United States Patent Application Publication US 2024/0124889 A1 - sequence listing, part 3

SEQ ID NO: 8367 - protein, 127 aa, Artificial Sequence
  source: /note="Description of Artificial Sequence: Synthetic polypeptide"
QVQLVQSGGGLVKPGGSLRLSCAASGVTFSDYYMNWIRQAPGKGLEWVSYISTSGSIIYYTDSVKGRFTISRDNAKNSLYLQMNSLRAEDTAVYYCAGGVDSDDYEDYYSYYDMDVWGQGTTVTVSS

SEQ ID NO: 8368 - protein, 120 aa, Artificial Sequence
  source: /note="Description of Artificial Sequence: Synthetic polypeptide"
EVQLVQSGGGLVQPGGSLRLSCAASGFTFSSYAMSWVRQAPGKGLEWVSAISGSGDYTYYADSVKGRFTISRDNSKNTLYLQMSSLRAEDTAVYYCAKYSYGLYYYFDLWGRGTLVTVSS

SEQ ID NO: 8369 - protein, 119 aa, Artificial Sequence; identical to SEQ ID NO: 8349
  source: /note="Description of Artificial Sequence: Synthetic polypeptide"

SEQ ID NO: 8370 - protein, 122 aa, Artificial Sequence
  source: /note="Description of Artificial Sequence: Synthetic polypeptide"
QVQLVQSGGGLVKPGGSLRLSCAASGFTFSNAWMSWVRQAPGKGLEWIGRIKSKTDGGTTDYAAPVKGRFTISRDDSKNTLYLQMNSLKTEDTAAYYCFTDDFWSGDYTHCWGQGTLVTVSS

SEQ ID NO: 8371 - protein, 127 aa, Artificial Sequence
  source: /note="Description of Artificial Sequence: Synthetic polypeptide"
EVQLVQSGGGLVKPGGSLTLSCAASGFTFSDYYMNWIRQAPGKGLEWVSYISTGGSTIYYADSVKGRFTISRDNAKNSLYLQMNSLKADDPAVYYCARGVDSDDYEDFYSYYDLDVWGQGTTVTVSS

SEQ ID NO: 8372 - protein, 125 aa, Artificial Sequence
  source: /note="Description of Artificial Sequence: Synthetic polypeptide"
QVQLVQSGAEVKKPGASVKVSCKASGYTFSNYGISWVRQAPGQGLEWMGWINTYNGDTNYAQELQGRVTMTTDTSTNTAYMEMRSLRSDDTAVYYCVRVVVVPADGHYYYGMDVWGQGTTVTVSS

SEQ ID NO: 8373 - protein, 124 aa, Artificial Sequence
  source: /note="Description of Artificial Sequence: Synthetic polypeptide"
QVQLVQSGGGVVQPGRSLRLSCEASGFTISSYGMHWVRQAPGKGLEWVAVIWYDGSNKYYADSVKGRFTISRDKSRNTLYLQMNSLRAEDTAVYYCARDNWNYEDYYYYGMDVWGQGTTVTVSS

SEQ ID NO: 8374 - protein, 127 aa, Artificial Sequence
  source: /note="Description of Artificial Sequence: Synthetic polypeptide"
QVQLVQSGGGLVKPGGSLRLSCAASGFTFSDYYMNWIRQAPGKGLEWVSYISTGGSTIYYADSVKGRFTISRDNAKNSLYLQMNSLRAEDTALYYCARGVDSDDYEDYYSYYDMDVWGQGTTVTVSS

SEQ ID NO: 8375 - protein, 127 aa, Artificial Sequence
  source: /note="Description of Artificial Sequence: Synthetic polypeptide"
EVQLVESGGGLVKPGGSLRLSCAASGFTFSDYYMNWIRQAPGKGLEWVSYISTGGSTIYYADSVKGRFTISRDNAKNSLYLQMNSLRADDTAVYYCARGVDSDDYEDFYSYYDLDVWGQGTTVTVSS

SEQ ID NO: 8376 - protein, 127 aa, Artificial Sequence
  source: /note="Description of Artificial Sequence: Synthetic polypeptide"
QVQLVESGGGLVKPGGSLRLSCAASGFTFSDYYMNWIRQAPGKGLEWVSYISTSGSTIYYADSVKGRFTISRDNAKNSLYLQMNTLRAEDTAVYYCARGVDSSDYEDYYSYYDLDVWGQGTTVTVSS

SEQ ID NO: 8377 - protein, 122 aa, Artificial Sequence
  source: /note="Description of Artificial Sequence: Synthetic polypeptide"
QVQLVQSGGGLVKPGGSLRLSCAASGFTFSDAWMTWVRQAPGKGLEWIGRIKSKTDGGTTDYAAPVKGRFTISRDDSKNTLYLQMNSLKTEDTAAYYCFTDDFWSGDYTHCWGQGTLVTVSS

SEQ ID NO: 8378 - protein, 122 aa, Artificial Sequence; identical to SEQ ID NO: 8377
  source: /note="Description of Artificial Sequence: Synthetic polypeptide"

SEQ ID NO: 8379 - protein, 120 aa, Artificial Sequence
  source: /note="Description of Artificial Sequence: Synthetic polypeptide"
QVQLVESGGDLVQPGGSLRLSCAASGFTFSSYAMSWVRQAPGKGLEWVSAISGSGDYTYYADSVKGRFTISRDNSKNTLYLQMNSLRAEDTAVYYCAKYSYGLYYYFDLWGRGTTVTVSS

SEQ ID NO: 8380 - protein, 119 aa, Artificial Sequence
  source: /note="Description of Artificial Sequence: Synthetic polypeptide"
EVQLVQSGGGVVQPGRSLRLSCAASGFTFSSYGMHWVRQAPGKGLEWVAVISYQESNKHYVDSVKGRFTISRDNSKNTLYLQMNSLRAEDTAVYYCAKSRGYSYGLGYWGQGTLVTVSS

SEQ ID NO: 8381 - protein, 127 aa, Artificial Sequence
  source: /note="Description of Artificial Sequence: Synthetic polypeptide"
QVQLLQSGGGLVKPGGSLRLSCAASGFTFSDYYMNWIRQAPGKGLEWVSYISTGGSTIYYADSVKGRFTISRDNAKNSLYLQMNSLRADDTAVYYCARGVDSDDYEDFYSYYDLDVWGQGTTVTVSS

SEQ ID NO: 8382 - protein, 127 aa, Artificial Sequence
  source: /note="Description of Artificial Sequence: Synthetic polypeptide"
QVQLVQSGGGLVKPGGSLRLSCAASGFTFSDYYMNWIRQAPGKGLEWVSYISTSGSTIYYADSVKGRFTISRDNAKNSLYLQMTSLRAEDTAVYYCARGVDSSDYEDYYSYYDMDVWGQGTTVTVSS

SEQ ID NO: 8383 - protein, 127 aa, Artificial Sequence; identical to SEQ ID NO: 8374
  source: /note="Description of Artificial Sequence: Synthetic polypeptide"

SEQ ID NO: 8384 - protein, 127 aa, Artificial Sequence
  source: /note="Description of Artificial Sequence: Synthetic polypeptide"
QVQLVQSGGGLVKPGGSLRLSCAASGFTFSDYYMNWIRQAPGKGLEWVSYISTGGTTIYYADSVKGRFTISRDNAKNSLYLQMNSLRADDTAVYYCARGVDSDDYEDFYSYYDLDVWGQGTTVTVSS

SEQ ID NO: 8385 - protein, 122 aa, Artificial Sequence
  source: /note="Description of Artificial Sequence: Synthetic polypeptide"
EVQLVQSGGGLVKPGGSLRLSCAASGFTFSNAWMTWVRQAPGKGLEWVGRIKSKTDGGTTDYAAPVKGRFTISRDDSKNTLYLQMNSLKTEDTAVYYCLTDDFWSEYYTHCWGQGTLVTVSS

SEQ ID NO: 8386 - protein, 127 aa, Artificial Sequence
  source: /note="Description of Artificial Sequence: Synthetic polypeptide"
EVQLVQSGGGLVKPGGSLRLSCAASGVTFSDYYMTWIRQAPGKGLEWVSYISTSGRTIYYADSVKGRFTISRDNAKNSLYLQMNNLRAEDTAVYYCARGVDSDDYEDFYSYYDMDVWGQGTTVTVSS

SEQ ID NO: 8387 - protein, 126 aa, Artificial Sequence
  source: /note="Description of Artificial Sequence: Synthetic polypeptide"
EVQLVQSGGGLVQPGGSLRLSCAASGFTFSSYWMSWVRQAPGKGLEWVANIKQDGSEKYYVDSVKGRFTISRDNAKSSLHLQMNSLRAEDTAVYYCARETVDYYDNSEYSYGMDVWGQGTTVTVSS

SEQ ID NO: 8388 - protein, 127 aa, Artificial Sequence
  source: /note="Description of Artificial Sequence: Synthetic polypeptide"
EVQLVQSGGGLVKPGGSLRLSCAASGFTFSDYYMNWIRQAPGKGLEWVSYISTGGSTIYYADSVKGRFTISRDNAKNSLYLQMNSLRADDTAVYYCARGVDSDDYEDFYSYYDLDVWGQGTTVTVSS

SEQ ID NO: 8389 - protein, 127 aa, Artificial Sequence
  source: /note="Description of Artificial Sequence: Synthetic polypeptide"
EVQLVQSGGGLVKPGGSLRLSCAASGVTFSDYYMNWIRQAPGKGLEWVSYISTSGSIIYYTDSVKGRFTISRDNAKNSLYLQMNSLRAEDTAVYYCAGGVDSDDYEDYYSYYDMDVWGQGTMVTVSS

SEQ ID NO: 8390 - protein, 124 aa, Artificial Sequence
  source: /note="Description of Artificial Sequence: Synthetic polypeptide"
QVQLVQSGGGVVQPGRSLRLSCEASGFTISSYGMHWVRQAPGKGLEWVAAIWYDGNNKYYADSVKGRFTISRDKSRNTLYLQMNSLRAEDTAVYYCARDNWNYEDYYYYGMDVWGQGTTVTVSS

SEQ ID NO: 8391 - protein, 119 aa, Artificial Sequence
  source: /note="Description of Artificial Sequence: Synthetic polypeptide"
EVQLVQSGGGVVQPGRSLRLSCEASGFTFSSYGMHWVRQAPGKGLEWVAVISYDGSNKHYTDSVKGRFTISRDNSKNTLYLQMNSLRAEDTAVYFCAQSRGYSYGLGYWGQGTLVTVSS

SEQ ID NO: 8392 - protein, 120 aa, Artificial Sequence
  source: /note="Description of Artificial Sequence: Synthetic polypeptide"
QVQLVQSGGGVVQPGRSLRLSCAASGFTFSSYGMHWVRQAPGKGLEWVAVISYDGINKYYVDSVKGRFTISRDNSKNTLYLQMNSLRTEDTAVYFCAKGDYGDFDAFDIWGQGTMVTVSS

SEQ ID NO: 8393 - protein, 118 aa, Artificial Sequence
  source: /note="Description of Artificial Sequence: Synthetic polypeptide"
QVQLVQSGGGVVQPGRSLRLSCAASGFTFSSYGIHWVRQAPGKGLEWVAVISYDGSDKKYADSVKGRITISRDNSKNTLYLQMNSLRAEDTAVYYCAKGGSGSSFDYWGQGILVTVSS

SEQ ID NO: 8394 - protein, 114 aa, Artificial Sequence
  source: /note="Description of Artificial Sequence: Synthetic polypeptide"
QVQLVQSGGGLVQFGGSLRLSCAASGFTFSSYGMNWVRQTPGKGLEWVSAIGGSGGSTYYADSVKGRFTISRDNSKNTLYLQMTSLRAEDTAVYYCAKGAYDVWGQGTTVTVSS

SEQ ID NO: 8395 - protein, 119 aa, Artificial Sequence
  source: /note="Description of Artificial Sequence: Synthetic polypeptide"
QVQLVQSGGGLVQPGGSLRLSCAASGFTLSSYAMSWVRQAPGKGLEWVSTFSGSGIIYYLDSVKGRFTISRDSSKNTLYLQMNSLRVEDTAVFYCAKDRGAAAGAFDYWGQGTLVTVSS

SEQ ID NO: 8396 - protein, 114 aa, Artificial Sequence
  source: /note="Description of Artificial Sequence: Synthetic polypeptide"
KVQLLESGGGLVQFGGSLKLSCAASGFTFTSYGMNWVRQTPGKGLEWVSAIGGSGGSTYYADSVKGRFTISRDNSKNTLYLQMTSLRAEDTAVYYCAKGAYDVWGQGTTVTVSS

SEQ ID NO: 8397 - protein, 119 aa, Artificial Sequence
  source: /note="Description of Artificial Sequence: Synthetic polypeptide"
QVQLVQSGGGLVQPGGSLRLSCAASGFTLSSYAMSWVRQAPGKGLEWVSTISGSGIIYYTDSVKGRFTISRDSSKNTVYLQMTSLRVEDTAVYYCAKDRGAAAGAFDYWGQGTLVTVSS

SEQ ID NO: 8398 - protein, 119 aa, Artificial Sequence
  source: /note="Description of Artificial Sequence: Synthetic polypeptide"
QVQLVESGGGLVQPGGSLRLSCAASGFTFSSYDMHWVRQATGKGLEWVSAIGTAGDTYYPGSVKGRFTISRENAYNSLYLQMNSLRAGDTAVYYCAAEYSSSGGAFDIWGQGTMVTVSS

SEQ ID NO: 8399 - protein, 114 aa, Artificial Sequence; identical to SEQ ID NO: 8309
  source: /note="Description of Artificial Sequence: Synthetic polypeptide"

SEQ ID NO: 8400 - protein, 121 aa, Artificial Sequence
  source: /note="Description of Artificial Sequence: Synthetic polypeptide"
QVQLVQSGGGVVQPGRSLRLSCAASGFTFSSYGLHWVRQAPGKGLEWVAVISYDGSNKYYADSVKGRFTISRDNSKNTLYLQMNSLRAEDTAVYYCAKPIAVARYYGMDVWGQGTTVTVSS

SEQ ID NO: 8401 - protein, 118 aa, Artificial Sequence
  source: /note="Description of Artificial Sequence: Synthetic polypeptide"
KVQLVESGGGLVKPGGSLRLSCAASGFTFSDHYMNWIRQAPGKGLEWVSYFSSNVNTIYYTDSVKGRFTISRDNAKNSLYLQMNSLRAEDTAVYYCAKRTPAGPFDYWGQGTLVTVSS

SEQ ID NO: 8402 - protein, 121 aa, Artificial Sequence
  source: /note="Description of Artificial Sequence: Synthetic polypeptide"
EVQLVQSGGGLVQPGGSLKLSCAASGFTFSNYAMSWVRQAPGKGLEWVSAISGDGGNTYYPNSVKGRFTISRDNSKNTLYLQMNSLRAEDTAVYYCAKDYCNSTYYYGEDWGRGTTVTVSS

SEQ ID NO: 8403 - protein, 114 aa, Artificial Sequence
  source: /note="Description of Artificial Sequence: Synthetic polypeptide"
EVQLVQSGGGLVQFGGSLRLSCAASGFTFSSYGMNWVRQTPGKGLEWVSAIGGSGGSTYYADSVKGRFTISRDNSKNTLYLQMTSLRAEDTAVYYCAKGAYDVWGQGTTVTVSS

SEQ ID NO: 8404 - protein, 114 aa, Artificial Sequence; identical to SEQ ID NO: 8318
  source: /note="Description of Artificial Sequence: Synthetic polypeptide"

SEQ ID NO: 8405 - protein, 114 aa, Artificial Sequence
  source: /note="Description of Artificial Sequence: Synthetic polypeptide"
EVQLVESGGGLVQFGGSLRLSCAASGFTFTSYGMNWVRQTPGKGLEWVSAIGGSGGSTYYADSVKGRFTISRDNSKNTLYLQMTSLRAEDTAVYYCAKGAYDVWGQGTTVTVSS

SEQ ID NO: 8406 - protein, 113 aa, Artificial Sequence
  source: /note="Description of Artificial Sequence: Synthetic polypeptide"
QVQLVQSGGGLVQPGGSLRLSCAASGFTFSSYAMSWVRQAPGKGLEWVSVINRSGGGTYYADSVKGRFTISRDNSKNALYLQMNSLRTEDTAVYYCAKEVEDWGQGTLVTVSS

SEQ ID NO: 8407 - protein, 114 aa, Artificial Sequence
  source: /note="Description of Artificial Sequence: Synthetic polypeptide"
QVQLVQSGAEVKKPGASVKVSCKASGYTFTSYGVSWVRQAPGQGLEWMGWISAYNGNTNYAQKLQGRVTMTTDTSTSTAYMELTSLRSDDTAVYYCARNWGDYWGQGTLVTVSS

SEQ ID NO: 8408 - protein, 118 aa, Artificial Sequence
  source: /note="Description of Artificial Sequence: Synthetic polypeptide"
QVQLVQSGGGVVQPGRSLRLSCAASGFTFSSYGMHWVRQAPGKGLEWVAVISYDGSNKKYADSVKGRITISRDNSKNTLYLQMNSLRAEDTAVFYCAKGGSGYSFDYWGQGTLVTVSS

SEQ ID NO: 8409 - protein, 118 aa, Artificial Sequence
  source: /note="Description of Artificial Sequence: Synthetic polypeptide"
QVQLVESGGGLVQPGGSLRLSCAASGFTFSSYAMSWVRQAPGKGLEWVSAIMDDGGNTYYADSVKGRFTISRDNSKNMLYLQMNSLRAEDTAVYYCARGQFLMWFDPWGQGTLVTVSS

SEQ ID NO: 8410 - protein, 119 aa, Artificial Sequence
  source: /note="Description of Artificial Sequence: Synthetic polypeptide"
QVQLVQSGGGVVQPGRSLRLSCAASGFTFSSYGMHWVRQAPGKGLEWVAVISYEGSNKHYADSVKGRFTISRDNSKNTLYLQMNSLRAEDTAVFYCAQSRGYSYGLGYWGQGTLVTVSS

SEQ ID NO: 8411 - protein, 132 aa, Artificial Sequence
  source: /note="Description of Artificial Sequence: Synthetic polypeptide"
QVQLVQSGGGVVQPGRSLRLSCAASGFTFSSYGMHWVRQAPGKGLEWVAFISYDGSNKFYADSVKGRLTISRDNSKNMLYLQMNSLRAEDTAVYYCAKGGVVIPGPTRYNWNHYYYYGMDVWGQGTTVTVSS

SEQ ID NO: 8412 - protein, 118 aa, Artificial Sequence
  source: /note="Description of Artificial Sequence: Synthetic polypeptide"
QVQLVESGGGVVQPGRSLRLSCAASGFTFSSYGMHWVRQAPGKGLEWVAVISYDGSDKKYADSVKGRFTIARDNSKSTLHLQMNSLRVEDTAVFYCVRGGRGFVFDMWGQGTMVTVSS

SEQ ID NO: 8413 - protein, 116 aa, Artificial Sequence
  source: /note="Description of Artificial Sequence: Synthetic polypeptide"
EVQLVQSGGGLVKPGGSLRLSCAASGFTFSNVWMSWVRQAPGQGLEWVGRIKSKIDGGTTDYAAPVKGRFTISRDDSKNTLYLQMNSLKTEDTAVYYCTTGGGTYWGQGTLVTVSS

SEQ ID NO: 8414 - protein, 114 aa, Artificial Sequence
  source: /note="Description of Artificial Sequence: Synthetic polypeptide"
QVQLVESGAEVKKPGASVKVSCKASGYTFTSYGISWVRQAPGQGLEWMGWISGYNGNTKYAQKVQGRVTMTTDASTSTAYMELRSLRSDDTAVYYCARNWGDYWGQGTLVTVSS

SEQ ID NO: 8415 - protein, 116 aa, Artificial Sequence
  source: /note="Description of Artificial Sequence: Synthetic polypeptide"
QVQLVQSGGGLVKPGGSLRLSCAASGFTFSNVWMSWVRQAPGQGLEWVGRIKSKIDGGTTDYAAPVKGRFFISRDDSKNTLYLQMNSLKTEDTAVYYCTTGGGTYWGQGTLVTVSS

SEQ ID NO: 8416 - protein, 122 aa, Artificial Sequence
  source: /note="Description of Artificial Sequence: Synthetic polypeptide"
QVQLVQSGTDVKKPGASLKVSCEVSGYTFANYGLSWVRQAPGQGLEWMGWIIAYTTNTNYAQKLQDRVTITTDTSTSTAYMELRSLRSDDTAVYYCARVFSGTNHLNYFDYWGQGTLVTVSS

SEQ ID NO: 8417 - protein, 117 aa, Artificial Sequence
  source: /note="Description of Artificial Sequence: Synthetic polypeptide"
QVQLVQSGGGLVQPGGSLRLSCAASGFTFSSYVMSWVRQTPGKGLEWVSAIRTSGGGTYYADSVKGRFTISRDNSKSTLYLQMNSLRAEDSAVYYCAKDGYGAFDYWGQGTLVTVSS

SEQ ID NO: 8418 - protein, 120 aa, Artificial Sequence
  source: /note="Description of Artificial Sequence: Synthetic polypeptide"
QVQLVQSGADVNKPGASLKVSCAASGYTFTNYDINWVPQATGQGLEWMGWMNPTSGNTCYSHKFQGRVTMTRSTSISTAYMELSSLRSEDTAVYYCARDIVGALDAFDIWGQGTMVTVSS

SEQ ID NO: 8419 - protein, 120 aa, Artificial Sequence
  source: /note="Description of Artificial Sequence: Synthetic polypeptide"
QVQLVQSGGGLVQPGGSLRLSCAASGFTFSSYAMSWVRQGPGKGLEWVSVISGSGGSTYYADSVKGRFTISRDNSKNTLYLQMNSLRAEDTAVYYCAKHITGIADGMDVWGQGTTVTVSS

SEQ ID NO: 8420 - protein, 117 aa, Artificial Sequence
  source: /note="Description of Artificial Sequence: Synthetic polypeptide"
QVQLVESGAGVINPGASLILSCAASGYTFTSYHIHWVRQAPGQGLEWMGWINHNGGDKNYAHYFQGRVTLTRDTSNTTLYLELNRLRSDDTAVYYCAKDGIGNFDYWGQGTLVTVSS

SEQ ID NO: 8421 - protein, 118 aa, Artificial Sequence
  source: /note="Description of Artificial Sequence: Synthetic polypeptide"
QVQLVESGGGVVQPGRSLRLSCAASGFTFSSYGMHWVRQAPGKGLEWVAVISYDGSDKKYADSVKGRFTIARDNSKSTLHLQMNSLRVEDTAVFYCARGGRGFVFDMWGQGTMVTVSS

SEQ ID NO: 8422 - protein, 132 aa, Artificial Sequence
  source: /note="Description of Artificial Sequence: Synthetic polypeptide"
QVQLVQSGGGVVQPGRSLRLSCAASGFTFSSYGMHWVRQAPGKGLEWAAFISYDGSNKFYADSVKGRLTISRDNSKNILYLQMNSLRAEDTAVYYCAKGGVVVPGPTRYNWNHYYYYGMDVWGQGTTVTVSS

SEQ ID NO: 8423 - protein, 132 aa, Artificial Sequence; identical to SEQ ID NO: 8331
  source: /note="Description of Artificial Sequence: Synthetic polypeptide"

SEQ ID NO: 8424 - protein, 132 aa, Artificial Sequence
  source: /note="Description of Artificial Sequence: Synthetic polypeptide"
QVQLVESGGGVVQPGRSLRLSCAASGFTFSSYGMHWVRQAPGKGLEWVAFISYDGGNKFYADSVKGRLTISRDNSKNILYLQMNSLTAEDTAVYYCAKGGVVVPGPTRYNWNHYYYYGMDVWGQGTTVTVSS

SEQ ID NO: 8425 - protein, 118 aa, Artificial Sequence
  source: /note="Description of Artificial Sequence: Synthetic polypeptide"
QVQLVQSGGGVVQPGRSLRLSCAASGFTFSNYGMHWVRQAPGKGLEWLAVISYDGSNKHYVDSVKGRFTISRDNSKNTLYLQMNSLRTEDTAVHYCVRGGSGWSFDSWGQGTLVTVSS

SEQ ID NO: 8426 - protein, 118 aa, Artificial Sequence
  source: /note="Description of Artificial Sequence: Synthetic polypeptide"
QVQLVESGGGVVQPGRSLRLSCAASGFTFSDYGMHWVRQAPGKGLEWVSVISYDGTNKYYADSVKGRFTISRDNSKNTLYLQMSSLRPEDTAVYYCPKGGSGWSFDYWGQGTLVTVSS

SEQ ID NO: 8427 - protein, 118 aa, Artificial Sequence
  source: /note="Description of Artificial Sequence: Synthetic polypeptide"
QVQLVQSGGGVVQPGRSLRLSCAASGFTFSNYGMHWVRQAPGQGLEWLAVISYDGNNKHYVDSVKGRFTISRDNSKSTLFLQMNSLRTEDTTVYYCARGGSGWSFDSWGQGTLVTVSS

SEQ ID NO: 8428 - protein, 117 aa, Artificial Sequence
  source: /note="Description of Artificial Sequence: Synthetic polypeptide"
QVQLVESGGGVVQPGRSLRLSCAASGFTFNDYGMHWFRQAPGKGLEWLAVISYDGNDKQYEDSVKGRFTISRDNSKNTLFLQMTSLRAEDTAMYFCARGGSGWTFDSWGQGTLVTSP

SEQ ID NO: 8429 - protein, 116 aa, Artificial Sequence
  source: /note="Description of Artificial Sequence: Synthetic polypeptide"
EVQLVQSGGGLVKPGGSLRLSCAASGFTFSDYYMSWIRQAPGKGLEWVSCITSSGSTKKHADSVKGRFTISRDNAKNSLYLQMNSLRAEDTAVYYCARVSRGFDHWGQGTLVTVSS

SEQ ID NO: 8430 - protein, 116 aa, Artificial Sequence
  source: /note="Description of Artificial Sequence: Synthetic polypeptide"
QVQLVESGGGLVKPGGSLRLSCAASGFTFSDYYMSWIRQAPGKGLEWVSCITSSGGTKKYADSVKGRFTISRDNAENSLYLQMNSLRAEDTAVYYCARVSRGFDHWGQGTLVTVSS

SEQ ID NO: 8431 - protein, 119 aa, Artificial Sequence
  source: /note="Description of Artificial Sequence: Synthetic polypeptide"
QVQLVESGGGVVQPGRSLRLSCAASGFTFSSYGMHWVRQAPGKGLEWVAVISYEGSNKHYADSVKGRFTISRDNSKNTLYLQMNSLRAEDTAVFYCAQSRGYSYGLGYWGQGTLVTVSS

SEQ ID NO: 8432 - protein, 118 aa, Artificial Sequence
  source: /note="Description of Artificial Sequence: Synthetic polypeptide"
QVQLVESGGGVVQPGRSLRLSCAASGFTFSSYGMHWVRQAPGKGLEWLAVISYDGTNKHYVDSVKGRFTISRDNSKNTVYLQMNSLRAEDTALYYCARGGSGWSFDSWGQGTLVTVSS

SEQ ID NO: 8433 - protein, 118 aa, Artificial Sequence
  source: /note="Description of Artificial Sequence: Synthetic polypeptide"
QVQLVQSGGGVVQPGRSLRLSCVASGFTFNNYGLHWFRQAPGKGLEWLAVISYDGNDKHYVDYVKGRFTISRDNSRYTLNLQMNSLRTEDTALYYCARGGSGWSFDSWGQGTLVTVSS

SEQ ID NO: 8434 - protein, 126 aa, Artificial Sequence
  source: /note="Description of Artificial Sequence: Synthetic polypeptide"
QVQLVESGGGVVQPGRSLKLSCAASGFTFSSYGMHWVRQAPGKGLEWVAVIWYDGSNKYYADSVKGRFTISRDNSKNTLYLQMNSLRAEDTAVYYCARDEGRGFGTYYYYYGMDVWGQGTTVTVSS

SEQ ID NO: 8435 - protein, 118 aa, Artificial Sequence
  source: /note="Description of Artificial Sequence: Synthetic polypeptide"
EVQLVESGGGVVQPGRSLRLSCAASGFTFRSYGMHWVRQAPGKGLEWLAVTSYDGNSQHYVDSVKGRFTISRDNSKNTLYLQMNSLRAEDTAVFYCARGGSGWSFDSWGQGTLVTVSS

SEQ ID NO: 8436 - protein, 118 aa, Artificial Sequence
  source: /note="Description of Artificial Sequence: Synthetic polypeptide"
EVQLVESGGGVVQPGRSLRLSCAASGFTFSSYGIHWVRQAPGKGLEWLAVISYDGSNKHYVDSVKGRLTISRDNSKNTLYLQMNSLRAEDTAVYYCARGGRGWSFDSWGQGTTVTVSS

SEQ ID NO: 8437 - protein, 118 aa, Artificial Sequence
  source: /note="Description of Artificial Sequence: Synthetic polypeptide"
QVQLVQSGGGVVQPGRSLRLSCAASGFTFSNYGMHWVRQAPGKGLEWLAVISYDGSNKHYVDSVKGRFTISRDNSKNTLYLQMNSLRAEDTAVHYCVRGGSGWSFDSWGQGTLVTVSS

SEQ ID NO: 8438 - protein, 118 aa, Artificial Sequence
  source: /note="Description of Artificial Sequence: Synthetic polypeptide"
EVQLLESGGGVVQPGRSLRLSCAASGFTFSYHGMHWVRQAPGKGLEWLAVISYDGSDRHYIDSVKGRFTNARDNSKNTLYLQMNSLRPEDTAVYYCARGGSGWSFDSWGQGTLVTVSS

SEQ ID NO: 8439 - protein, 118 aa, Artificial Sequence
  source: /note="Description of Artificial Sequence: Synthetic polypeptide"
QVQLVQSGGGVVQPGRSLKLSCAASGFTFNNYGMHWVRQAPGKGLEWLAVISYDGNDKHYVDSVKGRFTTSKDNSKNTLYLQMNSLRVEDTAVFYCVRGGSGWSFDSWGQGTPVTVSS

SEQ ID NO: 8440 - protein, 118 aa, Artificial Sequence
  source: /note="Description of Artificial Sequence: Synthetic polypeptide"
QVQLVESGGGVVQPGGSLRLSCAASGFTFSSYGMHWVRQAPGKGLEWVAVISYDGSNKNYADSVKGRFTIFRDNSKNTLYLLMNTLRAEDTAVYYCAERGSGWSFDYWGQGTLVTVSS

SEQ ID NO: 8441 - protein, 119 aa, Artificial Sequence
  source: /note="Description of Artificial Sequence: Synthetic polypeptide"
QVQLVESGGGVVQPGRSLRLSCAASGFTFSSYGMHWVRQAPGKGLEWVAVISYQESNKHYVDSVKGRFTISRDNSKNTLYLQMNSLRAEDTAVYYCAQSRGYSYGLGYWGQGTLVTVSS

SEQ ID NO: 8442 - protein, 119 aa, Artificial Sequence
  source: /note="Description of Artificial Sequence: Synthetic polypeptide"
QVQLVESGGGVVQPGRSLRLSCAASGFTFSSYGMHWVRQAPGKGLEWVAVISYQESNKHYVDSVKGRFTISRDNSKNTLFLQMNSLRAEDTAVYYCAQSRGYSFGLGYWGQGTRSTVSS

SEQ ID NO: 8443 - protein, 119 aa, Artificial Sequence
  source: /note="Description of Artificial Sequence: Synthetic polypeptide"
EVQLVQSGGGVVQPGRSLRLSCAASGFSFSSYGMHWVRQAPGRGLEWVAVISYVGINKYYGDSVKGRFTISRDDSKNTLYLQMNSLRAEDTAVYYCAKSRGYSYGLVYWGQGTLVTVSS

SEQ ID NO: 8444 - protein, 119 aa, Artificial Sequence
  source: /note="Description of Artificial Sequence: Synthetic polypeptide"
QVQLVQSGGGVVQPGRSLRLSCVASGIIFSSYGMHWVRQAPGKGLEWVAVIAYDGSNKNYVDSVKGRFTISRDNSKNTLYLQMNSLRAEDTAVYYCAKSRGYSYGLVYWGQGTMVTVSS

SEQ ID NO: 8445 - protein, 118 aa, Artificial Sequence
  source: /note="Description of Artificial Sequence: Synthetic polypeptide"
QVQLVQSGGGVVQPGRSLRLSCAASGFTFSSYGMHWVRQAPGKGLEWVAVISYQESNKHYVDSVKGRFTISRDNSKNTLYLQMNSLRAEDTAVYYCAKSRGYSYGLGYWGQGPGHVSS

SEQ ID NO: 8446 - protein, 119 aa, Artificial Sequence
  source: /note="Description of Artificial Sequence: Synthetic polypeptide"
EVQLVESGGGVVQPGRSLRLSCAASGFTFSSYGMHWVRQAPGKGLEWVAVISYDGSNKHYTDSVKGRFTISRDNSKNTLYLQMNSLRVEDTAVYYCAQSRGYSYGLGYWGQGTLVTVSS

SEQ ID NO: 8447 - protein, 119 aa, Artificial Sequence
  source: /note="Description of Artificial Sequence: Synthetic polypeptide"
QVQLVQSGGGVVQPGRSLRLSCAASGFTFSSYGMHWVRQAPGKGLEWVAVISYQESNKHYLDSVKGRFTISRDNSKNTLYLQMNSLRAEDTAVYYCAKSRGYSYGLGYWGQGTLVTVSS

SEQ ID NO: 8448 - protein, 122 aa, Artificial Sequence
  source: /note="Description of Artificial Sequence: Synthetic polypeptide"
EVQLVQSGGGLVQPGGSLRLSCAASGFTFSSYAMSWVRQAPGKGLEWVSAISGSGGNTYYADSVKGRFTISRDNSKNTLYLQMNSLRAEDTAVYYCAKDPHSSNWPGFFDLWGRGTLVTVSS

SEQ ID NO: 8449 - protein, 118 aa, Artificial Sequence
  source: /note="Description of Artificial Sequence: Synthetic polypeptide"
QVQLVESGGGLVQPGRSLRISCVASGFSFDDYAMHWVRQAPGKGLEWVSGISWISGRIGYADSVKGRFTISRDNAKKSLYLQMNSLRTEDTALYYCVKDDNSSLGDYWGQGTLVTVSS

SEQ ID NO: 8450 - protein, 115 aa, Artificial Sequence
  source: /note="Description of Artificial Sequence: Synthetic polypeptide"
QVQLQESGPGLVKPSETLSLTCTVSGGSISGYYWSRIRQPPGKGLEWIGYIYYSGNTNYDPSLKSRVTISVDTSKNQFSLKLRSVTAADTAVYHCARLGRAFDIWGQGTMVTVSS

SEQ ID NO: 8451 - protein, 114 aa, Artificial Sequence
  source: /note="Description of Artificial Sequence: Synthetic polypeptide"
EVQLVESGGGLVQPGGSLRLSCAASGFTFSSYAMNWVRQAPGKGLEWVSTISGSSGSTYYADSVKGRFTISRDNSKNTLYLQMNSLTAEDTAVYYCAKVGGDVWGQGTTVTVSS

SEQ ID NO: 8452 - protein, 119 aa, Artificial Sequence
  source: /note="Description of Artificial Sequence: Synthetic polypeptide"
QVQLVQSGGGVVQPGRSLRLSCAASGFTFSSYGMHWVRQAPGKGLEWVALISYAGINEYYADSVKGRFTISRDDSKNTLYLQMNSLRVEDTAVYYCAKSRGYSYGLGYWGQGTLVTVSS

SEQ ID NO: 8453 - protein, 118 aa, Artificial Sequence
  source: /note="Description of Artificial Sequence: Synthetic polypeptide"
QVQLVESGGTLVQPGRSLRLSCAASGFTFDDYAMHWVRQAPGKGLEWVSGISWIGGRIGYADSVKGRFTISRDNAKNSLYLQMNSLRAEDTALYYCVKDDNSSLGDYWGQGTLVTVSS

SEQ ID NO: 8454 - protein, 118 aa, Artificial Sequence
  source: /note="Description of Artificial Sequence: Synthetic polypeptide"
QVQLVESGGGLVQPGRSLRLSCAASGFTFDDYAMHWVRQAPGKGLEWVSGISWKSGRIGYADSVKGRFTISRDNAKNSLYLQMNSLRPEDTALYYCAKDDGSSLGDYWGQGTLVTVSS

SEQ ID NO: 8455 - protein, 120 aa, Artificial Sequence
  source: /note="Description of Artificial Sequence: Synthetic polypeptide"
QVQLVQSGGGVVQPGRSLRLSCAASGFTFSSYGMHWVRQAPGKGLEWVAIISYDGINKYYVDSVKGRFTISRDNSKNTLYLQMNSLRAEDTAVYFCAKGDYGDFDAFDIWGQGTMVTVSS

SEQ ID NO: 8456 - protein, 123 aa, Artificial Sequence
  source: /note="Description of Artificial Sequence: Synthetic polypeptide"
EVQLVQSGGGLVKPGGSLRLSCAASGFTFSDAWMTWVRQAPGKGLEWIGRIKSKTDGGTTDYAAPVKGRFTISRDDSKNTLYLQMNSLKTEDTAAYYCFTDDFWSGDYTHCWGQGTLVTVSSS

SEQ ID NO: 8457 - protein, 119 aa, Artificial Sequence; identical to SEQ ID NO: 8441
  source: /note="Description of Artificial Sequence: Synthetic polypeptide"

SEQ ID NO: 8458 - protein, 118 aa, Artificial Sequence
  source: /note="Description of Artificial Sequence: Synthetic polypeptide"
QVQLVESGGGVVQPGRSLRLSCAASGFTFSSYGMHWVRQAPGKGLEWVAVISYDGNNKHFADSVKGRFTISRDNSKNTLNLQMNSLRAEDRAVYYCARGASGFVLDIWGQGTMVTVSS

SEQ ID NO: 8459 - protein, 128 aa, Artificial Sequence
  source: /note="Description of Artificial Sequence: Synthetic polypeptide"
EVQLVQSGGGLVQPGRSLRLSCAASGFTFDDYAMHWVRQAPGKGLEWVSGISWNSGSIGYADSVKGRFTSSRDNAKNSLYLQMNSLRAEDTALYYCAKDMEYYDILTGYYSYYIMDVWGQGTTVTVSS

SEQ ID NO: 8460 - protein, 121 aa, Artificial Sequence
  source: /note="Description of Artificial Sequence: Synthetic polypeptide"
QVQLQQWGAGLLKPSETLSLTCAVYGGSFSGHYWSWIRQPPGKGLEWIGEINHRGSTNYNPSLKSRATISVDTSKNQFSLKLSSVTAADTAVYYCAREGSLAARLWFFDLWGRDTLVTVSS

SEQ ID NO: 8461 - DNA, 356 bp, Artificial Sequence
  source: /note="Description of Artificial Sequence: Synthetic polynucleotide"
caggtgcagctggtggagtcggggggaggcgtggtccagcctgggaggtccctgagactctcctgtgcagcctctggattcaccttcagtagctatggcatgcactgggtccgccaggctccaggcaaggggctggagtgggtggctcttatatcatatgttggaagtaataaacactatcagactccgtgaagggccgattcaccatttccagagacaattccaaaaacacgctgtatctgcaaatgaacagcctgagagctgaggacacggctgtgtattactgtgcgaaaagtcgtggatacagctatggtctagactactggggccagggaaccctggtcaccgtctcctca

SEQ ID NO: 8462 - protein, 126 aa, Artificial Sequence
  source: /note="Description of Artificial Sequence: Synthetic polypeptide"
EVQLVESGGGLVQPGGSLRLSCAASGFTFSSYGMSWVRQVPGKGLEWVSAISGSGGSTYYVDSVKGRFTISRDNFKNTLYLQMNSLRVEDTAVYYCAKDVGYCSTTSCRGDAFDVWGQGTMVTVSS

SEQ ID NO: 8463 - protein, 122 aa, Artificial Sequence; identical to SEQ ID NO: 8361
  source: /note="Description of Artificial Sequence: Synthetic polypeptide"

SEQ ID NO: 8464 - protein, 122 aa, Artificial Sequence
  source: /note="Description of Artificial Sequence: Synthetic polypeptide"
EVQLVESGGGLVQPGGSLRLSCAASGFTFSNYAMSWVRQAPGKGLEWVSAISGSGDNTYYADSVRGRFTISRDNSKNTLYLQMNSLRAEDTAIYYCAKDPHSSRWPGFFDLWGRGTLVTVSS

SEQ ID NO: 8465 - protein, 121 aa, Artificial Sequence; identical to SEQ ID NO: 8362
  source: /note="Description of Artificial Sequence: Synthetic polypeptide"

SEQ ID NO: 8466 - protein, 121 aa, Artificial Sequence
  source: /note="Description of Artificial Sequence: Synthetic polypeptide"
  MOD_RES (7)..(7): Any amino acid
QVQLQQXGAGLLKPSETLSLTCAVYGGSFSGHYWSWIRQPPGKGLEWIGEINHRGSTNYNPSLKSRATISVDTSKNQFSLKLSSVTAADTAVYYCAREGSLAARLWFFDLWGRDTLVTVSS

SEQ ID NO: 8467 - protein, 121 aa, Artificial Sequence
  source: /note="Description of Artificial Sequence: Synthetic polypeptide"
QVQLQQWGAGLLKPSETLSLTCAVYGGSFSGHYWTWIRQPPGKGLEWIGEINHRGNTNYNPSLKSRATISVDTSKNQFSLKLSSVTAADTAVYYCAREGSLAARLWFFDLWGRDTPVTVSS

SEQ ID NO: 8468 - protein, 121 aa, Artificial Sequence
  source: /note="Description of Artificial Sequence: Synthetic polypeptide"
QLQLQESGPGLVKSSETLSLKCTVSGGSISSSGYYWGWIRQPPGKGLEWIGSIHRSGSTFYNPSLKSRVTISVDTSKSQFSLRLTSVTAADTSVYFCGRHGRDYYYGMDVWGQGTTVTVSS

SEQ ID NO: 8469 - protein, 114 aa, Artificial Sequence; identical to SEQ ID NO: 8407
  source: /note="Description of Artificial Sequence: Synthetic polypeptide"

SEQ ID NO: 8470 - protein, 117 aa, Artificial Sequence
  source: /note="Description of Artificial Sequence: Synthetic polypeptide"
QVQLVESGGGVVQPGRSLRLSCAASGFTFSNYGMHWVRQAPGKGLEWVAAIWFDGSNKKYVDSVKGRFTISRDNSKNTLYLQMNSLRAGDTAVYYCTRDRSGSFDYWGQGTLVTVSS

SEQ ID NO: 8471 - protein, 118 aa, Artificial Sequence
  source: /note="Description of Artificial Sequence: Synthetic polypeptide"
QVQVVESGGGVVQPGRSLRLSCAASGFTFSNYGMHWVRQAPGKGLEWVTVISYDGSNKNYADSVKGRFTISRDNSKNTLYLQMNSLRAEDTAMYYCARGGSGFAFDIWGQGTMVTVSS

SEQ ID NO: 8472 - protein, 128 aa, Artificial Sequence
  source: /note="Description of Artificial Sequence: Synthetic polypeptide"
QVQLVESGGGLVQPGRSLRLSCAASGFTFDDYAMHWVRQVPGKGLEWVSGINWNSGSIGYADSVKGRFTISRDNAKNSLFLQMNSLRAEDTALYYCAKDIEYYDILTGYYSYYIMDVWGQGTTVTVSS

SEQ ID NO: 8473 - protein, 118 aa, Artificial Sequence
  source: /note="Description of Artificial Sequence: Synthetic polypeptide"
QVQLVESGGGVVQPERSLRLSCAASGFTFSSYGMHWVRQAPGEGLEWVAVISYDGSNTKYADSVRGRFTISRDNSKNMLYLQMNSLRAEDTAVFYCARGYSGYAFDYWGQGILVTVSS

SEQ ID NO: 8474 - protein, 118 aa, Artificial Sequence
  source: /note="Description of Artificial Sequence: Synthetic polypeptide"
QVQLVESGGGVVQPGRSLRLSCAASGFTFSSYGMHWVRQAPGKGLEWVAVISYDGNNKYYADSVKGRFTISRDNSKNTLYLQMNSLRAEDTAVYYCAKGSAGYALDYWGQGTLVTVSS

SEQ ID NO: 8475 - protein, 128 aa, Artificial Sequence
  source: /note="Description of Artificial Sequence: Synthetic polypeptide"
EVQLVQSGGGLVQPGRSLRLSCAASGFTFDDYAMHWVRQAPGKGLEWVSGISWNSGSIGYADSVKGRFTISRDNAKNSLYLQMNSLRAEDTALYYCAKDIEYYDILTGYYSYYIMDVWGQGTTVTVSS

SEQ ID NO: 8476 - protein, 120 aa, Artificial Sequence
  source: /note="Description of Artificial Sequence: Synthetic polypeptide"
EVQLVESGGGLVKPGGSLRLSCAASGFTFSSYTIHWVRQAPGKGLEWVSSISSSSSYIYYVDSVKGRFTISRDNAKNSVYLQMNSLRAEDTAVYYCATSSITARGYFDYWGQGTLVTVSS

SEQ ID NO: 8477 - protein, 118 aa, Artificial Sequence; identical to SEQ ID NO: 8458
  source: /note="Description of Artificial Sequence: Synthetic polypeptide"

SEQ ID NO: 8478 - protein, 128 aa, Artificial Sequence
  source: /note="Description of Artificial Sequence: Synthetic polypeptide"
EVQLVQSGGGVVQPGRSLRLSCTASGFTFSVYGIHWVRQAPGKGLEWVAVIWYDGSNKYYTDSVKGRFTISRDNSKNTLYLQMNSLRAEDTALYYCAREGDLSSSSGSGGYHYVVDVWGQGTMVTVSS

SEQ ID NO: 8479 - protein, 124 aa, Artificial Sequence; identical to SEQ ID NO: 8347
  source: /note="Description of Artificial Sequence: Synthetic polypeptide"

SEQ ID NO: 8480 - protein, 128 aa, Artificial Sequence
  source: /note="Description of Artificial Sequence: Synthetic polypeptide"
QVQLVESGGGVVQPGRSLRLSCTASGFTFSVYGIHWVRQAPGKGLEWVAVIWYDGSNKYYTDSVKGRFTISRDNSKNTLYLQMNSLRAEDTALYYCAREGDLSSSSGSGGYHYVVDVWGQGTTVTVSS

SEQ ID NO: 8481 - protein, 119 aa, Artificial Sequence
  source: /note="Description of Artificial Sequence: Synthetic polypeptide"
EVQLVESGGGLVQPGGSLRLSCAASGFTLSSYAMSWVRQAPGKGLEWVSTISGSGIIYYTDSVKGRFTISRDSSKNTLYLQMNSLRVEDTAVYYCAKDRGAAAGAFDYWGQGTLVTVSS

SEQ ID NO: 8482 - protein, 121 aa, Artificial Sequence
  source: /note="Description of Artificial Sequence: Synthetic polypeptide"
QVQLQQWGAGLLKPSETLSLTCAVYGGSFSGHYWTWIRQPPGKGLEWIGEINHRGNTNYNPSLKSRATISVDTSKNQFSLKLSSVTAADTAVYYCAREGSLAARLWFFDLWGRDTLVTVSS

SEQ ID NO: 8483 - protein, 117 aa, Artificial Sequence
  source: /note="Description of Artificial Sequence: Synthetic polypeptide"
QVQLVQSGAEVKKPGASVKVSCKASGYTFTTYGISWVRQAPGQGLEWMGWISAYNGKTNYAQKFQGRVTMTTDTSTNTAYMELRSLRFDDTAVYYCARDGGTPFYYWGQGTLVTVSS

SEQ ID NO: 8484 - protein, 117 aa, Artificial Sequence; identical to SEQ ID NO: 8470
  source: /note="Description of Artificial Sequence: Synthetic polypeptide"

SEQ ID NO: 8485 - protein, 127 aa, Artificial Sequence
  source: /note="Description of Artificial Sequence: Synthetic polypeptide"
EVQLVESGGGLVKPGGSLRLSCAASGVTFSDYYMTWIRQAPGKGLEWVSYISTDGRTIYYADSVKGRFTISRDNAKNSLYLQMNNLRAEDTAVYYCARGVDSDDYEDFYSYYDMDVWGQGTTVTVSS

SEQ ID NO: 8486 - protein, 127 aa, Artificial Sequence
  source: /note="Description of Artificial Sequence: Synthetic polypeptide"
QVQLVESGGGLVKPGGSLRLSCAASGVTFSDYYMTWIRQAPGKGLEWVSYISTDGRTIYYADSVKGRFTISRDNAKNSLYLQMNNLRAEDTAVYYCARGVDSDDYEDFYSYYDMDVWGQGTTVTVSS

SEQ ID NO: 8487 - protein, 119 aa, Artificial Sequence
  source: /note="Description of Artificial Sequence: Synthetic polypeptide"
QVQLVESGGGLVQPGGSLRLSCAASGFTLSSYAMSWVRQAPGKGLEWVSTISGSGIIYYTDSVKGRFTISRDSSKNTLYLQMNSLRVEDTAVYYCAKDRGAAAGAFDYWGQGTLVTVSS

SEQ ID NO: 8488 - protein, 115 aa, Artificial Sequence
  source: /note="Description of Artificial Sequence: Synthetic polypeptide"
QVQLVQSGAEVKKPGSSVKVSCKASGYTFTDFYINWVRQAPGQGLEWIGEIYPYSGHAYYNEKFKARVTITADKSTSTAYMELSSLRSEDTAVYYCARWDFLDYWGQGTTVTVSS

SEQ ID NO: 8489 - protein, 115 aa, Artificial Sequence; identical to SEQ ID NO: 8488
  source: /note="Description of Artificial Sequence: Synthetic polypeptide"

SEQ ID NO: 8490 - protein, 115 aa, Artificial Sequence; identical to SEQ ID NO: 8488
  source: /note="Description of Artificial Sequence: Synthetic polypeptide"

SEQ ID NO: 8491 - protein, 118 aa, Artificial Sequence [sequence omitted]

SEQ ID NO: 8492 - protein, 128 aa, Artificial Sequence
  source: /note="Description of Artificial Sequence: Synthetic polypeptide"
EVQLVQSGAEVKKPGSSVKVSCKASGGTFSSYAISWVRQAPGQGLEWMGGIIPIFGTANYAQKFQGRVTITADKSTSTAYMELSSLRSEDTAVYYCARAPLRFLEWSTQDHYYYYYMDVWGKGTTVTV

SEQ ID NO: 8493 - protein, 137 aa, Artificial Sequence
  source: /note="Description of Artificial Sequence: Synthetic polypeptide"
MKCSWVIFFLMAVVTGVNSEVQLQQSGAELVKPGASVKLSCTASGFNIKDTYIHWVKQRPEQGLEWVGRIDPATGNTRYDPKFQGKATITADTSSNTAYLQLSSLTSEDTAVYYCASFRPGYALDYWGQGTSVTVSS

SEQ ID NO: 8494 - protein, 138 aa, Artificial Sequence
  source: /note="Description of Artificial Sequence: Synthetic polypeptide"
MGWSYIILFLVATATDVHSQVQLQQPGAELVKPGASVKLSCKASGYSFTSYWMHWLKQRPGQGLEWIGEINPNNGRTYYNEKFKTKATLTVDKSSSTAYMQLNSLTSEDSAVYYCARRLTMVESFAYWGQGTLVTFSA

SEQ ID NO: 8495 - protein, 119 aa, Artificial Sequence
  source: /note="Description of Artificial Sequence: Synthetic polypeptide"
EVQLVESGGGVVQPGRSLRLSCSASGFIFSKYDMSWVRQAPGKGLEWVAYISHGGAGTYYPDSVKGRFTISRDNSKNTLFLQMDSLRAEDTGVYYCARGGVYKGYFDEWGQGTPVTVSS

SEQ ID NO: 8496 - protein, 119 aa, Artificial Sequence
  source: /note="Description of Artificial Sequence: Synthetic polypeptide"
EVQLVESGGGVVQPGRSLRLSCAASGFIFSKYDMSWVRQAPGKGLEWVAYISHGGAGTYYPDSVKGRFTISRDNSKNTLFLQMDSLRPEDTGVYFCARGGVTKGYFDVWGQGTPVTVSS

SEQ ID NO: 8497 - protein, 119 aa, Artificial Sequence
  source: /note="Description of Artificial Sequence: Synthetic polypeptide"
EVQLVESGGGVVQPGRSLRLSCSASGFIFSRYDMSWVRQAPGKGLEWVAYISHGGAGTYYPDSVKGRFTISRDNSKNTLFLQMDSLRPEDTAVYYCARGGVYKGYFDVWGQGTPVTVSS

SEQ ID NO: 8498 - protein, 119 aa, Artificial Sequence
  source: /note="Description of Artificial Sequence: Synthetic polypeptide"
EVQLVESGGGVVQPGRSLRLSCAASGFIFSRYDMSWVRQAPGKGLEWVAYISHGGAGTYYPDSVKGRFTISRDNSKNTLFLQMDSLRPEDTGVYFCARGGVTKGYFDVWGQGTPVTVSS

SEQ ID NO: 8499 - protein, 119 aa, Artificial Sequence
  source: /note="Description of Artificial Sequence: Synthetic polypeptide"
EVQLVESGGGVVQPGRSLRLSCSASGFIFSRYDMSWVRQAPGKGLEWVAYISHGGAGTYYPDSVKGRFTISRDNSKNTLFLQMDSLRPEDTGVYFCARGGVTKGYFDVWGQGTPVTVSS

SEQ ID NO: 8500 - protein, 119 aa, Artificial Sequence
  source: /note="Description of Artificial Sequence: Synthetic polypeptide"
EVQLVESGGGVVQPGRSLRLSCSASGFIFSRYDMSWVRQAPGKGLEWVAYISHGGAGTYYPDSVKGRFTISRDNSKNTLFLQMDSLRPEDTGVYFCARGGVTKGYFDVWGQGTTVTVSS

SEQ ID NO: 8501 - protein, 119 aa, Artificial Sequence
  source: /note="Description of Artificial Sequence: Synthetic polypeptide"
EVQLVESGGGVVQPGRSLRLSCSASGFIFSRYDMSWVRQAPGKGLEWVAYISHGGAGTYYPDSVKGRFTISRDNSKNTLFLQMDSLRAEDTAVYYCARGGVYKGYFDVWGQGTPVTVSS

SEQ ID NO: 8502 - protein, 119 aa, Artificial Sequence
  source: /note="Description of Artificial Sequence: Synthetic polypeptide"
EVQLVESGGGVVQPGRSLRLSCSASGFIFSKYDMSWVRQAPGKGLEWVAYISHGGAGTYYPDSVKGRFTISRDNSKNTLFLQMDSLRPEDTGVYYCARGGVYKGYFDVWGQGTPVTVSS

SEQ ID NO: 8503 - protein, 119 aa, Artificial Sequence
  source: /note="Description of Artificial Sequence: Synthetic polypeptide"
QVTLKESGPGILQPSQTLSLTCSFSGFSLRKSVMGVSWIRQPSGKGLEWLAHIYWDDDKYYNPSLKSRLTISKDPSRNQVFLKITSVDTADAATYYCTRRGIRSAMDYWGQGTSVTVSS

SEQ ID NO: 8504 - protein, 120 aa, Artificial Sequence
  source: /note="Description of Artificial Sequence: Synthetic polypeptide"
QVTLKESGPGILKPSQTLSLTCSFSGFSLSTSGMGVSWIRQPSGKGLEWLAHIWWDGDNYYNPSLKSQLTISKDTSRNQVFLRIATVDTADTATYYCARRTRVNYAMDYWGQGTSVTVSS

SEQ ID NO: 8505 - protein, 117 aa, Artificial Sequence
  source: /note="Description of Artificial Sequence: Synthetic polypeptide"
QVQLQQSGAELMKPGASVKISCKATGYTFSSYWIEWVKQRPGHGLEWIGDILPGSGSTNYNEKFKDKATFTADTSFNTAYMQLSSLTSEDSAVYYCATRRFRGLDYWGQGTTLTVSS

SEQ ID NO: 8506 - protein, 117 aa, Artificial Sequence
  source: /note="Description of Artificial Sequence: Synthetic polypeptide"
QVQLQQSGAELMKPGASVKISCKATGYTFNDYWIEWVKQRPGHGLEWIGGFSHGSGSTNYNEKFKGKATFTADSSSNTAYMQLSSLTSEDSAVYYCARRRFRGMDYWGQGTSVTVSS

SEQ ID NO: 8507 - protein, 117 aa, Artificial Sequence
  source: /note="Description of Artificial Sequence: Synthetic polypeptide"
QIQLVQSGPELKKPGETVKISCKASGYSFTDYSMHWVKQAPGKGLKWMDWINTETGEPTYADDFKGRFAFSLETSASTAYLQINNLKNEDTATYFCSRRRYRAFDYWGQGTTLTVSS

SEQ ID NO: 8508 - protein, 112 aa, Artificial Sequence
  source: /note="Description of Artificial Sequence: Synthetic polypeptide"
EVKLVESGGGLVQPGGSRKLSCAASGFTFSDYGMVWVRQAPGKGLEWVASISSGSSNIYYADTVKGRFTISRDDPNNTLFLQMRSLRSEDTAMYYCARNPYWGQGTTLTVSS

SEQ ID NO: 8509 - protein, 117 aa, Artificial Sequence
  source: /note="Description of Artificial Sequence: Synthetic polypeptide"
EVKLVESGGGLVQPGGSRKLSCAASGFTFSDYGMVWVRQAPGKGLEWVAYISSGSSTIHYADTMKGRFTISRDNPKNTLFLQMSSLRSEDTAMYYCARRHYYAMDYWGQGTSVTVSS

SEQ ID NO: 8510 - protein, 122 aa, Artificial Sequence
  source: /note="Description of Artificial Sequence: Synthetic polypeptide"
EVQLQQSGADLEKPGASVKLSCTASGFNIKDTFMHWVKQRPEQGLEWIGRIDPANGHTKYDPKFQGKATITADTSSNTAYLQLSSLTSEDTAVYYCARWGQFGLLWNAMDYWGQGTSVTVSS

SEQ ID NO: 8511 - protein, 120 aa, Artificial Sequence
  source: /note="Description of Artificial Sequence: Synthetic polypeptide"
QVTLKESGPGILKPSQTLSLTCSLSGFSLSTSGMGVSWIRQPSGKGLEWLAHIWWDGDSYSNPSLRSRLTISRDTSRNQVFLRIATVDTADTATYYCARRTRVNYAMDYWGQGTSVTVSS

SEQ ID NO: 8512 - protein, 118 aa, Artificial Sequence
  source: /note="Description of Artificial Sequence: Synthetic polypeptide"
EVQLQQSGAEFVRSGASVKLSCTASGLNIKDYYIHWVKQRPEQVLDWIGWIDPENGYSEYAPRFQDKATMTADTSSNTAYLHLSSLTSEDTAVYYCNPGELARYFDYWGQGTTLTVSS

SEQ ID NO: 8513 - protein, 117 aa, Artificial Sequence
  source: /note="Description of Artificial Sequence: Synthetic polypeptide"
VTLRESGPALVKPTQTLTLTCTVSGFSLSAYSVNWIRQPPGKALEWLAMIWGDGKIVYNSALKSRLTISKDTSKNQVVLTMTNMDPVDTATYYCAGDGYYPYAMDNWGQGSLVTVSS

SEQ ID NO: 8514 - protein, 118 aa, Artificial Sequence [sequence omitted]

SEQ ID NO: 8515 - protein, 127 aa, Artificial Sequence [sequence omitted]

SEQ ID NO: 8516 - protein, 120 aa, Artificial Sequence
  source: /note="Description of Artificial Sequence: Synthetic polypeptide"
QIQLVQSGPDSKKPGETVKLSCRASGYTFTNYGMNWVKQAPGKGLKWMGWINTYSGVPTYADDFKGQFAFSLETSAATAFLQINNLKDEDTATYFCAREGYSTTRSMDYWGQGTSVTVSS

SEQ ID NO: 8517 - protein, 115 aa, Artificial Sequence
  source: /note="Description of Artificial Sequence: Synthetic polypeptide"
EVQLQQSGAELVKPGASVKLSCTASGFKIKDTYIHWVIQRPAQGLEWIGRIDPANGNTIYGSKFQGKATLTADTSSNTAYIHLSSLTSGDSAVYYCAGYVWFAYWGQGTLVTVSA

SEQ ID NO: 8518 - protein, 115 aa, Artificial Sequence; identical to SEQ ID NO: 8517
  source: /note="Description of Artificial Sequence: Synthetic polypeptide"

SEQ ID NO: 8519 - protein, 115 aa, Artificial Sequence
  source: /note="Description of Artificial Sequence: Synthetic polypeptide"
EVQVQQSGAELVKPGASVKLSCTASGFKIKDTYIHWLKQRPEQGLEWIGRIDPANGNTIYGSKFQGKATITADTSSNTAYIQLSSLTSGDTAVYFCAGYVWFAYWGQGTLVTVSA

SEQ ID NO: 8520 - protein, 120 aa, Artificial Sequence
  source: /note="Description of Artificial Sequence: Synthetic polypeptide"
EVKLVESGGGLVKPGGSLKLSCAASGFTFSNYAMSWVRQNPAKRLEWVATISSGGANIYYPDSVKGRFIISRDNARNTLYLQMSSLRSEDTAMYYCARGDYFNHFWFAYWGQGTLVTVSA

SEQ ID NO: 8521 - protein, 120 aa, Artificial Sequence
  source: /note="Description of Artificial Sequence: Synthetic polypeptide"
EVKLVESGGGLVKPGGSLKLSCAASGFTFSNYAMSWVRQTPAKRLEWVTTISSGGGNIYYTDSVKGRFTVSRDNARNTLYLQMSSLRSEDTAMYYCARGDYSNYFWFAYWGQGTLVSVSE

SEQ ID NO: 8522 - protein, 120 aa, Artificial Sequence
  source: /note="Description of Artificial Sequence: Synthetic polypeptide"
QIQLVQSGPELKKPGETVKLSCRASGYTFTNYGMNWVKQAPGKGLKWMGWINTYSGVPTYADDFKGQFAFSLETSAATAFLQINNLKDEDTATYFCAREGYSTTRSMDYWGQGTSVTVSS

SEQ ID NO: 8523 - protein, 122 aa, Artificial Sequence
  source: /note="Description of Artificial Sequence: Synthetic polypeptide"
EVQLVQSGSELKKPGASVKVSCKASGYTFTNYGMNWVRQAPGQGLEWMGWINTYTGESTYADDFKGRFVFSLDTSVSTAYLQISSLKAEDTAVYYCARGIYYYGSSYAMDYWGQGTTVTVSS

SEQ ID NO: 8524 - protein, 123 aa, Artificial Sequence
  source: /note="Description of Artificial Sequence: Synthetic polypeptide"
AEIQLVQSGSELKKPGASVKVSCKASGYTFTNYGMNWVRQAPGQDLERMAWINTYTGESTYADDFKGRFVFSLDTSVSTAYLQISSLKAEDTAVYFCARGIYYYGSSYAMDYWGQGTTVTVSS

SEQ ID NO: 8525 - protein, 122 aa, Artificial Sequence
  source: /note="Description of Artificial Sequence: Synthetic polypeptide"
EVQLVQSGAEVKKPGASVKVSCKASGYTFTNYGMNWVRQAPGQGLEWMGWINTYTGESTYADDFKGRVTMTTDTSTSTAYMELSSLRSEDTAVYYCARGIYYYGSSYAMDYWGQGTTVTVSS

SEQ ID NO: 8526 - protein, 122 aa, Artificial Sequence
  source: /note="Description of Artificial Sequence: Synthetic polypeptide"
EIQLVQSGAEVKKPGASVKVSCKASGYTFTNYGMNWVRQAPGQDLERMAWINTYTGESTYADDFKGRFTFTLDTSTSTAYMELSSLRSEDTAVYFCARGIYYYGSSYAMDYWGQGTTVTVSS

SEQ ID NO: 8527 - protein, 122 aa, Artificial Sequence
  source: /note="Description of Artificial Sequence: Synthetic polypeptide"
EVQLVQSGAEVKKPGVSVKVSCKASGYTFTTYGMHWVRQAPGQGLEWMGWINTYTGESTYADDFQGRVTFTLDTSTSTAYMELSSLRSEDTAVYFCARGIYYYGSSYAMNYWGQGTTVTVSS

SEQ ID NO: 8528 - protein, 122 aa, Artificial Sequence
  source: /note="Description of Artificial Sequence: Synthetic polypeptide"
EIQLVQSGAEVKKPGASVKVSCKASGYTFKYYGMNWVRQAPGQGLERMGWINTYTGESRYADDFKGRVTFTLDTSTSTAYMELSSLRSEDTAVYYCARDIYYFGSDYAMDYWGQGTTVTVSS

SEQ ID NO: 8529 - protein, 122 aa, Artificial Sequence
  source: /note="Description of Artificial Sequence: Synthetic polypeptide"
EVQLVQSGAEVKKPGASVKVSCKASGYTFKYYGMNWVRQAPGQGLERMGWINTYTGQSTYADDFKGRVTFTLDTSTSTAYMELSSLRSEDTAVYYCARDIYYYGSDFAMDYWGQGTTVTVSS

SEQ ID NO: 8530 - protein, 122 aa, Artificial Sequence
  source: /note="Description of Artificial Sequence: Synthetic polypeptide"
EIQLVQSGAEVKKPGASVKVSCKASGYTFAHYGMNWVRQAPGQGLEWMGWINTYTGQSTYADDFKGRFTFTLDTSTSTAYMELSSLRSEDTAVYYCARGIYYFGSNYAMDYWGQGTTVTVSS

SEQ ID NO: 8531 - protein, 122 aa, Artificial Sequence
  source: /note="Description of Artificial Sequence: Synthetic polypeptide"
EVQLQESGPGLVKPSETLSLTCTVSGFSLSDYGVSWIRQPPGKGLEWLGLIWGGGDTYYNSPLKSRLTISKDNSKSQVSLKLSSVTAADTAVYYCAKQRTLWGYDLYGMDYWGQGTLVTVSS

SEQ ID NO: 8532 - protein, 122 aa, Artificial Sequence
  source: /note="Description of Artificial Sequence: Synthetic polypeptide"
EVQLVESGGGLVQPGGSLRLSCAVSGFTLSDYGVSWIRQAPGKGLEWLGLIWGGGDTYYNSPLKSRLTISKDNSKSTVYLQMNSLRAEDTAVYYCAKQRTLWGYDLYGMDYWGQGTLVTVSS

SEQ ID NO: 8533 - protein, 124 aa, Artificial Sequence
  source: /note="Description of Artificial Sequence: Synthetic polypeptide"
EVQLVESGGGLEQPGGSLRLSCAGSGFTFRDYAMTWVRQAPGKGLEWVSSISGSGGNTYYADSVKGRFTISRDNSKNTLYLQMNSLRAEDTAVYYCAKDRLSITIRPRYYGLDVWGQGTTVTVS

SEQ ID NO: 8534 - protein, 119 aa, Artificial Sequence [sequence omitted]

SEQ ID NO: 8535 - protein, 119 aa, Artificial Sequence [sequence omitted]

SEQ ID NO: 8536 - protein, 116 aa, Artificial Sequence
  source: /note="Description of Artificial Sequence: Synthetic polypeptide"
EVQLVESGGGLVQPGRSLRLSCAASRFTFDDYAMHWVRQAPGKGLEWVSGISWNSGRIGYADSVKGRFTISRDNAENSLFLQMNGLRAEDTALYYCAKGRDSFDIWGQGTMVTVSS

SEQ ID NO: 8537 - protein, 118 aa, Artificial Sequence
  source: /note="Description of Artificial Sequence: Synthetic polypeptide"
EVQLLESGGGLVQPGGSLRLSCAASGFTFSSYAMSWVRQAPGKGLEWVSAISGSGGSTYYADSVKGRFTISRDNSKNTLYLQMNSLRAGDTAVYYCARDLIWGVAGSWGQGTMVTVSS

SEQ ID NO: 8538 - protein, 118 aa, Artificial Sequence
  source: /note="Description of Artificial Sequence: Synthetic polypeptide"
EVQLLESGGGLVQPGGSLRLSCAASGFTFSSYAMSWVRQAPGKGLEWVSAISGSGGSTYYADSVKGRFTISRDNSKNTLYLQMNSLRAEDTAVYYCARDLIFGVGGGWGQGTMVTVSS

SEQ ID NO: 8539 - protein, 118 aa, Artificial Sequence
  source: /note="Description of Artificial Sequence: Synthetic polypeptide"
EVQLLESGGGLVQPGGSLRLSCAASGFTFSSYAMSWVRQAPGKGLEWVSAISGSGGSTYYADSVKGRFTISRDNSKNTLYLQMNSLRAEDTAVYYCARDLIWGVAGSWGQGTLVTVSS

SEQ ID NO: 8540 - protein, 118 aa, Artificial Sequence; identical to SEQ ID NO: 8539
  source: /note="Description of Artificial Sequence: Synthetic polypeptide"

SEQ ID NO: 8541 - protein, 118 aa, Artificial Sequence; identical to SEQ ID NO: 8539
  source: /note="Description of Artificial Sequence: Synthetic polypeptide"

SEQ ID NO: 8542 - protein, 112 aa, Artificial Sequence
  source: /note="Description of Artificial Sequence: Synthetic polypeptide"
NFMLTQPHSVSESPGKTVTISCTRSSGSLANYYVQWYQQRPGSAPTIVIFANNQRPSGVPDRFSGSIDSSSNSASLTISRLKTEDEADYYCQSYSPTSVVFGGGTKLTVLGE

SEQ ID NO: 8543 - protein, 112 aa, Artificial Sequence
  source: /note="Description of Artificial Sequence: Synthetic polypeptide"
NFMLTQPHSVSESPGKTVTISCTRSSGSLANYYVQWYQQRPGSAPTIVIFANNQRPSGVPDRFSGSIDSSSNSASLTISRLKTEDEADYYCQTYDPYSVVFGGGTKLTVLGE

SEQ ID NO: 8544 - protein, 118 aa, Artificial Sequence
  source: /note="Description of Artificial Sequence: Synthetic polypeptide"
EVQLLESGGGLVQPGGSLRLSCAASGFTFSSYAMSWVRQAPGKGLEWVSAISGSGGSTYYADSVKGRFTISRDNSKNTLYLQMNSLRAEDTAVYYCARDLIWGVAGSWGQGTMVTVSS

SEQ ID NO: 8545 - protein, 118 aa, Artificial Sequence
  source: /note="Description of Artificial Sequence: Synthetic polypeptide"
EVQLLESGGGLVQPGGSLRLSCAASGFTFSSYAMSWVRQAPGKGLEWVSAISGSGGSTYYADSVKGRFTISRDNSKNTLYLQMNSLRAEDTAVYYCARDLIHGVTRNWGQGTLVTVSS

SEQ ID NO: 8546 - protein, 118 aa, Artificial Sequence; identical to SEQ ID NO: 8545
  source: /note="Description of Artificial Sequence: Synthetic polypeptide"

SEQ ID NO: 8547 - protein, 118 aa, Artificial Sequence; identical to SEQ ID NO: 8545
  source: /note="Description of Artificial Sequence: Synthetic polypeptide"

SEQ ID NO: 8548 - protein, 118 aa, Artificial Sequence; identical to SEQ ID NO: 8539
  source: /note="Description of Artificial Sequence: Synthetic polypeptide"

SEQ ID NO: 8549 - protein, 118 aa, Artificial Sequence; identical to SEQ ID NO: 8545
  source: /note="Description of Artificial Sequence: Synthetic polypeptide"

SEQ ID NO: 8550 - protein, 100 aa, Artificial Sequence
  source: /note="Description of Artificial Sequence: Synthetic polypeptide"
EVQLLESGGGLVQPGGSLRLSCAASGFTFSSYAMSWVRQAPGKGLEWVSAISGSGGSTYYADSVKGRFTISRDNLQMNSLRAEDARDLIWGVAGMVTVSS

SEQ ID NO: 8551 - protein, 118 aa, Artificial Sequence; identical to SEQ ID NO: 8538
  source: /note="Description of Artificial Sequence: Synthetic polypeptide"

SEQ ID NO: 8552 - protein, 100 aa, Artificial Sequence
  source: /note="Description of Artificial Sequence: Synthetic polypeptide"
EVQLLESGGGLVQPGGSLRLSCAASGFTFSSYAMSWVRQAPGKGLEWVSAISGSGGSTYYADSVKGRFTISRDNLQMNSLRAEDARDLIFGVGGMVTVSS

SEQ ID NO: 8553 - protein, 121 aa, Artificial Sequence
  source: /note="Description of Artificial Sequence: Synthetic polypeptide"
QVQLVESGGGVVQPGRSLRLSCAASGFTFSSYGMHWVRQAPGKGLEWVAVIWFEGSIKYYADSVKGISRDNSKNTLYLQMNSLRAEDTAVYYCAREGAGSSLYYYYGMDVWGQGTTVTVSS

SEQ ID NO: 8554 - protein, 120 aa, Artificial Sequence
  source: /note="Description of Artificial Sequence: Synthetic polypeptide"
QEQLVESGGNVVQPGRSLRLSCAASGFTFSTYGMHWVRQAPGKGLEWVAVIWYDGSDKYYADSVKDRFTVSKDNSKNTLYLQMNSLRAEDTAVYYCARNIAVADVAFDLWGQGTMVTVSS

SEQ ID NO: 8555 - protein, 121 aa, Artificial Sequence
  source: /note="Description of Artificial Sequence: Synthetic polypeptide"
QVQLVESGGGVVQPGRSLRLSCAASGFTFSNCGMHWVRQAPGKGLEWVALIGYDGINEYYADSVKGRFTISRDNSKNTLYLQMNSLRAEDTAVFYCARDWPEGYYNGMDVWGQGTTVTVSS

SEQ ID NO: 8556 - protein, 123 aa, Artificial Sequence
  source: /note="Description of Artificial Sequence: Synthetic polypeptide"
EVQLVQSGAEVKKPGESLKISCKGSGYNFPSYWIGWVRQMPGKGLEWMGVISPGDSDTRYSPSFQGQVTISADKSISTAYLQWSSLKASDTAMYYCARGYCSGGSCYPFFQYWGQGTLVTVSS

SEQ ID NO: 8557 - protein, 124 aa, Artificial Sequence
  source: /note="Description of Artificial Sequence: Synthetic polypeptide"
QMQLVESGGGVVQPGRSLRLSCTASGFTFSNNGMHWVRQAPGKGLEWVAVIWFDGMNKFYVDSVKGRFTISRDNSKNTLYLEMNSLRAEDTAIYYCAREGDGSGIYYYYGMDVWGQGTTVTVSS

SEQ ID NO: 8558 - protein, 124 aa, Artificial Sequence
  source: /note="Description of Artificial Sequence: Synthetic polypeptide"
QVQLVESGGGVVQPGRSLRLSCTASGFTFSTYGMHWVRQAPGKGLEWVAIIWFDGSNEDYAASVKGRFTISRDNSKNTLYLQMNSLRAEDTAVYYCAREGDGSSLYYYYGMDVWGQGTTVTVSS

SEQ ID NO: 8559 - protein, 246 aa, Artificial Sequence
  source: /note="Description of Artificial Sequence: Synthetic polypeptide"
QVQLVESGGGVVQPGRSLRLSCTASGFTFSTYGMHWVRQAPGKGLEWVAIIWFDGSNEDYAASVKGRFTISRDNSKNTLYLQMNSLRAEDTAVYYCAREGDGSSLYYYYGMDVWGQGTTVTVSSQVQLVESGGGVVQPGRSLRLSCAASGFTFSNSAMHWVRQAPGKGLEWVALIPFDGYNKYYADSVKGRFTISRDNSKNTLYLQMNSLRAEDTAVYYCAREGGYTGYDGGFDYWGQGILVTVSS

SEQ ID NO: 8560 - protein, 123 aa, Artificial Sequence
  source: /note="Description of Artificial Sequence: Synthetic polypeptide"
QVQLVESGGGVVQPGRSLRLSCAASGFTFSNSGMHWVRQAPGKGLEWVAVIDYDGIIQYYADSVKGRFTISRDNSKNTLYLQINSLRAEDTAVYYCATERGTHYYGSGSFDYWGQGTLVTVSS

SEQ ID NO: 8561 - protein, 120 aa, Artificial Sequence
  source: /note="Description of Artificial Sequence: Synthetic polypeptide"
QVQLVDSGGGVVQPGRSLRLSCAASGFTFNTYGMHWVRQAPGKGLEWVAVISYDGIIKHYADSVKGRFTITRDNSKNMVHLQMNSLRAEDTAVYYCARDSSSWYVYFDYWGQGTLVTVSS

SEQ ID NO: 8562 - protein, 121 aa, Artificial Sequence
  source: /note="Description of Artificial Sequence: Synthetic polypeptide"
QVQLVESGGGVVQPGRSLRLSCAASGFTFSNCGMHWVRQAPGKGLEWVALIGFDGINEYYADSVKGRFTISRDNSKNTLYLQMNSLRAEDTAVYYCARDWPEGYYNGMDVWGQGTTVTVSS

SEQ ID NO: 8563 - protein, 130 aa, Artificial Sequence
  source: /note="Description of Artificial Sequence: Synthetic polypeptide"
QVQLQESGPGLVKPSETLSLTCTISGGSVSSGDYYWSWIRQPPGKGLEWIGNIYYSGSTNYNPSLKSRVTISVDTSKNQFSLKLSSVTAADTAVYYCARGGGTVVRGIIHYYYYYGMDVWGQGTTVTVSS

SEQ ID NO: 8564 - protein, 119 aa, Artificial Sequence
  source: /note="Description of Artificial Sequence: Synthetic polypeptide"
EVQLVQSGAEVKKPGESLKISCKGSGYSFTTYWLGWVRQMPGKGLDWIGIMSPVDSDIRYSPSFQGQVTMSVDKSITTAYLQWNSLKASDTAMYYCARRRPGQGYFDFWGQGTLVTVSS

SEQ ID NO: 8565 - protein, 117 aa, Artificial Sequence
  source: /note="Description of Artificial Sequence: Synthetic polypeptide"
QVQLVESGGGVVQPGRSLRLSCAASGFTFSSYDMSWVRQAPGKGLEWVAKVSSGGGSTYYLDTVQGRFTISRDNSKNTLYLQMNSLRAEDTAVYYCARHLHGSFASWGQGTTVTVSS

SEQ ID NO: 8566 - protein, 123 aa, Artificial Sequence
  source: /note="Description of Artificial Sequence: Synthetic polypeptide"
QVQLVQSGAEVKKPGSSVKVSCKASGGTFSFYAISWVRQAPGQGLEWMGGFIPIFGAANYAQKFQGRVTITADESTSTAYMELSSLRSDDTAVYYCARIPSGSYYYDYDMDVWGQGTTVTVSS

SEQ ID NO: 8567 - protein, 124 aa, Artificial Sequence
  source: /note="Description of Artificial Sequence: Synthetic polypeptide"
QVQLVQSGAEVKKPGASVKVSCKASGYTFTSYWMNWVRQAPGQGLEWMGRIDPYDSETHYAQKLQGRVTMTTDTSTSTAYMELRSLRSDDTAVYYCARGGYDFDVGTLYWFFDVWGQGTTVTVS

SEQ ID NO: 8568 - protein, 125 aa, Artificial Sequence
  source: /note="Description of Artificial Sequence: Synthetic polypeptide"
QIQLVQSGPELKKPGETVKISCKASGFTLTNYGMNWVRQTPGKGLKWMGWINTDTGEPTYADDFKGRFAFSLETSASTASLQINNLKNADTATYFCARNPPYYYGTNNAEAMDYWGQGTAVTVSS

SEQ ID NO: 8569 - protein, 119 aa, Artificial Sequence
  source: /note="Description of Artificial Sequence: Synthetic polypeptide"
EVQLLESGGGLVQPGGSLRLSCAASGFTFSIYPMFWVRQAPGKGLEWVSWIGPSGGITKYADSVKGRFTISRDNSKNTLYLQMNSLRAEDTATYYCAREGHNDWYFDLWGRGTLVTVSS

SEQ ID NO: 8570 - protein, 118 aa, Artificial Sequence [sequence omitted]

SEQ ID NO: 8571 - protein, 119 aa, Artificial Sequence
  source: /note="Description of Artificial Sequence: Synthetic polypeptide"
EVQLLESGGGLVQPGGSLRLSCAASGFTFSIYPMFWVRQAPGKGLEWVSWIGPSGGITKYADSVKGRFTISRDNSKNTLYLQMNSLRAEDTATYYCAREGYYDWYFDQWGRGTLVTVSS

SEQ ID NO: 8572 - protein, 119 aa, Artificial Sequence
  source: /note="Description of Artificial Sequence: Synthetic polypeptide"
EVQLLESGGGLVQPGGSLRLSCAASGFTFSIYPMFWVRQAPGKGLEWVSWIGPSGGITKYADSVKGRFTISRDNSKNTLYLQMNSLRAEDTATYYCAREGQYDWYFDVWGRGTLVTVSS

SEQ ID NO: 8573 - protein, 119 aa, Artificial Sequence
  source: /note="Description of Artificial Sequence: Synthetic polypeptide"
EVQLLESGGGLVQPGGSLRLSCAASGFTFSIYPMFWVRQAPGKGLEWVSWIGPSGGITKYADSVKGRFTISRDNSKNTLYLQMNSLRAEDTATYYCAREGDYDWYFDLWGRGTLVTVSS

SEQ ID NO: 8574 - protein, 119 aa, Artificial Sequence
  source: /note="Description of Artificial Sequence: Synthetic polypeptide"
EVQLLESGGGLVQPGGSLRLSCAASGFTFSIYPMFWVRQAPGKGLEWVSWIGPSGGITKYADSVKGRFTISRDNSKNTLYLQMNSLRAEDTATYYCAREGQYDWYFELWGRGTLVTVSS

SEQ ID NO: 8575 - protein, 119 aa, Artificial Sequence
  source: /note="Description of Artificial Sequence: Synthetic polypeptide"
EVQLLESGGGLVQPGGSLRLSCAASGFTFSIYPMFWVRQAPGKGLEWVSWIGPSGGITKYADSVKGRFTISRDNSKNTLYLQMNSLRAEDTATYYCAREADIDWFFDLWGRGTLVTVSS

SEQ ID NO: 8576 - protein, 119 aa, Artificial Sequence
  source: /note="Description of Artificial Sequence: Synthetic polypeptide"
EVQLLESGGGLVQPGGSLRLSCAASGFTFSIYPMFWVRQAPGKGLEWVSWIGPSGGITKYADSVKGRFTISRDNSKNTLYLQMNSLRAEDTATYYCAREGHYDWYFDLWGRGTLVTVSS

SEQ ID NO: 8577 - protein, 119 aa, Artificial Sequence
  source: /note="Description of Artificial Sequence: Synthetic polypeptide"
EVQLLESGGGLVQPGGSLRLSCAASGFTFSIYPMFWVRQAPGKGLEWVSWIGPSGGITKYADSVKGRFTISRDNSKNTLYLQMNSLRAEDTATYYCAREGRYDWYFDPWGRGTLVTVSS

SEQ ID NO: 8578 - protein, 119 aa, Artificial Sequence
  source: /note="Description of Artificial Sequence: Synthetic polypeptide"
EVQLLESGGGLVQPGGSLRLSCAASGFTFSIYPMFWVRQAPGKGLEWVSWIGPSGGITKYADSVKGRFTISRDNSKNTLYLQMNSLRAEDTATYYCAREGDYDWYFGLWGRGTLVTVSS

SEQ ID NO: 8579 - protein, 119 aa, Artificial Sequence
  source: /note="Description of Artificial Sequence: Synthetic polypeptide"
EVQLLESGGGLVQPGGSLRLSCAASGFTFSIYPMFWVRQAPGKGLEWVSWIGPSGGITKYADSVKGRFTISRDNSKNTLYLQMNSLRAEDTATYYCAREGRYDWYFDLWGRGTLVTVSS

SEQ ID NO: 8580 - protein, 119 aa, Artificial Sequence
  source: /note="Description of Artificial Sequence: Synthetic polypeptide"
EVQLLESGGGLVQPGGSLRLSCAASGFTFSIYPMFWVRQAPGKGLEWVSWIGPSGGITKYADSVKGRFTISRDNSKNTLYLQMNSLRAEDTATYYCARESHIDRYFDLWGRGTLVTVSS

SEQ ID NO: 8581 - protein, 119 aa, Artificial Sequence; identical to SEQ ID NO: 8572
  source: /note="Description of Artificial Sequence: Synthetic polypeptide"

SEQ ID NO: 8582 - protein, 119 aa, Artificial Sequence
  source: /note="Description of Artificial Sequence: Synthetic polypeptide"
EVQLLESGGGLVQPGGSLRLSCAASGFTFSIYPMFWVRQAPGKGLEWVSWIGPSGGITKYADSVKGRFTISRDNSKNTLYLQMNSLRAEDTATYYCAREGHYNGYFDLWGRGTLVTVSS

SEQ ID NO: 8583 - protein, 119 aa, Artificial Sequence
  source: /note="Description of Artificial Sequence: Synthetic polypeptide"
EVQLLESGGGLVQPGGSLRLSCAASGFTFSIYPMFWVRQAPGKGLEWVSWIGPSGGITKYADSVKGRFTISRDNSKNTLYLQMNSLRAEDTATYYCAREGYYDWYFDLWGRGTLVTVSS

SEQ ID NO: 8584 - protein, 119 aa, Artificial Sequence
  source: /note="Description of Artificial Sequence: Synthetic polypeptide"
EVQLLESGGGLVQPGGSLRLSCAASGFTFSIYPMFWVRQAPGKGLEWVSWIGPSGGITKYADSVKGRFTISRDNSKNTLYLQMNSLRAEDTATYYCAREGTYDWYLDLWGRGTLVTVSS

SEQ ID NO: 8585 - protein, 119 aa, Artificial Sequence
  source: /note="Description of Artificial Sequence: Synthetic polypeptide"
EVQLLESGGGLVQPGGSLRLSCAASGFTFSIYPMFWVRQAPGKGLEWVSWIGPSGGITKYADSVKGRFTISRDNSKNTLYLQMNSLRAEDTATYYCAREGYYDWYFELWGRGTLVTVSS

SEQ ID NO: 8586 - protein, 119 aa, Artificial Sequence
  source: /note="Description of Artificial Sequence: Synthetic polypeptide"
EVQLLESGGGLVQPGGSLRLSCAASGFTFSIYPMFWVRQAPGKGLEWVSWIGPSGGITKYADSVKGRFTISRDNSKNTLYLQMNSLRAEDTATYYCAREGLIDWFFDQWGRGTLVTVSS

SEQ ID NO: 8587 - protein, 119 aa, Artificial Sequence
  source: /note="Description of Artificial Sequence: Synthetic polypeptide"
EVQLLESGGGLVQPGGSLRLSCAASGFTFSIYPMFWVRQAPGKGLEWVSWIGPSGGITKYADSVKGRFTISRDNSKNTLYLQMNSLRAEDTATYYCAREGQFDWYFDLWGRGTLVTVSS

SEQ ID NO: 8588 - protein, 119 aa, Artificial Sequence
  source: /note="Description of Artificial Sequence: Synthetic polypeptide"
EVQLLESGGGLVQPGGSLRLSCAASGFTFSIYPMFWVRQAPGKGLEWVSWIGPSGGITKYADSVKGRFTISRDNSKNTLYLQMNSLRAEDTATYYCAREGTYDWYFDLWGRGTLVTVSS

SEQ ID NO: 8589 - protein, 118 aa, Artificial Sequence
  source: /note="Description of Artificial Sequence: Synthetic polypeptide"
EVQLLESGGGLVQPGGSLRLSCAASGFTFSAYEMKWVRQAPGKGLEWVSVIGPSGGFTFYADSVKGRFTISRDNSKNTLYLQMNSLRAEDTAVYYCATEGENDAFDVWGQGTTVTVSS

SEQ ID NO: 8590 - protein, 118 aa, Artificial Sequence
  source: /note="Description of Artificial Sequence: Synthetic polypeptide"
EVQLLESGGGLVQPGGSLRLSCAASGFTFSAYEMKWVRQAPGKGLEWVSVIGPSGGFTFYADSVKGRFTISRDNSKNTLYLQMNSLRAEDTAVYYCATEGDNDAYDTWGQGTTVTVSS

SEQ ID NO: 8591 - protein, 118 aa, Artificial Sequence
  source: /note="Description of Artificial Sequence: Synthetic polypeptide"
EVQLLESGGGLVQPGGSLRLSCAASGFTFSAYEMKWVRQAPGKGLEWVSVIGPSGGFTFYADSVKGRFTISRDNSKNTLYLQMNSLRAEDTAVYYCATEGTNDAFDIWGQGTTVTVSS

SEQ ID NO: 8592 - protein, 118 aa, Artificial Sequence
  source: /note="Description of Artificial Sequence: Synthetic polypeptide"
EVQLLESGGGLVQPGGSLRLSCAASGFTFSAYEMKWVRQAPGKGLEWVSVIGPSGGFTFYADSVKGRFTISRDNSKNTLYLQMNSLRAEDTAVYYCATEGDNDAFDSWGQGTTVTVSS

SEQ ID NO: 8593 - protein, 118 aa, Artificial Sequence
  source: /note="Description of Artificial Sequence: Synthetic polypeptide"
EVQLLESGGGLVQPGGSLRLSCAASGFTFSAYEMKWVRQAPGKGLEWVSVIGPSGGFTFYADSVKGRFTISRDNSKNTLYLQMNSLRAEDTAVYYCATEGDNDAFDTWGQGTTVTVSS

SEQ ID NO: 8594 - protein, 118 aa, Artificial Sequence
  source: /note="Description of Artificial Sequence: Synthetic polypeptide"
EVQLLESGGGLVQPGGSLRLSCAASGFTFSAYEMKWVRQAPGKGLEWVSVIGPSGGFTFYADSVKGRFTISRDNSKNTLYLQMNSLRAEDTAVYYCATEGDNDAYDRWGQGTTVTVSS

SEQ ID NO: 8595 - protein, 118 aa, Artificial Sequence
  source: /note="Description of Artificial Sequence: Synthetic polypeptide"
EVQLLESGGGLVQPGGSLRLSCAASGFTFSAYEMKWVRQAPGKGLEWVSVIGPSGGFTFYADSVKGRFTISRDNSKNTLYLQMNSLRAEDTAVYYCATEGDNDVFDSWGQGTTVTVSS

SEQ ID NO: 8596 - protein, 118 aa, Artificial Sequence
  source: /note="Description of Artificial Sequence: Synthetic polypeptide"
EVQLLESGGGLVQPGGSLRLSCAASGFTFSAYEMKWVRQAPGKGLEWVSVIGPSGGFTFYADSVKGRFTISRDNSKNTLYLQMNSLRAEDTAVYYCATEGDDDVFDMWGQGTTVTVSS

SEQ ID NO: 8597 - protein, 118 aa, Artificial Sequence
  source: /note="Description of Artificial Sequence: Synthetic polypeptide"
EVQLLESGGGLVQPGGSLRLSCAASGFTFSAYEMKWVRQAPGKGLEWVSVIGPSGGFTFYADSVKGRFTISRDNSKNTLYLQMNSLRAEDTAVYYCATEGYNDAFDFWGQGTTVTVSS

SEQ ID NO: 8598 - protein, 118 aa, Artificial Sequence
  source: /note="Description of Artificial Sequence: Synthetic polypeptide"
EVQLLESGGGLVQPGGSLRLSCAASGFTFSAYEMKWVRQAPGKGLEWVSVIGPSGGFTFYADSVKGRFTISRDNSKNTLYLQMNSLRAEDTAVYYCATEGDDDAYDMWGQGTTVTVSS

SEQ ID NO: 8599 - protein, 118 aa, Artificial Sequence
  source: /note="Description of Artificial Sequence: Synthetic polypeptide"
EVQLLESGGGLVQPGGSLRLSCAASGFTFSAYEMKWVRQAPGKGLEWVSVIGPSGGFTFYADSVKGRFTISRDNSKNTLYLQMNSLRAEDTAVYYCATEQDYDTYDLWGQGTTVTVSS

SEQ ID NO: 8600 - protein, 118 aa, Artificial Sequence
  source: /note="Description of Artificial Sequence: Synthetic polypeptide"
EVQLLESGGGLVQPGGSLRLSCAASGFTFSAYEMKWVRQAPGKGLEWVSVIGPSGGFTFYADSVKGRFTISRDNSKNTLYLQMNSLRAEDTAVYYCATEGDDDAFDTWGQGTTVTVSS

SEQ ID NO: 8601 - protein, 118 aa, Artificial Sequence
  source: /note="Description of Artificial Sequence: Synthetic polypeptide"
EVQLLESGGGLVQPGGSLRLSCAASGFTFSAYEMKWVRQAPGKGLEWVSVIGPSGGFTFYADSVKGRFTISRDNSKNTLYLQMNSLRAEDTAVYYCATEADDDAFDIWGQGTTVTVSS

SEQ ID NO: 8602 - protein, 118 aa, Artificial Sequence
  source: /note="Description of Artificial Sequence: Synthetic polypeptide"
EVQLLESGGGLVQPGGSLRLSCAASGFTFSAYEMKWVRQAPGKGLEWVSVIGPSGGFTFYADSVKGRFTISRDNSKNTLYLQMNSLRAEDTAVYYCATEGENDAFDMWGQGTTVTVSS

SEQ ID NO: 8603 - protein, 118 aa, Artificial Sequence
  source: /note="Description of Artificial Sequence: Synthetic polypeptide"
EVQLLESGGGLVQPGGSLRLSCAASGFTFSAYEMKWVRQAPGKGLEWVSVIGPSGGFTFYADSVKGRFTISRDNSKNTLYLQMNSLRAEDTAVYYCATEGEYDTYDIWGQGTTVTVSS

SEQ ID NO: 8604 - protein, 118 aa, Artificial Sequence; identical to SEQ ID NO: 3968
  source: /note="Description of Artificial Sequence: Synthetic polypeptide"

SEQ ID NO: 8605 - protein, 133 aa, Artificial Sequence; identical to SEQ ID NO: 3969
  source: /note="Description of Artificial Sequence: Synthetic polypeptide"

SEQ ID NO: 8606 - protein, 120 aa, Artificial Sequence
  source: /note="Description of Artificial Sequence: Synthetic polypeptide"
QVQLQQSGPELVKPGASVKMSCKASGYTFTSYYIYWVKQRPGQGLEWLGWIWPGDGSTKYNEKFKDKTTLTADKSSNTAYMFLSSLTSEDSAVYFCASPMITPNYAMDYWGQGASVTVSS

SEQ ID NO: 8607 - protein, 120 aa, Artificial Sequence
  source: /note="Description of Artificial Sequence: Synthetic polypeptide"
QVQLQQSGPELVKPGASVKMSCKASGYTFTSYYIHWVKQRPGQGLEWIGWIWPGDGSTKYNEKFKGKTTLTADKSSSTAYMFLSSLTSEDSAVYFCASPMITPNYAMDYWGQGASVTVSS

SEQ ID NO: 8608 - protein, 120 aa, Artificial Sequence
  source: /note="Description of Artificial Sequence: Synthetic polypeptide"
QVQLQQSGSELVKPGASVKLSCKASGYTFTSYYIHWVKQRPGQGLEWIGWIWPGDGSTKYNERFKGKTTLTADKSSSTAYMFLSSLTSEDSAVYFCASPMITPNYAMDYWGQGASVTVSS

SEQ ID NO: 8609 - protein, 120 aa, Artificial Sequence
  source: /note="Description of Artificial Sequence: Synthetic polypeptide"
QVQLQQSGPELVKPGDSVKMSCKASGYSFTSYFIHWVKQRPGQGLEWIGWIWPGDGSTKYNEKFKGKTTLTTDKSSSTAYMFLNSLTSEDSAVYFCASPMITPNYAMDYWGQGASVTVSS

SEQ ID NO: 8610 - protein, 120 aa, Artificial Sequence
  source: /note="Description of Artificial Sequence: Synthetic polypeptide"
QVQLQQSGSELVKPGASVKMSCKASGYTFTSYYIHWVKQRPGQGLEWIGWIWPGDGSTKYNERFKGKTTLTADKSSSTAYMFLSSLTSEDSAVYFCASPMITPNYAMDYWGQGASVTVSS

SEQ ID NO: 8611 - protein, 120 aa, Artificial Sequence
  source: /note="Description of Artificial Sequence: Synthetic polypeptide"
QVQLVQSGAEVKKPGASVKVSCKASGYTFTSYYMHWVRQAPGQGLEWMGIIWPGDGSTSYAQKFQGRVTMTRDTSTSTVYMELSSLRSEDTAVYYCASPMITPNYAMDYWGQGTLVTVSS

SEQ ID NO: 8612 - protein, 120 aa, Artificial Sequence
  source: /note="Description of Artificial Sequence: Synthetic polypeptide"
QVQLVQSGAEVKKPGASVKMSCKASGYTFTSYYIYWVKQAPGQGLEWLGWIWPGDGSTKYNEKFQGRVTLTADKSSNTAYMFLSSLRSEDTAVYFCASPMITPNYAMDYWGQGTLVTVSS

SEQ ID NO: 8613 - protein, 449 aa, Artificial Sequence
  source: /note="Description of Artificial Sequence: Synthetic polypeptide"
QVQLVQSGAEVKKPGASVKVSCKASGYTFTSYYMHWVRQAPGQGLEWMGIIWPGDGSTSYAQKFQGRVTMTRDTSTSTVYMELSSLRSEDTAVYYCASPMITPNYAMDYWGQGTLVTVSSASTKGPSVFPLAPSSKSTSGGTAALGCLVKDYFPEPVTVSWNSGALTSGVHTFPAVLQSSGLYSLSSVVTVPSSSLGTQTYICNVNHKPSNTKVDKRVEPKSCDKTHTCPPCPAPELLGGPSVFLFPPKPKDTLMISRTPEVTCVVVDVSHEDPEVKFNWYVDGVEVHNAKTKPREEQYNSTYRVVSVLTVLHQDWLNGKEYKCKVSNKALPAPIEKTISKAKGQPREPQVYTLPPSREEMTKNQVSLTCLVKGFYPSDIAVEWESNGQPENNYKTTPPVLDSDGSFFLYSKLTVDKSRWQQGNVFSCSVMHEALHNHYTQKSLSLSPG

SEQ ID NO: 8614 - protein, 449 aa, Artificial Sequence
  source: /note="Description of Artificial Sequence: Synthetic polypeptide"
QVQLVQSGAEVKKPGASVKMSCKASGYTFTSYYIYWVKQAPGQGLEWLGWIWPGDGSTKYNEKFQGRVTLTADKSSNTAYMFLSSLRSEDTAVYFCASPMITPNYAMDYWGQGTLVTVSSASTKGPSVFPLAPSSKSTSGGTAALGCLVKDYFPEPVTVSWNSGALTSGVHTFPAVLQSSGLYSLSSVVTVPSSSLGTQTYICNVNHKPSNTKVDKRVEPKSCDKTHTCPPCPAPELLGGPSVFLFPPKPKDTLMISRTPEVTCVVVDVSHEDPEVKFNWYVDGVEVHNAKTKPREEQYNSTYRVVSVLTVLHQDWLNGKEYKCKVSNKALPAPIEKTISKAKGQPREPQVYTLPPSREEMTKNQVSLTCLVKGFYPSDIAVEWESNGQPENNYKTTPPVLDSDGSFFLYSKLTVDKSRWQQGNVFSCSVMHEALHNHYTQKSLSLSPG

SEQ ID NO: 8615 - protein, 142 aa, Artificial Sequence
  source: /note="Description of Artificial Sequence: Synthetic polypeptide"
MEWSGVFLFLLSGTAGVHSEVQLQQSGPELVKPGASVKMSCKASGYTFTDYYMDWVKQSHGESFECIGRVNPYNGGTSYNQKFKGKATLTVDKSSSTAYMELNSLTSEDSAVYYCARLGSSYRWGQGTTLTVSSAKTTPPSV

SEQ ID NO: 8616 - protein, 145 aa, Artificial Sequence
  source: /note="Description of Artificial Sequence: Synthetic polypeptide"
MEWSGIFIFLLSGTAGVHSEVQLQQSGPELVKPGASVKMSCKASGYTFTDYYMDWVKQSHGESFECIGRVNPYNGGTSYNQKFKGKATLTVDKSSSTAYMELNSLTSEDSAVYYCARLGSSYRWGQGTTLTVSSAKTTPPSVYPL

SEQ ID NO: 8617 - protein, 150 aa, Artificial Sequence
  source: /note="Description of Artificial Sequence: Synthetic polypeptide"
MGWSGVFILILSVTTGVHSEVQLQQSGPELEKPGASVKISCKASGYSFTGYNMNWVKQNNGKSLEWIGNITPYYGSTSYNQKFKGRVTLTVDKSSSTAYMQLKSLTSEDSAVYFCLLWLRRGDYAMDYWGQGTSVTVSSAKTTPPSVYPL

SEQ ID NO: 8618 - protein, 441 aa, Artificial Sequence
  source: /note="Description of Artificial Sequence: Synthetic polypeptide"
QVQLVQSGAEVKKPGASVKVSCKASGYTFTDYYMHWVRQAPGQGLEWMGRVNPNRRGTTYNQKFEGRVTMTTDTSTSTAYMELRSLRSDDTAVYYCARANWLDYWGQGTTVTVSSASTKGPSVFPLAPCSRSTSESTAALGCLVKDYFPEPVTVSWNSGALTSGVHTFPAVLQSSGLYSLSSVVTVPSSSLGTKTYTCNVDHKPSNTKVDKRVESKYGPPCPPCPAPEAAGGPSVFLFPPKPKDTLMISRTPEVTCVVVDVSQEDPEVQFNWYVDGVEVHNAKTKPREEQFNSTYRVVSVLTVLHQDWLNGKEYKCKVSNKGLPSSIEKTISKAKGQPREPQVYTLPPSQEEMTKNQVSLTCLVKGFYPSDIAVEWESNGQPENNYKTTPPVLDSDGSFFLYSRLTVDKSRWQEGNVFSCSVMHEALHNHYTQKSLSLSLG

SEQ ID NO: 8619 - protein, 118 aa, Artificial Sequence
  source: /note="Description of Artificial Sequence: Synthetic polypeptide"
EVQLLESGGGLVQPGGSLRLSCAASGFTFSIYSMNWVRQAPGKGLEWVSSIGSSGGTTYYADSVKGRFTISRDNSKNTLYLQMNSLRAEDTAVYYCAGSQWLYGMDVWGQGTTVTVSS

SEQ ID NO: 8620 - protein, 119 aa, Artificial Sequence; identical to SEQ ID NO: 6976
  source: /note="Description of Artificial Sequence: Synthetic polypeptide"

SEQ ID NO: 8621 - protein, 119 aa, Artificial Sequence
  source: /note="Description of Artificial Sequence: Synthetic polypeptide"
QVQLQQSGAELMKPGASVKISCKASGYTFTSYWIEWIKQRPGHGLEWIGEILPGTGSLNNNEKFRDKATFTADTSSNTAYMQLSSLTSEDSAVYYCARGYRYDGWFAYWGQGTLVTVSA

SEQ ID NO: 8622 - protein, 119 aa, Artificial Sequence
  source: /note="Description of Artificial Sequence: Synthetic polypeptide"
EVQLVESGGGLVQPGGSLKLSCAASGFTFNNYYMSWVRQTPERRLEWVAYISSSGGSTYYSDSVRGRFTISRDTARNTLYLQMTSLKSEDTAMYYCARHFGDYSYFDYWGQGTTLTVSS

SEQ ID NO: 8623 - protein, 118 aa, Artificial Sequence
  source: /note="Description of Artificial Sequence: Synthetic polypeptide"
KIQLVQSGPELKKPGETVKISCKASGYTFTNYGMNWVKQAPGKGLKWMGWININTGEPTYAEEFKGRFAFSLETSATTAFLQINNLKNEDTATYLCARDSYSGGFDYWGQGTIVTVSS

SEQ ID NO: 8624 - protein, 122 aa, Artificial Sequence
  source: /note="Description of Artificial Sequence: Synthetic polypeptide"
QIQLVQSGPELKKPGETVKISCKASGYTFTDYSMHWVKQAPGKGLKWMGWIHTETGEPRYVDDFKGRFAFSLETSASTAYLQINNLKNEDTATYFCARDSYYFGSSYYFDYWGQGTTLTVSS

SEQ ID NO: 8625 - protein, 123 aa, Artificial Sequence
  source: /note="Description of Artificial Sequence: Synthetic polypeptide"
EVQLQQSGPELVKPGASMKISCKASDYSFTAYTIHWMKQSHGKNLEWIGLINPYNGGTSYNQKFQGRATLTVDKSSSIAYMELLSLTSEDSAVYYCARRGYDREGHYYAMDYWGQGTSVTVSS

SEQ ID NO: 8626 - protein, 122 aa, Artificial Sequence
  source: /note="Description of Artificial Sequence: Synthetic polypeptide"
EVQLQQSGPELVQPGASMKISCKASGYSFTDYTMNWVKQSHGKNLEWIGLINPYNGGSRYNQKFMAKATLTVDKSSNTAYMELLSVTSEDSAVYYCARDAGYFGSGFYFDYWGQGTTLTVSS

SEQ ID NO: 8627 - protein, 118 aa, Artificial Sequence
  source: /note="Description of Artificial Sequence: Synthetic polypeptide"
QVQLQQPGSELVRPGASVKLSCKASGYTFTSYWMHWVKQRPGQGLEWIGNIYPGTVNTNYDEKFKNKATLTVDTSSSTAYMLLSSLTSEDSAVYYCTRDYYGGGLNYWGQGTTLTVSS

SEQ ID NO: 8628 - protein, 117 aa, Artificial Sequence
  source: /note="Description of Artificial Sequence: Synthetic polypeptide"
QIQLVQSGPELRKPGETVKISCKGSGYTFTHYGINWVKQTPRKDLKWMGWINTHTGEAYYADDFKGRFAFSLETSANTAYLQINNLNNGDMGTYFCTRSHRFGLDYWGQGTSVTVSS

SEQ ID NO: 8629 - protein, 112 aa, Artificial Sequence
  source: /note="Description of Artificial Sequence: Synthetic polypeptide"
QVQLQQPGAELVRPGASVKLSCKASGYTFTSYWMNWVKQRPEQGLEWIGRIDPYDSETHYNQKFKDKAILTVDKSSSTAFVQLTSLTSEDSAVYYCVSDGYWGAGTTVTVSS

SEQ ID NO: 8630 - protein, 112 aa, Artificial Sequence; identical to SEQ ID NO: 8629
  source: /note="Description of Artificial Sequence: Synthetic polypeptide"

SEQ ID NO: 8631 - protein, 119 aa, Artificial Sequence
  source: /note="Description of Artificial Sequence: Synthetic polypeptide"
EVQLQQSGPDLVKPGASVRISCKASGYTFTDYNLHWVKQSHGKSLEWIGYIYPYNGITGYNQKFKSKATLTVDSSSNTAYMDLRSLTSEDSAVYFCARDAYDYDYLTDWGQGTLVTVSA

SEQ ID NO: 8632 - protein, 151 aa, Artificial Sequence
  source: /note="Description of Artificial Sequence: Synthetic polypeptide"
LNMERHWIFLFLLSVTAGVHSQVLLQQSAPELARPGASVKMSCTASGYIFTNYPIHWVKQRPGQGLEWIGFIDPGGGYDEPDERFRDRATLTADKSSSTAYMQLSSLTSEDSAIYYCARRGGGYYLDYWGQDTTLTVSAASTTPPSVKGEF

SEQ ID NO: 8633 - protein, 109 aa, Artificial Sequence; identical to SEQ ID NO: 3970
  source: /note="Description of Artificial Sequence: Synthetic polypeptide"

SEQ ID NO: 8634 - protein, 113 aa, Artificial Sequence; identical to SEQ ID NO: 3971
  source: /note="Description of Artificial Sequence: Synthetic polypeptide"

SEQ ID NO: 8635 - protein, 113 aa, Artificial Sequence; identical to SEQ ID NO: 3972
  source: /note="Description of Artificial Sequence: Synthetic polypeptide"

SEQ ID NO: 8636 - protein, 113 aa, Artificial Sequence; identical to SEQ ID NO: 3973
  source: /note="Description of Artificial Sequence: Synthetic polypeptide"

SEQ ID NO: 8637 - protein, 113 aa, Artificial Sequence; identical to SEQ ID NO: 3974
  source: /note="Description of Artificial Sequence: Synthetic polypeptide"

SEQ ID NO: 8638 - protein, 113 aa, Artificial Sequence; identical to SEQ ID NO: 3975
  source: /note="Description of Artificial Sequence: Synthetic polypeptide"

SEQ ID NO: 8639 - protein, 113 aa, Artificial Sequence; identical to SEQ ID NO: 3976
  source: /note="Description of Artificial Sequence: Synthetic polypeptide"

SEQ ID NO: 8640 - protein, 113 aa, Artificial Sequence; identical to SEQ ID NO: 3977
  source: /note="Description of Artificial Sequence: Synthetic polypeptide"

SEQ ID NO: 8641 - protein, 113 aa, Artificial Sequence; identical to SEQ ID NO: 3978
  source: /note="Description of Artificial Sequence: Synthetic polypeptide"

SEQ ID NO: 8642 - protein, 113 aa, Artificial Sequence; identical to SEQ ID NO: 3979
  source: /note="Description of Artificial Sequence: Synthetic polypeptide"

SEQ ID NO: 8643 - protein, 113 aa, Artificial Sequence; identical to SEQ ID NO: 3980
  source: /note="Description of Artificial Sequence: Synthetic polypeptide"

SEQ ID NO: 8644 - protein, 113 aa, Artificial Sequence; identical to SEQ ID NO: 3981
  source: /note="Description of Artificial Sequence: Synthetic polypeptide"

SEQ ID NO: 8645 - protein, 113 aa, Artificial Sequence; identical to SEQ ID NO: 3982
  source: /note="Description of Artificial Sequence: Synthetic polypeptide"

SEQ ID NO: 8646 - protein, 113 aa, Artificial Sequence; identical to SEQ ID NO: 3983
  source: /note="Description of Artificial Sequence: Synthetic polypeptide"

SEQ ID NO: 8647 - protein, 113 aa, Artificial Sequence; identical to SEQ ID NO: 3984
  source: /note="Description of Artificial Sequence: Synthetic polypeptide"

SEQ ID NO: 8648 - protein, 113 aa, Artificial Sequence; identical to SEQ ID NO: 3985
  source: /note="Description of Artificial Sequence: Synthetic polypeptide"

SEQ ID NO: 8649 - protein, 113 aa, Artificial Sequence; identical to SEQ ID NO: 3986
  source: /note="Description of Artificial Sequence: Synthetic polypeptide"

SEQ ID NO: 8650 - protein, 117 aa, Artificial Sequence
  source: /note="Description of Artificial Sequence: Synthetic polypeptide"
QVQLVQSGSELKKPGASVKISCKASGYSFSNYGMNWVRQAPGQGLQWMGWINTDSGESTYAEEFKGRFVFSLDTSVSTAYLQITSLTAEDTGMYFCAKVGYDALDYWGQGTLVTVSS

SEQ ID NO: 8651 - protein, 117 aa, Artificial Sequence
  source: /note="Description of Artificial Sequence: Synthetic polypeptide"
QVQLVQSGSELKKPGASVKISCKASGYTFTNYGMNWVRQAPGQGLQWMGWINTDSGESTYAEEFKGRFVFSLDTSVSTAYLQITSLTAEDTGMYFCAKVGYDALDYWGQGTLVTVSS

SEQ ID NO: 8652 - protein, 117 aa, Artificial Sequence
  source: /note="Description of Artificial Sequence: Synthetic polypeptide"
QVQLVQSGSELKKPGASVKISCKASGYTFTNYGMNWVRQAPGQGLQWMGWINTDSGESTYAEEFKGRFVFSLDTSVNTAYLQITSLTAEDTGMYFCVRVGYDALDYWGQGTLVTVSS

SEQ ID NO: 8653 - protein, 117 aa, Artificial Sequence
  source: /note="Description of Artificial Sequence: Synthetic polypeptide"
QIQLVQSGSELKKPGASVKISCKASGYTFTNYGMNWVRQAPGQGLQWMGWINTDSGESTYAEEFKGRFVFSLDTSVNTAYLQITSLTAEDTGMYFCVRVGYDALDYWGQGTLVTVSS

SEQ ID NO: 8654 - protein, 117 aa, Artificial Sequence
  source: /note="Description of Artificial Sequence: Synthetic polypeptide"
QIQLVQSGSELKKPGASVKISCKASGYTFTNYGMNWVKQAPGQGLKWMGWINTDSGESTYAEEFKGRFAFSLDTSVNTAYLQITSLNAEDTGMYFCVRVGYDALDYWGQGTLVTVSS

SEQ ID NO: 8655 - protein, 117 aa, Artificial Sequence
  source: /note="Description of Artificial Sequence: Synthetic polypeptide"
QVQLQQPGSELVRPGASVKLSCKASGYTFTTYWMHWVRQRPGQGLEWIGNIYPGTGGSNFDEKFKNRTSLTVDTSSTTAYMHLASLTSEDSAVYYCTRWTTGTGAYWGQGTLVTVSA

SEQ ID NO: 8656 - protein, 117 aa, Artificial Sequence
  source: /note="Description of Artificial Sequence: Synthetic polypeptide"
QVQLQQSGSELVRPGASVKLSCKASGYTFTTYWMHWVRQRPGQGLEWIGNIYPGTGGSNFDEKFKNRTSLTVDTSSTTAYMHLASLTSEDSAVYYCTRWTTGTGAYWGQGTLVTVSA

SEQ ID NO: 8657 - protein, 113 aa, Artificial Sequence [sequence omitted]

SEQ ID NO: 8658 - protein, 120 aa, Artificial Sequence
  source: /note="Description of Artificial Sequence: Synthetic polypeptide"
QVQLVESGGGLVKPGGSLRLSCAASGFTFSDYYMNWIRQAPGKGLEWVSYISSSGSIIYYADSVKGRFTISRDNAKNSLYLQMNSLRAEDTAVYYCARDGRIVARGMDVWGQGTTVTVSS

SEQ ID NO: 8659 - protein, 120 aa, Artificial Sequence
  source: /note="Description of Artificial Sequence: Synthetic polypeptide"
EVQLRDSGGGLVQPGGSLRLSCVASGFTFSSYWMSWVRQAPGKGLEWVVNINRDGSEKYYVDSVKGRFIISRDNTKNSLYLQMESLRAEDTAVYYCARDPPYHLYGMDVWGQGTTVTVSS

SEQ ID NO: 8660 - protein, 122 aa, Artificial Sequence
  source: /note="Description of Artificial Sequence: Synthetic polypeptide"
QLQLQESGPGLVKPSETLSLTCTVSGGSITSSSYYWGWIRQPPGKGLEWIGSIYYRGSTNYNPSLKSRVTISVDSSKNQFYLKVSSVTAVDTAVYYCARQNGAARPSWFDPWGQGTLVTVSS

SEQ ID NO: 8661 - protein, 127 aa, Artificial Sequence
  source: /note="Description of Artificial Sequence: Synthetic polypeptide"
EVQLVESGGGLVQPGGSLRLSCAASGFTFSSYWMSWVRQAPGKGLEWVANMNQDGSETHYVDSVKGRLSISRDNAKKSLFLHMNSLRAEDTAVYFCARDLVPPRQDDYYYYFGMDVWGHGTTVTVSS

SEQ ID NO: 8662 - protein, 127 aa, Artificial Sequence
  source: /note="Description of Artificial Sequence: Synthetic polypeptide"
EVQLVESGGGLVQPGGSLRLSCGASGFTFSSYWMTWVRQAPGKGLEWVGNINQDGSEKYSVDSVKGRFTISRDNAKNSLYLQMNRVRAEDTAVYYCSRDLVPPRQGDNYYYFGMDVWGLGTTVTVSS

SEQ ID NO: 8663 - protein, 127 aa, Artificial Sequence
  source: /note="Description of Artificial Sequence: Synthetic polypeptide"
EVQLVQSGGSLVQPGGSLRLSCTASGFTFSSYWMSWVRQAPGKGLEWVANIQQDESEKYYVDSVKGRFSISRDNAKKSLYLQMNSLRAEDTAVYFCARDLVPPRQGDYYHYFGMDVWGQGTLVTVSS

SEQ ID NO: 8664 - protein, 121 aa, Artificial Sequence
  source: /note="Description of Artificial Sequence: Synthetic polypeptide"
QLQLQESGPGLVKPSETLSLTCIVSGGSISSSSYYWGWIRQPPGKGLEWIGSLYYSGITFYNPSLKSRVTISVDTSKNQFSLTLTSVTAADTAVFYCARHRVMASSPFDHWGQGTLVTVSS

SEQ ID NO: 8665 - protein, 123 aa, Artificial Sequence
  source: /note="Description of Artificial Sequence: Synthetic polypeptide"
QVQLVESGAEMKKPGASVKVSCKASGYTFTDYGINWVRQAPGQGLEWMGWVSGYNGNTVFAQKIQGRVTMTTDTSTSTAYMELRSLRSDDTAVYFCARISVRGHSYYHGMGVWGQGTTVTVSS

SEQ ID NO: 8666 - protein, 120 aa, Artificial Sequence
  source: /note="Description of Artificial Sequence: Synthetic polypeptide"
QVQLVESGGGVVQPGRSLRLSCAASGFTFSSYGLHWVRQAPGKGLEWVALISNVGSNKYYADSVKGRFTISRDNSKNSLFLQMNSLRAEDTAVYYCAKGADYYYYGMDVWGQGTTVTVSS

SEQ ID NO: 8667 - protein, 118 aa, Artificial Sequence
  source: /note="Description of Artificial Sequence: Synthetic polypeptide"
EVQLVESGGGVVQPGRSLRLSCAASGFTFSNYGMHWVRQAPGKGLEWVTVIWYDGSYKYYADSVKGRFTISRDNSKNRLYLQMNSLRAEDTAVYYCARGELGDAFDIWGQGTMVTVSS

SEQ ID NO: 8668 - protein, 124 aa, Artificial Sequence
  source: /note="Description of Artificial Sequence: Synthetic polypeptide"
QITLKESGPTLVKPTQTLTLTCTFSGFSLTTTGVGVGWIRQPPGKALEWLALIYWNDLKRYSPSLKNRLTITKDTSRHQVVLTMTNMDPMDTATYYCAHRPLYYGSGSGWFDPWGPGTTVTVSS

SEQ ID NO: 8669 - protein, 119 aa, Artificial Sequence
  source: /note="Description of Artificial Sequence: Synthetic polypeptide"
EVQLVESGGDLVHPGRSLRLSCVASGFTFDDYTMHWVRQAPGKGLEWVSAISWNGDNINYAGSVKGRFTISRDNAKNSLYLEMNSLRVEDTAFYYCAKGRGFSFGFNYLGQGTMVTVSS

SEQ ID NO: 8670 - protein, 124 aa, Artificial Sequence
  source: /note="Description of Artificial Sequence: Synthetic polypeptide"
EVQLLQSGGGLVQPGGSLRLSCAASGFTFSHYWMSWVRQGPGKGLEWVATIKKDGSESYYVDSVRGRFTISRDNAKNSLYLQMNSLRTEDTAVYYCARDIVTPNVGYYFGMDVWGQGTTVTVSS

SEQ ID NO: 8671 - protein, 124 aa, Artificial Sequence
  source: /note="Description of Artificial Sequence: Synthetic polypeptide"
QVQLVESGGGLVQPGGSLRLSCAAAGFTFSHYWMSWVRQAPGKGLEWVATIKKDGSERYYVDSVKGRFTISRDNARNSMYLEMNSLRTEDTAIYYCARDIVTPNTDYYFGMDVWGQGTTVTVSS

SEQ ID NO: 8672 - protein, 127 aa, Artificial Sequence
  source: /note="Description of Artificial Sequence: Synthetic polypeptide"
QVQLVESGGSLVQPGGSLRLACTASGFTFSSYWMSWVRQAPGKGLEWVANIQQDENEKYYVDSVKGRFSISRDNAKKSLYLQMNSLRVEDTAVYFCARDLVPPRQGDYYHYFGMDVWGQGTTVTVSS

SEQ ID NO: 8673 - protein, 127 aa, Artificial Sequence
  source: /note="Description of Artificial Sequence: Synthetic polypeptide"
QVQLVESGGGLVQPGGSLRLSCAASGFTFSSYWMSWVRQVPGKGLEWVANMNQDGTEKYYVDSVKGRLTISRENVKNSLYLQMNGLRAEDTAVYYCARDLVPPRQGDYYYYFGMDVWGHGTMVTVSS

SEQ ID NO: 8674 - protein, 118 aa, Artificial Sequence
  source: /note="Description of Artificial Sequence: Synthetic polypeptide"
QVQLVESGGGFVQPGGSLRLSCAASGFTFTNYAMSWVRQAPGKGLEWVSAISGVGGSTYYADSVKGRFTISRDTSKNMLYLQMNSLRAEDTAVYYCAKAPHWGPFGSWGQGTLVTVSS

SEQ ID NO: 8675 - protein, 123 aa, Artificial Sequence
  source: /note="Description of Artificial Sequence: Synthetic polypeptide"
EVQLLESGGDLVQPGGSLRLSCAASGITFSSFAMSWVRQAPGKGLEWVSTVSVSAGITYYADSVKGRFTISRDNSKNTLYLQMNSLRAEDTAIYYCAKSSCTTNSCPAYFDYWGLGTLVTVSS

SEQ ID NO: 8676 - protein, 126 aa, Artificial Sequence
  source: /note="Description of Artificial Sequence: Synthetic polypeptide"
EVQLVESGGGLVQPGGSLRLSCAASGFTFSSYWMTWVRQAPGKGLEWVANIRQDGSDKYYVDSVKGRFTISRDNAKNSLFLQMNSLRAEDTAVYYCARTNGGTYGYNHYYYGMDVWGQGTTVTVSS

SEQ ID NO: 8677 - protein, 123 aa, Artificial Sequence
  source: /note="Description of Artificial Sequence: Synthetic polypeptide"
QVQVQESGPGLVKPSETLSLTCTVSGDSISSSSYYWGWIRQPPGKGLEWIGSIYYNGISSYNPSLKSRVTISVESSKNQFSLRLASVTAADTALYYCARHRAARRFSEAFDIWGQGTMVTVSS

SEQ ID NO: 8678 - protein, 120 aa, Artificial Sequence
  source: /note="Description of Artificial Sequence: Synthetic polypeptide"
EVQLVESGGGLVQPGRSLRLSCAASGFTFDDFAMHWVRQVPGKGLEWVSGISWSSGTIGYVGSVKGRFTISRDNAKNSLYLQMNSLRAEDTAMYFCTKDKAAFHDAFDIWGQGTMVTVSS

SEQ ID NO: 8679 - protein, 123 aa, Artificial Sequence
  source: /note="Description of Artificial Sequence: Synthetic polypeptide"
QVQLQQWGAGLLKPSETLSLTCAVYGGSFSGYYWTWIRQSPGKGLEWMGEISHRGTTNYNPSLKSRLTISLDTSNNHFSLKLSSVTAADTAVYYCAREERLGMGYDYFGLDVWGQGTTVTVSS

SEQ ID NO: 8680 - protein, 121 aa, Artificial Sequence
  source: /note="Description of Artificial Sequence: Synthetic polypeptide"
EVQLLESGGGLVQPGGSLRLSCAASGFTFSKYKMLWVRQAPGKGLEWVSSIYPSGGVTFYADSVKGRFTISRDNSKNTLYLQMNSLRAEDTAVYYCARDGEMISGSFFDSWGQGTLVTVSS

SEQ ID NO: 8681 - protein, 121 aa, Artificial Sequence
  source: /note="Description of Artificial Sequence: Synthetic polypeptide"
EVQLLESGGGLVQPGGSLRLSCAASGFTFSQYMMLWVRQAPGKGLEWVSGISPSGGITTYADSVKGRFTISRDNSKNTLYLQMNSLRAEDTAVYYCARAYSSGWSLPFDYWGQGTLVTVSS

SEQ ID NO: 8682 - protein, 121 aa, Artificial Sequence; identical to SEQ ID NO: 8681
  source: /note="Description of Artificial Sequence: Synthetic polypeptide"

SEQ ID NO: 8683 - protein, 121 aa, Artificial Sequence; identical to SEQ ID NO: 8681
  source: /note="Description of Artificial Sequence: Synthetic polypeptide"

SEQ ID NO: 8684 - protein, 121 aa, Artificial Sequence; identical to SEQ ID NO: 8681
  source: /note="Description of Artificial Sequence: Synthetic polypeptide"

SEQ ID NO: 8685 - protein, 121 aa, Artificial Sequence; identical to SEQ ID NO: 8681
  source: /note="Description of Artificial Sequence: Synthetic polypeptide"

SEQ ID NO: 8686 - protein, 122 aa, Artificial Sequence
  source: /note="Description of Artificial Sequence: Synthetic polypeptide"
EVQLLESGGGLVQPGGSLRLSCAASGFTFSKYKMEWVRQAPGKGLEWVSSISPSGGLTFYADSVKGRFTISRDNSKNTLYLQMNSLRAEDTAVYYCAKARRMRSLWEAFDVWGQGTMVTVSS

SEQ ID NO: 8687 - protein, 122 aa, Artificial Sequence; identical to SEQ ID NO: 8686
  source: /note="Description of Artificial Sequence: Synthetic polypeptide"

SEQ ID NO: 8688 - protein, 122 aa, Artificial Sequence
  source: /note="Description of Artificial Sequence: Synthetic polypeptide"
EVQLLESGGGLVQPGGSLRLSCAASGFTFSKYKMLWVRQAPGKGLEWVSSISPSGGLTFYADSVKGRFTISRDNSKNTLYLQMNSLRAEDTAAYYCAKARRMRSLWEAFDVWGQGTMVTVSS

SEQ ID NO: 8689 - protein, 122 aa, Artificial Sequence; identical to SEQ ID NO: 8686
  source: /note="Description of Artificial Sequence: Synthetic polypeptide"

SEQ ID NO: 8690 - protein, 121 aa, Artificial Sequence; identical to SEQ ID NO: 8681
  source: /note="Description of Artificial Sequence: Synthetic polypeptide"

SEQ ID NO: 8691 - protein, 120 aa, Artificial Sequence
  source: /note="Description of Artificial Sequence: Synthetic polypeptide"
EVQLLESGGGLVQPGGSLRLSCAASGFTFSKYPMVWVRQAPGKGLEWVSSISPSGGLTFYADSVKGRFTISRDNSKNTLYLQMNSLRAEDTAVYYCAKARRMRSLWEAFDVWGQGTTVTV

SEQ ID NO: 8692 - protein, 121 aa, Artificial Sequence
  source: /note="Description of Artificial Sequence: Synthetic polypeptide"
EVQLLESGGGLVQPGGSLRLSCAASGFTFSRYVMTWVRQAPGKGLEWVSSIWPSGGMTVYADSVKGRFTISRDNSKNTLYLQMNSLRAEDTAVYYCARDRPTGKTGYFQHWGQGTLVTVSS

SEQ ID NO: 8693 - protein, 121 aa, Artificial Sequence
  source: /note="Description of Artificial Sequence: Synthetic polypeptide"
EVQLLESGGGLVQPGGSLRLSCAASGFTFSKYMMGWVRQAPGKGLEWVSGISPSGGITTYADSVKGRFTISRDNSKNTLYLQMNSLRAEDTAVYYCARAYSSGWSLPFDYWGQGTLVTVSS

SEQ ID NO: 8694 - protein, 121 aa, Artificial Sequence; identical to SEQ ID NO: 8680
  source: /note="Description of Artificial Sequence: Synthetic polypeptide"

SEQ ID NO: 8695 - protein, 122 aa, Artificial Sequence
  source: /note="Description of Artificial Sequence: Synthetic polypeptide"
EVQLLESGGGLVQPGGSLRLSCAASGFTFSKYPMVWVRQAPGKGLEWVSSISPSGGLTFYADSVKGRFTISRDNSKNTLYLQMNSLRAEDTAVYYCAKARRMRSLWEAFDVWGQGTLVTVSS

SEQ ID NO: 8696 - protein, 121 aa, Artificial Sequence; identical to SEQ ID NO: 8681
  source: /note="Description of Artificial Sequence: Synthetic polypeptide"

SEQ ID NO: 8697 - protein, 122 aa, Artificial Sequence; identical to SEQ ID NO: 8686
  source: /note="Description of Artificial Sequence: Synthetic polypeptide"

SEQ ID NO: 8698 - protein, 122 aa, Artificial Sequence
  source: /note="Description of Artificial Sequence: Synthetic polypeptide"
EVQLLESGGGLVQPGGSLRLSCAASGFTFSKYRMSWVRQAPGKGLEWVSSISPSGGLTFYADSVKGRFTISRDNSKNTLYLQMNSLRAEDTAVYYCAKARRMRSLWEAFDVWGQGTLVTVSS

SEQ ID NO: 8699 - protein, 112 aa, Artificial Sequence
  source: /note="Description of Artificial Sequence: Synthetic polypeptide"
EVQLLESGGGLVQPGGSLRLSCAASGFTFSKYDMHWVRQAPGKGLEWVSVISPSGGWTSYADSVKGRFTISRDNSKNTLYLQMNSLRAEDTAMYYCARDDYSKGRDAFDIWG

SEQ ID NO: 8700 - protein, 113 aa, Artificial Sequence
  source: /note="Description of Artificial Sequence: Synthetic polypeptide"
EVQLLESGGGLVQPGGSLRLSCAASGFTFSGYIMWWVRQAPGKGLEWVSVISPSGGDTWYADSVKGRFTISRDNSKNTLYLQMNSLRAEDTAVYYCATAGDYWGQGTLVTVSS

SEQ ID NO: 8701 - protein, 121 aa, Artificial Sequence
  source: /note="Description of Artificial Sequence: Synthetic polypeptide"
EVQLLESGGGLVQPGGSLRLSCAASGFTFSKYDMHWVRQAPGKGLEWVSVISPSGGWTSYADSVKGRFTISRDNSKNTLYLQMNSLRAEDTAMYYCARDDYSKGRDAFDIWGQGTLVTVSS

SEQ ID NO: 8702 - protein, 121 aa, Artificial Sequence
  source: /note="Description of Artificial Sequence: Synthetic polypeptide"
EVQLLESGGGLVQPGGSLRLSCAASGFTFSKYDMHWVRQAPGKGLEWVSVISPSGGWTSYADSVKGRFTISRDNSKNTLYLQMNSLRAEDTAMYYCARDDYSKGRDAFDIWGQGTMVTVSS

SEQ ID NO: 8703 - protein, 121 aa, Artificial Sequence; identical to SEQ ID NO: 8702
  source: /note="Description of Artificial Sequence: Synthetic polypeptide"

SEQ ID NO: 8704 - protein, 121 aa, Artificial Sequence; identical to SEQ ID NO: 8701
  source: /note="Description of Artificial Sequence: Synthetic polypeptide"

SEQ ID NO: 8705 - protein, 121 aa, Artificial Sequence; identical to SEQ ID NO: 8701
  source: /note="Description of Artificial Sequence: Synthetic polypeptide"

SEQ ID NO: 8706 - protein, 121 aa, Artificial Sequence
  source: /note="Description of Artificial Sequence: Synthetic polypeptide"
EVQLLESGGGLVQPGGSLRLSCAASGFTFSKYDMHWVRQAPGKGLEWVSVISPSGGWTSYADSVKGRFTISRDNSKNTLYLQMNSLRAEDTAMYYCARDDYSKGRDAFDIWGQGTTVTVSS

SEQ ID NO: 8707 - protein, 126 aa, Artificial Sequence
  source: /note="Description of Artificial Sequence: Synthetic polypeptide"
EVQLLESGGGLVQPGGSLRLSCAASGFTFSNYHMFWVRQAPGKGLEWVSVISPSGGSTGYADSVKGRFTISRDNSKNTLYLQMNSLRAEDTAMYYCARFDGDYLWDDYRHDAFDIWGQGTMVTVSS

SEQ ID NO: 8708 - protein, 121 aa, Artificial Sequence; identical to SEQ ID NO: 8706
  source: /note="Description of Artificial Sequence: Synthetic polypeptide"

SEQ ID NO: 8709 - protein, 121 aa, Artificial Sequence; identical to SEQ ID NO: 8706
  source: /note="Description of Artificial Sequence: Synthetic polypeptide"

SEQ ID NO: 8710 - protein, 121 aa, Artificial Sequence; identical to SEQ ID NO: 8702
  source: /note="Description of Artificial Sequence: Synthetic polypeptide"

SEQ ID NO: 8711 - protein, 121 aa, Artificial Sequence
  source: /note="Description of Artificial Sequence: Synthetic polypeptide"
EVQLLESGGGLVQPGGSLRLSCAASGLTFSKYDMHWVRQAPGKGLEWVSVISPSGGWTSYADSVKGRFTISRDNSKNTLYLQMNSLRAEDTAMYYCARDDYSKGRDAFDIWGQGTTVTVSS

SEQ ID NO: 8712 - protein, 121 aa, Artificial Sequence
  source: /note="Description of Artificial Sequence: Synthetic polypeptide"
EVQLLESGGGLVQPGGSLRLSCAASGFTFSDYLMVWVRQAPGKGLEWVSYISPSGGWTAYADSVKGRFTISRDNSKNTLYLQMNSLRAEDTAVYYCARVVELRAGDAFDIWGQGTLVTVSS

SEQ ID NO: 8713 - protein, 121 aa, Artificial Sequence; identical to SEQ ID NO: 8702
  source: /note="Description of Artificial Sequence: Synthetic polypeptide"

SEQ ID NO: 8714 - protein, 121 aa, Artificial Sequence; identical to SEQ ID NO: 8701
  source: /note="Description of Artificial Sequence: Synthetic polypeptide"

SEQ ID NO: 8715 - protein, 121 aa, Artificial Sequence
  source: /note="Description of Artificial Sequence: Synthetic polypeptide"
EVQLLESGGGLVQPGGSLRLSCAASGFTFSRYDMEWVRQAPGKGLEWVSSISPSGGWTSYADSVKGRFTISRDNSKNTLYLQMNSLRAEDTAVYYCARDHSGYDSEYFDYWGQGTLVTVSS

SEQ ID NO: 8716 - protein, 121 aa, Artificial Sequence; identical to SEQ ID NO: 8702
  source: /note="Description of Artificial Sequence: Synthetic polypeptide"

SEQ ID NO: 8717 - protein, 113 aa, Artificial Sequence; identical to SEQ ID NO: 8700
  source: /note="Description of Artificial Sequence: Synthetic polypeptide"

SEQ ID NO: 8718 - protein, 122 aa, Artificial Sequence
  source: /note="Description of Artificial Sequence: Synthetic polypeptide"
EVQLLESGGGLVQPGGSLRLSCAASGFTFSKYKMQWVRQAPGKGLEWVSSISPSGGLTFYADSVKGRFTISRDNSKNTLYLQMNSLRAEDTAVYYCAKARRMRSLWEAFDIWGQGTMVTVSS

SEQ ID NO: 8719 - protein, 121 aa, Artificial Sequence; identical to SEQ ID NO: 8702
  source: /note="Description of Artificial Sequence: Synthetic polypeptide"

SEQ ID NO: 8720 - protein, 118 aa, Artificial Sequence
  source: /note="Description of Artificial Sequence: Synthetic polypeptide"
EVQLLESGGGLVQPGGSLRLSCAASGFTFSHYEMGWVRQAPGKGLEWVSYISSSGGWTAYADSVKGRFTISRDNSKNTLYLQMNSLRAEDTAVYYCARIGYADAFDIWGQGTTVTVSS

SEQ ID NO: 8721 - protein, 113 aa, Artificial Sequence; identical to SEQ ID NO: 8700
  source: /note="Description of Artificial Sequence: Synthetic polypeptide"

SEQ ID NO: 8722 - protein, 121 aa, Artificial Sequence
  source: /note="Description of Artificial Sequence: Synthetic polypeptide"
EVQLLGSGGGLVQPGGSLRLSCAASGFTFSRYDMEWVRQAPGKGLEWVSSISPSGGWTSYADSVKGRFTISRDNSKNTLYLQMNSLRAEDTAVYYCARDHSGYDSEYFDYWGQGTLVTVSS

SEQ ID NO: 8723 - protein, 121 aa, Artificial Sequence; identical to SEQ ID NO: 8701
  source: /note="Description of Artificial Sequence: Synthetic polypeptide"

SEQ ID NO: 8724 - protein, 121 aa, Artificial Sequence
  source: /note="Description of Artificial Sequence: Synthetic polypeptide"
EVQLLESGGGLVQPGGSLRLSCAASGFTFSKYDMHWVRQAPGKGLEWVSVISPSGGWTSYADSVKGRFTISRDNSKNTLYLQMNSLRAEDTAMYYCARDGYSKGRDAFDIWGQGTLVTVSS

SEQ ID NO: 8725 - protein, 121 aa, Artificial Sequence; identical to SEQ ID NO: 8701
  source: /note="Description of Artificial Sequence: Synthetic polypeptide"

SEQ ID NO: 8726 - protein, 121 aa, Artificial Sequence; identical to SEQ ID NO: 8701
  source: /note="Description of Artificial Sequence: Synthetic polypeptide"

SEQ ID NO: 8727 - protein, 121 aa, Artificial Sequence; identical to SEQ ID NO: 8702
  source: /note="Description of Artificial Sequence: Synthetic polypeptide"

SEQ ID NO: 8728 - protein, 113 aa, Artificial Sequence; identical to SEQ ID NO: 8700
  source: /note="Description of Artificial Sequence: Synthetic polypeptide"

SEQ ID NO: 8729 - protein, 121 aa, Artificial Sequence; identical to SEQ ID NO: 8680
  source: /note="Description of Artificial Sequence: Synthetic polypeptide"

SEQ ID NO: 8730 - protein, 121 aa, Artificial Sequence
  source: /note="Description of Artificial Sequence: Synthetic polypeptide"
EVQLLESGGGLVQPGGSLRLSCAASGFTFSWYDMVWVRQAPGKGLEWVSVISPSGGWTSYADSVKGRFTISRDNSKNTLYLQMNSLRAEDTAVYYCARDHSGYDSEYFDYWGQGTLVTVSS

SEQ ID NO: 8731 - protein, 118 aa, Artificial Sequence
  source: /note="Description of Artificial Sequence: Synthetic polypeptide"
EVQLLESGGGLVQPGGSLRLSCAASGFTFSHYEMGWVRQAPGKGLEWVSYISPSGGWTAYADSVKGRFTISRDNSKNTLYLQMNSLRAEDTAVYYCARIDYADAFDIWGQGTLVTVSS

SEQ ID NO: 8732 - protein, 113 aa, Artificial Sequence; identical to SEQ ID NO: 8700
  source: /note="Description of Artificial Sequence: Synthetic polypeptide"

SEQ ID NO: 8733 - protein, 121 aa, Artificial Sequence; identical to SEQ ID NO: 8702
  source: /note="Description of Artificial Sequence: Synthetic polypeptide"

SEQ ID NO: 8734 - protein, 121 aa, Artificial Sequence; identical to SEQ ID NO: 8706
  source: /note="Description of Artificial Sequence: Synthetic polypeptide"

SEQ ID NO: 8735 - protein, 121 aa, Artificial Sequence; identical to SEQ ID NO: 8702
  source: /note="Description of Artificial Sequence: Synthetic polypeptide"

SEQ ID NO: 8736 - protein, 113 aa, Artificial Sequence; identical to SEQ ID NO: 8700
  source: /note="Description of Artificial Sequence: Synthetic polypeptide"

SEQ ID NO: 8737 - protein, 121 aa, Artificial Sequence; identical to SEQ ID NO: 8701
  source: /note="Description of Artificial Sequence: Synthetic polypeptide"

SEQ ID NO: 8738 - protein, 113 aa, Artificial Sequence; identical to SEQ ID NO: 8700
  source: /note="Description of Artificial Sequence: Synthetic polypeptide"

SEQ ID NO: 8739 - protein, 121 aa, Artificial Sequence; identical to SEQ ID NO: 8701
  source: /note="Description of Artificial Sequence: Synthetic polypeptide"

SEQ ID NO: 8740 - protein, 121 aa, Artificial Sequence; identical to SEQ ID NO: 8680
  source: /note="Description of Artificial Sequence: Synthetic polypeptide"

SEQ ID NO: 8741 - protein, 113 aa, Artificial Sequence; identical to SEQ ID NO: 8700
  source: /note="Description of Artificial Sequence: Synthetic polypeptide"

SEQ ID NO: 8742 - protein, 122 aa, Artificial Sequence
  source: /note="Description of Artificial Sequence: Synthetic polypeptide"
EVQLLESGGGLVQPGGSLRLSCAASGFTFSWYDMDWVRQAPGKGLEWVSVISPSGGWTAYADSVKGRFTISRDNSKNTLYLQMNSLRAEDTAVYYCARDSSGYYSPDAFDIWGQGTLVTVSS

SEQ ID NO: 8743 - protein, 121 aa, Artificial Sequence; identical to SEQ ID NO: 8701
  source: /note="Description of Artificial Sequence: Synthetic polypeptide"

SEQ ID NO: 8744 - protein, 113 aa, Artificial Sequence; identical to SEQ ID NO: 8700
  source: /note="Description of Artificial Sequence: Synthetic polypeptide"

SEQ ID NO: 8745 - protein, 118 aa, Artificial Sequence
  source: /note="Description of Artificial Sequence: Synthetic polypeptide"
EVQLLESGGGLVQPGGSLRLSCAASGFTFSRYEMGWVRQAPGKGLEWVSYISPSGGWTAYADSVKGRFTISRDNSKNTLYLQMNSLRAEDTAVYYCARIDYADAFDIWGQGTMVTVSS

SEQ ID NO: 8746 - protein, 113 aa, Artificial Sequence; identical to SEQ ID NO: 8700
  source: /note="Description of Artificial Sequence: Synthetic polypeptide"

SEQ ID NO: 8747 - protein, 121 aa, Artificial Sequence; identical to SEQ ID NO: 8701
  source: /note="Description of Artificial Sequence: Synthetic polypeptide"

SEQ ID NO: 8748 - protein, 118 aa, Artificial Sequence
  source: /note="Description of Artificial Sequence: Synthetic polypeptide"
EVQLLESGGGLVQPGGSLRLSCAASGFTFSHYEMAWVRQAPGKGLEWVSYISSSGGWTSYADSVKGRFTISRDNSKNTLYLQMNSLRAEDTAVYYCARIDYADAFDIWGQGTTVTVSS

SEQ ID NO: 8749 - protein, 118 aa, Artificial Sequence
  source: /note="Description of Artificial Sequence: Synthetic polypeptide"
EVQLLESGGGLVQPGGSLRLSCAASGFTFSWYDMVWVRQAPGKGLEWVSVISPSGGWTSYADSVKGRFTISRDNSKNTLYLQMNSLRAEDTAVYYCARASSGDAFDIWGQGTTVTVSS

SEQ ID NO: 8750 - protein, 118 aa, Artificial Sequence
  source: /note="Description of Artificial Sequence: Synthetic polypeptide"
EVQLLESGGGLVQPGGSLRLSCAASGFTFSHYEMAWVRQAPGKGLEWVSYISPSGGWTSYADSVKGRFTISRDNSKNTLYLQMNSLRAEDTAVYYCAREGPLDAFDIWGQGTTVTVSS

SEQ ID NO: 8751 - protein, 121 aa, Artificial Sequence; identical to SEQ ID NO: 8692
  source: /note="Description of Artificial Sequence: Synthetic polypeptide"

SEQ ID NO: 8752 - protein, 121 aa, Artificial Sequence; identical to SEQ ID NO: 8706
  source: /note="Description of Artificial Sequence: Synthetic polypeptide"

SEQ ID NO: 8753 - protein, 121 aa, Artificial Sequence
  source: /note="Description of Artificial Sequence: Synthetic polypeptide"
EVQLLESGGGLVQPGGSLRLSCAASGFTFSKYDMHWVRQAPGKGLEWVSVISPSGGWASYADSVKGRFTISRDNSKNTLYLQMNSLRAEDTAMYYCARDDYSKGRDAFDIWGQGTTVTVSS

SEQ ID NO: 8754 - protein, 121 aa, Artificial Sequence; identical to SEQ ID NO: 8701
  source: /note="Description of Artificial Sequence: Synthetic polypeptide"

SEQ ID NO: 8755 - protein, 121 aa, Artificial Sequence; identical to SEQ ID NO: 8701
  source: /note="Description of Artificial Sequence: Synthetic polypeptide"

SEQ ID NO: 8756 - protein, 118 aa, Artificial Sequence
  source: /note="Description of Artificial Sequence: Synthetic polypeptide"
EVQLLESGGGLVQPGGSLRLSCAASGFTFSHYEMGWVRQAPGKGLEWVSYISSSGGWTTYADSVKGRFTISRDNSKNTLYLQMNSLRAEDTAVYYCARIDYADAFDIWGQGTLVTVSS

SEQ ID NO: 8757 - protein, 118 aa, Artificial Sequence; identical to SEQ ID NO: 8756
  source: /note="Description of Artificial Sequence: Synthetic polypeptide"

SEQ ID NO: 8758 - protein, 118 aa, Artificial Sequence
  source: /note="Description of Artificial Sequence: Synthetic polypeptide"
EVQLLESGGGLVQPGGSLRLSCAASGFTFSWYDMVWVRQAPGKGLEWVSVISPSGGWTSYADSVKGRFTISRDNSKNTLYLQMNSLRAEDTAVYYCARASSGDAFDIWGQGTLVTVSS

SEQ ID NO: 8759 - protein, 118 aa, Artificial Sequence; identical to SEQ ID NO: 8758
  source: /note="Description of Artificial Sequence: Synthetic polypeptide"

SEQ ID NO: 8760 - protein, 118 aa, Artificial Sequence
  source: /note="Description of Artificial Sequence: Synthetic polypeptide"
EVQLLESGGGLVQPGGSLRLSCAASGFTFSWYDMVWVRQAPGKGLEWVSVISPSGGWTSYADSVKGRFTISRDNSKNTLYLQMNSLRAEDTAVYYCARASSGDAFDIWGQGTMVTVSS

SEQ ID NO: 8761 - protein, 113 aa, Artificial Sequence; identical to SEQ ID NO: 8700
  source: /note="Description of Artificial Sequence: Synthetic polypeptide"

SEQ ID NO: 8762 - protein, 121 aa, Artificial Sequence; identical to SEQ ID NO: 8680
  source: /note="Description of Artificial Sequence: Synthetic polypeptide"

SEQ ID NO: 8763 - protein, 118 aa, Artificial Sequence; identical to SEQ ID NO: 8760
  source: /note="Description of Artificial Sequence: Synthetic polypeptide"

SEQ ID NO: 8764 - protein, 118 aa, Artificial Sequence
  source: /note="Description of Artificial Sequence: Synthetic polypeptide"
EVQLLESGGGLVQPGGSLRLSCAASGFTFSWYDMGWVRQAPGKGLEWVSVISPSGGWTSYADSVKGRFTISRDNSKNTLYLQMNSLRAEDTAVYYCARASSGDAFDIWGQGTLVTVSS

SEQ ID NO: 8765 - protein, 121 aa, Artificial Sequence
  source: /note="Description of Artificial Sequence: Synthetic polypeptide"
EVQLLESGGGLVQPGGSLRLSCAASGFTFSKYDMHWVRQAPGKGLEWVSVISPSGGWTSYADPVKGRFTISRDNSKNTLYLQMNSLRAEDTAMYYCARDDYSKGRDAFDIWGQGTMVTVSS

SEQ ID NO: 8766 - protein, 116 aa, Artificial Sequence
  source: /note="Description of Artificial Sequence: Synthetic polypeptide"
EVQLLESGGGLVQPGGSLRLSCAASGFTFSWYDMVWVRQAPGKGLEWVSVISPSGGWTSYADSVKGRFTISRDNSKNTLYLQMNSLRAEDTAVYYCARASSGDAFDIWGQGTTVTV

SEQ ID NO: 8767 - protein, 121 aa, Artificial Sequence; identical to SEQ ID NO: 8715
  source: /note="Description of Artificial Sequence: Synthetic polypeptide"

SEQ ID NO: 8768 - protein, 113 aa, Artificial Sequence
  source: /note="Description of Artificial Sequence: Synthetic polypeptide"
DVQLLESGGGLVQPGGSLRLSCAASGFTSSGYIMWWVRQAPGKGLEWVSVISPSGGDTWYADSVKGRFTISRDNSKNTLYLQMNSLRAEDTAVYYCATAGDYWGQGTLVTVSS

SEQ ID NO: 8769 - protein, 121 aa, Artificial Sequence
  source: /note="Description of Artificial Sequence: Synthetic polypeptide"
EVQLLESGGGLVQPGGSLRLSCAASGFTFSWYDMVWVRQAPGKGLEWVSVISPSGGWTSYADSVKGRFTISRDNSKNTLYLQMNSLRAEDTAMYYCARDDYSKGRDAFDIWGQGTLVTVSS

SEQ ID NO: 8770 - protein, 118 aa, Artificial Sequence
  source: /note="Description of Artificial Sequence: Synthetic polypeptide"
EVQLLESGGGLVQPGGSLRLSCAASGFTFSWYDMVWVRQAPGKGLEWVSVISPSGGWTSYADSVKGRFTISRDNSRNTLYLQMNSLRAEDTAMYYCARASSGDAFDIWGQGTLVTVSS

SEQ ID NO: 8771 - protein, 113 aa, Artificial Sequence
  source: /note="Description of Artificial Sequence: Synthetic polypeptide"
EVQLLESGGGLVQPGGSLRLSCAASGFTSSGYIMWWVRQAPGKGLEWVSVISPSGGDTWYADSVKGRFTISRDNSKNTLYLQMNSLRAEDTAVYYCATAGDYWGQGTLVTVSS

SEQ ID NO: 8772 - protein, 121 aa, Artificial Sequence; identical to SEQ ID NO: 8681
  source: /note="Description of Artificial Sequence: Synthetic polypeptide"

SEQ ID NO: 8773 - protein, 122 aa, Artificial Sequence
  source: /note="Description of Artificial Sequence: Synthetic polypeptide"
EVQLLESGGGLVQPGGSLRLSCAASGFTFSMYFMSWVRQAPGKGLEWVSGISPSGGMTFYADSVKGRFTISRDNSKNTLYLQMNSLRAEDTAVYYCAKDGIPLSIAAPIDYWGQGTLVTVSS

SEQ ID NO: 8774 - protein, 121 aa, Artificial Sequence
  source: /note="Description of Artificial Sequence: Synthetic polypeptide"
EVQLLESGGGLVQPGGSLRLSCAASGLTFSRYVMTWVRQAPGKGLEWVSSIWPSGGMTVYADSVKGRFTISRDNSKNTLYLQMNSLRAEDTAVYYCARDRPTGKTGYFQHWGQGTLVTVSS

SEQ ID NO: 8775 - protein, 121 aa, Artificial Sequence; identical to SEQ ID NO: 8681
  source: /note="Description of Artificial Sequence: Synthetic polypeptide"

SEQ ID NO: 8776 - protein, 122 aa, Artificial Sequence
  source: /note="Description of Artificial Sequence: Synthetic polypeptide"
EVQLLESGGGLVQPGGSLRLSCAASGFTFSGYIMQWVRQAPGKGLEWVSSISPSGGLTFYADSVKGRFTISRDNSKNTLYLQMNSLRAEDTAVYYCAKARRMRSLWEAFDVWGQGTTVTVSS

SEQ ID NO: 8777 - protein, 122 aa, Artificial Sequence; identical to SEQ ID NO: 8686
  source: /note="Description of Artificial Sequence: Synthetic polypeptide"

SEQ ID NO: 8778 - protein, 122 aa, Artificial Sequence
  source: /note="Description of Artificial Sequence: Synthetic polypeptide"
EVQLLESGGGLVQPGGSLRLSCAASGFTFSNYSMTWVRQAPGKGLEWVSSISPSGGLTFYADSVKGRFTISRDNSKNTLYLQMNSLRAEDTAVYYCAKARRMRSLWEAFDIWGQGTMVTVSS

SEQ ID NO: 8779 - protein, 121 aa, Artificial Sequence
  source: /note="Description of Artificial Sequence: Synthetic polypeptide"
EVQLLESGGGLVQPGGSLRLSCAASGFTFSKYPMTWVRQAPGKGLEWVSSIWPSGGMTVYADSVKGRFTISRDNSKNTLYLQMNSLRAEDTAVYYCARDRPTGKTGYFQHWGQGTLVTVSS

SEQ ID NO: 8780 - protein, 121 aa, Artificial Sequence
  source: /note="Description of Artificial Sequence: Synthetic polypeptide"
EVQLLESGGGLVQPGGSLRLSCAASGFTFSQYMMLWVRQAPGKGLEWVSGISPSGGITTYADSVKGRFTISRDNSKNTLYLRMNSLRAEDTAVYYCARAYSSGWSLPFDYWGQGTLVTVSS

SEQ ID NO: 8781 - protein, 121 aa, Artificial Sequence; identical to SEQ ID NO: 8680
  source: /note="Description of Artificial Sequence: Synthetic polypeptide"

SEQ ID NO: 8782 - protein, 121 aa, Artificial Sequence
  source: /note="Description of Artificial Sequence: Synthetic polypeptide"
EVQLLESGGGLVQPGGSLRLSCAASGFTFSMYMMLWVRQAPGKGLEWVSGISPSGGITTYADSVKGRFTISRDNSKNTLYLQMNSLRAEDTAVYYCARAYSSGWSLPFDYWGQGTLVTVSS

SEQ ID NO: 8783 - protein, 121 aa, Artificial Sequence; identical to SEQ ID NO: 8681
  source: /note="Description of Artificial Sequence: Synthetic polypeptide"

SEQ ID NO: 8784 - protein, 122 aa, Artificial Sequence
  source: /note="Description of Artificial Sequence: Synthetic polypeptide"
EVQLLESGGGLVQPGGSLRLSCAASGFTFSKYPMTWVRQAPGKGLEWVSSISPSGGLTFYADSVKGRFTISRDNSKNTLYLQMNSLRAEDTAVYYCAKARRMRSLWEAFDVWGQGTMVTVSS

SEQ ID NO: 8785 - protein, 121 aa, Artificial Sequence; identical to SEQ ID NO: 8692
  source: /note="Description of Artificial Sequence: Synthetic polypeptide"

SEQ ID NO: 8786 - protein, 121 aa, Artificial Sequence; identical to SEQ ID NO: 8692
  source: /note="Description of Artificial Sequence: Synthetic polypeptide"

SEQ ID NO: 8787 - protein, 123 aa, Artificial Sequence
  source: /note="Description of Artificial Sequence: Synthetic polypeptide"
QVQLVQSGAEVKKPGSSVKVSCKTSGDTFSTYAISWVRQAPGQGLEWMGGIIPIFGKAHYAQKFQGRVTITADESTSTAYMELSSLRSEDTAVYFCARKFHFVSGSPFGMDVWGQGTTVTVSS

SEQ ID NO: 8788 - protein, 116 aa, Artificial Sequence
  source: /note="Description of Artificial Sequence: Synthetic polypeptide"
QVQLQESGAELSKPGASVKMSCKASGYTFTSYWLHWIKQRPGQGLEWIGYIYPRNDYTEYNQNFKDKATLTADKSSSTAYMQLSSLTSEDSAVYYCARRDITTFYWGQGTTLTVSS

SEQ ID NO: 8789 - protein, 116 aa, Artificial Sequence
  source: /note="Description of Artificial Sequence: Synthetic polypeptide"
QVQLQQSGAEVKKPGSSVKVSCKASGYTFTSYWLHWVRQAPGQGLEWIGYIYPRNDYTEYNQNFKDKATITADESTNTAYMELSSLRSEDTAFYFCARRDITTFYWGQGTTVTVSS

SEQ ID NO: 8790 - protein, 123 aa, Artificial Sequence
  source: /note="Description of Artificial Sequence: Synthetic polypeptide"
EVQLVESGGGLVKPGGSLKLSCAASGFAFSIYDMSWVRQTPEKRLEWVAYISSGGGTTYYPDTVKGRFTISRDNAKNTLYLQMSSLKSEDTAMYYCARHSGYGSSYGVLFAYWGQGTLVTVSA

SEQ ID NO: 8791 - protein, 123 aa, Artificial Sequence
  source: /note="Description of Artificial Sequence: Synthetic polypeptide"
QVQLVQSGAEVKKPGSSVKVSCKASGFTFSIYDMSWVRQAPGQGLEWVAYISSGGGTTYYPDTVKGRFTITADESTNTAYMELSSLRSEDTAFYFCARHSGYGSSYGVLFAYWGQGTLVTVSS

SEQ ID NO: 8792 - protein, 106 aa, Artificial Sequence
  source: /note="Description of Artificial Sequence: Synthetic polypeptide"
PVQLVQSGAEVKKPGSSVKVSCKASGGTFSRSAIIWVRQAPGQGLEWMGGIVPMFGPPNYAQKFQGRVTITADESTNTAYMELSSLRSEDTAFYFCAGGYGIYSPE

SEQ ID NO: 8793 - protein, 118 aa, Artificial Sequence; identical to SEQ ID NO: 5842
  source: /note="Description of Artificial Sequence: Synthetic polypeptide"

SEQ ID NO: 8794 - protein, 449 aa, Artificial Sequence
  source: /note="Description of Artificial Sequence: Synthetic polypeptide"
QVQLQQSGSELMMPGASVKISCKATGYTFSNYWIEWVKQRPGHGLEWIGEILPGTGRTIYNEKFKGKATFTADISSNTVQMQLSSLTSEDSAVYYCARRDYYGNFYYAMDYWGQGTSVTVSSASTKGPSVFPLAPCSRSTSESTAALGCLVKDYFPEPVTVSWNSGALTSGVHTFPAVLQSSGLYSLSSVVTVPSSSLGTKTYTCNVDHKPSNTKVDKRVESKYGPPCPSCPAPEFLGGPSVFLFPPKPKDTLMISRTPEVTCVVVDVSQEDPEVQFNWYVDGVEVHNAKTKPREEQFNSTYRVVSVLTVLHQDWLNGKEYKCKVSNKGLPSSIEKTISKAKGQPREPQVYTLPPSQEEMTKNQVSLTCLVKGFYPSDIAVEWESNGQPENNYKTTPPVLDSDGSFFLYSRLTVDKSRWQEGNVFSCSVMHEALHNHYTQKSLSLSLGK

SEQ ID NO: 8795 - protein, 113 aa, Artificial Sequence
  source: /note="Description of Artificial Sequence: Synthetic polypeptide"
EVQLQQSGAELVKPGASVKLSCTASGFNIKDYYIHWVQQRTEQGLEWIGRIDPEDGETKYAPKFQDKATITADTSSNTAYLHLSSLTSEDTAVYYCARWGAYWGQGTLVTVSS

SEQ ID NO: 8796 - protein, 119 aa, Artificial Sequence
  source: /note="Description of Artificial Sequence: Synthetic polypeptide"
EVQLVESGGGLVQPGGSLRLSCAASGFDFSRYWMSWVRQAPGKGLEWIGEINPDSSTINYAPSLKDKFIISRDNAKNSLYLQMNSLRAEDTAVYYCARPDGNYWYFDVWGQGTLVTVSS

SEQ ID NO: 8797 - protein, 456 aa, Artificial Sequence
  source: /note="Description of Artificial Sequence: Synthetic polypeptide"
EIQLQQSGPELVKPGASVKVSCKASGYAFTSYNMYWVKQSHGKSLEWIGYIDPYNGVTSYNQKFKGKATLTVDKSSSTAYMHLNSLTSEDSAVYYCARGGGSIYYAMDYWGQGTSVTVSSAKTTPPSVYPLAPGCGDTTGSSVTLGCLVKGYFPESVTVTWNSGSLSSSVHTFPALLQSGLYTMSSSVTVPSSTWPSQTVTCSVAHPASSTTVDKKLEPSGPISTINPCPPCKECHKCPAPNLEGGPSVFIFPPNIKDVLMISLTPKVTCVVVDVSEDDPDVQISWFVNNVEVHTAQTQTHREDYNSTIRVVSTLPIQHQDWMSGKEFKCKVNNKDLPSPIERTISKIKGLVRAPQVYILPPPAEQLSRKDVSLTCLVVGFNPGDISVEWTSNGHTEENYKDTAPVLDSDGSYFIYSKLNMKTSKWEKTDSFSCNVRHEGLKNYYLKKTISRSPGK

SEQ ID NO: 8798 - protein, 118 aa, Artificial Sequence
  source: /note="Description of Artificial Sequence: Synthetic polypeptide"
QVQLQQPGAELVKPGASVKMSCKASGYTFTSYNMHWIKQTPGQGLEWIGDIYPGNGDTSYNQKFKGKATLTADKSSSTVYMQLSSLTSEDSAVYYCARVGGAFPMDYWGQGTSVTVSS

SEQ ID NO: 8799 - protein, 118 aa, Artificial Sequence
  source: /note="Description of Artificial Sequence: Synthetic polypeptide"
QVQLVQSGAEVKKPGESLKISCKGSGYTFTSYNMHWVRQMPGKGLEWMGDIYPGNGDTSYNQKFKGQVTISADKSISTVYLQWSSLKASDTAMYYCARVGGAFPMDYWGQGTTVTVSS

SEQ ID NO: 8800 - protein, 118 aa, Artificial Sequence
  source: /note="Description of Artificial Sequence: Synthetic polypeptide"
QVQLVQSGAEVKKPGASVKVSCKASGYTFTSYNMHWVRQAPGQGLEWIGDIYPGNGDTSYNQKFKGRATMTADKSTSTVYMELSSLRSEDTAVYYCARVGGAFPMDYWGQGTLVTVSS

SEQ ID NO: 8801 - protein, 118 aa, Artificial Sequence
  source: /note="Description of Artificial Sequence: Synthetic polypeptide"
QVQLVQSGAEVKKPGASVKVSCKASGYTFTSYNMHWVRQAPGQGLEWIGDIYPGSGDTSYNQKFKGRATMTADKSTSTVYMELSSLRSEDTAVYYCARVGGAFPMDYWGQGTLVTVSS

SEQ ID NO: 8802 - protein, 118 aa, Artificial Sequence
  source: /note="Description of Artificial Sequence: Synthetic polypeptide"
QVQLVQSGAEVKKPGASVKVSCKASGYTFTSYNMHWVRQAPGQGLEWIGDIYPGQGDTSYNQKFKGRATMTADKSTSTVYMELSSLRSEDTAVYYCARVGGAFPMDYWGQGTLVTVSS

SEQ ID NO: 8803 - protein, 118 aa, Artificial Sequence
  source: /note="Description of Artificial Sequence: Synthetic polypeptide"
QVQLVQSGAEVKKPGASVKVSCKASGYTFTSYNMHWIRQAPGQGLEWIGDIYPGNGDTSYNQKFKGRATLTADKSTSTVYMELSSLRSEDTAVYYCARVGGAFPMDYWGQGTLVTVSS

SEQ ID NO: 8804 - protein, 118 aa, Artificial Sequence
  source: /note="Description of Artificial Sequence: Synthetic polypeptide"
QVQLVQSGAEVKKPGASVKVSCKASGYTFTSYNMHWIRQAPGQGLEWIGDIYPGSGDTSYNQKFKGRATLTADKSTSTVYMELSSLRSEDTAVYYCARVGGAFPMDYWGQGTLVTVSS

SEQ ID NO: 8805 - protein, 118 aa, Artificial Sequence
  source: /note="Description of Artificial Sequence: Synthetic polypeptide"
QVQLVQSGAEVKKPGASVKVSCKASGYTFTSYNMHWIRQAPGQGLEWIGDIYPGQGDTSYNQKFKGRATLTADKSTSTVYMELSSLRSEDTAVYYCARVGGAFPMDYWGQGTLVTVSS

SEQ ID NO: 8806 - protein, 118 aa, Artificial Sequence
  source: /note="Description of Artificial Sequence: Synthetic polypeptide"
QVQLVQSGAEVKKPGSSVKVSCKASGYTFTSYNMHWVRQAPGQGLEWMGDIYPGNGDTSYNQKFKGRVTITADKSTSTVYMELSSLRSEDTAVYYCARVGGAFPMDYWGQGTTVTVSS

SEQ ID NO: 8807 - protein, 118 aa, Artificial Sequence
  source: /note="Description of Artificial Sequence: Synthetic polypeptide"
EVQLVQSGAEVKKPGESLKISCKGSGYTFTSYNMHWVRQMPGKGLEWMGDIYPGNGDTSYNQKFKGQVTISADKSISTVYLQWSSLKASDTAMYYCARVGGAFPMDYWGQGTTVTVSS

SEQ ID NO: 8808 - protein, 118 aa, Artificial Sequence
  source: /note="Description of Artificial Sequence: Synthetic polypeptide"
QVQLVQSGAEVKKPGSSVKVSCKASGYTFTSYNMHWVRQAPGQGLEWMGDIYPGSGDTSYNQKFKGRVTITADKSTSTVYMELSSLRSEDTAVYYCARVGGAFPMDYWGQGTTVTVSS

SEQ ID NO: 8809 - protein, 118 aa, Artificial Sequence
  source: /note="Description of Artificial Sequence: Synthetic polypeptide"
QVQLVQSGAEVKKPGSSVKVSCKASGYTFTSYNMHWVRQAPGQGLEWMGDIYPGQGDTSYNQKFKGRVTITADKSTSTVYMELSSLRSEDTAVYYCARVGGAFPMDYWGQGTTVTVSS

SEQ ID NO: 8810 - protein, 118 aa, Artificial Sequence
  source: /note="Description of Artificial Sequence: Synthetic polypeptide"
EVQLVQSGAEVKKPGESLKISCKGSGYTFTSYNMHWVRQMPGKGLEWMGDIYPGSGDTSYNQKFKGQVTISADKSISTVYLQWSSLKASDTAMYYCARVGGAFPMDYWGQGTTVTVSS

SEQ ID NO: 8811 - protein, 118 aa, Artificial Sequence
  source: /note="Description of Artificial Sequence: Synthetic polypeptide"
EVQLVQSGAEVKKPGESLKISCKGSGYTFTSYNMHWVRQMPGKGLEWMGDIYPGQGDTSYNQKFKGQVTISADKSISTVYLQWSSLKASDTAMYYCARVGGAFPMDYWGQGTTVTVSS

SEQ ID NO: 8812 - protein, 118 aa, Artificial Sequence; identical to SEQ ID NO: 8802
  source: /note="Description of Artificial Sequence: Synthetic polypeptide"

SEQ ID NO: 8813 - protein, 118 aa, Artificial Sequence
  source: /note="Description of Artificial Sequence: Synthetic polypeptide"
QVQLVQSGAEVKKPGASVKVSCKASGYTFTSYNMHWVRQAPGQGLEWMGDIYPGQGDTSYNQKFKGRVTMTRDTSTSTVYMELSSLRSEDTAVYYCARVGGAFPMDYWGQGTTVTVSS

SEQ ID NO: 8814 - protein, 119 aa, Artificial Sequence
  source: /note="Description of Artificial Sequence: Synthetic polypeptide"
QVQLVQSGAEVKKPGASVKVSCKASGYTFTTYWIHWVRQAPGQRLEWMGEINPNNGRINYNEKFKTRVTITRDTSASTAYMELSSLRSEDTAVYYCARVGVMITTFPYWGQGTLVTVSS

SEQ ID NO: 8815 - protein, 119 aa, Artificial Sequence
  source: /note="Description of Artificial Sequence: Synthetic polypeptide"
QVQLVQSGAEVKKPGASVKVSCKASGYTFTTYWIHWVRQAPGQGLEWMGEINPNNGRINYNEKFKTRVTMTRDTSISTAYMELSRLRSDDTAVYYCARVGVMITTFPYWGQGTLVTVSS

SEQ ID NO: 8816 - protein, 119 aa, Artificial Sequence
  source: /note="Description of Artificial Sequence: Synthetic polypeptide"
QVQLVQSGAEVKKPGASVKVSCKASGYTFTTYWIHWVRQATGQGLEWMGEINPNNGRINYNEKFKTRVTMTRNTSISTAYMELSSLRSEDTAVYYCARVGVMITTFPYWGQGTLVTVSS

SEQ ID NO: 8817 - protein, 119 aa, Artificial Sequence
  source: /note="Description of Artificial Sequence: Synthetic polypeptide"
QVQLVQSGAEVKKPGSSVKVSCKASGGTFSTYWIHWVRQAPGQGLEWMGEINPNNGRINYNEKFKTRVTITADESTSTAYMELSSLRSEDTAVYYCARVGVMITTFPYWGRGTLVTVSS

SEQ ID NO: 8818 - protein, 119 aa, Artificial Sequence
  source: /note="Description of Artificial Sequence: Synthetic polypeptide"
QVQLVQSGAEVKKPGASVKVSCKASGYTFTTYWIHWVRQAPGQRLEWMGEINPNNGRINGNEKFKTRVTITRDTSASTAYMELSSLRSEDTAVYYCARVGVMITTFPYWGQGTLVTVSS

SEQ ID NO: 8819 - protein, 119 aa, Artificial Sequence
  source: /note="Description of Artificial Sequence: Synthetic polypeptide"
QVQLVQSGAEVKKPGASVKVSCKASGYTFTTYWIHWVRQAPGQRLEWMGEINPNNGRINYAEKFKTRVTITRDTSASTAYMELSSLRSEDTAVYYCARVGVMITTFPYWGQGTLVTVSS

SEQ ID NO: 8820 - protein, 119 aa, Artificial Sequence
  source: /note="Description of Artificial Sequence: Synthetic polypeptide"
QVQLVQSGAEVKKPGASVKVSCKASGYTFTTYWIHWVRQAPGQRLEWMGEINPNNGRINYNEKGKTRVTITRDTSASTAYMELSSLRSEDTAVYYCARVGVMITTFPYWGQGTLVTVSS

SEQ ID NO: 8821 - protein, 119 aa, Artificial Sequence
  source: /note="Description of Artificial Sequence: Synthetic polypeptide"
QVQLVQSGAEVKKPGASVKVSCKASGYTFTTYWIHWVRQAPGQRLEWMGEINPNNGRINYNEKFKTRVTITRDTSASTAYMELSSLRSEDTAVYYCARVGVIITTFPYWGQGTLVTVSS

SEQ ID NO: 8822 - protein, 138 aa, Artificial Sequence
  source: /note="Description of Artificial Sequence: Synthetic polypeptide"
MGWSYIILFLVATATDVHSQVQLQQPGAELVQPGTSVRLSCKASGYIFTTYWIHWVKQRPGQGLEWIGEINPNNGRINYNEKFKTKATLTVDKSSSTAYMQLSSLTSEDSAVYYCTRVGVMITTFPYWGQGTLVTVSA

SEQ ID NO: 8823 - protein, 216 aa, Artificial Sequence
  source: /note="Description of Artificial Sequence: Synthetic polypeptide"
EVQLVESGGGLVQPGGSLRLSCAASGYVFTDYGMNWVRQAPGKGLEWMGWINTYIGEPIYADSVKGRFTFSLDTSKSTAYLQMNSLRAEDTAVYYCARGYRSYAMDYWGQGTLVTVSSASTKGPSVFPLAPSSKSTSGGTAALGCLVKDYFPEPVTVSWNSGALTSGVHTFPAVLQSSGLYSLSSVVTVPSSSLGTQTYICNVNHKPSNTKVDKKV

SEQ ID NO: 8824 - protein, 229 aa, Artificial Sequence
  source: /note="Description of Artificial Sequence: Synthetic polypeptide"
EVQLVESGGGLVQPGGSLRLSCAASGYVFTDYGMNWVRQAPGKGLEWMGWINTYIGEPIYADSVKGRFTFSLDTSKSTAYLQMNSLRAEDTAVYYCARGYRSYAMDYWGQGTLVTVSSASTKGPSVFPLAPSSKSTSGGTAALGCLVKDYFPEPVTVSWNSGALTSGVHTFPAVLQSSGLYSLSSVVTVPSSSLGTQTYICNVNHKPSNTKVDKKVEPKSCDKTHTCAA

SEQ ID NO: 8825 - protein, 120 aa, Artificial Sequence
  source: /note="Description of Artificial Sequence: Synthetic polypeptide"
EVKLEESGGGLVQPGGSMKLSCVASGFIFSNHWMNWVRQSPEKGLEWVAEIRSKSINSATHYAESVKGRFTISRDDSKSAVYLQMTDLRTEDTGVYYCSRNYYGSTYDYWGQGTTLTVSS

SEQ ID NO: 8826 - protein, 117 aa, Artificial Sequence
  source: /note="Description of Artificial Sequence: Synthetic polypeptide"
QVQLKESGPGLVAPSQSLSITCTVSGFSLTDYGVNWVRQPPGKGLEWLGMIWGDGSTDYDSTLKSRLSISKDNSKSQIFLKMNSLQTDDTARYYCAREWHHGPVAYWGQGTLVTVSA

SEQ ID NO: 8827 - protein, 117 aa, Artificial Sequence
  source: /note="Description of Artificial Sequence: Synthetic polypeptide"
QVQLQESGPGLVKPSETLSLTCTVSGGSISDYGVNWIRQPPGKGLEWIGMIWGDGSTDYDSTLKSRVTISVDTSKNQFSLKLSSVTAADTAVYYCAREWHHGPVAYWCQGTLVTVSS

SEQ ID NO: 8828 - protein, 117 aa, Artificial Sequence
  source: /note="Description of Artificial Sequence: Synthetic polypeptide"
EVQLVESGGGLIQPGGSLRLSCAASGFTVSDYGVNWVRQAPGKGLEWVSMIWGDGSTDYDSTLKSRFTISRDNSKNTLYLQMNSLRAEDTAVYYCAREWHHGPVAYWGQGTLVTVSS

SEQ ID NO: 8829 - protein, 117 aa, Artificial Sequence
  source: /note="Description of Artificial Sequence: Synthetic polypeptide"
EVQLQESGPGLVKPSETLSLTCTVSGGSISDYGVNWIRQPPGKGLEWIGMIWGDGSTDYDSTLKSRVTISVDTSKNQFSLKLSSVTAADTAVYYCAREWHHGPVAYWGQGTLVTVSS

SEQ ID NO: 8830 - protein, 117 aa, Artificial Sequence
  source: /note="Description of Artificial Sequence: Synthetic polypeptide"
EVQLQESGPGLVKPSETLSLTCTVSGFSLSDYGVNWVRQPPGKGLEWLGMIWGDGSTDYDSTLKSRLTISKDNSKSQISLKLSSVTAADTAVYYCAREWHHGPVAYWGQGTLVTVSS

SEQ ID NO: 8831 - protein, 117 aa, Artificial Sequence
  source: /note="Description of Artificial Sequence: Synthetic polypeptide"
EVQLQESGPGLVKPSETLSLTCTVSGFSLSDYGVNWIRQPPGKGLEWIGMIWGDGSTDYDSTLKSRVTISKDTSKNQFSLKLSSVTAADTAVYYCAREWHHGPVAYWGQGTLVTVSS

SEQ ID NO: 8832 - protein, 117 aa, Artificial Sequence; identical to SEQ ID NO: 8831
  source: /note="Description of Artificial Sequence: Synthetic polypeptide"

SEQ ID NO: 8833 - protein, 117 aa, Artificial Sequence; identical to SEQ ID NO: 8831
  source: /note="Description of Artificial Sequence: Synthetic polypeptide"

SEQ ID NO: 8834 - protein, 117 aa, Artificial Sequence; identical to SEQ ID NO: 8831
  source: /note="Description of Artificial Sequence: Synthetic polypeptide"

SEQ ID NO: 8835 - protein, 122 aa, Artificial Sequence
  source: /note="Description of Artificial Sequence: Synthetic polypeptide"
EVQLVESGGGLVQPGGSLRLSCAASGFSLSSGAMSWVRQAPGKGLEWVSVIISSGATYYASWAKGRFTISRDNSKNTLYLQMNSLRAEDTAVYYCAKGGPDDSNSMGTFDPWGQGTLVTVSS

SEQ ID NO: 8836 - protein, 122 aa, Artificial Sequence
  source: /note="Description of Artificial Sequence: Synthetic polypeptide"
EVQLVESGGGLVQPGGSLRLSCTVSGFSLSSGAMSWVRQAPGKGLEWVGVIISSGATYYASWAKGRFTISKDTSKNTVYLQMNSLRAEDTAVYYCARGGPDDSNSMGTFDPWGQGTLVTVSS

SEQ ID NO: 8837 - protein, 122 aa, Artificial Sequence
  source: /note="Description of Artificial Sequence: Synthetic polypeptide"
EVQLVESGGGSVQPGGSLRLSCTVSGFSLSSGAMSWVRQAPGKGLEWVGVIISSGATYYASWAKGRFTISKDTSKNTVYLQMNSLRAEDTATYYCARGGPDDSNSMGTFDPWGQGTSVTVSS

SEQ ID NO: 8838 - protein, 118 aa, Artificial Sequence
  source: /note="Description of Artificial Sequence: Synthetic polypeptide"
EVQLVESGGGLVQPGGSLRLSCAASGFTFSNDAISWVRQAPGKGLEWVSYISDWSIRYYANWAQGRFTISRDNSKNTLYLQMNSLRAEDTAVYYCAKGAPGAGDNGIWGQGTLVTVSS

SEQ ID NO: 8839 - protein, 118 aa, Artificial Sequence
  source: /note="Description of Artificial Sequence: Synthetic polypeptide"
EVQLVESGGGSVQPGGSLRLSCTVSGIDLSNDAISWVRQAPGKGLEWVAYISDWSIRYYANWAQGRFTISKDTSKNTVYLQMNSLRAEDTATYYCARGAPGAGDNGIWGQGTTVTVSS

SEQ ID NO: 8840 - protein, 121 aa, Artificial Sequence
  source: /note="Description of Artificial Sequence: Synthetic polypeptide"
EVQLVESGGGLVQPGGSLRLSCAASGFSLSRYGVSWVRQAPGKGLEWVSTIGEAGRAYYANWARSRFTISRDNSKNTLYLQMNSLRAEDTAVYYCAKGEVFNNGWGAFNIWGQGTLVTVSS

SEQ ID NO: 8841 - protein, 121 aa, Artificial Sequence
  source: /note="Description of Artificial Sequence: Synthetic polypeptide"
EVQLVESGGGLVQPGGSLRLSCTVSGFSLSRYGVSWVRQAPGKGLEWVGTIGEAGRAYYANWARSRSTISRDTSKNTVYLQMNSLRAEDTAVYYCARGEVFNNGWGAFNIWGQGTLVTVSS

SEQ ID NO: 8842 - protein, 121 aa, Artificial Sequence
  source: /note="Description of Artificial Sequence: Synthetic polypeptide"
EVQLVESGGGLVQPGGSLRLSCAASGFTFSRYGVSWVRQAPGKGLEWVSAIGETGRAYYANWAKSRFTISRDNSKNTLYLQMNSLRAEDTAVYYCAKGEEFNNGWGAFNIWGQGTLVTVSS

SEQ ID NO: 8843 - protein, 121 aa, Artificial Sequence
  source: /note="Description of Artificial Sequence: Synthetic polypeptide"
EVQLVESGGGSVQPGGSLRLSCTVSGFSLSRYGVSWVRQAPGKGLEWVGAIGETGRAYYANWAKSRSTISRDTSKNTVYLQMNSLRAEDTATYYCARGEEFNNGWGAFNIWGQGTTVTVSS

SEQ ID NO: 8844 - protein, 120 aa, Artificial Sequence
  source: /note="Description of Artificial Sequence: Synthetic polypeptide"
EVQLVESGGGLVQPGGSLRLSCTVSGFSLNSNEISWVRQAPGKGLEWVGYIGNGGMTHYASWAKGRFTISRDTSKNTVYLQMNSLRAEDTAVYYCASSVEYTDLYYLNIWGQGTLVTVSS

SEQ ID NO: 8845 - protein, 120 aa, Artificial Sequence
  source: /note="Description of Artificial Sequence: Synthetic polypeptide"
EVQLVESGGGLVQPGGSLRLSCAASGFSLNSNEISWVRQAPGKGLEWVSYIGNGGMTHYASWAKGRFTISRDNSKNTLYLQMNSLRAEDTAVYYCAKSVEYTDLYYLNIWGQGTLVTVSS

SEQ ID NO: 8846 - protein, 121 aa, Artificial Sequence
  source: /note="Description of Artificial Sequence: Synthetic polypeptide"
EVQLVESGGGLVQPGGSLRLSCAASGFTISRSYWICWVRQAPGKGLEWVSCIYGDNDITPLYANWAKGRFTISRDNSKNTLYLQMNSLRAEDTAVYYCAKLGYADYAYDLWGQGTLVTVSS

SEQ ID NO: 8847 - protein, 121 aa, Artificial Sequence
  source: /note="Description of Artificial Sequence: Synthetic polypeptide"
EVQLVESGGGLVQPGGSLRLSCTASGFTISRSYWICWVRQAPGKGLEWVACIYGDNDITPLYANWAKGRFPVSTDTSKNTVYLQMNSLRAEDTAVYYCARLGYADYAYDLWGQGTLVTVSS

SEQ ID NO: 8848 - protein, 122 aa, Artificial Sequence
  source: /note="Description of Artificial Sequence: Synthetic polypeptide"
EVQLVESGGGLVQPGGSLRLSCAASGFTFSVGYWICWVRQAPGKGLEWVSCIDAGTSGGTYYATWAKGRFTISRDNSKNTLYLQMNSLRAEDTAVYYCAKGVSSNGYYFKLWGQGTLVTVSS

SEQ ID NO: 8849 - protein, 122 aa, Artificial Sequence
  source: /note="Description of Artificial Sequence: Synthetic polypeptide"
EVQLVESGGGSVQPGGSLRLSCTASGFSFSVGYWICWVRQAPGKGLEWVACIDAGTSGGTYYATWAKGRFTISKDTSKNTVYLQMNSLRAEDTATYYCARGVSSNGYYFKLWGQGTTVTVSS

SEQ ID NO: 8850 - protein, 118 aa, Artificial Sequence
  source: /note="Description of Artificial Sequence: Synthetic polypeptide"
EVQLVESGGGLVQPGGSLRLSCAASGFTFRNDAISWVRQAPGKGLEWVSYISDWGIKYYASWVKGRFTISRDNSKNTLYLQMNSLRAEDTAVYYCAKGAPGAGDNGIWGQGTLVTVSS

SEQ ID NO: 8851 - protein, 118 aa, Artificial Sequence
  source: /note="Description of Artificial Sequence: Synthetic polypeptide"
EVQLVESGGGSVQPGGSLRLSCTVSGIDLRNDAISWVRQAPGKGLEWVSYISDWGIKYYASWVKGRFTISKDTSKNTVYLQMNSLRAEDTATYYCARGAPGAGDNGIWGQGTTVTVSS

SEQ ID NO: 8852 - protein, 122 aa, Artificial Sequence
  source: /note="Description of Artificial Sequence: Synthetic polypeptide"
METGLRWLLLVAVLKGVQCQSVEESGGRLVTPGTPLTLTCTASGFSLSNYVMGWVRQAPGKGLEFIGYIAFGIGPYYATWAKGRFSISSTSSTTVDLTMTSLTPEDTATYFCARGDYSGNNI

SEQ ID NO: 8853 - protein, 120 aa, Artificial Sequence
  source: /note="Description of Artificial Sequence: Synthetic polypeptide"
METGLRWLLLVAVLKGVQCQSVEESGGRLVTPGTPLTLTCTVSGFSLSIYWMTWVRQAPGKGLEWIGVISTDGSAYYATWAKGRFTISKTSSTTVDLRITSPTTEDTATYFCAGGGGMDP

SEQ ID NO: 8854 - protein, 120 aa, Artificial Sequence
  source: /note="Description of Artificial Sequence: Synthetic polypeptide"
METGLRWLLLVAVLKGVQCQSVEESGGRLVTPGTPLTLTCTVSGFSLSIYWMTWVRQAPGRGLEWIGVISTDGTTYYANWAKGRFTISKASSTTVDLRITSPTTEDTATYFCAGGGGMDP

SEQ ID NO: 8855 - protein, 120 aa, Artificial Sequence
  source: /note="Description of Artificial Sequence: Synthetic polypeptide"
METGLRWLLLVAVLKGVQCQSVEESGGRLVTPGTPLTLTCTVSGFSLSIYWMTWVRQAPGKGLEWIGVIASDGSTYYASWAKGRFTISKASSTTVDLKIASPTIEDTATYFCAGGGGMDP

SEQ ID NO: 8856 - protein, 128 aa, Artificial Sequence
  source: /note="Description of Artificial Sequence: Synthetic polypeptide"
METGLRWLLLVAVLKGVQCQSVEESGGRLVTPGTPLTLTCTVSGFSLSHYAMGWVRQAPGKGLEWIGIISSNGVTYYATWASGRFTISKTSTTVDLKITSPTTEDTATYFCARGDDTSIIYYIYAFDL

SEQ ID NO: 8857 - protein, 122 aa, Artificial Sequence
  source: /note="Description of Artificial Sequence: Synthetic polypeptide"
METGLRWLLLVAVLKGVQCQSVEESGGRLVTPGTPLTLTCSVSGFSLNNYVMGWVRQAPGKGLEFIGYIAFGIGPYYASWAKGRFTISSTSSTTVDLKMTSLTPEDTATYFCARGDYSGNDI

SEQ ID NO: 8858 - protein, 124 aa, Artificial Sequence
  source: /note="Description of Artificial Sequence: Synthetic polypeptide"
METGLRWLLLVAVLKGVQCQSVEESGGRLVTPGTPLTLTCTVSGIDLSSYAMGWVRQAPGKGLEYIGYILSSGITYYASWARGRFTISKTSSTTVDLKMTSLTTEDTATYFCARNGNYNSGTDI

SEQ ID NO: 8859 - protein, 124 aa, Artificial Sequence
  source: /note="Description of Artificial Sequence: Synthetic polypeptide"
METGLRWLLLVAVLKGVQCQSVEESGGRLVTPGTPLTLTCTVSGFSLSSYAMGWVRQAPGKGLEYIGYIGSSGITYYTSWARGRFTISKPSSTTVDLKMTSLTTEDTATYFCARNGNYNSGTDI

SEQ ID NO: 8860 - protein, 121 aa, Artificial Sequence
  source: /note="Description of Artificial Sequence: Synthetic polypeptide"
METGLRWLLLVAVLKGVQCQSVEESGGRLVSPGTPLTLTCTVSGIDLSSYGMGWVRQAPGKGLEYIGYMIASGITYYAAWAKGRFTISKTSSTTVDLKITSPTTEDTATYFCARNYYGMDP

SEQ ID NO: 8861 - protein, 125 aa, Artificial Sequence
  source: /note="Description of Artificial Sequence: Synthetic polypeptide"
METGLRWLLLVAVLKGVQCQSLEESGGRLVKPDETLTITCTVSGIDLNNYNMGWVRQAPGKGLEYIGYILGSGITYYATWAKGRFTISKTSSTTVDLKMTSLTTEDTATYFCAGSIYYRGYGMDP

SEQ ID NO: 8862 - protein, 124 aa, Artificial Sequence
  source: /note="Description of Artificial Sequence: Synthetic polypeptide"
METGLRWLLLVAVLKGVQCQSLEESGGRLVTPGGSLTLTCTVSGIDLSSYAMGWVRQAPGKGLEYIGYVLGSGITYYASWARGRFTISKTSSTTVDLKMTSLTTEDTATYFCVRNDNYNSGTDI

SEQ ID NO: 8863 - protein, 124 aa, Artificial Sequence
  source: /note="Description of Artificial Sequence: Synthetic polypeptide"
METGLRWLLLVAVLKGVQCQSVEESGGRLVTPGTPLTLTCTVSGIDLSSYAMGWVRQAPGKGLEYIGYILSSGITYYASWARGRFTISKTSSTTVDLKMTSLTTEDTATYFCVRNGNYNVGTDI

SEQ ID NO: 8864 - protein, 122 aa, Artificial Sequence
  source: /note="Description of Artificial Sequence: Synthetic polypeptide"
METGLRWLLLVAVLKGVQCQSVEESGGRLVTPGTPLTLTCSVSGFSLNNYIMGWVRQAPGKGLEFIGYIAFGIGPYYASWAKGRFTSSSTSSTTVDLKMTSLTPEDTATYFCARGDVSGNDI

SEQ ID NO: 8865 - protein, 121 aa, Artificial Sequence
  source: /note="Description of Artificial Sequence: Synthetic polypeptide"
METGLRWLLLVAVLKGVQCQSVEESGGRLVTPGTPLTLTCTVSGFSLSTYNMGWVRQAPGKGLEYIGYVLGSGITYYASWAKGRFTISKTSTTVDLEITSPTTEDTATYFCARDAGGRASL

SEQ ID NO: 8866 - protein, 124 aa, Artificial Sequence
  source: /note="Description of Artificial Sequence: Synthetic polypeptide"
METGLRWLLLVAVLKGVQCQSVEESGGRLVTPGTPLTLTCTVSGIDLNSYAMGWVRQAPGKGLEYIGYILSSGITYYATWAKGRFTISKTSSTTVDLKMTSLTTEDTATYFCVRNGNYNSGTDI

SEQ ID NO: 8867 - protein, 127 aa, Artificial Sequence
  source: /note="Description of Artificial Sequence: Synthetic polypeptide"
METGLRWLLLVAVFKGVQCQSVEESGGRLVTPGTPLTLTCTVSGFSLSTYTMGWVRQAPGKGLEYIGYISYGGLAYYATWVNGRFTISKTSTTVDLKMTSLTASDTATYFCARAASGAWGHAYGLDL

SEQ ID NO: 8868 - protein, 121 aa, Artificial Sequence
  source: /note="Description of Artificial Sequence: Synthetic polypeptide"
METGLRWLLLVAVLKGVQCQSVEESGGRLVSPGTPLTLTCTVSGIDLSSYGMGWVRQAPGKGLDYIGYMLPSGITYYAAWAKGRFTISKTSSTTVDLKITSPTTEDTATYFCARNYYGMDP

SEQ ID NO: 8869 - protein, 127 aa, Artificial Sequence
  source: /note="Description of Artificial Sequence: Synthetic polypeptide"
METGLRWLLLVAVLKGVQCQSVEESGGRLVTPGTPLTLTCKVSGFSLSSYDMTWVRQAPGKGLEWIGYIWNDGSTAYASWATGRFTISKTSTTVDLKIASPTTEDTATYFCARGPVFATTLGYYFTI

SEQ ID NO: 8870 - protein, 129 aa, Artificial Sequence
  source: /note="Description of Artificial Sequence: Synthetic polypeptide"
METGLRWLLLVAVLKGVQCQEQLEESGGDLVKPGASLTLTCKASGFSFSSGYYMGWVRQAPGKGLQYIGYIDYGGSAYYASWAKGRFTISKTSSTTVTLQMTSLTAADTATFFCTRRDYTGGVVRGLDL

SEQ ID NO: 8871 - protein, 123 aa, Artificial Sequence
  source: /note="Description of Artificial Sequence: Synthetic polypeptide"
METGLRWLLLVAVLKGVQCQSVEESGGRLVTPGTPLTLTCTASGFSLNNYYMTWVRQAPGKGLESIGYFASGGGTYYANWAKGRFTISKTSTTVDLKITSPTTDDTATYFCARGGAYLGTGSL

SEQ ID NO: 8872 - protein, 123 aa, Artificial Sequence
  source: /note="Description of Artificial Sequence: Synthetic polypeptide"
METGLRWLLLVAVLKGVQCQSVEESGGRLVTPGTPLTLTCTVAGFSLSTYGVTWVRQAPGKGLESIGYITYGNIKYYATWAKGRFTISKTSTTVDLKMTSPTTEDTATYFCTRYGGSGIGEDL

SEQ ID NO: 8873 - protein, 125 aa, Artificial Sequence
  source: /note="Description of Artificial Sequence: Synthetic polypeptide"
METGLRWLLLVAVLKGVQCQSVEESGGRLVTPGTPLTLTCTVSGFSLSSYYMAWVRQAPGKGLEWIGYIGFGGSTYYATWAKGRVTISRTSTTVDLQITSPTTEDTATYFCARGVYGDFRTGADL

SEQ ID NO: 8874 - protein, 122 aa, Artificial Sequence
  source: /note="Description of Artificial Sequence: Synthetic polypeptide"
METGLRWLLLVAVLKGVQCQSVEESGGRLVTPGTPLTLTCTVSGLSLSTETINWVRQAPGKGLEWIGYIDSSGGTGYANWARGRFTISKTSTTVDLKITSPTTGDTATYFCARGTITTGMNI

SEQ ID NO: 8875 - protein, 120 aa, Artificial Sequence
  source: /note="Description of Artificial Sequence: Synthetic polypeptide"
METGLRWLLLVAVLKGVQCQSVEESGGRLVTPGTPLTLTCAVSGFSLSVYWMTWVRQAPGKGLEWIGTISTDGITVYATWAKGRFTISKTSSTAVDLKLTSPTTEDTATYFCAGGGGMDP

SEQ ID NO: 8876 - protein, 126 aa, Artificial Sequence
  source: /note="Description of Artificial Sequence: Synthetic polypeptide"
METGLRWLLLVAVFKGVQCQSVEESGGRLVTPGTPLTLTCTVSGFSLSSNTISWVRQAPGKGLEWIGYIWRGVSTYYATWAKGRFTISKTSSTTVDLKITGPTTEDTATYFCARDAGDGGGYSLDL

SEQ ID NO: 8877 - protein, 121 aa, Artificial Sequence
  source: /note="Description of Artificial Sequence: Synthetic polypeptide"
METGLRWLLLVAVLKGVQCQSVEESGGRLVTPGTPLTLTCTVSGFSLSSDNMGWVRQAPGKGLEYIGYITYGGFTYYATWAKGRFTISKTSTTVDLKMTSPTTEDTATYFCAREAGGRANV

SEQ ID NO: 8878 - protein, 120 aa, Artificial Sequence
  source: /note="Description of Artificial Sequence: Synthetic polypeptide"
QQLQESGPGLVKPSETLSLTCAVSGFSLSRYGINWVRQAPGSGLEWIGAIGETGRAYYASWAKSRSTISRDTSKNQVSLKMSSVTAADTAVYFCARGELFNNGWGAFNIWGPGTMVTVSS

SEQ ID NO: 8879 - protein, 119 aa, Artificial Sequence [sequence omitted]

SEQ ID NO: 8880 - protein, 122 aa, Artificial Sequence
  source: /note="Description of Artificial Sequence: Synthetic polypeptide"
QVQLQESGPGLVKPSQTLSLTCTVSGGSISSGDYFWSWIRQLPGKGLEWIGHIHNSGTTYYNPSLKSRVTISVDTSKKQFSLRLSSVTAADTAVYYCARDRGGDYYYGMDVWGQGTTVTVSS

SEQ ID NO: 8881 - protein, 117 aa, Artificial Sequence; identical to SEQ ID NO: 7224
  source: /note="Description of Artificial Sequence: Synthetic polypeptide"

SEQ ID NO: 8882 - protein, 117 aa, Artificial Sequence; identical to SEQ ID NO: 8827
  source: /note="Description of Artificial Sequence: Synthetic polypeptide"

SEQ ID NO: 8883 - protein, 117 aa, Artificial Sequence; identical to SEQ ID NO: 8828
  source: /note="Description of Artificial Sequence: Synthetic polypeptide"

SEQ ID NO: 8884 - protein, 117 aa, Artificial Sequence; identical to SEQ ID NO: 8829
  source: /note="Description of Artificial Sequence: Synthetic polypeptide"

SEQ ID NO: 8885 - protein, 117 aa, Artificial Sequence; identical to SEQ ID NO: 8830
  source: /note="Description of Artificial Sequence: Synthetic polypeptide"

SEQ ID NO: 8886 - protein, 117 aa, Artificial Sequence; identical to SEQ ID NO: 8831
  source: /note="Description of Artificial Sequence: Synthetic polypeptide"

SEQ ID NO: 8887 - protein, 117 aa, Artificial Sequence
  source: /note="Description of Artificial Sequence: Synthetic polypeptide"
EVQLVESGGGLVQPGGSLRLSCAASGFTFSDYGVNWVRQAPGKGLEWVSMIWGDGSTDYDSTLKSRFTISRDNSKNTLYLQMNSLRAEDTAVYYCAREWHHGPVAYWGQGTLVTVSS

SEQ ID NO: 8888 - protein, 117 aa, Artificial Sequence
  source: /note="Description of Artificial Sequence: Synthetic polypeptide"
EVQLVESGGGLVQPGGSLRLSCAVSGFTLSDYGVNWVRQAPGKGLEWLGMIWGDGSTDYDSTLKSRLTISKDNSKSTIYLQMNSLRAEDTAVYYCAREWHHGPVAYWGQGTLVTVSS

SEQ ID NO: 8889 - protein, 117 aa, Artificial Sequence
  source: /note="Description of Artificial Sequence: Synthetic polypeptide"
EVQLVESGGGLVQPGGSLRLSCAASGFTLSDYGVNWVRQAPGKGLEWVSMIWGDGSTDYDSTLKSRFTISKDNSKNTLYLQMNSLRAEDTAVYYCAREWHHGPVAYWGQGTLVTVSS

SEQ ID NO: 8890 - protein, 123 aa, Artificial Sequence; identical to SEQ ID NO: 4364
  source: /note="Description of Artificial Sequence: Synthetic polypeptide"

SEQ ID NO: 8891 - protein, 118 aa, Artificial Sequence
  source: /note="Description of Artificial Sequence: Synthetic polypeptide"
QQVQLVQSGAEVKKPGESLKISCKGSGYSFTSYWIGWVRQMPGKGLEWMGIIYPGDSDTRYSPSFQGQVTISADKSISTAYLQWSSLKASDTAMYYCARQGTHNRKIWGQGTMVTVSS

SEQ ID NO: 8892 - protein, 118 aa, Artificial Sequence
  source: /note="Description of Artificial Sequence: Synthetic polypeptide"
QQVQLVQSGAEVKKPGESLKISCKGSGYSFTSYWIGWVRQMPGKGLEWMGIIYPGDSDTRYSPSFQGQVTISADKSISTAYLQWSSLKASDTAMYYCARLVHRYRAIWGQGTMVTVSS

SEQ ID NO: 8893 - protein, 118 aa, Artificial Sequence
  source: /note="Description of Artificial Sequence: Synthetic polypeptide"
QQVQLVQSGAEVKKPGESLKISCKGSGYSFTSYWIGWVRQMPGKGLEWMGIIYPGDSDTRYSPSFQGQVTISADKSISTAYLQWSSLKASDTAMYYCARPYATDTRIWGQGTMVTVSS

SEQ ID NO: 8894 - protein, 121 aa, Artificial Sequence
  source: /note="Description of Artificial Sequence: Synthetic polypeptide"
EVQLVESGGGLVQPGRSLRLSCAASGFTFSSYAMHWVRQAPGKGLEWVAVISYDGSNKYYADSVKGRFTISRDNSKNTLYLQMNSLRAEDTAVYYCAKDQYSVGATTYDYWGQGTLVTVSS

SEQ ID NO: 8895 - protein, 118 aa, Artificial Sequence
  source: /note="Description of Artificial Sequence: Synthetic polypeptide"
EVQLVESGGGLVQPGRSLRLSCAASGFTFSSYAMHWVRQAPGKGLEWVAVISYDGSNKYYADSVKGRFTISRDNSKNTLYLQMNSLRAEDTAVYYCASKRELHSFDYWGQGTLVTVSS

SEQ ID NO: 8896 - protein, 122 aa, Artificial Sequence
  source: /note="Description of Artificial Sequence: Synthetic polypeptide"
QITLKESGPTLVKPTQTLTLTCTFSGFSLSTSGVGVGWIRQPPGKALEWLALIYWDDDKRYSPSLKSRLTITKDTSKNQVVLTMTNMDPVDTATYYCAHSGSVGYALYFDYWGQGTLVTVSS

SEQ ID NO: 8897 - protein, 126 aa, Artificial Sequence
  source: /note="Description of Artificial Sequence: Synthetic polypeptide"
QVQLVQSGAEVKKPGTSVKVSCKASGYTFTTYTMHWVRQAPGQRLEWMGWINTGNGNTKYSQKFQDRVTITRDTSASTAYMELSSLKFEDTAVYYCAREGVTIFGDHSYYYGMDVWGQGTTVTVSS

SEQ ID NO: 8898 - protein, 123 aa, Artificial Sequence
  source: /note="Description of Artificial Sequence: Synthetic polypeptide"
EVQLVESGGGVVKPGESLRLLCTASGLSFNKYSINWVRQAPGGGLEWVSSIESGSGHIYYADSLEGRFTISRDNAKNSVTLEMNSLRVEDTALYYCVSGPEDKWLLQLYFESWGQGTLVTVSS

SEQ ID NO: 8899 - protein, 118 aa, Artificial Sequence
  source: /note="Description of Artificial Sequence: Synthetic polypeptide"
QVQLQQWGAGLLKPSETLSLTCAVYGGSFSGYYWSWIRQPPGKGLEWIGEINHSGSTNYNPSLKSRVTISVDTSKNQFSLKLSSVTAADTAVYYCARGWRGGSFMDVWGQGTTVTVSS

SEQ ID NO: 8900 - protein, 121 aa, Artificial Sequence
  source: /note="Description of Artificial Sequence: Synthetic polypeptide"
EVQLVESGGGLVQPGGSLRLSCAASGFTFSSYAMTWVRQAPGKGLEWVSVISGGGGTTYYADSVKGRFTISRDNSKNTLYLQMSSLRAEDTAVYYCAKGYSSGWPYYFDYWGQGTLVTVSS

SEQ ID NO: 8901 - protein, 122 aa, Artificial Sequence
  source: /note="Description of Artificial Sequence: Synthetic polypeptide"
QVQLVQSGAEVKKPGESLKISCKGSGYDFNNYWIGWVRQTPEKGLEWMGIVYPGDHPGDYHIRYGPSFQGQVTISADRSITTAYLQWRNLKASDTAMYYCARLGSSKDLDYWGQGTLVTVSS

SEQ ID NO: 8902 - protein, 119 aa, Artificial Sequence
  source: /note="Description of Artificial Sequence: Synthetic polypeptide"
QVQLQESGPGLMKPSQTLSLTCTVSGDSITRGSSYWSWIRQSDGKGLEWIGHIYSGGDTDYNPALKSRVTISADASRGQFLLRLTSMTAADTAVYYCARDRGAYGMDVWGQGTTVTVSS

SEQ ID NO: 8903 - protein, 126 aa, Artificial Sequence
  source: /note="Description of Artificial Sequence: Synthetic polypeptide"
QVQLVESGGGVVQPGRSRRLSCAASGFAFRNYGMHWVRQAPGKGLEWVAFISQNGGKKYYADSVTGRFTVSRDNSKNTLYLQINSLTTDDTAVFYCARSGSGSWGYSDFPGPFDHWGQGSLVTVSS

SEQ ID NO: 8904 - protein, 120 aa, Artificial Sequence
  source: /note="Description of Artificial Sequence: Synthetic polypeptide"
QVQLVESGGGVVQPGGSLKLSCVASGFTFSAYAMNWVRLVPGKGLEWVSGISGNGYSTFYPDSVQGRFTVSRDNSKNTLFLQIDRLTGGDTAIYYCAKVQTTVITPFQNWGQGTLVTVSS

SEQ ID NO: 8905 - protein, 112 aa, Artificial Sequence
  source: /note="Description of Artificial Sequence: Synthetic polypeptide"
EVQLVEIGGGLIQPGRSLRLSCAASGFTFSSYAMHWVRQAPGKGLEWVAVISYDGSKKYYADSVKGRFTISRDNSKNTVHLQMNSLRVEDTAVYYCALLSRPHYGLDVWGQG

SEQ ID NO: 8906 - protein, 96 aa, Artificial Sequence
  source: /note="Description of Artificial Sequence: Synthetic polypeptide"
EVQLVESGGGLVQPGGSLRLSCAASGFFITNNYWGWVRQAPGKGLEWVGYISYSGSTSYNPSLKSRFTISRDTSKNTFYLQMNSLRAEDTAVYYCA

SEQ ID NO: 8907 - protein, 118 aa, Artificial Sequence; identical to SEQ ID NO: 7202
  source: /note="Description of Artificial Sequence: Synthetic polypeptide"

SEQ ID NO: 8908 - protein, 116 aa, Artificial Sequence; identical to SEQ ID NO: 6256
  source: /note="Description of Artificial Sequence: Synthetic polypeptide"

SEQ ID NO: 8909 - protein, 124 aa, Artificial Sequence; identical to SEQ ID NO: 6257
  source: /note="Description of Artificial Sequence: Synthetic polypeptide"

SEQ ID NO: 8910 - protein, 124 aa, Artificial Sequence; identical to SEQ ID NO: 6258
  source: /note="Description of Artificial Sequence: Synthetic polypeptide"

SEQ ID NO: 8911 - protein, 124 aa, Artificial Sequence; identical to SEQ ID NO: 6258
  source: /note="Description of Artificial Sequence: Synthetic polypeptide"

SEQ ID NO: 8912 - protein, 124 aa, Artificial Sequence; identical to SEQ ID NO: 6260
  source: /note="Description of Artificial Sequence: Synthetic polypeptide"

SEQ ID NO: 8913 - protein, 124 aa, Artificial Sequence; identical to SEQ ID NO: 6261
  source: /note="Description of Artificial Sequence: Synthetic polypeptide"

SEQ ID NO: 8914 - protein, 124 aa, Artificial Sequence; identical to SEQ ID NO: 6262
  source: /note="Description of Artificial Sequence: Synthetic polypeptide"

SEQ ID NO: 8915 - protein, 124 aa, Artificial Sequence; identical to SEQ ID NO: 6263
  source: /note="Description of Artificial Sequence: Synthetic polypeptide"

SEQ ID NO: 8916 - protein, 124 aa, Artificial Sequence; identical to SEQ ID NO: 6264
  source: /note="Description of Artificial Sequence: Synthetic polypeptide"

SEQ ID NO: 8917 - protein, 124 aa, Artificial Sequence; identical to SEQ ID NO: 6257
  source: /note="Description of Artificial Sequence: Synthetic polypeptide"

SEQ ID NO: 8918 - protein, 124 aa, Artificial Sequence; identical to SEQ ID NO: 6266
  source: /note="Description of Artificial Sequence: Synthetic polypeptide"

SEQ ID NO: 8919 - protein, 124 aa, Artificial Sequence; identical to SEQ ID NO: 6267
  source: /note="Description of Artificial Sequence: Synthetic polypeptide"

SEQ ID NO: 8920 - protein, 141 aa, Artificial Sequence
  source: /note="Description of Artificial Sequence: Synthetic polypeptide"
MELGLSWIFLLAILKGVQCEVQLVESGGGLVQPGRSLRLSCAASGFTFNDYAMHWVRQAPGKGLEWVSTISWNSGSIGYADSVKGRFTISRDNAKKSLYLQMNSLRAEDTALYYCAKDIQYGNYYYGMDVWGQGTTVTVSS

SEQ ID NO: 8921 - protein, 121 aa, Artificial Sequence [sequence omitted]

SEQ ID NO: 8922 - protein, 120 aa, Artificial Sequence
  source: /note="Description of Artificial Sequence: Synthetic polypeptide"
QVQLKQSRPGPVQPSQSLSITCTVSGFSLPNYGVHWVRQPPGKGLEWLGVIWSGGSTDYNAAFKSRLSISKDNSKSQVFFKMNSLQADDTAIYYCARNFYSKYDYAMDYWGQGTSVTVSS

SEQ ID NO: 8923 - protein, 113 aa, Artificial Sequence
  source: /note="Description of Artificial Sequence: Synthetic polypeptide"
QVQLQQPGSVLVRPGASVKLSCKASGYTFTSYWMHWVKQRPGQGLEWIGNINPNSGSTNYNEKFKGKATLTVDTSSSTAYMDLSSLTSEDSAVYYCARLGDYWGQGTTLTVSS

SEQ ID NO: 8924 - protein, 363 aa, Artificial Sequence
  source: /note="Description of Artificial Sequence: Synthetic polypeptide"
EVQLVESGGGLVQPGGSLRLSCAASGFTFSDYWMYWVRQAPGKGLEWVSEINTNGLITKYPDSVKGRFTISRDNAKNTLYLQMNSLRPEDTAVYYCARSPSGFNRGQGTLVTVSSGGGGSGGGSEVQLVESGGGLVQPGNSLRLSCAASGFTFSSFGMSWVRQAPGKGLEWVSSISGSGSDTLYADSVKGRFTISRDNAKTTLYLQMNSLRPEDTAVYYCTIGGSLSRSSQGTLVTVSSGGGGSGGGSEVQLVESGGGLVQPGGSLRLSCAASGFTFSDYWMYWVRQAPGKGLEWVSEINTNGLITKYPDSVKGRFTISRDNAKNTLYLQMNSLRPEDTAVYYCARSPSGFNRGQGTLVTVSS

SEQ ID NO: 8925 - protein, 118 aa, Artificial Sequence [sequence omitted]

SEQ ID NO: 8926 - protein, 140 aa, Artificial Sequence
  source: /note="Description of Artificial Sequence: Synthetic polypeptide"
MGWSLILLFLVAVATRVLSQVQLQQPGAELVKPGASVKMSCKASGYTFTSYNMHWVKQTPGRGLEWIGAIYPGNGDTSYNQKFKGKATLTADKSSSTAYMQLSSLTSEDSAVYYCARSTYYGGDWYFNVWGAGTTVTVSA

SEQ ID NO: 8927 - protein, 447 aa, Artificial Sequence
  source: /note="Description of Artificial Sequence: Synthetic polypeptide"
EVQLVESGGGLVQPGGSLRLSCAVSGYSITSGYSWNWIRQAPGKGLEWVASITYDGSTNYADSVKGRFTISRDDSKNTFYLQMNSLRAEDTAVYYCARGSHYFGHWHFAVWGQGTLVTVSSGPSVFPLAPSSKSTSGGTAALGCLVKDYFPEPVTVSWNSGALTSGVHTFPAVLQSSGLYSLSSVVTVPSSSLGTQTYICNVNHKPSNTKVDKKAEPKSCDKTHTCPPCPAPELLGGPSVFLFPPKPKDTLMISRTPEVTCVVVDVSHEDPEVKFNWYVDGVEVHNAKTKPREEQYNSTYRVVSVLTVLHQDWLNGKEYKCKVSNKALPAPIEKTISKAKGQPREPQVYTLPPSRDELTKNQVSLTCLVKGFYPSDIAVEWESNGQPENNYKTTPPVLDSDGSFFLYSKLTVDKSRWQQGNVFSCSVMHEALHNHYTQKSLSLSPGK

SEQ ID NO: 8928 - protein, 123 aa, Artificial Sequence
  source: /note="Description of Artificial Sequence: Synthetic polypeptide"
QVQLVESGGGVVQPGRSLRLSCAASGFTFSSYGMHWVRQAPGKELEWVAVISYDGSIKYYADSVKGRFTISRDNSKNTLYLQMNSLRAEDTAVYYCARTGEYSGYDTPASPDWGQGTTVTVSS

SEQ ID NO: 8929 - protein, 113 aa, Artificial Sequence; identical to SEQ ID NO: 3979
  source: /note="Description of Artificial Sequence: Synthetic polypeptide"

SEQ ID NO: 8930 - protein, 112 aa, Artificial Sequence; identical to SEQ ID NO: 4021
  source: /note="Description of Artificial Sequence: Synthetic polypeptide"

SEQ ID NO: 8931 - protein, 112 aa, Artificial Sequence; identical to SEQ ID NO: 4022
  source: /note="Description of Artificial Sequence: Synthetic polypeptide"

SEQ ID NO: 8932 - protein, 113 aa, Artificial Sequence; identical to SEQ ID NO: 3976
  source: /note="Description of Artificial Sequence: Synthetic polypeptide"

SEQ ID NO: 8933 - protein, 113 aa, Artificial Sequence; identical to SEQ ID NO: 3977
  source: /note="Description of Artificial Sequence: Synthetic polypeptide"

SEQ ID NO: 8934 - protein, 112 aa, Artificial Sequence; identical to SEQ ID NO: 4025
  source: /note="Description of Artificial Sequence: Synthetic polypeptide"

SEQ ID NO: 8935 - protein, 113 aa, Artificial Sequence; identical to SEQ ID NO: 3980
  source: /note="Description of Artificial Sequence: Synthetic polypeptide"

SEQ ID NO: 8936 - protein, 113 aa, Artificial Sequence; identical to SEQ ID NO: 3981
  source: /note="Description of Artificial Sequence: Synthetic polypeptide"

SEQ ID NO: 8937 - protein, 113 aa, Artificial Sequence; identical to SEQ ID NO: 3982
  source: /note="Description of Artificial Sequence: Synthetic polypeptide"

SEQ ID NO: 8938 - protein, 113 aa, Artificial Sequence; identical to SEQ ID NO: 3983
  source: /note="Description of Artificial Sequence: Synthetic polypeptide"

SEQ ID NO: 8939 - protein, 113 aa, Artificial Sequence; identical to SEQ ID NO: 3984
  source: /note="Description of Artificial Sequence: Synthetic polypeptide"

SEQ ID NO: 8940 - protein, 113 aa, Artificial Sequence; identical to SEQ ID NO: 3985
  source: /note="Description of Artificial Sequence: Synthetic polypeptide"

SEQ ID NO: 8941 - protein, 113 aa, Artificial Sequence; identical to SEQ ID NO: 3986
  source: /note="Description of Artificial Sequence: Synthetic polypeptide"

SEQ ID NO: 8942 - protein, 113 aa, Artificial Sequence; identical to SEQ ID NO: 3971
  source: /note="Description of Artificial Sequence: Synthetic polypeptide"

SEQ ID NO: 8943 - protein, 113 aa, Artificial Sequence; identical to SEQ ID NO: 3972
  source: /note="Description of Artificial Sequence: Synthetic polypeptide"

SEQ ID NO: 8944 - protein, 113 aa, Artificial Sequence; identical to SEQ ID NO: 3973
  source: /note="Description of Artificial Sequence: Synthetic polypeptide"

SEQ ID NO: 8945 - protein, 123 aa, Artificial Sequence
  source: /note="Description of Artificial Sequence: Synthetic polypeptide"
EVQLVESGGGLVKPGGSLKLSCAASGFAFSIYDMSWVRQTPEKRLEWVAYISSGGGTTYYPDTVKGRFTISRDNAKNTLYLQMSSLKSEDTAMYYCARHSGYGTHWGVLFAYWGQGTLVTVSA

SEQ ID NO: 8946 - protein, 121 aa, Artificial Sequence [sequence omitted]

SEQ ID NO: 8947 - protein, 119 aa, Artificial Sequence [sequence omitted]

SEQ ID NO: 8948 - protein, 119 aa, Artificial Sequence
  source: /note="Description of Artificial Sequence: Synthetic polypeptide"
EVQLLESGGGLVQPGGSLRLSCAASGFTFSIYPMFWVRQAPGKGLEWVSHIGPSGGITKYADSVKGRFTISRDNSKNTLYLQMNSLRAEDTATYYCAREGHNDWYFDLWGRGTLVTVSS

SEQ ID NO: 8949 - protein, 119 aa, Artificial Sequence
  source: /note="Description of Artificial Sequence: Synthetic polypeptide"
EVQLLESGGGLVQPGGSLRLSCAASGFTFSIYPMFWVRQAPGKGLEWVSFIGPSGGITKYADSVKGRFTISRDNSKNTLYLQMNSLRAEDTATYYCAREGHNDWYFDLWGRGTLVTVSS

SEQ ID NO: 8950 - protein, 119 aa, Artificial Sequence
  source: /note="Description of Artificial Sequence: Synthetic polypeptide"
EVQLLESGGGLVQPGGSLRLSCAASGFTFSIYPMFWVRQAPGKGLEWVSLIGPSGGITKYADSVKGRFTISRDNSKNTLYLQMNSLRAEDTATYYCAREGHNDWYFDLWGRGTLVTVSS

SEQ ID NO: 8951 - protein, 119 aa, Artificial Sequence
  source: /note="Description of Artificial Sequence: Synthetic polypeptide"
EVQLLESGGGLVQPGGSLRLSCAASGFTFSIYPMFWVRQAPGKGLEWVSMIGPSGGITKYADSVKGRFTISRDNSKNTLYLQMNSLRAEDTATYYCAREGHNDWYFDLWGRGTLVTVSS

SEQ ID NO: 8952 - protein, 119 aa, Artificial Sequence
  source: /note="Description of Artificial Sequence: Synthetic polypeptide"
EVQLLESGGGLVQPGGSLRLSCAASGFTFSIYPMFWVRQAPGKGLEWVSWIGLSGGITKYADSVKGRFTISRDNSKNTLYLQMNSLRAEDTATYYCAREGHNDWYFDLWGRGTLVTVSS

SEQ ID NO: 8953 - protein, 119 aa, Artificial Sequence
  source: /note="Description of Artificial Sequence: Synthetic polypeptide"
EVQLLESGGGLVQPGGSLRLSCAASGFTFSIYPMFWVRQAPGKGLEWVSWIGSSGGITKYADSVKGRFTISRDNSKNTLYLQMNSLRAEDTATYYCAREGHNDWYFDLWGRGTLVTVSS

SEQ ID NO: 8954 - protein, 119 aa, Artificial Sequence
  source: /note="Description of Artificial Sequence: Synthetic polypeptide"
EVQLLESGGGLVQPGGSLRLSCAASGFTFSIYPMFWVRQAPGKGLEWVSWIGTSGGITKYADSVKGRFTISRDNSKNTLYLQMNSLRAEDTATYYCAREGHNDWYFDLWGRGTLVTVSS

SEQ ID NO: 8955 - protein, 119 aa, Artificial Sequence
  source: /note="Description of Artificial Sequence: Synthetic polypeptide"
EVQLLESGGGLVQPGGSLRLSCAASGFTFSIYPMFWVRQAPGKGLEWVSWIGWSGGITKYADSVKGRFTISRDNSKNTLYLQMNSLRAEDTATYYCAREGHNDWYFDLWGRGTLVTVSS

SEQ ID NO: 8956 - protein, 119 aa, Artificial Sequence
  source: /note="Description of Artificial Sequence: Synthetic polypeptide"
EVQLLESGGGLVQPGGSLRLSCAASGFTFSIYPMFWVRQAPGKGLEWVSWIGPSGGITKYADSVKGRFTISRDNSKNTLYLQMNSLRAEDTATYYCAREGHNDVYFDLWGRGTLVTVSS

SEQ ID NO: 8957 - protein, 119 aa, Artificial Sequence
  source: /note="Description of Artificial Sequence: Synthetic polypeptide"
EVQLLESGGGLVQPGGSLRLSCAASGFTFSIYPMFWVRQAPGKGLEWVSWIGPSGGITKYADSVKGRFTISRDNSKNTLYLQMNSLRAEDTATYYCAREGHNDHYFDLWGRGTLVTVSS

SEQ ID NO: 8958 - protein, 119 aa, Artificial Sequence
  source: /note="Description of Artificial Sequence: Synthetic polypeptide"
EVQLLESGGGLVQPGGSLRLSCAASGFTFSIYPMFWVRQAPGKGLEWVSWIGPSGGITKYADSVKGRFTISRDNSKNTLYLQMNSLRAEDTATYYCAREGHNDSYFDLWGRGTLVTVSS

SEQ ID NO: 8959 - protein, 119 aa, Artificial Sequence
  source: /note="Description of Artificial Sequence: Synthetic polypeptide"
EVQLLESGGGLVQPGGSLRLSCAASGFTFSIYPMFWVRQAPGKGLEWVSWIGPSGGITKYADSVKGRFTISRDNSKNTLYLQMNSLRAEDTATYYCAREGHNDQYFDLWGRGTLVTVSS

SEQ ID NO: 8960 - protein, 119 aa, Artificial Sequence
  source: /note="Description of Artificial Sequence: Synthetic polypeptide"
EVQLLESGGGLVQPGGSLRLSCAASGFTFSIYPMFWVRQAPGKGLEWVSWIGPSGGGTKYADSVKGRFTISRDNSKNTLYLQMNSLRAEDTATYYCAREGHNDWYFDLWGRGTLVTVSS

SEQ ID NO: 8961 - protein, 119 aa, Artificial Sequence
  source: /note="Description of Artificial Sequence: Synthetic polypeptide"
EVQLLESGGGLVQPGGSLRLSCAASGFTFSIYPMFWVRQAPGKGLEWVSWIGPSGGMTKYADSVKGRFTISRDNSKNTLYLQMNSLRAEDTATYYCAREGHNDWYFDLWGRGTLVTVSS

SEQ ID NO: 8962 - protein, 119 aa, Artificial Sequence
  source: /note="Description of Artificial Sequence: Synthetic polypeptide"
EVQLLESGGGLVQPGGSLRLSCAASGFTFSIYPMFWVRQAPGKGLEWVSWIGPSGGNTKYADSVKGRFTISRDNSKNTLYLQMNSLRAEDTATYYCAREGHNDWYFDLWGRGTLVTVSS

SEQ ID NO: 8963 - protein, 119 aa, Artificial Sequence
  source: /note="Description of Artificial Sequence: Synthetic polypeptide"
EVQLLESGGGLVQPGGSLRLSCAASGFTFSIYPMFWVRQAPGKGLEWVSWIGPSGGHTKYADSVKGRFTISRDNSKNTLYLQMNSLRAEDTATYYCAREGHNDWYFDLWGRGTLVTVSS

SEQ ID NO: 8964 - protein, 119 aa, Artificial Sequence
  source: /note="Description of Artificial Sequence: Synthetic polypeptide"
EVQLLESGGGLVQPGGSLRLSCAASGFTFSIYPMFWVRQAPGKGLEWVSWIGPSGGLTKYADSVKGRFTISRDNSKNTLYLQMNSLRAEDTATYYCAREGHNDWYFDLWGRGTLVTVSS

SEQ ID NO: 8965 - protein, 119 aa, Artificial Sequence
  source: /note="Description of Artificial Sequence: Synthetic polypeptide"
EVQLLESGGGLVQPGGSLRLSCAASGFTFSIYPMFWVRQAPGKGLEWVSWIGPSGGFTKYADSVKGRFTISRDNSKNTLYLQMNSLRAEDTATYYCAREGHNDWYFDLWGRGTLVTVSS

SEQ ID NO: 8966 - protein, 119 aa, Artificial Sequence
  source: /note="Description of Artificial Sequence: Synthetic polypeptide"
EVQLLESGGGLVQPGGSLRLSCAASGFTFSIYPMFWVRQAPGKGLEWVSGIGPSGGITKYADSVKGRFTISRDNSKNTLYLQMNSLRAEDTATYYCAREGHNDWYFDLWGRGTLVTVSS

SEQ ID NO: 8967 - protein, 119 aa, Artificial Sequence
  source: /note="Description of Artificial Sequence: Synthetic polypeptide"
EVQLLESGGGLVQPGGSLRLSCAASGFTFSIYPMFWVRQAPGKGLEWVSIIGPSGGITKYADSVKGRFTISRDNSKNTLYLQMNSLRAEDTATYYCAREGHNDWYFDLWGRGTLVTVSS

SEQ ID NO: 8968 - protein, 119 aa, Artificial Sequence
  source: /note="Description of Artificial Sequence: Synthetic polypeptide"
EVQLLESGGGLVQPGGSLRLSCAASGFTFSIYPMFWVRQAPGKGLEWVSDIGPSGGITKYADSVKGRFTISRDNSKNTLYLQMNSLRAEDTATYYCAREGHNDWYFDLWGRGTLVTVSS

SEQ ID NO: 8969 - protein, 119 aa, Artificial Sequence
  source: /note="Description of Artificial Sequence: Synthetic polypeptide"
EVQLLESGGGLVQPGGSLRLSCAASGFTFSIYPMFWVRQAPGKGLEWVSWIGPSGGITKYADSVKGRFTISRDNSKNTLYLQMNSLRAEDTATYYCAREGHNDMYFDLWGRGTLVTVSS

SEQ ID NO: 8970 - protein, 119 aa, Artificial Sequence
  source: /note="Description of Artificial Sequence: Synthetic polypeptide"
EVQLLESGGGLVQPGGSLRLSCAASGFTFSIYPMFWVRQAPGKGLEWVSWIGPSGGITKYADSVKGRFTISRDNSKNTLYLQMNSLRAEDTATYYCAREGHNDLYFDLWGRGTLVTVSS

SEQ ID NO: 8971 - protein, 119 aa, Artificial Sequence
  source: /note="Description of Artificial Sequence: Synthetic polypeptide"
EVQLLESGGGLVQPGGSLRLSCAASGFTFSIYPMFWVRQAPGKGLEWVSWIGPSGGITKYADSVKGRFTISRDNSKNTLYLQMNSLRAEDTATYYCAREGHNDTYFDLWGRGTLVTVSS

SEQ ID NO: 8972 - protein, 119 aa, Artificial Sequence
  source: /note="Description of Artificial Sequence: Synthetic polypeptide"
EVQLLESGGGLVQPGGSLRLSCAASGFTFSIYPMFWVRQAPGKGLEWVSWIGPSGGITKYADSVKGRFTISRDNSKNTLYLQMNSLRAEDTATYYCAREGHNDIYFDLWGRGTLVTVSS

SEQ ID NO: 8973 - protein, 119 aa, Artificial Sequence
  source: /note="Description of Artificial Sequence: Synthetic polypeptide"
EVQLLESGGGLVQPGGSLRLSCAASGFTFSIYPMFWVRQAPGKGLEWVSWIGGSGGITKYADSVKGRFTISRDNSKNTLYLQMNSLRAEDTATYYCAREGHNDWYFDLWGRGTLVTVSS

SEQ ID NO: 8974 - protein, 119 aa, Artificial Sequence
  source: /note="Description of Artificial Sequence: Synthetic polypeptide"
EVQLLESGGGLVQPGGSLRLSCAASGFTFSIYPMFWVRQAPGKGLEWVSWIGPSGGWTKYADSVKGRFTISRDNSKNTLYLQMNSLRAEDTATYYCAREGHNDWYFDLWGRGTLVTVSS

SEQ ID NO: 8975 - protein, 119 aa, Artificial Sequence
  source: /note="Description of Artificial Sequence: Synthetic polypeptide"
EVQLLESGGGLVQPGGSLRLSCAASGFTFSIYPMFWVRQAPGKGLEWVSWIGPSGGYTKYADSVKGRFTISRDNSKNTLYLQMNSLRAEDTATYYCAREGHNDWYFDLWGRGTLVTVSS

SEQ ID NO: 8976 - protein, 119 aa, Artificial Sequence
  source: /note="Description of Artificial Sequence: Synthetic polypeptide"
EVQLLESGGGLVQPGGSLRLSCAASGFTFSIYPMFWVRQAPGKGLEWVSWIGPSGGSTKYADSVKGRFTISRDNSKNTLYLQMNSLRAEDTATYYCAREGHNDWYFDLWGRGTLVTVSS

SEQ ID NO: 8977 - protein, 119 aa, Artificial Sequence
  source: /note="Description of Artificial Sequence: Synthetic polypeptide"
EVQLLESGGGLVQPGGSLRLSCAASGFTFSIYPMFWVRQAPGKGLEWVSWIGPSGGPTKYADSVKGRFTISRDNSKNTLYLQMNSLRAEDTATYYCAREGHNDWYFDLWGRGTLVTVSS

SEQ ID NO: 8978 - protein, 119 aa, Artificial Sequence
  source: /note="Description of Artificial Sequence: Synthetic polypeptide"
EVQLLESGGGLVQPGGSLRLSCAASGFTFSIYPMFWVRQAPGKGLEWVSWIGPSGGVTKYADSVKGRFTISRDNSKNTLYLQMNSLRAEDTATYYCAREGHNDWYFDLWGRGTLVTVSS

SEQ ID NO: 8979 - protein, 119 aa, Artificial Sequence
  source: /note="Description of Artificial Sequence: Synthetic polypeptide"
EVQLLESGGGLVQPGGSLRLSCAASGFTFSIYPMFWVRQAPGKGLEWVSWIGPSGGTTKYADSVKGRFTISRDNSKNTLYLQMNSLRAEDTATYYCAREGHNDWYFDLWGRGTLVTVSS

SEQ ID NO: 8980 - protein, 119 aa, Artificial Sequence; identical to SEQ ID NO: 8959
  source: /note="Description of Artificial Sequence: Synthetic polypeptide"

SEQ ID NO: 8981 - protein, 118 aa, Artificial Sequence
  source: /note="Description of Artificial Sequence: Synthetic polypeptide"
EVQLLESGGGLVQPGGSLRLSCAASGFTFSAYEMKWVRQAPGKGLEWVSVIGLSGGFTFYADSVKGRFTISRDNSKNTLYLQMNSLRAEDTAVYYCATEGDNDAFDIWGQGTTVTVSS

SEQ ID NO: 8982 - protein, 118 aa, Artificial Sequence
  source: /note="Description of Artificial Sequence: Synthetic polypeptide"
EVQLLESGGGLVQPGGSLRLSCAASGFTFSAYEMKWVRQAPGKGLEWVSVIGSSGGFTFYADSVKGRFTISRDNSKNTLYLQMNSLRAEDTAVYYCATEGDNDAFDIWGQGTTVTVSS

SEQ ID NO: 8983 - protein, 118 aa, Artificial Sequence
  source: /note="Description of Artificial Sequence: Synthetic polypeptide"
EVQLLESGGGLVQPGGSLRLSCAASGFTFSAYEMKWVRQAPGKGLEWVSVIGTSGGFTFYADSVKGRFTISRDNSKNTLYLQMNSLRAEDTAVYYCATEGDNDAFDIWGQGTTVTVSS

SEQ ID NO: 8984 - protein, 118 aa, Artificial Sequence
  source: /note="Description of Artificial Sequence: Synthetic polypeptide"
EVQLLESGGGLVQPGGSLRLSCAASGFTFSAYEMKWVRQAPGKGLEWVSVIGWSGGFTFYADSVKGRFTISRDNSKNTLYLQMNSLRAEDTAVYYCATEGDNDAFDIWGQGTTVTVSS

SEQ ID NO: 8985 - protein, 118 aa, Artificial Sequence
  source: /note="Description of Artificial Sequence: Synthetic polypeptide"
EVQLLESGGGLVQPGGSLRLSCAASGFTFSAYEMKWVRQAPGKGLEWVSVIGGSGGFTFYADSVKGRFTISRDNSKNTLYLQMNSLRAEDTAVYYCATEGDNDAFDIWGQGTTVTVSS

SEQ ID NO: 8986 - protein, 119 aa, Artificial Sequence
  source: /note="Description of Artificial Sequence: Synthetic polypeptide"
EVQLLESGGGLVQPGGSLRLSCAASGFTFSIYPMFWVRQAPGKGLEWVSHIGPSGGITKYADSVKGRFTISRDNSKNTLYLQMNSLRAEDTATYYCAREGTYDWYLDLWGRGTLVTVSS

SEQ ID NO: 8987 - protein, 119 aa, Artificial Sequence
  source: /note="Description of Artificial Sequence: Synthetic polypeptide"
EVQLLESGGGLVQPGGSLRLSCAASGFTFSIYPMFWVRQAPGKGLEWVSFIGPSGGITKYADSVKGRFTISRDNSKNTLYLQMNSLRAEDTATYYCAREGTYDWYLDLWGRGTLVTVSS

SEQ ID NO: 8988 - protein, 119 aa, Artificial Sequence
  source: /note="Description of Artificial Sequence: Synthetic polypeptide"
EVQLLESGGGLVQPGGSLRLSCAASGFTFSIYPMFWVRQAPGKGLEWVSLIGPSGGITKYADSVKGRFTISRDNSKNTLYLQMNSLRAEDTATYYCAREGTYDWYLDLWGRGTLVTVSS

SEQ ID NO: 8989 - protein, 119 aa, Artificial Sequence
  source: /note="Description of Artificial Sequence: Synthetic polypeptide"
EVQLLESGGGLVQPGGSLRLSCAASGFTFSIYPMFWVRQAPGKGLEWVSMIGPSGGITKYADSVKGRFTISRDNSKNTLYLQMNSLRAEDTATYYCAREGTYDWYLDLWGRGTLVTVSS

SEQ ID NO: 8990 - protein, 119 aa, Artificial Sequence
  source: /note="Description of Artificial Sequence: Synthetic polypeptide"
EVQLLESGGGLVQPGGSLRLSCAASGFTFSIYPMFWVRQAPGKGLEWVSWIGLSGGITKYADSVKGRFTISRDNSKNTLYLQMNSLRAEDTATYYCAREGTYDWYLDLWGRGTLVTVSS

SEQ ID NO: 8991 - protein, 119 aa, Artificial Sequence
  source: /note="Description of Artificial Sequence: Synthetic polypeptide"
EVQLLESGGGLVQPGGSLRLSCAASGFTFSIYPMFWVRQAPGKGLEWVSWIGSSGGITKYADSVKGRFTISRDNSKNTLYLQMNSLRAEDTATYYCAREGTYDWYLDLWGRGTLVTVSS

SEQ ID NO: 8992 - protein, 119 aa, Artificial Sequence
  source: /note="Description of Artificial Sequence: Synthetic polypeptide"
EVQLLESGGGLVQPGGSLRLSCAASGFTFSIYPMFWVRQAPGKGLEWVSWIGTSGGITKYADSVKGRFTISRDNSKNTLYLQMNSLRAEDTATYYCAREGTYDWYLDLWGRGTLVTVSS

SEQ ID NO: 8993 - protein, 119 aa, Artificial Sequence
  source: /note="Description of Artificial Sequence: Synthetic polypeptide"
EVQLLESGGGLVQPGGSLRLSCAASGFTFSIYPMFWVRQAPGKGLEWVSWIGWSGGITKYADSVKGRFTISRDNSKNTLYLQMNSLRAEDTATYYCAREGTYDWYLDLWGRGTLVTVSS

SEQ ID NO: 8994 - protein, 119 aa, Artificial Sequence
  source: /note="Description of Artificial Sequence: Synthetic polypeptide"
EVQLLESGGGLVQPGGSLRLSCAASGFTFSIYPMFWVRQAPGKGLEWVSWIGPSGGITKYADSVKGRFTISRDNSKNTLYLQMNSLRAEDTATYYCAREGTYDVYLDLWGRGTLVTVSS

SEQ ID NO: 8995 - protein, 119 aa, Artificial Sequence
  source: /note="Description of Artificial Sequence: Synthetic polypeptide"
EVQLLESGGGLVQPGGSLRLSCAASGFTFSIYPMFWVRQAPGKGLEWVSWIGPSGGITKYADSVKGRFTISRDNSKNTLYLQMNSLRAEDTATYYCAREGTYDHYLDLWGRGTLVTVSS

SEQ ID NO: 8996 - protein, 119 aa, Artificial Sequence
  source: /note="Description of Artificial Sequence: Synthetic polypeptide"
EVQLLESGGGLVQPGGSLRLSCAASGFTFSIYPMFWVRQAPGKGLEWVSWIGPSGGITKYADSVKGRFTISRDNSKNTLYLQMNSLRAEDTATYYCAREGTYDSYLDLWGRGTLVTVSS

SEQ ID NO: 8997 - protein, 119 aa, Artificial Sequence
  source: /note="Description of Artificial Sequence: Synthetic polypeptide"
EVQLLESGGGLVQPGGSLRLSCAASGFTFSIYPMFWVRQAPGKGLEWVSWIGPSGGITKYADSVKGRFTISRDNSKNTLYLQMNSLRAEDTATYYCAREGTYDQYLDLWGRGTLVTVSS

SEQ ID NO: 8998 - protein, 119 aa, Artificial Sequence
  source: /note="Description of Artificial Sequence: Synthetic polypeptide"
EVQLLESGGGLVQPGGSLRLSCAASGFTFSIYPMFWVRQAPGKGLEWVSWIGPSGGGTKYADSVKGRFTISRDNSKNTLYLQMNSLRAEDTATYYCAREGTYDWYLDLWGRGTLVTVSS

SEQ ID NO: 8999 - protein, 119 aa, Artificial Sequence
  source: /note="Description of Artificial Sequence: Synthetic polypeptide"
EVQLLESGGGLVQPGGSLRLSCAASGFTFSIYPMFWVRQAPGKGLEWVSWIGPSGGMTKYADSVKGRFTISRDNSKNTLYLQMNSLRAEDTATYYCAREGTYDWYLDLWGRGTLVTVSS

SEQ ID NO: 9000 - protein, 119 aa, Artificial Sequence
  source: /note="Description of Artificial Sequence: Synthetic polypeptide"
EVQLLESGGGLVQPGGSLRLSCAASGFTFSIYPMFWVRQAPGKGLEWVSWIGPSGGNTKYADSVKGRFTISRDNSKNTLYLQMNSLRAEDTATYYCAREGTYDWYLDLWGRGTLVTVSS

SEQ ID NO: 9001 - protein, 119 aa, Artificial Sequence
  source: /note="Description of Artificial Sequence: Synthetic polypeptide"
EVQLLESGGGLVQPGGSLRLSCAASGFTFSIYPMFWVRQAPGKGLEWVSWIGPSGGHTKYADSVKGRFTISRDNSKNTLYLQMNSLRAEDTATYYCAREGTYDWYLDLWGRGTLVTVSS

SEQ ID NO: 9002 - protein, 119 aa, Artificial Sequence
  source: /note="Description of Artificial Sequence: Synthetic polypeptide"
EVQLLESGGGLVQPGGSLRLSCAASGFTFSIYPMFWVRQAPGKGLEWVSWIGPSGGLTKYADSVKGRFTISRDNSKNTLYLQMNSLRAEDTATYYCAREGTYDWYLDLWGRGTLVTVSS

SEQ ID NO: 9003 - protein, 119 aa, Artificial Sequence
  source: /note="Description of Artificial Sequence: Synthetic polypeptide"
EVQLLESGGGLVQPGGSLRLSCAASGFTFSIYPMFWVRQAPGKGLEWVSWIGPSGGFTKYADSVKGRFTISRDNSKNTLYLQMNSLRAEDTATYYCAREGTYDWYLDLWGRGTLVTVSS

SEQ ID NO: 9004 - protein, 119 aa, Artificial Sequence
  source: /note="Description of Artificial Sequence: Synthetic polypeptide"
EVQLLESGGGLVQPGGSLRLSCAASGFTFSIYPMFWVRQAPGKGLEWVSGIGPSGGITKYADSVKGRFTISRDNSKNTLYLQMNSLRAEDTATYYCAREGTYDWYLDLWGRGTLVTVSS

SEQ ID NO: 9005 - protein, 119 aa, Artificial Sequence
  source: /note="Description of Artificial Sequence: Synthetic polypeptide"
EVQLLESGGGLVQPGGSLRLSCAASGFTFSIYPMFWVRQAPGKGLEWVSIIGPSGGITKYADSVKGRFTISRDNSKNTLYLQMNSLRAEDTATYYCAREGTYDWYLDLWGRGTLVTVSS

SEQ ID NO: 9006 - protein, 119 aa, Artificial Sequence
  source: /note="Description of Artificial Sequence: Synthetic polypeptide"
EVQLLESGGGLVQPGGSLRLSCAASGFTFSIYPMFWVRQAPGKGLEWVSDIGPSGGITKYADSVKGRFTISRDNSKNTLYLQMNSLRAEDTATYYCAREGTYDWYLDLWGRGTLVTVSS

SEQ ID NO: 9007 - protein, 119 aa, Artificial Sequence
  source: /note="Description of Artificial Sequence: Synthetic polypeptide"
EVQLLESGGGLVQPGGSLRLSCAASGFTFSIYPMFWVRQAPGKGLEWVSWIGPSGGITKYADSVKGRFTISRDNSKNTLYLQMNSLRAEDTATYYCAREGTYDMYLDLWGRGTLVTVSS

SEQ ID NO: 9008 - protein, 119 aa, Artificial Sequence
  source: /note="Description of Artificial Sequence: Synthetic polypeptide"
EVQLLESGGGLVQPGGSLRLSCAASGFTFSIYPMFWVRQAPGKGLEWVSWIGPSGGITKYADSVKGRFTISRDNSKNTLYLQMNSLRAEDTATYYCAREGTYDLYLDLWGRGTLVTVSS

SEQ ID NO: 9009 - protein, 119 aa, Artificial Sequence
  source: /note="Description of Artificial Sequence: Synthetic polypeptide"
EVQLLESGGGLVQPGGSLRLSCAASGFTFSIYPMFWVRQAPGKGLEWVSWIGPSGGITKYADSVKGRFTISRDNSKNTLYLQMNSLRAEDTATYYCAREGTYDTYLDLWGRGTLVTVSS

SEQ ID NO: 9010 - protein, 119 aa, Artificial Sequence
  source: /note="Description of Artificial Sequence: Synthetic polypeptide"
EVQLLESGGGLVQPGGSLRLSCAASGFTFSIYPMFWVRQAPGKGLEWVSWIGPSGGITKYADSVKGRFTISRDNSKNTLYLQMNSLRAEDTATYYCAREGTYDIYLDLWGRGTLVTVSS

SEQ ID NO: 9011 - protein, 119 aa, Artificial Sequence
  source: /note="Description of Artificial Sequence: Synthetic polypeptide"
EVQLLESGGGLVQPGGSLRLSCAASGFTFSIYPMFWVRQAPGKGLEWVSWIGGSGGITKYADSVKGRFTISRDNSKNTLYLQMNSLRAEDTATYYCAREGTYDWYLDLWGRGTLVTVSS

SEQ ID NO: 9012 - protein, 119 aa, Artificial Sequence
  source: /note="Description of Artificial Sequence: Synthetic polypeptide"
EVQLLESGGGLVQPGGSLRLSCAASGFTFSIYPMFWVRQAPGKGLEWVSWIGPSGGWTKYADSVKGRFTISRDNSKNTLYLQMNSLRAEDTATYYCAREGTYDWYLDLWGRGTLVTVSS

SEQ ID NO: 9013 - protein, 119 aa, Artificial Sequence
  source: /note="Description of Artificial Sequence: Synthetic polypeptide"
EVQLLESGGGLVQPGGSLRLSCAASGFTFSIYPMFWVRQAPGKGLEWVSWIGPSGGYTKYADSVKGRFTISRDNSKNTLYLQMNSLRAEDTATYYCAREGTYDWYLDLWGRGTLVTVSS

SEQ ID NO: 9014 - protein, 119 aa, Artificial Sequence
  source: /note="Description of Artificial Sequence: Synthetic polypeptide"
EVQLLESGGGLVQPGGSLRLSCAASGFTFSIYPMFWVRQAPGKGLEWVSWIGPSGGSTKYADSVKGRFTISRDNSKNTLYLQMNSLRAEDTATYYCAREGTYDWYLDLWGRGTLVTVSS

SEQ ID NO: 9015 - protein, 119 aa, Artificial Sequence
  source: /note="Description of Artificial Sequence: Synthetic polypeptide"
EVQLLESGGGLVQPGGSLRLSCAASGFTFSIYPMFWVRQAPGKGLEWVSWIGPSGGPTKYADSVKGRFTISRDNSKNTLYLQMNSLRAEDTATYYCAREGTYDWYLDLWGRGTLVTVSS

SEQ ID NO: 9016 - protein, 119 aa, Artificial Sequence
  source: /note="Description of Artificial Sequence: Synthetic polypeptide"
EVQLLESGGGLVQPGGSLRLSCAASGFTFSIYPMFWVRQAPGKGLEWVSWIGPSGGVTKYADSVKGRFTISRDNSKNTLYLQMNSLRAEDTATYYCAREGTYDWYLDLWGRGTLVTVSS

SEQ ID NO: 9017 - protein, 119 aa, Artificial Sequence
  source: /note="Description of Artificial Sequence: Synthetic polypeptide"
EVQLLESGGGLVQPGGSLRLSCAASGFTFSIYPMFWVRQAPGKGLEWVSWIGPSGGTTKYADSVKGRFTISRDNSKNTLYLQMNSLRAEDTATYYCAREGTYDWYLDLWGRGTLVTVSS

SEQ ID NO: 9018 - protein, 119 aa, Artificial Sequence; identical to SEQ ID NO: 8997
  source: /note="Description of Artificial Sequence: Synthetic polypeptide"

SEQ ID NO: 9019 - protein, 77 aa, Artificial Sequence
  source: /note="Description of Artificial Sequence: Synthetic polypeptide"
VVSGGSVSSGSYYWSWIRQPPGKGLEWIGYIYYSGSTNYNPSLKSRVTISVDTSKNQFSLKLSSVTAADTAVYYCAR

SEQ ID NO: 9020 - DNA, 561 bp, Artificial Sequence
  source: /note="Description of Artificial Sequence: Synthetic polynucleotide"
aattccctggaatcgattcccagttcctcacattcagtcagcactgaacacggacccctcaccatgaactccgggctcagcctgattttccttgtccttgttttaaaaggtgtccaatgtgaagtgattctggtggagtctgggggagccttagtggagcctggagggtccctgaaactctcctgttcagcctctcactttcagtaactatggattgccatgtcttgggttcgtcagactccggagaagaggctggagtgggtcgcagccattagtgatcatagtactaacacctactatccagacagtgtgaaggggcgattcactatctccagagacaatgccaagaacaccctgtacctacaaatgaacagtctgaggtctgaggacacggccatttattactgtgaaagaaagtacggtggtgactacgacccctttggccaaggcaccactctcacagtctcctcagactattgggccaaaacaacagccccatcggtctatccactggcccctgtgtgtggagatacaactggctcctcggtgactctaggatgc

SEQ ID NO: 9021 - protein, 121 aa, Artificial Sequence
  source: /note="Description of Artificial Sequence: Synthetic polypeptide"
EVQLLESGGGLVQPGGSLRLSCAASGFTFSNAWMSWVRQAPGKGLEWVSSISVGGHRTYYADSVKGRSTISRDNSKNTLYLQMNSLRAEDTAVYYCARIRVGPSGGAFDYWGQGTLVTVSS

SEQ ID NO: 9022 - protein, 125 aa, Artificial Sequence
  source: /note="Description of Artificial Sequence: Synthetic polypeptide"
EVQLVESGGGLVQPGGSLRLSCAASGYSFTGHWMNWVRQAPGKGLEWVGIMIHPSDSETRYNQKFKDIRFTISVDKSKNTLYLQMNSLRAEDTAVYYCARIGIYFYGTTYFDYIWGQGTLVTVSS

SEQ ID NO: 9023 - protein, 139 aa, Artificial Sequence
  source: /note="Description of Artificial Sequence: Synthetic polypeptide"
MRVLILLWLFTAFPGILSDVQLQESGPVLVKPSQSLSLTCTVTGYSITSDHAWSWIRQFPGNKLEWMGYISYSGITTYNPSLKSRISITRDTRDTSNQFFLQLNSVTTGDTSTYYCARSLARTAMDYWGQGTTSVTVSS

SEQ ID NO: 9024 - protein, 121 aa, Artificial Sequence
  source: /note="Description of Artificial Sequence: Synthetic polypeptide"
VQLLESGGGLVQPGGSLRLSCAASGFTFSSYAMSWVRQAPGKGLEWVSGITGSGGSTYYADSVKGRFTISRDNSKNTLYLQMNSLRAEDTAVYYCAKDPGTTVIMSWFDPWGQGTLVTVSS

SEQ ID NO: 9025 - protein, 122 aa, Artificial Sequence
  source: /note="Description of Artificial Sequence: Synthetic polypeptide"
EVQLVESGGGLVQPGGSLRLSCAASGYSFTGHWMNWVRQAPGKGLEWVGMIHPSDSETRYNQKFKDRFTISVDKSKNTLYLQMNSLRAEDTAVYYCARGIYFYGTFFYFDYWGQGTLVTVSS

SEQ ID NO: 9026 - protein, 119 aa, Artificial Sequence
  source: /note="Description of Artificial Sequence: Synthetic polypeptide"
QVQLVQSGAEVKKPGSSVKVSCKASGGTFSSYGISWVRQAPGQGLEWMGGIIPIFGTANYAQKFQGRVTITADESTSTAYMELSSLRSEDTAVYYCARYDGIYGELDFWGQGTLVTVSS

SEQ ID NO: 9027 - protein, 119 aa, Artificial Sequence
  source: /note="Description of Artificial Sequence: Synthetic polypeptide"
EVQLVESGGGLVQPGGSLRLSCAASGFTFSPFAMSWVRQAPGKGLEWVAKISPGGSWTYYSDTVTGRFTISRDNAKNSLYLQMNSLRAEDTAVYYCARQLWGYYALDIWGQGTTVTVSS

SEQ ID NO: 9028 - protein, 119 aa, Artificial Sequence
  source: /note="Description of Artificial Sequence: Synthetic polypeptide"
EVQLVESGGDVVQPGRSLRLSCSASGFIFSKYDMSWVRQAPGKGLEWVAYISHGGAGTYYPDSVKGRFTISRDNSKNTLFLQMDSLRPEDTAVYYCARGGVYKGYFDEWGQGTLVTVSS

SEQ ID NO: 9029 - protein, 119 aa, Artificial Sequence
  source: /note="Description of Artificial Sequence: Synthetic polypeptide"
EVQLVESGGGVVQPGRSLRLSCSASGFIFSKYDMSWVRQAPGKGLEWVAYISHGGAGTYYPDTVKGRFTISRDNSKNTLFLQMDSLRAEDTAVYYCARGGVYKGYFDEWGQGTLVTVSS

SEQ ID NO: 9030 - protein, 119 aa, Artificial Sequence
  source: /note="Description of Artificial Sequence: Synthetic polypeptide"
EVQLVESGGGVVQPGRSLRLSCSASGFIFSKYDMSWVRQAPGKGLEWVAYISHGGAGTYYPDSVKGRFTISRDNSKNTLFLQMDSLRPEDTAVYYCARGGVYKGYFDEWGQGTLVTVSS

SEQ ID NO: 9031 - protein, 119 aa, Artificial Sequence
  source: /note="Description of Artificial Sequence: Synthetic polypeptide"
EVQLVESGGGVVQPGRSLRLSCSASGFIFSKYDMSWVRQAPGKGLEWVAYISHGGAGTYYPDSVKGRFTISRDNSKNTLFLQMDSLRAEDTAVYYCARGGVYKGYFDEWGQGTPVTVSS

SEQ ID NO: 9032 - protein, 119 aa, Artificial Sequence
  source: /note="Description of Artificial Sequence: Synthetic polypeptide"
EVQLVESGGGVVQPGRGLRLSCSASGFIFSRYDMSWVRQAPGKGLEWVAYISHGGAGTYYPDTVKGRFTISRDNSRNTLFLQMDSLRAEDTAVYYCARGGVYKGYFDYWGQGTPVTVSS

SEQ ID NO: 9033 - protein, 119 aa, Artificial Sequence
  source: /note="Description of Artificial Sequence: Synthetic polypeptide"
EVQLVESGGGVVQPGRSLRLSCSASGFIFSRYDMSWVRQAPGKGLEWVAYVSHGGAGTYYPDTVKGRFTISRDNSKNTLFLQMDSLRAEDTAVYYCARGGVYKGYFDYWGQGTPVTVSS

SEQ ID NO: 9034 - protein, 119 aa, Artificial Sequence
  source: /note="Description of Artificial Sequence: Synthetic polypeptide"
EVQLVESGGGVVQPGRSLRLSCSASGFIFSRYDMSWVRQAPGKGLEWVAYISHGGAGTYYPDTVKGRFTISRDNSKNTLFLQMDSLRAEDTAVYYCARGGVYKGYFDYWGQGTPVTVSS

SEQ ID NO: 9035 - protein, 119 aa, Artificial Sequence
  source: /note="Description of Artificial Sequence: Synthetic polypeptide"
EVQLVESGGGVVQPGRSLRLSCSSSGFIFSRYDMSWVRQAPGKGLEWVAYISHGGAGTYYPDTVKGRFTISRDNSKNTLFLQMDSLRAEDTAVYYCARGGVYKGYFDEWGQGTPVTVSS

SEQ ID NO: 9036 - protein, 119 aa, Artificial Sequence
  source: /note="Description of Artificial Sequence: Synthetic polypeptide"
EVQLVESGGGVVQPGRSLRLSCSASGFIFSRYDMSWVRQAPGKGLEWVAYISHGGAGTYYPDTVKGRFTISRDNSKNTLFLQMDSLRAEDTAVYYCARGGVYKGYFDVWGQGTPVTVSS

SEQ ID NO: 9037 - protein, 119 aa, Artificial Sequence
  source: /note="Description of Artificial Sequence: Synthetic polypeptide"
EVQLVESGGGVVQPGRSLRLGCSASGFIFSRYDMSWVRQAPGKGLEWVAYISHGGAGTYYPDTVKGRFTISRDNSKNTLFLQMDSLRAEDTAVYYCARGGVYKGYFDVWGQGTPVTVSS

SEQ ID NO: 9038 - protein, 119 aa, Artificial Sequence
  source: /note="Description of Artificial Sequence: Synthetic polypeptide"
EVQLVESGGGVVQPGRSLRLSCSSSGFIFSRYDMSWVRQAPGKGLEWVAYISHGGAGTYYPDTVKGRFTISRDNSKNTLFLQMDSLRAEDTGVYYCARGGVYKGYFDVWGQGTPVTVSS

SEQ ID NO: 9039 - protein, 119 aa, Artificial Sequence
  source: /note="Description of Artificial Sequence: Synthetic polypeptide"
EVQLVESGGGVVQPGRSLRLSCSSSGFIFSRYDMSWVRQAPGKGLEWVAYISHGGAGTYYPDTVKGRFTISRDNSKNTLFLQMNSLRAEDTGVYYCARGGVYKGYFDVWGQGTPVTVSS

SEQ ID NO: 9040 - protein, 119 aa, Artificial Sequence
  source: /note="Description of Artificial Sequence: Synthetic polypeptide"
EVQLVESGGGVVQPGRSLRLSCSASGFIFSRYDMSWVRQAPGKGLEWVAYISHGGAGTYYPDTVKGRFTISRDNSKNTLFLQMDSLRAEDTGVYYCARGGVYKGYFDVWGQGTPVTVSS

SEQ ID NO: 9041 - protein, 119 aa, Artificial Sequence
  source: /note="Description of Artificial Sequence: Synthetic polypeptide"
EVQLVESGGDVVQPGRSLRLSCSASGFIFSKYDMSWVRQAPGKGLEWVAYISHGGAGTYYPDTAKGRFTISRDNSKNTLFLQMDSLRAEDTGVYYCARGGVYKGYFDVWGQGTPVTVSS

SEQ ID NO: 9042 - protein, 119 aa, Artificial Sequence
  source: /note="Description of Artificial Sequence: Synthetic polypeptide"
EVQLVESGGDVVQPGRSLRLSCSASGFIFSKYGMSWVRQAPGKGLEWVAYISHGGAGTYYPDTVKGRFTISRDNSKNTLFLQMDSLRAEDTGVYYCARGGVYKGYFDVWGQGTPVTVSS

SEQ ID NO: 9043 - protein, 119 aa, Artificial Sequence
  source: /note="Description of Artificial Sequence: Synthetic polypeptide"
EVQLVESGGDVVQPGRSLRLSCSAGGFIFSKYDMSWVRQAPGKGLEWVAYISHGGAGTYYPDTVKGRFTISRDNSKNTLFLQMDSLRAEDTGVYYCARGGVYKGYFDVWGQGTPVTVSS

SEQ ID NO: 9044 - protein, 119 aa, Artificial Sequence
  source: /note="Description of Artificial Sequence: Synthetic polypeptide"
EVQLVESGGDVVQPGRSLRLSCSASGFIFSKYDMSWVRQAPGKGLEWVAYISHGGAGTYYPDTVKGRFTISRDNSKNTLFLQMDSLRAEDTGVYYCARGGVYKGYFDVWGQGTPVTVSS

SEQ ID NO: 9045 - protein, 119 aa, Artificial Sequence
  source: /note="Description of Artificial Sequence: Synthetic polypeptide"
EVQLVESGGDVVQPGRSLRLSCSASGFIFSKYDMGWVRQAPGKGLEWVAYISHGGAGTYYPDTVKGRFTISRDNSKNTLFLQMDSLRAEDTGVYYCARGGVYKGYFDVWGQGTPVTVSS

SEQ ID NO: 9046 - protein, 119 aa, Artificial Sequence
  source: /note="Description of Artificial Sequence: Synthetic polypeptide"
EVQLVESGGDVVQPGRSLRLSCSASGFIFSKYDMSWVHQAPGKGLEWVAYISHGGAGTYYPDTVKGRFTISRDNSKNTLFLQMDSLRAEDTAVYYCARGGVYKGYFDVWGQGTPVTVSS

SEQ ID NO: 9047 - protein, 119 aa, Artificial Sequence
  source: /note="Description of Artificial Sequence: Synthetic polypeptide"
EVQLVESGGDVVQPGRSLRLSCSASGFIFSKYDMSWVRQAPGKGLEWVAYISHGGAGTYYPDTVKGRFTISRDNSKNTLFLQMDSLRPEDTAVYYCARGGVYKGYFDVWGQGTPVTVSS

SEQ ID NO: 9048 - protein, 119 aa, Artificial Sequence
  source: /note="Description of Artificial Sequence: Synthetic polypeptide"
EVQLVESGGDVVQPGRSLRLSCSASGFIFSKYDMSWVRQAPGKGLEWVAYISHGGAGTYYPDTVKGRFTISRDNSKNTLFLQMDSLRPEDTGVYYCARGGVYKGYFDVWGQGTPVTVSS

SEQ ID NO: 9049 - protein, 119 aa, Artificial Sequence
  source: /note="Description of Artificial Sequence: Synthetic polypeptide"
EVQLVESGGDVVQPGRSLRLSCSASGFIFSKYDMSWVRQAPGKGLEWVAYISHGGAGTYYPDTVKGRFTISRDNSKNTLFLQMDSLRPEDTGVYFCARGGVYKGYFDQWGQGTPVTVSS

SEQ ID NO: 9050 - protein, 119 aa, Artificial Sequence
  source: /note="Description of Artificial Sequence: Synthetic polypeptide"
EVQLVESGGDVVQPGRSLRLSCSASGFIFSKYDMSWVRQAPGKGLEWVAYISHGGAGTYYPDTVKGRFTISRDNSKNTLFLQMDSLRPEDTAVYFCARGGVYKGYFDVWGQGTPVTVSS

SEQ ID NO: 9051 - protein, 119 aa, Artificial Sequence
  source: /note="Description of Artificial Sequence: Synthetic polypeptide"
EVQLVESGGGVVQPGRSLRLSCSSSGFIFSSYDMSWVRQAPGKGLEWVAYISSGGGGTYYPDTVKGRFTISRDNSKNTLFLQMDSLRPEDTGVYFCARGGVTKGYFDVWGQGTPVTVSS

SEQ ID NO: 9052 - protein, 119 aa, Artificial Sequence
  source: /note="Description of Artificial Sequence: Synthetic polypeptide"
EVQLVESGGGVVQPGRSLRLSCSSSGFIFSKYDMSWVRQAPGKGLEWVAYISHGGAGTYYPDTVKGRFTISRDNSKNTLFLQMDSLRPEDTAVYYCARGGVYKGYFDVWGQGTPVTVSS

SEQ ID NO: 9053 - protein, 119 aa, Artificial Sequence
  source: /note="Description of Artificial Sequence: Synthetic polypeptide"
EVQLVESGGGVVQPGRSLRLSCSSSGFIFSKYDMSWVRQAPGKGLEWVAYISHGGAGTYYPDTVKGRFTISRDNSKNTLFLQMDSLRPEDTAVYYCARGGVYKGYFDVWGQGTPVTVSL

SEQ ID NO: 9054 - protein, 119 aa, Artificial Sequence
  source: /note="Description of Artificial Sequence: Synthetic polypeptide"
EVQLVESGGGVVQPGRSLRLSCSSSGFIFSKYDMSWVRQAPGKGLEWVAYISHGGAGTYYPDSVKGRFTISRDNSKNTLFLQMDSLRAEDTAVYYCVRGGVYKGYFDVWGQGTPVTVSS

SEQ ID NO: 9055 - protein, 119 aa, Artificial Sequence; identical to SEQ ID NO: 8501
  source: /note="Description of Artificial Sequence: Synthetic polypeptide"

SEQ ID NO: 9056 - protein, 119 aa, Artificial Sequence
  source: /note="Description of Artificial Sequence: Synthetic polypeptide"
EVQLVESGGGVVQPGRSLRLSCSASGFIFSRYDMSWVRQAPGKGLEWVAYISHGGAGTYYPDSVKGRFTISRDNSKNTLFLQMDSPRAEDTGVYYCARGGVYKGYFDVWGQGTPVTVSS

SEQ ID NO: 9057 - protein, 119 aa, Artificial Sequence
  source: /note="Description of Artificial Sequence: Synthetic polypeptide"
EVQLVESGGGVVQPGRSLRLSCSASGFIFSRYDMSWVRQAPGKGLEWVAYISHGGAGTYYPDSVKGRFTISRDNSKNTLFLQMDSLRAEDTGVYYCARGGVYKGYFDVWGQGTPVTVSS

SEQ ID NO: 9058 - protein, 119 aa, Artificial Sequence; identical to SEQ ID NO: 8497
  source: /note="Description of Artificial Sequence: Synthetic polypeptide"

SEQ ID NO: 9059 - protein, 119 aa, Artificial Sequence
  source: /note="Description of Artificial Sequence: Synthetic polypeptide"
EVQLVESGGGVVQPGRSLRLSCSASGFIFSRYDMSRVRLAPGKGLEWVAYISHGGAGTYHPDSVKGRFTISRDNSKNTLFLQMDSLRPEDTAVYYCARGGVYKGYFDVWGQGTPVTVSS

SEQ ID NO: 9060 - protein, 119 aa, Artificial Sequence; identical to SEQ ID NO: 9030
  source: /note="Description of Artificial Sequence: Synthetic polypeptide"

SEQ ID NO: 9061 - protein, 119 aa, Artificial Sequence
  source: /note="Description of Artificial Sequence: Synthetic polypeptide"
EVQLVESGGDVVQPGRSLRLSCSASGFIFSKYDMSWVRQAPGKGLEWVAYIGHGGAGTYYPDTVKGRFTISRNNSKNTLFLQMDSLRPEDTAVYYCARGGVYKGYFDEWGQGTLVTVSS

SEQ ID NO: 9062 - protein, 119 aa, Artificial Sequence
  source: /note="Description of Artificial Sequence: Synthetic polypeptide"
EVQLVESGGGVVQPGRSLRLSCSSSGFIFSRYDMSWVRQAPGKGLEWVAYISHGGAGTYYPDSVKGRFTISRDNSKNTLFLQMDSLRPEDTAVYYCARGGVYKGYFDEWGQGTLVTVSS

SEQ ID NO: 9063 - protein, 119 aa, Artificial Sequence
  source: /note="Description of Artificial Sequence: Synthetic polypeptide"
EVQLVESGGGVVQPGRSLRLSCSASGFIFSRYDMSWVRQAPGKGLEWVAYISHGGAGTYYPDSVKGRFTISRDNSKNTLFLQMDSLRPEDTAVYYCARGGVYKGYFDLWGQGTPVTVSS

SEQ ID NO: 9064 - protein, 119 aa, Artificial Sequence
  source: /note="Description of Artificial Sequence: Synthetic polypeptide"
EVQLVESGGGVVQPGRSLRLSCASSGFIFSRYDMSWVRQAPGKGLEWVAYISHGGAGTYYPDSVKGRFTISRDNSKNTLFLQMDSLRAEDTGVYYCARGGVYKGYFDVWGQGTPVTVSS

SEQ ID NO: 9065 - protein, 119 aa, Artificial Sequence
  source: /note="Description of Artificial Sequence: Synthetic polypeptide"
EVQLVESGGGVVQPGRSLRLSCASSGFIFSRYDMSWVRQAPGKGLEWVAYISHGGAGTYYPDSVKGRFTISRDNSKNTLFLQMDSLRPEDTGVYYCARGGVYKGYFDVWGQGTPVTVSS

SEQ ID NO: 9066 - protein, 119 aa, Artificial Sequence
  source: /note="Description of Artificial Sequence: Synthetic polypeptide"
EVQLVESGGGVVQPGRSLRLSCSSSGFIFSRYDMSWVRQAPGKGLEWVAYISHGGAGTYYPDSVKGRFTISRDNSKNTLFLQMDSLRPEDTGVYYCARGGVYKGYFDVWGQGTPVTVSS

SEQ ID NO: 9067 - protein, 119 aa, Artificial Sequence
  source: /note="Description of Artificial Sequence: Synthetic polypeptide"
EVQLVESGGGVVQPGRSLRLSCSSSGFIFSRYDMSWVRQAPGKGPEWVAYISHGGAGTYYPDSVKGRFTISRDNSKNTLFLQMDSLRPEDTGVYYCARGGVYKGYFDEWGQGTPVTVSS

SEQ ID NO: 9068 - protein, 119 aa, Artificial Sequence
  source: /note="Description of Artificial Sequence: Synthetic polypeptide"
EVQLVESGGGVVQPGRSLRLSCSSSGFIFSRYDMSWVRQAPGKGLEWVAYISHGGAGTYYPDSVKGRFTISRDNSKNTLFLQMDSLRPEDTAVYYCARGGVYKGCFDVWGQGTPVTVSS

SEQ ID NO: 9069 - protein, 119 aa, Artificial Sequence
  source: /note="Description of Artificial Sequence: Synthetic polypeptide"
EVQLVESGGGVVQPGRSLRLSCSSSGFIFSRYDMSWVRQAPGKGLEWVAYISHGGAGTYYPDSVKGRFTISRDNSKNTLFLQMDSLRPEDTAVYYCARGGVYKGYFDVWGQGTPVTVSS

SEQ ID NO: 9070 - protein, 119 aa, Artificial Sequence
  source: /note="Description of Artificial Sequence: Synthetic polypeptide"
EVQLVESGGGVVQPGRSLRLSCSASGFIFSRYDMSWVRQAPGKGLEWVAYISHGGAGTYYPDSVKGRFTISRDNSKNTLFLQMDSLRAEDTGVYFCARGGVYKGYFDEWGQGTPVTVSS

SEQ ID NO: 9071 - protein, 119 aa, Artificial Sequence
  source: /note="Description of Artificial Sequence: Synthetic polypeptide"
EVQLVESGGGVVQPGRSLRLSCSASGFIFSRYDMSWVRQAPGKGLEWVAYISHGGAGTYYPDTVKGRFTISRDNSKNTLFLQMDSLRPEDTGVYFCARGGVYKGYFDEWGQGTPVTVSS

SEQ ID NO: 9072 - protein, 119 aa, Artificial Sequence
  source: /note="Description of Artificial Sequence: Synthetic polypeptide"
EVQLVESGGGVVQPGRSLRLSCSASGFIFSRYDMSWVRQAPGKGLEWVAYISHGGAGTYYPDSVKGRFTISRDNSKNTLFLQMDSLRPEDTGVYFCARGGVYKGYFDVWGQGTPVTVSS

SEQ ID NO: 9073 - protein, 119 aa, Artificial Sequence
  source: /note="Description of Artificial Sequence: Synthetic polypeptide"
EVQLVESGGGVVQPGRSLRLSCSASGFIFSRYDMSWVRQAPGKGLEWVAYISHGGAGTYYPDTVKGRFTISRDNSKNTLFLQMDSLRPEDTGVYYCARGGVYKGYFDVWGQGTPVTVSS

SEQ ID NO: 9074 - protein, 119 aa, Artificial Sequence; identical to SEQ ID NO: 8502
  source: /note="Description of Artificial Sequence: Synthetic polypeptide"

SEQ ID NO: 9075 - protein, 119 aa, Artificial Sequence
  source: /note="Description of Artificial Sequence: Synthetic polypeptide"
EVQLVESGGGVVQPGRSLRLSCSASGFIFSRYDMSWVRQAPGKGLEWVAYISHGGAGTYYPDSVKGRFTISRDNSKNTLFLQMDSLRPEDTGVYYCARGGVYKGYFDVWGQGTLVTVSS

SEQ ID NO: 9076 - protein, 119 aa, Artificial Sequence
  source: /note="Description of Artificial Sequence: Synthetic polypeptide"
EVQLVESGGGVVQPGRSLRLSCSASGFIFSRYDMSWVRQAPGKGLEWVAYISHGGAGTYYPDSVKGRFTISRDNSKNTLFLQMDSLRPEDTGVYYCARGGVYKGYFDVWGQGTPVTVSS

SEQ ID NO: 9077 - protein, 119 aa, Artificial Sequence
  source: /note="Description of Artificial Sequence: Synthetic polypeptide"
EVQLVESGGGVVQPGRSLRLSCSASGFIFSKYDMSWVRQAPGKGLEWVAYISHGGAGTYYPDSVKGRFTISRDNSKNTLFLQMDSLRPEDTAVYYCARGGVYKGYFDEWGQGTPVTVSS

SEQ ID NO: 9078 - protein, 119 aa, Artificial Sequence; identical to SEQ ID NO: 8495
  source: /note="Description of Artificial Sequence: Synthetic polypeptide"

SEQ ID NO: 9079 - protein, 119 aa, Artificial Sequence; identical to SEQ ID NO: 8497
  source: /note="Description of Artificial Sequence: Synthetic polypeptide"

SEQ ID NO: 9080 - protein, 119 aa, Artificial Sequence; identical to SEQ ID NO: 8501
  source: /note="Description of Artificial Sequence: Synthetic polypeptide"

SEQ ID NO: 9081 - protein, 119 aa, Artificial Sequence; identical to SEQ ID NO: 8502
  source: /note="Description of Artificial Sequence: Synthetic polypeptide"

SEQ ID NO: 9082 - protein, 119 aa, Artificial Sequence; identical to SEQ ID NO: 8496
  source: /note="Description of Artificial Sequence: Synthetic polypeptide"

SEQ ID NO: 9083 - protein, 119 aa, Artificial Sequence; identical to SEQ ID NO: 8498
  source: /note="Description of Artificial Sequence: Synthetic polypeptide"

SEQ ID NO: 9084 - protein, 119 aa, Artificial Sequence; identical to SEQ ID NO: 8499
  source: /note="Description of Artificial Sequence: Synthetic polypeptide"

SEQ ID NO: 9085 - protein, 119 aa, Artificial Sequence; identical to SEQ ID NO: 9077
  source: /note="Description of Artificial Sequence: Synthetic polypeptide"

SEQ ID NO: 9086 - protein, 119 aa, Artificial Sequence
  source: /note="Description of Artificial Sequence: Synthetic polypeptide"
EVQLVESGGGVVQPGRSLRLSCSASGFIFSKYDMSWVRQAPGKGLEWVAYISHGGAGTYYPDSVKGRFTISRDNSKNTLFLQMDSLRAEDTAVYYCARGGVYKGYFDVWGQGTLVTVSS

SEQ ID NO: 9087 - protein, 119 aa, Artificial Sequence; identical to SEQ ID NO: 8495
  source: /note="Description of Artificial Sequence: Synthetic polypeptide"

SEQ ID NO: 9088 - protein, 119 aa, Artificial Sequence; identical to SEQ ID NO: 8502
  source: /note="Description of Artificial Sequence: Synthetic polypeptide"

SEQ ID NO: 9089 - protein, 119 aa, Artificial Sequence
  source: /note="Description of Artificial Sequence: Synthetic polypeptide"
EVQLVESGGGVVQPGRSLRLSCSASGFIFSRYDMSWVRQAPGKGLEWVAYISHGGAGTYYPDTVKGRFTISRDNSKNTLFLQMDSLRAEDTGVYYCARGGVYKGYFDEWGQGTPVTVSS

SEQ ID NO: 9090 - protein, 119 aa, Artificial Sequence
  source: /note="Description of Artificial Sequence: Synthetic polypeptide"
EVQLVESGGGVVQPGRSLRLSCSASGFIFSRYDMSWVRQAPGKGLEWVAYISHGGAGTYYPDTVKGRFTISRDNSKNTLFLQMDSLRPEDTGVYYCARGGVYKGYFDEWGQGTPVTVSS

SEQ ID NO: 9091 - protein, 119 aa, Artificial Sequence
  source: /note="Description of Artificial Sequence: Synthetic polypeptide"
EVQLVESGGGVVQPGRSLRLSCSSSGFIFSRYDMSWVRQAPGKGLEWVAYISHGGAGTYYPDTVKGRFTISRDNSKNTLFLQMDSLRPEDTGVYYCARGGVYKGYFDVWGQGTPVTVSS

SEQ ID NO: 9092 - protein, 119 aa, Artificial Sequence; identical to SEQ ID NO: 9038
  source: /note="Description of Artificial Sequence: Synthetic polypeptide"

SEQ ID NO: 9093 - protein, 119 aa, Artificial Sequence
  source: /note="Description of Artificial Sequence: Synthetic polypeptide"
EVQLVESGGGVVQPGRSLRLSCSSSGFIFSRYDMSWVRQAPGKGLEWVAYISHGGAGTYYPDTVKGRFTISRDNSKNTLFLQMDSLRAEDTAVYYCARGGVYKGYFDVWGQGTPVTVSS

SEQ ID NO: 9094 - protein, 119 aa, Artificial Sequence
  source: /note="Description of Artificial Sequence: Synthetic polypeptide"
EVQLVESGGGVVQPGRSLRLSCSSSGFIFSRYDMSWVRQAPGKGLEWVAYISHGGAGTYYPDSVKGRFTISRDNSKNTLFLQMDSLRVEDTAVYYCARGGVYKGYFDVWGQGTPVTVSS

SEQ ID NO: 9095 - protein, 119 aa, Artificial Sequence
  source: /note="Description of Artificial Sequence: Synthetic polypeptide"
EVQLVESGGGVVQPGRSLRLSCSASGFIFSRYDMSWVRQAPGKGLEWVAYISHGGAGTYYPDTVKGRFTISRDNSKNTLFLQMDSLRPEDTAVYYCARGGVYKGYFDVWGQGTPVTVSS

SEQ ID NO: 9096 - protein, 118 aa, Artificial Sequence
  source: /note="Description of Artificial Sequence: Synthetic polypeptide"
EVQLVESGGGVVQPGRSLRLSCSASGFIFSRYDMSWVRQAPGKGLEWVAYISHGGAGTYYPDSVKGRFTISRDNSKNTLFLQMDSLRAEDTAVYYCARGGVYKGYFDLWGQGTPVTVS

SEQ ID NO: 9097 - protein, 119 aa, Artificial Sequence
  source: /note="Description of Artificial Sequence: Synthetic polypeptide"
EVQLVESGGGVVQPGRSLRLSCSASGFIFSRYDMSWVRQAPGKGLEWVAYISHGGAGTYYPDSVKGRFTISRDNSKNTLFLQMDSLRAEDTAVYFCARGGVYKGYFDLWGQGTPVTVSS

SEQ ID NO: 9098 - protein, 119 aa, Artificial Sequence
  source: /note="Description of Artificial Sequence: Synthetic polypeptide"
EVQLVESGGGVVQPGRSLRLSCSASGFIFSRYDMSWVRQAPGKGLEWVAYISHGGAGTYYPDSVKGRFTISRDNSKNTLFLQMDSLRPEDTAVYFCARGGVYKGYFDVWGQGTPVTVSS

SEQ ID NO: 9099 - protein, 119 aa, Artificial Sequence
  source: /note="Description of Artificial Sequence: Synthetic polypeptide"
EVQLVESGGGVVQPGRSLRLSCSASGFIFSRYDMSWVRQAPGKGLEWVAYISHGGAGTYYPDSVKGRFTVSRDNSKNTLFLQMDSLRPEDTAVYYCARGGVYKGYFDEWGQGTPVTVSS

SEQ ID NO: 9100 - protein, 119 aa, Artificial Sequence
  source: /note="Description of Artificial Sequence: Synthetic polypeptide"
EVQLVESGGGVVQPGRSLRLSCSSSGFIFSRYDMSWVRQAPGKGLEWVAYISHGGAGTYYPDSVKGRFTISRDNSKNTLFLQMDSLRAEDTAVYYCARGGVYKGYFDEWGQGTPVTVSS

SEQ ID NO: 9101 - protein, 119 aa, Artificial Sequence
  source: /note="Description of Artificial Sequence: Synthetic polypeptide"
EVQLVESGGGVVQPGRSLRLSCSSSGFIFSRYDMSWVRQAPGKGLEWVAYISHGGAGTYYPDSVKGRFTISRDNSKNTLFLQMDSLRAEDTGVYYCARGGVYKGYFDEWGQGTPVTVSS

SEQ ID NO: 9102 - protein, 119 aa, Artificial Sequence
  source: /note="Description of Artificial Sequence: Synthetic polypeptide"
EVQLVESGGGVVQPGRSLRLSCSSSGFIFSRYDMSWVRQAPGKGLEWVAYISHGGAGTYYPDSVKGRFTISRDNSKNTLFLQMDSLRPEDTGVYFCARGGVYKGYFDEWGQGTPVTVSS

SEQ ID NO: 9103 - protein, 119 aa, Artificial Sequence
  source: /note="Description of Artificial Sequence: Synthetic polypeptide"
EVQLVESGGGVVQPGRSLRLSCSSSGFIFSKYDMSWVRQAPGKGLEWVAYISHGGAGTYYPDSVKGRFTISRDNSKNTLFLQMDSLRAEDTAVYFCARGGVYKGYFDEWGQGTPVTVSS

SEQ ID NO: 9104 - protein, 119 aa, Artificial Sequence
  source: /note="Description of Artificial Sequence: Synthetic polypeptide"
EVQLVESGGGVVQPGRSLRLSCSSSGFIFSRYDMSWVRQAPGKGLEWVAYISHGGAGTYYPDSVKGRFTISRDNSKNTLFLQMDSLRPEDTAVYYCARGGVYKGYFDEWGQGTPVTVSS

SEQ ID NO: 9105 - protein, 119 aa, Artificial Sequence
  source: /note="Description of Artificial Sequence: Synthetic polypeptide"
EVQLVESGGGVVQPGRSLRLSCSSSGFIFSKYDMSWVRQAPGKGLEWVAYISHGGAGTYYPDSVKGRFTISRDNSKNTLFLQMDSLRPEDTAVYYCARGGVYKGYFDMWGQGTPVTVSS

SEQ ID NO: 9106 - protein, 119 aa, Artificial Sequence; identical to SEQ ID NO: 9062
  source: /note="Description of Artificial Sequence: Synthetic polypeptide"

SEQ ID NO: 9107 - protein, 119 aa, Artificial Sequence
  source: /note="Description of Artificial Sequence: Synthetic polypeptide"
EVQLVESGGGVVQPGRSLRLSCASSGFIFSRYDMSWVRQAPGKGLEWVAYISHGGAGTYYPDSVKGRFTISRDNSKNTLFLQMDSLRPEDTAVYYCARGGVYKGYFDEWGQGTLVTVSS

SEQ ID NO: 9108 - protein, 119 aa, Artificial Sequence
  source: /note="Description of Artificial Sequence: Synthetic polypeptide"
EVQLVESGGGVVQPGRSLRLSCSASGFIFSRYDMSWVRQAPGKGLEWVAYISHGGAGTYYPDSVKGRFTISRDNSKNTLFLQMDSLRPEDTAVYYCARGGVYKGYFDEWGQGTLVTVSS

SEQ ID NO: 9109 - protein, 119 aa, Artificial Sequence
  source: /note="Description of Artificial Sequence: Synthetic polypeptide"
EVQLVESGGGVVQPGRSLRLSCSASGFIFSRYDMSWVRQAPGKGLEWVAYISHGGAGTYYPDTVKGRFTISRDNSKNTLFLQMDSLRPEDTAVYYCARGGVYKGYFDEWGQGTLVTVSS

SEQ ID NO: 9110 - protein, 119 aa, Artificial Sequence
  source: /note="Description of Artificial Sequence: Synthetic polypeptide"
EVQLVESGGGVVQPGRSLRLSCSSSGFIFSRYDMSWVRQAPGKGLEWVAYISHGGAGTYYPDSVKGRFTISRDNSKNTLFLQMDSLRPEDTAVYYCVRGGVYKGYFDQWGQGTLVTVSS

SEQ ID NO: 9111 - protein, 119 aa, Artificial Sequence
  source: /note="Description of Artificial Sequence: Synthetic polypeptide"
EVQLVESGGGVVQPGRSLRLSCSASGFIFSRYDMSWVRQAPGKGLEWVAYISHGGAGTYYPDTVKGRFTISRDNSKNTLFLQMDSLRPEDTAVYYCVRGGVYKGYFDQWGQGTLVTVSS

SEQ ID NO: 9112 - protein, 119 aa, Artificial Sequence
  source: /note="Description of Artificial Sequence: Synthetic polypeptide"
EVQLVESGGGVVQPGRSLRLSCSSSGFIFSRYDMSWVRQAPGKGLEWVAYISHGGAGTYYPDTVKGRFTISRDNSKNTLFLQMDSLRPEDTAVYYCARGGVYKGYFDEWGQGTLVTVSS

SEQ ID NO: 9113 - protein, 119 aa, Artificial Sequence
  source: /note="Description of Artificial Sequence: Synthetic polypeptide"
EVQLVESGGGVVQPGRSLRLSCSSSGFIFSKYDMSWVRQAPGKGLEWVAYISHGGAGTYYPDTVKGRFTISRDNSKNTLFLQMDSLRPEDTAVYYCARGGVYKGYFDEWGQGTLVTVGS

SEQ ID NO: 9114 - protein, 119 aa, Artificial Sequence
  source: /note="Description of Artificial Sequence: Synthetic polypeptide"
EVQLVESGGGVVQPGRSLRLSCSSSGFIFSKYDMSWVRQAPGKGLEWVAYISHGGAGTYYPDSVKGRFTISRDNSKNTLFLQMDSLRPEDTAVYYCARGGVYKGYFDEWGQGTLVTVSS

SEQ ID NO: 9115 - protein, 119 aa, Artificial Sequence
  source: /note="Description of Artificial Sequence: Synthetic polypeptide"
EVQLVESGGDVVQPGRSLRLSCSASGFIFSKYDMSWVRQAPGKGLEWVAYISHGGAGTYYPDTVKGRFTISRDNSKNTLFLQMDSLRPEDTGVYYCARGGVYKGYFDEWGQGTLVTVSS

SEQ ID NO: 9116 - protein, 119 aa, Artificial Sequence
  source: /note="Description of Artificial Sequence: Synthetic polypeptide"
EVQLVEGGGDVVQPGRSLRLSCSASGFIFSKYDMSWVRQAPGKGLEWVAYISHGGAGTYYPDTVKGRFTISRDNSKNTLFLQMDSLRPEDTAVYYCARGGVYKGYFDEWGQGTLVTVSS

SEQ ID NO: 9117 - protein, 119 aa, Artificial Sequence
  source: /note="Description of Artificial Sequence: Synthetic polypeptide"
EVQLVESGGDVVQPGRSLRLSCSASGFIFSKYDMSWVRQAPGKGLEWVAYISHGGAGTYYPDTVKGRFTISRDNSKNTLFLQMDSLRPEDTAVYYCARGGVYKGYFDEWGQGTLVTVSS

SEQ ID NO: 9118 - protein, 126 aa, Artificial Sequence
  source: /note="Description of Artificial Sequence: Synthetic polypeptide"
QVQLVESGGGVVQPGRSLRLSCAASGFIFSSYAMHWVRQAPGNGLEWVAFMSYDGSNKKYADSVKGRFTISRDNSKNTLYLQMNSLRAEDTAVYYCARDRGIAAGGNYYYYGMDVWGQGTTVTVSS

SEQ ID NO: 9119 - protein, 10 aa, Artificial Sequence
  source: /note="Description of Artificial Sequence: Synthetic peptide"
GRNIKDTYIH

SEQ ID NO: 9120 - protein, 17 aa, Artificial Sequence
  source: /note="Description of Artificial Sequence: Synthetic peptide"
RIYPTNGYTRYADSVKG

SEQ ID NO: 9121 - protein, 11 aa, Artificial Sequence
  source: /note="Description of Artificial Sequence: Synthetic peptide"
WGGDGFYAMDY

SEQ ID NO: 9122 - protein, 223 aa, Artificial Sequence
  source: /note="Description of Artificial Sequence: Synthetic polypeptide"
QVQLVQSGAEVKKPGASVKVSCKASGYTFTSHWMHWVRQAPGQGLEWIGEFNPSNGRTNYNEKFKSKATMTVDTSTNTAYMELSSLRSEDTAVYYCASRDYDYDGRYFDYWGQGTLVTVSSASTKGPSVFPLAPSSKSTSGGTAALGCLVKDYFPEPVTVSWNSGALTSGVHTFPAVLQSSGLYSLSSVVTVPSSSLGTQTYICNVNHKPSNTKVDKKVEPKS

SEQ ID NO: 9123 - protein, 119 aa, Artificial Sequence
  source: /note="Description of Artificial Sequence: Synthetic polypeptide"
VQLVESGGGLVQPGGSLRLSCAASGFNIKDTYIHWVRQAPGKGLEWVARIYPTNGYTRYADSVKGRFTISADTSKNTAYLQMNSLRAEDTAVYYCSRWGGDGFYAMDYWGQGTLVTVSS

SEQ ID NO: 9124 - protein, 120 aa, Artificial Sequence
  source: /note="Description of Artificial Sequence: Synthetic polypeptide"
EVQLQESGPGLVKPSETLSLTCTVSGDSITNGFWIWIRKPPGNKLEYMGYISYSGSTYYNPSLKSRISISRDTSKNQFSLKLSSVTAADTGVYYCACRSYGRTPYYFDFWGQGTTLTVSS

SEQ ID NO: 9125 - protein, 120 aa, Artificial Sequence
  source: /note="Description of Artificial Sequence: Synthetic polypeptide"
EVQLQESGPGLVKPSQTLSLTCTVSGDSITNGFWIWIRKHPGNKLEYMGYISYSGSTYYNPSLKSRISISRDTSKNQFSLKLSSVTAADTGVYYCACRSYGRTPYYFDFWGQGTTLTVSS

SEQ ID NO: 9126 - protein, 120 aa, Artificial Sequence
  source: /note="Description of Artificial Sequence: Synthetic polypeptide"
EVQLQESGPGLVKPSQTLSLTCAVSGDSITNGFWIWIRKHPGNKLEYMGYISYSGSTYYNPSLKSRISISRDTSNNQFSLNLNSVTRADTGVYYCACRSYGRTPYYFDFWGQGTTLTVSS

SEQ ID NO: 9127 - protein, 120 aa, Artificial Sequence
  source: /note="Description of Artificial Sequence: Synthetic polypeptide"
EVQLQESGPGLVKPSETLSLTCAVYGDSITNGFWIWIRKPPGNKLEYMGYISYSGSTYYNPSLKSRISISRDTSKNQFYLKLSSVTAADTGVYYCACRSYGRTPYYFDFWGQGTTLTVSS

SEQ ID NO: 9128 - protein, 122 aa, Artificial Sequence
  source: /note="Description of Artificial Sequence: Synthetic polypeptide"
QVQLVQSGAEVKKPGASVKVSCKASGYTFSMYWLEWVRQAPGHGLEWVGEISPGTFTTNYNEKFKARATFTADTSTNTAYMELSSLRSEDTAVYYCARFSHFSGSNYDYFDYWGQGTLVTVS

SEQ ID NO: 9129 - protein, 118 aa, Artificial Sequence
  source: /note="Description of Artificial Sequence: Synthetic polypeptide"
QVQLVQSGAEVKKPGASVKVSCKASGYTFTEYYMYWVRQAPGQGLELMGRIDPEDGSIDYVEKFKKKVTLTADTSSSTAYMELSSLTSDDTAVYYCARGKFNYRFAYWGQGTLVTVSS

SEQ ID NO: 9130 - protein, 128 aa, Artificial Sequence
  source: /note="Description of Artificial Sequence: Synthetic polypeptide"
MAWALLLLGLLAHFTDSAASYELSQPRSVSVSPGQTAGFTCGGDNVGRKSVQWYQQKPPQAPVLVIYADSERPSGIPARFSGSNSGNTATLTISGVEAGDEADYYCQVWDSTADHWVFGGGTRLTVLG

SEQ ID NO: 9131 - protein, 121 aa, Artificial Sequence
  source: /note="Description of Artificial Sequence: Synthetic polypeptide"
QVQLVQSGAEVKKPGSSVKVSCKASGYTFTFYNMHWVRQAPGQGLEWIGAIYPGNGDTSYNQKFKGKATITADKSTSTAYMELSSLRSDDTAVYYCARSTYYAGDWNFNNWGQGTLVTVSS

SEQ ID NO: 9132 - protein, 121 aa, Artificial Sequence
  source: /note="Description of Artificial Sequence: Synthetic polypeptide"
QVQLVQSGAEVKKPGSSVKVSCKASGYTFTSYNMHWVRQAPGQGLEWIGAIYPGNGATSYNQKFKGKATITADKSTSTAYMELSSLRSDDTAVYYCARSTYYAGDWNFNNWGQGTLVTVSS

SEQ ID NO: 9133 - protein, 121 aa, Artificial Sequence
  source: /note="Description of Artificial Sequence: Synthetic polypeptide"
QVQLVQSGAEVKKPGSSVKVSCKASGYTFTSYNMHWVRQAPGQGLEWIGAIYPGNGLTSYNQKFKGKATITADKSTSTAYMELSSLRSDDTAVYYCARSTYYAGDWNFNNWGQGTLVTVSS

SEQ ID NO: 9134 - protein, 121 aa, Artificial Sequence
  source: /note="Description of Artificial Sequence: Synthetic polypeptide"
QVQLVQSGAEVKKPGSSVKVSCKASGYTFTSYNMHWVRQAPGQGLEWIGAIYPGNGDTSYNQKFKGKATITADKSTSTAYMELSSLRSDDTAVYYCARSTYYAGDWNFGNWGQGTLVTVSS

SEQ ID NO: 9135 - protein, 230 aa, Artificial Sequence
  source: /note="Description of Artificial Sequence: Synthetic polypeptide"
EVQLLESGGGLVQPGGSLRLSCAASGFTFSIYPMFWVRQAPGKGLEWVSHIGPSGGITKYADSVKGRFTISRDNSKNTLYLQMNSLRAEDTATYYCAREGHNDWYFDLWGRGTLVTVSSASTKGPSVFPLAPSSKSTSGGTAALGCLVKDYFPEPVTVSWNSGALTSGVHTFPAVLQSSGLYSLSSVVTVPSSSLGTQTYICNVNHKPSNTKVDKKVEPKSCDKTHTCPP

SEQ ID NO: 9136 - protein, 230 aa, Artificial Sequence
  source: /note="Description of Artificial Sequence: Synthetic polypeptide"
EVQLLESGGGLVQPGGSLRLSCAASGFTFSIYPMFWVRQAPGKGLEWVSFIGPSGGITKYADSVKGRFTISRDNSKNTLYLQMNSLRAEDTATYYCAREGHNDWYFDLWGRGTLVTVSSASTKGPSVFPLAPSSKSTSGGTAALGCLVKDYFPEPVTVSWNSGALTSGVHTFPAVLQSSGLYSLSSVVTVPSSSLGTQTYICNVNHKPSNTKVDKKVEPKSCDKTHTCPP

SEQ ID NO: 9137 - protein, 230 aa, Artificial Sequence
  source: /note="Description of Artificial Sequence: Synthetic polypeptide"
EVQLLESGGGLVQPGGSLRLSCAASGFTFSIYPMFWVRQAPGKGLEWVSLIGPSGGITKYADSVKGRFTISRDNSKNTLYLQMNSLRAEDTATYYCAREGHNDWYFDLWGRGTLVTVSSASTKGPSVFPLAPSSKSTSGGTAALGCLVKDYFPEPVTVSWNSGALTSGVHTFPAVLQSSGLYSLSSVVTVPSSSLGTQTYICNVNHKPSNTKVDKKVEPKSCDKTHTCPP

SEQ ID NO: 9138 - protein, 230 aa, Artificial Sequence
  source: /note="Description of Artificial Sequence: Synthetic polypeptide"
EVQLLESGGGLVQPGGSLRLSCAASGFTFSIYPMFWVRQAPGKGLEWVSMIGPSGGITKYADSVKGRFTISRDNSKNTLYLQMNSLRAEDTATYYCAREGHNDWYFDLWGRGTLVTVSSASTKGPSVFPLAPSSKSTSGGTAALGCLVKDYFPEPVTVSWNSGALTSGVHTFPAVLQSSGLYSLSSVVTVPSSSLGTQTYICNVNHKPSNTKVDKKVEPKSCDKTHTCPP

SEQ ID NO: 9139 - protein, 230 aa, Artificial Sequence
  source: /note="Description of Artificial Sequence: Synthetic polypeptide"
EVQLLESGGGLVQPGGSLRLSCAASGFTFSIYPMFWVRQAPGKGLEWVSWIGLSGGITKYADSVKGRFTISRDNSKNTLYLQMNSLRAEDTATYYCAREGHNDWYFDLWGRGTLVTVSSASTKGPSVFPLAPSSKSTSGGTAALGCLVKDYFPEPVTVSWNSGALTSGVHTFPAVLQSSGLYSLSSVVTVPSSSLGTQTYICNVNHKPSNTKVDKKVEPKSCDKTHTCPP

SEQ ID NO: 9140 - protein, 230 aa, Artificial Sequence
  source: /note="Description of Artificial Sequence: Synthetic polypeptide"
EVQLLESGGGLVQPGGSLRLSCAASGFTFSIYPMFWVRQAPGKGLEWVSWIGSSGGITKYADSVKGRFTISRDNSKNTLYLQMNSLRAEDTATYYCAREGHNDWYFDLWGRGTLVTVSSASTKGPSVFPLAPSSKSTSGGTAALGCLVKDYFPEPVTVSWNSGALTSGVHTFPAVLQSSGLYSLSSVVTVPSSSLGTQTYICNVNHKPSNTKVDKKVEPKSCDKTHTCPP

SEQ ID NO: 9141 - protein, 230 aa, Artificial Sequence
  source: /note="Description of Artificial Sequence: Synthetic polypeptide"
EVQLLESGGGLVQPGGSLRLSCAASGFTFSIYPMFWVRQAPGKGLEWVSWIGTSGGITKYADSVKGRFTISRDNSKNTLYLQMNSLRAEDTATYYCAREGHNDWYFDLWGRGTLVTVSSASTKGPSVFPLAPSSKSTSGGTAALGCLVKDYFPEPVTVSWNSGALTSGVHTFPAVLQSSGLYSLSSVVTVPSSSLGTQTYICNVNHKPSNTKVDKKVEPKSCDKTHTCPP

SEQ ID NO: 9142 - protein, 230 aa, Artificial Sequence
  source: /note="Description of Artificial Sequence: Synthetic polypeptide"
EVQLLESGGGLVQPGGSLRLSCAASGFTFSIYPMFWVRQAPGKGLEWVSWIGWSGGITKYADSVKGRFTISRDNSKNTLYLQMNSLRAEDTATYYCAREGHNDWYFDLWGRGTLVTVSSASTKGPSVFPLAPSSKSTSGGTAALGCLVKDYFPEPVTVSWNSGALTSGVHTFPAVLQSSGLYSLSSVVTVPSSSLGTQTYICNVNHKPSNTKVDKKVEPKSCDKTHTCPP

SEQ ID NO: 9143 - protein, 230 aa, Artificial Sequence
  source: /note="Description of Artificial Sequence: Synthetic polypeptide"
EVQLLESGGGLVQPGGSLRLSCAASGFTFSIYPMFWVRQAPGKGLEWVSWIGPSGGITKYADSVKGRFTISRDNSKNTLYLQMNSLRAEDTATYYCAREGHNDVYFDLWGRGTLVTVSSASTKGPSVFPLAPSSKSTSGGTAALGCLVKDYFPEPVTVSWNSGALTSGVHTFPAVLQSSGLYSLSSVVTVPSSSLGTQTYICNVNHKPSNTKVDKKVEPKSCDKTHTCPP

SEQ ID NO: 9144 - protein, 230 aa, Artificial Sequence
  source: /note="Description of Artificial Sequence: Synthetic polypeptide"
EVQLLESGGGLVQPGGSLRLSCAASGFTFSIYPMFWVRQAPGKGLEWVSWIGPSGGITKYADSVKGRFTISRDNSKNTLYLQMNSLRAEDTATYYCAREGHNDHYFDLWGRGTLVTVSSASTKGPSVFPLAPSSKSTSGGTAALGCLVKDYFPEPVTVSWNSGALTSGVHTFPAVLQSSGLYSLSSVVTVPSSSLGTQTYICNVNHKPSNTKVDKKVEPKSCDKTHTCPP

SEQ ID NO: 9145 - protein, 230 aa, Artificial Sequence
  source: /note="Description of Artificial Sequence: Synthetic polypeptide"
EVQLLESGGGLVQPGGSLRLSCAASGFTFSIYPMFWVRQAPGKGLEWVSWIGPSGGITKYADSVKGRFTISRDNSKNTLYLQMNSLRAEDTATYYCAREGHNDSYFDLWGRGTLVTVSSASTKGPSVFPLAPSSKSTSGGTAALGCLVKDYFPEPVTVSWNSGALTSGVHTFPAVLQSSGLYSLSSVVTVPSSSLGTQTYICNVNHKPSNTKVDKKVEPKSCDKTHTCPP

SEQ ID NO: 9146 - protein, 230 aa, Artificial Sequence
  source: /note="Description of Artificial Sequence: Synthetic polypeptide"
EVQLLESGGGLVQPGGSLRLSCAASGFTFSIYPMFWVRQAPGKGLEWVSWIGPSGGITKYADSVKGRFTISRDNSKNTLYLQMNSLRAEDTATYYCAREGHNDQYFDLWGRGTLVTVSSASTKGPSVFPLAPSSKSTSGGTAALGCLVKDYFPEPVTVSWNSGALTSGVHTFPAVLQSSGLYSLSSVVTVPSSSLGTQTYICNVNHKPSNTKVDKKVEPKSCDKTHTCPP

SEQ ID NO: 9147 - protein, 230 aa, Artificial Sequence
  source: /note="Description of Artificial Sequence: Synthetic polypeptide"
EVQLLESGGGLVQPGGSLRLSCAASGFTFSIYPMFWVRQAPGKGLEWVSWIGPSGGGTKYADSVKGRFTISRDNSKNTLYLQMNSLRAEDTATYYCAREGHNDWYFDLWGRGTLVTVSSASTKGPSVFPLAPSSKSTSGGTAALGCLVKDYFPEPVTVSWNSGALTSGVHTFPAVLQSSGLYSLSSVVTVPSSSLGTQTYICNVNHKPSNTKVDKKVEPKSCDKTHTCPP

SEQ ID NO: 9148 - protein, 230 aa, Artificial Sequence
  source: /note="Description of Artificial Sequence: Synthetic polypeptide"
EVQLLESGGGLVQPGGSLRLSCAASGFTFSIYPMFWVRQAPGKGLEWVSWIGPSGGMTKYADSVKGRFTISRDNSKNTLYLQMNSLRAEDTATYYCAREGHNDWYFDLWGRGTLVTVSSASTKGPSVFPLAPSSKSTSGGTAALGCLVKDYFPEPVTVSWNSGALTSGVHTFPAVLQSSGLYSLSSVVTVPSSSLGTQTYICNVNHKPSNTKVDKKVEPKSCDKTHTCPP

SEQ ID NO: 9149 - protein, 230 aa, Artificial Sequence
  source: /note="Description of Artificial Sequence: Synthetic polypeptide"
EVQLLESGGGLVQPGGSLRLSCAASGFTFSIYPMFWVRQAPGKGLEWVSWIGPSGGNTKYADSVKGRFTISRDNSKNTLYLQMNSLRAEDTATYYCAREGHNDWYFDLWGRGTLVTVSSASTKGPSVFPLAPSSKSTSGGTAALGCLVKDYFPEPVTVSWNSGALTSGVHTFPAVLQSSGLYSLSSVVTVPSSSLGTQTYICNVNHKPSNTKVDKKVEPKSCDKTHTCPP

SEQ ID NO: 9150 - protein, 230 aa, Artificial Sequence
  source: /note="Description of Artificial Sequence: Synthetic polypeptide"
EVQLLESGGGLVQPGGSLRLSCAASGFTFSIYPMFWVRQAPGKGLEWVSWIGPSGGHTKYADSVKGRFTISRDNSKNTLYLQMNSLRAEDTATYYCAREGHNDWYFDLWGRGTLVTVSSASTKGPSVFPLAPSSKSTSGGTAALGCLVKDYFPEPVTVSWNSGALTSGVHTFPAVLQSSGLYSLSSVVTVPSSSLGTQTYICNVNHKPSNTKVDKKVEPKSCDKTHTCPP

SEQ ID NO: 9151 - protein, 230 aa, Artificial Sequence
  source: /note="Description of Artificial Sequence: Synthetic polypeptide"
EVQLLESGGGLVQPGGSLRLSCAASGFTFSIYPMFWVRQAPGKGLEWVSWIGPSGGLTKYADSVKGRFTISRDNSKNTLYLQMNSLRAEDTATYYCAREGHNDWYFDLWGRGTLVTVSSASTKGPSVFPLAPSSKSTSGGTAALGCLVKDYFPEPVTVSWNSGALTSGVHTFPAVLQSSGLYSLSSVVTVPSSSLGTQTYICNVNHKPSNTKVDKKVEPKSCDKTHTCPP

SEQ ID NO: 9152 - protein, 230 aa, Artificial Sequence
  source: /note="Description of Artificial Sequence: Synthetic polypeptide"
EVQLLESGGGLVQPGGSLRLSCAASGFTFSIYPMFWVRQAPGKGLEWVSWIGPSGGFTKYADSVKGRFTISRDNSKNTLYLQMNSLRAEDTATYYCAREGHNDWYFDLWGRGTLVTVSSASTKGPSVFPLAPSSKSTSGGTAALGCLVKDYFPEPVTVSWNSGALTSGVHTFPAVLQSSGLYSLSSVVTVPSSSLGTQTYICNVNHKPSNTKVDKKVEPKSCDKTHTCPP

SEQ ID NO: 9153 - protein, 230 aa, Artificial Sequence
  source: /note="Description of Artificial Sequence: Synthetic polypeptide"
EVQLLESGGGLVQPGGSLRLSCAASGFTFSIYPMFWVRQAPGKGLEWVSGIGPSGGITKYADSVKGRFTISRDNSKNTLYLQMNSLRAEDTATYYCAREGHNDWYFDLWGRGTLVTVSSASTKGPSVFPLAPSSKSTSGGTAALGCLVKDYFPEPVTVSWNSGALTSGVHTFPAVLQSSGLYSLSSVVTVPSSSLGTQTYICNVNHKPSNTKVDKKVEPKSCDKTHTCPP

SEQ ID NO: 9154 - protein, 230 aa, Artificial Sequence
  source: /note="Description of Artificial Sequence: Synthetic polypeptide"
EVQLLESGGGLVQPGGSLRLSCAASGFTFSIYPMFWVRQAPGKGLEWVSIIGPSGGITKYADSVKGRFTISRDNSKNTLYLQMNSLRAEDTATYYCAREGHNDWYFDLWGRGTLVTVSSASTKGPSVFPLAPSSKSTSGGTAALGCLVKDYFPEPVTVSWNSGALTSGVHTFPAVLQSSGLYSLSSVVTVPSSSLGTQTYICNVNHKPSNTKVDKKVEPKSCDKTHTCPP

SEQ ID NO: 9155 - protein, 230 aa, Artificial Sequence
  source: /note="Description of Artificial Sequence: Synthetic polypeptide"
EVQLLESGGGLVQPGGSLRLSCAASGFTFSIYPMFWVRQAPGKGLEWVSDIGPSGGITKYADSVKGRFTISRDNSKNTLYLQMNSLRAEDTATYYCAREGHNDWYFDLWGRGTLVTVSSASTKGPSVFPLAPSSKSTSGGTAALGCLVKDYFPEPVTVSWNSGALTSGVHTFPAVLQSSGLYSLSSVVTVPSSSLGTQTYICNVNHKPSNTKVDKKVEPKSCDKTHTCPP

SEQ ID NO: 9156 - protein, 230 aa, Artificial Sequence
  source: /note="Description of Artificial Sequence: Synthetic polypeptide"
EVQLLESGGGLVQPGGSLRLSCAASGFTFSIYPMFWVRQAPGKGLEWVSWIGPSGGITKYADSVKGRFTISRDNSKNTLYLQMNSLRAEDTATYYCAREGHNDMYFDLWGRGTLVTVSSASTKGPSVFPLAPSSKSTSGGTAALGCLVKDYFPEPVTVSWNSGALTSGVHTFPAVLQSSGLYSLSSVVTVPSSSLGTQTYICNVNHKPSNTKVDKKVEPKSCDKTHTCPP

SEQ ID NO: 9157 - protein, 230 aa, Artificial Sequence
  source: /note="Description of Artificial Sequence: Synthetic polypeptide"
EVQLLESGGGLVQPGGSLRLSCAASGFTFSIYPMFWVRQAPGKGLEWVSWIGPSGGITKYADSVKGRFTISRDNSKNTLYLQMNSLRAEDTATYYCAREGHNDLYFDLWGRGTLVTVSSASTKGPSVFPLAPSSKSTSGGTAALGCLVKDYFPEPVTVSWNSGALTSGVHTFPAVLQSSGLYSLSSVVTVPSSSLGTQTYICNVNHKPSNTKVDKKVEPKSCDKTHTCPP

SEQ ID NO: 9158 - protein, 230 aa, Artificial Sequence
  source: /note="Description of Artificial Sequence: Synthetic polypeptide"
EVQLLESGGGLVQPGGSLRLSCAASGFTFSIYPMFWVRQAPGKGLEWVSWIGPSGGITKYADSVKGRFTISRDNSKNTLYLQMNSLRAEDTATYYCAREGHNDTYFDLWGRGTLVTVSSASTKGPSVFPLAPSSKSTSGGTAALGCLVKDYFPEPVTVSWNSGALTSGVHTFPAVLQSSGLYSLSSVVTVPSSSLGTQTYICNVNHKPSNTKVDKKVEPKSCDKTHTCPP

SEQ ID NO: 9159 - protein, 230 aa, Artificial Sequence
  source: /note="Description of Artificial Sequence: Synthetic polypeptide"
EVQLLESGGGLVQPGGSLRLSCAASGFTFSIYPMFWVRQAPGKGLEWVSWIGPSGGITKYADSVKGRFTISRDNSKNTLYLQMNSLRAEDTATYYCAREGHNDIYFDLWGRGTLVTVSSASTKGPSVFPLAPSSKSTSGGTAALGCLVKDYFPEPVTVSWNSGALTSGVHTFPAVLQSSGLYSLSSVVTVPSSSLGTQTYICNVNHKPSNTKVDKKVEPKSCDKTHTCPP

SEQ ID NO: 9160 - protein, 230 aa, Artificial Sequence
  source: /note="Description of Artificial Sequence: Synthetic polypeptide"
EVQLLESGGGLVQPGGSLRLSCAASGFTFSIYPMFWVRQAPGKGLEWVSWIGGSGGITKYADSVKGRFTISRDNSKNTLYLQMNSLRAEDTATYYCAREGHNDWYFDLWGRGTLVTVSSASTKGPSVFPLAPSSKSTSGGTAALGCLVKDYFPEPVTVSWNSGALTSGVHTFPAVLQSSGLYSLSSVVTVPSSSLGTQTYICNVNHKPSNTKVDKKVEPKSCDKTHTCPP

SEQ ID NO: 9161 - protein, 230 aa, Artificial Sequence
  source: /note="Description of Artificial Sequence: Synthetic polypeptide"
EVQLLESGGGLVQPGGSLRLSCAASGFTFSIYPMFWVRQAPGKGLEWVSWIGPSGGWTKYADSVKGRFTISRDNSKNTLYLQMNSLRAEDTATYYCAREGHNDWYFDLWGRGTLVTVSSASTKGPSVFPLAPSSKSTSGGTAALGCLVKDYFPEPVTVSWNSGALTSGVHTFPAVLQSSGLYSLSSVVTVPSSSLGTQTYICNVNHKPSNTKVDKKVEPKSCDKTHTCPP

SEQ ID NO: 9162 - protein, 230 aa, Artificial Sequence
  source: /note="Description of Artificial Sequence: Synthetic polypeptide"
EVQLLESGGGLVQPGGSLRLSCAASGFTFSIYPMFWVRQAPGKGLEWVSWIGPSGGYTKYADSVKGRFTISRDNSKNTLYLQMNSLRAEDTATYYCAREGHNDWYFDLWGRGTLVTVSSASTKGPSVFPLAPSSKSTSGGTAALGCLVKDYFPEPVTVSWNSGALTSGVHTFPAVLQSSGLYSLSSVVTVPSSSLGTQTYICNVNHKPSNTKVDKKVEPKSCDKTHTCPP

SEQ ID NO: 9163 - protein, 230 aa, Artificial Sequence
  source: /note="Description of Artificial Sequence: Synthetic polypeptide"
EVQLLESGGGLVQPGGSLRLSCAASGFTFSIYPMFWVRQAPGKGLEWVSWIGPSGGSTKYADSVKGRFTISRDNSKNTLYLQMNSLRAEDTATYYCAREGHNDWYFDLWGRGTLVTVSSASTKGPSVFPLAPSSKSTSGGTAALGCLVKDYFPEPVTVSWNSGALTSGVHTFPAVLQSSGLYSLSSVVTVPSSSLGTQTYICNVNHKPSNTKVDKKVEPKSCDKTHTCPP

SEQ ID NO: 9164 - protein, 230 aa, Artificial Sequence
  source: /note="Description of Artificial Sequence: Synthetic polypeptide"
EVQLLESGGGLVQPGGSLRLSCAASGFTFSIYPMFWVRQAPGKGLEWVSWIGPSGGPTKYADSVKGRFTISRDNSKNTLYLQMNSLRAEDTATYYCAREGHNDWYFDLWGRGTLVTVSSASTKGPSVFPLAPSSKSTSGGTAALGCLVKDYFPEPVTVSWNSGALTSGVHTFPAVLQSSGLYSLSSVVTVPSSSLGTQTYICNVNHKPSNTKVDKKVEPKSCDKTHTCPP

SEQ ID NO: 9165 - protein, 230 aa, Artificial Sequence
  source: /note="Description of Artificial Sequence: Synthetic polypeptide"
EVQLLESGGGLVQPGGSLRLSCAASGFTFSIYPMFWVRQAPGKGLEWVSWIGPSGGVTKYADSVKGRFTISRDNSKNTLYLQMNSLRAEDTATYYCAREGHNDWYFDLWGRGTLVTVSSASTKGPSVFPLAPSSKSTSGGTAALGCLVKDYFPEPVTVSWNSGALTSGVHTFPAVLQSSGLYSLSSVVTVPSSSLGTQTYICNVNHKPSNTKVDKKVEPKSCDKTHTCPP

SEQ ID NO: 9166 - protein, 230 aa, Artificial Sequence
  source: /note="Description of Artificial Sequence: Synthetic polypeptide"
EVQLLESGGGLVQPGGSLRLSCAASGFTFSIYPMFWVRQAPGKGLEWVSWIGPSGGTTKYADSVKGRFTISRDNSKNTLYLQMNSLRAEDTATYYCAREGHNDWYFDLWGRGTLVTVSSASTKGPSVFPLAPSSKSTSGGTAALGCLVKDYFPEPVTVSWNSGALTSGVHTFPAVLQSSGLYSLSSVVTVPSSSLGTQTYICNVNHKPSNTKVDKKVEPKSCDKTHTCPP

SEQ ID NO: 9167 - protein, 230 aa, Artificial Sequence; identical to SEQ ID NO: 9146
  source: /note="Description of Artificial Sequence: Synthetic polypeptide"

SEQ ID NO: 9168 - protein, 466 aa, Artificial Sequence
  source: /note="Description of Artificial Sequence: Synthetic polypeptide"
MDWTWRVFCLLAVAPGAHSQVQLVQSGAEVKKPGASVKVSCKASGYTFTDYSMDWVRQAPGQGLEWMGAINPNSGGTNYNQKFKDRVTMTRDTSTSTVYMELSSLRSEDTAVYYCARSGSYDGYYAMDYWGQGTTVTVSSASTKGPSVFPLAPCSRSTSESTAALGCLVKDYFPEPVTVSWNSGALTSGVHTFPAVLQSSGLYSLSSVVTVPSSNFGTQTYTCNVDHKPSNTKVDKTVERKCCVECPPCPAPPVAGPSVFLFPPKPKDTLMISRTPEVTCVVVDVSHEDPEVQFNWYVDGVEVHNAKTKPREEQFNSTFRVVSVLTVVHQDWLNGKEYKCKVSNKGLPAPIEKTISKTKGQPREPQVYTLPPSREEMTKNQVSLTCLVKGFYPSDISVEWESNGQPENNYKTTPPMLDSDGSFFLYSKLTVDKSRWQQGNVFSCSVMHEALHNHYTQKSLSLSPGK

SEQ ID NO: 9169 - protein, 466 aa, Artificial Sequence
  source: /note="Description of Artificial Sequence: Synthetic polypeptide"
MDWTWRVFCLLAVAPGAHSQVQLVQSGAEVKKPGASVKVSCKASGYTFTDYSMDWVRQAPGQGLEWMGAINPNSGGTNYNQKFKDRVTMTRDTSTSTVYMELSSLRSEDTAVYYCARSGSYDGYYAMDYWGQGTTVTVSSASTKGPSVFPLAPCSRSTSESTAALGCLVKDYFPEPVTVSWNSGALTSGVHTFPAVLQSSGLYSLSSVVTVPSSNFGTQTYTCNVDHKPSNTKVDKTVERKCCVECPPCPAPPVAGPSVFLFPPKPKDTLMISRTPEVTCVVVDVSQEDPEVQFNWYVDGVEVHNAKTKPREEQFNSTYRVVSVLTVLHQDWLNGKEYKCKVSNKGLPSSIEKTISKAKGQPREPQVYTLPPSQEEMTKNQVSLTCLVKGFYPSDIAVEWESNGQPENNYKTTPPVLDSDGSFFLYSRLTVDKSRWQEGNVFSCSVMHEALHNHYTQKSLSLSLGK

SEQ ID NO: 9170 - protein, 465 aa, Artificial Sequence
  source: /note="Description of Artificial Sequence: Synthetic polypeptide"
MDWTWRVFCLLAVAPGAHSQVQLVQSGAEVKKPGASVKVSCKASGYTFTDYSMDWVRQAPGQGLEWMGAIHLNTGYTNYNQKFKGRVTMTRDTSTSTVYMELSSLRSEDTAVYYCARGFYDGYSPMDYWGQGTTVTVSSASTKGPSVFPLAPCSRSTSESTAALGCLVKDYFPEPVTVSWNSGALTSGVHTFPAVLQSSGLYSLSSVVTVPSSNFGTQTYTCNVDHKPSNTKVDKTVERKCCVECPPCPAPPVAGPSVFLFPPKPKDTLMISRTPEVTCVVVDVSHEDPEVQFNWYVDGVEVHNAKTKPREEQFNSTFRVVSVLTVVHQDWLNGKEYKCKVSNKGLPAPIEKTISKTKGQPREPQVYTLPPSREEMTKNQVSLTCLVKGFYPSDISVEWESNGQPENNYKTTPPMLDSDGSFFLYSKLTVDKSRWQQGNVFSCSVMHEALHNHYTQKSLSLSPGK

SEQ ID NO: 9171 - protein, 465 aa, Artificial Sequence
  source: /note="Description of Artificial Sequence: Synthetic polypeptide"
MDWTWRVFCLLAVAPGAHSQVQLVQSGAEVKKPGASVKVSCKASGYTFTDYSMDWVRQAPGQGLEWMGAIHLNTGYTNYNQKFKGRVTMTRDTSTSTVYMELSSLRSEDTAVYYCARGFYDGYSPMDYWGQGTTVTVSSASTKGPSVFPLAPCSRSTSESTAALGCLVKDYFPEPVTVSWNSGALTSGVHTFPAVLQSSGLYSLSSVVTVPSSNFGTQTYTCNVDHKPSNTKVDKTVERKCCVECPPCPAPPVAGPSVFLFPPKPKDTLMISRTPEVTCVVVDVSQEDPEVQFNWYVDGVEVHNAKTKPREEQFNSTYRVVSVLTVLHQDWLNGKEYKCKVSNKGLPSSIEKTISKAKGQPREPQVYTLPPSQEEMTKNQVSLTCLVKGFYPSDIAVEWESNGQPENNYKTTPPVLDSDGSFFLYSRLTVDKSRWQEGNVFSCSVMHEALHNHYTQKSLSLSLGK

SEQ ID NO: 9172 - protein, 463 aa, Artificial Sequence
  source: /note="Description of Artificial Sequence: Synthetic polypeptide"
QVQLVQSGAEVKKPGASVKVSCKASGYTFTGYYMHWVRQAPGQGLEWMGWINPNSGGTNYAQKFQGRVTMTRDTSISTAYMELSRLRSDDTAVYYCARSPNPYYYDSSGYYYPGAFDIWGQGTMVTVSSASVAAPSVFIFPPSDEQLKSGTASVVCLLNNFYPREAKVQWKVDNALQSGNSQESVTEQDSKDSTYSLSSTLTLSKADYEKHKVYACEVTHQGLSSPVTKSFNRGECDKTHTCPPCPAPELLGGPSVFLFPPKPKDTLMISRTPEVTCVVVDVSHEDPEVKFNWYVDGVEVHNAKTKPREEQYNSTYRVVSVLTVLHQDWLNGKEYKCKVSNKALPAPIEKTISKAKGQPREPQVCTLPPSRDELTKNQVSLSCAVKGFYPSDIAVEWESNGQPENNYKTTPPVLDSDGSFFLVSKLTVDKSRWQQGNVFSCSVMHEALHNHYTQKSLSLSPGK

SEQ ID NO: 9173 - protein, 454 aa, Artificial Sequence
  source: /note="Description of Artificial Sequence: Synthetic polypeptide"
QVQLVQSGAEVKRPGASVKVSCKASGYTFTNDIIHWVRQAPGQRLEWMGWINAGYGNTQYSQNFQDRVSITRDTSASTAYMELISLRSEDTAVYYCAREPLWFGESSPHDYYGMDVWGQGTTVTVSSASTKGPSVFPLAPCSRSTSESTAALGCLVKDYFPEPVTVSWNSGALTSGVHTFPAVLQSSGLYSLSSVVTVPSSSLGTKTYTCNVDHKPSNTKVDKRVESKYGPPCPPCPAPEFLGGPSVFLFPPKPKDTLMISRTPEVTCVVVDVSQEDPEVQFNWYVDGVEVHNAKTKPREEQFNSTYRVVSVLTVLHQDWLNGKEYKCKVSNKGLPSSIEKTISKAKGQPREPQVYTLPPSQEEMTKNQVSLTCLVKGFYPSDIAVEWESNGQPENNYKTTPPVLDSDGSFFLYSRLTVDKSRWQEGNVFSCSVMHEALHNHYTQKSLSLSLGK

SEQ ID NO: 9174 - protein, 451 aa, Artificial Sequence
  source: /note="Description of Artificial Sequence: Synthetic polypeptide"
EVQLLESGGGLVQPGGSLRLSCAASGFTFSNAWMSWVRQAPGKGLEWVSSISVGGHRTYYADSVKGRSTISRDNSKNTLYLQMNSLRAEDTAVYYCARIRVGPSGGAFDYWGQGTLVTVSSASTKGPSVFPLAPSSKSTSGGTAALGCLVKDYFPEPVTVSWNSGALTSGVHTFPAVLQSSGLYSLSSVVTVPSSSLGTQTYICNVNHKPSNTKVDKKVEPKSCDKTHTCPPCPAPELLGGPSVFLFPPKPKDTLMISRTPEVTCVVVDVSHEDPEVKFNWYVDGVEVHNAKTKPREEQYNSTYRVVSVLTVLHQDWLNGKEYKCKVSNKALPAPIEKTISKAKGQPREPQVYTLPPSRDELTKNQVSLTCLVKGFYPSDIAVEWESNGQPENNYKTTPPVLDSDGSFFLYSKLTVDKSRWQQGNVFSCSVMHEALHNHYTQKSLSLSPGK

SEQ ID NO: 9175 - protein, 453 aa, Artificial Sequence
  source: /note="Description of Artificial Sequence: Synthetic polypeptide"
QVQLVQSGAEVMKPGSSVKVSCKASGYTFSWYWLEWVRQAPGHGLEWMGEIDPGTFTTNYNEKFKARVTFTADTSTSTAYMELSSLRSEDTAVYYCARFSHFSGSNYDYFDYWGQGTLVTVSSASTKGPSVFPLAPSSKSTSGGTAALGCLVKDYFPEPVTVSWNSGALTSGVHTFPAVLQSSGLYSLSSVVTVPSSSLGTQTYICNVNHKPSNTKVDKKVEPKSCDKTHTCPPCPAPELLGGPSVFLFPPKPKDTLMISRTPEVTCVVVDVSHEDPEVKFNWYVDGVEVHNAKTKPREEQYNSTYRVVSVLTVLHQDWLNGKEYKCKVSNKALPAPIEKTISKAKGQPREPQVYTLPPSRDELTKNQVSLTCLVKGFYPSDIAVEWESNGQPENNYKTTPPVLDSDGSFFLYSKLTVDKSRWQQGNVFSCSVMHEALHNHYTQKSLSLSPGK

SEQ ID NO: 9176 - protein, 118 aa, Artificial Sequence
  source: /note="Description of Artificial Sequence: Synthetic polypeptide"
QVQLVQSGGGVVQPGRSLRLSCAASGFTFSSYGMHWVRQAPGKGLEWVAVISYDGSIKHYADSVKGRFTISRDNSKNTLYLQMNSLRTDDTAVYYCAGDTDYGDIDPWGQGTMVTVSS

SEQ ID NO: 9177 - protein, 565 aa, Artificial Sequence
  source: /note="Description of Artificial Sequence: Synthetic polypeptide"
EVKLEESGGGLVQPGGSMKLSCVASGFTFSNYMNWVRQSPEKGLEVAEIRLKSNNYATHYAESVKGRFTISRDDSKSSVYLQMNNLRAEDTGIYYCTDYDAYWGQGTLVTVSAESQSFPNVFPLVSCESPLSDKNLVAMGCLARDFLPSTISFTWNYQNNTEVIQGIRTFPTLRTGGKYLATSQVLLSPKSILEGSDEYLVCKIHYGGKNRDLHVPIPAVAEMNPNVNVFVPPRDGFSGPAPRKSKLICEATNFTPKPITVSWLKDGKLVESGFTTDPVTIENKGSTPQTYKVISTLTISEIDWLNLNVYTCRVDHRGLTFLKNVSSTCAASPSTDILTFTIPPSFADIFLSKSANLTCLVSNLATYETLNISWASQSGEPLETKIKIMESHPNGTFSAKGVASVCVEDWNNRKEFVCTVHRDLPSPQKKFISKPNEVHKHPPAVYLLPPAREQLNLRESATVTCLVKGFSPADISVQLQRGQLLPQEKYVTSAPMPEPGAPGFYFTHSILTVTEEEWNSGETYTCWGHEALPHLVTERTVDKSTGKPTLYNVSLIMSDTGGTCY

SEQ ID NO: 9178 - protein, 449 aa, Artificial Sequence
  source: /note="Description of Artificial Sequence: Synthetic polypeptide"
QVQLVQSGAEVKKPGASVKVSCKASGYSFTNYYIHWVRQAPGQRLEWMGWINAGNGNTKYSQKFQGRVTITRDTSASTAYMELSSLRSEDTAVYYCVRRQRFPYYFDYWGQGTLVTVSSASTKGPSVFPLAPSSKSTSGGTAALGCLVKDYFPEPVTVSWNSGALTSGVHTFPAVLQSSGLYSLSSVVTVPSSSLGTQTYICNVNHKPSNTKVDKRVEPKSCDKTHTCPPCPAPELLGGPSVFLFPPKPKDTLMISRTPEVTCVVVDVSHEDPEVKFNWYVDGVEVHNAKTKPREEQYNSTYRVVSVLTVLHQDWLNGKEYKCKVSNKALPAPIEKTISKAKGQPREPQVYTLPPSREEMTKNQVSLTCLVKGFYPSDIAVEWESNGQPENNYKTTPPVLDSDGSFFLYSKLTVDKSRWQQGNVFSCSVMHEALHNHYTQKSLSLSPGK

SEQ ID NO: 9179 - protein, 449 aa, Artificial Sequence
  source: /note="Description of Artificial Sequence: Synthetic polypeptide"
QVQLVQSGAEVKKPGSSVKVSCKASGYTFTDQTIHWMRQAPGQGLEWIGYIYPRDDSPKYNENFKGKVTITADKSTSTAYMELSSLRSEDTAVYYCAIPDRSGYAWFIYWGQGTLVTVSSASTKGPSVFPLAPSSKSTSGGTAALGCLVKDYFPEPVTVSWNSGALTSGVHTFPAVLQSSGLYSLSSVVTVPSSSLGTQTYICNVNHKPSNTKVDKRVEPKSCDKTHTCPPCPAPEAAGGPSVFLFPPKPKDTLMISRTPEVTCVVVDVSHEDPEVKFNWYVDGVEVHNAKTKPREEQYNSTYRVVSVLTVLHQDWLNGKEYKCKVSNKALPAPIEKTISKAKGQPREPQVYTLPPSREEMTKNQVSLTCLVKGFYPSDIAVEWESNGQPENNYKTTPPVLDSDGSFFLYSKLTVDKSRWQQGNVFSCSVMHEALHNHYTQKSLSLSPG

SEQ ID NO: 9180 - protein, 229 aa, Artificial Sequence; identical to SEQ ID NO: 8824
  source: /note="Description of Artificial Sequence: Synthetic polypeptide"

SEQ ID NO: 9181 - protein, 448 aa, Artificial Sequence
  source: /note="Description of Artificial Sequence: Synthetic polypeptide"
QVQLVESGGGVVQPGRSLRLSCAASGFKFSGYGMHWVRQAPGKGLEWVAVIWYDGSKKYYVDSVKGRFTISRDNSKNTLYLQMNSLRAEDTAVYYCARQMGYWHFDLWGRGTLVTVSSASTKGPSVFPLAPSSKSTSGGTAALGCLVKDYFPEPVTVSWNSGALTSGVHTFPAVLQSSGLYSLSSVVTVPSSSLGTQTYICNVNHKPSNTKVDKRVEPKSCDKTHTCPPCPAPEAEGGPSVFLFPPKPKDTLMISRTPEVTCVVVDVSHEDPEVKFNWYVDGVEVHNAKTKPREEQYNSTYRVVSVLTVLHQDWLNGKEYKCKVSNKALPAPIEKTISKAKGQPREPQVYTLPPSREEMTKNQVSLTCLVKGFYPSDIAVEWESNGQPENNYKTTPPVLDSDGSFFLYSKLTVDKSRWQQGNVFSCSVMHEALHNHYTQKSLSLSPGK

SEQ ID NO: 9182 - protein, 449 aa, Artificial Sequence
  source: /note="Description of Artificial Sequence: Synthetic polypeptide"
QVQLVQSGGGVVQPGRSLRLSCKASGYTFTRYTMHWVRQAPGKGLEWIGYINPSRGYTNYNQKVKDRFTISRDNSKNTAFLQMDSLRPEDTGVYFCARYYDDHYCLDYWGQGTPVTVSSASTKGPSVFPLAPSSKSTSGGTAALGCLVKDYFPEPVTVSWNSGALTSGVHTFPAVLQSSGLYSLSSVVTVPSSSLGTQTYICNVNHKPSNTKVDKKVEPKSCDKTHTCPPCPAPEAAGGPSVFLFPPKPKDTLMISRTPEVTCVVVDVSHEDPEVKFNWYVDGVEVHNAKTKPREEQYNSTYRVVSVLTVLHQDWLNGKEYKCKVSNKALPAPIEKTISKAKGQPREPQVYTLPPSRDELTKNQVSLTCLVKGFYPSDIAVEWESNGQPENNYKTTPPVLDSDGSFFLYSKLTVDKSRWQQGNVFSCSVMHEALHNHYTQKSLSLSPGK

SEQ ID NO: 9183 - protein, 468 aa, Artificial Sequence
  source: /note="Description of Artificial Sequence: Synthetic polypeptide"
MGWSCIILFLVATATGVHSEVQLLESGGGLVQPGGSLRLSCAASGFTFSSFPMAWVRQAPGKGLEWVSTISTSGGRTYYRDSVKGRFTISRDNSKNTLYLQMNSLRAEDTAVYYCAKFRQYSGGFDYWGQGTLVTVSSASTKGPSVFPLAPSSKSTSGGTAALGCLVKDYFPEPVTVSWNSGALTSGVHTFPAVLQSSGLYSLSSVVTVPSSSLGTQTYICNVNHKPSNTKVDKKVEPKSCDKTHTCPPCPAPELLGGPSVFLFPPKPKDTLMISRTPEVTCVVVDVSHEDPEVKFNWYVDGVEVHNAKTKPREEQYASTYRVVSVLTVLHQDWLNGKEYKCKVSNKALPAPIEKTISKAKGQPREPQVYTLPPSRDELTKNQVSLTCLVKGFYPSDIAVEWESNGQPENNYKTTPPVLDSDGSFFLYSKLTVDKSRWQQGNVFSCSVMHEALHNHYTQKSLSLSPGK

SEQ ID NO: 9184 - protein, 471 aa, Artificial Sequence
  source: /note="Description of Artificial Sequence: Synthetic polypeptide"
MEFGLSWVFLVALLRGVQCQVQLVESGGGVVQPGRSLRLSCTASGFTFSMFGVHWVRQAPGKGLEWVAAVSYDGSNKYYAESVKGRFTISRDNSKNILFLQMDSLRLEDTAVYYCARGRPKVVIPAPLAHWGQGTLVTFSSASTKGPSVFPLAPSSKSTSGGTAALGCLVKDYFPEPVTVSWNSGALTSGVHTFPAVLQSSGLYSLSSVVTVPSSSLGTQTYICNVNHKPSNTKVDKRVEPKSCDKTHTCPPCPAPELLGGPSVFLFPPKPKDTLMISRTPEVTCVVVDVSHEDPEVKFNWYVDGVEVHNAKTKPREEQYNSTYRVVSVLTVLHQDWLNGKEYKCKVSNKALPAPIEKTISKAKGQPREPQVYTLPPSREEMTKNQVSLTCLVKGFYPSDIAVEWESNGQPENNYKTTPPVLDSDGSFFLYSKLTVDKSRWQQGNVFSCSVMHEALHNHYTQKSLSLSPGK

SEQ ID NO: 9185 - protein, 449 aa, Artificial Sequence
  source: /note="Description of Artificial Sequence: Synthetic polypeptide"
EGQLVQSGGGLVHPGGSLRLSCAGSGFTFSSYGMHWVRQAPGKGLEWVSGIGTGGGTYSTDSVKGRFTISRDNAKNSLYLQMNSLRAEDMAVYYCARGDYYGSGSFFDCWGQGTLVTVSSASTKGPSVFPLAPSSKSTSGGTAALGCLVKDYFPEPVTVSWNSGALTSGVHTFPAVLQSSGLYSLSSVVTVPSSSLGTQTYICNVNHKPSNTKVDKRVEPKSCDKTHTCPPCPAPELLGGPSVFLFPPKPKDTLMISRTPEVTCVVVDVSHEDPEVKFNWYVDGVEVHNAKTKPREEQYNSTYRVVSVLTVLHQDWLNGKEYKCKVSNKALPAPIEKTISKAKGQPREPQVYTLPPSREEMTKNQVSLTCLVKGFYPSDIAVEWESNGQPENNYKTTPPVLDSDGSFFLYSKLTVDKSRWQQGNVFSCSVMHEALHNHYTQKSLSLSPG

SEQ ID NO: 9186 - protein, 447 aa, Artificial Sequence
  source: /note="Description of Artificial Sequence: Synthetic polypeptide"
QVQLVQSGAEVKKPGSSVKVSCKASGYTFSSNVISWVRQAPGQGLEWMGGVIPIVDIANYAQRFKGRVTITADESTSTTYMELSSLRSEDTAVYYCASTLGLVLDAMDYWGQGTLVTVSSASTKGPSVFPLAPCSRSTSESTAALGCLVKDYFPEPVTVSWNSGALTSGVHTFPAVLQSSGLYSLSSVVTVPSSSLGTKTYTCNVDHKPSNTKVDKRVESKYGPPCPSCPAPEFLGGPSVFLFPPKPKDTLMISRTPEVTCVVVDVSQEDPEVQFNWYVDGVEVHNAKTKPREEQFNSTYRVVSVLTVLHQDWLNGKEYKCKVSNKGLPSSIEKTISKAKGQPREPQVYTLPPSQEEMTKNQVSLTCLVKGFYPSDIAVEWESNGQPENNYKTTPPVLDSDGSFFLYSRLTVDKSRWQEGNVFSCSVMHEALHNHYTQKSLSLSLGK

SEQ ID NO: 9187 - protein, 449 aa, Artificial Sequence
  source: /note="Description of Artificial Sequence: Synthetic polypeptide"
EVQLVQSGAEVKKPGASVKVSCKASGYTFTDYNMHWVRQAPGQGLEWMGEINPNSGGAGYNQKFKGRVTMTTDTSTSTAYMELRSLRSDDTAVYYCARLGYDDIYDDWYFDVWGQGTTVTVSSASTKGPSVFPLAPCSRSTSESTAALGCLVKDYFPEPVTVSWNSGALTSGVHTFPAVLQSSGLYSLSSVVTVPSSNFGTQTYTCNVDHKPSNTKVDKTVERKCCVECPPCPAPPVAGPSVFLFPPKPKDTLMISRTPEVTCVVVDVSHEDPEVQFNWYVDGVEVHNAKTKPREEQFNSTFRVVSVLTVVHQDWLNGKEYKCKVSNKGLPAPIEKTISKTKGQPREPQVYTLPPSREEMTKNQVSLTCLVKGFYPSDIAVEWESNGQPENNYKTTPPMLDSDGSFFLYSKLTVDKSRWQQGNVFSCSVMHEALHNHYTQKSLSLSPGK

SEQ ID NO: 9188 - protein, 444 aa, Artificial Sequence
  source: /note="Description of Artificial Sequence: Synthetic polypeptide"
QVQLVQSGAEVKKPGASVKVSCKVSGFPIKDTFQHWVRQAPGKGLEWMGWSDPEIGDTEYASKFQGRVTMTEDTSTDTAYMELSSLRSEDTAVYYCATGDTTYKFDFWGQGTTVTVSSASTKGPSVFPLAPCSRSTSESTAALGCLVKDYFPEPVTVSWNSGALTSGVHTFPAVLQSSGLYSLSSVVTVPSSSLGTKTYTCNVDHKPSNTKVDKRVESKYGPPCPPCPAPEFLGGPSVFLFPPKPKDTLMISRTPEVTCVVVDVSQEDPEVQFNWYVDGVEVHNAKTKPREEQFNSTYRVVSVLTVLHQDWLNGKEYKCKVSNKGLPSSIEKTISKAKGQPREPQVYTLPPSQEEMTKNQVSLTCLVKGFYPSDIAVEWESNGQPENNYKTTPPVLDSDGSFFLYSRLTVDKSRWQEGNVFSCSVMHEALHNHYTQKSLSLSLG

SEQ ID NO: 9189 - protein, 467 aa, Artificial Sequence
  source: /note="Description of Artificial Sequence: Synthetic polypeptide"
MEFGLSWLFLVAILKGVQCEVQLLESGGGLVQPGGSLRLSCAASGFTFSSYAMSWVRQAPGKGLEWVSGITGSGGSTYYADSVKGRFTISRDNSKNTLYLQMNSLRAEDTAVYYCAKDPGTTVIMSWFDPWGQGTLVTVSSASTKGPSVFPLAPCSRSTSESTAALGCLVKDYFPEPVTVSWNSGALTSGVHTFPAVLQSSGLYSLSSVVTVPSSNFGTQTYTCNVDHKPSNTKVDKTVERKCCVECPPCPAPPVAGPSVFLFPPKPKDTLMISRTPEVTCVVVDVSHEDPEVQFNWYVDGVEVHNAKTKPREEQFNSTFRVVSVLTVVHQDWLNGKEYKCKVSNKGLPAPIEKTISKTKGQPREPQVYTLPPSREEMTKNQVSLTCLVKGFYPSDIAVEWESNGQPENNYKTTPPMLDSDGSFFLYSKLTVDKSRWQQGNVFSCSVMHEALHNHYTQKSLSLSPGK

SEQ ID NO: 9190 - protein, 452 aa, Artificial Sequence
  source: /note="Description of Artificial Sequence: Synthetic polypeptide"
EVQLLESGGGLVQPGGSLRLSCAASGFTFSSYAMSWVRQAPGKGLEWVSGITGSGGSTYYADSVKGRFTISRDNSKNTLYLQMNSLRAEDTAVYYCAKDPGTTVIMSWFDPWGQGTLVTVSSASTKGPSVFPLAPSSKSTSGGTAALGCLVKDYFPEPVTVSWNSGALTSGVHTFPAVLQSSGLYSLSSVVTVPSSSLGTQTYICNVNHKPSNTKVDKKVEPKSCDKTHTCPPCPAPELLGGPSVFLFPPKPKDTLMISRTPEVTCVVVDVSHEDPEVKFNWYVDGVEVHNAKTKPREEQYNSTYRVVSVLTVLHQDWLNGKEYKCKVSNKALPAPIEKTISKAKGQPREPQVYTLPPSRDELTKNQVSLTCLVKGFYPSDIAVEWESNGQPENNYKTTPPVLDSDGSFFLYSKLTVDKSRWQQGNVFSCSVMHEALHNHYTQKSLSLSPGK

SEQ ID NO: 9191 - protein, 122 aa, Artificial Sequence
  source: /note="Description of Artificial Sequence: Synthetic polypeptide"
QVQLQQSGAELMKPGASVKMSCKATGYIFSNYWIQWIKQRPGHGLEWIGEILPGSGSTEYTENFKDKAAFTADTSSNTAYMQLSSLTSEDSAVYYCARYFFGSSPNWYFDVWGAGTTVTVSS

SEQ ID NO: 9192 - protein, 447 aa, Artificial Sequence
  source: /note="Description of Artificial Sequence: Synthetic polypeptide"
EVQLVQSGAEVKKPGESLKISCKGSGYSFSNYWIGWVRQMPGKGLEWMGIIDPSNSYTRYSPSFQGQVTISADKSISTAYLQWSSLKASDTAMYYCARWYYKPFDVWGQGTLVTVSSASTKGPSVFPLAPSSKSTSGGTAALGCLVKDYFPEPVTVSWNSGALTSGVHTFPAVLQSSGLYSLSSVVTVPSSSLGTQTYICNVNHKPSNTKVDKKVEPKSCDKTHTCPPCPAPELLGGPSVFLFPPKPKDTLMISRTPEVTCVVVDVSHEDPEVKFNWYVDGVEVHNAKTKPREEQYNSTYRVVSVLTVLHQDWLNGKEYKCKVSNKALPAPIEKTISKAKGQPREPQVYTLPPSRDELTKNQVSLTCLVKGFYPSDIAVEWESNGQPENNYKTTPPVLDSDGSFFLYSKLTVDKSRWQQGNVFSCSVMHEALHNHYTQKSLSLSPGK

SEQ ID NO: 9193 - protein, 450 aa, Artificial Sequence; identical to SEQ ID NO: 7100
  source: /note="Description of Artificial Sequence: Synthetic polypeptide"

SEQ ID NO: 9194 - protein, 449 aa, Artificial Sequence
  source: /note="Description of Artificial Sequence: Synthetic polypeptide"
EVQLVESGGGLVKPGGSLKLSCAASGFKFSRYAMSWVRQAPGKRLEWVATISSGGSYIYYPDSVKGRFTISRDNVKNTLYLQMSSLRSEDTAMYYCARRDYDLDYFDSWGQGTLVTVSSASTKGPSVFPLAPSSKSTSGGTAALGCLVKDYFPEPVTVSWNSGALTSGVHTFPAVLQSSGLYSLSSVVTVPSSSLGTQTYICNVNHKPSNTKVDKKVEPKSCDKTHTCPPCPAPELLGGPSVFLFPPKPKDTLMISRTPEVTCVVVDVSHEDPEVKFNWYVDGVEVHNAKTKPREEQYNSTYRVVSVLTVLHQDWLNGKEYKCKVSNKALPAPIEKTISKAKGQPREPQVYTLPPSRDELTKNQVSLTCLVKGFYPSDIAVEWESNGQPENNYKTTPPVLDSDGSFFLYSKLTVDKSRWQQGNVFSCSVMHEALHNHYTQKSLSLSPGK

SEQ ID NO: 9195 - protein, 118 aa, Artificial Sequence
  source: /note="Description of Artificial Sequence: Synthetic polypeptide"
EVQLVESGGGLVKPGGSLKLSCAASGFKFSRYAMSWVRQAPGKRLEWVATISSGGSYIYYPDSVKGRFTISRDNVKNTLYLQMSSLRSEDTAMYYCARRDYDLDYFDSWGQGTLVTVS

SEQ ID NO: 9196 - protein, 119 aa, Artificial Sequence
  source: /note="Description of Artificial Sequence: Synthetic polypeptide"
EVQLVESGGGLVKPGGSLKLSCAASGFKFSRYAMSWVRQAPGKRLEWVATISSGGSYIYYPDSVKGRFTISRDNVKNTLYLQMSSLRSEDTAMYYCARRDYDLDYFDSWGQGTLVTVSS

SEQ ID NO: 9197 - protein, 448 aa, Artificial Sequence
  source: /note="Description of Artificial Sequence: Synthetic polypeptide"
QLQLQESGPGLLKPSETLSLTCTVSGGSISSPGYYGGWIRQPPGKGLEWIGSIYKSGSTYHNPSLKSRVTISVDTSKNQFSLKLSSVTAADTAVYYCTRPVVRYFGWFDPWGQGTLVTVSSASTKGPSVFPLAPCSRSTSESTAALGCLVKDYFPEPVTVSWNSGALTSGVHTFPAVLQSSGLYSLSSVVTVPSSSLGTKTYTCNVDHKPSNTKVDKRVESKYGPPCPPCPAPEFEGGPSVFLFPPKPKDTLMISRTPEVTCVVVDVSQEDPEVQFNWYVDGVEVHNAKTKPREEQFNSTYRVVSVLTVLHQDWLNGKEYKCKVSNKGLPSSIEKTISKAKGQPREPQVYTLPPSQEEMTKNQVSLTCLVKGFYPSDIAVEWESNGQPENNYKTTPPVLDSDGSFFLYSRLTVDKSRWQEGNVFSCSVMHEALHNHYTQKSLSLSLGK

SEQ ID NO: 9198 - protein, 454 aa, Artificial Sequence
  source: /note="Description of Artificial Sequence: Synthetic polypeptide"
EEQLVESGGGLVKPGGSLRLSCAASGFSFSDCRMYWLRQAPGKGLEWIGVISVKSENYGANYAESVRGRFTISRDDSKNTVYLQMNSLKTEDTAVYYCSASYYRYDVGAWFAYWGQGTLVTVSSASTKGPSVFPLAPSSKSTSGGTAALGCLVKDYFPEPVTVSWNSGALTSGVHTFPAVLQSSGLYSLSSVVTVPSSSLGTQTYICNVNHKPSNTKVDKKVEPKSCDKTHTCPPCPAPELLGGPSVFLFPPKPKDTLMISRTPEVTCVVVDVSHEDPEVKFNWYVDGVEVHNAKTKPREEQYNSTYRVVSVLTVLHQDWLNGKEYKCKVSNKALPAPIEKTISKAKGQPREPQVYTLPPSRDELTKNQVSLTCLVKGFYPSDIAVEWESNGQPENNYKTTPPVLDSDGSFFLYSKLTVDKSRWQQGNVFSCSVMHEALHNHYTQKSLSLSPGK

SEQ ID NO: 9199 - protein, 341 aa, Artificial Sequence
  source: /note="Description of Artificial Sequence: Synthetic polypeptide"
DIQMTQSPSSLSASVGDRVTITCRASQAIDSYLHWYQQKPGKAPKLLIYSASNLETGVPSRFSGSGSGTDFTLTISSLLPEDFATYYCQQVVWRPFTFGQGTKVEIKRVEPKSSDKTHTCPPCPAPELLGGPSVFLFPPKPKDTLMISRTPEVTCVVVDVSHEDPEVKFNWYVDGVEVHNAKTKPREEQYNSTYRVVSVLTVLHQDWLNGKEYKCKVSNKALPAPIEKTISKAKGQPREPQVYTLPPSRDELTKNQVSLTCLVKGFYPSDIAVEWESNGQPENNYKTTPPVLDSDGSFFLYSKLTVDKSRWQQGNVFSCSVMHEALHNHYTQKSLSLSPGK

SEQ ID NO: 9200 - protein, 445 aa, Artificial Sequence; identical to SEQ ID NO: 6837
  source: /note="Description of Artificial Sequence: Synthetic polypeptide"

SEQ ID NO: 9201 - protein, 455 aa, Artificial Sequence
  source: /note="Description of Artificial Sequence: Synthetic polypeptide"
EVQLVESGGGLVQPGGSLRLSCAASGFTFSDYNMAWVRQAPGKGLEWVATITYEGRNTYYRDSVKGRFTISRDNAKNSLYLQMNSLRAEDTAVYYCASPPQYYEGSIYRLWFAHWGQGTLVTVSSASTKGPSVFPLAPSSKSTSGGTAALGCLVKDYFPEPVTVSWNSGALTSGVHTFPAVLQSSGLYSLSSVVTVPSSSLGTQTYICNVNHKPSNTKVDKKVEPKSCDKTHTCPPCPAPELLGGPSVFLFPPKPKDTLMISRTPEVTCVVVDVSHEDPEVKFNWYVDGVEVHNAKTKPREEQYNSTYRVVSVLTVLHQDWLNGKEYKCKVSNKALPAPIEKTISKAKGQPREPQVYTLPPSRDELTKNQVSLTCLVKGFYPSDIAVEWESNGQPENNYKTTPPVLDSDGSFFLYSKLTVDKSRWQQGNVFSCSVMHEALHNHYTQKSLSLSPGK

SEQ ID NO: 9202 - protein, 463 aa, Artificial Sequence
  source: /note="Description of Artificial Sequence: Synthetic polypeptide"
MDWTWRVFCLLAVAPGAHSQVQLVQSGAEVVKPGASVKLSCKASGYIFTSYYMYWVKQAPGQGLEWIGEINPSNGDTNFNEKFKSKATLTVDKSASTAYMELSSLRSEDTAVYYCTRSDGRNDMDSWGQGTLVTVSSASTKGPSVFPLAPCSRSTSESTAALGCLVKDYFPEPVTVSWNSGALTSGVHTFPAVLQSSGLYSLSSVVTVPSSSLGTKTYTCNVDHKPSNTKVDKRVESKYGPPCPPCPAPEFLGGPSVFLFPPKPKDTLMISRTPEVTCVVVDVSQEDPEVQFNWYVDGVEVHNAKTKPREEQFNSAYRVVSVLTVLHQDWLNGKEYKCKVSNKGLPSSIEKTISKAKGQPREPQVYTLPPSQEEMTKNQVSLTCLVKGFYPSDIAVEWESNGQPENNYKTTPPVLDSDGSFFLYSRLTVDKSRWQEGNVFSCSVMHEALHNHYTQKSLSLSLG

SEQ ID NO: 9203 - protein, 447 aa, Artificial Sequence
  source: /note="Description of Artificial Sequence: Synthetic polypeptide"
QVQLVQSGAEVKKPGASVKVSCKVSGYTLTELSIHWVRQAPGKGLEWMGGFDPEENEIVYAQRFQGRVTMTEDTSTDTAYMELSSLRSEDTAVYYCAIVGSFSPLTLGLWGQGTMVTVSSASTKGPSVFPLAPCSRSTSESTAALGCLVKDYFPEPVTVSWNSGALTSGVHTFPAVLQSSGLYSLSSVVTVPSSSLGTKTYTCNVDHKPSNTKVDKRVESKYGPPCPSCPAPEFLGGPSVFLFPPKPKDTLMISRTPEVTCVVVDVSQEDPEVQFNWYVDGVEVHNAKTKPREEQFNSTYRVVSVLTVLHQDWLNGKEYKCKVSNKGLPSSIEKTISKAKGQPREPQVYTLPPSQEEMTKNQVSLTCLVKGFYPSDIAVEWESNGQPENNYKTTPPVLDSDGSFFLYSRLTVDKSRWQEGNVFSCSVMHEALHNHYTQKSLSLSLGK

SEQ ID NO: 9204 - protein, 454 aa, Artificial Sequence
  source: /note="Description of Artificial Sequence: Synthetic polypeptide"
QMQLVESGGGVVQPGRSLRLSCTASGFTFSNNGMHWVRQAPGKGLEWVAVIWFDGMNKFYVDSVKGRFTISRDNSKNTLYLEMNSLRAEDTAIYYCAREGDGSGIYYYYGMDVWGQGTTVTVSSASTKGPSVFPLAPSSKSTSGGTAALGCLVKDYFPEPVTVSWNSGALTSGVHTFPAVLQSSGLYSLSSVVTVPSSSLGTQTYICNVNHKPSNTKVDKRVEPKSCDKTHTCPPCPAPELLGGPSVFLFPPKPKDTLMISRTPEVTCVVVDVSHEDPEVKFNWYVDGVEVHNAKTKPREEQYNSTYRVVSVLTVLHQDWLNGKEYKCKVSNKALPAPIEKTISKAKGQPREPQVYTLPPSREEMTKNQVSLTCLVKGFYPSDIAVEWESNGQPENNYKTTPPVLDSDGSFFLYSKLTVDKSRWQQGNVFSCSVMHEALHNHYTQKSLSLSPGK

SEQ ID NO: 9205 - protein, 450 aa, Artificial Sequence; identical to SEQ ID NO: 6920
  source: /note="Description of Artificial Sequence: Synthetic polypeptide"

SEQ ID NO: 9206 - protein, 449 aa, Artificial Sequence
  source: /note="Description of Artificial Sequence: Synthetic polypeptide"
EVQLVESGGGLVQPGGSLRLSCAASGFTFSPFAMSWVRQAPGKGLEWVAKISPGGSWTYYSDTVTGRFTISRDNAKNSLYLQMNSLRAEDTAVYYCARQLWGYYALDIWGQGTTVTVSSASTKGPSVFPLAPSSKSTSGGTAALGCLVKDYFPEPVTVSWNSGALTSGVHTFPAVLQSSGLYSLSSVVTVPSSSLGTQTYICNVNHKPSNTKVDKKVEPKSCDKTHTCPPCPAPELLGGPSVFLFPPKPKDTLMISRTPEVTCVVVDVSHEDPEVKFNWYVDGVEVHNAKTKPREEQYNSTYRVVSVLTVLHQDWLNGKEYKCKVSNKALPAPIEKTISKAKGQPREPQVYTLPPSRDELTKNQVSLTCLVKGFYPSDIAVEWESNGQPENNYKTTPPVLDSDGSFFLYSKLTVDKSRWQQGNVFSCSVMHEALHNHYTQKSLSLSPGK

SEQ ID NO: 9207 - protein, 447 aa, Artificial Sequence
  source: /note="Description of Artificial Sequence: Synthetic polypeptide"
EVQLVESGGGLVQPGGSLRLSCAASGYTFTSYVIHWVRQAPGKGLEWVGYNNPYNAGTNYNEKFKGRFTISSDKSKNTAYLQMNSLRAEDTAVYYCSRPTMLPWFAYWGQGTLVTVSSASTKGPSVFPLAPSSKSTSGGTAALGCLVKDYFPEPVTVSWNSGALTSGVHTFPAVLQSSGLYSLSSVVTVPSSSLGTQTYICNVNHKPSNTKVDKKVEPKSCDKTHTCPPCPAPELLGGPSVFLFPPKPKDTLMISRTPEVTCVVVDVSHEDPEVKFNWYVDGVEVHNAKTKPREEQYNSTYRVVSVLTVLHQDWLNGKEYKCKVSNKALPAPIEKTISKAKGQPREPQVYTLPPSREEMTKNQVSLTCLVKGFYPSDIAVEWESNGQPENNYKTTPPVLDSDGSFFLYSKLTVDKSRWQQGNVFSCSVMHEALHNHYTQKSLSLSPG

SEQ ID NO: 9208 - protein, 449 aa, Artificial Sequence
  source: /note="Description of Artificial Sequence: Synthetic polypeptide"
QVQLVQSGAEVKKPGASVKVSCKAFGYPFTDYLLHWVRQAPGQGLEWVGWLNPYSGDTNYAQKFQGRVTMTRDTSISTAYMELSRLRSDDTAVYYCTRTTLISVYFDYWGQGTMVTVSSASTKGPSVFPLAPSSKSTSGGTAALGCLVKDYFPEPVTVSWNSGALTSGVHTFPAVLQSSGLYSLSSVVTVPSSSLGTQTYICNVNHKPSNTKVDKKVEPKSCDKTHTCPPCPAPELLGGPSVFLFPPKPKDTLMISRTPEVTCVVVDVSHEDPEVKFNWYVDGVEVHNAKTKPREEQYNSTYRVVSVLTVLHQDWLNGKEYKCKVSNKALPAPIEKTISKAKGQPREPQVYTLPPSRDELTKNQVSLTCLVKGFYPSDIAVEWESNGQPENNYKTTPPVLDSDGSFFLYSKLTVDKSRWQQGNVFSCSVMHEALHNHYTQKSLSLSPGK

SEQ ID NO: 9209 - protein, 224 aa, Artificial Sequence
  source: /note="Description of Artificial Sequence: Synthetic polypeptide"
EVQLVESGGGLVQPGRSLRLSCAASGFTFDDYAMHWVRQAPGKGLEWVSAITWNSGHIDYADSVEGRFTISRDNAKNSLYLQMNSLRAEDTAVYYCAKVSYLSTASSLDYWGQGTLVTVSSASTKGPSVFPLAPSSKSTSGGTAALGCLVKDYFPEPVTVSWNSGALTSGVHTFPAVLQSSGLYSLSSVVTVPSSSLGTQTYICNVNHKPSNTKVDKKVEPKSC

SEQ ID NO: 9210 - protein, 229 aa, Artificial Sequence
  source: /note="Description of Artificial Sequence: Synthetic polypeptide"
EVQLVESGGGLVQPGGSLRLSCAVSGFSSTNYHVHWVRQAPGKGLEWMGVIWGDGDTSYNSVLKSRFTISRDTSKNTVYLQMNSLRAEDTAVYYCARQLTHYYVLAAWGQGTLVTVSSASTKGPSVFPLAPSSKSTSGGTAALGCLVKDYFPEPVTVSWNSGALTSGVHTFPAVLQSSGLYSLSSVVTVPSSSLGTQTYICNVNHKPSNTKVDKKVEPKSCDKTHTCAA

SEQ ID NO: 9211 - protein, 221 aa, Artificial Sequence
  source: /note="Description of Artificial Sequence: Synthetic polypeptide"
EVQLVESGGGLVQPGGSLRLSCAVSGFSSTNYHVHWVRQAPGKGLEWMGVIWGDGDTSYNSVLKSRFTISRDTSKNTVYLQMNSLRAEDTAVYYCARQLTHYYVLAAWGQGTLVTVSSASTKGPSVFPLAPSSKSTSGGTAALGCLVKDYFPEPVTVSWNSGALTSGVHTFPAVLQSSGLYSLSSVVTVPSSSLGTQTYICNVNHKPSNTKVDKKVEPKSC

SEQ ID NO: 9212 - protein, 447 aa, Artificial Sequence
  source: /note="Description of Artificial Sequence: Synthetic polypeptide"
EVQLVQSGAEVKKPGESLKISCKGSGYIFTNYWIAWVRQMPGKGLESMGIIYPGDSDIRYSPSFQGQVTISADKSITTAYLQWSSLKASDTAMYYCARHDIEGFDYWGRGTLVTVSSASTKGPSVFPLAPSSKSTSGGTAALGCLVKDYFPEPVTVSWNSGALTSGVHTFPAVLQSSGLYSLSSVVTVPSSSLGTQTYICNVNHKPSNTKVDKRVEPKSCDKTHTCPPCPAPEFEGGPSVFLFPPKPKDTLMISRTPEVTCVVVDVSHEDPEVKFNWYVDGVEVHNAKTKPREEQYNSTYRVVSVLTVLHQDWLNGKEYKCKVSNKALPASIEKTISKAKGQPREPQVYTLPPSREEMTKNQVSLTCLVKGFYPSDIAVEWESNGQPENNYKTTPPVLDSDGSFFLYSKLTVDKSRWQQGNVFSCSVMHEALHNHYTQKSLSLSPGK

SEQ ID NO: 9213 - protein, 447 aa, Artificial Sequence
  source: /note="Description of Artificial Sequence: Synthetic polypeptide"
EVQLVESGGGLVQPGGSLRLSCATSGYTFTEYIIHWVRQAPGKGLEWVASINPDYDITNYNQRFKGRFTISLDKSKRTAYLQMNSLRAEDTAVYYCASWISDFFDYWGQGTLVTVSSASTKGPSVFPLAPSSKSTSGGTAALGCLVKDYFPEPVTVSWNSGALTSGVHTFPAVLQSSGLYSLSSVVTVPSSSLGTQTYICNVNHKPSNTKVDKKVEPKSCDKTHTCPPCPAPELLGGPSVFLFPPKPKDTLMISRTPEVTCVVVDVSHEDPEVKFNWYVDGVEVHNAKTKPREEQYNSTYRVVSVLTVLHQDWLNGKEYKCKVSNKALPAPIEKTISKAKGQPREPQVYTLPPSREEMTKNQVSLTCLVKGFYPSDIAVEWESNGQPENNYKTTPPVLDSDGSFFLYSKLTVDKSRWQQGNVFSCSVMHEALHNHYTQKSLSLSPGK

SEQ ID NO: 9214 - protein, 470 aa, Artificial Sequence
  source: /note="Description of Artificial Sequence: Synthetic polypeptide"
MGWSCIILFLVATATGVHSQVQLVQSGAEVKKPGASVKVSCKGSGYTFTSYWMHWVRQAPGQRLEWIGEIDPSESNTNYNQKFKGRVTLTVDISASTAYMELSSLRSEDTAVYYCARGGYDGWDYAIDYWGQGTLVTVSSASTKGPSVFPLAPSSKSTSGGTAALGCLVKDYFPEPVTVSWNSGALTSGVHTFPAVLQSSGLYSLSSVVTVPSSSLGTQTYICNVNHKPSNTKVDKKVEPKSCDKTHTCPPCPAPELAGAPSVFLFPPKPKDTLMISRTPEVTCVVVDVSHEDPEVKFNWYVDGVEVHNAKTKPREEQYNSTYRVVSVLTVLHQDWLNGKEYKCKVSNKALPAPIEKTISKAKGQPREPQVYTLPPSRDELTKNQVSLTCLVKGFYPSDIAVEWESNGQPENNYKTTPPVLDSDGSFFLYSKLTVDKSRWQQGNVFSCSVMHEALHNHYTQKSLSLSPGK

SEQ ID NO: 9215 - protein, 452 aa, Artificial Sequence
  source: /note="Description of Artificial Sequence: Synthetic polypeptide"
QVQLKQSGPGLVQPSQSLSITCTVSGFSLTNYGVHWVRQSPGKGLEWLGVIWSGGNTDYNTPFTSRLSINKDNSKSQVFFKMNSLQSNDTAIYYCARALTYYDYEFAYWGQGTLVTVSAASTKGPSVFPLAPSSKSTSGGTAALGCLVKDYFPEPVTVSWNSGALTSGVHTFPAVLQSSGLYSLSSVVTVPSSSLGTQTYICNVNHKPSNTKVDKRVEPKSPKSCDKTHTCPPCPAPELLGGPSVFLFPPKPKDTLMISRTPEVTCVVVDVSHEDPEVKFNWYVDGVEVHNAKTKPREEQYNSTYRVVSVLTVLHQDWLNGKEYKCKVSNKALPAPIEKTISKAKGQPREPQVYTLPPSRDELTKNQVSLTCLVKGFYPSDIAVEWESNGQPENNYKTTPPVLDSDGSFFLYSKLTVDKSRWQQGNVFSCSVMHEALHNHYTQKSLSLSPGK

SEQ ID NO: 9216 - protein, 116 aa, Artificial Sequence
  source: /note="Description of Artificial Sequence: Synthetic polypeptide"
QVQLQQSGAELAKPGASVKMSCKASGYTFTSYRMHWVKQRPGQGLEWIGYINPSTGYTEYNQKFKDKATLTADKSSSTAYMQLSSLTFEDSAVYYCARGGGVFDYWGQGTTLTVSS

SEQ ID NO: 9217 - protein, 456 aa, Artificial Sequence
  source: /note="Description of Artificial Sequence: Synthetic polypeptide"
QVQLQQSGAELVKPGASVKLSCKASGYTFRSYDINWVRQRPEQGLEWIGWIFPGDGSTKYNEKFKGKATLTTDKSSSTAYMQLSRLTSEDSAVYFCARWTVVGPGYFDVWGAGTTVTVSSAKTTPPSVYPLAPGCGDTTGSSVTLGCLVKGYFPESVTVTWNSGSLSSSVHTFPALLQSGLYTMSSSVTVPSSTWPSQTVTCSVAHPASSTTVDKKLEPSGPISTINPCPPCKECHKCPAPNLEGGPSVFIFPPNIKDVLMISLTPKVTCVVVDVSEDDPDVQISWFVNNVEVHTAQTQTHREDYNSTIRVVSTLPIQHQDWMSGKEFKCKVNNKDLPSPIERTISKIKGLVRAPQVYILPPPAEQLSRKDVSLTCLVVGFNPGDISVEWTSNGHTEENYKDTAPVLDSDGSYFIYSKLNMKTSKWEKTDSFSCNVRHEGLKNYYLKKTISRSPGK

SEQ ID NO: 9218 - protein, 443 aa, Artificial Sequence
  source: /note="Description of Artificial Sequence: Synthetic polypeptide"
QVKLQESGAELARPGASVKLSCKASGYTFTNYWMQWVKQRPGQGLDWIGAIYPGDGNTRYTHKFKGKATLTADKSSSTAYMQLSSLASEDSGVYYCARGEGNYAWFAYWGQGTTVTVSSAKTTPPSVYPLAPGSAAQTNSMVTLGCLVKGYFPEPVTVTWNSGSLSSGVHTFPAVLQSDLYTLSSSVTVPSSTWPSETVTCNVAHPASSTKVDKKIVPRDCGCKPCICTVPEVSSVFIFPPKPKDVLTITLTPKVTCVVVDISKDDPEVQFSWFVDDVEVHTAQTQPREEQFNSTFRSVSELPIMHQDWLNGKEFKCRVNSAAFPAPIEKTISKTKGRPKAPQVYTIPPPKEQMAKDKVSLTCMITDFFPEDITVEWQWNGQPAENYKNTQPIMDTDGSYFVYSKLNVQKSNWEAGNTFTCSVLHEGLHNHHTEKSLSHSPGK

SEQ ID NO: 9219 - protein, 453 aa, Artificial Sequence
  source: /note="Description of Artificial Sequence: Synthetic polypeptide"
EVQLVESGGGLVQPGGSLRLSCAASGYTFTNYGMNWVRQAPGKGLEWVGWINTYTGEPTYAADFKRRFTFSLDTSKSTAYLQMNSLRAEDTAVYYCAKYPHYYGSSHWYFDVWGQGTLVTVSSASTKGPSVFPLAPSSKSTSGGTAALGCLVKDYFPEPVTVSWNSGALTSGVHTFPAVLQSSGLYSLSSVVTVPSSSLGTQTYICNVNHKPSNTKVDKKVEPKSCDKTHTCPPCPAPELLGGPSVFLFPPKPKDTLMISRTPEVTCVVVDVSHEDPEVKFNWYVDGVEVHNAKTKPREEQYNSTYRVVSVLTVLHQDWLNGKEYKCKVSNKALPAPIEKTISKAKGQPREPQVYTLPPCRDELTKNQVSLWCLVKGFYPSDIAVEWESNGQPENNYKTTPPVLDSDGSFFLYSKLTVDKSRWQQGNVFSCSVMHEALHNHYTQKSLSLSPGK

SEQ ID NO: 9220 - protein, 326 aa, Artificial Sequence; identical to SEQ ID NO: 7181
  source: /note="Description of Artificial Sequence: Synthetic polypeptide"

SEQ ID NO: 9221 - protein, 227 aa, Artificial Sequence
  source: /note="Description of Artificial Sequence: Synthetic polypeptide"
DKTHTCPPCPAPELLGGPSVFLFPPKPKDTLMISRTPEVTCVVVDVSHEDPEVKFNWYVDGVEVHNAKTKPREEQYNSTYRVVSVLTVLHQDWLNGKEYKCKVSNKALPAPIEKTISKAKGQPREPQVYTLPPSREEMTKNQVSLTCLVKGFYPSDIAVEWESNGQPENNYKTTPPVLDSDGSFFLYSKLTVDKSRWQQGNVFSCSVMHEALHNHYTQKSLSLSPGK

SEQ ID NO: 9222 - protein, 224 aa, Artificial Sequence
  source: /note="Description of Artificial Sequence: Synthetic polypeptide"
EVQLVESGGGLVQPGGSLRLSCAASGFTLSGDWIHWVRQAPGKGLEWVGEISAAGGYTDYADSVKGRFTISADTSKNTAYLQMNSLRAEDTAVYYCARESRVSFEAAMDYWGQGTLVTVSSASTKGPSVFPLAPSSKSTSGGTAALGCLVKDYFPEPVTVSWNSGALTSGVHTFPAVLQSSGLYSLSSVVTVPSSSLGTQTYICNVNHKPSNTKVDKKVEPKSC

SEQ ID NO: 9223 - protein, 96 aa, Artificial Sequence
  source: /note="Description of Artificial Sequence: Synthetic polypeptide"
EVQLVESGGDFVQPGGSLRVSCAASGFAFSHYAMSWVRQAPGKGLEWVAYISSGGSGTYYSDSVKGRFTISRDNSKNTLYLQMRSLRAEDSAVYFC

SEQ ID NO: 9224 - protein, 116 aa, Artificial Sequence
  source: /note="Description of Artificial Sequence: Synthetic polypeptide"
QVQLQESGPGLVKPSETLSLTCTVSGFSLTNYGVHWVRQSPGKGLEWIGVKWSGGSTEYNAAFISRLTISKDTSKNQVSLKLNSLTAADTAVYYCARNDRYAMDYWGQGTLVTVSS

SEQ ID NO: 9225 - protein, 446 aa, Artificial Sequence
  source: /note="Description of Artificial Sequence: Synthetic polypeptide"
QLQQSGTVLARPGASVKMSCKASGYSFTRYWMHWIKQRPGQGLEWIGAIYPGNSDTSYNQKFEGKAKLTAVTSASTAYMELSSLTHEDSAVYYCSRDYGYYFDFWGQGTTLTVSSASTKGPSVFPLAPSSKSTSGGTAALGCLVKDYFPEPVTVSWNSGALTSGVHTFPAVLQSSGLYSLSSVVTVPSSSLGTQTYICNVNHKPSNTKVDKRVEPPKSCDKTHTCPPCPAPELLGGPSVFLFPPKPKDTLMISRTPEVTCVVVDVSHEDPEVKFNWYVDGVEVHNAKTKPREEQYNSTYRVVSVLTVLHQDWLNGKEYKCKVSNKALPAPIEKTISKAKGQPREPQVYTLPPSRDELTKNQVSLTCLVKGFYPSDIAVEWESNGQPENNYKTTPPVLDSDGSFFLYSKLTVDKSRWQQGNVFSCSVMHEALHNHYTQKSLSLSPGK

SEQ ID NO: 9226 - protein, 8 aa, Artificial Sequence
  source: /note="Description of Artificial Sequence: Synthetic peptide"
GFAFSIYD

SEQ ID NO: 9227 - protein, 5 aa, Artificial Sequence
  source: /note="Description of Artificial Sequence: Synthetic peptide"
NYWIH

SEQ ID NO: 9228 - protein, 7 aa, Artificial Sequence
  source: /note="Description of Artificial Sequence: Synthetic peptide"
SGDYYWS

SEQ ID NO: 9229 - protein, 5 aa, Artificial Sequence
  source: /note="Description of Artificial Sequence: Synthetic peptide"
IYYWS

SEQ ID NO: 9230 - protein, 10 aa, Artificial Sequence
  source: /note="Description of Artificial Sequence: Synthetic peptide"
GYTFTSYWLH

SEQ ID NO: 9231 - protein, 5 aa, Artificial Sequence
  source: /note="Description of Artificial Sequence: Synthetic peptide"
NYYMY

SEQ ID NO: 9232 - protein, 8 aa, Artificial Sequence
  source: /note="Description of Artificial Sequence: Synthetic peptide"
ISSGGGTT

SEQ ID NO: 9233 - protein, 17 aa, Artificial Sequence
  source: /note="Description of Artificial Sequence: Synthetic peptide"
GINPGNNYATYRRKFQG

SEQ ID NO: 9234 - protein, 16 aa, Artificial Sequence
  source: /note="Description of Artificial Sequence: Synthetic peptide"
YIYYSGSTDYNPSLKS

SEQ ID NO: 9235 - protein, 16 aa, Artificial Sequence
  source: /note="Description of Artificial Sequence: Synthetic peptide"
YVYYSGSTNYNPSLKS

SEQ ID NO: 9236 - protein, 18 aa, Artificial Sequence
  source: /note="Description of Artificial Sequence: Synthetic peptide"
GMIDPSNSDTRFNPNFKD

SEQ ID NO: 9237 - protein, 17 aa, Artificial Sequence
  source: /note="Description of Artificial Sequence: Synthetic peptide"
GINPSNGGTNFNEKFKN

SEQ ID NO: 9238 - protein, 16 aa, Artificial Sequence
  source: /note="Description of Artificial Sequence: Synthetic peptide"
ARHSGYGTHWGVLFAY

SEQ ID NO: 9239 - protein, 12 aa, Artificial Sequence
  source: /note="Description of Artificial Sequence: Synthetic peptide"
EGYGNYGAWFAY

SEQ ID NO: 9240 - protein, 11 aa, Artificial Sequence
  source: /note="Description of Artificial Sequence: Synthetic peptide"
VSIFGVGTFDY

SEQ ID NO: 9241 - protein, 12 aa, Artificial Sequence
  source: /note="Description of Artificial Sequence: Synthetic peptide"
GGYDFWSGYFDY

SEQ ID NO: 9242 - protein, 12 aa, Artificial Sequence
  source: /note="Description of Artificial Sequence: Synthetic peptide"
ATYRSYVTPLDY

SEQ ID NO: 9243 - protein, 11 aa, Artificial Sequence
  source: /note="Description of Artificial Sequence: Synthetic peptide"
RDYRFDMGFDY

SEQ ID NO: 9244 - protein, 220 aa, Artificial Sequence
  source: /note="Description of Artificial Sequence: Synthetic polypeptide"
EVQLVESGGGLVQPGGSLRLSCAASGFNIKDTYIHWVRQAPGKGLEWVARIYPTNGYTRYADSVKGRFTISADTSKNTAYLQMNSLRAEDTAVYYCSRWGGDGFYAMDYWGQGTLVTVSSASTKGPSVFPLAPSSKSTSGGTAALGCLVKDYFPEPVTVSWNSGALTSGVHTFPAVLQSSGLYSLSSVVTVPSSSLGTQTYICNVNHKPSNTKVDKKVEP

SEQ ID NO: 9245 - protein, 448 aa, Artificial Sequence
  source: /note="Description of Artificial Sequence: Synthetic polypeptide"
QVQLVESGGGVVQPGRSLRLSCAASGFTFSVYGMNWVRQAPGKGLEWVAIIWYDGDNQYYADSVKGRFTISRDNSKNTLYLQMNGLRAEDTAVYYCARDLRTGPFDYWGQGTLVTVSSASTKGPSVFPLAPSSKSTSGGTAALGCLVKDYFPEPVTVSWNSGALTSGVHTFPAVLQSSGLYSLSSVVTVPSSSLGTQTYICNVNHKPSNTKVDKRVEPKSCDKTHTCPPCPAPELLGGPSVFLFPPKPKDTLMISRTPEVTCVVVDVSHEDPEVKFNWYVDGVEVHNAKTKPREEQYNSTYRVVSVLTVLHQDWLNGKEYKCKVSNKALPAPIEKTISKAKGQPREPQVYTLPPSREEMTKNQVSLTCLVKGFYPSDIAVEWESNGQPENNYKTTPPVLDSDGSFFLYSKLTVDKSRWQQGNVFSCSVMHEALHNHYTQKSLSLSPGK

SEQ ID NO: 9246 - protein, 450 aa, Artificial Sequence
  source: /note="Description of Artificial Sequence: Synthetic polypeptide"
EVQLVESGGGLVQPGGSLRLSCAASGFNIKDTYIHWVRQAPGKGLEWVARIYPTNGYTRYADSVKGRFTISADTSKNTAYLQMNSLRAEDTAVYYCSRWGGDGFYAMDYWGQGTLVTVSSASTKGPSVFPLAPSSKSTSGGTAALGCLVKDYFPEPVTVSWNSGALTSGVHTFPAVLQSSGLYSLSSVVTVPSSSLGTQTYICNVNHKPSNTKVDKKVEPKSCDTPPPCPRCPAPELLGGPSVFLFPPKPKDTLMISRTPEVTCVVVDVSHEDPEVKFNWYVDGVEVHNAKTKPREEQYNSTYRVVSVLTVLHQDWLNGKEYKCKVSNKALPAPIEKTISKAKGQPREPQVYTLPPSRDELTKNQVSLTCLVKGFYPSDIAVEWESNGQPENNYKTTPPVLDSDGSFFLYSKLTVDKSRWQQGNVFSCSVMHEALHNHYTQKSLSLSPGK

SEQ ID NO: 9247 - protein, 437 aa, Artificial Sequence
  source: /note="Description of Artificial Sequence: Synthetic polypeptide"
QVQLQESGPGLVRPSQTLSLTCTVSGFTFTDFYMNWVRQPPGRGLEWIGFIRDKAKGYTTEYNPSVKGRVTMLVDTSKNQFSLRLSSVTAADTAVYYCAREGHTAAPFDYWGQGSLVTVSSASTKGPSVFPLAPSSKSTSGGTAALGCLVKDYFPEPVTVSWNSGALTSGVHTFPAVLQSSGLYSLSSVVTVPSSSLGTQTYICNVNHKPSNTKVDKKVEAPELLGGPSVFLFPPKPKDTLMISRTPEVTCVVVDVSHEDPEVKFNWYVDGVEVHNAKTKPREEQYNSTYRVVSVLTVLHQDWLNGKEYKCKVSNKALPAPIEKTISKAKGQPREPQVYTLPPSRDELTKNQVSLTCLVKGFYPSDIAVEWESNGQPENNYKTTPPVLDSDGSFFLYSKLTVDKSRWQQGNVFSCSVMHEALHNHYTQKSLSLSPGK

SEQ ID NO: 9248 - protein, 247 aa, Artificial Sequence
  source: /note="Description of Artificial Sequence: Synthetic polypeptide"
QVQLVQSGAEVKKPGASVKVSCKASGYTFSAYWIEWVRQAPGKGLEWVGEILPGSNNSRYNEKFKGRVTVTADTSTNTAYMELSSLRSEDTAVYYCARSYDFAWFAYWGQGTLVTVSSGGGGSGGGGSGGGGSDIQMTQSPSSLSASVGDRVTITCKSSQSLLYSSNQKIYLAWYQQKPGKAPKLLIYWASTRESGVPSRFSGSGSGTDFTFTISSLQPEDIATYYCQQYYRYPRTFGQGTKVEIKR

SEQ ID NO: 9249 - protein, 5 aa, Artificial Sequence
  source: /note="Description of Artificial Sequence: Synthetic peptide"
RYWMS

SEQ ID NO: 9250 - protein, 17 aa, Artificial Sequence
  source: /note="Description of Artificial Sequence: Synthetic peptide"
EINPDSSTINYAPSLKD

SEQ ID NO: 9251 - protein, 10 aa, Artificial Sequence
  source: /note="Description of Artificial Sequence: Synthetic peptide"
PDGNYWYFDV

SEQ ID NO: 9252 - protein, 11 aa, Artificial Sequence
  source: /note="Description of Artificial Sequence: Synthetic peptide"
KASQDVGIAVA

SEQ ID NO: 9253 - protein, 7 aa, Artificial Sequence
  source: /note="Description of Artificial Sequence: Synthetic peptide"
WASTRHT

SEQ ID NO: 9254 - protein, 9 aa, Artificial Sequence
  source: /note="Description of Artificial Sequence: Synthetic peptide"
QQYSSYPYT

SEQ ID NO: 9255 - protein, 220 aa, Artificial Sequence
  source: /note="Description of Artificial Sequence: Synthetic polypeptide"
QVQLQESGPGLVRPSQTLSLTCTVSGFTFTDFYMNWVRQPPGRGLEWIGFIRDKAKGYTTEYNPSVKGRVTMLVDTSKNQFSLRLSSVTAADTAVYYCAREGHTAAPFDYWGQGSLVTVSSASTKGPSVFPLAPSSKSTSGGTAALGCLVKDYFPEPVTVSWNSGALTSGVHTFPAVLQSSGLYSLSSVVTVPSSSLGTQTYICNVNHKPSNTKVDKKVE

SEQ ID NO: 9256 - protein, 219 aa, Artificial Sequence
  source: /note="Description of Artificial Sequence: Synthetic polypeptide"
QVQLQESGPGLVRPSQTLSLTCTVSGFTFTDFYMNWVRQPPGRGLEWIGFIRDKAKGYTTEYNPSVKGRVTMLVDTSKNQFSLRLSSVTAADTAVYYCAREGHTAAPFDYWGQGSLVTVSSASTKGPSVFPLAPSSKSTSGGTAALGCLVKDYFPEPVTVSWNSGALTSGVHTFPAVLQSSGLYSLSSVVTVPSSSLGTQTYICNVNHKPSNTKVDKKV

SEQ ID NO: 9257 - protein, 211 aa, Artificial Sequence
  source: /note="Description of Artificial Sequence: Synthetic polypeptide"
DIQMTQSPSSLSASVGDRVTITCKASQNIDKYLNWYQQKPGKAPKLLIYNTNNLQTGVPSRFSGSGSGTDFTFTISSLQPEDIATYYCLQHISRPRTFGQGTKVEIKRTVAAPSVFIFPPSDEQLKSGTASVVCLLNNFYPREAKVQWKVDNALQSGNSQESVTEQDSKDSTYSLSSTLTLSKADYEKHKVYACEVTHQGLSSPVTKSFNR

SEQ ID NO: 9258 - protein, 214 aa, Artificial Sequence
  source: /note="Description of Artificial Sequence: Synthetic polypeptide"
DIQMTQSPSSLSASVGDRVTITCKASQNIDKYLNWYQQKPGKAPKLLIYNTNNLQTGVPSRFSGSGSGTDFTFTISSLQPEDIATYYCLQHISRPRTFGQGTKVEIKRTVAAPSVFIFPPSDEQLKSGTASVVCLLNNFYPREAKVQWKVDNALQSGNSQESVTEQDSKDSTYSLSSTLTLSKADYEKHKVYACEVTHQGLSSPVTKSFNRGEC

SEQ ID NO: 9259 - protein, 214 aa, Artificial Sequence
  source: /note="Description of Artificial Sequence: Synthetic polypeptide"
QVDIQMTQSPSSLSASVGDRVTITCSASSSVTYMYWYQQKPGKAPKLLIYDTSNLASGVPSRFSGSGSGTDYTFTISSLQPEDIATYYCQQWSSHIFTFGQGTKVEIKRTVAAPSVFIFPPSDEQLKSGTASVVCLLNNFYPREAKVQWKVDNALQSGNSQESVTEQDSKDSTYSLSSTLTLSKADYEKHKVYACEVTHQGLSSPVTKSFNRGE

SEQ ID NO: 9260 - protein, 447 aa, Artificial Sequence
  source: /note="Description of Artificial Sequence: Synthetic polypeptide"
QAYLQQSGAELVRPGASVKMSCKASGYTFTSYNMHWVKQTPRQGLEWIGAIYPGNGDTSYNQKFKGKATLTVDKSSSTAYMQLSSLTSEDSAVYFCARVVYYSNSYWYFDVWGTGTTVTVSGPSVFPLAPSSKSTSGGTAALGCLVKDYFPEPVTVSWNSGALTSGVHTFPAVLQSSGLYSLSSVVTVPSSSLGTQTYICNVNHKPSNTKVDKKAEPKSCDKTHTCPPCPAPELLGGPSVFLFPPKPKDTLMISRTPEVTCVVVDVSHEDPEVKFNWYVDGVEVHNAKTKPREEQYNSTYRVVSVLTVLHQDWLNGKEYKCKVSNKALPAPIEKTISKAKGQPREPQVYTLPPSRDELTKNQVSLTCLVKGFYPSDIAVEWESNGQPENNYKTTPPVLDSDGSFFLYSKLTVDKSRWQQGNVFSCSVMHEALHNHYTQKSLSLSPGK

SEQ ID NO: 9261 - protein, 210 aa, Artificial Sequence
  source: /note="Description of Artificial Sequence: Synthetic polypeptide"
QIVLSQSPAILSASPGEKVTMTCRASSSVSYMHWYQQKPGSSPKPWIYAPSNLASGVPARFSGSGSGTSYSLTISRVEAEDAATYYCQQWSFNPPTFGAGTKLELKRTVAAPSVFIFPPSDEQLKSGTASVVCLLNNFYPREAKVQWKVDNALQSGNSQESVTEQDSKDSTYSLSSTLTLSKADYEKHKVYACEVTHQGLSSPVTKSFNR

SEQ ID NO: 9262 - protein, 330 aa, Artificial Sequence [sequence omitted]

SEQ ID NO: 9263 - protein, 218 aa, Artificial Sequence
  source: /note="Description of Artificial Sequence: Synthetic polypeptide"
DIQMTQSPSSLSASVGDRVTITCKASQSVDYDGDSYMNWYQQKPGKAPKLLIYAASNLESGIPSRFSGSGSGTDFTLTISSLQPEDFATYYCQQSNEDPWTFGQGTKVEIKRTVAAPSVFIFPPSDEQLKSGTASVVCLLNNFYPREAKVQWKVDNALQSGNSQESVTEQDSKDSTYSLSSTLTLSKADYEKHKVYACEVTHQGLSSPVTKSFNRGEC

SEQ ID NO: 9264 - protein, 218 aa, Artificial Sequence; identical to SEQ ID NO: 9263
  source: /note="Description of Artificial Sequence: Synthetic polypeptide"

SEQ ID NO: 9265 - protein, 443 aa, Artificial Sequence
  source: /note="Description of Artificial Sequence: Synthetic polypeptide"
EVQLVESGGGLVQPGGSLRLSCAASGFTFSTYAMSWVRQAPGKGLEWVASISTGGSTYYPDSVKGRFTISRDNAKNTLYLQMNSLRAEDTAVYYCARDYDGYFDYWGQGTLVTVSSASTKGPSVFPLAPCSRSTSESTAALGCLVKDYFPEPVTVSWNSGALTSGVHTFPAVLQSSGLYSLSSVVTVPSSSLGTKTYTCNVDHKPSNTKVDKRVESKYGPPCPSCPAPEFLGGPSVFLFPPKPKDTLMISRTPEVTCVVVDVSQEDPEVQFNWYVDGVEVHNAKTKPREEQFNSTYRVVSVLTVLHQDWLNGKEYKCKVSNKGLPSSIEKTISKAKGQPREPQVYTLPPSQEEMTKNQVSLTCLVKGFYPSDIAVGWESNGQPENNYKTTPPVLDSDGSFFLYSRLTVDKSRWQEGNVFSCSVMHEALHNHYTQKSLSLSLGK

SEQ ID NO: 9266 - protein, 443 aa, Artificial Sequence
  source: /note="Description of Artificial Sequence: Synthetic polypeptide"
EVQLVESGGGLVQPGGSLRLSCAASGFTFSTYAMSWVRQAPGKGLEWVASISTGGSTYYPDSVKGRFTISRDNAKNTLYLQMNSLRAEDTAVYYCARDYDGYFDYWGQGTLVTVSSASTKGPSVFPLAPCSRSTSESTAALGCLVKDYFPEPVTVSWNSGALTSGVHTFPAVLQSSGLYSLSSVVTVPSSSLGTKTYTCNVDHKPSNTKVDKRVESKYGPPCPSCPAPEFLGGPSVFLFPPKPKDTLMISRTPEVTCVVVDVSQEDPEVQFNWYVDGVEVHNAKTKPREEQFNSTYRVVSVLTVLHQDWLNGKEYKCKVSNKGLPSSIEKTISKAKGQPREPQVYTLPPSQEEMTKNQVSLTCLVKGFYPSDIAVEWESNGQPENNYKTTPPVLDSDGSFFLYSRLTVDKSRWQEGNVFSCSVMHEALHNHYTQKSLSLSLGK

SEQ ID NO: 9267 - protein, 105 aa, Artificial Sequence
  source: /note="Description of Artificial Sequence: Synthetic polypeptide"
DAAPTVSIFPPSSEQLTSGGASVVCFLNNFYPKDINVKWKIDGSERQNGVLNSWTDQDSKDSTYSMSSTLTLTKDEYERHNSYTCEATHKTSTSPIVKSFNRNEC

SEQ ID NO: 9268 - protein, 106 aa, Artificial Sequence
  source: /note="Description of Artificial Sequence: Synthetic polypeptide"
EIVLTQSPSSLSASVGDRVTITCSARSSVSYMHWYQQKPGKAPKLLIYRTSNLASGVPSRFSGSGSGTDFTLTINSLQPEDFATYYCQQRSSFPLTFGGGTKLEIK

SEQ ID NO: 9269 - protein, 106 aa, Artificial Sequence
  source: /note="Description of Artificial Sequence: Synthetic polypeptide"
EIVLTQSPSSLSASVGDRVTITCSARSSVSYMHWFQQKPGKAPKLWIYRTSNLASGVPSRFSGSGSGTDYTLTINSLQPEDFATYYCQQRSSFPLTFGGGTKLEIK

SEQ ID NO: 9270 - protein, 106 aa, Artificial Sequence
  source: /note="Description of Artificial Sequence: Synthetic polypeptide"
EIVLTQSPSSLSASVGDRVTITCSARSSVSYMHWFQQKPGKAPKLWIYRTSNLASGVPSRFSGSGSGTDYCLTINSLQPEDFATYYCQQRSSFPLTFGGGTKLEIK

SEQ ID NO: 9271 - protein, 106 aa, Artificial Sequence
  source: /note="Description of Artificial Sequence: Synthetic polypeptide"
EIVLTQSPSSLSASVGDRVTITCSARSSVSYMHWFQQKPGKAPKLWIYRTSNLASGVPSRFSGSGSGTSYCLTINSLQPEDFATYYCQQRSSFPLTFGGGTKLEIK

SEQ ID NO: 9272 - protein, 113 aa, Artificial Sequence
  source: /note="Description of Artificial Sequence: Synthetic polypeptide"
DIVMTQSPSSLTVTAGEKVTMSCKSSQSLLDSGNQKNFLTWYQQKPGQPPKLLIFWASTRESGVPDRFTGSGSVTDFTLTISSVQAEDLAVYYCQNDYSYPCTFGGGTKLEIK

SEQ ID NO: 9273 - protein, 107 aa, Artificial Sequence
  source: /note="Description of Artificial Sequence: Synthetic polypeptide"
DIVMTQTPSSLSASVGDRVTITCRASQDISKFLNWYQQKPGKAIKLLIYHTSRLHSGVPSRFSGSGSGTDFTLTISSLQPEDFATYYCQQGNTLPYTFGPGTKVDIK

SEQ ID NO: 9274 - protein, 107 aa, Artificial Sequence
  source: /note="Description of Artificial Sequence: Synthetic polypeptide"
DIQMTQSPSSLSASVGDRVTITCRASQDISKYLNWYQQKPGKAPKLLIYHTSRLHSGVPSRFSGSGSGTDFTLTISSLQPEDFATYYCQQGATLPYTFGPGTKVDIK

SEQ ID NO: 9275 - protein, 107 aa, Artificial Sequence
  source: /note="Description of Artificial Sequence: Synthetic polypeptide"
DIQMTQSPSSLSASVGDRVTITCRASQDISKFLNWYQQKPGKAPKLLIYHTSRLHSGVPSRFSGSGSGTDFTLTISSLQPEDFATYYCQQGATLPYTFGPGTKVDIK

SEQ ID NO: 9276 - protein, 107 aa, Artificial Sequence
  source: /note="Description of Artificial Sequence: Synthetic polypeptide"
DIQMTQSPSSLSASVGDRVTITCRASQDISKYLNWYQQKPGKAIKLLIYHTSRLHSGVPSRFSGSGSGTDFTLTISSLQPEDFATYYCQQGATLPYTFGPGTKVDIK

SEQ ID NO: 9277 - protein, 240 aa, Artificial Sequence
  source: /note="Description of Artificial Sequence: Synthetic polypeptide"
QVQLVQSGGGVVQPGRSLRLSCAASGVSLPDYGVSWVRQAPGKGLEWVAVIWGSETTYYNSALKSRFTISKDNSKNTLYLQMNSLRAEDTAVYYCARHYYYGGSYAMDYWGQGTLVTVSSQVQLVQSGGGVVQPGRSLRLSCAASGVSLPDYGVSWVRQAPGKGLEWVAVIWGSETTYYNSALKSRFTISRDNSKNTVYLQMNSLRAEDTAVYYCARHYYYGGSYAMDYWGQGTLVTVSS

SEQ ID NO: 9278 - protein, 120 aa, Artificial Sequence
  source: /note="Description of Artificial Sequence: Synthetic polypeptide"
QVQLVQSGGGVVQPGRSLRLSCAASGVSLPDYGVSWVRQAPGKGLEWVAVIWGSETTYYNSALKSRFTISRDNSKNTLYLQMNSLRAEDTAVYYCAKHYYYGGSYAMDYWGQGTLVTVSS

SEQ ID NO: 9279 - protein, 107 aa, Artificial Sequence
  source: /note="Description of Artificial Sequence: Synthetic polypeptide"
DIVMTQTPSSLSASVGDRVTITCRASQDISKYLNWYQQKPGKAVKLLIYHTSRLHSGVPSRFSGSGSGTDFTLTISSLQPEDFATYYCQQGNTLPYTFGPGTKVDIK

SEQ ID NO: 9280 - protein, 107 aa, Artificial Sequence
  source: /note="Description of Artificial Sequence: Synthetic polypeptide"
DIVMTQTPSSLSASVGDRVTITCRASQDISKYLNWYQQKPGKAPKLLIYHTSRLHSGVPSRFSGSGSGTDYTLTISSLQPEDFATYYCQQGNTLPYTFGPGTKVDIK

SEQ ID NO: 9281 - protein, 214 aa, Artificial Sequence
  source: /note="Description of Artificial Sequence: Synthetic polypeptide"
DIQMTQSPSSLSASVGDRVTITCRASQDVSTAVAWYQQKPGKAPKLLIYSASFLYSGVPSRFSGSGSGTDFTLTISSLQPEDFATYYCQQYLYHPATFGQGTKVEIKRTVAAPSVFIFPPSDEQLKSGTASVVCLLNNFYPREAKVQWKVDNALQSGNSQESVTEQDSKDSTYSLSSTLTLSKADYEKHKVYACEVTHQGLSSPVTKSFNRGEC

SEQ ID NO: 9282 - protein, 219 aa, Artificial Sequence; identical to SEQ ID NO: 4044
  source: /note="Description of Artificial Sequence: Synthetic polypeptide"

SEQ ID NO: 9283 - protein, 219 aa, Artificial Sequence; identical to SEQ ID NO: 4045
  source: /note="Description of Artificial Sequence: Synthetic polypeptide"

SEQ ID NO: 9284 - protein, 220 aa, Artificial Sequence; identical to SEQ ID NO: 4046
  source: /note="Description of Artificial Sequence: Synthetic polypeptide"

SEQ ID NO: 9285 - protein, 219 aa, Artificial Sequence; identical to SEQ ID NO: 4047
  source: /note="Description of Artificial Sequence: Synthetic polypeptide"

SEQ ID NO: 9286 - protein, 220 aa, Artificial Sequence; identical to SEQ ID NO: 4048
  source: /note="Description of Artificial Sequence: Synthetic polypeptide"

SEQ ID NO: 9287 - protein, 220 aa, Artificial Sequence; identical to SEQ ID NO: 4049
  source: /note="Description of Artificial Sequence: Synthetic polypeptide"

SEQ ID NO: 9288 - protein, 220 aa, Artificial Sequence; identical to SEQ ID NO: 4050
  source: /note="Description of Artificial Sequence: Synthetic polypeptide"

SEQ ID NO: 9289 - protein, 219 aa, Artificial Sequence; identical to SEQ ID NO: 4051
  source: /note="Description of Artificial Sequence: Synthetic polypeptide"

SEQ ID NO: 9290 - protein, 219 aa, Artificial Sequence; identical to SEQ ID NO: 4052
  source: /note="Description of Artificial Sequence: Synthetic polypeptide"

SEQ ID NO: 9291 - protein, 219 aa, Artificial Sequence; identical to SEQ ID NO: 4053
  source: /note="Description of Artificial Sequence: Synthetic polypeptide"

SEQ ID NO: 9292 - protein, 219 aa, Artificial Sequence; identical to SEQ ID NO: 4054
  source: /note="Description of Artificial Sequence: Synthetic polypeptide"

SEQ ID NO: 9293 - protein, 219 aa, Artificial Sequence; identical to SEQ ID NO: 4055
  source: /note="Description of Artificial Sequence: Synthetic polypeptide"

SEQ ID NO: 9294 - protein, 219 aa, Artificial Sequence; identical to SEQ ID NO: 4056
  source: /note="Description of Artificial Sequence: Synthetic polypeptide"

SEQ ID NO: 9295 - protein, 219 aa, Artificial Sequence; identical to SEQ ID NO: 4057
  source: /note="Description of Artificial Sequence: Synthetic polypeptide"

SEQ ID NO: 9296 - protein, 219 aa, Artificial Sequence; identical to SEQ ID NO: 4058
  source: /note="Description of Artificial Sequence: Synthetic polypeptide"

SEQ ID NO: 9297 - protein, 219 aa, Artificial Sequence; identical to SEQ ID NO: 4059
  source: /note="Description of Artificial Sequence: Synthetic polypeptide"

SEQ ID NO: 9298 - protein, 219 aa, Artificial Sequence; identical to SEQ ID NO: 4060
  source: /note="Description of Artificial Sequence: Synthetic polypeptide"

SEQ ID NO: 9299 - protein, 220 aa, Artificial Sequence; identical to SEQ ID NO: 4061
  source: /note="Description of Artificial Sequence: Synthetic polypeptide"

SEQ ID NO: 9300 - protein, 219 aa, Artificial Sequence; identical to SEQ ID NO: 4062
  source: /note="Description of Artificial Sequence: Synthetic polypeptide"

SEQ ID NO: 9301 - protein, 219 aa, Artificial Sequence; identical to SEQ ID NO: 4063
  source: /note="Description of Artificial Sequence: Synthetic polypeptide"

SEQ ID NO: 9302 - protein, 219 aa, Artificial Sequence; identical to SEQ ID NO: 4064
  source: /note="Description of Artificial Sequence: Synthetic polypeptide"

SEQ ID NO: 9303 - protein, 219 aa, Artificial Sequence; identical to SEQ ID NO: 4065
  source: /note="Description of Artificial Sequence: Synthetic polypeptide"

SEQ ID NO: 9304 - protein, 215 aa, Artificial Sequence
  source: /note="Description of Artificial Sequence: Synthetic polypeptide"
EIVLTQSPGTLSLSPGERATLSCRASQSVSSSYLAWYQQKPGQAPRLLIYGTSSRATGIPDRFSGSGSGTDFTLTISRLEPEDFAVYYCQQYGSSPITFGQGTRLEIKRTVAAPSVFIFPPSDEQLKSGTASVVCLLNNFYPREAKVQWKVDNALQSGNSQESVTEQDSKDSTYSLSSTLTLSKADYEKHKVYACEVTHQGLSSPVTKSFNRGEC

SEQ ID NO: 9305 - protein, 253 aa, Artificial Sequence
  source: /note="Description of Artificial Sequence: Synthetic polypeptide"
MACPGFLWALVISTCLEFSMASSELTQDPAVSVALGQTVRITCQGDSLRSYYASWYQQKPGQAPVLVIYGKNNRPSGIPDRFSGSSSGNTASLTITGAQAEDEADYYCNSRDSSGNHVVFGGGTKLTVLGESRPQAYRAGPAQGRSQRDPVPPLLRGAAGQQGHPGVPHQRLLPWRRDRGLEGRQQPREGRRGDHHPQQAEQQQVRRQQLPEPHPRAVEEPPELQLPGDPRGQHRGEDRGPHRVQLIDLSLNR

SEQ ID NO: 9306 - protein, 213 aa, Artificial Sequence
  source: /note="Description of Artificial Sequence: Synthetic polypeptide"
DIQMTQSPSSLSASVGDRVTITCKTSQDINKYMAWYQQTPGKAPRLLIHYTSALQPGIPSRFSGSGSGRDYTFTISSLQPEDIATYYCLQYDNLWTFGQGTKVEIKRTVAAPSVFIFPPSDEQLKSGTASVVCLLNNFYPREAKVQWKVDNALQSGNSQESVTEQDSKDSTYSLSSTLTLSKADYEKHKVYACEVTHQGLSSPVTKSFNRGEC

SEQ ID NO: 9307 - protein, 214 aa, Artificial Sequence
  source: /note="Description of Artificial Sequence: Synthetic polypeptide"
EIVLTQSPGTLSLSPGERATLSCRASQSVSSTYLAWYQQKPGQAPRLLIYGASSRATGIPDRFSGSGSGTDFTLTISRLEPEDFAVYYCQHYDNSQTFGQGTKVEIKRTVAAPSVFIFPPSDEQLKSGTASVVCLLNNFYPREAKVQWKVDNALQSGNSQESVTEQDSKDSTYSLSSTLTLSKADYEKHKVYACEVTHQGLSSPVTKSFNRGEC

SEQ ID NO: 9308 - protein, 107 aa, Artificial Sequence
  source: /note="Description of Artificial Sequence: Synthetic polypeptide"
DIELTQSPTTMAASPGEKITITCSASSSISSNYLHWYQQKPGFSPKLLIYRTSNLASGVPARFSGSGSGTSYSLTIGTMEAEDVATYYCQQGSSIPRTRSEGAPSWK

SEQ ID NO: 9309 - protein, 112 aa, Artificial Sequence
  source: /note="Description of Artificial Sequence: Synthetic polypeptide"
DVLMTQTPLSLPVSLGDQASISCRSSQSIVHSNGNTYLEWYLQKPGQSPKLLIYKVSNRFSGVPDRFSGSGSGTDFTLKISRVEAEDLGVYYCFQGSHVPYTFGGGTKLEIK

SEQ ID NO: 9310 - protein, 108 aa, Artificial Sequence
  source: /note="Description of Artificial Sequence: Synthetic polypeptide"
DIVMTQSPASLAVSLGQRATISYRASKSVSTSGYSYMHWNQQKPGQPPRLLIYLVSNLESGVPARFSGSGSGTDFTLNIHPVEEEDAATYYCQHIRELTRSEGGPSWK

SEQ ID NO: 9311 - protein, 107 aa, Artificial Sequence
  source: /note="Description of Artificial Sequence: Synthetic polypeptide"
DIQMTQSPKFMSTSVGDRVSITCKASQDVGTAVAWYQQKPGQSPKLLIYWASTRHTGVPDRFTGSGSGTDFTLTISNVQSEDLADYFCQQYSSYPLTFGAGTKLELK

SEQ ID NO: 9312 - protein, 114 aa, Artificial Sequence
  source: /note="Description of Artificial Sequence: Synthetic polypeptide"
DVLMTQTPLSLPVSLGDQASISCRSSQSIVHSNGNTYLEWYLQKPGQSPKLLIYKVSNRFSGVPDRFSGSGSGTDFTLKISRVEAEDLGVYYCFQGSHGPWTFGGGTKLEIKRA

SEQ ID NO: 9313 - protein, 214 aa, Artificial Sequence
  source: /note="Description of Artificial Sequence: Synthetic polypeptide"
DIQMTQSPSSLSASVGDRVTITCRASESVDDLLHWYQQKPGKAPKLLIKYASQSISGVPSRFSGSGSGTDFTLTISSLQPEDFATYYCQQGNSLPNTFGQGTKVEIKRTVAAPSVFIFPPSDEQLKSGTASVVCLLNNFYPREAKVQWKVDNALQSGNSQESVTEQDSKDSTYSLSSTLTLSKADYEKHKVYACEVTHQGLSSPVTKSFNRGEC

SEQ ID NO: 9314 - protein, 214 aa, Artificial Sequence
  source: /note="Description of Artificial Sequence: Synthetic polypeptide"
DIQLTQSPSFLSASVGDRVTITCKASQNVDTNVAWYQQKPGKAPKALIYSASYRYSGVPSRFSGSGSGTDFTLTISSLQPEDFATYYCQQYNNYPFTFGQGTKLEIKRTVAAPSVFIFPPSDEQLKSGTASVVCLLNNFYPREAKVQWKVDNALQSGNSQESVTEQDSKDSTYSLSSTLTLSKADYEKHKVYACEVTHQGLSSPVTKSFNRGEC

SEQ ID NO: 9315 - protein, 214 aa, Artificial Sequence
  source: /note="Description of Artificial Sequence: Synthetic polypeptide"
DIQMTQSPSSLSASVGDRVTITCRASQDVNTAVAWYQQKPGKAPKLLIYSASFLYSGVPSRFSGSRSGTDFTLTISSLQPEDFATYYCQQHYTTPPTFGQGTKVEIKRTVAAPSVFIFPPSDEQLKSGTASVVCLLNNFYPREAKVQWKVDNALQSGNSQESVTEQDSKDSTYSLSSTLTLSKADYEKHKVYACEVTHQGLSSPVTKSFNRGEC

SEQ ID NO: 9316 - protein, 112 aa, Artificial Sequence
  source: /note="Description of Artificial Sequence: Synthetic polypeptide"
AVVLTQTASPVSGVVGGTVTINCQASENIYSRLAWYQQKPGQPPRVLIYYASDLASGVPSRFGGSGSGTDYTLTISDLECADAATYYCHSYYWNSAYSDNTFGGGTEVVVEG

SEQ ID NO: 9317 - protein, 107 aa, Artificial Sequence
  source: /note="Description of Artificial Sequence: Synthetic polypeptide"
DIQMTQSPSSLSTSVGDRVTITCKASQDVSDAVAWFQQKPGKAPKLLIYSPSYRYTGVPSRFTGSGSGTDFTFTISSVQAEDLAVYYCQQHYSTPWTFGQGTKLEIK

SEQ ID NO: 9318 - protein, 108 aa, Artificial Sequence
  source: /note="Description of Artificial Sequence: Synthetic polypeptide"
DIQMTQSPSSLSASVGDRVTITCQASQDISNYLNWYQQKPGKAPKLLIYDASTLETGVPSRFSGSGSGTDFTFTISSLQPEDIATYYCQNYDNLPLTFGGGTKVEIKR

SEQ ID NO: 9319 - protein, 108 aa, Artificial Sequence
  source: /note="Description of Artificial Sequence: Synthetic polypeptide"
DIQMTQSPSSLSASVGDRVTITCRASQNISSFLNWYQQKSGKAPKLLIFATSRLQSGVPSRISGSGSGTDFTLTISGLQPEDFATFYCQQSYSIPLTFGGGTKVDIKR

SEQ ID NO: 9320 - protein, 108 aa, Artificial Sequence
  source: /note="Description of Artificial Sequence: Synthetic polypeptide"
DIQMTQSPSSLSASVGDRVTITCRASQGISNYLAWYQQKPGKVPKLLIYAASTLQSGVPSRFSGSGSGTDFTLTISSLQPEDVATYYCQKYDSAPWTFGQGTKVEIKR

SEQ ID NO: 9321 - protein, 101 aa, Artificial Sequence
  source: /note="Description of Artificial Sequence: Synthetic polypeptide"
DIQMTQSPSSLSASVGDRVTITCRASQDISFFLNWYLQKPGQSPQLLIYYTSRYHSGVPSRFSGSGSGTEFTLTISSLQPDDFATYYCQHGNTLPWTFGQG

SEQ ID NO: 9322 - protein, 101 aa, Artificial Sequence
  source: /note="Description of Artificial Sequence: Synthetic polypeptide"
DIQMTQSPSSLSASVGDRVTITCRASQDISFFLNWYQQKPGKAPKLLIYYTSRYHSGVPSRFSGSGSGTEFTLTISSLQSEDFAVYYCQHGNTLPWTFGQG

SEQ ID NO: 9323 - protein, 101 aa, Artificial Sequence
  source: /note="Description of Artificial Sequence: Synthetic polypeptide"
EIVMTQSPATLSVSPGERATLSCRASQDISFFLNWYQQKPGKAPKLLIYYTSRYHSGVPSRFSGSGSGTDFTFTISSLQPEDIATYYCQHGNTLPWTFGQG

SEQ ID NO: 9324 - protein, 101 aa, Artificial Sequence
  source: /note="Description of Artificial Sequence: Synthetic polypeptide"
EIVLTQSPATLSLSPGERATLSCRASQDISFFLNWFQQRPGQSPRRLIYYTSRYHSGIPPRFSGSGYGTDFTLTINNIESEDAAYYFCQHGNTLPWTFGQG

SEQ ID NO: 9325 - protein, 101 aa, Artificial Sequence; identical to SEQ ID NO: 9323
  source: /note="Description of Artificial Sequence: Synthetic polypeptide"

SEQ ID NO: 9326 - protein, 101 aa, Artificial Sequence; identical to SEQ ID NO: 9321
  source: /note="Description of Artificial Sequence: Synthetic polypeptide"

SEQ ID NO: 9327 - protein, 111 aa, Artificial Sequence
  source: /note="Description of Artificial Sequence: Synthetic polypeptide"
AYDLTQTPASVEAAVGGTVTINCQASDNIYSLLAWYQQKPGQPPKLLIYRASTLASGVPSRFKGSGSGTQFTLTISGVECADAATYYCQQHYDYNYLDVAFGGGTEVVVKG

SEQ ID NO: 9328 - protein, 101 aa, Artificial Sequence; identical to SEQ ID NO: 9322
  source: /note="Description of Artificial Sequence: Synthetic polypeptide"

SEQ ID NO: 9329 - protein, 101 aa, Artificial Sequence; identical to SEQ ID NO: 9322
  source: /note="Description of Artificial Sequence: Synthetic polypeptide"

SEQ ID NO: 9330 - protein, 101 aa, Artificial Sequence; identical to SEQ ID NO: 9322
  source: /note="Description of Artificial Sequence: Synthetic polypeptide"

SEQ ID NO: 9331 - protein, 101 aa, Artificial Sequence
  source: /note="Description of Artificial Sequence: Synthetic polypeptide"
DIQMTQSPSSLSASVGDRVTITCRASQDISFFLNWYQQKPGKAPKLLIYYTSRYHSGIPPRFSGSGYGTEFTFTISSLEAEDAATYYCQHGNTLPWTFGQG

SEQ ID NO: 9332 - protein, 101 aa, Artificial Sequence; identical to SEQ ID NO: 9323
  source: /note="Description of Artificial Sequence: Synthetic polypeptide"

SEQ ID NO: 9333 - protein, 101 aa, Artificial Sequence; identical to SEQ ID NO: 9322
  source: /note="Description of Artificial Sequence: Synthetic polypeptide"

SEQ ID NO: 9334 - protein, 108 aa, Artificial Sequence
  source: /note="Description of Artificial Sequence: Synthetic polypeptide"
DIQMTQTTSSLSASLGDRVTISCRASQDISFFLNWYQQKPDGTVKLLIYYTSRYHSGVPSRFSGSGSGTDFSLTINNLEQEDFATYFCQHGNTLPWTFGGGTKLEIKR

SEQ ID NO: 9335 - protein, 101 aa, Artificial Sequence; identical to SEQ ID NO: 9322
  source: /note="Description of Artificial Sequence: Synthetic polypeptide"

SEQ ID NO: 9336 - protein, 101 aa, Artificial Sequence; identical to SEQ ID NO: 9321
  source: /note="Description of Artificial Sequence: Synthetic polypeptide"

SEQ ID NO: 9337 - protein, 101 aa, Artificial Sequence; identical to SEQ ID NO: 9323
  source: /note="Description of Artificial Sequence: Synthetic polypeptide"

SEQ ID NO: 9338 - protein, 111 aa, Artificial Sequence; identical to SEQ ID NO: 9327
  source: /note="Description of Artificial Sequence: Synthetic polypeptide"

SEQ ID NO: 9339 - protein, 101 aa, Artificial Sequence; identical to SEQ ID NO: 9331
  source: /note="Description of Artificial Sequence: Synthetic polypeptide"

SEQ ID NO: 9340 - protein, 108 aa, Artificial Sequence
  source: /note="Description of Artificial Sequence: Synthetic polypeptide"
DIQMTQSPSSLSASLGDRVTITCRASQDISFFLNWYQQKPDGTVKLLIYYTSRYHSGVPSRFSGSGSGTDFTLTISSLQPEDFATYFCQHGNTLPWTFGQGTKLEIKR

SEQ ID NO: 9341 - protein, 108 aa, Artificial Sequence; identical to SEQ ID NO: 9340
  source: /note="Description of Artificial Sequence: Synthetic polypeptide"

SEQ ID NO: 9342 - protein, 156 aa, Artificial Sequence
  source: /note="Description of Artificial Sequence: Synthetic polypeptide"
KEIHQAGKGIKMKSQTQVFVFLLLCVSGAHGSIVMTQTPKFLLVSAGDRITITCKASQSVNNDVAWYQQKPGQSPKLLIYYASNRYTGVPDRFTGSGYGTDFTFTITTVKAEDLAVYFCQQDYSSPLTFGAGTKLELKRADAAPTVSACTKGEFAA

SEQ ID NO: 9343 - protein, 101 aa, Artificial Sequence
  source: /note="Description of Artificial Sequence: Synthetic polypeptide"
DIQMTQTTSSLSASLGDRVTISCRASQDISFFLNWYQQKPDGTVKLLIYYTSRYHSGVPSRFSGSGSGTDFSLTINNLEQEDFATYFCQHGNTLPWTFGGG

SEQ ID NO: 9344 - protein, 108 aa, Artificial Sequence
  source: /note="Description of Artificial Sequence: Synthetic polypeptide"
DVQITQSPSYLAASPGETITINCRASKSISKYLAWYQDKPGKTNKLLIYSGSTLQSGIPSRFSGSGSGTDFTLTISSLEPEDFAMYYCQQHDEYPWTFGGGTKLEIKR

SEQ ID NO: 9345 - protein, 108 aa, Artificial Sequence
  source: /note="Description of Artificial Sequence: Synthetic polypeptide"
DVQITQSPSTLSASPGDRITITCRASKSISKYLAWYQDKPGKTNKLLIYSGSTLQSGIPSRFSGSGSGTEFTLTISSLQPDDFAMYYCQQHDEYPWTFGQGTKLEIKR

SEQ ID NO: 9346 - protein, 108 aa, Artificial Sequence
  source: /note="Description of Artificial Sequence: Synthetic polypeptide"
DVQITQSPSYLSASPGDTITITCRASKSISKYLAWYQDKPGKTNKLLIYSGSTLQSGIPSRFSGSGSGTEFTLTISSLQPDDFAMYYCQQHDEYPWTFGQGTKLEIKR

SEQ ID NO: 9347 - protein, 107 aa, Artificial Sequence
  source: /note="Description of Artificial Sequence: Synthetic polypeptide"
QIVLTQSPAILSASPGEKVTMTCSATSSITYIHWYQQKSGTSPKRWIYDTSRLASGVPTRFSGSGSGTSYSLTISTMEAEDAATYYCQQWSSNPPTFGGGTKLEIKR

SEQ ID NO: 9348 - protein, 106 aa, Artificial Sequence
  source: /note="Description of Artificial Sequence: Synthetic polypeptide"
EIVLTQSPATLSASPGEKVTMTCSATSSITYIHWYQQKSGQSPKRWIYDTSRLASGVPSRFSGSGSGTSYSLTISTMEAEDAATYYCQQWSSNPPTFGGGTKLEIK

SEQ ID NO: 9349 - protein, 111 aa, Artificial Sequence
  source: /note="Description of Artificial Sequence: Synthetic polypeptide"
AYDMTQTPFSVSAAVGGTVTINCQASQNIYSNLAWYQQKPGQRPKLLIYRASTLASGVPSRFSGSRSGTQFTLTISGVECADAATYYCQQHWDYDYIDVAFGGGTEVVVKG

SEQ ID NO: 9350 - protein, 106 aa, Artificial Sequence
  source: /note="Description of Artificial Sequence: Synthetic polypeptide"
EIVLTQSPATLSASPGEKVTMTCSATSSITYIHWYQQKSGTSPKRWIYDTSRLASGVPARFSGSGSGTSYSLTISTMEAEDAATYYCQQWSSNPPTFGGGTKLEIK

SEQ ID NO: 9351 - protein, 106 aa, Artificial Sequence
  source: /note="Description of Artificial Sequence: Synthetic polypeptide"
EIVLTQSPATLSASPGEKVTMTCSATSSITYIHWYQQKPGQAPKRWIYDTSRLASGVPARFSGSGSGTSYSLTISTMEPEDFATYYCQQWSSNPPTFGGGTKLEIK

SEQ ID NO: 9352 - protein, 108 aa, Artificial Sequence
  source: /note="Description of Artificial Sequence: Synthetic polypeptide"
DIQMTQSPSSLSASVGDRVTSTCRASQDISNYLAWYQQKPGKVPKLLIYAASTLQSGVPSRFSGSGSGTDFTLTISSLQPEDVATYYCQKYNSAPWTFGQGTKVEIKR

SEQ ID NO: 9353 - protein, 108 aa, Artificial Sequence
  source: /note="Description of Artificial Sequence: Synthetic polypeptide"
DIQMTQSPSSVSASVGDRVTITCRASQGISSWLAWYQQKPGKAPKLLIYVASSLQSGVPSRFSGSGSGTDFTLTISSLQPEDIATYYCQQADSFPRTFGQGTKVEIKR

SEQ ID NO: 9354 - protein, 111 aa, Artificial Sequence
  source: /note="Description of Artificial Sequence: Synthetic polypeptide"
DVVMTQTPSSVEAAVGGTVTIKCQASENIYSYLAWYQQKPGQPPKLLIYKASYLASGVSSRFKGSGSGTEFTLTISDLECADAATYYCLSTIASASNFDAFGGGTEVVVKG

SEQ ID NO: 9355 - protein, 114 aa, Artificial Sequence
  source: /note="Description of Artificial Sequence: Synthetic polypeptide"
DPVLTQTASSVSAPVGGTVTISCQSSQSVYRSNNVAWYQQKPGKPPKLLIYEASSLASGVPSRFTGSGSGTQFTLTISGVQCDDAATYYCAGGYSSSVDFFFAFGGGTEVVVKG

SEQ ID NO: 9356 - protein, 108 aa, Artificial Sequence
  source: /note="Description of Artificial Sequence: Synthetic polypeptide"
DIVMTQSHKFMSTSVGDRVSISCKASQDVSDAVAWFQQKPGQSPKLLIYSPSYRYTGVPDRFTGSGSGTDFTFTISSVQAEDLAVYYCQQHYSTPWTFGGGTKLEIKR

SEQ ID NO: 9357 - protein, 107 aa, Artificial Sequence
  source: /note="Description of Artificial Sequence: Synthetic polypeptide"
DIQMTQSHKFMSTSVGDRVTITCKASQDVSDAVAWFQQKPGKSPKLLIYSPSYRYTGVPSRFTGSGSGTDFTFTISSVQAEDLAVYYCQQHYSTPWTFGQGTKLEIK

SEQ ID NO: 9358 - protein, 107 aa, Artificial Sequence
  source: /note="Description of Artificial Sequence: Synthetic polypeptide"
DIQMTQSHKFMSTSVGDRVSISCKASQDVSDAVAWFQQKPGKSPKLLIYSPSYRYTGVPSRFTGSGSGTDFTFTISSVQAEDLAVYYCQQHYSTPWTFGQGTKLEIK

SEQ ID NO: 9359 - protein, 217 aa, Artificial Sequence
  source: /note="Description of Artificial Sequence: Synthetic polypeptide"
DIQMTQSPSSLSASVGDRVTITCQASQSINNQLSWYQQKPGKAPKLLIYYASTLASGVPSRFSGSGSGTDFTLTISSLQPEDFATYYCQGSYYSGGWDYGFGQGTKVEIKRTVAAPSVFIFPPSDEQLKSGTASVVCLLNNFYPREAKVQWKVDNALQSGNSQESVTEQDSKDSTYSLSSTLTLSKADYEKHKVYACEVTHQGLSSPVTKSFNRGEC

SEQ ID NO: 9360 - protein, 217 aa, Artificial Sequence; identical to SEQ ID NO: 9359
  source: /note="Description of Artificial Sequence: Synthetic polypeptide"

SEQ ID NO: 9361 - protein, 210 aa, Artificial Sequence
  source: /note="Description of Artificial Sequence: Synthetic polypeptide"
DIQMTQSPSSLSASVGDRVTITCQASQSINNQLSWYQQKPGKAPKLLIYYASTLASGVPSRFSGSGSGTDFTLTISSLQPEDFATYYCQGSYYSGGWDYGFGQGTKVEIKRTVAAPSVFIFPPSDEQLKSGTASVVCLLNNFYPREAKVQWKVDNALQSGNSQESVTEQDSKDSTYSLSSTLTLSKADYEKHKVYACEVTHQGLSSPVTK

SEQ ID NO: 9362 - protein, 217 aa, Artificial Sequence; identical to SEQ ID NO: 9359
  source: /note="Description of Artificial Sequence: Synthetic polypeptide"

SEQ ID NO: 9363 - protein, 217 aa, Artificial Sequence; identical to SEQ ID NO: 9359
  source: /note="Description of Artificial Sequence: Synthetic polypeptide"

SEQ ID NO: 9364 - protein, 217 aa, Artificial Sequence; identical to SEQ ID NO: 9359
  source: /note="Description of Artificial Sequence: Synthetic polypeptide"

SEQ ID NO: 9365 - protein, 214 aa, Artificial Sequence
  source: /note="Description of Artificial Sequence: Synthetic polypeptide"
SYELTQPPSVSVAPGQTARISCSGDNLGSKYVDWYQQKPGQAPVLVIYSDNNRPSGIPERFSGSNSGNTATLTISGTQAEDEADYYCQTYTSGNNYLVFGGGTKLTVLGQPKAAPSVTLFPPSSEELQANKATLVCLISDFYPGAVTVAWKADSSPVKAGVETTTPSKQSNNKYAASSYLSLTPEQWKSHRSYSCQVTHEGSTVEKTVAPTECS

SEQ ID NO: 9366 - protein, 214 aa, Artificial Sequence; identical to SEQ ID NO: 9365
  source: /note="Description of Artificial Sequence: Synthetic polypeptide"

SEQ ID NO: 9367 - protein, 214 aa, Artificial Sequence; identical to SEQ ID NO: 9365
  source: /note="Description of Artificial Sequence: Synthetic polypeptide"

SEQ ID NO: 9368 - protein, 214 aa, Artificial Sequence
  source: /note="Description of Artificial Sequence: Synthetic polypeptide"
SYVLTQPPSVSVAPGKTARISCSGDNLGSKYVDWYQQKPGQAPVLVIYSDNNRPSGIPERFSGSNSGNTATLTISGTQAMDEADYYCATYDSSPRTEVFGGGTKLTVLGQPKAAPSVTLFPPSSEELQANKATLVCLISDFYPGAVTVAWKADSSPVKAGVETTTPSKQSNNKYAASSYLSLTPEQWKSHRSYSCQVTHEGSTVEKTVAPTECS

SEQ ID NO: 9369 - protein, 214 aa, Artificial Sequence; identical to SEQ ID NO: 9368
  source: /note="Description of Artificial Sequence: Synthetic polypeptide"

SEQ ID NO: 9370 - protein, 214 aa, Artificial Sequence; identical to SEQ ID NO: 9368
  source: /note="Description of Artificial Sequence: Synthetic polypeptide"

SEQ ID NO: 9371 - protein, 214 aa, Artificial Sequence; identical to SEQ ID NO: 9365
  source: /note="Description of Artificial Sequence: Synthetic polypeptide"

SEQ ID NO: 9372 - protein, 214 aa, Artificial Sequence; identical to SEQ ID NO: 9365
  source: /note="Description of Artificial Sequence: Synthetic polypeptide"

SEQ ID NO: 9373 - protein, 214 aa, Artificial Sequence; identical to SEQ ID NO: 9365
  source: /note="Description of Artificial Sequence: Synthetic polypeptide"

SEQ ID NO: 9374 - protein, 214 aa, Artificial Sequence; identical to SEQ ID NO: 9365
  source: /note="Description of Artificial Sequence: Synthetic polypeptide"

SEQ ID NO: 9375 - protein, 214 aa, Artificial Sequence; identical to SEQ ID NO: 9365
  source: /note="Description of Artificial Sequence: Synthetic polypeptide"

SEQ ID NO: 9376 - protein, 216 aa, Artificial Sequence
  source: /note="Description of Artificial Sequence: Synthetic polypeptide"
QSVLTQPPSVSGAPGQRVTISCTGSSSNIGAGYDVHWYQQLPGTAPKLLIHDNSHRPSGVPDRFSGSKSGTSASLAITGLQSEDEADYYCASYDESAHSVFGGGTKLTVLGQPKAAPSVTLFPPSSEELQANKATLVCLISDFYPGAVTVAWKADSSPVKAGVETTTPSKQSNNKYAASSYLSLTPEQWKSHRSYSCQVTHEGSTVEKTVAPTECS

SEQ ID NO: 9377 - protein, 214 aa, Artificial Sequence; identical to SEQ ID NO: 9368
  source: /note="Description of Artificial Sequence: Synthetic polypeptide"

SEQ ID NO: 9378 - protein, 214 aa, Artificial Sequence; identical to SEQ ID NO: 9368
  source: /note="Description of Artificial Sequence: Synthetic polypeptide"

SEQ ID NO: 9379 - protein, 214 aa, Artificial Sequence; identical to SEQ ID NO: 9368
  source: /note="Description of Artificial Sequence: Synthetic polypeptide"

SEQ ID NO: 9380 - protein, 213 aa, Artificial Sequence
  source: /note="Description of Artificial Sequence: Synthetic polypeptide"
SYELTQPPSVSVAPGQTARISCSGDSIREYYVHWYQQKPGQAPVLVIGDDTNRPSGIPERFSGSNSGNTATLTISGTQAEDEADYYCAAWDFSPAIVFGGGTKLTVLGQPKAAPSVTLFPPSSEELQANKATLVCLISDFYPGAVTVAWKADSSPVKAGVETTTPSKQSNNKYAASSYLSLTPEQWKSHRSYSCQVTHEGSTVEKTVAPTECS

SEQ ID NO: 9381 - protein, 214 aa, Artificial Sequence
  source: /note="Description of Artificial Sequence: Synthetic polypeptide"
SYELTQPLSVSVALGQTARITCSGDSIPNYYVYWYQQKPGQAPVLVIYDDSNRPSGIPERFSGSNSGNTATLTISRAQAGDEADYYCQSFDSSLNAEVFGGGTKLTVLGQPKAAPSVTLFPPSSEELQANKATLVCLISDFYPGAVTVAWKADSSPVKAGVETTTPSKQSNNKYAASSYLSLTPEQWKSHRSYSCQVTHEGSTVEKTVAPTECS

SEQ ID NO: 9382 - protein, 212 aa, Artificial Sequence
  source: /note="Description of Artificial Sequence: Synthetic polypeptide"
SYELTQPPSVSVAPGQTARISCSGDNIGNSYVHWYQQKPGQAPVLVIYKDNDRPSGIPERFSGSNSGNTATLTISGTQAEDEADYYCGTYDIESYVFGGGTKLTVLGQPKAAPSVTLFPPSSEELQANKATLVCLISDFYPGAVTVAWKADSSPVKAGVETTTPSKQSNNKYAASSYLSLTPEQWKSHRSYSCQVTHEGSTVEKTVAPTECS

SEQ ID NO: 9383 - protein, 447 aa, Artificial Sequence
  source: /note="Description of Artificial Sequence: Synthetic polypeptide"
EVTLKESGPALVKPTQTLTLTCTFSGFSLSTSGGGVSWIRQPPGKALEWLANIDDADIKDYSPSLKSRLTISKDTSKNQVVLTMTNMDPVDTATYYCARGPYGFDSWGQGTLVTVSSASTKGPSVFPLAPSSKSTSGGTAALGCLVKDYFPEPVTVSWNSGALTSGVHTFPAVLQSSGLYSLSSVVTVPSSSLGTQTYICNVNHKPSNTKVDKRVEPKSCDKTHTCPPCPAPEAAGGPSVFLFPPKPKDTLMISRTPEVTCVVVDVSHEDPEVKFNWYVDGVEVHNAKTKPREEQYNSTYRVVSVLTVLHQDWLNGKEYKCKVSNKALPAPIEKTISKAKGQPREPQVYTLPPSREEMTKNQVSLTCLVKGFYPSDIAVEWESNGQPENNYKTTPPVLDSDGSFFLYSKLTVDKSRWQQGNVFSCSVMHEALHNHYTQKSLSLSPGK

SEQ ID NO: 9384 - protein, 212 aa, Artificial Sequence
  source: /note="Description of Artificial Sequence: Synthetic polypeptide"
SYELTQPPSVSVAPGQTARISCSGDNIGNSYVHWYQQKPGQAPVLVIYKDNDRPSGIPERFSGSNSGNTATLTISGTQAEDEADYYCATWGSEDQVFGGGTKLTVLGQPKAAPSVTLFPPSSEELQANKATLVCLISDFYPGAVTVAWKADSSPVKAGVETTTPSKQSNNKYAASSYLSLTPEQWKSHRSYSCQVTHEGSTVEKTVAPTECS

SEQ ID NO: 9385 - protein, 213 aa, Artificial Sequence
  source: /note="Description of Artificial Sequence: Synthetic polypeptide"
SYELTQPPSVSVAPGQTARISCSGDSLGDYYAYWYQQKPGQAPVLVIYKDNNRPSGIPERFSGSNSGNTATLTISGTQAEDEADYYCQTWDTGESGVFGGGTKLTVLGQPKAAPSVTLFPPSSEELQANKATLVCLISDFYPGAVTVAWKADSSPVKAGVETTTPSKQSNNKYAASSYLSLTPEQWKSHRSYSCQVTHEGSTVEKTVAPTECS

SEQ ID NO: 9386 - protein, 212 aa, Artificial Sequence
  source: /note="Description of Artificial Sequence: Synthetic polypeptide"
SYVLTQPPSVSVAPGKTARISCSGDNLGSYYVNWYQQKPGQAPVLVIYGDSERPSGIPERFSGSNSGNTATLTISRAQAGDEADYYCGSWDITSFVFGGGTKLTVLGQPKAAPSVTLFPPSSEELQANKATLVCLISDFYPGAVTVAWKADSSPVKAGVETTTPSKQSNNKYAASSYLSLTPEQWKSHRSYSCQVTHEGSTVEKTVAPTECS

SEQ ID NO: 9387 - protein, 214 aa, Artificial Sequence; identical to SEQ ID NO: 9368
  source: /note="Description of Artificial Sequence: Synthetic polypeptide"

SEQ ID NO: 9388 - protein, 213 aa, Artificial Sequence
  source: /note="Description of Artificial Sequence: Synthetic polypeptide"
SYVLTQPPSVSVAPGKTARISCSGDSIREYYVHWYQQKPGQAPVLVIGDDTNRPSGIPERFSGSNSGNTATLTISRAQAGDEADYYCAAWDFSPAIVFGGGTKLTVLGQPKAAPSVTLFPPSSEELQANKATLVCLISDFYPGAVTVAWKADSSPVKAGVETTTPSKQSNNKYAASSYLSLTPEQWKSHRSYSCQVTHEGSTVEKTVAPTECS

SEQ ID NO: 9389 - protein, 214 aa, Artificial Sequence; identical to SEQ ID NO: 9365
  source: /note="Description of Artificial Sequence: Synthetic polypeptide"

SEQ ID NO: 9390 - protein, 107 aa, Artificial Sequence
  source: /note="Description of Artificial Sequence: Synthetic polypeptide"
DIVLTQSPDSLAVSLGERATINCKASQDVNTAVAWYQQKPDQSPKLLIYWASTRHTGVPARFTGSGSGTDYTLTISSLQAEDVAVYFCQQHHVSPWTFGGGTKVEIK

SEQ ID NO: 9391 - protein, 119 aa, Artificial Sequence
  source: /note="Description of Artificial Sequence: Synthetic polypeptide"
QVQLKQSGAEVKKPGASVKVSCKASGYTFTDEYMNWVRQAPGKSLEWMGYINPNNGGADYNQKFQGRVTMTVDQSISTAYMELSRLRSDDTAVYFCARLGYSNPYFDFWGQGTLVTVSS

SEQ ID NO: 9392 - protein, 107 aa, Artificial Sequence
  source: /note="Description of Artificial Sequence: Synthetic polypeptide"
DIVLTQSPSFLSASVGDRVTITCQASQDVNTAVAWYLQKPGKSPKLLIYWASTRHTGVPARFTGSGSGTDYTLTISSLQPEDFAVYFCQQHHVSPWTFGGGTKVEIK

SEQ ID NO: 9393 - protein, 107 aa, Artificial Sequence
  source: /note="Description of Artificial Sequence: Synthetic polypeptide"
DIVLTQSPATLSLSPGERATLSCRASQDVNTAVAWYQQKPGQSPKLLIYWASTRHTGVPARFTGSGSGTDYTLTISSLQSEDFAVYFCQQHHVSPWTFGGGTKVEIK

SEQ ID NO: 9394 - protein, 119 aa, Artificial Sequence
  source: /note="Description of Artificial Sequence: Synthetic polypeptide"
QVQLVQSGAEVKKPGASVKVSCKASGYTFTDEYMNWVRQAPGQSLEWMGYINPNNGGADYNQKFQGRVTMTVDQSISTAYMELSRLRSDDTAVYFCARLGYSNPYFDFWGQGTLVTVSS

SEQ ID NO: 9395 - protein, 119 aa, Artificial Sequence
  source: /note="Description of Artificial Sequence: Synthetic polypeptide"
QVQLVQSGAEVKKPGASVKVSCKASGYTFTDEYMNWVRQAPGQSLEWMGYINPNNGGADYNPSLKSRVTISVDQSISTAYMELSRLRSDDTAVYFCARLGYSNPYFDFWGQGTLVTVSS

SEQ ID NO: 9396 - protein, 214 aa, Artificial Sequence; identical to SEQ ID NO: 9381
  source: /note="Description of Artificial Sequence: Synthetic polypeptide"

SEQ ID NO: 9397 - protein, 110 aa, Artificial Sequence
  source: /note="Description of Artificial Sequence: Synthetic polypeptide"
EIVLTQSPGTLSLSPGERATLSCRASQSVSSSYLAWYQQKPGQAPRLLIYGASSRATGIPDRFSGSGSETDFTLTISRLEPEDFAVYYCQQYGSSPEYTFGQGTKLEIKR

SEQ ID NO: 9398 - protein, 110 aa, Artificial Sequence
  source: /note="Description of Artificial Sequence: Synthetic polypeptide"
EIVLTQSPGTLSLSPGERATLSCRASQSVSSSYLAWYQQKPGQAPRLLIYGASSRATGIPDRFSGSGSRTDFTLTISRLEPEDFAVYYCQQYGSSPEYTFGQGTKLEIKR

SEQ ID NO: 9399 - protein, 110 aa, Artificial Sequence
  source: /note="Description of Artificial Sequence: Synthetic polypeptide"
EIVLTQSPGTLSLSPGERATLSCRASQSVSSSYLAWYQQKPGQAPRLLIYGASSRATGIPDRFSGSGSGTDFTLTISRREPEDFAVYYCQQYGSSPEYTFGQGTKLEIKR

SEQ ID NO: 9400 - protein, 110 aa, Artificial Sequence
  source: /note="Description of Artificial Sequence: Synthetic polypeptide"
EIVLTQSPGTLSLSPGERATLSCRASQSVSSSYLAWYQQKPGQAPRLLIYGASSRATGIPDRFSGSGSGTDFTLTISRLEAEDFAVYYCQQYGSSPEYTFGQGTKLEIKR

SEQ ID NO: 9401 - protein, 110 aa, Artificial Sequence
  source: /note="Description of Artificial Sequence: Synthetic polypeptide"
EIVLTQSPGTLSLSPGERATLSCRASQSVSSSYLAWYQQKPGQAPRLLIYGASSRATGIPDRFSGSGSGTDFTLTISRLEPEDFAVYYCQQYDSSPEYTFGQGTKLEIKR

SEQ ID NO: 9402 - protein, 110 aa, Artificial Sequence
  source: /note="Description of Artificial Sequence: Synthetic polypeptide"
EIVLTQSPGTLSLSPGERATLSCRASQSVSSSYLAWYQQKPGQAPRLLIYGASSRATGIPDRFSGSGSGTDFTLTISRLEPEDFAVYYCQQYGRSLEYTFGQGTKLEIKR

SEQ ID NO: 9403 - protein, 110 aa, Artificial Sequence
  source: /note="Description of Artificial Sequence: Synthetic polypeptide"
EIVLTQSPGTLSLSPGERATLSCRASQSVSSSYLAWYQQKPGQAPRLLIYGASSRATGIPDRFSGSGSGTDFTLTISRLEPEDFAVYYCQQYGGSPEYTFGQGTKLEIKR

SEQ ID NO: 9404 - protein, 110 aa, Artificial Sequence
  source: /note="Description of Artificial Sequence: Synthetic polypeptide"
EIVLTQSPGTLSLSPGERATLSCRASQSVSSSYLAWYQQKPGQAPRLLIYGASSRATGIPDRFSGSGSGTDFTLTISRLEPEDFAVYYCQQYGISPEYTFGQGTKLEIKR

SEQ ID NO: 9405 - protein, 110 aa, Artificial Sequence
  source: /note="Description of Artificial Sequence: Synthetic polypeptide"
EIVLTQSPGTLSLSPGERATLSCRASQSVSSSYLAWYQQKPGQAPRLLIYGASSRATGIPDRFSGSGSGTDFTLTISRLEPEDFAVYYCQQYGTSPEYTFGQGTKLEIKR

SEQ ID NO: 9406 - protein, 115 aa, Artificial Sequence
  source: /note="Description of Artificial Sequence: Synthetic polypeptide"
EIVLTQSPGTLSLSPGERATLSCRASQSVSSSYLAWYQQKPGQAPRLLIYGASSRATGIPDRFSGSGSGTDFTLTISRLEPEDFAVYYCQQYGSSQYGSSPEYTFGQGTKLEIKR

SEQ ID NO: 9407 - protein, 110 aa, Artificial Sequence
  source: /note="Description of Artificial Sequence: Synthetic polypeptide"
EIVLTQSPGTLSLSPGERATLSCRASQSVSSSYLAWYQQKPGQAPRLLIYGASSRATGIPDRFSGSGSGTDFTLTISRLEPEDFAVYYCQQYGSSAEYTFGQGTKLEIKR

SEQ ID NO: 9408 - protein, 110 aa, Artificial Sequence
  source: /note="Description of Artificial Sequence: Synthetic polypeptide"
EIVLTQSPGTLSLSPGERATLSCRASQSVSSSYLAWYQQKPGQAPRLLIYGASSRATGIPDRFSGSGSGTDFTLTISRLEPEDFAVYYCQQYGSSTEYTFGQGTKLEIKR

SEQ ID NO: 9409 - protein, 108 aa, Artificial Sequence
  source: /note="Description of Artificial Sequence: Synthetic polypeptide"
EIVLTQSPGTLSLSPGERATLSCRASQSVSSSYLAWYQQKPGQAPRLLIYGASSRATGIPDRFSGSGSGTDFTLTISRLEPEDFAVYYCQQYGSSPTFGQGTKLEIKR

SEQ ID NO: 9410 - protein, 110 aa, Artificial Sequence
  source: /note="Description of Artificial Sequence: Synthetic polypeptide"
EIVLTQSPGTLSLSPGERATLSCRASQSVSSSYLAWYQQKPGQAPRLLIYGASSRATGIPDRFSGSGSGTDFTLTISRLEPEDFAVYYCQQYGSSPDYTFGQGTKLEIKR

SEQ ID NO: 9411 - protein, 116 aa, Artificial Sequence
  source: /note="Description of Artificial Sequence: Synthetic polypeptide"
EIVLTQSPGTLSLSPGERATLSCRASQSVSSSYLAWYQQKPGQAPRLLIYGASSRATGIPDRFSGSGSGTDFTLTISRLEPEDFAVYYCQQYGSSPEYGGSPEYTFGQGTKLEIKR

SEQ ID NO: 9412 - protein, 110 aa, Artificial Sequence
  source: /note="Description of Artificial Sequence: Synthetic polypeptide"
EIVLTQSPGTLSLSPGERATLSCRASQSVSSSYLAWYQQKPGQAPRLLIYGASSRATGIPDRFSGSGSGTDFTLTISRLEPEDFAVYYCQQYGSSPEYTFGQGTKLEIKR

SEQ ID NO: 9413 - protein, 110 aa, Artificial Sequence
  source: /note="Description of Artificial Sequence: Synthetic polypeptide"
EIVLTQSPGTLSLSPGERATLSCRASQSVSISYLAWYQQKPGQAPRLLIYGASSRATGIPDRFSGSGSGTDFTLTISRLEPEDFAVYYCQQYGSSPEYTFGQGTKLEIKR

SEQ ID NO: 9414 - protein, 110 aa, Artificial Sequence
  source: /note="Description of Artificial Sequence: Synthetic polypeptide"
EIVLTQSPGTLSLSPGERATLSCRASQSVSSSYLAWYQQKPGQAPRLLIYGASTRATGIPDRFSGSGSGTDFTLTISRLEPEDFAVYYCQQYGSSPEYTFGQGTKLEIKR

SEQ ID NO: 9415 - protein, 110 aa, Artificial Sequence
  source: /note="Description of Artificial Sequence: Synthetic polypeptide"
EIVLTQSPGTLSLSPGERATLSCRASQSVSSSYLAWYQQKPGQAPRLLIYGASSRATGIPDRFSGSGSVTDFTLTISRLEPEDFAVYYCQQYGSSPEYTFGQGTKLEIKR

SEQ ID NO: 9416 - protein, 236 aa, Artificial Sequence
  source: /note="Description of Artificial Sequence: Synthetic polypeptide"
MGWSCIILFLVATATGVHSRDIQMTQSPSSLSASVGDRVTITCGASENIYGALNWYQQKPGKAPKLLIYGATNLADGVPSRFSGSGSGTDFTLTISSLQPEDFATYYCQNVLNTPLTFGQGTKVEIKRTRTVAAPSVFIFPPSDEQLKSGTASVVCLLNNFYPREAKVQWKVDNALQSGNSQESVTEQDSKDSTYSLSSTLTLSKADYEKHKVYACEVTHQGLSSPVTKSFNRGEC

SEQ ID NO: 9417 - protein, 236 aa, Artificial Sequence
  source: /note="Description of Artificial Sequence: Synthetic polypeptide"
MGWSCIILFLVATATGVHSRDIQMTQSPSSLSASVGDRVTITCGASENIYHALNWYQQKPGKAPKLLIYGATNLADGVPSRFSGSGSGTDFTLTISSLQPEDFATYYCQNVLNTPLTFGQGTKVEIKRTRTVAAPSVFIFPPSDEQLKSGTASVVCLLNNFYPREAKVQWKVDNALQSGNSQESVTEQDSKDSTYSLSSTLTLSKADYEKHKVYACEVTHQGLSSPVTKSFNRGEC

SEQ ID NO: 9418 - protein, 236 aa, Artificial Sequence; identical to SEQ ID NO: 9416
  source: /note="Description of Artificial Sequence: Synthetic polypeptide"

SEQ ID NO: 9419 - protein, 218 aa, Artificial Sequence
  source: /note="Description of Artificial Sequence: Synthetic polypeptide"
NIMMTQSPSSLAVSAGEKVTMSCKSSQSVLYSSNQKNYLAWYQQKPGQSPKLLIYWASTRESGVPDRFTGSGSGTDFTLTISSVQAEDLAVYYCAQHLSHRTFGGGTKLEIKRTVAAPSVFIFPPSDEQLKSGTASVVCLLNFYPREAKVQWKVDNALQSGNSQESVTEQDSKDSTYSLSSTLTLSKADYEKHKVYACEVTHQGLSSPVTKSFNRGEC

SEQ ID NO: 9420 - protein, 218 aa, Artificial Sequence; identical to SEQ ID NO: 9419
  source: /note="Description of Artificial Sequence: Synthetic polypeptide"

SEQ ID NO: 9421 - protein, 218 aa, Artificial Sequence
  source: /note="Description of Artificial Sequence: Synthetic polypeptide"
NIMMTQSPSSLAVSAGEKVTMSCKSSQSVLYSSNQKNYLAWYQQKPGQSPKLLIYWASTRESGVPDRFTGSGSGTDFTLTISSVQAEDLAVYYCAQYLSSRTFGGGTKLEIKRTVAAPSVFIFPPSDEQLKSGTASVVCLLNFYPREAKVQWKVDNALQSGNSQESVTEQDSKDSTYSLSSTLTLSKADYEKHKVYACEVTHQGLSSPVTKSFNRGEC

SEQ ID NO: 9422 - protein, 218 aa, Artificial Sequence
  source: /note="Description of Artificial Sequence: Synthetic polypeptide"
DIVMTQSPDSLAVSLGERATINCRASESVDSYGNSFMHWYQQKPGQPPKLLIYRASNLESGVPDRFSGSGSGTDFTLTISSLQAEDVAVYYCQQSNEDPYTFGGGTKVEIKRTVAAPSVFIFPPSDEQLKSGTASVVCLLNNFYPREAKVQWKVDNALQSGNSQESVTEQDSKDSTYSLSSTLTLSKADYEKHKVYACEVTHQGLSSPVTKSFNRGEC

SEQ ID NO: 9423 - protein, 218 aa, Artificial Sequence
  source: /note="Description of Artificial Sequence: Synthetic polypeptide"
DIVMTQSPDSLAVSLGERATINCRASESVDSYGNSFMHWYQQKPGQPPKLLIYWASTRESGVPDRFSGSGSGTDFTLTISSLQAEDVAVYYCQQSNEDPYTFGGGTKVEIKRTVAAPSVFIFPPSDEQLKSGTASVVCLLNNFYPREAKVQWKVDNALQSGNSQESVTEQDSKDSTYSLSSTLTLSKADYEKHKVYACEVTHQGLSSPVTKSFNRGEC

SEQ ID NO: 9424 - protein, 218 aa, Artificial Sequence
  source: /note="Description of Artificial Sequence: Synthetic polypeptide"
DIQMTQSPSSLSASVGDRVTITCRASESVDSYGNSFMHWYQQKPGKAPKLLIYRASNLESGVPSRFSGSGSGTDFTLTISSLQPEDFATYYCQQSNEDPYTFGGGTKVEIKRTVAAPSVFIFPPSDEQLKSGTASVVCLLNNFYPREAKVQWKVDNALQSGNSQESVTEQDSKDSTYSLSSTLTLSKADYEKHKVYACEVTHQGLSSPVTKSFNRGEC

SEQ ID NO: 9425 - protein, 214 aa, Artificial Sequence
  source: /note="Description of Artificial Sequence: Synthetic polypeptide"
DIQMTQSPSSLSASVGDRVTITCKASDLIHNWLAWYQQKPGKAPKLLIYGATSLETGVPSRFSGSGSGTDFTLTISSLQPEDFATYYCQQYWTTPFTFGQGTKVEIKRTVAAPSVFIFPPSDEQLKSGTASVVCLLNNFYPREAKVQWKVDNALQSGNSQESVTEQDSKDSTYSLSSTLTLSKADYEKHKVYACEVTHQGLSSPVTKSFNRGEC

SEQ ID NO: 9426 - protein, 214 aa, Artificial Sequence
  source: /note="Description of Artificial Sequence: Synthetic polypeptide"
DIVMTQSQRFMSTTVGDRVSITCKASQNVVSAVAWYQQKPGQSPKLLIYSASNRYTGVPDRFTGSGSGTDFTLTISNMQSEDLADFFCQQYSNYPWTFGGGTKLEIKRTVAAPSVFIFPPSDEQLKSGTASVVCLLNNFYPREAKVQWKVDNALQSGNSQESVTEQDSKDSTYSLSSTLTLSKADYEKHKVYACEVTHQGLSSPVTKSFNRGEC

SEQ ID NO: 9427 - protein, 219 aa, Artificial Sequence
  source: /note="Description of Artificial Sequence: Synthetic polypeptide"
DVVMTQSPLSLPVTLGQPASISCKSSQSLLDSDGKTFLNWFQQRPGQSPRRLIYLVSKLDSGVPDRFSGSGSGTDFTLKISRVEAEDVGVYYCWQGTHFPYTFGQGTRLEIKRTVAAPSVFIFPPSDEQLKSGTASVVCLLNNFYPREAKVQWKVDNALQSGNSQESVTEQDSKDSTYSLSSTLTLSKADYEKHKVYACEVTHQGLSSPVTKSFNRGEC

SEQ ID NO: 9428 - protein, 219 aa, Artificial Sequence
  source: /note="Description of Artificial Sequence: Synthetic polypeptide"
DVLMTQSPLSLPVTPGEPASISCRSSRNIVHINGDTYLEWYLQKPGQSPQLLIYKVSNRFSGVPDRFSGSGSGTDFTLKISRVEAEDVGVYYCFQGSLLPWTFGQGTKVEIKRTVAAPSVFIFPPSDEQLKSGTASVVCLLNNFYPREAKVQWKVDNALQSGNSQESVTEQDSKDSTYSLSSTLTLSKADYEKHKVYACEVTHQGLSSPVTKSFNRGEC

SEQ ID NO: 9429 - protein, 113 aa, Artificial Sequence
  source: /note="Description of Artificial Sequence: Synthetic polypeptide"
DIVMTQSPLSLPVSPGEPATINCKSSQSLFNSGNQKNYLAWYLQKPGQPPKLLIYGASTRESGVPDRFSGSGSGTDFTLTISSLQAEDVAVYYCQNDHTYPYTFGQGTKLEIK

SEQ ID NO: 9430 - protein, 113 aa, Artificial Sequence
  source: /note="Description of Artificial Sequence: Synthetic polypeptide"
DIVLTQSPSSLSVSAGEKVTMDCKSSQSLFNSGNQKNYLAWYHQKPGQPPKLLIYGASTRESGVPDRFTGSGSGTDFTLTISSVQAEDLAVYYCQNDHTYPYTFGGGTKLEIK

SEQ ID NO: 9431 - protein, 106 aa, Artificial Sequence
  source: /note="Description of Artificial Sequence: Synthetic polypeptide"
DIQMTQSPSSLSASLGGKVTITCKASQDINKYISWYQDKPGKGPGLLIHYTSTLQPGIPSRFSGSGSGRDYSFSISNLEPEDIATYYCLQYDNLYTFGGGTKLEIK

SEQ ID NO: 9432 - protein, 214 aa, Artificial Sequence
  source: /note="Description of Artificial Sequence: Synthetic polypeptide"
DIVMTQSPSSMSASIGDRVTITCRASQGITSWLAWYQQKPGKAPNLLIYGSSSLQSGVPSRFSGSGSGTEFTLTISSLQPEDFATYYCQQGYSFPYTFGQGTKLEIKRTVAAPSVFIFPPSDEQLKSGTASVVCLLNNFYPREAKVQWKVDNALQSGNSQESVTEQDSKDSTYSLSSTLTLSKADYEKHKVYACEVTHQGLSSPVTKSFNRGEC

SEQ ID NO: 9433 - protein, 120 aa, Artificial Sequence
  source: /note="Description of Artificial Sequence: Synthetic polypeptide"
QVQLVQSGGGVVQPGRSLRLSCAASGVSLPDYGVSWVRQAPGKGLEWVAVIWGSETTYYNSALKSRLTISRDNSKNTLYLQMNSLRAEDTAVYYCARHYYYGGSYAMDYWGQGTLVTVSS

SEQ ID NO: 9434 - protein, 214 aa, Artificial Sequence
  source: /note="Description of Artificial Sequence: Synthetic polypeptide"
DIQMTQSPSSLSASVGDRVTITCRASQDISKFLNWYQQKPGKAIKLLIYHTSRLHSGVPSRFSGSGSGTDFTLTISSLQPEDFATYYCQQGATLPYTFGPGTKVDIKRTVAAPSVFIFPPSDEQLKSGTASVVCLLNNFYPREAKVQWKVDNALQSGNSQESVTEQDSKDSTYSLSSTLTLSKADYEKHKVYACEVTHQGLSSPVTKSFNRGEC

SEQ ID NO: 9435 - protein, 214 aa, Artificial Sequence
  source: /note="Description of Artificial Sequence: Synthetic polypeptide"
DIQMTQTTSSLSASLGDRVTISCRASQDISKYLNWYQQKPDGTVKLLIYHTSRLHSGVPSRFSGSGSGTDYSLTISNLEQEDIATYFCQQGNTLPYTFGGGTKLEITRTVAAPSVFIFPPSDEQLKSGTASVVCLLNNFYPREAKVQWKVDNALQSGNSQESVTEQDSKDSTYSLSSTLTLSKADYEKHKVYACEVTHQGLSSPVTKSFNRGEC

SEQ ID NO: 9436 - protein, 107 aa, Artificial Sequence
  source: /note="Description of Artificial Sequence: Synthetic polypeptide"
DIVMTQTPSSLSASVGDRVTITCRASQDISKYLNWYQQKPGKAPKLLIYHTSRLHSGVPSRFSGSGSGTDFTLTISSLQPEDFATYFCQQGNTLPYTFGPGTKVDIK

SEQ ID NO: 9437 - protein, 107 aa, Artificial Sequence
  source: /note="Description of Artificial Sequence: Synthetic polypeptide"
DIQMTQSPSSLSASVGDRVTITCRASQDISKYLNWYQQKPGKAPKLLIYHTSRLHSGVPSRFSGSGSGTDFTLTISSLQPEDFATYYCQQGNTLPYTFGPGTKVDIK

SEQ ID NO: 9438 - protein, 120 aa, Artificial Sequence
  source: /note="Description of Artificial Sequence: Synthetic polypeptide"
QVQLVESGGGVVQPGRSLRLSCAASGVSLPDYGVSWVRQAPGKGLEWVAVIWGSETTYYNSALKSRFTISRDNSKNTLYLQMNSLRAEDTAVYYCARHYYYGGSYAMDYWGQGTLVTVSS

SEQ ID NO: 9439 - protein, 213 aa, Artificial Sequence
  source: /note="Description of Artificial Sequence: Synthetic polypeptide"
EIVLTQSPATLSLSPGERATLSCSASSSVSYMHWYQQKPGQAPRLLIYDTSKLASGIPARFSGSGSGTDFTLTISSLEPEDVAVYYCFQGSVYPFTFGQGTKLEIKRTVAAPSVFIFPPSDEQLKSGTASVVCLLNNFYPREAKVQWKVDNALQSGNSQESVTEQDSKDSTYSLSSTLTLSKADYEKHKVYACEVTHQGLSSPVTKSFNRGEC

SEQ ID NO: 9440 - protein, 114 aa, Artificial Sequence
  source: /note="Description of Artificial Sequence: Synthetic polypeptide"
ELVLTQSPASLAVSLGQRATISCKASQSVDYDGDSYLNWYQQIPGQPPKLLIYDASNLVSGIPPRFSGSGSGTDFTLNIHPVEKVDAATYHCQQSTEDPWTFGGGTKLEIKRRS

SEQ ID NO: 9441 - protein, 114 aa, Artificial Sequence
  source: /note="Description of Artificial Sequence: Synthetic polypeptide"
ELVLTQSPASLAVSLGQRATISCRASQSVDNYGISFMNWFQQKPGQPPKLLIYAASNQGSGVPARFSGSGSGTDFSLNIHPMEEDDTAMYFCQQSKEVPRTFGGGTKLEIKRRS

SEQ ID NO: 9442 - protein, 211 aa, Artificial Sequence
  source: /note="Description of Artificial Sequence: Synthetic polypeptide"
EIVLTQSPAIMSASPGERVTMTCSASSGVNYMHWYQQKPGTSPRRWIYDTSKLASGVPARFSGSGSGTDYSLTISSMEPEDAATYYCHQRGSYTFGGGTKLEIKRTVAAPSVFIFPPSDEQLKSGTASVVCLLNNFYPREAKVQWKVDNALQSGNSQESVTEQDSKDSTYSLSSTLTLSKADYEKHKVYACEVTHQGLSSPVTKSFNRGEC

SEQ ID NO: 9443 - protein, 218 aa, Artificial Sequence
  source: /note="Description of Artificial Sequence: Synthetic polypeptide"
EIVLTQSPDFQSVTPKEKVTITCRASESVDTFGISFMNWFQQKPDQSPKLLIHEASNQGSGVPSRFSGSGSGTDFTLTINSLEAEDAATYYCQQSKEVPFTFGGGTKVEIKRTVAAPSVFIFPPSDEQLKSGTASVVCLLNNFYPREAKVQWKVDNALQSGNSQESVTEQDSKDSTYSLSSTLTLSKADYEKHKVYACEVTHQGLSSPVTKSFNRGEC

SEQ ID NO: 9444 - protein, 125 aa, Artificial Sequence
  source: /note="Description of Artificial Sequence: Synthetic polypeptide"
MGWSCIILFLVATATGVHSDIQLTQSPSSLSASVGDRVTMTCRASSSVSYIHWFQQKPGKAPKPWIYATSNLASGVPVRFSGSGSGTDYTFTISSLQPEDIATYYCQQWTSNPPTFGGGTKLEIK

SEQ ID NO: 9445 - protein, 213 aa, Artificial Sequence
  source: /note="Description of Artificial Sequence: Synthetic polypeptide"
QIVMSQSPAILSASPGEKVTMTCRARSSVSYIHWYQQKPGSSPKPWIYATSNLASGVPGRFSGSGSGTSYSLTITRVEAEDAATYYCQQWSSKPPTFGGGTKLEIKRADAAPTVSIFPPSSEQLTSGGASVVCFLNNFYPKDINVKWKIDGSERQNGVLNSWTDQDSKDSTYSMSSTLTLTKDEYERHNSYTCEATHKTSTSPIVKSFNRNEC

SEQ ID NO: 9446 - protein, 232 aa, Artificial Sequence
  source: /note="Description of Artificial Sequence: Synthetic polypeptide"
MGWSCIILFLVATATGVHSDIQMTQSPSSLSASVGDRVTITCRASSSVSYMHWYQQKPGKAPKPLIYAPSNLASGVPSRFSGSGSGTDFTLTISSLQPEDFATYYCQQWSFNPFTFGQGTKVEIKRTVAAPSVFIFPPSDEQLKSGTASVVCLLNNFYPREAKVQWKVDNALQSGNSQESVTEQDSKDSTYSLSSTLTLSKADYEKHKVYACEVTHQGLSSPVTKSFNRGEC

SEQ ID NO: 9447 - protein, 219 aa, Artificial Sequence
  source: /note="Description of Artificial Sequence: Synthetic polypeptide"
DIVMTQTPLSLPVTPGEPASISCRSSKSLLHSNGITYLYWYLQKPGQSPQLLIYQMSNLVSGVPDRFSGSGSGTDFTLKISRVEAEDVGVYYCAQNLELPYTFGGGTKVEIKRTVAAPSVFIFPPSDEQLKSGTASVVCLLNNFYPREAKVQWKVDNALQSGNSQESVTEQDSKDSTYSLSSTLTLSKADYEKHKVYACEVTHQGLSSPVTKSFNRGEC

SEQ ID NO: 9448 - protein, 209 aa, Artificial Sequence
  source: /note="Description of Artificial Sequence: Synthetic polypeptide"
QIVLSQSPAILSASPGEKVTMTCRASSSVSYMHWYQQKPGSSPKPWIYAPSNLASGVPARFSGSGSGTSYSLTISRVEAEDAATYYCQQWSFNPPTFGAGTKLELKRADAAPTVFIFPPSDEQLKSGTASVVCLLNNFYPREAKVQWKVDNALQSGNSQESVTEQDSKDSTYSLSSTLTLSKADYEKHKVYACEVTHQGLSSPVTKSFN

SEQ ID NO: 9449 - protein, 213 aa, Artificial Sequence
  source: /note="Description of Artificial Sequence: Synthetic polypeptide"
DIQMTQSPSSLSASVGDRVTITCRASSSVSYMHWYQQKPGKAPKPLIYAPSNLASGVPSRFSGSGSGTDFTLTISSLQPEDFATYYCQQWSFNPPTFGQGTKVEIKRTVAAPSVFIFPPSDEQLKSGTASVVCLLNNFYPREAKVQWKVDNALQSGNSQESVTEQDSKDSTYSLSSTLTLSKADYEKHKVYACEVTHQGLSSPVTKSFNRGEC

SEQ ID NO: 9450 - protein, 232 aa, Artificial Sequence
  source: /note="Description of Artificial Sequence: Synthetic polypeptide"
MGWSCIILFLVATATGVHSDIQMTQSPSSLSASVGDRVTITCRASSSVSYMHWYQQKPGKAPKPLIYAPSNLASGVPSRFSGSGSGTDFTLTISSLQPEDFATYYCQQWSFNPPTFGQGTKVEIKRTVAAPSVFIFPPSDEQLKSGTASVVCLLNNFYPREAKVQWKVDNALQSGNSQESVTEQDSKDSTYSLSSTLTLSKADYEKHKVYACEVTHQGLSSPVTKSFNRGEC

SEQ ID NO: 9451 - protein, 238 aa, Artificial Sequence
  source: /note="Description of Artificial Sequence: Synthetic polypeptide"
ALPAQLLGLLMLWVSGSSGDIVMTQSPLSLTVTPGEPASISCRSSQSLLYSNGYNYLDWYLQKPGQSPQVLISLGSNRASGVPDRFSGSGSGTDFTLKISRVEAEDVGVYYCMQARQTPFTFGPGTKVDIRRTVAAPSVFIFPPSDEQLKSGTASVVCLLNNFYPREAKVQWKVDNALQSGNSQESVTEQDSKDSTYSLSSTLTLSKADYEKHKVYACEVTHQGLSSPVTKSFNRGEC

SEQ ID NO: 9452 - protein, 108 aa, Artificial Sequence
  source: /note="Description of Artificial Sequence: Synthetic polypeptide"
DVVMTQSPLSLPVTLGQPASISCRSSQSLVYSDGNTYLNWFQQRPGQSPRRLIYKVSNWDSGVPDRFSGSGSGTDFTLKISRVEAEDVGVYYCMQGTHFGPGTKVDIK

SEQ ID NO: 9453 - protein, 112 aa, Artificial Sequence
  source: /note="Description of Artificial Sequence: Synthetic polypeptide"
DVVMTQSPLSLPVTLGQPASISCRSSQSLVYSDGNTYLNWFQQRPGQSPRRLIYKVSNWDSGVPDRFSGSGSGTDFTLKISRVEAEDVGVYYCMQGTHWPLTFGGGTKVEIK

SEQ ID NO: 9454 - protein, 112 aa, Artificial Sequence
  source: /note="Description of Artificial Sequence: Synthetic polypeptide"
DVVMTQSPLSLPVTLGQPASISCRSSQSLVYSDGNTYLNWFQQRPGQSPRRLIYKVSNWDSGVPDRFSGSGSGTDFTLKISRVEAEDVGVYYCMQGTHWPITFGQGTRLEIK

SEQ ID NO: 9455 - protein, 110 aa, Artificial Sequence
  source: /note="Description of Artificial Sequence: Synthetic polypeptide"
DIVMTQTPLSSPVTLGQPASISCRSSQSLVHSDGNTYLSWLQQRPGQPPRLLIYKISNRFSGVPDRFSGSGAGTDFTLKISRVEAEDVGVYYCMQATQFTFGGGTKVEIK

SEQ ID NO: 9456 - protein, 112 aa, Artificial Sequence
  source: /note="Description of Artificial Sequence: Synthetic polypeptide"
DIVMTQTPLSSPVTLGQPASISCRSSQSLVHSDGNTYLSWLQQRPGQPPRLLIYKISNRFSGVPDRFSGSGAGTDFTLKISRVEAEDVGVYYCMQATQFPITFGQGTRLEIK

SEQ ID NO: 9457 - protein, 105 aa, Artificial Sequence
  source: /note="Description of Artificial Sequence: Synthetic polypeptide"
EIVMTQSPATLSVSPGERATLSCRASQSVSSNLAWYQQKPGQAPRLLIYGASTRATGIPARFSGSGSGTEFTLTISSLQSEDFAVYYCQQYNNWTFGGGTKVEIK

SEQ ID NO: 9458 - protein, 107 aa, Artificial Sequence
  source: /note="Description of Artificial Sequence: Synthetic polypeptide"
SSELTQDPAVSVALGQTVRITCQGDSLRSYYASWYQQKPGQAPVLVIYGKNNRPSGIPDRFSGSSSGNTASLTITGAQAEDEADYYCNSRDSSGNHVFGGGTKLTVL

SEQ ID NO: 9459 - protein, 114 aa, Artificial Sequence
  source: /note="Description of Artificial Sequence: Synthetic polypeptide"
QPVLTQPTSLSASPGASARLTCTLRSGINLGSYRIFWYQQKPESPPRYLLSYYSDSSKHQGSGVPSRFSGSKDASSNAGILVISGLQSEDEADYYCMIWHSSAVFGGGTKLTVL

SEQ ID NO: 9460 - protein, 218 aa, Artificial Sequence
  source: /note="Description of Artificial Sequence: Synthetic polypeptide"
DIVLTQSPASLAVSLGQRATISCRASGSVDSFGNSFMHWYQQKPGQPPKLLIYRASNLESGVPARFSGGGSRTDFTLTINPVEADDIATYFCQQSYEDPFTFGAGTKLELMRADAAPTVSIFPPSSEQLTSGGASVVCFLNNFYPKDINVKWKIDGSERQNGVLNSWTDQDSKDSTYSMSSTLTLTKDEYERHNSYTCEATHKTSTSPIVKSFNRNEC

SEQ ID NO: 9461 - protein, 218 aa, Artificial Sequence
  source: /note="Description of Artificial Sequence: Synthetic polypeptide"
DIVLTQSPASLAVSLGQRAIISCRASESVDNFGNSFMHWYQQKPGQPPTLLIYRASNLESGIPARFSGSGSRTDFTLTVNPVEADDIATYYCQQSYEDPFTFGAGTKLELKRADAAPTVSIFPPSSEQLTSGGASVVCFLNNFYPKDINVKWKIDGSERQNGVLNSWTDQDSKDSTYSMSSTLTLTKDEYERHNSYTCEATHKTSTSPIVKSFNRNEC

SEQ ID NO: 9462 - protein, 112 aa, Artificial Sequence
  source: /note="Description of Artificial Sequence: Synthetic polypeptide"
DIVLTQSPASLAVSLGQRATISCRASGSVDSFGNSFMHWYQQKPGQPPKLLIYRASNLESGVPARFSGGGSRTDFTLTINPVEADDIATYFCQQSYEDPFTFGAGTKLELMR

SEQ ID NO: 9463 - protein, 112 aa, Artificial Sequence
  source: /note="Description of Artificial Sequence: Synthetic polypeptide"
DIVLTQSPASLAVSPGQRATISCRASGSVDSFGNSFMHWYQQKPGQPPKLLIYRASNLESGVPARFSGGGSRTDFTLTINPVEANDIATYFCQQSYEDPFTFGQGTKLELKR

SEQ ID NO: 9464 - protein, 112 aa, Artificial Sequence
  source: /note="Description of Artificial Sequence: Synthetic polypeptide"
DIVLTQSPASLAVSLGQRAIISCRASESVDNFGNSFMHWYQQKPGQPPTLLIYRASNLESGIPARFSGSGSRTDFTLTVNPVEADDIATYYCQQSYEDPFTFGAGTKLELKR

SEQ ID NO: 9465 - protein, 218 aa, Artificial Sequence
  source: /note="Description of Artificial Sequence: Synthetic polypeptide"
DIVLTQSPASLAVSPGQRATISCRASGSVDSFGNSFMHWYQQKPGQPPKLLIYRASNLESGVPARFSGGGSRTDFTLTINPVEANDIATYFCQQSYEDPFTFGQGTKLELKRTVAAPSVFIFPPSDEQLKSGTASVVCLLNNFYPREAKVQWKVDNALQSGNSQESVTEQDSKDSTYSLSSTLTLSKADYEKHKVYACEVTHQGLSSPVTKSFNRGEC

SEQ ID NO: 9466 - protein, 112 aa, Artificial Sequence; identical to SEQ ID NO: 9462
  source: /note="Description of Artificial Sequence: Synthetic polypeptide"

SEQ ID NO: 9467 - protein, 214 aa, Artificial Sequence
  source: /note="Description of Artificial Sequence: Synthetic polypeptide"
DIVMTQSQKFMSTSVGDRVSVNCKASQNVGTNVAWYQQKPRQSPKGLIYSASFRYSGVPDRFTGSGSGTDFTLTIFNVQSDDLAEYFCQQYNNYPLTFGGGTKLEIKRADAAPTVSIFPPSSEQLTSGGASVVCFLNNFYPKDINVKWKIDGSERQNGVLNSWTDQDSKDSTYSMSSTLTLTKDEYERHNSYTCEATHKTSTSPIVKSFNRNEC

SEQ ID NO: 9468 - protein, 214 aa, Artificial Sequence
  source: /note="Description of Artificial Sequence: Synthetic polypeptide"
DIQMTQSPSTMSTSVGDRVSVNCKASQNVGTNVAWYQQKPGKSPKGLIYSASFRYSGVPSRFTGSGSGTDFTLTIFNVQPDDLAEYFCQQYNNYPLTFGGGTKLEIKRTVAAPSVFIFPPSDEQLKSGTASVVCLLNNFYPREAKVQWKVDNALQSGNSQESVTEQDSKDSTYSLSSTLTLSKADYEKHKVYACEVTHQGLSSPVTKSFNRGEC

SEQ ID NO: 9469 - protein, 108 aa, Artificial Sequence
  source: /note="Description of Artificial Sequence: Synthetic polypeptide"
DIQMTQSPSTMSTSVGDRVSVNCKASQNVGTNVAWYQQKPGKSPKGLIYSASFRYSGVPSRFTGSGSGTDFTLTIFNVQPDDLAEYFCQQYNNYPLTFGGGTKLEIKR

SEQ ID NO: 9470 - protein, 214 aa, Artificial Sequence
  source: /note="Description of Artificial Sequence: Synthetic polypeptide"
DIKMTQSPSSMYTSLGERVTITCKASQDINSFLSWFQQKPGKSPKTLIYRAYRLVDGVPSRFSGSGSGQDYSLTISSLEFEDMGIYYCLQSGAFPLTFGAGTKLELKRADAAPTVSIFPPSSEQLTSGGASVVCFLNNFYPKDINVKWKIDGSERQNGVLNSWTDQDSKDSTYSMSSTLTLTKDEYERHNSYTCEATHKTSTSPIVKSFNRNEC

SEQ ID NO: 9471 - protein, 108 aa, Artificial Sequence
  source: /note="Description of Artificial Sequence: Synthetic polypeptide"
DIVMTQSQKFMSTSVGDRVSVNCKASQNVGTNVAWYQQKPRQSPKGLIYSASFRYSGVPDRFTGSGSGTDFTLTIFNVQSDDLAEYFCQQYNNYPLTFGGGTKLEIKR

SEQ ID NO: 9472 - protein, 108 aa, Artificial Sequence
  source: /note="Description of Artificial Sequence: Synthetic polypeptide"
DIKMTQSPSSMYTSLGERVTITCKASQDINSFLSWFQQKPGKSPKTLIYRAYRLVDGVPSRFSGSGSGQDYSLTISSLEFEDMGIYYCLQSGAFPLTFGAGTKLELKR

SEQ ID NO: 9473 - protein, 213 aa, Artificial Sequence
  source: /note="Description of Artificial Sequence: Synthetic polypeptide"
QIVLSQSPAILSASPGEKVTMTCRASSSVSYMHWYQQKPGSSPKPWIYATSNLASGVPARFSGSGSGTSYSFTISRVEAEDAATYYCQQWTFNPPTFGGGTRLEIKRTVAAPSVFIFPPSDEQLKSGTASVVCLLNNFYPREAKVQWKVDNALQSGNSQESVTEQDSKDSTYSLSSTLTLSKADYEKHKVYACEVTHQGLSSPVTKSFNRGEC

SEQ ID NO: 9474 - protein, 239 aa, Artificial Sequence
  source: /note="Description of Artificial Sequence: Synthetic polypeptide"
MALPAQLLGLLMLWVSGSSGDIVMTQSPLSLTVTPGEPASISCRSSQSLLYSNGYNYLDWYLQKPGQSPQVLISLGSNRASGVPDRFSGSGSGTDFTLKISRVEAEDVGVYYCMQARQTPFTFGPGTKVDIRRTVAAPSVFIFPPSDEQLKSGTASVVCLLNNFYPREAKVQWKVDNALQSGNSQESVTEQDSKDSTYSLSSTLTLSKADYEKHKVYACEVTHQGLSSPVTKSFNRGEC

SEQ ID NO: 9475 - protein, 239 aa, Artificial Sequence
  source: /note="Description of Artificial Sequence: Synthetic polypeptide"
MALLAQLLGLLMLWVPGSSGAIVMTQPPLSSPVTLGQPASISCRSSQSLVHSDGNTYLNWLQQRPGQPPRLLIYKFFRRLSGVPDRFSGSGAGTDFTLKISRVEAEDVGVYYCMQVTQFPHTFGQGTRLEIKRTVAAPSVFIFPPSDEQLKSGTASVVCLLNNFYPREAKVQWKVDNALQSGNSQESVTEQDSKDSTYSLSSTLTLSKADYEKHKVYACEVTHQGLSSPVTKSFNRGEC

SEQ ID NO: 9476 - protein, 213 aa, Artificial Sequence
  source: /note="Description of Artificial Sequence: Synthetic polypeptide"
QIVLSQSPSSLSASPGEKVTMTCRASSSVSYIHWFQQKPGSSPKPWIYATSNLASGVPVRFSGSGSGTSYSLTISRVEAEDAATYYCQQWTSNPPTFGGGTKLEIKRTVAAPSVFIFPPSDEQLKSGTASVVCLLNNFYPREAKVQWKVDNALQSGNSQESVTEQDSKDSTYSLSSTLTLSKADYEKHKVYACEVTHQGLSSPVTKSFNRGEC

SEQ ID NO: 9477 - protein, 213 aa, Artificial Sequence
  source: /note="Description of Artificial Sequence: Synthetic polypeptide"
QIQLSQSPSILSASPGEKVTMTCRASSSVSYIHWFQQKPGSSPKPWIYATSNLASGVPSRFSGSGSGTSYSLTISRVEAEDAATYYCQQWTSNPPTFGGGTKLEIKRTVAAPSVFIFPPSDEQLKSGTASVVCLLNNFYPREAKVQWKVDNALQSGNSQESVTEQDSKDSTYSLSSTLTLSKADYEKHKVYACEVTHQGLSSPVTKSFNRGEC

SEQ ID NO: 9478 - protein, 213 aa, Artificial Sequence
  source: /note="Description of Artificial Sequence: Synthetic polypeptide"
QIQLSQSPSSLSASPGEKVTMTCRASSSVSYIHWFQQKPGSSPKPWIYATSNLASGVPSRFSGSGSGTSYSLTISRVEAEDAATYYCQQWTSNPPTFGGGTKLEIKRTVAAPSVFIFPPSDEQLKSGTASVVCLLNNFYPREAKVQWKVDNALQSGNSQESVTEQDSKDSTYSLSSTLTLSKADYEKHKVYACEVTHQGLSSPVTKSFNRGEC

SEQ ID NO: 9479 - protein, 213 aa, Artificial Sequence
  source: /note="Description of Artificial Sequence: Synthetic polypeptide"
QIQLSQSPSILSASPGEKVTMTCRASSSVSYIHWFQQKPGSSPKPWIYATSNLASGVPSRFSGSGSGTSYSLTISRVEAEDAATYYCQQWTSNPPTFGGGTKLEIKRTVAAPSVFIFPPSDEQLKSGTASVVCLLNNFYPREAKVQWKVDNADQSGNSQESVTEQDSKDSTYSLSSTLTLSKADYEKHKVYACEVTHQGLSSPVTKSFNRGEC

SEQ ID NO: 9480 - protein, 213 aa, Artificial Sequence
  source: /note="Description of Artificial Sequence: Synthetic polypeptide"
QIQLSQSPSSLSASPGEKVTMTCRASSSVSYIHWFQQKPGSSPKPWIYATSNLASGVPSRFSGSGSGTSYSLTISRVEAEDAATYYCQQWTSNPPTFGGGTKLEIKRTVAAPSVFIFPPSDEQLKSGTASVVCLLNNFYPREAKVQWKVDNADQSGNSQESVTEQDSKDSTYSLSSTLTLSKADYEKHKVYACEVTHQGLSSPVTKSFNRGEC

SEQ ID NO: 9481 - protein, 213 aa, Artificial Sequence
  source: /note="Description of Artificial Sequence: Synthetic polypeptide"
  MOD_RES (3)..(3): Any amino acid
QIXLSQSPAILSASPGEKVTMTCRASSSVSYIHWFQQKPGSSPKPWIYATSNLASGVPVRFSGSGSGTSYSLTISRVEAEDAATYYCQQWTSNPPTFGGGTKLEIKRTVAAPSVFIFPPSDEQLKSGTASVVCLLNNFYPREAKVQWKVDNALQSGNSQESVTEQDSKDSTYSLSSTLTLSKADYEKHKVYACEVTHQGLSSPVTKSFNRGEC

SEQ ID NO: 9482 - protein, 213 aa, Artificial Sequence
  source: /note="Description of Artificial Sequence: Synthetic polypeptide"
  MOD_RES (9)..(9): Any amino acid
QIVLSQSPXILSASPGEKVTMTCRASSSVSYIHWFQQKPGSSPKPWIYATSNLASGVPVRFSGSGSGTSYSLTISRVEAEDAATYYCQQWTSNPPTFGGGTKLEIKRTVAAPSVFIFPPSDEQLKSGTASVVCLLNNFYPREAKVQWKVDNALQSGNSQESVTEQDSKDSTYSLSSTLTLSKADYEKHKVYACEVTHQGLSSPVTKSFNRGEC

SEQ ID NO: 9483 - protein, 213 aa, Artificial Sequence
  source: /note="Description of Artificial Sequence: Synthetic polypeptide"
  MOD_RES (10)..(10): Any amino acid
QIVLSQSPAXLSASPGEKVTMTCRASSSVSYIHWFQQKPGSSPKPWIYATSNLASGVPVRFSGSGSGTSYSLTISRVEAEDAATYYCQQWTSNPPTFGGGTKLEIKRTVAAPSVFIFPPSDEQLKSGTASVVCLLNNFYPREAKVQWKVDNALQSGNSQESVTEQDSKDSTYSLSSTLTLSKADYEKHKVYACEVTHQGLSSPVTKSFNRGEC

SEQ ID NO: 9484 - protein, 213 aa, Artificial Sequence
  source: /note="Description of Artificial Sequence: Synthetic polypeptide"
  MOD_RES (59)..(59): Any amino acid
QIVLSQSPAILSASPGEKVTMTCRASSSVSYIHWFQQKPGSSPKPWIYATSNLASGVPXRFSGSGSGTSYSLTISRVEAEDAATYYCQQWTSNPPTFGGGTKLEIKRTVAAPSVFIFPPSDEQLKSGTASVVCLLNNFYPREAKVQWKVDNALQSGNSQESVTEQDSKDSTYSLSSTLTLSKADYEKHKVYACEVTHQGLSSPVTKSFNRGEC

SEQ ID NO: 9485 - protein, 213 aa, Artificial Sequence
  source: /note="Description of Artificial Sequence: Synthetic polypeptide"
  MOD_RES (153)..(153): Any amino acid
QIVLSQSPAILSASPGEKVTMTCRASSSVSYIHWFQQKPGSSPKPWIYATSNLASGVPVRFSGSGSGTSYSLTISRVEAEDAATYYCQQWTSNPPTFGGGTKLEIKRTVAAPSVFIFPPSDEQLKSGTASVVCLLNNFYPREAKVQWKVDNAXQSGNSQESVTEQDSKDSTYSLSSTLTLSKADYEKHKVYACEVTHQGLSSPVTKSFNRGEC

SEQ ID NO: 9486 - protein, 213 aa, Artificial Sequence
  source: /note="Description of Artificial Sequence: Synthetic polypeptide"
  MOD_RES (9)..(10): Any amino acid
QIVLSQSPXXLSASPGEKVTMTCRASSSVSYIHWFQQKPGSSPKPWIYATSNLASGVPVRFSGSGSGTSYSLTISRVEAEDAATYYCQQWTSNPPTFGGGTKLEIKRTVAAPSVFIFPPSDEQLKSGTASVVCLLNNFYPREAKVQWKVDNALQSGNSQESVTEQDSKDSTYSLSSTLTLSKADYEKHKVYACEVTHQGLSSPVTKSFNRGEC

SEQ ID NO: 9487 - protein, 213 aa, Artificial Sequence
  source: /note="Description of Artificial Sequence: Synthetic polypeptide"
  MOD_RES (3)..(3): Any amino acid
  MOD_RES (9)..(9): Any amino acid
  MOD_RES (59)..(59): Any amino acid
QIXLSQSPXILSASPGEKVTMTCRASSSVSYIHWFQQKPGSSPKPWIYATSNLASGVPXRFSGSGSGTSYSLTISRVEAEDAATYYCQQWTSNPPTFGGGTKLEIKRTVAAPSVFIFPPSDEQLKSGTASVVCLLNNFYPREAKVQWKVDNALQSGNSQESVTEQDSKDSTYSLSSTLTLSKADYEKHKVYACEVTHQGLSSPVTKSFNRGEC

SEQ ID NO: 9488 - protein, 213 aa, Artificial Sequence
  source: /note="Description of Artificial Sequence: Synthetic polypeptide"
  MOD_RES (3)..(3): Any amino acid
  MOD_RES (9)..(10): Any amino acid
  MOD_RES (59)..(59): Any amino acid
QIXLSQSPXXLSASPGEKVTMTCRASSSVSYIHWFQQKPGSSPKPWIYATSNLASGVPXRFSGSGSGTSYSLTISRVEAEDAATYYCQQWTSNPPTFGGGTKLEIKRTVAAPSVFIFPPSDEQLKSGTASVVCLLNNFYPREAKVQWKVDNALQSGNSQESVTEQDSKDSTYSLSSTLTLSKADYEKHKVYACEVTHQGLSSPVTKSFNRGEC

SEQ ID NO: 9489 - protein, 213 aa, Artificial Sequence
  source: /note="Description of Artificial Sequence: Synthetic polypeptide"
  MOD_RES (3)..(3): Any amino acid
  MOD_RES (9)..(9): Any amino acid
  MOD_RES (59)..(59): Any amino acid
  MOD_RES (153)..(153): Any amino acid
QIXLSQSPXILSASPGEKVTMTCRASSSVSYIHWFQQKPGSSPKPWIYATSNLASGVPXRFSGSGSGTSYSLTISRVEAEDAATYYCQQWTSNPPTFGGGTKLEIKRTVAAPSVFIFPPSDEQLKSGTASVVCLLNNFYPREAKVQWKVDNAXQSGNSQESVTEQDSKDSTYSLSSTLTLSKADYEKHKVYACEVTHQGLSSPVTKSFNRGEC

SEQ ID NO: 9490 - protein, 213 aa, Artificial Sequence
  source: /note="Description of Artificial Sequence: Synthetic polypeptide"
  MOD_RES (3)..(3): Any amino acid
  MOD_RES (9)..(10): Any amino acid
  MOD_RES (59)..(59): Any amino acid
  MOD_RES (153)..(153): Any amino acid
QIXLSQSPXXLSASPGEKVTMTCRASSSVSYIHWFQQKPGSSPKPWIYATSNLASGVPXRFSGSGSGTSYSLTISRVEAEDAATYYCQQWTSNPPTFGGGTKLEIKRTVAAPSVFIFPPSDEQLKSGTASVVCLLNNFYPREAKVQWKVDNAXQSGNSQESVTEQDSKDSTYSLSSTLTLSKADYEKHKVYACEVTHQGLSSPVTKSFNRGEC

SEQ ID NO: 9491 - protein, 214 aa, Artificial Sequence
  source: /note="Description of Artificial Sequence: Synthetic polypeptide"
DILLTQSPVILSVSPGERVSFSCRASQSIGTNIHWYQQRTNGSPRLLIKYASESISGIPSRFSGSGSGTDFTLSINSVESEDIADYYCQQNNNWPTTFGAGTKLELKRTVAAPSVFIFPPSDEQLKSGTASVVCLLNNFYPREAKVQWKVDNALQSGNSQESVTEQDSKDSTYSLSSTLTLSKADYEKHKVYACEVTHQGLSSPVTKSFNRGEC

SEQ ID NO: 9492 - protein, 214 aa, Artificial Sequence
  source: /note="Description of Artificial Sequence: Synthetic polypeptide"
DIQLTQSPVILSVSPGERVSFSCRASQSIGTNIHWYQQRTNGSPRLLIKYASESISGIPSRFSGSGSGTDFTLSINSVESEDIADYYCQQNNNWPTTFGAGTKLELKRTVAAPSVFIFPPSDEQLKSGTASVVCLLNNFYPREAKVQWKVDNALQSGNSQESVTEQDSKDSTYSLSSTLTLSKADYEKHKVYACEVTHQGLSSPVTKSFNRGEC

SEQ ID NO: 9493 - protein, 214 aa, Artificial Sequence
  source: /note="Description of Artificial Sequence: Synthetic polypeptide"
DILLTQSPSILSVSPGERVSFSCRASQSIGTNIHWYQQRTNGSPRLLIKYASESISGIPSRFSGSGSGTDFTLSINSVESEDIADYYCQQNNNWPTTFGAGTKLELKRTVAAPSVFIFPPSDEQLKSGTASVVCLLNNFYPREAKVQWKVDNALQSGNSQESVTEQDSKDSTYSLSSTLTLSKADYEKHKVYACEVTHQGLSSPVTKSFNRGEC

SEQ ID NO: 9494 - protein, 214 aa, Artificial Sequence
  source: /note="Description of Artificial Sequence: Synthetic polypeptide"
DILLTQSPVSLSVSPGERVSFSCRASQSIGTNIHWYQQRTNGSPRLLIKYASESISGIPSRFSGSGSGTDFTLSINSVESEDIADYYCQQNNNWPTTFGAGTKLELKRTVAAPSVFIFPPSDEQLKSGTASVVCLLNNFYPREAKVQWKVDNALQSGNSQESVTEQDSKDSTYSLSSTLTLSKADYEKHKVYACEVTHQGLSSPVTKSFNRGEC

SEQ ID NO: 9495 - protein, 213 aa, Artificial Sequence
  source: /note="Description of Artificial Sequence: Synthetic polypeptide"
QIQLSQSPAILSASPGEKVTMTCRASSSVSYIHWFQQKPGSSPKPWIYATSNLASGVPVRFSGSGSGTSYSLTISRVEAEDAATYYCQQWTSNPPTFGGGTKLEIKRTVAAPSVFIFPPSDEQLKSGTASVVCLLNNFYPREAKVQWKVDNALQSGNSQESVTEQDSKDSTYSLSSTLTLSKADYEKHKVYACEVTHQGLSSPVTKSFNRGEC

SEQ ID NO: 9496 - protein, 214 aa, Artificial Sequence
  source: /note="Description of Artificial Sequence: Synthetic polypeptide"
DILLTQSPVILSVSPGERVSFSCRASQSIGTNIHWYQQRTNGSPRLLIKYASESISGIPSRFSGSGSGTDFTLSINSVESEDIADYYCQQNNNWPTTFGAGTKLELKRTVAAPSVFIFPPSDEQLKSGTASVVCLLNNFYPREAKVQWKVDNADQSGNSQESVTEQDSKDSTYSLSSTLTLSKADYEKHKVYACEVTHQGLSSPVTKSFNRGEC

SEQ ID NO: 9497 - protein, 214 aa, Artificial Sequence; identical to SEQ ID NO: 9491
  source: /note="Description of Artificial Sequence: Synthetic polypeptide"

SEQ ID NO: 9498 - protein, 214 aa, Artificial Sequence; identical to SEQ ID NO: 9491
  source: /note="Description of Artificial Sequence: Synthetic polypeptide"

SEQ ID NO: 9499 - protein, 214 aa, Artificial Sequence; identical to SEQ ID NO: 9491
  source: /note="Description of Artificial Sequence: Synthetic polypeptide"

SEQ ID NO: 9500 - protein, 214 aa, Artificial Sequence; identical to SEQ ID NO: 9491
  source: /note="Description of Artificial Sequence: Synthetic polypeptide"

SEQ ID NO: 9501 - protein, 214 aa, Artificial Sequence; identical to SEQ ID NO: 9491
  source: /note="Description of Artificial Sequence: Synthetic polypeptide"

SEQ ID NO: 9502 - protein, 213 aa, Artificial Sequence
  source: /note="Description of Artificial Sequence: Synthetic polypeptide"
QIVLSQSPSILSASPGEKVTMTCRASSSVSYIHWFQQKPGSSPKPWIYATSNLASGVPVRFSGSGSGTSYSLTISRVEAEDAATYYCQQWTSNPPTFGGGTKLEIKRTVAAPSVFIFPPSDEQLKSGTASVVCLLNNFYPREAKVQWKVDNALQSGNSQESVTEQDSKDSTYSLSSTLTLSKADYEKHKVYACEVTHQGLSSPVTKSFNRGEC

SEQ ID NO: 9503 - protein, 214 aa, Artificial Sequence
  source: /note="Description of Artificial Sequence: Synthetic polypeptide"
  MOD_RES (3)..(3): Any amino acid
DIXLTQSPVILSVSPGERVSFSCRASQSIGTNIHWYQQRTNGSPRLLIKYASESISGIPSRFSGSGSGTDFTLSINSVESEDIADYYCQQNNNWPTTFGAGTKLELKRTVAAPSVFIFPPSDEQLKSGTASVVCLLNNFYPREAKVQWKVDNALQSGNSQESVTEQDSKDSTYSLSSTLTLSKADYEKHKVYACEVTHQGLSSPVTKSFNRGEC

SEQ ID NO: 9504 - protein, 214 aa, Artificial Sequence
  source: /note="Description of Artificial Sequence: Synthetic polypeptide"
  MOD_RES (9)..(9): Any amino acid
DILLTQSPXILSVSPGERVSFSCRASQSIGTNIHWYQQRTNGSPRLLIKYASESISGIPSRFSGSGSGTDFTLSINSVESEDIADYYCQQNNNWPTTFGAGTKLELKRTVAAPSVFIFPPSDEQLKSGTASVVCLLNNFYPREAKVQWKVDNALQSGNSQESVTEQDSKDSTYSLSSTLTLSKADYEKHKVYACEVTHQGLSSPVTKSFNRGEC

SEQ ID NO: 9505 - protein, 214 aa, Artificial Sequence
  source: /note="Description of Artificial Sequence: Synthetic polypeptide"
  MOD_RES (10)..(10): Any amino acid
DILLTQSPVXLSVSPGERVSFSCRASQSIGTNIHWYQQRTNGSPRLLIKYASESISGIPSRFSGSGSGTDFTLSINSVESEDIADYYCQQNNNWPTTFGAGTKLELKRTVAAPSVFIFPPSDEQLKSGTASVVCLLNNFYPREAKVQWKVDNALQSGNSQESVTEQDSKDSTYSLSSTLTLSKADYEKHKVYACEVTHQGLSSPVTKSFNRGEC

SEQ ID NO: 9506 - protein, 214 aa, Artificial Sequence
  source: /note="Description of Artificial Sequence: Synthetic polypeptide"
  MOD_RES (154)..(154): Any amino acid
DILLTQSPVILSVSPGERVSFSCRASQSIGTNIHWYQQRTNGSPRLLIKYASESISGIPSRFSGSGSGTDFTLSINSVESEDIADYYCQQNNNWPTTFGAGTKLELKRTVAAPSVFIFPPSDEQLKSGTASVVCLLNNFYPREAKVQWKVDNAXQSGNSQESVTEQDSKDSTYSLSSTLTLSKADYEKHKVYACEVTHQGLSSPVTKSFNRGEC

SEQ ID NO: 9507 - protein, 214 aa, Artificial Sequence
  source: /note="Description of Artificial Sequence: Synthetic polypeptide"
  MOD_RES (9)..(10): Any amino acid
DILLTQSPXXLSVSPGERVSFSCRASQSIGTNIHWYQQRTNGSPRLLIKYASESISGIPSRFSGSGSGTDFTLSINSVESEDIADYYCQQNNNWPTTFGAGTKLELKRTVAAPSVFIFPPSDEQLKSGTASVVCLLNNFYPREAKVQWKVDNALQSGNSQESVTEQDSKDSTYSLSSTLTLSKADYEKHKVYACEVTHQGLSSPVTKSFNRGEC

SEQ ID NO: 9508 - protein, 214 aa, Artificial Sequence
  source: /note="Description of Artificial Sequence: Synthetic polypeptide"
  MOD_RES (3)..(3): Any amino acid
  MOD_RES (9)..(9): Any amino acid
DIXLTQSPXILSVSPGERVSFSCRASQSIGTNIHWYQQRTNGSPRLLIKYASESISGIPSRFSGSGSGTDFTLSINSVESEDIADYYCQQNNNWPTTFGAGTKLELKRTVAAPSVFIFPPSDEQLKSGTASVVCLLNNFYPREAKVQWKVDNALQSGNSQESVTEQDSKDSTYSLSSTLTLSKADYEKHKVYACEVTHQGLSSPVTKSFNRGEC

SEQ ID NO: 9509 - protein, 214 aa, Artificial Sequence
  source: /note="Description of Artificial Sequence: Synthetic polypeptide"
  MOD_RES (3)..(3): Any amino acid
  MOD_RES (9)..(10): Any amino acid
DIXLTQSPXXLSVSPGERVSFSCRASQSIGTNIHWYQQRTNGSPRLLIKYASESISGIPSRFSGSGSGTDFTLSINSVESEDIADYYCQQNNNWPTTFGAGTKLELKRTVAAPSVFIFPPSDEQLKSGTASVVCLLNNFYPREAKVQWKVDNALQSGNSQESVTEQDSKDSTYSLSSTLTLSKADYEKHKVYACEVTHQGLSSPVTKSFNRGEC

SEQ ID NO: 9510 - protein, 214 aa, Artificial Sequence
  source: /note="Description of Artificial Sequence: Synthetic polypeptide"
  MOD_RES (3)..(3): Any amino acid
  MOD_RES (9)..(9): Any amino acid
  MOD_RES (154)..(154): Any amino acid
DIXLTQSPXILSVSPGERVSFSCRASQSIGTNIHWYQQRTNGSPRLLIKYASESISGIPSRFSGSGSGTDFTLSINSVESEDIADYYCQQNNNWPTTFGAGTKLELKRTVAAPSVFIFPPSDEQLKSGTASVVCLLNNFYPREAKVQWKVDNAXQSGNSQESVTEQDSKDSTYSLSSTLTLSKADYEKHKVYACEVTHQGLSSPVTKSFNRGEC

SEQ ID NO: 9511 - protein, 213 aa, Artificial Sequence
  source: /note="Description of Artificial Sequence: Synthetic polypeptide"
QIVLSQSPASLSASPGEKVTMTCRASSSVSYIHWFQQKPGSSPKPWIYATSNLASGVPVRFSGSGSGTSYSLTISRVEAEDAATYYCQQWTSNPPTFGGGTKLEIKRTVAAPSVFIFPPSDEQLKSGTASVVCLLNNFYPREAKVQWKVDNALQSGNSQESVTEQDSKDSTYSLSSTLTLSKADYEKHKVYACEVTHQGLSSPVTKSFNRGEC

SEQ ID NO: 9512 - protein, 214 aa, Artificial Sequence
  source: /note="Description of Artificial Sequence: Synthetic polypeptide"
  MOD_RES (3)..(3): Any amino acid
  MOD_RES (9)..(10): Any amino acid
  MOD_RES (154)..(154): Any amino acid
DIXLTQSPXXLSVSPGERVSFSCRASQSIGTNIHWYQQRTNGSPRLLIKYASESISGIPSRFSGSGSGTDFTLSINSVESEDIADYYCQQNNNWPTTFGAGTKLELKRTVAAPSVFIFPPSDEQLKSGTASVVCLLNNFYPREAKVQWKVDNAXQSGNSQESVTEQDSKDSTYSLSSTLTLSKADYEKHKVYACEVTHQGLSSPVTKSFNRGEC

SEQ ID NO: 9513 - protein, 213 aa, Artificial Sequence
  source: /note="Description of Artificial Sequence: Synthetic polypeptide"
QIVLSQSPAILSASPGEKVTMTCRASSSVSYIHWFQQKPGSSPKPWIYATSNLASGVPSRFSGSGSGTSYSLTISRVEAEDAATYYCQQWTSNPPTFGGGTKLEIKRTVAAPSVFIFPPSDEQLKSGTASVVCLLNNFYPREAKVQWKVDNALQSGNSQESVTEQDSKDSTYSLSSTLTLSKADYEKHKVYACEVTHQGLSSPVTKSFNRGEC

SEQ ID NO: 9514 - protein, 213 aa, Artificial Sequence
  source: /note="Description of Artificial Sequence: Synthetic polypeptide"
QIVLSQSPAILSASPGEKVTMTCRASSSVSYIHWFQQKPGSSPKPWIYATSNLASGVPVRFSGSGSGTSYSLTISRVEAEDAATYYCQQWTSNPPTFGGGTKLEIKRTVAAPSVFIFPPSDEQLKSGTASVVCLLNNFYPREAKVQWKVDNADQSGNSQESVTEQDSKDSTYSLSSTLTLSKADYEKHKVYACEVTHQGLSSPVTKSFNRGEC

SEQ ID NO: 9515 - protein, 214 aa, Artificial Sequence
  source: /note="Description of Artificial Sequence: Synthetic polypeptide"
DIQMTQSPSSLSASIGDRVTITCKASQDINSYLSWFQQKPGKAPKLLIYRANRLVDGVPSRFSGSGSGTDYTLTISSLQPEDFAVYYCLQYDEFPYTFGGGTKLEIKRTVAAPSVFIFPPSDEQLKSGTASVVCLLNNFYPREAKVQWKVDNALQSGNSQESVTEQDSKDSTYSLSSTLTLSKADYEKHKVYACEVTHQGLSSPVTKSFNRGEC

SEQ ID NO: 9516 - protein, 239 aa, Artificial Sequence
  source: /note="Description of Artificial Sequence: Synthetic polypeptide"
MKLPVRLLVLLLFWIPASRGDVQVTQSPSSLSASVGDRVTITCRSSQSLANSYGNTFLSWYLHKPGKAPQLLIYGISNRFSGVPDRFSGSGSGTDFTLTISSLQPEDFATYYCLQGTHQPYTFGQGTKVEIKRTVAAPSVFIFPPSDEQLKSGTASVVCLLNNFYPREAKVQWKVDNALQSGNSQESVTEQDSKDSTYSLSSTLTLSKADYEKHKVYACEVTHQGLSSPVTKSFNRGEC

SEQ ID NO: 9517 - protein, 219 aa, Artificial Sequence
  source: /note="Description of Artificial Sequence: Synthetic polypeptide"
DIQMTQSPSSLSASVGDRVTITCRSSQSIVHSVGNTFLEWYQQKPGKAPKLLIYKVSNRFSGVPSRFSGSGSGTDFTLTISSLQPEDFATYYCFQGSQFPYTFGQGTKVEIKRTVAAPSVFIFPPSDEQLKSGTASVVCLLNNFYPREAKVQWKVDNALQSGNSQESVTEQDSKDSTYSLSSTLTLSKADYEKHKVYACEVTHQGLSSPVTKSFNRGEC

SEQ ID NO: 9518 - protein, 113 aa, Artificial Sequence
  source: /note="Description of Artificial Sequence: Synthetic polypeptide"
DVQVTQSPSSLSASVGDRVTITCRSSQSLANSYGNTFLSWYLHKPGKAPQLLIYGISNRFSGVPDRFSGSGSGTDFTLTISSLQPEDFATYYCLQGTHQPYTFGQGTKVEIKR

SEQ ID NO: 9519 - protein, 113 aa, Artificial Sequence
  source: /note="Description of Artificial Sequence: Synthetic polypeptide"
DVVVTQSPSSLSASVGDRVTITCRSSQSLANSYGNTFLSWYLHKPGKAPQLLIYGISNRFSGVPDRFSGSGSGTDFTLTISSLQPEDFATYYCLQGTHQPYTFGQGTKVEIKR

SEQ ID NO: 9520 - protein, 239 aa, Artificial Sequence; identical to SEQ ID NO: 9516
  source: /note="Description of Artificial Sequence: Synthetic polypeptide"

SEQ ID NO: 9521 - protein, 108 aa, Artificial Sequence
  source: /note="Description of Artificial Sequence: Synthetic polypeptide"
MDIQMTQTTSSLSASLGDRVTISCRASQDISNYLNWYQQKPDGTVKLLIYYTSILHSGVPSRFSGSGSGTDYSLTISNLEQEDFATYFCQQGNTLPWTFGCGTKLEIK

SEQ ID NO: 9522 - protein, 215 aa, Artificial Sequence
  source: /note="Description of Artificial Sequence: Synthetic polypeptide"
EIVLTQSPATLSLSPGERATLSCRASQSVSSYLAWYQQKPGQAPRLLIYDASKRATGIPARFSGSGSGTDFTLTISSLEPEDFAVYYCQQRSKWPPWTFGQGTKVESKRTVAAPSVFIFPPSDEQLKSGTASVVCLLNNFYPREAKVQWKVDNALQSGNSQESVTEQDSKDSTYSLSSTLTLSKADYEKHKVYACEVTHQGLSSPVTKSFNRGEC

SEQ ID NO: 9523 - protein, 215 aa, Artificial Sequence
  source: /note="Description of Artificial Sequence: Synthetic polypeptide"
DIQMTQSPSSLSASVGDRVTITCRASQNVGTAVAWLQQTPGKAPKLLIYSASNRYTGVPSRFSGSGSGTDYTFTISSLQPEDIATYYCQQYTNYPMYTFGQGTKVQIKRTVAAPSVFIFPPSDEQLKSGTASVVCLLNNFYPREAKVQWKVDNALQSGNSQESVTEQDSKDSTYSLSSTLTLSKADYEKHKVYACEVTHQGLSSPVTKSFNRGEC

SEQ ID NO: 9524 - protein, 214 aa, Artificial Sequence
  source: /note="Description of Artificial Sequence: Synthetic polypeptide"
DIQMTQSPSSLSASVGDRVTITCRASQGISRWLAWYQQKPEKAPKSLIYAASSLQSGVPSRFSGSGSGTDFTLTISSLQPEDFATYYCQQYNTYPRTFGQGTKVEIKRTVAAPSVFIFPPSDEQLKSGTASVVCLLNNFYPREAKVQWKVDNALQSGNSQESVTEQDSKDSTYSLSSTLTLSKADYEKHKVYACEVTHQGLSSPVTKSFNRGEC

SEQ ID NO: 9525 - protein, 216 aa, Artificial Sequence
  source: /note="Description of Artificial Sequence: Synthetic polypeptide"
QSALTQPASVSGSPGQSITISCTGTSSDVGGYNYVSWYQQHPGKAPKLMIYDVSNRPSGVSNRFSGSKSGNTASLTISGLQAEDEADYYCSSYTSSSTRVFGTGTKVTVLGQPKANPTVTLFPPSSEELQANKATLVCLISDFYPGAVTVAWKADGSPVKAGVETTKPSKQSNNKYAASSYLSLTPEQWKSHRSYSCQVTHEGSTVEKTVAPTECS

SEQ ID NO: 9526 - protein, 214 aa, Artificial Sequence
  source: /note="Description of Artificial Sequence: Synthetic polypeptide"
DIQMTQSPSSLSASVGDRVTITCHASQNIYVWLNWYQQKPGKAPKLLIYKASNLHTGVPSRFSGSGSGTDFTLTISSLQPEDFATYYCQQGQTYPYTFGGGTKVEIKRTVAAPSVFIFPPSDEQLKSGTASVVCLLNNFYPREAKVQWKVDNALQSGNSQESVTEQDSKDSTYSLSSTLTLSKADYEKHKVYACEVTHQGLSSPVTKSFNRGEC

SEQ ID NO: 9527 - protein, 447 aa, Artificial Sequence
  source: /note="Description of Artificial Sequence: Synthetic polypeptide"
QVQLVQSGAEVKKPGASVKVSCKVSGYTFTDYYITWVRQAPGQALEWMGWIYPGSGNTKYSQKFQGRFVFSVDTSASTAYLQISSLKAEDTAVYYCANYGNYWFAYWGQGTLVTVSSASTKGPSVFPLAPSSKSTSGGTAALGCLVKDYFPEPVTVSWNSGALTSGVHTFPAVLQSSGLYSLSSVVTVPSSSLGTQTYICNVNHKPSNTKVDKKVEPKSCDKTHTCPPCPAPELLGGPDVFLFPPKPKDTLMISRTPEVTCVVVDVSHEDPEVQFNWYVDGVEVHNAKTKPREEQFNSTFRVVSVLTVVHQDWLNGKEYKCKVSNKALPAPEEKTISKTKGQPREPQVYTLPPSREEMTKNQVSLTCLVKGFYPSDIAVEWESNGQPENNYKTTPPMLDSDGSFFLYSKLTVDKSRWQQGNVFSCSVMHEALHNHYTQKSLSLSPGK

SEQ ID NO: 9528 - protein, 214 aa, Artificial Sequence
  source: /note="Description of Artificial Sequence: Synthetic polypeptide"
DIQMTQSPASLSASVGETVTITCRTSENVYSYLAWYQQKQGKSPQLLVSFAKTLAEGVPSRFSGSGSGTQFSLKISSLQPEDSGSYFCQHHSDNPWTFGGGTELEIKRTVAAPSVFIFPPSDEQLKSGTASVVCLLNNFYPREAKVQWKVDNALQSGNSQESVTEQDSKDSTYSLSSTLTLSKADYEKHKVYACEVTHQGLSSPVTKSFNRGEC

SEQ ID NO: 9529 - protein, 214 aa, Artificial Sequence
  source: /note="Description of Artificial Sequence: Synthetic polypeptide"
DIQMTQSPSSLSASVGDRVTITCRTSENVYSYLAWYQQKPGKAPKLLVSFAKTLAEGVPSRFSGSGSGTDFTLTISSLQPEDFATYFCQHHSDNPWTFGQGTKVEIKRTVAAPSVFIFPPSDEQLKSGTASVVCLLNNFYPREAKVQWKVDNALQSGNSQESVTEQDSKDSTYSLSSTLTLSKADYEKHKVYACEVTHQGLSSPVTKSFNRGEC

SEQ ID NO: 9530 - protein, 214 aa, Artificial Sequence; identical to SEQ ID NO: 9529
  source: /note="Description of Artificial Sequence: Synthetic polypeptide"

SEQ ID NO: 9531 - protein, 214 aa, Artificial Sequence; identical to SEQ ID NO: 9528
  source: /note="Description of Artificial Sequence: Synthetic polypeptide"

SEQ ID NO: 9532 - protein, 214 aa, Artificial Sequence
  source: /note="Description of Artificial Sequence: Synthetic polypeptide"
DIVMTQSHKLLSTSVGDRVSITCKASQDVSTAVDWYQQKPGQSPKLLINWASTRHTGVPDRFTGSGSGTDYTLTISSMQAEDLALYYCRQHYSTPFTFGSGTKLEIKRADAAPTVSIFPPSSEQLTSGGASVVCFLNNFYPKDINVKWKIDGSERQNGVLNSWTDQDSKDSTYSMSSTLTLTKDEYERHNSYTCEATHKTSTSPIVKSFNRNEC

SEQ ID NO: 9533 - protein, 214 aa, Artificial Sequence
  source: /note="Description of Artificial Sequence: Synthetic polypeptide"
DIQMTQSPSSLSVSVGERVTITCRASENIRSNLAWYQQKPGKSPKLLVNVATNLADGVPSRFSGSGSGTDYSLKINSLQPEDFGTYYCQHYWGTTWTFGQGTKLEIKRTVAAPSVFIFPPSDEQLKSGTASVVCLLNNFYPREAKVQWKVDNALQSGNSQESVTEQDSKDSTYSLSSTLTLSKADYEKHKVYACEVTHQGLSSPVTKSFNRGEC

SEQ ID NO: 9534 - protein, 214 aa, Artificial Sequence
  source: /note="Description of Artificial Sequence: Synthetic polypeptide"
EIVLTQSPATLSLSPGERATLSCRASQSVSSYLAWYQQKPGQAPRLLIYDASNRATGIPARFSGSGSGTDFTLTISSLEPEDFAVYYCQQRSNWPPTFGQGTKVEIKRTVAAPSVFIFPPSDEQLKSGTASVVCLLNNFYPREAKVQWKVDNALQSGNSQESVTEQDSKDSTYSLSSTLTLSKADYEKHKVYACEVTHQGLSSPVTKSFNRGEC

SEQ ID NO: 9535 - protein, 214 aa, Artificial Sequence
  source: /note="Description of Artificial Sequence: Synthetic polypeptide"
DIVMTQSHLSMSTSLGDPVSITCKASQDVSTVVAWYQQKPGQSPRRLIYSASYRYIGVPDRFTGSGAGTDFTFTISSVQAEDLAVYYCQQHYSPPYTFGGGTKLEIKRTVAAPSVFIFPPSDEQLKSGTASVVCLLNNFYPREAKVQWKVDNALQSGNSQESVTEQDSKDSTYSLSSTLTLSKADYEKHKVYACEVTHQGLSSPVTKSFNRGEC

SEQ ID NO: 9536 - protein, 214 aa, Artificial Sequence; identical to SEQ ID NO: 9534
  source: /note="Description of Artificial Sequence: Synthetic polypeptide"

SEQ ID NO: 9537 - protein, 219 aa, Artificial Sequence
  source: /note="Description of Artificial Sequence: Synthetic polypeptide"
DIVMTQSPLSLTVTPGEPASISCRSSQSLLYSNGYNYLDWYLQKPGQSPQVLISLGSNRASGVPDRFSGSGSGTDFTLKISRVEAEDVGVYYCMQARQTPFTFGPGTKVDIRRTVAAPSVFIFPPSDEQLKSGTASVVCLLNNFYPREAKVQWKVDNALQSGNSQESVTEQDSKDSTYSLSSTLTLSKADYEKHKVYACEVTHQGLSSPVTKSFNRGEC

SEQ ID NO: 9538 - protein, 238 aa, Artificial Sequence
  source: /note="Description of Artificial Sequence: Synthetic polypeptide"
MGWSCIILFLVATATGVHSDIQMTQSPSSLSASVGDRVTITCRSSQSLVHSNGNTFLHWYQQKPGKAPKLLIYTVSNRFSGVPSRFSGSGSGTDFTLTISSLQPEDFATYFCSQTTHVPWTFGQGTKVEIKRTVAAPSVFIFPPSDEQLKSGTASVVCLLNNFYPREAKVQWKVDNALQSGNSQESVTEQDSKDSTYSLSSTLTLSKADYEKHKVYACEVTHQGLSSPVTKSFNRGEC

SEQ ID NO: 9539 - protein, 239 aa, Artificial Sequence; identical to SEQ ID NO: 9474
  source: /note="Description of Artificial Sequence: Synthetic polypeptide"

SEQ ID NO: 9540 - protein, 239 aa, Artificial Sequence; identical to SEQ ID NO: 9474
  source: /note="Description of Artificial Sequence: Synthetic polypeptide"

SEQ ID NO: 9541 - protein, 219 aa, Artificial Sequence
  source: /note="Description of Artificial Sequence: Synthetic polypeptide"
DIQMTQSPSSLSASVGDRVTITCRSSQSLVHSNGNTFLHWYQQKPGKAPKLLIYTVSNRFSGVPSRFSGSGSGTDFTLTISSLQPEDFATYFCSQTTHVPWTFGQGTKVEIKRTVAAPSVFIFPPSDEQLKSGTASVVCLLNNFYPREAKVQWKVDNALQSGNSQESVTEQDSKDSTYSLSSTLTLSKADYEKHKVYACEVTHQGLSSPVTKSFNRGEC

SEQ ID NO: 9542 - protein, 444 aa, Artificial Sequence
  source: /note="Description of Artificial Sequence: Synthetic polypeptide"
EVQLVESGGGLVKPGGSLRLSCAASGFTFSSYDMSWVRQAPGKGLEWVSTISSGGSYTYYLDSIKGRFTISRDNAKNSLYLQMNSLRAEDTAVYYCARQGLDYWGRGTLVTVSSASTKGPSVFPLAPSSKSTSGGTAALGCLVKDYFPEPVTVSWNSGALTSGVHTFPAVLQSSGLYSLSSVVTVPSSSLGTQTYICNVNHKPSNTKVDKKVEPKSCDKTHTCPPCPAPELLGGPSVFLFPPKPKDTLMISRTPEVTCVVVDVSHEDPEVKFNWYVDGVEVHNAKTKPREEQYNSTYRVVSVLTVLHQDWLNGKEYKCKVSNKALPAPIEKTISKAKGQPREPQVYTLPPSRDELTKNQVSLTCLVKGFYPSDIAVEWESNGQPENNYKTTPPVLDSDGSFFLYSKLTVDKSRWQQGNVFSCSVMHEALHNHYTQKSLSLSPGK

SEQ ID NO: 9543 - protein, 470 aa, Artificial Sequence
  source: /note="Description of Artificial Sequence: Synthetic polypeptide"
MGWSCIILFLVATATGVHSQVQLQESGPGLVRPSQTLSLTCTVSGFTFTDFYMNWVRQPPGRGLEWIGFIRDKAKGYTTEYNPSVKGRVTMLVDTSKNQFSLRLSSVTAADTAVYYCAREGHTAAPFDYWGQGSLVTVSSASTKGPSVFPLAPSSKSTSGGTAALGCLVKDYFPEPVTVSWNSGALTSGVHTFPAVLQSSGLYSLSSVVTVPSSSLGTQTYICNVNHKPSNTKVDKKVEPKSCDKTHTCPPCPAPELLGGPSVFLFPPKPKDTLMISRTPEVTCVVVDVSHEDPEVKFNWYVDGVEVHNAKTKPREEQYNSTYRVVSVLTVLHQDWLNGKEYKCKVSNKALPAPIEKTISKAKGQPREPQVYTLPPSRDELTKNQVSLTCLVKGFYPSDIAVEWESNGQPENNYKTTPPVLDSDGSFFLYSKLTVDKSRWQQGNVFSCSVMHEALHNHYTQKSLSLSPGK

SEQ ID NO: 9544 - protein, 238 aa, Artificial Sequence
  source: /note="Description of Artificial Sequence: Synthetic polypeptide"
MEAPAQLLFLLLLWLPDTTGDIVMTQTPLSLSVTPGQPASISCKSSQSLLYSNGKTYLNWLLQKPGQSPQRLIYLVSKLDSGVPDRFSGSGSGTDFTLKISRVEAEDVGVYYCVQGTHLHTFGQGTRLEIKRTVAAPSVFIFPPSDEQLKSGTASVVCLLNNFYPREAKVQWKVDNALQSGNSQESVTEQDSKDSTYSLSSTLTLSKADYEKHKVYACEVTHQGLSSPVTKSFNRGEC

SEQ ID NO: 9545 - protein, 239 aa, Artificial Sequence
  source: /note="Description of Artificial Sequence: Synthetic polypeptide"
MEAPAQLLFLLLLWLPDTTGDIVMTQTPLSLSVTPGQPASISCRSSQSLVHTNGNSYLHWYLQKPGQSPQLLIYMVSNRFSGVPDRFSGSGSGTDFTLKISRVEAEDVGVYYCSQSTHVPFTFGQGTKLEIKRTVAAPSVFIFPPSDEQLKSGTASVVCLLNNFYPREAKVQWKVDNALQSGNSQESVTEQDSKDSTYSLSSTLTLSKADYEKHKVYACEVTHQGLSSPVTKSFNRGEC

SEQ ID NO: 9546 - protein, 239 aa, Artificial Sequence
  source: /note="Description of Artificial Sequence: Synthetic polypeptide"
MEAPAQLLFLLLLWLPDTTGDIVMTQTPLSLSVTPGQPASISCKSSQSLLDSDGKTYLNWLLQKPGQSPQRLIYLVSALDSGVPDRFSGSGSGTDFTLKISRVEAEDVGVYYCWQGTHFPWTFGQGTKLEIKRTVAAPSVFIFPPSDEQLKSGTASVVCLLNNFYPREAKVQWKVDNALQSGNSQESVTEQDSKDSTYSLSSTLTLSKADYEKHKVYACEVTHQGLSSPVTKSFNRGEC

SEQ ID NO: 9547 - protein, 238 aa, Artificial Sequence
  source: /note="Description of Artificial Sequence: Synthetic polypeptide"
MEAPAQLLFLLLLWLPDTTGDIVMTQTPLSLSVTPGQPASISCKSSQSLLYSNGKTYLNWVLQKPGQSPQRLIYLVSKLDSGVPDRFSGSGSGTDFTLKISRVEAEDVGVYYCVQGSHFHTFGQGTKLEIKRTVAAPSVFIFPPSDEQLKSGTASVVCLLNNFYPREAKVQWKVDNALQSGNSQESVTEQDSKDSTYSLSSTLTLSKADYEKHKVYACEVTHQGLSSPVTKSFNRGEC

SEQ ID NO: 9548 - protein, 240 aa, Artificial Sequence
  source: /note="Description of Artificial Sequence: Synthetic polypeptide"
MEAPAQLLFLLLLWLPDTTGDIVMTQTPLSLSVTPGQPASISCRSSQSLVHTNGNTYLHWYLQKPGQSPQLLIYMVSNRFSGVPDRFSGSGSGTDFTLKISRVEAEDVGVYYCSQSAHVPPLTFGQGTRLEIKRTVAAPSVFIFPPSDEQLKSGTASVVCLLNNFYPREAKVQWKVDNALQSGNSQESVTEQDSKDSTYSLSSTLTLSKADYEKHKVYACEVTHQGLSSPVTKSFNRGEC

SEQ ID NO: 9549 - protein, 214 aa, Artificial Sequence
  source: /note="Description of Artificial Sequence: Synthetic polypeptide"
DIQMTQSPSSLSASVGDRVTITCRASQDISNYLAWYQQKPGKAPKLLIYYTSKIHSGVPSRFSGSGSGTDYTFTISSLQPEDIATYYCQQGNTFPYTFGQGTKVEIKRTVAAPSVFIFPPSDEQLKSGTASVVCLLNNFYPREAKVQWKVDNALQSGNSQESVTEQDSKDSTYSLSSTLTLSKADYEKHKVYACEVTHQGLSSPVTKSFNRGEC

SEQ ID NO: 9550 - protein, 218 aa, Artificial Sequence
  source: /note="Description of Artificial Sequence: Synthetic polypeptide"
DIVMTQSPDSLAVSLGERATINCRASKSVSTSGYSFMHWYQQKPGQPPKLLIYLASNLESGVPDRFSGSGSGTDFTLTISSLQAEDVAVYYCQHSREVPWTFGQGTKVEIKRTVAAPSVFIFPPSDEQLKSGTASVVCLLNNFYPREAKVQWKVDNALQSGNSQESVTEQDSKDSTYSLSSTLTLSKADYEKHKVYACEVTHQGLSSPVTKSFNRGEC

SEQ ID NO: 9551 - protein, 219 aa, Artificial Sequence
  source: /note="Description of Artificial Sequence: Synthetic polypeptide"
DIQLTQSPLSLPVTLGQPASISCRSSQSLVHRNGNTYLHWFQQRPGQSPRLLIYTVSNRFSGVPDRFSGSGSGTDFTLKISRVEAEDVGVYFCSQSSHVPPTFGAGTRLEIKRTVAAPSVFIFPPSDEQLKSGTASVVCLLNNFYPREAKVQWKVDNALQSGNSQESVTEQDSKDSTYSLSSTLTLSKADYEKHKVYACEVTHQGLSSPVTKSFNRGEC

SEQ ID NO: 9552 - protein, 218 aa, Artificial Sequence
  source: /note="Description of Artificial Sequence: Synthetic polypeptide"
DIQLTQSPSSLSASVGDRVTITCKASQSVDYEGDSFLNWYQQKPGKAPKLLIYAASNLESGVPSRFSGSGSGTDFTLTISSLQPEDFATYYCQQSNEDPLTFGQGTKVEIKRTVAAPSVFIFPPSDEQLKSGTASVVCLLNNFYPREAKVQWKVDNALQSGNSQESVTEQDSKDSTYSLSSTLTLSKADYEKHKVYACEVTHQGLSSPVTKSFNRGEC

SEQ ID NO: 9553 - protein, 107 aa, Artificial Sequence
  source: /note="Description of Artificial Sequence: Synthetic polypeptide"
AIQLTQSPSSLSASVGDRVTITCRASQGISSALAWYQQKPGKAPKLLIYGASSLEGGVPSRFSGSGSGTDFTLTISSLQPEDFATYYCQQFNSYPFTFGPGTKVDIK

SEQ ID NO: 9554 - protein, 109 aa, Artificial Sequence
  source: /note="Description of Artificial Sequence: Synthetic polypeptide"
EIVLTQSPGTLSLSPGERATLSCRASQSVSSSYLAWYQQKPGQAPRLLIYGASSRATGIPDRFSGSGSGTDFTLTISRLEPEDFAVYYCQQYGSSPPYTFGQGTKLEIK

SEQ ID NO: 9555 - protein, 213 aa, Artificial Sequence
  source: /note="Description of Artificial Sequence: Synthetic polypeptide"
DIQLTQSPSSLSASVGDRVTITCKASQDVGTSVAWYQQKPGKAPKLLIYWTSTRHTGVPSRFSGSGSGTDFTFTISSLQPEDIATYYCQQYSLYRSFGQGTKVEIKRTVAAPSVFIFPPSDEQLKSGTASVVCLLNNFYPREAKVQWKVDNALQSGNSQESVTEQDSKDSTYSLSSTLTLSKADYEKHKVYACEVTHQGLSSPVTKSFNRGEC

SEQ ID NO: 9556 - protein, 213 aa, Artificial Sequence
  source: /note="Description of Artificial Sequence: Synthetic polypeptide"
DIQMTQSPSSLSASVGDRVTITCRASEDVNTYVSWYQQKPGKAPKLLIYAASNRYTGVPSRFSGSGSGTDFTLTISSLQPEDFATYYCQQSFSYPTFGQGTKLEIKRTVAAPSVFIFPPSDEQLKSGTASVVCLLNNFYPREAKVQWKVDNALQSGNSQESVTEQDSKDSTYSLSSTLTLSKADYEKHKVYACEVTHQGLSSPVTKSFNRGEC

SEQ ID NO: 9557 - protein, 214 aa, Artificial Sequence
  source: /note="Description of Artificial Sequence: Synthetic polypeptide"
DIQMTQSPSSLSASVGDRVTITCRASQSINSYLDWYQQKPGKAPKLLIYAASSLQSGVPSRFSGSGSGTDFTLTISSLQPEDFATYYCQQYYSTPFTFGPGTKVEIKRTVAAPSVFIFPPSDEQLKSGTASVVCLLNNFYPREAKVQWKVDNALQSGNSQESVTEQDSKDSTYSLSSTLTLSKADYEKHKVYACEVTHQGLSSPVTKSFNRGEC

SEQ ID NO: 9558 - protein, 214 aa, Artificial Sequence
  source: /note="Description of Artificial Sequence: Synthetic polypeptide"
DIQMTQSPSSLSASVGDRVTITCRASQGISSWLAWYQQKPEKAPKSLIYAASSLQSGVPSRFSGSGSGTDFTLTISSLQPEDFVTYYCQQYNSYPRTFGQGTKVEIKRTVAAPSVFIFPPSDEQLKSGTASVVCLLNNFYPREAKVQWKVDNALQSGNSQESVTEQDSKDSTYSLSSTLTLSKADYEKHKVYACEVTHQGLSSPVTKSFNRGEC

SEQ ID NO: 9559 - protein, 214 aa, Artificial Sequence
  source: /note="Description of Artificial Sequence: Synthetic polypeptide"
EIVMTQSPATLSVSPGERATLSCKASQSVSNDVVWYQQKPGQAPRLLIYYASNRYTGIPARFSGSGSGTEFTLTISSLQSEDFAVYYCQQDYTSPWTFGQGTKLEIKRTVAAPSVFIFPPSDEQLKSGTASVVCLLNNFYPREAKVQWKVDNALQSGNSQESVTEQDSKDSTYSLSSTLTLSKADYEKHKVYACEVTHQGLSSPVTKSFNRGEC

SEQ ID NO: 9560 - protein, 218 aa, Artificial Sequence
  source: /note="Description of Artificial Sequence: Synthetic polypeptide"
DIVMTQSPDSLAVSLGERATISCRASESVDNYGISFMKWFQQKPGQPPKLLIYAASNQGSGVPDRFSGSGSGTDFTLTISSLQAEDVAVYYCQQSKEVPWTFGGGTKVEIKRTVAAPSVFIFPPSDEQLKSGTASVVCLLNNFYPREAKVQWKVDNALQSGNSQESVTEQDSKDSTYSLSSTLTLSKADYEKHKVYACEVTHQGLSSPVTKSFNRGEC

SEQ ID NO: 9561 - protein, 214 aa, Artificial Sequence
  source: /note="Description of Artificial Sequence: Synthetic polypeptide"
EIVLTQSPATLSLSPGERATLSCRASQSVSSYLAWYQQKPGQAPRLLIYDASNRATGIPARFSGSGSGTDFTLTISSLEPEDFAVYYCQHRSNWPPTFGGGTKVEIKRTVAAPSVFIFPPSDEQLKSGTASVVCLLNNFYPREAKVQWKVDNALQSGNSQESVTEQDSKDSTYSLSSTLTLSKADYEKHKVYACEVTHQGLSSPVTKSFNRGEC

SEQ ID NO: 9562 - protein, 215 aa, Artificial Sequence
  source: /note="Description of Artificial Sequence: Synthetic polypeptide"
ENVLTQSPAIMSASPGEKVTMTCRASSSVSSSYLHWYQQKSGASPKLWIYSTSNLASGVPARFSGSGSGTSYSLTISSVEAEDAATYYCQQYSGYPLTFGGGTKLEIKRTVAAPSVFIFPPSDEQLKSGTASVVCLLNNFYPREAKVQWKVDNALQSGNSQESVTEQDSKDSTYSLSSTLTLSKADYEKHKVYACEVTHQGLSSPVTKSFNRGEC

SEQ ID NO: 9563 - protein, 219 aa, Artificial Sequence
  source: /note="Description of Artificial Sequence: Synthetic polypeptide"
DIQMTQSPSSLSASVGDRVTITCRTSQSLVHINAITYLHWYQQKPGKAPKLLIYRVSNRFSGVPSRFSGSGSGTDFTLTISSLQPEDFATYYCGQSTHVPLTFGQGTKVEIKRTVAAPSVFIFPPSDEQLKSGTASVVCLLNNFYPREAKVQWKVDNALQSGNSQESVTEQDSKDSTYSLSSTLTLSKADYEKHKVYACEVTHQGLSSPVTKSFNRGEC

SEQ ID NO: 9564 - protein, 213 aa, Artificial Sequence
  source: /note="Description of Artificial Sequence: Synthetic polypeptide"
DIQMTQSPSSLSASVGDRVTITCRASQGINNYLNWYQQKPGKAPKRLIYNTNNLQTGVPSRFSGSGSGTEFTLTISSLQPEDFATYYCLQHNSFPTFGQGTKLEIKRTVAAPSVFIFPPSDEQLKSGTASVVCLLNNFYPREAKVQWKVDNALQSGNSQESVTEQDSKDSTYSLSSTLTLSKADYEKHKVYACEVTHQGLSSPVTKSFNRGEC

SEQ ID NO: 9565 - protein, 214 aa, Artificial Sequence
  source: /note="Description of Artificial Sequence: Synthetic polypeptide"
EIVMTQSPATLSLSPGERATLSCRASQSVSSYLAWYQQKPGQAPRLLIYDASNRATGIPARFSGSGSGTDFTLTISSLEPEDFAVYYCHQYGSTPLTFGGGTKAEIKRTVAAPSVFIFPPSDEQLKSGTASVVCLLNNFYPREAKVQWKVDNALQSGNSQESVTEQDSKDSTYSLSSTLTLSKADYEKHKVYACEVTHQGLSSPVTKSFNRGEC

SEQ ID NO: 9566 - protein, 214 aa, Artificial Sequence
  source: /note="Description of Artificial Sequence: Synthetic polypeptide"
DIQMTQTTSSLSASLGDRVTISCRTSQDIGNYLNWYQQKPDGTVKLLIYYTSRLHSGVPSRFSGSGSGTDFSLTINNVEQEDVATYFCQHYNTVPPTFGGGTKLEIKRTVAAPSVFIFPPSDEQLKSGTASVVCLLNNFYPREAKVQWKVDNALQSGNSQESVTEQDSKDSTYSLSSTLTLSKADYEKHKVYACEVTHQGLSSPVTKSFNRGEC

SEQ ID NO: 9567 - protein, 219 aa, Artificial Sequence
  source: /note="Description of Artificial Sequence: Synthetic polypeptide"
DIVMTQAAFSNPVTLGTSASISCRSSKSLLHSNGITYLYWYLQKPGQSPQLLIYQMSNLASGVPDRFSSSGSGTDFTLRISRVEAEDVGVYYCAQNLELPYTFGGGTKLEIKRTVAAPSVFIFPPSDEQLKSGTASVVCLLNNFYPREAKVQWKVDNALQSGNSQESVTEQDSKDSTYSLSSTLTLSKADYEKHKVYACEVTHQGLSSPVTKSFNRGEC

SEQ ID NO: 9568 - protein, 481 aa, Artificial Sequence
  source: /note="Description of Artificial Sequence: Synthetic polypeptide"
DIQMTQSPSSLSASVGDRVTITCRSTKSLLHSNGITYLYWYQQKPGKAPKLLIYQMSNLASGVPSRFSSSGSGTDFTLTISSLQPEDFATYYCAQNLEIPRTFGQGTKVELKRTVAAPSVFIFPPSDEQLKSGTASVVCLLNNFYPREAKVQWKVDNALQSGNSQESVTEQDSKDSTYSLSSTLTLSKADYEKHKVYACEVTHQGLSSPVTKSFNRGECTRHRQPRGWEQLYNTVSFNLGEAYEYPTFIQDLRNELAKGTPVCQLPVTLQTIADDKRFVLVDITTTSKKTVKVAIDVTDVYVVGYQDKWDGKDRAVFLDKVPTVATSKLFPGVTNRVTLTFDGSYQKLVNAAKADRKALELGVNKLEFSIEAIHGKTINGQEAAKFFLIVIQMVSEAARFKYIETEVVDRGLYGSFKPNFKVLNLENNWGDISDAIHKSSPQCTTINPALQLISPSNDPWVVNKVSQISPDMGILKFKSSK

SEQ ID NO: 9569 - protein, 214 aa, Artificial Sequence
  source: /note="Description of Artificial Sequence: Synthetic polypeptide"
ELQMTQSPSSLSASVGDRVTITCRTSQSISSYLNWYQQKPGQPPKLLIYWASTRESGVPDRFSGSGSGTDFTLTISSLQPEDSATYYCQQSYDIPYTFGQGTKLEIKRTVAAPSVFIFPPSDEQLKSGTASVVCLLNNFYPREAKVQWKVDNALQSGNSQESVTEQDSKDSTYSLSSTLTLSKADYEKHKVYACEVTHQGLSSPVTKSFNRGEC

SEQ ID NO: 9570 - protein, 214 aa, Artificial Sequence
  source: /note="Description of Artificial Sequence: Synthetic polypeptide"
DIQMTQSPSFLSASVGDRVTITCRASQGIISYLAWYQQKPEKAPKRLIYAASSLQSGVPSRFSGSGSGTEFTLTISSLQPEDFATYYCGQYANYPYTFGQGTKLEIKRTVAAPSVFIFPPSDEQLKSGTASVVCLLNNFYPREAKVQWKVDNALQSGNSQESVTEQDSKDSTYSLSSTLTLSKADYEKHKVYACEVTHQGLSSPVTKSFNRGEC

SEQ ID NO: 9571 - protein, 214 aa, Artificial Sequence
  source: /note="Description of Artificial Sequence: Synthetic polypeptide"
DIVMTQSHKFMSTSVGDRVSITCKASQDVNTAVAWYQQKPGHSPKLLIYSASFRYTGVPDRFTGSRSGTDFTFTISSVQAEDLAVYYCQQHYTTPPTFGGGTKVEIKRTVAAPSVFIFPPSDEQLKSGTASVVCLLNNFYPREAKVQWKVDNALQSGNSQESVTEQDSKDSTYSLSSTLTLSKADYEKHKVYACEVTHQGLSSPVTKSFNRGEC

SEQ ID NO: 9572 - protein, 214 aa, Artificial Sequence
  source: /note="Description of Artificial Sequence: Synthetic polypeptide"
DIQMTQSPSSLSASVGDRVTITCKASQDVSIGVAWYQQKPGKAPKLLIYSASYRYTGVPSRFSGSGSGTDFTLTISSLQPEDFATYYCQQYYIYPYTFGQGTKVEIKRTVAAPSVFIFPPSDEQLKSGTASVVCLLNNFYPREAKVQWKVDNALQSGNSQESVTEQDSKDSTYSLSSTLTLSKADYEKHKVYACEVTHQGLSSPVTKSFNRGEC

SEQ ID NO: 9573 - protein, 214 aa, Artificial Sequence
  source: /note="Description of Artificial Sequence: Synthetic polypeptide"
DIQMTQSPSSLSASVGDRVTITCRASQNIATDVAWYQQKPGKAPKLLIYSASFLYSGVPSRFSGSGSGTDFTLTISSLQPEDFATYYCQQSEPEPYTFGQGTKVEIKRTVAAPSVFIFPPSDEQLKSGTASVVCLLNNFYPREAKVQWKVDNALQSGNSQESVTEQDSKDSTYSLSSTLTLSKADYEKHKVYACEVTHQGLSSPVTKSFNRGEC

SEQ ID NO: 9574 - protein, 214 aa, Artificial Sequence
  source: /note="Description of Artificial Sequence: Synthetic polypeptide"
DIQMTQSPSSLSASVGDRVTITCRASQGISNWLAWYQQKPGKAPKLLIYGASSLQSGVPSRFSGSGSGTDFTLTISSLQPEDFATYYCQQYSSFPTTFGQGTKVEIKRTVAAPSVFIFPPSDEQLKSGTASVVCLLNNFYPREAKVQWKVDNALQSGNSQESVTEQDSKDSTYSLSSTLTLSKADYEKHKVYACEVTHQGLSSPVTKSFNRGEC

SEQ ID NO: 9575 - protein, 217 aa, Artificial Sequence
  source: /note="Description of Artificial Sequence: Synthetic polypeptide"
QSALTQPASVSGSPGQSITISCTGTSSDVGSYNVVSWYQQHPGKAPKLIIYEVSQRPSGVSNRFSGSKSGNTASLTISGLQTEDEADYYCCSYAGSSIFVIFGGGTKVTVLGQPKAAPSVTLFPPSSEELQANKATLVCLVSDFYPGAVTVAWKADGSPVKVGVETTKPSKQSNNKYAASSYLSLTPEQWKSHRSYSCRVTHEGSTVEKTVAPAECS

SEQ ID NO: 9576 - protein, 220 aa, Artificial Sequence
  source: /note="Description of Artificial Sequence: Synthetic polypeptide"
DIVMTQSPDSLAVSLGERATINCKSSQSVLNSGNQKNYLTWYQQKPGQPPKLLIYWASTRESGVPDRFSGSGSGTDFTLTISSLQAEDVAVYYCQSDYSYPYTFGQGTKLEIKRTVAAPSVFIFPPSDEQLKSGTASVVCLLNNFYPREAKVQWKVDNALQSGNSQESVTEQDSKDSTYSLSSTLTLSKADYEKHKVYACEVTHQGLSSPVTKSFNRGEC

SEQ ID NO: 9577 - protein, 214 aa, Artificial Sequence
  source: /note="Description of Artificial Sequence: Synthetic polypeptide"
DIQMTQSPPSLSASAGDRVTITCRASQGISSRLAWYQQKPEKAPKSLIYAASSLQSGVPSRFSGSGSGTDFTLTISSLQPEDFATYYCQQYNSYPYTFGQGTKLEIKRTVAAPSVFIFPPSDEQLKSGTASVVCLLNNFYPREAKVQWKVDNALQSGNSQESVTEQDSKDSTYSLSSTLTLSKADYEKHKVYACEVTHQGLSSPVTKSFNRGEC

SEQ ID NO: 9578 - protein, 239 aa, Artificial Sequence
  source: /note="Description of Artificial Sequence: Synthetic polypeptide"
MDTRAPTQLLGLLLLWLPGATFAQVLTQTPASVSAAVGGTVTISCQSSESVYKNNYLSWFQQKPGQPPKLLIYEASKLASGVSTRFKGSGSGTQFTLTISGVQCDDAATYYCLGEFSCYSGDCGTFGGGTAVVVKGDPVAPTVLIFPPAADQVATGTVTIVCVANKYFPDVTVTWEVDGTTQTTGIENSKTPQNSADCTYNLSSTLTLTSTQYNSHKEYTCKVTQGTTSVVQSFNRGDC

SEQ ID NO: 9579 - protein, 237 aa, Artificial Sequence
  source: /note="Description of Artificial Sequence: Synthetic polypeptide"
MDTRVPTQLLGLLLLWLPGATFAQVLTQTPSPVSAAVGGTVTINCQASKSVYNNVQLSWFQQKPGQPPKRLIYYASTLASGVPSRFKGSGSGTQFTLTISDVQCDDVATYYCAGGYSSSSDNAFGGGTEVVVKGDPVAPTVLIFPPAADQVATGTVTIVCVANKYFPDVTVTWEVDGTTQTTGIENSKTPQNSADCTYNLSSTLTLTSTQYNSHKEYTCKVTQGTTSVVQSFNRGDC

SEQ ID NO: 9580 - protein, 214 aa, Artificial Sequence
  source: /note="Description of Artificial Sequence: Synthetic polypeptide"
DIQLTQSPTTVAASPGEKITITCSASSSISSNYLHWYQQKPGFSPKLLIYRTSNLASGVPARFSGSGSGTSYSLTIGTMEAEDVATYYCQQGSNIPLTFGAGTKLELKRADAAPTVSIFPPSSEQLTSGGASVVCFLNNFYPKDINVKWKIDGSERQNGVLNSWTDQDSKDSTYSMSSTLTLTKDEYERHNSYTCEATHKTSTSPIVKSFNKNE

SEQ ID NO: 9581 - protein, 213 aa, Artificial Sequence
  source: /note="Description of Artificial Sequence: Synthetic polypeptide"
DIQLTQSPSSLSASLGDKVTITCKASQDINNYIAWYQHKPGKRSRLLIHYTSTLQPGIPSRFSGSGSGRDYSFSISNLEPEDIATYYCLQYDNLLRTFGGGTKLEIKRADAAPTVSIFPPSSEQLTSGGASVVCFLNNFYPKDINVKWKIDGSERQNGVLNSWTDQDSKDSTYSMSSTLTLTKDEYERHNSYTCEATHKTSTSPIVKSFNKNE

SEQ ID NO: 9582 - protein, 214 aa, Artificial Sequence
  source: /note="Description of Artificial Sequence: Synthetic polypeptide"
EIVLTQSPDFQSVTPKEKVTFTCRTSQSIGTNIHWYQQKPDQSPKLLIKEVSESISGVPSRFSGSGSGTDFTLTINSLEAEDAATYYCQQSNTWPFTFGGGTKVEIKRTVAAPSVFIFPPSDEQLKSGTASVVCLLNNFYPREAKVQWKVDNALQSGNSQESVTEQDSKDSTYSLSSTLTLSKADYEKHKVYACEVTHQGLSSPVTKSFNRGEC

SEQ ID NO: 9583 - protein, 109 aa, Artificial Sequence
  source: /note="Description of Artificial Sequence: Synthetic polypeptide"
DIVMTQSHKFMSTSVGDRVSITCKASQDVNTAVAWYQQKPGHSPKLLIYSASFRYTGVPDRFTGNRSGTDFTFTISSVQAADLAVYYCQQHYTTPPTFGGGTKLEIKRA

SEQ ID NO: 9584 - protein, 109 aa, Artificial Sequence
  source: /note="Description of Artificial Sequence: Synthetic polypeptide"
DIQMTQSPSSLSASVGDRVTITCRASQVVNTAVAWYQQKPGKAPKLLIYSASFLYSGVPSRFSGSRSGTDFTLTISSLQPEDFATYYCQQHYTTPPTFGQGTKVEIKRT

SEQ ID NO: 9585 - protein, 214 aa, Artificial Sequence; identical to SEQ ID NO: 9582
  source: /note="Description of Artificial Sequence: Synthetic polypeptide"

SEQ ID NO: 9586 - protein, 215 aa, Artificial Sequence
  source: /note="Description of Artificial Sequence: Synthetic polypeptide"
EIVLTQSPGTLSLSPGERATLSCRASQSVSSSYLAWYQQKPGQAPRLLIYGASSRATGIPDRFSGSGSGTDFTLTISRLEPEDFAVYYCQQYGSSPLTFGGGTKVEIKRTVAAPSVFIFPPSDEQLKSGTASVVCLLNNFYPREAKVQWKVDNALQSGNSQESVTEQDSKDSTYSLSSTLTLSKADYEKHKVYACEVTHQGLSSPVTKSFNRGEC

SEQ ID NO: 9587 - protein, 218 aa, Artificial Sequence
  source: /note="Description of Artificial Sequence: Synthetic polypeptide"
DIVLTQSPLSLAVSLGQPAIISCKASQSVSFAGTSLMHWYHQKPGQQPRLLIYRASNLEAGVPDRFSGSGSKTDFTLTISPVEAEDAATYYCQQSREYPYTFGGGTKLEIKRTVAAPSVFIFPPSDEQLKSGTASVVCLLNNFYPREAKVQWKVDNALQSGNSQESVTEQDSKDSTYSLSSTLTLSKADYEKHKVYACEVTHQGLSSPVTKSFNRGEC

SEQ ID NO: 9588 - protein, 217 aa, Artificial Sequence
  source: /note="Description of Artificial Sequence: Synthetic polypeptide"
DIQLTQSPSSLSASVGDRVTITCSVSSSISSNNLHWYQQKPGKAPKPWIYGTSNLASGVPSRFSGSGSGTDYTFTISSLQPEDIATYYCQQWSSYPYMYTFGQGTKVEIKRTVAAPSVFIFPPSDEQLKSGTASVVCLLNNFYPREAKVQWKVDNALQSGNSQESVTEQDSKDSTYSLSSTLTLSKADYEKHKVYACEVTHQGLSSPVTKSFNRGEC

SEQ ID NO: 9589 - protein, 213 aa, Artificial Sequence
  source: /note="Description of Artificial Sequence: Synthetic polypeptide"
DIELTQPPSVSVAPGQTARISCSGDNIGSFYVHWYQQKPGQAPVLVIYDKSNRPSGIPERFSGSNSGNTATLTISGTQAEDEADYYCQSYANTLSLVFGGGTKLTVLGQPKAAPSVTLFPPSSEELQANKATLVCLISDFYPGAVTVAWKADSSPVKAGVETTTPSKQSNNKYAASSYLSLTPEQWKSHRSYSCQVTHEGSTVEKTVAPTECS

SEQ ID NO: 9590 - protein, 113 aa, Artificial Sequence
  source: /note="Description of Artificial Sequence: Synthetic polypeptide"
DVVMTQTPLSLPVTPGEPASISCRSSQSLVHRNGNTYLHWYLQKPGQSPKLLIHKVSNRFSGVPDRFSGSGSGTDFTLKISRVEAEDLGVYFCSQSTHVPPLTFGAGTKLELK

SEQ ID NO: 9591 - protein, 219 aa, Artificial Sequence
  source: /note="Description of Artificial Sequence: Synthetic polypeptide"
DVVMTQSPLSLPVTPGEPASISCRSSQSLVHSNRNTYLHWYLQKPGQSPQLLIYKVSNRFSGVPDRFSGSGSGTDFTLKISRVEAEDVGVYYCSQNTHVPPTFGQGTKLEIKRTVAAPSVFIFPPSDEQLKSGTASVVCLLNNFYPREAKVQWKVDNALQSGNSQESVTEQDSKDSTYSLSSTLTLSKADYEKHKVYACEVTHQGLSSPVTKSFNRGEC

SEQ ID NO: 9592 - protein, 215 aa, Artificial Sequence
  source: /note="Description of Artificial Sequence: Synthetic polypeptide"
EIVMTQSPATLSVSPGERATLSCRASQSVDNNLVWYQQKPGQAPRLLIYGASTRATGIPARFSGSGSGTEFTLTISSLQSEDFAVYYCQQYNNWPPWTFGQGTKVEIKRTVAAPSVFIFPPSDEQLKSGTASVVCLLNNFYPREAKVQWKVDNALQSGNSQESVTEQDSKDSTYSLSSTLTLSKADYEKHKVYACEVTHQGLSSPVTKSFNRGEC

SEQ ID NO: 9593 - protein, 214 aa, Artificial Sequence
  source: /note="Description of Artificial Sequence: Synthetic polypeptide"
EIVMTQSPATLSVSPGERATLSCRASQSVSRNLAWYQQKPGQAPRLLIYGASTRATGIPARFSGSGSGTEFTLTIGSLQSEDFAVYYCQQYKTWPRTFGQGTNVEIKRTVAAPSVFIFPPSDEQLKSGTASVVCLLNNFYPREAKVQWKVDNALQSGNSQESVTEQDSKDSTYSLSSTLTLSKADYEKHKVYACEVTHQGLSSPVTKSFNRGEC

SEQ ID NO: 9594 - protein, 220 aa, Artificial Sequence
  source: /note="Description of Artificial Sequence: Synthetic polypeptide"
DIEMTQSPDSLAVSLGERATINCRSSQSVLYSSSNRNYLAWYQQNPGQPPKLLIYWASTRESGVPDRFSGSGSGTDFTLTISSLQAEDVAVYYCQQYYSTPRTFGQGTKVEIKRTVAAPSVFIFPPSDEQLKSGTASVVCLLNNFYPREAKVQWKVDNALQSGNSQESVTEQDSKDSTYSLSSTLTLSKADYEKHKVYACEVTHQGLSSPVTKSFNRGEC

SEQ ID NO: 9595 - protein, 217 aa, Artificial Sequence
  source: /note="Description of Artificial Sequence: Synthetic polypeptide"
AYDMTQTPASVEIAVGGTVTIRCQASEDIESYLAWYQQKPGQPPKLLIYRASDLASGVSSRFKGSGSGTDYTLTISGVECDDAATYYCQQGYTIDNVDNTFGGGTEVVVKRTVAAPSVFIFPPSDEQLKSGTASVVCLLNNFYPREAKVQWKVDNALQSGNSQESVTEQDSKDSTYSLSSTLTLSKADYEKHKVYACEVTHQGLSSPVTKSFNRGEC

SEQ ID NO: 9596 - protein, 218 aa, Artificial Sequence
  source: /note="Description of Artificial Sequence: Synthetic polypeptide"
ADIVMTQNPASVSEPVGGTVTIKCQASQSVNSWLSWYQQKPGQPPKFLIYKASTLASGVSSRFKGSGIGTEFTLTISDLECADAATYYCQFSNSGTIYGSGFGGGTEVVVKRTVAAPSVFIFPPSDEQLKSGTASVVCLLNNFYPREAKVQWKVDNALQSGNSQESVTEQDSKDSTYSLSSTLTLSKADYEKHKVYACEVTHQGLSSPVTKSFNRGEC

SEQ ID NO: 9597 - protein, 217 aa, Artificial Sequence
  source: /note="Description of Artificial Sequence: Synthetic polypeptide"
DIQMTQSPSTLSASVGDRVTITCQASQSISSWLAWYQQKPGKAPKLLIYEASKLASGVPSRFSGSGSGTEFTLTISSLQPDDFATYYCQQAYSVANVDNAFGGGTKVEIKRTVAAPSVFIFPPSDEQLKSGTASVVCLLNNFYPREAKVQWKVDNALQSGNSQESVTEQDSKDSTYSLSSTLTLSKADYEKHKVYACEVTHQGLSSPVTKSFNRGEC

SEQ ID NO: 9598 - protein, 217 aa, Artificial Sequence
  source: /note="Description of Artificial Sequence: Synthetic polypeptide"
AYDMTQSPASVEAAVGGTVTIRCQASEDIESYLAWYQQKPGQPPKLLIYRASDLASGVSSRFKGSGSGTDYTLTISGLEPEDAATYYCQQGYTIDNVDNTFGGGTKVEIKRTVAAPSVFIFPPSDEQLKSGTASVVCLLNNFYPREAKVQWKVDNALQSGNSQESVTEQDSKDSTYSLSSTLTLSKADYEKHKVYACEVTHQGLSSPVTKSFNRGEC

SEQ ID NO: 9599 - protein, 217 aa, Artificial Sequence
  source: /note="Description of Artificial Sequence: Synthetic polypeptide"
AYDMTQTPASMEVAVGGTVTIKCQASQSISTYLAWYQQKPGQPPKLLIYDASDLASGVSSRFKGSGSGTQFTLTISGVECDDAATYYCQQDWSDSNVDNAFGGGTEVVVKRTVAAPSVFIFPPSDEQLKSGTASVVCLLNNFYPREAKVQWKVDNALQSGNSQESVTEQDSKDSTYSLSSTLTLSKADYEKHKVYACEVTHQGLSSPVTKSFNRGEC

SEQ ID NO: 9600 - protein, 217 aa, Artificial Sequence
  source: /note="Description of Artificial Sequence: Synthetic polypeptide"
AYDMTQTPASVEVAVGGTVTIKCQASQSISSWLAWYQQKPGQPPKLLIYQASKLASGVPSRFKGSGSGTEFTLTISGVECADAATYYCQQAYSVSNVDNAFGGGTEVVVKRTVAAPSVFIFPPSDEQLKSGTASVVCLLNNFYPREAKVQWKVDNALQSGNSQESVTEQDSKDSTYSLSSTLTLSKADYEKHKVYACEVTHQGLSSPVTKSFNRGEC

SEQ ID NO: 9601 - protein, 222 aa, Artificial Sequence
  source: /note="Description of Artificial Sequence: Synthetic polypeptide"
ADIVMTQTPSSVEAAVGGTVTIKCQASENIYRLLAWYQQKPGQRPKLLIYSASTLASGVPSRFKGSGSGTQFTLTISDLECADAATYYCQNYYYSSRSSYDTYNVFGGGTEVVVKRTVAAPSVFIFPPSDEQLKSGTASVVCLLNNFYPREAKVQWKVDNALQSGNSQESVTEQDSKDSTYSLSSTLTLSKADYEKHKVYACEVTHQGLSSPVTKSFNRGEC

SEQ ID NO: 9602 - protein, 217 aa, Artificial Sequence
  source: /note="Description of Artificial Sequence: Synthetic polypeptide"
AYDMTQTPASVEVAVGGTVTIKCQASQSISSWLAWYQQKPGQPPKLLIYEASKLASGVPSRFSGSGSGTQFTLTISGVECADAATYYCQQAYSVANVDNAFGGGTEVVVKRTVAAPSVFIFPPSDEQLKSGTASVVCLLNNFYPREAKVQWKVDNALQSGNSQESVTEQDSKDSTYSLSSTLTLSKADYEKHKVYACEVTHQGLSSPVTKSFNRGEC

SEQ ID NO: 9603 - protein, 217 aa, Artificial Sequence; identical to SEQ ID NO: 9597
  source: /note="Description of Artificial Sequence: Synthetic polypeptide"

SEQ ID NO: 9604 - protein, 215 aa, Artificial Sequence
  source: /note="Description of Artificial Sequence: Synthetic polypeptide"
QVLTQTPPSVSAVVGGTVTINCQSSQRIYSNWLSWYQQKPGQTPKPLIYAASSLASGVPSRFKGSGSGTQFTLTISDLECDDAASYYCAGYYSGHIYSFGGGTEVVVKRTVAAPSVFIFPPSDEQLKSGTASVVCLLNNFYPREAKVQWKVDNALQSGNSQESVTEQDSKDSTYSLSSTLTLSKADYEKHKVYACEVTHQGLSSPVTKSFNRGEC

SEQ ID NO: 9605 - protein, 216 aa, Artificial Sequence
  source: /note="Description of Artificial Sequence: Synthetic polypeptide"
DIQMTQSPSSVSASVGDRVTITCQSSQRIYSNWLSWYQQKPGKAPKLLIYAASSLASGVPSRFSGSGSGTDFTLTISSLQPEDFATYYCAGYYSGHIYSFGGGTKVEIKRTVAAPSVFIFPPSDEQLKSGTASVVCLLNNFYPREAKVQWKVDNALQSGNSQESVTEQDSKDSTYSLSSTLTLSKADYEKHKVYACEVTHQGLSSPVTKSFNRGEC

SEQ ID NO: 9606 - protein, 219 aa, Artificial Sequence
  source: /note="Description of Artificial Sequence: Synthetic polypeptide"
AVLTQTPSPVSAAVGGTVTIKCQSSQSVYNNNLLSWYQQKPGQPPKLLIWGASYLPSGVPDRFSGSGSGTQFTLTISGVQCDDAATYYCLGGYDGDADTYNTFGGGTEVVVKRTVAAPSVFIFPPSDEQLKSGTASVVCLLNNFYPREAKVQWKVDNALQSGNSQESVTEQDSKDSTYSLSSTLTLSKADYEKHKVYACEVTHQGLSSPVTKSFNRGEC

SEQ ID NO: 9607 - protein, 217 aa, Artificial Sequence
  source: /note="Description of Artificial Sequence: Synthetic polypeptide"
AYDMTQTPASVEVAVGGTVTIKCQVSQSISSWLSWYQKKPGQRPKLLIYRASTLASGVSSRFKGSGSGTEFTLTISGVECADAATYYCQQAYSVSNVDNAFGGGTEVVVKRTVAAPSVFIFPPSDEQLKSGTASVVCLLNNFYPREAKVQWKVDNALQSGNSQESVTEQDSKDSTYSLSSTLTLSKADYEKHKVYACEVTHQGLSSPVTKSFNRGEC

SEQ ID NO: 9608 - protein, 217 aa, Artificial Sequence
  source: /note="Description of Artificial Sequence: Synthetic polypeptide"
DYQMTQSPSTLSASVGDRVTITCQVSQSISSWLSWYQQKPGKAPKLLIYRASTLASGVPSRFSGSGSGTEFTLTISSLQPDDFATYYCQQAYSVSNVDNAFGGGTKVEIKRTVAAPSVFIFPPSDEQLKSGTASVVCLLNNFYPREAKVQWKVDNALQSGNSQESVTEQDSKDSTYSLSSTLTLSKADYEKHKVYACEVTHQGLSSPVTKSFNRGEC

SEQ ID NO: 9609 - protein, 217 aa, Artificial Sequence
  source: /note="Description of Artificial Sequence: Synthetic polypeptide"
AYDMTQTPASVEVAVGGTVTIKCQASESIESYLAWYQQKSGQPPKLLIYRASTLASGVSSRFKGSGSGTQFTLTISGVECADAATYYCQQGDAWSNVDNVFGGGTEVVVKRTVAAPSVFIFPPSDEQLKSGTASVVCLLNNFYPREAKVQWKVDNALQSGNSQESVTEQDSKDSTYSLSSTLTLSKADYEKHKVYACEVTHQGLSSPVTKSFNRGEC

SEQ ID NO: 9610 - protein, 217 aa, Artificial Sequence
  source: /note="Description of Artificial Sequence: Synthetic polypeptide"
AYDMTQTPASVEVAVGGTVTIKCQASESISSYLAWYQQKSGQPPKLLIYRASTLASGVSSRFKGSGSGTQFTLTISGVECADAATYYCQQGDAWSNVDNVFGGGTEVVVKRTVAAPSVFIFPPSDEQLKSGTASVVCLLNNFYPREAKVQWKVDNALQSGNSQESVTEQDSKDSTYSLSSTLTLSKADYEKHKVYACEVTHQGLSSPVTKSFNRGEC

SEQ ID NO: 9611 - protein, 217 aa, Artificial Sequence
  source: /note="Description of Artificial Sequence: Synthetic polypeptide"
DIQMTQSPSTLSASVGDRVTITCQASQSISSWLAWYQQKPGKAPKLLIYQASKLASGVPSRFSGSGSGTEFTLTISSLQPDDFATYYCQQAYSVSNVDNAFGGGTKVEIKRTVAAPSVFIFPPSDEQLKSGTASVVCLLNNFYPREAKVQWKVDNALQSGNSQESVTEQDSKDSTYSLSSTLTLSKADYEKHKVYACEVTHQGLSSPVTKSFNRGEC

SEQ ID NO: 9612 - protein, 219 aa, Artificial Sequence
  source: /note="Description of Artificial Sequence: Synthetic polypeptide"
QVLTQTPSPVSAAVGGTVTINCQGSQSLYNNNAFSWYQQKPGQPPKLLIYDASTLASGVPSRFKGSGSGTQFTLTISGVQCADAATYYCQGEFSCGDVDCIAFGGGTEVVVKRTVAAPSVFIFPPSDEQLKSGTASVVCLLNNFYPREAKVQWKVDNALQSGNSQESVTEQDSKDSTYSLSSTLTLSKADYEKHKVYACEVTHQGLSSPVTKSFNRGEC

SEQ ID NO: 9613 - protein, 219 aa, Artificial Sequence
  source: /note="Description of Artificial Sequence: Synthetic polypeptide"
QVLTQTPSPVSAAVGGTVTINCQASQSFYNNGAFSWYQQKPGQPPKLLIYDASTLASGVPSRFKGSGSGTQFTLTISGVQCGDAATYYCQGEFSCGSADCVAFGGGTEVVVKRTVAAPSVFIFPPSDEQLKSGTASVVCLLNNFYPREAKVQWKVDNALQSGNSQESVTEQDSKDSTYSLSSTLTLSKADYEKHKVYACEVTHQGLSSPVTKSFNRGEC

SEQ ID NO: 9614 - protein, 217 aa, Artificial Sequence
  source: /note="Description of Artificial Sequence: Synthetic polypeptide"
AYDMTQTPASVEVAVGGTVTIKCQASQSISTALAWYQQKPGQRPKLLIYDASKLASGVSSRFKGSGSGAQFTLTISGVECADAATYYCHQGYSSSNVDNTFGGGTEVVVKRTVAAPSVFIFPPSDEQLKSGTASVVCLLNNFYPREAKVQWKVDNALQSGNSQESVTEQDSKDSTYSLSSTLTLSKADYEKHKVYACEVTHQGLSSPVTKSFNRGEC

SEQ ID NO: 9615 - protein, 217 aa, Artificial Sequence
  source: /note="Description of Artificial Sequence: Synthetic polypeptide"
DVVMTQTPASVSEPVGGTVTIKCQASQSIDNYLAWYQQKPGQRPRLLIYYTSTLASGVPSRFKGSGSGTEYTLTISDLECADAATYYCQFTAYYSTYIGAFGGGTEVVVKRTVAAPSVFIFPPSDEQLKSGTASVVCLLNNFYPREAKVQWKVDNALQSGNSQESVTEQDSKDSTYSLSSTLTLSKADYEKHKVYACEVTHQGLSSPVTKSFNRGEC

SEQ ID NO: 9616 - protein, 217 aa, Artificial Sequence
  source: /note="Description of Artificial Sequence: Synthetic polypeptide"
DIQMTQSPSSLSASVGDRVTITCQASQSIDNYLAWYQQKPGKVPKLLIYYTSTLASGVPSRFSGSGSGTDFTLTISSLQPEDVATYYCQFTAYYSTYIGAFGGGTKVEIKRTVAAPSVFIFPPSDEQLKSGTASVVCLLNNFYPREAKVQWKVDNALQSGNSQESVTEQDSKDSTYSLSSTLTLSKADYEKHKVYACEVTHQGLSSPVTKSFNRGEC

SEQ ID NO: 9617 - protein, 217 aa, Artificial Sequence
  source: /note="Description of Artificial Sequence: Synthetic polypeptide"
AYDMTQTPASVEVAVGGTVTIKCQASESISSYLNWYQQKLGQPPKLLIYRASTLTSGVSSRFKGSGSGTEYTLTISDLECADAATYYCQQTYGYSDTDNSFGGGTEVVVKRTVAAPSVFIFPPSDEQLKSGTASVVCLLNNFYPREAKVQWKVDNALQSGNSQESVTEQDSKDSTYSLSSTLTLSKADYEKHKVYACEVTHQGLSSPVTKSFNRGEC

SEQ ID NO: 9618 - protein, 217 aa, Artificial Sequence
  source: /note="Description of Artificial Sequence: Synthetic polypeptide"
AYDMTQTPASVEVAVGGTVTIKCQASESISTYLAWYQQKPGQPPKLLIYRASTLASGVSSRFKGSGSGTQFTLTISGVECADAATYYCQQGYSYSNVDNAFGGGTEVVVKRTVAAPSVFIFPPSDEQLKSGTASVVCLLNNFYPREAKVQWKVDNALQSGNSQESVTEQDSKDSTYSLSSTLTLSKADYEKHKVYACEVTHQGLSSPVTKSFNRGEC

SEQ ID NO: 9619 - protein, 217 aa, Artificial Sequence
  source: /note="Description of Artificial Sequence: Synthetic polypeptide"
DIQMTQSPSSLSASVGDRVTITCQASESISTYLAWYQQKPGKVPKLLIYRASTLASGVPSRFSGSGSGTDFTLTISSLQPEDVATYYCQQGYSYSNVDNAFGGGTKVEIKRTVAAPSVFIFPPSDEQLKSGTASVVCLLNNFYPREAKVQWKVDNALQSGNSQESVTEQDSKDSTYSLSSTLTLSKADYEKHKVYACEVTHQGLSSPVTKSFNRGEC

SEQ ID NO: 9620 - protein, 216 aa, Artificial Sequence
  source: /note="Description of Artificial Sequence: Synthetic polypeptide"
QVLTQTASSVSAAVGGTVTISCQSSQSVTNNNDLAWYQQKPGQPPKLLIYQASKLASGVPSRFKGSGSGTQFTLTISDLECDDAATYYCQGSYSGGICAFGGGTEVVVKRTVAAPSVFIFPPSDEQLKSGTASVVCLLNNFYPREAKVQWKVDNALQSGNSQESVTEQDSKDSTYSLSSTLTLSKADYEKHKVYACEVTHQGLSSPVTKSFNRGEC

SEQ ID NO: 9621 - protein, 216 aa, Artificial Sequence
  source: /note="Description of Artificial Sequence: Synthetic polypeptide"
ADVVMTQTPASVSEPVGGTVTIKCQASQSISSYLSWYQQKPGQPPKLLIYGASKLTSGVPSRFKGSGSGTEYTLTISDLECADAATYYCQSNYDIYSYAFGGGTEVVVKRTVAAPSVFIFPPSDEQLKSGTASVVCLLNNFYPREAKVQWKVDNALQSGNSQESVTEQDSKDSTYSLSSTLTLSKADYEKHKVYACEVTHQGLSSPVTKSFNRGEC

SEQ ID NO: 9622 - protein, 214 aa, Artificial Sequence
  source: /note="Description of Artificial Sequence: Synthetic polypeptide"
DIVMTQSPDSLAMSLGERVTLNCKASENVVSYVSWYQQKPGQSPKLLIYGASNRESGVPDRFSGSGSATDFTLTISSVQAEDVADYHCGQSYNYPYTFGQGTKLEIKRTVAAPSVFIFPPSDEQLKSGTASVVCLLNNFYPREAKVQWKVDNALQSGNSQESVTEQDSKDSTYSLSSTLTLSKADYEKHKVYACEVTHQGLSSPVTKSFNRGEC

SEQ ID NO: 9623 - protein, 215 aa, Artificial Sequence
  source: /note="Description of Artificial Sequence: Synthetic polypeptide"
EIVMTQSPATLSVSPGERATLSCRASQSVDSNLAWYRQKPGQAPRLLIYGASTRATGIPARFSGSGSGTEFTLTISSLQSEDFAVYYCQQYINWPPITFGQGTRLEIKRTVAAPSVFIFPPSDEQLKSGTASVVCLLNNFYPREAKVQWKVDNALQSGNSQESVTEQDSKDSTYSLSSTLTLSKADYEKHKVYACEVTHQGLSSPVTKSFNRGEC

SEQ ID NO: 9624 - protein, 219 aa, Artificial Sequence
  source: /note="Description of Artificial Sequence: Synthetic polypeptide"
DIVMTQSPLSLPVTPGEPASISCRSSQSLLHSNGNTYLHWYLQKPGQSPQLLIYTVSNRFSGVPDRFSGSGSGTDFTLKISRVEAEDVGVYYCSQSTHVPYTFGGGTKVEIKRTVAAPSVFIFPPSDEQLKSGTASVVCLLNNFYPREAKVQWKVDNALQSGNSQESVTEQDSKDSTYSLSSTLTLSKADYEKHKVYACEVTHQGLSSPVTKSFNRGEC

SEQ ID NO: 9625 - protein, 215 aa, Artificial Sequence
  source: /note="Description of Artificial Sequence: Synthetic polypeptide"
EIVLTQSPGTLSLSPGERATLSCRASQSVSSTYLAWYQQKPGQAPRLLIYGASSRATGIPDRFSGSGSGTDFTLTISRLEPEDFAVYYCQQYGSSPRTFGQGTKVEIKRTVAAPSVFIFPPSDEQLKSGTASVVCLLNNFYPREAKVQWKVDNALQSGNSQESVTEQDSKDSTYSLSSTLTLSKADYEKHKVYACEVTHQGLSSPVTKSFNRGEC

SEQ ID NO: 9626 - protein, 214 aa, Artificial Sequence
  source: /note="Description of Artificial Sequence: Synthetic polypeptide"
DIQMTQFPSSLSASVGDRVTITCRASQGIRNDLGWYQQKPGKAPKRLIYAASRLHRGVPSRFSGSGSGTEFTLTISSLQPEDFATYYCLQHNSYPCSFGQGTKLEIKRTVAAPSVFIFPPSDEQLKSGTASVVCLLNNFYPREAKVQWKVDNALQSGNSQESVTEQDSKDSTYSLSSTLTLSKADYEKHKVYACEVTHQGLSSPVTKSFNRGEC

SEQ ID NO: 9627 - protein, 214 aa, Artificial Sequence
  source: /note="Description of Artificial Sequence: Synthetic polypeptide"
EIVLTQSPGTLSVSPGERATLSCRASQSIGSSLHWYQQKPGQAPRLLIKYASQSLSGIPDRFSGSGSGTDFTLTISRLEPEDFAVYYCHQSSRLPHTFGQGTKVEIKRTVAAPSVFIFPPSDEQLKSGTASVVCLLNNFYPREAKVQWKVDNALQSGNSQESVTEQDSKDSTYSLSSTLTLSKADYEKHKVYACEVTHQGLSSPVTKSFNRGEC

SEQ ID NO: 9628 - protein, 219 aa, Artificial Sequence
  source: /note="Description of Artificial Sequence: Synthetic polypeptide"
DIVMTQSPLSLPVTPGQPASISCRSSQSIVHSNGNTWLQWWLQKPGQSPQLLIWKVSNRLWGVPDRFSGSGSGTDFTLKISRVQAQDVGVWWCFQGSHVPWTFGQGTKVQIKRTVAAPSVFIFPPSDEQLKSGTASVVCLLNNFYPREAKVQWKVDNALQSGNSQESVTEQDSKDSTYSLSSTLTLSKADYEKHKVYACEVTHQGLSSPVTKSFNRGEC

SEQ ID NO: 9629 - protein, 219 aa, Artificial Sequence
  source: /note="Description of Artificial Sequence: Synthetic polypeptide"
DVVMTQSPLSLPVTPGEPASISCRSSQSLLHSNGYNYLDWYLQKPGQSPQLLIYLGSNRASGVPDRFSGSGSGTDFTLKISRVEAEDVGVYYCMQGTHWPLTFGQGTKVEIKRTVAAPSVFIFPPSDEQLKSGTASVVCLLNNFYPREAKVQWKVDNALQSGNSQESVTEQDSKDSTYSLSSTLTLSKADYEKHKVYACEVTHQGLSSPVTKSFNRGEC

SEQ ID NO: 9630 - protein, 231 aa, Artificial Sequence
  source: /note="Description of Artificial Sequence: Synthetic polypeptide"
MAWIPLFLGVLVYCTGSVASYELTQPPSVSVAPGQTASITCSGDKLGDNFTCWYQQKPGQSPVLVIFQDWKRRPGIPARFSGSKSGNTATLTISGTQAMDEADYYCQAWDISTVVFGGGTKLTVLGQPKAAPSVTLFPPSSEELQANKATLVCLISDFYPGAVTVAWKADSSPVKAGVETTTPSKQSNNKYAASSYLSLTPEQWKSHRSYSCQVTHEGSTVEKTVAPTECS

SEQ ID NO: 9631 - protein, 130 aa, Artificial Sequence
  source: /note="Description of Artificial Sequence: Synthetic polypeptide"
MDMRVPAQLLGLLLLWLPGARCAIQLTQSPSSLSASVGDRVTITCRASQGISSALAWYQQKPGKAPKLLIYDASNLESGVPSRFSGSGSGTDFTLTISSLQPEDFATYYCQQFNSYPTFGQGTKVEIKRT

SEQ ID NO: 9632 - protein, 235 aa, Artificial Sequence
  source: /note="Description of Artificial Sequence: Synthetic polypeptide"
MDMRVPAQLLGLLLLWLPGARCAIQLTQSPSSLSASVGDRVTITCRASQGISSALAWYQQKPGKAPKLLIYDASNLESGVPSRFSGSGSGTDFTLTISSLQPEDFATYYCQQFNSYPTFGQGTKVEIKRTVAAPSVFIFPPSDEQLKSGTASVVCLLNNFYPREAKVQWKVDNALQSGNSQESVTEQDSKDSTYSLSSTLTLSKADYEKHKVYACEVTHQGLSSPVTKSFNRGEC

SEQ ID NO: 9633 - protein, 130 aa, Artificial Sequence
  source: /note="Description of Artificial Sequence: Synthetic polypeptide"
METPAQLLFLLLLWLPDTTGEIVLTQSPGTLSLSPGERATLSCRASQSVSSSYLAWYQQKPGQAPRLLIYGASSRATGIPDRFSGSGSGTDFTLTISRLEPEDFAVYYCQQYGSSPITFGQGTRLEIKRT

SEQ ID NO: 9634 - protein, 219 aa, Artificial Sequence
  source: /note="Description of Artificial Sequence: Synthetic polypeptide"
DIQMTQSPSSLSASVGDRVTITCRSSQSLVHNNANTYLHWYQQKPGKAPKLLIYKVSNRFSGVPSRFSGSGSGTDFTLTISSLQPEDFATYYCSQNTLVPWTFGQGTKVEIKRTVAAPSVFIFPPSDEQLKSGTASVVCLLNNFYPREAKVQWKVDNALQSGNSQESVTEQDSKDSTYSLSSTLTLSKADYEKHKVYACEVTHQGLSSPVTKSFNRGEC

SEQ ID NO: 9635 - protein, 112 aa, Artificial Sequence
  source: /note="Description of Artificial Sequence: Synthetic polypeptide"
DVQMTQSPSSLSASVGDRVTITCRSSQSLVHSNGNTYLHWYQQKPGKAPKLLIYKVSNRFSGVPSRFSGSGSGTDFTLTISSLQPEDFATYYCSQSTHVPTFGQGTKVEIKR

SEQ ID NO: 9636 - protein, 206 aa, Artificial Sequence
  source: /note="Description of Artificial Sequence: Synthetic polypeptide"
SLRLSCAVSGFSLTTYGVHWVRQAPGKGLEWVAVIWSDGYTTYNSALKSRFTISRDNSKNTVYLQMNSLRAEDTAVYYCARNDGDYFYSMDYWGQGTLVTVSSASTKGPSVFPLAPSSKSTSGGTAALGCLVKDYFPEPVTVSWNSGALTSGVHTFPAVLQSSGLYSLSSVVTVPSSSLGTQTYICNVNHKPSNTKVDKKVEPKSC

SEQ ID NO: 9637 - protein, 214 aa, Artificial Sequence
  source: /note="Description of Artificial Sequence: Synthetic polypeptide"
DIQMTQSPSSLSASVGDRVTITCQASQDIGISLSWYQQKPGKAPKLLIYNANNLADGVPSRFSGSGSGTDFTLTISSLQPEDFATYYCLQHNSAPYTFGQGTKLEIKRTVAAPSVFIFPPSDEQLKSGTASVVCLLNNFYPREAKVQWKVDNALQSGNSQESVTEQDSKDSTYSLSSTLTLSKADYEKHKVYACEVTHQGLSSPVTKSFNRGEC

SEQ ID NO: 9638 - protein, 217 aa, Artificial Sequence
  source: /note="Description of Artificial Sequence: Synthetic polypeptide"
QSVLTQPPSVSGAPGQRVTISCSGSRSNIGSNTVKWYQQLPGTAPKLLIYYNDQRPSGVPDRFSGSKSGTSASLAITGLQAEDEADYYCQSYDRYTHPALLFGTGTKVTVLGQPKAAPSVTLFPPSSEELQANKATLVCLISDFYPGAVTVAWKADSSPVKAGVETTTPSKQSNNKYAASSYLSLTPEQWKSHRSYSCQVTHEGSTVEKTVAPTECS

SEQ ID NO: 9639 - protein, 218 aa, Artificial Sequence
  source: /note="Description of Artificial Sequence: Synthetic polypeptide"
DIVMTQSPDSLSVSLGERATINCRASKSVDSYGNSFMHWYQQKPGQPPKLLIYLASNLESGVPDRFSGSGSGTDFTLTISSLQAEDVAVYYCQQNNEDPRTFGGGTKVEIKRTVAAPSVFIFPPSDEQLKSGTASVVCLLNNFYPREAKVQWKVDNALQSGNSQESVTEQDSKDSTYSLSSTLTLSKADYEKHKVYACEVTHQGLSSPVTKSFNRGEC

SEQ ID NO: 9640 - protein, 218 aa, Artificial Sequence
  source: /note="Description of Artificial Sequence: Synthetic polypeptide"
DIQMTQSPSSLSASVGDRVTITCKASESVDNYGKSLMHWYQQKPGKAPKLLIYRASNLESGVPSRFSGSGSGTDFTLTISSLQPEDFATYYCQQSNEDPWTFGGGTKVEIKRTVAAPSVFIFPPSDEQLKSGTASVVCLLNNFYPREAKVQWKVDNALQSGNSQESVTEQDSKDSTYSLSSTLTLSKADYEKHKVYACEVTHQGLSSPVTKSFNRGEC

SEQ ID NO: 9641 - protein, 216 aa, Artificial Sequence
  source: /note="Description of Artificial Sequence: Synthetic polypeptide"
EIVLTQSPATLSLSPGERAILSCRAGQSVSSYLVWYQQKPGQAPRLLIYDASNRATGIPARFSGSGSGTDFTLTISSLEPEDFAVYYCQQRSSWPPVYTFGQGTKLEIKRTVAAPSVFIFPPSDEQLKSGTASVVCLLNNFYPREAKVQWKVDNALQSGNSQESVTEQDSKDSTYSLSSTLTLSKADYEKHKVYACEVTHQGLSSPVTKSFNRGEC

SEQ ID NO: 9642 - protein, 214 aa, Artificial Sequence
  source: /note="Description of Artificial Sequence: Synthetic polypeptide"
SYVLTQPPSVSVAPGKTARITCGGNIIGSKLVHWYQQKPGQAPVLVIYDDGDRPSGIPERFSGSNSGNTATLTISRVEAGDEADYYCQVWDTGSDPVVFGGGTKLTVLGQPKAAPSVTLFPPSSEELQANKATLVCLISDFYPGAVTVAWKADSSPVKAGVETTTPSKQSNNKYAASSYLSLTPEQWKSHRSYSCQVTHEGSTVEKTVAPTECS

SEQ ID NO: 9643 - protein, 219 aa, Artificial Sequence
  source: /note="Description of Artificial Sequence: Synthetic polypeptide"
DIVMTQTPLSLSVTPGQPASISCRSSRSLVHSRGNTYLHWYLQKPGQSPQLLIYKVSNRFIGVPDRFSGSGSGTDFTLKISRVEAEDVGVYYCSQSTHLPFTFGQGTKLEIKRTVAAPSVFIFPPSDEQLKSGTASVVCLLNNFYPREAKVQWKVDNALQSGNSQESVTEQDSKDSTYSLSSTLTLSKADYEKHKVYACEVTHQGLSSPVTKSFNRGEC

SEQ ID NO: 9644 - protein, 215 aa, Artificial Sequence
  source: /note="Description of Artificial Sequence: Synthetic polypeptide"
DIQMTQSPSSLSASVGDRVTITCRASQDINSYLSWFQQKPGKAPKSLIVRANRLVDGVPSRFSGSGSGQDYSLTISSLQPEDFATYYCLQYDAFPPYTFGQGTKLEIKRTVAAPSVFIFPPSDEQLKSGTASVVCLLNNFYPREAKVQWKVDNALQSGNSQESVTEQDSKDSTYSLSSTLTLSKADYEKHKVYACEVTHQGLSSPVTKSFNRGEC

SEQ ID NO: 9645 - protein, 215 aa, Artificial Sequence
  source: /note="Description of Artificial Sequence: Synthetic polypeptide"
EIVLTQSPGTLSLSPGERATLSCRASQSVSSSYLAWYQQKPGQAPRLLIYGASSRATGIPDRFSGSGSGTDFTLTISRLEPEDFAVYYCQQYGSSPCTFGQGTRLEIKRTVAAPSVFIFPPSDEQLKSGTASVVCLLNNFYPREAKVQWKVDNALQSGNSQESVTEQDSKDSTYSLSSTLTLSKADYEKHKVYACEVTHQGLSSPVTKSFNRGEC

SEQ ID NO: 9646 - protein, 234 aa, Artificial Sequence
  source: /note="Description of Artificial Sequence: Synthetic polypeptide"
MEAPAQLLFLLLLWLPDTTGEIVMTQSPATLSVSPGERATLSCRASQSVSSNLAWFQQKPGQAPRPLIYDASTRATGVPARFSGSGSGTDFTLTISSLQSEDFAVYYCQQYDNWPLTFGGGTKVEIKRTVAAPSVFIFPPSDEQLKSGTASVVCLLNNFYPREAKVQWKVDNALQSGNSQESVTEQDSKDSTYSLSSTLTLSKADYEKHKVYACEVTHQGLSSPVTKSFNRGEC

SEQ ID NO: 9647 - protein, 214 aa, Artificial Sequence
  source: /note="Description of Artificial Sequence: Synthetic polypeptide"
DIQMTQSTSSLSASVGDRVTITCRASQDISNYLSWYQQKPGKAVKLLIYYTSKLHSGVPSRFSGSGSGTDYTLTISSLQQEDFATYFCLQGKMLPWTFGQGTKLEIKRTVAAPSVFIFPPSDEQLKSGTASVVCLLNNFYPREAKVQWKVDNALQSGNSQESVTEQDSKDSTYSLSSTLTLSKADYEKHKVYACEVTHQGLSSPVTKSFNRGEC

SEQ ID NO: 9648 - protein, 107 aa, Artificial Sequence
  source: /note="Description of Artificial Sequence: Synthetic polypeptide"
EIVLTQSPATLSLSPGERATLSCRASQSVSSYLAWYQQKPGQAPRLLIYDASNRATGIPARFSGSGSGTDFTLTISSLEPEDFAVYYCQQRSNWMFPFGQGTKLEIK

SEQ ID NO: 9649 - protein, 217 aa, Artificial Sequence
  source: /note="Description of Artificial Sequence: Synthetic polypeptide"
QAVLTQPPSVSGAPGQRVTISCTGSSSNIGAGYGVHWYQQLPGTAPKLLIYGDSNRPSGVPDRFSGSKSGTSASLAITGLQAEDEADYYCQSYDNSLSGYVFGGGTQLTVLGQPKAAPSVTLFPPSSEELQANKATLVCLISDFYPGAVTVAWKADSSPVKAGVETTTPSKQSNNKYAASSYLSLTPEQWKSHRSYSCQVTHEGSTVEKTVAPTECS

SEQ ID NO: 9650 - protein, 214 aa, Artificial Sequence
  source: /note="Description of Artificial Sequence: Synthetic polypeptide"
DIQMTQSPSSLSASVGDRVTITCRTSENIYSYLAWYQQKPGKAPKLLIYNAKTLAEGVPSRFSGSGSGTDFTLTISSLQPEDFATYYCQHHYGIPFTFGQGTKVEIKRTVAAPSVFIFPPSDEQLKSGTASVVCLLNNFYPREAKVQWKVDNALQSGNSQESVTEQDSKDSTYSLSSTLTLSKADYEKHKVYACEVTHQGLSSPVTKSFNRGEC

SEQ ID NO: 9651 - protein, 214 aa, Artificial Sequence
  source: /note="Description of Artificial Sequence: Synthetic polypeptide"
DIQMTQSPSSLSASVGDRVTITCQASEDIYSFVAWYQQKPGKAPKLLIYNAQTEAQGVPSRFSGSGSGTDFTLTISSLQPEDFATYYCQHHYDSPLTFGGGTKVEIKRTVAAPSVFIFPPSDEQLKSGTASVVCLLNNFYPREAKVQWKVDNALQSGNSQESVTEQDSKDSTYSLSSTLTLSKADYEKHKVYACEVTHQGLSSPVTKSFNRGEC

SEQ ID NO: 9652 - protein, 219 aa, Artificial Sequence
  source: /note="Description of Artificial Sequence: Synthetic polypeptide"
DIVMTQSPLSLPVTPGEPASISCRSSQSLLYSIGYNYLDWYLQKSGQSPQLLIYLGSNRASGVPDRFSGSGSGTDFTLKISRVEAEDVGFYYCMQALQTPYTFGQGTKLEIKRTVAAPSVFIFPPSDEQLKSGTASVVCLLNNFYPREAKVQWKVDNALQSGNSQESVTEQDSKDSTYSLSSTLTLSKADYEKHKVYACEVTHQGLSSPVTKSFNRGEC

SEQ ID NO: 9653 - protein, 107 aa, Artificial Sequence [sequence omitted]

SEQ ID NO: 9654 - protein, 214 aa, Artificial Sequence
  source: /note="Description of Artificial Sequence: Synthetic polypeptide"
DIQMTQSPSSLSASVGDRVTITCGTSEDIINYLNWYQQKPGKAPKLLIYHTSRLQSGVPSRFSGSGSGTDFTLTISSLQPEDFATYYCQQGYTLPYTFGQGTKVEIKRTVAAPSVFIFPPSDEQLKSGTASVVCLLNNFYPREAKVQWKVDNALQSGNSQESVTEQDSKDSTYSLSSTLTLSKADYEKHKVYACEVTHQGLSSPVTKSFNRGEC

SEQ ID NO: 9655 - protein, 214 aa, Artificial Sequence; identical to SEQ ID NO: 9637
  source: /note="Description of Artificial Sequence: Synthetic polypeptide"

SEQ ID NO: 9656 - protein, 213 aa, Artificial Sequence
  source: /note="Description of Artificial Sequence: Synthetic polypeptide"
QIVLIQSPAIMSASPGEKVTMTCSASSSVSYMYWYQQKPGSSPRLLIYDTSNLASGVPVRFSGSGSGTSYSLTISRMEAEDAATYYCQQWSGYPYTFGGGTKLEIKRTVAAPSVFIFPPSDEQLKSGTASVVCLLNNFYPREAKVQWKVDNALQSGNSQESVTEQDSKDSTYSLSSTLTLSKADYEKHKVYACEVTHQGLSSPVTKSFNRGEC

SEQ ID NO: 9657 - protein, 164 aa, Artificial Sequence
  source: /note="Description of Artificial Sequence: Synthetic polypeptide"
MDTRAPTQLLGLLLLWLPGARCAYDMTQTPASVSAAVGGTVTIKCQASQSINNELSWYQQKSGQRPKLLIYRASTLASGVSSRFKGSGSGTEFTLTISDLECADAATYYCQQGYSLRNIDNAFGGGTEVVVKRTVAAPSVFIFPPSDEQLKSGTASVVCLLNNF

SEQ ID NO: 9658 - protein, 100 aa, Artificial Sequence
  source: /note="Description of Artificial Sequence: Synthetic polypeptide"
DIQMTQSPSTLSASVGDRVTITCQASQSINNELSWYQQKPGKAPKLLIYRASTLASGVPSRFSGSGSGTEFTLTISSLQPDDFATYYCQQGYSLRNIDNA

SEQ ID NO: 9659 - protein, 123 aa, Artificial Sequence
  source: /note="Description of Artificial Sequence: Synthetic polypeptide"
MDTRAPTQLLGLLLLWLPGATFAAVLTQTPSPVSAAVGGTVTISCQSSQSVGNNQDLSWFQQRPGQPPKLLIYEISKLESGVPSRFSGSGSGTHFTLTISGVQCDDAATYYCLGGYDDDADNA

SEQ ID NO: 9660 - protein, 123 aa, Artificial Sequence
  source: /note="Description of Artificial Sequence: Synthetic polypeptide"
MDTRAPTQLLGLLLLWLPGATFAAVLTQTPSSVSAAVGGTVSISCQSSQSVYSNKYLAWYQQKPGQPPKLLIYWTSKLASGAPSRFSGSGSGTQFTLTISGVQCDDAATYYCLGAYDDDADNA

SEQ ID NO: 9661 - protein, 123 aa, Artificial Sequence
  source: /note="Description of Artificial Sequence: Synthetic polypeptide"
MDTRAPTQLLGLLLLWLPGATFAAVLTQTPSPVSAAVGGTVTISCQSSQSVYNNNDLAWYQQKPGQPPKLLIYYASTLASGVPSRFKGSGSGTQFTLTISGVQCDDAAAYYCLGGYDDDADNA

SEQ ID NO: 9662 - protein, 123 aa, Artificial Sequence
  source: /note="Description of Artificial Sequence: Synthetic polypeptide"
MDTRAPTQLLGLLLLWLPGATFAAVLTQTPSSVSAAVGGTVTINCQSSQSVYNNDYLSWYQQRPGQRPKLLIYGASKLASGVPSRFKGSGSGKQFTLTISGVQCDDAATYYCLGDYDDDADNT

SEQ ID NO: 9663 - protein, 119 aa, Artificial Sequence
  source: /note="Description of Artificial Sequence: Synthetic polypeptide"
MDTRAPTQLLGLLLLWLPGARCDVVMTQTPASVEAAVGGTVTIKCQASETIGNALAWYQQKSGQPPKLLIYKASKLASGVPSRFKGSGSGTEYTLTISDLECADAATYYCQWCYFGDSV

SEQ ID NO: 9664 - protein, 163 aa, Artificial Sequence
  source: /note="Description of Artificial Sequence: Synthetic polypeptide"
MDTRAPTQLLGLLLLWLPGARCAYDMTQTPASVSAAVGGTVTIKCQASQSINNELSWYQQKPGQRPKLLIYRASTLASGVSSRFKGSGSGTEFTLTISDLECADAATYYCQQGYSLRNIDNAFGGGTEVVVKRTVAAPSVFIFPPSDEQLKSGTASVVCLLNN

SEQ ID NO: 9665 - protein, 99 aa, Artificial Sequence
  source: /note="Description of Artificial Sequence: Synthetic polypeptide"
IQMTQSPSSLSASVGDRVTITCQASQSINNELSWYQQKPGKAPKLLIYRASTLASGVPSRFSGSGSGTDFTLTISSLQPDDFATYYCQQGYSLRNIDNA

SEQ ID NO: 9666 - protein, 119 aa, Artificial Sequence
  source: /note="Description of Artificial Sequence: Synthetic polypeptide"
MDTRAPTQLLGLLLLWLPGARCDVVMTQTPASVEAAVGGTVTIKCQASESIGNALAWYQQKPGQPPKLLIYKASTLASGVPSRFSGSGSGTEFTLTISGVQCADAAAYYCQWCYFGDSV

SEQ ID NO: 9667 - protein, 170 aa, Artificial Sequence
  source: /note="Description of Artificial Sequence: Synthetic polypeptide"
MDTRAPTQLLGLLLLWLPGARCAYDMTQTPASVEVAVGGTVTINCQASETIYSWLSWYQQKPGQPPKLLIYQASDLASGVPSRFSGSGAGTEYTLTISGVQCDDAATYYCQQGYSGSNVDNVFGGGTEVVVKRTVAAPSVFIFPPSDEQLKSGTASVVCLLNNFYPREAK

SEQ ID NO: 9668 - protein, 123 aa, Artificial Sequence
  source: /note="Description of Artificial Sequence: Synthetic polypeptide"
MDTRAPTQLLGLLLLWLPGARCDVVMTQTPASVEAAVGGTVTIKCQASQSVSSYLNWYQQKPGQPPKLLIYRASTLESGVPSRFKGSGSGTEFTLTISDLECADAATYYCQCTYGTSSSYGAA

SEQ ID NO: 9669 - protein, 125 aa, Artificial Sequence
  source: /note="Description of Artificial Sequence: Synthetic polypeptide"
MDTRAPTQLLGLLLLWLPGATFAQVLTQTASPVSAAVGGTVTINCQASQSVYKNNYLSWYQQKPGQPPKGLIYSASTLDSGVPLRFSGSGSGTQFTLTISDVQCDDAATYYCLGSYDCSSGDCYA

SEQ ID NO: 9670 - protein, 123 aa, Artificial Sequence
  source: /note="Description of Artificial Sequence: Synthetic polypeptide"
MDTRAPTQLLGLLLLWLPGSTFAAVLTQTPSPVSAAVGGTVSISCQASQSVYDNNYLSWYQQKPGQPPKLLIYGASTLASGVPSRFKGTGSGTQFTLTITDVQCDDAATYYCAGVFNDDSDDA

SEQ ID NO: 9671 - protein, 123 aa, Artificial Sequence
  source: /note="Description of Artificial Sequence: Synthetic polypeptide"
MDTRAPTQLLGLLLLWLPGATFAAVLTQTPSPVSAAVGGTVTISCQASQSVYNNKNLAWYQQKSGQPPKLLIYWASTLASGVSSRFSGSGSGTQFTLTVSGVQCDDAATYYCLGVFDDDADNA

SEQ ID NO: 9672 - protein, 120 aa, Artificial Sequence
  source: /note="Description of Artificial Sequence: Synthetic polypeptide"
MDTRAPTQLLGLLLLWLPGARCAFELTQTPASVEAAVGGTVTINCQASQNIYRYLAWYQQKPGQPPKFLIYLASTLASGVPSRFKGSGSGTEFTLTISDLECADAATYYCQSYYSSNSVA

SEQ ID NO: 9673 - protein, 122 aa, Artificial Sequence
  source: /note="Description of Artificial Sequence: Synthetic polypeptide"
MDTRAPTQLLGLLLLWLPGARCAYDMTQTPASVEVAVGGTVTIKCQASEDIYRLLAWYQQKPGQPPKLLIYDSSDLASGVPSRFKGSGSGTEFTLAISGVQCDDAATYYCQQAWSYSDIDNA

SEQ ID NO: 9674 - protein, 123 aa, Artificial Sequence
  source: /note="Description of Artificial Sequence: Synthetic polypeptide"
MDTRAPTQLLGLLLLWLPGATFAAVLTQTASPVSAAVGATVTINCQSSQSVYNDMDLAWFQQKPGQPPKLLIYSASTLASGVPSRFSGSGSGTEFTLTISGVQCDDAATYYCLGAFDDDADNT

SEQ ID NO: 9675 - protein, 121 aa, Artificial Sequence
  source: /note="Description of Artificial Sequence: Synthetic polypeptide"
MDTRAPTQLLGLLLLWLPGARCAYDMTQTPASVEVAVGGTVTIKCQASQSVYNWLSWYQQKPGQPPKLLIYTASSLASGVPSRFSGSGSGTEFTLTISGVECADAATYYCQQGYTSDVDNV

SEQ ID NO: 9676 - protein, 123 aa, Artificial Sequence
  source: /note="Description of Artificial Sequence: Synthetic polypeptide"
MDTRAPTQLLGLLLLWLPGAKCADVVMTQTPASVSAAVGGTVTINCQASENIYNWLAWYQQKPGQPPKLLIYTVGDLASGVSSRFKGSGSGTEFTLTISDLECADAATYYCQQGYSSSYVDNV

SEQ ID NO: 9677 - protein, 121 aa, Artificial Sequence
  source: /note="Description of Artificial Sequence: Synthetic polypeptide"
MDTRAPTQLLGLLLLWLPGATFAQVLTQTPSSVSAAVGGTVTINCQASQSVYQNNYLSWFQQKPGQPPKLLIYGAATLASGVPSRFKGSGSGTQFTLTISDLECDDAATYYCAGAYRDVDS

SEQ ID NO: 9678 - protein, 165 aa, Artificial Sequence
  source: /note="Description of Artificial Sequence: Synthetic polypeptide"
MDTRAPTQLLGLLLLWLPGATFAAVLTQTPSPVSAAVGGTVSISCQASQSVYDNNYLSWFQQKPGQPPKLLIYGASTLASGVPSRFVGSGSGTQFTLTITDVQCDDAATYYCAGVYDDDSDNAFGGGTEVVVKRTVAAPSVFIFPPSDEQLKSGTASVVCLLNNF

SEQ ID NO: 9679 - protein, 120 aa, Artificial Sequence
  source: /note="Description of Artificial Sequence: Synthetic polypeptide"
MDTRAPTQLLGLLLLWLPGARCAFELTQTPSSVEAAVGGTVTIKCQASQSISSYLAWYQQKPGQPPKFLIYRASTLASGVPSRFKGSGSGTEFTLTISDLECADAATYYCQSYYDSVSNP

SEQ ID NO: 9680 - protein, 124 aa, Artificial Sequence
  source: /note="Description of Artificial Sequence: Synthetic polypeptide"
MDTRAPTQLLGLLLLWLPGVTFAIEMTQSPFSVSAAVGGTVSISCQASQSVYKNNQLSWYQQKSGQPPKLLIYGASALASGVPSRFKGSGSGTEFTLTISDVQCDDAATYYCAGAITGSIDTDG

SEQ ID NO: 9681 - protein, 124 aa, Artificial Sequence
  source: /note="Description of Artificial Sequence: Synthetic polypeptide"
MDTRAPTQLLGLLLLWLPGARCDVVMTQTPASVEAAVGGTVTIKCQASEDISSYLAWYQQKPGQPPKLLIYAASNLESGVSSRFKGSGSGTEYTLTISDLECADAATYYCQCTYGTISISDGNA

SEQ ID NO: 9682 - protein, 124 aa, Artificial Sequence
  source: /note="Description of Artificial Sequence: Synthetic polypeptide"
MDTRAPTQLLGLLLLWLPGARCDVVMTQTPASVSAAVGGTVTIKCQASEDIESYLAWYQQKPGQPPKLLIYGASNLESGVSSRFKGSGSGTEFTLTISDLECADAATYYCQCTYGIISISDGNA

SEQ ID NO: 9683 - protein, 124 aa, Artificial Sequence
  source: /note="Description of Artificial Sequence: Synthetic polypeptide"
MDTRAPTQLLGLLLLWLPGATFAAVLTQTPSPVSEPVGGTVSISCQSSKSVMNNNYLAWYQQKPGQPPKLLIYGASNLASGVPSRFSGSGSGTQFTLTISDVQCDDAATYYCQGGYTGYSDHGT

SEQ ID NO: 9684 - protein, 121 aa, Artificial Sequence
  source: /note="Description of Artificial Sequence: Synthetic polypeptide"
MDTRAPTQLLGLLLLWLPGATFAAVLTQTPSPVSAAVGGTVSISCQSSQSVYNNNWLSWFQQKPGQPPKLLIYKASTLASGVPSRFKGSGSGTQFTLTISDVQCDDVATYYCAGGYLDSVI

SEQ ID NO: 9685 - protein, 122 aa, Artificial Sequence
  source: /note="Description of Artificial Sequence: Synthetic polypeptide"
MDTRAPTQLLGLLLLWLPGARCASDMTQTPSSVSAAVGGTVTINCQASENIYSFLAWYQQKPGQPPKLLIFKASTLASGVSSRFKGSGSGTQFTLTISDLECDDAATYYCQQGATVYDIDNN

SEQ ID NO: 9686 - protein, 122 aa, Artificial Sequence
  source: /note="Description of Artificial Sequence: Synthetic polypeptide"
MDTRAPTQLLGLLLLWLPGARCASDMTQTPSSVSAAVGGTVTINCQASENIYSFLAWYQQKPGQPPKLLIFRASTLASGVSSRFKGSGSGTQFTLTISDLECDDAATYYCQQGATVYDIDNN

SEQ ID NO: 9687 - protein, 124 aa, Artificial Sequence
  source: /note="Description of Artificial Sequence: Synthetic polypeptide"
MDTRAPTQLLGLLLLWLPGATFAIEMTQTPSPVSAAVGGTVTINCQASESVFNNMLSWYQQKPGHSPKLLIYDASDLASGVPSRFKGSGSGTQFTLTISGVECDDAATYYCAGYKSDSNDGDNV

SEQ ID NO: 9688 - protein, 121 aa, Artificial Sequence
  source: /note="Description of Artificial Sequence: Synthetic polypeptide"
MDTRAPTQLLGLLLLWLPGATFAQVLTQTASSVSAAVGGTVTINCQSSQSVYNNYLSWYQQKPGQPPKLLIYTASSLASGVPSRFKGSGSGTQFTLTISEVQCDDAATYYCQGYYSGPIIT

SEQ ID NO: 9689 - protein, 164 aa, Artificial Sequence
  source: /note="Description of Artificial Sequence: Synthetic polypeptide"
MDTRAPTQLLGLLLLWLPGAICDPVLTQTPSPVSAPVGGTVSISCQASQSVYENNYLSWFQQKPGQPPKLLIYGASTLDSGVPSRFKGSGSGTQFTLTITDVQCDDAATYYCAGVYDDDSDDAFGGGTEVVVKRTVAAPSVFIFPPSDEQLKSGTASVVCLLNN

SEQ ID NO: 9690 - protein, 122 aa, Artificial Sequence
  source: /note="Description of Artificial Sequence: Synthetic polypeptide"
MDTRAPTQLLGLLLLWLPGATFAQVLTQTPSPVSVPVGDTVTISCQSSESVYSNNLLSWYQQKPGQPPKLLIYRASNLASGVPSRFKGSGSGTQFTLTISGAQCDDAATYYCQGYYSGVINS

SEQ ID NO: 9691 - protein, 122 aa, Artificial Sequence
  source: /note="Description of Artificial Sequence: Synthetic polypeptide"
MDTRAPTQLLGLLLLWLPGARCAYDMTQTPASVEVAVGGTVTIKCQATESIGNELSWYQQKPGQAPKLLIYSASTLASGVPSRFKGSGSGTQFTLTITGVECDDAATYYCQQGYSSANIDNA

SEQ ID NO: 9692 - protein, 122 aa, Artificial Sequence; identical to SEQ ID NO: 9691
  source: /note="Description of Artificial Sequence: Synthetic polypeptide"

SEQ ID NO: 9693 - protein, 111 aa, Artificial Sequence
  source: /note="Description of Artificial Sequence: Synthetic polypeptide"
AYDMTQTPASVSAAVGGTVTIKCQASQSINNELSWYQQKPGQRPKLLIYRASTLASGVSSRFKGSGSGTEFTLTISDLECADAATYYCQQGYSLRNIDNAFGGGTEVVVKR

SEQ ID NO: 9694 - protein, 88 aa, Artificial Sequence
  source: /note="Description of Artificial Sequence: Synthetic polypeptide"
AIQMTQSPSSLSASVGDRVTITCRASQGIRNDLGWYQQKPGKAPKLLIYAASSLQSGVPSRFSGSGSGTDFTLTISSLQPEDFATYYC

SEQ ID NO: 9695 - protein, 88 aa, Artificial Sequence
  source: /note="Description of Artificial Sequence: Synthetic polypeptide"
DIQMTQSPSSLSASVGDRVTITCRASQGISNYLAWYQQKPGKVPKLLIYAASTLQSGVPSRFSGSGSGTDFTLTISSLQPEDVATYYC

SEQ ID NO: 9696 - protein, 88 aa, Artificial Sequence
  source: /note="Description of Artificial Sequence: Synthetic polypeptide"
DIQMTQSPSTLSASVGDRVTITCRASQSISSWLAWYQQKPGKAPKLLIYKASSLESGVPSRFSGSGSGTEFTLTISSLQPDDFATYYC

SEQ ID NO: 9697 - protein, 111 aa, Artificial Sequence
  source: /note="Description of Artificial Sequence: Synthetic polypeptide"
AIQMTQSPSSLSASVGDRVTITCQASQSINNELSWYQQKPGKAPKLLIYRASTLASGVPSRFSGSGSGTDFTLTISSLQPEDFATYYCQQGYSLRNIDNAFGGGTKVEIKR

SEQ ID NO: 9698 - protein, 122 aa, Artificial Sequence
  source: /note="Description of Artificial Sequence: Synthetic polypeptide"
MDTRAPTQLLGLLLLWLPGARCAYDMTQTPASVSAAVGGTVTIKCQASQSINNELSWYQQKPGQRPKLLIYRASTLASGVSSRFKGSGSGTEFTLTISDLECADAATYYCQQGYSLRNIDNA

SEQ ID NO: 9699 - protein, 216 aa, Artificial Sequence
  source: /note="Description of Artificial Sequence: Synthetic polypeptide"
IQMTQSPSSLSASVGDRVTITCQASQSINNELSWYQQKPGKAPKLLIYRASTLASGVPSRFSGSGSGTDFTLTISSLQPDDFATYYCQQGYSLRNIDNAFGGGTKVEIKRTVAAPSVFIFPPSDEQLKSGTASVVCLLNNFYPREAKVQWKVDNALQSGNSQESVTEQDSKDSTYSLSSTLTLSKADYEKHKVYACEVTHQGLSSPVTKSFNRGEC

SEQ ID NO: 9700 - protein, 122 aa, Artificial Sequence
  source: /note="Description of Artificial Sequence: Synthetic polypeptide"
MDTRAPTQLLGLLLLWLPGARCAYDMTQTPASVEVAVGGTVTINCQASETIYSWLSWYQQKPGQPPKLLIYQASDLASGVPSRFSGSGAGTEYTLTISGVQCDDAATYYCQQGYSGSNVDNV

SEQ ID NO: 9701 - protein, 123 aa, Artificial Sequence
  source: /note="Description of Artificial Sequence: Synthetic polypeptide"
MDTRAPTQLLGLLLLWLPGATFAAVLTQTPSPVSAAVGGTVSISCQASQSVYDNNYLSWFQQKPGQPPKLLIYGASTLASGVPSRFVGSGSGTQFTLTITDVQCDDAATYYCAGVYDDDSDNA

SEQ ID NO: 9702 - protein, 123 aa, Artificial Sequence
  source: /note="Description of Artificial Sequence: Synthetic polypeptide"
MDTRAPTQLLGLLLLWLPGAICDPVLTQTPSPVSAPVGGTVSISCQASQSVYENNYLSWFQQKPGQPPKLLIYGASTLDSGVPSRFKGSGSGTQFTLTITDVQCDDAATYYCAGVYDDDSDDA

SEQ ID NO: 9703 - protein, 122 aa, Artificial Sequence
  source: /note="Description of Artificial Sequence: Synthetic polypeptide"
MDTRAPTQLLGLLLLWLPGATFAQVLTQTPSPVSAAVGGTVTINCQASQSVDDNNWLGWYQQKRGQPPKYLIYSASTLASGVPSRFKGSGSGTQFTLTISDLECDDAATYYCAGGFSGNIFA

SEQ ID NO: 9704 - protein, 122 aa, Artificial Sequence
  source: /note="Description of Artificial Sequence: Synthetic polypeptide"
MDTRAPTQLLGLLLLWLPGATFAAVLTQTPSPVSVPVGGTVTIKCQSSQSVYNNFLSWYQQKPGQPPKLLIYQASKLASGVPDRFSGSGSGTQFTLTISGVQCDDAATYYCLGGYDDDADNA

SEQ ID NO: 9705 - protein, 122 aa, Artificial Sequence
  source: /note="Description of Artificial Sequence: Synthetic polypeptide"
MDTRAPTQLLGLLLLWLPGARCAYDMTQTPASVSAAVGGTVTIKCQASQSINNELSWYQQKSGQRPKLLIYRASTLASGVSSRFKGSGSGTEFTLTISDLECADAATYYCQQGYSLRNIDNA

SEQ ID NO: 9706 - protein, 164 aa, Artificial Sequence
  source: /note="Description of Artificial Sequence: Synthetic polypeptide"
MDTRAPTQLLGLLLLWLPGATFAQVLTQTPSPVSAAVGGTVTINCQASQSVDDNNWLGWYQQKRGQPPKYLIYSASTLASGVPSRFKGSGSGTQFTLTISDLECDDAATYYCAGGFSGNIFAFGGGTEVVVKRTVAAPSVFIFPPSDEQLKSGTASVVCLLNNF

SEQ ID NO: 9707 - protein, 217 aa, Artificial Sequence
  source: /note="Description of Artificial Sequence: Synthetic polypeptide"
DIQMTQSPSTLSASVGDRVTITCQASQSINNELSWYQQKPGKAPKLLIYRASTLASGVPSRFSGSGSGTEFTLTISSLQPDDFATYYCQQGYSLRNIDNAFGGGTKVEIKRTVAAPSVFIFPPSDEQLKSGTASVVCLLNNFYPREAKVQWKVDNALQSGNSQESVTEQDSKDSTYSLSSTLTLSKADYEKHKVYACEVTHQGLSSPVTKSFNRGEC

SEQ ID NO: 9708 - protein, 112 aa, Artificial Sequence
  source: /note="Description of Artificial Sequence: Synthetic polypeptide"
AIQMTQSPSSLSASVGDRVTITCQASQSINNELSWYQQKPGKAPKLLIYRASTLASGVPSRFSGSGSGTDFTLTISSLQPDDFATYYCQQGYSLRNIDNAFGGGTKVEIKRT

SEQ ID NO: 9709 - protein, 217 aa, Artificial Sequence
  source: /note="Description of Artificial Sequence: Synthetic polypeptide"
AIQMTQSPSSLSASVGDRVTITCQASQSINNELSWYQQKPGKAPKLLIYRASTLASGVPSRFSGSGSGTDFTLTISSLQPDDFATYYCQQGYSLRNIDNAFGGGTKVEIKRTVAAPSVFIFPPSDEQLKSGTASVVCLLNNFYPREAKVQWKVDNALQSGNSQESVTEQDSKDSTYSLSSTLTLSKADYEKHKVYACEVTHQGLSSPVTKSFNRGEC

SEQ ID NO: 9710 - protein, 235 aa, Artificial Sequence
  source: /note="Description of Artificial Sequence: Synthetic polypeptide"
MKWVTFISLLFLFSSAYSAIQMTQSPSSLSASVGDRVTITCQASQSINNELSWYQQKPGKAPKLLIYRASTLASGVPSRFSGSGSGTDFTLTISSLQPDDFATYYCQQGYSLRNIDNAFGGGTKVEIKRTVAAPSVFIFPPSDEQLKSGTASVVCLLNNFYPREAKVQWKVDNALQSGNSQESVTEQDSKDSTYSLSSTLTLSKADYEKHKVYACEVTHQGLSSPVTKSFNRGEC

SEQ ID NO: 9711 - protein, 111 aa, Artificial Sequence
  source: /note="Description of Artificial Sequence: Synthetic polypeptide"
AIQMTQSPSSLSASVGDRVTITCQASQSINNELSWYQQKPGKAPKLLIYRASTLASGVPSRFSGSGSGTDFTLTISSLQPDDFATYYCQQGYSLRNIDNAFGGGTKVEIKR

SEQ ID NO: 9712 - protein, 164 aa, Artificial Sequence
  source: /note="Description of Artificial Sequence: Synthetic polypeptide"
MDTRAPTQLLGLLLLWLPGATFAAVLTQTPSPVSVPVGGTVTIKCQSSQSVYNNFLSWYQQKPGQPPKLLIYQASKLASGVPDRFSGSGSGTQFTLTISGVQCDDAATYYCLGGYDDDADNAFGGGTEVVVKRTVAAPSVFIFPPSDEQLKSGTASVVCLLNNF

SEQ ID NO: 9713 - protein, 214 aa, Artificial Sequence
  source: /note="Description of Artificial Sequence: Synthetic polypeptide"
DIQMTQSPSSVSASVGDRVTITCRASQGISSWLAWYQQKPGKAPKLLIYGASSLESGVPSRFSGSGSGTDFTLTISSLQPEDFASYYCQQANSFPYTFGQGTKLEIKRTVAAPSVFIFPPSDEQLKSGTASVVCLLNNFYPREAKVQWKVDNALQSGNSQESVTEQDSKDSTYSLSSTLTLSKADYEKHKVYACEVTHQGLSSPVTKSFNRGEC

SEQ ID NO: 9714 - protein, 64 aa, Artificial Sequence
  source: /note="Description of Artificial Sequence: Synthetic polypeptide"
DIQMTQSPASLSASLEEIVTITCQASQDIGISLSWYQQKPGRTPQLLIQNANNLADGVPSRFSG

SEQ ID NO: 9715 - protein, 111 aa, Artificial Sequence
  source: /note="Description of Artificial Sequence: Synthetic polypeptide"
NFMLTQPHSVSGSPGKTVTISCTRSSGSIDSSYVQWYQQRPGNSPTTVIYEDDQRPSGVPDRFSGSIDSSSNSASLTISGLVTEDEADYYCQSYDSSHLVFGGGTKLTVLC

SEQ ID NO: 9716 - protein, 111 aa, Artificial Sequence
  source: /note="Description of Artificial Sequence: Synthetic polypeptide"
NFMLTQPHSVSGSPGKTVTISCTRSSGSIDSSYVQWYQQRPGNSPTTVIYEDDQRPSGVPDRFSGSIDSSSNSASLTISGLVTEDEADYYCMQYDFHHLVFGGGTKLTVLC

SEQ ID NO: 9717 - protein, 216 aa, Artificial Sequence
  source: /note="Description of Artificial Sequence: Synthetic polypeptide"
NFMLTQPHSVSGSPGKTVTISCTRSSGSIDSSYVQWYQQRPGNSPTTVIYEDDQRPSGVPDRFSGSIDSSSNSASLTISGLVTEDEADYYCQSYDFHHLVFGGGTKLTVLTVAAPSVFIFPPSDEQLKSGTASVVCLLNNFYPREAKVQWKVDNALQSGNSQESVTEQDSKDSTYSLSSTLTLSKADYEKHKVYACEVTHQGLSSPVTKSFNRGEC

SEQ ID NO: 9718 - protein, 112 aa, Artificial Sequence
  source: /note="Description of Artificial Sequence: Synthetic polypeptide"
NFMLTQPHSVSESPGKTVTISCTGSSGRIASSYVQWYQQRPGSAPTTVIYEDNQRPSGVPDRFSGSIDSSSNSASLTISGLKTEDEADYYCQSYASSSLWVFGGGTQLTVLS

SEQ ID NO: 9719 - protein, 110 aa, Artificial Sequence
  source: /note="Description of Artificial Sequence: Synthetic polypeptide"
NFMLTQPHSVSESPGKTVTISCTRSSGSIDSSYVQWYQQRPGSSPTTVIYEDDQRPSGVPDRFSGSIDSSSNSASLTISGLKTEDEADYYCQSYDFHHLVFGGGTKLTVL

SEQ ID NO: 9720 - protein, 215 aa, Artificial Sequence
  source: /note="Description of Artificial Sequence: Synthetic polypeptide"
NFMLTQPHSVSESPGKTVTISCTRSSGSIDSSYVQWYQQRPGSSPTTVIYEDDQRPSGVPDRFSGSIDSSSNSASLTISGLKTEDEADYYCQSYDFHHLVFGGGTKLTVLQPKAAPSVTLFPPSSEELQANKATLVCLISDFYPGAVTVAWKADSSPVKAGVETTTPSKQSNNKYAASSYLSLTPEQWKSHRSYSCQVTHEGSTVEKTVAPTECS

SEQ ID NO: 9721 - protein, 110 aa, Artificial Sequence
  source: /note="Description of Artificial Sequence: Synthetic polypeptide"
NFMLTQPHSVSESPGKTVTISCTRSSGSIDSSYVQWYQQRPGSSPTTVIYEDDQRPSGVPDRFSGSIDSSSNSASLTISGLKTEDEADYYCMQYDFHHLVFGGGTKLTVL

SEQ ID NO: 9722 - protein, 111 aa, Artificial Sequence
  source: /note="Description of Artificial Sequence: Synthetic polypeptide"
NFMLTQPHSVSGSPGKTVTISCTRSSGSIDSSYVQWYQQRPGNSPTTVIYEDDQRPSGVPDRFSGSIDSSSNSASLTISGLVTEDEADYYCMQYDSSHLVFGGGTKLTVLC

SEQ ID NO: 9723 - protein, 111 aa, Artificial Sequence
  source: /note="Description of Artificial Sequence: Synthetic polypeptide"
NFMLTQPHSVSGSPGKTVTISCTRSSGSIDSSYVQWYQQRPGNSPTTVIYEDDQRPSGVPDRFSGSIDSSSNSASLTISGLVTEDEADYYCQSYDFHHLVFGGGTKLTVLC

SEQ ID NO: 9724 - protein, 111 aa, Artificial Sequence; identical to SEQ ID NO: 9723
  source: /note="Description of Artificial Sequence: Synthetic polypeptide"

SEQ ID NO: 9725 - protein, 215 aa, Artificial Sequence
  source: /note="Description of Artificial Sequence: Synthetic polypeptide"
DIQMTQSPSSLSASVGDRVTITCKASQHVITHVTWYQQKPGKAPKLLIYGSTSYSYSGVPSRFSGSGSGTDFTLTISSLQPEDFATYYCQQFYEYPLTFGGGTKVEIKRTVAAPSVFIFPPSDEQLKSGTASVVCLLNNFYPREAKVQWKVDNALQSGNSQESVTEQDSKDSTYSLSSTLTLSKADYEKHKVYACEVTHQGLSSPVTKSFNRGEC

SEQ ID NO: 9726 - protein, 108 aa, Artificial Sequence
  source: /note="Description of Artificial Sequence: Synthetic polypeptide"
DIQMTQSPSSLSASVGDRVTITCQASQDIGISLSWYQQKPGKAPKLLIYNANNLADGVPSRFSGSGSGTDFTLTISSLQPEDFATYYTFGQGTKLEIKRCLQHNSAPY

SEQ ID NO: 9727 - protein, 214 aa, Artificial Sequence
  source: /note="Description of Artificial Sequence: Synthetic polypeptide"
DIQMTQSPSSVSASVGDRVTITCRASQGISSWLAWYQQKPGKAPKLLIYGASNLESGVPSRFSGSGSGTDFTLTISSLQPEDFANYYCQQANSFPWTFGQGTKVEIKRTVAAPSVFIFPPSDEQLKSGTASVVCLLNNFYPREAKVQWKVDNALQSGNSQESVTEQDSKDSTYSLSSTLTLSKADYEKHKVYACEVTHQGLSSPVTKSFNRGEC

SEQ ID NO: 9728 - protein, 214 aa, Artificial Sequence
  source: /note="Description of Artificial Sequence: Synthetic polypeptide"
DIQMTQSPSSLSASVGDRVTITCRASQGISSWLAWYQQKPEKAPKSLIYAASSLQSGVPSRFSGSGSGTDFTLTISSLQPEDFATYYCQQYNIYPYTFGQGTKLEIKRTVAAPSVFIFPPSDEQLKSGTASVVCLLNNFYPREAKVQWKVDNALQSGNSQESVTEQDSKDSTYSLSSTLTLSKADYEKHKVYACEVTHQGLSSPVTKSFNRGEC

SEQ ID NO: 9729 - protein, 213 aa, Artificial Sequence
  source: /note="Description of Artificial Sequence: Synthetic polypeptide"
DFVMTQSPAFLSVTPGEKVTITCSAQSSVNYIHWYQQKPDQAPKKLIYDTSKLASGVPSRFSGSGSGTDYTFTISSLEAEDAATYYCQQWTTNPLTFGQGTKVEIKRTVAAPSVFIFPPSDEQLKSGTASVVCLLNNFYPREAKVQWKVDNALQSGNSQESVTEQDSKDSTYSLSSTLTLSKADYEKHKVYACEVTHQGLSSPVTKSFNRGEC

SEQ ID NO: 9730 - protein, 214 aa, Artificial Sequence
  source: /note="Description of Artificial Sequence: Synthetic polypeptide"
EIVLTQSPATLSLSPGERATLSCQASQSISNFLHWYQQRPGQAPRLLIRYRSQSISGIPARFSGSGSGTDFTLTISSLEPEDFAVYYCQQSGSWPLTFGGGTKVEIKRTVAAPSVFIFPPSDEQLKSGTASVVCLLNNFYPREAKVQWKVDNALQSGNSQESVTEQDSKDSTYSLSSTLTLSKADYEKHKVYACEVTHQGLSSPVTKSFNRGEC

SEQ ID NO: 9731 - protein, 215 aa, Artificial Sequence
  source: /note="Description of Artificial Sequence: Synthetic polypeptide"
EIVLTQSPATLSLSPGERATLSCRASQSVSSYLAWYQQKPGQAPRLLIYDASNRATGIPARFSGSGSGTDFTLTISSLEPEDFAVYYCQQRSNWPPFTFGPGTKVDIKRTVAAPSVFIFPPSDEQLKSGTASVVCLLNNFYPREAKVQWKVDNALQSGNSQESVTEQDSKDSTYSLSSTLTLSKADYEKHKVYACEVTHQGLSSPVTKSFNRGEC

SEQ ID NO: 9732 - protein, 214 aa, Artificial Sequence
  source: /note="Description of Artificial Sequence: Synthetic polypeptide"
DIQMTQSPSSVSASIGDRVTITCRASQGIDNWLGWYQQKPGKAPKLLIYDASNLDTGVPSRFSGSGSGTYFTLTISSLQAEDFAVYFCQQAKAFPPTFGGGTKVDIKGTVAAPSVFIFPPSDEQLKSGTASVVCLLNNFYPREAKVQWKVDNALQSGNSQESVTEQDSKDSTYSLSSTLTLSKADYEKHKVYACEVTHQGLSSPVTKSFNRGEC

SEQ ID NO: 9733 - protein, 214 aa, Artificial Sequence
  source: /note="Description of Artificial Sequence: Synthetic polypeptide"
EIVLTQSPVTLSLSPGERATLSCRASQSVSSYLAWYQQKPGQAPRLLIYDASNRATGIPARFSGSGSGTDFTLTISSLEPEDFAVYYCQQRSNWMYTFGQGTKLEIKRTVAAPSVFIFPPSDEQLKSGTASVVCLLNNFYPREAKVQWKVDNALQSGNSQESVTEQDSKDSTYSLSSTLTLSKADYEKHKVYACEVTHQGLSSPVTKSFNRGEC

SEQ ID NO: 9734 - protein, 214 aa, Artificial Sequence
  source: /note="Description of Artificial Sequence: Synthetic polypeptide"
DIQMTQSPSSLSASVGDRVTITCRASENIYSYLAWYQQKPGKAPKLLIYNAKTLAEGVPSRFSGSGSGTDFTLTISSLQPEDFATYYCQHHYGTPRTFGGGTKVEIKRTVAAPSVFIFPPSDEQLKSGTASVVCLLNNFYPREAKVQWKVDNALQSGNSQESVTEQDSKDSTYSLSSTLTLSKADYEKHKVYACEVTHQGLSSPVTKSFNRGEC

SEQ ID NO: 9735 - protein, 214 aa, Artificial Sequence
  source: /note="Description of Artificial Sequence: Synthetic polypeptide"
DIQMTQTTSSLSASLGDRVTISCSSSQDISNYLNWYQQKPDGTVKVLIYYTSTLHLGVPSRFSGSGSGTDYSLTISNLELEDIATYYCQQYYNLPWTFGQGTKVEIKRTVAAPSVFIFPPSDEQLKSGTASVVCLLNNFYPREAKVQWKVDNALQSGNSQESVTEQDSKDSTYSLSSTLTLSKADYEKHKVYACEVTHQGLSSPVTKSFNRGEC

SEQ ID NO: 9736 - protein, 214 aa, Artificial Sequence
  source: /note="Description of Artificial Sequence: Synthetic polypeptide"
DIQMTQSPSSLSASVGDRVTITCSSSQDISNYLNWYQQKPGKAPKLLIYYTSTLHLGVPSRFSGSGSGTDFTFTISSLEAEDAATYYCQQYYNLPWTFGQGTKVEIKRTVAAPSVFIFPPSDEQLKSGTASVVCLLNNFYPREAKVQWKVDNALQSGNSQESVTEQDSKDSTYSLSSTLTLSKADYEKHKVYACEVTHQGLSSPVTKSFNRGEC

SEQ ID NO: 9737 - protein, 214 aa, Artificial Sequence
  source: /note="Description of Artificial Sequence: Synthetic polypeptide"
DIQMTQSPSSLSASVGDRVTITCSSSQDISNYLNWYQQKPGKAPKLLIYYTSTLHLGIPPRFSGSGYGTDFTLTINNIESEDAAYYFCQQYYNLPWTFGQGTKVEIKRTVAAPSVFIFPPSDEQLKSGTASVVCLLNNFYPREAKVQWKVDNALQSGNSQESVTEQDSKDSTYSLSSTLTLSKADYEKHKVYACEVTHQGLSSPVTKSFNRGEC

SEQ ID NO: 9738 - protein, 214 aa, Artificial Sequence
  source: /note="Description of Artificial Sequence: Synthetic polypeptide"
EIVLTQSPATLPVTLGQPASISCSSSQDISNYLNWYQQKPGQAPRLLIYYTSTLHLGVPSRFSGSGSGTDFTFTISSLEAEDAATYYCQQYYNLPWTFGQGTKVEIKRTVAAPSVFIFPPSDEQLKSGTASVVCLLNNFYPREAKVQWKVDNALQSGNSQESVTEQDSKDSTYSLSSTLTLSKADYEKHKVYACEVTHQGLSSPVTKSFNRGEC

SEQ ID NO: 9739 - protein, 214 aa, Artificial Sequence
  source: /note="Description of Artificial Sequence: Synthetic polypeptide"
DIQMTQSPSSLSASVGDRVTITCSSSQDISNYLNWYLQKPGQSPQLLIYYTSTLHLGIPDRFSGSGSGTDFTLTISRLEPEDFAVYYCQQYYNLPWTFGQGTKVEIKRTVAAPSVFIFPPSDEQLKSGTASVVCLLNNFYPREAKVQWKVDNALQSGNSQESVTEQDSKDSTYSLSSTLTLSKADYEKHKVYACEVTHQGLSSPVTKSFNRGEC

SEQ ID NO: 9740 - protein, 214 aa, Artificial Sequence
  source: /note="Description of Artificial Sequence: Synthetic polypeptide"
EIVLTQSPATLSLSPGERATLSCSSSQDISNYLNWYQQKPGKAPKLLIYYTSTLHLGVPSRFSGSGSGTDFTFTISSLEAEDAATYYCQQYYNLPWTFGQGTKVEIKRTVAAPSVFIFPPSDEQLKSGTASVVCLLNNFYPREAKVQWKVDNALQSGNSQESVTEQDSKDSTYSLSSTLTLSKADYEKHKVYACEVTHQGLSSPVTKSFNRGEC

SEQ ID NO: 9741 - protein, 214 aa, Artificial Sequence
  source: /note="Description of Artificial Sequence: Synthetic polypeptide"
DIVMTQTPLSLPVTPGEPASISCSSSQDISNYLNWYQQKPGQAPRLLIYYTSTLHLGVPSRFSGSGSGTEFTLTISSLQPDDFATYYCQQYYNLPWTFGQGTKVEIKRTVAAPSVFIFPPSDEQLKSGTASVVCLLNNFYPREAKVQWKVDNALQSGNSQESVTEQDSKDSTYSLSSTLTLSKADYEKHKVYACEVTHQGLSSPVTKSFNRGEC

SEQ ID NO: 9742 - protein, 214 aa, Artificial Sequence
  source: /note="Description of Artificial Sequence: Synthetic polypeptide"
DIQMTQSPSSLSASVGDRVTITCSSSQDISNYLNWYLQKPGQSPQLLIYYTSTLHLGVPSRFSGSGSGTEFTLTISSLQPDDFATYYCQQYYNLPWTFGQGTKVEIKRTVAAPSVFIFPPSDEQLKSGTASVVCLLNNFYPREAKVQWKVDNALQSGNSQESVTEQDSKDSTYSLSSTLTLSKADYEKHKVYACEVTHQGLSSPVTKSFNRGEC

SEQ ID NO: 9743 - protein, 214 aa, Artificial Sequence
  source: /note="Description of Artificial Sequence: Synthetic polypeptide"
EIVLTQSPDFQSVTPKEKVTITCSSSQDISNYLNWYQQKPGQAPRLLIYYTSTLHLGVPSRFSGSGSGTDFTLTISSLQPEDFATYYCQQYYNLPWTFGQGTKVEIKRTVAAPSVFIFPPSDEQLKSGTASVVCLLNNFYPREAKVQWKVDNALQSGNSQESVTEQDSKDSTYSLSSTLTLSKADYEKHKVYACEVTHQGLSSPVTKSFNRGEC

SEQ ID NO: 9744 - protein, 214 aa, Artificial Sequence
  source: /note="Description of Artificial Sequence: Synthetic polypeptide"
DIQMTQSPSSLSASVGDRVTITCSSSQDISNYLNWYQQKPGKAPKLLIYYTSTLHLGVPSRFSGSGSGTDFTFTISSLQPEDIATYYCQQYYNLPWTFGQGTKVEIKRTVAAPSVFIFPPSDEQLKSGTASVVCLLNNFYPREAKVQWKVDNALQSGNSQESVTEQDSKDSTYSLSSTLTLSKADYEKHKVYACEVTHQGLSSPVTKSFNRGEC

SEQ ID NO: 9745 - protein, 214 aa, Artificial Sequence
  source: /note="Description of Artificial Sequence: Synthetic polypeptide"
AIQLTQSPSSLSASVGDRVTITCSSSQDISNYLNWYQQKPGQAPRLLIYYTSTLHLGVPSRFSGSGSGTDFTLTISSLQPEDFATYYCQQYYNLPWTFGQGTKVEIKRTVAAPSVFIFPPSDEQLKSGTASVVCLLNNFYPREAKVQWKVDNALQSGNSQESVTEQDSKDSTYSLSSTLTLSKADYEKHKVYACEVTHQGLSSPVTKSFNRGEC

SEQ ID NO: 9746 - protein, 214 aa, Artificial Sequence
  source: /note="Description of Artificial Sequence: Synthetic polypeptide"
EIVLTQSPDFQSVTPKEKVTITCSSSQDISNYLNWYQQKPGQAPRLLIYYTSTLHLGVPSRFSGSGSGTDFTFTISSLEAEDAATYYCQQYYNLPWTFGQGTKVEIKRTVAAPSVFIFPPSDEQLKSGTASVVCLLNNFYPREAKVQWKVDNALQSGNSQESVTEQDSKDSTYSLSSTLTLSKADYEKHKVYACEVTHQGLSSPVTKSFNRGEC

SEQ ID NO: 9747 - protein, 214 aa, Artificial Sequence
  source: /note="Description of Artificial Sequence: Synthetic polypeptide"
DIVMTQTPLSLPVTPGEPASISCSSSQDISNYLNWYQQKPGQAPRLLIYYTSTLHLGIPDRFSGSGSGTDFTLTISRLEPEDFAVYYCQQYYNLPWTFGQGTKVEIKRTVAAPSVFIFPPSDEQLKSGTASVVCLLNNFYPREAKVQWKVDNALQSGNSQESVTEQDSKDSTYSLSSTLTLSKADYEKHKVYACEVTHQGLSSPVTKSFNRGEC

SEQ ID NO: 9748 - protein, 215 aa, Artificial Sequence
  source: /note="Description of Artificial Sequence: Synthetic polypeptide"
DIQMTQSPATLSLSPGERATLSCRASQSVSSYLAWYQQKPGQAPRLLIYDASNRATGIPARFSGSGSGTDFTLTISSLEPEDFAVYYCQQRSNWPMYTFGQGTKLEIKRTVAAPSVFIFPPSDEQLKSGTASVVCLLNNFYPREAKVQWKVDNALQSGNSQESVTEQDSKDSTYSLSSTLTLSKADYEKHKVYACEVTHQGLSSPVTKSFNRGEC

SEQ ID NO: 9749 - protein, 214 aa, Artificial Sequence
  source: /note="Description of Artificial Sequence: Synthetic polypeptide"
DIQMTQSPGTLSLSPGERATLSCRASQSVSSYLAWYQQKPGQAPRLLIYDASNRATGIPARFSGSGSGTEFTLTISSLQSEDFAVYYCQQYDKWPLTFGGGTKVEIKRTVAAPSVFIFPPSDEQLKSGTASVVCLLNNFYPREAKVQWKVDNALQSGNSQESVTEQDSKDSTYSLSSTLTLSKADYEKHKVYACEVTHQGLSSPVTKSFNRGEC

SEQ ID NO: 9750 - protein, 219 aa, Artificial Sequence
  source: /note="Description of Artificial Sequence: Synthetic polypeptide"
DIVMTQTPLSLSVTPGQPASISCRSSKSLLHSNGNTYLYWFLQKPGQSPQFLIYRMSNLASGVPDRFSGSGSGTDFTLKISRVEAEDVGVYYCMQHLEYPYTFGGGTKVEIKRTVAAPSVFIFPPSDEQLKSGTASVVCLLNNFYPREAKVQWKVDNALQSGNSQESVTEQDSKDSTYSLSSTLTLSKADYEKHKVYACEVTHQGLSSPVTKSFNRGEC

SEQ ID NO: 9751 - protein, 214 aa, Artificial Sequence
  source: /note="Description of Artificial Sequence: Synthetic polypeptide"
DIQLTQSPSSLSASVGDRVTITCRASENIYSNLAWYRQKPGKAPKLLVFAASNLADGVPSRFSGSGSGTDYTFTISSLQPEDIATYYCQHFWTTPWAFGGGTKLQIKRTVAAPSVFIFPPSDEQLKSGTASVVCLLNNFYPREAKVQWKVDNALQSGNSQESVTEQDSKDSTYSLSSTLTLSKADYEKHKVYACEVTHQGLSSPVTKSFNRGEC

SEQ ID NO: 9752 - protein, 214 aa, Artificial Sequence
  source: /note="Description of Artificial Sequence: Synthetic polypeptide"
DIQMTQTTSSLSASLGDRVTISCRASQDISKYLNWYQQQPDGTIKLLIYYTSRLHSGVPSRFSGRGSGTDYSLTISNVEQEDIATYFCQQGSTLPYTFGGGTKLEIKRTVAAPSVFIFPPSDEQLKSGTASVVCLLNNFYPREAKVQWKVDNALQSGNSQESVTEQDSKDSTYSLSSTLTLSKADYEKHKVYACEVTHQGLSSPVTKSFNRGEC

SEQ ID NO: 9753 - protein, 214 aa, Artificial Sequence
  source: /note="Description of Artificial Sequence: Synthetic polypeptide"
DIQMTQTTSSLSASLGDRVTISCRASQDINKYLNWYQQQPDGTVKLLIYYTSRLHSGVPSRFSGRGSGTDYSLTISNLEQEDIATYFCQQGSTLPYTFGGGTKLEIKRTVAAPSVFIFPPSDEQLKSGTASVVCLLNNFYPREAKVQWKVDNALQSGNSQESVTEQDSKDSTYSLSSTLTLSKADYEKHKVYACEVTHQGLSSPVTKSFNRGEC

SEQ ID NO: 9754 - protein, 214 aa, Artificial Sequence
  source: /note="Description of Artificial Sequence: Synthetic polypeptide"
DIQMTQTTSSLSASLGDRVTFSCRASQDISKYLNWYQQQPDGTIKLLIYYTSRLHSGVPSRFSGRGSGTDYSLTITNLEQEDIATYFCQQGSALPYTFGGGTKLEIKRTVAAPSVFIFPPSDEQLKSGTASVVCLLNNFYPREAKVQWKVDNALQSGNSQESVTEQDSKDSTYSLSSTLTLSKADYEKHKVYACEVTHQGLSSPVTKSFNRGEC

SEQ ID NO: 9755 - protein, 214 aa, Artificial Sequence
  source: /note="Description of Artificial Sequence: Synthetic polypeptide"
DIQMTQTTSSLSASLGDRVTISCRASQDISKYLNWYQQQPDGTVKLLIYYTSRLHSGVPSRFSGRGSGTDYSLTISNLEQEDIATYFCQQGSTLPYTFGGGTKLEIKRTVAAPSVFIFPPSDEQLKSGTASVVCLLNNFYPREAKVQWKVDNALQSGNSQESVTEQDSKDSTYSLSSTLTLSKADYEKHKVYACEVTHQGLSSPVTKSFNRGEC

SEQ ID NO: 9756 - protein, 214 aa, Artificial Sequence
  source: /note="Description of Artificial Sequence: Synthetic polypeptide"
DIQMTQTTSSLSASLGDRVTISCRASQDISKYLNWYQQQPDGTIKLLIYYTSRLHSGVPSRFSGRGSGTDYSLTITNLEQEDIATYFCQQGSALPYTFGGGTKLEIKRTVAAPSVFIFPPSDEQLKSGTASVVCLLNNFYPREAKVQWKVDNALQSGNSQESVTEQDSKDSTYSLSSTLTLSKADYEKHKVYACEVTHQGLSSPVTKSFNRGEC

SEQ ID NO: 9757 - protein, 213 aa, Artificial Sequence
  source: /note="Description of Artificial Sequence: Synthetic polypeptide"
DIELTQSPAIMSASPGEKVTMTCSASSSVSYMHWYQQKSGTSPKRWIYDTSKLASGVPGRFSGSGSGNSYSLTISSVEAEDDATYYCQQWSKHPLTFGSGTKVEIKRTVAAPSVFIFPPSDEQLKSGTASVVCLLNNFYPREAKVQWKVDNALQSGNSQESVTEQDSKDSTYSLSSTLTLSKADYEKHKVYACEVTHQGLSSPVTKSFNRGEC

SEQ ID NO: 9758 - protein, 215 aa, Artificial Sequence
  source: /note="Description of Artificial Sequence: Synthetic polypeptide"
DIQMTQSPSSLSASVGDRVTITCSVSSSVSSIYLHWYQQKPGKAPKLLIYSTSNLASGVPSRFSGSGSGTDFTLTISSLQPEDFATYYCQVYSGYPLTFGGGTKVEIKRTVAAPSVFIFPPSDEQLKSGTASVVCLLNNFYPREAKVQWKVDNALQSGNSQESVTEQDSKDSTYSLSSTLTLSKADYEKHKVYACEVTHQGLSSPVTKSFNRGEC

SEQ ID NO: 9759 - protein, 220 aa, Artificial Sequence
  source: /note="Description of Artificial Sequence: Synthetic polypeptide"
DIQMTQSPSSLSASVGDRVTITCKSSQSLLYTSSQKNYLAWYQQKPGKAPKLLIYWASTRESGVPSRFSGSGSGTDFTLTISSLQPEDFATYYCQQYYAYPWTFGQGTKVEIKRTVAAPSVFIFPPSDEQLKSGTASVVCLLNNFYPREAKVQWKVDNALQSGNSQESVTEQDSKDSTYSLSSTLTLSKADYEKHKVYACEVTHQGLSSPVTKSFNRGEC

SEQ ID NO: 9760 - protein, 217 aa, Artificial Sequence
  source: /note="Description of Artificial Sequence: Synthetic polypeptide"
LEIVLTQSPATLSLSPGERATLSCRASQSVSSYLAWYQQKPGQAPRLLIYDASNRATGIPARFSGSGSGTDFTLTISSLEPEDFAVYYCQQRSNWPPSYTFGQGTKLEIKRTVAAPSVFIFPPSDEQLKSGTASVVCLLNNFYPREAKVQWKVDNALQSGNSQESVTEQDSKDSTYSLSSTLTLSKADYEKHKLYACEVTHQGLSSPVTKSFNRGEC

SEQ ID NO: 9761 - protein, 216 aa, Artificial Sequence
  source: /note="Description of Artificial Sequence: Synthetic polypeptide"
LETTLTQSPGTLSLSPGERATLSCRASQSIINSHLAWYQQKPGQAPRLLIYGASSRATGIPDRFSGGGSGTDFTLTITRLETEDFALYFCQQYGTSPLTFGGGTRVETKRTVAAPSVFIFPPSDEQLKSGTASVVCLLNNFYPREAKVQWKVDNALQSGNSQESVTEQDSKDSTYSLSSTLTLSKADYEKHKVYACEVTHQGLSSPVTKSFNRGEC

SEQ ID NO: 9762 - protein, 215 aa, Artificial Sequence
  source: /note="Description of Artificial Sequence: Synthetic polypeptide"
LDIQLTQSPSSVSASVGDRVTITCRASQVISSWLAWYQQKPGKAPKLLISTASSLQSGVPPRFSGSGSGTDFTLTITSLQPEDFATYYCQQANSFPLTFGQGTKVEIKRTVAAPSVFIFPPSDEQLKSGTASVVCLLNNFYPREAKVQWKVDNALQSGNSQESVTEQDSKDSTYSLSSTLTLSKADYEKHKVYACEVTHQGLSSPVTKSFNRGEC

SEQ ID NO: 9763 - protein, 220 aa, Artificial Sequence
  source: /note="Description of Artificial Sequence: Synthetic polypeptide"
LEIVMTQSPLSLPVTPGEPASISCRSSQSLLHSNGNNYLDWYLQKPGQSPQLLIYLGSNRASGVPDRFSGSGSGTDFTLKITRVEAEDVGVYYCMQALQTPLTFGGGTKMEIKRTVAAPSVFIFPPSDEQLKSGTASVVCLLNNFYPREAKVQWKVDNALQSGNSQESVTEQDSKDSTYSLSSTLTLSKADYEKHKVYACEVTHQGLSSPVTKSFNRGEC

SEQ ID NO: 9764 - protein, 220 aa, Artificial Sequence
  source: /note="Description of Artificial Sequence: Synthetic polypeptide"
LDVVMTQSPLSLPVTPGEPASISCRSSQSLLHSDGNNYLDWYLQKPGQSPQLLIYLGSNRASGVPDRFSGSGSGTDFTLKISRVEPEDVGVYYCMQALHIPLTFGQGTRLEIKRTVAAPSVFIFPPSDEQLKSGTASVVCLLNNFYPREAKVQWKVDNALQSGNSQESVTEQDSRDSTYSLSSTLTLSKADYEKHKVYACEVTHQGLSSPVTKSFNRGEC

SEQ ID NO: 9765 - protein, 214 aa, Artificial Sequence
  source: /note="Description of Artificial Sequence: Synthetic polypeptide"
DIQMTQSPSSLSASVGDRVTITCRSSQRIMTYLNWYQQKPGKAPKLLIFVASHSQSGVPSRFRGSGSETDFTLTISGLQPEDSATYYCQQSFWTPLTFGGGTKVEIKRTVAAPSVFIFPPSDEQLKSGTASVVCLLNNFYPREAKVQWKVDNALQSGNSQESVTEQDSKDSTYSLSSTLTLSKADYEKHKVYACEVTHQGLSSPVTKSFNRGEC

SEQ ID NO: 9766 - protein, 115 aa, Artificial Sequence
  source: /note="Description of Artificial Sequence: Synthetic polypeptide"
DIVMTQTPLSLPVTPGEPASISCRSSKSLLHSNGITYLYWYLQKPGQSPQLLIYQMSNLVSGVPDRFSGSGSGTDFTLKISRVEAEDVGVYYCAQNLELPYTFGGGTKVEIKRTV

SEQ ID NO: 9767 - protein, 219 aa, Artificial Sequence; identical to SEQ ID NO: 9447
  source: /note="Description of Artificial Sequence: Synthetic polypeptide"

SEQ ID NO: 9768 - protein, 213 aa, Artificial Sequence
  source: /note="Description of Artificial Sequence: Synthetic polypeptide"
DIQLTQSPSSLSASVGDRVTMTCRASSSVSYIHWFQQKPGKAPKPWIYATSNLASGVPVRFSGSGSGTDYTFTISSLQPEDIATYYCQQWTSNPPTFGGGTKLEIKRTVAAPSVFIFPPSDEQLKSGTASVVCLLNNFYPREAKVQWKVDNALQSGNSQESVTEQDSKDSTYSLSSTLTLSKADYEKHKVYACEVTHQGLSSPVTKSFNRGEC

SEQ ID NO: 9769 - protein, 218 aa, Artificial Sequence
  source: /note="Description of Artificial Sequence: Synthetic polypeptide"
IVMTQTPLSLPVTPGEPASISCRSSKSLLHSNGITYLYWYLQKPGQSPQLLIYQMSNLVSGVPDRFSGSGSGTDFTLKISRVEAEDVGVYYCAQNLELPYTFGGGTKVEIKRTVAAPSVFIFPPSDEQLKSGTASVVCLLNNFYPREAKVQWKVDNALQSGNSQESVTEQDSKDSTYSLSSTLTLSKADYEKHKVYACEVTHQGLSSPVTKSFNRGEC

SEQ ID NO: 9770 - protein, 213 aa, Artificial Sequence; identical to SEQ ID NO: 9473
  source: /note="Description of Artificial Sequence: Synthetic polypeptide"

SEQ ID NO: 9771 - protein, 213 aa, Artificial Sequence
  source: /note="Description of Artificial Sequence: Synthetic polypeptide"
EIVLTQSPGTLSLSPGERATLSCRASSSVPYIHWYQQKPGQAPRLLIYATSALASGIPDRFSGSGSGTDFTLTISRLEPEDFAVYYCQQWLSNPPTFGQGTKLEIKRTVAAPSVFIFPPSDEQLKSGTASVVCLLNNFYPREAKVQWKVDNALQSGNSQESVTEQDSKDSTYSLSSTLTLSKADYEKHKVYACEVTHQGLSSPVTKSFNRGEC

SEQ ID NO: 9772 - protein, 217 aa, Artificial Sequence
  source: /note="Description of Artificial Sequence: Synthetic polypeptide"
DIALTQPASVSGSPGQSITISCTGTSSDIGGYNSVSWYQQHPGKAPKLMIYGVNNRPSGVSNRFSGSKSGNTASLTISGLQAEDEADYYCSSYDIESATPVFGGGTKLTVLGQPKAAPSVTLFPPSSEELQANKATLVCLISDFYPGAVTVAWKGDSSPVKAGVETTTPSKQSNNKYAASSYLSLTPEQWKSHRSYSCQVTHEGSTVEKTVAPTECS

SEQ ID NO: 9773 - protein, 214 aa, Artificial Sequence
  source: /note="Description of Artificial Sequence: Synthetic polypeptide"
EIVLTQSPATLSLSPGERATLSCRASQSVSRYLAWYQQKPGQAPRLLIYDASNRATGIPARFSGSGSGTDFTLTISSLEPEDFAVYYCQQRSNWPRTFGQGTKVEIKRTVAAPSVFIFPPSDEQLKSGTASVVCLLNNFYPREAKVQWKVDNALQSGNSQESVTEQDSKDSTYSLSSTLTLSKADYEKHKVYACEVTHQGLSSPVTKSFNRGEC

SEQ ID NO: 9774 - protein, 219 aa, Artificial Sequence
  source: /note="Description of Artificial Sequence: Synthetic polypeptide"
DIVMTQSPLSVPVTPGEPVSISCRSSKSLLHSNGNTYLYWFLQRPGQSPQLLIYRMSNLVSGVPDRFSGSGSGTAFTLRISRVEAEDVGVYYCLQHLEYPFTFGPGTKLELKRTVAAPSVFIFPPSDEQLKSGTASVVCLLNNFYPREAKVQWKVDNALQSGNSQESVTEQDSKDSTYSLSSTLTLSKADYEKHKVYACEVTHQGLSSPVTKSFNRGEC

SEQ ID NO: 9775 - protein, 215 aa, Artificial Sequence
  source: /note="Description of Artificial Sequence: Synthetic polypeptide"
DIQLTQSPSSLSASVGDRVTMTCSASSSVSSSYLYWYQQKPGKAPKLWIYSTSNLASGVPARFSGSGSGTDFTLTISSLQPEDSASYFCHQWNRYPYTFGGGTRLEIKRTVAAPSVFIFPPSDEQLKSGTASVVCLLNNFYPREAKVQWKVDNALQSGNSQESVTEQDSKDSTYSLSSTLTLSKADYEKHKVYACEVTHQGLSSPVTKSFNRGEC

SEQ ID NO: 9776 - protein, 213 aa, Artificial Sequence
  source: /note="Description of Artificial Sequence: Synthetic polypeptide"
QVVLTQSPVIMSASPGEKVTMTCSASSSISYMYWYQQKPGTSPKRWIYDTSKLASGVPARFSGSGSGTSYSLTISNMEAGDAATYYCHQRDSYPWTFGGGTNLEIKRTVAAPSVFIFPPSDEQLKSGTASVVCLLNNFYPREAKVQWKVDNALQSGNSQESVTEQDSKDSTYSLSSTLTLSKADYEKHKVYACEVTHQGLSSPVTKSFNRGEC

SEQ ID NO: 9777 - protein, 219 aa, Artificial Sequence; identical to SEQ ID NO: 9774
  source: /note="Description of Artificial Sequence: Synthetic polypeptide"

SEQ ID NO: 9778 - protein, 219 aa, Artificial Sequence
  source: /note="Description of Artificial Sequence: Synthetic polypeptide"
DVVMTQSPLSLPVTLGQPASISCRSSQIIIHSDGNTYLEWFQQRPGQSPRRLIYKVSNRFSGVPDRFSGSGSGTDFTLKISRVEAEDVGVYYCFQGSHVPHTFGQGTKVEIKRTVAAPSVFIFPPSDEQLKSGTASVVCLLNNFYPREAKVQWKVDNALQSGNSQESVTEQDSKDSTYSLSSTLTLSKADYEKHKVYACEVTHQGLSSPVTKSFNRGEC

SEQ ID NO: 9779 - protein, 214 aa, Artificial Sequence
  source: /note="Description of Artificial Sequence: Synthetic polypeptide"
DIQMTQTTSSLSASLGDRVTISCRASQDISNYLNWYQQKPDGTVKLLIYYTSRLHSGVPSRFSGSGSGTDYSLTISNLEQEDIATYFCQQGNTLPWTFGGGTKLEIKRADAAPTVSIFPPSSEQLTSGGASVVCFLNNFYPKDINVKWKIDGSERQNGVLNSWTDQDSKDSTYSMSSTLTLTKDEYERHNSYTCEATHKTSTSPIVKSFNRNEC

SEQ ID NO: 9780 - protein, 214 aa, Artificial Sequence; identical to SEQ ID NO: 6290
  source: /note="Description of Artificial Sequence: Synthetic polypeptide"

SEQ ID NO: 9781 - protein, 214 aa, Artificial Sequence; identical to SEQ ID NO: 6291
  source: /note="Description of Artificial Sequence: Synthetic polypeptide"

SEQ ID NO: 9782 - protein, 238 aa, Artificial Sequence; identical to SEQ ID NO: 4096
  source: /note="Description of Artificial Sequence: Synthetic polypeptide"

SEQ ID NO: 9783 - protein, 238 aa, Artificial Sequence; identical to SEQ ID NO: 4097
  source: /note="Description of Artificial Sequence: Synthetic polypeptide"

SEQ ID NO: 9784 - protein, 238 aa, Artificial Sequence; identical to SEQ ID NO: 4098
  source: /note="Description of Artificial Sequence: Synthetic polypeptide"

SEQ ID NO: 9785 - protein, 144 aa, Artificial Sequence; identical to SEQ ID NO: 4099
  source: /note="Description of Artificial Sequence: Synthetic polypeptide"

SEQ ID NO: 9786 - protein, 116 aa, Artificial Sequence; identical to SEQ ID NO: 4100
  source: /note="Description of Artificial Sequence: Synthetic polypeptide"

SEQ ID NO: 9787 - protein, 215 aa, Artificial Sequence
  source: /note="Description of Artificial Sequence: Synthetic polypeptide"
DIVLTQSPATLSLSPGERATLSCRASQSVRSNYLAWYQQKPGQAPRLLIYGASSRATGVPARFSGSGSGTDFTLTISSLEPEDFAVYYCQQYSNFPITFGQGTKVEIKRTVAAPSVFIFPPSDEQLKSGTASVVCLLNNFYPREAKVQWKVDNALQSGNSQESVTEQDSKDSTYSLSSTLTLSKADYEKHKVYACEVTHQGLSSPVTKSFNRGEC

SEQ ID NO: 9788 - protein, 215 aa, Artificial Sequence
  source: /note="Description of Artificial Sequence: Synthetic polypeptide"
QAVVTQEPSLTVSPGGTVTLTCRSSTGAVTTSNYANWFQQKPGQAPRTLIGGTNNRAPGVPARFSGSLLGGKAALTLSGAQPEDEAEYYCALWYSNHWVFGGGTKLTVLGQPKAAPSVTLFPPSSEELQANKATLVCLVSDFYPGAVTVAWKADGSPVKVGVETTKPSKQSNNKYAASSYLSLTPEQWKSHRSYSCRVTHEGSTVEKTVAPAECS

SEQ ID NO: 9789 - protein, 214 aa, Artificial Sequence
  source: /note="Description of Artificial Sequence: Synthetic polypeptide"
DIQMTQSPSSLSASVGDRVTITCRASQYFSSYLAWYQQKPGKAPKLLIYGASSRASGVPSRFSGSGSGTDFTLTISSLQPEDFATYYCQQYLGSPPTFGQGTKVEIKRTVAAPSVFIFPPSDEQLKSGTASVVCLLNNFYPREAKVQWKVDNALQSGNSQESVTEQDSKDSTYSLSSTLTLSKADYEKHKVYACEVTHQGLSSPVTKSFNRGEC

SEQ ID NO: 9790 - protein, 214 aa, Artificial Sequence
  source: /note="Description of Artificial Sequence: Synthetic polypeptide"
DIQMTQSPSSLSASVGDRVTITCRASQGISSWLAWYQQKPEKAPKSLIYAASSLQSGVPSRFSGSGSGTDFTLTISSLQPEDFATYYCQQYNSYPYTFGQGTKLEIKRTVAAPSVFIFPPSDEQLKSGTASVVCLLNNFYPREAKVQWKVDNALQSGNSQESVTEQDSKDSTYSLSSTLTLSKADYEKHKVYACEVTHQGLSSPVTKSFNRGEC

SEQ ID NO: 9791 - protein, 220 aa, Artificial Sequence
  source: /note="Description of Artificial Sequence: Synthetic polypeptide"
DIVMTQSPSSLTVTAGEKVTMSCKSSQSLLDSGNQKNFLTWYQQKPGQPPKLLIFWASTRESGVPDRFTGSGSVTDFTLTISSVQAEDLAVYYCQNDYSYPCTFGQGTKVEIKRTVAAPSVFIFPPSDEQLKSGTASVVCLLNNFYPREAKVQWKVDNALQSGNSQESVTEQDSKDSTYSLSSTLTLSKADYEKHKVYACEVTHQGLSSPVTKSFNRGEC

SEQ ID NO: 9792 - protein, 220 aa, Artificial Sequence
  source: /note="Description of Artificial Sequence: Synthetic polypeptide"
DIVMTQSPSSLTVTAGEKVTMSCKSSQSLLDSGNQKNFLTWYQQKPGQPPKLLIFWASTRESGVPDRFTGSGSVTDFTLTISSVQAEDLAVYYCQNDYSYPYTFGQGTKVEIKRTVAAPSVFIFPPSDEQLKSGTASVVCLLNNFYPREAKVQWKVDNALQSGNSQESVTEQDSKDSTYSLSSTLTLSKADYEKHKVYACEVTHQGLSSPVTKSFNRGEC

SEQ ID NO: 9793 - protein, 220 aa, Artificial Sequence
  source: /note="Description of Artificial Sequence: Synthetic polypeptide"
EIVLTQSPATLSLSPGERATLSCKSSQSLLDSGNQKNFLTWYQQKPGQAPRLLIYWASTRESGVPSRFSGSGSGTEFTLTISSLQPDDFATYYCQNDYSYPYTFGQGTKVEIKRTVAAPSVFIFPPSDEQLKSGTASVVCLLNNFYPREAKVQWKVDNALQSGNSQESVTEQDSKDSTYSLSSTLTLSKADYEKHKVYACEVTHQGLSSPVTKSFNRGEC

SEQ ID NO: 9794 - protein, 220 aa, Artificial Sequence
  source: /note="Description of Artificial Sequence: Synthetic polypeptide"
DIQMTQSPSSLSASVGDRVTITCKSSQSLLDSGNQKNFLTWYQQKPGQAPRLLIYWASTRESGIPPRFSGSGYGTDFTLTINNIESEDAAYYFCQNDYSYPYTFGQGTKVEIKRTVAAPSVFIFPPSDEQLKSGTASVVCLLNNFYPREAKVQWKVDNALQSGNSQESVTEQDSKDSTYSLSSTLTLSKADYEKHKVYACEVTHQGLSSPVTKSFNRGEC

SEQ ID NO: 9795 - protein, 220 aa, Artificial Sequence
  source: /note="Description of Artificial Sequence: Synthetic polypeptide"
EIVLTQSPATLSLSPGERATLSCKSSQSLLDSGNQKNFLTWYQQKPGKAPKLLIYWASTRESGVPSRFSGSGSGTDFTFTISSLQPEDIATYYCQNDYSYPYTFGQGTKVEIKRTVAAPSVFIFPPSDEQLKSGTASVVCLLNNFYPREAKVQWKVDNALQSGNSQESVTEQDSKDSTYSLSSTLTLSKADYEKHKVYACEVTHQGLSSPVTKSFNRGEC

SEQ ID NO: 9796 - protein, 220 aa, Artificial Sequence
  source: /note="Description of Artificial Sequence: Synthetic polypeptide"
DIVMTQTPLSLPVTPGEPASISCKSSQSLLDSGNQKNFLTWYQQKPGQAPRLLIYWASTRESGVPSRFSGSGSGTDFTFTISSLEAEDAATYYCQNDYSYPYTFGQGTKVEIKRTVAAPSVFIFPPSDEQLKSGTASVVCLLNNFYPREAKVQWKVDNALQSGNSQESVTEQDSKDSTYSLSSTLTLSKADYEKHKVYACEVTHQGLSSPVTKSFNRGEC

SEQ ID NO: 9797 - protein, 220 aa, Artificial Sequence
  source: /note="Description of Artificial Sequence: Synthetic polypeptide"
EIVLTQSPATLSLSPGERATLSCKSSQSLLDSGNQKNFLTWYQQKPGKAPKLLIYWASTRESGVPSRFSGSGSGTDFTFTISSLEAEDAATYYCQNDYSYPYTFGQGTKVEIKRTVAAPSVFIFPPSDEQLKSGTASVVCLLNNFYPREAKVQWKVDNALQSGNSQESVTEQDSKDSTYSLSSTLTLSKADYEKHKVYACEVTHQGLSSPVTKSFNRGEC

SEQ ID NO: 9798 - protein, 220 aa, Artificial Sequence
  source: /note="Description of Artificial Sequence: Synthetic polypeptide"
EIVLTQSPDFQSVTPKEKVTITCKSSQSLLDSGNQKNFLTWYQQKPGQAPRLLIYWASTRESGVPSRFSGSGSGTDFTFTISSLEAEDAATYYCQNDYSYPYTFGQGTKVEIKRTVAAPSVFIFPPSDEQLKSGTASVVCLLNNFYPREAKVQWKVDNALQSGNSQESVTEQDSKDSTYSLSSTLTLSKADYEKHKVYACEVTHQGLSSPVTKSFNRGEC

SEQ ID NO: 9799 - protein, 220 aa, Artificial Sequence
  source: /note="Description of Artificial Sequence: Synthetic polypeptide"
EIVLTQSPATLSLSPGERATLSCKSSQSLLDSGNQKNFLTWYQQKPGQAPRLLIYWASTRESGVPSRFSGSGSGTDFTFTISSLEAEDAATYYCQNDYSYPYTFGQGTKVEIKRTVAAPSVFIFPPSDEQLKSGTASVVCLLNNFYPREAKVQWKVDNALQSGNSQESVTEQDSKDSTYSLSSTLTLSKADYEKHKVYACEVTHQGLSSPVTKSFNRGEC

SEQ ID NO: 9800 - protein, 220 aa, Artificial Sequence
  source: /note="Description of Artificial Sequence: Synthetic polypeptide"
DIQMTQSPSSLSASVGDRVTITCKSSQSLLDSGNQKNFLTWYLQKPGQSPQLLIYWASTRESGVPSRFSGSGSGTDFTFTISSLEAEDAATYYCQNDYSYPYTFGQGTKVEIKRTVAAPSVFIFPPSDEQLKSGTASVVCLLNNFYPREAKVQWKVDNALQSGNSQESVTEQDSKDSTYSLSSTLTLSKADYEKHKVYACEVTHQGLSSPVTKSFNRGEC

SEQ ID NO: 9801 - protein, 220 aa, Artificial Sequence
  source: /note="Description of Artificial Sequence: Synthetic polypeptide"
DVVMTQSPLSLPVTLGQPASISCKSSQSLLDSGNQKNFLTWYQQKPGKAPKLLIYWASTRESGVPSRFSGSGSGTDFTFTISSLEAEDAATYYCQNDYSYPYTFGQGTKVEIKRTVAAPSVFIFPPSDEQLKSGTASVVCLLNNFYPREAKVQWKVDNALQSGNSQESVTEQDSKDSTYSLSSTLTLSKADYEKHKVYACEVTHQGLSSPVTKSFNRGEC

SEQ ID NO: 9802 - protein, 218 aa, Artificial Sequence
  source: /note="Description of Artificial Sequence: Synthetic polypeptide"
EIVLTQSPATLSLSPGERATLSCRASKGVSTSGYSYLHWYQQKPGQAPRLLIYLASYLESGVPARFSGSGSGTDFTLTISSLEPEDFAVYYCQHSRDLPLTFGGGTKVEIKRTVAAPSVFIFPPSDEQLKSGTASVVCLLNNFYPREAKVQWKVDNALQSGNSQESVTEQDSKDSTYSLSSTLTLSKADYEKHKVYACEVTHQGLSSPVTKSFNRGEC

SEQ ID NO: 9803 - protein, 214 aa, Artificial Sequence
  source: /note="Description of Artificial Sequence: Synthetic polypeptide"
EIVLTQSPATLSLSPGERATLSCRASQSVSSYLAWYQQKPGQAPRLLIYDASNRATGIPARFSGSGSGTDFTLTISSLEPEDFAVYYCQQRSNWPPAFGQGTKVEIKRTVAAPSVFIFPPSDEQLKSGTASVVCLLNNFYPREAKVQWKVDNALQSGNSQESVTEQDSKDSTYSLSSTLTLSKADYEKHKVYACEVTHQGLSSPVTKSFNRGEC

SEQ ID NO: 9804 - protein, 215 aa, Artificial Sequence
  source: /note="Description of Artificial Sequence: Synthetic polypeptide"
DIQMTQSPSSLSASVGDRVSITCRPSQSFSRYINWYQQKPGKAPKLLIHAASSLVGGVPSRFSGSGSGTDFTLTISSLQPEDFATYYCQQTYSNPPITFGQGTRLEMKRTVAAPSVFIFPPSDEQLKSGTASVVCLLNNFYPREAKVQWKVDNALQSGNSQESVTEQDSKDSTYSLSSTLTLSKADYEKHKVYACEVTHQGLSSPVTKSFNRGEC

SEQ ID NO: 9805 - protein, 215 aa, Artificial Sequence
  source: /note="Description of Artificial Sequence: Synthetic polypeptide"
EIVLTQSPGTLSLSPGERATLSCRASQRVSSSYLAWYQQKPGQAPRLLIYDASSRATGIPDRFSGSGSGTDFTLTISRLEPEDFAVYYCQQYGSLPWTFGQGTKVEIKRTVAAPSVFIFPPSDEQLKSGTASVVCLLNNFYPREAKVQWKVDNALQSGNSQESVTEQDSKDSTYSLSSTLTLSKADYEKHKVYACEVTHQGLSSPVTKSFNRGEC

SEQ ID NO: 9806 - protein, 108 aa, Artificial Sequence
  source: /note="Description of Artificial Sequence: Synthetic polypeptide"
DIQMTQSPSSLSASVGDRVTITCRASQDVSTAVAWYQQKPGKAPKLLIYSASFLYSGVPSRFSGSGSGTDFTLTISSLQPEDFATYYCQQYLYHPATFGQGTKVEIKR

SEQ ID NO: 9807 - protein, 214 aa, Artificial Sequence
  source: /note="Description of Artificial Sequence: Synthetic polypeptide"
EIVLTQSPATLSLSPGERATLSCRASQSVSSYLAWYQQKPGQAPRLLIYDASNRATGIPARFSGSGSGTDFTLTISSLEPEDFAVYYCQQSSNWPRTFGQGTKVEIKRTVAAPSVFIFPPSDEQLKSGTASVVCLLNNFYPREAKVQWKVDNALQSGNSQESVTEQDSKDSTYSLSSTLTLSKADYEKHKVYACEVTHQGLSSPVTKSFNRGEC

SEQ ID NO: 9808 - protein, 214 aa, Artificial Sequence; identical to SEQ ID NO: 9281
  source: /note="Description of Artificial Sequence: Synthetic polypeptide"

SEQ ID NO: 9809 - protein, 108 aa, Artificial Sequence; identical to SEQ ID NO: 9806
  source: /note="Description of Artificial Sequence: Synthetic polypeptide"

SEQ ID NO: 9810 - protein, 214 aa, Artificial Sequence
  source: /note="Description of Artificial Sequence: Synthetic polypeptide"
DIQMTQSPSSLSASLGERVSLTCRASQDIGSSLNWLQQGPDGTIKRLIYATSSLDSGVPKRFSGSRSGSDYSLTISSLESEDFVDYYCLQYVSSPPTFGAGTKLELKRADAAPSVFIFPPSDEQLKSGTASVVCLLNNFYPREAKVQWKVDNALQSGNSQESVTEQDSKDSTYSLSSTLTLSKADYEKHKVYACEVTHQGLSSPVTKSFNRGEC

SEQ ID NO: 9811 - protein, 214 aa, Artificial Sequence
  source: /note="Description of Artificial Sequence: Synthetic polypeptide"
DIQMTQSPSSVSASVGDRVTITCRASQGISGWLAWYQQKPGKAPKFLIYAASTLQSGVPSRFSGSGSGTDFTLTISSLQPEDFATYYCQQANSFPPTFGGGTKVEIKRTVAAPSVFIFPPSDEQLKSGTASVVCLLNNFYPREAKVQWKVDNALQSGNSQESVTEQDSKDSTYSLSSTLTLSKADYEKHKVYACEVTHQGLSSPVTKSFNRGEC

SEQ ID NO: 9812 - protein, 214 aa, Artificial Sequence; identical to SEQ ID NO: 5975
  source: /note="Description of Artificial Sequence: Synthetic polypeptide"

SEQ ID NO: 9813 - protein, 214 aa, Artificial Sequence
  source: /note="Description of Artificial Sequence: Synthetic polypeptide"
DIQMTQSTSSLSASLGDRVTISCSASQGINNYLNWYQQKPDGTVELLIYYTSTLQSGVPSRFSGSGSGTDYSLTISNLEPEDIGTYYCQQYSKLPRTFGGGTKLEIKRTVAAPSVFIFPPSDEQLKSGTASVVCLLNNFYPREAKVQWKVDNALQSGNSQESVTEQDSKDSTYSLSSTLTLSKADYEKHKVYACEVTHQGLSSPVTKSFNRGEC

SEQ ID NO: 9814 - protein, 215 aa, Artificial Sequence
  source: /note="Description of Artificial Sequence: Synthetic polypeptide"
QIVLTQSPAIMSASPGEKVTLTCSASSSVSSSYLYWYQQKPGSSPKLWIYSTSNLASGVPARFSGSGSGTSYSLTISSMEAEDAASYFCHQWSSYPRTFGAGTKLELKRTVAAPSVFIFPPSDEQLKSGTASVVCLLNNFYPREAKVQWKVDNALQSGNSQESVTEQDSKDSTYSLSSTLTLSKADYEKHKVYACEVTHQGLSSPVTKSFNRGEC

SEQ ID NO: 9815 - protein, 220 aa, Artificial Sequence
  source: /note="Description of Artificial Sequence: Synthetic polypeptide"
QIVLSQSPAILSASPGEKVTMTCRASSSVSYIHWFQQKPGSSPKPWIYATSNLASGVPVRFSGSGSGTSYSLTISRVEAEDAATYYCQQWTSNPPTFGGGTKLEIKRTVAAPQIVLTQSPAIMSASPGEKVTLTCSASSSVSSSYLYWYQQKPGSSPKLWIYSTSNLASGVPARFSGSGSGTSYSLTISSMEAEDAASYFCHQWSSYPRTFGAGTKLELK

SEQ ID NO: 9816 - protein, 221 aa, Artificial Sequence
  source: /note="Description of Artificial Sequence: Synthetic polypeptide"
DIQMTQSPSSLSASVGDRVTITCRASQDVNTAVAWYQQKPGKAPKLLIYSASFLYSGVPSRFSGSRSGTDFTLTISSLQPEDFATYYCQQHYTTPPTFGQGTKVEIKRTVAAPQIVLTQSPAIMSASPGEKVTLTCSASSSVSSSYLYWYQQKPGSSPKLWIYSTSNLASGVPARFSGSGSGTSYSLTISSMEAEDAASYFCHQWSSYPRTFGAGTKLELK

SEQ ID NO: 9817 - protein, 226 aa, Artificial Sequence
  source: /note="Description of Artificial Sequence: Synthetic polypeptide"
DVVMTQSPLSLPVTLGQPASISCRSSQIIIHSDGNTYLEWFQQRPGQSPRRLIYKVSNRFSGVPDRFSGSGSGTDFTLKISRVEAEDVGVYYCFQGSHVPHTFGQGTKVEIKRTVAAPQIVLTQSPAIMSASPGEKVTLTCSASSSVSSSYLYWYQQKPGSSPKLWIYSTSNLASGVPARFSGSGSGTSYSLTISSMEAEDAASYFCHQWSSYPRTFGAGTKLELK

SEQ ID NO: 9818 - protein, 214 aa, Artificial Sequence
  source: /note="Description of Artificial Sequence: Synthetic polypeptide"
DIQMTQSPSSLSASVGDRVTITCKASQDVGIAVAWYQQKPGKVPKLLIYWASTRHTGVPDRFSGSGSGTDFTLTISSLQPEDVATYYCQQYSSYPYTFGQGTKVEIKRTVAAPSVFIFPPSDEQLKSGTASVVCLLNNFYPREAKVQWKVDNALQSGNSQESVTEQDSKDSTYSLSSTLTLSKADYEKHKVYACEVTHQGLSSPVTKSFNRGEC

SEQ ID NO: 9819 - protein, 219 aa, Artificial Sequence
  source: /note="Description of Artificial Sequence: Synthetic polypeptide"
DIQMTQSPSSLSASVGDRVTITCRSSETLVHSSGNTYLEWYQQKPGKAPKLLIYRVSNRFSGVPSRFSGSGSGTDFTLTISSLQPEDFATYYCFQGSFNPLTFGQGTKVEIKRTVAAPSVFIFPPSDEQLKSGTASVVCLLNNFYPREAKVQWKVDNALQSGNSQESVTEQDSKDSTYSLSSTLTLSKADYEKHKVYACEVTHQGLSSPVTKSFNRGEC

SEQ ID NO: 9820 - protein, 220 aa, Artificial Sequence
  source: /note="Description of Artificial Sequence: Synthetic polypeptide"
DIQMTQSPSSLSASVGDRVTITCKSSQSLLYRSNQKNYLAWYQQKPGKAPKLLIYWASTRESGVPSRFSGSGSGTDFTLTISSLQPEDFATYYCQQYYNYPRTFGQGTKVEIKRTVAAPSVFIFPPSDEQLKSGTASVVCLLNNFYPREAKVQWKVDNALQSGNSQESVTEQDSKDSTYSLSSTLTLSKADYEKHKVYACEVTHQGLSSPVTKSFNRGEC

SEQ ID NO: 9821 - protein, 239 aa, Artificial Sequence
  source: /note="Description of Artificial Sequence: Synthetic polypeptide"
MDTRAPTQLLGLLLLWLPGARCAYQMTQSPSSLSASVGDRVTIKCQASESIYSSLAWYQQKPGKPPKLLIYSASTLASGVPSRFSGSGSGTDFTLTISSLQPEDFATYYCQQGFGTSNVENPFGGGTKVEIKRTVAAPSVFIFPPSDEQLKSGTASVVCLLNNFYPREAKVQWKVDNALQSGNSQESVTEQDSKDSTYSLSSTLTLSKADYEKHKVYACEVTHQGLSSPVTKSFNRGEC

SEQ ID NO: 9822 - protein, 239 aa, Artificial Sequence
  source: /note="Description of Artificial Sequence: Synthetic polypeptide"
MDMRVPAQLLGLLLLWLRGARCDIQMTQSPSSLSASVGDRVTIKCQASESIYSSLAWYQQKPGKPPKLLIYSASTLASGVPSRFSGSGSGTDFTLTISSLQPEDFATYYCQQGFGTSNVENPFGGGTKVEIKRTVAAPSVFIFPPSDEQLKSGTASVVCLLNNFYPREAKVQWKVDNALQSGNSQESVTEQDSKDSTYSLSSTLTLSKADYEKHKVYACEVTHQGLSSPVTKSFNRGEC

SEQ ID NO: 9823 - protein, 212 aa, Artificial Sequence
  source: /note="Description of Artificial Sequence: Synthetic polypeptide"
DIQMTQSPSSLSASVGDRVTITCKASQDVGTAVAWYQQKPGKAPKLLIYWASTRHTGVPSRFSGSGSGTDFTLTISSLQPEDFATYYCQQYSSYRTFGQGTKVEIKRTVAAPSVFIFPPSDEQLKSGTASVVCLLNNFYPREAKVQWKVDNALQSGNSQESVTEQDSKDSTYSLSSTLTLSKADYEKHKVYACEVTHQGLSSPVTKSFNRGE

SEQ ID NO: 9824 - protein, 213 aa, Artificial Sequence
  source: /note="Description of Artificial Sequence: Synthetic polypeptide"
SELTQDPAVSVALGQTVRITCSGDSLRSYYASWYQQKPGQAPVLVIYGANNRPSGIPDRFSGSSSGNTASLTITGAQAEDEADYYCNSADSSGNHVVFGGGTKLTVLGQPKAAPSVTLFPPSSEELQANKATLVCLISDFYPGAVTVAWKADSSPVKAGVETTTPSKQSNNKYAASSYLSLTPEQWKSHKSYSCQVTHEGSTVEKTVAPTECS

SEQ ID NO: 9825 - protein, 215 aa, Artificial Sequence
  source: /note="Description of Artificial Sequence: Synthetic polypeptide"
EIVLTQSPGTLSLSPGERATLSCRASQGISRSYLAWYQQKPGQAPSLLIYGASSRATGIPDRFSGSGSGTDFTLTISRLEPEDFAVYYCQQFGSSPWTFGQGTKVEIKRTVAAPSVFIFPPSDEQLKSGTASVVCLLNNFYPREAKVQWKVDNALQSGNSQESVTEQDSKDSTYSLSSTLTLSKADYEKHKVYACEVTHQGLSSPVTKSFNRGEC

SEQ ID NO: 9826 - protein, 213 aa, Artificial Sequence
  source: /note="Description of Artificial Sequence: Synthetic polypeptide"
DIQMTQSPSSLSASVGDRVTITCKASQDVGTAVAWYQQKPGKAPKLLIYWASTRHTGVPSRFSGSGSGTDFTLTISSLQPEDFATYYCQQYSSYRTFGQGTKVEIKRTVAAPSVFIFPPSDEQLKSGTASVVCLLNNFYPREAKVQWKVDNALQSGNSQESVTEQDSKDSTYSLSSTLTLSKADYEKHKVYACEVTHQGLSSPVTKSFNRGEC

SEQ ID NO: 9827 - protein, 218 aa, Artificial Sequence
  source: /note="Description of Artificial Sequence: Synthetic polypeptide"
DIQMTQSPSSLSASVGDRVTITCRASQSVSTSSYSYMHWYQQKPGKAPKLLIKYASNLESGVPSRFSGSGSGTDFTLTISSLQPEDFATYYCQHSWEIPYTFGGGTKVEIKRTVAAPSVFIFPPSDEQLKSGTASVVCLLNNFYPREAKVQWKVDNALQSGNSQESVTEQDSKDSTYSLSSTLTLSKADYEKHKVYACEVTHQGLSSPVTKSFNRGEC

SEQ ID NO: 9828 - protein, 218 aa, Artificial Sequence
  source: /note="Description of Artificial Sequence: Synthetic polypeptide"
DIVLTQSPASLAVSLGQRATISCKASQSVDFDGDSYMNWYQQKPGQPPKVLIYAASNLESGIPARFSGSGSGTDFTLNIHPVEEEDAATYYCQQSNEDPWTFGGGTKLEIKRTVAAPSVFIFPPSDEQLKSGTASVVCLLNNFYPREAKVQWKVDNALQSGNSQESVTEQDSKDSTYSLSSTLTLSKADYEKHKVYACEVTHQGLSSPVTKSFNRGEC

SEQ ID NO: 9829 - protein, 216 aa, Artificial Sequence
  source: /note="Description of Artificial Sequence: Synthetic polypeptide"
EIVLTQSPATLSLSPGERATLSCRASQSVSSYLAWYQQKPGQAPRLLIYDASNRATGIPARFSGSGSGTDFTLTISSLEPEDFAVYYCQQRSNWPPALTFCGGTKVEIKRTVAAPSVFIFPPSDEQLKSGTASVVCLLNNFYPREAKVQWKVDNALQSGNSQESVTEQDSKDSTYSLSSTLTLSKADYEKHKVYACEVTHQGLSSPVTKSFNRGEC

SEQ ID NO: 9830 - protein, 214 aa, Artificial Sequence
  source: /note="Description of Artificial Sequence: Synthetic polypeptide"
EIVLTQSPATLSLSPGERATLSCRASQSVSRYLAWYQQKPGQAPRLLIYDASNRATGIPARFSGSGSGTDSTLTISSLEPEDFAVYYCQQRSNWPRTFGQGTKVEIKRTVAAPSVFIFPPSDEQLKSGTASVVCLLNNFYPREAKVQWKVDNALQSGNSQESVTEQDSKDSTYSLSNTLTLSKADYEKHKVYACEVTHQGLSSPVTKSFNRGEC

SEQ ID NO: 9831 - protein, 214 aa, Artificial Sequence
  source: /note="Description of Artificial Sequence: Synthetic polypeptide"
SSELTQDPAVSVALGQTVRITCQGDSLRSYYASWYQQKPGQAPVLVIYGKNNRPSGIPDRFSGSSSGNTASLTITGAQAEDEADYYCNSRDSSGNHVVFGGGTKLTVLGQPKAAPSVTLFPPSSEELQANKATLVCLISDFYPGAVTVAWKADSSPVKAGVETTTPSKQSNNKYAASSYLSLTPEQWKSHRSYSCQVTHEGSTVEKTVAPTECS

SEQ ID NO: 9832 - protein, 213 aa, Artificial Sequence
  source: /note="Description of Artificial Sequence: Synthetic polypeptide"
EIVLTQSPATLSLSPGERATLSCSASSSVSYMHWYQQKPGQAPRLLIYTTSNLASGIPARFSGSGSGTDFTLTISSLEPEDFAVYYCHQWSSYPWTFGQGTKLEIKRTVAAPSVFIFPPSDEQLKSGTASVVCLLNNFYPREAKVQWKVDNALQSGNSQESVTEQDSKDSTYSLSSTLTLSKADYEKHKVYACEVTHQGLSSPVTKSFNRGEC

SEQ ID NO: 9833 - protein, 106 aa, Artificial Sequence; identical to SEQ ID NO: 4950
  source: /note="Description of Artificial Sequence: Synthetic polypeptide"

SEQ ID NO: 9834 - protein, 106 aa, Artificial Sequence; identical to SEQ ID NO: 4951
  source: /note="Description of Artificial Sequence: Synthetic polypeptide"

SEQ ID NO: 9835 - protein, 106 aa, Artificial Sequence; identical to SEQ ID NO: 4952
  source: /note="Description of Artificial Sequence: Synthetic polypeptide"

SEQ ID NO: 9836 - protein, 106 aa, Artificial Sequence; identical to SEQ ID NO: 4953
  source: /note="Description of Artificial Sequence: Synthetic polypeptide"

SEQ ID NO: 9837 - protein, 106 aa, Artificial Sequence; identical to SEQ ID NO: 4954
  source: /note="Description of Artificial Sequence: Synthetic polypeptide"

SEQ ID NO: 9838 - protein, 106 aa, Artificial Sequence; identical to SEQ ID NO: 4955
  source: /note="Description of Artificial Sequence: Synthetic polypeptide"

SEQ ID NO: 9839 - protein, 106 aa, Artificial Sequence; identical to SEQ ID NO: 4956
  source: /note="Description of Artificial Sequence: Synthetic polypeptide"

SEQ ID NO: 9840 - protein, 106 aa, Artificial Sequence; identical to SEQ ID NO: 4957
  source: /note="Description of Artificial Sequence: Synthetic polypeptide"

SEQ ID NO: 9841 - protein, 106 aa, Artificial Sequence; identical to SEQ ID NO: 4950
  source: /note="Description of Artificial Sequence: Synthetic polypeptide"

SEQ ID NO: 9842 - protein, 114 aa, Artificial Sequence
  source: /note="Description of Artificial Sequence: Synthetic polypeptide"
DIVMTQAAFSNPVTLGTSASISCRSSKSLLHSNGITYFFWYLQKPGLSPQLLIYQMSNLASGVPDRFSSSGSGTDFTLRISRVEAEDVGVYYCAQNLELPPTFGGGTKLEIKRA

SEQ ID NO: 9843 - protein, 214 aa, Artificial Sequence
  source: /note="Description of Artificial Sequence: Synthetic polypeptide"
DIQLTQSPSSLSASVGDRVSITCKASQDVSIAVAWYQQKPGKAPKLLIYSASYRYTGVPDRFSGSGSGTDFTLTISSLQPEDFAVYYCQQHYITPLTFGAGTKVEIKRTVAAPSVFIFPPSDEQLKSGTASVVCLLNNFYPREAKVQWKVDNALQSGNSQESVTEQDSKDSTYSLSSTLTLSKADYEKHKVYACEVTHQGLSSPVTKSFNRGEC

SEQ ID NO: 9844 - protein, 215 aa, Artificial Sequence
  source: /note="Description of Artificial Sequence: Synthetic polypeptide"
EIVLTQSPATLSLSPGERATLSCRASQSVSSYLAWYQQKPGQAPRLLIYDASNRATGIPARFSGSGSGTDFTLTISSLEPEDFAVYYCQQRSNWLMYTFGQGTKLEIKRTVAAPSVFIFPPSDEQLKSGTASVVCLLNNFYPREAKVQWKVDNALQSGNSQESVTEQDSKDSTYSLSSTLTLSKADYEKHKVYACEVTHQGLSSPVTKSFNRGEC

SEQ ID NO: 9845 - protein, 214 aa, Artificial Sequence
  source: /note="Description of Artificial Sequence: Synthetic polypeptide"
DIQMTQSPSSLSASVGDRVTITCSASQDISNYLNWYQQKPGKAPKVLIYFTSSLHSGVPSRFSGSGSGTDFTLTISSLQPEDFATYYCQQYSTVPWTFGQGTKVEIKRTVAAPSVFIFPPSDEQLKSGTASVVCLLNNFYPREAKVQWKVDNALQSGNSQESVTEEDSKDSTYSLSSTLTLSKADYEKHKVYACEVTHQGLSSPVTKSFNRGEC

SEQ ID NO: 9846 - protein, 214 aa, Artificial Sequence
  source: /note="Description of Artificial Sequence: Synthetic polypeptide"
DIQMTQSPSSLSASVGDRVTITCRASQDIAGSLNWLQQKPGKAIKRLIYATSSLDSGVPKRFSGSRSGSDYTLTISSLQPEDFATYYCLQYGSFPPTFGQGTKVEIKRTVAAPSVFIFPPSDEQLKSGTASVVCLLNNFYPREAKVQWKVDNALQSGNSQESVTEQDSKDSTYSLSSTLTLSKADYEKHKVYACEVTHQGLSSPVTKSFNRGEC

SEQ ID NO: 9847 - protein, 214 aa, Artificial Sequence
  source: /note="Description of Artificial Sequence: Synthetic polypeptide"
DIQMTQSPSSLSASVGDRVTITCRASQDISNYLAWFQQKPGKAPKSLIYAASSLHSKVPTQFSGSGSGTDFTLTISSLQPEDFATYYCLQYSTYPITFGGGTKVEIKRTVAAPSVFIFPPSDEQLKSGTASVVCLLNNFYPREAKVQWKVDNALQSGNSQESVTEQDSKDSTYSLSSTLTLSKADYEKHKVYACEVTHQGLSSPVTKSFNRGEC

SEQ ID NO: 9848 - protein, 106 aa, Artificial Sequence
  source: /note="Description of Artificial Sequence: Synthetic polypeptide"
DIVMTQSPLSLPVTPGEPASISCRASSSLSFMHWYQQKPGQPPKLLIYATSNLASGIPARFSGSGSGTDFTLTISSLEPEDFAVYYCHQWSSNPLTFGQGTKVEIK

SEQ ID NO: 9849 - protein, 106 aa, Artificial Sequence
  source: /note="Description of Artificial Sequence: Synthetic polypeptide"
DIVMTQSPLSLPVTPGEPASISCRASSSLSFMHWYLQKPGQSPQLLIYATSNLASGIPARFSGSGSGTDFTLTISSLEPEDFAVYYCHQWSSNPLTFGQGTKVEIK

SEQ ID NO: 9850 - protein, 106 aa, Artificial Sequence
  source: /note="Description of Artificial Sequence: Synthetic polypeptide"
DIVMTQSPLSLPVTPGEPASISCRASSSLSFMHWYQQKPGQAPRLLIYATSNLASGVPDRFSGSGSGTDFTLTISSLQAEDVAVYYCHQWSSNPLTFGQGTKVEIK

SEQ ID NO: 9851 - protein, 106 aa, Artificial Sequence
  source: /note="Description of Artificial Sequence: Synthetic polypeptide"
DIVMTQSPLSLPVTPGEPASISCRASSSLSFMHWYQQKPGKAPKLLIYATSNLASGVPDRFSGSGSGTDFTLTISSLQAEDVAVYYCHQWSSNPLTFGQGTKVEIK

SEQ ID NO: 9852 - protein, 106 aa, Artificial Sequence
  source: /note="Description of Artificial Sequence: Synthetic polypeptide"
DIVMTQSPLSLPVTPGEPASISCRASSSLSFMHWYQQKPGQPPKLLIYATSNLASGVPSRFSGSGSGTDFTFTISSLQPEDIATYYCHQWSSNPLTFGQGTKVEIK

SEQ ID NO: 9853 - protein, 106 aa, Artificial Sequence
  source: /note="Description of Artificial Sequence: Synthetic polypeptide"
DIVMTQSPLSLPVTPGEPASISCRASSSLSFMHWYQQKPGQAPRLLIYATSNLASGVPSRFSGSGSGTDFTFTISSLQPEDIATYYCHQWSSNPLTFGQGTKVEIK

SEQ ID NO: 9854 - protein, 106 aa, Artificial Sequence
  source: /note="Description of Artificial Sequence: Synthetic polypeptide"
DIVMTQSPLSLPVTPGEPASISCRASSSLSFMHWYQQKPGQAPRLLIYATSNLASGVPSRFSGSGSGTEFTLTISSLQPDDFATYYCHQWSSNPLTFGQGTKVEIK

SEQ ID NO: 9855 - protein, 106 aa, Artificial Sequence
  source: /note="Description of Artificial Sequence: Synthetic polypeptide"
DIVMTQSPDSLAVSLGERATINCRASSSLSFMHWYQQKPGQAPRLLIYATSNLASGVPSRFSGSGSGTDFTLTISSLQPEDFATYYCHQWSSNPLTFGQGTKVEIK

SEQ ID NO: 9856 - protein, 106 aa, Artificial Sequence
  source: /note="Description of Artificial Sequence: Synthetic polypeptide"
DIVMTQSPDSLAVSLGERATINCRASSSLSFMHWYQQKPGQPPKLLIYATSNLASGIPARFSGSGSGTDFTLTISSLEPEDFAVYYCHQWSSNPLTFGQGTKVEIK

SEQ ID NO: 9857 - protein, 106 aa, Artificial Sequence
  source: /note="Description of Artificial Sequence: Synthetic polypeptide"
DIVMTQSPLSLPVTPGEPASISCRASSSLSFMHWYLQKPGQSPQLLIYATSNLASGVPDRFSGSGSGTDFTLKISRVEAEDVGVYYCHQWSSNPLTFGQGTKVEIK

SEQ ID NO: 9858 - protein, 106 aa, Artificial Sequence
  source: /note="Description of Artificial Sequence: Synthetic polypeptide"
DIQMTQSPSSLSASVGDRVTITCRASSSLSFMHWYLQKPGQSPQLLIYATSNLASGVPDRFSGSGSGTDFTLTISSLQAEDVAVYYCHQWSSNPLTFGQGTKVEIK

SEQ ID NO: 9859 - protein, 106 aa, Artificial Sequence
  source: /note="Description of Artificial Sequence: Synthetic polypeptide"
DIQMTQSPSTLSASVGDRVTITCRASSSLSFMHWYQQKPGQAPRLLIYATSNLASGVPSRFSGSGSGTDFTFTISSLQPEDIATYYCHQWSSNPLTFGQGTKVEIK

SEQ ID NO: 9860 - protein, 106 aa, Artificial Sequence
  source: /note="Description of Artificial Sequence: Synthetic polypeptide"
EIVLTQSPGTLSLSPGERATLSCRASSSLSFMHWYLQKPGQSPQLLIYATSNLASGVPDRFSGSGSGTDFTLTISSLQAEDVAVYYCHQWSSNPLTFGQGTKVEIK

SEQ ID NO: 9861 - protein, 106 aa, Artificial Sequence
  source: /note="Description of Artificial Sequence: Synthetic polypeptide"
DIVMTQSPDSLAVSLGERATINCRASSSLSFMHWYQQKPGKAPKLLIYATSNLASGVPSRFSGSGSGTEFTLTISSLQPDDFATYYCHQWSSNPLTFGQGTKVEIK

SEQ ID NO: 9862 - protein, 106 aa, Artificial Sequence
  source: /note="Description of Artificial Sequence: Synthetic polypeptide"
EIVMTQSPATLSVSPGERATLSCRASSSLSFMHWYLQKPGQSPQLLIYATSNLASGVPSRFSGSGSGTDFTLTISSLQPEDFATYYCHQWSSNPLTFGQGTKVEIK

SEQ ID NO: 9863 - protein, 106 aa, Artificial Sequence
  source: /note="Description of Artificial Sequence: Synthetic polypeptide"
EIVLTQSPGTLSLSPGERATLSCRASSSLSFMHWYQQKPGKAPKLLIYATSNLASGVPSRFSGSGSGTEFTLTISSLQPDDFATYYCHQWSSNPLTFGQGTKVEIK

SEQ ID NO: 9864 - protein, 106 aa, Artificial Sequence
  source: /note="Description of Artificial Sequence: Synthetic polypeptide"
EIVLTQSPATLSLSPGERATLSCRASSSLSFMHWYQQKPGKAPKLLIYATSNLASGVPSRFSGSGSGTEFTLTISSLQPDDFATYYCHQWSSNPLTFGQGTKVEIK

SEQ ID NO: 9865 - protein, 106 aa, Artificial Sequence
  source: /note="Description of Artificial Sequence: Synthetic polypeptide"
EIVLTQSPATLSLSPGERATLSCRASSSLSFMHWYQQKPGQPPKLLIYATSNLASGIPARFSGSGSGTEFTLTISSLQSEDFAVYYCHQWSSNPLTFGQGTKVEIK

SEQ ID NO: 9866 - protein, 106 aa, Artificial Sequence
  source: /note="Description of Artificial Sequence: Synthetic polypeptide"
EIVLTQSPATLSLSPGERATLSCRASSSLSFMHWYQQKPGQPPKLLIYATSNLASGVPSRFSGSGSGTDFTFTISSLQPEDIATYYCHQWSSNPLTFGQGTKVEIK

SEQ ID NO: 9867 - protein, 106 aa, Artificial Sequence
  source: /note="Description of Artificial Sequence: Synthetic polypeptide"
EIVMTQSPATLSVSPGERATLSCRASSSLSFMHWYQQKPGQPPKLLIYATSNLASGVPSRFSGSGSGTDFTFTISSLQPEDIATYYCHQWSSNPLTFGQGTKVEIK

SEQ ID NO: 9868 - protein, 106 aa, Artificial Sequence
  source: /note="Description of Artificial Sequence: Synthetic polypeptide"
EIVLTQSPGTLSLSPGERATLSCRASSSLSFMHWYQQKPGQAPRLLIYATSNLASGVPSRFSGSGSGTDFTFTISSLQPEDIATYYCHQWSSNPLTFGQGTKVEIK

SEQ ID NO: 9869 - protein, 106 aa, Artificial Sequence
  source: /note="Description of Artificial Sequence: Synthetic polypeptide"
EIVLTQSPGTLSLSPGERATLSCRASSSLSFMHWYQQKPGQPPKLLIYATSNLASGVPSRFSGSGSGTDFTLTISSLQPEDFATYYCHQWSSNPLTFGQGTKVEIK

SEQ ID NO: 9870 - protein, 106 aa, Artificial Sequence
  source: /note="Description of Artificial Sequence: Synthetic polypeptide"
EIVLTQSPATLSLSPGERATLSCRASSSLSFMHWYQQKPGQPPKLLIYATSNLASGVPSRFSGSGSGTDFTLTISSLQPEDFATYYCHQWSSNPLTFGQGTKVEIK

SEQ ID NO: 9871 - protein, 106 aa, Artificial Sequence
  source: /note="Description of Artificial Sequence: Synthetic polypeptide"
EIVMTQSPATLSVSPGERATLSCRASSSLSFMHWYQQKPGQPPKLLIYATSNLASGVPSRFSGSGSGTDFTLTISSLQPEDFATYYCHQWSSNPLTFGQGTKVEIK

SEQ ID NO: 9872 - protein, 250 aa, Artificial Sequence
  source: /note="Description of Artificial Sequence: Synthetic polypeptide"
MVAGSDAGRALGVLSVVCLLHCFGFISCFSQQIYGVVYGNVTFHVPSNVPLKEVLWKKQKDKVAELENSEFRAFSSFKNRVYLDTVSGSLTIYNLTSSDEDEYEMESPNITDTMKFFLYVLESLPSPTLTCALTNGSIEVQCMIPEHYNSHRGLIMYSWDCPMEQCKRNSTSIYFKMENDLPQKIQCTLSNPLFNTTSSIILTTCIPSSGHSRHRYALIPIPLAVITTCIVLYMNGILKCDRKPDRTNSN

SEQ ID NO: 9873 - protein, 213 aa, Artificial Sequence
  source: /note="Description of Artificial Sequence: Synthetic polypeptide"
QTVLSQSPAILSASPGEKVTMTCRASSSVTYIHWYQQKPGSSPKSWIYATSNLASGVPARFSGSGSGTSYSLTISRVEAEDAATYYCQHWSSKPPTFGGGTKLEIKRADAAPTVSIFPPSSEQLTSGGASVVCFLNNFYPKDINVKWKIDGSERQNGVLNSWTDQDSKDSTYSMSSTLTLTKDEYERHNSYTCEATHKTSTSPIVKSFNRNEC

SEQ ID NO: 9874 - protein, 219 aa, Artificial Sequence
  source: /note="Description of Artificial Sequence: Synthetic polypeptide"
DVVMSQSPSSLAVSVGEKVTMSCKSSQSLLYSGNQKNYLAWYQQKPGQSPRLLIYWASTRESGVPDRFTGSGSGTDFTLTISSVKAEDLAVFYCQQYYNYPLTFGGGTHLTVLGQPKASPSVTLFPPSSEELGANKATLVCLISDFYPSGVTVAWKADGSPITQGVETTKPSKQSNNKYAASSYLSLTPDKWKSHSSFSCLVTHEGSTVEKKVAPAECS

SEQ ID NO: 9875 - protein, 214 aa, Artificial Sequence; identical to SEQ ID NO: 9811
  source: /note="Description of Artificial Sequence: Synthetic polypeptide"

SEQ ID NO: 9876 - protein, 215 aa, Artificial Sequence; identical to SEQ ID NO: 9562
  source: /note="Description of Artificial Sequence: Synthetic polypeptide"

SEQ ID NO: 9877 - protein, 214 aa, Artificial Sequence; identical to SEQ ID NO: 9713
  source: /note="Description of Artificial Sequence: Synthetic polypeptide"

SEQ ID NO: 9878 - protein, 210 aa, Artificial Sequence
  source: /note="Description of Artificial Sequence: Synthetic polypeptide"
DIQMTQSPASLSVSVGETVTITCRASENIYSNLAWYQQKQGKSPQLLVYAATNLADGVPSRFSGSGSGTQYSLKINSLQSEDFGSYYCQHFWGTPYTFGGGTRLEIKRADAAPTVFIFPPSDEQLKSGTASVVCLLNNFYPREAKVQWKVDNALQSGNSQESVTEQDSKDSTYSLSSTLTLSKADYEKHKVYACEVTHQGLSSPVTKSFN

SEQ ID NO: 9879 - protein, 236 aa, Artificial Sequence
  source: /note="Description of Artificial Sequence: Synthetic polypeptide"
MKKNIAFLLASMFVFSIATNAYAQIVLSQSPAILSASPGEKVTMTCRASSSVSYMHWYQQKPGSSPKPWIYAPSNLASGVPARFSGSGSGTSYSLTISRVEAEDAATYYCQQWSFNPPTFGAGTKLELKRTVAAPSVFIFPPSDEQLKSGTASVVCLLNNFYPREAKVQWKVDNALQSGNSQESVTEQDSKDSTYSLSSTLTLSKADYEKHKVYACEVTHQGLSSPVTKSFNRGEC

SEQ ID NO: 9880 - protein, 232 aa, Artificial Sequence; identical to SEQ ID NO: 9450
  source: /note="Description of Artificial Sequence: Synthetic polypeptide"

SEQ ID NO: 9881 - protein, 213 aa, Artificial Sequence; identical to SEQ ID NO: 9449
  source: /note="Description of Artificial Sequence: Synthetic polypeptide"

SEQ ID NO: 9882 - protein, 213 aa, Artificial Sequence
  source: /note="Description of Artificial Sequence: Synthetic polypeptide"
DIQMTQSPSSLSASVGDRVTITCRASSSVSYLHWYQQKPGKAPKPLIYAPSNLASGVPSRFSGSGSGTDFTLTISSLQPEDFATYYCQQWSFNPPTFGQGTKVEIKRTVAAPSVFIFPPSDEQLKSGTASVVCLLNNFYPREAKVQWKVDNALQSGNSQESVTEQDSKDSTYSLSSTLTLSKADYEKHKVYACEVTHQGLSSPVTKSFNRGEC

SEQ ID NO: 9883 - protein, 213 aa, Artificial Sequence
  source: /note="Description of Artificial Sequence: Synthetic polypeptide"
DIQMTQSPSSLSASVGDRVTITCRASSSVSYLHWYQQKPGKAPKPLIYAPSNLASGVPSRFSGSGSGTDFTLTISSLQPEDFATYYCQQWAFNPPTFGQGTKVEIKRTVAAPSVFIFPPSDEQLKSGTASVVCLLNNFYPREAKVQWKVDNALQSGNSQESVTEQDSKDSTYSLSSTLTLSKADYEKHKVYACEVTHQGLSSPVTKSFNRGEC

SEQ ID NO: 9884 - protein, 219 aa, Artificial Sequence
  source: /note="Description of Artificial Sequence: Synthetic polypeptide"
DIQLTQSPSSLSASVGDRVTMSCKSSQSVLYSANHKNYLAWYQQKPGKAPKLLIYWASTRESGVPSRFSGSGSGTDFTFTISSLQPEDIATYYCHQYLSSWTFGGGTKVQIKRTVAAPSVFIFPPSDEQLKSGTASVVCLLNNFYPREAKVQWKVDNALQSGNSQESVTEQDSKDSTYSLSSTLTLSKADYEKHKVYACEVTHQGLSSPVTKSFNRGEC

SEQ ID NO: 9885 - protein, 214 aa, Artificial Sequence; identical to SEQ ID NO: 9733
  source: /note="Description of Artificial Sequence: Synthetic polypeptide"

SEQ ID NO: 9886 - protein, 107 aa, Artificial Sequence
  source: /note="Description of Artificial Sequence: Synthetic polypeptide"
DILLTQSPGTLSLSPGERATLSCRASQSIGTNIHWYQQKPGQAPRLLIKYASESISGIPSRFSGSGSGTDFTLTISRLEPEDFAMYYCQQSDSWPTTFGQGTKVEIK

SEQ ID NO: 9887 - protein, 214 aa, Artificial Sequence [sequence omitted]

SEQ ID NO: 9888 - protein, 214 aa, Artificial Sequence; identical to SEQ ID NO: 9315
  source: /note="Description of Artificial Sequence: Synthetic polypeptide"

SEQ ID NO: 9889 - protein, 214 aa, Artificial Sequence; identical to SEQ ID NO: 9315
  source: /note="Description of Artificial Sequence: Synthetic polypeptide"

SEQ ID NO: 9890 - protein, 106 aa, Artificial Sequence
  source: /note="Description of Artificial Sequence: Synthetic polypeptide"
QIVLTQSPAIMSASPGEKVTITCSASSSISYMHWFQQKPGTSPKLWIYTTSNLASGVPARFSGSGSGTSYSLTISRMEAEDAATYYCHQRSTYPLTFGSGTKLELK

SEQ ID NO: 9891 - protein, 211 aa, Artificial Sequence; identical to SEQ ID NO: 9257
  source: /note="Description of Artificial Sequence: Synthetic polypeptide"

SEQ ID NO: 9892 - protein, 213 aa, Artificial Sequence
  source: /note="Description of Artificial Sequence: Synthetic polypeptide"
DILLTQSPVILSVSPGERVSFSCRASQSIGTNIHWYQQRTNGSPRLLIKYASESISGIPSRFSGSGSGTDFTLSINSVESEDIADYYCQQNNNWPTTFGAGTKLELKRTVAAPSVFIFPPSDEQLKSGTASVVCLLNNFYPREAKVQWKVDNALQSGNSQESVTEQDSKDSTYSLSSTLTLSKADYEKHKVYACEVTHQGLSSPVTKSFNRGA

SEQ ID NO: 9893 - protein, 213 aa, Artificial Sequence
  source: /note="Description of Artificial Sequence: Synthetic polypeptide"
QIVLTQSPAIMSASPGEKVTMTCSASSSVSYMNWYQQKSGTSPKRWIYDTSKLASGVPAHFRGSGSGTSYSLTISGMEAEDAATYYCQQWSSNPFTFGSGTKLEINRADTAPTVSIFPPSSEQLTSGGASVVCFLNNFYPKDINVKWKIDGSERQNGVLNSWTDQDSKDSTYSMSSTLTLTKDEYERHNSYTCEATHKTSTSPIVKSFNRNEC

SEQ ID NO: 9894 - protein, 214 aa, Artificial Sequence; identical to SEQ ID NO: 9315
  source: /note="Description of Artificial Sequence: Synthetic polypeptide"

SEQ ID NO: 9895 - protein, 107 aa, Artificial Sequence
  source: /note="Description of Artificial Sequence: Synthetic polypeptide"
DIQMTQSPSTLSASVGDRVTITCRASQSINTWLAWYQQKPGKAPKLLMYKASSLESGVPSRFIGSGSGTEFTLTISSLQPDDFATYYCQQYNSDSKMFGQGTKVEVK

SEQ ID NO: 9896 - protein, 116 aa, Artificial Sequence; identical to SEQ ID NO: 9216
  source: /note="Description of Artificial Sequence: Synthetic polypeptide"

SEQ ID NO: 9897 - protein, 117 aa, Artificial Sequence [sequence omitted]

SEQ ID NO: 9898 - protein, 213 aa, Artificial Sequence; identical to SEQ ID NO: 9449
  source: /note="Description of Artificial Sequence: Synthetic polypeptide"

SEQ ID NO: 9899 - protein, 107 aa, Artificial Sequence
  source: /note="Description of Artificial Sequence: Synthetic polypeptide"
DIVMTQTPSSLSASVGDRVTITCRASQDISKYLNWYQQKPGKAPKLLIYHTSRLHSGVPSRFSGSGSGTDTTLTISSLQPEDFATYYCQQGNTLPYTFGPGTKVDIK

SEQ ID NO: 9900 - protein, 450 aa, Artificial Sequence
  source: /note="Description of Artificial Sequence: Synthetic polypeptide"
QVQLVQSGGGVVQPGRSLRLSCAASGVSLPDYGVSWVRQAPGKGLEWVAVIWGSETTYYNSALKSRFTISRDNSKNTLYLQMNSLRAEDTAVYYCAKHYYYGGSYAMDYWGQGTLVTVSSASTKGPSVFPLAPSSKSTSGGTAALGCLVKDYFPEPVTVSWNSGALTSGVHTFPAVLQSSGLYSLSSVVTVPSSSLGTQTYICNVNHKPSNTKVDKKVEPKSCDKTHTCPPCPAPELLGGPSVFLFPPKPKDTLMISRTPEVTCVVVDVSHEDPEVKFNWYVDGVEVHNAKTKPREEQYNSTYRVVSVLTVLHQDWLNGKEYKCKVSNKALPAPIEKTISKAKGQPREPQVYTLPPSRDELTKNQVSLTCLVKGFYPSDIAVEWESNGQPENNYKTTPPVLDSDGSFFLYSKLTVDKSRWQQGNVFSCSVMHEALHNHYTQKSLSLSPGK

SEQ ID NO: 9901 - protein, 214 aa, Artificial Sequence
  source: /note="Description of Artificial Sequence: Synthetic polypeptide"
DIQMTQSPSSLSASVGDRVTITCRASQDISKYLNWYQQKPGKAIKLLIYHTSRLHSGVPSRFSGSGSGTDFTLTISSLQPEDFATYYCQQGATLPYTFGPGTKVDIKRTVAAPSVFIFPPSDEQLKSGTASVVCLLNNFYPREAKVQWKVDNALQSGNSQESVTEQDSKDSTYSLSSTLTLSKADYEKHKVYACEVTHQGLSSPVTKSFNRGEC

SEQ ID NO: 9902 - protein, 10 aa, Artificial Sequence
  source: /note="Description of Artificial Sequence: Synthetic peptide"
SASSSISYMH

SEQ ID NO: 9903 - protein, 7 aa, Artificial Sequence
  source: /note="Description of Artificial Sequence: Synthetic peptide"
TTSNLAS

SEQ ID NO: 9904 - protein, 9 aa, Artificial Sequence
  source: /note="Description of Artificial Sequence: Synthetic peptide"
HQRSTYPLT

SEQ ID NO: 9905 - protein, 128 aa, Artificial Sequence
  source: /note="Description of Artificial Sequence: Synthetic polypeptide"
MSVPTQVLGLLLLWLTDARCDIQMTQSPSSLSASVGDRVTITCLASEGISSYLAWYQQKPGKAPKLLIYGANSLQTGVPSRFSGSGSATDYTLTISSLQPEDFATYYCQQSYKFPNTFGQGTKVEVKR

SEQ ID NO: 9906 - protein, 6 aa, Artificial Sequence
  source: /note="Description of Artificial Sequence: Synthetic peptide"
QDIHGY

SEQ ID NO: 9907 - protein, 16 aa, Artificial Sequence
  source: /note="Description of Artificial Sequence: Synthetic peptide"
RSSQSLANSYGNTFLS

SEQ ID NO: 9908 - protein, 12 aa, Artificial Sequence
  source: /note="Description of Artificial Sequence: Synthetic peptide"
RASQSVGSSYLA

SEQ ID NO: 9909 - protein, 11 aa, Artificial Sequence
  source: /note="Description of Artificial Sequence: Synthetic peptide"
RASQSVSSYLA

SEQ ID NO: 9910 - protein, 11 aa, Artificial Sequence
  source: /note="Description of Artificial Sequence: Synthetic peptide"
RASQSVDSNLA

SEQ ID NO: 9911 - protein, 11 aa, Artificial Sequence
  source: /note="Description of Artificial Sequence: Synthetic peptide"
QGDSLRSYYAT

SEQ ID NO: 9912 - protein, 15 aa, Artificial Sequence
  source: /note="Description of Artificial Sequence: Synthetic peptide"
RASKSVDSYGNSFMH

SEQ ID NO: 9913 - protein, 12 aa, Artificial Sequence
  source: /note="Description of Artificial Sequence: Synthetic peptide"
RASQSVSSSYLA

SEQ ID NO: 9914 - protein, 11 aa, Artificial Sequence
  source: /note="Description of Artificial Sequence: Synthetic peptide"
RASQSVSSNLA

SEQ ID NO: 9915 - protein, 11 aa, Artificial Sequence
  source: /note="Description of Artificial Sequence: Synthetic peptide"
RTSENIYSYLA

SEQ ID NO: 9916 - protein, 11 aa, Artificial Sequence
  source: /note="Description of Artificial Sequence: Synthetic peptide"
QSLLYSIGYNY

SEQ ID NO: 9917 - protein, 17 aa, Artificial Sequence
  source: /note="Description of Artificial Sequence: Synthetic peptide"
KSSQSLLNSGNQKNYLA

SEQ ID NO: 9918 - protein, 10 aa, Artificial Sequence
  source: /note="Description of Artificial Sequence: Synthetic peptide"
SASSSVSYMY

SEQ ID NO: 9919 - protein, 11 aa, Artificial Sequence
  source: /note="Description of Artificial Sequence: Synthetic peptide"
RASQGISSWLA

SEQ ID NO: 9920 - protein, 17 aa, Artificial Sequence
  source: /note="Description of Artificial Sequence: Synthetic peptide"
KSSQSLLYTSSQKNYLA

SEQ ID NO: 9921 - protein, 11 aa, Artificial Sequence
  source: /note="Description of Artificial Sequence: Synthetic peptide"
RASQSVSSYLA

SEQ ID NO: 9922 - protein, 12 aa, Artificial Sequence
  source: /note="Description of Artificial Sequence: Synthetic peptide"
SASSSVSSSYLY

SEQ ID NO: 9923 - protein, 15 aa, Artificial Sequence
  source: /note="Description of Artificial Sequence: Synthetic peptide"
RASKGVSTSGYSYLH

SEQ ID NO: 9924 - protein, 17 aa, Artificial Sequence
  source: /note="Description of Artificial Sequence: Synthetic peptide"
KSSQSLLYSGNQKNYLA

SEQ ID NO: 9925 - protein, 11 aa, Artificial Sequence
  source: /note="Description of Artificial Sequence: Synthetic peptide"
RASQSVSSYLA

SEQ ID NO: 9926 - protein, 11 aa, Artificial Sequence
  source: /note="Description of Artificial Sequence: Synthetic peptide"
GASENIYGALN

SEQ ID NO: 9927 - protein, 10 aa, Artificial Sequence
  source: /note="Description of Artificial Sequence: Synthetic peptide"
SASISVSYMY

SEQ ID NO: 9928 - protein, 11 aa, Artificial Sequence
  source: /note="Description of Artificial Sequence: Synthetic peptide"
RASQSVYSYLA

SEQ ID NO: 9929 - protein, 3 aa, Artificial Sequence
  source: /note="Description of Artificial Sequence: Synthetic peptide"
YTS

SEQ ID NO: 9930 - protein, 7 aa, Artificial Sequence
  source: /note="Description of Artificial Sequence: Synthetic peptide"
GISNRFS

SEQ ID NO: 9931 - protein, 7 aa, Artificial Sequence
  source: /note="Description of Artificial Sequence: Synthetic peptide"
GAFSRAT

SEQ ID NO: 9932 - protein, 7 aa, Artificial Sequence
  source: /note="Description of Artificial Sequence: Synthetic peptide"
DASNRAT

SEQ ID NO: 9933 - protein, 7 aa, Artificial Sequence
  source: /note="Description of Artificial Sequence: Synthetic peptide"
GASTRAT

SEQ ID NO: 9934 - protein, 7 aa, Artificial Sequence
  source: /note="Description of Artificial Sequence: Synthetic peptide"
GENKRPS

SEQ ID NO: 9935 - protein, 7 aa, Artificial Sequence
  source: /note="Description of Artificial Sequence: Synthetic peptide"
LASNLES

SEQ ID NO: 9936 - protein, 7 aa, Artificial Sequence
  source: /note="Description of Artificial Sequence: Synthetic peptide"
GASSRAT

SEQ ID NO: 9937 - protein, 7 aa, Artificial Sequence
  source: /note="Description of Artificial Sequence: Synthetic peptide"
DASTRAT

SEQ ID NO: 9938 - protein, 7 aa, Artificial Sequence
  source: /note="Description of Artificial Sequence: Synthetic peptide"
NAKTLAE

SEQ ID NO: 9939 - protein, 3 aa, Artificial Sequence
  source: /note="Description of Artificial Sequence: Synthetic peptide"
LGS

SEQ ID NO: 9940 - protein, 7 aa, Artificial Sequence
  source: /note="Description of Artificial Sequence: Synthetic peptide"
GASTRES

SEQ ID NO: 9941 - protein, 7 aa, Artificial Sequence
  source: /note="Description of Artificial Sequence: Synthetic peptide"
DTSNLAS

SEQ ID NO: 9942 - protein, 7 aa, Artificial Sequence
  source: /note="Description of Artificial Sequence: Synthetic peptide"
AASSLQS

SEQ ID NO: 9943 - protein, 7 aa, Artificial Sequence
  source: /note="Description of Artificial Sequence: Synthetic peptide"
WASTRES

SEQ ID NO: 9944 - protein, 7 aa, Artificial Sequence
  source: /note="Description of Artificial Sequence: Synthetic peptide"
DASNRAT

SEQ ID NO: 9945 - protein, 7 aa, Artificial Sequence
  source: /note="Description of Artificial Sequence: Synthetic peptide"
STSNLAS

SEQ ID NO: 9946 - protein, 7 aa, Artificial Sequence
  source: /note="Description of Artificial Sequence: Synthetic peptide"
LASYLES

SEQ ID NO: 9947 - protein, 7 aa, Artificial Sequence
  source: /note="Description of Artificial Sequence: Synthetic peptide"
WASARES

SEQ ID NO: 9948 - protein, 7 aa, Artificial Sequence
  source: /note="Description of Artificial Sequence: Synthetic peptide"
DASNRAT

SEQ ID NO: 9949 - protein, 7 aa, Artificial Sequence
  source: /note="Description of Artificial Sequence: Synthetic peptide"
GATNLAD

SEQ ID NO: 9950 - protein, 7 aa, Artificial Sequence
  source: /note="Description of Artificial Sequence: Synthetic peptide"
DMSNLAS

SEQ ID NO: 9951 - protein, 7 aa, Artificial Sequence
  source: /note="Description of Artificial Sequence: Synthetic peptide"
DASNRAT

SEQ ID NO: 9952 - protein, 9 aa, Artificial Sequence
  source: /note="Description of Artificial Sequence: Synthetic peptide"
QQGNTLPWT

SEQ ID NO: 9953 - protein, 9 aa, Artificial Sequence
  source: /note="Description of Artificial Sequence: Synthetic peptide"
LQGTHQPYT

SEQ ID NO: 9954 - protein, 9 aa, Artificial Sequence
  source: /note="Description of Artificial Sequence: Synthetic peptide"
QQYGSSPWT

SEQ ID NO: 9955 - protein, 9 aa, Artificial Sequence
  source: /note="Description of Artificial Sequence: Synthetic peptide"
HQYGSTPLT

SEQ ID NO: 9956 - protein, 10 aa, Artificial Sequence
  source: /note="Description of Artificial Sequence: Synthetic peptide"
QQYINWPPIT

SEQ ID NO: 9957 - protein, 11 aa, Artificial Sequence
  source: /note="Description of Artificial Sequence: Synthetic peptide"
KSRDGSGQHLV

SEQ ID NO: 9958 - protein, 9 aa, Artificial Sequence
  source: /note="Description of Artificial Sequence: Synthetic peptide"
QQNNEDPRT

SEQ ID NO: 9959 - protein, 9 aa, Artificial Sequence
  source: /note="Description of Artificial Sequence: Synthetic peptide"
QQYGSSPCT

SEQ ID NO: 9960 - protein, 9 aa, Artificial Sequence
  source: /note="Description of Artificial Sequence: Synthetic peptide"
QQYDNWPLT

SEQ ID NO: 9961 - protein, 9 aa, Artificial Sequence
  source: /note="Description of Artificial Sequence: Synthetic peptide"
QHHYGIPFT

SEQ ID NO: 9962 - protein, 9 aa, Artificial Sequence
  source: /note="Description of Artificial Sequence: Synthetic peptide"
MQALQTPYT

SEQ ID NO: 9963 - protein, 9 aa, Artificial Sequence
  source: /note="Description of Artificial Sequence: Synthetic peptide"
QNVHSFPFT

SEQ ID NO: 9964 - protein, 9 aa, Artificial Sequence
  source: /note="Description of Artificial Sequence: Synthetic peptide"
QQWSGYPYT

SEQ ID NO: 9965 - protein, 9 aa, Artificial Sequence
  source: /note="Description of Artificial Sequence: Synthetic peptide"
QQYNIYPYT

SEQ ID NO: 9966 - protein, 9 aa, Artificial Sequence
  source: /note="Description of Artificial Sequence: Synthetic peptide"
QQYYAYPWT

SEQ ID NO: 9967 - protein, 9 aa, Artificial Sequence
  source: /note="Description of Artificial Sequence: Synthetic peptide"
QQRSNWPIT

SEQ ID NO: 9968 - protein, 9 aa, Artificial Sequence
  source: /note="Description of Artificial Sequence: Synthetic peptide"
HQWNRYPYT

SEQ ID NO: 9969 - protein, 9 aa, Artificial Sequence
  source: /note="Description of Artificial Sequence: Synthetic peptide"
QHSRDLPLT

SEQ ID NO: 9970 - protein, 9 aa, Artificial Sequence
  source: /note="Description of Artificial Sequence: Synthetic peptide"
QQYYSYPLT

SEQ ID NO: 9971 - protein, 9 aa, Artificial Sequence
  source: /note="Description of Artificial Sequence: Synthetic peptide"
QQSSNWPRT

SEQ ID NO: 9972 - protein, 7 aa, Artificial Sequence
  source: /note="Description of Artificial Sequence: Synthetic peptide"
VLNTPLT

SEQ ID NO: 9973 - protein, 9 aa, Artificial Sequence
  source: /note="Description of Artificial Sequence: Synthetic peptide"
MQWSGYPYT

SEQ ID NO: 9974 - protein, 10 aa, Artificial Sequence
  source: /note="Description of Artificial Sequence: Synthetic peptide"
QQRSNWPPFT

SEQ ID NO: 9975 - protein, 213 aa, Artificial Sequence
  source: /note="Description of Artificial Sequence: Synthetic polypeptide"
QIVLSQSPAILSASPGEKVTMTCRASSSVSYIHWFQQKPGSSPKPWIYATSNLASGVPVRFSGSGSGTSYSLTISRVEAEDAATYYCQQWTSNPPTFGGGTKLEIKRTVAAPSVFIFPPSDEQLKSGTASVVCLLNNFYPREAKVQWKVDNALQSGNSQESVTEQDSKDSTYSLSSTLTLSKADYEKHKVYACEVTHQGLSSPVTKSFNRGEC

SEQ ID NO: 9976 - protein, 326 aa, Artificial Sequence
  source: /note="Description of Artificial Sequence: Synthetic polypeptide"
ASTKGPSVFPLAPCSRSTSESTAALGCLVKDYFPEPVTVSWNSGALTSGVHTFPAVLQSSGLYSLSSVVTVPSSSLGTKTYTCNVDHKPSNTKVDKRVESKYGPPCPPCPAPPVAGPSVFLFPPKPKDTLMISRTPEVTCVVVDVSQEDPEVQFNWYVDGVEVHNAKTKPREEQFNSTYRVVSVLTVLHQDWLNGKEYKCKVSNKGLPSSIEKTISKAKGQPREPQVYTLPPSQEEMTKNQVSLTCLVKGFYPSDIAVEWESNGQPENNYKTTPPVLDSDGSFFLYSRLTVDKSRWQEGNVFSCSVMHEALHNRFTQKSLSLSLGK

SEQ ID NO: 9977 - protein, 329 aa, Artificial Sequence
  source: /note="Description of Artificial Sequence: Synthetic polypeptide"
ASTKGPSVFPLAPSSKSTSGGTAALGCLVKDYFPEPVTVSWNSGALTSGVHTFPAVLQSSGLYSLSSVVTVPSSSLGTQTYICNVNHKPSNTKVDKKVEPKSCDKTHTCPPCPAPPVAGPSVFLFPPKPKDTLMISRTPEVTCVVVDVSQEDPEVQFNWYVDGVEVHNAKTKPREEQFNSTYRVVSVLTVLHQDWLNGKEYKCKVSNKGLPSSIEKTISKAKGQPREPQVYTLPPSRDELTKNQVSLTCLVKGFYPSDIAVEWESNGQPENNYKTTPPVLDSDGSFFLYSKLTVDKSRWQQGNVFSCSVMHEALHNRFTQKSLSLSPGK

SEQ ID NO: 9978 - protein, 107 aa, Artificial Sequence [sequence omitted]

SEQ ID NO: 9979 - protein, 106 aa, Artificial Sequence; identical to SEQ ID NO: 4042
  source: /note="Description of Artificial Sequence: Synthetic polypeptide"

SEQ ID NO: 9980 - protein, 106 aa, Artificial Sequence; identical to SEQ ID NO: 4042
  source: /note="Description of Artificial Sequence: Synthetic polypeptide"

SEQ ID NO: 9981 - protein, 107 aa, Artificial Sequence [sequence omitted]

SEQ ID NO: 9982 - protein, 106 aa, Artificial Sequence; identical to SEQ ID NO: 4042
  source: /note="Description of Artificial Sequence: Synthetic polypeptide"

SEQ ID NO: 9983 - protein, 106 aa, Artificial Sequence; identical to SEQ ID NO: 4042
  source: /note="Description of Artificial Sequence: Synthetic polypeptide"

SEQ ID NO: 9984 - protein, 107 aa, Artificial Sequence [sequence omitted]

SEQ ID NO: 9985 - protein, 238 aa, Artificial Sequence; identical to SEQ ID NO: 4116
  source: /note="Description of Artificial Sequence: Synthetic polypeptide"

SEQ ID NO: 9986 - protein, 237 aa, Artificial Sequence; identical to SEQ ID NO: 4117
  source: /note="Description of Artificial Sequence: Synthetic polypeptide"

SEQ ID NO: 9987 - protein, 238 aa, Artificial Sequence; identical to SEQ ID NO: 4118
  source: /note="Description of Artificial Sequence: Synthetic polypeptide"

SEQ ID NO: 9988 - protein, 237 aa, Artificial Sequence; identical to SEQ ID NO: 4119
  source: /note="Description of Artificial Sequence: Synthetic polypeptide"

SEQ ID NO: 9989 - protein, 237 aa, Artificial Sequence; identical to SEQ ID NO: 4120
  source: /note="Description of Artificial Sequence: Synthetic polypeptide"

SEQ ID NO: 9990 - protein, 237 aa, Artificial Sequence; identical to SEQ ID NO: 4121
  source: /note="Description of Artificial Sequence: Synthetic polypeptide"

SEQ ID NO: 9991 - protein, 238 aa, Artificial Sequence; identical to SEQ ID NO: 4098
  source: /note="Description of Artificial Sequence: Synthetic polypeptide"

SEQ ID NO: 9992 - protein, 238 aa, Artificial Sequence; identical to SEQ ID NO: 4123
  source: /note="Description of Artificial Sequence: Synthetic polypeptide"

SEQ ID NO: 9993 - protein, 214 aa, Artificial Sequence; identical to SEQ ID NO: 4124
  source: /note="Description of Artificial Sequence: Synthetic polypeptide"

SEQ ID NO: 9994 - protein, 107 aa, Artificial Sequence
  source: /note="Description of Artificial Sequence: Synthetic polypeptide"
DIQMTQSPASLSVSVGETVTITCRASENIYSNLAWYRQKQGKSPQLLVFAASNLADGVPSRFSGSGSGTQYSLKINSLQSEDFGDYYCQHFWTTPWAFGGGTNLEIK

SEQ ID NO: 9995 - protein, 128 aa, Artificial Sequence
  source: /note="Description of Artificial Sequence: Synthetic polypeptide"
MSPSQLIGFLLLWVPASRGEIVLTQSPGTLSVSPGERATLSCRASQSIGSSLHWYQQKPGQAPRLLIYYASQSLSGIPDRFSGSGSGTDFTLTISRLEPEDFAVYYCHQSSRLPHTFGQGTKVEIKRT

SEQ ID NO: 9996 - protein, 128 aa, Artificial Sequence
  source: /note="Description of Artificial Sequence: Synthetic polypeptide"
MSPSQLIGFLLLWVPASRGEIVLTQSPDSLSVTPGERVTITCRASQSIGSSLHWYQQKPGQSPKLLIKYASQSLSGVPSRFSGSGSGTDFTLTISSLEAEDAAAYYCHQSSRLPHTFGQGTKVEIKRT

SEQ ID NO: 9997 - protein, 128 aa, Artificial Sequence
  source: /note="Description of Artificial Sequence: Synthetic polypeptide"
MSPSQLIGFLLLWVPASRGEIVLTQSPDSLSVTPGERVTITCRASQSIGSSLHWYQQKPGQSPKLLIKYASQSLSGVPSRFSGSGSGTDFTLTISSLEAEDFAVYYCHQSSRLPHTFGQGTKVEIKRT

SEQ ID NO: 9998 - protein, 128 aa, Artificial Sequence
  source: /note="Description of Artificial Sequence: Synthetic polypeptide"
MSPSQLIGFLLLWVPASRGEIVLTQSPGTLSVSPGERATLSCRASQSIGSSLHWYQQKPGQAPRLLIKYASQSLSGIPDRFSGSGSGTDFTLTISRLEPEDAAAYYCHQSSRLPHTFGQGTKVEIKRT

SEQ ID NO: 9999 - protein, 128 aa, Artificial Sequence
  source: /note="Description of Artificial Sequence: Synthetic polypeptide"
MSPSQLIGFLLLWVPASRGEIVLTQSPGTLSVSPGERATLSCRASQSIGSSLHWYQQKPGQAPRLLIKYASQSLSGIPDRFSGSGSGTDFTLTISRLEPEDFAVYYCHQSSRLPHTFGQGTKVEIKRT

SEQ ID NO: 10000 - protein, 128 aa, Artificial Sequence
  source: /note="Description of Artificial Sequence: Synthetic polypeptide"
MSPSQLIGFLLLWVPASRGEIVLTQVPDFQSVTPKEKVTITCRASQSIGSSLHWYQQKPDQSPKLLIKYASQSLSGVPSRFSGSGSGTDFTLTINSLEAEDAAAYYCHQSSRLPHTFGGGTKVEIKRT

SEQ ID NO: 10001 - protein, 128 aa, Artificial Sequence
  source: /note="Description of Artificial Sequence: Synthetic polypeptide"
MSPSQLIGFLLLWVPASRGEIVLTQSPDSLSVTPGERVTITCRASQSIGSSLHWYQQKPGQSPKLLIYYASQSLSGVPSRFSGSGSGTDFTLTISSLEAEDFAVYYCHQSSRLPHTFGQGTKVEIKRT

SEQ ID NO: 10002 - protein, 218 aa, Artificial Sequence
  source: /note="Description of Artificial Sequence: Synthetic polypeptide"
DIVLTQSPATLSVSPGERATISCRASQRVSSSTYSYMHWYQQKPGQPPKLLIKYASNLESGVPARFSGSGSGTDFTLTISSVEPEDFATYYCQHSWEIPPTFGGGTKLEIKRTVAAPSVFIFPPSDEQLKSGTASVVCLLNNFYPREAKVQWKVDNALQSGNSQESVTEQDSKDSTYSLSSTLTLSKADYEKHKVYACEVTHQGLSSPVTKSFNRGEC

SEQ ID NO: 10003 - protein, 112 aa, Artificial Sequence
  source: /note="Description of Artificial Sequence: Synthetic polypeptide"
QSVLTQPPSVSAAPGQKVTISCSGSSSNIENNHVSWYQQLPGTAPKLLIYDNNKRPSGIPDRFSGSKSGTSATLGITGLQTGDEADYYCETWDTSLSAGRVFGGGTKLTVLG

SEQ ID NO: 10004 - protein, 113 aa, Artificial Sequence [sequence omitted]

SEQ ID NO: 10005 - protein, 214 aa, Artificial Sequence
  source: /note="Description of Artificial Sequence: Synthetic polypeptide"
DIVMTQSPDSLAVSLGERATINCKSSQSLLNSGNQKNYLAWYQQKPGQPPKLLIYGASTRESGVPDRFSGSGSGTDFTLTISSLQAEDVAVYYCQNVHSFPFTFGGGTKLEIKRTVAAPSVFIFPPSDEQLKSGTASVVCLLNNFYPREAKVQWKVDNALQSGNSQESVTEQDSKDSTYSLSSTLTLSKEKHKVYACEVTHQSPVTKSFNRGEC

SEQ ID NO: 10006 - protein, 107 aa, Artificial Sequence
  source: /note="Description of Artificial Sequence: Synthetic polypeptide"
QVVLTQSPAIMSAFPGEKVTMTCSASSSVSYMNWYQQKSGTSPKRWIYDSSKLASGVPARFSGSGSGTSYSLTISSMETEDAATYYCQQWSRNPPTFGGGTKLQITR

SEQ ID NO: 10007 - protein, 106 aa, Artificial Sequence
  source: /note="Description of Artificial Sequence: Synthetic polypeptide"
DIQMTQSPSSLSASVGDRVTITCSASSSVSYMNWYQQKPGKAPKRLIYDSSKLASGVPSRFSGSGSGTEFTLTISSLQPEDFATYYCQQWSRNPPTFGGGTKVEIK

SEQ ID NO: 10008 - protein, 106 aa, Artificial Sequence
  source: /note="Description of Artificial Sequence: Synthetic polypeptide"
DVVMTQSPAIMSAFPGEKVTITCSASSSVSYMNWYQQKPGKAPKRWIYDSSKLASGVPSRFSGSGSGTEFTLTISSLQPEDFATYYCQQWSRNPPTFGGGTKVEIK

SEQ ID NO: 10009 - protein, 110 aa, Artificial Sequence
  source: /note="Description of Artificial Sequence: Synthetic polypeptide"
QAVVTQEPSLTVSPGGTVTLTCRSSTGAVTTSNYANWFQQKPGQAPRTLIGGTNKRAPWTPARFSGSLLGGKAALTITGAQAEDEADYYCALWYSNLWVFGGGTKLTVLG

SEQ ID NO: 10010 - protein, 110 aa, Artificial Sequence
  source: /note="Description of Artificial Sequence: Synthetic polypeptide"
QAVVTQEPSLTVSPGGTVTLTCRSSTGAVTTSNYANWVQQKPGQAPRTLIGGTNKRAPWTPARFSGSLLGGKAALTITGAQAEDEADYYCALWYSNLWVFGGGTKLTVLG

SEQ ID NO: 10011 - protein, 110 aa, Artificial Sequence
  source: /note="Description of Artificial Sequence: Synthetic polypeptide"
QAVVTQEPSLTVSPGGTVTLTCRSSTGAVTTSNYANWFQEKPGQAPRTLIGGTNKRAPWTPARFSGSLLGGKAALTITGAQAEDEADYYCALWYSNLWVFGGGTKLTVLG

SEQ ID NO: 10012 - protein, 110 aa, Artificial Sequence
  source: /note="Description of Artificial Sequence: Synthetic polypeptide"
QAVVTQEPSLTVSPGGTVTLTCRSSTGAVTTSNYANWFQQKPGQAPRGLIGGTNKRAPWTPARFSGSLLGGKAALTITGAQAEDEADYYCALWYSNLWVFGGGTKLTVLG

SEQ ID NO: 10013 - protein, 110 aa, Artificial Sequence
  source: /note="Description of Artificial Sequence: Synthetic polypeptide"
QAVVTQEPSLTVSPGGTVTLTCRSSTGAVTTSNYANWVQEKPGQAPRTLIGGTNKRAPWTPARFSGSLLGGKAALTITGAQAEDEADYYCALWYSNLWVFGGGTKLTVLG

SEQ ID NO: 10014 - protein, 110 aa, Artificial Sequence
  source: /note="Description of Artificial Sequence: Synthetic polypeptide"
QAVVTQEPSLTVSPGGTVTLTCRSSTGAVTTSNYANWVQQKPGQAPRGLIGGTNKRAPWTPARFSGSLLGGKAALTITGAQAEDEADYYCALWYSNLWVFGGGTKLTVLG

SEQ ID NO: 10015 - protein, 110 aa, Artificial Sequence
  source: /note="Description of Artificial Sequence: Synthetic polypeptide"
QAVVTQEPSLTVSPGGTVTLTCRSSTGAVTTSNYANWFQEKPGQAPRGLIGGTNKRAPWTPARFSGSLLGGKAALTITGAQAEDEADYYCALWYSNLWVFGGGTKLTVLG

SEQ ID NO: 10016 - protein, 110 aa, Artificial Sequence
  source: /note="Description of Artificial Sequence: Synthetic polypeptide"
QAVVTQEPSLTVSPGGTVTLTCRSSTGAVTTSNYANWVQEKPGQAPRGLIGGTNKRAPWTPARFSGSLLGGKAALTITGAQAEDEADYYCALWYSNLWVFGGGTKLTVLG

SEQ ID NO: 10017 - protein, 110 aa, Artificial Sequence
  source: /note="Description of Artificial Sequence: Synthetic polypeptide"
QAVVTQEPSLTVSPGGTVTLTCRSSTGAVTTSNYANWVQEKPGQAFRGLIGGTNKRAPWTPARFSGSLLGGKAALTITGAQAEDEADYYCALWYSNLWVFGGGTKLTVLG

SEQ ID NO: 10018 - protein, 110 aa, Artificial Sequence
  source: /note="Description of Artificial Sequence: Synthetic polypeptide"
QAVVTQESALTTSPGETVTLTCRSSTGAVTTSNYANWVQEKPDHLFTGLIGGTNKRAPGVPARFSGSLIGDKAALTITGAQTEDEAIYFCALWYSNLWVFGGGTKLTVLG

SEQ ID NO: 10019 - protein, 113 aa, Artificial Sequence
  source: /note="Description of Artificial Sequence: Synthetic polypeptide"
DIVMTQSPDSLAVSLGERATINCKSSQSLLYSRNQKNYLAWYQQKPGQPPKLLIFWASTRESGVPDRFSGSGFGTDFTLTISSLQAEDVAVYYCQQYFSYPLTFGQGTKVEIK

SEQ ID NO: 10020 - protein, 112 aa, Artificial Sequence
  source: /note="Description of Artificial Sequence: Synthetic polypeptide"
DIVMTQSPDSLAVSLGERATINCKSSQSLLYSRNQKNYLAWFQQKPGQPPKLLIFWASTRESGVPDRFSGSGFGTDFTLTISSLQAEDVAVYDCQQYFSYPLTFGQGTKVEI

SEQ ID NO: 10021 - protein, 113 aa, Artificial Sequence
  source: /note="Description of Artificial Sequence: Synthetic polypeptide"
DIVMTQSPDSLAVSLGERATINCKSSQSLLYSRNQKNYLAWYQQKPGQPPKLLIYWASTRESGVPDRFSGSGFGTDFTLTISSLQAEDVAVYYCQQYFSYPLTFGQGTKVEIK

SEQ ID NO: 10022 - protein, 106 aa, Artificial Sequence
  source: /note="Description of Artificial Sequence: Synthetic polypeptide"
QIVLTQSPALMSASPGEKVTMTCSASSSVRYMYWYQQKPRSSPKPWIHLTSNLASGVPARFSGSGSGTSYSLTISSMEAEDAATYYCQQWSSHPFTFGSGTKLEIK

SEQ ID NO: 10023 - protein, 113 aa, Artificial Sequence
  source: /note="Description of Artificial Sequence: Synthetic polypeptide"
DIVMSQSPSSLAVSVGEKVTMSCKSSQSLLYSNNQKNYLAWYQQKPGQSPKLLIYWASTRESGVPDRFTGSGSGTDFTLTISSVKAEDLAVYYCHQYYTSPYTFGGGTNLEIK

SEQ ID NO: 10024 - protein, 112 aa, Artificial Sequence
  source: /note="Description of Artificial Sequence: Synthetic polypeptide"
DVLMTQTPLSLPVSLGDQASISCRSSQSIVHSDGNTYLEWYLRKPGQSPRLLIYKVSNRFSGVPDRFSGSGSGTDFTLKISRVEAEDLGVYYCFQGSHAPWTFGGGTKLEIK

SEQ ID NO: 10025 - protein, 113 aa, Artificial Sequence
  source: /note="Description of Artificial Sequence: Synthetic polypeptide"
DIVMSQSPSSLTVSVGEKGTMSCKSSQSLLYSSNQKNYLAWYQQKPGQSPKLLIYWASTRESGVPDRFTGSGSGTDFSLTISSVLAEDLAVYFCHQYYSSPYTFGGGTKLEIK

SEQ ID NO: 10026 - protein, 108 aa, Artificial Sequence
  source: /note="Description of Artificial Sequence: Synthetic polypeptide"
QIVLTQSPAIMSASPGERVTLTCSASSSVSSSFLYWYQQKSGSSPKLWIYSTSTLASGVPARFSGSGSGTSYSLTISSMEAEDAASYFCHQWSSYPWTFGGGTKLEIK

SEQ ID NO: 10027 - protein, 113 aa, Artificial Sequence
  source: /note="Description of Artificial Sequence: Synthetic polypeptide"
DIVMTQSPSSLAMSVGQKVTMSCKSSQSLLNSSTQKNYLAWYQQKPGQSPKLLIYFASTRGSGVPDRFIGSGSGTDFTLTISSVQTEDLADYFCQQHYSIPCTFGGGTKLEIK

SEQ ID NO: 10028 - protein, 103 aa, Artificial Sequence
  source: /note="Description of Artificial Sequence: Synthetic polypeptide"
DIQMNQSPSSLSASLGDTITITCHVSQNINVWLTWYQQKPGNIPKLLLYKASNLQTGVPSRFSGSGSGTGFTLTISSLQPEDIATYYCQQGQSYPFTFGSGTK

SEQ ID NO: 10029 - protein, 111 aa, Artificial Sequence
  source: /note="Description of Artificial Sequence: Synthetic polypeptide"
DIVMSQSPSSLAVSVGEKVTMSCKSSQSLLYSNNQKNYLAWYQQKPGQSPKLLIYWASSRESGVPERFTGSGSGTDFTLTISSVKAEDLAVYYCQQYYSSPYTFGGGTKLK

SEQ ID NO: 10030 - protein, 107 aa, Artificial Sequence
  source: /note="Description of Artificial Sequence: Synthetic polypeptide"
DIVMTQSQKFMSTSVGDRVSVTCKASQNVAINVAWYQQKPGQSPKALIYSASYRYSVVPDRFTGSGSGTDFTLPISNVQSEGLADYFCLQYINYPYTFGGGTKLEIK

SEQ ID NO: 10031 - protein, 106 aa, Artificial Sequence
  source: /note="Description of Artificial Sequence: Synthetic polypeptide"
QIVLSQSPAILSASPGEKVTMTCRASSSVSYIHWYQQKAGSSPTSWIYATSNLASGVPTRFSGSGSGTSYSLTVNRVEAEDAATYYCQQWSTTPPTFGGGTRLEIK

SEQ ID NO: 10032 - protein, 110 aa, Artificial Sequence
  source: /note="Description of Artificial Sequence: Synthetic polypeptide"
DIVMTQSPSSLTVTAGEKVTMSCKSSQSLLKSGNQKNYLTWYQQKPGQPPKLLIYWASTRESGVPDRFTGSGFGTDFTLTISSVQAEDLAVYYCQSDYNYPTFGSGTKLK

SEQ ID NO: 10033 - protein, 106 aa, Artificial Sequence
  source: /note="Description of Artificial Sequence: Synthetic polypeptide"
QIVLTQSPAIMSASPGEKVTITCSASSSVSYMHWFQQKPGTSPKLWIYSTSNLASGVPARFSGSGSGTSYSLTISRMEAEDAATYYCQQRSTYPYTFGGGTKLEIK

SEQ ID NO: 10034 - protein, 106 aa, Artificial Sequence
  source: /note="Description of Artificial Sequence: Synthetic polypeptide"
QIVLSQSPAILSASPGEKVTMTCRASSSVSYMHWYQQKPGSSPKPWIYAASNLASGVPARFSATGSGTSYSLTISRVEAEDAATYCCQQWSNNPPTFGGGTKLEIK

SEQ ID NO: 10035 - protein, 111 aa, Artificial Sequence
  source: /note="Description of Artificial Sequence: Synthetic polypeptide"
DIVLTQSPASLAVSLGQRATISCRANESVEYYGTSLMQWYQQKPGQPPKLLIYAASSVKSGVPARFSGSGSGTDFSLNIHPVEEDDIAMYFCQQSRKVPSTFGGGTKLEIK

SEQ ID NO: 10036 - protein, 111 aa, Artificial Sequence
  source: /note="Description of Artificial Sequence: Synthetic polypeptide"
DIVLTQSPASLAVSLGQRATISCRAHESVEYYGTSLMQWYQQKPGQPPKLLIYAASSVKSGVPARFSGSGSGTDFSLNIHPVEEDDIAMYFCQQSRKVPSTFGGGTKLEIK

SEQ ID NO: 10037 - protein, 113 aa, Artificial Sequence
  source: /note="Description of Artificial Sequence: Synthetic polypeptide"
DIVMTQSPSSLAVSVGEKVTMSCKSSQSLLYSSNQKNYLAWYQQKPGQSPKLLIYWASTRESGVPDRFTGSGSGTDFTLTISSVKAEDLAVYYCQQYYNYPYTFGGGTKLEIK

SEQ ID NO: 10038 - protein, 109 aa, Artificial Sequence
  source: /note="Description of Artificial Sequence: Synthetic polypeptide"
DIVLTQSPASLAVSLGQRATISCRANENVEYYGTSLMQWYQQKPGQPPKLLIYAASNVKSGVPARFSGSGSGTDFSLNIHPVEEDDIAMYFCQQSRKVPSTFGGGTKLK

SEQ ID NO: 10039 - protein, 113 aa, Artificial Sequence
  source: /note="Description of Artificial Sequence: Synthetic polypeptide"
DIVMSQSPSSLAVSVGEKVTMSCKSSQSLLYSSNQKNYLAWYQQKPGQSPKLLIYWASTRESGVPDRFTGSGSGTDFTLTISTVKAEDLAVYYCHQYYSYPYTFGGGTKLEIK

SEQ ID NO: 10040 - protein, 111 aa, Artificial Sequence
  source: /note="Description of Artificial Sequence: Synthetic polypeptide"
DIVLTQSPGSLAVSLGQRATISCRASQSVSSSSYSYMHWYQQKPGQPPKLLIKFASNLESGVPARFSGSGSGTDFTLNIHPVEEEDTATYYCQHSWEIPLTFGAGTKLELK

SEQ ID NO: 10041 - protein, 107 aa, Artificial Sequence
  source: /note="Description of Artificial Sequence: Synthetic polypeptide"
DVQITQSPSYLAASPGETISINCRASKNISKYLAWYQEKPGKTNKLLIYSGSTLQSGIPSGFSGSGSGTDFTLTISSLEPEDFAMYYCQQHFEYPYTFGGGTKLEIK

SEQ ID NO: 10042 - protein, 105 aa, Artificial Sequence
  source: /note="Description of Artificial Sequence: Synthetic polypeptide"
QIVLTQSPAIMSASLGEEITLTCSATSSVGYIHWYQQTSGTSPRLLIYTTSNLASGVPSRFSGSGSGTFYSLTISSVEAEDAADYYCHQWSRYPTFGGGTKLEIK

SEQ ID NO: 10043 - protein, 107 aa, Artificial Sequence
  source: /note="Description of Artificial Sequence: Synthetic polypeptide"
DIKMTQSPSSTYASLGERVTITCKASQDINTYLYWFQQKPGKPPKTLIYRANRLIDGVPSRFSGSGSGQDYSLTISSLEYEDLGIYYCLQYDEFPYTFGGGTKLEIK

SEQ ID NO: 10044 - protein, 111 aa, Artificial Sequence
  source: /note="Description of Artificial Sequence: Synthetic polypeptide"
DIVLTQSPASLAVSLGQRATISCRADESVEYYGTSLMQWYQQKPGQPPKLLIYAASNVKSGVPARFSGSGSGTDFSLNIHPVEEDDIAIYFCQQSREVPSTFGGGTKLEIK

SEQ ID NO: 10045 - protein, 112 aa, Artificial Sequence
  source: /note="Description of Artificial Sequence: Synthetic polypeptide"
DIVMTQAAFSNPVTLGTSASISCRSSKSLLHSNGITYLYWYLQKPGQSPQLLIYQMSNLASGVPDRFSNSGSGTDFTLRISRVEAEDVGVYYCAQNLELPWTFGGGTKLEIK

SEQ ID NO: 10046 - protein, 108 aa, Artificial Sequence
  source: /note="Description of Artificial Sequence: Synthetic polypeptide"
DIVMTQSHKLMSASVGDRVSITCKASQDVGTAVAWYQQKPGRSPKLLIYWASNRHTGVPDRFTGSGSGTDFTLTISNVQSEDLADYFCQQFGSYPYTFGGGTKLEIKR

SEQ ID NO: 10047 - protein, 111 aa, Artificial Sequence
  source: /note="Description of Artificial Sequence: Synthetic polypeptide"
DIVLTQSPLSLLVSLGDQASISCRSSQSLVHSNGNTYLHWYLQKPGQSPNLLIFKVSNRFSGVPDRFSGSGSGTDFTLRISRVEAEDLGVYFCSQTTHVWTFGGGTKLEIK

SEQ ID NO: 10048 - protein, 108 aa, Artificial Sequence
  source: /note="Description of Artificial Sequence: Synthetic polypeptide"
DIQMTQSPATLSLSPGERATLSCRASQSVSSYLAWYQQKPGQAPRLLIYDASNRATGIPARFSGSGSGTDFTLTISSLEPEDFAVYYCQQRSNWPMYTFGQGTKLEIK

SEQ ID NO: 10049 - protein, 219 aa, Artificial Sequence; identical to SEQ ID NO: 9537
  source: /note="Description of Artificial Sequence: Synthetic polypeptide"

SEQ ID NO: 10050 - protein, 110 aa, Artificial Sequence
  source: /note="Description of Artificial Sequence: Synthetic polypeptide"
QAVVTQEPSLTVSPGGTVTLTCRSSTGAVTTSNYANWFQQKPDHLFTGLIGGTNKRAPWTPARFSGSLLGGKAALTITGAQAEDEADYYCALWYSNLWVFGGGTKLTVLG

SEQ ID NO: 10051 - protein, 110 aa, Artificial Sequence
  source: /note="Description of Artificial Sequence: Synthetic polypeptide"
DIQLTQSPSSLSASVGDRVTITCSVSSSISSNNLHWYQQKPGKAPKPWIYGTSNLASGVPSRFSGSGSGTDYTFTISSLQPEDIATYYCQQWSSYPYMYTFGQGTKVEIK

SEQ ID NO: 10052 - protein, 108 aa, Artificial Sequence
  source: /note="Description of Artificial Sequence: Synthetic polypeptide"
DIQMTQSPSSLSASVGDRVTITCRASQGISSWLAWYQQKPEKAPKSLIYAASSLQSGVPSRFSGSGSGTDFTLTISSLQPEDFATYYCQQYNIYPYTFGQGTKLEIKR

SEQ ID NO: 10053 - protein, 107 aa, Artificial Sequence [sequence omitted]

SEQ ID NO: 10054 - protein, 109 aa, Artificial Sequence
  source: /note="Description of Artificial Sequence: Synthetic polypeptide"
EIVLTQSPATLSLSPGERATLSCRASQSVSSYLAWYQQKPGQAPRLLIYDASNRATGIPARFSGSGSGTDFTLTISSLEPEDFAVYYCQQRSNWPFLTFGGGTKVEIKR

SEQ ID NO: 10055 - protein, 76 aa, Artificial Sequence
  source: /note="Description of Artificial Sequence: Synthetic polypeptide"
TITCQASQDISNYLNWYQQKPGKAPKLLIYDASNLETGVPSRFSGSGSGTDFTFTISSLQPEDIATYYCQQYDNLP

SEQ ID NO: 10056 - protein, 109 aa, Artificial Sequence
  source: /note="Description of Artificial Sequence: Synthetic polypeptide"
SSELTQDPAVSVALGQTVRVTCQGDSLRSYYASWYQQKPGQAPVLVIYGKNNRPSGIPDRFSGSSSGNTASLTITGAQAEDEADYYCSSRDSSGNHWVFGGGTELTVLG

SEQ ID NO: 10057 - protein, 107 aa, Artificial Sequence
  source: /note="Description of Artificial Sequence: Synthetic polypeptide"
EIVLTQSPGTLSLSPGERATLSCRASQSVSSTYLAWYQQKPGQAPRLLIYGASSRATGIPDRFSGSGSGTDFTLTISRLEPEDFAVYYCQHYDNSQTFGQGTKVEIK

SEQ ID NO: 10058 - protein, 112 aa, Artificial Sequence
  source: /note="Description of Artificial Sequence: Synthetic polypeptide"
DIVMTQSPDSLAVSLGERATINCKSSQSLLNSRTRKNYLAWYQQKPGQPPKLLIYWASTRESGVPDRFSGSGSGTDFTLTISSLQAEDVAVYYCTQSFILRTFGQGTKVEIK

SEQ ID NO: 10059 - protein, 112 aa, Artificial Sequence
  source: /note="Description of Artificial Sequence: Synthetic polypeptide"
DIVMTQSPSSLAVSAGEKVTMSCKSSQSLLNSRTRKNYLAWYQQKPGQSPKLLIYWASTRESGVPDRFTGSGSGTDFTLTISSVQAEDLAVYYCTQSFILRTFGGGTKLEIK

SEQ ID NO: 10060 - protein, 112 aa, Artificial Sequence
  source: /note="Description of Artificial Sequence: Synthetic polypeptide"
DIVMTQSPDSLAVSLGERATINCKSSQSLLNSRTRKNYLAWYQQKPGQSPKLLIYWTSTRKSGVPDRFSGSGSGTDFTLTISSLQAEDVAVYYCKQSFILRTFGQGTKVEIK

SEQ ID NO: 10061 - protein, 112 aa, Artificial Sequence; identical to SEQ ID NO: 10060
  source: /note="Description of Artificial Sequence: Synthetic polypeptide"

SEQ ID NO: 10062 - protein, 112 aa, Artificial Sequence
  source: /note="Description of Artificial Sequence: Synthetic polypeptide"
DIVMTQSPDSLAVSLGERATINCKSSQSLLNSRTRKNYLAWYQQKPGQSPKLLIYWTSTRKSGVPDRFSGSGSGTDFTLTISSLQAEDVAVYYCKQSFALRTFGQGTKVEIK

SEQ ID NO: 10063 - protein, 112 aa, Artificial Sequence
  source: /note="Description of Artificial Sequence: Synthetic polypeptide"
DIVMTQSPDSLAVSLGERATINCKSSQSLLNSRTRKNYLAWYQQKPGQSPKLLIYWTSTRKSGVPDRFSGSGSGTDFTLTISSLQAEDVAVYYCKASFILRTFGQGTKVEIK

SEQ ID NO: 10064 - protein, 112 aa, Artificial Sequence
  source: /note="Description of Artificial Sequence: Synthetic polypeptide"
DIVMTQSPDSLAVSLGERATINCKSSQSLLNSRTRKNYLAWYQQKPGQSPKLLIYWTSTRKSGVPDRFSGSGSGTDFTLTISSLQAEDVAVYYCKQSAILRTFGQGTKVEIK

SEQ ID NO: 10065 - protein, 112 aa, Artificial Sequence; identical to SEQ ID NO: 10060
  source: /note="Description of Artificial Sequence: Synthetic polypeptide"

SEQ ID NO: 10066 - protein, 112 aa, Artificial Sequence; identical to SEQ ID NO: 10060
  source: /note="Description of Artificial Sequence: Synthetic polypeptide"

SEQ ID NO: 10067 - protein, 112 aa, Artificial Sequence; identical to SEQ ID NO: 10060
  source: /note="Description of Artificial Sequence: Synthetic polypeptide"

SEQ ID NO: 10068 - protein, 112 aa, Artificial Sequence; identical to SEQ ID NO: 10060
  source: /note="Description of Artificial Sequence: Synthetic polypeptide"

SEQ ID NO: 10069 - protein, 112 aa, Artificial Sequence
  source: /note="Description of Artificial Sequence: Synthetic polypeptide"
DIVMTQSPDSLAVSLGERATINCKSSQSLLNSRTRKNYLAWYQQKPGQSPKLLIYWTSTRKSGVPDRFSGSGSGTDFTLTISSLQAEDVAVYYCTQSFILRTFGQGTKVEIK

SEQ ID NO: 10070 - protein, 107 aa, Artificial Sequence
  source: /note="Description of Artificial Sequence: Synthetic polypeptide"
DIQMTQSPSSLSASVGDRVTITCRASQDIRNYLNWYQQKPGKAPKLLIYYTSRLESGVPSRFSGSGSGTDYTLTISSLQPEDFATYYCQQGNTLPWTFGQGTKLELK

SEQ ID NO: 10071 - protein, 107 aa, Artificial Sequence [sequence omitted]

SEQ ID NO: 10072 - protein, 107 aa, Artificial Sequence [sequence omitted]

SEQ ID NO: 10073 - protein, 109 aa, Artificial Sequence
  source: /note="Description of Artificial Sequence: Synthetic polypeptide"
EAVVTQEPSLTVSPGGTVTLTCRSSTGAVTTSNYANWVQQKPGQAPRGLIGGTNKRAPWTPARFSGSLLGGKAALTLSGAQPEDEAEYYCALWYSNLWVFGGGTKLTVL

SEQ ID NO: 10074 - protein, 109 aa, Artificial Sequence
  source: /note="Description of Artificial Sequence: Synthetic polypeptide"
QAVVTQESALTTSPGETVTLTCRSSTGAVTTSNYANWVQEKPDHLFTGLIGGTNKRAPGVPARFSGSLIGDKAALTITGAQTEDEAIYFCALWYSNLWVFGGGTKLTVL

SEQ ID NO: 10075 - protein, 109 aa, Artificial Sequence
  source: /note="Description of Artificial Sequence: Synthetic polypeptide"
QAVVTQEPSLTVSPGGTVTLTCRSSTGAVTTSNYANWFQQKPGQAPRTLIYGTSNRAPWTPARFSGSLLGGKAALTLSGAQPEDEAEYFCALWYSTHFVFGTGTKVTVL

SEQ ID NO: 10076 - protein, 108 aa, Artificial Sequence
  source: /note="Description of Artificial Sequence: Synthetic polypeptide"
QAVVTQESALTTSPGGTVILTCRSSTGAVTTSNYANWVQEKPDHLFTGLIGGTSNRAPGVPVRFSGSLIGDKAALTITGAQTEDDAMYFCALWYSTHFVFGGGTKVTV

SEQ ID NO: 10077 - protein, 112 aa, Artificial Sequence
  source: /note="Description of Artificial Sequence: Synthetic polypeptide"
DIVMTQSPDSLAVSLGERATINCKSSQSLLNSRTRKNYLAWYQQKPGQPPKLLIYWASTRESGVPDRFSGSGSGTDFTLTISSLQAEDVAVYYCKQSYILRTFGQGTKVEIK

SEQ ID NO: 10078 - protein, 112 aa, Artificial Sequence; identical to SEQ ID NO: 10077
  source: /note="Description of Artificial Sequence: Synthetic polypeptide"

SEQ ID NO: 10079 - protein, 112 aa, Artificial Sequence
  source: /note="Description of Artificial Sequence: Synthetic polypeptide"
DIVLTQSPSSLAVSAGEKVTMSCKSSQSLLNSRTRKNYLAWYQQKPGQSPKLLIYWASTRESGVPDRFTGSGSGTDFTLTISSVQAEDLAVYYCKQSYILRTFGGGTKLEIK

SEQ ID NO: 10080 - protein, 112 aa, Artificial Sequence
  source: /note="Description of Artificial Sequence: Synthetic polypeptide"
DIVMTQSPDSLAVSLGERATINCKSSQSLLSGRTRKNYLAWYQQKPGQPPKLLIYWASTRESGVPDRFSGSGSGTDFTLTISSLQAEDVAVYYCKQSYYLLTFGQGTKVEIK

SEQ ID NO: 10081 - protein, 112 aa, Artificial Sequence
  source: /note="Description of Artificial Sequence: Synthetic polypeptide"
NIVMTQSPSSLAVSAGEKVTMSCKSSQSLLSGRTRKNYLAWYQQKPGQSPKLLIYWASTRESGVPDRFTGSGSGTDFTLTISSVQAEDLAVYYCKQSYYLLTFGAGTKLELK

SEQ ID NO: 10082 - protein, 112 aa, Artificial Sequence; identical to SEQ ID NO: 10080
  source: /note="Description of Artificial Sequence: Synthetic polypeptide"

SEQ ID NO: 10083 - protein, 113 aa, Artificial Sequence
  source: /note="Description of Artificial Sequence: Synthetic polypeptide"
DIQMTQSPSSLAVSLGERATINCKSSQSVLYSSNNKNYLVWYQQKLGQPPKLLIYRASTRESGVPDRFSGSGSGTDFTLTISSLQAEDVAVYYCQQYYSVPWTFGQGTKVEIK

SEQ ID NO: 10084 - protein, 112 aa, Artificial Sequence
  source: /note="Description of Artificial Sequence: Synthetic polypeptide"
DIVMTQSPSSLAVSAGEKVTMSCKSSQSLLNSRTRKNYLAWYQQKPGQSPKLLIYWASTRESGVPDRFTGSGSGTDFTLTISSVQAEDLAVYYCKQSFTLRTFGQGTKVEIK

SEQ ID NO: 10085 - protein, 112 aa, Artificial Sequence
  source: /note="Description of Artificial Sequence: Synthetic polypeptide"
DIVMTQSPSSLAVSAGETVTMNCKSSQSLLNSRTRKNYLAWYQQKPGQSPKLLIYWASTRESGVPDRFTGSGSGTDFTLTISTVQAEDLAVYYCKQSYTLRTFGQGTKVEIK

SEQ ID NO: 10086 - protein, 112 aa, Artificial Sequence
  source: /note="Description of Artificial Sequence: Synthetic polypeptide"
EIVLSQSPSSLAVSAGEKVTMSCKSSQSLLNSRTRKNYLAWYQQKPGQSPKLLIYWASTRESGVPDRFTGSGSGTDFTLTISSVQAEDLAVYYCKQSYTLRTFGGGTKLEIK

SEQ ID NO: 10087 - protein, 112 aa, Artificial Sequence
  source: /note="Description of Artificial Sequence: Synthetic polypeptide"
GIVMTQSPSSLAVSAGEKVTMSCKSSQSLLNSRTRKNYLAWYQQKPGQSPKLLIYWASTRESGVPDRFTGSGSGTDFTLTISSVQAEDLAVYYCKQSYILRTFGGGTKLEIK

SEQ ID NO: 10088 - protein, 108 aa, Artificial Sequence; identical to SEQ ID NO: 10076
  source: /note="Description of Artificial Sequence: Synthetic polypeptide"

SEQ ID NO: 10089 - protein, 112 aa, Artificial Sequence
  source: /note="Description of Artificial Sequence: Synthetic polypeptide"
DVVMTQTPSSLAVSTGEKVTMTCKSSQSLLNIRTRKNCLAWYQQKPGQSPKLLIFWASTRYSGVPDRFTGSGSGTDFTLTIRSVQPEDLAVYYCTQSYTLRTFGGGTKLEIK

SEQ ID NO: 10090 - protein, 112 aa, Artificial Sequence
  source: /note="Description of Artificial Sequence: Synthetic polypeptide"
DIVMTQSPSSLAVSAGEKVTMSCKSSQSLLNSRTRKNYLAWYQQKPGQSPKLLIYWASTRESGVPDRFTGSGSGTDFTLTISSVQTEDLAVYYCCQSFILRTFGGGTKLEIK

SEQ ID NO: 10091 - protein, 112 aa, Artificial Sequence
  source: /note="Description of Artificial Sequence: Synthetic polypeptide"
DIVMTQSPSSLAVSAGEKVTMTCKSSQSLLNSRTRKNYLAWYQQKPGQSPKLLIYWASTRESGVPDRFTGSGSGTDFTLTISSVQAEDLAVYYCKQSFILRTFGGGTKLELK

SEQ ID NO: 10092 - protein, 112 aa, Artificial Sequence
  source: /note="Description of Artificial Sequence: Synthetic polypeptide"
DIVMTQSPSSLAVSVGEKVTMSCKSSQSLLNSRTRKNYLAWYQQKPGQSPKLLIYWASTRESGVPVRFTGSGSGTDFTLTISSVQAEDLAVYYCTQSFILRTFGGGTKLEIK

SEQ ID NO: 10093 - protein, 112 aa, Artificial Sequence
  source: /note="Description of Artificial Sequence: Synthetic polypeptide"
DIVMTQSPSSLAVSAGEKVTMTCKSSQSLLNSRTRKNYLAWYQQKPGQSPKLLIYWASTRESGVPDRFTGSGSGTDFTLTISSVQAEDLAVYYCKQSFILRTFGGGTKLEIK

SEQ ID NO: 10094 - protein, 112 aa, Artificial Sequence
  source: /note="Description of Artificial Sequence: Synthetic polypeptide"
DIVMTQSPSSLAVSAGEKVTMSCKSSQSLLNSRTRKNYLAWYQQKPGQSPKLLIFWASTRESGVPDRFTGSGSGTDFTLTISSVQAEDLAVYYCKQSFILRTFGGGTKLELK

SEQ ID NO: 10095 - protein, 112 aa, Artificial Sequence; identical to SEQ ID NO: 10090
  source: /note="Description of Artificial Sequence: Synthetic polypeptide"

SEQ ID NO: 10096 - protein, 112 aa, Artificial Sequence
  source: /note="Description of Artificial Sequence: Synthetic polypeptide"
DIVMTQSPSSLAVSAGEMVTLHCKSSQSLLNIRTRKNYLAWYLQKPGQSPRLLIYWASTRASGVPDRFTGSGSGTDFTLTISSVQPEDLAVYYCTQSFILRTFGGGTKLELK

SEQ ID NO: 10097 - protein, 112 aa, Artificial Sequence
  source: /note="Description of Artificial Sequence: Synthetic polypeptide"
DIVMTQSPSSLAVSAGEKVTMSCKSSQSLLNSRTRKNYLAWYQQKPGLSPKLLIYWASTRESGVPERFTGSGSGTDFTLTISSVQTEDLAVYYCTQSFILRTFGGGTRLEIK

SEQ ID NO: 10098 - protein, 110 aa, Artificial Sequence
  source: /note="Description of Artificial Sequence: Synthetic polypeptide"
DMTQTPSSKSVPVGDTVTINCQASETVYSNNYLAWFQQKPGQPPKRLIYGVSTLDSGVPPRFSGSGSGTQFTLTISDVVCDDAATYYCAGYKTSSSYAIAFGGGTELEIL

SEQ ID NO: 10099 - protein, 107 aa, Artificial Sequence; identical to SEQ ID NO: 6292
  source: /note="Description of Artificial Sequence: Synthetic polypeptide"

SEQ ID NO: 10100 - protein, 118 aa, Artificial Sequence; identical to SEQ ID NO: 6293
  source: /note="Description of Artificial Sequence: Synthetic polypeptide"

SEQ ID NO: 10101 - protein, 114 aa, Artificial Sequence; identical to SEQ ID NO: 9312
  source: /note="Description of Artificial Sequence: Synthetic polypeptide"

SEQ ID NO: 10102 - protein, 107 aa, Artificial Sequence
  source: /note="Description of Artificial Sequence: Synthetic polypeptide"
DIAMTQSQKFMSTSVGDRVSVTCKASQNVDTNVAWYQQKPGQSPKALIYSASYRYSGVPDRFTGSGSGTDFTLTINNVQSEDLAEYFCQQYNNYPFTFGSGTKLEIK

SEQ ID NO: 10103 - protein, 107 aa, Artificial Sequence
  source: /note="Description of Artificial Sequence: Synthetic polypeptide"
DIQMTQTTSSLSASLGDRVTISCRASQDISNYLNWYQQKPDGTVKLLIYYTSRLHSGVPSRFSGSGSGTDYSLTIDNLEQEDIATYFCQQGNTLPPTFGGGTKLEIK

SEQ ID NO: 10104 - protein, 108 aa, Artificial Sequence
  source: /note="Description of Artificial Sequence: Synthetic polypeptide"
DIQMTQSPASLSVSVGETVTITCRASESIYSYLAWYQQKQGKSPQLLVYNTKTLPEGVPSRFSGSGSGTQFSLKINSLQPEDFGRYYCQHHYGTPPWTFGGGTNLEIK

SEQ ID NO: 10105 - protein, 107 aa, Artificial Sequence
  source: /note="Description of Artificial Sequence: Synthetic polypeptide"
DIQMTQSPSSLSASVGDRVTITCGASENIYHALNWYQQKPGKAPKLLIYGATNLADGVPSRFSGSGSGTDFTLTISSLQPEDFATYYCQNVLNTPLTFGQGTKVEIK

SEQ ID NO: 10106 - protein, 107 aa, Artificial Sequence [sequence omitted]

SEQ ID NO: 10107 - protein, 111 aa, Artificial Sequence
  source: /note="Description of Artificial Sequence: Synthetic polypeptide"
NIVLTQSPVSLAVSLGQRATISCRASESVDSHGNSFMHWYQQKPGQPPKLLIYLASNLESGVPARFTGGGSGSDFTLTIDPVEADDVGTYYCQQNNEDPYTFGGGTKLEIK

SEQ ID NO: 10108 - protein, 107 aa, Artificial Sequence
  source: /note="Description of Artificial Sequence: Synthetic polypeptide"
DVVLTQSPATLSVTPGDRVSLSCRASQSVSKYLHWYQQKSHESPRLLIKYVSQSISGIPSRFSGSGSGTDFTLSINSVETEDLGMYFCQQSNSWPHTFGAGTKLELK

SEQ ID NO: 10109 - protein, 110 aa, Artificial Sequence
  source: /note="Description of Artificial Sequence: Synthetic polypeptide"
QAVVTQESALTTSPGETVTLTCRSNTGAVTTSNYANWVQEKPDHLFTGLIGGTNNRAPGVPARFSGSLIGDKAALTITGAQTEDEAIYFCALWYSNHWVFGGGTKLTVLG

SEQ ID NO: 10110 - protein, 110 aa, Artificial Sequence; identical to SEQ ID NO: 10109
  source: /note="Description of Artificial Sequence: Synthetic polypeptide"

SEQ ID NO: 10111 - protein, 107 aa, Artificial Sequence
  source: /note="Description of Artificial Sequence: Synthetic polypeptide"
DIQMTQSPSSLSASVGDRVTITCRGSGNIHNYLAWYQQKPGKAPKLLVYNAKTLADGVPSRFSGSGSGTDYTLTISSLQPEDFATYYCQHFWSTPYTFGGGTKVEIK

SEQ ID NO: 10112 - protein, 110 aa, Artificial Sequence
  source: /note="Description of Artificial Sequence: Synthetic polypeptide"
SAEVTQPPSVSVSPGQTARITCSSNTGAVTTSNYANWVQQKPGQAPVGLIGGTNERPSGIPERFSGSSSGNTATLTISGAQAEDEADYYCALWYSNHWVFGGGTKLTVLG

SEQ ID NO: 10113 - protein, 107 aa, Artificial Sequence
  source: /note="Description of Artificial Sequence: Synthetic polypeptide"
DIQMTQSPASLSASVGETVTITCRGSGNIHNYLAWYQQKQGKSPQLLVYNAKTLADGVPSRFSGSGSGTQYSLKINSLQPEDFGSYYCQHFWSTPYTFGGGTKLEIK

SEQ ID NO: 10114 - protein, 112 aa, Artificial Sequence
  source: /note="Description of Artificial Sequence: Synthetic polypeptide"
DILLTQTPASLAVSLGQRATISCKASQSVDYDGDSYLNWYQQIPGQPPKLLIYDASNLVSGIPPRFSGSGSGTDFTLNIHPVEKVDAATYHCQQSTEDPWTFGGGTKLEIKR

SEQ ID NO: 10115 - protein, 114 aa, Artificial Sequence; identical to SEQ ID NO: 9440
  source: /note="Description of Artificial Sequence: Synthetic polypeptide"

SEQ ID NO: 10116 - protein, 107 aa, Artificial Sequence
  source: /note="Description of Artificial Sequence: Synthetic polypeptide"
DIQMTQTTSSLSASLGDRVTISCRASQDISKYLNWYQQKPDGTVKLLIYHTSRLHSGVPSRFSGSGSGTDYSLTISNLEQEDIATYFCQQGNTLPYTFGGGTKLEIT

SEQ ID NO: 10117 - protein, 115 aa, Artificial Sequence
  source: /note="Description of Artificial Sequence: Synthetic polypeptide"
DIVMTQAAPSIPVTPGESVSISCRSSKSLLNSNGNTYLYWFLQRPGQSPQLLIYRMSNLASGVPDRFSGSGSGTAFTLRISRVEAEDVGVYYCMQHLEYPFTFGAGTKLELKRAD

SEQ ID NO: 10118 - protein, 146 aa, Artificial Sequence
  source: /note="Description of Artificial Sequence: Synthetic polypeptide"
MSPAQFLFLLVLWIQETNGDVGMTQTPLTLSVTIGQPASFSCKSSQSLLYSNGKTYLNWLLQRPGQSPKRLIHLVSKLDSGVPDRFTGSGSGTDFTLKIGRVEAEDLGVYYCVQGTHFPYTFGGGTKLEIKRADAAPTVSIFPPSS

SEQ ID NO: 10119 - protein, 146 aa, Artificial Sequence
  source: /note="Description of Artificial Sequence: Synthetic polypeptide"
MEKDTLLLWVLLLWVPGSTGDIVLTQSPTSLAVSLGQRATISCRASESVDTFGISFMNWFQQKPGQPPKLLIHAASNQGSGVPARFSGSGSGTDFSLNIHPMEEDDSAMYFCQQSKEVPFTFGSGTKLEIKRADAAPTVSIFPPSS

SEQ ID NO: 10120 - protein, 111 aa, Artificial Sequence
  source: /note="Description of Artificial Sequence: Synthetic polypeptide"
EIVLTQSPDFQSVTPKEKVTITCRASESVDTFGISFMNWFQQKPDQSPKLLIHEASNQGSGVPSRFSGSGSGTDFTLTINSLEAEDAATYYCQQSKEVPFTFGGGTKVEIK

SEQ ID NO: 10121 - protein, 112 aa, Artificial Sequence
  source: /note="Description of Artificial Sequence: Synthetic polypeptide"
DIQLTQSPSSLSASVGDRVTITCKASQSVDYDGDSYLNWYQQIPGKAPKLLIYDASNLVSGIPPRFSGSGSGTDYTFTISSLQPEDIATYHCQQSTEDPWTFGGGTKLQIKR

SEQ ID NO: 10122 - protein, 112 aa, Artificial Sequence
  source: /note="Description of Artificial Sequence: Synthetic polypeptide"
DIQLTQSPASLAVSLGQRATISCKASQSVDYDGDSYLNWYQQIPGQPPKLLIYDASNLVSGIPPRFSGSGSGTDFTLNIHPVEKVDAATYHCQQSTEDPWTFGGGTKLEIKR

SEQ ID NO: 10123 - protein, 108 aa, Artificial Sequence
  source: /note="Description of Artificial Sequence: Synthetic polypeptide"
DIQMTQSPSSLSASVGDRVTITCQASQDIIKYLNWYQQTPGKAPKLLIYEANSLQAGVPSRFSGSGSGTDYTFTISSLQPEDIATYYCQQYQSLPYTFGQGTKLQITR

SEQ ID NO: 10124 - protein, 112 aa, Artificial Sequence
  source: /note="Description of Artificial Sequence: Synthetic polypeptide"
DIQLTQSPASLAVSLGQRATISCKASQSVDYDGDSYLNWYQQIPGQPPKLLIYDASNLVSGIPPRFSGSGSGTDFTLNIHPVEKVDAATYHCQQSTEDPWTFGGGTKLQIKR

SEQ ID NO: 10125 - protein, 112 aa, Artificial Sequence; identical to SEQ ID NO: 10121
  source: /note="Description of Artificial Sequence: Synthetic polypeptide"

SEQ ID NO: 10126 - protein, 108 aa, Artificial Sequence; identical to SEQ ID NO: 10123
  source: /note="Description of Artificial Sequence: Synthetic polypeptide"

SEQ ID NO: 10127 - protein, 112 aa, Artificial Sequence; identical to SEQ ID NO: 10121
  source: /note="Description of Artificial Sequence: Synthetic polypeptide"

SEQ ID NO: 10128 - protein, 120 aa, Artificial Sequence
  source: /note="Description of Artificial Sequence: Synthetic polypeptide"
VQLQQPGAELVKPGASVKMSCKASGYTFTSYNMHWVKQTPGRGLEWIGAIYPGNGDTSYNQKFKGKATLTADKSSSTAYMQLSSLTSEDSAVYYCARSTYYGGDWYFDVWGQGTTVTVSS

SEQ ID NO: 10129 - protein, 120 aa, Artificial Sequence
  source: /note="Description of Artificial Sequence: Synthetic polypeptide"
QVQLQQPGAELVKPGASVKMSCKASGYTFTSYNMHWVKQTPGRGLEWIGAIYPGNGDTSYNQKFKGKATLTADKSSSTAYMQLSSLTSEDSAVYYCARSTYYGGDWYFDVWGQGTTVTVS

SEQ ID NO: 10130 - protein, 107 aa, Artificial Sequence
  source: /note="Description of Artificial Sequence: Synthetic polypeptide"
DIQMTQSPSSLSASVGDRVTITCRASSSVSYMHWYQQKPGKAPKPLIYAPSNLASGVPSRFSGSGSGTDFTLTISSLQPEDFATYYCQQWSFNPPTFGQGTKVEIKR

SEQ ID NO: 10131 - protein, 106 aa, Artificial Sequence
  source: /note="Description of Artificial Sequence: Synthetic polypeptide"
DIQMTQSPSSLSASVGDRVTITCKTSQDINKYMAWYQQTPGKAPRLLIHYTSALQPGIPSRFSGSGSGRDYTFTISSLQPEDIATYYCLQYDNLWTFGQGTEVEIK

SEQ ID NO: 10132 - protein, 111 aa, Artificial Sequence
  source: /note="Description of Artificial Sequence: Synthetic polypeptide"
QIVMSQSPAILSASPGEKVTMTCRARSSVSYIHWYQQKPGSSPKPWIYATSNLASGVPGRFSGSGSGTSYSLTITRVEAEDAATYYCQQWSSKPPTFGGGTKLEIKRTDAA

SEQ ID NO: 10133 - protein, 108 aa, Artificial Sequence
  source: /note="Description of Artificial Sequence: Synthetic polypeptide"
QIVMSQSPAILSASPGEKVTMTCRARSSVSYIHWYQQKPGSSPKPWIYATSNLASGVPGRFSGSGSGTSYSLTITRVEAEDAATYYCQQWSSKPPTFGGGTKLEIKRA

SEQ ID NO: 10134 - protein, 107 aa, Artificial Sequence
  source: /note="Description of Artificial Sequence: Synthetic polypeptide"
EIVMTQSPATLSVSPGERTTLSCRASQSVSSNLAWYLQKPGQAPRLLIYGASTRATGIPARFSGSGSGTEFILTISSLQSEDFAVYYCQQYNNWPITFGQGTRLEIK

SEQ ID NO: 10135 - protein, 107 aa, Artificial Sequence
  source: /note="Description of Artificial Sequence: Synthetic polypeptide"
EIVMTQSPATLSVSPGERATLSCRASQSVSSNLAWYQQKPGQAPRLLIYGTSTRATGIPARFSGSGSGTEFTLTISSLQSEDFAVYYCQQYNNWPLTFGGGTKVEIK

SEQ ID NO: 10136 - protein, 107 aa, Artificial Sequence
  source: /note="Description of Artificial Sequence: Synthetic polypeptide"
EIVMTQSPATLSVSPGERATLSCRASQSVSSNLAWYQQKPGQAPRLLIYGASTRATGIPARFSGSGSGTEFTLTISSLQSEDFAVYYCQQYNNWPITFGQGTRLEIK

SEQ ID NO: 10137 - protein, 107 aa, Artificial Sequence; identical to SEQ ID NO: 10136
  source: /note="Description of Artificial Sequence: Synthetic polypeptide"

SEQ ID NO: 10138 - protein, 107 aa, Artificial Sequence; identical to SEQ ID NO: 10136
  source: /note="Description of Artificial Sequence: Synthetic polypeptide"

SEQ ID NO: 10139 - protein, 107 aa, Artificial Sequence
  source: /note="Description of Artificial Sequence: Synthetic polypeptide"
EIVLTQSPATLSLSPGERATLSCRASQSVSSYLVWYQQRPGQAPRLLIYEASNRATGIPARFSGSGSGTDFTLTISSLESEDFAVYYCQQRSNWPLTFGGGTKVEIK

SEQ ID NO: 10140 - protein, 107 aa, Artificial Sequence
  source: /note="Description of Artificial Sequence: Synthetic polypeptide"
EIVLTQSPATLSLSPGERATLSCRASQSVSSYLAWYQQKPGQAPRLLIYEASNRATGIPARFSGSGSGTDFTLTISSLEPEDFAVYYCQQRSNWPLTFGGGTKVEIK

SEQ ID NO: 10141 - protein, 107 aa, Artificial Sequence
  source: /note="Description of Artificial Sequence: Synthetic polypeptide"
EIVMTQSPATLSVSPGERATLSCRASQSVSHNLAWYQQKPGQAPRLLIYGAYTRATGIPDRFSGTGSGTEFTLTISSLQSEDFAVFYCQQYNNWPLTFGGGTKVEIK

SEQ ID NO: 10142 - protein, 107 aa, Artificial Sequence
  source: /note="Description of Artificial Sequence: Synthetic polypeptide"
EIVMTQSPATLSVSPGERATLSCRASQSVSHNLAWYQQKPGQAPRLLIYGAYTRATGIPARFSGSGSGTEFTLTISSLQSEDFAVYYCQQYNNWPLTFGGGTKVEIK

SEQ ID NO: 10143 - protein, 107 aa, Artificial Sequence
  source: /note="Description of Artificial Sequence: Synthetic polypeptide"
EIVMTQSPATLSMSPGERATLSCRASQSVSRNLAWYQQKVGQAPRLLISGASTRATGIPARFSGSGSGTEFTLTINSLQSEDFAVYYCQQSNDWPLTFGQGTRLEIK

SEQ ID NO: 10144 - protein, 107 aa, Artificial Sequence
  source: /note="Description of Artificial Sequence: Synthetic polypeptide"
EIVMTQSPATLSVSPGERATLSCRASQSVSRNLAWYQQKPGQAPRLLIYGASTRATGIPARFSGSGSGTEFTLTISSLQSEDFAVYYCQQSNDWPLTFGQGTRLEIK

SEQ ID NO: 10145 - protein, 107 aa, Artificial Sequence
  source: /note="Description of Artificial Sequence: Synthetic polypeptide"
EIVMTQSPATLSVSPGERATLSCRASQSVSSNLAWYQQKPGQAPRLLIYGASTRATGIPARFSGSGSGTEFTLTISSLQSEDFAVYYCQQYNNWPLTFGQGTRLEIK

SEQ ID NO: 10146 - protein, 107 aa, Artificial Sequence; identical to SEQ ID NO: 10145
  source: /note="Description of Artificial Sequence: Synthetic polypeptide"

SEQ ID NO: 10147 - protein, 107 aa, Artificial Sequence; identical to SEQ ID NO: 10135
  source: /note="Description of Artificial Sequence: Synthetic polypeptide"

SEQ ID NO: 10148 - protein, 107 aa, Artificial Sequence
  source: /note="Description of Artificial Sequence: Synthetic polypeptide"
EIVLTQSPATLSLSPGERATLSCRASQSVSSYLAWYQQKPGQAPRLLIYVASNRATGIPARFSGSGSGTDFTLTISSLEPDDFAVYYCQQRYYWPLTFGGGTKVEIK

SEQ ID NO: 10149 - protein, 107 aa, Artificial Sequence
  source: /note="Description of Artificial Sequence: Synthetic polypeptide"
EIVLTQSPATLSLSPGERATLSCRASQSVSSYLAWYQQKPGQAPRLLIYVASNRATGIPARFSGSGSGTDFTLTISSLEPEDFAVYYCQQRYYWPLTFGGGTKVEIK

SEQ ID NO: 10150 - protein, 107 aa, Artificial Sequence
  source: /note="Description of Artificial Sequence: Synthetic polypeptide"
EIVMTQSPATLSVSPGERATLSCRASQSVSSNLAWYQQKPGQAPRLLIYGASTRATGIPARFSGSGSGTEFTLTISSLQSEDFAVYYCQQYNNWPLTFGGGTKVEIK

SEQ ID NO: 10151 - protein, 107 aa, Artificial Sequence; identical to SEQ ID NO: 10150
  source: /note="Description of Artificial Sequence: Synthetic polypeptide"

SEQ ID NO: 10152 - protein, 107 aa, Artificial Sequence
  source: /note="Description of Artificial Sequence: Synthetic polypeptide"
DIVLTQSPATLSLSPGERATLSCRASQSVSSYLAWYQQKPGQAPRLLICDASHRATRIPARFSGSGSGTDFTLTISSLEPEDFAVYYCQQRSNWPITFGQGTRLEIK

SEQ ID NO: 10153 - protein, 107 aa, Artificial Sequence
  source: /note="Description of Artificial Sequence: Synthetic polypeptide"
EIVLTQSPATLSLSPGERATLSCRASQSVSSYLAWYQQKPGQAPRLLIYDASNRATGIPARFSGSGSGTDFTLTISSLEPEDFAVYYCQQRSNWPITFGQGTRLEIK

SEQ ID NO: 10154 - protein, 107 aa, Artificial Sequence
  source: /note="Description of Artificial Sequence: Synthetic polypeptide"
EIVLTQSPATLALSPGERATLSCRASQSVSKYLAWYQQKPGQAPRLLIYDASKRVTGIPGRLSGSGSGTDFTLTISSLEPEDFALYYCQQSSNWPITFGQGTRVEIK

SEQ ID NO: 10155 - protein, 107 aa, Artificial Sequence
  source: /note="Description of Artificial Sequence: Synthetic polypeptide"
EIVLTQSPATLSLSPGERATLSCRASQSVSKYLAWYQQKPGQAPRLLIYDASNRATGIPARFSGSGSGTDFTLTISSLEPEDFAVYYCQQSSNWPITFGQGTRLEIK

SEQ ID NO: 10156 - protein, 107 aa, Artificial Sequence
  source: /note="Description of Artificial Sequence: Synthetic polypeptide"
EIVLTQSPATLSLSPGERATLSCWASQSISRYLVWYQQKCGQAPRLLIYEASKRATGIPVRFSGSGSGTDFTLTISSLESEDFAVYYCQQRFNWPLTFGGGTKVEIK

SEQ ID NO: 10157 - protein, 106 aa, Artificial Sequence
  source: /note="Description of Artificial Sequence: Synthetic polypeptide"
EIVVTQSPATLSLSPGERATLSCRTSQTTTSYLAWYRQKPGQAPRLLIYDASNRAAGIPARFSGSGSGTDFTLTINSLEPEDFAVYYCQLRTNWITFGQGTRLEIK

SEQ ID NO: 10158 - protein, 107 aa, Artificial Sequence
  source: /note="Description of Artificial Sequence: Synthetic polypeptide"
EIVLTQSPATLSLSPGERATLSCRASQSISRYLAWYQQKPGQAPRLLIYEASNRATGIPARFSGSGSGTDFTLTISSLEPEDFAVYYCQQRFNWPLTFGGGTKVEIK

SEQ ID NO: 10159 - protein, 107 aa, Artificial Sequence
  source: /note="Description of Artificial Sequence: Synthetic polypeptide"
EIVMTQSPATLSVSPGERATLSCRASQSVSSKLAWYQQKPGQAPRLLIYGASTRATGIPARFSGSGSGTEFTLTISSLQSEDFAVYYCQQYNNWPITFGQGTRLEIK

SEQ ID NO: 10160 - protein, 107 aa, Artificial Sequence; identical to SEQ ID NO: 10159
  source: /note="Description of Artificial Sequence: Synthetic polypeptide"

SEQ ID NO: 10161 - protein, 106 aa, Artificial Sequence
  source: /note="Description of Artificial Sequence: Synthetic polypeptide"
EIVLTQSPATLSLSPGERATLSCRASQTTTSYLAWYQQKPGQAPRLLIYDASNRATGIPARFSGSGSGTDFTLTISSLEPEDFAVYYCQLRTNWITFGQGTRLEIK

SEQ ID NO: 10162 - protein, 107 aa, Artificial Sequence
  source: /note="Description of Artificial Sequence: Synthetic polypeptide"
EIVLTQSPATLSLSPGERAALSCRASQSVSNYLAWYQQKPGQAPRLLIYDASNRATGIPARFSGSGSGTDFTLTISSLEPEDFAVYYCQQRSNWPLTFGGGTKVEIR

SEQ ID NO: 10163 - protein, 107 aa, Artificial Sequence
  source: /note="Description of Artificial Sequence: Synthetic polypeptide"
EIVLTQSPATLSLSPGERATLSCRASQSVSNYLAWYQQKPGQAPRLLIYDASNRATGIPARFSGSGSGTDFTLTISSLEPEDFAVYYCQQRSNWPLTFGGGTKVEIK

SEQ ID NO: 10164 - protein, 107 aa, Artificial Sequence
  source: /note="Description of Artificial Sequence: Synthetic polypeptide"
EIVLTQSPATLSLSPGERATLSCRASQSVSRYLAWYQQKPGQAPRLLIHDASNRATGIPARFSGSGSGTDFTLTITSLEPEDFVVYYCQQRSDWPITFGQGTRLEIK

SEQ ID NO: 10165 - protein, 107 aa, Artificial Sequence
  source: /note="Description of Artificial Sequence: Synthetic polypeptide"
EIVLTQSPATLSLSPGERATLSCRASQSVSRYLAWYQQKPGQAPRLLIYDASNRATGIPARFSGSGSGTDFTLTISSLEPEDFAVYYCQQRSDWPITFGQGTRLEIK

SEQ ID NO: 10166 - protein, 107 aa, Artificial Sequence; identical to SEQ ID NO: 10153
  source: /note="Description of Artificial Sequence: Synthetic polypeptide"

SEQ ID NO: 10167 - protein, 125 aa, Artificial Sequence; identical to SEQ ID NO: 9444
  source: /note="Description of Artificial Sequence: Synthetic polypeptide"

SEQ ID NO: 10168 - protein, 107 aa, Artificial Sequence
  source: /note="Description of Artificial Sequence: Synthetic polypeptide"
EIVLTQSPATLSLSPGERATLSCRASQSVSSYLAWYQQKPGQAPRLLIYDASNRATGIPARFSGSGSGTDFTLTISSLEPEDFAVYYCQQRSDWPLTFGGGTKVEIK

SEQ ID NO: 10169 - protein, 107 aa, Artificial Sequence; identical to SEQ ID NO: 10153
  source: /note="Description of Artificial Sequence: Synthetic polypeptide"

SEQ ID NO: 10170 - protein, 103 aa, Artificial Sequence
  source: /note="Description of Artificial Sequence: Synthetic polypeptide"
NPVTLGTSASISCRSSKSLLHSNGITYLYWYLQKPGQSPQLLIYQMSNLVSGVPDRFSSSGSGTDFTLRISRVEAEDVGVYYCAQNLELPYTFGGGTKLEIKR

SEQ ID NO: 10171 - protein, 115 aa, Artificial Sequence; identical to SEQ ID NO: 9766
  source: /note="Description of Artificial Sequence: Synthetic polypeptide"

SEQ ID NO: 10172 - protein, 115 aa, Artificial Sequence; identical to SEQ ID NO: 9766
  source: /note="Description of Artificial Sequence: Synthetic polypeptide"

SEQ ID NO: 10173 - protein, 107 aa, Artificial Sequence
  source: /note="Description of Artificial Sequence: Synthetic polypeptide"
QIVLSQSPAILSASPGEKVTMTCRASSSVSYMHWYQQKPGSSPKPWIYAPSNLASGVPARFSGSGSGTSYSLTISRVEAEDAATYYCQQWSFNPPTFGAGTKLELKR

SEQ ID NO: 10174 - protein, 107 aa, Artificial Sequence; identical to SEQ ID NO: 10130
  source: /note="Description of Artificial Sequence: Synthetic polypeptide"

SEQ ID NO: 10175 - protein, 127 aa, Artificial Sequence
  source: /note="Description of Artificial Sequence: Synthetic polypeptide"
MEAPAQLLFLLLLWLPDTTGEIVLTQSPATLSLSPGERATLSCRASQSVSSYLAWYQQKPGQAPRLLIYDASNRATGIPARFSGSGSGTDFTLTISSLEPEDFAVYYCQQRSNWPITFGQGTRLEIK

SEQ ID NO: 10176 - protein, 107 aa, Artificial Sequence
  source: /note="Description of Artificial Sequence: Synthetic polypeptide"
EIVLTQSPATLSLSPGERATLSCRASQSVSSYLAWYQQKPGQAPRLLIYDASNRATGIPARFSGSGSGTDFTLTISSLEPEDFAVYYCQQRSNWPLTFGGGTKVEIK

SEQ ID NO: 10177 - protein, 106 aa, Artificial Sequence
  source: /note="Description of Artificial Sequence: Synthetic polypeptide"
DIQMTQSPSSLSASVGDRVTITCRASQGISSWLAWYQQKPEKAPKSLIYAASSLQSGVPSRFSGSGSGTDFTLTISSLQPEDFATYYCQQYNSVFTFGPGTKVDIK

SEQ ID NO: 10178 - protein, 107 aa, Artificial Sequence; identical to SEQ ID NO: 10168
  source: /note="Description of Artificial Sequence: Synthetic polypeptide"

SEQ ID NO: 10179 - protein, 125 aa, Artificial Sequence; identical to SEQ ID NO: 9444
  source: /note="Description of Artificial Sequence: Synthetic polypeptide"

SEQ ID NO: 10180 - protein, 106 aa, Artificial Sequence; identical to SEQ ID NO: 7304
  source: /note="Description of Artificial Sequence: Synthetic polypeptide"

SEQ ID NO: 10181 - protein, 107 aa, Artificial Sequence; identical to SEQ ID NO: 10134
  source: /note="Description of Artificial Sequence: Synthetic polypeptide"

SEQ ID NO: 10182 - protein, 107 aa, Artificial Sequence; identical to SEQ ID NO: 10135
  source: /note="Description of Artificial Sequence: Synthetic polypeptide"

SEQ ID NO: 10183 - protein, 107 aa, Artificial Sequence; identical to SEQ ID NO: 10134
  source: /note="Description of Artificial Sequence: Synthetic polypeptide"

SEQ ID NO: 10184 - protein, 107 aa, Artificial Sequence; identical to SEQ ID NO: 10136
  source: /note="Description of Artificial Sequence: Synthetic polypeptide"

SEQ ID NO: 10185 - protein, 107 aa, Artificial Sequence; identical to SEQ ID NO: 10136
  source: /note="Description of Artificial Sequence: Synthetic polypeptide"

SEQ ID NO: 10186 - protein, 107 aa, Artificial Sequence; identical to SEQ ID NO: 10136
  source: /note="Description of Artificial Sequence: Synthetic polypeptide"

SEQ ID NO: 10187 - protein, 107 aa, Artificial Sequence; identical to SEQ ID NO: 10136
  source: /note="Description of Artificial Sequence: Synthetic polypeptide"

SEQ ID NO: 10188 - protein, 107 aa, Artificial Sequence; identical to SEQ ID NO: 10139
  source: /note="Description of Artificial Sequence: Synthetic polypeptide"

SEQ ID NO: 10189 - protein, 107 aa, Artificial Sequence; identical to SEQ ID NO: 10139
  source: /note="Description of Artificial Sequence: Synthetic polypeptide"

SEQ ID NO: 10190 - protein, 107 aa, Artificial Sequence; identical to SEQ ID NO: 10140
  source: /note="Description of Artificial Sequence: Synthetic polypeptide"

SEQ ID NO: 10191 - protein, 107 aa, Artificial Sequence; identical to SEQ ID NO: 10141
  source: /note="Description of Artificial Sequence: Synthetic polypeptide"

SEQ ID NO: 10192 - protein, 107 aa, Artificial Sequence; identical to SEQ ID NO: 10141
  source: /note="Description of Artificial Sequence: Synthetic polypeptide"

SEQ ID NO: 10193 - protein, 107 aa, Artificial Sequence; identical to SEQ ID NO: 10142
  source: /note="Description of Artificial Sequence: Synthetic polypeptide"

SEQ ID NO: 10194 - protein, 107 aa, Artificial Sequence; identical to SEQ ID NO: 10143
  source: /note="Description of Artificial Sequence: Synthetic polypeptide"

SEQ ID NO: 10195 - protein, 107 aa, Artificial Sequence; identical to SEQ ID NO: 10135
  source: /note="Description of Artificial Sequence: Synthetic polypeptide"

SEQ ID NO: 10196 - protein, 107 aa, Artificial Sequence
  source: /note="Description of Artificial Sequence: Synthetic polypeptide"
EIVMTQSPATLSVSPGERATLSCRASQSVSRNLAWYQQKVGQAPRLLISGASTRATGIPARFSGSGSGTEFTLTINSLQSEDFAVYYCQQSNDWPLTFGQGTRLEIK

SEQ ID NO: 10197 - protein, 107 aa, Artificial Sequence; identical to SEQ ID NO: 10144
  source: /note="Description of Artificial Sequence: Synthetic polypeptide"

SEQ ID NO: 10198 - protein, 107 aa, Artificial Sequence; identical to SEQ ID NO: 10145
  source: /note="Description of Artificial Sequence: Synthetic polypeptide"

SEQ ID NO: 10199 - protein, 107 aa, Artificial Sequence; identical to SEQ ID NO: 10145
  source: /note="Description of Artificial Sequence: Synthetic polypeptide"

SEQ ID NO: 10200 - protein, 107 aa, Artificial Sequence; identical to SEQ ID NO: 10145
  source: /note="Description of Artificial Sequence: Synthetic polypeptide"

SEQ ID NO: 10201 - protein, 107 aa, Artificial Sequence; identical to SEQ ID NO: 10135
  source: /note="Description of Artificial Sequence: Synthetic polypeptide"

SEQ ID NO: 10202 - protein, 107 aa, Artificial Sequence; identical to SEQ ID NO: 10148
  source: /note="Description of Artificial Sequence: Synthetic polypeptide"

SEQ ID NO: 10203 - protein, 107 aa, Artificial Sequence; identical to SEQ ID NO: 10148
  source: /note="Description of Artificial Sequence: Synthetic polypeptide"

SEQ ID NO: 10204 - protein, 107 aa, Artificial Sequence; identical to SEQ ID NO: 10149
  source: /note="Description of Artificial Sequence: Synthetic polypeptide"

SEQ ID NO: 10205 - protein, 107 aa, Artificial Sequence; identical to SEQ ID NO: 10150
  source: /note="Description of Artificial Sequence: Synthetic polypeptide"

SEQ ID NO: 10206 - protein, 107 aa, Artificial Sequence; identical to SEQ ID NO: 10150
  source: /note="Description of Artificial Sequence: Synthetic polypeptide"

SEQ ID NO: 10207 - protein, 107 aa, Artificial Sequence; identical to SEQ ID NO: 10150
  source: /note="Description of Artificial Sequence: Synthetic polypeptide"

SEQ ID NO: 10208 - protein, 107 aa, Artificial Sequence; identical to SEQ ID NO: 10152
  source: /note="Description of Artificial Sequence: Synthetic polypeptide"

SEQ ID NO: 10209 - protein, 107 aa, Artificial Sequence
  source: /note="Description of Artificial Sequence: Synthetic polypeptide"
EIVLTQSPATLSLSPGERATLSCRASQSVSSYLAWYQQKPGQAPRLLICDASHRATRIPARFSGSGSGTDFTLTISSLEPEDFAVYYCQQRSNWPITFGQGTRLEIK

SEQ ID NO: 10210 - protein, 107 aa, Artificial Sequence; identical to SEQ ID NO: 10153
  source: /note="Description of Artificial Sequence: Synthetic polypeptide"

SEQ ID NO: 10211 - protein, 107 aa, Artificial Sequence; identical to SEQ ID NO: 10154
  source: /note="Description of Artificial Sequence: Synthetic polypeptide"

SEQ ID NO: 10212 - protein, 107 aa, Artificial Sequence
  source: /note="Description of Artificial Sequence: Synthetic polypeptide"
EIVLTQSPATLSLSPGERATLSCRASQSVSKYLAWYQQKPGQAPRLLIYDASKRVTGIPGRLSGSGSGTDFTLTISSLEPEDFALYYCQQSSNWPITFGQGTRLEIK

SEQ ID NO: 10213 - protein, 107 aa, Artificial Sequence; identical to SEQ ID NO: 10155
  source: /note="Description of Artificial Sequence: Synthetic polypeptide"

SEQ ID NO: 10214 - protein, 107 aa, Artificial Sequence; identical to SEQ ID NO: 10156
  source: /note="Description of Artificial Sequence: Synthetic polypeptide"

SEQ ID NO: 10215 - protein, 106 aa, Artificial Sequence; identical to SEQ ID NO: 10157
  source: /note="Description of Artificial Sequence: Synthetic polypeptide"

SEQ ID NO: 10216 - protein, 107 aa, Artificial Sequence; identical to SEQ ID NO: 10156
  source: /note="Description of Artificial Sequence: Synthetic polypeptide"

SEQ ID NO: 10217 - protein, 107 aa, Artificial Sequence; identical to SEQ ID NO: 10158
  source: /note="Description of Artificial Sequence: Synthetic polypeptide"

SEQ ID NO: 10218 - protein, 107 aa, Artificial Sequence; identical to SEQ ID NO: 10159
  source: /note="Description of Artificial Sequence: Synthetic polypeptide"

SEQ ID NO: 10219 - protein, 107 aa, Artificial Sequence; identical to SEQ ID NO: 10159
  source: /note="Description of Artificial Sequence: Synthetic polypeptide"

SEQ ID NO: 10220 - protein, 107 aa, Artificial Sequence; identical to SEQ ID NO: 10159
  source: /note="Description of Artificial Sequence: Synthetic polypeptide"

SEQ ID NO: 10221 - protein, 106 aa, Artificial Sequence
  source: /note="Description of Artificial Sequence: Synthetic polypeptide"
EIVLTQSPATLSLSPGERATLSCRTSQTTTSYLAWYRQKPGQAPRLLIYDASNRAAGIPARFSGSGSGTDFTLTINSLEPEDFAVYYCQLRTNWITFGQGTRLEIK

SEQ ID NO: 10222 - protein, 106 aa, Artificial Sequence; identical to SEQ ID NO: 10161
  source: /note="Description of Artificial Sequence: Synthetic polypeptide"

SEQ ID NO: 10223 - protein, 107 aa, Artificial Sequence; identical to SEQ ID NO: 10162
  source: /note="Description of Artificial Sequence: Synthetic polypeptide"

SEQ ID NO: 10224 - protein, 107 aa, Artificial Sequence
  source: /note="Description of Artificial Sequence: Synthetic polypeptide"
EIVLTQSPATLSLSPGERAALSCRASQSVSNYLAWYQQKPGQAPRLLIYDASNRATGIPARFSGSGSGTDFTLTISSLEPEDFAVYYCQQRSNWPLTFGGGTKVEIK

SEQ ID NO: 10225 - protein, 107 aa, Artificial Sequence; identical to SEQ ID NO: 10163
  source: /note="Description of Artificial Sequence: Synthetic polypeptide"

SEQ ID NO: 10226 - protein, 107 aa, Artificial Sequence; identical to SEQ ID NO: 10164
  source: /note="Description of Artificial Sequence: Synthetic polypeptide"

SEQ ID NO: 10227 - protein, 107 aa, Artificial Sequence; identical to SEQ ID NO: 10164
  source: /note="Description of Artificial Sequence: Synthetic polypeptide"

SEQ ID NO: 10228 - protein, 107 aa, Artificial Sequence; identical to SEQ ID NO: 10165
  source: /note="Description of Artificial Sequence: Synthetic polypeptide"

SEQ ID NO: 10229 - protein, 106 aa, Artificial Sequence
  source: /note="Description of Artificial Sequence: Synthetic polypeptide"
DVVMTQSPAFLSVTPGEKVTITCRASSSVSYIHWFQQKPGKAPKSLIYATSNLASGVPSRFSGSGSGTDFTLTINSLEAEDAATYYCQQWTSNPPTFGGGTKVEIK

SEQ ID NO: 10230 - protein, 106 aa, Artificial Sequence
  source: /note="Description of Artificial Sequence: Synthetic polypeptide"
DVVMTQSPAFLSVTPGEKVTITCRASSSVSYIHWFQQKPGKAPKPLIYATSNLASGVPSRFSGSGSGTDFTLTINSLEAEDAATYYCQQWTSNPPTFGGGTKVEIK

SEQ ID NO: 10231 - protein, 106 aa, Artificial Sequence
  source: /note="Description of Artificial Sequence: Synthetic polypeptide"
DVVMTQSPAFLSVTPGEKVTITCRASSSVSYIHWFQQKPGKAPKPLIYATSNLASGVPSRFSGSGSGTDFTLTINSLEAEDAATYYCQQWTSKPPTFGGGTKVEIK

SEQ ID NO: 10232 - protein, 106 aa, Artificial Sequence
  source: /note="Description of Artificial Sequence: Synthetic polypeptide"
DIVLTQSPAIITASPGEKVTMTCRASSSVNYMDWYQKKPGSSPKPWIYATSNLASGVPSRFSGSGSGTTYSMTISSLEAEDAATYYCQQWSFNPPTFGGGTKLEIK

SEQ ID NO: 10233 - protein, 121 aa, Artificial Sequence
  source: /note="Description of Artificial Sequence: Synthetic polypeptide"
QVQLQQPGAELKKPGASVKVSCKASGYTFTSYNMHWVKQTPGRGLEWIGAIYPGNGDTSYNQKFKGKTTLTADKSSSTAYMELSSLRSEDTAVYYCARSTYYGGDWYFNVWGAGTTVTVSA

SEQ ID NO: 10234 - protein, 106 aa, Artificial Sequence
  source: /note="Description of Artificial Sequence: Synthetic polypeptide"
QIVLSQSPAIITASPGEKVTMTCRASTSASYIHWFQQKPTSSPKPWIYATSNLASGVPSRFSGSGSGTTYSMTISSLEAEDAATYYCQQWTSNPPTFGGGTKLEIK

SEQ ID NO: 10235 - protein, 106 aa, Artificial Sequence
  source: /note="Description of Artificial Sequence: Synthetic polypeptide"
QIVLSQSPAIITASPGEKVTMTCRASTSVSYIHWFQQKPGSSPKPWIYATSNLASGVPSRFSGSGSGTTYSMTISSLEAEDAATYYCQQWTSNPPTFGGGTKLEIK

SEQ ID NO: 10236 - protein, 106 aa, Artificial Sequence [sequence omitted]

SEQ ID NO: 10237 - protein, 213 aa, Artificial Sequence; identical to SEQ ID NO: 9449
  source: /note="Description of Artificial Sequence: Synthetic polypeptide"

SEQ ID NO: 10238 - protein, 213 aa, Artificial Sequence; identical to SEQ ID NO: 9883
  source: /note="Description of Artificial Sequence: Synthetic polypeptide"

SEQ ID NO: 10239 - protein, 107 aa, Artificial Sequence
  source: /note="Description of Artificial Sequence: Synthetic polypeptide"
DIQMTQSPSSLSASVGDRVTITCRASSSVSYLHWYQQKPGKAPKPLIYAPSNLASGVPSRFSGSGSGTDFTLTISSLQPEDFATYYCQQWAFNPPTFGQGTKVEIKR

SEQ ID NO: 10240 - protein, 107 aa, Artificial Sequence; identical to SEQ ID NO: 10130
  source: /note="Description of Artificial Sequence: Synthetic polypeptide"

SEQ ID NO: 10241 - protein, 107 aa, Artificial Sequence; identical to SEQ ID NO: 10134
  source: /note="Description of Artificial Sequence: Synthetic polypeptide"

SEQ ID NO: 10242 - protein, 107 aa, Artificial Sequence; identical to SEQ ID NO: 10136
  source: /note="Description of Artificial Sequence: Synthetic polypeptide"

SEQ ID NO: 10243 - protein, 107 aa, Artificial Sequence; identical to SEQ ID NO: 10139
  source: /note="Description of Artificial Sequence: Synthetic polypeptide"

SEQ ID NO: 10244 - protein, 107 aa, Artificial Sequence; identical to SEQ ID NO: 10141
  source: /note="Description of Artificial Sequence: Synthetic polypeptide"

SEQ ID NO: 10245 - protein, 107 aa, Artificial Sequence; identical to SEQ ID NO: 10135
  source: /note="Description of Artificial Sequence: Synthetic polypeptide"

SEQ ID NO: 10246 - protein, 107 aa, Artificial Sequence; identical to SEQ ID NO: 10196
  source: /note="Description of Artificial Sequence: Synthetic polypeptide"

SEQ ID NO: 10247 - protein, 107 aa, Artificial Sequence; identical to SEQ ID NO: 10145
  source: /note="Description of Artificial Sequence: Synthetic polypeptide"

SEQ ID NO: 10248 - protein, 107 aa, Artificial Sequence; identical to SEQ ID NO: 10148
  source: /note="Description of Artificial Sequence: Synthetic polypeptide"

SEQ ID NO: 10249 - protein, 107 aa, Artificial Sequence; identical to SEQ ID NO: 10150
  source: /note="Description of Artificial Sequence: Synthetic polypeptide"

SEQ ID NO: 10250 - protein, 107 aa, Artificial Sequence; identical to SEQ ID NO: 10209
  source: /note="Description of Artificial Sequence: Synthetic polypeptide"

SEQ ID NO: 10251 - protein, 107 aa, Artificial Sequence; identical to SEQ ID NO: 10212
  source: /note="Description of Artificial Sequence: Synthetic polypeptide"

SEQ ID NO: 10252 - protein, 107 aa, Artificial Sequence; identical to SEQ ID NO: 10156
  source: /note="Description of Artificial Sequence: Synthetic polypeptide"

SEQ ID NO: 10253 - protein, 107 aa, Artificial Sequence; identical to SEQ ID NO: 10159
  source: /note="Description of Artificial Sequence: Synthetic polypeptide"

SEQ ID NO: 10254 - protein, 106 aa, Artificial Sequence; identical to SEQ ID NO: 10221
  source: /note="Description of Artificial Sequence: Synthetic polypeptide"

SEQ ID NO: 10255 - protein, 107 aa, Artificial Sequence; identical to SEQ ID NO: 10224
  source: /note="Description of Artificial Sequence: Synthetic polypeptide"

SEQ ID NO: 10256 - protein, 107 aa, Artificial Sequence; identical to SEQ ID NO: 10164
  source: /note="Description of Artificial Sequence: Synthetic polypeptide"

SEQ ID NO: 10257 - protein, 112 aa, Artificial Sequence
  source: /note="Description of Artificial Sequence: Synthetic polypeptide"
DIVMTQTPLSSPVTLGQPASISCRSRQSLLHSDGNTYLSWLQQRPGQPPRLLIYKLSNRVSGVPDRFSGSGAGTDFTLKISRVEAEDVGVYYCMQSTQFPLTFGGGTKVKIK

SEQ ID NO: 10258 - protein, 112 aa, Artificial Sequence
  source: /note="Description of Artificial Sequence: Synthetic polypeptide"
DIVMTQTPLSSPVTLGQPASISCRSSQSLVHSDRNTYLSWLQQRPGQPPRLLIYKVSNRFSGVPERFSGSGTGTDFTLKISRVEAEDVGVYYCVQETLFPITIGQGTRLEIK

SEQ ID NO: 10259 - protein, 112 aa, Artificial Sequence
  source: /note="Description of Artificial Sequence: Synthetic polypeptide"
DIVMTQTPLSSPVTLGQPASISCRSSQSLVHSDGNTFLSWLQQRPGQPPRLLIYKISNRFSGVPDRFSGSGAGTDFTLKISRVEAEDVGIYYCMQATQFPLTFGGGTKVEIK

SEQ ID NO: 10260 - protein, 112 aa, Artificial Sequence
  source: /note="Description of Artificial Sequence: Synthetic polypeptide"
DIVLTQTPLSSPVTLGQPASISCRSSQSLVHSDGHTYLSWLQQRPGQPPRLLIYKISNRFSGVPDRFSGSGAGTDFTLKISRVGAEDVGVYYCMQATQFPLTFGGGTKVEIK

SEQ ID NO: 10261 - protein, 112 aa, Artificial Sequence
  source: /note="Description of Artificial Sequence: Synthetic polypeptide"
DIVMTQTPLSSPVTLGQPASISCRSSQSLVSSDGNTYLSWLQQRPGQPPRLLIYKISNLFSGVPDRFSGSGAGTDFTLKISRVEAEDVGLYYCMQATQFPLTFGGGTKVEIK

SEQ ID NO: 10262 - protein, 112 aa, Artificial Sequence
  source: /note="Description of Artificial Sequence: Synthetic polypeptide"
DIVMTQTPLSSPVTLGQPASISCRSSQRLVHSDGHTYLSWLQQRPGQPPRLLISKVSNRFSGVPDRFSGSGAGTDFTLKISRVEAEDVGIYYCMQATQFPLTFGGGTKVEIK

SEQ ID NO: 10263 - protein, 112 aa, Artificial Sequence
  source: /note="Description of Artificial Sequence: Synthetic polypeptide"
DIVMTQSPLSSPVTLGQPASISCRSSQSLVHSDGNTFLSWLQQRPGQPPRLLIYKISNRFSGVPDRFSGSGAGTDFTLKISRVEAEDVGVYYCIQATQFPLTFGGGTKVEIK

SEQ ID NO: 10264 - protein, 113 aa, Artificial Sequence
  source: /note="Description of Artificial Sequence: Synthetic polypeptide"
DVVMTQSPLSLPVTLGQPASISCRSRQSLVYSDGSTYLNWFQQRPGQSPRRLIYKVSNWDSGVPDRFSASGSGTDFTLKISRVEAEDDGVYHCMQGTHWPLLAFGGGTKVEIK

SEQ ID NO: 10265 - protein, 112 aa, Artificial Sequence
  source: /note="Description of Artificial Sequence: Synthetic polypeptide"
DIVMTQTPLSSPVTLGQPASISCRSSQSLVHSDGNTFLSWLQQRPGQPPRLLIYKISNRFSGVPDRFSGSGAGTDFTLKISRVEAEDVGVYYCMQATQFPLTFGGGTKVEIK

SEQ ID NO: 10266 - protein, 112 aa, Artificial Sequence
  source: /note="Description of Artificial Sequence: Synthetic polypeptide"
DIVMTQTPLSSPVTLGQPASISCRSSQSLVHSDGHTYLSWLQQRPGQPPRLLFYKISNRFSGVPDRFSGSGAGTDFTLKISRVEAEDVGIYYCMQATQFPLTFGGGTKVDIK

SEQ ID NO: 10267 - protein, 115 aa, Artificial Sequence
  source: /note="Description of Artificial Sequence: Synthetic polypeptide"
QPVLTQPTSLSASPGASARLTCTLRSGINLGSYRIFWYQQKPESPPRYLLSYYSDSRKHQGSGVPSRFSGSKDASSNAGILVISGLQSEDEADYYCIFWHSSAWVFGGGTKLTVL

SEQ ID NO: 10268 - protein, 112 aa, Artificial Sequence
  source: /note="Description of Artificial Sequence: Synthetic polypeptide"
DIVMTQTPLSSPVTLGQPASISCRSSQSLVYSDGNTYLSWLQQRPGQPPRLLFYKISNRFSGVPDRFSGSGAGTDFTLKISRVEAEDVGVYYCVQATQFPLTFGGGTKVEIK

SEQ ID NO: 10269 - protein, 112 aa, Artificial Sequence
  source: /note="Description of Artificial Sequence: Synthetic polypeptide"
DVVMTQSPLSLSVTLGQPASISCRSSQSLVYNDGDTYLNWFQQRPGQSPRLLIYKVSNWDSGVPDRFSGSGSGTDFTLKVSRVEAEDVGVYYCMQGTHWPLTFGGGTKVEIK

SEQ ID NO: 10270 - protein, 112 aa, Artificial Sequence
  source: /note="Description of Artificial Sequence: Synthetic polypeptide"
DIVMTQTPLSSPVTLGQPASISCRSSQSLVHSDGKTYLSWLQQRPGQPPRLLIYKSSNRFSGVPDRFSGSGAGTDFTLKISRVEAEDVGVYYCVQATQFPITFGQGTRLEIK

SEQ ID NO: 10271 - protein, 112 aa, Artificial Sequence
  source: /note="Description of Artificial Sequence: Synthetic polypeptide"
DIVMTQTPLSSPVTLGQPASISCRSSQSLVHSDGNTYLSWLQQRPGQPPRLLIYKISNRFSGVPDRFSGSGAGTDFTLKISRVEAEDVGVYYCMQAIQFPITFGQGTRLEIK

SEQ ID NO: 10272 - protein, 112 aa, Artificial Sequence
  source: /note="Description of Artificial Sequence: Synthetic polypeptide"
DIVMTQTPLSSPVTLGQPASISCRSSQSLVYSDGNTYLSWLQQRPGQPPRLLIYKISNRFSGVPDRFSGSGAGTDFTLKISRVEAEDVGVYYCVQATQFPLTFGGGTKVEIK

SEQ ID NO: 10273 - protein, 110 aa, Artificial Sequence
  source: /note="Description of Artificial Sequence: Synthetic polypeptide"
DVVMTQSPLSLPVTLGQPASISCRSSQSLVYSDGNAYLNWFQQRPGQSPRRLIYKVSNWDSGVPDRFSGSGSGTDFTLKIRRVEAEDVGAYYCMQGIHCTFGPGTKVHIK

SEQ ID NO: 10274 - protein, 112 aa, Artificial Sequence; identical to SEQ ID NO: 10272
  source: /note="Description of Artificial Sequence: Synthetic polypeptide"

SEQ ID NO: 10275 - protein, 112 aa, Artificial Sequence
  source: /note="Description of Artificial Sequence: Synthetic polypeptide"
DIVMTQTPLSSPVTLGQPASISCRSSQSLVHSDGNTFLSWLQQRPGQPPRLLIYKISNRFSGVPDRFSGSGAGTDFTLKISRVEAEDVGVYYCMQLTQFPLTFGGGTKVEIR

SEQ ID NO: 10276 - protein, 113 aa, Artificial Sequence
  source: /note="Description of Artificial Sequence: Synthetic polypeptide"
DVVMTQSPLSLPVTLGQPASISCRSSQSLVYSDGNTYLNWFQQRPGQSPRRLIYKVSNWDSGVPDRFSGSGSGTDFTLKISRVEAEDVGVYYCMQGTHWPSITFGQGTRLEIK

SEQ ID NO: 10277 - protein, 112 aa, Artificial Sequence
  source: /note="Description of Artificial Sequence: Synthetic polypeptide"
DIVMTQTPHSSPVTLGQPASISCRSSQSLVSRDGNTYLSWLQQRPGQPPRLLIYKISNRFSGVPNRFSGSGAGTDFTLKISRVKAEDVGVYYCMQATQFPLTFGQGTRLEIK

SEQ ID NO: 10278 - protein, 112 aa, Artificial Sequence
  source: /note="Description of Artificial Sequence: Synthetic polypeptide"
DIVMTQTPLSSPVTLGQPASISCRSSQSLVSRDGNTYLSWLQQRPGQPPRLLIYKISNRFSGVPDRFSGSGAGTDFTLKISRVEVEDVGVYYCMQATQFPITFGQGTRLEIK

SEQ ID NO: 10279 - protein, 112 aa, Artificial Sequence
  source: /note="Description of Artificial Sequence: Synthetic polypeptide"
DIVMTQTPLSSPVTLGQPASISCRSSQSLVHSDGNTFLSWLQQRPGQPPRLLIYKISNRFSGVPDRFSGSGAGTDFTLKISRVEAEDVGVYYCMQGTQFPLTFGGGTKVEIK

SEQ ID NO: 10280 - protein, 112 aa, Artificial Sequence
  source: /note="Description of Artificial Sequence: Synthetic polypeptide"
DIVMTQSPLSSPVTLGQPASISCRYSQSLVHRDGNTYLSWLQQRPGQPPRLVIHKISNRFSGVPDRFSGSGAGTDFTLKISRVEAEDVGFYYCMQTTQFPLTFGGGTKVEIK

SEQ ID NO: 10281 - protein, 112 aa, Artificial Sequence
  source: /note="Description of Artificial Sequence: Synthetic polypeptide"
DIVMTQTPLSSPVTLGQPASISCRSSQSLVHSDGNTYLSWLQQRPGQPPRLLIYKISNRFSGVPDRFSGSGAGTDFTLKISRVEAEDVGVYYCMQATQFPLTFGGGTKVEIK

SEQ ID NO: 10282 - protein, 112 aa, Artificial Sequence
  source: /note="Description of Artificial Sequence: Synthetic polypeptide"
EIVMTQTPLSSPVTLGQPASISCKSSQSLVHSDGNTYLSWLQQRPGQPPRLLIYKISNRFSGVPDRFSGSGAGTDFTLKISRVEAEDVGVYYCMQTTYFPLTFGGGTKVEIK

SEQ ID NO: 10283 - protein, 112 aa, Artificial Sequence
  source: /note="Description of Artificial Sequence: Synthetic polypeptide"
DIVMTQTPLSSPVTLGQPASISCRSSQSLVYSDGNTYLSWLHQRPGQPPRLLIYKISNRFSGVPDRFSGSGAGTDFTLKISRVEAEDVGLYYCMQTTQFPLTFGGGTKVKIK

SEQ ID NO: 10284 - protein, 112 aa, Artificial Sequence
  source: /note="Description of Artificial Sequence: Synthetic polypeptide"
DIVMTQTPLSSPVTLGQPASISCRSSQSLVHSDGNTYLSWLQQRPGQPPRLLIYKLSNRFSGIPDRFSGSGAGTDFTLKISRVEAEDVGVYYCMQATQFPLTFGGGTKVEIK

SEQ ID NO: 10285 - protein, 107 aa, Artificial Sequence
  source: /note="Description of Artificial Sequence: Synthetic polypeptide"
EIVMTQSPATLSVSPGERATLSCRASQSVSSNLAWYQQKPGQAPRLLISGASTRATGIPARFSGSGSGTEFTLTISSLQSEDFAVYYCHQYNDWSLTFGGGTKVEIK

SEQ ID NO: 10286 - protein, 112 aa, Artificial Sequence
  source: /note="Description of Artificial Sequence: Synthetic polypeptide"
DIVMTQTPLSSPVTLGQPASISCRSSQSLVYRDGNTYLSWLQQRPGQPPRLLIYKISNRFSGVPDRFSGSGAGTDFTLKISRVEAEDVGVYYCMQATQFPLTFGGGTKVEIK

SEQ ID NO: 10287 - protein, 112 aa, Artificial Sequence
  source: /note="Description of Artificial Sequence: Synthetic polypeptide"
KIVMTQTPLSSPVTLGQPASISCRSSQSLVHSDGNTYLSWFQQRPGQPPRLLINKISNRFSGVPDRFSGSGAGTDFTLKISRVEAEDVGVYYCMQATQFPLTFGGGTKVEIK

SEQ ID NO: 10288 - protein, 108 aa, Artificial Sequence
  source: /note="Description of Artificial Sequence: Synthetic polypeptide"
SSELTQDPAVSVALGQTVRITCQGDSLRSYYASWYQQKPGQAPVLVIYGKNNRPSGIPARFSGSDSGNTASLTITGAQAEDEADYYCNSRDSSGNHVVFGGGTKLTVL

SEQ ID NO: 10289 - protein, 112 aa, Artificial Sequence
  source: /note="Description of Artificial Sequence: Synthetic polypeptide"
DIVMTQTPLSSPVTLGQPASISCRSSQSLVHSDGNTYLSWLQQRPGQPPRLLLYKNSNRFSGVPDRFSGSGAGTDFTLKISRVEAEDVGVYYCMQATQFPLTFGGGTKVEIK

SEQ ID NO: 10290 - protein, 112 aa, Artificial Sequence
  source: /note="Description of Artificial Sequence: Synthetic polypeptide"
DIVMTQTPPSSPVTRGQPASISCRSSQSLVHSDGKTYLSWLQQRPGQPPRLLIYKISNRFSGVPGRFSGSGAGTDFTLKISRVEAEDVGVYYCMQATQFPLTFGGGTKVEIK

SEQ ID NO: 10291 - protein, 125 aa, Artificial Sequence; identical to SEQ ID NO: 9444
  source: /note="Description of Artificial Sequence: Synthetic polypeptide"

SEQ ID NO: 10292 - protein, 135 aa, Artificial Sequence
  source: /note="Description of Artificial Sequence: Synthetic polypeptide"
MESQTQVFVFLLLCVSGAHGSIVMTQTPKFLLVSAGDRITLTCKASQSVTNDVAWYQQKPGQSPKLLIYYASNRYTGVPDRFTGSGYGTDFTFTISTVQAEDLAVYFCQQDYRSPWTFGGGTKLEIKRADAAPTV

SEQ ID NO: 10293 - protein, 135 aa, Artificial Sequence
  source: /note="Description of Artificial Sequence: Synthetic polypeptide"
MESQTQVFVFLLLCVSGAHGSIVMTQTPKFLLVSAGDRVTISCKASQSVSNDVAWYQQKPGQSPKLLIYYASKRYTGVPDRLTGSGYGTDFTFTISTVQAEDLAVYFCQQDHSYPWTFGGGTKLEIKRADAAPTV

SEQ ID NO: 10294 - protein, 135 aa, Artificial Sequence
  source: /note="Description of Artificial Sequence: Synthetic polypeptide"
MESQTQVFISILLWLYGADGNIVMTQSPKSMSMSVGERVTLTCKASENVVTYVSWYQQKPEQSPKLLIYGASNRYTGVPDRFTGSGSATDFTLTISSVQAEDLADYHCGQGYSYPYTFGGGTKLEIKRADAAPTV

SEQ ID NO: 10295 - protein, 106 aa, Artificial Sequence
  source: /note="Description of Artificial Sequence: Synthetic polypeptide"
SIVMTQTPKFLLVSAGDRITLTCKASQSVTNDVAWYQQKPGQSPKLLIYYASNRYTGVPDRFTGSGYGTDFTFTISTVQAEDLAVYFCQQDYRSPWTFGGGTKLEI

SEQ ID NO: 10296 - protein, 113 aa, Artificial Sequence
  source: /note="Description of Artificial Sequence: Synthetic polypeptide"
DIQMTQSPSSLSASVGDRVTITCQASQDISNYLNWYQQKPGKAPKLLIYDASNLETGVPSRFSGSGSGTDFTFTISSLQPEDIATYYCQQYDNLPPWASYTFGQGTKLEIKRT

SEQ ID NO: 10297 - protein, 113 aa, Artificial Sequence
  source: /note="Description of Artificial Sequence: Synthetic polypeptide"
DIVMTQSPSSLSASVGDRVTITCQASQDISNYLNWYQQKPGKAPKLLIYDASNLETGVPSRFSGSGSGTDFTLTISSLQPEDFATYYCQQYDNLPPWASYTFGGGTKVEIKRT

SEQ ID NO: 10298 - protein, 109 aa, Artificial Sequence
  source: /note="Description of Artificial Sequence: Synthetic polypeptide"
DIVMTQSPSSLSASVGDRVTITCKASQSVTNDVAWYQQKPGKAPKLLIYYASNRYTGVPSRFSGSGSGTDFTLTISSLQPEDFATYYCQQDYRSPWTFGGGTKVEIKRT

SEQ ID NO: 10299 - protein, 110 aa, Artificial Sequence
  source: /note="Description of Artificial Sequence: Synthetic polypeptide"
MDMRVPAQLLGLLQLWLSGARCDIVMTQSPSSLSASVGDRVTITCKASQSVTNDVAWYQQKPGKAPKLLIYYASNRYTGVPSRFSGSGSGTDFTLTISSLQPEDFATYYC

SEQ ID NO: 10300 - protein, 131 aa, Artificial Sequence
  source: /note="Description of Artificial Sequence: Synthetic polypeptide"
MDMRVPAQLLGLLQLWLSGARCDIVMTQSPSSLSASVGDRVTITCKASQSVTNDVAWYQQKPGKAPKLLIYYASNRYTGVPSRFSGSGSGTDFTLTISSLQPEDFATYFCQQDYRSPWTFGGGTKVEIKRT

SEQ ID NO: 10301 - protein, 131 aa, Artificial Sequence
  source: /note="Description of Artificial Sequence: Synthetic polypeptide"
MDMRVPAQLLGLLQLWLSGARCDIVMTQSPSSLSASVGDRVTITCKASQSVTNDVAWYQQKPGKAPKLLIYYASNRYTGVPDRFSGSGYGTDFTLTISSLQPEDFATYFCQQDYRSPWTFGGGTKVEIKRT

SEQ ID NO: 10302 - protein, 136 aa, Artificial Sequence
  source: /note="Description of Artificial Sequence: Synthetic polypeptide"
KLAATMKSQTQVFVFLLLCVSGAHGSIVMTQTPKFLLVSAGDRITLTCKASQSVTNDVAWYQQKPGQSPKLLIYYASNRYTGVPDRFTGSGYGTDFTFTISTVQAEDLAVYFCQQDYRSPWTFGGGTKLEIKREWI

SEQ ID NO: 10303 - protein, 122 aa, Artificial Sequence
  source: /note="Description of Artificial Sequence: Synthetic polypeptide"
QVQLEESGGGVVRPGRSLRLSCAASGFTFDQYAIHWIRQAPGKGLEWVTVISPVGNEQHYAASVKGRFTVSRNNSNNTLSLQMNSLTTEDTAVYYCVRGDVVTTVTTGYFDYWGQGVLVTVS

SEQ ID NO: 10304 - protein, 116 aa, Artificial Sequence
  source: /note="Description of Artificial Sequence: Synthetic polypeptide"
QVQLEESGGGVVRPGRSLRLSCAASGFTFDDYGVNWIRQAPGKGLEWVTIIWGDGRTDYNSALKSRFTVSRNNSNNTLSLQMNSLTTEDTAVYYCVRAPGNRAMEYWGQGVLVTVS

SEQ ID NO: 10305 - protein, 135 aa, Artificial Sequence
  source: /note="Description of Artificial Sequence: Synthetic polypeptide"
MEFGLSWVFLVALLRGVQCQVQLEESGGGVVRPGRSLRLSCAASGFTFDDYGVNWIRQAPGKGLEWVTIIWGDGRTDYNSALKSRFTVSRNNSNNTLSLQMNSLTTEDTAVYYCVRAPGNRAMEYWGQGVLVTVS

SEQ ID NO: 10306 - protein, 135 aa, Artificial Sequence
  source: /note="Description of Artificial Sequence: Synthetic polypeptide"
MEFGLSWVFLVALLRGVQCQVQLEESGGGVVRPGRSLRLSCAASGFTLSDYGVNWIRQAPGKGLEWVGIIWGDGRTDYNSALKSRLTVSRNNSNNTLSLQMNSLTTEDTAVYYCVRAPGNRAMEYWGQGVLVTVS

SEQ ID NO: 10307 - protein, 135 aa, Artificial Sequence
  source: /note="Description of Artificial Sequence: Synthetic polypeptide"
MDTLCSTLLLLTIPSWVLSQVQLEESGGGVVRPGRSLRLSCAASGFTLSDYGVNWIRQAPGKGLEWVGIIWGDGRTDYNSALKSRLTVSRNNSNNTLSLQMNSLTTEDTAVYYCVRAPGNRAMEYWGQGVLVTVS

SEQ ID NO: 10308 - protein, 135 aa, Artificial Sequence
  source: /note="Description of Artificial Sequence: Synthetic polypeptide"
MDTLCSTLLLLTIPSWVLSQVQLEESGGGVVRPGRSLRLSCAASGFTFSDYGVNWIRQAPGKGLEWVGIIWGDGRTDYNSALKSRLTVSRNNSNNTLSLQMNSLTTEDTAVYYCVRAPGNRAMEYWGQGVLVTVS

SEQ ID NO: 10309 - protein, 135 aa, Artificial Sequence
  source: /note="Description of Artificial Sequence: Synthetic polypeptide"
MDTLCSTLLLLTIPSWVLSQVQLEESGGGVVRPGRSLRLSCAASGFTLDDYGVNWIRQAPGKGLEWVGIIWGDGRTDYNSALKSRLTVSRNNSNNTLSLQMNSLTTEDTAVYYCVRAPGNRAMEYWGQGVLVTVS

SEQ ID NO: 10310 - protein, 135 aa, Artificial Sequence
  source: /note="Description of Artificial Sequence: Synthetic polypeptide"
MDTLCSTLLLLTIPSWVLSQVQLEESGGGVVRPGRSLRLSCAASGFTLSDYGVNWIRQAPGKGLEWVTIIWGDGRTDYNSALKSRLTVSRNNSNNTLSLQMNSLTTEDTAVYYCVRAPGNRAMEYWGQGVLVTVS

SEQ ID NO: 10311 - protein, 135 aa, Artificial Sequence
  source: /note="Description of Artificial Sequence: Synthetic polypeptide"
MDTLCSTLLLLTIPSWVLSQVQLEESGGGVVRPGRSLRLSCAASGFTLSDYGVNWIRQAPGKGLEWVGIIWGDGRTDYNSALKSRFTVSRNNSNNTLSLQMNSLTTEDTAVYYCVRAPGNRAMEYWGQGVLVTVS

SEQ ID NO: 10312 - protein, 135 aa, Artificial Sequence
  source: /note="Description of Artificial Sequence: Synthetic polypeptide"
MDTLCSTLLLLTIPSWVLSQVQLEESGGGVVRPGRSLRLSCAASGFTFSDYGVNWIRQAPGKGLEWVTIIWGDGRTDYNSALKSRFTVSRNNSNNTLSLQMNSLTTEDTAVYYCVRAPGNRAMEYWGQGVLVTVS

SEQ ID NO: 10313 - protein, 135 aa, Artificial Sequence
  source: /note="Description of Artificial Sequence: Synthetic polypeptide"
MDTLCSTLLLLTIPSWVLSQVQLEESGGGVVRPGRSLRLSCAASGFTFDDYGVNWIRQAPGKGLEWVTIIWGDGRTDYNSALKSRFTVSRNNSNNTLSLQMNSLTTEDTAVYYCVRAPGNRAMEYWGQGVLVTVS

SEQ ID NO: 10314 - protein, 113 aa, Artificial Sequence; identical to SEQ ID NO: 9518
  source: /note="Description of Artificial Sequence: Synthetic polypeptide"

SEQ ID NO: 10315 - protein, 113 aa, Artificial Sequence
  source: /note="Description of Artificial Sequence: Synthetic polypeptide"
DVVVTQTPLSLPVSFGDQVSISCRSSQSLANSYGNTFLSWYLHKPGQSPQLLIYGISNRFSGVPDRFTGSGSGTDFTLKISTIKPEDLGMYYCLQGTHQPYTFGGGTKLEIKR

SEQ ID NO: 10316 - protein, 108 aa, Artificial Sequence
  source: /note="Description of Artificial Sequence: Synthetic polypeptide"
EIVMTQSPATLSVSPGERATLSCRASQSVSSNLAWYQQKPGQAPRLLIYGASTRATGIPARFSGSGSGTEFTLTISSLQSEDFAVYYCQHYINWPLTFGGGTKVEIKR

SEQ ID NO: 10317 - protein, 107 aa, Artificial Sequence
  source: /note="Description of Artificial Sequence: Synthetic polypeptide"
DIQMTQSPTSLSASVGDRVTITCRASQGISSWLTWYQQKPEKAPKSLIYAASSLQSGVPSRFSGSGSGTDFTLTISSLQPEDFATYYCQQYDSYPITFGQGTRLEIK

SEQ ID NO: 10318 - protein, 108 aa, Artificial Sequence
  source: /note="Description of Artificial Sequence: Synthetic polypeptide"
EIVLTQSPGTLSLSPGERATLSCRASQSVSSSYLAWYQQKPGQAPRLLIYGASSRATGIPDRFSGSGSGTDFTLTISSLEPEDFAVYYCQQYGSSPWTFGQGTKVEIK

SEQ ID NO: 10319 - protein, 107 aa, Artificial Sequence
  source: /note="Description of Artificial Sequence: Synthetic polypeptide"
EIVLTQSPATLSLSPGERATLSCRASQSVSSNLAWYQQKPGQAPRLLIYDASNRATGIPARLSGSGSGTDFTLTISSLEPEDFAVYYCQQRSNWPWTFGQGTKVEIK

SEQ ID NO: 10320 - protein, 94 aa, Artificial Sequence
  source: /note="Description of Artificial Sequence: Synthetic polypeptide"
DIQMTQSPSSLSASVGDRVTITCRASQGISSWLAWYQQKPEKAPKSLIYAASSLQSGVPSRFSGSGSGTDFTLTISSLQPEDFATYYCQQYNSY

SEQ ID NO: 10321 - protein, 95 aa, Artificial Sequence
  source: /note="Description of Artificial Sequence: Synthetic polypeptide"
EIVLTQSPGTLSLSPGERATLSCRASQSVSSSYLAWYQQKPGQAPRLLIYGASSRATGIPDRFSGSGSGTDFTLTISRLEPEDFAVYYCQQYGSS

SEQ ID NO: 10322 - protein, 94 aa, Artificial Sequence
  source: /note="Description of Artificial Sequence: Synthetic polypeptide"
EIVLTQSPATLSLSPGERATLSCRASQSVSSYLAWYQQKPGQAPRLLIYDASNRATGIPARFSGSGSGTDFTLTISSLEPEDFAVYYCQQRSNW

SEQ ID NO: 10323 - protein, 107 aa, Artificial Sequence; identical to SEQ ID NO: 10317
  source: /note="Description of Artificial Sequence: Synthetic polypeptide"

SEQ ID NO: 10324 - protein, 108 aa, Artificial Sequence; identical to SEQ ID NO: 10318
  source: /note="Description of Artificial Sequence: Synthetic polypeptide"

SEQ ID NO: 10325 - protein, 107 aa, Artificial Sequence; identical to SEQ ID NO: 10319
  source: /note="Description of Artificial Sequence: Synthetic polypeptide"

SEQ ID NO: 10326 - protein, 111 aa, Artificial Sequence
  source: /note="Description of Artificial Sequence: Synthetic polypeptide"
DIVLTQSPASLAVSLGQRATISCKASQSVDFDGDSYMNWYQQKPGQPPKVLIYAASNLESGIPARFSGSGSGTDFTLNIHPVEEEDAATYYCQQSNEDPWTFGGGTKLEIK

SEQ ID NO: 10327 - protein, 111 aa, Artificial Sequence
  source: /note="Description of Artificial Sequence: Synthetic polypeptide"
EIVLTQSPDSLAVSLGERATINCKASQSVDFDGDSYLNWYQQKPGQPPKVLIYAASTLQSGVPSRFSGSGSGTDFTLTINSLEAEDAATYYCQQSNEDPWTFGGGTKVEIK

SEQ ID NO: 10328 - protein, 111 aa, Artificial Sequence; identical to SEQ ID NO: 7229
  source: /note="Description of Artificial Sequence: Synthetic polypeptide"

SEQ ID NO: 10329 - protein, 111 aa, Artificial Sequence; identical to SEQ ID NO: 10327
  source: /note="Description of Artificial Sequence: Synthetic polypeptide"

SEQ ID NO: 10330 - protein, 111 aa, Artificial Sequence
  source: /note="Description of Artificial Sequence: Synthetic polypeptide"
AIVLTQSPDSLAVSLGERATINCKASQSVDFDGDSYLNWYQQKPGQPPKVLIYAASTLETGVPSRFSGSGSGTDFTLTINSLEAEDAATYYCQQSNEDPWTFGGGTKVEIK

SEQ ID NO: 10331 - protein, 107 aa, Artificial Sequence; identical to SEQ ID NO: 10317
  source: /note="Description of Artificial Sequence: Synthetic polypeptide"

SEQ ID NO: 10332 - protein, 108 aa, Artificial Sequence; identical to SEQ ID NO: 10318
  source: /note="Description of Artificial Sequence: Synthetic polypeptide"

SEQ ID NO: 10333 - protein, 107 aa, Artificial Sequence; identical to SEQ ID NO: 10319
  source: /note="Description of Artificial Sequence: Synthetic polypeptide"

SEQ ID NO: 10334 - protein, 108 aa, Artificial Sequence
  source: /note="Description of Artificial Sequence: Synthetic polypeptide"
DIQMTQSPSSLSASVGDRVTITCRASQGISSWLAWYQQKPEKAPKSLIYAASSLQSGVPSRFRGSGSGTDFTLTISSLQPEDFATYYCQQYNSYPYTFGQGTKLEIKR

SEQ ID NO: 10335 - protein, 108 aa, Artificial Sequence
  source: /note="Description of Artificial Sequence: Synthetic polypeptide"
DIQMTQSPSSLSASVGDRVTITCRASQGISSWLAWYQQKPEKAPKSLIYAASSLQSGVPSRFSGSRSGTDFTLTISSLQPEDFATYYCQQYNSYPYTFGQGTKLEIKR

SEQ ID NO: 10336 - protein, 108 aa, Artificial Sequence; identical to SEQ ID NO: 10335
  source: /note="Description of Artificial Sequence: Synthetic polypeptide"

SEQ ID NO: 10337 - protein, 108 aa, Artificial Sequence; identical to SEQ ID NO: 10335
  source: /note="Description of Artificial Sequence: Synthetic polypeptide"

SEQ ID NO: 10338 - protein, 109 aa, Artificial Sequence
  source: /note="Description of Artificial Sequence: Synthetic polypeptide"
EIVLTQSPATLSLSPGERATLSCRASQSVSSYLAWYQQKPGQAPRLLIYDASNRATGIPARFSGSGSRTDFTLTISSLEPEDFAVYYCQQRSNWPHLTFGGGTKVEIKR

SEQ ID NO: 10339 - protein, 109 aa, Artificial Sequence
  source: /note="Description of Artificial Sequence: Synthetic polypeptide"
EIVLTQSPATLSLSPGERATLSCKASQSVSSSLAWYQQKPGQAPRLLIYDASNRATGIPARFSGSGSGTDFTLTISSLEPEDFAVYYCQQRSNWPPYTFGQGTKLEIKR

SEQ ID NO: 10340 - protein, 108 aa, Artificial Sequence
  source: /note="Description of Artificial Sequence: Synthetic polypeptide"
EIVLTQSPATLSLSPGERATLSCRASQSVSSYLAWYQQKPGQAPRLLIYDASNRATGIPARFSGSGSGTDFTLTISSLEPEDFAVYYCQQRSNWGFTFGPGTKVDIKR

SEQ ID NO: 10341 - protein, 108 aa, Artificial Sequence
  source: /note="Description of Artificial Sequence: Synthetic polypeptide"
AVQLTQSPSSLSASVGDRVTITCRASQGISSALAWYQQKPGKAPKLLIYDASSLESGVPSRFSGSGSGTDFTLTISSLQPEDFATYCCQQFNSYPHTFGGGTKVEIKR

SEQ ID NO: 10342 - protein, 109 aa, Artificial Sequence
  source: /note="Description of Artificial Sequence: Synthetic polypeptide"
EIVLTQSPATLSLSPGERATLSCRASQSVSSYLAWYQQKPGQAPRLLIYDASNRATGIPARFSGSGSGTDFTLTISSLEPEDFAVYYCQQRSSWPPYTFGQGTKLEIKR

SEQ ID NO: 10343 - protein, 94 aa, Artificial Sequence; identical to SEQ ID NO: 10322
  source: /note="Description of Artificial Sequence: Synthetic polypeptide"

SEQ ID NO: 10344 - protein, 115 aa, Artificial Sequence
  source: /note="Description of Artificial Sequence: Synthetic polypeptide"
DIVLTQSPTIMSASPGERVTMTCTASSSVNYIHWYQQKSGDSPKRWIFDTSKVASGVPARFSGSGSGTSYSLTISTMEAEDAATYYCQQWRSYPLTFGDGTRLELKRADAAPTVS

SEQ ID NO: 10345 - protein, 115 aa, Artificial Sequence
  source: /note="Description of Artificial Sequence: Synthetic polypeptide"
DIVLTQSPAIMSASPGEKVTMTCSANSSVSYIHWYQQKSGTSPKRWIFDTSKLASGVPARFSGSGSGTSYSLTISTMEAEDAATYYCQQWTSHPLTFGTGTKLQLKRADAAPTVS

SEQ ID NO: 10346 - protein, 107 aa, Artificial Sequence
  source: /note="Description of Artificial Sequence: Synthetic polypeptide"
DIQLTQSPSSLSASVGDRVTITCRASQGISSALAWYQQKPGKAPKLLIYDASSLESGVPSRFSGSGSGTDFTLTISSLQPEDFATYYCQQFNSSITFGQGTKLEIKR

SEQ ID NO: 10347 - protein, 107 aa, Artificial Sequence
  source: /note="Description of Artificial Sequence: Synthetic polypeptide"
DIQLTQSPSSLSASVGDRVTITCRASQGISSALAWSQQKPGKAPKLLIYDASSLESGVPSRFSGSGSGTDFTLTISSLQPEDFATYYCQQFNSSITFGQGTKLEIKR

SEQ ID NO: 10348 - protein, 107 aa, Artificial Sequence
  source: /note="Description of Artificial Sequence: Synthetic polypeptide"
DIQLTQSPSSLSASVGDRVTITCRASQGISSVLAWYQQKPGKAPKLLIYDASSLESGVPSRFSGSGSGTDFTLTISSLQPEDFATYYCQQFNSSITFGQGTKLEIKR

SEQ ID NO: 10349 - protein, 107 aa, Artificial Sequence
  source: /note="Description of Artificial Sequence: Synthetic polypeptide"
DIQLTQSPSSLSASVGDRVTITCRASQGISSVLAWYQQKPGKAPKLLIYDASSLESGVPSRFSGSGSGTDFTLTISSLQPEDFATYYCQQFDSSITFGQGTKLEIKR

SEQ ID NO: 10350 - protein, 107 aa, Artificial Sequence
  source: /note="Description of Artificial Sequence: Synthetic polypeptide"
DIQLTQSPSSLSASVGDRVTITCRASQGISSALAWYQQKPGKAPKLLIYDASRLESGVPSRFSGSGSGTDFTLTISSLQPEDFTTYYCQQFNSSYTFGQGTKLEIKR

SEQ ID NO: 10351 - protein, 107 aa, Artificial Sequence
  source: /note="Description of Artificial Sequence: Synthetic polypeptide"
DIQLTQSPSSLSASVGDRVTITCRASQGISSVLAWYQQKPGKAPKLLIYAASSLESGVPSRFSGSGSGTDFTLTISSLQPEDFATYYCQQFNSSITFGQGTKVEIKR

SEQ ID NO: 10352 - protein, 107 aa, Artificial Sequence
  source: /note="Description of Artificial Sequence: Synthetic polypeptide"
DIQLTQSPSSLSASVGDRVTITCRASQGISSVLAWYQQKPGKAPKLLIYAASSLESGVPSRFSGSGSGTDFTLTISSLQPEDFATYYCQQFDSSITFGQGTKVEIKR

SEQ ID NO: 10353 - protein, 107 aa, Artificial Sequence
  source: /note="Description of Artificial Sequence: Synthetic polypeptide"
DIQLTQSPSSLSASVGDRVTITCRASQGISSVLAWYQQKPGKAPKLLIYAASSLESGVPSRFSGSGSGTDFTLTISSLQPEDFATYYCQQFNSSITFGQGTKLEIKR

SEQ ID NO: 10354 - protein, 107 aa, Artificial Sequence
  source: /note="Description of Artificial Sequence: Synthetic polypeptide"
DIQLTQSPSSLSASVGDRVTITCRASQGISSALAWYQQKPGKAPKFMIYDASSLESGVPSRFSGSGSGTDFTLTISSLQPEDFATYYCQQFNSSITFGQGTKLEIKR

SEQ ID NO: 10355 - protein, 107 aa, Artificial Sequence; identical to SEQ ID NO: 10354
  source: /note="Description of Artificial Sequence: Synthetic polypeptide"

SEQ ID NO: 10356 - protein, 107 aa, Artificial Sequence; identical to SEQ ID NO: 10354
  source: /note="Description of Artificial Sequence: Synthetic polypeptide"

SEQ ID NO: 10357 - protein, 107 aa, Artificial Sequence; identical to SEQ ID NO: 10354
  source: /note="Description of Artificial Sequence: Synthetic polypeptide"

SEQ ID NO: 10358 - protein, 107 aa, Artificial Sequence; identical to SEQ ID NO: 10354
  source: /note="Description of Artificial Sequence: Synthetic polypeptide"

SEQ ID NO: 10359 - protein, 107 aa, Artificial Sequence; identical to SEQ ID NO: 10348
  source: /note="Description of Artificial Sequence: Synthetic polypeptide"

SEQ ID NO: 10360 - protein, 113 aa, Artificial Sequence
  source: /note="Description of Artificial Sequence: Synthetic polypeptide"
EIVLTQSPGSLAVSPGERVTMSCKSSQSVFFSSSQKNYLAWYQQIPGQSPRLLIYWASTRESGVPDRFTGSGSGTDFTLTISSVQPEDLAIYYCHQYLSSRTFGQGTKLEIKR

SEQ ID NO: 10361 - protein, 113 aa, Artificial Sequence
  source: /note="Description of Artificial Sequence: Synthetic polypeptide"
NIMLTQSPSSLAVSAGEKVTMSCKSSQSVFFSSSQKNYLAWYQQIPGQSPKLLIYWASTRESGVPDRFTGSGSGTDFTLTISSVQSEDLAIYYCHQYLSSRTFGGGTKLEIKR

SEQ ID NO: 10362 - protein, 107 aa, Artificial Sequence; identical to SEQ ID NO: 10346
  source: /note="Description of Artificial Sequence: Synthetic polypeptide"

SEQ ID NO: 10363 - protein, 107 aa, Artificial Sequence; identical to SEQ ID NO: 10347
  source: /note="Description of Artificial Sequence: Synthetic polypeptide"

SEQ ID NO: 10364 - protein, 107 aa, Artificial Sequence; identical to SEQ ID NO: 10348
  source: /note="Description of Artificial Sequence: Synthetic polypeptide"

SEQ ID NO: 10365 - protein, 107 aa, Artificial Sequence; identical to SEQ ID NO: 10349
  source: /note="Description of Artificial Sequence: Synthetic polypeptide"

SEQ ID NO: 10366 - protein, 107 aa, Artificial Sequence; identical to SEQ ID NO: 10350
  source: /note="Description of Artificial Sequence: Synthetic polypeptide"

SEQ ID NO: 10367 - protein, 107 aa, Artificial Sequence; identical to SEQ ID NO: 10351
  source: /note="Description of Artificial Sequence: Synthetic polypeptide"

SEQ ID NO: 10368 - protein, 107 aa, Artificial Sequence; identical to SEQ ID NO: 10352
  source: /note="Description of Artificial Sequence: Synthetic polypeptide"

SEQ ID NO: 10369 - protein, 107 aa, Artificial Sequence; identical to SEQ ID NO: 10353
  source: /note="Description of Artificial Sequence: Synthetic polypeptide"

SEQ ID NO: 10370 - protein, 107 aa, Artificial Sequence; identical to SEQ ID NO: 10354
  source: /note="Description of Artificial Sequence: Synthetic polypeptide"

SEQ ID NO: 10371 - protein, 107 aa, Artificial Sequence; identical to SEQ ID NO: 10354
  source: /note="Description of Artificial Sequence: Synthetic polypeptide"

SEQ ID NO: 10372 - protein, 107 aa, Artificial Sequence; identical to SEQ ID NO: 10354
  source: /note="Description of Artificial Sequence: Synthetic polypeptide"

SEQ ID NO: 10373 - protein, 107 aa, Artificial Sequence; identical to SEQ ID NO: 10354
  source: /note="Description of Artificial Sequence: Synthetic polypeptide"

SEQ ID NO: 10374 - protein, 107 aa, Artificial Sequence; identical to SEQ ID NO: 10354
  source: /note="Description of Artificial Sequence: Synthetic polypeptide"

SEQ ID NO: 10375 - protein, 107 aa, Artificial Sequence; identical to SEQ ID NO: 10348
  source: /note="Description of Artificial Sequence: Synthetic polypeptide"

SEQ ID NO: 10376 - protein, 95 aa, Artificial Sequence; identical to SEQ ID NO: 10321
  source: /note="Description of Artificial Sequence: Synthetic polypeptide"

SEQ ID NO: 10377 - protein, 94 aa, Artificial Sequence; identical to SEQ ID NO: 10320
  source: /note="Description of Artificial Sequence: Synthetic polypeptide"

SEQ ID NO: 10378 - protein, 108 aa, Artificial Sequence
  source: /note="Description of Artificial Sequence: Synthetic polypeptide"
DIQMTQSPASLSASVGETVTITCRTSENVYSYLAWYQQKQGKSPQLLVSFAKTLAEGVPSRFSGSGSGTQFSLKISSLQPEDSGSYFCQHHSDNPWTFGGGTELEIKR

SEQ ID NO: 10379 - protein, 107 aa, Artificial Sequence
  source: /note="Description of Artificial Sequence: Synthetic polypeptide"
DIVMTQSHKLLSTSVGDRVSITCKASQDVSTAVDWYQQKPGQSPKLLINWASTRHTGVPDRFTGSGSGTDYTLTISSMQAEDLALYYCRQHYSTPFTFGSGTKLEIK

SEQ ID NO: 10380 - protein, 108 aa, Artificial Sequence; identical to SEQ ID NO: 10378
  source: /note="Description of Artificial Sequence: Synthetic polypeptide"

SEQ ID NO: 10381 - protein, 108 aa, Artificial Sequence; identical to SEQ ID NO: 10378
  source: /note="Description of Artificial Sequence: Synthetic polypeptide"

SEQ ID NO: 10382 - protein, 115 aa, Artificial Sequence
  source: /note="Description of Artificial Sequence: Synthetic polypeptide"
QVQVKESGPGLVAPSQSLSITCTVSGFSLTTSGVSWVRQPPGKGLEWLGVIWGDGSTNYHSALKSRLSIKKDHSKSQVFLKLNSLQTDDTATYYCAKGGYSLAHWGQGTLVTVSA

SEQ ID NO: 10383 - protein, 110 aa, Artificial Sequence
  source: /note="Description of Artificial Sequence: Synthetic polypeptide"
EIVLTQSPATLSLSPGERATLSCRASENVYSYLAWYQQKPGQAPRLLIYFAKTLAEGIPARFSGSGSGTDFTLTISSLEPEDFAVYYCQHHSDNPWTFGQGTKVEIKGDQ

SEQ ID NO: 10384 - protein, 108 aa, Artificial Sequence
  source: /note="Description of Artificial Sequence: Synthetic polypeptide"
DIQMTQSPSSLSASVGDRVTITCRTSENVYSYLAWYQQKPGKAPKLLVSFAKTLAEGVPSRFSGSGSGTDFTLTISSLQPEDFATYFCQHHSDNPWTFGQGTKVEIKR

SEQ ID NO: 10385 - protein, 108 aa, Artificial Sequence
  source: /note="Description of Artificial Sequence: Synthetic polypeptide"
DIVMTQSPSSLSASVGDRVTITCRVSENVYSYLAWYQQKPGKAPKLLISFAKTLAEGVPSRFSGSGSGTDFTLTISSLQPEDFATYFCQHHSDNPWTFGQGTKVEIKR

SEQ ID NO: 10386 - protein, 108 aa, Artificial Sequence
  source: /note="Description of Artificial Sequence: Synthetic polypeptide"
DIQMTQSPSSLSASVGDRVTITCRTSENVYSYLAWYQQKPGKAPKLLVSFAKTLAEGVPSRFSGSGSGTQFTLTISSLQPEDFATYFCQHHSDNPWTFGGGTELEIKR

SEQ ID NO: 10387 - protein, 108 aa, Artificial Sequence
  source: /note="Description of Artificial Sequence: Synthetic polypeptide"
DIVMTQSPATLSLSPGERATLSCRTSENVYSYLAWYQQKPGQAPRLLVSFAKTLAEGVPARFSGSGSGTDFTLTISSLEPEDFAVYFCQHHSDNPWTFGQGTKVEIKR

SEQ ID NO: 10388 - protein, 108 aa, Artificial Sequence
  source: /note="Description of Artificial Sequence: Synthetic polypeptide"
DIVMTQSPATLSLSPGERATLSCRVSENVYSYLAWYQQKPGQAPRLLISFAKTLAEGVPARFSGSGSGTDFTLTISSLEPEDFAVYFCQHHSDNPWTFGQGTKVEIKR

SEQ ID NO: 10389 - protein, 108 aa, Artificial Sequence
  source: /note="Description of Artificial Sequence: Synthetic polypeptide"
DIVMTQSPATLSLSPGERATLSCRTSENVYSYLAWYQQKPGQAPRLLVSFAKTLAEGVPARFSGSGSGTQFTLTISSLEPEDFAVYFCQHHSDNPWTFGGGTELEIKR

SEQ ID NO: 10390 - protein, 106 aa, Artificial Sequence; identical to SEQ ID NO: 4042
  source: /note="Description of Artificial Sequence: Synthetic polypeptide"

SEQ ID NO: 10391 - protein, 214 aa, Artificial Sequence; identical to SEQ ID NO: 9528
  source: /note="Description of Artificial Sequence: Synthetic polypeptide"

SEQ ID NO: 10392 - protein, 214 aa, Artificial Sequence; identical to SEQ ID NO: 9528
  source: /note="Description of Artificial Sequence: Synthetic polypeptide"

SEQ ID NO: 10393 - protein, 214 aa, Artificial Sequence; identical to SEQ ID NO: 9529
  source: /note="Description of Artificial Sequence: Synthetic polypeptide"

SEQ ID NO: 10394 - protein, 108 aa, Artificial Sequence; identical to SEQ ID NO: 10378
  source: /note="Description of Artificial Sequence: Synthetic polypeptide"

SEQ ID NO: 10395 - protein, 214 aa, Artificial Sequence; identical to SEQ ID NO: 9529
  source: /note="Description of Artificial Sequence: Synthetic polypeptide"

SEQ ID NO: 10396 - protein, 107 aa, Artificial Sequence
  source: /note="Description of Artificial Sequence: Synthetic polypeptide"
DIQMTQSPSSLSASVGDRVTITCRASQGISSWLAWYQQKPEKAPKSLIYAASSLQSGVPSRFSGSGSGTDFTLTISSLQPEDFATYYCQQYNSYPRTFGQGTKVEIK

SEQ ID NO: 10397 - protein, 107 aa, Artificial Sequence [sequence omitted]

SEQ ID NO: 10398 - protein, 109 aa, Artificial Sequence
  source: /note="Description of Artificial Sequence: Synthetic polypeptide"
DIELTQPPSVSVAPGQTARISCSGDNLRHYYVYWYQQKPGQAPVLVIYGDSKRPSGIPERFSGSNSGNTATLTISGTQAEDEADYYCQTYTGGASLVFGGGTKLTVLGQ

SEQ ID NO: 10399 - protein, 107 aa, Artificial Sequence [sequence omitted]

SEQ ID NO: 10400 - protein, 107 aa, Artificial Sequence; identical to SEQ ID NO: 10396
  source: /note="Description of Artificial Sequence: Synthetic polypeptide"

SEQ ID NO: 10401 - protein, 107 aa, Artificial Sequence
  source: /note="Description of Artificial Sequence: Synthetic polypeptide"
EIVLTQSPATLSLSPGERATLSCRASQSVSSYLAWYQQKPGQAPGLLIYDASNRASGIPARFSGSGSGTDFTLTISSLEPEDFAVYYCQQRSNWPLTFGGGTKVEIK

SEQ ID NO: 10402 - protein, 112 aa, Artificial Sequence
  source: /note="Description of Artificial Sequence: Synthetic polypeptide"
NIVLTQSPASLAVSLGQRATISCRASESVEIYGNGFMNWFQQKPGQPPKLLIYRASNLESGIPARFSGSGSRTEFTLTIDPVEADDVATYYCQQINEDPFTFGSGTKLEIKR

SEQ ID NO: 10403 - protein, 112 aa, Artificial Sequence
  source: /note="Description of Artificial Sequence: Synthetic polypeptide"
DIVLTQSPASLAVSLGQRATISCRASESVAIYGNSFLKWFQQKPGQPPKLLIYRASNLESGIPARFSGSGSGTDFTLTINPVEADDVATYYCQQINEDPYTFGGGTKLEIKR

SEQ ID NO: 10404 - protein, 108 aa, Artificial Sequence
  source: /note="Description of Artificial Sequence: Synthetic polypeptide"
DIVMAQSHKFMSTSVGDRVSITCKASQDVSTVVAWYQQKPGQSPKRLIYSASYRYIGVPDRFTGSGSGTDFTFTISSVQAEDLAVYYCQQHYSPPYTFGGGTKLEIKR

SEQ ID NO: 10405 - protein, 108 aa, Artificial Sequence
  source: /note="Description of Artificial Sequence: Synthetic polypeptide"
DIVMTQSHKFLSTSVGDRVSITCKASQDVVTAVAWFQQKPGQSPKLLIYSASHRYTGVPDRFTGSGSGTDFTFTIISVQAEDLAVYYCQQHYTTPTTFGGGTKLDFRR

SEQ ID NO: 10406 - protein, 108 aa, Artificial Sequence
  source: /note="Description of Artificial Sequence: Synthetic polypeptide"
DTVMTQSHKFISTSVGDRVSITCKASQVVGSAVAWYQQKPGQSPKLLIYWASTRHTGVPDRFTGSGSGTDFTLTISNVQSEDLADYFCQQYNSYPYTFGGGTKLEIKR

SEQ ID NO: 10407 - protein, 108 aa, Artificial Sequence
  source: /note="Description of Artificial Sequence: Synthetic polypeptide"
DIVMTQSQKFMSTSVGDRVSVTCKASQNVGTNVAWYQHKPGQSPKIMIYSASSRYSGVPDRFTGSGSGTLFTLTINNVQSEDLAEYFCQQYNSYPLTFGSGTKLEIKR

SEQ ID NO: 10408 - protein, 108 aa, Artificial Sequence
  source: /note="Description of Artificial Sequence: Synthetic polypeptide"
DIVMTQSHLSMSTSLGDPVSITCKASQDVSTVVAWYQQKPGQSPRRLIYSASYRYIGVPDRFTGSGAGTDFTFTISSVQAEDLAVYYCQQHYSPPYTFGGGTKLEIKR

SEQ ID NO: 10409 - protein, 108 aa, Artificial Sequence
  source: /note="Description of Artificial Sequence: Synthetic polypeptide"
DIVMAQSHLSMSTSLGDPVSITCKASQDVSTVVAWYQQKPGQSPRRLIYSASYRYIGVPDRFTGSGAGTDFTFTISSVQAEDLAVYYCQQHYSPPYTFGGGTKLEIKR

SEQ ID NO: 10410 - protein, 108 aa, Artificial Sequence
  source: /note="Description of Artificial Sequence: Synthetic polypeptide"
DTVMTQSPSTISTSVGDRVSITCKASQVVGSAVAWYQQKPGQSPKLLIYWASTRHTGVPDRFTGSGSGTDFTLTISNVQSDDLADYFCQQYNSYPYTFGGGTKLEIKR

SEQ ID NO: 10411 - protein, 108 aa, Artificial Sequence
  source: /note="Description of Artificial Sequence: Synthetic polypeptide"
DTVMTQSPSSISTSIGDRVSITCKASQVVGSAVAWYQQKPGQSPKLLIYWASTRHTGVPARFTGSGSGTDFTLTISNVQSEDLADYFCQQYNSYPYTFGGGTKLEIKR

SEQ ID NO: 10412 - protein, 116 aa, Artificial Sequence
  source: /note="Description of Artificial Sequence: Synthetic polypeptide"
QAVLTQPASLSASPGESARLTCTLPSDINVRYYNIYWYQQKPGSPPRYLLYYYSDSHKGQGSGVPSRFSGSKDVSTNSGILLISGLQSEDEADYYCMTWSSNGSGVFGGGTQLTVL

SEQ ID NO: 10413 - protein, 108 aa, Artificial Sequence
  source: /note="Description of Artificial Sequence: Synthetic polypeptide"
AIQMTQSPSSLSASVGDRVTITCRASQSISSYLNWYQQKPGKAPKLLIYAASSLQSGVPSRFSGSGSGTDFTLTISSLQPEDFATYYCQQSYFTPLYTFGQGTKLEIK

SEQ ID NO: 10414 - protein, 116 aa, Artificial Sequence
  source: /note="Description of Artificial Sequence: Synthetic polypeptide"
QAVLTQPASLSASPGESARLTCTLPSDINVRYYNIYWYQQKPGSPPRYLLYYYSDSHKDQGSGVPSRFSGSKDTSANTGILLISGLQSEDEADYYCMIWASNGSGVLGGGTQLTVL

SEQ ID NO: 10415 - protein, 116 aa, Artificial Sequence
  source: /note="Description of Artificial Sequence: Synthetic polypeptide"
QAVLTQPASLSASPGESARLTCTLPSDINVRYHNIYWYQEKPGSPPRYLLYYYSDSSKGQGSGVPSRFSGSKDVSTNTGILVISGLQSEDEAEYYCMTWSSNGSGVFGGGTQLTVL

SEQ ID NO: 10416 - protein, 107 aa, Artificial Sequence
  source: /note="Description of Artificial Sequence: Synthetic polypeptide"
DIQMTQSPASLSASLGETVTIECRASEDIYSNLAWYQQKPGNSPQLLIYDANSLADGVPSRFSASGSGTQFSLKINSLRSEDVASYFCQQYNNYPYTFGAGTKLELK

SEQ ID NO: 10417 - protein, 112 aa, Artificial Sequence
  source: /note="Description of Artificial Sequence: Synthetic polypeptide"
DIVMTQGALPNPVPSGESASITCQSSESLLHSNGKTYLNWYLQRPGQSPQLLIYWMSTRAAGVSDRFSGSGSGTDFTLTISGVEAEDVGVYYCQQFLEYPPTFGSGTKLEIK

SEQ ID NO: 10418 - protein, 107 aa, Artificial Sequence
  source: /note="Description of Artificial Sequence: Synthetic polypeptide"
DIVMTQSPTSISISVGERVTMNCKASQNVDSDVDWYQQKTGQSPKLLIYKASNRYTGVPDRFTGSGSGTDFTFTISNMQAEDLAVYYCMQSNTHPRTFGGGTKLELK

SEQ ID NO: 10419 - protein, 107 aa, Artificial Sequence
  source: /note="Description of Artificial Sequence: Synthetic polypeptide"
EIVLTQSPATLSASPGERATLSCRASQSISSNLAWYQQKPGQAPRLLIQDSSTRATGIPARFSGSGSGTEFTLTISSLQSEDFAVYYCQQSDNWPLTFGGGTKVDIK

SEQ ID NO: 10420 - protein, 112 aa, Artificial Sequence
  source: /note="Description of Artificial Sequence: Synthetic polypeptide"
DVVMTQSPLSLPVTPGEPASISCRSSQSLLNSNGYNYLEWYVQKPGQSPQLLIFLGSNRASGVPDRFSGSGSGTDFTLKINRVEAEDVGVYYCMQALQSPLTFGGGTKVEIK

SEQ ID NO: 10421 - protein, 107 aa, Artificial Sequence [sequence omitted]

SEQ ID NO: 10422 - protein, 113 aa, Artificial Sequence
  source: /note="Description of Artificial Sequence: Synthetic polypeptide"
DVVVTQTPLSLPVSLGAQASISCRSSQSLVHSNGNTFLHWYLQKPGQSPKLLIYTVSNRFSGVPDRFSGSGSGTDFTLKISRVEAEDLGVYFCSQTTHVPWTFGGGTKLEIQR

SEQ ID NO: 10423 - protein, 113 aa, Artificial Sequence
  source: /note="Description of Artificial Sequence: Synthetic polypeptide"
DIQMTQSPSSLSASVGDRVTITCRSSQSLVHSNGNTFLHWYQQKPGKAPKLLIYTVSNRFSGVPSRFSGSGSGTDFTLTISSLQPEDFATYYCSQTTHVPWTFGQGTKVEIKR

SEQ ID NO: 10424 - protein, 113 aa, Artificial Sequence
  source: /note="Description of Artificial Sequence: Synthetic polypeptide"
DVQVTQSPSSLSASVGDRVTITCRSSQSLVHSNGNTFLHWYQQKPGKAPKLLIYTVSNRFSGVPSRFSGSGSGTDFTLTISSLQPEDFATYYCSQTTHVPWTFGQGTKVEIKR

SEQ ID NO: 10425 - protein, 113 aa, Artificial Sequence
  source: /note="Description of Artificial Sequence: Synthetic polypeptide"
DIQMTQSPSSLSASVGDRVTITCRSSQSLVHSNGNTFLHWYQQKPGKAPKLLIYTVSNRFSGVPSRFSGSGSGTDFTLTISSLQPEDFATYFCSQTTHVPWTFGQGTKVEIKR

SEQ ID NO: 10426 - protein, 108 aa, Artificial Sequence
  source: /note="Description of Artificial Sequence: Synthetic polypeptide"
DIVLTQSPATLSVTPGDRVSLSCRASQSISDYLHWYQQKSHESPRLLIKYASHSISGIPSRFSGSGSGSDFTLSINSVEPEDVGIYYCQHGHSFPWTFGGGTKLEIKR

SEQ ID NO: 10427 - protein, 112 aa, Artificial Sequence
  source: /note="Description of Artificial Sequence: Synthetic polypeptide"
DIVMTQSPLSLTVTPGEPASISCRSSQSLLYSNGYNYLDWYLQKPGQSPQVLISLGSNRASGVPDRFSGSGSGTDFTLKISRVEAEDVGVYYCMQARQTPFTFGPGTKVDIR

SEQ ID NO: 10428 - protein, 108 aa, Artificial Sequence
  source: /note="Description of Artificial Sequence: Synthetic polypeptide"
DIQMTQSPSSLSASVGDRVTITCRASQNIGEDLEWYQQKPGNAPKLLIYSASHLQSGVPSRFSGSGSGTDFTLTISSLQPEDFATYYCQQYSSYPVTFGQGTKVEIKR

SEQ ID NO: 10429 - protein, 108 aa, Artificial Sequence
  source: /note="Description of Artificial Sequence: Synthetic polypeptide"
DIQMTQSPSSLSASVGDRVTITCRASQPIDEDLEWYQQKPGNAPKLLIYSASYLQSGVPSRFSGSGSGTDFTLTISRLQPEDFATYYCQQYHLLPATFGQGTKVEIKR

SEQ ID NO: 10430 - protein, 108 aa, Artificial Sequence
  source: /note="Description of Artificial Sequence: Synthetic polypeptide"
DIQMIQSPSSLSASVGDRVTITCRASQDINEDLEWYQQKPGKAPKLLIYNASMLQSGVPSRFSGSGSGTDFTLTISSLQPKDFATYYCQQYHTNPTTFGQGTKVEIKR

SEQ ID NO: 10431 - protein, 108 aa, Artificial Sequence
  source: /note="Description of Artificial Sequence: Synthetic polypeptide"
DIQMTQSPSSLSASVGDRVTITCRASQDIEADLEWYQQKPGKAPKLLIYHSSELQSGVPSRFSGSGSGTDFTLTISSLQPEDFATYYCQQYHMSPVTFGQGTKVEIKR

SEQ ID NO: 10432 - protein, 108 aa, Artificial Sequence
  source: /note="Description of Artificial Sequence: Synthetic polypeptide"
DIQMTQSPSSLSASVGDRVTITCRASQDIDSDLEWYQQKPGKAPMLLIYSSSDLQSGVPSRFSGSGSGTDFTLTISSLQPEDFATYYCQQYHSLPVTFGQGTKVEIKR

SEQ ID NO: 10433 - protein, 108 aa, Artificial Sequence
  source: /note="Description of Artificial Sequence: Synthetic polypeptide"
DIQMTQSPSSLSASVGDRVTITCRASQDISDDLEWYQQKPGKAPKLLIYNSSFLQSGVPSRFSGSGSGADFTLTISSLQPEDFATYYCQQYHSLPVTFGQGTKVEIKR

SEQ ID NO: 10434 - protein, 108 aa, Artificial Sequence
  source: /note="Description of Artificial Sequence: Synthetic polypeptide"
DIQMTQSPSSLSASVGDRVTITCRASQDIEGNLEWYQQKPGKAPKLLIYDSSQLQSGVPSRFSGSGSGTDFTLTISSLQPEDFATYYCQQYHHLPTTFGQGTKVEIKR

SEQ ID NO: 10435 - protein, 108 aa, Artificial Sequence
  source: /note="Description of Artificial Sequence: Synthetic polypeptide"
DIQMTQSPSSLSASVGDRVTITCRASQSIDTDLEWYQQKPGKAPKLLIYDGSWLQSGVPSRFSGSGSGTDFTLTISSLQPEDFATYYCQQYRWIPVTFGQGTKVEIKR

SEQ ID NO: 10436 - protein, 108 aa, Artificial Sequence
  source: /note="Description of Artificial Sequence: Synthetic polypeptide"
DIQMTQSPSSLSASVGDRVTITCRASQSISTDLEWYQQKLGKAPKLLIYDASLLQSGVPSRFSGSGSGTDFTLTISSLQPEDFATYYCQQYSSLPVTFGQGTKVEIKR

SEQ ID NO: 10437 - protein, 108 aa, Artificial Sequence
  source: /note="Description of Artificial Sequence: Synthetic polypeptide"
DIQMTQSPSSLSASVGDRVTITCRASQPITTSLEWYQQKPGKAPKLLIYDASMLQSGVPSRFSGSGSGTDFTLTISSLQPEDFATYYCQQYWVTPVTFGQGTKVEIKR

SEQ ID NO: 10438 - protein, 108 aa, Artificial Sequence
  source: /note="Description of Artificial Sequence: Synthetic polypeptide"
DIQMTQSPSSLSASVGDRVTITCRASQNIHTNLEWYQQKPGKAPKLLIYDGSMLQSGVPSRFSGSGSGTDFTLTISSLQPEDFATYYCQQYSANPVTFGQGTKVGIKR

SEQ ID NO: 10439 - protein, 108 aa, Artificial Sequence
  source: /note="Description of Artificial Sequence: Synthetic polypeptide"
DIQMTQSPSSLSASVGDRVTITCRASQWIHTDLEWYQQKPGKAPKLLIYDGSMLQSGVPSRFSGSGSGTDFTLTISSLQPEDFATYYCQQYSVSPVTFGQGTKVEIKR

SEQ ID NO: 10440 - protein, 108 aa, Artificial Sequence
  source: /note="Description of Artificial Sequence: Synthetic polypeptide"
DIQMTQSPSSLSASVGDRVTITCRASQSIDNNLEWYQQKPGEAPKLLIYDGSLLQSGVPSRFSGSGSGTDFTLTISSLQPEDFATYYCQQYHLHPVTFGQGTKVEIKR

SEQ ID NO: 10441 - protein, 108 aa, Artificial Sequence
  source: /note="Description of Artificial Sequence: Synthetic polypeptide"
DIQMTQSPSSLSASVGDRVTITCRASQDIDTNLEWYQQKPGEAPKLLIYDRSTLQSGVPSRFSGSGSGTDFTLTISSLQPEDFATYYCQQYDSYPVTFGQGTKVEIKR

SEQ ID NO: 10442 - protein, 108 aa, Artificial Sequence
  source: /note="Description of Artificial Sequence: Synthetic polypeptide"
DIQMTQSPSSLSASVGDRVTITCRASQSIESNLEWYQQKPGKAPKLLIYNASELQSGVPSRFSGSGSGTDFTLTISSLRPEDFATYYCQQYDQWPTTFGQGTKVEIKR

SEQ ID NO: 10443 - protein, 108 aa, Artificial Sequence
  source: /note="Description of Artificial Sequence: Synthetic polypeptide"
DIQMTQSPSSLSASVGDRVTITCRASQAIGNTLRWYQQKPGKAPKLLIYLSSRLQSGVPSRFSGSGSGTDFTLTISSLQPEDFATYYCQQLKKPPYTFGQGTKVEIKR

SEQ ID NO: 10444 - protein, 108 aa, Artificial Sequence
  source: /note="Description of Artificial Sequence: Synthetic polypeptide"
DIQMTQSPSSLSASVGDRVTITCRASQKIKNRLAWYQQKPGKAPKLLIYEVSHLQSGVPSRFSGSGSGTDFTLTIGSLQPEDFATYYCQQRRQSPYTFGQGTKVEIKR

SEQ ID NO: 10445 - protein, 108 aa, Artificial Sequence
  source: /note="Description of Artificial Sequence: Synthetic polypeptide"
DIQMTQSPSSLSASVGDRVTITCRASEDIGEELFWYQQKPGKAPKLLIYSASTLQSEVPSRFSGSGSGTDFTLTISSLQHEDFATYYCQQVYEWPYTFGQGTKVEIKR

SEQ ID NO: 10446 - protein, 108 aa, Artificial Sequence
  source: /note="Description of Artificial Sequence: Synthetic polypeptide"
DIQMTQSPSSLSASVGDRVTITCRASQPISGGLRWYQQKPGKAPKLLIYSTSMLQSGVPSRFSGSGSGTDFTLTISSLQPEDFATYYCQQLYSAPYTFGQGTKVEIKR

SEQ ID NO: 10447 - protein, 108 aa, Artificial Sequence
  source: /note="Description of Artificial Sequence: Synthetic polypeptide"
DIQMTQSPSSLSASVGDRVTITCRASQDIDQDLEWYQQKPGKAPKLLIYNVSLLQSGVPSRFSGSGSGTDFTLTISSLQPEDFATYYCQQYSMNPVTFGQGTKVEIKR

SEQ ID NO: 10448 - protein, 108 aa, Artificial Sequence
  source: /note="Description of Artificial Sequence: Synthetic polypeptide"
DIQMTQSPSSLSASVGDRVTITCRASQDIGNQLKWYQQKPGKAPKLLIYQASGLQSGVPSRFSGSGSGTDFTLTISSLQPEDFATYYCQQYDLRPQTFGQGTKVEIKR

SEQ ID NO: 10449 - protein, 108 aa, Artificial Sequence
  source: /note="Description of Artificial Sequence: Synthetic polypeptide"
DIQMTQSPSFLSASVGDRVTITCRASQKISTSLEWYQQKPGKAPRLLIYDSSWLQSGVPSRFSGSGSGTDFTLTISSLQPEDFATYYCQQYEYNPITFGQGTKVEIKR

SEQ ID NO: 10450 - protein, 108 aa, Artificial Sequence
  source: /note="Description of Artificial Sequence: Synthetic polypeptide"
DIQMTQSPSSLSASVGDRVTITCRASQTIGESLHWYQQKPGKAPRLLIYFASLLQSGVPSRFSGSGSGTDFTLTISSLQPEDFATYYCQQHHMLPSTFGQGTKVEIKR

SEQ ID NO: 10451 - protein, 108 aa, Artificial Sequence
  source: /note="Description of Artificial Sequence: Synthetic polypeptide"
DIQMTQSPSSLSASVGDRVTITCRASQFIGDSLSWYQQKPGKAPKLLIYFSSILQSGVPSRFSGSGSGTDFTLTISSLQPEDFATYYCQQYMDIPITFGQGTKVEIKR

SEQ ID NO: 10452 - protein, 108 aa, Artificial Sequence
  source: /note="Description of Artificial Sequence: Synthetic polypeptide"
DIQMTQSPSSLSASVGDRVTITCRASQDIDHNLEWYQQKPGKAPKLLIYDSSMLQSGVPSRFSGSGSGTDFTLTISSLQPEDFATYYCQQYHSIPVTFGQGTKVEIKR

SEQ ID NO: 10453 - protein, 108 aa, Artificial Sequence
  source: /note="Description of Artificial Sequence: Synthetic polypeptide"
DIQMTQSPSSLSASVGDRVTITCRASQQIETNLEWYQQKPGKAPKLLIYDGSWLQSGVPSRFSGSGSGTDFTLTISSLQPEDFATYYCQQYHSLPATFGQGTKVEIKR

SEQ ID NO: 10454 - protein, 108 aa, Artificial Sequence
  source: /note="Description of Artificial Sequence: Synthetic polypeptide"
DIQMTQSPSSLSASVGDRVTITCRASQDIGNNLEWYQQKPGKAPRLLIYHGSWLQSGVPSRFSGSGSGTDFTLTISSLQPEDFATYYCQQYDFNPTTFGQGTKVEIKR

SEQ ID NO: 10455 - protein, 108 aa, Artificial Sequence
  source: /note="Description of Artificial Sequence: Synthetic polypeptide"
DIQMTQSPSSLSASVGDCVTITCRASQNIDGLLWWYQQKPGKAPKLLIYAGSGLQSGVPSRFSGSGSGTDFTLTISSLQPEDFATYYCQQKAFEPFTFGQGTKVEIKR

SEQ ID NO: 10456 - protein, 108 aa, Artificial Sequence
  source: /note="Description of Artificial Sequence: Synthetic polypeptide"
DIQMTQTPSSLSASVGDRVTITCRASQSIGHDLEWYQQKPGKAPKLLIYNVSWLQSGVPSRFSGSGSGTDFTLTISSLQPEDFATYYCQQYSHNPPTFGQGTKVEIKR

SEQ ID NO: 10457 - protein, 108 aa, Artificial Sequence
  source: /note="Description of Artificial Sequence: Synthetic polypeptide"
DIQMTQSPSSLSASVGDRVTITCRASQHIENDLEWYQQKPGKAPKLLIYSASHLQSGVPSRFSGSGSGTDFTLTISSLQPEDFATYYCQQYHLQPTTFGPGTKVEIKR

SEQ ID NO: 10458 - protein, 108 aa, Artificial Sequence
  source: /note="Description of Artificial Sequence: Synthetic polypeptide"
DIQMTQSPSSLSASVGDRVTITCRASQVIEGSLNWYQQKPGKAPKLLIYHRSILQSGVPSRFSGRGSGTDFTLTISSLQPEDFATYYCQQTYQLPLTFGQGTKVEIKR

SEQ ID NO: 10459 - protein, 108 aa, Artificial Sequence
  source: /note="Description of Artificial Sequence: Synthetic polypeptide"
DIQMTQSPSSLSASVGDRVTITCRASRPINGKLFWYQQKPGKAPKLLIAFASALQSGVPSRFSGSGSGTDFTLTISSLQPEDFATYYCVQQAVYPITFGQGTKVEIKR

SEQ ID NO: 10460 - protein, 108 aa, Artificial Sequence
  source: /note="Description of Artificial Sequence: Synthetic polypeptide"
DIQMTQSPSSLSASVGDRVTITCRASQAIETNLEWYQQKPGKAPKLLIYDGSLLQSGVPSRFSGRGSGTDFTLTISSLQPEDFATYYCQQYHYQPATFGQGTKVEIKR

SEQ ID NO: 10461 - protein, 108 aa, Artificial Sequence
  source: /note="Description of Artificial Sequence: Synthetic polypeptide"
DIQMTQSPSSLSASVGDRVTITCRASQDIEHDLEWYQQKPGKAPKLLIYSASQLQSGVPSRFSGSGSGTDFTLTISSLQPEDFATYYCQQYQQQPTTFGQGTKVEIKR

SEQ ID NO: 10462 - protein, 108 aa, Artificial Sequence
  source: /note="Description of Artificial Sequence: Synthetic polypeptide"
DIQMTQSPSSLSASVGDRVTITCRASSQIEESLWWYQQKPGKAPKLLIADVSLLQSGVPSRFSGSGSGTDFTLTISSLQPEDFATYYCAQGVVEPRTFGQGTKVEIKR

SEQ ID NO: 10463 - protein, 108 aa, Artificial Sequence
  source: /note="Description of Artificial Sequence: Synthetic polypeptide"
DIQMTQSPSSLSASVGDRVTITCRASQYIGLDLEWYQQKPGKAPKLLIYAASWLQSGVPSRFSGSGSGTDFTLTISSLQPEDFATYYCQQYFRQPITFGQGTKVEIKR

SEQ ID NO: 10464 - protein, 108 aa, Artificial Sequence
  source: /note="Description of Artificial Sequence: Synthetic polypeptide"
DIQMTQSPSSLSASVGDRVTITCRASTPIGTMLDWYQQKPGKAPKLLIGHSSWLQSGVPSRFSGSGSGTDFTLTISSLQPEDFATYYCGQHVRPPATFGQGTKVEIKR

SEQ ID NO: 10465 - protein, 108 aa, Artificial Sequence
  source: /note="Description of Artificial Sequence: Synthetic polypeptide"
DIQLTQSPTSLSATVGDRVTITCRASTPIGTMLDWYQQKPGKAPKLLIGHSSWLQSGVPSRFSGSGSGTDFTLTISSLQPEDFATYYCGQHVRHPATFGQGTKVEIKR

SEQ ID NO: 10466 - protein, 108 aa, Artificial Sequence
  source: /note="Description of Artificial Sequence: Synthetic polypeptide"
DIQMTQSPSSLSASVGDRVTITCRASTPIGTMLDWYQQKPGKAPKLLIGHSSWLQSGVPSRFSGSGSGTDFTLTISSLQPEDFATYYCGQHVRPPATFGQGTKVGIKR

SEQ ID NO: 10467 - protein, 108 aa, Artificial Sequence
  source: /note="Description of Artificial Sequence: Synthetic polypeptide"
DIQMTQSPSSLSASVGDRVTITCRVSTPIGTMLDWYQQKPGKAPKLLIGHSSWLQSGVPPRFSGSGSGTDFTLTISSLQPEDFATYYCGQHVRPPATFGQGTKVEIKR

SEQ ID NO: 10468 - protein, 108 aa, Artificial Sequence
  source: /note="Description of Artificial Sequence: Synthetic polypeptide"
DIQMTQSPSSLSASVGDRVTITCRASTPIGTMLDWYQQKPGKAPKLLIGHSSWLQSGVPSRFSGCGSGTDFTLTISSLQPEDFATYYCGQHVRPPATFGQGTKVEIKR

SEQ ID NO: 10469 - protein, 108 aa, Artificial Sequence
  source: /note="Description of Artificial Sequence: Synthetic polypeptide"
DIQMTQSPSSLSASVGDRVTITCRASTPIGTMIDWYQQKPGKAPKLLIGHSSWLQSGVPSRFSGSGSGTDFTLTISSLQPEDFATYYCGQHVRPPATFGKGTKVEIKR

SEQ ID NO: 10470 - protein, 108 aa, Artificial Sequence
  source: /note="Description of Artificial Sequence: Synthetic polypeptide"
DIQMTQSPSSLSASVGDRVTITCRASQYIDTNLEWYQQKPGKAPRLLIYDGSQLQSGVPSRFSGSGSGTDFTLIISSLQPEDFATYYCQQYQVVPVTFGQGTKVEIKR

SEQ ID NO: 10471 - protein, 108 aa, Artificial Sequence
  source: /note="Description of Artificial Sequence: Synthetic polypeptide"
DIQMTQSPSSLSASVGDRVTITCRASQSISSYLNWYQQKPGKAPRLLIVDSSGLQSGVPSRFSGSGSGTDFTLTISSLQPEDFATYYCGQDRWSPATFGQGTKVEIKR

SEQ ID NO: 10472 - protein, 108 aa, Artificial Sequence
  source: /note="Description of Artificial Sequence: Synthetic polypeptide"
DIQMTQSPSSLSASVGDRVTITCRASSRIQHMLSWYQQKPGKAPKLLIGGHSGLQSGVPSRFSGSGSGTDFTLTISSLQPEDFATYYCAQSCAWPLTFGQGTKVEIKR

SEQ ID NO: 10473 - protein, 108 aa, Artificial Sequence
  source: /note="Description of Artificial Sequence: Synthetic polypeptide"
DIQMTQSPSSLSASVGDRVTITCRASRGIDGDLWWYQQKPGKAPKLLIADSSLLQSGVPSRFSGSGSGTDFTLTISSLQPEDFATYYCGQGAVRPMTFGQGTKVEIKR

SEQ ID NO: 10474 - protein, 108 aa, Artificial Sequence
  source: /note="Description of Artificial Sequence: Synthetic polypeptide"
DIQMTQSPSSLSASVGDRVTITCRASRGIDTDLWWYQQKPGKAPKLLIADSSLLQSGVPSRFSGSGSGTDFTLTISSLQPEDFATYYCGQGAVRPMTFGQGTKVEIKR

SEQ ID NO: 10475 - protein, 108 aa, Artificial Sequence
  source: /note="Description of Artificial Sequence: Synthetic polypeptide"
DIQMTQSPSSLSASVGDRVTITCRASYTIPVALDWYQQKPGKAPKLLIADASLLQSGVPSRFSGSGSGTDFTLTISSLQPEDFATYYCAQGWPGPQTFGQGTKVEIKR

SEQ ID NO: 10476 - protein, 108 aa, Artificial Sequence
  source: /note="Description of Artificial Sequence: Synthetic polypeptide"
DIQMTQSPSSLSASVGDRVTITCRASQSIATDLEWYQQKPGKAPKLLIYDTSMLQSGVPSRFSGSGSGTDFTLTISSLQPEDFATYYCQQYSYNPSTFGQGTKVEIKR

SEQ ID NO: 10477 - protein, 108 aa, Artificial Sequence
  source: /note="Description of Artificial Sequence: Synthetic polypeptide"
DIQMTQSPSSLSASVGDRVTITCRASVPITEGLSWYQQKPGKAPKLLIQANSWLQSGVPSRFSGSGSGTDFTLTISSLQPEDFATYYCGQWEHVPATFGQGTKVEIKR

SEQ ID NO: 10478 - protein, 108 aa, Artificial Sequence
  source: /note="Description of Artificial Sequence: Synthetic polypeptide"
DIQMTQSPSSLSASVGDRVTITCRASSMILYGLDWYQQKPGKAPKLLIGGTSALQSGVPSRFSGSGSGTDFTLTISSLQPEDFATYYCGQWETVPATFGQGTKVEIKR

SEQ ID NO: 10479 - protein, 108 aa, Artificial Sequence
  source: /note="Description of Artificial Sequence: Synthetic polypeptide"
DIQMTQSPSSLSASVGDRVTITCRASQPINGLLIWYQQKPGKAPKLLIYAMSSLQSGVPSRFSGSGSGTDFTLTISSLQPEDFATYYCQQLARIPFTFGQGTKVGIKR

SEQ ID NO: 10480 - protein, 108 aa, Artificial Sequence
  source: /note="Description of Artificial Sequence: Synthetic polypeptide"
DIQMTQSPSSLSASVGDRVTITCRASQLIRTYLAWYQQKPGKAPKLLIYQSSQLQSGVPSRFSGSGSGTDFTLTISSLQPEDFATYYCQQYNSYPDTFGQGTKVEIKR

SEQ ID NO: 10481 - protein, 108 aa, Artificial Sequence
  source: /note="Description of Artificial Sequence: Synthetic polypeptide"
DIQMTQSPSSLSASVGDRVTITCRASQWIGDSLSWYQQKPGKAPKLLIYFGSYLQSGVPSRFSGSGSGTDFTLTISSLQPEDFATYYCQQYLHTPSTFGQGTKVEIKR

SEQ ID NO: 10482 - protein, 108 aa, Artificial Sequence
  source: /note="Description of Artificial Sequence: Synthetic polypeptide"
DIQMTQSPSSLSASVGDRVTITCRASQDIEADLEWYQQKPGKAPKLLIYHSSELQSGVPSRFSGSGSGTDFTLTISSLQPEDFATYYCQQYGFNPPTFGQGTKVEIKR

SEQ ID NO: 10483 - protein, 108 aa, Artificial Sequence
  source: /note="Description of Artificial Sequence: Synthetic polypeptide"
DIQMTQSPSSLSASVGDRVTITCRASSPIEYGLDWYQQKPGKAPKLLIGGGSALQSGVPSRFSGSGSGTDFTLTISSLQPEDFATYYCGQWEVQPATFGQGTKVEIKR

SEQ ID NO: 10484 - protein, 108 aa, Artificial Sequence
  source: /note="Description of Artificial Sequence: Synthetic polypeptide"
DIQMTQSPSSLSASVGDRVTITCRASQRIDTDLEWYQQKPGKAPKLLIYDSSQLQSGVPSRFSGSGSGTDFTLTISSLQPEDFATYYCQQYHSAPATFGQGTKVEIKR

SEQ ID NO: 10485 - protein, 108 aa, Artificial Sequence
  source: /note="Description of Artificial Sequence: Synthetic polypeptide"
DIQMTQSPSSLSASVGDRVTITCRASGWIGMSLEWHQQKPGKAPKLLIRGASSLQSGVPSRFSGSGSGTDFTLTISSLQPEDFATYYCSQSRWPPVTFGQGTKVEIKR

SEQ ID NO: 10486 - protein, 108 aa, Artificial Sequence
  source: /note="Description of Artificial Sequence: Synthetic polypeptide"
DIQMTQSPSSLSASVGDRVTITCRASRNISNALSWYQQKPGKAPKLLILGASWLQSGVPSRFSGSGSGTDFTLTISSLQPEDFATYYCTQVWDRPFTFGQGTKVEIKR

SEQ ID NO: 10487 - protein, 108 aa, Artificial Sequence
  source: /note="Description of Artificial Sequence: Synthetic polypeptide"
DIQMTQSPSSLSASVGDRVTITCRASQDIMSALSWYQQKPGKAPKLLIYSTSILQSGVPSRFSGSGSGTDFTLTISSLQPEDFATYYCQQVYLLPVTFGQGTKVEIKR

SEQ ID NO: 10488 - protein, 108 aa, Artificial Sequence
  source: /note="Description of Artificial Sequence: Synthetic polypeptide"
DIQMTQSPSSLSASVGDRVTITCRASQEIGIDLEWYQQKPGKAPKLLIYAASYLQSGVPSRFSSSGSGTDFTLTISSLQPEDFATYYCQQYASNPPTFGRGTKVEIKR

SEQ ID NO: 10489 - protein, 108 aa, Artificial Sequence
  source: /note="Description of Artificial Sequence: Synthetic polypeptide"
DIQMTQSPSSLSASVGDRVTITCRASQMIGDWLNWYQQKPGKAPKLLIYRSSELQSGVPSRFSGSGSGTDFTLTISSLQPEDFATYYCQQLYFWPRTFGQGTKVEIKR

SEQ ID NO: 10490 - protein, 108 aa, Artificial Sequence
  source: /note="Description of Artificial Sequence: Synthetic polypeptide"
DIQMTQSPSSLSASVGDRVTITCRASQAIELNLEWYQQKPGKAPKLLIYDASMLQSGVPSRFSGSGSGTDFTLTISSLQPEDFATYYCQQYDVYPPTFGQGTKVEIKR

SEQ ID NO: 10491 - protein, 108 aa, Artificial Sequence
  source: /note="Description of Artificial Sequence: Synthetic polypeptide"
DIQMTQSPSSLSASVGDRVTITCRASQAIEHNLEWYQQKPGKAPKLLIYDASMLQSGVPSRFSGSGSGTDFTLTISSLQPEDLATYYCQQYDAYPPTYGQGTKVEIKR

SEQ ID NO: 10492 - protein, 108 aa, Artificial Sequence
  source: /note="Description of Artificial Sequence: Synthetic polypeptide"
DIQMTQSPSSLSASVGDRVTITCRASRAIETNLEWYQQKPGKAPKLLFYDASMLQSGVPSRFGGSGSGTDFTLTISSLQPEDFATYYCLQYDVYPPTFGQGTKVEIKR

SEQ ID NO: 10493 - protein, 108 aa, Artificial Sequence
  source: /note="Description of Artificial Sequence: Synthetic polypeptide"
DIQMTQSPSSLSATVGDRVTITCRASQAIETNLEWYQQKPGKAPKLLIYDASMLQSGVPSRFSGSGSGTDFTLTISSLQPEDFATYYCQQYDAYPPTFGQGTKVEIKR

SEQ ID NO: 10494 - protein, 108 aa, Artificial Sequence
  source: /note="Description of Artificial Sequence: Synthetic polypeptide"
DIQMTQSPSSLSASVGDRVTITCRASQAIEHNLEWYQQKPGKAPKLLIYDASMLQSGVPSRFSGRGSGTDFTLTISSLQPEDFATYYCQQYDAYPPTFGQGTKVEIKR

SEQ ID NO: 10495 - protein, 108 aa, Artificial Sequence
  source: /note="Description of Artificial Sequence: Synthetic polypeptide"
DIQMNQSPSSLSASVGDRVSITCRASQAIEHNLEWYQQKPGKAPKLLIYDASMLQSGVPSRFSGSGSGTDFTLTISSLQPEDFATYYCQQYDAYPPTFGQGTKVEIKR

SEQ ID NO: 10496 - protein, 108 aa, Artificial Sequence
  source: /note="Description of Artificial Sequence: Synthetic polypeptide"
DIQMTQSPSSLSASVGDRVTITCRASQAIESNLEWYQQKPGKAPKLLIYDASMLQSGVPSRFSGSGSGTDFTLTISSLQPEDFATYYCQQYDVYPPTFGQGTKVEIKR

SEQ ID NO: 10497 - protein, 108 aa, Artificial Sequence
  source: /note="Description of Artificial Sequence: Synthetic polypeptide"
DIQMTQSPSSLSASVGDRVTITCRASQAIEHNLEWYQQKPGKAPKLLIYDASMLQSGVPSRFSGSGSGTDFTLTISSLQPEDFATYYCQQYDAYPPTFGQGTKVEIKR

SEQ ID NO: 10498 - protein, 108 aa, Artificial Sequence
  source: /note="Description of Artificial Sequence: Synthetic polypeptide"
DIQMTQSPSSLSASVGDRVTITCRASQGIDEDLEWYQQKPGKAPRLLIYSSSWLQSGVPSRFSGSGSGTDFTLTISSLQPEDFATYYCQQYFQYPPTFGQGTKVEIKR

SEQ ID NO: 10499 - protein, 108 aa, Artificial Sequence
  source: /note="Description of Artificial Sequence: Synthetic polypeptide"
DIQMTQSPSSLSASVGDRVTITCRASQSIDEDLEWYQQKPGKAPRLLIYSSSWLQSGVPSRFSGSGSGTDFTLTISSLQPEDFATYYCQQYFQYPPTFGQGTKVEIKR

SEQ ID NO: 10500 - protein, 108 aa, Artificial Sequence
  source: /note="Description of Artificial Sequence: Synthetic polypeptide"
DIQMTQSPSSLSASVGDRVTITCRASQSIDEDLEWYQQKPGKAPRLLIYSSSWLQSGVPSRFSGSGSGTDFTLTISSLQPEDFATYYCQQYSQYPPTFGQGTKVEIKR

SEQ ID NO: 10501 - protein, 108 aa, Artificial Sequence
  source: /note="Description of Artificial Sequence: Synthetic polypeptide"
DIQMTQSPSSLSASVGDRVTITCRASQSIEEDLEWYQQKPGKAPRLLIYSSSWLQSGVPSRFSGSGSGTDFTLTISSLQPEDFATYYCQQYFQYPPTFGHGTKVEIKR

SEQ ID NO: 10502 - protein, 108 aa, Artificial Sequence
  source: /note="Description of Artificial Sequence: Synthetic polypeptide"
DIQMTQSPSSLSASVGDRVTITCRASQSIDEDLEWYQQKPGKAPRLLIYSSSWLQSGVPSRFSGSGSGTDFTLTISSLQPEDFATYFCQQYFQYPPTFGQGTKVEIKR

SEQ ID NO: 10503 - protein, 108 aa, Artificial Sequence
  source: /note="Description of Artificial Sequence: Synthetic polypeptide"
EIQMTQSPSSLSASVGDRVTMTCRASQSIDKDLEWYQQKPGKAPRLLIYSSSWLQRGVPSRFSGSGSGTDFTLTISSLRPEDFATYYCQQYFQYPPTLGQGTKVEIKR

SEQ ID NO: 10504 - protein, 108 aa, Artificial Sequence
  source: /note="Description of Artificial Sequence: Synthetic polypeptide"
DIQMTQSPSSLSASVGDRVTITCRASQSIDEDLEWYQQKPGKAPRLLIYSSSWLQSGVPSRFSGSGSGTDFTLTISGLQPEDIATYYCKQYSQYPPTFGQGTKVEIKR

SEQ ID NO: 10505 - protein, 108 aa, Artificial Sequence
  source: /note="Description of Artificial Sequence: Synthetic polypeptide"
DIQMTQSPPSLSASVGDRVTITCRASQSIDKDLEWYQQKPGKAPRLLIYSSSWLQRGVPSRFSGSGSGTDFTLTISSLQPEDFATYHCQQYFQYPPTFGQGTKVEIKR

SEQ ID NO: 10506 - protein, 108 aa, Artificial Sequence
  source: /note="Description of Artificial Sequence: Synthetic polypeptide"
DIQMTQSPSSLSASVGDRVTITCRASEYINAELAWYQQKPGKAPKLLIYGSSGLQSGVPSRFSGSGSGTDFTLTISSLQPEDFATYYCLQNAMWPITFGQGTKVEIKR

SEQ ID NO: 10507 - protein, 108 aa, Artificial Sequence
  source: /note="Description of Artificial Sequence: Synthetic polypeptide"
DIQMTQSPSSLSASVGDRVTITCRASLDINNGLIWYQQKPGKAPRLLILGASGLQSGVPSRFSGSGSGTDFTLTISSLQPEDFATYYCSQVRSRPFTFGQGTKVEIKR

SEQ ID NO: 10508 - protein, 108 aa, Artificial Sequence
  source: /note="Description of Artificial Sequence: Synthetic polypeptide"
DIQMTQSPSSLSASVGDRVTITCRASQDILSALAWYQQKPGKAPKLLIYGSSVLQSGVPSRFSGSGSGTDFTLTISSLQPEDFATYYCQQNYSLPITFGQGTKVEIKR

SEQ ID NO: 10509 - protein, 108 aa, Artificial Sequence
  source: /note="Description of Artificial Sequence: Synthetic polypeptide"
DIQMTQSPSSLSASVGDRVTITCRASSPIESYLRWYQQKPGKAPKLLIRYVSVLQSGVPSRFSGSGSGTDFTLTISSLQPEDFATYYCGQWFRAPVTFGQGTKVEIKR

SEQ ID NO: 10510 - protein, 108 aa, Artificial Sequence
  source: /note="Description of Artificial Sequence: Synthetic polypeptide"
DIQMTQSPSSLSASVGDRVTITCRVSESINAELHWYQQKPGKAPKLLISGFSGLQSGVPSRFSGSGSGTDFTLTISSLQPEDFATYYCVQFAMWPFTFGQGTKVEIKR

SEQ ID NO: 10511 - protein, 108 aa, Artificial Sequence
  source: /note="Description of Artificial Sequence: Synthetic polypeptide"
DIQMTQSPSSLSASVGDRVTITCRASMMIRFGLDWYQQKPGKAPKLLIGGGSSLQSGVPSRFSGSGSGTDFTLTISSLQPEDFATYYCGQHERWPATFGQGTKVEIKR

SEQ ID NO: 10512 - protein, 108 aa, Artificial Sequence
  source: /note="Description of Artificial Sequence: Synthetic polypeptide"
DIQMTQSPSSLSASVGDRVTITCRASQSIGTLLRWYQQKPGKAPKLLIYLTSVLQSGVPSRFSGSGSGTDFTLTISSLQPEDFATYYCQQMVYRPYTFGQGTKVEIKR

SEQ ID NO: 10513 - protein, 108 aa, Artificial Sequence
  source: /note="Description of Artificial Sequence: Synthetic polypeptide"
DIQMTQSPSSLSASVGDRVTITCRASQTIETNLEWYQQKPGKAPKLLIYDSSQLQSGVPSRFSGSGSGTDFTLTISSLQPEDFATYYCQQYDKVPATFGQGTKVEIKR

SEQ ID NO: 10514 - protein, 108 aa, Artificial Sequence
  source: /note="Description of Artificial Sequence: Synthetic polypeptide"
DIQMTQSPSSLSASVGDRVTITCRASHHIQRYLSWYQQKPGKAPKLLILWGSQLQSGVPSRFSGSGSGTDFTLTISSLQPEDFATYYCGQWWAPPPTFGQGTKVEIKR

SEQ ID NO: 10515 - protein, 108 aa, Artificial Sequence
  source: /note="Description of Artificial Sequence: Synthetic polypeptide"
DIQMTQSPSSLSASVGDRVTITCRASHHIQRYLSWYQQKPGKAPKLLILWGSQLQSGVPSRFSGSGSGTDFTLTISSLQPEDFATYYCGQWWAPPQTFGQGTKVEIKR

SEQ ID NO: 10516 - protein, 108 aa, Artificial Sequence
  source: /note="Description of Artificial Sequence: Synthetic polypeptide"
DIQMTQSPSSLSASVGDRVTITCRASHDIQRYLSWYQQKPGKAPKLLILWGSQLQSGVPSRFSGSGSGTDFTLTISSLQPEDFATYYCGQWWAPPQTFGQGTKVEIKR

SEQ ID NO: 10517 - protein, 108 aa, Artificial Sequence
  source: /note="Description of Artificial Sequence: Synthetic polypeptide"
DIQMTQSPSSLSASVGDRVTITCRASQYIDTNLEWYQQKPGKAPKLLIYDGSLLQSGVPSRFSGSGSGTDFTLTISSLQPEDFATYYCGQGAVVPVTFGQGTKVEIKR

SEQ ID NO: 10518 - protein, 108 aa, Artificial Sequence
  source: /note="Description of Artificial Sequence: Synthetic polypeptide"
DIQMTQSPSSLSASVGDRVTITCRASQDIAFDLEWYQQKPGKAPKLLIYSASMLQSGVPSRFSGSGSGSDFTLTISSLQPEDFATYYCQQYNLQPPTFGQGTKVEIKR

SEQ ID NO: 10519 - protein, 108 aa, Artificial Sequence
  source: /note="Description of Artificial Sequence: Synthetic polypeptide"
DIQMTQSPSSLSASVGDRVTITCRASQNIATLLRWYQQKPGKAPKLLIYAGSMLQSGVPSRFSGSGSGTDFTLTISSLQPEDFATYYCQQMWQRPYTFGQGTKVEIKR

SEQ ID NO: 10520 - protein, 108 aa, Artificial Sequence
  source: /note="Description of Artificial Sequence: Synthetic polypeptide"
DIQMTQSPSSLSASVGDRVTITCRASQPIVDELDWYQQKPGKAPKLLIYAASILQSGVPSRFSGSGSGTDFTLTISSLQPEDFATYYCHQWSTYPTTFGQGTKVEIKR

SEQ ID NO: 10521 - protein, 108 aa, Artificial Sequence
  source: /note="Description of Artificial Sequence: Synthetic polypeptide"
DIQMTQSPSSLSASVGDRVTITCRASQSISSYLNWYQQKPGKAPKLLIDGVSGLQSGVPSRFSGSGSGTDFTLTISSLQPEDFATYYCGQDWDWPRTFGQGTKVEIKR

SEQ ID NO: 10522 - protein, 108 aa, Artificial Sequence
  source: /note="Description of Artificial Sequence: Synthetic polypeptide"
DIQMTQSPSSLSASVGDRVTITCRASRNIRDWLRWYQQKPGKAPKLLIDWGSVLQSGVPSRFSGSGSGTDFTLTISSLQPEDFATYYCAQTWDDPLTFGQGTKVEIKR

SEQ ID NO: 10523 - protein, 108 aa, Artificial Sequence
  source: /note="Description of Artificial Sequence: Synthetic polypeptide"
DIQMTQSPSSLSAFVGDRVTITCRASRNIRDWLRWYQQKPGKAPKLLIDWGSELQSGVPSRFSGSGSGTDFTLTISSLQPEDFATYYCAQTWYDPLTFGHGTKVEIKR

SEQ ID NO: 10524 - protein, 108 aa, Artificial Sequence
  source: /note="Description of Artificial Sequence: Synthetic polypeptide"
DIQMTQSPSSLSASVGDRVTITCRASIDIHGGLTWYQQKPGKAPKLLIVGVSGLQSGVPSRFSGSGSGTDFTLTISNLQPEDFATYYCAQVWRRPFTFGQGTKVEIKR

SEQ ID NO: 10525 - protein, 108 aa, Artificial Sequence
  source: /note="Description of Artificial Sequence: Synthetic polypeptide"
DIQMTQSPSSLSASVGDRVTITCRASQDIGSSLSWYQQKPGKAPKLLIYASSLLQSGVPSRFSGSGSGTDFTLTISSLQPEDFATYYCQQTYALPVTFGQGTKVEIKR

SEQ ID NO: 10526 - protein, 108 aa, Artificial Sequence
  source: /note="Description of Artificial Sequence: Synthetic polypeptide"
DIQMTQSPSSLSASVGDRVTITCRASQQIETNLEWYQQKPGKAPKLLIYDGSWLQSGVPSRFSGSGSGTDFTLTISSLQPEDFATYYCQQYKYLPVTFGQGTKVEIKR

SEQ ID NO: 10527 - protein, 108 aa, Artificial Sequence
  source: /note="Description of Artificial Sequence: Synthetic polypeptide"
DIQMTQSPSSLSASVGDRVTITCRASQDIGSALRWYQQKPGKAPKLLIYLGSDLQSGVPSRFSGSGSGTDFTLTISSLQPEDFATYYCQQTQYFPTTFGQGTKVEIKR

SEQ ID NO: 10528 - protein, 108 aa, Artificial Sequence
  source: /note="Description of Artificial Sequence: Synthetic polypeptide"
DIQMTQSPSSLSASVGDRVTITCRASQAIYGGLRWYQQKPGKAPKLLIYGESMLQSGVPSRFSGSGSGTDFTLTISSLHPEDFATYYCQQVYHKPFTFGQGTKVEIKR

SEQ ID NO: 10529 - protein, 108 aa, Artificial Sequence
  source: /note="Description of Artificial Sequence: Synthetic polypeptide"
DIQMTQSPSSLSASVGDRVTITCRASQRIGVWLDWYQQKPGKAPKLLIYDGSFLQSGVPSRFSGSGSGTDFTLTISSLQPEDFATYYCQQTFSSPSTFGQGTKVEIKR

SEQ ID NO: 10530 - protein, 108 aa, Artificial Sequence
  source: /note="Description of Artificial Sequence: Synthetic polypeptide"
DIQMTQSPSSLSASVGDRVPITCRASQWIGDELYWYQQKPGKAPKLLIYSSSTLQSGVPSRFSGSGSGTDFTLTISSLQPEDFATYYCQQSFQFPYTFGQGTKVEIKR

SEQ ID NO: 10531 - protein, 108 aa, Artificial Sequence
  source: /note="Description of Artificial Sequence: Synthetic polypeptide"
DIQMTQSPSSLSASVGDRVTITCRASSNITGPLEWYQQKPGKAPKLLIPGWSTLQSGVPSRFSGSGSGTDFTLTISSLQPEDFATYYCGQVWGEPVTFGQGTKVEIKR

SEQ ID NO: 10532 - protein, 108 aa, Artificial Sequence
  source: /note="Description of Artificial Sequence: Synthetic polypeptide"
DIQMTQSPSSLSASIGDRVTITCRASQRIAYGLHWYQQKPGKAPRLLIGGRSGLQSGVPSRFSGSGSGTDFTLTISSLQPEDFATYYCVQPGMPPDTFGQGTKVEIKR

SEQ ID NO: 10533 - protein, 108 aa, Artificial Sequence
  source: /note="Description of Artificial Sequence: Synthetic polypeptide"
DIQMTQSPSSLSASVGDRVTITCRASKQIVGGLSWYQQKPGKAPKLLIGRHSGLQSGVPSRFSGSGSGTDFTLTISSLQPEDFATYYCVQGVWAPGTFGQGTKVEIKR

SEQ ID NO: 10534 - protein, 108 aa, Artificial Sequence
  source: /note="Description of Artificial Sequence: Synthetic polypeptide"
DIQMTQSPSSLSASVGDRVTITCRASPAIAAKLDWYQQKPGKAPKLLIGADSGLQSGVPSRFSGSGSGTDFTLTISSLQPEDFATYYCGQLWAGPPTFGQGTKVEIKR

SEQ ID NO: 10535 - protein, 108 aa, Artificial Sequence
  source: /note="Description of Artificial Sequence: Synthetic polypeptide"
DIQMTQSPSSLSASVGDRVTITCRASRTIADGLDWYQQKPGKAPKLLIGAYSGLQSGVPSRFSGSGSGTDFTLTISSLQPEDFATYYCGQLWEGPPTFGQGTKVEIKR

SEQ ID NO: 10536 - protein, 108 aa, Artificial Sequence
  source: /note="Description of Artificial Sequence: Synthetic polypeptide"
DIQMTQSPSSLSASVGDRVTITCRASQRIYGFLDWYQQKPGKAPKLLIYGVSSLQSGVPSRFSGSGSGTDFTLTISSLQPEDFATYYCQQTLAWPFTFGQGTKVEIKR

SEQ ID NO: 10537 - protein, 108 aa, Artificial Sequence
  source: /note="Description of Artificial Sequence: Synthetic polypeptide"
DIQMTQSPSSLSASVGDRVTITCRASQDIRDWLMWYQQKPGKAPKLLIYWGSFLQSGVPSRFSGSGSGTDFTLTISSLQPEDFATYYCQQLYDTPYTFGQGTKVEIKR

SEQ ID NO: 10538 - protein, 108 aa, Artificial Sequence
  source: /note="Description of Artificial Sequence: Synthetic polypeptide"
DIQMTQSPSSLSASVGDRVTITCRASQNINTGLDWYQQKPGKAPKLLIYDSSALQSGVPSRFSGSGSGTDFTLTISSLQPEDFATYYCQQTSYYPYTFGQGTKVEIKR

SEQ ID NO: 10539 - protein, 108 aa, Artificial Sequence
  source: /note="Description of Artificial Sequence: Synthetic polypeptide"
DIQMTQSPSSLSASVGDRVTITCRASQKIFGWLDWYQQKPGKAPKLLIYGTSKLQSGVPSRFSGSGSGTDFTLTISSLQPEDFATYYCQQVYSLPYTFGQGTKVEIKR

SEQ ID NO: 10540 - protein, 108 aa, Artificial Sequence
  source: /note="Description of Artificial Sequence: Synthetic polypeptide"
DIQMTQSPSSLSASVGDRVTITCRASSNIGADLDWYQQKPGKAPKLLIGGASGLQSGVPSRFSGSGSGTDFTLTISSLQPEDFATYYCGQLWNGPPTFGQGTKVEIKR

SEQ ID NO: 10541 - protein, 108 aa, Artificial Sequence
  source: /note="Description of Artificial Sequence: Synthetic polypeptide"
DIQMTQSPSSLSASVGDRVTITCRASSPIYDGLDWYQQKPGKAPKLLISGASWLQSGVPSRFSGSGSGTDFTLTISSLQPEDFATYYCGQLWLGPPTFGQGTKVEIKQ

SEQ ID NO: 10542 - protein, 108 aa, Artificial Sequence
  source: /note="Description of Artificial Sequence: Synthetic polypeptide"
DIQMTQSPSSLSASVGDRVTITCRASSRIYNGLHWYQQKPGKAPKLLIGGRSGLQSGVPSRFSGSGSGTDFTLTISSLQPEDFATYYCAQVGEAPSTFGQGTKVEIKR

SEQ ID NO: 10543 - protein, 108 aa, Artificial Sequence
  source: /note="Description of Artificial Sequence: Synthetic polypeptide"
DIQMTQSPSSLSASVGDRVTITCRASRFINEELDWYQQKPGKAPKLLISWSSWLQSGVPSRFSGSGSGTDFTLTISSLQPEDFATYYCVQPGGGPGTFGQGTKVEIKR

SEQ ID NO: 10544 - protein, 108 aa, Artificial Sequence
  source: /note="Description of Artificial Sequence: Synthetic polypeptide"
DIQMTQSPSSLSASVGDRVTITCRASRDILDELDWYQQKPGKAPRLLIGGGSGLQSGVPSRFSGSGSGTDFTLTISSLQPEDFATYYCGQLWHGPPTFGQGTKVEIKR

SEQ ID NO: 10545 - protein, 108 aa, Artificial Sequence
  source: /note="Description of Artificial Sequence: Synthetic polypeptide"
DIQMTQSPSSLSASVGDRVTITCRASSPIYTGLHWYQQKPGKAPKLLIGGRSGLQSGVPSRFSGSGSGTDFTLTISSLQPEDFATYYCMQVGTAPATFGQGTKVEIKR

SEQ ID NO: 10546 - protein, 108 aa, Artificial Sequence
  source: /note="Description of Artificial Sequence: Synthetic polypeptide"
DIRMTQSPSSLSASVGDRVTITCRASQNISRRLLWYQQKPGKAPKLLIYSSSRLQSGVPSRFGGSGSGTDFTLTISSLQPEDFATYYCQQTYSYPHTFGQGTKVEIKR

SEQ ID NO: 10547 - protein, 108 aa, Artificial Sequence
  source: /note="Description of Artificial Sequence: Synthetic polypeptide"
DIQMTQSPSSLSASVGDRVTITCRASSPIPQDLYWYQQKPGKAPKLLIVGISQLQSGVPSRFSGSGSGTDFTLTISSLQPEDFATYYCGQLWSAPATFGQGTKVEIKR

SEQ ID NO: 10548 - protein, 108 aa, Artificial Sequence
  source: /note="Description of Artificial Sequence: Synthetic polypeptide"
DIQMTQSPSSLSASVGDRVTITCRASKSIDGMLDWYQQKPGKAPKLLIPGFSGLQSGVPSRFSGSGSGTDFTLTISSLQPEDFATYYCGQSVEAPWTFGQGTKVEIKR

SEQ ID NO: 10549 - protein, 108 aa, Artificial Sequence
  source: /note="Description of Artificial Sequence: Synthetic polypeptide"
DIQMTQSPSSLSASVGDRVTITCRASRYIAHPLDWYQQKPGKAPKLLIPGSSVLQSGVPSRFSGSGSGTDFTLTISSLQPEDFATYYCGQSVVVPWTFGQGTKVEIKR

SEQ ID NO: 10550 - protein, 108 aa, Artificial Sequence
  source: /note="Description of Artificial Sequence: Synthetic polypeptide"
DIQMTQSPSSLSASVGDRVTITCRASRTIEGGLDWYQQKPGKAPKLLIMGGSGLQSGVPSRFSGSGSGTDFTLTISSLQPEDFATYYCGQLWVGPPTFGQGTKVEIKR

SEQ ID NO: 10551 - protein, 108 aa, Artificial Sequence
  source: /note="Description of Artificial Sequence: Synthetic polypeptide"
DIQMTQSPSSLSASVGDRVTITCRASKFIRDELYWYQQKPGKAPRLLIGGSSLLQSGVPSRFSGSGSGTDFTLTISSLQPEDFATYYCGQLWRAPATFGQGTKVEIKR

SEQ ID NO: 10552 - protein, 108 aa, Artificial Sequence
  source: /note="Description of Artificial Sequence: Synthetic polypeptide"
DIQMTQSPSSLSASVGDRVTITCRASKPIYGGLEWYQQKPGKAPRLLIGGGSVLQSGVPSRFSGSGSGTDFTLTISSLQPEDFATYYCGQVWGGPVTFGQGTKVEIKR

SEQ ID NO: 10553 - protein, 108 aa, Artificial Sequence
  source: /note="Description of Artificial Sequence: Synthetic polypeptide"
DIRMTQSPSSLSASVGDRVTITCRASRPISGCLDWYQQKPGKAPKLLIDGASGLQSGVPSRFSGSGSGTDFTLTISSLQPEDFATYYCGQWWEYPPTFGQGTKVEIKR

SEQ ID NO: 10554 - protein, 108 aa, Artificial Sequence
  source: /note="Description of Artificial Sequence: Synthetic polypeptide"
DIQMTQSPSSLSASVGDRVTITCRASKPIVRDLEWYQQKPGKAPKLLIHGVSTLQSGVPSRFSGSGSGTDFTLTISSLQPEDFATYYCGQLEAAPATFGQGTKVEIKR

SEQ ID NO: 10555 - protein, 108 aa, Artificial Sequence
  source: /note="Description of Artificial Sequence: Synthetic polypeptide"
DIQMTQSPSSLSASVGDRVTITCRASRDIGDWLYWYQQKPGKAPRLLIVWASVLQSGVPSRFSGSGSGTDFTLTISSLQPEDFATYYCAQWGTPPTTFGQGTKVEIKR

SEQ ID NO: 10556 - protein, 108 aa, Artificial Sequence
  source: /note="Description of Artificial Sequence: Synthetic polypeptide"
DIQMTQSPSSLSASVGDRVTITCRASNRIEYGLDWYQQKPGKAPKLLISGSSRLQSGVPSRFSSSGSGTDFTLTISSLQPEDFATYYCGQLEAAPATFGQGTKVEIKR

SEQ ID NO: 10557 - protein, 108 aa, Artificial Sequence
  source: /note="Description of Artificial Sequence: Synthetic polypeptide"
DIQMTQSPSSLSASVGDRVTITCRASRNIGHFLDWYQQKPGKAPKLLILGGSSLQSGVPSRFSGSGSGTDFTLTISSLQPEDFATYYCGQLVEPPATFGQGTKVEIKR

SEQ ID NO: 10558 - protein, 108 aa, Artificial Sequence
  source: /note="Description of Artificial Sequence: Synthetic polypeptide"
DIQMTQSPSSLSASVGDRVTITCRASSSIYSDLYWYQQKPGKAPKLLIDGWSGLQSGVPSRFSGSGSGTDFTLTISSLQPEDFATYYCGQLHRAPATFGQGTKVEIKR

SEQ ID NO: 10559 - protein, 108 aa, Artificial Sequence
  source: /note="Description of Artificial Sequence: Synthetic polypeptide"
DIQMTQSPSSLSASVGDRVTITCRASRFITDRLDWYQQKPGKAPKLLIGGVSGLQSGVPSRFSGSGSGTDFTLTISSLQPEDFATYYCGQSSELPWTFGQGTKVEIKR

SEQ ID NO: 10560 - protein, 108 aa, Artificial Sequence
  source: /note="Description of Artificial Sequence: Synthetic polypeptide"
DIQMTQSPSSLSASVGDRVTITCRASRKIGSELYWYQQKPGKAPKLLIGGRSRLQSGVPSRFSGSGSGTDFTLTISSLQPEDFATYYCGQLWEPPATFGQGTKVEIKR

SEQ ID NO: 10561 - protein, 108 aa, Artificial Sequence
  source: /note="Description of Artificial Sequence: Synthetic polypeptide"
DIQMTQSPSSLSASVGDRVTITCRASRNIGNGLDWYQQKPGKAPKLLIGEGSRLQSGVPSRFSGSGSGTDFTLTISSLQPEDFATYYCGQLWHTPPTFGQGTKVEIKR

SEQ ID NO: 10562 - protein, 108 aa, Artificial Sequence
  source: /note="Description of Artificial Sequence: Synthetic polypeptide"
DIQMTQSPSSLSASVGDRVTITCRASRNIYGWLSWYQQKPGKAPRLLIGGWSGLQSGVPSRFSGSGSGTDFTLTISSLQPEDFATYYCAQDYTLPGTFGQGTKVEIKR

SEQ ID NO: 10563 - protein, 108 aa, Artificial Sequence
  source: /note="Description of Artificial Sequence: Synthetic polypeptide"
DIQMTQSPSSLSASVGDRVTITCRASQDIKDWLHWYQQKPGKAPKLLIYFASGLQSGVPSRFSGSGSGTDFTLTISSLQPEDSATYYCQQHYSTPYTSGQGTKVEIKR

SEQ ID NO: 10564 - protein, 108 aa, Artificial Sequence
  source: /note="Description of Artificial Sequence: Synthetic polypeptide"
DIQMTQSPPSLSASVGDRVTITCRASQLISSHLDWYQQKPGKAPKLLVYDASELQSGVPSRFSGSGSGTDFTLTISSLQPEDFATYYCQQHRSLPFTFGQGTKVEIKR

SEQ ID NO: 10565 - protein, 108 aa, Artificial Sequence
  source: /note="Description of Artificial Sequence: Synthetic polypeptide"
DIQMTQSPSSLSASVGDRVTITCRASQWIGGALAWYQQKPGKAPRLLIYQISVLQSGIPSRFSGSGSGTDFTLTISSLQPEDFATYYCQQYIRSPFTFGQGTKVEIKR

SEQ ID NO: 10566 - protein, 108 aa, Artificial Sequence
  source: /note="Description of Artificial Sequence: Synthetic polypeptide"
DIQMTQSPSSLSASVGDRVTITCRASQSIGAALNWYQQKPGKAPKLLIYGLSSLQSGVPSRFSGSGSGTDFTLTISSLQPEDFATYYCQQLFRLPLTFGQGTKVEIKR

SEQ ID NO: 10567 - protein, 108 aa, Artificial Sequence
  source: /note="Description of Artificial Sequence: Synthetic polypeptide"
DIQMTQSPSSLSASVGDRVTITCRASQPIGGRLVWYQQKPGKAPKLLIYGSSILQSGVPSRFSGSGSGTDFTLTISSLQPEDFATYYCQQYAEAPITFGQGTKVEIKR

SEQ ID NO: 10568 - protein, 108 aa, Artificial Sequence
  source: /note="Description of Artificial Sequence: Synthetic polypeptide"
DIQMTQSPSSLSASVGDRVTITCRASQNIGSSLIWYQQKPGKAPTLLIYYSSKLQSGVPSRFSGSGSGTDFTLTISSLQPEDFATYYCQQSLSSPYTVGQGTKVEIKR

SEQ ID NO: 10569 - protein, 108 aa, Artificial Sequence
  source: /note="Description of Artificial Sequence: Synthetic polypeptide"
DIQMTQSPSSLSASVGDRVTITCRASQWIGSELAWYQQKPGKAPKLLIYWTSNLQSGVPSRFSGSGSGTDFTLTISNLQPEDFATYYCQQILETPLTFGQGTKVEIKR

SEQ ID NO: 10570 - protein, 108 aa, Artificial Sequence
  source: /note="Description of Artificial Sequence: Synthetic polypeptide"
DIQMTQSPSSLSASVGDRVTITCRASQKIWDALYWYQQKPGKAPKLLIYRGSILQSGVPSRFSGSGSGTDFTLTISSLQPEDFATYYCQQFYRWPHTFGQGTKVEIKR

SEQ ID NO: 10571 - protein, 108 aa, Artificial Sequence
  source: /note="Description of Artificial Sequence: Synthetic polypeptide"
DIQMTQSPSSLSASVGDRVTITCRASQHIEDSLRWYQQKPGKAPKLLIYYGSVLQSGVPSRFSGSGSGTDFTLTISSLQPEDFATYYCQQMYKFPITFGQGTKVEIKR

SEQ ID NO: 10572 - protein, 108 aa, Artificial Sequence
  source: /note="Description of Artificial Sequence: Synthetic polypeptide"
DIQTTQSPSSLSASVGDRVTITCRASQRINSSLLWYQQKPGKAPKLLIYDTSTLQSGVPSRFSGSRSGTDFTLTISSLQPEDFATYYCQQIWGSPPTFGQGTKVEIKR

SEQ ID NO: 10573 - protein, 108 aa, Artificial Sequence
  source: /note="Description of Artificial Sequence: Synthetic polypeptide"
DIQMTQSPSSLSASVGDRVTITCRASQSIPVGLNWYQQKPGKAPRLLIYSGSTLQSGVPSRFSGSGSGTDFTLTISSLQPEDFATYYCQQDWYYPNTFGQGTKVEIKR

SEQ ID NO: 10574 - protein, 108 aa, Artificial Sequence
  source: /note="Description of Artificial Sequence: Synthetic polypeptide"
DIQMTQSPSSLSASVGDRVTITCRASQPIYGWLNWYQQKPGKAPKLLIYLTSGLQSGVPSRFSGSGSGTDFTLTISSLQPEDFATYYCQQIHSSPFTFGQGTKVEIKR

SEQ ID NO: 10575 - protein, 108 aa, Artificial Sequence
  source: /note="Description of Artificial Sequence: Synthetic polypeptide"
DIQMTQSPSSLSASVGDRVTITCRASQFIDTSLEWYQQKPGKAPKLLIYDGSHLQSGVPSRFSGSGSGTDFTLTISSLQPEDLATYYCQQYWVLPLTFGQGTKVEIKR

SEQ ID NO: 10576 - protein, 108 aa, Artificial Sequence
  source: /note="Description of Artificial Sequence: Synthetic polypeptide"
DIQMTQSPSSLSASVGDRVTITCRASQDIGDALFWYQQKPGKAPKLLIYYSSMLQSGVPSRFSGGGSGTDFTLTISSLQPEDFATYYCQQRHSTPATFGQGTKVEIKR

SEQ ID NO: 10577 - protein, 108 aa, Artificial Sequence
  source: /note="Description of Artificial Sequence: Synthetic polypeptide"
DIQMTQSPSSLSASVGDRVTITCRASQDIDESLMWYQQKPGKAPRLLIYGVSYLQSGVPSRFSGSGSGTDFTLTISSLQPEDFATYYCQQRWKAPFTFGQGTKVEIKR

SEQ ID NO: 10578 - protein, 108 aa, Artificial Sequence
  source: /note="Description of Artificial Sequence: Synthetic polypeptide"
DIQMTQSPSSLSASVGDRVTITCRASQEIVEDLYWYQQKPGKAAKLLIYGASWLQSGVPSRFSGSGSGTDFTLTISSLQPEDFATYYCQQTRRRPYTFGQGTKVEIKR

SEQ ID NO: 10579 - protein, 108 aa, Artificial Sequence
  source: /note="Description of Artificial Sequence: Synthetic polypeptide"
DIQMTQSPASLSASVGDRVTITCRASQDIDPMLRWYQQKPGKAPKLLIYAGSILQSGVPSRFSGSGSGTDFTLTISSLQPEDFATYYCQQTLVTPYTFGQGTKVEIKR

SEQ ID NO: 10580 - protein, 108 aa, Artificial Sequence
  source: /note="Description of Artificial Sequence: Synthetic polypeptide"
DIQMTQSPSSLSASVGDRVTITCRASQSISDALFWYQQKPGKAPRLLIYYGSVLQSGVPSRFSGSGSGTDFTLTISSLQPEDFATYYCQQRFQEPVTFGQGTKVEIKR

SEQ ID NO: 10581 - protein, 108 aa, Artificial Sequence
  source: /note="Description of Artificial Sequence: Synthetic polypeptide"
DIQMTQSPSSLSASVGDRVTITCRASQQISDELNWYQQKPGKAPKLLIYAVSILQSGVPSRFSGSGSGTDFTLTISSLQPEDFATYYCQQWLSFPSTFGQGTKVEIKR

SEQ ID NO: 10582 - protein, 108 aa, Artificial Sequence
  source: /note="Description of Artificial Sequence: Synthetic polypeptide"
DIQMTQSPSSLSASVGDRVTITCRASQNIKHSLRWYQQKPGKAPRLLIYHRSQLQSGVPSRFSGSGSGTDFTLTISSLQPEDFATYYCQQVRHRPYTFGQGTKVEIKR

SEQ ID NO: 10583 - protein, 108 aa, Artificial Sequence
  source: /note="Description of Artificial Sequence: Synthetic polypeptide"
DIQMTQSPSSLSASVGDRVTITCRASQAIGHRLRWYQQKPGKAPKLLIYHRSKLQSGVPSRFSGSGSGTDFTLTISSLQPEDFATYYCQQVALFPYTFGQGTKVEIKR

SEQ ID NO: 10584 - protein, 108 aa, Artificial Sequence
  source: /note="Description of Artificial Sequence: Synthetic polypeptide"
DIQMTQSPSSLSASVGDRVTITCRASQHIGHHLRWYQQKPGKAPKLLIYHRSHLQSGVPSRFSGSGSGTDFTLTISSLQPEDSATYYCQQWDRPPYTFGQGTKVEIKR

SEQ ID NO: 10585 - protein, 108 aa, Artificial Sequence
  source: /note="Description of Artificial Sequence: Synthetic polypeptide"
DIQMTQSPSSLSASVGDRVTITCRASQAIGHRLRWYQQKPGKAPKLLIYHRSKLQSGVPSRFSGSGSGTDFTLTISSLQPEDFATYYCQQVRAVPYTFGQGTKVEIKR

SEQ ID NO: 10586 - protein, 108 aa, Artificial Sequence
  source: /note="Description of Artificial Sequence: Synthetic polypeptide"
DIQMTQSPSSLSASVGDRVTITCRASQAIGHRLRWYQQKPGKAPKLLIYHRSKLQSGVPSRFSGSGSGTDFTLTISSLQPEDFATYYCQQVRFSPYTFGQGTKVEIKR

SEQ ID NO: 10587 - protein, 108 aa, Artificial Sequence
  source: /note="Description of Artificial Sequence: Synthetic polypeptide"
DIQMTQSPSSLSASVGDRVTITCRASQAIGHRLRWYQQKPGKAPKLLIYHRSKLQSGVPSRFSGSGSGTDFTLTISSLQPEDFATYYCQQSYARPVTFGQGTKVEIKR

SEQ ID NO: 10588 - protein, 108 aa, Artificial Sequence
  source: /note="Description of Artificial Sequence: Synthetic polypeptide"
DIQMTQSPSSLSASVGDRVTITCRASQSINHRLYWYQQKPGKAPKLLIYHRSRLQSGVPSRFSGSGSGTDFTLTISSLQPEDFATYYCQQYKVRPNTFGQGTKVEIKR

SEQ ID NO: 10589 - protein, 108 aa, Artificial Sequence
  source: /note="Description of Artificial Sequence: Synthetic polypeptide"
DIQMTQSPSSLSASVGDRVTITCRASQAIGHRLRWYQQKPGKAPKLLIYHRSKLQSGVPSRFSGSGSGTDFTLTISSLQPEDFATYYCQQTYSSPHTFGQGTKVEIKR

SEQ ID NO: 10590 - protein, 108 aa, Artificial Sequence
  source: /note="Description of Artificial Sequence: Synthetic polypeptide"
DIQMTQSPSSLSASVGDRVTITCRASQAIGHRLRWYQQKPGKAPKLLIYHRSKLQSGVPSRFSGSGSGTDFTLTISSLQPEDFATYYCQQRAVRPFTFGQGTKVEIKR

SEQ ID NO: 10591 - protein, 108 aa, Artificial Sequence
  source: /note="Description of Artificial Sequence: Synthetic polypeptide"
DIQMTQSPSSLSASVGDRVTITCRASQAIGHRLRWYQQKPGKAPKLLIYHRSKLQSGVPSRFSGSGSGTDFTLTISSLQPEDFATYYCQQTYYRPLTFGQGTKVEIKR

SEQ ID NO: 10592 - protein, 108 aa, Artificial Sequence
  source: /note="Description of Artificial Sequence: Synthetic polypeptide"
DIQMTQSPASLSASVGDRVTITCRASQDIDPMLRWYQQKPGKAPKLLIYAGSILQSGVPSRFSGSGSGTDFTLTISSLQPEDFATYYCQQTSIRPYTFGQGTKVEIKR

SEQ ID NO: 10593 - protein, 108 aa, Artificial Sequence
  source: /note="Description of Artificial Sequence: Synthetic polypeptide"
DIQMTQSPSSLSASVGDRVTITCRASQPIGPDLLWYQQKPGKAPKLLIYQTSILQSGVPSRFSGSGSGTDFTLTISSLQPEDFATYYCQQYWAFPVTFGQGTKVEIKR

SEQ ID NO: 10594 - protein, 108 aa, Artificial Sequence
  source: /note="Description of Artificial Sequence: Synthetic polypeptide"
DIQMTQSPSSLSASVGDRVTITCRASQPIGPDILWYQQKPGKAPKLLIYQTSILQSGVPSRFSGSESGTDFTLTISSLQPEDFATYYCQQYWAFPVTFGQGTKVEIKR

SEQ ID NO: 10595 - protein, 108 aa, Artificial Sequence
  source: /note="Description of Artificial Sequence: Synthetic polypeptide"
DIQITQSPSSLSASVGDRVTITCRASQPIGPDLLWYQQKPGKAPKLLIYQTSILRSGVPSRFSGSGSGTDFTLTISSLQPEDLATYYCQQYWAFPVTFGQGTKVEIKR

SEQ ID NO: 10596 - protein, 108 aa, Artificial Sequence
  source: /note="Description of Artificial Sequence: Synthetic polypeptide"
DIQMTQSPSSLSASVGDRVTITCRASQPIGPDLLWYQQKPGKAPKLLIYQTSILRSGVPSRFSGRGSGTDFTLTISSLQPEDFATYYCQQYWAFPVTFGQGTKVEIKR

SEQ ID NO: 10597 - protein, 108 aa, Artificial Sequence
  source: /note="Description of Artificial Sequence: Synthetic polypeptide"
DIQMTQSPSSLSASVGDRVTITCRASQPIGPDLLWYQQKPGKAPKLLIYQTSILRSGVPSRFSGSGSGTDFTLTISSLQPEDFATYYCQQYWTFPVTFGQGTKVEIKR

SEQ ID NO: 10598 - protein, 108 aa, Artificial Sequence
  source: /note="Description of Artificial Sequence: Synthetic polypeptide"
DIQMTQSPSSLSASVGDRVTITCRASQPIGPDLLWYQQKPGKAPKLLIYQTSILRSGVPSRFSGSGSETDFTLTISNLQPEDFATYYCQQYWAFPVTFGQGTKVVIKR

SEQ ID NO: 10599 - protein, 108 aa, Artificial Sequence
  source: /note="Description of Artificial Sequence: Synthetic polypeptide"
DIQMTQSPSSLSASVGDRVTITCRASQPIGPDLLWYQQKPGKAPKLLIYQTSILRSGVPSRFSGSGSETDFTLTISNLQPEDLATYYCQQYWAFPVTFGKGTKVVIKR

SEQ ID NO: 10600 - protein, 108 aa, Artificial Sequence
  source: /note="Description of Artificial Sequence: Synthetic polypeptide"
DIQMTQSPSSLSASVGDRVTITCRASQPIGPDLLWYQQKPGKAPKLLIYQTSILRSGVPSRFSGSGSETDFTLTISNLQPEDFATYYCQQYWAFPVTFGRGTKVVIKR

SEQ ID NO: 10601 - protein, 108 aa, Artificial Sequence
  source: /note="Description of Artificial Sequence: Synthetic polypeptide"
DIQMTQSPSSLSASVGDRVTITCRASQPIGPDLLWYRQKPGKAPKLLIYQTSILRSGVPSRFSGSGSETDFTLTISNLQPEDFATYYCQQYWAFPVTFGQGTKVVIKR

SEQ ID NO: 10602 - protein, 108 aa, Artificial Sequence
  source: /note="Description of Artificial Sequence: Synthetic polypeptide"
DIQMTQSPSSLSASVGDRVTITCRASQPIGPDLLWYQQKPGKAPKLLIYQTSIMRSGVPSRFSGSGSETDFTLTISNLQPEDFATYYCQQYWTFPVTFGQGTKVEIKR

SEQ ID NO: 10603 - protein, 108 aa, Artificial Sequence
  source: /note="Description of Artificial Sequence: Synthetic polypeptide"
DIQMTQSPSSLSAYVGDRVTITCRASQPIGPDLLWYQQKPGKAPKLLIYQTSILRSGVPSRFSGSGSETDFTLTISNLQPEDFAKYYCQQYWAFPVTFGQGTKVVIKR

SEQ ID NO: 10604 - protein, 108 aa, Artificial Sequence
  source: /note="Description of Artificial Sequence: Synthetic polypeptide"
DIQMTQSPSSLSASVGDRVTITCRASQPIGPDLLWYQQKPGKAPKLLIYQTSILRSGVPSRFSGSGSETDFTLTISNLQPVDFATYYCQQYWAFPVTFGQGTKVVIKR

SEQ ID NO: 10605 - protein, 108 aa, Artificial Sequence
  source: /note="Description of Artificial Sequence: Synthetic polypeptide"
DIQMTQSPSSLSASVGDRVTITCRASQPIGPDLLWFQQKPGKAPKLLIYQTSILQSGVPSRFSGSESGTDFTLTISSLQPEDFATYYCQQYWAFPVTFGQGTKVEIKR

SEQ ID NO: 10606 - protein, 108 aa, Artificial Sequence
  source: /note="Description of Artificial Sequence: Synthetic polypeptide"
DIQMTQSPSSLSASVGDRVTITCRASQPIGPDLLWYRQKPGKAPKLLIYQTSILQSGVPSRFSGSGSGTDFTLTISSLQPEDFATYYCQQYWTFPVTFGQGTKVEIKR

SEQ ID NO: 10607 - protein, 108 aa, Artificial Sequence
  source: /note="Description of Artificial Sequence: Synthetic polypeptide"
DIQMTQSPSSLSASVGDRVTITCRASQPIDPDLLWYQQKPGKAPKLLIYQTSILQSGVPSRFSGSGSGTVFTLTISSLQPEDFATYYCQQYWAFPVTFGQGTKVEIKR

SEQ ID NO: 10608 - protein, 108 aa, Artificial Sequence
  source: /note="Description of Artificial Sequence: Synthetic polypeptide"
DIQMTQSPSSLSASVGDRVTITCRASQPIGPDLLWYQQKPGKAPKLLIYQTSILRSGVPSRFSGSGSGTDFTLTISSLQPEDFATYYCQQYWAFPVTFGQGTKVEIKR

SEQ ID NO: 10609 - protein, 108 aa, Artificial Sequence
  source: /note="Description of Artificial Sequence: Synthetic polypeptide"
DIQMTQSPSSLSASVGDRVTITCRASQPIEPDLLWYQQKPGKAPKLLIYQTSILQSGVPSRFSGSGSGTDFTLTISSLQPEDFATYYCQQYWASPVTFGQGTKVEIKR

SEQ ID NO: 10610 - protein, 108 aa, Artificial Sequence
  source: /note="Description of Artificial Sequence: Synthetic polypeptide"
DIQMTQSPSSLSASVGDRVTITCRASQPIGPDLLWYQQKPGKAPKLLIYQTSILQSGVPSRFSGSESGTDFTLTISSLQPEDIATYYCQQYWAFPVTFGQGTRVEIKR

SEQ ID NO: 10611 - protein, 108 aa, Artificial Sequence
  source: /note="Description of Artificial Sequence: Synthetic polypeptide"
DIQMTQSPSSLSASVGDRVTITCRASQPIGPDLLWYQQKPGKAPKLLIYQTSILQSGVPSRFSGSESGTDFTLTISSLQPEDFATYYCQQYWAFPVTFGQGTKVEIKR

SEQ ID NO: 10612 - protein, 108 aa, Artificial Sequence
  source: /note="Description of Artificial Sequence: Synthetic polypeptide"
DIQMTQSPSSLSASVGDRVAITCRASQPIGPDILWYQQKPGKAPKLLIYQTSILRSGVPSRFSGSGSGTDFTLTISSLQPEDSATYYCQQYWAFPVTFGQGTKVEIKR

SEQ ID NO: 10613 - protein, 108 aa, Artificial Sequence
  source: /note="Description of Artificial Sequence: Synthetic polypeptide"
DIQMTQSPSSLSASVGDRVTITCRASQPIGPDLLWYQQKPGKAPKLLIYQTSILRSGVPSRFSGSGSVTDFTLTISSLQPEDFATYYCQQYWAFPVTFGQGTKVGIKR

SEQ ID NO: 10614 - protein, 108 aa, Artificial Sequence
  source: /note="Description of Artificial Sequence: Synthetic polypeptide"
DIQMTQSPSSLSASVGDRVTITCRASQPIDPDLLWYQQKPGKAPKLLIYQTSILQSGVPSRFSGSGSRTDFTLTISSLQPEDFATYYCQQYWAFPVTFGQGTKVEIKR

SEQ ID NO: 10615 - protein, 108 aa, Artificial Sequence
  source: /note="Description of Artificial Sequence: Synthetic polypeptide"
DIQMTQSPSSLSASVGDRVTITCRASQPIGPDLLWYQQKPGKAPKLLIYQTSILQSGVPSRFSGSGSGTDFTLTISGLQPEDFATYYCQQYWAFPVTFGQGTKVEIKR

SEQ ID NO: 10616 - protein, 108 aa, Artificial Sequence
  source: /note="Description of Artificial Sequence: Synthetic polypeptide"
DIQMTQSPSSLSASVGDRVTITCRASMPIGPDLLWYQQKPGKAPKLLIYQTSILRSGVPSRFSGSESGTDFTLTISSLQPEDFATYYCQQYWAFPVTFGQGTKVEIKR

SEQ ID NO: 10617 - protein, 108 aa, Artificial Sequence
  source: /note="Description of Artificial Sequence: Synthetic polypeptide"
DIQMTQSPSSLSASVGDRVTITCRASQWIGDTLTWYQQKLGKAPKLLIYGGSELQSGVPPRFSGSGSGTDFTLTISSLQPEDFATYYCQQCISSPCTFGQGTKVEIKR

SEQ ID NO: 10618 - protein, 108 aa, Artificial Sequence
  source: /note="Description of Artificial Sequence: Synthetic polypeptide"
DIQMTQSPSSLSASVGDRVTITCRASQFIGDSLSWYQQKPGKAPKLLIYFSSILQSGVPSRFSGSGSGTDFTLTISSLQPEDFATYYCQQYHTSPTTFGRGTKVKIKR

SEQ ID NO: 10619 - protein, 108 aa, Artificial Sequence
  source: /note="Description of Artificial Sequence: Synthetic polypeptide"
DIQMTQSPSSLSASVGDRVTITCRASQTIETNLEWYQQKPGKAPKLLIYDSSQLQSGVPSRFSGSGSGTDFTLTISSLQPEDLATYYCQQYHGYPTTFGQGTKVEIKR

SEQ ID NO: 10620 - protein, 108 aa, Artificial Sequence
  source: /note="Description of Artificial Sequence: Synthetic polypeptide"
DIQMTQSPSSLSASVGDRVTITCRASQMIDQDLEWYQQKPGKAPKLLIYNASWLQSGVPSRFSGSGSGTDFTLTISSLQPEDFATYYCQQYHGYPITFGQGTKVEIKR

SEQ ID NO: 10621 - protein, 108 aa, Artificial Sequence
  source: /note="Description of Artificial Sequence: Synthetic polypeptide"
DIQMTQSPSSLSASVGDRVTITCRASQTIYTSLSWYQQKPGKAPKLLIHYGSVLQSGVPSRFSGSGSGTDFTLTISSLQPEDSATYYCQQVHQAPTTFGQGTKVEIKR

SEQ ID NO: 10622 - protein, 108 aa, Artificial Sequence
  source: /note="Description of Artificial Sequence: Synthetic polypeptide"
DIRMTQSPSSLSASVGDRVTITCRASQWIGDSLAWYQQKPGKAPKLLIYGISELQSGVPSRFSGSGSGTDFTLTISSLQPEDSATYYCQLSSSMPHTFGQGTKVEIKR

SEQ ID NO: 10623 - protein, 108 aa, Artificial Sequence
  source: /note="Description of Artificial Sequence: Synthetic polypeptide"
DIQMTQSPSSLSASVGDRVTITCRASQEIETNLEWYQQKPGKAPKLLIYDSSHLQSGVPSRFSGSGSGTDFTLTISSLQPEDFATYYCQQYHQNPPTFGQGTKVEIKR

SEQ ID NO: 10624 - protein, 108 aa, Artificial Sequence
  source: /note="Description of Artificial Sequence: Synthetic polypeptide"
DIQMTQSPSSLSASVGDRVTITCRASQWIGRQLVWYQQKPGKAPKLLIYGATELQSGVPSRFSGSGSGTDFTLTISSLQPEDFATYYCQQQSKGPLTFGHGTKVEIKR

SEQ ID NO: 10625 - protein, 108 aa, Artificial Sequence
  source: /note="Description of Artificial Sequence: Synthetic polypeptide"
DIQMTQSPSSLSASVGDRVTITCRASQGIGTDLNWYQQKPGKAPKLLIYMGSYLQSGVPSRFSGSGSGTDFTLTISSLQPEDFATYYCQQIYSFPITFGQGTKVEIKR

SEQ ID NO: 10626 - protein, 108 aa, Artificial Sequence
  source: /note="Description of Artificial Sequence: Synthetic polypeptide"
DIQMTQSPSSLSASVGDRVTITCRASQDIEEMLHWYQQKPGKAPKLLIYFGSLLQSGVPSRFSGSRSGTDFTLTISSLQPEDFATYYCQQHHTRPYTFGQGTKVEIKR

SEQ ID NO: 10627 - protein, 108 aa, Artificial Sequence
  source: /note="Description of Artificial Sequence: Synthetic polypeptide"
DIQMTQSPSSLSASVGDRVTITCRASQDIGMDLEWYQQIPGKVPKLLIYDASYLQSGVPSRFSGSGSGTDFTLTISSLQPEDFATYYCQQYHKLPATFGQGTKVEIKR

SEQ ID NO: 10628 - protein, 108 aa, Artificial Sequence
  source: /note="Description of Artificial Sequence: Synthetic polypeptide"
DIQMTQSPSSLSASVGDRVTITCRASQDIMDNLEWYQQKPGKAPKLLIYAASWLQSGVPSRFSGSGSGTDFTLTISSLQPEDFATYYCQQYHKLPVTFGQGTKVEIKR

SEQ ID NO: 10629 - protein, 107 aa, Artificial Sequence
  source: /note="Description of Artificial Sequence: Synthetic polypeptide"
SIVMTQSPSSLSASVGDRVTITCKASQSVTNDVAWYQQKPGKAPKLLIYYASNRYTGVPDRFSGSGYGTDFTFTISSLQPEDIATYYCQQDYSSPYTFGQGTKVEIK

SEQ ID NO: 10630 - protein, 107 aa, Artificial Sequence
  source: /note="Description of Artificial Sequence: Synthetic polypeptide"
DIQMTQSPSSLSASVGDRVTITCKASQSVTNDVAWYQQKPGKAPKLLIYYASNRYTGVPDRFSGSGSGTDFTFTISSLQPEDIATYYCQQDYSSPYTFGQGTYVEIK

SEQ ID NO: 10631 - protein, 107 aa, Artificial Sequence
  source: /note="Description of Artificial Sequence: Synthetic polypeptide"
SIVMTQSPDSLAVSLGERVTINCKASQSVTNDVAWYQQKPGQSPKLLIYYASNRYTGVPDRFSGSGYGTDFTFTISSVQAEDVAVYYCQQDYSSPYTFGGGTKLEIK

SEQ ID NO: 10632 - protein, 106 aa, Artificial Sequence
  source: /note="Description of Artificial Sequence: Synthetic polypeptide"
DIQMTQSPSSLSASVGDRVTITCKTSQDINKYMAWYQQTPGKAPRLLIYYTSALQPGIPSRFSGSGSGRDYTFTISSLQPEDIATYYCLQYDNLWTFGQGTEVEIK

SEQ ID NO: 10633 - protein, 107 aa, Artificial Sequence
  source: /note="Description of Artificial Sequence: Synthetic polypeptide"
DIKMTQSPSFLSASVGDRVTLNCKASQNIDKYLNWYQQKLGESPKLLIYNTNNLQTGIPSRFSGSGSGTDFTLTISSLQPEDVATYFCLQHISRPRTFGTGTKLELK

SEQ ID NO: 10634 - protein, 113 aa, Artificial Sequence
  source: /note="Description of Artificial Sequence: Synthetic polypeptide"
DIVMTQTPLSLSVTPGQPASISCRSSQSLVHTNGNTYLHWYLQKPGQSPQLLIYMVSNRFSGVPDRFSGSGSGTDFTLKISRVEAEDVGVYYCSQSAHVPPLTFGQGTRLEIK

SEQ ID NO: 10635 - protein, 112 aa, Artificial Sequence
  source: /note="Description of Artificial Sequence: Synthetic polypeptide"
DVVMTQTPLALSVTIGHPASISCKSSQSLLESDGRTYLNWLFQRPGQSPKRLIYLVSNLDSGVPDRFSGSGSGTDFTLKISRVEAEDLGVYYCWQGTHFPWTFGGGTKLELK

SEQ ID NO: 10636 - protein, 114 aa, Artificial Sequence
  source: /note="Description of Artificial Sequence: Synthetic polypeptide"
DIVLTQSPDSLAVSLGERATINCKSSQSVLYSSNNKNYLAWYQQKPGQPPKLLIYWASTRESGVPDRFSGSGSGTDFTPAISSLQAEDVAVYYCQQYYSTPQLTFGGGTKVDIK

SEQ ID NO: 10637 - protein, 109 aa, Artificial Sequence
  source: /note="Description of Artificial Sequence: Synthetic polypeptide"
SSELTQEPAVSVALGQTVSITCQGDSLRSYYASWYQQKPGQAPIPVIYGKNNRPSGIPDRFSGSSSGNTASLTITGAQAEDEADYYCSSRDNRGTHRWVFGGGTKLTVL

SEQ ID NO: 10638 - protein, 94 aa, Artificial Sequence; identical to SEQ ID NO: 10322
  source: /note="Description of Artificial Sequence: Synthetic polypeptide"

SEQ ID NO: 10639 - protein, 108 aa, Artificial Sequence
  source: /note="Description of Artificial Sequence: Synthetic polypeptide"
EIVLTQSPATLSLSPGERATLSCRASQSVSSYLAWYQQKPGQAPRLLIYDASSRATGIPARFGGSGSGTDFTLTISSLEPEDFAVYYCQLRSNWPPYTFGQGTKLEIK

SEQ ID NO: 10640 - protein, 111 aa, Artificial Sequence; identical to SEQ ID NO: 8168
  source: /note="Description of Artificial Sequence: Synthetic polypeptide"

SEQ ID NO: 10641 - protein, 113 aa, Artificial Sequence; identical to SEQ ID NO: 8169
  source: /note="Description of Artificial Sequence: Synthetic polypeptide"

SEQ ID NO: 10642 - protein, 111 aa, Artificial Sequence
  source: /note="Description of Artificial Sequence: Synthetic polypeptide"
DVVMTQTPLSLPVSLGDQASISCRSSQSLVHRNGNTYLHWYLQKPGQSPKLLIYTVSNRFSGVPDRFSGSGSGTDFTLKISRVEAEDLGLYFCSQSSHVPPTFGAGTKLEI

SEQ ID NO: 10643 - protein, 113 aa, Artificial Sequence
  source: /note="Description of Artificial Sequence: Synthetic polypeptide"
DIQLTQTPLSLPVSLGDQASISCRSSQSLVHRNGNTYLHWYLQKPGQSPKLLIYTVSNRFSGVPDRFSGSGSGTDFTLKISRVEAEDLGLYFCSQSSHVPPTFGAGTKLEIKR

SEQ ID NO: 10644 - protein, 111 aa, Artificial Sequence; identical to SEQ ID NO: 10642
  source: /note="Description of Artificial Sequence: Synthetic polypeptide"

SEQ ID NO: 10645 - protein, 113 aa, Artificial Sequence; identical to SEQ ID NO: 10643
  source: /note="Description of Artificial Sequence: Synthetic polypeptide"

SEQ ID NO: 10646 - protein, 120 aa, Artificial Sequence; identical to SEQ ID NO: 8162
  source: /note="Description of Artificial Sequence: Synthetic polypeptide"

SEQ ID NO: 10647 - protein, 111 aa, Artificial Sequence; identical to SEQ ID NO: 10642
  source: /note="Description of Artificial Sequence: Synthetic polypeptide"

SEQ ID NO: 10648 - protein, 113 aa, Artificial Sequence; identical to SEQ ID NO: 10643
  source: /note="Description of Artificial Sequence: Synthetic polypeptide"

SEQ ID NO: 10649 - protein, 111 aa, Artificial Sequence; identical to SEQ ID NO: 8168
  source: /note="Description of Artificial Sequence: Synthetic polypeptide"

SEQ ID NO: 10650 - protein, 113 aa, Artificial Sequence; identical to SEQ ID NO: 8169
  source: /note="Description of Artificial Sequence: Synthetic polypeptide"

SEQ ID NO: 10651 - protein, 107 aa, Artificial Sequence
  source: /note="Description of Artificial Sequence: Synthetic polypeptide"
DIQMTQSPSSLSASVGDRVTITCRASQGISSWLAWFQQKPEKAPKSLIYAASSLQSGVPSRFSGSGSGTDFTLTISSLQPEDFATYYCQQYNSYPLTFGGGTKVEIK

SEQ ID NO: 10652 - protein, 107 aa, Artificial Sequence
  source: /note="Description of Artificial Sequence: Synthetic polypeptide"
DIQMTQSPSSLSASVGDRVTITCRASQGISSWLAWYQQKPEKAPKSLIYAASSLQSGVPSRFSGSGSGTDFTLTISSLQPEDFATYYCQQYNSYPLTFGGGTKVEIK

SEQ ID NO: 10653 - protein, 107 aa, Artificial Sequence; identical to SEQ ID NO: 10153
  source: /note="Description of Artificial Sequence: Synthetic polypeptide"

SEQ ID NO: 10654 - protein, 106 aa, Artificial Sequence
  source: /note="Description of Artificial Sequence: Synthetic polypeptide"
DIQMTQSPSSLSASVGDRVTITCRASEDVNTYVSWYQQKPGKAPKLLIYAASNRYTGVPSRFSGSGSGTDFTLTISSLQPEDFATYYCQQSFSYPTFGQGTKLEIK

SEQ ID NO: 10655 - protein, 108 aa, Artificial Sequence
  source: /note="Description of Artificial Sequence: Synthetic polypeptide"
EIVLTQSPGTLSLSPGERATLSCRASQSVGSSYLAWYQQKPGQAPRLLIYGAFSRATGIPDRFSGSGSGTDFTLTISRLEPEDFAVYYCQQYGSSPWTFGQGTKVEIK

SEQ ID NO: 10656 - DNA, 325 bp, Artificial Sequence
  source: /note="Description of Artificial Sequence: Synthetic polynucleotide"
gaaattgtgttgacgcagtctccaggcaccctgtctttgtctccaggggaaagagccaccctctcctgcagggccagtcagagtgttggcagcagctacttagcctggtaccagcagaaacctggccaggctcccaggctcctcatctatggtgcattcagcagggccactggcatcccagacaggttcagtggcagtgggtctgggacagacttcactctcaccatcagcagactggagcctgaagattttgcagtgtattactgtcagcagtatggtagctcaccgtggacgttcggccaagggaccaaggtggaaatcaaac

SEQ ID NO: 10657 - protein, 107 aa, Artificial Sequence
  source: /note="Description of Artificial Sequence: Synthetic polypeptide"
DIQMTQSPSSLSASVGDRVTITCRASQGISSWLAWYQQKPEKAPKSLIYAASSLQSGVPSRFSGSGSGTDFTLTISSLQPEDFATYYCQQYNSYPPTFGQGTKVEIK

SEQ ID NO: 10658 - protein, 108 aa, Artificial Sequence; identical to SEQ ID NO: 10655
  source: /note="Description of Artificial Sequence: Synthetic polypeptide"

SEQ ID NO: 10659 - protein, 108 aa, Artificial Sequence
  source: /note="Description of Artificial Sequence: Synthetic polypeptide"
EIVLTQSPGTLSLSPGERATLSCRASQSVSSSFLAWYQQKPGQAPRLLIYGASSRATGIPDRFSGSGSGTDFTLTISRLEPEDFAVYYCQQYGSSPWTFGQGTKVEIK

SEQ ID NO: 10660 - protein, 107 aa, Artificial Sequence
  source: /note="Description of Artificial Sequence: Synthetic polypeptide"
DIQMTQSPSSLSASVGDRVTITCRASQGISSWLAWYQQKPEKAPKSLIYAASSLQSGVPSRFSGSGSGTDFTLTISSLQPEDFVTYYCQQYNSYPRTFGQGTKVEIK

SEQ ID NO: 10661 - protein, 119 aa, Artificial Sequence
  source: /note="Description of Artificial Sequence: Synthetic polypeptide"
DIVLTQSPATLSVTPGDSVSLSCRASQSISNNLHWYQQKSHESPRLLINYASQSISGIPSRFSGSGSGTDFTLSINSVETEDFGMYFCQQSNSWPLTFGAGTKLELKRRASQSISNNLH

SEQ ID NO: 10662 - protein, 119 aa, Artificial Sequence
  source: /note="Description of Artificial Sequence: Synthetic polypeptide"
DIVLTQSPATLSVTPGDSVSLSCRASQSISNNLHWYQQKSHESPRLLITYASQSISGIPSRFSGSGSGTDFTLSINSVESEDVGVYFCQQSDSWPLTFGAGTKLELKRRASQSISNNLH

SEQ ID NO: 10663 - protein, 119 aa, Artificial Sequence
  source: /note="Description of Artificial Sequence: Synthetic polypeptide"
DIQMTQTTSSLSASLGDRVTISCRSSQDISNFLNWYQQRPDGTVKLLIYYTSRLHSGVPSRFSGSGSGTDYSLTISNLEQEDIATYFCQQGDTLPWTFGGGTKLEIKRRSSQDISNFLN

SEQ ID NO: 10664 - protein, 119 aa, Artificial Sequence
  source: /note="Description of Artificial Sequence: Synthetic polypeptide"
DIVLTQSPATLSVTPGDSVSLSCRASQSISNNLHWYQQRSHESPRLIITHVSQSISGIPSRFSGSGSGTDFIFSINSVESEDFGVYFCQQSNSWPLTFGAGTKLELKRRASQSISNNLH

SEQ ID NO: 10665 - protein, 119 aa, Artificial Sequence
  source: /note="Description of Artificial Sequence: Synthetic polypeptide"
DIVLTQSPATLSVTPGDSVSLSCRASQNINNNLHWYQQKSHESPRLLITYTSQSISGIPSRFSGSGSGTDFTLSINSVESEDVGVYFCQQSDSWPLTFGAGTKLELKRRASQNINNNLH

SEQ ID NO: 10666 - protein, 119 aa, Artificial Sequence
  source: /note="Description of Artificial Sequence: Synthetic polypeptide"
DIVLTQSPATLSVTPGDSVSLSCRASQSINNNLHWYQQESHESPRLLITYASQSISGIPSRFSGSGSGTDFTLSINSVESEDFGVYFCQQSNSWPLTFGAGTKLELKRRASQSINNNLH

SEQ ID NO: 10667 - protein, 119 aa, Artificial Sequence
  source: /note="Description of Artificial Sequence: Synthetic polypeptide"
DIVLTQSPATLSVTPGDSVSLSCRASQSISSNLHWYQQKSHESPRLLITYASQSISGIPSRFSGSGSGTDFTLSINSVESEDVGVYFCQQSDSWPLTFGAGTKLELKRRASQSISSNLH

SEQ ID NO: 10668 - protein, 119 aa, Artificial Sequence; identical to SEQ ID NO: 10667
  source: /note="Description of Artificial Sequence: Synthetic polypeptide"

SEQ ID NO: 10669 - protein, 109 aa, Artificial Sequence
  source: /note="Description of Artificial Sequence: Synthetic polypeptide"
DIQMTQSPSSLSASVGDRVTITCRASQGIKNYLNWYQQKPGKAPKLLIGAASSLQSGVPSRFSGSGSGTDFTLTISSLQPEDFATYYCLQYYGMPPTFGQGTKVEIKRT

SEQ ID NO: 10670 - protein, 109 aa, Artificial Sequence
  source: /note="Description of Artificial Sequence: Synthetic polypeptide"
DIQMTQSPSSLSASVGDRVTITCRASQDISNYLHWYQQKPGKAPKLLIYGASNLQSGVPSRFSGSGSGTDFTLTISSLQPEDFAVYYCQQYDSIPMTFGQGTKVEIKRT

SEQ ID NO: 10671 - protein, 110 aa, Artificial Sequence
  source: /note="Description of Artificial Sequence: Synthetic polypeptide"
DIVLTQSPATLSLSPGERATLSCRASQNLFSPYLAWYQQKPGQAPRLLIYGASNRATGVPARFSGSGSGTDFTLTISSLEPEDFATYYCQQYGDEPITFGQGTKVEIKRT

SEQ ID NO: 10672 - protein, 112 aa, Artificial Sequence
  source: /note="Description of Artificial Sequence: Synthetic polypeptide"
DIALTQPASVSGSPGQSITISCTGTSSDVGGFNYVSWYQQHPGKAPKLMIHDGSNRPSGVSNRFSGSKSGNTASLTISGLQAEDEADYYCSTWDMTVDFVFGGGTKLTVLGQ

SEQ ID NO: 10673 - protein, 113 aa, Artificial Sequence
  source: /note="Description of Artificial Sequence: Synthetic polypeptide"
DIALTQPASVSGSPGQSITISCTGTSSDLGGYNYVSWYQQHPGKAPKLMIYDVNNRPSGVSNRFSGSKSGNTASLTISGLQAEDEADYYCQSYASGNTKVVFGGGTKLTVLGQ

SEQ ID NO: 10674 - protein, 112 aa, Artificial Sequence
  source: /note="Description of Artificial Sequence: Synthetic polypeptide"
DIVLTQPPSVSGAPGQRVTISCSGSSSNIGSSFVNWYQQLPGTAPKLLIGNNSNRPSGVPDRFSGSKSGTSASLAITGLQSEDEADYYCASFDMGSPNVVFGGGTKLTVLGQ

SEQ ID NO: 10675 - protein, 110 aa, Artificial Sequence
  source: /note="Description of Artificial Sequence: Synthetic polypeptide"
DIVLTQSPATLSLSPGERATLSCRASQNLFSPYLAWYQQKPGQAPRLLIYGASNRATGVPARFSGSGSGTDFTLTISSLEPEDFAVYYCQQYLSLPTTFGQGTKVEIKRT

SEQ ID NO: 10676 - protein, 110 aa, Artificial Sequence
  source: /note="Description of Artificial Sequence: Synthetic polypeptide"
DIVLTQSPATLSLSPGERATLSCRASQNLFSPYLAWYQQKPGQAPRLLIYGASNRATGVPARFSGSGSGTDFTLTISSLEPEDFAVYYCQQYMTLPLTFGQGTKVEINRT

SEQ ID NO: 10677 - protein, 110 aa, Artificial Sequence
  source: /note="Description of Artificial Sequence: Synthetic polypeptide"
DIVLTQSPATLSLSPGERATLSCRASQNLFSPYLAWYQQKPGQAPRLLIYGASNRATGVPARFSGSGSGTDFTLTISSLEPEDFAVYYCQQYLTLPLTFGQGTKVEIKRT

SEQ ID NO: 10678 - protein, 113 aa, Artificial Sequence
  source: /note="Description of Artificial Sequence: Synthetic polypeptide"
DIALTQPASVSGSPGQSITISCTGTSSDVGGFNYVSWYQQHPGKAPKLMIHDGSNRPSGVSNRFSGSKSGNTASLTISGLQAEDEADYYCQSWDVSPITAVFGGGTKLTVLGQ

SEQ ID NO: 10679 - protein, 113 aa, Artificial Sequence
  source: /note="Description of Artificial Sequence: Synthetic polypeptide"
DIALTQPASVSGSPGQSITISCTGTSSDVGGFNYVSWYQQHPGKAPKLMIHDGSNRPSGVSNRFSGSKSGNTASLTISGLQAEDEADYYCQTWATSPLSSVFGGGTKLTVLGQ

SEQ ID NO: 10680 - protein, 112 aa, Artificial Sequence
  source: /note="Description of Artificial Sequence: Synthetic polypeptide"
DIALTQPASVSGSPGQSITISCTGTSSDVGGFNYVSWYQQHPGKAPKLMIHDGSNRPSGVSNRFSGSKSGNTASLTISGLQAEDEADYYCQTWDSLSFFVFGGGTKLTVLGQ

SEQ ID NO: 10681 - protein, 113 aa, Artificial Sequence
  source: /note="Description of Artificial Sequence: Synthetic polypeptide"
DIALTQPASVSGSPGQSITISCTGTSSDLGGYNYVSWYQQHPGKAPKLMIYDVNNRPSGVSNRFSGSKSGNTASLTISGLQAEDEADYYCQSYTYTPISPVFGGGTKLTVLGQ

SEQ ID NO: 10682 - protein, 113 aa, Artificial Sequence; identical to SEQ ID NO: 10673
  source: /note="Description of Artificial Sequence: Synthetic polypeptide"

SEQ ID NO: 10683 - protein, 113 aa, Artificial Sequence
  source: /note="Description of Artificial Sequence: Synthetic polypeptide"
DIALTQPASVSGSPGQSITISCTGTSSDLGGYNYVSWYQQHPGKAPKLMIYDVNNRPSGVSNRFSGSKSGNTASLTISGLQAEDEADYYCQTYDQIKLSAVFGGGTKLTVLGQ

SEQ ID NO: 10684 - protein, 113 aa, Artificial Sequence
  source: /note="Description of Artificial Sequence: Synthetic polypeptide"
DIALTQPASVSGSPGQSITISCTGTSSDLGGYNYVSWYQQHPGKAPKLMIYDVNNRPSGVSNRFSGSKSGNTASLTISGLQAEDEADYYCQSYDSPTDSVVFGGGTKLTVLGQ

SEQ ID NO: 10685 - protein, 113 aa, Artificial Sequence; identical to SEQ ID NO: 10673
  source: /note="Description of Artificial Sequence: Synthetic polypeptide"

SEQ ID NO: 10686 - protein, 112 aa, Artificial Sequence; identical to SEQ ID NO: 10674
  source: /note="Description of Artificial Sequence: Synthetic polypeptide"

SEQ ID NO: 10687 - protein, 110 aa, Artificial Sequence
  source: /note="Description of Artificial Sequence: Synthetic polypeptide"
DIVLTQSPATLSLSPGERATLSCRASQNLFSPYLAWYQQKPGQAPRLLIYGASNRATGVPARFSGSGSGTDFTLTISSLEPEDFAVYYCQQYMTLPLTFGQGTKVEIKRT

SEQ ID NO: 10688 - protein, 118 aa, Artificial Sequence
  source: /note="Description of Artificial Sequence: Synthetic polypeptide"
QVQLVQSGAEVKKPGASVKVSCKASGYTFTNYGMNWVRQAPGQRLEWMGWINTYTGDPTYADDFKGRVTITRDTSASTAYMELSSLRSEDTAVYYCARIGGNSPSDYWGQGTTVTVSS

SEQ ID NO: 10689 - protein, 107 aa, Artificial Sequence
  source: /note="Description of Artificial Sequence: Synthetic polypeptide"
EIVLTQSPATLSLSPGERATLSCRASQSVSSYLAWYQQKPGQAPRLLIYDASNRATGIPARFSGSGSGTDFTLTISSLEPEDFAVYYCQHRSNWPPTFGGGTKVEIK

SEQ ID NO: 10690 - protein, 108 aa, Artificial Sequence
  source: /note="Description of Artificial Sequence: Synthetic polypeptide"
DIQMTQSPASLSASLGETISIECRASEDIYSNLAWYQKKSGKSPQLLIYAANRLQDGVPSRFSGSGSGTQYSLKISGMQPEDEGDYFCLQGSKFPLTFGSGTKLEIKR

SEQ ID NO: 10691 - protein, 108 aa, Artificial Sequence
  source: /note="Description of Artificial Sequence: Synthetic polypeptide"
DIQMTQSPASLSASLGETVTIECRASEDIYSNLAWYQQKPGNSPQLLIFDTNNLADGVPSRFSGSGSGTQSSLKINSLQSEDVASYFCQQYNNYPPTFGGGTKLELKR

SEQ ID NO: 10692 - protein, 108 aa, Artificial Sequence
  source: /note="Description of Artificial Sequence: Synthetic polypeptide"
DIQMTQSPPVLSASVGDRVTLSCKASQNIHKNLDWYQQKHGDAPKLLIYYTDHLQTGVPSRFSGSGSATDYTLTISSLQPEDVATYYCYQYNGGPFTFGSGTKLEIKR

SEQ ID NO: 10693 - protein, 109 aa, Artificial Sequence
  source: /note="Description of Artificial Sequence: Synthetic polypeptide"
DIQMTQSPASLSASLGETVTIECRASDDIYNGLAWFQQKPGKSPQLLIYDANTLHTGVPSRFSGSGSGTQFSLKINSLQSEDVASYFCQQFYDYPPYTFGAGTKLELKR

SEQ ID NO: 10694 - protein, 108 aa, Artificial Sequence
  source: /note="Description of Artificial Sequence: Synthetic polypeptide"
DTVMTQSPASMSTSVGERVTVNCKASQSVGTIVAWFQQKPGQSPKRLIYLATYRHTGVPDRFIGSGFGRDFTLTISNVEAEDLAVYYCLQYGSRPFTFGAGTKLEIKR

SEQ ID NO: 10695 - protein, 111 aa, Artificial Sequence
  source: /note="Description of Artificial Sequence: Synthetic polypeptide"
NTVLTQSPALAVSLGQRVTISCKASRSVSSPMYSYIYWYQQKPGQQPKLLIYRASTLASGVPARFSGSGSGTDFTLNIDPVEADDIATYFCQQSWSDPFTFGSGTKLEIKR

SEQ ID NO: 10696 - protein, 111 aa, Artificial Sequence
  source: /note="Description of Artificial Sequence: Synthetic polypeptide"
DTVLTQSPALAVSLGQRVTISCKASRSLSSPMYSYIYWYQQKLGQQPRLLIYRASTLASGVPARFSGSGSGTDFTLNIDPVEADDIATYFCQQSWSDPFTFGSGTKLEIKR

SEQ ID NO: 10697 - protein, 108 aa, Artificial Sequence
  source: /note="Description of Artificial Sequence: Synthetic polypeptide"
DIQMTQSPSSLSASVGDRVTITCRASEDIYSNLAWYQQKPGKAPKLLIYDTNNLADGVPSRFSGSGSGTDFTLTISSLQPEDFATYYCQQYNNYPPTFGQGTKLEIKR

SEQ ID NO: 10698 - protein, 108 aa, Artificial Sequence
  source: /note="Description of Artificial Sequence: Synthetic polypeptide"
DIQMTQSPSSLSASVGDRVTITCRASEDIYSNLAWYQQKPGKSPKLLIFDTNNLADGVPSRFSGSGSGTDSTLTISSLQPEDFATYFCQQYNNYPPTFGQGTKLEIKR

SEQ ID NO: 10699 - protein, 108 aa, Artificial Sequence
  source: /note="Description of Artificial Sequence: Synthetic polypeptide"
DIQMTQSPSSLSASVGDRVTITCRASEDIYSNLAWYQQKPGKAPKLLIFDTNNLADGVPSRFSGSGSGTDFTLTISSLQPEDFATYYCQQYNNYPPTFGQGTKLEIKR

SEQ ID NO: 10700 - protein, 108 aa, Artificial Sequence
  source: /note="Description of Artificial Sequence: Synthetic polypeptide"
EIVMTQSPATLSVSPGERATLSCRASEDIYSNLAWYQQKPGQSPRLLIFDTNNLADGVPARFSGSGSGTESTLTISSLQSEDFAVYFCQQYNNYPPTFGQGTKLEIKR

SEQ ID NO: 10701 - protein, 108 aa, Artificial Sequence
  source: /note="Description of Artificial Sequence: Synthetic polypeptide"
DIQMTQSPSSLSASVGDRVTITCRASEDIYSNLAWYQQKPGKAPKLLIYAANRLQDGVPSRFSGSGSGTDFTLTISSLQPEDFATYYCLQGSKFPLTFGQGTKLEIKR

SEQ ID NO: 10702 - protein, 108 aa, Artificial Sequence
  source: /note="Description of Artificial Sequence: Synthetic polypeptide"
DIQMTQSPSSLSASVGDRVTITCRASEDIYSNLAWYQKKPGKSPKLLIYAANRLQDGVPSRFSGSGSGTDYTLTISSLQPEDFATYFCLQGSKFPLTFGQGTKLEIKR

SEQ ID NO: 10703 - protein, 108 aa, Artificial Sequence
  source: /note="Description of Artificial Sequence: Synthetic polypeptide"
DIQMTQSPSSLSASVGDRVTITCRASEDIYSNLAWYQQKPGKAPKLLIYAANRLQDGVPSRFSGSGSGTDYTLTISSLQPEDFATYYCLQGSKFPLTFGQGTKLEIKR

SEQ ID NO: 10704 - protein, 108 aa, Artificial Sequence
  source: /note="Description of Artificial Sequence: Synthetic polypeptide"
EIVMTQSPATLSVSPGERATLSCRASEDIYSNLAWYQKKPGQSPRLLIYAANRLQDGVPARFSGSGSGTEYTLTISSLQSEDFAVYFCLQGSKFPLTFGQGTKLEIKR

SEQ ID NO: 10705 - protein, 107 aa, Artificial Sequence
  source: /note="Description of Artificial Sequence: Synthetic polypeptide"
DIQMTQSPSSLSASVGDRVTITCRASEDIYSNLAWYQQKPGKAPKLLIYDTNNLADGVPSRFSGSGSGTDFTLTISSLQPEDFATYYCQQYNNYPPTFGQGTKLEIK

SEQ ID NO: 10706 - protein, 107 aa, Artificial Sequence
  source: /note="Description of Artificial Sequence: Synthetic polypeptide"
DIQMTQSPSSLSASVGDRVTITCRASQDIYINLAWYQQKPGKSPKLLIFDTNDLADGVPSRFSGSGSGTDFTLTISSLQPEDFATYYCQQYDYVPPTFGQGTKLEIK

SEQ ID NO: 10707 - protein, 107 aa, Artificial Sequence
  source: /note="Description of Artificial Sequence: Synthetic polypeptide"
DIQMTQSPSSLSASVGDRVTITCRASQDIYYNLAWYQQKPGKSPKLLIFDTSSLADGVPSRFSGSGSGTDFTLTISSLQPEDFATYFCQQYDWYPPTFGQGTKLEIK

SEQ ID NO: 10708 - protein, 107 aa, Artificial Sequence
  source: /note="Description of Artificial Sequence: Synthetic polypeptide"
DIQMTQSPSSLSASVGDRVTITCRASQDIYINLAWYQQKPGKAPKLLIFDTSDLADGVPSRFSGSGSGTDFTLTISSLQPEDFATYYCQQYDYYPPTFGQGTKLEIK

SEQ ID NO: 10709 - protein, 107 aa, Artificial Sequence
  source: /note="Description of Artificial Sequence: Synthetic polypeptide"
DIQMTQSPSSLSASVGDRVTITCRASQDIYYNLAWYQQKPGKAPKLLIFDTNILADGVPSRFSGSGSGTDFTLTISSLQPEDFATYFCQQYDYVPPTFGQGTKLEIK

SEQ ID NO: 10710 - protein, 107 aa, Artificial Sequence
  source: /note="Description of Artificial Sequence: Synthetic polypeptide"
DIQMTQSPSSLSASVGDRVTITCRASQDIWNNLAWYQQKPGKSPKLLIFDTSYLADGVPSRFSGSGSGTDFTLTISSLQPEDFATYYCQQYDWYPPTFGQGTKLEIK

SEQ ID NO: 10711 - protein, 107 aa, Artificial Sequence
  source: /note="Description of Artificial Sequence: Synthetic polypeptide"
DIQMTQSPSSLSASVGDRVTITCRASQEIYRNLAWYQQKPGKSPKLLIFDTSVLADGVPSRFSGSGSGTDSTLTISSLQPEDFATYYCQQYTYYPPTFGQGTKLEIK

SEQ ID NO: 10712 - protein, 113 aa, Artificial Sequence
  source: /note="Description of Artificial Sequence: Synthetic polypeptide"
DIQMTQSPSSLSASVGDRVTITCRTSQSLVHINAITYLHWYQQKPGKAPKLLIYRVSNRFSGVPSRFSGSGSGTDFTLTISSLQPEDFATYYCGQSTHVPLTFGQGTKVEIKR

SEQ ID NO: 10713 - protein, 105 aa, Artificial Sequence
  source: /note="Description of Artificial Sequence: Synthetic polypeptide"
TITCQASQDISNYLNWYQQKPGKAPKLLIYDASNLETGVPSRFSGSGSGTDFTFTISSLQPEDIATYFCQHFDHLPLAFGGGTKVEIKRTVAAPSVFIFPPSDEQ

SEQ ID NO: 10714 - protein, 108 aa, Artificial Sequence
  source: /note="Description of Artificial Sequence: Synthetic polypeptide"
DIQMTQSPSSLSASVGDRVTITCRASQGINNYLNWYQQKPGKAPKRLIYNTNNLQTGVPSRFSGSGSGTEFTLTISSLQPEDFATYYCLQHNSFPTFGQGTKLEIKRT

SEQ ID NO: 10715 - protein, 107 aa, Artificial Sequence [sequence omitted]

SEQ ID NO: 10716 - protein, 108 aa, Artificial Sequence
  source: /note="Description of Artificial Sequence: Synthetic polypeptide"
DILLTQSPVILSVSPGERVSFSCRASQSIGTNIHWYQQRTNGSPRLLIKYASESISGIPSRFSGSGSGTDFTLSINSVESEDIADYYCQQNNNWPTTFGAGTKLELKR

SEQ ID NO: 10717 - protein, 108 aa, Artificial Sequence
  source: /note="Description of Artificial Sequence: Synthetic polypeptide"
EIVLTQSPDFQSVTPKEKVTITCRASQSIGTNIHWYQQKPDQSPKLLIKYASESISGVPSRFSGSGSGTDFTLTINSLEAEDAATYYCQQNNNWPTTFGAGTKLEIKR

SEQ ID NO: 10718 - protein, 113 aa, Artificial Sequence
  source: /note="Description of Artificial Sequence: Synthetic polypeptide"
DIVMTQSPDSLAVSLGERATINCKSSQSVLNSGNQKNYLTWYQQKPGQPPKLLIYWASTRESGVPDRFSGSGSGTDFTLTISSLQAEDVAVYYCQSDYSYPYTFGQGTKLEIK

SEQ ID NO: 10719 - protein, 135 aa, Artificial Sequence
  source: /note="Description of Artificial Sequence: Synthetic polypeptide"
MDTRAPTQLLGLLLLWLPGATFAQVLTQTPASVSAAVGGTVTISCQSSESVYKNNYLSWFQQKPGQPPKLLIYEASKLASGVSTRFKGSGSGTQFTLTISGVQCDDAATYYCLGEFSCYSGDCGTFGGGTAVVVK

SEQ ID NO: 10720 - protein, 133 aa, Artificial Sequence
  source: /note="Description of Artificial Sequence: Synthetic polypeptide"
MDTRVPTQLLGLLLLWLPGATFAQVLTQTPSPVSAAVGGTVTINCQASKSVYNNVQLSWFQQKPGQPPKRLIYYASTLASGVPSRFKGSGSGTQFTLTISDVQCDDVATYYCAGGYSSSSDNAFGGGTEVVVK

SEQ ID NO: 10721 - protein, 107 aa, Artificial Sequence
  source: /note="Description of Artificial Sequence: Synthetic polypeptide"
DIQMTQSPSSLLAALGERVSLTCRASQEISGYLSWLQQKPDGTIKRLIYAASTLDSGVPKRFSGSESGSDYSLTISSLESEDFADYYCLQYFSYPLTFGAGTKLELK

SEQ ID NO: 10722 - protein, 107 aa, Artificial Sequence
  source: /note="Description of Artificial Sequence: Synthetic polypeptide"
DILLTQSPAILSVSPGERVSFSCRTSQSIGTNIHWYQQRTNGFPRLLIKNVSESISGIPSRFSGSGSGTDFILSINSVESEDIADYYCQQSNTWPFTFGGGTKLEIK

SEQ ID NO: 10723 - protein, 121 aa, Artificial Sequence; identical to SEQ ID NO: 8248
  source: /note="Description of Artificial Sequence: Synthetic polypeptide"

SEQ ID NO: 10724 - protein, 107 aa, Artificial Sequence
  source: /note="Description of Artificial Sequence: Synthetic polypeptide"
EIVLTQSPDFQSVTPKEKVTITCRTSQSIGTNIHWYQQKPDQSPKLLIKNVSESISGVPSRFSGSGSGTDFTLTINSLEAEDAATYYCQQSNTWPFTFGGGTKVEIK

SEQ ID NO: 10725 - protein, 107 aa, Artificial Sequence
  source: /note="Description of Artificial Sequence: Synthetic polypeptide"
EIVLTQSPDFQSVTPKEKVTITCRTSQSIGTNIHWYQQKPDQSPKLLIKYVSESISGVPSRFSGSGSGTDFTLTINSLEAEDAATYYCQQSNTWPFTFGGGTKVEIK

SEQ ID NO: 10726 - protein, 107 aa, Artificial Sequence
  source: /note="Description of Artificial Sequence: Synthetic polypeptide"
EIVLTQSPDFQSVTPKEKVTITCRTSQSIGTNIHWYQQKPDQSPKLLIKYASESISGVPSRFSGSGSGTDFTLTINSLEAEDAATYYCQQSNTWPFTFGGGTKVEIK

SEQ ID NO: 10727 - protein, 107 aa, Artificial Sequence
  source: /note="Description of Artificial Sequence: Synthetic polypeptide"
EIVLTQSPDFQSVTPKEKVTFTCRTSQSIGTNIHWYQQKPDQSPKLLIKEVSESISGVPSRFSGSGSGTDFTLTINSLEAEDAATYYCQQSNTWPFTFGGGTKVEIK

SEQ ID NO: 10728 - protein, 107 aa, Artificial Sequence; identical to SEQ ID NO: 10721
  source: /note="Description of Artificial Sequence: Synthetic polypeptide"

SEQ ID NO: 10729 - protein, 107 aa, Artificial Sequence; identical to SEQ ID NO: 10722
  source: /note="Description of Artificial Sequence: Synthetic polypeptide"

SEQ ID NO: 10730 - protein, 107 aa, Artificial Sequence; identical to SEQ ID NO: 10724
  source: /note="Description of Artificial Sequence: Synthetic polypeptide"

SEQ ID NO: 10731 - protein, 107 aa, Artificial Sequence; identical to SEQ ID NO: 10725
  source: /note="Description of Artificial Sequence: Synthetic polypeptide"

SEQ ID NO: 10732 - protein, 107 aa, Artificial Sequence; identical to SEQ ID NO: 10726
  source: /note="Description of Artificial Sequence: Synthetic polypeptide"

SEQ ID NO: 10733 - protein, 107 aa, Artificial Sequence; identical to SEQ ID NO: 10727
  source: /note="Description of Artificial Sequence: Synthetic polypeptide"

SEQ ID NO: 10734 - protein, 107 aa, Artificial Sequence
  source: /note="Description of Artificial Sequence: Synthetic polypeptide"
DIQMTQSPSSLSASLGERVSLTCRASQEISGYLSWLQQKPDGTIRRLIYAASTLDSGVPKRFSGSWSGSDYSLTISSLESEDFADYYCLQYVSYPYTFGGGTKLEIK

SEQ ID NO: 10735 - protein, 112 aa, Artificial Sequence
  source: /note="Description of Artificial Sequence: Synthetic polypeptide"
QVQLVESGGGVVQPGRSLRLSCAASGFTFSDYYMAWVRQAPGKGLEWVASISYDGSNKYYGDSVKGRFTISRDNSKNTLYLQMNSLRAEDTAVYYCARPGDYWGQGTLVTVS

SEQ ID NO: 10736 - protein, 329 aa, Artificial Sequence
  source: /note="Description of Artificial Sequence: Synthetic polypeptide"
ASTKGPSVFPLAPSSKSTSGGTAALGCLVKDYFPEPVTVSWNSGALTSGVHTFPAVLQSSGLYSLSSVVTVPSSSLGTQTYICNVNHKPSNTKVDKKVEPKSCDKTHTCPPCPAPELLGGPSVFLFPPKPKDTLMISRTPEVTCVVVDVSHEDPEVKFNWYVDGVEVHNAKTKPREEQYNSTYRVVSVLTVLHQDWLNGKEYKCKVSNKALPAPIEKTISKAKGQPREPQVYTLPPSREEMTKNQVSLTCLVKGFYPSDIAVEWESNGQPENNYKTTPPVLDSDGSFFLYSKLTVDKSRWQQGNVFSCSVMHEALHNHYTQKSLSLSPG

SEQ ID NO: 10737 - protein, 106 aa, Artificial Sequence
  source: /note="Description of Artificial Sequence: Synthetic polypeptide"
SYELMQPPSVSVSSGQTASIPCSGDKLEEKYVSWYQQRPGQSPVLVIYQDNKRPSGIPERFSGSNSGNTATLTISGTQAMDEADYYCQVWDNYSVLFGGGTKLTVL

SEQ ID NO: 10738 - protein, 106 aa, Artificial Sequence
  source: /note="Description of Artificial Sequence: Synthetic polypeptide"
SYELTQPLSESVAQGQTARITCGGNNIESRNVHWYQQKPGQAPVLVIYRDNNRPSGIPERFSGSNSGNMATLTISRAQAGDAADYYCQVWDNYTVLFGGGTKLTVL

SEQ ID NO: 10739 - protein, 106 aa, Artificial Sequence
  source: /note="Description of Artificial Sequence: Synthetic polypeptide"
SYELTQPPSVAVAPGKTARITCGGNNIGSKNVHWYQQKPGQAPVLVIYRDSNRPSGIPERFSGSNSGNTATLTISRAQAGDEADFYCQVWDNYIVLFGGGTKLTVL

SEQ ID NO: 10740 - protein, 106 aa, Artificial Sequence
  source: /note="Description of Artificial Sequence: Synthetic polypeptide"
QAVLTQPPSVSVAPGQTARIPCEGNNIGSKNVHWYRQKPGQVPVLVMYDDSDRPSGIPERFSGSNSGNTATLTISGTQAMDEADYYCQVWDNYSVLFGGGTKLTVL

SEQ ID NO: 10741 - protein, 106 aa, Artificial Sequence
  source: /note="Description of Artificial Sequence: Synthetic polypeptide"
QPVLTQPLSVSVAPGQTARITCGGNNIGSKNVHWYQQKPGQAPVLVIYRDSSRPSGIPERLSGSNSGDTATLTISRAQAGDEADYYCQVWDDYIVVFGGGTKLTVL

SEQ ID NO: 10742 - protein, 106 aa, Artificial Sequence
  source: /note="Description of Artificial Sequence: Synthetic polypeptide"
SYELTQPPSVSVTPGQTATITCGANDIGKRNVHWYQQRPGQSPVLVIYQDNKRPSGIPERFSGSNSGNTATLTISGTQAMDEADYYCQVWDNYSVLFGGGTKLTVL

SEQ ID NO: 10743 - protein, 106 aa, Artificial Sequence
  source: /note="Description of Artificial Sequence: Synthetic polypeptide"
QPVLTQPSSVSVAPGQTATISCGGHNIGSKNVHWYQQRPGQSPVLVIYQDNKRPSGIPERFSGSNSGNTATLTISGTQAMDEADYYCQVWDNYSVLFGGGTKLTVL

SEQ ID NO: 10744 - protein, 106 aa, Artificial Sequence
  source: /note="Description of Artificial Sequence: Synthetic polypeptide"
DIQMTQSPSTLSASVGDRVTITCRASQSISRWLAWYQQKPGKAPKLLIYKASSLESGVPSRFSGSGSGTEFTLTISSLQPDDFASYYCQQYNSYSTFGQGTKLEIK

SEQ ID NO: 10745 - protein, 107 aa, Artificial Sequence
  source: /note="Description of Artificial Sequence: Synthetic polypeptide"
AIRMTQSPSSVSASVGDRVTITCRASQGISSWLAWYQQKPGKAPKLLIYAASSLQSGVPSRFSGSGSGTDFTLTISSLQPEDFATYYCQQANSFPFTFGGGTKVEIK

SEQ ID NO: 10746 - protein, 107 aa, Artificial Sequence
  source: /note="Description of Artificial Sequence: Synthetic polypeptide"
DIQMTQSPSSLSASVGDRVTITCRASQSISSYLNWYQQKPGKAPKLLIYAASSLQSGVPSRFSGSGSGTDFTLTIRSLIPEDFATYYCQQTYNTPFTFGPGTKVEIK

SEQ ID NO: 10747 - protein, 108 aa, Artificial Sequence
  source: /note="Description of Artificial Sequence: Synthetic polypeptide"
AIQMTQSPSSLSASVGDRVTITCRASQNINNYLNWYHQKPGKAPNLLIYAASSLQSGVPSRFSGSGSGTDYTLTISSLQPEDFGNYYCQQSYSTSMYTFGQGTKLEIK

SEQ ID NO: 10748 - protein, 107 aa, Artificial Sequence
  source: /note="Description of Artificial Sequence: Synthetic polypeptide"
DIQLTQSPSSVSASVGDRVTITCRASQGISSWLAWYQQKPGKAPKLLIYAASSLQSGVPSRFSGSGSGTDFTLTISSLQPEDFATYYCQQTNSFPFPFGPGTKVDIK

SEQ ID NO: 10749 - protein, 107 aa, Artificial Sequence
  source: /note="Description of Artificial Sequence: Synthetic polypeptide"
DIQMTQSPSSVSASVGDRVTITCRASQGISSWLAWYQQKPGKAPKLLIYTASSLQSGVPSRFSGSGSRTDFTLTISSLQPEDFATYYCQQTNSLPLTFGPGTKVEIK

SEQ ID NO: 10750 - protein, 107 aa, Artificial Sequence
  source: /note="Description of Artificial Sequence: Synthetic polypeptide"
DIVMTQSPSSVSASVGDRVTITCRASQGISSWLAWYQQKPGKAPKLLIYAASSLRSGVPSRFSGSGSGTDFTLTITSLQPEDFATYYCQHTNSFPFTFGPGTKVEIK

SEQ ID NO: 10751 - protein, 107 aa, Artificial Sequence
  source: /note="Description of Artificial Sequence: Synthetic polypeptide"
DIQMTQSPSSLSASVGDRVTITCRASQSISSYLNWYQQKPGKAPKLLIYAASSLQSGVPSRFSGSGSGTDFTLTISSLQPEDFATYHCQQSYSIPITFGQGTRLEIK

SEQ ID NO: 10752 - protein, 106 aa, Artificial Sequence
  source: /note="Description of Artificial Sequence: Synthetic polypeptide"
DIQMTQSPSSLSASVGDRVTITCRASQDISNYLAWYQQKPGKVPKLLIYAASTLQSGVPFRFSGSGSGTDFTLTISSLQPEDVATYYCQKYNSAPPFGPGTKVDIK

SEQ ID NO: 10753 - protein, 108 aa, Artificial Sequence
  source: /note="Description of Artificial Sequence: Synthetic polypeptide"
DIQMTQSPSSLSASVGDRVTITCRASQSINNYLNWYHQKPGKAPKLLIYAASSLQSGVPSRFSGSGSGTDYTLTISSLQPEDFGNYYCQQSYRTSMYTFGQGTKVEIK

SEQ ID NO: 10754 - protein, 106 aa, Artificial Sequence
  source: /note="Description of Artificial Sequence: Synthetic polypeptide"
DIVMTQSPSSLSASVGDRVTITCRASQGISNYLAWYQQKPGKVPKLLIYSASTLQSGVPSRFSGSGSGTDFTLTISNLQPEDFATFFCQKYNSAPTFGGGTKVEIK

SEQ ID NO: 10755 - protein, 113 aa, Artificial Sequence
  source: /note="Description of Artificial Sequence: Synthetic polypeptide"
DIVMTQSPDSLAVSLGERATINCKSSQNILYSSDNKNYLAWYQKKPGQPPKLLIYWASTRESGVPDRFSGSGSGTDFTLTIISLQAEDVALYYCHQYYTTPPTFGQGTKVEIK

SEQ ID NO: 10756 - protein, 108 aa, Artificial Sequence
  source: /note="Description of Artificial Sequence: Synthetic polypeptide"
EIVMTQSPSSLSASVGDRVTITCRASQSINNYLNWYHQKPGKAPKLLIYAASSLQSGVPSRFSGSGSGTDYTLTISSLQPEDFGNYYCQQSYRTSMYTFGQGTKVEIK

SEQ ID NO: 10757 - protein, 107 aa, Artificial Sequence
  source: /note="Description of Artificial Sequence: Synthetic polypeptide"
DIQLTQSPSFLSASVGDRVTITCWASQGISSYLAWSQQKPGKAPKLLIYAASTLQSGVPSRFSGSGSGTEFTLTISSLQPEDFATYYCQQLNSYPWTFGQGTKVEIK

SEQ ID NO: 10758 - protein, 108 aa, Artificial Sequence
  source: /note="Description of Artificial Sequence: Synthetic polypeptide"
EIVLTQSPGTLSLSPGERATLSCRASQSVSSTYLAWLQQKPGQAPRLLIYGASSRATGIPDRFSGSGSGTDFTLTINRLEPEDFAVYYCQQYAYSPYTFGQGTKLEIK

SEQ ID NO: 10759 - protein, 108 aa, Artificial Sequence
  source: /note="Description of Artificial Sequence: Synthetic polypeptide"
DIQLTQSPSSLSASVGDRVTITCRASQSINNYLNWYHQKPGKAPKLLIYAASSLQSGVPSRFSGSGSGTDYTLTISSLQPEDFGNYYCQQSYRTSMYTFGQGTKVEIK

SEQ ID NO: 10760 - protein, 106 aa, Artificial Sequence
  source: /note="Description of Artificial Sequence: Synthetic polypeptide"
DIVMTQSPSTLSASVGDRVTITCRASQSISWWLAWYQQKPGKAPKLLIYKASSLESGVPSRFSGSGSGTEFTLTISSLQPDDFATYYCQQYNSYSTFGGGTKLEIK

SEQ ID NO: 10761 - protein, 107 aa, Artificial Sequence
  source: /note="Description of Artificial Sequence: Synthetic polypeptide"
DIQMTQSPSSVSASVGDRVTITCRASQGISSWLAWYQQKPGKAPKLLIYTTSSLQSGVPSRFSGSGSGTDFTLTISSLQPEDFATYYCQQANSFPLTFGGGTKVDIK

SEQ ID NO: 10762 - protein, 107 aa, Artificial Sequence
  source: /note="Description of Artificial Sequence: Synthetic polypeptide"
DIQMTQSPYSVSASVGDRVTITCRASQGISSWLAWYQQKPGRAPKLLIYAASSLQSGVPSRFSGSGSGTDFTLTISSLQPEDFATYYCQKTNSFPFTFGPGTKVEIK

SEQ ID NO: 10763 - protein, 107 aa, Artificial Sequence
  source: /note="Description of Artificial Sequence: Synthetic polypeptide"
DIQMTQSPSSLSASVGDRVTITCRASQDITNYLAWFQQKPGKAPKSLIYAASSLQSGVPSKFSGSGSGTDFTLTISSLQPEDFATYYCQQYNSYPPTFGPGTKVDIK

SEQ ID NO: 10764 - protein, 107 aa, Artificial Sequence
  source: /note="Description of Artificial Sequence: Synthetic polypeptide"
DIQMTQSPSSLSAFVGDRVTITCRASQDIRNYLDWFQQKPGKAPKSLIYAASNLQSGVPSRFGGSGSGTDFTLTINSLQPEDFVTYYCQQYNSYPPTFGGGTKVEIK

SEQ ID NO: 10765 - protein, 107 aa, Artificial Sequence; identical to SEQ ID NO: 10764
  source: /note="Description of Artificial Sequence: Synthetic polypeptide"

SEQ ID NO: 10766 - protein, 107 aa, Artificial Sequence; identical to SEQ ID NO: 10763
  source: /note="Description of Artificial Sequence: Synthetic polypeptide"

SEQ ID NO: 10767 - protein, 107 aa, Artificial Sequence
  source: /note="Description of Artificial Sequence: Synthetic polypeptide"
EIVLTQSPDTLSLSPGERATLSCRASQSVSSSYFAWYQQKPGQAPRLLMYSASSRATGIPDRFSGSGSGTDFSLTISRLEPEDFAVYYCQQYGRSLTFGGGTKVEIK

SEQ ID NO: 10768 - protein, 113 aa, Artificial Sequence
  source: /note="Description of Artificial Sequence: Synthetic polypeptide"
DIVMTQSPDSLAVSLGERATINCKSSQSVLYSSNNKNYLTWYQQKPGQPPKLLIYWASTRESGVPDRFSGSGSGTDFTLTISSLQAEDVAVYYCQQYYSTPPTFGLGTKVEIK

SEQ ID NO: 10769 - protein, 109 aa, Artificial Sequence
  source: /note="Description of Artificial Sequence: Synthetic polypeptide"
EIVMTQSPATLSVSPGERATLSCRASQSVDNNLVWYQQKPGQAPRLLIYGASTRATGIPARFSGSGSGTEFTLTISSLQSEDFAVYYCQQYNNWPPWTFGQGTKVEIKR

SEQ ID NO: 10770 - protein, 112 aa, Artificial Sequence
  source: /note="Description of Artificial Sequence: Synthetic polypeptide"
SYVLTQPPSVSGTPGQRVTISCSGGRSWIGSNTVKWYQQLPGTAPKLLIYGNDQRPSGVPDRFSGSKSGTSASLAITGVQAEDGADYYCQSYDRGTHPALLFGTGTKVTVLG

SEQ ID NO: 10771 - protein, 114 aa, Artificial Sequence
  source: /note="Description of Artificial Sequence: Synthetic polypeptide"
QSVLTQPPSVSGAPGQRVTISCSGSRSNIGSNTVKWYQQLPGTAPKLLIYYNDQRPSGVPDRFSGSKSGTSASLAITGLQAEDHPAEADYYCQSYDRYTHPALFGTGTKVTVLG

SEQ ID NO: 10772 - protein, 113 aa, Artificial Sequence
  source: /note="Description of Artificial Sequence: Synthetic polypeptide"
DVVLTQTPLSLPVNIGDQASISCKSTKSLLNSDGFTYLDWYLQKPGQSPQLLIYLVSNRFSGAPDRFSGSGSGTDFTLKISRVEAEDLGVYYCFQHNYLPLTFGAGTNLELKR

SEQ ID NO: 10773 - protein, 113 aa, Artificial Sequence
  source: /note="Description of Artificial Sequence: Synthetic polypeptide"
DVVLTQTPLSLPVNIGDQASISCRSTQTLLNSDGFTYLDWYLQKPGQSPQLLIYLVSNRFSGVPDRFSGSGSGTDFTLKISRVEAEDLGVYYCFQNNYLPLTFGAGTKLELKR

SEQ ID NO: 10774 - protein, 113 aa, Artificial Sequence
  source: /note="Description of Artificial Sequence: Synthetic polypeptide"
DVLMTQTPLSLPVSLGDQASISCRSSQNIVHSNGKTYLEWYLQRPGQSPKLLIYKVSNRFSGVPDRFSGSGSGTDFTLKISRVEAEDLGVYYCFQGSHVPYTFGGGTKLEIKR

SEQ ID NO: 10775 - protein, 113 aa, Artificial Sequence
  source: /note="Description of Artificial Sequence: Synthetic polypeptide"
DVVMTQTPLSLPVSLGDQASISCRSSQSLVHSHGNTYLHWYLQKPGQSPKLLIYTVSNRFSGVPDRFSGSGSGTDFTLKISRVEAEDLGVYFCSQSTHVPYTFGGGTKLEIKR

SEQ ID NO: 10776 - protein, 113 aa, Artificial Sequence
  source: /note="Description of Artificial Sequence: Synthetic polypeptide"
DVVLTQTPLTLSVTIGQPASISCKSSQSLLDSDGETYLNWLLQRPGQSPKRLIYLVSKLDSGVPDRFTGSGSGTDFTLKISRVEAEDLGVYYCWQGTHFPWTFGGGTKLEIKR

SEQ ID NO: 10777 - protein, 114 aa, Artificial Sequence
  source: /note="Description of Artificial Sequence: Synthetic polypeptide"
DIVMSQSPSSLAVSVGEKVTMSCKSSQNLLYSSNQKNYLAWYQQKPGQSPKLLIYWASTRESGVPDRFTGSGSGTDFTLTISSVKAEDLAVYYCQQYYSYPFTFGSGTKLEIKR

SEQ ID NO: 10778 - protein, 108 aa, Artificial Sequence
  source: /note="Description of Artificial Sequence: Synthetic polypeptide"
DIQMTQTASSLSASLGDRVTISCRASQDIRNYLNWYQRKPDGTVKLLIFYTSKLHSGVPSRFSGSGSGTDYSLTIRNLEQEDIATYFCQQGNTLPLTFGGGTKLEIKR

SEQ ID NO: 10779 - protein, 108 aa, Artificial Sequence
  source: /note="Description of Artificial Sequence: Synthetic polypeptide"
DIQMTQTASSLSASLGDRVTISCRASQDIRNYLNWYQRKPDGTVKLLIYYTSRLHSGVPSRFSGSGSGTDYSLTISNLEQEDIATYFCQQGNTLPLTFGGGTKLEIKR

SEQ ID NO: 10780 - protein, 108 aa, Artificial Sequence
  source: /note="Description of Artificial Sequence: Synthetic polypeptide"
DIQMTQTTSSLSASLGDRVTITCRASQDIRNYLNWYQQKPDGTVKLLIYYTSRLHSGVPSRFSGSGSGTDYSLTISNLDQEDIATYFCQQGNTLPLTFGGGTRLEIKR

SEQ ID NO: 10781 - protein, 118 aa, Artificial Sequence
  source: /note="Description of Artificial Sequence: Synthetic polypeptide"
QVQLKESGPGLVAPSQSLSITCTVSGFSLTGYGVNWVRQPPGKGLEWLGMIWGDERIDYNSALKSRLSITKDNSKSQVFLKMNSLQTDDTGRYFCARDGYFPYAMDYWGQGTSVTVSS

SEQ ID NO: 10782 - protein, 118 aa, Artificial Sequence
  source: /note="Description of Artificial Sequence: Synthetic polypeptide"
QVQLKESGPGLVAPSQSLSITCTVSGFSLTGSSINWVRQPPGKGLEWLGMIWGDGRIDYNSVLKSRLSISKDSSKSQVFLKMNSLQADDTARYYCARDGYYPYAMVYWGQGTSVTVSS

SEQ ID NO: 10783 - protein, 118 aa, Artificial Sequence
  source: /note="Description of Artificial Sequence: Synthetic polypeptide"
QVQLKESGPGLVAPSQSLSITCTVSEFSLTGSSVNWVRQPPGKGLEWLGMIWGDGRIDYNSALKSRLSISKDNSKSQVFLKMNSLQTDDTARYYCARDGYYPYAMNYWGQGTSVTVSS

SEQ ID NO: 10784 - protein, 118 aa, Artificial Sequence
  source: /note="Description of Artificial Sequence: Synthetic polypeptide"
QVQLKESGPGLVAPSQSLSITCTVSGFSLTGYNINWVRQPPGKGLEWLGLIWGDGNTAFNSALKSRLSISKDNSKSQVFLKLNSLQTDDTARYYCARDGYYPYAIKYWGQGTSVTVSS

SEQ ID NO: 10785 - protein, 118 aa, Artificial Sequence
  source: /note="Description of Artificial Sequence: Synthetic polypeptide"
QVQLKESGPGLVAPSQSLSITCTVSGFSLTGHNINWVRQPPGKGLEWLGMIWGDGNTDFNSALKSRLSISKDNSKSQVFLKLNSLQTDDTARYYCARDGYYPYAIKFWGQGTSVTVSS

SEQ ID NO: 10786 - protein, 108 aa, Artificial Sequence
  source: /note="Description of Artificial Sequence: Synthetic polypeptide"
DIQMTQSPASLSVSVGETVTITCRASENIYSNLAWYRQKQGKSPQLLVFAASNLADGVPSRFSGSGSGTQYSLKINSLQSEDFGDYYCQHFWTTPWAFGGGTNLEIKR

SEQ ID NO: 10787 - protein, 108 aa, Artificial Sequence
  source: /note="Description of Artificial Sequence: Synthetic polypeptide"
DIQLTQSPSSLSASVGDRVTITCRASENIYSNLAWYRQKPGKAPKLLVFAASNLADGVPSRFSGSGSGTDYTFTISSLQPEDIATYYCQHFWTTPWAFGGGTKLQIKR

SEQ ID NO: 10788 - protein, 108 aa, Artificial Sequence; identical to SEQ ID NO: 10787
  source: /note="Description of Artificial Sequence: Synthetic polypeptide"

SEQ ID NO: 10789 - protein, 110 aa, Artificial Sequence
  source: /note="Description of Artificial Sequence: Synthetic polypeptide"
AIQLTQSPDSLAVSLGERATIKCKSSQSVLYSSNNKNYLAWYQQKPGQPPNLLIYWASTRESGVPDRFSGSGSGTDFTLTISSLQAEDVAVYYCQQYFSFGQGTKVDIKR

SEQ ID NO: 10790 - protein, 108 aa, Artificial Sequence
  source: /note="Description of Artificial Sequence: Synthetic polypeptide"
DIQMTQSPSSVSASVGDRVTITCRSSQDINNWLVWYQQKPGKAPKVLIYGASRLQSGVPSRFSGSGSGTDFTLTISSLQPEDFATYYCQQANSFPLTFGGGTKVEIKR

SEQ ID NO: 10791 - protein, 108 aa, Artificial Sequence
  source: /note="Description of Artificial Sequence: Synthetic polypeptide"
DIQMTQSPSSVSASVGDRVTITCRSSQDINNWLVWYQQKPGKAPKVLIYGASRLQSGVPSRFSGSGSGTDFTLTISSLQPEDFATYYCQQANSFPLTFGGGTKLEIKR

SEQ ID NO: 10792 - protein, 108 aa, Artificial Sequence
  source: /note="Description of Artificial Sequence: Synthetic polypeptide"
AIQLTQSPSSLSASVGDRVTITCRASQDINNWLVWYQQKPGKAPKLLIYAASSLQSGVPSRFSGSGSGTDFTLTISSLQPEDFATYYCQQANSFPLTFGGGTKVDIKR

SEQ ID NO: 10793 - protein, 108 aa, Artificial Sequence
  source: /note="Description of Artificial Sequence: Synthetic polypeptide"
DIQMTQSPSSLSASVGNRVTITCRASQGIRNDLGWYQQKPGKAPKRLIYAASSLQSGVPSRFSGSGSGTEFTLTISSLQPEDFATYYCLQHNSYPLTFGRGTKVEIKR

SEQ ID NO: 10794 - protein, 112 aa, Artificial Sequence
  source: /note="Description of Artificial Sequence: Synthetic polypeptide"
DIVMTQTPLSSPVTLGQPASISCRSSQSLVKSDGNTYLSWLQQRPGQPPRLLIYKISNRFSGVPDRFSGSGAGTDFTLKISRVEAEDVGVYYCMQTTQFPFTFGPGTKVDIK

SEQ ID NO: 10795 - protein, 108 aa, Artificial Sequence
  source: /note="Description of Artificial Sequence: Synthetic polypeptide"
DIQLTQSPSSVSASVGNRVTITCRASQDINNWLVWYHQNPGKAPKVLIYGASRLQSGVPSRFSGSGSGTDFTLTISSLQPEDFATYYCQQANSFPLTFGGGTKVEIKR

SEQ ID NO: 10796 - protein, 108 aa, Artificial Sequence
  source: /note="Description of Artificial Sequence: Synthetic polypeptide"
DIQLTQSPSSLSASVGNRVTITCRASQGIRNDLAWFQQKPGKAPKPLIYAASSLQSGVPSRFSGSGSGTEFTLTISSLQPEDFATYYCLQHNSYPWTFGQGTKVEIKR

SEQ ID NO: 10797 - protein, 108 aa, Artificial Sequence
  source: /note="Description of Artificial Sequence: Synthetic polypeptide"
DIQLTQSPSFLSASVGNRVTITCWASQGISSYLAWYQQKPGKAPKLLIYAASTLQSGVPSRFSGSGSGTEFTLTISSLQPEDFATYYCQQLNSYPFTFGPGTKVEIKR

SEQ ID NO: 10798 - protein, 107 aa, Artificial Sequence
  source: /note="Description of Artificial Sequence: Synthetic polypeptide"
DIQMTQSPSTLSASVGDRVTITCRASQSISSWLAWYQQKPGKAPKLLIYKASSLKSGVPSRFSGSGSGTEFILTISSLQPDDFATYYCQQYNSYWTFGQGTKVEIKR

SEQ ID NO: 10799 - protein, 108 aa, Artificial Sequence
  source: /note="Description of Artificial Sequence: Synthetic polypeptide"
AIQMTQSPSSLSASVGNRVTITCRASQGIINDLGWYNQKPWKAPKRLIYAASILQSGVPSRFSGRGCGTEFSLTISSLQPEDFATYYCLQHNSYPLTFGGGTKVEIKR

SEQ ID NO: 10800 - protein, 108 aa, Artificial Sequence
  source: /note="Description of Artificial Sequence: Synthetic polypeptide"
DIQLTQSPSSLSASVGDRVTITCRASQGIRNDLGWYQQKPGKAPKRLIYAASSLQSGVPSRFSGSGSGTEFTLTISSLQPEDFATYYCLQHNSYPWTFGQGTKVEIKR

SEQ ID NO: 10801 - protein, 108 aa, Artificial Sequence
  source: /note="Description of Artificial Sequence: Synthetic polypeptide"
DIPMTQSPSSLSASVGDRVTITCRASQGIRNDLGWYQQKPGKAPKRLIYAASSLQSGVPSRFTGSGSGTEFTLTISSLQPEDFATYYCLQHNSYPFTFGQGTKMEIKR

SEQ ID NO: 10802 - protein, 108 aa, Artificial Sequence
  source: /note="Description of Artificial Sequence: Synthetic polypeptide"
DIPMTQSPSSLSASVGNRVTITCRASQGISNYLAWYHHKPGKVPKLLIYAASTLQSGVPSRFSGSGSGTDFTLTIHSLQPEDVATYYCQKYNSAPFTFGPGTKVEIKR

SEQ ID NO: 10803 - protein, 108 aa, Artificial Sequence
  source: /note="Description of Artificial Sequence: Synthetic polypeptide"
DIQMTQSPSSVSASVGNRVTITCRASQGISSWLAWYQQKPGKAPKLLIYAASSLQSGVPSRFSGSGSGTDFTLTISSLQPEDFATYYCQQANSFPPTFGQGTKVEIKR

SEQ ID NO: 10804 - protein, 108 aa, Artificial Sequence
  source: /note="Description of Artificial Sequence: Synthetic polypeptide"
AIQMTQSPSSLSASVGNRVTITCRASQGINNWLGWYQQKPGKAPKVLIYAASSLQSGVPSRFSGSGSGTDFTLTISSLQPEDFATYYCQQDNSFPLTFGRGTKVEIKR

SEQ ID NO: 10805 - protein, 112 aa, Artificial Sequence
  source: /note="Description of Artificial Sequence: Synthetic polypeptide"
DIVMTQTPLSSPVTLGQPASISCRSSQSLVKSDGNTYLSWLQQRPGQPPRLLIYKISNRFSGVPDRFSGSGAGTDFTLKISRVEAEDVGIYYCMQTTQFPFTFGPGTKVDIK

SEQ ID NO: 10806 - protein, 108 aa, Artificial Sequence
  source: /note="Description of Artificial Sequence: Synthetic polypeptide"
DIQMTQSPSSLSASVGNRVTITCRASQGIRNDLGWYHQKPGKAPKRLIYAASTLQSGVPSRFSGSGSGTEFTLTISSLQPEDFATYYCLQHNSYPFTFGQGTKVEIKR

SEQ ID NO: 10807 - protein, 108 aa, Artificial Sequence
  source: /note="Description of Artificial Sequence: Synthetic polypeptide"
DIQMTQSPSSLSASVGDRVTITCRASQDITNYLAWYQQKPGKVPKLLIYTTSTLQSGVPSRFSGSGSGTDFTLTITSLQPEDVATYFCQKYNSDPFTFGPGTKVEIKR

SEQ ID NO: 10808 - protein, 108 aa, Artificial Sequence
  source: /note="Description of Artificial Sequence: Synthetic polypeptide"
DIQMTQSPSSLSASVGDRVTITCRASQGIRNDLGWYQQKPGKAPKRLIYAASSLQSGVPSRFSGSGSGTEFTLTISSLQPEDFATYYCLQHNNYPWTFGQGTKVEIKR

SEQ ID NO: 10809 - protein, 108 aa, Artificial Sequence
  source: /note="Description of Artificial Sequence: Synthetic polypeptide"
DIQLTQSPSSLSASVGNRVTITCRASQGISNYLAWYQQKPGKAPKLLIYAASTLQSGVPSRFSGSGSGTDFTLTISSLQPEDVATYYCQKYNSAPLTFGGGTKVEIKR

SEQ ID NO: 10810 - protein, 113 aa, Artificial Sequence
  source: /note="Description of Artificial Sequence: Synthetic polypeptide"
DIVMTQTPLSSPVTLGQPASISCRSSQSLVHSDGNTYLSWLQQRPGQPPRLLIYKISNRFSGVPDRFSGSGAGTDFTLKISRVEAEDVGVYYCMQATQFPQTFGQGTKVEIKR

SEQ ID NO: 10811 - protein, 108 aa, Artificial Sequence
  source: /note="Description of Artificial Sequence: Synthetic polypeptide"
DIQLTQSPSSVSASVGNRVTITCRASQGISSWLAWYQQKPGKAPNLLIYAISSLRSGVPSRFSGSGSGTDFTLTISSLQPEDFATYYCQQAKSFPYTFGQGTKVEIKR

SEQ ID NO: 10812 - protein, 108 aa, Artificial Sequence
  source: /note="Description of Artificial Sequence: Synthetic polypeptide"
DIQMTQSPSSFSASTGNRVTITCRASQGISSYLAWYHQKPRKAPKLLIYAASTLQSGVPSRFSGSGSGTDFTLTISSLQSEDFATYYCQQYYSYPWTFGQGTKVEIKR

SEQ ID NO: 10813 - protein, 108 aa, Artificial Sequence
  source: /note="Description of Artificial Sequence: Synthetic polypeptide"
DIQLTQSPSFLSASVGNRVTITCWASQDISSYLVWYQQKPGKAPKLLIYAASTLQSGVPSRFSGSGSGTEFTLTISSLQPEDFATYYCQQLNTCPFTFGPGTKVEIKR

SEQ ID NO: 10814 - protein, 109 aa, Artificial Sequence
  source: /note="Description of Artificial Sequence: Synthetic polypeptide"
DIQMTQSPSTLSASVGDRVTITCRASQSISSWLAWYQQKPGKAPKLLIYKASSLESGVPSRFTGSGSGTEFTLTISSLQPDDFATYYCQQYNSYSPWTFGQGTKVEIKR

SEQ ID NO: 10815 - protein, 108 aa, Artificial Sequence
  source: /note="Description of Artificial Sequence: Synthetic polypeptide"
DIPMTQSPSSFSASTGNRVTITCRASQGIRSYLAWYHQKPGKAPKLLIYAASTLQSGVPSRFTGSGSGTDFTLTISCLQSEDFATYYCQQYYSYPFTFGQGTKVEIKR

SEQ ID NO: 10816 - protein, 107 aa, Artificial Sequence
  source: /note="Description of Artificial Sequence: Synthetic polypeptide"
AIQMTQSPSSLSAYVGDRVTITCRASQDIRNDLGWYQQKPGKAPNLLIYDISSLQSGVPSRFSGSGSGTDFTLTISSLQPEDFATYYCLQDYNYPLTFGGGTKVEIK

SEQ ID NO: 10817 - protein, 108 aa, Artificial Sequence
  source: /note="Description of Artificial Sequence: Synthetic polypeptide"
DIPMTQSPSFLSASVGSRVTITCWASQGISSYLVWYQQKPGKAPKLLMYEASNPQSGVPSRFTGSGLGTEFIVPISSLQPEDFSSYYCQQINKYPLTFGGGTKMEIKR

SEQ ID NO: 10818 - protein, 108 aa, Artificial Sequence
  source: /note="Description of Artificial Sequence: Synthetic polypeptide"
AIQMTQSPSSLSASVGNRVTITCRASQGIRNDLGWYQQKPGKAPKLLIYAASSLQSGVPSRFSGSGSGTDFTLTISSLQPEDFATYYCLQDYNYPHTFGQGTKVEIKR

SEQ ID NO: 10819 - protein, 108 aa, Artificial Sequence
  source: /note="Description of Artificial Sequence: Synthetic polypeptide"
DIQMTQSPSFLSASVGNRVTITCWASQGIRNYLAWYHQKPGKAPKLLIYAASTLQSGVPSRFSGSGSGTDFTLTISSLQPEDFATYYCQQLNSYPLTFGGGTKVEIKR

SEQ ID NO: 10820 - protein, 113 aa, Artificial Sequence
  source: /note="Description of Artificial Sequence: Synthetic polypeptide"
DVVMTQTPLSSPVTLGQPASISCRSSQGLVRSDGNTYLSWLQQRPGQPPRLLIYKISNRFSGVPDRFSGSGAGTTFTLKINRVEVEDVGVYYCLQATQFPFTFGHGTKVEIKR

SEQ ID NO: 10821 - protein, 108 aa, Artificial Sequence
  source: /note="Description of Artificial Sequence: Synthetic polypeptide"
DIQLTQSPSSLSASVGNRVTITCRASQGISNYLAWFQQKPGKAPKSLIYAASSLQSGVPSKFSGSGSGTDFTLTISSLQPEDFATYYCQQYNSYPLTFGGGTKLEIKR

SEQ ID NO: 10822 - protein, 108 aa, Artificial Sequence
  source: /note="Description of Artificial Sequence: Synthetic polypeptide"
DIQMTQSPSSLSASTGNRVTITCRASQGISSCLAWYHQKPGKAPKLLIYAASTLQSGVPSRFSGSGSGTDFTLTISCLQSEDFATYYCQQYYSYPLTFGGGTKVEIKR

SEQ ID NO: 10823 - protein, 113 aa, Artificial Sequence
  source: /note="Description of Artificial Sequence: Synthetic polypeptide"
DIVMTQTPLSSPVSLGHPASISCRSSQSLKKSDGNTYLSWLQQRPGQPPRLLIYNISNRFSGVPDRFSGSGAGTDFTLKITRVEAEDVGFYYCMQTTQFPFTFGPGTKVEIKR

SEQ ID NO: 10824 - protein, 108 aa, Artificial Sequence
  source: /note="Description of Artificial Sequence: Synthetic polypeptide"
AHPMTQSPSFLSASVGNRVTITCWASQGISSYLAWYQQKPGKAPKLLIYAASTLQSGVPSRFTGSGSGTEFTLTISSLQPEDFATYYCQQLNSYPRTFGQGTKLDIKR

SEQ ID NO: 10825 - protein, 108 aa, Artificial Sequence
  source: /note="Description of Artificial Sequence: Synthetic polypeptide"
DIQMTQSPSFLSASVGDRVTITCWASQGISSYLAWYQQKPGKAPKLLIYATSTLQSGVPSRFSGSGSGTEFTLTISSLQPEDFATYYCQQLNSYPLTFGGGTKVEIKR

SEQ ID NO: 10826 - protein, 112 aa, Artificial Sequence; identical to SEQ ID NO: 10794
  source: /note="Description of Artificial Sequence: Synthetic polypeptide"

SEQ ID NO: 10827 - protein, 114 aa, Artificial Sequence
  source: /note="Description of Artificial Sequence: Synthetic polypeptide"
DIQLTQSPDSLAVSLGERATINCKSSQSVLYSSNNKNYLTWYQQKPGQPPNLLIYWTSTRESGVPDRFSGSGSGTDFTLTISSLQAEDVAVYYCQQYYSIPYTFGQGTKVEIKR

SEQ ID NO: 10828 - protein, 114 aa, Artificial Sequence
  source: /note="Description of Artificial Sequence: Synthetic polypeptide"
AIQMTQSPDSLAVSLGERATINCKSSQSVLYSSDNENCLTWYQQKPGQPPKLLIYWASTRESGVPDRFSGSGSGTDFTLTISSLQAEDVAVYYCQQHYNIPYTFGQGTKVEIKR

SEQ ID NO: 10829 - protein, 114 aa, Artificial Sequence
  source: /note="Description of Artificial Sequence: Synthetic polypeptide"
DIQMTQSPDSLAVSLGERATINCKSSQSVLYSSNNKNYLTWYQQKPGQPPKLLIYWTSTRESGVPDRFSGSGSGTDFTLTISSLQAEDVAVYYCQQYYSTPYTFGQGTKVEIKR

SEQ ID NO: 10830 - protein, 114 aa, Artificial Sequence
  source: /note="Description of Artificial Sequence: Synthetic polypeptide"
AIRMTQSPDSLAVSLGERATINCKSSQSVLYSSDNKNYLVWYQQKPGQPPNLLIYWASTRESGVPDRFSGSGSGTDFTLTISSLQAEDVAVYYCQQHYNPPYSFGQGTKVEIKR

SEQ ID NO: 10831 - protein, 114 aa, Artificial Sequence
  source: /note="Description of Artificial Sequence: Synthetic polypeptide"
DIQMTQSPDSLTVSLGERATINCKSSQSVLYSSNNKNYLTWYQQKPGQPPKLLIYWTSTRESGVPDRFSGSGSGTDFTLTISSLQAEDVAVYYCQQYYSTPYTFGQGTKVEIKR

SEQ ID NO: 10832 - protein, 108 aa, Artificial Sequence
  source: /note="Description of Artificial Sequence: Synthetic polypeptide"
DIQMTQSPDFQSVTPKEKVTITCRASQSIGSSLHWYQQKPDQSPKLLIKYASQSFSGVPSRFSGSGSGTDFTLMINSLEAEDAATYYCHQSGGLPWTFGQGTKVEIKR

SEQ ID NO: 10833 - protein, 114 aa, Artificial Sequence
  source: /note="Description of Artificial Sequence: Synthetic polypeptide"
DIQMTQSPDSLAVSLGERATINCKSSQTVLHSSNNQNNLVWYQQKPGQPPKLLIYWASTRESGVPDRFSGSGSGTDFTLTISSLQAEDVAIYYCQQYYSTPYTFGQGTKLEIKR

SEQ ID NO: 10834 - protein, 108 aa, Artificial Sequence
  source: /note="Description of Artificial Sequence: Synthetic polypeptide"
DIQMTQSPSSLSASVGDRVTITCRASQGISNYLAWFQQKPGKAPKSLIYGASSLQSGVPSKFSGSGSGTDFTLTISSLQPEDFATYYCQQYNSYPLTFGGGTKVEIKR

SEQ ID NO: 10835 - protein, 114 aa, Artificial Sequence
  source: /note="Description of Artificial Sequence: Synthetic polypeptide"
DIQMTQSPDSLAVSLGERATINCKSSQSVLFISNNKNYLTWYQQKPGQPPKLLIYWTSTRESGVPDRFSGSGSGTDFTLTISSLQAEDVAVYYCQQYYSTPYTFGQGTKVEIKR

SEQ ID NO: 10836 - protein, 108 aa, Artificial Sequence; identical to SEQ ID NO: 10834
  source: /note="Description of Artificial Sequence: Synthetic polypeptide"

SEQ ID NO: 10837 - protein, 113 aa, Artificial Sequence
  source: /note="Description of Artificial Sequence: Synthetic polypeptide"
DIVMTQSPLSLPVTPGEPASISCRSSQSLLHSNGYNYLDWYLQKTGQSPQLLIYLGSNRASGVPDRFSGSGSGTDFTLKISRVEAEDVGIYYCMQALQALPFTFGPGTKVDIK

SEQ ID NO: 10838 - protein, 114 aa, Artificial Sequence
  source: /note="Description of Artificial Sequence: Synthetic polypeptide"
DIQMTQSPNSLEVSLGERATINCKSSQSVLSTSNNKNYLTWYQQKPGQPPNLLIYWASTRESGVPDRFTGSGSGTDFTLTISSLQAEDVAVYYCQQYYNIPYTFGQGTKVEIKR

SEQ ID NO: 10839 - protein, 108 aa, Artificial Sequence
  source: /note="Description of Artificial Sequence: Synthetic polypeptide"
DIQMTQSPSSVSASVGDRVIITCRASQGIRTWLAWYQQKPGKAPKLLIYAASSLQSGVPSRFSGSGSGTEFTLTISSLQPEDFVTYYCQQVNSFPLTFGGGTKVEIKR

SEQ ID NO: 10840 - protein, 108 aa, Artificial Sequence
  source: /note="Description of Artificial Sequence: Synthetic polypeptide"
DIQMTQSPSSLSASVGDRVTITCRASQGISNYLAWYQQKPGKVPKLLIYAASTLQSGVPSRFSGSGSGTDFTLTISSLQPEDVATYYCQKYNSAPFTFGPGTKVEIKR

SEQ ID NO: 10841 - protein, 114 aa, Artificial Sequence
  source: /note="Description of Artificial Sequence: Synthetic polypeptide"
AIQMTQSPDSLAVSLGERATINCKSSQSVLYSSDNKNYLVWYQQKPGQPPNLLIYWASTRESGVPDRFSGSGSGTDFTLTISSLQAEDVAVYYCQQHYNPPYSFGQGTKVEIKR

SEQ ID NO: 10842 - protein, 114 aa, Artificial Sequence
  source: /note="Description of Artificial Sequence: Synthetic polypeptide"
DIQMTQSPDSLAVSLGERATINCKSSQSVLYSSNNKNYLVWYQQKPGQPPNLLIYWASTRESGVPDRFSGSGSGTDFTLTISSLQAEDVAVYYCQQYYNPPYTFGQGTKVEIKR

SEQ ID NO: 10843 - protein, 114 aa, Artificial Sequence
  source: /note="Description of Artificial Sequence: Synthetic polypeptide"
DIQMTQSPDSLAVSLGERATINCKSSQTVLHSSNNQNNLVWYQQKPGQPPKLLIYWASTRESGVPDRFSGSGSGTDFTLTISSLQAEDVAIYYCQQYYSTPYTFGQGTKVEIKR

SEQ ID NO: 10844 - protein, 114 aa, Artificial Sequence
  source: /note="Description of Artificial Sequence: Synthetic polypeptide"
AIRMTQSPDSLAVSLGERATINCKSSQSVLYSSNNKNYLTWYQQKPGQPPKLLIYWTSTRESGVPDRFSGSGSGTDFTLTISSLQAEDVAVYYCQQYYSTPYTFGQGTKVEIKR

SEQ ID NO: 10845 - protein, 114 aa, Artificial Sequence
  source: /note="Description of Artificial Sequence: Synthetic polypeptide"
DIQMTQSPDSLAVSLGERATINCKSSQSVLYSSNNKNYLAWYQQKPGQPPKLLIYWASTRESGVPDRFSGSGSGTDFTLTISSLQAEDVAVYYCQQYYSSPYTFGQGTKVEIKR

SEQ ID NO: 10846 - protein, 114 aa, Artificial Sequence
  source: /note="Description of Artificial Sequence: Synthetic polypeptide"
DIQMTQSPDSLAVSLGERATINCKSSQSVLYSSNNQNYLAWYQQKPGQPPKLLIYWASTRESGVPDRFSGSGSGTDFTLTISSLQAEDVAVYYCQQYYSTPYTFGQGTKVEIKR

SEQ ID NO: 10847 - protein, 108 aa, Artificial Sequence
  source: /note="Description of Artificial Sequence: Synthetic polypeptide"
DIQMTQSPSSLSASVGDRGTITCRTSQSIRSYLNWYQQKPGKAPKLLIYAASSLQSGVPSRFSGSGSGTDFTLTISSLQPEDFATYFCQQSYSSPFTFGQGTKVEIKR

SEQ ID NO: 10848 - protein, 114 aa, Artificial Sequence
  source: /note="Description of Artificial Sequence: Synthetic polypeptide"
DIQMTQSPDSLAVSLGERATINCKSSQSVLYSSNNKNYLGWYQQKAGQPPKLLIYWASTRESGVPDRFSGSGSGTDFTLTISSLQAEDVAVYYCQQYYGIPWTFGQGTKVEIKR

SEQ ID NO: 10849 - protein, 114 aa, Artificial Sequence
  source: /note="Description of Artificial Sequence: Synthetic polypeptide"
DIQMTQSPESLAVSLGERATINCKSSQSVLDSSNNRNYLAWYQQKPGQPPKLFIYWASTRESGVPDRFSGSGSGTDFTLTISSLQAEDVAVYYCQQYYSTPLTFGGGTKLEIKR

SEQ ID NO: 10850 - protein, 108 aa, Artificial Sequence
  source: /note="Description of Artificial Sequence: Synthetic polypeptide"
DIQMTQSPSSLSASVGDRVTITCRASQGISNYLAWYQQKPGKVPKLLIYAASTLQSGVPSRFSGSGSGTDFTLTISSLQPEDVATYYCQKYNSAPLTFGGGTKVEIKR

SEQ ID NO: 10851 - protein, 108 aa, Artificial Sequence
  source: /note="Description of Artificial Sequence: Synthetic polypeptide"
DIQMTQSPSFLSASVGDRVTITCWASQGISSYLAWYQQKPGKAPKLLIYAASTLQSGVPSRFSGSGSGTEFTLTISSLQPEDFATYYCQQFNSYPPTFGQGTKVEIKR

SEQ ID NO: 10852 - protein, 114 aa, Artificial Sequence
  source: /note="Description of Artificial Sequence: Synthetic polypeptide"
DIRMTQSPDSLAVSLGERATINCKSSQSVLSSSNNKNYLAWYQQKPGQPPKLLIYWASTRESGVPDRFSGSGSGTDFSLTISSLQAEDLAVYYCQQYYSTPLTFGGGTKVEIKR

SEQ ID NO: 10853 - protein, 108 aa, Artificial Sequence
  source: /note="Description of Artificial Sequence: Synthetic polypeptide"
DIQMTQSPSSLSASVGDRVTITCRASQGINNYLAWFQQKPGKAPKSLIYAASSLQSGVPSKFSGSGSGTDFTLTISSLQPEDVAIYYCQQYNSYPLTFGGGTKVEIKR

SEQ ID NO: 10854 - protein, 114 aa, Artificial Sequence
  source: /note="Description of Artificial Sequence: Synthetic polypeptide"
DIQLTQSPDSLAVSLGERATINCKSSQSVLYSSNNKNYLAWYQQKPGQPPKLLFYWASTRESGVPDRFSGSGSGTDFTLTISSLQAEDVAVYYCHQSYNIPYTFGQGTKVEIKR

SEQ ID NO: 10855 - protein, 113 aa, Artificial Sequence
  source: /note="Description of Artificial Sequence: Synthetic polypeptide"
DIQMTQSPLSLPVTPGEPASISCRSSQSLLHSNGYNFLDWYLQKPGQSPQLLIYLGSNRASGVPDRFSGSGSGTDFTLKFSRVEAEDVGVYYCMQTLQTPWTFGQGTKVEIKR

SEQ ID NO: 10856 - protein, 108 aa, Artificial Sequence
  source: /note="Description of Artificial Sequence: Synthetic polypeptide"
DIQMTQSPSSLSASVGDRVTITCRASQGISNYLAWFQQKPGKAPKSLIYAASSLHSGVPSKFSGSGSGTDFTLTISSLQPEDFATYYCQQYNSYPLTFGGGTKVEIKR

SEQ ID NO: 10857 - protein, 108 aa, Artificial Sequence
  source: /note="Description of Artificial Sequence: Synthetic polypeptide"
DIQMTQSPSFLSASVGDRVTITCWASQGSGSYLAWYQQKPGKAPKLLIYAASTLQSGVPSRFSGSGSGTEFTLTISSLQPEDFATYYCQQLNNYLFIFGPGTKVEIKR

SEQ ID NO: 10858 - protein, 108 aa, Artificial Sequence
  source: /note="Description of Artificial Sequence: Synthetic polypeptide"
DIQMTQSPSSLSASVGDRVTITCRASQGINNFLAWFQQKPGKAPKSLIYAASRLQSGVPSKFSGSGSGTDFTLTISSLQPEDFATYYCLQYNSYFRTFGQGTKVEIKR

SEQ ID NO: 10859 - protein, 108 aa, Artificial Sequence; identical to SEQ ID NO: 10834
  source: /note="Description of Artificial Sequence: Synthetic polypeptide"

SEQ ID NO: 10860 - protein, 108 aa, Artificial Sequence
  source: /note="Description of Artificial Sequence: Synthetic polypeptide"
DIQMTQSPSSLSASVGDRVTITCRASQGISNYLAWFQQKPGKAPKSLIYAASSLHSGVPSKFSGSGSGTDFTLTISSLQPEDFATYYCLQYNSYPLTFGGGTKVEIKR

SEQ ID NO: 10861 - protein, 108 aa, Artificial Sequence; identical to SEQ ID NO: 10856
  source: /note="Description of Artificial Sequence: Synthetic polypeptide"

SEQ ID NO: 10862 - protein, 108 aa, Artificial Sequence
  source: /note="Description of Artificial Sequence: Synthetic polypeptide"
DIQMTQSPSSLSASVGDRVTITCRASQDISNYLAWFQQKPGKAPKSLIYAASSLQSGVPSKFSGSGSGTDFTLTISSLQPEDFATYYCHQYNSYPLTFGGGTKVEIKR

SEQ ID NO: 10863 - protein, 113 aa, Artificial Sequence; identical to SEQ ID NO: 10855
  source: /note="Description of Artificial Sequence: Synthetic polypeptide"

SEQ ID NO: 10864 - protein, 113 aa, Artificial Sequence
  source: /note="Description of Artificial Sequence: Synthetic polypeptide"
DIQLTQSPLSLPVTPGEPASISCRSSQSLLHSNGYNFLDWYLQKPGQSPQLLIYLGSNRASGVPDRFSGSGSGTDFTLKFSRVEAEDVGLYYCMQTLQTPWTFGQGTKVEIKR

SEQ ID NO: 10865 - protein, 114 aa, Artificial Sequence
  source: /note="Description of Artificial Sequence: Synthetic polypeptide"
DIQMTQSPDSLAVSLGERATINCKSSQSVLYSSNNKNYLAWYQQKPGQPPKLLFYWASARESGVPDRFSGSGSGTDFTLTISSLQAEDVAVYYCHQSYNIPYTFGQGTKVEIKR

SEQ ID NO: 10866 - protein, 108 aa, Artificial Sequence
  source: /note="Description of Artificial Sequence: Synthetic polypeptide"
DIQMTQSPSSLSASVGDRVTITCRASQGISNYLAWFQQKPGKAPKSLIYAASSLHSGVPSKFSGSGSGTDFTLTISSLQPEDFATYYCQQYNSYPLTFGGGTKLEIKR

SEQ ID NO: 10867 - protein, 108 aa, Artificial Sequence; identical to SEQ ID NO: 10862
  source: /note="Description of Artificial Sequence: Synthetic polypeptide"

SEQ ID NO: 10868 - protein, 108 aa, Artificial Sequence; identical to SEQ ID NO: 10860
  source: /note="Description of Artificial Sequence: Synthetic polypeptide"

SEQ ID NO: 10869 - protein, 108 aa, Artificial Sequence
  source: /note="Description of Artificial Sequence: Synthetic polypeptide"
DIQMTQSPSSVSASVGDRVTITCRASQGISNYLAWFQQKPGKAPKSLIYAASSLHSGVPSKFSGSGSGTDFTLTISSLQPEDFATYYCQQYNSYPLTFGGGTKVEIKR

SEQ ID NO: 10870 - protein, 107 aa, Artificial Sequence
  source: /note="Description of Artificial Sequence: Synthetic polypeptide"
DIQLTQSPSFLSTSVGDRVTITCWASQGISSYLAWYQQKPGKAPNLLIYTASTLQSGVPSRFSGSGSGTEFTLTISSLQPEDFATYYCQQLNSYPYTFGQGTKLEIK

SEQ ID NO: 10871 - protein, 114 aa, Artificial Sequence; identical to SEQ ID NO: 10829
  source: /note="Description of Artificial Sequence: Synthetic polypeptide"

SEQ ID NO: 10872 - protein, 113 aa, Artificial Sequence; identical to SEQ ID NO: 10855
  source: /note="Description of Artificial Sequence: Synthetic polypeptide"

SEQ ID NO: 10873 - protein, 108 aa, Artificial Sequence
  source: /note="Description of Artificial Sequence: Synthetic polypeptide"
DIQMTQSPSSLSASVGDRVTITCRASQGISNYLAWFQQKPGKAPKSLIYAASSLQSGVPSKFSGSGSGTDFTLTISSLQPEDFATYYCQQYNSYPLTFGGGTKVEIKR

SEQ ID NO: 10874 - protein, 108 aa, Artificial Sequence
  source: /note="Description of Artificial Sequence: Synthetic polypeptide"
DIQMTQSPSSLSASVGDRVTITCRASQGIRNDLDWYQQKPGKAPKRLIYTASSLQSGVPSRFSGSGSGTEFTLTISSLQPEDFATYYCLQYSNYPPTFGQGTKVEIKR

SEQ ID NO: 10875 - protein, 108 aa, Artificial Sequence
  source: /note="Description of Artificial Sequence: Synthetic polypeptide"
DIQMTQSPSSLSASVGDRVTITCRASQGISNYLAWFQQKPGKAPKSLIYAASSLHSGVPSKFSGSGSGTDFTLTISSLQPEDFATYYCQQYDSYPLTFGGGTKVEIKR

SEQ ID NO: 10876 - protein, 108 aa, Artificial Sequence
  source: /note="Description of Artificial Sequence: Synthetic polypeptide"
DIQMTQSPSSLSASVGDRVTITCRASQGINNYLAWFQQKPGKAPKSLIYAASSLQSGVPSKFSGSGSGTDFTLTISSLQPEDFAIYYCQQYNSYPLTFGGGTKVEIKR

SEQ ID NO: 10877 - protein, 108 aa, Artificial Sequence
  source: /note="Description of Artificial Sequence: Synthetic polypeptide"
DIQMTQSPSSLSASVGDRVTITCRASQGINNFLAWFQQKPGKAPKSLIYAASSLQSGVPSKFSGSGSGTDFTLTISSLQPEDFATYYCLQYSSYFRTFGQGTKVEIKR

SEQ ID NO: 10878 - protein, 114 aa, Artificial Sequence
  source: /note="Description of Artificial Sequence: Synthetic polypeptide"
AIQMTQSPDSLAVSLGERATINCRSSQSVLYSSTNKNYLAWYQQKPGQPPKLLIYWASTRDSGVPDRFSGSGSGTDFTLTISSLQAEDVAVYYCQQYYSIYRTFGQGTKVEIKR

SEQ ID NO: 10879 - protein, 114 aa, Artificial Sequence
  source: /note="Description of Artificial Sequence: Synthetic polypeptide"
DIQMTQSPDSLAVSLGERATINCKSSQSVLSSSNNENYLVWYQQKPGQPPKLLIYWASTREPGVPDRFSGGGSGTDFTLTISSLQAEDVAVYYCQQYHSIPYTFGQGTKVEIKR

SEQ ID NO: 10880 - protein, 114 aa, Artificial Sequence
  source: /note="Description of Artificial Sequence: Synthetic polypeptide"
DIQMTQSPDSLAVSLGERATINCKSSQSVLSSSNNKNYLTWYQQKPGQPPKLLIYWASTRESGVPDRFSGSGSGTDFTLTISSLQAEDVAVYYCQQYYSTPYTFGQGTKVEIKR

SEQ ID NO: 10881 - protein, 113 aa, Artificial Sequence
  source: /note="Description of Artificial Sequence: Synthetic polypeptide"
DIVMTQSPDSLAVSLGERATINCKSSQSVLSSSNNKNYLTWYQQKPGQPPKLLIYWASTRESGVPDRFSGSGSGTDFTLTISSLQAEDVAVYYCQQYYSTPYTFGQGTKLEIK

SEQ ID NO: 10882 - protein, 108 aa, Artificial Sequence
  source: /note="Description of Artificial Sequence: Synthetic polypeptide"
DIQMTQSPSSLSASVGNRVTITCRASQGIRNDLGWYQQKPGKAPKRLIYAASSLQSGVPSRFSGSGSGTEFTLTISSLQPEDFATYYCLQHNSYPLTFGGGTKVEIKR

SEQ ID NO: 10883 - protein, 108 aa, Artificial Sequence
  source: /note="Description of Artificial Sequence: Synthetic polypeptide"
DIQMTQSPSSLSASVGNRVTITCRASQGIRNDLGWYQQKPGKAPKRLIYAASSLQSGVPSRFTGSGSGTEFTLTISSLQPEDFATYYCLQHNSYPLTFGGGTKVEIKR

SEQ ID NO: 10884 - protein, 108 aa, Artificial Sequence
  source: /note="Description of Artificial Sequence: Synthetic polypeptide"
NIKMIQSPSSLFASVGVTVTITCRASQGIRNNLVWYQQKPGKAPKLLIYDASSLRIWVPSRFSGSGWGAEFILPINSRQPEDYASYYCRQHNKYPFTFGQGTKMEIKR

SEQ ID NO: 10885 - protein, 108 aa, Artificial Sequence
  source: /note="Description of Artificial Sequence: Synthetic polypeptide"
DIQMTQSPSSLSASVGNRVTITCRASQGIRSWLAWYHQKPGKAPKLLIYAASSLQSGVPSRFSGSGSGTEFTLTISSLQPDDFATYYCQQYNSYSYTFGQGTKVEIKR

SEQ ID NO: 10886 - protein, 108 aa, Artificial Sequence
  source: /note="Description of Artificial Sequence: Synthetic polypeptide"
DIQMTQSPSSLSASVGDRVTITCRASQGIRNDLGWYQQKPGKAPKLLIYAASSLQSGVPSRFSGSGSGTDFTLTISSLQPEDFATYYCQQDNNYPSTFGQGTKVEIKR

SEQ ID NO: 10887 - protein, 108 aa, Artificial Sequence
  source: /note="Description of Artificial Sequence: Synthetic polypeptide"
DIQMTQSPSSLSASVGDRVTITCRASQGISNYLGWYQQKPGKAPKPLIYAASSLQSGVPSRFSGSGSGTDFTLTITSLQPEDFATYYCLQHNSYPFTFGRGTKVEIKR

SEQ ID NO: 10888 - protein, 114 aa, Artificial Sequence; identical to SEQ ID NO: 10842
  source: /note="Description of Artificial Sequence: Synthetic polypeptide"

SEQ ID NO: 10889 - protein, 108 aa, Artificial Sequence
  source: /note="Description of Artificial Sequence: Synthetic polypeptide"
DIQLTQSPSSLSASVGDRVTITCRASQGIRNDLGWYQQKPGKAPKRLIYAASSLQSGVPSRFSGSGSGTEFTLTISSLQPEDFATYYCLQHNSYPCTFGQGTKVEIKR

SEQ ID NO: 10890 - protein, 108 aa, Artificial Sequence
  source: /note="Description of Artificial Sequence: Synthetic polypeptide"
DIQLTQSPSSLSASVGNRVTITCRASQGIRNDLAWYQQKPGKAPKLLIYAASTLQTGVPSRFSGSGSGTDFTLTISSLQPEDVATYYCQKYNSAPLTFGGGTKVEIKR

SEQ ID NO: 10891 - protein, 108 aa, Artificial Sequence
  source: /note="Description of Artificial Sequence: Synthetic polypeptide"
DIQMTQSPSSLSASVGNRVTITCRASQGIRNDLGWYHQKPGKAPKLLIYAASSLQSGVPSRFSGSGSGTDFTLTISSLQPEDFATYYCLQDYNYPRTFGQGTKVEIKR

SEQ ID NO: 10892 - protein, 108 aa, Artificial Sequence
  source: /note="Description of Artificial Sequence: Synthetic polypeptide"
DIQMTQSPSSLSASVGDRVTITCRASQGIRNDLGWYHQKPGKAPKLLIYAASSLQSGVPSRFSGSGSGTEFTLTISSLQPEDFATYYCLQHNSYPLTFGRGTKVEIKR

SEQ ID NO: 10893 - protein, 108 aa, Artificial Sequence
  source: /note="Description of Artificial Sequence: Synthetic polypeptide"
DIQMTQSPSSLSASVGDRVTITCRASQGIRNDLGWYQQKPGKAPKRLIYAASSLQSGVPSRFSGSGSGTEFTLTISSLQPEDFATYYCLQHNSYPLTFGGGTKVEIKR

SEQ ID NO: 10894 - protein, 108 aa, Artificial Sequence
  source: /note="Description of Artificial Sequence: Synthetic polypeptide"
DIQMTQSPSSLSASVGNRVTITCRASQGIRNDLGWYHLNPRKATKRLIYAASILQSGVPSWFIGNGSGTDFTLTISSLQPEDFATYYCLQDNSYPLTFGRGTKVEIKR

SEQ ID NO: 10895 - protein, 108 aa, Artificial Sequence
  source: /note="Description of Artificial Sequence: Synthetic polypeptide"
DIQMTQSPSSLSASVGNRVTITCRASQGIRNDLGWYQQKPGKAPKRLIYAASSLQSGVPSRFSGSGSGTEFTLTISSLQPEDFATYYCLQHNSYPWTFGQGTKVEIKR

SEQ ID NO: 10896 - protein, 108 aa, Artificial Sequence
  source: /note="Description of Artificial Sequence: Synthetic polypeptide"
DIQMTQSPSSLSASVGNRVTITCRASQGIRNDLGWYHQKPGKAPKHLIYAASSLQSGVPSRFTGSGSGTEFTLTITSLQPEDFATYYCLQHNSYPCTFGQGTKVEIKR

SEQ ID NO: 10897 - protein, 108 aa, Artificial Sequence
  source: /note="Description of Artificial Sequence: Synthetic polypeptide"
DIPMTQSPSSLSASVGNRVTITCRASQGFNNYLAWYHQKPGKVPNLLIYAASTLQSGVPSRFSGSGSGTDFTLTIHSLQPEDVATYYCPKYNSAPFTFGPGTKVEIKR

SEQ ID NO: 10898 - protein, 108 aa, Artificial Sequence
  source: /note="Description of Artificial Sequence: Synthetic polypeptide"
DIQMTQSPSSLSASVGDRVTITCRASQGISNYLAWYQQKPGKAPKLLIYAASTLQTGVPSRFTGSGSGTDFTLPINSLQPEDVATYYCQKYNRAPLTFGGGTKVEIKR

SEQ ID NO: 10899 - protein, 108 aa, Artificial Sequence
  source: /note="Description of Artificial Sequence: Synthetic polypeptide"
DIQLTQSPSSVSASVGDRVTITCRASQGISSWLAWYQQKPGKAPKLLIYAASSLQSGVPSRFSGSGSGTDFTLTISSLQPEDFATYYCQQANSFPLTFGGGTKVEIKR

SEQ ID NO: 10900 - protein, 108 aa, Artificial Sequence
  source: /note="Description of Artificial Sequence: Synthetic polypeptide"
DIQMTQSPSSLSASVGDRVTITCRASQGIRNDLGWYQQKPGKAPKLLIYAASSLQSGVPSRFTGIGSGTEFTLTITSLQPEHFATYYCLQANNYPFTFGQGTKMEIKR

SEQ ID NO: 10901 - protein, 108 aa, Artificial Sequence
  source: /note="Description of Artificial Sequence: Synthetic polypeptide"
DIQMTQSPSSLSASVGDRVTITCRASQGISIYLAWCQQKPGKAPKSLIYAASSLQSGVPSKFSGSGSGTEFTLTISSLQPEDFATYYCQQLNSYPLTFGRGTKLEIKR

SEQ ID NO: 10902 - protein, 113 aa, Artificial Sequence
  source: /note="Description of Artificial Sequence: Synthetic polypeptide"
DIVMTQTPLSSPVTLGQPASISCRSSQSLVRSDGNTYLSWLQQRPGQPPRLLIYKISNRFSGVPDRFSGSGAGTDFTLKISRVDAEDVGVYYCMQATQFPFTFGPGTKVEIKR

SEQ ID NO: 10903 - protein, 113 aa, Artificial Sequence
  source: /note="Description of Artificial Sequence: Synthetic polypeptide"
DIVMTQTPLSSPVTLGQPASISCRSSQSLEKSDGNTYLSWLQQRPGQPPRLLIYKISNRFSGVPDRFSGSGAGTDFTLRISRVEAEDVGIYYCVQTTQFPFTFGPGTKVEIKR

SEQ ID NO: 10904 - protein, 108 aa, Artificial Sequence
  source: /note="Description of Artificial Sequence: Synthetic polypeptide"
DIQLTQSPSFLSASVGNRVTITCWASQGISSYLAWYQQKPGKAPKLLIYAASTLQSGVPSRFSGSGSGTEFTLTISSLQPEDFATYYCQQLNSYPRTFGQGTKVEIKR

SEQ ID NO: 10905 - protein, 108 aa, Artificial Sequence
  source: /note="Description of Artificial Sequence: Synthetic polypeptide"
DIQMTQSPSSLSASVGNRVTITCRASQGISNYLACYHQKPGKVPKLLIYAASTLQSGVPSRFSGSGSGTDFTLTISSLQPEDVATYYCQKYNSAPFTFGPGTKVDIKR

SEQ ID NO: 10906 - protein, 114 aa, Artificial Sequence
  source: /note="Description of Artificial Sequence: Synthetic polypeptide"
DIQMTQSPDSLAVSLGERATINCKSSQSVLYSSNNKNYLAWFQQKPGQPPYLLISWASTRESGVPDRFSGSGSGTDFTLTISSLQAGDVAVYYCQQYYSIPWTFGQGTKLEIKR

SEQ ID NO: 10907 - protein, 114 aa, Artificial Sequence
  source: /note="Description of Artificial Sequence: Synthetic polypeptide"
AIRMTQSPDSLAMSLGERATISCKSSQSVLYSSNNKNYLAWYQQKPGQPPKLLISWASTRESGVPDRFSGSGSGTDFTLTISSLQAEDVAVYYCLQYYSIPWTFGQGTKVEIKR

SEQ ID NO: 10908 - protein, 114 aa, Artificial Sequence
  source: /note="Description of Artificial Sequence: Synthetic polypeptide"
DIQMTQSPDSLAVSLGERATINCKSSQNLLYSSHNKNYLTWYQQKPGQPPKLLIYWASTRESGVPDRFSGSGSGTDFTLTISSLQAEDVAVYYCQQYYTTPYTFGQGTKVEIKR

SEQ ID NO: 10909 - protein, 108 aa, Artificial Sequence
  source: /note="Description of Artificial Sequence: Synthetic polypeptide"
DIQMTQSPSSLSASVGDRVTITCRASQGIRNDLGWYQQKPGKAPKRLIYAASSLQSGVPSRFSGSGSGTEFTLTISSLQPEDFATYYCQQHNSYPLTFGQGTKVEIKR

SEQ ID NO: 10910 - protein, 114 aa, Artificial Sequence
  source: /note="Description of Artificial Sequence: Synthetic polypeptide"
DIQMTQSPDSLAVSLGERATINCKSSQSVLYSSNNKNYLTWYQQKPGQPPKLLIYWTSTRESGVPDRFSGSGSGTDFTLTISSLQAEDVAVYYCQQYYNTPYTFGQGTKLEIKR

SEQ ID NO: 10911 - protein, 114 aa, Artificial Sequence
  source: /note="Description of Artificial Sequence: Synthetic polypeptide"
DIQMTQSPDSLAVSLGERATINCQSSQSVLYSSKNKNYLAWYQQKPGQPPNLLIYWASTRESGVPDRFSGSGSGTDFTLTISSLQAEDVAVYYCQQYYSTPWTFGQGTKVEIKR

SEQ ID NO: 10912 - protein, 114 aa, Artificial Sequence
  source: /note="Description of Artificial Sequence: Synthetic polypeptide"
DIQMTQSPDSLAVSLGERATIDCKSSQSVLSSSNNENYLTWYQQKPGQPPKLLIYWASTRESGVPDRFSGSGSGTDFTLTISSLQAEDVAVYYCQQYYSIPYTFGQGTKVEIKR

SEQ ID NO: 10913 - protein, 114 aa, Artificial Sequence
  source: /note="Description of Artificial Sequence: Synthetic polypeptide"
DIQMTQSPDSLAVSLGERATINCKSSQSILYSSKNKNYLAWYQQKPGQPPNLLIYWASTRESGVPDRFSGSGSGTDFTLTISSLQAEDVAFYYCHQYYSTPWTFGQGTKVEIKR

SEQ ID NO: 10914 - protein, 108 aa, Artificial Sequence
  source: /note="Description of Artificial Sequence: Synthetic polypeptide"
DIQMTQSPSSLSASVGDRVTITCRASQGISNYLGWYQQKPGKAPKRLMYAASSLQTGVPSRFSGSGSGTEFTLTISSLQPEDFATYYCLQHNSDPLTFGAGTKVEIKR

SEQ ID NO: 10915 - protein, 114 aa, Artificial Sequence
  source: /note="Description of Artificial Sequence: Synthetic polypeptide"
DIQMTQSPNSLAVSLGERASINCKSSQNILFRSHNKNFLTWYQQKPGQPPKLLIYWASTRESGVPDRFSGNGSGTDFTLTISSLQAEDVAVYYCQQYSSTPYTFGQGTKVEIKR

SEQ ID NO: 10916 - protein, 114 aa, Artificial Sequence
  source: /note="Description of Artificial Sequence: Synthetic polypeptide"
DIQMTQSPDSLAVSLGERATINCKSSQSVLYSSKNKNYLAWYQQKPGQSPKLVIYWASTRESGVPDRFSGSGSGTDFTLTISSLQAEDVAVYYCHQYYSSPWTFGQGTKVEIKR

SEQ ID NO: 10917 - protein, 114 aa, Artificial Sequence
  source: /note="Description of Artificial Sequence: Synthetic polypeptide"
DIQMTQSPDSLAVSLGERATINCKSSQSVLYSSKNKNYLAWYQQKPGQPPKLLIYWASTRESGVPDRFSGSGSGTNFTLTISGLQAEDVAVYFCQQYYSTPWTFGQGTKVEIKR

SEQ ID NO: 10918 - protein, 114 aa, Artificial Sequence
  source: /note="Description of Artificial Sequence: Synthetic polypeptide"
DIQMTQSPDSLAVSLGERATINCKSSQSVLSSSNNKNYLTWYQQKPGQPPKLLIYWTSTRESGVPDRFSGSGSGTDFTLTISSLQAEDVAVYYCQQYYNIPYTFGQGTKVEIKR

SEQ ID NO: 10919 - protein, 108 aa, Artificial Sequence
  source: /note="Description of Artificial Sequence: Synthetic polypeptide"
DIQMTQSPSSVSASVGDRVTITCRASQGIRSWLAWYQQKPGKAPKLLIYAASSLQSGVPSRFSGSGSGTDFTLTISSLQPEDFAIYYCQQVNSFPLTFGGGTKVEIKR

SEQ ID NO: 10920 - protein, 114 aa, Artificial Sequence
  source: /note="Description of Artificial Sequence: Synthetic polypeptide"
DIQMTQSPDSLAVSLGERATINCKSSQSVLYSSSNKNYLTWYQQKPGQPPKLLIYWASTRESGVPDRFSGSGSGTDFTLTISSLQAEDVAVYYCQQYYNIPYTFGQGTKVEIKR

SEQ ID NO: 10921 - protein, 114 aa, Artificial Sequence
  source: /note="Description of Artificial Sequence: Synthetic polypeptide"
DIQMTQSPDSLAVSLGERATINCKSSQSVLYSSNNKNYLTWYQQKPGQPPKLLIYWTSTRESGVPDRFSGSGSGTDFTLTISSLQAEDVAVYYCQQYFSTPYTFGQGTKVEIKR

SEQ ID NO: 10922 - protein, 108 aa, Artificial Sequence
  source: /note="Description of Artificial Sequence: Synthetic polypeptide"
DIQMTQSPSSVSASVGDRVTITCRASQGIRSWLAWYQQKPGKAPKLLIYAASSLQSGVPSRFSGSGSGTDFTLTISSLQPVDFATYYCQQVNSFPLTFGGGTKVEIKR

SEQ ID NO: 10923 - protein, 114 aa, Artificial Sequence
  source: /note="Description of Artificial Sequence: Synthetic polypeptide"
DIQMTQSPDSLAVSLGERATINCKSSQNLLYSSHNKNYLTWYQQKPGQPPKLLIYWASTRESGVPDRFSGSGSGTDFTLTISSLQAEDVAVYYCQQYYSTPYTFGQGTKVEIKR

SEQ ID NO: 10924 - protein, 114 aa, Artificial Sequence
  source: /note="Description of Artificial Sequence: Synthetic polypeptide"
DIQMTQSPHSLAVSLGERATINCKSSQSVLYSSKNKNYLAWYQQKPGQAPKLLIYWASTRESGVPDRFSGSGSGTDFTLTISSLQAEDVAVYYCHQYYSNPWTFGQGTKVEIKR

SEQ ID NO: 10925 - protein, 108 aa, Artificial Sequence
  source: /note="Description of Artificial Sequence: Synthetic polypeptide"
AIRMTQSPSSLSASVGDRVTITCRASQGISNYLAWFQQKPGKAPKSLIYAASSLQSGVPSKFSGSGSGTDFTLTISSLQPEDFATYYCQQYNSYPFTFGPGTKLEIKR

SEQ ID NO: 10926 - protein, 114 aa, Artificial Sequence
  source: /note="Description of Artificial Sequence: Synthetic polypeptide"
DIQMTQSPDSLAVSLGERATINCKSSQSVLYSSNNENYLTWYQQKPGQPPKLLIYWTSTRESGVPDRFSGSGSGTDFTLTISSLQAEDVAVYYCQQYYSIPYTFGQGTKVEIKR

SEQ ID NO: 10927 - protein, 108 aa, Artificial Sequence
  source: /note="Description of Artificial Sequence: Synthetic polypeptide"
DIQMTQSPSSVSASVGDRVTITCRASQGISSWLAWYQQKPGKAPNLLIYNASSLQSGVPSRFSGSGSGTDFTLTISSLQPEDFATYYCQQANSFPLTFGGGTKVEIKR

SEQ ID NO: 10928 - protein, 108 aa, Artificial Sequence
  source: /note="Description of Artificial Sequence: Synthetic polypeptide"
AIQMTQSPSSLSASVGDRVTITCRASQGIRNDLGWYQQKPGKAPKRLIYAASSLQSGVPSRFSGSGSGTEFTLTISSLQPEDFATYYCLQQNSYPLTFGGGTKVEIKR

SEQ ID NO: 10929 - protein, 108 aa, Artificial Sequence
  source: /note="Description of Artificial Sequence: Synthetic polypeptide"
DIQMTQSPSSLSTSVGDRVTITCRASQTISSYLDWYQQKPGKAPKLLIYAASSLQSGVPSRFSGSGSGTDLTLTITSLQPENFATYYCQQTYRAPYTFGQGTKVETKR

SEQ ID NO: 10930 - protein, 108 aa, Artificial Sequence; identical to SEQ ID NO: 10851
  source: /note="Description of Artificial Sequence: Synthetic polypeptide"

SEQ ID NO: 10931 - protein, 114 aa, Artificial Sequence
  source: /note="Description of Artificial Sequence: Synthetic polypeptide"
DIQLTQSPLSLPVTLGQPASISCRSSQSLVYSDGNTYLNWFQQRPGQSPRRLIYKVSNRDSGVPDRFSGSGSGTDFTLKISRVEAEDVGVYYCMQGTHWPIFTFGPGTKVEIKR

SEQ ID NO: 10932 - protein, 114 aa, Artificial Sequence
  source: /note="Description of Artificial Sequence: Synthetic polypeptide"
AIQMTQSPLSLSVTLGQPASISCRSSQSLVYSDGNTYLNWFQQRPGQSPRRLIYKVSNRDSGVPDRFSGSGSGTDFTLKISRVEAEDVGVYYCMQGTHWPIFTFGPGTKVEIKR

SEQ ID NO: 10933 - protein, 114 aa, Artificial Sequence
  source: /note="Description of Artificial Sequence: Synthetic polypeptide"
DIQMTQSPDSLAVSLGERATINCKSSQSVLYSSNNQNYLAWYQQKPGQPPNLLIYWASTRESGVPDRFSGSGSGTDFTLTISSLQAEDVAVYYCQQYYNTPYTFGQGTKVEIKR

SEQ ID NO: 10934 - protein, 108 aa, Artificial Sequence
  source: /note="Description of Artificial Sequence: Synthetic polypeptide"
DIQMTQSPSSLSASVGDRGTVTCRASQNIRTYLNWYQQKPGKAPKLLIYAASSLQSGVPSRFSGSGSGTDFTLTISSLQPEDFATYYCQQSYGTPYTFGQGTKVEIKR

SEQ ID NO: 10935 - protein, 114 aa, Artificial Sequence
  source: /note="Description of Artificial Sequence: Synthetic polypeptide"
DIQLTQSPDSLAVSLGERATINCKSSQSVLYSSNNKNYLTWYQQKPGQPPKLLIYWASTRESGVPDRFSGSGSGTDFTLTISSLQAEDVAVYYCQQFYSFPYTFGQGTKVEIKR

SEQ ID NO: 10936 - protein, 114 aa, Artificial Sequence
  source: /note="Description of Artificial Sequence: Synthetic polypeptide"
DIQMTQSPNSLAVSLGERATINCKSSQSVFYSSYNKNHLAWYQQKPGQPPKLLIYWASTRESGVPDRFSGSGSGTDFTLTISSLQAEDVAVYYCQQYYSTELTFGGGTKVEIKR

SEQ ID NO: 10937 - protein, 108 aa, Artificial Sequence; identical to SEQ ID NO: 10851
  source: /note="Description of Artificial Sequence: Synthetic polypeptide"

SEQ ID NO: 10938 - protein, 108 aa, Artificial Sequence
  source: /note="Description of Artificial Sequence: Synthetic polypeptide"
DIQMTQSPSSLSASVGDRGTITCRASQIINTYLNWYQQKPGKAPKLLIYAASSLQSGVPSRFSGSGSGTDFTLTISSLQPEDFATYYCQQSYSSPFTFGQGTKVEIKR

SEQ ID NO: 10939 - protein, 114 aa, Artificial Sequence
  source: /note="Description of Artificial Sequence: Synthetic polypeptide"
DIVMTQSPDSLAVSLGERATINCKSSQSVLYSSNNKNYLAWYQQKPGQPPKLLFYWASARESGVPDRFSGSGCGTDFTLTISSLQAEDVAVYYCHQSYNIPYTFGQGTKVEIKR

SEQ ID NO: 10940 - protein, 108 aa, Artificial Sequence
  source: /note="Description of Artificial Sequence: Synthetic polypeptide"
AIQMTQSPSFLSASVGDRVTITCWASQGISNYLAWYQQKPGKAPKFLIYAASTLQSGVPSRFSGSGSGTEFTLTISSLQPEDFATYYCLQLNNNLFIFGPGTKVDIKR

SEQ ID NO: 10941 - protein, 108 aa, Artificial Sequence
  source: /note="Description of Artificial Sequence: Synthetic polypeptide"
DIQMTQSPSSLSASVGDRVTITCRASQGISNYLAWFQQKPGKAPKYLIYAASSLHSGVPSKFSGSGSGTDFTLTISSLQPEDFATYYCQQYNSYPLTFGGGTKVEIKR

SEQ ID NO: 10942 - protein, 108 aa, Artificial Sequence
  source: /note="Description of Artificial Sequence: Synthetic polypeptide"
DIQMTQSPSFLSASVGDRVTITCWASQGISSYLAWYQQKPGKAPKFLIYAASTLQSGVPSRFSGSGSGTEFTLTISSLQPEDFATYYCQQLNNNLFIFGPGTKVEIKR

SEQ ID NO: 10943 - protein, 114 aa, Artificial Sequence
  source: /note="Description of Artificial Sequence: Synthetic polypeptide"
DIQMTQSPDSLAVSLGERATINCRSNQSVLYSSTNKNYLAWYQQKPGQPPKLLIYWASTRDSGVPDRFSGSGSGTDFTLTISSLQAEDVAIYYCQQYYSIYRTFGQGTKVEIKR

SEQ ID NO: 10944 - protein, 114 aa, Artificial Sequence; identical to SEQ ID NO: 10943
  source: /note="Description of Artificial Sequence: Synthetic polypeptide"

SEQ ID NO: 10945 - protein, 114 aa, Artificial Sequence
  source: /note="Description of Artificial Sequence: Synthetic polypeptide"
DIVMTQSPYSLAVSLGERATINCRSSQNLLYSSTNKNYLPWYQQKPGQPPKLLIYWASTRDSGVPDRFSGSGSGTDFTLTISSLQAEDVAVYYCQQYYSIYRTFGQGTKLEIKR

SEQ ID NO: 10946 - protein, 108 aa, Artificial Sequence
  source: /note="Description of Artificial Sequence: Synthetic polypeptide"
DIQMTQSPSSLSASVGDRGTITCRASQDIRTYLNWYQQKPGKAPKLLIYAASSLQSGVPSRFSGSGSGTDFTLTISSLQPEDFATYYCQQSYGTPYTFGQGTKVEIKR

SEQ ID NO: 10947 - protein, 114 aa, Artificial Sequence; identical to SEQ ID NO: 10833
  source: /note="Description of Artificial Sequence: Synthetic polypeptide"

SEQ ID NO: 10948 - protein, 114 aa, Artificial Sequence; identical to SEQ ID NO: 10920
  source: /note="Description of Artificial Sequence: Synthetic polypeptide"

SEQ ID NO: 10949 - protein, 114 aa, Artificial Sequence; identical to SEQ ID NO: 10846
  source: /note="Description of Artificial Sequence: Synthetic polypeptide"

SEQ ID NO: 10950 - protein, 113 aa, Artificial Sequence
  source: /note="Description of Artificial Sequence: Synthetic polypeptide"
DIVMTQSPDSLAVSLGERATINCKSSQSVLYSSNNQNYLAWYQQKPGQPPKLLIYWASTRESGVPDRFSGSGSGTDFTLTISSLQAEDVAVYYCQQYYSTPYTFGQGTKLEIK

SEQ ID NO: 10951 - protein, 108 aa, Artificial Sequence; identical to SEQ ID NO: 10847
  source: /note="Description of Artificial Sequence: Synthetic polypeptide"

SEQ ID NO: 10952 - protein, 108 aa, Artificial Sequence; identical to SEQ ID NO: 10934
  source: /note="Description of Artificial Sequence: Synthetic polypeptide"

SEQ ID NO: 10953 - protein, 107 aa, Artificial Sequence
  source: /note="Description of Artificial Sequence: Synthetic polypeptide"
DIQMTQSPSSVSASVGDRVTITCRSSQDINNWLVWYQQKPGKAPKVLIYGASRLQSGVPSRFSGSGSGTDFTLTISSLQPEDFATYYCQQANSFPLTFGGGTKVEIK

SEQ ID NO: 10954 - protein, 114 aa, Artificial Sequence
  source: /note="Description of Artificial Sequence: Synthetic polypeptide"
DIQMTQSPDSLAVSLGERATINCKSSQSVLYSSNNKNYLAWYQQKPGQPPKLLIYWASTRESGVPDRFSGSGSGTDFTLTISSLQAEDVAVYYCQQYYSTPWTFGQGTKVEIKR

SEQ ID NO: 10955 - protein, 107 aa, Artificial Sequence
  source: /note="Description of Artificial Sequence: Synthetic polypeptide"
DIQMTQSPSSLSASVGDRGTITCRASQDIRTYLNWYQQKPGKAPKLLIYAASSLQSGVPSRFSGSGSGTDFTLTISSLQPEDFATYYCQQSYGTPYTFGQGTKLEIK

SEQ ID NO: 10956 - protein, 108 aa, Artificial Sequence; identical to SEQ ID NO: 10889
  source: /note="Description of Artificial Sequence: Synthetic polypeptide"

SEQ ID NO: 10957 - protein, 112 aa, Artificial Sequence
  source: /note="Description of Artificial Sequence: Synthetic polypeptide"
DIVMTQTPLSSPVTLGQPASISCRSSQSLVRSDGNTYLSWLQQRPGQPPRLLIYKISNRFSGVPDRFSGSGAGTDFTLKISRVEADDVGVYYCMQTTQFPFTFGPGTKVDIK

SEQ ID NO: 10958 - protein, 112 aa, Artificial Sequence
  source: /note="Description of Artificial Sequence: Synthetic polypeptide"
DIVMTQTPLSSPVTLGQPASISCRSSHSLVRSDGNTYLSWLQQRPGQPPRLLIYKISNRFSGVPDRFSGTGAGTDFTLKINRVEAEDVGFYYCMQATQFPFTFGPGTKVDIK

SEQ ID NO: 10959 - protein, 108 aa, Artificial Sequence
  source: /note="Description of Artificial Sequence: Synthetic polypeptide"
DIQMTQSPSFLSASVGDRVTITCWASQGISSYLAWYQQKPGKAPKLLIYASSTLQSGVPSRFSGSGSGTEFTLTISSLQPEDFATYYCQQFNSYPPTFGQGTKVEIKR

SEQ ID NO: 10960 - protein, 112 aa, Artificial Sequence
  source: /note="Description of Artificial Sequence: Synthetic polypeptide"
DIVMTQTPLSSPVTLGQPASISCRSSQSLVHSDGNTYLSWLQQRPGQPPRLLIYKISNRFSGVPDRFIGSGAGTDFTLRISRVEAEDVGVYYCMQATQFPFTFGPGTRVDIK

SEQ ID NO: 10961 - protein, 107 aa, Artificial Sequence
  source: /note="Description of Artificial Sequence: Synthetic polypeptide"
EIVLTQSPATLSLSPGERVTLSCRASQSVSSYLAWYQQKPGQAPRLLIYDASNRATGIPARFSGSGSGTDFTLTISSLEPEDFAVYYCQQRNIWPPTFGQGTKVEIK

SEQ ID NO: 10962 - protein, 112 aa, Artificial Sequence
  source: /note="Description of Artificial Sequence: Synthetic polypeptide"
DIVMTQTPLSSPVTLGQPASISCRSSQSLVRSDGNTYLSWLQQRPGQPPRLLIYKISNRFSGVPDRFSGSGAGTDFTLKISRVEAEDVGIYFCMQTTQFPFTFGPGTKVDIK

SEQ ID NO: 10963 - protein, 108 aa, Artificial Sequence
  source: /note="Description of Artificial Sequence: Synthetic polypeptide"
DIRMTQSPSSLSASVGDRGTITCRASQNINSYLNWYQLKPGKAPKLLIFAASSLQSGVPSRFSGSGSGTDFTLTISSLQPEDFATYYCQQSYSSPFTFGQGTKVEIKR

SEQ ID NO: 10964 - protein, 112 aa, Artificial Sequence; identical to SEQ ID NO: 10962
  source: /note="Description of Artificial Sequence: Synthetic polypeptide"

SEQ ID NO: 10965 - protein, 113 aa, Artificial Sequence; identical to SEQ ID NO: 10837
  source: /note="Description of Artificial Sequence: Synthetic polypeptide"

SEQ ID NO: 10966 - protein, 108 aa, Artificial Sequence
  source: /note="Description of Artificial Sequence: Synthetic polypeptide"
DIQMTQSPSSLSASVGDRVTITCRASQDIRNDLGWYQQKPGNAPKLLIYSTSSLQSGVPSRFSGSGSGTDFTLTISSLQPEDFATYYCLQDYNYPLTFGGGTKVEIKR

SEQ ID NO: 10967 - protein, 109 aa, Artificial Sequence
  source: /note="Description of Artificial Sequence: Synthetic polypeptide"
DIVMTQSPDSLAVSLGERATIKCKSSQSVLYSSNNKNYLAWYQQKPGQPPNLLIYWASTRESGVPDRFSGSGSGTDFTLTISSLQAEDVAVYYCQQYFSFGQGTKVEIK

SEQ ID NO: 10968 - protein, 107 aa, Artificial Sequence
  source: /note="Description of Artificial Sequence: Synthetic polypeptide"
DIQMTQSPSSLSASVGDRGTVTCRASQNIRTYLNWYQQKPGKAPKLLIYAASSLQSGVPSRFSGSGSGTDFTLTISSLQPEDFATYYCQQSYGTPYTFGQGTKLEIK

SEQ ID NO: 10969 - protein, 113 aa, Artificial Sequence
  source: /note="Description of Artificial Sequence: Synthetic polypeptide"
DIVMTQSPDSLAVSLGERATINCKSSQSVLYSSNNKNYLGWYQQKAGQPPKLLIYWASTRESGVPDRFSGSGSGTDFTLTISSLQAEDVAVYYCQQYYGIPWTFGQGTKVEIK

SEQ ID NO: 10970 - protein, 107 aa, Artificial Sequence
  source: /note="Description of Artificial Sequence: Synthetic polypeptide"
DIQMTQSPSSLSASVGDRVTITCRASQGIRNDLGWYQQKPGKAPKRLIYAASSLQSGVPSRFSGSGSGTEFTLTISSLQPEDFATYYCLQHNSYPWTFGQGTKVEIK

SEQ ID NO: 10971 - protein, 107 aa, Artificial Sequence
  source: /note="Description of Artificial Sequence: Synthetic polypeptide"
AIQMTQSPSSLSASVGDRVTITCRASQDIRNDLGWYQQKPGNAPKLLIYSTSSLQSGVPSRFSGSGSGTDFTLTISSLQPEDFATYYCLQDYNYPLTFGGGTKVEIK

SEQ ID NO: 10972 - protein, 108 aa, Artificial Sequence
  source: /note="Description of Artificial Sequence: Synthetic polypeptide"
DIQMTQSPSSLSASVGDRVTITCRASQGISNYLAWFQQKPGKAPKSLIYAASSLQGGVPSRFSGSGSGTDFTLTISSLQPEDFATYYCQQYNSYPLTFGGGTKVEIKR

SEQ ID NO: 10973 - protein, 107 aa, Artificial Sequence
  source: /note="Description of Artificial Sequence: Synthetic polypeptide"
DIQMTQSPSSLSASVGDRVTITCRASQGISNYLAWFQQKPGKAPKSLIYAASSLQGGVPSRFSGSGSGTDFTLTISSLQPEDFATYYCQQYNSYPLTFGGGTKVEIK

SEQ ID NO: 10974 - protein, 113 aa, Artificial Sequence
  source: /note="Description of Artificial Sequence: Synthetic polypeptide"
DIVMTQSPLSLPVTPGEPASISCRSSQSLLHSNGNTYLHWYLQKPGQSPQLLIYTVSNRFSGVPDRFSGSGSGTDFTLKISRVEAEDVGVYYCSQSTHVPYTFGGGTKVEIKR

SEQ ID NO: 10975 - protein, 113 aa, Artificial Sequence; identical to SEQ ID NO: 10974
  source: /note="Description of Artificial Sequence: Synthetic polypeptide"

SEQ ID NO: 10976 - protein, 113 aa, Artificial Sequence; identical to SEQ ID NO: 10974
  source: /note="Description of Artificial Sequence: Synthetic polypeptide"

SEQ ID NO: 10977 - protein, 108 aa, Artificial Sequence
  source: /note="Description of Artificial Sequence: Synthetic polypeptide"
EIVLTQSPGTLSVSPGERATLSCRASQSIGSSLHWYQQKPGQAPRLLIKYASQSLSGIPDRFSGSGSGTDFTLTISRLEPEDFAVYYCHQSSRLPHTFGQGTKVEIKR

SEQ ID NO: 10978 - protein, 127 aa, Artificial Sequence
  source: /note="Description of Artificial Sequence: Synthetic polypeptide"
MESQIQAFVFVFLWLSGVDGDIVMTQSHKFMSTSVGDRVSFTCKASQDVFTAVAWYQQKPGQSPKLLIYWASTRRTGVPDRFTGSGSGTDYTLTISSVQAEDLALYYCQQHFSTPPTFGGGTKLEIK

SEQ ID NO: 10979 - protein, 133 aa, Artificial Sequence
  source: /note="Description of Artificial Sequence: Synthetic polypeptide"
MESQTQVLMSLLFWVSGTCGDIVMTQSPSSLTVTAGEKVTMSCKSSQSLLNSGNQKNYLTWYQQKPGQPPKLLIYWASTRESGVPDRFTGSGSGTDFSLTISSVQAEDLAIYYCQNDYSYPFTFGSGTKLEIK

SEQ ID NO: 10980 - protein, 90 aa, Artificial Sequence
  source: /note="Description of Artificial Sequence: Synthetic polypeptide"
DIQMTQSPSSLSASVGDRVTITCRASGNIYGWLAWYQQTPGKAPKLLIYQAKTLMDGVPSRFSGSGSGTDYTFTISSLQPEDIATYYCQH

SEQ ID NO: 10981 - protein, 107 aa, Artificial Sequence
  source: /note="Description of Artificial Sequence: Synthetic polypeptide"
DIQMTQSPSSLSASVGDRVTITCRASGNIHNYLTWYQQTPGKAPKLLIYNAKTLADGVPSRFSGSGSGTDYTFTISSLQPEDIATYYCQHFWSIPYTFGQGTKLQIT

SEQ ID NO: 10982 - protein, 107 aa, Artificial Sequence; identical to SEQ ID NO: 10981
  source: /note="Description of Artificial Sequence: Synthetic polypeptide"

SEQ ID NO: 10983 - protein, 107 aa, Artificial Sequence; identical to SEQ ID NO: 10981
  source: /note="Description of Artificial Sequence: Synthetic polypeptide"

SEQ ID NO: 10984 - protein, 107 aa, Artificial Sequence; identical to SEQ ID NO: 10981
  source: /note="Description of Artificial Sequence: Synthetic polypeptide"

SEQ ID NO: 10985 - protein, 108 aa, Artificial Sequence
  source: /note="Description of Artificial Sequence: Synthetic polypeptide"
DIQMTQSPSSLSASVGDRVTITCRASGNIHNYLTWYQQTPGKAPKLLIYNAKTLADGVPSRFSGSGSGTDYTFTISSLQPEDIATYYCQHFWSIPYTFGQGTKLEIKR

SEQ ID NO: 10986 - protein, 107 aa, Artificial Sequence; identical to SEQ ID NO: 10981
  source: /note="Description of Artificial Sequence: Synthetic polypeptide"

SEQ ID NO: 10987 - protein, 107 aa, Artificial Sequence
  source: /note="Description of Artificial Sequence: Synthetic polypeptide"
DIQMTQSPSSLSASVGDRVTITCRASGNIYTYLTWYQQTPGKAPKLLIYNAKTLADGVPSRFSGSGSGTDYTFTISSLQPEDIATYYCQHFWTLPYTFGQGTKLQIT

SEQ ID NO: 10988 - protein, 108 aa, Artificial Sequence
  source: /note="Description of Artificial Sequence: Synthetic polypeptide"
SVVMTQTPKFLLVSAGDRVTITCKASQSVSNDVAWYQQKPGQSPKLLIYYASNRYTGVPDRFTGSGYGTDFTFIISTVRAEDLAVYFCQQDYNSPWTFGGGTKLEIKR

SEQ ID NO: 10989 - protein, 108 aa, Artificial Sequence
  source: /note="Description of Artificial Sequence: Synthetic polypeptide"
SVVMTQTPKFLLVSAGDRVTITCKASQSVSNDVAWFQQKPGQSPKLLIYYASNRYTGVPDRFTGSGYGTDFTFTISTVQAEDLAVYFCQQDYNSPWTFGGGTKLEIKR

SEQ ID NO: 10990 - protein, 108 aa, Artificial Sequence
  source: /note="Description of Artificial Sequence: Synthetic polypeptide"
SIVMTQTPKFLLVSAGDRVTITCKASQSVSNDVAWYQQKSGQSPKLLIYYASNRYTGVPDRFTGSGYGTDFTFTISTVQPEDLAVYFCQQDYTSPFTFGSGTKLEIKR

SEQ ID NO: 10991 - protein, 108 aa, Artificial Sequence
  source: /note="Description of Artificial Sequence: Synthetic polypeptide"
SIVMTQTPKFLLVSAGDRVTITCKASQSVSNDVAWYQQKPGQSPKLLIYYASNRYTGVPDRFTGSGYGTDFTFTITTVQAEDLAVYFCQQDYSSPWSFGGGTKLEIKR

SEQ ID NO: 10992 - protein, 108 aa, Artificial Sequence
  source: /note="Description of Artificial Sequence: Synthetic polypeptide"
SIVMTQSPKFLLVSAGDRVTITCKASQSVSNDVAWYQQKLGQSPKLLIYYASNRYTGVPDRFTGSGYGTDFTFTINTVQAEDLAVYFCQQDYTSPYTFGGGTKLEIQR

SEQ ID NO: 10993 - protein, 108 aa, Artificial Sequence
  source: /note="Description of Artificial Sequence: Synthetic polypeptide"
DIVMTQSQKFMSTSVGDRVSVTCKASQNVGTNVAWYQQKPGQSPKGLIYSASHRYSGVPDRFAGSGSGTDFTLTISNVQSEDLAEYFCQQYNSYPLTFGGGTKLELKR

SEQ ID NO: 10994 - protein, 108 aa, Artificial Sequence
  source: /note="Description of Artificial Sequence: Synthetic polypeptide"
SFVMTQTPKFLLVSAGDRVTITCKASQSVSNDVAWYQQKPGQSPKLLIYYASNRYTGVPDRFTGTGYGTDFTFTISTVQAEDLAVYFCQQDYTSPFTFGSGTKLEIKR

SEQ ID NO: 10995 - protein, 112 aa, Artificial Sequence
  source: /note="Description of Artificial Sequence: Synthetic polypeptide"
DIVLTQSPGSLAVSLGQRATISCRASESVDNYGISFMNWFQQKPGQPPKLLIYAASNQGSGVPARFSGSGSGTDFSLDIHPMEEDDTAMYFCQQSKEVPPTFGGGTKLEIKR

SEQ ID NO: 10996 - protein, 108 aa, Artificial Sequence
  source: /note="Description of Artificial Sequence: Synthetic polypeptide"
SVVMTQTPKFLLVSAGDRVTMTCKASQSVSNDVAWFQQKPGQSPKLLIYYASNRYTGVPDRFTGSGYGTDFTFTISTVQAEDLAVYFCQQDYNSPWTFGGGTKLEIKR

SEQ ID NO: 10997 - protein, 108 aa, Artificial Sequence
  source: /note="Description of Artificial Sequence: Synthetic polypeptide"
DIVLSQSPATLSVTPGDSVSLSCRASQSISKNLHWYQQKSHESPRLLIKYTSQSISGIPSRFSGSGSGTDFTLSINSVETEDFGMYFCQQSISWPLTFGAGTKLELKR

SEQ ID NO: 10998 - protein, 112 aa, Artificial Sequence
  source: /note="Description of Artificial Sequence: Synthetic polypeptide"
DIVMTQSPDSLSVSLGERATINCRASKSVDSYGNSFMHWYQQKPGQPPKLLIYLASNLESGVPDRFSGSGSGTDFTLTISSLQAEDVAVYYCQQNNEDPRTFGGGTKVEIKR

SEQ ID NO: 10999 - protein, 109 aa, Artificial Sequence
  source: /note="Description of Artificial Sequence: Synthetic polypeptide"
EIVLTQSPGTLSLSPGERATLSCRASQSVSSSYLAWYQQKPGQAPRLLIYGASSRATGIPDRFSGSGSGTDFTLTISRLEPEDFAVYYCQQYGSSPCTFGQGTRLEIKR

SEQ ID NO: 11000 - protein, 112 aa, Artificial Sequence
  source: /note="Description of Artificial Sequence: Synthetic polypeptide"
DIVMSQSPSSLAVSAGEKVTMSCKSSQSLLDSRTRKNYLVWYQQKPGQSPKLLIYWASTRGSGVPDRFTGSGSGTDFTLTISSVQAEDLAVYYCKQSYNLRTFGGGTKLEIK

SEQ ID NO: 11001 - protein, 112 aa, Artificial Sequence; identical to SEQ ID NO: 11000
  source: /note="Description of Artificial Sequence: Synthetic polypeptide"

SEQ ID NO: 11002 - protein, 112 aa, Artificial Sequence
  source: /note="Description of Artificial Sequence: Synthetic polypeptide"
DVVMTQVPLSLPVSLGDQASISCRSSQRLVHSNGNTYLHWFLQKPGQSPKLLIYTVSNRFSGVPDRFSGSGSGTDFTLKISRVEAEDLGVYFCSQSTLVPWTFGGGTKLEIK

SEQ ID NO: 11003 - protein, 112 aa, Artificial Sequence
  source: /note="Description of Artificial Sequence: Synthetic polypeptide"
DAVLTQTPLSLPVSLGDQASISCTSSQSLVHSNGNTYLHWYLQKPGQSPKLLIYKVSDRFSGVPDRFSGSGSGTDFTLMITRVEAEDLGVYFCSQSSLVPWTFGGGTKLEVK

SEQ ID NO: 11004 - protein, 106 aa, Artificial Sequence
  source: /note="Description of Artificial Sequence: Synthetic polypeptide"
ENVLTQSPAIMSASPGEKVTMTCSASSSVSYMHWYQQKSSTSPKLWIYDTSKLASGVPGRFSGSGSGNSYSLTISSMEAEDVATYYCFQGSGYPLTFGSGTKLEIK

SEQ ID NO: 11005 - protein, 112 aa, Artificial Sequence
  source: /note="Description of Artificial Sequence: Synthetic polypeptide"
DVLMTQTPLSLPVSLGDQASISCRSSQSIVHSNGNTYLEWYLQKPGQSPKFLIYKVSNRFSGVPDRFSGSGSGTDFTLKINRVEAEDLGIYYCFQGSHVPWTFGGGTKLEIK

SEQ ID NO: 11006 - protein, 112 aa, Artificial Sequence
  source: /note="Description of Artificial Sequence: Synthetic polypeptide"
DVLMTQTPLSLPVSLGDQASISCRSSQSIVHSNGNTYLEWYLQKPGQSPKLLIYKVSNRFSGVPDRFSGSGSGTDFTLKISRVEAEDLGVYYCFQGSHVPWTFGGGTKLEIK

SEQ ID NO: 11007 - protein, 108 aa, Artificial Sequence
  source: /note="Description of Artificial Sequence: Synthetic polypeptide"
DIQMTQSPSSLSASVGDRVTITCRASQDISNCLNWYQQKPGKAPKLLIYYTSRLHSGVPSRFSGSGSGTDFTFTISSLQPEDIATYYCQQGKTLPYAFGQGTKLEIKR

SEQ ID NO: 11008 - protein, 107 aa, Artificial Sequence
  source: /note="Description of Artificial Sequence: Synthetic polypeptide"
DIQMTQSPSSLSASVGDRVTITCRASQDISNCLNWYQQKPGKTVKLLIYYTSRLHSGVPSRFSGSGSGTDYTFTISSLQPEDIATYFCQQGKTLPYAFGQGTKLEIK

SEQ ID NO: 11009 - protein, 107 aa, Artificial Sequence
  source: /note="Description of Artificial Sequence: Synthetic polypeptide"
NIQMTQTPSSLSASVGDRVTITCRASQDISNCLNWYQQKPGKTVKLLIYYTSRLHSGVPSRFSGSGSGTDYTFTISSLQPEDIATYFCQQGKTLPYAFGQGTKLEIK

SEQ ID NO: 11010 - protein, 107 aa, Artificial Sequence
  source: /note="Description of Artificial Sequence: Synthetic polypeptide"
DIQMTQSPSSLSASVGDRVTITCRASQDISNCLNWYQQKPGKTPKLLIYYTSRLHSGVPSRFSGSGSGTDYTFTISSLQPEDIATYFCQQGKTLPYAFGQGTKLEIK

SEQ ID NO: 11011 - protein, 108 aa, Artificial Sequence
  source: /note="Description of Artificial Sequence: Synthetic polypeptide"
DIQMTQSPSSLSASVGDRVTITCRASQDISNCLNWYQQKPGKAPKLLIYYTSRLHSGVPSRFSGSGSGTDFTFTISSLQPEDIATYYCQQGKTLPYAFGGGTKVEIKR

SEQ ID NO: 11012 - protein, 107 aa, Artificial Sequence
  source: /note="Description of Artificial Sequence: Synthetic polypeptide"
DIQMTQSPSSLSASVGDRVTITCRASQDISNCLNWYQQKPGKTVKLLIYYTSRLHSGVPSRFSGSGSGTDYTFTISSLQPEDIATYFCQQGKTLPYAFGGGTKVEIK

SEQ ID NO: 11013 - protein, 107 aa, Artificial Sequence
  source: /note="Description of Artificial Sequence: Synthetic polypeptide"
NIQMTQTPSSLSASVGDRVTITCRASQDISNCLNWYQQKPGKTVKLLIYYTSRLHSGVPSRFSGSGSGTDYTFTISSLQPEDIATYFCQQGKTLPYAFGGGTKVEIK

SEQ ID NO: 11014 - protein, 107 aa, Artificial Sequence
  source: /note="Description of Artificial Sequence: Synthetic polypeptide"
DIQMTQSPSSLSASVGDRVTITCRASQDISNMLNWYQQKPGKTPKLLIYYTSRLYPGVPSRFSGSGSGTDYTFTISSLQPEDIATYFCQQGKTLPYAFGQGTKLEIK

SEQ ID NO: 11015 - protein, 107 aa, Artificial Sequence
  source: /note="Description of Artificial Sequence: Synthetic polypeptide"
DIQMTQSPSSLSASVGDRVTITCRASQDISNRLNWYQQKPGKAPKLLIYYASRLKPGVPSRFSGSGSGTDYTFTISSLQPEDIATYFCQQGNTPPYTFGQGTKLEIK

SEQ ID NO: 11016 - protein, 107 aa, Artificial Sequence
  source: /note="Description of Artificial Sequence: Synthetic polypeptide"
DIQMTQSPSSLSASVGDRVTITCRASQDISNMLNWYQQKPGKAPKLLIYYTSRLKPGVPSRFSGSGSGTDYTFTISSLQPEDIATYFCQQGKTAPYTFGQGTKLEIK

SEQ ID NO: 11017 - protein, 107 aa, Artificial Sequence
  source: /note="Description of Artificial Sequence: Synthetic polypeptide"
DIQMTQSPSSLSASVGDRVTITCRASQDISNMLNWYQQKPGKTPKLLIYYTSRLRSGVPSRFSGSGSGTDYTFTISSLQPEDIATYFCQQGKKPPYTFGQGTKLEIK

SEQ ID NO: 11018 - protein, 122 aa, Artificial Sequence; identical to SEQ ID NO: 8531
  source: /note="Description of Artificial Sequence: Synthetic polypeptide"

SEQ ID NO: 11019 - protein, 107 aa, Artificial Sequence
  source: /note="Description of Artificial Sequence: Synthetic polypeptide"
ETTVTQSPSSLSASVGDRVTITCITSTDIDVDMNWYQQKPGKPPKLLISQGNTLRPGVPSRFSSSGSGTDFTFTISSLQPEDFATYYCLQSDNLPLTFGQGTKLEIK

SEQ ID NO: 11020 - protein, 107 aa, Artificial Sequence
  source: /note="Description of Artificial Sequence: Synthetic polypeptide"
DTVVTQSPAFLSVTPGEKVTITCITSTDIDVDMNWYQQKPDQPPKLLISQGNTLRPGVPSRFSSSGSGTDFTFTISSLEAEDAATYYCLQSDNLPLTFGQGTKLEIK

SEQ ID NO: 11021 - protein, 107 aa, Artificial Sequence
  source: /note="Description of Artificial Sequence: Synthetic polypeptide"
ETTVTQSPAFLSVTPGEKVTITCITSTDIDVDMNWYQQKPDQPPKLLISQGNTLRPGVPSRFSSSGSGTDFTFTISSLEAEDAATYYCLQSDNLPLTFGQGTKLEIK

SEQ ID NO: 11022 - protein, 112 aa, Artificial Sequence [sequence omitted]

SEQ ID NO: 11023 - protein, 106 aa, Artificial Sequence [sequence omitted]

SEQ ID NO: 11024 - protein, 106 aa, Artificial Sequence [sequence omitted]

SEQ ID NO: 11025 - protein, 107 aa, Artificial Sequence
  source: /note="Description of Artificial Sequence: Synthetic polypeptide"
DIQMTQSPSSVSASVGDRVTITCRASQGISSWLAWYQQKPGKAPKLLIYGASSLESGVPSRFSGSGSGTDFTLTISSLQPEDFASYYCQQANSFPYTFGQGTKLEIK

SEQ ID NO: 11026 - protein, 112 aa, Artificial Sequence
  source: /note="Description of Artificial Sequence: Synthetic polypeptide"
NFMLTQPHSVSESPGKTVTISCTRSSGSLANYYVQWYQQRPGSAPTIVIFANNQRPSGVPDRFSGSIDSSSNSASLTISRLKTEDEADYYCQSYSPHSVVFGGGTKLTVLGE

SEQ ID NO: 11027 - protein, 98 aa, Artificial Sequence
  source: /note="Description of Artificial Sequence: Synthetic polypeptide"
NFMLTQPHSVSESPGKTVTISCTRSSGSLANYYVQWYQQRPGSAPTIVIFANNQRPSGVPDRFSGSIDSSSNSASLTISRLKTEDEADYYSVVFGGGT

SEQ ID NO: 11028 - protein, 112 aa, Artificial Sequence
  source: /note="Description of Artificial Sequence: Synthetic polypeptide"
NFMLTQPHSVSESPGKTVTISCTRSSGSLANYYVQWYQQRPGSAPTIVIFANNQRPSGVPDRFSGSIDSSSNSASLTISRLKTEDEADYYCQSYDPRVVVFGGGTKLTVLGE

SEQ ID NO: 11029 - protein, 112 aa, Artificial Sequence
  source: /note="Description of Artificial Sequence: Synthetic polypeptide"
NFMLTQPHSVSESPGKTVTISCTRSSGSLANYYVQWYQQRPGSAPTIVIFANNQRPSGVPDRFSGSIDSSSNSASLTISRLKTEDEADYYCQSYDPTNQVFGGGTKLTVLGE

SEQ ID NO: 11030 - protein, 118 aa, Artificial Sequence; identical to SEQ ID NO: 8544
  source: /note="Description of Artificial Sequence: Synthetic polypeptide"

SEQ ID NO: 11031 - protein, 155 aa, Artificial Sequence
  source: /note="Description of Artificial Sequence: Synthetic polypeptide"
MTPGKTSLVLLLLLLSLEAIVKAGIAIPRNSGCPNSEDKNFPRTVMVNLNIHNRNTSTNPKRSSDYYNRSTSPWNLHRNEDPERYPSVIWEAKCRHLGCVKADGNVDYHMNSVPIQQEILVLRREPRHCPNSFRLEKILVSVGCTCVTPIVHHVA

SEQ ID NO: 11032 - protein, 112 aa, Artificial Sequence
  source: /note="Description of Artificial Sequence: Synthetic polypeptide"
NFMLTQPHSVSESPGKTVTISCTRSSGSLANYYVQWYQQRPGSSPTIVIFANNQRPSGVPDRFSGSIDSSSNSASLTISGLKTEDEADYYCQSYDPHSVVFGGGTKLTVLGE

SEQ ID NO: 11033 - protein, 112 aa, Artificial Sequence
  source: /note="Description of Artificial Sequence: Synthetic polypeptide"
NFMLTQPHSVSESPGKTVTISCTRSSGSLANYYVQWYQQRPGSAPTIVIFANNQRPSGVPDRFSGSIASSSNSASLTISRLKTEDEADYYCQSYSPHSVVFGGGTKLTVLGE

SEQ ID NO: 11034 - protein, 112 aa, Artificial Sequence; identical to SEQ ID NO: 8542
  source: /note="Description of Artificial Sequence: Synthetic polypeptide"

SEQ ID NO: 11035 - protein, 92 aa, Artificial Sequence
  source: /note="Description of Artificial Sequence: Synthetic polypeptide"
NFMLTQPHSVSESPGKTVTISCTRSSGSLANYYVQWYQQRPGSAPTIVIFANNQRPSGVPDRFSGSIDSSSNSALKTEDEADYKDIVFGGGT

SEQ ID NO: 11036 - protein, 112 aa, Artificial Sequence
  source: /note="Description of Artificial Sequence: Synthetic polypeptide"
NFMLTQPHSVSESPGKTVTISCTRSSGSLANYYVQWYQQRPGSAPTIVIFANNQRPSGVPDRFSGSIDSSSNSASLTISRLKTEDEADYYCQSYSPSSVVFGGGTKLTVLGE

SEQ ID NO: 11037 - protein, 112 aa, Artificial Sequence
  source: /note="Description of Artificial Sequence: Synthetic polypeptide"
NFMLTQPHSVSESPGKTVTISCTRSSGSLANYYVQWYQQRPGSSPTIVIFANNQRPSGVPDRFSGSIDSSSNSASLTISGLKTEDEADYYCQTYDPYSVVFGGGTKLTVLGE

SEQ ID NO: 11038 - protein, 112 aa, Artificial Sequence
  source: /note="Description of Artificial Sequence: Synthetic polypeptide"
NFMLTQPHSVSESPGKTVTISCTRSSGSLANYYVQWYQQRPGSAPTIVIFANNQRPSGVPDRFSGSIDSSSNSASLTISRLKTEDEADYYCQSYDDSSVVFGGGTKLTVLGE

SEQ ID NO: 11039 - protein, 112 aa, Artificial Sequence
  source: /note="Description of Artificial Sequence: Synthetic polypeptide"
NFMLTQPHSVSESPGKTVTISCTRSSGSLANYYVQWYQQRPGSAPTIVIFANNQRPSGVPDRFSGSIDSSSNSASLTISRLKTEDEADYYCQSYNHKDIVFGGGTKLTVLGE

SEQ ID NO: 11040 - protein, 112 aa, Artificial Sequence; identical to SEQ ID NO: 11026
  source: /note="Description of Artificial Sequence: Synthetic polypeptide"

SEQ ID NO: 11041 - protein, 112 aa, Artificial Sequence
  source: /note="Description of Artificial Sequence: Synthetic polypeptide"
NFMLTQPHSVSESPGKTVTISCTRSSGSLANYYVQWYQQRPGSAPTIVIFANNQRPSGVPDRFSGSIDSSSNSASLTISRLKTEDEADYYCQSYDPHSVVFGGGTKLTVLGE

SEQ ID NO: 11042 - protein, 108 aa, Artificial Sequence
  source: /note="Description of Artificial Sequence: Synthetic polypeptide"
EIVLTQSPGTLSLSPGERATLSCRASQSVSSGHLAWYQQKPGQAPRLLIYGASSRATGIPGRFSGSGSGTDFTLTISRLEPEDFAVYYCQQYGSSPYTFGQGTKLEIK

SEQ ID NO: 11043 - protein, 108 aa, Artificial Sequence
  source: /note="Description of Artificial Sequence: Synthetic polypeptide"
EIVLTQSPAILSLSPGERATLSCRASQSVSSYLAWYQQKPGQAPRLLIYDASNRATGIPARFSGSGSGTDFTLTISSLEPEDFAVYYCQQRSNWPPLTFGGGTKVEIK

SEQ ID NO: 11044 - protein, 109 aa, Artificial Sequence
  source: /note="Description of Artificial Sequence: Synthetic polypeptide"
EIVLTQSPGTLSLSPGERATLSCRASQSVSSSYLAWYQQKPGQAPRLLIYGASSRATGIPDRFSGSGSGTDFTLTISRLEPEDFAVYYCQQYGSSPPFTFGPGTKVDIK

SEQ ID NO: 11045 - protein, 107 aa, Artificial Sequence
  source: /note="Description of Artificial Sequence: Synthetic polypeptide"
AIQLTQSPSSLSASVGDRVTITCRASQGISSALAWYQQKPGKAPKLLIYDASSLESGVPSRFSGSGSGTDFTLTISSLQPEDFATYYCQQFDSFPHTFGGGTKVEIK

SEQ ID NO: 11046 - protein, 109 aa, Artificial Sequence
  source: /note="Description of Artificial Sequence: Synthetic polypeptide"
EIVLTQSPGTLSLSPGERATLSCRASQSVSSSYLAWYQQKPGQAPRLLIYGASSRATGIPDRFSGSGSGTDFTLTISRLEPEDFAVYYCQQYGSSPIFTFGPGTKVDIK

SEQ ID NO: 11047 - protein, 107 aa, Artificial Sequence
  source: /note="Description of Artificial Sequence: Synthetic polypeptide"
EVVLTQSPGTLSLSPGERATLSCRASQSISSGYLAWYQQKPGQAPRLLIYGASSRATGIPDRFSGSGSGTDFTLTISRLEPEDFAVYYCQQYGSSPTFGGGTKVEIK

SEQ ID NO: 11048 - protein, 108 aa, Artificial Sequence
  source: /note="Description of Artificial Sequence: Synthetic polypeptide"
EIVLTQSPATLSLSPGERATLSCRASQSVSSYLAWYQQKPGQAPRLLIYDASNRATGIPARFSGSGSGTDFTLTISSLEPEDFAVYYCQQRSNWPPYTFGQGTKLEIK

SEQ ID NO: 11049 - protein, 107 aa, Artificial Sequence
  source: /note="Description of Artificial Sequence: Synthetic polypeptide"
DIQMTQSPSSLSASVGDRVTITCRASQGISSWLAWYQQKPEKAPKSLIYAASSLQSGVPSRFSGSGSGTDFTLTISSLQPEDFATYYCQQYNSYPPTFGGGTKVEIK

SEQ ID NO: 11050 - protein, 108 aa, Artificial Sequence
  source: /note="Description of Artificial Sequence: Synthetic polypeptide"
EIVLTQSPATLSLSPGERATLSCRASQSVSSYVAWYQQKPGQAPRLLIYDASNRATGIPARFSGSGSGTDFTLTISSLEPEDFAIYYCQQRSNSPPWTFGQGTKVEIK

SEQ ID NO: 11051 - protein, 109 aa, Artificial Sequence; identical to SEQ ID NO: 11044
  source: /note="Description of Artificial Sequence: Synthetic polypeptide"

SEQ ID NO: 11052 - protein, 109 aa, Artificial Sequence
  source: /note="Description of Artificial Sequence: Synthetic polypeptide"
EIVLTQSPGTLSLSPGERATLSCRASQSVSSSYLAWYQQKPGQAPRLLIYGASSRATGIPDRFSGSGSGTDFTLTISRLEPEDFAVYYCQQYGSSPEYTFGQGTKLEIK

SEQ ID NO: 11053 - protein, 107 aa, Artificial Sequence
  source: /note="Description of Artificial Sequence: Synthetic polypeptide"
EIVLTQSPATLSLSPGERATLSCQASQSISNFLHWYQQRPGQAPRLLIRYRSQSISGIPARFSGSGSGTDFTLTISSLEPEDFAVYYCQQSGSWPLTFGGGTKVEIK

SEQ ID NO: 11054 - protein, 107 aa, Artificial Sequence [sequence omitted]

SEQ ID NO: 11055 - protein, 109 aa, Artificial Sequence
  source: /note="Description of Artificial Sequence: Synthetic polypeptide"
EIVLTQSPVTLSLSPGERATLSCRASQSVSSYLAWYQQKPGQAPRLLIYDASNRATGIPARFSGSGSGTDFTLTISSLEPEDFAVYYCQQRSNWMYTFGQGTKLEIKRT

SEQ ID NO: 11056 - protein, 107 aa, Artificial Sequence
  source: /note="Description of Artificial Sequence: Synthetic polypeptide"
DIQMTQSPSSLSASVGDRVTITCRASENIYSYLAWYQQKPGKAPKLLIYNAKTLAEGVPSRFSGSGSGTDFTLTISSLQPEDFATYYCQHHYGTPRTFGGGTKVEIK

SEQ ID NO: 11057 - protein, 107 aa, Artificial Sequence
  source: /note="Description of Artificial Sequence: Synthetic polypeptide"
DIQMTQTTSSLSASLGDRVTISCSSSQDISNYLNWYQQKPDGTVKVLIYYTSTLHLGVPSRFSGSGSGTDYSLTISNLELEDIATYYCQQYYNLPWTFGGGTKLEIK

SEQ ID NO: 11058 - protein, 107 aa, Artificial Sequence
  source: /note="Description of Artificial Sequence: Synthetic polypeptide"
DIQMTQSPSFLSASVGDSVAITCRASQDISRYLAWYQQRPGKAPKLLIYDASNLQTGVPSRFSGSGSGTDFTFTITSLQPEDFGTYYCQQYDTLHPSFGPGTTVDIK

SEQ ID NO: 11059 - protein, 105 aa, Artificial Sequence; identical to SEQ ID NO: 4174
  source: /note="Description of Artificial Sequence: Synthetic polypeptide"

SEQ ID NO: 11060 - protein, 105 aa, Artificial Sequence; identical to SEQ ID NO: 4175
  source: /note="Description of Artificial Sequence: Synthetic polypeptide"

SEQ ID NO: 11061 - protein, 107 aa, Artificial Sequence
  source: /note="Description of Artificial Sequence: Synthetic polypeptide"
DIQMTQTTSSLSASLGDRVTISCRASQDISKYLNWYQQQPDGTIKLLIYYTSRLHSGVPSRFSGRGSGTDYSLTISNVEQEDIATYFCQQGSTLPYTFGGGTKLEIK

SEQ ID NO: 11062 - protein, 107 aa, Artificial Sequence
  source: /note="Description of Artificial Sequence: Synthetic polypeptide"
DIQMTQTTSSLSASLGDRVTISCRASQDINKYLNWYQQQPDGTVKLLIYYTSRLHSGVPSRFSGRGSGTDYSLTISNLEQEDIATYFCQQGSTLPYTFGGGTKLEIK

SEQ ID NO: 11063 - protein, 107 aa, Artificial Sequence
  source: /note="Description of Artificial Sequence: Synthetic polypeptide"
DIQMTQTTSSLSASLGDRVTFSCRASQDISKYLNWYQQQPDGTIKLLIYYTSRLHSGVPSRFSGRGSGTDYSLTITNLEQEDIATYFCQQGSALPYTFGGGTKLEIK

SEQ ID NO: 11064 - protein, 107 aa, Artificial Sequence
  source: /note="Description of Artificial Sequence: Synthetic polypeptide"
DIQMTQTTSSLSASLGDRVTISCRASQDISKYLNWYQQQPDGTVKLLIYYTSRLHSGVPSRFSGRGSGTDYSLTISNLEQEDIATYFCQQGSTLPYTFGGGTKLEIK

SEQ ID NO: 11065 - protein, 107 aa, Artificial Sequence
  source: /note="Description of Artificial Sequence: Synthetic polypeptide"
DIQMTQTTSSLSASLGDRVTISCRASQDISKYLNWYQQQPDGTIKLLIYYTSRLHSGVPSRFSGRGSGTDYSLTITNLEQEDIATYFCQQGSALPYTFGGGTKLEIK

SEQ ID NO: 11066 - protein, 107 aa, Artificial Sequence
  source: /note="Description of Artificial Sequence: Synthetic polypeptide"
DIQMTQSPSSLSASVGDRVTITCRASQDISKYLNWYQQKPGKAPKLLIYYTSSLQSGVPSRFSGSGSGTDFTLTISSLQPEDFATYYCQQGSTLPYTFGGGTKVEIK

SEQ ID NO: 11067 - protein, 107 aa, Artificial Sequence
  source: /note="Description of Artificial Sequence: Synthetic polypeptide"
DIQMTQSPSSLSASVGDRVTISCRASQDISKYLNWYQQKPGKAPKLLIYYTSRLHSGVPSRFSGRGSGTDYSLTISNLQPEDFATYFCQQGSTLPYTFGGGTKVEIK

SEQ ID NO: 11068 - protein, 214 aa, Artificial Sequence
  source: /note="Description of Artificial Sequence: Synthetic polypeptide"
DIQMTQSPSSLSASVGDRVTITCRASQDISKYLNWYQQKPGKAPKLLIYYTSSLQSGVPSRFSGSGSGTDFTLTISSLQPEDFATYYCQQGSTLPYTFGGGTKVEIKRTVAAPSVFIFPPSDEQLKSGTASVVCLLNNFYPREAKVQWKVDNALQSGNSQESVTEQDSKDSTYSLSSTLTLSKADYEKHKVYACEVTHQGLSSPVTKSFNRGEC

SEQ ID NO: 11069 - protein, 214 aa, Artificial Sequence
  source: /note="Description of Artificial Sequence: Synthetic polypeptide"
DIQMTQSPSSLSASVGDRVTISCRASQDISKYLNWYQQKPGKAPKLLIYYTSRLHSGVPSRFSGRGSGTDYSLTISNLQPEDFATYFCQQGSTLPYTFGGGTKVEIKRTVAAPSVFIFPPSDEQLKSGTASVVCLLNNFYPREAKVQWKVDNALQSGNSQESVTEQDSKDSTYSLSSTLTLSKADYEKHKVYACEVTHQGLSSPVTKSFNRGEC

SEQ ID NO: 11070 - protein, 145 aa, Artificial Sequence
  source: /note="Description of Artificial Sequence: Synthetic polypeptide"
MESQFLFLLVLWIRETNGDVVMTQTPLSLSVTIGQPASISCKSSQSLLDSAGKTYLSWLLQRPGQSPKRLIYLVSKLDSGVPDRFTGSGSGTDFTLKISRVEAEDLGVYYCWQGTHFPWTFGGGTKLEIKRADAAPTVSIFPPSS

SEQ ID NO: 11071 - protein, 147 aa, Artificial Sequence
  source: /note="Description of Artificial Sequence: Synthetic polypeptide"
MVSSAQFLFLLVLWIRETNGDVVMTQTPLSLSVTIGQPASISCKSSQSLLDSAGKTYLSWLLQRPGQSPKRLIYLVSKLDSGVPDRFTGSGSGTDFTLKISRVEAEDLGVYYCWQGTHFPWTFGGGTKLEIKRADAAPTVSIFPPSS

SEQ ID NO: 11072 - protein, 146 aa, Artificial Sequence
  source: /note="Description of Artificial Sequence: Synthetic polypeptide"
MKLPVRLLVLMFWIPASSSDVLMTQTPLSLPVSLGDQASISCKSSQSIVHSNGNTYLEWYLQKPGQSPKLLIYKVFNRFSGVPDRFSGSGSGTDFTLKISRVEAEDLGVYYCFQGSHVPYTFGGGTKLEIKRADAAPTVSIFPPSS

SEQ ID NO: 11073 - protein, 108 aa, Artificial Sequence [sequence omitted]

SEQ ID NO: 11074 - protein, 107 aa, Artificial Sequence
  source: /note="Description of Artificial Sequence: Synthetic polypeptide"
DIQMTQSPSSLSASVGDRVTITCRSSQRIMTYLNWYQQKPGKAPKLLIFVASHSQSGVPSRFRGSGSETDFTLTISGLQPEDSATYYCQQSFWTPLTFGGGTKVEIK

SEQ ID NO: 11075 - protein, 112 aa, Artificial Sequence
  source: /note="Description of Artificial Sequence: Synthetic polypeptide"
DIVMTQTPLSLPVTPGEPASISCRSSKSLLHSNGITYLYWYLQKPGQSPQLLIYQMSNLVSGVPDRFSGSGSGTDFTLKISRVEAEDVGVYYCAQNLELPYTFGGGTKVEIK

SEQ ID NO: 11076 - protein, 108 aa, Artificial Sequence
  source: /note="Description of Artificial Sequence: Synthetic polypeptide"
DIQMTQSPASLSASVGETVTITCRTSENIYSYLAWYQQKPGKSPHLLVYNTKTLAEGVPSRFSGSGSGTQFSLKINSLQPEDFGSYYCQHHYDSPLTFGSGTKLELKR

SEQ ID NO: 11077 - protein, 108 aa, Artificial Sequence
  source: /note="Description of Artificial Sequence: Synthetic polypeptide"
DIQMTQSPASLSASVGETVTITCRASENFYSYLAWYQQKQGKSPQLLVYNAKTLAEGVPSRFSGSGSGTQFSLKINSLQPEDFGTYYCQHHYDIPLTFGAGTKLELKR

SEQ ID NO: 11078 - protein, 114 aa, Artificial Sequence
  source: /note="Description of Artificial Sequence: Synthetic polypeptide"
DIVMTQSPSSLSVSAGEKVTLSCKSSQSLLISGDQKNYLAWYQQKPGQPPKLLIYGASTRDSGVPDRFTGSGSGADFTLTISSVQAEDLAVYYCQNDHSFPPTFGAGTKLELKR

SEQ ID NO: 11079 - protein, 108 aa, Artificial Sequence
  source: /note="Description of Artificial Sequence: Synthetic polypeptide"
DTVMTQSHKFMSTSVGDRVSITCKASQDVSSAVAWYQQKPGQSPKLLIYSASYRYTGVPDRFTGSGSGMDFTFTISSVQAEDLAVYYCQQHYSTPLTFGAGTKLELER

SEQ ID NO: 11080 - protein, 108 aa, Artificial Sequence
  source: /note="Description of Artificial Sequence: Synthetic polypeptide"
DIQMTQSPASLAASVGETVTITCRASENIYTFLAWYQQKQGKSPQLLVYTTKTLAEGVPSRFSGSGSGTQFSLKIKSLQPEDFGSYYCQHHYGLPLTFGAGTKLELKR

SEQ ID NO: 11081 - protein, 107 aa, Artificial Sequence
  source: /note="Description of Artificial Sequence: Synthetic polypeptide"
DIVMTQSHKFMSTSVGDRVSITCKASQDVSTAVAWYQQKPGQSPKLLIYSASYRSTGVPDRFTGSGSGTDFTFTISSVQAEDLAVYYCQQHYSTPTFGAGTKLELKR

SEQ ID NO: 11082 - protein, 108 aa, Artificial Sequence
  source: /note="Description of Artificial Sequence: Synthetic polypeptide"
SIVMTQTPKFLLVSAGDRVTITCKASQSVSNDVAWFQQKPGQSPKLLIYYASNRYAGVPDRFTGSGFGTDFTFTISTVQAEDLAVYFCHQDYSSPRTFGGGTKLEIKR

SEQ ID NO: 11083 - protein, 112 aa, Artificial Sequence
  source: /note="Description of Artificial Sequence: Synthetic polypeptide"
DNVLTQSPPSLAVSLGQRATISCKANWPVDYNGDSYLNWYQQKPGQPPKFLIYAASNLESGIPARFSGSGSGTDFNLNIHPVEEEDAATYYCQQSNEDPFTFGSGTKLEIKR

SEQ ID NO: 11084 - protein, 113 aa, Artificial Sequence
  source: /note="Description of Artificial Sequence: Synthetic polypeptide"
DVVMTQTPLTLSVTTGQPASISCKSSQSLLDSDGKTYLNWLFQRPGESPKLLIYVVSKLESGVPDRFTGSGSGTDFTLKISRVEAEDLGVYYCLQATHFPWTFGGGTKLEIKR

SEQ ID NO: 11085 - protein, 113 aa, Artificial Sequence
  source: /note="Description of Artificial Sequence: Synthetic polypeptide"
DVVMTQTPLTLSVTTGQPASISCKSSQSLLDSDGKTYLNWLFQRPGESPKLLIYVTDILESGVPDRFTGSGSGTDFTLKISRVEAEDLGVYYCLQATHFPWTFGGGTKLEIKR

SEQ ID NO: 11086 - protein, 108 aa, Artificial Sequence
  source: /note="Description of Artificial Sequence: Synthetic polypeptide"
DILLTQSPVILSVSPGERVSFSCRTSKNVGTNIHWYQQRTNGSPRLLIKYASERLPGIPSRFSGSGSGTDFTLSINSVESEDIADYYCQQSNNWPYTFGGGTKLEIKR

SEQ ID NO: 11087 - protein, 156 aa, Artificial Sequence; identical to SEQ ID NO: 9342
  source: /note="Description of Artificial Sequence: Synthetic polypeptide"

SEQ ID NO: 11088 - protein, 108 aa, Artificial Sequence; identical to SEQ ID NO: 4176
  source: /note="Description of Artificial Sequence: Synthetic polypeptide"

SEQ ID NO: 11089 - protein, 112 aa, Artificial Sequence; identical to SEQ ID NO: 4177
  source: /note="Description of Artificial Sequence: Synthetic polypeptide"

SEQ ID NO: 11090 - protein, 112 aa, Artificial Sequence; identical to SEQ ID NO: 4178
  source: /note="Description of Artificial Sequence: Synthetic polypeptide"

SEQ ID NO: 11091 - protein, 112 aa, Artificial Sequence; identical to SEQ ID NO: 4179
  source: /note="Description of Artificial Sequence: Synthetic polypeptide"

SEQ ID NO: 11092 - protein, 112 aa, Artificial Sequence; identical to SEQ ID NO: 4180
  source: /note="Description of Artificial Sequence: Synthetic polypeptide"

SEQ ID NO: 11093 - protein, 112 aa, Artificial Sequence [sequence omitted]

SEQ ID NO: 11094 - protein, 112 aa, Artificial Sequence; identical to SEQ ID NO: 4182
  source: /note="Description of Artificial Sequence: Synthetic polypeptide"

SEQ ID NO: 11095 - protein, 112 aa, Artificial Sequence; identical to SEQ ID NO: 4183
  source: /note="Description of Artificial Sequence: Synthetic polypeptide"

SEQ ID NO: 11096 - protein, 112 aa, Artificial Sequence; identical to SEQ ID NO: 4184
  source: /note="Description of Artificial Sequence: Synthetic polypeptide"

SEQ ID NO: 11097 - protein, 112 aa, Artificial Sequence
  source: /note="Description of Artificial Sequence: Synthetic polypeptide"
DIVMTQAAPSVPVTPGESVSISCRSSKSLLHSNGNTYLYWFLQRPGQSPQLLIYRMSNLASGVPDRFSGSGSGTAFTLRISRVEAEDVGVYYCMQHLEYPLTFGAGTKLELK

SEQ ID NO: 11098 - protein, 107 aa, Artificial Sequence [sequence omitted]

SEQ ID NO: 11099 - protein, 108 aa, Artificial Sequence
  source: /note="Description of Artificial Sequence: Synthetic polypeptide"
DIQMTQSPSSLCASVGDRVTITCRASRSITRYLNWYQQKPGKAPKLLIYGASSLQSGVPSRFSGSGSGTDFTLTISSLQPEDFATYYCQQSYSTPPITFGQGTRLEIK

SEQ ID NO: 11100 - protein, 113 aa, Artificial Sequence
  source: /note="Description of Artificial Sequence: Synthetic polypeptide"
DIVMTQSPDSLAVSLGERATINCKSSQSVLYSSNNKNYLAWYQQKPGQPPKLIIYWTSTRESGVPDRFSGSGSGTDFTLTISSLQAEDVAVYYCQQYYSTPFTFGPGTKVDIK

SEQ ID NO: 11101 - protein, 106 aa, Artificial Sequence
  source: /note="Description of Artificial Sequence: Synthetic polypeptide"
EIVLTQSPATLSLSPGERATLSCRASQSVSTYLTWYQQKPGQAPRLLIYDASNRATGIPARFSGSGSGTDFTLTISSLEPEDCAVYYCQQRSIWITFGQGTRLEIK

SEQ ID NO: 11102 - protein, 107 aa, Artificial Sequence
  source: /note="Description of Artificial Sequence: Synthetic polypeptide"
DIQMTQSPSSLSASVGDRVTITCRTSQGIRVDLAWYQQKPGKAPERLIYAASSLQSGVPSRFSGGGSGTEFTLTVSSLQPEDFATYYCLQHHNFPYTFGQGTKLEIK

SEQ ID NO: 11103 - protein, 108 aa, Artificial Sequence
  source: /note="Description of Artificial Sequence: Synthetic polypeptide"
EIVLTQSPDTISLSPGERATLSCRASQSISSIYLAWYQQKPGQAPRLLIYGASSRVTGIPDRFSVSGSGTDFTLTISRLEPEDFAVYYCQHYGISPFTFGPGTKVDIR

SEQ ID NO: 11104 - protein, 107 aa, Artificial Sequence
  source: /note="Description of Artificial Sequence: Synthetic polypeptide"
DIQMTQSPSTLSASVGDRVTITCRASQSISDWLAWYQQKPGKAPKLLIFKASTLESGVPSRFSGSGSGTEFTLTISSLQPDDFATYYCQQYNSYSRTFGQGTKVEIK

SEQ ID NO: 11105 - protein, 107 aa, Artificial Sequence
  source: /note="Description of Artificial Sequence: Synthetic polypeptide"
DIQMTQSPSTLSASVGDRVIITCRASQNINNWLAWYQQQPGKAPKLLIYEASSLESGVPSRFSGSGSGTEFTLTIGSLQPDDFATYYCQHYNSYSRTFGQGTKVDIK

SEQ ID NO: 11106 - protein, 108 aa, Artificial Sequence
  source: /note="Description of Artificial Sequence: Synthetic polypeptide"
AIRMTQSPSTLSASVGDRVTITCRASQSISDWLAWYQQKPGKAPNLLIYKASSLESGVPSRFSGSGSGTEFTLTISGLQPDDFATYYCQQYNSYSRTFGQGTKLEIKR

SEQ ID NO: 11107 - protein, 107 aa, Artificial Sequence
  source: /note="Description of Artificial Sequence: Synthetic polypeptide"
AIRMTQSPSSLSASVGDRVTITCRASQDINSYLAWFQQKPGKAPKSLIYTASSLQSGVPSKFSGSGSGTDFTLTISSLQPEDFATYYCQQYNTYPYTFGQGTKVESK

SEQ ID NO: 11108 - protein, 107 aa, Artificial Sequence
  source: /note="Description of Artificial Sequence: Synthetic polypeptide"
DIQMTQSPSTLSASVGDRLTITCRASQSISTWLAWYQQKPGKAPTLLIYKASSLESGVPSRFSGSGSGTDFTLTISSLQPDDFATYYCQQYKTSWTFGQGTKLEIKR

SEQ ID NO: 11109 - protein, 113 aa, Artificial Sequence
  source: /note="Description of Artificial Sequence: Synthetic polypeptide"
AIQLTQSPDSLALSLGERATINCKSSQSVLYSSNNKNYLAWYQQKPGQPPKLLIYWASSRESGVPDRFSGSGSGTDFTLTISSLQAEDVAVYYCQQFYGTPYTFGQGTKVDIK

SEQ ID NO: 11110 - protein, 107 aa, Artificial Sequence
  source: /note="Description of Artificial Sequence: Synthetic polypeptide"
AIRMTQSPSSLSASVGDRVTITCRASQDISNYLAWFQQQPGKAPKSLIYATSSLNSGVPSKFSGSGSGTDFTLTISSLQPEDFATYYCQQYKSYPLTFGGGTKVEIK

SEQ ID NO: 11111 - protein, 113 aa, Artificial Sequence
  source: /note="Description of Artificial Sequence: Synthetic polypeptide"
DIVMTQSPESLAVSLGERATINCKSSQSILYSSNNKNYLAWYQLKPGQPPNLLIYWASTRESGVPDRFSGSGSGTDFTLTIGSLQAEDVAVYYCQQYYSTPFTFGPGTKVDIK

SEQ ID NO: 11112 - protein, 107 aa, Artificial Sequence
  source: /note="Description of Artificial Sequence: Synthetic polypeptide"
DIQMTQSPSTLSASVGDRVTITCRASQSISSWLSWYQQKPGKAPKLLIYMASTLESGVPSRFSGSGSGTDFTLTITSLQPDDFATYYCQQSNSYSRTFGHGTKLEIK

SEQ ID NO: 11113 - protein, 107 aa, Artificial Sequence
  source: /note="Description of Artificial Sequence: Synthetic polypeptide"
DIQLTQSPSTLSASVGDRVTITCRASQSFNNWLSWYQQKPGKAPKLLIYMASTLESGVPSRFSGSGSGTDFTLTINSLQPDDFATYYCQQSNSYSRTFGHGTKVEIK

SEQ ID NO: 11114 - protein, 107 aa, Artificial Sequence
  source: /note="Description of Artificial Sequence: Synthetic polypeptide"
DIQLTQSPSTLSASVGDRVTITCRASQSISDWLAWYQQKPGKAPNLLIYKASTLESGVPSRFSGSGSGTEFTLTISSLQPDDFATYYCQQYNSYSRTFGQGTKVEIK

SEQ ID NO: 11115 - protein, 107 aa, Artificial Sequence
  source: /note="Description of Artificial Sequence: Synthetic polypeptide"
AIQMTQSPSTLSASVGDIVTITCRASQSISDWLAWYQQKPGKAPKLLIFKASSLESGVPSRFSGSGSGTDFTLTISSLQPDDFATYYCQQYNSYSRTFGQGTKVDIK

SEQ ID NO: 11116 - protein, 112 aa, Artificial Sequence
  source: /note="Description of Artificial Sequence: Synthetic polypeptide"
DIQLTQSPDSLAVSLGERATINCKSSQSVLYRSNNKKFLVWYQQKPGQPPKPLIYWASTRESGVPDRFSGSGSGTDFTLTINSLQAEDVAVYYCQQYYSTPYTFGQGTKVEI

SEQ ID NO: 11117 - protein, 113 aa, Artificial Sequence
  source: /note="Description of Artificial Sequence: Synthetic polypeptide"
DIVMTQSPESLAVSLGERATINCKSSQNILYRSNNKNYLAWYQQKPGQPPKLLIYWASTRESGVPDRFSGSGSGTDFTLTISSLQAEDVAVYYCQQYYGTPYTFGQGTNLEIK

SEQ ID NO: 11118 - protein, 107 aa, Artificial Sequence
  source: /note="Description of Artificial Sequence: Synthetic polypeptide"
DIQMTQSPSSLSASVGDRVTITCRASQGIRNDLGWYQLKPGKAPKRLIFAASSLQSGVPSRFSGSGSGTEFTLTISSLQPEDFATYYCLQHNSYPWTFGQGTKVEIK

SEQ ID NO: 11119 - protein, 113 aa, Artificial Sequence
  source: /note="Description of Artificial Sequence: Synthetic polypeptide"
DIVMTQSPDSPAVSLGERATINCKSSQSVLYSSSNKNYLAWYQQKPGQPPRLLIYWASTRESGVPDRFSGSGSGTDFTLTISSLQAEDVAVYYCQQYYSGPYTFGQGTKLEIK

SEQ ID NO: 11120 - protein, 113 aa, Artificial Sequence
  source: /note="Description of Artificial Sequence: Synthetic polypeptide"
DIVMTQSPDSLAVSLGERATINCKSSQSVLYRSDNKNYLAWYQQRPGQPPKLLIYWASTRESGVPGRFSGSGSGTDFTLTISSLQGEDVAVYYCHQYYNIPFTFGPGTKVDIK

SEQ ID NO: 11121 - protein, 112 aa, Artificial Sequence
  source: /note="Description of Artificial Sequence: Synthetic polypeptide"
DIQMTQSPDSLAVSLGERATINCKSSQSVLYSSNNKNYLAWYQQKPGQPPKLLIYWASTRESGVPDRFSGSGSGTDFTLTISSLQAEDVAVYYCQQYYSTPYTFGQGTKLEI

SEQ ID NO: 11122 - protein, 112 aa, Artificial Sequence
  source: /note="Description of Artificial Sequence: Synthetic polypeptide"
AIQMTQSPDSLAVSLGERATINCKSSQSVLYSSNNKNYLAWYQQKPGQPPKLLIYWASTRESGVPDRFSGSGSGTDFTLTISSLQAEDVAVYYCQQYYSTPYTFGQGTKLEI

SEQ ID NO: 11123 - protein, 113 aa, Artificial Sequence
  source: /note="Description of Artificial Sequence: Synthetic polypeptide"
NIQMTQSPDSLAVSLGERATINCKSSQSVLYSSNNKNYLAWYQQKPGQPPKLLIYWASTRESGVPDRFSGSGSGTDFTLTISSLQAEDVAVYYCQQYYSTPYTFGQGTKLEIK

SEQ ID NO: 11124 - protein, 113 aa, Artificial Sequence
  source: /note="Description of Artificial Sequence: Synthetic polypeptide"
DIQLTQSPGSLAVSLGERATINCKSSQSVLYSSNNKNYLAWYQQKPGQPPKLLIYWASTRESGVPDRFSGSGSGTDFTLTISSLQAEDVAVYYCQQYYSTPYTFGQGTKLEIK

SEQ ID NO: 11125 - protein, 112 aa, Artificial Sequence
  source: /note="Description of Artificial Sequence: Synthetic polypeptide"
AIRMTQSPDSLAVSLGERATINCKSSQSVLYSSNNKNYLAWYQQKPGQPPKLLIYWASTRESGVPDRFSGSGSGTDFTLTISSLQAEDVAVYYCQQYYSTPYTFGQGTKLEI

SEQ ID NO: 11126 - protein, 113 aa, Artificial Sequence
  source: /note="Description of Artificial Sequence: Synthetic polypeptide"
AIQMTQSPDSLAVSLGERATINCKSSQSVLYSSNNKNYLAWYQQKPGQPPKLLIYWASTRESGVPDRFSGSGSGTDFTLTISSLQAEDVAVYYCQQYYSTPITFGQGTRLEIK

SEQ ID NO: 11127 - protein, 113 aa, Artificial Sequence
  source: /note="Description of Artificial Sequence: Synthetic polypeptide"
AIQLTQSPDSLAVSLGERATINCKSSQSVLYSSNNKNYLAWYQQKPGQPPKLLIYWASTRESGVPDRFSGSGSGTDFTLTISSLQAEDVAVYYCQQYYSTPITFGQGTRLEIK

SEQ ID NO: 11128 - protein, 113 aa, Artificial Sequence
  source: /note="Description of Artificial Sequence: Synthetic polypeptide"
AIQMTQSPDSLAVSLGERATINCKSSQSVLYSSNNKNYLAWYQQKPGQPPRLLIYWASTRESGVPARFSGSGSGTDFTLTISSLQAEDVAVYYCQQYYSTPFTFGQGTKLEIK

SEQ ID NO: 11129 - protein, 113 aa, Artificial Sequence
  source: /note="Description of Artificial Sequence: Synthetic polypeptide"
NIQMTQSPDSLAVSLGERATINCKSSQSVLYSSNNKNYLAWYQQKPGQPPKLLIYWASTRESGVPDRFSGSGSGTDFTLTISSLQAEDVAVYYCQQYYSTPITFGQGTRLELR

SEQ ID NO: 11130 - protein, 113 aa, Artificial Sequence
  source: /note="Description of Artificial Sequence: Synthetic polypeptide"
AIQLTQSPDSLAVSLGERATINCKSSQSVLYSSNNKNYLAWYQQKPGQPPKLLIYWASTRESGVPDRFSGSGSGTDFTLTISSLQAEDVAVYYCQQYYSTPYTFGQGTKLEIK

SEQ ID NO: 11131 - protein, 113 aa, Artificial Sequence
  source: /note="Description of Artificial Sequence: Synthetic polypeptide"
AIQMTQSPDSLAVSLGERATINCKSSQSVLYSSNNKNYLAWYQQKPGQPPKLLIYWASTRESGVPDRFSGSGSGTDFTLTISSLQAEDVAVYYCQQYYSTPWTFGQGTKVEIK

SEQ ID NO: 11132 - protein, 113 aa, Artificial Sequence
  source: /note="Description of Artificial Sequence: Synthetic polypeptide"
DIQMTQSPDSLAVSLGERVTINCKSSQSVLYSSNNKNYLAWYQQKPGQPPKLLIYWASTRESGVPARFSGSGSGTDFTLTISSLQAEDVAVYYCQQYYSTPFTFGQGTKLEIM

SEQ ID NO: 11133 - protein, 113 aa, Artificial Sequence
  source: /note="Description of Artificial Sequence: Synthetic polypeptide"
AIQMTQSPDSLAVSLGERATINCKSSQSLLYSANNKNYLAWYQQKPGQPPKLLIYWASTRESGVPDRFSGSGSGTDFTLTISSLQAEDVAVYYCQQYYSTPWTFGQGTKVEIK

SEQ ID NO: 11134 - protein, 113 aa, Artificial Sequence; identical to SEQ ID NO: 11129
  source: /note="Description of Artificial Sequence: Synthetic polypeptide"

SEQ ID NO: 11135 - protein, 112 aa, Artificial Sequence
  source: /note="Description of Artificial Sequence: Synthetic polypeptide"
AIQMTQSPDSLAVSLGERATINCKSSQSVLYSPNKKNYLAWYQQKPGQPPKLLIYWASTRESGVPDRFSGSGSGTDFTLTISSLQAEDVAVYYCQQYYSTPYTFGQGTKLEI

SEQ ID NO: 11136 - protein, 113 aa, Artificial Sequence
  source: /note="Description of Artificial Sequence: Synthetic polypeptide"
EIVLTQSPDSLAVSLGERATINCKSSQSVLYSSNNKNYLAWYQQKPGQPPKLLIYWASTRESGVPDRFSGSGSGTDFTLTISSLQAEDVAVYYCQQYYSTPWTFGQGTRLEIK

SEQ ID NO: 11137 - protein, 113 aa, Artificial Sequence
  source: /note="Description of Artificial Sequence: Synthetic polypeptide"
AIWMTQSPDSLAVSLGERATINCKSSQSVLYSSNNKNYLAWYQQKPGQPPKLLIYWASTRESGVPDRFSGSGSGTDFTLTISSLQAEDVAVYYCQQYYSTPITFGQGTRLELR

SEQ ID NO: 11138 - protein, 112 aa, Artificial Sequence
  source: /note="Description of Artificial Sequence: Synthetic polypeptide"
AIQMTQSPDSLAVSLGERATINCKSSQSVLYSSNNKNYLAWYQQKPGQPPKLLIYWASTRESGVPDRFSGSGSGTDFTLTISSLQAEDVAVYYCQQYYSTPWTFGQGTKVEI

SEQ ID NO: 11139 - protein, 107 aa, Artificial Sequence
  source: /note="Description of Artificial Sequence: Synthetic polypeptide"
DIVMTQSPSSLSASVGDRVTITCRASQSISSYLNWYQQKPGKAPKLLIYAASSLQSGVPSRFSGSGSGTDFTLTISSLQPEDFATYYCQQSYSTPLTFGQGTKVEIK

SEQ ID NO: 11140 - protein, 107 aa, Artificial Sequence
  source: /note="Description of Artificial Sequence: Synthetic polypeptide"
DVVMTQSPSSLSASVGDRVTITCRASQSISSYLNWYQQKPGKAPKLLIYAASSLQSGVPSRFSGSGSGTDFTLTISSLQPEDFATYYCQQSYTTPYTFGQGTKLEIK

SEQ ID NO: 11141 - protein, 107 aa, Artificial Sequence
  source: /note="Description of Artificial Sequence: Synthetic polypeptide"
AIQMTQSPSSLSASVGDRVTITCRASQSISSYLNWYQQKPGKAPKLLIYAASSLQSGVPSRFSGSGSGTDFTLTISSLQPEDFATYYCQQSYSTPLTFGGGTKVEIK

SEQ ID NO: 11142 - protein, 107 aa, Artificial Sequence
  source: /note="Description of Artificial Sequence: Synthetic polypeptide"
EIVLTQSPSSLSASVGDRVTITCRASQSISSYLNWYQQKPGKAPKLLIYAASTLQSGVPSRFSGSGSGTDFTLTISSLQPEDFATYYCQQSYSTPPTFGQGTKVEIK

SEQ ID NO: 11143 - protein, 107 aa, Artificial Sequence
  source: /note="Description of Artificial Sequence: Synthetic polypeptide"
DIQMTQSPLSLSASVGDRVTITCRASQSVGSYLNWYQQKPGKAPKLLIFAAYSLQTGVPSRFSGSGSETEFSLTISGLQPEDFATYYCQQLNFYPFTFGPGTTVDIK

SEQ ID NO: 11144 - protein, 107 aa, Artificial Sequence
  source: /note="Description of Artificial Sequence: Synthetic polypeptide"
DIVMTQSPSSLSASVGDRVTITCRASQSISSYLNWYQQKPGKAPNLLIYAASSLQSGVPSRFSGSGSGTDFTLTISSLQPEDFATYYCQQSYSTPLTFGQGTKVEIK

SEQ ID NO: 11145 - protein, 107 aa, Artificial Sequence
  source: /note="Description of Artificial Sequence: Synthetic polypeptide"
DIVMTQSPSSVSASVGDRVTITCRASQGISSYLNWYQQKPGKAPKLLIYAASSLQSGVPSRFSGSGSGTDFTLTISSLQPEDFATYYCQQSYSTPITFGGGTKVEIK

SEQ ID NO: 11146 - protein, 107 aa, Artificial Sequence
  source: /note="Description of Artificial Sequence: Synthetic polypeptide"
ETTLTQSPSSLSASVGDRVTITCRASQSISSYLNWYQQKPGKAPKLLIYAASSLQSGVPSRFSGSGSGTDFTLTISSLQPEDFATYYCQQSYSTPRTFGQGTKVEIK

SEQ ID NO: 11147 - protein, 107 aa, Artificial Sequence
  source: /note="Description of Artificial Sequence: Synthetic polypeptide"
EIVMTQSPSSLSASVGDRVTITCRASQSISSYLNWYQQKPGKAPKLLIYAASSLQSGVPSRFSGSGSGTDFTLTISSLQPEDFATYYCQQSYSTPLTFGGGTKVEIK

SEQ ID NO: 11148 - protein, 107 aa, Artificial Sequence; identical to SEQ ID NO: 11141
  source: /note="Description of Artificial Sequence: Synthetic polypeptide"

SEQ ID NO: 11149 - protein, 107 aa, Artificial Sequence
  source: /note="Description of Artificial Sequence: Synthetic polypeptide"
AIQLTQSPSSLSASVGDRVTITCRASQSISSYLNWYQQKPGKAPKLLIYAASSLQSGVPSRFSGSGSGTDFTLTISSLQPEDFATYYCQQSYSTPLTFGGGTKVDIK

SEQ ID NO: 11150 - protein, 107 aa, Artificial Sequence
  source: /note="Description of Artificial Sequence: Synthetic polypeptide"
DVVMTQSPLSPSASVGDRVAITCRASQSIDTYLNWYQQKPGTAPKLLIYAASSLQSGVPSRFSGSGSGTDFTLTISSLQPEDFATYYCQQSYSTPITFGQGTRLELR

SEQ ID NO: 11151 - protein, 107 aa, Artificial Sequence
  source: /note="Description of Artificial Sequence: Synthetic polypeptide"
AIWMTQSPSSLSASVGDRVTITCRASQSISSYLNWYQQKPGKAPKLLIYAASKLEDGVPSRFSGSGAGTDFTLTISRLEPEDFATYYCQQSYSTPLTFGGGTKVEIK

SEQ ID NO: 11152 - protein, 110 aa, Artificial Sequence
  source: /note="Description of Artificial Sequence: Synthetic polypeptide"
QPVLTQPPSASGTPGQRVTISCSGSSSNIGSNTVNWYQQLPGMPPKVLISGNNQRPPGVPGRFSGSKSGTSASLAISGLQSEDEADYHCTAWDDNLNGPVFGGGTQLTVL

SEQ ID NO: 11153 - protein, 107 aa, Artificial Sequence
  source: /note="Description of Artificial Sequence: Synthetic polypeptide"
AIRMTQSPSSLSASVGDRVTITCRASQSISSYLNWYQQKPGKAPKLLIYAASSLQSGVPSRFSGSGSGTDFTLTISSLQPEDFATYYCQQSYSTPLTFGGGTKVEIK

SEQ ID NO: 11154 - protein, 112 aa, Artificial Sequence
  source: /note="Description of Artificial Sequence: Synthetic polypeptide"
AIQLTQSPDSLAVSLGERATINCKSSQSVLYSSNNKNYLAWYQQKPGQPPKLLIYRASTRESGVPDRFSGSGSGTDFTLTISSLQAEDVAVYYCQQYYSTPWTFGQGTKVEI

SEQ ID NO: 11155 - protein, 107 aa, Artificial Sequence
  source: /note="Description of Artificial Sequence: Synthetic polypeptide"
NIQMTQSPSSLSASVGDRVTITCRASQTISTYLNWYQQKPGKAPKLLIYGASSLQSGVPSRFSGSGSGTDFTLTISSLQPEDFATYYCQQSYSTPVTFGQGTKVEIK

SEQ ID NO: 11156 - protein, 107 aa, Artificial Sequence
  source: /note="Description of Artificial Sequence: Synthetic polypeptide"
DIQMTQSPSSLSASVGDRVTITCRASQSISSYLNWYQQKPGKAPKLLIYAASSLQSGVPSRFSGSGSGTDFTLTISSLQPEDFATYYCQQSYSTPRTFGQGTKVEIK

SEQ ID NO: 11157 - protein, 106 aa, Artificial Sequence
  source: /note="Description of Artificial Sequence: Synthetic polypeptide"
DIVMTQSPSSLSASVGDRVTITCRASQSISSYLNWYQQKPGKAPKLLIYAASNLQSGVPSRFSGSGSGTDFTLTISSLQREDFATYYCQQSYSAPTFGQGTKVEIK

SEQ ID NO: 11158 - protein, 110 aa, Artificial Sequence
  source: /note="Description of Artificial Sequence: Synthetic polypeptide"
QSVLTQPPSASGTPGQRVTISCSGSSSNIGSNPVNWYQQLPGTAPKLLIYSNRQRPSGVPDRFSGSRSGTSGSLAISGLQSEDEADYYCATWDDSLNGWVFGGGTQLTVL

SEQ ID NO: 11159 - protein, 107 aa, Artificial Sequence
  source: /note="Description of Artificial Sequence: Synthetic polypeptide"
DVVMTQSPLSLSASVGDRVTITCRASQTISRYLNWYQQKPGTAPKLLIYAASSLQSGVPSRFSGSGSGTDFTLTISSLQPEDFATYYCQQSYSTPPTFGQGTKVEIK

SEQ ID NO: 11160 - protein, 107 aa, Artificial Sequence
  source: /note="Description of Artificial Sequence: Synthetic polypeptide"
AIQMTQSPSSLSASVGDRVTITCRASQSISSYLNWYQQKPGKAPKLLIHAASNLQSGVPSRFSGSGSGTDFTLTISSLQPEDFATYYCQQSYSTPLTFGGGTKVEIK

SEQ ID NO: 11161 - protein, 110 aa, Artificial Sequence
  source: /note="Description of Artificial Sequence: Synthetic polypeptide"
QSELTQPPSASGTPGQRVTISCSGSSSNIGRNPVNWYQHLPGTAPKLLIYGDNQRPSGVPDRFSGSRSGTSASLAISGLQSEDEADYYCAAWDDSLNGVVFGGGTKLTVL

SEQ ID NO: 11162 - protein, 107 aa, Artificial Sequence
  source: /note="Description of Artificial Sequence: Synthetic polypeptide"
AIQMTQSPDSLSASVGDRVTITCRASQSISSYLNWYQQKPGKAPKLLIYAASSLQSGVPSRFSGSGSGTDFTLTISSLQPEDFATYYCQQSYSTPRTFGQGTKVEIK

SEQ ID NO: 11163 - protein, 106 aa, Artificial Sequence
  source: /note="Description of Artificial Sequence: Synthetic polypeptide"
DIVMTQSPSSLSASVGDRVTITCRASQSISSYLNWYQQKPGKAPKLLIYAASSLQSGVPSRFSGSGSGTDFTLTISSLQPEDFATYYCQQSYSAPTFGQGTKVEIK

SEQ ID NO: 11164 - protein, 107 aa, Artificial Sequence
  source: /note="Description of Artificial Sequence: Synthetic polypeptide"
AIRMTQSPSSLSASVGDRVTITCRASQSISSYLNWYQQKPGKAPKLLIYAASSLQSGVPSRFSGSGSGTDFTLTISSLQPEDFATYYCQQSYSTPLTFGGGTKLTVL

SEQ ID NO: 11165 - protein, 121 aa, Artificial Sequence; identical to SEQ ID NO: 8680
  source: /note="Description of Artificial Sequence: Synthetic polypeptide"

SEQ ID NO: 11166 - protein, 107 aa, Artificial Sequence
  source: /note="Description of Artificial Sequence: Synthetic polypeptide"
DIQLTQSPSSLSASLGDRVTITCRASESIRGYLNWYQQKPGKAPKLLIYAASSLQSGVPSRFSGSGSGTDFTLTISSLQPEDFATYFCQQSYSTPYTFGQGTKLEIK

SEQ ID NO: 11167 - protein, 107 aa, Artificial Sequence
  source: /note="Description of Artificial Sequence: Synthetic polypeptide"
AIQLTQSPSSVSASVGDRVTITCRASQSISSYLNWYQQKPGKAPKLLIYAASSLQSGVPSRFSGSGSGTDFTLTISSLQPEDFATYYCQQSYSTPLTFGGGTKLEIK

SEQ ID NO: 11168 - protein, 107 aa, Artificial Sequence
  source: /note="Description of Artificial Sequence: Synthetic polypeptide"
DVVMTQSPSSLSASVGDRVTITCRASQSISSYLNWYQQKPGKAPKLLIYAASSLQSGVPSRFSGSGSGTDFTLTISSLQPEDFATYYCQQSYSTPLTFGGGTKLEIK

SEQ ID NO: 11169 - protein, 110 aa, Artificial Sequence
  source: /note="Description of Artificial Sequence: Synthetic polypeptide"
QSVLTQPPSASGTPGQRVTISCSGSSSNIGSNNVNWYQQLPGTAPKLLIYSNDQRPSGVPDRFSGSRSGTSGSLAISGLQSEDEADYYCATWDDSLNGWVFGGGTKLTVL

SEQ ID NO: 11170 - protein, 107 aa, Artificial Sequence
  source: /note="Description of Artificial Sequence: Synthetic polypeptide"
NIQMTQSPSSLSASVGDRVTITCRASQSISSYLNWYQQKPGKAPKLLIYAASSLQSGVPSRFSGSGSGTDFTLTISSLQPEDFATYYCQQSYSTPYTFGQGTKLEIK

SEQ ID NO: 11171 - protein, 107 aa, Artificial Sequence
  source: /note="Description of Artificial Sequence: Synthetic polypeptide"
EIVMTQSPSSLSASVGDRVTITCRASQSISSYLNWYQQKPGKAPKLLIYAASSLQSGVPSRFSGSGSGTDFTLTISSLQPEDFATYYCQQSYSTPLTFGPGTKVDIK

SEQ ID NO: 11172 - protein, 110 aa, Artificial Sequence
  source: /note="Description of Artificial Sequence: Synthetic polypeptide"
QSVLTQPPSASETPGQRVTISCSGVSSNIGRNSVTWYQQLPGTAPKLLIYRNNQRPSGVPDRFSGSKSGTSASLAISGLRSEDEADYYCATWDDSLSGWVFGGGTKLTVL

SEQ ID NO: 11173 - protein, 107 aa, Artificial Sequence
  source: /note="Description of Artificial Sequence: Synthetic polypeptide"
AIRMTQSPSSLSASVGDRVTITCRASQSISSYLNWYQQKPGKAPKLLIYAASSLQSGVPSRFSGSGSGTDFTLTISSLQPEDFATYYCQQSYSTPLTFGGGTKLEIK

SEQ ID NO: 11174 - protein, 107 aa, Artificial Sequence
  source: /note="Description of Artificial Sequence: Synthetic polypeptide"
NIQMTQSPSSLSASVGDRVTITCRASQSISSYLNWYQQKPGKAPKLLIYAASSLQSGVPSRFSGSGSGTDFTLTISSLQPEDFATYYCQQSYSTPLTFGGGTKVEIK

SEQ ID NO: 11175 - protein, 106 aa, Artificial Sequence
  source: /note="Description of Artificial Sequence: Synthetic polypeptide"
AIRMTQSPSSLSASVGDRVTITCRASQSISSYLNWYQQKPGKAPKLLIYAASSLQSGVPSRFSGSGSGTDFTLTISSLQPEDFATYYCQQSYSAPTFGQGTKVGIK

SEQ ID NO: 11176 - protein, 112 aa, Artificial Sequence; identical to SEQ ID NO: 11125
  source: /note="Description of Artificial Sequence: Synthetic polypeptide"

SEQ ID NO: 11177 - protein, 110 aa, Artificial Sequence
  source: /note="Description of Artificial Sequence: Synthetic polypeptide"
QSELTQPPSASGTPGQRVTISCSGSSSNIGSNPVNWYQQLPGTAPKLLIYSNRQRPSGVPDRFSGSRSGTSGSLAISGLQSEDEADYYCATWDDSLNGWVFGGGTQLTVL

SEQ ID NO: 11178 - protein, 107 aa, Artificial Sequence
  source: /note="Description of Artificial Sequence: Synthetic polypeptide"
DIQLTQSPSSLSASVGDRVTITCRASQSISSYLNWYQQKPGKAPKLLIYAASSLQSGVPSRFSGSGSGTDFTLTISSLQPEDFATYYCQQSYSTPYTFGQGTKLEIK

SEQ ID NO: 11179 - protein, 110 aa, Artificial Sequence
  source: /note="Description of Artificial Sequence: Synthetic polypeptide"
QSELTQPPSASGTPGQGVTISCSGSSSNIGSNTVQWYQQFPGRAPKLLIYSNNRRPSGVPDRFSGSKSGTSASLAISGLRSEDQADYYCAAWDDSLSVVVFGGGTKLTVL

SEQ ID NO: 11180 - protein, 107 aa, Artificial Sequence
  source: /note="Description of Artificial Sequence: Synthetic polypeptide"
AIWMTQSPSSLSASVGDRVTITCRTSQSISNYLNWYQQKPGKAPKLLIYARSSLQSGVPSRFSGSGSGTDFTLTISSLQPEDFATYYCQQSYSTPITFGQGTRLEIK

SEQ ID NO: 11181 - protein, 110 aa, Artificial Sequence
  source: /note="Description of Artificial Sequence: Synthetic polypeptide"
QSVLTQPPSASGTPGQRVTISCSGSSSNIGSNIVNWFQQLPGTAPKLLIYSDNQRPSGVPDRFSGSRSGTSGSLAISGLQSEDEADYYCATWDDSLNGWVFGGGTKLTVL

SEQ ID NO: 11182 - protein, 107 aa, Artificial Sequence
  source: /note="Description of Artificial Sequence: Synthetic polypeptide"
NIQMTQSPSSLSASVGDRVTITCRASQSISSYLNWYQQKPGKAPKLLIYDASSLQSGVPLRFSGSGSGTDFTLTISSLQPEDFATYYCQQSYSTPLTFGGGTKVDIK

SEQ ID NO: 11183 - protein, 107 aa, Artificial Sequence
  source: /note="Description of Artificial Sequence: Synthetic polypeptide"
AIQLTQSPSSLSASVGDRVTITCRASQSISSYLNWYQQKPGKAPKLLIYAASSLQSGVPSRFSGSGSGTDFTLTISSLQPEDFAAYYCQQSYTTPLTFGQGTKVEIK

SEQ ID NO: 11184 - protein, 107 aa, Artificial Sequence
  source: /note="Description of Artificial Sequence: Synthetic polypeptide"
AIWMTQSPSSLSASVGDRVTIPCRSSQNINNFVNWYQQKPGKAPKLLIYAASRLKGGVPSRFSGSGSGTDFTLTISSLQPEDFATYYCQQSYSTPLTFGGGTKLEIK

SEQ ID NO: 11185 - protein, 107 aa, Artificial Sequence
  source: /note="Description of Artificial Sequence: Synthetic polypeptide"
DVVMTQSPSSLSASVGDRVTITCRASQSISSYLNWYQQKPGKAPKLLIYAASSLQSGVPSRFSGSGSGTDFTLTISSLQPEDFATYYCQQSYSTPLTFGGGTKVEIK

SEQ ID NO: 11186 - protein, 110 aa, Artificial Sequence
  source: /note="Description of Artificial Sequence: Synthetic polypeptide"
QSVLTQPPSVSEAPRQRVTISCSGSSSNIGKNAVHWYQQLPGKAPRLLIYYDDLLPSGVSDRFSGSRSGTSASLAISGLRSEDEADYYCAAWDDSLSGWVFGGGTKLTVL

SEQ ID NO: 11187 - protein, 112 aa, Artificial Sequence; identical to SEQ ID NO: 11138
  source: /note="Description of Artificial Sequence: Synthetic polypeptide"

SEQ ID NO: 11188 - protein, 107 aa, Artificial Sequence
  source: /note="Description of Artificial Sequence: Synthetic polypeptide"
EIVLTQSPSSLSASVGDRVTITCRASQSISSYLNWYQQKPGKAPKLLIYAASSLQSGVPSRFSGSGSGTDFTLTISGLQPEDFATYYCQQSYSSPLTFGGGTKVEIK

SEQ ID NO: 11189 - protein, 107 aa, Artificial Sequence; identical to SEQ ID NO: 11147
  source: /note="Description of Artificial Sequence: Synthetic polypeptide"

SEQ ID NO: 11190 - protein, 107 aa, Artificial Sequence
  source: /note="Description of Artificial Sequence: Synthetic polypeptide"
DIVMTQTPLSLSASVGDRVTITCRASQSIDTYLNWYQQKPGKAPKLLIYAASSLQSGVPSRFSGSGSGTDFTLTISSLQPEDFATYYCQQSYSTPLTFGGGTKVDIK

SEQ ID NO: 11191 - protein, 116 aa, Artificial Sequence
  source: /note="Description of Artificial Sequence: Synthetic polypeptide"
QSVLTQPPSASGTPGQRVSISCSGSSSNIGANYVSWYQQLPGTAPRLLIYTNDQRPSGVPDRFSGSKSGTSASLAISGLRSEDEADYYCAAWDDSPTGDDSLSSYVFGTGTKVTVL

SEQ ID NO: 11192 - DNA, 364 bp, Artificial Sequence
  source: /note="Description of Artificial Sequence: Synthetic polynucleotide"
gaagttcaattgttagagtctggtggcggtcttgttcagcctggtggttctttacgtctttcttgcgctgcttccggattcactttctctaagtacgatatgcattgggttcgccaagctcctggtaaaggtttggagtgggtttctgttatctctccttctggtggctggacttcttatgctgactccgttaaaggtcgcttcactatctctagagacaactctaagaatactctctacttgcagatgaacagcttaagggctgaggacaccgccatgtattactgtgcgagggatgactacagtaaaggacgggatgcttttgatatctggggccaagggaccacggtcaccgtctcaagcg

SEQ ID NO: 11193 - protein, 107 aa, Artificial Sequence
  source: /note="Description of Artificial Sequence: Synthetic polypeptide"
EIVLTQSPSSLSASVGDRVTITCRASQSISSYLNWYQQKPGKAPKLLIYAASSLQSGVPSRFSGSGSGTDFTLAISSLQPEDFATYYCQQSYSTPLTFGGGTKVEIK

SEQ ID NO: 11194 - protein, 107 aa, Artificial Sequence
  source: /note="Description of Artificial Sequence: Synthetic polypeptide"
EIVLTQSPSSLSASVGDRVAITCRASQSISSYLNWYQQKPGKAPKLLIYAASSLQSGVPSRFSGSGSGTDFTLTISSLQPEDFATYYCQQSYSTPYTFGQGTKVDIK

SEQ ID NO: 11195 - protein, 107 aa, Artificial Sequence
  source: /note="Description of Artificial Sequence: Synthetic polypeptide"
EIVLTQSPLSLSASVGDRVTITCRASQSISSYLNWYQQKPGKAPKLLIYAASSLQSGVPSRFSGSGSGTDFTLTISSLQPEDFATYYCQQSYSTPLTFGGGTKVDIK

SEQ ID NO: 11196 - protein, 107 aa, Artificial Sequence
  source: /note="Description of Artificial Sequence: Synthetic polypeptide"
NIQMTQSPSSLSASVGDRVTITCRASQSISSYLNWYQQKPGKAPELLIYAASSLQSGVPSRFSGSGSGTDFTLTISSLQPEDFATYYCQQSYSTPLTFGGGTKVEIK

SEQ ID NO: 11197 - DNA, 355 bp, Artificial Sequence
  source: /note="Description of Artificial Sequence: Synthetic polynucleotide"
gaagttcaattgttagagtctggtggcggtcttgttcagcctggtggttctttacgtctttcctgcgctgcttccggattcactttctctcattacgagatgggttgggttcgccaagctcctggtaaaggtttggagtgggtttcttatatctcttcttctggtggctggactacttatgctgactccgttaaaggtcgcttcactatctctagagacaactctaagaatactctctacttgcagatgaacagcttaagggctgaggacacggccgtgtattactgtgcaaggattgactacgcagatgcttttgatatctggggccaaggcaccctggtcactgtctcaagcg

SEQ ID NO: 11198 - protein, 112 aa, Artificial Sequence; identical to SEQ ID NO: 11122
  source: /note="Description of Artificial Sequence: Synthetic polypeptide"

SEQ ID NO: 11199 - protein, 107 aa, Artificial Sequence
  source: /note="Description of Artificial Sequence: Synthetic polypeptide"
EIVLTQSPSSLSASVGDRVAIACRASQSIDTYLNWYQQKPGKAPKLLIYAASSLQSGVPSRFSGSGSGTDFTLTISSLQPEDFATYYCQQSYSTPLTFGGGTKVEIK

SEQ ID NO: 11200 - protein, 107 aa, Artificial Sequence
  source: /note="Description of Artificial Sequence: Synthetic polypeptide"
EIVLTQSPSSLSASVGDRVTITCRASQSISSYLNWYQQKPGKAPKLLIYGASSLQSGVPSRFSGSGSGTDFTLTISSLQPEDFATYYCQQSYSTPLTFGGGTKVEIK

SEQ ID NO: 11201 - protein, 107 aa, Artificial Sequence
  source: /note="Description of Artificial Sequence: Synthetic polypeptide"
EIVMTQSPSSLSASVGDRVAITCRASQSIDTYLNWYQQKPGKAPKLLIYAASSLQSGVPSRFSGSGSGTDFTLTISSLQPEDFAIYYCQQSYSTPLTFGGGTKVEIK

SEQ ID NO: 11202 - protein, 107 aa, Artificial Sequence
  source: /note="Description of Artificial Sequence: Synthetic polypeptide"
DVVMTQSPLSLSASVGDRVAITCRASQSIDTYLNWYQQKPGKAPKPLIYAASSLRSGVPSRFSGSGSGTDFTLTISSLQPEDFATYYCQQSYSTSLTFGGGTKVDIK

SEQ ID NO: 11203 - protein, 107 aa, Artificial Sequence
  source: /note="Description of Artificial Sequence: Synthetic polypeptide"
EIVMTQSPSSLSASVGDRVTITCRASQSISSYLNWYQQKPGKAPKLLIYAASSLQSGVPSRFSGSGSGTDFTLTISSLQPEDFATYYCQQSYSTPLTFGPGTKVEIK

SEQ ID NO: 11204 - protein, 107 aa, Artificial Sequence
  source: /note="Description of Artificial Sequence: Synthetic polypeptide"
EIVLTQSPLSLSASVGDRVTITCRASQSISTYLNWYQQKPGKAPRLLIYAASSLQSGVPSRFSGSGSGTDFTLTISSLQPEDFATYYCQQSYSTPITFGQGTRLEIK

SEQ ID NO: 11205 - protein, 107 aa, Artificial Sequence
  source: /note="Description of Artificial Sequence: Synthetic polypeptide"
DIQLTQSPSSLSASVGDRVTITCRASQSISSYLNWYQQKPGKAPKLLIYAASSLQSGVPSRFSGSGSGTDFTLTISSLQPEDFATYYCQQSYSTPLTFGGGTRLEIK

SEQ ID NO: 11206 - protein, 107 aa, Artificial Sequence
  source: /note="Description of Artificial Sequence: Synthetic polypeptide"
AIWMTQSPSSLSASVGDRVTITCRASQSISSYLNWYQQKPGKAPKLLIYAASSLQSGVPSRFSGSGSGTDFTLTISSLQPEDSATYYCQQSYSTPYTFGGGTKVEIK

SEQ ID NO: 11207 - protein, 107 aa, Artificial Sequence; identical to SEQ ID NO: 11185
  source: /note="Description of Artificial Sequence: Synthetic polypeptide"

SEQ ID NO: 11208 - protein, 107 aa, Artificial Sequence
  source: /note="Description of Artificial Sequence: Synthetic polypeptide"
AIWMTQSPSSLSASVGDRVTITCRASQSISSYLNWYQQKPGKAPKLLIYAASSLQSGVPSRFSGGGSGTDFTLTISSLQPEDFATYYCQQSYSTPLTFGGGTRLEIK

SEQ ID NO: 11209 - protein, 113 aa, Artificial Sequence
  source: /note="Description of Artificial Sequence: Synthetic polypeptide"
AIWMTQSPDSLAVSLGERATINCKSSQSVLYSSNNKNYLAWYQQKPGQPPKLLIYWASTRESGVPDRFSGSGSGTDFTLTISSLQAEDVAVYYCQQYYSTPYTFGQGTKLEIK

SEQ ID NO: 11210 - protein, 107 aa, Artificial Sequence; identical to SEQ ID NO: 11147
  source: /note="Description of Artificial Sequence: Synthetic polypeptide"

SEQ ID NO: 11211 - protein, 107 aa, Artificial Sequence
  source: /note="Description of Artificial Sequence: Synthetic polypeptide"
EIVLTQSPSSVSASVGDRVTITCRASQSISTYLNWYRQKPGKAPNLLISTASNLQSGVPSRFSGSGSGTDFTLTISSLQPEDFATYSCQQSYSTPFTFGPGTKVDIK

SEQ ID NO: 11212 - protein, 107 aa, Artificial Sequence
  source: /note="Description of Artificial Sequence: Synthetic polypeptide"
DVVMTQSPSSLSASVGDRVTITCRASQSISSYLNWYQQKPGKAPKLLIYAASSLQSGVPSRFSGSGSGTDFTLTISSLQPEDFATYYCQQSYSTPYTFGQGTRLEIK

SEQ ID NO: 11213 - protein, 112 aa, Artificial Sequence
  source: /note="Description of Artificial Sequence: Synthetic polypeptide"
AIQMTQSPDSLAVSLGERATINCKSSQSVLYSSNNKNYLAWYQQKPGQPPKLLIYWASTRESGVPDRFSGSGSGTDFTLTISSLQAEDVAVYYCQQYYSTPITFGQGTRLEI

SEQ ID NO: 11214 - protein, 113 aa, Artificial Sequence
  source: /note="Description of Artificial Sequence: Synthetic polypeptide"
DIVMTQSPDSLAVSLGERATINCKSSQSVLYSSNNKNYLAWYQQKPGQPPKLLIYWASTRESGVPDRFSGSGSGTDFTLTISSLQAEDVAVYYCQQYYSIPWTFGQGTKVEIK

SEQ ID NO: 11215 - protein, 113 aa, Artificial Sequence
  source: /note="Description of Artificial Sequence: Synthetic polypeptide"
NIQMTQSPDSLAVSLGERVTINCKSSQSVLYSSNNKNYLAWYQQKPGQPPKLLIYWASTRESGVPARFSGSGSGTDFTLTISSLQAEDVAVYYCQQYYSTPFTFGQGTKVEIK

SEQ ID NO: 11216 - protein, 112 aa, Artificial Sequence
  source: /note="Description of Artificial Sequence: Synthetic polypeptide"
AIQMTQSPDSLAVSLGERATINCKSSQSVLYSSNNKNYLAWYQQKPGQPPKLLIYWASTRESGVPDRFSGSGSGTDFTLTISSLQAEDVAVYYCQQYYSTPWTFGQGTKLEI

SEQ ID NO: 11217 - protein, 112 aa, Artificial Sequence; identical to SEQ ID NO: 11121
  source: /note="Description of Artificial Sequence: Synthetic polypeptide"

SEQ ID NO: 11218 - protein, 112 aa, Artificial Sequence
  source: /note="Description of Artificial Sequence: Synthetic polypeptide"
AIQMTQSPDSLAVSLGERATINCKSSQSVLYSSNNKNYLAWYQQKPGQSPKLLIYWASTRESGVPDRFSGSGSGTDFTLTISSLQAEDVAVYYCQQYYSTPITFGQGTRLEL

SEQ ID NO: 11219 - protein, 112 aa, Artificial Sequence; identical to SEQ ID NO: 11154
  source: /note="Description of Artificial Sequence: Synthetic polypeptide"

SEQ ID NO: 11220 - protein, 112 aa, Artificial Sequence
  source: /note="Description of Artificial Sequence: Synthetic polypeptide"
EIVMTQSPDSLAVSLGERATINCKSSQSVLYSSNNKNYLAWYQQKPGQPPKLLIYWASTRESGVPDRFSGSGSGTDFTLTISSLQAEDVAVYYCQQYYSTPWTFGQGTKVEI

SEQ ID NO: 11221 - protein, 112 aa, Artificial Sequence; identical to SEQ ID NO: 11121
  source: /note="Description of Artificial Sequence: Synthetic polypeptide"

SEQ ID NO: 11222 - protein, 112 aa, Artificial Sequence; identical to SEQ ID NO: 11122
  source: /note="Description of Artificial Sequence: Synthetic polypeptide"

SEQ ID NO: 11223 - protein, 113 aa, Artificial Sequence
  source: /note="Description of Artificial Sequence: Synthetic polypeptide"
NIQMTQSPDSLAVSLGERATINCKSSQSVLYSSNNKNYLAWYQQKPGQPPKLLIYWASTRESGVPDRFSGSGSGTDFTLTISSLQAEDVAVYYCQQYYSTPYTFGQGTKVEIK

SEQ ID NO: 11224 - protein, 112 aa, Artificial Sequence
  source: /note="Description of Artificial Sequence: Synthetic polypeptide"
DIQLTQSPDSLAVSLGERATINCKSSQSVLYSSNNKNYLAWYQQKPGQPPKLLIYWASTRESGVPDRFSGSGSGTDFTLTISSLQAEDVAVYYCQQYYSTPWTFGQGTKVEI

SEQ ID NO: 11225 - protein, 112 aa, Artificial Sequence
  source: /note="Description of Artificial Sequence: Synthetic polypeptide"
DIVMTQSPDSLAVSLGERATINCKSSQSVLYSSNNKNYLAWYQQKPGQPPKLLIYWASTRESGVPDRFSGSGSGTDFTLTISSLQAEDVAVYYCQQYYSTPWTFGQGTKVEI

SEQ ID NO: 11226 - protein, 112 aa, Artificial Sequence; identical to SEQ ID NO: 11224
  source: /note="Description of Artificial Sequence: Synthetic polypeptide"

SEQ ID NO: 11227 - protein, 112 aa, Artificial Sequence
  source: /note="Description of Artificial Sequence: Synthetic polypeptide"
AIQMTQSPDSLAVSLGERATINCKSSQSVLYSSNNKNYLAWYQQKPGQPPKLLIYWASTRESGVPDRFSGTGSGTDFTLTISSLQAEDVAVYYCQQYYSTPFTFGQGTRLEL

SEQ ID NO: 11228 - protein, 106 aa, Artificial Sequence
  source: /note="Description of Artificial Sequence: Synthetic polypeptide"
EIVLTQSPATLSLSPGERATLSCRASQSVSSYLAWYQQKPGQAPRLLIYDASNRATGIPARFSGSGSGTDFTLTISSLEPEDFAVYYCQQRSNWPTFGQGTKVEIK

SEQ ID NO: 11229 - protein, 108 aa, Artificial Sequence
  source: /note="Description of Artificial Sequence: Synthetic polypeptide"
DIQLTQSPSSLSASVGDRVTISCRASQDISNYLNWYQQKPGKAPKLLIYYTSILHSGVPSRFSGSGSGTDYTFTISSLQPEDIATYYCQQGNTLPWTFGGGTKVQIKR

SEQ ID NO: 11230 - protein, 108 aa, Artificial Sequence; identical to SEQ ID NO: 6060
  source: /note="Description of Artificial Sequence: Synthetic polypeptide"

SEQ ID NO: 11231 - protein, 108 aa, Artificial Sequence
  source: /note="Description of Artificial Sequence: Synthetic polypeptide"
QIVLTQSPAIMSASPGEKVTLTCSASSSVSSSYLYWYQQKPGSSPKLWIYSTSNLASGVPARFSGSGSGTSYSLTISSMEAEDAASYFCHQWSSYPRTFGAGTKLELK

SEQ ID NO: 11232 - protein, 107 aa, Artificial Sequence
  source: /note="Description of Artificial Sequence: Synthetic polypeptide"
DIQMTQSPSSLSASVGDRVTITCKASQDVGIAVAWYQQKPGKVPKLLIYWASTRHTGVPDRFSGSGSGTDFTLTISSLQPEDVATYYCQQYSSYPYTFGQGTKVEIK

SEQ ID NO: 11233 - protein, 219 aa, Artificial Sequence
  source: /note="Description of Artificial Sequence: Synthetic polypeptide"
DIVMTQAAPSVPVTPGESVSISCRSSKSLLHSNGNTYLYWFLQRPGQSPQLLIYRMSNLASGVPDRFSGSGSGTAFTLRISRVEAEDVGVYYCMQHLEYPLTFGAGTKLELKRADAAPTVSIFPPSSEQLTSGGASVVCFLNNFYPKDINVKWKIDGSERQNGVLNSWTDQDSKDSTYSMSSTLTLTKDEYERHNSYTCEATHKTSTSPIVKSFNRNEC

SEQ ID NO: 11234 - protein, 111 aa, Artificial Sequence
  source: /note="Description of Artificial Sequence: Synthetic polypeptide"
AIQLTQSPSSLSASVGDRVTITCRASESVEYYGTSLMQWYQQKPGKAPKLLIYAASNVESGVPSRFSGSGSGTDFTLTISSLQPEDFATYFCQQSRKDPSTFGGGTKVEIK

SEQ ID NO: 11235 - protein, 111 aa, Artificial Sequence
  source: /note="Description of Artificial Sequence: Synthetic polypeptide"
DIVLTQSPASLAVSLGQRATISCRASESVEYYGTSLMQWYQQKPGQPPKLLIYAASNVESGVPARFSGSGSGTDFSLNIHPVEEDDIAIYFCQQSRKDPSTFGGGTKLEIK

SEQ ID NO: 11236 - protein, 111 aa, Artificial Sequence
  source: /note="Description of Artificial Sequence: Synthetic polypeptide"
DIVLTQSPDSLAVSLGERATINCRASESVEYYGTSLMQWYQQKPGQPPKLLIYAASNVESGVPDRFSGSGSGTDFTLTISSLQAEDVAVYYCQQSRKDPSTFGGGTKVEIK

SEQ ID NO: 11237 - protein, 111 aa, Artificial Sequence
  source: /note="Description of Artificial Sequence: Synthetic polypeptide"
DIVLTQSPDSLAVSLGERATINCRASESVEYYGTSLMQWYQQKPGQPPKLLIYAASNVESGVPDRFSGSGSGTDFTLTISSLQAEDVAVYFCQQSRKDPSTFGGGTKVEIK

SEQ ID NO: 11238 - protein, 111 aa, Artificial Sequence
  source: /note="Description of Artificial Sequence: Synthetic polypeptide"
EIVLTQSPATLSLSPGERATLSCRASESVEYYGTSLMQWYQQKPGQAPRLLIYAASNVESGIPARFSGSGSGTDFTLTISSLEPEDIAVYFCQQSRKDPSTFGGGTKVEIK

SEQ ID NO: 11239 - protein, 111 aa, Artificial Sequence; identical to SEQ ID NO: 11234
  source: /note="Description of Artificial Sequence: Synthetic polypeptide"

SEQ ID NO: 11240 - protein, 111 aa, Artificial Sequence; identical to SEQ ID NO: 11236
  source: /note="Description of Artificial Sequence: Synthetic polypeptide"

SEQ ID NO: 11241 - protein, 111 aa, Artificial Sequence
  source: /note="Description of Artificial Sequence: Synthetic polypeptide"
AIRLTQSPSSFSASTGDRVTITCRASESVEYYGTSLMQWYQQKPGKAPKLLIYAASNVESGVPSRFSGSGSGTDFTLTISSLQSEDFATYYCQQSRKDPSTFGGGTKVEIK

SEQ ID NO: 11242 - protein, 127 aa, Artificial Sequence
  source: /note="Description of Artificial Sequence: Synthetic polypeptide"
MSVLTQVLALLLLWLTGARCDIQMTQSPASLSASVGETVTITCRASGNIHNYLAWYQQKQGKSPQLLVYNAKTLADGVPSRFSGSESGTQYSLKINSLQPEDFGSYYCQHFWSTPFTFGSGTKLELK

SEQ ID NO: 11243 - protein, 107 aa, Artificial Sequence
  source: /note="Description of Artificial Sequence: Synthetic polypeptide"
DIQMTQSPSSLSASVGDRVTITCRASGNIHNYLAWYQQKPGKAPKLLIYNAKTLADGVPSRFSGSGSGTDFTLTISSLQPEDFATYYCQHFWSTPFTFGQGTKLEIK

SEQ ID NO: 11244 - protein, 107 aa, Artificial Sequence
  source: /note="Description of Artificial Sequence: Synthetic polypeptide"
DIQMTQSPSSLSASVGDRVTITCRASGNIHNYLAWYQQKPGKAPKRLIYNAKTLADGVPSRFSGSGSGTEFTLTISSLQPEDFATYYCQHFWSTPFTFGQGTKLEIK

SEQ ID NO: 11245 - protein, 107 aa, Artificial Sequence
  source: /note="Description of Artificial Sequence: Synthetic polypeptide"
DIQMTQSPSSLSASVGDRVTITCRASGNIHNYLAWYQQKPGKVPKLLIYNAKTLADGVPSRFSGSGSGTDFTLTISSLQPEDVATYYCQHFWSTPFTFGGGTKVEIK

SEQ ID NO: 11246 - protein, 107 aa, Artificial Sequence
  source: /note="Description of Artificial Sequence: Synthetic polypeptide"
DIQMTQSPSSLSASVGDRVTITCRASGNIHNYLAWFQQKPGKAPKSLIYNAKTLADGVPSRFSGSGSGTDFTLTISSLQPEDFATYYCQHFWSTPFTFGQGTKLEIK

SEQ ID NO: 11247 - protein, 214 aa, Artificial Sequence
  source: /note="Description of Artificial Sequence: Synthetic polypeptide"
DIQMTQSPSSLSASVGDRVTITCKASQNVGTNVAWYQQKPGKAPKALIYSASFLYSGVPYRFSGSGSGTDFTLTISSLQPEDFATYYCQQYNIYPLTFGQGTKVEIKRTVAAPSVFIFPPSDEQLKSGTASVVCLLNNFYPREAKVQWKVDNALQSGNSQESVTEQDSKDSTYSLSSTLTLSKADYEKHKVYACEVTHQGLSSPVTKSFNRGEC

SEQ ID NO: 11248 - protein, 107 aa, Artificial Sequence
  source: /note="Description of Artificial Sequence: Synthetic polypeptide"
DILLTQSPAILSVSPGERVSFSCRASQFVGSSIHWYQQRTNGSPRLLIKYASESMSGIPSRFSGSGSGTDFTLSINTVESEDIADYYCQQSHSWPFTFGSGTNLEVK

SEQ ID NO: 11249 - protein, 108 aa, Artificial Sequence
  source: /note="Description of Artificial Sequence: Synthetic polypeptide"
DIVMTQSHKFMSTTVGDRVSITCKASQAVSSAVAWYQQKPGQSPKLLIYWASTRHTGVPDRFTGSGSVTDFTLTIHNLQAEDLALYYCQQHYSTPFTFGSGTKLEIKR

SEQ ID NO: 11250 - protein, 107 aa, Artificial Sequence
  source: /note="Description of Artificial Sequence: Synthetic polypeptide"
DIQMTQSPSSLSASVGDRVTITCKASQAVSSAVAWYQQKPGKAPKLLIYWASTRHTGVPSRFSGSGSGTDFTLTISSLQPEDFATYYCQQHYSTPFTFGQGTKLEIK

SEQ ID NO: 11251 - protein, 107 aa, Artificial Sequence
  source: /note="Description of Artificial Sequence: Synthetic polypeptide"
EIVMTQSPATLSVSPGERATLSCKASQAVSSAVAWYQQKPGQAPRLLIYWASTRHTGIPARFSGSGSGTEFTLTISSLQSEDFAVYYCQQHYSTPFTFGQGTKLEIK

SEQ ID NO: 11252 - protein, 107 aa, Artificial Sequence
  source: /note="Description of Artificial Sequence: Synthetic polypeptide"
DIQMTQSPSSLSASVGDRVTITCKASQAVSSAVAWYQQKPGKSPKLLIYWASTRHTGVPSRFSGSGSGTDFTLTISSLQPEDFATYYCQQHYSTPFTFGQGTKLEIK

SEQ ID NO: 11253 - protein, 107 aa, Artificial Sequence; identical to SEQ ID NO: 11252
  source: /note="Description of Artificial Sequence: Synthetic polypeptide"

SEQ ID NO: 11254 - protein, 107 aa, Artificial Sequence; identical to SEQ ID NO: 11252
  source: /note="Description of Artificial Sequence: Synthetic polypeptide"

SEQ ID NO: 11255 - protein, 111 aa, Artificial Sequence
  source: /note="Description of Artificial Sequence: Synthetic polypeptide"
EIVMTQSPSTLSASVGDRVIITCQASQSISDWLAWYQQKPGKAPKLLIYGASRLASGVPSRFSGSGSGAEFTLTISSLQPDDFATYYCQQGWSDSYVDNLFGQGTKLTVLG

SEQ ID NO: 11256 - protein, 111 aa, Artificial Sequence
  source: /note="Description of Artificial Sequence: Synthetic polypeptide"
EIVMTQSPSTLSASVGDRVIIKCQASQSISDWLAWYQQKPGKAPKLLIYGASRLASGFPSRFSGSGSGAEFTLTISGLEPADFATYYCQQGWSDSYVDNLFGQGTKLTVLG

SEQ ID NO: 11257 - protein, 111 aa, Artificial Sequence
  source: /note="Description of Artificial Sequence: Synthetic polypeptide"
EIVMTQSPSTLSASVGDRVIIKCQASQSISDWLAWYQQKPGKAPKLLIYGASRLASGVPSRFSGSGSGAEFTLTISSLQPDDFATYYCQQGWSDSYVDNLFGQGTKLTVLG

SEQ ID NO: 11258 - protein, 111 aa, Artificial Sequence
  source: /note="Description of Artificial Sequence: Synthetic polypeptide"
EIVMTQSPSTLSASVGDRVIITCQASQSISDWLAWYQQKPGKAPKLLIYGASRLASGFPSRFSGSGSGAEFTLTISSLQPDDFATYYCQQGWSDSYVDNLFGQGTKLTVLG

SEQ ID NO: 11259 - protein, 111 aa, Artificial Sequence
  source: /note="Description of Artificial Sequence: Synthetic polypeptide"
EIVMTQSPSTLSASVGDRVIITCQASQSISDWLAWYQQKPGKAPKLLIYGASRLASGVPSRFSGSGSGAEFTLTISSLEPDDFATYYCQQGWSDSYVDNLFGQGTKLTVLG

SEQ ID NO: 11260 - protein, 111 aa, Artificial Sequence
  source: /note="Description of Artificial Sequence: Synthetic polypeptide"
EIVMTQSPSTLSASVGDRVIITCQASQSISDWLAWYQQKPGKAPKLLIYGASRLASGVPSRFSGSGSGAEFTLTISSLQPADFATYYCQQGWSDSYVDNLFGQGTKLTVLG

SEQ ID NO: 11261 - protein, 115 aa, Artificial Sequence
  source: /note="Description of Artificial Sequence: Synthetic polypeptide"
EIVMTQSPSTLSASVGDRVIITCQSTESVYKNNYLAWYQQKPGKAPKLLIYDASTLASGVPSRFSGSGSGAEFTLTISSLQPDDFATYYCAGYYRSGSGTANGSFGQGTKLTVLG

SEQ ID NO: 11262 - protein, 115 aa, Artificial Sequence
  source: /note="Description of Artificial Sequence: Synthetic polypeptide"
EIVMTQSPSTLSASVGDRVIITCQSTESVYKNNYLAWYQQKPGKAPKLLIYDASTLASGVPSRFSGSGSGTEFTLTISSLQPDDFATYYCAGYYRSGSGTANGSFGQGTKLTVLG

SEQ ID NO: 11263 - protein, 111 aa, Artificial Sequence
  source: /note="Description of Artificial Sequence: Synthetic polypeptide"
EIVMTQSPSTLSASVGDRVIITCQASESIYSGLAWYQQKPGKAPKLLIYQASTLASGVPSRFSGSGSGAEFTLTISSLQPDDFATYYCQQGFGTSNVENPFGQGTKLTVLG

SEQ ID NO: 11264 - protein, 111 aa, Artificial Sequence
  source: /note="Description of Artificial Sequence: Synthetic polypeptide"
EIVMTQSPSTLSASVGDRVIITCQASESIYSGLAWYQQKPGKAPKLLIYQASTLASGVPSRFSGSGSGTDFTLAISSLQPDDFATYYCQQGFGTSNVENPFGQGTKLTVLG

SEQ ID NO: 11265 - protein, 111 aa, Artificial Sequence
  source: /note="Description of Artificial Sequence: Synthetic polypeptide"
EIVMTQSPSTLSASVGDRVIITCQASENIYTSLAWYQQKPGKAPKLLIYSASTLASGVPSRFSGSGSGAEFTLTISSLQPDDFATYYCQQGFATSNVENPFGQGTKLTVLG

SEQ ID NO: 11266 - protein, 111 aa, Artificial Sequence
  source: /note="Description of Artificial Sequence: Synthetic polypeptide"
EIVMTQSPSTLSASVGDRVIITCQASENIYTSLAWYQQKPGKAPKLLIYSASTLASGVPSRFSGSGSGTEFTLTISSLQPDDFATYYCQQGFATSNVENPFGQGTKLTVLG

SEQ ID NO: 11267 - protein, 112 aa, Artificial Sequence
  source: /note="Description of Artificial Sequence: Synthetic polypeptide"
EIVMTQSPSTLSASVGDRVIITCQASDNIYRGLAWYQQKPGKAPKLLIYDASTLQSGVPSRFSGSGSGTQFTLTISSLQPDDFATYYCLGVYGYSSDDGAAFGQGTKLTVLG

SEQ ID NO: 11268 - protein, 112 aa, Artificial Sequence
  source: /note="Description of Artificial Sequence: Synthetic polypeptide"
EIVMTQSPSTLSASVGDRVIITCQASDNIYRGLAWYQQKPGKAPKLLIYDASTLQSGVPSRFSGSGSGAEFTLTISSLQPDDFATYYCLGVYGYSSDDGAAFGQGTKLTVLG

SEQ ID NO: 11269 - protein, 112 aa, Artificial Sequence
  source: /note="Description of Artificial Sequence: Synthetic polypeptide"
EIVMTQSPSTLSASVGDRVIITCQSSQSVYGNIWMAWYQQKPGKAPKLLIYQASKLASGVPSRFSGSGSGAEFTLTISSLQPDDFATYYCQGNFNTGDRYAFGQGTKLTVLG

SEQ ID NO: 11270 - protein, 112 aa, Artificial Sequence
  source: /note="Description of Artificial Sequence: Synthetic polypeptide"
EIVMTQSPSTLSASLGDRVIITCQSSQSVYGNIWMAWYQQKSGKAPKLLIYQASKLASGVPSRFSGSGSGAEFSLTISSLQPDDFATYYCQGNFNTGDRYAFGQGTKLTVLG

SEQ ID NO: 11271 - protein, 111 aa, Artificial Sequence
  source: /note="Description of Artificial Sequence: Synthetic polypeptide"
EIVMTQSPSTLSASVGDRVIITCQASQSISNLLAWYQQKPGKAPKLLIYAASKLASGVPSRFSGSGSGAEFTLTISSLQPDDFATYYCQQGWSHTNVDNTFGQGTKLTVLG

SEQ ID NO: 11272 - protein, 111 aa, Artificial Sequence
  source: /note="Description of Artificial Sequence: Synthetic polypeptide"
EIVMTQSPSTLSASVGDRVIITCQASQSISNLLAWYQQKPGKAPKLLIVAASKLASGVPSRFSGSGSGTEFTLTISSLQPDDFATYYCQQGWSHTNVDNTFGQGTKLTVLG

SEQ ID NO: 11273 - protein, 115 aa, Artificial Sequence
  source: /note="Description of Artificial Sequence: Synthetic polypeptide"
EIVMTQSPSTLSASVGDRVIITCQSTESVYKNNYLAWYQQKPGKAPKLLIYDASTLASGVPSRFSGSGSGAEFTLTISSLQPDDFATYYCAGYYRSGFGTANGSFGQGTKLTVLG

SEQ ID NO: 11274 - protein, 115 aa, Artificial Sequence
  source: /note="Description of Artificial Sequence: Synthetic polypeptide"
EIVMTQSPSTLSASVGDRVIITCQSTESVYKNNYLAWYQQKPGKAPKLLIYDASTLASGVPSRFSGSGSGTEFTLTISSLQPDDFATYYCAGYYRSGFGTANGSFGQGTKLTVLG

SEQ ID NO: 11275 - protein, 125 aa, Artificial Sequence
  source: /note="Description of Artificial Sequence: Synthetic polypeptide"
MDTRAPTQLLGLLLLWLPGARCADIVMTQTPSSVSEPVGGTVTIMCQASQNIYSYLSWYQQKPGQPPKLLEYKASTLASGVPSRFAGSGSGTDFILTISDLECADAATYYCQSNYGSNSDSFGNA

SEQ ID NO: 11276 - protein, 122 aa, Artificial Sequence
  source: /note="Description of Artificial Sequence: Synthetic polypeptide"
MDTRAPTQLLGLLLLWLPGATFAQVLTQTPSSVSAAVGGTVTVSCQSSQNVYNNNDFVWFQQKPGQPPKRLIYWASTLASGVPSRFKGSGSGTQFTLTINDLECDDAATYYCAGAYITELRT

SEQ ID NO: 11277 - protein, 122 aa, Artificial Sequence
  source: /note="Description of Artificial Sequence: Synthetic polypeptide"
MDTRAPTQLLGLLLLWLPGATFAQVLTQTASSVSAAVGGTVTISCQSSQSVYNNNDFIWFQQKPGQPPKRLIYWASTLASGVSSRFKGSGSGTQFTLTINDLECDDAAVYYCAGAYDSEVRA

SEQ ID NO: 11278 - protein, 122 aa, Artificial Sequence
  source: /note="Description of Artificial Sequence: Synthetic polypeptide"
MDTRAPTQLLGLLLLWLPGATFAQVMTQTPASVSAAVGGTVTISCQSSESVYNNNDLIWFRQKPGQPPKRLIYWASQLASGVSSRFKGSGSGTQFTLTINDLECDDAATYYCAGAYDSEIRA

SEQ ID NO: 11279 - protein, 124 aa, Artificial Sequence
  source: /note="Description of Artificial Sequence: Synthetic polypeptide"
MDTRAPTQLLGLLLLWLPGARCALVMTQTPSPVSAAVGGTVTISCQSSESVVFNNRLSWYQQKPGQPPKLLIYWASTLASGVPSRFKGSGSGTQFTLTISGVECDDAATYYCAGYKSYSNDDFA

SEQ ID NO: 11280 - protein, 125 aa, Artificial Sequence
  source: /note="Description of Artificial Sequence: Synthetic polypeptide"
MDTRAPTQLLGLLLLWLPGARCADIVMTQTPSSVSEPVRGTVTIKCQASQNIYSYLSWYQQSPGQPPKLLIYKASTLASGVPSRFKGSGSGTDFTLTISDLECADAATYYCQSNYGSDSDSFGNA

SEQ ID NO: 11281 - protein, 125 aa, Artificial Sequence
  source: /note="Description of Artificial Sequence: Synthetic polypeptide"
MDTRAPTQLLGLLLLWLPGARCADIVMTQTPASVSEPVGGTVTIKCQASQNIYSTLAWYQQKPGQPPKLLIYLASTLASGVPSRFKGSGSGTQFTLTISDLECADAATYYCQTSHGSNSDSFGYA

SEQ ID NO: 11282 - protein, 125 aa, Artificial Sequence
  source: /note="Description of Artificial Sequence: Synthetic polypeptide"
MDTRAPTQLLGLLLLWLPGARCADIVMTQTPASVEAAVGGTVTIKCQASQNIRSWLAWYQQKPGQPPKLLIYGASTLASGVPSRFQGSGSGTEYTLTIIDLDCADAATYYCQSNYGSNDNSYGNG

SEQ ID NO: 11283 - protein, 125 aa, Artificial Sequence
  source: /note="Description of Artificial Sequence: Synthetic polypeptide"
MDTRAPTQLLGLLLLWLPGARCADIVMTQTPASVSEPVGGTVTIKCQASQNIYSTLAWYQQKPGQPPKLLIYLASTLASGVPSRFKGSGSGTQFTLTISDLECADAATYYCQTNHGSNSDSFGYA

SEQ ID NO: 11284 - protein, 125 aa, Artificial Sequence
  source: /note="Description of Artificial Sequence: Synthetic polypeptide"
MDTRAPTQLLGLLLLWLPGARCADIVMTQTPASVSEPVGGTVTIKCQASQSIYSSFSWYQQIPGQRPKLLIYYASTLASGVPSRFSGSGSGTDFTLTISDLECADAATYYCQSNHGSNGDSFGNA

SEQ ID NO: 11285 - protein, 126 aa, Artificial Sequence
  source: /note="Description of Artificial Sequence: Synthetic polypeptide"
MDTRAPTQLLGLLLLWLPGARCADIVMTQTPASVSEPVGGTVTIKCQASQTIYSSLSVVYQQKPGQRPKLLIYAASTLASGVPSRFKGSGSGTDFTLTISDLECADAATYYCQSNHGSNSDSYGNA

SEQ ID NO: 11286 - protein, 125 aa, Artificial Sequence
  source: /note="Description of Artificial Sequence: Synthetic polypeptide"
MDTRAPTQLLGLLLLWLPGARCADIVMTQTPASVSEPVGGTVTIKCQASQSIYSTLAWYQQKPGQPPKLLISLASTLASGVPSRFKGSGSGTQFTLTISDLECADAATYYCQTNHGSNSDSFGYA

SEQ ID NO: 11287 - protein, 125 aa, Artificial Sequence
  source: /note="Description of Artificial Sequence: Synthetic polypeptide"
MDTRAPTQLLGLLLLWLPGARCADIVMTQTPASVSEPVGGTVTIKCQASQNIYSTLAWYQQKPGQPPKLLIYLASTLESGVPSRFKGSGSGTEFTLTISDLECADAATYYCQTSHGSNSESFGYA

SEQ ID NO: 11288 - protein, 125 aa, Artificial Sequence
  source: /note="Description of Artificial Sequence: Synthetic polypeptide"
MDTRAPTQLLGLLLLWLPGARCADIVMTQTPSSVSEPVRGTVTIKCQASQNIYSYLSWYRQSPGQPPNLLIYKASTLASGVPSRFKGSGSGTDFTLTISDLECADAATYYCQSNYGSNSDSFGNA

SEQ ID NO: 11289 - protein, 125 aa, Artificial Sequence
  source: /note="Description of Artificial Sequence: Synthetic polypeptide"
MDTRAPTQLLGLLLLWLPGARCADIVMTQTPASVSEPVGGTVTIKCQASQNIYTTLAWYQQKPGQPPKLLIYLASTLASGVPSRFKGSGSETQFTLTISDLECADAATYYCQTSHGSNSDSFGYV

SEQ ID NO: 11290 - protein, 125 aa, Artificial Sequence
  source: /note="Description of Artificial Sequence: Synthetic polypeptide"
MDTRAPTQLLGLLLLWLPGARCADIVMTQTPSSVSAAVGGTVTIKCQASQSIDTYLAWYQQKPGQRPKLLIYGASNLASGVSSRFKGSGSGTEFALTISDLECADAATYYCQSNYGSNSDSFGNG

SEQ ID NO: 11291 - protein, 125 aa, Artificial Sequence
  source: /note="Description of Artificial Sequence: Synthetic polypeptide"
MDTRAPTQLLGLLLLWLPGARCADIVMTQTPASVSGPVGGTVTIKCQASQNIYSSFSWYQQIPGQRPKLLIYYASTLASGVPSRFSGSGSGTDFTLTISDLECADAATYYCQSNHGSNGDSFGNA

SEQ ID NO: 11292 - protein, 122 aa, Artificial Sequence
  source: /note="Description of Artificial Sequence: Synthetic polypeptide"
MDTRAPTQLLGLLLLWLPGSTFAIKVTQTPASVSAAVGGTVSINCQASEDIESYLAWYQQKPGQPPKLLLYDASALASGVPSRFKGSGSGTEYTLTISGVECADAATYYCQQGYSYSNVDNS

SEQ ID NO: 11293 - protein, 125 aa, Artificial Sequence
  source: /note="Description of Artificial Sequence: Synthetic polypeptide"
MDTRAPTQLLGLLLLWLPGARCADIVMTQTPASVSEPVGGTVTIKCQASQSIYRYLSWYHHKPGQPPKLLIYGASNLESGVPSRFKGSGSGTEYTLTISDLECDDAATYYCQSNYGANSDSYGDA

SEQ ID NO: 11294 - protein, 125 aa, Artificial Sequence
  source: /note="Description of Artificial Sequence: Synthetic polypeptide"
MDTRAPTQLLGLLLLWLPGARCADIVMTQTPSSVSAAVGGTVTINCQASQNIYSSLAWYQQKPGQPPKLLIFGASNLESGVPSRFKGSGSGTEFTLTISDLECADAAAYYCQSHHGSNSDSYGNA

SEQ ID NO: 11295 - protein, 125 aa, Artificial Sequence
  source: /note="Description of Artificial Sequence: Synthetic polypeptide"
MDTRAPTQLLGLLLLWLPGARCADIVMTQTPSSVSVPVGGTVTIKCQASQNIYSSLAWYQQKPGQPPKRLIYYAATLASGVPSRFKGSGSGTDFTLTISDLECADAATYYCQSNHGSNSDSYGNP

SEQ ID NO: 11296 - protein, 124 aa, Artificial Sequence
  source: /note="Description of Artificial Sequence: Synthetic polypeptide"
MDTRAPTQLLGLLLLWLPGARCADVVMTQTPSSVSEPVGGTVTIKCQASETIGNYLSWYQQKPGQPPKRLIYYASTLSSGVPSRFKGSGSGTDFTLTISDLECADAATYYCQKNYGSGASSLGA

SEQ ID NO: 11297 - protein, 123 aa, Artificial Sequence
  source: /note="Description of Artificial Sequence: Synthetic polypeptide"
MDTRAPTQLLGLLLLWLTGATFAAVLTQTPSPVSAVVGGTVSISCQSSKRVVNSVALSWYQQKPGRSPKLLIYFASKLASGVPSRFKGSGSGTQFTLAISDVQCDDAATYYCAGHYTDSGDDA

SEQ ID NO: 11298 - protein, 122 aa, Artificial Sequence
  source: /note="Description of Artificial Sequence: Synthetic polypeptide"
MDTRAPTQLLGLLLLWLPGATLAQVVTQTPASVSAAVGGTVTISCQSSQNVYNNNDLVWFQQKPGQPPKRLVYWASTLASGVSSRFRGSGSGTQFILTISDLQCDDAATYYCAGAYDSEIRA

SEQ ID NO: 11299 - protein, 122 aa, Artificial Sequence
  source: /note="Description of Artificial Sequence: Synthetic polypeptide"
MDTRAPTQLLGLLLLWLPDARCAYDMTQTPASVEVAGGGTVTIKCQASQSIANRLAWYQQKPGQPPKLLIYYASTLASGVPSRFSGSGSGTEFTLTISGVQCDDAATYYCQQTYSDNNVDNA

SEQ ID NO: 11300 - protein, 125 aa, Artificial Sequence
  source: /note="Description of Artificial Sequence: Synthetic polypeptide"
MDTRAPTQLLGLLLLWLPGARCADIVMTQTPASVEAAVGGTVTINCQASQSIVSWLAWYQQKPGQPPKLLIYGASTLASGVPSRFKGSGSGTEYTLTISDLECADAATYYCQSNYGSNSHSFGNT

SEQ ID NO: 11301 - protein, 110 aa, Artificial Sequence
  source: /note="Description of Artificial Sequence: Synthetic polypeptide"
AYQMTQSPSSLSASVGDRVTIKCQASESIYSSLAWYQQKPGKPPKLLIYSASTLASGVPSRFSGSGSGTDFTLTISSLQPEDFATYYCQQGFGTSNVENPFGGGTKVEIK

SEQ ID NO: 11302 - protein, 108 aa, Artificial Sequence
  source: /note="Description of Artificial Sequence: Synthetic polypeptide"
EIVLTQSPGTLSLSPGERATLSCRASQGISRSYLAWYQQKPGQAPSLLIYGASSRATGIPDRFSGSGSGTDFTLTISRLEPEDFAVYYCQQFGSSPWTFGQGTKVEIK

SEQ ID NO: 11303 - protein, 111 aa, Artificial Sequence; identical to SEQ ID NO: 10326
  source: /note="Description of Artificial Sequence: Synthetic polypeptide"

SEQ ID NO: 11304 - protein, 107 aa, Artificial Sequence; identical to SEQ ID NO: 11250
  source: /note="Description of Artificial Sequence: Synthetic polypeptide"

SEQ ID NO: 11305 - protein, 107 aa, Artificial Sequence; identical to SEQ ID NO: 11251
  source: /note="Description of Artificial Sequence: Synthetic polypeptide"

SEQ ID NO: 11306 - protein, 107 aa, Artificial Sequence; identical to SEQ ID NO: 11252
  source: /note="Description of Artificial Sequence: Synthetic polypeptide"

SEQ ID NO: 11307 - protein, 107 aa, Artificial Sequence
  source: /note="Description of Artificial Sequence: Synthetic polypeptide"
EIVMTQSPATLSLSPGERATLSCKASQAVSSAVAWYQQKPGQAPRLLIYWASTRHTGIPARFSGSGSGTDFTLTISSLQPEDFAVYYCQQHYSTPFTFGQGTKLEIK

SEQ ID NO: 11308 - protein, 107 aa, Artificial Sequence
  source: /note="Description of Artificial Sequence: Synthetic polypeptide"
EIVMTQSPATLSLSPGERATLSCKASQAVSSAVAWYQQKPGQSPRLLIYWASTRHTGVPARFSGSGSGTDFTLTISSLQPEDFAVYYCQQHYSTPFTFGQGTKLEIK

SEQ ID NO: 11309 - protein, 106 aa, Artificial Sequence; identical to SEQ ID NO: 5367
  source: /note="Description of Artificial Sequence: Synthetic polypeptide"

SEQ ID NO: 11310 - protein, 98 aa, Artificial Sequence; identical to SEQ ID NO: 4699
  source: /note="Description of Artificial Sequence: Synthetic polypeptide"

SEQ ID NO: 11311 - protein, 15 aa, Artificial Sequence
  source: /note="Description of Artificial Sequence: Synthetic peptide"
YFDYWGQGTLVTVSS

SEQ ID NO: 11312 - protein, 95 aa, Artificial Sequence; identical to SEQ ID NO: 5370
  source: /note="Description of Artificial Sequence: Synthetic polypeptide"

SEQ ID NO: 11313 - protein, 12 aa, Artificial Sequence
  source: /note="Description of Artificial Sequence: Synthetic peptide"
WTFGQGTKVEIK

SEQ ID NO: 11314 - protein, 453 aa, Artificial Sequence; identical to SEQ ID NO: 5372
  source: /note="Description of Artificial Sequence: Synthetic polypeptide"

SEQ ID NO: 11315 - protein, 111 aa, Artificial Sequence
  source: /note="Description of Artificial Sequence: Synthetic polypeptide"
QAVVTQEPSLTVSPGGTVTLTCASSTGAVTSGNYPNWFQQRPGQPPRALIYSTSNKHSWTPARFSGSLLGGKAALTLSGAQPEDEAEYYCRLSYDLARPVFGGGTKLTVLG

SEQ ID NO: 11316 - protein, 112 aa, Artificial Sequence
  source: /note="Description of Artificial Sequence: Synthetic polypeptide"
QPVLTQSSSASASLGASVKLTCSLSSGHSSYAIAWHQQQPEKGPRYLMKLNSDGSHSKGDGIPDRFSGSSSGAERYLTISSLQSEDEADYYCQTWGSGIQVFGGGTKLTVLG

SEQ ID NO: 11317 - protein, 113 aa, Artificial Sequence
  source: /note="Description of Artificial Sequence: Synthetic polypeptide"
DVVMTQSPLSLPVTPGEPASISCRSSQSLLQSNGHNYLNWYLQKPGQSPQVLIYLASNRASGVPDRFSGSGSGTDFTLKISRVEAEDVGIYYCMQGLQIPLTFGGGTKVEIKR

SEQ ID NO: 11318 - protein, 117 aa, Artificial Sequence
  source: /note="Description of Artificial Sequence: Synthetic polypeptide"
QAVLTQPPSSSASPGESARLTCTLPSDINVRYYNIYWYQQKPGSPPRYLLYYQSDSHKGRGSGVPSRFSGSKDTSANTGILLISGLQSEDEADYYCMIWASNGSGVLGGGTQLTVLG

SEQ ID NO: 11319 - protein, 112 aa, Artificial Sequence
  source: /note="Description of Artificial Sequence: Synthetic polypeptide"
QPVLTQSSSASASLGSSVKLTCTLSSGHSSYIIAWHQQQPGKAPRYLMKLEGSGSYNKGSGLPDRFSGSSSGADRYLTISNLQSEDEADYYCETWDGNTWVFGGGTQLTVLG

SEQ ID NO: 11320 - protein, 109 aa, Artificial Sequence
  source: /note="Description of Artificial Sequence: Synthetic polypeptide"
EIVLTQSPATLSLSPGERATLSCRTSQSSPSDNLAWYQHKPGQAPRLLIYGGSNRATGIPARFSGSGSGTDFTLTISSLEPEDFAVYYCQQYGSSPLTFGGGTKVDIKR

SEQ ID NO: 11321 - protein, 110 aa, Artificial Sequence
  source: /note="Description of Artificial Sequence: Synthetic polypeptide"
QSALTQPRSVSGSPGQSVTISCTGTSSDVGGYNYVSWYQQHPGKAPKLMIYDVIKRPSGVPDRFSGSRSGNTASLTISGLQAEDEADYYCCSYAGTHWVFGGGTKLTVLG

SEQ ID NO: 11322 - protein, 109 aa, Artificial Sequence
  source: /note="Description of Artificial Sequence: Synthetic polypeptide"
EIVLTQSPGTLSLSPGERATLSCRASQSGVTNFLAWYQQKPGQAPRLLIYATSSRATGIPDRFSGSASGTDFTLTITRLEPEDFAVYFCQQYASSPLTFGGGTKVEIKR

SEQ ID NO: 11323 - protein, 108 aa, Artificial Sequence
  source: /note="Description of Artificial Sequence: Synthetic polypeptide"
EIVLTQSPATLSLSPGERATLSCRASQSVSGHLDWYQQKPGQSPRLLIYDASNRATGIPARFSGSGSGTDFSLTISSLEPEDFAVYYCQHRSNWPWTFGQGTKVEIKR

SEQ ID NO: 11324 - protein, 112 aa, Artificial Sequence
  source: /note="Description of Artificial Sequence: Synthetic polypeptide"
QPVLTQSSSASASLGASVKLTCTLSSEHDRYAIAWLQQKPEKGPRYLMKVNSDGSHRKGDGIPDRFSGSSSGAERYLTISRLQSEDEADYYCQTWGIGIRVFGGGTQLTVLG

SEQ ID NO: 11325 - protein, 109 aa, Artificial Sequence
  source: /note="Description of Artificial Sequence: Synthetic polypeptide"
EIVLTQSPGTLSLSPGERATLSCRASQNIFISFLAWYQQKPGQAPRLLLYGASNRATGIPDRFSGSGSGTDFTLTISRLEPEDFAVYYCQQYGSSPLTFGGGTKVEIKR

SEQ ID NO: 11326 - protein, 109 aa, Artificial Sequence
  source: /note="Description of Artificial Sequence: Synthetic polypeptide"
EIVLTQSPGTLSLSPGERATLSCRASQNIGSNFLAWYQQKPGQAPRLLIYGASTRANGIPDRFSGSKSETDFTLTISRLEPEDFAVYYCQQYDNSPYTFGQGTKLEIKR

SEQ ID NO: 11327 - protein, 111 aa, Artificial Sequence
  source: /note="Description of Artificial Sequence: Synthetic polypeptide"
QSVLTQPPSVSAAPGQKVTISCSGSRSNVGGNFLSWYQHVPGTPPQLLIYDNYKRPSEIPDRFSGSKSGTSATLDITGLQTGDEADYYCGTWDSSLSSWVFGGGTQLTVLG

SEQ ID NO: 11328 - protein, 109 aa, Artificial Sequence
  source: /note="Description of Artificial Sequence: Synthetic polypeptide"
DIQMTQSPSSLSASVGDRVTITCRASQDVNTAVAWYQQKPGKAPKLLIYSASFLYSGVPSRFSGSRSGTDFTLTISSLQPEDFATYYCQQHYTTPPTFGQGTKVEIKRT

SEQ ID NO: 11329 - protein, 108 aa, Artificial Sequence; identical to SEQ ID NO: 6323
  source: /note="Description of Artificial Sequence: Synthetic polypeptide"

SEQ ID NO: 11330 - protein, 108 aa, Artificial Sequence; identical to SEQ ID NO: 6324
  source: /note="Description of Artificial Sequence: Synthetic polypeptide"

SEQ ID NO: 11331 - protein, 108 aa, Artificial Sequence; identical to SEQ ID NO: 6325
  source: /note="Description of Artificial Sequence: Synthetic polypeptide"

SEQ ID NO: 11332 - protein, 108 aa, Artificial Sequence; identical to SEQ ID NO: 6326
  source: /note="Description of Artificial Sequence: Synthetic polypeptide"

SEQ ID NO: 11333 - protein, 108 aa, Artificial Sequence; identical to SEQ ID NO: 6327
  source: /note="Description of Artificial Sequence: Synthetic polypeptide"

SEQ ID NO: 11334 - protein, 108 aa, Artificial Sequence; identical to SEQ ID NO: 6328
  source: /note="Description of Artificial Sequence: Synthetic polypeptide"

SEQ ID NO: 11335 - protein, 108 aa, Artificial Sequence; identical to SEQ ID NO: 6329
  source: /note="Description of Artificial Sequence: Synthetic polypeptide"

SEQ ID NO: 11336 - protein, 108 aa, Artificial Sequence; identical to SEQ ID NO: 6330
  source: /note="Description of Artificial Sequence: Synthetic polypeptide"

SEQ ID NO: 11337 - protein, 108 aa, Artificial Sequence; identical to SEQ ID NO: 6331
  source: /note="Description of Artificial Sequence: Synthetic polypeptide"

SEQ ID NO: 11338 - protein, 108 aa, Artificial Sequence; identical to SEQ ID NO: 6332
  source: /note="Description of Artificial Sequence: Synthetic polypeptide"

SEQ ID NO: 11339 - protein, 108 aa, Artificial Sequence; identical to SEQ ID NO: 6333
  source: /note="Description of Artificial Sequence: Synthetic polypeptide"

SEQ ID NO: 11340 - protein, 108 aa, Artificial Sequence; identical to SEQ ID NO: 6334
  source: /note="Description of Artificial Sequence: Synthetic polypeptide"

SEQ ID NO: 11341 - protein, 108 aa, Artificial Sequence; identical to SEQ ID NO: 6335
  source: /note="Description of Artificial Sequence: Synthetic polypeptide"

SEQ ID NO: 11342 - protein, 108 aa, Artificial Sequence; identical to SEQ ID NO: 6336
  source: /note="Description of Artificial Sequence: Synthetic polypeptide"

SEQ ID NO: 11343 - protein, 108 aa, Artificial Sequence; identical to SEQ ID NO: 6337
  source: /note="Description of Artificial Sequence: Synthetic polypeptide"

SEQ ID NO: 11344 - protein, 108 aa, Artificial Sequence
  source: /note="Description of Artificial Sequence: Synthetic polypeptide"
ENVLTQSPAIMSASPGEKVTMTCRARSSVSSSYLHWYQQKSGASPKLWIYSTSNLASGVPTRFSGSGSGTSYSLTISSVEAEDAATYYCQQYSGYPLTFGAGTKLELK

SEQ ID NO: 11345 - protein, 112 aa, Artificial Sequence; identical to SEQ ID NO: 11002
  source: /note="Description of Artificial Sequence: Synthetic polypeptide"

SEQ ID NO: 11346 - protein, 107 aa, Artificial Sequence [sequence omitted]

SEQ ID NO: 11347 - protein, 128 aa, Artificial Sequence
  source: /note="Description of Artificial Sequence: Synthetic polypeptide"
MDFQVQIISFLLISASVIMSRGQIVLSQSPAILSASPGEKVTMTCRASSSVSYIHWFQQKPGSSPKPWIYATSNLASGVPVRFSGSGSGTSYSLTISRVEAEDAATYYCQQWTSNPPTFGGGTKLEIK

SEQ ID NO: 11348 - protein, 215 aa, Artificial Sequence
  source: /note="Description of Artificial Sequence: Synthetic polypeptide"
DIQLTQSPSSLSASVGDRVTITCRASQSVDYDGDSYMNWYQQKPGKAPKLLIYAASYLESGVPSRFSGSGSGTDFTLTISSLQPEDFATYYCQQSHEDPYTFGQGTKVEIKRTVAAPSVFIFPPSDEQLKSGTASVVCLLNNFYPREAKVQWKVDNALQSGNSQESVTEQDSKDSTYSLSSTLTLSKADYEKHKVYACEVTHQGLSSPVTKSFNR

SEQ ID NO: 11349 - protein, 125 aa, Artificial Sequence
  source: /note="Description of Artificial Sequence: Synthetic polypeptide"
QVQIISFLLISASVIMSRGQIVLSQSPAILSASPGEKVTMTCRASSSVSYIHWFQQKPGSSPKPWIYATSNLASGVPVRFSGSGSGTSYSLTISRVEAEDAATYYCQQWTSNPPTFGGGTKLEIK

SEQ ID NO: 11350 - protein, 107 aa, Artificial Sequence
  source: /note="Description of Artificial Sequence: Synthetic polypeptide"
EIVLTQSPSSLSASVGDRVTITCRASQGIGDDLGWYQQKPGKAPILLIYGTSTLQSGVPSRFSGSGSGTDFTLTINSLQPEDFATYYCLQDSNYPLTFGGGTRLEIK

SEQ ID NO: 11351 - protein, 112 aa, Artificial Sequence; identical to SEQ ID NO: 4184
  source: /note="Description of Artificial Sequence: Synthetic polypeptide"

SEQ ID NO: 11352 - protein, 112 aa, Artificial Sequence; identical to SEQ ID NO: 4178
  source: /note="Description of Artificial Sequence: Synthetic polypeptide"

SEQ ID NO: 11353 - protein, 112 aa, Artificial Sequence; identical to SEQ ID NO: 4179
  source: /note="Description of Artificial Sequence: Synthetic polypeptide"

SEQ ID NO: 11354 - protein, 112 aa, Artificial Sequence; identical to SEQ ID NO: 4180
  source: /note="Description of Artificial Sequence: Synthetic polypeptide"

SEQ ID NO: 11355 - protein, 112 aa, Artificial Sequence [sequence omitted]

SEQ ID NO: 11356 - protein, 112 aa, Artificial Sequence; identical to SEQ ID NO: 4182
  source: /note="Description of Artificial Sequence: Synthetic polypeptide"

SEQ ID NO: 11357 - protein, 112 aa, Artificial Sequence; identical to SEQ ID NO: 4183
  source: /note="Description of Artificial Sequence: Synthetic polypeptide"

SEQ ID NO: 11358 - protein, 112 aa, Artificial Sequence; identical to SEQ ID NO: 4177
  source: /note="Description of Artificial Sequence: Synthetic polypeptide"

SEQ ID NO: 11359 - protein, 107 aa, Artificial Sequence
  source: /note="Description of Artificial Sequence: Synthetic polypeptide"
DIQMTQSPSSLSASVGDRVTITCRASENIYSYLAWYQQKPGKAPKLLVSNAKTLAEGVPSRFSGSGSGKQFTLTISSLQPEDFATYYCQHHYGNSYPFGQGTKLEIK

SEQ ID NO: 11360 - protein, 107 aa, Artificial Sequence
  source: /note="Description of Artificial Sequence: Synthetic polypeptide"
DIQMTQTTSSLSASLGDRVTISCRASQDISNYLNWYQQKPDGTVKLLIYYTSILHSGVPSRFSGSGSGTDYSLTISNLEQEDFATYFCQQGNTLPWTFGGGTKLEIK

SEQ ID NO: 11361 - protein, 107 aa, Artificial Sequence
  source: /note="Description of Artificial Sequence: Synthetic polypeptide"
DIQMTQTTSSLSASLGDRVTISCRASQDIHGYLNWYQQKPDGTVKLLIYYTSILHSGVPSRFSGSGSGTDYSLTISNLEQEDFATYFCQQGNTLPWTFGGGTKLEIK

SEQ ID NO: 11362 - protein, 107 aa, Artificial Sequence [sequence omitted]

SEQ ID NO: 11363 - protein, 114 aa, Artificial Sequence
  source: /note="Description of Artificial Sequence: Synthetic polypeptide"
DIQMTQSPSSLSASVGDRVTITCKSSQSLLYTSSQKNYLAWYQQKPGKAPKLLIYWASTRESGVPSRFSGSGSGTDFTLTISSLQPEDFATYYCQQYYAYPWTFGQGTKVEIKR

SEQ ID NO: 11364 - protein, 108 aa, Artificial Sequence
  source: /note="Description of Artificial Sequence: Synthetic polypeptide"
DIQMTQSPATLSLSPGERATLSCRASQSVSSYLAWYQQKPGQAPRLLIYDASNRATGIPARFSGSGSGTDFTLTISSLEPEDFAVYYCQQRSNWPLYTFGQGTKLEIK

SEQ ID NO: 11365 - protein, 108 aa, Artificial Sequence
  source: /note="Description of Artificial Sequence: Synthetic polypeptide"
DIQMTQSPATLSLSPGERATLSCRASQSVSSYLAWYQQKPGQAPRLLIYDASNRATGIPARFSGSGSGTDFTLTISSLEPEDFAVYYCQQRSNWPIYTFGQGTKLEIK

SEQ ID NO: 11366 - protein, 108 aa, Artificial Sequence
  source: /note="Description of Artificial Sequence: Synthetic polypeptide"
DIQMTQSPATLSLSPGERATLSCRASQSVSSYLAWYQQKPGQAPRLLIYDASNRATGIPARFSGSGSGTDFTLTISSLEPEDFAVYYCQQRSNWPQYTFGQGTKLEIK

SEQ ID NO: 11367 - protein, 108 aa, Artificial Sequence
  source: /note="Description of Artificial Sequence: Synthetic polypeptide"
DIQMTQSPATLSLSPGERATLSCRASQSVSSYLAWYQQKPGQAPRLLIYDASNRATGIPARFSGSGSGTDFTLTISSLEPEDFAVYYCQQRSNWPKYTFGQGTKLEIK

SEQ ID NO: 11368 - protein, 108 aa, Artificial Sequence
  source: /note="Description of Artificial Sequence: Synthetic polypeptide"
DIQMTQSPATLSLSPGERATLSCRASQSVSSYLAWYQQKPGQAPRLLIYDASNRATGIPARFSGSGSGTDFTLTISSLEPEDFAVYYCQQRSNWPAYTFGQGTKLEIK

SEQ ID NO: 11369 - protein, 108 aa, Artificial Sequence
  source: /note="Description of Artificial Sequence: Synthetic polypeptide"
DIQMTQSPATLSLSPGERATLSCRASQSVSSYLAWYQQKPGQAPRLLIYDASNRATGIPARFSGSGSGTDFTLTISSLEPEDFAVYYCQQRSNWPVYTFGQGTKLEIK

SEQ ID NO: 11370 - protein, 108 aa, Artificial Sequence
  source: /note="Description of Artificial Sequence: Synthetic polypeptide"
DIQMTQSPATLSLSPGERATLSCRASQSVSSYLAWYQQKPGQAPRLLIYDASNRATGIPARFSGSGSGTDFTLTISSLEPEDFAVYYCQQRSNWPYYTFGQGTKLEIK

SEQ ID NO: 11371 - protein, 108 aa, Artificial Sequence
  source: /note="Description of Artificial Sequence: Synthetic polypeptide"
DIQMTQSPATLSLSPGERATLSCRASQSVSSYLAWYQQKPGQAPRLLIYDASNRATGIPARFSGSGSGTDFTLTISSLEPEDFAVYYCQQRSNWPFYTFGQGTKLEIK

SEQ ID NO: 11372 - protein, 108 aa, Artificial Sequence
  source: /note="Description of Artificial Sequence: Synthetic polypeptide"
DIQMTQSPATLSLSPGERATLSCRASQSVSSYLAWYQQKPGQAPRLLIYDASNRATGIPARFSGSGSGTDFTLTISSLEPEDFAVYYCQQRSNAPMYTFGQGTKLEIK

SEQ ID NO: 11373 - protein, 108 aa, Artificial Sequence
  source: /note="Description of Artificial Sequence: Synthetic polypeptide"
DIQMTQSPATLSLSPGERATLSCRASQSVSSYLAWYQQKPGQAPRLLIYDASNRATGIPARFSGSGSGTDFTLTISSLEPEDFAVYYCQQRSNDPMYTFGQGTKLEIK

SEQ ID NO: 11374 - protein, 108 aa, Artificial Sequence
  source: /note="Description of Artificial Sequence: Synthetic polypeptide"
DIQMTQSPATLSLSPGERATLSCRASQSVSSYLAWYQQKPGQAPRLLIYDASNRATGIPARFSGSGSGTDFTLTISSLEPEDFAVYYCQQRSNLPMYTFGQGTKLEIK

SEQ ID NO: 11375 - protein, 108 aa, Artificial Sequence
  source: /note="Description of Artificial Sequence: Synthetic polypeptide"
DIQMTQSPATLSLSPGERATLSCRASQSVSSYLAWYQQKPGQAPRLLIYDASNRATGIPARFSGSGSGTDFTLTISSLEPEDFAVYYCQQRSNNPMYTFGQGTKLEIK

SEQ ID NO: 11376 - protein, 108 aa, Artificial Sequence
  source: /note="Description of Artificial Sequence: Synthetic polypeptide"
DIQMTQSPATLSLSPGERATLSCRASQSVSSYLAWYQQKPGQAPRLLIYDASNRATGIPARFSGSGSGTDFTLTISSLEPEDFAVYYCQQRSNGPMYTFGQGTKLEIK

SEQ ID NO: 11377 - protein, 108 aa, Artificial Sequence
  source: /note="Description of Artificial Sequence: Synthetic polypeptide"
DIQMTQSPATLSLSPGERATLSCRASQSVSSYLAWYQQKPGQAPRLLIYDASNRATGIPARFSGSGSGTDFTLTISSLEPEDFAVYYCQQRSNQPMYTFGQGTKLEIK

SEQ ID NO: 11378 - protein, 108 aa, Artificial Sequence
  source: /note="Description of Artificial Sequence: Synthetic polypeptide"
DIQMTQSPATLSLSPGERATLSCRASQSVSSYLAWYQQKPGQAPRLLIYDASNRATGIPARFSGSGSGTDFTLTISSLEPEDFAVYYCQQRSNVPMYTFGQGTKLEIK

SEQ ID NO: 11379 - protein, 108 aa, Artificial Sequence
  source: /note="Description of Artificial Sequence: Synthetic polypeptide"
DIQMTQSPATLSLSPGERATLSCRASQSVSSYLAWYQQKPGQAPRLLIYDASNRATGIPARFSGSGSGTDFTLTISSLEPEDFAVYYCQQRSNSPMYTFGQGTKLEIK

SEQ ID NO: 11380 - protein, 127 aa, Artificial Sequence; identical to SEQ ID NO: 10175
  source: /note="Description of Artificial Sequence: Synthetic polypeptide"

SEQ ID NO: 11381 - DNA, 467 bp, Artificial Sequence
  source: /note="Description of Artificial Sequence: Synthetic polynucleotide"
  source: /note="Description of Combined DNA/RNA Molecule: Synthetic polynucleotide"
  modified_base (69)..(69): a, c, t, g, unknown or other
  modified_base (72)..(72): a, c, t, g, unknown or other
  modified_base (74)..(74): a, c, t, g, unknown or other
  modified_base (82)..(82): a, c, t, g, unknown or other
  modified_base (85)..(86): a, c, t, g, unknown or other
  modified_base (89)..(89): a, c, t, g, unknown or other
  modified_base (96)..(98): a, c, t, g, unknown or other
  modified_base (106)..(106): a, c, t, g, unknown or other
  modified_base (108)..(109): a, c, t, g, unknown or other
  modified_base (443)..(444): a, c, t, g, unknown or other
gaattccgttgtagaaatgagaccgtctattcagttcctggggctcttgttgttctggcttcatggtgnctnangtgtgtanganntcnagatgunnncagtctcnannctcactgtctgcatctctgggaggcaaagtcaccatcgcttgcaaggcaagccaagacattaacaactatatagcttggtaccaacacaagcctggaaaaggtcctaggctactcattcattacacatctacattacaaccaggcatcccatcaaggttcagtggaagtggatctgggagagattattccttcagcatcagcaacctggagcctgaagatattgcaacttattattgtctacagtatgataatcttctgttcacgttcggaggggggaccaaactggaaataaacgggctgatgctgcaccaactgtatccatcttcccaccannagtgagcagttaacatctggagg

SEQ ID NO: 11382 - protein, 111 aa, Artificial Sequence
  source: /note="Description of Artificial Sequence: Synthetic polypeptide"
QSVLTQPPSASGTPGQRVTISCSGSNTNIGKNYVSWYQQLPGTAPKLLIYANSNRPSGVPDRFSGSKSGTSASLAISGLRSEDEADYYCASWDASLNGWVFGGGTKLTVLG

SEQ ID NO: 11383 - protein, 108 aa, Artificial Sequence
  source: /note="Description of Artificial Sequence: Synthetic polypeptide"
  MOD_RES (36)..(36): Any amino acid
DIQMTQSPSSLSASVGDRVTITCRASKTISKYLAWXQQKPGKAPKLLIYSGSTLQSGVPSRFSGSGSGTDFTLTISSLQPEDFATYYCQQHNEYPLTFGQGTKVEIKR

SEQ ID NO: 11384 - protein, 108 aa, Artificial Sequence
  source: /note="Description of Artificial Sequence: Synthetic polypeptide"
ETVLTQSPGTLSLSPGERATLSCRASQSLGSSYLAWYQQKPGQAPRLLIYGASSRAPGIPDRFSGSGSGTDFTLTISRLEPEDFAVYYCQQYADSPITFGQGTRLEIK

SEQ ID NO: 11385 - protein, 108 aa, Artificial Sequence
  source: /note="Description of Artificial Sequence: Synthetic polypeptide"
EIVLTQSPGTLSLSPGERATLSCRASQSVRGRYLAWYQQKPGQAPRLLIYGASSRATGIPDRFSGSGSGTDFTLTISRLEPEDFAVFYCQQYGSSPRTFGQGTKVEIK

SEQ ID NO: 11386 - protein, 107 aa, Artificial Sequence [sequence omitted]

SEQ ID NO: 11387 - protein, 109 aa, Artificial Sequence
  source: /note="Description of Artificial Sequence: Synthetic polypeptide"
  MOD_RES (1)..(1): Any amino acid
XIVLTQSPATLSLSPGERATLSCRASQSVSDAYLAWYQQKPGQAPRLLIYDASSRATGVPARFSGSGSGTDFTLTISSLEPEDFAVYYCHQYIQLHSFTFGQGTKVEIK

SEQ ID NO: 11388 - protein, 106 aa, Artificial Sequence
  source: /note="Description of Artificial Sequence: Synthetic polypeptide"
EIVLTQSPATLSLSPGERATLSCSASISVSYMYWYQQKPGQAPRLLIYDMSNLASGIPARFSGSGSGTDFTLTISSLEPEDFAVYYCMQWSGYPYTFGGGTKVEIK

SEQ ID NO: 11389 - protein, 486 aa, Artificial Sequence
  source: /note="Description of Artificial Sequence: Synthetic polypeptide"
MALPVTALLLPLALLLHAARPDIQMTQTTSSLSASLGDRVTISCRASQDISKYLNWYQQKPDGTVKLLIYHTSRLHSGVPSRFSGSGSGTDYSLTISNLEQEDIATYFCQQGNTLPYTFGGGTKLEITGGGGSGGGGSGGGGSEVKLQESGPGLVAPSQSLSVTCTVSGVSLPDYGVSWIRQPPRKGLEWLGVIWGSETTYYNSALKSRLTIIKDNSKSQVFLKMNSLQTDDTAIYYCAKHYYYGGSYAMDYWGQGTSVTVSSTTTPAPRPPTPAPTIASQPLSLRPEACRPAAGGAVHTRGLDFACDIYIWAPLAGTCGVLLLSLVITLYCKRGRKKLLYIFKQPFMRPVQTTQEEDGCSCRFPEEEEGGCELRVKFSRSADAPAYKQGQNQLYNELNLGRREEYDVLDKRRGRDPEMGGKPRRKNPQEGLYNELQKDKMAEAYSEIGMKGERRRGKGHDGLYQGLSTATKDTYDALHMQALPPR

SEQ ID NO: 11390 - protein, 107 aa, Artificial Sequence
  source: /note="Description of Artificial Sequence: Synthetic polypeptide"
DIQMTQSPSSLSASVGDRVTITCRASGNIYGWLAWYQQTPGKAPKLLIYQAKTLMDGVPSRFSGSGSGTDYTFTISSLQPEDIATYYCQHFWNIPATFGQGTKLQIT

SEQ ID NO: 11391 - protein, 107 aa, Artificial Sequence; identical to SEQ ID NO: 10987
  source: /note="Description of Artificial Sequence: Synthetic polypeptide"

SEQ ID NO: 11392 - protein, 107 aa, Artificial Sequence
  source: /note="Description of Artificial Sequence: Synthetic polypeptide"
GIQMTQSPSSLSASVGDRVTITCRASGNIYQYLTWYQQTPGKAPKLLIYNAKTLAEGVPSRFSGSSSGTDYTFTISSLQPEDIATYYCQHFWKLPYTFGQGTKLQIT

SEQ ID NO: 11393 - protein, 107 aa, Artificial Sequence; identical to SEQ ID NO: 11392
  source: /note="Description of Artificial Sequence: Synthetic polypeptide"

SEQ ID NO: 11394 - protein, 107 aa, Artificial Sequence
  source: /note="Description of Artificial Sequence: Synthetic polypeptide"
DIQMTQSPSSLSASVGDRVTITCRASGNIYEYLTWYQQTPGKAPKLLIYNAKTLAEGVPSRFSGSSSGTDYTFTISSLQPEDIATYYCQHFWKLPYTFGQGTKLQIT

SEQ ID NO: 11395 - protein, 107 aa, Artificial Sequence
  source: /note="Description of Artificial Sequence: Synthetic polypeptide"
GIQMAQSPSSLSASVGDRVTITCRASGNIYEYLTWYQQTPGKAPKLLIYNAKTLAEGVPSRFSGSSSGTDYTFTISSLQPEDIATYYCQHFWKLPYTFGQGTKLQIT

SEQ ID NO: 11396 - protein, 107 aa, Artificial Sequence
  source: /note="Description of Artificial Sequence: Synthetic polypeptide"
GIQMTQSPSSLSASVGDRVTITCRASGNIYTYLTWYQQTPGKAPKLLIYNAKTLAEGVPSRFSGSSSGTDYTFTISSLQPEDIATYYCQHFWSLPYTFGQGTKLQIT

SEQ ID NO: 11397 - protein, 107 aa, Artificial Sequence
  source: /note="Description of Artificial Sequence: Synthetic polypeptide"
GIQMTQSPSSLSASVGDRVTITCRASGNIYHYLTWYQQTPGKAPKLLIYDAKTLAEGVPSRFSGSSSGTDYTFTISSLQPEDIATYYCQHFWSLPYTFGQGTKLQIT

SEQ ID NO: 11398 - protein, 107 aa, Artificial Sequence
  source: /note="Description of Artificial Sequence: Synthetic polypeptide"
GIQMTQSPSSLSASVGDRVTITCRASGNIYHYLTWYQQTPGKAPKLLIYNAKTLAEGVPSRFSGSSSGTDYTFTISSLQPEDIATYYCQHFWSLPYTFGQGTKLQIT

SEQ ID NO: 11399 - protein, 107 aa, Artificial Sequence
  source: /note="Description of Artificial Sequence: Synthetic polypeptide"
GIQMTQSPSSLSASVGDRVTITCRASGNIYHYLTWYQQTPGKAPKLLIYNAKTLAEGVPSRFSGSCSGTDYTFTISSLQPEDIATYYCQHFWSLPYTFGQGTKLQIT

SEQ ID NO: 11400 - protein, 107 aa, Artificial Sequence
  source: /note="Description of Artificial Sequence: Synthetic polypeptide"
GIQMTQSPSSLSASVGDRVTITCRASGNIYNYLTWYQQTPGKAPKLLIYNAKTLADGVPSRFSGSSSGTDYTFTISSLQPEDIATYYCQHFWTLPYTFGQGTKLQIT

SEQ ID NO: 11401 - protein, 107 aa, Artificial Sequence
  source: /note="Description of Artificial Sequence: Synthetic polypeptide"
GIQMTQSPSSLSASVGDRVTITCRASGNIYNYLTWYQQTPGKAPKLLIYNAKTLADGVPSRFSGSSSGTDYTLTISSLQPEDIATYYCQHFWTLPYTFGQGTKLQIT

SEQ ID NO: 11402 - protein, 107 aa, Artificial Sequence
  source: /note="Description of Artificial Sequence: Synthetic polypeptide"
GIQMTQSPSSLSASVGDRVTITCRASGNIYTYLTWYQQTPGKAPKLLIYNAKTLADGVPSRFSGSGSGTDYTFTISSLQPEDIATYYCQHFWTLPYTFGQGTKLQIT

SEQ ID NO: 11403 - protein, 107 aa, Artificial Sequence
  source: /note="Description of Artificial Sequence: Synthetic polypeptide"
GIQMTQSPSSLSASVGDRVTITCRASGNIYQYLTWYQQTPGKAPKLLIYNAKTLADGVPSRFSGSGSGTDYTFTISSLQPEDIATYYCQHFWTLPYTFGQGTKLQIT

SEQ ID NO: 11404 - protein, 107 aa, Artificial Sequence
  source: /note="Description of Artificial Sequence: Synthetic polypeptide"
GIQMTQSPSSLSASVGDRVTITCRASGNIYNYLTWYQQTPGKAPKLLIYNAKTLADGVPSRFSGSGSGTDYTFTISSLQPEDIATYYCQHFWTLPYTFGQGTKLQIT

SEQ ID NO: 11405 - protein, 107 aa, Artificial Sequence
  source: /note="Description of Artificial Sequence: Synthetic polypeptide"
GIQMTQSPSSLSASVGDRVTITCRASGNIYDYLTWYQQTPGKAPKLLIYNAKTLADGVPSRFSGSCSGTDYTFTISSLQPEDIATYYCQHFWTLPYTFGQGTKLQIT

SEQ ID NO: 11406 - protein, 107 aa, Artificial Sequence
  source: /note="Description of Artificial Sequence: Synthetic polypeptide"
GIQMTQSPSSLSASVGDRVTITCRASGNIYDYLTWYQQTPGKAPKLLIYNAKTLADGVPSRFSGSCSGTDYTFTISSLQPEDIATYYCQHFWSLPYTFGQGTKLQIT

SEQ ID NO: 11407 - protein, 107 aa, Artificial Sequence
  source: /note="Description of Artificial Sequence: Synthetic polypeptide"
GIQMTQSPSSLSASVGDRVTITCRASGNIYNYLTWYQQTPGKAPKLLIYNAKTLADGVPSRFSGSCSGTDYTFTISSLQPEDIATYYCQHFWKLPYTFGQGTKLQIT

SEQ ID NO: 11408 - protein, 107 aa, Artificial Sequence
  source: /note="Description of Artificial Sequence: Synthetic polypeptide"
GIQMTQSPSSLSASVGDRVTITCRASGNIYKYLTWYQQTPGKAPKLLIYDAKTLADGVPSRFSGSVSGTDYTFTISSLQPEDIATYYCQHFWRLPYTFGQGTKLQIT

SEQ ID NO: 11409 - protein, 107 aa, Artificial Sequence
  source: /note="Description of Artificial Sequence: Synthetic polypeptide"
GIQMTQSPSSLSASVGDRVTITCRASGNIYKYLTWYQQTPGKAPKLLIYDAKTLADGVPSRFSGSSSGTDYTFTISSLQPEDIATYYCQHFWRLPYTFGQGTKLQIT

SEQ ID NO: 11410 - protein, 107 aa, Artificial Sequence
  source: /note="Description of Artificial Sequence: Synthetic polypeptide"
GIQMTQSPSSLSASVGDRVTITCRASGNIYHYLTWYQQTPGKAPKLLIYDAKNLADGVPSRFSGSCSGTDYTFTISSLQPEDIATYYCQHFWSLPYTFGQGTKLQIT

SEQ ID NO: 11411 - protein, 107 aa, Artificial Sequence
  source: /note="Description of Artificial Sequence: Synthetic polypeptide"
GIQMTQSPSSLSASVGDRVTITCRASGNIYHYLTWYQQTPGKAPKLLIYDAKTLADGVPSRFSGSSSGTDYTFTISSLQPEDIATYYCQHFWSLPYTFGQGTKLQIT

SEQ ID NO: 11412 - protein, 107 aa, Artificial Sequence
  source: /note="Description of Artificial Sequence: Synthetic polypeptide"
GIQMTQSPSSLSASVGDRVTITCRASGNIYQYLTWYQQTPGKAPKLLIYDAKILADGVPSRFSGSSSGTDYTFTISSLQPEDIATYYCQHFWKLPYTFGQGTKLQIT

SEQ ID NO: 11413 - protein, 107 aa, Artificial Sequence
  source: /note="Description of Artificial Sequence: Synthetic polypeptide"
GIQMTQSPSSLSASVGDRVTITCRASGNIYHYLTWYQQTPGKAPKLLIYDAKILADGVPSRFSGSSSGTDYTFTISSLQPEDIATYYCQHFWKLPYTFGQGTKLQIT

SEQ ID NO: 11414 - protein, 107 aa, Artificial Sequence; identical to SEQ ID NO: 11390
  source: /note="Description of Artificial Sequence: Synthetic polypeptide"

SEQ ID NO: 11415 - protein, 107 aa, Artificial Sequence
  source: /note="Description of Artificial Sequence: Synthetic polypeptide"
DIQMTQSPSSLSASVGDRVTITCRASGNIYTYLNWYQQTPGKAPKLLIYDAKTLADGVPSRFSGSSSGTDYTFTISSLQPEDIATYYCQHFWRLPYTFGQGTKLQIT

SEQ ID NO: 11416 - protein, 107 aa, Artificial Sequence
  source: /note="Description of Artificial Sequence: Synthetic polypeptide"
DIQMTQSPSSLSASVGDRVTITCRASGNIYTYLNWYQQTPGKAPKLLIYNAKELAEGVPSRFSGSGSGTDYTFTISSLQPEDIATYYCQHFWRLPYTFGQGTKLQIT

SEQ ID NO: 11417 - protein, 107 aa, Artificial Sequence
  source: /note="Description of Artificial Sequence: Synthetic polypeptide"
DIQMTQSPSSLSASVGDRVTITCRASGNIYTYLNWYQQTPGKAPKLLIYNAKSLADGVPSRFSGSCSGTDYTFTISSLQPEDIATYYCQHFWRIPYTFGQGTKLQIT

SEQ ID NO: 11418 - protein, 107 aa, Artificial Sequence
  source: /note="Description of Artificial Sequence: Synthetic polypeptide"
DIQMTQSPSSLSASVGDRVTITCRASGNIYTYLTWYQQTPGKAPKLLIYDAKTLADGVPSRFSGSSSGTDYTFTISSLQPEDIATYYCQHFWKLPYTFGQGTKLQIT

SEQ ID NO: 11419 - protein, 107 aa, Artificial Sequence
  source: /note="Description of Artificial Sequence: Synthetic polypeptide"
DIQMTQSPSSLSASVGDRVTITCRASGNIYNYLTWYQQTPGKAPKLLIYNAKNLADGVPSRFSGSVSGTDYTFTISSLQPEDIATYYCQHFWRLPYTFGQGTKLQIT

SEQ ID NO: 11420 - protein, 107 aa, Artificial Sequence
  source: /note="Description of Artificial Sequence: Synthetic polypeptide"
DIQMTQSPSSLSASVGDRVTITCRASGNIWHYLTWYQQTPGKAPKLLIYDAKTLADGVPSRFSGSSSGTDYTLTISSLQPEDIATYYCQHFWRLPYTFGQGTKLQIT

SEQ ID NO: 11421 - protein, 107 aa, Artificial Sequence
  source: /note="Description of Artificial Sequence: Synthetic polypeptide"
DIQMTQSPSSLSASVGDRVTITCRASGNIYHYLTWYQQTPGKAPKLLIYNAKTLASGVPSRFSGSSSGTDYTLTISSLQPEDIATYYCQHFWKLPYTFGQGTKLQIT

SEQ ID NO: 11422 - protein, 107 aa, Artificial Sequence
  source: /note="Description of Artificial Sequence: Synthetic polypeptide"
DIQMTQSPSSLSASVGDRVTITCRASGNIYDYLTWYQQTPGKAPKLLIYNAKILADGVPSRFSGSGSGTDYTLTISSLQPEDIATYYCQHFWMLPYTFGQGTKLQIT

SEQ ID NO: 11423 - protein, 107 aa, Artificial Sequence
  source: /note="Description of Artificial Sequence: Synthetic polypeptide"
GIQMTQSPSSLSASVGDRVTITCRASGNIYTYLTWYQQIPGKAPKLLIYDAKTLAEGVPSRFSGSGSGTDYTFTISSLQPEDIATYYCQHFWKIPYTFGQGTKLQIT

SEQ ID NO: 11424 - protein, 107 aa, Artificial Sequence
  source: /note="Description of Artificial Sequence: Synthetic polypeptide"
DIQMTQSPSSLSASVGDRVTITCRASGNIYHYLTWYQQTPGKAPKLLIYNAKTLAEGVPSRFSGSCSGADYTFTISSLQPEDIATYYCQQFWKIPYTFGQGTKLQIT

SEQ ID NO: 11425 - protein, 107 aa, Artificial Sequence
  source: /note="Description of Artificial Sequence: Synthetic polypeptide"
DIQMTQSPSSLSASVGDRVTITCRASGNIYNYLTWYQQTPGKAPKLLIYNAKTLAEGVPSRFSGSDSGTDYTFTISSLQPEDIATYYCQHFWKLPYTFGQGTKLQIT

SEQ ID NO: 11426 - protein, 107 aa, Artificial Sequence
  source: /note="Description of Artificial Sequence: Synthetic polypeptide"
GIQMTQSPSSLSASVGDRVTITCRASGNIYNYLTWYQQTPGKAPKLLIYNAKTLAAGVPSRFSGSGSGTDYTFTISSLQPEDIATYYCQHFWKLPYTFGQGTKLQIT

SEQ ID NO: 11427 - protein, 107 aa, Artificial Sequence
  source: /note="Description of Artificial Sequence: Synthetic polypeptide"
GIQMTQSPSSLSASVGDRVTITCRASGNIYNYLTWYQQTPGKAPKLLIYNAKTLAEGVPSRFSGSGSGTDYTFTISSLQPEDIATYYCQHFWKLPYTFGQGTKLQIT

SEQ ID NO: 11428 - protein, 107 aa, Artificial Sequence
  source: /note="Description of Artificial Sequence: Synthetic polypeptide"
GIQMTQSPSSLSASVGDRVTITCRASGNIYNYLTWYQQTPGKAPKLLIYNAKTLEEGVPSRFSGSSSGTDYTFTISSLQPEDIATYYCQHFWTLPYTFGQGTKLQIT

SEQ ID NO: 11429 - protein, 107 aa, Artificial Sequence
  source: /note="Description of Artificial Sequence: Synthetic polypeptide"
GIQMTQSPSSLSASVGDRVTITCRASGNIYGYLTWYQQTPGKAPKLLIYNAKTLEEGVPSRFSGSGSGTDYTFTISSLQPEDIATYYCQHFWTLPYNFGQGTKLQIT

SEQ ID NO: 11430 - protein, 107 aa, Artificial Sequence
  source: /note="Description of Artificial Sequence: Synthetic polypeptide"
GIQMTQSPSSLSASVGDRVTITCRASGNIYDYLTWYQQTPGKAPKLLIYNAKTLAEGVPSRFSGSGSGTDYTFTISSLQPEDIATYYCQHFWTLPYTFGQGTKLQIT

SEQ ID NO: 11431 - protein, 108 aa, Artificial Sequence
  source: /note="Description of Artificial Sequence: Synthetic polypeptide"
EIVLTQSPATLSLSPGERATLSCRASQSVYSYLAWYQQKPGQAPRLLIYDASNRATGIPARFSGSGSGTDFTLTISSLEPEDFAVYYCQQRSNWPPFTFGPGTKVDIK

SEQ ID NO: 11432 - protein, 12 aa, Artificial Sequence
  source: /note="Description of Artificial Sequence: Synthetic peptide"
RASQDVNTAVAW

SEQ ID NO: 11433 - protein, 7 aa, Artificial Sequence
  source: /note="Description of Artificial Sequence: Synthetic peptide"
SASFLYS

SEQ ID NO: 11434 - protein, 9 aa, Artificial Sequence
  source: /note="Description of Artificial Sequence: Synthetic peptide"
QQHYTTPPT

SEQ ID NO: 11435 - protein, 107 aa, Artificial Sequence
  source: /note="Description of Artificial Sequence: Synthetic polypeptide"
DIVMTQSPSFLSASVGDRVTITCKASQNVITAVAWYQQKPGKSPKLLIYSASNRYTGVPDRFSGSGSGTDFTLTISSLQPEDFADYFCQQYNSYPYTFGGGTKLEIK

SEQ ID NO: 11436 - protein, 107 aa, Artificial Sequence
  source: /note="Description of Artificial Sequence: Synthetic polypeptide"
DIVMTQSPDSLAVSLGERATINCKASQNVITAVAWYQQKPGQSPKLLIYSASNRYTGVPDRFSGSGSGTDFTLTISSLQAEDVADYFCQQYNSYPYTFGGGTKLEIK

SEQ ID NO: 11437 - protein, 107 aa, Artificial Sequence
  source: /note="Description of Artificial Sequence: Synthetic polypeptide"
DIVMTQSPSFMSTSVGDRVTITCKASQNVITAVAWYQQKPGKSPKLLIYSASNRYTGVPDRFSGSGSGTDFTLTISSMQPEDFADYFCQQYNSYPYTFGGGTKLEIK

SEQ ID NO: 11438 - protein, 97 aa, Artificial Sequence
  source: /note="Description of Artificial Sequence: Synthetic polypeptide"
DIVMTQSPDSMATSLGERVTINCKASQNVITAVAWYQQKPGQSPKLLIYSASNRYTGVPDRFSGSGSGTDFTLTISSMQAEDVADYFCQQYNSYPYT

SEQ ID NO: 11439 - protein, 112 aa, Artificial Sequence
  source: /note="Description of Artificial Sequence: Synthetic polypeptide"
DVVMTQSPPSLLVTLGQPASISCRSSQSLLHSSGNTYLNWLLQRPGQSPQPLIYLVSKLESGVPDRFSGSGSGTDFTLKISGVEAEDVGVYYCMQFTHYPYTFGQGTKLEIK

SEQ ID NO: 11440 - protein, 139 aa, Artificial Sequence
  source: /note="Description of Artificial Sequence: Synthetic polypeptide"
MKHLWFFLLLVAAPRWVLSQVQLQEAGPGLVKPSETLSLTCSVSGGSISGDYYWFWIRQSPGKGLEWIGYIYGSGGGTNYNPSLNNRVSISIDTSKNLFSLKLRSVTAADTAVYYCASNILKYLHWLLYWGQGVLVTVS

SEQ ID NO: 11441 - protein, 124 aa, Artificial Sequence
  source: /note="Description of Artificial Sequence: Synthetic polypeptide"
MVSSAQFLGLLLLCFQGTRCDIQMTQTTSSLSASLGDRVTISCRASQDISSYLNWYQQKPDGTIKLLIYYTSRLHSGVPSRFSGSGTDYSLTINNLEQEDIATYFCQQGNTLPYTFGGTKLEIN

SEQ ID NO: 11442 - protein, 106 aa, Artificial Sequence
  source: /note="Description of Artificial Sequence: Synthetic polypeptide"
DIQMTQSPSSLSASVGDRVTITCRASSSVSYIHWFQQKPGKAPKPLIYAASSLQSGVPSRFSGSGSGTDYTLTISSLQPEDFATYYCQQWTSNPPTFGGGTKLEIK

SEQ ID NO: 11443 - protein, 106 aa, Artificial Sequence
  source: /note="Description of Artificial Sequence: Synthetic polypeptide"
DIQMTQSPSSLSASVGDRVTITCRASSSVSYIHWFQQKPGKAPKPLIYAASSLQSGVPSRFSGSGSGTDYTLTISSLQPEDFATYYCQQWQSNPPTFGGGTKLEIK

SEQ ID NO: 11444 - protein, 121 aa, Artificial Sequence
  source: /note="Description of Artificial Sequence: Synthetic polypeptide"
QVQLVQSGAEVKKPGSSVKVSCKASGYTFTSYNMHWVRQAPGQGLEWIGAIYPGNGDTSYNQKFKGKATITADKSTSTAYMELSSLRSDDTAVYYCARSTYYGGDWNFNNWGQGTLVTVSS

SEQ ID NO: 11445 - protein, 121 aa, Artificial Sequence
  source: /note="Description of Artificial Sequence: Synthetic polypeptide"
QVQLVQSGAEVKKPGSSVKVSCKASGYTFTSYNMHWVRQAPGQGLEWIGAIYPGNGDTSYNQKFKGKATITADKSTSTAYMELSSLRSDDTAVYYCARSTYYAGDWNFNNWGQGTLVTVSS

SEQ ID NO: 11446 - protein, 214 aa, Artificial Sequence
  source: /note="Description of Artificial Sequence: Synthetic polypeptide"
DIQMTQSPGTLSLSPGERATLSCRASQSVSSYLAWYQQKPGQAPRLLIYDASNRATGIPARFSGSGSGTEFTLTISSLQSEDFAVYYCQQYDKAPLTFGGGTKVEIKRTVAAPSVFIFPPSDEQLKSGTASVVCLLNNFYPREAKVQWKVDNALQSGNSQESVTEQDSKDSTYSLSSTLTLSKADYEKHKVYACEVTHQGLSSPVTKSFNRGEC

SEQ ID NO: 11447 - protein, 214 aa, Artificial Sequence
  source: /note="Description of Artificial Sequence: Synthetic polypeptide"
DIQMTQSPGTLSLSPGERATLSCRASQSVSSYLAWYQQKPGQAPRLLIYDASNRATGIPARFSGSGSGTEFTLTISSLQSEDFAVYYCQQYDKDPLTFGGGTKVEIKRTVAAPSVFIFPPSDEQLKSGTASVVCLLNNFYPREAKVQWKVDNALQSGNSQESVTEQDSKDSTYSLSSTLTLSKADYEKHKVYACEVTHQGLSSPVTKSFNRGEC

SEQ ID NO: 11448 - protein, 214 aa, Artificial Sequence
  source: /note="Description of Artificial Sequence: Synthetic polypeptide"
DIQMTQSPGTLSLSPGERATLSCRASQSVSSYLAWYQQKPGQAPRLLIYDASNRATGIPARFSGSGSGTEFTLTISSLQSEDFAVYYCQQYDKLPLTFGGGTKVEIKRTVAAPSVFIFPPSDEQLKSGTASVVCLLNNFYPREAKVQWKVDNALQSGNSQESVTEQDSKDSTYSLSSTLTLSKADYEKHKVYACEVTHQGLSSPVTKSFNRGEC

SEQ ID NO: 11449 - protein, 214 aa, Artificial Sequence
  source: /note="Description of Artificial Sequence: Synthetic polypeptide"
DIQMTQSPGTLSLSPGERATLSCRASQSVSSYLAWYQQKPGQAPRLLIYDASNRATGIPARFSGSGSGTEFTLTISSLQSEDFAVYYCQQYDKNPLTFGGGTKVEIKRTVAAPSVFIFPPSDEQLKSGTASVVCLLNNFYPREAKVQWKVDNALQSGNSQESVTEQDSKDSTYSLSSTLTLSKADYEKHKVYACEVTHQGLSSPVTKSFNRGEC

SEQ ID NO: 11450 - protein, 214 aa, Artificial Sequence
  source: /note="Description of Artificial Sequence: Synthetic polypeptide"
DIQMTQSPGTLSLSPGERATLSCRASQSVSSYLAWYQQKPGQAPRLLIYDASNRATGIPARFSGSGSGTEFTLTISSLQSEDFAVYYCQQYDKGPLTFGGGTKVEIKRTVAAPSVFIFPPSDEQLKSGTASVVCLLNNFYPREAKVQWKVDNALQSGNSQESVTEQDSKDSTYSLSSTLTLSKADYEKHKVYACEVTHQGLSSPVTKSFNRGEC

SEQ ID NO: 11451 - protein, 214 aa, Artificial Sequence
  source: /note="Description of Artificial Sequence: Synthetic polypeptide"
DIQMTQSPGTLSLSPGERATLSCRASQSVSSYLAWYQQKPGQAPRLLIYDASNRATGIPARFSGSGSGTEFTLTISSLQSEDFAVYYCQQYDKQPLTFGGGTKVEIKRTVAAPSVFIFPPSDEQLKSGTASVVCLLNNFYPREAKVQWKVDNALQSGNSQESVTEQDSKDSTYSLSSTLTLSKADYEKHKVYACEVTHQGLSSPVTKSFNRGEC

SEQ ID NO: 11452 - protein, 214 aa, Artificial Sequence
  source: /note="Description of Artificial Sequence: Synthetic polypeptide"
DIQMTQSPGTLSLSPGERATLSCRASQSVSSYLAWYQQKPGQAPRLLIYDASNRATGIPARFSGSGSGTEFTLTISSLQSEDFAVYYCQQYDKVPLTFGGGTKVEIKRTVAAPSVFIFPPSDEQLKSGTASVVCLLNNFYPREAKVQWKVDNALQSGNSQESVTEQDSKDSTYSLSSTLTLSKADYEKHKVYACEVTHQGLSSPVTKSFNRGEC

SEQ ID NO: 11453 - protein, 214 aa, Artificial Sequence
  source: /note="Description of Artificial Sequence: Synthetic polypeptide"
DIQMTQSPGTLSLSPGERATLSCRASQSVSSYLAWYQQKPGQAPRLLIYDASNRATGIPARFSGSGSGTEFTLTISSLQSEDFAVYYCQQYDKSPLTFGGGTKVEIKRTVAAPSVFIFPPSDEQLKSGTASVVCLLNNFYPREAKVQWKVDNALQSGNSQESVTEQDSKDSTYSLSSTLTLSKADYEKHKVYACEVTHQGLSSPVTKSFNRGEC

SEQ ID NO: 11454 - protein, 238 aa, Artificial Sequence
  source: /note="Description of Artificial Sequence: Synthetic polypeptide"
MVLQTQVFISLLLWISGAYGDIVMTQSPDSLAVSLGERATINCRASESVDSYGNSFMHWYQQKPGQPPKLLIYRASNLESGVPDRFSGSGSGTDFTLTISSLQAEDVAVYYCQQSNEDPYTFGGGTKVEIKRTVAAPSVFIFPPSDEQLKSGTASVVCLLNNFYPREAKVQWKVDNALQSGNSQESVTEQDSKDSTYSLSSTLTLSKADYEKHKVYACEVTHQGLSSPVTKSFNRGEC

SEQ ID NO: 11455 - protein, 238 aa, Artificial Sequence
  source: /note="Description of Artificial Sequence: Synthetic polypeptide"
MVLQTQVFISLLLWISGAYGDIVMTQSPDSLAVSLGERATINCRASESVDSYGNSFMHWYQQKPGQPPKLLIYWASTRESGVPDRFSGSGSGTDFTLTISSLQAEDVAVYYCQQSNEDPYTFGGGTKVEIKRTVAAPSVFIFPPSDEQLKSGTASVVCLLNNFYPREAKVQWKVDNALQSGNSQESVTEQDSKDSTYSLSSTLTLSKADYEKHKVYACEVTHQGLSSPVTKSFNRGEC

SEQ ID NO: 11456 - protein, 240 aa, Artificial Sequence
  source: /note="Description of Artificial Sequence: Synthetic polypeptide"
MDMRVPAQLLGLLLLWLRGARCDIQMTQSPSSLSASVGDRVTITCRASESVDSYGNSFMHWYQQKPGKAPKLLIYRASNLESGVPSRFSGSGSGTDFTLTISSLQPEDFATYYCQQSNEDPYTFGGGTKVEIKRTVAAPSVFIFPPSDEQLKSGTASVVCLLNNFYPREAKVQWKVDNALQSGNSQESVTEQDSKDSTYSLSSTLTLSKADYEKHKVYACEVTHQGLSSPVTKSFNRGEC

SEQ ID NO: 11457 - protein, 213 aa, Artificial Sequence
  source: /note="Description of Artificial Sequence: Synthetic polypeptide"
QPGLTQPPSVSVAPGQTARITCGGNNIGSKSVHWYQQKPGQAPVLVVYDDSDRPSGIPERFSGSNSGNTATLTISRVEAGDEADYYCQVWDSSSDHYVFGTGTKVTVLSSASTKGPSVFPLAPSSKSTSGGTAALGCLVKDYFPEPVTVSWNSGALTSGVHTFPAVLQSSGLYSLSSVVTVPSSSLGTQTYICNVNHKPSNTKVDKKVEPKSC

SEQ ID NO: 11458 - protein, 216 aa, Artificial Sequence
  source: /note="Description of Artificial Sequence: Synthetic polypeptide"
QSVLTQPPSASGTPGQRVTISCSGSNTNIGKNYVSWYQQLPGTAPKLLIYANSNRPSGVPDRFSGSKSGTSASLAISGLRSEDEADYYCASWDASLNGWVFGGGTKLTVLGQPKAAPSVTLFPPSSEELQANKATLVCLISDFYPGAVTVAWKADSSPVKAGVETTTPSKQSNNKYAASSYLSLTPEQWKSHRSYSCQVTHEGSTVEKTVAPTECS

SEQ ID NO: 11459 - protein, 214 aa, Artificial Sequence
  source: /note="Description of Artificial Sequence: Synthetic polypeptide"
EIVMTQSPATLSVSPGERATLSCRASQSIGTNIHWYQQKPGQAPRLLIYYASESISGIPARFSGSGSGTEFTLTISSLQSEDFAVYYCQQSWSWPTTFGGGTKVEIKRTVAAPSVFIFPPSDEQLKSGTASVVCLLNNFYPREAKVQWKVDNALQSGNSQESVTEQDSKDSTYSLSSTLTLSKADYEKHKVYACEVTHQGLSSPVTKSFNRGEC

SEQ ID NO: 11460 - protein, 109 aa, Artificial Sequence
  source: /note="Description of Artificial Sequence: Synthetic polypeptide"
DIQMTQSPSSVSASVGDRVTITCRASQDISSWLAWYQQKPGKAPKLLIYAASSLQSGVPSRFSGSGSGTDFTLTISSLQPEDFATYYCQQASSFPSITFGQGTRLEIKR

SEQ ID NO: 11461 - protein, 126 aa, Artificial Sequence
  source: /note="Description of Artificial Sequence: Synthetic polypeptide"
METDTLLLWVLLLWVPGSTGDIQMTQSPSSLSASVGDRVTITCSASSSVSYMNWYQQKPGKAPKRLIYDTSKLASGVPSRFSGSGSGTDFTLTISSLQPEDFATYYCQQWSSNPPTFGGGTKVEIK

SEQ ID NO: 11462 - protein, 204 aa, Artificial Sequence
  source: /note="Description of Artificial Sequence: Synthetic polypeptide"
KFLLVSAGDRVTITCKASQSVSNDVAWYQQKPGQSPKLLIYYASNRYTGVPDRFTGSGYGTDFTFTISTVQAEDLAVYFCQQDYSSPYTFGGGTKLEIKRADAAPTVSIFPPSSEQLTSGGASWCFLNNFYPKDINVKWKIDGSERQNGVLNSWTDQDSKDSTYSMSSTLTTKDEYERHNSYTCEATHKTSTSPIVKSFNRNEC

SEQ ID NO: 11463 - protein, 214 aa, Artificial Sequence
  source: /note="Description of Artificial Sequence: Synthetic polypeptide"
EIVLTQSPATLSVSPGERATLSCRASQSVGTNVAWYQQKPGQAPRVLIYSTSSRATGITDRFSGSGSGTDFTLTISRLEPEDFAVYYCQQFNKSPLTFGGGTKVEIKRTVAAPSVFIFPPSDEQLKSGTASVVCLLNNFYPREAKVQWKVDNALQSGNSQESVTEQDSKDSTYSLSSTLTLSKADYEKHKVYACEVTHQGLSSPVTKSFNRGEC

SEQ ID NO: 11464 - protein, 214 aa, Artificial Sequence
  source: /note="Description of Artificial Sequence: Synthetic polypeptide"
DIQMTQSPSSLSASVGDRVTITCKASRDVAIAVAWYQQKPGKVPKLLIYWASTRHTGVPSRFSGSGSRTDFTLTISSLQPEDVADYFCHQYSSYPFTFGSGTKLEIKRTVAAPSVFIFPPSDEQLKSGTASVVCLLNNFYPREAKVQWKVDNALQSGNSQESVTEQDSKDSTYSLSSTLTLSKADYEKHKVYACEVTHQGLSSPVTKSFNRGEC

SEQ ID NO: 11465 - protein, 214 aa, Artificial Sequence; identical to SEQ ID NO: 11247
  source: /note="Description of Artificial Sequence: Synthetic polypeptide"

SEQ ID NO: 11466 - protein, 215 aa, Artificial Sequence
  source: /note="Description of Artificial Sequence: Synthetic polypeptide"
EIVLTQSPATLSLSPGERATLSCRASQSVSSYLAWYQQKPGQAPRLLIYDASNRATGIPARFSGSGSGTDFTLTISSLEPEDFAVYYCQQRSNWPPLTFGGGTKVEIKRTVAAPSVFIFPPSDEQLKSGTASVVCLLNNFYPREAKVQWKVDNALQSGNSQESVTEQDSKDSTYSLSSTLTLSKADYEKHKVYACEVTHQGLSSPVTKSFNRGEC

SEQ ID NO: 11467 - protein, 235 aa, Artificial Sequence
  source: /note="Description of Artificial Sequence: Synthetic polypeptide"
MGWSCIILFLVATATGVHSDIQLTQPNSVSTSLGSTVKLSCTLSSGNIENNYVHWYQLYEGRSPTTMIYDDDKRPDGVPDRFSGSIDRSSNSAFLTIHNVAIEDEAIYFCHSYVSSFNVFGGGTKLTVLRQPKAAPSVTLFPPSSEELQANKATLVCLISDFYPGAVTVAWKADSSPVKAGVETTTPSKQSNNKYAASSYLSLTPEQWKSHRSYSCQVTHEGSTVEKTVAPTECS

SEQ ID NO: 11468 - protein, 213 aa, Artificial Sequence
  source: /note="Description of Artificial Sequence: Synthetic polypeptide"
DIQMTQSPSSLSASVGDRVTITCSASSSVSYMNWYQQTPGKAPKRWIYDTSKLASGVPSRFSGSGSGTDYTFTISSLQPEDIATYYCQQWSSNPFTFGQGTKLQITRTVAAPSVFIFPPSDEQLKSGTASVVCLLNNFYPREAKVQWKVDNALQSGNSQESVTEQDSKDSTYSLSSTLTLSKADYEKHKVYACEVTHQGLSSPVTKSFNRGEC

SEQ ID NO: 11469 - protein, 236 aa, Artificial Sequence
  source: /note="Description of Artificial Sequence: Synthetic polypeptide"
MDMRVPAQLLGLLLLWFPGSRCDIQMTQSPSSVSASVGDRVTITCRASQGISSWLAWYQQKPGKAPKLLIYEASNLETGVPSRFSGSGSGSDFTLTISSLQPEDFATYYCQQTSSFLLSFGGGTKVEHKRTVAAPSVFIFPPSDEQLKSGTASVVCLLNNFYPREAKVQWKVDNALQSGNSQESVTEQDSKDSTYSLSSTLTLSKADYEKHKVYACEVTHQGLSSPVTKSFNRGEC

SEQ ID NO: 11470 - protein, 214 aa, Artificial Sequence
  source: /note="Description of Artificial Sequence: Synthetic polypeptide"
DIQMTQSPSSLSASVGDRVTITCRASQGISSWLAWYQQKPEKAPKSLIYAASSLQSGVPSRFSGSGSGTDFTLTISSLQPEDFATYYCQQYNSYPPTFGQGTKLEIKRTVAAPSVFIFPPSDEQLKSGTASVVCLLNNFYPREAKVQWKVDNALQSGNSQESVTEQDSKDSTYSLSSTLTLSKADYEKHKVYACEVTHQGLSSPVTKSFNRGEC

SEQ ID NO: 11471 - protein, 215 aa, Artificial Sequence
  source: /note="Description of Artificial Sequence: Synthetic polypeptide"
ETVLTQSPGTLSLSPGERATLSCRASQSLGSSYLAWYQQKPGQAPRLLIYGASSRAPGIPDRFSGSGSGTDFTLTISRLEPEDFAVYYCQQYADSPITFGQGTRLEIKRTVAAPSVFIFPPSDEQLKSGTASVVCLLNNFYPREAKVQWKVDNALQSGNSQESVTEQDSKDSTYSLSSTLTLSKADYEKHKVYACEVTHQGLSSPVTKSFNRGEC

SEQ ID NO: 11472 - protein, 214 aa, Artificial Sequence
  source: /note="Description of Artificial Sequence: Synthetic polypeptide"
DIQMTQSPSSLSASVGDRVTITCRASQDISNYLNWYQQKPGKAPKLLIYYTSRLLSGVPSRFSGSGSGTDFTLTISSLQPEDFATYYCQQGDTLPYTFGGGTKVEIKRTVAAPSVFIFPPSDEQLKSGTASVVCLLNNFYPREAKVQWKVDNALQSGNSQESVTEQDSKDSTYSLSSTLTLSKADYEKHKVYACEVTHQGLSSPVTKSFNRGEC

SEQ ID NO: 11473 - protein, 214 aa, Artificial Sequence
  source: /note="Description of Artificial Sequence: Synthetic polypeptide"
DIQMTQSPSSLSASVGDRVTITCKASQDVHTAVAWYQQKPGKAPKLLIYWASTRWTGVPSRFSGSGSGTDFTLTISSLQPEDFATYYCQQYSDYPWTFGGGTKVEIKRTVAAPSVFIFPPSDEQLKSGTASVVCLLNNFYPREAKVQWKVDNALQSGNSQESVTEQDSKDSTYSLSSTLTLSKADYEKHKVYACEVTHQGLSSPVTKSFNRGEC

SEQ ID NO: 11474 - protein, 235 aa, Artificial Sequence
  source: /note="Description of Artificial Sequence: Synthetic polypeptide"
METPAQLLFLLLLWLPDTTGEIVLTQSPGTLSLSPGERATLSCRASQSVRGRYLAWYQQKPGQAPRLLIYGASSRATGIPDRFSGSGSGTDFTLTISRLEPEDFAVFYCQQYGSSPRTFGQGTKVEIKRTVAAPSVFIFPPSDEQLKSGTASVVCLLNNFYPREAKVQWKVDNALQSGNSQESVTEQDSKDSTYSLSSTLTLSKADYEKHKVYACEVTHQGLSSPVTKSFNRGEC

SEQ ID NO: 11475 - protein, 215 aa, Artificial Sequence
  source: /note="Description of Artificial Sequence: Synthetic polypeptide"
EIVLTQSPGTLSLSPGERATLSCRASQSVRGRYLAWYQQKPGQAPRLLIYGASSRATGIPDRFSGSGSGTDFTLTISRLEPEDFAVFYCQQYGSSPRTFGQGTKVEIKRTVAAPSVFIFPPSDEQLKSGTASVVCLLNNFYPREAKVQWKVDNALQSGNSQESVTEQDSKDSTYSLSSTLTLSKADYEKHKVYACEVTHQGLSSPVTKSFNRGEC

SEQ ID NO: 11476 - protein, 107 aa, Artificial Sequence
  source: /note="Description of Artificial Sequence: Synthetic polypeptide"
DIQMTQSPASLSASVGETVTITCGASENIYGALNWYQRKQGKSPQLLIYGATNLADGMSSRFSGSGSGRQYYLKISSLHPDDVATYYCQNVLNTPLTFGAGTKLELK

SEQ ID NO: 11477 - protein, 217 aa, Artificial Sequence
  source: /note="Description of Artificial Sequence: Synthetic polypeptide"
QSVLTQPPSVSGAPGQRVTISCTGSSSNIGSGYDVHWYQQLPGTAPKLLIYGNSKRPSGVPDRFSGSKSGTSASLAITGLQSEDEADYYCASWTDGLSLVVFGGGTKLTVLGQPKAAPSVTLFPPSSEELQANKATLVCLISDFYPGAVTVAWKADSSPVKAGVETTTPSKQSNNKYAASSYLSLTPEQWKSHRSYSCQVTHEGSTVEKTVAPTECS

SEQ ID NO: 11478 - protein, 213 aa, Artificial Sequence; identical to SEQ ID NO: 9893
  source: /note="Description of Artificial Sequence: Synthetic polypeptide"

SEQ ID NO: 11479 - protein, 214 aa, Artificial Sequence
  source: /note="Description of Artificial Sequence: Synthetic polypeptide"
DIQMTQSPSSLSASVGDRVTITCKASRDIRSYLTWYQQKPGKAPKTLIYYATSLADGVPSRFSGSGSGQDYSLTISSLESDDTATYYCLQHGESPFTLGSGTKLEIKRTVAAPSVFIFPPSDEQLKSGTASVVCLLNNFYPREAKVQWKVDNALQSGNSQESVTEQDSKDSTYSLSSTLTLSKADYEKHKVYACEVTHQGLSSPVTKSFNRGEC

SEQ ID NO: 11480 - protein, 109 aa, Artificial Sequence
  source: /note="Description of Artificial Sequence: Synthetic polypeptide"
DIQMTQSPSSLSASVGDRVTITCKASRDIRSYLTWYQQKPGKAPKTLIYYATSLADGVPSRFSGSGSGQDYSLTISSLESDDTATYYCLQHGESPFTFGSGTKLEIKRA

SEQ ID NO: 11481 - protein, 107 aa, Artificial Sequence
  source: /note="Description of Artificial Sequence: Synthetic polypeptide"
DIQMTQSPSSLSASVGDRVTITCKASRDIRSYLTWYQQKPGKAPKTLIYYATSLADGVPSRFSGSGSGQDYSLTISSLESDDTATYYCLQHGESPFTLGSGTKLEIK

SEQ ID NO: 11482 - protein, 213 aa, Artificial Sequence
  source: /note="Description of Artificial Sequence: Synthetic polypeptide"
AIQLTQSPSSLSASVGDRVTITCRASQGISSALAWYQQKPGKAPKLLIYDASNLESGVPSRFSGSGSGTDFTLTISSLQPEDFATYYCQQFNSYPTFGQGTKVEIKRTVAAPSVFIFPPSDEQLKSGTASVVCLLNNFYPREAKVQWKVDNALQSGNSQESVTEQDSKDSTYSLSSTLTLSKADYEKHKVYACEVTHQGLSSPVTKSFNRGEC

SEQ ID NO: 11483 - protein, 218 aa, Artificial Sequence
  source: /note="Description of Artificial Sequence: Synthetic polypeptide"
DIVMTQSPDSLAVSLGERATINCRASKSVSTSGYSYIYWYQQKPGQPPKLLIYLASILESGVPDRFSGSGSGTDFTLTISSLQAEDVAVYYCQHSRELPWTFGQGTKVEIKRTVAAPSVFIFPPSDEQLKSGTASVVCLLNNFYPREAKVQWKVDNALQSGNSQESVTEQDSKDSTYSLSSTLTLSKADYEKHKVYACEVTHQGLSSPVTKSFNRGEC

SEQ ID NO: 11484 - protein, 214 aa, Artificial Sequence
  source: /note="Description of Artificial Sequence: Synthetic polypeptide"
AIQLTQSPSSLSASVGDRVTITCRADESVRTLMHWYQQKPGKAPKLLIYLVSNSEIGVPDRFSGSGSGTDFRLTISSLQPEDFATYYCQQTWSDPWTFGQGTKVEIKRTVAAPSVFIFPPSDEQLKSGTASVVCLLNNFYPREAKVQWKVDNALQSGNSQESVTEQDSKDSTYSLSSTLTLSKADYEKHKVYACEVTHQGLSSPVTKSFNRGEC

SEQ ID NO: 11485 - protein, 238 aa, Artificial Sequence
  source: /note="Description of Artificial Sequence: Synthetic polypeptide"
METDTLLLWVLLLWVPGSTGDIVLTQSPATLSVSPGERATISCRASQRVSSSTYSYMHWYQQKPGQPPKLLIKYASNLESGVPARFSGSGSGTDFTLTISSVEPEDFATYYCQHSWEIPPTFGGGTKLEIKRTVAAPSVFIFPPSDEQLKSGTASVVCLLNNFYPREAKVQWKVDNALQSGNSQESVTEQDSKDSTYSLSSTLTLSKADYEKHKVYACEVTHQGLSSPVTKSFNRGEC

SEQ ID NO: 11486 - protein, 217 aa, Artificial Sequence
  source: /note="Description of Artificial Sequence: Synthetic polypeptide"
QSVLTQPPSVSGAPGQRVTISCTGSGSNIGAPYDVSWYQQLPGTAPKLLIYHNNKRPSGVPDRFSGSKSGTSASLAITGLQAEDEADYYCATVEAGLSGSVFGGGTKLTVLGQPKAAPSVTLFPPSSEELQANKATLVCLISDFYPGAVTVAWKADSSPVKAGVETTTPSKQSNNKYAASSYLSLTPEQWKSHRSYSCQVTHEGSTVEKTVAPTECS

SEQ ID NO: 11487 - protein, 216 aa, Artificial Sequence
  source: /note="Description of Artificial Sequence: Synthetic polypeptide"
EIVLTQSPGTLSLSPGERATLSCRASQSVSSSYLAWYQQKPGQAPRLLIYGASSRATGIPDRFSGSGSGTDFTLTISRLEPEDFAVYYCQQYGSSPIFTFGPGTKVDIKRTVAAPSVFIFPPSDEQLKSGTASVVCLLNNFYPREAKVQWKVDNALQSGNSQESVTEQDSKDSTYSLSSTLTLSKADYEKHKVYACEVTHQGLSSPVTKSFNRGEC

SEQ ID NO: 11488 - protein, 214 aa, Artificial Sequence
  source: /note="Description of Artificial Sequence: Synthetic polypeptide"
AIQLTQSPSSLSASVGDRVTITCRASQGISSALAWYQQKPGKAPKLLIYDASSLESGVPSRFSGSGSGTDFTLTISSLQPEDFATYYCQQFNSYPLTFGGGTKVEIKRTVAAPSVFIFPPSDEQLKSGTASVVCLLNNFYPREAKVQWKVDNALQSGNSQESVTEQDSKDSTYSLSSTLTLSKADYEKHKVYACEVTHQGLSSPVTKSFNRGEC

SEQ ID NO: 11489 - protein, 217 aa, Artificial Sequence; identical to SEQ ID NO: 9709
  source: /note="Description of Artificial Sequence: Synthetic polypeptide"

SEQ ID NO: 11490 - protein, 213 aa, Artificial Sequence
  source: /note="Description of Artificial Sequence: Synthetic polypeptide"
EIVLTQSPATLSLSPGERATLSCSASISVSYMYWYQQKPGQAPRLLIYDMSNLASGIPARFSGSGSGTDFTLTISSLEPEDFAVYYCMQWSGYPYTFGGGTKVEIKRTVAAPSVFIFPPSDEQLKSGTASVVCLLNNFYPREAKVQWKVDNALQSGNSQESVTEQDSKDSTYSLSSTLTLSKADYEKHKVYACEVTHQGLSSPVTKSFNRGEC

SEQ ID NO: 11491 - protein, 214 aa, Artificial Sequence
  source: /note="Description of Artificial Sequence: Synthetic polypeptide"
DIQMTQSPSSLSASVGDRVTITCRASQAVSSAVAWYQQKPGKAPKLLIYSASHRYTGVPSRFSGSGSGTDFTLTISSLQPEDFATYYCQESYSTPWTFGQGTKVEIKRTVAAPSVFIFPPSDEQLKSGTASVVCLLNNFYPREAKVQWKVDNALQSGNSQESVTEQDSKDSTYSLSSTLTLSKADYEKHKVYACEVTHQGLSSPVTKSFNRGEC

SEQ ID NO: 11492 - protein, 214 aa, Artificial Sequence
  source: /note="Description of Artificial Sequence: Synthetic polypeptide"
DIQMTQSPSSVSASVGDRVTIACRASQNIRNILNWYQQRPGKAPQLLIYAASNLQSGVPSRFSGSGSGTDFTLTINSLQPEDFATYYCQQSYSMPRTFGGGTKLEIKRTVAAPSVFIFPPSDEQLKSGTASVVCLLNNFYPREAKVQWKVDNALQSGNSQESVTEQDSKDSTYSLSSTLTLSKADYEKHKVYACEVTHQGLSSPVTKSFNRGEC

SEQ ID NO: 11493 - protein, 214 aa, Artificial Sequence
  source: /note="Description of Artificial Sequence: Synthetic polypeptide"
DIQMTQSPSSLSASVGDRVTITCRASQGIRNYLAWYQQKPGKAPKLLIYAASTLQSGVPSRFSGSGSGTDFTLTISSLQPEDVATYYCQRYNRAPYTFGQGTKVEIKRTVAAPSVFIFPPSDEQLKSGTASVVCLLNNFYPREAKVQWKVDNALQSGNSQESVTEQDSKDSTYSLSSTLTLSKADYEKHKVYACEVTHQGLSSPVTKSFNRGEC

SEQ ID NO: 11494 - protein, 214 aa, Artificial Sequence
  source: /note="Description of Artificial Sequence: Synthetic polypeptide"
DIQMTQSPSSLSASVGDRVTITCRASEDLYYNLAWYQRKPGKAPKLLIYDTYRLADGVPSRFSGSGSGTDYTLTISSLQPEDFASYYCQQYYKFPFTFGQGTKVEIKRTVAAPSVFIFPPSDEQLKSGTASVVCLLNNFYPREAKVQWKVDNALQSGNSQESVTEQDSKDSTYSLSSTLTLSKADYEKHKVYACEVTHQGLSSPVTKSFNRGEC

SEQ ID NO: 11495 - protein, 236 aa, Artificial Sequence
  source: /note="Description of Artificial Sequence: Synthetic polypeptide"
MDMRVPAQLLGLLLLWLRGARCDIQMTQSPSSLSASVGDRVTITCRASEDLYYNLAWYQRKPGKAPKLLIYDTYRLADGVPSRFSGSGSGTDYTLTISSLQPEDFASYYCQQYYKFPFTFGQGTKVEIKRTVAAPSVFIFPPSDEQLKSGTASVVCLLNNFYPREAKVQWKVDNALQSGNSQESVTEQDSKDSTYSLSSTLTLSKADYEKHKVYACEVTHQGLSSPVTKSFNRGEC

SEQ ID NO: 11496 - protein, 215 aa, Artificial Sequence
  source: /note="Description of Artificial Sequence: Synthetic polypeptide"
EIVLTQSPGTLSLSPGERATLSCRASQSVSSSFFAWYQQKPGQAPRLLIYGASSRATGIPDRLSGSGSGTDFTLTITRLEPEDFAVYYCQQYDSSAITFGQGTRLEIKRTVAAPSVFIFPPSDEQLKSGTASVVCLLNNFYPREAKVQWKVDNALQSGNSQESVTEQDSKDSTYSLSSTLTLSKADYEKHKVYACEVTHQGLSSPVTKSFNRGEC

SEQ ID NO: 11497 - protein, 218 aa, Artificial Sequence
  source: /note="Description of Artificial Sequence: Synthetic polypeptide"
DIQMTQSPSSLSASVGDRVTITCRASQSVSTSSYSYMHWYQQKPGKAPKVLISYASNLESGVPSRFSGSGSGTDFTLTISSLQPEDFATYYCQHSWGIPRTFGQGTKVEIKRTVAAPSVFIFPPSDEQLKSGTASVVCLLNNFYPREAKVQWKVDNALQSGNSQESVTEQDSKDSTYSLSSTLTLSKADYEKHKVYACEVTHQGLSSPVTKSFNRGEC

SEQ ID NO: 11498 - protein, 238 aa, Artificial Sequence
  source: /note="Description of Artificial Sequence: Synthetic polypeptide"
MGWSCIILFLVATATGVHSDVVMTQSPLSLPVTPGEPASISCRSSQSLAKSYGNTYLSWYLQKPGQSPQLLIYGISNRFSGVPDRFSGSGSGTDFTLKISRVEAEDVGVYYCLQGTHQPYTFGQGTKVEIKRTVAAPSVFIFPPSDEQLKSGTASVVCLLNNFYPREAKVQWKVDNALQSGNSQESVTEQDSKDSTYSLSSTLTLSKADYEKHKVYACEVTHQGLSSPVTKSFNRGEC

SEQ ID NO: 11499 - protein, 106 aa, Artificial Sequence; identical to SEQ ID NO: 9890
  source: /note="Description of Artificial Sequence: Synthetic polypeptide"

SEQ ID NO: 11500 - protein, 213 aa, Artificial Sequence
  source: /note="Description of Artificial Sequence: Synthetic polypeptide"
QIVLTQSPAIMSASPGEKVTITCSASSSVSYMNWFQQKPGTSPKLWIYSTSNLASGVPARFSGSGSGTSYSLTISRMEAEDAATYYCQQRSSYPNTFGGGTKLEIKRADAAPTVSIFPPSSEQLTSGGASVVCFLNNFYPKDINVKWKIDGSERQNGVLNSWTDQDSKDSTYSMSSTLTLTKDEYERHNSYTCEATHKTSTSPIVKSFNRNEC

SEQ ID NO: 11501 - protein, 214 aa, Artificial Sequence
  source: /note="Description of Artificial Sequence: Synthetic polypeptide"
DIELTQSPASLSASVGETVTITCQASENIYSYLAWHQQKQGKSPQLLVYNAKTLAGGVSSRFSGSGSGTHFSLKIKSLQPEDFGIYYCQHHYGILPTFGGGTKLEIKRADAAPTVSIFPPSSEQLTSGGASVVCFLNNFYPKDINVKWKIDGSERQNGVLNSWTDQDSKDSTYSMSSTLTLTKDEYERHNSYTCEATHKTSTSPIVKSFNRNEC

SEQ ID NO: 11502 - protein, 214 aa, Artificial Sequence; identical to SEQ ID NO: 9779
  source: /note="Description of Artificial Sequence: Synthetic polypeptide"

SEQ ID NO: 11503 - protein, 214 aa, Artificial Sequence
  source: /note="Description of Artificial Sequence: Synthetic polypeptide"
DIQMTQSPSSLSASVGDRVTITCSASQDISNYLNWYQQKPGKAPKVLIYFTSSLHSGVPSRFSGSGSGTDFTLTISSLQPEDFATYYCQQYSTVPWTFGQGTKVEIKRTVAAPSVFIFPPSDEQLKSGTASVVCLLNNFYPREAKVQWKVDNALQSGNSQESVTEQDSKDSTYSLSSTLTLSKADYEKHKVYACEVTHQGLSSPVTKSFNRGEC

SEQ ID NO: 11504 - protein, 108 aa, Artificial Sequence
  source: /note="Description of Artificial Sequence: Synthetic polypeptide"
DIQMTQSPSSLSASVGDRVTITCSASQDISNYLNWYQQKPDKAPKLLIFYSSNLHSGVPSRFSGGGSGTDYTLTISSLQPEDIATYFCHQYSKLPWTFGQGTKVEIKR

SEQ ID NO: 11505 - protein, 210 aa, Artificial Sequence
  source: /note="Description of Artificial Sequence: Synthetic polypeptide"
QIVSTQSPAIMSASPGEKVTMTCSASSSRSYMQWYQQKPGTSPKRWIYDTSKLASGVPARFSGSGSGTSYSLTISSMEAEDAATYYCHQRSSYTFGGGTKLEIKRTVAAPSVFIFPPSDEQLKSGTASVVCLLNNFYPREAKVQWKVDNALQSGNSQESVTEQDSKDSTYSLSSTLTLSKADYEKHKVYACEVTHQGLSSPVTKSFNRGE

SEQ ID NO: 11506 - protein, 214 aa, Artificial Sequence; identical to SEQ ID NO: 9258
  source: /note="Description of Artificial Sequence: Synthetic polypeptide"

SEQ ID NO: 11507 - protein, 394 aa, Artificial Sequence [sequence omitted]

SEQ ID NO: 11508 - protein, 465 aa, Artificial Sequence
  source: /note="Description of Artificial Sequence: Synthetic polypeptide"
MEWSRVFIFLLSVTAGVHSQVQLQQSGAELVRPGTSVKVSCKASGYAFTNYLIEWVKQRPGQGLEWIGVINPGSGGTNYNEKFKGKATLTADKSSSTAYMQLSSLTSDDSAVYFCARDGPWFAYWGQGTLVTVSAAKTTAPSVYPLAPVCGDTTGSSVTLGCLVKGYFPEPVTLTWNSGSLSSGVHTFPAVLQSDLYTLSSSVTVTSSTWPSQSITCNVAHPASSTKVDKKIEPRGPTIKPCPPCKCPAPNLLGGPSVFIFPPKIKDVLMISLSPIVTCVVVDVSEDDPDVQISWFVNNVEVHTAQTQTHREDYNSTLRVVSALPIQHQDWMSGKEFKCKVNNKDLPAPIERTISKPKGSVRAPQVYVLPPPEEEMTKKQVTLTCMVTDFMPEDIYVEWTNNGKTELNYKNTEPVLDSDGSYFMYSKLRVEKKNWVERNSYSCSVVHEGLHNHHTTKSFSRTPGK

SEQ ID NO: 11509 - protein, 243 aa, Artificial Sequence
  source: /note="Description of Artificial Sequence: Synthetic polypeptide"
MHQTSMGIKMESQTLVFISILLWLYGADGNIVMTQSPKSMSMSVGERVTLTCKASENVVTYVSWYQQKPEQSPKLLIYGASNRYTGVPDRFTGSGSATDFTLTISSVQAEDLADYHCGQGYSYPYTFGGGTKLEIKRADAAPTVSIFPPSSEQLTSGGASVVCFLNNFYPKDINVKWKIDGSERQNGVLNSWTDQDSKDSTYSMSSTLTLTKDEYERHNSYTCEATHKTSTSPIVKSFNRNEC

SEQ ID NO: 11510 - protein, 443 aa, Artificial Sequence; identical to SEQ ID NO: 6666
  source: /note="Description of Artificial Sequence: Synthetic polypeptide"

SEQ ID NO: 11511 - protein, 209 aa, Artificial Sequence; identical to SEQ ID NO: 9448
  source: /note="Description of Artificial Sequence: Synthetic polypeptide"

SEQ ID NO: 11512 - protein, 259 aa, Artificial Sequence
  source: /note="Description of Artificial Sequence: Synthetic polypeptide"
EVQLVESGGGLVQPGGSLRLSCAASGRTFSYNPMGWFRQAPGKGRELVAAISRTGGSTYYPDSVEGRFTISRDNAKRMVYLQMNSLRAEDTAVYYCAAAGVRAEDGRVRTLPSEYTFWGQGTQVTVSSAAAEVQLVESGGGLVQPGGSLRLSCAASGRTFSYNPMGWFRQAPGKGRELVAAISRTGGSTYYPDSVEGRFTISRDNAKRMVYLQMNSLRAEDTAVYYCAAAGVRAEDGRVRTLPSEYTFWGQGTQVTVSS

SEQ ID NO: 11513 - protein, 236 aa, Artificial Sequence
  source: /note="Description of Artificial Sequence: Synthetic polypeptide"
QIVLTQSPAIMSASPGEKVTLTCSASSSVSSSYLYWYQQKPGSSPKLWIYSTSNLASGVPARFSGSGSGTSYSLTISSMEAEDAASYFCHQWSSYPRTFGAGTKLELKGTTAASGSSGGSSSGAEVQLQQSGAELVKPGASVKLSCTASGFNIKDYYIHWVQQRTEQGLEWIGRIDPEDGETKYAPKFQDKATITADTSSNTAYLHLSSLTSEDTAVYYCARWGAYWGQGTLVTVS

SEQ ID NO: 11514 - protein, 242 aa, Artificial Sequence
  source: /note="Description of Artificial Sequence: Synthetic polypeptide"
EIVMTQSPATLSLSPGERATLSCRASQDISKYLNWYQQKPGQAPRLLIYHTSRLHSGIPARFSGSGSGTDYTLTISSLQPEDFAVYFCQQGNTLPYTFGQGTKLEIKGGGGSGGGGSGGGGSQVQLQESGPGLVKPSETLSLTCTVSGVSLPDYGVSWIRQPPGKGLEWIGVIWGSETTYYSSSLKSRVTISKDNSKNQVSLKLSSVTAADTAVYYCAKHYYYGGSYAMDYWGQGTLVTVSS

SEQ ID NO: 11515 - protein, 247 aa, Artificial Sequence
  source: /note="Description of Artificial Sequence: Synthetic polypeptide"
QVQLQESGPGLVKPSETLSLTCTVSGVSLPDYGVSWIRQPPGKGLEWIGVIWGSETTYYNSSLKSRVTISKDNSKNQVSLKLSSVTAADTAVYYCAKHYYYGGSYAMDYWGQGTLVTVSSGGGGSGGGGSGGGGSGGGGSEIVMTQSPATLSLSPGERATLSCRASQDISKYLNWYQQKPGQAPRLLIYHTSRLHSGIPARFSGSGSGTDYTLTISSLQPEDFAVYFCQQGNTLPYTFGQGTKLEIK

SEQ ID NO: 11516 - protein, 242 aa, Artificial Sequence
  source: /note="Description of Artificial Sequence: Synthetic polypeptide"
EIVMTQSPATLSLSPGERATLSCRASQDISKYLNWYQQKPGQAPRLLIYHTSRLHSGIPARFSGSGSGTDYTLTISSLQPEDFAVYFCQQGNTLPYTFGQGTKLEIKGGGGSGGGGSGGGGSQVQLQESGPGLVKPSETLSLTCTVSGVSLPDYGVSWIRQPPGKGLEWIGVIWGSETTYYNSSLKSRVTISKDNSKNQVSLKLSSVTAADTAVYYCAKHYYYGGSYAMDYWGQGTLVTVSS

SEQ ID NO: 11517 - protein, 242 aa, Artificial Sequence
  source: /note="Description of Artificial Sequence: Synthetic polypeptide"
QVQLQESGPGLVKPSETLSLTCTVSGVSLPDYGVSWIRQPPGKGLEWIGVIWGSETTYYNSSLKSRVTISKDNSKNQVSLKLSSVTAADTAVYYCAKHYYYGGSYAMDYWGQGTLVTVSSGGGGSGGGGSGGGGSEIVMTQSPATLSLSPGERATLSCRASQDISKYLNWYQQKPGQAPRLLIYHTSRLHSGIPARFSGSGSGTDYTLTISSLQPEDFAVYFCQQGNTLPYTFGQGTKLEIK

SEQ ID NO: 11518 - protein, 242 aa, Artificial Sequence
  source: /note="Description of Artificial Sequence: Synthetic polypeptide"
EIVMTQSPATLSLSPGERATLSCRASQDISKYLNWYQQKPGQAPRLLIYHTSRLHSGIPARFSGSGSGTDYTLTISSLQPEDFAVYFCQQGNTLPYTFGQGTKLEIKGGGGSGGGGSGGGGSQVQLQESGPGLVKPSETLSLTCTVSGVSLPDYGVSWIRQPPGKGLEWIGVIWGSETTYYQSSLKSRVTISKDNSKNQVSLKLSSVTAADTAVYYCAKHYYYGGSYAMDYWGQGTLVTVSS

SEQ ID NO: 11519 - protein, 242 aa, Artificial Sequence
  source: /note="Description of Artificial Sequence: Synthetic polypeptide"
QVQLQESGPGLVKPSETLSLTCTVSGVSLPDYGVSWIRQPPGKGLEWIGVIWGSETTYYSSSLKSRVTISKDNSKNQVSLKLSSVTAADTAVYYCAKHYYYGGSYAMDYWGQGTLVTVSSGGGGSGGGGSGGGGSEIVMTQSPATLSLSPGERATLSCRASQDISKYLNWYQQKPGQAPRLLIYHTSRLHSGIPARFSGSGSGTDYTLTISSLQPEDFAVYFCQQGNTLPYTFGQGTKLEIK

SEQ ID NO: 11520 - protein, 486 aa, Artificial Sequence; identical to SEQ ID NO: 6377
  source: /note="Description of Artificial Sequence: Synthetic polypeptide"

SEQ ID NO: 11521 - protein, 486 aa, Artificial Sequence; identical to SEQ ID NO: 6378
  source: /note="Description of Artificial Sequence: Synthetic polypeptide"

SEQ ID NO: 11522 - protein, 486 aa, Artificial Sequence; identical to SEQ ID NO: 6379
  source: /note="Description of Artificial Sequence: Synthetic polypeptide"

SEQ ID NO: 11523 - protein, 486 aa, Artificial Sequence; identical to SEQ ID NO: 6380
  source: /note="Description of Artificial Sequence: Synthetic polypeptide"

SEQ ID NO: 11524 - protein, 491 aa, Artificial Sequence; identical to SEQ ID NO: 6381
  source: /note="Description of Artificial Sequence: Synthetic polypeptide"

SEQ ID NO: 11525 - protein, 491 aa, Artificial Sequence; identical to SEQ ID NO: 6382
  source: /note="Description of Artificial Sequence: Synthetic polypeptide"

SEQ ID NO: 11526 - protein, 491 aa, Artificial Sequence; identical to SEQ ID NO: 6383
  source: /note="Description of Artificial Sequence: Synthetic polypeptide"

SEQ ID NO: 11527 - protein, 491 aa, Artificial Sequence; identical to SEQ ID NO: 6384
  source: /note="Description of Artificial Sequence: Synthetic polypeptide"

SEQ ID NO: 11528 - protein, 491 aa, Artificial Sequence; identical to SEQ ID NO: 6385
  source: /note="Description of Artificial Sequence: Synthetic polypeptide"

SEQ ID NO: 11529 - protein, 242 aa, Artificial Sequence
  source: /note="Description of Artificial Sequence: Synthetic polypeptide"
QVQLQESGPGLVKPSETLSLTCTVSGVSLPDYGVSWIRQPPGKGLEWIGVIWGSETTYYQSSLKSRVTISKDNSKNQVSLKLSSVTAADTAVYYCAKHYYYGGSYAMDYWGQGTLVTVSSGGGGSGGGGSGGGGSEIVMTQSPATLSLSPGERATLSCRASQDISKYLNWYQQKPGQAPRLLIYHTSRLHSGIPARFSGSGSGTDYTLTISSLQPEDFAVYFCQQGNTLPYTFGQGTKLEIK

SEQ ID NO: 11530 - protein, 491 aa, Artificial Sequence; identical to SEQ ID NO: 6385
  source: /note="Description of Artificial Sequence: Synthetic polypeptide"

SEQ ID NO: 11531 - protein, 491 aa, Artificial Sequence; identical to SEQ ID NO: 6387
  source: /note="Description of Artificial Sequence: Synthetic polypeptide"

SEQ ID NO: 11532 - protein, 486 aa, Artificial Sequence; identical to SEQ ID NO: 6388
  source: /note="Description of Artificial Sequence: Synthetic polypeptide"

SEQ ID NO: 11533 - protein, 247 aa, Artificial Sequence
  source: /note="Description of Artificial Sequence: Synthetic polypeptide"
EIVMTQSPATLSLSPGERATLSCRASQDISKYLNWYQQKPGQAPRLLIYHTSRLHSGIPARFSGSGSGTDYTLTISSLQPEDFAVYFCQQGNTLPYTFGQGTKLEIKGGGGSGGGGSGGGGSGGGGSQVQLQESGPGLVKPSETLSLTCTVSGVSLPDYGVSWIRQPPGKGLEWIGVIWGSETTYYSSSLKSRVTISKDNSKNQVSLKLSSVTAADTAVYYCAKHYYYGGSYAMDYWGQGTLVTVSS

SEQ ID NO: 11534 - protein, 247 aa, Artificial Sequence
  source: /note="Description of Artificial Sequence: Synthetic polypeptide"
EIVMTQSPATLSLSPGERATLSCRASQDISKYLNWYQQKPGQAPRLLIYHTSRLHSGIPARFSGSGSGTDYTLTISSLQPEDFAVYFCQQGNTLPYTFGQGTKLEIKGGGGSGGGGSGGGGSGGGGSQVQLQESGPGLVKPSETLSLTCTVSGVSLPDYGVSWIRQPPGKGLEWIGVIWGSETTYYQSSLKSRVTISKDNSKNQVSLKLSSVTAADTAVYYCAKHYYYGGSYAMDYWGQGTLVTVSS

SEQ ID NO: 11535 - protein, 247 aa, Artificial Sequence
  source: /note="Description of Artificial Sequence: Synthetic polypeptide"
QVQLQESGPGLVKPSETLSLTCTVSGVSLPDYGVSWIRQPPGKGLEWIGVIWGSETTYYSSSLKSRVTISKDNSKNQVSLKLSSVTAADTAVYYCAKHYYYGGSYAMDYWGQGTLVTVSSGGGGSGGGGSGGGGSGGGGSEIVMTQSPATLSLSPGERATLSCRASQDISKYLNWYQQKPGQAPRLLIYHTSRLHSGIPARFSGSGSGTDYTLTISSLQPEDFAVYFCQQGNTLPYTFGQGTKLEIK

SEQ ID NO: 11536 - protein, 271 aa, Artificial Sequence
  source: /note="Description of Artificial Sequence: Synthetic polypeptide"
MALPVTALLLPLALLLHAARPEIVMTQSPATLSLSPGERATLSCRASQDISKYLNWYQQKPGQAPRLLIYHTSRLHSGIPARFSGSGSGTDYTLTISSLQPEDFAVYFCQQGNTLPYTFGQGTKLEIKGGGGSGGGGSGGGGSQVQLQESGPGLVKPSETLSLTCTVSGVSLPDYGVSWIRQPPGKGLEWIGVIWGSETTYYSSSLKSRVTISKDNSKNQVSLKLSSVTAADTAVYYCAKHYYYGGSYAMDYWGQGTLVTVSSHHHHHHHH

SEQ ID NO: 11537 - protein, 271 aa, Artificial Sequence
  source: /note="Description of Artificial Sequence: Synthetic polypeptide"
MALPVTALLLPLALLLHAARPEIVMTQSPATLSLSPGERATLSCRASQDISKYLNWYQQKPGQAPRLLIYHTSRLHSGIPARFSGSGSGTDYTLTISSLQPEDFAVYFCQQGNTLPYTFGQGTKLEIKGGGGSGGGGSGGGGSQVQLQESGPGLVKPSETLSLTCTVSGVSLPDYGVSWIRQPPGKGLEWIGVIWGSETTYYQSSLKSRVTISKDNSKNQVSLKLSSVTAADTAVYYCAKHYYYGGSYAMDYWGQGTLVTVSSHHHHHHHH

SEQ ID NO: 11538 - protein, 271 aa, Artificial Sequence
  source: /note="Description of Artificial Sequence: Synthetic polypeptide"
MALPVTALLLPLALLLHAARPQVQLQESGPGLVKPSETLSLTCTVSGVSLPDYGVSWIRQPPGKGLEWIGVIWGSETTYYSSSLKSRVTISKDNSKNQVSLKLSSVTAADTAVYYCAKHYYYGGSYAMDYWGQGTLVTVSSGGGGSGGGGSGGGGSEIVMTQSPATLSLSPGERATLSCRASQDISKYLNWYQQKPGQAPRLLIYHTSRLHSGIPARFSGSGSGTDYTLTISSLQPEDFAVYFCQQGNTLPYTFGQGTKLEIKHHHHHHHH

SEQ ID NO: 11539 - protein, 271 aa, Artificial Sequence
  source: /note="Description of Artificial Sequence: Synthetic polypeptide"
MALPVTALLLPLALLLHAARPQVQLQESGPGLVKPSETLSLTCTVSGVSLPDYGVSWIRQPPGKGLEWIGVIWGSETTYYQSSLKSRVTISKDNSKNQVSLKLSSVTAADTAVYYCAKHYYYGGSYAMDYWGQGTLVTVSSGGGGSGGGGSGGGGSEIVMTQSPATLSLSPGERATLSCRASQDISKYLNWYQQKPGQAPRLLIYHTSRLHSGIPARFSGSGSGTDYTLTISSLQPEDFAVYFCQQGNTLPYTFGQGTKLEIKHHHHHHHH

SEQ ID NO: 11540 - protein, 276 aa, Artificial Sequence
  source: /note="Description of Artificial Sequence: Synthetic polypeptide"
MALPVTALLLPLALLLHAARPEIVMTQSPATLSLSPGERATLSCRASQDISKYLNWYQQKPGQAPRLLIYHTSRLHSGIPARFSGSGSGTDYTLTISSLQPEDFAVYFCQQGNTLPYTFGQGTKLEIKGGGGSGGGGSGGGGSGGGGSQVQLQESGPGLVKPSETLSLTCTVSGVSLPDYGVSWIRQPPGKGLEWIGVIWGSETTYYSSSLKSRVTISKDNSKNQVSLKLSSVTAADTAVYYCAKHYYYGGSYAMDYWGQGTLVTVSSHHHHHHHH

SEQ ID NO: 11541 - protein, 276 aa, Artificial Sequence
  source: /note="Description of Artificial Sequence: Synthetic polypeptide"
MALPVTALLLPLALLLHAARPEIVMTQSPATLSLSPGERATLSCRASQDISKYLNWYQQKPGQAPRLLIYHTSRLHSGIPARFSGSGSGTDYTLTISSLQPEDFAVYFCQQGNTLPYTFGQGTKLEIKGGGGSGGGGSGGGGSGGGGSQVQLQESGPGLVKPSETLSLTCTVSGVSLPDYGVSWIRQPPGKGLEWIGVIWGSETTYYQSSLKSRVTISKDNSKNQVSLKLSSVTAADTAVYYCAKHYYYGGSYAMDYWGQGTLVTVSSHHHHHHHH

SEQ ID NO: 11542 - protein, 276 aa, Artificial Sequence
  source: /note="Description of Artificial Sequence: Synthetic polypeptide"
MALPVTALLLPLALLLHAARPQVQLQESGPGLVKPSETLSLTCTVSGVSLPDYGVSWIRQPPGKGLEWIGVIWGSETTYYSSSLKSRVTISKDNSKNQVSLKLSSVTAADTAVYYCAKHYYYGGSYAMDYWGQGTLVTVSSGGGGSGGGGSGGGGSGGGGSEIVMTQSPATLSLSPGERATLSCRASQDISKYLNWYQQKPGQAPRLLIYHTSRLHSGIPARFSGSGSGTDYTLTISSLQPEDFAVYFCQQGNTLPYTFGQGTKLEIKHHHHHHHH

SEQ ID NO: 11543 - protein, 247 aa, Artificial Sequence
  source: /note="Description of Artificial Sequence: Synthetic polypeptide"
QVQLQESGPGLVKPSETLSLTCTVSGVSLPDYGVSWIRQPPGKGLEWIGVIWGSETTYYQSSLKSRVTISKDNSKNQVSLKLSSVTAADTAVYYCAKHYYYGGSYAMDYWGQGTLVTVSSGGGGSGGGGSGGGGSGGGGSEIVMTQSPATLSLSPGERATLSCRASQDISKYLNWYQQKPGQAPRLLIYHTSRLHSGIPARFSGSGSGTDYTLTISSLQPEDFAVYFCQQGNTLPYTFGQGTKLEIK

SEQ ID NO: 11544 - protein, 276 aa, Artificial Sequence
  source: /note="Description of Artificial Sequence: Synthetic polypeptide"
MALPVTALLLPLALLLHAARPQVQLQESGPGLVKPSETLSLTCTVSGVSLPDYGVSWIRQPPGKGLEWIGVIWGSETTYYQSSLKSRVTISKDNSKNQVSLKLSSVTAADTAVYYCAKHYYYGGSYAMDYWGQGTLVTVSSGGGGSGGGGSGGGGSGGGGSEIVMTQSPATLSLSPGERATLSCRASQDISKYLNWYQQKPGQAPRLLIYHTSRLHSGIPARFSGSGSGTDYTLTISSLQPEDFAVYFCQQGNTLPYTFGQGTKLEIKHHHHHHHH

SEQ ID NO: 11545 - protein, 276 aa, Artificial Sequence
  source: /note="Description of Artificial Sequence: Synthetic polypeptide"
MALPVTALLLPLALLLHAARPEIVMTQSPATLSLSPGERATLSCRASQDISKYLNWYQQKPGQAPRLLIYHTSRLHSGIPARFSGSGSGTDYTLTISSLQPEDFAVYFCQQGNTLPYTFGQGTKLEIKGGGGSGGGGSGGGGSGGGGSQVQLQESGPGLVKPSETLSLTCTVSGVSLPDYGVSWIRQPPGKGLEWIGVIWGSETTYYNSSLKSRVTISKDNSKNQVSLKLSSVTAADTAVYYCAKHYYYGGSYAMDYWGQGTLVTVSSHHHHHHHH

SEQ ID NO: 11546 - protein, 276 aa, Artificial Sequence
  source: /note="Description of Artificial Sequence: Synthetic polypeptide"
MALPVTALLLPLALLLHAARPQVQLQESGPGLVKPSETLSLTCTVSGVSLPDYGVSWIRQPPGKGLEWIGVIWGSETTYYNSSLKSRVTISKDNSKNQVSLKLSSVTAADTAVYYCAKHYYYGGSYAMDYWGQGTLVTVSSGGGGSGGGGSGGGGSGGGGSEIVMTQSPATLSLSPGERATLSCRASQDISKYLNWYQQKPGQAPRLLIYHTSRLHSGIPARFSGSGSGTDYTLTISSLQPEDFAVYFCQQGNTLPYTFGQGTKLEIKHHHHHHHH

SEQ ID NO: 11547 - protein, 271 aa, Artificial Sequence
  source: /note="Description of Artificial Sequence: Synthetic polypeptide"
MALPVTALLLPLALLLHAARPEIVMTQSPATLSLSPGERATLSCRASQDISKYLNWYQQKPGQAPRLLIYHTSRLHSGIPARFSGSGSGTDYTLTISSLQPEDFAVYFCQQGNTLPYTFGQGTKLEIKGGGGSGGGGSGGGGSQVQLQESGPGLVKPSETLSLTCTVSGVSLPDYGVSWIRQPPGKGLEWIGVIWGSETTYYNSSLKSRVTISKDNSKNQVSLKLSSVTAADTAVYYCAKHYYYGGSYAMDYWGQGTLVTVSSHHHHHHHH

SEQ ID NO: 11548 - protein, 271 aa, Artificial Sequence
  source: /note="Description of Artificial Sequence: Synthetic polypeptide"
MALPVTALLLPLALLLHAARPQVQLQESGPGLVKPSETLSLTCTVSGVSLPDYGVSWIRQPPGKGLEWIGVIWGSETTYYNSSLKSRVTISKDNSKNQVSLKLSSVTAADTAVYYCAKHYYYGGSYAMDYWGQGTLVTVSSGGGGSGGGGSGGGGSEIVMTQSPATLSLSPGERATLSCRASQDISKYLNWYQQKPGQAPRLLIYHTSRLHSGIPARFSGSGSGTDYTLTISSLQPEDFAVYFCQQGNTLPYTFGQGTKLEIKHHHHHHHH

SEQ ID NO: 11549 - protein, 247 aa, Artificial Sequence
  source: /note="Description of Artificial Sequence: Synthetic polypeptide"
EIVMTQSPATLSLSPGERATLSCRASQDISKYLNWYQQKPGQAPRLLIYHTSRLHSGIPARFSGSGSGTDYTLTISSLQPEDFAVYFCQQGNTLPYTFGQGTKLEIKGGGGSGGGGSGGGGSGGGGSQVQLQESGPGLVKPSETLSLTCTVSGVSLPDYGVSWIRQPPGKGLEWIGVIWGSETTYYNSSLKSRVTISKDNSKNQVSLKLSSVTAADTAVYYCAKHYYYGGSYAMDYWGQGTLVTVSS

SEQ ID NO: 11550 - protein, 242 aa, Artificial Sequence; identical to SEQ ID NO: 11514
  source: /note="Description of Artificial Sequence: Synthetic polypeptide"

SEQ ID NO: 11551 - protein, 247 aa, Artificial Sequence; identical to SEQ ID NO: 11515
  source: /note="Description of Artificial Sequence: Synthetic polypeptide"

SEQ ID NO: 11552 - protein, 242 aa, Artificial Sequence; identical to SEQ ID NO: 11516
  source: /note="Description of Artificial Sequence: Synthetic polypeptide"

SEQ ID NO: 11553 - protein, 242 aa, Artificial Sequence; identical to SEQ ID NO: 11517
  source: /note="Description of Artificial Sequence: Synthetic polypeptide"

SEQ ID NO: 11554 - protein, 242 aa, Artificial Sequence; identical to SEQ ID NO: 11518
  source: /note="Description of Artificial Sequence: Synthetic polypeptide"

SEQ ID NO: 11555 - protein, 242 aa, Artificial Sequence; identical to SEQ ID NO: 11519
  source: /note="Description of Artificial Sequence: Synthetic polypeptide"

SEQ ID NO: 11556 - protein, 242 aa, Artificial Sequence; identical to SEQ ID NO: 11529
  source: /note="Description of Artificial Sequence: Synthetic polypeptide"

SEQ ID NO: 11557 - protein, 247 aa, Artificial Sequence; identical to SEQ ID NO: 11533
  source: /note="Description of Artificial Sequence: Synthetic polypeptide"

SEQ ID NO: 11558 - protein, 247 aa, Artificial Sequence; identical to SEQ ID NO: 11534
  source: /note="Description of Artificial Sequence: Synthetic polypeptide"

SEQ ID NO: 11559 - protein, 247 aa, Artificial Sequence; identical to SEQ ID NO: 11535
  source: /note="Description of Artificial Sequence: Synthetic polypeptide"

SEQ ID NO: 11560 - protein, 247 aa, Artificial Sequence; identical to SEQ ID NO: 11543
  source: /note="Description of Artificial Sequence: Synthetic polypeptide"

SEQ ID NO: 11561 - protein, 247 aa, Artificial Sequence; identical to SEQ ID NO: 11549
  source: /note="Description of Artificial Sequence: Synthetic polypeptide"

SEQ ID NO: 11562 - protein, 271 aa, Artificial Sequence
  source: /note="Description of Artificial Sequence: Synthetic polypeptide"
METDTLLLWVLLLWVPGSTGDIVLTQSPASLAVSLGQRATISCKASQSVDYDGDSYLNWYQQIPGQPPKLLIYDASNLVSGIPPRFSGSGSGTDFTLNIHPVEKVDAATYHCQQSTEDPWTFGGGTKLEIKGGGGSGGGGSGGGGSSQVQLQQSGAELVRPGSSVKISCKASGYAFSSYWMNWVKQRPGQGLEWIGQIWPGDGDTNYNGKFKGKATLTADESSSTAYMQLSSLASEDSAVYFCARRETTTVGRYYYAMDYWGQGTSVTVSS

SEQ ID NO: 11563 - protein, 259 aa, Artificial Sequence
  source: /note="Description of Artificial Sequence: Synthetic polypeptide"
MVSTAQFLGLLLLWLTGGRCDIQMTQSPASLSASVGETVTITCRTSENVYSYLAWYQQKQGKSPQLLVSFAKTLAEGVPSRFSGSGSGTQFSLKISSLQPEDSGSYFCQHHSDNPWTFGGGTELEIKGGGGSGGGGSGGGGSSAVQLQQSGPELEKPGASVKISCKASGYSFTGYNMNWVKQNNGKSLEWIGNIDPYYGGTTYNRKFKGKATLTVDKSSSTAYMQLKSLTSEDSAVYYCARSVGPMDYWGQGTSVTVSS

SEQ ID NO: 11564 - protein, 272 aa, Artificial Sequence
  source: /note="Description of Artificial Sequence: Synthetic polypeptide"
MESHSQVFLSLLLWVSGTCGNIMMTQSPSSLAVSAGEKVTMNCKSSQSVFYSSNQRNYLAWYQQKPGQSPKLLIYWASTRESGVPDRFTGSGSGTDFTLTISSVHTEDLAVYYCHQFLSSWTFGGGTKLEIKGGGGSGGGGSGGGGSSQVQLQQPGAELVKPGTSVKLSCKASGYTFTNYWMVWVKQTPGEGLEWIGEIIPSNGRTKYNEKFKSKATLTADKSSRTAYMQLSSLASEDSAVYYCAREMSIITTVLTPGLLTGAKGLWSLSLQ

SEQ ID NO: 11565 - protein, 499 aa, Artificial Sequence; identical to SEQ ID NO: 6441
  source: /note="Description of Artificial Sequence: Synthetic polypeptide"

SEQ ID NO: 11566 - protein, 499 aa, Artificial Sequence; identical to SEQ ID NO: 6442
  source: /note="Description of Artificial Sequence: Synthetic polypeptide"

SEQ ID NO: 11567 - protein, 499 aa, Artificial Sequence; identical to SEQ ID NO: 6443
  source: /note="Description of Artificial Sequence: Synthetic polypeptide"

SEQ ID NO: 11568 - protein, 266 aa, Artificial Sequence; identical to SEQ ID NO: 7306
  source: /note="Description of Artificial Sequence: Synthetic polypeptide"

SEQ ID NO: 11569 - protein, 271 aa, Artificial Sequence; identical to SEQ ID NO: 11562
  source: /note="Description of Artificial Sequence: Synthetic polypeptide"

SEQ ID NO: 11570 - protein, 259 aa, Artificial Sequence; identical to SEQ ID NO: 11563
  source: /note="Description of Artificial Sequence: Synthetic polypeptide"

SEQ ID NO: 11571 - protein, 272 aa, Artificial Sequence; identical to SEQ ID NO: 11564
  source: /note="Description of Artificial Sequence: Synthetic polypeptide"

SEQ ID NO: 11572 - protein, 867 aa, Artificial Sequence [sequence omitted]

SEQ ID NO: 11573 - protein, 288 aa, Artificial Sequence
  source: /note="Description of Artificial Sequence: Synthetic polypeptide"
MKYLLPTAAAGLLLLAAQPAMAQVQLVQSGAEVKKPGSSVKVSCKASGYTFTDFYINWVRQAPGQGLEWIGEIYPYSGHAYYNEKFKARVTITADKSTSTAYMELSSLRSEDTAVYYCARWDFLDYWGQGTTVTVSSGGGGSGGGGSGGSAQDIVMTQSPLSLPVTPGEPASISCRSSQSLLHSNGNTYLHWYLQKPGQSPQLLIYTVSNRFSGVPDRFSGSGSGTDFTLKISRVEAEDVGVYYCSQSTHVPYTFGGGTKVEIKRAAAEQKLISEEDLNGAAHHHHHH

SEQ ID NO: 11574 - protein, 253 aa, Artificial Sequence
  source: /note="Description of Artificial Sequence: Synthetic polypeptide"
EIVMTQSPSTLSASVGDRVIITCQASQSISDWLAWYQQKPGKAPKLLIYGASRLASGFPSRFSGSGSGAEFTLTISSLQPDDFATYYCQQGWSDSYVDNLFGQGTKLTVLGGGGGSGGGGSGGGGSGGGGSEVQLVESGGGLVQPGGSLRLSCTVSGFSLSSGAMSWVRQAPGKGLEWVGVIISSGATYYASWAKGRFTISKDTSKNTVYLQMNSLRAEDTAVYYCARGGPDDSNSMGTFDPWGQGTLVTVSS

SEQ ID NO: 11575 - protein, 253 aa, Artificial Sequence
  source: /note="Description of Artificial Sequence: Synthetic polypeptide"
EIVMTQSPSTLSASVGDRVIITCQASQSISDWLAWYQQKPGKAPKLLIYGASRLASGVPSRFSGSGSGAEFTLTISSLQPADFATYYCQQGWSDSYVDNLFGQGTKLTVLGGGGGSGGGGSGGGGSGGGGSEVQLVESGGGLVQPGGSLRLSCTVSGFSLSSGAMSWVRQAPGKGLEWVGVIISSGATYYASWAKGRFTISKDTSKNTVYLQMNSLRAEDTAVYYCARGGPDDSNSMGTFDPWGQGTLVTVSS

SEQ ID NO: 11576 - protein, 253 aa, Artificial Sequence
  source: /note="Description of Artificial Sequence: Synthetic polypeptide"
EIVMTQSPSTLSASVGDRVIITCQASQSISDWLAWYQQKPGKAPKLLIYGASRLASGVPSRFSGSGSGAEFTLTISSLEPDDFATYYCQQGWSDSYVDNLFGQGTKLTVLGGGGGSGGGGSGGGGSGGGGSEVQLVESGGGLVQPGGSLRLSCTVSGFSLSSGAMSWVRQAPGKGLEWVGVIISSGATYYASWAKGRFTISKDTSKNTVYLQMNSLRAEDTAVYYCARGGPDDSNSMGTFDPWGQGTLVTVSS

SEQ ID NO: 11577 - protein, 253 aa, Artificial Sequence
  source: /note="Description of Artificial Sequence: Synthetic polypeptide"
EIVMTQSPSTLSASVGDRVIITCQSTESVYKNNYLAWYQQKPGKAPKLLIYDASTLASGVPSRFSGSGSGAEFTLTISSLQPDDFATYYCAGYYRSGSGTANGSFGQGTKLTVLGGGGGSGGGGSGGGGSGGGGSEVQLVESGGGLVQPGGSLRLSCAASGFTFSNDAISWVRQAPGKGLEWVSYISDWSIRYYANWAQGRFTISRDNSKNTLYLQMNSLRAEDTAVYYCAKGAPGAGDNGIWGQGTLVTVSS

SEQ ID NO: 11578 - protein, 253 aa, Artificial Sequence
  source: /note="Description of Artificial Sequence: Synthetic polypeptide"
EIVMTQSPSTLSASVGDRVIITCQSTESVYKNNYLAWYQQKPGKAPKLLIYDASTLASGVPSRFSGSGSGTEFTLTISSLQPDDFATYYCAGYYRSGSGTANGSFGQGTKLTVLGGGGGSGGGGSGGGGSGGGGSEVQLVESGGGSVQPGGSLRLSCTVSGIDLSNDAISWVRQAPGKGLEWVAYISDWSIRYYANWAQGRFTISKDTSKNTVYLQMNSLRAEDTATYYCARGAPGAGDNGIWGQGTTVTVSS

SEQ ID NO: 11579 - protein, 253 aa, Artificial Sequence
  source: /note="Description of Artificial Sequence: Synthetic polypeptide"
EIVMTQSPSTLSASVGDRVIITCQSTESVYKNNYLAWYQQKPGKAPKLLIYDASTLASGVPSRFSGSGSGAEFTLTISSLQPDDFATYYCAGYYRSGSGTANGSFGQGTKLTVLGGGGGSGGGGSGGGGSGGGGSEVQLVESGGGSVQPGGSLRLSCTVSGIDLSNDAISWVRQAPGKGLEWVAYISDWSIRYYANWAQGRFTISKDTSKNTVYLQMNSLRAEDTATYYCARGAPGAGDNGIWGQGTTVTVSS

SEQ ID NO: 11580 - protein, 252 aa, Artificial Sequence
  source: /note="Description of Artificial Sequence: Synthetic polypeptide"
EIVMTQSPSTLSASVGDRVIITCQASESIYSGLAWYQQKPGKAPKLLIYQASTLASGVPSRFSGSGSGAEFTLTISSLQPDDFATYYCQQGFGTSNVENPFGQGTKLTVLGGGGGSGGGGSGGGGSGGGGSEVQLVESGGGLVQPGGSLRLSCAASGFSLSRYGVSWVRQAPGKGLEWVSTIGEAGRAYYANWARSRFTISRDNSKNTLYLQMNSLRAEDTAVYYCAKGEVFNNGWGAFNIWGQGTLVTVSS

SEQ ID NO: 11581 - protein, 252 aa, Artificial Sequence
  source: /note="Description of Artificial Sequence: Synthetic polypeptide"
EIVMTQSPSTLSASVGDRVIITCQASESIYSGLAWYQQKPGKAPKLLIYQASTLASGVPSRFSGSGSGTDFTLAISSLQPDDFATYYCQQGFGTSNVENPFGQGTKLTVLGGGGGSGGGGSGGGGSGGGGSEVQLVESGGGLVQPGGSLRLSCTVSGFSLSRYGVSWVRQAPGKGLEWVGTIGEAGRAYYANWARSRSTISRDTSKNTVYLQMNSLRAEDTAVYYCARGEVFNNGWGAFNIWGQGTLVTVSS

SEQ ID NO: 11582 - protein, 252 aa, Artificial Sequence
  source: /note="Description of Artificial Sequence: Synthetic polypeptide"
EIVMTQSPSTLSASVGDRVIITCQASESIYSGLAWYQQKPGKAPKLLIYQASTLASGVPSRFSGSGSGAEFTLTISSLQPDDFATYYCQQGFGTSNVENPFGQGTKLTVLGGGGGSGGGGSGGGGSGGGGSEVQLVESGGGLVQPGGSLRLSCTVSGFSLSRYGVSWVRQAPGKGLEWVGTIGEAGRAYYANWARSRSTISRDTSKNTVYLQMNSLRAEDTAVYYCARGEVFNNGWGAFNIWGQGTLVTVSS

SEQ ID NO: 11583 - protein, 252 aa, Artificial Sequence
  source: /note="Description of Artificial Sequence: Synthetic polypeptide"
EIVMTQSPSTLSASVGDRVIITCQASENIYTSLAWYQQKPGKAPKLLIYSASTLASGVPSRFSGSGSGAEFTLTISSLQPDDFATYYCQQGFATSNVENPFGQGTKLTVLGGGGGSGGGGSGGGGSGGGGSEVQLVESGGGLVQPGGSLRLSCAASGFTFSRYGVSWVRQAPGKGLEWVSAIGETGRAYYANWAKSRFTISRDNSKNTLYLQMNSLRAEDTAVYYCAKGEEFNNGWGAFNIWGQGTLVTVSS

SEQ ID NO: 11584 - protein, 252 aa, Artificial Sequence
  source: /note="Description of Artificial Sequence: Synthetic polypeptide"
EIVMTQSPSTLSASVGDRVIITCQASENIYTSLAWYQQKPGKAPKLLIYSASTLASGVPSRFSGSGSGTEFTLTISSLQPDDFATYYCQQGFATSNVENPFGQGTKLTVLGGGGGSGGGGSGGGGSGGGGSEVQLVESGGGSVQPGGSLRLSCTVSGFSLSRYGVSWVRQAPGKGLEWVGAIGETGRAYYANWAKSRSTISRDTSKNTVYLQMNSLRAEDTATYYCARGEEFNNGWGAFNIWGQGTTVTVSS

SEQ ID NO: 11585 - protein, 252 aa, Artificial Sequence
  source: /note="Description of Artificial Sequence: Synthetic polypeptide"
EIVMTQSPSTLSASVGDRVIITCQASENIYTSLAWYQQKPGKAPKLLIYSASTLASGVPSRFSGSGSGAEFTLTISSLQPDDFATYYCQQGFATSNVENPFGQGTKLTVLGGGGGSGGGGSGGGGSGGGGSEVQLVESGGGSVQPGGSLRLSCTVSGFSLSRYGVSWVRQAPGKGLEWVGAIGETGRAYYANWAKSRSTISRDTSKNTVYLQMNSLRAEDTATYYCARGEEFNNGWGAFNIWGQGTTVTVSS

SEQ ID NO: 11586 - protein, 252 aa, Artificial Sequence
  source: /note="Description of Artificial Sequence: Synthetic polypeptide"
EIVMTQSPSTLSASVGDRVIITCQASDNIYRGLAWYQQKPGKAPKLLIYDASTLQSGVPSRFSGSGSGAEFTLTISSLQPDDFATYYCLGVYGYSSDDGAAFGQGTKLTVLGGGGGSGGGGSGGGGSGGGGSEVQLVESGGGLVQPGGSLRLSCAASGFSLNSNEISWVRQAPGKGLEWVSYIGNGGMTHYASWAKGRFTISRDNSKNTLYLQMNSLRAEDTAVYYCAKSVEYTDLYYLNIWGQGTLVTVSS

SEQ ID NO: 11587 - protein, 252 aa, Artificial Sequence
  source: /note="Description of Artificial Sequence: Synthetic polypeptide"
EIVMTQSPSTLSASVGDRVIITCQASDNIYRGLAWYQQKPGKAPKLLIYDASTLQSGVPSRFSGSGSGTQFTLTISSLQPDDFATYYCLGVYGYSSDDGAAFGQGTKLTVLGGGGGSGGGGSGGGGSGGGGSEVQLVESGGGLVQPGGSLRLSCTVSGFSLNSNEISWVRQAPGKGLEWVGYIGNGGMTHYASWAKGRFTISRDTSKNTVYLQMNSLRAEDTAVYYCASSVEYTDLYYLNIWGQGTLVTVSS

SEQ ID NO: 11588 - protein, 253 aa, Artificial Sequence
  source: /note="Description of Artificial Sequence: Synthetic polypeptide"
EIVMTQSPSTLSASVGDRVIITCQSSQSVYGNIWMAWYQQKPGKAPKLLIYQASKLASGVPSRFSGSGSGAEFTLTISSLQPDDFATYYCQGNFNTGDRYAFGQGTKLTVLGGGGGSGGGGSGGGGSGGGGSEVQLVESGGGLVQPGGSLRLSCAASGFTISRSYWICWVRQAPGKGLEWVSCIYGDNDITPLYANWAKGRFTISRDNSKNTLYLQMNSLRAEDTAVYYCAKLGYADYAYDLWGQGTLVTVSS

SEQ ID NO: 11589 - protein, 253 aa, Artificial Sequence
  source: /note="Description of Artificial Sequence: Synthetic polypeptide"
EIVMTQSPSTLSASLGDRVIITCQSSQSVYGNIWMAWYQQKSGKAPKLLIYQASKLASGVPSRFSGSGSGAEFSLTISSLQPDDFATYYCQGNFNTGDRYAFGQGTKLTVLGGGGGSGGGGSGGGGSGGGGSEVQLVESGGGLVQPGGSLRLSCTASGFTISRSYWICWVRQAPGKGLEWVACIYGDNDITPLYANWAKGRFPVSTDTSKNTVYLQMNSLRAEDTAVYYCARLGYADYAYDLWGQGTLVTVSS

SEQ ID NO: 11590 - protein, 253 aa, Artificial Sequence
  source: /note="Description of Artificial Sequence: Synthetic polypeptide"
EIVMTQSPSTLSASVGDRVIITCQASQSISNLLAWYQQKPGKAPKLLIYAASKLASGVPSRFSGSGSGAEFTLTISSLQPDDFATYYCQQGWSHTNVDNTFGQGTKLTVLGGGGGSGGGGSGGGGSGGGGSEVQLVESGGGLVQPGGSLRLSCAASGFTFSVGYWICWVRQAPGKGLEWVSCIDAGTSGGTYYATWAKGRFTISRDNSKNTLYLQMNSLRAEDTAVYYCAKGVSSNGYYFKLWGQGTLVTVSS

SEQ ID NO: 11591 - protein, 253 aa, Artificial Sequence
  source: /note="Description of Artificial Sequence: Synthetic polypeptide"
EIVMTQSPSTLSASVGDRVIITCQASQSISNLLAWYQQKPGKAPKLLIVAASKLASGVPSRFSGSGSGTEFTLTISSLQPDDFATYYCQQGWSHTNVDNTFGQGTKLTVLGGGGGSGGGGSGGGGSGGGGSEVQLVESGGGSVQPGGSLRLSCTASGFSFSVGYWICWVRQAPGKGLEWVACIDAGTSGGTYYATWAKGRFTISKDTSKNTVYLQMNSLRAEDTATYYCARGVSSNGYYFKLWGQGTTVTVSS

SEQ ID NO: 11592 - protein, 253 aa, Artificial Sequence
  source: /note="Description of Artificial Sequence: Synthetic polypeptide"
EIVMTQSPSTLSASVGDRVIITCQASQSISNLLAWYQQKPGKAPKLLIYAASKLASGVPSRFSGSGSGAEFTLTISSLQPDDFATYYCQQGWSHTNVDNTFGQGTKLTVLGGGGGSGGGGSGGGGSGGGGSEVQLVESGGGSVQPGGSLRLSCTASGFSFSVGYWICWVRQAPGKGLEWVACIDAGTSGGTYYATWAKGRFTISKDTSKNTVYLQMNSLRAEDTATYYCARGVSSNGYYFKLWGQGTTVTVSS

SEQ ID NO: 11593 - protein, 253 aa, Artificial Sequence
  source: /note="Description of Artificial Sequence: Synthetic polypeptide"
EIVMTQSPSTLSASVGDRVIITCQSTESVYKNNYLAWYQQKPGKAPKLLIYDASTLASGVPSRFSGSGSGAEFTLTISSLQPDDFATYYCAGYYRSGFGTANGSFGQGTKLTVLGGGGGSGGGGSGGGGSGGGGSEVQLVESGGGLVQPGGSLRLSCAASGFTFRNDAISWVRQAPGKGLEWVSYISDWGIKYYASWVKGRFTISRDNSKNTLYLQMNSLRAEDTAVYYCAKGAPGAGDNGIWGQGTLVTVSS

SEQ ID NO: 11594 - protein, 253 aa, Artificial Sequence
  source: /note="Description of Artificial Sequence: Synthetic polypeptide"
EIVMTQSPSTLSASVGDRVIITCQSTESVYKNNYLAWYQQKPGKAPKLLIYDASTLASGVPSRFSGSGSGTEFTLTISSLQPDDFATYYCAGYYRSGFGTANGSFGQGTKLTVLGGGGGSGGGGSGGGGSGGGGSEVQLVESGGGSVQPGGSLRLSCTVSGIDLRNDAISWVRQAPGKGLEWVSYISDWGIKYYASWVKGRFTISKDTSKNTVYLQMNSLRAEDTATYYCARGAPGAGDNGIWGQGTTVTVSS

SEQ ID NO: 11595 - protein, 253 aa, Artificial Sequence
  source: /note="Description of Artificial Sequence: Synthetic polypeptide"
EIVMTQSPSTLSASVGDRVIITCQSTESVYKNNYLAWYQQKPGKAPKLLIYDASTLASGVPSRFSGSGSGAEFTLTISSLQPDDFATYYCAGYYRSGFGTANGSFGQGTKLTVLGGGGGSGGGGSGGGGSGGGGSEVQLVESGGGSVQPGGSLRLSCTVSGIDLRNDAISWVRQAPGKGLEWVSYISDWGIKYYASWVKGRFTISKDTSKNTVYLQMNSLRAEDTATYYCARGAPGAGDNGIWGQGTTVTVSS

SEQ ID NO: 11596 - protein, 253 aa, Artificial Sequence
  source: /note="Description of Artificial Sequence: Synthetic polypeptide"
EIVMTQSPSTLSASVGDRVIITCQASQSISDWLAWYQQKPGKAPKLLIYGASRLASGVPSRFSGSGSGAEFTLTISSLQPDDFATYYCQQGWSDSYVDNLFGQGTKLTVLGGGGGSGGGGSGGGGSGGGGSEVQLVESGGGLVQPGGSLRLSCAASGFSLSSGAMSWVRQAPGKGLEWVSVIISSGATYYASWAKGRFTISRDNSKNTLYLQMNSLRAEDTAVYYCAKGGPDDSNSMGTFDPWGQGTLVTVSS

SEQ ID NO: 11597 - protein, 253 aa, Artificial Sequence
  source: /note="Description of Artificial Sequence: Synthetic polypeptide"
EIVMTQSPSTLSASVGDRVIIKCQASQSISDWLAWYQQKPGKAPKLLIYGASRLASGFPSRFSGSGSGAEFTLTISGLEPADFATYYCQQGWSDSYVDNLFGQGTKLTVLGGGGGSGGGGSGGGGSGGGGSEVQLVESGGGLVQPGGSLRLSCTVSGFSLSSGAMSWVRQAPGKGLEWVGVIISSGATYYASWAKGRFTISKDTSKNTVYLQMNSLRAEDTAVYYCARGGPDDSNSMGTFDPWGQGTLVTVSS

SEQ ID NO: 11598 - protein, 253 aa, Artificial Sequence
  source: /note="Description of Artificial Sequence: Synthetic polypeptide"
EIVMTQSPSTLSASVGDRVIITCQASQSISDWLAWYQQKPGKAPKLLIYGASRLASGVPSRFSGSGSGAEFTLTISSLQPDDFATYYCQQGWSDSYVDNLFGQGTKLTVLGGGGGSGGGGSGGGGSGGGGSEVQLVESGGGLVQPGGSLRLSCTVSGFSLSSGAMSWVRQAPGKGLEWVGVIISSGATYYASWAKGRFTISKDTSKNTVYLQMNSLRAEDTAVYYCARGGPDDSNSMGTFDPWGQGTLVTVSS

SEQ ID NO: 11599 - protein, 253 aa, Artificial Sequence
  source: /note="Description of Artificial Sequence: Synthetic polypeptide"
EIVMTQSPSTLSASVGDRVIIKCQASQSISDWLAWYQQKPGKAPKLLIYGASRLASGFPSRFSGSGSGAEFTLTISGLEPADFATYYCQQGWSDSYVDNLFGQGTKLTVLGGGGGSGGGGSGGGGSGGGGSEVQLVESGGGSVQPGGSLRLSCTVSGFSLSSGAMSWVRQAPGKGLEWVGVIISSGATYYASWAKGRFTISKDTSKNTVYLQMNSLRAEDTATYYCARGGPDDSNSMGTFDPWGQGTSVTVSS

SEQ ID NO: 11600 - protein, 253 aa, Artificial Sequence
  source: /note="Description of Artificial Sequence: Synthetic polypeptide"
EIVMTQSPSTLSASVGDRVIITCQASQSISDWLAWYQQKPGKAPKLLIYGASRLASGVPSRFSGSGSGAEFTLTISSLQPDDFATYYCQQGWSDSYVDNLFGQGTKLTVLGGGGGSGGGGSGGGGSGGGGSEVQLVESGGGSVQPGGSLRLSCTVSGFSLSSGAMSWVRQAPGKGLEWVGVIISSGATYYASWAKGRFTISKDTSKNTVYLQMNSLRAEDTATYYCARGGPDDSNSMGTFDPWGQGTSVTVSS

SEQ ID NO: 11601 - protein, 253 aa, Artificial Sequence
  source: /note="Description of Artificial Sequence: Synthetic polypeptide"
EIVMTQSPSTLSASVGDRVIIKCQASQSISDWLAWYQQKPGKAPKLLIYGASRLASGVPSRFSGSGSGAEFTLTISSLQPDDFATYYCQQGWSDSYVDNLFGQGTKLTVLGGGGGSGGGGSGGGGSGGGGSEVQLVESGGGLVQPGGSLRLSCTVSGFSLSSGAMSWVRQAPGKGLEWVGVIISSGATYYASWAKGRFTISKDTSKNTVYLQMNSLRAEDTAVYYCARGGPDDSNSMGTFDPWGQGTLVTVSS

SEQ ID NO: 11602 - protein, 232 aa, Artificial Sequence
  source: /note="Description of Artificial Sequence: Synthetic polypeptide"
QVQLVESGGGWQPGRSLRLDCKASGITFSNSGMHWVRQAPGKGLEWVAVIYDGSKRYYADSVKGRFISRDNSKNTLFLQMNSLRAEDTAVYYCATNDDYWGQGTLVTVSSGGGGSGGGGSGGGGSEIVLTQSPATLSLSPGERATLSCRASQSVSSYLAWYQQKPGQAPRLLIYDASNRATGIPARFSGSGSGTDFTLTISSLEPEDFAVYYCQQSSNWPRTFGQGTKVEIK

SEQ ID NO: 11603 - protein, 414 aa, Artificial Sequence
  source: /note="Description of Artificial Sequence: Synthetic polypeptide"
METDTLLLWVLLLWVPGSTGDGLGLQVFFVALLKGVHCEVRLLESGGGLVPEGSLKLSCVASGFTFSDYFMSWVRQAPGKGLEWVAHIYTKSYNYATYYSGSVKGRFTISRDDSRSMVYLQMNNLRTEDTATYYCTRDGSGYPSLDFWGQGTQVTVSSATTTAPSVYPLAPACDSTTKSGGGGSGGGGSGGGGSYELTQPPSASVVGETVKITCSGDQLPKYFADWFHQRSDQTILQVIYDDNKRPSGIPERISGSSSGTTATLTIRDVRAEDEGDYYCFSGYVDSDSKLYVFGSGTQLTVLGGPSSPKVTVFPPSPEELRTNKATLVCLVNDFYPGSATVTWKANGATINDGVKTTPSKQGQNYMTSSYLSLTADQWSHNRVSCQVTHEGETVEKSLSPAECLEQKLISEEDL

SEQ ID NO: 11604 - protein, 249 aa, Artificial Sequence
  source: /note="Description of Artificial Sequence: Synthetic polypeptide"
EVQLVESGGDLVKPGGSLKLSCAASGFTFSGYGMSWVRQTPDKRLEWVATITSGGTYTYYPDSVKGRFTISRDNAKNTLYLQIDSLKSEDTAIYFCARSLAGNAMDYWGQGTSVTVSSGGGGSGGGGSGGGGSDIVMTQSPATLSVTPGDRVSLSCRASQTISDYLHWYQQKSHESPRLLIKFASQSISGIPSRFSGSGSGSDFTLSINSVEPEDVGVYYCQNGHGFPRTFGGGTKLEIKEQLISEEDL

SEQ ID NO: 11605 - protein, 245 aa, Artificial Sequence
  source: /note="Description of Artificial Sequence: Synthetic polypeptide"
QQVQLVQSGAEVKKPGESLKISCKGSGYSFTSYWIGWVRQMPGKGLEWMGIIYPGDSDTRYSPSFQGQVTISADKSISTAYLQWSSLKASDTAMYYCARQGTHNRKIWGQGTMVTVSSAPQAKSSGSGSESKVDQAVVTQEPSLTVSPGGTVTLTCASSTGAVTSGNYPNWFQQRPGQPPRALIYSTSNKHSWTPARFSGSLLGGKAALTLSGAQPEDEAEYYCRLSYDLARPVFGGGTKLTVLG

SEQ ID NO: 11606 - protein, 245 aa, Artificial Sequence
  source: /note="Description of Artificial Sequence: Synthetic polypeptide"
QQVQLVQSGAEVKKPGESLKISCKGSGYSFTSYWIGWVRQMPGKGLEWMGIIYPGDSDTRYSPSFQGQVTISADKSISTAYLQWSSLKASDTAMYYCARLVHRYRAIWGQGTMVTVSSAPQAKSSGSGSESKVDQAVVTQEPSLTVSPGGTVTLTCASSTGAVTSGNYPNWFQQRPGQPPRALIYSTSNKHSWTPARFSGSLLGGKAALTLSGAQPEDEAEYYCRLSYDLARPVFGGGTKLTVLG

SEQ ID NO: 11607 - protein, 245 aa, Artificial Sequence
  source: /note="Description of Artificial Sequence: Synthetic polypeptide"
QQVQLVQSGAEVKKPGESLKISCKGSGYSFTSYWIGWVRQMPGKGLEWMGIIYPGDSDTRYSPSFQGQVTISADKSISTAYLQWSSLKASDTAMYYCARPYATDTRIWGQGTMVTVSSAPQAKSSGSGSESKVDQAVVTQEPSLTVSPGGTVTLTCASSTGAVTSGNYPNWFQQRPGQPPRALIYSTSNKHSWTPARFSGSLLGGKAALTLSGAQPEDEAEYYCRLSYDLARPVFGGGTKLTVLG

SEQ ID NO: 11608 - protein, 216 aa, Artificial Sequence
  source: /note="Description of Artificial Sequence: Synthetic polypeptide"
QAVVTQEPSLTVSPGGTVTLTCASSTGAVTSGNYPNWFQQRPGQPPRALIYSTSNKHSWTPARFSGSLLGGKAALTLSGAQPEDEAEYYCRLSYDLARPVFGGGTKLTVLGQPKAAPSVTLFPPSSEELQANKATLVCLISDFYPGAVTVAWKADSSPVKAGVETTTPSKQSNNKYAASSYLSLTPEQWKSHKSYSCQVTHEGSTVEKTVAPTECS

SEQ ID NO: 11609 - protein, 221 aa, Artificial Sequence
  source: /note="Description of Artificial Sequence: Synthetic polypeptide"
QQVQLVQSGAEVKKPGESLKISCKGSGYSFTSYWIGWVRQMPGKGLEWMGIIYPGDSDTRYSPSFQGQVTISADKSISTAYLQWSSLKASDTAMYYCARQGTHNRKIWGQGTMVTVSSASTKGPSVFPLAPSSKSTSGGTAALGCLVKDYFPEPVTVSWNSGALTSGVHTFPAVLQSSGLYSLSSVVTVPSSSLGTQTYICNVNHKPSNTKVDKKVEPKSC

SEQ ID NO: 11610 - protein, 216 aa, Artificial Sequence; identical to SEQ ID NO: 11608
  source: /note="Description of Artificial Sequence: Synthetic polypeptide"

SEQ ID NO: 11611 - protein, 221 aa, Artificial Sequence
  source: /note="Description of Artificial Sequence: Synthetic polypeptide"
QQVQLVQSGAEVKKPGESLKISCKGSGYSFTSYWIGWVRQMPGKGLEWMGIIYPGDSDTRYSPSFQGQVTISADKSISTAYLQWSSLKASDTAMYYCARLVHRYRAIWGQGTMVTVSSASTKGPSVFPLAPSSKSTSGGTAALGCLVKDYFPEPVTVSWNSGALTSGVHTFPAVLQSSGLYSLSSVVTVPSSSLGTQTYICNVNHKPSNTKVDKKVEPKSC

SEQ ID NO: 11612 - protein, 216 aa, Artificial Sequence; identical to SEQ ID NO: 11608
  source: /note="Description of Artificial Sequence: Synthetic polypeptide"

SEQ ID NO: 11613 - protein, 647 aa, Artificial Sequence
  source: /note="Description of Artificial Sequence: Synthetic polypeptide"
HHHHHHDIQMTQSPSSLSASVGDRVTITCRSTKSLLHSNGITYLYWYQQKPGKAPKLLIYQMSNLASGVPSRFSSSGSGTDFTLTISSLQPEDFATYYCAQNLEIPRTFGQGTKVELKRATPSHNSHQVPSAGGPTANSGTSGSEVQLVQSGPGLVQPGGSVRISCAASGYTFTNYGMNWVKQAPGKGLEWMGWINTYTGESTYADSFKGRFTFSLDTSASAAYLQINSLRAEDTAVYYCARFAIKGDYWGQGTLLTVSSEFGGAPEFPKPSTPPGSSGLEGGSLAALTAHQACHLPLETFTRHRQPRGWEQLEQCGYPVQRLVALYLAARLSWNQVDQVIRNALASPGSGGDLGEAIREQPEQARLALTLAAAESERFVRQGTGNDEAGAASADVVSLTCPVAAGECAGPADSGDALLERNYPTGAEFLGDGGDVSFSTRGTQNWTVERLLQAHRQLEERGYVFVGYHGTFLEAAQSIVFGGVRARSQDLDAIWRGFYIAGDPALAYGYAQDQEPDARGRIRNGALLRVYVPRSSLPGFYRTGLTLAAPEAAGEVERLIGHPLPLRLDAITGPEEEGGRLETILGWPLAERTVVIPSAIPTDPRNVGGDLDPSSIPDKEQAISALPDYASQPGKPPHHHHHHKDEL

SEQ ID NO: 11614 - protein, 235 aa, Artificial Sequence
  source: /note="Description of Artificial Sequence: Synthetic polypeptide"
EVQLQQSGAELVKPGASVKLSCTASGFNIKDYYIHWVQQRTEQGLEWIGRIDPEDGETKYAPKFQDKATITADTSSNTAYLHLSSLTSEDTAVYYCARWGAYWGQGTLVTVSGGGGSGGGGSGGGGSQIVLTQSPAIMSASPGEKVTLTCSASSSVSSSYLYWYQQKPGSSPKLWIYSTSNLASGVPARFSGSGSGTSYSLTISSMEAEDAASYFCHQWSSYPRTFGAGTKLELK

SEQ ID NO: 11615 - protein, 249 aa, Artificial Sequence
  source: /note="Description of Artificial Sequence: Synthetic polypeptide"
QVQLQQWGAGLLKPSETLSLTCAVYGGSFSGYYWSWIRQPPGKGLEWIGEINHSGSTNYNPSLKSRVTISVDTSKNQFSLKLSSVTAADTAVYYCARGPRYYDILTGYRYNWFDPWGRGTLVTVSSGGGGSGGGGSGGGGSDIVMTQSPSTLSASVGDRVTITCRASQGISSWLAWYQQKPGRAPKVLIYKASTLESGVPSRFSGSGSGTDFTLTISSLQPEDFATYYCQQSYSTPWTFGQGTKLEIKR

SEQ ID NO: 11616 - protein, 251 aa, Artificial Sequence
  source: /note="Description of Artificial Sequence: Synthetic polypeptide"
QLQLQESGPGLVKPSETLSLTCTVSGGFISSRTSYWGWIRQPPGKGPEWIGNIYYTGKTYYSPSLKSRVTISVDTSKNQLSLKLNSVTAADTAVYYCARAGYDLLTGYPFYFDSWGKGTLVTVSSGGGGSGGGGSGGGGSALEIVLTQSPATLSLSPGERATLSCRASQSVSSYLAWYQQKPGQAPRLLIYDASNRATGIPARFSGSGSGTDFTLTISSLEPEDFAVYYCQQRSNWPFLTFGGGTKVEIKR

SEQ ID NO: 11617 - protein, 249 aa, Artificial Sequence
  source: /note="Description of Artificial Sequence: Synthetic polypeptide"
QVQLQQSGAEVKKPGSSVRVSCKASGGTFNNNAINWVRQAPGQGLEWMGGIIPMFGTAKYSQNFQGRVAITADESTGTASMELSSLRSEDTAVYYCARSRDLLLFPHHALSPWGRGTMVTVSSGGGGSGGGGSGGGGSAFSSELTQDPAVSVALGQTVRVTCQGDSLRSYYASWYQQKPGQAPVLVIYGKNNRPSGIPDRFSGSSSGNTASLTITGAQAEDEADYYCSSRDSSGNHWVFGGGTELTVLG

SEQ ID NO: 11618 - protein, 272 aa, Artificial Sequence
  source: /note="Description of Artificial Sequence: Synthetic polypeptide"
HHHHHHVKLQESGAELVKPGASVKLSCKASGYTFTSYWMHWVKQRPGRGLEWIGRIGPNSGGTKYNEKFKSKATLTVDKPSSTAYMQLSSLTSEDSAVYYCARRMVKGCYGLLGPRDHGHRLLKGRIPAHWRPLLVDPSSVPSLASGGGGGSGGGGSWISAEFALDIELTQSPTTMAASPGEKITITCSASSSISSNYLHWYQQKPGFSPKLLIYRTSNLASGVPARFSGSGSGTSYSLTIGTMEAEDVATYYCQQGSSIPRTRSEGAPSWK

SEQ ID NO: 11619 - protein, 274 aa, Artificial Sequence
  source: /note="Description of Artificial Sequence: Synthetic polypeptide"
MSVPTQVLGLLLLWLTDARCVKLQESGPELVKPGASVKISCKASGYTFTDYYMNWVKQSHGKSLEWIGDINPNNGGTSYNQKFKGKATLTVDKSSSTAYMELRSLTSEDSAVYYCARYDYAWYFDVWGQGTTVTVSSGGGGSGGGGSGGGGDVLMTQTPLSLPVSLGDQASISCRSSQSIVHSNGNTYLEWYLQKPGQSPKLLIYKVSNRFSGVPDRFSGSGSGTDFTLKISRVEAEDLGVYYCFQGSHVPYTFGGGTKLEIKRIEGRHHHHHH

SEQ ID NO: 11620 - protein, 275 aa, Artificial Sequence
  source: /note="Description of Artificial Sequence: Synthetic polypeptide"
VKLQESGTELVKPGASVKLSCKASGYTFTSYWMHWVKQRPGQGLEWIGNINPSNGGTNYNEKFKSKATLTVDKSSSTAYMQLSSLTSEDSAVYYCARRGIRLRHFDYWGQGTTVTVSSRANSADIHHTGGRSSMHLEGPIRPIVSRISGGGGGSGGGGSWISAEFALDIVMTQSPASLAVSLGQRATISYRASKSVSTSGYSYMHWNQQKPGQPPRLLIYLVSNLESGVPARFSGSGSGTDFTLNIHPVEEEDAATYYCQHIRELTRSEGGPSWK

SEQ ID NO: 11621 - protein, 271 aa, Artificial Sequence
  source: /note="Description of Artificial Sequence: Synthetic polypeptide"
MSVPTQVLGLLLLWLTDARCVKLQESGTELVKPGASVKLSCKASGYTFTSYWMHWVKQRPGQGLEWIGNINPSNGGTNYNEKFKSKATLTVDKSSSTAYMQLSSLTSEDSAVYYCARRGIRLRHFDYWGQGTTVTVSSGGGGSGGGGSGGGGSDIQMTQSPKFMSTSVGDRVSITCKASQDVGTAVAWYQQKPGQSPKLLIYWASTRHTGVPDRFTGSGSGTDFTLTISNVQSEDLADYFCQQYSSYPLTFGAGTKLELKRIEGRHHHHHH

SEQ ID NO: 11622 - protein, 245 aa, Artificial Sequence
  source: /note="Description of Artificial Sequence: Synthetic polypeptide"
QVQLVQSGAEVKKPGASVKVSCKASGYTFSMYWLEWVRQAPGHGLEWVGEISPGTFTTNYNEKFKARATFTADTSTNTAYMELSSLRSEDTAVYYCARFSHFSGSNYDYFDYWGQGTLVTVSSGGGGSGGGGSGGGGSDILLTQSPGTLSLSPGERATLSCRASQSIGTNIHWYQQKPGQAPRLLIKYASESISGIPSRFSGSGSGTDFTLTISRLEPEDFAMYYCQQSDSWPTTFGQGTKVEIK

SEQ ID NO: 11623 - protein, 242 aa, Artificial Sequence; identical to SEQ ID NO: 11514
  source: /note="Description of Artificial Sequence: Synthetic polypeptide"

SEQ ID NO: 11624 - protein, 247 aa, Artificial Sequence; identical to SEQ ID NO: 11515
  source: /note="Description of Artificial Sequence: Synthetic polypeptide"

SEQ ID NO: 11625 - protein, 242 aa, Artificial Sequence; identical to SEQ ID NO: 11516
  source: /note="Description of Artificial Sequence: Synthetic polypeptide"

SEQ ID NO: 11626 - protein, 242 aa, Artificial Sequence; identical to SEQ ID NO: 11517
  source: /note="Description of Artificial Sequence: Synthetic polypeptide"

SEQ ID NO: 11627 - protein, 242 aa, Artificial Sequence; identical to SEQ ID NO: 11518
  source: /note="Description of Artificial Sequence: Synthetic polypeptide"

SEQ ID NO: 11628 - protein, 242 aa, Artificial Sequence; identical to SEQ ID NO: 11519
  source: /note="Description of Artificial Sequence: Synthetic polypeptide"

SEQ ID NO: 11629 - protein, 242 aa, Artificial Sequence; identical to SEQ ID NO: 11529
  source: /note="Description of Artificial Sequence: Synthetic polypeptide"

SEQ ID NO: 11630 - protein, 247 aa, Artificial Sequence; identical to SEQ ID NO: 11533
  source: /note="Description of Artificial Sequence: Synthetic polypeptide"

SEQ ID NO: 11631 - protein, 242 aa, Artificial Sequence
  source: /note="Description of Artificial Sequence: Synthetic polypeptide"
DIQMTQTTSSLSASLGDRVTISCRASQDISKYLNWYQQKPDGTVKLLIYHTSRLHSGVPSRFSGSGSGTDYSLTISNLEQEDIATYFCQQGNTLPYTFGGGTKLEITGGGGSGGGGSGGGGSEVKLQESGPGLVAPSQSLSVTCTVSGVSLPDYGVSWIRQPPRKGLEWLGVIWGSETTYYNSALKSRLTIIKDNSKSQVFLKMNSLQTDDTAIYYCAKHYYYGGSYAMDYWGQGTSVTVSS

SEQ ID NO: 11632 - protein, 247 aa, Artificial Sequence; identical to SEQ ID NO: 11534
  source: /note="Description of Artificial Sequence: Synthetic polypeptide"

SEQ ID NO: 11633 - protein, 247 aa, Artificial Sequence; identical to SEQ ID NO: 11535
  source: /note="Description of Artificial Sequence: Synthetic polypeptide"

SEQ ID NO: 11634 - protein, 247 aa, Artificial Sequence; identical to SEQ ID NO: 11543
  source: /note="Description of Artificial Sequence: Synthetic polypeptide"

SEQ ID NO: 11635 - protein, 247 aa, Artificial Sequence; identical to SEQ ID NO: 11549
  source: /note="Description of Artificial Sequence: Synthetic polypeptide"

SEQ ID NO: 11636 - protein, 357 aa, Artificial Sequence
  source: /note="Description of Artificial Sequence: Synthetic polypeptide"
EVQLLESGGGLVQPGGSLRLSCAASGFTFSSFSMSWVRQAPGKGLEWVSSISGSSGTTYYADSVKGRFTISRDNSKNTLYLQMNSLRAEDTAVYYCAKPFPYFDYWGQGTLVTVSSGDGSSGGSGGASEIVLTQSPGTLSLSPGERATLSCRASQSVSSSFLAWYQQKPGQAPRLLIYYASSRATGIPDRFSGSGSGTDFTLTISRLEPEDFAVYYCQQTGRIPPTFGQGTKVEIKSGGSGGPRAAPEVYAFATPEWPGSRDKRTLACLIQNFMPEDISVQWLHNEVQLPDARHSTTQPRKTKGSGFFVFSRLEVTRAEWEQKDEFICRAVHEAASPSQTVQRAVSVNPESSRRGGC

SEQ ID NO: 11637 - protein, 233 aa, Artificial Sequence
  source: /note="Description of Artificial Sequence: Synthetic polypeptide"
SEKSEEINEKDLRKKSELQGTALGNLKQIYYYNSKAITSSEKSADQFLTNTLLFKGFFTGHPWYNDLLVDLGSTAATSEYEGSSVDLYGAYYGYQCAGGTPNKTACMYGGVTLHDNNRLTEEKKVPINLWIDGKQTTVPIDKVKTSKKEVTVQELDLQARHYLHGKFGLYNSDSFGGKVQRGLIVFHSSEGSTVSYDLFDAQGQYPDTLLRIYRDNTTISSTSLSISLYLYTT

SEQ ID NO: 11638 - protein, 246 aa, Artificial Sequence
  source: /note="Description of Artificial Sequence: Synthetic polypeptide"
LESGAELVRPGSSVKISCKASGYAFSSYWMNWVKQRPGQGLEWIGQIWPGDGDTNYNGKFKGKATLTADESSSTAYMQLSSLRSEDSAVYSCARRETTTVGRYYYAMDYWGQGTTVTGGGGSGGGGSGGGGSELVLTQSPASLAVSLGQRATISCKASQSVDYDGDSYLNWYQQIPGQPPKLLIYDASNLVSGIPPRFSGSGSGTDFTLNIHPVEKVDAATYHCQQSTEDPWTFGGGTKLEIKRRS

SEQ ID NO: 11639 - protein, 241 aa, Artificial Sequence
  source: /note="Description of Artificial Sequence: Synthetic polypeptide"
LESGAELVRPGSSVKISCKASGYAFSSYWMNWVKQRPGQGLEWIGQIYPGDGDTNYNGKFKGQATLTADKSSSTAYMQLSGLTSEDSAVYSCARKTISSVVDFYFDNWGQGTTVTGGGGSGGGGSGGGGSELVLTQSPKFMSTSVGDRVSVTCKASQNVGTNVAWYQQKPGQSPKPLIYSATYRNSGVPDRFTGSGSGTDFTLTITNVQSKDLADYFYFCQYNRYPYTSGGGTKLEIKRRS

SEQ ID NO: 11640 - protein, 243 aa, Artificial Sequence
  source: /note="Description of Artificial Sequence: Synthetic polypeptide"
LESGAELVRPGASVKISCKASGYAFSSSWMNWVKQRPGQGLEWIGRIYPGDGDTNYNGKFKEAATLTADKSSSTAYMQLSSLTSVDSAVYSCARSEYWGNYWAMDYWGQGTTVTGGGGSGGGGSGGGGSELVLTQSPASLAVSLGQRATISCRASQSVDNYGISFMNWFQQKPGQPPKLLIYAASNQGSGVPARFSGSGSGTDFSLNIHPMEEDDTAMYFCQQSKEVPRTFGGGTKLEIKRRS

SEQ ID NO: 11641 - protein, 247 aa, Artificial Sequence
  source: /note="Description of Artificial Sequence: Synthetic polypeptide"
LESGAELVRPGSSVKISCKASGYAFSSYWMNWVKQRPGQGLEWIGQIWPGDGDTNYNGKFKGKATLTADESSSTAYMQLSSLRSEDSAVYSCARRETTTVGRYYYAMDYWGQGTTVTGGGGSGGGGSGGGGSELVLTQSPASLAVSLGQRATISCKASQSVDYDGDSYLNWYQQIPGQPPKLLIYDASNLVSGIPPRFSGSGSGTDFTLNIHPVEKVDAATYHCQQSTEDPWTFGGGTKLEIKRRSC

SEQ ID NO: 11642 - protein, 242 aa, Artificial Sequence
  source: /note="Description of Artificial Sequence: Synthetic polypeptide"
LESGAELVRPGSSVKISCKASGYAFSSYWMNWVKQRPGQGLEWIGQIYPGDGDTNYNGKFKGQATLTADKSSSTAYMQLSGLTSEDSAVYSCARKTISSVVDFYFDNWGQGTTVTGGGGSGGGGSGGGGSELVLTQSPKFMSTSVGDRVSVTCKASQNVGTNVAWYQQKPGQSPKPLIYSATYRNSGVPDRFTGSGSGTDFTLTITNVQSKDLADYFYFCQYNRYPYTSGGGTKLEIKRRSC

SEQ ID NO: 11643 - protein, 250 aa, Artificial Sequence; identical to SEQ ID NO: 6338
  source: /note="Description of Artificial Sequence: Synthetic polypeptide"

SEQ ID NO: 11644 - protein, 251 aa, Artificial Sequence; identical to SEQ ID NO: 6339
  source: /note="Description of Artificial Sequence: Synthetic polypeptide"

SEQ ID NO: 11645 - protein, 242 aa, Artificial Sequence; identical to SEQ ID NO: 6340
  source: /note="Description of Artificial Sequence: Synthetic polypeptide"

SEQ ID NO: 11646 - protein, 248 aa, Artificial Sequence; identical to SEQ ID NO: 6341
  source: /note="Description of Artificial Sequence: Synthetic polypeptide"

SEQ ID NO: 11647 - protein, 244 aa, Artificial Sequence; identical to SEQ ID NO: 6342
  source: /note="Description of Artificial Sequence: Synthetic polypeptide"

SEQ ID NO: 11648 - protein, 247 aa, Artificial Sequence; identical to SEQ ID NO: 6343
  source: /note="Description of Artificial Sequence: Synthetic polypeptide"

SEQ ID NO: 11649 - protein, 248 aa, Artificial Sequence; identical to SEQ ID NO: 6344
  source: /note="Description of Artificial Sequence: Synthetic polypeptide"

SEQ ID NO: 11650 - protein, 243 aa, Artificial Sequence; identical to SEQ ID NO: 6345
  source: /note="Description of Artificial Sequence: Synthetic polypeptide"

SEQ ID NO: 11651 - protein, 255 aa, Artificial Sequence; identical to SEQ ID NO: 6346
  source: /note="Description of Artificial Sequence: Synthetic polypeptide"

SEQ ID NO: 11652 - protein, 245 aa, Artificial Sequence; identical to SEQ ID NO: 6347
  source: /note="Description of Artificial Sequence: Synthetic polypeptide"

SEQ ID NO: 11653 - protein, 248 aa, Artificial Sequence; identical to SEQ ID NO: 6348
  source: /note="Description of Artificial Sequence: Synthetic polypeptide"

SEQ ID NO: 11654 - protein, 243 aa, Artificial Sequence; identical to SEQ ID NO: 6349
  source: /note="Description of Artificial Sequence: Synthetic polypeptide"

SEQ ID NO: 11655 - protein, 251 aa, Artificial Sequence; identical to SEQ ID NO: 6350
  source: /note="Description of Artificial Sequence: Synthetic polypeptide"

SEQ ID NO: 11656 - protein, 245 aa, Artificial Sequence; identical to SEQ ID NO: 6351
  source: /note="Description of Artificial Sequence: Synthetic polypeptide"

SEQ ID NO: 11657 - protein, 245 aa, Artificial Sequence; identical to SEQ ID NO: 6352
  source: /note="Description of Artificial Sequence: Synthetic polypeptide"

SEQ ID NO: 11658 - protein, 247 aa, Artificial Sequence; identical to SEQ ID NO: 6353
  source: /note="Description of Artificial Sequence: Synthetic polypeptide"

SEQ ID NO: 11659 - protein, 246 aa, Artificial Sequence; identical to SEQ ID NO: 6354
  source: /note="Description of Artificial Sequence: Synthetic polypeptide"

SEQ ID NO: 11660 - protein, 248 aa, Artificial Sequence; identical to SEQ ID NO: 6355
  source: /note="Description of Artificial Sequence: Synthetic polypeptide"

SEQ ID NO: 11661 - protein, 242 aa, Artificial Sequence; identical to SEQ ID NO: 6356
  source: /note="Description of Artificial Sequence: Synthetic polypeptide"

SEQ ID NO: 11662 - protein, 116 aa, Artificial Sequence
  source: /note="Description of Artificial Sequence: Synthetic polypeptide"
EVQLLESGGGLVQPGGSLRLSCAASGFTFSQYRMWWVRQAPGKGLEWVSAIAPSGDNTYYADSVKGRFTISRDNSKNTLYLQMNSLRAEDTAVYYCAKHRTSFDYWGQGTLVTVSS

SEQ ID NO: 11663 - protein, 122 aa, Artificial Sequence
  source: /note="Description of Artificial Sequence: Synthetic polypeptide"
EVQLLESGGGLVQPGGSLRLSCAASGFTFGTEQMWWVRQAPGKGLEWVSRIDSPGGRTYYADSVKGRFTISRDNSKNTLYLQMNSLRAEDTAVYYCAKRHAAGVSGTYFDYWGQGTLVTVSS

SEQ ID NO: 11664 - protein, 116 aa, Artificial Sequence
  source: /note="Description of Artificial Sequence: Synthetic polypeptide"
EVQLLESGGGLVQPGGSLRLSCAASGFTFTDDRMWWVRQAPGKGLEWVSAIDPQGQHTYYADSVKGRFTISRDNSKNTLYLQMNSLRAEDTAVYYCAKELLSFDYWGQGTLVTVSS

SEQ ID NO: 11665 - protein, 124 aa, Artificial Sequence
  source: /note="Description of Artificial Sequence: Synthetic polypeptide"
EVQLLESGGGLVQPGGSLRLSCAASGFTFFNYEMAWARQAPGKGLEWVSLISAEGTRTYYANSVKGRFTISRDNSKNTLYLQMNSLRAEDTAVYYCAKRRDASMGHTTRRFDHWGQGTLVTVSS

SEQ ID NO: 11666 - protein, 124 aa, Artificial Sequence
  source: /note="Description of Artificial Sequence: Synthetic polypeptide"
EVQLLESGGGLVQPGGSLRLSCAASGFTFFNYEMAWARRAPGKGLEWVSLISADGTRTYYANSVRGRFTISRDNSKNTLYLQMNSLRAEDTAVYYCAKRRDASMGHTTRRFDYSGQGTLVTVSS

SEQ ID NO: 11667 - protein, 124 aa, Artificial Sequence
  source: /note="Description of Artificial Sequence: Synthetic polypeptide"
EVQLLESGGGLVQPGGSLRLSCTASGFTFTEYRMWWVRQAPGKGLEWVSLIEPIGNRTYYADSVKGRFTISRDNSKNTLYLQMNSLRAEDTAVYYCAKQIPGHMWTANPRSDYWGQGTQVTVSS

SEQ ID NO: 11668 - protein, 124 aa, Artificial Sequence
  source: /note="Description of Artificial Sequence: Synthetic polypeptide"
EVQLLESGGGLVQPGGSLRLSCAASGFTFTEYRMWWVRQAPGKGLEWVSAIEPIGNRTYYADSVKGRFTISRDNSKNTLYLQMNSLRAEDTAVYYCAKQIPGRKWTANSRFDYWGQGTLVTVSS

SEQ ID NO: 11669 - protein, 124 aa, Artificial Sequence
  source: /note="Description of Artificial Sequence: Synthetic polypeptide"
EVQLLESGGGLVQPGGSLRLSCTASGFTFTEYRMWWVRQAPGKGLEWVSLIEPIGNRTYYANSVRGRFTISRDNSKNTLYLQMNSLRAEDTAVYYCAKQIPGHMWTANPRSDYWGQGTQVTVSS

SEQ ID NO: 11670 - protein, 124 aa, Artificial Sequence
  source: /note="Description of Artificial Sequence: Synthetic polypeptide"
EVQLLESGGGLVQPGGSLRLSCAASGFTFTEYRMWWVRQAPGKGLEWVSAIEPIGNRTYYANSVRGRFTISRDNSKNTLYLQMNSLRAEDTAVYYCAKQIPGRKWTANSRFDYWGQGTLVTVSS

SEQ ID NO: 11671 - protein, 116 aa, Artificial Sequence
  source: /note="Description of Artificial Sequence: Synthetic polypeptide"
EVQLLESGGGLVQPGGSLRLSCAASGFTISDYRMWWVRQAPGKGLEWVSAIDSQGHTTYYADSVRGRFTISRDNSKNTLYLQMNSLRAEDTAVYYCAKYGGYFDYWGQGTLVTVSS

SEQ ID NO: 11672 - protein, 116 aa, Artificial Sequence
  source: /note="Description of Artificial Sequence: Synthetic polypeptide"
EVQLLESGGGLVQPGGSLRLSCATSGFTFSDYRMWWVRQAPGKGLEWVSAIDSQGHTTYYADSVKGRFTISRDNSKNTLYLQMNSLRAEDTAVYYCAKYGGYFDYWGQGTLVTVSS

SEQ ID NO: 11673 - protein, 116 aa, Artificial Sequence
  source: /note="Description of Artificial Sequence: Synthetic polypeptide"
EVQLLESGGGLVQPGGSLRLSCAASGFTFSDYDMWWVRQAPGKGLEWVSKITQKGDFTYYADSVKGRFTISRDNSKNTLYLQMNSLRAEDTAVYYCAKDATHFDYWGQGTLVTVSS

SEQ ID NO: 11674 - protein, 116 aa, Artificial Sequence
  source: /note="Description of Artificial Sequence: Synthetic polypeptide"
EVQLLESGGGLVQPGGSLRLSCAASGFTISDYRMWWVRQAPGKGLEWVSAIDSQGHTTYYANSVRGRFTISRDNSKNTLYLQMNSLRAEDTAVYYCAKYGGYFDYWGQGTLVTVSS

SEQ ID NO: 11675 - protein, 116 aa, Artificial Sequence
  source: /note="Description of Artificial Sequence: Synthetic polypeptide"
EVQLLESGGGLVQPGGSLRLSCATSGFTFSDYRMWWVRQAPGKGLEWVSAIDSQGHTTYYANSVRGRFTISRDNSKNTLYLQMNSLRAEDTAVYYCAKYGGYFDYWGQGTLVTVSS

SEQ ID NO: 11676 - protein, 122 aa, Artificial Sequence
  source: /note="Description of Artificial Sequence: Synthetic polypeptide"
EVQLLESGGGLVRPGGSLRLSCAASGFTFGTEQMWWVRQAPGKGLEWVSRIDSPGGRTYYADSVRGRFTISRDNSKNTLYLQMNSLRAEDTAVYYCAKRHAAGVSGTYFDYWGQGTLVTVSS

SEQ ID NO: 11677 - protein, 122 aa, Artificial Sequence
  source: /note="Description of Artificial Sequence: Synthetic polypeptide"
EVQLLESGGGLVRPGGSLRLSCAASGFTFGTEQMWWVRQAPGKGLEWVSRIDSPGGRTYYANSVRGRFTISRDNSKNTLYLQMNSLRAEDTAVYYCAKRHAAGVSGTYFDYWGQGTLVTVSS

SEQ ID NO: 11678 - protein, 124 aa, Artificial Sequence
  source: /note="Description of Artificial Sequence: Synthetic polypeptide"
EVQLLESGGGLVQPGGSLRLSCAASGFTFFNYEMAWARQAPGKGLEWVSLISAEGTRTYYADSVKGRFTISRDNSKNTLYLQMNSLRAEDTAVYYCAKRRDASMGHTTRRFDYWGQGTLVTVSS

SEQ ID NO: 11679 - protein, 124 aa, Artificial Sequence
  source: /note="Description of Artificial Sequence: Synthetic polypeptide"
EVQLLESGGGLVQPGGSLRLSCAASGFTFTEYRMWWVRQAPGKGLEWVSSIEPIGNRTYYADSVKGRFTISRDNSKNTLYLQMNSLRAEDTAVYYCAKQIPGHKWTANSRFDYWGQGTLVTVSS

SEQ ID NO: 11680 - protein, 121 aa, Artificial Sequence
  source: /note="Description of Artificial Sequence: Synthetic polypeptide"
EVQLLESGGGLVQPGGSLRLSCAASGFTFSDYDMAWARQAPGKGLEWVSRISHSGYSTYYADSVKGRFTISRDNSKNTLYLQMNSLRAEDTAVYYCAKRSWDGVHAQFDYWGQGTLVTVSS

SEQ ID NO: 11681 - protein, 116 aa, Artificial Sequence
  source: /note="Description of Artificial Sequence: Synthetic polypeptide"
EVQLLESGGGLVQPGGSLRLTCAASGFTFTDDRMWWVRQAPGKGLEWVSAIDPQGQHTYYADSVKGRFTISRDNSKNTLYLQMNSLRAEDTAVYYCAKHNSSFDYWGQGTLVTVSS

SEQ ID NO: 11682 - protein, 116 aa, Artificial Sequence
  source: /note="Description of Artificial Sequence: Synthetic polypeptide"
EVQLLESGGGLVQPGGSLRLSCAASGFTFSDYKMGWVRQAPGKGLEWVSSIWPNGGLTYYADSVKGRFTISRDNSKNTLYLQMNSLRAEDTAVYYCAKDHMGFDYWGQGTLVTVSS

SEQ ID NO: 11683 - protein, 116 aa, Artificial Sequence
  source: /note="Description of Artificial Sequence: Synthetic polypeptide"
EVQLLESGGGLVQPGGSLRLSCAASGFTFSDYRMWWVRQAPGKGLEWVSAIDSQGHTTYYADSVKGRFTISRDNSKNTLYLQMNSLRAEDTAVYYCAKYGGYFDYWGQGTLVTVSS

SEQ ID NO: 11684 - protein, 119 aa, Artificial Sequence
  source: /note="Description of Artificial Sequence: Synthetic polypeptide"
EVQLLESGGGLVQPGGSLRLSCAASGFTFAQGDMWWVRQAPGKGLEWVSRIGMDGDKTYYADSVKGRFTISRDNSKNTLYLQMNSLRAEDTAVYYCAKGPSSTSPFDYWGQGTLVTVSS

SEQ ID NO: 11685 - protein, 493 aa, Artificial Sequence
  source: /note="Description of Artificial Sequence: Synthetic polypeptide"
MEAPAQLLFLLLLWLPDTTGEIVLTQSPATLSLSPGERATLSCRTSENVYSYLAWYQQKPGQAPRLLIYFAKTLAEGIPARFSGSGSGTDFTLTISSLEPEDFAVYYCQHHSDNPWTFGQGTKVEIKGGGGSGGGGSGGGGTGEVQLVQSGAESKKPGESLKISCKGSGYSFTGYNMNWVRQMPGKGLEWMGNIDPYYGGTTYNRKFKGQVTISADKSISTAYLQWSSLKASDTAMYYCARSVGPMDYWGRGTLVTVSSDQEPKSSDKTHTSPPCPAPELLGGPSVFLFPPKPKDTLMISRTPEVTCVVVDVSHEDPEVKFNWYVDGVEVHNAKTKPREEQYNSTYRVVSVLTVLHQDWLNGKEYKCKVSNKALPAPIEKTISKAKGQPREPQVYTLPPSRDELTKNQVSLTCLVKGFYPSDIAVEWESNGQPENNYKTTPPVLDSDGSFFLYSKLTVDKSRWQQGNVFSCSVMHEALHNHYTQKSLSLSPGK

SEQ ID NO: 11686 - protein, 493 aa, Artificial Sequence
  source: /note="Description of Artificial Sequence: Synthetic polypeptide"
MEAPAQLLFLLLLWLPDTTGEIVLTQSPATLSLSPGERATLSCRTSQNVYSYLAWYQQKPGQAPRLLIYFAKTLAEGIPARFSGSGSGTDFTLTISSLEPEDFAVYYCQHHSDNPWTFGQGTKVEIKGGGGSGGGGSGGGGTGEVQLVQSGAEVKKPGESLKISCKGSGYSFTGYNMNWVRQMPGKGLEWMGNIDPYYGGTTYNRKFKGQVTISADKSISTAYLQWSSLKASDTAMYYCARSVGPMDYWGRGTLVTVSSDQEPKSSDKTHTSPPCPAPELLGGPSVFLFPPKPKDTLMISRTPEVTCVVVDVSHEDPEVKFNWYVDGVEVHNAKTKPREEQYNSTYRVVSVLTVLHQDWLNGKEYKCKVSNKALPAPIEKTISKAKGQPREPQVYTLPPSRDELTKNQVSLTCLVKGFYPSDIAVEWESNGQPENNYKTTPPVLDSDGSFFLYSKLTVDKSRWQQGNVFSCSVMHEALHNHYTQKSLSLSPGK

SEQ ID NO: 11687 - protein, 493 aa, Artificial Sequence
  source: /note="Description of Artificial Sequence: Synthetic polypeptide"
MEAPAQLLFLLLLWLPDTTGEIVLTQSPATLSLSPGERATLSCRTSESVYSYLAWYQQKPGQAPRLLIYFAKTLAEGIPARFSGSGSGTDFTLTISSLEPEDFAVYYCQHHSDNPWTFGQGTKVEIKGGGGSGGGGSGGGGTGEVQLVQSGAEVKKPGESLKISCKGSGYSFTGYNMNWVRQMPGKGLEWMGNIDPYYGGTTYNRKFKGQVTISADKSISTAYLQWSSLKASDTAMYYCARSVGPMDYWGRGTLVTVSSDQEPKSSDKTHTSPPCPAPELLGGPSVFLFPPKPKDTLMISRTPEVTCVVVDVSHEDPEVKFNWYVDGVEVHNAKTKPREEQYNSTYRVVSVLTVLHQDWLNGKEYKCKVSNKALPAPIEKTISKAKGQPREPQVYTLPPSRDELTKNQVSLTCLVKGFYPSDIAVEWESNGQPENNYKTTPPVLDSDGSFFLYSKLTVDKSRWQQGNVFSCSVMHEALHNHYTQKSLSLSPGK

SEQ ID NO: 11688 - protein, 493 aa, Artificial Sequence
  source: /note="Description of Artificial Sequence: Synthetic polypeptide"
MEAPAQLLFLLLLWLPDTTGEIVLTQSPATLSLSPGERATLSCRASENVYSYLAWYQQKPGQAPRLLIYFAKTLAEGIPARFSGSGSGTDFTLTISSLEPEDFAVYYCQHHSDNPWTFGQGTKVEIKGGGGSGGGGSGGGGTGEVQLVQSGAEVKKPGESLKISCKGSGYSFTGYNMNWVRQMPGKGLEWMGNIDPYYGGTTYNRKFKGQVTISADKSISTAYLQWSSLKASDTAMYYCARSVGPMDYWGRGTLVTVSSDQEPKSSDKTHTSPPCPAPELLGGPSVFLFPPKPKDTLMISRTPEVTCVVVDVSHEDPEVKFNWYVDGVEVHNAKTKPREEQYNSTYRVVSVLTVLHQDWLNGKEYKCKVSNKALPAPIEKTISKAKGQPREPQVYTLPPSRDELTKNQVSLTCLVKGFYPSDIAVEWESNGQPENNYKTTPPVLDSDGSFFLYSKLTVDKSRWQQGNVFSCSVMHEALHNHYTQKSLSLSPGK

SEQ ID NO: 11689 - protein, 492 aa, Artificial Sequence
  source: /note="Description of Artificial Sequence: Synthetic polypeptide"
MEAPAQLLFLLLLWLPDTTGDIQMTQSPASLSASVGETVTITCRTSENVYSYLAWYQQKQGKSPQLLVSFAKTLAEGVPSRFSGSGSGTQFSLKISSLQPEDSGSYFCQHHSDNPWTFGGGTELEIKGGGGSGGGGSGGGGASEVQLVQSGAEVKKPGESLRISCKGSGYSFTGYNMNWVRQMPGKGLEWMGNIDPYYGGTTYNRKFKGQVTISADKSISTAYLQWSSLKASDTAMYYCARSVGPMDYWGRGTLVTVSSSEPKSSDKTHTSPPCPAPELLGGPSVFLFPPKPKDTLMISRTPEVTCVVVDVSHEDPEVKFNWYVDGVEVHNAKTKPREEQYNSTYRVVSVLTVLHQDWLNGKEYKCKVSNKALPAPIEKTISKAKGQPREPQVYTLPPSRDELTKNQVSLTCLVKGFYPSDIAVEWESNGQPENNYKTTPPVLDSDGSFFLYSKLTVDKSRWQQGNVFSCSVMHEALHNHYTQKSLSLSPGK

SEQ ID NO: 11690 - protein, 496 aa, Artificial Sequence
  source: /note="Description of Artificial Sequence: Synthetic polypeptide"
MDFQVQIFSFLLISASVIIARGVDIQMTQSPASLSASVGETVTITCRTSENVYSYLAWYQQKQGKSPQLLVSFAKTLAEGVPSRFSGSGSGTQFSLKISSLQPEDSGSYFCQHHSDNPWTFGGGTELEIKGGGGSGGGGSGGGGSSAVQLQQSGPESEKPGASVKISCKASGYSFTGYNMNWVKQNNGKSLEWIGNIDPYYGGTTYNRKFKGKATLTVDKSSSTAYMQLKSLTSEDSAVYYCARSVGPMDYWGQGTSVTVSSDLEPKSSDKTHTSPPCPAPELLGGPSVFLFPPKPKDTLMISRTPEVTCVVVDVSHEDPEVKFNWYVDGVEVHNAKTKPREEQYNSTYRVVSVLTVLHQDWLNGKEYKCKVSNKALPAPIEKTISKAKGQPREPQVYTLPPSRDELTKNQVSLTCLVKGFYPSDIAVEWESNGQPENNYKTTPPVLDSDGSFFLYSKLTVDKSRWQQGNVFSCSVMHEALHNHYTQKSLSLSPGK

SEQ ID NO: 11691 - protein, 492 aa, Artificial Sequence
  source: /note="Description of Artificial Sequence: Synthetic polypeptide"
MEAPAQLLFLLLLWLPDTTGEIVLTQSPATLSLSPGERATLSCRTSENVYSYLAWYQQKPGQAPRLLIYFAKTLAEGIPARFSGSGSGTDFTLTISSLEPEDFAVYYCQHHSDNPWTFGQGTKVEIKGGGGSGGSGSGGGGASAVQLQQSGPESEKPGASVKISCKASGYSFTGYNMNWVKQNNGKSLEWIGNIDPYYGGTTYNRKFKGKATLTVDKSSSTAYMQLKSLTSEDSAVYYCARSVGPMDYWGQGTSVTVSSSEPKSSDKTHTSPPCPAPELLGGPSVFLFPPKPKDTLMISRTPEVTCVVVDVSHEDPEVKFNWYVDGVEVHNAKTKPREEQYNSTYRVVSVLTVLHQDWLNGKEYKCKVSNKALPAPIEKTISKAKGQPREPQVYTLPPSRDELTKNQVSLTCLVKGFYPSDIAVEWESNGQPENNYKTTPPVLDSDGSFFLYSKLTVDKSRWQQGNVFSCSVMHEALHNHYTQKSLSLSPGK

SEQ ID NO: 11692 - protein, 492 aa, Artificial Sequence
  source: /note="Description of Artificial Sequence: Synthetic polypeptide"
MEAPAQLLFLLLLWLPDTTGEIVLTQSPATLSLSPGERATLSCRTSENVYSYLAWYQQKPGQAPRLLIYFAKTLAEGIPARFSGSGSGTDFTLTISSLEPEDFAVYYCQHHSDNPWTFGQGTKVEIKGGGGSGGGGSGGGGASQVQLVESGGGVVQPGRSLRLSCAASGFTFSGYNMNWVRQMPGKGLEWMGNIDPYYGGTTYNRKFKGQVTISADKSISTAYLQWSSLKASDTAMYYCARSVGPMDYWGRGTLVTVSSSEPKSSDKTHTSPPCPAPELLGGPSVFLFPPKPKDTLMISRTPEVTCVVVDVSHEDPEVKFNWYVDGVEVHNAKTKPREEQYNSTYRVVSVLTVLHQDWLNGKEYKCKVSNKALPAPIEKTISKAKGQPREPQVYTLPPSRDELTKNQVSLTCLVKGFYPSDIAVEWESNGQPENNYKTTPPVLDSDGSFFLYSKLTVDKSRWQQGNVFSCSVMHEALHNHYTQKSLSLSPGK

SEQ ID NO: 11693 - protein, 503 aa, Artificial Sequence; identical to SEQ ID NO: 6438
  source: /note="Description of Artificial Sequence: Synthetic polypeptide"

SEQ ID NO: 11694 - protein, 500 aa, Artificial Sequence
  source: /note="Description of Artificial Sequence: Synthetic polypeptide"
MEAPAQLLFLLLLWLPDTTGAVQLQQSGPESEKPGASVKISCKASGYSFTGYNMNWVKQNNGKSLEWIGNIDPYYGGTTYNRKFKGKATLTVDKSSSTAYMQLKSLTSEDSAVYYCARSVGPMDYWGQGTSVTVSSGGGGSGGGGSGGGGSGGGGSASEIVLTQSPATLSLSPGERATLSCRTSENVYSYLAWYQQKPGQAPRLLIYFAKTLAEGIPARFSGSGSGTDFTLTISSLEPEDFAVYYCQHHSDNPWTFGQGTKVEIKGSSEPKSSDKTHTSPPCPAPELLGGPSVFLFPPKPKDTLMISRTPEVTCVVVDVSHEDPEVKFNWYVDGVEVHNAKTKPREEQYNSTYRVVSVLTVLHQDWLNGKEYKCKVSNKALPAPIEKTISKAKGQPREPQVYTLPPSRDELTKNQVSLTCLVKGFYPSDIAVEWESNGQPENNYKTTPPVLDSDGSFFLYSKLTVDKSRWQQGNVFSCSVMHEALHNHYTQKSLSLSPGK

SEQ ID NO: 11695 - protein, 473 aa, Artificial Sequence
  source: /note="Description of Artificial Sequence: Synthetic polypeptide"
DIQMTQSPASLSASVGETVTITCRTSENVYSYLAWYQQKQGKSPQLLVSFAKTLAEGVPSRFSGSGSGTQFSLKISSLQPEDSGSYFCQHHSDNPWTFGGGTELEIKGGGGSGGGGSGGGGSSAVQLQQSGPESEKPGASVKISCKASGYSFTGYNMNWVKQNNGKSLEWIGNIDPYYGGTTYNRKFKGKATLTVDKSSSTAYMQLKSLTSEDSAVYYCARSVGPMDYWGQGTSVTVSSDLEPKSSDKTHTSPPCPAPELLGGPSVFLFPPKPKDTLMISRTPEVTCVVVDVSHEDPEVKFNWYVDGVEVHNAKTKPREEQYNSTYRVVSVLTVLHQDWLNGKEYKCKVSNKALPAPIEKTISKAKGQPREPQVYTLPPSRDELTKNQVSLTCLVKGFYPSDIAVEWESNGQPENNYKTTPPVLDSDGSFFLYSKLTVDKSRWQQGNVFSCSVMHEALHNHYTQKSLSLSPGK

SEQ ID NO: 11696 - protein, 473 aa, Artificial Sequence
  source: /note="Description of Artificial Sequence: Synthetic polypeptide"
EIVLTQSPATLSLSPGERATLSCRTSENVYSYLAWYQQKPGQAPRLLIYFAKTLAEGIPARFSGSGSGTDFTLTISSLEPEDFAVYYCQHHSDNPWTFGQGTKVEIKGGGGSGGGGSGGGGTGEVQLVQSGAEVKKPGESLKISCKGSGYSFTGYNMNWVRQMPGKGLEWMGNIDPYYGGTTYNRKFKGQVTISADKSISTAYLQWSSLKASDTAMYYCARSVGPMDYWGRGTLVTVSSDQEPKSSDKTHTSPPCPAPELLGGPSVFLFPPKPKDTLMISRTPEVTCVVVDVSHEDPEVKFNWYVDGVEVHNAKTKPREEQYNSTYRVVSVLTVLHQDWLNGKEYKCKVSNKALPAPIEKTISKAKGQPREPQVYTLPPSRDELTKNQVSLTCLVKGFYPSDIAVEWESNGQPENNYKTTPPVLDSDGSFFLYSKLTVDKSRWQQGNVFSCSVMHEALHNHYTQKSLSLSPGK

SEQ ID NO: 11697 - protein, 473 aa, Artificial Sequence
  source: /note="Description of Artificial Sequence: Synthetic polypeptide"
EIVLTQSPATLSLSPGERATLSCRASENVYSYLAWYQQKPGQAPRLLIYFAKTLAEGIPARFSGSGSGTDFTLTISSLEPEDFAVYYCQHHSDNPWTFGQGTKVEIKGGGGSGGGGSGGGGTGEVQLVQSGAEVKKPGESLKISCKGSGYSFTGYNMNWVRQMPGKGLEWMGNIDPYYGGTTYNRKFKGQVTISADKSISTAYLQWSSLKASDTAMYYCARSVGPFDYWGQGTLVTVSSDQEPKSSDKTHTSPPCPAPELLGGPSVFLFPPKPKDTLMISRTPEVTCVVVDVSHEDPEVKFNWYVDGVEVHNAKTKPREEQYNSTYRVVSVLTVLHQDWLNGKEYKCKVSNKALPAPIEKTISKAKGQPREPQVYTLPPSRDELTKNQVSLTCLVKGFYPSDIAVEWESNGQPENNYKTTPPVLDSDGSFFLYSKLTVDKSRWQQGNVFSCSVMHEALHNHYTQKSLSLSPGK

SEQ ID NO: 11698 - protein, 473 aa, Artificial Sequence
  source: /note="Description of Artificial Sequence: Synthetic polypeptide"
EIVLTQSPATLSLSPGERATLSCRASENVYSYLAWYQQKPGQAPRLLIYFAKTLAEGIPARFSGSGSGTDFTLTISSLEPEDFAVYYCQHHSDNPWTFGQGTKVEIKGGGGSGGGGSGGGGTGEVQLVQSGAEVKKPGESLKISCKGSGYSFTGYNMNWVRQMPGKGLEWMGNIDPYYGGTTYNRKFKGQVTISADKSISTAYLQWSSLKASDTAMYYCARSVGPFDSWGQGTLVTVSSDQEPKSSDKTHTSPPCPAPELLGGPSVFLFPPKPKDTLMISRTPEVTCVVVDVSHEDPEVKFNWYVDGVEVHNAKTKPREEQYNSTYRVVSVLTVLHQDWLNGKEYKCKVSNKALPAPIEKTISKAKGQPREPQVYTLPPSRDELTKNQVSLTCLVKGFYPSDIAVEWESNGQPENNYKTTPPVLDSDGSFFLYSKLTVDKSRWQQGNVFSCSVMHEALHNHYTQKSLSLSPGK

SEQ ID NO: 11699 - protein, 480 aa, Artificial Sequence
  source: /note="Description of Artificial Sequence: Synthetic polypeptide"
AVQLQQSGPESEKPGASVKISCKASGYSFTGYNMNWVKQNNGKSLEWIGNIDPYYGGTTYNRKFKGKATLTVDKSSSTAYMQLKSLTSEDSAVYYCARSVGPMDYWGQGTSVTVSSGGGGSGGGGSGGGGSGGGGSASEIVLTQSPATLSLSPGERATLSCRTSENVYSYLAWYQQKPGQAPRLLIYFAKTLAEGIPARFSGSGSGTDFTLTISSLEPEDFAVYYCQHHSDNPWTFGQGTKVEIKGSSEPKSSDKTHTSPPCPAPELLGGPSVFLFPPKPKDTLMISRTPEVTCVVVDVSHEDPEVKFNWYVDGVEVHNAKTKPREEQYNSTYRVVSVLTVLHQDWLNGKEYKCKVSNKALPAPIEKTISKAKGQPREPQVYTLPPSRDELTKNQVSLTCLVKGFYPSDIAVEWESNGQPENNYKTTPPVLDSDGSFFLYSKLTVDKSRWQQGNVFSCSVMHEALHNHYTQKSLSLSPGK

SEQ ID NO: 11700 - protein, 472 aa, Artificial Sequence
  source: /note="Description of Artificial Sequence: Synthetic polypeptide"
EIVLTQSPATLSLSPGERATLSCRTSENVYSYLAWYQQKPGQAPRLLIYFAKTLAEGIPARFSGSGSGTDFTLTISSLEPEDFAVYYCQHHSDNPWTFGQGTKVEIKGGGGSGGGGSGGGGASAVQLQQSGPESEKPGASVKISCKASGYSFTGYNMNWVKQNNGKSLEWIGNIDPYYGGTTYNRKFKGKATLTVDKSSSTAYMQLKSLTSEDSAVYYCARSVGPMDYWGQGTSVTVSSSEPKSSDKTHTSPPCPAPELLGGPSVFLFPPKPKDTLMISRTPEVTCVVVDVSHEDPEVKFNWYVDGVEVHNAKTKPREEQYNSTYRVVSVLTVLHQDWLNGKEYKCKVSNKALPAPIEKTISKAKGQPREPQVYTLPPSRDELTKNQVSLTCLVKGFYPSDIAVEWESNGQPENNYKTTPPVLDSDGSFFLYSKLTVDKSRWQQGNVFSCSVMHEALHNHYTQKSLSLSPGK

SEQ ID NO: 11701 - protein, 483 aa, Artificial Sequence; identical to SEQ ID NO: 6726
  source: /note="Description of Artificial Sequence: Synthetic polypeptide"

SEQ ID NO: 11702 - protein, 473 aa, Artificial Sequence
  source: /note="Description of Artificial Sequence: Synthetic polypeptide"
EIVLTQSPATLSLSPGERATLSCRASENVYSYLAWYQQKPGQAPRLLIYFAKTLAEGIPARFSGSGSGTDFTLTISSLEPEDFAVYYCQHHSDNPWTFGQGTKVEIKGGGGSGGGGSGGGGTGEVQLVQSGAEVKKPGESLKISCKGSGYSFTGYNMNWVRQMPGKGLEWMGNIDPYYGGTTYNRKFKGQVTISADKSISTAYLQWSSLKASDTAMYYCARSVGPMDVWGQGTTVTVSSDQEPKSSDKTHTSPPCPAPELLGGPSVFLFPPKPKDTLMISRTPEVTCVVVDVSHEDPEVKFNWYVDGVEVHNAKTKPREEQYNSTYRVVSVLTVLHQDWLNGKEYKCKVSNKALPAPIEKTISKAKGQPREPQVYTLPPSRDELTKNQVSLTCLVKGFYPSDIAVEWESNGQPENNYKTTPPVLDSDGSFFLYSKLTVDKSRWQQGNVFSCSVMHEALHNHYTQKSLSLSPGK

SEQ ID NO: 11703 - protein, 495 aa, Artificial Sequence
  source: /note="Description of Artificial Sequence: Synthetic polypeptide"
MDFQVQIFSFLLISASVIIARGVEIVLTQSPATLSLSPGERATLSCRTSENVYSYLAWYQQKPGQAPRLLIYFAKTLAEGIPARFSGSGSGTDFTLTISSLEPEDFAVYYCQHHSDNPWTFGQGTKVEIKGGGGSGGGGSGGGGASAVQLQQSGPESEKPGASVKISCKASGYSFTGYNMNWVKQNNGKSLEWIGNIDPYYGGTTYNRKFKGKATLTVDKSSSTAYMQLKSLTSEDSAVYYCARSVGPMDYWGQGTSVTVSSSEPKSSDKTHTSPPCPAPELLGGPSVFLFPPKPKDTLMISRTPEVTCVVVDVSHEDPEVKFNWYVDGVEVHNAKTKPREEQYNSTYRVVSVLTVLHQDWLNGKEYKCKVSNKALPAPIEKTISKAKGQPREPQVYTLPPSRDELTKNQVSLTCLVKGFYPSDIAVEWESNGQPENNYKTTPPVLDSDGSFFLYSKLTVDKSRWQQGNVFSCSVMHEALHNHYTQKSLSLSPGK

SEQ ID NO: 11704 - protein, 473 aa, Artificial Sequence
  source: /note="Description of Artificial Sequence: Synthetic polypeptide"
EIVLTQSPATLSLSPGERATLSCRASENVYSYLAWYQQKPGQAPRLLIYFAKTLAEGIPARFSGSGSGTDFTLTISSLEPEDFAVYYCQHHSDNPWTFGQGTKVEIKGGGGSGGGGSGGGGTGEVQLVQSGAEVKKPGESLKISCKGSGYSFTGYNMNWVRQMPGKGLEWMGNIDPYYGGTTYNRKFKGQVTISADKSISTAYLQWSSLKASDTAMYYCARSVGPFDPWGQGTLVTVSSDQEPKSSDKTHTSPPCPAPELLGGPSVFLFPPKPKDTLMISRTPEVTCVVVDVSHEDPEVKFNWYVDGVEVHNAKTKPREEQYNSTYRVVSVLTVLHQDWLNGKEYKCKVSNKALPAPIEKTISKAKGQPREPQVYTLPPSRDELTKNQVSLTCLVKGFYPSDIAVEWESNGQPENNYKTTPPVLDSDGSFFLYSKLTVDKSRWQQGNVFSCSVMHEALHNHYTQKSLSLSPGK

SEQ ID NO: 11705 - protein, 473 aa, Artificial Sequence
  source: /note="Description of Artificial Sequence: Synthetic polypeptide"
EIVLTQSPATLSLSPGERATLSCRASENVYSYLAWYQQKPGQAPRLLIYFAKTLAEGIPARFSGSGSGTDFTLTISSLEPEDFAVYYCQHHSDNPWTFGQGTKVEIKGGGGSGGGGSGGGGTGEVQLVQSGAEVKKPGESLKISCKGSGYSFTGYNMNWVRQMPGKGLEWMGNIDPYYGGTTYNRKFKGQVTISADKSISTAYLQWSSLKASDTAMYYCARSVGPMEHWGQGTLVTVSSDQEPKSSDKTHTSPPCPAPELLGGPSVFLFPPKPKDTLMISRTPEVTCVVVDVSHEDPEVKFNWYVDGVEVHNAKTKPREEQYNSTYRVVSVLTVLHQDWLNGKEYKCKVSNKALPAPIEKTISKAKGQPREPQVYTLPPSRDELTKNQVSLTCLVKGFYPSDIAVEWESNGQPENNYKTTPPVLDSDGSFFLYSKLTVDKSRWQQGNVFSCSVMHEALHNHYTQKSLSLSPGK

SEQ ID NO: 11706 - protein, 473 aa, Artificial Sequence
  source: /note="Description of Artificial Sequence: Synthetic polypeptide"
EIVLTQSPATLSLSPGERATLSCRASENVYSYLAWYQQKPGQAPRLLIYFAKTLAEGIPARFSGSGSGTDFTLTISSLEPEDFAVYYCQHHSDNPWTFGQGTKVEIKGGGGSGGGGSGGGGTGEVQLVQSGAEVKKPGESLKISCKGSGYSFTGYNMNWVRQMPGKGLEWMGNIDPYYGGTTYNRKFKGQVTISADKSISTAYLQWSSLKASDTAMYYCARSVGPFDVWGQGTMVTVSSDQEPKSSDKTHTSPPCPAPELLGGPSVFLFPPKPKDTLMISRTPEVTCVVVDVSHEDPEVKFNWYVDGVEVHNAKTKPREEQYNSTYRVVSVLTVLHQDWLNGKEYKCKVSNKALPAPIEKTISKAKGQPREPQVYTLPPSRDELTKNQVSLTCLVKGFYPSDIAVEWESNGQPENNYKTTPPVLDSDGSFFLYSKLTVDKSRWQQGNVFSCSVMHEALHNHYTQKSLSLSPGK

SEQ ID NO: 11707 - protein, 473 aa, Artificial Sequence
  source: /note="Description of Artificial Sequence: Synthetic polypeptide"
EIVLTQSPATLSLSPGERATLSCRASENVYSYLAWYQQKPGQAPRLLIYFAKTLAEGIPARFSGSGSGTDFTLTISSLEPEDFAVYYCQHHSDNPWTFGQGTKVEIKGGGGSGGGGSGGGGTGEVQLVQSGAEVKKPGESLKISCKGSGYSFTGYNMNWVRQMPGKGLEWMGNIDPYYGGTTYNRKFKGQVTISADKSISTAYLQWSSLKASDTAMYYCARSVGPFDIWGQGTMVTVSSDQEPKSSDKTHTSPPCPAPELLGGPSVFLFPPKPKDTLMISRTPEVTCVVVDVSHEDPEVKFNWYVDGVEVHNAKTKPREEQYNSTYRVVSVLTVLHQDWLNGKEYKCKVSNKALPAPIEKTISKAKGQPREPQVYTLPPSRDELTKNQVSLTCLVKGFYPSDIAVEWESNGQPENNYKTTPPVLDSDGSFFLYSKLTVDKSRWQQGNVFSCSVMHEALHNHYTQKSLSLSPGK

SEQ ID NO: 11708 - protein, 500 aa, Artificial Sequence
  source: /note="Description of Artificial Sequence: Synthetic polypeptide"
MEAPAQLLFLLLLWLPDTTGAVQLQQSGPESEKPGASVKISCKASGYSFTGYNMNWVKQNNGKSLEWIGNIDPYYGGTTYNRKFKGKATLTVDKSSSTAYMQLKSLTSEDSAVYYCARSVGPMDYWGQGTSVTVSSGGGGSGGGGSGGGGSGGGGSASEIVLTQSPATLSLSPGERATLSCRTSENVYSYLAWYQQKPGQAPRLLIYFAKTLAEGIPARFSGSGSGTDFTLTISSLEPEDFAVYYCQHHSDNPWTFGQGTKVEIKGSSEPKSSDKTHTCPPCPAPELLGGPSVFLFPPKPKDTLMISRTPEVTCVVVDVSHEDPEVKFNWYVDGVEVHNAKTKPREEQYNSTYRVVSVLTVLHQDWLNGKEYKCKVSNKALPAPIEKTISKAKGQPREPQVYTLPPSRDELTKNQVSLTCLVKGFYPSDIAVEWESNGQPENNYKTTPPVLDSDGSFFLYSKLTVDKSRWQQGNVFSCSVMHEALHNHYTQKSLSLSPGK

SEQ ID NO: 11709 - protein, 492 aa, Artificial Sequence
  source: /note="Description of Artificial Sequence: Synthetic polypeptide"
MEAPAQLLFLLLLWLPDTTGEIVLTQSPATLSLSPGERATLSCRTSENVYSYLAWYQQKPGQAPRLLIYFAKTLAEGIPARFSGSGSGTDFTLTISSLEPEDFAVYYCQHHSDNPWTFGQGTKVEIKGGGGSGGGGSGGGGASAVQLQQSGPESEKPGASVKISCKASGYSFTGYNMNWVKQNNGKSLEWIGNIDPYYGGTTYNRKFKGKATLTVDKSSSTAYMQLKSLTSEDSAVYYCARSVGPMDYWGQGTSVTVSSSEPKSSDKTHTSPPCPAPELLGGPSVFLFPPKPKDTLMISRTPEVTCVVVDVSHEDPEVKFNWYVDGVEVHNAKTKPREEQYNSTYRVVSVLTVLHQDWLNGKEYKCKVSNKALPAPIEKTISKAKGQPREPQVYTLPPSRDELTKNQVSLTCLVKGFYPSDIAVEWESNGQPENNYKTTPPVLDSDGSFFLYSKLTVDKSRWQQGNVFSCSVMHEALHNHYTQKSLSLSPGK

SEQ ID NO: 11710 - protein, 492 aa, Artificial Sequence
  source: /note="Description of Artificial Sequence: Synthetic polypeptide"
MEAPAQLLFLLLLWLPDTTGEIVLTQSPATLSLSPGERATLSCRTSENVYSYLAWYQQKPGQAPRLLIYFAKTLAEGIPARFSGSGSGTDFTLTISSLEPEDFAVYYCQHHSDNPWTFGQGTKVEIKGGGGSGGGGSGGGGASAVQLQQSGPESEKPGASVKISCKASGYSFTGYNMNWVKQNNGKSLEWIGNIDPYYGGTTYNRKFKGKATLTVDKSSSTAYMQLKSLTSEDSAVYYCARSVGPMDYWGQGTSVTVSSSEPKSSDKTHTCPPCPAPELLGGPSVFLFPPKPKDTLMISRTPEVTCVVVDVSHEDPEVKFNWYVDGVEVHNAKTKPREEQYNSTYRVVSVLTVLHQDWLNGKEYKCKVSNKALPAPIEKTISKAKGQPREPQVYTLPPSRDELTKNQVSLTCLVKGFYPSDIAVEWESNGQPENNYKTTPPVLDSDGSFFLYSKLTVDKSRWQQGNVFSCSVMHEALHNHYTQKSLSLSPGK

SEQ ID NO: 11711 - protein, 492 aa, Artificial Sequence
  source: /note="Description of Artificial Sequence: Synthetic polypeptide"
MEAPAQLLFLLLLWLPDTTGEIVLTQSPATLSLSPGERATLSCRTSENVYSYLAWYQQKPGQAPRLLIYFAKTLAEGIPARFSGSGSGTDFTLTISSLEPEDFAVYYCQHHSDNPWTFGQGTKVEIKGGGGSGGGGSGGGGASQVQLVESGGGVVQPGRSLRLSCAASGFTFSGYNMNWVRQMPGKGLEWMGNIDPYYGGTTYNRKFKGQVTISADKSISTAYLQWSSLKASDTAMYYCARSVGPMDYWGRGTLVTVSSSEPKSSDKTHTCPPCPAPELLGGPSVFLFPPKPKDTLMISRTPEVTCVVVDVSHEDPEVKFNWYVDGVEVHNAKTKPREEQYNSTYRVVSVLTVLHQDWLNGKEYKCKVSNKALPAPIEKTISKAKGQPREPQVYTLPPSRDELTKNQVSLTCLVKGFYPSDIAVEWESNGQPENNYKTTPPVLDSDGSFFLYSKLTVDKSRWQQGNVFSCSVMHEALHNHYTQKSLSLSPGK

SEQ ID NO: 11712 - protein, 492 aa, Artificial Sequence; identical to SEQ ID NO: 11692
  source: /note="Description of Artificial Sequence: Synthetic polypeptide"

SEQ ID NO: 11713 - protein, 492 aa, Artificial Sequence
  source: /note="Description of Artificial Sequence: Synthetic polypeptide"
MEAPAQLLFLLLLWLPDTTGEIVLTQSPATLSLSPGERATLSCRTSENVYSYLAWYQQKPGQAPRLLIYFAKTLAEGIPARFSGSGSGTDFTLTISSLEPEDFAVYYCQHHSDNPWTFGQGTKVEIKGGGGSGGGGSGGGGASEVQLVESGGGLVQPGGSLRLSCAASGFTFSGYNMNWVRQMPGKGLEWMGNIDPYYGGTTYNRKFKGQVTISADKSISTAYLQWSSLKASDTAMYYCARSVGPMDYWGRGTLVTVSSSEPKSSDKTHTSPPCPAPELLGGPSVFLFPPKPKDTLMISRTPEVTCVVVDVSHEDPEVKFNWYVDGVEVHNAKTKPREEQYNSTYRVVSVLTVLHQDWLNGKEYKCKVSNKALPAPIEKTISKAKGQPREPQVYTLPPSRDELTKNQVSLTCLVKGFYPSDIAVEWESNGQPENNYKTTPPVLDSDGSFFLYSKLTVDKSRWQQGNVFSCSVMHEALHNHYTQKSLSLSPGK

SEQ ID NO: 11714 - protein, 492 aa, Artificial Sequence
  source: /note="Description of Artificial Sequence: Synthetic polypeptide"
MEAPAQLLFLLLLWLPDTTGEIVLTQSPATLSLSPGERATLSCRTSENVYSYLAWYQQKPGQAPRLLIYFAKTLAEGIPARFSGSGSGTDFTLTISSLEPEDFAVYYCQHHSDNPWTFGQGTKVEIKGGGGSGGGGSGGGGASEVQLVESGGGLVQPGGSLRLSCAASGFTFSGYNMNWVRQMPGKGLEWMGNIDPYYGGTTYNRKFKGQVTISADKSISTAYLQWSSLKASDTAMYYCARSVGPMDYWGRGTLVTVSSSEPKSSDKTHTCPPCPAPELLGGPSVFLFPPKPKDTLMISRTPEVTCVVVDVSHEDPEVKFNWYVDGVEVHNAKTKPREEQYNSTYRVVSVLTVLHQDWLNGKEYKCKVSNKALPAPIEKTISKAKGQPREPQVYTLPPSRDELTKNQVSLTCLVKGFYPSDIAVEWESNGQPENNYKTTPPVLDSDGSFFLYSKLTVDKSRWQQGNVFSCSVMHEALHNHYTQKSLSLSPGK

SEQ ID NO: 11715 - protein, 492 aa, Artificial Sequence
  source: /note="Description of Artificial Sequence: Synthetic polypeptide"
MEAPAQLLFLLLLWLPDTTGEIVLTQSPATLSLSPGERATLSCRTSENVYSYLAWYQQKPGQAPRLLIYFAKTLAEGIPARFSGSGSGTDFTLTISSLEPEDFAVYYCQHHSDNPWTFGQGTKVEIKGGGGSGGGGSGGGGASEVQLVESGGGSVQPGGSLRLSCAASGFTFSGYNMNWVRQMPGKGLEWMGNIDPYYGGTTYNRKFKGQVTISADKSISTAYLQWSSLKASDTAMYYCARSVGPMDYWGRGTLVTVSSSEPKSSDKTHTSPPCPAPELLGGPSVFLFPPKPKDTLMISRTPEVTCVVVDVSHEDPEVKFNWYVDGVEVHNAKTKPREEQYNSTYRVVSVLTVLHQDWLNGKEYKCKVSNKALPAPIEKTISKAKGQPREPQVYTLPPSRDELTKNQVSLTCLVKGFYPSDIAVEWESNGQPENNYKTTPPVLDSDGSFFLYSKLTVDKSRWQQGNVFSCSVMHEALHNHYTQKSLSLSPGK

SEQ ID NO: 11716 - protein, 492 aa, Artificial Sequence
  source: /note="Description of Artificial Sequence: Synthetic polypeptide"
MEAPAQLLFLLLLWLPDTTGEIVLTQSPATLSLSPGERATLSCRTSENVYSYLAWYQQKPGQAPRLLIYFAKTLAEGIPARFSGSGSGTDFTLTISSLEPEDFAVYYCQHHSDNPWTFGQGTKVEIKGGGGSGGGGSGGGGASEVQLVESGGGSVQPGGSLRLSCAASGFTFSGYNMNWVRQMPGKGLEWMGNIDPYYGGTTYNRKFKGQVTISADKSISTAYLQWSSLKASDTAMYYCARSVGPMDYWGRGTLVTVSSSEPKSSDKTHTCPPCPAPELLGGPSVFLFPPKPKDTLMISRTPEVTCVVVDVSHEDPEVKFNWYVDGVEVHNAKTKPREEQYNSTYRVVSVLTVLHQDWLNGKEYKCKVSNKALPAPIEKTISKAKGQPREPQVYTLPPSRDELTKNQVSLTCLVKGFYPSDIAVEWESNGQPENNYKTTPPVLDSDGSFFLYSKLTVDKSRWQQGNVFSCSVMHEALHNHYTQKSLSLSPGK

SEQ ID NO: 11717 - protein, 493 aa, Artificial Sequence
  source: /note="Description of Artificial Sequence: Synthetic polypeptide"
MEAPAQLLFLLLLWLPDTTGEIVLTQSPATLSLSPGERATLSCRASQSVYSYLAWYQQKPGQAPRLLIYFAKTLAEGIPARFSGSGSGTDFTLTISSLEPEDFAVYYCQHHSDNPWTFGQGTKVEIKGGGGSGGGGSGGGGTGEVQLVQSGAEVKKPGESLKISCKGSGYSFTGYNMNWVRQMPGKGLEWMGNIDPYYGGTTYNRKFKGQVTISADKSISTAYLQWSSLKASDTAMYYCARSVGPMDYWGRGTLVTVSSDQEPKSSDKTHTSPPCPAPELLGGPSVFLFPPKPKDTLMISRTPEVTCVVVDVSHEDPEVKFNWYVDGVEVHNAKTKPREEQYNSTYRVVSVLTVLHQDWLNGKEYKCKVSNKALPAPIEKTISKAKGQPREPQVYTLPPSRDELTKNQVSLTCLVKGFYPSDIAVEWESNGQPENNYKTTPPVLDSDGSFFLYSKLTVDKSRWQQGNVFSCSVMHEALHNHYTQKSLSLSPGK

SEQ ID NO: 11718 - protein, 493 aa, Artificial Sequence
  source: /note="Description of Artificial Sequence: Synthetic polypeptide"
MEAPAQLLFLLLLWLPDTTGEIVLTQSPATLSLSPGERATLSCRASENVYSYLAWYQQKPGQAPRLLIYFAKTLAEGIPARFSGSGSGTDFTLTISSLEPEDFAVYYCQHHSDNPWTFGQGTKVEIKGGGGSGGGGSGGGGTGEVQLVQSGAEVKKPGESLKISCKGSGYSFTGYNMNWVRQMPGKGLEWMGNIDPYYGGTTYNRKFKGQVTISADKSISTAYLQWSSLKASDTAMYYCARSVGPFDYWGQGTLVTVSSDQEPKSSDKTHTSPPCPAPELLGGPSVFLFPPKPKDTLMISRTPEVTCVVVDVSHEDPEVKFNWYVDGVEVHNAKTKPREEQYNSTYRVVSVLTVLHQDWLNGKEYKCKVSNKALPAPIEKTISKAKGQPREPQVYTLPPSRDELTKNQVSLTCLVKGFYPSDIAVEWESNGQPENNYKTTPPVLDSDGSFFLYSKLTVDKSRWQQGNVFSCSVMHEALHNHYTQKSLSLSPGK

SEQ ID NO: 11719 - protein, 493 aa, Artificial Sequence
  source: /note="Description of Artificial Sequence: Synthetic polypeptide"
MEAPAQLLFLLLLWLPDTTGEIVLTQSPATLSLSPGERATLSCRASENVYSYLAWYQQKPGQAPRLLIYFAKTLAEGIPARFSGSGSGTDFTLTISSLEPEDFAVYYCQHHSDNPWTFGQGTKVEIKGGGGSGGGGSGGGGTGEVQLVQSGAEVKKPGESLKISCKGSGYSFTGYNMNWVRQMPGKGLEWMGNIDPYYGGTTYNRKFKGQVTISADKSISTAYLQWSSLKASDTAMYYCARSVGPFDSWGQGTLVTVSSDQEPKSSDKTHTSPPCPAPELLGGPSVFLFPPKPKDTLMISRTPEVTCVVVDVSHEDPEVKFNWYVDGVEVHNAKTKPREEQYNSTYRVVSVLTVLHQDWLNGKEYKCKVSNKALPAPIEKTISKAKGQPREPQVYTLPPSRDELTKNQVSLTCLVKGFYPSDIAVEWESNGQPENNYKTTPPVLDSDGSFFLYSKLTVDKSRWQQGNVFSCSVMHEALHNHYTQKSLSLSPGK

SEQ ID NO: 11720 - protein, 493 aa, Artificial Sequence
  source: /note="Description of Artificial Sequence: Synthetic polypeptide"
MEAPAQLLFLLLLWLPDTTGEIVLTQSPATLSLSPGERATLSCRTSENVYSYLAWYQQKPGQAPRLLIYFAKTLAEGIPARFSGSGSGTDFTLTISSLEPEDFAVYYCQHHSDNPWTFGQGTKVEIKGGGGSGGGGSGGGGTGEVQLVQSGAEVKKPGESLKISCKGSGYSFTGYNMNWVRQMPGKGLEWMGNIDPYYGGTTYNRKFKGQVTISADKSISTAYLQWSSLKASDTAMYYCARSVGPMDYWGRGTLVTVSSDQEPKSSDKTHTSPPCPAPELLGGPSVFLFPPKPKDTLMISRTPEVTCVVVDVSHEDPEVKFNWYVDGVEVHNAKTKPREEQYNSTYRVVSVLTVLHQDWLNGKEYKCKVSNKALPAPIEKTISKAKGQPREPQVYTLPPSRDELTKNQVSLTCLVKGFYPSDIAVEWESNGQPENNYKTTPPVLDSDGSFFLYSKLTVDKSRWQQGNVFSCSVMHEALHNHYTQKSLSLSPGK

SEQ ID NO: 11721 - protein, 493 aa, Artificial Sequence
  source: /note="Description of Artificial Sequence: Synthetic polypeptide"
MEAPAQLLFLLLLWLPDTTGEIVLTQSPATLSLSPGERATLSCRTSENVYSYLAWYQQKPGQAPRLLIYFAKTLAEGIPARFSGSGSGTDFTLTISSLEPEDFAVYYCQHHSDNPWTFGQGTKVEIKGGGGSGGGGSGGGGSSEVQLVQSGAEVKKPGESLKISCKGSGYSFTGYNMNWVRQMPGKGLEWMGNIDPYYGGTTYNRKFKGQVTISADKSISTAYLQWSSLKASDTAMYYCARSVGPMDYWGRGTLVTVSSDQEPKSSDKTHTSPPCPAPELLGGPSVFLFPPKPKDTLMISRTPEVTCVVVDVSHEDPEVKFNWYVDGVEVHNAKTKPREEQYNSTYRVVSVLTVLHQDWLNGKEYKCKVSNKALPAPIEKTISKAKGQPREPQVYTLPPSRDELTKNQVSLTCLVKGFYPSDIAVEWESNGQPENNYKTTPPVLDSDGSFFLYSKLTVDKSRWQQGNVFSCSVMHEALHNHYTQKSLSLSPGK

SEQ ID NO: 11722 - protein, 493 aa, Artificial Sequence
  source: /note="Description of Artificial Sequence: Synthetic polypeptide"
MEAPAQLLFLLLLWLPDTTGEIVLTQSPATLSLSPGERATLSCRASENVYSYLAWYQQKPGQAPRLLIYFAKTLAEGIPARFSGSGSGTDFTLTISSLEPEDFAVYYCQHHSDNPWTFGQGTKVEIKGGGGSGGGGSGGGGTGEVQLVQSGAEVKKPGESLKISCKGSGYSFTGYNMNWVRQMPGKGLEWMGNIDPYYGGTTYNRKFKGQVTISADKSISTAYLQWSSLKASDTAMYYCARSVGPFDLWGRGTLVTVSSDQEPKSSDKTHTSPPCPAPELLGGPSVFLFPPKPKDTLMISRTPEVTCVVVDVSHEDPEVKFNWYVDGVEVHNAKTKPREEQYNSTYRVVSVLTVLHQDWLNGKEYKCKVSNKALPAPIEKTISKAKGQPREPQVYTLPPSRDELTKNQVSLTCLVKGFYPSDIAVEWESNGQPENNYKTTPPVLDSDGSFFLYSKLTVDKSRWQQGNVFSCSVMHEALHNHYTQKSLSLSPGK

SEQ ID NO: 11723 - protein, 493 aa, Artificial Sequence
  source: /note="Description of Artificial Sequence: Synthetic polypeptide"
MEAPAQLLFLLLLWLPDTTGEIVLTQSPATLSLSPGERATLSCRASENVYSYLAWYQQKPGQAPRLLIYFAKTLAEGIPARFSGSGSGTDFTLTISSLEPEDFAVYYCQHHSDNPWTFGQGTKVEIKGGGGSGGGGSGGGGASEVQLVQSGAEVKKPGESLKISCKGSGYSFTSYNMNWVRQMPGKGLEWMGNIDPYYGGTNYAQKFQGQVTISADKSISTAYLQWSSLKASDTAMYYCARSVGPMDYWGRGTLVTVSSDQEPKSSDKTHTSPPCPAPELLGGPSVFLFPPKPKDTLMISRTPEVTCVVVDVSHEDPEVKFNWYVDGVEVHNAKTKPREEQYNSTYRVVSVLTVLHQDWLNGKEYKCKVSNKALPAPIEKTISKAKGQPREPQVYTLPPSRDELTKNQVSLTCLVKGFYPSDIAVEWESNGQPENNYKTTPPVLDSDGSFFLYSKLTVDKSRWQQGNVFSCSVMHEALHNHYTQKSLSLSPGK

SEQ ID NO: 11724 - protein, 485 aa, Artificial Sequence
  source: /note="Description of Artificial Sequence: Synthetic polypeptide"
MEAPAQLLFLLLLWLPDTTGEIVLTQSPATLSLSPGERATLSCRASENVYSYLAWYQQKPGQAPRLLIYFAKTLAEGIPARFSGSGSGTDFTLTISSLEPEDFAVYYCQHHSDNPWTFGQGTKVEIKGGGGSGGGGSGGGGSGGGASEVQLVQSGAEVKKPGESLKISCKGSGYSFTGYNMNWVRQMPGKGLEWMGNIDPYYGGTTYNRKFKGQVTISADKSISTAYLQWSSLKASDTAMYYCARSVGPFDSWGQGTLVTVSSCPPCPAPELLGGPSVFLFPPKPKDTLMISRTPEVTCVVVDVSHEDPEVKFNWYVDGVEVHNAKTKPREEQYNSTYRVVSVLTVLHQDWLNGKEYKCKVSNKALPAPIEKTISKAKGQPREPQVYTLPPSRDELTKNQVSLTCLVKGFYPSDIAVEWESNGQPENNYKTTPPVLDSDGSFFLYSKLTVDKSRWQQGNVFSCSVMHEALHNHYTQKSLSLSPGK

SEQ ID NO: 11725 - protein, 493 aa, Artificial Sequence
  source: /note="Description of Artificial Sequence: Synthetic polypeptide"
MEAPAQLLFLLLLWLPDTTGEIVLTQSPATLSLSPGERATLSCRTSENVYSYLAWYQQKPGQAPRLLIYFAKTLAEGIPARFSGSGSGTDFTLTISSLEPEDFAVYYCQHHSDNPWTFGQGTKVEIKGGGGSGGGGSGGGGASEVQLVQSGAEVKKPGESLKISCKGSGYSFTGYNMNWVRQMPGKGLEWMGNIDPYYGGTTYNRKFKGQVTISADKSISTAYLQWSSLKASDTAMYYCARSVGPMDYWGRGTLVTVSSDQEPKSSDKTHTSPPCPAPELLGGPSVFLFPPKPKDTLMISRTPEVTCVVVDVSHEDPEVKFNWYVDGVEVHNAKTKPREEQYNSTYRVVSVLTVLHQDWLNGKEYKCKVSNKALPAPIEKTISKAKGQPREPQVYTLPPSRDELTKNQVSLTCLVKGFYPSDIAVEWESNGQPENNYKTTPPVLDSDGSFFLYSKLTVDKSRWQQGNVFSCSVMHEALHNHYTQKSLSLSPGK

SEQ ID NO: 11726 - protein, 493 aa, Artificial Sequence
  source: /note="Description of Artificial Sequence: Synthetic polypeptide"
MEAPAQLLFLLLLWLPDTTGEIVLTQSPATLSLSPGERATLSCRTSENVYSYLAWYQQKPGQAPRLLIYFAKTLAEGIPARFSGSGSGTDFTLTISSLEPEDFAVYYCQHHSDNPWTFGQGTKVEIKGGGGSGGGGSGGGGASEVQLVQSGAEVKKPGESLRISCKGSGYSFTGYNMNWVRQMPGKGLEWMGNIDPYYGGTTYNRKFKGQVTISADKSISTAYLQWSSLKASDTAMYYCARSVGPMDYWGRGTLVTVSSDQEPKSSDKTHTSPPCPAPELLGGPSVFLFPPKPKDTLMISRTPEVTCVVVDVSHEDPEVKFNWYVDGVEVHNAKTKPREEQYNSTYRVVSVLTVLHQDWLNGKEYKCKVSNKALPAPIEKTISKAKGQPREPQVYTLPPSRDELTKNQVSLTCLVKGFYPSDIAVEWESNGQPENNYKTTPPVLDSDGSFFLYSKLTVDKSRWQQGNVFSCSVMHEALHNHYTQKSLSLSPGK

SEQ ID NO: 11727 - protein, 113 aa, Artificial Sequence
  source: /note="Description of Artificial Sequence: Synthetic polypeptide"
EVQLLESGGGLVQPGGSLRLSCAASGFTFRDYEWWVRQAPGKGLERVSAINPQGTRTYYADSVGRFTISRDNSNTLYLQMNSLRAEDTAVYYCAKLPFYFHEWGQGTLVTVSS

SEQ ID NO: 11728 - protein, 118 aa, Artificial Sequence
  source: /note="Description of Artificial Sequence: Synthetic polypeptide"
EVQLLESGGGLVQPGGSLRLSCAASGFTFADEPMTWVRQAPGKGLEWVSRIPPEGAPTYYADSVGRFTISRDNSKNTLYLQMNSLRAEDTAVYYCAKGLIPDLQFDYWGQGTLVTVSS

SEQ ID NO: 11729 - protein, 118 aa, Artificial Sequence
  source: /note="Description of Artificial Sequence: Synthetic polypeptide"
EVQLLESGGGLVQPGGSLRLSCAASGFTFQDSDMTWVRQAPGGLEWVSAIAAPGGSTYYADSVKGRFTISRDNSKNTLYLQMNSLRAEDTAVYYCAKDRIPNLRFDYWGQGTLVTVSS

SEQ ID NO: 11730 - protein, 117 aa, Artificial Sequence
  source: /note="Description of Artificial Sequence: Synthetic polypeptide"
EVQLLESGGGLVQPGGSLRLSCAASGFTFVSDTMSVRQAPGGLEWVSRIDGTGGDTYYADSVKGRFTISRDNSKNTLYLQMNSLRAEDTAVYYCAKGQVPELLFDYWGQGTLVTVSS

SEQ ID NO: 11731 - protein, 117 aa, Artificial Sequence
  source: /note="Description of Artificial Sequence: Synthetic polypeptide"
EVQLLESGGGLVQPGGSLRLSCAASGFTFQDSDMTWVRQAPGGLEWVSAIAAPGGSTYYADSVKGRFTISRDNSNTLYLQMNSLRAEDTAVYYCAKDRIPNLVFDYWGQGTLVTVSS

SEQ ID NO: 11732 - protein, 118 aa, Artificial Sequence
  source: /note="Description of Artificial Sequence: Synthetic polypeptide"
EVQLLESGGGLVQPGGSLRLSCAAAGFTFDLAETWVRQAPGKGLEWVSRIDEDGASTYYADSVKGRFTISRDNSKNTLYLQMNSLRAEDAAVYYCAEGVIPSLTFDYWGQGTLVTVSS

SEQ ID NO: 11733 - protein, 116 aa, Artificial Sequence
  source: /note="Description of Artificial Sequence: Synthetic polypeptide"
EVQLLESGGGLVQPGGSLRLSCAASGFTFTDKHMSWVRQAPGGLEVSRISPDGTYTYYADSVKGRFTISRDNSKNTLYLQMNSLRAEDAAVYYCAEGVIPSLTFDYGQGTLVTVSS

SEQ ID NO: 11734 - protein, 119 aa, Artificial Sequence
  source: /note="Description of Artificial Sequence: Synthetic polypeptide"
EVQLLESGGGLVQPGGSLRLSCAASGFTFAEDDMTWVRQAPGKGLEWVSRIAVDGDRTYYADSVKGRFTISRDNSKNTLYLQMNSLRTEDTAVYYCAKGKTPHLVFDYWGQGTLVTVSS

SEQ ID NO: 11735 - protein, 118 aa, Artificial Sequence
  source: /note="Description of Artificial Sequence: Synthetic polypeptide"
EVQLLESGGGLVQPGGSLRLSCAAAGFTFDLAEMTWVRQAPGGLEWVSRIDEDGASTYYADSVKGRFTISRDNSKNTLYLQMNSLRAEDTAVYYCAKGQVPALVFDYWGQGTLVTVSS

SEQ ID NO: 11736 - protein, 118 aa, Artificial Sequence
  source: /note="Description of Artificial Sequence: Synthetic polypeptide"
EVQLLESGGGLVQPGGSLRLSCAASGFTFEDSMMSWVRQAPGKGLEWVSRIDPGGAQTYYADSVGRFTISRDNSKNTLYLQMNSLRAEDTAVYYCAKGVTPDLTFDYWGQGTLVTVSS

SEQ ID NO: 11737 - protein, 117 aa, Artificial Sequence
  source: /note="Description of Artificial Sequence: Synthetic polypeptide"
EVQLLESGGGLVQPGGSLRLSCAASGFTFEHADMSWVRQASGGLEWVSRIDNSGQSTYYADSVKGRFTISRDNSNTLYLQMNSLRAEDTAVYYCAKGVTPDLTFDYWGQGTLVTVSS

SEQ ID NO: 11738 - protein, 115 aa, Artificial Sequence
  source: /note="Description of Artificial Sequence: Synthetic polypeptide"
EVQLLESGGGLVQPGGSLRLSCAASGFTFEWYEMQWVRQAPGKGLEWVSAISGDGYRTYYADSVGRFTISRDNSKNTLYLQMNSLRAEDTAVYYCAKELGYFDYWGQGTLVTVSS

SEQ ID NO: 11739 - protein, 118 aa, Artificial Sequence
  source: /note="Description of Artificial Sequence: Synthetic polypeptide"
EVQLLESGGGLVQPGGSLRLSCAASGFTFSEAEMNWVRQAPGKGLEWVSRITTDGDSTYYADSVKGRFTISRDNSNTLYLQMNSLRAEDTAVYYCAKGRIPTLHFDYWGQGTLVTVSS

SEQ ID NO: 11740 - protein, 118 aa, Artificial Sequence
  source: /note="Description of Artificial Sequence: Synthetic polypeptide"
EVQLLESGGGLVQPGGSLRLSCAASGFTFDDSDMTWVRQAPGSLEWVSYIRGDDDETYYADSVKGRFTISRDNSKNTLYLQMNSLRAEDTAVYYCAKNRIPDLVFDYWGQGTLVTVSS

SEQ ID NO: 11741 - protein, 121 aa, Artificial Sequence
  source: /note="Description of Artificial Sequence: Synthetic polypeptide"
EVQLLESGGGLVQPGGSLRLSCAASGFTFNVADMQWVRQAPGKGLEWVSSISPNGWDTYYADSVKGRFTISRDNSKNTLYLQMNSLRAEDTAVYYCAKHASTEGPTAFDYWGQGTLVTVSS

SEQ ID NO: 11742 - protein, 115 aa, Artificial Sequence
  source: /note="Description of Artificial Sequence: Synthetic polypeptide"
EVQLLESGGGLVQPGGSLRLSCAASGFTFGPYDMGWVRQAPGKGLEWVSWISAHGSFTYYADSVKGRFTISRDNSKNTLYLQMNSLRAEDTAVYYCAKWPYFDYWGQGTLVTVSS

SEQ ID NO: 11743 - protein, 119 aa, Artificial Sequence
  source: /note="Description of Artificial Sequence: Synthetic polypeptide"
EVQLLESGGGLVQPGGSLRLSCAASGFTFGSGSMSWVRQAPGKGLEWVSRIGSNGADTYYADSVKGRFTISRDNSKNTLYLQMNSLRAEDTAVYYCAKGMVPNLVFDYWGQGTLVTVSS

SEQ ID NO: 11744 - protein, 117 aa, Artificial Sequence
  source: /note="Description of Artificial Sequence: Synthetic polypeptide"
EVQLLESGGGLVQPGGSLRLSCAASGFTFNRFDMTWVRQAPGKGLEVSAISGSGGSTYYADSVKGRFTISRDNSNTLYLQMNSLRAEDTAVYYCAKDRIPNLVFDYWGQGTLVTVSS

SEQ ID NO: 11745 - protein, 115 aa, Artificial Sequence
  source: /note="Description of Artificial Sequence: Synthetic polypeptide"
EVQLLESGGGLVQPGGSLRLSCAASGFTFGESDMKWVRQAPGGLEWVSSISPNGWDTYYADSVGRFTISRDNSKNTLYLQMNSLRAEDTAVYYCASPSSRLKFDYWGQGTLTVSS

SEQ ID NO: 11746 - protein, 117 aa, Artificial Sequence
  source: /note="Description of Artificial Sequence: Synthetic polypeptide"
EVQLLESGGGLVQPGGSLRLSCAASGFTFDSSEMSVRQAPGKGLEWVSSIENQGGATYYADSVKGRFTISRDNSKNTLYLQMNSLRAEDTAVYYCAKDRIPLVFDYWGQGTLVTVSS

SEQ ID NO: 11747 - protein, 116 aa, Artificial Sequence
  source: /note="Description of Artificial Sequence: Synthetic polypeptide"
EVQLLESGGGLVQPGGSLRLSCAASGFTLDAYPMYWVRQAPGKGLEWVSWIASGGGATYYADSVKGRFTISRDNSKNTLYLQMNSLRAEDTAVYYCAKRTKNFDYWGQGTLVTVSS

SEQ ID NO: 11748 - protein, 118 aa, Artificial Sequence
  source: /note="Description of Artificial Sequence: Synthetic polypeptide"
EVQLLESGGGLVQPGGSLRLSCAASGFTFMSYSMAWVRQAPGKGLEWVSGITSNGNRTYYADSVGRFTISRDNSKNTLYLQMNSLRAEDTAVYYCASTGANSRNFDYWGQGTLVTVSS

SEQ ID NO: 11749 - protein, 113 aa, Artificial Sequence
  source: /note="Description of Artificial Sequence: Synthetic polypeptide"
EVQLLESGGGLVQPGGSLRLSCAASGFTFEEEEMIWVRQAPGGLEVSAISGSGGSTYYADSVKGRFTISRDNSKNTLYLQMNSLRAEDTAVYYCAKEPFFDYWGQGTLVTVSS

SEQ ID NO: 11750 - protein, 119 aa, Artificial Sequence
  source: /note="Description of Artificial Sequence: Synthetic polypeptide"
EVQLLESGGGLVQPGGSLRLSCAASGFTFEGYLMSWVRQAPGKGLEWVSSIAANGMQTYYADSVGRFTISRDNSKNTLYLQMNSLRAEDTAVYYCAKKPRGIWDGDFDYGQGTLVTVSS

SEQ ID NO: 11751 - protein, 118 aa, Artificial Sequence
  source: /note="Description of Artificial Sequence: Synthetic polypeptide"
EVQLLESGGGLVQPGGSLRLSCAASGFTFHESTMTWVRQAPGKGLEWVSTIRHPGEFTYYADSVKGRFTISRDNSNTLYLQMNSLRAGDTAVYYCAKGLIPDLQFDYWGQGTLVTVSS

SEQ ID NO: 11752 - protein, 120 aa, Artificial Sequence
  source: /note="Description of Artificial Sequence: Synthetic polypeptide"
EVQLLESGGGLVQPGGSLRLSCAASGFTFAMYSMSWVRQAPGGLEWVSSIAPPGGRTYYADSVKGRFTISRDNSKNTLYLQMNSLRAEDTAVYYCAKQSLTGYSRSFDYWGQGTLVTVSS

SEQ ID NO: 11753 - protein, 118 aa, Artificial Sequence
  source: /note="Description of Artificial Sequence: Synthetic polypeptide"
EVQLLESGGGLVQPGGSLRLSCAASGFTFSQNPMSWVRHAPGKGLEVSTIPANGRPTSYADSVGRFTISRDNSKNTLYLQMNSLRAEDTAVYYCAKYSQQPGRRFDYWGQGTLVTVSS

SEQ ID NO: 11754 - protein, 116 aa, Artificial Sequence
  source: /note="Description of Artificial Sequence: Synthetic polypeptide"
EVQLLESGGGLVQPGGSLRLSCAASGFTFANYHMTWVRQAPGGLEWVSSIPDSGQTYYADSVKGRFTISRDNSNTLYLQMNSLRAEDTAVYYCAKGRIPSLLFDYWGQGTLVTVSS

SEQ ID NO: 11755 - protein, 117 aa, Artificial Sequence
  source: /note="Description of Artificial Sequence: Synthetic polypeptide"
EVQLLESGGGLVQPGGSLRLSCAASGFTFAQYHMRWVRQAPGGLEWVSTINDIGSNTYYADSVKGRFTISRDNSKNTLYLQMNSLRAEDTAVYYCAVGGRGSFSFDYGQGTLVTVSS

SEQ ID NO: 11756 - protein, 118 aa, Artificial Sequence
  source: /note="Description of Artificial Sequence: Synthetic polypeptide"
EVQLLESGGGLVQPGGSLRLSCAASGFTFSSYDMKWVRQAPGKGLEWVSTISASGVFTYYADSVGRFTISRDNSNTLYLQMNSLRAEDTAVYYCAKREHAGQPPFDYWGQGTLVTVSS

SEQ ID NO: 11757 - protein, 118 aa, Artificial Sequence
  source: /note="Description of Artificial Sequence: Synthetic polypeptide"
EVQLLESGGGLVQPGGSLRLSCAASGFTFNGYAMSWVRQAPGKGLEWVSTINANGKYTYYADSVGRFTISRDNSKNTLYLQMNSLRAEDTAVYYCAKLTLASNYFDYWGQGTLVTVSS

SEQ ID NO: 11758 - protein, 120 aa, Artificial Sequence
  source: /note="Description of Artificial Sequence: Synthetic polypeptide"
EVQLLESGGGLVQPGGSLRLSCAASGFTFMDYDMKWVRQAPGKGLEWVSSITALGKKTYYADSVGRFTISRDNSKNTLYLQMNSLRAEDTAVYYCAKDSVKYPLNLFDYWGQGTLVTVSS

SEQ ID NO: 11759 - protein, 118 aa, Artificial Sequence
  source: /note="Description of Artificial Sequence: Synthetic polypeptide"
EVQLLESGGGLVQPGGSLRLSCAASGFTFPHYTMAWVRQAPGKGLEWVSSIQSPGWRTYYADSVGRFTISRDNSKNTLYLQMNSLRAEDTAVYYCAYGDGLPLTFDYWGQGTLVTVSS

SEQ ID NO: 11760 - protein, 114 aa, Artificial Sequence
  source: /note="Description of Artificial Sequence: Synthetic polypeptide"
EVQLLESGGGLVQPGGSLRLSCAASGFTFTEYEMIWVRQAPGKGLEWVSSISGNGANTYYADSVKGRFTISRDNSNTLYLQMNSLRAEDTAVYYCAKEPLRFDYGQGTLVTVSS

SEQ ID NO: 11761 - protein, 117 aa, Artificial Sequence
  source: /note="Description of Artificial Sequence: Synthetic polypeptide"
EVQLLESGGGLVQPGGSLRLSCAASGFTFSGTPMSWVRQAPGGLEWVSRIGDEGQETYYADSVKGRFTISRDNSKNTLYLQMNSLRAEDTAVYYCAGVTPDLTFDYWGQGTLVTVSS

SEQ ID NO: 11762 - protein, 118 aa, Artificial Sequence
  source: /note="Description of Artificial Sequence: Synthetic polypeptide"
EVQLLESGGGLVQPGGSLRLSCAASGFTFSSSSMSWVRQAPGKGLEWVSAIGSDGPSTYYADSVKGRFTISRDNSKNTLYLQMNSLRAEDTAVYYCAGRIPTLHFDYWGQGTLVTVSS

SEQ ID NO: 11763 - protein, 117 aa, Artificial Sequence
  source: /note="Description of Artificial Sequence: Synthetic polypeptide"
EVQLLESGGGLVQPGGSLRLSCAASGFTFNPGEMTWVRQAPGKGLEWVSSIDGSGSSTYYADSVKGRFTISRDNSNTLYLQMNSLRADDTAVYYCAGRIPTLHFDYWGQGTLVTVSS

SEQ ID NO: 11764 - protein, 118 aa, Artificial Sequence
  source: /note="Description of Artificial Sequence: Synthetic polypeptide"
EVQLLESGGGLVQPGGSLRLSCAASGFTFPESMMGWVRQAPGKGLEWVSSIGYPGATTYYADSVKGRFTISRDNSNTLYLQMNSLRAEDTAVYYCAKGGSRDDNFDYWGQGTLVTVSS

SEQ ID NO: 11765 - protein, 124 aa, Artificial Sequence
  source: /note="Description of Artificial Sequence: Synthetic polypeptide"
EVQLLESGGGLVQPGGSLRLSCAASGFTFGQHSMHWVRQAPGKGLEWVSSISVPGPKTYYADSVKGRFTISRDNSKNTLYLQMNSLRAEDTAVYYCAKSLRDLRPGDSKSFDYWGQGTLVTVSS

SEQ ID NO: 11766 - protein, 116 aa, Artificial Sequence
  source: /note="Description of Artificial Sequence: Synthetic polypeptide"
EVQLLESGGGLVQPGGSLRLSCAASGFTFGSAAMDWVRQAPGKGLEWVSSINDMGSNTYYADSVKGRFTISRDNSKNTLYLQMNSLRAEDTAVYYCAKQGGRFDYWGQGTLVTVSS

SEQ ID NO: 11767 - protein, 118 aa, Artificial Sequence
  source: /note="Description of Artificial Sequence: Synthetic polypeptide"
EVQLLESGGGLVQPGGSLRLSCAASGFTFGYDRMAWVRQAPGKGLEWVSSIDGPGGATYYADSVKGRFTISRDNSKNTLYLQMNSLRAEDTAVYYCAEGRRVPDFDYWGQGTLVTVSS

SEQ ID NO: 11768 - protein, 119 aa, Artificial Sequence
  source: /note="Description of Artificial Sequence: Synthetic polypeptide"
EVQLLESGGGLVQPGGSLRLSCAASGFTFGEYEMTWVRQAPGKGLEWVSRIDPFGSETYYADSVKGRFTISRDNSKNTLYLQMNSLRAEDTAVYYCAEGVVPDLNFDYWGQGTLVTVSS

SEQ ID NO: 11769 - protein, 119 aa, Artificial Sequence
  source: /note="Description of Artificial Sequence: Synthetic polypeptide"
EVQLLESGGGLVQPGGSLRLSCAASGFTFDKYVMGWVRQAPGKGLEVSTIGSYGGATYYADSVKGRFTISRDNSKNTLYLQMNSLRAEDTAVYYCAKRLTLSATKFDYWGQGTLVTVSS

SEQ ID NO: 11770 - protein, 117 aa, Artificial Sequence
  source: /note="Description of Artificial Sequence: Synthetic polypeptide"
EVQLLESGGGLVQPGGSLRLSCAASGFTFEDYVMGVRQAPGGLEWVSTIAHRGDITYYADSVKGRFTISRDNSKNTLYLQMNSLRAEDTAVYYCAKRRRLSDYRFDYWGQGTLTVSS

SEQ ID NO: 11771 - protein, 123 aa, Artificial Sequence
  source: /note="Description of Artificial Sequence: Synthetic polypeptide"
EVQLLESGGGLVQPGGSLRLSCTASGFTFNMYEMSWVRQAPGKGLEWVSGISRRGFTTYYADSVKGRFTISRDNSKNTLYLQMNSLRAEDTAVYYCAKEPITYAMRYARFDYWGQGTLVTVSS

SEQ ID NO: 11772 - protein, 119 aa, Artificial Sequence
  source: /note="Description of Artificial Sequence: Synthetic polypeptide"
EVQLLESGGGLVQPGGSLRLSCAASGFTFGQFDMYWVRQAPGKGLEWVSAISPAGTGTYYADSVKGRFTISRDNSKNTLYLQMNSLRAEDTAVYYCAKAGDRSSLFDYRGQGTLVTVSS

SEQ ID NO: 11773 - protein, 116 aa, Artificial Sequence
  source: /note="Description of Artificial Sequence: Synthetic polypeptide"
EVQLLESGGGLVQPGGSLRLSCAASGFTFKDTGMTWVRQAPGGLEWVSSISSYGRDTYYADSVKGRFTISRDNSKNTLYLQMNSLRAEDAAVYYCALNAALGFDYWGQGTLVTVSS

SEQ ID NO: 11774 - protein, 118 aa, Artificial Sequence
  source: /note="Description of Artificial Sequence: Synthetic polypeptide"
EVQLLESGGGLVQPGGSLRLSCAASGFTFGPYPMSWVRQAPGKGLEWVSGINAPGTRTYYADSVKGRFTISRDNSKNTLYLQMNSLRAEDTAVYYCAQQMSSGVFDYWGQGTLVTVSS

SEQ ID NO: 11775 - protein, 115 aa, Artificial Sequence
  source: /note="Description of Artificial Sequence: Synthetic polypeptide"
EVQLLESGGGLVQPGGSLRLSCAASGFTFSNQDMTWVRQAPGKGLEVSSIDSSGQLTYYADSVGRFTISRDNSKNTLYLQMNSLRAEDTAVYYCAKVSLARFDYWGQGTLVTVSS

SEQ ID NO: 11776 - protein, 113 aa, Artificial Sequence
  source: /note="Description of Artificial Sequence: Synthetic polypeptide"
EVQLLESGGGLVQPGGSLRLSCAASGFTFPESDMKWVRQAPGKGLEWVSSISPNGWDTYYADSVGFTISRDNSNTLYLQMNSLRAEDTAVYYCAKPAQVLFDYWGQGTLTVSS

SEQ ID NO: 11777 - protein, 117 aa, Artificial Sequence
  source: /note="Description of Artificial Sequence: Synthetic polypeptide"
EVQLLESGGGLVQPGGSLRLSCAASGFTFEQYVMGVRQAPGKGLEVSTIGTSGKYTYYADSVKGRFTISRDNSNTLYLQMNSLRAEDTAVYYCAQRRSLTRVHFDYWGQGTLVTVSS

SEQ ID NO: 11778 - protein, 119 aa, Artificial Sequence
  source: /note="Description of Artificial Sequence: Synthetic polypeptide"
EVQLLESGGGLVQPGGSLRLSCAASGFTFGVEHMSWVRQAPGKGLEWVSAITGDGDRTYYADSVKGRFTISRDNSKNTLYLQMNSLRAEDTAVYYCAKTVSWNGRFDYWGQGTLVTVSS

SEQ ID NO: 11779 - protein, 116 aa, Artificial Sequence
  source: /note="Description of Artificial Sequence: Synthetic polypeptide"
EVQLLESGGGLVQPGGSLRLSCAASGFTFAWYNMGWVRQAPGKGLEWVSRIAPSGIITYYADSVGRFTISRDNSKNTLYLQMNSLRAEDTAVYYCAKGLRGKFDYWGQGTLVTVSS

SEQ ID NO: 11780 - protein, 112 aa, Artificial Sequence
  source: /note="Description of Artificial Sequence: Synthetic polypeptide"
EVQLLESGGGLVQPGGSLRLSCAASGFTFSNYEMRVRQAPGGLEVSSISSAGTDTYYADSVKGRFTISRDNSKNTLYLQMNSLRAEDTAVYYCAKQSLNFDYGQGTLVTVSS

SEQ ID NO: 11781 - protein, 116 aa, Artificial Sequence
  source: /note="Description of Artificial Sequence: Synthetic polypeptide"
EVQLLESGGGLVQPGGSLRLSCVASGFTFDEEPMTWVRQAPGKGLEWVSIIDPGGGATYYADSVKGRFTISRDNSKNTLYLQMNSLRAEDTAVYYCAKSNSMFDYWGQGTLVTVSS

SEQ ID NO: 11782 - protein, 115 aa, Artificial Sequence
  source: /note="Description of Artificial Sequence: Synthetic polypeptide"
EVQLLESGGGLVQPGGSLRLSCAASGFTFRDYEMWWVRQAPGKGLERVSAINPQGTRTYYADSVKGRFTISRDNSNTLYLQMNSLRAEDTAVYYCAKLPFIFDYWGQGTLVTVSS

SEQ ID NO: 11783 - protein, 120 aa, Artificial Sequence
  source: /note="Description of Artificial Sequence: Synthetic polypeptide"
EVQLLESGGGLVQPGGSLRLSCAASGFTFSAYPMHWVRQAPGKGLEVSSIASSGITTYYADSVKGRFTISRDNSKNTLYLQMNSLRAEDTAVYYCAKFTRLHFPAQFDYWGQGTLVTVSS

SEQ ID NO: 11784 - protein, 119 aa, Artificial Sequence
  source: /note="Description of Artificial Sequence: Synthetic polypeptide"
EVQLLESGGGLVQPGGSLRLSCAASGFTFADYAMGWVRQAPGKGLEWVSRISPEGSRTYYADSVKGRFTISRDNSKNTLYLQMNSLRAEDTAVYYCAKLRPYASKFDYWGQGTLVTVSS

SEQ ID NO: 11785 - protein, 115 aa, Artificial Sequence
  source: /note="Description of Artificial Sequence: Synthetic polypeptide"
EVQLLESGGGLVQPGGSLRLSCAASGFTFRPYDMGVRQAPGKGLEWVSTISHQGNRTYYADSVKGRFTISRDNSKNTLYLQMNSLRAEDTAVYYCAKVSHHFDYWGQGTLVTVSS

SEQ ID NO: 11786 - protein, 115 aa, Artificial Sequence
  source: /note="Description of Artificial Sequence: Synthetic polypeptide"
EVQLLESGGGLVQPGGSLRLSCAASGFTFSAYNMWARQAPGKGLEWVSINSTGSRTYYADSVGRFTISRDNSKNTLYLQMNSLRAEDTAVYYCAKNWHRGRFDYWGQGTLVTVSS

SEQ ID NO: 11787 - protein, 115 aa, Artificial Sequence
  source: /note="Description of Artificial Sequence: Synthetic polypeptide"
EVQLLESGGGLVQPGGSLRLSCAASGFTFDRYRMGWVRQAPGGLEWVSTINRLGQSTYYADSVKGRFTISRDNSKNTLYLQMNSLRAEDTAVYYCAVKKHKFDYWGQGTLVTVSS

SEQ ID NO: 11788 - protein, 116 aa, Artificial Sequence
  source: /note="Description of Artificial Sequence: Synthetic polypeptide"
EVQLLESGGGLVQPGGSLRLSCAASGFTFAHYNMRWVRQAPGGLEWVSTITKTGFRTYYADSVKGRFTISRDNSKNTLYLQMNSLRAEDTAVYYCAKAGQFDFDYWGQGTLVTVSS

SEQ ID NO: 11789 - protein, 116 aa, Artificial Sequence
  source: /note="Description of Artificial Sequence: Synthetic polypeptide"
EVQLLESGGGLVQPGGSLRLSCAASGFTFYPYSMHWVRQAPGGLEWVSTIDGSGMFTYYADSVGRFTISRDNSKNTLYLQMNSLRAEDTAVYYCAEDSLKASFDYWGQGTLVTVSS

SEQ ID NO: 11790 - protein, 115 aa, Artificial Sequence
  source: /note="Description of Artificial Sequence: Synthetic polypeptide"
EVQLLESGGGLVQPGGSLRLSCAASGFTFPLYGMWWVRQAPGGLEWVSYIGPYGHTTYYADSVKGRFTISRDNSKNTLYLQMNSLRAEDTAVYYCAKRKKKFDYWGQGTLVTVSS

SEQ ID NO: 11791 - protein, 117 aa, Artificial Sequence
  source: /note="Description of Artificial Sequence: Synthetic polypeptide"
EVQLLESGGGLVQPGGSLRLSCAASGFTFPRYRMSWVRQAPGKGLEWVSSITPYGAHTYYADSVKGRFTISRDNSKNTLYLQMNSLRAEDTAVYYCAKYGKWYFDYWGQGTLVTVSS

SEQ ID NO: 11792 - protein, 115 aa, Artificial Sequence
  source: /note="Description of Artificial Sequence: Synthetic polypeptide"
EVQLLESGGGLVQPGGSLRLSCAASGFTFNEYAMRVRQAPGKGLEWVSTIDRLGLHTYYADSVKGRFTISRDNSNTLYLQMNSLRAEDTAVYYCAKSGPFTFDYWGQGTLVTVSS

SEQ ID NO: 11793 - protein, 115 aa, Artificial Sequence
  source: /note="Description of Artificial Sequence: Synthetic polypeptide"
EVQLLESGGGLVQPGGSLRLSCAASGFTFSTYHMQVRQAPGGLEWVSMIDADGLGTYYADSVGRFTISRDNSNTLYLQMNSLRAEDTAVYYCAKPGPQFGQFDYWGQGTLVTVSS

SEQ ID NO: 11794 - protein, 115 aa, Artificial Sequence
  source: /note="Description of Artificial Sequence: Synthetic polypeptide"
EVQLLESGGGLVQPGGSLRLSCAASGFTFERYNMRWVRQAPGGLEWVSTIDRLGLATYYADSVKGRFTISRDNSKNTLYLQMNSLRAEDTAVYYCAAGSWSFDYWGQGTLVTVSS

SEQ ID NO: 11795 - protein, 116 aa, Artificial Sequence
  source: /note="Description of Artificial Sequence: Synthetic polypeptide"
EVQLLESGGGLVQPGGSLRLSCAASGFTFGIYDMKWVRQAPGKGLEVSTISSSGTHTYYADSVKGRFTISRDNSKNTLYLQMNSLRAEDTAVYYCAKYPQPYPFDYWGQGTLTVSS

SEQ ID NO: 11796 - protein, 115 aa, Artificial Sequence
  source: /note="Description of Artificial Sequence: Synthetic polypeptide"
EVQLLESGGGLVQPGGSLRLSCAASGFTFVYDMRWVRQAPGGLEWVSTISATGVHTYYADSVKGRFTISRDNSNTLYLQMNSLRAEDTAVYYCAKYPPAGRFDYWGQGTLVTVSS

SEQ ID NO: 11797 - protein, 118 aa, Artificial Sequence
  source: /note="Description of Artificial Sequence: Synthetic polypeptide"
EVQLLESGGGLVQPGGSLRLSCAASGFTFSTYDMIWVRQAPGGLEWVSAISPNGTGTYYADSVKGRFTISRDNSKNTLYLQMNSLRAEDTAVYYCAKPPQVNTEFDYRGQGTLVTVSS

SEQ ID NO: 11798 - protein, 116 aa, Artificial Sequence
  source: /note="Description of Artificial Sequence: Synthetic polypeptide"
EVQLLESGGGLVQPGGSLRLSCAASGFTFEKEDMGWVRQAPGKGLEWVSHISPNGYATYYADSVKGRFTISRDNSKNTLYLQMNSLRAEDTAVYYCAKSWSSFDYWGQGTLVTVSS

SEQ ID NO: 11799 - protein, 116 aa, Artificial Sequence
  source: /note="Description of Artificial Sequence: Synthetic polypeptide"
EVQLLESGGGLVQPGGSLRLSCAASGFTFSATPMEWARQAPGKGLEWVSTISESGYSTYYADSVGRFTISRDNSNTLYLQMNSLRAEDTAVYYCAKWNSTTGFDYWGQGTLVTVSS

SEQ ID NO: 11800 - protein, 114 aa, Artificial Sequence
  source: /note="Description of Artificial Sequence: Synthetic polypeptide"
EVQLLESGGGLVQPGGSLRLSCAASGFTFNTVDMEWVRQAPGGLEWVSSISPNGDTYYADSVKGRFTISRDNSNTLYLQMNSLRAEDTAVYYCAEAPHRAFDYWGQGTLVTVSS

SEQ ID NO: 11801 - protein, 118 aa, Artificial Sequence
  source: /note="Description of Artificial Sequence: Synthetic polypeptide"
EVQLLESGGGLVQPGGSLRLSCAASGFTFEDEMSWVRQAPGKGLEWVSRIDALGDSTYYADSVKGRFTISRDNSKNTLYLQMNSLRAEDTAVYYCAEGMVPRLKFDYWGQGTLVTVSS

SEQ ID NO: 11802 - protein, 112 aa, Artificial Sequence
  source: /note="Description of Artificial Sequence: Synthetic polypeptide"
EVQLLESGGGLVQPGGSLRLSCAASGFTFSDHSMMWVRQAPGGLEWVSDIEPHGVHTYYADSVKGRFTISRDNSNTLYLQMNSLRAEDTAVYYCANPTFDYWGQGTLVTVSS

SEQ ID NO: 11803 - protein, 120 aa, Artificial Sequence
  source: /note="Description of Artificial Sequence: Synthetic polypeptide"
EVQLLESGGGLVQPGGSLRLSCAASGFTFSPHTMHWVRQAPGGLEWVSGIGPDGTTTYYADSVKGRFTISRDNSNTLYLQMNSLRAEDTAVYYCAKRSYSWDRGWTFDYWGQGTLVTVSS

SEQ ID NO: 11804 - protein, 119 aa, Artificial Sequence
  source: /note="Description of Artificial Sequence: Synthetic polypeptide"
EVQLLESGGGLVQPGGSLRLSCAASGFTFSGYDMQWVRQAPGKGLEWVSTISASGVFTYYADSVGRFTTSRDNSKNTLYLQMNSLRAEDTAVYYCAYPNRFALNNFDYWGQGTLVTVSS

SEQ ID NO: 11805 - protein, 117 aa, Artificial Sequence
  source: /note="Description of Artificial Sequence: Synthetic polypeptide"
EVQLLESGGGLVQPGGSLRLSCAASGFTFYASDMKWVRQAPGGLEWVSSISPNGWDTYYADSVGRFTISRDNSKNTLYLQMNSLRAEDTAVYYCAKADYTYHSFDYWGQGTLVTVSS

SEQ ID NO: 11806 - protein, 115 aa, Artificial Sequence
  source: /note="Description of Artificial Sequence: Synthetic polypeptide"
EVQLLESGGGLVQPGGSLRLSCAASGFTFAHYNMRWVRQAPGGLEMVSTITTGFRTYYADSVKGRFTISRDNSKNTLYLQMNSLRAEDTAVYYCAKAGQFDFDYWGQGTLVTVSS

SEQ ID NO: 11807 - protein, 117 aa, Artificial Sequence
  source: /note="Description of Artificial Sequence: Synthetic polypeptide"
EVQLLESGGGLVQPGGSLRLSCAASGFTFSHYHMGWARQAPGGLEWVSVIGPRGISTYYADSVKGRFTISRDNSKNTLYLQMNSLRAEDTAVYYCAKSPSRHRFDYWGQGTLVTVSS

SEQ ID NO: 11808 - protein, 117 aa, Artificial Sequence
  source: /note="Description of Artificial Sequence: Synthetic polypeptide"
EVQLLESGGGLVQPGGSLRLSCAASGFTFNEYAMRWVRQAPGKGLEWVSTIDRLGLHTYYADSVKGRFTISRDNSKNTLYLQMNSLRAEDTAVYYCAKSGPFTFDYWGQGTLVTVSS

SEQ ID NO: 11809 - protein, 122 aa, Artificial Sequence
  source: /note="Description of Artificial Sequence: Synthetic polypeptide"
EVQLLESGGGLVQPGGSLRLSCAASGFTFGNYSMKARQAPGKGLEWVSTITPDGWYTYYADSVKGRFTISRDNSKNTLYLQMNSLRAEDTAVYYCAKVGDAVWGWIGGFDYWGQGTLVTVSS

SEQ ID NO: 11810 - protein, 113 aa, Artificial Sequence
  source: /note="Description of Artificial Sequence: Synthetic polypeptide"
EVQLLESGGGLVQPGGSLRLSCAASGFTFGDYGMWVRQAPGKGLEVSAITSNGDFTYYADSVKGRFTISRDNSNTLYLQMNSLRAEDTAVYYCAKSLYKFDYWGQGTLVTVSS

SEQ ID NO: 11811 - protein, 121 aa, Artificial Sequence
  source: /note="Description of Artificial Sequence: Synthetic polypeptide"
EVQLLESGGGLVQPGGSLRLSCAGSGFTFPTYKMGWVRQAPGKGLEVSFIDYWGWRTYYADSVKGRFTISRDNSNTLYLQMNSLRAEDTAVYYCAKSPYSWTHDSPHFDYWGQGTLVTVSS

SEQ ID NO: 11812 - protein, 115 aa, Artificial Sequence
  source: /note="Description of Artificial Sequence: Synthetic polypeptide"
EVQLLESGGGLVQPGGSLRLSCAASGFTFRPYTMCWARQAPGKGLEWVSCISDAGSFTYYADSVKGRFTISRDNSNTLYLQMNSLRAEDTAVYYCAKRMSSFDYWGQGTLVTVSS

SEQ ID NO: 11813 - protein, 121 aa, Artificial Sequence
  source: /note="Description of Artificial Sequence: Synthetic polypeptide"
EVQLLESGGGLVQPGGSLRLSCAASGFTFQNYQMAWVRQAPGKGLEWVSTISGTGNTYYADSVKGRFTISRDNSKNTLYLQMNSLRAEDTAVYYCAKTPQNYFSVRRFDYWGQGTLVTVSS

SEQ ID NO: 11814 - protein, 115 aa, Artificial Sequence
  source: /note="Description of Artificial Sequence: Synthetic polypeptide"
EVQLLESGGGLVQPGGSLRLSCAASGFTFGAYTMGWVRQAPGGLEWVSISTSGGQTYYADSVGRFTISRDNSKNTLYLQMNSLRAEDTAVYYCAKPLNWWAFDYWGQGTLVTVSS

SEQ ID NO: 11815 - protein, 108 aa, Artificial Sequence
  source: /note="Description of Artificial Sequence: Synthetic polypeptide"
DIQMTQSPSSLSASVGDRVTITCRANSSILWALAWYQQKPGKAPKLLIESSSGLQSGVPSRFSGSGSGTDFTLTISSLQPEDFATYYCVQNAGWPGTFGQGTKVEIKR

SEQ ID NO: 11816 - protein, 115 aa, Artificial Sequence
  source: /note="Description of Artificial Sequence: Synthetic polypeptide"
EVQLLESGGGLVQPGGSLRLSCAASGFTFNAYPMTWVRQAPGGLEWVSRIDGYGRHTYYADSVKGRFTISRDNSNTLYLQMNSLRAEDTAVYYCAKGIIPNFDYWGQGTLVTVSS

SEQ ID NO: 11817 - protein, 119 aa, Artificial Sequence
  source: /note="Description of Artificial Sequence: Synthetic polypeptide"
EVQLLESGGGLVQPGGSLRLSCAASQFTFGAVDMTWVRQAPGKGLEWVSAISPSGSATYYADSVKGRFTISRDNSKNTLYLQMNSLRAEDTAVYYCAKGRVPDLGFDYWGQGTLVTVSS

SEQ ID NO: 11818 - protein, 117 aa, Artificial Sequence
  source: /note="Description of Artificial Sequence: Synthetic polypeptide"
EVQLLESGGGLVQPGGSLRLSCAASGFTFDSYAMGWARQAPGKGLEWVSAIGAKGLSTYYADSVKGRFTISRDNSKNTLYLQMNSLRAEDTAVYYCAKAARGKFDYWGQGTLVTVSS

SEQ ID NO: 11819 - protein, 116 aa, Artificial Sequence
  source: /note="Description of Artificial Sequence: Synthetic polypeptide"
EVQLLESGGGLVQPGGSLRLSCAASGFTFTRYQMGWVRQAPGKGLEWVSVINVWGSSTYYADSVKGRFTISRDNSKNTLYLQMNSLRAEDTAVYYCAKMSGKFAYWGQGTLVTVSS

SEQ ID NO: 11820 - protein, 114 aa, Artificial Sequence
  source: /note="Description of Artificial Sequence: Synthetic polypeptide"
EVQLLESGGGLVQPGGSLRLSCAASGFTFGNYSMMWVRQAPGGLEVSTIIPAGTSTYYADSVGRFTISRDNSKNTLYLQMNSLRAEDTAVYYCAKPSIRLFDYWGQGTLVTVSS

SEQ ID NO: 11821 - protein, 116 aa, Artificial Sequence
  source: /note="Description of Artificial Sequence: Synthetic polypeptide"
EVQLLESGGGLVQPGGSLRLSCAASGFTFGAYDMGWVRQAPGKGLEWVSWISPNGYDTYYADSVKGRFTISRDNSKNTLYLQMNSLRAEDTAVYYCAKGGVKFDYWGQGTLVTVSS

SEQ ID NO: 11822 - protein, 120 aa, Artificial Sequence
  source: /note="Description of Artificial Sequence: Synthetic polypeptide"
EVQLLESGGGLVQPGGSLRLSCAASGFTFVWYEMAWVRQAPGGLEWVSTIQADGEQTYYADSVGRFTISRDNSKNTLYLQMNSLRAEDTAVYYCAKASYALVYPPEEFDYGQGTLVTVSS

SEQ ID NO: 11823 - protein, 119 aa, Artificial Sequence
  source: /note="Description of Artificial Sequence: Synthetic polypeptide"
EVQLLESGGGLVQPGGSLRLSCAASGFTFTNYRMSWVRQAPGKGLEVSAIDDLGVSTYYADSVGRFTISRDNSKNTLYLQMNSLRAEDTAVYYCAKWRLKNSQPTDFDYGQGTLVTVSS

SEQ ID NO: 11824 - protein, 116 aa, Artificial Sequence
  source: /note="Description of Artificial Sequence: Synthetic polypeptide"
EVQLLESGGGLVQPGGSLRLSCAASGFTFDQAHMWVRQAPGGLEWVSFINPSGYYTYYADSVGRFTISRDNSKNTLYLQMNSLRAEDTAVYYCAKPSLSPSSFDYWGQGTLVTVSS

SEQ ID NO: 11825 - protein, 114 aa, Artificial Sequence
  source: /note="Description of Artificial Sequence: Synthetic polypeptide"
  MOD_RES (104)..(104): Selenocysteine
EVQLLESGGGLVQPGGSLRLSCAASGFTFETGQGWARQAPGGLEVSNIDGSGTYTYYADSVGRFTISRDNSKNTLYLQMNSLRAEDTAVYYCAKSTQNYRFDYXGQGTLVTVSS

SEQ ID NO: 11826 - protein, 107 aa, Artificial Sequence
  source: /note="Description of Artificial Sequence: Synthetic polypeptide"
DIQMTQSPSSLSASVGDRVTITCRASQTIERRLNWYQQPGKAPKLLIYLASRLQSGVPSRFSGSGSGTDFTLTISSLQPEDFATYYCHQYASPPLTFGQGTKVEIKR

SEQ ID NO: 11827 - protein, 118 aa, Artificial Sequence
  source: /note="Description of Artificial Sequence: Synthetic polypeptide"
EVQLLESGGGLVQPGGSLRLSCAASGFTFGAYPMYWVRQAPGGLEWVSSIHKDGRITYYADSVKGRFTISRDNSKNTLYLQMNSLRAEDTAVYYCAKQGTPVDGFDYWGQGTLVTVSS

SEQ ID NO: 11828 - protein, 120 aa, Artificial Sequence
  source: /note="Description of Artificial Sequence: Synthetic polypeptide"
EVQLLESGGGLVQPGGSLRLSCAASGFTFPDEGMTWVRQAPGKGLEWVSTIETGGTVTYYADSVGRFTISRDNSKNTLYLQMNSLRAEDTAVYYCAKMDGSGTWQTFDYWGQGTLVTVSS

SEQ ID NO: 11829 - protein, 115 aa, Artificial Sequence
  source: /note="Description of Artificial Sequence: Synthetic polypeptide"
EVQLLESGGGLVQPGGSLRLSCAASGFTFDSLGMGWARQAPGKGLEWVSYIRAEGAYTYYADSVKGRFTISRDNSNTLYLQMNSLRAEDTAVYYCAKYLADSDYWGQGTLVTVSS

SEQ ID NO: 11830 - protein, 120 aa, Artificial Sequence
  source: /note="Description of Artificial Sequence: Synthetic polypeptide"
EVQLLESGGGLVQPGGSLRLSCAASGFTFSESYMEWVRQAPGKGLEWVSGIDHIGGGTYYADSVKGRFTISRDNSKNTLYLQMNSLRAEDTAVYYCAKDDGRGGSMFDYWGQGTLVTVSS

SEQ ID NO: 11831 - protein, 113 aa, Artificial Sequence
  source: /note="Description of Artificial Sequence: Synthetic polypeptide"
EVQLLESGGGLVQPGGSLRLSCAASGFTFSGGYMWWVRQAPGGLEWVSSIGASGAYTYYADSVGRFTISRDNSKNTLYLQMNSLAEDTAVYYCAKTGGRLDYWGQGTLVTVSS

SEQ ID NO: 11832 - protein, 118 aa, Artificial Sequence
  source: /note="Description of Artificial Sequence: Synthetic polypeptide"
EVQLLESGGGLVQPGGSLRLSCAASGFTFDEGHMGWVRQAPGKDLEWVSYIGSLGLHTYYADSVGRFTISRDNSKNTLYLQMNSLRAEDTAVYYCAKREFSNGGFDYWGQGTLVTVSS

SEQ ID NO: 11833 - protein, 117 aa, Artificial Sequence
  source: /note="Description of Artificial Sequence: Synthetic polypeptide"
EVQILESGGGLVQPGGSLRLSCMSGFTFTSPMYWVRQAPGKGLEWVSSIDRTGGHTYYADSVKGRFTISRDNSKNTLYLQMNSLRAEDTAVYYCAQALLTDARFDYWGQGTLVTVSS

SEQ ID NO: 11834 - protein, 120 aa, Artificial Sequence
  source: /note="Description of Artificial Sequence: Synthetic polypeptide"
EVQLLESGGGLVQPGGSLRLSCAASGFTFDGRDMVWVRQAPGKGLEWVSAISPSGLDTYYADSVKGRFTISRDNSKNTLYLQMNSLRAEDTAVYYCAERPQMLVTNFDYWGQGTLVTVSS

SEQ ID NO: 11835 - protein, 119 aa, Artificial Sequence
  source: /note="Description of Artificial Sequence: Synthetic polypeptide"
EVQLLESGGGLVQPGGSLRLSCAASGFTFGNDPMSWVRQAPGKGLEWVSGIGREGDSTYYADSVKGRFTISRDNSKNTLYLQMNSLRAEDTAVYYCAKDSMRHQPFDYWGQGTLVTVSS

SEQ ID NO: 11836 - protein, 115 aa, Artificial Sequence
  source: /note="Description of Artificial Sequence: Synthetic polypeptide"
EVQLLESGGGLVQPGGSLRLSCAASGFTFDETYMWVRQAPGKGLEWVSAIGASGADTYYADSVGRFTISRDNSNTLYLQMNSLRAEDTAVYYCAFTHLNGRFDYWGQGTLVTVSS

SEQ ID NO: 11837 - protein, 115 aa, Artificial Sequence
  source: /note="Description of Artificial Sequence: Synthetic polypeptide"
EVQLLESGGGLVQPGGSLRLSCAASGFTFAGYEMWWVRQAPGKGLERVSAISGSGGSTYYADSVKGRFTISRDDSKNTLYLQMNSLRAEDTAVYYCADPYSFDYWGQGTLVTVSS

SEQ ID NO: 11838 - protein, 118 aa, Artificial Sequence
  source: /note="Description of Artificial Sequence: Synthetic polypeptide"
EVQLLESGGGLVQPGGSLRLSCAASGFTFGGWPMGWVRQAPGKGLEWVSGIDIDGAPTYYADSVKGRFTISRDNSNTLYLQMNSLRAEDTAVYYCAKEEAGSWSFDYWGQGTLVTVSS

SEQ ID NO: 11839 - protein, 114 aa, Artificial Sequence
  source: /note="Description of Artificial Sequence: Synthetic polypeptide"
EVQLLESGGGLVQPGGSLRLSCAASGFTFSDQAMWWARQAPGKGLEWVSFIQGDGGFTYYADSVKGRFTISRDNSKNTLYLQMNSLRAEDTAVYYCAPSPFDYWGQGTLVTVSS

SEQ ID NO: 11840 - protein, 116 aa, Artificial Sequence
  source: /note="Description of Artificial Sequence: Synthetic polypeptide"
EVQLLESGGGLVQPGGSLRLSCAASGFTFETGQMGWARQAPGGLEWVSNIDGSGTYTYYADSVGRFTISRDNSKNTLYLQMNSLRAEDTAVYYCAKAVRNFAFDYWGQGTLVTVSS

SEQ ID NO: 11841 - protein, 123 aa, Artificial Sequence
  source: /note="Description of Artificial Sequence: Synthetic polypeptide"
EVQLLESGGGLVQPGGSLRLSCAASGFTFSGHDMSWVRQAPGKGLEWVSAISPHGTHTYYADSVGRFTISRDNSKNTLYLQMNSLRAEDTAVYYCAKGIRGWIGHDTQPFDYWGQGTLVTVSS

SEQ ID NO: 11842 - protein, 119 aa, Artificial Sequence
  source: /note="Description of Artificial Sequence: Synthetic polypeptide"
EVQLLESGGGLVQPGGSLRLSCAASGFTFESKDMLWVRQAPGKGLEWVSSISSDGTHTYYADSVKGRFTISRDNSKNTLYLQMNSLRAEDTAVYYCAQELGGSWQFDYWGQGTLVTVSS

SEQ ID NO: 11843 - protein, 122 aa, Artificial Sequence
  source: /note="Description of Artificial Sequence: Synthetic polypeptide"
EVQLLESGGGLVQPGGSLRLSCAASGFTFADRDMVWVRQAPGKGLEWVSGIGASGTSTYYADSVKGRFTISRDNSKNTLYLQMNSLRAEDAAVYYCAKGGTGPTDLWDFDYWGQGTLVTVSS

SEQ ID NO: 11844 - protein, 119 aa, Artificial Sequence
  source: /note="Description of Artificial Sequence: Synthetic polypeptide"
EVQLLESGGGLVQPGGSLRLSCAASGFTFDDEKMLWVRQAPGKGLEWVSSISVSGLHTYYADSVKGRFTISRDNSKNTLYLQMNSLRAEDTAVYYCAKEEAGSWSFDYWGQGTLVTVSS

SEQ ID NO: 11845 - protein, 119 aa, Artificial Sequence
  source: /note="Description of Artificial Sequence: Synthetic polypeptide"
EVQLLESGGGLVQPGGSLRLSCAASGFTFGQERMIWVRQAPGKGLEWVSDISASGGTTYYADSVKGRFTISRDNSKNTLYLQMNSLRAEDTAVYYCAKEEAGSWSFDYWGQGTLVTVSS

SEQ ID NO: 11846 - protein, 116 aa, Artificial Sequence
  source: /note="Description of Artificial Sequence: Synthetic polypeptide"
EVQLLESGGGLVQPGGSLRLSCAASGFTFEWYEMQWVRQAPGKGLEWVSAISGDGYRTYYADSVKGRFTISRDNSMNTLYLQMNSLRAEDTAVYYCAKELGYFDYRGRGTLVTVSS

SEQ ID NO: 11847 - protein, 116 aa, Artificial Sequence
  source: /note="Description of Artificial Sequence: Synthetic polypeptide"
EVQLLESGGGLVQPGGSLRLSCAASGFTFEWYEMQWVRRAPGKGLEWVSAISGDGYRTYYADSVKGRFTISRDNSKNTLYLQMNSLRAEDTAVYYCAKELGYFDYWGRGTLVTVSS

SEQ ID NO: 11848 - protein, 118 aa, Artificial Sequence
  source: /note="Description of Artificial Sequence: Synthetic polypeptide"
EVQLLESGGGLVQPGGSLRLSCAASGFTFPTAEMVVRQAPGKGLEWVSSISASGGSTYYADSVKGRFTISRDNSKNTLYLQMNSLRAEDTAVYYCAEPVSYVATFDYWGQGTLVTVSS

SEQ ID NO: 11849 - protein, 116 aa, Artificial Sequence
  source: /note="Description of Artificial Sequence: Synthetic polypeptide"
EVQLLESGGGLVQPGGSLRLSCAASGFTFEWYEMQWVRRAPGKGLEWVSAISGDGYRTYYADSVKGRFTISRDNSKNTLYLQMNSLRAEDTAVYYCAKELGYFDYRVQGTLVTVSS

SEQ ID NO: 11850 - protein, 114 aa, Artificial Sequence
  source: /note="Description of Artificial Sequence: Synthetic polypeptide"
EVQLLESGGGLVQPGGSLRLSCAASGFTFEWYEMQWVRKAPGGLEWVSAISGDGYRTYYADSVKGRFTISRDNSKNTLYLQMNSLRAEDTAVYYCAKELGYFDYGRGTLVTVSS

SEQ ID NO: 11851 - protein, 115 aa, Artificial Sequence
  source: /note="Description of Artificial Sequence: Synthetic polypeptide"
EVQLLESGGGLVQPGGSLRLSCAASGFTFEWYEMQWVRQAPGGLEWISAISGDGYRTYYADSVKGRFTISRDNSKNTLYLQMNSLRAEDTAVYYCAKELGYFDYRVQGTLVTVSS

SEQ ID NO: 11852 - protein, 114 aa, Artificial Sequence
  source: /note="Description of Artificial Sequence: Synthetic polypeptide"
EVQLLESGGGLVQPGGSLRLSCAASGFTFEWYEMQWVRRAPGKGLEVSAISGDGYRTYYADSVGRFTISRDNSENTLYLQMNSLRAEDTAVYYCAKELGYFDYWGRGTLVTVSS

SEQ ID NO: 11853 - protein, 113 aa, Artificial Sequence
  source: /note="Description of Artificial Sequence: Synthetic polypeptide"
EVQLLETGGGLVQPGGSLRLSCAASGFTFEWYEMQVRRAPGKGLEWVSAISGDGYRTYYADSVGRFTISRDNSKNTLYLQMDSLRAEDTAVYYCAKELGYFDYGRGTLVTVTS

SEQ ID NO: 11854 - protein, 116 aa, Artificial Sequence
  source: /note="Description of Artificial Sequence: Synthetic polypeptide"
EVQLLESGGGLVQPGGSLRLSCAASGFTFEWYEMQWVRQAPGKGLEWVSAISGDGYRTYYADSVKGRFTISRDNSKNTLYLQMNSLRAEDTAVYYCAKELGYFHYWGRGTLVTVSS

SEQ ID NO: 11855 - protein, 116 aa, Artificial Sequence
  source: /note="Description of Artificial Sequence: Synthetic polypeptide"
EVQLLESGGGLVQPGGSLRLSCVASGFTFEWYEMQWVRQAPGNGLEWISAISGDGYRTYYADSVKGRFTISRDNSKNTLYLQMNSLRAEDTAVYYCAKELGYFDYWGRGTLVTVSS

SEQ ID NO: 11856 - protein, 114 aa, Artificial Sequence
  source: /note="Description of Artificial Sequence: Synthetic polypeptide"
EVQLLESGGGLVQPGGSLRLSCAASGFTFEWYEMQWVRRAPGGLEWVSAISGDGYRTYYADSVGRFTISRDNSKNTLYLLMNSLRAEDTAVYYCAKELGYFDYWGRGTLVTVSS

SEQ ID NO: 11857 - protein, 116 aa, Artificial Sequence
  source: /note="Description of Artificial Sequence: Synthetic polypeptide"
EVQLLESGGGLVQPGGSLRLSCAASGFTFEWYEMQWVRKAPGKGLEWVSAISGDGYRTYYADSVKGRFTISRDNSKNTLYLQMNSLRAEDTAVYYCAKELGYFDYRGRGTLVTVSS

SEQ ID NO: 11858 - protein, 115 aa, Artificial Sequence
  source: /note="Description of Artificial Sequence: Synthetic polypeptide"
EVQLLESGGGLVQPGGSMRLSCAASGFTFEWYEMQWVRRAPGKGLEWVSAISGDGYRTYYADSVKGRFTISRDNSKNTLYLQMNSLRAEDTAVYYCAELGYFDYRGRGTLVTVSS

SEQ ID NO: 11859 - protein, 105 aa, Artificial Sequence
  source: /note="Description of Artificial Sequence: Synthetic polypeptide"
DIQMTQSPSSLSASVGDRVTITCRASHFIGTLLSWYQQKPGKAPKLLITYGSLLQSGVPSRFSGSGSGTDFTLTISSLQPEDFATYYCGQGVLPATFGQGTVEIR

SEQ ID NO: 11860 - protein, 115 aa, Artificial Sequence
  source: /note="Description of Artificial Sequence: Synthetic polypeptide"
EVQLLESGGGLVQPGGSLRLSCAASGFTFEWYEMQWVRRAPGGLEWVSMISGDGYRTYYADSVKGRFTISRDNSKNTLYLQMNSLRAEDTAVYYCAKELGYFDYWGRGTLVTVSS

SEQ ID NO: 11861 - protein, 115 aa, Artificial Sequence
  source: /note="Description of Artificial Sequence: Synthetic polypeptide"
EVQLLESGGGLVQPGGSLRLSCAASGFTFEWYEMQWVRRAPGGLEWVSAISGDGWRTYYADSVKGRFTISRDNSKNTLYLQMNSLRAEDTAVYYCAKELGYFDYWGRGTLVTVSS

SEQ ID NO: 11862 - protein, 115 aa, Artificial Sequence
  source: /note="Description of Artificial Sequence: Synthetic polypeptide"
EVQLLESGGGLVQPGGSLRLSCAASGFTFGWYEMQWVRRAPGGLEWVSAISGDGYRTYYADSVKGRFTISRDNSKNTLYLQMNSLRAEDTAVYYCAKELLYFDYWGRGTLVTVSS

SEQ ID NO: 11863 - protein, 116 aa, Artificial Sequence
  source: /note="Description of Artificial Sequence: Synthetic polypeptide"
EVQLLESGGGLVQPGGSLRLSCAASGFTFEWYEMQWVRRAPGKGLEWVSAISGDGYRTYYADSVKGRFTISRDNSKNTLYLQMNSLRAEDTAVYYCAKELGFFDYWGRGTLVTVSS

SEQ ID NO: 11864 - protein, 114 aa, Artificial Sequence
  source: /note="Description of Artificial Sequence: Synthetic polypeptide"
EVQLLESGGGLVQPGGSLRLSCAASGFTFEWYEMQWVRRAPGKGLEWVSAISGDGYRTYYADSVKGRFTISRDNSNTLYLQMNSLRAEDTAVYYCAELEYFDYWGRGTLVTVSS

SEQ ID NO: 11865 - protein, 114 aa, Artificial Sequence
  source: /note="Description of Artificial Sequence: Synthetic polypeptide"
EVQLLESGGGLVQPGGSLRLSCAASGFTFEWYEMQWVRRAPGKGLEWVSAISGDGYRTYYADSVKGRFTISRDNSKNTLYLQMNSLAEDTAVYYCAGLEYFDYWGRGTLVTVSS

SEQ ID NO: 11866 - protein, 114 aa, Artificial Sequence
  source: /note="Description of Artificial Sequence: Synthetic polypeptide"
EVQLLESGGGLVQPGGSLRLSCAASGFTFEWYEMQWVRRAPGKGLEWVSAISGDGYRTYYADSVKGRFTISRDNSNTLYLQMNSLRAEDTAVYYCAELAFFDYWGRGTLVTVSS

SEQ ID NO: 11867 - protein, 115 aa, Artificial Sequence
  source: /note="Description of Artificial Sequence: Synthetic polypeptide"
EVQLLESGGGLVQPGGSLRLSCAASGFTFEWYEMQWVRRAPGGLEWVSAISGDGYRTYYADSVKGRFTISRDNSKNTLYLQMNSLRAEDTAVYYCAKELLYFDYWGRGTLVTVSS

SEQ ID NO: 11868 - protein, 114 aa, Artificial Sequence
  source: /note="Description of Artificial Sequence: Synthetic polypeptide"
EVQLLESGGGLVQPGGSLRLSCAASGFTFEYEMQWVRRAPGKGLEWVSAISGDGYRTYYADSVGRFTISRDNSKNTLYLQMNSLRAEDTAVYYCAKELEFFDYWGRGTLVTVSS

SEQ ID NO: 11869 - protein, 113 aa, Artificial Sequence
  source: /note="Description of Artificial Sequence: Synthetic polypeptide"
EVQLLESGGGLVQPGGSLRLSCAASGFTFEWYEMQVRRAPGKGLEWVSAISGDGYRTYYADSVKGRFTISRDNSNTLYLQMNSLAEDTAVYYCAKELQFFDYWGRGTLVTVSS

SEQ ID NO: 11870 - protein, 115 aa, Artificial Sequence
  source: /note="Description of Artificial Sequence: Synthetic polypeptide"
EVQLLESGGGLVQPGGSLRLSCAASGFTFPKNEMTWVRQAPGKGLEVSAIESDGQATYYADSVGRFTISRDNSNTLYLQMNSLRAEDTAVYYCAKNRIPDLVFDYGQGTLVTVSS

SEQ ID NO: 11871 - protein, 115 aa, Artificial Sequence
  source: /note="Description of Artificial Sequence: Synthetic polypeptide"
EVQLLESGGGLVQPGGSLRLSCAASGFTFEWYEMQWVRRAPGKGLEWVSAISGDGYRTYYADSVKGRFTISRDNSNTLYLQMNSLRAEDTAVYYCAKELLFFDYWGRGTLVTVSS

SEQ ID NO: 11872 - protein, 114 aa, Artificial Sequence
  source: /note="Description of Artificial Sequence: Synthetic polypeptide"
EVQLLESGGGLVRPGGSLRLSCAASGFTFEWYEMQWVRRAPGKGLEWVSAISGDGYRTYYADSVKGRFTISRDNSKNTLYLQMNSLAEDTAVYYCAELEFFDYWGRGTLVTVSS

SEQ ID NO: 11873 - protein, 114 aa, Artificial Sequence
  source: /note="Description of Artificial Sequence: Synthetic polypeptide"
EVQLLESGGGLVQPGGSLRLSCAASGFTFEWYEMQWVRRAPGGLEWVSAISGDGYRTYYADSVGRFTISRDNSKNTLYLQMNSLRAEDTAVYYCAKELLFFDYRGRGTLVTVSS

SEQ ID NO: 11874 - protein, 114 aa, Artificial Sequence
  source: /note="Description of Artificial Sequence: Synthetic polypeptide"
EVQLLESGGGLVQPGGSLRLSCAASGFIFEWYEMQWVRRAPGKGLEWVSAISGDGYRTYTADSVGRFTISRDNSKNTLYLQMNSLRAEDTAVYYCAKLEYFDYWGRGTLVTVSS

SEQ ID NO: 11875 - protein, 116 aa, Artificial Sequence
  source: /note="Description of Artificial Sequence: Synthetic polypeptide"
EVRLLESGGGLVQPGGSLRLSCAASGFTFEWYEMQWVRRAPGKGLEWVSAISGDGYRTYYADSVKGRFTISRDNSKNTLYLQMNSLRAEDTAVYYCAKELQFFDYWGRGTLVTVSS

SEQ ID NO: 11876 - protein, 115 aa, Artificial Sequence
  source: /note="Description of Artificial Sequence: Synthetic polypeptide"
EVQLLGSGGGLVQPGGSLRLSCAASGFTFEEEEMIWVRQAPGKGLEWVSAISGSGGSTYYADSVKGRFTISRDNSKNTLYLQMNSLRAEDTAVYYCSKEPFRFDYGQGTLVTVSS

SEQ ID NO: 11877 - protein, 116 aa, Artificial Sequence
  source: /note="Description of Artificial Sequence: Synthetic polypeptide"
EVQLLASGGGLVQPGGSLRLSCAASGFTFEEEEMIWVRQAPGKGLEWVSAISGSGGSTYYADSVKGRFTISRDNSKNTLYLQMNSLRAEDTAVYYCGKEPFRYDYWGQGTLVTVSS

SEQ ID NO: 11878 - protein, 114 aa, Artificial Sequence
  source: /note="Description of Artificial Sequence: Synthetic polypeptide"
EVQLLASGGGLVQPGGSLRLSCAASGFTFEEEEMIWVRQAPGKGLEWISAISGSGGSTYYADSVGRFTISRDNSKNTLYLQMNSLRAEDTAVYYCGKEPFRFDYGQGTLVTVSS

SEQ ID NO: 11879 - protein, 115 aa, Artificial Sequence
  source: /note="Description of Artificial Sequence: Synthetic polypeptide"
EVQLLDPGGGLVQPGGSLRLSCAASGFTFGKEEMIWVRQAPGKGLEWVSSISGSGGSTYYADSVKGRFTISRDNSRNTLYLQMNSLRAEDTAVYYCGEPFRFDYWGQGTLVTVSS

SEQ ID NO: 11880 - protein, 116 aa, Artificial Sequence
  source: /note="Description of Artificial Sequence: Synthetic polypeptide"
EVQLLGSGGGLVQPGGSLRLSCAASGFTFEEEEMIWVRQAPGKGLEWVSAISGSGGSTYYADSVKGRFTISRDNSKNTLYLQMNSLRAEDTAVYYCGKEPFRFDYWGQGTLVTVSS

SEQ ID NO: 11881 - protein, 117 aa, Artificial Sequence
  source: /note="Description of Artificial Sequence: Synthetic polypeptide"
EVQLLESGGGLVQPGGSLRLSCAASGFTFDAGAHTWVRQAPGKGLEWVSSIDKEGLSTYYADSVGRFTISRDNSNTLYLQMNSLRAEDTAVYYCAKGRIPGLVFDYWGQGTLVTVSS

SEQ ID NO: 11882 - protein, 116 aa, Artificial Sequence
  source: /note="Description of Artificial Sequence: Synthetic polypeptide"
EVQLLEPGGGLVQPGGSLRLSCAASGFTFEEEEMIWVRQAPGKGLEWVSAISGSGGSTYYADSVKGRFTISRDNSKNTLYLLMNSLRAEDTAVYYCSKEPFRFDYWGQGALVTVSS

SEQ ID NO: 11883 - protein, 116 aa, Artificial Sequence
  source: /note="Description of Artificial Sequence: Synthetic polypeptide"
EVQLLDPGGGLVQPGGSLRLSCAASGFTFGKEEMIWVRQAPGKGLEWVSSISGSGGSTYYADSVKGRFTISRDNSKNTLYLQMNSLRAEDTAVYYCAKEPLRFDYWGQGTLVTVSS

SEQ ID NO: 11884 - protein, 114 aa, Artificial Sequence
  source: /note="Description of Artificial Sequence: Synthetic polypeptide"
EVQLLESGGGLVQPGGSLRLSCAASGFTFEEEEMIWVRQAPGKGLEWISAISGSGGSTYYADSVGRFTIHRDNSNTLYLQMNSLRAEDTAVYYCSKEPFRFDYRGLGTLVTVSS

SEQ ID NO: 11885 - protein, 116 aa, Artificial Sequence
  source: /note="Description of Artificial Sequence: Synthetic polypeptide"
EVQLLDPGGGLVQPGGSLRLSCAASGFTFGKEEMIWVRQAPGKGLEWVSSISGSGGSTYYADSVKGRFTISRDNSRNTLYLQMNSLRAEDTAVYYCAKEPLRFDYWGQGTLVTVSS

SEQ ID NO: 11886 - protein, 116 aa, Artificial Sequence
  source: /note="Description of Artificial Sequence: Synthetic polypeptide"
EVQLLDSGGGFVQPGGSLRLSCAASGFTFEEEEMIWVRQAPGKGLEWISAISGSGGSTYYADSVKGRFTISRDNSKNTLYLQMNSLRAEDTAVYYCAKEPFRFDYWGQGTLVTVSS

SEQ ID NO: 11887 - protein, 116 aa, Artificial Sequence
  source: /note="Description of Artificial Sequence: Synthetic polypeptide"
EVQLLDPGGGLVQPGGSLRLSCAASGFTFEEEEMIWVRQAPGKGLEWISAISGSGGSTYYADSVKGRFTISRDNSNNTLYLQMNSLRAEDTAVYYCGREPFRFDYWGQGTLVTVSS

SEQ ID NO: 11888 - protein, 115 aa, Artificial Sequence
  source: /note="Description of Artificial Sequence: Synthetic polypeptide"
EVRLLESGEGLVQPGGSLRLSCAASGFTFEEEEMIWVRQAPGKGLEWVSAISGSGGSTYYADSVKGRFTISRDNSKNTLYLQMNSLRAEDTAVYYCGKEPFRFDYGQGTLVTVSS

SEQ ID NO: 11889 - protein, 115 aa, Artificial Sequence
  source: /note="Description of Artificial Sequence: Synthetic polypeptide"
EVQQLESGGGLVQPGGSLRLSCAASGFTFEEEEMIWVRQAPGKGLEWVSAISGSGGSTYYADSVKGRFTISRDNSKNTLYLQMNSLRAEDTAVYYCGEPFRFDYWGQGTLVTVSS

SEQ ID NO: 11890 - protein, 115 aa, Artificial Sequence
  source: /note="Description of Artificial Sequence: Synthetic polypeptide"
EVQLLASGGGLVQPGGSLRLSCAASGFTFEEEEMIWVRQAPGKGLEWVSAISGSGGSTYYADSVKGRFTISRDNSKNTLYLQMNSLRAEDTAVYYCGEPFYYDYWGQGTLVTVSS

SEQ ID NO: 11891 - protein, 115 aa, Artificial Sequence
  source: /note="Description of Artificial Sequence: Synthetic polypeptide"
EVQLLASGGGLVQPGGSLRLSCAASGFTFEEEEMIWRQAPGKGLEWVSAISGSGGSTYYADSVKGRFTISRDNSKNTLYLQMNSLRAEDTAVYYCGKEPFYFDYWGQGTLVTVSS

SEQ ID NO: 11892 - protein, 119 aa, Artificial Sequence
  source: /note="Description of Artificial Sequence: Synthetic polypeptide"
EVQLLESGGGLVQPGGSLRLSCAASGFTFGDAAMTWVRQAPGKGLEWVSAIQPMGDGTYYADSVKGRFTVSRDNSKNTLYLQMNSLRAEDTAVYYCAKGRIPTLQFDYWGQGTLVTVSS

SEQ ID NO: 11893 - protein, 115 aa, Artificial Sequence
  source: /note="Description of Artificial Sequence: Synthetic polypeptide"
EVQLLASGGGLVQPGGSLRLSCAASGFTFEEKEMIWVRQAPGGLEWVSAISGSGGSTYYADSVKGRFTISRDNSKNTLYLQMNSLRAEDTAVYYCGKEPFFYDYWGQGTLVTVSS

SEQ ID NO: 11894 - protein, 114 aa, Artificial Sequence
  source: /note="Description of Artificial Sequence: Synthetic polypeptide"
EVQLLASGGGLVQPGGSLRLSCAASGFTFPQEEMIWVRQAPGGLEWVSAISGSGGSTYYADSVKGRFTISRDNSKNTLYLQMNSLRAEDTAVYYCGEPFRYDYWGQGTLVTVSS

SEQ ID NO: 11895 - protein, 114 aa, Artificial Sequence
  source: /note="Description of Artificial Sequence: Synthetic polypeptide"
EVQLLASGGGLVQPGGSLRLSCAASGFTFFAAEMIWVRQAPGGLEWVSAISGSGGSTYYADSVKGRFTISRDNSKNTLYLQMNSLRAEDTAVYYCGKEPFRYDYGQGTLVTVSS

SEQ ID NO: 11896 - protein, 114 aa, Artificial Sequence
  source: /note="Description of Artificial Sequence: Synthetic polypeptide"
EVQLLASGGGLVQPGGSLRLSCAASGFTFEEEEMIWVRQAPGKGLEWVSAISRPGTSTYYADSVGRFTISRDNSKNTLYLQMNSLRAEDTAVYYCGEPFRYDYWGQGTLVTVSS

SEQ ID NO: 11897 - protein, 114 aa, Artificial Sequence
  source: /note="Description of Artificial Sequence: Synthetic polypeptide"
EVQLLASGGGLVQPGGSLRLSCAASGFTFEEEEMIWVRQAPGKGLEWVSAISRMGFSTYYADSVGRFTISRDNSNTLYLQMNSLRAEDTAVYYCGKEPFRYDYWGQGTLVTVSS

SEQ ID NO: 11898 - protein, 115 aa, Artificial Sequence
  source: /note="Description of Artificial Sequence: Synthetic polypeptide"
EVQLLASGGGLVQPGGSLRLSCAASGFTFEEEEIWVRQAPGKGLEWVSAISRWGHSTYYADSVKGRFTISRDNSKNTLYLQMNSLRAEDTAVYYCGKEPFRYDYWGQGTLVTVSS

SEQ ID NO: 11899 - protein, 116 aa, Artificial Sequence
  source: /note="Description of Artificial Sequence: Synthetic polypeptide"
EVQLLASGGGLVQPGGSLRLSCAASGFTFEEEEMIWVRQAPGKGLEWVSAISRLGWSTYYADSVKGRFTISRDNSKNTLYLQMNSLRAEDTAVYYCGKEPFRYDYWGQGTLVTVSS

SEQ ID NO: 11900 - protein, 116 aa, Artificial Sequence
  source: /note="Description of Artificial Sequence: Synthetic polypeptide"
EVQLLASGGGLVQPGGSLRLSCAASGFTFEEEEMIWVRQAPGKGLEWVSAISRWGASTYYADSVKGRFTISRDNSKNTLYLQMNSLRAEDTAVYYCGKEPFRYDYWGQGTLVTVSS

SEQ ID NO: 11901 - protein, 116 aa, Artificial Sequence
  source: /note="Description of Artificial Sequence: Synthetic polypeptide"
EVQLLASGGGLVQPGGSLRLSCAASGFTFEEEEMIWVRQAPGKGLEWVSAISRQGGSTYYADSVKGRFTISRDNSKNTLYLQMNSLRAEDTAVYYCGKEPFRYDYWGQGTLVTVSS

SEQ ID NO: 11902 - protein, 116 aa, Artificial Sequence
  source: /note="Description of Artificial Sequence: Synthetic polypeptide"
EVQLLASGGGLVQPGGSLRLSCAASGFTFEEEEMIWVRQAPGKGLEWVSAISVSGWSTYYADSVKGRFTISRDNSKNTLYLQMNSLRAEDTAVYYCGKEPFRYDYWGQGTLVTVSS

SEQ ID NO: 11903 - protein, 118 aa, Artificial Sequence
  source: /note="Description of Artificial Sequence: Synthetic polypeptide"
EVQLLESGGGLVQPGGSLRLSCAASGFTFEDSPMTWVRQAPGKGLEWVSAITSNGYETYYADSVKGRFTISRDNSNTLYLQMNSLRAEDTAVYYCAKGRIPTLHFDYWGQGTLVTVSS

SEQ ID NO: 11904 - protein, 116 aa, Artificial Sequence
  source: /note="Description of Artificial Sequence: Synthetic polypeptide"
EVQLLASGGGLVQPGGSLRLSCAASGFTFEEEEMIWVRQAPGKGLEWVSAISRWGWSTYYADSVKGRFTISRDNSKNTLYLQMNSLRAEDTAVYYCGKEPFRYDYWGQGTLVTVSS

SEQ ID NO: 11905 - protein, 116 aa, Artificial Sequence
  source: /note="Description of Artificial Sequence: Synthetic polypeptide"
EVQLLASGGGLVQPGGSLRLSCAASGFTFEEEEMIWVRQAPGKGLEWVSAISRNGLSTYYADSVKGRFTISRDNSKNTLYLQMNSLRAEDTAVYYCGKEPFRYDYWGQGTLVTVSS

SEQ ID NO: 11906 - protein, 116 aa, Artificial Sequence
  source: /note="Description of Artificial Sequence: Synthetic polypeptide"
EVQLLASGGGLVQPGGSLRLSCAASGFTFEEEEMIWVRQAPGKGLEWVSAISGLGWSTYYADSVKGRFTISRDNSKNTLYLQMNSLRAEDTAVYYCGKEPFRYDYWGQGTLVTVSS

SEQ ID NO: 11907 - protein, 115 aa, Artificial Sequence
  source: /note="Description of Artificial Sequence: Synthetic polypeptide"
EVQLLASGGGLVQPGGSLRLSCAASGFTFEEEEMIWVRQAPGKGLEWVSAISALGWSTYYADSVKGRFTISRDNSKNTLYLQMNSLRAEDTAYYCGKEPFRYDYWGQGTLVTVSS

SEQ ID NO: 11908 - protein, 116 aa, Artificial Sequence
  source: /note="Description of Artificial Sequence: Synthetic polypeptide"
EVQLLASGGGLVQPGGSLRLSCAASGFTFEEEEMIWVRQAPGKGLEWVSAISRRGYSTYYADSVKGRFTISRDNSKNTLYLQMNSLRAEDTAVYYCGKEPFRYDYWGQGTLVTVSS

SEQ ID NO: 11909 - protein, 113 aa, Artificial Sequence
  source: /note="Description of Artificial Sequence: Synthetic polypeptide"
EVQLLASGGGLVQPGGSLRLSCAASGFTFEEEEMIWVRQAPGGLEWVSAISRHGWSTYYADSVKGRFTISRDNSNTLYLQMNSLRAEDTAYYCGKEPFRYDYWGQGTLVTVSS

SEQ ID NO: 11910 - protein, 116 aa, Artificial Sequence
  source: /note="Description of Artificial Sequence: Synthetic polypeptide"
EVQLLASGGGLVQPGGSLRLSCAASGFTFEEEEMIWVRQAPGKGLEWVSSISRSGGSTYYADSVKGRFTISRDNSKNTLYLQMNSLRAEDTAVYYCGKEPFRYDYWGQGTLVTVSS

SEQ ID NO: 11911 - protein, 116 aa, Artificial Sequence
  source: /note="Description of Artificial Sequence: Synthetic polypeptide"
EVQLLASGGGLVQPGGSLRLSCAASGFTFEEEEMIWVRQAPGKGLEWVSAISRIGNSTYYADSVKGRFTISRDNSKNTLYLQMNSLRAEDTAVYYCGKEPFRYDYWGQGTLVTVSS

SEQ ID NO: 11912 - protein, 116 aa, Artificial Sequence
  source: /note="Description of Artificial Sequence: Synthetic polypeptide"
EVQLLASGGGLVQPGGSLRLSCAASGFTFEEEEMIWVRQAPGKGLEWVSAISGHGWSTYYADSVKGRFTISRDNSKNTLYLQMNSLRAEDTAVYYCGKEPFRYDYWGQGTLVTVSS

SEQ ID NO: 11913 - protein, 116 aa, Artificial Sequence
  source: /note="Description of Artificial Sequence: Synthetic polypeptide"
EVQLLASGGGLVQPGGSLRLSCAASGFTFEEEEMIWVRQAPGKGLEWVSAISRWGGSTYYADSVKGRFTISRDNSKNTLYLQMNSLRAEDTAVYYCGKEPFRYDYWGQGTLVTVSS

SEQ ID NO: 11914 - protein, 118 aa, Artificial Sequence
  source: /note="Description of Artificial Sequence: Synthetic polypeptide"
EVQLLESGGGLVQPGGSLRLSCAASGFTFDEHDMSWVRQAPGKGLEWVSRIGPDGFHTYYADSVGRFTISRDNSKNTLYLQMNSLRAEDTAVYYCAKGRIPTLHFDYWGQGTLVTVSS

SEQ ID NO: 11915 - protein, 116 aa, Artificial Sequence
  source: /note="Description of Artificial Sequence: Synthetic polypeptide"
EVQLLASGGGLVQPGGSLRLSCAASGFTFEEEEMIWVRQAPGKGLEWVSAISGSGGSTYYADSVKGRFTISRDNSKNTLYLQMNSLRAEDTAVYYCGKEPFMYDYWGQGTLVTVSS

SEQ ID NO: 11916 - protein, 115 aa, Artificial Sequence
  source: /note="Description of Artificial Sequence: Synthetic polypeptide"
EVQLLASGGGLVQPGGSLRLSCAASGFTFEEEEMIWVRQAPGKGLEWVSAISGSGGSTYYADSVKGRFTISRDNSKNTLYLQMNSLRAEDTAVYYCGKEPFPDYWGQGTLVTVSS

SEQ ID NO: 11917 - protein, 116 aa, Artificial Sequence
  source: /note="Description of Artificial Sequence: Synthetic polypeptide"
EVQLLASGGGLVQPGGSLRLSCAASGFTFEEEEMIWVRQAPGKGLEWVSAISGSGGGTYYADSVKGRFTISRDNSKNTLYLQMNSLRAEDTAVYYCGKEPFRYDYWGQGTLVTVSS

SEQ ID NO: 11918 - protein, 114 aa, Artificial Sequence
  source: /note="Description of Artificial Sequence: Synthetic polypeptide"
EVQLLASGGGLVQPGGSLRLSCAASGFTFEEEEMIWVRQAPGGLEWVSAISGSGGSTYYADSVKGRFTISRDNSNTLYLQMNSLRAEDTAVYYCGKEPLYYDYWGQGTLVTVSS

SEQ ID NO: 11919 - protein, 116 aa, Artificial Sequence
  source: /note="Description of Artificial Sequence: Synthetic polypeptide"
EVQLLASGGGLVQPGGSLRLSCAASGFTFEEEEMIWVRQAPGKGLEWVSAISGSGGSTYYADSVKGRFTISRDNSKNTLYLQMNSLRAEDTAVYYCGKEPMYYDYWGQGTLVTVSS

SEQ ID NO: 11920 - protein, 116 aa, Artificial Sequence
  source: /note="Description of Artificial Sequence: Synthetic polypeptide"
EVQLLASGGGLVQPGGSLRLSCAASGFTFEEEEMIWVRQAPGKGLEWVSAISRNGFSTYYADSVKGRFTISRDNSKNTLYLQMNSLRAEDTAVYYCGKEPFRYDYWGQGTLVTVSS

SEQ ID NO: 11921 - protein, 113 aa, Artificial Sequence
  source: /note="Description of Artificial Sequence: Synthetic polypeptide"
EVQLLASGGGLVQPGGSLRLSCAASGFTFEEEEMIWVRQAPGKGLEVSAISRTGGSTYYADSVKGRFTISRDNSNTLYLQMNSLRAEDTAVYYCGEPFRYDYWGQGTLVTVSS

SEQ ID NO: 11922 - protein, 116 aa, Artificial Sequence
  source: /note="Description of Artificial Sequence: Synthetic polypeptide"
EVQLLASGGGLVQPGGSLRLSCAASGFTFEEEEMIWVRQAPGKGLEWVSAISREGGSTYYADSVKGRFTISRDNSKNTLYLQMNSLRAEDTAVYYCGKEPFRYDYWGQGTLVTVSS

SEQ ID NO: 11923 - protein, 116 aa, Artificial Sequence
  source: /note="Description of Artificial Sequence: Synthetic polypeptide"
EVQLLASGGGLVQPGGSLRLSCAASGFPFEEEEMIWVRQAPGKGLEWVSAISRQGWSTYYADSVKGRFTISRDNSKNTLYLQMNSLRAEDTAVYYCGKEPFRYDYWGQGTLVTVSS

SEQ ID NO: 11924 - protein, 115 aa, Artificial Sequence
  source: /note="Description of Artificial Sequence: Synthetic polypeptide"
EVQLLASGGGLVQPGGSLRLSCAASGFTFEEEEMIWVRQAPGKGLEWVSAISRGGGSTYYADSVKGRFTISRDNSKNTLYLQMNSLRAEDTAVYYCGKEPFRYDYWGQGTLTVSS

SEQ ID NO: 11925 - protein, 118 aa, Artificial Sequence
  source: /note="Description of Artificial Sequence: Synthetic polypeptide"
EVQLLESGGGLVQPGGSLRLSCAASGFTFGEYHMSWVRQAPGKGLEWVSRITPLGTLTYYADSVKGRFTISRDNSKNTLYLQMNSLRAEDTAVYYCAGRIPSLTFDYWGQGTLVTVSS

SEQ ID NO: 11926 - protein, 116 aa, Artificial Sequence
  source: /note="Description of Artificial Sequence: Synthetic polypeptide"
EVQLLASGGGLVQPGGSLRLSCAASGFTFEEEEMIWVRQAPGKGLEWVSAISRTGYSTYYADSVKGRFTISRDNSKNTLYLQMNSLRAEDTAVYYCGKEPFRYDYWGQGTLVTVSS

SEQ ID NO: 11927 - protein, 114 aa, Artificial Sequence
  source: /note="Description of Artificial Sequence: Synthetic polypeptide"
EVQLLASGGGLVQPGGSLRLSCAASGFTFEEEEMIWVRQAPGGLEWVSAISRNGRSTYYADSVKGRFTISRDNSKNTLYLQMNSLRAEDTAVYYCGEPFRYDYWGQGTLVTVSS

SEQ ID NO: 11928 - protein, 114 aa, Artificial Sequence
  source: /note="Description of Artificial Sequence: Synthetic polypeptide"
EVQLLASGGGLVQPGGSLRLSCAASGFTFEEEEMIWVRQAPGKGLEVSAISRNGYSTYYADSVGRFTISRDWSKNTLYLQMNSLRAEDTAVYYCGKEPFRYDYWGQGTLVTVSS

SEQ ID NO: 11929 - protein, 115 aa, Artificial Sequence
  source: /note="Description of Artificial Sequence: Synthetic polypeptide"
EVQLLASGGGLVQPGGSLRLSCAASGFTFEEEEMIWVRQAPGKGLEWVSAISRKGSSTYYADSVKGRFTISRDNSKNTLYLQMNSLRAEDTAVYYCGEPFRYDYWGQGTLVTVSS

SEQ ID NO: 11930 - protein, 115 aa, Artificial Sequence
  source: /note="Description of Artificial Sequence: Synthetic polypeptide"
EVQLLASGGGLVQPGGSLRLSCAASGFTFEEEEMIWVRQAPGKGLEWVSAISRGGSTYYADSVKGRFTISRDNSKNTLYLQMNSLRAEDTAVYYCGKEPFRYDYWGQGTLVTVSS

SEQ ID NO: 11931 - protein, 113 aa, Artificial Sequence
  source: /note="Description of Artificial Sequence: Synthetic polypeptide"
EVQLLASGGGLVQPGGSLRLSCAASGFTFEEEEMIWVRQAPGGLEWVSAISRSGYSTYYADSVKGRFTISRDNSKNTLYLQMNSLRAEDTAVYYCGEFRYDYWGQGTLVTVSS

SEQ ID NO: 11932 - protein, 116 aa, Artificial Sequence
  source: /note="Description of Artificial Sequence: Synthetic polypeptide"
EVQLLASGGGLVQPGGSLRLSCAASGFTFEEEEMIWVRQAPGKGLEWVSAISRNGMSTYYADSVKGRFTISRDNSKNTLYLQMNSLRAEDTAVYYCGKEPFRYDYWGQGTLVTVSS

SEQ ID NO: 11933 - protein, 116 aa, Artificial Sequence
  source: /note="Description of Artificial Sequence: Synthetic polypeptide"
EVQLLESGGGLVQPGGSLRLSCAASGFTFEEEEMIWVRQAPGKGLEWVSAISRNGYSTYYADSVKGRFTISRDNSKNTLYLQHNSLRAEDTAVYYCGKEPFRYDYWGQGTLVTVSS

SEQ ID NO: 11934 - protein, 112 aa, Artificial Sequence
  source: /note="Description of Artificial Sequence: Synthetic polypeptide"
EVQLLESGEGLVQPGGSLRLSCAASGFTFTEHEMIWVRQAPGGLEWVSSISGNGANTYYADSVKGRFTISRDNSKNTLYLQMNSLRPEDTAVYYCAKEPLFDYGQGTLTVSS

SEQ ID NO: 11935 - protein, 112 aa, Artificial Sequence
  source: /note="Description of Artificial Sequence: Synthetic polypeptide"
EVQLLESGGGLVQPGGSLRLSCAASGSTFTEYEMIWVRQAPGKGLEISSISGNGANTYYADSVGRFTISRDNSKNTLYLQMSLAEDTAVYFCAKEPLRFDYRGQGTLVTVSS

SEQ ID NO: 11936 - protein, 118 aa, Artificial Sequence
  source: /note="Description of Artificial Sequence: Synthetic polypeptide"
EVQLLESGGGLVQPGGSLRLSCAASGFTFGTNAMSWVRQAPGKGLEVSRISPGGDYTYYADSVKGRFTISRDNSKNTLYLQMNSLRAEDTAVYYCAKGRVPDLLFDYWGQGTLVTVSS

SEQ ID NO: 11937 - protein, 114 aa, Artificial Sequence
  source: /note="Description of Artificial Sequence: Synthetic polypeptide"
EVQLLEPGGGLVQPGGSLRLSCAASGFTFTEYEMIWVRKAPGKGMEWVSSISGNGANTYYADSVKGRFTISRDNSNMLYLQNSLRAEDTAVYYCAKEPLRFGYWGQGTLVTVSS

SEQ ID NO: 11938 - protein, 116 aa, Artificial Sequence
  source: /note="Description of Artificial Sequence: Synthetic polypeptide"
EVQLLDSGGGLVQPGGSLRLSCAASGFTFTEYEMIWVRQAPGKGLEWVSSISGNGANTYYADSVKGRFTISRDNSKNTLYLQMNSLRAEDTAVYYCAKEPLRFDYWGRGTLVTVSS

SEQ ID NO: 11939 - protein, 115 aa, Artificial Sequence
  source: /note="Description of Artificial Sequence: Synthetic polypeptide"
EVQLLGSGGGLVQPGGSLRLSCAASGFTFTEYEMIWVRQAPGKSLEWVSSISGNGANTYYADSVKGRFTISRDNSKNTLYLQMNSLRAEDTAVYYCAEPLRYDDWGQGTLVTVSS

SEQ ID NO: 11940 - protein, 116 aa, Artificial Sequence
  source: /note="Description of Artificial Sequence: Synthetic polypeptide"
EVQPLESGGGLVQPGGSLRLSCSASGFTFNEYEMIWVRQAPGKGLEWVSSISGNGANTYYADSVKGRFTISRDNSKNTLYLQMNSLRAEDTAVYYCAKEPLRFDYWGQGTLVTVSS

SEQ ID NO: 11941 - protein, 116 aa, Artificial Sequence
  source: /note="Description of Artificial Sequence: Synthetic polypeptide"
EVQLLESGEGLVQPGGSLRLSCAASGFTFAEYEMIWVRQAPGKGLEWVSSISGNGANTYYADSVKGRFTISRDNSKNTLYLQMNSLRAEDTAVYYCAKEPLRFDYWGQGTLVTVSS

SEQ ID NO: 11942 - protein, 116 aa, Artificial Sequence
  source: /note="Description of Artificial Sequence: Synthetic polypeptide"
EVQLLDPGGGLVQPGGSLRLSCAASGFTFTESEMIWVRQAPGKGLEWVSSISGNGANTYYADSVKGRFTISRDNSKNTLYLQMNSLRAEDTAVYYCAKEPLRFDYWGQGTLVTVSS

SEQ ID NO: 11943 - protein, 113 aa, Artificial Sequence
  source: /note="Description of Artificial Sequence: Synthetic polypeptide"
EVQLLEPGGGLVQPGGSLRLSCAASGFTFTEYEMIWVRAPGKGMEWVSSISGNGANTYYADSVGRFTISRDNSKNTLYLQMNSLRPEDTAVYYCAEPLRFDDWGQGTLVTVSS

SEQ ID NO: 11944 - protein, 115 aa, Artificial Sequence
  source: /note="Description of Artificial Sequence: Synthetic polypeptide"
EVQLLESGVGLVQPGGSLRLSCAASGFTFTEYEMIWVRKAPGKGLEWVSSISGNGANTYYADSVGRFTISRDNSKNTLYLQMNSLRAEDTAVYYCAKEPLRFDNWGQGTLVTVSS

SEQ ID NO: 11945 - protein, 116 aa, Artificial Sequence
  source: /note="Description of Artificial Sequence: Synthetic polypeptide"
EVQLLESRGGLVQPGGSLRLSCAASGFTFTEHEMIWVRQAPGKGLEWVSSISGNGANTYYADSVKGRFSVSRDNSKNTLYLQMNSLRAEDTAVYYCAKEPLRFDYWGQGTLVTVSS

SEQ ID NO: 11946 - protein, 113 aa, Artificial Sequence
  source: /note="Description of Artificial Sequence: Synthetic polypeptide"
EVQPLESGGGLVQPGGSLRLSCAASGFTFTEYEMIVRQAPGGLEWVSSISGNGANTYYADSVKGRFTISRDNSKNTLYLQMNSLRAEDTAVYYCAKEPLRFDYGQGTLVTVSS

SEQ ID NO: 11947 - protein, 118 aa, Artificial Sequence
  source: /note="Description of Artificial Sequence: Synthetic polypeptide"
EVQLLESGGGLVQPGGSLRLSCAASGFTFPSEEMSWVRQAPGKGLEWVSRISADGANTYYADSVKGRFTISRDNSKNTLYLQMNSLRAEDAAVYYCAKGRVPDLLFDYGQGTLVTVSS

SEQ ID NO: 11948 - protein, 115 aa, Artificial Sequence
  source: /note="Description of Artificial Sequence: Synthetic polypeptide"
EVQLLESAGGLVQPGGSLRLSCAASGFTFAEYEMIWVRQAPGKGLEWVSSISGNGANTYYADSVKGRFTISRDNSKNTLYLQMNSLRAEDTAVYYCAKEPLRFDYWGQGALVTSS

SEQ ID NO: 11949 - protein, 123 aa, Artificial Sequence
  source: /note="Description of Artificial Sequence: Synthetic polypeptide"
EVQLLESGGGLVQPGGSLRLSCTASGFTFNMYEMSWVRQAPGKGLEWVSGISRRGFTTYYADSVKGRFTISRDNSKNTLYLQMNSLRAEDTAVYYCAKEPITYDLRYARFDYSGQGTLVTVSS

SEQ ID NO: 11950 - protein, 122 aa, Artificial Sequence
  source: /note="Description of Artificial Sequence: Synthetic polypeptide"
EEQLLESGGGLVQPGGSLRLSCTASGFTFNMYEMSWVRQAPGKGLEVSGISRRGFTTYYADSVKGRFTISRDNSKNTLYLQMNSLRAEDTAVYYCAKEPITYATRYARFDYWGQGTLVTVSS

SEQ ID NO: 11951 - protein, 123 aa, Artificial Sequence
  source: /note="Description of Artificial Sequence: Synthetic polypeptide"
EVQLLESGGGLVQPGGSLRLSCTASGFTFNMYEMSWVRQAPGKGLEWVSGISRRGFTTYYADSVKGRFTISRDNFKNTLYLQMNSLRAEDTAVYYCAKEPITYDMRYARFDYGGQGTLVTVSS

SEQ ID NO: 11952 - protein, 123 aa, Artificial Sequence
  source: /note="Description of Artificial Sequence: Synthetic polypeptide"
EVQLLESGGGLVQPGGSLRLSCTASGFTFNMYEMSWVRQAPGKGLEWVSGISRRGFTTYYADSVKGRFTISRDNSKNTLYLQMNSLRAEDTAVYYCAKEPITYDMRYARFDNWGQGTLVTVSN

SEQ ID NO: 11953 - protein, 120 aa, Artificial Sequence
  source: /note="Description of Artificial Sequence: Synthetic polypeptide"
EVQLMESGGGLVQPGGSLRLSCTASGFSFNMYEMSWVRQAPGKGLEWVSGISRRGYTTYYADSVGRFTISRDNSKNTLYLQMNSLRAEDTAVYYCAKEPITYDMYARFDYWGRGTLTVSS

SEQ ID NO: 11954 - protein, 123 aa, Artificial Sequence
  source: /note="Description of Artificial Sequence: Synthetic polypeptide"
EVQLLESGGGLVQPGGSLRLSCTASGFAFNMYEMSWVRQAPGKGLEWVSGISRHGFTTYYADSVKGRFTVSRDNSKNTLYLQMNSLRAEDTAVYYCAKEPITYDMRYARSDYWGQGTLVTVSS

SEQ ID NO: 11955 - protein, 123 aa, Artificial Sequence
  source: /note="Description of Artificial Sequence: Synthetic polypeptide"
EVQLLESGGGLVQPGGSLRLSCTASGFTFNMYEMSWVRQAPGKGLEWVSGISRRGFTTYYADSVKGRFTISRDNSKNTLYLQMNSLRAEDTAVYFCAKEPITYDMRYARSDYWGQGTLVTVSS

SEQ ID NO: 11956 - protein, 122 aa, Artificial Sequence
  source: /note="Description of Artificial Sequence: Synthetic polypeptide"
EVQLLESGGGLVQPGGSLRLSCTASGFTFNMYEMSWVRQAPGKGLEWVSGISRRGFTTYYADSVKGRFTISRDNSKNTLYLQMNSLRAEDTAVYYCAKEPITYSMRYAFDYSGLGTMVTVSS

SEQ ID NO: 11957 - protein, 123 aa, Artificial Sequence
  source: /note="Description of Artificial Sequence: Synthetic polypeptide"
EVQLLESGGGLVQPGGSLRLSCTASGFTFNMYEMSWVRQAPGKGLEWVSGISRRGFTTYYADSVKGRFTISRDNSKNTLYLQMNSLRAEDTAVYYCAKEPITYDMRYARFDYSGQGTLVTVSS

SEQ ID NO: 11958 - protein, 120 aa, Artificial Sequence
  source: /note="Description of Artificial Sequence: Synthetic polypeptide"
EVQLLESGGGLVQPGGSLRLSCTASGFTFNMYEMSWVRKAPGGLEWVSGISRHGFTTYYADSVKGRFTISRDNSNTLYLQMNSLRAEDTAVYYCAKEPITYDMRYARFDYGQGTLVTVSS

SEQ ID NO: 11959 - protein, 120 aa, Artificial Sequence
  source: /note="Description of Artificial Sequence: Synthetic polypeptide"
EVQLFESGGGLVQPGGSLRLSCTASGFTFNMYEMSWVRQAPGGLEWVSGISRRGFTTYYADSVGRFTISRDNSNTLYLQMNSLRAEDTAVYYCAKEPITYDMRYARFDYWGRGTLVTVSS

SEQ ID NO: 11960 - protein, 121 aa, Artificial Sequence
  source: /note="Description of Artificial Sequence: Synthetic polypeptide"
EVQLLESGGGLVQPGGSLRLSCTASGFTFNMYEMSWVRQAPGKGLEWVSGISRRGFTTYYADSVGRFTISRDNSNTLYLQMNSLRAEDTAVYYCAKEPITYDMRYARFDYWGRGTLVTVSS

SEQ ID NO: 11961 - protein, 120 aa, Artificial Sequence
  source: /note="Description of Artificial Sequence: Synthetic polypeptide"
EVQLLESGGGSVQPGGSLRLSCTASGFSFNMYEMSWVRQAPGGLEWVSGISRRGFTTYYADSVKGRFTISRDNSNTLYLQMNSLRAEDTAVYYCAEPITYDMRYARFDYWGQGTLVTVSG

SEQ ID NO: 11962 - protein, 121 aa, Artificial Sequence
  source: /note="Description of Artificial Sequence: Synthetic polypeptide"
EVQLLESGGGLVQPGGSLRLSCTASGFTFNMYEMSWVRAPGKGLEWVSGISRRGFTTYYADSVGRFTISRDNSKNTLYLQMNSLRAEDTAVYYCAKEPITYDMRYARFDYWGQGTLVTVSS

SEQ ID NO: 11963 - protein, 114 aa, Artificial Sequence
  source: /note="Description of Artificial Sequence: Synthetic polypeptide"
EVQLLESGGGLVQPGGSLRLSCAASGFTFRDYEMWWVRQAPGKGLERVSAINPQGTRTYYADSVGRFTISRDNSKNTLYLQMNSLRAEDTAVYYCALPFTFEDWGQGTLVTVSS

SEQ ID NO: 11964 - protein, 116 aa, Artificial Sequence
  source: /note="Description of Artificial Sequence: Synthetic polypeptide"
EVQLLESGGGLVQPGGSLRLSCAASGFTFRDYEMWWVRQAPGKGLERVSAINPQGTRTYYADSVKGRFTISRDNSKNTLYLQMNSLRAEDTAVYYCAKLPFTFDDWGQGTLVTVSS

SEQ ID NO: 11965 - protein, 115 aa, Artificial Sequence
  source: /note="Description of Artificial Sequence: Synthetic polypeptide"
EVQLLESGGGLVQPGGSLLSCAASGFTFRDYEMWWVRQAPGKGLERVSAINPQGTRTYYADSVKGRFTISRDNSKNTLYLQMNSLRAEDTAVYYCTKLPFIFEYWGQGTLVTVSS

SEQ ID NO: 11966 - protein, 116 aa, Artificial Sequence
  source: /note="Description of Artificial Sequence: Synthetic polypeptide"
EVQLLESGGGLVQPGGSLRLSCAASGFTFRDYEMWWVRQAPGKGLERVSAINPQGTRTYYADSVKGRFTISRDNSKNTLYLQMNSLRAEDTAVYYCAKLPFMFDDRGQGTLVTVSS

SEQ ID NO: 11967 - protein, 112 aa, Artificial Sequence
  source: /note="Description of Artificial Sequence: Synthetic polypeptide"
EVQLLESGGGLVQPGGSLRLSCAASGFTFRDYEMWWVRQAPGKGLERVSAINPQGTRTYYADSVMGRFTISRDNSKNTLYLQMNSLRAEDTAVYYALFTFDDWGQGTLVTSS

SEQ ID NO: 11968 - protein, 116 aa, Artificial Sequence
  source: /note="Description of Artificial Sequence: Synthetic polypeptide"
EVQLLESGGGLVQPGGSLRLSCAASGFSFRDYEMWWYRQAPGKGLERVSAINPQGTRTYYADSVKGRFTISRDNSKNTLYLQMNSLRAEDTAVYYCAKLPFIFDNRGQGTLVTVSS

SEQ ID NO: 11969 - protein, 116 aa, Artificial Sequence
  source: /note="Description of Artificial Sequence: Synthetic polypeptide"
EVQLLESGGGLVQPGGSLRLSCAASGFTFRDYEMWWVRQAPGKGLERVSAINPQGTRTYYADSVKGRFTISRDNSKNTLYLQMNSLRAEDTSVYHCAKPPFIFGDWGPGTLVTVSS

SEQ ID NO: 11970 - protein, 115 aa, Artificial Sequence
  source: /note="Description of Artificial Sequence: Synthetic polypeptide"
EVQLLESGGGLVQPGGSRRLSCAASGFTFRDYEMWWVRQAPGKGLERVSAINPQGTRTYYADSVKGRFTISRDNSKNTLYLQMNSLRAEDTAVYYCAKLPFTFEDWGQGTLVTSS

SEQ ID NO: 11971 - protein, 116 aa, Artificial Sequence
  source: /note="Description of Artificial Sequence: Synthetic polypeptide"
EVQLLESGGGLVQPGGSLRLSCAASGFTFRDYEMWWVRQAPGKGLERVSAINPQGTRTYYADSVMGRFTISRDNSKNTLYLQMNSLRAEDTAVYYCAKLPFMFDDRGQGTLVTVSS

SEQ ID NO: 11972 - protein, 116 aa, Artificial Sequence
  source: /note="Description of Artificial Sequence: Synthetic polypeptide"
EVQLLESGGGLVQPGGSLRLSCAASGFTFRDYEMWWVRQAPGKVLERVSAINPQGTRTYYADSVKGRFTISRDNSKNMLYLQMNSLRAEDTAVYYCAKLPFMFDDRGQGTLVTVSS

SEQ ID NO: 11973 - protein, 116 aa, Artificial Sequence; identical to SEQ ID NO: 11966
  source: /note="Description of Artificial Sequence: Synthetic polypeptide"

SEQ ID NO: 11974 - protein, 116 aa, Artificial Sequence
  source: /note="Description of Artificial Sequence: Synthetic polypeptide"
EVQLLESGGGLIQPGGSLRLSCAASGFTFRDYEMWWVRQAPGKGLERVSAINPQGTRTYYADSVKGRFTISRDNSKNTLYLQMNSLRAEDTAVYYCLKLPFIFDYWGQGTLVTVSS

SEQ ID NO: 11975 - protein, 115 aa, Artificial Sequence
  source: /note="Description of Artificial Sequence: Synthetic polypeptide"
EVQLLESGGGLVQPGGSLRLSCAASGFTFRDYEMWWVRQAPGKGLERVSAINPQGTRTYYADSVKGRFTISRDNSKNTLYLQNSLRADDTAVYHCTKLPFIFDYWGQGTLVTVSS

SEQ ID NO: 11976 - protein, 116 aa, Artificial Sequence
  source: /note="Description of Artificial Sequence: Synthetic polypeptide"
EVQLLESGGGLVQPGGSLRLSCAASGFTFRDYEMWWVRRAPGKGLERVSAINPQGTRTYYADSVKGRFTISRDNSKNTLYLQMNSLRAEDTAVYYCAKLPFTFEDWGQGTLVTVSS

SEQ ID NO: 11977 - protein, 114 aa, Artificial Sequence
  source: /note="Description of Artificial Sequence: Synthetic polypeptide"
EVQLLESGGGLVQPGGSLRLSCAASGFTFRDYEMWVRQAPGGLERVSAINPQGTRTYYADSVMGRFTISRDNSKNTLYLQMNSLRAEDTAVYYCAKLPFTFEDWGQGTLVTVSS

SEQ ID NO: 11978 - protein, 113 aa, Artificial Sequence
  source: /note="Description of Artificial Sequence: Synthetic polypeptide"
EVQLLESGGGLVQPGGSLRLSCAASGFSFRDYEMWYRQAPGKGLERVSAINPQGTRTYYADSVGRFTISRDNSKNTLYLQMNSLRAEDTAVYYCAKLPFTFEDGQGTLVTVSS

SEQ ID NO: 11979 - protein, 114 aa, Artificial Sequence
  source: /note="Description of Artificial Sequence: Synthetic polypeptide"
EVQLLESGGGLVQPGGSLRLSCAASGFTFRDYEMWWVRQAPGKVLERVSAINPQGTRTYYADSVGRFTISRDNSNMLYLQMNSLRAEDTAVYYCAKLPFTFEDWGQGTLVTVSS

SEQ ID NO: 11980 - protein, 115 aa, Artificial Sequence
  source: /note="Description of Artificial Sequence: Synthetic polypeptide"
EVQLLESGGGLVQPGGSLRLSCAASGFTFRDYEMWWVRQAPGKGLERVSAINPQGTRTYYADSVGRFTISRDNSKNTLYLQMNSLRAEDTAVYHCAKLPFTFEDWGQGTLVTVSS

SEQ ID NO: 11981 - protein, 114 aa, Artificial Sequence
  source: /note="Description of Artificial Sequence: Synthetic polypeptide"
EVQLLESGGGLVQPGGSLRLSCAASGFTFRDYEMWWVRQAPGKGLERVSAINPQGTRTYYADSVGRFTISRDNSNTLYLQMNSLRAEDTAVYYCTKLPFTFEDWGQGTLVTVSS

SEQ ID NO: 11982 - protein, 116 aa, Artificial Sequence
  source: /note="Description of Artificial Sequence: Synthetic polypeptide"
  MOD_RES (106)..(106): Selenocysteine
EVQLLESGGGLVQPGGSLRLSCAASGFTFRDYEMWWVRQAPGKGLERVSAINPQGTRTYYADSVKGRFTISRDNSKNTLYLQMNSLRAEDTAVYYCLKLPFTFEDXGQGTLVTVSS

SEQ ID NO: 11983 - protein, 116 aa, Artificial Sequence
  source: /note="Description of Artificial Sequence: Synthetic polypeptide"
EVQLLESGGGLVQPGGSLRLSCAASGFTFRDYEMWWVRQAPGKGLERVSAINPQGTRTYYADSVKGRFTISRDNSKNTLYLQHNSLRADDTAVYHCTKLPFIFEYWGQGTLVTVSS

SEQ ID NO: 11984 - protein, 113 aa, Artificial Sequence
  source: /note="Description of Artificial Sequence: Synthetic polypeptide"
EVQLLESGGGLVQPGGSLRLSCAASGFTFRDYEMWVRQAPGKGLERVSAINPQGTRTYYADSVMGRFTISRDNSNTLYLQMNSLRAEDTAVYYCAKEPYSFDSGQGTLVTVSS

SEQ ID NO: 11985 - protein, 116 aa, Artificial Sequence
  source: /note="Description of Artificial Sequence: Synthetic polypeptide"
EVQLLESGGGLVQPGGSLRLSCAASGFTFRDYEMWWVRQAPGMVLERVSAINPQGTRTYYADSVKGRFTISRDNSKNTLYLQMNSLRAEDTAVYYCAKLPFFFDSRGQGTLVTVSS

SEQ ID NO: 11986 - protein, 113 aa, Artificial Sequence
  source: /note="Description of Artificial Sequence: Synthetic polypeptide"
EVQLLESGGGLVQPGGSLRLSCAASGFTFRDYEMWWVRQAPGGLERVSAINPQGTRTYYADSVMGRFTISRDNSNTLYLQMNSLRAEDTAVYHCAEPYSYDYWGQGTLVTVSS

SEQ ID NO: 11987 - protein, 116 aa, Artificial Sequence
  source: /note="Description of Artificial Sequence: Synthetic polypeptide"
EVQLLESGGGLVQPGGSLRLSCAASGFTFRDYEMWWVRRAPGKGLERVSAINPQGTRTYYADSVMGRFTISRDNSKNTLYLQMNSLRAEDTAVYYCAKLPFTFDDWGQGTLVTVSS

SEQ ID NO: 11988 - protein, 115 aa, Artificial Sequence
  source: /note="Description of Artificial Sequence: Synthetic polypeptide"
EVQLLESGGGLVQPGGSLRLSCAASGFTFRDYEMWVRRAPGKGLERVSAINPQGTRTYYADSVMGRFTISRDNSKNTLYLQMNSLRAEDTAVYYCAKLPFMFDDRGQGTLVTVSS

SEQ ID NO: 11989 - protein, 116 aa, Artificial Sequence
  source: /note="Description of Artificial Sequence: Synthetic polypeptide"
EVQLLESGGGLVQPGGSLRLSCAASGFTFRDYEMWWVRQAPGKGLERVSAINPQGTRTYYADSVMGRFTISRDNSKNTLYLQMNSLRAEDTAVYYCAKLPFMFDDWGQGTLVTVSS

SEQ ID NO: 11990 - protein, 115 aa, Artificial Sequence
  source: /note="Description of Artificial Sequence: Synthetic polypeptide"
EVQLLESGGGLVQPGGSLRLSCAASGFTFAGYELWWVRQAPGKGLERVSAINPQGTRTYYADSVMGRFTISRDNSKNTLYLQMNSLRAEDTAVYYCALPFTFDDWGQGTLVTVSS

SEQ ID NO: 11991 - protein, 116 aa, Artificial Sequence
  source: /note="Description of Artificial Sequence: Synthetic polypeptide"
EVQLLESGGGLVQPGGSLRLSCAASGFTFAGYELWWVRQAPGKGLERVSAINPQGTRTYYADSVMGRFTISRDNSKNTLYLQMNSLRAEDTAVYYCAKLPFMFDDRGQGTLVTVSS

SEQ ID NO: 11992 - protein, 114 aa, Artificial Sequence
  source: /note="Description of Artificial Sequence: Synthetic polypeptide"
EVQLLESGGGLVQPGGSLRLSCAASGFTFAGYEWWFRQAPGKGLERVSAINPQGTRTYYADSVMGRFTISRDNSKNTLYLQMNSLRAEDTAVYYCALPFTFDDWGQGTLVTVSS

SEQ ID NO: 11993 - protein, 116 aa, Artificial Sequence
  source: /note="Description of Artificial Sequence: Synthetic polypeptide"
EVQLLESGGGLVQPGGSLRLSCAASGFTFAGYEMWWFRQAPGKGLERVSAINPQGTRTYYADSVMGRFTISRDNSKNTLYLQMNSLRAEDTAVYYCAKLPFMFDDRGQGTLVTVSS

SEQ ID NO: 11994 - protein, 115 aa, Artificial Sequence
  source: /note="Description of Artificial Sequence: Synthetic polypeptide"
EVQLLESGGGLVQPGGSLRLSCAASGFTFRDYEMWWVRQAPGKGLEWVSAINPQGTRTYYADSVMGRFTISRDNSKNTLYLQMNSLRAEDTAVYYCALPFTFDDWGQGTLVTVSS

SEQ ID NO: 11995 - protein, 116 aa, Artificial Sequence
  source: /note="Description of Artificial Sequence: Synthetic polypeptide"
EVQLLESGGGLVQPGGSLRLSCAASGFTFRDYEMWWVRQAPGKGLEWVSAINPQGTRTYYADSVMGRFTISRDNSKNTLYLQMNSLRAEDTAVYYCAKLPFMFDDRGQGTLVTVSS

SEQ ID NO: 11996 - protein, 112 aa, Artificial Sequence
  source: /note="Description of Artificial Sequence: Synthetic polypeptide"
EVQLLESGGGLVQPGGSLRLSCAASGFTFRDYEMVRQAPGKGLERVSAINPQGTRTYYADSVGRFTISRDNSNTLYLQMNSLRAEDTAVYYCAKLPTYFSDRGQGTLVTVSS

SEQ ID NO: 11997 - protein, 112 aa, Artificial Sequence
  source: /note="Description of Artificial Sequence: Synthetic polypeptide"
EVQLLESGGGLVQPGGSLRLSCAASGFTFRDYEMWWVRQAPGGLERVSAINPQGTRTYYADSVKGRFTISRDNSNTLYLQMNSLRAEDTAVYYCALPFFFEEGQGTLVTVSS

SEQ ID NO: 11998 - protein, 114 aa, Artificial Sequence
  source: /note="Description of Artificial Sequence: Synthetic polypeptide"
EVQLLESGGGLVQPGGSLRLSCAASGFTFRDYEMWVRQAPGKGLERVSAINPQGTRTYYADSVKGRFTISRDNSKNTLYLQMNSLRAEDTAVYYCALPTYFKDWGQGTLVTVSS

SEQ ID NO: 11999 - protein, 115 aa, Artificial Sequence
  source: /note="Description of Artificial Sequence: Synthetic polypeptide"
EVQLLESGGGLVQPGGSLRLSCAASGFTFRDYEMWWVRQAPGKGLERVSAINPQGTRTYYADSVGRFTISRDNSKNTLYLQMNSLRAEDTAVYYCAKLPFYFSEWGQGTLVTVSS

SEQ ID NO: 12000 - protein, 112 aa, Artificial Sequence
  source: /note="Description of Artificial Sequence: Synthetic polypeptide"
EVQLLESGGGLVQPGGSLRLSCAASGFTFRDYEMVRQAPGKGLERVSAINPQGTRTYYADSVKGRFTISRDNSNTLYLQMNSLRAEDTAVYHCALPMFFEDWGQGTLVTVSN

SEQ ID NO: 12001 - protein, 115 aa, Artificial Sequence
  source: /note="Description of Artificial Sequence: Synthetic polypeptide"
EVQLLESGGGLVQPGGSLRLSCAASGFTFRDYEMWVRQAPGKGLERVSAINPQGTRTYYADSVKGRFTISRDNSKNTLYLQHNSLRAEDTAVYYCAKLPFPFSEWGQGTLVTVSS

SEQ ID NO: 12002 - protein, 116 aa, Artificial Sequence
  source: /note="Description of Artificial Sequence: Synthetic polypeptide"
EVQLLESGGGLVQPGGSLRLSCAASGFTFRDYEMWWVRQAPGKGLERVSAINPQGTRTYYADSVKGRFTISRDNSKNTLYLQMDSLRAEDTAVYYCAKLPFYFSEWGQGTLVTVSS

SEQ ID NO: 12003 - protein, 115 aa, Artificial Sequence
  source: /note="Description of Artificial Sequence: Synthetic polypeptide"
EVQLLESGGGLVQPGGSLRLSCAASGFTFRDYEMWWVRQAPGKGLERVSAINPYGNLTYYADSVKGRFTISRDNSKNTLYLQMNSLRAEDTAVYYCALPFTFEDWGQGTLVTVSS

SEQ ID NO: 12004 - protein, 116 aa, Artificial Sequence
  source: /note="Description of Artificial Sequence: Synthetic polypeptide"
EVQLLESGGGLVQPGGSLRLSCAASGFTFRDYEMWWVRQAPGKGLERVSAINPPGTLTYYADSVKGRFTISRDNSKNTLYLQMNSLRAEDTAVYYCAKLPFTFEDRGQGTLVTVSS

SEQ ID NO: 12005 - protein, 116 aa, Artificial Sequence
  source: /note="Description of Artificial Sequence: Synthetic polypeptide"
EVQLLESGGGLVQPGGSLRLSCAASGFTFRDYEMWWVRQAPGKGLERVSAINPWGGLTYYADSVKGRFTISRDNSKNTLYLQMNSLRAEDTAVYYCAKLPFTFEDWGQGTLVTVSS

SEQ ID NO: 12006 - protein, 115 aa, Artificial Sequence
  source: /note="Description of Artificial Sequence: Synthetic polypeptide"
EVQLLESGGGLVQPGGSLRLSCAASGFTFRDYEMWWVRQAPGKGLERVSAINPMGGFTYYADSVKGRFTISRDNSKNTLYLQMNSLRAEDTAVYYCALPFTFEDWGQGTLVTVSS

SEQ ID NO: 12007 - protein, 116 aa, Artificial Sequence
  source: /note="Description of Artificial Sequence: Synthetic polypeptide"
EVQLLESGGGLVQPGGSLRLSCAASGFTFRDYEMWWVRQAPGKGLERVSAINPWGSHTYYADSVKGRFTISRDNSKNTLYLQMNSLRAEDTAVYYCAKLPFTFEDWGQGTLVTVSS

SEQ ID NO: 12008 - protein, 116 aa, Artificial Sequence
  source: /note="Description of Artificial Sequence: Synthetic polypeptide"
EVQLLESGGGLVQPGGSLRLSCAASGFTFRDYEMWWVRQAPGKGLERVSAINPSGGLTYYADSVKGRFTISRDNSKNTLYLQMNSLRAEDTAVYYCAKLPFTFDDRGQGTLVTVSS

SEQ ID NO: 12009 - protein, 116 aa, Artificial Sequence
  source: /note="Description of Artificial Sequence: Synthetic polypeptide"
EVQLLESGGGLVQPGGSLRLSCAASGFTFRDYEMWWVRQAPGKGLERVSAINPHGSLTYYADSVKGRFTISRDNSKNTLYLQMNSLRAEDTAVYYCAKLPFTFDDWGQGTLVTVSS

SEQ ID NO: 12010 - protein, 116 aa, Artificial Sequence
  source: /note="Description of Artificial Sequence: Synthetic polypeptide"
EVQLLESGGGLVQPGGSLRLSCAASGFTFRDYEMWWVRQAPGKGLERVSAINPAGRLTYYADSVKGRFTISRDNSKNTLYLQMNSLRAEDTAVYYCAKLPFTFEDWGQGTLVTVSS

SEQ ID NO: 12011 - protein, 116 aa, Artificial Sequence
  source: /note="Description of Artificial Sequence: Synthetic polypeptide"
EVQLLESGGGLVQPGGSLRLSCAASGFTFRDYEMWWVRQAPGKGLERVSAINPWGSLTYYADSVKGRFTISRDNSKNTLYLQMNSLRAEDTAVYYCAKLPFTFEDWGQGTLVTVSS

SEQ ID NO: 12012 - protein, 116 aa, Artificial Sequence
  source: /note="Description of Artificial Sequence: Synthetic polypeptide"
EVQLLESGGGLVQPGGSLRLSCAASGFTFPDYEMWWVRQAPGKGLERVSAINPQGTRTYYADSVKGRFTISRDNSKNTLYLQMNSLRAEDTAVYHCAKLPFTFDDWGQGTLVTVSS

SEQ ID NO: 12013 - protein, 116 aa, Artificial Sequence
  source: /note="Description of Artificial Sequence: Synthetic polypeptide"
EVQLLESGGGLVQPGGSLRLSCADSGFTFPPVEMWWVRQAPGKGLERVSAINPQGTRTYYADSVKGRFTISRDNSKNTLYLQMNSLRAEDTAVYYCAKLPFTFEDWGQGTLVTVSS

SEQ ID NO: 12014 - protein, 116 aa, Artificial Sequence
  source: /note="Description of Artificial Sequence: Synthetic polypeptide"
EVQLLESGGGLVQPGGSLRLSCAASGFTFRDYEMWWVRQAPGKGLERVSAINPYGGLTYYADSVKGRFTISRDNSKNTLYLQMNSLRAEDTAVYYCAKLPFTFDDWGQGTLVTVSS

SEQ ID NO: 12015 - protein, 116 aa, Artificial Sequence
  source: /note="Description of Artificial Sequence: Synthetic polypeptide"
EVQLLESGGGLVQPGGSLRLSCAASGFTFRDYEMWWVRQAPGKGLERVSAINPWGMHTYYADSVKGRFTISRDNSKNTLYLQMNSLRAEDTAVYYCAKLPFTFEDWGQGTLVTVSS

SEQ ID NO: 12016 - protein, 115 aa, Artificial Sequence
  source: /note="Description of Artificial Sequence: Synthetic polypeptide"
EVQLLESGGGLVQPGGSLRLSCAASGFTFRDYEMWWVRQAPGKGLERVSAINPHGGYTYYADSVKGRFTISRDNSKNTLYLQMNSLRAEDTAVYYCAKLFTFEDWGQGTLVTVSS

SEQ ID NO: 12017 - protein, 116 aa, Artificial Sequence
  source: /note="Description of Artificial Sequence: Synthetic polypeptide"
EVQLLESGGGLVQPGGSLRLSCAASGFTFRDYEMWWVRQAPGRGLERVSAINPPGMLTYYADSVKGRFTISRDNSKNTLYLQMNSLRAEDTAVYYCAKLPFTFDDWGQGTLVTVSS

SEQ ID NO: 12018 - protein, 114 aa, Artificial Sequence
  source: /note="Description of Artificial Sequence: Synthetic polypeptide"
EVQLLESGGGLVQPGGSLRLSCAASGFTFRDYEMWWVRQAPGKGLERVSAINPWGQLTYYADSVGRFTISRDNSKNTLYLQMNSLAEDTAVYYCAKLPFTFEDWGQGTLVTVSS

SEQ ID NO: 12019 - protein, 115 aa, Artificial Sequence
  source: /note="Description of Artificial Sequence: Synthetic polypeptide"
EVQLLESGGGLVQPGGSLRLSCAASGFTFRDYEMWWVRQAPGKGLERVSAINPWGGYTYYADSVKGRFTISRDNSKNTLYLQMNSLRAEDTAVYYCAKLPFTFDDGQGTLVTVSS

SEQ ID NO: 12020 - protein, 115 aa, Artificial Sequence
  source: /note="Description of Artificial Sequence: Synthetic polypeptide"
EVQLLESGGGLVQPGGSLRLSCAASGFTFRDYEMWWVRQAPGKGLERVSAINPSGGLTYYADSVKGRFTISRDNSKNTLYLQMNSLRAEDTAVYYCAKLPFTFEDGQGTLVTVSS

SEQ ID NO: 12021 - protein, 116 aa, Artificial Sequence
  source: /note="Description of Artificial Sequence: Synthetic polypeptide"
EVQLLESGGGLVQPGGSLRLSCAASGFTFRDYEMWWVRQAPGKGLERVSAINPSGGLTYYADSVKGRFTISRDNSKNTLYLQMNSLRAEDTAVYYCAKLPFTFDDWGQGTLVTVSS

SEQ ID NO: 12022 - protein, 114 aa, Artificial Sequence
  source: /note="Description of Artificial Sequence: Synthetic polypeptide"
EVQLLESGGGLVQPGGSLRLSCAASGFTFRDYEMWVRQAPGKGLERVSAINPSGTLTYYADSVKGRFTISRDNSNTLYLQMNSLRAEDTAVYYCAKLPFTFEDWGQGTLVTVSS

SEQ ID NO: 12023 - protein, 115 aa, Artificial Sequence
  source: /note="Description of Artificial Sequence: Synthetic polypeptide"
EVQLLESGGGLVQPGGSLRLSCAASGFTFRDYEMWVRQAPGKGLERVSAINPYGSLTYYADSVKGRFTISRDNSKNTLYLQMNSLRAEDTAVYYCAKLPFTFDDWGQGTLVTVSS

SEQ ID NO: 12024 - protein, 116 aa, Artificial Sequence
  source: /note="Description of Artificial Sequence: Synthetic polypeptide"
EVQLLESGGGLVQPGGSLRLSCAASGFTFRDYEMWWVRQAPGKGLERVSAINPWGGYTYYADSVKGRFTISRDNSKNTLYLQMNSLRAEDTAVYYCAKLPFTFEDWGQGTLVTVSS

SEQ ID NO: 12025 - protein, 116 aa, Artificial Sequence
  source: /note="Description of Artificial Sequence: Synthetic polypeptide"
EVQLLESGGGLVQPGGSLRLSCAASGFTFRDYEMWWVRQAPGKGLERVSAINPQGGLTYYADSVKGRFTISRDNSKNTLYLQMNSLRAEDTAVYYCAKLPFTFEDWGQGTLVTVSS

SEQ ID NO: 12026 - protein, 116 aa, Artificial Sequence
  source: /note="Description of Artificial Sequence: Synthetic polypeptide"
EVQLLESGGGLVQPGGSLRLSCAASGFTFRDYEMWWVRQAPGKGLERVSAINPWGTLTYYADSVKGRFTISRDNSRNTLYLQMNSLRAEDTAVYYCAKLPFTFDDWGQGTLVTVSS

SEQ ID NO: 12027 - protein, 116 aa, Artificial Sequence
  source: /note="Description of Artificial Sequence: Synthetic polypeptide"
EVQLLESGGGLVQPGGSLRLSCAASGFTFRDYEMWWVRQAPGKGLERVSAINPNGRLTYYADSVKGRFTISRDNSKNTLYLQMNSLRAEDTAVYYCAKLPFTFADWGQGTLVTVSS

SEQ ID NO: 12028 - protein, 116 aa, Artificial Sequence
  source: /note="Description of Artificial Sequence: Synthetic polypeptide"
EVQLLESGGGLVQPGGSLRLSCAASGFTFRDYEMWWVRQAPGKGLERVSAINPWGQLTYYADSVKGRFTISRDNSKNTLYLQMNSLRAEDTAVYYCAKLPFTFDDWGQGTLVTVSS

SEQ ID NO: 12029 - protein, 116 aa, Artificial Sequence
  source: /note="Description of Artificial Sequence: Synthetic polypeptide"
EVQLLESGGGLVQPGGSLRLSCAASGFTFRDYEMWWVRQAPGKGLERVSAINPHGGLTYYADSVKGRFTISRDNSKNTLYLQMNSLRAEDTAVYYCAKLPFTFDDWGQGTLVTVSS

SEQ ID NO: 12030 - protein, 116 aa, Artificial Sequence
  source: /note="Description of Artificial Sequence: Synthetic polypeptide"
EVQLLESGGGLVQPGGSLRLSCAASGFTFRDYEMWWVRQAPGKGLERVSAINPAGMLTYYADSVKGRFTISRDNSKNTLYLQMNSLRAEDTAVYYCAKLPFTFDDWGQGTLVTVSS

SEQ ID NO: 12031 - protein, 116 aa, Artificial Sequence
  source: /note="Description of Artificial Sequence: Synthetic polypeptide"
EVQLLESGGGLVQPGGSLRLSCAASGFTFRDYEMWWVRQAPGKGLERVSAINPHGTLTYYADSVKGRFTISRDNSKNTLYLQMNSLRAEDTAVYYCAKLPFTFEDWGQGTLVTVSS

SEQ ID NO: 12032 - protein, 114 aa, Artificial Sequence
  source: /note="Description of Artificial Sequence: Synthetic polypeptide"
EVQLLESGGGLVQPGGSLRLSCAASGFTFRDYEMWVRQAPGGLERVSAINPWGSLTYYADSVKGRFTISRDNSKNTLYLQMNSLRAEDTAVYYCAKLPFTFDDWGQGTLVTVSS

SEQ ID NO: 12033 - protein, 114 aa, Artificial Sequence
  source: /note="Description of Artificial Sequence: Synthetic polypeptide"
EVQLLESGGGLVQPGGSLRLSCAASGFTFRDYEMWWVRQAPGKGLERVSAINPYGGLTYYADSVGRFTISRDNSKNTLYLQMNSLRAEDTAVYYCAKLPFTFEDGQGTLVTVSS

SEQ ID NO: 12034 - protein, 116 aa, Artificial Sequence
  source: /note="Description of Artificial Sequence: Synthetic polypeptide"
EVQLLESGGGLVQPGGSLRLSCAASGFTFRDYEMWWVRQAPGKGLERVSAINPAGFLTYYADSVKGRFTISRDNSKNTLYLQMNSLRAEDTAVYYCAKLPFTFEDWGQGTLVTVSS

SEQ ID NO: 12035 - protein, 115 aa, Artificial Sequence
  source: /note="Description of Artificial Sequence: Synthetic polypeptide"
EVQLLESGGGLVQPGGSLRLSCAASGFTFRDYEMWVRQAPGKGLERVSAINPWGSHTYYADSVKGRFTISRDNSKNTLYLQMNSLRAEDTAVYYCAKLPFTFDDWGQGTLVTVSS

SEQ ID NO: 12036 - protein, 114 aa, Artificial Sequence
  source: /note="Description of Artificial Sequence: Synthetic polypeptide"
EVQLLESGGGLVRPGGSLRLSCAASGFTFRDYEMWVRQAPGKGLERVSAINPYGGLTYYADSVKGRFTISRDNSKNTLYLQMNSLRAEDTAVYYCAKLPFTFEDGQGTLVTVSS

SEQ ID NO: 12037 - protein, 116 aa, Artificial Sequence
  source: /note="Description of Artificial Sequence: Synthetic polypeptide"
EVQLLESGGGLVQPGGSLRLSCAASGFTFRDYEMWWVRQAPGKGLERVSAINPWGGFTYYADSVKGRFTISRDNSKNTLYLQMNSLRAEDTAVYYCAKLPFTFEDWGQGTLVTVSS

SEQ ID NO: 12038 - protein, 115 aa, Artificial Sequence
  source: /note="Description of Artificial Sequence: Synthetic polypeptide"
EVQLLESGGGLVQPGGSLRLSCAASGFTFRDYEMWWVRQAPGKGLERVSAINPGGLTYYADSVKGRFTISRDNSKNTLYLQMNSLRAEDTAVYYCAKLPFTFDDWGQGTLVTVSS

SEQ ID NO: 12039 - protein, 115 aa, Artificial Sequence
  source: /note="Description of Artificial Sequence: Synthetic polypeptide"
EVQLLESGGGLVQPGGSLRLSCAASGFTFRDYEMWWVRQAPGKGLERVSAINPYGGLTYYADSVKGRFTISRDNSKNTLYLQMDSLRAEDTAVYYCAKLPFTFEDGQGTLVTVSS

SEQ ID NO: 12040 - protein, 116 aa, Artificial Sequence
  source: /note="Description of Artificial Sequence: Synthetic polypeptide"
EVQLLESGGGLVQPGGSLRLSCAASGFTFRDYEMWWVRQAPGKGLERVSAINPWGTLTYYADSVKGRFTISRDNSKNTLYLQMNSLRAEDTAVYYCAKLPFTFEDWGQGTLVTVSS

SEQ ID NO: 12041 - protein, 115 aa, Artificial Sequence
  source: /note="Description of Artificial Sequence: Synthetic polypeptide"
EVQLLESGGGLVQPGGSLRLSCAASGFTFRDYEMWWVRQAPGKGLERVSAINPWGGYTYYADSVKGRFTISRDNSNTLYLQMNSLRAEDTAVYYCAKLPFTFEDWGRGTLVTVSS

SEQ ID NO: 12042 - protein, 116 aa, Artificial Sequence
  source: /note="Description of Artificial Sequence: Synthetic polypeptide"
EVQLLESGGGLVQPGGSLRLSCAASGFTFRDYEMWWVRQAPGKGLERVSAINPYGNLTYYADSVKGRFTISRDNSKNTLYLQMNSLRAEDTAVYYCAKLPFTFDDWGQGTLVTVSS

SEQ ID NO: 12043 - protein, 116 aa, Artificial Sequence
  source: /note="Description of Artificial Sequence: Synthetic polypeptide"
EVQLLESGGGLVQPGGSLRLSCAASGFTFRDYEMWWVRQAPGKGLERVSAINPHGGFTYYADSVKGRFTISRDNSKNTLYLQMNSLRAEDTAVYYCAKLPFTFEDWGQGTLVTVSS

SEQ ID NO: 12044 - protein, 116 aa, Artificial Sequence
  source: /note="Description of Artificial Sequence: Synthetic polypeptide"
EVQLLESGGGLVQPGGSLRLSCAASGFTFRDYEMWWVRQAPGKGLERVSAINPAGFYTYYADSVKGRFTISRDNSKNTLYLQMNSLRAEDTAVYYCAKLPFTFDDWGQGTLVTVSS

SEQ ID NO: 12045 - protein, 116 aa, Artificial Sequence
  source: /note="Description of Artificial Sequence: Synthetic polypeptide"
EVQLLESGGGLVQPGGSLRLSCAASGFTFRDYEMWWVRQAPGKGLERVSAINPAGGLTYYADSVKGRFTISRDNSKNTLYLQMNSLRAEDTAVYYCAKLPFTFDDWGQGTLVTVSS

SEQ ID NO: 12046 - protein, 115 aa, Artificial Sequence
  source: /note="Description of Artificial Sequence: Synthetic polypeptide"
EVQLLEPGGGLVQPGGSLRLSCAASGFTFTEYEMIWVRQAPGKGLEWVSSISGNGANTYYADSVKGRFTISRDNSKNTLYLQMNSLRAEDTAVYYCAKEPLRFDNGQGTLVTVSS

SEQ ID NO: 12047 - protein, 119 aa, Artificial Sequence
  source: /note="Description of Artificial Sequence: Synthetic polypeptide"
EVQLLESGGGLVQPGGSLRLSCTASGFTFNTYEMSWVRQAPGKGLEWVSGIGRRGFTTYYADSVGRFTISRDNSNTLYLQMNSLAEDTAVYYCAEPITYDLRYARFDYSGQGTLVTVSS

SEQ ID NO: 12048 - protein, 114 aa, Artificial Sequence
  source: /note="Description of Artificial Sequence: Synthetic polypeptide"
EVQLLESGGGLVQPGGSLRLSCAASGFAFRDYEMWWVRQAPGKGLERVSAINPHGSLTYYADSVKGRFTISRDNSKNTLYLQMNSLAEDTAVYYCALPFTFEDWGQGTLVTVSS

SEQ ID NO: 12049 - protein, 114 aa, Artificial Sequence
  source: /note="Description of Artificial Sequence: Synthetic polypeptide"
EVQLLESGGGLVQPGGSLRLSCAASGFTFRDYEMWVRQAPGGLERVSAINPAGGYTYYADSVKGRFTISRDNSKNTLYLQMNSLRAEDTAVYHCAKLPFTFEDWGQGTLVTVSS

SEQ ID NO: 12050 - protein, 113 aa, Artificial Sequence
  source: /note="Description of Artificial Sequence: Synthetic polypeptide"
EVQLLESGGGLVQPGGSLRLSCAASGFTFRDYEMWWVRQAPGGLERVSAINPQGTRTYYADSVGRFTISRDNSKNTLYLQMNSLRAEDTAVYYCAKLPFWFTEGQGTLVTVSS

SEQ ID NO: 12051 - protein, 115 aa, Artificial Sequence
  source: /note="Description of Artificial Sequence: Synthetic polypeptide"
EVQLLESGGGLVQPGGSLRLSCAASGFTFRDYEMWWVRQAPGKGLERVSAINPQGTRTYYADSVGRFTISRDNSKNTLYLQMNSLRAEDTAVYYCAKLPFMFSDRGQGTLVTVSS

SEQ ID NO: 12052 - protein, 114 aa, Artificial Sequence
  source: /note="Description of Artificial Sequence: Synthetic polypeptide"
EVQLLESGGGLVQPGGSLRLSCAASGFTFRDYEMWVRQAPGKGLERVSAINPQGTRTYYADSVKGRFTISRDNSNTLYLQMNSLRAEDTAVYYCAKLPFLFQEWGQGTLVTVSS

SEQ ID NO: 12053 - protein, 116 aa, Artificial Sequence
  source: /note="Description of Artificial Sequence: Synthetic polypeptide"
EVQLLESGGGLVQPGGSLRLSCAASGFTFRDYEMWWVRQAPGKGLERVSAINPQGTRTYYADSVKGRFTISRDNSKNTLYLQMNSLRAEDTAVYYCAKLPTRFEDWGQGTLVTVSS

SEQ ID NO: 12054 - protein, 115 aa, Artificial Sequence
  source: /note="Description of Artificial Sequence: Synthetic polypeptide"
EVQLLESGSGLVQPGGSLRLSCAASGFTFRDYEMWWVRQAPGKGLERVSAINPQGTRTYYADSVGRFTISRDNSKNTLYLQMNSLRAEDTAVYYCAKLPFYFHEWGQGTLVTVSS

SEQ ID NO: 12055 - protein, 115 aa, Artificial Sequence
  source: /note="Description of Artificial Sequence: Synthetic polypeptide"
EVQLLESGGGLVQPGGSLRLSCAASGFTFRDYEMWWVRQAPGGLERVSAINPQGTRTYYADSVKGRFTISRDNSKNTLYLQMNSLRAEDTAVYYCGKEPFRYDYWGQGTLVTVSS

SEQ ID NO: 12056 - protein, 114 aa, Artificial Sequence
  source: /note="Description of Artificial Sequence: Synthetic polypeptide"
EVQLLESGGGLVQPGGSLRLSCAASGFTFRDYEMWWVRQAPGGLERVSAINPQGTRTYYADSVKGRFTISRDNSKNTLYLQMNSLRAEDTAVYYCALPTFFKDWGQGTLVTVSS

SEQ ID NO: 12057 - protein, 115 aa, Artificial Sequence
  source: /note="Description of Artificial Sequence: Synthetic polypeptide"
EVQLLESGGGLVQPGGSLRLSCAASGFTFRDYEMWWVRQAPGKGLERVSAINPQGTRTYYADSVGRFTISRDNSKNTLYLQMNSLRAEDTAVYYCAKLPFFFQEWGQGTLVTVSS

SEQ ID NO: 12058 - protein, 114 aa, Artificial Sequence
  source: /note="Description of Artificial Sequence: Synthetic polypeptide"
EVQLLESGGGLVQPGGSLRLSCAASGFTFRDYEMWVRQAPGKGLERVSAINPQGTRTYYADSVGRFTISRDNSKNTLYLQMNSLRAEDTAVYYCAKLPQLFHDRGQGTLVTVSS

SEQ ID NO: 12059 - protein, 116 aa, Artificial Sequence
  source: /note="Description of Artificial Sequence: Synthetic polypeptide"
EVQLLESGGGLVQPGGSLRLSCAASGFTFRDYEMWWVRQAPGKGLERVSAINPQGTRTYYADSVKGRFTISRDNSKNTLYLQMNSLRAEDTAVYYCAKLPQLFEDWGQGTLVTVSS

SEQ ID NO: 12060 - protein, 114 aa, Artificial Sequence
  source: /note="Description of Artificial Sequence: Synthetic polypeptide"
EVQLLESGGGLVQPGGSLRLSCAASGFTFRDYEMWVRQAPGKGLERVSAINPQGTRTYYADSVGRFTISRDNSKNTLYLQMNSLRAEDTAVYHCAKLPFGFSEWGQGTLVTVSS

SEQ ID NO: 12061 - protein, 114 aa, Artificial Sequence
  source: /note="Description of Artificial Sequence: Synthetic polypeptide"
EVQLLESGGGLVQPGGSLRLSCAASGFTFRDYEMWWVRQAPGKGLERVSAINPQGTRTYYADSVKGRFTISRDNSKNTLYLQMNSLAEDTAVYYCALPQLFQDWGQGTLVTVSS

SEQ ID NO: 12062 - protein, 115 aa, Artificial Sequence
  source: /note="Description of Artificial Sequence: Synthetic polypeptide"
EVQLLESGGGLVQPGGSLRLSCAASGFTFRDYEMWWVRQAPGKGLERVSAINPQGTRTYYADSVGRFTISRDNSKNTLYLQMNSLRAEDTAVYYCAKLPFFFHEWGQGTLVTVSS

SEQ ID NO: 12063 - protein, 113 aa, Artificial Sequence
  source: /note="Description of Artificial Sequence: Synthetic polypeptide"
EVQLLESGGGLVQPGGSLRLSCAASGFTFRDYEMWVRQAPGKGLERVSAINPQGTRTYYADSVKGRFTISRDNSKNTLYLQMNSLRAEDTAVYYCAKLPHYFDGQGTLVTVSS

SEQ ID NO: 12064 - protein, 114 aa, Artificial Sequence
  source: /note="Description of Artificial Sequence: Synthetic polypeptide"
EVQLLESGGGLVQSGGSLRLSCAASGFTFRDYEMWWVRQAPGKGLERVSAINPQGTRTYYADSVKGRFTISRDNSKNTLYLQMNSLRAEDTAVYYCALPFYFEEGQGTLVTVSS

SEQ ID NO: 12065 - protein, 115 aa, Artificial Sequence
  source: /note="Description of Artificial Sequence: Synthetic polypeptide"
EVQLLESGGGLVQPGGSLRLSCAASGFTFRDYEMWWVRQAPGGLERVSAINPQGTRTYYADSVKGRFTISRDNSKNTLYLQMNSLRAEDTAVYYCAKLPFRFSDRGQGTLVTVSS

SEQ ID NO: 12066 - protein, 115 aa, Artificial Sequence
  source: /note="Description of Artificial Sequence: Synthetic polypeptide"
EVQLLESGGGLVQPGGSLRLSCAASGFTFRDYEMWWVRQAPGKGLERVSAINPQGTRTYYADSVGRFTISRDNSKNTLYLQMNSLRAEDTAVYYCAKLPTLFQDWGQGTLVTVSS

SEQ ID NO: 12067 - protein, 116 aa, Artificial Sequence
  source: /note="Description of Artificial Sequence: Synthetic polypeptide"
EVQLLESGGGLVQPGGSLRLSCAASGFTFRDYEMWWVRQAPGKGLERVSAINPQGTRTYYADSVKGRFTISRDNSKNTLYLQMNSLRAEDTAVYYCAKLPFWFQEWGQGTLVTVSS

SEQ ID NO: 12068 - protein, 114 aa, Artificial Sequence
  source: /note="Description of Artificial Sequence: Synthetic polypeptide"
EVQLLESGGGLVQPGGSLRLSCAASGFTFRDYEMWWVRQAPGKGLERVSAINPGSLTYYADSVKGRFTISRDNSNTLYLQMNSLRAEDTAVYYCAKLPFYFQEWGQGTLVTVSS

SEQ ID NO: 12069 - protein, 116 aa, Artificial Sequence
  source: /note="Description of Artificial Sequence: Synthetic polypeptide"
EVQLLESGGGLVQPGGSLRLSCAASGFTFRDYEMWWVRQAPGKGLERVSAINPWGSLTYYADSVKGRFTISRDNSKNTLYLQMNSLRAEDTAVYHCAKLPMFFEDWGQGTLVTVSN

SEQ ID NO: 12070 - protein, 113 aa, Artificial Sequence
  source: /note="Description of Artificial Sequence: Synthetic polypeptide"
EVQLLESGGGLVQPGGSLRLSCAASGFTFRDYEMWVRQAPGGLERVSAINPWGSLTYYADSVKGRFTISRDNSKNTLYLQMNSLRAEDTAVYYCAKLPFYFHEGQGTLVTVSS

SEQ ID NO: 12071 - protein, 116 aa, Artificial Sequence
  source: /note="Description of Artificial Sequence: Synthetic polypeptide"
EVQLLESGGGLVQPGGSLRLSCAASGFTFRDYEMWWVRQAPGKGLERVSAINPWGSLTYYADSVKGRFTISRDNSKNTLYLQMNSLRAEDTAVYYCAKLPFFFQEWGQGTLVTVSS

SEQ ID NO: 12072 - protein, 115 aa, Artificial Sequence
  source: /note="Description of Artificial Sequence: Synthetic polypeptide"
EVQLLESGGGLVQPGGSLRLSCAASGFTFRDYEMWWVRQAPGGLERVSAINPWGSLTYYADSVKGRFTISRDNSKNTLYLQMNSLRAEDTAVYYCAKLPFFFHEWGQGTLVTVSS

SEQ ID NO: 12073 - protein, 114 aa, Artificial Sequence
  source: /note="Description of Artificial Sequence: Synthetic polypeptide"
EVQLLESGGGLVQPGGSLRLSCAASGFTFRDYEMWWVRQAPGKGLERVSAINPWGGFTYYADSVKGRFTISRDNSNTLYLQMNSLRAEDTAVYYCALPFYFQEWGQGTLVTVSS

SEQ ID NO: 12074 - protein, 113 aa, Artificial Sequence
  source: /note="Description of Artificial Sequence: Synthetic polypeptide"
EVQLLESGGGLVQPGGSLRLSCAASGFTFRDYEMWWVRQAPGGLERVSAINPGGFTYYADSVKGRFTISRDNSKNTLYLQIWSLRAEDTAVYHCALPMFFEDWGQGTLVTVSN

SEQ ID NO: 12075 - protein, 116 aa, Artificial Sequence
  source: /note="Description of Artificial Sequence: Synthetic polypeptide"
EVQLLESGGGLVQPGGSLRLSCAASGFTFRDYEMWWVRQAPGKGLERVSAINPWGGFTYYADSVKGRFTISRDNSKNTLYLQMNSLRAEDTAVYYCAKLPFYFHEWGQGTLVTVSS

SEQ ID NO: 12076 - protein, 114 aa, Artificial Sequence
  source: /note="Description of Artificial Sequence: Synthetic polypeptide"
EVQLLESGGGLVQPGGSLRLSCAASGFTFRDYEMWVRQAPGGLERVSAINPWGGFTYYADSVKGRFTISRDNSKNTLYLQMNSLRAEDTAVYYCAKLPFFFQEWGQGTLVTVSS

SEQ ID NO: 12077 - protein, 119 aa, Artificial Sequence
  source: /note="Description of Artificial Sequence: Synthetic polypeptide"
EVQLLESGGGLVQPGGSLRLSCAASGFTFHWEPMSWVRQAPGKGLEWVSRINSSGWDTYYADSVKGRFTISRDNSKNTLYLQMNSLRAEDTAVYYCAKGMVPNLVFDYWGQGTLVTVSS

SEQ ID NO: 12078 - protein, 114 aa, Artificial Sequence
  source: /note="Description of Artificial Sequence: Synthetic polypeptide"
EVQLLESGGGLVQPGGSLRLSCAASGFTFRDYEMWVRQAPGGLERVSAINPWGGLTYYADSVKGRFTISRDNSKNTLYLQMNSLRAEDTAVYYCAKLPFYFQEWGQGTLVTVSS

SEQ ID NO: 12079 - protein, 114 aa, Artificial Sequence
  source: /note="Description of Artificial Sequence: Synthetic polypeptide"
EVQLLESGGGLVQPGGSLRLSCAASGFTFRDYEMWWVRQAPGGLERVSAINPWGGLTYYADSVKGRFTISRDNSKNTLYLQMNSLAEDTAVYHCAKLPMFFEDWGQGTLVTVSN

SEQ ID NO: 12080 - protein, 115 aa, Artificial Sequence
  source: /note="Description of Artificial Sequence: Synthetic polypeptide"
EVQLLESGGGLVQPGGSLRLSCAASGFTFRDYEMWWVRQAPGKGLERVSAINPWGGLTYYADSVKGRFTISRDNSKNTLYLQMNSLRAEDTAVYYCALPFYFHEWGQGTLVTVSS

SEQ ID NO: 12081 - protein, 111 aa, Artificial Sequence
  source: /note="Description of Artificial Sequence: Synthetic polypeptide"
EVQLLESGGGLVQPGGSLRLSCAASGFTFRDYEMVRQAPGKGLERVSAINPWGGLTYYADSVGRFTISRDNSKNTLYLQMNSLRAEDTAVYYCALPFFFQEGQGTLVTVSS

SEQ ID NO: 12082 - protein, 115 aa, Artificial Sequence
  source: /note="Description of Artificial Sequence: Synthetic polypeptide"
EVQLLESGGGLVQPGGSLRLSCAASGFTFRDYEMWVRQAPGKGLERVSAINPWGGLTYYADSVKGRFTISRDNSKNTLYLQMNSLRAEDTAVYYCAKLPFFFHEWGQGTLVTVSS

SEQ ID NO: 12083 - protein, 115 aa, Artificial Sequence
  source: /note="Description of Artificial Sequence: Synthetic polypeptide"
EVQLLESGGGLVQPGGSLRLSCAASGFTFRDYEMWWVRQAPGGLERVSAINPQGTRTYYADSVKGRFTISRDNSKNTLYLQMNSLRAEDTAVYHCAKLPMFFEDWGQGTLVTVSS

SEQ ID NO: 12084 - protein, 118 aa, Artificial Sequence
  source: /note="Description of Artificial Sequence: Synthetic polypeptide"
EVQLLETGGGLVQPGGSLRLSCAASGFTFSTYHMQWVRRAPGKGLEVSMIDADGLGTYYADPVKGRFTISRDNSKMTLYLQMNSLRAKDTAVYYCARPGPQFGQFDYLGQGTLVTVSS

SEQ ID NO: 12085 - protein, 119 aa, Artificial Sequence
  source: /note="Description of Artificial Sequence: Synthetic polypeptide"
EVQLFESGGGLVQTGGSLRLSCAASGFTFSTYHMQWVRQAPGKGLEWVSMIDADGLGKYYADPVKGRFTISRDNSKNTLYLQMNSLRAEDTAVYYCVKPGPQFGQYDYWGQGTLVTVSS

SEQ ID NO: 12086 - protein, 120 aa, Artificial Sequence
  source: /note="Description of Artificial Sequence: Synthetic polypeptide"
EVQLLESGGGLVQPGGSLRLSCSASGFTFSGYDMQWVRQAPGKGLEWVSTISASGVYTYYADSVKGRFTISRDNSKNTLYLQMNSLRAEDTAVYYCAKYPNFALNSFDYRGRGTLVTVSS

SEQ ID NO: 12087 - protein, 116 aa, Artificial Sequence
  source: /note="Description of Artificial Sequence: Synthetic polypeptide"
EVQLLESGGGLVQPGGSLRLSCAASGFTFRDYEMWWVRQAPGKGLERVSAINPWGGFTYYADSVKGRFTISRDNSKNTLYLQMNSLRAEDTAVYYCAKLPFFFHEWGQGTLVTVSS

SEQ ID NO: 12088 - protein, 118 aa, Artificial Sequence
  source: /note="Description of Artificial Sequence: Synthetic polypeptide"
EVQLLESGGGLVQPGGSLRLSCAASGFTFADEPMTWVRQAPGGLEWVSRIPPEGAPTYYADSVKGRFTISRDNSKNTLYLQMNSLRAEDTAVYYCAKGITPNLTFDYWGQGTLVTVSS

SEQ ID NO: 12089 - protein, 120 aa, Artificial Sequence
  source: /note="Description of Artificial Sequence: Synthetic polypeptide"
EVQLLESGGGLVQPGGSLRLSCAASGFTFSGYDMQVRQAPGRGLEWVSTISASGVYTYYTDSVKGRFTTSRDNSKNTLYLQMNSLRAEDTAVYYCTKYPNRFARNNFDYWGQGTLVTVSS

SEQ ID NO: 12090 - protein, 107 aa, Artificial Sequence
  source: /note="Description of Artificial Sequence: Synthetic polypeptide"
DILMTQSPSSLSASVGDRVTITCRANSSILWALAYQQKPGEAPKLLIESSSGLQSGVPSRFSGSGSGTDFTLTISSLQPEDFATYYCVQNAVWPGTFSQGTKVEIKR

SEQ ID NO: 12091 - protein, 108 aa, Artificial Sequence
  source: /note="Description of Artificial Sequence: Synthetic polypeptide"
DIQMTQSPSSLSASVGDRVTITCRADSSILWALAWYQQKPGKAPKLLIESSSGLQSGVPSRFSGSGSGTDFTLTISSLQPEDFATYYCVQNAVWPGTFGQGTKVEIKR

SEQ ID NO: 12092 - protein, 106 aa, Artificial Sequence
  source: /note="Description of Artificial Sequence: Synthetic polypeptide"
DIQMTVSPSSLSASVGDRVTITCRADSSILWALAYQQKPGAPKLLIESSSGLQSGVPSRFSGSGSGTDFTLTISSLQPEDFATYYCVQNAVWPGTFGQGTKVEIKR

SEQ ID NO: 12093 - protein, 108 aa, Artificial Sequence
  source: /note="Description of Artificial Sequence: Synthetic polypeptide"
DIQMTQSPSSLSASVGDRVTITCRANSSILWALAWYQQKPGKAPKLLIESSSGLQSGVPSRFSGSGSGTDFTLTISSLQPEDFATYYCVQNAVWPGTFDQGTKVEIKR

SEQ ID NO: 12094 - protein, 108 aa, Artificial Sequence
  source: /note="Description of Artificial Sequence: Synthetic polypeptide"
DIQMTQSPSSLSASVGDRVTITCRANSSILWALAWYQQKPGKAPKLLIESSTGLQSGVPSRFSGSGSGTDFTLTISSLQPEDFATYYCVQNAVWPGTFGQGTKVEIKR

SEQ ID NO: 12095 - protein, 107 aa, Artificial Sequence
  source: /note="Description of Artificial Sequence: Synthetic polypeptide"
DIQIWSPSSLSASVGDRVTITCRANSSILWALAWYQQKPGKAPKLLIESSSGLQSGVPSRFSGSGSGTDFTLTISSLQPEDFATYYCVQNAVWPGTFGQGTKVEIKR

SEQ ID NO: 12096 - protein, 107 aa, Artificial Sequence
  source: /note="Description of Artificial Sequence: Synthetic polypeptide"
DIQMTQSPSSLSASVGDRVTITCRADSSILWALAWYQQKPGKAPKLLIESSSGLQSGVPSRFSGSGSGTDFTLTISSLQPEDFATYYCVQNAVWPGTFDQGTKVEIR

SEQ ID NO: 12097 - protein, 108 aa, Artificial Sequence
  source: /note="Description of Artificial Sequence: Synthetic polypeptide"
DIQMTQSPSSLSASVGDRVTITCRANSSILWALAWYQQKPGKAPELLIESSSGLQSGVPSRFSGSGSGTDFTLTISSLQPEDFATYYCVQNAVWPGTFGQGTKVEIKR

SEQ ID NO: 12098 - protein, 108 aa, Artificial Sequence
  source: /note="Description of Artificial Sequence: Synthetic polypeptide"
DIQMTQSPSSLSASVGDRVTITCRANSSILWALAWYQQKPGKAPKLLIESSSGLQSGVPSRFSGSGSGTDFTLTISSLQPEDFATYYCVQNAVWPGTFGQGTKVENKR

SEQ ID NO: 12099 - protein, 116 aa, Artificial Sequence
  source: /note="Description of Artificial Sequence: Synthetic polypeptide"
EVQLLESGGGLVQPGGSLRLSCAASGFTFHNHDMSWVRQAPGGLEWVSRISRGGLQTYYADSVKGRFTISRDNSNTLYLQMNSLRAEDTAVYYCAGIVPDLHFDYWGQGTLVTVSS

SEQ ID NO: 12100 - protein, 108 aa, Artificial Sequence
  source: /note="Description of Artificial Sequence: Synthetic polypeptide"
DIQMTQSPSSLSASVGDRVTITCRANSSILWALAWYQQKPGKAPKLLIESSSGLQSGVPSRFSGSGSGTDFTLTISSLQPEDFATYYCVQNAVWPGTFGQGTKVEIKR

SEQ ID NO: 12101 - protein, 108 aa, Artificial Sequence
  source: /note="Description of Artificial Sequence: Synthetic polypeptide"
DIQMTQSPSSLSASVGDRVTITCRANSSILWALAWYQQKPGKAPKLLIESSSGLQSGIPSRFSGSGSGTDFTLTISSLQPEDFATYYCVQNAVWPGTFGQGTKVEIKR

SEQ ID NO: 12102 - protein, 108 aa, Artificial Sequence; identical to SEQ ID NO: 12100
  source: /note="Description of Artificial Sequence: Synthetic polypeptide"

SEQ ID NO: 12103 - protein, 108 aa, Artificial Sequence
  source: /note="Description of Artificial Sequence: Synthetic polypeptide"
DILLTQSPSSLSASVGDRVTITCRANSSILWALAWYQQKPGKAPKLLIESSSGLQSGVPSRFSGSGSGTDFTLTISSLQPEDFATYYCVQNAVWPGTFGQGTKVEIKR

SEQ ID NO: 12104 - protein, 108 aa, Artificial Sequence
  source: /note="Description of Artificial Sequence: Synthetic polypeptide"
DIQMTQSPSSLSASVGDRVTITCRANSSILWALAWYQQKPGKAPKLLIESSSGLQSGVPSRFSGSGTGTDFTLTISGLQPEDFATYYCVQNAVWPGTFDQGTKVEIKR

SEQ ID NO: 12105 - protein, 108 aa, Artificial Sequence
  source: /note="Description of Artificial Sequence: Synthetic polypeptide"
DIQMTQSPSSLSASVGDRVTIPCRANSSILWALAWYQQKPGKAPKLLIESSSGLQSGVPSRFSGSASGTDFTLTISSLQPEDFATYYCVQNAVWPGTFGQGTKVEIKR

SEQ ID NO: 12106 - protein, 108 aa, Artificial Sequence
  source: /note="Description of Artificial Sequence: Synthetic polypeptide"
DIQMAQSPSSLSASVGDRVTITCRASQTIERRLNWYQQKPGKAPKLLIYLASRLQSGVPSRFSGSGSGTDFTLTISSLQPEDFATYYCHQYASPPLTLGQGTKVEIKR

SEQ ID NO: 12107 - protein, 108 aa, Artificial Sequence
  source: /note="Description of Artificial Sequence: Synthetic polypeptide"
DIQMTQSPSSLSASVGDSVTITCRASQTIERRLNWYQQKPGEAPKLLIYLASRLQSGVPSRFSGSGSGTDFTLTISSLQPEDFATYYCHQYASPPLTFGQGTNVEIKR

SEQ ID NO: 12108 - protein, 108 aa, Artificial Sequence
  source: /note="Description of Artificial Sequence: Synthetic polypeptide"
DIQMTQSPSSLSASVGDRVTITCRASQTIERRLNWYQQKPGKAPKLLIYLASRLQSGVPSRFSGSGSGTDFTLTISSLQPEDFAAYYCHQYESPPLTFGQGTKVEIKR

SEQ ID NO: 12109 - protein, 106 aa, Artificial Sequence
  source: /note="Description of Artificial Sequence: Synthetic polypeptide"
DIQMTQSPSSLSASVGDRVTITCRASRTIERRLNWYQQKPGKAPKLLIYLASRLQSGVPSRFSGSGSGTDFTLTISSLQPEDFATYYCHQYESPPLTFGQGTVEIR

SEQ ID NO: 12110 - protein, 119 aa, Artificial Sequence
  source: /note="Description of Artificial Sequence: Synthetic polypeptide"
EVQLLESGGGLVQPGGSLRLSCAASGFTFNEYPMSWVRQAPGKGLEWVSRINGDGANTYYADSVKGRFTISRDNSKNTLYLQMNSLRAEDTAVYYCAKGIIPAMQFDYWGQGTLVTVSS

SEQ ID NO: 12111 - protein, 107 aa, Artificial Sequence
  source: /note="Description of Artificial Sequence: Synthetic polypeptide"
DIQMTQSPSSLSASVGERVTITCRASQTIERRLNWYQQKPGKAPKLLIYLASRLQSGVPSRFSGSGSGTDFTLTISNLQPEDSATYYCHQYASPPLTLGQGTKVEIR

SEQ ID NO: 12112 - protein, 108 aa, Artificial Sequence
  source: /note="Description of Artificial Sequence: Synthetic polypeptide"
DIQMTQSPSSLSASVGDRVTITCRASQTIERRLNWYQQKPGKAPKLLIYLASRLQSGVPSRFSGSGSGTDFTLTISSLQPEDFATYYCHQYASPPLTLGQGTKVEIKR

SEQ ID NO: 12113 - protein, 107 aa, Artificial Sequence
  source: /note="Description of Artificial Sequence: Synthetic polypeptide"
DIQITQSPSSLSASVGDRVTITCRASQTIERRLNWYQQPGKDPKLLIYLASRLQSGVPSRFSGSGSGTDFTLTISSLQPEDFATYYCHQYESPPLTFGQGTKVEIKR

SEQ ID NO: 12114 - protein, 108 aa, Artificial Sequence
  source: /note="Description of Artificial Sequence: Synthetic polypeptide"
DIQMTQSPSSLSASVGDRVTITCRASQTIERRLNWYQQKPGEAPKLLIYLASRLQSGVPSRFSGSGSGTDFTLTISSLQPEDFATYYCHQYESPPLTFGQGTKVEIKW

SEQ ID NO: 12115 - protein, 108 aa, Artificial Sequence
  source: /note="Description of Artificial Sequence: Synthetic polypeptide"
DIQLTQSPSSLSASVGDRVTITCRASQTIERRLNWYQQKPGKAPKLLIYLASRLQSGVPSRFSGSGSGTEFTLTISSLQPEDFATYYCHQYESPPLTFGQGTKVEIKR

SEQ ID NO: 12116 - protein, 108 aa, Artificial Sequence
  source: /note="Description of Artificial Sequence: Synthetic polypeptide"
DIQMSQSPSTLSASVGDRVTITCRASQTIERRLNWYQQKPGKAPKLLIYLASRLQSGVPSRFSGSGSGTDFTLTISSLQPEDFATYYCHQYESPPLMFGQGTKVEIKR

SEQ ID NO: 12117 - protein, 108 aa, Artificial Sequence
  source: /note="Description of Artificial Sequence: Synthetic polypeptide"
DIQMTQSPSSLSASVGDRVTITCRASQTIERRLNWYQQKPGKDPKLLIYLASRLQSGVPSRFSGSGSGTDFTLTISSLQPEDFATYYCHQYESPPLTFGQGTKVEIKR

SEQ ID NO: 12118 - protein, 108 aa, Artificial Sequence
  source: /note="Description of Artificial Sequence: Synthetic polypeptide"
DIQMTQSPSSLSASVGDRVTITCRASQTIERRLNWYQQKPGKAPKLLIYLASRLQSGVPSRFSGSGSGTDFTLTISSLQPEDFATYYCHQYESPPLTFGQGTKVEIKR

SEQ ID NO: 12119 - protein, 108 aa, Artificial Sequence
  source: /note="Description of Artificial Sequence: Synthetic polypeptide"
DIQMTQSPSSLFASVGDRVTITCRASQTIERRLNWYQQKPGKAPKLLIYLASRLQSGVPSRFSGSGSGTDFTLTISSLQPEDFATYYCHQYESPPLTFGQGTKVEIKR

SEQ ID NO: 12120 - protein, 107 aa, Artificial Sequence
  source: /note="Description of Artificial Sequence: Synthetic polypeptide"
DIQMTQYPSSLSASVGDRVTITCRASQSIERRLNYQQKPGEAPKLLIYLASRLQSGVPSRFSGSGSGTDFTLTISSLQPEDFATYYCHQYESPPLTFGQGTKVEIKR

SEQ ID NO: 12121 - protein, 119 aa, Artificial Sequence
  source: /note="Description of Artificial Sequence: Synthetic polypeptide"
EVQLLESGGGLVQPGGSLRLSCAASGFTFGDVPMSWVRQAPGKGLEWVSRIDPYGSNTYYADSVKGRFTISRDNSKNTLYLQMNSLRAEDTAVYYCAKGIMPSLTFDYWGQGTLVTVSS

SEQ ID NO: 12122 - protein, 108 aa, Artificial Sequence
  source: /note="Description of Artificial Sequence: Synthetic polypeptide"
DIQMTQSPSSLSASVGDRVTITCRASRTIERRLNWYQQKPGKAPKLLIYLASRLQSGVPSRFSGSGSGTDFTLTISSLQPEDFATYYCHPYESPPLTFGQGTKVEIKR

SEQ ID NO: 12123 - protein, 106 aa, Artificial Sequence
  source: /note="Description of Artificial Sequence: Synthetic polypeptide"
DIQMTQSPSSLSASVGDRVTITCRASQAIERRLNWYQQKPGKAPKLLIYLASRLQSGVPSRFSGSGSGTDFTLTISSLQPEDFATYYCHQYASPPLTLGQGTVEIR

SEQ ID NO: 12124 - protein, 106 aa, Artificial Sequence
  source: /note="Description of Artificial Sequence: Synthetic polypeptide"
NIQMTQSPSSLSASVGDRVTITCRASQAIERRLNYQQKPGKAPLLIYLASRLQSGVPSRFSGSGSGTDFTLTISSLQPEDFATYYCHQYESPPLTFGQGTKVEIKR

SEQ ID NO: 12125 - protein, 108 aa, Artificial Sequence
  source: /note="Description of Artificial Sequence: Synthetic polypeptide"
DIQMTQSPSSLSASVGDRVTITCRASQTIGRRLNWYQQKPGKAPKLLIYLASRLQSGVPSRFSGSGSGSDFTLTISSLQPEDFATYYCHQYESPPLTFGQGTKVEIKR

SEQ ID NO: 12126 - protein, 108 aa, Artificial Sequence
  source: /note="Description of Artificial Sequence: Synthetic polypeptide"
DIQMTQSPSSLSASVGDRVTITCRASQTIERRLNWYQQKPGKAPKLLIYLASRLQSGVPSRFSGSGSGTEFTLTISSLQPEDFATYYCHQYESPPLTFGQGTKVEIKR

SEQ ID NO: 12127 - protein, 107 aa, Artificial Sequence
  source: /note="Description of Artificial Sequence: Synthetic polypeptide"
DIQMTQTPSSLSASVGDRVTITCRASQTIERLNWYQQKPGEAPKLLIYLASRLQSGVPSRFSGSGSGTDFTLTISSLQPEDFATYYCHQYESPPLTFGQGTKVKIKR

SEQ ID NO: 12128 - protein, 108 aa, Artificial Sequence
  source: /note="Description of Artificial Sequence: Synthetic polypeptide"
DIQMTQSPSSLSASVGDSVTITCRASQTIERRLNWYQQKPGKAPKLLIYLASRLQSGVPSRFSGSGSGTDFTLTISSLQPEDFATYYCHQYESPPLTFGQGTKVEIKR

SEQ ID NO: 12129 - protein, 107 aa, Artificial Sequence
  source: /note="Description of Artificial Sequence: Synthetic polypeptide"
HIQMTQSPSSLSASVGDRVTITCRASQTIERRLNYQQKPGKAPKLLIYLASRLQSGVPSRFSGSGSGTDFTLTISSLQPEDFATYYCHQYESPPLTFGQGTKVEIKR

SEQ ID NO: 12130 - protein, 108 aa, Artificial Sequence
  source: /note="Description of Artificial Sequence: Synthetic polypeptide"
DVQMTQSPSSLSASVGDRVTITCRASQTIERRLNWYQQKPGEAPKLLIYLTSRLQSGVPSRFSGSGSGTDFTLTISSLQPEDFATYYCHQYASPPLTFGQGTKVEIKR

SEQ ID NO: 12131 - protein, 107 aa, Artificial Sequence
  source: /note="Description of Artificial Sequence: Synthetic polypeptide"
DIQMTQSPSSLSASVGDRVTITCRASQTIERRLNWYQQKPGKAPKLLIYLASRLQSGVPSRFSGSGSGTDFTLTISSLQPEDFATYYCHQYESPPLTFGQGTKWIKR

SEQ ID NO: 12132 - protein, 119 aa, Artificial Sequence
  source: /note="Description of Artificial Sequence: Synthetic polypeptide"
EVQLLESGGGLVQPGGSLRLSCAASGFTFADYDMSWVRQAPGKGLEWVSRISALGATTYYADSVKGRFTISRDNSKNTLYLQMNSLRAEDTAVYYCAKGQLPALEFDYWGQGTLVTVSS

SEQ ID NO: 12133 - protein, 108 aa, Artificial Sequence
  source: /note="Description of Artificial Sequence: Synthetic polypeptide"
DIQMTQSPSSLSASVGDRVTITCRASQTIERRLNWYQQKPGKAPRLLIYLATRLQSGVPSRFSGSGSGTDFTLTISSLQPEDFATYYCHQYESPPLTFGQGTKVEIKR

SEQ ID NO: 12134 - protein, 108 aa, Artificial Sequence
  source: /note="Description of Artificial Sequence: Synthetic polypeptide"
DIQMTQSPSSLSASVGDRVTITCRASQPIERRLNWYQQKPGKAPKLLIYLASRLQSGVPSRFSGSGSGTDFTLTISSLQPEDFATYYCHQYESPPLTFGQGTKVEIKR

SEQ ID NO: 12135 - protein, 107 aa, Artificial Sequence
  source: /note="Description of Artificial Sequence: Synthetic polypeptide"
DIQMTQSPSSLSASVGDRVTITCRASQTIGRRLNWYQQKPGKAPKLLIYLASRLQSGVPSRFSGSGSGTDFTLTISSLQPEDFATYYCHQYESPPLTFGQGTVEIKR

SEQ ID NO: 12136 - protein, 108 aa, Artificial Sequence
  source: /note="Description of Artificial Sequence: Synthetic polypeptide"
DIQMTQSPSSLSASVGDRVTITCRASQSIERRLNWYQQKPGKAPKLLIYLASRLQSGVPSRFSGSGSGTDFTLTISSLQPEDFATYYCHQYESPPLTFGQGTKVEIIR

SEQ ID NO: 12137 - protein, 108 aa, Artificial Sequence
  source: /note="Description of Artificial Sequence: Synthetic polypeptide"
DIQMTQSPSSLSASVGDRVTITCRASQTIERRLNWYQQKPGKAPKLLIYLATRLQSGVPSRFSGSGSGTDFTLTISSLQPEDFATYYCHQYESPPLTFGQGTKVEIKR

SEQ ID NO: 12138 - protein, 108 aa, Artificial Sequence
  source: /note="Description of Artificial Sequence: Synthetic polypeptide"
DIQMTQSPSSLSASVGDRVTITCRASQSIERRLNWYQQKPGKAPKLLIYLASRLQSGVPSRFSGSGSGTDFTLTISSLQPEDFATYYCHQYESPPLTFGQGTKVEIKR

SEQ ID NO: 12139 - protein, 108 aa, Artificial Sequence
  source: /note="Description of Artificial Sequence: Synthetic polypeptide"
DIQMTQSPSSLSASVGDRVTITCRASQTIERRLNWYQQKPGKAPRLLIYLATRLQSGVPSRFSGSGSGTDFTLTISSLQPEDFATYYCHQFEHPPLTFGQGTKVEIKR

SEQ ID NO: 12140 - protein, 108 aa, Artificial Sequence
  source: /note="Description of Artificial Sequence: Synthetic polypeptide"
DIQMTQSPSSLSASVGDRVTITCRASFPIDRRLNWYQQKPGKAPRLLIYLATRLQSGVPSRFSGSGSGTDFTLTISSLQPEDFATYYCHQYESPPLTFGQGTKVEIKR

SEQ ID NO: 12141 - protein, 108 aa, Artificial Sequence
  source: /note="Description of Artificial Sequence: Synthetic polypeptide"
DIQMTQSPSSLSASVGDRVTITCRASSTIGRRLNWYQQKPGKAPRLLIYLATRLQSGVPSRFSGSGSGTDFTLTISSLQPEDFATYYCHQYESPPLTFGQGTKVEIKR

SEQ ID NO: 12142 - protein, 108 aa, Artificial Sequence
  source: /note="Description of Artificial Sequence: Synthetic polypeptide"
DIQMTQSPSSLSASVGDRVTITCRASSQIGRRLNWYQQKPGKAPRLLIYLATRLQSGVPSRFSGSGSGTDFTLTISSLQPEDFATYYCHQYESPPLTFGQGTKVEIKR

SEQ ID NO: 12143 - protein, 117 aa, Artificial Sequence
  source: /note="Description of Artificial Sequence: Synthetic polypeptide"
EVQLLESGGGLVQPGGSLRLSCAASGFTFKRYYMTWVRQAPGKDLEWVSGIVPSGNRTYYADSVKGRFTISRDNSKNTLYLQMNSLRAEDTAVYYCAGRIPDLHFDYGQGTLVTVSS

SEQ ID NO: 12144 - protein, 108 aa, Artificial Sequence
  source: /note="Description of Artificial Sequence: Synthetic polypeptide"
DIQMTQSPSSLSASVGDRVTITCRASERIGRRLNWYQQKPGKAPRLLIYLATRLQSGVPSRFSGSGSGTDFTLTISSLQPEDFATYYCHQYESPPLTFGQGTKVEIKR

SEQ ID NO: 12145 - protein, 107 aa, Artificial Sequence
  source: /note="Description of Artificial Sequence: Synthetic polypeptide"
DIQMTQSPSSLSASVGDRVTITCRASQQIGRRLNYQQKPGKAPRLLIYLATRLQSGVPSRFSGSGSGTDFTLTISSLQPEDFATYYCHQYESPPLTFGQGTKVEIKR

SEQ ID NO: 12146 - protein, 108 aa, Artificial Sequence
  source: /note="Description of Artificial Sequence: Synthetic polypeptide"
DIQMTQSPSSLSASVGDRVTITCRASQPIARRLNWYQQKPGKAPRLLIYLATRLQSGVPSRFSGSGSGTDFTLTISSLQPEDFATYYCHQYESPPLTFGQGTKVEIKR

SEQ ID NO: 12147 - protein, 107 aa, Artificial Sequence
  source: /note="Description of Artificial Sequence: Synthetic polypeptide"
DIQMTQSPSSLSASVGDRVTITCRASGNIGRRLNYQQKPGKAPRLLIYLATRLQSGVPSRFSGSGSGTDFTLTISSLQPEDFATYYCHQYESPPLTFGQGTKVEIKR

SEQ ID NO: 12148 - protein, 108 aa, Artificial Sequence
  source: /note="Description of Artificial Sequence: Synthetic polypeptide"
DIQMTQSPSSLSASVGDRVTITCRASRNIDRRLNWYQQKPGKAPRLLIYLATRLQSGVPSRFSGSGSGTDFTLTISSLQPEDFATYYCHQYESPPLTFGQGTKVEIKR

SEQ ID NO: 12149 - protein, 106 aa, Artificial Sequence
  source: /note="Description of Artificial Sequence: Synthetic polypeptide"
DIQMTQSPSSLSASVGDRVTITCRASQNIGTRLNWYQQPGAPRLLIYLATRLQSGVPSRFSGSGSGTDFTLTISSLQPEDFATYYCHQYESPPLTFGQGTKVEIKR

SEQ ID NO: 12150 - protein, 108 aa, Artificial Sequence
  source: /note="Description of Artificial Sequence: Synthetic polypeptide"
DIQMTQSPSSLSASVGDRVTITCRASEVIGRRLNWYQQKPGKAPRLLIYLATRLQSGVPSRFSGSGSGTDFTLTISSLQPEDFATYYCHQYESPPLTFGQGTKVEIKR

SEQ ID NO: 12151 - protein, 108 aa, Artificial Sequence
  source: /note="Description of Artificial Sequence: Synthetic polypeptide"
DIQMTQSPSSLSASVGDRVTITCRASEAIGRRLNWYQQKPGKAPRLLIYLATRLQSGVPSRFSGSGSGTDFTLTISSLQPEDFATYYCHQYESPPLTFGQGTKVEIKR

SEQ ID NO: 12152 - protein, 108 aa, Artificial Sequence
  source: /note="Description of Artificial Sequence: Synthetic polypeptide"
DIQMTQSPSSLSASVGDRVTITCRASTSIARRLNWYQQKPGKAPRLLIYLATRLQSGVPSRFSGSGSGTDFTLTISSLQPEDFATYYCHQYESPPLTFGQGTKVEIKR

SEQ ID NO: 12153 - protein, 122 aa, Artificial Sequence
  source: /note="Description of Artificial Sequence: Synthetic polypeptide"
EVQLLESGGGLVQPGGSLRLSCAASGFTFADYDMTWVRQAPGKGLEWVSRISPTGGQTYYADSVKGRFTISRDNSKNTLYLQMNSLRAEDTAVYYCAKGVIPYLSFSPFDYWGQGTLVTVSS

SEQ ID NO: 12154 - protein, 108 aa, Artificial Sequence
  source: /note="Description of Artificial Sequence: Synthetic polypeptide"
DIQMTQSPSSLSASVGDRVTITCRASQTIERRLNWYQQKPGKAPRLLIYLSSKLQSGVPSRFSGSGSGTDFTLTISSLQPEDFATYYCHQYESPPLTFGQGTKVEIKR

SEQ ID NO: 12155 - protein, 116 aa, Artificial Sequence
  source: /note="Description of Artificial Sequence: Synthetic polypeptide"
EVQPLESGGGLVQPGGSLRLSCAASGFTFAGYEMWWVRQAPGKGLERISAISGSGGSTYYADSVKGRFTISRDDSKNTLYLQMNSLRAEDTAVYYCARDPYSFDYWGQGTLVTVSS

SEQ ID NO: 12156 - protein, 116 aa, Artificial Sequence
  source: /note="Description of Artificial Sequence: Synthetic polypeptide"
EVQLLESGGGSVQPGGSLRLSCAATGSTFAGYEMWWVRQAPGKGLERVSAISGSGGSTYYADSVKGRFTISRDDSKNTLYLQMNSLRAEDTAVYYCARDPYSYDYWGQGTLVSVSS

SEQ ID NO: 12157 - protein, 116 aa, Artificial Sequence
  source: /note="Description of Artificial Sequence: Synthetic polypeptide"
EVQLLESGGGLVQPGGSLRLSCAASGLTFAGYEMWWVRQAPGKGLERVSAISGSGGSTYYADSVKGRFTISRDDSKNTLYLQMNSLRAEDTAVYHCARDPYSFDYWGQGTLVTVSS

SEQ ID NO: 12158 - protein, 116 aa, Artificial Sequence
  source: /note="Description of Artificial Sequence: Synthetic polypeptide"
EVQLLESGGGLVQPGGSLRLSCAASGFTFAGYEMWWVRQAPGKGLERVSAISGSGGSTYYADSVKGRFTISRDDSKNTLYLQMNSLRAEDTAVYHCAKEPYSYDYWGQGTLVTVSS

SEQ ID NO: 12159 - protein, 116 aa, Artificial Sequence
  source: /note="Description of Artificial Sequence: Synthetic polypeptide"
EVQLLESGGGLVQPGGSLRLSCAASGSTFAGYEMWWVRQAPGKGLERVSAISGSGGSTYYADSVKGRFTISRDDSKNTLYLQMNSLRPEDTAVYYCVKDPYSFDYWGQGTLVTVSS

SEQ ID NO: 12160 - protein, 116 aa, Artificial Sequence
  source: /note="Description of Artificial Sequence: Synthetic polypeptide"
EVQLLESGGGLVQPGGSLRLSCAASGSTIAGYEMWWVRQAPGKGLERVSAISGSGGSTYYADSVKGRFTISRDDSKNTLYLQMNSLRAEDTAVYYCARDPYSFDYWGQGTPVTVSS

SEQ ID NO: 12161 - protein, 116 aa, Artificial Sequence
  source: /note="Description of Artificial Sequence: Synthetic polypeptide"
EVQLMESGGGLVQPGGSLRLSCAASGSTFAGYEMWWYRQAPGKGLERVSAISGSGRSTYYADSVKGRFTISRDDSKNTLYLQMNSLRAEDTAVYYCAKDPYSFDYWGQGTLVTVSS

SEQ ID NO: 12162 - protein, 108 aa, Artificial Sequence
  source: /note="Description of Artificial Sequence: Synthetic polypeptide"
DIQMTQSPSSLSASVGDRVTITCRASLNIGRRLNWYQQKPGKAPRLLIYLATRLQSGVPSRFSGSGSGTDFTLTISSLQPEDFATYYCHQYESPPLTFGQGTKVEIKR

SEQ ID NO: 12163 - protein, 119 aa, Artificial Sequence
  source: /note="Description of Artificial Sequence: Synthetic polypeptide"
EVQLLESGGGLVQPGGSLRLSCAASGFTFSKYWMGWARQAPGGLEWVSSIDSHGAGTYYADSVKGRFTISRDNSNTLYLQMNSLRVEDTAVYYCAKGAPKFMTTYTFDYGQGTLVTVSS

SEQ ID NO: 12164 - protein, 116 aa, Artificial Sequence
  source: /note="Description of Artificial Sequence: Synthetic polypeptide"
EVQLLESGGGLVQPGGSLRLSCAASGFTFAGYEMWWVRQAPGKGLERVSAISGSGGSTYYADSVKGRFTISRDDSKNTLYLQMNSLRAEDTAVYYCAKEPYSFDYWGQGTLVTVSS

SEQ ID NO: 12165 - protein, 116 aa, Artificial Sequence
  source: /note="Description of Artificial Sequence: Synthetic polypeptide"
EVQLLESGGGLVQPGGSLRLSCAASGSTIAGYEMWWVRQAPGKGLERVSAISGSGGSTYYADSVKGRFTISRDDSKNTLYLQMNSLRAEDTAVYYCAKDPYSFDYWGQGTLVTVSS

SEQ ID NO: 12166 - protein, 116 aa, Artificial Sequence
  source: /note="Description of Artificial Sequence: Synthetic polypeptide"
EVQLLESGGGLVQPGGSLRLSCAASGFTFAGYEMWWVRQAPGKGLERVSAISGSGGSTYYADSVKGRFTISRDDSKNTLYLQMNSLRAEDTAVYYCARDPYSFDYWGQGTLVSVSS

SEQ ID NO: 12167 - protein, 116 aa, Artificial Sequence
  source: /note="Description of Artificial Sequence: Synthetic polypeptide"
EVQLLESGGGLVQPGGSLRLSCAASGFTIAGYEMWWVRQAPGKGLERVSAISGSGGSTYYADSVKGRFTISRDDSKNTLYLQMNSLRAEDTAVYYCAKDPYSFDYWGQGTLVTVSS

SEQ ID NO: 12168 - protein, 116 aa, Artificial Sequence
  source: /note="Description of Artificial Sequence: Synthetic polypeptide"
EVQLLESGGGLVQPGGSLRLSCAASGFTFAGYEMWWVRQAPGKGLERVSAISGSGGSTYYADSVKGRFTITRDDSKNTLYLQMNSLRAEDTAVYYCAKEPYSFDYWGQGTLVTVSS

SEQ ID NO: 12169 - protein, 115 aa, Artificial Sequence
  source: /note="Description of Artificial Sequence: Synthetic polypeptide"
EVQLLESGGGLVQPGGSLRLSCAASGFTFAGYEMWWFRQAPGKGLERVSAISGSGGSTYYADSVKGRFTISRDDTNTLYLQMNSLRAEDTAVYYCAKDPYSFDYWRQGTLVTVSS

SEQ ID NO: 12170 - protein, 115 aa, Artificial Sequence
  source: /note="Description of Artificial Sequence: Synthetic polypeptide"
EVQLLESGGGLVQPGGSLRLSCAASGSTFAGYEVWWVRQAPGGLERVSAISGSGGSTYYADSVKGRFTISRDDSKNTLYLQMNSLRAEDTAVYYCARDPYSFDYWGQGTLVTVSS

SEQ ID NO: 12171 - protein, 114 aa, Artificial Sequence
  source: /note="Description of Artificial Sequence: Synthetic polypeptide"
EVQLLESGGGLVQPGGSLRLSCAASGSTFAGYEMWWVRQAPGKGLERISAISGSGGSTYYADSVGRFTISRDDSKNTLYLMNSLRAEDTAVYYCAKDPYSFDYWGQGTLVTVSS

SEQ ID NO: 12172 - protein, 116 aa, Artificial Sequence
  source: /note="Description of Artificial Sequence: Synthetic polypeptide"
EVQLLESGGGLVQPGGSLRLSCAASGFTFAGYEMWWVRQAPGKGLERVSAISGSGGSTYYADSVKGRFTISRDDSKNTLYLQMNSLRAEDTAVYYCARDPYSFDYWGQGTLVTVSS

SEQ ID NO: 12173 - protein, 116 aa, Artificial Sequence
  source: /note="Description of Artificial Sequence: Synthetic polypeptide"
EVQLLESGGGLVQPGGSLRLSCAASGLTFAGYEMWWVRRAPGKGLERVAAISGSGGSTYYADSVKGRFTISRDDSKNTLYLQMNSLRAEDTAVYYCARDPYSFDYWGQGTLVTVSS

SEQ ID NO: 12174 - protein, 117 aa, Artificial Sequence
  source: /note="Description of Artificial Sequence: Synthetic polypeptide"
EVQLLESGGGLVQPGGSLRLSCAASGFTFLSYPMHWVRQAPGKGLEWVSSIDSRGSVTYYADSVKGRFTISRDNSKNTLYLQMNSLRAEDTAVYYCAKGHSWTFDYWGQGTLVTVSS

SEQ ID NO: 12175 - protein, 116 aa, Artificial Sequence
  source: /note="Description of Artificial Sequence: Synthetic polypeptide"
EVQLLESGGGLVQPGGSLRLSCAASGFTFAGYELWWVRQAPGKGLERVSAISGSGGSTYYADSVKGRFTISRDDSKNTLYLQMNSLRAEDTAVYYCARDPYSFDYRGQGTLVTVSS

SEQ ID NO: 12176 - protein, 115 aa, Artificial Sequence
  source: /note="Description of Artificial Sequence: Synthetic polypeptide"
EVQLLESGGGLVQPGGSLRLSCAAPGFTLAGYEMWWVRQAPGKGLERVSAISGSGGSTYYADSVKGRFTISRDDSKNTLYLQMNSLRAEDTAVYYCAEPYSFDYWGQGTLVTVSS

SEQ ID NO: 12177 - protein, 116 aa, Artificial Sequence
  source: /note="Description of Artificial Sequence: Synthetic polypeptide"
EVQLLESGGGLVQPGGSLRLSCAASGLTFAGYEMWWVRRAPGKGLERVSAISGSGGSTYYADSVKGRFTTSRDDSKNTLYLQMNSLRAEDTAVYYCARDPYSFDYWGRGTLVTVSS

SEQ ID NO: 12178 - protein, 116 aa, Artificial Sequence
  source: /note="Description of Artificial Sequence: Synthetic polypeptide"
EVQLLESGGGLVQPGGSLRLSCAASGFTFAGYEMWWVRQAPGKGLERVSAISGSGGSTYYADSVKGRFTISRDDSKNTLYLQMNSLRAEDTAVYYCAKEPYSYDYWGHGTLVTVSS

SEQ ID NO: 12179 - protein, 113 aa, Artificial Sequence
  source: /note="Description of Artificial Sequence: Synthetic polypeptide"
EVQPLESGGGLVQPGGSLRLSCAASGFTFAGYEMWWVRQAPGKGLERVSAISGSGGNTYYADSVKGRFTISRDDSKNTLYLQMNSLRAEDTGYYCADPYSFDYGQGTLVTVSS

SEQ ID NO: 12180 - protein, 114 aa, Artificial Sequence
  source: /note="Description of Artificial Sequence: Synthetic polypeptide"
EVQLLESGGGLVQPGGSLRLSCAASGFTFAGYEMWWVRQAPGKGLERVSAISGSGGSTYYADSVKGRFTISRDDSKNTLYLQMNSLRAEDTAVYYCAEPYSFDSGQGTLVTVSS

SEQ ID NO: 12181 - protein, 113 aa, Artificial Sequence
  source: /note="Description of Artificial Sequence: Synthetic polypeptide"
EAQLLESGGGLVQPGGSLLSCAASGLTFAGYEMWWVRQAPGKGLERVSAISGSGGSTYYADSVKGRFTISRDDSKNTLYLQMNSLRAEDTAYYCARDPYSFDYWGQGTLTVSS

SEQ ID NO: 12182 - protein, 115 aa, Artificial Sequence
  source: /note="Description of Artificial Sequence: Synthetic polypeptide"
EVQLLESGGGLVQPGGSLRLSCAASGSTFAGYEMWWVRQAPGKGLERVSAISGSGGSTYYADSVKGRFSISRDDSKNTLYLQMNSLRAEDTAVYYCAKEPYSFDHWGQGTLTVSS

SEQ ID NO: 12183 - protein, 115 aa, Artificial Sequence
  source: /note="Description of Artificial Sequence: Synthetic polypeptide"
EVQLLESGGGLVQPGGSLRLSCAASGSTFAGYEMWWVRRAPGGLERVSAISGSGGSTYYADSVKGRFTISRDDSKNTLYLQMNSLRAEDTAVYYCARDPYSFDYWGQGTLVTVSS

SEQ ID NO: 12184 - protein, 116 aa, Artificial Sequence
  source: /note="Description of Artificial Sequence: Synthetic polypeptide"
EVQLLESGGGLVQPGGSLRLSCAASGFTFAGYEMWWFRQAPGKGLERVSAISGSGGSTYYADSVKGRFTISRDDSKNTLYLQMNSLRAEDTAVYYCAKDPYSFDNWGQGTLVTVSS

SEQ ID NO: 12185 - protein, 113 aa, Artificial Sequence
  source: /note="Description of Artificial Sequence: Synthetic polypeptide"
EVQLLESGGGLVQPGGSLRLSCAASGFTFAGYEMWWVRQAPGGLERVSAISGSGGSTYYADSVGRFTISRDDSKNTLYLQMMSLRAEDTAVYYCAKEPYSYDYGQGTLVTVSS

SEQ ID NO: 12186 - protein, 116 aa, Artificial Sequence
  source: /note="Description of Artificial Sequence: Synthetic polypeptide"
EVQLLESGGGLVEPGGSLRLSCAASGFTFAGYEMWWVRQAPGKGLERVSAISGSGGSTYYADSVKGRFTISRDDSKNTLYLQMNSLRAEDTAVYYCAKEPYSFDHRGQGTLVTVSS

SEQ ID NO: 12187 - protein, 116 aa, Artificial Sequence
  source: /note="Description of Artificial Sequence: Synthetic polypeptide"
EVQLLESGGGLVQPGGSLRLSCAASGYTFAGYEMWWVRQAPGKGLERVSAISGSGGSTYYADSVKGRFTISRDDSKNTLYLQMNSLRAEDTAVYYCAKEPYSFDHRGQGTLVTVSS

SEQ ID NO: 12188 - protein, 116 aa, Artificial Sequence
  source: /note="Description of Artificial Sequence: Synthetic polypeptide"
EVQLLESGGGLVQPGGSLRLSCAASGFTFAGYEMWWVRQAPGKGLERVSAISGSGGSTYYADSVKGRFTISRDNSKNTLYLQMNSLRAEDTAVYHCAKEPYSYDYWGQGTLVTVSS

SEQ ID NO: 12189 - protein, 116 aa, Artificial Sequence
  source: /note="Description of Artificial Sequence: Synthetic polypeptide"
EVQLLESGGGLVQPGGSLRLSCAASGFTFAGYEMWWFRQAPGKGLERVSAISGSGGSTYYADSVKGRFTISRDNSKNTLYLQMNSLRAEDTAVYYCAKDPYSFDNWGQGTLVTVSS

SEQ ID NO: 12190 - protein, 116 aa, Artificial Sequence
  source: /note="Description of Artificial Sequence: Synthetic polypeptide"
EVQLLESGGGLVQPGGSLRLSCAASGFTFAGYEMWWVRQAPGKGLERVSAISGSGGSTYYADSVKGRFTISRDDSKNTLYLQMNSLRAEDTAVYYCAKDPYSFDNWGQGTLVTVSS

SEQ ID NO: 12191 - protein, 115 aa, Artificial Sequence
  source: /note="Description of Artificial Sequence: Synthetic polypeptide"
EVQLLESGGGLVQPGGSLRLSCAASGFTFAGYEMWVRQAPGKGLEWVSAISGSGGSTYYADSVKGRFTISRDDSKNTLYLQMNSLRAEDTAVYHCAKEPYSYDYWGQGTLVTVSS

SEQ ID NO: 12192 - protein, 114 aa, Artificial Sequence
  source: /note="Description of Artificial Sequence: Synthetic polypeptide"
EVQLLESGGGLVQPGGSLRLSCAASGFTFAGYEMWWFRQAPGGLEWVSAISGSGGSTYYADSVKGRFTISRDDSNTLYLQMNSLRAEDTAVYYCAKDPYSFDNWGQGTLVTVSS

SEQ ID NO: 12193 - protein, 115 aa, Artificial Sequence
  source: /note="Description of Artificial Sequence: Synthetic polypeptide"
EVQLLESGGGLVQPGGSLRLSCAASGFTFAGYELWWVRQAPGKGLERVSAISGSGGSTYYADSVKGRFTISRDDSNTLYLQMNSLRAEDTAVYYCAKDPYSFDYRGQGTLVTVSS

SEQ ID NO: 12194 - protein, 114 aa, Artificial Sequence
  source: /note="Description of Artificial Sequence: Synthetic polypeptide"
EVQLLESGGGLVQPGGSLRLSCAASGFTFAGYELWWRQAPGKGLERVSAISGSGGSTWADSVKGRFTISRDDSKNTLYLQMNSLRAEDTAVYYCARDPYSFDYWGQGTLVTVSS

SEQ ID NO: 12195 - protein, 117 aa, Artificial Sequence
  source: /note="Description of Artificial Sequence: Synthetic polypeptide"
EVQLLESGGGLVQPGGSLRLSCAASGFTFGPRRMGWVRQAPGGLEWVSSIDDIGRRTYYADSVGRFTISRDNSKNTLYLQMNSLRAEDTAVYYCAEGAQGVLLFDYWGQGTLVTVSS

SEQ ID NO: 12196 - protein, 115 aa, Artificial Sequence
  source: /note="Description of Artificial Sequence: Synthetic polypeptide"
EVQLLESGGGLVQPGGSLRLSCAASGFTFPTAEMLVRKAPGKGLEWVSSISASGGSTYYADSVKGRFTISRDNSNTLYLQMNSLRAEDTAVYYCAKEPSYVATFDYGQGTLVTSS

SEQ ID NO: 12197 - protein, 118 aa, Artificial Sequence
  source: /note="Description of Artificial Sequence: Synthetic polypeptide"
EVQLLVSGGGLVQPGGSLRLSCAASGFTFPTAEMLWVRQAPGGPEWVSSISASGGSTYYADSVKGRFTISRDNSNTLYLQMNSLRAEDTAVYYCAKEPVSYVATFDYWGQGTLVTVSS

SEQ ID NO: 12198 - protein, 116 aa, Artificial Sequence
  source: /note="Description of Artificial Sequence: Synthetic polypeptide"
EVQLLESGGGLVQPGGSLRLSCAASGFTFPTAEMVVRAPGMGLEWVSSISASGGYTYYADSVKGRFTISRDNSNMLYLQMNSLRAEDTAVYYCAKEPVSYVATFDYGQGALVTVTS

SEQ ID NO: 12199 - protein, 117 aa, Artificial Sequence
  source: /note="Description of Artificial Sequence: Synthetic polypeptide"
EVQLLVSGGGLVQPGGSLRLSCAASGFTFPTAEMVVRQAPGKGLEWVSSISASGGSTYYADSVKGRFSISRDDSKNTLYLQMNSLRAEDTAVYYCAKEPVSYVATFDYGHGALVTSS

SEQ ID NO: 12200 - protein, 120 aa, Artificial Sequence
  source: /note="Description of Artificial Sequence: Synthetic polypeptide"
EVQLLESGGGLVQPGGSLRLSCAASGFTFPTAEMLWVRQAPGKGLEWVSSISASGGSTYYADSVKGRFTISRDNSKNTLYLQMNSLRAEDTAVYYCAKEPVSYVATFDYWGQGTLVTVSS

SEQ ID NO: 12201 - protein, 117 aa, Artificial Sequence
  source: /note="Description of Artificial Sequence: Synthetic polypeptide"
EAQLLESGGGLVQPGGSLRLSCAASGFTFPTAEMVWVRQAPGKGLEWISSISASGGSTYYADSVGRFTISRDNSNTLYLQLNSLRAEDTAVYYCAKEVSYVATFDYWGRGTLVTVSS

SEQ ID NO: 12202 - protein, 120 aa, Artificial Sequence
  source: /note="Description of Artificial Sequence: Synthetic polypeptide"
EVQLLESGGGLVQPGGSLRLSCAASGFTFPTAEMLWVRQAPGKGLEWVSSISASGGSTYYADSVKGRFTISRDNSKSTLYLQMNSLRAEDTAVYYCAKEPVSYVATFDYWGPGALVTVSS

SEQ ID NO: 12203 - protein, 120 aa, Artificial Sequence
  source: /note="Description of Artificial Sequence: Synthetic polypeptide"
EVQLLESGGGLVQPGGSLRLSCAASGFTFPTAEMLWVRKAPGKGLEWVSSISASGGSTYYADSVKGRFTISRDNSKNTLFLQMNSLRAEDTAVYYCAKEPVSYVATFDYWGQGTLVTVSS

SEQ ID NO: 12204 - protein, 120 aa, Artificial Sequence
  source: /note="Description of Artificial Sequence: Synthetic polypeptide"
EVQLLESGGGLVQPGGSLRLSCAASGFTFPTAEMLWVRQAPGKGLEWVSSISASGGSTYYADSVKGRFTISRDNSKNTLYLQMNSLRAEDTAVYYCAKEPVSYVATFDYWGPGALVTVSS

SEQ ID NO: 12205 - protein, 120 aa, Artificial Sequence
  source: /note="Description of Artificial Sequence: Synthetic polypeptide"
EVQLLESGGGLVQPGGSLRLSCAASGFTFPTAEMLWVRQAPGKGLEWVSSISASGGSTYYADSVKGRFTISRDNSKNTLYLQMNSLRAEDTAVYYCAKEPVYYVATFDYWGQGTLVTVSS

SEQ ID NO: 12206 - protein, 113 aa, Artificial Sequence
  source: /note="Description of Artificial Sequence: Synthetic polypeptide"
EVQLLESGGGLVQPGGSLRLSCAASGFTFEDYRMVWVRQAPGGLEWVSSISTSGELTYYADSVGRFTISRDNSNTLYLQMNSLRAEDTAVYYCAETAGQFFDYGQGTLVTVSS

SEQ ID NO: 12207 - protein, 120 aa, Artificial Sequence
  source: /note="Description of Artificial Sequence: Synthetic polypeptide"
EVQLLESGGGLVQPGGSLRLSCAASGFTFPTAEMLWVRKAPGKGLEWVSSISASGGSTYYADSVKGRFTISRDNSKNTLYLQMNSLRAEDAAVYYCAKEPVSYVATFDYWGQGTLVTVSS

SEQ ID NO: 12208 - protein, 107 aa, Artificial Sequence
  source: /note="Description of Artificial Sequence: Synthetic polypeptide"
NIQMTQSPSSLSASVGDRVTITCRASHFIGTLLTWYQHKPGKAPKLLITYGSLLQSGVPSRFSGSGSGTDFTLTISSLQPEDFATYYCGQGVLWPATFGQGTKVEIR

SEQ ID NO: 12209 - protein, 107 aa, Artificial Sequence
  source: /note="Description of Artificial Sequence: Synthetic polypeptide"
DIQMTQSPSSLSASVGDRVTITCRASHFIGTLLSWYQQKPRKAPKLLITYGSLLQSGVPSRFSGSGSGTDFTLTISSLHPEDFATYYCGQGVLWPPTFGQGTVEIKR

SEQ ID NO: 12210 - protein, 108 aa, Artificial Sequence
  source: /note="Description of Artificial Sequence: Synthetic polypeptide"
DIQMTQSPSSLTASVGDRVTITCRASHFIGTLLSWYQQKPGKAPKLLVTYGSLLQSGVPSRFSGSGSGTDFTLTISNLQPEDFATYYCGQGVLWPPTFGQGTKVENIR

SEQ ID NO: 12211 - protein, 106 aa, Artificial Sequence
  source: /note="Description of Artificial Sequence: Synthetic polypeptide"
DIQMTQSPSSLSASVGDRVTITCRASHFIATLLSYQQPGKAPKLLITYGSLLQSGVPSRFSGSGSGTDFTLTISSLQPEDFATYYCGQGVLWPPTFGQGTKVEIKR

SEQ ID NO: 12212 - protein, 108 aa, Artificial Sequence
  source: /note="Description of Artificial Sequence: Synthetic polypeptide"
DIQMTQSPSFLSASVGDRVTITCRASHFIATLLSWYQQKPGKAPKLLITYGSLLQSGVPSRFSGSGSGTDFTLTISSLQPEDFATYYCGQGVLWPPTFGQGTKVEIKR

SEQ ID NO: 12213 - protein, 108 aa, Artificial Sequence
  source: /note="Description of Artificial Sequence: Synthetic polypeptide"
DIQMTQSPSSLSASVGDRVTITCRASHFIGTLLSWYQQKPGKATKLLITYGSLLQSGVPSRFSGSGSGTDFTLTISSLQPEDFATYYCGQGVLWPPTFGQGTKVEIKR

SEQ ID NO: 12214 - protein, 108 aa, Artificial Sequence
  source: /note="Description of Artificial Sequence: Synthetic polypeptide"
DIQMTQSPSSLSASVGDRVTITCRASHFIGSLLSWYQHKPGKAPKLLITYGSLLQSGVPSRFSGSGSGTDFTLTISSLQPEDFATYYCGQGVLWPATFGQGTKVEIKR

SEQ ID NO: 12215 - protein, 108 aa, Artificial Sequence
  source: /note="Description of Artificial Sequence: Synthetic polypeptide"
DIQMTQSPSSLSASVGDRVTITCRASHFIGTLLSWYQHKPGKAPKLLITYGSLLQSGVPSRFSGSGSGTDFTLTISSLQPEDFATYYCGQGVLWPATFGQGTKVEIKR

SEQ ID NO: 12216 - protein, 108 aa, Artificial Sequence
  source: /note="Description of Artificial Sequence: Synthetic polypeptide"
DIQMTQSPSSLSASVGDRVTITCRASHFIGTLLSWYQHKPGKAPKLLITYGSMLQSGVPSRFSGSGSGTDFTLTISSLQPEDFATYYCGQGVLWPATFGQGTKVEIKR

SEQ ID NO: 12217 - protein, 115 aa, Artificial Sequence
  source: /note="Description of Artificial Sequence: Synthetic polypeptide"
EVQLLESGGGLVQPGGSLRLSCAASGFTFPEYEMVWVRQAPGGLEWVSAISREGRATYYADSVKGRFTISRDNSKNTLYLQMNNLRAEDTAVYYCAKEPVRFDYWGQGTLVTVSS

SEQ ID NO: 12218 - protein, 108 aa, Artificial Sequence
  source: /note="Description of Artificial Sequence: Synthetic polypeptide"
DIQMTQSPSSLSASVGDRVTITCRASHFIGTLLSWYQHKPGKAPKLLITYGSLLQSGVPSRFSGSGSGTEFTLTISSLQPEDFATYYCGQGVLWPATFGQGTKVEIKR

SEQ ID NO: 12219 - protein, 108 aa, Artificial Sequence
  source: /note="Description of Artificial Sequence: Synthetic polypeptide"
DIQMTQSPSSLTASVGDRVTITCRASHFIGTLLSWYQHKPGKAPKLLITYGSLLQSGVPSRFSGSGSGTEFTLTISSLQPEDFATYYCGQGVLWPATFGQGTKVEIKR

SEQ ID NO: 12220 - protein, 108 aa, Artificial Sequence
  source: /note="Description of Artificial Sequence: Synthetic polypeptide"
NIQMTQSPSSLSASVGDRVTITCRASHFIGTLLSWYQHKPGKAPKLLITYGSLLQSGVPSRFSGSGSGTDFTLTISSLQPEDFATYYCGQGVLWPATFGQGTKVEIKR

SEQ ID NO: 12221 - protein, 108 aa, Artificial Sequence
  source: /note="Description of Artificial Sequence: Synthetic polypeptide"
DIQMTQSPSSLSASVGDRVTINCRASHFIGTLLSWYQHKPGKAPKLLITYGSLLQSGVPSRFSGSGSGTDFTLTISSLQPEDFATYYCGQGVLWPATFGQGTKVEIKR

SEQ ID NO: 12222 - protein, 108 aa, Artificial Sequence
  source: /note="Description of Artificial Sequence: Synthetic polypeptide"
DIQLTQSPSSLSASVGDRVTITCRASHFIGTLLSWYQQKPGKATKLLITYGSLLQSGVPSRFSGSGSGTDFTLTISSLQPEDFATYYCGQGVLWPPTFGQGTKVEIKR

SEQ ID NO: 12223 - protein, 108 aa, Artificial Sequence
  source: /note="Description of Artificial Sequence: Synthetic polypeptide"
DIQMTQSPSSLYASVGDRVTITCRVSHFIGTLLSWYQQKPGKAPKLLITYGSLLQSGVPSRFSGSGSGTDFTLSISSLQPEDFATYYCGQGVLWPPTFGQGTKVEIKQ

SEQ ID NO: 12224 - protein, 108 aa, Artificial Sequence
  source: /note="Description of Artificial Sequence: Synthetic polypeptide"
DIQMTQSPSSLSASVGDRVTITCRASHFIGTLLSWYQQKPRKAPKLLITYGSLLQSGVPSRFSGSGSGTDFTLTISSLQPEDFATYYCGQGVLWPPTFGQGTKVEIKR

SEQ ID NO: 12225 - protein, 108 aa, Artificial Sequence
  source: /note="Description of Artificial Sequence: Synthetic polypeptide"
DIQIIQSPSSLSASVGDRVTITCRASHFIGTLLSWYQQKPGKAPKLLITYGSLLQSGVPSRFSGSGSGTDFTLTISSLQPEDFATYYCGQGVLWPPTFGQGTKVEIKR

SEQ ID NO: 12226 - protein, 108 aa, Artificial Sequence
  source: /note="Description of Artificial Sequence: Synthetic polypeptide"
DIQMTQSPSSLSASVGDRVTITCRASHFIGTLLSWYQLKPGKAPKLLITYGSLLQSGVPSRFSGSGSGTDFTLTISSLQPEDFATYYCGQGVLWPATFGQGTKVEIKR

SEQ ID NO: 12227 - protein, 107 aa, Artificial Sequence
  source: /note="Description of Artificial Sequence: Synthetic polypeptide"
DIQTQSPSSLSASVGDRVTITCRASHFIGTLLSWYQLKPGKAPKLLITYGSWLQSGVPSRFSGSGSGTDFTLTISSLQPEDFATYYCGQGVLWPATFGQGTKVENKR

SEQ ID NO: 12228 - protein, 115 aa, Artificial Sequence
  source: /note="Description of Artificial Sequence: Synthetic polypeptide"
EVQLLESGGGLVQPGGSLRLSCAASGFTFSTYEMLWVRQAPGGLEWVSSISSSGNYTYYADSVKGRFTISRDNSKNTLYLQMNSLRAEDTAVYYCAKEPLMFDYWGQGTLVTVSS

SEQ ID NO: 12229 - protein, 108 aa, Artificial Sequence
  source: /note="Description of Artificial Sequence: Synthetic polypeptide"
DIQMTQSPSSLSASVGDRVTITCRASHFIGTLLSWYQLKPGKAPKLLITYGSLLQRGVPSRFSGSGSGTDFTLTISSLQPEDFATYYCGQGVLWPATFGQGTKVEIKR

SEQ ID NO: 12230 - protein, 108 aa, Artificial Sequence
  source: /note="Description of Artificial Sequence: Synthetic polypeptide"
DIQMTQAPSSLSASVGDRVTITCRASHFIGTLLSWYQLKPGKAPKLLITYGSLLQSGVPSRFSGSGSGTDFTLTISSLQPEDFATYYCGQGVLWPATFGQGTKVENKR

SEQ ID NO: 12231 - protein, 108 aa, Artificial Sequence
  source: /note="Description of Artificial Sequence: Synthetic polypeptide"
DIQMTQSPSSLSASVGDRVTITCRASHFIGSLLSWYQQKPGKAPKLLITYGSLLQSGVPSRFSGSGSGTDFALTISSLQPEDFATYYCGQGVLWPATFGQGTKVEIKR

SEQ ID NO: 12232 - protein, 108 aa, Artificial Sequence
  source: /note="Description of Artificial Sequence: Synthetic polypeptide"
DIQMTQSPSSLSASVGDRVTITCRASHFIGSLLSWYQVKPGKAPKLLITYGSLLQSGVPSRFSGSGSGTDFTLTISSLQPEDFATYYCGQGVLWPATFGQGTTVEIKR

SEQ ID NO: 12233 - protein, 106 aa, Artificial Sequence
  source: /note="Description of Artificial Sequence: Synthetic polypeptide"
DILMTQSPSSLSASVGDRVTITCRASHFIGSLLSWYQQPGAPKLLITYGSLLQSGVPSRFSGSGSGTDFTLTISSLQPEDFATYYCGQGVLWPATFGQGTKVEIKR

SEQ ID NO: 12234 - protein, 107 aa, Artificial Sequence
  source: /note="Description of Artificial Sequence: Synthetic polypeptide"
DIQTQSPSSLSASVGDRVTITCRASHFIGTLVSWYQQKPGKAPKLLITYGSLLQSGVPSRFSGSGSGTDFTLTISSLQPEDFATYYCGQGVLWPATYGQGTKVEIKR

SEQ ID NO: 12235 - protein, 107 aa, Artificial Sequence
  source: /note="Description of Artificial Sequence: Synthetic polypeptide"
DIQMTQSPSSLSASVGDRVTITCRASHFIGTLVSYQQKPGKAPKLLITYGSLLQSGVPSRFSGSGSGTDFTLTISSLQPEDFATYYCGQGVLWPATFGQGTKVENKR

SEQ ID NO: 12236 - protein, 108 aa, Artificial Sequence
  source: /note="Description of Artificial Sequence: Synthetic polypeptide"
DIKMTQSPSSLSASVGDRVTITCRASHFIGTLVSWYQQKPGKAPKLLITYGSMLQSGVPSRFSGSGSGTDFTLTISSLQPEDFATYYCGQGVLWPATFGQGTKVEIKR

SEQ ID NO: 12237 - protein, 108 aa, Artificial Sequence
  source: /note="Description of Artificial Sequence: Synthetic polypeptide"
DIQMTQSPSSLSASVGDRVTITCQASHFIGTLVSWYQQKPGKAPKLLITYGSLLQSGVPSRFSGSGSGTDFTLTISSLQPEDFATYYCGQGVLWPATFGQGTKVEIKR

SEQ ID NO: 12238 - protein, 108 aa, Artificial Sequence
  source: /note="Description of Artificial Sequence: Synthetic polypeptide"
DIQMTQSPSSLSASVGDRVTITCRASHFIGTLLSWYQQKPGKAPKLLITYGSWLQSGVPSRFSGSGSGTDFTLTISSLQPEDFATYYCGQGVLWPATFGQGTKVEIKR

SEQ ID NO: 12239 - protein, 114 aa, Artificial Sequence
  source: /note="Description of Artificial Sequence: Synthetic polypeptide"
EVQLLESGGGLVQPGGSLRLSCAASGFTFDTEEMSWVRQAPGGLEWVSAISPNGAFTFYADSVKGRFTISRDNSKNTLYLQMNSLRAEDTAVYYCAKEILFDYWGQGTLVTVSS

SEQ ID NO: 12240 - protein, 108 aa, Artificial Sequence
  source: /note="Description of Artificial Sequence: Synthetic polypeptide"
DIQMTQSPSSLSASVGDRVTITCRASHFIGTLLSWYQLKPGKAPKLLITYGSWLQSGVPSRFSGSGSGTDFTLTISSLQPEDFATYYCGQGVLWPATFGQGTKVEIKR

SEQ ID NO: 12241 - protein, 108 aa, Artificial Sequence
  source: /note="Description of Artificial Sequence: Synthetic polypeptide"
DIQMTQSPSSLSASVGDRVTITCRASHFIGTLLSWYQQKPGKAPKLLITYGSLLQSGVPSRFSGSGFGTDFTLTISSLQPEDFATYYCGQEVLWPATFGQGTKVEIKR

SEQ ID NO: 12242 - protein, 108 aa, Artificial Sequence
  source: /note="Description of Artificial Sequence: Synthetic polypeptide"
DIQMTQSPSSLSASVGDRVSITCRASHFIGTLLSWYQQKPGKAPKLLITYGSLLQSGVPSRFSGSGFGTDFTLTISSLQPEDLATYYCGQEVLWPATFGQGTKVEIKR

SEQ ID NO: 12243 - protein, 108 aa, Artificial Sequence
  source: /note="Description of Artificial Sequence: Synthetic polypeptide"
DIQMTQSPSSLSASVGDRVTITCQASHFIGTLLSWYQQKPGKAPKLLITYGSLLQSGVPSRFSGSGFGTDFTLTISSLQPEDFATYYCGQEVLWPATFGQGTKVEIKR

SEQ ID NO: 12244 - protein, 108 aa, Artificial Sequence
  source: /note="Description of Artificial Sequence: Synthetic polypeptide"
DIQMTQSPSSLSASVGDRVTITCRASHFIGTLLSWYQQKPGKAPKLLITYGSLLQSGVPSRFSGSGFGTEFTLTIGSLQPEDFATYYCGQGVLWPATFGQGTKVEIKR

SEQ ID NO: 12245 - protein, 108 aa, Artificial Sequence; identical to SEQ ID NO: 12213
  source: /note="Description of Artificial Sequence: Synthetic polypeptide"

SEQ ID NO: 12246 - protein, 108 aa, Artificial Sequence
  source: /note="Description of Artificial Sequence: Synthetic polypeptide"
DIQMTQSPSSLSASVGDRVTITCRASHFIASLLSWYQVKPGKAPKLLITYGSLLQSGVPSRFSGSGSGTDFTLTISSLQPEDFATYYCGQGVLWPATFGQGTTVEIKR

SEQ ID NO: 12247 - protein, 107 aa, Artificial Sequence
  source: /note="Description of Artificial Sequence: Synthetic polypeptide"
DIQTQSPSSLSASVGDRVTITCRASHFIAQLLSWYQVKPGKAPKLLITYGSLLQSGVPSRFSGSGSGTDFTLTISSLQPEDFATYYCGQGVLWPATFGQGTTVEIKR

SEQ ID NO: 12248 - protein, 108 aa, Artificial Sequence
  source: /note="Description of Artificial Sequence: Synthetic polypeptide"
DIQMTQSPSSLSASVGDRVTITCRASHFIAQLLSWYQVKPGKAPKLLITYGSLLQSGVPSRFSGSGSGTDFTLTISSLQPEDFATYYCGQGVLWPATFGQGTTVEIRR

SEQ ID NO: 12249 - protein, 108 aa, Artificial Sequence
  source: /note="Description of Artificial Sequence: Synthetic polypeptide"
DIQMTQSPSSLSASVGDRVTITCRASHYIASLLSWYQVKPGKAPKLLITYGSLLQSGAPSRFSGSGSGTDFTLTISSLQPEDFATYYCGQGVLWPATFGQGTTVEIKR

SEQ ID NO: 12250 - protein, 117 aa, Artificial Sequence
  source: /note="Description of Artificial Sequence: Synthetic polypeptide"
EVQLLESGGGLVQPGGSLRLSCAASGFTFGHYDMVWVRQAPGRGLEWVSTINGAGLNTYYADSVKGRFTISRDNSKNTLYLQMNSLRAEDTAVYYCAQSASRIFDYWGQGTLVTVSS

SEQ ID NO: 12251 - protein, 108 aa, Artificial Sequence
  source: /note="Description of Artificial Sequence: Synthetic polypeptide"
DIQMTQSPSSLSASVGDRVTITCRASHFIGSLLSWYQVKPGKAPKLLITWASYLQSGVPSRFSGSGSGTDFTLTISSLQPEDFATYYCGQGVLWPATFGQGTTVEIKR

SEQ ID NO: 12252 - protein, 108 aa, Artificial Sequence
  source: /note="Description of Artificial Sequence: Synthetic polypeptide"
DIQMTQSPSSLSASVGDRVTITCRASHFIGSLLSWYQVKPGKAPKLLITWTSYLQSGVPSRFSGSGSGTDFTLTISSLQPEDFATYYCGQGVLWPATFGQGTTVEIKR

SEQ ID NO: 12253 - protein, 108 aa, Artificial Sequence
  source: /note="Description of Artificial Sequence: Synthetic polypeptide"
DIQMTQSPSSLSASVGDRVTITCRASHFIGSLLSWYQVKPGKAPKLLITWSSYLQSGVPSRFSGSGSGTDFTLTISSLQPEDFATYYCGQGVLWPATFGQGTTVEIKR

SEQ ID NO: 12254 - protein, 108 aa, Artificial Sequence
  source: /note="Description of Artificial Sequence: Synthetic polypeptide"
DIQMTQSPSSLSASVGDRVTITCRASHFIGSLLSWYQVKPGKAPKLLITWGSWLQSGVPSRFSGSGSGTDFTLTISSLQPEDFATYYCGQGVLWPATFGQGTTVEIKR

SEQ ID NO: 12255 - protein, 108 aa, Artificial Sequence
  source: /note="Description of Artificial Sequence: Synthetic polypeptide"
DIQMTQSPSSLSASVGDRVTITCRASHFIGSLLSWYQVKPGKAPKLLITWASWLQSGVPSRFSGSGSGTDFTLTISSLQPEDFATYYCGQGVLWPATFGQGTTVEIKR

SEQ ID NO: 12256 - protein, 108 aa, Artificial Sequence
  source: /note="Description of Artificial Sequence: Synthetic polypeptide"
DIQMTQSPSSLSASVGDRVTITCRASHFIGSLLSWYQVKPGKAPKLLITWSSWLQSGVPSRFSGSGSGTDFTLTISSLQPEDFATYYCGQGVLWPATFGQGTTVEIKR

SEQ ID NO: 12257 - protein, 108 aa, Artificial Sequence
  source: /note="Description of Artificial Sequence: Synthetic polypeptide"
DIQMTQSPSSLSASVGDRVTITCRASHWIAQLLSWYQVKPGKAPKLLITYGSLLQSGVPSRFSGSGSGTDFTLTISSLQPEDFATYYCGQGVLWPATFGQGTTVEIKR

SEQ ID NO: 12258 - protein, 108 aa, Artificial Sequence
  source: /note="Description of Artificial Sequence: Synthetic polypeptide"
DIQMTQSPSSLSASVGDRVTITCRASHFIGSLLRWYQVKPGKAPKLLITYGSLLQSGVPSRFSGSGSGTDFTLTISSLQPEDFATYYCGQGVLWPATFGQGTTVEIKR

SEQ ID NO: 12259 - protein, 108 aa, Artificial Sequence
  source: /note="Description of Artificial Sequence: Synthetic polypeptide"
DIQMTQSPSSLSASVGDRVTITCRASHRIAQLLSWYQVKPGKAPKLLITYGSLLQSGVPSRFSGSGSGTDFTLTISSLQPEDFATYYCGQGVLWPATFGQGTTVEIKR

SEQ ID NO: 12260 - protein, 108 aa, Artificial Sequence
  source: /note="Description of Artificial Sequence: Synthetic polypeptide"
DIQMTQSPSSLSASVGDRVTITCRASHYIASLLSWYQVKPGKAPKLLITYGSLLQSGVPSRFSGSGSGTDFTLTISSLQPEDFATYYCGQGVLWPATFGQGTTVEIKR

SEQ ID NO: 12261 - protein, 116 aa, Artificial Sequence
  source: /note="Description of Artificial Sequence: Synthetic polypeptide"
EVQLLESGGGLVQPGGSLRLSCAASGSTIAGYEMWWVRQAPGKGLERVSAISGSGGSTYYADSVKGRFTISRDDSKNTLYLQMNSLRAEDTAVYYCARDPYSFDYWGQGTLVTVSS

SEQ ID NO: 12262 - protein, 115 aa, Artificial Sequence
  source: /note="Description of Artificial Sequence: Synthetic polypeptide"
EVQLLESGGGLVQPGGSLRLSCAASGFTFRSYEMAWVRQAPGKGLEWVSSISTLGTKTYYADSVKGRFTISRDNSKNTLYLQMNSLAEDTAVYYCAQSSTHIFDYWGQGTLTVSS

SEQ ID NO: 12263 - protein, 108 aa, Artificial Sequence
  source: /note="Description of Artificial Sequence: Synthetic polypeptide"
DIQMTQSPSSLSASVGDRVTITCRASHFIGSLLSWYQVKPGKAPKLLIRFGSLLQSGVPSRFSGSGSGTDFTLTISSLQPEDFATYYCGQGVLWPATFGQGTTVEIKR

SEQ ID NO: 12264 - protein, 108 aa, Artificial Sequence
  source: /note="Description of Artificial Sequence: Synthetic polypeptide"
DIQMTQSPSSLSASVGDRVTITCRASHFIGSLLSWYQVKPGKAPKLLITYKSYLQSGVPSRFSGSGSGTDFTLTISSLQPEDFATYYCGQGVLWPATFGQGTTVEIKR

SEQ ID NO: 12265 - protein, 108 aa, Artificial Sequence
  source: /note="Description of Artificial Sequence: Synthetic polypeptide"
DIQMTQSPSSLSASVGDRVTITCRASHFIGSLLSWYQVKPGKAPKLLITWGSYLQSGVPSRFSGSGSGTDFTLTISSLQPEDFATYYCGQGVLWPATFGQGTTVEIKR

SEQ ID NO: 12266 - protein, 108 aa, Artificial Sequence
  source: /note="Description of Artificial Sequence: Synthetic polypeptide"
DIQMTQSPSSLSASVGDRVTITCRASHFIWGPLSWYQVKPGKAPKLLITYGSLLQSGVPSRFSGSGSGTDFTLTISSLQPEDSATYYCGQGVLWPATFGQGTTVEIKR

SEQ ID NO: 12267 - protein, 108 aa, Artificial Sequence
  source: /note="Description of Artificial Sequence: Synthetic polypeptide"
DIQMTQSPSSLSASVGDRVTITCRASHWIATLLSWYQVKPGKAPKLLITYGSLLQSGVPSRFSGSGSGTDFTLTISSLQPEDFATYYCGQGVLWPATFGQGTTVEIKR

SEQ ID NO: 12268 - protein, 108 aa, Artificial Sequence
  source: /note="Description of Artificial Sequence: Synthetic polypeptide"
DIQMTQSPSSLSASVGDRVTITCRASHFIWGPLSWYQVKPGKAPKLLITYGSLLQSGVPSRFSGSGSGTDFTLTISSLQPEDFATYYCGQGVLWPATFGQGTTVEIKR

SEQ ID NO: 12269 - protein, 108 aa, Artificial Sequence
  source: /note="Description of Artificial Sequence: Synthetic polypeptide"
DIQMTQSPSSLSASVGDRVTITCRASHFIGSLLNWYQVKPGKAPKLLITYGSLLQSGVPSRFSGSGSGTDFTLTISSLQPEDFATYYCGQGVLWPATFGQGTTVEIKR

SEQ ID NO: 12270 - protein, 108 aa, Artificial Sequence
  source: /note="Description of Artificial Sequence: Synthetic polypeptide"
GIQMTQSPSSLSASVGDRVTITCRASHFIGSLLSWYQVKPGKAPKLLITYGSWLQSGVPSRFSGSGSGTDFTLTISSLQPEDFATYYCGQGVLWPATFGQGTTVEIKR

SEQ ID NO: 12271 - protein, 117 aa, Artificial Sequence
  source: /note="Description of Artificial Sequence: Synthetic polypeptide"
EVQLLESGGGLVQPGGSLRLSCAASGFTFIRYEMAWVRQAPGKGLEWVSSISSSGWTTYYADSVKGRFTISRDNSKNTLYLQMNSLRAEDTAVYYCAKSDAHIFDYWGQGTLVTVSS

SEQ ID NO: 12272 - protein, 116 aa, Artificial Sequence
  source: /note="Description of Artificial Sequence: Synthetic polypeptide"
EVQLLESGGGLVQPGGSLRLSCAASGFTFYAYEMAWVRQAPGGLEWVSSISDDGTRTYYADSVKGRFTISRDNSKNTLYLQMNSLRAEDTAVYYCAKDLGQGFDYWGQGTLVTVSS

SEQ ID NO: 12273 - protein, 117 aa, Artificial Sequence
  source: /note="Description of Artificial Sequence: Synthetic polypeptide"
EVQLLESGGGLVQPGGSLRLSCAASGFTFADHGMTWVRQAPGKGLEWVSGIGPSGEATYYADSVKGRFTISRDNSKNTLYLQMNSLAEDTAVYYCAKDRIPLVFDYWGQGTLVTVSS

SEQ ID NO: 12274 - protein, 115 aa, Artificial Sequence
  source: /note="Description of Artificial Sequence: Synthetic polypeptide"
EVQLLESGGGLVQPGGSLRLSCAASGFTFESQDMSWVRQAPGKGLEWVSGISPNGWDTYYADSVKGRFTISRDNSKNTLYLQMNSLRAEDTAVYYCAKDRSDFDYGQGTLVTVSS

SEQ ID NO: 12275 - protein, 116 aa, Artificial Sequence
  source: /note="Description of Artificial Sequence: Synthetic polypeptide"
EVQLLESGGGLVQPGGSLRLSCAASGFTFGDYDMWWVRQAPGGLEWVSRIRHPGGVTYYADSVKGRFTISRDNSKNTLYLQMNSLRAEDTAVYYCAKAVPKGFDYWGQGTLVTVSS

SEQ ID NO: 12276 - protein, 117 aa, Artificial Sequence
  source: /note="Description of Artificial Sequence: Synthetic polypeptide"
EVQLLESGGGLVQPGGSLRLSCAASGFTFRVYWMTWVRQAPGGLEWVSSIDPQGGMTYYADSVGRFTISRDNSKNTLYLQMNSLRAEDTAVYYCAKARIPNLEFDYWGQGTLVTVSS

SEQ ID NO: 12277 - protein, 118 aa, Artificial Sequence
  source: /note="Description of Artificial Sequence: Synthetic polypeptide"
EVQLLESGGGLVQPGESLRLSCAASGFTFSAYDMTWVRQAPGKGLEWVSRINPTGSYTYYADSVKGRFTISRDNSNTLYLQMNSLRAEDTAVYYCAKAKIPNLVFDYWGQGTLVTVSS

SEQ ID NO: 12278 - protein, 118 aa, Artificial Sequence
  source: /note="Description of Artificial Sequence: Synthetic polypeptide"
EVQLLESGGGLVQPGGSLRLSCAASGFTFADSEMMWVRQAPGKGLEVSGIAHNGGHTYYADSVGRFTISRDNSKNTLYLQMNSLRAEDTAVYYCAAGHPQQTEAFDYWGQGTLVTVSS

SEQ ID NO: 12279 - protein, 116 aa, Artificial Sequence
  source: /note="Description of Artificial Sequence: Synthetic polypeptide"
EMQLLESGGGLVQPGGSLRLSCAASGFTFATYDMYWVRQAPGKGLEWVSKISPNGWSTYYADSVKGRFTISRDNSKNTLYLQMNSLRAEDTAVYYCAKYQTHFDYWGQGTLVTVSS

SEQ ID NO: 12280 - protein, 115 aa, Artificial Sequence
  source: /note="Description of Artificial Sequence: Synthetic polypeptide"
EVQLLESGGGLVQPGGSLRLSCAASGFTFSVYDMRWVRQAPGKGLEWVSTISSSGTYTYYADSVGRFTISRDNSKNTLYLQMNSLRAEDTAVYYCAKYPKNFDYWGQGTLVTVSS

SEQ ID NO: 12281 - protein, 116 aa, Artificial Sequence
  source: /note="Description of Artificial Sequence: Synthetic polypeptide"
EVQLLESGGGLVQPGGSLRLSCAASGFTFSHEDMTWVRQAPGGLEWVSSISPNGWDTYYADSVKGRFTISRDNSKNTLYLQMNSLRAEDTAVYYCAKRTRSKFDYWGQGTLVTVSS

SEQ ID NO: 12282 - protein, 119 aa, Artificial Sequence
  source: /note="Description of Artificial Sequence: Synthetic polypeptide"
EVQLLESGGGLVQPGGSLRLSCAASGFTFEKYIMGWARQAPGKGLEMVSTIDYWGQHTYYADSVGRFTISRDNSKNTLYLQMNSLRAEDTAVYYCAKRSHLIPLQFDYWGQGTLVTVSS

SEQ ID NO: 12283 - protein, 120 aa, Artificial Sequence
  source: /note="Description of Artificial Sequence: Synthetic polypeptide"
EVQLLESGGGLVQPGGSLRLSCAASGFTFSDYAMGWVRQAPGGLEWVSTISYVGYYTYYADSVGRFTISRDNSKNTLYLQMNSLRAEDTAVYYCAKALRGEAFTERFDYWGQGTLVTVSS

SEQ ID NO: 12284 - protein, 121 aa, Artificial Sequence
  source: /note="Description of Artificial Sequence: Synthetic polypeptide"
EVQLLESGGGLVQPGGSLRLSCAASGFTFGPYMMHWVRQAPGKGLEWVSTIEVNGNRTYYADSVGRFTISRDNSKNTLYLQMNSLRAEDTAVYYCAKWVGSTSSDKSFDYWGQGTLVTVSS

SEQ ID NO: 12285 - protein, 119 aa, Artificial Sequence
  source: /note="Description of Artificial Sequence: Synthetic polypeptide"
EVQLLESGGGLVQPGGSLRLSCAASGFTFGTTEMAWVRQAPGGLEWVSSIGSAGAWTYYADSVKGRFTISRDNSKNTLYLQMNSLRAEDTAVYYCAKIGGHPQGQFDYWGQGTLVTVSS

SEQ ID NO: 12286 - protein, 117 aa, Artificial Sequence
  source: /note="Description of Artificial Sequence: Synthetic polypeptide"
EVQLLESGGGLVQPGGSLRLSCAASGFTFPREWMAWVRQAPGKGLEVSSIQPMGQTTYYADSVKGRFTISRDNSKNTLYLQMNSLRAEDTAVYYCAKYSRNKGFFDYGQGTLVTVSS

SEQ ID NO: 12287 - protein, 116 aa, Artificial Sequence
  source: /note="Description of Artificial Sequence: Synthetic polypeptide"
EVQLLESGGGLVQPGGSLRLSCAASGFTFTSEYMGWVRQAPGKGLEWVSSIQRYGSTTYYADSVKGRFTISRDNSNTLYLQMNSLRAEDTAVYYCAKHESNETFDYGQGTLVTVSS

SEQ ID NO: 12288 - protein, 119 aa, Artificial Sequence
  source: /note="Description of Artificial Sequence: Synthetic polypeptide"
EVQLLESGGGLVQPGGSLRLSCAASGFTFSVYSMQVRQAPGKGLEWVSAITPNGTRTYYADSVGRFTISRDNSNTLYLQMNSLRAEDTAVYYCATLGRGSYPGVDFDYWGQGTLVTVSS

SEQ ID NO: 12289 - protein, 116 aa, Artificial Sequence
  source: /note="Description of Artificial Sequence: Synthetic polypeptide"
EVQLLESGGGLVQPGGSLRLSCAASGFTFPSYAMTVRQAPGKGLEWVSRITADGTVTYYADSVGRFTISRDNSKNTLYLQMNSLRAEDTAVYYCAGSIPMLTFDYWGQGTLVTVSS

SEQ ID NO: 12290 - protein, 117 aa, Artificial Sequence
  source: /note="Description of Artificial Sequence: Synthetic polypeptide"
EVQLLESGGGLVQPGGSLRLSCAASGFTFSTYDMIVRQAPGKGLEWVSAISPNGTGIYYADSVKGRFTISRDNSKNTLYLQMNSLRAEDTAVYYCANQSVHHAVFDYGQGTLVTVSS

SEQ ID NO: 12291 - protein, 118 aa, Artificial Sequence
  source: /note="Description of Artificial Sequence: Synthetic polypeptide"
EVQLLESGGGLVQPGGSLRLSCAASGFTFENYEMTWVRQAPGKGLEIVSRIAPHGRLTYYADSVKGRFTISRDNSKNTLYLQMNSLRAEDTAVYYCAGQIPMLDFDYWGQGTLVTVSS

SEQ ID NO: 12292 - protein, 121 aa, Artificial Sequence
  source: /note="Description of Artificial Sequence: Synthetic polypeptide"
EVQLLESGGGLVQPGGSLRLSCAASGFTFSHYMMMWVRQAPGKGLEWVSTISHFGDITYYADSVKGRFTISRDNSKNTLYLQMNSLRAEDTAVYYCAKNDMVMKNGGFDYWGQGTLVTVSS

SEQ ID NO: 12293 - protein, 119 aa, Artificial Sequence
  source: /note="Description of Artificial Sequence: Synthetic polypeptide"
EVQLLESGGGLVQPGGSLRLSCAASGFTFERYDMSWVRQAPGKGLEWVSRIDSRGWSTYYADSVKGRFTISRDNSKNTLYLQMNSLRAEDTAVYYCAKGLVPHLRFDYWGQGTLVTVSS

SEQ ID NO: 12294 - protein, 116 aa, Artificial Sequence
  source: /note="Description of Artificial Sequence: Synthetic polypeptide"
EVQLLESGGGLVQPGGSLRLSCAASGFTFANAQMTWVRQAPGKGLEWVSRIDAMGDATYYADSVGRFTISRDNSKNTLYLQMNSLRAEDTAVYYCAKGKVPSIDYWGQGTLVTVSS

SEQ ID NO: 12295 - protein, 116 aa, Artificial Sequence
  source: /note="Description of Artificial Sequence: Synthetic polypeptide"
EVQLLESGGGLVQPGGSLRLSCAASGFTFANAQMTWVRQAPGKGLEWVSRIDAMGDATYYADSVGRFTISRDNSKNTLYLQMNSLRAEDTAVYYCAKGVIPAFDYWGQGTLVTVSS

SEQ ID NO: 12296 - protein, 116 aa, Artificial Sequence
  source: /note="Description of Artificial Sequence: Synthetic polypeptide"
EVQLLESGGGLVQPGGSLRLSCAASGFTFQNDRMHWVRQAPGKGLEWVSSISATGGDTYYADSVGRFTISRDNSKNTLYLQMNSLRAEDTAVYYCAQTGTNRFDYWGQGTLVTVSS

SEQ ID NO: 12297 - protein, 118 aa, Artificial Sequence
  source: /note="Description of Artificial Sequence: Synthetic polypeptide"
EVQLLESGGGLVQPGGSLRLSCAASGFTFNQPYMSWVRQAPGKGLEWVSSIDASGGTTYYADSVKGRFTISRDNSKNTLYLQMNSLRAEDAAVYYCAKDRIPNLVFDYGQGTLVTVSS

SEQ ID NO: 12298 - protein, 116 aa, Artificial Sequence
  source: /note="Description of Artificial Sequence: Synthetic polypeptide"
EVQLLESGGGLVQPGGSLRLSCAASGFTFDNENMTWVRQAPGKGLEWVSRIDGGGYNTYYADSVKGRFTISRDNSKNTLYLQNSLRAEDTAVYYCAGQVPELLFDYGQGTLVTVSS

SEQ ID NO: 12299 - protein, 117 aa, Artificial Sequence
  source: /note="Description of Artificial Sequence: Synthetic polypeptide"
EVQLLESGGGLVQPGGSLRLSCAASGFTFVSSNMTVRQAPGKGLEWVSAISGSGGSTYYADSVKGRFTISRDNSKNTLYLQMNSLRAEDTAVYYCAGRIPTLVFDYWGQGTLVTVSS

SEQ ID NO: 12300 - protein, 114 aa, Artificial Sequence
  source: /note="Description of Artificial Sequence: Synthetic polypeptide"
EVQLLESGGGLVQPGGSLRLSCAASGFTFRDYEMWWVRQAPGKGLERVSAINPQGTRTWADSVKGRFTISRDNSNTLYLQMNSLRAEDTAVYYCAKLPFYFQEWGQGTLVTVSS

SEQ ID NO: 12301 - protein, 118 aa, Artificial Sequence
  source: /note="Description of Artificial Sequence: Synthetic polypeptide"
EVQLLESGGGLVQPGGSLRLSCAASGFTFSDDSMSWVRQAPGGLEWVSRINDAGSSTYYADSVKGRFTISRDNSKNTLYLQMNSLRAEDTAVYYCAKGTIPLLEFDYWGQGTLVTVSS

SEQ ID NO: 12302 - protein, 115 aa, Artificial Sequence
  source: /note="Description of Artificial Sequence: Synthetic polypeptide"
EMQLLESGGGLVQPGGSLRLSCAASGFTFVSDTMSVRQAPGGLEVSRIDGTGGDTYYADSVKGRFTISRDNSKNTLYLQMNSLRAGDTAVYYCAGLIPDLQFDYWGQGTLVTVSS

SEQ ID NO: 12303 - protein, 118 aa, Artificial Sequence
  source: /note="Description of Artificial Sequence: Synthetic polypeptide"
EVQLLESGGGLVQPGGSLRLSCAASGFTFDEEEMTVRQAPGKGLEWVSRIIGGGHETYYADSVKGRFTISRDNSKNTLYLQMNSLRAEDTAVYYCAKGTIPLLEFDYWGQGTLVTVSS

SEQ ID NO: 12304 - protein, 118 aa, Artificial Sequence
  source: /note="Description of Artificial Sequence: Synthetic polypeptide"
EVQLLESGGGLVQPGGSLRLSCAASGFTFDIMEMMTVRQAPGKDLEWVSRITERGDVTYYADSVKGRFTISRDNSKNTLYLQMNSLRAEDTAVYYCAGTVPTLEFDYWGQGTLVTVSS

SEQ ID NO: 12305 - protein, 118 aa, Artificial Sequence
  source: /note="Description of Artificial Sequence: Synthetic polypeptide"
EVQLLESGGGLVQPGGSLRLSCAASGFTFDEEEMTVRQAPGKGLEWVSRIIGGGHETYYADSVKGRFTISRDNSKNTLYLQMNSLRAEDTAVYYCAKGTVPTLEFDYWGQGTLVTVSS

SEQ ID NO: 12306 - protein, 116 aa, Artificial Sequence
  source: /note="Description of Artificial Sequence: Synthetic polypeptide"
EVQLLESGGGLVQPGGSLRLSCAASGFTFHETEMTWVRQAPGGLEWVSAINRLGQDTYYADSVKGRFTISRDNSKNTLYLQMNSLRAEDTAVYYCAGRIPGLVFDYGQGTLVTVSS

SEQ ID NO: 12307 - protein, 119 aa, Artificial Sequence
  source: /note="Description of Artificial Sequence: Synthetic polypeptide"
EVQLLESGGGLVQPGGSLRLSCAASGFTFSDDSMSWVRQAPGKGLEWVSRINDAGSSTYYADSVKGRFTISRDNSKNTLYLQMNSLRAEDTAVYYCAKGTVPTLEFDYWGQGTLVTVSS

SEQ ID NO: 12308 - protein, 118 aa, Artificial Sequence
  source: /note="Description of Artificial Sequence: Synthetic polypeptide"
EVQLLESGGGLVQPGGSLRLSCAASGFTFDNENMTWVRQAPGKDLEWVSRITERGDVTYYADSVKGRFTISRDNSKNTLYLQMNSLRAEDTAVYYCAGRIPTLVFDYWGQGTLVTVSS

SEQ ID NO: 12309 - protein, 118 aa, Artificial Sequence
  source: /note="Description of Artificial Sequence: Synthetic polypeptide"
EVQLLESGGGLVQPGGSLRLSCAASGFTFSDDSMSWVRQAPGKGLEWVSRINDAGSSTYYADSVKGRFTISRDNSNTLYLQMNSLRAEDTAVYYCAKGITPNLTFDYWGQGTLVTVSS

SEQ ID NO: 12310 - protein, 108 aa, Artificial Sequence
  source: /note="Description of Artificial Sequence: Synthetic polypeptide"
DIQMTQSPSSLSASVGDRVTITCRASQSIGRRLNWYQQKPGKAPRLLIYLATRLQSGVPSRFSGSGSGTDFTLTISSLQPEDFATYYCHQYESPPLTFGQGTKVEIKR

SEQ ID NO: 12311 - protein, 118 aa, Artificial Sequence
  source: /note="Description of Artificial Sequence: Synthetic polypeptide"
EVQLLESGGGLVQPGGSLRLSCAASGFTFVSSNMTWVRQAPGKGLEWVSAISGSGGSTYYADSVKGRFTISRDNSKNTLYLQMNSLRAEDTAVYYCADRIPNLVFDYWGQGTLVTVSS

SEQ ID NO: 12312 - protein, 123 aa, Artificial Sequence
  source: /note="Description of Artificial Sequence: Synthetic polypeptide"
EVQLQQSGPELVKPGASVKISCKASGYTFTDYYMNWVKQSHGKSLEWIGDINPNNGDTSYNQKFKGKAPLTVDKSSSTAYMEVRSLTSEDSAVYFCARGGVLRYPYYYVMDYWGQGTSVTVSS

SEQ ID NO: 12313 - protein, 107 aa, Artificial Sequence
  source: /note="Description of Artificial Sequence: Synthetic polypeptide"
DIVMTQSQKFMSRSVGDRVSVTCKASQNVGPNVAWYQQRPGQSPKPLIYSASYRYSGVPDRFTGSGSGTDFTLTISNVQSEDLAEYFCQQYNNYPYTFGGGTKLEIK

SEQ ID NO: 12314 - protein, 124 aa, Artificial Sequence
  source: /note="Description of Artificial Sequence: Synthetic polypeptide"
EVQLQQSGAELVRPGASVKLSCTASGFNIKDDYMHWVKQRPEQGLEWIGWIDPENGHTKYASKFQGKATITADTSSNTAYLQLSSLTSEDTAVYYCTSLRHYYGSSYVSPHYYWGQGTTLTVSS

SEQ ID NO: 12315 - protein, 112 aa, Artificial Sequence
  source: /note="Description of Artificial Sequence: Synthetic polypeptide"
  MOD_RES (26)..(26): Any amino acid
  MOD_RES (28)..(28): Any amino acid
  MOD_RES (33)..(34): Any amino acid
DIVMTQAAPSVPVTPGESVSISCRSXKXLLHRXXNTYLYWFLQRPGQSPQLLIYRMSNLASGVPDRFSGSGSGTAFTLRISRVEAEDVGVYYCMQHLEFPFTFGGGTKLEIK

SEQ ID NO: 12316 - protein, 123 aa, Artificial Sequence
  source: /note="Description of Artificial Sequence: Synthetic polypeptide"
  MOD_RES (55)..(56): Any amino acid
EVQLQQSGPELVKPGASVKISCKASGYTFTDYYMNWVKQSHGKSLEWIGDINPNXXDTSYNQKFKGKAPLTVDKSSSTAYMEVRSLTSEDSAVYFCARGGVLRYPYYYVMDYWGQGTSVTVSS

SEQ ID NO: 12317 - protein, 124 aa, Artificial Sequence
  source: /note="Description of Artificial Sequence: Synthetic polypeptide"
  MOD_RES (52)..(53): Any amino acid
  MOD_RES (55)..(56): Any amino acid
EVQLQQSGAELVRPGASVKLSCTASGFNIKDDYMHWVKQRPEQGLEWIGWIXXEXXHTKYASKFQGKATITADTSSNTAYLQLSSLTSEDTAVYYCTSLRHYYGSSYVSPHYYWGQGTTLTVSS

SEQ ID NO: 12318 - protein, 68 aa, Artificial Sequence
  source: /note="Description of Artificial Sequence: Synthetic polypeptide"
DVVMTQNPLSLPVSLGDQASISCRSSQSLIYNNGNTYLHWYRQKPGQSPKLLIYKVSNRFSGVPDRFS

SEQ ID NO: 12319 - protein, 114 aa, Artificial Sequence
  source: /note="Description of Artificial Sequence: Synthetic polypeptide"
EVQLVESGGGLVKPGGSLKLSCAASGFTFSDYGMLWVRQAPEKGLEWIAYISSGSSTIYYADRVKGRFTISRDNAKNTLFLQMTSLRSEDTAMYYCSTGTFAYWGQGTPVTVSS

SEQ ID NO: 12320 - protein, 112 aa, Artificial Sequence
  source: /note="Description of Artificial Sequence: Synthetic polypeptide"
DIVMTQAAPSVPVTPGESVSISCRSNKSLLHRNGNTYLYWFLQRPGQSPQLLIYRMSNLASGVPDRFSGSGSGTAFTLRISRVEAEDVGVYYCMQHLEFPFTFGGGTKLEIK

SEQ ID NO: 12321 - protein, 97 aa, Artificial Sequence
  source: /note="Description of Artificial Sequence: Synthetic polypeptide"
EIVLTQSPGTLSLSPGERATLSCRASSSVPYIHWYQQKPGQAPRLLIYATSALASGIPDRFSGSGSGTDFTLTISRLEPEDFAVYYCQQWLSNPPTF

SEQ ID NO: 12322 - protein, 111 aa, Artificial Sequence
  source: /note="Description of Artificial Sequence: Synthetic polypeptide"
EVQLVQSGAEVKKPGESLKISCKGSGRTFTSYNMHWVRQMPGKGLEWMGAIYPLTGDTSYNQKSKLQVTISADKSISTAYLQWSSLKASDTAMYYCARSTYVGGDWQFDVW

SEQ ID NO: 12323 - protein, 97 aa, Artificial Sequence
  source: /note="Description of Artificial Sequence: Synthetic polypeptide"
QIVLSQSPAILSASPGEKVTMTCRASSSVSYIHWFQQKPGSSPKPWIYATSNLASGVPVRFSGSGSGTSYSLTISRVEAEDAATYYCQQWTSNPPTF

SEQ ID NO: 12324 - protein, 111 aa, Artificial Sequence
  source: /note="Description of Artificial Sequence: Synthetic polypeptide"
QVQLQQPGAELVKAGASVKMSCKASGYTFTSYNMHWVKQTPGRGLEWIGAIYPGNGDTSYNQKFKGKATLTADKSSSTAYMQLSSLTSEDSAVYYCARSTYYGGDWYFNVW

SEQ ID NO: 12325 - protein, 241 aa, Artificial Sequence
  source: /note="Description of Artificial Sequence: Synthetic polypeptide"
EVQLVESGGGLVQPGGSLRLSCAASGFTFSSYAMSWVRQAPGKGLEWVSAISGSGGSTYYADSVKGRFTISRDNSKDTLYLQMSSLKTEDTAVYYCARGSLLQFWGQGTLVTASRGGGGSGGGGSGGGGSSELTQDPAVSVALGQTVRITCQGDSLRSYYASWYQQKPGQAPVLVIYGKNNRPSGIPDRFSGSSSGNTASLTITGAQAEDEADYYCNSRDSSGNHVVFGGGTKLTVLGAAA

SEQ ID NO: 12326 - protein, 446 aa, Artificial Sequence
  source: /note="Description of Artificial Sequence: Synthetic polypeptide"
EVQLVESGGGLVQPGGSLRLSCAASGFFITNNYWGWVRQAPGKGLEWVGYISYSGSTSYNPSLKSRFTISRDTSKNTFYLQMNSLRAEDTAVYYCARTGSSGYFDFWGQGTLVTVSSASTKGPSVFPLAPSSKSTSGGTAALGCLVKDYFPEPVTVSWNSGALTSGVHTFPAVLQSSGLYSLSSVVTVPSSSLGTQTYICNVNHKPSNTKVDKKVEPKSCDKTHTCPPCPAPELLGGPSVFLFPPKPKDTLMISRTPEVTCVVVDVSHEDPEVKFNWYVDGVEVHNAKTKPREEQYNSTYRVVSVLTVLHQDWLNGKEYKCKVSNKALPAPIEKTISKAKGQPREPQVYTLPPSREEMTKNQVSLTCLVKGFYPSDIAVEWESNGQPENNYKTTPPVLDSDGSFFLYSKLTVDKSRWQQGNVFSCSVMHEALHNHYTQKSLSLSPG

SEQ ID NO: 12327 - protein, 350 aa, Artificial Sequence
  source: /note="Description of Artificial Sequence: Synthetic polypeptide"
RTGSSGYFDFWGQGTLVTVSSASTKGPSVFPLAPSSKSTSGGTAALGCLVKDYFPEPVTVSWNSGALTSGVHTFPAVLQSSGLYSLSSVVTVPSSSLGTQTYICNVNHKPSNTKVDKKVEPKSCDKTHTCPPCPAPELLGGPSVFLFPPKPKDTLMISRTPEVTCVVVDVSHEDPEVKFNWYVDGVEVHNAKTKPREEQYNSTYRVVSVLTVLHQDWLNGKEYKCKVSNKALPAPIEKTISKAKGQPREPQVYTLPPSREEMTKNQVSLTCLVKGFYPSDIAVEWESNGQPENNYKTTPPVLDSDGSFFLYSKLTVDKSRWQQGNVFSCSVMHEALHNHYTQKSLSLSPG

SEQ ID NO: 12328 - protein, 494 aa, Artificial Sequence
  source: /note="Description of Artificial Sequence: Synthetic polypeptide"
MALPVTALLLPLALLLHAARPGSDIVLTQSPASLAVSLGQRATISCRASESVDNYGNTFMHWYQQKPGQPPKLLIYRASNLESGIPARFSGSGSRTDFTLTINPVEADDVATYYCQQSNEDPPTFGAGTKLELKGGGGSGGGGSSGGGSQIQLVQSGPELKKPGETVKISCKASGYIFTNYGMNWVKQAPGKSFKWMGWINTYTGESTYSADFKGRFAFSLETSASTAYLHINDLKNEDTATYFCARSGGYDPMDYWGQGTSVTVSSASSGTTTPAPRPPTPAPTIASQPLSLRPEACRPAAGGAVHTRGLDFACDIYIWAPLAGTCGVLLLSLVITLYCKRGRKKLLYIFKQPFMRPVQTTQEEDGCSCRFPEEEEGGCELRVKFSRSADAPAYKQGQNQLYNELNLGRREEYDVLDKRRGRDPEMGGKPRRKNPQEGLYNELQKDKMAEAYSEIGMKGERRRGKGHDGLYQGLSTATKDTYDALHMQALPPR

SEQ ID NO: 12329 - protein, 244 aa, Artificial Sequence
  source: /note="Description of Artificial Sequence: Synthetic polypeptide"
DIVLTQSPASLAVSLGQRATISCRASESVDNYGNTFMHWYQQKPGQPPKLLIYRASNLESGIPARFSGSGSRTDFTLTINPVEADDVATYYCQQSNEDPPTFGAGTKLELKGGGGSGGGGSSGGGSQIQLVQSGPELKKPGETVKISCKASGYIFTNYGMNWVKQAPGKSFKWMGWINTYTGESTYSADFKGRFAFSLETSASTAYLHINDLKNEDTATYFCARSGGYDPMDYWGQGTSVTVSS

SEQ ID NO: 12330 - protein, 121 aa, Artificial Sequence
  source: /note="Description of Artificial Sequence: Synthetic polypeptide"
QVQLQQPGAELVKPGASVKMSCKASGYTFTSYNMHWVKQTPGRGLEWIGAIYPGNGDTSYNQKFKGKATLTADKSSSTAYMQLSSLTSEDSAVYYCARSTYYGGDWYFNVWGQGTTVTVSS

SEQ ID NO: 12331 - protein, 102 aa, Artificial Sequence
  source: /note="Description of Artificial Sequence: Synthetic polypeptide"
QIVLSQSPAILSASPGEKVTMTCRASSSVSYIHWFQQKPGSSPKPWIYATSNLASGVPVRFSGSGSGTSYSLTISRVEAEDAATYYCQQWTSNPPTFGGGTK

SEQ ID NO: 12332 - protein, 510 aa, Artificial Sequence
  source: /note="Description of Artificial Sequence: Synthetic polypeptide"
QVQLVQSGAELVKPGASVKMSCKASGYTFTSYNMHWVKQTPGQGLEWIGAIYPGNGDTSYNQKFKGKATLTADKSSSTAYMQLSSLTSEDSAVYYCARAQLRPNYWYFDVWGAGTTVTVSSGGGGSGGGGSGGGGSGGGGSGGGGSDIVLSQSPAILSASPGEKVTMTCRASSSVSYMHWYQQKPGSSPKPWIYATSNLASGVPARFSGSGSGTSYSLTISRVEAEDAATYYCQQWISNPPTFGAGTKLELKGGGGSGGKEFTLDFSTAKTYVDSLNVIRSAIGTPLQTISSGGTSLLMIDSGSGDNLFAVDVRGIDPEEGRFNNLRLIVERNNLYVTGFVNRTNNVFYRFADFSHVTFPGTTAVTLSGDSSYTTLQRVAGISRTGMQINRHSLTTSYLDLMSHSGTSLTQSVARAMLRFVTVTAEALRFRQIQRGFRTTLDDLSGRSYVMTAEDVDLTLNWGRLSSVLPDYHGQDSVRVGRISFGSINAILGSVALILNCHHHASRVAR

SEQ ID NO: 12333 - protein, 512 aa, Artificial Sequence
  source: /note="Description of Artificial Sequence: Synthetic polypeptide"
QVQLQQPGAELVKPGASVKMSCKASGYTFTSYNMHWVKQTPGRGLEWIGAIYPGNGDTSYNQKFKGKATLTADKSSSTAYMQLSSLTSEDSAVYYCARSTYYGGDWYFNVWGAGTTVTVSAGSTSGSGKPGSGEGSTKGQIVLSQSPAILSASPGEKVTMTCRASSSVSYIHWFQQKPGSSPKPWIYATSNLASGVPVRFSGSGSGTSYSLTISRVEAEDAATYYCQQWTSNPPTFGGGTKLEIKEFPKPSTPPGSSGGAPKEFTLDFSTAKTYVDSLNVIRSAIGTPLQTISSGGTSLLMIDSGSGDNLFAVDVRGIDPEEGRFNNLRLIVERNNLYVTGFVNRTNNVFYRFADFSHVTFPGTTAVTLSGDSSYTTLQRVAGISRTGMQINRHSLTTSYLDLMSHSGTSLTQSVARAMLRFVTVTAEALRFRQIQRGFRTTLDDLSGRSYVMTAEDVDLTLNWGRLSSVLPDYHGQDSVRVGRISFGSINAILGSVALILNCHHHASRVAR

SEQ ID NO: 12334 - protein, 520 aa, Artificial Sequence
  source: /note="Description of Artificial Sequence: Synthetic polypeptide"
QVQLQQPGAELVKPGASVKMSCKTSGYTFTSYNVHWVKQTPGQGLEWIGAIYPGNGDTSFNWKFKGKATLTADKSSSTVYMQLSSLTSEDSAVYYCARSNYYGSSYVWFFDVWGAGTTVTVSSGSTSGSGKPGSGEGSQIVLSQSPTILSASPGEKVTMTCRASSSVSYMDWYQQKPGSSPKPWIYATSNLASGVPARFSGSGSGTSYSLTISRVEAEDAATYYCQQWISNPPTFGAGTKLELKEFPKTSTPPGSSGGAPGILGFVFTLKEFTLDFSTAKTYVDSLNVIRSAIGTPLQTISSGGTSLLMIDSGSGDNLFAVDVRGIDPEEGRFNNLRLIVERNNLYVTGFVNRTNNVFYRFADFSHVTFPGTTAVTLSGDSSYTTLQRVAGISRTGMQINRHSLTTSYLDLMSHSGTSLTQSVARAMLRFVTVTAEALRFRQIQRGFRTTLDDLSGRSYVMTAEDVDLTLNWGRLSSVLPDYHGQDSVRVGRISFGSINAILGSVALILNCHHHASRVAR

SEQ ID NO: 12335 - protein, 504 aa, Artificial Sequence
  source: /note="Description of Artificial Sequence: Synthetic polypeptide"
DIQLTQSPASLAVSLGQRATISCKASQSVDYDGDSYLNWYQQIPGQPPKLLIYDASNLVSGIPPRFSGSGSGTDFTLNIHPVEKVDAATYHCQQSTEDPWTFGGGTKLEIKGGGGSGGGGSGGGGSQVQLQQSGAELVRPGSSVKISCKASGYAFSSYWMNWVKQRPGQGLEWIGQIWPGDGDTNYNGKFKGKATLTADESSSTAYMQLSSLASEDSAVYFCARRETTTVGRYYYAMDYWGQGTTVTVSSGGGGSDIKLQQSGAELARPGASVKMSCKTSGYTFTRYTMHWVKQRPGQGLEWIGYINPSRGYTNYNQKFKDKATLTTDKSSSTAYMQLSSLTSEDSAVYYCARYYDDHYCLDYWGQGTTLTVSSVEGGSGGSGGSGGSGGVDDIQLTQSPAIMSASPGEKVTMTCRASSSVSYMNWYQQKSGTSPKRWIYDTSKVASGVPYRFSGSGSGTSYSLTISSMEAEDAATYYCQQWSSNPLTFGAGTKLELKHHHHHH

SEQ ID NO: 12336 - protein, 504 aa, Artificial Sequence
  source: /note="Description of Artificial Sequence: Synthetic polypeptide"
QVQLVESGGGLVKPGESLRLSCAASGFTFSDYYMYWVRQAPGKGLEWVAIISDGGYYTYYSDIIKGRFTISRDNAKNSLYLQMNSLKAEDTAVYYCARGFPLLRHGAMDYWGQGTLVTVSSGGGGSGGGGSGGGGSDIQMTQSPSSLSASVGDRVTITCKASQNVDTNVAWYQQKPGQAPKSLIYSASYRYSDVPSRFSGSASGTDFTLTISSVQSEDFATYYCQQYDSYPYTFGGGTKLEIKSGGGGSEVQLVESGGGLVQPGGSLKLSCAASGFTFNKYAMNWVRQAPGKGLEWVARIRSKYNNYATYYADSVKDRFTISRDDSKNTAYLQMNNLKTEDTAVYYCVRHGNFGNSYISYWAYWGQGTLVTVSSGGGGSGGGGSGGGGSQTVVTQEPSLTVSPGGTVTLTCGSSTGAVTSGNYPNWVQQKPGQAPRGLIGGTKFLAPGTPARFSGSLLGGKAALTLSGVQPEDEAEYYCVLWYSNRWVFGGGTKLTVLHHHHHH

SEQ ID NO: 12337 - protein, 296 aa, Artificial Sequence
  source: /note="Description of Artificial Sequence: Synthetic polypeptide"
MHRRRSRSCREDQKPVMDDQRDLISNNEQLPMLGRRPGAPESKCSRGALYTGFSILVTLLLAGQATTAYFLYQQQGRLDKLTVTSQNLQLENLRMKLPKPPKPVSKMRMATPLLMQALPMGALPQGPMQNATKYGNMTEDHVMHLLQNADPLKVYPPLKGSFPENLRHLKNTMETIDWKVFESWMHHWLLFEMSRHSLEQKPTDAPPKVLTKCQEEVSHIPAVHPGSFRPKCDENGNYLPLQCYGSIGYCWCVFPNGTEVPNTRSRGHHNCSESLELEDPSSGLGVTKQDLGPVPM

SEQ ID NO: 12338 - protein, 232 aa, Artificial Sequence
  source: /note="Description of Artificial Sequence: Synthetic polypeptide"
MHRRRSRSCREDQKPVMDDQRDLISNNEQLPMLGRRPGAPESKCSRGALYTGFSILVTLLLAGQATTAYFLYQQQGRLDKLTVTSQNLQLENLRMKLPKPPKPVSKMRMATPLLMQALPMGALPQGPMQNATKYGNMTEDHVMHLLQNADPLKVYPPLKGSFPENLRHLKNTMETIDWKVFESWMHHWLLFEMSRHSLEQKPTDAPPKESLELEDPSSGLGVTKQDLGPVPM

SEQ ID NO: 12339 - protein, 261 aa, Artificial Sequence
  source: /note="Description of Artificial Sequence: Synthetic polypeptide"
MPGAPESKCSRGALYTGFSILVTLLLAGQATTAYFLYQQQGRLDKLTVTSQNLQLENLRMKLPKPPKPVSKMRMATPLLMQALPMGALPQGPMQNATKYGNMTEDHVMHLLQNADPLKVYPPLKGSFPENLRHLKNTMETIDWKVFESWMHHWLLFEMSRHSLEQKPTDAPPKVLTKCQEEVSHIPAVHPGSFRPKCDENGNYLPLQCYGSIGYCWCVFPNGTEVPNTRSRGHHNCSESLELEDPSSGLGVTKQDLGPVPM

SEQ ID NO: 12340 - protein, 197 aa, Artificial Sequence
  source: /note="Description of Artificial Sequence: Synthetic polypeptide"
MPGAPESKCSRGALYTGFSILVTLLLAGQATTAYFLYQQQGRLDKLTVTSQNLQLENLRMKLPKPPKPVSKMRMATPLLMQALPMGALPQGPMQNATKYGNMTEDHVMHLLQNADPLKVYPPLKGSFPENLRHLKNTMETIDWKVFESWMHHWLLFEMSRHSLEQKPTDAPPKESLELEDPSSGLGVTKQDLGPVPM

SEQ ID NO: 12341 - protein, 230 aa, Artificial Sequence
  source: /note="Description of Artificial Sequence: Synthetic polypeptide"
HHHHHHQQQGRLDKLTVTSQNLQLENLRMKLPKPPKPVSKMRMATPLLMQALPMGALPQGPMQNATKYGNMTEDHVMHLLQNADPLKVYPPLKGSFPENLRHLKNTMETIDWKVFESWMHHWLLFEMSRHSLEQKPTDAPPKVLTKCQEEVSHIPAVHPGSFRPKCDENGNYLPLQCYGSIGYCWCVFPNGTEVPNTRSRGHHNCSESLELEDPSSGLGVTKQDLGPVPM

SEQ ID NO: 12342 - protein, 166 aa, Artificial Sequence
  source: /note="Description of Artificial Sequence: Synthetic polypeptide"
HHHHHHQQQGRLDKLTVTSQNLQLENLRMKLPKPPKPVSKMRMATPLLMQALPMGALPQGPMQNATKYGNMTEDHVMHLLQNADPLKVYPPLKGSFPENLRHLKNTMETIDWKVFESWMHHWLLFEMSRHSLEQKPTDAPPKESLELEDPSSGLGVTKQDLGPVPM

SEQ ID NO: 12343 - protein, 502 aa, Artificial Sequence
  source: /note="Description of Artificial Sequence: Synthetic polypeptide"
ELVMTQSPSSLTVTAGEKVTMSCKSSQSLLNSGNQKNYLTWYQQKPGQPPKLLIYWASTRESGVPDRFTGSGSGTDFTLTISSVQAEDLAVYYCQNDYSYPLTFGAGTKLEIKGGGGSGGGGSGGGGSEVQLLEQSGAELVRPGTSVKISCKASGYAFTNYWLGWVKQRPGHGLEWIGDIFPGSGNIHYNEKFKGKATLTADKSSSTAYMQLSSLTFEDSAVYFCARLRNWDEPMDYWGQGTTVTVSSGGGGSDVQLVQSGAEVKKPGASVKVSCKASGYTFTRYTMHWVRQAPGQGLEWIGYINPSRGYTNYADSVKGRFTITTDKSTSTAYMELSSLRSEDTATYYCARYYDDHYCLDYWGQGTTVTVSSGEGTSTGSGGSGGSGGADDIVLTQSPATLSLSPGERATLSCRASQSVSYMNWYQQKPGKAPKRWIYDTSKVASGVPARFSGSGSGTDYSLTINSLEAEDAATYYCQQWSSNPLTFGGGTKVEIKHHHHHH

SEQ ID NO: 12344 - protein, 141 aa, Artificial Sequence
  source: /note="Description of Artificial Sequence: Synthetic polypeptide"
MSYDYMEGGDIRVRRLFCRTQWYLRIDKRGKVKGTQEMKNNYNIMEIRTVAVGIVAIKGVESEFYLAMNKEGKLYAKKECNEDCNFKELILENHYNTYASAKWTHNGGEMFVALNQKGIPVRGKKTKKEQKTAHFLPMAIT

SEQ ID NO: 12345 - protein, 672 aa, Artificial Sequence
  source: /note="Description of Artificial Sequence: Synthetic polypeptide"
EVQLQQSGPDLVKPGASVKISCKASGYSFTGYYMHWVKQSPGKGLEWIGRINPNNGVTLYNQKFKDKATLTVDKSSTTAYMELRSLTSEDSAVYYCARSTMITNYVMDYWGQGTSVTVSSAKTTPPSVYPLAPGSAAQTNSMVTLGCLVKGYFPEPVTVTWNSGSLSSGVHTFPAVLQSDLYTLSSSVTVPSSTWPSETVTCNVAHPASSTKVDKKIVPRDSGGPSEKSEEINEKDLRKKSELQGTALGNLKQIYYYNSKAITSSEKSADQFLTNTLLFKGFFTGHPWYNDLLVDLGSTAATSEYEGSSVDLYGAYYGYQCAGGTPNKTACMYGGVTLHDNNRLTEEKKVPINLWIDGKQTTVPIDKVKTSKKEVTVQELDLQARHYLHGKFGLYNSDSFGGKVQRGLIVFHSSEGSTVSYDLFDAQGQYPDTLLRIYRDNTTISSTSLSISLYLYTTSIVMTQTPTSLLVSAGDRVTITCKASQSVSNDVAWYQQKPGQSPKLLISYTSSRYAGVPDRFSGSGYGTDFTLTISSVQAEDAAVYFCQQDYNSPPTFGGGTKLEIKRADAAPTVSIFPPSSEQLTSGGASVVCFLNNFYPKDINVKWKIDGSERQNGVLNSWTDQDSKDSTYSMSSTLTLTKDEYERHNSYTCEATHKTSTSPIVKSFNRNES

SEQ ID NO: 12346 - protein, 456 aa, Artificial Sequence
  source: /note="Description of Artificial Sequence: Synthetic polypeptide"
METGLRWLLLVAVLKGVHCQSLEESGGGLVKPGASLTLTCTASGFSFSNNDWMCWVRQAPGKGLEWIACIYGGSSIGTNYAGWAKGRFTISRTSSTTVALQMTSLTVADTATYFCTRDLANLWGPGTLVSVSSGQPKAPSVFPLAPCCGDTPSSTVTLGCLVKGYLPEPVTVTWNSGTLTNGVRTFPSVRQSSGLYSLSSVVSVTSSSQPVTCNVAHPATNTKVDKTVAPSTCSKPMCPPPELLGGPSVFIFPPKPKDTLMISRTPEVTCVVVDVSQDDPEVQFTWYINNEQVRTARPPLREQQFNSTIRVVSTLPIAHQDWLRGKEFKCKVHNKALPAPIEKTISKARGQPLEPKVYTMGPPREELSSRSVSLTCMINGFYPSDISVEWEKNGKAEDNYKTTPTVLDSDGSYFLYSKLSVPTSEWQRGDVFTCSVMHEALHNHYTQKSISRSPGK

SEQ ID NO: 12347 - protein, 238 aa, Artificial Sequence
  source: /note="Description of Artificial Sequence: Synthetic polypeptide"
MDMRAPTQLLGLLLLWLPGATFAQVLTQTPSSVSAAVGGTVTINCQSSQSVYSDWLSWYQQKGGQPPRQLIYEASKLASGVPSRFSGSGSGTQFTLTINDVQCDDAATYYCLASYDCTRADCLAFGGGTEVVVRGDPVAPTVLIFPPAADQVATGTVTIVCVANKYFPDVTVTWEVDGTTQTTGIENSKTPQNSADCTYNLSSTLTLTSTQYNSHKEYTCKVTQGTTSVVQSFNRGDC

SEQ ID NO: 12348 - protein, 451 aa, Artificial Sequence
  source: /note="Description of Artificial Sequence: Synthetic polypeptide"
METGLRWLLLVAVLKGVQCQSVEESGGRLVTPGTPLTLTCTVSGFSLNTYGVSWVRQAPGKGLEWIGYIFTDGQTYYASWAKGRFTISKTSSTTVDLKITSPTTEDTATYFCASVDIWGPGTPVTVSSGQPKAPSVFPLAPCCGDTPSSTVTLGCLVKGYLPEPVTVTWNSGTLTNGVRTFPSVRQSSGLYSLSSVVSVTSSSQPVTCNVAHPATNTKVDKTVAPSTCSKPTCPPPELLGGPSVFIFPPKPKDTLMISRTPEVTCVVVDVSQDDPEVQFTWYINNEQVRTARPPLREQQFNSTIRVVSTLPIAHQDWLRGKEFKCKVHNKALPAPIEKTISKARGQPLEPKVYTMGPPREELSSRSVSLTCMINGFYPSDISVEWEKNGKAEDNYKTTPAVLDSDGSYFLYSKLSVPTSEWQRGDVFTCSVMHEALHNHYTQKSISRSPGK

SEQ ID NO: 12349 - protein, 238 aa, Artificial Sequence
  source: /note="Description of Artificial Sequence: Synthetic polypeptide"
MDMRAPTQLLGLLLLWLPGATFAQVLTQTPSPVSAAVGSTVTIKCQSSPSVYSNYLSWYQQKSGQPPKQLIYDASHLASGVPSRFSGSGSGTQFTLTISGVQCDDAATYYCLGSYDCSSVDCHAFGGGTEVVVKGDPVAPTVLIFPPAADQVATGTVTIVCVANKYFPDVTVTWEVDGTTQTTGIENSKTPQNSADCTYNLSSTLTLTSTQYNSHKEYTCKVTQGTTSVVQSFNRGDC

SEQ ID NO: 12350 - protein, 126 aa, Artificial Sequence
  source: /note="Description of Artificial Sequence: Synthetic polypeptide"
EAQLVQSGAEGKKPGSSVKVSCKAPGGTFNSYAISWVRQAPGQGLEWMGGIIPIFGTAYYAQKFQGRVTITADESTSTAYMELSSLRSEDTAVYYCAREEGPYCSSTSCYAAFDIWGRGTLVTVSS

SEQ ID NO: 12351 - protein, 126 aa, Artificial Sequence
  source: /note="Description of Artificial Sequence: Synthetic polypeptide"
EVQLVQSGAEVKKPGSSVKVSCKASGGTFSSYAIGWVRQAPGQGLEWMGGIIPIFGIANYAQKFQGRVTITADESTSSAYMELSSLRSEDTAVYYCAREEGPYCSSTSCYAAFDIWGQGTLVTVSS

SEQ ID NO: 12352 - protein, 126 aa, Artificial Sequence
  source: /note="Description of Artificial Sequence: Synthetic polypeptide"
EVQLVQSGAEVKKPGSSVKVSCKASGGTFSSYAISWVRQAPGQGLEWVGGIIPIFGTANYAQKFQGRVKITADESASTAYMELSSLRSEDTAVYYCAREEGPYCSSTSCYAAFDIWGQGTLVTVSS

SEQ ID NO: 12353 - protein, 112 aa, Homo sapiens
  MOD_RES (35)..(36): Any amino acid
  MOD_RES (39)..(39): Any amino acid
  MOD_RES (99)..(99): Any amino acid
DIVMTQSPLSLPVTPGEPASISCRSSQSLLHSDGXXYLXWYLQKPGQSPQLLIYLVSNRASGVPDRFSGSGSGTDFTLKISRVEAEDVGVYYCMQALQXPRTFGQGTKVEIK

SEQ ID NO: 12354 - protein, 330 aa, Homo sapiens
ASTKGPSVFPLAPSSKSTSGGTAALGCLVKDYFPEPVTVSWNSGALTSGVHTFPAVLQSSGLYSLSSVVTVPSSSLGTQTYICNVNHKPSNTKVDKKVEPKSCDKTHTCPPCPAPELLGGPSVFLFPPKPKDTLMISRTPEVTCVVVDVSHEDPEVKFNWYVDGVEVHNAKTKPREEQYNSTYRVVSVLTVLHQDWLNGKEYKCKVSNKALPAPIEKTISKAKGQPREPQVYTLPPSRDEMTKNQVSLTCLVKGFYPSDIAVEWESNGQPENNYKTTPPVLDSDGSFFLYSKLTVDKSRWQQGNVFSCSVMHEALHNHYTQKSLSLSPGK

SEQ ID NO: 12355 - protein, 326 aa, Homo sapiens; identical to SEQ ID NO: 3888

SEQ ID NO: 12356 - protein, 377 aa, Homo sapiens; identical to SEQ ID NO: 7170

SEQ ID NO: 12357 - protein, 120 aa, Artificial Sequence
  source: /note="Description of Artificial Sequence: Synthetic polypeptide"
QVQLVQSGAEVKKPGSSVKVSCKASGFTFTDYAISWVRQAPGQGLEWMGGINPNSGYSTYAQKFQGRVTITADKSTSTAYMELSSLRSEDTAVYYCARLSPGGYYVMDAWGQGTTVTVSS

SEQ ID NO: 12358 - protein, 260 aa, Artificial Sequence
  source: /note="Description of Artificial Sequence: Synthetic polypeptide"
QVQLVQSGGGLVQPGGSLRLSCAASGFTFSSYAMSWVRQAPGKGLEWVSAISGSGGSTYYADSVKGRFTISRDNSKNTLYLQMNSLRAEDTAVYYCAKSSSSWYRSYYFDYWGQGTLVTVSSGGGGGSQSALTQDPAVSVALGQTVRITCRGDSLRNYYASWYQQKPGQAPVLVIYGKNNRPSGIPDRFSGSFSGNTASLTITGAQAEDEADYYCNSRDSSANQMFGGGTKVTVLGAAAEQKLISEEDLNGAAHHHHHHC

SEQ ID NO: 12359 - protein, 259 aa, Artificial Sequence
  source: /note="Description of Artificial Sequence: Synthetic polypeptide"
QVQLQESGGGLVQPGGSLRLSCAASGFTFSSYAMSWVRQAPGKGLEWVSAISGSGGSTYYADSVKGRFTISRDNSKNTLYLQMNSLRAEDTAVYYCASQHVGEQSRYFDYWGQGTLVTVSSGGGGGSDIVMTQSPSSLSASIGDRVTITCRASHSISSYVNWYQKKPGKAPNLLIYAASYLPRGVPSRFSGSGLGTDFTLTISNLQPEDFATYYCQESYSTPYSFGQGTKVDIKRAAAEQKLISEEDLNGAAHHHHHHC

SEQ ID NO: 12360 - protein, 255 aa, Artificial Sequence
  source: /note="Description of Artificial Sequence: Synthetic polypeptide"
QVQLQESGGGVVQPGRSLRLSCAASGFTFSSYGMHWVRQAPGKGLEWVSAIGSSGGSTHDADTVKGRFTISRDNAKNSLYLQMNSLRAEDTAVYYCARDRARGFDYWGQGTLVTVSSGGGGGSEIVLTQSPSTLSASIGDRVTITCRASQGISSYLAWYQQKPGKAPKLLIYGASSLQSGVPSRFSGRGSGADFTLTISSLQPEDFATYYCQQLISYPLTFGGGTKVEIKRAAAEQKLISEEDLNGAAHHHHHHC

SEQ ID NO: 12361 - protein, 255 aa, Artificial Sequence
  source: /note="Description of Artificial Sequence: Synthetic polypeptide"
QVQLVQSGAEVKKPGASVKVSCKASGYTFTDYYMHWVRQAPGEGLEWMGWMNPNSGGTNYAQKFQGRVTMTRDTSISTAYMELSRLRSDDTAVYYCARSHYWDSWSPGTLVTVSSGGGGGSSALTQPASVSGSPGQSITISCTGTSGDVGGYNYVSWYQQHPGKAPKLMIYDVSNRPSGVSNRFSGSKSGNTASLTISGLQAEDEADYYCTSYAGSRNLVFGGGTKLTVLGAAAEQKLISEEDLNGAAHHHHHHC

SEQ ID NO: 12362 - protein, 257 aa, Artificial Sequence
  source: /note="Description of Artificial Sequence: Synthetic polypeptide"
QVQLQESGGGLLQPGGSLRLSCAASRFTFSNYAMSWVRQAPGKGLEWVSAISGSGASTYYADSVKGRFTISRDNSKNTLYLQMNSLRAEDTAVYYCSNLYGDYDYWGQGTLVTVSSGGGGGSQSVLTQPASVSGSPGQSITISCTGTSSDVGGYNYVSWYQQHPGKAPKLMIYDVSNRPSGVSNRFSGSKSGNTASLTISGLQAEDEADYYCSSYTSSSTLLFGGGTKLTVLGAAAEQKLISEEDLNGAAHHHHHHC

SEQ ID NO: 12363 - protein, 269 aa, Artificial Sequence
  source: /note="Description of Artificial Sequence: Synthetic polypeptide"
QVQLQESGGGVVQPGGSLRLSCAASGFTFSSYSMNWVRQAPGKGLEWVSSISSSSSYIYYADSVKGRFTISRDNAKNSLYLQMNSLRAEDTAVYYCARDLPSDDYGDYDYYYYGMDVWGQGTTVTVSSGGGGGSQSVLTQPPSASGTPGQRVTLFCSGSSSNIASNSVKWYQQPPQRAPKLLMFSDDQRPSGVPVRFSASKSGTSASLAISGLQSEDEADYYCAAWDDSLNAEVFGGGTKVTVLGAAAEQKLISEEDLNGAAHHHHHHC

SEQ ID NO: 12364 - protein, 258 aa, Artificial Sequence
  source: /note="Description of Artificial Sequence: Synthetic polypeptide"
EVQLVESGGGLVQPGGSLRLSCAASGFTFSTYAMSWVRQAPGKGLEWVSAISGSGGSTYYADSVKGRFTISRDNSKNTLYLQMNSLRAEDTAVYYCAREGGKWYYGMDVWGRGTLVTVSSGGGGGSSSELTQDPAVSVALGQTVRITCQGDSLRSYYTNWFQQKPGQAPLLVVYAKNKRPSGIPDRFSGSGSGDTASLTITGAQAEDEADYYCNSRDSSGNYLFAAGTKLTVLGAAAEQKLISEEDLNGAAHHHHHHC

SEQ ID NO: 12365 - protein, 259 aa, Artificial Sequence
  source: /note="Description of Artificial Sequence: Synthetic polypeptide"
QVQLQESGGGLVQPGGSLRLSCAASGFTFSNYAMSWVRQAPGKGLEWVSAISGSGGSTYYADSVKGRFTISRDNSKNTLYLQMNSLRAEDTAVYYCAKDRFRAAAYWGQGTLVTVSSGGGGGSQSVLTQPPSVSAAPGQKVTISCTGSSSNIGAGYDVHWYQQLPGTAPKLLIYGNSNRPSGVPDRFSGSKSGTSASLAISGLQSEDEADYYCAAWDDILNGEIFGGGTKVTVLGAAAEQKLISEEDLNGAAHHHHHHC

SEQ ID NO: 12366 - protein, 118 aa, Homo sapiens
GVQLLESGGGLVQPGGSLRLSCAASGFTFAWYDMGWVRQAPGKGLEWVSSIDWHGEVTYYADSVKGRFTISRDNSKNTLYLQMNSLRAEDTAVYYCATAEDEPGYDYWGQGTLVTVSS

SEQ ID NO: 12367 - protein, 118 aa, Homo sapiens
GVQLLESGGGLVQPGGSLRLSCAASGFVFPWYDMGWVRQAPGKGLEWVSSIDWHGKITYYADSVKGRFTISRDNSKNTLYLQMNSLRAEDTAVYYCATAEDEPGYDYWGQGTLVTVSS

SEQ ID NO: 12368 - protein, 108 aa, Homo sapiens
DIQMTQSPSSLSASVGDRVTITCRASRPISDWLHWYQQKPGKAPKLLIAWASTLDSGVPSRFSGSGSGTDFTLTISSLQPEDFATYYCLQEGWGPPTFGQGTKVEIKR

SEQ ID NO: 12369 - protein, 108 aa, Homo sapiens
DIQMTQSPSSLSASVGDRVTITCRASRPISDWLHWYQQKPGKAPKLLIAWASSLYEGVPSRFSGSGSGTDFTLTISSLQPEDFATYYCLQEGWGPPTFGQGTKVEIKR

SEQ ID NO: 12370 - protein, 108 aa, Homo sapiens
DIQMTQSPSSLSASVGDRVTITCRASRPISDWLHWYQQKPGKAPKLLIAWASSLQGGVPSRFSGSGSGTDFTLTISSLQPEDFATYYCLQEGWGPPTFGQGTKVEIKR

SEQ ID NO: 12371 - protein, 116 aa, Homo sapiens
EVQLLESGGGLVQPGGSLRLSCAASGFTFRNFGMGWVRQAPGKGLEWVSWIISSGTETYYADSVKGRFTISRDNSKNTLYLQMNSLRAEDTAVYYCAKSLGRFDYWGQGTLVTVSS

SEQ ID NO: 12372 - protein, 108 aa, Homo sapiens
DIQMTQSPSSLSASVGDRVTITCRASRPISDWLHWYQQKPGKAPKLLIAWASSLQGGVPSRFSGSGSGTDFTLTISSLQPEDFATYYCQQEGWGPPTFGQGTKVEIKR

SEQ ID NO: 12373 - protein, 116 aa, Artificial Sequence
  source: /note="Description of Artificial Sequence: Synthetic polypeptide"
QVHLQQSGAELAKPGASVKMSCKASGYTFTSYRMHWVKQRPGQGLEWIGYINPSTGYTEYNQKFKDKATLTADKSSSTAYMQLSSLTFEDSAVYYCARGGGVFDYWGQGTTLTVSS

SEQ ID NO: 12374 - protein, 227 aa, Artificial Sequence
  source: /note="Description of Artificial Sequence: Synthetic polypeptide"
DKTHTCPPCPAPELLGGPSVFLFPPKPKDTLMISRTPEVTCVVVDVSHEDPEVKFNWYVDGVEVHNAKTKPREEQYNSTYRVVSVLTVLHQDWLNGKEYKCKVSNKALPAPIEKTISKAKGQPREPQVYTLPPSREEMTKNQVSLWCLVKGFYPSDIAVEWESNGQPENNYKTTPPVLDSDGSFFLYSKLTVDKSRWQQGNVFSCSVMHEALHNHYTQKSLSLSPGK

SEQ ID NO: 12375 - protein, 231 aa, Homo sapiens; identical to SEQ ID NO: 6427

SEQ ID NO: 12376 - protein, 227 aa, Homo sapiens
DKTHTCPPCPAPELLGGPSVFLFPPKPKDTLMISRTPEVTCVVVDVSHEDPEVKFNWYVDGVEVHNAKTKPREEQYNSTYRVVSVLTVLHQDWLNGKEYKCKVSNKALPAPIEKTISKAKGQPREPQVYTLPPSRDELTKNQVSLTCLVKGFYPSDIAVEWESNGQPENNYKTTPPVLDSDGSFFLYSKLTVDKSRWQQGNVFSCSVMHEALHNHYTQKSLSLSPGK

SEQ ID NO: 12377 - protein, 230 aa, Artificial Sequence
  source: /note="Description of Artificial Sequence: Synthetic polypeptide"
DKTHTCPPCPAPELLGGPSVFLFPPKPKDTLMISRTPEVTCVVVDVSHEDPEVKFNWYVDGVEVHNAKTKPREEQYNSTYRVVSVLTVLHQDWLNGKEYKCKVSNKALPAPIEKTISKAKSGNTFRPEVHLLPPPSEELALNELVTLTCLARGFSPKDVLVRWLQGSQELPREKYLTWASRQEPSQGTTTFAVTSILRVAAEDWKKGDTFSCMVGHEALPLAFTQKTIDR

SEQ ID NO: 12378 - protein, 228 aa, Artificial Sequence
  source: /note="Description of Artificial Sequence: Synthetic polypeptide"
KTHTCPPCPAPELLGGPSVFLFPPALEDLLLGSEANVTCVVVDVSHEDPEVKFNWYVDGVEVHNAKTKPREEQYNSTYRVVSVLTVLHQDWLNGKEYKCKVSNKALPAPIEKTISKAKSGNTFRPEVHLLPPPSEELALNELVTLTCLARGFSPKDVLVRWLQGSQELPREKYLTWASRQEPSQGTTTFAVTSILRVAAEDWKKGDTFSCMVGHEALPLAFTQKTIDR

SEQ ID NO: 12379 - protein, 230 aa, Artificial Sequence
  source: /note="Description of Artificial Sequence: Synthetic polypeptide"
DKTHTCPPCPAPELLGGPSVFLFPPALEDLLLGSEANGVTCVVVDVSHEDPEVKFNWYVDGVEVHNAKTKPREEQYNSTYRVVSVLTVLHQDWLNGKEYKCKVSNKALPAPIEKTISKAKSGNTFRPEVHLLPPPSEELALNELVTLTCLARGFSPKDVLVRWLQGSQELPREKYLTWASRQEPSQGTTTFAVTSILRVAAEDWKKGDTFSCMVGHEALPLAFTQKTIDR

SEQ ID NO: 12380 - protein, 218 aa, Homo sapiens
PAPELLGGPSVFLFPPKPKDTLMISRTPEVTCVVVDVSHEDPEVKFNWYVDGVEVHNAKTKPREEQYNSTYRVVSVLTVLHQDWLNGKEYKCKVSNKALPAPIEKTISKAKGQPREPQVYTLPPSRDELTKNQVSLTCLVKGFYPSDIAVEWESNGQPENNYKTTPPVLDSDGSFFLYSKLTVDKSRWQQGNVFSCSVMHEALHNHYTQKSLSLSPGK

SEQ ID NO: 12381 - protein, 221 aa, Artificial Sequence
  source: /note="Description of Artificial Sequence: Synthetic polypeptide"
PAPELLGGPSVFLFPPKPKDTLMISRTPEVTCVVVDVSHEDPEVKFNWYVDGVEVHNAKTKPREEQYNSTYRVVSVLTVLHQDWLNGKEYKCKVSNKALPAPIEKTISKAKSGNTFRPEVHLLPPPSEELALNELVTLTCLARGFSPKDVLVRWLQGSQELPREKYLTWASRQEPSQGTTTFAVTSILRVAAEDWKKGDTFSCMVGHEALPLAFTQKTIDR

SEQ ID NO: 12382 - protein, 220 aa, Artificial Sequence
  source: /note="Description of Artificial Sequence: Synthetic polypeptide"
PAPELLGGPSVFLFPPALEDLLLGSEANVTCVVVDVSHEDPEVKFNWYVDGVEVHNAKTKPREEQYNSTYRVVSVLTVLHQDWLNGKEYKCKVSNKALPAPIEKTISKAKSGNTFRPEVHLLPPPSEELALNELVTLTCLARGFSPKDVLVRWLQGSQELPREKYLTWASRQEPSQGTTTFAVTSILRVAAEDWKKGDTFSCMVGHEALPLAFTQKTIDR

SEQ ID NO: 12383 - protein, 221 aa, Artificial Sequence
  source: /note="Description of Artificial Sequence: Synthetic polypeptide"
PAPELLGGPSVFLFPPALEDLLLGSEANGVTCVVVDVSHEDPEVKFNWYVDGVEVHNAKTKPREEQYNSTYRVVSVLTVLHQDWLNGKEYKCKVSNKALPAPIEKTISKAKSGNTFRPEVHLLPPPSEELALNELVTLTCLARGFSPKDVLVRWLQGSQELPREKYLTWASRQEPSQGTTTFAVTSILRVAAEDWKKGDTFSCMVGHEALPLAFTQKTIDR

SEQ ID NO: 12384 - protein, 353 aa, Artificial Sequence
  source: /note="Description of Artificial Sequence: Synthetic polypeptide"
ASPTSPKVFPLSLCSTQPDGNVVIACLVQGFFPQEPLSVTWSESGQGVTARNFPPSQDASGDLYTTSSQLTLPATQCLAGKSVTCHVKHYTNPSQDVTVPCPVPSTPPTPSPSTPPTPSPSCCHPRLSLHRPALEDLLLGSEANLTCTLTGLRDASGVTFTWTPSSGKSAVQGPPERDLCGCYSVSSVLPGCAEPWNHGKTFTCTAAYPESKTPLTATLSKSGNTFRPEVHLLPPPSEELALNELVTLTCLARGFSPKDVLVRWLQGSQELPREKYLTWASRQEPSQGTTTFAVTSILRVAAEDWKKGDTFSCMVGHEALPLAFTQKTIDRLAGKPTHVNVSVVMAEVDGTCY

SEQ ID NO: 12385 - protein, 340 aa, Homo sapiens
ASPTSPKVFPLSLDSTPQDGNVVVACLVQGFFPQEPLSVTWSESGQNVTARNFPPSQDASGDLYTTSSQLTLPATQCPDGKSVTCHVKHYTNPSQDVTVPCPVPPPPPCCHPRLSLHRPALEDLLLGSEANLTCTLTGLRDASGATFTWTPSSGKSAVQGPPERDLCGCYSVSSVLPGCAQPWNHGETFTCTAAHPELKTPLTANITKSGNTFRPEVHLLPPPSEELALNELVTLTCLARGFSPKDVLVRWLQGSQELPREKYLTWASRQEPSQGTTTFAVTSILRVAAEDWKKGDTFSCMVGHEALPLAFTQKTIDRMAGKPTHVNVSVVMAEVDGTCY

SEQ ID NO: 12386 - protein, 344 aa, Mus musculus
ESARNPTIYPLTLPPALSSDPVIIGCLIHDYFPSGTMNVTWGKSGKDITTVNFPPALASGGRYTMSNQLTLPAVECPEGESVKCSVQHDSNPVQELDVNCSGPTPPPPITIPSCQPSLSLQRPALEDLLLGSDASITCTLNGLRNPEGAVFTWEPSTGKDAVQKKAVQNSCGCYSVSSVLPGCAERWNSGASFKCTVTHPESGTLTGTIAKVTVNTFPPQVHLLPPPSEELALNELLSLTCLVRAFNPKEVLVRWLHGNEELSPESYLVFEPLKEPGEGATTYLVTSVLRVSAETWKQGDQYSCMVGHEALPMNFTQKTIDRLSGKPTNVSVSVIMSEGDGICY

SEQ ID NO: 12387 - protein, 299 aa, Oryctolagus cuniculus
QSGTSGPYTACSELILPVTQCLGQKSAACHVEYNSVINESLPVPFPDCCPANSCCTCPSSSSRNLISGCQPSLSLQRPDLGDLLLGRDASLTCTLSGLKNPEDAVFTWEPTNGNEPVQQRAQRDLSGCYSVSSVLPSSAETWKARTEFTCTVTHPEIDSGSLTATISRGVVTPPQVHLLPPPSEELALNEQVTLTCLVRGFSPKDVLVSWRHQGQEVPEDSFLVWKSMPESSQDKATYAITSLLRVPAEDWNQGDTYSCMVGHEGLAEHFTQKTIDRLAGKPTHVNVSVVVADVEAVCY

SEQ ID NO: 12388 - protein, 353 aa, Gorilla gorilla
ASPTSPKVFPLSLCSTQPDGDVVVACLVQGFFPQEPLSVTWSESGQGVTARNFPPSQDASGDLYTTSSQLTLPATQCPDGKSVTCHVNHYTNPSQDVTVPCRVPSTPPTPSPSTPPTPSPPCCHPRLSLHRPALEDLLLGSEANLTCTLTGLRDASGVTFTWTPSSGKSAVEGPPERDLCGCYSVSSVLPGCAEPWNHGKTFTCTAAYPESKTPLTATLSKSGNMFRPEVHLLPPPSEELALNELVTLTCLARGFSPKDVLVRWLQGSQELPREKYLTWASRQEPSQGTTTFAVTSILRVAAEDWKKGDTFSCMVGHEALPLAFTQKTIDRLAGKPTHVNVSVVMAEVDGTCY

SEQ ID NO: 12389 - protein, 337 aa, Sus scrofa
SETSPKIFPLTLGSSEPAGYVVIACLVRDFFPSEPLTVTWSPSREGVIVRNFPPAQAGGLYTMSSQLTLPVEQCPADQILKCQVQHLSKSSQSVNVPCKDPCPQCCKPSLSLQPPALADLLLGSNASLTCTLSGLKKSEGVSFTWQPSGGKDAVQASPTRDSCGCYSVSSILPGCADPWNKGETFSCTAAHSELKSALTATITKPKVNTFRPQVHLLPPPSEELALNELVTLTCLVRGFSPKDVLVRWLQGGQELPRDKYLVWESLPEPGQAIPTYAVTSVLRVDAEDWKQGDTFSCMVGHEALPLAFTQKTIDRLAGKPTHVNVSVVMAEAEGICY

SEQ ID NO: 12390 - protein, 222 aa, Artificial Sequence
  source: /note="Description of Artificial Sequence: Synthetic polypeptide"
CPPCPAPELLGGPSVFLFPPKPKDTLMISRTPEVTCVVVDVSHEDPEVKFNWYVDGVEVHNAKTKPREEQYNSTYRVVSVLTVLHQDWLNGKEYKCKVSNKALPAPIEKTISKAKGQPREPQVYTLPPSREEMTKNQVSLWCLVKGFYPSDIAVEWESNGQPENNYKTTPPVLDSDGSFFLYSKLTVDKSRWQQGNVFSCSVMHEALHNHYTQKSLSLSPGK

SEQ ID NO: 12391 - protein, 222 aa, Artificial Sequence
  source: /note="Description of Artificial Sequence: Synthetic polypeptide"
CPPCPAPELLGGPSVFLFPPKPKDTLMISRTPEVTCVVVDVSHEDPEVKFNWYVDGVEVHNAKTKPREEQYNSTYRVVSVLTVLHQDWLNGKEYKCKVSNKALPAPIEKTISKAKGQPREPQVYTLPPSREEMTKNQVSLSCAVKGFYPSDIAVEWESNGQPENNYKTTPPVLDSDGSFFLVSKLTVDKSRWQQGNVFSCSVMHEALHNHYTQKSLSLSPGK

SEQ ID NO: 12392 - protein, 363 aa, Artificial Sequence
  source: /note="Description of Artificial Sequence: Synthetic polypeptide"
MGSDIQMTQTTSSLSASLGDRVTISCRASQDISKYLNWYQQKPDGTVKLLIYHTSRLHSGVPSRFSGSGSGTDYSLTISNLEQEDIATYFCQQGNTLPYTFGGGTKLEITGSTSGSGKPGSGEGSTKGEVKLQESGPGLVAPSQSLSVTCTVSGVSLPDYGVSWIRQPPRKGLEWLGVIWGSETTYYNSALKSRLTIIKDNSKSQVFLKMNSLQTDDTAIYYCAKHYYYGGSYAMDYWGQGTSVTVSSASGGGGSGVQVETISPGDGRTFPKRGQTCVVHYTGMLEDGKKFDSSRDRNKPFKFMLGKQEVIRGWEEGVAQMSVGQRAKLTISPDYAYGATGHPGIIPPHATLVFDVELLKLEG

SEQ ID NO: 12393 - protein, 363 aa, Artificial Sequence
  source: /note="Description of Artificial Sequence: Synthetic polypeptide"
MGSDIQMTQTTSSLSASLGDRVTISCRASQDISKYLNWYQQKPDGTVKLLIYHTSRLHSGVPSRFSGSGSGTDYSLTISNLEQEDIATYFCQQGNTLPYTFGGGTKLEITGSTSGSGKPGSGEGSTKGEVKLQESGPGLVAPSQSLSVTCTVSGVSLPDYGVSWIRQPPRKGLEWLGVIWGSETTYYNSALKSRLTIIKDNSKSQVFLKMNSLQTDDTAIYYCAKHYYYGGSYAMDYWGQGTSVTVSSASGGGGSGVQVETISPGDGRTFPKRGQTCVVHYTGMLEDGKKVDSSRDRNKPFKFMLGKQEVIRGWEEGVAQMSVGQRAKLTISPDYAYGATGHPGIIPPHATLVFDVELLKLEG

SEQ ID NO: 12394 - protein, 349 aa, Artificial Sequence
  source: /note="Description of Artificial Sequence: Synthetic polypeptide"
MGSDIQMTQTTSSLSASLGDRVTISCRASQDISKYLNWYQQKPDGTVKLLIYHTSRLHSGVPSRFSGSGSGTDYSLTISNLEQEDIATYFCQQGNTLPYTFGGGTKLEITGSTSGSGKPGSGEGSTKGEVKLQESGPGLVAPSQSLSVTCTVSGVSLPDYGVSWIRQPPRKGLEWLGVIWGSETTYYNSALKSRLTIIKDNSKSQVFLKMNSLQTDDTAIYYCAKHYYYGGSYAMDYWGQGTSVTVSSASGGGGSILWHEMWHEGLEEASRLYFGERNVKGMFEVLEPLHAMMERGPQTLKETSFNQAYGRDLMEAQEWCRKYMKSGNVKDLLQAWDLYYHVFRRISKG

SEQ ID NO: 12395 - protein, 324 aa, Artificial Sequence
  source: /note="Description of Artificial Sequence: Synthetic polypeptide"
MGSILWHEMWHEGLEEASRLYFGERNVKGMFEVLEPLHAMMERGPQTLKETSFNQAYGRDLMEAQEWCRKYMKSGNVKDLLQAWDLYYHVFRRISKASAKPTTTPAPRPPTPAPTIASQPLSLRPEACRPAAGGAVHTRGLDFACDIYIWAPLAGTCGVLLLSLVITMHKRGRKKLLYIFKQPFMRPVQTTQEEDGCSCRFPEEEEGGCELRVKFSRSADAPAYQQGQNQLYNELNLGRREEYDVLDKRRGRDPEMGGKPRRKNPQEGLYNELQKDKMAEAYSEIGMKGERRRGKGHDGLYQGLSTATKDTYDALHMQALPPRG

SEQ ID NO: 12396 - protein, 338 aa, Artificial Sequence
  source: /note="Description of Artificial Sequence: Synthetic polypeptide"
MGSGVQVETISPGDGRTFPKRGQTCVVHYTGMLEDGKKVDSSRDRNKPFKFMLGKQEVIRGWEEGVAQMSVGQRAKLTISPDYAYGATGHPGIIPPHATLVFDVELLKLEASAKPTTTPAPRPPTPAPTIASQPLSLRPEACRPAAGGAVHTRGLDFACDIYIWAPLAGTCGVLLLSLVITMHKRGRKKLLYIFKQPFMRPVQTTQEEDGCSCRFPEEEEGGCELRVKFSRSADAPAYQQGQNQLYNELNLGRREEYDVLDKRRGRDPEMGGKPRRKNPQEGLYNELQKDKMAEAYSEIGMKGERRRGKGHDGLYQGLSTATKDTYDALHMQALPPRG

SEQ ID NO: 12397 - protein, 338 aa, Artificial Sequence
  source: /note="Description of Artificial Sequence: Synthetic polypeptide"
MGSGVQVETISPGDGRTFPKRGQTCVVHYTGMLEDGKKFDSSRDRNKPFKFMLGKQEVIRGWEEGVAQMSVGQRAKLTISPDYAYGATGHPGIIPPHATLVFDVELLKLEASAKPTTTPAPRPPTPAPTIASQPLSLRPEACRPAAGGAVHTRGLDFACDIYIWAPLAGTCGVLLLSLVITMHKRGRKKLLYIFKQPFMRPVQTTQEEDGCSCRFPEEEEGGCELRVKFSRSADAPAYQQGQNQLYNELNLGRREEYDVLDKRRGRDPEMGGKPRRKNPQEGLYNELQKDKMAEAYSEIGMKGERRRGKGHDGLYQGLSTATKDTYDALHMQALPPRG

SEQ ID NO: 12398 - protein, 570 aa, Artificial Sequence
  source: /note="Description of Artificial Sequence: Synthetic polypeptide"
MALPVTALLLPLALLLHAARPGSGGVQVETISPGDGRTFPKRGQTCVVHYTGMLEDGKKVDSSRDRNKPFKFMLGKQEVIRGWEEGVAQMSVGQRAKLTISPDYAYGATGHPGIIPPHATLVFDVEFLKLESGTSGTSGVQVETISPGDGRTFPKRGQTCVVHYTGMLEDGKKVDSSRDRNKPFKFMLGKQEVIRGWEEGVAQMSVGQRAKLTISPDYAYGATGHPGIIPPHATLVFDVELLKLEGSRSILWHEMWHEGLEEASRLYFGERNVKGMFEVLEPLHAMMERGPQTLKETSFNQAYGRDLMEAQEWCRKYMKSGNVKDLLQAWDLYYHVFRRISKASAKPTTTPAPRPPTPAPTIASQPLSLRPEACRPAAGGAVHTRGLDFACDIYIWAPLAGTCGVLLLSLVITMHKRGRKKLLYIFKQPFMRPVQTTQEEDGCSCRFPEEEEGGCELRVKFSRSADAPAYQQGQNQLYNELNLGRREEYDVLDKRRGRDPEMGGKPRRKNPQEGLYNELQKDKMAEAYSEIGMKGERRRGKGHDGLYQGLSTATKDTYDALHMQALPPRG

SEQ ID NO: 12399 - protein, 742 aa, Artificial Sequence
  source: /note="Description of Artificial Sequence: Synthetic polypeptide"
METDTLLLWVLLLWVPGSTGDYKDEGSDIQMTQTTSSLSASLGDRVTISCRASQDISKYLNWYQQKPDGTVKLLIYHTSRLHSGVPSRFSGSGSGTDYSLTISNLEQEDIATYFCQQGNTLPYTFGGGTKLEITGSTSGSGKPGSGEGSTKGEVKLQESGPGLVAPSQSLSVTCTVSGVSLPDYGVSWIRQPPRKGLEWLGVIWGSETTYYNSALKSRLTIIKDNSKSQVFLKMNSLQTDDTAIYYCAKHYYYGGSYAMDYWGQGTSVTVSSASGSGGVQVETISPGDGRTFPKRGQTCVVHYTGMLEDGKKFDSSRDRNKPFKFMLGKQEVIRGWEEGVAQMSVGQRAKLTISPDYAYGATGHPGIIPPHATLVFDVELLKLEGGRARYKRSVSGSGATNFSLLKQAGDVEENPGPSRSILWHEMWHEGLEEASRLYFGERNVKGMFEVLEPLHAMMERGPQTLKETSFNQAYGRDLMEAQEWCRKYMKSGNVKDLLQAWDLYYHVFRRISKASAKPTTTPAPRPPTPAPTIASQPLSLRPEACRPAAGGAVHTRGLDFACDIYIWAPLAGTCGVLLLSLVITMHKRGRKKLLYIFKQPFMRPVQTTQEEDGCSCRFPEEEEGGCELRVKFSRSADAPAYQQGQNQLYNELNLGRREEYDVLDKRRGRDPEMGGKPRRKNPQEGLYNELQKDKMAEAYSEIGMKGERRRGKGHDGLYQGLSTATKDTYDALHMQALPPRGS

SEQ ID NO: 12400 - protein, 741 aa, Artificial Sequence
  source: /note="Description of Artificial Sequence: Synthetic polypeptide"
METDTLLLWVLLLWVPGSTGDYKDEGSDIQMTQTTSSLSASLGDRVTISCRASQDISKYLNWYQQKPDGTVKLLIYHTSRLHSGVPSRFSGSGSGTDYSLTISNLEQEDIATYFCQQGNTLPYTFGGGTKLEITGSTSGSGKPGSGEGSTKGEVKLQESGPGLVAPSQSLSVTCTVSGVSLPDYGVSWIRQPPRKGLEWLGVIWGSETTYYNSALKSRLTIIKDNSKSQVFLKMNSLQTDDTAIYYCAKHYYYGGSYAMDYWGQGTSVTVSSASGSGGVQVETISPGDGRTFPKRGQTCVVHYTGMLEDGKKFDSSRDRNKPFKFMLGKQEVIRGWEEGVAQMSVGQRAKLTISPDYAYGATGHPGIIPPHATLVFDVELLKLEGGRARYKRSVSGSGATNFSLLKQAGDVEENPGPSRSILWHEMWHEGLEEASRLYFGERNVKGMFEVLEPLHAMMERGPQTLKETSFNQAYGRDLMEAQEWCRKYMKSGNVKDLTQAWDLYYHVFRRISKASAKPTTTPAPRPPTPAPTIASQPLSLRPEACRPAAGGAVHTRGLDFACDIYIWAPLAGTCGVLLLSLVITMHKRGRKKLLYIFKQPFMRPVQTTQEEDGCSCRFPEEEEGGCELRVKFSRSADAPAYQQGQNQLYNELNLGRREEYDVLDKRRGRDPEMGGKPRRKNPQEGLYNELQKDKMAEAYSEIGMKGERRRGKGHDGLYQGLSTATKDTYDALHMQALPPRG

SEQ ID NO: 12401 - protein, 967 aa, Artificial Sequence
  source: /note="Description of Artificial Sequence: Synthetic polypeptide"
METDTLLLWVLLLWVPGSTGDYKDEGSDIQMTQTTSSLSASLGDRVTISCRASQDISKYLNWYQQKPDGTVKLLIYHTSRLHSGVPSRFSGSGSGTDYSLTISNLEQEDIATYFCQQGNTLPYTFGGGTKLEITGSTSGSGKPGSGEGSTKGEVKLQESGPGLVAPSQSLSVTCTVSGVSLPDYGVSWIRQPPRKGLEWLGVIWGSETTYYNSALKSRLTIIKDNSKSQVFLKMNSLQTDDTAIYYCAKHYYYGGSYAMDYWGQGTSVTVSSASGSGGVQVETISPGDGRTFPKRGQTCVVHYTGMLEDGKKFDSSRDRNKPFKFMLGKQEVIRGWEEGVAQMSVGQRAKLTISPDYAYGATGHPGIIPPHATLVFDVELLKLEGGRARYKRSVSGSGATNFSLLKQAGDVEENPGPSRSGGVQVETISPGDGRTFPKRGQTCVVHYTGMLEDGKKVDSSRDRNKPFKFMLGKQEVIRGWEEGVAQMSVGQRAKLTISPDYAYGATGHPGIIPPHATLVFDVEFLKLESGTSGTSGVQVETISPGDGRTFPKRGQTCVVHYTGMLEDGKKVDSSRDRNKPFKFMLGKQEVIRGWEEGVAQMSVGQRAKLTISPDYAYGATGHPGIIPPHATLVFDVELLKLEGSRSILWHEMWHEGLEEASRLYFGERNVKGMFEVLEPLHAMMERGPQTLKETSFNQAYGRDLMEAQEWCRKYMKSGNVKDLLQAWDLYYHVFRRISKASAKPTTTPAPRPPTPAPTIASQPLSLRPEACRPAAGGAVHTRGLDFACDIYIWAPLAGTCGVLLLSLVITMHKRGRKKLLYIFKQPFMRPVQTTQEEDGCSCRFPEEEEGGCELRVKFSRSADAPAYQQGQNQLYNELNLGRREEYDVLDKRRGRDPEMGGKPRRKNPQEGLYNELQKDKMAEAYSEIGMKGERRRGKGHDGLYQGLSTATKDTYDALHMQALPPRG

SEQ ID NO: 12402 - protein, 406 aa, Artificial Sequence
  source: /note="Description of Artificial Sequence: Synthetic polypeptide"
MPLGLLWLGLALLGALHAQAGSDIQMTQTTSSLSASLGDRVTISCRASQDISKYLNWYQQKPDGTVKLLIYHTSRLHSGVPSRFSGSGSGTDYSLTISNLEQEDIATYFCQQGNTLPYTFGGGTKLEITGSTSGSGKPGSGEGSTKGEVKLQESGPGLVAPSQSLSVTCTVSGVSLPDYGVSWIRQPPRKGLEWLGVIWGSETTYYNSALKSRLTIIKDNSKSQVFLKMNSLQTDDTAIYYCAKHYYYGGSYAMDYWGQGTSVTVSSASGGGGSGVQVETISPGDGRTFPKRGQTCVVHYTGMLEDGKKFDSSRDRNKPFKFMLGKQEVIRGWEEGVAQMSVGQRAKLTISPDYAYGATGHPGIIPPHATLVFDVELLKLEGGRMALIVLGGVAGLLLFIGLGIFF

SEQ ID NO: 12403 - protein, 453 aa, Artificial Sequence
  source: /note="Description of Artificial Sequence: Synthetic polypeptide"
MPLGLLWLGLALLGALHAQAGSDIQMTQTTSSLSASLGDRVTISCRASQDISKYLNWYQQKPDGTVKLLIYHTSRLHSGVPSRFSGSGSGTDYSLTISNLEQEDIATYFCQQGNTLPYTFGGGTKLEITGSTSGSGKPGSGEGSTKGEVKLQESGPGLVAPSQSLSVTCTVSGVSLPDYGVSWIRQPPRKGLEWLGVIWGSETTYYNSALKSRLTIIKDNSKSQVFLKMNSLQTDDTAIYYCAKHYYYGGSYAMDYWGQGTSVTVSSASGGGGSGVQVETISPGDGRTFPKRGQTCVVHYTGMLEDGKKFDSSRDRNKPFKFMLGKQEVIRGWEEGVAQMSVGQRAKLTISPDYAYGATGHPGIIPPHATLVFDVELLKLEGGRAKPTTTPAPRPPTPAPTIASQPLSLRPEACRPAAGGAVHTRGLDFACDIYIWAPLAGTCGVLLLSLVIT

SEQ ID NO: 12404 - protein, 635 aa, Artificial Sequence
  source: /note="Description of Artificial Sequence: Synthetic polypeptide"
MPLGLLWLGLALLGALHAQAGSDIQMTQTTSSLSASLGDRVTISCRASQDISKYLNWYQQKPDGTVKLLIYHTSRLHSGVPSRFSGSGSGTDYSLTISNLEQEDIATYFCQQGNTLPYTFGGGTKLEITGSTSGSGKPGSGEGSTKGEVKLQESGPGLVAPSQSLSVTCTVSGVSLPDYGVSWIRQPPRKGLEWLGVIWGSETTYYNSALKSRLTIIKDNSKSQVFLKMNSLQTDDTAIYYCAKHYYYGGSYAMDYWGQGTSVTVSSASGGGGSGVQVETISPGDGRTFPKRGQTCVVHYTGMLEDGKKFDSSRDRNKPFKFMLGKQEVIRGWEEGVAQMSVGQRAKLTISPDYAYGATGHPGIIPPHATLVFDVELLKLEGGRESKYGPPCPPCPAPEFLGGPSVFLFPPKPKDTLMISRTPEVTCVVVDVSQEDPEVQFNWYVDGVEVHNAKTKPREEQFNSTYRVVSVLTVLHQDWLNGKEYKCKVSNKGLPSSIEKTISKAKGQPREPQVYTLPPSQEEMTKNQVSLTCLVKGFYPSDIAVEWESNGQPENNYKTTPPVLDSDGSFFLYSRLTVDKSRWQEGNVFSCSVMHEALHNHYTQKSLSLSLGKMALIVLGGVAGLLLFIGLGIFF

SEQ ID NO: 12405 - protein, 417 aa, Artificial Sequence
  source: /note="Description of Artificial Sequence: Synthetic polypeptide"
MPLGLLWLGLALLGALHAQAGSDIQMTQTTSSLSASLGDRVTISCRASQDISKYLNWYQQKPDGTVKLLIYHTSRLHSGVPSRFSGSGSGTDYSLTISNLEQEDIATYFCQQGNTLPYTFGGGTKLEITGSTSGSGKPGSGEGSTKGEVKLQESGPGLVAPSQSLSVTCTVSGVSLPDYGVSWIRQPPRKGLEWLGVIWGSETTYYNSALKSRLTIIKDNSKSQVFLKMNSLQTDDTAIYYCAKHYYYGGSYAMDYWGQGTSVTVSSASGGGGSGVQVETISPGDGRTFPKRGQTCVVHYTGMLEDGKKFDSSRDRNKPFKFMLGKQEVIRGWEEGVAQMSVGQRAKLTISPDYAYGATGHPGIIPPHATLVFDVELLKLEGGRTSQTSSPSASSNISGGIFLFFVANAIIHLFCFS

SEQ ID NO: 12406 - protein, 740 aa, Artificial Sequence
  source: /note="Description of Artificial Sequence: Synthetic polypeptide"
MALPVTALLLPLALLLHAARPGSILWHEMWHEGLEEASRLYFGERNVKGMFEVLEPLHAMMERGPQTLKETSFNQAYGRDLMEAQEWCRKYMKSGNVKDLLQAWDLYYHVFRRISKASAGTGSDIYIWAPLAGTCGVLLLSLVITMHKRGRKKLLYIFKQPFMRPVQTTQEEDGCSCRFPEEEEGGCELRVKFSRSADAPAYQQGQNQLYNELNLGRREEYDVLDKRRGRDPEMGGKPRRKNPQEGLYNELQKDKMAEAYSEIGMKGERRRGKGHDGLYQGLSTATKDTYDALHMQALPPRSGSGATNFSLLKQAGDVEENPGPSMETDTLLLWVLLLWVPGSTGSDIQMTQTTSSLSASLGDRVTISCRASQDISKYLNWYQQKPDGTVKLLIYHTSRLHSGVPSRFSGSGSGTDYSLTISNLEQEDIATYFCQQGNTLPYTFGGGTKLEITGSTSGSGKPGSGEGSTKGEVKLQESGPGLVAPSQSLSVTCTVSGVSLPDYGVSWIRQPPRKGLEWLGVIWGSETTYYNSALKSRLTIIKDNSKSQVFLKMNSLQTDDTAIYYCAKHYYYGGSYAMDYWGQGTSVTVSSASGGGGSGVQVETISPGDGRTFPKRGQTCVVHYTGMLEDGKKFDSSRDRNKPFKFMLGKQEVIRGWEEGVAQMSVGQRAKLTISPDYAYGATGHPGIIPPHATLVFDVELLKLEGGRMALIVLGGVAGLLLFIGLGIFFCVRCRHRRRQ

SEQ ID NO: 12407 - protein, 739 aa, Artificial Sequence
  source: /note="Description of Artificial Sequence: Synthetic polypeptide"
MALPVTALLLPLALLLHAARPGSILWHEMWHEGLEEASRLYFGERNVKGMFEVLEPLHAMMERGPQTLKETSFNQAYGRDLMEAQEWCRKYMKSGNVKDLLQAWDLYYHVFRRISKASAGTGSDIYIWAPLAGTCGVLLLSLVITMHKRGRKKLLYIFKQPFMRPVQTTQEEDGCSCRFPEEEEGGCELRVKFSRSADAPAYQQGQNQLYNELNLGRREEYDVLDKRRGRDPEMGGKPRRKNPQEGLYNELQKDKMAEAYSEIGMKGERRRGKGHDGLYQGLSTATKDTYDALHMQALPPRSGSGATNFSLLKQAGDVEENPGPSMETDTLLLWVLLLWVPGSTGDIQMTQTTSSLSASLGDRVTISCRASQDISKYLNWYQQKPDGTVKLLIYHTSRLHSGVPSRFSGSGSGTDYSLTISNLEQEDIATYFCQQGNTLPYTFGGGTKLEITGSTSGSGKPGSGEGSTKGEVKLQESGPGLVAPSQSLSVTCTVSGVSLPDYGVSWIRQPPRKGLEWLGVIWGSETTYYNSALKSRLTIIKDNSKSQVFLKMNSLQTDDTAIYYCAKHYYYGGSYAMDYWGQGTSVTVSSPRGGGGSGVQVETISPGDGRTFPKRGQTCVVHYTGMLEDGKKFDSSRDRNKPFKFMLGKQEVIRGWEEGVAQMSVGQRAKLTISPDYAYGATGHPGIIPPHATLVFDVELLKLEGGRMALIVLGGVAGLLLFIGLGIFFCVRCRHRRRQ

SEQ ID NO: 12408 - protein, 762 aa, Artificial Sequence
  source: /note="Description of Artificial Sequence: Synthetic polypeptide"
MRPTWAWWLFLVLLLALWAPARGGSILWHEMWHEGLEEASRLYFGERNVKGMFEVLEPLHAMMERGPQTLKETSFNQAYGRDLMEAQEWCRKYMKSGNVKDLLQAWDLYYHVFRRISKASAGTGSDIYIWAPLAGTCGVLLLSLVITMHKRGRKKLLYIFKQPFMRPVQTTQEEDGCSCRFPEEEEGGCELRVKFSRSADAPAYQQGQNQLYNELNLGRREEYDVLDKRRGRDPEMGGKPRRKNPQEGLYNELQKDKMAEAYSEIGMKGERRRGKGHDGLYQGLSTATKDTYDALHMQALPPRGGRSGSGATNFSLLKQAGDVEENPGPSLWWRLWWLLLLLLLLWPMVWAPRADYKDIVMTQSHKFMSTSVGDRVNITCKASQNVDSAVAWYQQKPGQSPKALIYSASYRYSGVPDRFTGRGSGTDFTLTISSVQAEDLAVYYCQQYYSTPWTFGGGTKLEIKRGGGGSGGGGSGGGGSGGGGSEVKLVESGGGLVQPGGSLSLSCAASGFTFTDYYMSWVRQPPGKALEWLALIRSKADGYTTEYSASVKGRFTLSRDDSQSILYLQMNALRPEDSATYYCARDAAYYSYYSPEGAMDYWGQGTSVTVSSSASGGGGSGVQVETISPGDGRTFPKRGQTCVVHYTGMLEDGKKFDSSRDRNKPFKFMLGKQEVIRGWEEGVAQMSVGQRAKLTISPDYAYGATGHPGIIPPHATLVFDVELLKLEGGRMALIVLGGVAGLLLFIGLGIFFCVRCRHRRRQ

SEQ ID NO: 12409 - protein, 736 aa, Artificial Sequence
  source: /note="Description of Artificial Sequence: Synthetic polypeptide"
MALPVTALLLPLALLLHAARPGSILWHEMWHEGLEEASRLYFGERNVKGMFEVLEPLHAMMERGPQTLKETSFNQAYGRDLMEAQEWCRKYMKSGNVKDLLQAWDLYYHVFRRISKASAGTGSDIYIWAPLAGTCGVLLLSLVITMHKRGRKKLLYIFKQPFMRPVQTTQEEDGCSCRFPEEEEGGCELRVKFSRSADAPAYQQGQNQLYNELNLGRREEYDVLDKRRGRDPEMGGKPRRKNPQEGLYNELQKDKMAEAYSEIGMKGERRRGKGHDGLYQGLSTATKDTYDALHMQALPPRSGSGATNFSLLKQAGDVEENPGPSMETDTLLLWVLLLWVPGSTGDIQMTQTTSSLSASLGDRVTISCRASQDISKYLNWYQQKPDGTVKLLIYHTSRLHSGVPSRFSGSGSGTDYSLTISNLEQEDIATYFCQQGNTLPYTFGGGTKLEITGSTSGSGKPGSGEGSTKGEVKLQESGPGLVAPSQSLSVTCTVSGVSLPDYGVSWIRQPPRKGLEWLGVIWGSETTYYNSALKSRLTIIKDNSKSQVFLKMNSLQTDDTAIYYCAKHYYYGGSYAMDYWGQGTSVTVSSPRGGGGSGVQVETISPGDGRTFPKRGQTCVVHYTGMLEDGKKFDSSRDRNKPFKFMLGKQEVIRGWEEGVAQMSVGQRAKLTISPDYAYGATGHPGIIPPHATLVFDVELLKLEGGRMKIFMYLLTVFLITQMIGSALFAVYLHRR

SEQ ID NO: 12410 - protein, 343 aa, Artificial Sequence
  source: /note="Description of Artificial Sequence: Synthetic polypeptide"
MALPVTALLLPLALLLHAARPGSILWHEMWHEGLEEASRLYFGERNVKGMFEVLEPLHAMMERGPQTLKETSFNQAYGRDLMEAQEWCRKYMKSGNVKDLLQAWDLYYHVFRRISKASAKPTTTPAPRPPTPAPTIASQPLSLRPEACRPAAGGAVHTRGLDFACDIYIWAPLAGTCGVLLLSLVITMHKRGRKKLLYIFKQPFMRPVQTTQEEDGCSCRFPEEEEGGCELRVKFSRSADAPAYQQGQNQLYNELNLGRREEYDVLDKRRGRDPEMGGKPRRKNPQEGLYNELQKDKMAEAYSEIGMKGERRRGKGHDGLYQGLSTATKDTYDALHMQALPPR

SEQ ID NO: 12411 - protein, 382 aa, Artificial Sequence
  source: /note="Description of Artificial Sequence: Synthetic polypeptide"
MPLGLLWLGLALLGALHAQAGSDIQMTQTTSSLSASLGDRVTISCRASQDISKYLNWYQQKPDGTVKLLIYHTSRLHSGVPSRFSGSGSGTDYSLTISNLEQEDIATYFCQQGNTLPYTFGGGTKLEITGSTSGSGKPGSGEGSTKGEVKLQESGPGLVAPSQSLSVTCTVSGVSLPDYGVSWIRQPPRKGLEWLGVIWGSETTYYNSALKSRLTIIKDNSKSQVFLKMNSLQTDDTAIYYCAKHYYYGGSYAMDYWGQGTSVTVSSASGGGGSGVQVETISPGDGRTFPKRGQTCVVHYTGMLEDGKKFDSSRDRNKPFKFMLGKQEVIRGWEEGVAQMSVGQRAKLTISPDYAYGATGHPGIIPPHATLVFDVELLKLEG

SEQ ID NO: 12412 - protein, 383 aa, Artificial Sequence
  source: /note="Description of Artificial Sequence: Synthetic polypeptide"
MPLGLLWLGLALLGALHAQAGSEVQLQQSGAELVKPGASVKMSCKASGYTFTSYNMHWVKQTPGQGLEWIGAIYPGNGDTSYNQKFKGKATLTADKSSSTAYMQLSSLTSEDSADYYCARSNYYGSSYWFFDVWGAGTTVTVSSGSTSGGGSGGGSGGGGSSDIVLTQSPAILSASPGEKVTMTCRASSSVNYMDWYQKKPGSSPKPWIYATSNLASGVPARFSGSGSGTSYSLTISRVEAEDAATYYCQQWSFNPPTFGGGTKLEIKASGGGGSGVQVETISPGDGRTFPKRGQTCVVHYTGMLEDGKKFDSSRDRNKPFKFMLGKQEVIRGWEEGVAQMSVGQRAKLTISPDYAYGATGHPGIIPPHATLVFDVELLKLEG

SEQ ID NO: 12413 - protein, 739 aa, Artificial Sequence
  source: /note="Description of Artificial Sequence: Synthetic polypeptide"
MALPVTALLLPLALLLHAARPGSILWHEMWHEGLEEASRLYFGERNVKGMFEVLEPLHAMMERGPQTLKETSFNQAYGRDLMEAQEWCRKYMKSGNVKDLTQAWDLYYHVFRRISKASAGTGSDIYIWAPLAGTCGVLLLSLVITMHKRGRKKLLYIFKQPFMRPVQTTQEEDGCSCRFPEEEEGGCELRVKFSRSADAPAYQQGQNQLYNELNLGRREEYDVLDKRRGRDPEMGGKPRRKNPQEGLYNELQKDKMAEAYSEIGMKGERRRGKGHDGLYQGLSTATKDTYDALHMQALPPRSGSGATNFSLLKQAGDVEENPGPSMETDTLLLWVLLLWVPGSTGDIQMTQTTSSLSASLGDRVTISCRASQDISKYLNWYQQKPDGTVKLLIYHTSRLHSGVPSRFSGSGSGTDYSLTISNLEQEDIATYFCQQGNTLPYTFGGGTKLEITGSTSGSGKPGSGEGSTKGEVKLQESGPGLVAPSQSLSVTCTVSGVSLPDYGVSWIRQPPRKGLEWLGVIWGSETTYYNSALKSRLTIIKDNSKSQVFLKMNSLQTDDTAIYYCAKHYYYGGSYAMDYWGQGTSVTVSSPRGGGGSGVQVETISPGDGRTFPKRGQTCVVHYTGMLEDGKKFDSSRDRNKPFKFMLGKQEVIRGWEEGVAQMSVGQRAKLTISPDYAYGATGHPGIIPPHATLVFDVELLKLEGGRMALIVLGGVAGLLLFIGLGIFFCVRCRHRRRQ

SEQ ID NO: 12414 - protein, 736 aa, Artificial Sequence
  source: /note="Description of Artificial Sequence: Synthetic polypeptide"
MALPVTALLLPLALLLHAARPGSILWHEMWHEGLEEASRLYFGERNVKGMFEVLEPLHAMMERGPQTLKETSFNQAYGRDLMEAQEWCRKYMKSGNVKDLTQAWDLYYHVFRRISKASAGTGSDIYIWAPLAGTCGVLLLSLVITMHKRGRKKLLYIFKQPFMRPVQTTQEEDGCSCRFPEEEEGGCELRVKFSRSADAPAYQQGQNQLYNELNLGRREEYDVLDKRRGRDPEMGGKPRRKNPQEGLYNELQKDKMAEAYSEIGMKGERRRGKGHDGLYQGLSTATKDTYDALHMQALPPRSGSGATNFSLLKQAGDVEENPGPSMETDTLLLWVLLLWVPGSTGDIQMTQTTSSLSASLGDRVTISCRASQDISKYLNWYQQKPDGTVKLLIYHTSRLHSGVPSRFSGSGSGTDYSLTISNLEQEDIATYFCQQGNTLPYTFGGGTKLEITGSTSGSGKPGSGEGSTKGEVKLQESGPGLVAPSQSLSVTCTVSGVSLPDYGVSWIRQPPRKGLEWLGVIWGSETTYYNSALKSRLTIIKDNSKSQVFLKMNSLQTDDTAIYYCAKHYYYGGSYAMDYWGQGTSVTVSSPRGGGGSGVQVETISPGDGRTFPKRGQTCVVHYTGMLEDGKKFDSSRDRNKPFKFMLGKQEVIRGWEEGVAQMSVGQRAKLTISPDYAYGATGHPGIIPPHATLVFDVELLKLEGGRMKIFMYLLTVFLITQMIGSALFAVYLHRR

SEQ ID NO: 12415 - protein, 778 aa, Artificial Sequence
  source: /note="Description of Artificial Sequence: Synthetic polypeptide"
MALPVTALLLPLALLLHAARPGSILWHEMWHEGLEEASRLYFGERNVKGMFEVLEPLHAMMERGPQTLKETSFNQAYGRDLMEAQEWCRKYMKSGNVKDLTQAWDLYYHVFRRISKASAKPTTTPAPRPPTPAPTIASQPLSLRPEACRPAAGGAVHTRGLDFACDIYIWAPLAGTCGVLLLSLVITMHKRGRKKLLYIFKQPFMRPVQTTQEEDGCSCRFPEEEEGGCELRVKFSRSADAPAYQQGQNQLYNELNLGRREEYDVLDKRRGRDPEMGGKPRRKNPQEGLYNELQKDKMAEAYSEIGMKGERRRGKGHDGLYQGLSTATKDTYDALHMQALPPRSGSGATNFSLLKQAGDVEENPGPSMETDTLLLWVLLLWVPGSTGDIQMTQTTSSLSASLGDRVTISCRASQDISKYLNWYQQKPDGTVKLLIYHTSRLHSGVPSRFSGSGSGTDYSLTISNLEQEDIATYFCQQGNTLPYTFGGGTKLEITGSTSGSGKPGSGEGSTKGEVKLQESGPGLVAPSQSLSVTCTVSGVSLPDYGVSWIRQPPRKGLEWLGVIWGSETTYYNSALKSRLTIIKDNSKSQVFLKMNSLQTDDTAIYYCAKHYYYGGSYAMDYWGQGTSVTVSSPRGGGGSGVQVETISPGDGRTFPKRGQTCVVHYTGMLEDGKKFDSSRDRNKPFKFMLGKQEVIRGWEEGVAQMSVGQRAKLTISPDYAYGATGHPGIIPPHATLVFDVELLKLEGGRMKIFMYLLTVFLITQMIGSALFAVYLHRR

SEQ ID NO: 12416 - protein, 740 aa, Artificial Sequence
  source: /note="Description of Artificial Sequence: Synthetic polypeptide"
MALPVTALLLPLALLLHAARPGSILWHEMWHEGLEEASRLYFGERNVKGMFEVLEPLHAMMERGPQTLKETSFNQAYGRDLMEAQEWCRKYMKSGNVKDLTQAWDLYYHVFRRISKASVWGSSAAGLAGGVAAAVLLALLVLLVAPPLLMHKRGRKKLLYIFKQPFMRPVQTTQEEDGCSCRFPEEEEGGCELRVKFSRSADAPAYQQGQNQLYNELNLGRREEYDVLDKRRGRDPEMGGKPRRKNPQEGLYNELQKDKMAEAYSEIGMKGERRRGKGHDGLYQGLSTATKDTYDALHMQALPPRSGSGATNFSLLKQAGDVEENPGPSMETDTLLLWVLLLWVPGSTGDIQMTQTTSSLSASLGDRVTISCRASQDISKYLNWYQQKPDGTVKLLIYHTSRLHSGVPSRFSGSGSGTDYSLTISNLEQEDIATYFCQQGNTLPYTFGGGTKLEITGSTSGSGKPGSGEGSTKGEVKLQESGPGLVAPSQSLSVTCTVSGVSLPDYGVSWIRQPPRKGLEWLGVIWGSETTYYNSALKSRLTIIKDNSKSQVFLKMNSLQTDDTAIYYCAKHYYYGGSYAMDYWGQGTSVTVSSPRGGGGSGVQVETISPGDGRTFPKRGQTCVVHYTGMLEDGKKFDSSRDRNKPFKFMLGKQEVIRGWEEGVAQMSVGQRAKLTISPDYAYGATGHPGIIPPHATLVFDVELLKLEGGRMKIFMYLLTVFLITQMIGSALFAVYLHRR

SEQ ID NO: 12417 - protein, 735 aa, Artificial Sequence
  source: /note="Description of Artificial Sequence: Synthetic polypeptide"
MALPVTALLLPLALLLHAARPGSILWHEMWHEGLEEASRLYFGERNVKGMFEVLEPLHAMMERGPQTLKETSFNQAYGRDLMEAQEWCRKYMKSGNVKDLLQAWDLYYHVFRRISKASAGTGSDIYIWAPLAGTCGVLLLSLVITMHKRGRKKLLYIFKQPFMRPVQTTQEEDGCSCRFPEEEEGGCELRVKFSRSADAPAYQQGQNQLYNELNLGRREEYDVLDKRRGRDPEMGGKPRRKNPQEGLYNELQKDKMAEAYSEIGMKGERRRGKGHDGLYQGLSTATKDTYDALHMQALPPRSGSGATNFSLLKQAGDVEENPGPSMETDTLLLWVLLLWVPGSTGDIQMTQTTSSLSASLGDRVTISCRASQDISKYLNWYQQKPDGTVKLLIYHTSRLHSGVPSRFSGSGSGTDYSLTISNLEQEDIATYFCQQGNTLPYTFGGGTKLEITGSTSGSGKPGSGEGSTKGEVKLQESGPGLVAPSQSLSVTCTVSGVSLPDYGVSWIRQPPRKGLEWLGVIWGSETTYYNSALKSRLTIIKDNSKSQVFLKMNSLQTDDTAIYYCAKHYYYGGSYAMDYWGQGTSVTVSSPRGGGGSGVQVETISPGDGRTFPKRGQTCVVHYTGMLEDGKKFDSSRDRNKPFKFMLGKQEVIRGWEEGVAQMSVGQRAKLTISPDYAYGATGHPGIIPPHATLVFDVELLKLEGGRRCSGSICYGTIAVIVFFLIGFMIGYLGY

SEQ ID NO: 12418 - protein, 714 aa, Artificial Sequence
  source: /note="Description of Artificial Sequence: Synthetic polypeptide"
MALPVTALLLPLALLLHAARPGSILWHEMWHEGLEEASRLYFGERNVKGMFEVLEPLHAMMERGPQTLKETSFNQAYGRDLMEAQEWCRKYMKSGNVKDLLQAWDLYYHVFRRISKASAGTGSDIYIWAPLAGTCGVLLLSLVITMHKRGRKKLLYIFKQPFMRPVQTTQEEDGCSCRFPEEEEGGCELRVKFSRSADAPAYQQGQNQLYNELNLGRREEYDVLDKRRGRDPEMGGKPRRKNPQEGLYNELQKDKMAEAYSEIGMKGERRRGKGHDGLYQGLSTATKDTYDALHMQALPPRSGSGATNFSLLKQAGDVEENPGPSRCSGSICYGTIAVIVFFLIGFMIGYLGYTGGVQVETISPGDGRTFPKRGQTCVVHYTGMLEDGKKFDSSRDRNKPFKFMLGKQEVIRGWEEGVAQMSVGQRAKLTISPDYAYGATGHPGIIPPHATLVFDVELLKLEGGGGSPRDIQMTQTTSSLSASLGDRVTISCRASQDISKYLNWYQQKPDGTVKLLIYHTSRLHSGVPSRFSGSGSGTDYSLTISNLEQEDIATYFCQQGNTLPYTFGGGTKLEITGSTSGSGKPGSGEGSTKGEVKLQESGPGLVAPSQSLSVTCTVSGVSLPDYGVSWIRQPPRKGLEWLGVIWGSETTYYNSALKSRLTIIKDNSKSQVFLKMNSLQTDDTAIYYCAKHYYYGGSYAMDYWGQGTSVTVSS

SEQ ID NO: 12419 - protein, 746 aa, Artificial Sequence
  source: /note="Description of Artificial Sequence: Synthetic polypeptide"
MALPVTALLLPLALLLHAARPGSILWHEMWHEGLEEASRLYFGERNVKGMFEVLEPLHAMMERGPQTLKETSFNQAYGRDLMEAQEWCRKYMKSGNVKDLTQAWDLYYHVFRRISKASAKPTTTPAPRPPTPAPTIASQPLSLRPEACRPAAGGAVHTRGLDFACDIYIWAPLAGTCGVLLLSLVITMHKRGRKKLLYIFKQPFMRPVQTTQEEDGCSCRFPEEEEGGCELRVKFSRSADAPAYQQGQNQLYNELNLGRREEYDVLDKRRGRDPEMGGKPRRKNPQEGLYNELQKDKMAEAYSEIGMKGERRRGKGHDGLYQGLSTATKDTYDALHMQALPPRSGSGATNFSLLKQAGDVEENPGPSMETDTLLLWVLLLWVPGSTGDIQMTQTTSSLSASLGDRVTISCRASQDISKYLNWYQQKPDGTVKLLIYHTSRLHSGVPSRFSGSGSGTDYSLTISNLEQEDIATYFCQQGNTLPYTFGGGTKLEITGSTSGSGKPGSGEGSTKGEVKLQESGPGLVAPSQSLSVTCTVSGVSLPDYGVSWIRQPPRKGLEWLGVIWGSETTYYNSALKSRLTIIKDNSKSQVFLKMNSLQTDDTAIYYCAKHYYYGGSYAMDYWGQGTSVTVSSPRGGGGSGVQVETISPGDGRTFPKRGQTCVVHYTGMLEDGKKFDSSRDRNKPFKFMLGKQEVIRGWEEGVAQMSVGQRAKLTISPDYAYGATGHPGIIPPHATLVFDVELLKLE

SEQ ID NO: 12420 - protein, 1095 aa, Artificial Sequence
  source: /note="Description of Artificial Sequence: Synthetic polypeptide"
QVQLQESGGGLVKPGGSLRLSCAASGFTFSSYWMSWVRQAPGKGLEWVANINRDGSASYYVDSVKGRFTISRDDAKNSLYLQMNSLRAEDTAVYYCARDRGVGYFDLWGRGTLVTVSSASTGGGGSGGGGSGGGGSQSALTQPASVSGSPGQSITISCTGTSSDVGGYNFVSWYQQHPGKAPKLMIYDVSDRPSGVSDRFSGSKSGNTASLIISGLQADDEADYYCSSYGSSSTHVIFGGGTKVTVLGAASDAHKSEVAHRFKDLGEENFKALVLIAFAQYLQQSPFEDHVKLVNEVTEFAKTCVADESAENCDKSLHTLFGDKLCTVATLRETYGEMADCCAKQEPERNECFLQHKDDNPNLPRLVRPEVDVMCTAFHDNEETFLKKYLYEIARRHPYFYAPELLFFAKRYKAAFTECCQAADKAACLLPKLDELRDEGKASSAKQRLKCASLQKFGERAFKAWAVARLSQRFPKAEFAEVSKLVTDLTKVHTECCHGDLLECADDRADLAKYICENQDSISSKLKECCEKPLLEKSHCIAEVENDEMPADLPSLAADFVESKDVCKNYAEAKDVFLGMFLYEYARRHPDYSVVLLLRLAKTYETTLEKCCAAADPHECYAKVFDEFKPLVEEPQNLIKQNCELFEQLGEYKFQNALLVRYTKKVPQVSTPTLVEVSRNLGKVGSKCCKHPEAKRMPCAEDYLSVVLNQLCVLHEKTPVSDRVTKCCTESLVNRRPCFSALEVDETYVPKEFQAETFTFHADICTLSEKERQIKKQTALVELVKHKPKATKEQLKAVMDDFAAFVEKCCKADDKETCFAEEGKKLVAASQAALGLAAALQVQLVQSGAEVKKPGESLKISCKGSGYSFTSYWIAWVRQMPGKGLEYMGLIYPGDSDTKYSPSFQGQVTISVDKSVSTAYLQWSSLKPSDSAVYFCARHDVGYCTDRTCAKWPEWLGVWGQGTLVTVSSGGGGSSGGGSGGGGSQSVLTQPPSVSAAPGQKVTISCSGSSSNIGNNYVSWYQQLPGTAPKLLIYDHTNRPAGVPDRFSGSKSGTSASLAISGFRSEDEADYYCASWDYTLSGWVFGGGTKLTVLG

SEQ ID NO: 12421 - protein, 117 aa, Mus musculus
DVQLQESGPGLVKPSQSLSLTCSVTGYSITGGYLWNWIRQFPGNKLEWMGYISYDGTNNYKPSLKDRISITRDTSKNQFFLKLNSVTNEDTATYYCARYGRVFFDYWGQGTTLTVSS

SEQ ID NO: 12422 - protein, 447 aa, Artificial Sequence; identical to SEQ ID NO: 6741
  source: /note="Description of Artificial Sequence: Synthetic polypeptide"

SEQ ID NO: 12423 - protein, 120 aa, Homo sapiens
EVQLVESGGGLVQPGGSLRLSCAASGFTFSSYWMSWVRQAPGKGLEWVANIKQDGGEQYYVDSVKGRFTISRDNAKNSLYLQMNSLRAEDTAVYYCARDWNYGYYDMDVWGQGTTVTVSS

SEQ ID NO: 12424 - protein, 121 aa, Homo sapiens
EVQLVESGGGLVQPGGSLRLSCAASGFTFSRYWMSWVRQAPGKGLEWVANIKQDGSEKYYVDSVKGRFTISRDNAKNSLYLQMNSLRAEDTAVYYCAREGGWFGELAFDYWGQGTLVTVSS

SEQ ID NO: 12425 - protein, 121 aa, Homo sapiens
EVQLLESGGDLVQPGGSLRLSCAASGFTFNSYAMSWVRQAPGKGLEWVSTISGSGGFTFSADSVKGRFTISRDNSKNTLFLQMNSLRVEDSAVYSCAKVLVGFNNGCWDYWGQGTLVTVSS

SEQ ID NO: 12426 - protein, 120 aa, Homo sapiens
EVQLVESGGGLVKPGGSLRLSCAASGFTFSTYSMNWVRQAPGKGLEWVSSISSSGDYIYYADSVKGRFTISRDNAKNSLYLQMNSLRAEDTAVYYCARDLVTSMVAFDYWGQGTLVTVSS

SEQ ID NO: 12427 - protein, 471 aa, Artificial Sequence
  source: /note="Description of Artificial Sequence: Synthetic polypeptide"
MKCSWVMFLVATATGVNSQVQLQQPGAEIVRPGASVKLSCKASGYTFTDYWMNWVKLRPGQGLEWIGIIDPSDSYASYNQKFKGKATLTVDESSSTAYMQLSSLTSEDSAVYYCARKSYYGGNYYYAMDYWGQGTSVTVSSAKTTAPSVYPLAPVCGDTTGSSVTLGCLVKGYFPEPVTLTWNSGSLSSGVHTFPAVLQSDLYTLSSSVTVTSSTWPSQSITCNVAHPASSTKVDKKIEPRGPTIKPCPPCKCPAPNLLGGPSVFIFPPKIKDVLMISLSPIVTCVVVDVSEDDPDVQISWFVNNVEVHTAQTQTHREDYNSTLRVVSALPIQHQDWMSGKEFKCKVNNKDLPAPIERTISKPKGSVRAPQVYVLPPPEEEMTKKQVTLTCMVTDFMPEDIYVEWTNNGKTELNYKNTEPVLDSDGSYFMYSKLRVEKKNWVERNSYSCSVVHEGLHNHHTTKSFSRTPGK

SEQ ID NO: 12428 - protein, 150 aa, Homo sapiens
LEMDMEFQAQLLFLLLLWLPDITGDIVLTQSPGTLSLSPGERATLSCRASQSVSSSYLAWYQQKPGQAPRLLIYGASTRATGMPDRFSGSGSGTDFTLTISRLEPEDFAVYYCQQYGSSPQTPQITFGGGTKVEIKRTVAAPSVFIFPPS

SEQ ID NO: 12429 - protein, 123 aa, Artificial Sequence; identical to SEQ ID NO: 8791
  source: /note="Description of Artificial Sequence: Synthetic polypeptide"

SEQ ID NO: 12430 - protein, 450 aa, Artificial Sequence
  source: /note="Description of Artificial Sequence: Synthetic polypeptide"
MQVQLQQPGTELVRPGASVKLSCKASGFSFTSYWMNWVKQRPGQGLEWIGMIHPSDSETRLNQKFKDRATLTVDKSSSTAYMQLSSPTSEDSAVYYCASEMDYYFAMDYWGQGTSVTVSSASTKGPSVFPLAPSSKSTSGGTAALGCLVKDYFPEPVTVSWNSGALTSGVHTFPAVLQSSGLYSLSSVVTVPSSSLGTQTYICNVNHKPSNTKVDKKVEPKSCDKTHTCPPCPAPELLGGPSVFLFPPKPKDTLMISRTPEVTCVVVDVSHEDPEVKFNWYVDGVEVHNAKTKPREEQYNSTYRVVSVLTVLHQDWLNGKEYKCKVSNKALPAPIEKTISKAKGQPREPQVYTLPPSREEMTKNQVSLTCLVKGFYPSDIAVEWESNGQPENNYKTTPPVLDSDGSFFLYSKLTVDKSRWQQGNVFSCSVMHEALHNHYTQKSLSLSPGK

SEQ ID NO: 12431 - protein, 447 aa, Artificial Sequence
  source: /note="Description of Artificial Sequence: Synthetic polypeptide"
MQVKLQESGAELAKPGASVKMSCKASGYTFTSYRMHWVKQRPGQGLEWIGYINPSTGYTEYNQKFKDKATLTADKSSSTAYMQLSSLTFEDSAVYYCARGGGVFDYWGQGTTLTVSSASTKGPSVFPLAPSSKSTSGGTAALGCLVKDYFPEPVTVSWNSGALTSGVHTFPAVLQSSGLYSLSSVVTVPSSSLGTQTYICNVNHKPSNTKVDKKVEPKSCDKTHTCPPCPAPELLGGPSVFLFPPKPKDTLMISRTPEVTCVVVDVSHEDPEVKFNWYVDGVEVHNAKTKPREEQYNSTYRVVSVLTVLHQDWLNGKEYKCKVSNKALPAPIEKTISKAKGQPREPQVYTLPPSREEMTKNQVSLTCLVKGFYPSDIAVEWESNGQPENNYKTTPPVLDSDGSFFLYSKLTVDKSRWQQGNVFSCSVMHEALHNHYTQKSLSLSPGK

SEQ ID NO: 12432 - protein, 450 aa, Artificial Sequence
  source: /note="Description of Artificial Sequence: Synthetic polypeptide"
MQVQLQQPGTELVRPGASVKLSCKASGFSFTSYWMNWVKQRPGQGLEWIGMIHPSDSETRLNQKFKDRATLTVDKSSSTAYMQLSSPTSEDSAVYYCASEMDYYFAMDYWGQGTSVTVSSASTKGPSVFPLAPSSKSTSGGTAALGCLVKDYFPEPVTVSWNSGALTSGVHTFPAVLQSSGLYSLSSVVTVPSSSLGTQTYICNVNHKPSNTKVDKKVEPKSCDKTHTCPPCPAPELLGGPSVFLFPPKPKDTLMISRTPEVTCVVVDVSHEDPEVKFNWYVDGVEVHNAKTKPREEQYNSTYRVVSVLTVLHQDWLNGKEYKCKVSNKALPAPIEKTISKAKGQPREPQVCTLPPSREEMTKNQVSLSCAVKGFYPSDIAVEWESNGQPENNYKTTPPVLDSDGSFFLVSKLTVDKSRWQQGNVFSCSVMHEALHNHYTQKSLSLSPGK

SEQ ID NO: 12433 - protein, 800 aa, Artificial Sequence
  source: /note="Description of Artificial Sequence: Synthetic polypeptide"
QVQLQQPGTELVRPGASVKLSCKASGFSFTSYWMNWVKQRPGQGLEWIGMIHPSDSETRLNQKFKDRATLTVDKSSSTAYMQLSSPTSEDSAVYYCASEMDYYFAMDYWGQGTSVTVSSASTKGPSVFPLAPSSKSTSGGTAALGCLVKDYFPEPVTVSWNSGALTSGVHTFPAVLQSSGLYSLSSVVTVPSSSLGTQTYICNVNHKPSNTKVDKKVEPKSCDKTHTCPPCPAPELLGGPSVFLFPPKPKDTLMISRTPEVTCVVVDVSHEDPEVKFNWYVDGVEVHNAKTKPREEQYNSTYRVVSVLTVLHQDWLNGKEYKCKVSNKALPAPIEKTISKAKGQPREPQVYTLPPSREEMTKNQVSLTCLVKGFYPSDIAVEWESNGQPENNYKTTPPVLDSDGSFFLYSKLTVDKSRWQQGNVFSCSVMHEALHNHYTQKSLSLSPGKASGGPEGGSLAALTAHQACHLPLETFTRHRQPRGWEQLEQCGYPVQRLVALYLAARLSWNQVDQVIRNALASPGSGGDLGEAIREQPEQARLALTLAAAESERFVRQGTGNDEAGAANGPADSGDALLERNYPTGAEFLGDGGDVSFSTRGTQNWTVERLLQAHRQLEERGYVFVGYHGTFLEAAQSIVFGGVRARSQDLDAIWRGFYIAGDPALAYGYAQDQEPDARGRIRNGALLRVYVPRSSLPGFYRTSLTLAAPEAAGEVERLIGHPLPLRLDAITGPEEEGGRLETILGWPLAERTVVIPSAIPTDPRNVGGDLDPSSIPDKEQAISALPDYASQPGKPPREDLK

SEQ ID NO: 12434 - protein, 450 aa, Artificial Sequence
  source: /note="Description of Artificial Sequence: Synthetic polypeptide"
MQVQLQQPGTELVRPGASVKLSCKASGFSFTSYWMNWVKQRPGQCLEWIGMIHPSDSETRLNQKFKDRATLTVDKSSSTAYMQLSSPTSEDSAVYYCASEMDYYFAMDYWGQGTSVTVSSASTKGPSVFPLAPSSKSTSGGTAALGCLVKDYFPEPVTVSWNSGALTSGVHTFPAVLQSSGLYSLSSVVTVPSSSLGTQTYICNVNHKPSNTKVDKKVEPKSADKTHTCPPCPAPELLGGPSVFLFPPKPKDTLMISRTPEVTCVVVDVSHEDPEVKFNWYVDGVEVHNAKTKPREEQYNSTYRVVSVLTVLHQDWLNGKEYKCKVSNKALPAPIEKTISKAKGQPREPQVYTLPPCREEMTKNQVSLWCLVKGFYPSDIAVEWESNGQPENNYKTTPPVLDSDGSFFLYSKLTVDKSRWQQGNVFSCSVMHEALHNHYTQKSLSLSPGK

SEQ ID NO: 12435 - protein, 800 aa, Artificial Sequence
  source: /note="Description of Artificial Sequence: Synthetic polypeptide"
QVQLQQPGTELVRPGASVKLSCKASGFSFTSYWMNWVKQRPGQGLEWIGMIHPSDSETRLNQKFKDRATLTVDKSSSTAYMQLSSPTSEDSAVYYCASEMDYYFAMDYWGQGTSVTVSSASTKGPSVFPLAPSSKSTSGGTAALGCLVKDYFPEPVTVSWNSGALTSGVHTFPAVLQSSGLYSLSSVVTVPSSSLGTQTYICNVNHKPSNTKVDKKVEPKSCDKTHTCPPCPAPELLGGPSVFLFPPKPKDTLMISRTPEVTCVVVDVSHEDPEVKFNWYVDGVEVHNAKTKPREEQYNSTYRVVSVLTVLHQDWLNGKEYKCKVSNKALPAPIEKTISKAKGQPREPQVCTLPPSREEMTKNQVSLSCAVKGFYPSDIAVEWESNGQPENNYKTTPPVLDSDGSFFLVSKLTVDKSRWQQGNVFSCSVMHEALHNHYTQKSLSLSPGKASGGPEGGSLAALTAHQACHLPLETFTRHRQPRGWEQLEQCGYPVQRLVALYLAARLSWNQVDQVIRNALASPGSGGDLGEAIREQPEQARLALTLAAAESERFVRQGTGNDEAGAANGPADSGDALLERNYPTGAEFLGDGGDVSFSTRGTQNWTVERLLQAHRQLEERGYVFVGYHGTFLEAAQSIVFGGVRARSQDLDAIWRGFYIAGDPALAYGYAQDQEPDARGRIRNGALLRVYVPRSSLPGFYRTSLTLAAPEAAGEVERLIGHPLPLRLDAITGPEEEGGRLETILGWPLAERTVVIPSAIPTDPRNVGGDLDPSSIPDKEQAISALPDYASQPGKPPREDLK

SEQ ID NO: 12436 - protein, 447 aa, Artificial Sequence
  source: /note="Description of Artificial Sequence: Synthetic polypeptide"
EVQLVESGGGLVQPGGSLRLSCAASGFTFTDYYMSWVRQAPGKGLEWLGFIRNKANGYTTEYSASVKGRFTISRDNSKNSLYLQMNSLKTEDTAVYYCARDNWFAYWGQGTLVTVSSASTKGPSVFPLAPSSKSTSGGTAALGCLVKDYFPEPVTVSWNSGALTSGVHTFPAVLQSSGLYSLSSVVTVPSSSLGTQTYICNVNHKPSNTKVDKKVEPKSCDKTHTCPPCPAPELLGGPSVFLFPPKPKDTLMISRTPEVTCVVVDVSHEDPEVKFNWYVDGVEVHNAKTKPREEQYNSTYRVVSVLTVLHQDWLNGKEYKCKVSNKALPAPIEKTISKAKGQPREPQVYTLPPSREEMTKNQVSLTCLVKGFYPSDIAVEWESNGQPENNYKTTPPVLDSDGSFFLYSKLTVDKSRWQQGNVFSCSVMHEALHNHYTQKSLSLSPGK

SEQ ID NO: 12437 - protein, 447 aa, Artificial Sequence
  source: /note="Description of Artificial Sequence: Synthetic polypeptide"
EVQLVESGGGLVQPGGSLRLSCAASGFTFTDYYMSWVRQAPGKGLEWLGFIRNKANGYTTEYSASVKGRFTISRDNSKNSLYLQMNSLRAEDTAVYYCARDNWFAYWGQGTLVTVSSASTKGPSVFPLAPSSKSTSGGTAALGCLVKDYFPEPVTVSWNSGALTSGVHTFPAVLQSSGLYSLSSVVTVPSSSLGTQTYICNVNHKPSNTKVDKKVEPKSCDKTHTCPPCPAPELLGGPSVFLFPPKPKDTLMISRTPEVTCVVVDVSHEDPEVKFNWYVDGVEVHNAKTKPREEQYNSTYRVVSVLTVLHQDWLNGKEYKCKVSNKALPAPIEKTISKAKGQPREPQVYTLPPSREEMTKNQVSLTCLVKGFYPSDIAVEWESNGQPENNYKTTPPVLDSDGSFFLYSKLTVDKSRWQQGNVFSCSVMHEALHNHYTQKSLSLSPGK

SEQ ID NO: 12438 - protein, 447 aa, Artificial Sequence
  source: /note="Description of Artificial Sequence: Synthetic polypeptide"
EVQLVESGGGLVQPGGSLRLSCAASGFTFTDYYMSWVRQAPGKGLEWLGFIRNKANGYTTEYSASVKGRFTISRDNSKNTLYLQMNSLRAEDTAVYYCARDNWFAYWGQGTLVTVSSASTKGPSVFPLAPSSKSTSGGTAALGCLVKDYFPEPVTVSWNSGALTSGVHTFPAVLQSSGLYSLSSVVTVPSSSLGTQTYICNVNHKPSNTKVDKKVEPKSCDKTHTCPPCPAPELLGGPSVFLFPPKPKDTLMISRTPEVTCVVVDVSHEDPEVKFNWYVDGVEVHNAKTKPREEQYNSTYRVVSVLTVLHQDWLNGKEYKCKVSNKALPAPIEKTISKAKGQPREPQVYTLPPSREEMTKNQVSLTCLVKGFYPSDIAVEWESNGQPENNYKTTPPVLDSDGSFFLYSKLTVDKSRWQQGNVFSCSVMHEALHNHYTQKSLSLSPGK

SEQ ID NO: 12439 - protein, 447 aa, Artificial Sequence; identical to SEQ ID NO: 12436
  source: /note="Description of Artificial Sequence: Synthetic polypeptide"

SEQ ID NO: 12440 - protein, 447 aa, Artificial Sequence; identical to SEQ ID NO: 12437
  source: /note="Description of Artificial Sequence: Synthetic polypeptide"

SEQ ID NO: 12441 - protein, 447 aa, Artificial Sequence; identical to SEQ ID NO: 12438
  source: /note="Description of Artificial Sequence: Synthetic polypeptide"

SEQ ID NO: 12442 - protein, 449 aa, Artificial Sequence; identical to SEQ ID NO: 6969
  source: /note="Description of Artificial Sequence: Synthetic polypeptide"

SEQ ID NO: 12443 - protein, 449 aa, Artificial Sequence; identical to SEQ ID NO: 6969
  source: /note="Description of Artificial Sequence: Synthetic polypeptide"

SEQ ID NO: 12444 - protein, 118 aa, Mus musculus
EVQLQQSGPELVKPGASVKISCKTSGYIFTAYTMHWVRQSLGESLDWIGGIKPNNGLANYNQKFKGKATLTVDKSSSTAYMDLRSLTSEDSAVYYCARSEITTEFDYWGQGTALTVSS

SEQ ID NO: 12445 - protein, 118 aa, Mus musculus
EVQLQQSGPELVKPGASMKISCKASGYSFTDYTLNWVKQSHGKTLEWIGLINPYNGGTTYNQKFKGKATLTVDKSSSTAYMELLSLTSEDSAVYYCAREEITKDFDFWGQGTTLTVSS

SEQ ID NO: 12446 - protein, 121 aa, Mus musculus
EVLLQQSGPELVKPGASVKIPCKASGYTFTDYNMDWVKQSHGMSLEWIGDINPNNGGTIFNQKFKGKATLTVDKSSSTAYMELRSLTSEDTAVYYCARGRYVGYYYAMDYWGQGTSVTVSS

SEQ ID NO: 12447 - protein, 118 aa, Mus musculus
QVQLQQSGAELAKPGASVKMSCKASGYTFTSYWMNWVKQRPGQGLEWIGYINPTTGSTDYNQKLKDKATLTADKSSNTAYMQLSSLTSEDSAVYYCAIGGYGSWFAYWGQGTLVTVSA

SEQ ID NO: 12448 - protein, 443 aa, Mus musculus
QVQLVQSGAEVKKPGASVKVSCKASGYIFTAYTMHWVRQAPGQGLEWMGWIKPNNGLANYAQKFQGRVTMTRDTSISTAYMELSRLRSDDTAVYYCARSEITTEFDYWGQGTLVTVSSASTKGPSVFPLAPCSRSTSESTAALGCLVKDYFPEPVTVSWNSGALTSGVHTFPAVLQSSGLYSLSSVVTVPSSNFGTQTYTCNVDHKPSNTKVDKTVERKCCVECPPCPAPPVAGPSVFLFPPKPKDTLMISRTPEVTCVVVDVSHEDPEVQFNWYVDGVEVHNAKTKPREEQFNSTFRVVSVLTVVHQDWLNGKEYKCKVSNKGLPAPIEKTISKTKGQPREPQVYTLPPSREEMTKNQVSLTCLVKGFYPSDIAVEWESNGQPENNYKTTPPMLDSDGSFFLYSKLTVDKSRWQQGNVFSCSVMHEALHNHYTQKSLSLSPG

SEQ ID NO: 12449 - protein, 443 aa, Mus musculus
EVQLQQSGPELVKPGASVKISCKTSGYIFTAYTMHWVRQSLGESLDWIGGIKPNNGLANYNQKFKGKATLTVDKSSSTAYMDLRSLTSEDSAVYYCARSEITTEFDYWGQGTALTVSSASTKGPSVFPLAPCSRSTSESTAALGCLVKDYFPEPVTVSWNSGALTSGVHTFPAVLQSSGLYSLSSVVTVPSSNFGTQTYTCNVDHKPSNTKVDKTVERKCCVECPPCPAPPVAGPSVFLFPPKPKDTLMISRTPEVTCVVVDVSHEDPEVQFNWYVDGVEVHNAKTKPREEQFNSTFRVVSVLTVVHQDWLNGKEYKCKVSNKGLPAPIEKTISKTKGQPREPQVYTLPPSREEMTKNQVSLTCLVKGFYPSDIAVEWESNGQPENNYKTTPPMLDSDGSFFLYSKLTVDKSRWQQGNVFSCSVMHEALHNHYTQKSLSLSPG

SEQ ID NO: 12450 - protein, 446 aa, Mus musculus
EVQLQQSGPELVKPGASVKISCKTSGYIFTAYTMHWVRQSLGESLDWIGGIKPNNGLANYNQKFKGKATLTVDKSSSTAYMDLRSLTSEDSAVYYCARSEITTEFDYWGQGTALTVSSASTKGPSVFPLAPSSKSTSGGTAALGCLVKDYFPEPVTVSWNSGALTSGVHTFPAVLQSSGLYSLSSVVTVPSSSLGTQTYICNVNHKPSNTKVDKRVEPKSCDCHCPPCPAPELLGGPSVFLFPPKPKDTLMISRTPEVTCVVVDVSHEDPEVKFNWYVDGVEVHNAKTKPREEQYNSTYRVVSVLTVLHQDWLNGKEYKCKVSNKALPAPIEKTISKAKGQPREPQVYTLPPSREEMTKNQVSLTCLVKGFYPSDIAVEWESNGQPENNYKTTPPVLDSDGSFFLYSKLTVDKSRWQQGNVFSCSVMHEALHNHYTQKSLSLSPGK

SEQ ID NO: 12451 - protein, 448 aa, Mus musculus
EVQLQQSGPELVKPGASVKISCKTSGYIFTAYTMHWVRQSLGESLDWIGGIKPNNGLANYNQKFKGKATLTVDKSSSTAYMDLRSLTSEDSAVYYCARSEITTEFDYWGQGTALTVSSASTKGPSVFPLAPSSKSTSGGTAALGCLVKDYFPEPVTVSWNSGALTSGVHTFPAVLQSSGLYSLSSVVTVPSSSLGTQTYICNVNHKPSNTKVDKRVECKSCDKTHTCPPCPAPELLGGPSVFLFPPKPKDTLMISRTPEVTCVVVDVSHEDPEVKFNWYVDGVEVHNAKTKPREEQYNSTYRVVSVLTVLHQDWLNGKEYKCKVSNKALPAPIEKTISKAKGQPREPQVYTLPPSREEMTKNQVSLTCLVKGFYPSDIAVEWESNGQPENNYKTTPPVLDSDGSFFLYSKLTVDKSRWQQGNVFSCSVMHEALHNHYTQKSLSLSPGK

SEQ ID NO: 12452 - protein, 448 aa, Mus musculus
EVQLQQSGPELVKPGASVKISCKTSGYIFTAYTMHWVRQSLGESLDWIGGIKPNNGLANYNQKFKGKATLTVDKSSSTAYMDLRSLTSEDSAVYYCARSEITTEFDYWGQGTALTVSSASTKGPSVFPLAPSSKSTSGGTAALGCLVKDYFPEPVTVSWNSGALTSGVHTFPAVLQSSGLYSLSSVVTVPSSSLGTQTYICNVNHKPSNTKVDKRVEPCSCDKTHTCPPCPAPELLGGPSVFLFPPKPKDTLMISRTPEVTCVVVDVSHEDPEVKFNWYVDGVEVHNAKTKPREEQYNSTYRVVSVLTVLHQDWLNGKEYKCKVSNKALPAPIEKTISKAKGQPREPQVYTLPPSREEMTKNQVSLTCLVKGFYPSDIAVEWESNGQPENNYKTTPPVLDSDGSFFLYSKLTVDKSRWQQGNVFSCSVMHEALHNHYTQKSLSLSPGK

SEQ ID NO: 12453 - protein, 448 aa, Mus musculus
EVQLQQSGPELVKPGASVKISCKTSGYIFTAYTMHWVRQSLGESLDWIGGIKPNNGLANYNQKFKGKATLTVDKSSSTAYMDLRSLTSEDSAVYYCARSEITTEFDYWGQGTALTVSSASTKGPSVFPLAPSSKSTSGGTAALGCLVKDYFPEPVTVSWNSGALTSGVHTFPAVLQSSGLYSLSSVVTVPSSSLGTQTYICNVNHKPSNTKVDKRVEPKCCDKTHTCPPCPAPELLGGPSVFLFPPKPKDTLMISRTPEVTCVVVDVSHEDPEVKFNWYVDGVEVHNAKTKPREEQYNSTYRVVSVLTVLHQDWLNGKEYKCKVSNKALPAPIEKTISKAKGQPREPQVYTLPPSREEMTKNQVSLTCLVKGFYPSDIAVEWESNGQPENNYKTTPPVLDSDGSFFLYSKLTVDKSRWQQGNVFSCSVMHEALHNHYTQKSLSLSPGK

SEQ ID NO: 12454 - protein, 448 aa, Mus musculus
EVQLQQSGPELVKPGASVKISCKTSGYIFTAYTMHWVRQSLGESLDWIGGIKPNNGLANYNQKFKGKATLTVDKSSSTAYMDLRSLTSEDSAVYYCARSEITTEFDYWGQGTALTVSSASTKGPSVFPLAPSSKSTSGGTAALGCLVKDYFPEPVTVSWNSGALTSGVHTFPAVLQSSGLYSLSSVVTVPSSSLGTQTYICNVNHKPSNTKVDKRVEPKSCCKTHTCPPCPAPELLGGPSVFLFPPKPKDTLMISRTPEVTCVVVDVSHEDPEVKFNWYVDGVEVHNAKTKPREEQYNSTYRVVSVLTVLHQDWLNGKEYKCKVSNKALPAPIEKTISKAKGQPREPQVYTLPPSREEMTKNQVSLTCLVKGFYPSDIAVEWESNGQPENNYKTTPPVLDSDGSFFLYSKLTVDKSRWQQGNVFSCSVMHEALHNHYTQKSLSLSPGK

SEQ ID NO: 12455 - protein, 448 aa, Mus musculus
EVQLQQSGPELVKPGASVKISCKTSGYIFTAYTMHWVRQSLGESLDWIGGIKPNNGLANYNQKFKGKATLTVDKSSSTAYMDLRSLTSEDSAVYYCARSEITTEFDYWGQGTALTVSSASTKGPSVFPLAPSSKSTSGGTAALGCLVKDYFPEPVTVSWNSGALTSGVHTFPAVLQSSGLYSLSSVVTVPSSSLGTQTYICNVNHKPSNTKVDKRVEPKSCDCTHTCPPCPAPELLGGPSVFLFPPKPKDTLMISRTPEVTCVVVDVSHEDPEVKFNWYVDGVEVHNAKTKPREEQYNSTYRVVSVLTVLHQDWLNGKEYKCKVSNKALPAPIEKTISKAKGQPREPQVYTLPPSREEMTKNQVSLTCLVKGFYPSDIAVEWESNGQPENNYKTTPPVLDSDGSFFLYSKLTVDKSRWQQGNVFSCSVMHEALHNHYTQKSLSLSPGK

SEQ ID NO: 12456 - protein, 448 aa, Mus musculus
EVQLQQSGPELVKPGASVKISCKTSGYIFTAYTMHWVRQSLGESLDWIGGIKPNNGLANYNQKFKGKATLTVDKSSSTAYMDLRSLTSEDSAVYYCARSEITTEFDYWGQGTALTVSSASTKGPSVFPLAPSSKSTSGGTAALGCLVKDYFPEPVTVSWNSGALTSGVHTFPAVLQSSGLYSLSSVVTVPSSSLGTQTYICNVNHKPSNTKVDKRVEPKSCDKCHTCPPCPAPELLGGPSVFLFPPKPKDTLMISRTPEVTCVVVDVSHEDPEVKFNWYVDGVEVHNAKTKPREEQYNSTYRVVSVLTVLHQDWLNGKEYKCKVSNKALPAPIEKTISKAKGQPREPQVYTLPPSREEMTKNQVSLTCLVKGFYPSDIAVEWESNGQPENNYKTTPPVLDSDGSFFLYSKLTVDKSRWQQGNVFSCSVMHEALHNHYTQKSLSLSPGK

SEQ ID NO: 12457 - protein, 448 aa, Mus musculus
EVQLQQSGPELVKPGASVKISCKTSGYIFTAYTMHWVRQSLGESLDWIGGIKPNNGLANYNQKFKGKATLTVDKSSSTAYMDLRSLTSEDSAVYYCARSEITTEFDYWGQGTALTVSSASTKGPSVFPLAPSSKSTSGGTAALGCLVKDYFPEPVTVSWNSGALTSGVHTFPAVLQSSGLYSLSSVVTVPSSSLGTQTYICNVNHKPSNTKVDKRVEPKSCDKTHCCPPCPAPELLGGPSVFLFPPKPKDTLMISRTPEVTCVVVDVSHEDPEVKFNWYVDGVEVHNAKTKPREEQYNSTYRVVSVLTVLHQDWLNGKEYKCKVSNKALPAPIEKTISKAKGQPREPQVYTLPPSREEMTKNQVSLTCLVKGFYPSDIAVEWESNGQPENNYKTTPPVLDSDGSFFLYSKLTVDKSRWQQGNVFSCSVMHEALHNHYTQKSLSLSPGK

SEQ ID NO: 12458 - protein, 446 aa, Mus musculus
EVQLQQSGPELVKPGASVKISCKTSGYIFTAYTMHWVRQSLGESLDWIGGIKPNNGLANYNQKFKGKATLTVDKSSSTAYMDLRSLTSEDSAVYYCARSEITTEFDYWGQGTALTVSSASTKGPSVFPLAPSSKSTSGGTAALGCLVKDYFPEPVTVSWNSGALTSGVHTFPAVLQSSGLYSLSSVVTVPSSSLGTQTYICNVNHKPSNTKVDKRVEKCDKTHTCPPCPAPELLGGPSVFLFPPKPKDTLMISRTPEVTCVVVDVSHEDPEVKFNWYVDGVEVHNAKTKPREEQYNSTYRVVSVLTVLHQDWLNGKEYKCKVSNKALPAPIEKTISKAKGQPREPQVYTLPPSREEMTKNQVSLTCLVKGFYPSDIAVEWESNGQPENNYKTTPPVLDSDGSFFLYSKLTVDKSRWQQGNVFSCSVMHEALHNHYTQKSLSLSPGK

SEQ ID NO: 12459 - protein, 447 aa, Mus musculus
EVQLQQSGPELVKPGASVKISCKTSGYIFTAYTMHWVRQSLGESLDWIGGIKPNNGLANYNQKFKGKATLTVDKSSSTAYMDLRSLTSEDSAVYYCARSEITTEFDYWGQGTALTVSSASTKGPSVFPLAPSSKSTSGGTAALGCLVKDYFPEPVTVSWNSGALTSGVHTFPAVLQSSGLYSLSSVVTVPSSSLGTQTYICNVNHKPSNTKVDKRVEPKSCDCHTCPPCPAPELLGGPSVFLFPPKPKDTLMISRTPEVTCVVVDVSHEDPEVKFNWYVDGVEVHNAKTKPREEQYNSTYRVVSVLTVLHQDWLNGKEYKCKVSNKALPAPIEKTISKAKGQPREPQVYTLPPSREEMTKNQVSLTCLVKGFYPSDIAVEWESNGQPENNYKTTPPVLDSDGSFFLYSKLTVDKSRWQQGNVFSCSVMHEALHNHYTQKSLSLSPGK

SEQ ID NO: 12460 - protein, 447 aa, Mus musculus
EVQLQQSGPELVKPGASVKISCKTSGYIFTAYTMHWVRQSLGESLDWIGGIKPNNGLANYNQKFKGKATLTVDKSSSTAYMDLRSLTSEDSAVYYCARSEITTEFDYWGQGTALTVSSASTKGPSVFPLAPSSKSTSGGTAALGCLVKDYFPEPVTVSWNSGALTSGVHTFPAVLQSSGLYSLSSVVTVPSSSLGTQTYICNVNHKPSNTKVDKRVEPKSCDCTHCPPCPAPELLGGPSVFLFPPKPKDTLMISRTPEVTCVVVDVSHEDPEVKFNWYVDGVEVHNAKTKPREEQYNSTYRVVSVLTVLHQDWLNGKEYKCKVSNKALPAPIEKTISKAKGQPREPQVYTLPPSREEMTKNQVSLTCLVKGFYPSDIAVEWESNGQPENNYKTTPPVLDSDGSFFLYSKLTVDKSRWQQGNVFSCSVMHEALHNHYTQKSLSLSPGK

SEQ ID NO: 12461 - protein, 446 aa, Mus musculus
EVQLQQSGPELVKPGASVKISCKTSGYIFTAYTMHWVRQSLGESLDWIGGIKPNNGLANYNQKFKGKATLTVDKSSSTAYMDLRSLTSEDSAVYYCARSEITTEFDYWGQGTALTVSSASTKGPSVFPLAPSSKSTSGGTAALGCLVKDYFPEPVTVSWNSGALTSGVHTFPAVLQSSGLYSLSSVVTVPSSSLGTQTYICNVNHKPSNTKVDKRVEPCSCKHTCPPCPAPELLGGPSVFLFPPKPKDTLMISRTPEVTCVVVDVSHEDPEVKFNWYVDGVEVHNAKTKPREEQYNSTYRVVSVLTVLHQDWLNGKEYKCKVSNKALPAPIEKTISKAKGQPREPQVYTLPPSREEMTKNQVSLTCLVKGFYPSDIAVEWESNGQPENNYKTTPPVLDSDGSFFLYSKLTVDKSRWQQGNVFSCSVMHEALHNHYTQKSLSLSPGK

SEQ ID NO: 12462 - protein, 446 aa, Mus musculus
EVQLQQSGPELVKPGASVKISCKTSGYIFTAYTMHWVRQSLGESLDWIGGIKPNNGLANYNQKFKGKATLTVDKSSSTAYMDLRSLTSEDSAVYYCARSEITTEFDYWGQGTALTVSSASTKGPSVFPLAPSSKSTSGGTAALGCLVKDYFPEPVTVSWNSGALTSGVHTFPAVLQSSGLYSLSSVVTVPSSSLGTQTYICNVNHKPSNTKVDKRVEPSCCTHTCPPCPAPELLGGPSVFLFPPKPKDTLMISRTPEVTCVVVDVSHEDPEVKFNWYVDGVEVHNAKTKPREEQYNSTYRVVSVLTVLHQDWLNGKEYKCKVSNKALPAPIEKTISKAKGQPREPQVYTLPPSREEMTKNQVSLTCLVKGFYPSDIAVEWESNGQPENNYKTTPPVLDSDGSFFLYSKLTVDKSRWQQGNVFSCSVMHEALHNHYTQKSLSLSPGK

SEQ ID NO: 12463 - protein, 446 aa, Mus musculus
EVQLQQSGPELVKPGASVKISCKTSGYIFTAYTMHWVRQSLGESLDWIGGIKPNNGLANYNQKFKGKATLTVDKSSSTAYMDLRSLTSEDSAVYYCARSEITTEFDYWGQGTALTVSSASTKGPSVFPLAPSSKSTSGGTAALGCLVKDYFPEPVTVSWNSGALTSGVHTFPAVLQSSGLYSLSSVVTVPSSSLGTQTYICNVNHKPSNTKVDKRVEPSCDKHCCPPCPAPELLGGPSVFLFPPKPKDTLMISRTPEVTCVVVDVSHEDPEVKFNWYVDGVEVHNAKTKPREEQYNSTYRVVSVLTVLHQDWLNGKEYKCKVSNKALPAPIEKTISKAKGQPREPQVYTLPPSREEMTKNQVSLTCLVKGFYPSDIAVEWESNGQPENNYKTTPPVLDSDGSFFLYSKLTVDKSRWQQGNVFSCSVMHEALHNHYTQKSLSLSPGK

SEQ ID NO: 12464 - protein, 444 aa, Mus musculus
EVQLQQSGPELVKPGASVKISCKTSGYIFTAYTMHWVRQSLGESLDWIGGIKPNNGLANYNQKFKGKATLTVDKSSSTAYMDLRSLTSEDSAVYYCARSEITTEFDYWGQGTALTVSSASTKGPSVFPLAPSSKSTSGGTAALGCLVKDYFPEPVTVSWNSGALTSGVHTFPAVLQSSGLYSLSSVVTVPSSSLGTQTYICNVNHKPSNTKVDKRVEPKSCTCPPCPAPELLGGPSVFLFPPKPKDTLMISRTPEVTCVVVDVSHEDPEVKFNWYVDGVEVHNAKTKPREEQYNSTYRVVSVLTVLHQDWLNGKEYKCKVSNKALPAPIEKTISKAKGQPREPQVYTLPPSREEMTKNQVSLTCLVKGFYPSDIAVEWESNGQPENNYKTTPPVLDSDGSFFLYSKLTVDKSRWQQGNVFSCSVMHEALHNHYTQKSLSLSPGK

SEQ ID NO: 12465 - protein, 448 aa, Mus musculus
EVQLQQSGPELVKPGASVKISCKTSGYIFTAYTMHWVRQSLGESLDWIGGIKPNNGLANYNQKFKGKATLTVDKSSSTAYMDLRSLTSEDSAVYYCARSEITTEFDYWGQGTALTVSSASTKGPSVFPLAPSSKSTSGGTAALGCLVKDYFPEPVTVSWNSGALTSGVHTFPAVLQSSGLYSLSSVVTVPSSSLGTQTYICNVNHKPSNTKVDKRVEPKSCDKCVECPPCPAPELLGGPSVFLFPPKPKDTLMISRTPEVTCVVVDVSHEDPEVKFNWYVDGVEVHNAKTKPREEQYNSTYRVVSVLTVLHQDWLNGKEYKCKVSNKALPAPIEKTISKAKGQPREPQVYTLPPSREEMTKNQVSLTCLVKGFYPSDIAVEWESNGQPENNYKTTPPVLDSDGSFFLYSKLTVDKSRWQQGNVFSCSVMHEALHNHYTQKSLSLSPGK

SEQ ID NO: 12466 - protein, 123 aa, Homo sapiens
SIVMTQSPLSLPVSLGDQASISCRSSQSLENINGNTYKNWYFQKPGQSPQLLIYRVSNRVSGVLDRFSGSGSGTDFTLKITRVEAEDLGVYFCLQVTHVPWTFGGGTKLEIKRADAAPTKSIS

SEQ ID NO: 12467 - protein, 442 aa, Artificial Sequence
  source: /note="Description of Artificial Sequence: Synthetic polypeptide"
QVQLVQSGAEVKKPGASVKVSCKASGYTFTDYYMHWVRQAPGQGLEWMGRVNPNRRGTTYNQKFEGRVTMTTDTSTSTAYMELRSLRSDDTAVYYCARANWLDYWGQGTTVTVSSASTKGPSVFPLAPCSRSTSESTAALGCLVKDYFPEPVTVSWNSGALTSGVHTFPAVLQSSGLYSLSSVVTVPSSSLGTKTYTCNVDHKPSNTKVDKRVESKYGPPCPPCPAPEAAGGPSVFLFPPKPKDTLMISRTPEVTCVVVDVSQEDPEVQFNWYVDGVEVHNAKTKPREEQFNSTYRVVSVLTVLHQDWLNGKEYKCKVSNKGLPSSIEKTISKAKGQPREPQVYTLPPSQEEMTKNQVSLTCLVKGFYPSDIAVEWESNGQPENNYKTTPPVLDSDGSFFLYSRLTVDKSRWQEGNVFSCSVMHEALHNHYTQKSLSLSLGK

SEQ ID NO: 12468 - protein, 441 aa, Artificial Sequence
  source: /note="Description of Artificial Sequence: Synthetic polypeptide"
QVQLVQSGAEVKKPGSSVKVSCKASGYTFTSRYIHWVRQAPGQGLEWMGWIYPVTGDTYYNEKFKGRVTITADKSTSTAYMELSSLRSEDTAVYYCARGYGAFYYWGQGTLVTVSSASTKGPSVFPLAPCSRSTSESTAALGCLVKDYFPEPVTVSWNSGALTSGVHTFPAVLQSSGLYSLSSVVTVPSSNFGTQTYTCNVDHKPSNTKVDKTVERKCCVECPPCPAPPVAGPSVFLFPPKPKDTLMISRTPEVTCVVVDVSHEDPEVQFNWYVDGMEVHNAKTKPREEQFNSTFRVVSVLTVVHQDWLNGKEYKCKVSNKGLPAPIEKTISKTKGQPREPQVYTLPPSREEMTKNQVSLTCLVKGFYPSDIAVEWESNGQPENNYKTTPPMLDSDGSFFLYSKLTVDKSRWQQGNVFSCSVMHEALHNHYTQKSLSLSPG

SEQ ID NO: 12469 - protein, 441 aa, Artificial Sequence
  source: /note="Description of Artificial Sequence: Synthetic polypeptide"
QVQLVQSGAEVKKPGSSVKVSCKASGYTFTSRYIHWVRQAPGQGLEWMGWIYPVTGDTYYIEKFKGRVTITADKSTSTAYMELSSLRSEDTAVYYCARGYGAFFYWGQGTLVTVSSASTKGPSVFPLAPCSRSTSESTAALGCLVKDYFPEPVTVSWNSGALTSGVHTFPAVLQSSGLYSLSSVVTVPSSNFGTQTYTCNVDHKPSNTKVDKTVERKCCVECPPCPAPPVAGPSVFLFPPKPKDTLMISRTPEVTCVVVDVSHEDPEVQFNWYVDGMEVHNAKTKPREEQFNSTFRVVSVLTVVHQDWLNGKEYKCKVSNKGLPAPIEKTISKTKGQPREPQVYTLPPSREEMTKNQVSLTCLVKGFYPSDIAVEWESNGQPENNYKTTPPMLDSDGSFFLYSKLTVDKSRWQQGNVFSCSVMHEALHNHYTQKSLSLSPG

SEQ ID NO: 12470 - protein, 441 aa, Artificial Sequence
  source: /note="Description of Artificial Sequence: Synthetic polypeptide"
QVQLVQSGAEVKKPGSSVKVSCKASGYTFTSRYIHWVRQAPGQGLEWMGWIYPVTGDTYYREPFKGRVTITADKSTSTAYMELSSLRSEDTAVYYCARGYGAFYYWGQGTLVTVSSASTKGPSVFPLAPCSRSTSESTAALGCLVKDYFPEPVTVSWNSGALTSGVHTFPAVLQSSGLYSLSSVVTVPSSNFGTQTYTCNVDHKPSNTKVDKTVERKCCVECPPCPAPPVAGPSVFLFPPKPKDTLMISRTPEVTCVVVDVSHEDPEVQFNWYVDGMEVHNAKTKPREEQFNSTFRVVSVLTVVHQDWLNGKEYKCKVSNKGLPAPIEKTISKTKGQPREPQVYTLPPSREEMTKNQVSLTCLVKGFYPSDIAVEWESNGQPENNYKTTPPMLDSDGSFFLYSKLTVDKSRWQQGNVFSCSVMHEALHNHYTQKSLSLSPG

SEQ ID NO: 12471 - protein, 440 aa, Artificial Sequence
  source: /note="Description of Artificial Sequence: Synthetic polypeptide"
QVQLVQSGAEVKKPGASVKVSCKASGYTFTDYYMHWVRQAPGQGLEWMGRVNPNRGGTTYNQKFEGRVTMTTDTSTSTAYMELRSLRSDDTAVYYCARTNWLDYWGQGTTVTVSSASTKGPSVFPLAPCSRSTSESTAALGCLVKDYFPEPVTVSWNSGALTSGVHTFPAVLQSSGLYSLSSVVTVPSSNFGTQTYTCNVDHKPSNTKVDKTVERKCCVECPPCPAPPVAGPSVFLFPPKPKDTLMISRTPEVTCVVVDVSHEDPEVQFNWYVDGMEVHNAKTKPREEQFNSTFRVVSVLTVVHQDWLNGKEYKCKVSNKGLPAPIEKTISKTKGQPREPQVYTLPPSREEMTKNQVSLTCLVKGFYPSDIAVEWESNGQPENNYKTTPPMLDSDGSFFLYSKLTVDKSRWQQGNVFSCSVMHEALHNHYTQKSLSLSPG

SEQ ID NO: 12472 - protein, 440 aa, Artificial Sequence
  source: /note="Description of Artificial Sequence: Synthetic polypeptide"
QVQLVQSGAEVKKPGASVKVSCKASGYTFTDYYMHWVRQAPGQGLEWMGRVNPNRRGTTYNQKFEGRVTMTTDTSTSTAYMELRSLRSDDTAVYYCARANWLDYWGQGTTVTVSSASTKGPSVFPLAPCSRSTSESTAALGCLVKDYFPEPVTVSWNSGALTSGVHTFPAVLQSSGLYSLSSVVTVPSSNFGTQTYTCNVDHKPSNTKVDKTVERKCCVECPPCPAPPVAGPSVFLFPPKPKDTLMISRTPEVTCVVVDVSHEDPEVQFNWYVDGMEVHNAKTKPREEQFNSTFRVVSVLTVVHQDWLNGKEYKCKVSNKGLPAPIEKTISKTKGQPREPQVYTLPPSREEMTKNQVSLTCLVKGFYPSDIAVEWESNGQPENNYKTTPPMLDSDGSFFLYSKLTVDKSRWQQGNVFSCSVMHEALHNHYTQKSLSLSPG

SEQ ID NO: 12473 - protein, 440 aa, Artificial Sequence
  source: /note="Description of Artificial Sequence: Synthetic polypeptide"
QVQLVQSGAEVKKPGASVKVSCKASGYTFTDYYMHWVRQAPGQGLEWMGRVNPYRGSTTYNQKFEGRVTMTTDTSTSTAYMELRSLRSDDTAVYYCARANILDYWGQGTTVTVSSASTKGPSVFPLAPCSRSTSESTAALGCLVKDYFPEPVTVSWNSGALTSGVHTFPAVLQSSGLYSLSSVVTVPSSNFGTQTYTCNVDHKPSNTKVDKTVERKCCVECPPCPAPPVAGPSVFLFPPKPKDTLMISRTPEVTCVVVDVSHEDPEVQFNWYVDGMEVHNAKTKPREEQFNSTFRVVSVLTVVHQDWLNGKEYKCKVSNKGLPAPIEKTISKTKGQPREPQVYTLPPSREEMTKNQVSLTCLVKGFYPSDIAVEWESNGQPENNYKTTPPMLDSDGSFFLYSKLTVDKSRWQQGNVFSCSVMHEALHNHYTQKSLSLSPG

SEQ ID NO: 12474 - protein, 447 aa, Artificial Sequence; identical to SEQ ID NO: 12436
  source: /note="Description of Artificial Sequence: Synthetic polypeptide"

SEQ ID NO: 12475 - protein, 447 aa, Artificial Sequence; identical to SEQ ID NO: 12437
  source: /note="Description of Artificial Sequence: Synthetic polypeptide"

SEQ ID NO: 12476 - protein, 447 aa, Artificial Sequence; identical to SEQ ID NO: 12438
  source: /note="Description of Artificial Sequence: Synthetic polypeptide"

SEQ ID NO: 12477 - protein, 118 aa, Mus musculus
EVKLVESGGGLVQPGGSLRLSCTTSGFTFTDYYMSWVRQSPGKALEWLTFIRNKANGYTTEYSASVKGRFTISRDNSQSILYLQMNTLRAEDSATYYCARDIPGFAYWGQGTLVTVSA

SEQ ID NO: 12478 - protein, 142 aa, Mus musculus
EVNLVESGGGLVQPGGSLRLSCATSGFTFTDNYMSWVRQPPGKALEWLGFIRNKANGYTTDYSASVRGRFTISRDNSQSILYLQMNALRAEDSATYYCARDVGSNYFDYWGQGTTLTVSSAKTTPPSVYPLAPGCGDTTGSS

SEQ ID NO: 12479 - protein, 467 aa, Mus musculus
MKLWLNWVFLVTLLNGFQCEVKLVESGGGLVQPGGSLRLSCTTSGFTFTDYYMSWVRQSPGKALEWLTFIRNKANGYTTEYSASVKGRFTISRDNSQSILYLQMNTLRAEDSATYYCARDIPGFAYWGQGTLVTVSAASTKGPSVFPLAPSSKSTSGGTAALGCLVKDYFPEPVTVSWNSGALTSGVHTFPAVLQSSGLYSLSSVVTVPSSSLGTQTYICNVNHKPSNTKVDKRVEPKSCDKTHTCPPCPAPELLGGPSVFLFPPKPKDTLMISRTPEVTCVVVDVSHEDPEVKFNWYVDGVEVHNAKTKPREEQYNSTYRVVSVLTVLHQDWLNGKEYKCKVSNKALPAPIEKTISKAKGQPREPQVYTLPPSREEMTKNQVSLTCLVKGFYPSDIAVEWESNGQPENNYKTTPPVLDSDGSFFLYSKLTVDKSRWQQGNVFSCSVMHEALHNHYTQKSLSLSPGK

SEQ ID NO: 12480 - protein, 469 aa, Mus musculus
MKMWLNWVFLVTLLNGIQCEVNLVESGGGLVQPGGSLRLSCATSGFTFTDNYMSWVRQPPGKALEWLGFIRNKANGYTTDYSASVRGRFTISRDNSQSILYLQMNALRAEDSATYYCARDVGSNYFDYWGQGTTLTVSSASTKGPSVFPLAPSSKSTSGGTAALGCLVKDYFPEPVTVSWNSGALTSGVHTFPAVLQSSGLYSLSSVVTVPSSSLGTQTYICNVNHKPSNTKVDKRVEPKSCDKTHTCPPCPAPELLGGPSVFLFPPKPKDTLMISRTPEVTCVVVDVSHEDPEVKFNWYVDGVEVHNAKTKPREEQYNSTYRVVSVLTVLHQDWLNGKEYKCKVSNKALPAPIEKTISKAKGQPREPQVYTLPPSREEMTKNQVSLTCLVKGFYPSDIAVEWESNGQPENNYKTTPPVLDSDGSFFLYSKLTVDKSRWQQGNVFSCSVMHEALHNHYTQKSLSLSPGK

SEQ ID NO: 12481 - protein, 134 aa, Mus musculus
MRVLILLWLFTAFPGVLSDVQLQESGPSLVKPSQSLSLTCTVTGYSITSDFAWNWIRQFPGNKLEWMGYISYSGNTRYNPSLKSRISITRDTSKNQFFLQLNSVTIEDTATYYCVTAGRGFPYWGQGTLVTVSA

SEQ ID NO: 12482 - protein, 116 aa, Mus musculus
DVQLQESGPSLVKPSQSLSLTCTVTGYSITSDYAWNWIRQFPGNKLEWMGYISYSANTRYNPSLKSRISITRDTSKNQFFLQLNSVTTEDTATYYCATAGRGFPYWGQGTLVTVSA

SEQ ID NO: 12483 - protein, 116 aa, Mus musculus
DVQLQGSGPSLVKPSQSLSLTCTVTGYSITSDYAWNWIRQFPGNKLEWMGYISYSGNTRYNPSLRSRISITRDTSKNQFFLQLNSVTTEDTATYYCATAGRGFPYWGQGTLVTVSA

SEQ ID NO: 12484 - protein, 330 aa, Artificial Sequence
  source: /note="Description of Artificial Sequence: Synthetic polypeptide"
ASTKGPSVFPLAPSSKSTSGGTAALGCLVKDYFPEPVTVSWNSGALTSGVHTFPAVLQSSGLYSLSSVVTVPSSSLGTQTYICNVNHKPSNTKVDKKVEPKSCDKTHTCPPCPAPELLGGPSVFLFPPKPKDTLMISRTPEVTCVVVDVSHEDPEVKFNWYVDGVEVHNAKTKPREEQYNSTYRVVSVLTVLHQDWLNGKEYKCKVSNKALPAPIEKTISKAKGQPREPQVYTLPPSRDECTKNQVSLTCLVKGFYPSDIAVEWESNGQPENNYKTTPPVLDSDGSFFLYSKLTVDKSRWQQGNVFSCSVMHEALHNHYTQKSLSLSPGK

SEQ ID NO: 12485 - protein, 465 aa, Artificial Sequence
  source: /note="Description of Artificial Sequence: Synthetic polypeptide"
MDWTWRILFLVAAATGVHSQVQLQESGPGLVKPSQTLSLTCTVSGYSISSDFAWNWIRQPPGKGLEWMGYISYSGNTRYQPSLKSRITISRDTSKNQFFLKLNSVTAADTATYYCVTAGRGFPYWGQGTLVTVSSASTKGPSVFPLAPSSKSTSGGTAALGCLVKDYFPEPVTVSWNSGALTSGVHTFPAVLQSSGLYSLSSVVTVPSSSLGTQTYICNVNHKPSNTKVDKKVEPKSCDKTHTCPPCPAPELLGGPSVFLFPPKPKDTLMISRTPEVTCVVVDVSHEDPEVKFNWYVDGVEVHNAKTKPREEQYNSTYRVVSVLTVLHQDWLNGKEYKCKVSNKALPAPIEKTISKAKGQPREPQVYTLPPSRDECTKNQVSLTCLVKGFYPSDIAVEWESNGQPENNYKTTPPVLDSDGSFFLYSKLTVDKSRWQQGNVFSCSVMHEALHNHYTQKSLSLSPGK

SEQ ID NO: 12486 - protein, 449 aa, Homo sapiens
  MOD_RES (58)..(58): Any amino acid
  MOD_RES (101)..(103): Any amino acid
  MOD_RES (105)..(105): Any amino acid
QVQLKQSGPGLVQPSQSLSITCTVSGFSLTNYGVHWVRQSPGKGLEWLGVIWSGGNTXYNTPFTSRLSINKDNSKSQVFFKMNSLQSNDTAIYYCARALTXXXYXFAYWGQGTLVTVSAASTKGPSVFPLAPSSKSTSGGTAALGCLVKDYFPEPVTVSWNSGALTSGVHTFPAVLQSSGLYSLSSVVTVPSSSLGTQTYICNVNHKPSNTKVDKRVEPKSCDKTHTCPPCPAPELLGGPSVFLFPPKPKDTLMISRTPEVTCVVVDVSHEDPEVKFNWYVDGVEVHNAKTKPREEQYNSTYRVVSVLTVLHQDWLNGKEYKCKVSNKALPAPIEKTISKAKGQPREPQVYTLPPSRDELTKNQVSLTCLVKGFYPSDIAVEWESNGQPENNYKTTPPVLDSDGSFFLYSKLTVDKSRWQQGNVFSCSVMHEALHNHYTQKSLSLSPGK

SEQ ID NO: 12487 - protein, 468 aa, Homo sapiens
MDWTWRILFLVAAATGTHAQVQLKQSGPGLVQPSQSLSITCTVSGFSLTNYGVHWVRQSPGKGLEWLGVIWSGGNTDYNTPFTSRLSINKDNSKSQVFFKMNSLQSNDTAIYYCARALTAYDYEFAYWGQGTLVTVSAASTKGPSVFPLAPSSKSTSGGTAALGCLVKDYFPEPVTVSWNSGALTSGVHTFPAVLQSSGLYSLSSVVTVPSSSLGTQTYICNVNHKPSNTKVDKRVEPKSCDKTHTCPPCPAPELLGGPSVFLFPPKPKDTLMISRTPEVTCVVVDVSHEDPEVKFNWYVDGVEVHNAKTKPREEQYNSTYRVVSVLTVLHQDWLNGKEYKCKVSNKALPAPIEKTISKAKGQPREPQVYTLPPSRDELTKNQVSLTCLVKGFYPSDIAVEWESNGQPENNYKTTPPVLDSDGSFFLYSKLTVDKSRWQQGNVFSCSVMHEALHNHYTQKSLSLSPGK

SEQ ID NO: 12488 - protein, 468 aa, Homo sapiens
MDWTWRILFLVAAATGTHAQVQLKQSGPGLVQPSQSLSITCTVSGFSLTNYGVHWVRQSPGKGLEWLGVIWSGGNTDYNTPFTSRLSINKDNSKSQVFFKMNSLQSNDTAIYYCARALTYADYEFAYWGQGTLVTVSAASTKGPSVFPLAPSSKSTSGGTAALGCLVKDYFPEPVTVSWNSGALTSGVHTFPAVLQSSGLYSLSSVVTVPSSSLGTQTYICNVNHKPSNTKVDKRVEPKSCDKTHTCPPCPAPELLGGPSVFLFPPKPKDTLMISRTPEVTCVVVDVSHEDPEVKFNWYVDGVEVHNAKTKPREEQYNSTYRVVSVLTVLHQDWLNGKEYKCKVSNKALPAPIEKTISKAKGQPREPQVYTLPPSRDELTKNQVSLTCLVKGFYPSDIAVEWESNGQPENNYKTTPPVLDSDGSFFLYSKLTVDKSRWQQGNVFSCSVMHEALHNHYTQKSLSLSPGK

SEQ ID NO: 12489 - protein, 468 aa, Homo sapiens
MDWTWRILFLVAAATGTHAQVQLKQSGPGLVQPSQSLSITCTVSGFSLTNYGVHWVRQSPGKGLEWLGVIWSGGNTDYNTPFTSRLSINKDNSKSQVFFKMNSLQSNDTAIYYCARALTYYNYEFAYWGQGTLVTVSAASTKGPSVFPLAPSSKSTSGGTAALGCLVKDYFPEPVTVSWNSGALTSGVHTFPAVLQSSGLYSLSSVVTVPSSSLGTQTYICNVNHKPSNTKVDKRVEPKSCDKTHTCPPCPAPELLGGPSVFLFPPKPKDTLMISRTPEVTCVVVDVSHEDPEVKFNWYVDGVEVHNAKTKPREEQYNSTYRVVSVLTVLHQDWLNGKEYKCKVSNKALPAPIEKTISKAKGQPREPQVYTLPPSRDELTKNQVSLTCLVKGFYPSDIAVEWESNGQPENNYKTTPPVLDSDGSFFLYSKLTVDKSRWQQGNVFSCSVMHEALHNHYTQKSLSLSPGK

SEQ ID NO: 12490 - protein, 468 aa, Homo sapiens
MDWTWRILFLVAAATGTHAQVQLKQSGPGLVQPSQSLSITCTVSGFSLTNYGVHWVRQSPGKGLEWLGVIWSGGNTNYNTPFTSRLSINKDNSKSQVFFKMNSLQSNDTAIYYCARALTYYNYEFAYWGQGTLVTVSAASTKGPSVFPLAPSSKSTSGGTAALGCLVKDYFPEPVTVSWNSGALTSGVHTFPAVLQSSGLYSLSSVVTVPSSSLGTQTYICNVNHKPSNTKVDKRVEPKSCDKTHTCPPCPAPELLGGPSVFLFPPKPKDTLMISRTPEVTCVVVDVSHEDPEVKFNWYVDGVEVHNAKTKPREEQYNSTYRVVSVLTVLHQDWLNGKEYKCKVSNKALPAPIEKTISKAKGQPREPQVYTLPPSRDELTKNQVSLTCLVKGFYPSDIAVEWESNGQPENNYKTTPPVLDSDGSFFLYSKLTVDKSRWQQGNVFSCSVMHEALHNHYTQKSLSLSPGK

SEQ ID NO: 12491 - protein, 468 aa, Homo sapiens
MDWTWRILFLVAAATGTHAQVQLKQSGPGLVQPSQSLSITCTVSGFSLTNYGVHWVRQSPGKGLEWLGVIWSGGNTNYNTPFTSRLSINKDNSKSQVFFKMNSLQSNDTAIYYCARALTYYNYQFAYWGQGTLVTVSAASTKGPSVFPLAPSSKSTSGGTAALGCLVKDYFPEPVTVSWNSGALTSGVHTFPAVLQSSGLYSLSSVVTVPSSSLGTQTYICNVNHKPSNTKVDKRVEPKSCDKTHTCPPCPAPELLGGPSVFLFPPKPKDTLMISRTPEVTCVVVDVSHEDPEVKFNWYVDGVEVHNAKTKPREEQYNSTYRVVSVLTVLHQDWLNGKEYKCKVSNKALPAPIEKTISKAKGQPREPQVYTLPPSRDELTKNQVSLTCLVKGFYPSDIAVEWESNGQPENNYKTTPPVLDSDGSFFLYSKLTVDKSRWQQGNVFSCSVMHEALHNHYTQKSLSLSPGK

SEQ ID NO: 12492 - protein, 142 aa, Artificial Sequence
  source: /note="Description of Artificial Sequence: Synthetic polypeptide"
MGFGLSWLFLVAILKGVQCQVQLVQSGAEVKKPGASVKVSCKASGYTFTSYGINWVRQAPGQGLEWMGWISAYNGNTNYAQKLQGRVTMTTDTSTSTAYMELRSLRSDDTAVYYCARDSGGYGSGSVPFDPWGQGTLVTVSS

SEQ ID NO: 12493 - protein, 142 aa, Artificial Sequence
  source: /note="Description of Artificial Sequence: Synthetic polypeptide"
MGFGLSWLFLVAILKGVQCQVQLVQSGAEVKKPGASVKVSCKASGYTFTSYGINWVRQAPGQGLEWMGWISAYNGNTNYAQKLQGRVTMTTDTSTSTAYMELRSLRSDDTAVYYCARDLGGYGSGSVPFDPWGQGTLVTVSS

SEQ ID NO: 12494 - protein, 142 aa, Artificial Sequence
  source: /note="Description of Artificial Sequence: Synthetic polypeptide"
MGFGLSWLFLVAILKGVQCQVQLVQSGAEVKKPGASVKVSCKASGYTFTSYGINWVRQAPGQGLEWMGWISAYNGNTNYAQKLQGRVTMTTDTSTSTAYMELRSLRSDDTAVYYCARDGGPYGFGPPWFDPWGQGTLVTVSS

SEQ ID NO: 12495 - protein, 143 aa, Artificial Sequence
  source: /note="Description of Artificial Sequence: Synthetic polypeptide"
MGFGLSWLFLVAILKGVQCQVQLVQSGAEVKKPGASVKVSCKASGYTFTSYGISWVRQAPGQGLEWMGWISAYNGNTDYAQKLQGRVTMTTDTSTSTAYMELRSLRSDDTAVYYCARDLGGYGSGGVGYFDPWGRGTSVTVSS

SEQ ID NO: 12496 - protein, 143 aa, Artificial Sequence
  source: /note="Description of Artificial Sequence: Synthetic polypeptide"
MGFGLSWLFLVAILKGVQCQVQLVQSGAEVKKPGASVKVSCKASGYTFTSYGISWVRQAPGQGLEWMGWISAYNGNTNYAQKLQGRVTMTTDTSTSTAYMELRSLRSDDTAVYYCARDLGGYGSGGVGYFDPWGRGTLVTVSS

SEQ ID NO: 12497 - protein, 138 aa, Artificial Sequence
  source: /note="Description of Artificial Sequence: Synthetic polypeptide"
MGFGLSWLFLVAILKGVQCQVQLVQSGAEVKKPGSSVKVSCKASGGTFGSYAISWVRQAPGQGLEWMGSIIPIFGTANYAQKFQGRVTITADESTSTAYMELSSLRSEDTAVYYCARMGRGKVAFDIWGQGTMVTASS

SEQ ID NO: 12498 - protein, 138 aa, Artificial Sequence
  source: /note="Description of Artificial Sequence: Synthetic polypeptide"
MGFGLSWLFLVAILKGVQCQVQLVQSGAEVKKPGSSVKVSCKASGGTFGSYAISWVRQAPGQGLEWMGSIIPIFGTANYAQKFQGRVTITADESTSTAYMELSSLRSEDTAVYYCARMARGKVAFDIWGQGTMVTVSS

SEQ ID NO: 12499 - protein, 138 aa, Artificial Sequence
  source: /note="Description of Artificial Sequence: Synthetic polypeptide"
MGFGLSWLFLVAILKGVQCQVQLVQSGAEVKKPGSSVKVSCKASGGTFSSYAISWVRQAPGQGLEWMGSIIPIFGTANYAQKFQGRVTITADESTSTAYMELSSLRSEDTAVYYCARMVRGKVAFDIWGQGTMVTVSS

SEQ ID NO: 12500 - protein, 140 aa, Artificial Sequence
  source: /note="Description of Artificial Sequence: Synthetic polypeptide"
MGFGLSWLFLVAILKGVQCQVQLVQSGAEVKKPGSSVKVSCKASGGTFSSYAISWVRQAPGQGLEWMGSIIPIFGTANYAQKFQGRVTITADESTSTAYMELSSLRSEDTAVYYCARDPSVDLYWYFDLWGRGTLVTVSS

SEQ ID NO: 12501 - protein, 138 aa, Artificial Sequence
  source: /note="Description of Artificial Sequence: Synthetic polypeptide"
MGFGLSWLFLVAILKGVQCQVQLQESGPGLVKPSETLSLTCTVSGGSVNSGSYYWSWVRQPPGKGLWIGSIYYSGSTNYNPSLKSRVTISVDTSKNQFSLKLSSVTAADTAVYYCARDSPYYGYFDYWGQGTLVTVSS

SEQ ID NO: 12502 - protein, 139 aa, Artificial Sequence
  source: /note="Description of Artificial Sequence: Synthetic polypeptide"
MGFGLSWLFLVAILKGVQCQVQLQESGPGLVKPSETLSLTCTVSGGSVSSGSYYWSWIRQPPGKGLWIGRIYYSGSTNYNPSLKSRVTISVDTSKNQFSLKLSSVTAADTAVYYCAREPLYDSSGFQHWGQGTLVTVSS

SEQ ID NO: 12503 - protein, 118 aa, Artificial Sequence
  source: /note="Description of Artificial Sequence: Synthetic polypeptide"
LVTLKVCGPGILQPSQTLSLTCSFSGFSLSTSGMGVGWLRQPSGKSLEWLAHIWWDDDKRYNPALKSRLTISKDTSSNQVFLKIASVDTTDTATYYCARMGMTGYFDFWGQGTTLTVS

SEQ ID NO: 12504 - protein, 452 aa, Artificial Sequence; identical to SEQ ID NO: 9215
  source: /note="Description of Artificial Sequence: Synthetic polypeptide"

SEQ ID NO: 12505 - protein, 449 aa, Artificial Sequence
  source: /note="Description of Artificial Sequence: Synthetic polypeptide"
QVQLKQSGPGLVQPSQSLSITCTVSGFSLTNYGVHWVRQSPGKGLEWLGVIWSGGNTDYNTPFTSRLSINKDNSKSQVFFKMNSLQSNDTAIYYCARALTYYDYEFAYWGQGTLVTVSSASTKGPSVFPLAPSSKSTSGGTAALGCLVKDYFPEPVTVSWNSGALTSGVHTFPAVLQSSGLYSLSSVVTVPSSSLGTQTYICNVNHKPSNTKVDKKVEPKSCDKTHTCPPCPAPELLGGPSVFLFPPKPKDTLMISRTPEVTCVVVDVSHEDPEVKFNWYVDGVEVHNAKTKPREEQYNSTYRVVSVLTVLHQDWLNGKEYKCKVSNKALPAPIEKTISKAKGQPREPQVYTLPPSRDELTKNQVSLTCLVKGFYPSDIAVEWESNGQPENNYKTTPPVLDSDGSFFLYSKLTVDKSRWQQGNVFSCSVMHEALHNHYTQKSLSLSPGK

SEQ ID NO: 12506 - protein, 449 aa, Artificial Sequence
  source: /note="Description of Artificial Sequence: Synthetic polypeptide"
QVQLKQSGPGLVQPSQSLSITCTVSGFSLTNYGVHWVRQSPGKGLEWLGVIWSGGNTDYNTPFTSRLSINKDNSKSQVFFKMNSLQSNDTAIYYCARALTYYDYEFAYWGQGTLVTVSAASTKGPSVFPLAPSSKSTSGGTAALGCLVKDYFPEPVTVSWNSGALTSGVHTFPAVLQSSGLYSLSSVVTVPSSSLGTQTYICNVNHKPSNTKVDKRVEPKSCDKTHTCPPCPAPELLGGPSVFLFPPKPKDTLMISRTPEVTCVVVDVSHEDPEVKFNWYVDGVEVHNAKTKPREEQYNSTYRVVSVLTVLHQDWLNGKEYKCKVSNKALPAPIEKTISKAKGQPREPQVYTLPPSREEMTKNQVSLTCLVKGFYPSDIAVEWESNGQPENNYKTTPPVLDSDGSFFLYSKLTVDKSRWQQGNVFSCSVMHEALHNHYTQKSLSLSPGK

SEQ ID NO: 12507 - protein, 449 aa, Artificial Sequence
  source: /note="Description of Artificial Sequence: Synthetic polypeptide"
QVQLKQSGPGLVQPSQSLSITCTVSGFSLTNYGVHWVRQSPGKGLEWLGVIWSGGNTDYNTPFTSRLSINKDNSKSQVFFKMNSLQSNDTAIYYCARALTYYDDEFAYWGPGTLVTVSSASTKGPSVFPLAPSSKSTSGGTAALGCLVKDYFPEPVTVSWNSGALTSGVHTFPAVLQSSGLYSLSSVVTVPSSSLGTQTYICNVNHKPSNTKVDKKVEPKSCDKTHTCPPCPAPELLGGPSVFLFPPKPKDTLMISRTPEVTCVVVDVSHEDPEVKFNWYVDGVEVHNAKTKPREEQYNSTYRVVSVLTVLHQDWLNGKEYKCKVSNKALPAPIEKTISKAKGQPREPQVYTLPPSRDELTKNQVSLTCLVKGFYPSDIAVEWESNGQPENNYKTTPPVLDSDGSFFLYSKLTVDKSRWQQGNVFSCSVMHEALHNHYTQKSLSLSPGK

SEQ ID NO: 12508 - protein, 449 aa, Artificial Sequence
  source: /note="Description of Artificial Sequence: Synthetic polypeptide"
EVQLVQSGAEVKKPGATVKISCKVSGFSLTNYGVHWVRQATGQGLEWMGVIWSGGNTDYNTPFTSRFTISRDDSKNTAYLQMNSLKTEDTAVYYCARALTYYDDEFAYWGPGTLVTVSSASTKGPSVFPLAPSSKSTSGGTAALGCLVKDYFPEPVTVSWNSGALTSGVHTFPAVLQSSGLYSLSSVVTVPSSSLGTQTYICNVNHKPSNTKVDKKVEPKSCDKTHTCPPCPAPELLGGPSVFLFPPKPKDTLMISRTPEVTCVVVDVSHEDPEVKFNWYVDGVEVHNAKTKPREEQYNSTYRVVSVLTVLHQDWLNGKEYKCKVSNKALPAPIEKTISKAKGQPREPQVYTLPPSRDELTKNQVSLTCLVKGFYPSDIAVEWESNGQPENNYKTTPPVLDSDGSFFLYSKLTVDKSRWQQGNVFSCSVMHEALHNHYTQKSLSLSPGK

SEQ ID NO: 12509 - protein, 449 aa, Artificial Sequence
  source: /note="Description of Artificial Sequence: Synthetic polypeptide"
EVQLVQSGAEVKKPGATVKISCKVSGFSLTNYGVHWVRQATGQGLEWMGVIWSGGNTDYNTPFTSRFTISRDDSKNTAYLQMNSLKTEDTAVYYCARALTYYDDEFAYWGQGTLVTVSSASTKGPSVFPLAPSSKSTSGGTAALGCLVKDYFPEPVTVSWNSGALTSGVHTFPAVLQSSGLYSLSSVVTVPSSSLGTQTYICNVNHKPSNTKVDKKVEPKSCDKTHTCPPCPAPELLGGPSVFLFPPKPKDTLMISRTPEVTCVVVDVSHEDPEVKFNWYVDGVEVHNAKTKPREEQYNSTYRVVSVLTVLHQDWLNGKEYKCKVSNKALPAPIEKTISKAKGQPREPQVYTLPPSRDELTKNQVSLTCLVKGFYPSDIAVEWESNGQPENNYKTTPPVLDSDGSFFLYSKLTVDKSRWQQGNVFSCSVMHEALHNHYTQKSLSLSPGK

SEQ ID NO: 12510 - protein, 449 aa, Artificial Sequence
  source: /note="Description of Artificial Sequence: Synthetic polypeptide"
EVQLVQSGAEVKKPGATVKISCKVSGFSLTNYGVHWVRQATGQGLEWMGVIWSGGNTDYNTPFTSRFTISRDDSKNTAYLQMNSLKTEDTAVYYCARALTYYDEEFAYWGQGTLVTVSSASTKGPSVFPLAPSSKSTSGGTAALGCLVKDYFPEPVTVSWNSGALTSGVHTFPAVLQSSGLYSLSSVVTVPSSSLGTQTYICNVNHKPSNTKVDKKVEPKSCDKTHTCPPCPAPELLGGPSVFLFPPKPKDTLMISRTPEVTCVVVDVSHEDPEVKFNWYVDGVEVHNAKTKPREEQYNSTYRVVSVLTVLHQDWLNGKEYKCKVSNKALPAPIEKTISKAKGQPREPQVYTLPPSRDELTKNQVSLTCLVKGFYPSDIAVEWESNGQPENNYKTTPPVLDSDGSFFLYSKLTVDKSRWQQGNVFSCSVMHEALHNHYTQKSLSLSPGK

SEQ ID NO: 12511 - protein, 449 aa, Artificial Sequence
  source: /note="Description of Artificial Sequence: Synthetic polypeptide"
EVQLVQSGAEVKKPGATVKISCKVSGFSLFNYGVHWVRQATGQGLEWMGVIWSGGNTDYNTPFTSRFTISRDDSKNTAYLQMNSLKTEDTAVYYCARALTYYDDEFAYWGPGTLVTVSSASTKGPSVFPLAPSSKSTSGGTAALGCLVKDYFPEPVTVSWNSGALTSGVHTFPAVLQSSGLYSLSSVVTVPSSSLGTQTYICNVNHKPSNTKVDKKVEPKSCDKTHTCPPCPAPELLGGPSVFLFPPKPKDTLMISRTPEVTCVVVDVSHEDPEVKFNWYVDGVEVHNAKTKPREEQYNSTYRVVSVLTVLHQDWLNGKEYKCKVSNKALPAPIEKTISKAKGQPREPQVYTLPPSRDELTKNQVSLTCLVKGFYPSDIAVEWESNGQPENNYKTTPPVLDSDGSFFLYSKLTVDKSRWQQGNVFSCSVMHEALHNHYTQKSLSLSPGK

SEQ ID NO: 12512 - protein, 449 aa, Artificial Sequence
  source: /note="Description of Artificial Sequence: Synthetic polypeptide"
QVQLKQSGPGLVQPSQSLSITCTVSGFSLTNYGVHWVRQSPGKGLEWLGVIWSGGNTDYNTPFTSRLSINKDNSKSQVFFKMNSLQSNDTAIYYCARALTYYDDEFAYWGQGTLVTVSSASTKGPSVFPLAPSSKSTSGGTAALGCLVKDYFPEPVTVSWNSGALTSGVHTFPAVLQSSGLYSLSSVVTVPSSSLGTQTYICNVNHKPSNTKVDKKVEPKSCDKTHTCPPCPAPELLGGPSVFLFPPKPKDTLMISRTPEVTCVVVDVSHEDPEVKFNWYVDGVEVHNAKTKPREEQYNSTYRVVSVLTVLHQDWLNGKEYKCKVSNKALPAPIEKTISKAKGQPREPQVYTLPPSRDELTKNQVSLTCLVKGFYPSDIAVEWESNGQPENNYKTTPPVLDSDGSFFLYSKLTVDKSRWQQGNVFSCSVMHEALHNHYTQKSLSLSPGK

SEQ ID NO: 12513 - protein, 449 aa, Artificial Sequence
  source: /note="Description of Artificial Sequence: Synthetic polypeptide"
QVQLKQSGPGLVQPSQSLSITCTVSGFSLTNYGVHWVRQSPGKGLEWLGVIWSGGNTDYNTPFTSRLSINKDNSKSQVFFKMNSLQSNDTAIYYCARALTYYDEEFAYWGQGTLVTVSSASTKGPSVFPLAPSSKSTSGGTAALGCLVKDYFPEPVTVSWNSGALTSGVHTFPAVLQSSGLYSLSSVVTVPSSSLGTQTYICNVNHKPSNTKVDKKVEPKSCDKTHTCPPCPAPELLGGPSVFLFPPKPKDTLMISRTPEVTCVVVDVSHEDPEVKFNWYVDGVEVHNAKTKPREEQYNSTYRVVSVLTVLHQDWLNGKEYKCKVSNKALPAPIEKTISKAKGQPREPQVYTLPPSRDELTKNQVSLTCLVKGFYPSDIAVEWESNGQPENNYKTTPPVLDSDGSFFLYSKLTVDKSRWQQGNVFSCSVMHEALHNHYTQKSLSLSPGK

SEQ ID NO: 12514 - protein, 449 aa, Artificial Sequence
  source: /note="Description of Artificial Sequence: Synthetic polypeptide"
QVQLKQSGPGLVQPSQSLSITCTVSGFSLTNYGVHWVRQSPGKGLEWLGVIWSGGNTDYNTPFTSRLSINKDNSKSQVFFKMNSLQSNDTAIYYCARALTYYDEEFAYWGPGTLVTVSSASTKGPSVFPLAPSSKSTSGGTAALGCLVKDYFPEPVTVSWNSGALTSGVHTFPAVLQSSGLYSLSSVVTVPSSSLGTQTYICNVNHKPSNTKVDKKVEPKSCDKTHTCPPCPAPELLGGPSVFLFPPKPKDTLMISRTPEVTCVVVDVSHEDPEVKFNWYVDGVEVHNAKTKPREEQYNSTYRVVSVLTVLHQDWLNGKEYKCKVSNKALPAPIEKTISKAKGQPREPQVYTLPPSRDELTKNQVSLTCLVKGFYPSDIAVEWESNGQPENNYKTTPPVLDSDGSFFLYSKLTVDKSRWQQGNVFSCSVMHEALHNHYTQKSLSLSPGK

SEQ ID NO: 12515 - protein, 449 aa, Artificial Sequence
  source: /note="Description of Artificial Sequence: Synthetic polypeptide"
QVQLKQSGPGLVQPSQSLSITCTVCGFSLTNYGVHWVRQSPGKGLEWLGVIWSGGNTDYNTPFTSRLSINKDNSKSQVFFKMNSLQSNDTAIYYCARALTYYDEEFAYWGQGTLVTVSSASTKGPSVFPLAPSSKSTSGGTAALGCLVKDYFPEPVTVSWNSGALTSGVHTFPAVLQSSGLYSLSSVVTVPSSSLGTQTYICNVNHKPSNTKVDKKVEPKSCDKTHTCPPCPAPELLGGPSVFLFPPKPKDTLMISRTPEVTCVVVDVSHEDPEVKFNWYVDGVEVHNAKTKPREEQYNSTYRVVSVLTVLHQDWLNGKEYKCKVSNKALPAPIEKTISKAKGQPREPQVYTLPPSRDELTKNQVSLTCLVKGFYPSDIAVEWESNGQPENNYKTTPPVLDSDGSFFLYSKLTVDKSRWQQGNVFSCSVMHEALHNHYTQKSLSLSPGK

SEQ ID NO: 12516 - protein, 449 aa, Artificial Sequence
  source: /note="Description of Artificial Sequence: Synthetic polypeptide"
QVQLKQSGPGLVQPSQSLSITCTVSGFSLTNYGVHWVRQSPGKGLEWLGVIWGGGNTDYNTPFTSRLSINKDNSKSQVFFKMNSLQSNDTAIYYCARALTYYDEEFAYWGQGTLVTVSSASTKGPSVFPLAPSSKSTSGGTAALGCLVKDYFPEPVTVSWNSGALTSGVHTFPAVLQSSGLYSLSSVVTVPSSSLGTQTYICNVNHKPSNTKVDKKVEPKSCDKTHTCPPCPAPELLGGPSVFLFPPKPKDTLMISRTPEVTCVVVDVSHEDPEVKFNWYVDGVEVHNAKTKPREEQYNSTYRVVSVLTVLHQDWLNGKEYKCKVSNKALPAPIEKTISKAKGQPREPQVYTLPPSRDELTKNQVSLTCLVKGFYPSDIAVEWESNGQPENNYKTTPPVLDSDGSFFLYSKLTVDKSRWQQGNVFSCSVMHEALHNHYTQKSLSLSPGK

SEQ ID NO: 12517 - protein, 449 aa, Artificial Sequence
  source: /note="Description of Artificial Sequence: Synthetic polypeptide"
QVQLKQSGPGLVQPSQSLSITCTVSGFSLTNYGVHWVRQSPGKGLEWLGVIWGGGNTDYNTPFTSRLSINKDNSKSQVFFKMNSLQSNDTAIYYCARALTYYDEEFAYWGPGTLVTVSSASTKGPSVFPLAPSSKSTSGGTAALGCLVKDYFPEPVTVSWNSGALTSGVHTFPAVLQSSGLYSLSSVVTVPSSSLGTQTYICNVNHKPSNTKVDKKVEPKSCDKTHTCPPCPAPELLGGPSVFLFPPKPKDTLMISRTPEVTCVVVDVSHEDPEVKFNWYVDGVEVHNAKTKPREEQYNSTYRVVSVLTVLHQDWLNGKEYKCKVSNKALPAPIEKTISKAKGQPREPQVYTLPPSRDELTKNQVSLTCLVKGFYPSDIAVEWESNGQPENNYKTTPPVLDSDGSFFLYSKLTVDKSRWQQGNVFSCSVMHEALHNHYTQKSLSLSPGK

SEQ ID NO: 12518 - protein, 449 aa, Artificial Sequence
  source: /note="Description of Artificial Sequence: Synthetic polypeptide"
QVQLKQSGPGLVQPSQSLSITCTVVGFSLTNYGVHWVRQSPGKGLEWLGVIWSGGNTDYNTPFTSRLSINKDNSKSQVFFKMNSLQSNDTAIYYCARALTYYDEEFAYWGQGTLVTVSSASTKGPSVFPLAPSSKSTSGGTAALGCLVKDYFPEPVTVSWNSGALTSGVHTFPAVLQSSGLYSLSSVVTVPSSSLGTQTYICNVNHKPSNTKVDKKVEPKSCDKTHTCPPCPAPELLGGPSVFLFPPKPKDTLMISRTPEVTCVVVDVSHEDPEVKFNWYVDGVEVHNAKTKPREEQYNSTYRVVSVLTVLHQDWLNGKEYKCKVSNKALPAPIEKTISKAKGQPREPQVYTLPPSRDELTKNQVSLTCLVKGFYPSDIAVEWESNGQPENNYKTTPPVLDSDGSFFLYSKLTVDKSRWQQGNVFSCSVMHEALHNHYTQKSLSLSPGK

SEQ ID NO: 12519 - protein, 449 aa, Artificial Sequence
  source: /note="Description of Artificial Sequence: Synthetic polypeptide"
QVQLKQSGPGLVQPSQSLSITCTVVGFSLTNYGVHWVRQSPGKGLEWLGVIWSGGNTDYNTPFTSRLSINKDNSKSQVFFKMNSLQSNDTAIYYCARALTYYDEEFAYWGPGTLVTVSSASTKGPSVFPLAPSSKSTSGGTAALGCLVKDYFPEPVTVSWNSGALTSGVHTFPAVLQSSGLYSLSSVVTVPSSSLGTQTYICNVNHKPSNTKVDKKVEPKSCDKTHTCPPCPAPELLGGPSVFLFPPKPKDTLMISRTPEVTCVVVDVSHEDPEVKFNWYVDGVEVHNAKTKPREEQYNSTYRVVSVLTVLHQDWLNGKEYKCKVSNKALPAPIEKTISKAKGQPREPQVYTLPPSRDELTKNQVSLTCLVKGFYPSDIAVEWESNGQPENNYKTTPPVLDSDGSFFLYSKLTVDKSRWQQGNVFSCSVMHEALHNHYTQKSLSLSPGK

SEQ ID NO: 12520 - protein, 449 aa, Artificial Sequence
  source: /note="Description of Artificial Sequence: Synthetic polypeptide"
QVQLKQSGPGLVQPSQSLSITCTVVGFSLTNYGVHWVRQSPGKGLEWLGVIWGGGNTDYNTPFTSRLSINKDNSKSQVFFKMNSLQSNDTAIYYCARALTYYDEEFAYWGQGTLVTVSSASTKGPSVFPLAPSSKSTSGGTAALGCLVKDYFPEPVTVSWNSGALTSGVHTFPAVLQSSGLYSLSSVVTVPSSSLGTQTYICNVNHKPSNTKVDKKVEPKSCDKTHTCPPCPAPELLGGPSVFLFPPKPKDTLMISRTPEVTCVVVDVSHEDPEVKFNWYVDGVEVHNAKTKPREEQYNSTYRVVSVLTVLHQDWLNGKEYKCKVSNKALPAPIEKTISKAKGQPREPQVYTLPPSRDELTKNQVSLTCLVKGFYPSDIAVEWESNGQPENNYKTTPPVLDSDGSFFLYSKLTVDKSRWQQGNVFSCSVMHEALHNHYTQKSLSLSPGK

SEQ ID NO: 12521 - protein, 449 aa, Artificial Sequence
  source: /note="Description of Artificial Sequence: Synthetic polypeptide"
QVQLKQSGPGLVQPSQSLSITCTVVGFSLTNYGVHWVRQSPGKGLEWLGVIWGGGNTDYNTPFTSRLSINKDNSKSQVFFKMNSLQSNDTAIYYCARALTYYDEEFAYWGPGTLVTVSSASTKGPSVFPLAPSSKSTSGGTAALGCLVKDYFPEPVTVSWNSGALTSGVHTFPAVLQSSGLYSLSSVVTVPSSSLGTQTYICNVNHKPSNTKVDKKVEPKSCDKTHTCPPCPAPELLGGPSVFLFPPKPKDTLMISRTPEVTCVVVDVSHEDPEVKFNWYVDGVEVHNAKTKPREEQYNSTYRVVSVLTVLHQDWLNGKEYKCKVSNKALPAPIEKTISKAKGQPREPQVYTLPPSRDELTKNQVSLTCLVKGFYPSDIAVEWESNGQPENNYKTTPPVLDSDGSFFLYSKLTVDKSRWQQGNVFSCSVMHEALHNHYTQKSLSLSPGK

SEQ ID NO: 12522 - protein, 119 aa, Artificial Sequence
  source: /note="Description of Artificial Sequence: Synthetic polypeptide"
QVQLKQSGPGLVQPSQSLSITCTVVGFSLTNYGVHWVRQSPGKGLEWLGVIWGGGNTDYNTPFTSRLSINKDNSKSQVFFKMNSLQSNDTAIYYCARALTYYDEEFAYWGPGTLVTVSS

SEQ ID NO: 12523 - protein, 119 aa, Artificial Sequence
  source: /note="Description of Artificial Sequence: Synthetic polypeptide"
QVQLKQSGPGLVQPSQSLSITCTVVGFSLTNYGVHWVRQSPGKGLEWLGVIWGGGNTDYNTPFTSRLSINKDNSKSQVFFKMNSLQSNDTAIYYCARALTYYDEEFAYWGPGTLVTVSA

SEQ ID NO: 12524 - protein, 449 aa, Artificial Sequence
  source: /note="Description of Artificial Sequence: Synthetic polypeptide"
QVQLKQSGPGLVQPSQSLSITCTVSGFSLFNYGVHWVRQSPGKGLEWLGVIWSGGNTDYNTPFTSRLSINKDNSKSQVFFKMNSLQSNDTAIYYCARALTYYDEEFAYWGQGTLVTVSSASTKGPSVFPLAPSSKSTSGGTAALGCLVKDYFPEPVTVSWNSGALTSGVHTFPAVLQSSGLYSLSSVVTVPSSSLGTQTYICNVNHKPSNTKVDKKVEPKSCDKTHTCPPCPAPELLGGPSVFLFPPKPKDTLMISRTPEVTCVVVDVSHEDPEVKFNWYVDGVEVHNAKTKPREEQYNSTYRVVSVLTVLHQDWLNGKEYKCKVSNKALPAPIEKTISKAKGQPREPQVYTLPPSRDELTKNQVSLTCLVKGFYPSDIAVEWESNGQPENNYKTTPPVLDSDGSFFLYSKLTVDKSRWQQGNVFSCSVMHEALHNHYTQKSLSLSPGK

SEQ ID NO: 12525 - protein, 449 aa, Artificial Sequence
  source: /note="Description of Artificial Sequence: Synthetic polypeptide"
QVQLKQSGPGLVQPSQSLSITCTVSGFSLFNYGVHWVRQSPGKGLEWLGVIWSGGNTDYNTPFTSRLSINKDNSKSQVFFKMNSLQSNDTAIYYCARALTYYDEEFAYWGPGTLVTVSSASTKGPSVFPLAPSSKSTSGGTAALGCLVKDYFPEPVTVSWNSGALTSGVHTFPAVLQSSGLYSLSSVVTVPSSSLGTQTYICNVNHKPSNTKVDKKVEPKSCDKTHTCPPCPAPELLGGPSVFLFPPKPKDTLMISRTPEVTCVVVDVSHEDPEVKFNWYVDGVEVHNAKTKPREEQYNSTYRVVSVLTVLHQDWLNGKEYKCKVSNKALPAPIEKTISKAKGQPREPQVYTLPPSRDELTKNQVSLTCLVKGFYPSDIAVEWESNGQPENNYKTTPPVLDSDGSFFLYSKLTVDKSRWQQGNVFSCSVMHEALHNHYTQKSLSLSPGK

SEQ ID NO: 12526 - protein, 449 aa, Artificial Sequence
  source: /note="Description of Artificial Sequence: Synthetic polypeptide"
QVQLKQSGPGLVQPSQSLSITCTVSGFSLFNYGVHWVRQSPGKGLEWLGVIWGGGNTDYNTPFTSRLSINKDNSKSQVFFKMNSLQSNDTAIYYCARALTYYDEEFAYWGQGTLVTVSSASTKGPSVFPLAPSSKSTSGGTAALGCLVKDYFPEPVTVSWNSGALTSGVHTFPAVLQSSGLYSLSSVVTVPSSSLGTQTYICNVNHKPSNTKVDKKVEPKSCDKTHTCPPCPAPELLGGPSVFLFPPKPKDTLMISRTPEVTCVVVDVSHEDPEVKFNWYVDGVEVHNAKTKPREEQYNSTYRVVSVLTVLHQDWLNGKEYKCKVSNKALPAPIEKTISKAKGQPREPQVYTLPPSRDELTKNQVSLTCLVKGFYPSDIAVEWESNGQPENNYKTTPPVLDSDGSFFLYSKLTVDKSRWQQGNVFSCSVMHEALHNHYTQKSLSLSPGK

SEQ ID NO: 12527 - protein, 449 aa, Artificial Sequence
  source: /note="Description of Artificial Sequence: Synthetic polypeptide"
QVQLKQSGPGLVQPSQSLSITCTVSGFSLFNYGVHWVRQSPGKGLEWLGVIWGGGNTDYNTPFTSRLSINKDNSKSQVFFKMNSLQSNDTAIYYCARALTYYDEEFAYWGPGTLVTVSSASTKGPSVFPLAPSSKSTSGGTAALGCLVKDYFPEPVTVSWNSGALTSGVHTFPAVLQSSGLYSLSSVVTVPSSSLGTQTYICNVNHKPSNTKVDKKVEPKSCDKTHTCPPCPAPELLGGPSVFLFPPKPKDTLMISRTPEVTCVVVDVSHEDPEVKFNWYVDGVEVHNAKTKPREEQYNSTYRVVSVLTVLHQDWLNGKEYKCKVSNKALPAPIEKTISKAKGQPREPQVYTLPPSRDELTKNQVSLTCLVKGFYPSDIAVEWESNGQPENNYKTTPPVLDSDGSFFLYSKLTVDKSRWQQGNVFSCSVMHEALHNHYTQKSLSLSPGK

SEQ ID NO: 12528 - protein, 119 aa, Artificial Sequence
  source: /note="Description of Artificial Sequence: Synthetic polypeptide"
QVQLKQSGPGLVQPSQSLSITCTVSGFSLFNYGVHWVRQSPGKGLEWLGVIWGGGNTDYNTPFTSRLSINKDNSKSQVFFKMNSLQSNDTAIYYCARALTYYDEEFAYWGPGTLVTVSS

SEQ ID NO: 12529 - protein, 119 aa, Artificial Sequence
  source: /note="Description of Artificial Sequence: Synthetic polypeptide"
QVQLKQSGPGLVQPSQSLSITCTVSGFSLFNYGVHWVRQSPGKGLEWLGVIWGGGNTDYNTPFTSRLSINKDNSKSQVFFKMNSLQSNDTAIYYCARALTYYDEEFAYWGPGTLVTVSA

SEQ ID NO: 12530 - protein, 449 aa, Artificial Sequence
  source: /note="Description of Artificial Sequence: Synthetic polypeptide"
QVQLKQSGPGLVQPSQSLSITCTVSGFSLTNYGVHWVRQSPGKGLEWLGVIWSGGNTDYNTPFTSRLSINKLNSKSQVFFKMNSLQSNDTAIYYCARALTYYDEEFAYWGQGTLVTVSSASTKGPSVFPLAPSSKSTSGGTAALGCLVKDYFPEPVTVSWNSGALTSGVHTFPAVLQSSGLYSLSSVVTVPSSSLGTQTYICNVNHKPSNTKVDKKVEPKSCDKTHTCPPCPAPELLGGPSVFLFPPKPKDTLMISRTPEVTCVVVDVSHEDPEVKFNWYVDGVEVHNAKTKPREEQYNSTYRVVSVLTVLHQDWLNGKEYKCKVSNKALPAPIEKTISKAKGQPREPQVYTLPPSRDELTKNQVSLTCLVKGFYPSDIAVEWESNGQPENNYKTTPPVLDSDGSFFLYSKLTVDKSRWQQGNVFSCSVMHEALHNHYTQKSLSLSPGK

SEQ ID NO: 12531 - protein, 449 aa, Artificial Sequence
  source: /note="Description of Artificial Sequence: Synthetic polypeptide"
QVQLKQSGPGLVQPSQSLSITCTVSGFSLTNYGVHWVRQSPGKGLEWLGVIWSGGNTDYNTPFTSRLSINKLNSKSQVFFKMNSLQSNDTAIYYCARALTYYDEEFAYWGPGTLVTVSSASTKGPSVFPLAPSSKSTSGGTAALGCLVKDYFPEPVTVSWNSGALTSGVHTFPAVLQSSGLYSLSSVVTVPSSSLGTQTYICNVNHKPSNTKVDKKVEPKSCDKTHTCPPCPAPELLGGPSVFLFPPKPKDTLMISRTPEVTCVVVDVSHEDPEVKFNWYVDGVEVHNAKTKPREEQYNSTYRVVSVLTVLHQDWLNGKEYKCKVSNKALPAPIEKTISKAKGQPREPQVYTLPPSRDELTKNQVSLTCLVKGFYPSDIAVEWESNGQPENNYKTTPPVLDSDGSFFLYSKLTVDKSRWQQGNVFSCSVMHEALHNHYTQKSLSLSPGK

SEQ ID NO: 12532 - protein, 449 aa, Artificial Sequence
  source: /note="Description of Artificial Sequence: Synthetic polypeptide"
QVQLKQSGPGLVQPSQSLSITCTVSGFSLTNYGVHWVRQSPGKGLEWLGVIWGGGNTDYNTPFTSRLSINKLNSKSQVFFKMNSLQSNDTAIYYCARALTYYDEEFAYWGQGTLVTVSSASTKGPSVFPLAPSSKSTSGGTAALGCLVKDYFPEPVTVSWNSGALTSGVHTFPAVLQSSGLYSLSSVVTVPSSSLGTQTYICNVNHKPSNTKVDKKVEPKSCDKTHTCPPCPAPELLGGPSVFLFPPKPKDTLMISRTPEVTCVVVDVSHEDPEVKFNWYVDGVEVHNAKTKPREEQYNSTYRVVSVLTVLHQDWLNGKEYKCKVSNKALPAPIEKTISKAKGQPREPQVYTLPPSRDELTKNQVSLTCLVKGFYPSDIAVEWESNGQPENNYKTTPPVLDSDGSFFLYSKLTVDKSRWQQGNVFSCSVMHEALHNHYTQKSLSLSPGK

SEQ ID NO: 12533 - protein, 449 aa, Artificial Sequence
  source: /note="Description of Artificial Sequence: Synthetic polypeptide"
QVQLKQSGPGLVQPSQSLSITCTVSGFSLTNYGVHWVRQSPGKGLEWLGVIWGGGNTDYNTPFTSRLSINKLNSKSQVFFKMNSLQSNDTAIYYCARALTYYDEEFAYWGPGTLVTVSSASTKGPSVFPLAPSSKSTSGGTAALGCLVKDYFPEPVTVSWNSGALTSGVHTFPAVLQSSGLYSLSSVVTVPSSSLGTQTYICNVNHKPSNTKVDKKVEPKSCDKTHTCPPCPAPELLGGPSVFLFPPKPKDTLMISRTPEVTCVVVDVSHEDPEVKFNWYVDGVEVHNAKTKPREEQYNSTYRVVSVLTVLHQDWLNGKEYKCKVSNKALPAPIEKTISKAKGQPREPQVYTLPPSRDELTKNQVSLTCLVKGFYPSDIAVEWESNGQPENNYKTTPPVLDSDGSFFLYSKLTVDKSRWQQGNVFSCSVMHEALHNHYTQKSLSLSPGK

SEQ ID NO: 12534 - protein, 119 aa, Artificial Sequence
  source: /note="Description of Artificial Sequence: Synthetic polypeptide"
QVQLKQSGPGLVQPSQSLSITCTVSGFSLTNYGVHWVRQSPGKGLEWLGVIWGGGNTDYNTPFTSRLSINKLNSKSQVFFKMNSLQSNDTAIYYCARALTYYDEEFAYWGPGTLVTVSS

SEQ ID NO: 12535 - protein, 119 aa, Artificial Sequence
  source: /note="Description of Artificial Sequence: Synthetic polypeptide"
QVQLKQSGPGLVQPSQSLSITCTVSGFSLTNYGVHWVRQSPGKGLEWLGVIWGGGNTDYNTPFTSRLSINKLNSKSQVFFKMNSLQSNDTAIYYCARALTYYDEEFAYWGPGTLVTVSA

SEQ ID NO: 12536 - protein, 449 aa, Artificial Sequence
  source: /note="Description of Artificial Sequence: Synthetic polypeptide"
QVQLQQSGPGLVKPSQTLSLTCAISGFSLTNYGVHWIRQPPGKGLEWIGVIWSGGNTDYNTPFTSRFTISRDDSKNTAYLQMNSLKTEDTAVYYCARALTYYDEEFAYWGPGTLVTVSSASTKGPSVFPLAPSSKSTSGGTAALGCLVKDYFPEPVTVSWNSGALTSGVHTFPAVLQSSGLYSLSSVVTVPSSSLGTQTYICNVNHKPSNTKVDKKVEPKSCDKTHTCPPCPAPELLGGPSVFLFPPKPKDTLMISRTPEVTCVVVDVSHEDPEVKFNWYVDGVEVHNAKTKPREEQYNSTYRVVSVLTVLHQDWLNGKEYKCKVSNKALPAPIEKTISKAKGQPREPQVYTLPPSRDELTKNQVSLTCLVKGFYPSDIAVEWESNGQPENNYKTTPPVLDSDGSFFLYSKLTVDKSRWQQGNVFSCSVMHEALHNHYTQKSLSLSPGK

SEQ ID NO: 12537 - protein, 449 aa, Artificial Sequence
  source: /note="Description of Artificial Sequence: Synthetic polypeptide"
EVQLVQSGAEVKKPGATVKISCKVSGFSLTNYGVHWVRQATGQGLEWMGVIWSGGNTDYNTPFTSRFTISRDDSKNTAYLQMNSLKTEDTAVYYCARALTYYDEEFAYWGPGTLVTVSSASTKGPSVFPLAPSSKSTSGGTAALGCLVKDYFPEPVTVSWNSGALTSGVHTFPAVLQSSGLYSLSSVVTVPSSSLGTQTYICNVNHKPSNTKVDKKVEPKSCDKTHTCPPCPAPELLGGPSVFLFPPKPKDTLMISRTPEVTCVVVDVSHEDPEVKFNWYVDGVEVHNAKTKPREEQYNSTYRVVSVLTVLHQDWLNGKEYKCKVSNKALPAPIEKTISKAKGQPREPQVYTLPPSRDELTKNQVSLTCLVKGFYPSDIAVEWESNGQPENNYKTTPPVLDSDGSFFLYSKLTVDKSRWQQGNVFSCSVMHEALHNHYTQKSLSLSPGK

SEQ ID NO: 12538 - protein, 449 aa, Artificial Sequence
  source: /note="Description of Artificial Sequence: Synthetic polypeptide"
EVQLVQSGAEVKKPGATVKISCKVSGFSLTNYGVHWIRQSPSRGLEWLGVIWSGGNTDYNTPFTSRLTISKDTSKNQVVLTMTNMDPVDTATYYCARALTYYDEEFAYWGPGTLVTVSSASTKGPSVFPLAPSSKSTSGGTAALGCLVKDYFPEPVTVSWNSGALTSGVHTFPAVLQSSGLYSLSSVVTVPSSSLGTQTYICNVNHKPSNTKVDKKVEPKSCDKTHTCPPCPAPELLGGPSVFLFPPKPKDTLMISRTPEVTCVVVDVSHEDPEVKFNWYVDGVEVHNAKTKPREEQYNSTYRVVSVLTVLHQDWLNGKEYKCKVSNKALPAPIEKTISKAKGQPREPQVYTLPPSRDELTKNQVSLTCLVKGFYPSDIAVEWESNGQPENNYKTTPPVLDSDGSFFLYSKLTVDKSRWQQGNVFSCSVMHEALHNHYTQKSLSLSPGK

SEQ ID NO: 12539 - protein, 449 aa, Artificial Sequence
  source: /note="Description of Artificial Sequence: Synthetic polypeptide"
EVQLVQSGAEVKKPGATVKISCKVSGFSLTNYGVHWIRQPPGKGLEWIGVIWSGGNTDYNTPFTSRFTISRDNAKNSLYLQMNSLRAEDTAVYYCARALTYYDEEFAYWGPGTLVTVSSASTKGPSVFPLAPSSKSTSGGTAALGCLVKDYFPEPVTVSWNSGALTSGVHTFPAVLQSSGLYSLSSVVTVPSSSLGTQTYICNVNHKPSNTKVDKKVEPKSCDKTHTCPPCPAPELLGGPSVFLFPPKPKDTLMISRTPEVTCVVVDVSHEDPEVKFNWYVDGVEVHNAKTKPREEQYNSTYRVVSVLTVLHQDWLNGKEYKCKVSNKALPAPIEKTISKAKGQPREPQVYTLPPSRDELTKNQVSLTCLVKGFYPSDIAVEWESNGQPENNYKTTPPVLDSDGSFFLYSKLTVDKSRWQQGNVFSCSVMHEALHNHYTQKSLSLSPGK

SEQ ID NO: 12540 - protein, 449 aa, Artificial Sequence
  source: /note="Description of Artificial Sequence: Synthetic polypeptide"
EVQLVQSGAEVKKPGATVKISCKVSGFSLFNYGVHWIRQPPGKGLEWIGVIWSGGNTDYNTPFTSRFTISRDNSKNTLYLQMNSLRAEDTAVYYCARALTYYDEEFAYWGPGTLVTVSSASTKGPSVFPLAPSSKSTSGGTAALGCLVKDYFPEPVTVSWNSGALTSGVHTFPAVLQSSGLYSLSSVVTVPSSSLGTQTYICNVNHKPSNTKVDKKVEPKSCDKTHTCPPCPAPELLGGPSVFLFPPKPKDTLMISRTPEVTCVVVDVSHEDPEVKFNWYVDGVEVHNAKTKPREEQYNSTYRVVSVLTVLHQDWLNGKEYKCKVSNKALPAPIEKTISKAKGQPREPQVYTLPPSRDELTKNQVSLTCLVKGFYPSDIAVEWESNGQPENNYKTTPPVLDSDGSFFLYSKLTVDKSRWQQGNVFSCSVMHEALHNHYTQKSLSLSPGK

SEQ ID NO: 12541 - protein, 449 aa, Artificial Sequence
  source: /note="Description of Artificial Sequence: Synthetic polypeptide"
EVQLVQSGAEVKKPGATVKISCKVSGFSLFNYGVHWVRQARGQRLEWIGVIWSGGNTDYNTPFTSRFTISRDDSKNTAYLQMNSLKTEDTAVYYCARALTYYDEEFAYWGPGTLVTVSSASTKGPSVFPLAPSSKSTSGGTAALGCLVKDYFPEPVTVSWNSGALTSGVHTFPAVLQSSGLYSLSSVVTVPSSSLGTQTYICNVNHKPSNTKVDKKVEPKSCDKTHTCPPCPAPELLGGPSVFLFPPKPKDTLMISRTPEVTCVVVDVSHEDPEVKFNWYVDGVEVHNAKTKPREEQYNSTYRVVSVLTVLHQDWLNGKEYKCKVSNKALPAPIEKTISKAKGQPREPQVYTLPPSRDELTKNQVSLTCLVKGFYPSDIAVEWESNGQPENNYKTTPPVLDSDGSFFLYSKLTVDKSRWQQGNVFSCSVMHEALHNHYTQKSLSLSPGK

SEQ ID NO: 12542 - protein, 449 aa, Artificial Sequence
  source: /note="Description of Artificial Sequence: Synthetic polypeptide"
EVQLVQSGAEVKKPGATVKISCKVSGFSLFNYGVHWVRQATGQGLEWMGVIWSGGNTDYNTPFTSRFTISRDDSKNTAYLQMNSLKTEDTAVYYCARALTYYDEEFAYWGPGTLVTVSSASTKGPSVFPLAPSSKSTSGGTAALGCLVKDYFPEPVTVSWNSGALTSGVHTFPAVLQSSGLYSLSSVVTVPSSSLGTQTYICNVNHKPSNTKVDKKVEPKSCDKTHTCPPCPAPELLGGPSVFLFPPKPKDTLMISRTPEVTCVVVDVSHEDPEVKFNWYVDGVEVHNAKTKPREEQYNSTYRVVSVLTVLHQDWLNGKEYKCKVSNKALPAPIEKTISKAKGQPREPQVYTLPPSRDELTKNQVSLTCLVKGFYPSDIAVEWESNGQPENNYKTTPPVLDSDGSFFLYSKLTVDKSRWQQGNVFSCSVMHEALHNHYTQKSLSLSPGK

SEQ ID NO: 12543 - protein, 449 aa, Artificial Sequence
  source: /note="Description of Artificial Sequence: Synthetic polypeptide"
QVQLQQSGPGLVKPSQTLSLTCAISGFSLFNYGVHWIRQSPSRGLEWLGVIWSGGNTDYNTPFTSRLTISKDTSKNQVVLTMTNMDPVDTATYYCARALTYYDEEFAYWGPGTLVTVSSASTKGPSVFPLAPSSKSTSGGTAALGCLVKDYFPEPVTVSWNSGALTSGVHTFPAVLQSSGLYSLSSVVTVPSSSLGTQTYICNVNHKPSNTKVDKKVEPKSCDKTHTCPPCPAPELLGGPSVFLFPPKPKDTLMISRTPEVTCVVVDVSHEDPEVKFNWYVDGVEVHNAKTKPREEQYNSTYRVVSVLTVLHQDWLNGKEYKCKVSNKALPAPIEKTISKAKGQPREPQVYTLPPSRDELTKNQVSLTCLVKGFYPSDIAVEWESNGQPENNYKTTPPVLDSDGSFFLYSKLTVDKSRWQQGNVFSCSVMHEALHNHYTQKSLSLSPGK

SEQ ID NO: 12544 - protein, 449 aa, Artificial Sequence; identical to SEQ ID NO: 12540
  source: /note="Description of Artificial Sequence: Synthetic polypeptide"

SEQ ID NO: 12545 - protein, 448 aa, Artificial Sequence
  source: /note="Description of Artificial Sequence: Synthetic polypeptide"
EVQLVQSGAEVKKPGATVKISCKVSGFSLFNYGVHWIRQSPSRGLEWLGVIWSGGNTDYNTPFTSRFTISRDNSKNTLYLQMNSLRAEDTAVYYCARALTYYDEEFAYWGPGTLVTVSSASTKGPSVFPLAPSSKSTSGGTAALGCLVKDYFPEPVTVSWNSGALTSGVHTFPAVLQSSGLYSLSSVVTVPSSSLGTQTYICNVNHKPSNTKVDKKVEPKSCDKTHTCPPCPAPELLGGPSVFLFPPKPKDTLMISRTPEVTCVVVDVSHEDPEVKFNWYVDGVEVHNAKTKPREEQYNSTYRVVSVLTVLHQDWLNGKEYKCKVSNKALPAPIEKTISKAKGQPREPQVYTLPPSRDELTKNQVSLTCLVKGFYPSDIAVEWESNGQPENNYKTTPPVLDSDGSFFLYSKLTVDKSRWQQGNVFSCSVMHEALHNHYTQKSLSLSPG

SEQ ID NO: 12546 - protein, 449 aa, Artificial Sequence
  source: /note="Description of Artificial Sequence: Synthetic polypeptide"
EVQLVQSGAEVKKPGATVKISCKVSGFSLFNYGVHWIRQPPGKGLEWIGVIWSGGNTDYNTPFTSRFTISRDDSKNTAYLQMNSLKTEDTAVYYCARALTYYDEEFAYWGPGTLVTVSSASTKGPSVFPLAPSSKSTSGGTAALGCLVKDYFPEPVTVSWNSGALTSGVHTFPAVLQSSGLYSLSSVVTVPSSSLGTQTYICNVNHKPSNTKVDKKVEPKSCDKTHTCPPCPAPELLGGPSVFLFPPKPKDTLMISRTPEVTCVVVDVSHEDPEVKFNWYVDGVEVHNAKTKPREEQYNSTYRVVSVLTVLHQDWLNGKEYKCKVSNKALPAPIEKTISKAKGQPREPQVYTLPPSRDELTKNQVSLTCLVKGFYPSDIAVEWESNGQPENNYKTTPPVLDSDGSFFLYSKLTVDKSRWQQGNVFSCSVMHEALHNHYTQKSLSLSPGK

SEQ ID NO: 12547 - protein, 449 aa, Artificial Sequence
  source: /note="Description of Artificial Sequence: Synthetic polypeptide"
QVQLKQSGPGLVQPSQSLSITCTVSGGSLTNYGVHWVRQSPGKGLEWLGVIWSGGNTDYNTPFTSRLSINKDNSKSQVFFKMNSLQSNDTAIYYCARALTYYDEEFAYWGQGTLVTVSSASTKGPSVFPLAPSSKSTSGGTAALGCLVKDYFPEPVTVSWNSGALTSGVHTFPAVLQSSGLYSLSSVVTVPSSSLGTQTYICNVNHKPSNTKVDKKVEPKSCDKTHTCPPCPAPELLGGPSVFLFPPKPKDTLMISRTPEVTCVVVDVSHEDPEVKFNWYVDGVEVHNAKTKPREEQYNSTYRVVSVLTVLHQDWLNGKEYKCKVSNKALPAPIEKTISKAKGQPREPQVYTLPPSRDELTKNQVSLTCLVKGFYPSDIAVEWESNGQPENNYKTTPPVLDSDGSFFLYSKLTVDKSRWQQGNVFSCSVMHEALHNHYTQKSLSLSPGK

SEQ ID NO: 12548 - protein, 449 aa, Artificial Sequence
  source: /note="Description of Artificial Sequence: Synthetic polypeptide"
QVQLKQSGPGLVQPSQSLSITCTVSGGSLTNYGVHWVRQSPGKGLEWLGVIWSGGNTDYNTPFTSRLSINKDNSKSQVFFKMNSLQSNDTAIYYCARALTYYDEEFAYWGPGTLVTVSSASTKGPSVFPLAPSSKSTSGGTAALGCLVKDYFPEPVTVSWNSGALTSGVHTFPAVLQSSGLYSLSSVVTVPSSSLGTQTYICNVNHKPSNTKVDKKVEPKSCDKTHTCPPCPAPELLGGPSVFLFPPKPKDTLMISRTPEVTCVVVDVSHEDPEVKFNWYVDGVEVHNAKTKPREEQYNSTYRVVSVLTVLHQDWLNGKEYKCKVSNKALPAPIEKTISKAKGQPREPQVYTLPPSRDELTKNQVSLTCLVKGFYPSDIAVEWESNGQPENNYKTTPPVLDSDGSFFLYSKLTVDKSRWQQGNVFSCSVMHEALHNHYTQKSLSLSPGK

SEQ ID NO: 12549 - protein, 449 aa, Artificial Sequence
  source: /note="Description of Artificial Sequence: Synthetic polypeptide"
QVQLKQSGPGLVQPSQSLSITCTVSGGSLTNYGVHWVRQSPGKGLEWLGVIWGGGNTDYNTPFTSRLSINKDNSKSQVFFKMNSLQSNDTAIYYCARALTYYDEEFAYWGQGTLVTVSSASTKGPSVFPLAPSSKSTSGGTAALGCLVKDYFPEPVTVSWNSGALTSGVHTFPAVLQSSGLYSLSSVVTVPSSSLGTQTYICNVNHKPSNTKVDKKVEPKSCDKTHTCPPCPAPELLGGPSVFLFPPKPKDTLMISRTPEVTCVVVDVSHEDPEVKFNWYVDGVEVHNAKTKPREEQYNSTYRVVSVLTVLHQDWLNGKEYKCKVSNKALPAPIEKTISKAKGQPREPQVYTLPPSRDELTKNQVSLTCLVKGFYPSDIAVEWESNGQPENNYKTTPPVLDSDGSFFLYSKLTVDKSRWQQGNVFSCSVMHEALHNHYTQKSLSLSPGK

SEQ ID NO: 12550 - protein, 449 aa, Artificial Sequence
  source: /note="Description of Artificial Sequence: Synthetic polypeptide"
QVQLKQSGPGLVQPSQSLSITCTVSGGSLTNYGVHWVRQSPGKGLEWLGVIWGGGNTDYNTPFTSRLSINKDNSKSQVFFKMNSLQSNDTAIYYCARALTYYDEEFAYWGPGTLVTVSSASTKGPSVFPLAPSSKSTSGGTAALGCLVKDYFPEPVTVSWNSGALTSGVHTFPAVLQSSGLYSLSSVVTVPSSSLGTQTYICNVNHKPSNTKVDKKVEPKSCDKTHTCPPCPAPELLGGPSVFLFPPKPKDTLMISRTPEVTCVVVDVSHEDPEVKFNWYVDGVEVHNAKTKPREEQYNSTYRVVSVLTVLHQDWLNGKEYKCKVSNKALPAPIEKTISKAKGQPREPQVYTLPPSRDELTKNQVSLTCLVKGFYPSDIAVEWESNGQPENNYKTTPPVLDSDGSFFLYSKLTVDKSRWQQGNVFSCSVMHEALHNHYTQKSLSLSPGK

SEQ ID NO: 12551 - protein, 119 aa, Artificial Sequence
  source: /note="Description of Artificial Sequence: Synthetic polypeptide"
QVQLKQSGPGLVQPSQSLSITCTVSGGSLTNYGVHWVRQSPGKGLEWLGVIWGGGNTDYNTPFTSRLSINKDNSKSQVFFKMNSLQSNDTAIYYCARALTYYDEEFAYWGPGTLVTVSS

SEQ ID NO: 12552 - protein, 119 aa, Artificial Sequence
  source: /note="Description of Artificial Sequence: Synthetic polypeptide"
QVQLKQSGPGLVQPSQSLSITCTVSGGSLTNYGVHWVRQSPGKGLEWLGVIWGGGNTDYNTPFTSRLSINKDNSKSQVFFKMNSLQSNDTAIYYCARALTYYDEEFAYWGPGTLVTVSA

SEQ ID NO: 12553 - protein, 449 aa, Artificial Sequence
  source: /note="Description of Artificial Sequence: Synthetic polypeptide"
QVQLKQSGPGLVQPSQSLSITCTVCGFSLTNYGVHWVRQSPGKGLEWLGVIWSGGNTDYNTPFTSRLSINKDNSKSQVFFKMNSLQSNDTAIYYCARALTYYDDEFAYWGQGTLVTVSSASTKGPSVFPLAPSSKSTSGGTAALGCLVKDYFPEPVTVSWNSGALTSGVHTFPAVLQSSGLYSLSSVVTVPSSSLGTQTYICNVNHKPSNTKVDKKVEPKSCDKTHTCPPCPAPELLGGPSVFLFPPKPKDTLMISRTPEVTCVVVDVSHEDPEVKFNWYVDGVEVHNAKTKPREEQYNSTYRVVSVLTVLHQDWLNGKEYKCKVSNKALPAPIEKTISKAKGQPREPQVYTLPPSRDELTKNQVSLTCLVKGFYPSDIAVEWESNGQPENNYKTTPPVLDSDGSFFLYSKLTVDKSRWQQGNVFSCSVMHEALHNHYTQKSLSLSPGK

SEQ ID NO: 12554 - protein, 449 aa, Artificial Sequence
  source: /note="Description of Artificial Sequence: Synthetic polypeptide"
QVQLKQSGPGLVQPSQSLSITCTVSGFSLTNYGVHWVRQSPGKGLEWLGVIWGGGNTDYNTPFTSRLSINKDNSKSQVFFKMNSLQSNDTAIYYCARALTYYDDEFAYWGQGTLVTVSSASTKGPSVFPLAPSSKSTSGGTAALGCLVKDYFPEPVTVSWNSGALTSGVHTFPAVLQSSGLYSLSSVVTVPSSSLGTQTYICNVNHKPSNTKVDKKVEPKSCDKTHTCPPCPAPELLGGPSVFLFPPKPKDTLMISRTPEVTCVVVDVSHEDPEVKFNWYVDGVEVHNAKTKPREEQYNSTYRVVSVLTVLHQDWLNGKEYKCKVSNKALPAPIEKTISKAKGQPREPQVYTLPPSRDELTKNQVSLTCLVKGFYPSDIAVEWESNGQPENNYKTTPPVLDSDGSFFLYSKLTVDKSRWQQGNVFSCSVMHEALHNHYTQKSLSLSPGK

SEQ ID NO: 12555 - protein, 449 aa, Artificial Sequence
  source: /note="Description of Artificial Sequence: Synthetic polypeptide"
QVQLKQSGPGLVQPSQSLSITCTVSGFSLTNYGVHWVRQSPGKGLEWLGVIWGGGNTDYNTPFTSRLSINKDNSKSQVFFKMNSLQSNDTAIYYCARALTYYDDEFAYWGPGTLVTVSSASTKGPSVFPLAPSSKSTSGGTAALGCLVKDYFPEPVTVSWNSGALTSGVHTFPAVLQSSGLYSLSSVVTVPSSSLGTQTYICNVNHKPSNTKVDKKVEPKSCDKTHTCPPCPAPELLGGPSVFLFPPKPKDTLMISRTPEVTCVVVDVSHEDPEVKFNWYVDGVEVHNAKTKPREEQYNSTYRVVSVLTVLHQDWLNGKEYKCKVSNKALPAPIEKTISKAKGQPREPQVYTLPPSRDELTKNQVSLTCLVKGFYPSDIAVEWESNGQPENNYKTTPPVLDSDGSFFLYSKLTVDKSRWQQGNVFSCSVMHEALHNHYTQKSLSLSPGK

SEQ ID NO: 12556 - protein, 449 aa, Artificial Sequence
  source: /note="Description of Artificial Sequence: Synthetic polypeptide"
QVQLKQSGPGLVQPSQSLSITCTVVGFSLTNYGVHWVRQSPGKGLEWLGVIWSGGNTDYNTPFTSRLSINKDNSKSQVFFKMNSLQSNDTAIYYCARALTYYDDEFAYWGQGTLVTVSSASTKGPSVFPLAPSSKSTSGGTAALGCLVKDYFPEPVTVSWNSGALTSGVHTFPAVLQSSGLYSLSSVVTVPSSSLGTQTYICNVNHKPSNTKVDKKVEPKSCDKTHTCPPCPAPELLGGPSVFLFPPKPKDTLMISRTPEVTCVVVDVSHEDPEVKFNWYVDGVEVHNAKTKPREEQYNSTYRVVSVLTVLHQDWLNGKEYKCKVSNKALPAPIEKTISKAKGQPREPQVYTLPPSRDELTKNQVSLTCLVKGFYPSDIAVEWESNGQPENNYKTTPPVLDSDGSFFLYSKLTVDKSRWQQGNVFSCSVMHEALHNHYTQKSLSLSPGK

SEQ ID NO: 12557 - protein, 449 aa, Artificial Sequence
  source: /note="Description of Artificial Sequence: Synthetic polypeptide"
QVQLKQSGPGLVQPSQSLSITCTVVGFSLTNYGVHWVRQSPGKGLEWLGVIWSGGNTDYNTPFTSRLSINKDNSKSQVFFKMNSLQSNDTAIYYCARALTYYDDEFAYWGPGTLVTVSSASTKGPSVFPLAPSSKSTSGGTAALGCLVKDYFPEPVTVSWNSGALTSGVHTFPAVLQSSGLYSLSSVVTVPSSSLGTQTYICNVNHKPSNTKVDKKVEPKSCDKTHTCPPCPAPELLGGPSVFLFPPKPKDTLMISRTPEVTCVVVDVSHEDPEVKFNWYVDGVEVHNAKTKPREEQYNSTYRVVSVLTVLHQDWLNGKEYKCKVSNKALPAPIEKTISKAKGQPREPQVYTLPPSRDELTKNQVSLTCLVKGFYPSDIAVEWESNGQPENNYKTTPPVLDSDGSFFLYSKLTVDKSRWQQGNVFSCSVMHEALHNHYTQKSLSLSPGK

SEQ ID NO: 12558 - protein, 449 aa, Artificial Sequence
  source: /note="Description of Artificial Sequence: Synthetic polypeptide"
QVQLKQSGPGLVQPSQSLSITCTVVGFSLTNYGVHWVRQSPGKGLEWLGVIWGGGNTDYNTPFTSRLSINKDNSKSQVFFKMNSLQSNDTAIYYCARALTYYDDEFAYWGQGTLVTVSSASTKGPSVFPLAPSSKSTSGGTAALGCLVKDYFPEPVTVSWNSGALTSGVHTFPAVLQSSGLYSLSSVVTVPSSSLGTQTYICNVNHKPSNTKVDKKVEPKSCDKTHTCPPCPAPELLGGPSVFLFPPKPKDTLMISRTPEVTCVVVDVSHEDPEVKFNWYVDGVEVHNAKTKPREEQYNSTYRVVSVLTVLHQDWLNGKEYKCKVSNKALPAPIEKTISKAKGQPREPQVYTLPPSRDELTKNQVSLTCLVKGFYPSDIAVEWESNGQPENNYKTTPPVLDSDGSFFLYSKLTVDKSRWQQGNVFSCSVMHEALHNHYTQKSLSLSPGK

SEQ ID NO: 12559 - protein, 449 aa, Artificial Sequence
  source: /note="Description of Artificial Sequence: Synthetic polypeptide"
QVQLKQSGPGLVQPSQSLSITCTVVGFSLTNYGVHWVRQSPGKGLEWLGVIWGGGNTDYNTPFTSRLSINKDNSKSQVFFKMNSLQSNDTAIYYCARALTYYDDEFAYWGPGTLVTVSSASTKGPSVFPLAPSSKSTSGGTAALGCLVKDYFPEPVTVSWNSGALTSGVHTFPAVLQSSGLYSLSSVVTVPSSSLGTQTYICNVNHKPSNTKVDKKVEPKSCDKTHTCPPCPAPELLGGPSVFLFPPKPKDTLMISRTPEVTCVVVDVSHEDPEVKFNWYVDGVEVHNAKTKPREEQYNSTYRVVSVLTVLHQDWLNGKEYKCKVSNKALPAPIEKTISKAKGQPREPQVYTLPPSRDELTKNQVSLTCLVKGFYPSDIAVEWESNGQPENNYKTTPPVLDSDGSFFLYSKLTVDKSRWQQGNVFSCSVMHEALHNHYTQKSLSLSPGK

SEQ ID NO: 12560 - protein, 449 aa, Artificial Sequence
  source: /note="Description of Artificial Sequence: Synthetic polypeptide"
QVQLKQSGPGLVQPSQSLSITCTVSGFSLFNYGVHWVRQSPGKGLEWLGVIWSGGNTDYNTPFTSRLSINKDNSKSQVFFKMNSLQSNDTAIYYCARALTYYDDEFAYWGQGTLVTVSSASTKGPSVFPLAPSSKSTSGGTAALGCLVKDYFPEPVTVSWNSGALTSGVHTFPAVLQSSGLYSLSSVVTVPSSSLGTQTYICNVNHKPSNTKVDKKVEPKSCDKTHTCPPCPAPELLGGPSVFLFPPKPKDTLMISRTPEVTCVVVDVSHEDPEVKFNWYVDGVEVHNAKTKPREEQYNSTYRVVSVLTVLHQDWLNGKEYKCKVSNKALPAPIEKTISKAKGQPREPQVYTLPPSRDELTKNQVSLTCLVKGFYPSDIAVEWESNGQPENNYKTTPPVLDSDGSFFLYSKLTVDKSRWQQGNVFSCSVMHEALHNHYTQKSLSLSPGK

SEQ ID NO: 12561 - protein, 449 aa, Artificial Sequence
  source: /note="Description of Artificial Sequence: Synthetic polypeptide"
QVQLKQSGPGLVQPSQSLSITCTVSGFSLFNYGVHWVRQSPGKGLEWLGVIWSGGNTDYNTPFTSRLSINKDNSKSQVFFKMNSLQSNDTAIYYCARALTYYDDEFAYWGPGTLVTVSSASTKGPSVFPLAPSSKSTSGGTAALGCLVKDYFPEPVTVSWNSGALTSGVHTFPAVLQSSGLYSLSSVVTVPSSSLGTQTYICNVNHKPSNTKVDKKVEPKSCDKTHTCPPCPAPELLGGPSVFLFPPKPKDTLMISRTPEVTCVVVDVSHEDPEVKFNWYVDGVEVHNAKTKPREEQYNSTYRVVSVLTVLHQDWLNGKEYKCKVSNKALPAPIEKTISKAKGQPREPQVYTLPPSRDELTKNQVSLTCLVKGFYPSDIAVEWESNGQPENNYKTTPPVLDSDGSFFLYSKLTVDKSRWQQGNVFSCSVMHEALHNHYTQKSLSLSPGK

SEQ ID NO: 12562 - protein, 449 aa, Artificial Sequence
  source: /note="Description of Artificial Sequence: Synthetic polypeptide"
QVQLKQSGPGLVQPSQSLSITCTVSGFSLFNYGVHWVRQSPGKGLEWLGVIWGGGNTDYNTPFTSRLSINKDNSKSQVFFKMNSLQSNDTAIYYCARALTYYDDEFAYWGQGTLVTVSSASTKGPSVFPLAPSSKSTSGGTAALGCLVKDYFPEPVTVSWNSGALTSGVHTFPAVLQSSGLYSLSSVVTVPSSSLGTQTYICNVNHKPSNTKVDKKVEPKSCDKTHTCPPCPAPELLGGPSVFLFPPKPKDTLMISRTPEVTCVVVDVSHEDPEVKFNWYVDGVEVHNAKTKPREEQYNSTYRVVSVLTVLHQDWLNGKEYKCKVSNKALPAPIEKTISKAKGQPREPQVYTLPPSRDELTKNQVSLTCLVKGFYPSDIAVEWESNGQPENNYKTTPPVLDSDGSFFLYSKLTVDKSRWQQGNVFSCSVMHEALHNHYTQKSLSLSPGK

SEQ ID NO: 12563 - protein, 449 aa, Artificial Sequence
  source: /note="Description of Artificial Sequence: Synthetic polypeptide"
QVQLKQSGPGLVQPSQSLSITCTVSGFSLFNYGVHWVRQSPGKGLEWLGVIWGGGNTDYNTPFTSRLSINKDNSKSQVFFKMNSLQSNDTAIYYCARALTYYDDEFAYWGPGTLVTVSSASTKGPSVFPLAPSSKSTSGGTAALGCLVKDYFPEPVTVSWNSGALTSGVHTFPAVLQSSGLYSLSSVVTVPSSSLGTQTYICNVNHKPSNTKVDKKVEPKSCDKTHTCPPCPAPELLGGPSVFLFPPKPKDTLMISRTPEVTCVVVDVSHEDPEVKFNWYVDGVEVHNAKTKPREEQYNSTYRVVSVLTVLHQDWLNGKEYKCKVSNKALPAPIEKTISKAKGQPREPQVYTLPPSRDELTKNQVSLTCLVKGFYPSDIAVEWESNGQPENNYKTTPPVLDSDGSFFLYSKLTVDKSRWQQGNVFSCSVMHEALHNHYTQKSLSLSPGK

SEQ ID NO: 12564 - protein, 449 aa, Artificial Sequence
  source: /note="Description of Artificial Sequence: Synthetic polypeptide"
QVQLKQSGPGLVQPSQSLSITCTVSGFSLTNYGVHWVRQSPGKGLEWLGVIWSGGNTDYNTPFTSRLSINKLNSKSQVFFKMNSLQSNDTAIYYCARALTYYDDEFAYWGQGTLVTVSSASTKGPSVFPLAPSSKSTSGGTAALGCLVKDYFPEPVTVSWNSGALTSGVHTFPAVLQSSGLYSLSSVVTVPSSSLGTQTYICNVNHKPSNTKVDKKVEPKSCDKTHTCPPCPAPELLGGPSVFLFPPKPKDTLMISRTPEVTCVVVDVSHEDPEVKFNWYVDGVEVHNAKTKPREEQYNSTYRVVSVLTVLHQDWLNGKEYKCKVSNKALPAPIEKTISKAKGQPREPQVYTLPPSRDELTKNQVSLTCLVKGFYPSDIAVEWESNGQPENNYKTTPPVLDSDGSFFLYSKLTVDKSRWQQGNVFSCSVMHEALHNHYTQKSLSLSPGK

SEQ ID NO: 12565 - protein, 449 aa, Artificial Sequence
  source: /note="Description of Artificial Sequence: Synthetic polypeptide"
QVQLKQSGPGLVQPSQSLSITCTVSGFSLTNYGVHWVRQSPGKGLEWLGVIWSGGNTDYNTPFTSRLSINKLNSKSQVFFKMNSLQSNDTAIYYCARALTYYDDEFAYWGPGTLVTVSSASTKGPSVFPLAPSSKSTSGGTAALGCLVKDYFPEPVTVSWNSGALTSGVHTFPAVLQSSGLYSLSSVVTVPSSSLGTQTYICNVNHKPSNTKVDKKVEPKSCDKTHTCPPCPAPELLGGPSVFLFPPKPKDTLMISRTPEVTCVVVDVSHEDPEVKFNWYVDGVEVHNAKTKPREEQYNSTYRVVSVLTVLHQDWLNGKEYKCKVSNKALPAPIEKTISKAKGQPREPQVYTLPPSRDELTKNQVSLTCLVKGFYPSDIAVEWESNGQPENNYKTTPPVLDSDGSFFLYSKLTVDKSRWQQGNVFSCSVMHEALHNHYTQKSLSLSPGK

SEQ ID NO: 12566 - protein, 449 aa, Artificial Sequence
  source: /note="Description of Artificial Sequence: Synthetic polypeptide"
QVQLKQSGPGLVQPSQSLSITCTVSGFSLTNYGVHWVRQSPGKGLEWLGVIWGGGNTDYNTPFTSRLSINKLNSKSQVFFKMNSLQSNDTAIYYCARALTYYDDEFAYWGQGTLVTVSSASTKGPSVFPLAPSSKSTSGGTAALGCLVKDYFPEPVTVSWNSGALTSGVHTFPAVLQSSGLYSLSSVVTVPSSSLGTQTYICNVNHKPSNTKVDKKVEPKSCDKTHTCPPCPAPELLGGPSVFLFPPKPKDTLMISRTPEVTCVVVDVSHEDPEVKFNWYVDGVEVHNAKTKPREEQYNSTYRVVSVLTVLHQDWLNGKEYKCKVSNKALPAPIEKTISKAKGQPREPQVYTLPPSRDELTKNQVSLTCLVKGFYPSDIAVEWESNGQPENNYKTTPPVLDSDGSFFLYSKLTVDKSRWQQGNVFSCSVMHEALHNHYTQKSLSLSPGK

SEQ ID NO: 12567 - protein, 449 aa, Artificial Sequence
  source: /note="Description of Artificial Sequence: Synthetic polypeptide"
QVQLKQSGPGLVQPSQSLSITCTVSGFSLTNYGVHWVRQSPGKGLEWLGVIWGGGNTDYNTPFTSRLSINKLNSKSQVFFKMNSLQSNDTAIYYCARALTYYDDEFAYWGPGTLVTVSSASTKGPSVFPLAPSSKSTSGGTAALGCLVKDYFPEPVTVSWNSGALTSGVHTFPAVLQSSGLYSLSSVVTVPSSSLGTQTYICNVNHKPSNTKVDKKVEPKSCDKTHTCPPCPAPELLGGPSVFLFPPKPKDTLMISRTPEVTCVVVDVSHEDPEVKFNWYVDGVEVHNAKTKPREEQYNSTYRVVSVLTVLHQDWLNGKEYKCKVSNKALPAPIEKTISKAKGQPREPQVYTLPPSRDELTKNQVSLTCLVKGFYPSDIAVEWESNGQPENNYKTTPPVLDSDGSFFLYSKLTVDKSRWQQGNVFSCSVMHEALHNHYTQKSLSLSPGK

SEQ ID NO: 12568 - protein, 449 aa, Artificial Sequence
  source: /note="Description of Artificial Sequence: Synthetic polypeptide"
QVQLKQSGPGLVQPSQSLSITCTVSGGSLTNYGVHWVRQSPGKGLEWLGVIWSGGNTDYNTPFTSRLSINKDNSKSQVFFKMNSLQSNDTAIYYCARALTYYDDEFAYWGQGTLVTVSSASTKGPSVFPLAPSSKSTSGGTAALGCLVKDYFPEPVTVSWNSGALTSGVHTFPAVLQSSGLYSLSSVVTVPSSSLGTQTYICNVNHKPSNTKVDKKVEPKSCDKTHTCPPCPAPELLGGPSVFLFPPKPKDTLMISRTPEVTCVVVDVSHEDPEVKFNWYVDGVEVHNAKTKPREEQYNSTYRVVSVLTVLHQDWLNGKEYKCKVSNKALPAPIEKTISKAKGQPREPQVYTLPPSRDELTKNQVSLTCLVKGFYPSDIAVEWESNGQPENNYKTTPPVLDSDGSFFLYSKLTVDKSRWQQGNVFSCSVMHEALHNHYTQKSLSLSPGK

SEQ ID NO: 12569 - protein, 449 aa, Artificial Sequence
  source: /note="Description of Artificial Sequence: Synthetic polypeptide"
QVQLKQSGPGLVQPSQSLSITCTVSGGSLTNYGVHWVRQSPGKGLEWLGVIWSGGNTDYNTPFTSRLSINKDNSKSQVFFKMNSLQSNDTAIYYCARALTYYDDEFAYWGPGTLVTVSSASTKGPSVFPLAPSSKSTSGGTAALGCLVKDYFPEPVTVSWNSGALTSGVHTFPAVLQSSGLYSLSSVVTVPSSSLGTQTYICNVNHKPSNTKVDKKVEPKSCDKTHTCPPCPAPELLGGPSVFLFPPKPKDTLMISRTPEVTCVVVDVSHEDPEVKFNWYVDGVEVHNAKTKPREEQYNSTYRVVSVLTVLHQDWLNGKEYKCKVSNKALPAPIEKTISKAKGQPREPQVYTLPPSRDELTKNQVSLTCLVKGFYPSDIAVEWESNGQPENNYKTTPPVLDSDGSFFLYSKLTVDKSRWQQGNVFSCSVMHEALHNHYTQKSLSLSPGK

SEQ ID NO: 12570 - protein, 449 aa, Artificial Sequence
  source: /note="Description of Artificial Sequence: Synthetic polypeptide"
QVQLKQSGPGLVQPSQSLSITCTVSGGSLTNYGVHWVRQSPGKGLEWLGVIWGGGNTDYNTPFTSRLSINKDNSKSQVFFKMNSLQSNDTAIYYCARALTYYDDEFAYWGQGTLVTVSSASTKGPSVFPLAPSSKSTSGGTAALGCLVKDYFPEPVTVSWNSGALTSGVHTFPAVLQSSGLYSLSSVVTVPSSSLGTQTYICNVNHKPSNTKVDKKVEPKSCDKTHTCPPCPAPELLGGPSVFLFPPKPKDTLMISRTPEVTCVVVDVSHEDPEVKFNWYVDGVEVHNAKTKPREEQYNSTYRVVSVLTVLHQDWLNGKEYKCKVSNKALPAPIEKTISKAKGQPREPQVYTLPPSRDELTKNQVSLTCLVKGFYPSDIAVEWESNGQPENNYKTTPPVLDSDGSFFLYSKLTVDKSRWQQGNVFSCSVMHEALHNHYTQKSLSLSPGK

SEQ ID NO: 12571 - protein, 449 aa, Artificial Sequence
  source: /note="Description of Artificial Sequence: Synthetic polypeptide"
QVQLKQSGPGLVQPSQSLSITCTVSGGSLTNYGVHWVRQSPGKGLEWLGVIWGGGNTDYNTPFTSRLSINKDNSKSQVFFKMNSLQSNDTAIYYCARALTYYDDEFAYWGPGTLVTVSSASTKGPSVFPLAPSSKSTSGGTAALGCLVKDYFPEPVTVSWNSGALTSGVHTFPAVLQSSGLYSLSSVVTVPSSSLGTQTYICNVNHKPSNTKVDKKVEPKSCDKTHTCPPCPAPELLGGPSVFLFPPKPKDTLMISRTPEVTCVVVDVSHEDPEVKFNWYVDGVEVHNAKTKPREEQYNSTYRVVSVLTVLHQDWLNGKEYKCKVSNKALPAPIEKTISKAKGQPREPQVYTLPPSRDELTKNQVSLTCLVKGFYPSDIAVEWESNGQPENNYKTTPPVLDSDGSFFLYSKLTVDKSRWQQGNVFSCSVMHEALHNHYTQKSLSLSPGK

SEQ ID NO: 12572 - protein, 449 aa, Artificial Sequence
  source: /note="Description of Artificial Sequence: Synthetic polypeptide"
QVQLQQSGPGLVKPSQTLSLTCAISGFSLTNYGVHWIRQPPGKGLEWIGVIWSGGNTDYNTPFTSRFTISRDDSKNTAYLQMNSLKTEDTAVYYCARALTYYDDEFAYWGPGTLVTVSSASTKGPSVFPLAPSSKSTSGGTAALGCLVKDYFPEPVTVSWNSGALTSGVHTFPAVLQSSGLYSLSSVVTVPSSSLGTQTYICNVNHKPSNTKVDKKVEPKSCDKTHTCPPCPAPELLGGPSVFLFPPKPKDTLMISRTPEVTCVVVDVSHEDPEVKFNWYVDGVEVHNAKTKPREEQYNSTYRVVSVLTVLHQDWLNGKEYKCKVSNKALPAPIEKTISKAKGQPREPQVYTLPPSRDELTKNQVSLTCLVKGFYPSDIAVEWESNGQPENNYKTTPPVLDSDGSFFLYSKLTVDKSRWQQGNVFSCSVMHEALHNHYTQKSLSLSPGK

SEQ ID NO: 12573 - protein, 449 aa, Artificial Sequence
  source: /note="Description of Artificial Sequence: Synthetic polypeptide"
EVQLVQSGAEVKKPGATVKISCKVSGFSLTNYGVHWIRQSPSRGLEWLGVIWSGGNTDYNTPFTSRLTISKDTSKNQVVLTMTNMDPVDTATYYCARALTYYDDEFAYWGPGTLVTVSSASTKGPSVFPLAPSSKSTSGGTAALGCLVKDYFPEPVTVSWNSGALTSGVHTFPAVLQSSGLYSLSSVVTVPSSSLGTQTYICNVNHKPSNTKVDKKVEPKSCDKTHTCPPCPAPELLGGPSVFLFPPKPKDTLMISRTPEVTCVVVDVSHEDPEVKFNWYVDGVEVHNAKTKPREEQYNSTYRVVSVLTVLHQDWLNGKEYKCKVSNKALPAPIEKTISKAKGQPREPQVYTLPPSRDELTKNQVSLTCLVKGFYPSDIAVEWESNGQPENNYKTTPPVLDSDGSFFLYSKLTVDKSRWQQGNVFSCSVMHEALHNHYTQKSLSLSPGK

SEQ ID NO: 12574 - protein, 449 aa, Artificial Sequence
  source: /note="Description of Artificial Sequence: Synthetic polypeptide"
EVQLVQSGAEVKKPGATVKISCKVSGFSLTNYGVHWIRQPPGKGLEWIGVIWSGGNTDYNTPFTSRFTISRDNAKNSLYLQMNSLRAEDTAVYYCARALTYYDDEFAYWGPGTLVTVSSASTKGPSVFPLAPSSKSTSGGTAALGCLVKDYFPEPVTVSWNSGALTSGVHTFPAVLQSSGLYSLSSVVTVPSSSLGTQTYICNVNHKPSNTKVDKKVEPKSCDKTHTCPPCPAPELLGGPSVFLFPPKPKDTLMISRTPEVTCVVVDVSHEDPEVKFNWYVDGVEVHNAKTKPREEQYNSTYRVVSVLTVLHQDWLNGKEYKCKVSNKALPAPIEKTISKAKGQPREPQVYTLPPSRDELTKNQVSLTCLVKGFYPSDIAVEWESNGQPENNYKTTPPVLDSDGSFFLYSKLTVDKSRWQQGNVFSCSVMHEALHNHYTQKSLSLSPGK

SEQ ID NO: 12575 - protein, 449 aa, Artificial Sequence
  source: /note="Description of Artificial Sequence: Synthetic polypeptide"
EVQLVQSGAEVKKPGATVKISCKVSGFSLFNYGVHWIRQPPGKGLEWIGVIWSGGNTDYNTPFTSRFTISRDNSKNTLYLQMNSLRAEDTAVYYCARALTYYDDEFAYWGPGTLVTVSSASTKGPSVFPLAPSSKSTSGGTAALGCLVKDYFPEPVTVSWNSGALTSGVHTFPAVLQSSGLYSLSSVVTVPSSSLGTQTYICNVNHKPSNTKVDKKVEPKSCDKTHTCPPCPAPELLGGPSVFLFPPKPKDTLMISRTPEVTCVVVDVSHEDPEVKFNWYVDGVEVHNAKTKPREEQYNSTYRVVSVLTVLHQDWLNGKEYKCKVSNKALPAPIEKTISKAKGQPREPQVYTLPPSRDELTKNQVSLTCLVKGFYPSDIAVEWESNGQPENNYKTTPPVLDSDGSFFLYSKLTVDKSRWQQGNVFSCSVMHEALHNHYTQKSLSLSPGK

SEQ ID NO: 12576 - protein, 449 aa, Artificial Sequence
  source: /note="Description of Artificial Sequence: Synthetic polypeptide"
EVQLVQSGAEVKKPGATVKISCKVSGFSLFNYGVHWVRQARGQRLEWIGVIWSGGNTDYNTPFTSRFTISRDDSKNTAYLQMNSLKTEDTAVYYCARALTYYDDEFAYWGPGTLVTVSSASTKGPSVFPLAPSSKSTSGGTAALGCLVKDYFPEPVTVSWNSGALTSGVHTFPAVLQSSGLYSLSSVVTVPSSSLGTQTYICNVNHKPSNTKVDKKVEPKSCDKTHTCPPCPAPELLGGPSVFLFPPKPKDTLMISRTPEVTCVVVDVSHEDPEVKFNWYVDGVEVHNAKTKPREEQYNSTYRVVSVLTVLHQDWLNGKEYKCKVSNKALPAPIEKTISKAKGQPREPQVYTLPPSRDELTKNQVSLTCLVKGFYPSDIAVEWESNGQPENNYKTTPPVLDSDGSFFLYSKLTVDKSRWQQGNVFSCSVMHEALHNHYTQKSLSLSPGK

SEQ ID NO: 12577 - protein, 449 aa, Artificial Sequence
  source: /note="Description of Artificial Sequence: Synthetic polypeptide"
QVQLQQSGPGLVKPSQTLSLTCAISGFSLFNYGVHWIRQSPSRGLEWLGVIWSGGNTDYNTPFTSRLTISKDTSKNQVVLTMTNMDPVDTATYYCARALTYYDDEFAYWGPGTLVTVSSASTKGPSVFPLAPSSKSTSGGTAALGCLVKDYFPEPVTVSWNSGALTSGVHTFPAVLQSSGLYSLSSVVTVPSSSLGTQTYICNVNHKPSNTKVDKKVEPKSCDKTHTCPPCPAPELLGGPSVFLFPPKPKDTLMISRTPEVTCVVVDVSHEDPEVKFNWYVDGVEVHNAKTKPREEQYNSTYRVVSVLTVLHQDWLNGKEYKCKVSNKALPAPIEKTISKAKGQPREPQVYTLPPSRDELTKNQVSLTCLVKGFYPSDIAVEWESNGQPENNYKTTPPVLDSDGSFFLYSKLTVDKSRWQQGNVFSCSVMHEALHNHYTQKSLSLSPGK

SEQ ID NO: 12578 - protein, 449 aa, Artificial Sequence; identical to SEQ ID NO: 12575
  source: /note="Description of Artificial Sequence: Synthetic polypeptide"

SEQ ID NO: 12579 - protein, 449 aa, Artificial Sequence
  source: /note="Description of Artificial Sequence: Synthetic polypeptide"
EVQLVQSGAEVKKPGATVKISCKVSGFSLFNYGVHWIRQSPSRGLEWLGVIWSGGNTDYNTPFTSRFTISRDNSKNTLYLQMNSLRAEDTAVYYCARALTYYDDEFAYWGPGTLVTVSSASTKGPSVFPLAPSSKSTSGGTAALGCLVKDYFPEPVTVSWNSGALTSGVHTFPAVLQSSGLYSLSSVVTVPSSSLGTQTYICNVNHKPSNTKVDKKVEPKSCDKTHTCPPCPAPELLGGPSVFLFPPKPKDTLMISRTPEVTCVVVDVSHEDPEVKFNWYVDGVEVHNAKTKPREEQYNSTYRVVSVLTVLHQDWLNGKEYKCKVSNKALPAPIEKTISKAKGQPREPQVYTLPPSRDELTKNQVSLTCLVKGFYPSDIAVEWESNGQPENNYKTTPPVLDSDGSFFLYSKLTVDKSRWQQGNVFSCSVMHEALHNHYTQKSLSLSPGK

SEQ ID NO: 12580 - protein, 449 aa, Artificial Sequence
  source: /note="Description of Artificial Sequence: Synthetic polypeptide"
EVQLVQSGAEVKKPGATVKISCKVSGFSLFNYGVHWIRQPPGKGLEWIGVIWSGGNTDYNTPFTSRFTISRDDSKNTAYLQMNSLKTEDTAVYYCARALTYYDDEFAYWGPGTLVTVSSASTKGPSVFPLAPSSKSTSGGTAALGCLVKDYFPEPVTVSWNSGALTSGVHTFPAVLQSSGLYSLSSVVTVPSSSLGTQTYICNVNHKPSNTKVDKKVEPKSCDKTHTCPPCPAPELLGGPSVFLFPPKPKDTLMISRTPEVTCVVVDVSHEDPEVKFNWYVDGVEVHNAKTKPREEQYNSTYRVVSVLTVLHQDWLNGKEYKCKVSNKALPAPIEKTISKAKGQPREPQVYTLPPSRDELTKNQVSLTCLVKGFYPSDIAVEWESNGQPENNYKTTPPVLDSDGSFFLYSKLTVDKSRWQQGNVFSCSVMHEALHNHYTQKSLSLSPGK

SEQ ID NO: 12581 - protein, 449 aa, Artificial Sequence
  source: /note="Description of Artificial Sequence: Synthetic polypeptide"
QVQLKQSGPGLVQPSQSLSITCTVSGFSLTNYGVHWVRQSPGKGLEWLGVIWSGGNTDYNTPFTSRLSINKDNSKSQVFFKMNSLQSQDTAIYYCARALTYYDYEFAYWGQGTLVTVSAASTKGPSVFPLAPSSKSTSGGTAALGCLVKDYFPEPVTVSWNSGALTSGVHTFPAVLQSSGLYSLSSVVTVPSSSLGTQTYICNVNHKPSNTKVDKKVEPKSCDKTHTCPPCPAPELLGGPSVFLFPPKPKDTLMISRTPEVTCVVVDVSHEDPEVKFNWYVDGVEVHNAKTKPREEQYNSTYRVVSVLTVLHQDWLNGKEYKCKVSNKALPAPIEKTISKAKGQPREPQVYTLPPSRDELTKNQVSLTCLVKGFYPSDIAVEWESNGQPENNYKTTPPVLDSDGSFFLYSKLTVDKSRWQQGNVFSCSVMHEALHNHYTQKSLSLSPGK

SEQ ID NO: 12582 - protein, 449 aa, Artificial Sequence
  source: /note="Description of Artificial Sequence: Synthetic polypeptide"
QVQLKQSGPGLVQPSQSLSITCTVSGFSLTNYGVHWVRQSPGKGLEWLGVIWSGGNTDYNTPFTSRLSINKDNSKSQVFFKMNSLQSNDTAIYYCARALTYYDYEFAYWGQGTLVTVSAASTKGPSVFPLAPSSKSTSGGTAALGCLVKDYFPEPVTVSWNSGALTSGVHTFPAVLQSSGLYSLSSVVTVPSSSLGTQTYICNVNHKPSNTKVDKKVEPKSCDKTHTCPPCPAPELLGGPSVFLFPPKPKDTLMISRTPEVTCVVVDVSHEDPEVKFNWYVDGVEVHNAKTKPREEQYNSTYRVVSVLTVLHQDWLNGKEYKCKVSNKALPAPIEKTISKAKGQPREPQVYTLPPSRDELTKNQVSLTCLVKGFYPSDIAVEWESNGQPENNYKTTPPVLDSDGSFFLYSKLTVDKSRWQQGNVFSCSVMHEALHNHYTQKSLSLSPGK

SEQ ID NO: 12583 - protein, 449 aa, Artificial Sequence
  source: /note="Description of Artificial Sequence: Synthetic polypeptide"
QVQLKQSGPGLVQPSQSLSITCTVSGFSLTNYGVHWVRQSPGKGLEWLGVIWSGGNTDYNTPFTSRLSINKDNSKSQVFFKMNSLQSQDTAIYYCARALTYYDYEFAYWGQGTLVTVSAASTKGPSVFPLAPSSKSTSGGTAALGCLVKDYFPEPVTVSWNSGALTSGVHTFPAVLQSSGLYSLSSVVTVPSSSLGTQTYICNVNHKPSNTKVDKKVEPKSCDKTHTCPPCPAPELLGGPSVFLFPPKPKDTLMISRTPEVTCVVVDVSHEDPEVKFNWYVDGVEVHNAKTKPREEQYASTYRVVSVLTVLHQDWLNGKEYKCKVSNKALPAPIEKTISKAKGQPREPQVYTLPPSRDELTKNQVSLTCLVKGFYPSDIAVEWESNGQPENNYKTTPPVLDSDGSFFLYSKLTVDKSRWQQGNVFSCSVMHEALHNHYTQKSLSLSPGK

SEQ ID NO: 12584 - protein, 118 aa, Mus sp.
EVQLVESGGGLVQPGGSLRLSCAASGFTFSSYAMSWVRQAPGKGLEWVSAITGTGGETYYADSVKGRFTISRDNSKNTLYLQMNSLRAEDTAVYYCARGWSWTGVDPWGQGTLVTVSS

SEQ ID NO: 12585 - protein, 470 aa, Artificial Sequence
  source: /note="Description of Artificial Sequence: Synthetic polypeptide"
MRVLILLWLFTAFPGILSDVQLQESGPGLVKPSQSLSLTCTVTGYSITSDYAWNWIRLFPGNKLEWMGFINYSGNTSYNPSLKSRISITRDTSKNQFFLKLNSLTTDDTATYYCARGGLSRFPYWGQGTLVTVSAAKTTAPSVYPLAPVCGGTTGSSVTLGCLVKGYFPEPVTLTWNSGSLSSGVHTFPALLQSGLYTLSSSVTVTSNTWPSQTITCNVAHPASSTKVDKKIEPRVPITQNPCPPLKECPPCAAPDLLGGPSVFIFPPKIKDVLMISLSPMVTCVVVDVSEDDPDVQISWFVNNVEVHTAQTQTHREDYNSTLRVVSALPIQHQDWMSGKEFKCKVNNRALPSPIEKTISKPRGPVRAPQVYVLPPPAEEMTKKEFSLTCMITGFLPAEIAVDWTSNGRTEQNYKNTATVLDSDGSYFMYSKLRVQKSTWERGSLFACSVVHEGLHNHLTTKTISRSLGK

SEQ ID NO: 12586 - protein, 475 aa, Artificial Sequence
  source: /note="Description of Artificial Sequence: Synthetic polypeptide"
VSRAATMDWTWRVFCLLAVAPGAHSQVKLLEQSGAEVKKPGASVKVSCKASGFSLTNYGVHWVRQAPGQRLEWMGVIWSGGNTDYNTPFTSRVTITRDTSATTAYMGLSSLRPEDTAVYYCARALTYYDYEFAYWGQGTLVTVSSASTKGPSVFPLAPSSKSTSGGTAALGCLVKDYFPEPVTVSWNSGALTSGVHTFPAVLQSSGLYSLSSVVTVPSSSLGTQTYICNVNHKPSNTKVDKKAEPKSCDKTHTCPPCPAPELLGGPSVFLFPPKPKDTLMISRTPEVTCVVVDVSHEDPEVKFNWYVDGVEVHNAKTKPREEQYNSTYRVVSVLTVLHQDWLNGKEYKCKVSNKALPAPIEKTISKAKGQPREPQVYTLPPSRDELTKNQVSLTCLVKGFYPSDIAVEWESNGQPENNYKTTPPVLDSDGSFFLYSKLTVDKSRWQQGNVFSCSVMHEALHNHYTQKSLSLSPGK

SEQ ID NO: 12587 - protein, 448 aa, Artificial Sequence
  source: /note="Description of Artificial Sequence: Synthetic polypeptide"
QVQLVQSGAEVAKPGASVKLSCKASGYTFTSYWMQWVKQRPGQGLECIGTIYPGDGDTTYTQKFQGKATLTADKSSSTAYMQLSSLRSEDSAVYYCARYDAPGYAMDYWGQGTLVTVSSASTKGPSVFPLAPSSKSTSGGTAALGCLVKDYFPEPVTVSWNSGALTSGVHTFPAVLQSSGLYSLSSVVTVPSSSLGTQTYICNVNHKPSNTKVDKKVEPKSCDKTHTCPPCPAPELLGGPSVFLFPPKPKDTLMISRTPEVTCVVVDVSHEDPEVKFNWYVDGVEVHNAKTKPREEQYNSTYRVVSVLTVLHQDWLNGKEYKCKVSNKALPAPIEKTISKAKGQPREPQVYTLPPSRDELTKNQVSLTCLVKGFYPSDIAVEWESNGQPENNYKTTPPVLDSDGSFFLYSKLTVDKSRWQQGNVFSCSVMHEALHNHYTQKSLSLSPG

SEQ ID NO: 12588 - protein, 448 aa, Artificial Sequence
  source: /note="Description of Artificial Sequence: Synthetic polypeptide"
QVQLVQSGAEVKKPGASVKVSCKASGYTFTSYWMQWVRQAPGQGLEWMGTIYPGDGDTTYTQKFKGRVTMTRDTSTSTVYMELSSLRSEDTAVYYCARYDAPGYAMDYWGQGTLVTVSSASTKGPSVFPLAPSSKSTSGGTAALGCLVKDYFPEPVTVSWNSGALTSGVHTFPAVLQSSGLYSLSSVVTVPSSSLGTQTYICNVNHKPSNTKVDKKVEPKSCDKTHTCPPCPAPELLGGPSVFLFPPKPKDTLMISRTPEVTCVVVDVSHEDPEVKFNWYVDGVEVHNAKTKPREEQYNSTYRVVSVLTVLHQDWLNGKEYKCKVSNKALPAPIEKTISKAKGQPREPQVYTLPPSRDELTKNQVSLTCLVKGFYPSDIAVEWESNGQPENNYKTTPPVLDSDGSFFLYSKLTVDKSRWQQGNVFSCSVMHEALHNHYTQKSLSLSPG

SEQ ID NO: 12589 - protein, 214 aa, Artificial Sequence
  source: /note="Description of Artificial Sequence: Synthetic polypeptide"
DIQMTQSPSSLSASVGDRVTITCRASQDINNYLAWYQHKPGKGPKLLIHYTSTLHPGIPSRFSGSGSGRDYSFSISSLEPEDIATYYCLQYDNLLYTFGQGTKLEIKRTVAAPSVFIFPPSDEQLKSGTASVVCLLNNFYPREAKVQWKVDNALQSGNSQESVTEQDSKDSTYSLSSTLTLSKADYEKHKVYACEVTHQGLSSPVTKSFNRGEC

SEQ ID NO: 12590 - protein, 214 aa, Artificial Sequence
  source: /note="Description of Artificial Sequence: Synthetic polypeptide"
DIQMTQSPSSLSASVGDRVTITCKASQDINNYLAWYQHKPGKGPKLLIHYTSTLHPGIPSRFSGSGSGRDYSFSISSLEPEDIATYYCLQYDNLLYTFGQGTKLEIKRTVAAPSVFIFPPSDEQLKSGTASVVCLLNNFYPREAKVQWKVDNALQSGNSQESVTEQDSKDSTYSLSSTLTLSKADYEKHKVYACEVTHQGLSSPVTKSFNRGEC

SEQ ID NO: 12591 - protein, 214 aa, Artificial Sequence
  source: /note="Description of Artificial Sequence: Synthetic polypeptide"
DIQMTQSPSSLSASVGDRVTITCRASQDINNYLAWYQQKPGKAPKLLIYYTSTLHPGVPSRFSGSGSGTDFTFTISSLQPEDIATYYCLQYDNLLYTFGQGTKVEIKRTVAAPSVFIFPPSDEQLKSGTASVVCLLNNFYPREAKVQWKVDNALQSGNSQESVTEQDSKDSTYSLSSTLTLSKADYEKHKVYACEVTHQGLSSPVTKSFNRGEC

SEQ ID NO: 12592 - protein, 445 aa, Artificial Sequence
  source: /note="Description of Artificial Sequence: Synthetic polypeptide"
QVQLVQSGAEVAKPGASVKLSCKASGYTFTSYWMQWVKQRPGQGLECIGTIYPGDGDTRYIQKFQGKATLTADKSSSTAYMQLSSLRSEDSAVYYCARYDAPGYAMDYWGQGTLVTVSSASTKGPSVFPLAPSSKSTSGGTAALGCLVKDYFPEPVTVSWNSGALTSGVHTFPAVLQSSGLYSLSSVVTVPSSSLGTQTYICNVNHKPSNTKVDKKVEPKSCDKTHTCPPCPAPELLGGPSVFLFPPKPKDTLMISRTPEVTCVVVDVSHEDPEVKFNWYVDGVEVHNAKTKPREEQYNSTYRVVSVLTVLHQDWLNGKEYKCKVSNKALPAPIEKTISKAKGQPREPQVYTLPPSRDELTKNQVSLTCLVKGFYPSDIAVEWESNGQPENNYKTTPPVLDSDGSFFLYSKLTVDKSRWQQGNVFSCSVMHEALHNHYTQKSLSL

SEQ ID NO: 12593 - protein, 214 aa, Artificial Sequence
  source: /note="Description of Artificial Sequence: Synthetic polypeptide"
DVQITQSPSSLAASVGERITINCRASQSISRYLAWYQEKPGKTNKLLIYSGSTLQSGIPSRFSGSGSGTDFTLTISSLEPEDFAMYYCQQHNEYPWTFGQGTKLEIKRTVAAPSVFIFPPSDEQLKSGTASVVCLLNNFYPREAKVQWKVDNALQSGNSQESVTEQDSKDSTYSLSSTLTLSKADYEKHKVYACEVTHQGLSSPVTKSFNRGEC

SEQ ID NO: 12594 - protein, 214 aa, Artificial Sequence
  source: /note="Description of Artificial Sequence: Synthetic polypeptide"
DVQITQSPSSLAASVGERITINCRASKSISKYLAWYQEKPGKTNKLLIYSGSTLQSGIPSRFSGSGSGTDFTLTISSLEPEDFAMYYCQQHNEYPWTFGQGTKLEIKRTVAAPSVFIFPPSDEQLKSGTASVVCLLNNFYPREAKVQWKVDNALQSGNSQESVTEQDSKDSTYSLSSTLTLSKADYEKHKVYACEVTHQGLSSPVTKSFNRGEC

SEQ ID NO: 12595 - protein, 448 aa, Artificial Sequence
  source: /note="Description of Artificial Sequence: Synthetic polypeptide"
QVQLVQSGAEVAKPGASVKLSCKASGYTFTSYWMQWVKQRPGQGLECIGALYPGDGDARYTQKFQGKATLTADTSSSTAYMQLSSLRSEDSAVYYCARYDAPGYAMDYWGQGTLVTVSSASTKGPSVFPLAPSSKSTSGGTAALGCLVKDYFPEPVTVSWNSGALTSGVHTFPAVLQSSGLYSLSSVVTVPSSSLGTQTYICNVNHKPSNTKVDKKVEPKSCDKTHTCPPCPAPELLGGPSVFLFPPKPKDTLMISRTPEVTCVVVDVSHEDPEVKFNWYVDGVEVHNAKTKPREEQYNSTYRVVSVLTVLHQDWLNGKEYKCKVSNKALPAPIEKTISKAKGQPREPQVYTLPPSRDELTKNQVSLTCLVKGFYPSDIAVEWESNGQPENNYKTTPPVLDSDGSFFLYSKLTVDKSRWQQGNVFSCSVMHEALHNHYTQKSLSLSPG

SEQ ID NO: 12596 - protein, 448 aa, Artificial Sequence
  source: /note="Description of Artificial Sequence: Synthetic polypeptide"
QVQLVQSGAEVAKPGASVKLSCKASGYTFTSYWMQWVKQRPGQGLEWIGALYPGDGDARYTQKFQGKATLTADTSSSTAYMQLSSLRSEDSAVYYCARYDAPGYAMDYWGQGTLVTVSSASTKGPSVFPLAPSSKSTSGGTAALGCLVKDYFPEPVTVSWNSGALTSGVHTFPAVLQSSGLYSLSSVVTVPSSSLGTQTYICNVNHKPSNTKVDKKVEPKSCDKTHTCPPCPAPELLGGPSVFLFPPKPKDTLMISRTPEVTCVVVDVSHEDPEVKFNWYVDGVEVHNAKTKPREEQYNSTYRVVSVLTVLHQDWLNGKEYKCKVSNKALPAPIEKTISKAKGQPREPQVYTLPPSRDELTKNQVSLTCLVKGFYPSDIAVEWESNGQPENNYKTTPPVLDSDGSFFLYSKLTVDKSRWQQGNVFSCSVMHEALHNHYTQKSLSLSPG

SEQ ID NO: 12597 - protein, 448 aa, Artificial Sequence
  source: /note="Description of Artificial Sequence: Synthetic polypeptide"
QVQLVQSGAEVAKPGASVKLSCKASGYTFTSYWMQWVKQRPGQGLEWIGTIYPGDGDTTYTQKFQGKATLTADKSSSTAYMQLSSLRSEDSAVYYCARYDAPGYAMDYWGQGTLVTVSSASTKGPSVFPLAPSSKSTSGGTAALGCLVKDYFPEPVTVSWNSGALTSGVHTFPAVLQSSGLYSLSSVVTVPSSSLGTQTYICNVNHKPSNTKVDKKVEPKSCDKTHTCPPCPAPELLGGPSVFLFPPKPKDTLMISRTPEVTCVVVDVSHEDPEVKFNWYVDGVEVHNAKTKPREEQYNSTYRVVSVLTVLHQDWLNGKEYKCKVSNKALPAPIEKTISKAKGQPREPQVYTLPPSRDELTKNQVSLTCLVKGFYPSDIAVEWESNGQPENNYKTTPPVLDSDGSFFLYSKLTVDKSRWQQGNVFSCSVMHEALHNHYTQKSLSLSPG

SEQ ID NO: 12598 - protein, 119 aa, Artificial Sequence
  source: /note="Description of Artificial Sequence: Synthetic polypeptide"
QVQLQQSGAELARPGASVKLSCKASGYTFTSYWMQWVKQRPGQGLECIGTIYPGDGDTRYTQKFKGKATLTADKSSSTAYMQLSSLASEDSAVYYCARYDAPGYTMDYWGQGTSVTVSS

SEQ ID NO: 12599 - protein, 119 aa, Artificial Sequence
  source: /note="Description of Artificial Sequence: Synthetic polypeptide"
QVQLQQSGAELARPGASVKLSCKASGYTFTSYWMQWVKQRPGQGLECIGTIYPGDGDTRYTQKFKGKATLTADKSSSTAYMQLSSLASEDSAVYYCARYDAPGYAMDYWGQGTSVTVSS

SEQ ID NO: 12600 - protein, 119 aa, Artificial Sequence
  source: /note="Description of Artificial Sequence: Synthetic polypeptide"
QVQLQQSGAELARPGASVKLSCKASGYTFTSYWMQWVKQRPGQGLECIGTIYPGDGDTTYTQKFKGKATLTADKSSSTAYMQLNSLASEDSAVYYCARYDAPGYAMDYWGQGTSVTVSS

SEQ ID NO: 12601 - protein, 129 aa, Artificial Sequence
  source: /note="Description of Artificial Sequence: Synthetic polypeptide"
QVQLVQSGAEVKKPGESLKISCKGSGYSFTSYWIAWVRQMPGKGLEYMGLIYPGDSDTKYSPSFQGQVTISVDKSVSTAYLQWSSLKPSDSAVYFCARHDVGYCSSSNCAKWPEYFQHWGQGTLVTVSS

SEQ ID NO: 12602 - protein, 129 aa, Artificial Sequence
  source: /note="Description of Artificial Sequence: Synthetic polypeptide"
QVQLVQSGAEVKKPGESLKISCKGSGYSFTSYWIAWVRQMPGKGLEYMGLIYPGDSDTKYSPSFQGQVTISVDKSVSTAYLQWSSLKPSDSAVYFCARHDVAYCSSSNCAKWPEYFQHWGQGTLVTVSS

SEQ ID NO: 12603 - protein, 129 aa, Artificial Sequence
  source: /note="Description of Artificial Sequence: Synthetic polypeptide"
QVQLVQSGAEVKKPGESLKISCKGSGYSFTSYWIAWVRQMPGKGLEYMGLIYPGDSDTKYSPSFQGQVTISVDKSVSTAYLQWSSLKPSDSAVYFCARHDVGYCTDRTCAKWPEYFQHWGQGTLVTVSS

SEQ ID NO: 12604 - protein, 129 aa, Artificial Sequence
  source: /note="Description of Artificial Sequence: Synthetic polypeptide"
QVQLVQSGAEVKKPGESLKISCKGSGYSFTSYWIAWVRQMPGKGLEYMGLIYPGDSDTKYSPSFQGQVTISVDKSVSTAYLQWSSLKPSDSAVYFCARHDVGYCTDRTCAKWPEWLGVWGQGTLVTVSS

SEQ ID NO: 12605 - protein, 170 aa, Homo sapiens
QVQLVESGGGVVQPGRSLRLSCAASGFTFSSYGMHWVRQAPGKGLEWVAVIWYDGSNKYYVDSVKGRFTISRDNSKNTLYLQMNSLRAEDTAVYYCARDGWQQLAPFDYWGQGTLVTVSSASTKGPSVFPLAPSSKSTSGGTAALGCLVKDYFPEPVTVSWNSGALTSGV

SEQ ID NO: 12606 - protein, 124 aa, Homo sapiens
QVQLVESGGGVVQSGRSLRLSCAASGFTFRNYGMHWVRQAPGKGLEWVAVIWYDGSDKYYADSVRGRFTISRDNSKNTLYLQMNSLRAEDTAVYYCARDGYDILTGNPRDFDYWGQGTLVTVSS

SEQ ID NO: 12607 - protein, 118 aa, Homo sapiens
QVQLQQSGPGLVKPSQTLSLTCAISGDSVSSNNAAWNWIRQSPARGLEWLGRTYYRSKWYNDYVVSVKSRITINPDTSKNQFSLQLNSVTPEDTAVYYCVRATAFDYWGQGTLVTVSS

SEQ ID NO: 12608 - protein, 118 aa, Homo sapiens
QVQLQQSGPGLVKPSQTLSLTCAISGDSVSSYSSAWNWIRQSPSRGLEWLGRAYHRSRWYYEYAVSVKSRINITPDTSKNQFSLQLNSVTPEDTAVYYCARGSRFDYWGQGTLVTVSS

SEQ ID NO: 12609 - protein, 126 aa, Homo sapiens
QVQLQESGPFLVKPSQTLSLTCTVSGGSISSGGYYWSWIRQHPGKGLEWIGFIYYRGNTYYNPSLKSRVTISVDTSKNQFSLKLSSVTAADTAVYYCARDGYCSRTGCYGGWFDPWGQGTLVTVSP

SEQ ID NO: 12610 - protein, 116 aa, Homo sapiens
EGQLLESGGGWVQPGESLRLSCAASGFTFSSYAMSWVRQAPGKGLEWVSAISGSGGSTNYADSVKGRFTISRDNSKNTLYLQVNSLRVEDTAVYYCAGSSGWSEYWGQGTLVTVSS

SEQ ID NO: 12611 - protein, 116 aa, Homo sapiens
EVQVLESGGGLVQPGGSLRLSCAASGFTFSSYAMSWVRQAPGKGLEWVSAISGSGGSTNYADSVKGRFTISRDNSKNTLYLQMNSLRAEDTAVYYCAGSSGWSEYWGQGTLVTVSS

SEQ ID NO: 12612 - protein, 128 aa, Homo sapiens
QVQLVESGGGVVQPGRSLRLSCVASGFTLSSYGMHWVRQAPGKGLEWVAVTSYDGSKKDYADSAKGRFTISRDNSKNTLYLQMNSLRAEDTAVYYCVSEGYCSSSSCYKYYYYGMDVWGQGTTVTVSS

SEQ ID NO: 12613 - protein, 128 aa, Homo sapiens
QVQLVESGGGVVQPGRSLRLSCAASGFTLSSYGMHWVRQAPGKGLEWVAVMSYDGSKEDYADSVKGRFTISRDNSENTLYLQMNSLRAEDTAVYYCVSEGYCSSRSCYKYYYYGMDVWGQGTTVTVSS

SEQ ID NO: 12614 - protein, 128 aa, Homo sapiens
QVQLVESGGGVVQPGRSLRLSCVASGFTLSSYGMHWVRQAPGKGLEWVAVTSYDGSKKDYADSVKGRFTISRDNSKNTLYLQMNSLRAEDTAVYYCVSEGYCDSSSCYKYYYYGMDVWGQGTTVTVSS

SEQ ID NO: 12615 - protein, 128 aa, Homo sapiens
QVQLVESGGGVVQPGRSLRLSCVASGFTLSSYGMHWVRQAPGKGLEWVAVTSYDGSKKDYADSVKGRFTISRDNSKNTLYLQMNSLRAEDTAVYYCVSEGYCDSTSCYKYYYYGMDVWGQGTTVTVSS

SEQ ID NO: 12616 - protein, 128 aa, Homo sapiens
QVQLVESGGGVVQPGRSLRLSCVASGFTLSSYGMHWVRQALGKGLEWVAVTSYDGSKKDYADSVKGRFTISRDNSKNTLYLQMNSLRAEDTAVYYCVSEGYCDSTSCYKYYYYGMDVWGQGTTVTVSS

SEQ ID NO: 12617 - protein, 110 aa, Homo sapiens
QVQLVESGGGVVQPGRSLRLSCAASGFTFSSYGMHWVRQAPGKGLEWVAVIWYDGSNKYYADSVKGRFTISRDNSKNTLYLQMNSLRAEDTAVYYCARWGQGTLVTVSSA

SEQ ID NO: 12618 - protein, 121 aa, Homo sapiens
QVQLVESGGGVVQPGRSLRLSCAASGFTFSSYGMHWVRQAPGKGLEWVAVIWYDGSNKYYVDSVKGRFTISRDNSKNTLYLQMNSLRAEDTAVYYCARDGWQQLAPFDYWGQGTLVTVSSA

SEQ ID NO: 12619 - protein, 123 aa, Artificial Sequence
  source: /note="Description of Artificial Sequence: Synthetic polypeptide"
MAQVQLVQSGGGVVQPGRSLRLSCAASGFTFSSYAMHWVRQAPGKGLEWVAVISYDGSNKYYADSVKGRFTISRDNSKNTLYLQMNSLRAEDTAVYYCARDRRGRKSAGIDYWGQGTLVTVSS

SEQ ID NO: 12620 - protein, 121 aa, Artificial Sequence
  source: /note="Description of Artificial Sequence: Synthetic polypeptide"
MAQVQLVESGGGLVQPGGSLRLSCAASGFTFSSYAMHWVRQAPGKGLEWVAVISYDGSNKYYADSVKGRFTISRDNSKNTLYLQMNSLRAEDTAVYYCARTVGATGAFDIWGQGTMVTVSS

SEQ ID NO: 12621 - protein, 119 aa, Artificial Sequence
  source: /note="Description of Artificial Sequence: Synthetic polypeptide"
MAQVQLVQSGGGLVQPGRSLRLSCAASGFSFSEYPMHWVRQAPGRGLESVAVISYDGEYQKYADSVKGRFTISRDDSKSTVYLQMNSLRPEDTAVYYCARTINNGMDVWGQGTTVTVSS

SEQ ID NO: 12622 - protein, 448 aa, Artificial Sequence
  source: /note="Description of Artificial Sequence: Synthetic polypeptide"
QVQLVQSGAEVKKPGASVKVSCKASGYTFTGYWMNWVRQAPGQGLEWMGDIYPGSGNTNYDEKFQGRVTMTRDTSISTAYMELSRLRSDDTAVYYCARSGYYEEFDSWGQGTTVTVSSASTKGPSVFPLAPSSKSTSGGTAALGCLVKDYFPEPVTVSWNSGALTSGVHTFPAVLQSSGLYSLSSVVTVPSSSLGTQTYICNVNHKPSNTKVDKRVEPKSCDKTHTCPPCPAPELLGGPSVFLFPPKPKDTLMISRTPEVTCVVVDVSHEDPEVKFNWYVDGVEVHNAKTKPREEQYNSTYRVVSVLTVLHQDWLNGKEYKCKVSNKALPAPIEKTISKAKGQPREPQVYTLPPSREEMTKNQVSLTCLVKGFYPSDIAVEWESNGQPENNYKTTPPVLDSDGSFFLYSKLTVDKSRWQQGNVFSCSVMHEALHNHYTQKSLSLSPGK

SEQ ID NO: 12623 - protein, 448 aa, Artificial Sequence
  source: /note="Description of Artificial Sequence: Synthetic polypeptide"
QVQLVQSGAEVKKPGTSVKVSCKASGYTFTGYWMNWVRQASGQGLEWMGDIYPGSGNTNYDEKFQGRVTMTRDTSISTAYMELSRLRSDDTAVYYCARSGVYEDFDSWGQGTTVTVSSASTKGPSVFPLAPSSKSTSGGTAALGCLVKDYFPEPVTVSWNSGALTSGVHTFPAVLQSSGLYSLSSVVTVPSSSLGTQTYICNVNHKPSNTKVDKRVEPKSCDKTHTCPPCPAPELLGGPSVFLFPPKPKDTLMISRTPEVTCVVVDVSHEDPEVKFNWYVDGVEVHNAKTKPREEQYNSTYRVVSVLTVLHQDWLNGKEYKCKVSNKALPAPIEKTISKAKGQPREPQVYTLPPSREEMTKNQVSLTCLVKGFYPSDIAVEWESNGQPENNYKTTPPVLDSDGSFFLYSKLTVDKSRWQQGNVFSCSVMHEALHNHYTQKSLSLSPGK

SEQ ID NO: 12624 - protein, 448 aa, Artificial Sequence; identical to SEQ ID NO: 6769
  source: /note="Description of Artificial Sequence: Synthetic polypeptide"

SEQ ID NO: 12625 - protein, 448 aa, Artificial Sequence
  source: /note="Description of Artificial Sequence: Synthetic polypeptide"
QVQLVQSGAEVKKPGTSVKVSCKASGYTFTGYWMNWVRQASGQGLEWMGDIYPGSGNTNYDEKFQGRVTMTRDTSISTAYMELSRLRSDDTAVYYCARSGYYEEFDSWGQGTTVTVSSASTKGPSVFPLAPSSKSTSGGTAALGCLVKDYFPEPVTVSWNSGALTSGVHTFPAVLQSSGLYSLSSVVTVPSSSLGTQTYICNVNHKPSNTKVDKRVEPKSCDKTHTCPPCPAPELLGGPSVFLFPPKPKDTLMISRTPEVTCVVVDVSHEDPEVKFNWYVDGVEVHNAKTKPREEQYNSTYRVVSVLTVLHQDWLNGKEYKCKVSNKALPAPIEKTISKAKGQPREPQVYTLPPSREEMTKNQVSLTCLVKGFYPSDIAVEWESNGQPENNYKTTPPVLDSDGSFFLYSKLTVDKSRWQQGNVFSCSVMHEALHNHYTQKSLSLSPGK

SEQ ID NO: 12626 - protein, 448 aa, Artificial Sequence; identical to SEQ ID NO: 12622
  source: /note="Description of Artificial Sequence: Synthetic polypeptide"

SEQ ID NO: 12627 - protein, 448 aa, Artificial Sequence
  source: /note="Description of Artificial Sequence: Synthetic polypeptide"
EVQLVQSGAEVKKPGESLRISCKGSGYTFTTYWISWVRQMPGQGLEWMGDIYPGSGNTNYAQEFRGRVTITADESTSTAYVELSSLRSEDTAVYYCARSGYYEDFDSWGQGTTVTVSSASTKGPSVFPLAPSSKSTSGGTAALGCLVKDYFPEPVTVSWNSGALTSGVHTFPAVLQSSGLYSLSSVVTVPSSSLGTQTYICNVNHKPSNTKVDKRVEPKSCDKTHTCPPCPAPELLGGPSVFLFPPKPKDTLMISRTPEVTCVVVDVSHEDPEVKFNWYVDGVEVHNAKTKPREEQYNSTYRVVSVLTVLHQDWLNGKEYKCKVSNKALPAPIEKTISKAKGQPREPQVYTLPPSREEMTKNQVSLTCLVKGFYPSDIAVEWESNGQPENNYKTTPPVLDSDGSFFLYSKLTVDKSRWQQGNVFSCSVMHEALHNHYTQKSLSLSPGK

SEQ ID NO: 12628 - protein, 121 aa, Homo sapiens
  MOD_RES (99)..(100): Any amino acid
  MOD_RES (106)..(106): Any amino acid
EVQLVESGGGLVKPGGSLRLSCAASGFTFSSYSMNWVRQAPGKGLEWVSSISSSSSYIYYADSVKGRFTISRDNAKNSLYLQMNSLRAEDTAVYYCARXXDGYNYXYFDYWGQGTLVTVSS

SEQ ID NO: 12629 - protein, 123 aa, Homo sapiens
  MOD_RES (98)..(98): Any amino acid
  MOD_RES (103)..(104): Any amino acid
EVQLVESGGGLVQPGGSLRLSCAASGFTFSSYDMHWVRQATGKGLEWVSAIGTAGDTYYPGSVKGRFTISRENAKNSLYLQMNSLRAGDTAVYYCARXGYSSXXYYYYGMDVWGQGTTVTVSS

SEQ ID NO: 12630 - protein, 117 aa, Homo sapiens
  MOD_RES (98)..(101): Any amino acid
EVQLVESGGGLVQPGGSLRLSCAASGFTFSSYWMSWVRQAPGKGLEWVANIKQDGSEKYYVDSVKGRFTISRDNAKNSLYLQMNSLRAEDTAVYYCAXXXXYGMDVWGQGTTVTVSS

SEQ ID NO: 12631 - protein, 117 aa, Homo sapiens
  MOD_RES (98)..(99): Any amino acid
EVQLVESGGGLVQPGGSLRLSCAASGFTFSSYWMSWVRQAPGKGLEWVANIKQDGSEKYYVDSVKGRFTISRDNAKNSLYLQMNSLRAEDTAVYYCAXXRDYGMDVWGQGTTVTVSS

SEQ ID NO: 12632 - protein, 129 aa, Homo sapiens
  MOD_RES (100)..(102): Any amino acid
QVQLQESGPGLVKPSQTLSLTCTVSGGSISSGGYYWSWIRQHPGKGLEWIGYIYYSGSTYYNPSLKSRVTISVDTSKNQFSLKLSSVTAADTAVYYCARXXXITMVRGVYYYYYGMDVWGQGTTVTVSS

SEQ ID NO: 12633 - protein, 450 aa, Artificial Sequence
  source: /note="Description of Artificial Sequence: Synthetic polypeptide"
  MOD_RES (57)..(57): Any amino acid
  MOD_RES (59)..(59): Any amino acid
EVQLVESGGGLVQPGGSLRLSCAASGFNIKDTYIHWVRQAPGKGLEWVARIYPTNGXTXYADSVKGRFTISADTSKNTAYLQMNSLRAEDTAVYYCSRWGGDGFYAMDYWGQGTLVTVSSASTKGPSVFPLAPSSKSTSGGTAALGCLVKDYFPEPVTVSWNSGALTSGVHTFPAVLQSSGLYSLSSVVTVPSSSLGTQTYICNVNHKPSNTKVDKKVEPKSCDTPPPCPRCPAPELLGGPSVFLFPPKPKDTLMISRTPEVTCVVVDVSHEDPEVKFNWYVDGVEVHNAKTKPREEQYNSTYRVVSVLTVLHQDWLNGKEYKCKVSNKALPAPIEKTISKAKGQPREPQVYTLPPSRDELTKNQVSLTCLVKGFYPSDIAVEWESNGQPENNYKTTPPVLDSDGSFFLYSKLTVDKSRWQQGNVFSCSVMHEALHNHYTQKSLSLSPGK

SEQ ID NO: 12634 - protein, 469 aa, Artificial Sequence
  source: /note="Description of Artificial Sequence: Synthetic polypeptide"
MDWTWRILFLVAAATGTHAEVQLVESGGGLVQPGGSLRLSCAASGFNIKDTYIHWVRQAPGKGLEWVARIYPTNGYTRYADSVKGRFTISADTSKNTAYLQMNSLRAEDTAVYYCSRWGGDGFYAMDYWGQGTLVTVSSASTKGPSVFPLAPSSKSTSGGTAALGCLVKDYFPEPVTVSWNSGALTSGVHTFPAVLQSSGLYSLSSVVTVPSSSLGTQTYICNVNHKPSNTKVDKKVEPKSCDKTHTCPPCPAPELLGGPSVFLFPPKPKDTLMISRTPEVTCVVVDVSHEDPEVKFNWYVDGVEVHNAKTKPREEQYNSTYRVVSVLTVLHQDWLNGKEYKCKVSNKALPAPIEKTISKAKGQPREPQVYTLPPSRDELTKNQVSLTCLVKGFYPSDIAVEWESNGQPENNYKTTPPVLDSDGSFFLYSKLTVDKSRWQQGNVFSCSVMHEALHNHYTQKSLSLSPGK

SEQ ID NO: 12635 - protein, 469 aa, Artificial Sequence
  source: /note="Description of Artificial Sequence: Synthetic polypeptide"
MDWTWRILFLVAAATGTHAEVQLVESGGGLVQPGGSLRLSCAASGFNIKDTYIHWVRQAPGKGLEWVARIYPTNGATRYADSVKGRFTISADTSKNTAYLQMNSLRAEDTAVYYCSRWGGDGFYAMDYWGQGTLVTVSSASTKGPSVFPLAPSSKSTSGGTAALGCLVKDYFPEPVTVSWNSGALTSGVHTFPAVLQSSGLYSLSSVVTVPSSSLGTQTYICNVNHKPSNTKVDKKVEPKSCDKTHTCPPCPAPELLGGPSVFLFPPKPKDTLMISRTPEVTCVVVDVSHEDPEVKFNWYVDGVEVHNAKTKPREEQYNSTYRVVSVLTVLHQDWLNGKEYKCKVSNKALPAPIEKTISKAKGQPREPQVYTLPPSRDELTKNQVSLTCLVKGFYPSDIAVEWESNGQPENNYKTTPPVLDSDGSFFLYSKLTVDKSRWQQGNVFSCSVMHEALHNHYTQKSLSLSPGK

SEQ ID NO: 12636 - protein, 469 aa, Artificial Sequence
  source: /note="Description of Artificial Sequence: Synthetic polypeptide"
MDWTWRILFLVAAATGTHAEVQLVESGGGLVQPGGSLRLSCAASGFNIKDTYIHWVRQAPGKGLEWVARIYPTNGYTEYADSVKGRFTISADTSKNTAYLQMNSLRAEDTAVYYCSRWGGDGFYAMDYWGQGTLVTVSSASTKGPSVFPLAPSSKSTSGGTAALGCLVKDYFPEPVTVSWNSGALTSGVHTFPAVLQSSGLYSLSSVVTVPSSSLGTQTYICNVNHKPSNTKVDKKVEPKSCDKTHTCPPCPAPELLGGPSVFLFPPKPKDTLMISRTPEVTCVVVDVSHEDPEVKFNWYVDGVEVHNAKTKPREEQYNSTYRVVSVLTVLHQDWLNGKEYKCKVSNKALPAPIEKTISKAKGQPREPQVYTLPPSRDELTKNQVSLTCLVKGFYPSDIAVEWESNGQPENNYKTTPPVLDSDGSFFLYSKLTVDKSRWQQGNVFSCSVMHEALHNHYTQKSLSLSPGK

SEQ ID NO: 12637 - protein, 450 aa, Artificial Sequence; identical to SEQ ID NO: 12430
  source: /note="Description of Artificial Sequence: Synthetic polypeptide"

SEQ ID NO: 12638 - protein, 450 aa, Artificial Sequence
  source: /note="Description of Artificial Sequence: Synthetic polypeptide"
MQVQLQQSGPELKKPGETVKISCKASGYPFTNYGMNWVKQAPGQGLKWMGWINTSTGESTFADDFKGRFDFSLETSANTAYLQINNLKSEDMATYFCARWEVYHGYVPYWGQGTTVTVSSASTKGPSVFPLAPSSKSTSGGTAALGCLVKDYFPEPVTVSWNSGALTSGVHTFPAVLQSSGLYSLSSVVTVPSSSLGTQTYICNVNHKPSNTKVDKKVEPKSCDKTHTCPPCPAPELLGGPSVFLFPPKPKDTLMISRTPEVTCVVVDVSHEDPEVKFNWYVDGVEVHNAKTKPREEQYNSTYRVVSVLTVLHQDWLNGKEYKCKVSNKALPAPIEKTISKAKGQPREPQVYTLPPCREEMTKNQVSLWCLVKGFYPSDIAVEWESNGQPENNYKTTPPVLDSDGSFFLYSKLTVDKSRWQQGNVFSCSVMHEALHNHYTQKSLSLSPGK

SEQ ID NO: 12639 - protein, 450 aa, Artificial Sequence
  source: /note="Description of Artificial Sequence: Synthetic polypeptide"
MQVQLQQSGPELKKPGETVKISCKASGYPFTNYGMNWVKQAPGQGLKWMGWINTSTGESTFADDFKGRFDFSLETSANTAYLQINNLKSEDMATYFCARWEVYHGYVPYWGQGTTVTVSSASTKGPSVFPLAPSSKSTSGGTAALGCLVKDYFPEPVTVSWNSGALTSGVHTFPAVLQSSGLYSLSSVVTVPSSSLGTQTYICNVNHKPSNTKVDKKVEPKSCDKTHTCPPCPAPELLGGPSVFLFPPKPKDTLMISRTPEVTCVVVDVSHEDPEVKFNWYVDGVEVHNAKTKPREEQYNSTYRVVSVLTVLHQDWLNGKEYKCKVSNKALPAPIEKTISKAKGQPREPQVCTLPPSREEMTKNQVSLSCAVKGFYPSDIAVEWESNGQPENNYKTTPPVLDSDGSFFLVSKLTVDKSRWQQGNVFSCSVMHEALHNHYTQKSLSLSPGK

SEQ ID NO: 12640 - protein, 140 aa, Mus musculus
MEWIWIFLFFLSGTTGVYSQVQLQQSGAEVARPGASVKLSCKASGYTFTDYYLNWVKQRSGQGLEWIGEIDPGSDSIYYNENLEGRATLTADKSSSTAYMQLNSLTSEDSAVYFCARYGYSRYDVRFVYWGQGTLVTVST

SEQ ID NO: 12641 - protein, 471 aa, Artificial Sequence
  source: /note="Description of Artificial Sequence: Synthetic polypeptide"
MKHLWFFLLLVAAPRWVLSEVQLVESGGGLVQPGRSLKLSCVASGFRFNDFWMTWIRQAPGKGLEWVASITYTGDNTYYAGSVKGRITISRDNAKSTLYLQMNSLRSEDTATYYCTRDDYGGYSPYYMDAWGQGTSVTVSSASTKGPSVFPLAPSSKSTSGGTAALGCLVKDYFPEPVTVSWNSGALTSGVHTFPAVLQSSGLYSLSSVVTVPSSSLGTQTYICNVNHKPSNTKVDKRVEPKSCDKTHTCPPCPAPELLGGPSVFLFPPKPKDTLMISRTPEVTCVVVDVSHEDPEVKFNWYVDGVEVHNAKTKPREEQYNSTYRVVSVLTVLHQDWLNGKEYKCKVSNKALPAPIEKTISKAKGQPREPQVYTLPPSREEMTKNQVSLTCLVKGFYPSDIAVEWESNGQPENNYKTTPPVLDSDGSFFLYSKLTVDKSRWQQGNVFSCSVMHEALHNHYTQKSLSLSPGK

SEQ ID NO: 12642 - protein, 467 aa, Artificial Sequence
  source: /note="Description of Artificial Sequence: Synthetic polypeptide"
MKHLWFFLLLVAAPRWVLSQVKLLQSGAELVKPGASVKLSCKTSGFTFSTSYMSWLKQVPGPSIEWIGWIYAGDGGTKYNQKFKGKATLTVDKSSSTAYMDLSSLTSEDAAVYFCATDGYGDWFAYWGQGTLVTVSSASTKGPSVFPLAPSSKSTSGGTAALGCLVKDYFPEPVTVSWNSGALTSGVHTFPAVLQSSGLYSLSSVVTVPSSSLGTQTYICNVNHKPSNTKVDKRVEPKSCDKTHTCPPCPAPELLGGPSVFLFPPKPKDTLMISRTPEVTCVVVDVSHEDPEVKFNWYVDGVEVHNAKTKPREEQYNSTYRVVSVLTVLHQDWLNGKEYKCKVSNKALPAPIEKTISKAKGQPREPQVYTLPPSREEMTKNQVSLTCLVKGFYPSDIAVEWESNGQPENNYKTTPPVLDSDGSFFLYSKLTVDKSRWQQGNVFSCSVMHEALHNHYTQKSLSLSPGK

SEQ ID NO: 12643 - protein, 467 aa, Artificial Sequence
  source: /note="Description of Artificial Sequence: Synthetic polypeptide"
MKHLWFFLLLVAAPRWVLSQVKLLQSGAELVKPGASVKLSCKTSGFTFSTSYMSWLKQVPGPSTEWIGWIYAGDGGTKYNQKFKGKATLTVDKFSSTAYMDLSSLTSEDAAVYFCATDGYGDWFTYWGQGTLVTVSSASTKGPSVFPLAPSSKSTSGGTAALGCLVKDYFPEPVTVSWNSGALTSGVHTFPAVLQSSGLYSLSSVVTVPSSSLGTQTYICNVNHKPSNTKVDKRVEPKSCDKTHTCPPCPAPELLGGPSVFLFPPKPKDTLMISRTPEVTCVVVDVSHEDPEVKFNWYVDGVEVHNAKTKPREEQYNSTYRVVSVLTVLHQDWLNGKEYKCKVSNKALPAPIEKTISKAKGQPREPQVYTLPPSREEMTKNQVSLTCLVKGFYPSDIAVEWESNGQPENNYKTTPPVLDSDGSFFLYSKLTVDKSRWQQGNVFSCSVMHEALHNHYTQKSLSLSPGK

SEQ ID NO: 12644 - protein, 467 aa, Artificial Sequence
  source: /note="Description of Artificial Sequence: Synthetic polypeptide"
MKHLWFFLLLVAAPRWVLSQVQLVQSGAEVKKPGASVKVSCKASGFTFSTSYMSWVRQAPGQGLEWMGWIYAGDGGTKYNQKFKGRVTLTVDKSTSTAYMELSSLRSEDTAVYYCATDGYGDWFTYWGQGTLVTVSSASTKGPSVFPLAPSSKSTSGGTAALGCLVKDYFPEPVTVSWNSGALTSGVHTFPAVLQSSGLYSLSSVVTVPSSSLGTQTYICNVNHKPSNTKVDKRVEPKSCDKTHTCPPCPAPELLGGPSVFLFPPKPKDTLMISRTPEVTCVVVDVSHEDPEVKFNWYVDGVEVHNAKTKPREEQYNSTYRVVSVLTVLHQDWLNGKEYKCKVSNKALPAPIEKTISKAKGQPREPQVYTLPPSREEMTKNQVSLTCLVKGFYPSDIAVEWESNGQPENNYKTTPPVLDSDGSFFLYSKLTVDKSRWQQGNVFSCSVMHEALHNHYTQKSLSLSPGK

SEQ ID NO: 12645 - protein, 467 aa, Artificial Sequence
  source: /note="Description of Artificial Sequence: Synthetic polypeptide"
MKHLWFFLLLVAAPRWVLSQVQLVQSGAEVKKPGASVKVSCKASGFTFSTSYMSWVRQAPGQGLEWMGWIYAGDGGTKYNQKFKGRVTLTADKSTSTAYMELSSLRSEDTAVYYCATDGYGDWFTYWGQGTLVTVSSASTKGPSVFPLAPSSKSTSGGTAALGCLVKDYFPEPVTVSWNSGALTSGVHTFPAVLQSSGLYSLSSVVTVPSSSLGTQTYICNVNHKPSNTKVDKRVEPKSCDKTHTCPPCPAPELLGGPSVFLFPPKPKDTLMISRTPEVTCVVVDVSHEDPEVKFNWYVDGVEVHNAKTKPREEQYNSTYRVVSVLTVLHQDWLNGKEYKCKVSNKALPAPIEKTISKAKGQPREPQVYTLPPSREEMTKNQVSLTCLVKGFYPSDIAVEWESNGQPENNYKTTPPVLDSDGSFFLYSKLTVDKSRWQQGNVFSCSVMHEALHNHYTQKSLSLSPGK

SEQ ID NO: 12646 - protein, 467 aa, Artificial Sequence
  source: /note="Description of Artificial Sequence: Synthetic polypeptide"
MKHLWFFLLLVAAPRWVLSQVQLVQSGAEVKKPGASVKVSCKASGFTFSTSYMSWVRQAPGPSTEWMGWIYAGDGGTKYNQKFKGRVTLTVDKSTSTAYMELSSLRSEDTAVYYCATDGYGDWFTYWGQGTLVTVSSASTKGPSVFPLAPSSKSTSGGTAALGCLVKDYFPEPVTVSWNSGALTSGVHTFPAVLQSSGLYSLSSVVTVPSSSLGTQTYICNVNHKPSNTKVDKRVEPKSCDKTHTCPPCPAPELLGGPSVFLFPPKPKDTLMISRTPEVTCVVVDVSHEDPEVKFNWYVDGVEVHNAKTKPREEQYNSTYRVVSVLTVLHQDWLNGKEYKCKVSNKALPAPIEKTISKAKGQPREPQVYTLPPSREEMTKNQVSLTCLVKGFYPSDIAVEWESNGQPENNYKTTPPVLDSDGSFFLYSKLTVDKSRWQQGNVFSCSVMHEALHNHYTQKSLSLSPGK

SEQ ID NO: 12647 - protein, 467 aa, Artificial Sequence
  source: /note="Description of Artificial Sequence: Synthetic polypeptide"
MKHLWFFLLLVAAPRWVLSQVQLVQSGAEVKKPGASVKVSCKASGFTFSTSYMSWVRQAPGPSIEWMGWIYAGDGGTKYNQKFKGRVTLTVDKSTSTAYMELSSLRSEDTAVYYCATDGYGDWFAYWGQGTLVTVSSASTKGPSVFPLAPSSKSTSGGTAALGCLVKDYFPEPVTVSWNSGALTSGVHTFPAVLQSSGLYSLSSVVTVPSSSLGTQTYICNVNHKPSNTKVDKRVEPKSCDKTHTCPPCPAPELLGGPSVFLFPPKPKDTLMISRTPEVTCVVVDVSHEDPEVKFNWYVDGVEVHNAKTKPREEQYNSTYRVVSVLTVLHQDWLNGKEYKCKVSNKALPAPIEKTISKAKGQPREPQVYTLPPSREEMTKNQVSLTCLVKGFYPSDIAVEWESNGQPENNYKTTPPVLDSDGSFFLYSKLTVDKSRWQQGNVFSCSVMHEALHNHYTQKSLSLSPGK

SEQ ID NO: 12648 - protein, 467 aa, Artificial Sequence
  source: /note="Description of Artificial Sequence: Synthetic polypeptide"
MKHLWFFLLLVAAPRWVLSQVQLVQSGAEVKKPGASVKVSCKASGFTFSTSYMSWVRQAPGPSTEWMGWIYAGDGGTKYNQKFKGRVTLTVDKSTSTAYMELSSLRSEDTAVYYCATEGYGDWFTYWGQGTLVTVSSASTKGPSVFPLAPSSKSTSGGTAALGCLVKDYFPEPVTVSWNSGALTSGVHTFPAVLQSSGLYSLSSVVTVPSSSLGTQTYICNVNHKPSNTKVDKRVEPKSCDKTHTCPPCPAPELLGGPSVFLFPPKPKDTLMISRTPEVTCVVVDVSHEDPEVKFNWYVDGVEVHNAKTKPREEQYNSTYRVVSVLTVLHQDWLNGKEYKCKVSNKALPAPIEKTISKAKGQPREPQVYTLPPSREEMTKNQVSLTCLVKGFYPSDIAVEWESNGQPENNYKTTPPVLDSDGSFFLYSKLTVDKSRWQQGNVFSCSVMHEALHNHYTQKSLSLSPGK

SEQ ID NO: 12649 - protein, 464 aa, Artificial Sequence
  source: /note="Description of Artificial Sequence: Synthetic polypeptide"
MKHLWFFLLLVAAPRWVLSQVQLVQSGAEVKKPGASVKVSCKASGFTFSTSYMSWVRQAPGPSTEWMGWIYAGDGGTKYNQKFKGRVTLTVDKSTSTAYMELSSLRSEDTAVYYCATDAYGDWFTYWGQGTLVTVSSASTKGPSVFPLAPSSKSTSGGTAALGCLVKDYFPEPVTVSWNSGALTSGVHTFPAVLQSSGLYSLSSVVTVPSSSLGTQTYICNVNHKPSNTKVDKRVEPKSCDKTHTCPPCPAPELLGGPSVFLFPPKPKDTLMISRTPEVTCVVVDVSHEDPEVKFNWYVDGVEVHNAKTKPREEQYNSTYRVVSVLTVLHQDWLNGKEYKCKVSNKALPAPIEKTISKAKGQPREPQVYTLPPSREEMTKNQVSLTCLVKGFYPSDIAVEWESNGQPENNYKTTPPVLDSDGSFFLYSKLTVDKSRWQQGNVFSCSVMHEALHNHYTQKSLSLS

SEQ ID NO: 12650 - protein, 467 aa, Artificial Sequence
  source: /note="Description of Artificial Sequence: Synthetic polypeptide"
MKHLWFFLLLVAAPRWVLSQVQLVQSGAEVKKPGASVKVSCKASGFTFSTSYMSWVRQAPGPSTEWMGWIYAGDGGTKYNQKFKGRVTLTVDKSTSTAYMELSSLRSEDTAVYYCATDEYGDWFTYWGQGTLVTVSSASTKGPSVFPLAPSSKSTSGGTAALGCLVKDYFPEPVTVSWNSGALTSGVHTFPAVLQSSGLYSLSSVVTVPSSSLGTQTYICNVNHKPSNTKVDKRVEPKSCDKTHTCPPCPAPELLGGPSVFLFPPKPKDTLMISRTPEVTCVVVDVSHEDPEVKFNWYVDGVEVHNAKTKPREEQYNSTYRVVSVLTVLHQDWLNGKEYKCKVSNKALPAPIEKTISKAKGQPREPQVYTLPPSREEMTKNQVSLTCLVKGFYPSDIAVEWESNGQPENNYKTTPPVLDSDGSFFLYSKLTVDKSRWQQGNVFSCSVMHEALHNHYTQKSLSLSPGK

SEQ ID NO: 12651 - protein, 467 aa, Artificial Sequence
  source: /note="Description of Artificial Sequence: Synthetic polypeptide"
MKHLWFFLLLVAAPRWVLSQVQLVQSGAEVKKPGASVKVSCKASGFTFSTSYMSWVRQAPGPSTEWMGWIYAGDGGTKYNQKFKGRVTLTVDKSTSTAYMELSSLRSEDTAVYYCATDFYGDWFTYWGQGTLVTVSSASTKGPSVFPLAPSSKSTSGGTAALGCLVKDYFPEPVTVSWNSGALTSGVHTFPAVLQSSGLYSLSSVVTVPSSSLGTQTYICNVNHKPSNTKVDKRVEPKSCDKTHTCPPCPAPELLGGPSVFLFPPKPKDTLMISRTPEVTCVVVDVSHEDPEVKFNWYVDGVEVHNAKTKPREEQYNSTYRVVSVLTVLHQDWLNGKEYKCKVSNKALPAPIEKTISKAKGQPREPQVYTLPPSREEMTKNQVSLTCLVKGFYPSDIAVEWESNGQPENNYKTTPPVLDSDGSFFLYSKLTVDKSRWQQGNVFSCSVMHEALHNHYTQKSLSLSPGK

SEQ ID NO: 12652 - protein, 467 aa, Artificial Sequence
  source: /note="Description of Artificial Sequence: Synthetic polypeptide"
MKHLWFFLLLVAAPRWVLSQVQLVQSGAEVKKPGASVKVSCKASGFTFSTSYMSWVRQAPGPSTEWMGWIYAGDGGTKYNQKFKGRVTLTVDKSTSTAYMELSSLRSEDTAVYYCATDHYGDWFTYWGQGTLVTVSSASTKGPSVFPLAPSSKSTSGGTAALGCLVKDYFPEPVTVSWNSGALTSGVHTFPAVLQSSGLYSLSSVVTVPSSSLGTQTYICNVNHKPSNTKVDKRVEPKSCDKTHTCPPCPAPELLGGPSVFLFPPKPKDTLMISRTPEVTCVVVDVSHEDPEVKFNWYVDGVEVHNAKTKPREEQYNSTYRVVSVLTVLHQDWLNGKEYKCKVSNKALPAPIEKTISKAKGQPREPQVYTLPPSREEMTKNQVSLTCLVKGFYPSDIAVEWESNGQPENNYKTTPPVLDSDGSFFLYSKLTVDKSRWQQGNVFSCSVMHEALHNHYTQKSLSLSPGK

SEQ ID NO: 12653 - protein, 467 aa, Artificial Sequence
  source: /note="Description of Artificial Sequence: Synthetic polypeptide"
MKHLWFFLLLVAAPRWVLSQVQLVQSGAEVKKPGASVKVSCKASGFTFSTSYMSWVRQAPGPSTEWMGWIYAGDGGTKYNQKFKGRVTLTVDKSTSTAYMELSSLRSEDTAVYYCATDIYGDWFTYWGQGTLVTVSSASTKGPSVFPLAPSSKSTSGGTAALGCLVKDYFPEPVTVSWNSGALTSGVHTFPAVLQSSGLYSLSSVVTVPSSSLGTQTYICNVNHKPSNTKVDKRVEPKSCDKTHTCPPCPAPELLGGPSVFLFPPKPKDTLMISRTPEVTCVVVDVSHEDPEVKFNWYVDGVEVHNAKTKPREEQYNSTYRVVSVLTVLHQDWLNGKEYKCKVSNKALPAPIEKTISKAKGQPREPQVYTLPPSREEMTKNQVSLTCLVKGFYPSDIAVEWESNGQPENNYKTTPPVLDSDGSFFLYSKLTVDKSRWQQGNVFSCSVMHEALHNHYTQKSLSLSPGK

SEQ ID NO: 12654 - protein, 467 aa, Artificial Sequence
  source: /note="Description of Artificial Sequence: Synthetic polypeptide"
MKHLWFFLLLVAAPRWVLSQVQLVQSGAEVKKPGASVKVSCKASGFTFSTSYMSWVRQAPGPSTEWMGWIYAGDGGTKYNQKFKGRVTLTVDKSTSTAYMELSSLRSEDTAVYYCATDKYGDWFTYWGQGTLVTVSSASTKGPSVFPLAPSSKSTSGGTAALGCLVKDYFPEPVTVSWNSGALTSGVHTFPAVLQSSGLYSLSSVVTVPSSSLGTQTYICNVNHKPSNTKVDKRVEPKSCDKTHTCPPCPAPELLGGPSVFLFPPKPKDTLMISRTPEVTCVVVDVSHEDPEVKFNWYVDGVEVHNAKTKPREEQYNSTYRVVSVLTVLHQDWLNGKEYKCKVSNKALPAPIEKTISKAKGQPREPQVYTLPPSREEMTKNQVSLTCLVKGFYPSDIAVEWESNGQPENNYKTTPPVLDSDGSFFLYSKLTVDKSRWQQGNVFSCSVMHEALHNHYTQKSLSLSPGK

SEQ ID NO: 12655 - protein, 467 aa, Artificial Sequence
  source: /note="Description of Artificial Sequence: Synthetic polypeptide"
MKHLWFFLLLVAAPRWVLSQVQLVQSGAEVKKPGASVKVSCKASGFTFSTSYMSWVRQAPGPSTEWMGWIYAGDGGTKYNQKFKGRVTLTVDKSTSTAYMELSSLRSEDTAVYYCATDLYGDWFTYWGQGTLVTVSSASTKGPSVFPLAPSSKSTSGGTAALGCLVKDYFPEPVTVSWNSGALTSGVHTFPAVLQSSGLYSLSSVVTVPSSSLGTQTYICNVNHKPSNTKVDKRVEPKSCDKTHTCPPCPAPELLGGPSVFLFPPKPKDTLMISRTPEVTCVVVDVSHEDPEVKFNWYVDGVEVHNAKTKPREEQYNSTYRVVSVLTVLHQDWLNGKEYKCKVSNKALPAPIEKTISKAKGQPREPQVYTLPPSREEMTKNQVSLTCLVKGFYPSDIAVEWESNGQPENNYKTTPPVLDSDGSFFLYSKLTVDKSRWQQGNVFSCSVMHEALHNHYTQKSLSLSPGK

SEQ ID NO: 12656 - protein, 467 aa, Artificial Sequence
  source: /note="Description of Artificial Sequence: Synthetic polypeptide"
MKHLWFFLLLVAAPRWVLSQVQLVQSGAEVKKPGASVKVSCKASGFTFSTSYMSWVRQAPGPSTEWMGWIYAGDGGTKYNQKFKGRVTLTVDKSTSTAYMELSSLRSEDTAVYYCATDMYGDWFTYWGQGTLVTVSSASTKGPSVFPLAPSSKSTSGGTAALGCLVKDYFPEPVTVSWNSGALTSGVHTFPAVLQSSGLYSLSSVVTVPSSSLGTQTYICNVNHKPSNTKVDKRVEPKSCDKTHTCPPCPAPELLGGPSVFLFPPKPKDTLMISRTPEVTCVVVDVSHEDPEVKFNWYVDGVEVHNAKTKPREEQYNSTYRVVSVLTVLHQDWLNGKEYKCKVSNKALPAPIEKTISKAKGQPREPQVYTLPPSREEMTKNQVSLTCLVKGFYPSDIAVEWESNGQPENNYKTTPPVLDSDGSFFLYSKLTVDKSRWQQGNVFSCSVMHEALHNHYTQKSLSLSPGK

SEQ ID NO: 12657 - protein, 467 aa, Artificial Sequence
  source: /note="Description of Artificial Sequence: Synthetic polypeptide"
MKHLWFFLLLVAAPRWVLSQVQLVQSGAEVKKPGASVKVSCKASGFTFSTSYMSWVRQAPGPSTEWMGWIYAGDGGTKYNQKFKGRVTLTVDKSTSTAYMELSSLRSEDTAVYYCATDQYGDWFTYWGQGTLVTVSSASTKGPSVFPLAPSSKSTSGGTAALGCLVKDYFPEPVTVSWNSGALTSGVHTFPAVLQSSGLYSLSSVVTVPSSSLGTQTYICNVNHKPSNTKVDKRVEPKSCDKTHTCPPCPAPELLGGPSVFLFPPKPKDTLMISRTPEVTCVVVDVSHEDPEVKFNWYVDGVEVHNAKTKPREEQYNSTYRVVSVLTVLHQDWLNGKEYKCKVSNKALPAPIEKTISKAKGQPREPQVYTLPPSREEMTKNQVSLTCLVKGFYPSDIAVEWESNGQPENNYKTTPPVLDSDGSFFLYSKLTVDKSRWQQGNVFSCSVMHEALHNHYTQKSLSLSPGK

SEQ ID NO: 12658 - protein, 467 aa, Artificial Sequence
  source: /note="Description of Artificial Sequence: Synthetic polypeptide"
MKHLWFFLLLVAAPRWVLSQVQLVQSGAEVKKPGASVKVSCKASGFTFSTSYMSWVRQAPGPSTEWMGWIYAGDGGTKYNQKFKGRVTLTVDKSTSTAYMELSSLRSEDTAVYYCATDRYGDWFTYWGQGTLVTVSSASTKGPSVFPLAPSSKSTSGGTAALGCLVKDYFPEPVTVSWNSGALTSGVHTFPAVLQSSGLYSLSSVVTVPSSSLGTQTYICNVNHKPSNTKVDKRVEPKSCDKTHTCPPCPAPELLGGPSVFLFPPKPKDTLMISRTPEVTCVVVDVSHEDPEVKFNWYVDGVEVHNAKTKPREEQYNSTYRVVSVLTVLHQDWLNGKEYKCKVSNKALPAPIEKTISKAKGQPREPQVYTLPPSREEMTKNQVSLTCLVKGFYPSDIAVEWESNGQPENNYKTTPPVLDSDGSFFLYSKLTVDKSRWQQGNVFSCSVMHEALHNHYTQKSLSLSPGK

SEQ ID NO: 12659 - protein, 467 aa, Artificial Sequence
  source: /note="Description of Artificial Sequence: Synthetic polypeptide"
MKHLWFFLLLVAAPRWVLSQVQLVQSGAEVKKPGASVKVSCKASGFTFSTSYMSWVRQAPGPSTEWMGWIYAGDGGTKYNQKFKGRVTLTVDKSTSTAYMELSSLRSEDTAVYYCATDVYGDWFTYWGQGTLVTVSSASTKGPSVFPLAPSSKSTSGGTAALGCLVKDYFPEPVTVSWNSGALTSGVHTFPAVLQSSGLYSLSSVVTVPSSSLGTQTYICNVNHKPSNTKVDKRVEPKSCDKTHTCPPCPAPELLGGPSVFLFPPKPKDTLMISRTPEVTCVVVDVSHEDPEVKFNWYVDGVEVHNAKTKPREEQYNSTYRVVSVLTVLHQDWLNGKEYKCKVSNKALPAPIEKTISKAKGQPREPQVYTLPPSREEMTKNQVSLTCLVKGFYPSDIAVEWESNGQPENNYKTTPPVLDSDGSFFLYSKLTVDKSRWQQGNVFSCSVMHEALHNHYTQKSLSLSPGK

SEQ ID NO: 12660 - protein, 467 aa, Artificial Sequence
  source: /note="Description of Artificial Sequence: Synthetic polypeptide"
MKHLWFFLLLVAAPRWVLSQVQLVQSGAEVKKPGASVKVSCKASGFTFSTSYMSWVRQAPGPSTEWMGWIYAGDGGTKYNQKFKGRVTLTVDKSTSTAYMELSSLRSEDTAVYYCATDWYGDWFTYWGQGTLVTVSSASTKGPSVFPLAPSSKSTSGGTAALGCLVKDYFPEPVTVSWNSGALTSGVHTFPAVLQSSGLYSLSSVVTVPSSSLGTQTYICNVNHKPSNTKVDKRVEPKSCDKTHTCPPCPAPELLGGPSVFLFPPKPKDTLMISRTPEVTCVVVDVSHEDPEVKFNWYVDGVEVHNAKTKPREEQYNSTYRVVSVLTVLHQDWLNGKEYKCKVSNKALPAPIEKTISKAKGQPREPQVYTLPPSREEMTKNQVSLTCLVKGFYPSDIAVEWESNGQPENNYKTTPPVLDSDGSFFLYSKLTVDKSRWQQGNVFSCSVMHEALHNHYTQKSLSLSPGK

SEQ ID NO: 12661 - protein, 467 aa, Artificial Sequence
  source: /note="Description of Artificial Sequence: Synthetic polypeptide"
MKHLWFFLLLVAAPRWVLSQVQLVQSGAEVKKPGASVKVSCKASGFTFSTSYMSWVRQAPGPSTEWMGWIYAGDGGTKYNQKFKGRVTLTVDKSTSTAYMELSSLRSEDTAVYYCATDYYGDWFTYWGQGTLVTVSSASTKGPSVFPLAPSSKSTSGGTAALGCLVKDYFPEPVTVSWNSGALTSGVHTFPAVLQSSGLYSLSSVVTVPSSSLGTQTYICNVNHKPSNTKVDKRVEPKSCDKTHTCPPCPAPELLGGPSVFLFPPKPKDTLMISRTPEVTCVVVDVSHEDPEVKFNWYVDGVEVHNAKTKPREEQYNSTYRVVSVLTVLHQDWLNGKEYKCKVSNKALPAPIEKTISKAKGQPREPQVYTLPPSREEMTKNQVSLTCLVKGFYPSDIAVEWESNGQPENNYKTTPPVLDSDGSFFLYSKLTVDKSRWQQGNVFSCSVMHEALHNHYTQKSLSLSPGK

SEQ ID NO: 12662 - protein, 448 aa, Homo sapiens
QVQLQESGPGLVKPSQTLSLNCTVSGGSISSGGYYWSWIRQHPGKGLEWIGYIHYSGSTYYNPSLKSRITISADTSKNQFSLKLNSVTAADTAVYYCARDRGGGDYGRMDVWGQGTTVTVSSASTKGPSVFPLAPCSRSTSESTAALGCLVKDYFPEPVTVSWNSGALTSGVHTFPAVLQSSGLYSLSSVVTVPSSNFGTQTYTCNVDHKPSNTKVDKTVERKCCVECPPCPAPPVAGPSVFLFPPKPKDTLMISRTPEVTCVVVDVSHEDPEVQFNWYVDGVEVHNAKTKPREEQFNSTFRVVSVLTVVHQDWLNGKEYKCKVSNKGLPAPIEKTISKTKGQPREPQVYTLPPSREEMTKNQVSLTCLVKGFYPSDIAVEWESNGQPENNYKTTPPMLDSDGSFFLYSKLTVDKSRWQQGNVFSCSVMHEALHNHYTQKSLSLSPGK

SEQ ID NO: 12663 - protein, 228 aa, Artificial Sequence
  source: /note="Description of Artificial Sequence: Synthetic polypeptide"
EVQLVESGGGLVQPGGSLRLSCAASGFTFTGNWIHWVRQAPGKGLEWVGEISPSGGYTDYADSVKGRFTISADTSKNTAYLQMNSLRAEDTAVYYCARESRVSYEAAMDYWGQGTLVTVSSASTKGPSVFPLAPSSKSTSGGTAALGCLVKDYFPEPVTVSWNSGALTSGVHTFPAVLQSSGLYSLSSVVTVPSSSLGTQTYICNVNHKPSNTKVDKKVEPKSCDKTH

SEQ ID NO: 12664 - protein, 228 aa, Artificial Sequence
  source: /note="Description of Artificial Sequence: Synthetic polypeptide"
EVQLVESGGGLVQPGGSLRLSCAASGFTLSGDWIHWVRQAPGKGLEWLGEISAAGGYTDYADSVKGRFTISADTSKNTAYLQMNSLRAEDTAVYYCARESRVSFEAAMDYWGQGTLVTVSSASTKGPSVFPLAPSSKSTSGGTAALGCLVKDYFPEPVTVSWNSGALTSGVHTFPAVLQSSGLYSLSSVVTVPSSSLGTQTYICNVNHKPSNTKVDKKVEPKSCDKTH

SEQ ID NO: 12665 - protein, 228 aa, Artificial Sequence
  source: /note="Description of Artificial Sequence: Synthetic polypeptide"
EVQLVESGGGLVQPGGSLRLSCAASGFTLSGDWIHWVRQAPGKGLEWVGEISAAGGYTDYADSVKGRFTISADTSKNTAYLQMNSLRAEDTAVYYCARESRVSFEAAMDYWGQGTLVTVSSASTKGPSVFPLAPSSKSTSGGTAALGCLVKDYFPEPVTVSWNSGALTSGVHTFPAVLQSSGLYSLSSVVTVPSSSLGTQTYICNVNHKPSNTKVDKKVEPKSCDKTH

SEQ ID NO: 12666 - protein, 228 aa, Artificial Sequence
  source: /note="Description of Artificial Sequence: Synthetic polypeptide"
EVQLVESGGGLVQPGGSLRLSCAASGFTFSGDWIHWVRQAPGKGLEWVGEISPAGAYTDYADSVKGRFTISADTSKNTAYLQMNSLRAEDTAVYYCAREAKVSFEAAMDYWGQGTLVTVSSASTKGPSVFPLAPSSKSTSGGTAALGCLVKDYFPEPVTVSWNSGALTSGVHTFPAVLQSSGLYSLSSVVTVPSSSLGTQTYICNVNHKPSNTKVDKKVEPKSCDKTH

SEQ ID NO: 12667 - protein, 228 aa, Artificial Sequence
  source: /note="Description of Artificial Sequence: Synthetic polypeptide"
EVQLVESGGGLVQPGGSLRLSCAASGFTFTGDWIHWVRQAPGKGLEWVGEISPAGAYTDYADSVKGRFTISADTSKNTAYLQMNSLRAEDTAVYYCAREAKVSFEAAMDYWGQGTLVTVSSASTKGPSVFPLAPSSKSTSGGTAALGCLVKDYFPEPVTVSWNSGALTSGVHTFPAVLQSSGLYSLSSVVTVPSSSLGTQTYICNVNHKPSNTKVDKKVEPKSCDKTH

SEQ ID NO: 12668 - protein, 228 aa, Artificial Sequence
  source: /note="Description of Artificial Sequence: Synthetic polypeptide"
EVQLVESGGGLVQPGGSLRLSCAASGFTLSGDWIHWVRQAPGKGLEWLGEISAAGGYTDYADSVKGRFTISADTSKNTAYLQMNSLRAEDTAVYYCARESKVSFEAAMDYWGQGTLVTVSSASTKGPSVFPLAPSSKSTSGGTAALGCLVKDYFPEPVTVSWNSGALTSGVHTFPAVLQSSGLYSLSSVVTVPSSSLGTQTYICNVNHKPSNTKVDKKVEPKSCDKTH

SEQ ID NO: 12669 - protein, 228 aa, Artificial Sequence
  source: /note="Description of Artificial Sequence: Synthetic polypeptide"
EVQLVESGGGLVQPGGSLRLSCAASGFTLSGDWIHWVRQAPGKGLEWVGEISAAGGYTDYADSVKGRFTISADTSKNTAYLQMNSLRAEDTAVYYCARESKVSFEAAMDYWGQGTLVTVSSASTKGPSVFPLAPSSKSTSGGTAALGCLVKDYFPEPVTVSWNSGALTSGVHTFPAVLQSSGLYSLSSVVTVPSSSLGTQTYICNVNHKPSNTKVDKKVEPKSCDKTH

SEQ ID NO: 12670 - protein, 712 aa, Artificial Sequence
  source: /note="Description of Artificial Sequence: Synthetic polypeptide"
QVQLVQSGAEVKKPGSSVKVSCKASGYTFTTYYLHWVRQAPGQGLEWMGWIYPGNVHAQYNEKFKGRVTITADKSTSTAYMELSSLRSEDTAVYYCARSWEGFPYWGQGTTVTVSSGGGGSGGGGSGGGGSDIQMTQSPSSLSASVGDRVTITCKASQNVGINVAWYQQKPGKAPKSLISSASYRYSGVPSRFSGSGSGTDFTLTISSLQPEDFATYFCQQYDTYPFTFGQGTKVEIKGGGGSGGGGSGGGGSGGGGSGGGGSQIQLVQSGPELKKPGETVKISCKASGFTFTDYSIHWVKQAPGKGLKWMGWINTETGEPTYTDDFKGRFAFSLVTSATTAYLQINNLNNEDTATFFCARFIYDPYWGFAYWGQGTLVTVSAASTKGPSVFPLAPSSKSTSGGTAALGCLVKDYFPEPVTVSWNSGALTSGVHTFPAVLQSSGLYSLSSVVTVPSSSLGTQTYICNVNHKPSNTKVDKKVEPKSCDKTHTCPPCPAPELLGGPSVFLFPPKPKDTLMISRTPEVTCVVVDVSHEDPEVKFNWYVDGVEVHNAKTKPREEQYNSTYRVVSVLTVLHQDWLNGKEYKCKVSNKALPAPIEKTISKAKGQPREPQVYTLPPSRDELTKNQVSLTCLVKGFYPSDIAVEWESNGQPENNYKTTPPVLDSDGSFFLYSKLTVDKSRWQQGNVFSCSVMHEALHNHYTQKSLSLSPG

SEQ ID NO: 12671 - protein, 717 aa, Artificial Sequence
  source: /note="Description of Artificial Sequence: Synthetic polypeptide"
QVQLVQSGAEVKKPGSSVKVSCKASGYTFTTYYLHWVRQAPGQGLEWMGWIYPGNVHAQYNEKFKGRVTITADKSTSTAYMELSSLRSEDTAVYYCARSWEGFPYWGQGTTVTVSSGGGGSGGGGSGGGGSGGGGSDIQMTQSPSSLSASVGDRVTITCKASQNVGINVAWYQQKPGKAPKSLISSASYRYSGVPSRFSGSGSGTDFTLTISSLQPEDFATYFCQQYDTYPFTFGQGTKVEIKGGGGSGGGGSGGGGSGGGGSGGGGSQIQLVQSGPELKKPGETVKISCKASGFTFTDYSIHWVKQAPGKGLKWMGWINTETGEPTYTDDFKGRFAFSLVTSATTAYLQINNLNNEDTATFFCARFIYDPYWGFAYWGQGTLVTVSAASTKGPSVFPLAPSSKSTSGGTAALGCLVKDYFPEPVTVSWNSGALTSGVHTFPAVLQSSGLYSLSSVVTVPSSSLGTQTYICNVNHKPSNTKVDKKVEPKSCDKTHTCPPCPAPELLGGPSVFLFPPKPKDTLMISRTPEVTCVVVDVSHEDPEVKFNWYVDGVEVHNAKTKPREEQYNSTYRVVSVLTVLHQDWLNGKEYKCKVSNKALPAPIEKTISKAKGQPREPQVYTLPPSRDELTKNQVSLTCLVKGFYPSDIAVEWESNGQPENNYKTTPPVLDSDGSFFLYSKLTVDKSRWQQGNVFSCSVMHEALHNHYTQKSLSLSPG

SEQ ID NO: 12672 - protein, 712 aa, Artificial Sequence
  source: /note="Description of Artificial Sequence: Synthetic polypeptide"
QVQLVQSGAEVKKPGSSVKVSCKASGYTFTTYYLHWVRQAPGQCLEWMGWIYPGNVHAQYNEKFKGRVTITADKSTSTAYMELSSLRSEDTAVYYCARSWEGFPYWGQGTTVTVSSGGGGSGGGGSGGGGSDIQMTQSPSSLSASVGDRVTITCKASQNVGINVAWYQQKPGKAPKSLISSASYRYSGVPSRFSGSGSGTDFTLTISSLQPEDFATYFCQQYDTYPFTFGCGTKVEIKGGGGSGGGGSGGGGSGGGGSGGGGSQIQLVQSGPELKKPGETVKISCKASGFTFTDYSIHWVKQAPGKGLKWMGWINTETGEPTYTDDFKGRFAFSLVTSATTAYLQINNLNNEDTATFFCARFIYDPYWGFAYWGQGTLVTVSAASTKGPSVFPLAPSSKSTSGGTAALGCLVKDYFPEPVTVSWNSGALTSGVHTFPAVLQSSGLYSLSSVVTVPSSSLGTQTYICNVNHKPSNTKVDKKVEPKSCDKTHTCPPCPAPELLGGPSVFLFPPKPKDTLMISRTPEVTCVVVDVSHEDPEVKFNWYVDGVEVHNAKTKPREEQYNSTYRVVSVLTVLHQDWLNGKEYKCKVSNKALPAPIEKTISKAKGQPREPQVYTLPPSRDELTKNQVSLTCLVKGFYPSDIAVEWESNGQPENNYKTTPPVLDSDGSFFLYSKLTVDKSRWQQGNVFSCSVMHEALHNHYTQKSLSLSPG

SEQ ID NO: 12673 - protein, 717 aa, Artificial Sequence
  source: /note="Description of Artificial Sequence: Synthetic polypeptide"
QVQLVQSGAEVKKPGSSVKVSCKASGYTFTTYYLHWVRQAPGQCLEWMGWIYPGNVHAQYNEKFKGRVTITADKSTSTAYMELSSLRSEDTAVYYCARSWEGFPYWGQGTTVTVSSGGGGSGGGGSGGGGSGGGGSDIQMTQSPSSLSASVGDRVTITCKASQNVGINVAWYQQKPGKAPKSLISSASYRYSGVPSRFSGSGSGTDFTLTISSLQPEDFATYFCQQYDTYPFTFGCGTKVEIKGGGGSGGGGSGGGGSGGGGSGGGGSQIQLVQSGPELKKPGETVKISCKASGFTFTDYSIHWVKQAPGKGLKWMGWINTETGEPTYTDDFKGRFAFSLVTSATTAYLQINNLNNEDTATFFCARFIYDPYWGFAYWGQGTLVTVSAASTKGPSVFPLAPSSKSTSGGTAALGCLVKDYFPEPVTVSWNSGALTSGVHTFPAVLQSSGLYSLSSVVTVPSSSLGTQTYICNVNHKPSNTKVDKKVEPKSCDKTHTCPPCPAPELLGGPSVFLFPPKPKDTLMISRTPEVTCVVVDVSHEDPEVKFNWYVDGVEVHNAKTKPREEQYNSTYRVVSVLTVLHQDWLNGKEYKCKVSNKALPAPIEKTISKAKGQPREPQVYTLPPSRDELTKNQVSLTCLVKGFYPSDIAVEWESNGQPENNYKTTPPVLDSDGSFFLYSKLTVDKSRWQQGNVFSCSVMHEALHNHYTQKSLSLSPG

SEQ ID NO: 12674 - protein, 704 aa, Artificial Sequence
  source: /note="Description of Artificial Sequence: Synthetic polypeptide"
QIQLVQSGPELKKPGETVKISCKASGFTFTDYSIHWVKQAPGKGLKWMGWINTETGEPTYTDDFKGRFAFSLVTSATTAYLQINNLNNEDTATFFCARFIYDPYWGFAYWGQGTLVTVSAASTKGPSVFPLAPSSKSTSGGTAALGCLVKDYFPEPVTVSWNSGALTSGVHTFPAVLQSSGLYSLSSVVTVPSSSLGTQTYICNVNHKPSNTKVDKKVEPKSCDKTHTCPPCPAPELLGGPSVFLFPPKPKDTLMISRTPEVTCVVVDVSHEDPEVKFNWYVDGVEVHNAKTKPREEQYNSTYRVVSVLTVLHQDWLNGKEYKCKVSNKALPAPIEKTISKAKGQPREPQVYTLPPSRDELTKNQVSLTCLVKGFYPSDIAVEWESNGQPENNYKTTPPVLDSDGSFFLYSKLTVDKSRWQQGNVFSCSVMHEALHNHYTQKSLSLSPGKSGGGGSGGGGSGGGGSQVQLVQSGAEVKKPGSSVKVSCKASGYTFTTYYLHWVRQAPGQGLEWMGWIYPGNVHAQYNEKFKGRVTITADKSTSTAYMELSSLRSEDTAVYYCARSWEGFPYWGQGTTVTVSSGGGGSGGGGSGGGGSDIQMTQSPSSLSASVGDRVTITCKASQNVGINVAWYQQKPGKAPKSLISSASYRYSGVPSRFSGSGSGTDFTLTISSLQPEDFATYFCQQYDTYPFTFGQGTKVEIK

SEQ ID NO: 12675 - protein, 709 aa, Artificial Sequence
  source: /note="Description of Artificial Sequence: Synthetic polypeptide"
QIQLVQSGPELKKPGETVKISCKASGFTFTDYSIHWVKQAPGKGLKWMGWINTETGEPTYTDDFKGRFAFSLVTSATTAYLQINNLNNEDTATFFCARFIYDPYWGFAYWGQGTLVTVSAASTKGPSVFPLAPSSKSTSGGTAALGCLVKDYFPEPVTVSWNSGALTSGVHTFPAVLQSSGLYSLSSVVTVPSSSLGTQTYICNVNHKPSNTKVDKKVEPKSCDKTHTCPPCPAPELLGGPSVFLFPPKPKDTLMISRTPEVTCVVVDVSHEDPEVKFNWYVDGVEVHNAKTKPREEQYNSTYRVVSVLTVLHQDWLNGKEYKCKVSNKALPAPIEKTISKAKGQPREPQVYTLPPSRDELTKNQVSLTCLVKGFYPSDIAVEWESNGQPENNYKTTPPVLDSDGSFFLYSKLTVDKSRWQQGNVFSCSVMHEALHNHYTQKSLSLSPGKSGGGGSGGGGSGGGGSQVQLVQSGAEVKKPGSSVKVSCKASGYTFTTYYLHWVRQAPGQGLEWMGWIYPGNVHAQYNEKFKGRVTITADKSTSTAYMELSSLRSEDTAVYYCARSWEGFPYWGQGTTVTVSSGGGGSGGGGSGGGGSGGGGSDIQMTQSPSSLSASVGDRVTITCKASQNVGINVAWYQQKPGKAPKSLISSASYRYSGVPSRFSGSGSGTDFTLTISSLQPEDFATYFCQQYDTYPFTFGQGTKVEIK

SEQ ID NO: 12676 - protein, 704 aa, Artificial Sequence
  source: /note="Description of Artificial Sequence: Synthetic polypeptide"
QIQLVQSGPELKKPGETVKISCKASGFTFTDYSIHWVKQAPGKGLKWMGWINTETGEPTYTDDFKGRFAFSLVTSATTAYLQINNLNNEDTATFFCARFIYDPYWGFAYWGQGTLVTVSAASTKGPSVFPLAPSSKSTSGGTAALGCLVKDYFPEPVTVSWNSGALTSGVHTFPAVLQSSGLYSLSSVVTVPSSSLGTQTYICNVNHKPSNTKVDKKVEPKSCDKTHTCPPCPAPELLGGPSVFLFPPKPKDTLMISRTPEVTCVVVDVSHEDPEVKFNWYVDGVEVHNAKTKPREEQYNSTYRVVSVLTVLHQDWLNGKEYKCKVSNKALPAPIEKTISKAKGQPREPQVYTLPPSRDELTKNQVSLTCLVKGFYPSDIAVEWESNGQPENNYKTTPPVLDSDGSFFLYSKLTVDKSRWQQGNVFSCSVMHEALHNHYTQKSLSLSPGKSGGGGSGGGGSGGGGSQVQLVQSGAEVKKPGSSVKVSCKASGYTFTTYYLHWVRQAPGQCLEWMGWIYPGNVHAQYNEKFKGRVTITADKSTSTAYMELSSLRSEDTAVYYCARSWEGFPYWGQGTTVTVSSGGGGSGGGGSGGGGSDIQMTQSPSSLSASVGDRVTITCKASQNVGINVAWYQQKPGKAPKSLISSASYRYSGVPSRFSGSGSGTDFTLTISSLQPEDFATYFCQQYDTYPFTFGCGTKVEIK

SEQ ID NO: 12677 - protein, 709 aa, Artificial Sequence
  source: /note="Description of Artificial Sequence: Synthetic polypeptide"
QIQLVQSGPELKKPGETVKISCKASGFTFTDYSIHWVKQAPGKGLKWMGWINTETGEPTYTDDFKGRFAFSLVTSATTAYLQINNLNNEDTATFFCARFIYDPYWGFAYWGQGTLVTVSAASTKGPSVFPLAPSSKSTSGGTAALGCLVKDYFPEPVTVSWNSGALTSGVHTFPAVLQSSGLYSLSSVVTVPSSSLGTQTYICNVNHKPSNTKVDKKVEPKSCDKTHTCPPCPAPELLGGPSVFLFPPKPKDTLMISRTPEVTCVVVDVSHEDPEVKFNWYVDGVEVHNAKTKPREEQYNSTYRVVSVLTVLHQDWLNGKEYKCKVSNKALPAPIEKTISKAKGQPREPQVYTLPPSRDELTKNQVSLTCLVKGFYPSDIAVEWESNGQPENNYKTTPPVLDSDGSFFLYSKLTVDKSRWQQGNVFSCSVMHEALHNHYTQKSLSLSPGKSGGGGSGGGGSGGGGSQVQLVQSGAEVKKPGSSVKVSCKASGYTFTTYYLHWVRQAPGQCLEWMGWIYPGNVHAQYNEKFKGRVTITADKSTSTAYMELSSLRSEDTAVYYCARSWEGFPYWGQGTTVTVSSGGGGSGGGGSGGGGSGGGGSDIQMTQSPSSLSASVGDRVTITCKASQNVGINVAWYQQKPGKAPKSLISSASYRYSGVPSRFSGSGSGTDFTLTISSLQPEDFATYFCQQYDTYPFTFGCGTKVEIK

SEQ ID NO: 12678 - protein, 709 aa, Artificial Sequence
  source: /note="Description of Artificial Sequence: Synthetic polypeptide"
QIQLVQSGPELKKPGETVKISCKASGFTFTDYSIHWVKQAPGKGLKWMGWINTETGEPTYTDDFKGRFAFSLVTSATTAYLQINNLNNEDTATFFCARFIYDPYWGFAYWGQGTLVTVSAASTKGPSVFPLAPSSKSTSGGTAALGCLVKDYFPEPVTVSWNSGALTSGVHTFPAVLQSSGLYSLSSVVTVPSSSLGTQTYICNVNHKPSNTKVDKKVEPKSCDKTHTCPPCPAPELLGGPSVFLFPPKPKDTLMISRTPEVTCVVVDVSHEDPEVKFNWYVDGVEVHNAKTKPREEQYNSTYRVVSVLTVLHQDWLNGKEYKCKVSNKALPAPIEKTISKAKGQPREPQVYTLPPSRDELTKNQVSLTCLVKGFYPSDIAVEWESNGQPENNYKTTPPVLDSDGSFFLYSKLTVDKSRWQQGNVFSCSVMHEALHNHYTQKSLSLSPGKSGGGGSGGGGSGGGGSQVQLVQSGAEVKKPGESVKVSCKASGYTFTTYYLHWVRQAPGQGLEWMGWIYPGNVHAQYNEKFKGRVTITADKSTSTAYMELSSLRSEDTAVYYCARSWEGFPYWGQGTTVTVSSGGGGSGGGGSGGGGSGGGGSDIQMTQSPSSLSASVGDRVTITCKASQNVGINVAWYQQKPGKAPKLLISSASYRYSGVPSRFSGSGSGTDFTLTISSLQPEDFATYFCQQYDTYPFTFGQGTKVEIK

SEQ ID NO: 12679 - protein, 709 aa, Artificial Sequence
  source: /note="Description of Artificial Sequence: Synthetic polypeptide"
QIQLVQSGPELKKPGETVKISCKASGFTFTDYSIHWVKQAPGKGLKWMGWINTETGEPTYTDDFKGRFAFSLVTSATTAYLQINNLNNEDTATFFCARFIYDPYWGFAYWGQGTLVTVSAASTKGPSVFPLAPSSKSTSGGTAALGCLVKDYFPEPVTVSWNSGALTSGVHTFPAVLQSSGLYSLSSVVTVPSSSLGTQTYICNVNHKPSNTKVDKKVEPKSCDKTHTCPPCPAPELLGGPSVFLFPPKPKDTLMISRTPEVTCVVVDVSHEDPEVKFNWYVDGVEVHNAKTKPREEQYNSTYRVVSVLTVLHQDWLNGKEYKCKVSNKALPAPIEKTISKAKGQPREPQVYTLPPSRDELTKNQVSLTCLVKGFYPSDIAVEWESNGQPENNYKTTPPVLDSDGSFFLYSKLTVDKSRWQQGNVFSCSVMHEALHNHYTQKSLSLSPGKSGGGGSGGGGSGGGGSQVQLVQSGAEVKKPGESVKVSCKASGYTFTTYYLHWVRQAPGQCLEWMGWIYPGNVHAQYNEKFKGRVTITADKSTSTAYMELSSLRSEDTAVYYCARSWEGFPYWGQGTTVTVSSGGGGSGGGGSGGGGSGGGGSDIQMTQSPSSLSASVGDRVTITCKASQNVGINVAWYQQKPGKAPKLLISSASYRYSGVPSRFSGSGSGTDFTLTISSLQPEDFATYFCQQYDTYPFTFGCGTKVEIK

SEQ ID NO: 12680 - protein, 119 aa, Artificial Sequence
  source: /note="Description of Artificial Sequence: Synthetic polypeptide"
EVQLVESGGGLVQPGGSLRLSCAASGFTFSSYAMSWVRQAPGKGLEWVAVISGDGGSTYYADSVKGRFTISRDNSKNTLYLQMNSLRAEDTAVYYCARGRVGYSLYDYWGQGTLVTVSS

SEQ ID NO: 12681 - protein, 446 aa, Artificial Sequence; identical to SEQ ID NO: 6796
  source: /note="Description of Artificial Sequence: Synthetic polypeptide"

SEQ ID NO: 12682 - protein, 449 aa, Artificial Sequence; identical to SEQ ID NO: 6807
  source: /note="Description of Artificial Sequence: Synthetic polypeptide"

SEQ ID NO: 12683 - protein, 447 aa, Artificial Sequence; identical to SEQ ID NO: 6818
  source: /note="Description of Artificial Sequence: Synthetic polypeptide"

SEQ ID NO: 12684 - protein, 447 aa, Artificial Sequence; identical to SEQ ID NO: 6799
  source: /note="Description of Artificial Sequence: Synthetic polypeptide"

SEQ ID NO: 12685 - protein, 443 aa, Artificial Sequence; identical to SEQ ID NO: 6800
  source: /note="Description of Artificial Sequence: Synthetic polypeptide"

SEQ ID NO: 12686 - protein, 446 aa, Artificial Sequence; identical to SEQ ID NO: 6801
  source: /note="Description of Artificial Sequence: Synthetic polypeptide"

SEQ ID NO: 12687 - protein, 446 aa, Artificial Sequence; identical to SEQ ID NO: 6801
  source: /note="Description of Artificial Sequence: Synthetic polypeptide"

SEQ ID NO: 12688 - protein, 449 aa, Artificial Sequence; identical to SEQ ID NO: 6803
  source: /note="Description of Artificial Sequence: Synthetic polypeptide"

SEQ ID NO: 12689 - protein, 450 aa, Artificial Sequence; identical to SEQ ID NO: 6804
  source: /note="Description of Artificial Sequence: Synthetic polypeptide"

SEQ ID NO: 12690 - protein, 452 aa, Artificial Sequence; identical to SEQ ID NO: 6805
  source: /note="Description of Artificial Sequence: Synthetic polypeptide"

SEQ ID NO: 12691 - protein, 458 aa, Artificial Sequence; identical to SEQ ID NO: 6806
  source: /note="Description of Artificial Sequence: Synthetic polypeptide"

SEQ ID NO: 12692 - protein, 446 aa, Artificial Sequence; identical to SEQ ID NO: 6808
  source: /note="Description of Artificial Sequence: Synthetic polypeptide"

SEQ ID NO: 12693 - protein, 449 aa, Artificial Sequence; identical to SEQ ID NO: 6809
  source: /note="Description of Artificial Sequence: Synthetic polypeptide"

SEQ ID NO: 12694 - protein, 446 aa, Artificial Sequence; identical to SEQ ID NO: 6810
  source: /note="Description of Artificial Sequence: Synthetic polypeptide"

SEQ ID NO: 12695 - protein, 446 aa, Artificial Sequence; identical to SEQ ID NO: 6811
  source: /note="Description of Artificial Sequence: Synthetic polypeptide"

SEQ ID NO: 12696 - protein, 449 aa, Artificial Sequence; identical to SEQ ID NO: 6812
  source: /note="Description of Artificial Sequence: Synthetic polypeptide"

SEQ ID NO: 12697 - protein, 449 aa, Artificial Sequence; identical to SEQ ID NO: 6813
  source: /note="Description of Artificial Sequence: Synthetic polypeptide"

SEQ ID NO: 12698 - protein, 450 aa, Artificial Sequence; identical to SEQ ID NO: 6814
  source: /note="Description of Artificial Sequence: Synthetic polypeptide"

SEQ ID NO: 12699 - protein, 448 aa, Artificial Sequence; identical to SEQ ID NO: 6815
  source: /note="Description of Artificial Sequence: Synthetic polypeptide"

SEQ ID NO: 12700 - protein, 451 aa, Artificial Sequence; identical to SEQ ID NO: 6816
  source: /note="Description of Artificial Sequence: Synthetic polypeptide"

SEQ ID NO: 12701 - protein, 447 aa, Artificial Sequence; identical to SEQ ID NO: 6817
  source: /note="Description of Artificial Sequence: Synthetic polypeptide"

SEQ ID NO: 12702 - protein, 446 aa, Artificial Sequence; identical to SEQ ID NO: 6819
  source: /note="Description of Artificial Sequence: Synthetic polypeptide"

SEQ ID NO: 12703 - protein, 449 aa, Artificial Sequence; identical to SEQ ID NO: 6820
  source: /note="Description of Artificial Sequence: Synthetic polypeptide"

SEQ ID NO: 12704 - protein, 448 aa, Artificial Sequence; identical to SEQ ID NO: 6821
  source: /note="Description of Artificial Sequence: Synthetic polypeptide"

SEQ ID NO: 12705 - protein, 449 aa, Artificial Sequence; identical to SEQ ID NO: 6822
  source: /note="Description of Artificial Sequence: Synthetic polypeptide"

SEQ ID NO: 12706 - protein, 453 aa, Artificial Sequence; identical to SEQ ID NO: 6797
  source: /note="Description of Artificial Sequence: Synthetic polypeptide"

SEQ ID NO: 12707 - protein, 449 aa, Artificial Sequence; identical to SEQ ID NO: 6798
  source: /note="Description of Artificial Sequence: Synthetic polypeptide"

SEQ ID NO: 12708 - protein, 230 aa, Unknown
  source: /note="Description of Unknown: heavy chain 5D5 Fab sequence"
ZVQLQQSGPELVRPGASVKMSCRASGYTFTSYWLHWVKQRPGQGLEWIGMIDPSNSDTRFNPNFKDKATLNVDRSSNTAYMLLSSLTSADSAVYYCATYGSYVSPLDYWGQGTSVTVSSASTKGPSVFPLAPSSKSTSGGTAALGCLVKDYFPEPVTVSWNSGALTSGVHTFPAVLQSSGLYSLSSVVTVPSSSLGTQTYICNVNHKPSNTKVDKKVEPKSCDKTHTAAP

SEQ ID NO: 12709 - protein, 141 aa, Artificial Sequence
  source: /note="Description of Artificial Sequence: Synthetic polypeptide"
MEFGLSWVFLVAIIKGVQCQVQLVESGGGLVKPGGSLRLSCAASGFTFSDYYMSWIRQAPGKGLEWVSYISSSGSTIYYADSVKGRFTISRDNAKNSLYLQMNSLRAEDTAVYYCARDEYNSGWYVLFDYWGQGTLVTVSS

SEQ ID NO: 12710 - protein, 137 aa, Artificial Sequence
  source: /note="Description of Artificial Sequence: Synthetic polypeptide"
MEFGLNWVFLVALLRGVQCQVQLVESGGGVVQPGRSLRLSCAASGFTFSSYGMHWVRQAPGKGLEWVAVIWYDGSDKYYADSVKGRFTISRDNSKNTLYLQMNSLRAEDTAVYYCAREDYGEGFDYWGQGTLVTVSS

SEQ ID NO: 12711 - protein, 139 aa, Artificial Sequence
  source: /note="Description of Artificial Sequence: Synthetic polypeptide"
MDWTWRILFLVAAATGAHSQVQLVQSGAEVKKPGASVKVSCKASGYTFTGYYINWVRQAPGQGLEWMGWINPNSGGTNYAQKFQGRVTMTRDTSITTAYMELSRLRADDTAVYYCARELELRYYGMDVWGQGTTVTVSS

SEQ ID NO: 12712 - protein, 148 aa, Artificial Sequence
  source: /note="Description of Artificial Sequence: Synthetic polypeptide"
MKHLWFFLLLVAAPRWVLSQVQLQESGPGLVKPSQTLSLTCTVSGGSISSDGYYWSWIRQHPGKGLEWIGYIYYSGSTYYNPSLKSRVTISVDTSKNQFSLKLSSVTAADTAVYYCARSHLHYYDSSGYYYGGAFDIWGQGTMVTVSS

SEQ ID NO: 12713 - protein, 139 aa, Artificial Sequence
  source: /note="Description of Artificial Sequence: Synthetic polypeptide"
MDWTWRILFLVAAATGAHSQVQLVQSGAEVKKPGASVKVSCKASGYTFTGYYIHWVRQAPGQGLEWMGWINPNSGGTNYAQKFQGRVTMTRDTSISTAYMELSRLRSDDTAVYYCARELELRYYGMDVWGQGTTVTVSS

SEQ ID NO: 12714 - protein, 144 aa, Artificial Sequence
  source: /note="Description of Artificial Sequence: Synthetic polypeptide"
MKHLWFFLLLVAAPRWVLSQVQLQESGPGLVKPSQTLSLTCTVSGGSISSGGYYWSWIRQHPGKGLEWIGYIYYSGSTYYNPSLKSRVTISVDTSKNQFSLKVSSVTAADTAVYYCARDPLWFGEFDYYGMDVWGQGTTVTVSS

SEQ ID NO: 12715 - protein, 142 aa, Artificial Sequence
  source: /note="Description of Artificial Sequence: Synthetic polypeptide"
MKHLWFFLLLVAAPRWILSQVQLKESGPGLVKPSQTLSLTCTVSGGSISSGVYYWSWIRQHPGKGLEWIGYFYYSGNTYHNPSLKSRVTISVDTSKNQFSLKLSSVTAADTAVYYCARDRSGYDHPDAFDIWGQGTMVTVSS

SEQ ID NO: 12716 - protein, 139 aa, Artificial Sequence
  source: /note="Description of Artificial Sequence: Synthetic polypeptide"
MKHLWFFLLLVAAPRWVLSQVQLQESGPGLVKPSETLSLTCTVSGGSISIYYWSWIRQPPGKGLEWIGYVYYSGSTNYNPSLKSRVTISVDTSKNQFSLKLNSVTAADTAVYYCARGGYDFWSGYFDYWGQGTLVTVSS

SEQ ID NO: 12717 - protein, 140 aa, Artificial Sequence
  source: /note="Description of Artificial Sequence: Synthetic polypeptide"
MKHLWFFLLLVAAPRWVLSQVQLQESGPGLVKPSQTLSLTCTVSGGSISSGGYYWSWIRQHPGKGLEWIGNIYYSGITYYNPSLKSRVTMSVDTSKNQFSLKLSSVTAADTAVYYCARDPLYGDYGFDPWGQGTLVTVSS

SEQ ID NO: 12718 - protein, 139 aa, Artificial Sequence
  source: /note="Description of Artificial Sequence: Synthetic polypeptide"
MKHLWFFLLLVAAPRWVLSQVQLQQWGAGLLKPSETLSLTCAVYGGSFSTYYWSWIRQPPGKGLEWIGEINHSGSTNYNPSLKSRVTISVDTSKNQFSLKLSSVTAADTAVYYCARGGYDFWSGYYDYWGQGTLVTVSS

SEQ ID NO: 12719 - protein, 326 aa, Artificial Sequence; identical to SEQ ID NO: 3888
  source: /note="Description of Artificial Sequence: Synthetic polypeptide"

SEQ ID NO: 12720 - protein, 469 aa, Artificial Sequence
  source: /note="Description of Artificial Sequence: Synthetic polypeptide"
MDCTWRILFLVAAATGTHAEVQLVQSGAEVKKPGASVKVSCKVSGYTFSGNWIEWVRQAPGKGLEWIGEILPGSGNTNYNEKFKGKATMTADTSTDTAYMELSSLRSEDTAVYYCARGGHYYGSSWDYWGQGTLVTVSSASTKGPSVFPLAPSSKSTSGGTAALGCLVKDYFPEPVTVSWNSGALTSGVHTFPAVLQSSGLYSLSSVVTVPSSSLGTQTYICNVNHKPSNTKVDKRVEPKSCDKTHTCPPCPAPELLGGPSVFLFPPKPKDTLMISRTPEVTCVVVDVSHEDPEVKFNWYVDGVEVHNAKTKPREEQYNSTYRVVSVLTVLHQDWLNGKEYKCKVSNKALPAPIEKTISKAKGQPREPQVYTLPPSREEMTKNQVSLTCLVKGFYPSDIAVEWESNGQPENNYKTTPPVLDSDGSFFLYSKLTVDKSRWQQGNVFSCSVMHEALHNHYTQKSLSLSPGK

SEQ ID NO: 12721 - protein, 121 aa, Artificial Sequence
  source: /note="Description of Artificial Sequence: Synthetic polypeptide"
  MOD_RES (20)..(20): Any amino acid
  MOD_RES (34)..(34): Any amino acid
  MOD_RES (43)..(43): Any amino acid
  MOD_RES (50)..(50): Any amino acid
  MOD_RES (52)..(52): Any amino acid
  MOD_RES (54)..(54): Any amino acid
  MOD_RES (57)..(57): Any amino acid
  MOD_RES (59)..(59): Any amino acid
  MOD_RES (99)..(100): Any amino acid
  MOD_RES (103)..(108): Any amino acid
  MOD_RES (116)..(116): Any amino acid
QVQLQQSGAELVKPGASVKXSCKASGYTFTSYWXHWVKQRPGXGLEWIGXIXPXSGXTXYNEKFKGKATLTVDKSSSTAYMQLSSLTSEDSAVVYCARXXYYXXXXXXDYWGQGTXVTVSS

SEQ ID NO: 12722 - protein, 137 aa, Artificial Sequence
  source: /note="Description of Artificial Sequence: Synthetic polypeptide"
MDIRLSLVFLVLFIKGVQCQVQLVESGGGVVQPGRSLRLSCAASGFTFSNYYMTWVRQAPGKGLEWVAYISSGGGSTYYRDSVKGRFTISRDNSKNTLYLQMNSLRAEDTAVYYCAREDYGYWFAYWGQGTLVTVSS

SEQ ID NO: 12723 - protein, 118 aa, Artificial Sequence
  source: /note="Description of Artificial Sequence: Synthetic polypeptide"
EVQLVESGGGLVQPGGSLRLSCAASGFTFSNYYMTWVRQAPGKGLEWVSYISSGGGSTYYRDSVKGRFTISRDNSKNTLYLQMNSLRAEDTAVYYCAREDYGYWFAYWGQGTLVTVSS

SEQ ID NO: 12724 - protein, 452 aa, Homo sapiens
QVELVESGGGLVQPGGSLRLSCAASGFTFSNYWMHWVRQAPGKGLEWVSGISGWSSWTYYADSVKGRFTISRDNSKNTLYLQMNSLRAEDTAVYYCARFGIDAYTKVYFDYWGQGTLVTVSSASTKGPSVFPLAPSSKSTSGGTAALGCLVKDYFPEPVTVSWNSGALTSGVHTFPAVLQSSGLYSLSSVVTVPSSSLGTQTYICNVNHKPSNTKVDKKVEPKSCDKTHTCPPCPAPELLGGPSVFLFPPKPKDTLMISRTPEVTCVVVDVSHEDPEVKFNWYVDGVEVHNAKTKPREEQYNSTYRVVSVLTVLHQDWLNGKEYKCKVSNKALPAPIEKTISKAKGQPREPQVYTLPPSRDELTKNQVSLTCLVKGFYPSDIAVEWESNGQPENNYKTTPPVLDSDGSFFLYSKLTVDKSRWQQGNVFSCSVMHEALHNHYTQKSLSLSPGK

SEQ ID NO: 12725 - protein, 122 aa, Artificial Sequence
  source: /note="Description of Artificial Sequence: Synthetic polypeptide"
QVQLQQPGAELVKPGASVKLSCKASGYTFTSYWMHWVKQGPGQGLEWIGEIDPSDSYPNYNEKFKGKATLTVDKSSSTAYMQLSSLTSEDSAVYYCASLYYYGTSYGVLDYWGQGTSVTVSS

SEQ ID NO: 12726 - protein, 118 aa, Artificial Sequence
  source: /note="Description of Artificial Sequence: Synthetic polypeptide"
QVQFQQSGAELVKPGASVKLSCKASGYTFTSYLMHWIKQRPGRGLEWIGRIDPNNVVTKFNEKFKSKATLTVDKPSSTAYMELSSLTSEDSAVYYCARYAYCRPMDYWGQGTTVTVSS

SEQ ID NO: 12727 - protein, 115 aa, Artificial Sequence
  source: /note="Description of Artificial Sequence: Synthetic polypeptide"
VQLQQSGAELMKPGASVKISCKASGYTFSDYWIEWVKQRPGHGLEWIGEILPGSGSTNYHERFKGKATFTADTSSSTAYMQLNSLTSEDSGVYYCLHGNYDFDGWGQGTTLTVSS

SEQ ID NO: 12728 - protein, 137 aa, Homo sapiens; identical to SEQ ID NO: 7205

SEQ ID NO: 12729 - protein, 144 aa, Homo sapiens
MELGLSWIFLLAILKGVQCEVQLVESGGGLVQPGRSLRLSCAASGFTFDDYAMHWVRQAPGKGLEWVSGISWNSGSKGYVDSVKGRFTISRDNAKNSLYLQMNSLRAEDTALYYCAKDIRIGVAASYYFGMDVWGHGTTVTVSS

SEQ ID NO: 12730 - protein, 146 aa, Homo sapiens
MDWTWRILFLVAAATGAHSQVQLVQSGAEVKKPGASVKVSCKASGYTFTSYVMHWVRQAPGQRLEWMGWINAGNGNTKYSQKFQGRVTITRDTSASTVYMELSSLRSEDTAVYYCARGGMPVAGPGYFYYYGMDVWGQGTTVTVSS

SEQ ID NO: 12731 - protein, 472 aa, Artificial Sequence
  source: /note="Description of Artificial Sequence: Synthetic polypeptide"
MGWSWIFFFLLSETAGVLSEVQLQQSGPELVKPGASVRISCKASGYAFTDYYMNWVKQSHGKSLEWVANINPNNGGTNYNQKFKDKATLTVDKSSNTAYMELRSLTSEDTAVYYCARWILYYGRSKWYFDVWGTGTLVTVSSASTKGPSVFPLAPSSKSTSGGTAALGCLVKDYFPEPVTVSWNSGALTSGVHTFPAVLQSSGLYSLSSVVTVPSSSLGTQTYICNVNHKPSNTKVDKKVEPKSCDKTHTCPPCPAPELLGGPSVFLFPPKPKDTLMISRTPEVTCVVVDVSHEDPEVKFNWYVDGVEVHNAKTKPREEQYNSTYRVVSVLTVLHQDWLNGKEYKCKVSNKALPAPIEKTISKAKGQPREPQVYTLPPSRDELTKNQVSLTCLVKGFYPSDIAVEWESNGQPENNYKTTPPVLDSDGSFFLYSKLTVDKSRWQQGNVFSCSVMHEALHNHYTQKSLSLSPGK

SEQ ID NO: 12732 - protein, 472 aa, Homo sapiens
MGWSCIILFLVATATGVHSQVQLVQSGAEVKKPGASVKVSCKASGYAFTDYYMNWVRQAPGQGLEWMGNINPNNGGTNYNQKFKDRVTMTTDTSTSTAYMELRSLRSDDTAVYYCARWILYYGRSKWYFDVWGRGTLVTVSSASTKGPSVFPLAPSSKSTSGGTAALGCLVKDYFPEPVTVSWNSGALTSGVHTFPAVLQSSGLYSLSSVVTVPSSSLGTQTYICNVNHKPSNTKVDKKVEPKSCDKTHTCPPCPAPELLGGPSVFLFPPKPKDTLMISRTPEVTCVVVDVSHEDPEVKFNWYVDGVEVHNAKTKPREEQYNSTYRVVSVLTVLHQDWLNGKEYKCKVSNKALPAPIEKTISKAKGQPREPQVYTLPPSRDELTKNQVSLTCLVKGFYPSDIAVEWESNGQPENNYKTTPPVLDSDGSFFLYSKLTVDKSRWQQGNVFSCSVMHEALHNHYTQKSLSLSPGK

SEQ ID NO: 12733 - protein, 472 aa, Homo sapiens
MGWSCIILFLVATATGVHSQVQLVQSGAEVKKPGASVKVSCKASGYTFTDYYMNWVRQAPGQGLEWMGNINPNNGGTNYNQKFKDRVTMTTDTSTSTAYMELRSLRSDDTAVYYCARWILYYGRSKWYFDVWGRGTLVTVSSASTKGPSVFPLAPSSKSTSGGTAALGCLVKDYFPEPVTVSWNSGALTSGVHTFPAVLQSSGLYSLSSVVTVPSSSLGTQTYICNVNHKPSNTKVDKKVEPKSCDKTHTCPPCPAPELAGAPSVFLFPPKPKDTLMISRTPEVTCVVVDVSHEDPEVKFNWYVDGVEVHNAKTKPREEQYNSTYRVVSVLTVLHQDWLNGKEYKCKVSNKALPAPIEKTISKAKGQPREPQVYTLPPSRDELTKNQVSLTCLVKGFYPSDIAVEWESNGQPENNYKTTPPVLDSDGSFFLYSKLTVDKSRWQQGNVFSCSVMHEALHNHYTQKSLSLSPGK

SEQ ID NO: 12734 - protein, 472 aa, Homo sapiens
MGWSCIILFLVATATGVHSQVQLVQSGAEVKKPGASVKVSCKASGYAFTDYYMNWVRQAPGQGLEWMGNINPNNGGTNYNQKFKDRVTMTTDTSTSTAYMELRSLRSDDTAVYYCARWILYYGRSKWYFDVWGRGTLVTVSSASTKGPSVFPLAPSSKSTSGGTAALGCLVKDYFPEPVTVSWNSGALTSGVHTFPAVLQSSGLYSLSSVVTVPSSSLGTQTYICNVNHKPSNTKVDKKVEPKSCDKTHTCPPCPAPELAGAPSVFLFPPKPKDTLMISRTPEVTCVVVDVSHEDPEVKFNWYVDGVEVHNAKTKPREEQYNSTYRVVSVLTVLHQDWLNGKEYKCKVSNKALPAPIEKTISKAKGQPREPQVYTLPPSRDELTKNQVSLTCLVKGFYPSDIAVEWESNGQPENNYKTTPPVLDSDGSFFLYSKLTVDKSRWQQGNVFSCSVMHEALHNHYTQKSLSLSPGK

SEQ ID NO: 12735 - protein, 472 aa, Homo sapiens
MGWSCIILFLVATATGVHSQVQLVQSGAEVKKPGASVKVSCKASGYTFTDYYMNWVRQAPGQGLEWMGNINPNNGGTNYNQKFKDRVTMTTDTSTSTAYMELRSLRSDDTAVYYCARWILYYGRSKWYFDVWGRGTLVTVSSASTKGPSVFPLAPSSKSTSGGTAALGCLVKDYFPEPVTVSWNSGALTSGVHTFPAVLQSSGLYSLSSVVTVPSSSLGTQTYICNVNHKPSNTKVDKKVEPKSCDKTHTCPPCPAPELLGGPDVFLFPPKPKDTLMISRTPEVTCVVVDVSHEDPEVKFNWYVDGVEVHNAKTKPREEQYNSTYRVVSVLTVLHQDWLNGKEYKCKVSNKALPAPEEKTISKAKGQPREPQVYTLPPSRDELTKNQVSLTCLVKGFYPSDIAVEWESNGQPENNYKTTPPVLDSDGSFFLYSKLTVDKSRWQQGNVFSCSVMHEALHNHYTQKSLSLSPGK

SEQ ID NO: 12736 - protein, 120 aa, Artificial Sequence
  source: /note="Description of Artificial Sequence: Synthetic polypeptide"
QVQLKESGPDLVAPSQSLSITCTVSGFSLTNYGVHWVRQFPGKGLEWLGVIWAGGNTNYNSALMSRLTISKDNSKSQVFLKMNSLQTDDTAVYYCAREYGSTYVAWFAHWGQGTLVTVSS

SEQ ID NO: 12737 - protein, 135 aa, Homo sapiens
MKVLSLLYLLTAIPGILSQVQLQESGPGLVKPSETLSLTCTVSGYSITGGYLWNWIRQPPGKGLEWMGYISYDGTNNYKPSLKDRITISRDTSKNQFSLKLSSVTAADTAVYYCARYGRVFFDYWGQGTLVTVSS

SEQ ID NO: 12738 - protein, 135 aa, Homo sapiens
MKVLSLLYLLTAIPGILSQVQLQESGPGLVKPSETLSLTCTVSGYSITGGYLWNWIRQPPGKGLEWIGYISYDGTNNYKPSLKDRVTISRDTSKNQFSLKLSSVTAADTAVYYCARYGRVFFDYWGQGTLVTVSS

SEQ ID NO: 12739 - protein, 117 aa, Homo sapiens
QVQLQESGPGLVKPSETLSLTCTVSGYSISGGYLWNWIRQPPGKGLEWIGYISYDGTNNYKPSLKDRVTISVDTSKNQFSLKLSSVTAADTAVYYCARYGRVFFDYWGQGTLVTVSS

SEQ ID NO: 12740 - protein, 134 aa, Homo sapiens
MKVLSLLYLLTAIPGILSQVQLQESGPGLVKPSETLSLTCTVSGYSISGGYLWNWIRQPPGKGLEWIGYISYDGTNNYKPSLKDRVTISVDTSKNQFSLKLSSVTAADTAVYYCARYGRVFFDYWGQGTLVTVS

SEQ ID NO: 12741 - protein, 129 aa, Mus musculus
EVMLVESGGDLVKPGGSLKLSCAASGFTFNNYIMSWVRQTPEKRLEWVATISGGGSYTFYPDSVKGRFSISRDNAKNTLYLQMSSLRSEDTAMYFCTRNQLLTGMINPLTTPRAWFTYWGQGTLVTVSA

SEQ ID NO: 12742 - protein, 129 aa, Artificial Sequence
  source: /note="Description of Artificial Sequence: Synthetic polypeptide"
EVQLVESGGDLVQPGGSLRLSCAASGFTFNNYIMSWVRQAPGKGLEWVATISGGGSYTFYPDSVKGRFTISRDNSKNTLYLQMNSLRAEDTAVYFCTRNQLLTGMINPLTTPRAWFTYWGQGTLVTVSS

SEQ ID NO: 12743 - protein, 455 aa, Artificial Sequence
  source: /note="Description of Artificial Sequence: Synthetic polypeptide"
QVQLVQSGAEVKKPGSSVKVSCKASGFYIKDTYMHWVRQAPGQGLEWMGTIDPANGNTKYVPKFQGRVTITADESTSTAYMELSSLRSEDTAVYYCARSIYDDYHYDDYYAMDYWGQGTLVTVSSASTKGPSVFPLAPSSKSTSGGTAALGCLVKDYFPEPVTVSWNSGALTSGVHTFPAVLQSSGLYSLSSVVTVPSSSLGTQTYICNVNHKPSNTKVDKKVEPKSCDKTHTCPPCPAPELLGGPSVFLFPPKPKDTLMISRTPEVTCVVVDVSHEDPEVKFNWYVDGVEVHNAKTKPREEQYNSTYRVVSVLTVLHQDWLNGKEYKCKVSNKALPAPIEKTISKAKGQPREPQVYTLPPSRDELTKNQVSLTCLVKGFYPSDIAVEWESNGQPENNYKTTPPVLDSDGSFFLYSKLTVDKSRWQQGNVFSCSVMHEALHNHYTQKSLSLSPGK

SEQ ID NO: 12744 - protein, 449 aa, Artificial Sequence
  source: /note="Description of Artificial Sequence: Synthetic polypeptide"
QVQLVQSGAEVKKPGSSVKVSCKASGFYIKDTYMHWVRQAPGQGLEWMGTIDPANGNTKYVPKFQGRVTITADESTSTAYMELSSLRSEDTAVYYCARSIYDDYHVDDYYAMDYWGQGTLVTVSSASTKGPSVFPLAPSSKSTSGGTAALGCLVKDYFPEPVTVSWNSGALTSGVHTFPAVLQSSGSLSSVVTVPSSSLGTQTYICNVNHKPSNTKVDKKVEPKSCDKTHTCPPCPAPELLGGPSVFLFPPKPKDTLMISRTPEVTCVVVDVSHEDPEVKFNWYVDGVEVHNAKTKPREEQYNSYVVSVLTVLHQDWLNGKEYKCKVSNKALPAPIEKTISKAKGQPREPQVYTLPPSRDELTKNQVSLTCLVKGFYPSDIAVEWESNGQPENNYKTTPPVLDSDGSFFKKLTVDKSRWQQGNVFSCSVMHEALHNHYTQKSLSLSPGK

SEQ ID NO: 12745 - protein, 456 aa, Artificial Sequence
  source: /note="Description of Artificial Sequence: Synthetic polypeptide"
QVQLVQSGAEVKKPGASVKVSCKVSGEISTGYYFHWVRQAPGKGLEWMGRIDPEDDSTKYAERFKDRVTMTEDTSTDTAYMELSSLRSEDTAVYYCTTWRIYRDSSGRPFYVMDAWGQGTLVTVSSASTKGPSVFPLAPSSKSTSGGTAALGCLVKDYFPEPVTVSWNSGALTSGVHTFPAVLQSSGLYSLSSVVTVPSSSLGTQTYICNVNHKPSNTKVDKKVEPKSCDKTHTCPPCPAPELLGGPSVFLFPPKPKDTLMISRTPEVTCVVVDVSHEDPEVKFNWYVDGVEVHNAKTKPREEQYNSTYRVVSVLTVLHQDWLNGKEYKCKVSNKALPAPIEKTISKAKGQPREPQVYTLPPSRDELTKNQVSLTCLVKGFYPSDIAVEWESNGQPENNYKTTPPVLDSDGSFFLYSKLTVDKSRWQQGNVFSCSVMHEALHNHYTQKSLSLSPGK

SEQ ID NO: 12746 - protein, 140 aa, Unknown
  source: /note="Description of Unknown: Murinae gen. sp. sequence"
MNRLTSSLLLLIVPAYVLSQVTLKESGPGILQPSQTLSLTCSFSGFSLSTSGMGVSWIRQPSGKGLEWLAHIYWDDDKRYNPSLKSRLTISKDTSSNQVFLKITSVDTADTATYYCARRETVFYWYFDVWGAGTTVTVSS

SEQ ID NO: 12747 - protein, 141 aa, Artificial Sequence
  source: /note="Description of Artificial Sequence: Synthetic polypeptide"
MVLQTQVFISLLLWISGAYGQVTLRESGPALVKPTQTLTLTCTFSGFSLSTSGMGVSWIRQPPGKGLEWLAHIYWDDDKRYNPSLKSRLTISKDTSRNQVVLTMTNMDPVDTATYYCARRETVFYWYFDVWGRGTPVTVSS

SEQ ID NO: 12748 - protein, 445 aa, Artificial Sequence
  source: /note="Description of Artificial Sequence: Synthetic polypeptide"
QVTLRESGPALVKPTQTLTLTCTFSGFSLSTSGMGVSWIRQPPGKGLEWLAHIYWDDDKRYNPSLKSRLTISKDTSRNQVVLTMTNMDPVDTATYYCARRETVFYWYFDVWGRGTLVTVSSASTKGPSVFPLAPSSKSTSGGTAALGCLVKDYFPEPVTVSWNSGALTSGVHTFPAVLQSSGSLSSVVTVPSSSLGTQTYICNVNHKPSNTKVDKKVEPKSCDKTHTCPPCPAPELLGGPSVFLFPPKPKDTLMISRTPEVTCVVVDVSHEDPEVKFNWYVDGVEVHNAKTKPREEQYNSYVVSVLTVLHQDWLNGKEYKCKVSNKALPAPIEKTISKAKGQPREPQVYTLPPSRDELTKNQVSLTCLVKGFYPSDIAVEWESNGQPENNYKTTPPVLDSDGSFFKKLTVDKSRWQQGNVFSCSVMHEALHNHYTQKSLSLSPGK

SEQ ID NO: 12749 - protein, 443 aa, Artificial Sequence
  source: /note="Description of Artificial Sequence: Synthetic polypeptide"
QVTLRESGPALVKPTQTLTLTCTVSGFSLTSYSVHWVRQPPGKGLEWLGVIWASGGTDYNSALMSRLSISKDTSRNQVVLTMTNMDPVDTATYYCARDPPSSLLRLDYWGRGTLVTVSSASTKGPSVFPLAPSSKSTSGGTAALGCLVKDYFPEPVTVSWNSGALTSGVHTFPAVLQSSGSLSSVVTVPSSSLGTQTYICNVNHKPSNTKVDKKVEPKSCDKTHTCPPCPAPELLGGPSVFLFPPKPKDTLMISRTPEVTCVVVDVSHEDPEVKFNWYVDGVEVHNAKTKPREEQYNSYVVSVLTVLHQDWLNGKEYKCKVSNKALPAPIEKTISKAKGQPREPQVYTLPPSRDELTKNQVSLTCLVKGFYPSDIAVEWESNGQPENNYKTTPPVLDSDGSFFKKLTVDKSRWQQGNVFSCSVMHEALHNHYTQKSLSLSPGK

SEQ ID NO: 12750 - protein, 166 aa, Oryctolagus cuniculus; identical to SEQ ID NO: 6863

SEQ ID NO: 12751 - protein, 109 aa, Oryctolagus cuniculus; identical to SEQ ID NO: 6864

SEQ ID NO: 12752 - protein, 109 aa, Oryctolagus cuniculus; identical to SEQ ID NO: 6865

SEQ ID NO: 12753 - protein, 128 aa, Oryctolagus cuniculus; identical to SEQ ID NO: 6866

SEQ ID NO: 12754 - protein, 126 aa, Oryctolagus cuniculus; identical to SEQ ID NO: 6867

SEQ ID NO: 12755 - protein, 129 aa, Oryctolagus cuniculus
METGLRWLLLVAVLKGVQCQSVEESGGRLVTPGTPLTLTCTVSGLSLSSNTINWVRQAPGKGLEWIGYIWSGGSTYYASWVNGRFTISKTSTTVDLKITSPTTEDTATYFCARGGYASGGYPYATRLDL

SEQ ID NO: 12756 - protein, 123 aa, Oryctolagus cuniculus; identical to SEQ ID NO: 6869

SEQ ID NO: 12757 - protein, 109 aa, Oryctolagus cuniculus; identical to SEQ ID NO: 6870

SEQ ID NO: 12758 - protein, 128 aa, Oryctolagus cuniculus; identical to SEQ ID NO: 6871

SEQ ID NO: 12759 - protein, 109 aa, Oryctolagus cuniculus; identical to SEQ ID NO: 6872

SEQ ID NO: 12760 - protein, 128 aa, Oryctolagus cuniculus; identical to SEQ ID NO: 6873

SEQ ID NO: 12761 - protein, 133 aa, Oryctolagus cuniculus; identical to SEQ ID NO: 6874

SEQ ID NO: 12762 - protein, 167 aa, Oryctolagus cuniculus; identical to SEQ ID NO: 6875

SEQ ID NO: 12763 - protein, 119 aa, Oryctolagus cuniculus; identical to SEQ ID NO: 6876

SEQ ID NO: 12764 - protein, 125 aa, Oryctolagus cuniculus; identical to SEQ ID NO: 6877

SEQ ID NO: 12765 - protein, 121 aa, Oryctolagus cuniculus; identical to SEQ ID NO: 6878

SEQ ID NO: 12766 - protein, 128 aa, Oryctolagus cuniculus; identical to SEQ ID NO: 6879

SEQ ID NO: 12767 - protein, 123 aa, Oryctolagus cuniculus; identical to SEQ ID NO: 6880

SEQ ID NO: 12768 - protein, 166 aa, Oryctolagus cuniculus; identical to SEQ ID NO: 6881

SEQ ID NO: 12769 - protein, 129 aa, Oryctolagus cuniculus; identical to SEQ ID NO: 6882

SEQ ID NO: 12770 - protein, 130 aa, Oryctolagus cuniculus
METGLRWLLLVAVLKGVQCQSLEEAGGRLVTPGTPLTLTCTVSGIDLSSYAMGWVRQAPGKGLEYIGIISSSGSTYYATWAKGRFTISQASSTTVDLKITSPTTEDSATYFCARGGAGSGGVWLLDGFDP

SEQ ID NO: 12771 - protein, 130 aa, Oryctolagus cuniculus
METGLRWLLLVAVLKGVQCQEQLKESGGRLVTPGTPLTLTCTVSGFSLNDYAVGWFRQAPGKGLEWIGYIRSSGTTAYATWAKGRFTISATSTTVDLKITSPTTEDTATYFCARGGAGSSGVWILDGFAP

SEQ ID NO: 12772 - protein, 130 aa, Oryctolagus cuniculus
METGLRWLLLVAVLKGVQCQSLEESGGDLVKPGASLTLTCTASGFSFTSTYYIYWVRQAPGKGLEWIACIDAGSSGSTYYATWVNGRFTISKTSSTTVTLQMTSLTAADTATYFCAKWDYGGNVGWGYDL

SEQ ID NO: 12773 - protein, 127 aa, Oryctolagus cuniculus; identical to SEQ ID NO: 6886

SEQ ID NO: 12774 - protein, 166 aa, Oryctolagus cuniculus; identical to SEQ ID NO: 6887

SEQ ID NO: 12775 - protein, 130 aa, Oryctolagus cuniculus
METGLRWLLLVAVLKGVQCQSLEESGGDLVKPGASLTLTCTTSGFSFSSSYFICWVRQAPGKGLEWIACIYGGDGSTYYASWAKGRFTISKTSSTTVTLQMTSLTAADTATYFCAREWAYSQGYFGAFDL

SEQ ID NO: 12776 - protein, 124 aa, Oryctolagus cuniculus; identical to SEQ ID NO: 6889

SEQ ID NO: 12777 - protein, 124 aa, Oryctolagus cuniculus; identical to SEQ ID NO: 6890

SEQ ID NO: 12778 - protein, 127 aa, Oryctolagus cuniculus; identical to SEQ ID NO: 6891

SEQ ID NO: 12779 - protein, 126 aa, Oryctolagus cuniculus; identical to SEQ ID NO: 6892

SEQ ID NO: 12780 - protein, 128 aa, Oryctolagus cuniculus; identical to SEQ ID NO: 6893

SEQ ID NO: 12781 - protein, 122 aa, Oryctolagus cuniculus
METGLRWLLLVAVLKGVQCQSLEESGGRLVTPGTPLTLTCTVSGFSLNRNSITWVRQAPGEGLEWIGIITGSGRTYYANWAKGRFTISKTSTTVDLKMTSPTTEDTATYFCARGHPGLGSGN

SEQ ID NO: 12782 - protein, 122 aa, Oryctolagus cuniculus; identical to SEQ ID NO: 6896

SEQ ID NO: 12783 - protein, 124 aa, Oryctolagus cuniculus; identical to SEQ ID NO: 6897

SEQ ID NO: 12784 - protein, 167 aa, Oryctolagus cuniculus; identical to SEQ ID NO: 6898

SEQ ID NO: 12785 - protein, 128 aa, Oryctolagus cuniculus; identical to SEQ ID NO: 6899

SEQ ID NO: 12786 - protein, 124 aa, Oryctolagus cuniculus; identical to SEQ ID NO: 6900

SEQ ID NO: 12787 - protein, 117 aa, Oryctolagus cuniculus; identical to SEQ ID NO: 6901

SEQ ID NO: 12788 - protein, 120 aa, Homo sapiens; identical to SEQ ID NO: 6905

SEQ ID NO: 12789 - protein, 120 aa, Homo sapiens; identical to SEQ ID NO: 6906

SEQ ID NO: 12790 - protein, 166 aa, Oryctolagus cuniculus; identical to SEQ ID NO: 6907

SEQ ID NO: 12791 - protein, 125 aa, Oryctolagus cuniculus; identical to SEQ ID NO: 6908

SEQ ID NO: 12792 - protein, 450 aa, Oryctolagus cuniculus; identical to SEQ ID NO: 6909

SEQ ID NO: 12793 - protein, 450 aa, Oryctolagus cuniculus; identical to SEQ ID NO: 6910

SEQ ID NO: 12794 - protein, 126 aa, Oryctolagus cuniculus; identical to SEQ ID NO: 6911

SEQ ID NO: 12795 - protein, 125 aa, Oryctolagus cuniculus; identical to SEQ ID NO: 6912

SEQ ID NO: 12796 - protein, 126 aa, Oryctolagus cuniculus; identical to SEQ ID NO: 6913

SEQ ID NO: 12797 - protein, 122 aa, Oryctolagus cuniculus; identical to SEQ ID NO: 6914

SEQ ID NO: 12798 - protein, 128 aa, Oryctolagus cuniculus; identical to SEQ ID NO: 6915

SEQ ID NO: 12799 - protein, 125 aa, Oryctolagus cuniculus; identical to SEQ ID NO: 6916

SEQ ID NO: 12800 - protein, 450 aa, Oryctolagus cuniculus; identical to SEQ ID NO: 6917

SEQ ID NO: 12801 - protein, 450 aa, Oryctolagus cuniculus; identical to SEQ ID NO: 6918

SEQ ID NO: 12802 - protein, 164 aa, Oryctolagus cuniculus; identical to SEQ ID NO: 6919

SEQ ID NO: 12803 - protein, 450 aa, Oryctolagus cuniculus; identical to SEQ ID NO: 6920

SEQ ID NO: 12804 - protein, 468 aa, Oryctolagus cuniculus; identical to SEQ ID NO: 6921

SEQ ID NO: 12805 - protein, 170 aa, Oryctolagus cuniculus; identical to SEQ ID NO: 6922

SEQ ID NO: 12806 - protein, 253 aa, Artificial Sequence
  source: /note="Description of Artificial Sequence: Synthetic polypeptide"
MKKNIAFLLASMFVFSIATNAYAEIQLQQSGPELMKPGASVKISCKASGYSFSSHYMHWVKQSHGKSLEWIGYIDPSNGETTYNQKFKGKATLTVDTSSSTANVHLSSLTSDDSAVYFCARGDYRYNGDWFFDVWGAGTTVTVSSASTKGPSVFPLAPSSKSTSGGTAALGCLVKDYFPEPVTVSWNSGALTSGVHTFPAVLQSSGLYSLSSVVTVPSSSLGTQTYICNVNHKPSNTKVDKKVEPKSCDKTHT

SEQ ID NO: 12807 - protein, 443 aa, Artificial Sequence
  source: /note="Description of Artificial Sequence: Synthetic polypeptide"
QVQLHQPGAELVKPGAPVKLSCKASGYTFTSYWMNWVKQRPGRGLEWIGRIDPSDSETHYNQKFKDKATLTVDKSSSTAYIQLSSLTSEDSAVYYCAKVGRGYFDYWGQGTTLTVSSASTKGPSVFPLAPCSRSTSESTAALGCLVKDYFPEPVTVSWNSGALTSGVHTFPAVLQSSGLYSLSSVVTVPSSSLGTKTYTCNVDHKPSNTKVDKRVESKYGPPCPPCPAPEFEGGPSVFLFPPKPKDTLMISRTPEVTCVVVDVSQEDPEVQFNWYVDGVEVHNAKTKPREEQFNSTYRVVSVLTVLHQDWLNGKEYKCKVSNKGLPSSIEKTISKAKGQPREPQVYTLPPSQEEMTKNQVSLTCLVKGFYPSDIAVEWESNGQPENNYKTTPPVLDSDGSFFLYSRLTVDKSRWQEGNVFSCSVMHEALHNHYTQKSLSLSLG

SEQ ID NO: 12808 - protein, 449 aa, Artificial Sequence; identical to SEQ ID NO: 6830
  source: /note="Description of Artificial Sequence: Synthetic polypeptide"

SEQ ID NO: 12809 - protein, 461 aa, Artificial Sequence
  source: /note="Description of Artificial Sequence: Synthetic polypeptide"
MGWSYIILFLVATATDGHSQVQLQQPGTELVKPGASVKLSCKASGYTFTSYWIHWVKQRPGQGLEWIGEINPSSGRTNYNEKFKNKVTVTVDKSSTTAYMQLSNLTSEDSAVYYCASRGYWGQGTTLTVSSAKTTAPSVYPLAPVCGNTTGSSVTLGCLVKGYFPEPVTLTWNSGSLSSGVHTFPAVLQSDLYTLSSSVTVTSSTWPSQSITCNVAHPASSTKVDKKIEPRGPTIKPCPPCKCPAPNLLGGPSVFIFPPKIKDVLMISLSPIVTCVVVDVSEDDPDVQISWFVNNVEVHTAQTQTHREDYNSTLRVVSALPIQHQDWMSGKEFKCKVNNKDLPAPIERTISKPKGSVRAPQVYVLPPPEEEMTKKQVTLTCMVTDFMPEDIYVEWTNNGKTELNYKNTEPVLDSDGSYFMYSKLRVEKKNWVERNSYSCSVVHEGLHNHHTTKSFSRTPGK

SEQ ID NO: 12810 - protein, 499 aa, Homo sapiens
EVQLVESGGGLVQPGGSLRLSCAASGFTLRSYSMNWVRQAPGKGLEWVSYISRSSHTIFYADSVKGRFTISRDNAKNSLYLQMDSLRDEDTAMYYCARVYSSGWHVSDYFDYWGQGILVTVSSASTKGPSVFPLAPCSRSTSGGTAALGCLVKDYFPEPVTVSWNSGALTSGVHTFPAVLQSSGLYSLSSVVTVPSSSLGTQTYTCNVNHKPSNTKVDKRVELKTPLGDTTHTCPRCPEPKSCDTPPPCPRCPEPKSCDTPPPCPRCPEPKSCDTPPPCPRCPAPELLGGPSVFLFPPKPKDTLMISRTPEVTCVVVDVSHEDPEVQFKWYVDGVEVHNAKTKPREEQFNSTFRVVSVLTVLHQDWLNGKEYKCKVSNKALPAPIEKTISKTKGQPREPQVYTLPPSREEMTKNQVSLTCLVKGFYPSDIAVEWESSGQPENNYNTTPPMLDSDGSFFLYSKLTVDKSRWQQGNIFSCSVMHEALHNRFTQKSLSLSPG

SEQ ID NO: 12811 - protein, 467 aa, Mus musculus; identical to SEQ ID NO: 9189

SEQ ID NO: 12812 - protein, 122 aa, Mus musculus
EVQLLESGGGLVQPGGSLRLSCAASGFTFSSYAMSWVRQAPGKGLEWVSGITGSGGSTYYADSVKGRFTISRDNSKNTLYLQMNSLRAEDTAVYYCAKDPGTTVIMSWFDPWGQGTLVTVSS

SEQ ID NO: 12813 - protein, 107 aa, Artificial Sequence
  source: /note="Description of Artificial Sequence: Synthetic polypeptide"
DIQMTQSPSSLSASVGDRVTITCKASQDVGTAVAWYQQKPGQAPRLLIYWASTRHTGVPSRFSGSGSGTDFTFTISSLQPEDIATYYCQQYNSYPLTFGQGTKVEIK

SEQ ID NO: 12814 - protein, 120 aa, Artificial Sequence
  source: /note="Description of Artificial Sequence: Synthetic polypeptide"
EVQLVQSGAEVKKPGATVKISCKVSGYTFTSYWMYWVRQARGQRLEWIGRIDPNSGSTKYNEKFKNRFTISRDNSKNTLYLQMNSLRAEDTAVYYCARDYRKGLYAMDYWGQGTTVTVSS

SEQ ID NO: 12815 - protein, 446 aa, Artificial Sequence
  source: /note="Description of Artificial Sequence: Synthetic polypeptide"
EVQLVQSGAEVKKPGESLRISCKGSGYTFTSYWMYWVRQAPGQGLEWMGRIDPNSGSTKYNEKFKNRVTISVDTSKNQFSLKLSSVTAADTAVYYCARDYRKGLYAMDYWGQGTTVTVSSASTKGPSVFPLAPCSRSTSESTAALGCLVKDYFPEPVTVSWNSGALTSGVHTFPAVLQSSGLYSLSSVVTVPSSSLGTKTYTCNVDHKPSNTKVDKRVESKYGPPCPPCPAPEFLGGPSVFLFPPKPKDTLMISRTPEVTCVVVDVSQEDPEVQFNWYVDGVEVHNAKTKPREEQFNSTYRVVSVLTVLHQDWLNGKEYKCKVSNKGLPSSIEKTISKAKGQPREPQVYTLPPSQEEMTKNQVSLTCLVKGFYPSDIAVEWESNGQPENNYKTTPPVLDSDGSFFLYSRLTVDKSRWQEGNVFSCSVMHEALHNHYTQKSLSLSLG

SEQ ID NO: 12816 - protein, 446 aa, Artificial Sequence
  source: /note="Description of Artificial Sequence: Synthetic polypeptide"
EVQLVQSGAEVKKPGATVKISCKVSGYTFTSYWMYWVRQATGQGLEWMGRIDPNSGSTKYNEKFKNRVTITADKSTSTAYMELSSLRSEDTAVYYCARDYRKGLYAMDYWGQGTTVTVSSASTKGPSVFPLAPCSRSTSESTAALGCLVKDYFPEPVTVSWNSGALTSGVHTFPAVLQSSGLYSLSSVVTVPSSSLGTKTYTCNVDHKPSNTKVDKRVESKYGPPCPPCPAPEFLGGPSVFLFPPKPKDTLMISRTPEVTCVVVDVSQEDPEVQFNWYVDGVEVHNAKTKPREEQFNSTYRVVSVLTVLHQDWLNGKEYKCKVSNKGLPSSIEKTISKAKGQPREPQVYTLPPSQEEMTKNQVSLTCLVKGFYPSDIAVEWESNGQPENNYKTTPPVLDSDGSFFLYSRLTVDKSRWQEGNVFSCSVMHEALHNHYTQKSLSLSLG

SEQ ID NO: 12817 - protein, 446 aa, Artificial Sequence; identical to SEQ ID NO: 12816
  source: /note="Description of Artificial Sequence: Synthetic polypeptide"

SEQ ID NO: 12818 - protein, 447 aa, Artificial Sequence
  source: /note="Description of Artificial Sequence: Synthetic polypeptide"
EVQLVQSGAEVKKPGATVKISCKVSGYTFTSYWMYWVRQARGQRLEWIGRIDPNSGSTKYNEKFKNRFTISRDNSKNTLYLQMNSLRAEDTAVYYCARDYRKGLYAMDYWGQGTTVTVSSASTKGPSVFPLAPCSRSTSESTAALGCLVKDYFPEPVTVSWNSGALTSGVHTFPAVLQSSGLYSLSSVVTVPSSSLGTKTYTCNVDHKPSNTKVDKRVESKYGPPCPPCPAPEFLGGPSVFLFPPKPKDTLMISRTPEVTCVVVDVSQEDPEVQFNWYVDGVEVHNAKTKPREEQFNSTYRVVSVLTVLHQDWLNGKEYKCKVSNKGLPSSIEKTISKAKGQPREPQVYTLPPSQEEMTKNQVSLTCLVKGFYPSDIAVEWESNGQPENNYKTTPPVLDSDGSFFLYSRLTVDKSRWQEGNVFSCSVMHEALHNHYTQKSLSLSLGK

SEQ ID NO: 12819 - protein, 98 aa, Artificial Sequence
  source: /note="Description of Artificial Sequence: Synthetic polypeptide"
QVQLQQPGAELVKPGASVKLSCKASGYTFTSYWMHWVKQRPGRGLEWIGRIDPNSGGTKYNEKFKSKATLTVDKPSSTAYMQLSSLTSEDSAVYYCAR

SEQ ID NO: 12820 - protein, 107 aa, Artificial Sequence
  source: /note="Description of Artificial Sequence: Synthetic polypeptide"
DIVMTQSHKFMSTSVGDRVSITCKASQDVGTAVAWYQQKPGQSPKLLIYWASTRHTGVPDRFTGSGSGTDFTLTISNVQSEDLADYFCQQYSSYPLTFGAGSKLELK

SEQ ID NO: 12821 - protein, 446 aa, Artificial Sequence
  source: /note="Description of Artificial Sequence: Synthetic polypeptide"
EVQLVQSGAEVKKPGESLRISCKGSGYTFTSYWMYWIRQPPGKGLEWIGRIDPNSGSTKYNEKFKNRVTITADKSTSTAYMELSSLRSEDTAVYYCARDYRKGLYAMDYWGQGTTVTVSSASTKGPSVFPLAPCSRSTSESTAALGCLVKDYFPEPVTVSWNSGALTSGVHTFPAVLQSSGLYSLSSVVTVPSSSLGTKTYTCNVDHKPSNTKVDKRVESKYGPPCPPCPAPEFLGGPSVFLFPPKPKDTLMISRTPEVTCVVVDVSQEDPEVQFNWYVDGVEVHNAKTKPREEQFNSTYRVVSVLTVLHQDWLNGKEYKCKVSNKGLPSSIEKTISKAKGQPREPQVYTLPPSQEEMTKNQVSLTCLVKGFYPSDIAVEWESNGQPENNYKTTPPVLDSDGSFFLYSRLTVDKSRWQEGNVFSCSVMHEALHNHYTQKSLSLSLG

SEQ ID NO: 12822 - protein, 118 aa, Artificial Sequence
  source: /note="Description of Artificial Sequence: Synthetic polypeptide"
EVQLLESGGGLVQPGGSLRLSCAASGFTFSSYIMMWVRQAPGKGLEWVSSIYPSGGITFYADKGRFTISRDNSKNTLYLQMNSLRAEDTAVYYCARIKLGTVTTVDYWGQGTLVTVSS

SEQ ID NO: 12823 - protein, 253 aa, Artificial Sequence [sequence omitted]

SEQ ID NO: 12824 - protein, 120 aa, Artificial Sequence
  source: /note="Description of Artificial Sequence: Synthetic polypeptide"
EVQLVESGGGLVQPGGSLRLSCAASGFTFSNYWISWVRQAPGKGLEWVGDISPDGGYTYYADSVKGRFTISADTSKNTAYLQMNSLRAEDTAVYYCARESWWSAWVMDYWGQGTLVTVSS

SEQ ID NO: 12825 - protein, 118 aa, Artificial Sequence
  source: /note="Description of Artificial Sequence: Synthetic polypeptide"
EVQLVESGGGLVQPGGSLRLSCAASGFTFSNSDIHWVRQAPGKGLEWVGWIYPADGSTYYADSVKGRFTISADTSKNTAYLQMNSLRAEDTAVYYCAKGSGYYAMDYWGQGTLVTVSS

SEQ ID NO: 12826 - protein, 119 aa, Artificial Sequence
  source: /note="Description of Artificial Sequence: Synthetic polypeptide"
EVQLVESGGGLVQPGGSLRLSCAASGFTFTDTGIHWVRQAPGKGLEWVGVISPASGYTDYADSVKGRFTISADTSKNTAYLQMNSLRAEDTAVYYCARDIYYFFGFDYWGQGTLVTVSS

SEQ ID NO: 12827 - protein, 119 aa, Artificial Sequence
  source: /note="Description of Artificial Sequence: Synthetic polypeptide"
EVQLVESGGGLVQPGGSLRLSCAASGFTFTSYWIHWVRQAPGKGLEWVGEINPHDGSTNYADSVKGRFTISADTSKNTAYLQMNSLRAEDTAVYYCAREVFLGYAMDYWGQGTLVTVSS

SEQ ID NO: 12828 - protein, 117 aa, Artificial Sequence
  source: /note="Description of Artificial Sequence: Synthetic polypeptide"
EVQLVESGGGLVQPGGSLRLSCAASGFTFSGSDIHWVRQAPGKGLEWVAWIYPADGSTYYADSVKGRFTISADTSKNTAYLQMNSLRAEDTAVYYCAKPSWGFFDYWGQGTLVTVSS

SEQ ID NO: 12829 - protein, 120 aa, Artificial Sequence
  source: /note="Description of Artificial Sequence: Synthetic polypeptide"
EVQLVESGGGLVQPGGSLRLSCAASGFTFSNSYISWVRQAPGKGLEWVAGINPNGGYTYYADSVKGRFTISADTSKNTAYLQMNSLRAEDTAVYYCAREWYFGGYVMDYWGQGTLVTVSS

SEQ ID NO: 12830 - protein, 120 aa, Artificial Sequence
  source: /note="Description of Artificial Sequence: Synthetic polypeptide"
EVQLVESGGGLVQPGGSLRLSCAASGFTFSNSYISWVRQAPGKGLEWVAGINPNGGYTYYADSVKGRFTISADTSKNTAYLQMNSLRAEDTAVYYCAREWYFDGYVMDYWGQGTLVTVSS

SEQ ID NO: 12831 - protein, 120 aa, Artificial Sequence
  source: /note="Description of Artificial Sequence: Synthetic polypeptide"
EVQLVESGGGLVQPGGSLRLSCAASGFTFSNSYISWVRQAPGKGLEWVAGINPNGGYTYYADSVKGRFTISADTSKNTAYLQMNSLRAEDTAVYYCAREWYYGGYVMDYWGQGTLVTVSS

SEQ ID NO: 12832 - protein, 120 aa, Artificial Sequence
  source: /note="Description of Artificial Sequence: Synthetic polypeptide"
EVQLVESGGGLVQPGGSLRLSCAASGFTFSNSYISWVRQAPGKGLEWVAAINPAGGYTYYADSVKGRFTISADTSKNTAYLQMNSLRAEDTAVYYCAREWYFGGYVMDYWGQGTLVTVSS

SEQ ID NO: 12833 - protein, 450 aa, Artificial Sequence
  source: /note="Description of Artificial Sequence: Synthetic polypeptide"
MQVQLQQSGPELKKPGETVKISCKASGYPFTNYGMNWVKQAPGQGLKWMGWINTSTGESTFADDFKGRFDFSLETSANTAYLQINNLKSEDMATYFCARWEVYHGYVPYWGQGTTVTVSSASTKGPSVFPLAPSSKSTSGGTAALGCLVKDYFPEPVTVSWNSGALTSGVHTFPAVLQSSGLYSLSSVVTVPSSSLGTQTYICNVNHKPSNTKVDKKVEPKSCDKTHTCPPCPAPELLGGPSVFLFPPKPKDTLMISRTPEVTCVVVDVSHEDPEVKFNWYVDGVEVHNAKTKPREEQYNSTYRVVSVLTVLHQDWLNGKEYKCKVSNKALPAPIEKTISKAKGQPREPQVYTLPPSREEMTKNQVSLTCLVKGFYPSDIAVEWESNGQPENNYKTTPPVLDSDGSFFLYSKLTVDKSRWQQGNVFSCSVMHEALHNHYTQKSLSLSPGK

SEQ ID NO: 12834 - protein, 119 aa, Homo sapiens
RLQLVQSGAEVRKPGASVKVSCKASGYSFTGHYIHWARQAPGQGLEWMGWINPYSGGTNFPREFQGRVTMTRDTSVNTVYMELTRLTSDDTSVYYCARDHRIVGGLDYWGQGTLVTVSS

SEQ ID NO: 12835 - protein, 119 aa, Homo sapiens
EVQLVQSGAEVRKPGASVKVSCKASGYSFTGHYIHWVRQAPGQGLEWMGWINPYSGGTNFPREFQGRVTMTRDTSVNTVYMELTRLTSDDTSVYYCARDHRIVGGLDYWGQGTLVTVSS

SEQ ID NO: 12836 - protein, 119 aa, Artificial Sequence
  source: /note="Description of Artificial Sequence: Synthetic polypeptide"
EVQLVQSGAEVRKPGASVKVSCKASGYSFTGHYIHWVRQAPGQGLEWMGWINPYSGGTNFPREFQGRVTMTRDTSVNTVYMELTRLTSDDTSVYYCARDQMVHGGLDYWGQGTLVTVSS

SEQ ID NO: 12837 - protein, 119 aa, Artificial Sequence
  source: /note="Description of Artificial Sequence: Synthetic polypeptide"
EVQLVQSGAEVRKPGASVKVSCKASGYSFTGHYIHWVRQAPGQGLEWMGWINPYSGGTNFPREFQGRVTMTRDTSVNTVYMELTRLTSDDTSVYYCARDEMQNGGLDYWGQGTLVTVSS

SEQ ID NO: 12838 - protein, 119 aa, Artificial Sequence
  source: /note="Description of Artificial Sequence: Synthetic polypeptide"
EVQLVQSGAEVRKPGASVKVSCKASGYSFTGHYIHWVRQAPGQGLEWMGWINPYSGGTNFPREFQGRVTMTRDTSVNTVYMELTRLTSDDTSVYYCARDEMTRGGLDYWGQGTLVTVSS

SEQ ID NO: 12839 - protein, 119 aa, Artificial Sequence
  source: /note="Description of Artificial Sequence: Synthetic polypeptide"
EVQLVQSGAEVRKPGASVKVSCKASGYSFTGHYIHWVRQAPGQGLEWMGWINPYSGGTNFPREFQGRVTMTRDTSVNTVYMELTRLTSDDTSVYYCARDEMHVGGLDYWGQGTLVTVSS

SEQ ID NO: 12840 - protein, 119 aa, Artificial Sequence
  source: /note="Description of Artificial Sequence: Synthetic polypeptide"
EVQLVQSGAEVRKPGASVKVSCKASGYSFTGHYIHWVRQAPGQGLEWMGWINPYSGGTNFPREFQGRVTMTRDTSVNTVYMELTRLTSDDTSVYYCARDEMVWGGLDYWGQGTLVTVSS

SEQ ID NO: 12841 - protein, 472 aa, Homo sapiens
MGWSCIILFLVATATGVHSQVQLVQSGAEVKKPGASVKVSCKASGYTFTDYYMNWVRQAPGQGLEWMGNINPNNGGTNYNQKFKDRVTMTTDTSTSTAYMELRSLRSDDTAVYYCARWILYYGRSKWYFDVWGRGTLVTVSSASTKGPSVFPLAPSSKSTSGGTAALGCLVKDYFPEPVTVSWNSGALTSGVHTFPAVLQSSGLYSLSSVVTVPSSSLGTQTYICNVNHKPSNTKVDKKVEPKSCDKTHTCPPCPAPELLGGPSVFLFPPKPKDTLMISRTPEVTCVVVDVSHEDPEVKFNWYVDGVEVHNAKTKPREEQYNSTYRVVSVLTVLHQDWLNGKEYKCKVSNKALPAPIEKTISKAKGQPREPQVYTLPPSRDELTKNQVSLTCLVKGFYPSDIAVEWESNGQPENNYKTTPPVLDSDGSFFLYSKLTVDKSRWQQGNVFSCSVMHEALHNHYTQKSLSLSPGK

SEQ ID NO: 12842 - protein, 120 aa, Artificial Sequence
  source: /note="Description of Artificial Sequence: Synthetic polypeptide"
EVQLVQSGAEVKKPGATVKISCKVSGYTFTSYWMYWVRQATGQGLEWMGRIDPNSGSTKYNEKFKNRVTITADKSTSTAYMELSSLRSEDTAVYYCARDYRKGLYAMDYWGQGTTVTVSS

SEQ ID NO: 12843 - protein, 447 aa, Artificial Sequence
  source: /note="Description of Artificial Sequence: Synthetic polypeptide"
EVQLVQSGAEVKKPGATVKISCKVSGYTFTSYWMYWVRQATGQGLEWMGRIDPNSGSTKYNEKFKNRVTITADKSTSTAYMELSSLRSEDTAVYYCARDYRKGLYAMDYWGQGTTVTVSSASTKGPSVFPLAPCSRSTSESTAALGCLVKDYFPEPVTVSWNSGALTSGVHTFPAVLQSSGLYSLSSVVTVPSSSLGTKTYTCNVDHKPSNTKVDKRVESKYGPPCPPCPAPEFLGGPSVFLFPPKPKDTLMISRTPEVTCVVVDVSQEDPEVQFNWYVDGVEVHNAKTKPREEQFNSTYRVVSVLTVLHQDWLNGKEYKCKVSNKGLPSSIEKTISKAKGQPREPQVYTLPPSQEEMTKNQVSLTCLVKGFYPSDIAVEWESNGQPENNYKTTPPVLDSDGSFFLYSRLTVDKSRWQEGNVFSCSVMHEALHNHYTQKSLSLSLGK

SEQ ID NO: 12844 - protein, 120 aa, Artificial Sequence
  source: /note="Description of Artificial Sequence: Synthetic polypeptide"
EVQLVQSGAEVKKPGESLRISCKGSGYTFTSYWMYWVRQAPGQGLEWMGRIDPNSGSTKYNEKFKNRVTISVDTSKNQFSLKLSSVTAADTAVYYCARDYRKGLYAMDYWGQGTTVTVSS

SEQ ID NO: 12845 - protein, 447 aa, Artificial Sequence
  source: /note="Description of Artificial Sequence: Synthetic polypeptide"
EVQLVQSGAEVKKPGESLRISCKGSGYTFTSYWMYWVRQAPGQGLEWMGRIDPNSGSTKYNEKFKNRVTISVDTSKNQFSLKLSSVTAADTAVYYCARDYRKGLYAMDYWGQGTTVTVSSASTKGPSVFPLAPCSRSTSESTAALGCLVKDYFPEPVTVSWNSGALTSGVHTFPAVLQSSGLYSLSSVVTVPSSSLGTKTYTCNVDHKPSNTKVDKRVESKYGPPCPPCPAPEFLGGPSVFLFPPKPKDTLMISRTPEVTCVVVDVSQEDPEVQFNWYVDGVEVHNAKTKPREEQFNSTYRVVSVLTVLHQDWLNGKEYKCKVSNKGLPSSIEKTISKAKGQPREPQVYTLPPSQEEMTKNQVSLTCLVKGFYPSDIAVEWESNGQPENNYKTTPPVLDSDGSFFLYSRLTVDKSRWQEGNVFSCSVMHEALHNHYTQKSLSLSLGK

SEQ ID NO: 12846 - protein, 120 aa, Artificial Sequence
  source: /note="Description of Artificial Sequence: Synthetic polypeptide"
EVQLVQSGAEVKKPGATVKISCKVSGYTFTSYWMYWIRQSPSRGLEWLGRIDPNSGSTKYNEKFKNRLTISKDTSKNQVVLTMTNMDPVDTATYYCARDYRKGLYAMDYWGQGTTVTVSS

SEQ ID NO: 12847 - protein, 447 aa, Artificial Sequence
  source: /note="Description of Artificial Sequence: Synthetic polypeptide"
EVQLVQSGAEVKKPGATVKISCKVSGYTFTSYWMYWIRQSPSRGLEWLGRIDPNSGSTKYNEKFKNRLTISKDTSKNQVVLTMTNMDPVDTATYYCARDYRKGLYAMDYWGQGTTVTVSSASTKGPSVFPLAPCSRSTSESTAALGCLVKDYFPEPVTVSWNSGALTSGVHTFPAVLQSSGLYSLSSVVTVPSSSLGTKTYTCNVDHKPSNTKVDKRVESKYGPPCPPCPAPEFLGGPSVFLFPPKPKDTLMISRTPEVTCVVVDVSQEDPEVQFNWYVDGVEVHNAKTKPREEQFNSTYRVVSVLTVLHQDWLNGKEYKCKVSNKGLPSSIEKTISKAKGQPREPQVYTLPPSQEEMTKNQVSLTCLVKGFYPSDIAVEWESNGQPENNYKTTPPVLDSDGSFFLYSRLTVDKSRWQEGNVFSCSVMHEALHNHYTQKSLSLSLGK

SEQ ID NO: 12848 - protein, 120 aa, Artificial Sequence
  source: /note="Description of Artificial Sequence: Synthetic polypeptide"
EVQLVQSGAEVKKPGESLRISCKGSGYTFTSYWMYWIRQPPGKGLEWIGRIDPNSGSTKYNEKFKNRVTITADKSTSTAYMELSSLRSEDTAVYYCARDYRKGLYAMDYWGQGTTVTVSS

SEQ ID NO: 12849 - protein, 447 aa, Artificial Sequence
  source: /note="Description of Artificial Sequence: Synthetic polypeptide"
EVQLVQSGAEVKKPGESLRISCKGSGYTFTSYWMYWIRQPPGKGLEWIGRIDPNSGSTKYNEKFKNRVTITADKSTSTAYMELSSLRSEDTAVYYCARDYRKGLYAMDYWGQGTTVTVSSASTKGPSVFPLAPCSRSTSESTAALGCLVKDYFPEPVTVSWNSGALTSGVHTFPAVLQSSGLYSLSSVVTVPSSSLGTKTYTCNVDHKPSNTKVDKRVESKYGPPCPPCPAPEFLGGPSVFLFPPKPKDTLMISRTPEVTCVVVDVSQEDPEVQFNWYVDGVEVHNAKTKPREEQFNSTYRVVSVLTVLHQDWLNGKEYKCKVSNKGLPSSIEKTISKAKGQPREPQVYTLPPSQEEMTKNQVSLTCLVKGFYPSDIAVEWESNGQPENNYKTTPPVLDSDGSFFLYSRLTVDKSRWQEGNVFSCSVMHEALHNHYTQKSLSLSLGK

SEQ ID NO: 12850 - protein, 120 aa, Artificial Sequence
  source: /note="Description of Artificial Sequence: Synthetic polypeptide"
QVQLVQSGAEVKKPGASVKVSCKASGYTFTSYWMYWIRQSPSRGLEWLGRIDPNSGSTKYNEKFKNRFTISRDDSKNTAYLQMNSLKTEDTAVYYCARDYRKGLYAMDYWGQGTTVTVSS

SEQ ID NO: 12851 - protein, 447 aa, Artificial Sequence
  source: /note="Description of Artificial Sequence: Synthetic polypeptide"
QVQLVQSGAEVKKPGASVKVSCKASGYTFTSYWMYWIRQSPSRGLEWLGRIDPNSGSTKYNEKFKNRFTISRDDSKNTAYLQMNSLKTEDTAVYYCARDYRKGLYAMDYWGQGTTVTVSSASTKGPSVFPLAPCSRSTSESTAALGCLVKDYFPEPVTVSWNSGALTSGVHTFPAVLQSSGLYSLSSVVTVPSSSLGTKTYTCNVDHKPSNTKVDKRVESKYGPPCPPCPAPEFLGGPSVFLFPPKPKDTLMISRTPEVTCVVVDVSQEDPEVQFNWYVDGVEVHNAKTKPREEQFNSTYRVVSVLTVLHQDWLNGKEYKCKVSNKGLPSSIEKTISKAKGQPREPQVYTLPPSQEEMTKNQVSLTCLVKGFYPSDIAVEWESNGQPENNYKTTPPVLDSDGSFFLYSRLTVDKSRWQEGNVFSCSVMHEALHNHYTQKSLSLSLGK

SEQ ID NO: 12852 - protein, 120 aa, Artificial Sequence
  source: /note="Description of Artificial Sequence: Synthetic polypeptide"
EVQLVQSGAEVKKPGESLRISCKGSGYTFTSYWMYWVRQARGQRLEWIGRIDPNSGSTKYNEKFKNRLTISKDTSKNQVVLTMTNMDPVDTATYYCARDYRKGLYAMDYWGQGTTVTVSS

SEQ ID NO: 12853 - protein, 447 aa, Artificial Sequence
  source: /note="Description of Artificial Sequence: Synthetic polypeptide"
EVQLVQSGAEVKKPGESLRISCKGSGYTFTSYWMYWVRQARGQRLEWIGRIDPNSGSTKYNEKFKNRLTISKDTSKNQVVLTMTNMDPVDTATYYCARDYRKGLYAMDYWGQGTTVTVSSASTKGPSVFPLAPCSRSTSESTAALGCLVKDYFPEPVTVSWNSGALTSGVHTFPAVLQSSGLYSLSSVVTVPSSSLGTKTYTCNVDHKPSNTKVDKRVESKYGPPCPPCPAPEFLGGPSVFLFPPKPKDTLMISRTPEVTCVVVDVSQEDPEVQFNWYVDGVEVHNAKTKPREEQFNSTYRVVSVLTVLHQDWLNGKEYKCKVSNKGLPSSIEKTISKAKGQPREPQVYTLPPSQEEMTKNQVSLTCLVKGFYPSDIAVEWESNGQPENNYKTTPPVLDSDGSFFLYSRLTVDKSRWQEGNVFSCSVMHEALHNHYTQKSLSLSLGK

SEQ ID NO: 12854 - protein, 120 aa, Artificial Sequence
  source: /note="Description of Artificial Sequence: Synthetic polypeptide"
QITLKESGPTLVKPTQTLTLTCTFSGYTFTSYWMYWVRQAPGKGLEWVSRIDPNSGSTKYNEKFKNRVTITADKSTSTAYMELSSLRSEDTAVYYCARDYRKGLYAMDYWGQGTTVTVSS

SEQ ID NO: 12855 - protein, 447 aa, Artificial Sequence
  source: /note="Description of Artificial Sequence: Synthetic polypeptide"
QITLKESGPTLVKPTQTLTLTCTFSGYTFTSYWMYWVRQAPGKGLEWVSRIDPNSGSTKYNEKFKNRVTITADKSTSTAYMELSSLRSEDTAVYYCARDYRKGLYAMDYWGQGTTVTVSSASTKGPSVFPLAPCSRSTSESTAALGCLVKDYFPEPVTVSWNSGALTSGVHTFPAVLQSSGLYSLSSVVTVPSSSLGTKTYTCNVDHKPSNTKVDKRVESKYGPPCPPCPAPEFLGGPSVFLFPPKPKDTLMISRTPEVTCVVVDVSQEDPEVQFNWYVDGVEVHNAKTKPREEQFNSTYRVVSVLTVLHQDWLNGKEYKCKVSNKGLPSSIEKTISKAKGQPREPQVYTLPPSQEEMTKNQVSLTCLVKGFYPSDIAVEWESNGQPENNYKTTPPVLDSDGSFFLYSRLTVDKSRWQEGNVFSCSVMHEALHNHYTQKSLSLSLGK

SEQ ID NO: 12856 - protein, 137 aa, Homo sapiens; identical to SEQ ID NO: 7206

SEQ ID NO: 12857 - protein, 137 aa, Artificial Sequence; identical to SEQ ID NO: 7206
  source: /note="Description of Artificial Sequence: Synthetic polypeptide"

SEQ ID NO: 12858 - protein, 137 aa, Homo sapiens; identical to SEQ ID NO: 7207

SEQ ID NO: 12859 - protein, 137 aa, Artificial Sequence; identical to SEQ ID NO: 7207
  source: /note="Description of Artificial Sequence: Synthetic polypeptide"

SEQ ID NO: 12860 - protein, 127 aa, Lama glama
EVQLVESGGGLVQAGGSLRLSCAASGRTFSNYVMGWFRQAPGKERDFVVGIGRSGGDNTYYADSVKGRFTISWDNAKNTMYLQMNSLKPEDTAVYYCAASTYSRDTIFTKWANYNYWGQGTQVTVSS

SEQ ID NO: 12861 - protein, 127 aa, Lama glama
QVQLQESGGGLVKAGGSLRLSCAASGRTFSSYVMGWFRQAPGKEREFVGAIHWSGGRTYYADSVKGRFTISSDNAKNTLYLQMNSLKPEDTAVYYCAASRIIYSYVNYVNPGEYDYWGQGTQVTVSS

SEQ ID NO: 12862 - protein, 122 aa, Lama glama
EVQLVESGGGLVQPGGSLRLSCAASGFTFSSHYMSWFRQAPGKEREFVAAITSSSRTYYTESVKGRFTISRDNAKNTVYLQMNSLKSEDTAVYYCAADRTFYGSTWSKYDYRGQGTQVTVSS

SEQ ID NO: 12863 - protein, 129 aa, Lama glama
QVQLQESGGGLVQAGGSLRLSCAASGRTFSKYAMGWFRQAPGKEREFVSAISWSDGSTYYADSVKGRFTISRDNAKNTVYLQVNSLKPEDTAVYYCAATYLVDVWAVHVPIRPYEYDYWGQGTQVTVSS

SEQ ID NO: 12864 - protein, 125 aa, Lama glama
QVQLQDSGGGLVQAGDSLRLSCAASGRSFGGYAMGWFRQAPGKEREFVAAISWSGGSTYYADSLKGRFTISRDNAKNTVYLQMNSLKPEDTALYYCAAGLRPSPNYNHERSYDYWGQGTQVTVSS

SEQ ID NO: 12865 - protein, 129 aa, Lama glama
QVQLQESGGGLVQAGGSLLLSCAASGRTFSSYAMGWFRQAPGKEREFVAAINWSGGSTSYADSVKGRFTISRDNTKNTVYLQMNSLKPEDTAAFYCAATYNPYSRDHYFPRMTTEYDYWGQGTQVTVSS

SEQ ID NO: 12866 - protein, 122 aa, Lama glama
QVQLQESGGRLVQTGGSLRLSCAASGGTFGTYALGWFRQAPGKEREFVAAISRFGSTYYADSVKGRFTISRDNANNTVYLEMNSLKPEDTAVYYCAAREGVALGLRNDANYWGQGTQVTVSS

SEQ ID NO: 12867 - protein, 121 aa, Lama glama
QVQLQDSGGGLVQAGGSLRLSCAASGGTFSSYAMGWFRQAPGKEREFVAAIGLNTYYADSVKGRFTISRDNAKNTVYLQMNSLKPEDTAVYYCAARTSGVVGGTPKRYDYWGQGTQVTVSS

SEQ ID NO: 12868 - protein, 122 aa, Lama glama
QVQLQESGGGSVQAGGSLKLSCAASGRGFSRYAMGWFRQAPGQDREFVATISWTNSTDYADSVKGRFAISRDNAKNTAYLQMNSLKPEDTAVYYCAADKWASSTRSIDYDYWGQGIQVTVSS

SEQ ID NO: 12869 - protein, 123 aa, Lama glama
QVQLQESGGGLVQAGGSLRLSCAASGRTFSNYAMGWFRQAPGKEREFVAAINWGGGNTYYADSVKGRFTISRDNAKNTVYLQMNSLKPEDTAVYYCAASEWGGSDYDHDYDYWGQGTQVTVSS

SEQ ID NO: 12870 - protein, 123 aa, Lama glama
EVQLVESGGGLVQAGGSLRLSCAASGRSFSSYAMAWFRQAPGKEREFVAAISWGGGSTYYAVSVKGRFTISRDNAKNTVYLQMNSLKPEDTARYYCAADETFHSSAYGEYEYWGQGTQVTVSS

SEQ ID NO: 12871 - protein, 133 aa, Lama glama
EVQLVESGGGLVQAGGSLRLSCTASGRTFSSYAMGWFRQTPGKEREFVAAITSSGGSTYYADSVKGRFTISRDNAKSTMYLQMDSLMLDDTSVYYCAADSSRPQYSDSALRRILSLSNSYPYWGQGTQVTVSS

SEQ ID NO: 12872 - protein, 120 aa, Lama glama
EVQLVESGGGLVQPGGSLRLSCVASGFTFADYAMSWVRQAPGKGLQWVSSISYNGDTTYYAESMKDRFTISRDNAKNTLYLQMNSLKSEDTAVYYCASSGSYYPGHFESWGQGTQVTVSS

SEQ ID NO: 12873 - protein, 121 aa, Lama glama
QVQLQESGGGLVQAGGSLRLSCAASGRTFSGYAMGWFRQAPGEEREFVAAISWRGTSTYYGDSAKGRFTISRDNAKNTVYLQMNSLKPEDTAVYYCAAGSHSDYAPDYDYWGQGTQVTVSS

SEQ ID NO: 12874 - protein, 123 aa, Lama glama
QVQLQESGGGLVQAGGSLRLSCAASGRTFSSYAIGWFRQAPGKEREFVAAISWGGSNTYYADSVKGRFTISRDNAKNTVYLQMNSLKPEDTAVYYCAAGEVSNSDYAYEYDYWGQGTQVTVSS

SEQ ID NO: 12875 - protein, 122 aa, Lama glama
QVQLQESGGGLVQTGGSLRLSCAASGRYIMGWFRQAPGKEREFVAGISRSGASTAYADSVKDRFTISRDSALNTVYLQMNSLKAEDTAVYFCAAALAIRLGIPRGETEYEYWGQGTQVTVSS

SEQ ID NO: 12876 - protein, 121 aa, Lama glama
QVKLEESGGGLVQAGGSLRLSCSASGLTFSNYAMAWFRQAPGKEREFVATISQRGGMRHYLDSVKDRFTISRDNAKNTVYLQMNSLKPDDTAVYYCAADLMYGVDRRYDYWGRGTQVTVSS

SEQ ID NO: 12877 - protein, 127 aa, Lama glama
QVKLEESGGGLVQAGDSLRLSCAASGRSFSSITMGWFRQAPGKERQFVSAINSNGNRYYADSVKGRFTISRDNAKNTVYLQMNSLKPEDTAVYYCAAVQAYSSSSDYYSQEGAYDYWGQGTQVTVSS

SEQ ID NO: 12878 - protein, 126 aa, Lama glama
EVQLVESGGGLVQAGGSLRLSCAVSGRTFSSMGWFRQAPGKEREFVATINLSGDRTDYADSVKGRFTISRDNPKNTVYLQMDSLEPEDSAVYYCAGTSLYPSNLRYYTLPGTYADWGQGTQVTVSS

SEQ ID NO: 12879 - protein, 126 aa, Lama glama
QVKLEESGGGLVQAGGSLRLSCAASGSIFSINAMGWYRQAPGKQRELVARITGTGTGITGAVSTNYADSVKGRFTISRDNARNTVYLQMNSLKPEDTAVYYCAADRSRTIVVPDYWGQGTQVTVSS

SEQ ID NO: 12880 - protein, 126 aa, Lama glama
QVQLQDSGGGLVQAGGSLRLSCAASRFSSAQYAIGWFRQAPGKEREGVSYITFSGGPTGYADSVKGRFTVSRDNAKNTVYLQMNSLKPEDTAVYYCAARPYTRPGSMWVSSLYDNWGQGTQVTVSS

SEQ ID NO: 12881 - protein, 123 aa, Lama glama
QVQLQESGGRLVQAGGSLRLSCAASEHTFRGYAIGWFRQAPGKEREFVSSITYDGTLTNYADSVTGRFTISRDNAKNTVYLQMNSLKPEDTAVYVCAAGYSYRYTTLNQYDSWGQGTQVTVSS

SEQ ID NO: 12882 - protein, 115 aa, Lama glama
QVQLQESGGGLVQPGGSLRLSCEASGFTFSRFGMTWVRQAPGKGVEWVSGISSLGDSTLYADSVKGRFTISRDNAKNTLYLQMNSLKPEDTAVYYCTIGGSLNPGGQGTQVTVSS

SEQ ID NO: 12883 - protein, 115 aa, Lama glama
QVQLQESGGGLVQPGNSLRLSCAASGFTFRNFGMSWVRQAPGKEPEWVSSISGSGSNTIYADSVKDRFTISRDNAKSTLYLQMNSLKPEDTAVYYCTIGGSLSRSSQGTQVTVSS

SEQ ID NO: 12884 - protein, 114 aa, Lama glama
QVQLQESGGGLVQPGGSLRLTCTASGFTFSSFGMSWVRQAPGKGLEWVSAISSDSGTKNYADSVKGRFTISRDNAKKMLFLQMNSLRPEDTAVYYCVIGRGSPSSQGTQVTVSS

SEQ ID NO: 12885 - protein, 114 aa, Lama glama
QVQLQESGGGLVQPGGSLRLTCTASGFTFRSFGMSWVRQAPGKGLEWVSAISADGSDKRYADSVKGRFTISRDNGKKMLTLDMNSLKPEDTAVYYCVIGRGSPASQGTQVTVSS

SEQ ID NO: 12886 - protein, 254 aa, Lama glama
QVQLQESGGGLVQPGGSLRLSCEASGFTFSRFGMTWVRQAPGKGVEWVSGISSLGDSTLYADSVKGRFTISRDNAKNTLYLQMNSLKPEDTAVYYCTIGGSLNPGGQGTQVTVSSEPKTPKPQPAAAEVQLVESGGGLVQAGGSLRLSCAASGRTFSNYVMGWFRQAPGKERDFVVGIGRSGGDNTYYADSVKGRFTISWDNAKNTMYLQMNSLKPEDTAVYYCAASTYSRDTIFTKWANYNYWGQGTQVTVSS

SEQ ID NO: 12887 - protein, 254 aa, Lama glama
QVQLQESGGGLVQPGNSLRLSCAASGFTFRNFGMSWVRQAPGKEPEWVSSISGSGSNTIYADSVKDRFTISRDNAKSTLYLQMNSLKPEDTAVYYCTIGGSLSRSSQGTQVTVSSEPKTPKPQPAAAQVQLQESGGGLVKAGGSLRLSCAASGRTFSSYVMGWFRQAPGKEREFVGAIHWSGGRTYYADSVKGRFTISSDNAKNTLYLQMNSLKPEDTAVYYCAASRIIYSYVNYVNPGEYDYWGQGTQVTVSS

SEQ ID NO: 12888 - protein, 249 aa, Lama glama
QVQLQESGGGLVQPGGSLRLSCEASGFTFSRFGMTWVRQAPGKGVEWVSGISSLGDSTLYADSVKGRFTISRDNAKNTLYLQMNSLKPEDTAVYYCTIGGSLNPGGQGTQVTVSSEPKTPKPQPAAAEVQLVESGGGLVQPGGSLRLSCAASGFTFSSHYMSWFRQAPGKEREFVAAITSSSRTYYTESVKGRFTISRDNAKNTVYLQMNSLKSEDTAVYYCAADRTFYGSTWSKYDYRGQGTQVTVSS

SEQ ID NO: 12889 - protein, 249 aa, Lama glama
QVQLQESGGGLVQPGNSLRLSCAASGFTFRNFGMSWVRQAPGKEPEWVSSISGSGSNTIYADSVKDRFTISRDNAKSTLYLQMNSLKPEDTAVYYCTIGGSLSRSSQGTQVTVSSEPKTPKPQPAAAEVQLVESGGGLVQPGGSLRLSCAASGFTFSSHYMSWFRQAPGKEREFVAAITSSSRTYYTESVKGRFTISRDNAKNTVYLQMNSLKSEDTAVYYCAADRTFYGSTWSKYDYRGQGTQVTVSS

SEQ ID NO: 12890 - protein, 248 aa, Lama glama
QVQLQESGGGLVQPGGSLRLTCTASGFTFSSFGMSWVRQAPGKGLEWVSAISSDSGTKNYADSVKGRFTISRDNAKKMLFLQMNSLRPEDTAVYYCVIGRGSPSSQGTQVTVSSEPKTPKPQPAAAEVQLVESGGGLVQPGGSLRLSCAASGFTFSSHYMSWFRQAPGKEREFVAAITSSSRTYYTESVKGRFTISRDNAKNTVYLQMNSLKSEDTAVYYCAADRTFYGSTWSKYDYRGQGTQVTVSS

SEQ ID NO: 12891 - protein, 248 aa, Lama glama
QVQLQESGGGLVQPGGSLRLTCTASGFTFRSFGMSWVRQAPGKGLEWVSAISADGSDKRYADSVKGRFTISRDNGKKMLTLDMNSLKPEDTAVYYCVIGRGSPASQGTQVTVSSEPKTPKPQPAAAEVQLVESGGGLVQPGGSLRLSCAASGFTFSSHYMSWFRQAPGKEREFVAAITSSSRTYYTESVKGRFTISRDNAKNTVYLQMNSLKSEDTAVYYCAADRTFYGSTWSKYDYRGQGTQVTVSS

SEQ ID NO: 12892 - protein, 256 aa, Lama glama
QVQLQESGGGLVQPGGSLRLSCEASGFTFSRFGMTWVRQAPGKGVEWVSGISSLGDSTLYADSVKGRFTISRDNAKNTLYLQMNSLKPEDTAVYYCTIGGSLNPGGQGTQVTVSSEPKTPKPQPAAAQVQLQESGGGLVQAGGSLLLSCAASGRTFSSYAMGWFRQAPGKEREFVAAINWSGGSTSYADSVKGRFTISRDNTKNTVYLQMNSLKPEDTAAFYCAATYNPYSRDHYFPRMTTEYDYWGQGTQVTVSS

SEQ ID NO: 12893 - protein, 249 aa, Lama glama
QVQLQESGGGLVQPGGSLRLSCEASGFTFSRFGMTWVRQAPGKGVEWVSGISSLGDSTLYADSVKGRFTISRDNAKNTLYLQMNSLKPEDTAVYYCTIGGSLNPGGQGTQVTVSSEPKTPKPQPAAAQVQLQESGGRLVQTGGSLRLSCAASGGTFGTYALGWFRQAPGKEREFVAAISRFGSTYYADSVKGRFTISRDNANNTVYLEMNSLKPEDTAVYYCAAREGVALGLRNDANYWGQGTQVTVSS

SEQ ID NO: 12894 - protein, 248 aa, Lama glama
QVQLQESGGGLVQPGGSLRLSCEASGFTFSRFGMTWVRQAPGKGVEWVSGISSLGDSTLYADSVKGRFTISRDNAKNTLYLQMNSLKPEDTAVYYCTIGGSLNPGGQGTQVTVSSEPKTPKPQPAAAQVQLQDSGGGLVQAGGSLRLSCAASGGTFSSYAMGWFRQAPGKEREFVAAIGLNTYYADSVKGRFTISRDNAKNTVYLQMNSLKPEDTAVYYCAARTSGVVGGTPKRYDYWGQGTQVTVSS

SEQ ID NO: 12895 - protein, 249 aa, Lama glama
QVQLQESGGGLVQPGGSLRLSCEASGFTFSRFGMTWVRQAPGKGVEWVSGISSLGDSTLYADSVKGRFTISRDNAKNTLYLQMNSLKPEDTAVYYCTIGGSLNPGGQGTQVTVSSEPKTPKPQPAAAQVQLQESGGGSVQAGGSLKLSCAASGRGFSRYAMGWFRQAPGQDREFVATISWTNSTDYADSVKGRFAISRDNAKNTAYLQMNSLKPEDTAVYYCAADKWASSTRSIDYDYWGQGIQVTVSS

SEQ ID NO: 12896 - protein, 250 aa, Lama glama
QVQLQESGGGLVQPGGSLRLSCEASGFTFSRFGMTWVRQAPGKGVEWVSGISSLGDSTLYADSVKGRFTISRDNAKNTLYLQMNSLKPEDTAVYYCTIGGSLNPGGQGTQVTVSSEPKTPKPQPAAAQVQLQESGGGLVQAGGSLRLSCAASGRTFSNYAMGWFRQAPGKEREFVAAINWGGGNTYYADSVKGRFTISRDNAKNTVYLQMNSLKPEDTAVYYCAASEWGGSDYDHDYDYWGQGTQVTVSS

SEQ ID NO: 12897 - protein, 253 aa, Lama glama
QVQLQESGGGLVQPGGSLRLSCEASGFTFSRFGMTWVRQAPGKGVEWVSGISSLGDSTLYADSVKGRFTISRDNAKNTLYLQMNSLKPEDTAVYYCTIGGSLNPGGQGTQVTVSSEPKTPKPQPAAAQVKLEESGGGLVQAGGSLRLSCAASGSIFSINAMGWYRQAPGKQRELVARITGTGTGITGAVSTNYADSVKGRFTISRDNARNTVYLQMNSLKPEDTAVYYCAADRSRTIVVPDYWGQGTQVTVSS

SEQ ID NO: 12898 - protein, 253 aa, Lama glama
QVQLQESGGGLVQPGGSLRLSCEASGFTFSRFGMTWVRQAPGKGVEWVSGISSLGDSTLYADSVKGRFTISRDNAKNTLYLQMNSLKPEDTAVYYCTIGGSLNPGGQGTQVTVSSEPKTPKPQPAAAQVQLQDSGGGLVQAGGSLRLSCAASRFSSAQYAIGWFRQAPGKEREGVSYITFSGGPTGYADSVKGRFTVSRDNAKNTVYLQMNSLKPEDTAVYYCAARPYTRPGSMWVSSLYDNWGQGTQVTVSS

SEQ ID NO: 12899 - protein, 250 aa, Lama glama
QVQLQESGGGLVQPGGSLRLSCEASGFTFSRFGMTWVRQAPGKGVEWVSGISSLGDSTLYADSVKGRFTISRDNAKNTLYLQMNSLKPEDTAVYYCTIGGSLNPGGQGTQVTVSSEPKTPKPQPAAAQVQLQESGGRLVQAGGSLRLSCAASEHTFRGYAIGWFRQAPGKEREFVSSITYDGTLTNYADSVTGRFTISRDNAKNTVYLQMNSLKPEDTAVYVCAAGYSYRYTTLNQYDSWGQGTQVTVSS

SEQ ID NO: 12900 - protein, 128 aa, Lama glama
AVQLVESGGGLVQAGDSLRLSCVVSGTTFSSAAMGWFRQAPGKEREFVGAIKWSGTSTYYTDSVKGRFTISRDNVKNTVYLQMNNLKPEDTGVYTCAADRDRYRDRMGPMTTTDFRFWGQGTQVTVSS

SEQ ID NO: 12901 - protein, 124 aa, Lama glama
QVKLEESGGGLVQTGGSLRLSCAASGRTFSSFAMGWFRQAPGREREFVASIGSSGITTNYADSVKGRFTISRDNAKNTVYLQMNSLKPEDTGLCYCAVNRYGIPYRSGTQYQNWGQGTQVTVSS

SEQ ID NO: 12902 - protein, 120 aa, Lama glama
EVQLEESGGGLVQPGGSLRLSCAASGLTFNDYAMGWYRQAPGKERDMVATISIGGRTYYADSVKGRFTISRDNAKNTVYLQMNSLKPEDTAIYYCVAHRQTVVRGPYLLWGQGTQVTVSS

SEQ ID NO: 12903 - protein, 123 aa, Lama glama
QVQLVESGGKLVQAGGSLRLSCAASGRTFSNYAMGWFRQAPGKEREFVAGSGRSNSYNYYSDSVKGRFTISRDNAKNTVYLQMNSLKPEDTAVYYCAASTNLWPRDRNLYAYWGQGTQVTVSS

SEQ ID NO: 12904 - protein, 125 aa, Lama glama
EVQLVESGGGLVQAGDSLRLSCAASGRSLGIYRMGWFRQVPGKEREFVAAISWSGGTTRYLDSVKGRFTISRDSTKNAVYLQMNSLKPEDTAVYYCAVDSSGRLYWTLSTSYDYWGQGTQVTVSS

SEQ ID NO: 12905 - protein, 125 aa, Lama glama
QVQLVEFGGGLVQAGDSLRLSCAASGRSLGIYKMAWFRQVPGKEREFVAAISWSGGTTRYIDSVKGRFTLSRDNTKNMVYLQMNSLKPDDTAVYYCAVDSSGRLYWTLSTSYDYWGQGTQVTVSS

SEQ ID NO: 12906 - protein, 124 aa, Lama glama
EVQLVESGGGLVQAGGSLSLSCAASGRTFSPYTMGWFRQAPGKEREFLAGVTWSGSSTFYGDSVKGRFTASRDSAKNTVTLEMNSLNPEDTAVYYCAAAYGGGLYRDPRSYDYWGRGTQVTVSS

SEQ ID NO: 12907 - protein, 131 aa, Lama glama
AVQLVESGGGLVQAGGSLRLSCAASGFTLDAWPIAWFRQAPGKEREGVSCIRDGTTYYADSVKGRFTISSDNANNTVYLQTNSLKPEDTAVYYCAAPSGPATGSSHTFGIYWNLRDDYDNWGQGTQVTVSS

SEQ ID NO: 12908 - protein, 126 aa, Lama glama
EVQLVESGGGLVQAGGSLRLSCAASGFTFDHYTIGWFRQVPGKEREGVSCISSSDGSTYYADSVKGRFTISSDNAKNTVYLQMNTLEPDDTAVYYCAAGGLLLRVEELQASDYDYWGQGIQVTVSS

SEQ ID NO: 12909 - protein, 128 aa, Lama glama
AVQLVDSGGGLVQPGGSLRLSCTASGFTLDYYAIGWFRQAPGKEREGVACISNSDGSTYYGDSVKGRFTISRDNAKTTVYLQMNSLKPEDTAVYYCATADRHYSASHHPFADFAFNSWGQGTQVTVSS

SEQ ID NO: 12910 - protein, 120 aa, Lama glama
EVQLVESGGGLVQAGGSLRLSCAAYGLTFWRAAMAWFRRAPGKERELVVARNWGDGSTRYADSVKGRFTISRDNAKNTVYLQMNSLKPEDTAVYYCAAVRTYGSATYDIWGQGTQVTVSS

SEQ ID NO: 12911 - protein, 123 aa, Lama glama
EVQLVESGGGLVQDGGSLRLSCIFSGRTFANYAMGWFRQAPGKEREFVAAINRNGGTTNYADALKGRFTISRDNTKNTAFLQMNSLKPDDTAVYYCAAREWPFSTIPSGWRYWGQGTQVTVSS

SEQ ID NO: 12912 - protein, 125 aa, Lama glama
DVQLVESGGGWVQPGGSLRLSCAASGPTASSHAIGWFRQAPGKEREFVVGINRGGVTRDYADSVKGRFAVSRDNVKNTVYLQMNRLKPEDSAIYICAARPEYSFTAMSKGDMDYWGKGTLVTVSS

SEQ ID NO: 12913 - protein, 118 aa, Mus musculus
EVQLQESGPSLVKPSQTLSLTCSVTGDSITSGYWNNWIRQFPGNKLEWMGYISYSGSTYYNPSLKSRISITRDTSKNQYFLQLNSVTTEDTATYYCARGGYGYGFDYWGQGTTVTVSS

SEQ ID NO: 12914 - protein, 330 aa, Homo sapiens [sequence omitted]

SEQ ID NO: 12915 - protein, 326 aa, Homo sapiens; identical to SEQ ID NO: 3888

SEQ ID NO: 12916 - protein, 377 aa, Homo sapiens; identical to SEQ ID NO: 7170

SEQ ID NO: 12917 - protein, 327 aa, Homo sapiens; identical to SEQ ID NO: 7171

SEQ ID NO: 12918 - protein, 330 aa, Artificial Sequence
  source: /note="Description of Artificial Sequence: Synthetic polypeptide"
ASTKGPSVFPLAPSSKSTSGGTAALGCLVKDYFPEPVTVSWNSGALTSGVHTFPAVLQSSGLYSLSSVVTVPSSSLGTQTYICNVNHKPSNTKVDKRVEPKSCDKTHTCPPCPAPELLGGPSVFLFPPKPKDTLMISRTPEVTCVVVDVSHEDPEVKFNWYVDGVEVHNAKTKPREEQYASTYRVVSVLTVLHQDWLNGKEYKCKVSNKALPAPIEKTISKAKGQPREPQVYTLPPSREEMTKNQVSLTCLVKGFYPSDIAVEWESNGQPENNYKTTPPVLDSDGSFFLYSKLTVDKSRWQQGNVFSCSVMHEALHNHYTQKSLSLSPGK

SEQ ID NO: 12919 - protein, 330 aa, Artificial Sequence; identical to SEQ ID NO: 12918
  source: /note="Description of Artificial Sequence: Synthetic polypeptide"

SEQ ID NO: 12920 - protein, 330 aa, Artificial Sequence; identical to SEQ ID NO: 12918
  source: /note="Description of Artificial Sequence: Synthetic polypeptide"

SEQ ID NO: 12921 - protein, 330 aa, Artificial Sequence; identical to SEQ ID NO: 12918
  source: /note="Description of Artificial Sequence: Synthetic polypeptide"

SEQ ID NO: 12922 - protein, 330 aa, Artificial Sequence; identical to SEQ ID NO: 12918
  source: /note="Description of Artificial Sequence: Synthetic polypeptide"

SEQ ID NO: 12923 - protein, 330 aa, Artificial Sequence; identical to SEQ ID NO: 12918
  source: /note="Description of Artificial Sequence: Synthetic polypeptide"

SEQ ID NO: 12924 - protein, 330 aa, Artificial Sequence; identical to SEQ ID NO: 12918
  source: /note="Description of Artificial Sequence: Synthetic polypeptide"

SEQ ID NO: 12925 - protein, 330 aa, Artificial Sequence; identical to SEQ ID NO: 12918
  source: /note="Description of Artificial Sequence: Synthetic polypeptide"

SEQ ID NO: 12926 - protein, 330 aa, Artificial Sequence; identical to SEQ ID NO: 12918
  source: /note="Description of Artificial Sequence: Synthetic polypeptide"

SEQ ID NO: 12927 - protein, 330 aa, Artificial Sequence; identical to SEQ ID NO: 12918
  source: /note="Description of Artificial Sequence: Synthetic polypeptide"

SEQ ID NO: 12928 - protein, 330 aa, Artificial Sequence; identical to SEQ ID NO: 12918
  source: /note="Description of Artificial Sequence: Synthetic polypeptide"

SEQ ID NO: 12929 - protein, 330 aa, Artificial Sequence; identical to SEQ ID NO: 12918
  source: /note="Description of Artificial Sequence: Synthetic polypeptide"

SEQ ID NO: 12930 - protein, 330 aa, Artificial Sequence; identical to SEQ ID NO: 12918
  source: /note="Description of Artificial Sequence: Synthetic polypeptide"

SEQ ID NO: 12931 - protein, 330 aa, Artificial Sequence; identical to SEQ ID NO: 12918
  source: /note="Description of Artificial Sequence: Synthetic polypeptide"

SEQ ID NO: 12932 - protein, 330 aa, Artificial Sequence; identical to SEQ ID NO: 12918
  source: /note="Description of Artificial Sequence: Synthetic polypeptide"

SEQ ID NO: 12933 - protein, 330 aa, Artificial Sequence; identical to SEQ ID NO: 12918
  source: /note="Description of Artificial Sequence: Synthetic polypeptide"

SEQ ID NO: 12934 - protein, 330 aa, Artificial Sequence; identical to SEQ ID NO: 12918
  source: /note="Description of Artificial Sequence: Synthetic polypeptide"

SEQ ID NO: 12935 - protein, 330 aa, Artificial Sequence; identical to SEQ ID NO: 12918
  source: /note="Description of Artificial Sequence: Synthetic polypeptide"

SEQ ID NO: 12936 - protein, 330 aa, Artificial Sequence; identical to SEQ ID NO: 12918
  source: /note="Description of Artificial Sequence: Synthetic polypeptide"

SEQ ID NO: 12937 - protein, 330 aa, Artificial Sequence; identical to SEQ ID NO: 12918
  source: /note="Description of Artificial Sequence: Synthetic polypeptide"

SEQ ID NO: 12938 - protein, 330 aa, Artificial Sequence; identical to SEQ ID NO: 12918
  source: /note="Description of Artificial Sequence: Synthetic polypeptide"

SEQ ID NO: 12939 - protein, 330 aa, Artificial Sequence; identical to SEQ ID NO: 12918
  source: /note="Description of Artificial Sequence: Synthetic polypeptide"

SEQ ID NO: 12940 - protein, 330 aa, Artificial Sequence; identical to SEQ ID NO: 12918
  source: /note="Description of Artificial Sequence: Synthetic polypeptide"

SEQ ID NO: 12941 - protein, 330 aa, Artificial Sequence; identical to SEQ ID NO: 12918
  source: /note="Description of Artificial Sequence: Synthetic polypeptide"

SEQ ID NO: 12942 - protein, 330 aa, Artificial Sequence; identical to SEQ ID NO: 12918
  source: /note="Description of Artificial Sequence: Synthetic polypeptide"

SEQ ID NO: 12943 - protein, 330 aa, Artificial Sequence; identical to SEQ ID NO: 12918
  source: /note="Description of Artificial Sequence: Synthetic polypeptide"

SEQ ID NO: 12944 - protein, 330 aa, Artificial Sequence
  source: /note="Description of Artificial Sequence: Synthetic polypeptide"
ASTKGPSVFPLAPSSKSTSGGTAALGCLVKDYFPEPVTVSWNSGALTSGVHTFPAVLQSSGLYSLSSVVTVPSSSLGTQTYICNVNHKPSNTKVDARVEPKSCDKTHTCPPCPAPELLGGPSVFLFPPKPKDTLMISRTPEVTCVVVDVSHEDPEVKFNWYVDGVEVHNAKTKPREEQYASTYRVVSVLTVLHQDWLNGKEYKCKVSNKALPAPIEKTISKAKGQPREPQVYTLPPSREEMTKNQVSLTCLVKGFYPSDIAVEWESNGQPENNYKTTPPVLDSDGSFFLYSKLTVDKSRWQQGNVFSCSVMHEALHNHYTQKSLSLSPGK

SEQ ID NO: 12945 - protein, 110 aa, Homo sapiens
SGNTFRPEVHLLPPPSEELALNELVTLTCLARGFSPKDVLVRWLQGSQELPREKYLTWASRQEPSQGTTTFAVTSILRVAAEDWKKGDTFSCMVGHEALPLAFTQKTIDR

SEQ ID NO: 12946 - protein, 108 aa, Homo sapiens
KGQPREPQVYTLPPSRDELTKNQVSLTCLVKGFYPSDIAVEWESNGQPENNYKTTPPVLDSDGSFFLYSKLTVDKSRWQQGNVFSCSVMHEALHNHYTQKSLSLSPGK

SEQ ID NO: 12947 - protein, 330 aa, Artificial Sequence; identical to SEQ ID NO: 12918
  source: /note="Description of Artificial Sequence: Synthetic polypeptide"

SEQ ID NO: 12948 - protein, 328 aa, Artificial Sequence
  source: /note="Description of Artificial Sequence: Synthetic polypeptide"
TKGPSVFPLAPSSKSTSGGTAALGCLVKDYFPEPVTVSWNSGALTSGVHTFPAVLQSSGLYSLSSVVTVPSSSLGTQTYICNVNHKPSNTKVDKKAEPKSCDKTHTCPPCPAPELLGGPSVFLFPPKPKDTLMISRTPEVTCVVVDVSHEDPEVKFNWYVDGVEVHNAKTKPREEQYNSTYRVVSVLTVLHQDWLNGKEYKCKVSNKALPAPIEKTISKAKGQPREPQVYTLPPSRDELTKNQVSLTCLVKGFYPSDIAVEWESNGQPENNYKTTPPVLDSDGSFFLYSKLTVDKSRWQQGNVFSCSVMHEALHNHYTQKSLSLSPGK

SEQ ID NO: 12949 - protein, 119 aa, Artificial Sequence
  source: /note="Description of Artificial Sequence: Synthetic polypeptide"
DKTHTCPPCPAPELLGGPSVFLFPPALEDLLLGSEANVTCVVVDVSHEDPEVKFNWYVDGVEVHNAKTKPREEQYNSTYRVVSVLTVLHQDWLNGKEYKCKVSNKALPAPIEKTISKAK

SEQ ID NO: 12950 - protein, 120 aa, Artificial Sequence
  source: /note="Description of Artificial Sequence: Synthetic polypeptide"
DKTHTCPPCPAPELLGGPSVFLFPPALEDLLLGSEANGVTCVVVDVSHEDPEVKFNWYVDGVEVHNAKTKPREEQYNSTYRVVSVLTVLHQDWLNGKEYKCKVSNKALPAPIEKTISKAK

SEQ ID NO: 12951 - protein, 233 aa, Homo sapiens
VPCPVPSTPPTPSPSTPPTPSPSCCHPRLSLHRPALEDLLLGSEANLTCTLTGLRDASGVTFTWTPSSGKSAVQGPPERDLCGCYSVSSVLPGCAEPWNHGKTFTCTAAYPESKTPLTATLSKSGNTFRPEVHLLPPPSEELALNELVTLTCLARGFSPKDVLVRWLQGSQELPREKYLTWASRQEPSQGTTTFAVTSILRVAAEDWKKGDTFSCMVGHEALPLAFTQKTIDR

SEQ ID NO: 12952 - protein, 108 aa, Artificial Sequence
  source: /note="Description of Artificial Sequence: Synthetic polypeptide"
ASTKGPSVFPLAPSSKSTSGGTAALGCLVKDYFPEPVTVSWNSGALTSGVHTFPAVLQSSGLYSLSSVVTVPSSSLGTQTYICNVNHKPSNTKVDKKVEPKSCDKTHT

SEQ ID NO: 12953 - protein, 449 aa, Artificial Sequence
  source: /note="Description of Artificial Sequence: Synthetic polypeptide"
QVQLKQSGPGLVQPSQSLSITCTVSGFSLTNYGVHWVRQSPGKGLEWLGVIWSGGNTDYNTPFTSRLSINKDNSKSQVFFKMNSLQSNDTAIYYCARALTYYDYEFAYWGQGTLVTVSAASTKGPSVFPLAPSSKSTSGGTAALGCLVKDYFPEPVTVSWNSGALTSGVHTFPAVLQSSGLYSLSSVVTVPSSSLGTQTYICNVNHKPSNTKVDKRVEPKSCDKTHTCPPCPAPELLGGPSVFLFPPKPKDTLMISRTPEVTCVVVDVSHEDPEVKFNWYVDGVEVHNAKTKPREEQYNSTYRVVSVLTVLHQDWLNGKEYKCKVSNKALPAPIEKTISKAKGQPREPQVYTLPPSRDELTKNQVSLTCLVKGFYPSDIAVEWESNGQPENNYKTTPPVLDSDGSFFLYSKLTVDKSRWQQGNVFSCSVMHEALHNHYTQKSLSLSPGK

SEQ ID NO: 12954 - protein, 330 aa, Artificial Sequence; identical to SEQ ID NO: 3889
  source: /note="Description of Artificial Sequence: Synthetic polypeptide"

SEQ ID NO: 12955 - protein, 333 aa, Artificial Sequence
  source: /note="Description of Artificial Sequence: Synthetic polypeptide"
ASTKGPSVFPLAPSSKSTSGGTAALGCLVKDYFPEPVTVSWNSGALTSGVHTFPAVLQSSGLYSLSSVVTVPSSSLGTQTYICNVNHKPSNTKVDKRVEPKSPKSCDKTHTCPPCPAPELLGGPSVFLFPPKPKDTLMISRTPEVTCVVVDVSHEDPEVKFNWYVDGVEVHNAKTKPREEQYNSTYRVVSVLTVLHQDWLNGKEYKCKVSNKALPAPIEKTISKAKGQPREPQVYTLPPSRDELTKNQVSLTCLVKGFYPSDIAVEWESNGQPENNYKTTPPVLDSDGSFFLYSKLTVDKSRWQQGNVFSCSVMHEALHNHYTQKSLSLSPGK

SEQ ID NO: 12956 - protein, 330 aa, Artificial Sequence [sequence omitted]

SEQ ID NO: 12957 - protein, 330 aa, Artificial Sequence; identical to SEQ ID NO: 3890
  source: /note="Description of Artificial Sequence: Synthetic polypeptide"

SEQ ID NO: 12958 - protein, 330 aa, Artificial Sequence [sequence omitted]

SEQ ID NO: 12959 - protein, 330 aa, Artificial Sequence; identical to SEQ ID NO: 7178
  source: /note="Description of Artificial Sequence: Synthetic polypeptide"

SEQ ID NO: 12960 - protein, 330 aa, Artificial Sequence; identical to SEQ ID NO: 3890
  source: /note="Description of Artificial Sequence: Synthetic polypeptide"

SEQ ID NO: 12961 - protein, 330 aa, Homo sapiens [sequence omitted]

SEQ ID NO: 12962 - protein, 336 aa, Homo sapiens
LVTVSSASTKGPSVFPLAPSSKSTSGGTAALGCLVKDYFPEPVTVSWNSGALTSGVHTFPAVLQSSGLYSLSSVVTVPSSSLGTQTYICNVNHKPSNTKVDKKVEPKSCDKTHTCPPCPAPELLGGPDVFLFPPKPKDTLMISRTPEVTCVVVDVSHEDPEVKFNWYVDGVEVHNAKTKPREEQYNSTYRVVSVLTVLHQDWLNGKEYKCKVSNKALPAPEEKTISKAKGQPREPQVYTLPPSRDELTKNQVSLTCLVKGFYPSDIAVEWESNGQPENNYKTTPPVLDSDGSFFLYSKLTVDKSRWQQGNVFSCSVMHEALHNHYTQKSLSLSPGK

SEQ ID NO: 12963 - protein, 336 aa, Homo sapiens
LVTVSSASTKGPSVFPLAPSSKSTSGGTAALGCLVKDYFPEPVTVSWNSGALTSGVHTFPAVLQSSGLYSLSSVVTVPSSSLGTQTYICNVNHKPSNTKVDKKVEPKSCDKTHTCPPCPAPELLGGPDVFLFPPKPKDTLMISRTPEVTCVVVDVSHEDPEVKFNWYVDGVEVHNAKTKPREEQYNSTYRVVSVLTVLHQDWLNGKEYKCKVSNKALPLPEEKTISKAKGQPREPQVYTLPPSRDELTKNQVSLTCLVKGFYPSDIAVEWESNGQPENNYKTTPPVLDSDGSFFLYSKLTVDKSRWQQGNVFSCSVMHEALHNHYTQKSLSLSPGK

SEQ ID NO: 12964 - protein, 330 aa, Homo sapiens [sequence omitted]

SEQ ID NO: 12965 - protein, 326 aa, Homo sapiens; identical to SEQ ID NO: 3888

SEQ ID NO: 12966 - protein, 327 aa, Homo sapiens; identical to SEQ ID NO: 7171

SEQ ID NO: 12967 - protein, 376 aa, Homo sapiens
ASTKGPSVFPLAPCSRSTSGGTAALGCLVKDYFPEPVTVSWNSGALTSGVHTFPAVLQSSGLYSLSSVVTVPSSSLGTQTYTCNVNHKPSNTKVDKRVELKTPLGDTTHTCPRCPEPKSCDTPPPCPRCPEPKSCDTPPPCPRCPEPKSCDTPPPCPRCPAPELLGGPSVFLFPPKPKDTLMISRTPEVTCVVVDVSHEDPEVQFKWYVDGVEVHNAKTKPREEQFNSTFRVVSVLTVLHQDWLNGKEYKCKVSNKALPAPIEKTISKTKGQPREPQVYTLPPSREEMTKNQVSLTCLVKGFYPSDIAVEWESSGQPENNYNTTPPMLDSDGSFFLYSKLTVDKSRWQQGNIFSCSVMHEALHNRFTQKSLSLSPG

SEQ ID NO: 12968 - protein, 327 aa, Artificial Sequence; identical to SEQ ID NO: 7179
  source: /note="Description of Artificial Sequence: Synthetic polypeptide"

SEQ ID NO: 12969 - protein, 326 aa, Artificial Sequence; identical to SEQ ID NO: 4412
  source: /note="Description of Artificial Sequence: Synthetic polypeptide"

SEQ ID NO: 12970 - protein, 330 aa, Artificial Sequence; identical to SEQ ID NO: 3890
  source: /note="Description of Artificial Sequence: Synthetic polypeptide"

SEQ ID NO: 12971 - protein, 330 aa, Artificial Sequence
  source: /note="Description of Artificial Sequence: Synthetic polypeptide"
ASTKGPSVFPLAPSSKSTSGGTAALGCLVKDYFPEPVTVSWNSGALTSGVHTFPAVLQSSGLYSLSSVVTVPSSSLGTQTYICNVNHKPSNTKVDKRVEPKSCDKTHTCPPCPAPELLGGPSVFLFPPKPKDTLMISRTPEVTCVVVAVSHEDPEVKFNWYVDGVEVHNAKTKPREEQYNSTYRVVSVLTVLHQDWLNGKEYKCKVSNKALAAPIEKTISKAKGQPREPQVYTLPPSREEMTKNQVSLTCLVKGFYPSDIAVEWESNGQPENNYKTTPPVLDSDGSFFLYSKLTVDKSRWQQGNVFSCSVMHEALHNHYTQKSLSLSPGK

SEQ ID NO: 12972 - protein, 330 aa, Artificial Sequence
  source: /note="Description of Artificial Sequence: Synthetic polypeptide"
ASTKGPSVFPLAPSSKSTSGGTAALGCLVKDYFPEPVTVSWNSGALTSGVHTFPAVLQSSGLYSLSSVVTVPSSSLGTQTYICNVNHKPSNTKVDKRVEPKSCDKTHTCPPCPAPEAAGGPSVFLFPPKPKDTLMISRTPEVTCVVVDVSHEDPEVKFNWYVDGVEVHNAKTKPREEQYNSTYRVVSVLTVLHQDWLNGKEYKCKVSNKALPAPIEKTISKAKGQPREPQVYTLPPSREEMTKNQVSLTCLVKGFYPSDIAVEWESNGQPENNYKTTPPVLDSDGSFFLYSKLTVDKSRWQQGNVFSCSVMHEALHNHYTQKSLSLSPGK

SEQ ID NO: 12973 - protein, 315 aa, Homo sapiens
ASTKGPSVFPLAPCSRSTSESTAALGCLVKDYFPEPVTVSWNSGALTSGVHTFPAVLQSSGLYSLSSVVTVPSSSLGTKTYTCNVDHKPSNTKVDKRVAPEFLGGPSVFLFPPKPKDTLMISRTPEVTCVVVDVSQEDPEVQFNWYVDGVEVHNAKTKPREEQFNSTYRVVSVLTVLHQDWLNGKEYKCKVSNKGLPSSIEKTISKAKGQPREPQVYTLPPSQEEMTKNQVSLTCLVKGFYPSDIAVEWESNGQPENNYKTTPPVLDSDGSFFLYSRLTVDKSRWQEGNVFSCSVMHEALHNHYTQKSLSLSLGK

SEQ ID NO: 12974 - protein, 327 aa, Homo sapiens
  MOD_RES (189)..(189): Any amino acid
  MOD_RES (289)..(289): Any amino acid
ASTKGPSVFPLAPCSRSTSESTAALGCLVKDYFPEPVTVSWNSGALTSGVHTFPAVLQSSGLYSLSSVVTVPSSSLGTKTYTCNVDHKPSNTKVDKRVESKYGPPCPSCPAPEFLGGPSVFLFPPKPKDTLMISRTPEVTCVVVDVSQEDPEVQFNWYVDGVEVHNAKTKPREEQFNSTYRVVSVLTVXHQDWLNGKEYKCKVSNKGLPSSIEKTISKAKGQPREPQVYTLPPSQEEMTKNQVSLTCLVKGFYPSDIAVEWESNGQPENNYKTTPPVLDSDGSFFLYSXLTVDKSRWQEGNVFSCSVMHEALHNHYTQKSLSLSLGK

SEQ ID NO: 12975 - protein, 330 aa, Artificial Sequence [sequence omitted]

SEQ ID NO: 12976 - protein, 327 aa, Homo sapiens; identical to SEQ ID NO: 7171

SEQ ID NO: 12977 - protein, 315 aa, Homo sapiens; identical to SEQ ID NO: 12973

SEQ ID NO: 12978 - protein, 256 aa, Artificial Sequence
  source: /note="Description of Artificial Sequence: Synthetic polypeptide"
MKKNIAFLLASMFVFSIATNAYAEVQLVQSGGGLVQPGGSLRLSCAASGYSFSSHYMHWVRQAPGKGLEWVGYIDPSNGETTYNQKFKGRFTLSRDNSKNTAYLQMNSLRAEDTAVYYCARGDYRYNGDWFFDVWGQGTLVTVSSASTKGPSVFPLAPSSKSTSGGTAALGCLVKDYFPEPVTVSWNSGALTSGVHTFPAVLQSSGLYSLSSVVTVPSSSLGTQTYICNVNHKPSNTKVDKKVEPKSCDKTHTCPP

SEQ ID NO: 12979 - protein, 231 aa, Artificial Sequence
  source: /note="Description of Artificial Sequence: Synthetic polypeptide"
QVQLHQPGAELVKPGAPVKLSCKASGYTFTSYWMNWVKQRPGRGLEWIGRIDPSDSETHYNQKFKDKATLTVDKSSSTAYIQLSSLTSEDSAVYYCAKVGRGYFDYWGQGTTLTVSSASTKGPSVFPLAPSSKSTSGGTAALGCLVKDYFPEPVTVSWNSGALTSGVHTFPAVLQSSGLYSLSSVVTVPSSSLGTQTYICNVNHKPSNTKVDKKVEPKSCDKTHTHHHHHH

SEQ ID NO: 12980 - protein, 128 aa, Artificial Sequence
  source: /note="Description of Artificial Sequence: Synthetic polypeptide"
  MOD_RES (16)..(16): Any amino acid
  MOD_RES (31)..(32): Any amino acid
  MOD_RES (42)..(42): Any amino acid
  MOD_RES (58)..(58): Any amino acid
  MOD_RES (102)..(112): Any amino acid
  MOD_RES (114)..(114): Any amino acid
  MOD_RES (116)..(116): Any amino acid
QVQLQESGPGLVKPSXTLSLTCTVSGGSISXXGYYWSWIRQXPGKGLEWIGYIYYSGXSTYYNPSLKSRVTISVDTSKNQFSLKLSSVTAADTAVYYCARDXXXXXXXXXXXYXGXFDVWGQGTLVTV

SEQ ID NO: 12981 - protein, 118 aa, Artificial Sequence
  source: /note="Description of Artificial Sequence: Synthetic polypeptide"
QVQLVQSGAEVKKPGASVKVSCKASGYTFTGYYIHWVRQAPGQGLEWMGWINPNSGGTNYAQKFQGRVTMTRDTSISTAYMELSRLRSDDTAVYYCARELELRYYGMDVWGQGTTVTV

SEQ ID NO: 12982 - protein, 118 aa, Artificial Sequence
  source: /note="Description of Artificial Sequence: Synthetic polypeptide"
QVQLVQSGAEVKKPGASVKVSCKASGYTFTGYYINWVRQAPGQGLEWMGWINPNSGGTNYAQKFQGRVTMTRDTSITTAYMELSRLRADDTAVYYCARELELRYYGMDVWGQGTTVTV

SEQ ID NO: 12983 - protein, 120 aa, Artificial Sequence
  source: /note="Description of Artificial Sequence: Synthetic polypeptide"
QVQLVESGGGLVKPGGSLRLSCAASGFTFSDYYMSWIRQAPGKGLEWVSYISSSGSTIYYADSVKGRFTISRDNAKNSLYLQMNSLRAEDTAVYYCARDEYNSGWYVLFDYWGQGTLVTV

SEQ ID NO: 12984 - protein, 116 aa, Artificial Sequence
  source: /note="Description of Artificial Sequence: Synthetic polypeptide"
QVQLVESGGGVVQPGRSLRLSCAASGFTFSSYGMHWVRQAPGKGLEWVAVIWYDGSDKYYADSVKGRFTISRDNSKNTLYLQMNSLRAEDTAVYYCAREDYGEGFDYWGQGTLVTV

SEQ ID NO: 12985 - protein, 127 aa, Artificial Sequence
  source: /note="Description of Artificial Sequence: Synthetic polypeptide"
QVQLQESGPGLVKPSQTLSLTCTVSGGSISSDGYYWSWIRQHPGKGLEWIGYIYYSGSTYYNPSLKSRVTISVDTSKNQFSLKLSSVTAADTAVYYCARSHLHYYDSSGYYYGGAFDIWGQGTMVTV

SEQ ID NO: 12986 - protein, 119 aa, Artificial Sequence
  source: /note="Description of Artificial Sequence: Synthetic polypeptide"
QVQLQESGPGLVKPSQTLSLTCTVSGGSISSGGYYWSWIRQHPGKGLEWIGNIYYSGITYYNPSLKSRVTMSVDTSKNQFSLKLSSVTAADTAVYYCARDPLYGDYGFDPWGQGTLVTV

SEQ ID NO: 12987 - protein, 123 aa, Artificial Sequence
  source: /note="Description of Artificial Sequence: Synthetic polypeptide"
QVQLQESGPGLVKPSQTLSLTCTVSGGSISSGGYYWSWIRQHPGKGLEWIGYIYYSGSTYYNPSLKSRVTISVDTSKNQFSLKVSSVTAADTAVYYCARDPLWFGEFDYYGMDVWGQGTTVTV

SEQ ID NO: 12988 - protein, 121 aa, Artificial Sequence
  source: /note="Description of Artificial Sequence: Synthetic polypeptide"
QVQLKESGPGLVKPSQTLSLTCTVSGGSISSGVYYWSWIRQHPGKGLEWIGYFYYSGNTYHNPSLKSRVTISVDTSKNQFSLKLSSVTAADTAVYYCARDRSGYDHPDAFDIWGQGTMVTV

SEQ ID NO: 12989 - protein, 118 aa, Artificial Sequence
  source: /note="Description of Artificial Sequence: Synthetic polypeptide"
QVQLQQWGAGLLKPSETLSLTCAVYGGSFSTYYWSWIRQPPGKGLEWIGEINHSGSTNYNPSLKSRVTISVDTSKNQFSLKLSSVTAADTAVYYCARGGYDFWSGYYDYWGQGTLVTV

SEQ ID NO: 12990 - protein, 116 aa, Artificial Sequence
  source: /note="Description of Artificial Sequence: Synthetic polypeptide"
QVQLQESGPGLVKPSETLSLTCTVSGGSISIYYWSWIRQPPGKGLEWIGYVYYSGSTNYNPSLKSRVTISVDTSKNQFSLKLNSVTAADTAVYYCARGGYDFWSGYFDYWGQGTLV

SEQ ID NO: 12991 - protein, 124 aa, Artificial Sequence
  source: /note="Description of Artificial Sequence: Synthetic polypeptide"
QVQLQQSGAELVKPGASVKLSCKASGYTFTSYWMHWVKQRPGQGLEWIGEINPSNGRTNYNEKFKRKATLTVDKSSSTAYMQLSSLTSEDSAVYYFARGRPDYYGSSKWYFDVWGAGTTVTVSS

SEQ ID NO: 12992 - protein, 120 aa, Artificial Sequence
  source: /note="Description of Artificial Sequence: Synthetic polypeptide"
QVQLQQPGSVLVRPGASVKLSCKASGYTFTSSWIHWAKQRPGQGLEWIGEIHPNSGNTNYNEKFKGKATLTVDTSSSTAYVDLSSLTSEDSAVYYCARWRYGSPYYFDYWGQGTTLTVSS

SEQ ID NO: 12993 - protein, 117 aa, Artificial Sequence
  source: /note="Description of Artificial Sequence: Synthetic polypeptide"
QIQLQQSGPELVRPGASVKISCKASGYTFTDYYIHWVKQRPGEGLEWIGWIYPGSGNTKYNEKFKGKATLTVDTSSSTAYMQLSSLTSEDSAVYFCARGGKFAMDYWGQGTSVTVSS

SEQ ID NO: 12994 - protein, 120 aa, Artificial Sequence
  source: /note="Description of Artificial Sequence: Synthetic polypeptide"
QIQLQQSGPELVKPGASVKISCKASGYTFTDYYINWMKQKPGQGLEWIGWIDPGSGNTKYNEKFKGKATLTVDTSSSTAYMQLSSLTSEDTAVYFCAREKTTYYYAMDYWGQGTSVTVSA

SEQ ID NO: 12995 - protein, 120 aa, Artificial Sequence
  source: /note="Description of Artificial Sequence: Synthetic polypeptide"
QVQLLESGAELMKPGASVKISCKATGYTFSSFWIEWVKQRPGHGLEWIGEILPGSGGTHYNEKFKGKATFTADKSSNTAYMQLSSLTSEDSAVYYCARGHSYYFYDGDYWGQGTSVTVSS

SEQ ID NO: 12996 - protein, 120 aa, Artificial Sequence
  source: /note="Description of Artificial Sequence: Synthetic polypeptide"
QVQLQQSGAELVKPGASVKLSCKASGYTFTSYWMHWVKQRPGRGLEWIGRIDPNSGGTKYNEKFKSKATLTVDKPSSTAYMQLSSLTSEDSAVYYCARYDYYGSSYFDYWGQGTTVTVSS

SEQ ID NO: 12997 - protein, 120 aa, Artificial Sequence
  source: /note="Description of Artificial Sequence: Synthetic polypeptide"
QVQLQQPGAELVKPGASVKLSCKASGYTFTSYWMHWVKQRPGRGLEWIGRIDPNSGGTKYNEKFKSKATLTVDKPSSTAYMQLSSLTSEDSAVYYCARYDYYGSSYFDYWGQGTTLTVSS

SEQ ID NO: 12998 - protein, 120 aa, Artificial Sequence
  source: /note="Description of Artificial Sequence: Synthetic polypeptide"
QVQLQQSGAELMKPGASVKISCKATGYTFSSFWIEWVKQRPGHGLEWIGEILPGSGGTHYNEKFKGKATFTADKSSNTAYMQLSSLTSEDSAVYYCARGHSYYFYDGDYWGQGTSVTVSS

SEQ ID NO: 12999 - protein, 447 aa, Artificial Sequence
  source: /note="Description of Artificial Sequence: Synthetic polypeptide"
QVQLQESGPGLVKPSETLSLTCTVSGYSITGGYLWNWIRQPPGKGLEWIGYISYDGTNNYKPSLKDRVTISRDTSKNQFSLKLSSVTAADTAVYYCARYGRVFFDYWGQGTLVTVSSASTKGPSVFPLAPSSKSTSGGTAALGCLVKDYFPEPVTVSWNSGALTSGVHTFPAVLQSSGLYSLSSVVTVPSSSLGTQTYICNVNHKPSNTKVDKRVEPKSCDKTHTCPPCPAPELLGGPSVFLFPPKPKDTLMISRTPEVTCVVVDVSHEDPEVKFNWYVDGVEVHNAKTKPREEQYNSTYRVVSVLTVLHQDWLNGKEYKCKVSNKALPAPIEKTISKAKGQPREPQVYTLPPSREEMTKNQVSLTCLVKGFYPSDIAVEWESNGQPENNYKTTPPVLDSDGSFFLYSKLTVDKSRWQQGNVFSCSVMHEALHNHYTQKSLSLSPGK

SEQ ID NO: 13000 - protein, 473 aa, Artificial Sequence
  source: /note="Description of Artificial Sequence: Synthetic polypeptide"
MEFGLSWVFLVAIIKGVQCQVQLVESGGGLVKPGGSLRLSCAASGFTFSDYYMSWIRQAPGKGLEWVSYISSSGSTIYYADSVKGRFTISRDNAKNSLYLQMNSLRAEDTAVYYCARVLRFLEWLLYYYYYYGMDVWGQGTTVTVSSASTKGPSVFPLAPCSRSTSESTAALGCLVKDYFPEPVTVSWNSGALTSGVHTFPAVLQSSGLYSLSSVVTVPSSNFGTQTYTCNVDHKPSNTKVDKTVERKCCVECPPCPAPPVAGPSVFLFPPKPKDTLMISRTPEVTCVVVDVSHEDPEVQFNWYVDGVEVHNAKTKPREEQFNSTFRVVSVLTVVHQDWLNGKEYKCKVSNKGLPAPIEKTISKTKGQPREPQVYTLPPSREEMTKNQVSLTCLVKGFYPSDIAVEWESNGQPENNYKTTPPMLDSDGSFFLYSKLTVDKSRWQQGNVFSCSVMHEALHNHYTQKSLSLSPGK

SEQ ID NO: 13001 - protein, 470 aa, Artificial Sequence
  source: /note="Description of Artificial Sequence: Synthetic polypeptide"
MEFGLSWVFLVAIIKGVQCQAQLVESGGGLVKPGGSLRLSCAASGFTFSDYYMSWIRQAPGKGLEWVSYISSSGSTRDYADSVKGRFTISRDNAKNSLYLQMNSLRAEDTAVYYCVRDGVETTFYYYYYGMDVWGQGTTVTVSSASTKGPSVFPLAPCSRSTSESTAALGCLVKDYFPEPVTVSWNSGALTSGVHTFPAVLQSSGLYSLSSVVTVPSSNFGTQTYTCNVDHKPSNTKVDKTVERKCCVECPPCPAPPVAGPSVFLFPPKPKDTLMISRTPEVTCVVVDVSHEDPEVQFNWYVDGVEVHNAKTKPREEQFNSTFRVVSVLTVVHQDWLNGKEYKCKVSNKGLPAPIEKTISKTKGQPREPQVYTLPPSREEMTKNQVSLTCLVKGFYPSDIAVEWESNGQPENNYKTTPPMLDSDGSFFLYSKLTVDKSRWQQGNVFSCSVMHEALHNHYTQKSLSLSPGK

SEQ ID NO: 13002 - protein, 470 aa, Artificial Sequence
  source: /note="Description of Artificial Sequence: Synthetic polypeptide"
MEFGLSWLFLVAILKGVQCEVQLLESGGGLVQPGGSLRLSCAASGFTFSSYAMSWVRQAPGKGLEWVSAISGSGGSTYYADSVKGRFTISRDNSKNTLYLQMNSLRAEDTAVYYCAKGYSSGWYYYYYYGMDVWGQGTTVTVSSASTKGPSVFPLAPCSRSTSESTAALGCLVKDYFPEPVTVSWNSGALTSGVHTFPAVLQSSGLYSLSSVVTVPSSNFGTQTYTCNVDHKPSNTKVDKTVERKCCVECPPCPAPPVAGPSVFLFPPKPKDTLMISRTPEVTCVVVDVSHEDPEVQFNWYVDGVEVHNAKTKPREEQFNSTFRVVSVLTVVHQDWLNGKEYKCKVSNKGLPAPIEKTISKTKGQPREPQVYTLPPSREEMTKNQVSLTCLVKGFYPSDIAVEWESNGQPENNYKTTPPMLDSDGSFFLYSKLTVDKSRWQQGNVFSCSVMHEALHNHYTQKSLSLSPGK

SEQ ID NO: 13003 - protein, 470 aa, Artificial Sequence
  source: /note="Description of Artificial Sequence: Synthetic polypeptide"
MEFGLSWLFLVAILKGVQCEVQLLESGGGLVQPGGSLRLSCTASGFTFSSYAMNWVRQAPGKGLEWVSAISGSGGTTFYADSVKGRFTISRDNSRTTLYLQMNSLRAEDTAVYYCAKDLGWSDSYYYYYGMDVWGQGTTVTVSSASTKGPSVFPLAPCSRSTSESTAALGCLVKDYFPEPVTVSWNSGALTSGVHTFPAVLQSSGLYSLSSVVTVPSSNFGTQTYTCNVDHKPSNTKVDKTVERKCCVECPPCPAPPVAGPSVFLFPPKPKDTLMISRTPEVTCVVVDVSHEDPEVQFNWYVDGVEVHNAKTKPREEQFNSTFRVVSVLTVVHQDWLNGKEYKCKVSNKGLPAPIEKTISKTKGQPREPQVYTLPPSREEMTKNQVSLTCLVKGFYPSDIAVEWESNGQPENNYKTTPPMLDSDGSFFLYSKLTVDKSRWQQGNVFSCSVMHEALHNHYTQKSLSLSPGK

SEQ ID NO: 13004 - protein, 143 aa, Mus musculus
MGWSYIILFLVATATEVHSQVQLQQSGAELVKPGASVKLSCKASGYTFTSYWMHWVKQRPGQGLEWIGEINPSNGRTNYNEKFKRKATLTVDKSSSTAYMQLSSLTSEDSAVYYFARGRPDYYGSSKWYFDVWGAGTTVTVSS

SEQ ID NO: 13005 - protein, 120 aa, Artificial Sequence
  source: /note="Description of Artificial Sequence: Synthetic polypeptide"
QVQLQQSGADLMKPGASVKISCKATGYTFSGNWIEWVKQRPGHGLEWIGEILPGSGNTNYNEKFKGKATFTADTSSNTAYMQLSSLTSEDSAVYYCARGGHYYGSSWDYWGQGTTLTVSS

SEQ ID NO: 13006 - protein, 123 aa, Homo sapiens
VQLLESGGGLVQPGGSLRLSCTASGFTFSSYAMNWVRQAPGKGLEWVSAISGSGGTTFYADSVKGRFTISRDNSRTTYLQMNSLRAEDTAVYYCAKDLGWSDSYYYYYGMDVWGQGTTVTVSS

SEQ ID NO: 13007 - protein, 120 aa, Artificial Sequence
  source: /note="Description of Artificial Sequence: Synthetic polypeptide"
EVQLVQSGAEVKKPGASVKVSCKVSGYTFSGNWIEWVRQAPGKGLEWIGEILPGSGNTNYNEKFKGKATMTADTSTDTAYMELSSLRSEDTAVYYCARGGHYYGSSWDYWGQGTLVTVSS

SEQ ID NO: 13008 - protein, 125 aa, Artificial Sequence
  source: /note="Description of Artificial Sequence: Synthetic polypeptide"
QVQLVQSGAEVKKPGASVKVSCKVSGYTLTELSMHWVRQAPGKGLEWMGGFDPEDGETIYAQKFQGRVTMTEDTSTDTAYMELSSLRSEDTAVYYCATPVGRCSSTSCYHPLDYWGQGTLVTVSS

SEQ ID NO: 13009 - protein, 461 aa, Artificial Sequence
  source: /note="Description of Artificial Sequence: Synthetic polypeptide"
MEWSWVFLVTLLNGIQCEVQLVESGGGLVQPGGSLRLSCAASGFTFTDYYMSWVRQAPGKGLEWLGFIRNKANGYTTEYSASVKGRFTISRDNSKNTLYLQMNSLRAEDTAVYYCARDNWFAYWGQGTLVTVSSASTKGPSVFPLAPSSKSTSGGTAALGCLVKDYFPEPVTVSWNSGALTSGVHTFPAVLQSSGLYSLSSVVTVPSSSLGTQTYICNVNHKPSNTKVDKKVERKCCVECPPCPAPELLGGPSVFLFPPKPKDTLMISRTPEVTCVVVDVSHEDPEVKFNWYVDGVEVHNAKTKPREEQYNSTYRVVSVLTVLHQDWLNGKEYKCKVSNKALPAPIEKTISKAKGQPREPQVYTLPPSREEMTKNQVSLTCLVKGFYPSDIAVEWESNGQPENNYKTTPPVLDSDGSFFLYSKLTVDKSRWQQGNVFSCSVMHEALHNHYTQKSLSLSPGK

SEQ ID NO: 13010 - protein, 460 aa, Artificial Sequence
  source: /note="Description of Artificial Sequence: Synthetic polypeptide"
MEWSWVFLVTLLNGIQCEVQLVESGGGLVQPGGSLRLSCAASGFTFTDYYMSWVRQAPGKGLEWLGFIRNKANGYTTEYSASVKGRFTISRDNSKNTLYLQMNSLRAEDTAVYYCARDNWFAYWGQGTLVTVSSASTKGPSVFPLAPCSRSTSESTAALGCLVKDYFPEPVTVSWNSGALTSGVHTFPAVLQSSGLYSLSSVVTVPSSNFGTQTYTCNVDHKPSNTKVDKTVERKCCVECPPCPAPPVAGPSVFLFPPKPKDTLMISRTPEVTCVVVDVSHEDPEVQFNWYVDGVEVHNAKTKPREEQFNSTFRVVSVLTVVHQDWLNGKEYKCKVSNKGLPAPIEKTISKTKGQPREPQVYTLPPSREEMTKNQVSLTCLVKGFYPSDIAVEWESNGQPENNYKTTPPMLDSDGSFFLYSKLTVDKSRWQQGNVFSCSVMHEALHNHYTQKSLSLSPGK

SEQ ID NO: 13011 - protein, 462 aa, Artificial Sequence
  source: /note="Description of Artificial Sequence: Synthetic polypeptide"
MEWSWVFLVTLLNGIQCEVQLVESGGGLVQPGGSLRLSCAASGFTFTDYYMSWVRQAPGKGLEWLGFIRNKANGYTTEYSASVKGRFTISRDNSKNTLYLQMNSLRAEDTAVYYCARDNWFAYWGQGTLVTVSSASTKGPSVFPLAPSSKSTSGGTAALGCLVKDYFPEPVTVSWNSGALTSGVHTFPAVLQSSGLYSLSSVVTVPSSSLGTQTYICNVNHKPSNTKVDKKVEPKSCDCHCPPCPAPELLGGPSVFLFPPKPKDTLMISRTPEVTCVVVDVSHEDPEVKFNWYVDGVEVHNAKTKPREEQYNSTYRVVSVLTVLHQDWLNGKEYKCKVSNKALPAPIEKTISKAKGQPREPQVYTLPPSREEMTKNQVSLTCLVKGFYPSDIAVEWESNGQPENNYKTTPPVLDSDGSFFLYSKLTVDKSRWQQGNVFSCSVMHEALHNHYTQKSLSLSPGK

SEQ ID NO: 13012 - protein, 119 aa, Artificial Sequence
  source: /note="Description of Artificial Sequence: Synthetic polypeptide"
QVQLQQSGPGLVKPSQTLSLTCAISGFSLTNYGVHWIRQPPGKGLEWIGVIWSGGNTDYNTPFTSRFTISRDDSKNTAYLQMNSLKTEDTAVYYCARALTYYDDEFAYWGPGTLVTVSA

SEQ ID NO: 13013 - protein, 119 aa, Artificial Sequence
  source: /note="Description of Artificial Sequence: Synthetic polypeptide"
EVQLVQSGAEVKKPGATVKISCKVSGFSLTNYGVHWVRQATGQGLEWMGVIWSGGNTDYNTPFTSRFTISRDDSKNTAYLQMNSLKTEDTAVYYCARALTYYDDEFAYWGPGTLVTVSA

SEQ ID NO: 13014 - protein, 119 aa, Artificial Sequence
  source: /note="Description of Artificial Sequence: Synthetic polypeptide"
EVQLVQSGAEVKKPGATVKISCKVSGFSLTNYGVHWIRQSPSRGLEWLGVIWSGGNTDYNTPFTSRLTISKDTSKNQVVLTMTNMDPVDTATYYCARALTYYDDEFAYWGPGTLVTVSA

SEQ ID NO: 13015 - protein, 119 aa, Artificial Sequence
  source: /note="Description of Artificial Sequence: Synthetic polypeptide"
EVQLVQSGAEVKKPGATVKISCKVSGFSLFNYGVHWIRQPPGKGLEWIGVIWSGGNTDYNTPFTSRFTISRDNSKNTLYLQMNSLRAEDTAVYYCARALTYYDDEFAYWGPGTLVTVSA

SEQ ID NO: 13016 - protein, 119 aa, Artificial Sequence
  source: /note="Description of Artificial Sequence: Synthetic polypeptide"
EVQLVQSGAEVKKPGATVKISCKVSGFSLFNYGVHWVRQARGQRLEWIGVIWSGGNTDYNTPFTSRFTISRDDSKNTAYLQMNSLKTEDTAVYYCARALTYYDDEFAYWGPGTLVTVSA

SEQ ID NO: 13017 - protein, 119 aa, Artificial Sequence
  source: /note="Description of Artificial Sequence: Synthetic polypeptide"
EVQLVQSGAEVKKPGATVKISCKVSGFSLFNYGVHWVRQATGQGLEWMGVIWSGGNTDYNTPFTSRFTISRDDSKNTAYLQMNSLKTEDTAVYYCARALTYYDDEFAYWGPGTLVTVSA

SEQ ID NO: 13018 - protein, 119 aa, Artificial Sequence
  source: /note="Description of Artificial Sequence: Synthetic polypeptide"
QVQLQQSGPGLVKPSQTLSLTCAISGFSLFNYGVHWIRQSPSRGLEWLGVIWSGGNTDYNTPFTSRLTISKDTSKNQVVLTMTNMDPVDTATYYCARALTYYDDEFAYWGPGTLVTVSA

SEQ ID NO: 13019 - protein, 119 aa, Artificial Sequence
  source: /note="Description of Artificial Sequence: Synthetic polypeptide"
EVQLVQSGAEVKKPGATVKISCKVSGFSLFNYGVHWIRQSPSRGLEWLGVIWSGGNTDYNTPFTSRFTISRDNSKNTLYLQMNSLRAEDTAVYYCARALTYYDDEFAYWGPGTLVTVSA

SEQ ID NO: 13020 - protein, 119 aa, Artificial Sequence
  source: /note="Description of Artificial Sequence: Synthetic polypeptide"
EVQLVQSGAEVKKPGATVKISCKVSGFSLFNYGVHWIRQPPGKGLEWIGVIWSGGNTDYNTPFTSRFTISRDDSKNTAYLQMNSLKTEDTAVYYCARALTYYDDEFAYWGPGTLVTVSA

SEQ ID NO: 13021 - protein, 97 aa, Homo sapiens; identical to SEQ ID NO: 6902

SEQ ID NO: 13022 - protein, 97 aa, Homo sapiens; identical to SEQ ID NO: 6903

SEQ ID NO: 13023 - protein, 98 aa, Homo sapiens; identical to SEQ ID NO: 6904

SEQ ID NO: 13024 - protein, 122 aa, Artificial Sequence
  source: /note="Description of Artificial Sequence: Synthetic polypeptide"
QVQLVQSGGGLVQPGGSLRLSCAASGFTFSSYAMSWVRQAPGKGLEWVSAISGSGGSTYYADSVKGRFTISRDNSKNTLYLQMNSLRAEDTAVYYCAKSSSSWYRSYYFDYWGQGTLVTVSS

SEQ ID NO: 13025 - protein, 121 aa, Artificial Sequence
  source: /note="Description of Artificial Sequence: Synthetic polypeptide"
QVQLQESGGGLVQPGGSLRLSCAASGFTFSSYAMSWVRQAPGKGLEWVSAISGSGGSTYYADSVKGRFTISRDNSKNTLYLQMNSLRAEDTAVYYCASQHVGEQSRYFDYWGQGTLVTVSS

SEQ ID NO: 13026 - protein, 117 aa, Artificial Sequence
  source: /note="Description of Artificial Sequence: Synthetic polypeptide"
QVQLQESGGGVVQPGRSLRLSCAASGFTFSSYGMHWVRQAPGKGLEWVSAIGSSGGSTHDADTVKGRFTISRDNAKNSLYLQMNSLRAEDTAVYYCARDRARGFDYWGQGTLVTVSS

SEQ ID NO: 13027 - protein, 115 aa, Artificial Sequence
  source: /note="Description of Artificial Sequence: Synthetic polypeptide"
QVQLVQSGAEVKKPGASVKVSCKASGYTFTDYYMHWVRQAPGEGLEWMGWMNPNSGGTNYAQKFQGRVTMTRDTSISTAYMELSRLRSDDTAVYYCARSHYWDSWSPGTLVTVSS

SEQ ID NO: 13028 - protein, 116 aa, Artificial Sequence
  source: /note="Description of Artificial Sequence: Synthetic polypeptide"
QVQLQESGGGLLQPGGSLRLSCAASRFTFSNYAMSWVRQAPGKGLEWVSAISGSGASTYYADSVKGRFTISRDNSKNTLYLQMNSLRAEDTAVYYCSNLYGDYDYWGQGTLVTVSS

SEQ ID NO: 13029 - protein, 128 aa, Artificial Sequence
  source: /note="Description of Artificial Sequence: Synthetic polypeptide"
QVQLQESGGGVVQPGGSLRLSCAASGFTFSSYSMNWVRQAPGKGLEWVSSISSSSSYIYYADSVKGRFTISRDNAKNSLYLQMNSLRAEDTAVYYCARDLPSDDYGDYDYYYYGMDVWGQGTTVTVSS

SEQ ID NO: 13030 - protein, 120 aa, Artificial Sequence
  source: /note="Description of Artificial Sequence: Synthetic polypeptide"
EVQLVESGGGLVQPGGSLRLSCAASGFTFSTYAMSWVRQAPGKGLEWVSAISGSGGSTYYADSVKGRFTISRDNSKNTLYLQMNSLRAEDTAVYYCAREGGKWYYGMDVWGRGTLVTVSS

SEQ ID NO: 13031 - protein, 117 aa, Artificial Sequence
  source: /note="Description of Artificial Sequence: Synthetic polypeptide"
QVQLQESGGGLVQPGGSLRLSCAASGFTFSNYAMSWVRQAPGKGLEWVSAISGSGGSTYYADSVKGRFTISRDNSKNTLYLQMNSLRAEDTAVYYCAKDRFRAAAYWGQGTLVTVSS

SEQ ID NO: 13032 - protein, 108 aa, Artificial Sequence
  source: /note="Description of Artificial Sequence: Synthetic polypeptide"
QSVLTQDPAVSVALGQTVKITCQGDSLRSYFASWYQQKPGQAPTLVMYARNDRPAGVPDRFSGSKSGTSASLAISGLQSEDEADYYCAAWDDSLNGYLFGAGTKLTVL

SEQ ID NO: 13033 - protein, 108 aa, Artificial Sequence
  source: /note="Description of Artificial Sequence: Synthetic polypeptide"
QSVLTQDPAVSVALGQTVKITCQGDSLRSYFASWYQQKPGQAPTLVMYARNDRPAGVPDRFSGSKSGTSASLAISGLQPEDEADYYCAAWDDSLNGYLFGAGTKLTVL

SEQ ID NO: 13034 - protein, 108 aa, Artificial Sequence
  source: /note="Description of Artificial Sequence: Synthetic polypeptide"
QSVLTQDPAASVALGQTVKITCQGDSLRSYFASWYQQKPGQAPTLVMYARNDRPAGVPDRFSGSKSGTSASLAISGLQSEDEADYYCAAWDDSLNGYLFGAGTKLTVL

SEQ ID NO: 13035 - protein, 108 aa, Artificial Sequence
  source: /note="Description of Artificial Sequence: Synthetic polypeptide"
QSVLTQDPAVSVALGQTVKITCQGDSLRSYLASWYQQKPGQAPTLVTYARNDRPAGVPDRFSGSKSGTSASLAISGLQSEDEADYYCAAWDDSLNGYLFGAGTKLTVL

SEQ ID NO: 13036 - protein, 119 aa, Mus sp.
  MOD_RES (49)..(49): Any amino acid
  MOD_RES (54)..(54): Any amino acid
  MOD_RES (107)..(107): Any amino acid
EVQLVQSGAEVKKPGESLKISCKGSGYSFTSYWIGWVRQMPGKGLEWMXIIYPXDSDTRYSPSFQGQVTISADKSISTAYLQWSSLKASDTAMYYCARGIIYPSNVXVWGQGTLVTVSS

SEQ ID NO: 13037 - protein, 121 aa, Mus sp.
QVQLQQPGSELVRPGASVQLSCKASGYSFTSYWMHWVRQRPGQGLQWIGNIYPGTGNTNYDEKFMNKATLTVDTYSSTTYMQLSSLTSEDSAVYYCARWGLVRYFFAMDYWGQGTSVTVSS

SEQ ID NO: 13038 - protein, 118 aa, Mus sp.
EVQLQQSGPELVKPGASMKISCRASGYSFTGYTMNWVRQSHGKNLEWIGLINPHNGGSSYNLKFKGKATLTVDKSSSTAYMELLSLTSEDSAVYYCVRWGDYGSFAYWGQGTLVTVSA

SEQ ID NO: 13039 - protein, 119 aa, Mus sp.
EVQLQQSGPELVKPGASVKISCKASGYSFTAYYMHWVKQSHVKSLEWIGLVNPYNGFSSYNQNFEDKASLTVDKFSSTAYMELHSLTSEDSAVYYCAREFYGYRYFDVWGAGTAVTVSS

SEQ ID NO: 13040 - protein, 121 aa, Artificial Sequence
  source: /note="Description of Artificial Sequence: Synthetic polypeptide"
QVQLVQPGAEVVKPGASVKLSCKASGYNFTSYWMHWVRQRPGQGLQWIGNIYPGTGNTNYDQKFQGKATLTVDTSTSTTYMQLSSLTSEDSAVYYCARWGLVRYFFAMDYWGQGTSVTVSS

SEQ ID NO: 13041 - protein, 121 aa, Artificial Sequence
  source: /note="Description of Artificial Sequence: Synthetic polypeptide"
QVQLVQPGAEVVKPGASVKLSCKASGYSFTSYWMHWVRQRPGQGLQWIGNIYPGTGNTNYDQKFQGKATLTVDTSTSTTYMQLSSLTSEDSAVYYCARWGLVRYFFAMDYWGQGTSVTVSS

SEQ ID NO: 13042 - protein, 121 aa, Artificial Sequence
  source: /note="Description of Artificial Sequence: Synthetic polypeptide"
QVQLVQPGAEVVKPGASVKLSCKASGYNFTSYWMHWVRQRPGQGLQWIGNIYPGTGNTNYDQKFQGKATLTVDTYTSTTYMQLSSLTSEDSAVYYCARWGLVRYFFAMDYWGQGTSVTVSS

SEQ ID NO: 13043 - protein, 118 aa, Artificial Sequence
  source: /note="Description of Artificial Sequence: Synthetic polypeptide"
EVQLLQSGGELVQPGASMRISCAASGYTFTGYTMNWVRQSPGKNLEWIGLINPHNGGSSYNDSFKGKATLTVDKSSSTAYMELLSLTAEDSAVYYCVRWGDYGSFAYWGQGTLVTVSS

SEQ ID NO: 13044 - protein, 118 aa, Artificial Sequence
  source: /note="Description of Artificial Sequence: Synthetic polypeptide"
EVQLLQSGGELVQPGASMRISCAASGYSFTGYTMNWVRQSPGKNLEWIGLINPHNGGSSYNDSFKGKATLTVDKSSSTAYMELLSLTAEDSAVYYCVRWGDYGSFAYWGQGTLVTVSS

SEQ ID NO: 13045 - protein, 119 aa, Artificial Sequence
  source: /note="Description of Artificial Sequence: Synthetic polypeptide"
QVQLVQSGAEVVKPGASVKISCKASGYTFTAYYMHWVKQSPVQSLEWIGLVNPYNGFSSYNQKFQGKASLTVDKSSSTAYMELHSLTSEDSAVYYCAREFYGYRYFDVWGQGTAVTVSS

SEQ ID NO: 13046 - protein, 119 aa, Artificial Sequence
  source: /note="Description of Artificial Sequence: Synthetic polypeptide"
QVQLVQSGAEVVKPGASVKISCKASGYSFTAYYMHWVKQSPVQSLEWIGLVNPYNGFSSYNQKFQGKASLTVDKSSSTAYMELHSLTSEDSAVYYCAREFYGYRYFDVWGQGTAVTVSS

SEQ ID NO: 13047 - protein, 119 aa, Artificial Sequence
  source: /note="Description of Artificial Sequence: Synthetic polypeptide"
QVQLVQSGAEVVKPGASVKISCKASGYTFTAYYMHWVKQSPGQSLEWIGLVNPYNGFSSYNQKFQGKASLTVDKSSSTAYMELHSLTSEDSAVYYCAREFYGYRYFDVWGQGTAVTVSS

SEQ ID NO: 13048 - protein, 119 aa, Artificial Sequence
  source: /note="Description of Artificial Sequence: Synthetic polypeptide"
QVQLVQSGAEVVKPGASVKISCKASGYSFTAYYMHWVKQSPGQSLEWIGLVNPYNGFSSYNQKFQGKASLTVDKSSSTAYMELHSLTSEDSAVYYCAREFYGYRYFDVWGQGTAVTVSS

SEQ ID NO: 13049 - protein, 120 aa, Mus sp.
EVQLQQSGPDLVKPGASVKISCKASGYRFTEYNMHWMKQSHGESLEWIGYIYPYNGDTGYRQKFKNMATLTADISSNTAYMELRSLTSDDSAVYFCARWGYGSGGGFTYWGQGTLVTVSA

SEQ ID NO: 13050 - protein, 119 aa, Mus sp.
EVQLQQSGPELVKPGASVKISCKASGYTFTDYNMHWVKQSHGKSLEWIGFIYPYNGGTGYNQRFKNKATLTVDTSSSTAYMEVRSLTSEDSAVYFCARGYYYGRHFDYWGQGTTLTVSS

SEQ ID NO: 13051 - protein, 123 aa, Mus musculus
EVQLQQSGPELVKPGASVRISCKASGYAFTDYYMNWVKQSHGKSLEWVANINPNNGGTNYNQKFKDKATLTVDKSSNTAYMELRSLTSEDTAVYYCARWILYYGRSKWYFDVWGTGTTVTVSS

SEQ ID NO: 13052 - protein, 122 aa, Mus musculus
QVQLKQSGPGLVQSSQSLSITCTISGFSLTSHGIYWLRQSPGKGLEWLGVIWSGGSADYNAAFISRLSISKDNSKSQVFFKMNSLQADDTAIYYCARSPYYYRSSLYAMDYWGQGTSVTVSS

SEQ ID NO: 13053 - protein, 123 aa, Artificial Sequence
  source: /note="Description of Artificial Sequence: Synthetic polypeptide"
EVQLQQSGPELVKPGASVRISCKASGYAFTDYYMNWVKQSHGKSLEWVANINPNNGGTNYNQKFKDKATLTVDKSSNTAYMELRSLTSEDTAVYYCARWILYYGRSKWYFDVWGTGTLVTVSS

SEQ ID NO: 13054 - protein, 123 aa, Homo sapiens
QVQLVQSGAEVKKPGASVKVSCKASGYTFTDYYMNWVRQAPGQGLEWMGNINPNNGGTNYNQKFKDRVTMTTDTSTSTAYMELRSLRSDDTAVYYCARWILYYGRSKWYFDVWGRGTLVTVSS

SEQ ID NO: 13055 - protein, 123 aa, Homo sapiens
QVQLVQSGAEVKKPGASVKVSCKASGYAFTDYYMNWVRQAPGQGLEWMGNINPNNGGTNYNQKFKDRVTMTTDTSTSTAYMELRSLRSDDTAVYYCARWILYYGRSKWYFDVWGRGTLVTVSS

SEQ ID NO: 13056 - protein, 123 aa, Mus musculus
EVQLQQSGPELVKPGASVRISCKASGYAFTDYYMNWVKQSHGKSLEWMANINPNNGGTNYNQKFKDKATLTVDKSSNTAYMELRSLTSEDSAVYYCARWILYYGRSKWYFDVWGPGTTVTVSS

SEQ ID NO: 13057 - protein, 123 aa, Mus musculus
EVQLQQSGPELVKPGASVKISCKASGYAFTDYYMNWVKQTHGRSLEWMANINPNTGGTNYNQKFRGKATLTVDKSSTTAYMELRSLTSEDSAVYYCARWILYYGSSRWYFDVWGTGTTVTVSS

SEQ ID NO: 13058 - protein, 123 aa, Mus musculus
EVQLQQSGPELVKPGASVKISCKASGYAFTDYYMNWVKQSHGKSLEWMANINPNTGGTNYNQKFTGKATLTVDKSSTTAYMELRSLTSEDSAVYYCTRWILYYGSSKWYFDVWGTGTTVTVSS

SEQ ID NO: 13059 - protein, 117 aa, Artificial Sequence
  source: /note="Description of Artificial Sequence: Synthetic polypeptide"
QVQLHQPGAELVKPGAPVKLSCKASGYTFTSYWMNWVKQRPGQGLEWIGRIDPSDSETHYNQKFKDRATLTVDKSSSTAYIQLSSLTSEDSAVYYCAKVGRGYFDYWGQGTTLTVVS

SEQ ID NO: 13060 - protein, 117 aa, Artificial Sequence
  source: /note="Description of Artificial Sequence: Synthetic polypeptide"
QVQLHQPGAELVKPGAPVKLSCKASGYTFTSYWMNWVKQRPGQGLEWIGRIDPSESETHYNQKFKDRATLTVDKSSSTAYIQLSSLTSEDSAVYYCAKVGRGYFDYWGQGTTLTVVS

SEQ ID NO: 13061 - protein, 117 aa, Artificial Sequence
  source: /note="Description of Artificial Sequence: Synthetic polypeptide"
QVQLHQPGAELVKPGASVKLSCKASGYTFTSYWMNWVKQRPGRGLEWIGRIDPSDSETHYNQKFKDKATLTVDKSSSTAYIQLSSLTSEDSAVYYCAKVGRGYFDYWGQGTTLTVVS

SEQ ID NO: 13062 - protein, 117 aa, Artificial Sequence
  source: /note="Description of Artificial Sequence: Synthetic polypeptide"
QVQLHQPGAELVKPGASVKLSCKASGYTFTSYWMNWVKQRPGRGLEWIGRIDPSDSETHYNQKFKDKATLTVDKSSSTAYIQLSSLTSEDSAKYYCAKVGRGYFDYWGQGTTLTVVS

SEQ ID NO: 13063 - protein, 117 aa, Artificial Sequence
  source: /note="Description of Artificial Sequence: Synthetic polypeptide"
QVQLHQPGAELVKPGASVKLSCKASGYTFTSYWMNWVKQRPGRGLEWIGRIDPSESETHYNQKFKDKATLTVDKSSSTAYIQLSSLTSEDSAVYYCAKVGRGYFDYWGQGTTLTVVS

SEQ ID NO: 13064 - protein, 117 aa, Artificial Sequence
  source: /note="Description of Artificial Sequence: Synthetic polypeptide"
QVQLHQPGAELVKPGASVKLSCKASGYTFTSYWMNWVKQRPGRGLEWIGRIDPSESETHYNQKFKDKATLTVDKSSSTAYIQLSSLTSEDSAKYYCAKVGRGYFDYWGQGTTLTVVS

SEQ ID NO: 13065 - protein, 117 aa, Artificial Sequence
  source: /note="Description of Artificial Sequence: Synthetic polypeptide"
QVQLVQSGAEVKKPGASVKVSCKASGYTFTSYWMNWVRQAPGQGLEWIGRIDPSDSETHYAQKFQGRATLTVDKSTSTAYMELSSLRSEDTAVYYCAKVGRGYFDYWGQGTLVTVSS

SEQ ID NO: 13066 - protein, 117 aa, Artificial Sequence
  source: /note="Description of Artificial Sequence: Synthetic polypeptide"
QVQLHQPGAELVKPGAPVKLSCKASGYTFTSYWMNWVKQRPGRGLEWIGRIDPSDSETHYNQKFKDKATLTVDKSSSTAYIQLSSLTSEDSAVYYCAKVGRGYFDYWGQGTTLTVSS

SEQ ID NO: 13067 - protein, 117 aa, Mus musculus
EIQLQQSGPELMKPGASVKISCKASGYSFSSHYMHWVKQSHGKSLEWIGYIDPSNGETTYNQKFKGKATLTVDTSSSTANVHLSSLTSDDSAVYFCAARGDYRYNGDWFFDVWGAGT

SEQ ID NO: 13068 - protein, 121 aa, Homo sapiens
EVQLVESGGGLVQPGGSLRLSCAASGFSLSGSWIHWVRQAPGKGLEWVGWINPYRGYAYYADSVKGRFTISADTSKNTAYLQMNSLRAEDTAVYYCAREYSGWGGSSVGYAMDYWGQGTLV

SEQ ID NO: 13069 - protein, 121 aa, Homo sapiens
EVQLVESGGGLVQPGGSLRLSCAASGFSFTGTWIHWVRQAPGKGLEWVGWIAPYSRHPYYADSVKGRFTISADTSKNTAYLQMNSLRAEDTAVYYCAREYSGWGGSSVGYAMDYWGQGTLV

SEQ ID NO: 13070 - protein, 115 aa, Homo sapiens
EVQLVESGGGLVQPGGSLRLSCAASGFTFTGTGIHWVRQAPGKGLEWVAGIPPVGSYTYYADSVKGRFTISADTSKNTAYLQMNSLRAEDTAVYYCARWRSLSSGMDYWGQGTLV

SEQ ID NO: 13071 - protein, 115 aa, Homo sapiens
EVQLVESGGGLVQPGGSLRLSCAASGFSFTSIGIHWVRQAPGKGLEWVAGIPPVGRYTYYADSVKGRFTISADTSKNTAYLQMNSLRAEDTAVYYCARWRSLSSGMDYWGQGTLV

SEQ ID NO: 13072 - protein, 134 aa, Homo sapiens
MAWRCPRMGRVPLAWCLALCGWACMAPRGTQAEESPFVGNPGNITGARGLTGTLRCQLQVQGEPPEVHWLRDGQILELADSTQTQVPLGEDEQDDWIVVSQLRITSLQLSDTGQYQCLVFLGHQTFVSQPGYVG

SEQ ID NO: 13073 - protein, 122 aa, Mus musculus
QVQLQQSGAEVKKPGASVKVSCKTSGYTFTHYEYTMHWVRQAPGQGLEWMGGVSPNNGGASYNQKFKGKATLTVDKSSNTAYMELRSLTSDDSAVYYCARRLGRGYDLASYWGQGTLVLSLQ

SEQ ID NO: 13074 - protein, 120 aa, Homo sapiens
EVQLVESGGGLVKPGGSLRLSCAASGFTFSTYSMNWVRQAPGKGLEWVSSISSSGDYIYYADSVKGRFTISRDNAKNSLFLQMNSLKAEDTAVYYCARDLVTSMVAFDYWGQGTLVTVSS

SEQ ID NO: 13075 - protein, 121 aa, Homo sapiens
EVQLLESGGGLVQPGGSLRLSCAASGFTFSNYAMSWVRQAPGKGLEWVSAIRGSGGSTYYADSVKGRFTISRDNSKNTLYLQMNSLRAEDTAVYYCAKDLHYDSSGYLDYWGQGTLVTVSS

SEQ ID NO: 13076 - protein, 119 aa, Homo sapiens
EVQLVESGGGLVQPGGSLRLSCAASGFTFSSYWMSWVRQAPGKGLEWVANIKQDGGEKYYVDSVKGRFTISRDNAKNSLFLQMNSLRAEDTAVYYCARVQLYSDYFDYWGQGTLVTVSS

SEQ ID NO: 13077 - protein, 139 aa, Artificial Sequence
  source: /note="Description of Artificial Sequence: Synthetic polypeptide"
MEWSRVFIFLLSVTAGVHSQVQLQQSGAELVRPGTSVKVSCKASGYAFTNYLMEWIKQRPGQGLEWIGVIHPGIGVTNYNEKFKGKATLTADISSSTAYMQLSSLTSEDSAVYFCARRANWDLYYFDYWGQGTTLTVSS

SEQ ID NO: 13078 - protein, 138 aa, Artificial Sequence
  source: /note="Description of Artificial Sequence: Synthetic polypeptide"
MDLRLSCAFIIVLLKGVQSEVKLEESRGGLVQPGGSMKLSCVASGFTFSNYWMNWVRQSPEKGLEWVAHIRLKSDNYATHYAESVRGRFTISRDDSKSSVFLQMNNLRAEDTGIYYCTGGSNYVFAFWGQGTLVTVSA

SEQ ID NO: 13079 - protein, 136 aa, Artificial Sequence
  source: /note="Description of Artificial Sequence: Synthetic polypeptide"
MGWNWIFILILSVTTGVHSEVQLQQSRPELVKPGASVKISCKASDYSFTDYYMNWVKQSPDKSLEWIGEISPSSGGTTYNQKFKAKATLTVDKSSSTAYMQLKSLTSEDSAVYYCATRGAFYFDYWGQGTALTVSS

SEQ ID NO: 13080 - protein, 120 aa, Artificial Sequence
  source: /note="Description of Artificial Sequence: Synthetic polypeptide"
QVQLQQSGAELVRPGTSVKVSCKASGYAFTNYLMEWIKQRPGQGLEWIGVIHPGIGVTNYNEKFKGKATLTADISSSTAYMQLSSLTSEDSAVYFCARRANWDLYYFDYWGQGTTLTVSS

SEQ ID NO: 13081 - protein, 119 aa, Artificial Sequence
  source: /note="Description of Artificial Sequence: Synthetic polypeptide"
EVKLEESRGGLVQPGGSMKLSCVASGFTFSNYWMNWVRQSPEKGLEWVAHIRLKSDNYATHYAESVRGRFTISRDDSKSSVFLQMNNLRAEDTGIYYCTGGSNYVFAFWGQGTLVTVSA

SEQ ID NO: 13082 - protein, 117 aa, Artificial Sequence
  source: /note="Description of Artificial Sequence: Synthetic polypeptide"
EVQLQQSRPELVKPGASVKISCKASDYSFTDYYMNWVKQSPDKSLEWIGEISPSSGGTTYNQKFKAKATLTVDKSSSTAYMQLKSLTSEDSAVYYCATRGAFYFDYWGQGTALTVSS

SEQ ID NO: 13083 - protein, 119 aa, Artificial Sequence
  source: /note="Description of Artificial Sequence: Synthetic polypeptide"
EVQLVESGGGLVQPGGSLRLSCAASGFTFSNYWMNWVRQAPGKGLEWVGHIRLKSDNYATHYAESVRGRFTISRDDSKNSLYLQMNSLKTEDTAVYYCARGSNYVFAFWGQGTLVTVSS

SEQ ID NO: 13084 - protein, 119 aa, Artificial Sequence
  source: /note="Description of Artificial Sequence: Synthetic polypeptide"
EVQLVESGGGLVQPGGSLRLSCAASGFTFSNYWMNWVRQAPGKGLEWVAHIRLKSDNYATHYAESVRGRFTISRDDSKNSLYLQMNSLKTEDTAVYYCTGGSNYVFAFWGQGTLVTVSS

SEQ ID NO: 13085 - protein, 119 aa, Artificial Sequence
  source: /note="Description of Artificial Sequence: Synthetic polypeptide"
EVQLVESRGGLVQPGGSMRLSCAASGFTFSNYWMNWVRQAPGKGLEWVGHIRLKSDNYATHYAESVRGRFTISRDDSKSSLYLQMNSLKTEDTAVYYCAGGSNYVFAFWGQGTLVTVSS

SEQ ID NO: 13086 - protein, 119 aa, Artificial Sequence
  source: /note="Description of Artificial Sequence: Synthetic polypeptide"
EVQLVESRGGLVQPGGSMRLSCAASGFTFSNYWMNWVRQAPGKGLEWVAHIRLKSDNYATHYAESVRGRFTISRDDSKSSLYLQMNSLKTEDTGVYYCTGGSNYVFAFWGQGTLVTVSS

SEQ ID NO: 13087 - protein, 119 aa, Artificial Sequence
  source: /note="Description of Artificial Sequence: Synthetic polypeptide"
EVQLVESRGGLVQPGGSMRLSCAASGFTFSNYWMNWVRQAPGKGLEWVAHIRLKSDNYATHYAESVRGRFTISRDDSKNSVYLQMNSLKTEDTGVYYCTGGSNYVFAFWGQGTLVTVSS

SEQ ID NO: 13088 - protein, 116 aa, Artificial Sequence
  source: /note="Description of Artificial Sequence: Synthetic polypeptide"
EVKLEESGGGLVQPGGSMKLSCVASGFTFSNFWMDWVRQSPEKGLEWIAGIRLKSYNYATHYAESVKGRFTISRDDSKSSVYLQMNNLRAEDTGIYYCTDWDGAYWGQGTLVTVSA

SEQ ID NO: 13089 - protein, 100 aa, Artificial Sequence
  source: /note="Description of Artificial Sequence: Synthetic polypeptide"
EVQLVESGGGLVQPGGSLKLSCAASGFTFSGSAMHWVRQASGKGLEWVGRIRSKANSYATAYAASVKGRFTISRDDSKNTAYLQMNSLKTEDTAVYYCTR

SEQ ID NO: 13090 - protein, 116 aa, Homo sapiens
  MOD_RES (101)..(101): Any amino acid
EVQLVESGGGLVQPGGSLKLSCAASGFTFSGSAMHWVRQASGKGLEWVGRIRSKANSYATAYAASVKGRFTISRDDSKNTAYLQMNSLKTEDTAVYYCTRXYFDYWGQGTLVTVSS

SEQ ID NO: 13091 - protein, 116 aa, Artificial Sequence
  source: /note="Description of Artificial Sequence: Synthetic polypeptide"
EVQLVESGGGLVQPGGSLKLSCAASGFTFSNFWMDWVRQASGKGLEWVGGIRLKSYNYATHYAESVKGRFTISRDDSKNTAYLQMNSLKTEDTAVYYCTRWDGAYWGQGTLVTVSS

SEQ ID NO: 13092 - protein, 116 aa, Artificial Sequence
  source: /note="Description of Artificial Sequence: Synthetic polypeptide"
EVQLVESGGGLVQPGGSLRLSCAASGFTFSNFWMDWVRQAPGKGLEWVGGIRLKSYNYATHYAESVKGRFTISRDDSKNTAYLQMNSLRAEDTAVYYCTRWDGAYWGQGTLVTVSS

SEQ ID NO: 13093 - protein, 116 aa, Artificial Sequence
  source: /note="Description of Artificial Sequence: Synthetic polypeptide"
EVQLVESGGGLVQPGGSLRLSCAASGFTFSNFWMDWVRQAPGKGLEWIAGIRLKSYNYATHYAESVKGRFTISRDDSKSTVYLQMNSLRAEDTAVYYCTDWDGAYWGQGTLVTVSS

SEQ ID NO: 13094 - protein, 116 aa, Homo sapiens
EVQLVESGGGLVQPGGSLKLSCAASGFTFSGSAMHWVRQASGKGLEWVGRIRSKANSYATAYAASVKGRFTISRDDSKNTAYLQMNSLKTEDTAVYYCTRYGMDVWGQGTTVTVSS

SEQ ID NO: 13095 - protein, 116 aa, Artificial Sequence
  source: /note="Description of Artificial Sequence: Synthetic polypeptide"
EVQLVESGGGLVQPGGSLKLSCAASGFTFSNFWMDWVRQASGKGLEWVGEIRLKSTNYATHYAESVKGRFTISRDDSKNTAYLQMNSLKTEDTAVYYCTRTSTGYWGQGTTVTVSS

SEQ ID NO: 13096 - protein, 116 aa, Artificial Sequence
  source: /note="Description of Artificial Sequence: Synthetic polypeptide"
EVQLVESGGGLVQPGGSLKLSCAASGFTFSNFWMDWVRQASGKGLEWVAEIRLKSTNYATHYAESVKGRFTISRDDSKSTVYLQMNSLKTEDTAVYYCTATSTGYWGQGTTVTVSS

SEQ ID NO: 13097 - protein, 116 aa, Artificial Sequence
  source: /note="Description of Artificial Sequence: Synthetic polypeptide"
EVQLVESGGGLVQPGGSLKLSCAASGFTFSNFWMDWVRQASGKGLEWVGEIRLKSTNYATHYAESVKGRFTISRDDSKNTAYLQMNSLKTEDTAVYYCTATSTGYWGQGTTVTVSS

SEQ ID NO: 13098 - protein, 116 aa, Artificial Sequence
  source: /note="Description of Artificial Sequence: Synthetic polypeptide"
EVKLEESGGGLVQPGGSMKLSCVASGFTFSNFWMDWVRQSPEKGLEWVAEIRLKSTNYATHYAESVKGRFTISRDDSKSSVYLQMNNLRAEDTGIYYCTATSTGYWGQGTTLTVSS

SEQ ID NO: 13099 - protein, 123 aa, Artificial Sequence
  source: /note="Description of Artificial Sequence: Synthetic polypeptide"
QVQLQQPGAEIVRPGASVKLSCKASGYTFTDYWMNWVKLRPGQGLEWIGIIDPSDSYASYNQKFKGKATLTVDESSSTAYMQLSSLTSEDSAVYYCARKSYYGGNYYYAMDYWGQGTSVTVSS

SEQ ID NO: 13100 - protein, 118 aa, Artificial Sequence
  source: /note="Description of Artificial Sequence: Synthetic polypeptide"
QVQLVQSGAEVVKPGASVKLSCKASGYIFTSYYMYWVKQAPGQGLEWIGEINPSNGDTNFNEKFKSKATLTVDKSASTAYMELSSLRSEDTAVYYCTRSDGRNDMDSWGQGTLVTVSS

SEQ ID NO: 13101 - protein, 118 aa, Artificial Sequence
  source: /note="Description of Artificial Sequence: Synthetic polypeptide"
  MOD_RES (28)..(28): Any amino acid
  MOD_RES (30)..(33): Any amino acid
  MOD_RES (35)..(35): Any amino acid
  MOD_RES (50)..(50): Any amino acid
  MOD_RES (52)..(55): Any amino acid
  MOD_RES (57)..(66): Any amino acid
  MOD_RES (99)..(107): Any amino acid
QVQLVQSGAEVVKPGASVKLSCKASGYXFXXXXMXWVKQAPGQGLEWIGXIXXXXGXXXXXXXXXXKATLTVDKSASTAYMELSSLRSEDTAVYYCTRXXXXXXXXXWGQGTLVTVSS

SEQ ID NO: 13102 - protein, 118 aa, Artificial Sequence
  source: /note="Description of Artificial Sequence: Synthetic polypeptide"
QVQLVQSGAEVVKPGASVKLSCKASGYIFHSYYMYWVKQAPGQGLEWIGEINPSNGDTNFNEKFKSKATLTVDKSASTAYMELSSLRSEDTAVYYCTRSDGRNDMDSWGQGTLVTVSS

SEQ ID NO: 13103 - protein, 118 aa, Artificial Sequence
  source: /note="Description of Artificial Sequence: Synthetic polypeptide"
QVQLVQSGAEVVKPGASVKLSCKASGYIFTSYWMYWVKQAPGQGLEWIGEINPSNGDTNFNEKFKSKATLTVDKSASTAYMELSSLRSEDTAVYYCTRSDGRNDMDSWGQGTLVTVSS

SEQ ID NO: 13104 - protein, 118 aa, Artificial Sequence
  source: /note="Description of Artificial Sequence: Synthetic polypeptide"
QVQLVQSGAEVVKPGASVKLSCKASGYIFTSYYMYWVKQAPGQGLEWIGEINPNNGDTNFNEKFKSKATLTVDKSASTAYMELSSLRSEDTAVYYCTRSDGRNDMDSWGQGTLVTVSS

SEQ ID NO: 13105 - protein, 118 aa, Artificial Sequence
  source: /note="Description of Artificial Sequence: Synthetic polypeptide"
QVQLVQSGAEVVKPGASVKLSCKASGYIFHSYWMYWVKQAPGQGLEWIGEINPSNGDTNFNEKFKSKATLTVDKSASTAYMELSSLRSEDTAVYYCTRSDGRNDMDSWGQGTLVTVSS

SEQ ID NO: 13106 - protein, 118 aa, Artificial Sequence
  source: /note="Description of Artificial Sequence: Synthetic polypeptide"
QVQLVQSGAEVVKPGASVKLSCKASGYIFHSYWMYWVKQAPGQGLEWIGEINPNNGDTNFNEKFKSKATLTVDKSASTAYMELSSLRSEDTAVYYCTRSDGRNDMDSWGQGTLVTVSS

SEQ ID NO: 13107 - protein, 118 aa, Artificial Sequence
  source: /note="Description of Artificial Sequence: Synthetic polypeptide"
QVQLVQSGAEVVKPGASVKLSCKASGYIFHSYYMYWVKQAPGQGLEWIGEINPNNGDTNFNEKFKSKATLTVDKSASTAYMELSSLRSEDTAVYYCTRSDGRNDMDSWGQGTLVTVSS

SEQ ID NO: 13108 - protein, 118 aa, Artificial Sequence
  source: /note="Description of Artificial Sequence: Synthetic polypeptide"
QVQLVQSGAEVVKPGASVKLSCKASGYIFTSYWMYWVKQAPGQGLEWIGEINPNNGDTNFNEKFKSKATLTVDKSASTAYMELSSLRSEDTAVYYCTRSDGRNDMDSWGQGTLVTVSS

SEQ ID NO: 13109 - protein, 111 aa, Artificial Sequence
  source: /note="Description of Artificial Sequence: Synthetic polypeptide"
DIQLTQSPASLAVSLGQRATISCKASQSVDYDGDSYLNWYQQIPGQPPKLLIYDASNLVSGIPPRFSGSGSGTDFTLNIHPVEKVDAATYHCQQSTEDPWTFGGGTKLEIK

SEQ ID NO: 13110 - protein, 106 aa, Artificial Sequence; identical to SEQ ID NO: 8792
  source: /note="Description of Artificial Sequence: Synthetic polypeptide"

SEQ ID NO: 13111 - protein, 116 aa, Artificial Sequence; identical to SEQ ID NO: 8788
  source: /note="Description of Artificial Sequence: Synthetic polypeptide"

SEQ ID NO: 13112 - protein, 56 aa, Artificial Sequence
  source: /note="Description of Artificial Sequence: Synthetic polypeptide"
NQNFKDKATITADESTNTAYMELSSLRSEDTAFYFCARRDITTFYWGQGTTVTVSS

SEQ ID NO: 13113 - protein, 123 aa, Artificial Sequence; identical to SEQ ID NO: 8790
  source: /note="Description of Artificial Sequence: Synthetic polypeptide"

SEQ ID NO: 13114 - protein, 119 aa, Rattus sp.
QVQLQESGGGLVQPGRSMKLSCAASGFTFSSFPMAWVRQAPKKGLEWVATISTSGGRTYYRDSVKGRFTISRDNGKSILYLQMNSLRSEDTATYYCSRFRQYSGGFDYWGQGTTVTVSS

SEQ ID NO: 13115 - protein, 119 aa, Artificial Sequence [sequence omitted]

SEQ ID NO: 13116 - protein, 118 aa, Artificial Sequence
  source: /note="Description of Artificial Sequence: Synthetic polypeptide"
IKLQQSGAELARPGASVKMSCKTSGYTFTRYTMHWVKQRPGQGLEWIGYINPSRGYTNYNQKFKDKATLTTDKSSSTAYMQLSSLTSEDSAVYYCARYYDDHYCLDYWGQGTTLTVSS

SEQ ID NO: 13117 - protein, 121 aa, Artificial Sequence
  source: /note="Description of Artificial Sequence: Synthetic polypeptide"
QVQLVESGGGVVQPGRSLRLSCSSSGFALTDYYMSWVRQAPGKGLEWLGFIANKANGHTTDYSPSVKGRFTISRDNSKNTLFLQMDSLRPEDTGVYFCARDMGIRWNFDVWGQGTPVTVSS

SEQ ID NO: 13118 - protein, 126 aa, Artificial Sequence
  source: /note="Description of Artificial Sequence: Synthetic polypeptide"
EVQLVESGGGVVQPGRSLRLSCSSSGFIFSSYAMYWVRQAPGKGLEWVAIIWDDGSDQHYADSVKGRFTISRDNSKNTLFLQMDSLRPEDTGVYFCARDGGHGFCSSASCFGPDYWGQGTPVTVSS

SEQ ID NO: 13119 - protein, 117 aa, Artificial Sequence
  source: /note="Description of Artificial Sequence: Synthetic polypeptide"
EVKLVESGGGLVQPGGSLRLSCATSGFTFTDYYMSWVRQPPGKALEWLGFIRNKANGYTTEYSASVKGRFTISRDNSQSILYLQMDTLRAEDSATYYCARDNWFAYWGQGTLVTVSA

SEQ ID NO: 13120 - protein, 113 aa, Artificial Sequence
  source: /note="Description of Artificial Sequence: Synthetic polypeptide"
QIQLVQSGPELKKPGETVKISCKASGYTFTDYSMHWVKQAPGKGLKWMGWINTETGAPTYADDFKGRFAFSLETSASTAYLQINNLKDEDTATYFCARASMISFVYWGQGTLV

SEQ ID NO: 13121 - protein, 112 aa, Artificial Sequence
  source: /note="Description of Artificial Sequence: Synthetic polypeptide"
EVQLQQFGPDLVKPGASVRISCKASGYTFTDYNMDWVRQSHGKSLEWIGDINPNYGSTKYNQKFQGKATLTVDESSNTAYMDLRSLTSEDTAVYYCARDGQHAMDFWGQGIS

SEQ ID NO: 13122 - protein, 119 aa, Artificial Sequence [sequence omitted]

SEQ ID NO: 13123 - protein, 449 aa, Artificial Sequence; identical to SEQ ID NO: 6969
  source: /note="Description of Artificial Sequence: Synthetic polypeptide"

SEQ ID NO: 13124 - protein, 115 aa, Mus musculus
DLQLQESGPGLVKPSQSLSLTCSVTGYSITSAYFWSWIRQFPGNKLEWMGFINYDGTNNYNPSLKNRISITRDTSKNQFFLRLNSVTTDDTATYYCTRDRTFAYWGQGTLVTVSA

SEQ ID NO: 13125 - protein, 117 aa, Mus musculus
QVQLQQPGAELVKPGASVKLSCKASGYTFTSYWMHWVKQRPGQGLEWIGEINPSNGRTHYNEKFRTKATLTVAKSSITAYMQLSTLTSEDSAVYYCARRVGYLMDYWGQGTSVTAPQ

SEQ ID NO: 13126 - protein, 449 aa, Artificial Sequence; identical to SEQ ID NO: 6969
  source: /note="Description of Artificial Sequence: Synthetic polypeptide"

SEQ ID NO: 13127 - protein, 117 aa, Artificial Sequence
  source: /note="Description of Artificial Sequence: Synthetic polypeptide"
EVQLVESGGGLVQPGGSLRLSCAASGFTFTDYYMSWVRQAPGKGLEWLGFIRNKANGYTTEYSASVKGRFTISRDNSKNTLYLQMNSLRAEDTAVYYCARDNWFAYWGQGTLVTVSS

SEQ ID NO: 13128 - protein, 117 aa, Artificial Sequence
  source: /note="Description of Artificial Sequence: Synthetic polypeptide"
EVQLVESGGGLVQPGGSLRLSCAASGFTFTDYYMSWVRQAPGKGLEWLGFIRNKANGYTTEYSASVKGRFTISRDNSKNSLYLQMNSLKTEDTAVYYCARDNWFAYWGQGTLVTVSS

SEQ ID NO: 13129 - protein, 119 aa, Mus musculus
QVQLQQSGPELVRPGASVKMSCRASGYTFTSYWLHWVKQRPGQGLEWIGMIDPSNSDTRFNPNFKDKATLNVDRSSNTAYMLLSSLTSADSAVYYCATYGSYVSPLDYWGQGTSVTVSS

SEQ ID NO: 13130 - protein, 121 aa, Homo sapiens
QVQLVQSGAEVKKPGSSVKVSCKASGGTFSSYGFGWVRQAPGQGLEWMGRISPILGIANYAQMFQGRVTITADKSTSTAYMELSSLRSEDTAVYYCARDVGYDWPDTFDIWGQGTMVIVSS

SEQ ID NO: 13131 - protein, 121 aa, Homo sapiens
QVQLVQSGAEVKKPGSSVKVSCKASGGTFSSFGIGWVRQAPGQGLEWMGRIFPILGTANYAQMFQGRVTITADKSTSTAYMELTSLRSEDTAVYYCARDVGYDSADAFDIWGQGTMVTVSS

SEQ ID NO: 13132 - protein, 118 aa, Homo sapiens
EVQLVQSGAEVKKPGESLKISCKGSGYSFTSYWIGWVRQMPGKGLEWMGIIYPGDSETRYSPSFQGQVTISADKSISTAYLQWSSLKASDTAMYYCARQEITGEFDYWGQGTLVTVSS

SEQ ID NO: 13133 - protein, 123 aa, Homo sapiens
QVQLVESGGGVVQPGRSLRLSCAASGFTFSSYAMHWVRQAPGKGLEWVAVISYDGSNKYYADSVKGRFTISRDNSKNTLYLQMNSLRAEDTAVYYCARELLWFGELWGYFDLWGRGTLVTVSS

SEQ ID NO: 13134 - protein, 122 aa, Homo sapiens
EVQLLESGGGLVQPGGSLRLSCVASGFTFSSYAMSWVRQAPGKGLEWVSAISGSSGGSTYYVDSVKGRFTISRANSKNTLYLQMNSLRAEDTAVYYCAKDLDRGWMGYFGYWGQGTLVTVSS

SEQ ID NO: 13135 - protein, 118 aa, Homo sapiens
EVQLVQSGAEVKKPGESLKISCKGSGYSFTSYWIGWVRQMPGKGLEWMGIIYPGDSDTRYSPSFQGQVTISADKSISTAYLQWNSLKASDTAMYYCARQEITGEFDYWGQGTLVTVSS

SEQ ID NO: 13136 - protein, 117 aa, Homo sapiens
EVQLLESGGGLVQPGGSLRLSCAASGFTFSSYAMSWVRQAPGKGLEWVSVISGSGGITYYADSVKGRFTISRDNSKNTLYLQMNSLRAEDTAVYYCARDRGWGSDYWGQGTLVTVSS

SEQ ID NO: 13137 - protein, 125 aa, Homo sapiens
EVQLVESGGGLVKPGGSLKLSCAASGFTFSDYYMYWVRQTPEKRLEWVATISDDGSYTYYPDSVKGRFTISRDNAKNNLYLQMSSLKSEDTAMYYCAREGLYYYGSGSYYNQDYWGQGTLVTVSS

SEQ ID NO: 13138 - protein, 118 aa, Homo sapiens
  MOD_RES (52)..(52): Any amino acid
QLQLQESGSGLVKPSQTLSLTCAVSGGSISSGGHSWSWIRQPPGKGLEWIGXIYHSGNTYDNPSLKSRVTIAVDRSKNQLSLKLSFLTAADTAVYYCARSSYDFLTDWGQGTLVTVSS

SEQ ID NO: 13139 - protein, 118 aa, Homo sapiens
  MOD_RES (52)..(52): Any amino acid
QLQLQESGSGLVKPSQTLSLTCAVSGGSISSGGHSWSWIRQPPGKGLEWIGXIYHSGNTYDNPSLKSRVTIAVDRSKNQLSLKLSFVTAADTAVYYCARSSYDILTDWGQGTLVTVSS

SEQ ID NO: 13140 - protein, 118 aa, Homo sapiens
  MOD_RES (52)..(52): Any amino acid
QLQLQESGSGLVKPSQTLSLTCAVSGGSISSGGHSWSWIRQPPGKGLEWIGXIYHSGNTYDNPSLKSRVTISVDRSKNQVSLKLSSVTAADTAVYYCARSSYDILTDWGQGTLVTVSS

SEQ ID NO: 13141 - protein, 118 aa, Homo sapiens
  MOD_RES (52)..(52): Any amino acid
QLQLQESGSGLVKPSQTLSLTCAVSGGSISSGGYSWSWIRQPPGKGLEWIGXIYHSGSTYYNPSLKSRVTISVDRSKNQFSLKLSSVTAADTAVYYCARSSYDILTDWGQGTLVTVSS

SEQ ID NO: 13142 - protein, 119 aa, Homo sapiens
QVQLVQSGAEVKKPGASVKVSCETSGYTFTSYGISWVRQAPGHGLEWMGWISAYNGYTNYAQKLQGRVTMTTDTSTSTAYMELRSLRSDDTAVYYCARDLRGTNYFDYWGQGTLVTVSS

SEQ ID NO: 13143 - protein, 118 aa, Homo sapiens
EVQLVQSGAEVKKPGESLKISCKGSGYSFTSYWIGWVRQMPGKGLEWMGIIYPGDSDTRYSPSFQGQVTISADKSISTAYLQWSSLKASDTAMYYCARQEITGDFDYWGQGTLVTVSS

SEQ ID NO: 13144 - protein, 121 aa, Homo sapiens
QVQLVQSGAEVKKPGASVKVSCKASGYTFTNFGISWVRQAPGQGLEWMGWISAFNGHTDYSQKVQGRVTMTTDTSTSTAYMELRSLRSDDTAVFYCARSHYYGSGSPFDYWGQGTLVTVSS

SEQ ID NO: 13145 - protein, 123 aa, Homo sapiens
QVQLVQSGGEVKKPGASVKVSCKASGYTFTRHGITWVRQAPGQGLEWMGWISADNGNTNYAQKFQDRVTMTTDTSTSTAYMELRSLRSDDTAVYFCARVFRYFDWLLPYFDYWGQGTLVTVST

SEQ ID NO: 13146 - protein, 119 aa, Homo sapiens
QVQLVQSGAEVKKPGASVKVSCKASGYTFTSYGISWVRQAPGQGLEWMGWISTYNGYTNYAQKLQGRVTMTTDTSTSTAYMELRSLRSDDTAVYYCARDLRGTAYFDYWGQGTLVTVSS

SEQ ID NO: 13147 - protein, 119 aa, Homo sapiens
QVQLVQSGAEVKKPGASVKVSCEASGYTFTSYGISWVRQAPGHGLEWMGWISAYNGYTNYAQKLQGRVTMTADTSTSTAYMELRSLRSDDTAVYYCARDLRGTNYFDYWGQGTLVTVSS

SEQ ID NO: 13148 - protein, 119 aa, Homo sapiens
QVQLVQSGAEVKKPGASVKVSCEASGYTFTNYGISWVRQAPGHGLEWMGWISAYNGYTNYAQKLQGRVTMTTDTSTTTAYMELRSLRSDDTAVYYCARDLRGTNYFDYWGQGTLVTVSS

SEQ ID NO: 13149 - protein, 121 aa, Homo sapiens
QVQLVQSGAEVKKPGSSVKVSCKASGGTFSSYGFGWVRQAPGQGLEWMGRISPILGITNYAQMFQGRVTITADKSTSTAYMELSSLRSEDTAVYYCARDVGYDWPDTFDIWGQGTMVIVSS

SEQ ID NO: 13150 - protein, 121 aa, Homo sapiens
QVQLVQSGAEVKKPGSSVKVSCKASGGTFSSYGIGWVRQAPGQGLEWMGRIFPILGTANYAQMFQGRVTITADKSTSTAYIELTSLRSEDTAVYYCARDVGYDSADAFDIWGQGTMVTVSS

SEQ ID NO: 13151 - protein, 121 aa, Homo sapiens
QVQLVQSGAEVKKPGSSVKVSCKASGGTFSSYGIGWVRQAPGQGLEWMGRVFPILGTANYAQMFQGRVTITADKSTSTAYMELTSLRSEDTAVYYCARDVGYDSADAFDIWGQGTMVTVSS

SEQ ID NO: 13152 - protein, 123 aa, Homo sapiens
QVQLVESGGGVVQPGRSLRLSCAASGFTFSSYAMHWVRQAPGKGLEWVAFISYDGSNKYFADSVKGRFTISRDNSKNTLYLQMNSLRAEDTAVYYCARELLWFGELWGYFDLWGRGTLVTVSS

SEQ ID NO: 13153 - protein, 123 aa, Homo sapiens
QVQLVESGGGVVQPGRSLRLSCAASGFTFSSYAMHWVRQAPGKGLEWVAFISYDGSSKDYADSVKGRFTIFRDNSKNTLYLQMSSLRAADTAVYYCARELLWFGELWGYFDLWGRGTLVTVSS

SEQ ID NO: 13154 - protein, 117 aa, Homo sapiens
EVQLLESGGGLVQPGGSLRLSCAASGFTFSSYAMTWVRQAPGKGLEWVSVISGSGGITYYADSVKGRFTISRDNSKNTLYLQMNSLRAEDTAVYYCARDRGWGSDYWGQGTLVTVSS

SEQ ID NO: 13155 - protein, 117 aa, Homo sapiens
EVQLLESGGGLVQPGGSLRLSCAASGFTFNNYAMSWVRQAPGKGLEWVSAISGSGGITYYADSEKGRFTISRDNSKNTLYLQMNSLRAEDTAVYYCAKDRGWGSDCWGQGTLVTVSS

SEQ ID NO: 13156 - protein, 118 aa, Homo sapiens
QLQLQESGSGLVKPSQTLSLTCAVSGGSISSGGHSWSWIRQPPGKGLEWIGCLYHSGNTYYNPSLKSRVTISVDRSKNQFSLKLSSVTAADTAVYYCARSSYDILTDWGQGILVTVSS

SEQ ID NO: 13157 - protein, 118 aa, Homo sapiens
QLQLQESGSGLVKPSQTLSLTCGVSGGSISSGGHSWSWIRQPPGKGLEWIGCLYHSGNTYYNPSLKSRVTISVDRSKNQFSLKLSSVTAADTAVYYCARSSYDILTDWGQGTLVTVSS

SEQ ID NO: 13158 - protein, 118 aa, Homo sapiens
QLQLQESGSGLVKPSQTLSLTCAVSGGSISSGGHSWSWIRQPPGKGLEWIGCIYHSGNTYDNPSLKSRVTIAVDRSKNQLSLKLSFVTAADTAVYYCARSSYDILTDWGQGTLVTVSS

SEQ ID NO: 13159 - protein, 118 aa, Homo sapiens
QLQLQESGSGLVKPSQTLSLTCAVSGGSISSGGHSWSWIRQPPGKGLEWIGCIYHSGNTYDNPSLKSRVTISVDRSKNQFSLKLSSVTAADTAVYYCARSSYDILTDWGQGTLVTVSS

SEQ ID NO: 13160 - protein, 118 aa, Homo sapiens
EVQLVQSGAEVKKPGESLKISCKGSGYIFTSYWIGWVRQMPGKGLEWMGIIYPGDSDTRYSPSFQGQVTISADKSISTAYLQWSSLKASDTAMYYCARQEVTGDFDYWGQGTLVTVSS

SEQ ID NO: 13161 - protein, 118 aa, Homo sapiens
EVQLVQSGGEVKKPGESLKISCKGSGYSFTSYWIGWVRQMPGKGLEWMGIIYPGDSDTRYSPSFQGQVTISADKSISTAYLQWSSLKASDTAMYYCARQEVTGDFDYWGQGTLVTVSS

SEQ ID NO: 13162 - protein, 118 aa, Homo sapiens
EVQLVQSGAEVKKPGESLKISCKGSGYSFTSYWIGWVRQMPGKGLEWMGIIYPGDSDTRYSPSFQGQVTISADKSISTAYLQWSSLKASDTAMYYCARQEITGEFDYWGQGTLVTVSS

SEQ ID NO: 13163 - protein, 118 aa, Homo sapiens
EVQLVQSGAEVKKPGESLKISCKGSGYSFTSYWIGWVRQMPGKGLEWMGIIYPGDSNTRYSPSFQGQVTISADKSISTAYLQWSSLKASDTAMYYCARQEITGDFDYWGQGTLVTVSS

SEQ ID NO: 13164 - protein, 118 aa, Homo sapiens
EVQLVQSGAEVKKPGESLKISCKGSGYSFISYWIGWVRQMPGKGLEWMGIIYPGDSDTRYSPSFQGQVTISADKSISTAYLQWSSLKASDTAMYYCARQEITGDFDYWGQGTLVTVSS

SEQ ID NO: 13165 - protein, 127 aa, Artificial Sequence
  source: /note="Description of Artificial Sequence: Synthetic polypeptide"
QVQLVESGPGLVKPSQTLSLTCTVSGGSISTNYYYWSWIRQSPGKGLEWIGVIAYEGSTDYSPSLKSRVTISRDTSKNQFSLKLSSVTAEDTAVYYCARDVRVIATGWATANALDAWGQGTLVTVSS

SEQ ID NO: 13166 - protein, 127 aa, Artificial Sequence
  source: /note="Description of Artificial Sequence: Synthetic polypeptide"
QVQLQESGPGLVKPSQTLSLTCAVSGGSISTNYYYWSWIRQHPGKGLEWIGVIAYEGSTDYSPSLKSRVTISVDTSKNQFSLQLSSVTPEDTAVYYCARDVRVIATGWATANALDAWGQGTLVTVSS

SEQ ID NO: 13167 - protein, 127 aa, Artificial Sequence
  source: /note="Description of Artificial Sequence: Synthetic polypeptide"
QVQLQESGPGLVKPSQTLSLTCTVSGGSITTNYYYWSWIRQSPGKGLEWIGVIAYEGSTDYSPSLKSRVTISRDTSKNQFSLQLSSVTAEDTAVYYCARDVRVIATGWATANALDAWGQGTLVTVSS

SEQ ID NO: 13168 - protein, 127 aa, Artificial Sequence
  source: /note="Description of Artificial Sequence: Synthetic polypeptide"
QVQLQESGPGLVKPSQTLSLTCTVSGGSITTNYYYWSWIRQSPGKGLEWIGVIAYDASTDYSPSLKSRVTISRDTSKNQFSLQLSSVTAEDTAVYYCARDVRVIATGWATANALDAWGQGTLVTVSS

SEQ ID NO: 13169 - protein, 119 aa, Artificial Sequence
  source: /note="Description of Artificial Sequence: Synthetic polypeptide"
EVQLVQPGAEVKKPGASVKVSCKASGYIFTMNSIDWVRQAPGQGLEWMGRIDPEEGGTKYAQKFQGRVTMTADTSTSTAYMELSSLRSDDTAVYYCARVDDYYLGYDYWGQGTQVTVSS

SEQ ID NO: 13170 - protein, 119 aa, Artificial Sequence
  source: /note="Description of Artificial Sequence: Synthetic polypeptide"
QVQLVQSGAEVKKPGASVKVSCKASGYTFTMNSIDWVRQAPGQGLEWMGRIDPEEGGTKYAQKFQGRVTFTRDTSTSTAYMELSSLRSDDTAVYYCARVDDYYLGYDYWGQGTQVTVSS

SEQ ID NO: 13171 - protein, 119 aa, Artificial Sequence
  source: /note="Description of Artificial Sequence: Synthetic polypeptide"
EVQLVQPGAEVKKPGASVKVSCKASGYTFTMNSIDWVRQAPGQGLEWMGRIDPEEGGTKYAQKFQGRVTFTRDTSTSTAYVELSSLRSDDTAVYYCARVDDYYLGYDYWGQGTLVTVSS

SEQ ID NO: 13172 - protein, 119 aa, Artificial Sequence
  source: /note="Description of Artificial Sequence: Synthetic polypeptide"
QVQLVQPGVEVKKPGASVKVSCKASGYTFTMNSIDWVRQAPGQGLEWMGRIDPEEGGTKYAQKFQGRVTFTADTSTSTAYMELSSLRSDDTAVYYCARVDDYYLGYDYWGQGTQVTVSS

SEQ ID NO: 13173 - protein, 119 aa, Artificial Sequence
  source: /note="Description of Artificial Sequence: Synthetic polypeptide"
QVQLVQPGAEVKKPGASVKVSCKASGYTFTMNSIDWVRQAPGQGLEWMGRIDPEEGGTKYAQKFQGRVTFTADTSTSTAYVELNSLRSEDTAVYYCARVDDYYLGYDYWGQGTQVTVSS

SEQ ID NO: 13174 - protein, 119 aa, Artificial Sequence
  source: /note="Description of Artificial Sequence: Synthetic polypeptide"
QVQLVQPGAELRNPGASVKVSCKASGYTFTMNSIDWVRQAPGQGLEWMGRIDPEEGGTKYAQKFQGRVTMTRDTSTSTAYMELSSLRSEDTAVYYCARVDDYYLGYDYWGQGTQVTVSS

SEQ ID NO: 13175 - protein, 119 aa, Artificial Sequence
  source: /note="Description of Artificial Sequence: Synthetic polypeptide"
QVQLVQPGAEVKKPGASVKVSCKASGYIFTMNSIDWVRQAPGQGLEWMGRIDPEEGGTKYAQKFQGRVTMTADTSTSTAYMELNSLRSEDTAVYYCARVDDYYLGYDYWGQGTLVTVSS

SEQ ID NO: 13176 - protein, 118 aa, Mus musculus
QVQLVQSGAEVKKPGASVKVSCKASGYIFTAYTMHWVRQAPGQGLEWMGWIKPNNGLANYAQKFQGRVTMTRDTSISTAYMELSRLRSDDTAVYYCARSEITTEFDYWGQGTLVTVSS

SEQ ID NO: 13177 - protein, 223 aa, Homo sapiens
EVQLVESGGGVVQPGRSLRLSCAASGFTFSSYAMHWVRQAPGKGLEWVAVIWYDGSNRYYADSVKGRFTISRDNSKNTLYLQMNSLRAEDTAVYYCASQATEGLIWGQGTLVTVSPASTKGPSVFPLAPSSKSTSGGTAALGCLVKDYFPEPVTVSWNSGALTSGVHTFPAVLQSSGLYSLSSVVTVPSSSLGTQTYICNVNHKPSNTKVDKKVEPKSCDKTS

SEQ ID NO: 13178 - protein, 121 aa, Homo sapiens
QVQLVQSGAEVKKPGASVKVSCKASGYTFTGYYMNWVRQAPGQGLEWMGIINPWTGNTNYAQKFQGRVTMTRDTSISTAYMELSSLRSEDTAVYYCARDPGFFYYTPSDLWGQGTLVTVSS

SEQ ID NO: 13179 - protein, 121 aa, Homo sapiens
QVQLVQSGAEVKKPGASVKVSCKASGYTFTGYYMNWVRQAPGQGLEWMGIIDPWNGQTNYAQKFQGRVTMTRDTSISTAYMELSSLRSEDTAVYYCARDPGFFYYTPSDLWGQGTLVTVSS

SEQ ID NO: 13180 - protein, 121 aa, Homo sapiens
QVQLVQSGAEVKKPGASVKVSCKASGYTFTGYYMNWVRQAPGQGLEWMGVIDPWNGITNYAQKFQGRVTMTRDTSISTAYMELSSLRSEDTAVYYCARDPGFFYYTPSDLWGQGTLVTVSS

SEQ ID NO: 13181 - protein, 113 aa, Homo sapiens
QVQLVQSGAEVKKPGSSVKVSCKASGGTFSSYAISWVRQAPGQGLEWMGGIDPFGTANYAQKFQGRVTITADESTSTAYMELSSLRSEDTAVYYCARVYQDVWGQGTLVTVSS

SEQ ID NO: 13182 - protein, 113 aa, Homo sapiens
QVQLVQSGAEVKKPGSSVKVSCKASGGTFSSYAISWVRQAPGQGLEWMGGIDPIMGTEYAQKFQGRVTITADESTSTAYMELSSLRSEDTAVYYCARVYQDVWGQGTLVTVSS

SEQ ID NO: 13183 - protein, 114 aa, Homo sapiens
QVQLVQSGAEVKKPGSSVKVSCKASGGTFSSYAISWVRQAPGQGLEWMGEIDPVIGETDYAQKFQGRVTITADESTSTAYMELSSLRSEDTAVYYCARVYQDVWGQGTLVTVSS

SEQ ID NO: 13184 - protein, 121 aa, Homo sapiens
QVQLQESGPGLVKPGETLSLTCTVSGGSISSSSYYWNWIRQAPGKGLEWIGEIYFGWTYYNPSLKGRVTISVDTSKNQFSLKLSSVTAEDTAVYYCARGYEFHGYTTFDYWGQGTLVTVSS

SEQ ID NO: 13185 - protein, 116 aa, Homo sapiens
QVQLVQSGAEVKKPGESLKISCKGSGYSFSNYWIGWVRQMPGKGLEWMGFIFPDTSYTRYSPSFQGQVTISADKSISTAYLQWSSLKASDTAMYYCARVKLITDYWGQGTLVTVSS

SEQ ID NO: 13186 - protein, 125 aa, Homo sapiens
QVQLQQSGPGLVKPSQTLSLTCAISGDSVSSNSAAWGWIRQSPGRGLEWLGRIYYRSKWVNDYAVSVKSRITINPDTSKNQFSLQLNSVTPEDTAVYYCARQGAVYPGPYGFDVWGQGTLVTVSS

SEQ ID NO: 13187 - protein, 123 aa, Homo sapiens
QVQLVQSGAEVKKPGESLKISCKGSGYSFTNYGIAWVRQMPGKGLEWMGIIYPSDSYTNYSPSFQGQVTISADKSISTAYLQWSSLKASDTAMYYCARMSYDYQHQAPSMDSWGQGTLVTVSS

SEQ ID NO: 13188 - protein, 115 aa, Artificial Sequence
  source: /note="Description of Artificial Sequence: Synthetic polypeptide"
QVQLVQSGAEVKKPGSSVKVSCKASGYTFTSRYIHWVRQAPGQGLEWMGWIYPVTGDTYYNEKFKGRVTITADKSTSTAYMELSSLRSEDTAVYYCARGYGAFYYWGQGTLVTVS

SEQ ID NO: 13189 - protein, 115 aa, Artificial Sequence
  source: /note="Description of Artificial Sequence: Synthetic polypeptide"
QVQLVQSGAEVKKPGSSVKVSCKASGYTFTSRYIHWVRQAPGQGLEWMGWIYPVTGDTYYIEKFKGRVTITADKSTSTAYMELSSLRSEDTAVYYCARGYGAFFYWGQGTLVTVS

SEQ ID NO: 13190 - protein, 115 aa, Artificial Sequence
  source: /note="Description of Artificial Sequence: Synthetic polypeptide"
QVQLVQSGAEVKKPGSSVKVSCKASGYTFTSRYIHWVRQAPGQGLEWMGWIYPVTGDTYYREPFKGRVTITADKSTSTAYMELSSLRSEDTAVYYCARGYGAFYYWGQGTLVTVS

SEQ ID NO: 13191 - protein, 114 aa, Artificial Sequence
  source: /note="Description of Artificial Sequence: Synthetic polypeptide"
QVQLVQSGAEVKKPGASVKVSCKASGYTFTDYYMHWVRQAPGQGLEWMGRVNPNRGGTTYNQKFEGRVTMTTDTSTSTAYMELRSLRSDDTAVYYCARTNWLDYWGQGTTVTVS

SEQ ID NO: 13192 - protein, 114 aa, Artificial Sequence
  source: /note="Description of Artificial Sequence: Synthetic polypeptide"
QVQLVQSGAEVKKPGASVKVSCKASGYTFTDYYMHWVRQAPGQGLEWMGRVNPNRRGTTYNQKFEGRVTMTTDTSTSTAYMELRSLRSDDTAVYYCARANWLDYWGQGTTVTVS

SEQ ID NO: 13193 - protein, 114 aa, Artificial Sequence
  source: /note="Description of Artificial Sequence: Synthetic polypeptide"
QVQLVQSGAEVKKPGASVKVSCKASGYTFTDYYMHWVRQAPGQGLEWMGRVNPYRGSTTYNQKFEGRVTMTTDTSTSTAYMELRSLRSDDTAVYYCARANILDYWGQGTTVTVS

SEQ ID NO: 13194 - protein, 115 aa, Artificial Sequence
  source: /note="Description of Artificial Sequence: Synthetic polypeptide"
  MOD_RES (61)..(61): Any amino acid
  MOD_RES (63)..(63): Any amino acid
  MOD_RES (104)..(104): Any amino acid
QVQLVQSGAEVKKPGSSVKVSCKASGYTFTSRYIHWVRQAPGQGLEWMGWIYPVTGDTYYXEXFKGRVTITADKSTSTAYMELSSLRSEDTAVYYCARGYGAFXYWGQGTLVTVS

SEQ ID NO: 13195 - protein, 114 aa, Artificial Sequence
  source: /note="Description of Artificial Sequence: Synthetic polypeptide"
  MOD_RES (54)..(54): Any amino acid
  MOD_RES (56)..(57): Any amino acid
  MOD_RES (99)..(99): Any amino acid
  MOD_RES (101)..(101): Any amino acid
QVQLVQSGAEVKKPGASVKVSCKASGYTFTDYYMHWVRQAPGQGLEWMGRVNPXRXXTTYNQKFEGRVTMTTDTSTSTAYMELRSLRSDDTAVYYCARXNXLDYWGQGTTVTVS

SEQ ID NO: 13196 - protein, 121 aa, Mus musculus
EVKLVESGGDLVKPGGSLQLSCAASGFTFSSYAMSWVRQTPEMRLEWVASIMGGGTTYYPDSVKGRFTISRDIARNILNLQMSSLRSEDTAIYYCARGRDYGIRSYAMDYWGQGTSVTVSS

SEQ ID NO: 13197 - protein, 119 aa, Mus musculus
QVQLKQSGPGLVQPSQSLSITCTVSGFSLTDYGIQWVRQSPGQGLEWLGVIWRGGSTDYNAPFMSRLSITKDNSKSQVFFRMNSLQADDTAIYYCATSYYRYDGPFTYWGQGTLVTVSA

SEQ ID NO: 13198 - protein, 114 aa, Artificial Sequence
  source: /note="Description of Artificial Sequence: Synthetic polypeptide"
DIQMTQSPSSLSASVGDRVTITCKSSQSLLASGNQNNYLAWHQQKPGKAPKMLIIWASTRVSGVPSRFSGSGSGTDFTLTISSLQPEDFATYYCGQSYSRPLTFGQGTKVEIKR

SEQ ID NO: 13199 - protein, 117 aa, Artificial Sequence
  source: /note="Description of Artificial Sequence: Synthetic polypeptide"
EVQLVESGGGLVQPGGSLRLSCATSGFTFTDYYMSWVRQPPGKGLEWLGFIRNKANGYTTEYSASVKGRFTISRDNSKSTLYLQMNSLRAEDTATYYCARDNWFAYWGQGTLVTVSS

SEQ ID NO: 13200 - protein, 117 aa, Artificial Sequence
  source: /note="Description of Artificial Sequence: Synthetic polypeptide"
EVQLVESGGGLVQPGGSLRLSCATSGFTFTDYYMSWVRQPPGKGLEWLGFIRNKANGYTTEYSASVKGRFTISRDNSKNTLYLQMNSLRAEDTATYYCARDNWFAYWGQGTLVTVSS

SEQ ID NO: 13201 - protein, 117 aa, Artificial Sequence
  source: /note="Description of Artificial Sequence: Synthetic polypeptide"
EVQLVESGGGLVQPGGSLRLSCATSGFTFTDYYMSWVRQPPGKGLEWLGFIRNKANGYTTEYSASVKGRFTISRDNSKNTLYLQMNSLRAEDTAVYYCARDNWFAYWGQGTLVTVSS

SEQ ID NO: 13202 - protein, 119 aa, Artificial Sequence; identical to SEQ ID NO: 13129
  source: /note="Description of Artificial Sequence: Synthetic polypeptide"

SEQ ID NO: 13203 - protein, 119 aa, Homo sapiens; identical to SEQ ID NO: 12680

SEQ ID NO: 13204 - protein, 112 aa, Artificial Sequence
  source: /note="Description of Artificial Sequence: Synthetic polypeptide"
QVQLQESGPELVKPGASVKMSCRASGYTFTEYVITWVKQRTGQGLEWIGEIYPGSGSTSYNEKFKGKATLTADKSSNTAYMHLSSLTSEDSAVYFCTREDLGGQGTLVTVSS

SEQ ID NO: 13205 - protein, 112 aa, Artificial Sequence
  source: /note="Description of Artificial Sequence: Synthetic polypeptide"
QVQLQQSGAEVKKPGSSVKVSCKASGYTFTEYVITWVKQRPGQGLEWIGEIYPGSGSTSYNEKFKGKATITADKSTNTAYMELSSLRSEDTAFYFCTREDLGGQGSLVTVSS

SEQ ID NO: 13206 - protein, 116 aa, Mus musculus
QVQLKESGPGLVAPSQSLSITCTVSGFSLTTYDISWIRQSPGKGLEWLGVIWTDGGTNYNSPFMSRLSIRKDNSKSQVFLKMNRLQTDDTAIYYCVRDQRLYFDVWGAGTTVTVSS

SEQ ID NO: 13207 - protein, 116 aa, Mus musculus
QVQLKESGPGLVAPSKSLSITCTVSGSSLDSFDISWIRQSPGKGLEWLGVIWTGGGTNYNSGFMSRLRITKDNSKSQVLLKMNSLQSDDTAIYYCVRDPRLYFDVWGAGTTVTVSS

SEQ ID NO: 13208 - protein, 116 aa, Artificial Sequence
  source: /note="Description of Artificial Sequence: Synthetic polypeptide"
QVQLVQSGAEVKKPGSSVKVSCKASGFSLTTYDISWIRQAPGQGLEWMGVIWTDGGTNYNSPFMSRVTITKDESTSTAYMELSSLRSEDTAVYYCVRDQRLYFDVWGQGTTVTVSS

SEQ ID NO: 13209 - protein, 116 aa, Artificial Sequence
  source: /note="Description of Artificial Sequence: Synthetic polypeptide"
QVQLVQSGAEVKKPGSSVKVSCKASGFSLTTYDISWVRQAPGQGLEWMGVIWTDGGANYAQKFQGRVTITADESTSTAYMELSSLRSEDTAVYYCARDQRLYFDVWGQGTTVTVSS

SEQ ID NO: 13210 - protein, 116 aa, Artificial Sequence; identical to SEQ ID NO: 8177
  source: /note="Description of Artificial Sequence: Synthetic polypeptide"

SEQ ID NO: 13211 - protein, 116 aa, Artificial Sequence
  source: /note="Description of Artificial Sequence: Synthetic polypeptide"
QVQLVQSGAEVKKPGSSVKVSCKASGFSLTTYDISWVRQAPGQGLEWMGVIWTDGGTNYNSPFMSRVTITKDESTSTAYMELSSLRSEDTAVYYCVRDQRLYFDVWGQGTTVTVSS

SEQ ID NO: 13212 - protein, 116 aa, Artificial Sequence
  source: /note="Description of Artificial Sequence: Synthetic polypeptide"
QVQLQESGPGLVKPSETLSLTCTVSGFSLTTYDISWIRQPPGKGLEWIGVIWTDGGTNYNSPLKSRVTISVDTSKNQFSLKLSSVTAADTAVYYCARDQRLYFDVWGQGTTVTVSS

SEQ ID NO: 13213 - protein, 116 aa, Mus musculus
RVQLKESGPGLVAPSQSLSITCTVSGFSLTSYDISWIRQSPGKGLEWLGVIWSGGGTNYNSPFMSRLRISKDDSRSQVFLKVNRLQTDDTAIYYCVRDLRLYFDVWGAGTTVTVSS

SEQ ID NO: 13214 - protein, 116 aa, Mus musculus
QVQLKESGPGLVAPSKSLSITCTVSGSSLDSFDISWIRQPPGKGLEWLGVIWTGGGTNYNSGFMSRLRISKDNSKSQVFLKMSSLQSDDTAIYYCVRDPRLYFDVWGAGTTVTVSS

SEQ ID NO: 13215 - protein, 126 aa, Homo sapiens
QVQLVQSGAEVKKPGASVKVSCKASGYTFTGYYMHWVRQAPGQGLEWMGWINPDSGGTNYAQKFQGRVTMTRDTSISTAYMELNRLRSDDTAVYYCARDQPLGYCTNGVCSYFDYWGQGTLVTVSS

SEQ ID NO: 13216 - protein, 113 aa, Artificial Sequence; identical to SEQ ID NO: 7667
  source: /note="Description of Artificial Sequence: Synthetic polypeptide"

SEQ ID NO: 13217 - protein, 120 aa, Artificial Sequence
  source: /note="Description of Artificial Sequence: Synthetic polypeptide"
EVQLVESGGGLVQPGRSLRLSCTASGFTFTDNYMSWVRQAPGKGLEWVGFIRNKANGYTTEYAASVKGRFTISRDDSKSIAYLQMNSLKTEDTAVYYCARDVGSNYFDYWGQGTLVTVSS

SEQ ID NO: 13218 - protein, 120 aa, Artificial Sequence
  source: /note="Description of Artificial Sequence: Synthetic polypeptide"
EVQLVESGGGLVQPGRSLRLSCTASGFTFTDNYMSWVRQAPGKGLEWVGFIRNKANGYTTEYAASVKGRFTISRDNSKSIAYLQMNSLKTEDTAVYYCARDVGSNYFDYWGQGTLVTVSS

SEQ ID NO: 13219 - protein, 120 aa, Artificial Sequence
  source: /note="Description of Artificial Sequence: Synthetic polypeptide"
EVQLVESGGGLVQPGRSLRLSCTASGFTFTDNYMSWVRQAPGKGLEWLGFIRNKANGYTTEYAASVKGRFTISRDNSKSIAYLQMNSLKTEDTAVYYCARDVGSNYFDYWGQGTLVTVSS

SEQ ID NO: 13220 - protein, 120 aa, Artificial Sequence
  source: /note="Description of Artificial Sequence: Synthetic polypeptide"
EVNLVESGGGLVQPGRSLRLSCTASGFTFTDNYMSWVRQAPGKGLEWLGFIRNKANGYTTDYAASVRGRFTISRDNSKSILYLQMNALRTEDTAVYYCARDVGSNYFDYWGQGTLVTVSS

SEQ ID NO: 13221 - protein, 112 aa, Artificial Sequence
  source: /note="Description of Artificial Sequence: Synthetic polypeptide"
DIVMTQSPDSLAVSLGERATINCKSSQSLFNSRTRKNYLAWYQQKPGQPPKLLIYWASARDSGVPDRFTGSGSETYFTLTISSLQAEDVAVYYCMQSFNLRTFGQGTKVEIK

SEQ ID NO: 13222 - protein, 450 aa, Artificial Sequence
  source: /note="Description of Artificial Sequence: Synthetic polypeptide"
EVQLVESGGGLVQPGRSLRLSCTASGFTFTDNYMSWVRQAPGKGLEWVGFIRNKANGYTTEYAASVKGRFTISRDDSKSIAYLQMNSLKTEDTAVYYCARDVGSNYFDYWGQGTLVTVSSASTKGPSVFPLAPSSKSTSGGTAALGCLVKDYFPEPVTVSWNSGALTSGVHTFPAVLQSSGLYSLSSVVTVPSSSLGTQTYICNVNHKPSNTKVDKRVEPKSCDKTHTCPPCPAPELLGGPSVFLFPPKPKDTLMISRTPEVTCVVVDVSHEDPEVKFNWYVDGVEVHNAKTKPREEQYNSTYRVVSVLTVLHQDWLNGKEYKCKVSNKALPAPIEKTISKAKGQPREPQVYTLPPSREEMTKNQVSLTCLVKGFYPSDIAVEWESNGQPENNYKTTPPVLDSDGSFFLYSKLTVDKSRWQQGNVFSCSVMHEALHNHYTQKSLSLSPGK

SEQ ID NO: 13223 - protein, 450 aa, Artificial Sequence
  source: /note="Description of Artificial Sequence: Synthetic polypeptide"
EVQLVESGGGLVQPGRSLRLSCTASGFTFTDNYMSWVRQAPGKGLEWVGFIRNKANGYTTEYAASVKGRFTISRDNSKSIAYLQMNSLKTEDTAVYYCARDVGSNYFDYWGQGTLVTVSSASTKGPSVFPLAPSSKSTSGGTAALGCLVKDYFPEPVTVSWNSGALTSGVHTFPAVLQSSGLYSLSSVVTVPSSSLGTQTYICNVNHKPSNTKVDKRVEPKSCDKTHTCPPCPAPELLGGPSVFLFPPKPKDTLMISRTPEVTCVVVDVSHEDPEVKFNWYVDGVEVHNAKTKPREEQYNSTYRVVSVLTVLHQDWLNGKEYKCKVSNKALPAPIEKTISKAKGQPREPQVYTLPPSREEMTKNQVSLTCLVKGFYPSDIAVEWESNGQPENNYKTTPPVLDSDGSFFLYSKLTVDKSRWQQGNVFSCSVMHEALHNHYTQKSLSLSPGK

SEQ ID NO: 13224 - protein, 450 aa, Artificial Sequence
  source: /note="Description of Artificial Sequence: Synthetic polypeptide"
EVQLVESGGGLVQPGRSLRLSCTASGFTFTDNYMSWVRQAPGKGLEWLGFIRNKANGYTTEYAASVKGRFTISRDNSKSIAYLQMNSLKTEDTAVYYCARDVGSNYFDYWGQGTLVTVSSASTKGPSVFPLAPSSKSTSGGTAALGCLVKDYFPEPVTVSWNSGALTSGVHTFPAVLQSSGLYSLSSVVTVPSSSLGTQTYICNVNHKPSNTKVDKRVEPKSCDKTHTCPPCPAPELLGGPSVFLFPPKPKDTLMISRTPEVTCVVVDVSHEDPEVKFNWYVDGVEVHNAKTKPREEQYNSTYRVVSVLTVLHQDWLNGKEYKCKVSNKALPAPIEKTISKAKGQPREPQVYTLPPSREEMTKNQVSLTCLVKGFYPSDIAVEWESNGQPENNYKTTPPVLDSDGSFFLYSKLTVDKSRWQQGNVFSCSVMHEALHNHYTQKSLSLSPGK

SEQ ID NO: 13225 - protein, 450 aa, Artificial Sequence
  source: /note="Description of Artificial Sequence: Synthetic polypeptide"
EVNLVESGGGLVQPGRSLRLSCTASGFTFTDNYMSWVRQAPGKGLEWLGFIRNKANGYTTDYAASVRGRFTISRDNSKSILYLQMNALRTEDTAVYYCARDVGSNYFDYWGQGTLVTVSSASTKGPSVFPLAPSSKSTSGGTAALGCLVKDYFPEPVTVSWNSGALTSGVHTFPAVLQSSGLYSLSSVVTVPSSSLGTQTYICNVNHKPSNTKVDKRVEPKSCDKTHTCPPCPAPELLGGPSVFLFPPKPKDTLMISRTPEVTCVVVDVSHEDPEVKFNWYVDGVEVHNAKTKPREEQYNSTYRVVSVLTVLHQDWLNGKEYKCKVSNKALPAPIEKTISKAKGQPREPQVYTLPPSREEMTKNQVSLTCLVKGFYPSDIAVEWESNGQPENNYKTTPPVLDSDGSFFLYSKLTVDKSRWQQGNVFSCSVMHEALHNHYTQKSLSLSPGK

SEQ ID NO: 13226 - protein, 122 aa, Artificial Sequence
  source: /note="Description of Artificial Sequence: Synthetic polypeptide"
QVQLQQPGAELVKPGASVKLSCKASGYTFTNYYIYWVKQRPGQGLEWIGGINPTSGGSNFNEKFKTKATLTVDESSTTAYMQLSSLTSEDSAVYYCTRQGLWFDSDGRGFDFWGQGTTLTVS

SEQ ID NO: 13227 - protein, 120 aa, Artificial Sequence
  source: /note="Description of Artificial Sequence: Synthetic polypeptide"
QVQLQQPGAELVKPGASVKLSCKASGYTFTSHWMHWVKQRAGQGLEWIGEFNPSNGRTNYNEKFKSKATLTVDKSSSTAYMQLSSLTSEDSAVYYCASRDYDYDGRYFDYWGQGTTLTVS

SEQ ID NO: 13228 - protein, 120 aa, Artificial Sequence
  source: /note="Description of Artificial Sequence: Synthetic polypeptide"
QVQLVQSGAEVKKPGASVKVSCKASGYTFTSHWMHWVRQAPGQGLEWIGEFNPSNGRTNYNEKFKSKATMTVDTSTNTAYMELSSLRSEDTAVYYCASRDYDYDGRYFDYWGQGTLVTVS

SEQ ID NO: 13229 - protein, 118 aa, Artificial Sequence
  source: /note="Description of Artificial Sequence: Synthetic polypeptide"
QVQLKQSGPSLVQPSQSLSITCTVSGFSLTNYGVHWVRQSPGKGLEWLGVIWSGGNTDYNTPFTSRLSINKDNSKSQVFFKMNSLQSNDTAIYYCARALTYYDYEFAYWGQGTLVTVS

SEQ ID NO: 13230 - protein, 123 aa, Artificial Sequence
  source: /note="Description of Artificial Sequence: Synthetic polypeptide"
EVQLVESGGGLVQPGGSLRLSCSASGFTFSSYAMHWVRQAPGKGLEYVSAISSNGGSTYYADSVKGRFTISRDNSKNTLYSQMSSLRAEDTAVYYCFKDVGGSSWYWADYFDYWGQGTLVTVS

SEQ ID NO: 13231 - protein, 125 aa, Artificial Sequence
  source: /note="Description of Artificial Sequence: Synthetic polypeptide"
QVQLVQSGAEVKKPGSSVKVSCKASGGTFSSYAISWVRQAPGQGLEWMGGIIPIFGTANYAQKFQGRVTITADESTSTAYMELSSRLSEDTAVYYCARDPDYYGSGSYYPNWFDPWGQGTLVTVS

SEQ ID NO: 13232 - protein, 119 aa, Artificial Sequence
  source: /note="Description of Artificial Sequence: Synthetic polypeptide"
QVQLKQSGPGLVQPSQSLSITCTVCGFSLTNYGVHWVRQSPGKGLEWLGVIWSGGNTDYNTPFTSRLSINKDNSKSQVFFKMNSLQSNDTAIYYCARALTYYDDEFAYWGQGTLVTVSA

SEQ ID NO: 13233 - protein, 293 aa, Artificial Sequence
  source: /note="Description of Artificial Sequence: Synthetic polypeptide"
MATGSRTSLLLAFGLLCLPWLQEGSAQVQLKQSGPGLVQPSQSLSITCTVSGFSLTNYGVHWVRQSPGKGLEWLGVIWSGGNTDYNTPFTSRLSINKDNSKSQVFFKMNSLQSNDTAIYYCARALTYYDYEFAYWGQGTLVTVSAAAASKEPLRPRCRPINATLAVEKEGCPVCITVNTTICAGYCPTMTRVLQGVLPALPQVVCNYRDVRFESIRLPGCPRGVNPVVSYAVALSCQCALCRRSTTDCGGPKDHPLTCDDPRFQDSSSSKAPPPSLPSPSRLPGPSDTPILPQ

SEQ ID NO: 13234 - protein, 232 aa, Artificial Sequence [sequence omitted]

SEQ ID NO: 13235 - protein, 291 aa, Artificial Sequence
  source: /note="Description of Artificial Sequence: Synthetic polypeptide"
MATGSRTSLLLAFGLLCLPWLQEGSAQVQLQESGPGLVKPSETLSLTCTVSGYSITGGYLWNWIRQPPGKGLEWIGYISYDGTNNYKPSLKDRVTISRDTSKNQFSLKLSSVTAADTAVYYCARYGRVFFDYWGQGTLVTVSSAAASKEPLRPRCRPINATLAVEKEGCPVCITVNTTICAGYCPTMTRVLQGVLPALPQVVCNYRDVRFESIRLPGCPRGVNPVVSYAVALSCQCALCRRSTTDCGGPKDHPLTCDDPRFQDSSSSKAPPPSLPSPSRLPGPSDTPILPQ

SEQ ID NO: 13236 - protein, 232 aa, Artificial Sequence
  source: /note="Description of Artificial Sequence: Synthetic polypeptide"
MATGSRTSLLLAFGLLCLPWLQEGSAAPDVQDCPECTLQENPFFSQPGAPILQCMGCCFSRAYPTPLRSKKTMLVQKNVTSESTCCVAKSYNRVTVMGGFKVENHTACHCSTCQVQLKQSGPGLVQPSQSLSITCTVSGFSLTNYGVHWVRQSPGKGLEWLGVIWSGGNTDYNTPFTSRLSINKDNSKSQVFFKMNSLQSNDTAIYYCARALTYYDYEFAYWGQGTLVTVSA

SEQ ID NO: 13237 - protein, 135 aa, Artificial Sequence
  source: /note="Description of Artificial Sequence: Synthetic polypeptide"
MDWTWRILFLVAAATGVHSQVQLQESGPGLVKPSQTLSLTCTVSGYSISSDFAWNWIRQPPGKGLEWMGYISYSGNTRYQPSLKSRITISRDTSKNQFFLKLNSVTAADTATYYCVTAGRGFPYWGQGTLVTVSS

SEQ ID NO: 13238 - protein, 116 aa, Mus musculus
LVKLQESGPSLVKPSQSLSLTCTVTGYSITSDYAWNWIRQFPGNKLEWMGYISYSANTRYNPSLKSRISITRDTSKNQFFLQLNSVTTEDTATYYCATAGRGFPYWGQGTLVTVSA

SEQ ID NO: 13239 - protein, 116 aa, Artificial Sequence
  source: /note="Description of Artificial Sequence: Synthetic polypeptide"
QVQLQESGPGLVKPSQTLSLTCTVSGYSISSDFAWNWIRQPPGKGLEWMGYISYSGNTRYQPSLKSRITISRDTSKNQFFLKLNSVTAADTATYYCVTAGRGFPYWGQGTLVTVSS

SEQ ID NO: 13240 - protein, 116 aa, Mus musculus
DVQLQESGPSLVKPSQTLSLTCTVTGYSITSDFAWNWIRQFPGNKLEWMGYISYSGNTRYNPSLKSRISITRDTSKNQFFLQLNSVTIEDTATYYCVTAGRGFPYWGQGTLVTVSA

SEQ ID NO: 13241 - protein, 116 aa, Artificial Sequence
  source: /note="Description of Artificial Sequence: Synthetic polypeptide"
QVQLQESGPGLVKPSQTLSLTCTVSGYSISSDFAWNWIRQPPGKGLEWMGYISYSGNTRYQPSLKSRITITRDTSKSQFFLQLNSVTAPDTATYYCVTAGRGFPYWGQGTLVTVSS

SEQ ID NO: 13242 - protein, 120 aa, Rattus norvegicus
QVNLLQSGAALVKPGASVKLSCKGSGFTFTDYKIHWVKQSHGKSLEWIGYFNPNSGYSTYNEKFKSKATLTADKSTDTAYMELTSLTSEDSATYYCTRLSPGGYYVMDAWGQGASVTVSS

SEQ ID NO: 13243 - protein, 120 aa, Artificial Sequence [sequence omitted]

SEQ ID NO: 13244 - protein, 118 aa, Artificial Sequence
  source: /note="Description of Artificial Sequence: Synthetic polypeptide"
QVELVESGGGVVQPGRSQRLSCAASGFTFSSYGMHWVRQAPGKGLEWVAIIWFDGSSTYYADSVRGRFTISRDNSKNTLYLQMNSLRAEDTAVYFCARELGRRYFDLWGRGTLVSVSS

SEQ ID NO: 13245 - protein, 118 aa, Artificial Sequence
  source: /note="Description of Artificial Sequence: Synthetic polypeptide"
QVQLVESGGGVVQPGRSLRLSCAASGFTFSSYGMHWVRQAPGKGLEWMAIIWFDGSSKYYGDSVKGRFTISRDNSKNTLYLQMNSLRADDTAVYYCARELGRRYFDLWGRGTLVTVSS

SEQ ID NO: 13246 - protein, 119 aa, Artificial Sequence
  source: /note="Description of Artificial Sequence: Synthetic polypeptide"
EVQLVESGGGLVQPGGSLRLSCAASGFSLTNYGVHWVRQAPGKGLEWLGVIWSGGNTDYNTPFTSRLTINKDNSKNTVYLQMNSLRAEDTAVYYCARALTYYDYEFAYWGQGTLVTVSS

SEQ ID NO: 13247 - protein, 119 aa, Artificial Sequence
  source: /note="Description of Artificial Sequence: Synthetic polypeptide"
QVQLKQSGPGLVQPSQSLSITCKVSGFSLTNYGVHWVRQSPGKGLEWLGVIWSGGNTDYNTPFTSRLSINKDNSKSQVFFKMNSLQSNDTAIYYCARALTYYDYEFAYWGQGTLVTVSA

SEQ ID NO: 13248 - protein, 119 aa, Artificial Sequence
  source: /note="Description of Artificial Sequence: Synthetic polypeptide"
QVQLKQSGPGLVQPSQSLSITCHVSGFSLTNYGVHWVRQSPGKGLEWLGVIWSGGNTDYNTPFTSRLSINKDNSKSQVFFKMNSLQSNDTAIYYCARALTYYDYEFAYWGQGTLVTVSA

SEQ ID NO: 13249 - protein, 119 aa, Artificial Sequence
  source: /note="Description of Artificial Sequence: Synthetic polypeptide"
QVQLKQSGPGLVQPSQSLSITCRVSGFSLTNYGVHWVRQSPGKGLEWLGVIWSGGNTDYNTPFTSRLSINKDNSKSQVFFKMNSLQSNDTAIYYCARALTYYDYEFAYWGQGTLVTVSA

SEQ ID NO: 13250 - protein, 119 aa, Artificial Sequence
  source: /note="Description of Artificial Sequence: Synthetic polypeptide"
QVQLKQSGPGLVQPSQSLSITCAVSGFSLTNYGVHWVRQSPGKGLEWLGVIWSGGNTDYNTPFTSRLSINKDNSKSQVFFKMNSLQSNDTAIYYCARALTYYDYEFAYWGQGTLVTVSA

SEQ ID NO: 13251 - protein, 119 aa, Artificial Sequence
  source: /note="Description of Artificial Sequence: Synthetic polypeptide"
QVQLKQSGPGLVQPSQSLSITCCVSGFSLTNYGVHWVRQSPGKGLEWLGVIWSGGNTDYNTPFTSRLSINKDNSKSQVFFKMNSLQSNDTAIYYCARALTYYDYEFAYWGQGTLVTVSA

SEQ ID NO: 13252 - protein, 119 aa, Artificial Sequence
  source: /note="Description of Artificial Sequence: Synthetic polypeptide"
QVQLKQSGPGLVQPSQSLSITCEVSGFSLTNYGVHWVRQSPGKGLEWLGVIWSGGNTDYNTPFTSRLSINKDNSKSQVFFKMNSLQSNDTAIYYCARALTYYDYEFAYWGQGTLVTVSA

SEQ ID NO: 13253 - protein, 119 aa, Artificial Sequence
  source: /note="Description of Artificial Sequence: Synthetic polypeptide"
QVQLKQSGPGLVQPSQSLSITCGVSGFSLTNYGVHWVRQSPGKGLEWLGVIWSGGNTDYNTPFTSRLSINKDNSKSQVFFKMNSLQSNDTAIYYCARALTYYDYEFAYWGQGTLVTVSA

SEQ ID NO: 13254 - protein, 119 aa, Artificial Sequence
  source: /note="Description of Artificial Sequence: Synthetic polypeptide"
QVQLKQSGPGLVQPSQSLSITCIVSGFSLTNYGVHWVRQSPGKGLEWLGVIWSGGNTDYNTPFTSRLSINKDNSKSQVFFKMNSLQSNDTAIYYCARALTYYDYEFAYWGQGTLVTVSA

SEQ ID NO: 13255 - protein, 119 aa, Artificial Sequence
  source: /note="Description of Artificial Sequence: Synthetic polypeptide"
QVQLKQSGPGLVQPSQSLSITCMVSGFSLTNYGVHWVRQSPGKGLEWLGVIWSGGNTDYNTPFTSRLSINKDNSKSQVFFKMNSLQSNDTAIYYCARALTYYDYEFAYWGQGTLVTVSA

SEQ ID NO: 13256 - protein, 119 aa, Artificial Sequence
  source: /note="Description of Artificial Sequence: Synthetic polypeptide"
QVQLKQSGPGLVQPSQSLSITCNVSGFSLTNYGVHWVRQSPGKGLEWLGVIWSGGNTDYNTPFTSRLSINKDNSKSQVFFKMNSLQSNDTAIYYCARALTYYDYEFAYWGQGTLVTVSA

SEQ ID NO: 13257 - protein, 119 aa, Artificial Sequence
  source: /note="Description of Artificial Sequence: Synthetic polypeptide"
QVQLKQSGPGLVQPSQSLSITCPVSGFSLTNYGVHWVRQSPGKGLEWLGVIWSGGNTDYNTPFTSRLSINKDNSKSQVFFKMNSLQSNDTAIYYCARALTYYDYEFAYWGQGTLVTVSA

SEQ ID NO: 13258 - protein, 119 aa, Artificial Sequence
  source: /note="Description of Artificial Sequence: Synthetic polypeptide"
QVQLKQSGPGLVQPSQSLSITCSVSGFSLTNYGVHWVRQSPGKGLEWLGVIWSGGNTDYNTPFTSRLSINKDNSKSQVFFKMNSLQSNDTAIYYCARALTYYDYEFAYWGQGTLVTVSA

SEQ ID NO: 13259 - protein, 119 aa, Artificial Sequence
  source: /note="Description of Artificial Sequence: Synthetic polypeptide"
QVQLKQSGPGLVQPSQSLSITCVVSGFSLTNYGVHWVRQSPGKGLEWLGVIWSGGNTDYNTPFTSRLSINKDNSKSQVFFKMNSLQSNDTAIYYCARALTYYDYEFAYWGQGTLVTVSA

SEQ ID NO: 13260 - protein, 119 aa, Artificial Sequence
  source: /note="Description of Artificial Sequence: Synthetic polypeptide"
QVQLKQSGPGLVQPSQSLSITCWVSGFSLTNYGVHWVRQSPGKGLEWLGVIWSGGNTDYNTPFTSRLSINKDNSKSQVFFKMNSLQSNDTAIYYCARALTYYDYEFAYWGQGTLVTVSA

SEQ ID NO: 13261 - protein, 119 aa, Artificial Sequence
  source: /note="Description of Artificial Sequence: Synthetic polypeptide"
QVQLKQSGPGLVQPSQSLSITCLVSGFSLTNYGVHWVRQSPGKGLEWLGVIWSGGNTDYNTPFTSRLSINKDNSKSQVFFKMNSLQSNDTAIYYCARALTYYDYEFAYWGQGTLVTVSA

SEQ ID NO: 13262 - protein, 119 aa, Artificial Sequence
  source: /note="Description of Artificial Sequence: Synthetic polypeptide"
QVQLKQSGPGLVQPSQSLSITCTRSGFSLTNYGVHWVRQSPGKGLEWLGVIWSGGNTDYNTPFTSRLSINKDNSKSQVFFKMNSLQSNDTAIYYCARALTYYDYEFAYWGQGTLVTVSA

SEQ ID NO: 13263 - protein, 119 aa, Artificial Sequence
  source: /note="Description of Artificial Sequence: Synthetic polypeptide"
QVQLKQSGPGLVQPSQSLSITCTASGFSLTNYGVHWVRQSPGKGLEWLGVIWSGGNTDYNTPFTSRLSINKDNSKSQVFFKMNSLQSNDTAIYYCARALTYYDYEFAYWGQGTLVTVSA

SEQ ID NO: 13264 - protein, 119 aa, Artificial Sequence
  source: /note="Description of Artificial Sequence: Synthetic polypeptide"
QVQLKQSGPGLVQPSQSLSITCTFSGFSLTNYGVHWVRQSPGKGLEWLGVIWSGGNTDYNTPFTSRLSINKDNSKSQVFFKMNSLQSNDTAIYYCARALTYYDYEFAYWGQGTLVTVSA

SEQ ID NO: 13265 - protein, 119 aa, Artificial Sequence
  source: /note="Description of Artificial Sequence: Synthetic polypeptide"
QVQLKQSGPGLVQPSQSLSITCTGSGFSLTNYGVHWVRQSPGKGLEWLGVIWSGGNTDYNTPFTSRLSINKDNSKSQVFFKMNSLQSNDTAIYYCARALTYYDYEFAYWGQGTLVTVSA

SEQ ID NO: 13266 - protein, 119 aa, Artificial Sequence
  source: /note="Description of Artificial Sequence: Synthetic polypeptide"
QVQLKQSGPGLVQPSQSLSITCTISGFSLTNYGVHWVRQSPGKGLEWLGVIWSGGNTDYNTPFTSRLSINKDNSKSQVFFKMNSLQSNDTAIYYCARALTYYDYEFAYWGQGTLVTVSA

SEQ ID NO: 13267 - protein, 119 aa, Artificial Sequence
  source: /note="Description of Artificial Sequence: Synthetic polypeptide"
QVQLKQSGPGLVQPSQSLSITCTMSGFSLTNYGVHWVRQSPGKGLEWLGVIWSGGNTDYNTPFTSRLSINKDNSKSQVFFKMNSLQSNDTAIYYCARALTYYDYEFAYWGQGTLVTVSA

SEQ ID NO: 13268 - protein, 119 aa, Artificial Sequence
  source: /note="Description of Artificial Sequence: Synthetic polypeptide"
QVQLKQSGPGLVQPSQSLSITCTPSGFSLTNYGVHWVRQSPGKGLEWLGVIWSGGNTDYNTPFTSRLSINKDNSKSQVFFKMNSLQSNDTAIYYCARALTYYDYEFAYWGQGTLVTVSA

SEQ ID NO: 13269 - protein, 119 aa, Artificial Sequence
  source: /note="Description of Artificial Sequence: Synthetic polypeptide"
QVQLKQSGPGLVQPSQSLSITCTSSGFSLTNYGVHWVRQSPGKGLEWLGVIWSGGNTDYNTPFTSRLSINKDNSKSQVFFKMNSLQSNDTAIYYCARALTYYDYEFAYWGQGTLVTVSA

SEQ ID NO: 13270 - protein, 119 aa, Artificial Sequence
  source: /note="Description of Artificial Sequence: Synthetic polypeptide"
QVQLKQSGPGLVQPSQSLSITCTTSGFSLTNYGVHWVRQSPGKGLEWLGVIWSGGNTDYNTPFTSRLSINKDNSKSQVFFKMNSLQSNDTAIYYCARALTYYDYEFAYWGQGTLVTVSA

SEQ ID NO: 13271 - protein, 119 aa, Artificial Sequence
  source: /note="Description of Artificial Sequence: Synthetic polypeptide"
QVQLKQSGPGLVQPSQSLSITCTLSGFSLTNYGVHWVRQSPGKGLEWLGVIWSGGNTDYNTPFTSRLSINKDNSKSQVFFKMNSLQSNDTAIYYCARALTYYDYEFAYWGQGTLVTVSA

SEQ ID NO: 13272 - protein, 119 aa, Artificial Sequence
  source: /note="Description of Artificial Sequence: Synthetic polypeptide"
QVQLKQSGPGLVQPSQSLSITCTVHGFSLTNYGVHWVRQSPGKGLEWLGVIWSGGNTDYNTPFTSRLSINKDNSKSQVFFKMNSLQSNDTAIYYCARALTYYDYEFAYWGQGTLVTVSA

SEQ ID NO: 13273 - protein, 119 aa, Artificial Sequence
  source: /note="Description of Artificial Sequence: Synthetic polypeptide"
QVQLKQSGPGLVQPSQSLSITCTVRGFSLTNYGVHWVRQSPGKGLEWLGVIWSGGNTDYNTPFTSRLSINKDNSKSQVFFKMNSLQSNDTAIYYCARALTYYDYEFAYWGQGTLVTVSA

SEQ ID NO: 13274 - protein, 119 aa, Artificial Sequence
  source: /note="Description of Artificial Sequence: Synthetic polypeptide"
QVQLKQSGPGLVQPSQSLSITCTVAGFSLTNYGVHWVRQSPGKGLEWLGVIWSGGNTDYNTPFTSRLSINKDNSKSQVFFKMNSLQSNDTAIYYCARALTYYDYEFAYWGQGTLVTVSA

SEQ ID NO: 13275 - protein, 119 aa, Artificial Sequence
  source: /note="Description of Artificial Sequence: Synthetic polypeptide"
QVQLKQSGPGLVQPSQSLSITCTVCGFSLTNYGVHWVRQSPGKGLEWLGVIWSGGNTDYNTPFTSRLSINKDNSKSQVFFKMNSLQSNDTAIYYCARALTYYDYEFAYWGQGTLVTVSA

SEQ ID NO: 13276 - protein, 119 aa, Artificial Sequence
  source: /note="Description of Artificial Sequence: Synthetic polypeptide"
QVQLKQSGPGLVQPSQSLSITCTVDGFSLTNYGVHWVRQSPGKGLEWLGVIWSGGNTDYNTPFTSRLSINKDNSKSQVFFKMNSLQSNDTAIYYCARALTYYDYEFAYWGQGTLVTVSA

SEQ ID NO: 13277 - protein, 119 aa, Artificial Sequence
  source: /note="Description of Artificial Sequence: Synthetic polypeptide"
QVQLKQSGPGLVQPSQSLSITCTVEGFSLTNYGVHWVRQSPGKGLEWLGVIWSGGNTDYNTPFTSRLSINKDNSKSQVFFKMNSLQSNDTAIYYCARALTYYDYEFAYWGQGTLVTVSA

SEQ ID NO: 13278 - protein, 119 aa, Artificial Sequence
  source: /note="Description of Artificial Sequence: Synthetic polypeptide"
QVQLKQSGPGLVQPSQSLSITCTVFGFSLTNYGVHWVRQSPGKGLEWLGVIWSGGNTDYNTPFTSRLSINKDNSKSQVFFKMNSLQSNDTAIYYCARALTYYDYEFAYWGQGTLVTVSA

SEQ ID NO: 13279 - protein, 119 aa, Artificial Sequence
  source: /note="Description of Artificial Sequence: Synthetic polypeptide"
QVQLKQSGPGLVQPSQSLSITCTVGGFSLTNYGVHWVRQSPGKGLEWLGVIWSGGNTDYNTPFTSRLSINKDNSKSQVFFKMNSLQSNDTAIYYCARALTYYDYEFAYWGQGTLVTVSA

SEQ ID NO: 13280 - protein, 119 aa, Artificial Sequence
  source: /note="Description of Artificial Sequence: Synthetic polypeptide"
QVQLKQSGPGLVQPSQSLSITCTVIGFSLTNYGVHWVRQSPGKGLEWLGVIWSGGNTDYNTPFTSRLSINKDNSKSQVFFKMNSLQSNDTAIYYCARALTYYDYEFAYWGQGTLVTVSA

SEQ ID NO: 13281 - protein, 119 aa, Artificial Sequence
  source: /note="Description of Artificial Sequence: Synthetic polypeptide"
QVQLKQSGPGLVQPSQSLSITCTVMGFSLTNYGVHWVRQSPGKGLEWLGVIWSGGNTDYNTPFTSRLSINKDNSKSQVFFKMNSLQSNDTAIYYCARALTYYDYEFAYWGQGTLVTVSA

SEQ ID NO: 13282 - protein, 119 aa, Artificial Sequence
  source: /note="Description of Artificial Sequence: Synthetic polypeptide"
QVQLKQSGPGLVQPSQSLSITCTVPGFSLTNYGVHWVRQSPGKGLEWLGVIWSGGNTDYNTPFTSRLSINKDNSKSQVFFKMNSLQSNDTAIYYCARALTYYDYEFAYWGQGTLVTVSA

SEQ ID NO: 13283 - protein, 119 aa, Artificial Sequence
  source: /note="Description of Artificial Sequence: Synthetic polypeptide"
QVQLKQSGPGLVQPSQSLSITCTVQGFSLTNYGVHWVRQSPGKGLEWLGVIWSGGNTDYNTPFTSRLSINKDNSKSQVFFKMNSLQSNDTAIYYCARALTYYDYEFAYWGQGTLVTVSA

SEQ ID NO: 13284 - protein, 119 aa, Artificial Sequence
  source: /note="Description of Artificial Sequence: Synthetic polypeptide"
QVQLKQSGPGLVQPSQSLSITCTVTGFSLTNYGVHWVRQSPGKGLEWLGVIWSGGNTDYNTPFTSRLSINKDNSKSQVFFKMNSLQSNDTAIYYCARALTYYDYEFAYWGQGTLVTVSA

SEQ ID NO: 13285 - protein, 119 aa, Artificial Sequence
  source: /note="Description of Artificial Sequence: Synthetic polypeptide"
QVQLKQSGPGLVQPSQSLSITCTVVGFSLTNYGVHWVRQSPGKGLEWLGVIWSGGNTDYNTPFTSRLSINKDNSKSQVFFKMNSLQSNDTAIYYCARALTYYDYEFAYWGQGTLVTVSA

SEQ ID NO: 13286 - protein, 119 aa, Artificial Sequence
  source: /note="Description of Artificial Sequence: Synthetic polypeptide"
QVQLKQSGPGLVQPSQSLSITCTVLGFSLTNYGVHWVRQSPGKGLEWLGVIWSGGNTDYNTPFTSRLSINKDNSKSQVFFKMNSLQSNDTAIYYCARALTYYDYEFAYWGQGTLVTVSA

SEQ ID NO: 13287 - protein, 119 aa, Artificial Sequence
  source: /note="Description of Artificial Sequence: Synthetic polypeptide"
QVQLKQSGPGLVQPSQSLSITCTVSHFSLTNYGVHWVRQSPGKGLEWLGVIWSGGNTDYNTPFTSRLSINKDNSKSQVFFKMNSLQSNDTAIYYCARALTYYDYEFAYWGQGTLVTVSA

SEQ ID NO: 13288 - protein, 119 aa, Artificial Sequence
  source: /note="Description of Artificial Sequence: Synthetic polypeptide"
QVQLKQSGPGLVQPSQSLSITCTVSRFSLTNYGVHWVRQSPGKGLEWLGVIWSGGNTDYNTPFTSRLSINKDNSKSQVFFKMNSLQSNDTAIYYCARALTYYDYEFAYWGQGTLVTVSA

SEQ ID NO: 13289 - protein, 119 aa, Artificial Sequence
  source: /note="Description of Artificial Sequence: Synthetic polypeptide"
QVQLKQSGPGLVQPSQSLSITCTVSDFSLTNYGVHWVRQSPGKGLEWLGVIWSGGNTDYNTPFTSRLSINKDNSKSQVFFKMNSLQSNDTAIYYCARALTYYDYEFAYWGQGTLVTVSA

SEQ ID NO: 13290 - protein, 119 aa, Artificial Sequence
  source: /note="Description of Artificial Sequence: Synthetic polypeptide"
QVQLKQSGPGLVQPSQSLSITCTVSFFSLTNYGVHWVRQSPGKGLEWLGVIWSGGNTDYNTPFTSRLSINKDNSKSQVFFKMNSLQSNDTAIYYCARALTYYDYEFAYWGQGTLVTVSA

SEQ ID NO: 13291 - protein, 119 aa, Artificial Sequence
  source: /note="Description of Artificial Sequence: Synthetic polypeptide"
QVQLKQSGPGLVQPSQSLSITCTVSMFSLTNYGVHWVRQSPGKGLEWLGVIWSGGNTDYNTPFTSRLSINKDNSKSQVFFKMNSLQSNDTAIYYCARALTYYDYEFAYWGQGTLVTVSA

SEQ ID NO: 13292 - protein, 119 aa, Artificial Sequence
  source: /note="Description of Artificial Sequence: Synthetic polypeptide"
QVQLKQSGPGLVQPSQSLSITCTVSNFSLTNYGVHWVRQSPGKGLEWLGVIWSGGNTDYNTPFTSRLSINKDNSKSQVFFKMNSLQSNDTAIYYCARALTYYDYEFAYWGQGTLVTVSA

SEQ ID NO: 13293 - protein, 119 aa, Artificial Sequence
  source: /note="Description of Artificial Sequence: Synthetic polypeptide"
QVQLKQSGPGLVQPSQSLSITCTVSPFSLTNYGVHWVRQSPGKGLEWLGVIWSGGNTDYNTPFTSRLSINKDNSKSQVFFKMNSLQSNDTAIYYCARALTYYDYEFAYWGQGTLVTVSA

SEQ ID NO: 13294 - protein, 119 aa, Artificial Sequence
  source: /note="Description of Artificial Sequence: Synthetic polypeptide"
QVQLKQSGPGLVQPSQSLSITCTVSQFSLTNYGVHWVRQSPGKGLEWLGVIWSGGNTDYNTPFTSRLSINKDNSKSQVFFKMNSLQSNDTAIYYCARALTYYDYEFAYWGQGTLVTVSA

SEQ ID NO: 13295 - protein, 119 aa, Artificial Sequence
  source: /note="Description of Artificial Sequence: Synthetic polypeptide"
QVQLKQSGPGLVQPSQSLSITCTVSSFSLTNYGVHWVRQSPGKGLEWLGVIWSGGNTDYNTPFTSRLSINKDNSKSQVFFKMNSLQSNDTAIYYCARALTYYDYEFAYWGQGTLVTVSA

SEQ ID NO: 13296 - protein, 119 aa, Artificial Sequence
  source: /note="Description of Artificial Sequence: Synthetic polypeptide"
QVQLKQSGPGLVQPSQSLSITCTVSYFSLTNYGVHWVRQSPGKGLEWLGVIWSGGNTDYNTPFTSRLSINKDNSKSQVFFKMNSLQSNDTAIYYCARALTYYDYEFAYWGQGTLVTVSA

SEQ ID NO: 13297 - protein, 119 aa, Artificial Sequence
  source: /note="Description of Artificial Sequence: Synthetic polypeptide"
QVQLKQSGPGLVQPSQSLSITCTVSLFSLTNYGVHWVRQSPGKGLEWLGVIWSGGNTDYNTPFTSRLSINKDNSKSQVFFKMNSLQSNDTAIYYCARALTYYDYEFAYWGQGTLVTVSA

SEQ ID NO: 13298 - protein, 119 aa, Artificial Sequence
  source: /note="Description of Artificial Sequence: Synthetic polypeptide"
QVQLKQSGPGLVQPSQSLSITCTVSGHSLTNYGVHWVRQSPGKGLEWLGVIWSGGNTDYNTPFTSRLSINKDNSKSQVFFKMNSLQSNDTAIYYCARALTYYDYEFAYWGQGTLVTVSA

SEQ ID NO: 13299 - protein, 119 aa, Artificial Sequence
  source: /note="Description of Artificial Sequence: Synthetic polypeptide"
QVQLKQSGPGLVQPSQSLSITCTVSGRSLTNYGVHWVRQSPGKGLEWLGVIWSGGNTDYNTPFTSRLSINKDNSKSQVFFKMNSLQSNDTAIYYCARALTYYDYEFAYWGQGTLVTVSA

SEQ ID NO: 13300 - protein, 119 aa, Artificial Sequence
  source: /note="Description of Artificial Sequence: Synthetic polypeptide"
QVQLKQSGPGLVQPSQSLSITCTVSGASLTNYGVHWVRQSPGKGLEWLGVIWSGGNTDYNTPFTSRLSINKDNSKSQVFFKMNSLQSNDTAIYYCARALTYYDYEFAYWGQGTLVTVSA

SEQ ID NO: 13301 - protein, 119 aa, Artificial Sequence
  source: /note="Description of Artificial Sequence: Synthetic polypeptide"
QVQLKQSGPGLVQPSQSLSITCTVSGDSLTNYGVHWVRQSPGKGLEWLGVIWSGGNTDYNTPFTSRLSINKDNSKSQVFFKMNSLQSNDTAIYYCARALTYYDYEFAYWGQGTLVTVSA

SEQ ID NO: 13302 - protein, 119 aa, Artificial Sequence
  source: /note="Description of Artificial Sequence: Synthetic polypeptide"
QVQLKQSGPGLVQPSQSLSITCTVSGESLTNYGVHWVRQSPGKGLEWLGVIWSGGNTDYNTPFTSRLSINKDNSKSQVFFKMNSLQSNDTAIYYCARALTYYDYEFAYWGQGTLVTVSA

SEQ ID NO: 13303 - protein, 119 aa, Artificial Sequence
  source: /note="Description of Artificial Sequence: Synthetic polypeptide"
QVQLKQSGPGLVQPSQSLSITCTVSGGSLTNYGVHWVRQSPGKGLEWLGVIWSGGNTDYNTPFTSRLSINKDNSKSQVFFKMNSLQSNDTAIYYCARALTYYDYEFAYWGQGTLVTVSA

SEQ ID NO: 13304 - protein, 119 aa, Artificial Sequence
  source: /note="Description of Artificial Sequence: Synthetic polypeptide"
QVQLKQSGPGLVQPSQSLSITCTVSGMSLTNYGVHWVRQSPGKGLEWLGVIWSGGNTDYNTPFTSRLSINKDNSKSQVFFKMNSLQSNDTAIYYCARALTYYDYEFAYWGQGTLVTVSA

SEQ ID NO: 13305 - protein, 119 aa, Artificial Sequence
  source: /note="Description of Artificial Sequence: Synthetic polypeptide"
QVQLKQSGPGLVQPSQSLSITCTVSGPSLTNYGVHWVRQSPGKGLEWLGVIWSGGNTDYNTPFTSRLSINKDNSKSQVFFKMNSLQSNDTAIYYCARALTYYDYEFAYWGQGTLVTVSA

SEQ ID NO: 13306 - protein, 119 aa, Artificial Sequence
  source: /note="Description of Artificial Sequence: Synthetic polypeptide"
QVQLKQSGPGLVQPSQSLSITCTVSGQSLTNYGVHWVRQSPGKGLEWLGVIWSGGNTDYNTPFTSRLSINKDNSKSQVFFKMNSLQSNDTAIYYCARALTYYDYEFAYWGQGTLVTVSA

SEQ ID NO: 13307 - protein, 119 aa, Artificial Sequence
  source: /note="Description of Artificial Sequence: Synthetic polypeptide"
QVQLKQSGPGLVQPSQSLSITCTVSGSSLTNYGVHWVRQSPGKGLEWLGVIWSGGNTDYNTPFTSRLSINKDNSKSQVFFKMNSLQSNDTAIYYCARALTYYDYEFAYWGQGTLVTVSA

SEQ ID NO: 13308 - protein, 119 aa, Artificial Sequence
  source: /note="Description of Artificial Sequence: Synthetic polypeptide"
QVQLKQSGPGLVQPSQSLSITCTVSGTSLTNYGVHWVRQSPGKGLEWLGVIWSGGNTDYNTPFTSRLSINKDNSKSQVFFKMNSLQSNDTAIYYCARALTYYDYEFAYWGQGTLVTVSA

SEQ ID NO: 13309 - protein, 119 aa, Artificial Sequence
  source: /note="Description of Artificial Sequence: Synthetic polypeptide"
QVQLKQSGPGLVQPSQSLSITCTVSGVSLTNYGVHWVRQSPGKGLEWLGVIWSGGNTDYNTPFTSRLSINKDNSKSQVFFKMNSLQSNDTAIYYCARALTYYDYEFAYWGQGTLVTVSA

SEQ ID NO: 13310 - protein, 119 aa, Artificial Sequence
  source: /note="Description of Artificial Sequence: Synthetic polypeptide"
QVQLKQSGPGLVQPSQSLSITCTVSGWSLTNYGVHWVRQSPGKGLEWLGVIWSGGNTDYNTPFTSRLSINKDNSKSQVFFKMNSLQSNDTAIYYCARALTYYDYEFAYWGQGTLVTVSA

SEQ ID NO: 13311 - protein, 119 aa, Artificial Sequence
  source: /note="Description of Artificial Sequence: Synthetic polypeptide"
QVQLKQSGPGLVQPSQSLSITCTVSGYSLTNYGVHWVRQSPGKGLEWLGVIWSGGNTDYNTPFTSRLSINKDNSKSQVFFKMNSLQSNDTAIYYCARALTYYDYEFAYWGQGTLVTVSA

SEQ ID NO: 13312 - protein, 119 aa, Artificial Sequence
  source: /note="Description of Artificial Sequence: Synthetic polypeptide"
QVQLKQSGPGLVQPSQSLSITCTVSGLSLTNYGVHWVRQSPGKGLEWLGVIWSGGNTDYNTPFTSRLSINKDNSKSQVFFKMNSLQSNDTAIYYCARALTYYDYEFAYWGQGTLVTVSA

SEQ ID NO: 13313 - protein, 119 aa, Artificial Sequence
  source: /note="Description of Artificial Sequence: Synthetic polypeptide"
QVQLKQSGPGLVQPSQSLSITCTVSGFKLTNYGVHWVRQSPGKGLEWLGVIWSGGNTDYNTPFTSRLSINKDNSKSQVFFKMNSLQSNDTAIYYCARALTYYDYEFAYWGQGTLVTVSA

SEQ ID NO: 13314 - protein, 119 aa, Artificial Sequence
  source: /note="Description of Artificial Sequence: Synthetic polypeptide"
QVQLKQSGPGLVQPSQSLSITCTVSGFHLTNYGVHWVRQSPGKGLEWLGVIWSGGNTDYNTPFTSRLSINKDNSKSQVFFKMNSLQSNDTAIYYCARALTYYDYEFAYWGQGTLVTVSA

SEQ ID NO: 13315 - protein, 119 aa, Artificial Sequence
  source: /note="Description of Artificial Sequence: Synthetic polypeptide"
QVQLKQSGPGLVQPSQSLSITCTVSGFRLTNYGVHWVRQSPGKGLEWLGVIWSGGNTDYNTPFTSRLSINKDNSKSQVFFKMNSLQSNDTAIYYCARALTYYDYEFAYWGQGTLVTVSA

SEQ ID NO: 13316 - protein, 119 aa, Artificial Sequence
  source: /note="Description of Artificial Sequence: Synthetic polypeptide"
QVQLKQSGPGLVQPSQSLSITCTVSGFALTNYGVHWVRQSPGKGLEWLGVIWSGGNTDYNTPFTSRLSINKDNSKSQVFFKMNSLQSNDTAIYYCARALTYYDYEFAYWGQGTLVTVSA

SEQ ID NO: 13317 - protein, 119 aa, Artificial Sequence
  source: /note="Description of Artificial Sequence: Synthetic polypeptide"
QVQLKQSGPGLVQPSQSLSITCTVSGFDLTNYGVHWVRQSPGKGLEWLGVIWSGGNTDYNTPFTSRLSINKDNSKSQVFFKMNSLQSNDTAIYYCARALTYYDYEFAYWGQGTLVTVSA

SEQ ID NO: 13318 - protein, 119 aa, Artificial Sequence
  source: /note="Description of Artificial Sequence: Synthetic polypeptide"
QVQLKQSGPGLVQPSQSLSITCTVSGFILTNYGVHWVRQSPGKGLEWLGVIWSGGNTDYNTPFTSRLSINKDNSKSQVFFKMNSLQSNDTAIYYCARALTYYDYEFAYWGQGTLVTVSA

SEQ ID NO: 13319 - protein, 119 aa, Artificial Sequence
  source: /note="Description of Artificial Sequence: Synthetic polypeptide"
QVQLKQSGPGLVQPSQSLSITCTVSGFMLTNYGVHWVRQSPGKGLEWLGVIWSGGNTDYNTPFTSRLSINKDNSKSQVFFKMNSLQSNDTAIYYCARALTYYDYEFAYWGQGTLVTVSA

SEQ ID NO: 13320 - protein, 119 aa, Artificial Sequence
  source: /note="Description of Artificial Sequence: Synthetic polypeptide"
QVQLKQSGPGLVQPSQSLSITCTVSGFPLTNYGVHWVRQSPGKGLEWLGVIWSGGNTDYNTPFTSRLSINKDNSKSQVFFKMNSLQSNDTAIYYCARALTYYDYEFAYWGQGTLVTVSA

SEQ ID NO: 13321 - protein, 119 aa, Artificial Sequence
  source: /note="Description of Artificial Sequence: Synthetic polypeptide"
QVQLKQSGPGLVQPSQSLSITCTVSGFQLTNYGVHWVRQSPGKGLEWLGVIWSGGNTDYNTPFTSRLSINKDNSKSQVFFKMNSLQSNDTAIYYCARALTYYDYEFAYWGQGTLVTVSA

SEQ ID NO: 13322 - protein, 119 aa, Artificial Sequence
  source: /note="Description of Artificial Sequence: Synthetic polypeptide"
QVQLKQSGPGLVQPSQSLSITCTVSGFVLTNYGVHWVRQSPGKGLEWLGVIWSGGNTDYNTPFTSRLSINKDNSKSQVFFKMNSLQSNDTAIYYCARALTYYDYEFAYWGQGTLVTVSA

SEQ ID NO: 13323 - protein, 119 aa, Artificial Sequence
  source: /note="Description of Artificial Sequence: Synthetic polypeptide"
QVQLKQSGPGLVQPSQSLSITCTVSGFWLTNYGVHWVRQSPGKGLEWLGVIWSGGNTDYNTPFTSRLSINKDNSKSQVFFKMNSLQSNDTAIYYCARALTYYDYEFAYWGQGTLVTVSA

SEQ ID NO: 13324 - protein, 119 aa, Artificial Sequence
  source: /note="Description of Artificial Sequence: Synthetic polypeptide"
QVQLKQSGPGLVQPSQSLSITCTVSGFLLTNYGVHWVRQSPGKGLEWLGVIWSGGNTDYNTPFTSRLSINKDNSKSQVFFKMNSLQSNDTAIYYCARALTYYDYEFAYWGQGTLVTVSA

SEQ ID NO: 13325 - protein, 119 aa, Artificial Sequence
  source: /note="Description of Artificial Sequence: Synthetic polypeptide"
QVQLKQSGPGLVQPSQSLSITCTVSGFSKTNYGVHWVRQSPGKGLEWLGVIWSGGNTDYNTPFTSRLSINKDNSKSQVFFKMNSLQSNDTAIYYCARALTYYDYEFAYWGQGTLVTVSA

SEQ ID NO: 13326 - protein, 119 aa, Artificial Sequence
  source: /note="Description of Artificial Sequence: Synthetic polypeptide"
QVQLKQSGPGLVQPSQSLSITCTVSGFSHTNYGVHWVRQSPGKGLEWLGVIWSGGNTDYNTPFTSRLSINKDNSKSQVFFKMNSLQSNDTAIYYCARALTYYDYEFAYWGQGTLVTVSA

SEQ ID NO: 13327 - protein, 119 aa, Artificial Sequence
  source: /note="Description of Artificial Sequence: Synthetic polypeptide"
QVQLKQSGPGLVQPSQSLSITCTVSGFSATNYGVHWVRQSPGKGLEWLGVIWSGGNTDYNTPFTSRLSINKDNSKSQVFFKMNSLQSNDTAIYYCARALTYYDYEFAYWGQGTLVTVSA

SEQ ID NO: 13328 - protein, 119 aa, Artificial Sequence
  source: /note="Description of Artificial Sequence: Synthetic polypeptide"
QVQLKQSGPGLVQPSQSLSITCTVSGFSDTNYGVHWVRQSPGKGLEWLGVIWSGGNTDYNTPFTSRLSINKDNSKSQVFFKMNSLQSNDTAIYYCARALTYYDYEFAYWGQGTLVTVSA

SEQ ID NO: 13329 - protein, 119 aa, Artificial Sequence
  source: /note="Description of Artificial Sequence: Synthetic polypeptide"
QVQLKQSGPGLVQPSQSLSITCTVSGFSGTNYGVHWVRQSPGKGLEWLGVIWSGGNTDYNTPFTSRLSINKDNSKSQVFFKMNSLQSNDTAIYYCARALTYYDYEFAYWGQGTLVTVSA

SEQ ID NO: 13330 - protein, 119 aa, Artificial Sequence
  source: /note="Description of Artificial Sequence: Synthetic polypeptide"
QVQLKQSGPGLVQPSQSLSITCTVSGFSITNYGVHWVRQSPGKGLEWLGVIWSGGNTDYNTPFTSRLSINKDNSKSQVFFKMNSLQSNDTAIYYCARALTYYDYEFAYWGQGTLVTVSA

SEQ ID NO: 13331 - protein, 119 aa, Artificial Sequence
  source: /note="Description of Artificial Sequence: Synthetic polypeptide"
QVQLKQSGPGLVQPSQSLSITCTVSGFSMTNYGVHWVRQSPGKGLEWLGVIWSGGNTDYNTPFTSRLSINKDNSKSQVFFKMNSLQSNDTAIYYCARALTYYDYEFAYWGQGTLVTVSA

SEQ ID NO: 13332 - protein, 119 aa, Artificial Sequence
  source: /note="Description of Artificial Sequence: Synthetic polypeptide"
QVQLKQSGPGLVQPSQSLSITCTVSGFSNTNYGVHWVRQSPGKGLEWLGVIWSGGNTDYNTPFTSRLSINKDNSKSQVFFKMNSLQSNDTAIYYCARALTYYDYEFAYWGQGTLVTVSA

SEQ ID NO: 13333 - protein, 119 aa, Artificial Sequence
  source: /note="Description of Artificial Sequence: Synthetic polypeptide"
QVQLKQSGPGLVQPSQSLSITCTVSGFSSTNYGVHWVRQSPGKGLEWLGVIWSGGNTDYNTPFTSRLSINKDNSKSQVFFKMNSLQSNDTAIYYCARALTYYDYEFAYWGQGTLVTVSA

SEQ ID NO: 13334 - protein, 119 aa, Artificial Sequence
  source: /note="Description of Artificial Sequence: Synthetic polypeptide"
QVQLKQSGPGLVQPSQSLSITCTVSGFSVTNYGVHWVRQSPGKGLEWLGVIWSGGNTDYNTPFTSRLSINKDNSKSQVFFKMNSLQSNDTAIYYCARALTYYDYEFAYWGQGTLVTVSA

SEQ ID NO: 13335 - protein, 119 aa, Artificial Sequence
  source: /note="Description of Artificial Sequence: Synthetic polypeptide"
QVQLKQSGPGLVQPSQSLSITCTVSGFSLHNYGVHWVRQSPGKGLEWLGVIWSGGNTDYNTPFTSRLSINKDNSKSQVFFKMNSLQSNDTAIYYCARALTYYDYEFAYWGQGTLVTVSA

SEQ ID NO: 13336 - protein, 119 aa, Artificial Sequence
  source: /note="Description of Artificial Sequence: Synthetic polypeptide"
QVQLKQSGPGLVQPSQSLSITCTVSGFSLRNYGVHWVRQSPGKGLEWLGVIWSGGNTDYNTPFTSRLSINKDNSKSQVFFKMNSLQSNDTAIYYCARALTYYDYEFAYWGQGTLVTVSA

SEQ ID NO: 13337 - protein, 119 aa, Artificial Sequence
  source: /note="Description of Artificial Sequence: Synthetic polypeptide"
QVQLKQSGPGLVQPSQSLSITCTVSGFSLDNYGVHWVRQSPGKGLEWLGVIWSGGNTDYNTPFTSRLSINKDNSKSQVFFKMNSLQSNDTAIYYCARALTYYDYEFAYWGQGTLVTVSA

SEQ ID NO: 13338 - protein, 119 aa, Artificial Sequence
  source: /note="Description of Artificial Sequence: Synthetic polypeptide"
QVQLKQSGPGLVQPSQSLSITCTVSGFSLGNYGVHWVRQSPGKGLEWLGVIWSGGNTDYNTPFTSRLSINKDNSKSQVFFKMNSLQSNDTAIYYCARALTYYDYEFAYWGQGTLVTVSA

SEQ ID NO: 13339 - protein, 119 aa, Artificial Sequence
  source: /note="Description of Artificial Sequence: Synthetic polypeptide"
QVQLKQSGPGLVQPSQSLSITCTVSGFSLINYGVHWVRQSPGKGLEWLGVIWSGGNTDYNTPFTSRLSINKDNSKSQVFFKMNSLQSNDTAIYYCARALTYYDYEFAYWGQGTLVTVSA

SEQ ID NO: 13340 - protein, 119 aa, Artificial Sequence
  source: /note="Description of Artificial Sequence: Synthetic polypeptide"
QVQLKQSGPGLVQPSQSLSITCTVSGFSLMNYGVHWVRQSPGKGLEWLGVIWSGGNTDYNTPFTSRLSINKDNSKSQVFFKMNSLQSNDTAIYYCARALTYYDYEFAYWGQGTLVTVSA

SEQ ID NO: 13341 - protein, 119 aa, Artificial Sequence
  source: /note="Description of Artificial Sequence: Synthetic polypeptide"
QVQLKQSGPGLVQPSQSLSITCTVSGFSLNNYGVHWVRQSPGKGLEWLGVIWSGGNTDYNTPFTSRLSINKDNSKSQVFFKMNSLQSNDTAIYYCARALTYYDYEFAYWGQGTLVTVSA

SEQ ID NO: 13342 - protein, 119 aa, Artificial Sequence
  source: /note="Description of Artificial Sequence: Synthetic polypeptide"
QVQLKQSGPGLVQPSQSLSITCTVSGFSLPNYGVHWVRQSPGKGLEWLGVIWSGGNTDYNTPFTSRLSINKDNSKSQVFFKMNSLQSNDTAIYYCARALTYYDYEFAYWGQGTLVTVSA

SEQ ID NO: 13343 - protein, 119 aa, Artificial Sequence
  source: /note="Description of Artificial Sequence: Synthetic polypeptide"
QVQLKQSGPGLVQPSQSLSITCTVSGFSLSNYGVHWVRQSPGKGLEWLGVIWSGGNTDYNTPFTSRLSINKDNSKSQVFFKMNSLQSNDTAIYYCARALTYYDYEFAYWGQGTLVTVSA

SEQ ID NO: 13344 - protein, 119 aa, Artificial Sequence
  source: /note="Description of Artificial Sequence: Synthetic polypeptide"
QVQLKQSGPGLVQPSQSLSITCTVSGFSLVNYGVHWVRQSPGKGLEWLGVIWSGGNTDYNTPFTSRLSINKDNSKSQVFFKMNSLQSNDTAIYYCARALTYYDYEFAYWGQGTLVTVSA

SEQ ID NO: 13345 - protein, 119 aa, Artificial Sequence
  source: /note="Description of Artificial Sequence: Synthetic polypeptide"
QVQLKQSGPGLVQPSQSLSITCTVSGFSLWNYGVHWVRQSPGKGLEWLGVIWSGGNTDYNTPFTSRLSINKDNSKSQVFFKMNSLQSNDTAIYYCARALTYYDYEFAYWGQGTLVTVSA

SEQ ID NO: 13346 - protein, 119 aa, Artificial Sequence
  source: /note="Description of Artificial Sequence: Synthetic polypeptide"
QVQLKQSGPGLVQPSQSLSITCTVSGFSLYNYGVHWVRQSPGKGLEWLGVIWSGGNTDYNTPFTSRLSINKDNSKSQVFFKMNSLQSNDTAIYYCARALTYYDYEFAYWGQGTLVTVSA

SEQ ID NO: 13347 - protein, 119 aa, Artificial Sequence
  source: /note="Description of Artificial Sequence: Synthetic polypeptide"
QVQLKQSGPGLVQPSQSLSITCTVSGFSLTKYGVHWVRQSPGKGLEWLGVIWSGGNTDYNTPFTSRLSINKDNSKSQVFFKMNSLQSNDTAIYYCARALTYYDYEFAYWGQGTLVTVSA

SEQ ID NO: 13348 - protein, 119 aa, Artificial Sequence
  source: /note="Description of Artificial Sequence: Synthetic polypeptide"
QVQLKQSGPGLVQPSQSLSITCTVSGFSLTHYGVHWVRQSPGKGLEWLGVIWSGGNTDYNTPFTSRLSINKDNSKSQVFFKMNSLQSNDTAIYYCARALTYYDYEFAYWGQGTLVTVSA

SEQ ID NO: 13349 - protein, 119 aa, Artificial Sequence
  source: /note="Description of Artificial Sequence: Synthetic polypeptide"
QVQLKQSGPGLVQPSQSLSITCTVSGFSLTDYGVHWVRQSPGKGLEWLGVIWSGGNTDYNTPFTSRLSINKDNSKSQVFFKMNSLQSNDTAIYYCARALTYYDYEFAYWGQGTLVTVSA

SEQ ID NO: 13350 - protein, 119 aa, Artificial Sequence
  source: /note="Description of Artificial Sequence: Synthetic polypeptide"
QVQLKQSGPGLVQPSQSLSITCTVSGFSLTEYGVHWVRQSPGKGLEWLGVIWSGGNTDYNTPFTSRLSINKDNSKSQVFFKMNSLQSNDTAIYYCARALTYYDYEFAYWGQGTLVTVSA

SEQ ID NO: 13351 - protein, 119 aa, Artificial Sequence
  source: /note="Description of Artificial Sequence: Synthetic polypeptide"
QVQLKQSGPGLVQPSQSLSITCTVSGFSLTGYGVHWVRQSPGKGLEWLGVIWSGGNTDYNTPFTSRLSINKDNSKSQVFFKMNSLQSNDTAIYYCARALTYYDYEFAYWGQGTLVTVSA

SEQ ID NO: 13352 - protein, 119 aa, Artificial Sequence
  source: /note="Description of Artificial Sequence: Synthetic polypeptide"
QVQLKQSGPGLVQPSQSLSITCTVSGFSLTIYGVHWVRQSPGKGLEWLGVIWSGGNTDYNTPFTSRLSINKDNSKSQVFFKMNSLQSNDTAIYYCARALTYYDYEFAYWGQGTLVTVSA

SEQ ID NO: 13353 - protein, 119 aa, Artificial Sequence
  source: /note="Description of Artificial Sequence: Synthetic polypeptide"
QVQLKQSGPGLVQPSQSLSITCTVSGFSLTTYGVHWVRQSPGKGLEWLGVIWSGGNTDYNTPFTSRLSINKDNSKSQVFFKMNSLQSNDTAIYYCARALTYYDYEFAYWGQGTLVTVSA

SEQ ID NO: 13354 - protein, 119 aa, Artificial Sequence
  source: /note="Description of Artificial Sequence: Synthetic polypeptide"
QVQLKQSGPGLVQPSQSLSITCTVSGFSLTVYGVHWVRQSPGKGLEWLGVIWSGGNTDYNTPFTSRLSINKDNSKSQVFFKMNSLQSNDTAIYYCARALTYYDYEFAYWGQGTLVTVSA

SEQ ID NO: 13355 - protein, 119 aa, Artificial Sequence
  source: /note="Description of Artificial Sequence: Synthetic polypeptide"
QVQLKQSGPGLVQPSQSLSITCTVSGFSLTLYGVHWVRQSPGKGLEWLGVIWSGGNTDYNTPFTSRLSINKDNSKSQVFFKMNSLQSNDTAIYYCARALTYYDYEFAYWGQGTLVTVSA

SEQ ID NO: 13356 - protein, 119 aa, Artificial Sequence
  source: /note="Description of Artificial Sequence: Synthetic polypeptide"
QVQLKQSGPGLVQPSQSLSITCTVSGFSLTNHGVHWVRQSPGKGLEWLGVIWSGGNTDYNTPFTSRLSINKDNSKSQVFFKMNSLQSNDTAIYYCARALTYYDYEFAYWGQGTLVTVSA

SEQ ID NO: 13357 - protein, 119 aa, Artificial Sequence
  source: /note="Description of Artificial Sequence: Synthetic polypeptide"
QVQLKQSGPGLVQPSQSLSITCTVSGFSLTNRGVHWVRQSPGKGLEWLGVIWSGGNTDYNTPFTSRLSINKDNSKSQVFFKMNSLQSNDTAIYYCARALTYYDYEFAYWGQGTLVTVSA

SEQ ID NO: 13358 - protein, 119 aa, Artificial Sequence
  source: /note="Description of Artificial Sequence: Synthetic polypeptide"
QVQLKQSGPGLVQPSQSLSITCTVSGFSLTNCGVHWVRQSPGKGLEWLGVIWSGGNTDYNTPFTSRLSINKDNSKSQVFFKMNSLQSNDTAIYYCARALTYYDYEFAYWGQGTLVTVSA

SEQ ID NO: 13359 - protein, 119 aa, Artificial Sequence
  source: /note="Description of Artificial Sequence: Synthetic polypeptide"
QVQLKQSGPGLVQPSQSLSITCTVSGFSLTNMGVHWVRQSPGKGLEWLGVIWSGGNTDYNTPFTSRLSINKDNSKSQVFFKMNSLQSNDTAIYYCARALTYYDYEFAYWGQGTLVTVSA

SEQ ID NO: 13360 - protein, 119 aa, Artificial Sequence
  source: /note="Description of Artificial Sequence: Synthetic polypeptide"
QVQLKQSGPGLVQPSQSLSITCTVSGFSLTNNGVHWVRQSPGKGLEWLGVIWSGGNTDYNTPFTSRLSINKDNSKSQVFFKMNSLQSNDTAIYYCARALTYYDYEFAYWGQGTLVTVSA

SEQ ID NO: 13361 - protein, 119 aa, Artificial Sequence
  source: /note="Description of Artificial Sequence: Synthetic polypeptide"
QVQLKQSGPGLVQPSQSLSITCTVSGFSLTNTGVHWVRQSPGKGLEWLGVIWSGGNTDYNTPFTSRLSINKDNSKSQVFFKMNSLQSNDTAIYYCARALTYYDYEFAYWGQGTLVTVSA

SEQ ID NO: 13362 - protein, 119 aa, Artificial Sequence
  source: /note="Description of Artificial Sequence: Synthetic polypeptide"
QVQLKQSGPGLVQPSQSLSITCTVSGFSLTNVGVHWVRQSPGKGLEWLGVIWSGGNTDYNTPFTSRLSINKDNSKSQVFFKMNSLQSNDTAIYYCARALTYYDYEFAYWGQGTLVTVSA

SEQ ID NO: 13363 - protein, 119 aa, Artificial Sequence
  source: /note="Description of Artificial Sequence: Synthetic polypeptide"
QVQLKQSGPGLVQPSQSLSITCTVSGFSLTNLGVHWVRQSPGKGLEWLGVIWSGGNTDYNTPFTSRLSINKDNSKSQVFFKMNSLQSNDTAIYYCARALTYYDYEFAYWGQGTLVTVSA

SEQ ID NO: 13364 - protein, 119 aa, Artificial Sequence
  source: /note="Description of Artificial Sequence: Synthetic polypeptide"
QVQLKQSGPGLVQPSQSLSITCTVSGFSLTNYEVHWVRQSPGKGLEWLGVIWSGGNTDYNTPFTSRLSINKDNSKSQVFFKMNSLQSNDTAIYYCARALTYYDYEFAYWGQGTLVTVSA

SEQ ID NO: 13365 - protein, 119 aa, Artificial Sequence
  source: /note="Description of Artificial Sequence: Synthetic polypeptide"
QVQLKQSGPGLVQPSQSLSITCTVSGFSLTNYMVHWVRQSPGKGLEWLGVIWSGGNTDYNTPFTSRLSINKDNSKSQVFFKMNSLQSNDTAIYYCARALTYYDYEFAYWGQGTLVTVSA

SEQ ID NO: 13366 - protein, 119 aa, Artificial Sequence
  source: /note="Description of Artificial Sequence: Synthetic polypeptide"
QVQLKQSGPGLVQPSQSLSITCTVSGFSLTNYSVHWVRQSPGKGLEWLGVIWSGGNTDYNTPFTSRLSINKDNSKSQVFFKMNSLQSNDTAIYYCARALTYYDYEFAYWGQGTLVTVSA

SEQ ID NO: 13367 - protein, 119 aa, Artificial Sequence
  source: /note="Description of Artificial Sequence: Synthetic polypeptide"
QVQLKQSGPGLVQPSQSLSITCTVSGFSLTNYTVHWVRQSPGKGLEWLGVIWSGGNTDYNTPFTSRLSINKDNSKSQVFFKMNSLQSNDTAIYYCARALTYYDYEFAYWGQGTLVTVSA

SEQ ID NO: 13368 - protein, 119 aa, Artificial Sequence
  source: /note="Description of Artificial Sequence: Synthetic polypeptide"
QVQLKQSGPGLVQPSQSLSITCTVSGFSLTNYYVHWVRQSPGKGLEWLGVIWSGGNTDYNTPFTSRLSINKDNSKSQVFFKMNSLQSNDTAIYYCARALTYYDYEFAYWGQGTLVTVSA

SEQ ID NO: 13369 - protein, 119 aa, Artificial Sequence
  source: /note="Description of Artificial Sequence: Synthetic polypeptide"
QVQLKQSGPGLVQPSQSLSITCTVSGFSLTNYGAHWVRQSPGKGLEWLGVIWSGGNTDYNTPFTSRLSINKDNSKSQVFFKMNSLQSNDTAIYYCARALTYYDYEFAYWGQGTLVTVSA

SEQ ID NO: 13370 - protein, 119 aa, Artificial Sequence
  source: /note="Description of Artificial Sequence: Synthetic polypeptide"
QVQLKQSGPGLVQPSQSLSITCTVSGFSLTNYGCHWVRQSPGKGLEWLGVIWSGGNTDYNTPFTSRLSINKDNSKSQVFFKMNSLQSNDTAIYYCARALTYYDYEFAYWGQGTLVTVSA

SEQ ID NO: 13371 - protein, 119 aa, Artificial Sequence
  source: /note="Description of Artificial Sequence: Synthetic polypeptide"
QVQLKQSGPGLVQPSQSLSITCTVSGFSLTNYGIHWVRQSPGKGLEWLGVIWSGGNTDYNTPFTSRLSINKDNSKSQVFFKMNSLQSNDTAIYYCARALTYYDYEFAYWGQGTLVTVSA

SEQ ID NO: 13372 - protein, 119 aa, Artificial Sequence
  source: /note="Description of Artificial Sequence: Synthetic polypeptide"
QVQLKQSGPGLVQPSQSLSITCTVSGFSLTNYGMHWVRQSPGKGLEWLGVIWSGGNTDYNTPFTSRLSINKDNSKSQVFFKMNSLQSNDTAIYYCARALTYYDYEFAYWGQGTLVTVSA

SEQ ID NO: 13373 - protein, 119 aa, Artificial Sequence
  source: /note="Description of Artificial Sequence: Synthetic polypeptide"
QVQLKQSGPGLVQPSQSLSITCTVSGFSLTNYGPHWVRQSPGKGLEWLGVIWSGGNTDYNTPFTSRLSINKDNSKSQVFFKMNSLQSNDTAIYYCARALTYYDYEFAYWGQGTLVTVSA

SEQ ID NO: 13374 - protein, 119 aa, Artificial Sequence
  source: /note="Description of Artificial Sequence: Synthetic polypeptide"
QVQLKQSGPGLVQPSQSLSITCTVSGFSLTNYGLHWVRQSPGKGLEWLGVIWSGGNTDYNTPFTSRLSINKDNSKSQVFFKMNSLQSNDTAIYYCARALTYYDYEFAYWGQGTLVTVSA

SEQ ID NO: 13375 - protein, 119 aa, Artificial Sequence
  source: /note="Description of Artificial Sequence: Synthetic polypeptide"
QVQLKQSGPGLVQPSQSLSITCTVSGFSLTNYGVIWVRQSPGKGLEWLGVIWSGGNTDYNTPFTSRLSINKDNSKSQVFFKMNSLQSNDTAIYYCARALTYYDYEFAYWGQGTLVTVSA

SEQ ID NO: 13376 - protein, 119 aa, Artificial Sequence
  source: /note="Description of Artificial Sequence: Synthetic polypeptide"
QVQLKQSGPGLVQPSQSLSITCTVSGFSLTNYGVQWVRQSPGKGLEWLGVIWSGGNTDYNTPFTSRLSINKDNSKSQVFFKMNSLQSNDTAIYYCARALTYYDYEFAYWGQGTLVTVSA

SEQ ID NO: 13377 - protein, 119 aa, Artificial Sequence
  source: /note="Description of Artificial Sequence: Synthetic polypeptide"
QVQLKQSGPGLVQPSQSLSITCTVSGFSLTNYGVHKVRQSPGKGLEWLGVIWSGGNTDYNTPFTSRLSINKDNSKSQVFFKMNSLQSNDTAIYYCARALTYYDYEFAYWGQGTLVTVSA

SEQ ID NO: 13378 - protein, 119 aa, Artificial Sequence
  source: /note="Description of Artificial Sequence: Synthetic polypeptide"
QVQLKQSGPGLVQPSQSLSITCTVSGFSLTNYGVHAVRQSPGKGLEWLGVIWSGGNTDYNTPFTSRLSINKDNSKSQVFFKMNSLQSNDTAIYYCARALTYYDYEFAYWGQGTLVTVSA

SEQ ID NO: 13379 - protein, 119 aa, Artificial Sequence
  source: /note="Description of Artificial Sequence: Synthetic polypeptide"
QVQLKQSGPGLVQPSQSLSITCTVSGFSLTNYGVHIVRQSPGKGLEWLGVIWSGGNTDYNTPFTSRLSINKDNSKSQVFFKMNSLQSNDTAIYYCARALTYYDYEFAYWGQGTLVTVSA

SEQ ID NO: 13380 - protein, 119 aa, Artificial Sequence
  source: /note="Description of Artificial Sequence: Synthetic polypeptide"
QVQLKQSGPGLVQPSQSLSITCTVSGFSLTNYGVHVVRQSPGKGLEWLGVIWSGGNTDYNTPFTSRLSINKDNSKSQVFFKMNSLQSNDTAIYYCARALTYYDYEFAYWGQGTLVTVSA

SEQ ID NO: 13381 - protein, 119 aa, Artificial Sequence
  source: /note="Description of Artificial Sequence: Synthetic polypeptide"
QVQLKQSGPGLVQPSQSLSITCTVSGFSLTNYGVHYVRQSPGKGLEWLGVIWSGGNTDYNTPFTSRLSINKDNSKSQVFFKMNSLQSNDTAIYYCARALTYYDYEFAYWGQGTLVTVSA

SEQ ID NO: 13382 - protein, 119 aa, Artificial Sequence
  source: /note="Description of Artificial Sequence: Synthetic polypeptide"
QVQLKQSGPGLVQPSQSLSITCTVSGFSLTNYGVHWVRQSPGKGLEWLGKIWSGGNTDYNTPFTSRLSINKDNSKSQVFFKMNSLQSNDTAIYYCARALTYYDYEFAYWGQGTLVTVSA

SEQ ID NO: 13383 - protein, 119 aa, Artificial Sequence
  source: /note="Description of Artificial Sequence: Synthetic polypeptide"
QVQLKQSGPGLVQPSQSLSITCTVSGFSLTNYGVHWVRQSPGKGLEWLGHIWSGGNTDYNTPFTSRLSINKDNSKSQVFFKMNSLQSNDTAIYYCARALTYYDYEFAYWGQGTLVTVSA

SEQ ID NO: 13384 - protein, 119 aa, Artificial Sequence
  source: /note="Description of Artificial Sequence: Synthetic polypeptide"
QVQLKQSGPGLVQPSQSLSITCTVSGFSLTNYGVHWVRQSPGKGLEWLGAIWSGGNTDYNTPFTSRLSINKDNSKSQVFFKMNSLQSNDTAIYYCARALTYYDYEFAYWGQGTLVTVSA

SEQ ID NO: 13385 - protein, 119 aa, Artificial Sequence
  source: /note="Description of Artificial Sequence: Synthetic polypeptide"
QVQLKQSGPGLVQPSQSLSITCTVSGFSLTNYGVHWVRQSPGKGLEWLGDIWSGGNTDYNTPFTSRLSINKDNSKSQVFFKMNSLQSNDTAIYYCARALTYYDYEFAYWGQGTLVTVSA

SEQ ID NO: 13386 - protein, 119 aa, Artificial Sequence
  source: /note="Description of Artificial Sequence: Synthetic polypeptide"
QVQLKQSGPGLVQPSQSLSITCTVSGFSLTNYGVHWVRQSPGKGLEWLGEIWSGGNTDYNTPFTSRLSINKDNSKSQVFFKMNSLQSNDTAIYYCARALTYYDYEFAYWGQGTLVTVSA

SEQ ID NO: 13387 - protein, 119 aa, Artificial Sequence
  source: /note="Description of Artificial Sequence: Synthetic polypeptide"
QVQLKQSGPGLVQPSQSLSITCTVSGFSLTNYGVHWVRQSPGKGLEWLGGIWSGGNTDYNTPFTSRLSINKDNSKSQVFFKMNSLQSNDTAIYYCARALTYYDYEFAYWGQGTLVTVSA

SEQ ID NO: 13388 - protein, 119 aa, Artificial Sequence
  source: /note="Description of Artificial Sequence: Synthetic polypeptide"
QVQLKQSGPGLVQPSQSLSITCTVSGFSLTNYGVHWVRQSPGKGLEWLGIIWSGGNTDYNTPFTSRLSINKDNSKSQVFFKMNSLQSNDTAIYYCARALTYYDYEFAYWGQGTLVTVSA

SEQ ID NO: 13389 - protein, 119 aa, Artificial Sequence
  source: /note="Description of Artificial Sequence: Synthetic polypeptide"
QVQLKQSGPGLVQPSQSLSITCTVSGFSLTNYGVHWVRQSPGKGLEWLGNIWSGGNTDYNTPFTSRLSINKDNSKSQVFFKMNSLQSNDTAIYYCARALTYYDYEFAYWGQGTLVTVSA

SEQ ID NO: 13390 - protein, 119 aa, Artificial Sequence
  source: /note="Description of Artificial Sequence: Synthetic polypeptide"
QVQLKQSGPGLVQPSQSLSITCTVSGFSLTNYGVHWVRQSPGKGLEWLGQIWSGGNTDYNTPFTSRLSINKDNSKSQVFFKMNSLQSNDTAIYYCARALTYYDYEFAYWGQGTLVTVSA

SEQ ID NO: 13391 - protein, 119 aa, Artificial Sequence
  source: /note="Description of Artificial Sequence: Synthetic polypeptide"
QVQLKQSGPGLVQPSQSLSITCTVSGFSLTNYGVHWVRQSPGKGLEWLGTIWSGGNTDYNTPFTSRLSINKDNSKSQVFFKMNSLQSNDTAIYYCARALTYYDYEFAYWGQGTLVTVSA

SEQ ID NO: 13392 - protein, 119 aa, Artificial Sequence
  source: /note="Description of Artificial Sequence: Synthetic polypeptide"
QVQLKQSGPGLVQPSQSLSITCTVSGFSLTNYGVHWVRQSPGKGLEWLGLIWSGGNTDYNTPFTSRLSINKDNSKSQVFFKMNSLQSNDTAIYYCARALTYYDYEFAYWGQGTLVTVSA

SEQ ID NO: 13393 - protein, 119 aa, Artificial Sequence
  source: /note="Description of Artificial Sequence: Synthetic polypeptide"
QVQLKQSGPGLVQPSQSLSITCTVSGFSLTNYGVHWVRQSPGKGLEWLGVKWSGGNTDYNTPFTSRLSINKDNSKSQVFFKMNSLQSNDTAIYYCARALTYYDYEFAYWGQGTLVTVSA

SEQ ID NO: 13394 - protein, 119 aa, Artificial Sequence
  source: /note="Description of Artificial Sequence: Synthetic polypeptide"
QVQLKQSGPGLVQPSQSLSITCTVSGFSLTNYGVHWVRQSPGKGLEWLGVHWSGGNTDYNTPFTSRLSINKDNSKSQVFFKMNSLQSNDTAIYYCARALTYYDYEFAYWGQGTLVTVSA

SEQ ID NO: 13395 - protein, 119 aa, Artificial Sequence
  source: /note="Description of Artificial Sequence: Synthetic polypeptide"
QVQLKQSGPGLVQPSQSLSITCTVSGFSLTNYGVHWVRQSPGKGLEWLGVAWSGGNTDYNTPFTSRLSINKDNSKSQVFFKMNSLQSNDTAIYYCARALTYYDYEFAYWGQGTLVTVSA

SEQ ID NO: 13396 - protein, 119 aa, Artificial Sequence
  source: /note="Description of Artificial Sequence: Synthetic polypeptide"
QVQLKQSGPGLVQPSQSLSITCTVSGFSLTNYGVHWVRQSPGKGLEWLGVCWSGGNTDYNTPFTSRLSINKDNSKSQVFFKMNSLQSNDTAIYYCARALTYYDYEFAYWGQGTLVTVSA

SEQ ID NO: 13397 - protein, 119 aa, Artificial Sequence
  source: /note="Description of Artificial Sequence: Synthetic polypeptide"
QVQLKQSGPGLVQPSQSLSITCTVSGFSLTNYGVHWVRQSPGKGLEWLGVEWSGGNTDYNTPFTSRLSINKDNSKSQVFFKMNSLQSNDTAIYYCARALTYYDYEFAYWGQGTLVTVSA

SEQ ID NO: 13398 - protein, 119 aa, Artificial Sequence
  source: /note="Description of Artificial Sequence: Synthetic polypeptide"
QVQLKQSGPGLVQPSQSLSITCTVSGFSLTNYGVHWVRQSPGKGLEWLGVGWSGGNTDYNTPFTSRLSINKDNSKSQVFFKMNSLQSNDTAIYYCARALTYYDYEFAYWGQGTLVTVSA

SEQ ID NO: 13399 - protein, 119 aa, Artificial Sequence
  source: /note="Description of Artificial Sequence: Synthetic polypeptide"
QVQLKQSGPGLVQPSQSLSITCTVSGFSLTNYGVHWVRQSPGKGLEWLGVNWSGGNTDYNTPFTSRLSINKDNSKSQVFFKMNSLQSNDTAIYYCARALTYYDYEFAYWGQGTLVTVSA

SEQ ID NO: 13400 - protein, 119 aa, Artificial Sequence
  source: /note="Description of Artificial Sequence: Synthetic polypeptide"
QVQLKQSGPGLVQPSQSLSITCTVSGFSLTNYGVHWVRQSPGKGLEWLGVQWSGGNTDYNTPFTSRLSINKDNSKSQVFFKMNSLQSNDTAIYYCARALTYYDYEFAYWGQGTLVTVSA

SEQ ID NO: 13401 - protein, 119 aa, Artificial Sequence
  source: /note="Description of Artificial Sequence: Synthetic polypeptide"
QVQLKQSGPGLVQPSQSLSITCTVSGFSLTNYGVHWVRQSPGKGLEWLGVSWSGGNTDYNTPFTSRLSINKDNSKSQVFFKMNSLQSNDTAIYYCARALTYYDYEFAYWGQGTLVTVSA

SEQ ID NO: 13402 - protein, 119 aa, Artificial Sequence
  source: /note="Description of Artificial Sequence: Synthetic polypeptide"
QVQLKQSGPGLVQPSQSLSITCTVSGFSLTNYGVHWVRQSPGKGLEWLGVVWSGGNTDYNTPFTSRLSINKDNSKSQVFFKMNSLQSNDTAIYYCARALTYYDYEFAYWGQGTLVTVSA

SEQ ID NO: 13403 - protein, 119 aa, Artificial Sequence
  source: /note="Description of Artificial Sequence: Synthetic polypeptide"
QVQLKQSGPGLVQPSQSLSITCTVSGFSLTNYGVHWVRQSPGKGLEWLGVYWSGGNTDYNTPFTSRLSINKDNSKSQVFFKMNSLQSNDTAIYYCARALTYYDYEFAYWGQGTLVTVSA

SEQ ID NO: 13404 - protein, 119 aa, Artificial Sequence
  source: /note="Description of Artificial Sequence: Synthetic polypeptide"
QVQLKQSGPGLVQPSQSLSITCTVSGFSLTNYGVHWVRQSPGKGLEWLGVLWSGGNTDYNTPFTSRLSINKDNSKSQVFFKMNSLQSNDTAIYYCARALTYYDYEFAYWGQGTLVTVSA

SEQ ID NO: 13405 - protein, 119 aa, Artificial Sequence
  source: /note="Description of Artificial Sequence: Synthetic polypeptide"
QVQLKQSGPGLVQPSQSLSITCTVSGFSLTNYGVHWVRQSPGKGLEWLGVIISGGNTDYNTPFTSRLSINKDNSKSQVFFKMNSLQSNDTAIYYCARALTYYDYEFAYWGQGTLVTVSA

SEQ ID NO: 13406 - protein, 119 aa, Artificial Sequence
  source: /note="Description of Artificial Sequence: Synthetic polypeptide"
QVQLKQSGPGLVQPSQSLSITCTVSGFSLTNYGVHWVRQSPGKGLEWLGVINSGGNTDYNTPFTSRLSINKDNSKSQVFFKMNSLQSNDTAIYYCARALTYYDYEFAYWGQGTLVTVSA

SEQ ID NO: 13407 - protein, 119 aa, Artificial Sequence
  source: /note="Description of Artificial Sequence: Synthetic polypeptide"
QVQLKQSGPGLVQPSQSLSITCTVSGFSLTNYGVHWVRQSPGKGLEWLGVIYSGGNTDYNTPFTSRLSINKDNSKSQVFFKMNSLQSNDTAIYYCARALTYYDYEFAYWGQGTLVTVSA

SEQ ID NO: 13408 - protein, 119 aa, Artificial Sequence
  source: /note="Description of Artificial Sequence: Synthetic polypeptide"
QVQLKQSGPGLVQPSQSLSITCTVSGFSLTNYGVHWVRQSPGKGLEWLGVIWHGGNTDYNTPFTSRLSINKDNSKSQVFFKMNSLQSNDTAIYYCARALTYYDYEFAYWGQGTLVTVSA

SEQ ID NO: 13409 - protein, 119 aa, Artificial Sequence
  source: /note="Description of Artificial Sequence: Synthetic polypeptide"
QVQLKQSGPGLVQPSQSLSITCTVSGFSLTNYGVHWVRQSPGKGLEWLGVIWRGGNTDYNTPFTSRLSINKDNSKSQVFFKMNSLQSNDTAIYYCARALTYYDYEFAYWGQGTLVTVSA

SEQ ID NO: 13410 - protein, 119 aa, Artificial Sequence
  source: /note="Description of Artificial Sequence: Synthetic polypeptide"
QVQLKQSGPGLVQPSQSLSITCTVSGFSLTNYGVHWVRQSPGKGLEWLGVIWAGGNTDYNTPFTSRLSINKDNSKSQVFFKMNSLQSNDTAIYYCARALTYYDYEFAYWGQGTLVTVSA

SEQ ID NO: 13411 - protein, 119 aa, Artificial Sequence
  source: /note="Description of Artificial Sequence: Synthetic polypeptide"
QVQLKQSGPGLVQPSQSLSITCTVSGFSLTNYGVHWVRQSPGKGLEWLGVIWCGGNTDYNTPFTSRLSINKDNSKSQVFFKMNSLQSNDTAIYYCARALTYYDYEFAYWGQGTLVTVSA

SEQ ID NO: 13412 - protein, 119 aa, Artificial Sequence
  source: /note="Description of Artificial Sequence: Synthetic polypeptide"
QVQLKQSGPGLVQPSQSLSITCTVSGFSLTNYGVHWVRQSPGKGLEWLGVIWGGGNTDYNTPFTSRLSINKDNSKSQVFFKMNSLQSNDTAIYYCARALTYYDYEFAYWGQGTLVTVSA

SEQ ID NO: 13413 - protein, 119 aa, Artificial Sequence
  source: /note="Description of Artificial Sequence: Synthetic polypeptide"
QVQLKQSGPGLVQPSQSLSITCTVSGFSLTNYGVHWVRQSPGKGLEWLGVIWIGGNTDYNTPFTSRLSINKDNSKSQVFFKMNSLQSNDTAIYYCARALTYYDYEFAYWGQGTLVTVSA

SEQ ID NO: 13414 - protein, 119 aa, Artificial Sequence
  source: /note="Description of Artificial Sequence: Synthetic polypeptide"
QVQLKQSGPGLVQPSQSLSITCTVSGFSLTNYGVHWVRQSPGKGLEWLGVIWMGGNTDYNTPFTSRLSINKDNSKSQVFFKMNSLQSNDTAIYYCARALTYYDYEFAYWGQGTLVTVSA

SEQ ID NO: 13415 - protein, 119 aa, Artificial Sequence
  source: /note="Description of Artificial Sequence: Synthetic polypeptide"
QVQLKQSGPGLVQPSQSLSITCTVSGFSLTNYGVHWVRQSPGKGLEWLGVIWPGGNTDYNTPFTSRLSINKDNSKSQVFFKMNSLQSNDTAIYYCARALTYYDYEFAYWGQGTLVTVSA

SEQ ID NO: 13416 - protein, 119 aa, Artificial Sequence
  source: /note="Description of Artificial Sequence: Synthetic polypeptide"
QVQLKQSGPGLVQPSQSLSITCTVSGFSLTNYGVHWVRQSPGKGLEWLGVIWQGGNTDYNTPFTSRLSINKDNSKSQVFFKMNSLQSNDTAIYYCARALTYYDYEFAYWGQGTLVTVSA

SEQ ID NO: 13417 - protein, 119 aa, Artificial Sequence
  source: /note="Description of Artificial Sequence: Synthetic polypeptide"
QVQLKQSGPGLVQPSQSLSITCTVSGFSLTNYGVHWVRQSPGKGLEWLGVIWLGGNTDYNTPFTSRLSINKDNSKSQVFFKMNSLQSNDTAIYYCARALTYYDYEFAYWGQGTLVTVSA

SEQ ID NO: 13418 - protein, 119 aa, Artificial Sequence
  source: /note="Description of Artificial Sequence: Synthetic polypeptide"
QVQLKQSGPGLVQPSQSLSITCTVSGFSLTNYGVHWVRQSPGKGLEWLGVIWTGGNTDYNTPFTSRLSINKDNSKSQVFFKMNSLQSNDTAIYYCARALTYYDYEFAYWGQGTLVTVSA

SEQ ID NO: 13419 - protein, 119 aa, Artificial Sequence
  source: /note="Description of Artificial Sequence: Synthetic polypeptide"
QVQLKQSGPGLVQPSQSLSITCTVSGFSLTNYGVHWVRQSPGKGLEWLGVIWVGGNTDYNTPFTSRLSINKDNSKSQVFFKMNSLQSNDTAIYYCARALTYYDYEFAYWGQGTLVTVSA

SEQ ID NO: 13420 - protein, 119 aa, Artificial Sequence
  source: /note="Description of Artificial Sequence: Synthetic polypeptide"
QVQLKQSGPGLVQPSQSLSITCTVSGFSLTNYGVHWVRQSPGKGLEWLGVIWYGGNTDYNTPFTSRLSINKDNSKSQVFFKMNSLQSNDTAIYYCARALTYYDYEFAYWGQGTLVTVSA

SEQ ID NO: 13421 - protein, 119 aa, Artificial Sequence
  source: /note="Description of Artificial Sequence: Synthetic polypeptide"
QVQLKQSGPGLVQPSQSLSITCTVSGFSLTNYGVHWVRQSPGKGLEWLGVIWSHGNTDYNTPFTSRLSINKDNSKSQVFFKMNSLQSNDTAIYYCARALTYYDYEFAYWGQGTLVTVSA

SEQ ID NO: 13422 - protein, 119 aa, Artificial Sequence
  source: /note="Description of Artificial Sequence: Synthetic polypeptide"
QVQLKQSGPGLVQPSQSLSITCTVSGFSLTNYGVHWVRQSPGKGLEWLGVIWSRGNTDYNTPFTSRLSINKDNSKSQVFFKMNSLQSNDTAIYYCARALTYYDYEFAYWGQGTLVTVSA

SEQ ID NO: 13423 - protein, 119 aa, Artificial Sequence
  source: /note="Description of Artificial Sequence: Synthetic polypeptide"
QVQLKQSGPGLVQPSQSLSITCTVSGFSLTNYGVHWVRQSPGKGLEWLGVIWSAGNTDYNTPFTSRLSINKDNSKSQVFFKMNSLQSNDTAIYYCARALTYYDYEFAYWGQGTLVTVSA

SEQ ID NO: 13424 - protein, 119 aa, Artificial Sequence
  source: /note="Description of Artificial Sequence: Synthetic polypeptide"
QVQLKQSGPGLVQPSQSLSITCTVSGFSLTNYGVHWVRQSPGKGLEWLGVIWSCGNTDYNTPFTSRLSINKDNSKSQVFFKMNSLQSNDTAIYYCARALTYYDYEFAYWGQGTLVTVSA

SEQ ID NO: 13425 - protein, 119 aa, Artificial Sequence
  source: /note="Description of Artificial Sequence: Synthetic polypeptide"
QVQLKQSGPGLVQPSQSLSITCTVSGFSLTNYGVHWVRQSPGKGLEWLGVIWSDGNTDYNTPFTSRLSINKDNSKSQVFFKMNSLQSNDTAIYYCARALTYYDYEFAYWGQGTLVTVSA

SEQ ID NO: 13426 - protein, 119 aa, Artificial Sequence
  source: /note="Description of Artificial Sequence: Synthetic polypeptide"
QVQLKQSGPGLVQPSQSLSITCTVSGFSLTNYGVHWVRQSPGKGLEWLGVIWSPGNTDYNTPFTSRLSINKDNSKSQVFFKMNSLQSNDTAIYYCARALTYYDYEFAYWGQGTLVTVSA

SEQ ID NO: 13427 - protein, 119 aa, Artificial Sequence
  source: /note="Description of Artificial Sequence: Synthetic polypeptide"
QVQLKQSGPGLVQPSQSLSITCTVSGFSLTNYGVHWVRQSPGKGLEWLGVIWSSGNTDYNTPFTSRLSINKDNSKSQVFFKMNSLQSNDTAIYYCARALTYYDYEFAYWGQGTLVTVSA

SEQ ID NO: 13428 - protein, 119 aa, Artificial Sequence
  source: /note="Description of Artificial Sequence: Synthetic polypeptide"
QVQLKQSGPGLVQPSQSLSITCTVSGFSLTNYGVHWVRQSPGKGLEWLGVIWSGHNTDYNTPFTSRLSINKDNSKSQVFFKMNSLQSNDTAIYYCARALTYYDYEFAYWGQGTLVTVSA

SEQ ID NO: 13429 - protein, 119 aa, Artificial Sequence
  source: /note="Description of Artificial Sequence: Synthetic polypeptide"
QVQLKQSGPGLVQPSQSLSITCTVSGFSLTNYGVHWVRQSPGKGLEWLGVIWSGRNTDYNTPFTSRLSINKDNSKSQVFFKMNSLQSNDTAIYYCARALTYYDYEFAYWGQGTLVTVSA

SEQ ID NO: 13430 - protein, 119 aa, Artificial Sequence
  source: /note="Description of Artificial Sequence: Synthetic polypeptide"
QVQLKQSGPGLVQPSQSLSITCTVSGFSLTNYGVHWVRQSPGKGLEWLGVIWSGMNTDYNTPFTSRLSINKDNSKSQVFFKMNSLQSNDTAIYYCARALTYYDYEFAYWGQGTLVTVSA

SEQ ID NO: 13431 - protein, 119 aa, Artificial Sequence
  source: /note="Description of Artificial Sequence: Synthetic polypeptide"
QVQLKQSGPGLVQPSQSLSITCTVSGFSLTNYGVHWVRQSPGKGLEWLGVIWSGSNTDYNTPFTSRLSINKDNSKSQVFFKMNSLQSNDTAIYYCARALTYYDYEFAYWGQGTLVTVSA

SEQ ID NO: 13432 - protein, 119 aa, Artificial Sequence
  source: /note="Description of Artificial Sequence: Synthetic polypeptide"
QVQLKQSGPGLVQPSQSLSITCTVSGFSLTNYGVHWVRQSPGKGLEWLGVIWSGYNTDYNTPFTSRLSINKDNSKSQVFFKMNSLQSNDTAIYYCARALTYYDYEFAYWGQGTLVTVSA

SEQ ID NO: 13433 - protein, 119 aa, Artificial Sequence
  source: /note="Description of Artificial Sequence: Synthetic polypeptide"
QVQLKQSGPGLVQPSQSLSITCTVSGFSLTNYGVHWVRQSPGKGLEWLGVIWSGGKTDYNTPFTSRLSINKDNSKSQVFFKMNSLQSNDTAIYYCARALTYYDYEFAYWGQGTLVTVSA

SEQ ID NO: 13434 - protein, 119 aa, Artificial Sequence
  source: /note="Description of Artificial Sequence: Synthetic polypeptide"
QVQLKQSGPGLVQPSQSLSITCTVSGFSLTNYGVHWVRQSPGKGLEWLGVIWSGGATDYNTPFTSRLSINKDNSKSQVFFKMNSLQSNDTAIYYCARALTYYDYEFAYWGQGTLVTVSA

SEQ ID NO: 13435 - protein, 119 aa, Artificial Sequence
  source: /note="Description of Artificial Sequence: Synthetic polypeptide"
QVQLKQSGPGLVQPSQSLSITCTVSGFSLTNYGVHWVRQSPGKGLEWLGVIWSGGPTDYNTPFTSRLSINKDNSKSQVFFKMNSLQSNDTAIYYCARALTYYDYEFAYWGQGTLVTVSA

SEQ ID NO: 13436 - protein, 119 aa, Artificial Sequence
  source: /note="Description of Artificial Sequence: Synthetic polypeptide"
QVQLKQSGPGLVQPSQSLSITCTVSGFSLTNYGVHWVRQSPGKGLEWLGVIWSGGSTDYNTPFTSRLSINKDNSKSQVFFKMNSLQSNDTAIYYCARALTYYDYEFAYWGQGTLVTVSA

SEQ ID NO: 13437 - protein, 119 aa, Artificial Sequence
  source: /note="Description of Artificial Sequence: Synthetic polypeptide"
QVQLKQSGPGLVQPSQSLSITCTVSGFSLTNYGVHWVRQSPGKGLEWLGVIWSGGVTDYNTPFTSRLSINKDNSKSQVFFKMNSLQSNDTAIYYCARALTYYDYEFAYWGQGTLVTVSA

SEQ ID NO: 13438 - protein, 119 aa, Artificial Sequence
  source: /note="Description of Artificial Sequence: Synthetic polypeptide"
QVQLKQSGPGLVQPSQSLSITCTVSGFSLTNYGVHWVRQSPGKGLEWLGVIWSGGGTDYNTPFTSRLSINKDNSKSQVFFKMNSLQSNDTAIYYCARALTYYDYEFAYWGQGTLVTVSA

SEQ ID NO: 13439 - protein, 119 aa, Artificial Sequence
  source: /note="Description of Artificial Sequence: Synthetic polypeptide"
QVQLKQSGPGLVQPSQSLSITCTVSGFSLTNYGVHWVRQSPGKGLEWLGVIWSGGNHDYNTPFTSRLSINKDNSKSQVFFKMNSLQSNDTAIYYCARALTYYDYEFAYWGQGTLVTVSA

SEQ ID NO: 13440 - protein, 119 aa, Artificial Sequence
  source: /note="Description of Artificial Sequence: Synthetic polypeptide"
QVQLKQSGPGLVQPSQSLSITCTVSGFSLTNYGVHWVRQSPGKGLEWLGVIWSGGNRDYNTPFTSRLSINKDNSKSQVFFKMNSLQSNDTAIYYCARALTYYDYEFAYWGQGTLVTVSA

SEQ ID NO: 13441 - protein, 119 aa, Artificial Sequence
  source: /note="Description of Artificial Sequence: Synthetic polypeptide"
QVQLKQSGPGLVQPSQSLSITCTVSGFSLTNYGVHWVRQSPGKGLEWLGVIWSGGNLDYNTPFTSRLSINKDNSKSQVFFKMNSLQSNDTAIYYCARALTYYDYEFAYWGQGTLVTVSA

SEQ ID NO: 13442 - protein, 119 aa, Artificial Sequence
  source: /note="Description of Artificial Sequence: Synthetic polypeptide"
QVQLKQSGPGLVQPSQSLSITCTVSGFSLTNYGVHWVRQSPGKGLEWLGVIWSGGNADYNTPFTSRLSINKDNSKSQVFFKMNSLQSNDTAIYYCARALTYYDYEFAYWGQGTLVTVSA

SEQ ID NO: 13443 - protein, 119 aa, Artificial Sequence
  source: /note="Description of Artificial Sequence: Synthetic polypeptide"
QVQLKQSGPGLVQPSQSLSITCTVSGFSLTNYGVHWVRQSPGKGLEWLGVIWSGGNCDYNTPFTSRLSINKDNSKSQVFFKMNSLQSNDTAIYYCARALTYYDYEFAYWGQGTLVTVSA

SEQ ID NO: 13444 - protein, 119 aa, Artificial Sequence
  source: /note="Description of Artificial Sequence: Synthetic polypeptide"
QVQLKQSGPGLVQPSQSLSITCTVSGFSLTNYGVHWVRQSPGKGLEWLGVIWSGGNDDYNTPFTSRLSINKDNSKSQVFFKMNSLQSNDTAIYYCARALTYYDYEFAYWGQGTLVTVSA

SEQ ID NO: 13445 - protein, 119 aa, Artificial Sequence
  source: /note="Description of Artificial Sequence: Synthetic polypeptide"
QVQLKQSGPGLVQPSQSLSITCTVSGFSLTNYGVHWVRQSPGKGLEWLGVIWSGGNFDYNTPFTSRLSINKDNSKSQVFFKMNSLQSNDTAIYYCARALTYYDYEFAYWGQGTLVTVSA

SEQ ID NO: 13446 - protein, 119 aa, Artificial Sequence
  source: /note="Description of Artificial Sequence: Synthetic polypeptide"
QVQLKQSGPGLVQPSQSLSITCTVSGFSLTNYGVHWVRQSPGKGLEWLGVIWSGGNMDYNTPFTSRLSINKDNSKSQVFFKMNSLQSNDTAIYYCARALTYYDYEFAYWGQGTLVTVSA

SEQ ID NO: 13447 - protein, 119 aa, Artificial Sequence
  source: /note="Description of Artificial Sequence: Synthetic polypeptide"
QVQLKQSGPGLVQPSQSLSITCTVSGFSLTNYGVHWVRQSPGKGLEWLGVIWSGGNNDYNTPFTSRLSINKDNSKSQVFFKMNSLQSNDTAIYYCARALTYYDYEFAYWGQGTLVTVSA

SEQ ID NO: 13448 - protein, 119 aa, Artificial Sequence
  source: /note="Description of Artificial Sequence: Synthetic polypeptide"
QVQLKQSGPGLVQPSQSLSITCTVSGFSLTNYGVHWVRQSPGKGLEWLGVIWSGGNQDYNTPFTSRLSINKDNSKSQVFFKMNSLQSNDTAIYYCARALTYYDYEFAYWGQGTLVTVSA

SEQ ID NO: 13449 - protein, 119 aa, Artificial Sequence
  source: /note="Description of Artificial Sequence: Synthetic polypeptide"
QVQLKQSGPGLVQPSQSLSITCTVSGFSLTNYGVHWVRQSPGKGLEWLGVIWSGGNWDYNTPFTSRLSINKDNSKSQVFFKMNSLQSNDTAIYYCARALTYYDYEFAYWGQGTLVTVSA

SEQ ID NO: 13450 - protein, 119 aa, Artificial Sequence
  source: /note="Description of Artificial Sequence: Synthetic polypeptide"
QVQLKQSGPGLVQPSQSLSITCTVSGFSLTNYGVHWVRQSPGKGLEWLGVIWSGGNYDYNTPFTSRLSINKDNSKSQVFFKMNSLQSNDTAIYYCARALTYYDYEFAYWGQGTLVTVSA

SEQ ID NO: 13451 - protein, 119 aa, Artificial Sequence
  source: /note="Description of Artificial Sequence: Synthetic polypeptide"
QVQLKQSGPGLVQPSQSLSITCTVSGFSLTNYGVHWVRQSPGKGLEWLGVIWSGGNTLYNTPFTSRLSINKDNSKSQVFFKMNSLQSNDTAIYYCARALTYYDYEFAYWGQGTLVTVSA

SEQ ID NO: 13452 - protein, 119 aa, Artificial Sequence
  source: /note="Description of Artificial Sequence: Synthetic polypeptide"
QVQLKQSGPGLVQPSQSLSITCTVSGFSLTNYGVHWVRQSPGKGLEWLGVIWSGGNTGYNTPFTSRLSINKDNSKSQVFFKMNSLQSNDTAIYYCARALTYYDYEFAYWGQGTLVTVSA

SEQ ID NO: 13453 - protein, 119 aa, Artificial Sequence
  source: /note="Description of Artificial Sequence: Synthetic polypeptide"
QVQLKQSGPGLVQPSQSLSITCTVSGFSLTNYGVHWVRQSPGKGLEWLGVIWSGGNTMYNTPFTSRLSINKDNSKSQVFFKMNSLQSNDTAIYYCARALTYYDYEFAYWGQGTLVTVSA

SEQ ID NO: 13454 - protein, 119 aa, Artificial Sequence
  source: /note="Description of Artificial Sequence: Synthetic polypeptide"
QVQLKQSGPGLVQPSQSLSITCTVSGFSLTNYGVHWVRQSPGKGLEWLGVIWSGGNTNYNTPFTSRLSINKDNSKSQVFFKMNSLQSNDTAIYYCARALTYYDYEFAYWGQGTLVTVSA

SEQ ID NO: 13455 - protein, 119 aa, Artificial Sequence
  source: /note="Description of Artificial Sequence: Synthetic polypeptide"
QVQLKQSGPGLVQPSQSLSITCTVSGFSLTNYGVHWVRQSPGKGLEWLGVIWSGGNTQYNTPFTSRLSINKDNSKSQVFFKMNSLQSNDTAIYYCARALTYYDYEFAYWGQGTLVTVSA

SEQ ID NO: 13456 - protein, 119 aa, Artificial Sequence
  source: /note="Description of Artificial Sequence: Synthetic polypeptide"
QVQLKQSGPGLVQPSQSLSITCTVSGFSLTNYGVHWVRQSPGKGLEWLGVIWSGGNTDHNTPFTSRLSINKDNSKSQVFFKMNSLQSNDTAIYYCARALTYYDYEFAYWGQGTLVTVSA

SEQ ID NO: 13457 - protein, 119 aa, Artificial Sequence
  source: /note="Description of Artificial Sequence: Synthetic polypeptide"
QVQLKQSGPGLVQPSQSLSITCTVSGFSLTNYGVHWVRQSPGKGLEWLGVIWSGGNTDRNTPFTSRLSINKDNSKSQVFFKMNSLQSNDTAIYYCARALTYYDYEFAYWGQGTLVTVSA

SEQ ID NO: 13458 - protein, 119 aa, Artificial Sequence
  source: /note="Description of Artificial Sequence: Synthetic polypeptide"
QVQLKQSGPGLVQPSQSLSITCTVSGFSLTNYGVHWVRQSPGKGLEWLGVIWSGGNTDANTPFTSRLSINKDNSKSQVFFKMNSLQSNDTAIYYCARALTYYDYEFAYWGQGTLVTVSA

SEQ ID NO: 13459 - protein, 119 aa, Artificial Sequence
  source: /note="Description of Artificial Sequence: Synthetic polypeptide"
QVQLKQSGPGLVQPSQSLSITCTVSGFSLTNYGVHWVRQSPGKGLEWLGVIWSGGNTDCNTPFTSRLSINKDNSKSQVFFKMNSLQSNDTAIYYCARALTYYDYEFAYWGQGTLVTVSA

SEQ ID NO: 13460 - protein, 119 aa, Artificial Sequence
  source: /note="Description of Artificial Sequence: Synthetic polypeptide"
QVQLKQSGPGLVQPSQSLSITCTVSGFSLTNYGVHWVRQSPGKGLEWLGVIWSGGNTDDNTPFTSRLSINKDNSKSQVFFKMNSLQSNDTAIYYCARALTYYDYEFAYWGQGTLVTVSA

SEQ ID NO: 13461 - protein, 119 aa, Artificial Sequence
  source: /note="Description of Artificial Sequence: Synthetic polypeptide"
QVQLKQSGPGLVQPSQSLSITCTVSGFSLTNYGVHWVRQSPGKGLEWLGVIWSGGNTDENTPFTSRLSINKDNSKSQVFFKMNSLQSNDTAIYYCARALTYYDYEFAYWGQGTLVTVSA

SEQ ID NO: 13462 - protein, 119 aa, Artificial Sequence
  source: /note="Description of Artificial Sequence: Synthetic polypeptide"
QVQLKQSGPGLVQPSQSLSITCTVSGFSLTNYGVHWVRQSPGKGLEWLGVIWSGGNTDGNTPFTSRLSINKDNSKSQVFFKMNSLQSNDTAIYYCARALTYYDYEFAYWGQGTLVTVSA

SEQ ID NO: 13463 - protein, 119 aa, Artificial Sequence
  source: /note="Description of Artificial Sequence: Synthetic polypeptide"
QVQLKQSGPGLVQPSQSLSITCTVSGFSLTNYGVHWVRQSPGKGLEWLGVIWSGGNTDINTPFTSRLSINKDNSKSQVFFKMNSLQSNDTAIYYCARALTYYDYEFAYWGQGTLVTVSA

SEQ ID NO: 13464 - protein, 119 aa, Artificial Sequence
  source: /note="Description of Artificial Sequence: Synthetic polypeptide"
QVQLKQSGPGLVQPSQSLSITCTVSGFSLTNYGVHWVRQSPGKGLEWLGVIWSGGNTDPNTPFTSRLSINKDNSKSQVFFKMNSLQSNDTAIYYCARALTYYDYEFAYWGQGTLVTVSA

SEQ ID NO: 13465 - protein, 119 aa, Artificial Sequence
  source: /note="Description of Artificial Sequence: Synthetic polypeptide"
QVQLKQSGPGLVQPSQSLSITCTVSGFSLTNYGVHWVRQSPGKGLEWLGVIWSGGNTDQNTPFTSRLSINKDNSKSQVFFKMNSLQSNDTAIYYCARALTYYDYEFAYWGQGTLVTVSA

SEQ ID NO: 13466 - protein, 119 aa, Artificial Sequence
  source: /note="Description of Artificial Sequence: Synthetic polypeptide"
QVQLKQSGPGLVQPSQSLSITCTVSGFSLTNYGVHWVRQSPGKGLEWLGVIWSGGNTDSNTPFTSRLSINKDNSKSQVFFKMNSLQSNDTAIYYCARALTYYDYEFAYWGQGTLVTVSA

SEQ ID NO: 13467 - protein, 119 aa, Artificial Sequence
  source: /note="Description of Artificial Sequence: Synthetic polypeptide"
QVQLKQSGPGLVQPSQSLSITCTVSGFSLTNYGVHWVRQSPGKGLEWLGVIWSGGNTDTNTPFTSRLSINKDNSKSQVFFKMNSLQSNDTAIYYCARALTYYDYEFAYWGQGTLVTVSA

SEQ ID NO: 13468 - protein, 119 aa, Artificial Sequence
  source: /note="Description of Artificial Sequence: Synthetic polypeptide"
QVQLKQSGPGLVQPSQSLSITCTVSGFSLTNYGVHWVRQSPGKGLEWLGVIWSGGNTDVNTPFTSRLSINKDNSKSQVFFKMNSLQSNDTAIYYCARALTYYDYEFAYWGQGTLVTVSA

SEQ ID NO: 13469 - protein, 119 aa, Artificial Sequence
  source: /note="Description of Artificial Sequence: Synthetic polypeptide"
QVQLKQSGPGLVQPSQSLSITCTVSGFSLTNYGVHWVRQSPGKGLEWLGVIWSGGNTDWNTPFTSRLSINKDNSKSQVFFKMNSLQSNDTAIYYCARALTYYDYEFAYWGQGTLVTVSA

SEQ ID NO: 13470 - protein, 119 aa, Artificial Sequence
  source: /note="Description of Artificial Sequence: Synthetic polypeptide"
QVQLKQSGPGLVQPSQSLSITCTVSGFSLTNYGVHWVRQSPGKGLEWLGVIWSGGNTDYKTPFTSRLSINKDNSKSQVFFKMNSLQSNDTAIYYCARALTYYDYEFAYWGQGTLVTVSA

SEQ ID NO: 13471 - protein, 119 aa, Artificial Sequence
  source: /note="Description of Artificial Sequence: Synthetic polypeptide"
QVQLKQSGPGLVQPSQSLSITCTVSGFSLTNYGVHWVRQSPGKGLEWLGVIWSGGNTDYATPFTSRLSINKDNSKSQVFFKMNSLQSNDTAIYYCARALTYYDYEFAYWGQGTLVTVSA

SEQ ID NO: 13472 - protein, 119 aa, Artificial Sequence
  source: /note="Description of Artificial Sequence: Synthetic polypeptide"
QVQLKQSGPGLVQPSQSLSITCTVSGFSLTNYGVHWVRQSPGKGLEWLGVIWSGGNTDYCTPFTSRLSINKDNSKSQVFFKMNSLQSNDTAIYYCARALTYYDYEFAYWGQGTLVTVSA

SEQ ID NO: 13473 - protein, 119 aa, Artificial Sequence
  source: /note="Description of Artificial Sequence: Synthetic polypeptide"
QVQLKQSGPGLVQPSQSLSITCTVSGFSLTNYGVHWVRQSPGKGLEWLGVIWSGGNTDYDTPFTSRLSINKDNSKSQVFFKMNSLQSNDTAIYYCARALTYYDYEFAYWGQGTLVTVSA

SEQ ID NO: 13474 - protein, 119 aa, Artificial Sequence
  source: /note="Description of Artificial Sequence: Synthetic polypeptide"
QVQLKQSGPGLVQPSQSLSITCTVSGFSLTNYGVHWVRQSPGKGLEWLGVIWSGGNTDYFTPFTSRLSINKDNSKSQVFFKMNSLQSNDTAIYYCARALTYYDYEFAYWGQGTLVTVSA

SEQ ID NO: 13475 - protein, 119 aa, Artificial Sequence
  source: /note="Description of Artificial Sequence: Synthetic polypeptide"
QVQLKQSGPGLVQPSQSLSITCTVSGFSLTNYGVHWVRQSPGKGLEWLGVIWSGGNTDYGTPFTSRLSINKDNSKSQVFFKMNSLQSNDTAIYYCARALTYYDYEFAYWGQGTLVTVSA

SEQ ID NO: 13476 - protein, 119 aa, Artificial Sequence
  source: /note="Description of Artificial Sequence: Synthetic polypeptide"
QVQLKQSGPGLVQPSQSLSITCTVSGFSLTNYGVHWVRQSPGKGLEWLGVIWSGGNTDYPTPFTSRLSINKDNSKSQVFFKMNSLQSNDTAIYYCARALTYYDYEFAYWGQGTLVTVSA

SEQ ID NO: 13477 - protein, 119 aa, Artificial Sequence
  source: /note="Description of Artificial Sequence: Synthetic polypeptide"
QVQLKQSGPGLVQPSQSLSITCTVSGFSLTNYGVHWVRQSPGKGLEWLGVIWSGGNTDYQTPFTSRLSINKDNSKSQVFFKMNSLQSNDTAIYYCARALTYYDYEFAYWGQGTLVTVSA

SEQ ID NO: 13478 - protein, 119 aa, Artificial Sequence
  source: /note="Description of Artificial Sequence: Synthetic polypeptide"
QVQLKQSGPGLVQPSQSLSITCTVSGFSLTNYGVHWVRQSPGKGLEWLGVIWSGGNTDYSTPFTSRLSINKDNSKSQVFFKMNSLQSNDTAIYYCARALTYYDYEFAYWGQGTLVTVSA

SEQ ID NO: 13479 - protein, 119 aa, Artificial Sequence
  source: /note="Description of Artificial Sequence: Synthetic polypeptide"
QVQLKQSGPGLVQPSQSLSITCTVSGFSLTNYGVHWVRQSPGKGLEWLGVIWSGGNTDYTTPFTSRLSINKDNSKSQVFFKMNSLQSNDTAIYYCARALTYYDYEFAYWGQGTLVTVSA

SEQ ID NO: 13480 - protein, 119 aa, Artificial Sequence
  source: /note="Description of Artificial Sequence: Synthetic polypeptide"
QVQLKQSGPGLVQPSQSLSITCTVSGFSLTNYGVHWVRQSPGKGLEWLGVIWSGGNTDYYTPFTSRLSINKDNSKSQVFFKMNSLQSNDTAIYYCARALTYYDYEFAYWGQGTLVTVSA

SEQ ID NO: 13481 - protein, 119 aa, Artificial Sequence
  source: /note="Description of Artificial Sequence: Synthetic polypeptide"
QVQLKQSGPGLVQPSQSLSITCTVSGFSLTNYGVHWVRQSPGKGLEWLGVIWSGGNTDYNNPFTSRLSINKDNSKSQVFFKMNSLQSNDTAIYYCARALTYYDYEFAYWGQGTLVTVSA

SEQ ID NO: 13482 - protein, 119 aa, Artificial Sequence
  source: /note="Description of Artificial Sequence: Synthetic polypeptide"
QVQLKQSGPGLVQPSQSLSITCTVSGFSLTNYGVHWVRQSPGKGLEWLGVIWSGGNTDYNQPFTSRLSINKDNSKSQVFFKMNSLQSNDTAIYYCARALTYYDYEFAYWGQGTLVTVSA

SEQ ID NO: 13483 - protein, 119 aa, Artificial Sequence
  source: /note="Description of Artificial Sequence: Synthetic polypeptide"
QVQLKQSGPGLVQPSQSLSITCTVSGFSLTNYGVHWVRQSPGKGLEWLGVIWSGGNTDYNTGFTSRLSINKDNSKSQVFFKMNSLQSNDTAIYYCARALTYYDYEFAYWGQGTLVTVSA

SEQ ID NO: 13484 - protein, 119 aa, Artificial Sequence
  source: /note="Description of Artificial Sequence: Synthetic polypeptide"
QVQLKQSGPGLVQPSQSLSITCTVSGFSLTNYGVHWVRQSPGKGLEWLGVIWSGGNTDYNTPHTSRLSINKDNSKSQVFFKMNSLQSNDTAIYYCARALTYYDYEFAYWGQGTLVTVSA

SEQ ID NO: 13485 - protein, 119 aa, Artificial Sequence
  source: /note="Description of Artificial Sequence: Synthetic polypeptide"
QVQLKQSGPGLVQPSQSLSITCTVSGFSLTNYGVHWVRQSPGKGLEWLGVIWSGGNTDYNTPRTSRLSINKDNSKSQVFFKMNSLQSNDTAIYYCARALTYYDYEFAYWGQGTLVTVSA

SEQ ID NO: 13486 - protein, 119 aa, Artificial Sequence
  source: /note="Description of Artificial Sequence: Synthetic polypeptide"
QVQLKQSGPGLVQPSQSLSITCTVSGFSLTNYGVHWVRQSPGKGLEWLGVIWSGGNTDYNTPLTSRLSINKDNSKSQVFFKMNSLQSNDTAIYYCARALTYYDYEFAYWGQGTLVTVSA

SEQ ID NO: 13487 - protein, 119 aa, Artificial Sequence
  source: /note="Description of Artificial Sequence: Synthetic polypeptide"
QVQLKQSGPGLVQPSQSLSITCTVSGFSLTNYGVHWVRQSPGKGLEWLGVIWSGGNTDYNTPATSRLSINKDNSKSQVFFKMNSLQSNDTAIYYCARALTYYDYEFAYWGQGTLVTVSA

SEQ ID NO: 13488 - protein, 119 aa, Artificial Sequence
  source: /note="Description of Artificial Sequence: Synthetic polypeptide"
QVQLKQSGPGLVQPSQSLSITCTVSGFSLTNYGVHWVRQSPGKGLEWLGVIWSGGNTDYNTPCTSRLSINKDNSKSQVFFKMNSLQSNDTAIYYCARALTYYDYEFAYWGQGTLVTVSA

SEQ ID NO: 13489 - protein, 119 aa, Artificial Sequence
  source: /note="Description of Artificial Sequence: Synthetic polypeptide"
QVQLKQSGPGLVQPSQSLSITCTVSGFSLTNYGVHWVRQSPGKGLEWLGVIWSGGNTDYNTPDTSRLSINKDNSKSQVFFKMNSLQSNDTAIYYCARALTYYDYEFAYWGQGTLVTVSA

SEQ ID NO: 13490 - protein, 119 aa, Artificial Sequence
  source: /note="Description of Artificial Sequence: Synthetic polypeptide"
QVQLKQSGPGLVQPSQSLSITCTVSGFSLTNYGVHWVRQSPGKGLEWLGVIWSGGNTDYNTPGTSRLSINKDNSKSQVFFKMNSLQSNDTAIYYCARALTYYDYEFAYWGQGTLVTVSA

SEQ ID NO: 13491 - protein, 119 aa, Artificial Sequence
  source: /note="Description of Artificial Sequence: Synthetic polypeptide"
QVQLKQSGPGLVQPSQSLSITCTVSGFSLTNYGVHWVRQSPGKGLEWLGVIWSGGNTDYNTPMTSRLSINKDNSKSQVFFKMNSLQSNDTAIYYCARALTYYDYEFAYWGQGTLVTVSA

SEQ ID NO: 13492 - protein, 119 aa, Artificial Sequence
  source: /note="Description of Artificial Sequence: Synthetic polypeptide"
QVQLKQSGPGLVQPSQSLSITCTVSGFSLTNYGVHWVRQSPGKGLEWLGVIWSGGNTDYNTPNTSRLSINKDNSKSQVFFKMNSLQSNDTAIYYCARALTYYDYEFAYWGQGTLVTVSA

SEQ ID NO: 13493 - protein, 119 aa, Artificial Sequence
  source: /note="Description of Artificial Sequence: Synthetic polypeptide"
QVQLKQSGPGLVQPSQSLSITCTVSGFSLTNYGVHWVRQSPGKGLEWLGVIWSGGNTDYNTPQTSRLSINKDNSKSQVFFKMNSLQSNDTAIYYCARALTYYDYEFAYWGQGTLVTVSA

SEQ ID NO: 13494 - protein, 119 aa, Artificial Sequence
  source: /note="Description of Artificial Sequence: Synthetic polypeptide"
QVQLKQSGPGLVQPSQSLSITCTVSGFSLTNYGVHWVRQSPGKGLEWLGVIWSGGNTDYNTPSTSRLSINKDNSKSQVFFKMNSLQSNDTAIYYCARALTYYDYEFAYWGQGTLVTVSA

SEQ ID NO: 13495 - protein, 119 aa, Artificial Sequence
  source: /note="Description of Artificial Sequence: Synthetic polypeptide"
QVQLKQSGPGLVQPSQSLSITCTVSGFSLTNYGVHWVRQSPGKGLEWLGVIWSGGNTDYNTPVTSRLSINKDNSKSQVFFKMNSLQSNDTAIYYCARALTYYDYEFAYWGQGTLVTVSA

SEQ ID NO: 13496 - protein, 119 aa, Artificial Sequence
  source: /note="Description of Artificial Sequence: Synthetic polypeptide"
QVQLKQSGPGLVQPSQSLSITCTVSGFSLTNYGVHWVRQSPGKGLEWLGVIWSGGNTDYNTPFRSRLSINKDNSKSQVFFKMNSLQSNDTAIYYCARALTYYDYEFAYWGQGTLVTVSA

SEQ ID NO: 13497 - protein, 119 aa, Artificial Sequence
  source: /note="Description of Artificial Sequence: Synthetic polypeptide"
QVQLKQSGPGLVQPSQSLSITCTVSGFSLTNYGVHWVRQSPGKGLEWLGVIWSGGNTDYNTPFLSRLSINKDNSKSQVFFKMNSLQSNDTAIYYCARALTYYDYEFAYWGQGTLVTVSA

SEQ ID NO: 13498 - protein, 119 aa, Artificial Sequence
  source: /note="Description of Artificial Sequence: Synthetic polypeptide"
QVQLKQSGPGLVQPSQSLSITCTVSGFSLTNYGVHWVRQSPGKGLEWLGVIWSGGNTDYNTPFCSRLSINKDNSKSQVFFKMNSLQSNDTAIYYCARALTYYDYEFAYWGQGTLVTVSA

SEQ ID NO: 13499 - protein, 119 aa, Artificial Sequence
  source: /note="Description of Artificial Sequence: Synthetic polypeptide"
QVQLKQSGPGLVQPSQSLSITCTVSGFSLTNYGVHWVRQSPGKGLEWLGVIWSGGNTDYNTPFFSRLSINKDNSKSQVFFKMNSLQSNDTAIYYCARALTYYDYEFAYWGQGTLVTVSA

SEQ ID NO: 13500 - protein, 119 aa, Artificial Sequence
  source: /note="Description of Artificial Sequence: Synthetic polypeptide"
QVQLKQSGPGLVQPSQSLSITCTVSGFSLTNYGVHWVRQSPGKGLEWLGVIWSGGNTDYNTPFGSRLSINKDNSKSQVFFKMNSLQSNDTAIYYCARALTYYDYEFAYWGQGTLVTVSA

SEQ ID NO: 13501 - protein, 119 aa, Artificial Sequence
  source: /note="Description of Artificial Sequence: Synthetic polypeptide"
QVQLKQSGPGLVQPSQSLSITCTVSGFSLTNYGVHWVRQSPGKGLEWLGVIWSGGNTDYNTPFNSRLSINKDNSKSQVFFKMNSLQSNDTAIYYCARALTYYDYEFAYWGQGTLVTVSA

SEQ ID NO: 13502 - protein, 119 aa, Artificial Sequence
  source: /note="Description of Artificial Sequence: Synthetic polypeptide"
QVQLKQSGPGLVQPSQSLSITCTVSGFSLTNYGVHWVRQSPGKGLEWLGVIWSGGNTDYNTPFQSRLSINKDNSKSQVFFKMNSLQSNDTAIYYCARALTYYDYEFAYWGQGTLVTVSA

SEQ ID NO: 13503 - protein, 119 aa, Artificial Sequence
  source: /note="Description of Artificial Sequence: Synthetic polypeptide"
QVQLKQSGPGLVQPSQSLSITCTVSGFSLTNYGVHWVRQSPGKGLEWLGVIWSGGNTDYNTPFVSRLSINKDNSKSQVFFKMNSLQSNDTAIYYCARALTYYDYEFAYWGQGTLVTVSA

SEQ ID NO: 13504 - protein, 119 aa, Artificial Sequence
  source: /note="Description of Artificial Sequence: Synthetic polypeptide"
QVQLKQSGPGLVQPSQSLSITCTVSGFSLTNYGVHWVRQSPGKGLEWLGVIWSGGNTDYNTPFTHRLSINKDNSKSQVFFKMNSLQSNDTAIYYCARALTYYDYEFAYWGQGTLVTVSA

SEQ ID NO: 13505 - protein, 119 aa, Artificial Sequence
  source: /note="Description of Artificial Sequence: Synthetic polypeptide"
QVQLKQSGPGLVQPSQSLSITCTVSGFSLTNYGVHWVRQSPGKGLEWLGVIWSGGNTDYNTPFTRRLSINKDNSKSQVFFKMNSLQSNDTAIYYCARALTYYDYEFAYWGQGTLVTVSA

SEQ ID NO: 13506 - protein, 119 aa, Artificial Sequence
  source: /note="Description of Artificial Sequence: Synthetic polypeptide"
QVQLKQSGPGLVQPSQSLSITCTVSGFSLTNYGVHWVRQSPGKGLEWLGVIWSGGNTDYNTPFTLRLSINKDNSKSQVFFKMNSLQSNDTAIYYCARALTYYDYEFAYWGQGTLVTVSA

SEQ ID NO: 13507 - protein, 119 aa, Artificial Sequence
  source: /note="Description of Artificial Sequence: Synthetic polypeptide"
QVQLKQSGPGLVQPSQSLSITCTVSGFSLTNYGVHWVRQSPGKGLEWLGVIWSGGNTDYNTPFTCRLSINKDNSKSQVFFKMNSLQSNDTAIYYCARALTYYDYEFAYWGQGTLVTVSA

SEQ ID NO: 13508 - protein, 119 aa, Artificial Sequence
  source: /note="Description of Artificial Sequence: Synthetic polypeptide"
QVQLKQSGPGLVQPSQSLSITCTVSGFSLTNYGVHWVRQSPGKGLEWLGVIWSGGNTDYNTPFTERLSINKDNSKSQVFFKMNSLQSNDTAIYYCARALTYYDYEFAYWGQGTLVTVSA

SEQ ID NO: 13509 - protein, 119 aa, Artificial Sequence
  source: /note="Description of Artificial Sequence: Synthetic polypeptide"
QVQLKQSGPGLVQPSQSLSITCTVSGFSLTNYGVHWVRQSPGKGLEWLGVIWSGGNTDYNTPFTFRLSINKDNSKSQVFFKMNSLQSNDTAIYYCARALTYYDYEFAYWGQGTLVTVSA

SEQ ID NO: 13510 - protein, 119 aa, Artificial Sequence
  source: /note="Description of Artificial Sequence: Synthetic polypeptide"
QVQLKQSGPGLVQPSQSLSITCTVSGFSLTNYGVHWVRQSPGKGLEWLGVIWSGGNTDYNTPFTGRLSINKDNSKSQVFFKMNSLQSNDTAIYYCARALTYYDYEFAYWGQGTLVTVSA

SEQ ID NO: 13511 - protein, 119 aa, Artificial Sequence
  source: /note="Description of Artificial Sequence: Synthetic polypeptide"
QVQLKQSGPGLVQPSQSLSITCTVSGFSLTNYGVHWVRQSPGKGLEWLGVIWSGGNTDYNTPFTIRLSINKDNSKSQVFFKMNSLQSNDTAIYYCARALTYYDYEFAYWGQGTLVTVSA

SEQ ID NO: 13512 - protein, 119 aa, Artificial Sequence
  source: /note="Description of Artificial Sequence: Synthetic polypeptide"
QVQLKQSGPGLVQPSQSLSITCTVSGFSLTNYGVHWVRQSPGKGLEWLGVIWSGGNTDYNTPFTMRLSINKDNSKSQVFFKMNSLQSNDTAIYYCARALTYYDYEFAYWGQGTLVTVSA

SEQ ID NO: 13513 - protein, 119 aa, Artificial Sequence
  source: /note="Description of Artificial Sequence: Synthetic polypeptide"
QVQLKQSGPGLVQPSQSLSITCTVSGFSLTNYGVHWVRQSPGKGLEWLGVIWSGGNTDYNTPFTNRLSINKDNSKSQVFFKMNSLQSNDTAIYYCARALTYYDYEFAYWGQGTLVTVSA

SEQ ID NO: 13514 - protein, 119 aa, Artificial Sequence
  source: /note="Description of Artificial Sequence: Synthetic polypeptide"
QVQLKQSGPGLVQPSQSLSITCTVSGFSLTNYGVHWVRQSPGKGLEWLGVIWSGGNTDYNTPFTPRLSINKDNSKSQVFFKMNSLQSNDTAIYYCARALTYYDYEFAYWGQGTLVTVSA

SEQ ID NO: 13515 - protein, 119 aa, Artificial Sequence
  source: /note="Description of Artificial Sequence: Synthetic polypeptide"
QVQLKQSGPGLVQPSQSLSITCTVSGFSLTNYGVHWVRQSPGKGLEWLGVIWSGGNTDYNTPFTQRLSINKDNSKSQVFFKMNSLQSNDTAIYYCARALTYYDYEFAYWGQGTLVTVSA

SEQ ID NO: 13516 - protein, 119 aa, Artificial Sequence
  source: /note="Description of Artificial Sequence: Synthetic polypeptide"
QVQLKQSGPGLVQPSQSLSITCTVSGFSLTNYGVHWVRQSPGKGLEWLGVIWSGGNTDYNTPFTTRLSINKDNSKSQVFFKMNSLQSNDTAIYYCARALTYYDYEFAYWGQGTLVTVSA

SEQ ID NO: 13517 - protein, 119 aa, Artificial Sequence
  source: /note="Description of Artificial Sequence: Synthetic polypeptide"
QVQLKQSGPGLVQPSQSLSITCTVSGFSLTNYGVHWVRQSPGKGLEWLGVIWSGGNTDYNTPFTWRLSINKDNSKSQVFFKMNSLQSNDTAIYYCARALTYYDYEFAYWGQGTLVTVSA

SEQ ID NO: 13518 - protein, 119 aa, Artificial Sequence
  source: /note="Description of Artificial Sequence: Synthetic polypeptide"
QVQLKQSGPGLVQPSQSLSITCTVSGFSLTNYGVHWVRQSPGKGLEWLGVIWSGGNTDYNTPFTYRLSINKDNSKSQVFFKMNSLQSNDTAIYYCARALTYYDYEFAYWGQGTLVTVSA

SEQ ID NO: 13519 - protein, 119 aa, Artificial Sequence
  source: /note="Description of Artificial Sequence: Synthetic polypeptide"
QVQLKQSGPGLVQPSQSLSITCTVSGFSLTNYGVHWVRQSPGKGLEWLGVIWSGGNTDYNTPFTSLLSINKDNSKSQVFFKMNSLQSNDTAIYYCARALTYYDYEFAYWGQGTLVTVSA

SEQ ID NO: 13520 - protein, 119 aa, Artificial Sequence
  source: /note="Description of Artificial Sequence: Synthetic polypeptide"
QVQLKQSGPGLVQPSQSLSITCTVSGFSLTNYGVHWVRQSPGKGLEWLGVIWSGGNTDYNTPFTSALSINKDNSKSQVFFKMNSLQSNDTAIYYCARALTYYDYEFAYWGQGTLVTVSA

SEQ ID NO: 13521 - protein, 119 aa, Artificial Sequence
  source: /note="Description of Artificial Sequence: Synthetic polypeptide"
QVQLKQSGPGLVQPSQSLSITCTVSGFSLTNYGVHWVRQSPGKGLEWLGVIWSGGNTDYNTPFTSCLSINKDNSKSQVFFKMNSLQSNDTAIYYCARALTYYDYEFAYWGQGTLVTVSA

SEQ ID NO: 13522 - protein, 119 aa, Artificial Sequence
  source: /note="Description of Artificial Sequence: Synthetic polypeptide"
QVQLKQSGPGLVQPSQSLSITCTVSGFSLTNYGVHWVRQSPGKGLEWLGVIWSGGNTDYNTPFTSELSINKDNSKSQVFFKMNSLQSNDTAIYYCARALTYYDYEFAYWGQGTLVTVSA

SEQ ID NO: 13523 - protein, 119 aa, Artificial Sequence
  source: /note="Description of Artificial Sequence: Synthetic polypeptide"
QVQLKQSGPGLVQPSQSLSITCTVSGFSLTNYGVHWVRQSPGKGLEWLGVIWSGGNTDYNTPFTSFLSINKDNSKSQVFFKMNSLQSNDTAIYYCARALTYYDYEFAYWGQGTLVTVSA

SEQ ID NO: 13524 - protein, 119 aa, Artificial Sequence
  source: /note="Description of Artificial Sequence: Synthetic polypeptide"
QVQLKQSGPGLVQPSQSLSITCTVSGFSLTNYGVHWVRQSPGKGLEWLGVIWSGGNTDYNTPFTSNLSINKDNSKSQVFFKMNSLQSNDTAIYYCARALTYYDYEFAYWGQGTLVTVSA

SEQ ID NO: 13525 - protein, 119 aa, Artificial Sequence
  source: /note="Description of Artificial Sequence: Synthetic polypeptide"
QVQLKQSGPGLVQPSQSLSITCTVSGFSLTNYGVHWVRQSPGKGLEWLGVIWSGGNTDYNTPFTSPLSINKDNSKSQVFFKMNSLQSNDTAIYYCARALTYYDYEFAYWGQGTLVTVSA

SEQ ID NO: 13526 - protein, 119 aa, Artificial Sequence
  source: /note="Description of Artificial Sequence: Synthetic polypeptide"
QVQLKQSGPGLVQPSQSLSITCTVSGFSLTNYGVHWVRQSPGKGLEWLGVIWSGGNTDYNTPFTSQLSINKDNSKSQVFFKMNSLQSNDTAIYYCARALTYYDYEFAYWGQGTLVTVSA

SEQ ID NO: 13527 - protein, 119 aa, Artificial Sequence
  source: /note="Description of Artificial Sequence: Synthetic polypeptide"
QVQLKQSGPGLVQPSQSLSITCTVSGFSLTNYGVHWVRQSPGKGLEWLGVIWSGGNTDYNTPFTSSLSINKDNSKSQVFFKMNSLQSNDTAIYYCARALTYYDYEFAYWGQGTLVTVSA

SEQ ID NO: 13528 - protein, 119 aa, Artificial Sequence
  source: /note="Description of Artificial Sequence: Synthetic polypeptide"
QVQLKQSGPGLVQPSQSLSITCTVSGFSLTNYGVHWVRQSPGKGLEWLGVIWSGGNTDYNTPFTSTLSINKDNSKSQVFFKMNSLQSNDTAIYYCARALTYYDYEFAYWGQGTLVTVSA

SEQ ID NO: 13529 - protein, 119 aa, Artificial Sequence
  source: /note="Description of Artificial Sequence: Synthetic polypeptide"
QVQLKQSGPGLVQPSQSLSITCTVSGFSLTNYGVHWVRQSPGKGLEWLGVIWSGGNTDYNTPFTSVLSINKDNSKSQVFFKMNSLQSNDTAIYYCARALTYYDYEFAYWGQGTLVTVSA

SEQ ID NO: 13530 - protein, 119 aa, Artificial Sequence
  source: /note="Description of Artificial Sequence: Synthetic polypeptide"
QVQLKQSGPGLVQPSQSLSITCTVSGFSLTNYGVHWVRQSPGKGLEWLGVIWSGGNTDYNTPFTSGLSINKDNSKSQVFFKMNSLQSNDTAIYYCARALTYYDYEFAYWGQGTLVTVSA

SEQ ID NO: 13531 - protein, 119 aa, Artificial Sequence
  source: /note="Description of Artificial Sequence: Synthetic polypeptide"
QVQLKQSGPGLVQPSQSLSITCTVSGFSLTNYGVHWVRQSPGKGLEWLGVIWSGGNTDYNTPFTSRASINKDNSKSQVFFKMNSLQSNDTAIYYCARALTYYDYEFAYWGQGTLVTVSA

SEQ ID NO: 13532 - protein, 119 aa, Artificial Sequence
  source: /note="Description of Artificial Sequence: Synthetic polypeptide"
QVQLKQSGPGLVQPSQSLSITCTVSGFSLTNYGVHWVRQSPGKGLEWLGVIWSGGNTDYNTPFTSRCSINKDNSKSQVFFKMNSLQSNDTAIYYCARALTYYDYEFAYWGQGTLVTVSA

SEQ ID NO: 13533 - protein, 119 aa, Artificial Sequence
  source: /note="Description of Artificial Sequence: Synthetic polypeptide"
QVQLKQSGPGLVQPSQSLSITCTVSGFSLTNYGVHWVRQSPGKGLEWLGVIWSGGNTDYNTPFTSRDSINKDNSKSQVFFKMNSLQSNDTAIYYCARALTYYDYEFAYWGQGTLVTVSA

SEQ ID NO: 13534 - protein, 119 aa, Artificial Sequence
  source: /note="Description of Artificial Sequence: Synthetic polypeptide"
QVQLKQSGPGLVQPSQSLSITCTVSGFSLTNYGVHWVRQSPGKGLEWLGVIWSGGNTDYNTPFTSRESINKDNSKSQVFFKMNSLQSNDTAIYYCARALTYYDYEFAYWGQGTLVTVSA

SEQ ID NO: 13535 - protein, 119 aa, Artificial Sequence
  source: /note="Description of Artificial Sequence: Synthetic polypeptide"
QVQLKQSGPGLVQPSQSLSITCTVSGFSLTNYGVHWVRQSPGKGLEWLGVIWSGGNTDYNTPFTSRISINKDNSKSQVFFKMNSLQSNDTAIYYCARALTYYDYEFAYWGQGTLVTVSA

SEQ ID NO: 13536 - protein, 119 aa, Artificial Sequence
  source: /note="Description of Artificial Sequence: Synthetic polypeptide"
QVQLKQSGPGLVQPSQSLSITCTVSGFSLTNYGVHWVRQSPGKGLEWLGVIWSGGNTDYNTPFTSRMSINKDNSKSQVFFKMNSLQSNDTAIYYCARALTYYDYEFAYWGQGTLVTVSA

SEQ ID NO: 13537 - protein, 119 aa, Artificial Sequence
  source: /note="Description of Artificial Sequence: Synthetic polypeptide"
QVQLKQSGPGLVQPSQSLSITCTVSGFSLTNYGVHWVRQSPGKGLEWLGVIWSGGNTDYNTPFTSRQSINKDNSKSQVFFKMNSLQSNDTAIYYCARALTYYDYEFAYWGQGTLVTVSA

SEQ ID NO: 13538 - protein, 119 aa, Artificial Sequence
  source: /note="Description of Artificial Sequence: Synthetic polypeptide"
QVQLKQSGPGLVQPSQSLSITCTVSGFSLTNYGVHWVRQSPGKGLEWLGVIWSGGNTDYNTPFTSRSSINKDNSKSQVFFKMNSLQSNDTAIYYCARALTYYDYEFAYWGQGTLVTVSA

SEQ ID NO: 13539 - protein, 119 aa, Artificial Sequence
  source: /note="Description of Artificial Sequence: Synthetic polypeptide"
QVQLKQSGPGLVQPSQSLSITCTVSGFSLTNYGVHWVRQSPGKGLEWLGVIWSGGNTDYNTPFTSRTSINKDNSKSQVFFKMNSLQSNDTAIYYCARALTYYDYEFAYWGQGTLVTVSA

SEQ ID NO: 13540 - protein, 119 aa, Artificial Sequence
  source: /note="Description of Artificial Sequence: Synthetic polypeptide"
QVQLKQSGPGLVQPSQSLSITCTVSGFSLTNYGVHWVRQSPGKGLEWLGVIWSGGNTDYNTPFTSRVSINKDNSKSQVFFKMNSLQSNDTAIYYCARALTYYDYEFAYWGQGTLVTVSA

SEQ ID NO: 13541 - protein, 119 aa, Artificial Sequence
  source: /note="Description of Artificial Sequence: Synthetic polypeptide"
QVQLKQSGPGLVQPSQSLSITCTVSGFSLTNYGVHWVRQSPGKGLEWLGVIWSGGNTDYNTPFTSRYSINKDNSKSQVFFKMNSLQSNDTAIYYCARALTYYDYEFAYWGQGTLVTVSA

SEQ ID NO: 13542 - protein, 119 aa, Artificial Sequence
  source: /note="Description of Artificial Sequence: Synthetic polypeptide"
QVQLKQSGPGLVQPSQSLSITCTVSGFSLTNYGVHWVRQSPGKGLEWLGVIWSGGNTDYNTPFTSRLKINKDNSKSQVFFKMNSLQSNDTAIYYCARALTYYDYEFAYWGQGTLVTVSA

SEQ ID NO: 13543 - protein, 119 aa, Artificial Sequence
  source: /note="Description of Artificial Sequence: Synthetic polypeptide"
QVQLKQSGPGLVQPSQSLSITCTVSGFSLTNYGVHWVRQSPGKGLEWLGVIWSGGNTDYNTPFTSRLHINKDNSKSQVFFKMNSLQSNDTAIYYCARALTYYDYEFAYWGQGTLVTVSA

SEQ ID NO: 13544 - protein, 119 aa, Artificial Sequence
  source: /note="Description of Artificial Sequence: Synthetic polypeptide"
QVQLKQSGPGLVQPSQSLSITCTVSGFSLTNYGVHWVRQSPGKGLEWLGVIWSGGNTDYNTPFTSRLRINKDNSKSQVFFKMNSLQSNDTAIYYCARALTYYDYEFAYWGQGTLVTVSA

SEQ ID NO: 13545 - protein, 119 aa, Artificial Sequence
  source: /note="Description of Artificial Sequence: Synthetic polypeptide"
QVQLKQSGPGLVQPSQSLSITCTVSGFSLTNYGVHWVRQSPGKGLEWLGVIWSGGNTDYNTPFTSRLLINKDNSKSQVFFKMNSLQSNDTAIYYCARALTYYDYEFAYWGQGTLVTVSA

SEQ ID NO: 13546 - protein, 119 aa, Artificial Sequence
  source: /note="Description of Artificial Sequence: Synthetic polypeptide"
QVQLKQSGPGLVQPSQSLSITCTVSGFSLTNYGVHWVRQSPGKGLEWLGVIWSGGNTDYNTPFTSRLCINKDNSKSQVFFKMNSLQSNDTAIYYCARALTYYDYEFAYWGQGTLVTVSA

SEQ ID NO: 13547 - protein, 119 aa, Artificial Sequence
  source: /note="Description of Artificial Sequence: Synthetic polypeptide"
QVQLKQSGPGLVQPSQSLSITCTVSGFSLTNYGVHWVRQSPGKGLEWLGVIWSGGNTDYNTPFTSRLDINKDNSKSQVFFKMNSLQSNDTAIYYCARALTYYDYEFAYWGQGTLVTVSA

SEQ ID NO: 13548 - protein, 119 aa, Artificial Sequence
  source: /note="Description of Artificial Sequence: Synthetic polypeptide"
QVQLKQSGPGLVQPSQSLSITCTVSGFSLTNYGVHWVRQSPGKGLEWLGVIWSGGNTDYNTPFTSRLEINKDNSKSQVFFKMNSLQSNDTAIYYCARALTYYDYEFAYWGQGTLVTVSA

SEQ ID NO: 13549 - protein, 119 aa, Artificial Sequence
  source: /note="Description of Artificial Sequence: Synthetic polypeptide"
QVQLKQSGPGLVQPSQSLSITCTVSGFSLTNYGVHWVRQSPGKGLEWLGVIWSGGNTDYNTPFTSRLFINKDNSKSQVFFKMNSLQSNDTAIYYCARALTYYDYEFAYWGQGTLVTVSA

SEQ ID NO: 13550 - protein, 119 aa, Artificial Sequence
  source: /note="Description of Artificial Sequence: Synthetic polypeptide"
QVQLKQSGPGLVQPSQSLSITCTVSGFSLTNYGVHWVRQSPGKGLEWLGVIWSGGNTDYNTPFTSRLGINKDNSKSQVFFKMNSLQSNDTAIYYCARALTYYDYEFAYWGQGTLVTVSA

SEQ ID NO: 13551 - protein, 119 aa, Artificial Sequence
  source: /note="Description of Artificial Sequence: Synthetic polypeptide"
QVQLKQSGPGLVQPSQSLSITCTVSGFSLTNYGVHWVRQSPGKGLEWLGVIWSGGNTDYNTPFTSRLIINKDNSKSQVFFKMNSLQSNDTAIYYCARALTYYDYEFAYWGQGTLVTVSA

SEQ ID NO: 13552 - protein, 119 aa, Artificial Sequence
  source: /note="Description of Artificial Sequence: Synthetic polypeptide"
QVQLKQSGPGLVQPSQSLSITCTVSGFSLTNYGVHWVRQSPGKGLEWLGVIWSGGNTDYNTPFTSRLNINKDNSKSQVFFKMNSLQSNDTAIYYCARALTYYDYEFAYWGQGTLVTVSA

SEQ ID NO: 13553 - protein, 119 aa, Artificial Sequence
  source: /note="Description of Artificial Sequence: Synthetic polypeptide"
QVQLKQSGPGLVQPSQSLSITCTVSGFSLTNYGVHWVRQSPGKGLEWLGVIWSGGNTDYNTPFTSRLQINKDNSKSQVFFKMNSLQSNDTAIYYCARALTYYDYEFAYWGQGTLVTVSA

SEQ ID NO: 13554 - protein, 119 aa, Artificial Sequence
  source: /note="Description of Artificial Sequence: Synthetic polypeptide"
QVQLKQSGPGLVQPSQSLSITCTVSGFSLTNYGVHWVRQSPGKGLEWLGVIWSGGNTDYNTPFTSRLTINKDNSKSQVFFKMNSLQSNDTAIYYCARALTYYDYEFAYWGQGTLVTVSA

SEQ ID NO: 13555 - protein, 119 aa, Artificial Sequence
  source: /note="Description of Artificial Sequence: Synthetic polypeptide"
QVQLKQSGPGLVQPSQSLSITCTVSGFSLTNYGVHWVRQSPGKGLEWLGVIWSGGNTDYNTPFTSRLVINKDNSKSQVFFKMNSLQSNDTAIYYCARALTYYDYEFAYWGQGTLVTVSA

SEQ ID NO: 13556 - protein, 119 aa, Artificial Sequence
  source: /note="Description of Artificial Sequence: Synthetic polypeptide"
QVQLKQSGPGLVQPSQSLSITCTVSGFSLTNYGVHWVRQSPGKGLEWLGVIWSGGNTDYNTPFTSRLSANKDNSKSQVFFKMNSLQSNDTAIYYCARALTYYDYEFAYWGQGTLVTVSA

SEQ ID NO: 13557 - protein, 119 aa, Artificial Sequence
  source: /note="Description of Artificial Sequence: Synthetic polypeptide"
QVQLKQSGPGLVQPSQSLSITCTVSGFSLTNYGVHWVRQSPGKGLEWLGVIWSGGNTDYNTPFTSRLSCNKDNSKSQVFFKMNSLQSNDTAIYYCARALTYYDYEFAYWGQGTLVTVSA

SEQ ID NO: 13558 - protein, 119 aa, Artificial Sequence
  source: /note="Description of Artificial Sequence: Synthetic polypeptide"
QVQLKQSGPGLVQPSQSLSITCTVSGFSLTNYGVHWVRQSPGKGLEWLGVIWSGGNTDYNTPFTSRLSGNKDNSKSQVFFKMNSLQSNDTAIYYCARALTYYDYEFAYWGQGTLVTVSA

SEQ ID NO: 13559 - protein, 119 aa, Artificial Sequence
  source: /note="Description of Artificial Sequence: Synthetic polypeptide"
QVQLKQSGPGLVQPSQSLSITCTVSGFSLTNYGVHWVRQSPGKGLEWLGVIWSGGNTDYNTPFTSRLSYNKDNSKSQVFFKMNSLQSNDTAIYYCARALTYYDYEFAYWGQGTLVTVSA

SEQ ID NO: 13560 - protein, 119 aa, Artificial Sequence
  source: /note="Description of Artificial Sequence: Synthetic polypeptide"
QVQLKQSGPGLVQPSQSLSITCTVSGFSLTNYGVHWVRQSPGKGLEWLGVIWSGGNTDYNTPFTSRLSIHKDNSKSQVFFKMNSLQSNDTAIYYCARALTYYDYEFAYWGQGTLVTVSA

SEQ ID NO: 13561 - protein, 119 aa, Artificial Sequence
  source: /note="Description of Artificial Sequence: Synthetic polypeptide"
QVQLKQSGPGLVQPSQSLSITCTVSGFSLTNYGVHWVRQSPGKGLEWLGVIWSGGNTDYNTPFTSRLSIRKDNSKSQVFFKMNSLQSNDTAIYYCARALTYYDYEFAYWGQGTLVTVSA

SEQ ID NO: 13562 - protein, 119 aa, Artificial Sequence
  source: /note="Description of Artificial Sequence: Synthetic polypeptide"
QVQLKQSGPGLVQPSQSLSITCTVSGFSLTNYGVHWVRQSPGKGLEWLGVIWSGGNTDYNTPFTSRLSILKDNSKSQVFFKMNSLQSNDTAIYYCARALTYYDYEFAYWGQGTLVTVSA

SEQ ID NO: 13563 - protein, 119 aa, Artificial Sequence
  source: /note="Description of Artificial Sequence: Synthetic polypeptide"
QVQLKQSGPGLVQPSQSLSITCTVSGFSLTNYGVHWVRQSPGKGLEWLGVIWSGGNTDYNTPFTSRLSIDKDNSKSQVFFKMNSLQSNDTAIYYCARALTYYDYEFAYWGQGTLVTVSA

SEQ ID NO: 13564 - protein, 119 aa, Artificial Sequence
  source: /note="Description of Artificial Sequence: Synthetic polypeptide"
QVQLKQSGPGLVQPSQSLSITCTVSGFSLTNYGVHWVRQSPGKGLEWLGVIWSGGNTDYNTPFTSRLSIEKDNSKSQVFFKMNSLQSNDTAIYYCARALTYYDYEFAYWGQGTLVTVSA

SEQ ID NO: 13565 - protein, 119 aa, Artificial Sequence
  source: /note="Description of Artificial Sequence: Synthetic polypeptide"
QVQLKQSGPGLVQPSQSLSITCTVSGFSLTNYGVHWVRQSPGKGLEWLGVIWSGGNTDYNTPFTSRLSIFKDNSKSQVFFKMNSLQSNDTAIYYCARALTYYDYEFAYWGQGTLVTVSA

SEQ ID NO: 13566 - protein, 119 aa, Artificial Sequence
  source: /note="Description of Artificial Sequence: Synthetic polypeptide"
QVQLKQSGPGLVQPSQSLSITCTVSGFSLTNYGVHWVRQSPGKGLEWLGVIWSGGNTDYNTPFTSRLSIGKDNSKSQVFFKMNSLQSNDTAIYYCARALTYYDYEFAYWGQGTLVTVSA

SEQ ID NO: 13567 - protein, 119 aa, Artificial Sequence
  source: /note="Description of Artificial Sequence: Synthetic polypeptide"
QVQLKQSGPGLVQPSQSLSITCTVSGFSLTNYGVHWVRQSPGKGLEWLGVIWSGGNTDYNTPFTSRLSIIKDNSKSQVFFKMNSLQSNDTAIYYCARALTYYDYEFAYWGQGTLVTVSA

SEQ ID NO: 13568 - protein, 119 aa, Artificial Sequence
  source: /note="Description of Artificial Sequence: Synthetic polypeptide"
QVQLKQSGPGLVQPSQSLSITCTVSGFSLTNYGVHWVRQSPGKGLEWLGVIWSGGNTDYNTPFTSRLSIPKDNSKSQVFFKMNSLQSNDTAIYYCARALTYYDYEFAYWGQGTLVTVSA

SEQ ID NO: 13569 - protein, 119 aa, Artificial Sequence
  source: /note="Description of Artificial Sequence: Synthetic polypeptide"
QVQLKQSGPGLVQPSQSLSITCTVSGFSLTNYGVHWVRQSPGKGLEWLGVIWSGGNTDYNTPFTSRLSIQKDNSKSQVFFKMNSLQSNDTAIYYCARALTYYDYEFAYWGQGTLVTVSA

SEQ ID NO: 13570 - protein, 119 aa, Artificial Sequence
  source: /note="Description of Artificial Sequence: Synthetic polypeptide"
QVQLKQSGPGLVQPSQSLSITCTVSGFSLTNYGVHWVRQSPGKGLEWLGVIWSGGNTDYNTPFTSRLSISKDNSKSQVFFKMNSLQSNDTAIYYCARALTYYDYEFAYWGQGTLVTVSA

SEQ ID NO: 13571 - protein, 119 aa, Artificial Sequence
  source: /note="Description of Artificial Sequence: Synthetic polypeptide"
QVQLKQSGPGLVQPSQSLSITCTVSGFSLTNYGVHWVRQSPGKGLEWLGVIWSGGNTDYNTPFTSRLSITKDNSKSQVFFKMNSLQSNDTAIYYCARALTYYDYEFAYWGQGTLVTVSA

SEQ ID NO: 13572 - protein, 119 aa, Artificial Sequence
  source: /note="Description of Artificial Sequence: Synthetic polypeptide"
QVQLKQSGPGLVQPSQSLSITCTVSGFSLTNYGVHWVRQSPGKGLEWLGVIWSGGNTDYNTPFTSRLSIVKDNSKSQVFFKMNSLQSNDTAIYYCARALTYYDYEFAYWGQGTLVTVSA

SEQ ID NO: 13573 - protein, 119 aa, Artificial Sequence
  source: /note="Description of Artificial Sequence: Synthetic polypeptide"
QVQLKQSGPGLVQPSQSLSITCTVSGFSLTNYGVHWVRQSPGKGLEWLGVIWSGGNTDYNTPFTSRLSIYKDNSKSQVFFKMNSLQSNDTAIYYCARALTYYDYEFAYWGQGTLVTVSA

SEQ ID NO: 13574 - protein, 119 aa, Artificial Sequence
  source: /note="Description of Artificial Sequence: Synthetic polypeptide"
QVQLKQSGPGLVQPSQSLSITCTVSGFSLTNYGVHWVRQSPGKGLEWLGVIWSGGNTDYNTPFTSRLSINHDNSKSQVFFKMNSLQSNDTAIYYCARALTYYDYEFAYWGQGTLVTVSA

SEQ ID NO: 13575 - protein, 119 aa, Artificial Sequence
  source: /note="Description of Artificial Sequence: Synthetic polypeptide"
QVQLKQSGPGLVQPSQSLSITCTVSGFSLTNYGVHWVRQSPGKGLEWLGVIWSGGNTDYNTPFTSRLSINRDNSKSQVFFKMNSLQSNDTAIYYCARALTYYDYEFAYWGQGTLVTVSA

SEQ ID NO: 13576 - protein, 119 aa, Artificial Sequence
  source: /note="Description of Artificial Sequence: Synthetic polypeptide"
QVQLKQSGPGLVQPSQSLSITCTVSGFSLTNYGVHWVRQSPGKGLEWLGVIWSGGNTDYNTPFTSRLSINLDNSKSQVFFKMNSLQSNDTAIYYCARALTYYDYEFAYWGQGTLVTVSA

SEQ ID NO: 13577 - protein, 119 aa, Artificial Sequence
  source: /note="Description of Artificial Sequence: Synthetic polypeptide"
QVQLKQSGPGLVQPSQSLSITCTVSGFSLTNYGVHWVRQSPGKGLEWLGVIWSGGNTDYNTPFTSRLSINADNSKSQVFFKMNSLQSNDTAIYYCARALTYYDYEFAYWGQGTLVTVSA

SEQ ID NO: 13578 - protein, 119 aa, Artificial Sequence
  source: /note="Description of Artificial Sequence: Synthetic polypeptide"
QVQLKQSGPGLVQPSQSLSITCTVSGFSLTNYGVHWVRQSPGKGLEWLGVIWSGGNTDYNTPFTSRLSINCDNSKSQVFFKMNSLQSNDTAIYYCARALTYYDYEFAYWGQGTLVTVSA

SEQ ID NO: 13579 - protein, 119 aa, Artificial Sequence
  source: /note="Description of Artificial Sequence: Synthetic polypeptide"
QVQLKQSGPGLVQPSQSLSITCTVSGFSLTNYGVHWVRQSPGKGLEWLGVIWSGGNTDYNTPFTSRLSINFDNSKSQVFFKMNSLQSNDTAIYYCARALTYYDYEFAYWGQGTLVTVSA

SEQ ID NO: 13580 - protein, 119 aa, Artificial Sequence
  source: /note="Description of Artificial Sequence: Synthetic polypeptide"
QVQLKQSGPGLVQPSQSLSITCTVSGFSLTNYGVHWVRQSPGKGLEWLGVIWSGGNTDYNTPFTSRLSINGDNSKSQVFFKMNSLQSNDTAIYYCARALTYYDYEFAYWGQGTLVTVSA

SEQ ID NO: 13581 - protein, 119 aa, Artificial Sequence
  source: /note="Description of Artificial Sequence: Synthetic polypeptide"
QVQLKQSGPGLVQPSQSLSITCTVSGFSLTNYGVHWVRQSPGKGLEWLGVIWSGGNTDYNTPFTSRLSINQDNSKSQVFFKMNSLQSNDTAIYYCARALTYYDYEFAYWGQGTLVTVSA

SEQ ID NO: 13582 - protein, 119 aa, Artificial Sequence
  source: /note="Description of Artificial Sequence: Synthetic polypeptide"
QVQLKQSGPGLVQPSQSLSITCTVSGFSLTNYGVHWVRQSPGKGLEWLGVIWSGGNTDYNTPFTSRLSINSDNSKSQVFFKMNSLQSNDTAIYYCARALTYYDYEFAYWGQGTLVTVSA

SEQ ID NO: 13583 - protein, 119 aa, Artificial Sequence
  source: /note="Description of Artificial Sequence: Synthetic polypeptide"
QVQLKQSGPGLVQPSQSLSITCTVSGFSLTNYGVHWVRQSPGKGLEWLGVIWSGGNTDYNTPFTSRLSINTDNSKSQVFFKMNSLQSNDTAIYYCARALTYYDYEFAYWGQGTLVTVSA

SEQ ID NO: 13584 - protein, 119 aa, Artificial Sequence
  source: /note="Description of Artificial Sequence: Synthetic polypeptide"
QVQLKQSGPGLVQPSQSLSITCTVSGFSLTNYGVHWVRQSPGKGLEWLGVIWSGGNTDYNTPFTSRLSINVDNSKSQVFFKMNSLQSNDTAIYYCARALTYYDYEFAYWGQGTLVTVSA

SEQ ID NO: 13585 - protein, 119 aa, Artificial Sequence
  source: /note="Description of Artificial Sequence: Synthetic polypeptide"
QVQLKQSGPGLVQPSQSLSITCTVSGFSLTNYGVHWVRQSPGKGLEWLGVIWSGGNTDYNTPFTSRLSINWDNSKSQVFFKMNSLQSNDTAIYYCARALTYYDYEFAYWGQGTLVTVSA

SEQ ID NO: 13586 - protein, 119 aa, Artificial Sequence
  source: /note="Description of Artificial Sequence: Synthetic polypeptide"
QVQLKQSGPGLVQPSQSLSITCTVSGFSLTNYGVHWVRQSPGKGLEWLGVIWSGGNTDYNTPFTSRLSINYDNSKSQVFFKMNSLQSNDTAIYYCARALTYYDYEFAYWGQGTLVTVSA

SEQ ID NO: 13587 - protein, 119 aa, Artificial Sequence
  source: /note="Description of Artificial Sequence: Synthetic polypeptide"
QVQLKQSGPGLVQPSQSLSITCTVSGFSLTNYGVHWVRQSPGKGLEWLGVIWSGGNTDYNTPFTSRLSINKKNSKSQVFFKMNSLQSNDTAIYYCARALTYYDYEFAYWGQGTLVTVSA

SEQ ID NO: 13588 - protein, 119 aa, Artificial Sequence
  source: /note="Description of Artificial Sequence: Synthetic polypeptide"
QVQLKQSGPGLVQPSQSLSITCTVSGFSLTNYGVHWVRQSPGKGLEWLGVIWSGGNTDYNTPFTSRLSINKHNSKSQVFFKMNSLQSNDTAIYYCARALTYYDYEFAYWGQGTLVTVSA

SEQ ID NO: 13589 - protein, 119 aa, Artificial Sequence
  source: /note="Description of Artificial Sequence: Synthetic polypeptide"
QVQLKQSGPGLVQPSQSLSITCTVSGFSLTNYGVHWVRQSPGKGLEWLGVIWSGGNTDYNTPFTSRLSINKRNSKSQVFFKMNSLQSNDTAIYYCARALTYYDYEFAYWGQGTLVTVSA

SEQ ID NO: 13590 - protein, 119 aa, Artificial Sequence
  source: /note="Description of Artificial Sequence: Synthetic polypeptide"
QVQLKQSGPGLVQPSQSLSITCTVSGFSLTNYGVHWVRQSPGKGLEWLGVIWSGGNTDYNTPFTSRLSINKLNSKSQVFFKMNSLQSNDTAIYYCARALTYYDYEFAYWGQGTLVTVSA

SEQ ID NO: 13591 - protein, 119 aa, Artificial Sequence
  source: /note="Description of Artificial Sequence: Synthetic polypeptide"
QVQLKQSGPGLVQPSQSLSITCTVSGFSLTNYGVHWVRQSPGKGLEWLGVIWSGGNTDYNTPFTSRLSINKANSKSQVFFKMNSLQSNDTAIYYCARALTYYDYEFAYWGQGTLVTVSA

SEQ ID NO: 13592 - protein, 119 aa, Artificial Sequence
  source: /note="Description of Artificial Sequence: Synthetic polypeptide"
QVQLKQSGPGLVQPSQSLSITCTVSGFSLTNYGVHWVRQSPGKGLEWLGVIWSGGNTDYNTPFTSRLSINKGNSKSQVFFKMNSLQSNDTAIYYCARALTYYDYEFAYWGQGTLVTVSA

SEQ ID NO: 13593 - protein, 119 aa, Artificial Sequence
  source: /note="Description of Artificial Sequence: Synthetic polypeptide"
QVQLKQSGPGLVQPSQSLSITCTVSGFSLTNYGVHWVRQSPGKGLEWLGVIWSGGNTDYNTPFTSRLSINKINSKSQVFFKMNSLQSNDTAIYYCARALTYYDYEFAYWGQGTLVTVSA

SEQ ID NO: 13594 - protein, 119 aa, Artificial Sequence
  source: /note="Description of Artificial Sequence: Synthetic polypeptide"
QVQLKQSGPGLVQPSQSLSITCTVSGFSLTNYGVHWVRQSPGKGLEWLGVIWSGGNTDYNTPFTSRLSINKMNSKSQVFFKMNSLQSNDTAIYYCARALTYYDYEFAYWGQGTLVTVSA

SEQ ID NO: 13595 - protein, 119 aa, Artificial Sequence
  source: /note="Description of Artificial Sequence: Synthetic polypeptide"
QVQLKQSGPGLVQPSQSLSITCTVSGFSLTNYGVHWVRQSPGKGLEWLGVIWSGGNTDYNTPFTSRLSINKNNSKSQVFFKMNSLQSNDTAIYYCARALTYYDYEFAYWGQGTLVTVSA

SEQ ID NO: 13596 - protein, 119 aa, Artificial Sequence
  source: /note="Description of Artificial Sequence: Synthetic polypeptide"
QVQLKQSGPGLVQPSQSLSITCTVSGFSLTNYGVHWVRQSPGKGLEWLGVIWSGGNTDYNTPFTSRLSINKQNSKSQVFFKMNSLQSNDTAIYYCARALTYYDYEFAYWGQGTLVTVSA

SEQ ID NO: 13597 - protein, 119 aa, Artificial Sequence
  source: /note="Description of Artificial Sequence: Synthetic polypeptide"
QVQLKQSGPGLVQPSQSLSITCTVSGFSLTNYGVHWVRQSPGKGLEWLGVIWSGGNTDYNTPFTSRLSINKSNSKSQVFFKMNSLQSNDTAIYYCARALTYYDYEFAYWGQGTLVTVSA

SEQ ID NO: 13598 - protein, 119 aa, Artificial Sequence
  source: /note="Description of Artificial Sequence: Synthetic polypeptide"
QVQLKQSGPGLVQPSQSLSITCTVSGFSLTNYGVHWVRQSPGKGLEWLGVIWSGGNTDYNTPFTSRLSINKVNSKSQVFFKMNSLQSNDTAIYYCARALTYYDYEFAYWGQGTLVTVSA

SEQ ID NO: 13599 - protein, 119 aa, Artificial Sequence
  source: /note="Description of Artificial Sequence: Synthetic polypeptide"
QVQLKQSGPGLVQPSQSLSITCTVSGFSLTNYGVHWVRQSPGKGLEWLGVIWSGGNTDYNTPFTSRLSINKWNSKSQVFFKMNSLQSNDTAIYYCARALTYYDYEFAYWGQGTLVTVSA

SEQ ID NO: 13600 - protein, 119 aa, Artificial Sequence
  source: /note="Description of Artificial Sequence: Synthetic polypeptide"
QVQLKQSGPGLVQPSQSLSITCTVSGFSLTNYGVHWVRQSPGKGLEWLGVIWSGGNTDYNTPFTSRLSINKYNSKSQVFFKMNSLQSNDTAIYYCARALTYYDYEFAYWGQGTLVTVSA

SEQ ID NO: 13601 - protein, 119 aa, Artificial Sequence
  source: /note="Description of Artificial Sequence: Synthetic polypeptide"
QVQLKQSGPGLVQPSQSLSITCTVSGFSLTNYGVHWVRQSPGKGLEWLGVIWSGGNTDYNTPFTSRLSINKDHSKSQVFFKMNSLQSNDTAIYYCARALTYYDYEFAYWGQGTLVTVSA

SEQ ID NO: 13602 - protein, 119 aa, Artificial Sequence
  source: /note="Description of Artificial Sequence: Synthetic polypeptide"
QVQLKQSGPGLVQPSQSLSITCTVSGFSLTNYGVHWVRQSPGKGLEWLGVIWSGGNTDYNTPFTSRLSINKDRSKSQVFFKMNSLQSNDTAIYYCARALTYYDYEFAYWGQGTLVTVSA

SEQ ID NO: 13603 - protein, 119 aa, Artificial Sequence
  source: /note="Description of Artificial Sequence: Synthetic polypeptide"
QVQLKQSGPGLVQPSQSLSITCTVSGFSLTNYGVHWVRQSPGKGLEWLGVIWSGGNTDYNTPFTSRLSINKDLSKSQVFFKMNSLQSNDTAIYYCARALTYYDYEFAYWGQGTLVTVSA

SEQ ID NO: 13604 - protein, 119 aa, Artificial Sequence
  source: /note="Description of Artificial Sequence: Synthetic polypeptide"
QVQLKQSGPGLVQPSQSLSITCTVSGFSLTNYGVHWVRQSPGKGLEWLGVIWSGGNTDYNTPFTSRLSINKDASKSQVFFKMNSLQSNDTAIYYCARALTYYDYEFAYWGQGTLVTVSA

SEQ ID NO: 13605 - protein, 119 aa, Artificial Sequence
  source: /note="Description of Artificial Sequence: Synthetic polypeptide"
QVQLKQSGPGLVQPSQSLSITCTVSGFSLTNYGVHWVRQSPGKGLEWLGVIWSGGNTDYNTPFTSRLSINKDCSKSQVFFKMNSLQSNDTAIYYCARALTYYDYEFAYWGQGTLVTVSA

SEQ ID NO: 13606 - protein, 119 aa, Artificial Sequence
  source: /note="Description of Artificial Sequence: Synthetic polypeptide"
QVQLKQSGPGLVQPSQSLSITCTVSGFSLTNYGVHWVRQSPGKGLEWLGVIWSGGNTDYNTPFTSRLSINKDGSKSQVFFKMNSLQSNDTAIYYCARALTYYDYEFAYWGQGTLVTVSA

SEQ ID NO: 13607 - protein, 119 aa, Artificial Sequence
  source: /note="Description of Artificial Sequence: Synthetic polypeptide"
QVQLKQSGPGLVQPSQSLSITCTVSGFSLTNYGVHWVRQSPGKGLEWLGVIWSGGNTDYNTPFTSRLSINKDISKSQVFFKMNSLQSNDTAIYYCARALTYYDYEFAYWGQGTLVTVSA

SEQ ID NO: 13608 - protein, 119 aa, Artificial Sequence
  source: /note="Description of Artificial Sequence: Synthetic polypeptide"
QVQLKQSGPGLVQPSQSLSITCTVSGFSLTNYGVHWVRQSPGKGLEWLGVIWSGGNTDYNTPFTSRLSINKDMSKSQVFFKMNSLQSNDTAIYYCARALTYYDYEFAYWGQGTLVTVSA

SEQ ID NO: 13609 - protein, 119 aa, Artificial Sequence
  source: /note="Description of Artificial Sequence: Synthetic polypeptide"
QVQLKQSGPGLVQPSQSLSITCTVSGFSLTNYGVHWVRQSPGKGLEWLGVIWSGGNTDYNTPFTSRLSINKDPSKSQVFFKMNSLQSNDTAIYYCARALTYYDYEFAYWGQGTLVTVSA

SEQ ID NO: 13610 - protein, 119 aa, Artificial Sequence
  source: /note="Description of Artificial Sequence: Synthetic polypeptide"
QVQLKQSGPGLVQPSQSLSITCTVSGFSLTNYGVHWVRQSPGKGLEWLGVIWSGGNTDYNTPFTSRLSINKDQSKSQVFFKMNSLQSNDTAIYYCARALTYYDYEFAYWGQGTLVTVSA

SEQ ID NO: 13611 - protein, 119 aa, Artificial Sequence
  source: /note="Description of Artificial Sequence: Synthetic polypeptide"
QVQLKQSGPGLVQPSQSLSITCTVSGFSLTNYGVHWVRQSPGKGLEWLGVIWSGGNTDYNTPFTSRLSINKDSSKSQVFFKMNSLQSNDTAIYYCARALTYYDYEFAYWGQGTLVTVSA

SEQ ID NO: 13612 - protein, 119 aa, Artificial Sequence
  source: /note="Description of Artificial Sequence: Synthetic polypeptide"
QVQLKQSGPGLVQPSQSLSITCTVSGFSLTNYGVHWVRQSPGKGLEWLGVIWSGGNTDYNTPFTSRLSINKDTSKSQVFFKMNSLQSNDTAIYYCARALTYYDYEFAYWGQGTLVTVSA

SEQ ID NO: 13613 - protein, 119 aa, Artificial Sequence
  source: /note="Description of Artificial Sequence: Synthetic polypeptide"
QVQLKQSGPGLVQPSQSLSITCTVSGFSLTNYGVHWVRQSPGKGLEWLGVIWSGGNTDYNTPFTSRLSINKDVSKSQVFFKMNSLQSNDTAIYYCARALTYYDYEFAYWGQGTLVTVSA

SEQ ID NO: 13614 - protein, 119 aa, Artificial Sequence
  source: /note="Description of Artificial Sequence: Synthetic polypeptide"
QVQLKQSGPGLVQPSQSLSITCTVSGFSLTNYGVHWVRQSPGKGLEWLGVIWSGGNTDYNTPFTSRLSINKDWSKSQVFFKMNSLQSNDTAIYYCARALTYYDYEFAYWGQGTLVTVSA

SEQ ID NO: 13615 - protein, 119 aa, Artificial Sequence
  source: /note="Description of Artificial Sequence: Synthetic polypeptide"
QVQLKQSGPGLVQPSQSLSITCTVSGFSLTNYGVHWVRQSPGKGLEWLGVIWSGGNTDYNTPFTSRLSINKDYSKSQVFFKMNSLQSNDTAIYYCARALTYYDYEFAYWGQGTLVTVSA

SEQ ID NO: 13616 - protein, 119 aa, Artificial Sequence
  source: /note="Description of Artificial Sequence: Synthetic polypeptide"
QVQLKQSGPGLVQPSQSLSITCTVSGFSLTNYGVHWVRQSPGKGLEWLGVIWSGGNTDYNTPFTSRLSINKDNKKSQVFFKMNSLQSNDTAIYYCARALTYYDYEFAYWGQGTLVTVSA

SEQ ID NO: 13617 - protein, 119 aa, Artificial Sequence
  source: /note="Description of Artificial Sequence: Synthetic polypeptide"
QVQLKQSGPGLVQPSQSLSITCTVSGFSLTNYGVHWVRQSPGKGLEWLGVIWSGGNTDYNTPFTSRLSINKDNHKSQVFFKMNSLQSNDTAIYYCARALTYYDYEFAYWGQGTLVTVSA

SEQ ID NO: 13618 - protein, 119 aa, Artificial Sequence
  source: /note="Description of Artificial Sequence: Synthetic polypeptide"
QVQLKQSGPGLVQPSQSLSITCTVSGFSLTNYGVHWVRQSPGKGLEWLGVIWSGGNTDYNTPFTSRLSINKDNRKSQVFFKMNSLQSNDTAIYYCARALTYYDYEFAYWGQGTLVTVSA

SEQ ID NO: 13619 - protein, 119 aa, Artificial Sequence
  source: /note="Description of Artificial Sequence: Synthetic polypeptide"
QVQLKQSGPGLVQPSQSLSITCTVSGFSLTNYGVHWVRQSPGKGLEWLGVIWSGGNTDYNTPFTSRLSINKDNLKSQVFFKMNSLQSNDTAIYYCARALTYYDYEFAYWGQGTLVTVSA

SEQ ID NO: 13620 - protein, 119 aa, Artificial Sequence
  source: /note="Description of Artificial Sequence: Synthetic polypeptide"
QVQLKQSGPGLVQPSQSLSITCTVSGFSLTNYGVHWVRQSPGKGLEWLGVIWSGGNTDYNTPFTSRLSINKDNAKSQVFFKMNSLQSNDTAIYYCARALTYYDYEFAYWGQGTLVTVSA

SEQ ID NO: 13621 - protein, 119 aa, Artificial Sequence
  source: /note="Description of Artificial Sequence: Synthetic polypeptide"
QVQLKQSGPGLVQPSQSLSITCTVSGFSLTNYGVHWVRQSPGKGLEWLGVIWSGGNTDYNTPFTSRLSINKDNCKSQVFFKMNSLQSNDTAIYYCARALTYYDYEFAYWGQGTLVTVSA

SEQ ID NO: 13622 - protein, 119 aa, Artificial Sequence
  source: /note="Description of Artificial Sequence: Synthetic polypeptide"
QVQLKQSGPGLVQPSQSLSITCTVSGFSLTNYGVHWVRQSPGKGLEWLGVIWSGGNTDYNTPFTSRLSINKDNDKSQVFFKMNSLQSNDTAIYYCARALTYYDYEFAYWGQGTLVTVSA

SEQ ID NO: 13623 - protein, 119 aa, Artificial Sequence
  source: /note="Description of Artificial Sequence: Synthetic polypeptide"
QVQLKQSGPGLVQPSQSLSITCTVSGFSLTNYGVHWVRQSPGKGLEWLGVIWSGGNTDYNTPFTSRLSINKDNEKSQVFFKMNSLQSNDTAIYYCARALTYYDYEFAYWGQGTLVTVSA

SEQ ID NO: 13624 - protein, 119 aa, Artificial Sequence
  source: /note="Description of Artificial Sequence: Synthetic polypeptide"
QVQLKQSGPGLVQPSQSLSITCTVSGFSLTNYGVHWVRQSPGKGLEWLGVIWSGGNTDYNTPFTSRLSINKDNGKSQVFFKMNSLQSNDTAIYYCARALTYYDYEFAYWGQGTLVTVSA

SEQ ID NO: 13625 - protein, 119 aa, Artificial Sequence
  source: /note="Description of Artificial Sequence: Synthetic polypeptide"
QVQLKQSGPGLVQPSQSLSITCTVSGFSLTNYGVHWVRQSPGKGLEWLGVIWSGGNTDYNTPFTSRLSINKDNIKSQVFFKMNSLQSNDTAIYYCARALTYYDYEFAYWGQGTLVTVSA

SEQ ID NO: 13626 - protein, 119 aa, Artificial Sequence
  source: /note="Description of Artificial Sequence: Synthetic polypeptide"
QVQLKQSGPGLVQPSQSLSITCTVSGFSLTNYGVHWVRQSPGKGLEWLGVIWSGGNTDYNTPFTSRLSINKDNMKSQVFFKMNSLQSNDTAIYYCARALTYYDYEFAYWGQGTLVTVSA

SEQ ID NO: 13627 - protein, 119 aa, Artificial Sequence
  source: /note="Description of Artificial Sequence: Synthetic polypeptide"
QVQLKQSGPGLVQPSQSLSITCTVSGFSLTNYGVHWVRQSPGKGLEWLGVIWSGGNTDYNTPFTSRLSINKDNPKSQVFFKMNSLQSNDTAIYYCARALTYYDYEFAYWGQGTLVTVSA

SEQ ID NO: 13628 - protein, 119 aa, Artificial Sequence
  source: /note="Description of Artificial Sequence: Synthetic polypeptide"
QVQLKQSGPGLVQPSQSLSITCTVSGFSLTNYGVHWVRQSPGKGLEWLGVIWSGGNTDYNTPFTSRLSINKDNTKSQVFFKMNSLQSNDTAIYYCARALTYYDYEFAYWGQGTLVTVSA

SEQ ID NO: 13629 - protein, 119 aa, Artificial Sequence
  source: /note="Description of Artificial Sequence: Synthetic polypeptide"
QVQLKQSGPGLVQPSQSLSITCTVSGFSLTNYGVHWVRQSPGKGLEWLGVIWSGGNTDYNTPFTSRLSINKDNVKSQVFFKMNSLQSNDTAIYYCARALTYYDYEFAYWGQGTLVTVSA

SEQ ID NO: 13630 - protein, 119 aa, Artificial Sequence
  source: /note="Description of Artificial Sequence: Synthetic polypeptide"
QVQLKQSGPGLVQPSQSLSITCTVSGFSLTNYGVHWVRQSPGKGLEWLGVIWSGGNTDYNTPFTSRLSINKDNYKSQVFFKMNSLQSNDTAIYYCARALTYYDYEFAYWGQGTLVTVSA

SEQ ID NO: 13631 - protein, 119 aa, Artificial Sequence
  source: /note="Description of Artificial Sequence: Synthetic polypeptide"
QVQLKQSGPGLVQPSQSLSITCTVSGFSLTNYGVHWVRQSPGKGLEWLGVIWSGGNTDYNTPFTSRLSINKDNSHSQVFFKMNSLQSNDTAIYYCARALTYYDYEFAYWGQGTLVTVSA

SEQ ID NO: 13632 - protein, 119 aa, Artificial Sequence
  source: /note="Description of Artificial Sequence: Synthetic polypeptide"
QVQLKQSGPGLVQPSQSLSITCTVSGFSLTNYGVHWVRQSPGKGLEWLGVIWSGGNTDYNTPFTSRLSINKDNSRSQVFFKMNSLQSNDTAIYYCARALTYYDYEFAYWGQGTLVTVSA

SEQ ID NO: 13633 - protein, 119 aa, Artificial Sequence
  source: /note="Description of Artificial Sequence: Synthetic polypeptide"
QVQLKQSGPGLVQPSQSLSITCTVSGFSLTNYGVHWVRQSPGKGLEWLGVIWSGGNTDYNTPFTSRLSINKDNSLSQVFFKMNSLQSNDTAIYYCARALTYYDYEFAYWGQGTLVTVSA

SEQ ID NO: 13634 - protein, 119 aa, Artificial Sequence
  source: /note="Description of Artificial Sequence: Synthetic polypeptide"
QVQLKQSGPGLVQPSQSLSITCTVSGFSLTNYGVHWVRQSPGKGLEWLGVIWSGGNTDYNTPFTSRLSINKDNSASQVFFKMNSLQSNDTAIYYCARALTYYDYEFAYWGQGTLVTVSA

SEQ ID NO: 13635 - protein, 119 aa, Artificial Sequence
  source: /note="Description of Artificial Sequence: Synthetic polypeptide"
QVQLKQSGPGLVQPSQSLSITCTVSGFSLTNYGVHWVRQSPGKGLEWLGVIWSGGNTDYNTPFTSRLSINKDNSCSQVFFKMNSLQSNDTAIYYCARALTYYDYEFAYWGQGTLVTVSA

SEQ ID NO: 13636 - protein, 119 aa, Artificial Sequence
  source: /note="Description of Artificial Sequence: Synthetic polypeptide"
QVQLKQSGPGLVQPSQSLSITCTVSGFSLTNYGVHWVRQSPGKGLEWLGVIWSGGNTDYNTPFTSRLSINKDNSESQVFFKMNSLQSNDTAIYYCARALTYYDYEFAYWGQGTLVTVSA

SEQ ID NO: 13637 - protein, 119 aa, Artificial Sequence
  source: /note="Description of Artificial Sequence: Synthetic polypeptide"
QVQLKQSGPGLVQPSQSLSITCTVSGFSLTNYGVHWVRQSPGKGLEWLGVIWSGGNTDYNTPFTSRLSINKDNSFSQVFFKMNSLQSNDTAIYYCARALTYYDYEFAYWGQGTLVTVSA

SEQ ID NO: 13638 - protein, 119 aa, Artificial Sequence
  source: /note="Description of Artificial Sequence: Synthetic polypeptide"
QVQLKQSGPGLVQPSQSLSITCTVSGFSLTNYGVHWVRQSPGKGLEWLGVIWSGGNTDYNTPFTSRLSINKDNSMSQVFFKMNSLQSNDTAIYYCARALTYYDYEFAYWGQGTLVTVSA

SEQ ID NO: 13639 - protein, 119 aa, Artificial Sequence
  source: /note="Description of Artificial Sequence: Synthetic polypeptide"
QVQLKQSGPGLVQPSQSLSITCTVSGFSLTNYGVHWVRQSPGKGLEWLGVIWSGGNTDYNTPFTSRLSINKDNSQSQVFFKMNSLQSNDTAIYYCARALTYYDYEFAYWGQGTLVTVSA

SEQ ID NO: 13640 - protein, 119 aa, Artificial Sequence
  source: /note="Description of Artificial Sequence: Synthetic polypeptide"
QVQLKQSGPGLVQPSQSLSITCTVSGFSLTNYGVHWVRQSPGKGLEWLGVIWSGGNTDYNTPFTSRLSINKDNSTSQVFFKMNSLQSNDTAIYYCARALTYYDYEFAYWGQGTLVTVSA

SEQ ID NO: 13641 - protein, 119 aa, Artificial Sequence
  source: /note="Description of Artificial Sequence: Synthetic polypeptide"
QVQLKQSGPGLVQPSQSLSITCTVSGFSLTNYGVHWVRQSPGKGLEWLGVIWSGGNTDYNTPFTSRLSINKDNSVSQVFFKMNSLQSNDTAIYYCARALTYYDYEFAYWGQGTLVTVSA

SEQ ID NO: 13642 - protein, 119 aa, Artificial Sequence
  source: /note="Description of Artificial Sequence: Synthetic polypeptide"
QVQLKQSGPGLVQPSQSLSITCTVSGFSLTNYGVHWVRQSPGKGLEWLGVIWSGGNTDYNTPFTSRLSINKDNSWSQVFFKMNSLQSNDTAIYYCARALTYYDYEFAYWGQGTLVTVSA

SEQ ID NO: 13643 - protein, 119 aa, Artificial Sequence
  source: /note="Description of Artificial Sequence: Synthetic polypeptide"
QVQLKQSGPGLVQPSQSLSITCTVSGFSLTNYGVHWVRQSPGKGLEWLGVIWSGGNTDYNTPFTSRLSINKDNSYSQVFFKMNSLQSNDTAIYYCARALTYYDYEFAYWGQGTLVTVSA

SEQ ID NO: 13644 - protein, 119 aa, Artificial Sequence
  source: /note="Description of Artificial Sequence: Synthetic polypeptide"
QVQLKQSGPGLVQPSQSLSITCTVSGFSLTNYGVHWVRQSPGKGLEWLGVIWSGGNTDYNTPFTSRLSINKDNSKHQVFFKMNSLQSNDTAIYYCARALTYYDYEFAYWGQGTLVTVSA

SEQ ID NO: 13645 - protein, 119 aa, Artificial Sequence
  source: /note="Description of Artificial Sequence: Synthetic polypeptide"
QVQLKQSGPGLVQPSQSLSITCTVSGFSLTNYGVHWVRQSPGKGLEWLGVIWSGGNTDYNTPFTSRLSINKDNSKRQVFFKMNSLQSNDTAIYYCARALTYYDYEFAYWGQGTLVTVSA

SEQ ID NO: 13646 - protein, 119 aa, Artificial Sequence
  source: /note="Description of Artificial Sequence: Synthetic polypeptide"
QVQLKQSGPGLVQPSQSLSITCTVSGFSLTNYGVHWVRQSPGKGLEWLGVIWSGGNTDYNTPFTSRLSINKDNSKLQVFFKMNSLQSNDTAIYYCARALTYYDYEFAYWGQGTLVTVSA

SEQ ID NO: 13647 - protein, 119 aa, Artificial Sequence
  source: /note="Description of Artificial Sequence: Synthetic polypeptide"
QVQLKQSGPGLVQPSQSLSITCTVSGFSLTNYGVHWVRQSPGKGLEWLGVIWSGGNTDYNTPFTSRLSINKDNSKAQVFFKMNSLQSNDTAIYYCARALTYYDYEFAYWGQGTLVTVSA

SEQ ID NO: 13648 - protein, 119 aa, Artificial Sequence
  source: /note="Description of Artificial Sequence: Synthetic polypeptide"
QVQLKQSGPGLVQPSQSLSITCTVSGFSLTNYGVHWVRQSPGKGLEWLGVIWSGGNTDYNTPFTSRLSINKDNSKCQVFFKMNSLQSNDTAIYYCARALTYYDYEFAYWGQGTLVTVSA

SEQ ID NO: 13649 - protein, 119 aa, Artificial Sequence
  source: /note="Description of Artificial Sequence: Synthetic polypeptide"
QVQLKQSGPGLVQPSQSLSITCTVSGFSLTNYGVHWVRQSPGKGLEWLGVIWSGGNTDYNTPFTSRLSINKDNSKDQVFFKMNSLQSNDTAIYYCARALTYYDYEFAYWGQGTLVTVSA

SEQ ID NO: 13650 - protein, 119 aa, Artificial Sequence
  source: /note="Description of Artificial Sequence: Synthetic polypeptide"
QVQLKQSGPGLVQPSQSLSITCTVSGFSLTNYGVHWVRQSPGKGLEWLGVIWSGGNTDYNTPFTSRLSINKDNSKEQVFFKMNSLQSNDTAIYYCARALTYYDYEFAYWGQGTLVTVSA

SEQ ID NO: 13651 - protein, 119 aa, Artificial Sequence
  source: /note="Description of Artificial Sequence: Synthetic polypeptide"
QVQLKQSGPGLVQPSQSLSITCTVSGFSLTNYGVHWVRQSPGKGLEWLGVIWSGGNTDYNTPFTSRLSINKDNSKFQVFFKMNSLQSNDTAIYYCARALTYYDYEFAYWGQGTLVTVSA

SEQ ID NO: 13652 - protein, 119 aa, Artificial Sequence
  source: /note="Description of Artificial Sequence: Synthetic polypeptide"
QVQLKQSGPGLVQPSQSLSITCTVSGFSLTNYGVHWVRQSPGKGLEWLGVIWSGGNTDYNTPFTSRLSINKDNSKMQVFFKMNSLQSNDTAIYYCARALTYYDYEFAYWGQGTLVTVSA

SEQ ID NO: 13653 - protein, 119 aa, Artificial Sequence
  source: /note="Description of Artificial Sequence: Synthetic polypeptide"
QVQLKQSGPGLVQPSQSLSITCTVSGFSLTNYGVHWVRQSPGKGLEWLGVIWSGGNTDYNTPFTSRLSINKDNSKPQVFFKMNSLQSNDTAIYYCARALTYYDYEFAYWGQGTLVTVSA

SEQ ID NO: 13654 - protein, 119 aa, Artificial Sequence
  source: /note="Description of Artificial Sequence: Synthetic polypeptide"
QVQLKQSGPGLVQPSQSLSITCTVSGFSLTNYGVHWVRQSPGKGLEWLGVIWSGGNTDYNTPFTSRLSINKDNSKQQVFFKMNSLQSNDTAIYYCARALTYYDYEFAYWGQGTLVTVSA

SEQ ID NO: 13655 - protein, 119 aa, Artificial Sequence
  source: /note="Description of Artificial Sequence: Synthetic polypeptide"
QVQLKQSGPGLVQPSQSLSITCTVSGFSLTNYGVHWVRQSPGKGLEWLGVIWSGGNTDYNTPFTSRLSINKDNSKTQVFFKMNSLQSNDTAIYYCARALTYYDYEFAYWGQGTLVTVSA

SEQ ID NO: 13656 - protein, 119 aa, Artificial Sequence
  source: /note="Description of Artificial Sequence: Synthetic polypeptide"
QVQLKQSGPGLVQPSQSLSITCTVSGFSLTNYGVHWVRQSPGKGLEWLGVIWSGGNTDYNTPFTSRLSINKDNSKYQVFFKMNSLQSNDTAIYYCARALTYYDYEFAYWGQGTLVTVSA

SEQ ID NO: 13657 - protein, 119 aa, Artificial Sequence
  source: /note="Description of Artificial Sequence: Synthetic polypeptide"
QVQLKQSGPGLVQPSQSLSITCTVSGFSLTNYGVHWVRQSPGKGLEWLGVIWSGGNTDYNTPFTSRLSINKDNSKSHVFFKMNSLQSNDTAIYYCARALTYYDYEFAYWGQGTLVTVSA

SEQ ID NO: 13658 - protein, 119 aa, Artificial Sequence
  source: /note="Description of Artificial Sequence: Synthetic polypeptide"
QVQLKQSGPGLVQPSQSLSITCTVSGFSLTNYGVHWVRQSPGKGLEWLGVIWSGGNTDYNTPFTSRLSINKDNSKSRVFFKMNSLQSNDTAIYYCARALTYYDYEFAYWGQGTLVTVSA

SEQ ID NO: 13659 - protein, 119 aa, Artificial Sequence
  source: /note="Description of Artificial Sequence: Synthetic polypeptide"
QVQLKQSGPGLVQPSQSLSITCTVSGFSLTNYGVHWVRQSPGKGLEWLGVIWSGGNTDYNTPFTSRLSINKDNSKSLVFFKMNSLQSNDTAIYYCARALTYYDYEFAYWGQGTLVTVSA

SEQ ID NO: 13660 - protein, 119 aa, Artificial Sequence
  source: /note="Description of Artificial Sequence: Synthetic polypeptide"
QVQLKQSGPGLVQPSQSLSITCTVSGFSLTNYGVHWVRQSPGKGLEWLGVIWSGGNTDYNTPFTSRLSINKDNSKSAVFFKMNSLQSNDTAIYYCARALTYYDYEFAYWGQGTLVTVSA

SEQ ID NO: 13661 - protein, 119 aa, Artificial Sequence
  source: /note="Description of Artificial Sequence: Synthetic polypeptide"
QVQLKQSGPGLVQPSQSLSITCTVSGFSLTNYGVHWVRQSPGKGLEWLGVIWSGGNTDYNTPFTSRLSINKDNSKSEVFFKMNSLQSNDTAIYYCARALTYYDYEFAYWGQGTLVTVSA

SEQ ID NO: 13662 - protein, 119 aa, Artificial Sequence
  source: /note="Description of Artificial Sequence: Synthetic polypeptide"
QVQLKQSGPGLVQPSQSLSITCTVSGFSLTNYGVHWVRQSPGKGLEWLGVIWSGGNTDYNTPFTSRLSINKDNSKSGVFFKMNSLQSNDTAIYYCARALTYYDYEFAYWGQGTLVTVSA

SEQ ID NO: 13663 - protein, 119 aa, Artificial Sequence
  source: /note="Description of Artificial Sequence: Synthetic polypeptide"
QVQLKQSGPGLVQPSQSLSITCTVSGFSLTNYGVHWVRQSPGKGLEWLGVIWSGGNTDYNTPFTSRLSINKDNSKSIVFFKMNSLQSNDTAIYYCARALTYYDYEFAYWGQGTLVTVSA

SEQ ID NO: 13664 - protein, 119 aa, Artificial Sequence
  source: /note="Description of Artificial Sequence: Synthetic polypeptide"
QVQLKQSGPGLVQPSQSLSITCTVSGFSLTNYGVHWVRQSPGKGLEWLGVIWSGGNTDYNTPFTSRLSINKDNSKSMVFFKMNSLQSNDTAIYYCARALTYYDYEFAYWGQGTLVTVSA

SEQ ID NO: 13665 - protein, 119 aa, Artificial Sequence
  source: /note="Description of Artificial Sequence: Synthetic polypeptide"
QVQLKQSGPGLVQPSQSLSITCTVSGFSLTNYGVHWVRQSPGKGLEWLGVIWSGGNTDYNTPFTSRLSINKDNSKSNVFFKMNSLQSNDTAIYYCARALTYYDYEFAYWGQGTLVTVSA

SEQ ID NO: 13666 - protein, 119 aa, Artificial Sequence
  source: /note="Description of Artificial Sequence: Synthetic polypeptide"
QVQLKQSGPGLVQPSQSLSITCTVSGFSLTNYGVHWVRQSPGKGLEWLGVIWSGGNTDYNTPFTSRLSINKDNSKSSVFFKMNSLQSNDTAIYYCARALTYYDYEFAYWGQGTLVTVSA

SEQ ID NO: 13667 - protein, 119 aa, Artificial Sequence
  source: /note="Description of Artificial Sequence: Synthetic polypeptide"
QVQLKQSGPGLVQPSQSLSITCTVSGFSLTNYGVHWVRQSPGKGLEWLGVIWSGGNTDYNTPFTSRLSINKDNSKSVVFFKMNSLQSNDTAIYYCARALTYYDYEFAYWGQGTLVTVSA

SEQ ID NO: 13668 - protein, 119 aa, Artificial Sequence
  source: /note="Description of Artificial Sequence: Synthetic polypeptide"
QVQLKQSGPGLVQPSQSLSITCTVSGFSLTNYGVHWVRQSPGKGLEWLGVIWSGGNTDYNTPFTSRLSINKDNSKSWVFFKMNSLQSNDTAIYYCARALTYYDYEFAYWGQGTLVTVSA

SEQ ID NO: 13669 - protein, 119 aa, Artificial Sequence
  source: /note="Description of Artificial Sequence: Synthetic polypeptide"
QVQLKQSGPGLVQPSQSLSITCTVSGFSLTNYGVHWVRQSPGKGLEWLGVIWSGGNTDYNTPFTSRLSINKDNSKSYVFFKMNSLQSNDTAIYYCARALTYYDYEFAYWGQGTLVTVSA

SEQ ID NO: 13670 - protein, 119 aa, Artificial Sequence
  source: /note="Description of Artificial Sequence: Synthetic polypeptide"
QVQLKQSGPGLVQPSQSLSITCTVSGFSLTNYGVHWVRQSPGKGLEWLGVIWSGGNTDYNTPFTSRLSINKDNSKSQVFFKMNSLQSNDTAIHYCARALTYYDYEFAYWGQGTLVTVSA

SEQ ID NO: 13671 - protein, 119 aa, Artificial Sequence
  source: /note="Description of Artificial Sequence: Synthetic polypeptide"
QVQLKQSGPGLVQPSQSLSITCTVSGFSLTNYGVHWVRQSPGKGLEWLGVIWSGGNTDYNTPFTSRLSINKDNSKSQVFFKMNSLQSNDTAIVYCARALTYYDYEFAYWGQGTLVTVSA

SEQ ID NO: 13672 - protein, 119 aa, Artificial Sequence
  source: /note="Description of Artificial Sequence: Synthetic polypeptide"
QVQLKQSGPGLVQPSQSLSITCTVSGFSLTNYGVHWVRQSPGKGLEWLGVIWSGGNTDYNTPFTSRLSINKDNSKSQVFFKMNSLQSNDTAIWYCARALTYYDYEFAYWGQGTLVTVSA

SEQ ID NO: 13673 - protein, 119 aa, Artificial Sequence
  source: /note="Description of Artificial Sequence: Synthetic polypeptide"
QVQLKQSGPGLVQPSQSLSITCTVSGFSLTNYGVHWVRQSPGKGLEWLGVIWSGGNTDYNTPFTSRLSINKDNSKSQVFFKMNSLQSNDTAIYRCARALTYYDYEFAYWGQGTLVTVSA

SEQ ID NO: 13674 - protein, 119 aa, Artificial Sequence
  source: /note="Description of Artificial Sequence: Synthetic polypeptide"
QVQLKQSGPGLVQPSQSLSITCTVSGFSLTNYGVHWVRQSPGKGLEWLGVIWSGGNTDYNTPFTSRLSINKDNSKSQVFFKMNSLQSNDTAIYLCARALTYYDYEFAYWGQGTLVTVSA

SEQ ID NO: 13675 - protein, 119 aa, Artificial Sequence
  source: /note="Description of Artificial Sequence: Synthetic polypeptide"
QVQLKQSGPGLVQPSQSLSITCTVSGFSLTNYGVHWVRQSPGKGLEWLGVIWSGGNTDYNTPFTSRLSINKDNSKSQVFFKMNSLQSNDTAIYYCAHALTYYDYEFAYWGQGTLVTVSA

SEQ ID NO: 13676 - protein, 119 aa, Artificial Sequence
  source: /note="Description of Artificial Sequence: Synthetic polypeptide"
QVQLKQSGPGLVQPSQSLSITCTVSGFSLTNYGVHWVRQSPGKGLEWLGVIWSGGNTDYNTPFTSRLSINKDNSKSQVFFKMNSLQSNDTAIYYCAWALTYYDYEFAYWGQGTLVTVSA

SEQ ID NO: 13677 - protein, 117 aa, Artificial Sequence
  source: /note="Description of Artificial Sequence: Synthetic polypeptide"
QVQLKQSGPGLVQPSQSLSITCTVSGFSLTNYGVHWVRQSPGKGLEWLGVIWSGGNTDYNTPFTSRLSINKDNSKSQVFFKMNSLQSNDTAIYYCARPLTYYDYEFAYWGQGTLVTV

SEQ ID NO: 13678 - protein, 119 aa, Artificial Sequence
  source: /note="Description of Artificial Sequence: Synthetic polypeptide"
QVQLKQSGPGLVQPSQSLSITCTVSGFSLTNYGVHWVRQSPGKGLEWLGVIWSGGNTDYNTPFTSRLSINKDNSKSQVFFKMNSLQSNDTAIYYCARANTYYDYEFAYWGQGTLVTVSA

SEQ ID NO: 13679 - protein, 119 aa, Artificial Sequence
  source: /note="Description of Artificial Sequence: Synthetic polypeptide"
QVQLKQSGPGLVQPSQSLSITCTVSGFSLTNYGVHWVRQSPGKGLEWLGVIWSGGNTDYNTPFTSRLSINKDNSKSQVFFKMNSLQSNDTAIYYCARAWTYYDYEFAYWGQGTLVTVSA

SEQ ID NO: 13680 - protein, 119 aa, Artificial Sequence
  source: /note="Description of Artificial Sequence: Synthetic polypeptide"
QVQLKQSGPGLVQPSQSLSITCTVSGFSLTNYGVHWVRQSPGKGLEWLGVIWSGGNTDYNTPFTSRLSINKDNSKSQVFFKMNSLQSNDTAIYYCARALHYYDYEFAYWGQGTLVTVSA

SEQ ID NO: 13681 - protein, 119 aa, Artificial Sequence
  source: /note="Description of Artificial Sequence: Synthetic polypeptide"
QVQLKQSGPGLVQPSQSLSITCTVSGFSLTNYGVHWVRQSPGKGLEWLGVIWSGGNTDYNTPFTSRLSINKDNSKSQVFFKMNSLQSNDTAIYYCARALLYYDYEFAYWGQGTLVTVSA

SEQ ID NO: 13682 - protein, 119 aa, Artificial Sequence
  source: /note="Description of Artificial Sequence: Synthetic polypeptide"
QVQLKQSGPGLVQPSQSLSITCTVSGFSLTNYGVHWVRQSPGKGLEWLGVIWSGGNTDYNTPFTSRLSINKDNSKSQVFFKMNSLQSNDTAIYYCARALAYYDYEFAYWGQGTLVTVSA

SEQ ID NO: 13683 - protein, 119 aa, Artificial Sequence
  source: /note="Description of Artificial Sequence: Synthetic polypeptide"
QVQLKQSGPGLVQPSQSLSITCTVSGFSLTNYGVHWVRQSPGKGLEWLGVIWSGGNTDYNTPFTSRLSINKDNSKSQVFFKMNSLQSNDTAIYYCARALDYYDYEFAYWGQGTLVTVSA

SEQ ID NO: 13684 - protein, 119 aa, Artificial Sequence
  source: /note="Description of Artificial Sequence: Synthetic polypeptide"
QVQLKQSGPGLVQPSQSLSITCTVSGFSLTNYGVHWVRQSPGKGLEWLGVIWSGGNTDYNTPFTSRLSINKDNSKSQVFFKMNSLQSNDTAIYYCARALIYYDYEFAYWGQGTLVTVSA

SEQ ID NO: 13685 - protein, 119 aa, Artificial Sequence
  source: /note="Description of Artificial Sequence: Synthetic polypeptide"
QVQLKQSGPGLVQPSQSLSITCTVSGFSLTNYGVHWVRQSPGKGLEWLGVIWSGGNTDYNTPFTSRLSINKDNSKSQVFFKMNSLQSNDTAIYYCARALNYYDYEFAYWGQGTLVTVSA

SEQ ID NO: 13686 - protein, 119 aa, Artificial Sequence
  source: /note="Description of Artificial Sequence: Synthetic polypeptide"
QVQLKQSGPGLVQPSQSLSITCTVSGFSLTNYGVHWVRQSPGKGLEWLGVIWSGGNTDYNTPFTSRLSINKDNSKSQVFFKMNSLQSNDTAIYYCARALPYYDYEFAYWGQGTLVTVSA

SEQ ID NO: 13687 - protein, 119 aa, Artificial Sequence
  source: /note="Description of Artificial Sequence: Synthetic polypeptide"
QVQLKQSGPGLVQPSQSLSITCTVSGFSLTNYGVHWVRQSPGKGLEWLGVIWSGGNTDYNTPFTSRLSINKDNSKSQVFFKMNSLQSNDTAIYYCARALQYYDYEFAYWGQGTLVTVSA

SEQ ID NO: 13688 - protein, 119 aa, Artificial Sequence
  source: /note="Description of Artificial Sequence: Synthetic polypeptide"
QVQLKQSGPGLVQPSQSLSITCTVSGFSLTNYGVHWVRQSPGKGLEWLGVIWSGGNTDYNTPFTSRLSINKDNSKSQVFFKMNSLQSNDTAIYYCARALSYYDYEFAYWGQGTLVTVSA

SEQ ID NO: 13689 - protein, 119 aa, Artificial Sequence
  source: /note="Description of Artificial Sequence: Synthetic polypeptide"
QVQLKQSGPGLVQPSQSLSITCTVSGFSLTNYGVHWVRQSPGKGLEWLGVIWSGGNTDYNTPFTSRLSINKDNSKSQVFFKMNSLQSNDTAIYYCARALVYYDYEFAYWGQGTLVTVSA

SEQ ID NO: 13690 - protein, 119 aa, Artificial Sequence
  source: /note="Description of Artificial Sequence: Synthetic polypeptide"
QVQLKQSGPGLVQPSQSLSITCTVSGFSLTNYGVHWVRQSPGKGLEWLGVIWSGGNTDYNTPFTSRLSINKDNSKSQVFFKMNSLQSNDTAIYYCARALYYYDYEFAYWGQGTLVTVSA

SEQ ID NO: 13691 - protein, 119 aa, Artificial Sequence
  source: /note="Description of Artificial Sequence: Synthetic polypeptide"
QVQLKQSGPGLVQPSQSLSITCTVSGFSLTNYGVHWVRQSPGKGLEWLGVIWSGGNTDYNTPFTSRLSINKDNSKSQVFFKMNSLQSNDTAIYYCARALTHYDYEFAYWGQGTLVTVSA

SEQ ID NO: 13692 - protein, 119 aa, Artificial Sequence
  source: /note="Description of Artificial Sequence: Synthetic polypeptide"
QVQLKQSGPGLVQPSQSLSITCTVSGFSLTNYGVHWVRQSPGKGLEWLGVIWSGGNTDYNTPFTSRLSINKDNSKSQVFFKMNSLQSNDTAIYYCARALTEYDYEFAYWGQGTLVTVSA

SEQ ID NO: 13693 - protein, 119 aa, Artificial Sequence
  source: /note="Description of Artificial Sequence: Synthetic polypeptide"
QVQLKQSGPGLVQPSQSLSITCTVSGFSLTNYGVHWVRQSPGKGLEWLGVIWSGGNTDYNTPFTSRLSINKDNSKSQVFFKMNSLQSNDTAIYYCARALTFYDYEFAYWGQGTLVTVSA

SEQ ID NO: 13694 - protein, 119 aa, Artificial Sequence
  source: /note="Description of Artificial Sequence: Synthetic polypeptide"
QVQLKQSGPGLVQPSQSLSITCTVSGFSLTNYGVHWVRQSPGKGLEWLGVIWSGGNTDYNTPFTSRLSINKDNSKSQVFFKMNSLQSNDTAIYYCARALTMYDYEFAYWGQGTLVTVSA

SEQ ID NO: 13695 - protein, 119 aa, Artificial Sequence
  source: /note="Description of Artificial Sequence: Synthetic polypeptide"
QVQLKQSGPGLVQPSQSLSITCTVSGFSLTNYGVHWVRQSPGKGLEWLGVIWSGGNTDYNTPFTSRLSINKDNSKSQVFFKMNSLQSNDTAIYYCARALTWYDYEFAYWGQGTLVTVSA

SEQ ID NO: 13696 - protein, 119 aa, Artificial Sequence
  source: /note="Description of Artificial Sequence: Synthetic polypeptide"
QVQLKQSGPGLVQPSQSLSITCTVSGFSLTNYGVHWVRQSPGKGLEWLGVIWSGGNTDYNTPFTSRLSINKDNSKSQVFFKMNSLQSNDTAIYYCARALTYRDYEFAYWGQGTLVTVSA

SEQ ID NO: 13697 - protein, 119 aa, Artificial Sequence
  source: /note="Description of Artificial Sequence: Synthetic polypeptide"
QVQLKQSGPGLVQPSQSLSITCTVSGFSLTNYGVHWVRQSPGKGLEWLGVIWSGGNTDYNTPFTSRLSINKDNSKSQVFFKMNSLQSNDTAIYYCARALTYCDYEFAYWGQGTLVTVSA

SEQ ID NO: 13698 - protein, 119 aa, Artificial Sequence
  source: /note="Description of Artificial Sequence: Synthetic polypeptide"
QVQLKQSGPGLVQPSQSLSITCTVSGFSLTNYGVHWVRQSPGKGLEWLGVIWSGGNTDYNTPFTSRLSINKDNSKSQVFFKMNSLQSNDTAIYYCARALTYDDYEFAYWGQGTLVTVSA

SEQ ID NO: 13699 - protein, 119 aa, Artificial Sequence
  source: /note="Description of Artificial Sequence: Synthetic polypeptide"
QVQLKQSGPGLVQPSQSLSITCTVSGFSLTNYGVHWVRQSPGKGLEWLGVIWSGGNTDYNTPFTSRLSINKDNSKSQVFFKMNSLQSNDTAIYYCARALTYIDYEFAYWGQGTLVTVSA

SEQ ID NO: 13700 - protein, 119 aa, Artificial Sequence
  source: /note="Description of Artificial Sequence: Synthetic polypeptide"
QVQLKQSGPGLVQPSQSLSITCTVSGFSLTNYGVHWVRQSPGKGLEWLGVIWSGGNTDYNTPFTSRLSINKDNSKSQVFFKMNSLQSNDTAIYYCARALTYNDYEFAYWGQGTLVTVSA

SEQ ID NO: 13701 - protein, 119 aa, Artificial Sequence
  source: /note="Description of Artificial Sequence: Synthetic polypeptide"
QVQLKQSGPGLVQPSQSLSITCTVSGFSLTNYGVHWVRQSPGKGLEWLGVIWSGGNTDYNTPFTSRLSINKDNSKSQVFFKMNSLQSNDTAIYYCARALTYWDYEFAYWGQGTLVTVSA

SEQ ID NO: 13702 - protein, 119 aa, Artificial Sequence
  source: /note="Description of Artificial Sequence: Synthetic polypeptide"
QVQLKQSGPGLVQPSQSLSITCTVSGFSLTNYGVHWVRQSPGKGLEWLGVIWSGGNTDYNTPFTSRLSINKDNSKSQVFFKMNSLQSNDTAIYYCARALTYYRYEFAYWGQGTLVTVSA

SEQ ID NO: 13703 - protein, 119 aa, Artificial Sequence
  source: /note="Description of Artificial Sequence: Synthetic polypeptide"
QVQLKQSGPGLVQPSQSLSITCTVSGFSLTNYGVHWVRQSPGKGLEWLGVIWSGGNTDYNTPFTSRLSINKDNSKSQVFFKMNSLQSNDTAIYYCARALTYYLYEFAYWGQGTLVTVSA

SEQ ID NO: 13704 - protein, 119 aa, Artificial Sequence
  source: /note="Description of Artificial Sequence: Synthetic polypeptide"
QVQLKQSGPGLVQPSQSLSITCTVSGFSLTNYGVHWVRQSPGKGLEWLGVIWSGGNTDYNTPFTSRLSINKDNSKSQVFFKMNSLQSNDTAIYYCARALTYYAYEFAYWGQGTLVTVSA

SEQ ID NO: 13705 - protein, 119 aa, Artificial Sequence
  source: /note="Description of Artificial Sequence: Synthetic polypeptide"
QVQLKQSGPGLVQPSQSLSITCTVSGFSLTNYGVHWVRQSPGKGLEWLGVIWSGGNTDYNTPFTSRLSINKDNSKSQVFFKMNSLQSNDTAIYYCARALTYYCYEFAYWGQGTLVTVSA

SEQ ID NO: 13706 - protein, 119 aa, Artificial Sequence
  source: /note="Description of Artificial Sequence: Synthetic polypeptide"
QVQLKQSGPGLVQPSQSLSITCTVSGFSLTNYGVHWVRQSPGKGLEWLGVIWSGGNTDYNTPFTSRLSINKDNSKSQVFFKMNSLQSNDTAIYYCARALTYYIYEFAYWGQGTLVTVSA

SEQ ID NO: 13707 - protein, 119 aa, Artificial Sequence
  source: /note="Description of Artificial Sequence: Synthetic polypeptide"
QVQLKQSGPGLVQPSQSLSITCTVSGFSLTNYGVHWVRQSPGKGLEWLGVIWSGGNTDYNTPFTSRLSINKDNSKSQVFFKMNSLQSNDTAIYYCARALTYYPYEFAYWGQGTLVTVSA

SEQ ID NO: 13708 - protein, 119 aa, Artificial Sequence
  source: /note="Description of Artificial Sequence: Synthetic polypeptide"
QVQLKQSGPGLVQPSQSLSITCTVSGFSLTNYGVHWVRQSPGKGLEWLGVIWSGGNTDYNTPFTSRLSINKDNSKSQVFFKMNSLQSNDTAIYYCARALTYYQYEFAYWGQGTLVTVSA

SEQ ID NO: 13709 - protein, 119 aa, Artificial Sequence
  source: /note="Description of Artificial Sequence: Synthetic polypeptide"
QVQLKQSGPGLVQPSQSLSITCTVSGFSLTNYGVHWVRQSPGKGLEWLGVIWSGGNTDYNTPFTSRLSINKDNSKSQVFFKMNSLQSNDTAIYYCARALTYYYYEFAYWGQGTLVTVSA

SEQ ID NO: 13710 - protein, 119 aa, Artificial Sequence
  source: /note="Description of Artificial Sequence: Synthetic polypeptide"
QVQLKQSGPGLVQPSQSLSITCTVSGFSLTNYGVHWVRQSPGKGLEWLGVIWSGGNTDYNTPFTSRLSINKDNSKSQVFFKMNSLQSNDTAIYYCARALTYYDHEFAYWGQGTLVTVSA

SEQ ID NO: 13711 - protein, 119 aa, Artificial Sequence
  source: /note="Description of Artificial Sequence: Synthetic polypeptide"
QVQLKQSGPGLVQPSQSLSITCTVSGFSLTNYGVHWVRQSPGKGLEWLGVIWSGGNTDYNTPFTSRLSINKDNSKSQVFFKMNSLQSNDTAIYYCARALTYYDLEFAYWGQGTLVTVSA

SEQ ID NO: 13712 - protein, 119 aa, Artificial Sequence
  source: /note="Description of Artificial Sequence: Synthetic polypeptide"
QVQLKQSGPGLVQPSQSLSITCTVSGFSLTNYGVHWVRQSPGKGLEWLGVIWSGGNTDYNTPFTSRLSINKDNSKSQVFFKMNSLQSNDTAIYYCARALTYYDDEFAYWGQGTLVTVSA

SEQ ID NO: 13713 - protein, 119 aa, Artificial Sequence
  source: /note="Description of Artificial Sequence: Synthetic polypeptide"
QVQLKQSGPGLVQPSQSLSITCTVSGFSLTNYGVHWVRQSPGKGLEWLGVIWSGGNTDYNTPFTSRLSINKDNSKSQVFFKMNSLQSNDTAIYYCARALTYYDFEFAYWGQGTLVTVSA

SEQ ID NO: 13714 - protein, 119 aa, Artificial Sequence
  source: /note="Description of Artificial Sequence: Synthetic polypeptide"
QVQLKQSGPGLVQPSQSLSITCTVSGFSLTNYGVHWVRQSPGKGLEWLGVIWSGGNTDYNTPFTSRLSINKDNSKSQVFFKMNSLQSNDTAIYYCARALTYYDIEFAYWGQGTLVTVSA

SEQ ID NO: 13715 - protein, 119 aa, Artificial Sequence
  source: /note="Description of Artificial Sequence: Synthetic polypeptide"
QVQLKQSGPGLVQPSQSLSITCTVSGFSLTNYGVHWVRQSPGKGLEWLGVIWSGGNTDYNTPFTSRLSINKDNSKSQVFFKMNSLQSNDTAIYYCARALTYYDMEFAYWGQGTLVTVSA

SEQ ID NO: 13716 - protein, 119 aa, Artificial Sequence
  source: /note="Description of Artificial Sequence: Synthetic polypeptide"
QVQLKQSGPGLVQPSQSLSITCTVSGFSLTNYGVHWVRQSPGKGLEWLGVIWSGGNTDYNTPFTSRLSINKDNSKSQVFFKMNSLQSNDTAIYYCARALTYYDSEFAYWGQGTLVTVSA

SEQ ID NO: 13717 - protein, 119 aa, Artificial Sequence
  source: /note="Description of Artificial Sequence: Synthetic polypeptide"
QVQLKQSGPGLVQPSQSLSITCTVSGFSLTNYGVHWVRQSPGKGLEWLGVIWSGGNTDYNTPFTSRLSINKDNSKSQVFFKMNSLQSNDTAIYYCARALTYYDVEFAYWGQGTLVTVSA

SEQ ID NO: 13718 - protein, 119 aa, Artificial Sequence
  source: /note="Description of Artificial Sequence: Synthetic polypeptide"
QVQLKQSGPGLVQPSQSLSITCTVSGFSLTNYGVHWVRQSPGKGLEWLGVIWSGGNTDYNTPFTSRLSINKDNSKSQVFFKMNSLQSNDTAIYYCARALTYYDYHFAYWGQGTLVTVSA

SEQ ID NO: 13719 - protein, 119 aa, Artificial Sequence
  source: /note="Description of Artificial Sequence: Synthetic polypeptide"
QVQLKQSGPGLVQPSQSLSITCTVSGFSLTNYGVHWVRQSPGKGLEWLGVIWSGGNTDYNTPFTSRLSINKDNSKSQVFFKMNSLQSNDTAIYYCARALTYYDYTFAYWGQGTLVTVSA

SEQ ID NO: 13720 - protein, 119 aa, Artificial Sequence
  source: /note="Description of Artificial Sequence: Synthetic polypeptide"
QVQLKQSGPGLVQPSQSLSITCTVSGFSLTNYGVHWVRQSPGKGLEWLGVIWSGGNTDYNTPFTSRLSINKDNSKSQVFFKMNSLQSNDTAIYYCARALTYYDYELAYWGQGTLVTVSA

SEQ ID NO: 13721 - protein, 119 aa, Artificial Sequence
  source: /note="Description of Artificial Sequence: Synthetic polypeptide"
QVQLKQSGPGLVQPSQSLSITCTVSGFSLTNYGVHWVRQSPGKGLEWLGVIWSGGNTDYNTPFTSRLSINKDNSKSQVFFKMNSLQSNDTAIYYCARALTYYDYEVAYWGQGTLVTVSA

SEQ ID NO: 13722 - protein, 119 aa, Artificial Sequence
  source: /note="Description of Artificial Sequence: Synthetic polypeptide"
QVQLKQSGPGLVQPSQSLSITCTVSGFSLTNYGVHWVRQSPGKGLEWLGVIWSGGNTDYNTPFTSRLSINKDNSKSQVFFKMNSLQSNDTAIYYCARALTYYDYEWAYWGQGTLVTVSA

SEQ ID NO: 13723 - protein, 119 aa, Artificial Sequence
  source: /note="Description of Artificial Sequence: Synthetic polypeptide"
QVQLKQSGPGLVQPSQSLSITCTVSGFSLTNYGVHWVRQSPGKGLEWLGVIWSGGNTDYNTPFTSRLSINKDNSKSQVFFKMNSLQSNDTAIYYCARALTYYDYEYAYWGQGTLVTVSA

SEQ ID NO: 13724 - protein, 119 aa, Artificial Sequence
  source: /note="Description of Artificial Sequence: Synthetic polypeptide"
QVQLKQSGPGLVQPSQSLSITCTVSGFSLTNYGVHWVRQSPGKGLEWLGVIWSGGNTDYNTPFTSRLSINKDNSKSQVFFKMNSLQSNDTAIYYCARALTYYDYEFKYWGQGTLVTVSA

SEQ ID NO: 13725 - protein, 119 aa, Artificial Sequence
  source: /note="Description of Artificial Sequence: Synthetic polypeptide"
QVQLKQSGPGLVQPSQSLSITCTVSGFSLTNYGVHWVRQSPGKGLEWLGVIWSGGNTDYNTPFTSRLSINKDNSKSQVFFKMNSLQSNDTAIYYCARALTYYDYEFHYWGQGTLVTVSA

SEQ ID NO: 13726 - protein, 119 aa, Artificial Sequence
  source: /note="Description of Artificial Sequence: Synthetic polypeptide"
QVQLKQSGPGLVQPSQSLSITCTVSGFSLTNYGVHWVRQSPGKGLEWLGVIWSGGNTDYNTPFTSRLSINKDNSKSQVFFKMNSLQSNDTAIYYCARALTYYDYEFRYWGQGTLVTVSA

SEQ ID NO: 13727 - protein, 119 aa, Artificial Sequence
  source: /note="Description of Artificial Sequence: Synthetic polypeptide"
QVQLKQSGPGLVQPSQSLSITCTVSGFSLTNYGVHWVRQSPGKGLEWLGVIWSGGNTDYNTPFTSRLSINKDNSKSQVFFKMNSLQSNDTAIYYCARALTYYDYEFLYWGQGTLVTVSA

SEQ ID NO: 13728 - protein, 119 aa, Artificial Sequence
  source: /note="Description of Artificial Sequence: Synthetic polypeptide"
QVQLKQSGPGLVQPSQSLSITCTVSGFSLTNYGVHWVRQSPGKGLEWLGVIWSGGNTDYNTPFTSRLSINKDNSKSQVFFKMNSLQSNDTAIYYCARALTYYDYEFCYWGQGTLVTVSA

SEQ ID NO: 13729 - protein, 119 aa, Artificial Sequence
  source: /note="Description of Artificial Sequence: Synthetic polypeptide"
QVQLKQSGPGLVQPSQSLSITCTVSGFSLTNYGVHWVRQSPGKGLEWLGVIWSGGNTDYNTPFTSRLSINKDNSKSQVFFKMNSLQSNDTAIYYCARALTYYDYEFDYWGQGTLVTVSA

SEQ ID NO: 13730 - protein, 119 aa, Artificial Sequence
  source: /note="Description of Artificial Sequence: Synthetic polypeptide"
QVQLKQSGPGLVQPSQSLSITCTVSGFSLTNYGVHWVRQSPGKGLEWLGVIWSGGNTDYNTPFTSRLSINKDNSKSQVFFKMNSLQSNDTAIYYCARALTYYDYEFEYWGQGTLVTVSA

SEQ ID NO: 13731 - protein, 119 aa, Artificial Sequence
  source: /note="Description of Artificial Sequence: Synthetic polypeptide"
QVQLKQSGPGLVQPSQSLSITCTVSGFSLTNYGVHWVRQSPGKGLEWLGVIWSGGNTDYNTPFTSRLSINKDNSKSQVFFKMNSLQSNDTAIYYCARALTYYDYEFGYWGQGTLVTVSA

SEQ ID NO: 13732 - protein, 119 aa, Artificial Sequence
  source: /note="Description of Artificial Sequence: Synthetic polypeptide"
QVQLKQSGPGLVQPSQSLSITCTVSGFSLTNYGVHWVRQSPGKGLEWLGVIWSGGNTDYNTPFTSRLSINKDNSKSQVFFKMNSLQSNDTAIYYCARALTYYDYEFNYWGQGTLVTVSA

SEQ ID NO: 13733 - protein, 119 aa, Artificial Sequence
  source: /note="Description of Artificial Sequence: Synthetic polypeptide"
QVQLKQSGPGLVQPSQSLSITCTVSGFSLTNYGVHWVRQSPGKGLEWLGVIWSGGNTDYNTPFTSRLSINKDNSKSQVFFKMNSLQSNDTAIYYCARALTYYDYEFSYWGQGTLVTVSA

SEQ ID NO: 13734 - protein, 119 aa, Artificial Sequence
  source: /note="Description of Artificial Sequence: Synthetic polypeptide"
QVQLKQSGPGLVQPSQSLSITCTVSGFSLTNYGVHWVRQSPGKGLEWLGVIWSGGNTDYNTPFTSRLSINKDNSKSQVFFKMNSLQSNDTAIYYCARALTYYDYEFTYWGQGTLVTVSA

SEQ ID NO: 13735 - protein, 119 aa, Artificial Sequence
  source: /note="Description of Artificial Sequence: Synthetic polypeptide"
QVQLKQSGPGLVQPSQSLSITCTVSGFSLTNYGVHWVRQSPGKGLEWLGVIWSGGNTDYNTPFTSRLSINKDNSKSQVFFKMNSLQSNDTAIYYCARALTYYDYEFYYWGQGTLVTVSA

SEQ ID NO: 13736 - protein, 119 aa, Artificial Sequence
  source: /note="Description of Artificial Sequence: Synthetic polypeptide"
QVQLKQSGPGLVQPSQSLSITCTVSGFSLTNYGVHWVRQSPGKGLEWLGVIWSGGNTDYNTPFTSRLSINKDNSKSQVFFKMNSLQSNDTAIYYCARALTYYDYEFAKWGQGTLVTVSA

SEQ ID NO: 13737 - protein, 119 aa, Artificial Sequence
  source: /note="Description of Artificial Sequence: Synthetic polypeptide"
QVQLKQSGPGLVQPSQSLSITCTVSGFSLTNYGVHWVRQSPGKGLEWLGVIWSGGNTDYNTPFTSRLSINKDNSKSQVFFKMNSLQSNDTAIYYCARALTYYDYEFAHWGQGTLVTVSA

SEQ ID NO: 13738 - protein, 119 aa, Artificial Sequence
  source: /note="Description of Artificial Sequence: Synthetic polypeptide"
QVQLKQSGPGLVQPSQSLSITCTVSGFSLTNYGVHWVRQSPGKGLEWLGVIWSGGNTDYNTPFTSRLSINKDNSKSQVFFKMNSLQSNDTAIYYCARALTYYDYEFARWGQGTLVTVSA

SEQ ID NO: 13739 - protein, 119 aa, Artificial Sequence
  source: /note="Description of Artificial Sequence: Synthetic polypeptide"
QVQLKQSGPGLVQPSQSLSITCTVSGFSLTNYGVHWVRQSPGKGLEWLGVIWSGGNTDYNTPFTSRLSINKDNSKSQVFFKMNSLQSNDTAIYYCARALTYYDYEFALWGQGTLVTVSA

SEQ ID NO: 13740 - protein, 119 aa, Artificial Sequence
  source: /note="Description of Artificial Sequence: Synthetic polypeptide"
QVQLKQSGPGLVQPSQSLSITCTVSGFSLTNYGVHWVRQSPGKGLEWLGVIWSGGNTDYNTPFTSRLSINKDNSKSQVFFKMNSLQSNDTAIYYCARALTYYDYEFACWGQGTLVTVSA

SEQ ID NO: 13741 - protein, 119 aa, Artificial Sequence
  source: /note="Description of Artificial Sequence: Synthetic polypeptide"
QVQLKQSGPGLVQPSQSLSITCTVSGFSLTNYGVHWVRQSPGKGLEWLGVIWSGGNTDYNTPFTSRLSINKDNSKSQVFFKMNSLQSNDTAIYYCARALTYYDYEFAFWGQGTLVTVSA

SEQ ID NO: 13742 - protein, 119 aa, Artificial Sequence
  source: /note="Description of Artificial Sequence: Synthetic polypeptide"
QVQLKQSGPGLVQPSQSLSITCTVSGFSLTNYGVHWVRQSPGKGLEWLGVIWSGGNTDYNTPFTSRLSINKDNSKSQVFFKMNSLQSNDTAIYYCARALTYYDYEFAIWGQGTLVTVSA

SEQ ID NO: 13743 - protein, 119 aa, Artificial Sequence
  source: /note="Description of Artificial Sequence: Synthetic polypeptide"
QVQLKQSGPGLVQPSQSLSITCTVSGFSLTNYGVHWVRQSPGKGLEWLGVIWSGGNTDYNTPFTSRLSINKDNSKSQVFFKMNSLQSNDTAIYYCARALTYYDYEFANWGQGTLVTVSA

SEQ ID NO: 13744 - protein, 119 aa, Artificial Sequence
  source: /note="Description of Artificial Sequence: Synthetic polypeptide"
QVQLKQSGPGLVQPSQSLSITCTVSGFSLTNYGVHWVRQSPGKGLEWLGVIWSGGNTDYNTPFTSRLSINKDNSKSQVFFKMNSLQSNDTAIYYCARALTYYDYEFASWGQGTLVTVSA

SEQ ID NO: 13745 - protein, 119 aa, Artificial Sequence
  source: /note="Description of Artificial Sequence: Synthetic polypeptide"
QVQLKQSGPGLVQPSQSLSITCTVSGFSLTNYGVHWVRQSPGKGLEWLGVIWSGGNTDYNTPFTSRLSINKDNSKSQVFFKMNSLQSNDTAIYYCARALTYYDYEFATWGQGTLVTVSA

SEQ ID NO: 13746 - protein, 119 aa, Artificial Sequence
  source: /note="Description of Artificial Sequence: Synthetic polypeptide"
QVQLKQSGPGLVQPSQSLSITCTVSGFSLTNYGVHWVRQSPGKGLEWLGVIWSGGNTDYNTPFTSRLSINKDNSKSQVFFKMNSLQSNDTAIYYCARALTYYDYEFAVWGQGTLVTVSA

SEQ ID NO: 13747 - protein, 119 aa, Artificial Sequence
  source: /note="Description of Artificial Sequence: Synthetic polypeptide"
QVQLKQSGPGLVQPSQSLSITCTVSGFSLTNYGVHWVRQSPGKGLEWLGVIWSGGNTDYNTPFTSRLSINKDNSKSQVFFKMNSLQSNDTAIYYCARALTYYDYEFAWWGQGTLVTVSA

SEQ ID NO: 13748 - protein, 119 aa, Artificial Sequence
  source: /note="Description of Artificial Sequence: Synthetic polypeptide"
QVQLKQSGPGLVQPSQSLSITCTVSGFSLTNYGVHWVRQSPGKGLEWLGVIWSGGNTDYNTPFTSRLSINKDNSKSQVFFKMNSLQSNDTAIYYCARALTYYDYEFAYIGQGTLVTVSA

SEQ ID NO: 13749 - protein, 119 aa, Artificial Sequence
  source: /note="Description of Artificial Sequence: Synthetic polypeptide"
QVQLKQSGPGLVQPSQSLSITCTVSGFSLTNYGVHWVRQSPGKGLEWLGVIWSGGNTDYNTPFTSRLSINKDNSKSQVFFKMNSLQSNDTAIYYCARALTYYDYEFAYMGQGTLVTVSA

SEQ ID NO: 13750 - protein, 119 aa, Artificial Sequence
  source: /note="Description of Artificial Sequence: Synthetic polypeptide"
QVQLKQSGPGLVQPSQSLSITCTVSGFSLTNYGVHWVRQSPGKGLEWLGVIWSGGNTDYNTPFTSRLSINKDNSKSQVFFKMNSLQSNDTAIYYCARALTYYDYEFAYYGQGTLVTVSA

SEQ ID NO: 13751 - protein, 119 aa, Artificial Sequence
  source: /note="Description of Artificial Sequence: Synthetic polypeptide"
QVQLKQSGPGLVQPSQSLSITCTVSGFSLTNYGVHWVRQSPGKGLEWLGVIWSGGNTDYNTPFTSRLSINKDNSKSQVFFKMNSLQSNDTAIYYCARALTYYDYEFAYWRQGTLVTVSA

SEQ ID NO: 13752 - protein, 119 aa, Artificial Sequence
  source: /note="Description of Artificial Sequence: Synthetic polypeptide"
QVQLKQSGPGLVQPSQSLSITCTVSGFSLTNYGVHWVRQSPGKGLEWLGVIWSGGNTDYNTPFTSRLSINKDNSKSQVFFKMNSLQSNDTAIYYCARALTYYDYEFAYWAQGTLVTVSA

SEQ ID NO: 13753 - protein, 119 aa, Artificial Sequence
  source: /note="Description of Artificial Sequence: Synthetic polypeptide"
QVQLKQSGPGLVQPSQSLSITCTVSGFSLTNYGVHWVRQSPGKGLEWLGVIWSGGNTDYNTPFTSRLSINKDNSKSQVFFKMNSLQSNDTAIYYCARALTYYDYEFAYWMQGTLVTVSA

SEQ ID NO: 13754 - protein, 119 aa, Artificial Sequence
  source: /note="Description of Artificial Sequence: Synthetic polypeptide"
QVQLKQSGPGLVQPSQSLSITCTVSGFSLTNYGVHWVRQSPGKGLEWLGVIWSGGNTDYNTPFTSRLSINKDNSKSQVFFKMNSLQSNDTAIYYCARALTYYDYEFAYWPQGTLVTVSA

SEQ ID NO: 13755 - protein, 119 aa, Artificial Sequence
  source: /note="Description of Artificial Sequence: Synthetic polypeptide"
QVQLKQSGPGLVQPSQSLSITCTVSGFSLTNYGVHWVRQSPGKGLEWLGVIWSGGNTDYNTPFTSRLSINKDNSKSQVFFKMNSLQSNDTAIYYCARALTYYDYEFAYWTQGTLVTVSA

SEQ ID NO: 13756 - protein, 119 aa, Artificial Sequence
  source: /note="Description of Artificial Sequence: Synthetic polypeptide"
QVQLKQSGPGLVQPSQSLSITCTVSGFSLTNYGVHWVRQSPGKGLEWLGVIWSGGNTDYNTPFTSRLSINKDNSKSQVFFKMNSLQSNDTAIYYCARALTYYDYEFAYWGKGTLVTVSA

SEQ ID NO: 13757 - protein, 119 aa, Artificial Sequence
  source: /note="Description of Artificial Sequence: Synthetic polypeptide"
QVQLKQSGPGLVQPSQSLSITCTVSGFSLTNYGVHWVRQSPGKGLEWLGVIWSGGNTDYNTPFTSRLSINKDNSKSQVFFKMNSLQSNDTAIYYCARALTYYDYEFAYWGHGTLVTVSA

SEQ ID NO: 13758 - protein, 119 aa, Artificial Sequence
  source: /note="Description of Artificial Sequence: Synthetic polypeptide"
QVQLKQSGPGLVQPSQSLSITCTVSGFSLTNYGVHWVRQSPGKGLEWLGVIWSGGNTDYNTPFTSRLSINKDNSKSQVFFKMNSLQSNDTAIYYCARALTYYDYEFAYWGRGTLVTVSA

SEQ ID NO: 13759 - protein, 119 aa, Artificial Sequence
  source: /note="Description of Artificial Sequence: Synthetic polypeptide"
QVQLKQSGPGLVQPSQSLSITCTVSGFSLTNYGVHWVRQSPGKGLEWLGVIWSGGNTDYNTPFTSRLSINKDNSKSQVFFKMNSLQSNDTAIYYCARALTYYDYEFAYWGLGTLVTVSA

SEQ ID NO: 13760 - protein, 119 aa, Artificial Sequence
  source: /note="Description of Artificial Sequence: Synthetic polypeptide"
QVQLKQSGPGLVQPSQSLSITCTVSGFSLTNYGVHWVRQSPGKGLEWLGVIWSGGNTDYNTPFTSRLSINKDNSKSQVFFKMNSLQSNDTAIYYCARALTYYDYEFAYWGDGTLVTVSA

SEQ ID NO: 13761 - protein, 119 aa, Artificial Sequence
  source: /note="Description of Artificial Sequence: Synthetic polypeptide"
QVQLKQSGPGLVQPSQSLSITCTVSGFSLTNYGVHWVRQSPGKGLEWLGVIWSGGNTDYNTPFTSRLSINKDNSKSQVFFKMNSLQSNDTAIYYCARALTYYDYEFAYWGEGTLVTVSA

SEQ ID NO: 13762 - protein, 119 aa, Artificial Sequence
  source: /note="Description of Artificial Sequence: Synthetic polypeptide"
QVQLKQSGPGLVQPSQSLSITCTVSGFSLTNYGVHWVRQSPGKGLEWLGVIWSGGNTDYNTPFTSRLSINKDNSKSQVFFKMNSLQSNDTAIYYCARALTYYDYEFAYWGGGTLVTVSA

SEQ ID NO: 13763 - protein, 119 aa, Artificial Sequence
  source: /note="Description of Artificial Sequence: Synthetic polypeptide"
QVQLKQSGPGLVQPSQSLSITCTVSGFSLTNYGVHWVRQSPGKGLEWLGVIWSGGNTDYNTPFTSRLSINKDNSKSQVFFKMNSLQSNDTAIYYCARALTYYDYEFAYWGMGTLVTVSA

SEQ ID NO: 13764 - protein, 119 aa, Artificial Sequence
  source: /note="Description of Artificial Sequence: Synthetic polypeptide"
QVQLKQSGPGLVQPSQSLSITCTVSGFSLTNYGVHWVRQSPGKGLEWLGVIWSGGNTDYNTPFTSRLSINKDNSKSQVFFKMNSLQSNDTAIYYCARALTYYDYEFAYWGPGTLVTVSA

SEQ ID NO: 13765 - protein, 119 aa, Artificial Sequence
  source: /note="Description of Artificial Sequence: Synthetic polypeptide"
QVQLKQSGPGLVQPSQSLSITCTVSGFSLTNYGVHWVRQSPGKGLEWLGVIWSGGNTDYNTPFTSRLSINKDNSKSQVFFKMNSLQSNDTAIYYCARALTYYDYEFAYWGSGTLVTVSA

SEQ ID NO: 13766 - protein, 119 aa, Artificial Sequence
  source: /note="Description of Artificial Sequence: Synthetic polypeptide"
QVQLKQSGPGLVQPSQSLSITCTVSGFSLTNYGVHWVRQSPGKGLEWLGVIWSGGNTDYNTPFTSRLSINKDNSKSQVFFKMNSLQSNDTAIYYCARALTYYDYEFAYWGTGTLVTVSA

SEQ ID NO: 13767 - protein, 119 aa, Artificial Sequence
  source: /note="Description of Artificial Sequence: Synthetic polypeptide"
QVQLKQSGPGLVQPSQSLSITCTVSGFSLTNYGVHWVRQSPGKGLEWLGVIWSGGNTDYNTPFTSRLSINKDNSKSQVFFKMNSLQSNDTAIYYCARALTYYDYEFAYWGWGTLVTVSA

SEQ ID NO: 13768 - protein, 119 aa, Artificial Sequence
  source: /note="Description of Artificial Sequence: Synthetic polypeptide"
QVQLKQSGPGLVQPSQSLSITCTVSGFSLTNYGVHWVRQSPGKGLEWLGVIWSGGNTDYNTPFTSRLSINKDNSKSQVFFKMNSLQSNDTAIYYCARALTYYDYEFAYWGYGTLVTVSA

SEQ ID NO: 13769 - protein, 119 aa, Artificial Sequence
  source: /note="Description of Artificial Sequence: Synthetic polypeptide"
QVQLKQSGPGLVQPSQSLSITCTVSGFSLTNYGVHWVRQSPGKGLEWLGVIWSGGNTDYNTPFTSRLSINKDNSKSQVFFKMNSLQSNDTAIYYCARALTYYDYEFAYWGQATLVTVSA

SEQ ID NO: 13770 - protein, 119 aa, Artificial Sequence
  source: /note="Description of Artificial Sequence: Synthetic polypeptide"
QVQLKQSGPGLVQPSQSLSITCTVSGFSLTNYGVHWVRQSPGKGLEWLGVIWSGGNTDYNTPFTSRLSINKDNSKSQVFFKMNSLQSNDTAIYYCARALTYYDYEFAYWGQNTLVTVSA

SEQ ID NO: 13771 - protein, 119 aa, Artificial Sequence
  source: /note="Description of Artificial Sequence: Synthetic polypeptide"
QVQLKQSGPGLVQPSQSLSITCTVSGFSLTNYGVHWVRQSPGKGLEWLGVIWSGGNTDYNTPFTSRLSINKDNSKSQVFFKMNSLQSNDTAIYYCARALTYYDYEFAYWGQPTLVTVSA

SEQ ID NO: 13772 - protein, 119 aa, Artificial Sequence
  source: /note="Description of Artificial Sequence: Synthetic polypeptide"
QVQLKQSGPGLVQPSQSLSITCTVSGFSLTNYGVHWVRQSPGKGLEWLGVIWSGGNTDYNTPFTSRLSINKDNSKSQVFFKMNSLQSNDTAIYYCARALTYYDYEFAYWGQSTLVTVSA

SEQ ID NO: 13773 - protein, 119 aa, Artificial Sequence
  source: /note="Description of Artificial Sequence: Synthetic polypeptide"
QVQLKQSGPGLVQPSQSLSITCTVSGFSLTNYGVHWVRQSPGKGLEWLGVIWSGGNTDYNTPFTSRLSINKDNSKSQVFFKMNSLQSNDTAIYYCARALTYYDYEFAYWGQTTLVTVSA

SEQ ID NO: 13774 - protein, 119 aa, Artificial Sequence
  source: /note="Description of Artificial Sequence: Synthetic polypeptide"
QVQLKQSGPGLVQPSQSLSITCTVSGFSLTNYGVHWVRQSPGKGLEWLGVIWSGGNTDYNTPFTSRLSINKDNSKSQVFFKMNSLQSNDTAIYYCARALTYYDYEFAYWGQYTLVTVSA

SEQ ID NO: 13775 - protein, 119 aa, Artificial Sequence
  source: /note="Description of Artificial Sequence: Synthetic polypeptide"
QVQLKQSGPGLVQPSQSLSITCTVSGFSLTNYGVHWVRQSPGKGLEWLGVIWSGGNTDYNTPFTSRLSINKDNSKSQVFFKMNSLQSNDTAIYYCARALTYYDDEFAYWGPGTLVTVSA

SEQ ID NO: 13776 - protein, 119 aa, Artificial Sequence
  source: /note="Description of Artificial Sequence: Synthetic polypeptide"
QVQLKQSGPGLVQPSQSLSITCTESGFSLTNYGVHWVRQSPGKGLEWLGVIWSGGNTDYNTPFTSRLSINKDNSKSQVFFKMNSLQSNDTAIYYCARALTYYDYEFAYWGQGTLVTVSA

SEQ ID NO: 13777 - protein, 119 aa, Artificial Sequence
  source: /note="Description of Artificial Sequence: Synthetic polypeptide"
QVQLKQSGPGLVQPSQSLSITCTVSGFSLTNYGVHWVRQSPGKGLEWLGVIWSGGNTDYNTPFTSRLSINKDNSKSQVFFKMNSLQSNDTAIYYCARALTYYDYEFAYWGVGTLVTVSA

SEQ ID NO: 13778 - protein, 330 aa, Artificial Sequence [sequence omitted]

SEQ ID NO: 13779 - protein, 119 aa, Artificial Sequence
  source: /note="Description of Artificial Sequence: Synthetic polypeptide"
QVQLKQSGPGLVQPSQSLSITCTESGRSLTNYGVHWVRQSPGKGLEWLGVIWSGGNTDYNTPFTSRLSINKDNSKSQVFFKMNSLQSNDTAIYYCAHALTYYDYEFAYWGPGTLVTVSA

SEQ ID NO: 13780 - protein, 119 aa, Artificial Sequence
  source: /note="Description of Artificial Sequence: Synthetic polypeptide"
QVQLKQSGPGLVQPSQSLSITCTVSGFCLTNYGVHWVRQSPGKGLEWLGVIWSGGNTDYNTPFTSRLSINKDNSKSQVFFKMNSLQSNDTAIYYCARALTYYDYEFAYWGQGTLVTVSA

SEQ ID NO: 13781 - protein, 119 aa, Artificial Sequence
  source: /note="Description of Artificial Sequence: Synthetic polypeptide"
QVQLKQSGPGLVQPSQSLSITCTVSGFSLTNYGVHWVRQSPGKGLEWLGVIWSGGNTDYNTPPTSRLSINKDNSKSQVFFKMNSLQSNDTAIYYCARALTYYDYEFAYWGQGTLVTVSA

SEQ ID NO: 13782 - protein, 119 aa, Artificial Sequence
  source: /note="Description of Artificial Sequence: Synthetic polypeptide"
QVQLKQSGPGLVQPSQSLSITCTVSGFSLTNYGVHWVRQSPGKGLEWLGVIWSGGNTDYNTPFTSRGSINKDNSKSQVFFKMNSLQSNDTAIYYCARALTYYDYEFAYWGQGTLVTVSA

SEQ ID NO: 13783 - protein, 119 aa, Artificial Sequence
  source: /note="Description of Artificial Sequence: Synthetic polypeptide"
QVQLKQSGPGLVQPSQSLSITCTVSGFSLTNYGVHWVRQSPGKGLEWLGVIWSGGNTDYNTPFTSRLSINKPNSKSQVFFKMNSLQSNDTAIYYCARALTYYDYEFAYWGQGTLVTVSA

SEQ ID NO: 13784 - protein, 119 aa, Artificial Sequence
  source: /note="Description of Artificial Sequence: Synthetic polypeptide"
QVQLKQSGPGLVQPSQSLSITCTVSGFSLTNYGVHWVRQSPGKGLEWLGVIWSGGNTDYNTPFTSRLSINKDNSGSQVFFKMNSLQSNDTAIYYCARALTYYDYEFAYWGQGTLVTVSA

SEQ ID NO: 13785 - protein, 119 aa, Artificial Sequence
  source: /note="Description of Artificial Sequence: Synthetic polypeptide"
QVQLKQSGPGLVQPSQSLSITCTVSGFSLTNYGVHWVRQSPGKGLEWLGVIWSGGNTDYNTPFTSRLSINKDNSPSQVFFKMNSLQSNDTAIYYCARALTYYDYEFAYWGQGTLVTVSA

SEQ ID NO: 13786 - protein, 119 aa, Artificial Sequence
  source: /note="Description of Artificial Sequence: Synthetic polypeptide"
QVQLKQSGPGLVQPSQSLSITCTVSGFSLTNYGVHWVRQSPGKGLEWLGVIWSGGNTDYNTPFTSRLSINKDNSKIQVFFKMNSLQSNDTAIYYCARALTYYDYEFAYWGQGTLVTVSA

SEQ ID NO: 13787 - protein, 119 aa, Artificial Sequence
  source: /note="Description of Artificial Sequence: Synthetic polypeptide"
QVQLKQSGPGLVQPSQSLSITCTVSGFSLTNYGVHWVRQSPGKGLEWLGVIWSGGNTDYNTPFTSRLSINKDNSKVQVFFKMNSLQSNDTAIYYCARALTYYDYEFAYWGQGTLVTVSA

SEQ ID NO: 13788 - protein, 119 aa, Artificial Sequence
  source: /note="Description of Artificial Sequence: Synthetic polypeptide"
QVQLKQSGPGLVQPSQSLSITCTVSGFSLTNYGVHWVRQSPGKGLEWLGVIWSGGNTDYNTPFTSRLSINKDNSKSQVFFKMNSLQSNDTAIYYCARALTYYDYEFAYWGIGTLVTVSA

SEQ ID NO: 13789 - protein, 119 aa, Artificial Sequence
  source: /note="Description of Artificial Sequence: Synthetic polypeptide"
QVQLKQSGPGLVQPSQSLSITCTVCGFSLTNYGVHWVRQSPGKGLEWLGVIWSGGNTDYNTPFTSRLSINKDNSKSQVFFKMNSLQSNDTAIYYCARALTYYDYEFAYWGPGTLVTVSA

SEQ ID NO: 13790 - protein, 119 aa, Artificial Sequence
  source: /note="Description of Artificial Sequence: Synthetic polypeptide"
QVQLKQSGPGLVQPSQSLSITCTVSGFSLTNYGVHWVRQSPGKGLEWLGVIWGGGNTDYNTPFTSRLSINKDNSKSQVFFKMNSLQSNDTAIYYCARALTYYDDEFAYWGQGTLVTVSA

SEQ ID NO: 13791 - protein, 119 aa, Artificial Sequence
  source: /note="Description of Artificial Sequence: Synthetic polypeptide"
QVQLKQSGPGLVQPSQSLSITCTVSGFSLTNYGVHWVRQSPGKGLEWLGVIWGGGNTDYNTPFTSRLSINKDNSKSQVFFKMNSLQSNDTAIYYCARALTYYDDEFAYWGPGTLVTVSA

SEQ ID NO: 13792 - protein, 119 aa, Artificial Sequence
  source: /note="Description of Artificial Sequence: Synthetic polypeptide"
QVQLKQSGPGLVQPSQSLSITCTVVGFSLTNYGVHWVRQSPGKGLEWLGVIWSGGNTDYNTPFTSRLSINKDNSKSQVFFKMNSLQSNDTAIYYCARALTYYDDEFAYWGQGTLVTVSA

SEQ ID NO: 13793 - protein, 119 aa, Artificial Sequence
  source: /note="Description of Artificial Sequence: Synthetic polypeptide"
QVQLKQSGPGLVQPSQSLSITCTVVGFSLTNYGVHWVRQSPGKGLEWLGVIWSGGNTDYNTPFTSRLSINKDNSKSQVFFKMNSLQSNDTAIYYCARALTYYDDEFAYWGPGTLVTVSA

SEQ ID NO: 13794 - protein, 119 aa, Artificial Sequence
  source: /note="Description of Artificial Sequence: Synthetic polypeptide"
QVQLKQSGPGLVQPSQSLSITCTVVGFSLTNYGVHWVRQSPGKGLEWLGVIWGGGNTDYNTPFTSRLSINKDNSKSQVFFKMNSLQSNDTAIYYCARALTYYDDEFAYWGQGTLVTVSA

SEQ ID NO: 13795 - protein, 119 aa, Artificial Sequence
  source: /note="Description of Artificial Sequence: Synthetic polypeptide"
QVQLKQSGPGLVQPSQSLSITCTVVGFSLTNYGVHWVRQSPGKGLEWLGVIWGGGNTDYNTPFTSRLSINKDNSKSQVFFKMNSLQSNDTAIYYCARALTYYDDEFAYWGPGTLVTVSA

SEQ ID NO: 13796 - protein, 119 aa, Artificial Sequence
  source: /note="Description of Artificial Sequence: Synthetic polypeptide"
QVQLKQSGPGLVQPSQSLSITCTVSGGSLTNYGVHWVRQSPGKGLEWLGVIWSGGNTDYNTPFTSRLSINKDNSKSQVFFKMNSLQSNDTAIYYCARALTYYDDEFAYWGQGTLVTVSA

SEQ ID NO: 13797 - protein, 119 aa, Artificial Sequence
  source: /note="Description of Artificial Sequence: Synthetic polypeptide"
QVQLKQSGPGLVQPSQSLSITCTVSGGSLTNYGVHWVRQSPGKGLEWLGVIWSGGNTDYNTPFTSRLSINKDNSKSQVFFKMNSLQSNDTAIYYCARALTYYDDEFAYWGPGTLVTVSA

SEQ ID NO: 13798 - protein, 119 aa, Artificial Sequence
  source: /note="Description of Artificial Sequence: Synthetic polypeptide"
QVQLKQSGPGLVQPSQSLSITCTVSGGSLTNYGVHWVRQSPGKGLEWLGVIWGGGNTDYNTPFTSRLSINKDNSKSQVFFKMNSLQSNDTAIYYCARALTYYDDEFAYWGQGTLVTVSA

SEQ ID NO: 13799 - protein, 119 aa, Artificial Sequence
  source: /note="Description of Artificial Sequence: Synthetic polypeptide"
QVQLKQSGPGLVQPSQSLSITCTVSGGSLTNYGVHWVRQSPGKGLEWLGVIWGGGNTDYNTPFTSRLSINKDNSKSQVFFKMNSLQSNDTAIYYCARALTYYDDEFAYWGPGTLVTVSA

SEQ ID NO: 13800 - protein, 119 aa, Artificial Sequence
  source: /note="Description of Artificial Sequence: Synthetic polypeptide"
QVQLKQSGPGLVQPSQSLSITCTVSGFSLFNYGVHWVRQSPGKGLEWLGVIWSGGNTDYNTPFTSRLSINKDNSKSQVFFKMNSLQSNDTAIYYCARALTYYDDEFAYWGQGTLVTVSA

SEQ ID NO: 13801 - protein, 119 aa, Artificial Sequence
  source: /note="Description of Artificial Sequence: Synthetic polypeptide"
QVQLKQSGPGLVQPSQSLSITCTVSGFSLFNYGVHWVRQSPGKGLEWLGVIWSGGNTDYNTPFTSRLSINKDNSKSQVFFKMNSLQSNDTAIYYCARALTYYDDEFAYWGPGTLVTVSA

SEQ ID NO: 13802 - protein, 119 aa, Artificial Sequence
  source: /note="Description of Artificial Sequence: Synthetic polypeptide"
QVQLKQSGPGLVQPSQSLSITCTVSGFSLFNYGVHWVRQSPGKGLEWLGVIWGGGNTDYNTPFTSRLSINKDNSKSQVFFKMNSLQSNDTAIYYCARALTYYDDEFAYWGQGTLVTVSA

SEQ ID NO: 13803 - protein, 119 aa, Artificial Sequence
  source: /note="Description of Artificial Sequence: Synthetic polypeptide"
QVQLKQSGPGLVQPSQSLSITCTVSGFSLFNYGVHWVRQSPGKGLEWLGVIWGGGNTDYNTPFTSRLSINKDNSKSQVFFKMNSLQSNDTAIYYCARALTYYDDEFAYWGPGTLVTVSA

SEQ ID NO: 13804 - protein, 119 aa, Artificial Sequence
  source: /note="Description of Artificial Sequence: Synthetic polypeptide"
QVQLKQSGPGLVQPSQSLSITCTVSGFSLTNYGVHWVRQSPGKGLEWLGVIWSGGNTDYNTPFTSRLSINKLNSKSQVFFKMNSLQSNDTAIYYCARALTYYDDEFAYWGQGTLVTVSA

SEQ ID NO: 13805 - protein, 119 aa, Artificial Sequence
  source: /note="Description of Artificial Sequence: Synthetic polypeptide"
QVQLKQSGPGLVQPSQSLSITCTVSGFSLTNYGVHWVRQSPGKGLEWLGVIWSGGNTDYNTPFTSRLSINKLNSKSQVFFKMNSLQSNDTAIYYCARALTYYDDEFAYWGPGTLVTVSA

SEQ ID NO: 13806 - protein, 119 aa, Artificial Sequence
  source: /note="Description of Artificial Sequence: Synthetic polypeptide"
QVQLKQSGPGLVQPSQSLSITCTVSGFSLTNYGVHWVRQSPGKGLEWLGVIWGGGNTDYNTPFTSRLSINKLNSKSQVFFKMNSLQSNDTAIYYCARALTYYDDEFAYWGQGTLVTVSA

SEQ ID NO: 13807 - protein, 119 aa, Artificial Sequence
  source: /note="Description of Artificial Sequence: Synthetic polypeptide"
QVQLKQSGPGLVQPSQSLSITCTVSGFSLTNYGVHWVRQSPGKGLEWLGVIWGGGNTDYNTPFTSRLSINKLNSKSQVFFKMNSLQSNDTAIYYCARALTYYDDEFAYWGPGTLVTVSA

SEQ ID NO: 13808 - protein, 107 aa, Homo sapiens
  MOD_RES (53)..(53): Any amino acid
  MOD_RES (94)..(94): Any amino acid
DILLTQSPVILSVSPGERVSFSCRASQSIGTNIHWYQQRTNGSPRLLIKYASXSISGIPSRFSGSGSGTDFTLSINSVESEDIADYYCQQNNNXPTTFGAGTKLELK

SEQ ID NO: 13809 - protein, 120 aa, Homo sapiens
QVTLRESGPTLVKPTQTLTLTCTFSGFSLTSLSESVAWIRQSPGKALEWLALIYWDDDKLYSPSLKSRLTITKDTSKNEVVLTMTNVDSADTATYFCAHKKIRDTGFDFWGQGTLVTVSS

SEQ ID NO: 13810 - protein, 128 aa, Homo sapiens
EVQLVQSGAEVKKPGASVKVSCKASGGTFSSYAISWVRQAPGQGLEWMGGIIPILGTADYAQKFQGRVTITADESTSTAYMELSSLRSEDTAVYYCARDEIPLEYCTSTSCYHAFDIWGQGTMVTVSS

SEQ ID NO: 13811 - protein, 128 aa, Homo sapiens
QVQLVQSGAEVKKPGSSVKVSCKASGGTFRNHAFSWVRQAPGQGLEWMGWISAYNGYTHYAEKLQGRVTMTTDTSTSTAYMELRSLRSDDTAVYYCARVSASYNSDWSLHYYYGMDVWGQGTTVTVSS

SEQ ID NO: 13812 - protein, 127 aa, Homo sapiens
QVQLVQSGAEVKKPGASVKVSCKASGYTFIRNDINWVRQASGQGLEWIGWMNPNTGATASAQNFQGRVAMTRNASMNTAYLELSGLRSDDTAIYYCARAFEDYIWESSEFHFGLDVWGQGTTVTVSS

SEQ ID NO: 13813 - protein, 120 aa, Homo sapiens
QVQLVQSGGGVVQPGRSLRLSCAASGFIFNHYAMHWVRQAPGKGLEWVAHISSDGSYKFYADSVKGRFTVSRDNSDNTVYLQMNSLGPEDTAVYHCARFTEVLYYGADYWGQGTLVTVSS

SEQ ID NO: 13814 - protein, 128 aa, Homo sapiens
QVQLVQSGAEVKKPGSAVKVSCKASGGTFSSYAISWVRQAPGQGLEWMGGIIPILGTADYAQKFQGRVTITADESTSTAYMELSSLRSEDTAVYYCARDEIPLEYCTSTSCYHAFDIWGQGTMVTVSS

SEQ ID NO: 13815 - protein, 119 aa, Homo sapiens
QMQLVQSWAEVKKPGASVKVSCKASAYTFTNYYIHWVRQAPGQGLEWMGIINPSSGATTYAQRLQGRVIMTRDTSTSTVNMELSSLRSEDTAVYYCARSTLWFSEFDYWGQGTLVTVSS

SEQ ID NO: 13816 - protein, 120 aa, Homo sapiens
QVQLVQSGAEVKKPGASVKVSCKASGYTFTGYYMHWVRQAPGQGLEWMGWINPNSGGTNYAQKFQGRVTMTRDTSISTAYMELSRLRSDDTAVYYCARRYYDSSLSFDYWGQGTLVTVSS

SEQ ID NO: 13817 - protein, 121 aa, Homo sapiens
QVQLVQSGAEVKKPGASVKVSCKASGYTFTGYYMHWVRQAPGQGLEWMGWINPNSGGTNYAQKFQGRVTMTRDTSISTAYMELSRLRSDDTAVYYCARDGGNWNYGGGDYWGQGTLVTVSS

SEQ ID NO: 13818 - protein, 120 aa, Homo sapiens
EVQLVESGGGVVQPGRSLRLSCAASGFIFNHYAMHWVRQAPGKGLEWVAHISSDGSYKFYADSVKGRFTVSRDNSDNTVYLQMNSLGPEDTAVYHCARFTEVLYYGADYWGQGTLVTVSS

SEQ ID NO: 13819 - protein, 124 aa, Homo sapiens
QVQLQQSGAEVKKPGASVKVSCKASGYTFTDHGIIWVRQAPGQGLEWMGWINTDNGNTIYAPKFQGRVTMTTDTSTSIVYMELQSLRSDDTAVYFCSREDWNYDGGLREVFDYWGQGTLVTVSS

SEQ ID NO: 13820 - protein, 128 aa, Homo sapiens
EVQLVQSGAEVKKPGSAVKVSCKASGGTFSSYAISWVRQAPGQGLEWMGGIIPILGTADYAQKFQGRVTITADESTSTAYMELSSLRSEDTAVYYCARDEIPLEYCTSTSCYHAFDIWGRGTMVTVSS

SEQ ID NO: 13821 - protein, 118 aa, Homo sapiens
QVQLVESGGGLVQPGGSLRLFCAASGFGVSTNYMSWVRQAPGKGLEWVSVIYSGGATYYADSVKGRFTISRDNSKNTLYLQMNSLRPEDTAVYYCAKESPNDDYFDYWGQGTLVTVSS

SEQ ID NO: 13822 - protein, 128 aa, Homo sapiens
QVQLVQSGAEVKKPGSSVKVSCKASGGTFSSYAISWVRQAPGQGLEWMGGIIPIFGTASYAQKFQGRVTITADESTTTAYMELSSLRSEDTAVYYCAREGPEYCSGGTCYSADAFDIWGQGTMVTVSS

SEQ ID NO: 13823 - protein, 120 aa, Homo sapiens
QVQLVESGGGLVQPGGSLRLSCAASGFTFSSYWMSWVRQAPGKGLEWVANIKQDGSEKYYVDSVKGRFTISRDNAKNSLYLQMNSLRAEDTAVYYCAREAPIAADAFDIWGQGTMVTVSS

SEQ ID NO: 13824 - protein, 117 aa, Homo sapiens
EVQLVQSGAEVKKPGSSVKVSCKASGGTFSSYPISWVRQAPGQGLEWMGGIIPIFGIANYAQKFQGRVTITADESTSTAYMELSSLRSEDTAVYYCARDSSGYSLYWGQGTLVTVSS

SEQ ID NO: 13825 - protein, 119 aa, Homo sapiens
QVQLVQSGAEVKKPGESLRISCKGSGYSFTSYWISWVRQMPGKGLEWMGWIDPSDSYTNYSPSFQGHVTISADKSISTAYLQWSSLKASDTAVYYCAIQTSSSDAFDIWGQGTMVTVSS

SEQ ID NO: 13826 - protein, 121 aa, Homo sapiens
QVQLQQSGPGLVKPSQTLSLTCAISGDSVASNGASWNWIRQSPSRGLEWLSKTYYRSKWYYEYAPSVTSRMTISPDTSKNQFSLQVTSVTPEDTAVYYCARLIGDGLIDYWGQGTLVTVSS

SEQ ID NO: 13827 - protein, 122 aa, Homo sapiens
EVQLVESGGGLVKPGGSLRLSCVGSGVDTNSRAISWVRQAPGKGLEWVSVIYSGGGGTNYADSVKGRFTISRDKSRNTVFLQMNSLRVEDTALYYCAKDPGWPIAGWYFDLWGRGTLVTVSS

SEQ ID NO: 13828 - protein, 125 aa, Homo sapiens
QVQLQQSGPGLVQPSQTLSLTCAISGDTVSTNYHAWNWIRQSPSRGLEWLGRTYYRSKWYNDYAVSVKSRVTISPDTSKNHFSLQLKSVTPEDTAVYYCARDGGTTNYYNVFDVWGQGTTVTVSS

SEQ ID NO: 13829 - protein, 119 aa, Homo sapiens
EVQLVQSGAEVKKPGASVKVSCKASGYTFTGYYMHWVRQAPGQGLEWLGWINPSSGFTDYAHKFQGRVTMTRDTSTSTVYMELSSLRSEDTAVYYCARSTLWFSEFDYWGQGTLVTVSS

SEQ ID NO: 13830 - protein, 120 aa, Homo sapiens
QVQLVESGAEVKKPGASVKVSCKASGYTFTDYHIHWVRQAPGQGLEWMGWINTYNGNTQYAQHVQDRVTMTRDSATSSVYLELRSLRSDDTALYFCALPNDYYSYAMDVWGQGTTVTVSS

SEQ ID NO: 13831 - protein, 123 aa, Homo sapiens
EVQLVESGAEVKKPGASVKVSCKASGYTFTSYYMHWVRQAPGQGLEWMGIINPNDGSTTYAQNFQGRITMTRDTSTRTAYMELSSLRSEDTAVYYCARVDSSLGGYYYGMDVWGQGTTVTVSS

SEQ ID NO: 13832 - protein, 118 aa, Homo sapiens
QVQLQQWAEVKKPGASVKVSCKASGYTFTDHYIDWVRQAPGQGLEWMGRINPNSGYTNYAQTFQGRVTMTRDTSINTAYMDLSSLRSEDTAVYYCARSTLWFSEFDYWGQGTLVTVSS

SEQ ID NO: 13833 - protein, 125 aa, Homo sapiens
EVQLLESGGGVVQPGRSLRLSCAASGFTFSSYAIHWVRQAPGKGLEWVAVISFDGNNKYYADSMKGRFTISRDNAKNSLYLQMNSLRAEDTAVYYCARDQYYDILTGYYYGMDVWGQGTTVTVSS

SEQ ID NO: 13834 - protein, 122 aa, Homo sapiens
EVQLVESGGGLVKPGGSLRLSCAASGFTFSSYSMNWVRQAPGKGLEWVSSISSSSSYIYYADSVKGRFTISRDNAKNSLYLQMNSLRAEDTAVYYCARHGSYYDPYYGMDVWGQGTTVTVSS

SEQ ID NO: 13835 - protein, 118 aa, Homo sapiens
VQLVQSGAEVKNPGASVKVSCKASGFTFTSYDLNWVRQAPGQGLEWMGWMNPINGNTGYAQKFQGRVSMTRDTSTSTVYMELSSLRSEDTAVYYCARADLWFGELDYWGQGTLVTVSS

SEQ ID NO: 13836 - protein, 127 aa, Homo sapiens
QVQLVQSGAEVKKPGSSVKVSCKASGGTFRNHAWSWVRQAPGQGLEWMGWISAYNGYTHYASKLQGRVTMTTDTSTSTAYMELRSLRSDDTAVYYCARVSAEYAEDWSLHYYYMDVWGQGTLVTVSS

SEQ ID NO: 13837 - protein, 128 aa, Homo sapiens
QVQLVQSGAEVKKPGSSVKVSCKASGGTFRNHAWSWVRQAPGQGLEWMGWISAYNGYTTYASKLQGRVTMTTDTSTSTAYMELRSLRSDDTAVYYCARVSASYNEDWSLHYYYGMDVWGQGTLVTVSS

SEQ ID NO: 13838 - protein, 128 aa, Homo sapiens
QVQLVQSGAEVKKPGSSVKVSCKASGGTFRNHAYSWVRQAPGQGLEWMGWISAYNGYTTYASKLQGRVTMTTDTSTSTAYMELRSLRSDDTAVYYCARVSASYNSDWSLHYYYGMDVWGQGTLVTVSS

SEQ ID NO: 13839 - protein, 128 aa, Homo sapiens
QVQLVQSGAEVKKPGSSVKVSCKASGGTFRNHAYSWVRQAPGQGLEWMGWISAYNGYTHYASKLQGRVTMTTDTSTSTAYMELRSLRSDDTAVYYCARVSASYASDWSLHYYYGMDVWGQGTLVTVSS

SEQ ID NO: 13840 - protein, 128 aa, Homo sapiens
QVQLVQSGAEVKKPGSSVKVSCKASGGTFRNHAYSWVRQAPGQGLEWMGWISAYNGYTTYASKLQGRVTMTTDTSTSTAYMELRSLRSDDTAVYYCARVSAEYNSDWSLHYYYGMDVWGQGTLVTVSS

SEQ ID NO: 13841 - protein, 128 aa, Homo sapiens
QVQLVQSGAEVKKPGSSVKVSCKASGGTFRNHAYSWVRQAPGQGLEWMGWISAYNGYTHYAEKLQGRVTMTTDTSTSTAYMELRSLRSDDTAVYYCARVSAEYNSDWSVHYYYGMDVWGQGTLVTVSS

SEQ ID NO: 13842 - protein, 128 aa, Homo sapiens
QVQLVQSGAEVKKPGSSVKVSCKASGGTFRNHAYSWVRQAPGQGLEWMGWISAYNGYTTYAEKLQGRVTMTTDTSTSTAYMELRSLRSDDTAVYYCARVSAEYAEDWSLHYYYGMDVWGQGTLVTVSS

SEQ ID NO: 13843 - protein, 120 aa, Homo sapiens
EVQLVESGGGVVQPGRSLRLSCAASGFIFHHYAMHWVRQAPGKGLEWVAHISIDGSSKFYADSVKGRFTVSRDNSKNTLYLQMNSLRAEDTAVYYCARFTEVLYYGADLWGQGTLVTVSS

SEQ ID NO: 13844 - protein, 128 aa, Homo sapiens
QVQLVQSGAEVKKPGSSVKVSCKASGGTFRNHAYSWVRQAPGQGLEWMGWISAYNGYTTYAEKLQGRVTMTTDTSTSTAYMELRSLRSDDTAVYYCARVSAEYNSDWSVHYYYGMDVWGQGTLVTVSS

SEQ ID NO: 13845 - protein, 128 aa, Homo sapiens
QVQLVQSGAEVKKPGSSVKVSCKASGGTFRNHAWSWVRQAPGQGLEWMGWISAYNGYTTYASKLQGRVTMTTDTSTSTAYMELRSLRSDDTAVYYCARVSAEYASDWSLHYYYGMDVWGQGTLVTVSS

SEQ ID NO: 13846 - protein, 128 aa, Homo sapiens
QVQLVQSGAEVKKPGSSVKVSCKASGGTFRNHAWSWVRQAPGQGLEWMGWISAYNGYTTYAEKLQGRVTMTTDTSTSTAYMELRSLRSDDTAVYYCARVSAEYAEDWSLHYYYGMDVWGQGTLVTVSS

SEQ ID NO: 13847 - protein, 128 aa, Homo sapiens
QVQLVQSGAEVKKPGSSVKVSCKASGGTFRNHAWSWVRQAPGQGLEWMGWISAYNGYTTYASKLQGRVTMTTDTSTSTAYMELRSLRSDDTAVYYCARVSASYASDWSVHYYYGMDVWGQGTLVTVSS

SEQ ID NO: 13848 - protein, 128 aa, Homo sapiens
QVQLVQSGAEVKKPGSSVKVSCKASGGTFRNHAWSWVRQAPGQGLEWMGWISAYNGYTTYASKLQGRVTMTTDTSTSTAYMELRSLRSDDTAVYYCARVSASYNSDWSVHYYYGMDVWGQGTLVTVSS

SEQ ID NO: 13849 - protein, 128 aa, Homo sapiens
QVQLVQSGAEVKKPGSSVKVSCKASGGTFRNHAWSWVRQAPGQGLEWMGWISAYNGYTTYAEKLQGRVTMTTDTSTSTAYMELRSLRSDDTAVYYCARVSASYASDWSLHYYYGMDVWGQGTLVTVSS

SEQ ID NO: 13850 - protein, 128 aa, Homo sapiens
QVQLVQSGAEVKKPGSSVKVSCKASGGTFRNHAYSWVRQAPGQGLEWMGWISAYNGYTTYASKLQGRVTMTTDTSTSTAYMELRSLRSDDTAVYYCARVSASYNEDWSLHYYYGMDVWGQGTLVTVSS

SEQ ID NO: 13851 - protein, 128 aa, Homo sapiens
QVQLVQSGAEVKKPGSSVKVSCKASGGTFRNHAYSWVRQAPGQGLEWMGWISAYNGYTTYASKLQGRVTMTTDTSTSTAYMELRSLRSDDTAVYYCARVSASYNSDWSVHYYYGMDVWGQGTLVTVSS

SEQ ID NO: 13852 - protein, 128 aa, Homo sapiens
QVQLVQSGAEVKKPGSSVKVSCKASGGTFRNHAYSWVRQAPGQGLEWMGWISAYNGYTTYAEKLQGRVTMTTDTSTSTAYMELRSLRSDDTAVYYCARVSAEYASDWSLHYYYGMDVWGQGTLVTVSS

SEQ ID NO: 13853 - protein, 120 aa, Homo sapiens
EVQLVESGGGVVQPGRSLRLSCAASGFIFHHYAMHWVRQAPGKGLEWVAHISPDGSSKFYADSVKGRFTVSRDNSKNTLYLQMNSLRAEDTAVYYCARFTEVLYYGADIWGQGTLVTVSS

SEQ ID NO: 13854 - protein, 120 aa, Homo sapiens
EVQLVESGGGVVQPGRSLRLSCAASGFIFHHYAMHWVRQAPGKGLEWVAHISLDGSYKFYADSVKGRFTVSRDNSKNTLYLQMNSLRAEDTAVYYCARFTEVLYYGADIWGQGTLVTVSS

SEQ ID NO: 13855 - protein, 120 aa, Homo sapiens
EVQLVESGGGVVQPGRSLRLSCAASGFIFHHYAMHWVRQAPGKGLEWVAHISPDGSSKFYADSVKGRFTVSRDNSKNTLYLQMNSLRAEDTAVYYCARFTEVLYYGADYWGQGTLVTVSS

SEQ ID NO: 13856 - protein, 120 aa, Homo sapiens
EVQLVESGGGVVQPGRSLRLSCAASGFIFHHYAMHWVRQAPGKGLEWVAHISPDGSYKFYADSVKGRFTVSRDNSKNTLYLQMNSLRAEDTAVYYCARFTEVLYYGADLWGQGTLVTVSS

SEQ ID NO: 13857 - protein, 120 aa, Homo sapiens
EVQLVESGGGVVQPGRSLRLSCAASGFIFHHYAMHWVRQAPGKGLEWVAHISSDGSSKFYADSVKGRFTVSRDNSKNTLYLQMNSLRAEDTAVYYCARFTEVLYYGADLWGQGTLVTVSS

SEQ ID NO: 13858 - protein, 120 aa, Homo sapiens
EVQLVESGGGVVQPGRSLRLSCAASGFIFHHYAMHWVRQAPGKGLEWVAHISSDGSYKFYADSVKGRFTVSRDNSKNTLYLQMNSLRAEDTAVYYCARFTEVLYYGADLWGQGTLVTVSS

SEQ ID NO: 13859 - protein, 120 aa, Homo sapiens
EVQLVESGGGVVQPGRSLRLSCAASGFIFHHYAMHWVRQAPGKGLEWVAHISPDGSYKFYADSVKGRFTVSRDNSKNTLYLQMNSLRAEDTAVYYCARFTEVLYYGADIWGQGTLVTVSS

SEQ ID NO: 13860 - protein, 120 aa, Homo sapiens
EVQLVESGGGVVQPGRSLRLSCAASGFIFHHYAMHWVRQAPGKGLEWVAHISPDGSSKFYADSVKGRFTVSRDNSKNTLYLQMNSLRAEDTAVYYCARFTEVLYYGADLWGQGTLVTVSS

SEQ ID NO: 13861 - protein, 120 aa, Homo sapiens
EVQLVESGGGVVQPGRSLRLSCAASGFIFHHYSMHWVRQAPGKGLEWVAHISSDGSSKFYADSVKGRFTVSRDNSKNTLYLQMNSLRAEDTAVYYCARFTEVLYYGADLWGQGTLVTVSS

SEQ ID NO: 13862 - protein, 120 aa, Homo sapiens
EVQLVESGGGVVQPGRSLRLSCAASGFTFSHYAMHWVRQAPGKGLEWVAHISLDGSSKFYADSVKGRFTVSRDNSKNTLYLQMNSLRAEDTAVYYCARFTEVLYYGADLWGQGTLVTVSS

SEQ ID NO: 13863 - protein, 117 aa, Artificial Sequence
  source: /note="Description of Artificial Sequence: Synthetic polypeptide"
EVQLVESGGGLVQPGGSLRLSCAASGFTFSSYWMTWVRQAPGKGLEWVANIQQDGSEKNYLDSVKGRFTISRDNAKNSLSLQMNSLRAEDTAVYYCARTYSGFEDFWGQGTLVTVSS

SEQ ID NO: 13864 - protein, 117 aa, Artificial Sequence
  source: /note="Description of Artificial Sequence: Synthetic polypeptide"
EVQLVESGGGLVQPGGSLRLSCAASRFTFSDYWMTWVRQAPGKGLEWVAHIKQDGSEKYYVDSVKGRFTISRDNAKNSLYLQMNSLRAEDTALYYCARGFLIYFDYWGQGTLVTVSS

SEQ ID NO: 13865 - protein, 121 aa, Artificial Sequence
  source: /note="Description of Artificial Sequence: Synthetic polypeptide"
EVQLVESGGGLVQPGGSLRLSCAASGFTFSSYWMNWVRQAPGKGLEWVANIKKDGSEKYYVDSVKGRFTISRDNAKNSLYLQMNSLRAEDTAVYYCARDLGWGWGWYFDLWGRGTLVTVSS

SEQ ID NO: 13866 - protein, 120 aa, Artificial Sequence
  source: /note="Description of Artificial Sequence: Synthetic polypeptide"
QVQLVQSGAEVKKPGSSVKVSCKASGFTFTDYKIHWVRQAPGQCLEWMGYINPNSGYSTYASKFQGRVTITADKSTSTAYMELSSLRSEDTAVYYCARLSPGGYYVMDAWGQGTTVTVSS

SEQ ID NO: 13867 - protein, 119 aa, Artificial Sequence
  source: /note="Description of Artificial Sequence: Synthetic polypeptide"
QVQLKQSGPGLVQPSQSLSITCTVSGFSLTNYGVHWVRQSPGKGLEWLGVIWSGGNTDYNTPFTSRLSINKDNSKSQVFFKMNSLQSNDTAIYYCARALTYYDYEFAYWGQGTLVTVSA

SEQ ID NO: 13868 - protein, 119 aa, Artificial Sequence
  source: /note="Description of Artificial Sequence: Synthetic polypeptide"
QVQLKQSGPGLVQPSQSLSITCTVSGFSLTNYGVHWVRQSPGKGLEWLGVIWSGGNTDYNTPFTSRLSINKDNSKSQVFFKMNSLQSNDTAIYYCARALTYYDYEFAYWGQGTLVTVSS

SEQ ID NO: 13869 - protein, 119 aa, Artificial Sequence
  source: /note="Description of Artificial Sequence: Synthetic polypeptide"
EVQLVESGGGLVQPGGSLRLSCAVSGFSLTNYGVHWVRQATGKGLEWLGVIWSGGNTDYNTPFTSRLTISKENAKNSLYLQMNSLRAGDTAVYYCARALTYYDYEFAYWGQGTMVTVSS

SEQ ID NO: 13870 - protein, 119 aa, Artificial Sequence
  source: /note="Description of Artificial Sequence: Synthetic polypeptide"
EVQLVQSGAEVKKPGATVKISCKVSGFSLTNYGVHWVRQATGQGLEWMGVIWSGGNTDYNTPFTSRFTISRDDSKNTAYLQMNSLKTEDTAVYYCARALTYYDEEFAYWGQGTLVTVSS

SEQ ID NO: 13871 - protein, 119 aa, Artificial Sequence
  source: /note="Description of Artificial Sequence: Synthetic polypeptide"
EVQLVQSGAEVKKPGATVKISCKVSGFSLTNYGVHWVRQATGQGLEWMGVIWSGGNTDYNTPFTSRFTISRDDSKNTAYLQMNSLKTEDTAVYYCARALTYYDEEFAYWGQGTLVTVSA

SEQ ID NO: 13872 - protein, 119 aa, Artificial Sequence
  source: /note="Description of Artificial Sequence: Synthetic polypeptide"
QVQLKQSGPGLVQPSQSLSITCTVSGFSLTNYGVHWVRQSPGKGLEWLGVIWSGGNTDYNTPFTSRLSINKDNSKSQVFFKMNSLQSNDTAIYYCARALTYYDDEFAYWGQGTLVTVSS

SEQ ID NO: 13873 - protein, 119 aa, Artificial Sequence
  source: /note="Description of Artificial Sequence: Synthetic polypeptide"
QVQLKQSGPGLVQPSQSLSITCTVSGFSLTNYGVHWVRQSPGKGLEWLGVIWSGGNTDYNTPFTSRLSINKDNSKSQVFFKMNSLQSNDTAIYYCARALTYYDEEFAYWGQGTLVTVSS

SEQ ID NO: 13874 - protein, 119 aa, Artificial Sequence
  source: /note="Description of Artificial Sequence: Synthetic polypeptide"
QVQLKQSGPGLVQPSQSLSITCTVSGFSLTNYGVHWVRQSPGKGLEWLGVIWSGGNTDYNTPFTSRLSINKDNSKSQVFFKMNSLQSNDTAIYYCARALTYYDEEFAYWGQGTLVTVSA

SEQ ID NO: 13875 - protein, 118 aa, Artificial Sequence
  source: /note="Description of Artificial Sequence: Synthetic polypeptide"
VQLKQSGPGLVQPSQSLSITCTVSGFSLTNYGVHWVRQSPGKGLEWLGVIWSGGNTDYNTPFTSRLSINKDNSKSQVFFKMNSLQSNDTAIYYCARALTYYDEEFAYWGPGTLVTVSS

SEQ ID NO: 13876 - protein, 119 aa, Artificial Sequence
  source: /note="Description of Artificial Sequence: Synthetic polypeptide"
QVQLKQSGPGLVQPSQSLSITCTVSGFSLTNYGVHWVRQSPGKGLEWLGVIWSGGNTDYNTPFTSRLSINKDNSKSQVFFKMNSLQSNDTAIYYCARALTYYDEEFAYWGPGTLVTVSA

SEQ ID NO: 13877 - protein, 119 aa, Artificial Sequence
  source: /note="Description of Artificial Sequence: Synthetic polypeptide"
QVQLKQSGPGLVQPSQSLSITCTVCGFSLTNYGVHWVRQSPGKGLEWLGVIWSGGNTDYNTPFTSRLSINKDNSKSQVFFKMNSLQSNDTAIYYCARALTYYDEEFAYWGQGTLVTVSS

SEQ ID NO: 13878 - protein, 119 aa, Artificial Sequence
  source: /note="Description of Artificial Sequence: Synthetic polypeptide"
QVQLKQSGPGLVQPSQSLSITCTVCGFSLTNYGVHWVRQSPGKGLEWLGVIWSGGNTDYNTPFTSRLSINKDNSKSQVFFKMNSLQSNDTAIYYCARALTYYDEEFAYWGQGTLVTVSA

SEQ ID NO: 13879 - protein, 119 aa, Artificial Sequence
  source: /note="Description of Artificial Sequence: Synthetic polypeptide"
QVQLKQSGPGLVQPSQSLSITCTVSGFSLTNYGVHWVRQSPGKGLEWLGVIWGGGNTDYNTPFTSRLSINKDNSKSQVFFKMNSLQSNDTAIYYCARALTYYDEEFAYWGQGTLVTVSS

SEQ ID NO: 13880 - protein, 119 aa, Artificial Sequence
  source: /note="Description of Artificial Sequence: Synthetic polypeptide"
QVQLKQSGPGLVQPSQSLSITCTVSGFSLTNYGVHWVRQSPGKGLEWLGVIWGGGNTDYNTPFTSRLSINKDNSKSQVFFKMNSLQSNDTAIYYCARALTYYDEEFAYWGQGTLVTVSA

SEQ ID NO: 13881 - protein, 119 aa, Artificial Sequence
  source: /note="Description of Artificial Sequence: Synthetic polypeptide"
QVQLKQSGPGLVQPSQSLSITCTVSGFSLTNYGVHWVRQSPGKGLEWLGVIWGGGNTDYNTPFTSRLSINKDNSKSQVFFKMNSLQSNDTAIYYCARALTYYDEEFAYWGPGTLVTVSS

SEQ ID NO: 13882 - protein, 119 aa, Artificial Sequence
  source: /note="Description of Artificial Sequence: Synthetic polypeptide"
QVQLKQSGPGLVQPSQSLSITCTVSGFSLTNYGVHWVRQSPGKGLEWLGVIWGGGNTDYNTPFTSRLSINKDNSKSQVFFKMNSLQSNDTAIYYCARALTYYDEEFAYWGPGTLVTVSA

SEQ ID NO: 13883 - protein, 119 aa, Artificial Sequence
  source: /note="Description of Artificial Sequence: Synthetic polypeptide"
QVQLKQSGPGLVQPSQSLSITCTVVGFSLTNYGVHWVRQSPGKGLEWLGVIWSGGNTDYNTPFTSRLSINKDNSKSQVFFKMNSLQSNDTAIYYCARALTYYDEEFAYWGQGTLVTVSS

SEQ ID NO: 13884 - protein, 119 aa, Artificial Sequence
  source: /note="Description of Artificial Sequence: Synthetic polypeptide"
QVQLKQSGPGLVQPSQSLSITCTVVGFSLTNYGVHWVRQSPGKGLEWLGVIWSGGNTDYNTPFTSRLSINKDNSKSQVFFKMNSLQSNDTAIYYCARALTYYDEEFAYWGQGTLVTVSA

SEQ ID NO: 13885 - protein, 119 aa, Artificial Sequence
  source: /note="Description of Artificial Sequence: Synthetic polypeptide"
QVQLKQSGPGLVQPSQSLSITCTVVGFSLTNYGVHWVRQSPGKGLEWLGVIWSGGNTDYNTPFTSRLSINKDNSKSQVFFKMNSLQSNDTAIYYCARALTYYDEEFAYWGPGTLVTVSS

SEQ ID NO: 13886 - protein, 119 aa, Artificial Sequence
  source: /note="Description of Artificial Sequence: Synthetic polypeptide"
QVQLKQSGPGLVQPSQSLSITCTVVGFSLTNYGVHWVRQSPGKGLEWLGVIWSGGNTDYNTPFTSRLSINKDNSKSQVFFKMNSLQSNDTAIYYCARALTYYDEEFAYWGPGTLVTVSA

SEQ ID NO: 13887 - protein, 119 aa, Artificial Sequence
  source: /note="Description of Artificial Sequence: Synthetic polypeptide"
QVQLKQSGPGLVQPSQSLSITCTVVGFSLTNYGVHWVRQSPGKGLEWLGVIWGGGNTDYNTPFTSRLSINKDNSKSQVFFKMNSLQSNDTAIYYCARALTYYDEEFAYWGQGTLVTVSS

SEQ ID NO: 13888 - protein, 119 aa, Artificial Sequence
  source: /note="Description of Artificial Sequence: Synthetic polypeptide"
QVQLKQSGPGLVQPSQSLSITCTVVGFSLTNYGVHWVRQSPGKGLEWLGVIWGGGNTDYNTPFTSRLSINKDNSKSQVFFKMNSLQSNDTAIYYCARALTYYDEEFAYWGQGTLVTVSA

SEQ ID NO: 13889 - protein, 119 aa, Artificial Sequence
  source: /note="Description of Artificial Sequence: Synthetic polypeptide"
QVQLKQSGPGLVQPSQSLSITCTVSGFSLFNYGVHWVRQSPGKGLEWLGVIWSGGNTDYNTPFTSRLSINKDNSKSQVFFKMNSLQSNDTAIYYCARALTYYDEEFAYWGQGTLVTVSS

SEQ ID NO: 13890 - protein, 119 aa, Artificial Sequence
  source: /note="Description of Artificial Sequence: Synthetic polypeptide"
QVQLKQSGPGLVQPSQSLSITCTVSGFSLFNYGVHWVRQSPGKGLEWLGVIWSGGNTDYNTPFTSRLSINKDNSKSQVFFKMNSLQSNDTAIYYCARALTYYDEEFAYWGQGTLVTVSA

SEQ ID NO: 13891 - protein, 119 aa, Artificial Sequence
  source: /note="Description of Artificial Sequence: Synthetic polypeptide"
QVQLKQSGPGLVQPSQSLSITCTVSGFSLFNYGVHWVRQSPGKGLEWLGVIWSGGNTDYNTPFTSRLSINKDNSKSQVFFKMNSLQSNDTAIYYCARALTYYDEEFAYWGPGTLVTVSS

SEQ ID NO: 13892 - protein, 119 aa, Artificial Sequence
  source: /note="Description of Artificial Sequence: Synthetic polypeptide"
QVQLKQSGPGLVQPSQSLSITCTVSGFSLFNYGVHWVRQSPGKGLEWLGVIWSGGNTDYNTPFTSRLSINKDNSKSQVFFKMNSLQSNDTAIYYCARALTYYDEEFAYWGPGTLVTVSA

SEQ ID NO: 13893 - protein, 119 aa, Artificial Sequence
  source: /note="Description of Artificial Sequence: Synthetic polypeptide"
QVQLKQSGPGLVQPSQSLSITCTVSGFSLFNYGVHWVRQSPGKGLEWLGVIWGGGNTDYNTPFTSRLSINKDNSKSQVFFKMNSLQSNDTAIYYCARALTYYDEEFAYWGQGTLVTVSS

SEQ ID NO: 13894 - protein, 119 aa, Artificial Sequence
  source: /note="Description of Artificial Sequence: Synthetic polypeptide"
QVQLKQSGPGLVQPSQSLSITCTVSGFSLFNYGVHWVRQSPGKGLEWLGVIWGGGNTDYNTPFTSRLSINKDNSKSQVFFKMNSLQSNDTAIYYCARALTYYDEEFAYWGQGTLVTVSA

SEQ ID NO: 13895 - protein, 119 aa, Artificial Sequence
  source: /note="Description of Artificial Sequence: Synthetic polypeptide"
QVQLKQSGPGLVQPSQSLSITCTVSGFSLTNYGVHWVRQSPGKGLEWLGVIWSGGNTDYNTPFTSRLSINKLNSKSQVFFKMNSLQSNDTAIYYCARALTYYDEEFAYWGQGTLVTVSS

SEQ ID NO: 13896 - protein, 119 aa, Artificial Sequence
  source: /note="Description of Artificial Sequence: Synthetic polypeptide"
QVQLKQSGPGLVQPSQSLSITCTVSGFSLTNYGVHWVRQSPGKGLEWLGVIWSGGNTDYNTPFTSRLSINKLNSKSQVFFKMNSLQSNDTAIYYCARALTYYDEEFAYWGQGTLVTVSA

SEQ ID NO: 13897 - protein, 119 aa, Artificial Sequence
  source: /note="Description of Artificial Sequence: Synthetic polypeptide"
QVQLKQSGPGLVQPSQSLSITCTVSGFSLTNYGVHWVRQSPGKGLEWLGVIWSGGNTDYNTPFTSRLSINKLNSKSQVFFKMNSLQSNDTAIYYCARALTYYDEEFAYWGPGTLVTVSS

SEQ ID NO: 13898 - protein, 119 aa, Artificial Sequence
  source: /note="Description of Artificial Sequence: Synthetic polypeptide"
QVQLKQSGPGLVQPSQSLSITCTVSGFSLTNYGVHWVRQSPGKGLEWLGVIWSGGNTDYNTPFTSRLSINKLNSKSQVFFKMNSLQSNDTAIYYCARALTYYDEEFAYWGPGTLVTVSA

SEQ ID NO: 13899 - protein, 119 aa, Artificial Sequence
  source: /note="Description of Artificial Sequence: Synthetic polypeptide"
QVQLKQSGPGLVQPSQSLSITCTVSGFSLTNYGVHWVRQSPGKGLEWLGVIWGGGNTDYNTPFTSRLSINKLNSKSQVFFKMNSLQSNDTAIYYCARALTYYDEEFAYWGQGTLVTVSS

SEQ ID NO: 13900 - protein, 119 aa, Artificial Sequence
  source: /note="Description of Artificial Sequence: Synthetic polypeptide"
QVQLKQSGPGLVQPSQSLSITCTVSGFSLTNYGVHWVRQSPGKGLEWLGVIWGGGNTDYNTPFTSRLSINKLNSKSQVFFKMNSLQSNDTAIYYCARALTYYDEEFAYWGQGTLVTVSA

SEQ ID NO: 13901 - protein, 119 aa, Artificial Sequence
  source: /note="Description of Artificial Sequence: Synthetic polypeptide"
QVQLQQSGPGLVKPSQTLSLTCAISGFSLTNYGVHWIRQPPGKGLEWIGVIWSGGNTDYNTPFTSRFTISRDDSKNTAYLQMNSLKTEDTAVYYCARALTYYDEEFAYWGPGTLVTVSS

SEQ ID NO: 13902 - protein, 119 aa, Artificial Sequence
  source: /note="Description of Artificial Sequence: Synthetic polypeptide"
QVQLQQSGPGLVKPSQTLSLTCAISGFSLTNYGVHWIRQPPGKGLEWIGVIWSGGNTDYNTPFTSRFTISRDDSKNTAYLQMNSLKTEDTAVYYCARALTYYDEEFAYWGPGTLVTVSA

SEQ ID NO: 13903 - protein, 119 aa, Artificial Sequence
  source: /note="Description of Artificial Sequence: Synthetic polypeptide"
EVQLVQSGAEVKKPGATVKISCKVSGFSLTNYGVHWVRQATGQGLEWMGVIWSGGNTDYNTPFTSRFTISRDDSKNTAYLQMNSLKTEDTAVYYCARALTYYDEEFAYWGPGTLVTVSS

SEQ ID NO: 13904 - protein, 119 aa, Artificial Sequence
  source: /note="Description of Artificial Sequence: Synthetic polypeptide"
EVQLVQSGAEVKKPGATVKISCKVSGFSLTNYGVHWVRQATGQGLEWMGVIWSGGNTDYNTPFTSRFTISRDDSKNTAYLQMNSLKTEDTAVYYCARALTYYDEEFAYWGPGTLVTVSA

SEQ ID NO: 13905 - protein, 119 aa, Artificial Sequence
  source: /note="Description of Artificial Sequence: Synthetic polypeptide"
EVQLVQSGAEVKKPGATVKISCKVSGFSLTNYGVHWIRQSPSRGLEWLGVIWSGGNTDYNTPFTSRLTISKDTSKNQVVLTMTNMDPVDTATYYCARALTYYDEEFAYWGPGTLVTVSS

SEQ ID NO: 13906 - protein, 119 aa, Artificial Sequence
  source: /note="Description of Artificial Sequence: Synthetic polypeptide"
EVQLVQSGAEVKKPGATVKISCKVSGFSLTNYGVHWIRQSPSRGLEWLGVIWSGGNTDYNTPFTSRLTISKDTSKNQVVLTMTNMDPVDTATYYCARALTYYDEEFAYWGPGTLVTVSA

SEQ ID NO: 13907 - protein, 119 aa, Artificial Sequence
  source: /note="Description of Artificial Sequence: Synthetic polypeptide"
EVQLVQSGAEVKKPGATVKISCKVSGFSLTNYGVHWIRQPPGKGLEWIGVIWSGGNTDYNTPFTSRFTISRDNAKNSLYLQMNSLRAEDTAVYYCARALTYYDEEFAYWGPGTLVTVSS

SEQ ID NO: 13908 - protein, 119 aa, Artificial Sequence
  source: /note="Description of Artificial Sequence: Synthetic polypeptide"
EVQLVQSGAEVKKPGATVKISCKVSGFSLTNYGVHWIRQPPGKGLEWIGVIWSGGNTDYNTPFTSRFTISRDNAKNSLYLQMNSLRAEDTAVYYCARALTYYDEEFAYWGPGTLVTVSA

SEQ ID NO: 13909 - protein, 119 aa, Artificial Sequence
  source: /note="Description of Artificial Sequence: Synthetic polypeptide"
EVQLVQSGAEVKKPGATVKISCKVSGFSLFNYGVHWIRQPPGKGLEWIGVIWSGGNTDYNTPFTSRFTISRDNSKNTLYLQMNSLRAEDTAVYYCARALTYYDEEFAYWGPGTLVTVSS

SEQ ID NO: 13910 - protein, 119 aa, Artificial Sequence
  source: /note="Description of Artificial Sequence: Synthetic polypeptide"
EVQLVQSGAEVKKPGATVKISCKVSGFSLFNYGVHWIRQPPGKGLEWIGVIWSGGNTDYNTPFTSRFTISRDNSKNTLYLQMNSLRAEDTAVYYCARALTYYDEEFAYWGPGTLVTVSA

SEQ ID NO: 13911 - protein, 119 aa, Artificial Sequence
  source: /note="Description of Artificial Sequence: Synthetic polypeptide"
EVQLVQSGAEVKKPGATVKISCKVSGFSLFNYGVHWVRQARGQRLEWIGVIWSGGNTDYNTPFTSRFTISRDDSKNTAYLQMNSLKTEDTAVYYCARALTYYDEEFAYWGPGTLVTVSS

SEQ ID NO: 13912 - protein, 119 aa, Artificial Sequence
  source: /note="Description of Artificial Sequence: Synthetic polypeptide"
EVQLVQSGAEVKKPGATVKISCKVSGFSLFNYGVHWVRQARGQRLEWIGVIWSGGNTDYNTPFTSRFTISRDDSKNTAYLQMNSLKTEDTAVYYCARALTYYDEEFAYWGPGTLVTVSA

SEQ ID NO: 13913 - protein, 119 aa, Artificial Sequence
  source: /note="Description of Artificial Sequence: Synthetic polypeptide"
EVQLVQSGAEVKKPGATVKISCKVSGFSLFNYGVHWVRQATGQGLEWMGVIWSGGNTDYNTPFTSRFTISRDDSKNTAYLQMNSLKTEDTAVYYCARALTYYDEEFAYWGPGTLVTVSS

SEQ ID NO: 13914 - protein, 119 aa, Artificial Sequence
  source: /note="Description of Artificial Sequence: Synthetic polypeptide"
EVQLVQSGAEVKKPGATVKISCKVSGFSLFNYGVHWVRQATGQGLEWMGVIWSGGNTDYNTPFTSRFTISRDDSKNTAYLQMNSLKTEDTAVYYCARALTYYDEEFAYWGPGTLVTVSA

SEQ ID NO: 13915 - protein, 119 aa, Artificial Sequence
  source: /note="Description of Artificial Sequence: Synthetic polypeptide"
QVQLQQSGPGLVKPSQTLSLTCAISGFSLFNYGVHWIRQSPSRGLEWLGVIWSGGNTDYNTPFTSRLTISKDTSKNQVVLTMTNMDPVDTATYYCARALTYYDEEFAYWGPGTLVTVSS

SEQ ID NO: 13916 - protein, 119 aa, Artificial Sequence
  source: /note="Description of Artificial Sequence: Synthetic polypeptide"
QVQLQQSGPGLVKPSQTLSLTCAISGFSLFNYGVHWIRQSPSRGLEWLGVIWSGGNTDYNTPFTSRLTISKDTSKNQVVLTMTNMDPVDTATYYCARALTYYDEEFAYWGPGTLVTVSA

SEQ ID NO: 13917 - protein, 119 aa, Artificial Sequence
  source: /note="Description of Artificial Sequence: Synthetic polypeptide"
EVQLVQSGAEVKKPGATVKISCKVSGFSLFNYGVHWIRQSPSRGLEWLGVIWSGGNTDYNTPFTSRFTISRDNSKNTLYLQMNSLRAEDTAVYYCARALTYYDEEFAYWGPGTLVTVSS

SEQ ID NO: 13918 - protein, 119 aa, Artificial Sequence
  source: /note="Description of Artificial Sequence: Synthetic polypeptide"
EVQLVQSGAEVKKPGATVKISCKVSGFSLFNYGVHWIRQSPSRGLEWLGVIWSGGNTDYNTPFTSRFTISRDNSKNTLYLQMNSLRAEDTAVYYCARALTYYDEEFAYWGPGTLVTVSA

SEQ ID NO: 13919 - protein, 119 aa, Artificial Sequence
  source: /note="Description of Artificial Sequence: Synthetic polypeptide"
EVQLVQSGAEVKKPGATVKISCKVSGFSLFNYGVHWIRQPPGKGLEWIGVIWSGGNTDYNTPFTSRFTISRDDSKNTAYLQMNSLKTEDTAVYYCARALTYYDEEFAYWGPGTLVTVSS

SEQ ID NO: 13920 - protein, 119 aa, Artificial Sequence
  source: /note="Description of Artificial Sequence: Synthetic polypeptide"
EVQLVQSGAEVKKPGATVKISCKVSGFSLFNYGVHWIRQPPGKGLEWIGVIWSGGNTDYNTPFTSRFTISRDDSKNTAYLQMNSLKTEDTAVYYCARALTYYDEEFAYWGPGTLVTVSA

SEQ ID NO: 13921 - protein, 119 aa, Artificial Sequence
  source: /note="Description of Artificial Sequence: Synthetic polypeptide"
QVQLKQSGPGLVQPSQSLSITCTVSGGSLTNYGVHWVRQSPGKGLEWLGVIWSGGNTDYNTPFTSRLSINKDNSKSQVFFKMNSLQSNDTAIYYCARALTYYDEEFAYWGQGTLVTVSS

SEQ ID NO: 13922 - protein, 119 aa, Artificial Sequence
  source: /note="Description of Artificial Sequence: Synthetic polypeptide"
QVQLKQSGPGLVQPSQSLSITCTVSGGSLTNYGVHWVRQSPGKGLEWLGVIWSGGNTDYNTPFTSRLSINKDNSKSQVFFKMNSLQSNDTAIYYCARALTYYDEEFAYWGQGTLVTVSA

SEQ ID NO: 13923 - protein, 119 aa, Artificial Sequence
  source: /note="Description of Artificial Sequence: Synthetic polypeptide"
QVQLKQSGPGLVQPSQSLSITCTVSGGSLTNYGVHWVRQSPGKGLEWLGVIWSGGNTDYNTPFTSRLSINKDNSKSQVFFKMNSLQSNDTAIYYCARALTYYDEEFAYWGPGTLVTVSS

SEQ ID NO: 13924 - protein, 119 aa, Artificial Sequence
  source: /note="Description of Artificial Sequence: Synthetic polypeptide"
QVQLKQSGPGLVQPSQSLSITCTVSGGSLTNYGVHWVRQSPGKGLEWLGVIWSGGNTDYNTPFTSRLSINKDNSKSQVFFKMNSLQSNDTAIYYCARALTYYDEEFAYWGPGTLVTVSA

SEQ ID NO: 13925 - protein, 119 aa, Artificial Sequence
  source: /note="Description of Artificial Sequence: Synthetic polypeptide"
QVQLKQSGPGLVQPSQSLSITCTVSGGSLTNYGVHWVRQSPGKGLEWLGVIWGGGNTDYNTPFTSRLSINKDNSKSQVFFKMNSLQSNDTAIYYCARALTYYDEEFAYWGQGTLVTVSS

SEQ ID NO: 13926 - protein, 119 aa, Artificial Sequence
  source: /note="Description of Artificial Sequence: Synthetic polypeptide"
QVQLKQSGPGLVQPSQSLSITCTVSGGSLTNYGVHWVRQSPGKGLEWLGVIWGGGNTDYNTPFTSRLSINKDNSKSQVFFKMNSLQSNDTAIYYCARALTYYDEEFAYWGQGTLVTVSA

SEQ ID NO: 13927 - protein, 116 aa, Artificial Sequence
  source: /note="Description of Artificial Sequence: Synthetic polypeptide"
EVQLQESGPGLVKPSQTLSLTCTVSGYSISRDFAWNWIRQPPGKGLEWMGYISYNGNTRYQPSLKSRITISRDTSKNQFFLKLNSVTAADTATYYCVTASRGFPYWGQGTLVTVSS

SEQ ID NO: 13928 - protein, 116 aa, Artificial Sequence
  source: /note="Description of Artificial Sequence: Synthetic polypeptide"
EVQLQESGPGLVKPSQTLSLTCTVSGYSISNDFAWNWIRQPPGKGLEWMGYISYKGNTRYQPSLKSRITISRDTSKNQFFLKLNSVTAADTATYYCVTASRGFPWWGQGTLVTVSS

SEQ ID NO: 13929 - protein, 116 aa, Artificial Sequence
  source: /note="Description of Artificial Sequence: Synthetic polypeptide"
EVQLQESGPGLVKPSQTLSLTCTVSGYSISSDFAWNWIRQPPGKGLEWMGYISYSGNTRYQPSLKSRITISRDTSKNQFFLKLNSVTAADTATYYCVTAGRGFPYWGQGTLVTVSS

SEQ ID NO: 13930 - protein, 116 aa, Artificial Sequence
  source: /note="Description of Artificial Sequence: Synthetic polypeptide"
EVQLQESGPGLVKPSQTLSLTCTVSGYSISRDFAWNWIRQPPGKGLEWMGYISYSGNTRYQPSLKSRITISRDTSKNQFFLKLNSVTAADTATYYCVTASRGFPYWGQGTLVTVSS

SEQ ID NO: 13931 - protein, 116 aa, Artificial Sequence
  source: /note="Description of Artificial Sequence: Synthetic polypeptide"
EVQLQESGPGLVKPSQTLSLTCTVSGYSISNDFAWNWIRQLPGKGLEWMGYISYKGNTRYQPSLKSRITISRDTSKNQFFLKLNSVTAADTATYYCVTASRGLPYWGQGTLVTVSS

SEQ ID NO: 13932 - protein, 116 aa, Artificial Sequence
  source: /note="Description of Artificial Sequence: Synthetic polypeptide"
EVQLQESGPGLVKPSQTLSLTCTVSGYSIGKDFAWNWIRQPPGKGLEWMGYISYNGNTRYQPSLKSRITISRDTSKNQFFLKLNSVTAADTATYYCVTASRGLPYWGQGTLVTVSS

SEQ ID NO: 13933 - protein, 116 aa, Artificial Sequence
  source: /note="Description of Artificial Sequence: Synthetic polypeptide"
EVQLQESGPGLVKPSQTLSLTCTVSGYSIGKDFAWNWIRQPPGKGLEWMGYISYSGNTRYQPSLKSRITISRDTSKNQFFLKLNSVTAADTATYYCVTASRGLPYWGQGTLVTVSS

SEQ ID NO: 13934 - protein, 116 aa, Artificial Sequence
  source: /note="Description of Artificial Sequence: Synthetic polypeptide"
EVQLQESGPGLVKPSQTLSLTCTVSGYSISRDFAWNWIRQPPGKGLEWMGYISYNGNTRYQPSLKSRITISRDTSKNQFFLKLNSVTAADTATYYCVTASRGFPWWGQGTLVTVSS

SEQ ID NO: 13935 - protein, 116 aa, Artificial Sequence
  source: /note="Description of Artificial Sequence: Synthetic polypeptide"
EVQLQESGPGLVKPSQTLSLTCTVSGYSIGRDFAWNWIRQPPGKGLEWMGYISYNGNTRYQPSLKSRITISRDTSKNQFFLKLNSVTAADTATYYCVTASRGFPYWGQGTLVTVSS

SEQ ID NO: 13936 - protein, 116 aa, Artificial Sequence
  source: /note="Description of Artificial Sequence: Synthetic polypeptide"
EVQLQESGPGLVKPSQTLSLTCTVSGYSIGRDFAWNWIRQPPGKGLEWMGYISYSGNTRYQPSLKSRITISRDTSKNQFFLKLNSVTAADTATYYCVTASRGFPYWGQGTLVTVSS

SEQ ID NO: 13937 - protein, 116 aa, Artificial Sequence
  source: /note="Description of Artificial Sequence: Synthetic polypeptide"
EVQLQESGPGLVKPSQTLSLTCTVSGYSIGKDFAWNWIRQPPGKGLEWMGYISYNGNTRYQPSLKSRITISRDTSKNQFFLKLNSVTAADTATYYCVTASRGFPYWGQGTLVTVSS

SEQ ID NO: 13938 - protein, 116 aa, Artificial Sequence
  source: /note="Description of Artificial Sequence: Synthetic polypeptide"
EVQLQESGPGLVKPSQTLSLTCTVSGYSISHDFAWNWIRQPPGKGLEWMGYISYNGNTRYQPSLKSRITISRDTSKNQFFLKLNSVTAADTATYYCVTASWGLPWWGQGTLVTVSS

SEQ ID NO: 13939 - protein, 116 aa, Artificial Sequence
  source: /note="Description of Artificial Sequence: Synthetic polypeptide"
EVQLQESGPGLVKPSQTLSLTCTVSGYSISHDFAWNWIRQPPGKGLEWMGYISYSGNTRYQPSLKSRITISRDTSKNQFFLKLNSVTAADTATYYCVTASWGLPWWGQGTLVTVSS

SEQ ID NO: 13940 - protein, 363 aa, Homo sapiens
GLNVALGLNTTAGLNGLNSERGLYALAGAGTTAMETLYSCCGGLYALASERVALLYSILESERCYSLYSALATHRGLYTYRTHRPHESERSERTYRTRPILEGAGTRPVALLYSGLNARGCCGGLYHISGLYTTAGAGTRPILEGLYGAGILETTACCGGLYSERLYSLYSTHRASNTYRASNGAGLYSPHELYSGLYLYSALATHRPHETHRALAASPTHRSERSERASNTHRALATYRMETGLNPHESERSERTTATHRSERGAGASPSERALAVALTYRTYRCYSALAARGTYRTYRTYRARGASNASPASPTYRGLYMETASPTYRTRPGLYGLNGLYTHRSERVALTHRVALSERSER

SEQ ID NO: 13941 - protein, 117 aa, Mus musculus
DVQLQESGPGLVKPSQSLSLTCTVTGYSITSDYAWNWIRLFPGNKLEWMGFINYSGNTSYNPSLKSRISITRDTSKNQFFLKLNSLTTDDTATYYCARGGLSRFPYWGQGTLVTVSA

SEQ ID NO: 13942 - protein, 119 aa, Artificial Sequence; identical to SEQ ID NO: 8236
  source: /note="Description of Artificial Sequence: Synthetic polypeptide"

SEQ ID NO: 13943 - protein, 119 aa, Artificial Sequence; identical to SEQ ID NO: 8237
  source: /note="Description of Artificial Sequence: Synthetic polypeptide"

SEQ ID NO: 13944 - protein, 119 aa, Artificial Sequence
  source: /note="Description of Artificial Sequence: Synthetic polypeptide"
QVTLKESGPVLVKPTETLTLTCTVSGFSLSNWGVHWIRQPPGKALEWLAVIWSGGNTDYNTPFDSRLTISKDTSKSQVVLTMTNMDPVDTATYYCARALDYYDYDFAYWGQGTMVTVSS

SEQ ID NO: 13945 - protein, 119 aa, Artificial Sequence
  source: /note="Description of Artificial Sequence: Synthetic polypeptide"
QVTLKESGPVLVKPTETLTLTCTVSGFSLSNWDVHWIRQPPGKALEWLAVIWSGGNTDYNTPFASRLTISKDTSKSQVVLTMTNMDPVDTATYYCARALDYYDYNFAYWGQGTMVTVSS

SEQ ID NO: 13946 - protein, 119 aa, Artificial Sequence
  source: /note="Description of Artificial Sequence: Synthetic polypeptide"
QVTLKESGPVLVKPTETLTLTCTVSGFSLSNWDVHWIRQPPGKALEWLAVIWSGGATDYNTPFNSRLTISKDTSKSQVVLTMTNMDPVDTATYYCARALDYYDYNFAYWGQGTMVTVSS

SEQ ID NO: 13947 - protein, 119 aa, Artificial Sequence
  source: /note="Description of Artificial Sequence: Synthetic polypeptide"
QVTLKESGPVLVKPTETLTLTCTVSGFSLSNWDVHWIRQPPGKALEWLAVIWSGGNTDYNTPFTSRLTISKDTSKSQVVLTMTNMDPVDTATYYCARALDYYDYEFAYWGQGTMVTVSS

SEQ ID NO: 13948 - protein, 119 aa, Artificial Sequence
  source: /note="Description of Artificial Sequence: Synthetic polypeptide"
QVTLKESGPVLVKPTETLTLTCTVSGFSLSNWDVHWIRQPPGKALEWLAVIWSGGNTDYNTPFTSRLTISKDTSKSQVVLTMTNMDPVDTATYYCARALDYYDYDFAYWGQGTMVTVSS

SEQ ID NO: 13949 - protein, 119 aa, Artificial Sequence
  source: /note="Description of Artificial Sequence: Synthetic polypeptide"
QVQLQESGPGLVKPSETLSLTCTVSGFSLTNWDVHWIRQPPGKGLEWIGNIWSGGNTDYNTPFTSRVTISVDTSKNQFSLKLSSVTAADTAVYYCARALDYYDYDYAYWGQGTMVTVSS

SEQ ID NO: 13950 - protein, 119 aa, Artificial Sequence
  source: /note="Description of Artificial Sequence: Synthetic polypeptide"
QVQLQESGPGLVKPSETLSLTCTVSGFSLTNYGVHWIRQPPGKGLEWIGNIWSGGNTDYNTPFTSRVTISVDTSKNQFSLKLSSVTAADTAVYYCARALDYYDYDYAYWGQGTMVTVSS

SEQ ID NO: 13951 - protein, 119 aa, Artificial Sequence
  source: /note="Description of Artificial Sequence: Synthetic polypeptide"
QVQLQESGPGLVKPSETLSLTCTVSGFSLTNWDVHWIRQPPGKGLEWIGVIWSGGNTDYNTPFTSRVTISVDTSKNQFSLKLSSVTAADTAVYYCARALDYYDYDFAYWGQGTMVTVSS

SEQ ID NO: 13952 - protein, 120 aa, Artificial Sequence
  source: /note="Description of Artificial Sequence: Synthetic polypeptide"
QVQLVQSGAEVKKPGSSVKVSCKASGGTFTDYKIHWVRQAPGQGLEWMGYFNPNSGYSTYAQKFQGRVTITADKSTSTAYMELSSLRSEDTAVYYCARLSPGGYYVMDAWGQGTTVTVSS

SEQ ID NO: 13953 - protein, 120 aa, Artificial Sequence
  source: /note="Description of Artificial Sequence: Synthetic polypeptide"
QVQLVQSGAEVKKPGSSVKVSCKASGFSFTDYKIHWVRQAPGQGLEWMGYFNPNSGYSTYAQKFQGRVTITADKSTSTAYMELSSLRSEDTAVYYCARLSPGGYYVMDAWGQGTTVTVSS

SEQ ID NO: 13954 - protein, 120 aa, Artificial Sequence
  source: /note="Description of Artificial Sequence: Synthetic polypeptide"
QVQLVQSGAEVKKPGSSVKVSCKASGFTITDYKIHWVRQAPGQGLEWMGYFNPNSGYSTYAQKFQGRVTITADKSTSTAYMELSSLRSEDTAVYYCARLSPGGYYVMDAWGQGTTVTVSS

SEQ ID NO: 13955 - protein, 120 aa, Artificial Sequence
  source: /note="Description of Artificial Sequence: Synthetic polypeptide"
QVQLVQSGAEVKKPGSSVKVSCKASGFTFTEYKIHWVRQAPGQGLEWMGYFNPNSGYSTYAQKFQGRVTITADKSTSTAYMELSSLRSEDTAVYYCARLSPGGYYVMDAWGQGTTVTVSS

SEQ ID NO: 13956 - protein, 120 aa, Artificial Sequence
  source: /note="Description of Artificial Sequence: Synthetic polypeptide"
QVQLVQSGAEVKKPGSSVKVSCKASGFTFTDYKIHWVRQAPGQGLEWMGYFTPNSGYSTYAQKFQGRVTITADKSTSTAYMELSSLRSEDTAVYYCARLSPGGYYVMDAWGQGTTVTVSS

SEQ ID NO: 13957 - protein, 120 aa, Artificial Sequence
  source: /note="Description of Artificial Sequence: Synthetic polypeptide"
QVQLVQSGAEVKKPGSSVKVSCKASGFTFTDYKIHWVRQAPGQGLEWMGYFNANSGYSTYAQKFQGRVTITADKSTSTAYMELSSLRSEDTAVYYCARLSPGGYYVMDAWGQGTTVTVSS

SEQ ID NO: 13958 - protein, 120 aa, Artificial Sequence
  source: /note="Description of Artificial Sequence: Synthetic polypeptide"
QVQLVQSGAEVKKPGSSVKVSCKASGFTFTDYKIHWVRQAPGQGLEWMGYFNPISGYSTYAQKFQGRVTITADKSTSTAYMELSSLRSEDTAVYYCARLSPGGYYVMDAWGQGTTVTVSS

SEQ ID NO: 13959 - protein, 120 aa, Artificial Sequence
  source: /note="Description of Artificial Sequence: Synthetic polypeptide"
QVQLVQSGAEVKKPGSSVKVSCKASGFTFTDYKIHWVRQAPGQGLEWMGYFNPNSGTSTYAQKFQGRVTITADKSTSTAYMELSSLRSEDTAVYYCARLSPGGYYVMDAWGQGTTVTVSS

SEQ ID NO: 13960 - protein, 120 aa, Artificial Sequence
  source: /note="Description of Artificial Sequence: Synthetic polypeptide"
QVQLVQSGAEVKKPGSSVKVSCKASGFTFTDYKIHWVRQAPGQGLEWMGYFNPNSGYATYAQKFQGRVTITADKSTSTAYMELSSLRSEDTAVYYCARLSPGGYYVMDAWGQGTTVTVSS

SEQ ID NO: 13961 - protein, 120 aa, Artificial Sequence
  source: /note="Description of Artificial Sequence: Synthetic polypeptide"
QVQLVQSGAEVKKPGSSVKVSCKASGFTFTDYKIHWVRQAPGQGLEWMGYFNPNSGYSTYAQKFQGRVTITADKSTSTAYMELSSLRSEDTAVYYCARLSPGGYYGMDAWGQGTTVTVSS

SEQ ID NO: 13962 - protein, 124 aa, Homo sapiens; identical to SEQ ID NO: 6765

SEQ ID NO: 13963 - protein, 120 aa, Homo sapiens
RAQVQLQQPGAELVEPGGSVKLSCKASGYTFTSHWMHWVKQRPGQGLEWIGEINPSSGRNNYNEKFKSKATLTVDKSSSTAYMQFSSLTSEDSAVYYCVRYYGYDEAMDYWGQGTSVTVS

SEQ ID NO: 13964 - protein, 120 aa, Homo sapiens
RAEVQLVESGGGLVKPGGSLKLSCAASGFTFSSYALSWVRQTPERRLEWVASISGVGSTYFPDSVKGRFTMSRDNARNILYLQMSSLRSEDTAMYYCARGSDGYFYAMDYWGQGTSVTVS

SEQ ID NO: 13965 - protein, 120 aa, Homo sapiens
RAQVQLQQPGAELVKPGASVKLSCKASGYTFTSHWMHWVQQRPGQGLEWIGEIHPSNGRTNYNEKFKNKATLTVDKSPSTAYMQLSSLTSEDSAVYYCARYYGYDDAMDYWGQGTSVTVS

SEQ ID NO: 13966 - protein, 122 aa, Homo sapiens
RAEVQLVESGGGLVKPGGSLKLSCAASGFAFSSYDMSWVRQTPEKRLEWVAYIGSGDDNTHYPDSVKGRFTISRHNAKNTLYLQMSSLKSEDTAMYYCARQKYGNYGDTMDYWGQGTSVTVS

SEQ ID NO: 13967 - protein, 122 aa, Homo sapiens
RAQVQLKESGPGLVAPSQSLSITCSVSGFSLTIYGVHWVRQPPGKGLEWLGVMWAGGNTDYNSALMSRLNISKDNSKSQVFLKVNSLQTDDTAMYYCTRDPDGYYVGWFFDVWGAGTTVTVS

SEQ ID NO: 13968 - protein, 122 aa, Homo sapiens
RAEVQLVESGGGLVKPGGSLKLSCAASGFAYSTYDMSWVRQTPEKRLEWVAYISSGGDAAYYPDTVKGRFTISRDNAKNTLYLQMSSLKSEDTAMYYCARSRYGNYGDAMDYWGQGTSVTVS

SEQ ID NO: 13969 - protein, 125 aa, Homo sapiens
RAEVQLQQSGPELVKPGASVKIPCKTSGYTFTDYNMAWVKQSHGKSLEWIGDIIPNNGGAIYNQKFKGKATLTVDKSSSTASMELRSLTSEDTAVYFCARKNIYYRYDGAGALDYWGQGTSVTVS

SEQ ID NO: 13970 - protein, 117 aa, Homo sapiens
RAQVQLKESGPGLVAPSQSLSITCTVSGFSLTTYGVHWVRQPPGKGLEWLGVIWAGGSTNYNSALMSRLSIKKDNSKSQVFLKMNSLQTDDTAMYYCARAYGYNFDYWGQGTTLTVS

SEQ ID NO: 13971 - protein, 124 aa, Homo sapiens
RAEVQLVESGGGLVKPGGSLKLSCAVSGFTFSSYVMSWVRQTPEKRLEWVATITSGGRNIYYLDSVKGRFTISRDNAKNTLYLQMSSLRSEDTAMYYCARHEDYRYDGYYAMDYWGQGTSVTVS

SEQ ID NO: 13972 - protein, 118 aa, Homo sapiens
RAEVQLVESGGGLVKPGESLKLSCAASGFAFSYSDMSWVRQTPEKRLEWVAYMSSAGDVTFYSDTVKGRFTISRDNAKNTLYLQVSSLKSEDTAIYYCVRHRDVAMDYWGQGTSVTVS

SEQ ID NO: 13973 - protein, 119 aa, Homo sapiens
RAQVQLQQPGAELVKPGASVKLSCKASGYTFTSDWMHWMKQRPGQGLEWIGEINPSNGRSSYNEKFKSKATLTVDKSSSTAYMQLSSLTSEDSAVYYCARIGGIYVETYWGQGTLVTVS

SEQ ID NO: 13974 - protein, 125 aa, Homo sapiens
RAEVQLQQSGAELVRPGSSVKISCKASGYAFSSYWMNWVRQRPGQGLEWIGQIYPGDGDTNYNGKFKGRATLTANKSSSTAYMQLSSLTSEDSAVYFCARRASSLYDVYPYYFDYWGQGTTLTVS

SEQ ID NO: 13975 - protein, 121 aa, Homo sapiens
RAQVQLQQPGAELVKPGASMKLSCKASGYTFTNYWMHWVKQRPGQGLEWIGEINPSNGRTNYNEKFKSKATLTVDKSSSTAYMQLSSLTSEDSGVYYCAKGGNYYDYDWDYWGQGTTLTVS

SEQ ID NO: 13976 - protein, 117 aa, Homo sapiens
RAQVQLKESGPGLVAPSQSLSITCTVSGFSLTIYGVHWVRQPPGKGLEWLGVIWAGGNTNYNSALMSRLSISKDNSKSQVFLKMNSLQTDDTAMYFCARGYGYNLDYWGQGTTLTVS

SEQ ID NO: 13977 - protein, 119 aa, Homo sapiens
RAQVQLKESGPGLVAPSQSLSITCTVSGFSLTGHGVNWVRQPPGKGLEWLGMIWGDGSTDYNSTLKSRLSISKDNSKSQVFLKMNSLQTDDTARYYCARGYGYLYYFDYWGQGTTLTVS

SEQ ID NO: 13978 - protein, 249 aa, Artificial Sequence
  source: /note="Description of Artificial Sequence: Synthetic polypeptide"
RAEVQLQQPGSELVRPGASVKLSCKASGYTFTSYWMHWVKQRPGQGLEWIGNIYPGSRSTNYDEKFKSKATLTVDTSSSTAYMQLSSLTSEDSAVYYCTRNGDYYVSSGDAMDYWGQGTSVTVSSASTKGPQVQLQQPGAELVEPGGSVKLSCKASGYTFTSHWMHWVKQRPGQGLEWIGEINPSSGRNNYNEKFKSKATLTVDKSSSTAYMQFSSLTSEDSAVYYCVRYYGYDEAMDYWGQGTSVTVS

SEQ ID NO: 13979 - protein, 249 aa, Artificial Sequence
  source: /note="Description of Artificial Sequence: Synthetic polypeptide"
RAQVQLQQPGAELVEPGGSVKLSCKASGYTFTSHWMHWVKQRPGQGLEWIGEINPSSGRNNYNEKFKSKATLTVDKSSSTAYMQFSSLTSEDSAVYYCVRYYGYDEAMDYWGQGTSVTVSSASTKGPEVQLQQPGSELVRPGASVKLSCKASGYTFTSYWMHWVKQRPGQGLEWIGNIYPGSRSTNYDEKFKSKATLTVDTSSSTAYMQLSSLTSEDSAVYYCTRNGDYYVSSGDAMDYWGQGTSVTVS

SEQ ID NO: 13980 - protein, 122 aa, Artificial Sequence
  source: /note="Description of Artificial Sequence: Synthetic polypeptide"
QVQLVQSGAEVKKPGASVKVSCKASGYTFTSYWMHWVRQAPGQGLEWMGIIYPGSRSTSYAQKFQGRVTMTRDTSTSTVYMELSSLRSEDTAVYYCTRNGDYYVSSGDAMDYWGQGTLVTVS

SEQ ID NO: 13981 - protein, 118 aa, Artificial Sequence
  source: /note="Description of Artificial Sequence: Synthetic polypeptide"
QVQLVQSGAEVKKPGASVKVSCKASGYTFTSHWMHWVRQAPGQGLEWMGWINPSSGRNNYAQKFQGRVTMTRDTSISTAYMELSRLTSDDTAVYYCARYYGYDEAMDYWGQGTSVTVS

SEQ ID NO: 13982 - protein, 621 aa, Homo sapiens
LEEKKVCQGTSNKLTQLGTFEDHFLSLQRMFNNCEVVLGNLEITYVQRNYDLSFLKTIQEVAGYVLIALNTVERIPLENLQIIRGNMYYENSYALAVLSNYDANKTGLKELPMRNLQEILHGAVRFSNNPALCNVESIQWRDIVSSDFLSNMSMDFQNHLGSCQKCDPSCPNGSCWGAGEENCQKLTKIICAQQCSGRCRGKSPSDCCHNQCAAGCTGPRESDCLVCRKFRDEATCKDTCPPLMLYNPTTYQMDVNPEGKYSFGATCVKKCPRNYVVTDHGSCVRACGADSYEMEEDGVRKCKKCEGPCRKVCNGIGIGEFKDSLSINATNIKHFKNCTSISGDLHILPVAFRGDSFTHTPPLDPQELDILKTVKEITGFLLIQAWPENRTDLHAFENLEIIRGRTKQHGQFSLAVVSLNITSLGLRSLKEISDGDVIISGNKNLCYANTINWKKLFGTSGQKTKIISNRGENSCKATGQVCHALCSPEGCWGPEPKDCVSCRNVSRGRECVDKCNLLEGEPREFVENSECIQCHPECLPQAMNITCTGRGPDNCIQCAHYIDGPHCVKTCPAGVMGENNTLVWKYADAGHVCHLCHPNCTYGCTGPGLEGCPTNGPKIPS

SEQ ID NO: 13983 - protein, 125 aa, Homo sapiens [sequence omitted]

SEQ ID NO: 13984 - protein, 122 aa, Artificial Sequence
  source: /note="Description of Artificial Sequence: Synthetic polypeptide"
EVQLVESGGGVVQPGGSLRLSCAASGFTFSDYDMSWIRQAPGKGLEWVSGILGGSERSYYRDSVKGRFTISRDNSRKTLYLQMNSLRAEDTAVYYCARHGSPGYTLYAWDYWGQGTTVTVSS

SEQ ID NO: 13985 - protein, 119 aa, Artificial Sequence
  source: /note="Description of Artificial Sequence: Synthetic polypeptide"
  MOD_RES (6)..(6): Any amino acid
  MOD_RES (27)..(27): Any amino acid
  MOD_RES (40)..(40): Any amino acid
  MOD_RES (70)..(71): Any amino acid
  MOD_RES (73)..(73): Any amino acid
  MOD_RES (76)..(76): Any amino acid
  MOD_RES (78)..(78): Any amino acid
  MOD_RES (80)..(80): Any amino acid
  MOD_RES (82)..(82): Any amino acid
  MOD_RES (88)..(88): Any amino acid
QVQLQXSGPGLVKPSETLSLTCTVSGXSISNYGVHWIRQXPGKGLEWIGVIWSGGNTDYNTPFTSRVTIXXDXSKXQXSXKXSSVTAXDTAVYYCARALTYYDYEFAYWGQGTLVTVSA

SEQ ID NO: 13986 - protein, 119 aa, Artificial Sequence
  source: /note="Description of Artificial Sequence: Synthetic polypeptide"
QVQLQESGPGLVKPSETLSLTCTVSGGSISNYGVHWIRQPPGKGLEWIGVIWSGGNTDYNTPFTSRVTISVDTSKNQFSLKLSSVTAADTAVYYCARALTYYDYEFAYWGQGTLVTVSA

SEQ ID NO: 13987 - protein, 119 aa, Artificial Sequence
  source: /note="Description of Artificial Sequence: Synthetic polypeptide"
QVQLQESGPGLVKPSETLSLTCTVSGFSISNYGVHWIRQPPGKGLEWIGVIWSGGNTDYNTPFTSRVTISKDTSKNQVSLKLSSVTAADTAVYYCARALTYYDYEFAYWGQGTLVTVSA

SEQ ID NO: 13988 - protein, 119 aa, Artificial Sequence
  source: /note="Description of Artificial Sequence: Synthetic polypeptide"
QVQLQESGPGLVKPSETLSLTCTVSGGSISNYGVHWIRQPPGKGLEWIGVIWSGGNTDYNTPFTSRVTINKDNSKSQVSFKMSSVTAADTAVYYCARALTYYDYEFAYWGQGTLVTVSA

SEQ ID NO: 13989 - protein, 119 aa, Artificial Sequence
  source: /note="Description of Artificial Sequence: Synthetic polypeptide"
QVQLQQSGPGLVKPSETLSLTCTVSGFSISNYGVHWIRQSPGKGLEWIGVIWSGGNTDYNTPFTSRVTINKDNSKSQFSLKLSSVTAADTAVYYCARALTYYDYEFAYWGQGTLVTVSA

SEQ ID NO: 13990 - protein, 119 aa, Artificial Sequence
  source: /note="Description of Artificial Sequence: Synthetic polypeptide"
QVQLQESGPGLVKPSETLSLTCTVSGFSISNYGVHWIRQSPGKGLEWIGVIWSGGNTDYNTPFTSRVTISVDTSKNQFSLKLSSVTAADTAVYYCARALTYYDYEFAYWGQGTLVTVSA

SEQ ID NO: 13991 - protein, 119 aa, Artificial Sequence
  source: /note="Description of Artificial Sequence: Synthetic polypeptide"
QVQLQQSGPGLVKPSETLSLTCTVSGFSISNYGVHWIRQPPGKGLEWIGVIWSGGNTDYNTPFTSRVTINKDNSKSQVSFKMSSVTAADTAVYYCARALTYYDYEFAYWGQGTLVTVSA

SEQ ID NO: 13992 - protein, 119 aa, Artificial Sequence
  source: /note="Description of Artificial Sequence: Synthetic polypeptide"
QVQLQQSGPGLVKPSETLSLTCTVSGFSISNYGVHWIRQSPGKGLEWIGVIWSGGNTDYNTPFTSRVTINKDNSKSQVSFKMSSVTAADTAVYYCARALTYYDYEFAYWGQGTLVTVSA

SEQ ID NO: 13993 - protein, 95 aa, Homo sapiens
QVQLQESGPGLVKPSETLSLTCTVSGGSISSYWSWIRQPPGKGLEWIGYYYSGSTNYNPSLKSRVTISVDTSKNQFSLKLSSVTAADTAVYYCAR

SEQ ID NO: 13994 - protein, 119 aa, Artificial Sequence
  source: /note="Description of Artificial Sequence: Synthetic polypeptide"
QVQLQQSGAELARPGASVKLSCKASGYTFTSYWMQWVKQRPGQGLECIGTIYPGDGDTTYTQKFKGKATLTADKSSSTAYMQLSSLASEDSAVYYCARYDAPGYAMDYWGQGTSVTVSS

SEQ ID NO: 13995 - protein, 119 aa, Artificial Sequence
  source: /note="Description of Artificial Sequence: Synthetic polypeptide"
QVQLQQSGTELARPGASVKLSCKASGYTFTSYWMQWVKQRPGQGLECIGTIYPGDGDTRYIQKFKGKATLTADKSSSTAYMQLSSLASEDSAVYYCARYDAPGYAMDYWGQGTSVTVSS

SEQ ID NO: 13996 - protein, 119 aa, Artificial Sequence
  source: /note="Description of Artificial Sequence: Synthetic polypeptide"
QVQLVQSGAEVAKPGASVKLSCKASGYTFTSYWMQWVKQRPGQGLECIGTIYPGDGDTTYTQKFQGKATLTADKSSSTAYMQLSSLRSEDSAVYYCARYDAPGYAMDYWGQGTLVTVSS

SEQ ID NO: 13997 - protein, 119 aa, Artificial Sequence
  source: /note="Description of Artificial Sequence: Synthetic polypeptide"
QVQLVQSGAEVKKPGASVKVSCKASGYTFTSYWMQWVRQAPGQGLEWMGTIYPGDGDTTYTQKFKGRVTMTRDTSTSTVYMELSSLRSEDTAVYYCARYDAPGYAMDYWGQGTLVTVSS

SEQ ID NO: 13998 - protein, 119 aa, Artificial Sequence
  source: /note="Description of Artificial Sequence: Synthetic polypeptide"
QVQLVQSGAEVAKPGASVKLSCKASGYTFTSYWMQWVKQRPGQGLECIGTIYPGDGDTRYIQKFQGKATLTADKSSSTAYMQLSSLRSEDSAVYYCARYDAPGYAMDYWGQGTLVTVSS

SEQ ID NO: 13999 - protein, 119 aa, Artificial Sequence
  source: /note="Description of Artificial Sequence: Synthetic polypeptide"
QVQLQQSGAELARPGASVKLSCKASGYTFTSYWMQWVKQRPGQGLECIGALYPGDGDARYTQKFKGKATLTADRSSSTAYMQLSSLASEDSAVYYCARYDAPGYAMDYWGQGTSVTVAS

SEQ ID NO: 14000 - protein, 119 aa, Artificial Sequence
  source: /note="Description of Artificial Sequence: Synthetic polypeptide"
QVQLVQSGAEVAKPGASVKLSCKASGYTFTSYWMQWVKQRPGQGLECIGALYPGDGDARYTQKFQGKATLTADTSSSTAYMQLSSLRSEDSAVYYCARYDAPGYAMDYWGQGTLVTVSS

SEQ ID NO: 14001 - protein, 119 aa, Artificial Sequence
  source: /note="Description of Artificial Sequence: Synthetic polypeptide"
QVQLVQSGAEVAKPGASVKLSCKASGYTFTSYWMQWVKQRPGQGLEWIGALYPGDGDARYTQKFQGKATLTADTSSSTAYMQLSSLRSEDSAVYYCARYDAPGYAMDYWGQGTLVTVSS

SEQ ID NO: 14002 - protein, 119 aa, Artificial Sequence
  source: /note="Description of Artificial Sequence: Synthetic polypeptide"
QVQLVQSGAEVAKPGASVKLSCKASGYTFTSYWMQWVKQRPGQGLEWIGTIYPGDGDTTYTQKFQGKATLTADKSSSTAYMQLSSLRSEDSAVYYCARYDAPGYAMDYWGQGTLVTVSS

SEQ ID NO: 14003 - DNA, 443 bp, Artificial Sequence
  source: /note="Description of Artificial Sequence: Synthetic polynucleotide"
aagcttgccaccatggggtggagttgtatcatcctcttccttgtcgctaccgccactggagtgcattcccaggtgcagttggtgcaatctggcgccgaggtggccaagcccggtgcctccgtaaaattgagttgtaaagcctctggctatacatttacatcttattggatgcagtgggtcaagcagcgccctggtcaaggcctggagtggatcggagctctgtatcctggcgacggggacgcccgttacactcagaaatttcagggcaaagctaccctcaccgcagatacatccagcagcactgcttatatgcaacttagtagcctccgcagcgaggatagtgccgtgtactactgtgccagatatgacgccccaggttatgctatggactactggggtcaaggaaccctggtgacagtgtcaagcgctagcacaaagggccc

SEQ ID NO: 14004 - DNA, 443 bp, Artificial Sequence
  source: /note="Description of Artificial Sequence: Synthetic polynucleotide"
aagcttgccaccatgggctggtcatgtatcattctgttcctggtggccaccgcaaccggtgtccattcccaggtgcagctcgtgcagagcggggctgaagtggccaagccaggtgcttctgtcaaattgtcttgtaaggccagtgggtacaccttcacaagctactggatgcagtgggttaagcaacgcccaggccagggactggagtggatcggcaccatttatccaggggatggagataccacttatacacaaaagtttcaaggcaaagccaccctgaccgccgacaaatccagcagcacagcatacatgcagctttctagcctcaggtctgaagactccgccgtgtactattgtgcccgctacgacgcccccggctatgcaatggattactggggccagggtactctggtcacagtgtcctccgcctctacaaagggccc

SEQ ID NO: 14005 - protein, 117 aa, Artificial Sequence
  source: /note="Description of Artificial Sequence: Synthetic polypeptide"
EVKLVESGGGLVQPGGSLRLSCATSGFTFTDYYMSWVRQPPGKGLEWLGFIRNKANGYTTEYSASVKGRFTISRDNSKSTLYLQMNSLRAEDTATYYCARDNWFAYWGQGTLVTVSS

SEQ ID NO: 14006 - protein, 118 aa, Artificial Sequence
  source: /note="Description of Artificial Sequence: Synthetic polypeptide"
QVQLVQSGAEVKKPGASVKVSCKASGYTFTSYDINWVRQATGQGLEWMGWINPNSDYTGYVQKFQGRVTMTRDTSISTAYMELSSLRSEDTAVYYCATSRWSEHFHHWGQGTLVTVSS

SEQ ID NO: 14007 - protein, 124 aa, Artificial Sequence
  source: /note="Description of Artificial Sequence: Synthetic polypeptide"
QVQLVESGGGVVQPGRSRRLSCVGSGFIFSSYGMHWVRQAPGKGLEWVALIFYDGSNEYYVDSVKGRFTISRDNSKNTLYLQMNSLRAEDTAVYYCAREGYSQRYKYYFGMDVWGQGTTVTVSS

SEQ ID NO: 14008 - protein, 122 aa, Artificial Sequence
  source: /note="Description of Artificial Sequence: Synthetic polypeptide"
EVQLVESGGGLVQPGGSLRLSCAASGFPFSSYDMHWVRQATGKGLEWVSAIGTAGATYYPGSVKGRFTISRENAKNSLYLQMNSLRAGDTAVYYCARGDYVWGTYRPLFDYWGQGTLVTVSS

SEQ ID NO: 14009 - protein, 124 aa, Artificial Sequence
  source: /note="Description of Artificial Sequence: Synthetic polypeptide"
QVQLVESGGGVVQPGRSLRLSCAASGFTFSRYGIHWVRQAPGKGLEWVAVIWHDGSNKYYADSVKGRFTISRDNSKNTLYLQMTSLRAEDTAVYYCARDGLEIRDHYYYGMDVWGQGTTVTVSS

SEQ ID NO: 14010 - protein, 126 aa, Artificial Sequence
  source: /note="Description of Artificial Sequence: Synthetic polypeptide"
EVQLVESGGGLVQPGRSLRLSCAASGFTFDDYAMHWVRQVPGKGLEWVSGISWNSGSIGYADSVKGRFTISRDNAKNSLYLQMNSLRAEDTALYYCAKDIHDYGKDYYYYYGMDVWGQGTTVTVSS

SEQ ID NO: 14011 - protein, 118 aa, Artificial Sequence
  source: /note="Description of Artificial Sequence: Synthetic polypeptide"
QVQLVESGGGVVQPGRSLRLSCAASGFTFSAYAMHWVRQAPGKGLEWVAVIWYDGSNKNYADSVKGRFTVSRDNSKNTLYLEMNSLRAEDTAVYYCARDLMVGVTNYWGQGTLVTVST

SEQ ID NO: 14012 - protein, 119 aa, Artificial Sequence
  source: /note="Description of Artificial Sequence: Synthetic polypeptide"
QVQLQQWGAGLLKPAETLSLTCAVYGGSFSGNYWSWIRQSPGKGLEWIGEINHRGNSNYNPSLKSRGTISLDTSKNQLSLKLRSVTAADTAMYYCVRGGGDYYFGMDVWGQGTTVTVSS

SEQ ID NO: 14013 - protein, 119 aa, Artificial Sequence
  source: /note="Description of Artificial Sequence: Synthetic polypeptide"
QVQLQQWGAGLLKPSETLSLTCAVYGGSFSGYYWSWIRQSPGKGLEWIGEINHSGSTNYNPSLKSRVTISVDTSKNQFSLKLTSVTAADTAVYFCARGGGTYYYGMDVWGQGTTVTVSS

SEQ ID NO: 14014 - protein, 119 aa, Artificial Sequence
  source: /note="Description of Artificial Sequence: Synthetic polypeptide"
QVQLQQWGAGLLKPSETLSLTCAVYGGSFSGDYWSWIRQSPGKGLEWIGEINHSGSTNYNPSLKSRVTISIDTSKNQFSLKLSSVTAADTAVYYCARGGGDYYYGMDVWGLGTTVTVSS

SEQ ID NO: 14015 - protein, 129 aa, Artificial Sequence
  source: /note="Description of Artificial Sequence: Synthetic polypeptide"
QVQLLQSGAELKKPGESLKISCKGSGYSFTSYWIAWVRQMPGKGLEYMGLIYPGDSDTKYSPSFQGQVTISVDKSVSTAYLQWSSLKPSDSAVYFCARHDVGYCSSSNCAKWPEYFQHWGQGTLVTVSS

SEQ ID NO: 14016 - protein, 129 aa, Artificial Sequence
  source: /note="Description of Artificial Sequence: Synthetic polypeptide"
QVQLLQSGAEVKKPGESLKISCKGSGYSFTSYWIAWVRQMPGKGLEYMGLIYPGDSDTKYSPSFQGQVTISVDKSVSTAYLQWSSLKPSDSAVYFCARHDVAYCSSSNCAKWPEYFQHWGQGTLVTVSS

SEQ ID NO: 14017 - protein, 129 aa, Artificial Sequence
  source: /note="Description of Artificial Sequence: Synthetic polypeptide"
QVQLLQSGAEVKKPGESLKISCKGSGYSFTSYWIAWVRQMPGKGLEYMGLIYPGDSDTKYSPSFQGQVTISVDKSVSTAYLQWSSLKPSDSAVYFCARHDVGYCSSSNCAKWPEYFQHWGQGTLVTVSS

SEQ ID NO: 14018 - protein, 129 aa, Artificial Sequence
  source: /note="Description of Artificial Sequence: Synthetic polypeptide"
QVQLLQSGAEVKKPGESLKISCKGSGYSFTSYWIAWVRQMPGKGLEYMGLIYPGDSDTKYSPSFQGQVTISVDKSVSTAYLQWSSLKPSDSAVYFCARHDVGYCTDRTCAKWPEYFQHWGQGTLVTVSS

SEQ ID NO: 14019 - protein, 129 aa, Artificial Sequence
  source: /note="Description of Artificial Sequence: Synthetic polypeptide"
QVQLLQSGAEVKKPGESLKISCKGSGYSFTSYWIAWVRQMPGKGLEYMGLIYPGDSDTKYSPSFQGQVTISVDKSVSTAYLQWSSLKPSDSAVYFCARHDVGYCTDRTCAKWPEWLGVWGQGTLVTVSS

SEQ ID NO: 14020 - protein, 140 aa, Artificial Sequence
  source: /note="Description of Artificial Sequence: Synthetic polypeptide"
MGFGLSWLFLVAILKGVQCQVQLVQSGAEVKKPGSSVKVSCKASGGTFSSYAISWVRQAPGQGLEWMGSIIPIFGTVNYAQKFQGRVTITADESTSTAYMELSSLRSEDTAVYYCARDPSVNLYWYFDLWGRGTLVTVSS

SEQ ID NO: 14021 - protein, 138 aa, Artificial Sequence
  source: /note="Description of Artificial Sequence: Synthetic polypeptide"
MGFGLSWLFLVAILKGVQCQVQLVQSGAEVKKPGSSVKVSCKASGGTFGSYAISWVRQAPGQGLEWMGSIIPIFGAANPAQKSQGRVTITADESTSTAYMELSSLRSEDTAVYYCAKMGRGKVAFDIWGQGTMVTVSS

SEQ ID NO: 14022 - protein, 142 aa, Artificial Sequence
  source: /note="Description of Artificial Sequence: Synthetic polypeptide"
MGFGLSWLFLVAILKGVQCQVQLVQSGAEVKKPGASVKVSCKASGYAFTSYGINWVRQAPGQGLEWMGWISAYNGNTYYAQKLRGRVTMTTDTSTSTAYMELRSLRSDDTAVYYCARDLGGYGSGSVPFDPWGQGTLVTVSS

SEQ ID NO: 14023 - protein, 124 aa, Mus musculus; identical to SEQ ID NO: 6765

SEQ ID NO: 14024 - protein, 120 aa, Mus musculus; identical to SEQ ID NO: 13963

SEQ ID NO: 14025 - protein, 120 aa, Mus musculus; identical to SEQ ID NO: 13964

SEQ ID NO: 14026 - protein, 122 aa, Mus musculus; identical to SEQ ID NO: 13968

SEQ ID NO: 14027 - protein, 118 aa, Mus musculus; identical to SEQ ID NO: 13972

SEQ ID NO: 14028 - protein, 122 aa, Mus musculus
RAEVQLQQSGTELVKPGASVILSCKASGYTFTSYWMQWVKQRPGQGLEWIGNINPSNGGTSFNEEFKSRATLTVDKSSSTAYMQLSSLTSEDSAVYYCARDGGLYDGYYFDFWGQGTTLTVS

SEQ ID NO: 14029 - protein, 116 aa, Mus musculus
QVTLKESGAELMKPGASVKLSCKATGYTFTGYWIEWVKQRPGHGLEWIGEILPGSGSTNYNEKFKGEATFTADTSSNTAYMHLSSLTTEDSAIYYCARWGDGSFAYWGQGTLVTVS

SEQ ID NO: 14030 - protein, 120 aa, Mus musculus
RAEVQLQQSGPELVMPGASVKISCKASGYSFTSYYVHWVKQRPGQGLEWIGWIYPGSGHTKYNEKFKDKATLTADTSSSTAYMQLSSLTSEDSAVYYCARPPYYSNYADVWGTGTTVTVS

SEQ ID NO: 14031 - protein, 121 aa, Mus musculus
RAEVKLVESGPGLVKPSQSLSLTCSVTGYSITSGFYWTWIRQFPGNKLEWMGFISYDGSNNYNPSLKNRISITRDTSKNQFFLKLNSVTTEDTATYYCARGGGYYGNLFDYWGQGTTLTVS

SEQ ID NO: 14032 - protein, 119 aa, Mus musculus
RAEVQLKESGPGLVKPSQSLSLTCSVTGYSITSAYYWNWIRQFPGNKVEWMGYIGYDGRNTYNPSLKNRISITRDTSKNQFFLKLNSLTTEDTATYYCSREGDYGYSDYWGQGTTLTVS

SEQ ID NO: 14033 - protein, 122 aa, Mus musculus
RAEVQLQQSGPELVKPGASVKMSCKASGYTFTSYLLHWVKQKPGQGLEWIGYINPYNDGAKYNEKLKGKATLTSDKSSSTAYMEVSSLTSEDSAVYYCAREGDYVRYYGMDYWGQGTSVTVS

SEQ ID NO: 14034 - protein, 118 aa, Mus musculus
QVQLQQPGTELVKPGASVKLSCKASGYTFTSHWMHWVKQRPGQGLEWIGNINPSNGGTNYNEKFKSRATLTVDKASSTAYMQLSSLTSEDSAVYYCARAYYDFSWFVYWGQGTLVTVS

SEQ ID NO: 14035 - protein, 121 aa, Artificial Sequence
  source: /note="Description of Artificial Sequence: Synthetic polypeptide"
EVQLVESGGGLVQPGGSLRLSCAASGFTLSGDWIHWVRQAPGKCLEWVGEISAAGGYTDYADSVKGRFTISADTSKNTAYLQMNSLRAEDTAVYYCARESRVSFEAAMDYWGQGTLVTVSS

SEQ ID NO: 14036 - protein, 117 aa, Artificial Sequence
  source: /note="Description of Artificial Sequence: Synthetic polypeptide"
EVKLVESGGGLVQPGGSLRLSCATSGFTFTDYYMSWVRQPPGKGLEWLGFIRNKANGYTTEYSASVKGRFTISRDNSKSTLYLQMNSLRAEDSATYYCARDNWFAYWGQGTLVTVSS

SEQ ID NO: 14037 - protein, 118 aa, Artificial Sequence
  source: /note="Description of Artificial Sequence: Synthetic polypeptide"
QVQLVQSGAEVKKPGTSVKVSCKASGYTFTGYWMNWVRQASGQGLEWMGDIYPGSGNTNYDEKFQGRVTMTRDTSISTAYMELSRLRSDDTAVYYCARSGVYEDFDSWGQGTTVTVSS

SEQ ID NO: 14038 - protein, 118 aa, Artificial Sequence
  source: /note="Description of Artificial Sequence: Synthetic polypeptide"
QVQLVQSGAEVKKPGASVKVSCKASGYTFTGYWMNWVRQAPGQGLEWMGDIYPGSGNTNYDEKFQGRVTMTRDTSISTAYMELSRLRSDDTAVYYCARSGYYEEFDSWGQGTTVTVSS

SEQ ID NO: 14039 - protein, 118 aa, Artificial Sequence
  source: /note="Description of Artificial Sequence: Synthetic polypeptide"
QVQLVQSGAEVKKPGTSVKVSCKASGYTFTGYWMNWVRQASGQGLEWMGDIYPGSGNTNYDEKFQGRVTMTRDTSISTAYMELSRLRSDDTAVYYCARSGYYEEFDSWGQGTTVTVSS

SEQ ID NO: 14040 - protein, 118 aa, Artificial Sequence
  source: /note="Description of Artificial Sequence: Synthetic polypeptide"
QVQLVQSGAELKKPGASVKVSCKTSGYTFTGYWMNWVRQAPGQGLEWMGDIYPGSGNTNYDEKFQGRVTMTRDTSISTAYMELSRLRSDDTAVYYCARSGYYEEFDSWGQGTTVTVSS

SEQ ID NO: 14041 - protein, 118 aa, Artificial Sequence
  source: /note="Description of Artificial Sequence: Synthetic polypeptide"
QVQLVQSGAEVKKPGASVKVSCKASGYTFTGYWMNWVRQAPGQGLEWMGDIYPGSGNTNYDEKFQGRVTMTRDTSISTAYMELSRLRSDDTAVYYCARGGYYEDFDSWGQGTTVTVSS

SEQ ID NO: 14042 - protein, 118 aa, Artificial Sequence
  source: /note="Description of Artificial Sequence: Synthetic polypeptide"
EVQLVQSGAEVKKPGESLRISCKGSGYTFTTYWISWVRQMPGQGLEWMGDIYPGSGNTNYAQKFQGRVTITADKSTSTAYMGLSSLRSEDTAVYYCARSGYYEDFDSWGQGTTVTVSS

SEQ ID NO: 14043 - protein, 118 aa, Artificial Sequence
  source: /note="Description of Artificial Sequence: Synthetic polypeptide"
EVQLVQSGAEVKKPGESLRISCKGSGYTFTTYWISWVRQMPGQGLEWMGDIYPGSGNTNYAQEFRGRVTITADESTSTAYVELSSLRSEDTAVYYCARSGYYEDFDSWGQGTTVTVSS

SEQ ID NO: 14044 - protein, 118 aa, Artificial Sequence
  source: /note="Description of Artificial Sequence: Synthetic polypeptide"
EVQLVQSGAEVKKPGESLRISCKGSGYTFTTYWISWVRQMPGQGLEWMGDIYPGSGNTNYAQKFLGRVTITADESTSTAYMELSSLRYDDTAVYYCARSGYYEDFDSWGQGTTVTVSS

SEQ ID NO: 14045 - protein, 118 aa, Artificial Sequence
  source: /note="Description of Artificial Sequence: Synthetic polypeptide"
EVKLEESGAELVKPGSSVKLSCKASGYNFTSYWINWVRLRPGQGLEWIGDIYPGSGNTNYDEKFKRKATLTVDTSSSTAYMQLSSLASEDTAVYYCARSGYYEDFDVWGQGTTVTVSS

SEQ ID NO: 14046 - protein, 118 aa, Artificial Sequence
  source: /note="Description of Artificial Sequence: Synthetic polypeptide"
EVKLEESGAELVKPGSSVKLSCKASGYNFTSYWINWVRLRPGQGLEWIGDIYPGSGNTNYDEKFKRKATLTVDTSSSTAYMQLSSLASEDTAVYYCARSGYYEDFDIWGQGTMVTVSS

SEQ ID NO: 14047 - protein, 118 aa, Artificial Sequence
  source: /note="Description of Artificial Sequence: Synthetic polypeptide"
EVKLEESGAELVKPGSSVKLSCKASGYNFTSYWINWVRLRPGQGLEWIGDIYPGSGNTNYDEKFKRKATLTVDTSSSTAYMQLSSLASEDSALYYCTRSGYYEDFDSWGQGTTLIVSS

SEQ ID NO: 14048 - protein, 118 aa, Artificial Sequence
  source: /note="Description of Artificial Sequence: Synthetic polypeptide"
EVKLEESGAELVKPGSSVKLSCKASGYNFTSYWINWVRLRPGQGLEWIGDIYPGSGNTNYDEKFKRKATLTVDTSSSTAYMQLSSLASEDTAVYYCARSGYYEDFDSWGQGTTVTVSS

SEQ ID NO: 14049 - protein, 119 aa, Mus musculus
EVQLQQSGPELVKPGTSVKISCKASGFTFTDYTMDWVKQSHGKSLEWIGDVNPNSGGSIYNQRFKGKASLTVDRSSRIVYMELRSLTFEDTAVYYCARNLGPSFYFDYWGQGTTLTVSS

SEQ ID NO: 14050 - protein, 129 aa, Homo sapiens
QVQLQESGPGLVKPSQTLSLTCTVSGGSISSGGYYWSWIRQHPGKGLEWIGYIYYSGSTYYNPSLKSRVTISVDTSKNQFSLKLSSVTAADTAVYYCAREGPITIVRGVYYYFYGMDVWGQGTTVTVSS

SEQ ID NO: 14051 - protein, 121 aa, Homo sapiens
EVQLVESGGGLVKPGGSLRLSCAASGFTFSSYSMNWVRQAPRKGLEWVSSISSSSSYIYYADSVKGRFTISRDNAKNSLYLQMNSLRAEDTAVYYCARGGDGYNYYYFDYWGQGTLVTVSS

SEQ ID NO: 14052 - protein, 117 aa, Homo sapiens
EVQLVESGGGLVQPGGSLRLSCAASGFTFSSYWMHWVRQTPGKGLEWVANIKQDGSEKYYVDSVKGRFTISRDNAKNSLHLQMNSLRAEDTAAYYCASFRDYGMDVWGQGTTVTVSS

SEQ ID NO: 14053 - protein, 121 aa, Homo sapiens
EVQLVESGGGLVKPGGSLRLSCAASGFTFSSYSMNWVRQAPGKGLEWVSSISSSSSYIYYADSVKGRFTISRDNAKNSLYLQMNSLRAEDTAVYYCARGGDGYNYYYFDYWGQGTLVTVSS

SEQ ID NO: 14054 - protein, 121 aa, Homo sapiens
EVQLVESGGGLVKPGGSLRLSCAASGFTFSSYSMNWVRQAPGKGLEWVSSISSSSSYIYYADSVKGRFTISRDNAKNSLYLQMNSLSAEDTAVYSCARGGDGYNYYYFDYWGQGTLVTVSS

SEQ ID NO: 14055 - protein, 121 aa, Homo sapiens
EVQLVESGGGLVKPGGSLRLSCAASGFTFSSYTMNWVRQAPGKGLEWVSSISSSSSYIYYADSVKGRFTISRDNAKNSLYLQMNSLSAEDTAVYSCARGGDGYNYYYFDYWGQGTLVTVSS

SEQ ID NO: 14056 - protein, 123 aa, Homo sapiens
EVQLVESGGGLVQPGGSLRLSCTASGFPFSSYDMHWVRQATGKGLEWVSAIGTAGDTFYPGSVKGRFTISRENAKNSLYLQMNSLRAGDTAVYYCAREGYSSGRYFYYGMDVWGQGTTVTVSS

SEQ ID NO: 14057 - protein, 112 aa, Homo sapiens
DIVMTQTPLSLSVTPGQPASISCKSSQSLLHSDGKTYLYWYLQKPGQPPQPLIYEVSNRFSGVPDRFSGSGSGTDFTLKISRVEAEDVGIYYCMQSKQLPRTFGQGTKVEIK

SEQ ID NO: 14058 - protein, 120 aa, Artificial Sequence
  source: /note="Description of Artificial Sequence: Synthetic polypeptide"
  MOD_RES (57)..(57): Any amino acid
  MOD_RES (59)..(59): Any amino acid
EVQLVESGGGLVQPGGSLRLSCAASGFNIKDTYIHWVRQAPGKGLEWVARIYPTNGXTXYADSVKGRFTISADTSKNTAYLQMNSLRAEDTAVYYCSRWGGDGFYAMDYWGQGTLVTVSS

SEQ ID NO: 14059 - protein, 123 aa, Homo sapiens
QVQLVQSGAEVKQPGASVKVSCKASGGTFSSYAISWVRQAPGQGLEWMGGIIPIFGTANYAQKFQGRVTITADESTSTAYMELSSLRSEDTAVYYCATTTMVRGVIMYYFDYWGQGTLVTVSS

SEQ ID NO: 14060 - protein, 117 aa, Homo sapiens
EVQLVQSGAEVKKPGASVTVSCKPSGYAFTDYYIHWVRQAAGQGLEWMGWVDPRSGATVYAQNFQGRVTMTRDRSSSTVYMDLSRVTSDDTALYFCGRDNYGIFDYWGQGTLVTVSS

SEQ ID NO: 14061 - protein, 121 aa, Homo sapiens
QMQLVQSGADVKKPGASVRVSCKTSGYTFTSYDINWVRQAPGQGLEWMGWMNPDTGNTAYVQKFQGRVTVTRDTSINTVYMELSGLRSEDTAVYYCAKSGGSSSYDAFDIWGQGTMVTVSS

SEQ ID NO: 14062 - protein, 120 aa, Homo sapiens
VQLLESGAEVKKPGASMKVSCKASGYPFPSYGISWVRQAPGQGLEWMGWINPYNGETNSAQQLQGRVTMTTDTSASTAYMELRSLRADDTAVYYCARARTPIAAAWFDPWGQGTLVTVSS

SEQ ID NO: 14063 - protein, 121 aa, Homo sapiens
QVQLVESGGGLVQPGGSLRLACAASGFTFSNYEMNWVRQAPGKGLEWVATISDDSVYKYYADSVKGRFTISRDNSKALFYLQMDSLTFEDTAIYYCARDPGGDSLGYFQHWGQGTLVTVSS

SEQ ID NO: 14064 - protein, 118 aa, Homo sapiens
EVQLVESGGGLVKPGGSLRLSCAASGFTFSRYSMNWVRQAPGKGLEWVSSISSSSSYIFYADSVKGRFTISRDNAKNSLYLQVNSLGAEDTAVYYCARASSEDAFDIWGQGTMVTVSS

SEQ ID NO: 14065 - protein, 118 aa, Homo sapiens
QLVESGGGVVQPGGSLRLSCAASGFNFRAYGMHWVRQAPGKGLEWLAMMSSDGTRTYYADSVKGRFTISRDNSKNTLYVQMNSLRAEDTAVYYCARDRGSFSSSFDLWGQGTLVTVSS

SEQ ID NO: 14066 - protein, 123 aa, Homo sapiens
EVQLLESGGGLVQPGGSLRLSCAASGFTFSTYWMTWVRQAPGKGLEWVASMNQDGSEKYYVDSVKGRFTISRDNAKNSLYLQMNSLRDEDTALYYCAKAYSSSWLLSGGMDVWGQGTTVTVSS

SEQ ID NO: 14067 - protein, 119 aa, Homo sapiens
QVQLVQSGAEVKKPGASVKVSCKASGYTFTSHYGISWVRQAPGQGLEWMGSITPHNGKTNYVQMFQGRVTMTTDTSTRTVYMELRNLRSDDTAVYYCARDWNFADFDYWGQGTLVTVSS

SEQ ID NO: 14068 - protein, 119 aa, Homo sapiens
QVQLVESGGGLVKPGGSLRLSCAASGFTFSSYSMNWVRQAPGKGLEWVSSISSRSGYIYYADSVKGRFTISRDNAKNSLYLQMNSLRDEDTAVYYCVRDGGTVDAFDIWGQGTMVTVSS

SEQ ID NO: 14069 - protein, 123 aa, Homo sapiens
QVQLVQSGRGLVQPGRSLRLSCAASGFTFDEYAMHWVRHAPGKGLEWVAGMSWNGGGIGYADSVKGRFTISRDNSKNTLYLQMNSLRAEDTAVYYCAREGAGGSYPTDAFDIWGQGTTVTVSS

SEQ ID NO: 14070 - protein, 119 aa, Homo sapiens
QVQLVQSGAEVKKPGASVKVSCKASGYTFTSYGISWVRQAPGQGLEWMGWISAYNGNTNYAQKLQGRVTMTTDTSTSTAYMELRSLRSDDTAVYYCAREAYAWGAFDIWGQGTMVTVSS

SEQ ID NO: 14071 - protein, 123 aa, Homo sapiens
QVQLQQSGPGLVQPSQTLSLTCDISGDSVSSTGAAWNWIRQSPSRGLEWLGRTYYRSKWYNDYALSVRSRITITPDTSKNQFSLQLNSVTPEDTAVYYCVRDGDVGLDAFDIWGQGTMVTVSS

SEQ ID NO: 14072 - protein, 120 aa, Homo sapiens
QVQLQQWGAGLLKSSETLSLSCAVYGGTFRDDHWSWIRQPPGKGLEWIGESHHTGRTIYNPSLRSRVTMSIDTSKNEFSLILRSVTAADTATYFCARGNNYVWGNQEDFWGQGTLVTVSS

SEQ ID NO: 14073 - protein, 117 aa, Homo sapiens
QLVQSGAEVRKPGASVKVSCKASGYTFADYYIHWVRQAPGQGLEWMGWINPNSGGADYAQKLQGRVTMTTDTSTSTAYMELRSLRSDDTAVYYCAREGYAWGAFDIWGQGTMVTVSS

SEQ ID NO: 14074 - protein, 120 aa, Homo sapiens
EVQLVQSGAEVRKPGASVKVSCKASQYTFTNYHIHWVRQVPGQGLEWMAMINPSNGNTNYGQRFQDRVTLTRDTSTSTAYMELSSLRSEDTAVYLCARDGLTFGDLLAYWGQGTLVTVSS

SEQ ID NO: 14075 - protein, 122 aa, Homo sapiens
QVQLVESGGGLVKPGGSLRLSCAASGFTFSSYSMNWVRQAPGKGLEWVSSISSSSSYIYYADSVKGRFTISRDNSKNTLYLQMNSLRDEDTAVYYCAREILTGYYPDAFDMWGQGTMVTVSS

SEQ ID NO: 14076 - protein, 118 aa, Homo sapiens
EVQLLESGGGLVKPGGSLRLSCAASGFTFSSYSMNWVRQAPGKGLEWVSSISSSSSYIYYADSVKGRFTISRDNAKNSLYLQMNSLRAEDTAVYYCARGFGEDLFDYWGQGTLVTVSS

SEQ ID NO: 14077 - protein, 123 aa, Homo sapiens
QVQLVESGGGLVQPGGSLRLSCVASGFTFSSYWMSWVRQAPGKGLEWVAYINLDGSEKDYVDSVKGRFTISRDNAKNSLYLQMNSLRAEDTALYYCAKAYSSSWLLSGGMDVWGQGTTVTVSS

SEQ ID NO: 14078 - protein, 122 aa, Homo sapiens
QVQLVESGGGLVKPGGSLRLSCAASGFTSSSYVLNWVRQAPGKGLEWVSSISSRGSYIYYADSVKGRFTISRDNAKNSLYLQMNSLRAEDTAVYYCARERAGFSPVNAFDIWGQGTMVTVSS

SEQ ID NO: 14079 - protein, 119 aa, Homo sapiens
  MOD_RES (19)..(20): Any amino acid
QVQLQQWGAGLLKPSETLXXTCAVYGGSFSGYYWSWIRQPPGKGLEWIGEINHSGSTNYNPSLKSRVTISVDTSKNQFSLQLNSVTPEDTAVYYCVRDDGMGLDALDIWGQGTMVTVSS

SEQ ID NO: 14080 - protein, 115 aa, Homo sapiens
EVQLVQSGAEVKKPGESLKISCKGSGYSFTNYWIGWVRQMPGKGLEWMGIIYPGDSDTRYSPSFQGQVTISADKSISTAYLQWSSLKASDTAMYYCAGGGYYSYWGQGTLVTVSS

SEQ ID NO: 14081 - protein, 126 aa, Homo sapiens
QVQLVESGGGLIQPGGSVKLSCAASGFTVSSNYMSWVRQAPGKGLEWVAVISYDGSFEYYGESVKGRFTISRDNAKNTLYLQMSSLRPEDTAVYYCAKDTPYYYDSSGQSGDYFDHWGQGALVTVS

SEQ ID NO: 14082 - protein, 117 aa, Homo sapiens
EVQLVESGGGLIQPGGSLRLSCAASGFTVSSNYMSWVRQAPGKGLEWVSVIYSGGSTYYADSVKGRFTISRDNSKNTLYLQMNSLRAEDTAVYYCARDFGVGAVDYWGQGTLVTVSS

SEQ ID NO: 14083 - protein, 121 aa, Homo sapiens
QLQLQESGPGLVKPSQTLSLTCTVSGGSINSAGYYWTWIRQHPGKGLEWIGSIYYSGSTYYNPSLKSRVSMSQDTSKNQFSLKLSSLTAADTAVYYCAREVGVVPEYMDVWGQGTTVTVSS

SEQ ID NO: 14084 - protein, 117 aa, Homo sapiens
QVQLVESGGGLVQPGRSLRLSCAASGFTFSSYGMHWVRQAPGKGLEWVGFIRSETYGGTTQTAASVKGRFSISRDDSQGIAYLQMDSLKTEDTAVYFCARSGRGDFWGQGTLVTVSS

SEQ ID NO: 14085 - protein, 126 aa, Homo sapiens
  MOD_RES (19)..(19): Any amino acid
QVQLQESGGGVVQPGRSLXLSCAASGFTFSSYAMHWVRQAPGKGLEWVAVISYDGSNKYYADSVKGRFTISRDNSKNTLYLQMNSLRAEDTAVYYCARDRWDVASTVEATDGMDVWGQGTTVTVSS

SEQ ID NO: 14086 - protein, 119 aa, Artificial Sequence [sequence omitted]

SEQ ID NO: 14087 - protein, 118 aa, Artificial Sequence
  source: /note="Description of Artificial Sequence: Synthetic polypeptide"
EVQLLESGGGLVQPGGSLRLSCAASGFTFSAYNMRWVRQAPGKGLEWVSVIYPSGGATRYADSVKGRFTISRDNSKNTLYLQMNSLRAEDTAVYYCARGYYYYGMDVWGQGTLVTVSS

SEQ ID NO: 14088 - protein, 122 aa, Artificial Sequence
  source: /note="Description of Artificial Sequence: Synthetic polypeptide"
EVQLLESGGGLVQPGGSLRLSCAASGFTFSAYGMGWVRQAPGKGLEWVSYISPSGGHTKYADSVKGRFTISRDNSKNTLYLQMNSLRAEDTAVYYCAKVLETGLLVDAFDIWGQGTMVTVSS

SEQ ID NO: 14089 - protein, 118 aa, Artificial Sequence
  source: /note="Description of Artificial Sequence: Synthetic polypeptide"
EVQLLESGGGLVQPGGSLRLSCAASGFTFSWYGMGWVRQAPGKGLEWVSYISPSGGITVYADSVKGRFTISRDNSKNTLYLQMNSLRAEDTAVYYCARLNYYYGLDVWGQGTTVTVSS

SEQ ID NO: 14090 - protein, 119 aa, Artificial Sequence
  source: /note="Description of Artificial Sequence: Synthetic polypeptide"
EVQLLESGGGLVQPGGSLRLSCAASGFTFSRYGMWWVRQAPGKGLEWVSYIGSSGGPTYYVDSVKGRFTISRDNSKNTLYLQMNSLRAEDTAVYYCAGGRGTPYYFDSWGQGTLVTVSS

SEQ ID NO: 14091 - protein, 120 aa, Artificial Sequence
  source: /note="Description of Artificial Sequence: Synthetic polypeptide"
EVQLVESGGGLVQPGGSLRLSCAASGFNIKDTYIHWVRQAPGKGLEWVARIYPTNGYTRYADSVKGRFTISADTSKNTAYLQMNSLRAEDTAVYYCSRWGGWGFYAFALWGQGTLVTVSS

SEQ ID NO: 14092 - protein, 120 aa, Artificial Sequence
  source: /note="Description of Artificial Sequence: Synthetic polypeptide"
EVQLVESGGGLVQPGGSLRLSCAASGFNIKDTYIHWVRQAPGKGLEWVARIYPTNGYTRYADSVKGRFTISADTSKNTAYLQMNSLRAEDTAVYYCSRWNAKGFYSFVHWGQGTLVTVSS

SEQ ID NO: 14093 - protein, 107 aa, Artificial Sequence
  source: /note="Description of Artificial Sequence: Synthetic polypeptide"
DIQMTQSPSSLSASVGDRVTITCRASQDVNTAVAWYQQKPGKAPKLLIYSASFLYSGVPSRFSGSRSGTDFTLTISSLQPEDFATYYCQQHYQTPASFGQGTKVEIK

SEQ ID NO: 14094 - protein, 120 aa, Artificial Sequence
  source: /note="Description of Artificial Sequence: Synthetic polypeptide"
EVQLVESGGGLVQPGGSLRLSCAASGFNIKDTYIHWVRQARGKGLEWVARIYPTNGYTRYADSVKGRFTISADTSKNTAYLQMNSLRAEDTAVYYCSRWGGWGFYAFALWGQGTLVTVSS

SEQ ID NO: 14095 - protein, 121 aa, Artificial Sequence
  source: /note="Description of Artificial Sequence: Synthetic polypeptide"
QVQLVQSGAEVKKPGASVKVSCKASGYTFTDYYLNWVRQAPGQGLEWMGEIDPGSDSIYYNENLEGRVTITADTSTSTAYMELSSLRSEDTAVYYCARYGYSRYDVRFVYWGQGTLVTVSS

SEQ ID NO: 14096 - protein, 121 aa, Artificial Sequence
  source: /note="Description of Artificial Sequence: Synthetic polypeptide"
QVQLVQSGAEVARPGASVKVSCKASGYTFTDYYLNWVRQRSGQGLEWIGEIDPGSDSIYYNENLEGRVTITADTSTSTAYMELSSLRSEDTAVYFCARYGYSRYDVRFVYWGQGTLVTVSS

SEQ ID NO: 14097 - protein, 121 aa, Mus musculus
QVQLQQSGAEVARPGASVKLSCKASGYTFTDYYLNWVKQRSGQGLEWIGEIDPGSDSIYYNENLEGRATLTADKSSSTAYMQLNSLTSEDSAVYFCARYGYSRYDVRFVYWGQGTLVTVST

SEQ ID NO: 14098 - protein, 122 aa, Rattus norvegicus
EVQLVESGGGLVQPGRSLKLSCVASGFRFNDFWMTWIRQAPGKGLEWVASITYTGDNTYYAGSVKGRITISRDNAKSTLYLQMNSLRSEDTATYYCTRDDYGGYSPYYMDAWGQGTSVTVSS

SEQ ID NO: 14099 - protein, 118 aa, Rattus norvegicus
QVKLLQSGAELVKPGASVKLSCKTSGFTFSTSYMSWLKQVPGPSIEWIGWIYAGDGGTKYNQKFKGKATLTVDKSSSTAYMDLSSLTSEDAAVYFCATDGYGDWFAYWGQGTLVTVSS

SEQ ID NO: 14100 - protein, 118 aa, Rattus norvegicus
QVKLLQSGAELVKPGASVKLSCKTSGFTFSTSYMSWLKQVPGPSTEWIGWIYAGDGGTKYNQKFKGKATLTVDKFSSTAYMDLSSLTSEDAAVYFCATDGYGDWFTYWGQGTLVTVSS

SEQ ID NO: 14101 - protein, 120 aa, Mus musculus
EVQLQQSGPELVKPGASVKISCKASGYTFTDYNMDWVKQSHGKSLEWIGYIYPNNGGTGYNQKFKSKATLTVDKSSSTAYMELHSLTSEDSAVYYCATYGHYYGYMFAYWGQGTLVTVSA

SEQ ID NO: 14102 - protein, 125 aa, Artificial Sequence
  source: /note="Description of Artificial Sequence: Synthetic polypeptide"
EVQLVQSGAEVKKPGASVKVSCKASGYTFTDYNMDWVRQAPGQGLEWMGYIYPNNGGTGYNQKFKSKVTITVDTSTSTAYMELHSLRSEDTAVYYCATYGHYYGYMFAYWGQGTLVTVSSASTKG

SEQ ID NO: 14103 - protein, 125 aa, Artificial Sequence
  source: /note="Description of Artificial Sequence: Synthetic polypeptide"
EVQLVQSGAEVKKPGASVKVSCKASGYTFTDYNMDWVRQAPGQGLEWMGYIYPNNGGTGYNQKFKSRVTITADTSTSTAYMELSSLRSEDTAVYYCARYGHYYGYMFAYWGQGTLVTVSSASTKG

SEQ ID NO: 14104 - protein, 125 aa, Artificial Sequence
  source: /note="Description of Artificial Sequence: Synthetic polypeptide"
EVQLVQSGAEVKKPGASVKVSCKASGYTFTDYNMDWVKQSPGQGLEWMGYIYPNNGGTGYNQKFKSKVTITVDTSTSTAYMELHSLRSEDTAVYYCATYGHYYGYMFAYWGQGTLVTVSSASTKG

SEQ ID NO: 14105 - protein, 125 aa, Artificial Sequence
  source: /note="Description of Artificial Sequence: Synthetic polypeptide"
EVQLVQSGAEVKKPGASVKVSCKASGYTFTDYNMDWVKQSPGKSLEWMGYIYPNNGGTGYNQKFKSKVTITVDTSTSTAYMELHSLRSEDTAVYYCATYGHYYGYMFAYWGQGTLVTVSSASTKG

SEQ ID NO: 14106 - protein, 125 aa, Artificial Sequence
  source: /note="Description of Artificial Sequence: Synthetic polypeptide"
EVQLVQSGAEVKKPGASVKVSCKASGYTFTDYNMDWVRQAPGQGLEWMGYIYPNNGGTGYNQKFKSKATLTVDTSTSTAYMELHSLRSEDTAVYYCATYGHYYGYMFAYWGQGTLVTVSSASTKG

SEQ ID NO: 14107 - protein, 125 aa, Artificial Sequence
  source: /note="Description of Artificial Sequence: Synthetic polypeptide"
EVQLVQSGAEVKKPGASVKVSCKASGYTFTDYNMDWVKQSPGKSLEWMGYIYPNNGGTGYNQKFKSKATLTVDTSTSTAYMELHSLRSEDTAVYYCATYGHYYGYMFAYWGQGTLVTVSSASTKG

SEQ ID NO: 14108 - protein, 125 aa, Artificial Sequence
  source: /note="Description of Artificial Sequence: Synthetic polypeptide"
EVQLVQSGAEVKKPGASVKVSCKASGYTFTDYNMDWVKQSPGQGLEWMGYIYPNNGGTGYNQKFKSKATLTVDTSTSTAYMELHSLRSEDTAVYYCATYGHYYGYMFAYWGQGTLVTVSSASTKG

SEQ ID NO: 14109 - protein, 141 aa, Mus musculus
MEWIWIFLFILSGTAGVHSQVQLQQSGTELARPGASVKLSCKASGYTFRTYGITWVKQRTGQGLEWIGEIFPGSGNTYYNEKFKGKASLTADKSSSTAYMQLSSLTSEDSAVYFCARESFSDGYYGYFDYWGQGTTLTVSS

SEQ ID NO: 14110 - protein, 122 aa, Artificial Sequence
  source: /note="Description of Artificial Sequence: Synthetic polypeptide"
QVQLVQSGAEVKKPGASVKVSCKASGYTFTTYGITWVRQAPGQGLEWMGEIFPGSGNTYYNEKFKGRVTITADKSTSTAYMELSSLRSEDTAVYYCARESFSDGYYGYFDYWGQGTLVTVSS

SEQ ID NO: 14111 - protein, 116 aa, Mus musculus
EVQLQQSGPELVKPRASVKISCKASGYSFSGYYMHWVKQSPEKSLEWIGEINPSTGGITYNQKFKAKATLTVDRSSSTAYMQLKSLTSEDSAVYYCTRITWAFAYWGQGTLVTVSA

SEQ ID NO: 14112 - protein, 117 aa, Mus musculus
EVQLQQSGPELVKPGASVKISCKASGYSFTGYYMHWVKQSPEKSLEWIGEINPSTGGTTYNQKFKAKATLTLDKSSSTAYMQLKSLTSEDSAVYYCAKSPYWDGAYWGQGTLVTVSA

SEQ ID NO: 14113 - protein, 116 aa, Artificial Sequence
  source: /note="Description of Artificial Sequence: Synthetic polypeptide"
QVQLVQSGAEVVKPGSSVKVSCKASGYSFSGYYMHWVKQAPGQGLEWIGEINPSTGGITYNQKFKAKATLTVDRSTSTAYMELKSLTSEDTAVYYCTRITWAFAYWGQGTTVTVSS

SEQ ID NO: 14114 - protein, 120 aa, Homo sapiens
QVQLVQSGAEVKKPGASVKVSCKASGYTFTSYGISWVRQAPGQGLEWMGWISASNGNTNYAQKLQDRVTMTTDTSTSTAYMELRSLRSDDTAVYYCAREDNWNYGFFDYWGQGTLVTVSS

SEQ ID NO: 14115 - protein, 117 aa, Homo sapiens
QVHLVQSGAEVKKPGASVKVSCKVSGYTFTGHYMHWVRQAPGQGLEWMGWINPNSGGTNCAQKFQGRVTMTRDTSISTAYMELSRLRSDDTAVYYCARSIAVALDYWGQGTLVTVSS

SEQ ID NO: 14116 - protein, 117 aa, Homo sapiens
QVQLVQSGAEVKKPGASVKVSCKASGYTFTGYYMHWVRQAPGQGLEWMGWINPNSGGTNHTQKFQGRVTMTRDTSISTAYMELSRLRSDDTAVYYCARSIAVALDYWGQGTLVTVSS

SEQ ID NO: 14117 - protein, 122 aa, Homo sapiens
QVQLVQSGAEVRKPGASVKVSCKVSGYTLTELSMHWVRQAPGKGLEWMGSFDPEDGETIYAQKFQGRVTMLEDTSTDTAYMELSSLRSEDTAVYYCATEGDGGYYYYGMDVWGQGTTVTVSS

SEQ ID NO: 14118 - protein, 122 aa, Homo sapiens
QVTLKESGPVLVKPTETLTLTCTVSGFSLSNARMGVSWIRQPPGKALEWLAHIFSNDEKSYSTSLKSRLTISKDTSKSQVVLTMTNMDPVDTATYYCARMYSSGWYGVFDYWGQGTLVTVSS

SEQ ID NO: 14119 - protein, 123 aa, Homo sapiens
QVTLKESGPVLVKPTETLTLTCTVSGFSLSNARMGVSWIRQPPGKALEWLVLIFSNDEKSYSTSLKSRLTISKDTSKSQVVLTMTNMDPVDTATYYCARVYSSGWSFYGMDVWGQGTTVTVSS

SEQ ID NO: 14120 - protein, 118 aa, Homo sapiens
QITLKESGPTLVKPTQTLTLTCTFSGFSLSTGGVGVGWIRQPPGKALEWLALIYWNDDKRYSPSLKSRLTITKDTSKNQVVLTMTNMDPVDTATYYCAHRRELPFDYWGQGTLVTVSS

SEQ ID NO: 14121 - protein, 118 aa, Homo sapiens
QITLKESGPTLVKPTQTLTLTCTFSGFSLSTGGVGVGWIRQPPGKALEWLALIYWNDDKRYSPSLKSRLTITKDTSKTQVVLTVTDMDPVDTATYYCAHRNWTPFDYWGQGTLVTVSS

SEQ ID NO: 14122 - protein, 118 aa, Homo sapiens
QITLKESGPTLVKPTQTLTLTCTFSGFSLNTGGVGVGWIRQPPGKALEWLALIYWNDDKRYSPSLKSRLTITKDTSKNQVVLTMTNMDPVDTATYYCAHRLELPFDYWGQGTLVTVSS

SEQ ID NO: 14123 - protein, 118 aa, Homo sapiens
QITLKESGPTLVKPTQTLTLTCTFSGFSLSTGGVGVGWIRQPPGKALEWLALIYWNDDKRYSPSLKSRLTITKDTSKNQVVLTMTNLDPVDTATYYCAHRREVPFDYWGQGTLVTVSS

SEQ ID NO: 14124 - protein, 118 aa, Homo sapiens
QITLKESGPTLVKPTQTLTLTCTFSGFSLSTGGVGVGWIRQPPGKALEWLALIYWNVEKRYSPSLRSRLTITKATSKNQVVLTMTNMDPVDTATYYCAHRHTNPFEYWGQGTLVTVSS

SEQ ID NO: 14125 - protein, 118 aa, Homo sapiens
QITLKESGPTLVKPTQTLTLTCTFSGFSLSTGGVGVGWIRQPPGKALEWLALIYWNDDKRYSPSLKSRLTITKDTSKNQVVLTMTNMDPVDTATYYCAHRGELPFDYWGQGTLVTVSS

SEQ ID NO: 14126 - protein, 121 aa, Homo sapiens
EVQLVESGGGLVKPGGSLRLSCAASGFPFSRYSMNWVRQAPGKGLEWVSAISSSSSYIYYADSVKGRFTISRDNAKNSLYLQMNSLRAEDTAVYYCARDRVGATPDAFDIWGQGTMVTVSS

SEQ ID NO: 14127 - protein, 128 aa, Homo sapiens
EVQLLESGGGLVQPGGSLRLSCAASGFTFSSYAMNWVRQAPGKGLEWVSAISGSGGSTYYADSVKGRFTISRDNSKNTLYLQMNSLRAEDTAVYYCAKEGIAVAGTAEYYYYYAMDVWGQGTTVTVSS

SEQ ID NO: 14128 - protein, 125 aa, Homo sapiens
EVQLLESGGGLVQPGGSLRLSCAASGFTFSSYAMSWVRQAPGKGLEWVSAISGSGGSTYYADSVKGRFTISRDNSKNTLYLQMNSLRAEDTAVYYCAKEGIAARDSYYYYAMDVWGQGTTVTVSS

SEQ ID NO: 14129 - protein, 125 aa, Homo sapiens
EVQLLESGGGLVQPGGSLRLSCTASGFTFSSYAMSWVRQAPGKGLEWVSAISGSGGSTYYADSVKGRFTISRDNSKNTLYLQMNSLRAEDTAEYYCAKEGIAGRDSYYYYGMDVWGQGTTVTVSS

SEQ ID NO: 14130 - protein, 123 aa, Homo sapiens
QVQLVESGGGVVQPGRSLRLSCAASGFTFSSYGMHWVRQAPGKGLEWVAFISDDGSTKYYADSVKGRFTISRDNSMNTLYLQMNSLRAEDTAVYYCARSYYDSSGYYYGFDYWGQGTLVTVSS

SEQ ID NO: 14131 - protein, 114 aa, Homo sapiens
QVQLVESGGGVVQPGRSLRLSCAASGFTFSSYGMHWVRQAPGKGLEWVAVIWYDGSNKYYADSVKGRFTISRDNSKNTLYLQMNSLRAEDTAVYYCARNVIDYWGQGTLVTVSS

SEQ ID NO: 14132 - protein, 120 aa, Homo sapiens
QVQLVESGGGVVQPGRSLRLSCAASGFTFSSYDMHWVRQAPGKGLEWVAVIWYDGSIKYYADSVKGRFTISRDNSKNTLYLQMNSLRAEDTAVYYCARGGATGAEYFQHWGQGTLVTVSS

SEQ ID NO: 14133 - protein, 118 aa, Homo sapiens
QVQLVESGGGVVQPGRSLRLSCAASGFTFSSYGMHWVRQAPGKGLEWVAVIWYDGSNKYYADSVKGRFTISRDNSKNTLYLQMNSLRAEDTAVYYCVLLWFGETFDYWGQGSLVTVSP

SEQ ID NO: 14134 - protein, 115 aa, Homo sapiens
QVQLVESGGGVVQPGRSLRLSCAASGFTFSSYGMHWVRQAPGKGLEWVAVIWSDGSNKYYADSVKGRFTISRDNSKNTLYLQMNSLRAEDTAVYYCARNLPFDYWGQGTLVTVSS

SEQ ID NO: 14135 - protein, 123 aa, Homo sapiens
QVQLVESGGGVVQPGRSLRLSCAASGFTFSSYGMHWVRQAPGKGLEWVAVIWDDGSNQYYTDSVKGRFTVSRDNSKNTLFLQMNSLRAEDTAVYYCARSHYGGDYDYYGMDVWGQGTTVTVSS

SEQ ID NO: 14136 - protein, 120 aa, Homo sapiens
QVQLVESGGGVVQPGRSLRLSCAASGFTFSSYGMHWVRQAPGKGLEWVAVIWYDGSNKRYVDSVKGRFTISRDNSKNTLYLQMNSLRAEDTAVYYCARDGWQQQAPFDYWGQGTLVTVSS

SEQ ID NO: 14137 - protein, 118 aa, Homo sapiens
QVQLVESGGGVVQPGRSLRLSCAASGFTFRSHGMHWVRQAPGKGLEWVAVIWYDGSNKNYADSVRGRFTISRDNSKNTLDLQMNSLRAEDTAVYYCARWGISAPFDCWGQGTLVTVSS

SEQ ID NO: 14138 - protein, 115 aa, Homo sapiens
EVQLVESGGGLVQPGGSLRLSCAASGFTFSAYSMNWVRQAPGKGLEWVSYISSSGRTIYYADSVKGRFTISRDNAKNSLFLQMNSLRDEDTAVYYCALWAPFDYWGQGTLVTVSS

SEQ ID NO: 14139 - protein, 125 aa, Homo sapiens
EVQLVESGGGLVQPGGSLRLSCAASGFTFSSYSMNWVRQAPGKGLEWVSHISSSSRTIYYADSVKGRFTISRDNAKNSVYLQMNSLRDEDTAVYYCARDGYNWNGGGNYYGMDVWGQGTTVTVSS

SEQ ID NO: 14140 - protein, 125 aa, Homo sapiens
EVQLVESGGGLVQPGGSLRLSCAASGFTFSSYSMNWVRQAPGKGLEWVSHISRSSRTIYYADSVKGRFTISRDNAKNSLYLQMNSLRDEDTAVYYCARDGYNWNNGGYYYGMDVWGQGTTVTVSS

SEQ ID NO: 14141 - protein, 118 aa, Homo sapiens
QVQLQESGPGLVKPSQTLSLTCTVSGGSVSSGGYYWSWIRQHPGKGLEWIGYIHSSGSTYYNPSLKSRVTISVDTSKNQFSLNLSSVTAADTAVYYCARGPYYGMDVWGQGTTVTVSS

SEQ ID NO: 14142 - protein, 127 aa, Homo sapiens
QVQLQESGPGLVKPSQTLSLTCTVSGGSISRGGYYWSWIRQHPGKGLEWIGYIYHSGSTYYNPSLKSRVNMSVDTSKNQFSLKLSSVTAADTAVYYCARALRGIVLMVYVLGALDIWGQGTKVTVSS

SEQ ID NO: 14143 - protein, 127 aa, Homo sapiens
QVQLQESGPGLVKPSQTLSLTCTVSGGSISSGGYYWSWIRQHPGKGLEWIGYIYYSGSTYYNPSLKSRVTISVDTSKNQFSLKLSSVTAADTAVYYCARDETVVRGLIRYCYGMDVWGQGTTVTVSS

SEQ ID NO: 14144 - protein, 122 aa, Homo sapiens
QVQLQESGPGLVKPSQTLSLNCTVSGGSISSGGYYWSWIRQHPGKGLEWIGYIHYSGSTYYNPSLKSRITISADTSKNQFSLKLNSVTAADTAVYYCARDRGGGDYGRMDVWGQGTTVTVSS

SEQ ID NO: 14145 - protein, 119 aa, Homo sapiens
QVQLQESGPGLVKPSQTLSLTCTVSGGSISSGGYYWSWIRQHPGKGLEWIGYIHSSGSTYYNPSLKSRITKSVDTSKNQFSLKLSSVTAADTAVYYCARSNNYGCFALWGRGTLVTVSS

SEQ ID NO: 14146 - protein, 133 aa, Homo sapiens
QVQLQESGPGLVKPSQTLSLTCTVSGGSISSGGYYWSWIRQHPGKGLEWIGYIHYSGSTYYNPSLKSRVTISVDTSKNQFSLKLSSVTAADTAVYYCASGYNYGLYYYDSSGYPSYYYGMDVWGQGTTVTVSS

SEQ ID NO: 14147 - protein, 125 aa, Homo sapiens
QVQLQESGPGLVKPSQTLSLTCTVSGGSISSGDYYWNWVRQHPGKGLEWIGYIYYSGGTYYNPSLKSRVTISVDTSKNQFSLKLFSVTAADTAVYFCARTYYDILTGYPFYFDYWGQGTLVTVSS

SEQ ID NO: 14148 - protein, 120 aa, Homo sapiens
QVQLQQWGAGLLKPSETLSLTCAVYGGSFSGYYWSWIRQPPGKGLEWIGEINHSGSTNYNPSLKSRVTISVDTSKNQFSLKLSSVTAADTAVYYCARGGYSSSWYWFDPWGQGTLVTVSS

SEQ ID NO: 14149 - protein, 120 aa, Homo sapiens
QVQLQQWGAGLLKPSETLSLTCAVYGGSFSGYYWSWIRQPPGKGLEWIGEINHSGSTNYNPSLKSRVTISVDTSKNQFSLKLSSVTAADTAVYYCARGGYSSSWFWFDPWGQGTLVTVSS

SEQ ID NO: 14150 - protein, 123 aa, Homo sapiens
QVQLQESGPGLVKPSETLSLTCTVSGGSISSYYWSWIRQPAGKGLEWIGRIYTSGTTNYNPSLKSRVTMSVDTSKNQFSLKLSSVTAADTAVYYCARDGYSYGHYYYYGMDVWGQGTTVTVSS

SEQ ID NO: 14151 - protein, 126 aa, Homo sapiens
QVQLQESGPGLVKPSETLSLTCTVSGGSVSSGGSYWSWIRQPPGKGLEWIGYIYYSGSTNYNPSLKSRVTISIVTSRNQFSLKLSSVTAADTAVYYCARSALRYFDWLFSDVSDIWGQGTMVTVSS

SEQ ID NO: 14152 - protein, 120 aa, Homo sapiens
EVQLVQSGAELKKPGESLKISCKGSGYRFTSYWIGWVRQMPGKGLEWMGIIYPDDSDTRYSPSFQGQVTISADKSISTAYLQWSSLKASDTAMYYCARQKSYGYSYFDYWGQGTLVTVSS

SEQ ID NO: 14153 - protein, 121 aa, Homo sapiens
EVQLVQSGAEVKKPGESLKISCKGSGYSFTSYWIGWVRQMPGKGLEWMGIIYPDDSDARYSPSFQGQVTISADKSINTAYLQWSSLKASDTAMYYCARQGYGSGWGYFDYWGQGTLVTVSS

SEQ ID NO: 14154 - protein, 127 aa, Homo sapiens
EVQLVQSGAEVKKPGESLKISCKGSGYSFTSYWIGWVRQMPGKGLEWMGIIYPGDSDIRYSPSFQGQVTISADKSISTAYLQWSSLKASDTAMYYCARQGLAVAGTSYYYYYGMDVWGQGTTVTVSS

SEQ ID NO: 14155 - protein, 125 aa, Homo sapiens
QVQLQQSGPGLVKPSQTLSLTCAISGDSVSSYSAAWNWIRQSPSRGLEWLGRTYCRSKWYNDYAVSVKSRITINPDTSKNQFSLQLNSVTPEDTAVYYCARDRAVAGYYYGMDVWGQGTTVTVSS

SEQ ID NO: 14156 - protein, 121 aa, Artificial Sequence
  source: /note="Description of Artificial Sequence: Synthetic polypeptide"
EVQLVESGGGLVQPGGSLRLSCAASGFTFTGNWIHWVRQAPGKGLEWVGEISPSGGYTDYADSVKGRFTISADTSKNTAYLQMNSLRAEDTAVYYCARESRVSYEAAMDYWGQGTLVTVSS

SEQ ID NO: 14157 - protein, 121 aa, Artificial Sequence
  source: /note="Description of Artificial Sequence: Synthetic polypeptide"
EVQLVESGGGLVQPGGSLRLSCAASGFTFSGDWIHWVRQAPGKGLEWVGEISPAGAYTDYADSVKGRFTISADTSKNTAYLQMNSLRAEDTAVYYCAREAKVSFEAAMDYWGQGTLVTVSS

SEQ ID NO: 14158 - protein, 121 aa, Artificial Sequence
  source: /note="Description of Artificial Sequence: Synthetic polypeptide"
EVQLVESGGGLVQPGGSLRLSCAASGFTFTGDWIHWVRQAPGKGLEWVGEISPAGAYTDYADSVKGRFTISADTSKNTAYLQMNSLRAEDTAVYYCAREAKVSFEAAMDYWGQGTLVTVSS

SEQ ID NO: 14159 - protein, 121 aa, Artificial Sequence
  source: /note="Description of Artificial Sequence: Synthetic polypeptide"
EVQLVESGGGLVQPGGSLRLSCAASGFTLSGDWIHWVRQAPGKGLEWLGEISAAGGYTDYADSVKGRFTISADTSKNTAYLQMNSLRAEDTAVYYCARESKVSFEAAMDYWGQGTLVTVSS

SEQ ID NO: 14160 - protein, 121 aa, Artificial Sequence
  source: /note="Description of Artificial Sequence: Synthetic polypeptide"
EVQLVESGGGLVQPGGSLRLSCAASGFTLSGDWIHWVRQAPGKGLEWVGEISAAGGYTDYADSVKGRFTISADTSKNTAYLQMNSLRAEDTAVYYCARESKVSFEAAMDYWGQGTLVTVSS

SEQ ID NO: 14161 - protein, 114 aa, Artificial Sequence
  source: /note="Description of Artificial Sequence: Synthetic polypeptide"
DIQMTQSPSSLSASVGDRVTITCRASQALGDSENGYADVAWYQQKPGKAPKLLIYEGSSLYSGVPSRFSGSGSGTDFTLTISSLQPEDFATYYCQQAAPSPYTFGQGTKVEIKR

SEQ ID NO: 14162 - protein, 114 aa, Artificial Sequence
  source: /note="Description of Artificial Sequence: Synthetic polypeptide"
DIQMTQSPSSLSASVGDRVTITCRASQSLLASHDGTPWVAWYQQKPGKAPKLLIYDASYLYSGVPSRFSGSGSGTDFTLTISSLQPEDFATYYCQQSTFAPYTFGQGTKVEIKR

SEQ ID NO: 14163 - protein, 108 aa, Artificial Sequence
  source: /note="Description of Artificial Sequence: Synthetic polypeptide"
DIQMTQSPSSLSASVGDRVTITCRASQEIFPDVAWYQQKPGKAPKLLIYSASSLYSGVPSRFSGSGSGTDFTLTISSLQPEDFATYYCQQAAPTPYTFGQGTKVEIKR

SEQ ID NO: 14164 - protein, 108 aa, Artificial Sequence
  source: /note="Description of Artificial Sequence: Synthetic polypeptide"
DIQMTQSPSSLSASVGDRVTITCRASQAIASDVAWYQQKPGKAPKLLIYSASFLYSGVPSRFSGSGSGTDFTLTISSLQPEDFATYYCQQSEPEPYTFGQGTKVEIKR

SEQ ID NO: 14165 - protein, 108 aa, Artificial Sequence
  source: /note="Description of Artificial Sequence: Synthetic polypeptide"
DIQMTQSPSSLSASVGDRVTITCRASQDVGSDLAWYQQKPGKAPKLLIYSASYLYSGVPSRFSGSGSGTDFTLTISSLQPEDFATYYCQQSDPEPYTFGQGTKVEIKR

SEQ ID NO: 14166 - protein, 108 aa, Artificial Sequence
  source: /note="Description of Artificial Sequence: Synthetic polypeptide"
DIQMTQSPSSLSASVGDRVTITCRASQNIASDVAWYQQKPGKAPKLLIYSASSLYSGVPSRFSGSGSGTDFTLTISSLQPEDFATYYCQQSDPEPYTFGQGTKVEIKR

SEQ ID NO: 14167 - protein, 115 aa, Mus musculus
EVQLQQSGADLVKPGASVKLSCTTSGFNIKDIFIHWVKERPEQGLEWIGRIDPANDNPKYDPKFQGKATISADTSSNTAYLRLSSLTSEDTAVYYCAGGPAYFDYWGQGTTLTVS

SEQ ID NO: 14168 - protein, 119 aa, Artificial Sequence; identical to SEQ ID NO: 14049
  source: /note="Description of Artificial Sequence: Synthetic polypeptide"

SEQ ID NO: 14169 - protein, 119 aa, Artificial Sequence [sequence omitted]

SEQ ID NO: 14170 - protein, 122 aa, Homo sapiens
EVQLVQSGAEVKKPGESLKISCKASGYSFHFYWIGWVRQMPGKGLEWMGSIYPGDSDTRYRPSFQGQVTISADKSISTAYLQWTSLKASDTAIYYCARQRGDYYYFYGMDVWGQGTTVTVSS

SEQ ID NO: 14171 - protein, 119 aa, Homo sapiens
EVQLLESGGGLVQPGGSLRLSCAASGFTFSNYALIWVRQAPGKGLEWVSIIRGGAGSTYYADSVKGRFTISRDNSKNTLYLQMNSLRAEDTAVYYCAKARIWGPLFDYWGQGTLVTVSS

SEQ ID NO: 14172 - protein, 122 aa, Homo sapiens
QVQLVQSGAEVKKPGASVRVPCKASGYTFTRYGISWVRQAPGQGLEWMGWISAYNGKTYYAQKLQGRVTMTTDTSTSTAYMELRSLRSDDTAVYYCARSPLLWFEELYFDYWGQGTLVTVSS

SEQ ID NO: 14173 - protein, 122 aa, Homo sapiens
EVQLVQSGAEVKKPGESLKISCKGSGYRFTSYWIGWVRQMPGKGLEWMGSIYPGDSYTRNSPSFQGQVTISADKSIATAYLQWNSLKASDTAMYYCARHAGDFYYFDGLDVWGQGTTVTVSS

SEQ ID NO: 14174 - protein, 124 aa, Homo sapiens
EVQLVQSGAEVKKPGESLKISCKGSGYSFTRYWIGWVRQMPGKGLEWMGIIYPGDSDTRYSPSFQGQVTISADKSISTAYLQWSSLKASDTAMYYCARLTGDRGFDYYSGMDVWGQGTTVTVSS

SEQ ID NO: 14175 - protein, 119 aa, Homo sapiens
QVQLVQSGAEVKKPGSSVKVSCKASGGTFSSYGISWVRQAPGPGLEWMGRIIPILGIANYAQKFQGRVTITADKSTNTAYMELSSLRSEDTAVYYCARDQEYSSNWYYWGQGTLVTVSS

SEQ ID NO: 14176 - protein, 122 aa, Homo sapiens
EVQLVQSGAEVKKPGESLKISCKGSGYSFTSYWIGWVRQMPGKGLEWMGSIYPGDSHTRYRPSFQGQVTISADKSISTAYLQWSSLKASDTAMYYCARQKGDFYYFFGLDVWGQGTAITVSS

SEQ ID NO: 14177 - protein, 122 aa, Homo sapiens
EVQLVQSGAEVKKPGESLKISCKGSGYSFTSYWIGWVRQMPGKGLEWMGSIYPGDSHTRYRPSFQGQVTISADKSISTAYLQWSSLKASDTAMYYCARQAGDYYYYNGMDVWGQGTTVTVSS

SEQ ID NO: 14178 - protein, 122 aa, Homo sapiens
EVQLVQSGAEVKKPGESLKISCKGSGYSFTSYWIGWVRQMPGKGLEWMGIIYPGDSDTRYSPSFQGQVTISVDKSISTAYLQWSSLKASDTAMYYCARQKGDYYYHYGLDVWGQGTTVTVSS

SEQ ID NO: 14179 - protein, 122 aa, Homo sapiens
EVQLVQSGAEVKKPGESLKISCKGSGYSFTSYWIGWVRQMPGKGLEWMGIIYPGDSDTRYSPSFQGQVTISADKSISTAYLQWSSLKASDTAMYYCARQKGDYYYFNGLDVWGQGTTVTVSS

SEQ ID NO: 14180 - protein, 122 aa, Homo sapiens
EVQLVQSGAEVKKPGESLKISCQGSGYRFISYWIGWVRQMPGKGLEWMGRIYPGDSDTRYSPSFQGQVTISVDKSISTAYLQWSSLKASDTAMYYCARQRGDYYYFNGLDVWGQGTTVTVSS

SEQ ID NO: 14181 - protein, 122 aa, Homo sapiens
EVQLVQSGAEVKKPGESLKISCKGSGYSFTSYWIGWVRQMPGKGLEWMGRIYPGDSDTRYSPSFQGQVTISADKSITTAYLQWSSLRASDTAMYYCARQRGDYYYFFGLDIWGQGTTVTVSL

SEQ ID NO: 14182 - protein, 122 aa, Homo sapiens
EVQLVQSGAEVKKPGESLKISCKGSGYRFSSYWIGWVRQMPGKGLEWMGSIFPGDSDTRYSPSFQGQVTISADKSITTAYLQWSSLKASDTAMYYCARQAGDYYYYNGMDVWGQGTTVTVSS

SEQ ID NO: 14183 - protein, 121 aa, Homo sapiens
QVQLVQSGAEVKKPGASVKVSCKASGYTFTNYGISWVRQAPGQGLEWMGWLSAYSGNTIYAQKLQGRVTMTTDTSTTTAYMELRSLRSDDTAVYYCARDRIVVRPDYFDYWGQGTLVTVSS

SEQ ID NO: 14184 - protein, 119 aa, Homo sapiens
EVQLLESGGGLVQPGGSLRLSCAASGFTFSSYAMNWVRQAPGKGLEWVSAISGRGGTTYYADSVKGRFTISRDNSKNTLYLQMSSLRAEDTAVYYCAKARANWDYFDYWGQGTLVTVSS

SEQ ID NO: 14185 - protein, 121 aa, Homo sapiens
QVQLVQSGAEVKKPGSSVKVSCKASGGTFRTYAINWVRQAPGQGLEWMGRINTVLGIVNHAQKFQGRVTITADKSTNTAYMELNSLRSEDTAVYYCAREKGVDYYYGIEVWGQGTTVTVSS

SEQ ID NO: 14186 - protein, 120 aa, Homo sapiens
QVQLQQWGAGLLKPSETLSLTCAVYGGSFSDYYWNWIRQPPGKGLEWIGEIHHSGSTNYNPSLKSRVTISVDTSKNQFSLKLSSVTAADTAVYYCARGYYDSGVYYFDYWAQGTLVTVSS

SEQ ID NO: 14187 - protein, 119 aa, Homo sapiens
QVQLVESGGGVVQPGRSLRLSCAASGFTFSTFAIHWVRQAPGKGLEWVAVISYDGGHKFYADSVKGRFTISRDNSKNTLYLQMNSLRAEDTAMYYCARGLGVWGAFDYWGQGTLVTVSS

SEQ ID NO: 14188 - protein, 123 aa, Homo sapiens
EVQLVQSGAEVKKPGESLTISCKGSGYSFSIYWIGWVRQMPGKGLEWMGIIFPGDSDIRYSPSFQGQVTISADKSISTAYLQWSSLKASDTAMYYCARQPGDWSPRHWYFDLWGRGTLVTVSS

SEQ ID NO: 14189 - protein, 126 aa, Homo sapiens
EVQLVQSGAEVKKPGESLKISCKGSGYNFTSYWIGWVRQMPGKGLEWMGIIYPGDSDTRYSPSFQGQVTISADKSISTAYLQWSSLKASDTAMYYCARWGTYYDILTGYFNWFDPWGQGTLVTVSS

SEQ ID NO: 14190 - protein, 121 aa, Homo sapiens
QVQLVESGGGVVQPGRSLRLSCAASGFTFSDYVIHWVRQAPGKGLEWVTVISYDGSNKYYADSVKGRFTISRDNSKNTLYLQMNSLSAEDTAMYYCARGGITGTTGVFDYWGQGTLVTVSS

SEQ ID NO: 14191 - protein, 125 aa, Homo sapiens
QVQLVQSGAEVKKPGASVKVSCKASGYTFTSYGISWVRQAPGQGLEWMGWISAYNGNSNYVQKFQGRVTMTTDTTTSTAYMELRSLTSDDTAVYYCAREYSYDSGTYFYYGMDVWGQGTTVTVSS

SEQ ID NO: 14192 - protein, 119 aa, Homo sapiens
EVQLLESGGDLVQPGGSLRLSCAASGFTFSSYAMSWVRQAPGKGLEWVSAISGRGGTTYYADSVKGRFTISRDNSKSTLCLQMNSLRAEDTAVYYCAKARANWDYFDYWGQGTLVTVSS

SEQ ID NO: 14193 - protein, 119 aa, Homo sapiens
EVQLLESGGGLVQPGGSLRLSCAASGFTFSSYAMNWVRQAPGKGLEWVSAISGRGGTTYYADSVKGRFTISRDNSKSTLCLQMNSLRAEDTAVYYCAKARANWDYFDYWGQGTLVTVSS

SEQ ID NO: 14194 - protein, 121 aa, Homo sapiens
QVQLVQSGAEVKKPGASVKVSCKAAGYTFTNYGISWVRQAPGQALEWMGWITTYSSNTIYAQKLQGRVTMTTDTSTSTAYMELRSLRSDDTAVYYCARDRVVVRPDYFDYWGQGTLVTVSS

SEQ ID NO: 14195 - protein, 121 aa, Homo sapiens
QVQLVQSGAEVKKPGASVKVSCKAAGYTFTNYGISWVRQAPGQGLEWMGWIITYNGNTIYAQRFQDRVTMTTDTSTSTAYMELRSLRSDDTAVYYCARDRIIVRPDYFDYWGQGTLVTVSS

SEQ ID NO: 14196 - protein, 120 aa, Homo sapiens
QVQLQQWGAGLLKPSETLSLTCAVYGGSFSGYYWNWIRQPPGKGLEWIGEINHSGSTNYNPSLKSRVTISVDTSKNQFSLKLSSVTAADTAVYYCARGNYGSGYYYFDLWGRGTQVTVSS

SEQ ID NO: 14197 - protein, 120 aa, Homo sapiens
QVQLQQWGAGLLKPSETLSLTCAVYGGSFSGYYWNWIRQPPGKGLEWIGEIHHSGSANYNPSLMSRVTISVDTSKNQFSLQLSSVTAADTAVYYCARGYYGSGYYYFDYWGQGTLVTVSS

SEQ ID NO: 14198 - protein, 120 aa, Homo sapiens
QVQLQQWGAGLLKPSETLSLTCAVYGGSFSDYYWNWIRQPPGKGLEWIGEIHHVGSTNYNPSLKSRVTISVDTSKSQFSLKLSSVTAADTAVYYCARGYYDSGVYYFDYWAQGTLVTVSS

SEQ ID NO: 14199 - protein, 120 aa, Homo sapiens
QVQLQQWGAGLLKPSETLSLTCAVYGGSFSDYYWNWIRQPPGKGLEWIGEIHHSGSTNYNPSLKSRVTISVDTSKNQFSLKLSSVTAADTAVYYCARGYYASGVYYFDYWGQGTLVTVSS

SEQ ID NO: 14200 - protein, 120 aa, Homo sapiens
QVQLQQWGAGLLKPSETLSLTCAVYGGSFSDYFWNWIRQPPGKGLEWIGEIHHSGSTNYNPSLKSRVTISVDTSKNQFSLNLSSVTAADTAVYYCARGLIGSGYYYFDYWDQGTLVTVSS

SEQ ID NO: 14201 - protein, 120 aa, Homo sapiens
QVQLQQWGAGLLKPSETLSLTCAVYGGSFSGYYWSWIRQPPGKGLEWIGEINHSGDTNYNPSLTSRVTISVDTSKNQFSLKLSSVTAADTAVYYCARLFYGSGIYYFDYWGQGTLVTVSS

SEQ ID NO: 14202 - protein, 120 aa, Homo sapiens
QVQLQQWGAGLLKPSETLSLTCAIYGGSFSGYYWSWIRQPPGKGLEWIGEINHSGDTNYNPSLTSRVTISVDTSKNQFSLKLSSVTAADTAVYYCARLFYGSGIYYFDYWGQGTLVTVSS

SEQ ID NO: 14203 - protein, 120 aa, Homo sapiens
QVQLQQWGAGLLKPSETLSLTCAVYGGSFSDYYWSWIRQPPGKGLEWIGEINHSGSTNYNPSLKSRVTISVDTSKNQFSLKLSSVTAADTAVYYCARLYYGSGTYYFDYWGQGTLVTVSS

SEQ ID NO: 14204 - protein, 120 aa, Homo sapiens
QVQLQQWGAGLLKPSETLSLTCAVYGGSFSGYYWSWIRQPPGKGLEWIGEIHHSGSTNYNPSLKSRVTISVDTSKNQFSLKLSSVTAADTAVYYCARLWYGSGSYYFDYWGQGTLVTVSS

SEQ ID NO: 14205 - protein, 120 aa, Homo sapiens
QVQLQQWGAGLLKPSETLSLTCAVSGGSFSGYYWTWIRQPPGKGLEWIGEIYHSGDTNYNPSLKSRVTISVDTSKNQFSLKLYSVTAADTAVYYCARLYFGSGIYYLDYWGQGTLVTVSS

SEQ ID NO: 14206 - protein, 124 aa, Homo sapiens
EVQLLESGGGLVQPGGSLRLSCAASGFTFSNYGMSWVRQAPGKGLEWVSAISGSAYSTYYADSVKGRFTISRDNSKNTLWLQMNSLRAEDTAVYYCAKAHYHGSGSYYTLFDYWGQGTLVTVSS

SEQ ID NO: 14207 - protein, 124 aa, Homo sapiens
EVQLLESGGGLVQPGGSLRLSCAASGFTFNNYGMNWVRQAPGKGLEWVSAISGTGYSTYYADSVKGRFTISRDNSKNTLYLQMNSLRAEDTAVYYCAKAHYFGSGSYYTLFDYWGQGTLVTVSS

SEQ ID NO: 14208 - protein, 124 aa, Homo sapiens
EVQLLESGGGLVQPGGSLRLSCAASGFTFTDYAMNWVRQAPGKGLEWVSTISGSGYATYYADSVKGRFTISRDNSKTTLYLQMNSLRAEDTAVYYCAKGHTLGSGSYYTLFDYWGQGTLVTVSS

SEQ ID NO: 14209 - protein, 124 aa, Homo sapiens
EVQLWESGGGSVQPGGSLRLSCAASGFTFSSYGMSWVRQAPGKGLEWVSGISGSGYSTYYADSVKGRFTISRDNSKNTLYLQMNSLRAEDTAVYYCAKGYYHGSGSYYTSFDYWGQGTLVTVSS

SEQ ID NO: 14210 - protein, 121 aa, Homo sapiens
QVQLVESGGGVVQTGRSLRLSCAASGFTFSSHAMHWVRQAPGKGLEWVAAISYDGSNKYYADSVKGRFTISRDNSKNTLYLQMNSLRAEDTAVYYCARGDYISSSGVFDYWGQGTLVTVSS

SEQ ID NO: 14211 - protein, 121 aa, Homo sapiens
QVQLVESGGGVVQPGRSLRLSCAASGFTFSSHAMHWVRQAPGKGLEWVAAISYDGSNKYYADSVKGRFTISRDNSKNTMYLQMNSLRAEDTAMCYCARGSITGSTGVFDYWGQGTLVTVSS

SEQ ID NO: 14212 - protein, 121 aa, Homo sapiens
QVQLVESGGGVVQPGRSLRLSCAASGFTFSSYAMHWVRQAPGKGLEWVAVISYDGSNEYYADSVKGRFTISRDNSKNTLYLQMNSLRAEDTAVYYCARGSIIGSTGVFDYWGQGTLVTVSS

SEQ ID NO: 14213 - protein, 121 aa, Homo sapiens
QVQVVESGGGVVQPGRSLRLSCAASGFTFSSYAMHWVRQAPGKGLEWVAVISYDGSYKYYADSVKGRFTISRDNSKNTLYLQMNSLRAEDTAVYYCARGSITGSTGVFDYWGQGTLVTVSS

SEQ ID NO: 14214 - protein, 121 aa, Homo sapiens
QVQLVESGGGVVQPGRSLRLSCAASGFTFSSYAIHWVRQAPGKGLEWVAVISYDGSNKYYADSVKGRFTISRDNSKNTLYLQMNSLRAEDTAVYYCARGSITGSTGVFDYWGQGTLVTVSS

SEQ ID NO: 14215 - protein, 108 aa, Artificial Sequence
  source: /note="Description of Artificial Sequence: Synthetic polypeptide"
DIQMTQSPSSLSASVGDRVTITCRASQGINNYLNWYQQKPGKAPKLLIYNTNNLQTGVPSRFSGSGSGTEFTLTISSLQPEDEATYYCLQHNSFPTFGQGTKLEIKRT

SEQ ID NO: 14216 - protein, 123 aa, Artificial Sequence
  source: /note="Description of Artificial Sequence: Synthetic polypeptide"
EVQLVQSGAEVKKPGESLKISCKGSGYSFTSYWIGWVRQMPGKGLEWMGIIYPGDSDTRYSPSFQGQVTISADKSISTAYLQWSSLKASDTAMYYCARHYYDSSGYSYFPDYWGQGTLVTVSS

SEQ ID NO: 14217 - protein, 125 aa, Artificial Sequence
  source: /note="Description of Artificial Sequence: Synthetic polypeptide"
QIQLVQSGAEVKKPGESLKISCRGSGYSFTSYWIGWVRQMPGKGLEWMGIIYPGDSDTRYSPSFQGQVTISADKSISTAYLQWSSLKASDTAMYYCARLSVAAAGTGGYNWFDPWGQGTLVTVSS

SEQ ID NO: 14218 - protein, 120 aa, Artificial Sequence
  source: /note="Description of Artificial Sequence: Synthetic polypeptide"
EVQLVESGGGLVKPGRSLRLSCTASGFTFGDYAMSWFRQAPGKGLEWVGFIRSKAYGGTTEYAASVKGRFTISRDDSKSIAYLQMNSLKTEDTAVYYCTRDLYPAMAEYWGQGTLVTVSS

SEQ ID NO: 14219 - protein, 128 aa, Artificial Sequence
  source: /note="Description of Artificial Sequence: Synthetic polypeptide"
EVQLVQSGAEVKKPGSSVKVSCKASGGTFSSYAISWVRQAPGQGLEWMGGIIPIFGTANYAQKFQGRVTITADKSTSTAYMELSSLRSEDTAVYYCARDSGYSYGYPMNYYYYYMDVWGKGTTVTVSS

SEQ ID NO: 14220 - protein, 123 aa, Artificial Sequence
  source: /note="Description of Artificial Sequence: Synthetic polypeptide"
EVQLVQSGAEVKKPGESLKISCKGSGYSFTSYWIGWVRQMPGKGLEWMGIIYPGDSDTRYSPSFQGQVTISADKSISTAYLQWSSLKASDTAMYYCARLVVGANPPTYYFDYWGQGTLVTVSS

SEQ ID NO: 14221 - protein, 119 aa, Artificial Sequence
  source: /note="Description of Artificial Sequence: Synthetic polypeptide"
EVKLVESGGGLVQPGGSLKLSCAASGFTFSSYTMSWVRQTPEKRLEWVAYISNGGGSTYYPDTVKGRFTISRDNAKNTLYLQMSSLKSEDTAMYYCARHLGGTASFDYWGQGTTVTVSS

SEQ ID NO: 14222 - protein, 119 aa, Artificial Sequence
  source: /note="Description of Artificial Sequence: Synthetic polypeptide"
EVQLVESGGGLVQPGGSLRLSCAASGFTFSSYTMSWVRQAPGKGLEWVAYISNGGGSTYYPDTVKGRFTISRDNAKNSLYLQMNSLRAEDTAVYYCARHLGGTASFDYWGQGTLVTVSS

SEQ ID NO: 14223 - protein, 120 aa, Mus musculus
EVQLVESGGDLVKPGGSLKLSCAASGFTFSSYGMSWVRLTPDKRLEWVATISGGGSYTYYPDSVKGRFTISRDIAKSTLYLQMSSLKSEDTAVYYCARKGNYGNYGKLAYWGQGTSVTVS

SEQ ID NO: 14224 - protein, 117 aa, Mus musculus
QVQLQQSGAELVKPGASVKVSCTASGYTFTNYWIHWVKQRPGQGLEWIGRIHPSDSDVHYNQRFRDKTTLTVDRSSSTAYMQLSSLTSEDSAVYYCAKSYYDSAMDYWGQGTSVTVS

SEQ ID NO: 14225 - protein, 117 aa, Mus musculus
EVQLQQSGPELVKPGASVKISCTASGYTFTDYYMNWVKQSHGKSLEWIGDINPNNGGTNYNQKWKGKATLTIHKSSSTAYMELRSLTSEDSAVYFCVPGGLRSYFDYWGQGTTLTVS

SEQ ID NO: 14226 - protein, 117 aa, Mus musculus
QIQLVQSGPERKKPGETVKISCKASGYTFTDYSIHWVKQAPGKGLKWMGWINTATGEPTHVDDFKGRFAFSLETSASTAYLQITNLKNEDTATYFCTAWAYEPYFDYWGQGTTLTVS

SEQ ID NO: 14227 - protein, 116 aa, Mus musculus
QVQLQQPGAELVKPGASVKLSCKASGYTFTSYWMHWVKQRPGQGLEWIGMIHPNSGSINYNEKFKNKATLTVVISSSTAYMQLSSLTSEDSAVYYCAGYGNGPMDYWGQGTSVTVS

SEQ ID NO: 14228 - protein, 119 aa, Mus musculus
QVQLQQSGAELVRPGTSVKMSCKASGYTFTNYWIGWAKQRPGHGLEWIGDILPGGGYTHYNEKFKGKATLTADKSSSTAFMQFSSLTSEDSAIYYCARGSSGYPYYFDYWGQGTTLTVS

SEQ ID NO: 14229 - protein, 116 aa, Mus musculus
EIQLQQSGPELVKPGASVKVSCKASGYSFTDYNIYWVKQSHGKSLEWIGYIDPYNGGTSYNQKFKGKATLTVDKSSSTAFMHLNSLTSEDSAVYYCARGAGYALDYWGQGTSVTVS

SEQ ID NO: 14230 - protein, 120 aa, Artificial Sequence [sequence omitted]

SEQ ID NO: 14231 - protein, 121 aa, Artificial Sequence [sequence omitted]

SEQ ID NO: 14232 - protein, 127 aa, Artificial Sequence
  source: /note="Description of Artificial Sequence: Synthetic polypeptide"
MVSTSQLLGLLLFWTSASRCDIVMTQSPATLSVTPGDRVSLSCRASQSINDYLYWYQQKLHESPRLLIKFASHSISGIPSRFSGSGSGSDFTLSINSVEPEDVGVYYCQNGHSFPLTFGAGTKLELK

SEQ ID NO: 14233 - protein, 136 aa, Artificial Sequence
  source: /note="Description of Artificial Sequence: Synthetic polypeptide"
MGWSRIFLFLLSIIAGVHCQVQLQQSGPELVKPGASVRISCKASGYTFTNYFLHWMKQRPGQGLEWIGWIYPGNVNTKYSEKFKGKATLTADKSSSTAYMQLSSLTSEDSAVYFCARSTYYSMDYWGQGTSVTVSS

SEQ ID NO: 14234 - protein, 118 aa, Artificial Sequence
  source: /note="Description of Artificial Sequence: Synthetic polypeptide"
EVQLLESGGGLVQPGGSLRLSCAASGFTFSYYYMQWVRQAPGKGLEWVSYIGSSGGVTNYADSVKGRFTISRDNSKNTLYLQMNSLRAEDTAVYYCARVGLGDAFDIWGQGTMVTVSS

SEQ ID NO: 14235 - protein, 118 aa, Artificial Sequence
  source: /note="Description of Artificial Sequence: Synthetic polypeptide"
EVQLLESGGGLVQPGGSLRLSCAASGFTFSYYYMQWVRQAPGKGLEWVSIIGSSGGVTNYADSVKGRFTISRDNSKNTLYLQMNSLRAEDTAVYYCARVGLGDAFDIWGQGTMVTVSS

SEQ ID NO: 14236 - protein, 118 aa, Artificial Sequence
  source: /note="Description of Artificial Sequence: Synthetic polypeptide"
EVQLLESGGGLVQPGGSLRLSCAASGFTFSYYYMQWVRQAPGKGLEWVSVIGSSGGVTNYADSVKGRFTISRDNSKNTLYLQMNSLRAEDTAVYYCARVGLGDAFDIWGQGTMVTVSS

SEQ ID NO: 14237 - protein, 116 aa, Artificial Sequence
  source: /note="Description of Artificial Sequence: Synthetic polypeptide"
QSVEESGGRLVTPGTPLTLTCTVSGFSLSAYAMSWVRQAPEKGLEWIAVIYVIGATDYASWAKGRFTISRTSTTVDLRIPSPTTEDTATYFCARVYDSVWNHFNLWGPGTLVTVSS

SEQ ID NO: 14238 - protein, 119 aa, Artificial Sequence
  source: /note="Description of Artificial Sequence: Synthetic polypeptide"
EVQLVESGGGLVQPGGSLRLSCAASGFTVSAYAMSWVRQAPGKGLEWVAVIYVIGATDYASSAKGRFTISRDNSKNTLYLQMNSLRAEDTAVYYCARVYDSVWNHFNLWGQGTLVTVSS

SEQ ID NO: 14239 - protein, 117 aa, Artificial Sequence
  source: /note="Description of Artificial Sequence: Synthetic polypeptide"
QSVEESGGRLVTPGTPLTLTCTVSGLTISSYYMSWVRQAPGKGLEWIGTINPGANTYFASWAKGRFTISRTSTTVDLKITSPTTEDTATYFCAREGDSNDWGVFDLWGQGTLVTVSS

SEQ ID NO: 14240 - protein, 117 aa, Artificial Sequence
  source: /note="Description of Artificial Sequence: Synthetic polypeptide"
QSLEESGGRLVQPGTPLTLSCTASGLTISSYYMSWVRQAPGKGLEWVGTINPGANTYFASSAKGRFTISRSSTTLDLKMTSPTAEDTATYYCAREGDSNDWGVFDLWGQGTLVTVSS

SEQ ID NO: 14241 - protein, 113 aa, Artificial Sequence
  source: /note="Description of Artificial Sequence: Synthetic polypeptide"
QSLEESGGRLVTPGTPLTLTCTVSGFSLNNYAVGWVRQAPGKGLEWIGIIYLSGNTDYANWAKGRFTISKTSTTVDLKITSPTTEDTATYFCARKFDTGYDIWGPGTLVTVSS

SEQ ID NO: 14242 - protein, 116 aa, Artificial Sequence
  source: /note="Description of Artificial Sequence: Synthetic polypeptide"
QSVEESGGRLVMPGTPLTLTCTVSGFSLSSNAISWVRQAPEKGLEWIGVIYVIGVTDYASWAQGRFTISKTSTTVDLKIPSPTTEDTATYFCARVYDSGWNHFNLWGPGTLVTVSS

SEQ ID NO: 14243 - protein, 120 aa, Artificial Sequence
  source: /note="Description of Artificial Sequence: Synthetic polypeptide"
QSVEESGGRLVTPGTPLTLTCTVSGIDLNSNGMSWVRQAPGEGLEWIGASSIDGTTYYTNWAKGRFTISKTSSTTVDLKITSPTTEDTATYFCTRGEYAGVVGSNYFDLWGQGTLVTVSS

SEQ ID NO: 14244 - protein, 122 aa, Artificial Sequence
  source: /note="Description of Artificial Sequence: Synthetic polypeptide"
EVQLVESGGGLVQPGGSLRLSCAASGFTVSSNGMSWVRQAPGKGLEWVGASSIDGTTYYTNSAKGRFTISRDNSKNTLYLQMNSLRAEDTAVYYCARGEYAGVVGSNYFDLWGQGTLVTVSS

SEQ ID NO: 14245 - protein, 128 aa, Artificial Sequence
  source: /note="Description of Artificial Sequence: Synthetic polypeptide"
QSMEESGGRLVTPGTPLTLTCTVSGFSLSDYALSWVRQAPGKGLEWIGMISSGDNTYYASWAKGRFTISKASTTVDLKITSPTTEDTATYFCARDKDASSGGYLVLDLLDVPDGMDLWGPGTLVTVSS

SEQ ID NO: 14246 - protein, 116 aa, Artificial Sequence
  source: /note="Description of Artificial Sequence: Synthetic polypeptide"
QSLEESGGRLVTPGGSLTLTCTVSGIDLSSNAISWVRQAPEKGLEWIAVIYVVGATDYASWAKGRFTISRTSTTVDLKMTSLTTEDTATYFCARVYDSGWNHFNLWGPGTLVTVSS

SEQ ID NO: 14247 - protein, 119 aa, Artificial Sequence
  source: /note="Description of Artificial Sequence: Synthetic polypeptide"
EVQLVESGGGLVQPGGSLRLSCAASGFTVSSNAISWVRQAPGKGLEWVAVIYVVGATDYASSAKGRFTISRDNSKNTLYLQMNSLRAEDTAVYYCARVYDSGWNHFNLWGQGTLVTVSS

SEQ ID NO: 14248 - protein, 116 aa, Artificial Sequence
  source: /note="Description of Artificial Sequence: Synthetic polypeptide"
QSVEESGGRLVTPGTPLTLTCTVSGFSLSNYAMTWVRQAPGKGLEWIGVISFGGNTYYANWAKGRFTISKTSTTVDLKITSPTTEDTATYFCARWDAENNEILNLWGQGTLVTVSS

SEQ ID NO: 14249 - protein, 116 aa, Artificial Sequence
  source: /note="Description of Artificial Sequence: Synthetic polypeptide"
QSVEESGGRLVTPGTPLTLTCTVSGFSLSNYAMTWVRQAPGKGLEWIGVISFGGNTYYANWAKGRFTISKTSTTVDLKITSPTTEDTATYFCARWDAENNEILNLWGPGTLVTVSS

SEQ ID NO: 14250 - protein, 119 aa, Artificial Sequence
  source: /note="Description of Artificial Sequence: Synthetic polypeptide"
QSVEESGGRLVTPGTPLTLTCTVSGIDLSNYAMGWVRQAPGKGLEYIGMIGVNGRAWYATWAKGRFTISKTSPTVDLKITSPTTEDTATYFCARLIDERSTYSYVFDLWGQGTLVTVSS

SEQ ID NO: 14251 - protein, 119 aa, Artificial Sequence
  source: /note="Description of Artificial Sequence: Synthetic polypeptide"
QSVEESGGRLVPPGTPLTLTCTVSGIDLSSYAMGWVRQAPGKGLEYIGMIDVSGSTYYADWAKGRLTISKTPTTVDLEITSPTTEDTATYFCARLIDERSTYSYAFDLWGQGTLVTVSS

SEQ ID NO: 14252 - protein, 120 aa, Artificial Sequence
  source: /note="Description of Artificial Sequence: Synthetic polypeptide"
QSLEESGGRLVTPGTPLTLTCTASGFSLSSYDMSWVRQAPGKGLEWIGIIYAGSASTWFASWVKGRFTISKTSTTVDLKMTSLTTEDTATYFCARVGYSGYGYDDNLDMWGQGTLVTVSS

SEQ ID NO: 14253 - protein, 118 aa, Artificial Sequence
  source: /note="Description of Artificial Sequence: Synthetic polypeptide"
QSVEESGGRLVTPGTPLTLTCTASGFSLSNYWMGWVRQAPGEGLEWIGTISYDGNTYYASWAKGRFTISRTSTTVDLKMTSLTTEDTAIYFCATVNYPDYSTGAFNIWGPGTLVTVSS

SEQ ID NO: 14254 - protein, 121 aa, Artificial Sequence
  source: /note="Description of Artificial Sequence: Synthetic polypeptide"
EVQLVESGGGLVQPGGSLRLSCAASGFTVSNYWMGWVRQAPGKGLEWIGTISYDGNTYYASSAKGRFTISRDNSKNTLYLQMNSLRAEDTAVYYCATVNYPDYSTGAFNIWGQGTLVTVSS

SEQ ID NO: 14255 - protein, 117 aa, Artificial Sequence
  source: /note="Description of Artificial Sequence: Synthetic polypeptide"
QSVEESGGRLVTPGTPLTLTCTVSGFSLSTYYMSWVRQAPGKGLEWIGIIYVSGITDYARWAKGRFTISKTSTTVDLKMTSLTTEDTATYFCARHIDSSGWDGLGIWGQGTLVTVSS

SEQ ID NO: 14256 - protein, 116 aa, Artificial Sequence
  source: /note="Description of Artificial Sequence: Synthetic polypeptide"
QSLEESGGRLVTPGTPLTLTCTASGFTIGRYYMSWVRQAPGKGLEWIGIIYTHGVNPDYASWAKGRFTISRPSTTVDLKITSPTTEDTATYFCARVGGFNDYSDIWGPGTLVTVSS

SEQ ID NO: 14257 - protein, 119 aa, Artificial Sequence
  source: /note="Description of Artificial Sequence: Synthetic polypeptide"
EVQLVESGGGLVQPGGSLRLSCAASGFTVGRYYMSWVRQAPGKGLEWIGIIYTHGVNPDYASSAKGRFTISRDNSKNTLYLQMNSLRAEDTAVYYCARVGGFNDYSDIWGQGTLVTVSS

SEQ ID NO: 14258 - protein, 118 aa, Artificial Sequence
  source: /note="Description of Artificial Sequence: Synthetic polypeptide"
QSLEESGGRLVTPGTPLTLTCTASGFSLSSYAMGWFRQAPGKGLEWIAYIFASGSTYYASWAKGRFTISKTSTTVELKITSLTTEDTATYFCARGSGARFFPNYFAIWGPGTLVTVSS

SEQ ID NO: 14259 - protein, 119 aa, Artificial Sequence
  source: /note="Description of Artificial Sequence: Synthetic polypeptide"
QSVEESGGRLVTPGTPLTLTCTVSGFSLSTYTMNWVRQAPGKGLEYIGFISSSSSIDYVSWAKGRFTISKTSTTVDLKITSPTTEDTATYFCARDFYADYIGGGYPYIWGPGTLVTVSS

SEQ ID NO: 14260 - protein, 123 aa, Artificial Sequence
  source: /note="Description of Artificial Sequence: Synthetic polypeptide"
QSLEESGGDLVKPGGTLTLTCTASGFSFSDDHYMCWVRQAPGKGLQWIACMYVGSSGATYYASWAKGRFTISKTSSTTVTLQMTSLTAADTATYFCARDDWTSYYAWGYWALWGPGTLVTVSS

SEQ ID NO: 14261 - protein, 119 aa, Artificial Sequence
  source: /note="Description of Artificial Sequence: Synthetic polypeptide"
EVQLVESGGGLVQPGGSLRLSCAASGFTVSSNAISWVRQAPGKGLEWVGVIYVIGVTDYASSAQGRFTISRDNSKNTLYLQMNSLRAEDTAVYYCARVYDSGWNHFNLWGQGTLVTVSS

SEQ ID NO: 14262 - protein, 115 aa, Artificial Sequence
  source: /note="Description of Artificial Sequence: Synthetic polypeptide"
EVQLQQSGTVLARPGASVKMSCKASGYIFTSYWVHWVKQRPGQGLEWIGGFYPGNSDSRYNQKFKGKATLTAVTSASTAYMDLSSLTNEDSAVYFCTRRDSPQYWGQGTTLTVSS

SEQ ID NO: 14263 - protein, 118 aa, Artificial Sequence
  source: /note="Description of Artificial Sequence: Synthetic polypeptide"
QVQLQQSGAELMKPGASVKISCKATGYTFSSSWIEWLKQRPGHGLEWIGEFLPGSGSTDYNEKFKGKATFTADTSSDTAYMLLSSLTSEDSAVYYCATDGNYDWFAYWGQGTLVTVSA

SEQ ID NO: 14264 - protein, 115 aa, Artificial Sequence
  source: /note="Description of Artificial Sequence: Synthetic polypeptide"
QVQLVQSGAEVKKPGASVKVSCKASGYIFTSYWVHWVRQAPGQRLEWMGGFYPGNSDSRYSQKFQGRVTITRDTSASTAYMELSSLRSEDTAVYYCTRRDSPQYWGQGTLVTVSS

SEQ ID NO: 14265 - protein, 118 aa, Artificial Sequence
  source: /note="Description of Artificial Sequence: Synthetic polypeptide"
QVQLVQSGAEVKKPGASVKVSCKASGYTFSSSWMHWVRQAPGQGLEWMGIFLPGSGSTDYAQKFQGRVTMTRDTSTSTVYMELSSLRSEDTAVYYCATDGNYDWFAYWGQGTLVTVSS

SEQ ID NO: 14266 - protein, 117 aa, Artificial Sequence
  source: /note="Description of Artificial Sequence: Synthetic polypeptide"
EVQLVESGGGLVKPGGSLKLSCAASGFTFTTYAMSWVRQTPEKRLEWVATISSGGTYTYYPDSVKGRFTISRDNAKNALYLQMSSLRSEDTAMYYCATQGNYSLDFWGQGTSLTVSS

SEQ ID NO: 14267 - protein, 114 aa, Artificial Sequence
  source: /note="Description of Artificial Sequence: Synthetic polypeptide"
EVQLVESGGGLVQPGGSLKLSCAASGFIFSSYGMSWVRQSPDRRLELVASINTFGDRTYYPDSVKGRFTISRDNAKNTLYLQMTSLKSEDTAIYYCARGTGTYWGQGTTLTVSS

SEQ ID NO: 14268 - protein, 117 aa, Artificial Sequence
  source: /note="Description of Artificial Sequence: Synthetic polypeptide"
QVQLQQSGAELVKPGASVKLSCKASGYTFTSYYMYWVKQRPGQGLEWIGEINPSNGGTNFNEKFKSKATLTVDKSSSTAYMQLSSLTSEDSAVYYCTRGGYYPFDYWGQGTTLTVSS

SEQ ID NO: 14269 - protein, 121 aa, Artificial Sequence
  source: /note="Description of Artificial Sequence: Synthetic polypeptide"
DVQLQESGPGLVKPSQSLSLTCTVTGYSITSDYAWNWIRQFPGNKLEWMGYISFSGYTSYNPSLKSRISVTRDTSRNQFFLQLTSVTTEDTATYYCAREVNYGDSYHFDYWGQGTIVTVSS

SEQ ID NO: 14270 - protein, 117 aa, Artificial Sequence
  source: /note="Description of Artificial Sequence: Synthetic polypeptide"
EVQLVESGGGLVKPGGSLRLSCAASGFTFTTYAMSWVRQAPGKGLEWVSSISSGGTYTYYADSVKGRFTISRDNAKNSLYLQMNSLRAEDTAVYYCATQGNYSLDFWGQGTTVTVSS

SEQ ID NO: 14271 - protein, 117 aa, Artificial Sequence
  source: /note="Description of Artificial Sequence: Synthetic polypeptide"
EVQLVESGGGLVKPGGSLRLSCAASGFTFTTYAMNWVRQAPGKGLEWVSSISSGGTYTYYADSVKGRFTISRDNAKNSLYLQMNSLRAEDTAVYYCATQGNYSLDFWGQGTTVTVSS

SEQ ID NO: 14272 - protein, 117 aa, Artificial Sequence
  source: /note="Description of Artificial Sequence: Synthetic polypeptide"
EVQLVESGGGLVKPGGSLRLSCAASGFTFTTYAMSWVRQAPGKGLEWVSTISSGGTYTYYADSVKGRFTISRDNAKNSLYLQMNSLRAEDTAVYYCATQGNYSLDFWGQGTTVTVSS

SEQ ID NO: 14273 - protein, 112 aa, Artificial Sequence
  source: /note="Description of Artificial Sequence: Synthetic polypeptide"
DVVMTQSPLSLPVTLGQPASISCRSSQSLLDSDGKTYLNWFQQRPGQSPRRLIYLVSNRDSGVPDRFSGSGSGTDFTLKISRVEAEDVGVYYCWQGTHFPQTFGGGTKVEIK

SEQ ID NO: 14274 - protein, 112 aa, Artificial Sequence
  source: /note="Description of Artificial Sequence: Synthetic polypeptide"
DVVMTQSPLSLPVTLGQPASISCRSSQSLLDSDGKTYLNWFQQRPGQSPRRLIYLVSKRDSGVPDRFSGSGSGTDFTLKISRVEAEDVGVYYCWQGTHFPQTFGGGTKVEIK

SEQ ID NO: 14275 - protein, 112 aa, Artificial Sequence
  source: /note="Description of Artificial Sequence: Synthetic polypeptide"
DVVMTQSPLSLPVTLGQPASISCRSSQSLLDSDGKTYLYWFQQRPGQSPRRLIYLVSNRDSGVPDRFSGSGSGTDFTLKISRVEAEDVGVYYCWQGTHSPYTFGQGTKLEIK

SEQ ID NO: 14276 - protein, 112 aa, Artificial Sequence
  source: /note="Description of Artificial Sequence: Synthetic polypeptide"
DVVMTQSPLSLPVTLGQPASISCRSSQSLLDSDGKTYLNWFQQRPGQSPRRLIYLVSNRDSGVPDRFSGSGSGTDFTLKISRVEAEDVGVYYCWQGTHSPYTFGQGTKLEIK

SEQ ID NO: 14277 - protein, 112 aa, Artificial Sequence
  source: /note="Description of Artificial Sequence: Synthetic polypeptide"
DVVMTQSPLSLPVTLGQPASISCRSSQSLLDSDGKTYLYWFQQRPGQSPRRLIYLVSERDSGVPDRFSGSGSGTDFTLKISRVEAEDVGVYYCWQGTHSPYTFGQGTKLEIK

SEQ ID NO: 14278 - protein, 115 aa, Artificial Sequence
  source: /note="Description of Artificial Sequence: Synthetic polypeptide"
QLVLTQSPSASASLGASVKLTCTLSSQHRTYTIEWHQQQPEKGPRYLMKVKKDGSHSKGDGIPDRFSGSSSGAERYLTISSLQSEDEADYYCGVGDAIKGQSVFVFGGGTKVEIK

SEQ ID NO: 14279 - protein, 115 aa, Artificial Sequence
  source: /note="Description of Artificial Sequence: Synthetic polypeptide"
QLVLTQSPSASASLGASVKLTCTLSSQHRTYTIAWHQQQPEKGPRYLMKVKKDGSHSKGDGIPDRFSGSSSGAERYLTISSLQSEDEADYYCGVGDAIKGQSVFVFGGGTKVEIK

SEQ ID NO: 14280 - protein, 115 aa, Artificial Sequence
  source: /note="Description of Artificial Sequence: Synthetic polypeptide"
QLVLTQSPSASASLGASVKLTCTLSSQHRTYTIEWHQQQPEKGPRYLMEVKKDGSHSKGDGIPDRFSGSSSGAERYLTISSLQSEDEADYYCGVGDAIKGQSVFVFGGGTKVEIK

SEQ ID NO: 14281 - protein, 123 aa, Mus musculus
QVQLQQSGAELVKPGASVKLSCKASGYTFTSYWMHWVKQRPGQGLEWIGEINPSNGRTNYNEKFKRKATLTVDKSSSTAYMQLSSLTSEDSAVYYFARGRPDYYGSSKWYFDVWGAGTTVTVS

SEQ ID NO: 14282 - protein, 137 aa, Artificial Sequence
  source: /note="Description of Artificial Sequence: Synthetic polypeptide"
MDIRLSLVFLVLFIKGVQCEVHLVESGGGLVQPGRSLKLSCAASGFTFSNYYMTWVRQAPTKGLEWVAYISSGGGSTYYRDSVKGRFTISRDNAKSTLYLQMDSLRSEDTATYYCTTEDYGYWFAYWGQGTLVTVSS

SEQ ID NO: 14283 - protein, 118 aa, Artificial Sequence
  source: /note="Description of Artificial Sequence: Synthetic polypeptide"
QVQLVESGGGVVQPGRSLRLSCAASGFTFSNYYMTWVRQAPGKGLEWVAYISSGGGSTYYRDSVKGRFTISRDNSKNTLYLQMNSLRAEDTAVYYCAREDYGYWFAYWGQGTLVTVSS

SEQ ID NO: 14284 - protein, 118 aa, Artificial Sequence
  source: /note="Description of Artificial Sequence: Synthetic polypeptide"
EVQLVESGGGVVQPGRSLRLSCAASGFTFSNYYMTWVRQAPTKGLEWVAYISSGGGSTYYRDSVKGRFTISRDNSKNTLYLQMNSLRAEDTAVYYCTTEDYGYWFAYWGQGTLVTVSS

SEQ ID NO: 14285 - protein, 122 aa, Homo sapiens
QVELVESGGGLVQPGGSLRLSCAASGFTFSNYWMHWVRQAPGKGLEWVSGISGWSSWTYYADSVKGRFTISRDNSKNTLYLQMNSLRAEDTAVYYCARFGIDAYTKVYFDYWGQGTLVTVSS

SEQ ID NO: 14286 - protein, 115 aa, Homo sapiens
QVELVESGGGLVQPGGSLRLSCAASGFTWSSFAMSWVRQAPGKGLEWVSYISYLGSYTGYADSVKGRFTISRDNSKNTLYLQMNSLRAEDTAVYYCARGTKFDYWGQGTLVTVSS

SEQ ID NO: 14287 - protein, 123 aa, Artificial Sequence
  source: /note="Description of Artificial Sequence: Synthetic polypeptide"
QVQLVQSGAEVVKPGASVKLSCKASGYTFTSYWMHWVKQRPGQGLEWIGEINPSNGRTNYNQKFQGKATLTVDKSSSTAYMQLSSLTSEDSAVYYFARGRPDYYGSSKWYFDVWGQGTTVTVS

SEQ ID NO: 14288 - protein, 122 aa, Homo sapiens
EVQLVESGGGLVQPGGSLRLSCAASGFTFSSYWMSWVRQAPGKGLEWVANIKQDGSEKYYVDSVKGRFTISRDNAKNSLYLQMNSLRAEDTAVYYCARGHDFGGNSGYFDYWGQGTLVTVSS

SEQ ID NO: 14289 - protein, 117 aa, Homo sapiens
QVQLVESGAEVKKPGASVKVSCKASGYTFTTYNMHWVRQAPGQGPEWMGVINPSGSSTSYAQKFQGRVTMTRDTSTSTVYMQLSSLRSEDTAVYYCARWSHEAFDIWGQGTMVTVSS

SEQ ID NO: 14290 - protein, 126 aa, Homo sapiens
EVQLVESGGGLVKPGGSLRLSCAASGFSISDYYMSWIRQAPGKGLEWVSYISSSSRYTNYADSVKGRFTISRDSAKNSLYLQMNSLRAEDTAVYYCAREGGGCNNTSCYGDGMDVWGQGTTVTVSS

SEQ ID NO: 14291 - protein, 120 aa, Homo sapiens
EVQLVESGGGLVQPGGSLRLSCAASGFTFSIYAMTWVRQAPGKGLEWVSSISGSSGYIYYADSLKGRFTISRDNAKNSLYLQMNSLRDEDTAVYYCARGWQGAYYGMDVWGQGTTVTVSS

SEQ ID NO: 14292 - protein, 113 aa, Homo sapiens
QLVQSGSEVKKPGASVKVSCKASGYTFTSYYMHWVRQAPGQGLEWMGIINPSGGSTSYAQKFQGRVTMTRDTSTSTVYMELSSLRSEDTAVYYCAVGGGGRYWGQGTTVTVSS

SEQ ID NO: 14293 - protein, 119 aa, Homo sapiens
QLVQSVAEVKKPGASLTVSCTASGYTFDDYLITWVRQAPGQGLEWLGWINTFNGKTNYAQKFQARVTMTRDTSTETAYLELASLTSDDTAVYYCARDYSGWYPFYLDFWGQGTLVTVSS

SEQ ID NO: 14294 - protein, 122 aa, Homo sapiens
QVQLVESGGGVVQPGRSLRLSCAASGFTFSRHDMYWVRQAPGKGLEWVAGIWYTGSKIFYADSVKGRFSISRDNSKNTLYLQMNSLRAEDTAVYYCAREFEAWSGYFGFDKWGQGTLVTVSS

SEQ ID NO: 14295 - protein, 126 aa, Homo sapiens
QVQLVQSGAEVKKPGASVKVSCKASSYTFTSNGISWVRQAPGQGLEWMGWINTYNGLTKYAQKLQGRLTMTTDTSTSTAYMELRSLRSDDTAVYYCARDRQRWLQGGGSGYGMDVWGQGTTVTVSS

SEQ ID NO: 14296 - protein, 122 aa, Homo sapiens
EVQLLESGGGLVQPGGSLRLSCAASGFTFSSYEMNWVRQAPGKGLEWVSYISTGDSTRSYADSVRGRFTISRDNAKNSLYLQMNSLRAEDTAVYYCARESGTWYGGWYFDLWGRGTLVTVSS

SEQ ID NO: 14297 - protein, 122 aa, Homo sapiens
QVQLVQSGAEVKKPGASVKVSCKGSGYNFPTQAIHWVRQAPGQRLEWMGWTNTANGNAKYSQKFQGRVTITRDTYASTDYMELSSLTSEDTAIYYCTRDRFTGSGTYGMDVWGQGTTVTVSS

SEQ ID NO: 14298 - protein, 121 aa, Homo sapiens
QVQLVQSGAEVMKPGASVKVSCKASGYTFTSYGISWVRQAPGQGLEWMGWISAYNGNTNYAQMLQGRVTMTTDTSTSTAYMELRSLRSDDTAVYYCARRGLSSYYYGMDVWGQGTTVTVSS

SEQ ID NO: 14299 - protein, 118 aa, Homo sapiens
QVQLVQSGAEVKKPGSSVKVSCKASGGSFNSFSISWVRQAPGQGLEWMGGITPMFGIGDNAQKFQDRVAITADESMSTFYMELSNLRFEDTAMYFCAREVGGLGFDVWGQGTTVTVSS

SEQ ID NO: 14300 - protein, 124 aa, Homo sapiens
EVQLVESGGGVVQPGRSLRLSCAASRFTFSNYAMHWVRQAPGKGLEWVAVISYDGSNKYYADSVKGRFTISRDNSKNTLYLQMNSLRAEDTAVYYCAREVLEYYYDSSGAFDIWGQGTMVTVSS

SEQ ID NO: 14301 - protein, 115 aa, Homo sapiens
QVQLVQSGAEVKKPGTSVKVSCKASGGAFNRFPISWVRQAPGQGLEWMGWISPNGGNTNYAQKFQGRVTMTRDTSINTAYMEVSSLTSDDTAVYYCTQGRVAFVWGQGTLVTVSS

SEQ ID NO: 14302 - protein, 119 aa, Homo sapiens
QVQLVQSGGGVVQPGRSLRLSCAASGFTFSSYAMHWVRQAPGKGLEWVAVISYDGSNKYYADSVKGRFTISRDNSKNTLYLQMNSLRAEDTAVYYCARELWYGEGFDPWGQGTLVTVSS

SEQ ID NO: 14303 - protein, 121 aa, Artificial Sequence
  source: /note="Description of Artificial Sequence: Synthetic polypeptide"
QVQLQESGGGVVQPGRSLRLSCSASGFTFSDYYMYWVRQAPGKGLEWVAYITNYGGSTYYPDTVKGRFTISRDNAKNTLFLQMDSLRPEDTGVYFCARQSNYDYDGWFAYWGQGTPVTVSS

SEQ ID NO: 14304 - protein, 125 aa, Artificial Sequence
  source: /note="Description of Artificial Sequence: Synthetic polypeptide"
EVQLLESGGGLVQPGGSLRLSCAASGFTFSSYAMSWVRQAPGKGLEWVSAISGSGGITYYADSVKGRFTISRDNSKNTLYLQMNSLRAEDTAVYYCAKDLGYGDFYYYYYGMDVWGQGTTVTVSS

SEQ ID NO: 14305 - protein, 124 aa, Homo sapiens
QLQLQESGPGLVKPSETLSLTCTVSGGSIRSSSYYWGWIRQPPGKGLEWIGGIYYSGSTYYNPSLKSRVTMSVDTSKNQFSLKLSSVTAADTAVYYCARQRGHSSGWWYFDLWGRGTLVTVSSA

SEQ ID NO: 14306 - protein, 121 aa, Homo sapiens; identical to SEQ ID NO: 7209

SEQ ID NO: 14307 - protein, 120 aa, Homo sapiens
QVQLQESGPGLVKPSETLSLTCTVSGGSISSYYWSWIRQPPGRGLEWIGYFFYSGYTNYNPSLKSRVTMSVDTSKNQFSLKLSSVTAADTAVYYCACITGTTKGGMDVWGQGATVTVSSA

SEQ ID NO: 14308 - protein, 120 aa, Homo sapiens
QVQLQESGPGLVKPSETLSLTCTVSGGSISSYYWSWIRQPPGKGLEWIGYFFYSGYTNYNPSLKSRVTISVDTSKNQFSLKLSSVTAADTAVYYCACITGTTKGGMDVWGQGTTVTVSSA

SEQ ID NO: 14309 - protein, 124 aa, Homo sapiens
QLQLQESGPGLVKPSETLSLTCTVSGGSINSSSNYWGWIRQPPGKGLAWIGGIYYSGSTYYNPSLRSRVTMSVDTSKNQFSLKLSSVTAADTAVYYCARQRGHSSGWWYFDLWGRGTLVTVSSA

SEQ ID NO: 14310 - protein, 198 aa, Homo sapiens
TMKHLWFFLLLVAAPRWVLSQLQLQESGPGLVKPSETLSLTCTVSGGSIRSSSYYWGWIRQPPGKGLEWIGGIYYSGSTYYNPSLKSRVTMSVDTSKNQFSLKLSSVTAADTAVYYCARQRGHSSGWWYFDLWGRGTLVTVSSASTKGPSVFPLAPCSRSTSESTAALGCLVKDYFPEPVTVSWNSGALTSGVHTFPA

SEQ ID NO: 14311 - protein, 145 aa, Homo sapiens
TMDWTWRILFLVAAATSAHSQVQLVQSGAEVKKPGASVKVSCKASGYTFTSYDINWVRQATGQGLEWMGWMNPNSGNTGYAQKFQGRVTMTRNTSISTAYMELSSLRSEDTAVYYCARDPYYYYYGMDVWGQGTTVTVSSASTKG

SEQ ID NO: 14312 - protein, 204 aa, Homo sapiens
TMKHLWFFLLLVAAPRWVLSQVQLQESGPGLVKPSETLSLTCTVSGGSISSYYWSWIRQPPGRGLEWIGYFFYSGYTNYNPSLKSRVTMSVDTSKNQFSLKLSSVTAADTAVYYCACITGTTKGGMDVWGQGATVTVSSASTKGPSVFPLAPCSRSTSESTAALGCLVKDYFPEPVTVSWNSGALTSGVHTFPAVLQSSGLYSL

SEQ ID NO: 14313 - protein, 181 aa, Homo sapiens
MKHLWFFLLLVAAPRWVLSQVQLQESGPGLVKPSETLSLTCTVSGGSISSYYWSWIRQPPGKGLEWIGYFFYSGYTNYNPSLKSRVTISVDTSKNQFSLKLSSVTAADTAVYYCACITGTTKGGMDVWGQGTTVTVSSASTKGPSVFPLAPCSRSTSESTAALGCLVKDYFPEPVTVSWNS

SEQ ID NO: 14314 - protein, 186 aa, Homo sapiens
TMKHLWFFLLLVAAPRWVLSQLQLQESGPGLVKPSETLSLTCTVSGGSINSSSNYWGWIRQPPGKGLAWIGGIYYSGSTYYNPSLRSRVTMSVDTSKNQFSLKLSSVTAADTAVYYCARQRGHSSGWWYFDLWGRGTLVTVSSASTKGPSVFPLAPCSRSTSESTAALGCLVKDYFPEPVTVSWNS

SEQ ID NO: 14315 - protein, 127 aa, Mus musculus
LLTAIPGILSDVQLQESGPGLVKPSQSLSLTCSVTGYSITGGYLWNWIRQFPGNKLEWMGYISYDGTNNYKPSLKDRISITRDTSKNQFFLKLNSVTNEDTATYYCARYGRVFFDYWGQGTTLTVSS

SEQ ID NO: 14316 - protein, 130 aa, Mus musculus
EVQLVESGGGLVPPGGSLKLSCAASGFIFSSYGMSWVRQTPGKSLELVATINNNGDSTYYPDSVKGRFTISRDNAKNTLYLQMSSLKSEDTAMFYCARALISSATWFGYWGQGTLVTVSAAKTTAPSVYP

SEQ ID NO: 14317 - protein, 135 aa, Mus musculus
EIQLQQSGPELMKPGASVKISCKASGYSFSSHYMHWVKQSHGKSLEWIGYIDPSNGETTYNQKFKGKATLTVDTSSSTANVHLSSLTSDDSAVYFCARGDYRYNGDWFFDVWGAGTTVTVSSAKTDSPIGLSGPI

SEQ ID NO: 14318 - protein, 117 aa, Artificial Sequence
  source: /note="Description of Artificial Sequence: Synthetic polypeptide"
EVQLVESGGGLVQPGGSLRLSCAASGYSFSSHYMHWVRQAPGKGLEWVGYIDPSNGETTYNQKFKGRFTISRDNSKNTLYLQMNSLRAEDTAVYYCAARGDYRYNGDWFFDVWGQGT

SEQ ID NO: 14319 - protein, 119 aa, Homo sapiens
EVQLLESGGGLVQPGGSLRLSCAASGFTFSSYGMVWVRQAPGKGLEWVSSISSSGGLTWYADSVKGRFTISRDNSKNTLYLQMNSLRAEDTAVYYCASPPGIAVARDYWGQGTLVTVSS

SEQ ID NO: 14320 - protein, 125 aa, Homo sapiens
EVQLLESGGGLVQPGGSLRLSCAASGFTFSRYNMWWVRQAPGKGLEWVSVIRSSGGYTGYADSVKGRFTISRDNSKNTLYLQMNSLRAEDTAVYYCARWNSGYSYWDYYYGMDVWGQGTTVTVSS

SEQ ID NO: 14321 - protein, 116 aa, Homo sapiens
EVQLLESGGGLVQPGGSLRLSCAASGFTFSPYMMVWVRQAPGKGLEWVSWISPSGGYTFYADSVKGRFTISRDNSKNTLYLQMNSLRAEDTAVYYCAYGTYPLTYWGQGTLVTVSS

SEQ ID NO: 14322 - protein, 130 aa, Homo sapiens
EVQLLESGGGLVQPGGSLRLSCAASGFTFSNYYMMWVRQAPGKGLEWVSVIGSSGGMTNYADSVKGRFTISRDNSKNTLYLQMNSLRAEDTAVYYCARGYPTGYYDSSGWVYSYYGIDVWGQGTTVTVSS

SEQ ID NO: 14323 - protein, 123 aa, Homo sapiens
EVQLLESGGGLVQPGGSLRLSCAASGFTFSMYSMQWVRQAPGKGLEWVSVIGSSGGQTGYADSVKGRFTISRDNSKNTLYLQMNSLRAEDTAVYYCARVRDYYGSGSYYLDPWGQGTLVTVSS

SEQ ID NO: 14324 - protein, 117 aa, Homo sapiens
EVQLLESGGGLVQPGGSLRLSCAASGFTFSWYSMSWVRQAPGKGLEWVSSISSSGGPTHYADSVKGRFTISRDNSKNTLYLQMNSLRAEDTAVYYCARDSSYSGTSWGQGTLVTVSS

SEQ ID NO: 14325 - protein, 120 aa, Homo sapiens
EVQLLESGGGLVQPGGSLRLSCAASGFTFSYYPMMWVRQAPGKGLEWVSSIWPSGGFTKYADSVKGRFTISRDNSKNTLYLQMNSLRAEDTATYYCARVSSSSWYGYLYWGQGTLVTVSS

SEQ ID NO: 14326 - protein, 119 aa, Homo sapiens
EVQLLESGGGLVQPGGSLRLSCAASGFTFSWYSMWWVRQAPGKGLEWVSSIVSSGGQTRYADSVKGRFTISRDNSKNTLYLQMNSLRAEDTAVYYCARVKGYYYYIDVWGKGTTVTVSS

SEQ ID NO: 14327 - protein, 123 aa, Homo sapiens
EVQLLESGGGLVQPGGSLRLSCAASGFTFSWYRMNWVRQAPGKGLEWVSSIYSSGGPTNYADSVKGRFTISRDNSQNTLYLQMNSLRAEDTAVYYCTREKPDYYDSSGYLDYWGQGTLVTVSS

SEQ ID NO: 14328 - protein, 116 aa, Homo sapiens
EVQLLESGGGLVQPGGSLRLSCAASGFTFSSYAMSWVRQAPGKGLEWVSAISGSGGSTYYADSVKGRFTISRDNSKNTLYLQMNSLRAEDTAVYYCAKRDTAMGVWGQGTLVTVSS

SEQ ID NO: 14329 - protein, 117 aa, Artificial Sequence
  source: /note="Description of Artificial Sequence: Synthetic polypeptide"
DVQLQESGPGLVKPSQSLSLTCTVTGYSITSDYVWNWIRQFPGNKLEWMGYIGHSGRTSYNPSLKSRISITRDTSKNQFFLQLNSVTSEDTATYYCARGGNNGFAYWGQGTLVTVSA

SEQ ID NO: 14330 - protein, 115 aa, Artificial Sequence
  source: /note="Description of Artificial Sequence: Synthetic polypeptide"
EVMVVESGGGLVKPGGSLKLSCAASGFTFRTNAMSWVRQTPEKRLEWVATITSGGGSTYYPVSVKGRFTISRDNAKNTLYLQMSSLRSEDTAIYYCVRQDYFDYWGQGTFVIVSS

SEQ ID NO: 14331 - protein, 122 aa, Artificial Sequence
  source: /note="Description of Artificial Sequence: Synthetic polypeptide"
  MOD_RES (20)..(20): Any amino acid
DVKLVESGGGLVKPGGSLKXSCVASGFTFSSYTMSWVRQTPEKRLEWVATITSGGGSSYYPDSVKGRFTISRDNAKNTLYLQITSLKSEDTAMYYCTSGGGVLLRLPLFAYWGQGTTLTVSS

SEQ ID NO: 14332 - protein, 119 aa, Artificial Sequence [sequence omitted]

SEQ ID NO: 14333 - protein, 122 aa, Artificial Sequence
  source: /note="Description of Artificial Sequence: Synthetic polypeptide"
QVQLKESGPALVKPTQTLTLTCTFSGFSLSTSGMVVSWIRQPPGKALEWLAFISWDDDKYYSTSLKTRLTISKDTSKNQVVLTMTNMDPVDTATYYCAREPGRYGGYYFDYWGQGTLVTVSS

SEQ ID NO: 14334 - protein, 122 aa, Artificial Sequence
  source: /note="Description of Artificial Sequence: Synthetic polypeptide"
QVQLQESGPGLVKPGETLSLTCTVSGGSISGYYWSWIRQAPGKGLEWIGEIYYAGSTLYNPSLKGRVTISVDTSKNQFSLKLSSVTAEDTAVYYCARHYGLDWFGDTGMDVWGQGTLVTVSS

SEQ ID NO: 14335 - protein, 109 aa, Artificial Sequence
  source: /note="Description of Artificial Sequence: Synthetic polypeptide"
DIELTQPPSVSVAPGQTARISCSGDNLGEQYVHWYQQKPGQAPVLVIYDDSERPSGIPERFSGSNSGNTATLTISGTQAEDEADYYCQSYTFYPNSRVFGGGTKLTVLG

SEQ ID NO: 14336 - protein, 123 aa, Artificial Sequence
  source: /note="Description of Artificial Sequence: Synthetic polypeptide"
QVQLVQSGGGLVKPGRSLRLSCTASGFTFGDYAMSWFRQAPGKGLEWVGFIRSKAYGGTTEYAASVKGRFTISRDDSKSIAYLQMNSLKTEDTAVYYCTRGSSGWFLNWFDPWGQGTLVTVSS

SEQ ID NO: 14337 - protein, 119 aa, Mus sp.
EVQLQESGPELVKPGASVKMSCKASGYTFPSYVLHWVKQKPGQGLEWIGYINPYNDGTQYNEKFKGKATLTSDKSSSTAYMELSRLTSEDSAVYYCARGFGGSYGFAYWGQGTLITVSA

SEQ ID NO: 14338 - protein, 119 aa, Artificial Sequence
  source: /note="Description of Artificial Sequence: Synthetic polypeptide"
QVQLQESGPELVKPGASVKMSCKASGYTFPSYVLHWVKQKPGQGLEWIGYINPYNDGTQYNEKFKGKATLTSDKSSSTAYMELSRLTSEDSAVYYCARGFGGSYGFAYWGQGTLITVSS

SEQ ID NO: 14339 - protein, 107 aa, Homo sapiens
VQLVQSGAEVKKPGSSVKVSCKASGGTFSSYAISWVRQAPGQGLEWMGGIIPIFGTANYAQKFQGRVTITADESTSTAYMELSSLRSEDTAVYYCARGPRLLADVLL

SEQ ID NO: 14340 - protein, 11 aa, Homo sapiens
WGQGTLVTVSS

SEQ ID NO: 14341 - protein, 119 aa, Artificial Sequence
  source: /note="Description of Artificial Sequence: Synthetic polypeptide"
QVQLQQSGAEVKKPGASVKVSCEASGYTFPSYVLHWVKQAPGQGLEWIGYINPYNDGTQYNEKFKGKATLTRDTSINTAYMELSRLRSDDTAVYYCARGFGGSYGFAYWGQGTLVTVSS

SEQ ID NO: 14342 - protein, 123 aa, Homo sapiens
EVQLVESGGGLVQPGGSLRLSCAASGFTLRSYSMNWVRQAPGKGLEWVSYISRSSHTIFYADSVKGRFTISRDNAKNSLYLQMDSLRDEDTAMYYCARVYSSGWHVSDYFDYWGQGILVTVSS

SEQ ID NO: 14343 - protein, 449 aa, Homo sapiens
EVQLVESGGGLVQPGGSLRLSCAASGFTLRSYSMNWVRQAPGKGLEWVSYISRSSHTIFYADSVKGRFTISRDNAKNSLYLQMDSLRDEDTAMYYCARVYSSGWHVSDYFDYWGQGILVTVSSASTKGPSVFPLAPCSRSTSESTAALGCLVKDYFPEPVTVSWNSGALTSGVHTFPAVLQSSGLYSLSSVVTVPSSNFGTQTYTCNVDHKPSNTKVDKTVERKCCVECPPCPAPPVAGPSVFLFPPKPKDTLMISRTPEVTCVVVDVSHEDPEVQFNWYVDGVEVHNAKTKPREEQFNSTFRVVSVLTVVHQDWLNGKEYKCKVSNKGLPAPIEKTISKTKGQPREPQVYTLPPSREEMTKNQVSLTCLVKGFYPSDIAVEWESNGQPENNYKTTPPMLDSDGSFFLYSKLTVDKSRWQQGNVFSCSVMHEALHNHYTQKSLSLSPGK

SEQ ID NO: 14344 - protein, 453 aa, Homo sapiens
EVQLVESGGGLVQPGGSLRLSCAASGFTLRSYSMNWVRQAPGKGLEWVSYISRSSHTIFYADSVKGRFTISRDNAKNSLYLQMDSLRDEDTAMYYCARVYSSGWHVSDYFDYWGQGILVTVSSASTKGPSVFPLAPSSKSTSGGTAALGCLVKDYFPEPVTVSWNSGALTSGVHTFPAVLQSSGLYSLSSVVTVPSSSLGTQTYICNVNHKPSNTKVDKKVEPKSCDKTHTCPPCPAPELLGGPSVFLFPPKPKDTLMISRTPEVTCVVVDVSHEDPEVKFNWYVDGVEVHNAKTKPREEQYNSTYRVVSVLTVLHQDWLNGKEYKCKVSNKALPAPIEKTISKAKGQPREPQVYTLPPSRDELTKNQVSLTCLVKGFYPSDIAVEWESNGQPENNYKTTPPVLDSDGSFFLYSKLTVDKSRWQQGNVFSCSVMHEALHNHYTQKSLSLSPGK

SEQ ID NO: 14345 - protein, 450 aa, Homo sapiens
EVQLVESGGGLVQPGGSLRLSCAASGFTLRSYSMNWVRQAPGKGLEWVSYISRSSHTIFYADSVKGRFTISRDNAKNSLYLQMDSLRDEDTAMYYCARVYSSGWHVSDYFDYWGQGILVTVSSASTKGPSVFPLAPCSRSTSESTAALGCLVKDYFPEPVTVSWNSGALTSGVHTFPAVLQSSGLYSLSSVVTVPSSSLGTKTYTCNVDHKPSNTKVDKRVESKYGPPCPSCPAPEFLGGPSVFLFPPKPKDTLMISRTPEVTCVVVDVSQEDPEVQFNWYVDGVEVHNAKTKPREEQFNSTYRVVSVLTVLHQDWLNGKEYKCKVSNKGLPSSIEKTISKAKGQPREPQVYTLPPSQEEMTKNQVSLTCLVKGFYPSDIAVEWESNGQPENNYKTTPPVLDSDGSFFLYSRLTVDKSRWQEGNVFSCSVMHEALHNHYTQKSLSLSLGK

SEQ ID NO: 14346 - protein, 125 aa, Homo sapiens
EVQLVQSGAEVKKPGESLKISCKGSGYNFTTYWIGWVRQMPGKGLEWMGIIYPGDSDTKYSPSFQGQVTISADKSISTAYLQWSSLKASDTAMYYCARNYYGSGTYYYYYGMNVWGQGTTVTVSS

SEQ ID NO: 14347 - protein, 127 aa, Homo sapiens
EVQLVESGGGLVQPGRSLRLSCTASGFTFEDYAMHWVRQAPGKGLEWVSGISWNRGIIGYADSVKGRFTVSRDNAKNSLYLQMNSLRAEDTALYYCAKEGYYGSGRPGYFYYVMDVWGQGTTVTVSS

SEQ ID NO: 14348 - protein, 127 aa, Homo sapiens
EVQLVESGGGLVQPGRSLRLSCAASGFIFDDYAMHWVRQAPGKGLEWVSGISWNRGIIGYAGSVKGRFTISRDNAKNSLYLQMNSLRAEDTALYYCVKEGYYGSGRPGYFYYVMDVWGQGTTVTVSS

SEQ ID NO: 14349 - protein, 121 aa, Homo sapiens
EVQLVESGGGLVQPGRSLRLSCAASGFIFDDYAMHWVRQAPGKGLEWVSGITWNSGILGYADSVKGRFTISRDDAKNSLYLQMNSLRAEDTALYYCAKEEGSGRYYNFDYWGQGTLVTVSS

SEQ ID NO: 14350 - protein, 124 aa, Homo sapiens
EVQLVESGGGVVRPGGSLRLSCAASGFTFDDYGMNWVRQAPGKGLEWVSDINWNGGSTGYADSVKGRFTISRDNAKNSLYLQMNSLRAEDTALYYCAREQWLDPYYYYYGMDVWGQGTTVTVSS

SEQ ID NO: 14351 - protein, 107 aa, Homo sapiens
EIVLTQSPATLSLSPGERATLSCRASQGVSSYLAWYQQKPGQAPRLLIYDASNRATGIPARFSGSGPGTDFTLTISSLEPEDFAVYYCQQRSNWHRTFGQGTKVEIK

SEQ ID NO: 14352 - protein, 116 aa, Artificial Sequence
  source: /note="Description of Artificial Sequence: Synthetic polypeptide"
QVQLQQWGAGLLKPSETLSLTCAVYGGSFSDYYWSWIRQPPGKGLEWIGEINHTGSTNYNPSLKSRVTISVDTSQNHFSLKLRSVTAADTALYYCAREEVIWFDSWGQGTLVTVSS

SEQ ID NO: 14353 - protein, 122 aa, Artificial Sequence
  source: /note="Description of Artificial Sequence: Synthetic polypeptide"
EVQLVESGGGLVQPGGSLRLSCAASGFTFSSYDIHWVRQATGKGLEWVSAIGAAGDTYYSGSVKGRFTISRENAKNSLYLEMNKLRAGDTAVYYCAREGTGTTNYYYGMDVWGQGTTVTVSS

SEQ ID NO: 14354 - protein, 122 aa, Artificial Sequence
  source: /note="Description of Artificial Sequence: Synthetic polypeptide"
EVQLVESGGGLVQPGGSLRLSCAASGFTFRAYDMHWVRQTAGKGLEWVSAIGSAGDTYYSGSVKGRFTISRENAKKSLYLQMNSLRAGDTAVYFCAREATGTTNYYYGMDVWGQGTTVTVSS

SEQ ID NO: 14355 - protein, 122 aa, Artificial Sequence
  source: /note="Description of Artificial Sequence: Synthetic polypeptide"
EVQLVESGGGLIQPGGSLRLSCAASGFTFSNFDMHWVRQATGKGLEWVAAIGSAGDTYYPDSVRGRFTISRENAKNSLFLQMNSLRDGDTAVYYCAREGTGTTNYYYGMDVWGQGTTVTVSS

SEQ ID NO: 14356 - protein, 122 aa, Artificial Sequence
  source: /note="Description of Artificial Sequence: Synthetic polypeptide"
EVQLVESGGGLEQPGGSLRLSCVASGFTFSNYDMHWVRQATGKGLEWVSAIGAAGDTYYSGSVKGRFTIARENGKNSLYLQMNGLRAGDTAVYYCAREGTGTTNYYYGMDVWGQGTTVTVSS

SEQ ID NO: 14357 - protein, 119 aa, Artificial Sequence
  source: /note="Description of Artificial Sequence: Synthetic polypeptide"
QVQLVQSGAEVKKPGASVKVSCKVSGFTLTELSMHWVRQAPGKGLEWMGGFDPEDGETIYAQKFQGRVTMTEDTSTDTAYMELSSLRSEDTAVYYCSTIFGVVTNFDNWGQGTLVTVSS

SEQ ID NO: 14358 - protein, 119 aa, Artificial Sequence [sequence omitted]

SEQ ID NO: 14359 - protein, 119 aa, Artificial Sequence
  source: /note="Description of Artificial Sequence: Synthetic polypeptide"
EVQLVQSGAEVKKPGASVKVSCKVSGYTLTELSIHWVRQAPGKGLEWMGGFDPEHGTTIYAQKFQGRVTMTEDTSTDTAYMELSSLRSEDTAVYYCVMIFGVVTNFDNWGQGTTVTVSS

SEQ ID NO: 14360 - protein, 119 aa, Artificial Sequence
  source: /note="Description of Artificial Sequence: Synthetic polypeptide"
QVQLVQSGAEVKKPGASVKVSCKVSGYTLTELSMHWVRQAPGKGLEWMGGFDPEHGTTIYAQKFQGRVTMTEDTSTDTAYMELSSLRSEDTAVYYCVMIFGVVTNFDNWGQGTLVTVSS

SEQ ID NO: 14361 - protein, 119 aa, Artificial Sequence
  source: /note="Description of Artificial Sequence: Synthetic polypeptide"
QVQLVQSGAEVKKPGASVKVSCKVSGYTLTELSIHWVRQAPGKGLEWMGGFDPEHGTTIYAQKFQGRVTMTEDTSTDTAYMELSSLRSEDTAVYYCVMIFGVVTNFDNWGQGTLVTVSS

SEQ ID NO: 14362 - protein, 119 aa, Artificial Sequence
  source: /note="Description of Artificial Sequence: Synthetic polypeptide"
EVQLVQSGAEVKKPGASVKVSCKVSGFTLTELSIHWVRQAPGKGLEWMGGFDPEDGETIYAQKFQGRVTMTEDTSTDTACMELSSLRSEDTAVYYCSTIFGVVTNFDNWGQGTLVTVSS

SEQ ID NO: 14363 - protein, 119 aa, Artificial Sequence
  source: /note="Description of Artificial Sequence: Synthetic polypeptide"
QVQLVQSGAEVKKPGASVKVSCKVSGFTLTELSIHWVRQAPGKGLEWMGGFDPEDGETIYAQKFQGRVTMTEDTSTDTACMELSSLRSEDTAVYYCSTIFGVVTNFDNWGQGTLVTVSS

SEQ ID NO: 14364 - protein, 119 aa, Artificial Sequence
  source: /note="Description of Artificial Sequence: Synthetic polypeptide"
EVQLVQSGAEVKKPGASVKVSCKVSGFTLNELSIHWVRQAPGKGLEWMGGFDPEDGEVIYAQKFQGRVTMTEDTSTDTAYMELRSLRSEDTAVFYCVMIFGVVTNFDNWGQGTTVTVSS

SEQ ID NO: 14365 - protein, 119 aa, Artificial Sequence
  source: /note="Description of Artificial Sequence: Synthetic polypeptide"
QVQLVQSGAEVKKPGASVKVSCKVSGFTLNELSMHWVRQAPGKGLEWMGGFDPEDGEVIYAQKFQGRVTMTEDTSTDTAYMELSSLRSEDTAVYYCVMIFGVVTNFDNWGQGTLVTVSS

SEQ ID NO: 14366 - protein, 119 aa, Artificial Sequence
  source: /note="Description of Artificial Sequence: Synthetic polypeptide"
QVQLVQSGAEVKKPGASVKVSCKVSGFTLNELSIHWVRQAPGKGLEWMGGFDPEDGEVIYAQKFQGRVTMTEDTSTDTAYMELRSLRSEDTAVFYCVMIFGVVTNFDNWGQGTLVTVSS

SEQ ID NO: 14367 - protein, 119 aa, Artificial Sequence
  source: /note="Description of Artificial Sequence: Synthetic polypeptide"
EVQLVQSGTEVKKPGASVKVSCKVSGYTLTELSMYWVRQAPGKGLEWMGGFDPEHGETIYAQKFQGRVTMTEDSSTDTAYMELSSLRSEDTAVYYCAMIFGVVTNFDSWGLGTLVTVSS

SEQ ID NO: 14368 - protein, 119 aa, Artificial Sequence
  source: /note="Description of Artificial Sequence: Synthetic polypeptide"
QVQLVQSGAEVKKPGASVKVSCKVSGYTLTELSMHWVRQAPGKGLEWMGGFDPEHGETIYAQKFQGRVTMTEDTSTDTAYMELSSLRSEDTAVYYCAMIFGVVTNFDSWGQGTLVTVSS

SEQ ID NO: 14369 - protein, 119 aa, Artificial Sequence
  source: /note="Description of Artificial Sequence: Synthetic polypeptide"
QVQLVQSGTEVKKPGASVKVSCKVSGYTLTELSMYWVRQAPGKGLEWMGGFDPEHGETIYAQKFQGRVTMTEDSSTDTAYMELSSLRSEDTAVYYCAMIFGVVTNFDSWGLGTLVTVSS

SEQ ID NO: 14370 - protein, 125 aa, Artificial Sequence
  source: /note="Description of Artificial Sequence: Synthetic polypeptide"
EVQLVQSGGGLVQPGRSLRLSCAAPGFNFDDYAMHWVRQTPGKGLEWVSGISWNSGTIGYADSVKGRFTISRDNAKNSLYLQMNSLRPEDTALYYCAKEGVWFGKLFSSYGMDVWGQGTTVTVSS

SEQ ID NO: 14371 - protein, 125 aa, Artificial Sequence
  source: /note="Description of Artificial Sequence: Synthetic polypeptide"
EVQLVESGGGLVQPGRSLRLSCAAPGFNFDDYAMHWVRQAPGKGLEWVSGISWNSGTIGYADSVKGRFTISRDNAKNSLYLQMNSLRAEDTALYYCAKEGVWFGKLFSSYGMDVWGQGTTVTVSS

SEQ ID NO: 14372 - protein, 125 aa, Artificial Sequence
  source: /note="Description of Artificial Sequence: Synthetic polypeptide"
EVQLVESGGGLVQPGRSLRLSCAASGFNFDDYAMHWVRQAPGKGLEWVSGISWNSGTIGYADSVKGRFTISRDNAKNSLYLQMNSLRAEDTALYYCAKEGVWFGKLFSSYGMDVWGQGTTVTVSS

SEQ ID NO: 14373 - protein, 125 aa, Artificial Sequence
  source: /note="Description of Artificial Sequence: Synthetic polypeptide"
EVQLVESGGGLVQPGRSLRLSCAAPGFNFDDYAMHWVRQTPGKGLEWVSGISWNSGTIGYADSVKGRFTISRDNAKNSLYLQMNSLRPEDTALYYCAKEGVWFGKLFSSYGMDVWGQGTTVTVSS

SEQ ID NO: 14374 - protein, 125 aa, Artificial Sequence
  source: /note="Description of Artificial Sequence: Synthetic polypeptide"
EVQLVESGGGLVQPGRSLRLSCAASGFNFDDYAMHWVRQTPGKGLEWVSGISWNSGTIGYADSVKGRFTISRDNAKNSLYLQMNSLRPEDTALYYCAKEGVWFGKLFSSYGMDVWGQGTTVTVSS

SEQ ID NO: 14375 - protein, 119 aa, Artificial Sequence
  source: /note="Description of Artificial Sequence: Synthetic polypeptide"
EVQLVQSGAEVRKPGASVKVSCKVSGYTLTELSIHWVRQAPGKGLEWMGGFDPEDGETIYAQKFQGRVIMTEDTSTDTAYMELSSLRSEDTAVYYCVMIFGVVTNFDNWGQGTLVTVSS

SEQ ID NO: 14376 - protein, 119 aa, Artificial Sequence
  source: /note="Description of Artificial Sequence: Synthetic polypeptide"
QVQLVQSGAEVKKPGASVKVSCKVSGYTLTELSMHWVRQAPGKGLEWMGGFDPEDGETIYAQKFQGRVTMTEDTSTDTAYMELSSLRSEDTAVYYCVMIFGVVTNFDNWGQGTLVTVSS

SEQ ID NO: 14377 - protein, 119 aa, Artificial Sequence
  source: /note="Description of Artificial Sequence: Synthetic polypeptide"
QVQLVQSGAEVRKPGASVKVSCKVSGYTLTELSIHWVRQAPGKGLEWMGGFDPEDGETIYAQKFQGRVIMTEDTSTDTAYMELSSLRSEDTAVYYCVMIFGVVTNFDNWGQGTLVTVSS

SEQ ID NO: 14378 - protein, 119 aa, Artificial Sequence
  source: /note="Description of Artificial Sequence: Synthetic polypeptide"
EVQLVQSGAEVKKPGASVKVSCKVSGFTLTELSIHWVRQAPGKGLEWMGGFDPEDGETIYAQKFQGRVTMTEDTSTDTAYMELSSLRSEDTAVYYCSTIFGVVTNFDNWGQGTLVTVSS

SEQ ID NO: 14379 - protein, 119 aa, Artificial Sequence
  source: /note="Description of Artificial Sequence: Synthetic polypeptide"
QVQLVQSGAEVKKPGASVKVSCKVSGFTLTELSIHWVRQAPGKGLEWMGGFDPEDGETIYAQKFQGRVTMTEDTSTDTAYMELSSLRSEDTAVYYCSTIFGVVTNFDNWGQGTLVTVSS

SEQ ID NO: 14380 - protein, 125 aa, Artificial Sequence
  source: /note="Description of Artificial Sequence: Synthetic polypeptide"
EVQLVQSGGGSVQPGRSLRLSCAASGFTFDDYSMHWVRQGPGKGLEWVSGISWNSGTIVYADSVKGRFTISRDNVKNTLYLQMKSLRDEDTAVYYCAKEGVWFGRLFSSYGMDVWGQGTLVTVSS

SEQ ID NO: 14381 - protein, 125 aa, Artificial Sequence
  source: /note="Description of Artificial Sequence: Synthetic polypeptide"
EVQLVESGGGLVQPGRSLRLSCAASGFTFDDYSMHWVRQAPGKGLEWVSGISWNSGTIGYADSVKGRFTISRDNAKNSLYLQMNSLRAEDTALYYCAKEGVWFGRLFSSYGMDVWGQGTTVTVSS

SEQ ID NO: 14382 - protein, 125 aa, Artificial Sequence
  source: /note="Description of Artificial Sequence: Synthetic polypeptide"
EVQLVESGGGSVQPGRSLRLSCAASGFTFDDYSMHWVRQGPGKGLEWVSGISWNSGTIVYADSVKGRFTISRDNVKNTLYLQMKSLRDEDTAVYYCAKEGVWFGRLFSSYGMDVWGQGTTVTVSS

SEQ ID NO: 14383 - protein, 125 aa, Artificial Sequence
  source: /note="Description of Artificial Sequence: Synthetic polypeptide"
QVQLVQSGGGLVQPGRSLKLSCAASRFTFEDYAMHWVRQAPGKGLEWVSGISWNSGSIGYADSVKGRFTISRDNAKNSLYLRMNSLRADDTALYYCVKEGVWFGKLFSSYGLDVWGQGTTVTVSS

SEQ ID NO: 14384 - protein, 125 aa, Artificial Sequence
  source: /note="Description of Artificial Sequence: Synthetic polypeptide"
EVQLVESGGGLVQPGRSLRLSCAASRFTFEDYAMHWVRQAPGKGLEWVSGISWNSGSIGYADSVKGRFTISRDNAKNSLYLQMNSLRAEDTALYYCVKEGVWFGKLFSSYGLDVWGQGTTVTVSS

SEQ ID NO: 14385 - protein, 125 aa, Artificial Sequence
  source: /note="Description of Artificial Sequence: Synthetic polypeptide"
EVQLVESGGGLVQPGRSLKLSCAASRFTFEDYAMHWVRQAPGKGLEWVSGISWNSGSIGYADSVKGRFTISRDNAKNSLYLRMNSLRADDTALYYCVKEGVWFGKLFSSYGLDVWGQGTTVTVSS

SEQ ID NO: 14386 - protein, 125 aa, Artificial Sequence
  source: /note="Description of Artificial Sequence: Synthetic polypeptide"
EVQLVQSGGGLVQPGRSLRLSCAAPGFNFDDYAMHWVRQAPGKGLEWVSGISWNSGSIGYADSVKGRFTISRDNAKNSLYLQMNSLRAEDTALYYCAKEGVWFGKLFSSYGMDVWGQGTTVTVSS

SEQ ID NO: 14387 - protein, 125 aa, Artificial Sequence
  source: /note="Description of Artificial Sequence: Synthetic polypeptide"
EVQLVESGGGLVQPGRSLRLSCAASGFNFDDYAMHWVRQAPGKGLEWVSGISWNSGSIGYADSVKGRFTISRDNAKNSLYLQMNSLRAEDTALYYCAKEGVWFGKLFSSYGMDVWGQGTTVTVSS

SEQ ID NO: 14388 - protein, 125 aa, Artificial Sequence
  source: /note="Description of Artificial Sequence: Synthetic polypeptide"
EVQLVESGGGLVQPGRSLRLSCAAPGFNFDDYAMHWVRQAPGKGLEWVSGISWNSGSIGYADSVKGRFTISRDNAKNSLYLQMNSLRAEDTALYYCAKEGVWFGKLFSSYGMDVWGQGTTVTVSS

SEQ ID NO: 14389 - protein, 125 aa, Artificial Sequence
  source: /note="Description of Artificial Sequence: Synthetic polypeptide"
EVQLVQSGGGLVQPGRSLRLSCAASGFTFDDYAMHWVRQGPGKGLEWVSGISWNSGSIGYADSVKGRFTISRDNAKNSLYLQMNSLRAEDTALYYCAKEGVWFGELFSSYGMDVWGQGTLVTVSS

SEQ ID NO: 14390 - protein, 125 aa, Artificial Sequence
  source: /note="Description of Artificial Sequence: Synthetic polypeptide"
EVQLVESGGGLVQPGRSLRLSCAASGFTFDDYAMHWVRQAPGKGLEWVSGISWNSGSIGYADSVKGRFTISRDNAKNSLYLQMNSLRAEDTALYYCAKEGVWFGELFSSYGMDVWGQGTTVTVSS

SEQ ID NO: 14391 - protein, 125 aa, Artificial Sequence
  source: /note="Description of Artificial Sequence: Synthetic polypeptide"
EVQLVESGGGLVQPGRSLRLSCAASGFTFDDYAMHWVRQGPGKGLEWVSGISWNSGSIGYADSVKGRFTISRDNAKNSLYLQMNSLRAEDTALYYCAKEGVWFGELFSSYGMDVWGQGTTVTVSS

SEQ ID NO: 14392 - protein, 125 aa, Artificial Sequence
  source: /note="Description of Artificial Sequence: Synthetic polypeptide"
QVQLVQSGGGLVQPGRSLRLSCAASGFTFDDYAMHWVRQGPGKGLEWVSGISWNSGSIGYADSVKGRFTISRDNAKNSLYLQMNSLRAEDTALYYCAKEGVWFGELFSSYGMDVWGQGTTVTVSS

SEQ ID NO: 14393 - protein, 119 aa, Artificial Sequence
  source: /note="Description of Artificial Sequence: Synthetic polypeptide"
EVQLVQSGAEVKKPGASVKVSCKVSGFTLTELSIHWVRQAPGKGLEWMGGFDPEDGETISAQKFQGRVTMTEDTSTDTAYMELSSLRSEDTAIYYCSTIFGVVTNFDNWGQGTTVTVSS

SEQ ID NO: 14394 - protein, 119 aa, Artificial Sequence
  source: /note="Description of Artificial Sequence: Synthetic polypeptide"
QVQLVQSGAEVKKPGASVKVSCKVSGFTLTELSIHWVRQAPGKGLEWMGGFDPEDGETISAQKFQGRVTMTEDTSTDTAYMELSSLRSEDTAIYYCSTIFGVVTNFDNWGQGTLVTVSS

SEQ ID NO: 14395 - protein, 125 aa, Artificial Sequence
  source: /note="Description of Artificial Sequence: Synthetic polypeptide"
QVQLVQSGGGLVQPGRSLRLSCAAPGFNFDDYAMHWVRQTPGKGLEWVSGISWNSGTIGYADSVKGRFTISRDNAKNSLYLQMNSLRAEDTALYYCAKEGVWFGKLFSSYGMDVWGQGTTVTVSS

SEQ ID NO: 14396 - protein, 125 aa, Artificial Sequence
  source: /note="Description of Artificial Sequence: Synthetic polypeptide"
EVQLVQSGGGLVQPGGSLRLSCAAPGFNFDDYAMHWVRQAPGKGLEWVSGISWNSGSIGYADSVKGRFTISRDNAKNSLYLQMNSLRAEDSALYFCAKEGVWFGKLFSSYGMDVWGQGTTVTVSS

SEQ ID NO: 14397 - protein, 125 aa, Artificial Sequence
  source: /note="Description of Artificial Sequence: Synthetic polypeptide"
EVQLVESGGGLVQPGGSLRLSCAAPGFNFDDYAMHWVRQAPGKGLEWVSGISWNSGSIGYADSVKGRFTISRDNAKNSLYLQMNSLRAEDSALYFCAKEGVWFGKLFSSYGMDVWGQGTTVTVSS

SEQ ID NO: 14398 - protein, 125 aa, Artificial Sequence
  source: /note="Description of Artificial Sequence: Synthetic polypeptide"
QVQLVQSGGGLVQPGRSLRLSCAASGFTFDDYAMHWVRQGPGKGLEWVSGISWNSGYKDYADSVKGRFTISRDNAKKSLYLQMNSLRPEDTALYYCAKEGVWFGELFSSYGMDVWGQGTTVTVSS

SEQ ID NO: 14399 - protein, 125 aa, Artificial Sequence
  source: /note="Description of Artificial Sequence: Synthetic polypeptide"
EVQLVESGGGLVQPGRSLRLSCAASGFTFDDYAMHWVRQAPGKGLEWVSGISWNSGYKGYADSVKGRFTISRDNAKNSLYLQMNSLRAEDTALYYCAKEGVWFGELFSSYGMDVWGQGTTVTVSS

SEQ ID NO: 14400 - protein, 125 aa, Artificial Sequence
  source: /note="Description of Artificial Sequence: Synthetic polypeptide"
EVQLVESGGGLVQPGRSLRLSCAASGFTFDDYAMHWVRQGPGKGLEWVSGISWNSGYKDYADSVKGRFTISRDNAKKSLYLQMNSLRPEDTALYYCAKEGVWFGELFSSYGMDVWGQGTTVTVSS

SEQ ID NO: 14401 - protein, 125 aa, Artificial Sequence
  source: /note="Description of Artificial Sequence: Synthetic polypeptide"
EVQLVQSGGGLVQPGRSLRLSCTASKFTFEDYAMHWVRQVPGKGLEWVSGISWNSGNIGYADSVKGRFTISRDNAKNSLYLRMNSLRADDTALYYCVKEGVWFGKSFSSYGLDVWGQGTTVTVSS

SEQ ID NO: 14402 - protein, 125 aa, Artificial Sequence
  source: /note="Description of Artificial Sequence: Synthetic polypeptide"
EVQLVESGGGLVQPGRSLRLSCAASKFTFEDYAMHWVRQAPGKGLEWVSGISWNSGNIGYADSVKGRFTISRDNAKNSLYLQMNSLRAEDTALYYCVKEGVWFGKSFSSYGLDVWGQGTTVTVSS

SEQ ID NO: 14403 - protein, 125 aa, Artificial Sequence
  source: /note="Description of Artificial Sequence: Synthetic polypeptide"
EVQLVESGGGLVQPGRSLRLSCTASKFTFEDYAMHWVRQVPGKGLEWVSGISWNSGNIGYADSVKGRFTISRDNAKNSLYLRMNSLRADDTALYYCVKEGVWFGKSFSSYGLDVWGQGTTVTVSS

SEQ ID NO: 14404 - protein, 119 aa, Artificial Sequence
  source: /note="Description of Artificial Sequence: Synthetic polypeptide"
EVQLVQSGADVKKPGASVKVSCKVSGYTLTELSIHWVRQAPGKGLEWMGGFDPEHGTTIYAQKFQGRVTMTEDTSTDTAYMELSSLRSEDTAVYYCVMIFGVVTNFDNWGQGTTVTVSS

SEQ ID NO: 14405 - protein, 119 aa, Artificial Sequence
  source: /note="Description of Artificial Sequence: Synthetic polypeptide"
QVQLVQSGADVKKPGASVKVSCKVSGYTLTELSIHWVRQAPGKGLEWMGGFDPEHGTTIYAQKFQGRVTMTEDTSTDTAYMELSSLRSEDTAVYYCVMIFGVVTNFDNWGQGTLVTVSS

SEQ ID NO: 14406 - protein, 123 aa, Artificial Sequence
  source: /note="Description of Artificial Sequence: Synthetic polypeptide"
AVQLVESGGGLVQPGRSLKLSCTASGFTFSSFAMAWVRQAPTKGLEWVASISYGGADTYYRDSVKGRFTISRDNAKSSLYLQMDSLRSEDTSTYYCAKDLPYYGYTPFVMDAWGQGTSVTVSS

SEQ ID NO: 14407 - protein, 119 aa, Artificial Sequence
  source: /note="Description of Artificial Sequence: Synthetic polypeptide"
EVQLVESGGGLVQPGRSLKVSCLASGFTFSHYGMNWIRQAPGKGLDWVASISRSGSYIRYVDTVKGRFTVSRDIAKNTLYLQMTSLRSEDTALYYCAREGQFGDYFEYWGQGVMVTVSS

SEQ ID NO: 14408 - protein, 119 aa, Artificial Sequence
  source: /note="Description of Artificial Sequence: Synthetic polypeptide"
EVQLVESGGGLVQPGRSLKLSCLASGFTFSHYGVNWIRQAPGKGLEWIASISRSSSYIYYADTVKGRFTISRDNAKNTLFLQLTSLRSEDTALYYCAREGQFGDYFEYWGRGVMVTVSS

SEQ ID NO: 14409 - protein, 119 aa, Artificial Sequence
  source: /note="Description of Artificial Sequence: Synthetic polypeptide"
EVQLVESGGGLVQPGRSLKLSCLASGFTFSHYGMNWIRQAPGKGLEWITSITSSSSYIYYADTVKGRFTISRDNAKNTLYLQMTSLRSEDTALYYCAREGQFGDYFDYWGQGVMVTVSS

SEQ ID NO: 14410 - protein, 116 aa, Artificial Sequence
  source: /note="Description of Artificial Sequence: Synthetic polypeptide"
QVQVKESGPGLVQPSQTLSLTCTVSGFSLTSYHVSWVRQPPGKGLEWMGAIWTGGSTAYNSLLKSRLSISRDISKSQVFLKMNSLQTEDTATYYCARADFYVMDAWGQGASVTVSS

SEQ ID NO: 14411 - protein, 123 aa, Artificial Sequence
  source: /note="Description of Artificial Sequence: Synthetic polypeptide"
EVQLVESGGGLVQPGGSLRLSCAASGFTFSSFAMAWVRQAPGKGLEWVASISYGGADTYYRDSVKGRFTISRDNAKNSLYLQMNSLRAEDTAVYYCARDLPYYGYTPFVMDAWGQGTLVTVSS

SEQ ID NO: 14412 - protein, 123 aa, Artificial Sequence
  source: /note="Description of Artificial Sequence: Synthetic polypeptide"
EVQLVESGGGLVQPGGSLRLSCAASGFTFSSFAMAWVRQAPGKGLEWVASISYGGADTYYRDSVKGRFTISRDNAKNSLYLQMNSLRAEDTAVYYCAKDLPYYGYTPFVMDAWGQGTLVTVSS

SEQ ID NO: 14413 - protein, 453 aa, Artificial Sequence
  source: /note="Description of Artificial Sequence: Synthetic polypeptide"
EVQLVESGGGLVQPGGSLRLSCAASGFTFSSFAMAWVRQAPGKGLEWVASISYGGADTYYRDSVKGRFTISRDNAKNSLYLQMNSLRAEDTAVYYCAKDLPYYGYTPFVMDAWGQGTLVTVSSASTKGPSVFPLAPSSKSTSGGTAALGCLVKDYFPEPVTVSWNSGALTSGVHTFPAVLQSSGLYSLSSVVTVPSSSLGTQTYICNVNHKPSNTKVDKKVEPKSCDKTHTCPPCPAPEAAGAPSVFLFPPKPKDTLMISRTPEVTCVVVDVSHEDPEVKFNWYVDGVEVHNAKTKPREEQYNSTYRVVSVLTVLHQDWLNGKEYKCKVSNKALPAPIEKTISKAKGQPREPQVYTLPPSREEMTKNQVSLTCLVKGFYPSDIAVEWESNGQPENNYKTTPPVLDSDGSFFLYSKLTVDKSRWQQGNVFSCSVMHEALHNHYTQKSLSLSPGK

SEQ ID NO: 14414 - protein, 119 aa, Artificial Sequence
  source: /note="Description of Artificial Sequence: Synthetic polypeptide"
EVQLVESGGGLVQPGGSLRLSCAASGFTFSHYGMNWVRQAPGKGLEWVASISRSGSYIRYVDTVKGRFTISRDNAKNSLYLQMNSLRAEDTAVYYCAREGQFGDYFEYWGQGTLVTVSS

SEQ ID NO: 14415 - protein, 449 aa, Artificial Sequence
  source: /note="Description of Artificial Sequence: Synthetic polypeptide"
EVQLVESGGGLVQPGGSLRLSCAASGFTFSHYGMNWVRQAPGKGLEWVASISRSGSYIRYVDTVKGRFTISRDNAKNSLYLQMNSLRAEDTAVYYCAREGQFGDYFEYWGQGTLVTVSSASTKGPSVFPLAPSSKSTSGGTAALGCLVKDYFPEPVTVSWNSGALTSGVHTFPAVLQSSGLYSLSSVVTVPSSSLGTQTYICNVNHKPSNTKVDKKVEPKSCDKTHTCPPCPAPEAAGAPSVFLFPPKPKDTLMISRTPEVTCVVVDVSHEDPEVKFNWYVDGVEVHNAKTKPREEQYNSTYRVVSVLTVLHQDWLNGKEYKCKVSNKALPAPIEKTISKAKGQPREPQVYTLPPSREEMTKNQVSLTCLVKGFYPSDIAVEWESNGQPENNYKTTPPVLDSDGSFFLYSKLTVDKSRWQQGNVFSCSVMHEALHNHYTQKSLSLSPGK

SEQ ID NO: 14416 - protein, 127 aa, Homo sapiens
QLQLQESGPGLVKPSETLSLTCTVSGGSINSSSYYWGWLRQSPGKGLEWIGSFFYTGSTYYNPSLRSRLTISVDTSKNQFSLMLSSVTAADTAVYYCARQSTYYYGSGNYYGWFDRWDQGTLVTVSS

SEQ ID NO: 14417 - protein, 130 aa, Homo sapiens
EVQLVQSGAEVKKPGSSVKVSCKASGGTFSSYAISWVRQAPGQGLEWMGGIIPIFGTANYAQKFQGRVTITADKSTSTAYMELSSLRSEDTAVYYCARAPLRFLEWSTQDHYYYYYMDVWGKGTTVTVSS

SEQ ID NO: 14418 - protein, 120 aa, Artificial Sequence
  source: /note="Description of Artificial Sequence: Synthetic polypeptide"
QVHLQQPGAELVKPGASVKLSCKASGYTFTSYWMYWVKQGPGRGLEWIGRIDPNSGSTKYNEKFKNKATLTVDKSSSTAYMQLSSLTSEDSAVYYCARDYRKGLYAMDYWGQGTSVTVSS

SEQ ID NO: 14419 - protein, 120 aa, Artificial Sequence
  source: /note="Description of Artificial Sequence: Synthetic polypeptide"
EVQLQQSGAELVKPGASVKLSCKASGYTFTSYWMYWVKQGPGRGLEWIGRIDPNSGSTKYNEKFKNKATLTVDKSSSTAYMQLSSLTSEDSAVYYCARDYRKGLYAMDYWGQGTTVTVSS

SEQ ID NO: 14420 - protein, 120 aa, Artificial Sequence
  source: /note="Description of Artificial Sequence: Synthetic polypeptide"
QVQLVQSGAEVKKPGASVKVSCKASGYTFTSYWMYWVRQATGQGLEWMGRIDPNSGSTKYNEKFKNRFTISRDDSKNTAYLQMNSLKTEDTAVYYCARDYRKGLYAMDYWGQGTTVTVSS

SEQ ID NO: 14421 - protein, 113 aa, Artificial Sequence
  source: /note="Description of Artificial Sequence: Synthetic polypeptide"
EVQLQQSGAELVKPGASVKLSCKASGYTFTSYWMYWVKQGPGRGLEWIGRIDPNSGSTKYNEKFKNKATLTVDKSSSTAYMQLSSLTSEDSAVYYCARDYRKGLYAMDYWGQG

SEQ ID NO: 14422 - protein, 113 aa, Artificial Sequence
  source: /note="Description of Artificial Sequence: Synthetic polypeptide"
QVQLVQSGAEVKKPGASVKVSCKASGYTFTSYWMYWVRQATGQGLEWMGRIDPNSGSTKYNEKFKNRFTISRDDSKNTAYLQMNSLKTEDTAVYYCARDYRKGLYAMDYWGQG

SEQ ID NO: 14423 - protein, 113 aa, Artificial Sequence
  source: /note="Description of Artificial Sequence: Synthetic polypeptide"
EVQLVQSGAEVKKPGESLRISCKGSGYTFTSYWMYWIRQPPGKGLEWIGRIDPNSGSTKYNEKFKNRVTITADKSTSTAYMELSSLRSEDTAVYYCARDYRKGLYAMDYWGQG

SEQ ID NO: 14424 - protein, 113 aa, Artificial Sequence
  source: /note="Description of Artificial Sequence: Synthetic polypeptide"
EVQLVQSGAEVKKPGATVKISCKVSGYTFTSYWMYWVRQATGQGLEWMGRIDPNSGSTKYNEKFKNRVTITADKSTSTAYMELSSLRSEDTAVYYCARDYRKGLYAMDYWGQG

SEQ ID NO: 14425 - protein, 113 aa, Artificial Sequence
  source: /note="Description of Artificial Sequence: Synthetic polypeptide"
EVQLVQSGAEVKKPGESLRISCKGSGYTFTSYWMYWVRQAPGQGLEWMGRIDPNSGSTKYNEKFKNRVTISVDTSKNQFSLKLSSVTAADTAVYYCARDYRKGLYAMDYWGQG

SEQ ID NO: 14426 - protein, 113 aa, Artificial Sequence
  source: /note="Description of Artificial Sequence: Synthetic polypeptide"
QVQLVQSGAEVKKPGASVKVSCKASGYTFTSYWMYWIRQSPSRGLEWLGRIDPNSGSTKYNEKFKNRFTISRDDSKNTAYLQMNSLKTEDTAVYYCARDYRKGLYAMDYWGQG

SEQ ID NO: 14427 - protein, 113 aa, Artificial Sequence
  source: /note="Description of Artificial Sequence: Synthetic polypeptide"
EVQLVQSGAEVKKPGESLRISCKGSGYTFTSYWMYWVRQARGQRLEWIGRIDPNSGSTKYNEKFKNRLTISKDTSKNQVVLTMTNMDPVDTATYYCARDYRKGLYAMDYWGQG

SEQ ID NO: 14428 - protein, 113 aa, Artificial Sequence
  source: /note="Description of Artificial Sequence: Synthetic polypeptide"
EVQLVQSGAEVKKPGATVKISCKVSGYTFTSYWMYWIRQSPSRGLEWLGRIDPNSGSTKYNEKFKNRLTISKDTSKNQVVLTMTNMDPVDTATYYCARDYRKGLYAMDYWGQG

SEQ ID NO: 14429 - protein, 113 aa, Artificial Sequence
  source: /note="Description of Artificial Sequence: Synthetic polypeptide"
QITLKESGPTLVKPTQTLTLTCTFSGYTFTSYWMYWVRQAPGKGLEWVSRIDPNSGSTKYNEKFKNRVTITADKSTSTAYMELSSLRSEDTAVYYCARDYRKGLYAMDYWGQG

SEQ ID NO: 14430 - protein, 113 aa, Artificial Sequence
  source: /note="Description of Artificial Sequence: Synthetic polypeptide"
EVQLVQSGAEVKKPGATVKISCKVSGYTFTSYWMYWVRQARGQRLEWIGRIDPNSGSTKYNEKFKNRFTISRDNSKNTLYLQMNSLRAEDTAVYYCARDYRKGLYAMDYWGQG

SEQ ID NO: 14431 - protein, 117 aa, Artificial Sequence
  source: /note="Description of Artificial Sequence: Synthetic polypeptide"
EVQLLESGGGLVQPGGSLRLSCAASGFTFSSYAMSWVRQAPGKGLEWVSGIGSYGGGTYYADSVKGRFTISRDNSKNTLYLQMNSLRAEDTAVYYCARYVNFGMDYWGQGTLVTVSS

SEQ ID NO: 14432 - protein, 116 aa, Artificial Sequence
  source: /note="Description of Artificial Sequence: Synthetic polypeptide"
EVQLLESGGGLVQPGGSLRLSCAASGFTFSSYAMSWVRQAPGKGLEWVSAISGSGGSTYYADSVKGRFTISRDNSKNTLYLQMNSLRAEDTAVYYCARRVWGFDYWGQGTLVTVSS

SEQ ID NO: 14433 - protein, 128 aa, Artificial Sequence
  source: /note="Description of Artificial Sequence: Synthetic polypeptide"
  MOD_RES (120)..(120): Any amino acid
  MOD_RES (124)..(125): Any amino acid
EVRLQQSGADLVKPGASVKLSCASGFIIKATYMHWVRQRPEQGLEWIGRIDPANGEKYDPKFQVKAITADTSSSTAYLQLNSLTSDDTAVYYCARYAWYFDVWGAGTTVTVSSAKTTPPXVYPXXPGS

SEQ ID NO: 14434 - protein, 446 aa, Artificial Sequence
  source: /note="Description of Artificial Sequence: Synthetic polypeptide"
EVQLVESGGDLVQPGGSLRLSCAASGFTFSSYWMSWVRQAPGKGLEWVANIKQDGSEKYYVDSVKGRFTISRDNAKNSLYLQMNSLRAEDTAVYYCARDRGSLYYWGQGTLVTVSSASTKGPSVFPLAPSSKSTSGGTAALGCLVKDYFPEPVTVSWNSGALTSGVHTFPAVLQSSGLYSLSSVVTVPSSSLGTQTYICNVNHKPSNTKVDKRVEPKSCDKTHTCPPCPAPELLGGPSVFLFPPKPKDTLMISRTPEVTCVVVDVSHEDPEVKFNWYVDGVEVHNAKTKPREEQYNSTYRVVSVLTVLHQDWLNGKEYKCKVSNKALPAPIEKTISKAKGQPREPQVYTLPPSREEMTKNQVSLTCLVKGFYPSDIAVEWESNGQPENNYKTTPPVLDSDGSFFLYSKLTVDKSRWQQGNVFSCSVMHEALHNHYTQKSLSLSPGK

SEQ ID NO: 14435 - protein, 124 aa, Artificial Sequence
  source: /note="Description of Artificial Sequence: Synthetic polypeptide"
QVQLQQSGPGLVKPSQTLSLTCAISGDSVSSNSAAWGWIRQSPGRGLEWLGRIYYRSKWYNSYAVSVKSRITINPDTSKNQFSLQLNSVTPEDTAVYYCARYDWVPKIGVFDSWGQGTLVTVSS

SEQ ID NO: 14436 - protein, 454 aa, Artificial Sequence
  source: /note="Description of Artificial Sequence: Synthetic polypeptide"
QVQLQQSGPGLVKPSQTLSLTCAISGDSVSSNSAAWGWIRQSPGRGLEWLGRIYYRSKWYNSYAVSVKSRITINPDTSKNQFSLQLNSVTPEDTAVYYCARYDWVPKIGVFDSWGQGTLVTVSSASTKGPSVFPLAPSSKSTSGGTAALGCLVKDYFPEPVTVSWNSGALTSGVHTFPAVLQSSGLYSLSSVVTVPSSSLGTQTYICNVNHKPSNTKVDKRVEPKSCDKTHTCPPCPAPELLGGPSVFLFPPKPKDTLMISRTPEVTCVVVDVSHEDPEVKFNWYVDGVEVHNAKTKPREEQYNSTYRVVSVLTVLHQDWLNGKEYKCKVSNKALPAPIEKTISKAKGQPREPQVYTLPPSREEMTKNQVSLTCLVKGFYPSDIAVEWESNGQPENNYKTTPPVLDSDGSFFLYSKLTVDKSRWQQGNVFSCSVMHEALHNHYTQKSLSLSPGK

SEQ ID NO: 14437 - protein, 112 aa, Mus musculus
DVQLQESGPGLVKPSQSLSLTCTVTGFSITTEYAWNWIRQFPGNRLEWMGYIGYTGRTNYSPSLKSRISITRDTSKNQFFLQLNSVTTEDTATYYCTRMDYWGQGTSVTVSS

SEQ ID NO: 14438 - protein, 112 aa, Artificial Sequence
  source: /note="Description of Artificial Sequence: Synthetic polypeptide"
QVQLQESGPGLVKPSQTLSLTCTVSGGSISTEYAWNWIRQPPGKGLEWIGYIGYTGRTNYAPSLKSRITISVDTSKNQFSLQLSSVTAEDTATYYCARMDYWGQGTLVTVSS

SEQ ID NO: 14439 - protein, 112 aa, Artificial Sequence
  source: /note="Description of Artificial Sequence: Synthetic polypeptide"
QVQLQESGPGLVKPSQTLSLTCTVSGGSISTEYAWNWIRQPPGKGLEWIGYIGYTGRTYYSPSLKSRITISVDTSKNQFSLQLSSVTAEDTATYYCARMDYWGQGTLVTVSS

SEQ ID NO: 14440 - protein, 112 aa, Artificial Sequence
  source: /note="Description of Artificial Sequence: Synthetic polypeptide"
QVQLQESGPGLVKPSQTLSLTCTVSGGSISTEYAWNWIRQPPGKGLEWIGYIGYTGRTSYSPSLKSRITISVDTSKNQFSLQLSSVTAEDTATYYCARMDYWGQGTLVTVSS

SEQ ID NO: 14441 - protein, 112 aa, Artificial Sequence
  source: /note="Description of Artificial Sequence: Synthetic polypeptide"
QVQLQESGPGLVKPSQTLSLTCTVSGGSISTEYAWNWIRQPPGKGLEWIGYIGYTGRTGYSPSLKSRITISVDTSKNQFSLQLSSVTAEDTATYYCARMDYWGQGTLVTVSS

SEQ ID NO: 14442 - protein, 112 aa, Artificial Sequence
  source: /note="Description of Artificial Sequence: Synthetic polypeptide"
QVQLQESGPGLVKPSQTLSLTCTVSGGSISTEYAWNWIRQPPGKGLEWIGYIGYTGRTSYAPSLKSRITISVDTSKNQFSLQLSSVTAEDTATYYCARMDYWGQGTLVTVSS

SEQ ID NO: 14443 - protein, 112 aa, Artificial Sequence
  source: /note="Description of Artificial Sequence: Synthetic polypeptide"
QVQLQESGPGLVKPSQTLSLTCTVSGGSISTEYAWNWIRQPPGKGLEWIGYIGYTGRTGYAPSLKSRITISVDTSKNQFSLQLSSVTAEDTATYYCARMDYWGQGTLVTVSS

SEQ ID NO: 14444 - protein, 130 aa, Mus musculus
MRVLILLWLFTAFPGILSDVQLQESGPGLVKPSQSLSLTCTVTGFSITTEYAWNWIRQFPGNRLEWMGYIGYTGRTNYSPSLKSRISITRDTSKNQFFLQLNSVTTEDTATYYCTRMDYWGQGTSVTVSS

SEQ ID NO: 14445 - protein, 113 aa, Homo sapiens
VKLQESGPELKKPGETVKISCKASGYTFTNYGMNWVKQAPGKGLKWMGWINTYTGEPTYADDFKGRFAFSLETSASTAYLQINNLKNEDTATYFCARPWFAYWGQGTTVTVSS

SEQ ID NO: 14446 - protein, 115 aa, Artificial Sequence
  source: /note="Description of Artificial Sequence: Synthetic polypeptide"
QVQLVQSGAEVKKPGASVKVSCKASGYTFTDHAIHWVRQAPGQRLEWMGYFSPGNDDFKYSQKFQGRVTITADKSASTAYMELSSLRSEDTAVYYCARSLNMAYWGQGTLVTVSS

SEQ ID NO: 14447 - protein, 115 aa, Artificial Sequence
  source: /note="Description of Artificial Sequence: Synthetic polypeptide"
QVQLVQSGAEVKKPGASVKVSCKASGYTFTDHAIHWVRQAPGQRLEWMGYFSPGNDDFKYSQKFQGRVTITADKSASTAYMELSSLRSEDTAVYYCARSLVQGYWGQGTLVTVSS

SEQ ID NO: 14448 - protein, 115 aa, Artificial Sequence
  source: /note="Description of Artificial Sequence: Synthetic polypeptide"
QVQLVQSGAEVKKPGASVKVSCKASGYTFTDHAIHWVRQAPGQRLEWMGYFSPGNDDFKYSQKFQGRVTITADKSASTAYMELSSLRSEDTAVYYCARSLIQGYWGQGTLVTVSS

SEQ ID NO: 14449 - protein, 115 aa, Artificial Sequence
  source: /note="Description of Artificial Sequence: Synthetic polypeptide"
QVQLVQSGAEVKKPGASVKVSCKASGYTFTDHAIHWVRQAPGQRLEWMGYFSPGNDDFKYSQKFQGRVTITADKSASTAYMELSSLRSEDTAVYYCARSWIMQYWGQGTLVTVSS

SEQ ID NO: 14450 - protein, 115 aa, Artificial Sequence
  source: /note="Description of Artificial Sequence: Synthetic polypeptide"
QVQLVQSGAEVKKPGASVKVSCKASGYTFTDHAIHWVRQAPGQRLEWMGYFSPGNDDFKYSQKFQGRVTITADKSASTAYMELSSLRSEDTAVYYCARSLVMAYWGQGTLVTVSS

SEQ ID NO: 14451 - protein, 115 aa, Artificial Sequence
  source: /note="Description of Artificial Sequence: Synthetic polypeptide"
QVQLVQSGAEVKKPGASVKVSCKASGYTFTDHAIHWVRQAPGQRLEWMGYFSPGNDDFKYSQKFQGRVTITADKSASTAYMELSSLRSEDTAVYYCARSLIMAYWGQGTLVTVSS

SEQ ID NO: 14452 - protein, 116 aa, Mus musculus
VQLQESGPGLAKPSQTLSLTCSVTGYSITSDYWNWIRKFPGNKLEYMGYISYSGSTYYNPSLKSRISITRDTSKNQYYLQLNSVTTEDTATYYCARSYDGICFDNWGQGTTLTVSS

SEQ ID NO: 14453 - protein, 116 aa, Mus musculus
EVQLQQSGAELVRPGASVKLSCTVSGFNIKDDYMHWVKQRPEQGLEWIGRIDPANGHTKYAPKFQDKATITADTSSNTAYLQFSSLTSEDTAVYYCTRMGLRRGYWGQGTTLTVSS

SEQ ID NO: 14454 - protein, 114 aa, Mus musculus
VQLQQSGAELVRPGASVKLSCTASDFNIKDDYMHWMKQRPEQGLEWIGRIDPANGNTKYAPKFQDKATMTADTSSNTAYLQFSSLTSEDTAVYYCATSWGFPYWGQGTLVTVSA

SEQ ID NO: 14455 - protein, 115 aa, Mus musculus
VQLQQSGAELVRPGASVKLSCTASGFNIKDDYMHWMKQRPEQGLEWIGRIDPANGNTKYAPKFQDKATITADTSSNTAYLQLSSLTSEDTAVYYCSRMGLLRGYWGQGTTLTVSS

SEQ ID NO: 14456 - protein, 115 aa, Mus musculus
VQLQQSGAELVRPGASVKLSCTASGFNIKDDYMHWVKQRPEQGLEWIGRIDPANGHTKYAPKFQDKATITADTSSNTAYLQFSSLTSEDTAVYYCTRMGLRRGYWGQGTTLTVSS

SEQ ID NO: 14457 - protein, 107 aa, Mus musculus
DIQMTQTTSSLSASLGDRLTISCRASQDIRNYLNWYQQKPDGTVKLLIYYTSRLHSGVPSRFSGSGSGTDYSLTISNLEQEDIATYFCQQGNTLPWTFGGGTKLEIK

SEQ ID NO: 14458 - protein, 112 aa, Mus musculus
VQLQQSGAELVRPGASVKLSCTASGFNIKDDYMYWVKQRPEQGLEWIGRIDPANGNTKYAPKFQDKATITADTSSNTAYLHLSSLTSEDTAVFYCAYRRAYWGQGTLVTVSA

SEQ ID NO: 14459 - protein, 106 aa, Mus musculus
IVMTQTPKLLPVSAGDRVTMTCKASQSVDNSVAWYQQKPGQSPKLLIFYASNHYTGVPDRFTASGSGTDFTFTISSVQVEDLAVYFCQQHFSSPRTFGGGTKLEIR

SEQ ID NO: 14460 - protein, 115 aa, Mus musculus
EVQLQQSGTVLTRPGASVKMSCKASGYTFTNFWIHWVKQRPGQGLDWIGAIYPGNTNTDYNQKFQGKAKLTAVSSASTAYMELSSLTNEDSAVYYCTRGGAMDYWGQGTSVTVSS

SEQ ID NO: 14461 - protein, 125 aa, Homo sapiens
QVQLVESGGGVVQPGRSLRLSCAASGFTFSSYDIHWVRQAPGKGLEWVAVIWYDGSIKYYADSVKGRFTISRDNSKNTLYLQMNSLRAEDTAVYYCAREEQLVRGGYYYYGMDVWGQGTTVTVSS

SEQ ID NO: 14462 - protein, 128 aa, Homo sapiens
QVQLQESGPGLVKPSQTLSLTCTVSGGSISSGGYYWSWIRQHPGKGLEWIGNIYYSGSTYYNPSLKSRVTISVDTSKNQFSLKLSSVTAADTAVYYCARDSNQYNWNDEVYDYGLDVWGQGTTVTVSS

SEQ ID NO: 14463 - protein, 123 aa, Homo sapiens
QVQLVESGGGVVQPGRSLRLSCAASGFTFSNYGMHWVRQAPGKGLEWVTIISYDGSNKYYADSVKGRFTISRDNSKNTLYLQMNSLRAEDTAVYYCVTYYDFWSGYLPGMDVWGQGTTVTVSS

SEQ ID NO: 14464 - protein, 117 aa, Homo sapiens
QVQLQESGPGLVKPSETLSLTCTVSGGSINHYYWSWIRQPAGKGLEWIGRIYPTGSTNYNPSLKSRVTMSVDTSKNQFSLKLSSVTAADTAVYYCAGGWSYWYFDLWGRGTLVTVSS

SEQ ID NO: 14465 - protein, 123 aa, Homo sapiens
QVQLVESGGGVVQPGRSLRLSCAASGFTFSNYDMHWVRQAPGKGLEWVAVIWYDGSIKYYADSVKGRFTISRDNSKNTLHLQMNSLRAEDTAVYYCAREIAVAGGYYYGLDVWGQGTTVTVSS

SEQ ID NO: 14466 - protein, 128 aa, Homo sapiens
QVQLQESGPGLVKPSQTLSLTCTVSGGSISSGGYYWSWIRQHPGKGLEWIGNIYYSGSTYYTPSLKSRVTISVDTSKNQFSLKLSSVTAADTAVYYCARDSNQYNWNDEVYDYGLDVWGQGTTVTVSS

SEQ ID NO: 14467 - protein, 122 aa, Homo sapiens
QVQLVESGGGVVQPGRSLRLSCAASGFTFSSYGMHWVRQAPGKGLEWVAVISYDGSNKYYADSVKGRFTISRDNSKNTLYLQMNSLRAEDTAVYYCARDQDNWNYYYGMDVWGQGTTVTVSS

SEQ ID NO: 14468 - protein, 124 aa, Homo sapiens
QVQLVESGGGVVQPGRSLRLSCAASGFTFSNYDMHWVRQAPGKGLEWVAVIWYDGSIKYYADSVKGRFTISRDNSKNTLYLQMNSLRAEDTAVYFCARETAILRGYYYYDMDVWGQGTTVTVSS

SEQ ID NO: 14469 - protein, 124 aa, Homo sapiens
QVQLVESGGGVVQPGRSLRLSCAASGFTFSSYDMHWVRQAPGKGLEWVAVISYDGSIKYYADSVKGRFTISRDNSKNTLYLQVNSLRAEDTAVYYCAREVRSGSYYYYYSMDVWGQGTTVTVSS

SEQ ID NO: 14470 - protein, 115 aa, Homo sapiens
EVQLVESGGGLIQPGGSLRLSCAASGFTVSSNYMSWVRQAPGKGLEWVSVIYSGDRTYYADSVKGRFTISRDNSKNTLYLQMNSLRAEDTAVYYCARGEGGFDYWGQGTLVTVSS

SEQ ID NO: 14471 - protein, 115 aa, Homo sapiens
EVQLVESGGGLIQPGGSLRLSCAASGFTVSRNYMSWVRQAPGKGLEWVSVIYSGDRTYYADSVKGRFTISRDNSKNTLYLQMNSLRAEDTAVYYCARGEGGFDYWGQGTLVTVSS

SEQ ID NO: 14472 - protein, 115 aa, Homo sapiens
EVQLVESGGGLIQPGGSLRLSCAASEFTVSRNYMSWVRQAPGKGLEWVSVIYSGDRTYYADSVKGRFTISRDNSKNTLYLQMNSLRAEDTAVYYCARGEGGFDYWGQGTLVTVSS

SEQ ID NO: 14473 - protein, 125 aa, Homo sapiens
QVQLVESGGGVVQPGRSLRLSCAASGFTVSSYGMHWVRQAPGKGLEWVAVIWSNGSNKYYADSVKGRFTISRDNSKNTLYLQMNSLRAEDTAVYYCARDNGVYVGYAYYYGMDVWGQGTTVTVSS

SEQ ID NO: 14474 - protein, 128 aa, Homo sapiens
QVQLVESGGSVVQPGRSLRLSCAASGFTFSNYGIHWVRQAPGKGLEWVAVIWSDGSNKYYADSVKGRFTISRDNSKNTLYLQMNSLRAEDTAVYYCARELPNSGSYSGYYYYYGMDVWGQGTTVTVSS

SEQ ID NO: 14475 - protein, 125 aa, Homo sapiens
QVQLVESGGGVVQPGRSLRLSCAASGFTFSSYDMHWVRQAPGKGLEWVAVIWSDGSIKYYADSVKGRFTISRDNSKNTLYLQMNSLRAEDTAVYYCAREVESAMGGFYYNGMDVWGQGATVTVSS

SEQ ID NO: 14476 - protein, 125 aa, Homo sapiens
QVQLVESGGGVVQPGRSLRLSCAASGFTFSSYDMHWVRQAPGKGLEWVAVIWSDGSIKYYADSVKGRFTISRDNSKNTLYLQMNSLRAEDTAVYYCAREVESAMGGFYYNGMDVWGQGTTVTVSS

SEQ ID NO: 14477 - protein, 107 aa, Homo sapiens
DIQMTQSPSSLSASVGDRVTITCRASQGIRNDLGWYQQKPGKAPKRLIYAASSLESGVPSRFSGSGSGPEFTLTISSLQPEDFATYYCLQHNSYPLTFGGGTKVEIQ

SEQ ID NO: 14478 - protein, 113 aa, Oryctolagus cuniculus
DVVMTQTPASVEAAVGGTVTIKCQASENIDILLAWYQQKVGQPPKLLIYRASKLASGAPSRFSGSGSGTEFTLTISDLECGDAATYYCQSNVGSTARSSYGNAFGGGTEVVVK

SEQ ID NO: 14479 - protein, 110 aa, Homo sapiens
QSVLTQPPSVSAAPGQKVTISCSGSSSNIGNNYVSWYQQFPGTAPKLLIYDNNSRPSGIPDRFSGSKSGTSATLGITGLQTGDEADYYCGTWDSSLSAGVFGGGTKLTVL

SEQ ID NO: 14480 - protein, 110 aa, Homo sapiens
QSALTQPPSVSAAPGQKVTISCSGSSSNIGSNYVSWCQQLPRTAPKLLIYDNNKRPSGIPDRFSGSKSGTSATLVITGLQTGDEADYYCGAWDSSLSAGVFGGGTKLTVL

SEQ ID NO: 14481 - protein, 108 aa, Homo sapiens
SSELTQDPAVSVALGQTVRITCQGDSLRSYYASWYQQRPGQAPVLVIYGRNNRPSGIPDRFSGSSSGLTASLTVTGAQAEDEADYYCNSRDSSYNHVAFGGGTKLTVL

SEQ ID NO: 14482 - protein, 108 aa, Homo sapiens
SSELTQDPAVSVALGQTVRITCQGDSLRIYYASWYQQKPGQAPVLVIYGKNNRPSGIPDRFSGSSSGNTASLTVTGAQAEDEADYYCKSRDSSFNHVTFGGGTKLTVL

SEQ ID NO: 14483 - protein, 111 aa, Homo sapiens
QSLLTQPPSVSGAPGQRVTISCTGSSSNIGAGYDVHWYQQFPGTAPKLLIYGNSNRPSGVPDRFSGSKSGTSASLAITGLQAEDEADYYCQSYDSSLSGSVFGGGTKLTVL

SEQ ID NO: 14484 - protein, 107 aa, Homo sapiens
SSELTQDPAVSVALGQTVRITCQGDSLRNYYASWYQQKPGQAPILVIYGKNNRPSGIPDRFSGSSSGNTASLTITGAQAEDEADYYCNSRDSSGNHLVFGGGTKLTV

SEQ ID NO: 14485 - protein, 111 aa, Homo sapiens
QSVLTQSPSVSGAPGQRVTISCTGSSSNIGAGYDVHWYQQLPGTAPRLLIYGNNNRPSGVPDRFSGSKSGTSASLAITGLQAEDEADYYCQSYDSSLSGSVFGGGTKLTVL

SEQ ID NO: 14486 - protein, 108 aa, Homo sapiens
SSELTQDPAVSVALGQTVRITCQGDSLRRYYASWYQQKPGQAPIVVIYGKKNRPSGIPDRFSGSSSGNTASLTITGAQAEDEADYYCKSRDSSGNHLVFGGGTKLTVL

SEQ ID NO: 14487 - protein, 107 aa, Homo sapiens
DIQMTQSPSSVSASVGDRVTITCRASQGISSWLAWYQQKPGKAPKLLIYAASSLQSGVPSRFSGSGSGTDFTLTISSLQPEDFASYYCQQANSFPWTFGQGTKVEIK

SEQ ID NO: 14488 - protein, 107 aa, Homo sapiens
DIQMTQSPSSLSASVGDRVTITCRASQGIRNDLGWYQQKPGKAPKRLIYAASSLQSGVPSRFSGSGSGTEFTLTVSSLQPEDFATYYCLQHNSLPLTFGGGTKVEIK

SEQ ID NO: 14489 - protein, 106 aa, Homo sapiens
DIQMTQSPSSLSASVGDRVTITCQASQDISNYLNWYQQKPGKAPKLLIYDASNLETGVPSRFSGSGSGTDFTFTISSLQPEDIATYYCHQCDNLPHFGQGTRLEIK

SEQ ID NO: 14490 - protein, 107 aa, Homo sapiens
DIQMTQSPSSLSASVGDRVTITCRASQAIRNDLGWYQQKPGKAPKRLIYAASSLQSGVPSRFSGSRSGTEFTLTISSLQPEDFASYYCLQHRSYPLTFGGGTKVEIK

SEQ ID NO: 14491 - protein, 107 aa, Homo sapiens
EIVMTQSPSTLSVSPGERATLSCRASQSVSSNLAWYQQKPGQAPRLLIYGASIRATGIPARFSGSGSGTEYTLTISSLQSEDFAVYYCQQYNNWPFTFGPGTKVDIK

SEQ ID NO: 14492 - protein, 107 aa, Homo sapiens
DIQMTQSPSSLSASVGDRVAITCRTSQSISSYLNWYQQKPGKAPELLIYAASNLQSGVPSRFSGSGSGTDFTLTISSLQPEDFATYYCQQSSSTLITFGQGTRLEIK

SEQ ID NO: 14493 - protein, 107 aa, Homo sapiens
EIVMTQSPATLSVSPGERATLSCRASQSVSSNLAWYQQKPGQAPRLLIYGASTRATGIPARFSGSRTGTEFTLTISSLQSEDFAVYYCQQYNNWPLTFGGGTKVEIK

SEQ ID NO: 14494 - protein, 107 aa, Homo sapiens
DIQMTQSPSSLSASVGDRVTITCRTSQSISSYLNWYHQKPGKAPELLIYAAFNLQSGVPSRFSGSGSGTDFTLTISSLQPEDFATYYCQQSSSTLITFGQGTRLEIK

SEQ ID NO: 14495 - protein, 108 aa, Homo sapiens
SYELTQPPSVSVSPGQTARITCSGDALPKKYVYWYQQKSGQAPVLVIYEDSKRPSGIPERFSGSSSGTMATLTINGAQVEDEADYYCYSTDSSGNHVVFGGGTKLTVL

SEQ ID NO: 14496 - protein, 123 aa, Homo sapiens
EVQLVESGGGLVKPGGSLRLSCAASGFTFSSYSMNWVRQAPGKGLEWVSSISSSSSYIYYADSVKGRFTISRDNAKNSLYLQMNSLRAEDTAVYYCARGGITGTTNYYGMDVWGQGTTVTVSS

SEQ ID NO: 14497 - protein, 125 aa, Homo sapiens
QVQLVQSGAEVKKPGASVKVSCKASGYTFTGYYMHWVRQAPGQGLEWMGWINPNSGGTNYAQKFQGRVTMTRDTSISTAYMELSRLRSDDTAVYYCARAPLWTVRSWYYYGMDVWGQGTTVTVSS

SEQ ID NO: 14498 - protein, 116 aa, Homo sapiens
EVQLVQSGAEVKKPGESLKISCKTSEYSFTSYWIGWVRQMPGKGLEWMGIIYLGDSDTRYSPSFQGQVTISADKSISTAYLQWSSLKASDTAMYYCARSNWGLDYWGQGTLVTVSS

SEQ ID NO: 14499 - protein, 117 aa, Homo sapiens
QVQLVQSGAEVKKPGASVKVSCKASGYTFTFYSITWVRQAPGQGLEWMGWISAYNDNTNYAQKLQGRVTMTTDTSTSTAYMELRSLRSDDTAVYYCARTFTSGFDYWGQGTLVTVSS

SEQ ID NO: 14500 - protein, 118 aa, Homo sapiens
QVQLQESGPGLVKPSETLSLTCTVSGGSISSYYWSWIRQPPGKGLEWIGYFYYSGSTNYNPSLKSRVTISVDTSKNQFSLKLRSVTAADTAVYYCARDRFTSGWFDYWGQGTLVTVSS

SEQ ID NO: 14501 - protein, 115 aa, Homo sapiens
EVQLVESGGGLIQPGGSLRLSCAASGFTVSNNYMHWVRQAPGKGLEWVSVIYSGGNTYYADSVKGRFTISRDNSKNTLFLQMNSLKTEDTAVYYCARGPGAFDIWGQGTMVTVSS

SEQ ID NO: 14502 - protein, 115 aa, Homo sapiens
EVQLVESGGGLIQPGGSLRLSCAASGFTVSSNYMSWVRQAPGKGLEWVSVIYSGGSTYYADSVKGRFTISRDNSKNTLYLQMNSLRAEDTAVYYCARGPGAFDIWGQGTMVTVSS

SEQ ID NO: 14503 - protein, 121 aa, Homo sapiens
QVQLVESGGGVVQPGRSLRLSCAASGFTFSSYGMHWVRQAPGKGLEWVAVIWYDGSNKYYADSVKGRFTISRDNSKNTLYLQMNSLRAEDTAVYYCAREGDYGGNPYFDYWGQGTLVTVSS

SEQ ID NO: 14504 - protein, 121 aa, Homo sapiens
QVHLVESGGGVVQPGRSLRLSCAASGFTFSSYGMHWVRQAPGKGLEWVAVIWHDGSNKYYADSVKGRFTISRDNSKNTLYLQMNSLRAEDTAVYYCTREGDYGGYPYFDYWGQGTLVTVSS

SEQ ID NO: 14505 - protein, 122 aa, Homo sapiens
QVQLVESGGGVVQPGRSLRLSCAASGFTFSSYGMHWVRQAPGKGLEWVAIIWYDGSNEYYGDSVKGRFTISRDNSKNTLFLQMNSLRAEDTAVYYCARDPLRIVVAGDFDYWGQGTLVTVSS

SEQ ID NO: 14506 - protein, 125 aa, Homo sapiens
QVQLVESGGGVVQPGRSLRLSCAASGFTFSSYGMHWVRQAPGKGLEWVAVIWYDGSNKYYADSVKGRFTISRDNSKNTLYLQMNSLRAEDTAVYYCARETTVTKEGYYYYGMDVWGQGTTVTVSS

SEQ ID NO: 14507 - protein, 120 aa, Homo sapiens
QVQLVESGGGVVQPGRSLRLSCAASGFTFSTYGMHWVRQAPGKGLEWVAVIWYDGSNKYYADSVKGRFTISRDNSKNTLYLQMNSLRAEDTAVYYCARSRYGDWGWFDPWGQGTLVTVSS

SEQ ID NO: 14508 - protein, 125 aa, Homo sapiens
QVQLVESGGGVVQPGRSLRLSCAASGFTFSSYDMHWVRQAPGKGLEWVAIISYDGSIKYYADSVKGRFTISRDNSKNTLYLQMNSLRAEDTAVYYCARENAVTYGGYYHYGMDVWGQGTTVTVSS

SEQ ID NO: 14509 - protein, 125 aa, Homo sapiens
QVQLVESGGGVVQPGRSLRLSCTTSGFTFSNYGMHWVRQAPGKGLEWVAVIWYDGSIKYYVDSVKGRFTISRDNSKNTLYLQMNSLRAEDTAVYYCAREKDCGGDCYSHYGMDVWGQGTTVTVSS

SEQ ID NO: 14510 - protein, 134 aa, Homo sapiens
QVQLVESGGGVVQPGRSLRLSCAASGFTFSSYGMHWVRQAPGKGLEWVAVIWYDGSNKYYADSVKGRFTISRDNSKNTLYLQMNSLRAEDTAVYYCARGNRVVVAGTRVTPANWGYYYYGMDVWGQGTTVTVSS

SEQ ID NO: 14511 - protein, 116 aa, Homo sapiens
EVQLVESGGGLVQPGGSLRLSCAASGFTFSNYGMNWVRQAPGKGLEWVSYISNSITSKYYADSVKGRFTISRDNAKNSLYLQMNSLRDVDTAVYHCARGPGGFDYWGQGTLVTVSS

SEQ ID NO: 14512 - protein, 122 aa, Homo sapiens
EVQLLESGGGLVQPGGSLRLSCAASGFTFSSYAMSWVRQAPGKGLEWVSAISGSGGSTYYADSVKGRFTISRDNSKNTLYLQMNSLRAEDTAVYYCAKDYYDSSGYHPFDYWGQGTLVTVSS

SEQ ID NO: 14513 - protein, 125 aa, Homo sapiens
QVQLVESGGGVVQPGRSLRLSCAASGFTFSSYDMHWVRQAPGKGLEWVAVIWYDGSNKYHADSVKGRFTISRDNSKNTLYLQMNSLRAEDTAVYYCARENTMVRGGDYYYGMDVWGQGTTVTVSS

SEQ ID NO: 14514 - protein, 122 aa, Homo sapiens
QVQLVESGGGVVQPGRSLRLSCAASGFTFSSYGMHWVRQAPGKGLEWVAVIWYDGRNKYNADSVKGRFTISRDNSKNTLNLQMNSLRAEDTAVYYCARDLTYYDILGGMDVWGQGTTVTVSS

SEQ ID NO: 14515 - protein, 135 aa, Mus musculus
MEWSGVFIFLLSVTADVHSQVQLQQSGPELVRPGTSVRISCKASGYTFTIYWLGWVKQRPGHGLEWIGNIFPGSAYINYNEKFKGKATLTADTSSSTAYMQLSSLTSEDSAVYFCAREGSNSGYWGQGTTLTVSS

SEQ ID NO: 14516 - protein, 116 aa, Mus musculus
QVQLVQSGAEVKKPGASVKVSCKASGYTFTIYWLGWVRQAPGQGLEWMGNIFPGSAYINYNEKFKGRVTITADTSTSTAYMELSSLRSEDTAVYYCAREGSNSGYWGQGTLVTVSS

SEQ ID NO: 14517 - protein, 116 aa, Artificial Sequence
  source: /note="Description of Artificial Sequence: Synthetic polypeptide"
QVQLVQSGPEVKKPGASVKVSCKASGYTFTIYWLGWVRQAPGQGLEWMGNIFPGSAYINYNEKFKGKVTITADTSTSTAYMELSSLRSEDTAVYFCAREGSNSGYWGQGTLVTVSS

SEQ ID NO: 14518 - protein, 116 aa, Artificial Sequence
  source: /note="Description of Artificial Sequence: Synthetic polypeptide"
QVQLVQSGPEVKKPGASVKVSCKASGYTFTIYWLGWVKQAPGQGLEWIGNIFPGSAYINYNEKFKGRVTITADTSTSTAYMELSSLRSEDTAVYFCAREGSNSGYWGQGTLVTVSS

SEQ ID NO: 14519 - protein, 116 aa, Artificial Sequence
  source: /note="Description of Artificial Sequence: Synthetic polypeptide"
QVQLVQSGAEVKKPGASVKVSCKASGYTFTIYWLGWVKQAPGQGLEWIGNIFPGSAYINYNEKFKGKATITADTSTSTAYMELSSLRSEDTAVYFCAREGSNSGYWGQGTLVTVSS

SEQ ID NO: 14520 - protein, 116 aa, Artificial Sequence
  source: /note="Description of Artificial Sequence: Synthetic polypeptide"
QVQLVQSGPEVVKPGASVKISCKASGYTFTIYWLGWVKQAPGQGLEWIGNIFPGSAYINYNEKFKGKATLTADTSTSTAYMELSSLRSEDTAVYFCAREGSNSGYWGQGTLLTVSS

SEQ ID NO: 14521 - protein, 449 aa, Artificial Sequence; identical to SEQ ID NO: 6969
  source: /note="Description of Artificial Sequence: Synthetic polypeptide"

SEQ ID NO: 14522 - protein, 113 aa, Artificial Sequence
  source: /note="Description of Artificial Sequence: Synthetic polypeptide"
LVQPGGSLRLSCAASGYTFTNYGMNWVRQAPGKGLEWVGWINTYTGEPTYAADFKRRFTFSLDTSKSTAYLQMNSLRAEDTAVYYCAKYPHYYGSSHWYFDVWGQGTLVTVSS

SEQ ID NO: 14523 - protein, 123 aa, Artificial Sequence [sequence omitted]

SEQ ID NO: 14524 - protein, 127 aa, Artificial Sequence
  source: /note="Description of Artificial Sequence: Synthetic polypeptide"
EVQLLESGGGLVQPGGSLRLSCAASGFTFSGYAMSWVRQAPGKGLEWVSSIYSSSGSKYYADSVKGRFTISRDNSKNTLYLQMNSLRAEDTAVYYCARASSTCTRTWCSYDDAMDVWGQGTLVTVSS

SEQ ID NO: 14525 - protein, 121 aa, Artificial Sequence
  source: /note="Description of Artificial Sequence: Synthetic polypeptide"
EVQLLESGGGLVQTGGSLRLSCAASGFTFSDYAMSWVRQAPGKGLEWVSSIYPGSGSKYYADSVKGRFAISRDNSKNTLYLQMNSLRAEDTAVYYCARDAWFRGHNVFDYWGQGTLVTVSS

SEQ ID NO: 14526 - protein, 127 aa, Artificial Sequence
  source: /note="Description of Artificial Sequence: Synthetic polypeptide"
EVQLLESGGGLVQPGGSLRLSCAASGFTFSNYDMSWVRQAPGKGLEWVSGIYPNGGSKYYADSVKGRFTISRDNSKNTLYLQMNSLRAEDTAVYYCARALRQCQRYWCSYADGMDVWGQGTLVTVSS

SEQ ID NO: 14527 - protein, 121 aa, Artificial Sequence
  source: /note="Description of Artificial Sequence: Synthetic polypeptide"
EVQLLESGGGLVQPGGSLRLSCAASGFTFSDYYMSWVRQAPGKGLEWVSAIYSGGGSIYYADSVKGRFTISRDNSKNTLYLQMNSLRAEDTAVYYCARDVQWNKAPRFDYWGQGTLVTVSS

SEQ ID NO: 14528 - protein, 121 aa, Artificial Sequence
  source: /note="Description of Artificial Sequence: Synthetic polypeptide"
EVQLLESGGGLVQPGGSLRLSCAASGFTFSSYSMSWVRQAPGKGLEWVSGISHGGGNKYYADSVKGRFTISRDNSKNTLYLQMNSLRAEDTAVYYCARDLRANNDTGFDYWGQGTLVTVSS

SEQ ID NO: 14529 - protein, 127 aa, Artificial Sequence
  source: /note="Description of Artificial Sequence: Synthetic polypeptide"
EVQLLESGGGLVQPGGSLRLSCAASGFTFSNYDMSWVRQAPGKGLEWVSLISHGGGNIYYADSVKGRFTISRDNSKNTLYLQMNSLRAEDTAVYYCARVPVMCTNHWCSYANGMDVWGQGTLVTVSS

SEQ ID NO: 14530 - protein, 121 aa, Artificial Sequence
  source: /note="Description of Artificial Sequence: Synthetic polypeptide"
EVQLLESGGGLVQPGGSLRLSCAASGFTFSGYAMSWVRQAPGKGLEWVSGISHDGGNTYYADSVKGRFTISRDNSKNTLYLQMNSLRAEDTAVYYCARDRRKGPSTEFDYWGQGTLVTVSS

SEQ ID NO: 14531 - protein, 127 aa, Artificial Sequence
  source: /note="Description of Artificial Sequence: Synthetic polypeptide"
EVQLLESGGGLVQTGGSLRLSCAASGFTFSDYAMSWVRQAPGKGLEWVSWIYPGDSSIYYADSVKGRFTISRDNSKNTLYLQMNSLRAEDTAVYYCARLLSIDQAQLHYYYDAMDVWGQGTLVTVSS

SEQ ID NO: 14532 - protein, 122 aa, Homo sapiens; identical to SEQ ID NO: 7214

SEQ ID NO: 14533 - protein, 118 aa, Mus musculus
EVQLQQSGAELVKPGASVKLSCTASGFNIKDTYIHWVKQRPEQGLEWVGRIDPATGNTRYDPKFQGKATITADTSSNTAYLQLSSLTSEDTAVYYCASFRPGYALDYWGQGTSVTVSS

SEQ ID NO: 14534 - protein, 251 aa, Artificial Sequence
  source: /note="Description of Artificial Sequence: Synthetic polypeptide"
MKKNIAFLLASMFVFSIATNAYAEVQLVESGGGLVPPGGSLKLSCAASGFIFSSYGMSWVRQTPGKSLELVATINNNGDSTYYPDSVKGRFTISRDNAKNTLYLQMSSLKSEDTAMFYCARALISSATWFGYWGQGTLVTVSAASTKGPSVFPLAPSSKSTSGGTAALGCLVKDYFPEPVTVSWNSGALTSGVHTFPAVLQSSGLYSLSSVVTVPSSSLGTQTYICNVNHKPSNTKVDKKVEPKSCDKTHT

SEQ ID NO: 14535 - protein, 81 aa, Artificial Sequence
  source: /note="Description of Artificial Sequence: Synthetic polypeptide"
QVQLVQSGAEVKKPGASVKVSCKASWVRQAPGQGLEWMRVTITADTSTSTAYMELSSLRSEDTAVYYCARWGQGTLVTVSS

SEQ ID NO: 14536 - protein, 80 aa, Artificial Sequence
  source: /note="Description of Artificial Sequence: Synthetic polypeptide"
QVQLVQSGAEVKKPGASVKVSCKASWVRQAPGQGLEWMRVTITADTSTSTAYMELSSLRSEDTAVYYCAWGQGTLVTVSS

SEQ ID NO: 14537 - protein, 79 aa, Artificial Sequence
  source: /note="Description of Artificial Sequence: Synthetic polypeptide"
QVQLVQSGAEVKKPGASVKVSCKASWVRQAPGQGLEWMRVTITADTSTSTAYMELSSLRSEDTAVYYCWGQGTLVTVSS

SEQ ID NO: 14538 - protein, 87 aa, Artificial Sequence
  source: /note="Description of Artificial Sequence: Synthetic polypeptide"
QVQLQESGPGLVKPSQTLSLTCTVSGGSVSWIRQPPGKGLEWIGRVTISVDTSKNQFSLKLSSVTAADTAVYYCARWGQGTLVTVSS

SEQ ID NO: 14539 - protein, 81 aa, Artificial Sequence
  source: /note="Description of Artificial Sequence: Synthetic polypeptide"
QVQLQESGPGLVKPSQTLSLTCTVSWIRQPPGKGLEWIRVTISVDTSKNQFSLKLSSVTAADTAVYYCARWGQGTLVTVSS

SEQ ID NO: 14540 - protein, 80 aa, Artificial Sequence
  source: /note="Description of Artificial Sequence: Synthetic polypeptide"
QVQLQESGPGLVKPSQTLSLTCTVSWIRQPPGKGLEWIRVTISVDTSKNQFSLKLSSVTAADTAVYYCAWGQGTLVTVSS

SEQ ID NO: 14541 - protein, 79 aa, Artificial Sequence
  source: /note="Description of Artificial Sequence: Synthetic polypeptide"
QVQLQESGPGLVKPSQTLSLTCTVSWIRQPPGKGLEWIRVTISVDTSKNQFSLKLSSVTAADTAVYYCWGQGTLVTVSS

SEQ ID NO: 14542 - protein, 87 aa, Artificial Sequence
  source: /note="Description of Artificial Sequence: Synthetic polypeptide"
EVQLVESGGGLVQPGGSLRLSCAASGFTFSWVRQAPGKGLEWVSRFTISRDNSKNTLYLQMNSLRAEDTAVYYCARWGQGTLVTVSS

SEQ ID NO: 14543 - protein, 81 aa, Artificial Sequence
  source: /note="Description of Artificial Sequence: Synthetic polypeptide"
EVQLVESGGGLVQPGGSLRLSCAASWVRQAPGKGLEWVRFTISRDNSKNTLYLQMNSLRAEDTAVYYCARWGQGTLVTVSS

SEQ ID NO: 14544 - protein, 80 aa, Artificial Sequence
  source: /note="Description of Artificial Sequence: Synthetic polypeptide"
EVQLVESGGGLVQPGGSLRLSCAASWVRQAPGKGLEWVRFTISRDNSKNTLYLQMNSLRAEDTAVYYCAWGQGTLVTVSS

SEQ ID NO: 14545 - protein, 79 aa, Artificial Sequence
  source: /note="Description of Artificial Sequence: Synthetic polypeptide"
EVQLVESGGGLVQPGGSLRLSCAASWVRQAPGKGLEWVRFTISRDNSKNTLYLQMNSLRAEDTAVYYCWGQGTLVTVSS

SEQ ID NO: 14546 - protein, 87 aa, Artificial Sequence
  source: /note="Description of Artificial Sequence: Synthetic polypeptide"
EVQLVESGGGLVQPGGSLRLSCAASGFNIKWVRQAPGKGLEWVSRFTISADTSKNTAYLQMNSLRAEDTAVYYCSRWGQGTLVTVSS

SEQ ID NO: 14547 - protein, 81 aa, Artificial Sequence
  source: /note="Description of Artificial Sequence: Synthetic polypeptide"
EVQLVESGGGLVQPGGSLRLSCAASWVRQAPGKGLEWVRFTISADTSKNTAYLQMNSLRAEDTAVYYCSRWGQGTLVTVSS

SEQ ID NO: 14548 - protein, 80 aa, Artificial Sequence
  source: /note="Description of Artificial Sequence: Synthetic polypeptide"
EVQLVESGGGLVQPGGSLRLSCAASWVRQAPGKGLEWVRFTISADTSKNTAYLQMNSLRAEDTAVYYCSWGQGTLVTVSS

SEQ ID NO: 14549 - protein, 87 aa, Artificial Sequence
  source: /note="Description of Artificial Sequence: Synthetic polypeptide"
EVQLVESGGGLVQPGGSLRLSCAASGFNIKWVRQAPGKGLEWVSRFTISADTSKNTAYLQMNSLRAEDTAVYYCARWGQGTLVTVSS

SEQ ID NO: 14550 - protein, 81 aa, Artificial Sequence
  source: /note="Description of Artificial Sequence: Synthetic polypeptide"
EVQLVESGGGLVQPGGSLRLSCAASWVRQAPGKGLEWVRFTISADTSKNTAYLQMNSLRAEDTAVYYCARWGQGTLVTVSS

SEQ ID NO: 14551 - protein, 80 aa, Artificial Sequence
  source: /note="Description of Artificial Sequence: Synthetic polypeptide"
EVQLVESGGGLVQPGGSLRLSCAASWVRQAPGKGLEWVRFTISADTSKNTAYLQMNSLRAEDTAVYYCAWGQGTLVTVSS

SEQ ID NO: 14552 - protein, 79 aa, Artificial Sequence
  source: /note="Description of Artificial Sequence: Synthetic polypeptide"
EVQLVESGGGLVQPGGSLRLSCAASWVRQAPGKGLEWVRFTISADTSKNTAYLQMNSLRAEDTAVYYCWGQGTLVTVSS

SEQ ID NO: 14553 - protein, 449 aa, Homo sapiens
EVQLLESGGGLVQPGGSLRLSCAASGFTFSSFPMAWVRQAPGKGLEWVSTISTSGGRTYYRDSVKGRFTISRDNSKNTLYLQMNSLRAEDTAVYYCAKFRQYSGGFDYWGQGTLVTVSSASTKGPSVFPLAPSSKSTSGGTAALGCLVKDYFPEPVTVSWNSGALTSGVHTFPAVLQSSGLYSLSSVVTVPSSSLGTQTYICNVNHKPSNTKVDKKVEPKSCDKTHTCPPCPAPELLGGPSVFLFPPKPKDTLMISRTPEVTCVVVDVSHEDPEVKFNWYVDGVEVHNAKTKPREEQYASTYRVVSVLTVLHQDWLNGKEYKCKVSNKALPAPIEKTISKAKGQPREPQVYTLPPSRDELTKNQVSLTCLVKGFYPSDIAVEWESNGQPENNYKTTPPVLDSDGSFFLYSKLTVDKSRWQQGNVFSCSVMHEALHNHYTQKSLSLSPGK

SEQ ID NO: 14554 - protein, 119 aa, Artificial Sequence
  source: /note="Description of Artificial Sequence: Synthetic polypeptide"
QVQLVQSGAEVKKPGASVKISCKASGYSFTAYYIHWVKQAPGQGLEWIGYISSYNGATNYNQKFKGRVTFTTDTSTSTAYMELRSLRSDDTAVYYCARDYDYDVGMDYWGQGTLVTVSS

SEQ ID NO: 14555 - protein, 119 aa, Artificial Sequence
  source: /note="Description of Artificial Sequence: Synthetic polypeptide"
QVQLVQSGAEVKKPGASVKISCKASGYSFTAYYIHWVKQAPGQGLEWIGYISCYNGATNYNQKFKGRVTFTTDTSTSTAYMELRSLRSDDTAVYYCARDYDYDVGMDYWGQGTLVTVSS

SEQ ID NO: 14556 - protein, 119 aa, Artificial Sequence
  source: /note="Description of Artificial Sequence: Synthetic polypeptide"
QVQLVQSGAEVKKPGASVKISCKASGYSFTAYYIHWVKQAPGQGLEWIGYISVYNGATNYNQKFKGRVTFTTDTSTSTAYMELRSLRSDDTAVYYCARDYDYDVGMDYWGQGTLVTVSS

SEQ ID NO: 14557 - protein, 123 aa, Artificial Sequence
  source: /note="Description of Artificial Sequence: Synthetic polypeptide"
QLQLVESGGGMAQPGGSLKLSCAASGFTFDDYAMTWVRQAPGKGLEWLSTISWNDINTYYAESMKDRFTISRDNAKNTLYLQMNSLESEDTAVYYCAKRRDNYYGTSGEYDYWGQGTQVTVSS

SEQ ID NO: 14558 - protein, 118 aa, Artificial Sequence
  source: /note="Description of Artificial Sequence: Synthetic polypeptide"
QVQLQESGGDLVQPGGSLRLSCAASGFTFDDYVMNWVRQAPGKGLEWISAINWNGGSTYYAESMKGRFTISRDNAKNTLYLQMYSLQSDDTAVYYCVKDTVVSGNGYWGQGTQVTVSS

SEQ ID NO: 14559 - protein, 117 aa, Artificial Sequence
  source: /note="Description of Artificial Sequence: Synthetic polypeptide"
QVQLVESGGGLVQPGGSLRLSCAASGFTFDDYAMSWVRQAPGKGLEWVSAISWNGSSTYYAESMKGRFTISRDNAKNTLYLQMNSLKSEDTAVYYCAKDLIGSHDYWGQGTQVTVSS

SEQ ID NO: 14560 - protein, 122 aa, Artificial Sequence
  source: /note="Description of Artificial Sequence: Synthetic polypeptide"
EVQVQESGPGLVKPSQTLSLTCTVSGGSMTGNYYAWSWIRQPPGKGLEWMGVIAYDGSTYYSPSLKSRTSISRDTSKNQFSLQLSSVSPEDTAVYYCARGPGWYSGSRNDYWGQGTQVTVSS

SEQ ID NO: 14561 - protein, 119 aa, Artificial Sequence
  source: /note="Description of Artificial Sequence: Synthetic polypeptide"
EVQLVQPGVELRNPGASVKVSCKASGYIFTMNSIDWVRQAPGQGLEWMGRIDPEDGGTKYAQKFQGRVTFTADTSTSTAYVELNSLRSEDTAVYYCARVDDYYLGYDYWGQGTQVTVSS

SEQ ID NO: 14562 - protein, 119 aa, Artificial Sequence
  source: /note="Description of Artificial Sequence: Synthetic polypeptide"
EVQLVQPGAELRNPGASVKVSCKASGYTFTNYVIDWVRQAPGQGLEWMGRIDPENGGTRYAQKFQGRVTFTADTSTSTAYVELSNLRSEDTAVYYCARLEDYELAYDYWGQGTQVTVSS

SEQ ID NO: 14563 - protein, 127 aa, Artificial Sequence
  source: /note="Description of Artificial Sequence: Synthetic polypeptide"
QVQLVESGPGLVKPSQTLSLTCAVSGGSITTNYYYWSWIRQSPGKGLEWMGVIAYDGSTDYSPSLKSRTSISRDTSKNQFSLQLSSVTPEDTAVYYCARDVRVIATGWATANALDAWGQGTLVTVSS

SEQ ID NO: 14564 - protein, 120 aa, Artificial Sequence
  source: /note="Description of Artificial Sequence: Synthetic polypeptide"
ELQLVESGGALVQPGGSLRLSCVESGFTFSSYAMSWVRQAPGKGLEWVSGIYKGGGPKYANSVKGRFTISRDNAKNTLYLQMNSLKPEDTAVYYCAKSGYGSSLGDFGSWGQGTQVTVSS

SEQ ID NO: 14565 - protein, 127 aa, Artificial Sequence
  source: /note="Description of Artificial Sequence: Synthetic polypeptide"
QVQLVESGPGLVKPSQTLSLTCAVSGGSITTNYYYWSWIRQSPGKGLEWMGVIAYDGSTDYSPSLKSRTSISRDTSKNQFSLQLSSVTPEDTAVYYCARDVRVIATGWATANALDAWGQGTQVTVSS

SEQ ID NO: 14566 - protein, 112 aa, Artificial Sequence
  source: /note="Description of Artificial Sequence: Synthetic polypeptide"
DVQLQESGPGLVKPSQSLSLTCTVTGFSITTEYAWNWIRQFPGNRLEWMGYIGYTGRTNYAPSLKSRISITRDTSKNQFFLQLNSVTTEDTATYYCTRMDYWGQGTSVTVSS

SEQ ID NO: 14567 - protein, 112 aa, Artificial Sequence
  source: /note="Description of Artificial Sequence: Synthetic polypeptide"
DVQLQESGPGLVKPSQSLSLTCTVTGFSITTEYAWNWIRQFPGNRLEWMGYIGYTGRTYYSPSLKSRISITRDTSKNQFFLQLNSVTTEDTATYYCTRMDYWGQGTSVTVSS

SEQ ID NO: 14568 - protein, 112 aa, Artificial Sequence
  source: /note="Description of Artificial Sequence: Synthetic polypeptide"
DVQLQESGPGLVKPSQSLSLTCTVTGFSITTEYAWNWIRQFPGNRLEWMGYIGYTGRTSYSPSLKSRISITRDTSKNQFFLQLNSVTTEDTATYYCTRMDYWGQGTSVTVSS

SEQ ID NO: 14569 - protein, 112 aa, Artificial Sequence
  source: /note="Description of Artificial Sequence: Synthetic polypeptide"
DVQLQESGPGLVKPSQSLSLTCTVTGFSITTEYAWNWIRQFPGNRLEWMGYIGYTGRTGYSPSLKSRISITRDTSKNQFFLQLNSVTTEDTATYYCTRMDYWGQGTSVTVSS

SEQ ID NO: 14570 - protein, 112 aa, Artificial Sequence
  source: /note="Description of Artificial Sequence: Synthetic polypeptide"
DVQLQESGPGLVKPSQSLSLTCTVTGFSITTEYAWNWIRQFPGNRLEWMGYIGYTGRTSYAPSLKSRISITRDTSKNQFFLQLNSVTTEDTATYYCTRMDYWGQGTSVTVSS

SEQ ID NO: 14571 - protein, 112 aa, Artificial Sequence
  source: /note="Description of Artificial Sequence: Synthetic polypeptide"
DVQLQESGPGLVKPSQSLSLTCTVTGFSITTEYAWNWIRQFPGNRLEWMGYIGYTGRTGYAPSLKSRISITRDTSKNQFFLQLNSVTTEDTATYYCTRMDYWGQGTSVTVSS

SEQ ID NO: 14572 - protein, 116 aa, Homo sapiens
EVQLVESGGGLVQPGGSLRLSCAASGFSFTGHWMNWVRQAPGKGLEWVGMIHPSDSETRYADSVKGRFTISRDNSKNTLYLQMNSLRAEDTAVYYCAARGIYFYGTTYFDYWGQGT

SEQ ID NO: 14573 - protein, 117 aa, Artificial Sequence
  source: /note="Description of Artificial Sequence: Synthetic polypeptide"
QVQLQESGPGLVKPSETLSLTCTVSGYSITGGYLWNWIRQPPGKGLEWMGYISYDGTNNYKPSLKDRITISRDTSKNQFSLKLSSVTAADTAVYYCARYGRVFFDYWGQGTLVTVSS

SEQ ID NO: 14574 - protein, 130 aa, Artificial Sequence; identical to SEQ ID NO: 14417
  source: /note="Description of Artificial Sequence: Synthetic polypeptide"

SEQ ID NO: 14575 - protein, 119 aa, Artificial Sequence
  source: /note="Description of Artificial Sequence: Synthetic polypeptide"
EVQLVQSGGGLVHPGGSLRLSCAGSGFTFRNYAMYWVRQAPGKGLEWVSAIGSGGGTYYADSVKGRFTISRDNAKNSLYLQMNSLRAEDMAVYYCARAPNWGSDAFDIWGQGTMVTVSS

SEQ ID NO: 14576 - protein, 117 aa, Artificial Sequence [sequence omitted]

SEQ ID NO: 14577 - protein, 117 aa, Artificial Sequence; identical to SEQ ID NO: 12739
  source: /note="Description of Artificial Sequence: Synthetic polypeptide"

SEQ ID NO: 14578 - protein, 174 aa, Artificial Sequence
  source: /note="Description of Artificial Sequence: Synthetic polypeptide"
GRLGQAWRSLRLSCAASGFTFSDYYMSWIRQAPGKGLEWVSYISSSGSTRDYADSVKGRFTISRDNAKNSLYLQMNSLRAEDTAVYYCVRDGVETTFYYYYYGMDVWGQGTTVTVSSASTKGPSVFPLAPCSRSTSESTAALGCLVKDYFPEPVTVSWNSGALTSGVHTFPSCA

SEQ ID NO: 14579 - protein, 124 aa, Artificial Sequence
  source: /note="Description of Artificial Sequence: Synthetic polypeptide"
VQLLESGGGLVQPGGSLRLSCTASGFTFSSYAMNWVRQAPGKGLEWVSAISGSGGTTFYADSVKGRFTISRDNSRTTLYLQMNSLRAEDTAVYYCAKDLGWSDSYYYYYGMDVWGQGTTVTVSS

SEQ ID NO: 14580 - protein, 112 aa, Artificial Sequence
  source: /note="Description of Artificial Sequence: Synthetic polypeptide"
GPGLVKPSETLSLTCTVSGGSISNYYWSWIRQPAGKGLEWIGRIYTSGSPNYNPSLKSRVTMSVDTSKNQFSLKLNSVTAADTAVYYCAVTIFGVVIIFDYWGQGTLVTVSS

SEQ ID NO: 14581 - protein, 113 aa, Artificial Sequence
  source: /note="Description of Artificial Sequence: Synthetic polypeptide"
PGLVKPSETLSLTCTVSGGSISSYYWSWIRQPPGKGLEWIGYIYYSGSTNYNPSLKSRVTISVDTSKNQFSLKLSSVTAADTAVYYCARTYSSSFYYYGMDVWGQGTTVTVSS

SEQ ID NO: 14582 - protein, 122 aa, Artificial Sequence; identical to SEQ ID NO: 12812
  source: /note="Description of Artificial Sequence: Synthetic polypeptide"

SEQ ID NO: 14583 - protein, 473 aa, Artificial Sequence; identical to SEQ ID NO: 13000
  source: /note="Description of Artificial Sequence: Synthetic polypeptide"

SEQ ID NO: 14584 - protein, 470 aa, Artificial Sequence; identical to SEQ ID NO: 13001
  source: /note="Description of Artificial Sequence: Synthetic polypeptide"

SEQ ID NO: 14585 - protein, 470 aa, Artificial Sequence; identical to SEQ ID NO: 13002
  source: /note="Description of Artificial Sequence: Synthetic polypeptide"

SEQ ID NO: 14586 - protein, 470 aa, Artificial Sequence; identical to SEQ ID NO: 13003
  source: /note="Description of Artificial Sequence: Synthetic polypeptide"

SEQ ID NO: 14587 - protein, 470 aa, Artificial Sequence
  source: /note="Description of Artificial Sequence: Synthetic polypeptide"
MEFGLSWVFLVAIIKGVQCQVQLVESGGGLVKPGGSLRLSCAASGFTFSDYYMSWIRQAPGKGLEWVSYISSSGSTRDYADSVKGRFTISRDNAKNSLYLQMNSLRAEDTAVYYCARDGVETTFYYYYYGMDVWGQGTTVTVSSASTKGPSVFPLAPCSRSTSESTAALGCLVKDYFPEPVTVSWNSGALTSGVHTFPAVLQSSGLYSLSSVVTVPSSNFGTQTYTCNVDHKPSNTKVDKTVERKCCVECPPCPAPPVAGPSVFLFPPKPKDTLMISRTPEVTCVVVDVSHEDPEVQFNWYVDGVEVHNAKTKPREEQFNSTFRVVSVLTVVHQDWLNGKEYKCKVSNKGLPAPIEKTISKTKGQPREPQVYTLPPSREEMTKNQVSLTCLVKGFYPSDIAVEWESNGQPENNYKTTPPMLDSDGSFFLYSKLTVDKSRWQQGNVFSCSVMHEALHNHYTQKSLSLSPGK

SEQ ID NO: 14588 - protein, 125 aa, Artificial Sequence
  source: /note="Description of Artificial Sequence: Synthetic polypeptide"
QVQLVESGGGLVKPGGSLRLSCAASGFTFSDYYMSWIRQAPGKGLEWVSYISSSGSTRDYADSVKGRFTISRDNAKNSLYLQMNSLRAEDTAVYYCARDGVETTFYYYYYGMDVWGQGTTVTVSS

SEQ ID NO: 14589 - protein, 117 aa, Artificial Sequence
  source: /note="Description of Artificial Sequence: Synthetic polypeptide"
QVQFQQSGAELVKPGASVKLSCKASGYTFTSYLMHWIKQRPGRGLEWIGRIDPNNVVTKFNEKFKSKATLTVDKPSSTAYMELSSLTSEDSAVYYCARYAYCRPMDYWGQGTTVTVS

SEQ ID NO: 14590 - protein, 123 aa, Artificial Sequence; identical to SEQ ID NO: 14281
  source: /note="Description of Artificial Sequence: Synthetic polypeptide"

SEQ ID NO: 14591 - protein, 473 aa, Artificial Sequence; identical to SEQ ID NO: 13000
  source: /note="Description of Artificial Sequence: Synthetic polypeptide"

SEQ ID NO: 14592 - protein, 470 aa, Artificial Sequence; identical to SEQ ID NO: 13001
  source: /note="Description of Artificial Sequence: Synthetic polypeptide"

SEQ ID NO: 14593 - protein, 470 aa, Artificial Sequence; identical to SEQ ID NO: 13002
  source: /note="Description of Artificial Sequence: Synthetic polypeptide"

SEQ ID NO: 14594 - protein, 470 aa, Artificial Sequence; identical to SEQ ID NO: 13003
  source: /note="Description of Artificial Sequence: Synthetic polypeptide"

SEQ ID NO: 14595 - protein, 470 aa, Artificial Sequence; identical to SEQ ID NO: 14587
  source: /note="Description of Artificial Sequence: Synthetic polypeptide"

SEQ ID NO: 14596 - protein, 135 aa, Homo sapiens
MKVLSLLYLLTAIPGILSQVQLQESGPGLVKPSETLSLTCTVSGYSISGGYLWNWIRQPPGKGLEWIGYISYDGTNNYKPSLKDRVTISVDTSKNQFSLKLSSVTAADTAVYYCARYGRVFFDYWGQGTLVTVSS

SEQ ID NO: 14597 - protein, 99 aa, Unknown
  source: /note="Description of Unknown: rabbit polypeptide"
HCQSLEESGGGLVKPGASLTLTCTASGFSFSNNDWMCWVRQAPGKGLEWICIYGGSSIGTNYAGWAKGRFTISRTSSTTVALQMTSLTVADTATYFCTR

SEQ ID NO: 14598 - protein, 97 aa, Unknown
  source: /note="Description of Unknown: rabbit polypeptide"
QCQSVEESGGRLVTPGTPLTLTCTVSGFSLNTYGVSWVRQAPGKGLEWIGYIFTDGQTYYASWAKGRFTISKTSSTTVDLKITSPTTEDTATYFCAS

SEQ ID NO: 14599 - protein, 468 aa, Homo sapiens
MDWTWRILFLVAAATGTHAQVQLKQSGPGLVQPSQSLSITCTVSGFSLTNYGVHWVRQSPGKGLEWLGVIWSGGNTDYNTPFTSRLSINKDNSKSQVFFKMNSLQSNDTAIYYCARALTYYDYEFAYWGQGTLVTVSAASTKGPSVFPLAPSSKSTSGGTAALGCLVKDYFPEPVTVSWNSGALTSGVHTFPAVLQSSGLYSLSSVVTVPSSSLGTQTYICNVNHKPSNTKVDKRVEPKSCDKTHTCPPCPAPELLGGPSVFLFPPKPKDTLMISRTPEVTCVVVDVSHEDPEVKFNWYVDGVEVHNAKTKPREEQYNSTYRVVSVLTVLHQDWLNGKEYKCKVSNKALPAPIEKTISKAKGQPREPQVYTLPPSRDELTKNQVSLTCLVKGFYPSDIAVEWESNGQPENNYKTTPPVLDSDGSFFLYSKLTVDKSRWQQGNVFSCSVMHEALHNHYTQKSLSLSPGK

SEQ ID NO: 14600 - protein, 457 aa, Artificial Sequence
  source: /note="Description of Artificial Sequence: Synthetic polypeptide"
QVQLKQSGPGLVQPSQSLSITCTVSGFSLTNYGVHWVRQSPGKGLEWLGVIWSGGNTDYNTPFTSRLSINKDNSKSQVFFKMNSLQSNDTAIYYCARALTYYDYEFAYWGQGTLVTVSSASTKGPSVFPLAPSSKSTSGGTAALGCLVKDYFPEPVTVSWNSGALTSGVHTFPAVLQSSGLYSLSSVVTVPSSSLGTQTYICNVNHKPSNTKVDKKVEPKSCDKTHTCPPCPAPELLGGPSVFLFPPKPKDTLMISRTPEVTCVVVDVSHEDPEVKFNWYVDGVEVHNAKTKPREEQYNSTYRVVSVLTVLHQDWLNGKEYKCKVSNKALPAPIEKTISKAKGQPREPQVYTLPPSRDELTKNQVSLTCLVKGFYPSDIAVEWESNGQPENNYKTTPPVLDSDGSFFLYSKLTVDKSRWQQGNVFSCSVMHEALHNHYTQKSLSLSPGKDYKDDDDK

SEQ ID NO: 14601 - protein, 393 aa, Artificial Sequence
  source: /note="Description of Artificial Sequence: Synthetic polypeptide"
EVQLLESGGGLVQPGGSLRLSCAASGFTFSIYRMQWVRQAPGKGLEWVSGISPSGGTTWYADSVKGRFTISRDNSKNTLYLQMNSLRAEDTAVYYCARWSGGSGYAFDIWGQGTMVTVSSASTKGPSVFPLAPSSKSTSGGTAALGCLVKDYFPEPVTVSWNSGALTSGVHTFPAVLQSSGLYSLSSVVTVPSSSLGTQTYICNVNHKPSNTKVDKKVEPKSCDKGGGGSGGGGSGGGGSGGGGSNPAAHLTGANSSLTGSGGPLLWETQLGLAFLRGLSYHDGALVVTKAGYYYIYSKVQLGGVGCPLGLASTITHGLYKRTPRYPEELELLVSQQSPCGRATSSSRVWWDSSFLGGVVHLEAGEEVVVRVLDERLVRLRDGTRSYFGAFMV

SEQ ID NO: 14602 - protein, 214 aa, Artificial Sequence
  source: /note="Description of Artificial Sequence: Synthetic polypeptide"
DIQMTQSPLSLSASVGDRVTITCQASRDIRNYLNWYQQKPGKAPKLLIYDASSLQTGVPSRFGGSGSGTDFSFTIGSLQPEDIATYYCQQFDSLPHTFGQGTKLEIKRTVAAPSVFIFPPSDEQLKSGTASVVCLLNNFYPREAKVQWKVDNALQSGNSQESVTEQDSKDSTYSLSSTLTLSKADYEKHKVYACEVTHQGLSSPVTKSFNRGEC

SEQ ID NO: 14603 - protein, 483 aa, Artificial Sequence
  source: /note="Description of Artificial Sequence: Synthetic polypeptide"
MGWTWIFILILSVTTGVHSEVQLQQSGPELEKPGASVKISCKASGYSFTGYNMNWVKQSNGKSLEWIGNIDPYYGAASYNQKFKGKATLTVDKSSSTAYMQLKSLTSEDSAVYYCARSQLPYWYFDVWGAGTTVTVSSASTKGPSVFPLAPSSASTKGPSVFPLAPSSKSTSGGTAALGCLVKDYFPEPVTVSWNSGALTSGVHTFPAVLQSSGLYSLSSVVTVPSSSLGTQTYICNVNHKPSNTKVDKKVEPKSCDKTHTCPPCPAPELLGGPSVFLFPPKPKDTLMISRTPEVTCVVVDVSHEDPEVKFNWYVDGVEVHNAKTKPREEQYNSTYRVVSVLTVLHQDWLNGKEYKCKVSNKALPAPIEKTISKAKGQPREPQVYTLPPSRDELTKNQVSLTCLVKGFYPSDIAVEWESNGQPENNYKTTPPVLDSDGSFFLYSKLTVDKSRWQQGNVFSCSVMHEALHNHYTQKSLSLSPGK

SEQ ID NO: 14604 - protein, 465 aa, Artificial Sequence
  source: /note="Description of Artificial Sequence: Synthetic polypeptide"
MRVLILLWLFTAFPGILSDVQLQESGPGLVKPSQSLSLTCTVTGYSITSDYAWNWIRLFPGNKLEWMGFINYSGNTSYNPSLKSRISITRDTSKNQFFLKLNSLTTDDTATYYCARGGLSRFPYWGQGTLVTVSAASTKGPSVFPLAPSSKSTSGGTAALGCLVKDYFPEPVTVSWNSGALTSGVHTFPAVLQSSGLYSLSSVVTVPSSSLGTQTYICNVNHKPSNTKVDKKVEPKSCDKTHTCPPCPAPELLGGPSVFLFPPKPKDTLMISRTPEVTCVVVDVSHEDPEVKFNWYVDGVEVHNAKTKPREEQYNSTYRVVSVLTVLHQDWLNGKEYKCKVSNKALPAPIEKTISKAKGQPREPQVYTLPPSRDELTKNQVSLTCLVKGFYPSDIAVEWESNGQPENNYKTTPPVLDSDGSFFLYSKLTVDKSRWQQGNVFSCSVMHEALHNHYTQKSLSLSPGK

SEQ ID NO: 14605 - protein, 350 aa, Artificial Sequence
  source: /note="Description of Artificial Sequence: Synthetic polypeptide"
ISSSGGLTWYADSVKGRFTISRDNSKNTLYLQMNSLRAEDTAVYYCASPPGIAVARDYWGQGTLVTVSSASTKGPSVFPLAPSSKSTSGGTAALGCLVKDYFPEPVTVSWNSGALTSGVHTFPAVLQSSGLYSLSSVVTVPSSSLGTQTYICNVNHKPSNTKVDKKVEPKSCDKLHWRLGEMVTRLPDGPAGSWQERRSHEVNPAAHLTGANSSLTGSGGPLLWETQLGLAFLRGLSYHDGALVVTKAGYYYIYSKVQLGGVGCPLGLASTITHGLYKRTPRYPEELELLVSQQSPCGRATSSSRVWWDSSFLGGVVHLEAGEEVVVRVLDERLVRLRDGTRSYFGAFMV

SEQ ID NO: 14606 - protein, 405 aa, Artificial Sequence [sequence omitted]

SEQ ID NO: 14607 - protein, 392 aa, Artificial Sequence
  source: /note="Description of Artificial Sequence: Synthetic polypeptide"
EVQLLESGGGLVQPGGSLRLSCAASGFTFSSYGMVWVRQAPGKGLEWVSSISSSGGLTWYADSVKGRFTISRDNSKNTLYLQMNSLRAEDTAVYYCASPPGIAVARDYWGQGTLVTVSSASTKGPSVFPLAPSSKSTSGGTAALGCLVKDYFPEPVTVSWNSGALTSGVHTFPAVLQSSGLYSLSSVVTVPSSSLGTQTYICNVNHKPSNTKVDKKVEPKSCDKGGGGSGGGGSGGGGSGGGGSNPAAHLTGANSSLTGSGGPLLWETQLGLAFLRGLSYHDGALVVTKAGYYYIYSKVQLGGVGCPLGLASTITHGLYKRTPRYPEELELLVSQQSPCGRATSSSRVWWDSSFLGGVVHLEAGEEVVVRVLDERLVRLRDGTRSYFGAFMV

SEQ ID NO: 14608 - protein, 396 aa, Artificial Sequence
  source: /note="Description of Artificial Sequence: Synthetic polypeptide"
EVQLVESGGGLAKPGGSLRLSCAASGFRFTFNNYYMDWVRQAPGQGLEWVSRISSSGDPTWYADSVKGRFTISRENAKNTLFLQMNSLRAEDTAVYYCASLTTGSDSWGQGVLVTVSSASTKGPSVFPLAPSSKSTSGGTAALGCLVKDYFPEPVTVSWNSGALTSGVHTFPAVLQSSGLYSLSSVVTVPSSSLGTQTYICNVNHKPSNTKVDKKVEPKSCGGGGSGGGGSGGGGSNPAAHLTGANSSLTGSGGPLLWETQLGLAFLRGLSYHDGALVVTKAGYYYIYSKVQLGGVGCPLGLASTITHGLYKRTPRYPEELELLVSQQSPCGRATSSSRVWWDSSFLGGVVHLEAGEEVVVRVLDERLVRLRDGTRSYFGAFMVGGHHHHHHHHHH

SEQ ID NO: 14609 - protein, 391 aa, Artificial Sequence
  source: /note="Description of Artificial Sequence: Synthetic polypeptide"
EVQLVESGGGLAKPGGSLRLSCAASGFRFTFNNYYMDWVRQAPGQGLEWVSRISSSGDPTWYADSVKGRFTISRENAKNTLFLQMNSLRAEDTAVYYCASLTTGSDSWGQGVLVTVSSASTKGPSVFPLAPSSKSTSGGTAALGCLVKDYFPEPVTVSWNSGALTSGVHTFPAVLQSSGLYSLSSVVTVPSSSLGTQTYICNVNHKPSNTKVDKKVEPKSCDKGGGGSGGGGSGGGGSGGGGSNPAAHLTGANSSLTGSGGPLLWETQLGLAFLRGLSYHDGALVVTKAGYYYIYSKVQLGGVGCPLGLASTITHGLYKRTPRYPEELELLVSQQSPCGRATSSSRVWWDSSFLGGVVHLEAGEEVVVRVLDERLVRLRDGTRSYFGAFMV

SEQ ID NO: 14610 - protein, 449 aa, Homo sapiens
EVQLLESGGGLVQPGGSLRLSCAASGFTFSSYGMVWVRQAPGKGLEWVSSISSSGGLTWYADSVKGRFTISRDNSKNTLYLQMNSLRAEDTAVYYCASPPGIAVARDYWGQGTLVTVSSASTKGPSVFPLAPSSKSTSGGTAALGCLVKDYFPEPVTVSWNSGALTSGVHTFPAVLQSSGLYSLSSVVTVPSSSLGTQTYICNVNHKPSNTKVDKKVEPKSCDKTHTCPPCPAPELLGGPSVFLFPPKPKDTLMISRTPEVTCVVVDVSHEDPEVKFNWYVDGVEVHNAKTKPREEQYNSAYRVVSVLTVLHQDWLNGKEYKCKVSNKALPAPIEKTISKAKGQPREPQVYTLPPSRDELTKNQVSLTCLVKGFYPSDIAVEWESNGQPENNYKTTPPVLDSDGSFFLYSKLTVDKSRWQQGNVFSCSVMHEALHNHYTQKSLSLSPGK

SEQ ID NO: 14611 - protein, 400 aa, Artificial Sequence [sequence omitted]

SEQ ID NO: 14612 - protein, 117 aa, Homo sapiens
  MOD_RES (59)..(59): Any amino acid
QVQLQESGPGLVKPSQTLSLTCTVSGGSVSSYWSWNWIRQPPGKGLEWIGRIYYSGSTXYNPSLKSRVTISVDTSKNQFSLKLSSVTAADTAVYYCARELPGGYDVWGQGTLVTVSS

SEQ ID NO: 14613 - protein, 473 aa, Artificial Sequence; identical to SEQ ID NO: 13000
  source: /note="Description of Artificial Sequence: Synthetic polypeptide"

SEQ ID NO: 14614 - protein, 470 aa, Artificial Sequence; identical to SEQ ID NO: 13001
  source: /note="Description of Artificial Sequence: Synthetic polypeptide"

SEQ ID NO: 14615 - protein, 470 aa, Artificial Sequence; identical to SEQ ID NO: 13002
  source: /note="Description of Artificial Sequence: Synthetic polypeptide"

SEQ ID NO: 14616 - protein, 470 aa, Artificial Sequence; identical to SEQ ID NO: 13003
  source: /note="Description of Artificial Sequence: Synthetic polypeptide"

SEQ ID NO: 14617 - protein, 330 aa, Homo sapiens [sequence omitted]

SEQ ID NO: 14618 - protein, 330 aa, Artificial Sequence
  source: /note="Description of Artificial Sequence: Synthetic polypeptide"
ASTKGPSVFPLAPSSKSTSGGTAALGCLVKDYFPEPVTVSWNSGALTSGVHTFPAVLQSSGLYSLSSVVTVPSSSLGTQTYICNVNHKPSNTKVDKKVEPKSCDKTHTCPPCPAPEAAGGPSVFLFPPKPKDTLMISRTPEVTCVVVDVSHEDPEVKFNWYVDGVEVHNAKTKPREEQYNSTYRVVSVLTVLHQDWLNGKEYKCKVSNKALPAPIEKTISKAKGQPREPQVYTLPPSRDELTKNQVSLTCLVKGFYPSDIAVEWESNGQPENNYKTTPPVLDSDGSFFLYSKLTVDKSRWQQGNVFSCSVMHEALHNHYTQKSLSLSPGK

SEQ ID NO: 14619 - protein, 327 aa, Homo sapiens; identical to SEQ ID NO: 7171

SEQ ID NO: 14620 - protein, 327 aa, Artificial Sequence; identical to SEQ ID NO: 7179
  source: /note="Description of Artificial Sequence: Synthetic polypeptide"

SEQ ID NO: 14621 - protein, 109 aa, Artificial Sequence
  source: /note="Description of Artificial Sequence: Synthetic polypeptide"
DIQMTQSPSSLSASVGDRVTITCRASQDVNTAVAWYQQKPGKAPKLLIYSASFLESGVPSRFSGSRSGTDFTLTISSLQPEDFATYYCQQHYTTPPTFGQGTKVEIKRT

SEQ ID NO: 14622 - protein, 107 aa, Artificial Sequence
  source: /note="Description of Artificial Sequence: Synthetic polypeptide"
DIQMTQSPSSLSASVGDRVTITCRASQDVSTAVAWYQQKPGKAPKLLIYSASFLYSGVPSRFSGSGSGTDFTLTISSLQPEDFATYYCQQSYTTPPTFGQGTKVEIK

SEQ ID NO: 14623 - protein, 214 aa, Artificial Sequence; identical to SEQ ID NO: 9549
  source: /note="Description of Artificial Sequence: Synthetic polypeptide"

SEQ ID NO: 14624 - protein, 108 aa, Homo sapiens
EIVLTQSPGTLSLSPGERATLSCRASQSVSSNYLAWFQQKPGQAPRLLIFGTSSRATGIPDRFSGSGSGTDFTLTISRLEPEDFAVYYCQQYGSSIFTFGPGTKVDIK

SEQ ID NO: 14625 - protein, 108 aa, Homo sapiens
EIVLTQSPGTLSLSPGERATLSCRASQRVSSSYLAWYQQKPGQAPRLLIYDASSRATGIPDRFSGSGSGTDFTLTISRLEPEDFAVYYCQQYGSLPWTFGQGTEVEIK

SEQ ID NO: 14626 - protein, 108 aa, Homo sapiens
SYVLTQPPSVSVAPGQTARITCGGNNIGSKSVHWYQQKPGQAPVLVVYDDSDRPSGIPERFSGSNSGNTATLTISRVEAGDEADYYCQVWDSSNDHVVFGGGTKLTVL

SEQ ID NO: 14627 - protein, 108 aa, Homo sapiens
SYELTQPPSVSVSPGQTARITCSGDALPQKYVFWYQQKSGQAPVLVIYEDSKRPSGIPERFSGSSSGTMATLTISGAQVEDEADYYCYSTDRSGNHRVFGGGTKLTVL

SEQ ID NO: 14628 - protein, 108 aa, Homo sapiens
EIVLTQSPGTLSLSPGERATLSCRASQRVSSSYLAWYQQKPGQAPRLLIYDASSRATGIPDRFSGSGSGTDFTLTISRLEPEDFAVYYCQQYGSLPWTFGQGTKVEIK

SEQ ID NO: 14629 - protein, 215 aa, Artificial Sequence
  source: /note="Description of Artificial Sequence: Synthetic polypeptide"
EIVLTQSPALMAASPGEKVTITCSVSSSINSINLHWYRQKSETSPKPWIYGTSNLASGVPVRFSGSGSGTSYSLTISSMEAEDAATYYCQQWSSYPLTFGAGTKLELKRADAAPTVSIFPPSSEQLTSGGASVVCFLNNFYPKDINVKWKIDGSERQNGVLNSWTDQDSKDSTYSMSSTLTLTKDEYERHNSYTCEATHKTSTSPIVKSFNRNEC

SEQ ID NO: 14630 - protein, 179 aa, Homo sapiens
QAIVTLNTQAMHPTRWELSHMVDLQAAALVISSFITEHRGLTMEFGLSWVFLVALLRGIQCQVQLVESGGGVVQPGRSLRLSCAASGFPFRSFAMHWVRQALGKGLEWVAVISYDGSTKYYADSVKGRFTISRDTSKNTVYLKMNRLRTEDTAVFYLCERQSLLGDYDHYYGLDAWGKG

SEQ ID NO: 14631 - protein, 108 aa, Artificial Sequence; identical to SEQ ID NO: 11229
  source: /note="Description of Artificial Sequence: Synthetic polypeptide"

SEQ ID NO: 14632 - protein, 219 aa, Artificial Sequence
  source: /note="Description of Artificial Sequence: Synthetic polypeptide"
MDIVLTQSPTSLAVSLGQRATISCRASESVDSYGNSFMHWFQQKPGQPPKLLIYRASNLESGIPARFSGSGSWTDFTLTINPVEADDVATYYCQQSNEDPRTFGGGTKLEIKRTVAAPSVFIFPPSDEQLKSGTASVVCLLNNFYPREAKVQWKVDNALQSGNSQESVTEQDSKDSTYSLSSTLTLSKADYEKHKVYACEVTHQGLSSPVTKSFNRGEC

SEQ ID NO: 14633 - protein, 217 aa, Artificial Sequence
  source: /note="Description of Artificial Sequence: Synthetic polypeptide"
MDIVLTQSPTSLAVSLGQRATISCRASESVDSYGNSFMHWFQQKPGQPPKLLIYRASNLESGIPARFSGSGSWTDFTLTINPVEADDVATYYCQQSNEDPRTFGCGTKLEIKRTVAAPSVFIFPPSDEQLKSGTASVVCLLNNFYPREAKVQWKVDNALQSGNSQESVTEQDSKDSTYSLSSTLTLSKADYEKHKVYACEVTHQGLSSPVTKSFNRG

SEQ ID NO: 14634 - protein, 220 aa, Artificial Sequence
  source: /note="Description of Artificial Sequence: Synthetic polypeptide"
DIVMTQSPDSLAVSLGERATINCKSSQSLLASGNQNNYLAWHQQKPGQPPKMLIIWASTRVSGVPDRFSGSGSGTDFTLTISSLQAEDVAVYYCQQSYSAPLTFGGGTKVEIKRTVAAPSVFIFPPSDEQLKSGTASVVCLLNNFYPREAKVQWKVDNALQSGNSQESVTEQDSKDSTYSLSSTLTLSKADYEKHKVYACEVTHQGLSSPVTKSFNRGEC

SEQ ID NO: 14635 - protein, 220 aa, Artificial Sequence
  source: /note="Description of Artificial Sequence: Synthetic polypeptide"
DIVMTQSPDSLAVSLGERATINCKSSQSLLASGNQNNYLAWYQQKPGQPPKLLIIWASTRVSGVPDRFSGSGSGTDFTLTISSLQAEDVAVYYCQQSYSAPLTFGGGTKVEIKRTVAAPSVFIFPPSDEQLKSGTASVVCLLNNFYPREAKVQWKVDNALQSGNSQESVTEQDSKDSTYSLSSTLTLSKADYEKHKVYACEVTHQGLSSPVTKSFNRGEC

SEQ ID NO: 14636 - protein, 219 aa, Artificial Sequence
  source: /note="Description of Artificial Sequence: Synthetic polypeptide"
DIQMTQSPSSLSASVGDRVTITCKSSQSLLASGNQNNYLAWHQQKPGKAPKMLIIWASTRVSGVPSRFSGSGSGTDFTLTISSLQPEDFATYYCQQSYSAPLTFGQGTKVEIKRTVAAPSVFIFPPSDEQLKSGTASVVCLLNNFYPREAKVQWKVDNALQSGNSQESVTEQDSKDSTYSLSSTLTLSKADYEKHKVYACEVTHQGLSSPVTKSFNRGE

SEQ ID NO: 14637 - protein, 220 aa, Artificial Sequence
  source: /note="Description of Artificial Sequence: Synthetic polypeptide"
DIQMTQSPSSLSASVGDRVTITCKSSQSLLAWGNQNNYLAWYQQKPGKAPKMLIIWASTRVSGVPSRFSGSGSGTDFTLTISSLQPEDFATYYCQQSYSRPYTFGQGTKVEIKRTVAAPSVFIFPPSDEQLKSGTASVVCLLNNFYPREAKVQWKVDNALQSGNSQESVTEQDSKDSTYSLSSTLTLSKADYEKHKVYACEVTHQGLSSPVTKSFNRGEC

SEQ ID NO: 14638 - protein, 111 aa, Mus musculus
DIVLTQSPASLAVSLGQRATISCRASESVDSYANSFMHWYQQKPGQPPKLLIYRASNLESGIPARFSGSGSRTDFTLTINPVEADDVATYYCQQSKEDPLTFGSGTKLEMK

SEQ ID NO: 14639 - protein, 111 aa, Mus musculus
GIVLTQSPASLAVSLGQRATISCRVSESIDTYGNSFIHWYQQKPGQPPKLLIYRASNLESGIPARFSGSGSRTDFTLTINPVEADDSATYYCQQSNEDPFTFGSGTKLEMK

SEQ ID NO: 14640 - protein, 107 aa, Mus musculus
DIQMTQSPASLSVSVGETVTITCRASENIYSNLAWYQQKQGKSPQLLVYAATNLVDGVPSRFSGSGSGTQYSLKINSLQSEDFGSYYCQHFWGPPYTFGGGTKLEIK

SEQ ID NO: 14641 - protein, 108 aa, Mus musculus
QIVLTQSPAIMSASPGEKVTLTCSASSSVSSTYLYWYQQKPGSSPKLWIYTTSILASGVPARFSGSGSGTSYSLTISSMETEDAASYFCHQWSSYPFTFGSGTKLDIK

SEQ ID NO: 14642 - protein, 445 aa, Mus musculus
QVQLVQSGAEVKKPGASVKVSCKASGYIFTAYTMHWVRQAPGQGLEWMGWIKPNNGLANYAQKFQGRVTMTRDTSISTAYMELSRLRSDDTAVYYCARSEITTEFDYWGQGTLVTVSSASTKGPSVFPLAPSSKSTSGGTAALGCLVKDFPEPVTVSWNSGALTSGVHTFPAVLQSSGLYSLSSVVTVPSSSLGTQTYICNVNHKPSNTKVDKRVEPKSCDCHCPPCPAPELLGGPSVFLFPPKPKDTLMISRTPEVTCVVVDVSHEDPEVKFNWYVDGVEVHNAKTKPREEQYNSTYRVVSVLTVLHQDWLNGKEYKCKVSNKALPAPIEKTISKAKGQPREPQVYTLPPSREEMTKNQVSLTCLVKGFYPSDIAVEWESNGQPENNYKTTPPVLDSDGSFFLYSKLTVDKSRWQQGNVFSCSVMHEALHNHYTQKSLSLSPGK

SEQ ID NO: 14643 - protein, 218 aa, Mus musculus
DIVMTQSPDSLAVSLGERATINCKSSESVDSYANSFMHWYQQKPGQPPKLLIYRASTRESGVPDRFSGSGSGTDFTLTISSLQAEDVAVYYCQQSKEDPLTFGGGTKVEIKRTVAAPSVFIFPPSDEQLKSGTASVVCLLNNFYPREAKVQWKVDNALQSGNSQESVTEQDSKDSTYSLSSTLTLSKADYEKHKVYACEVTHQGLSSPVTKSFNRGEC

SEQ ID NO: 14644 - protein, 218 aa, Mus musculus
DIVMTQSPDSLAVSLGERATINCKSSESVDSYANSFLHWYQQKPGQPPKLLIYRASTRESGVPDRFSGSGSGTDFTLTISSLQAEDVAVYYCQQSKEDPLTFGGGTKVEIKRTVAAPSVFIFPPSDEQLKSGTASVVCLLNNFYPREAKVQWKVDNALQSGNSQESVTEQDSKDSTYSLSSTLTLSKADYEKHKVYACEVTHQGLSSPVTKSFNRGEC

SEQ ID NO: 14645 - protein, 218 aa, Mus musculus
DIVLTQSPASLAVSLGQRATISCRASESVDSYANSFMHWYQQKPGQPPKLLIYRASNLESGIPARFSGSGSRTDFTLTINPVEADDVATYYCQQSKEDPLTFGSGTKLEMKRTVAAPSVFIFPPSDEQLKSGTASVVCLLNNFYPREAKVQWKVDNALQSGNSQESVTEQDSKDSTYSLSSTLTLSKADYEKHKVYACEVTHQGLSSPVTKSFNRGEC

SEQ ID NO: 14646 - protein, 130 aa, Homo sapiens
QVQLKESGGGLVQPGGSLTLSCATSGFTFTDHYMSWVRQPPGKALEWLAFIRNKAKGYTTEYNASVRGRFTISRDNSQNIVYLQMNTLRTEDSATYYCARDGVGIAYWGQTLVTVSAAKTTPPSVYPLAP

SEQ ID NO: 14647 - protein, 442 aa, Artificial Sequence; identical to SEQ ID NO: 12467
  source: /note="Description of Artificial Sequence: Synthetic polypeptide"

SEQ ID NO: 14648 - protein, 215 aa, Artificial Sequence
  source: /note="Description of Artificial Sequence: Synthetic polypeptide"
EIVLTQSPGTLSLSPGERATLSCSVSSSISSTNLHWYQQKPGQAPRLLIYGTSYLASGIPDRFSGSGSGTDFTLTISRLEPEDFAVYYCQQWSSYPYSFGQGTKLEIKRTVAAPSVFIFPPSDEQLKSGTASVVCLLNNFYPREAKVQWKVDNALQSGNSQESVTEQDSKDSTYSLSSTLTLSKADYEKHKVYACEVTHQGLSSPVTKSFNRGEC

SEQ ID NO: 14649 - protein, 215 aa, Artificial Sequence
  source: /note="Description of Artificial Sequence: Synthetic polypeptide"
EIVLTQSPGTLSLSPGERATLSCSVSSSISSTNLHWYQQKPGQAPRLLIYGTSRLRSGIPDRFSGSGSGTDFTLTISRLEPEDFAVYYCQQWSSYPYSFGQGTKLEIKRTVAAPSVFIFPPSDEQLKSGTASVVCLLNNFYPREAKVQWKVDNALQSGNSQESVTEQDSKDSTYSLSSTLTLSKADYEKHKVYACEVTHQGLSSPVTKSFNRGEC

SEQ ID NO: 14650 - protein, 215 aa, Artificial Sequence
  source: /note="Description of Artificial Sequence: Synthetic polypeptide"
DIQMTQSPSSLSASVGDRVTITCSVSSSVSSIYLHWYQQKPGKAPKLLIYSTSNLASGVPSRFSGSGSGTDFTLTISSLQPEDFATYYCIQYSGYPLTFGGGTKVEIKRTVAAPSVFIFPPSDEQLKSGTASVVCLLNNFYPREAKVQWKVDNALQSGNSQESVTEQDSKDSTYSLSSTLTLSKADYEKHKVYACEVTHQGLSSPVTKSFNRGEC

SEQ ID NO: 14651 - protein, 215 aa, Artificial Sequence; identical to SEQ ID NO: 9758
  source: /note="Description of Artificial Sequence: Synthetic polypeptide"

SEQ ID NO: 14652 - protein, 215 aa, Artificial Sequence
  source: /note="Description of Artificial Sequence: Synthetic polypeptide"
DIQMTQSPSSLSASVGDRVTITCSVSSSVRSIYLHWYQQKPGKAPKLLIYSTSNLASGVPSRFSGSGSGTDFTLTISSLQPEDFATYYCQVYRGYPLTFGGGTKVEIKRTVAAPSVFIFPPSDEQLKSGTASVVCLLNNFYPREAKVQWKVDNALQSGNSQESVTEQDSKDSTYSLSSTLTLSKADYEKHKVYACEVTHQGLSSPVTKSFNRGEC

SEQ ID NO: 14653 - protein, 220 aa, Artificial Sequence
  source: /note="Description of Artificial Sequence: Synthetic polypeptide"
DIVMTQTPLSLPVTPGEPASISCKSSQSLLASGNQNNYLAWHLQKPGQSPQMLIIWASTRVSGVPDRFSGSGSGTDFTLKISRVEAEDVGVYYCQQSYSAPLTFGQGTKLELKRTVAAPSVFIFPPSDEQLKSGTASVVCLLNNFYPREAKVQWKVDNALQSGNSQESVTEQDSKDSTYSLSSTLTLSKADYEKHKVYACEVTHQGLSSPVTKSFNRGEC

SEQ ID NO: 14654 - protein, 112 aa, Mus musculus
DIVMSQSPSSLAVSAGEKVTMSCKSSQSLYNSRTRKNYLAWYQQKPGQSPKLLIYWASTRESGVPDRFTGSGSGTDFTLTITSVQAEDLAVFYCKQSYNLRTFGGGTKLEIK

SEQ ID NO: 14655 - protein, 112 aa, Mus musculus
DIVMSQSPSSLAVSAGEKVTMSCKSSQSLFNSRTRKNYLAWYQQKPGQSPKLLIYWASARDSGVPARFTGSGSETYFTLTISRVQAEDLAVYYCMQSFNLRTFGGGTKLEIK

SEQ ID NO: 14656 - protein, 105 aa, Mus musculus [sequence omitted]

SEQ ID NO: 14657 - protein, 239 aa, Mus musculus
MESQTLVFISILLWLYGTCGDIVMSQSPSSLAVSAGEKVTMSCKSSQSLFNSRTRKNYLAWYQQKPGQSPKLLIYWASARDSGVPARFTGSGSETYFTLTISRVQAEDLAVYYCMQSFNLRTFGGGTKLEIKRTVAAPSVFIFPPSDEQLKSGTASVVCLLNNFYPREAKVQWKVDNALQSGNSQESVTEQDSKDSTYSLSSTLTLSKADYEKHKVYACEVTHQGLSSPVTKSFNRGEC

SEQ ID NO: 14658 - protein, 108 aa, Artificial Sequence
  source: /note="Description of Artificial Sequence: Synthetic polypeptide"
DIQMTQSPSSLSASLGGKVTITCKASQDINNYIAWYQHKPGKGPRLLIHYTSTLHPGIPSRFSGSGSGRDYSFSISNLEPEDIATYYCLQYDNLLYTFGGGTKLEIKR

SEQ ID NO: 14659 - protein, 128 aa, Mus musculus
MVSTAQFLAFLLLWFPGARCDILMTQSPSSMSVSLGDTVSITCHSSQDINSNIGWLQQRPGKSFKGLIYHGTNLDDEVPSRFSGSGSGADYSLTISSLESEDFADYYCVQYAQFPWTFGGGTKLEIKR

SEQ ID NO: 14660 - protein, 108 aa, Mus musculus
DILMTQSPSSMSLSLGDTVSITCHSSQDINSNIGWLQQKPGKSFKGLIYHGTNLDDGVPSRFSGSGSGADYSLTISSLESEDFVDYYCVQYGQFPWTFGGGTKLEIKR

SEQ ID NO: 14661 - protein, 108 aa, Mus musculus
DILMTQSPSSMSVSLGDTVNITCHSSQDINSNIGWLQQKPGKSFKGLIYHGTNLDDGVPSRFSGSGSGADYSLTISSLESEDFADYYCVQYGQFPWTFGGGTKLEIKR

SEQ ID NO: 14662 - protein, 209 aa, Artificial Sequence
  source: /note="Description of Artificial Sequence: Synthetic polypeptide"
MDWTWRILFLVAAATGVHSDIQMTQSPSSMSVSVGDRVTITCHSSQDINSNIGWLQQKPGKSFKGLIYHGTNLDDGVPSRFSGSGSGTDYTLTISSLEPEDFATYYCVQHAQFPWTFGGGTKLEIKRTVAAPSVFIFPPSDEQLKSGTASVVCLLNNFYPREAKVQWKVDNALQSGNSQESVTEQDSKDSTYSLSSTLTLSKADYEKHK

SEQ ID NO: 14663 - protein, 233 aa, Artificial Sequence
  source: /note="Description of Artificial Sequence: Synthetic polypeptide"
MDWTWRILFLVAAATGVHSDIQMTQSPSSMSVSVGDRVTITCHSSQDINSNIGWLQQKPGKSFKGLIYHGTNLDDGVPSRFSGSGSGTDYTLTISSLQPEDFATYYCVQYAQFPWTFGGGTKLEIKRTVAAPSVFIFPPSDEQLKSGTASVVCLLNNFYPREAKVQWKVDNALQSGNSQESVTEQDSKDSTYSLSSTLTLSKADYEKHKVYACEVTHQGLSSPVTKSFNRGEC

SEQ ID NO: 14664 - protein, 214 aa, Artificial Sequence
  source: /note="Description of Artificial Sequence: Synthetic polypeptide"
DIQMTQSPSTLSASVGDRVTITCRASQSINTWLAWYQQKPGKAPKLLMYKASSLESGVPSRFIGSGSGTEFTLTISSLQPDDFATYYCQQYNSDSKMFGQGTKVEVKGTVAAPSVFIFPPSDEQLKSGTASVVCLLNNFYPREAKVQWKVDNALQSGNSQESVTEQDSKDSTYSLSSTLTLSKADYEKHKVYACEVTHQGLSSPVTKSFNRGEC

SEQ ID NO: 14665 - protein, 213 aa, Homo sapiens
  MOD_RES (53)..(53): Any amino acid
  MOD_RES (94)..(94): Any amino acid
DILLTQSPVILSVSPGERVSFSCRASQSIGTNIHWYQQRTNGSPRLLIKYASXSISGIPSRFSGSGSGTDFTLSINSVESEDIADYYCQQNNNXPTTFGAGTKLELKRTVAAPSVFIFPPSDEQLKSGTASVVCLLNNFYPREAKVQWKVDNALQSGNSQESVTEQDSKDSTYSLSSTLTLSKADYEKHKVYACEVTHQGLSSPVTKSFNRGE

SEQ ID NO: 14666 - protein, 234 aa, Homo sapiens
MVLQTQVFISLLLWISGAYGDILLTQSPVILSVSPGERVSFSCRASQSIGTNIHWYQQRTNGSPRLLIKYASKSISGIPSRFSGSGSGTDFTLSINSVESEDIADYYCQQNNNWPTTFGAGTKLELKRTVAAPSVFIFPPSDEQLKSGTASVVCLLNNFYPREAKVQWKVDNALQSGNSQESVTEQDSKDSTYSLSSTLTLSKADYEKHKVYACEVTHQGLSSPVTKSFNRGEC

SEQ ID NO: 14667 - protein, 234 aa, Homo sapiens
MVLQTQVFISLLLWISGAYGDILLTQSPVILSVSPGERVSFSCRASQSIGTNIHWYQQRTNGSPRLLIKYASESISGIPSRFSGSGSGTDFTLSINSVESEDIADYYCQQNNNAPTTFGAGTKLELKRTVAAPSVFIFPPSDEQLKSGTASVVCLLNNFYPREAKVQWKVDNALQSGNSQESVTEQDSKDSTYSLSSTLTLSKADYEKHKVYACEVTHQGLSSPVTKSFNRGEC

SEQ ID NO: 14668 - protein, 128 aa, Artificial Sequence
  source: /note="Description of Artificial Sequence: Synthetic polypeptide"
MGTPAQLLFLLLLWLPDTTGEIVMTQSPATLSVSPGERATLSCRASQSVSSNLAWYQQKPGQAPRLLIYGASTRATGIPARFSGSGSGTEFTLTISSLQSEDFAVYYCQDYRSWPRRAFGGGTKVEIK

SEQ ID NO: 14669 - protein, 128 aa, Artificial Sequence
  source: /note="Description of Artificial Sequence: Synthetic polypeptide"
MGTPAQLLFLLLLWLPDTTGEIVMTQSPATLSVSPGERATLSCRASQSVSSNLAWYQQKPGQAPRLLIYGASTRATGIPARFSGSGSGTEFTLTISSLQSEDFAVYYCQDYRTWPRRAFGGGTKVEIK

SEQ ID NO: 14670 - protein, 128 aa, Artificial Sequence
  source: /note="Description of Artificial Sequence: Synthetic polypeptide"
MGTPAQLLFLLLLWLPDTTGEIVMTQSPATLSVSPGERATLSCRASQSVSSNLAWYQQKPGQAPRLLIYGASTRATGIPARFSGSGSGTEFTLTISSLQSEDFAVYYCQQYNDWPRWTFGGGTKVEIK

SEQ ID NO: 14671 - protein, 127 aa, Artificial Sequence
  source: /note="Description of Artificial Sequence: Synthetic polypeptide"
MGTPAQLLFLLLLWLPDTTGEIVLTQSPATLSLSPGERATLSCRASQSVSSYLAWYQQKPGAPRLLIYDASNRATGIPARFSGSGSGTDFTLTISSLEPEDFAVYYCQQRGSWPRITFGGGTKVEIK

SEQ ID NO: 14672 - protein, 127 aa, Artificial Sequence
  source: /note="Description of Artificial Sequence: Synthetic polypeptide"
MGTPAQLLFLLLLWLPDTTGEIVLTQSPATLSLSPGERATLSCRASQSVSSYLAWYQQKPGAPRLLIYDASNRATGIPARFSGSGSGTDFTLTISSLEPEDFAVYYCHQRGTWPSMTFGGGTKVEIK

SEQ ID NO: 14673 - protein, 133 aa, Artificial Sequence
  source: /note="Description of Artificial Sequence: Synthetic polypeptide"
MGTPAQLLFLLLLWLPDTTGDIVMTQSPDSLAVSLGERATINCKSSQSVLYSSNNKNYLAWYQQKPGQPPKLLIYWASTRESGVPDRFSGSGSGTDFTLTISSLQAEDVAVYYCQQYYGSPITFGGGTKVEIK

SEQ ID NO: 14674 - protein, 329 aa, Artificial Sequence
  source: /note="Description of Artificial Sequence: Synthetic polypeptide"
ASTKGPSVFPLAPSSKSTSGGTAALGCLVKDYFPEPVTVSWNSGALTSGVHTFPAVLQSSGLYSLSSVVTVPSSSLGTQTYICNVNHKPSNTKVDKKVEPKSCDKTHTCPPCPAPELLGGPSVFLFPPKPKDTLMISRTPEVTCVVVDVSHEDPEVKFNWYVDGVEVHNAKTKPREEQYNSTYRVVSVLTVLHQDWLNGKEYKCKVSNKALPAPIEKTISKAKGQPREPQVYTLPPSREEMTKNQVSTCLVKGFYPSDIAVEWESNGQPENNYKTTPPVLDSDGSFFLYSKLTVDKSRWQQGNVFSCSVMHEALHNHYTQKSLSLSPGK

SEQ ID NO: 14675 - protein, 132 aa, Artificial Sequence
  source: /note="Description of Artificial Sequence: Synthetic polypeptide"
MGTPAQLLFLLLLWLPDTTGDIVMTQSPDSLAVSLGERATINCKSSQSVLYSSNNKNYLAWYQQKPGQPPKLLISWASTRESGVPDRFSGSGSGTDFTLTISSLQAEDVAVYYCGQFYGSITFGGGTKVEIK

SEQ ID NO: 14676 - protein, 127 aa, Artificial Sequence
  source: /note="Description of Artificial Sequence: Synthetic polypeptide"
MGTPAQLLFLLLLWLPDTTGDIQMTQSPSTLSASVGDRVTITCRASQSISSWLAWYQQKPGKAPKLLIYDASSLESGVPSRFSGSGSGTEFTLTISSLQPDDFATYYCQQFAAHATTFGGGTKVEIK

SEQ ID NO: 14677 - protein, 127 aa, Artificial Sequence
  source: /note="Description of Artificial Sequence: Synthetic polypeptide"
MGTPAQLLFLLLLWLPDTTGDIQMTQSPSSLSASVGDRVTITCQASQDITNYLNWYQQKPGKAPKLLIYDASNLETGVPSRFSGSGSGTDFTFTISSLQPEDIATYYCHQYNAFPITFGGGTKVEIK

SEQ ID NO: 14678 - protein, 127 aa, Artificial Sequence
  source: /note="Description of Artificial Sequence: Synthetic polypeptide"
MGTPAQLLFLLLLWLPDTTGDIQMTQSPSTLSASVGDRVTITCRASQSISSWLAWYQQKPGKAPKLLIYDASSLESGVPSRFSGSGSGTEFTLTISSLQPDDFATYYCQQYIEYATTFGGGTKVEIK

SEQ ID NO: 14679 - protein, 106 aa, Artificial Sequence
  source: /note="Description of Artificial Sequence: Synthetic polypeptide"
MTQSPSSLSASLGERVSLTCQASQGISNNLNWYQQTPGKAPRLLIYDASKLEDGVPSRFSGTGYRTDFNFTISSLEEEDVATYFCLQHRYLPVHVRRGDQVGNKTG

SEQ ID NO: 14680 - protein, 213 aa, Artificial Sequence; identical to SEQ ID NO: 9892
  source: /note="Description of Artificial Sequence: Synthetic polypeptide"

SEQ ID NO: 14681 - protein, 214 aa, Artificial Sequence
  source: /note="Description of Artificial Sequence: Synthetic polypeptide"
DILLTQSPVILSVSPGERVSFSCRASQSIGTNIHWYQQRTNGSPRLLIKYASESISGIPSRFSGSGSGTDFTLSINSVESEDIADYYCQQNNNWPTTFGQGTKVEIKRTVAAPSVFIFPPSDEQLKSGTASVVCLLNNFYPREAKVQWKVDNALQSGNSQESVTEQDSKDSTYSLSSTLTLSKADYEKHKVYACEVTHQGLSSPVTKSFNRGEC

SEQ ID NO: 14682 - protein, 213 aa, Artificial Sequence
  source: /note="Description of Artificial Sequence: Synthetic polypeptide"
DILLTQSPVILSVSPGERVSFSCRASQSIGTNIHWYQQRTNGSPRLLIKYASESISGIPSRFSGSGSGTDFTLSINSVESEDIADYYCQQNNNWPTTFGQGTKLELKRTVAAPSVFIFPPSDEQLKSGTASVVCLLNNFYPREAKVQWKVDNALQSGNSQESVTEQDSKDSTYSLSSTLTLSKADYEKHKVYACEVTHQGLSSPVTKSFNRGA

SEQ ID NO: 14683 - protein, 214 aa, Artificial Sequence; identical to SEQ ID NO: 9491
  source: /note="Description of Artificial Sequence: Synthetic polypeptide"

SEQ ID NO: 14684 - protein, 214 aa, Artificial Sequence
  source: /note="Description of Artificial Sequence: Synthetic polypeptide"
DILLTQSPVILSVSPGERVSFSCRASQSSGTNIHWYQQRTNGSPRLLIKYASESISGIPSRFSGSGSGTDFTLSINSVESEDIADYYCQQNNNWPTTFGQGTKVEIKRTVAAPSVFIFPPSDEQLKSGTASVVCLLNNFYPREAKVQWKVDNALQSGNSQESVTEQDSKDSTYSLSSTLTLSKADYEKHKVYACEVTHQGLSSPVTKSFNRGEC

SEQ ID NO: 14685 - protein, 214 aa, Artificial Sequence
  source: /note="Description of Artificial Sequence: Synthetic polypeptide"
AIQLTQSPSSLSASVGDRVTITCRASQSIGTNIHWYQQKPGQAPRLLIYYASESISGVPSRFSGSGSGTDFTLTISSLQPEDFATYYCQQNNNWPTTFGQGTKVEIKRTVAAPSVFIFPPSDEQLKSGTASVVCLLNNFYPREAKVQWKVDNALQSGNSQESVTEQDSKDSTYSLSSTLTLSKADYEKHKVYACEVTHQGLSSPVTKSFNRGEC

SEQ ID NO: 14686 - protein, 214 aa, Artificial Sequence
  source: /note="Description of Artificial Sequence: Synthetic polypeptide"
AIQLTQSPSSLSASVGDRVTITCRASQSIGTNIHWYLQKPGQSPQLLIYYASESISGVPSRFSGSGSGTDFTLTISSLQPEDFATYYCQQNNNWPTTFGQGTKVEIKRTVAAPSVFIFPPSDEQLKSGTASVVCLLNNFYPREAKVQWKVDNALQSGNSQESVTEQDSKDSTYSLSSTLTLSKADYEKHKVYACEVTHQGLSSPVTKSFNRGEC

SEQ ID NO: 14687 - protein, 214 aa, Artificial Sequence
  source: /note="Description of Artificial Sequence: Synthetic polypeptide"
AIQLTQSPSSLSASVGDRVTITCRASQSIGTNIHWYQQKPGKAPKLLIYYASESISGVPSRFSGSGSGTDFTLTISSLQPEDFATYYCQQNNNWPTTFGQGTKVEIKRTVAAPSVFIFPPSDEQLKSGTASVVCLLNNFYPREAKVQWKVDNALQSGNSQESVTEQDSKDSTYSLSSTLTLSKADYEKHKVYACEVTHQGLSSPVTKSFNRGEC

SEQ ID NO: 14688 - protein, 214 aa, Artificial Sequence
  source: /note="Description of Artificial Sequence: Synthetic polypeptide"
DIQMTQSPSSLSASVGDRVTITCRASQSIGTNIHWYQQKPGQAPRLLIYYASESISGIPDRFSGSGSGTDFTLTISRLEPEDFAVYYCQQNNNWPTTFGQGTKVEIKRTVAAPSVFIFPPSDEQLKSGTASVVCLLNNFYPREAKVQWKVDNALQSGNSQESVTEQDSKDSTYSLSSTLTLSKADYEKHKVYACEVTHQGLSSPVTKSFNRGEC

SEQ ID NO: 14689 - protein, 214 aa, Artificial Sequence
  source: /note="Description of Artificial Sequence: Synthetic polypeptide"
AIQLTQSPSSLSASVGDRVTITCRASQSIGTNIHWYQQKPGQAPRLLIYYASESISGIPARFSGSGSGTEFTLTISSLQSEDFAVYYCQQNNNWPTTFGQGTKVEIKRTVAAPSVFIFPPSDEQLKSGTASVVCLLNNFYPREAKVQWKVDNALQSGNSQESVTEQDSKDSTYSLSSTLTLSKADYEKHKVYACEVTHQGLSSPVTKSFNRGEC

SEQ ID NO: 14690 - protein, 214 aa, Artificial Sequence
  source: /note="Description of Artificial Sequence: Synthetic polypeptide"
EIVLTQSPATLSLSPGERATLSCRASQSIGTNIHWYQQKPGQAPRLLIYYASESISGVPSRFSGSGSGTEFTLTISSLQPDDFATYYCQQNNNWPTTFGQGTKVEIKRTVAAPSVFIFPPSDEQLKSGTASVVCLLNNFYPREAKVQWKVDNALQSGNSQESVTEQDSKDSTYSLSSTLTLSKADYEKHKVYACEVTHQGLSSPVTKSFNRGEC

SEQ ID NO: 14691 - protein, 107 aa, Artificial Sequence
  source: /note="Description of Artificial Sequence: Synthetic polypeptide"
AIQLTQSPSSLSASVGDRVTITCRASQSIGTNIHWYLQKPGQSPQLLIYYASESISGIPDRFSGSGSGTDFTLTISRLEPEDFAVYYCQQNNNWPTTFGAGTKLELK

SEQ ID NO: 14692 - protein, 107 aa, Artificial Sequence
  source: /note="Description of Artificial Sequence: Synthetic polypeptide"
EIVLTQSPATLSLSPGERATLSCRASQSIGTNIHWYQQKPGKAPKLLIYYASESISGIPDRFSGSGSGTDFTLTISRLEPEDFAVYYCQQNNNWPTTFGAGTKLELK

SEQ ID NO: 14693 - protein, 107 aa, Artificial Sequence
  source: /note="Description of Artificial Sequence: Synthetic polypeptide"
EIVLTQSPATLSLSPGERATLSCRASQSIGTNIHWYQQKPGQAPRLLIYYASESISGVPSRFSGSGSGTDFTLTISSLQPEDFATYYCQQNNNWPTTFGAGTKLELK

SEQ ID NO: 14694 - protein, 107 aa, Artificial Sequence
  source: /note="Description of Artificial Sequence: Synthetic polypeptide"
AIQLTQSPSSLSASVGDRVTITCRASQSIGTNIHWYQQKPGQAPRLLIYYASESISGIPPRFSGSGSGTDFTLTISRLEPEDFAVYYCQQNNNWPTTFGAGTKLELK

SEQ ID NO: 14695 - protein, 107 aa, Artificial Sequence
  source: /note="Description of Artificial Sequence: Synthetic polypeptide"
AIQLTQSPSSLSASVGDRVTITCRASQSIGTNIHWYQQKPGQAPRLLIYYASESISGIPDRFSGSGSGTDFTLTISRLEPEDFAVYYCQQNNNWPTTFGAGTKLELK

SEQ ID NO: 14696 - protein, 107 aa, Artificial Sequence
  source: /note="Description of Artificial Sequence: Synthetic polypeptide"
EIVLTQSPATLSLSPGERATLSCRASQSIGTNIHWYQQKPGQAPRLLIYYASESISGIPARFSGSGSGTEFTLTISSLQSEDFAVYYCQQNNNWPTTFGAGTKLELK

SEQ ID NO: 14697 - protein, 260 aa, Artificial Sequence
  source: /note="Description of Artificial Sequence: Synthetic polypeptide"
GQSGQCISPRGCPDGPYVMYGSSGGSGGSGGSGLSGRSDNHGSSGTQILLTQSPVILSVSPGERVSFSCRASQSIGTNIHWYQQRTNGSPRLLIKYASESISGIPSRFSGSGSGTDFTLSINSVESEDIADYYCQQNNNWPTTFGAGTKLELKRTVAAPSVFIFPPSDEQLKSGTASVVCLLNNFYPREAKVQWKVDNALQSGNSQESVTEQDSKDSTYSLSSTLTLSKADYEKHKVYACEVTHQGLSSPVTKSFNRGEC

SEQ ID NO: 14698 - protein, 259 aa, Artificial Sequence
  source: /note="Description of Artificial Sequence: Synthetic polypeptide"
QSGQCISPRGCPDGPYVMYGSSGGSGGSGGSGLSGRSDNHGSSGTQILLTQSPVILSVSPGERVSFSCRASQSIGTNIHWYQQRTNGSPRLLIKYASESISGIPSRFSGSGSGTDFTLSINSVESEDIADYYCQQNNNWPTTFGAGTKLELKRTVAAPSVFIFPPSDEQLKSGTASVVCLLNNFYPREAKVQWKVDNALQSGNSQESVTEQDSKDSTYSLSSTLTLSKADYEKHKVYACEVTHQGLSSPVTKSFNRGEC

SEQ ID NO: 14699 - protein, 258 aa, Artificial Sequence
  source: /note="Description of Artificial Sequence: Synthetic polypeptide"
SGQCISPRGCPDGPYVMYGSSGGSGGSGGSGLSGRSDNHGSSGTQILLTQSPVILSVSPGERVSFSCRASQSIGTNIHWYQQRTNGSPRLLIKYASESISGIPSRFSGSGSGTDFTLSINSVESEDIADYYCQQNNNWPTTFGAGTKLELKRTVAAPSVFIFPPSDEQLKSGTASVVCLLNNFYPREAKVQWKVDNALQSGNSQESVTEQDSKDSTYSLSSTLTLSKADYEKHKVYACEVTHQGLSSPVTKSFNRGEC

SEQ ID NO: 14700 - protein, 257 aa, Artificial Sequence
  source: /note="Description of Artificial Sequence: Synthetic polypeptide"
GQCISPRGCPDGPYVMYGSSGGSGGSGGSGLSGRSDNHGSSGTQILLTQSPVILSVSPGERVSFSCRASQSIGTNIHWYQQRTNGSPRLLIKYASESISGIPSRFSGSGSGTDFTLSINSVESEDIADYYCQQNNNWPTTFGAGTKLELKRTVAAPSVFIFPPSDEQLKSGTASVVCLLNNFYPREAKVQWKVDNALQSGNSQESVTEQDSKDSTYSLSSTLTLSKADYEKHKVYACEVTHQGLSSPVTKSFNRGEC

SEQ ID NO: 14701 - protein, 256 aa, Artificial Sequence
  source: /note="Description of Artificial Sequence: Synthetic polypeptide"
QCISPRGCPDGPYVMYGSSGGSGGSGGSGLSGRSDNHGSSGTQILLTQSPVILSVSPGERVSFSCRASQSIGTNIHWYQQRTNGSPRLLIKYASESISGIPSRFSGSGSGTDFTLSINSVESEDIADYYCQQNNNWPTTFGAGTKLELKRTVAAPSVFIFPPSDEQLKSGTASVVCLLNNFYPREAKVQWKVDNALQSGNSQESVTEQDSKDSTYSLSSTLTLSKADYEKHKVYACEVTHQGLSSPVTKSFNRGEC

SEQ ID NO: 14702 - protein, 109 aa, Mus sp.
SYELTQPPSVSVAPGQTARITCSGDALGDKYASWYQQKPGQAPVLVIYEDSKRPSGIPERFSGSNSGNTATLTISGTQAEDEADYYCSVWDGDWGMPVFGGGTKLTVLG

SEQ ID NO: 14703 - protein, 234 aa, Artificial Sequence
  source: /note="Description of Artificial Sequence: Synthetic polypeptide"
MMSSAQFLGLLLLCFQGTRCDIQMTQTTSSLSASLGDRVTISCRSSQDIRNYLNWYQQKPDGTVKLLIYYTSRSHSGVPSRFSGSGSGTDYSLTISNLEQEDIATYFCQQGNMFPFTFGGGTKLEIKRADAAPTVSIFPPSSEQLTSGGASVVCFLNNFYPKDINVKWKIDGSERQNGVLNSWTDQDSKDSTYSMSSTLTLTKDEYERHNSYTCEATHKTSTSPIVKSFNRNEC

SEQ ID NO: 14704 - protein, 214 aa, Artificial Sequence
  source: /note="Description of Artificial Sequence: Synthetic polypeptide"
ELVMTQSPSSLSASVGDRVNIACRASQSIGTNIHWYQQKPGKAPRLLIKYASESISGVPSRFSGSGSGTDFTLTISSLQPEDFAIYYCQQNNNWPTTFGGGTKVEIKRTVAAPSVFIFPPSDEQLKSGTASVVCLLNNFYPREAKVQWKVDNALQSGNSQESVTEQDSKDSTYSLSSTLTLSKADYEKHKVYACEVTHQGLSSPVTKSFNRGEC

SEQ ID NO: 14705 - protein, 108 aa, Artificial Sequence
  source: /note="Description of Artificial Sequence: Synthetic polypeptide"
DIQMTQSPSSLSASLGGKVTITCKASQDINNYIAWYQHKPEKGPRLLIHYTSTLHPGIPSRFSGSGSGRDYSFSISNLEPEDIATYYCLQYDNLLYTFGGGTKLEIKR

SEQ ID NO: 14706 - protein, 119 aa, Artificial Sequence
  source: /note="Description of Artificial Sequence: Synthetic polypeptide"
QVQLQQSGAELARPGASVKLSCKASGYTFTSYWMQWVKQRPGQGLECIGAIYPGDGDTSYTQKFKGKATLTADKSSSTAYMQLSSLASEDSAVYYCARYDAPGYAMDYWGQGTSVTVSS

SEQ ID NO: 14707 - protein, 107 aa, Artificial Sequence
  source: /note="Description of Artificial Sequence: Synthetic polypeptide"
DIQMTQSPSSLSASVGDRVTITCRASQSIGTNIHWYQQKPGQAPRLLIYYASESISGIPDRFSGSGSGTDFTLTISRLEPEDFAVYYCQQNNNWPTTFGQGTKLELK

SEQ ID NO: 14708 - protein, 107 aa, Artificial Sequence
  source: /note="Description of Artificial Sequence: Synthetic polypeptide"
EIVLTQSPATLSLSPGERATLSCRASQSIGTNIHWYQQKPGQAPRLLIYYASESISGVPSRFSGSGSGTEFTLTISSLQPDDFATYYCQQNNNWPTTFGQGTKLELK

SEQ ID NO: 14709 - protein, 111 aa, Artificial Sequence
  source: /note="Description of Artificial Sequence: Synthetic polypeptide"
QSVLTQPPSVSAAPGQKVTISCSGSSSNIGNNYVSWYQQLPGTAPKLLIYGHTNRPAGVPDRFSGSKSGTSASLAISGFRSEDEADYYCASWDYTLSGWVFGGGTKLTVLG

SEQ ID NO: 14710 - protein, 111 aa, Artificial Sequence
  source: /note="Description of Artificial Sequence: Synthetic polypeptide"
QSVLTQPPSVSAAPGQKVTISCSGSSSNIGNNYVSWYQQLPGTAPKLLIYDHTNRPAGVPDRFSGSKSGTSASLAISGFRSEDEADYYCASWDYTLSGWVFGGGTKLTVLG

SEQ ID NO: 14711 - protein, 111 aa, Artificial Sequence
  source: /note="Description of Artificial Sequence: Synthetic polypeptide"
QSVLTQPPSVSAAPGQKVTISCSGSSSNIGNNYVSWYQQLPGTAPKLLIYDHTNRPAGVPDRFSGSKSGTSASLAISGFRSEDEADYYCASWDYTLSGWVFGGGTKVTVLG

SEQ ID NO: 14712 - protein, 165 aa, Homo sapiens
DIVMTQTPLSSPVTLGQPASISCRSSQSLVHSDGNTYLSWLHQRPGQPPRLLIYKISNRFSGVPDRFSGSGAGTAFTLKISRVEAEDVGVYYCMQATQLPRTFGQGTKVEIKRTVAAPSVFIFPPSDEQLKSGTASVVCLLNNFYPREAKVQWKVDNALQSGNSQ

SEQ ID NO: 14713 - protein, 112 aa, Homo sapiens
DTVMTQTPLSSHVTLGQPASISCRSSQSLVHSDGNTYLSWLQQRPGQPPRLLIYRISRRFSGVPDRFSGSGAGTDFTLEISRVEAEDVGVYYCMQSTHVPRTFGQGTKVEIK

SEQ ID NO: 14714 - protein, 112 aa, Homo sapiens
AIVLTQTPLSSPVTLGQPASISCRSSQSLVHRDGNTYLSWLQQRPGQPPRLLIYKISNRFSGVPDRFSGSGAGTDFTLKISRVEPDDVGVYYCMHTTQLPWTFGQGTKVEIK

SEQ ID NO: 14715 - protein, 112 aa, Homo sapiens
DIVMTQTPLSSPVTLGQPASISCRSSQSLVHRDGNTYLSWLQQRPGQPPRLLIYKISNRFSGVPDRFSGSGAGTDFTLKISRVEAEDVGIYFCMHTTQFPWTFGQGTRVEIK

SEQ ID NO: 14716 - protein, 112 aa, Homo sapiens
DIVMTQSPLSLPVTPGEPASISCRSSQSLLYRNGNNYLDWYLQKPGQSPQLLIYLGSNRASGVPDRFSGSGSGTDFTLNISRVEAEDVGHYYCMQALQTPRTFGQGTKVEIK

SEQ ID NO: 14717 - protein, 112 aa, Homo sapiens
DIVMTQTPLSSPVTLGQPASISCRSSQSLIHTDGNIYLSWLQQRPGQPPRLLIYKISNRFSGVPDRFSGSGAGTDFTLKISRVEAEDVGVYYCMQGTQFPITFGQGTRLEIK

SEQ ID NO: 14718 - protein, 107 aa, Homo sapiens
DIQMTQSPSSLSASVGDRVTITCRASQGIRNNLAWYQQKPGKAPKRLIYAASNLQSGVPSRFTGSGSGTEFTLIVSSLQPEDFATYYCLQHHSYPLTSGGGTKVEIK

SEQ ID NO: 14719 - protein, 107 aa, Homo sapiens
DIQMTQSPSSLSASVGDSVTITCRTSQGIRKNLGWYQQKPGKAPKRLIYAASSLQSGVPSRFSGSGSGTEFTLTISRLQPEDFATYYCLQHHSYPLTFGGGTRVEIR

SEQ ID NO: 14720 - protein, 112 aa, Homo sapiens
DIVMTQSPLSLPVTPGEPASISCRSSQSLLYRNGNNYLDWYLQRPGQSPQLLIYLGSNRASGVPDRFSGSGSGTDFTLKISRVEAEDVGVYYCMQALQTPRTFGQGTKVEIK

SEQ ID NO: 14721 - protein, 113 aa, Homo sapiens
DIVMTQTPLSSPVTLGQPASISCRSSQSLVHSDGNTYLSWLQQRPGQPPRLLIYKISNRFSGVPDRFSGSGAGTDFTLKISRVEAEDVGVYYCMQATQFPRTFGQGTKVEIKR

SEQ ID NO: 14722 - protein, 113 aa, Homo sapiens
DIVMTQTPLSSPVTLGQPASISCRSSQSLVHSDGNTYLSWLHQRPGQPPRLLIYKISNRFSGVPDRFSGSGAGTAFTLKISRVEAEDVGVYYCMQATQLPRTFGQGTKVEIKR

SEQ ID NO: 14723 - protein, 124 aa, Artificial Sequence
  source: /note="Description of Artificial Sequence: Synthetic polypeptide"
DIQMTQSPSSLSASVGDRVTITCQASQDISNYLNWYQQKPGKAPKLLIYAASSLQSGVPSRFSGSGSGTDFTLTISSLQPEDFATYYCLQDYNGWTFGQGTKVDIKRAAAEQKLISEEDLNGAA

SEQ ID NO: 14724 - protein, 125 aa, Artificial Sequence
  source: /note="Description of Artificial Sequence: Synthetic polypeptide"
DIVMTQSPSTVSASVGDRVIIPCRASQSIGKWLAWYQQKPGKAPKLLIYKASSLEGWVPSRFSGSGSGTEFSLTISSLQPDDSATYVCQQSHNFPPTFGGGTKLEIKRAAAEQKLISEEDLNGAA

SEQ ID NO: 14725 - protein, 124 aa, Artificial Sequence
  source: /note="Description of Artificial Sequence: Synthetic polypeptide"
DIVMTQSPSSLSASVGDRVTITCRASQGIRNDLGWYQQKPGKAPELLIYGASSLQSGVPSRFSGSGSGTDFTLTISSLQPEDSATYYCLQDYNGWTFGQGTKLEIKRAAAEQKLISEEDLNGAA

SEQ ID NO: 14726 - protein, 214 aa, Artificial Sequence
  source: /note="Description of Artificial Sequence: Synthetic polypeptide"
DIQMTQSPSFLSASVGDRVTITCRASQGIISYLAWYQQKPEKAPKRLIYAASSLQSGVPSRFSGSGSGTEFTLTISSLQPEDFATYYCVQYANYPYTFGQGTKLEIKRTVAAPSVFIFPPSDEQLKSGTASVVCLLNNFYPREAKVQWKVDNALQSGNSQESVTEQDSKDSTYSLSSTLTLSKADYEKHKVYACEVTHQGLSSPVTKSFNRGEC

SEQ ID NO: 14727 - protein, 214 aa, Artificial Sequence
  source: /note="Description of Artificial Sequence: Synthetic polypeptide"
DIQMTQSPSFLSASVGDRVTITCRASQGIISYLAWYQQKPEKAPKRLIYAASSLQSGVPSRFSGSGSGTEFTLTISSLQPEDFATYYCVQYAKYPYTFGQGTKLEIKRTVAAPSVFIFPPSDEQLKSGTASVVCLLNNFYPREAKVQWKVDNALQSGNSQESVTEQDSKDSTYSLSSTLTLSKADYEKHKVYACEVTHQGLSSPVTKSFNRGEC

SEQ ID NO: 14728 - protein, 214 aa, Artificial Sequence; identical to SEQ ID NO: 9570
  source: /note="Description of Artificial Sequence: Synthetic polypeptide"

SEQ ID NO: 14729 - protein, 214 aa, Artificial Sequence
  source: /note="Description of Artificial Sequence: Synthetic polypeptide"
DIQMTQSPSFLSASVGDRVTITCRASQGIISYLAWYQQKPEKAPKRLIYAASSLQSGVPSRFSGSGSGTEFTLTISSLQPEDFATYYCAQYANYPYTFGQGTKLEIKRTVAAPSVFIFPPSDEQLKSGTASVVCLLNNFYPREAKVQWKVDNALQSGNSQESVTEQDSKDSTYSLSSTLTLSKADYEKHKVYACEVTHQGLSSPVTKSFNRGEC

SEQ ID NO: 14730 - protein, 214 aa, Artificial Sequence
  source: /note="Description of Artificial Sequence: Synthetic polypeptide"
DIQLTQSPSFLSASVGDRVTITCRASQGIISYLAWYQQKPEKAPKRLIYGASSLQSGVPSRFSGSGSGTEFTLTISSLQPEDFATYYCVQYANYPYTFGQGTKLEIKRTVAAPSVFIFPPSDEQLKSGTASVVCLLNNFYPREAKVQWKVDNALQSGNSQESVTEQDSKDSTYSLSSTLTLSKADYEKHKVYACEVTHQGLSSPVTKSFNRGEC

SEQ ID NO: 14731 - protein, 107 aa, Homo sapiens
DIQMTQSPSSLSASVGDRVTITCRASQGISNYLAWFQQKPGKAPKSLIYAASSLQSGVPSRFSGSGSGTDFTLTISSLQPEDFATYYCQQYNSYPITFGQGTRLEIK

SEQ ID NO: 14732 - protein, 113 aa, Homo sapiens
DIVMTQSPDSLAVSLGERATINCKSSQSVLYSSNNKNYLAWYQQKPGQPPKLLIYWASTRESGVPDRFSGSGSGTDFTLTISSLQAEDVAVYYCQQYYSTPFTFGPGTKVDIK

SEQ ID NO: 14733 - protein, 112 aa, Homo sapiens
DIVMTQTPLSLSVTPGQPASISCKSSQSLLHSDGKTYLYWYLQKPGQPPQLLIYEVSNRFSGVPDRFSGSGSGTDFTLKISRVEAEDVGVYYCMQSIQLPRTFGQGTKVEIK

SEQ ID NO: 14734 - protein, 112 aa, Homo sapiens
  MOD_RES (100)..(101): Any amino acid
DVVMTQSPLSLPVTLGQPASISCRSSQSLVYSDGNTYLNWFQQRPGQSPRRLIYKVSNWDSGVPDRFSGSGSGTDFTLKISRVEAEDVGVYYCMQGTHWXXTFGGGTKVEIK

SEQ ID NO: 14735 - protein, 214 aa, Artificial Sequence
  source: /note="Description of Artificial Sequence: Synthetic polypeptide"
  MOD_RES (30)..(30): Any amino acid
  MOD_RES (53)..(53): Any amino acid
  MOD_RES (92)..(92): Any amino acid
DIQMTQSPSSLSASVGDRVTITCRASQDVXTAVAWYQQKPGKAPKLLIYSASXLYSGVPSRFSGSRSGTDFTLTISSLQPEDFATYYCQQHXTTPPTFGQGTKVEIKRTVAAPSVFIFPPSDEQLKSGTASVVCLLNNFYPREAKVQWKVDNALQSGNSQESVTEQDSKDSTYSLSSTLTLSKADYEKHKVYACEVTHQGLSSPVTKSFNRGEC

SEQ ID NO: 14736 - protein, 234 aa, Artificial Sequence
  source: /note="Description of Artificial Sequence: Synthetic polypeptide"
MVLQTQVFISLLLWISGAYGDIQMTQSPSSLSASVGDRVTITCRASQDVNTAVAWYQQKPGKAPKLLIYSASFLYSGVPSRFSGSRSGTDFTLTISSLQPEDFATYYCQQHYTTPPTFGQGTKVEIKRTVAAPSVFIFPPSDEQLKSGTASVVCLLNNFYPREAKVQWKVDNALQSGNSQESVTEQDSKDSTYSLSSTLTLSKADYEKHKVYACEVTHQGLSSPVTKSFNRGEC

SEQ ID NO: 14737 - protein, 234 aa, Artificial Sequence
  source: /note="Description of Artificial Sequence: Synthetic polypeptide"
MVLQTQVFISLLLWISGAYGDIQMTQSPSSLSASVGDRVTITCRASQDVNTAVAWYQQKPGKAPKLLIYSASNLYSGVPSRFSGSRSGTDFTLTISSLQPEDFATYYCQQHYTTPPTFGQGTKVEIKRTVAAPSVFIFPPSDEQLKSGTASVVCLLNNFYPREAKVQWKVDNALQSGNSQESVTEQDSKDSTYSLSSTLTLSKADYEKHKVYACEVTHQGLSSPVTKSFNRGEC

SEQ ID NO: 14738 - protein, 234 aa, Artificial Sequence
  source: /note="Description of Artificial Sequence: Synthetic polypeptide"
MVLQTQVFISLLLWISGAYGDIQMTQSPSSLSASVGDRVTITCRASQDVNTAVAWYQQKPGKAPKLLIYSASFLYSGVPSRFSGSRSGTDFTLTISSLQPEDFATYYCQQHATTPPTFGQGTKVEIKRTVAAPSVFIFPPSDEQLKSGTASVVCLLNNFYPREAKVQWKVDNALQSGNSQESVTEQDSKDSTYSLSSTLTLSKADYEKHKVYACEVTHQGLSSPVTKSFNRGEC

SEQ ID NO: 14739 - protein, 234 aa, Artificial Sequence
  source: /note="Description of Artificial Sequence: Synthetic polypeptide"
MVLQTQVFISLLLWISGAYGDIQMTQSPSSLSASVGDRVTITCRASQDVNTAVAWYQQKPGKAPKLLIYSASNLYSGVPSRFSGSRSGTDFTLTISSLQPEDFATYYCQQHATTPPTFGQGTKVEIKRTVAAPSVFIFPPSDEQLKSGTASVVCLLNNFYPREAKVQWKVDNALQSGNSQESVTEQDSKDSTYSLSSTLTLSKADYEKHKVYACEVTHQGLSSPVTKSFNRGEC

SEQ ID NO: 14740 - protein, 234 aa, Artificial Sequence
  source: /note="Description of Artificial Sequence: Synthetic polypeptide"
MVLQTQVFISLLLWISGAYGDIQMTQSPSSLSASVGDRVTITCRASQDVDTAVAWYQQKPGKAPKLLIYSASFLYSGVPSRFSGSRSGTDFTLTISSLQPEDFATYYCQQHYTTPPTFGQGTKVEIKRTVAAPSVFIFPPSDEQLKSGTASVVCLLNNFYPREAKVQWKVDNALQSGNSQESVTEQDSKDSTYSLSSTLTLSKADYEKHKVYACEVTHQGLSSPVTKSFNRGEC

SEQ ID NO: 14741 - protein, 215 aa, Artificial Sequence
  source: /note="Description of Artificial Sequence: Synthetic polypeptide"
MDIQLTQSHKFLSTSVGDRVSITCKASQDVYNAVAWYQQKPGQSPKLLIYSASSRYTGVPSRFTGSGSGPDFTFTISSVQAEDLAVYFCQQHFRTPFTFGSGTKLEIKRTVAAPSVFIFPPSDEQLKSGTASVVCLLNNFYPREAKVQWKVDNALQSGNSQESVTEQDSKDSTYSLSSTLTLSKADYEKHKVYACEVTHQGLSSPVTKSFNRGEC

SEQ ID NO: 14742 - protein, 131 aa, Mus musculus
MKLPVRLLVLMFWIPASRSDVLMTQTPLSLPVSLGDQASISCRSSQSLVHSNGRTYLEWYLQKPGQSPKVLIYKVSNRISGVPDRFSGSGSGTDFTLKISRVEAEDLGVYFCFQGSHVPYTFGGGTKLEIK

SEQ ID NO: 14743 - protein, 261 aa, Artificial Sequence
  source: /note="Description of Artificial Sequence: Synthetic polypeptide"
QGQSGQCISPRGCPDGPYVMYGSSGGSGGSGGSGLSGRSDNHGSSGTQILLTQSPVILSVSPGERVSFSCRASQSIGTNIHWYQQRTNGSPRLLIKYASESISGIPSRFSGSGSGTDFTLSINSVESEDIADYYCQQNNNWPTTFGAGTKLELKRTVAAPSVFIFPPSDEQLKSGTASVVCLLNNFYPREAKVQWKVDNALQSGNSQESVTEQDSKDSTYSLSSTLTLSKADYEKHKVYACEVTHQGLSSPVTKSFNRGEC

SEQ ID NO: 14744 - protein, 234 aa, Artificial Sequence
  source: /note="Description of Artificial Sequence: Synthetic polypeptide"
MVLQTQVFISLLLWISGAYGDIQMTQSPSSLSAFLGDRVTITCRASQDIGNYLRWFQQKPGKSPRLMIYGATNLANGVPSRFSGSRSGSDYSLTINNLESEDMAIYYCLKHNEYPFTFGSGTKLEIKRAVAAPSVFIFPPSDEQLKSGTASVVCLLNNFYPREAKVQWKVDNALQSGNSQESVTEQDSKDSTYSLSSTLTLSKADYEKHKVYACEVTHQGLSSPVTKSFNRGEC

SEQ ID NO: 14745 - protein, 235 aa, Artificial Sequence
  source: /note="Description of Artificial Sequence: Synthetic polypeptide"
MVLQTQVFISLLLWISGAYGDIQMTQSPASLSASLGETVTIECRASEDIYSNLAWYQQKPGNSPQLLIYDANILADGVPSRFSGSGSGTQYSLKINSLQSEDVASYFCQQYNNYPPFTFGVGTKLELKRAVAAPSVFIFPPSDEQLKSGTASVVCLLNNFYPREAKVQWKVDNALQSGNSQESVTEQDSKDSTYSLSSTLTLSKADYEKHKVYACEVTHQGLSSPVTKSFNRGEC

SEQ ID NO: 14746 - protein, 235 aa, Artificial Sequence
  source: /note="Description of Artificial Sequence: Synthetic polypeptide"
MVLQTQVFISLLLWISGAYGDIQMTQSPASLSASLGETVTIECRASEDIYSNLAWYQQKPGNSPQLLIYDANILADGVPSRFSGSGSGTQYSLKINSLQSEDVASYFCQQYNNYPPFTFGAGTKLELKRAVAAPSVFIFPPSDEQLKSGTASVVCLLNNFYPREAKVQWKVDNALQSGNSQESVTEQDSKDSTYSLSSTLTLSKADYEKHKVYACEVTHQGLSSPVTKSFNRGEC

SEQ ID NO: 14747 - protein, 235 aa, Artificial Sequence
  source: /note="Description of Artificial Sequence: Synthetic polypeptide"
MVLQTQVFISLLLWISGAYGDIQMTQSPSSLSASVGDRVTITCRASEDIYSNLAWYQQKPGKSPQLLIYDANILADGVPSRFSGSGSGTDYTLTISSLQPEDFATYYCQQYNNYPPFTFGQGTKVEIKRTVAAPSVFIFPPSDEQLKSGTASVVCLLNNFYPREAKVQWKVDNALQSGNSQESVTEQDSKDSTYSLSSTLTLSKADYEKHKVYACEVTHQGLSSPVTKSFNRGEC

SEQ ID NO: 14748 - protein, 214 aa, Homo sapiens
DIQMTQSPSSLSASVGDRVTITCRASQSISTYLNWYQQKPGKAPKFLIYAASSLQSGVPSRFSGSGSGTDFTLTISSLQPEDFAAYYCQQSHSAPFTFGPGTKVDIKRTVAAPSVFIFPPSDEQLKSGTASVVCLLNNFYPREAKVQWKVDNALQSGNSQESVTEQDSKDSTYSLSSTLTLSKADYEKHKVYACEVTHQGLSSPVTKSFNRGEC

SEQ ID NO: 14749 - protein, 216 aa, Artificial Sequence
  source: /note="Description of Artificial Sequence: Synthetic polypeptide"
DIQMTQSPSSLSASVGDRVTITCRASQDVLFYGNVAWYQQKPGKAPKLLIYDGSYLYSGVPSRFSGSGSGTDFTLTISSLQPEDFATYYCQQSYPAPYTFGQGTKVEIKRTVAAPSVFIFPPSDEQLKSGTASVVCLLNNFYPREAKVQWKVDNALQSGNSQESVTEQDSKDSTYSLSSTLTLSKADYEKHKVYACEVTHQGLSSPVTKSFNRGEC

SEQ ID NO: 14750 - protein, 222 aa, Artificial Sequence
  source: /note="Description of Artificial Sequence: Synthetic polypeptide"
QLVLTQSSSVSFSLGASAKLTCTLSSQHSTYTIEWYQQQPLKPPKYVMELKKDGSHSTGDGIPDRFSGSSSGADRYLSISNIQPEDEAIYICGVGDTIKEQFVYVFGGGTKVEIKRTVAAPSVFIFPPSDEQLKSGTASVVCLLNNFYPREAKVQWKVDNALQSGNSQESVTEQDSKDSTYSLSSTLTLSKADYEKHKVYACEVTHQGLSSPVTKSFNRGEC

SEQ ID NO: 14751 - protein, 704 aa, Artificial Sequence
  source: /note="Description of Artificial Sequence: Synthetic polypeptide"
EVQLVESGGGLAKPGGSLRLSCAASGFRFTFNNYYMDWVRQAPGQGLEWVSRISSSGDPTWYADSVKGRFTISRENAKNTLFLQMNSLRAEDTAVYYCASLTTGSDSWGQGVLVTVSSASTKGPSVFPLAPSSKSTSGGTAALGCLVKDYFPEPVTVSWNSGALTSGVHTFPAVLQSSGLYSLSSVVTVPSSSLGTQTYICNVNHKPSNTKVDKKVEPKSCDKTHTCPPCPAPELLGGPSVFLFPPKPKDTLMISRTPEVTCVVVDVSHEDPEVKFNWYVDGVEVHNAKTKPREEQYNSTYRVVSVLTVLHQDWLNGKEYKCKVSNKALPAPIEKTISKAKGQPREPQVYTLPPSRDELTKNQVSLTCLVKGFYPSDIAVEWESNGQPENNYKTTPPVLDSDGSFFLYSKLTVDKSRWQQGNVFSCSVMHEALHNHYTQKSLSLSPGKSGGGGSGGGGSGGGGSDIQMTQSPSSLSASVGDRVTITCRASQDIRYYLNWYQQKPGKAPKLLIYVASSLQSGVPSRFSGSGSGTEFTLTVSSLQPEDFATYYCLQVYSTPRTFGQGTKVEIKGGGGSGGGGSGGGGSEVQLVESGGGLAKPGGSLRLSCAASGFRFTFNNYYMDWVRQAPGQGLEWVSRISSSGDPTWYADSVKGRFTISRENAKNTLFLQMNSLRAEDTAVYYCASLTTGSDSWGQGVLVTVSS

SEQ ID NO: 14752 - protein, 214 aa, Artificial Sequence
  source: /note="Description of Artificial Sequence: Synthetic polypeptide"
DIQMTQSPSSLSASVGDRVTITCRASQDIRYYLNWYQQKPGKAPKLLIYVASSLQSGVPSRFSGSGSGTEFTLTVSSLQPEDFATYYCLQVYSTPRTFGQGTKVEIKRTVAAPSVFIFPPSDEQLKSGTASVVCLLNNFYPREAKVQWKVDNALQSGNSQESVTEQDSKDSTYSLSSTLTLSKADYEKHKVYACEVTHQGLSSPVTKSFNRGEC

SEQ ID NO: 14753 - protein, 214 aa, Mus musculus
DIVMTQSHKFMSTSVGDRVSISCKASQDVIAAVTWYQQKPGQSPKLLIYWASTRHTGVPDRFTGSGSGTDYTLTISSMQAEDLALYYCQQHYSTPWTFGGGTKLEIKRTVAAPSVFIFPPSDEQLKSGTASVVCLLNNFYPREAKVQWKVDNALQSGNSQESVTEQDSKDSTYSLSSTLTLSKADYEKHKVYACEVTHQGLSSPVTKSFNRGEC

SEQ ID NO: 14754 - protein, 214 aa, Mus musculus
DIQMTQSPASLSVSVGETVTITCRASENIYSNLAWYQQEQGKSPQLLVYAATNLADGVPSRFSGSGSGTQYSLKINSLQSEDFGSYYCQHFWGTPWTFGGGTKLEIKRTVAAPSVFIFPPSDEQLKSGTASVVCLLNNFYPREAKVQWKVDNALQSGNSQESVTEQDSKDSTYSLSSTLTLSKADYEKHKVYACEVTHQGLSSPVTKSFNRGEC

SEQ ID NO: 14755 - protein, 218 aa, Mus musculus
  MOD_RES (40)..(40): Any amino acid
DIVLTQSPASLAVSLGQRATISCRASKSVTTSGYSYMHWXQQKPGQPPKLLISVASNLESGVPARFSGSGSGTDFTLNIHPVEEEDAATFYCHHSRELPWTFGGGTKLEIKRTVAAPSVFIFPPSDEQLKSGTASVVCLLNNFYPREAKVQWKVDNALQSGNSQESVTEQDSKDSTYSLSSTLTLSKADYEKHKVYACEVTHQGLSSPVTKSFNRGEC

SEQ ID NO: 14756 - protein, 214 aa, Mus musculus
DIVMTQSLKFMSASVGDRVSITCKASQDVSAAVAWYQQKPGQSPELLIYWASTRHTGVPDRFTGSGSGTDYTLTISSVQAEDLALYYCQQHYTTPPTFGGGTKLEIKRTVAAPSVFIFPPSDEQLKSGTASVVCLLNNFYPREAKVQWKVDNALQSGNSQESVTEQDSKDSTYSLSSTLTLSKADYEKHKVYACEVTHQGLSSPVTKSFNRGEC

SEQ ID NO: 14757 - protein, 214 aa, Mus musculus
DIVMTQSHKFMSTSVGDRVSITCKASQDVFTAVAWYQQKPGQSPKLLIYSASSRYTGVPDRFTGSGSGTDFIFTISSVQAEDLAIYHCQQHFGIPWTFGGGTKLEIKRTVAAPSVFIFPPSDEQLKSGTASVVCLLNNFYPREAKVQWKVDNALQSGNSQESVTEQDSKDSTYSLSSTLTLSKADYEKHKVYACEVTHQGLSSPVTKSFNRGEC

SEQ ID NO: 14758 - protein, 214 aa, Mus musculus
DIVMTQSQKFMSTSVGDRVSITCKASQNVGTAVSWYQQKPGQSPKLLIFSTSNRYTGVPDRFTGSGSGTDFTLTISNMQSEDLADYFCQQYRSYPFTFGSGTKLEIKRTVAAPSVFIFPPSDEQLKSGTASVVCLLNNFYPREAKVQWKVDNALQSGNSQESVTEQDSKDSTYSLSSTLTLSKADYEKHKVYACEVTHQGLSSPVTKSFNRGEC

SEQ ID NO: 14759 - protein, 213 aa, Mus musculus
QIVLTQSPAIMSASPGEKVTISCSASSSVSYLYWYQQKPGSSPKPWIYRTSNLASGVPARFSGSGSGTSYSLTISSMEAEDAATYYCQQYHNYPLTFGAGTKLELKRTVAAPSVFIFPPSDEQLKSGTASVVCLLNNFYPREAKVQWKVDNALQSGNSQESVTEQDSKDSTYSLSSTLTLSKADYEKHKVYACEVTHQGLSSPVTKSFNRGEC

SEQ ID NO: 14760 - protein, 216 aa, Mus musculus
QIVMTQSHKFMSTSVGDRVSITCKASQDVGTAVAWYQQKPGQSPKLLIYWASTRHTGVPDRFTGSGSGTDFTLTISNVQSEDLADYFCQQYSSYPYMYTFGGGTKLEIKRTVAAPSVFIFPPSDEQLKSGTASVVCLLNNFYPREAKVQWKVDNALQSGNSQESVTEQDSKDSTYSLSSTLTLSKADYEKHKVYACEVTHQGLSSPVTKSFNRGEC

SEQ ID NO: 14761 - protein, 213 aa, Mus musculus
QIVLTQSPALMSASPGEKVTMTCSASSSVSYMYWYQQKPRSSPKPWIYLTSNLASGVPARFSGSGSGTSYTLTISSMEAEDAATYYCQQWSSTPYTFGGGTKLELKRTVAAPSVFIFPPSDEQLKSGTASVVCLLNNFYPREAKVQWKVDNALQSGNSQESVTEQDSKDSTYSLSSTLTLSKADYEKHKVYACEVTHQGLSSPVTKSFNRGEC

SEQ ID NO: 14762 - protein, 217 aa, Artificial Sequence; identical to SEQ ID NO: 9600
  source: /note="Description of Artificial Sequence: Synthetic polypeptide"

SEQ ID NO: 14763 - protein, 217 aa, Artificial Sequence; identical to SEQ ID NO: 9611
  source: /note="Description of Artificial Sequence: Synthetic polypeptide"

SEQ ID NO: 14764 - protein, 217 aa, Artificial Sequence; identical to SEQ ID NO: 9595
  source: /note="Description of Artificial Sequence: Synthetic polypeptide"

SEQ ID NO: 14765 - protein, 217 aa, Artificial Sequence; identical to SEQ ID NO: 9598
  source: /note="Description of Artificial Sequence: Synthetic polypeptide"

SEQ ID NO: 14766 - protein, 217 aa, Artificial Sequence; identical to SEQ ID NO: 9599
  source: /note="Description of Artificial Sequence: Synthetic polypeptide"

SEQ ID NO: 14767 - protein, 222 aa, Artificial Sequence; identical to SEQ ID NO: 9601
  source: /note="Description of Artificial Sequence: Synthetic polypeptide"

SEQ ID NO: 14768 - protein, 111 aa, Artificial Sequence
  source: /note="Description of Artificial Sequence: Synthetic polypeptide"
AYDMTQTPASVEVAVGGTVTIKCQASQSISSWLAWYQQKPGQPPKLLIYEASKLASGVPSRFSGSGSGTQFTLTISGVECADAATYYCQQAYSVANVDNAFGGGTEVVVKR

SEQ ID NO: 14769 - protein, 215 aa, Artificial Sequence; identical to SEQ ID NO: 9604
  source: /note="Description of Artificial Sequence: Synthetic polypeptide"

SEQ ID NO: 14770 - protein, 216 aa, Artificial Sequence; identical to SEQ ID NO: 9605
  source: /note="Description of Artificial Sequence: Synthetic polypeptide"

SEQ ID NO: 14771 - protein, 219 aa, Artificial Sequence; identical to SEQ ID NO: 9606
  source: /note="Description of Artificial Sequence: Synthetic polypeptide"

SEQ ID NO: 14772 - protein, 217 aa, Artificial Sequence; identical to SEQ ID NO: 9607
  source: /note="Description of Artificial Sequence: Synthetic polypeptide"

SEQ ID NO: 14773 - protein, 217 aa, Artificial Sequence; identical to SEQ ID NO: 9608
  source: /note="Description of Artificial Sequence: Synthetic polypeptide"

SEQ ID NO: 14774 - protein, 217 aa, Artificial Sequence; identical to SEQ ID NO: 9609
  source: /note="Description of Artificial Sequence: Synthetic polypeptide"

SEQ ID NO: 14775 - protein, 217 aa, Artificial Sequence; identical to SEQ ID NO: 9610
  source: /note="Description of Artificial Sequence: Synthetic polypeptide"

SEQ ID NO: 14776 - protein, 219 aa, Artificial Sequence; identical to SEQ ID NO: 9612
  source: /note="Description of Artificial Sequence: Synthetic polypeptide"

SEQ ID NO: 14777 - protein, 219 aa, Artificial Sequence; identical to SEQ ID NO: 9613
  source: /note="Description of Artificial Sequence: Synthetic polypeptide"

SEQ ID NO: 14778 - protein, 217 aa, Artificial Sequence; identical to SEQ ID NO: 9614
  source: /note="Description of Artificial Sequence: Synthetic polypeptide"

SEQ ID NO: 14779 - protein, 217 aa, Artificial Sequence; identical to SEQ ID NO: 9615
  source: /note="Description of Artificial Sequence: Synthetic polypeptide"

SEQ ID NO: 14780 - protein, 217 aa, Artificial Sequence; identical to SEQ ID NO: 9616
  source: /note="Description of Artificial Sequence: Synthetic polypeptide"

SEQ ID NO: 14781 - protein, 217 aa, Artificial Sequence; identical to SEQ ID NO: 9617
  source: /note="Description of Artificial Sequence: Synthetic polypeptide"

SEQ ID NO: 14782 - protein, 217 aa, Artificial Sequence; identical to SEQ ID NO: 9618
  source: /note="Description of Artificial Sequence: Synthetic polypeptide"

SEQ ID NO: 14783 - protein, 217 aa, Artificial Sequence; identical to SEQ ID NO: 9619
  source: /note="Description of Artificial Sequence: Synthetic polypeptide"

SEQ ID NO: 14784 - protein, 216 aa, Artificial Sequence; identical to SEQ ID NO: 9620
  source: /note="Description of Artificial Sequence: Synthetic polypeptide"

SEQ ID NO: 14785 - protein, 216 aa, Artificial Sequence; identical to SEQ ID NO: 9621
  source: /note="Description of Artificial Sequence: Synthetic polypeptide"

SEQ ID NO: 14786 - protein, 218 aa, Artificial Sequence; identical to SEQ ID NO: 9596
  source: /note="Description of Artificial Sequence: Synthetic polypeptide"

SEQ ID NO: 14787 - protein, 217 aa, Artificial Sequence; identical to SEQ ID NO: 9597
  source: /note="Description of Artificial Sequence: Synthetic polypeptide"

SEQ ID NO: 14788 - protein, 220 aa, Unknown
  source: /note="Description of Unknown: light chain 5D5 Fab"
DIMMSQSPSSLTVSVGEKVTVSCKSSQSLLYTSSQKNYLAWYQQKPGQSPKLLIYWASTRESGVPDRFTGSGSGTDFTLTITSVKADDLAVYYCQQYYAYPWTFGGGTKLEIKRTVAAPSVFIFPPSDEQLKSGTASVVCLLNNFYPREAKVQWKVDNALQSGNSQESVTEQDSKDSTYSLSSTLTLSKADYEKHKVYACEVTHQGLSSPVTKSFNRGEC

SEQ ID NO: 14789 - protein, 129 aa, Artificial Sequence
  source: /note="Description of Artificial Sequence: Synthetic polypeptide"
MDMRVPAQLLGLLLLWFPGSRCDIQMTQSPSSVSASVGDRVTITCRASQGISSWLAWYQQKPGKAPNLLIYEASSLQSGVPSRFGGSGSGTDFTLTISSLQPEDFATYYCQQANGFPWTFGQGTKVEIK

SEQ ID NO: 14790 - protein, 133 aa, Artificial Sequence
  source: /note="Description of Artificial Sequence: Synthetic polypeptide"
MVLQTQVFISLLLWISDAYGDIVMTQSPDSLAVSLGERATINCKSSQSIFYSSTNKNYLAWYQKKPGQPPKLLIYWASTRESGVPDRFSGSGSGTDFTLTISSLQAEDVAVYYCQQYYSTPWTFGQGTKVEIK

SEQ ID NO: 14791 - protein, 129 aa, Artificial Sequence
  source: /note="Description of Artificial Sequence: Synthetic polypeptide"
MDMRVPAQLLGLLLLWLPDTRCDIQMTQSPSSLSVSVGDRVTITCRASQGISSYLAWYQQKPGKVPKLLIYVASTLQSGVPSRFSGSGSGTDFTLTISSLQPEDVATYYCQNYNSDPLTFGGGTKVEIK

SEQ ID NO: 14792 - protein, 129 aa, Artificial Sequence
  source: /note="Description of Artificial Sequence: Synthetic polypeptide"
MDMRVPAQLLGLLLLWLSGARCDIQMTQSPSSLSASVGDRVTITCQASQDISNYLNWYQQKPGTAPKLLIYGASDLETGVPSRFSGSGSGTDFTFAISSLQPEDIATYYCQQYDNLPYNFGQGTKLEIK

SEQ ID NO: 14793 - protein, 129 aa, Artificial Sequence
  source: /note="Description of Artificial Sequence: Synthetic polypeptide"
MDMRVPAQLLGLLLLWLRGARCDIQMTQSPSSLSASVGDRVTITCRASQSINSDLNWYQQKPGKVPKLLIYVASSLQNGVPSRFSGSGSGTDFTLTISSLQPEDFATYYCQRSYSTPPTFGPGTKVDIK

SEQ ID NO: 14794 - protein, 129 aa, Artificial Sequence
  source: /note="Description of Artificial Sequence: Synthetic polypeptide"
MDMRVPAQLLGLLLLWFPGARCDIQMTQSPSSLSASVGDRVTITCRASQGIRNDLGWFQQKPGKAPKRLIYAASSLQSGVPSRFSGSGSGTEFTLTISSLQPEDFATYYCLQHDSYPLTFGGGTKVEIK

SEQ ID NO: 14795 - protein, 133 aa, Artificial Sequence
  source: /note="Description of Artificial Sequence: Synthetic polypeptide"
MVLQTQVFISLLLWISGAYGDIVMTQSPDSLAVSLGERATINCKSSQSVLFSSNNKNYLAWYQQKPGQPPKLLIYWASTRESGVPDRFSGSGSGTDFTLTISSLQAEDVAVYYCQQYFSPPWTFGQGTKVEIK

SEQ ID NO: 14796 - protein, 128 aa, Artificial Sequence
  source: /note="Description of Artificial Sequence: Synthetic polypeptide"
MEAPAQLLFLLLLWLPDTTGEIVMTQSPATLSVSPGERATLSCRASQSVDSNLAWYRQKPGQAPRLLIYGASTRATGIPARFSGSGSGTEFTLTISSLQSEDFAVYYCQQYINWPPITFGQGTRLEIK

SEQ ID NO: 14797 - protein, 129 aa, Artificial Sequence
  source: /note="Description of Artificial Sequence: Synthetic polypeptide"
MDMRVPAQLLGLLLLWFPGARCDIQMTQSPSSLSASVGDRVTITCRASQGIRNDLGWYQQKPGKAPKRLIYVASSLQSGVPSRFSGSGSGTEFTLTISSLQPEDFATYYCLQHNSYPLTFGGGTKVEIK

SEQ ID NO: 14798 - protein, 128 aa, Artificial Sequence
  source: /note="Description of Artificial Sequence: Synthetic polypeptide"
MEAPAQLLFLLLLWLPDTTGEIVMTQSPATLSVSPGERATLSCRASQSVSSNLAWYQQKPGQAPRLLMYGASTRATGIPARFSGSGSGTEFTLTISSLQSEDFAVYYCQQYNNWPPITFGQGTRLEIK

SEQ ID NO: 14799 - protein, 234 aa, Artificial Sequence
  source: /note="Description of Artificial Sequence: Synthetic polypeptide"
MEAPAQLLFLLLLWLPDTHGDIVMTQSPSSLSASVGDRVTITCKASENVVTYVSWYQQKPGKAPKLLIYGASNRYTGVPDRFSGSGSGTDFTLTISSLQPEDFATYYCGQGYSYPYTFGQGTKLEIKRTVAAPSVFIFPPSDEQLKSGTASVVCLLNNFYPREAKVQWKVDNALQSGNSQESVTEQDSKDSTYSLSSTLTLSKADYEKHKVYACEVTHQGLSSPVTKSFNRGEC

SEQ ID NO: 14800 - protein, 106 aa, Artificial Sequence
  source: /note="Description of Artificial Sequence: Synthetic polypeptide"
DIVMTQSPDSLAVSLGERATINCRASSSVSYMHWYQQKPGQPPKLLIYGTSKLASGVPDRFSGSGSGTDFTLTISSLQAEDVAVYYCLQRSSYPPTFGQGTKVEIK

SEQ ID NO: 14801 - protein, 128 aa, Artificial Sequence
  source: /note="Description of Artificial Sequence: Synthetic polypeptide"
MDFQVQSFSLLLISITVIVSSGDIVMTQSPDSLAVSLGERATINCRASSSVSYMHWYQQKPGQPPKLLIYGTSKLASGVPDRFSGSGSGTDFTLTISSLQAEDVAVYYCLQRSSYPPTFGQGTKVEIK

SEQ ID NO: 14802 - protein, 212 aa, Homo sapiens
DIELTQPPSVSVAPGQTARISCSGDNIPLKYVSWYQQKPGQAPVLVIHDDNKRPSGIPERFSGSNSGNTATLTISGTQAEDEADYYCQSWASTGVVFGGGTKLTVLGQPKAAPSVTLFPPSSEELQANKATLVCLISDFYPGAVTVAWKGDSSPVKAGVETTTPSKQSNNKYAASSYLSLTPEQWKSHRSYSCQVTHEGSTVEKTVAPTECS

SEQ ID NO: 14803 - protein, 113 aa, Artificial Sequence
  source: /note="Description of Artificial Sequence: Synthetic polypeptide"
DVLMTQTPLSLPVSLGDQASISCRSSQSIVHSNVNTYLEWYLQKPGQSPKLLIYKVSNRFSGVPDRFSGSGSGTDFTLRISRVEAEDLGIYYCFQGSHVPPTFGGGTKLEIKR

SEQ ID NO: 14804 - protein, 113 aa, Artificial Sequence
  source: /note="Description of Artificial Sequence: Synthetic polypeptide"
DVLMTQTPLSLPVSLGDQASISCRSSQSIVHSNGNTYLEWYLQKPGQSPKLLIYSISSRFSGVPDRFSGSGSGTDFTLKISRVQAEDLGVYYCFQGSHVPYTFGGGTKLEIKR

SEQ ID NO: 14805 - protein, 113 aa, Artificial Sequence
  source: /note="Description of Artificial Sequence: Synthetic polypeptide"
DVLMTQTPLSLPVSLGDQASISCRSSQTIVHSNGNTYLEWYLQKPGQSPKLLIYKVTNRFSGVPDRFSGSGSGTDFTLKISRVEAEDLGVYYCFQGTHAPYTFGGGTKLEIKR

SEQ ID NO: 14806 - protein, 113 aa, Artificial Sequence
  source: /note="Description of Artificial Sequence: Synthetic polypeptide"
DVLMTQTPLSLPVSLGDQASISCRFSQSIVHSNGNTYLEWYLQKSGQSPKLLIYKVSNRFSGVPDRFSGSGSGTDFTLKISRVEAEDLGVYYCFQGSHVPRTFGGGTKLEIKR

SEQ ID NO: 14807 - protein, 113 aa, Artificial Sequence
  source: /note="Description of Artificial Sequence: Synthetic polypeptide"
ELVMTQTPLSLPVSLGDQASISCRSSQTIVHSNGDTYLDWFLQKPGQSPKLLIYKVSNRFSGVPDRFSGSGSGTDFTLKISRVEAEDLGVYYCFQGSHVPPTFGGGTKLEIKR

SEQ ID NO: 14808 - protein, 113 aa, Artificial Sequence
  source: /note="Description of Artificial Sequence: Synthetic polypeptide"
DVLMTQTPLSLPVSLGDQASISCRSNQTILLSDGDTYLEWYLQKPGQSPKLLIYKVSNRFSGVPDRFSGSGSGTDFTLKISRVEAEDLGVYYCFQGSHVPPTFGGGTKLEIKR

SEQ ID NO: 14809 - protein, 113 aa, Artificial Sequence
  source: /note="Description of Artificial Sequence: Synthetic polypeptide"
DVLMTQTPLSLPVSLGDQASISCKSSQSIVHSSGNTYFEWYLQKPGQSPKLLIYKVSNRFSGVPDRFSGSGSGTDFTLKISRVEAEDLGVYYCFQGSHIPFTFGSGTKLEIKR

SEQ ID NO: 14810 - protein, 113 aa, Artificial Sequence
  source: /note="Description of Artificial Sequence: Synthetic polypeptide"
DVLMTQTPVSLSVSLGDQASISCRSSQSIVHSTGNTYLEWYLQKPGQSPKLLIYKISNRFSGVPDRFSGSGSGTDFTLKISRVEAEDLGVYYCFQASHAPRTFGGGTKLEIKR

SEQ ID NO: 14811 - protein, 113 aa, Artificial Sequence
  source: /note="Description of Artificial Sequence: Synthetic polypeptide"
  MOD_RES (28)..(28): Any amino acid
  MOD_RES (101)..(101): Any amino acid
DVLMTQTPLSLPVSLGDQASISCRSSQXIVHSNGNTYLEWYLQKPGQSPKLLIYKVSNRFSGVPDRFSGSGSGTDFTLKISRVEAEDLGVYYCFQGSHVPXTFGGGTKLEIKR

SEQ ID NO: 14812 - protein, 128 aa, Homo sapiens; identical to SEQ ID NO: 10000

SEQ ID NO: 14813 - protein, 129 aa, Homo sapiens
MDMRVPAQLLGLLLLWLPGARCAIQLTQSPSSLSASVGDRVTITCRASQGISSVLAWYQQKPGKAPKLLIYDASSLESGVPSRFSGSGSGTDFTLTISSLQPEDFATYYCQQFNSYPYTFGQGTKLEIK

SEQ ID NO: 14814 - protein, 130 aa, Homo sapiens
METPAQLLFLLLLWLPDTTGEIVLTQSPGTLSLSPGERATLSCRASQSVSRSYLAWYQQKPGQAPRLLIYGASSRATGIPDRFSGSGSGTDFTLTISRLEPEDFAVYCCQQYGSSPWTFGQGTKVEIKRT

SEQ ID NO: 14815 - protein, 112 aa, Artificial Sequence [sequence omitted]

SEQ ID NO: 14816 - protein, 238 aa, Artificial Sequence
  source: /note="Description of Artificial Sequence: Synthetic polypeptide"
MKLPVRLVVLMFWIPASSSDVLMTQTPLSLPVSLGDHASISCRSSQSIVQSNGDTYLEWYLQKPGQSPKLLIYRISNRFSGVPDRFSGSGSGTDFTLKISRVEAEDLGVYYCFQGSHVPYTFGGGTKLEIKRTVAAPSVFIFPPSDEQLKSGTASVVCLLNNFYPREAKVQWKVDNALQSGNSQESVTEQDSKDSTYSLSSTLTLSKADYEKHKVYACEVTHQGLSSPVTKSFNRGEC

SEQ ID NO: 14817 - protein, 108 aa, Artificial Sequence
  source: /note="Description of Artificial Sequence: Synthetic polypeptide"
ENVLTQSPAIMSASPGEKVTMTCGASSSVSSSFLHWYQQKSGASPKLWIYSTSNLASGVPTRFSGSGSGTSYSLTISSVEAEDAATYYCQQYSGYPLTFGAGTKLELK

SEQ ID NO: 14818 - protein, 112 aa, Mus musculus
DVLMTQTPLSLPVSLGDQASISCRSSQSIVHSNGNTYLEWYLQKPGQSPKLLIYKVSNRFSGVPDRFSGSGSGTDFTLKISRVEAEDLGVYYCFQGSHVPFTFGSGTKLDIK

SEQ ID NO: 14819 - protein, 112 aa, Homo sapiens [sequence omitted]

SEQ ID NO: 14820 - protein, 112 aa, Mus musculus
DIVMSQSPSSLAVSAGEKVTMNCKSSQSLLDSRTRKNYLAWYQQKPGQSPKLLIYWASTRESGVPDRFTGSGSGTDFTLTISSVQAEDLAVYYCKQSYNLFTFGGGTKLEIK

SEQ ID NO: 14821 - protein, 112 aa, Artificial Sequence
  source: /note="Description of Artificial Sequence: Synthetic polypeptide"
DIVMTQSPDSLAVSLGERATINCKSSQSLLDSRTRKNYLAWYQQKPGQPPKLLIYWASTRESGVPDRFSGSGSGTDFTLTISSLQAEDVAVYYCKQSYNLFTFGGGTKVEIK

SEQ ID NO: 14822 - protein, 219 aa, Artificial Sequence
  source: /note="Description of Artificial Sequence: Synthetic polypeptide"
DIVMTQSPLSLPVTPGEPASISCRSSQNIVHINGNTYLEWYLQKPGQSPRLLIYKISDRFSGVPDRFSGSGSGTDFTLKISRVEADDVGIYYCFQGSHVPWTFGQGTKLEIKRTVAAPSVFIFPPSDEQLKSGTASVVCLLNNFYPREAKVQWKVDNALQSGNSQESVTEQDSKDSTYSLSSTLTLSKADYEKHKVYACEVTHQGLSSPVTKSFNRGEC

SEQ ID NO: 14823 - protein, 449 aa, Artificial Sequence
  source: /note="Description of Artificial Sequence: Synthetic polypeptide"
QVQLVQSGAEVKKPGSSVKVSCKASGFYIKDTYMHWVRQAPGQGLEWMGTIDPANGNTKYVPKFQGRVTITADESTSTAYMELSSLRSEDTAVYYCARSIYDDYHYDDYYAMDYWGQGTLVTVSSASTKGPSVFPLAPSSKSTSGGTAALGCLVKDYFPEPVTVSWNSGALTSGVHTFPAVLQSSGSLSSVVTVPSSSLGTQTYICNVNHKPSNTKVDKKVEPKSCDKTHTCPPCPAPELLGGPSVFLFPPKPKDTLMISRTPEVTCVVVDVSHEDPEVKFNWYVDGVEVHNAKTKPREEQYNSYVVSVLTVLHQDWLNGKEYKCKVSNKALPAPIEKTISKAKGQPREPQVYTLPPSRDELTKNQVSLTCLVKGFYPSDIAVEWESNGQPENNYKTTPPVLDSDGSFFKKLTVDKSRWQQGNVFSCSVMHEALHNHYTQKSLSLSPGK

SEQ ID NO: 14824 - protein, 214 aa, Artificial Sequence
  source: /note="Description of Artificial Sequence: Synthetic polypeptide"
DIQMTQSPSSVSASVGDRVTITCLASEDIYTYLTWYQQKPGKAPKLLIYGANKLQDGVPSRFSGSGSGTDYTLTISSLQPEDFATYYCLQGSKFPLTFGQGTKLEIKRTVAAPSVFIFPPSDEQLKSGTASVVCLLNNFYPREAKVQWKVDNALQSGNSQESVTEQDSKDSTYSLSSTLTLSKADYEKHKVYACEVTHQGLSSPVTKSFNRGEC

SEQ ID NO: 14825 - protein, 132 aa, Unknown
  source: /note="Description of Unknown: Murinae gen. sp. sequence"
METDTILLWVLLLWVPGSTGDIVLTQSPASLAVSLGQRATISCKASQSVDYDGDSYMNWYQQKPGQPPKLLIYAASNLESGIPARFSGSGSGTDFTLNIHPVEEEDAATYYCQQSNEDPPTFGGGTKLEIKR

SEQ ID NO: 14826 - protein, 131 aa, Artificial Sequence
  source: /note="Description of Artificial Sequence: Synthetic polypeptide"
MGWSCIILFLVATATGVHSDIVMTQSPDSLAVSLGERATINCKASQSVDYDGDSYMNWYQQKPGQPPKLLIYAASNLESGVPDRFSGSGSGTDFTLTISSLQAEDVAVYYCQQSNEDPPRFGGGTKVEIKR

SEQ ID NO: 14827 - protein, 216 aa, Artificial Sequence
  source: /note="Description of Artificial Sequence: Synthetic polypeptide"
DIVLTQSPSSLSASVGDRVTITCKASQSVDYDGDSYMNWYQQKPGKAPKLLIYANLESGIPSRFSGSGSGTDFTFTISSLQPEDIATYYCQQSNEDPPTFGQGTKVEIKRTVAAPSVFIFPPSDEQLKSGTASVVCLLNNFYPREAKVQWKVDNALQSGNSQESVTEQDSKDSTYSLSSTLTLSKADYEKHKVYACEVTHQGLSSPVTKSFNRGEC

SEQ ID NO: 14828 - protein, 220 aa, Artificial Sequence
  source: /note="Description of Artificial Sequence: Synthetic polypeptide"
DIVMTQSPDSLAVSLGERATINCKSSQSLLNSGNQKNYLAWYQQKPGQPPKLLIYGASTRESGVPDRFSGSGSGTDFTLTISSLQAEDVAVYYCQNVHSFPFTFGGGTKLEIKRTVAAPSVFIFPPSDEQLKSGTASVVCLLNNFYPREAKVQWKVDNALQSGNSQESVTEQDSKDSTYSLSSTLTLSKADYEKHKVYACEVTHQGLSSPVTKSFNRGEC

SEQ ID NO: 14829 - protein, 163 aa, Oryctolagus cuniculus; identical to SEQ ID NO: 9664

SEQ ID NO: 14830 - protein, 164 aa, Oryctolagus cuniculus; identical to SEQ ID NO: 9657

SEQ ID NO: 14831 - protein, 100 aa, Oryctolagus cuniculus; identical to SEQ ID NO: 9658

SEQ ID NO: 14832 - protein, 123 aa, Oryctolagus cuniculus; identical to SEQ ID NO: 9659

SEQ ID NO: 14833 - protein, 123 aa, Oryctolagus cuniculus; identical to SEQ ID NO: 9660

SEQ ID NO: 14834 - protein, 123 aa, Oryctolagus cuniculus; identical to SEQ ID NO: 9661

SEQ ID NO: 14835 - protein, 123 aa, Oryctolagus cuniculus; identical to SEQ ID NO: 9662

SEQ ID NO: 14836 - protein, 119 aa, Oryctolagus cuniculus; identical to SEQ ID NO: 9663

SEQ ID NO: 14837 - protein, 99 aa, Oryctolagus cuniculus; identical to SEQ ID NO: 9665

SEQ ID NO: 14838 - protein, 119 aa, Oryctolagus cuniculus; identical to SEQ ID NO: 9666

SEQ ID NO: 14839 - protein, 170 aa, Oryctolagus cuniculus; identical to SEQ ID NO: 9667

SEQ ID NO: 14840 - protein, 123 aa, Oryctolagus cuniculus; identical to SEQ ID NO: 9668

SEQ ID NO: 14841 - protein, 125 aa, Oryctolagus cuniculus; identical to SEQ ID NO: 9669

SEQ ID NO: 14842 - protein, 123 aa, Oryctolagus cuniculus; identical to SEQ ID NO: 9670

SEQ ID NO: 14843 - protein, 123 aa, Oryctolagus cuniculus; identical to SEQ ID NO: 9671

SEQ ID NO: 14844 - protein, 120 aa, Oryctolagus cuniculus; identical to SEQ ID NO: 9672

SEQ ID NO: 14845 - protein, 122 aa, Oryctolagus cuniculus; identical to SEQ ID NO: 9673

SEQ ID NO: 14846 - protein, 123 aa, Oryctolagus cuniculus; identical to SEQ ID NO: 9674

SEQ ID NO: 14847 - protein, 121 aa, Oryctolagus cuniculus; identical to SEQ ID NO: 9675

SEQ ID NO: 14848 - protein, 123 aa, Oryctolagus cuniculus; identical to SEQ ID NO: 9676

SEQ ID NO: 14849 - protein, 121 aa, Oryctolagus cuniculus; identical to SEQ ID NO: 9677

SEQ ID NO: 14850 - protein, 165 aa, Oryctolagus cuniculus; identical to SEQ ID NO: 9678

SEQ ID NO: 14851 - protein, 120 aa, Oryctolagus cuniculus; identical to SEQ ID NO: 9679

SEQ ID NO: 14852 - protein, 124 aa, Oryctolagus cuniculus; identical to SEQ ID NO: 9680

SEQ ID NO: 14853 - protein, 124 aa, Oryctolagus cuniculus; identical to SEQ ID NO: 9681

SEQ ID NO: 14854 - protein, 124 aa, Oryctolagus cuniculus; identical to SEQ ID NO: 9682

SEQ ID NO: 14855 - protein, 124 aa, Oryctolagus cuniculus; identical to SEQ ID NO: 9683

SEQ ID NO: 14856 - protein, 121 aa, Oryctolagus cuniculus; identical to SEQ ID NO: 9684

SEQ ID NO: 14857 - protein, 122 aa, Oryctolagus cuniculus; identical to SEQ ID NO: 9685

SEQ ID NO: 14858 - protein, 122 aa, Oryctolagus cuniculus; identical to SEQ ID NO: 9686

SEQ ID NO: 14859 - protein, 124 aa, Oryctolagus cuniculus; identical to SEQ ID NO: 9687

SEQ ID NO: 14860 - protein, 121 aa, Oryctolagus cuniculus; identical to SEQ ID NO: 9688

SEQ ID NO: 14861 - protein, 164 aa, Oryctolagus cuniculus; identical to SEQ ID NO: 9689

SEQ ID NO: 14862 - protein, 122 aa, Oryctolagus cuniculus; identical to SEQ ID NO: 9690

SEQ ID NO: 14863 - protein, 122 aa, Oryctolagus cuniculus; identical to SEQ ID NO: 9691

SEQ ID NO: 14864 - protein, 111 aa, Oryctolagus cuniculus; identical to SEQ ID NO: 9693

SEQ ID NO: 14865 - protein, 111 aa, Artificial Sequence; identical to SEQ ID NO: 9697
  source: /note="Description of Artificial Sequence: Synthetic polypeptide"

SEQ ID NO: 14866 - protein, 122 aa, Oryctolagus cuniculus; identical to SEQ ID NO: 9698

SEQ ID NO: 14867 - protein, 216 aa, Oryctolagus cuniculus; identical to SEQ ID NO: 9699

SEQ ID NO: 14868 - protein, 122 aa, Oryctolagus cuniculus; identical to SEQ ID NO: 9700

SEQ ID NO: 14869 - protein, 123 aa, Oryctolagus cuniculus; identical to SEQ ID NO: 9701

SEQ ID NO: 14870 - protein, 123 aa, Oryctolagus cuniculus; identical to SEQ ID NO: 9702

SEQ ID NO: 14871 - protein, 122 aa, Oryctolagus cuniculus; identical to SEQ ID NO: 9703

SEQ ID NO: 14872 - protein, 122 aa, Oryctolagus cuniculus; identical to SEQ ID NO: 9704

SEQ ID NO: 14873 - protein, 122 aa, Oryctolagus cuniculus; identical to SEQ ID NO: 9705

SEQ ID NO: 14874 - protein, 164 aa, Oryctolagus cuniculus; identical to SEQ ID NO: 9706

SEQ ID NO: 14875 - protein, 217 aa, Oryctolagus cuniculus; identical to SEQ ID NO: 9707

SEQ ID NO: 14876 - protein, 112 aa, Oryctolagus cuniculus; identical to SEQ ID NO: 9708

SEQ ID NO: 14877 - protein, 217 aa, Oryctolagus cuniculus; identical to SEQ ID NO: 9709

SEQ ID NO: 14878 - protein, 235 aa, Oryctolagus cuniculus; identical to SEQ ID NO: 9710

SEQ ID NO: 14879 - protein, 111 aa, Oryctolagus cuniculus; identical to SEQ ID NO: 9711

SEQ ID NO: 14880 - protein, 164 aa, Oryctolagus cuniculus; identical to SEQ ID NO: 9712

SEQ ID NO: 14881 - protein, 219 aa, Artificial Sequence; identical to SEQ ID NO: 9629
  source: /note="Description of Artificial Sequence: Synthetic polypeptide"

SEQ ID NO: 14882 - protein, 238 aa, Artificial Sequence
  source: /note="Description of Artificial Sequence: Synthetic polypeptide"
METDTILLWVLLLWVPGSTGDIVLTQSPASLAVSLGQRATISCKASQSVDYDGGSYMSWFQQRPGQPPKLLISAASNLESGIPARFSGSGSGTDFTLNIHPVEEEDVATYYCQQSYEDPLTFGAGTKLELKRADAAPTVSIFPPSSEQLTSGGASVVCFLNNFYPKDINVKWKIDGSERQNGVLNSWTDQDSKDSTYSMSSTLTLTKDEYERHNSYTCEATHKTSTSPIVKSFNRNEC

SEQ ID NO: 14883 - protein, 214 aa, Homo sapiens; identical to SEQ ID NO: 11488

SEQ ID NO: 14884 - protein, 235 aa, Mus musculus; identical to SEQ ID NO: 11474

SEQ ID NO: 14885 - protein, 108 aa, Mus musculus; identical to SEQ ID NO: 11385

SEQ ID NO: 14886 - protein, 446 aa, Artificial Sequence
  source: /note="Description of Artificial Sequence: Synthetic polypeptide"
EVQLVQSGAEVKKPGATVKISCKVSGYTFTSYWMYWVRQARGQRLEWIGRIDPNSGSTKYNEKFKNRFTISRDNSKNTLYLQMNSLRAEDTAVYYCARDYRKGLYAMDYWGQGTTVTVSSASTKGPSVFPLAPCSRSTSESTAALGCLVKDYFPEPVTVSWNSGALTSGVHTFPAVLQSSGLYSLSSVVTVPSSSLGTKTYTCNVDHKPSNTKVDKRVESKYGPPCPPCPAPEFLGGPSVFLFPPKPKDTLMISRTPEVTCVVVDVSQEDPEVQFNWYVDGVEVHNAKTKPREEQFNSTYRVVSVLTVLHQDWLNGKEYKCKVSNKGLPSSIEKTISKAKGQPREPQVYTLPPSQEEMTKNQVSLTCLVKGFYPSDIAVEWESNGQPENNYKTTPPVLDSDGSFFLYSRLTVDKSRWQEGNVFSCSVMHEALHNHYTQKSLSLSLG

SEQ ID NO: 14887 - protein, 110 aa, Artificial Sequence
  source: /note="Description of Artificial Sequence: Synthetic polypeptide"
QSALTQPASVSGSPGQSITISCTGTSSDVGGYNYVSWYQQHPGKAPKLMIYDVSNRPSGVSNRFSGSKSGNTASLTISGLQAEDEADYYCSSYTSSSTRVFGTGTKVTVL

SEQ ID NO: 14888 - protein, 263 aa, Artificial Sequence [sequence omitted]

SEQ ID NO: 14889 - protein, 107 aa, Artificial Sequence; identical to SEQ ID NO: 14622
  source: /note="Description of Artificial Sequence: Synthetic polypeptide"

SEQ ID NO: 14890 - protein, 107 aa, Artificial Sequence
  source: /note="Description of Artificial Sequence: Synthetic polypeptide"
DIQMTQSPSSLSASVGDRVTITCGVSQDVDSVVSWYQQKPGKAPKLLIYSASFLYSGVPSRFSGSGSGTDFTLTISSLQPEDFATYYCQQSYTTPPTFGQGTKVEIK

SEQ ID NO: 14891 - protein, 107 aa, Artificial Sequence
  source: /note="Description of Artificial Sequence: Synthetic polypeptide"
DIQMTQSPSSLSASVGDRVTITCGASHNLGTVIAWYQQKPGKAPKLLIYSASFLYSGVPSRFSGSGSGTDFTLTISSLQPEDFATYYCQQSYTTPPTFGQGTKVEIK

SEQ ID NO: 14892 - protein, 107 aa, Artificial Sequence
  source: /note="Description of Artificial Sequence: Synthetic polypeptide"
DIQMTQSPSSLSASVGDRVTITCRASQDVSTAVAWYQQKPGKAPKLLIYNQEFVYSGVPSRFSGSGSGTDFTLTISSLQPEDFATYYCQQSYTTPPTFGQGTKVEIK

SEQ ID NO: 14893 - protein, 107 aa, Artificial Sequence
  source: /note="Description of Artificial Sequence: Synthetic polypeptide"
DIQMTQSPSSLSASVGDRVTITCRASQIVGTFVAWYQQKPGKAPKLLIYSASFLYSGVPSRFSGSGSGTDFTLTISSLQPEDFATYYCQQSYTTPPTFGQGTKVEIK

SEQ ID NO: 14894 - protein, 107 aa, Artificial Sequence
  source: /note="Description of Artificial Sequence: Synthetic polypeptide"
DIQMTQSPSSLSASVGDRVTITCRASQDVETFVAWYQQKPGKAPKLLIYSASFLYSGVPSRFSGSGSGTDFTLTISSLQPEDFATYYCQQSYTTPPTFGQGTKVEIK

SEQ ID NO: 14895 - protein, 214 aa, Artificial Sequence
  source: /note="Description of Artificial Sequence: Synthetic polypeptide"
MQIVLTQSPAIMSASPGEKVTITCSASSSISYMHWFQQKPGTSPKLWIYTTSNLASGVPARFSGSGSGTSYSLTISRMEAEDAATYYCHQRSTYPLTFGSGTKLEIKRTVAAPSVFIFPPSDEQLKSGTASVVCLLNNFYPREAKVQWKVDNALQSGNSQESVTEQDSKDSTYSLSSTLTLSKADYEKHKVYACEVTHQGLSSPVTKSFNRGEC

SEQ ID NO: 14896 - protein, 110 aa, Homo sapiens
QSVLTQPPSASGTPGQRVTISCSGSSSNLGSNFVYWYQQLPGTAPKLLIYRNHQRPSGVPDRFSGSKSGTSASLAISGLRSEDEADYYCASWDDSLRVVVFGGGTKLTVL

SEQ ID NO: 14897 - protein, 110 aa, Homo sapiens
SYVLTQPPSASGTPGQRVTISCSGSSSNIGINYVYWYQQLPGTAPKLLIYRNDQRPSGVPDRFSGSKSGTSASLAISGLRSEDEADYYCATWDDSLSGVVFGGGTKVTVL

SEQ ID NO: 14898 - protein, 107 aa, Artificial Sequence
  source: /note="Description of Artificial Sequence: Synthetic polypeptide"
EIVLTQSPATLSLSPGERATLSCRASQSIGTNIHWYQQKPGQAPRLLIYYASESISGVPSRFSGSGSGTDFTLTISSLQPEDFATYYCQQNNNWPTTFGQGTKLELK

SEQ ID NO: 14899 - protein, 107 aa, Artificial Sequence
  source: /note="Description of Artificial Sequence: Synthetic polypeptide"
EIVLTQSPATLSLSPGERATLSCRASQSIGTNIHWYQQKPGQAPRLLIYYASESISGIPARFSGSGSGTEFTLTISSLQSEDFAVYYCQQNNNWPTTFGQGTKLELK

SEQ ID NO: 14900 - protein, 214 aa, Artificial Sequence
  source: /note="Description of Artificial Sequence: Synthetic polypeptide"
DIQMTQSPSSLSASVGDRVTITCRASQDVSTAVAWYQQKPGKAPKLLIYSASFLYSGVPSRFSGSGSGTDFTLTISSLQPEDFATYYCQQSYTTPPTFGQGTKVEIKRTVAAPSVFIFPPSDEQLKSGTASVVCLLNNFYPREAKVQWKVDNALQSGNSQESVTEQDSKDSTYSLSSTLTLSKADYEKHKVYACEVTHQGLSSPVTKSFNRGEC

SEQ ID NO: 14901 - protein, 214 aa, Artificial Sequence
  source: /note="Description of Artificial Sequence: Synthetic polypeptide"
DIQMTQSPSSLSASVGDRVTITCRASQDVSTAVAWYQQKPGKAPKLLIYSASFLYSGVPSRFSGSGSGTDFTLTISSLQPEDFATYYCQQSYPTPYTFGQGTKVEIKRTVAAPSVFIFPPSDEQLKSGTASVVCLLNNFYPREAKVQWKVDNALQSGNSQESVTEQDSKDSTYSLSSTLTLSKADYEKHKVYACEVTHQGLSSPVTKSFNRGEC

SEQ ID NO: 14902 - protein, 220 aa, Artificial Sequence
  source: /note="Description of Artificial Sequence: Synthetic polypeptide"
DIQMTQSPSSLSASVGDRVTITCRASQALGDSENGYADVAWYQQKPGKAPKLLIYEGSSLYSGVPSRFSGSGSGTDFTLTISSLQPEDFATYYCQQAAPSPYTFGQGTKVEIKRTVAAPSVFIFPPSDEQLKSGTASVVCLLNNFYPREAKVQWKVDNALQSGNSQESVTEQDSKDSTYSLSSTLTLSKADYEKHKVYACEVTHQGLSSPVTKSFNRGEC

SEQ ID NO: 14903 - protein, 220 aa, Artificial Sequence
  source: /note="Description of Artificial Sequence: Synthetic polypeptide"
DIQMTQSPSSLSASVGDRVTITCRASQSLLASHDGTPWVAWYQQKPGKAPKLLIYDASYLYSGVPSRFSGSGSGTDFTLTISSLQPEDFATYYCQQSTFAPYTFGQGTKVEIKRTVAAPSVFIFPPSDEQLKSGTASVVCLLNNFYPREAKVQWKVDNALQSGNSQESVTEQDSKDSTYSLSSTLTLSKADYEKHKVYACEVTHQGLSSPVTKSFNRGEC

SEQ ID NO: 14904 - protein, 214 aa, Artificial Sequence
  source: /note="Description of Artificial Sequence: Synthetic polypeptide"
DIQMTQSPSSLSASVGDRVTITCRASQEIFPDVAWYQQKPGKAPKLLIYSASSLYSGVPSRFSGSGSGTDFTLTISSLQPEDFATYYCQQAAPTPYTFGQGTKVEIKRTVAAPSVFIFPPSDEQLKSGTASVVCLLNNFYPREAKVQWKVDNALQSGNSQESVTEQDSKDSTYSLSSTLTLSKADYEKHKVYACEVTHQGLSSPVTKSFNRGEC

SEQ ID NO: 14905 - protein, 214 aa, Artificial Sequence
  source: /note="Description of Artificial Sequence: Synthetic polypeptide"
DIQMTQSPSSLSASVGDRVTITCRASQAIASDVAWYQQKPGKAPKLLIYSASFLYSGVPSRFSGSGSGTDFTLTISSLQPEDFATYYCQQSEPEPYTFGQGTKVEIKRTVAAPSVFIFPPSDEQLKSGTASVVCLLNNFYPREAKVQWKVDNALQSGNSQESVTEQDSKDSTYSLSSTLTLSKADYEKHKVYACEVTHQGLSSPVTKSFNRGEC

SEQ ID NO: 14906 - protein, 214 aa, Artificial Sequence
  source: /note="Description of Artificial Sequence: Synthetic polypeptide"
DIQMTQSPSSLSASVGDRVTITCRASQDVGSDLAWYQQKPGKAPKLLIYSASYLYSGVPSRFSGSGSGTDFTLTISSLQPEDFATYYCQQSDPEPYTFGQGTKVEIKRTVAAPSVFIFPPSDEQLKSGTASVVCLLNNFYPREAKVQWKVDNALQSGNSQESVTEQDSKDSTYSLSSTLTLSKADYEKHKVYACEVTHQGLSSPVTKSFNRGEC

SEQ ID NO: 14907 - protein, 214 aa, Artificial Sequence
  source: /note="Description of Artificial Sequence: Synthetic polypeptide"
DIQMTQSPSSLSASVGDRVTITCRASQNIASDVAWYQQKPGKAPKLLIYSASSLYSGVPSRFSGSGSGTDFTLTISSLQPEDFATYYCQQSDPEPYTFGQGTKVEIKRTVAAPSVFIFPPSDEQLKSGTASVVCLLNNFYPREAKVQWKVDNALQSGNSQESVTEQDSKDSTYSLSSTLTLSKADYEKHKVYACEVTHQGLSSPVTKSFNRGEC

SEQ ID NO: 14908 - protein, 214 aa, Artificial Sequence
  source: /note="Description of Artificial Sequence: Synthetic polypeptide"
DIQMTQSPSSLSASVGDRVTITCRASQDLATDVAWYQQKPGKAPKLLIYSASFLYSGVPSRFSGSGSGTDFTLTISSLQPEDFATYYCQQSEPEPYTFGQGTKVEIKRTVAAPSVFIFPPSDEQLKSGTASVVCLLNNFYPREAKVQWKVDNALQSGNSQESVTEQDSKDSTYSLSSTLTLSKADYEKHKVYACEVTHQGLSSPVTKSFNRGEC

SEQ ID NO: 14909 - protein, 214 aa, Artificial Sequence; identical to SEQ ID NO: 9573
  source: /note="Description of Artificial Sequence: Synthetic polypeptide"

SEQ ID NO: 14910 - protein, 218 aa, Artificial Sequence
  source: /note="Description of Artificial Sequence: Synthetic polypeptide"
DIQMTQSPSSLSASVGDRVTITCRASQAVWGGYIAPVAWYQQKPGKAPKLLIYDGSYLYSGVPSRFSGSGSGTDFTLTISSLQPEDFATYYCQQRLPTPYTFGQGTKVEIKRTVAAPSVFIFPPSDEQLKSGTASVVCLLNNFYPREAKVQWKVDNALQSGNSQESVTEQDSKDSTYSLSSTLTLSKADYEKHKVYACEVTHQGLSSPVTKSFNRGEC

SEQ ID NO: 14911 - protein, 218 aa, Artificial Sequence
  source: /note="Description of Artificial Sequence: Synthetic polypeptide"
DIQMTQSPSSLSASVGDRVTITCRANQSIAGAYYAPVAWYQQKPGKAPKLLIYDGYFLYSGVPSRFSGSGSGTDFTLTISSLQPEDFATYYCQQRLPSPYTFGQGTKVEIKRTVAAPSVFIFPPSDEQLKSGTASVVCLLNNFYPREAKVQWKVDNALQSGNSQESVTEQDSKDSTYSLSSTLTLSKADYEKHKVYACEVTHQGLSSPVTKSFNRGEC

SEQ ID NO: 14912 - protein, 218 aa, Artificial Sequence
  source: /note="Description of Artificial Sequence: Synthetic polypeptide"
DIQMTQSPSSLSASVGDRVTITCRASQSLWAAYFAPVAWYQQKPGKAPKLLIYDGSYLYSGVPSRFSGSGSGTDFTLTISSLQPEDFATYYCQQRLPSPYTFGQGTKVEIKRTVAAPSVFIFPPSDEQLKSGTASVVCLLNNFYPREAKVQWKVDNALQSGNSQESVTEQDSKDSTYSLSSTLTLSKADYEKHKVYACEVTHQGLSSPVTKSFNRGEC

SEQ ID NO: 14913 - protein, 107 aa, Artificial Sequence
  source: /note="Description of Artificial Sequence: Synthetic polypeptide"
DIVMTQTPLSLPVTPGEPASISCKASQDVGTAVAWYLQKPGQSPQLLIYWASTRHTGIPARFSGSGSGTEFTLTISSLQSEDFAVYYCQQYNSYPLTFGQGTKVEIK

SEQ ID NO: 14914 - protein, 214 aa, Artificial Sequence
  source: /note="Description of Artificial Sequence: Synthetic polypeptide"
DIVMTQTPLSLPVTPGEPASISCKASQDVGTAVAWYLQKPGQSPQLLIYWASTRHTGIPARFSGSGSGTEFTLTISSLQSEDFAVYYCQQYNSYPLTFGQGTKVEIKRTVAAPSVFIFPPSDEQLKSGTASVVCLLNNFYPREAKVQWKVDNALQSGNSQESVTEQDSKDSTYSLSSTLTLSKADYEKHKVYACEVTHQGLSSPVTKSFNRGEC

SEQ ID NO: 14915 - protein, 107 aa, Artificial Sequence
  source: /note="Description of Artificial Sequence: Synthetic polypeptide"
DIQMTQSPSSLSASVGDRVTITCKASQDVGTAVAWYLQKPGQSPQLLIYWASTRHTGVPSRFSGSGSGTDFTLTISSLQPEDFATYYCQQYNSYPLTFGQGTKVEIK

SEQ ID NO: 14916 - protein, 214 aa, Artificial Sequence
  source: /note="Description of Artificial Sequence: Synthetic polypeptide"
DIQMTQSPSSLSASVGDRVTITCKASQDVGTAVAWYLQKPGQSPQLLIYWASTRHTGVPSRFSGSGSGTDFTLTISSLQPEDFATYYCQQYNSYPLTFGQGTKVEIKRTVAAPSVFIFPPSDEQLKSGTASVVCLLNNFYPREAKVQWKVDNALQSGNSQESVTEQDSKDSTYSLSSTLTLSKADYEKHKVYACEVTHQGLSSPVTKSFNRGEC

SEQ ID NO: 14917 - protein, 107 aa, Artificial Sequence
  source: /note="Description of Artificial Sequence: Synthetic polypeptide"
EIVLTQSPDFQSVTPKEKVTITCKASQDVGTAVAWYLQKPGQSPQLLIYWASTRHTGVPDRFSGSGSGTDFTLKISRVEAEDVGVYYCQQYNSYPLTFGQGTKVEIK

SEQ ID NO: 14918 - protein, 214 aa, Artificial Sequence
  source: /note="Description of Artificial Sequence: Synthetic polypeptide"
EIVLTQSPDFQSVTPKEKVTITCKASQDVGTAVAWYLQKPGQSPQLLIYWASTRHTGVPDRFSGSGSGTDFTLKISRVEAEDVGVYYCQQYNSYPLTFGQGTKVEIKRTVAAPSVFIFPPSDEQLKSGTASVVCLLNNFYPREAKVQWKVDNALQSGNSQESVTEQDSKDSTYSLSSTLTLSKADYEKHKVYACEVTHQGLSSPVTKSFNRGEC

SEQ ID NO: 14919 - protein, 107 aa, Artificial Sequence
  source: /note="Description of Artificial Sequence: Synthetic polypeptide"
EIVLTQSPDFQSVTPKEKVTITCKASQDVGTAVAWYLQKPGQSPQLLIYWASTRHTGVPSRFSGSGSGTDFTFTISSLQPEDIATYYCQQYNSYPLTFGQGTKVEIK

SEQ ID NO: 14920 - protein, 214 aa, Artificial Sequence
  source: /note="Description of Artificial Sequence: Synthetic polypeptide"
EIVLTQSPDFQSVTPKEKVTITCKASQDVGTAVAWYLQKPGQSPQLLIYWASTRHTGVPSRFSGSGSGTDFTFTISSLQPEDIATYYCQQYNSYPLTFGQGTKVEIKRTVAAPSVFIFPPSDEQLKSGTASVVCLLNNFYPREAKVQWKVDNALQSGNSQESVTEQDSKDSTYSLSSTLTLSKADYEKHKVYACEVTHQGLSSPVTKSFNRGEC

SEQ ID NO: 14921 - protein, 107 aa, Artificial Sequence
  source: /note="Description of Artificial Sequence: Synthetic polypeptide"
EIVLTQSPATLSLSPGERATLSCKASQDVGTAVAWYLQKPGQSPQLLIYWASTRHTGIPPRFSGSGYGTDFTLTINNIESEDAAYYFCQQYNSYPLTFGQGTKVEIK

SEQ ID NO: 14922 - protein, 214 aa, Artificial Sequence
  source: /note="Description of Artificial Sequence: Synthetic polypeptide"
EIVLTQSPATLSLSPGERATLSCKASQDVGTAVAWYLQKPGQSPQLLIYWASTRHTGIPPRFSGSGYGTDFTLTINNIESEDAAYYFCQQYNSYPLTFGQGTKVEIKRTVAAPSVFIFPPSDEQLKSGTASVVCLLNNFYPREAKVQWKVDNALQSGNSQESVTEQDSKDSTYSLSSTLTLSKADYEKHKVYACEVTHQGLSSPVTKSFNRGEC

SEQ ID NO: 14923 - protein, 107 aa, Artificial Sequence
  source: /note="Description of Artificial Sequence: Synthetic polypeptide"
DVVMTQSPLSLPVTLGQPASISCKASQDVGTAVAWYQQKPGQAPRLLIYWASTRHTGVPSRFSGSGSGTEFTLTISSLQPDDFATYYCQQYNSYPLTFGQGTKVEIK

SEQ ID NO: 14924 - protein, 214 aa, Artificial Sequence
  source: /note="Description of Artificial Sequence: Synthetic polypeptide"
DVVMTQSPLSLPVTLGQPASISCKASQDVGTAVAWYQQKPGQAPRLLIYWASTRHTGVPSRFSGSGSGTEFTLTISSLQPDDFATYYCQQYNSYPLTFGQGTKVEIKRTVAAPSVFIFPPSDEQLKSGTASVVCLLNNFYPREAKVQWKVDNALQSGNSQESVTEQDSKDSTYSLSSTLTLSKADYEKHKVYACEVTHQGLSSPVTKSFNRGEC

SEQ ID NO: 14925 - protein, 214 aa, Artificial Sequence
  source: /note="Description of Artificial Sequence: Synthetic polypeptide"
DIQMTQSPSSLSASVGDRVTITCKASQDVGTAVAWYQQKPGQAPRLLIYWASTRHTGVPSRFSGSGSGTDFTFTISSLQPEDIATYYCQQYNSYPLTFGQGTKVEIKRTVAAPSVFIFPPSDEQLKSGTASVVCLLNNFYPREAKVQWKVDNALQSGNSQESVTEQDSKDSTYSLSSTLTLSKADYEKHKVYACEVTHQGLSSPVTKSFNRGEC

SEQ ID NO: 14926 - protein, 107 aa, Artificial Sequence
  source: /note="Description of Artificial Sequence: Synthetic polypeptide"
AIQLTQSPSSLSASVGDRVTITCKASQDVGTAVAWYLQKPGQSPQLLIYWASTRHTGVPSRFSGSGSGTDFTFTISSLEAEDAATYYCQQYNSYPLTFGQGTKVEIK

SEQ ID NO: 14927 - protein, 214 aa, Artificial Sequence
  source: /note="Description of Artificial Sequence: Synthetic polypeptide"
AIQLTQSPSSLSASVGDRVTITCKASQDVGTAVAWYLQKPGQSPQLLIYWASTRHTGVPSRFSGSGSGTDFTFTISSLEAEDAATYYCQQYNSYPLTFGQGTKVEIKRTVAAPSVFIFPPSDEQLKSGTASVVCLLNNFYPREAKVQWKVDNALQSGNSQESVTEQDSKDSTYSLSSTLTLSKADYEKHKVYACEVTHQGLSSPVTKSFNRGEC

SEQ ID NO: 14928 - protein, 107 aa, Artificial Sequence
  source: /note="Description of Artificial Sequence: Synthetic polypeptide"
EIVLTQSPDFQSVTPKEKVTITCKASQDVGTAVAWYQQKPGQAPRLLIYWASTRHTGVPSRFSGSGSGTEFTLTISSLQPDDFATYYCQQYNSYPLTFGQGTKVEIK

SEQ ID NO: 14929 - protein, 214 aa, Artificial Sequence
  source: /note="Description of Artificial Sequence: Synthetic polypeptide"
EIVLTQSPDFQSVTPKEKVTITCKASQDVGTAVAWYQQKPGQAPRLLIYWASTRHTGVPSRFSGSGSGTEFTLTISSLQPDDFATYYCQQYNSYPLTFGQGTKVEIKRTVAAPSVFIFPPSDEQLKSGTASVVCLLNNFYPREAKVQWKVDNALQSGNSQESVTEQDSKDSTYSLSSTLTLSKADYEKHKVYACEVTHQGLSSPVTKSFNRGEC

SEQ ID NO: 14930 - protein, 216 aa, Rattus sp.
QAVVTQANSVSTSLGSTVKLSCTLSSGNIENNYVHWYQLYEGRSPTTMIYDDDKRPDGVPDRFSGSIDRSSNSAFLTIHNVAIEDEAIYFCHSYVSSFNVFGGGTKLTVLRQPKAAPSVTLFPPSSEELQANKATLVCLISDFYPGAVTVAWKADSSPVKAGVETTTPSKQSNNKYAASSYLSLTPEQWKSHRSYSCQVTHEGSTVEKTVAPTECS

SEQ ID NO: 14931 - protein, 238 aa, Homo sapiens
MGWSCIILFLVATATGVHSDIVMTQSPLSLPVTPGEPASISCRSSQSIVQSNGDTYLEWYLQKPGQSPQLLIYRVSNRFSGVPDRFSGSGSGTDFTLKISRVEAEDVGVYYCFQGSHVPYTFGQGTKLEIKRTVAAPSVFIFPPSDEQLKSGTASVVCLLNNFYPREAKVQWKVDNALQSGNSQESVTEQDSKDSTYSLSSTLTLSKADYEKHKVYACEVTHQGLSSPVTKSFNRGEC

SEQ ID NO: 14932 - protein, 107 aa, Artificial Sequence
  source: /note="Description of Artificial Sequence: Synthetic polypeptide"
DIQMTQSPSSLSASVGDRVTITCRASQSISNYLAWYQQKPGKAPKLLIYAASSLESGVPSRFSGSGSGTDFTLTISSLQPEDFATYYCQQYNSLPWTFGQGTKVEIK

SEQ ID NO: 14933 - protein, 106 aa, Artificial Sequence; identical to SEQ ID NO: 4042
  source: /note="Description of Artificial Sequence: Synthetic polypeptide"

SEQ ID NO: 14934 - protein, 233 aa, Artificial Sequence
  source: /note="Description of Artificial Sequence: Synthetic polypeptide"
MDWTWRILFLVAAATGVHSDIQMTQSPSSMSVSVGDRVTITCHSSQDINSNIGWLQQKPGKSFKGLIYHGTNLDDGVPSRFSGSGSGTDYTLTISSLQPEDFATYYCVQYAQFPWTFGGGTKLEIKRTVAAPSVFIFPPSDEQLKSGTASVVCLLNNVYPREAKVQWKVDNALQSGNSQESVTEQDSKDSTYSLSSTLTLSKADYEKGKVYACEVTHQHLSSPVTKSFNRGEC

SEQ ID NO: 14935 - protein, 105 aa, Homo sapiens
QPKAAPSVTLFPPSSEELQANKATLVCLISDFYPGAVTVAWKGDSSPVKAGVETTTPSKQSNNKYAASSYLSLTPEQWKSHRSYSCQVTHEGSTVEKTVAPTECS

SEQ ID NO: 14936 - protein, 128 aa, Artificial Sequence; identical to SEQ ID NO: 9996
  source: /note="Description of Artificial Sequence: Synthetic polypeptide"

SEQ ID NO: 14937 - protein, 112 aa, Mus musculus; identical to SEQ ID NO: 11006

SEQ ID NO: 14938 - protein, 118 aa, Mus musculus
DVQLQESGPGLVKPSQSLSLTCSVTGYSITSGYYWNWIRQFPGNKLEWMGYINYDGNNNYNPSLKNRISITRDTSKNQFFLKLNSVTTEDTATYYCAREGYGYFFDYWGQGTTLTVSS

SEQ ID NO: 14939 - protein, 123 aa, Homo sapiens
QVQLQESGPGLVKPSETLSLTCTVSGYSISSGYYWSWIRQPPGKGLEWIGSMFHSGSSYYNPSLKSRVTISVDTSKNQFSLQLRSVTAADTAVYYCARGRYCSSTSCNWFDPWGQGTLVTVSS

SEQ ID NO: 14940 - protein, 107 aa, Homo sapiens [sequence omitted]

SEQ ID NO: 14941 - protein, 106 aa, Artificial Sequence
  source: /note="Description of Artificial Sequence: Synthetic polypeptide"
RTVAAPSVFIFPPSDEQLKSGTASVVCLLNNFYPREAKVQWKVDNALQSGNSQESVTEQDSKDSTYSLSSTLTLSKADYEKHKVYACEVTHQGLSSPVTKSFNRGA

SEQ ID NO: 14942 - protein, 107 aa, Artificial Sequence [sequence omitted]

SEQ ID NO: 14943 - protein, 104 aa, Homo sapiens
QPKAAPSVTLFPPSSEELQANKATLVCLISDFYPGAVTVAWKADSSPVKAGVETTTPSKQSNNKYAASSYLSLTPEQWKSHRSYSCQVTHEGSTVEKTVAPTEC

SEQ ID NO: 14944 - protein, 128 aa, Artificial Sequence; identical to SEQ ID NO: 9997
  source: /note="Description of Artificial Sequence: Synthetic polypeptide"

SEQ ID NO: 14945 - protein, 128 aa, Artificial Sequence; identical to SEQ ID NO: 9998
  source: /note="Description of Artificial Sequence: Synthetic polypeptide"

SEQ ID NO: 14946 - protein, 128 aa, Artificial Sequence; identical to SEQ ID NO: 9999
  source: /note="Description of Artificial Sequence: Synthetic polypeptide"

SEQ ID NO: 14947 - protein, 113 aa, Artificial Sequence
  source: /note="Description of Artificial Sequence: Synthetic polypeptide"
DVLMTQIPVSLPVSLGDQASISCRSSQIIVHNNGNTYLEWYLQKPGQSPQLLIYKVSNRFSGVPDRFSGSGSGTDFTLKISRVEAEDLGVYYCFQGSHVPFTFGSGTKLEIKR

SEQ ID NO: 14948 - protein, 219 aa, Artificial Sequence
  source: /note="Description of Artificial Sequence: Synthetic polypeptide"
DIVMTQSPLSLPVTPGEPASISCRSSQSIVHSNGNTYLQWYLQKPGQSPQLLIYKVSNRLYGVPDRFSGSGSGTDFTLKISRVEAEDVGVYYCFQGSHVPWTFGQGTKVEIKRTVAAPSVFIFPPSDEQLKSGTASVVCLLNNFYPREAKVQWKVDNALQSGNSQESVTEQDSKDSTYSLSSTLTLSKADYEKHKVYACEVTHQGLSSPVTKSFNRGEC

SEQ ID NO: 14949 - protein, 236 aa, Artificial Sequence
  source: /note="Description of Artificial Sequence: Synthetic polypeptide"
MDMRVPAQLLGLLLLWFPGARCDIQMTQSPSSLSASVGDRVTITCRASQDIRRDLGWYQQKPGKAPKRLIYAASRLQSGVPSRFSGSGSGTEFTLTISSLQPEDFATYYCLQHNNYPRTFGQGTKVEIKRTVAAPSVFIFPPSDEQLKSGTASVVCLLNNFYPREAKVQWKVDNALQSGNSQESVTEQDSKDSTYSLSSTLTLSKADYEKHKVYACEVTHQGLSSPVTKSFNRGEC

SEQ ID NO: 14950 - protein, 112 aa, Mus musculus
DVVMTQTPLSLPVSLGDQASISCRSSQSLVHSNGNTYLEWYLQKPGQSPKLLIYKVSNRFSGVPDRFSGSGSGTDFTLKISRVEAEDLGVYYCFQGTHVPYTFGGGTKLEIK

SEQ ID NO: 14951 - protein, 100 aa, Homo sapiens; identical to SEQ ID NO: 5225

SEQ ID NO: 14952 - protein, 109 aa, Homo sapiens
DIQMTQSPSSLSASVGDRVTITCRASKTISKYLAWYQQKPGKAPKLLIYYSGSTLESGVPSRFSGSGSGTDFTLTISSLQPEDFATYYCQQHNEYPLTFGQGTKVEIKR

SEQ ID NO: 14953 - protein, 114 aa, Artificial Sequence
  source: /note="Description of Artificial Sequence: Synthetic polypeptide"
  MOD_RES (13)..(13): Any amino acid
  MOD_RES (29)..(34): Any amino acid
  MOD_RES (36)..(38): Any amino acid
  MOD_RES (56)..(56): Any amino acid
  MOD_RES (98)..(98): Any amino acid
  MOD_RES (100)..(100): Any amino acid
  MOD_RES (102)..(103): Any amino acid
DIQMTQSPSSLSXSVGDRVTITCRASQSXXXXXXIXXXLAWYQQKPGKAPKLLIYXASTLQSGVPSRFSGSGSGTDFTLTISSLQPEDFATYYCQQYXSXPXXTFGQGTKVEIK

SEQ ID NO: 14954 - protein, 105 aa, Artificial Sequence [sequence omitted]

SEQ ID NO: 14955 - protein, 330 aa, Artificial Sequence; identical to SEQ ID NO: 12918
  source: /note="Description of Artificial Sequence: Synthetic polypeptide"

SEQ ID NO: 14956 - protein, 113 aa, Artificial Sequence
  source: /note="Description of Artificial Sequence: Synthetic polypeptide"
DIVMTQSPDSLAVSLGERATINCKSSQSVLFSSNNKNYLAWYQQKPGQPPKLLIYWASTRESGVPDRFSGSGSGTDFTLTISSLQAEDVAVYYCQQYFSPPWTFGQGTKVEIK

SEQ ID NO: 14957 - protein, 113 aa, Artificial Sequence
  source: /note="Description of Artificial Sequence: Synthetic polypeptide"
DIVMTQSPDSLAVSLGERATINCKSSQSIFYSSTNKNYLAWYQKKPGQPPKLLIYWASTRESGVPDRFSGSGSGTDFTLTISSLQAEDVAVYYCQQYYSTPWTFGQGTKVEIK

SEQ ID NO: 14958 - protein, 107 aa, Artificial Sequence
  source: /note="Description of Artificial Sequence: Synthetic polypeptide"
DIQMTQSPSSLSASVGDRVTITCRASQGIRNDLGWFQQKPGKAPKRLIYAASSLQSGVPSRFSGSGSGTEFTLTISSLQPEDFATYYCLQHDSYPLTFGGGTKVEIK

SEQ ID NO: 14959 - protein, 107 aa, Artificial Sequence
  source: /note="Description of Artificial Sequence: Synthetic polypeptide"
DIQMTQSPSSLSASVGDRVTITCRASQGIRNDLGWYQQKPGKAPKRLIYVASSLQSGVPSRFSGSGSGTEFTLTISSLQPEDFATYYCLQHNSYPLTFGGGTKVEIK

SEQ ID NO: 14960 - protein, 107 aa, Artificial Sequence
  source: /note="Description of Artificial Sequence: Synthetic polypeptide"
DIQMTQSPSSVSASVGDRVTITCRASQGISSWLAWYQQKPGKAPNLLIYEASSLQSGVPSRFGGSGSGTDFTLTISSLQPEDFATYYCQQANGFPWTFGQGTKVEIK

SEQ ID NO: 14961 - protein, 107 aa, Artificial Sequence
  source: /note="Description of Artificial Sequence: Synthetic polypeptide"
DIQMTQSPSSLSVSVGDRVTITCRASQGISSYLAWYQQKPGKVPKLLIYVASTLQSGVPSRFSGSGSGTDFTLTISSLQPEDVATYYCQNYNSDPLTFGGGTKVEIK

SEQ ID NO: 14962 - protein, 107 aa, Artificial Sequence
  source: /note="Description of Artificial Sequence: Synthetic polypeptide"
DIQMTQSPSSLSASVGDRVTITCRASQSINSDLNWYQQKPGKVPKLLIYVASSLQNGVPSRFSGSGSGTDFTLTISSLQPEDFATYYCQRSYSTPPTFGPGTKVDIK

SEQ ID NO: 14963 - protein, 107 aa, Artificial Sequence
  source: /note="Description of Artificial Sequence: Synthetic polypeptide"
DIQMTQSPSSLSASVGDRVTITCQASDQISNYLNWYQQKPGTAPKLLIYGASDLETGVPSRFSGSGSGTDFTFAISSLQPEDIATYYCQQYDNLPYNFGQGTKLEIK

SEQ ID NO: 14964 - protein, 108 aa, Artificial Sequence
  source: /note="Description of Artificial Sequence: Synthetic polypeptide"
EIVMTQSPATLSVSPGERATLSCRASQSVDSNLAWYRQKPGQAPRLLIYGASTRATGIPARFSGSGSGTEFTLTISSLQSEDFAVYYCQQYINWPPITFGQGTRLEIK

SEQ ID NO: 14965 - protein, 108 aa, Artificial Sequence
  source: /note="Description of Artificial Sequence: Synthetic polypeptide"
EIVMTQSPATLSVSPGERATLSCRASQSVSSNLAWYQQKPGQAPRLLMYGASTRATGIPARFSGSGSGTEFTLTISSLQSEDFAVYYCQQYNNWPPITFGQGTRLEIK

SEQ ID NO: 14966 - protein, 107 aa, Artificial Sequence
  source: /note="Description of Artificial Sequence: Synthetic polypeptide"
DIQLTQSPSSLSASVGDRVTMTCSASSRVSYIHWYQQKPGKAPKRWIYGTSTLASGVPARFSGSGSGTDFTFTISSLQPEDIATYYCQQWSYNPPTFGQGTKVEIKR

SEQ ID NO: 14967 - protein, 108 aa, Artificial Sequence
  source: /note="Description of Artificial Sequence: Synthetic polypeptide"
DIQLTQSPSSLSASVGDRVTITCKASQEVGTAVAWYQQKPGKAPKLLIYWASTRHTGVPSRFSGSGSGTDFTFTISSLQPEDIATYFCQQYSNYPLTFGQGTKVEIKR

SEQ ID NO: 14968 - protein, 132 aa, Mus musculus
MKLPVRLLVLMFWIPASSSDVLMTQTPLSLPVSLGDQASISCRSSQSIVHSNVNTYLEWYLQKPGQSPKLLIYKVSNRFSGVPDRFSGSGSGTDFTLRISRVEAEDLGIYYCFQGSHVPPTFGGGTKLEIKR

SEQ ID NO: 14969 - protein, 108 aa, Artificial Sequence
  source: /note="Description of Artificial Sequence: Synthetic polypeptide"
NIVMTQSPKSMSMSVGERVTLTCKASENVVTYVSWYQQKPEQSPKLLIYGASNRYTGVPDRFTGSGSATDFTLTISSVQAEDLADYHCGQGYSYPYTFGGGTKLEIKR

SEQ ID NO: 14970 - protein, 107 aa, Homo sapiens [sequence omitted]

SEQ ID NO: 14971 - protein, 108 aa, Artificial Sequence
  source: /note="Description of Artificial Sequence: Synthetic polypeptide"
DIVMTQSPSSLSASVGDRVTITCKASENVVTYVSWYQQKPGKAPKLLIYGASNRYTGVPDRFSGSGSGTDFTLTISSLQPEDFATYYCGQGYSYPYTFGQGTKLEIKR

SEQ ID NO: 14972 - protein, 108 aa, Artificial Sequence
  source: /note="Description of Artificial Sequence: Synthetic polypeptide"
DIQMTQSPSSLSASVGDRVTITCRASQSISSYLNWYQQKPGKAPKLLIYAASSLQSGVPSRFSGSGSGTDFTLTISSLQPEDFATYYCQQSYSTPYTFGQGTKLEIKR

SEQ ID NO: 14973 - protein, 240 aa, Artificial Sequence [sequence omitted]

SEQ ID NO: 14974 - protein, 240 aa, Artificial Sequence
  source: /note="Description of Artificial Sequence: Synthetic polypeptide"
MDSQAQVLMLLLLSVSGTCGDIQMTQSPSSLSASVGDRVTITCKSSQSLLASGNQNNYLAWHQQKPGKAPKMLIIWASTRVSGVPSRFSGSGSGTDFTLTISSLQPEDFATYYCQQSYSRPYTFGQGTKVEIKRTVAAPSVFIFPPSDEQLKSGTASVVCLLNNFYPREAKVQWKVDNALQSGNSQESVTEQDSKDSTYSLSSTLTLSKADYEKHKVYACEVTHQGLSSPVTKSFNRGEC

SEQ ID NO: 14975 - protein, 242 aa, Artificial Sequence
  source: /note="Description of Artificial Sequence: Synthetic polypeptide"
MKKNIAFLLASMFVFSIATNAYADIQMTQSPSSLSASVGDRVTITCRSSQSLVHGIGETYLHWYQQKPGKAPKLLIYKVSNRFSGVPSRFSGSGSGTDFTLTISSLQPEDFATYYCSQSTHVPLTFGQGTKVEIKRTVAAPSVFIFPPSDEQLKSGTASVVCLLNNFYPREAKVQWKVDNALQSGNSQESVTEQDSKDSTYSLSSTLTLSKADYEKHKVYACEVTHQGLSSPVTKSFNRGEC

SEQ ID NO: 14976 - protein, 119 aa, Artificial Sequence
  source: /note="Description of Artificial Sequence: Synthetic polypeptide"
EVQLVQSGAEVKKPGATVKISCKVSGFSLTNYGVHWIRQPPGKGLEWIGVIWSGGNTDYNTPFTSRFTISRDNAKNSLYLQMNSLRAEDTAVYYCARALTYYDDEFAYWGPGTLVTVSA

SEQ ID NO: 14977 - protein, 107 aa, Artificial Sequence
  source: /note="Description of Artificial Sequence: Synthetic polypeptide"
EIVLTQSPATLSLSPGERATLSCRASQSIGTNIHWYQQKPGKAPKLLIYYASESISGIPDRFSGSGSGTDFTLTISRLEPEDFAVYYCQQNNNWPTTFGQGTKLELK

SEQ ID NO: 14978 - protein, 88 aa, Homo sapiens; identical to SEQ ID NO: 9694

SEQ ID NO: 14979 - protein, 88 aa, Homo sapiens; identical to SEQ ID NO: 9695

SEQ ID NO: 14980 - protein, 88 aa, Homo sapiens; identical to SEQ ID NO: 9696

SEQ ID NO: 14981 - protein, 220 aa, Artificial Sequence; identical to SEQ ID NO: 9759
  source: /note="Description of Artificial Sequence: Synthetic polypeptide"

SEQ ID NO: 14982 - protein, 126 aa, Artificial Sequence
  source: /note="Description of Artificial Sequence: Synthetic polypeptide"
EVQLVQSGAEVKKPGSSVKVSCKASGGTFSSYAIGWVRQAPGQGLEWMGGIIPIFGIANYAQKFQGRVTITADESTSSAYMELSSLRSEDTAVYYCAREEGPYCSSTSCYGAFDIWGQGTLVTVSS

SEQ ID NO: 14983 - protein, 126 aa, Artificial Sequence
  source: /note="Description of Artificial Sequence: Synthetic polypeptide"
EVQLVQSGAEVKKPGSSVKVSCKASGGTFSSYAISWVRQAPGQGLEWMGGIIPIFGTANYAQKFQGRVTITADESTSTAYMELSSLRSEDTAVYYCAREEGPYCSSTSCYAAFDIWGQGTLVTVSS

SEQ ID NO: 14984 - protein, 114 aa, Mus musculus
DVLMTQTPLSLPVSLGDHASISCRSSQSIVQSNGDTYLEWYLQKPGQSPKLLIYRISNRFSGVPDRFSGSGSGTDFTLKISRVEAEDLGVYYCFQGSHVPYTFGGGTKLEIKRA

SEQ ID NO: 14985 - protein, 109 aa, Mus musculus
NIVLTQSPKSMSMSIGERVTLSCKASENVGTYVSWYQQKAEQSPKLLIYGASNRHTGVPDRFTGSGSSTDFTLTISSVQAEDLADYHCGQSYSDPLTFGAGTKLELKRA

SEQ ID NO: 14986 - protein, 114 aa, Artificial Sequence
  source: /note="Description of Artificial Sequence: Synthetic polypeptide"
DVLMTQTPLSLPVSLGDHASISCRSSQSIVQSNGDTYLEWYLQKPGQSPKLLIYRISNRFSGVPDRFSGSGSGTDFTLKISRVEAEDLGVYYCFQGSHVPYTFGGGTKLEIKRT

SEQ ID NO: 14987 - protein, 114 aa, Homo sapiens
DIVMTQSPLSLPVTPGEPASISCRSSQSIVQSNGDTYLEWYLQKPGQSPQLLIYRVSNRFSGVPDRFSGSGSGTDFTLKISRVEAEDVGVYYCFQGSHVPYTFGQGTKLEIKRT

SEQ ID NO: 14988 - protein, 114 aa, Mus musculus
DVLMTQSPLSLPVSLGDHASISCRSSQSIVQSNGDTYLEWYLQKPGQSPKLLIYRVSNRFSGVPDRFSGSGSGTDFTLKISRVEAEDLGVYYCFQGSHVPYTFGGGTKLEIKRA

SEQ ID NO: 14989 - protein, 114 aa, Mus musculus
DVLMTQTPLSLPVSLGDQASISCRSSQTIVHSNGNTYLEWYLQKPGQSPKLLIYKVSNRFSGVPDRFSGSGSGTDFTLKISRVEAEDLGIYYCFQGSHVPYTFGGGTKLEIKRA

SEQ ID NO: 14990 - protein, 114 aa, Mus musculus
DVLMTQTPLSLPVSLGDQASISCRSSQTIVHSNGNTYLEWYLQKPGQSPKLLIYRVSYRFSGVPDRFSGSGSGTDFTLKISRLEAEDLGIYYCFQGSHVPYTFGGGTKLEIKRA

SEQ ID NO: 14991 - protein, 111 aa, Artificial Sequence
  source: /note="Description of Artificial Sequence: Synthetic polypeptide"
NIVLTQSPSSLAVSVGQRATISCRASESVESYGNSFIYWYQQKPGKAPKLLIYLASNLASGVPARFSGSGSRTDFTLTIDPVQADDAATYYCQQNNEDPYTFGGGTKLEIK

SEQ ID NO: 14992 - protein, 111 aa, Artificial Sequence
  source: /note="Description of Artificial Sequence: Synthetic polypeptide"
NIVLTQSPSSLAVSVGQRATISCRASESVESYGQSFIYWYQQKPGKAPKLLIYLASNLASGVPARFSGSGSRTDFTLTIDPVQADDAATYYCQQNNEDPYTFGGGTKLEIK

SEQ ID NO: 14993 - protein, 111 aa, Artificial Sequence
  source: /note="Description of Artificial Sequence: Synthetic polypeptide"
NIVLTQSPSSLSVSVGQRATISCRASESVESYGNSFIYWYQQKPGQAPKLLIYLASNLASGVPARFSGSGSRTDFTLTIDPVQAEDAATYYCQQNNEDPYTFGGGTKLEIK

SEQ ID NO: 14994 - protein, 111 aa, Artificial Sequence
  source: /note="Description of Artificial Sequence: Synthetic polypeptide"
NIVLTQSPSSLSVSVGQRATISCRASESVESYGQSFIYWYQQKPGQAPKLLIYLASNLASGVPARFSGSGSRTDFTLTIDPVQAEDAATYYCQQNNEDPYTFGGGTKLEIK

SEQ ID NO: 14995 - protein, 111 aa, Artificial Sequence
  source: /note="Description of Artificial Sequence: Synthetic polypeptide"
NIVLTQSPASLAVSPGQRATITCRASESVESYGNSFIYWYQQKPGQPPKLLIYLASNLASGVPARFSGSGSRTDFTLTINPVEADDTANYYCQQNNEDPYTFGGGTKLEIK

SEQ ID NO: 14996 - protein, 111 aa, Artificial Sequence
  source: /note="Description of Artificial Sequence: Synthetic polypeptide"
NIVLTQSPASLAVSLGQRATISCRASESVESYGNSFIYWYQQKPGQAPKLLIYLASNLASGVPARFSGSGSRTDFTLTIDPVEADDAATYYCQQNNEDPYTFGGGTKLEIK

SEQ ID NO: 14997 - protein, 108 aa, Artificial Sequence
  source: /note="Description of Artificial Sequence: Synthetic polypeptide"
DIQMTQSPSSLSASVGDRVTITCQASQDIIKYLNWYQQTPGKAPKLLIYEASNLQAGVPSRFSGSGSGTDYTFTISSLQPEDIATYYCQQYQSLPYTFGQGTKLQITR

SEQ ID NO: 14998 - protein, 113 aa, Artificial Sequence
  source: /note="Description of Artificial Sequence: Synthetic polypeptide"
DIQLTQSPSSLAVSAGENVTMSCKSSQSVLYSANHKNYLAWFQQKPGQSPKLLIYWASTRESGVPDRFTGSGSGTDFTLTISRVQVEDLAIYYCHQYLSSWTFGGGTKLEIKR

SEQ ID NO: 14999 - protein, 113 aa, Artificial Sequence
  source: /note="Description of Artificial Sequence: Synthetic polypeptide"
DIQLTQSPSSLSASVGDRVTMSCKSSQSVLYSANHKNYLAWYQQKPGKAPKLLIYWASTRESGVPSRFSGSGSGTDFTFTISSLQPEDIATYYCHQYLSSWTFGGGTKVQIKR

SEQ ID NO: 15000 - protein, 107 aa, Artificial Sequence
  source: /note="Description of Artificial Sequence: Synthetic polypeptide"
DIQLTQTTSSLSASLGDRVTISCRASQDISNYLNWYQQKPDGTVKLLIYYTSILHSGVPSRFSGSGSGTDYSLTISNLEQEDFATYFCQQGNTLPWTFGGGTKLEIK

SEQ ID NO: 15001 - protein, 108 aa, Artificial Sequence
  source: /note="Description of Artificial Sequence: Synthetic polypeptide"
  MOD_RES (54)..(54): Any amino acid
  MOD_RES (56)..(56): Any amino acid
EIVLTQSPGTLSLSPGERATLSCSVSSSISSTNLHWYQQKPGQAPRLLIYGTSXLXSGIPDRFSGSGSGTDFTLTISRLEPEDFAVYYCQQWSSYPYSFGQGTKLEIK

SEQ ID NO: 15002 - protein, 108 aa, Artificial Sequence
  source: /note="Description of Artificial Sequence: Synthetic polypeptide"
  MOD_RES (30)..(30): Any amino acid
  MOD_RES (90)..(91): Any amino acid
  MOD_RES (93)..(93): Any amino acid
DIQMTQSPSSLSASVGDRVTITCSVSSSVXSIYLHWYQQKPGKAPKLLIYSTSNLASGVPSRFSGSGSGTDFTLTISSLQPEDFATYYCXXYXGYPLTFGGGTKVEIK

SEQ ID NO: 15003 - protein, 108 aa, Homo sapiens; identical to SEQ ID NO: 6323

SEQ ID NO: 15004 - protein, 108 aa, Homo sapiens
DIQMTQSPSSLSASVGDRVTITCRASQDVSTAVAWYQQKPGKAPKLLIYSASFLYSGVPSRFSGSGSGTDFTLTISSLQPEDFATYYCQQSKTTPPTFGQGTKVEIKR

SEQ ID NO: 15005 - protein, 108 aa, Homo sapiens
DIQMTQSPSSLSASVGDRVTITCRASQDVSTAVAWYQQKPGKAPKLLIYSASFLYSGVPSRFSGSGSGTDFTLTISSLQPEDFATYYCQQSYMSPLTFGQGTKVEIKR

SEQ ID NO: 15006 - protein, 128 aa, Artificial Sequence
  source: /note="Description of Artificial Sequence: Synthetic polypeptide"
MMSSAQFLGLLLLCFQGTRCDIQMTQITSSLSASLGDRVTISCSASQDISNYLNWYQQKPDGTVKLLIYYTSSLHSEVPSRFSGSGSGTDYSLTISNLEPEDIATYYCQQYINLPLTFGAGTKLELKR

SEQ ID NO: 15007 - protein, 132 aa, Artificial Sequence
  source: /note="Description of Artificial Sequence: Synthetic polypeptide"
MEKDTLLLWVLLLWVPGSTGDIVLTQSPASLAVSLGQRATISCRASESVDNYGISFMNWFQQKPGQPPKLLIYAASNQGSGVPARFSGSGSGTDFSLNIHPMEEDDTAMYFCQQSKEVPWTFGGGTKLEIKR

SEQ ID NO: 15008 - protein, 129 aa, Artificial Sequence
  source: /note="Description of Artificial Sequence: Synthetic polypeptide"
MDFQVQIFSFLLMSASVIMSRGQIVLTQSPALMSAFPGEKVTMTCSASSSVSYMYWYQQKPRSSPKPWIYLTSNLASGVPTRFSGSGSGTSYSLTISSMEAEDAATYFCQQWSSNPRTFGGGTKLEIKR

SEQ ID NO: 15009 - protein, 108 aa, Artificial Sequence
  source: /note="Description of Artificial Sequence: Synthetic polypeptide"
DIQMTQITSSLSASLGDRVTISCSASQDISNYLNWYQQKPDGTVKLLIYYTSSLHSEVPSRFSGSGSGTDYSLTISNLEPEDIATYYCQQYINLPLTFGAGTKLELKR

SEQ ID NO: 15010 - protein, 112 aa, Artificial Sequence
  source: /note="Description of Artificial Sequence: Synthetic polypeptide"
DIVLTQSPASLAVSLGQRATISCRASESVDNYGISFMNWFQQKPGQPPKLLIYAASNQGSGVPARFSGSGSGTDFSLNIHPMEEDDTAMYFCQQSKEVPWTFGGGTKLEIKR

SEQ ID NO: 15011 - protein, 107 aa, Artificial Sequence
  source: /note="Description of Artificial Sequence: Synthetic polypeptide"
QIVLTQSPALMSAFPGEKVTMTCSASSSVSYMYWYQQKPRSSPKPWIYLTSNLASGVPTRFSGSGSGTSYSLTISSMEAEDAATYFCQQWSSNPRTFGGGTKLEIKR

SEQ ID NO: 15012 - protein, 111 aa, Artificial Sequence
  source: /note="Description of Artificial Sequence: Synthetic polypeptide"
DIVMTQSPDSLAVSLGERATINCRASESVDNYGISFMNWYQQKPGQPPKLLIYAASNQGSGVPDRFSGSGSGTDFTLTISSLQAEDVAVYYCQQSKEVPWTFGQGTKLEIK

SEQ ID NO: 15013 - protein, 119 aa, Artificial Sequence
  source: /note="Description of Artificial Sequence: Synthetic polypeptide"
EVQLVESGGGLVQPGGSLRLSCAASGFTFSNYWMNWVRQAPGKGLEWVAHIRLKSDNYATHYAESVRGRFTISRDDSKNSLYLQMNSLKTEDTAIYYCTGGSNYVFAFWGQGTLVTVSS

SEQ ID NO: 15014 - protein, 119 aa, Artificial Sequence
  source: /note="Description of Artificial Sequence: Synthetic polypeptide"
EVQLVESRGGLVQPGGSMRLSCAASGFTFSNYWMNWVRQAPGKGLEWVAHIRLKSDNYATHYAESVRGRFTISRDDSKSSVYLQMNSLKTEDTGIYYCTGGSNYVFAFWGQGTLVTVSS

SEQ ID NO: 15015 - protein, 111 aa, Artificial Sequence
  source: /note="Description of Artificial Sequence: Synthetic polypeptide"
DIVMTQSPDSLAVSLGERATINCRASESVDNYGISFMNWFQQKPGQPPKLLIYAASNQGSGVPDRFSGSGSGTDFTLTISSLQAEDVAVYFCQQSKEVPWTFGQGTKLEIK

SEQ ID NO: 15016 - protein, 111 aa, Artificial Sequence
  source: /note="Description of Artificial Sequence: Synthetic polypeptide"
DIVMTQSPDSLAVSLGERATINCRASESVDNYGISFMNWFQQKPGQPPKLLIYAASNQGSGVPDRFSGSGSGTDFTLTISPLQAEDVAVYFCQQSKEVPWTFGQGTKLEIK

SEQ ID NO: 15017 - protein, 111 aa, Artificial Sequence
  source: /note="Description of Artificial Sequence: Synthetic polypeptide"
DIVLTQSPDSLAVSLGERATINCRASESVDNYGISFMNWYQQKPGQPPKLLIYAASNQGSGVPDRFSGSGSGTDFTLTISPMQAEDVAMYYCQQSKEVPWTFGQGTKLEIK

SEQ ID NO: 15018 - protein, 111 aa, Artificial Sequence
  source: /note="Description of Artificial Sequence: Synthetic polypeptide"
DIVLTQSPDSLAVSLGERATINCRASESVDNYGISFMNWFQQKPGQPPKLLIYAASNQGSGVPDRFSGSGSGTDFTLTISPMQAEDVAMYFCQQSKEVPWTFGQGTKLEIK

SEQ ID NO: 15019 - protein, 107 aa, Artificial Sequence
  source: /note="Description of Artificial Sequence: Synthetic polypeptide"
DIVMTQSHKFMSTSVGDRVSITCKASQDVSTDVAWYQQKPGQSPKLLIYSASYRYTGVPDRFTGSGSGTDFTFTISSVQAEDLAVYYCQQHYSTPFTFGSGTKLEIK

SEQ ID NO: 15020 - protein, 95 aa, Artificial Sequence
  source: /note="Description of Artificial Sequence: Synthetic polypeptide"
DIQMTQSPSSLSASVGDRVTITCQASQDISNYLNWYQQKPGKAPKLLIYDASNLETGVPSRFSGSGSGTDFTFTISSLQPEDIATYYCQQYDNLP

SEQ ID NO: 15021 - protein, 107 aa, Homo sapiens
DIQMTQSPSSLSASVGDRVTITCQASQDISNYLNWYQQKPGKAPKLLIYDASNLETGVPSRFSGSGSGTDFTFTISSLQPEDIATYYCQQYDNLPYTFGQGTKLEIK

SEQ ID NO: 15022 - protein, 107 aa, Artificial Sequence
  source: /note="Description of Artificial Sequence: Synthetic polypeptide"
DIQMTQSPSSLSASVGDRVTITCKASQDVSTDVAWYQQKPGKAPKLLIYSASYRYTGVPSRFSGSGSGTDFTFTISSLQPEDIATYYCQQHYSTPFTFGQGTKLEIK

SEQ ID NO: 15023 - protein, 107 aa, Artificial Sequence
  source: /note="Description of Artificial Sequence: Synthetic polypeptide"
DIQMTQSPSSLSASVGDRVTITCKASQDVSTDVAWYQQKPGKAPKLLIYSASYRYTGVPSRFSGSGSGTDFTLTISSLQPEDIATYYCQQHYSTPFTFGQGTKLEIK

SEQ ID NO: 15024 - protein, 107 aa, Artificial Sequence
  source: /note="Description of Artificial Sequence: Synthetic polypeptide"
DIQMTQSPSSLSASVGDRVTITCKASQDVSTDVAWYQQKPGKSPKLLIYSASYRYTGVPSRFSGSGSGTDFTLTISSLQPEDIATYYCQQHYSTPFTFGQGTKLEIK

SEQ ID NO: 15025 - protein, 107 aa, Artificial Sequence
  source: /note="Description of Artificial Sequence: Synthetic polypeptide"
DIVMTQSPSSLSASVGDRVTITCKASQDVSTDVAWYQQKPGKSPKLLIYSASYRYTGVPSRFSGSGSGTDFTLTISSLQPEDIATYYCQQHYSTPFTFGQGTKLEIK

SEQ ID NO: 15026 - protein, 107 aa, Homo sapiens
DIQMTQSPSSLSASVGDRVTITCQASQDISNYLNWYQQKPGKAPKLLIYDASNLETGVPSRFSGSGSGTDFTFTISSLQPEDIATYYCQQYDNLPLTFGGGTKVEIK

SEQ ID NO: 15027 - protein, 107 aa, Artificial Sequence
  source: /note="Description of Artificial Sequence: Synthetic polypeptide"
DIQMTQSPSSLSASVGDRVTITCKASQSVSNDVAWYQQKPGKAPKLLIYYASNRYTGVPSRFSGSGSGTDFTFTISSLQPEDIATYYCQQDYSSPYTFGGGTKVEIK

SEQ ID NO: 15028 - protein, 107 aa, Artificial Sequence
  source: /note="Description of Artificial Sequence: Synthetic polypeptide"
DIQMTQSPSSLSASVGDRVTITCKASQSVSNDVAWYQQKPGKSPKLLIYYASNRYTGVPSRFSGSGSGTDFTFTISSLQPEDIATYFCQQDYSSPYTFGGGTKVEIK

SEQ ID NO: 15029 - protein, 107 aa, Artificial Sequence
  source: /note="Description of Artificial Sequence: Synthetic polypeptide"
EIVMTQSPATLSVSPGERATLSCRASQSVSSNLAWYQQKPGQAPRLLIYGASTRATGIPARFSGSGSGTEFTLTISSLQSEDFAVYYCQQYNNWPPTFGGGTKVEIK

SEQ ID NO: 15030 - protein, 107 aa, Artificial Sequence
  source: /note="Description of Artificial Sequence: Synthetic polypeptide"
EIVMTQSPATLSVSPGERATLSCKASQSVSNDVAWYQQKPGQAPRLLIYYASNRYTGIPARFSGSGSGTEFTLTISSLQSEDFAVYYCQQDYSSPYTFGGGTKVEIK

SEQ ID NO: 15031 - protein, 107 aa, Artificial Sequence
  source: /note="Description of Artificial Sequence: Synthetic polypeptide"
EIVMTQSPATLSVSPGERATLSCKASQSVSNDVAWYQQKPGQSPRLLIYYASNRYTGVPARFSGSGSGTEFTLTISSLQSEDFAVYFCQQDYSSPYTFGGGTKVEIK

SEQ ID NO: 15032 - protein, 107 aa, Artificial Sequence
  source: /note="Description of Artificial Sequence: Synthetic polypeptide"
SIVMTQSPKILLVSAGDRVTITCKASQSVSNDVAWYQQKPGQSPKLLIYYASNRYTGVPDRFTGSGYGTDFTFTISTVQAEDLAVYFCQQDYSSPYTFGGGTKLEIK

SEQ ID NO: 15033 - protein, 108 aa, Artificial Sequence
  source: /note="Description of Artificial Sequence: Synthetic polypeptide"
EIVLTQSPALMAASPGEKVTITCSVSSSINSINLHWYRQKSETSPKPWIYGTSNLASGVPVRFSGSGSGTSYSLTISSMEAEDAATYYCQQWSSYPLTFGAGTKLELK

SEQ ID NO: 15034 - protein, 111 aa, Artificial Sequence
  source: /note="Description of Artificial Sequence: Synthetic polypeptide"
DIVLTQSPATLSVSPGERATISCRASQRVSSSTYSYMHWYQQKPGQPPKLLIKYASNLESGVPARFSGSGSGTDFTLTISSVEPEDFATYYCQHSWEIPPTFGGGTKLEIK

SEQ ID NO: 15035 - protein, 111 aa, Artificial Sequence
  source: /note="Description of Artificial Sequence: Synthetic polypeptide"
  MOD_RES (24)..(24): Any amino acid
  MOD_RES (26)..(28): Any amino acid
  MOD_RES (30)..(36): Any amino acid
  MOD_RES (38)..(38): Any amino acid
  MOD_RES (54)..(54): Any amino acid
  MOD_RES (57)..(60): Any amino acid
  MOD_RES (93)..(93): Any amino acid
  MOD_RES (95)..(98): Any amino acid
  MOD_RES (100)..(101): Any amino acid
DIVLTQSPATLSVSPGERATISCXAXXXVXXXXXXXMXWYQQKPGQPPKLLIKXASXXXXGVPARFSGSGSGTDFTLTISSVEPEDFATYYCXHXXXXPXXFGGGTKLEIK

SEQ ID NO: 15036 - protein, 111 aa, Artificial Sequence
  source: /note="Description of Artificial Sequence: Synthetic polypeptide"
DIVLTQSPATLSVSPGERATISCRADQRVSSSTYSYMHWYQQKPGQPPKLLIKYASNLESGVPARFSGSGSGTDFTLTISSVEPEDFATYYCQHSWEIPPTFGGGTKLEIK

SEQ ID NO: 15037 - protein, 111 aa, Artificial Sequence
  source: /note="Description of Artificial Sequence: Synthetic polypeptide"
DIVLTQSPATLSVSPGERATISCRASERVSSSTYSYMHWYQQKPGQPPKLLIKYASNLESGVPARFSGSGSGTDFTLTISSVEPEDFATYYCQHSWEIPPTFGGGTKLEIK

SEQ ID NO: 15038 - protein, 111 aa, Artificial Sequence
  source: /note="Description of Artificial Sequence: Synthetic polypeptide"
DIVLTQSPATLSVSPGERATISCRADERVSSSTYSYMHWYQQKPGQPPKLLIKYASNLESGVPARFSGSGSGTDFTLTISSVEPEDFATYYCQHSWEIPPTFGGGTKLEIK

SEQ ID NO: 15039 - protein, 111 aa, Artificial Sequence
  source: /note="Description of Artificial Sequence: Synthetic polypeptide"
DIVLTQSPATLSVSPGERATISCRASQRVSSSWYSYMHWYQQKPGQPPKLLIKYASNLESGVPARFSGSGSGTDFTLTISSVEPEDFATYYCQHSWEIPPTFGGGTKLEIK

SEQ ID NO: 15040 - protein, 111 aa, Artificial Sequence
  source: /note="Description of Artificial Sequence: Synthetic polypeptide"
DIVLTQSPATLSVSPGERATISCRADERVSSSWYSYMHWYQQKPGQPPKLLIKYASNLESGVPARFSGSGSGTDFTLTISSVEPEDFATYYCQHSWEIPPTFGGGTKLEIK

SEQ ID NO: 15041 - protein, 124 aa, Artificial Sequence
  source: /note="Description of Artificial Sequence: Synthetic polypeptide"
QVQLQQSGAELVRPGSSVKISCKASGYAFSSYWMNWVKQRPGQGLEWIGQIWPGDGDTNYNGKFKGKATLTADESSSTAYMQLSSLASEDSAVYFCARRETTTVGRYYYAMDYWGQGTTVTVSS

SEQ ID NO: 15042 - protein, 111 aa, Rattus sp.
QAVVTQANSVSTSLGSTVKLSCTLSSGNIENNYVHWYQLYEGRSPTTMIYDDDKRPDGVPDRFSGSIDRSSNSAFLTIHNVAIEDEAIYFCHSYVSSFNVFGGGTKLTVLR

SEQ ID NO: 15043 - protein, 110 aa, Artificial Sequence
  source: /note="Description of Artificial Sequence: Synthetic polypeptide"
DFMLTQPHSVSESPGKTVIISCTLSSGNIENNYVHWYQQRPGRAPTTVIFDDDKRPDGVPDRFSGSIDRSSNSASLTISGLQTEDEADYYCHSYVSSFNVFGGGTKLTVL

SEQ ID NO: 15044 - protein, 105 aa, Artificial Sequence
  source: /note="Description of Artificial Sequence: Synthetic polypeptide"
IQLTQSPAIMSASPGEKVTMTCRASSSVSYMNWYQQKSGTSPKRWIYDTSKVASGVPYRFSGSGSGTSYSLTISSMEAEDAATYYCQQWSSNPLTFGAGTKLELK

SEQ ID NO: 15045 - protein, 107 aa, Mus sp.
DIQLTQSPAIMSASPGEKVTMTCSASSRVSYIHWYQQKSGTSPKRWIYGTSTLASGVPARFSGSGSGTSYSLTISSMEAEDAATYYCQQWSYNPPTFGAGTKLELKR

SEQ ID NO: 15046 - protein, 121 aa, Mus sp.
EVRLVESGGGLVQGPGSLRLSCAASGFALTDYYMSWVRQSPGKTLEWLGFIANKANGHTTDYSPSVKGRFTISRDNSQTILYLQMNTLRTEDSATYYCARDMGIRWNFDVWGQGTTVTVSS

SEQ ID NO: 15047 - protein, 107 aa, Artificial Sequence
  source: /note="Description of Artificial Sequence: Synthetic polypeptide"
DIQLTQSPSSLSASVGDRVTITCQASQDIIKYLNWYQQKPGKAPKLLIYEASNLQAGVPSRFSGSGSGTDFTFTISSLQPEDIATYYCQQYQSLPYTFGQGTKVEIK

SEQ ID NO: 15048 - protein, 114 aa, Artificial Sequence
  source: /note="Description of Artificial Sequence: Synthetic polypeptide"
DILMTQSPSSLTVSAGEKVTMSCKSSQSLLASGNQNNYLAWHQQKPGRSPKMLIIWASTRVSGVPDRFIGSGSGTDFTLTINSVQAEDLAVYYCQQSYSAPLTFGAGTKLELKR

SEQ ID NO: 15049 - protein, 109 aa, Artificial Sequence
  source: /note="Description of Artificial Sequence: Synthetic polypeptide"
DIVMSQSPSSLAVSVGEKITMSCKSSQSLLYSSNQKNYLAWYQQKPGQSPKLLIYWASTRKSGVPDRFTGSGSGTDFTLTISSVKAEDLAVYYCQQYYDYPFTFGSGTK

SEQ ID NO: 15050 - protein, 109 aa, Artificial Sequence
  source: /note="Description of Artificial Sequence: Synthetic polypeptide"
DIVMTQSPSSLSVSVGEKVIMSCKSSQSLFNSGHQKNYLAWYQQKPGQPPKLLIYGASTRESGVPDRFTGSGSGTEFTLTIGSVQAEDLAVYYCQNDHTYPLTFGAGTK

SEQ ID NO: 15051 - protein, 114 aa, Artificial Sequence; identical to SEQ ID NO: 11363
  source: /note="Description of Artificial Sequence: Synthetic polypeptide"

SEQ ID NO: 15052 - protein, 114 aa, Artificial Sequence
  source: /note="Description of Artificial Sequence: Synthetic polypeptide"
DIQMTQSPSSLSASVGDRVTITCKSSQSLLASGNQNNYLAWHQQKPGKAPKMLIIWASTRVSGVPSRFSGSGSGTDFTLTISSLQPEDFATYYCQQSYSRPYTFGQGTKVEIKR

SEQ ID NO: 15053 - protein, 114 aa, Artificial Sequence
  source: /note="Description of Artificial Sequence: Synthetic polypeptide"
DIQMTQSPSSLSASVGDRVTITCKSSQSLLASGNQNNYLAWHQQKPGKAPKMLIIWASTRVSGVPSRFSGSGSGTDFTLTISSLQPEDFATYYCAQSYSHPFSFGQGTKVEIKR

SEQ ID NO: 15054 - protein, 114 aa, Artificial Sequence
  source: /note="Description of Artificial Sequence: Synthetic polypeptide"
DIQMTQSPSSLSASVGDRVTITCKSSQSLLASGNQNNYLAWHQQKPGKAPKMLIIWASTRVSGVPSRFSGSGSGTDFTLTISSLQPEDFATYYCQQSYSRPFTFGQGTKVEIKR

SEQ ID NO: 15055 - protein, 114 aa, Artificial Sequence
  source: /note="Description of Artificial Sequence: Synthetic polypeptide"
DIQMTQSPSSLSASVGDRVTITCKSSQSLLAWGNQNNYLAWYQQKPGKAPKMLIIWASTRVSGVPSRFSGSGSGTDFTLTISSLQPEDFATYYCQQSYSRPYTFGQGTKVEIKR

SEQ ID NO: 15056 - protein, 114 aa, Artificial Sequence
  source: /note="Description of Artificial Sequence: Synthetic polypeptide"
DIQMTQSPSSLSASVGDRVTITCKSSQSLLASGNQNNYLAWYQQKPGKAPKMLIIWASTRVSGVPSRFSGSGSGTDFTLTISSLQPEDFATYYCQQSYSRPYTFGQGTKVEIKR

SEQ ID NO: 15057 - protein, 114 aa, Artificial Sequence
  source: /note="Description of Artificial Sequence: Synthetic polypeptide"
DIVMTQSPDSLAVSLGERATINCKSSQSLLASGNQNNYLAWHQQKPGQPPKMLIIWASTRVSGVPDRFSGSGSGTDFTLTISSLQAEDVAVYYCQQSYSAPLTFGGGTKVEIKR

SEQ ID NO: 15058 - protein, 114 aa, Artificial Sequence
  source: /note="Description of Artificial Sequence: Synthetic polypeptide"
DIQMTQSPSSLSASVGDRVTITCKSSQSLLASGNQNNYLAWHQQKPGKAPKMLIIWASTRVSGVPSRFSGSGSGTDFTLTISSLQPEDFATYYCQQSYSAPLTFGQGTKVEIKR

SEQ ID NO: 15059 - protein, 114 aa, Mus musculus
DIMMSQSPSSLTVSVGEKVTVSCKSSQSLLYTSSQKNYLAWYQQKPGQSPKLLIYWASTRESGVPDRFTGSGSGTDFTLTITSVKADDLAVYYCQQYYAYPWTFGGGTKLEIKR

SEQ ID NO: 15060 - protein, 119 aa, Artificial Sequence
  source: /note="Description of Artificial Sequence: Synthetic polypeptide"
EVQLVESGGGLVQPGGSLRLSCAASGYTFTSYWLHWVRQAPGKGLEWVGMIDPSNSDTRFNPNFKDRFTISADTSKNTAYLQMNSLRAEDTAVYYCARYGSYVSPLDYWGQGTLVTVSS

SEQ ID NO: 15061 - protein, 108 aa, Artificial Sequence
  source: /note="Description of Artificial Sequence: Synthetic polypeptide"
QSALTQDPAVSVALGQTVRITCRGDSLRNYYASWYQQKPGQAPVLVIYGKNNRPSGIPDRFSGSFSGNTASLTITGAQAEDEADYYCNSRDSSANQMFGGGTKVTVLG

SEQ ID NO: 15062 - protein, 108 aa, Artificial Sequence
  source: /note="Description of Artificial Sequence: Synthetic polypeptide"
DIVMTQSPSSLSASIGDRVTITCRASHSISSYVNWYQKKPGKAPNLLIYAASYLPRGVPSRFSGSGLGTDFTLTISNLQPEDFATYYCQESYSTPYSFGQGTKVDIKR

SEQ ID NO: 15063 - protein, 108 aa, Artificial Sequence
  source: /note="Description of Artificial Sequence: Synthetic polypeptide"
EIVLTQSPSTLSASIGDRVTITCRASQGISSYLAWYQQKPGKAPKLLIYGASSLQSGVPSRFSGRGSGADFTLTISSLQPEDFATYYCQQLISYPLTFGGGTKVEIKR

SEQ ID NO: 15064 - protein, 111 aa, Artificial Sequence
  source: /note="Description of Artificial Sequence: Synthetic polypeptide"
QSVLTQPASVSGSPGQSITISCTGTSSDVGGYNYVSWYQQHPGKAPKLMIYDVSNRPSGVSNRFSGSKSGNTASLTISGLQAEDEADYYCSSYTSSSTLLFGGGTKLTVLG

SEQ ID NO: 15065 - protein, 111 aa, Artificial Sequence
  source: /note="Description of Artificial Sequence: Synthetic polypeptide"
QSVLTQPPSASGTPGQRVTLFCSGSSSNIASNSVKWYQQPPQRAPKLLMFSDDQRPSGVPVRFSASKSGTSASLAISGLQSEDEADYYCAAWDDSLNAEVFGGGTKVTVLG

SEQ ID NO: 15066 - protein, 108 aa, Artificial Sequence
  source: /note="Description of Artificial Sequence: Synthetic polypeptide"
SSELTQDPAVSVALGQTVRITCQGDSLRSYYTNWFQQKPGQAPLLVVYAKNKRPSGIPDRFSGSGSGDTASLTITGAQAEDEADYYCNSRDSSGNYLFAAGTKLTVLG

SEQ ID NO: 15067 - protein, 112 aa, Artificial Sequence
  source: /note="Description of Artificial Sequence: Synthetic polypeptide"
QSVLTQPPSVSAAPGQKVTISCTGSSSNIGAGYDVHWYQQLPGTAPKLLIYGNSNRPSGVPDRFSGSKSGTSASLAISGLQSEDEADYYCAAWDDILNGEIFGGGTKVTVLG

SEQ ID NO: 15068 - protein, 107 aa, Homo sapiens; identical to SEQ ID NO: 10657

SEQ ID NO: 15069 - protein, 107 aa, Homo sapiens
DIQMTQSPSSVSASVGDRVTITCRASQGISSWLAWYQHKPGKAPKLLIYAASSLQSGVPSRFSGSGSGTDFTLTISSLQPEDFATYYCQEASSFTWTFGQGTKVEIK

SEQ ID NO: 15070 - protein, 106 aa, Homo sapiens
DIQMTQSPSSVSASVGDRVTITCRASQGISSWLAWYQHKPGKAPKLLIYAASSLQSGVPSRFSGSGSGTDFTLTISSLQPEDFATYYCQQANSFPTFGQGTRLEIK

SEQ ID NO: 15071 - protein, 108 aa, Homo sapiens
AIQLTQSPSSLSASVGDRVTITCRASQGISSALAWYQQKPGKAPKLLIYDASSLESGVPSRFSGSGSGTDFTLTISSLQPEDFATYYCQQFNSYPMYTFGQGTKLEIK

SEQ ID NO: 15072 - protein, 108 aa, Homo sapiens
AIQLTQSPSSLSASVGDRVTITCRASQGLSSALAWYRQKPGKAPKLLIYDASSLESGVPSRFSGSGSGTDFTLTISSLQPEDFATYYCQQFTSYPQITFGQGTRLEIK

SEQ ID NO: 15073 - protein, 107 aa, Homo sapiens
DIQMTQSPSSVSASVGDRVTITCRASQGISNWLAWFQHKPGKAPKLLIYAASSLLSGVPSRFSGSGSGTDFTLTISSLQPEDFATYYCQQANSFPITFGQGTRLEIK

SEQ ID NO: 15074 - protein, 107 aa, Homo sapiens
AIQLTQSPSSLSASVGDRVTITCRASQGISSALAWYQQKPGKAPNLLIYAASSLESGVPSRFSGSGSGTDFTLTISSLQPEDFATYYCQQFNSYPLTFGGGTKVEIK

SEQ ID NO: 15075 - protein, 107 aa, Homo sapiens
DIQMTQSPSSLSASVGDRVTITCRASQGISNWLAWYQQKPEKAPKSLIYAASSLQSGVPSRFSGSGSGTDFTLTISSLQPEDFATYYCHQYKSYPWTFGQGTKVEIK

SEQ ID NO: 15076 - protein, 108 aa, Homo sapiens
EIVLTQSPGTLSLSPGERATLSCRASQSVSSSYLAWYQQKPGQAPRLLIYGVFSRATGIPDRFSGSGSGTDFTLTISRLEPEDFAVYYCQQYGSSPYTFGQGTKLEIK

SEQ ID NO: 15077 - protein, 107 aa, Homo sapiens
DIQMTQSPSSLSASVGDRVTITCRASQGISSWLAWYQQKPEKAPKSLIYAASSLQSGVPSRFSGGGSGTDFTLTISSLQPEDFATYYCQQYNSFPPTFGQGTKVEIK

SEQ ID NO: 15078 - protein, 107 aa, Homo sapiens
DIQMTQSPSSVSASVGDRVTITCRASQGISSWLAWYQHKPGKAPKLLIYAASSLQSGVPSRFSGSGSGTDFTLTISSLQPEDFATYYCQEANSFTWTFGQGTKVEIK

SEQ ID NO: 15079 - protein, 107 aa, Homo sapiens
DIQMTQSPSSVSASVGDRVTITCRASQGISSWLAWYQHKPGKAPKLLIYAASSLQSGVPSRFSGSGSGTDFTLTISSLQPEDFATYYCQQTNSFTWTFGQGTKVEIK

SEQ ID NO: 15080 - protein, 107 aa, Homo sapiens
EIVLTQSPATLSLSPGERATLSCRASQSVSSYLAWYQQKPGQAPRLLIYDASNRATGIPARFSGSGSGTDFTLTISSLEPEDFAVYYCQQRSNWPFTFGPGTKVDIK

SEQ ID NO: 15081 - protein, 107 aa, Homo sapiens
DIQMTQSPSSVSASVGDRVTITCRASQGISSWLAWYQHKPGKAPKLLIYAASSLQSGVPSRFSGSGSGTDFTLTISSLQPEDFATYYCQQANSFPITFGQGTRLEIK

SEQ ID NO: 15082 - protein, 107 aa, Homo sapiens
DIQMTQSPSSVSASVGDRVTITCRASQGISSWLAWYQHKPGKAPKLLIYAASSLQSGVPSRFSGSGSGTDFTLTISSLQPEDFATYYCQQANGFPITFGQGTRLEIK

SEQ ID NO: 15083 - protein, 107 aa, Homo sapiens
AIQLTQSPSSLSASVGDRVTITCRASQGISSALAWYQQKPGKAPKLLIYDASSLESGVPSRFSGSGSGTDFTLTISSLQPEDFATYYCQQFNSYPRTFGQGTKVEIK

SEQ ID NO: 15084 - protein, 107 aa, Homo sapiens
AIQLTQSPSSLSASVGDRVTITCRASQGISSALAWYQQKPGKAPKLLIYVASSLESGVPSRFSGSGSGTDFTLTITSLQPEDFATYYCQQFNSYPITFGQGTRLEIK

SEQ ID NO: 15085 - protein, 111 aa, Artificial Sequence
  source: /note="Description of Artificial Sequence: Synthetic polypeptide"
QSALTQPPSVSGSPGQSVTISCAGTSSDVGYGNYVSWYQQPPGTAPKLLIFAVSYRASGVPDRFSGSKSGNTASLTISGLQAEDEADYYCASYRSSNNAAVFGGGTKLTVL

SEQ ID NO: 15086 - protein, 111 aa, Artificial Sequence
  source: /note="Description of Artificial Sequence: Synthetic polypeptide"
QSALTQPRSVSGSPGQSVTISCAGTSSDVGYGNYVSWYQQHPGTAPKLMIFAVSYRASGIPDRFSGSKSGNTAFLTISGLQAEDEADYYCASYRSSNNAAVFGGGTKLTVL

SEQ ID NO: 15087 - protein, 111 aa, Artificial Sequence
  source: /note="Description of Artificial Sequence: Synthetic polypeptide"
QSVLTQPPSVSGSPGQTVTISCAGTSSDVGYGNYVSWYQQLPGTAPKLMIFAVSYRASGIPDRFSGSKSGNTASLTISGLQSEDEADYYCASYRSSNNAAVFGGGTKLTVL

SEQ ID NO: 15088 - protein, 111 aa, Artificial Sequence
  source: /note="Description of Artificial Sequence: Synthetic polypeptide"
QSVLTQPPSVSGSPGQTVTISCAGTSSDVGYGNYVSWYQQPPGTAPKLMIFAVSYRASGIPDRFSGSKSGNTAFLTISGLQSEDEADYYCASYRSSNNAAVFGGGTKLTVL

SEQ ID NO: 15089 - protein, 113 aa, Artificial Sequence
  source: /note="Description of Artificial Sequence: Synthetic polypeptide"
DIVMTQSPDSLAASLGERVTINCKSSQSVLFSSNQKNYLAWYQQRPGQSPKLLIYWASIRESGVPDRFSGSGSGTDFTLTISSLQAEDVAVYYCQQGYSFPYSFGSGTRLEIK

SEQ ID NO: 15090 - protein, 113 aa, Artificial Sequence
  source: /note="Description of Artificial Sequence: Synthetic polypeptide"
DIVMTQSPDSLTASLGERVTINCKSSQSVLFSSNQKNYLAWYQQKPGQSPKLLIYWASIRESGVPDRFSGSGSGTDFTLTISSLQPEDVAVYYCQQGYSFPYSFGQGTRLEIR

SEQ ID NO: 15091 - protein, 113 aa, Artificial Sequence
  source: /note="Description of Artificial Sequence: Synthetic polypeptide"
DIVMTQSPDSLAVSEGERVTINCKSSQSVLFSSNQKNYLAWYQQKPGQSPRLLIYWASIRESGVPDRFSGSGSATDFTLTISSLQAEDVAVYYCQQGYSFPYSFGQGTRLEIR

SEQ ID NO: 15092 - protein, 113 aa, Artificial Sequence
  source: /note="Description of Artificial Sequence: Synthetic polypeptide"
DIVMTQSPTSVAVSLGERATINCKSSQSVLFSSNQKNYLAWYQQKPGQPPRLLIYWASIRESGVPDRFSGSGSGTDFTLTISSLQPEDVAVYYCQQGYSFPYSFGQGTRLEIR

SEQ ID NO: 15093 - protein, 113 aa, Artificial Sequence
  source: /note="Description of Artificial Sequence: Synthetic polypeptide"
DIVMTQSPDSLAVSLGEKVTINCKSSQSVLFSSNQKNYLAWYQQRPGQPPKLLIYWASIRESGVPDRFSGSGSATDFTLTISSLQPEDVAVYYCQQGYSFPYSFGQGTRLEIK

SEQ ID NO: 15094 - protein, 113 aa, Artificial Sequence
  source: /note="Description of Artificial Sequence: Synthetic polypeptide"
DIVMTQTPDSLAVSAGERVTINCKSSQSVLFSSNQKNYLAWYQQKPGQSPKLLIYWASIRESGVPDRFSGSGSGTDFTLTISSLQPEDVTVYYCQQGYSFPYSFGQGTRLEIK

SEQ ID NO: 15095 - protein, 113 aa, Artificial Sequence
  source: /note="Description of Artificial Sequence: Synthetic polypeptide"
DIVMTQTPTSLAPSAGERATINCKSSQSVLFSSNQKNYLAWYQQKPGQPPKLLIYWASIRESGVPDRFSGSGSATDFTLTISSLQPEDVAVYYCQQGYSFPYSFGSGTRLEIK

SEQ ID NO: 15096 - protein, 113 aa, Artificial Sequence
  source: /note="Description of Artificial Sequence: Synthetic polypeptide"
EIVMTQSPSSVTASAGEKVTINCKSSQSVLWRSNQKNYLAWYQQRLGQSPRLLISWASIRESGVPDRFSGSGSTTDFTLTISSFQPEDAAVYYCQQGYSFPYTFGSGTRLEIK

SEQ ID NO: 15097 - protein, 113 aa, Artificial Sequence
  source: /note="Description of Artificial Sequence: Synthetic polypeptide"
DIVMTQTPSSVTAAVGEKVAINCKSSQSVLYNPNQKSYLAWYQQRPGQSPRLLIYWASTRESGVPDRFSGSGSTTDFALTISSFQPEDAAVYYCQQGYSFPYSFGSGTRLEIR

SEQ ID NO: 15098 - protein, 113 aa, Artificial Sequence
  source: /note="Description of Artificial Sequence: Synthetic polypeptide"
DVVMTQSPSSVTASVGEKVTINCKSSQSVLYTSNHKNYLAWYQQRLGQSPRLLIYWASTRESGVPDRFSGSGSTTDFTLTISSFQPEDAAVYYCQQGWSFPYSFGSGTRLEIK

SEQ ID NO: 15099 - protein, 113 aa, Artificial Sequence
  source: /note="Description of Artificial Sequence: Synthetic polypeptide"
DIVMTQTPSSVTASAGEKVTINCKSSQSVLYNSNQKNYLAWYQQRLGQSPRLLIYWASTRESGVPDRFSGSGSTTDFTLTISSFQPEDAAVYYCQQGWSFPYTFGSGTRLEIK

SEQ ID NO: 15100 - protein, 113 aa, Artificial Sequence
  source: /note="Description of Artificial Sequence: Synthetic polypeptide"
DIQLTQSPSSVTASAGEKVTINCKSSQSVLYGSNQKNYLAWYQQRLGQSPRLLIYWASTRESGVPDRFSGSGSTTDFTLTISSFQPEDAAVYYCQQGWSFPYTFGSGTRLEIK

SEQ ID NO: 15101 - protein, 113 aa, Artificial Sequence
  source: /note="Description of Artificial Sequence: Synthetic polypeptide"
DIQLTQSPSSVTVSVGEKVTINCKSSQSVLYNSNQKNYLAWYQQRLGQSPRLLIYWASTRESGVPDRFSGSGSTTDFTLTISSFQPEDAAVYYCQQGWSFPYTFGSGTRLEIK

SEQ ID NO: 15102 - protein, 113 aa, Artificial Sequence
  source: /note="Description of Artificial Sequence: Synthetic polypeptide"
DIQMTQSPSSVTASAGEKVTINCKSSQSVLYNSNQKNYLAWYQQRLGQSPRLLIYWASTRESGVPDRFSGSGSTTDFTLTISSFQPEDAAVYYCQQGWSFPYTFGSGTRLEIK

SEQ ID NO: 15103 - protein, 113 aa, Artificial Sequence
  source: /note="Description of Artificial Sequence: Synthetic polypeptide"
DIVMTQTPASVTASAGEKVTINCKSSQSVLFSSNQKNYLAWYQQRVGQSPRLLIYWASTRESGVPDRFSGSGSTTDFTLTISNFQPEDAAVYYCQQGYSFPYSFGSGTRLEIR

SEQ ID NO: 15104 - protein, 113 aa, Artificial Sequence
  source: /note="Description of Artificial Sequence: Synthetic polypeptide"
DVVMTQSPSSVTASAGEKVTINCKSSQSVLWSSNQKNYLAWYQQRVGQSPRLLIYWASTRESGVPDRFSGSGSTTDFTLTISNFQPEDAAVYYCQQGYSFPYSFGSGTRLEIR

SEQ ID NO: 15105 - protein, 111 aa, Artificial Sequence
  source: /note="Description of Artificial Sequence: Synthetic polypeptide"
QSVLTQPPSVSGSPGKTVTISCAGTSSDVGYGNYVSWYQQLPGTAPKLLIFAVSYRASGIPDRFSGSKSGNTAFLTISGLQSEDEADYYCASYRSSNNAAVFGGGTHLTVL

SEQ ID NO: 15106 - protein, 111 aa, Artificial Sequence
  source: /note="Description of Artificial Sequence: Synthetic polypeptide"
QSVLTQPPSVSGTLGKTLTISCAGTSTDVGYGNYVSWYQQLPGTAPKLLIFAVSYRASGIPDRFSGSKSGNTAFLTISGLQSEDEADYYCASYRSSNNAAVFGGGTHLTVL

SEQ ID NO: 15107 - protein, 111 aa, Artificial Sequence
  source: /note="Description of Artificial Sequence: Synthetic polypeptide"
QSALTQPPSVSGTLGKTLTISCAGTSTDVGYGNYVSWYQQLPGTAPKLLIFAVSYRASGIPDRFSGSKSGNTAFLTISGLQSEDEADYYCASYRSSNNAAVFGGGTHLTVL

SEQ ID NO: 15108 - protein, 111 aa, Artificial Sequence
  source: /note="Description of Artificial Sequence: Synthetic polypeptide"
LPVLTQPPSVSGTLGKTLTISCAGTSSDVGYGNYVSWYQQLPGTAPKLLIYAVSYRASGIPDRFSGSKSGNTASLSISGLQSEDEADYYCASYRSSNKNAVFGGGTHLTVL

SEQ ID NO: 15109 - protein, 111 aa, Artificial Sequence
  source: /note="Description of Artificial Sequence: Synthetic polypeptide"
QSALTQPPSVSGSPGKTVTISCAGTSSDVGYGNYVSWYQKLPGTAPKLLIYAVSYRASGIPDRFSGSRSGNTASLTISGLQSEDEADYYCASYRITNRHSVFGGGTHLTVL

SEQ ID NO: 15110 - protein, 111 aa, Artificial Sequence
  source: /note="Description of Artificial Sequence: Synthetic polypeptide"
QSALTQPPSVSGTLGKTVTISCAGTSSDVGYGNYVSWYQKLPGTAPKLLIYAVTYRASGIPDRFSGSKSGNTASLTISGLQSEDEADYYCASYRRSTNVGVFGGGTHLTVL

SEQ ID NO: 15111 - protein, 111 aa, Artificial Sequence
  source: /note="Description of Artificial Sequence: Synthetic polypeptide"
QAVLTQPPSVSGTLGKTVTISCAGTSSDVGYGNYVSWYQKLPGTAPKLLIYAVSYRASGIPDRFSGSKSGNTASLTISGLQSEDEADYHCASYRTSNNVAVFGGGTKLTVL

SEQ ID NO: 15112 - protein, 112 aa, Mus musculus
DIVLTQSPDSLAVSLGERATINCKSSESVDSYANSFMHWYQQKPGQPPKLLIYRASTRESGVPDRFSGSGSRTDFTLTISSLQAEDVAVYYCQQSKEDPLTFGGGTKVEIKR

SEQ ID NO: 15113 - protein, 112 aa, Mus musculus
DIVMTQSPDSLAVSLGERATINCKSSESVDSYANSFMHWYQQKPGQPPKLLIYRASTRESGVPDRFSGSGSGTDFTLTISSLQAEDVAVYYCQQSKEDPLTFGGGTKVEIKR

SEQ ID NO: 15114 - protein, 112 aa, Mus musculus
DIVMTQSPDSLAVSLGERATINCKSSESVDSYANSFLHWYQQKPGQPPKLLIYRASTRESGVPDRFSGSGSGTDFTLTISSLQAEDVAVYYCQQSKEDPLTFGGGTKVEIKR

SEQ ID NO: 15115 - protein, 112 aa, Mus musculus
DIVLTQSPASLAVSLGQRATISCRASESVDSYANSFMHWYQQKPGQPPKLLIYRASNLESGIPARFSGSGSRTDFTLTINPVEADDVATYYCQQSKEDPLTFGSGTKLEMKR

SEQ ID NO: 15116 - protein, 219 aa, Homo sapiens
ELQMTQSPSLLSASTGDRVTISCRASQSISSYLNWYQQKPGKAPKLLIYTRSSLQSGVPSRFSGSGSGTDFTLTISSLQPEDFATYYCQQSYSTPHTFGQGTKLEIKRTVAAPSVFIFPPSDEQLKSGTASVVCLLNNFYPREAKVQWKVDNALQSGNSQESVTEQDSKDSTYSLSSTLTLSKADYEKHKVYACEVTHQGLSLPVTKSFNRGRVLVLDN

SEQ ID NO: 15117 - protein, 109 aa, Homo sapiens
DIELTQPPSVSVAPGQTARISCSGDSIGNKYVHWYQQKPGQAPVLVIYADSDRPSGIPERFSGSNSGNTATLTISGTQAEDEADYYCQAYDSSMLRVFGGGTKLTVLGQ

SEQ ID NO: 15118 - protein, 110 aa, Homo sapiens
DIELTQPPSVSVAPGQTARISCSGDSIGNKYVHWYQQKPGQAPVLVIYADSDRPSGIPERFSGSNSGNTATLTISGTQAEDEADYYCQSYANYHDSWVFGGGTKLTVLGQ

SEQ ID NO: 15119 - protein, 110 aa, Homo sapiens
DIELTQPPSVSVAPGQTARISCSGDSIGNKYVHWYQQKPGQAPVLVIYADSDRPSGIPERFSGSNSGNTATLTISGTQAEDEADYYCQSYASDYTSWVFGGGTKLTVLGQ

SEQ ID NO: 15120 - protein, 110 aa, Homo sapiens
DIELTQPPSVSVAPGQTARISCSGDSIGNKYVHWYQQKPGQAPVLVIYADSDRPSGIPERFSGSNSGNTATLTISGTQAEDEADYYCQSYAHYHDIWVFGGGTKLTVLGQ

SEQ ID NO: 15121 - protein, 109 aa, Homo sapiens
DIELTQPPSVSVAPGQTARISCSGDSIGNKYVHWYQQKPGQAPVLVIYADSDRPSGIPERFSGSNSGNTATLTISGTQAEDEADYYCQAHDSLYSRVFGGGTKLTVLGQ

SEQ ID NO: 15122 - protein, 114 aa, Homo sapiens
DIVMTQSPDSLAVSLGERATINCRSSQSILYGINNNFLGWYQQKPGQPPKLLIYWASTRESGVPDRFSGSGSGTDFTLTISSLQAEDVAVYYCQQYYNHPHTFGQGTKVEIKRT

SEQ ID NO: 15123 - protein, 113 aa, Homo sapiens
DIVMTQSPDSLAVSLGERATINCRSSQSILYGINNNFLGWYQQKPGQPPKLLIYWASTRESGVPDRFSGSGSGTDFTLTISSLQAEDVAVYYCQQYAFGWTFGQGTKVEIKRT

SEQ ID NO: 15124 - protein, 114 aa, Homo sapiens
DIVMTQSPDSLAVSLGERATINCRSSQSILYGINNNFLGWYQQKPGQPPKLLIYWASTRESGVPDRFSGSGSGTDFTLTISSLQAEDVAVYYCLQYSDEPWTFGQGTKVEIKRT

SEQ ID NO: 15125 - protein, 114 aa, Homo sapiens
DIVMTQSPDSLAVSLGERATINCRSSQSILYGINNNFLGWYQQKPGQPPKLLIYWASTRESGVPDRFSGSGSGTDFTLTISSLQAEDVAVYYCQQYAYEPNTFGQGTKVEIKRT

SEQ ID NO: 15126 - protein, 114 aa, Homo sapiens
DIVMTQSPDSLAVSLGERATINCRSSQSILYGINNNFLGWYQQKPGQPPKLLIYWASTRESGVPDRFSGSGSGTDFTLTISSLQAEDVAVYYCLQYAFSPWTFGQGTKVEIKRT

SEQ ID NO: 15127 - protein, 108 aa, Homo sapiens
DIELTQPPSVSVAPGQTARISCSGDNIGSYYVYWYQQKPGQAPVLVIYDDNDRPSGIPERFSGSNSGNTATLTISGTQAEDEADYYCQSYDFPSIVFGGGTKLTVLGQ

SEQ ID NO: 15128 - protein, 108 aa, Homo sapiens
DIELTQPPSVSVAPGQTARISCSGDNIGSYYVYWYQQKPGQAPVLVIYDDNDRPSGIPERFSGSNSGNTATLTISGTQAEDEADYYCQSYDSYIFVFGGGTKLTVLGQ

SEQ ID NO: 15129 - protein, 108 aa, Homo sapiens
DIELTQPPSVSVAPGQTARISCSGDNIGSYYVYWYQQKPGQAPVLVIYDDNDRPSGIPERFSGSNSGNTATLTISGTQAEDEADYYCSTYDAFTFVFGGGTKLTVLGQ

SEQ ID NO: 15130 - protein, 108 aa, Homo sapiens
DIELTQPPSVSVAPGQTARISCSGDNIGSYYVYWYQQKPGQAPVLVIYDDNDRPSGIPERFSGSNSGNTATLTISGTQAEDEADYYCQSYDKYVFVFGGGTKLTVLGQ

SEQ ID NO: 15131 - protein, 110 aa, Homo sapiens
DIELTQPPSVSVAPGQTARISCSGDSLRSYFVSWYQQKPGQAPVLVIYDDDDRPSGIPERFSGSNSGNTATLTISGTQAEDEADYYCASWDTLSDVEVFGGGTKLTVLGQ

SEQ ID NO: 15132 - protein, 110 aa, Homo sapiens
DIELTQPPSVSVAPGQTARISCSGDSLRSYFVSWYQQKPGQAPVLVIYDDDDRPSGIPERFSGSNSGNTATLTISGTQAEDEADYYCASWDPPSAFEVFGGGTKLTVLGQ

SEQ ID NO: 15133 - protein, 109 aa, Homo sapiens
DIELTQPPSVSVAPGQTARISCSGDSLRSYFVSWYQQKPGQAPVLVIYDDDDRPSGIPERFSGSNSGNTATLTISGTQAEDEADYYCASWDNDHFEVFGGGTKLTVLGQ

SEQ ID NO: 15134 - protein, 109 aa, Homo sapiens
DIELTQPPSVSVAPGQTARISCSGDKLGSYFVYWYQQKPGQAPVLVIYDDDNRPSGIPERFSGSNSGNTATLTISGTQAEDEADYYCQSFGISNFYVFGGGTKLTVLGQ

SEQ ID NO: 15135 - protein, 108 aa, Homo sapiens
DIELTQPPSVSVAPGQTARISCSGDKLGSYFVYWYQQKPGQAPVLVIYDDDNRPSGIPERFSGSNSGNTATLTISGTQAEDEADYYCGSWAYLGDVFGGGTKLTVLGQ

SEQ ID NO: 15136 - protein, 112 aa, Homo sapiens
DIVLTQPPSVSGAPGQRVTISCSGSSSNIGSNYVIWYQQLPGTAPKLLIYDDTNRPSGVPDRFSGSKSGTSASLAITGLQSEDEADYYCSTYDNYQAGWVFGGGTKLTVLGQ

SEQ ID NO: 15137 - protein, 108 aa, Artificial Sequence
  source: /note="Description of Artificial Sequence: Synthetic polypeptide"
EIVLTQSPGTLSLSPGERATLSCSVSSSISSTNLHWYQQKPGQAPRLLIYGTSYLASGIPDRFSGSGSGTDFTLTISRLEPEDFAVYYCQQWSSYPYSFGQGTKLEIK

SEQ ID NO: 15138 - protein, 108 aa, Artificial Sequence
  source: /note="Description of Artificial Sequence: Synthetic polypeptide"
EIVLTQSPGTLSLSPGERATLSCSVSSSISSTNLHWYQQKPGQAPRLLIYGTSRLRSGIPDRFSGSGSGTDFTLTISRLEPEDFAVYYCQQWSSYPYSFGQGTKLEIK

SEQ ID NO: 15139 - protein, 108 aa, Artificial Sequence
  source: /note="Description of Artificial Sequence: Synthetic polypeptide"
DIQMTQSPSSLSASVGDRVTITCSVSSSVSSIYLHWYQQKPGKAPKLLIYSTSNLASGVPSRFSGSGSGTDFTLTISSLQPEDFATYYCIQYSGYPLTFGGGTKVEIK

SEQ ID NO: 15140 - protein, 108 aa, Artificial Sequence [sequence omitted]

SEQ ID NO: 15141 - protein, 108 aa, Artificial Sequence
  source: /note="Description of Artificial Sequence: Synthetic polypeptide"
DIQMTQSPSSLSASVGDRVTITCSVSSSVRSIYLHWYQQKPGKAPKLLIYSTSNLASGVPSRFSGSGSGTDFTLTISSLQPEDFATYYCQVYRGYPLTFGGGTKVEIK

SEQ ID NO: 15142 - protein, 112 aa, Mus musculus
DIVMTQAAFSNPVTLGTSVSISCRSSKSLLHSNGITYLYWYLQKPGQSPQLLIYQMSNLASGVPDRFSSSGSGTDFTLRISRVEAEDVGVYYCAQNLELPYTFGGGTKLEIK

SEQ ID NO: 15143 - protein, 111 aa, Mus musculus
NIVLTQSPASLAVSLGQRATISCRASESVDSNGNSFIHWYQQKPGQPPKLLIYVASKLESGVPARFSGSGSRTDFTLTIDPVEAEDVATYYCQQNNEYPLTFGAGTKLELK

SEQ ID NO: 15144 - protein, 113 aa, Artificial Sequence
  source: /note="Description of Artificial Sequence: Synthetic polypeptide"
DILMTQSPSSLTASVGDRVTMTCKSSQSLLASGNQNNYLAWHQQKPGKAPKMLIIWASTRVSGVPDRFIGSGSGTDFTLTISSLQAEDVAVYYCQQSYSAPLTFGQGTKLEIK

SEQ ID NO: 15145 - protein, 113 aa, Artificial Sequence
  source: /note="Description of Artificial Sequence: Synthetic polypeptide"
DILMTQSPSSLSASVGDRVTITCKSSQSLLASGNQNNYLAWHQQKPGKAPKMLIIWASTRVSGVPDRFIGSGSGTDFTLTISSLQAEDVAVYYCQQSYSAPLTFGQGTKLEIK

SEQ ID NO: 15146 - protein, 113 aa, Artificial Sequence
  source: /note="Description of Artificial Sequence: Synthetic polypeptide"
DIQMTQSPSSLSASVGDRVTITCKSSQSLLASGNQNNYLAWHQQKPGKAPKMLIIWASTRVSGVPDRFIGSGSGTDFTLTISSLQAEDVAVYYCQQSYSAPLTFGQGTKLEIK

SEQ ID NO: 15147 - protein, 113 aa, Artificial Sequence
  source: /note="Description of Artificial Sequence: Synthetic polypeptide"
DIQMTQSPSSLSASVGDRVTITCKSSQSLLASGNQNNYLAWHQQKPGKAPKMLIIWASTRVSGVPDRFSGSGSGTDFTLTISSLQAEDVAVYYCQQSYSAPLTFGQGTKLEIK

SEQ ID NO: 15148 - protein, 113 aa, Artificial Sequence
  source: /note="Description of Artificial Sequence: Synthetic polypeptide"
DIMMSQSPSSLTVSVGEKVTVSCKSSQSLLYTSSQKNYLAWYQQKPGQSPKLLIYWASTRESGVPDRFTGSGSGTDFTLTITSVKADDLAVYYCQQYYAYPWTFGGGTKLEIK

SEQ ID NO: 15149 - protein, 107 aa, Homo sapiens; identical to SEQ ID NO: 14932

SEQ ID NO: 15150 - protein, 107 aa, Artificial Sequence [sequence omitted]

SEQ ID NO: 15151 - protein, 113 aa, Artificial Sequence
  source: /note="Description of Artificial Sequence: Synthetic polypeptide"
DILQTQTPLSLPVSLGDQASISCRSSQSIVHSNGNTYLEWYLQKPGQSPKLLIYKVSNRFSGVPDRFSGTGSGTDFTVRISRVEAEDLGLYYCFQGSRVPYTFGGGTKLEIKR

SEQ ID NO: 15152 - protein, 113 aa, Artificial Sequence
  source: /note="Description of Artificial Sequence: Synthetic polypeptide"
DIQLTQSPGTLSLSPGERATLSCRSSQSIVHSNGNTYLEWYLQKPGQAPRLLIYKVSNRFSGVPDRFSGSGSGTDFTLTISRLEPEDFAVYYCFQGSRVPYTFGGGTKVEIKR

SEQ ID NO: 15153 - protein, 106 aa, Mus musculus
NIVMTQSPKSMSMSVGERVTLNCKASEDVNTYVSWYQQQPEQSPKLLIYGASNRYTGVPDRFTGGGSTTDFTLTISSVQAEDLADYFCGQSFSYPTFGTGTKLEIK

SEQ ID NO: 15154 - protein, 106 aa, Mus musculus
NIVMTQSPKSMSMSVGERVTLSCKASEDVVTYVSWYQQKPDQSPKLLIYGASNRYTGVPDRFTGSGSATDFTLTISSVQAEDLADYYCGQTFSYPTFGTGTKLEIK

SEQ ID NO: 15155 - protein, 106 aa, Artificial Sequence
  source: /note="Description of Artificial Sequence: Synthetic polypeptide"
DIQMTQSPSSLSASVGDRVTITCRASEDVNTYVSWYQQKPGKAPKLLIYGASNRYTGVPSRFSGSGSGTDFTLTISSLQPEDFATYYCGQSFSYPTFGQGTKLEIK

SEQ ID NO: 15156 - protein, 106 aa, Artificial Sequence
  source: /note="Description of Artificial Sequence: Synthetic polypeptide"
DIQMTQSPSSLSASVGDRVTITCKASEDVNTYVSWYQQKPGKAPKLLIYGASNRYTGVPSRFSGSGSGTDFTLTISSLQPEDFATYYCGQSFSYPTFGQGTKLEIK

SEQ ID NO: 15157 - protein, 106 aa, Artificial Sequence; identical to SEQ ID NO: 10654
  source: /note="Description of Artificial Sequence: Synthetic polypeptide"

SEQ ID NO: 15158 - protein, 106 aa, Artificial Sequence
  source: /note="Description of Artificial Sequence: Synthetic polypeptide"
DIQMTQSPSSLSASVGDRVTITCRASEDVNTYVSWYQQKPGKAPKLLIYGASSLQSGVPSRFSGSGSGTDFTLTISSLQPEDFATYYCGQSFSYPTFGQGTKLEIK

SEQ ID NO: 15159 - protein, 106 aa, Artificial Sequence
  source: /note="Description of Artificial Sequence: Synthetic polypeptide"
EIVLTQSPGTLSLSPGERATLSCRASEDVNTYLAWYQQKPGQAPRLLIYGASSRATGIPDRFSGSGSGTDFTLTISRLEPEDFAVYYCGQSFSYPTFGQGTKLEIK

SEQ ID NO: 15160 - protein, 106 aa, Mus musculus
KIVMTQSPKSMSVSVGERVSLSCKASEDVGTYVSWYQQKPEQSPKLLIYGSSNRYTGVPDRFTGSGSATDFTLTISSVQAEDLADYSCGQSFTYPTFGTGTKLEIK

SEQ ID NO: 15161 - protein, 106 aa, Mus musculus
NIVMTQSPKSMSMSVGERVTLSCKASEDVVTYVSWYQQKPEQSPKLLIYGASNRYTGVPDRFTGSGSATDFTLTISSIQAEDLADYYCGQTFSYPTFGTGTKLEIK

SEQ ID NO: 15162 - protein, 107 aa, Homo sapiens
DIQMTQSPSSVSASVGDRVTITCRASQGIYSWLAWYQQKPGKAPNLLIYTASTLQSGVPSRFSGSGSGTDFTLTISSLQPEDFATYYCQQANIFPLTFGGGTKVEIK

SEQ ID NO: 15163 - protein, 113 aa, Artificial Sequence; identical to SEQ ID NO: 10425
  source: /note="Description of Artificial Sequence: Synthetic polypeptide"

SEQ ID NO: 15164 - protein, 112 aa, Artificial Sequence
  source: /note="Description of Artificial Sequence: Synthetic polypeptide"
DIVMTQSPDSLAVSLGERATINCKSSQSLFNSRTRKNYLAWYQQKPGQPPKLLIYWASTRESGVPDRFSGSGSGTDFTLTISSLQAEDVAVYYCMQSFNLRTFGQGTKVEIK

SEQ ID NO: 15165 - protein, 112 aa, Artificial Sequence
  source: /note="Description of Artificial Sequence: Synthetic polypeptide"
DIVMTQSPDSLAVSLGERATINCKSSQSLFNSRTRKNYLAWYQQKPGQPPKLLIYWASARDSGVPDRFSGSGSGTDFTLTISSLQAEDVAVYYCMQSFNLRTFGQGTKVEIK

SEQ ID NO: 15166 - protein, 112 aa, Artificial Sequence
  source: /note="Description of Artificial Sequence: Synthetic polypeptide"
DIVMTQSPSSLAVSLGERATMSCKSSQSLFNSRTRKNYLAWYQQKPGQSPKLLIYWASARDSGVPARFTGSGSETYFTLTISRVQAEDLAVYYCMQSFNLRTFGQGTKVEIK

SEQ ID NO: 15167 - protein, 112 aa, Artificial Sequence
  source: /note="Description of Artificial Sequence: Synthetic polypeptide"
DIVMTQSPDSLAVSLGERATMSCKSSQSLFNSRTRKNYLAWYQQKPGQPPKLLIYWASARDSGVPDRFSGSGSETYFTLTISRVQAEDLAVYYCMQSFNLRTFGQGTKVEIK

SEQ ID NO: 15168 - protein, 112 aa, Artificial Sequence
  source: /note="Description of Artificial Sequence: Synthetic polypeptide"
DIVMTQSPDSLAVSLGERATMSCKSSQSLFNSRTRKNYLAWYQQKPGQPPKLLIYWASARDSGVPDRFTGSGSETYFTLTISRVQAEDVAVYYCMQSFNLRTFGQGTKVEIK

SEQ ID NO: 15169 - protein, 112 aa, Artificial Sequence
  source: /note="Description of Artificial Sequence: Synthetic polypeptide"
DIVMTQSPDSLAVSLGERATMSCKSSQSLFNSRTRKNYLAWYQQKPGQPPKLLIYWASARDSGVPDRFTGSGSETYFTLTISSLQAEDLAVYYCMQSFNLRTFGQGTKVEIK

SEQ ID NO: 15170 - protein, 219 aa, Artificial Sequence
  source: /note="Description of Artificial Sequence: Synthetic polypeptide"
DIVMTQSPDSLAVSLGERATINCKSSQSLFNSRTRKNYLAWYQQKPGQPPKLLIYWASTRESGVPDRFSGSGSGTDFTLTISSLQAEDVAVYYCMQSFNLRTFGQGTKVEIKRTVAAPSVFIFPPSDEQLKSGTASVVCLLNNFYPREAKVQWKVDNALQSGNSQESVTEQDSKDSTYSLSSTLTLSKADYEKHKVYACEVTHQGLSSPVTKSFNRGEC

SEQ ID NO: 15171 - protein, 219 aa, Artificial Sequence
  source: /note="Description of Artificial Sequence: Synthetic polypeptide"
DIVMTQSPDSLAVSLGERATINCKSSQSLFNSRTRKNYLAWYQQKPGQPPKLLIYWASARDSGVPDRFSGSGSGTDFTLTISSLQAEDVAVYYCMQSFNLRTFGQGTKVEIKRTVAAPSVFIFPPSDEQLKSGTASVVCLLNNFYPREAKVQWKVDNALQSGNSQESVTEQDSKDSTYSLSSTLTLSKADYEKHKVYACEVTHQGLSSPVTKSFNRGEC

SEQ ID NO: 15172 - protein, 219 aa, Artificial Sequence
  source: /note="Description of Artificial Sequence: Synthetic polypeptide"
DIVMTQSPSSLAVSLGERATMSCKSSQSLFNSRTRKNYLAWYQQKPGQSPKLLIYWASARDSGVPARFTGSGSETYFTLTISRVQAEDLAVYYCMQSFNLRTFGQGTKVEIKRTVAAPSVFIFPPSDEQLKSGTASVVCLLNNFYPREAKVQWKVDNALQSGNSQESVTEQDSKDSTYSLSSTLTLSKADYEKHKVYACEVTHQGLSSPVTKSFNRGEC

SEQ ID NO: 15173 - protein, 219 aa, Artificial Sequence
  source: /note="Description of Artificial Sequence: Synthetic polypeptide"
DIVMTQSPDSLAVSLGERATMSCKSSQSLFNSRTRKNYLAWYQQKPGQPPKLLIYWASARDSGVPDRFSGSGSETYFTLTISRVQAEDLAVYYCMQSFNLRTFGQGTKVEIKRTVAAPSVFIFPPSDEQLKSGTASVVCLLNNFYPREAKVQWKVDNALQSGNSQESVTEQDSKDSTYSLSSTLTLSKADYEKHKVYACEVTHQGLSSPVTKSFNRGEC

SEQ ID NO: 15174 - protein, 219 aa, Artificial Sequence
  source: /note="Description of Artificial Sequence: Synthetic polypeptide"
DIVMTQSPDSLAVSLGERATMSCKSSQSLFNSRTRKNYLAWYQQKPGQPPKLLIYWASARDSGVPDRFTGSGSETYFTLTISRVQAEDVAVYYCMQSFNLRTFGQGTKVEIKRTVAAPSVFIFPPSDEQLKSGTASVVCLLNNFYPREAKVQWKVDNALQSGNSQESVTEQDSKDSTYSLSSTLTLSKADYEKHKVYACEVTHQGLSSPVTKSFNRGEC

SEQ ID NO: 15175 - protein, 219 aa, Artificial Sequence
  source: /note="Description of Artificial Sequence: Synthetic polypeptide"
DIVMTQSPDSLAVSLGERATMSCKSSQSLFNSRTRKNYLAWYQQKPGQPPKLLIYWASARDSGVPDRFTGSGSETYFTLTISSLQAEDLAVYYCMQSFNLRTFGQGTKVEIKRTVAAPSVFIFPPSDEQLKSGTASVVCLLNNFYPREAKVQWKVDNALQSGNSQESVTEQDSKDSTYSLSSTLTLSKADYEKHKVYACEVTHQGLSSPVTKSFNRGEC

SEQ ID NO: 15176 - protein, 219 aa, Artificial Sequence
  source: /note="Description of Artificial Sequence: Synthetic polypeptide"
DIVMTQSPDSLAVSLGERATINCKSSQSLFNSRTRKNYLAWYQQKPGQPPKLLIYWASARDSGVPDRFTGSGSETYFTLTISSLQAEDVAVYYCMQSFNLRTFGQGTKVEIKRTVAAPSVFIFPPSDEQLKSGTASVVCLLNNFYPREAKVQWKVDNALQSGNSQESVTEQDSKDSTYSLSSTLTLSKADYEKHKVYACEVTHQGLSSPVTKSFNRGEC

SEQ ID NO: 15177 - protein, 112 aa, Artificial Sequence
  source: /note="Description of Artificial Sequence: Synthetic polypeptide"
DVLMTQIPLSLPVSLGDQASISCRSSQNIVHSNGNTYLDWYLQKPGQSPNLLIYKVSNRFSGVPDRFRGSGSGTDFTLKISRVEAEDLGVYYCFQYSHVPWTFGGGTKLEIK

SEQ ID NO: 15178 - protein, 106 aa, Artificial Sequence
  source: /note="Description of Artificial Sequence: Synthetic polypeptide"
QIVLTQSPAIMSASPGEKVTMTCSASSSVTYMYWYQQKPGSSPRLLIYDTSNLASGVPVRFSGSGSGTSYSLTISRMEAEDAATYYCQQWSSHIFTFGSGTKLEIK

SEQ ID NO: 15179 - protein, 106 aa, Artificial Sequence [sequence omitted]

SEQ ID NO: 15180 - protein, 107 aa, Artificial Sequence
  source: /note="Description of Artificial Sequence: Synthetic polypeptide"
DILLTQSPVILSVSPGERVSFSCRASQSIGTNIHWYQQRTNGSPRLLIKYASESISGIPSRFSGSGSGTDFTLSINSVESEDIADYYCQQNNNWPTTFGAGTKLEIK

SEQ ID NO: 15181 - protein, 107 aa, Artificial Sequence
  source: /note="Description of Artificial Sequence: Synthetic polypeptide"
QSVLTQPPSLSVSPGQTASITCSGDKLGDKYASWYQQKPGQSPVLVIYQDRKRPSGIPERFSGSNSGNTATLTISGTQAMDEADYYCQAWDSSTPYVFGTGTKVTVL

SEQ ID NO: 15182 - protein, 107 aa, Artificial Sequence
  source: /note="Description of Artificial Sequence: Synthetic polypeptide"
QSALTQPPSVSVSPGQTASITCSGDKLGDKYASWYQLKPAQSPVWVIYQDTKRSSGIPERISGSNSGNTSTLTITGTQAMDEADYYCQAWDSSTAVVFGGGTKLTVL

SEQ ID NO: 15183 - protein, 106 aa, Artificial Sequence
  source: /note="Description of Artificial Sequence: Synthetic polypeptide"
EIVLTQSPATLSLSPGERATLSCRASQSVSSYLAWYQQKPGQAPRLLIYDASNRATGIPARFSGSGSGTDFTLTISSLEPEDFAVYYCQQRSNWWTFGQGTKVEIK

SEQ ID NO: 15184 - protein, 108 aa, Artificial Sequence
  source: /note="Description of Artificial Sequence: Synthetic polypeptide"
EIVLTQSPATLSLSPGERATLSCRASQSVSSYLAWYQQKPGQAPRLLIFDASNRATGIPARFSGSGSGTDFTLTISSLEPEDFAVYYCQQRSNWPPWTFGQGTKVEIK

SEQ ID NO: 15185 - protein, 107 aa, Artificial Sequence
  source: /note="Description of Artificial Sequence: Synthetic polypeptide"
AIQLTQSPSSLSASVGDRVTITCRASQSIGTNIHWYQQKPGQAPRLLIYYASESISGVPSRFSGSGSGTDFTLTISSLQPEDFATYYCQQNNNWPTTFGQGTKLELK

SEQ ID NO: 15186 - protein, 107 aa, Artificial Sequence
  source: /note="Description of Artificial Sequence: Synthetic polypeptide"
AIQLTQSPSSLSASVGDRVTITCRASQSIGTNIHWYLQKPGQSPQLLIYYASESISGVPSRFSGSGSGTDFTLTISSLQPEDFATYYCQQNNNWPTTFGQGTKLELK

SEQ ID NO: 15187 - protein, 107 aa, Artificial Sequence
  source: /note="Description of Artificial Sequence: Synthetic polypeptide"
AIQLTQSPSSLSASVGDRVTITCRASQSIGTNIHWYQQKPGKAPKLLIYYASESISGVPSRFSGSGSGTDFTLTISSLQPEDFATYYCQQNNNWPTTFGQGTKLELK

SEQ ID NO: 15188 - protein, 107 aa, Artificial Sequence
  source: /note="Description of Artificial Sequence: Synthetic polypeptide"
AIQLTQSPSSLSASVGDRVTITCRASQSIGTNIHWYLQKPGQSPQLLIYYASESISGIPDRFSGSGSGTDFTLTISRLEPEDFAVYYCQQNNNWPTTFGQGTKLELK

SEQ ID NO: 15189 - protein, 107 aa, Artificial Sequence
  source: /note="Description of Artificial Sequence: Synthetic polypeptide"
AIQLTQSPSSLSASVGDRVTITCRASQSIGTNIHWYQQKPGQAPRLLIYYASESISGIPARFSGSGSGTEFTLTISSLQSEDFAVYYCQQNNNWPTTFGQGTKLELK

SEQ ID NO: 15190 - protein, 107 aa, Artificial Sequence
  source: /note="Description of Artificial Sequence: Synthetic polypeptide"
AIQLTQSPSSLSASVGDRVTITCRASQSIGTNIHWYQQKPGQAPRLLIYYASESISGIPPRFSGSGSGTDFTLTISRLEPEDFAVYYCQQNNNWPTTFGQGTKLELK

SEQ ID NO: 15191 - protein, 107 aa, Artificial Sequence
  source: /note="Description of Artificial Sequence: Synthetic polypeptide"
AIQLTQSPSSLSASVGDRVTITCRASQSIGTNIHWYQQKPGQAPRLLIYYASESISGIPDRFSGSGSGTDFTLTISRLEPEDFAVYYCQQNNNWPTTFGQGTKLELK

SEQ ID NO: 15192 - protein, 222 aa, Artificial Sequence
  source: /note="Description of Artificial Sequence: Synthetic polypeptide"
MATGSRTSLLLAFGLLCLPWLQEGSADILLTQSPVILSVSPGERVSFSCRASQSIGTNIHWYQQRTNGSPRLLIKYASESISGIPSRFSGSGSGTDFTLSINSVESEDIADYYCQQNNNWPTTFGAGTKLELKAAAPDVQDCPECTLQENPFFSQPGAPILQCMGCCFSRAYPTPLRSKKTMLVQKNVTSESTCCVAKSYNRVTVMGGFKVENHTACHCSTC

SEQ ID NO: 15193 - protein, 227 aa, Artificial Sequence
  source: /note="Description of Artificial Sequence: Synthetic polypeptide"
MATGSRTSLLLAFGLLCLPWLQEGSADIVMTQSPLSLPVTPGEPASISCRSSQSIVHSNGNTYLQWYLQKPGQSPQLLIYKVSNRLYGVPDRFSGSGSGTDFTLKISRVEAEDVGVYYCFQGSHVPWTFGQGTKVEIKAAAPDVQDCPECTLQENPFFSQPGAPILQCMGCCFSRAYPTPLRSKKTMLVQKNVTSESTCCVAKSYNRVTVMGGFKVENHTACHCSTC

SEQ ID NO: 15194 - protein, 286 aa, Artificial Sequence
  source: /note="Description of Artificial Sequence: Synthetic polypeptide"
MATGSRTSLLLAFGLLCLPWLQEGSADIVMTQSPLSLPVTPGEPASISCRSSQSIVHSNGNTYLQWYLQKPGQSPQLLIYKVSNRLYGVPDRFSGSGSGTDFTLKISRVEAEDVGVYYCFQGSHVPWTFGQGTKVEIKAAASKEPLRPRCRPINATLAVEKEGCPVCITVNTTICAGYCPTMTRVLQGVLPALPQVVCNYRDVRFESIRLPGCPRGVNPVVSYAVALSCQCALCRRSTTDCGGPKDHPLTCDDPRFQDSSSSKAPPPSLPSPSRLPGPSDTPILPQ

SEQ ID NO: 15195 - protein, 278 aa, Artificial Sequence
  source: /note="Description of Artificial Sequence: Synthetic polypeptide"
MATGSRTSLLLAFGLLCLPWLQEGSASKEPLRPRCRPINATLAVEKEGCPVCITVNTTICAGYCPTMTRVLQGVLPALPQVVCNYRDVRFESIRLPGCPRGVNPVVSYAVALSCQCALCRRSTTDCGGPKDHPLTCDDPRFQDSSSSKAPPPSLPSPSRLPGPSDTPILPQDILLTQSPVILSVSPGERVSFSCRASQSIGTNIHWYQQRTNGSPRLLIKYASESISGIPSRFSGSGSGTDFTLSINSVESEDIADYYCQQNNNWPTTFGAGTKLELK

SEQ ID NO: 15196 - protein, 127 aa, Artificial Sequence
  source: /note="Description of Artificial Sequence: Synthetic polypeptide"
MDWTWRILFLVAAATGVHSDIQMTQSPSSMSVSVGDRVTITCHSSQDINSNIGWLQQKPGKSFKGLIYHGTNLDDGVPSRFSGSGSGTDYTLTISSLQPEDFATYYCVQYAQFPWTFGGGTKLEIKR

SEQ ID NO: 15197 - protein, 107 aa, Mus musculus
DIVLTQSPSSMSLSLGDTVSITCHSSQDISNIGWLQQKPGKSFKGLIYHGTNLEDGVPSRFSGSGSGADYSLTISSLESEDFVDYYCVQYGQFPWTFGGGTKLEIKR

SEQ ID NO: 15198 - protein, 108 aa, Artificial Sequence
  source: /note="Description of Artificial Sequence: Synthetic polypeptide"
DIQMTQSPSSMSVSVGDRVTITCHSSQDINSNIGWLQQKPGKSFKGLIYHGTNLDDGVPSRFSGSGSGTDYTLTISSLQPEDFATYYCVQYAQFPWTFGGGTKLEIKR

SEQ ID NO: 15199 - protein, 108 aa, Mus musculus
DILMTQSPSSMSVSLGDTVSITCHSSQDINSNIGWLQQRPGKSFKGLIYHGTNLDDEVPSRFSGSGSGADYSLTISSLESEDFADYYCVQYAQFPWTFGGGTKLEIKR

SEQ ID NO: 15200 - protein, 107 aa, Artificial Sequence
  source: /note="Description of Artificial Sequence: Synthetic polypeptide"
DILMTQSPSSMSVSLGDTVSITCHSSQDINSNIGWLQQRPGKSFKGLIYHGTNLDDEVPSRFSGSGSGTDYTLTISSLEPEDFATYYCVQYAQFPWTFGGGTKLEIK

SEQ ID NO: 15201 - protein, 107 aa, Mus musculus
DILMTQSPSSMSVSLGDTVSITCHSSQDINSNIGWLQQRPGKSFKGLIYHGTNLDDEVPSRFSGSGSGADYSLTISSLESEDFADYYCVQHAQFPWTFGGGTKLEIK

SEQ ID NO: 15202 - protein, 108 aa, Rattus norvegicus
DIQMTQSPSFLSASVGDRVTINCKASQNINNYLNWYQQKLGEAPKRLIYNTNNLQTGIPSRFSGSGSGTDYTLTISSLQPEDFATYFCLQHNSFPTFGAGTKLELKRT

SEQ ID NO: 15203 - protein, 108 aa, Artificial Sequence; identical to SEQ ID NO: 10714
  source: /note="Description of Artificial Sequence: Synthetic polypeptide"

SEQ ID NO: 15204 - protein, 108 aa, Artificial Sequence
  source: /note="Description of Artificial Sequence: Synthetic polypeptide"
EIVLTQSPATLSLSPGERATLSCRASQSVSSYLAWYQQKPGQAPRLLIYDASKRATGIPARFSGSGSGTDFTLTISSLEPEDFAVYYCQQRSKWPPWTFGQGTKVESK

SEQ ID NO: 15205 - protein, 108 aa, Artificial Sequence
  source: /note="Description of Artificial Sequence: Synthetic polypeptide"
EIVLTQSPATLSLSPGERATLSCRASQSVSSYLAWYQQKPGQAPRLLIYDASNRATGIPARFSGSGSGTDFTLTISSLEPEDFAVYYCQQRSKWPPWTFGQGTKVEIK

SEQ ID NO: 15206 - protein, 107 aa, Artificial Sequence
  source: /note="Description of Artificial Sequence: Synthetic polypeptide"
DILLTQSPGTLSLSPGERATLSCRASQSIGTNIHWYQQKPGQAPRLLIKYASESISGIPDRFSGSGSGTDFTLTISRLEPEDFAVYYCQQNNNWPTTFGQGTKLEIK

SEQ ID NO: 15207 - protein, 107 aa, Artificial Sequence
  source: /note="Description of Artificial Sequence: Synthetic polypeptide"
WILLTQSPVILSVSPGERVSFSCRASQSIGTNIHWYQQRTNGSPRLLIKYASESISGIPSRFSGSGSGTDFTLSINSVESEDIADYYCQQNNNWPTTFGAGTKLELK

SEQ ID NO: 15208 - protein, 107 aa, Artificial Sequence
  source: /note="Description of Artificial Sequence: Synthetic polypeptide"
DCLLTQSPVILSVSPGERVSFSCRASQSIGTNIHWYQQRTNGSPRLLIKYASESISGIPSRFSGSGSGTDFTLSINSVESEDIADYYCQQNNNWPTTFGAGTKLELK

SEQ ID NO: 15209 - protein, 107 aa, Artificial Sequence
  source: /note="Description of Artificial Sequence: Synthetic polypeptide"
DVLLTQSPVILSVSPGERVSFSCRASQSIGTNIHWYQQRTNGSPRLLIKYASESISGIPSRFSGSGSGTDFTLSINSVESEDIADYYCQQNNNWPTTFGAGTKLELK

SEQ ID NO: 15210 - protein, 107 aa, Artificial Sequence
  source: /note="Description of Artificial Sequence: Synthetic polypeptide"
DWLLTQSPVILSVSPGERVSFSCRASQSIGTNIHWYQQRTNGSPRLLIKYASESISGIPSRFSGSGSGTDFTLSINSVESEDIADYYCQQNNNWPTTFGAGTKLELK

SEQ ID NO: 15211 - protein, 107 aa, Artificial Sequence
  source: /note="Description of Artificial Sequence: Synthetic polypeptide"
DIDLTQSPVILSVSPGERVSFSCRASQSIGTNIHWYQQRTNGSPRLLIKYASESISGIPSRFSGSGSGTDFTLSINSVESEDIADYYCQQNNNWPTTFGAGTKLELK

SEQ ID NO: 15212 - protein, 107 aa, Artificial Sequence
  source: /note="Description of Artificial Sequence: Synthetic polypeptide"
DIFLTQSPVILSVSPGERVSFSCRASQSIGTNIHWYQQRTNGSPRLLIKYASESISGIPSRFSGSGSGTDFTLSINSVESEDIADYYCQQNNNWPTTFGAGTKLELK

SEQ ID NO: 15213 - protein, 107 aa, Artificial Sequence
  source: /note="Description of Artificial Sequence: Synthetic polypeptide"
DIGLTQSPVILSVSPGERVSFSCRASQSIGTNIHWYQQRTNGSPRLLIKYASESISGIPSRFSGSGSGTDFTLSINSVESEDIADYYCQQNNNWPTTFGAGTKLELK

SEQ ID NO: 15214 - protein, 107 aa, Artificial Sequence
  source: /note="Description of Artificial Sequence: Synthetic polypeptide"
DISLTQSPVILSVSPGERVSFSCRASQSIGTNIHWYQQRTNGSPRLLIKYASESISGIPSRFSGSGSGTDFTLSINSVESEDIADYYCQQNNNWPTTFGAGTKLELK

SEQ ID NO: 15215 - protein, 107 aa, Artificial Sequence
  source: /note="Description of Artificial Sequence: Synthetic polypeptide"
DITLTQSPVILSVSPGERVSFSCRASQSIGTNIHWYQQRTNGSPRLLIKYASESISGIPSRFSGSGSGTDFTLSINSVESEDIADYYCQQNNNWPTTFGAGTKLELK

SEQ ID NO: 15216 - protein, 107 aa, Artificial Sequence
  source: /note="Description of Artificial Sequence: Synthetic polypeptide"
DIVLTQSPVILSVSPGERVSFSCRASQSIGTNIHWYQQRTNGSPRLLIKYASESISGIPSRFSGSGSGTDFTLSINSVESEDIADYYCQQNNNWPTTFGAGTKLELK

SEQ ID NO: 15217 - protein, 107 aa, Artificial Sequence
  source: /note="Description of Artificial Sequence: Synthetic polypeptide"
DIWLTQSPVILSVSPGERVSFSCRASQSIGTNIHWYQQRTNGSPRLLIKYASESISGIPSRFSGSGSGTDFTLSINSVESEDIADYYCQQNNNWPTTFGAGTKLELK

SEQ ID NO: 15218 - protein, 107 aa, Artificial Sequence
  source: /note="Description of Artificial Sequence: Synthetic polypeptide"
DIYLTQSPVILSVSPGERVSFSCRASQSIGTNIHWYQQRTNGSPRLLIKYASESISGIPSRFSGSGSGTDFTLSINSVESEDIADYYCQQNNNWPTTFGAGTKLELK

SEQ ID NO: 15219 - protein, 107 aa, Artificial Sequence
  source: /note="Description of Artificial Sequence: Synthetic polypeptide"
DIRLTQSPVILSVSPGERVSFSCRASQSIGTNIHWYQQRTNGSPRLLIKYASESISGIPSRFSGSGSGTDFTLSINSVESEDIADYYCQQNNNWPTTFGAGTKLELK

SEQ ID NO: 15220 - protein, 107 aa, Artificial Sequence
  source: /note="Description of Artificial Sequence: Synthetic polypeptide"
DILCTQSPVILSVSPGERVSFSCRASQSIGTNIHWYQQRTNGSPRLLIKYASESISGIPSRFSGSGSGTDFTLSINSVESEDIADYYCQQNNNWPTTFGAGTKLELK

SEQ ID NO: 15221 - protein, 107 aa, Artificial Sequence
  source: /note="Description of Artificial Sequence: Synthetic polypeptide"
DILETQSPVILSVSPGERVSFSCRASQSIGTNIHWYQQRTNGSPRLLIKYASESISGIPSRFSGSGSGTDFTLSINSVESEDIADYYCQQNNNWPTTFGAGTKLELK

SEQ ID NO: 15222 - protein, 107 aa, Artificial Sequence
  source: /note="Description of Artificial Sequence: Synthetic polypeptide"
DILFTQSPVILSVSPGERVSFSCRASQSIGTNIHWYQQRTNGSPRLLIKYASESISGIPSRFSGSGSGTDFTLSINSVESEDIADYYCQQNNNWPTTFGAGTKLELK

SEQ ID NO: 15223 - protein, 107 aa, Artificial Sequence
  source: /note="Description of Artificial Sequence: Synthetic polypeptide"
DILITQSPVILSVSPGERVSFSCRASQSIGTNIHWYQQRTNGSPRLLIKYASESISGIPSRFSGSGSGTDFTLSINSVESEDIADYYCQQNNNWPTTFGAGTKLELK

SEQ ID NO: 15224 - protein, 107 aa, Artificial Sequence
  source: /note="Description of Artificial Sequence: Synthetic polypeptide"
DILPTQSPVILSVSPGERVSFSCRASQSIGTNIHWYQQRTNGSPRLLIKYASESISGIPSRFSGSGSGTDFTLSINSVESEDIADYYCQQNNNWPTTFGAGTKLELK

SEQ ID NO: 15225 - protein, 107 aa, Artificial Sequence
  source: /note="Description of Artificial Sequence: Synthetic polypeptide"
DILSTQSPVILSVSPGERVSFSCRASQSIGTNIHWYQQRTNGSPRLLIKYASESISGIPSRFSGSGSGTDFTLSINSVESEDIADYYCQQNNNWPTTFGAGTKLELK

SEQ ID NO: 15226 - protein, 107 aa, Artificial Sequence
  source: /note="Description of Artificial Sequence: Synthetic polypeptide"
DILTTQSPVILSVSPGERVSFSCRASQSIGTNIHWYQQRTNGSPRLLIKYASESISGIPSRFSGSGSGTDFTLSINSVESEDIADYYCQQNNNWPTTFGAGTKLELK

SEQ ID NO: 15227 - protein, 107 aa, Artificial Sequence
  source: /note="Description of Artificial Sequence: Synthetic polypeptide"
DILVTQSPVILSVSPGERVSFSCRASQSIGTNIHWYQQRTNGSPRLLIKYASESISGIPSRFSGSGSGTDFTLSINSVESEDIADYYCQQNNNWPTTFGAGTKLELK

SEQ ID NO: 15228 - protein, 107 aa, Artificial Sequence
  source: /note="Description of Artificial Sequence: Synthetic polypeptide"
DILWTQSPVILSVSPGERVSFSCRASQSIGTNIHWYQQRTNGSPRLLIKYASESISGIPSRFSGSGSGTDFTLSINSVESEDIADYYCQQNNNWPTTFGAGTKLELK

SEQ ID NO: 15229 - protein, 107 aa, Artificial Sequence
  source: /note="Description of Artificial Sequence: Synthetic polypeptide"
DILKTQSPVILSVSPGERVSFSCRASQSIGTNIHWYQQRTNGSPRLLIKYASESISGIPSRFSGSGSGTDFTLSINSVESEDIADYYCQQNNNWPTTFGAGTKLELK

SEQ ID NO: 15230 - protein, 107 aa, Artificial Sequence
  source: /note="Description of Artificial Sequence: Synthetic polypeptide"
DILHTQSPVILSVSPGERVSFSCRASQSIGTNIHWYQQRTNGSPRLLIKYASESISGIPSRFSGSGSGTDFTLSINSVESEDIADYYCQQNNNWPTTFGAGTKLELK

SEQ ID NO: 15231 - protein, 107 aa, Artificial Sequence
  source: /note="Description of Artificial Sequence: Synthetic polypeptide"
DILRTQSPVILSVSPGERVSFSCRASQSIGTNIHWYQQRTNGSPRLLIKYASESISGIPSRFSGSGSGTDFTLSINSVESEDIADYYCQQNNNWPTTFGAGTKLELK

SEQ ID NO: 15232 - protein, 107 aa, Artificial Sequence
  source: /note="Description of Artificial Sequence: Synthetic polypeptide"
DILLAQSPVILSVSPGERVSFSCRASQSIGTNIHWYQQRTNGSPRLLIKYASESISGIPSRFSGSGSGTDFTLSINSVESEDIADYYCQQNNNWPTTFGAGTKLELK

SEQ ID NO: 15233 - protein, 107 aa, Artificial Sequence
  source: /note="Description of Artificial Sequence: Synthetic polypeptide"
DILLCQSPVILSVSPGERVSFSCRASQSIGTNIHWYQQRTNGSPRLLIKYASESISGIPSRFSGSGSGTDFTLSINSVESEDIADYYCQQNNNWPTTFGAGTKLELK

SEQ ID NO: 15234 - protein, 107 aa, Artificial Sequence
  source: /note="Description of Artificial Sequence: Synthetic polypeptide"
DILLDQSPVILSVSPGERVSFSCRASQSIGTNIHWYQQRTNGSPRLLIKYASESISGIPSRFSGSGSGTDFTLSINSVESEDIADYYCQQNNNWPTTFGAGTKLELK

SEQ ID NO: 15235 - protein, 107 aa, Artificial Sequence
  source: /note="Description of Artificial Sequence: Synthetic polypeptide"
DILLEQSPVILSVSPGERVSFSCRASQSIGTNIHWYQQRTNGSPRLLIKYASESISGIPSRFSGSGSGTDFTLSINSVESEDIADYYCQQNNNWPTTFGAGTKLELK

SEQ ID NO: 15236 - protein, 107 aa, Artificial Sequence
  source: /note="Description of Artificial Sequence: Synthetic polypeptide"
DILLFQSPVILSVSPGERVSFSCRASQSIGTNIHWYQQRTNGSPRLLIKYASESISGIPSRFSGSGSGTDFTLSINSVESEDIADYYCQQNNNWPTTFGAGTKLELK

SEQ ID NO: 15237 - protein, 107 aa, Artificial Sequence
  source: /note="Description of Artificial Sequence: Synthetic polypeptide"
DILLGQSPVILSVSPGERVSFSCRASQSIGTNIHWYQQRTNGSPRLLIKYASESISGIPSRFSGSGSGTDFTLSINSVESEDIADYYCQQNNNWPTTFGAGTKLELK

SEQ ID NO: 15238 - protein, 107 aa, Artificial Sequence
  source: /note="Description of Artificial Sequence: Synthetic polypeptide"
DILLNQSPVILSVSPGERVSFSCRASQSIGTNIHWYQQRTNGSPRLLIKYASESISGIPSRFSGSGSGTDFTLSINSVESEDIADYYCQQNNNWPTTFGAGTKLELK

SEQ ID NO: 15239 - protein, 107 aa, Artificial Sequence
  source: /note="Description of Artificial Sequence: Synthetic polypeptide"
DILLSQSPVILSVSPGERVSFSCRASQSIGTNIHWYQQRTNGSPRLLIKYASESISGIPSRFSGSGSGTDFTLSINSVESEDIADYYCQQNNNWPTTFGAGTKLELK

SEQ ID NO: 15240 - protein, 107 aa, Artificial Sequence
  source: /note="Description of Artificial Sequence: Synthetic polypeptide"
DILLWQSPVILSVSPGERVSFSCRASQSIGTNIHWYQQRTNGSPRLLIKYASESISGIPSRFSGSGSGTDFTLSINSVESEDIADYYCQQNNNWPTTFGAGTKLELK

SEQ ID NO: 15241 - protein, 107 aa, Artificial Sequence
  source: /note="Description of Artificial Sequence: Synthetic polypeptide"
DILLLQSPVILSVSPGERVSFSCRASQSIGTNIHWYQQRTNGSPRLLIKYASESISGIPSRFSGSGSGTDFTLSINSVESEDIADYYCQQNNNWPTTFGAGTKLELK

SEQ ID NO: 15242 - protein, 107 aa, Artificial Sequence
  source: /note="Description of Artificial Sequence: Synthetic polypeptide"
DILLKQSPVILSVSPGERVSFSCRASQSIGTNIHWYQQRTNGSPRLLIKYASESISGIPSRFSGSGSGTDFTLSINSVESEDIADYYCQQNNNWPTTFGAGTKLELK

SEQ ID NO: 15243 - protein, 107 aa, Artificial Sequence
  source: /note="Description of Artificial Sequence: Synthetic polypeptide"
DILLHQSPVILSVSPGERVSFSCRASQSIGTNIHWYQQRTNGSPRLLIKYASESISGIPSRFSGSGSGTDFTLSINSVESEDIADYYCQQNNNWPTTFGAGTKLELK

SEQ ID NO: 15244 - protein, 107 aa, Artificial Sequence
  source: /note="Description of Artificial Sequence: Synthetic polypeptide"
DILLRQSPVILSVSPGERVSFSCRASQSIGTNIHWYQQRTNGSPRLLIKYASESISGIPSRFSGSGSGTDFTLSINSVESEDIADYYCQQNNNWPTTFGAGTKLELK

SEQ ID NO: 15245 - protein, 107 aa, Artificial Sequence
  source: /note="Description of Artificial Sequence: Synthetic polypeptide"
DILLTQSPVILSVSPGERVSFSCAASQSIGTNIHWYQQRTNGSPRLLIKYASESISGIPSRFSGSGSGTDFTLSINSVESEDIADYYCQQNNNWPTTFGAGTKLELK

SEQ ID NO: 15246 - protein, 107 aa, Artificial Sequence
  source: /note="Description of Artificial Sequence: Synthetic polypeptide"
DILLTQSPVILSVSPGERVSFSCCASQSIGTNIHWYQQRTNGSPRLLIKYASESISGIPSRFSGSGSGTDFTLSINSVESEDIADYYCQQNNNWPTTFGAGTKLELK

SEQ ID NO: 15247 - protein, 107 aa, Artificial Sequence
  source: /note="Description of Artificial Sequence: Synthetic polypeptide"
DILLTQSPVILSVSPGERVSFSCFASQSIGTNIHWYQQRTNGSPRLLIKYASESISGIPSRFSGSGSGTDFTLSINSVESEDIADYYCQQNNNWPTTFGAGTKLELK

SEQ ID NO: 15248 - protein, 107 aa, Artificial Sequence
  source: /note="Description of Artificial Sequence: Synthetic polypeptide"
DILLTQSPVILSVSPGERVSFSCLASQSIGTNIHWYQQRTNGSPRLLIKYASESISGIPSRFSGSGSGTDFTLSINSVESEDIADYYCQQNNNWPTTFGAGTKLELK

SEQ ID NO: 15249 - protein, 107 aa, Artificial Sequence
  source: /note="Description of Artificial Sequence: Synthetic polypeptide"
DILLTQSPVILSVSPGERVSFSCMASQSIGTNIHWYQQRTNGSPRLLIKYASESISGIPSRFSGSGSGTDFTLSINSVESEDIADYYCQQNNNWPTTFGAGTKLELK

SEQ ID NO: 15250 - protein, 107 aa, Artificial Sequence
  source: /note="Description of Artificial Sequence: Synthetic polypeptide"
DILLTQSPVILSVSPGERVSFSCSASQSIGTNIHWYQQRTNGSPRLLIKYASESISGIPSRFSGSGSGTDFTLSINSVESEDIADYYCQQNNNWPTTFGAGTKLELK

SEQ ID NO: 15251 - protein, 107 aa, Artificial Sequence
  source: /note="Description of Artificial Sequence: Synthetic polypeptide"
DILLTQSPVILSVSPGERVSFSCWASQSIGTNIHWYQQRTNGSPRLLIKYASESISGIPSRFSGSGSGTDFTLSINSVESEDIADYYCQQNNNWPTTFGAGTKLELK

SEQ ID NO: 15252 - protein, 107 aa, Artificial Sequence
  source: /note="Description of Artificial Sequence: Synthetic polypeptide"
DILLTQSPVILSVSPGERVSFSCYASQSIGTNIHWYQQRTNGSPRLLIKYASESISGIPSRFSGSGSGTDFTLSINSVESEDIADYYCQQNNNWPTTFGAGTKLELK

SEQ ID NO: 15253 - protein, 107 aa, Artificial Sequence
  source: /note="Description of Artificial Sequence: Synthetic polypeptide"
DILLTQSPVILSVSPGERVSFSCRCSQSIGTNIHWYQQRTNGSPRLLIKYASESISGIPSRFSGSGSGTDFTLSINSVESEDIADYYCQQNNNWPTTFGAGTKLELK

SEQ ID NO: 15254 - protein, 107 aa, Artificial Sequence
  source: /note="Description of Artificial Sequence: Synthetic polypeptide"
DILLTQSPVILSVSPGERVSFSCRGSQSIGTNIHWYQQRTNGSPRLLIKYASESISGIPSRFSGSGSGTDFTLSINSVESEDIADYYCQQNNNWPTTFGAGTKLELK

SEQ ID NO: 15255 - protein, 107 aa, Artificial Sequence
  source: /note="Description of Artificial Sequence: Synthetic polypeptide"
DILLTQSPVILSVSPGERVSFSCRLSQSIGTNIHWYQQRTNGSPRLLIKYASESISGIPSRFSGSGSGTDFTLSINSVESEDIADYYCQQNNNWPTTFGAGTKLELK

SEQ ID NO: 15256 - protein, 107 aa, Artificial Sequence
  source: /note="Description of Artificial Sequence: Synthetic polypeptide"
DILLTQSPVILSVSPGERVSFSCRVSQSIGTNIHWYQQRTNGSPRLLIKYASESISGIPSRFSGSGSGTDFTLSINSVESEDIADYYCQQNNNWPTTFGAGTKLELK

SEQ ID NO: 15257 - protein, 107 aa, Artificial Sequence
  source: /note="Description of Artificial Sequence: Synthetic polypeptide"
DILLTQSPVILSVSPGERVSFSCRAAQSIGTNIHWYQQRTNGSPRLLIKYASESISGIPSRFSGSGSGTDFTLSINSVESEDIADYYCQQNNNWPTTFGAGTKLELK

SEQ ID NO: 15258 - protein, 107 aa, Artificial Sequence
  source: /note="Description of Artificial Sequence: Synthetic polypeptide"
DILLTQSPVILSVSPGERVSFSCRACQSIGTNIHWYQQRTNGSPRLLIKYASESISGIPSRFSGSGSGTDFTLSINSVESEDIADYYCQQNNNWPTTFGAGTKLELK

SEQ ID NO: 15259 - protein, 107 aa, Artificial Sequence
  source: /note="Description of Artificial Sequence: Synthetic polypeptide"
DILLTQSPVILSVSPGERVSFSCRADQSIGTNIHWYQQRTNGSPRLLIKYASESISGIPSRFSGSGSGTDFTLSINSVESEDIADYYCQQNNNWPTTFGAGTKLELK

SEQ ID NO: 15260 - protein, 107 aa, Artificial Sequence
  source: /note="Description of Artificial Sequence: Synthetic polypeptide"
DILLTQSPVILSVSPGERVSFSCRAIQSIGTNIHWYQQRTNGSPRLLIKYASESISGIPSRFSGSGSGTDFTLSINSVESEDIADYYCQQNNNWPTTFGAGTKLELK

SEQ ID NO: 15261 - protein, 107 aa, Artificial Sequence
  source: /note="Description of Artificial Sequence: Synthetic polypeptide"
DILLTQSPVILSVSPGERVSFSCRAMQSIGTNIHWYQQRTNGSPRLLIKYASESISGIPSRFSGSGSGTDFTLSINSVESEDIADYYCQQNNNWPTTFGAGTKLELK

SEQ ID NO: 15262 - protein, 107 aa, Artificial Sequence
  source: /note="Description of Artificial Sequence: Synthetic polypeptide"
DILLTQSPVILSVSPGERVSFSCRANQSIGTNIHWYQQRTNGSPRLLIKYASESISGIPSRFSGSGSGTDFTLSINSVESEDIADYYCQQNNNWPTTFGAGTKLELK

SEQ ID NO: 15263 - protein, 107 aa, Artificial Sequence
  source: /note="Description of Artificial Sequence: Synthetic polypeptide"
DILLTQSPVILSVSPGERVSFSCRAVQSIGTNIHWYQQRTNGSPRLLIKYASESISGIPSRFSGSGSGTDFTLSINSVESEDIADYYCQQNNNWPTTFGAGTKLELK

SEQ ID NO: 15264 - protein, 107 aa, Artificial Sequence
  source: /note="Description of Artificial Sequence: Synthetic polypeptide"
DILLTQSPVILSVSPGERVSFSCRAWQSIGTNIHWYQQRTNGSPRLLIKYASESISGIPSRFSGSGSGTDFTLSINSVESEDIADYYCQQNNNWPTTFGAGTKLELK

SEQ ID NO: 15265 - protein, 107 aa, Artificial Sequence
  source: /note="Description of Artificial Sequence: Synthetic polypeptide"
DILLTQSPVILSVSPGERVSFSCRALQSIGTNIHWYQQRTNGSPRLLIKYASESISGIPSRFSGSGSGTDFTLSINSVESEDIADYYCQQNNNWPTTFGAGTKLELK

SEQ ID NO: 15266 - protein, 107 aa, Artificial Sequence
  source: /note="Description of Artificial Sequence: Synthetic polypeptide"
DILLTQSPVILSVSPGERVSFSCRAGQSIGTNIHWYQQRTNGSPRLLIKYASESISGIPSRFSGSGSGTDFTLSINSVESEDIADYYCQQNNNWPTTFGAGTKLELK

SEQ ID NO: 15267 - protein, 107 aa, Artificial Sequence
  source: /note="Description of Artificial Sequence: Synthetic polypeptide"
DILLTQSPVILSVSPGERVSFSCRAHQSIGTNIHWYQQRTNGSPRLLIKYASESISGIPSRFSGSGSGTDFTLSINSVESEDIADYYCQQNNNWPTTFGAGTKLELK

SEQ ID NO: 15268 - protein, 107 aa, Artificial Sequence
  source: /note="Description of Artificial Sequence: Synthetic polypeptide"
DILLTQSPVILSVSPGERVSFSCRARQSIGTNIHWYQQRTNGSPRLLIKYASESISGIPSRFSGSGSGTDFTLSINSVESEDIADYYCQQNNNWPTTFGAGTKLELK

SEQ ID NO: 15269 - protein, 107 aa, Artificial Sequence
  source: /note="Description of Artificial Sequence: Synthetic polypeptide"
DILLTQSPVILSVSPGERVSFSCRASASIGTNIHWYQQRTNGSPRLLIKYASESISGIPSRFSGSGSGTDFTLSINSVESEDIADYYCQQNNNWPTTFGAGTKLELK

SEQ ID NO: 15270 - protein, 107 aa, Artificial Sequence
  source: /note="Description of Artificial Sequence: Synthetic polypeptide"
DILLTQSPVILSVSPGERVSFSCRASDSIGTNIHWYQQRTNGSPRLLIKYASESISGIPSRFSGSGSGTDFTLSINSVESEDIADYYCQQNNNWPTTFGAGTKLELK

SEQ ID NO: 15271 - protein, 107 aa, Artificial Sequence
  source: /note="Description of Artificial Sequence: Synthetic polypeptide"
DILLTQSPVILSVSPGERVSFSCRASESIGTNIHWYQQRTNGSPRLLIKYASESISGIPSRFSGSGSGTDFTLSINSVESEDIADYYCQQNNNWPTTFGAGTKLELK

SEQ ID NO: 15272 - protein, 107 aa, Artificial Sequence
  source: /note="Description of Artificial Sequence: Synthetic polypeptide"
DILLTQSPVILSVSPGERVSFSCRASFSIGTNIHWYQQRTNGSPRLLIKYASESISGIPSRFSGSGSGTDFTLSINSVESEDIADYYCQQNNNWPTTFGAGTKLELK

SEQ ID NO: 15273 - protein, 107 aa, Artificial Sequence
  source: /note="Description of Artificial Sequence: Synthetic polypeptide"
DILLTQSPVILSVSPGERVSFSCRASISIGTNIHWYQQRTNGSPRLLIKYASESISGIPSRFSGSGSGTDFTLSINSVESEDIADYYCQQNNNWPTTFGAGTKLELK

SEQ ID NO: 15274 - protein, 107 aa, Artificial Sequence
  source: /note="Description of Artificial Sequence: Synthetic polypeptide"
DILLTQSPVILSVSPGERVSFSCRASMSIGTNIHWYQQRTNGSPRLLIKYASESISGIPSRFSGSGSGTDFTLSINSVESEDIADYYCQQNNNWPTTFGAGTKLELK

SEQ ID NO: 15275 - protein, 107 aa, Artificial Sequence
  source: /note="Description of Artificial Sequence: Synthetic polypeptide"
DILLTQSPVILSVSPGERVSFSCRASNSIGTNIHWYQQRTNGSPRLLIKYASESISGIPSRFSGSGSGTDFTLSINSVESEDIADYYCQQNNNWPTTFGAGTKLELK

SEQ ID NO: 15276 - protein, 107 aa, Artificial Sequence
  source: /note="Description of Artificial Sequence: Synthetic polypeptide"
DILLTQSPVILSVSPGERVSFSCRASPSIGTNIHWYQQRTNGSPRLLIKYASESISGIPSRFSGSGSGTDFTLSINSVESEDIADYYCQQNNNWPTTFGAGTKLELK

SEQ ID NO: 15277 - protein, 107 aa, Artificial Sequence
  source: /note="Description of Artificial Sequence: Synthetic polypeptide"
DILLTQSPVILSVSPGERVSFSCRASTSIGTNIHWYQQRTNGSPRLLIKYASESISGIPSRFSGSGSGTDFTLSINSVESEDIADYYCQQNNNWPTTFGAGTKLELK

SEQ ID NO: 15278 - protein, 107 aa, Artificial Sequence
  source: /note="Description of Artificial Sequence: Synthetic polypeptide"
DILLTQSPVILSVSPGERVSFSCRASQAIGTNIHWYQQRTNGSPRLLIKYASESISGIPSRFSGSGSGTDFTLSINSVESEDIADYYCQQNNNWPTTFGAGTKLELK

SEQ ID NO: 15279 - protein, 107 aa, Artificial Sequence
  source: /note="Description of Artificial Sequence: Synthetic polypeptide"
DILLTQSPVILSVSPGERVSFSCRASQDIGTNIHWYQQRTNGSPRLLIKYASESISGIPSRFSGSGSGTDFTLSINSVESEDIADYYCQQNNNWPTTFGAGTKLELK

SEQ ID NO: 15280 - protein, 107 aa, Artificial Sequence
  source: /note="Description of Artificial Sequence: Synthetic polypeptide"
DILLTQSPVILSVSPGERVSFSCRASQNIGTNIHWYQQRTNGSPRLLIKYASESISGIPSRFSGSGSGTDFTLSINSVESEDIADYYCQQNNNWPTTFGAGTKLELK

SEQ ID NO: 15281 - protein, 107 aa, Artificial Sequence
  source: /note="Description of Artificial Sequence: Synthetic polypeptide"
DILLTQSPVILSVSPGERVSFSCRASQQIGTNIHWYQQRTNGSPRLLIKYASESISGIPSRFSGSGSGTDFTLSINSVESEDIADYYCQQNNNWPTTFGAGTKLELK

SEQ ID NO: 15282 - protein, 107 aa, Artificial Sequence
  source: /note="Description of Artificial Sequence: Synthetic polypeptide"
DILLTQSPVILSVSPGERVSFSCRASQLIGTNIHWYQQRTNGSPRLLIKYASESISGIPSRFSGSGSGTDFTLSINSVESEDIADYYCQQNNNWPTTFGAGTKLELK

SEQ ID NO: 15283 - protein, 107 aa, Artificial Sequence
  source: /note="Description of Artificial Sequence: Synthetic polypeptide"
DILLTQSPVILSVSPGERVSFSCRASQKIGTNIHWYQQRTNGSPRLLIKYASESISGIPSRFSGSGSGTDFTLSINSVESEDIADYYCQQNNNWPTTFGAGTKLELK

SEQ ID NO: 15284 - protein, 107 aa, Artificial Sequence
  source: /note="Description of Artificial Sequence: Synthetic polypeptide"
DILLTQSPVILSVSPGERVSFSCRASQHIGTNIHWYQQRTNGSPRLLIKYASESISGIPSRFSGSGSGTDFTLSINSVESEDIADYYCQQNNNWPTTFGAGTKLELK

SEQ ID NO: 15285 - protein, 107 aa, Artificial Sequence
  source: /note="Description of Artificial Sequence: Synthetic polypeptide"
DILLTQSPVILSVSPGERVSFSCRASQSAGTNIHWYQQRTNGSPRLLIKYASESISGIPSRFSGSGSGTDFTLSINSVESEDIADYYCQQNNNWPTTFGAGTKLELK

SEQ ID NO: 15286 - protein, 107 aa, Artificial Sequence
  source: /note="Description of Artificial Sequence: Synthetic polypeptide"
DILLTQSPVILSVSPGERVSFSCRASQSEGTNIHWYQQRTNGSPRLLIKYASESISGIPSRFSGSGSGTDFTLSINSVESEDIADYYCQQNNNWPTTFGAGTKLELK

SEQ ID NO: 15287 - protein, 107 aa, Artificial Sequence
  source: /note="Description of Artificial Sequence: Synthetic polypeptide"
DILLTQSPVILSVSPGERVSFSCRASQSFGTNIHWYQQRTNGSPRLLIKYASESISGIPSRFSGSGSGTDFTLSINSVESEDIADYYCQQNNNWPTTFGAGTKLELK

SEQ ID NO: 15288 - protein, 107 aa, Artificial Sequence
  source: /note="Description of Artificial Sequence: Synthetic polypeptide"
DILLTQSPVILSVSPGERVSFSCRASQSSGTNIHWYQQRTNGSPRLLIKYASESISGIPSRFSGSGSGTDFTLSINSVESEDIADYYCQQNNNWPTTFGAGTKLELK

SEQ ID NO: 15289 - protein, 107 aa, Artificial Sequence
  source: /note="Description of Artificial Sequence: Synthetic polypeptide"
DILLTQSPVILSVSPGERVSFSCRASQSTGTNIHWYQQRTNGSPRLLIKYASESISGIPSRFSGSGSGTDFTLSINSVESEDIADYYCQQNNNWPTTFGAGTKLELK

SEQ ID NO: 15290 - protein, 107 aa, Artificial Sequence
  source: /note="Description of Artificial Sequence: Synthetic polypeptide"
DILLTQSPVILSVSPGERVSFSCRASQSRGTNIHWYQQRTNGSPRLLIKYASESISGIPSRFSGSGSGTDFTLSINSVESEDIADYYCQQNNNWPTTFGAGTKLELK

SEQ ID NO: 15291 - protein, 107 aa, Artificial Sequence
  source: /note="Description of Artificial Sequence: Synthetic polypeptide"
DILLTQSPVILSVSPGERVSFSCRASQSIATNIHWYQQRTNGSPRLLIKYASESISGIPSRFSGSGSGTDFTLSINSVESEDIADYYCQQNNNWPTTFGAGTKLELK

SEQ ID NO: 15292 - protein, 107 aa, Artificial Sequence
  source: /note="Description of Artificial Sequence: Synthetic polypeptide"
DILLTQSPVILSVSPGERVSFSCRASQSIETNIHWYQQRTNGSPRLLIKYASESISGIPSRFSGSGSGTDFTLSINSVESEDIADYYCQQNNNWPTTFGAGTKLELK

SEQ ID NO: 15293 - protein, 107 aa, Artificial Sequence
  source: /note="Description of Artificial Sequence: Synthetic polypeptide"
DILLTQSPVILSVSPGERVSFSCRASQSIFTNIHWYQQRTNGSPRLLIKYASESISGIPSRFSGSGSGTDFTLSINSVESEDIADYYCQQNNNWPTTFGAGTKLELK

SEQ ID NO: 15294 - protein, 107 aa, Artificial Sequence
  source: /note="Description of Artificial Sequence: Synthetic polypeptide"
DILLTQSPVILSVSPGERVSFSCRASQSIITNIHWYQQRTNGSPRLLIKYASESISGIPSRFSGSGSGTDFTLSINSVESEDIADYYCQQNNNWPTTFGAGTKLELK

SEQ ID NO: 15295 - protein, 107 aa, Artificial Sequence
  source: /note="Description of Artificial Sequence: Synthetic polypeptide"
DILLTQSPVILSVSPGERVSFSCRASQSIMTNIHWYQQRTNGSPRLLIKYASESISGIPSRFSGSGSGTDFTLSINSVESEDIADYYCQQNNNWPTTFGAGTKLELK

SEQ ID NO: 15296 - protein, 107 aa, Artificial Sequence
  source: /note="Description of Artificial Sequence: Synthetic polypeptide"
DILLTQSPVILSVSPGERVSFSCRASQSIPTNIHWYQQRTNGSPRLLIKYASESISGIPSRFSGSGSGTDFTLSINSVESEDIADYYCQQNNNWPTTFGAGTKLELK

SEQ ID NO: 15297 - protein, 107 aa, Artificial Sequence
  source: /note="Description of Artificial Sequence: Synthetic polypeptide"
DILLTQSPVILSVSPGERVSFSCRASQSIQTNIHWYQQRTNGSPRLLIKYASESISGIPSRFSGSGSGTDFTLSINSVESEDIADYYCQQNNNWPTTFGAGTKLELK

SEQ ID NO: 15298 - protein, 107 aa, Artificial Sequence
  source: /note="Description of Artificial Sequence: Synthetic polypeptide"
DILLTQSPVILSVSPGERVSFSCRASQSISTNIHWYQQRTNGSPRLLIKYASESISGIPSRFSGSGSGTDFTLSINSVESEDIADYYCQQNNNWPTTFGAGTKLELK

SEQ ID NO: 15299 - protein, 107 aa, Artificial Sequence
  source: /note="Description of Artificial Sequence: Synthetic polypeptide"
DILLTQSPVILSVSPGERVSFSCRASQSIVTNIHWYQQRTNGSPRLLIKYASESISGIPSRFSGSGSGTDFTLSINSVESEDIADYYCQQNNNWPTTFGAGTKLELK

SEQ ID NO: 15300 - protein, 107 aa, Artificial Sequence
  source: /note="Description of Artificial Sequence: Synthetic polypeptide"
DILLTQSPVILSVSPGERVSFSCRASQSIYTNIHWYQQRTNGSPRLLIKYASESISGIPSRFSGSGSGTDFTLSINSVESEDIADYYCQQNNNWPTTFGAGTKLELK

SEQ ID NO: 15301 - protein, 107 aa, Artificial Sequence
  source: /note="Description of Artificial Sequence: Synthetic polypeptide"
DILLTQSPVILSVSPGERVSFSCRASQSILTNIHWYQQRTNGSPRLLIKYASESISGIPSRFSGSGSGTDFTLSINSVESEDIADYYCQQNNNWPTTFGAGTKLELK

SEQ ID NO: 15302 - protein, 107 aa, Artificial Sequence
  source: /note="Description of Artificial Sequence: Synthetic polypeptide"
DILLTQSPVILSVSPGERVSFSCRASQSIKTNIHWYQQRTNGSPRLLIKYASESISGIPSRFSGSGSGTDFTLSINSVESEDIADYYCQQNNNWPTTFGAGTKLELK

SEQ ID NO: 15303 - protein, 107 aa, Artificial Sequence
  source: /note="Description of Artificial Sequence: Synthetic polypeptide"
DILLTQSPVILSVSPGERVSFSCRASQSIHTNIHWYQQRTNGSPRLLIKYASESISGIPSRFSGSGSGTDFTLSINSVESEDIADYYCQQNNNWPTTFGAGTKLELK

SEQ ID NO: 15304 - protein, 107 aa, Artificial Sequence
  source: /note="Description of Artificial Sequence: Synthetic polypeptide"
DILLTQSPVILSVSPGERVSFSCRASQSIRTNIHWYQQRTNGSPRLLIKYASESISGIPSRFSGSGSGTDFTLSINSVESEDIADYYCQQNNNWPTTFGAGTKLELK

SEQ ID NO: 15305 - protein, 107 aa, Artificial Sequence
  source: /note="Description of Artificial Sequence: Synthetic polypeptide"
DILLTQSPVILSVSPGERVSFSCRASQSIGANIHWYQQRTNGSPRLLIKYASESISGIPSRFSGSGSGTDFTLSINSVESEDIADYYCQQNNNWPTTFGAGTKLELK

SEQ ID NO: 15306 - protein, 107 aa, Artificial Sequence
  source: /note="Description of Artificial Sequence: Synthetic polypeptide"
DILLTQSPVILSVSPGERVSFSCRASQSIGFNIHWYQQRTNGSPRLLIKYASESISGIPSRFSGSGSGTDFTLSINSVESEDIADYYCQQNNNWPTTFGAGTKLELK

SEQ ID NO: 15307 - protein, 107 aa, Artificial Sequence
  source: /note="Description of Artificial Sequence: Synthetic polypeptide"
DILLTQSPVILSVSPGERVSFSCRASQSIGGNIHWYQQRTNGSPRLLIKYASESISGIPSRFSGSGSGTDFTLSINSVESEDIADYYCQQNNNWPTTFGAGTKLELK

SEQ ID NO: 15308 - protein, 107 aa, Artificial Sequence
  source: /note="Description of Artificial Sequence: Synthetic polypeptide"
DILLTQSPVILSVSPGERVSFSCRASQSIGMNIHWYQQRTNGSPRLLIKYASESISGIPSRFSGSGSGTDFTLSINSVESEDIADYYCQQNNNWPTTFGAGTKLELK

SEQ ID NO: 15309 - protein, 107 aa, Artificial Sequence
  source: /note="Description of Artificial Sequence: Synthetic polypeptide"
DILLTQSPVILSVSPGERVSFSCRASQSIGSNIHWYQQRTNGSPRLLIKYASESISGIPSRFSGSGSGTDFTLSINSVESEDIADYYCQQNNNWPTTFGAGTKLELK

SEQ ID NO: 15310 - protein, 107 aa, Artificial Sequence
  source: /note="Description of Artificial Sequence: Synthetic polypeptide"
DILLTQSPVILSVSPGERVSFSCRASQSIGVNIHWYQQRTNGSPRLLIKYASESISGIPSRFSGSGSGTDFTLSINSVESEDIADYYCQQNNNWPTTFGAGTKLELK

SEQ ID NO: 15311 - protein, 107 aa, Artificial Sequence
  source: /note="Description of Artificial Sequence: Synthetic polypeptide"
DILLTQSPVILSVSPGERVSFSCRASQSIGWNIHWYQQRTNGSPRLLIKYASESISGIPSRFSGSGSGTDFTLSINSVESEDIADYYCQQNNNWPTTFGAGTKLELK

SEQ ID NO: 15312 - protein, 107 aa, Artificial Sequence
  source: /note="Description of Artificial Sequence: Synthetic polypeptide"
DILLTQSPVILSVSPGERVSFSCRASQSIGLNIHWYQQRTNGSPRLLIKYASESISGIPSRFSGSGSGTDFTLSINSVESEDIADYYCQQNNNWPTTFGAGTKLELK

SEQ ID NO: 15313 - protein, 107 aa, Artificial Sequence
  source: /note="Description of Artificial Sequence: Synthetic polypeptide"
DILLTQSPVILSVSPGERVSFSCRASQSIGKNIHWYQQRTNGSPRLLIKYASESISGIPSRFSGSGSGTDFTLSINSVESEDIADYYCQQNNNWPTTFGAGTKLELK

SEQ ID NO: 15314 - protein, 107 aa, Artificial Sequence
  source: /note="Description of Artificial Sequence: Synthetic polypeptide"
DILLTQSPVILSVSPGERVSFSCRASQSIGHNIHWYQQRTNGSPRLLIKYASESISGIPSRFSGSGSGTDFTLSINSVESEDIADYYCQQNNNWPTTFGAGTKLELK

SEQ ID NO: 15315 - protein, 107 aa, Artificial Sequence
  source: /note="Description of Artificial Sequence: Synthetic polypeptide"
DILLTQSPVILSVSPGERVSFSCRASQSIGTGIHWYQQRTNGSPRLLIKYASESISGIPSRFSGSGSGTDFTLSINSVESEDIADYYCQQNNNWPTTFGAGTKLELK

SEQ ID NO: 15316 - protein, 107 aa, Artificial Sequence
  source: /note="Description of Artificial Sequence: Synthetic polypeptide"
DILLTQSPVILSVSPGERVSFSCRASQSIGTNFHWYQQRTNGSPRLLIKYASESISGIPSRFSGSGSGTDFTLSINSVESEDIADYYCQQNNNWPTTFGAGTKLELK

SEQ ID NO: 15317 - protein, 107 aa, Artificial Sequence
  source: /note="Description of Artificial Sequence: Synthetic polypeptide"
DILLTQSPVILSVSPGERVSFSCRASQSIGTNGHWYQQRTNGSPRLLIKYASESISGIPSRFSGSGSGTDFTLSINSVESEDIADYYCQQNNNWPTTFGAGTKLELK

SEQ ID NO: 15318 - protein, 107 aa, Artificial Sequence
  source: /note="Description of Artificial Sequence: Synthetic polypeptide"
DILLTQSPVILSVSPGERVSFSCRASQSIGTNMHWYQQRTNGSPRLLIKYASESISGIPSRFSGSGSGTDFTLSINSVESEDIADYYCQQNNNWPTTFGAGTKLELK

SEQ ID NO: 15319 - protein, 107 aa, Artificial Sequence
  source: /note="Description of Artificial Sequence: Synthetic polypeptide"
DILLTQSPVILSVSPGERVSFSCRASQSIGTNTHWYQQRTNGSPRLLIKYASESISGIPSRFSGSGSGTDFTLSINSVESEDIADYYCQQNNNWPTTFGAGTKLELK

SEQ ID NO: 15320 - protein, 107 aa, Artificial Sequence
  source: /note="Description of Artificial Sequence: Synthetic polypeptide"
DILLTQSPVILSVSPGERVSFSCRASQSIGTNVHWYQQRTNGSPRLLIKYASESISGIPSRFSGSGSGTDFTLSINSVESEDIADYYCQQNNNWPTTFGAGTKLELK

SEQ ID NO: 15321 - protein, 107 aa, Artificial Sequence
  source: /note="Description of Artificial Sequence: Synthetic polypeptide"
DILLTQSPVILSVSPGERVSFSCRASQSIGTNHHWYQQRTNGSPRLLIKYASESISGIPSRFSGSGSGTDFTLSINSVESEDIADYYCQQNNNWPTTFGAGTKLELK

SEQ ID NO: 15322 - protein, 107 aa, Artificial Sequence
  source: /note="Description of Artificial Sequence: Synthetic polypeptide"
DILLTQSPVILSVSPGERVSFSCRASQSIGTNIHWYQQRTNGSPRLLMKYASESISGIPSRFSGSGSGTDFTLSINSVESEDIADYYCQQNNNWPTTFGAGTKLELK

SEQ ID NO: 15323 - protein, 107 aa, Artificial Sequence
  source: /note="Description of Artificial Sequence: Synthetic polypeptide"
DILLTQSPVILSVSPGERVSFSCRASQSIGTNIHWYQQRTNGSPRLLSKYASESISGIPSRFSGSGSGTDFTLSINSVESEDIADYYCQQNNNWPTTFGAGTKLELK

SEQ ID NO: 15324 - protein, 107 aa, Artificial Sequence
  source: /note="Description of Artificial Sequence: Synthetic polypeptide"
DILLTQSPVILSVSPGERVSFSCRASQSIGTNIHWYQQRTNGSPRLLLKYASESISGIPSRFSGSGSGTDFTLSINSVESEDIADYYCQQNNNWPTTFGAGTKLELK

SEQ ID NO: 15325 - protein, 107 aa, Artificial Sequence
  source: /note="Description of Artificial Sequence: Synthetic polypeptide"
DILLTQSPVILSVSPGERVSFSCRASQSIGTNIHWYQQRTNGSPRLLKKYASESISGIPSRFSGSGSGTDFTLSINSVESEDIADYYCQQNNNWPTTFGAGTKLELK

SEQ ID NO: 15326 - protein, 107 aa, Artificial Sequence
  source: /note="Description of Artificial Sequence: Synthetic polypeptide"
DILLTQSPVILSVSPGERVSFSCRASQSIGTNIHWYQQRTNGSPRLLIAYASESISGIPSRFSGSGSGTDFTLSINSVESEDIADYYCQQNNNWPTTFGAGTKLELK

SEQ ID NO: 15327 - protein, 107 aa, Artificial Sequence
  source: /note="Description of Artificial Sequence: Synthetic polypeptide"
DILLTQSPVILSVSPGERVSFSCRASQSIGTNIHWYQQRTNGSPRLLIEYASESISGIPSRFSGSGSGTDFTLSINSVESEDIADYYCQQNNNWPTTFGAGTKLELK

SEQ ID NO: 15328 - protein, 107 aa, Artificial Sequence
  source: /note="Description of Artificial Sequence: Synthetic polypeptide"
DILLTQSPVILSVSPGERVSFSCRASQSIGTNIHWYQQRTNGSPRLLIFYASESISGIPSRFSGSGSGTDFTLSINSVESEDIADYYCQQNNNWPTTFGAGTKLELK

SEQ ID NO: 15329 - protein, 107 aa, Artificial Sequence
  source: /note="Description of Artificial Sequence: Synthetic polypeptide"
DILLTQSPVILSVSPGERVSFSCRASQSIGTNIHWYQQRTNGSPRLLIGYASESISGIPSRFSGSGSGTDFTLSINSVESEDIADYYCQQNNNWPTTFGAGTKLELK

SEQ ID NO: 15330 - protein, 107 aa, Artificial Sequence
  source: /note="Description of Artificial Sequence: Synthetic polypeptide"
DILLTQSPVILSVSPGERVSFSCRASQSIGTNIHWYQQRTNGSPRLLINYASESISGIPSRFSGSGSGTDFTLSINSVESEDIADYYCQQNNNWPTTFGAGTKLELK

SEQ ID NO: 15331 - protein, 107 aa, Artificial Sequence
  source: /note="Description of Artificial Sequence: Synthetic polypeptide"
DILLTQSPVILSVSPGERVSFSCRASQSIGTNIHWYQQRTNGSPRLLIQYASESISGIPSRFSGSGSGTDFTLSINSVESEDIADYYCQQNNNWPTTFGAGTKLELK

SEQ ID NO: 15332 - protein, 107 aa, Artificial Sequence
  source: /note="Description of Artificial Sequence: Synthetic polypeptide"
DILLTQSPVILSVSPGERVSFSCRASQSIGTNIHWYQQRTNGSPRLLISYASESISGIPSRFSGSGSGTDFTLSINSVESEDIADYYCQQNNNWPTTFGAGTKLELK

SEQ ID NO: 15333 - protein, 107 aa, Artificial Sequence
  source: /note="Description of Artificial Sequence: Synthetic polypeptide"
DILLTQSPVILSVSPGERVSFSCRASQSIGTNIHWYQQRTNGSPRLLITYASESISGIPSRFSGSGSGTDFTLSINSVESEDIADYYCQQNNNWPTTFGAGTKLELK

SEQ ID NO: 15334 - protein, 107 aa, Artificial Sequence
  source: /note="Description of Artificial Sequence: Synthetic polypeptide"
DILLTQSPVILSVSPGERVSFSCRASQSIGTNIHWYQQRTNGSPRLLIVYASESISGIPSRFSGSGSGTDFTLSINSVESEDIADYYCQQNNNWPTTFGAGTKLELK

SEQ ID NO: 15335 - protein, 107 aa, Artificial Sequence
  source: /note="Description of Artificial Sequence: Synthetic polypeptide"
DILLTQSPVILSVSPGERVSFSCRASQSIGTNIHWYQQRTNGSPRLLIYYASESISGIPSRFSGSGSGTDFTLSINSVESEDIADYYCQQNNNWPTTFGAGTKLELK

SEQ ID NO: 15336 - protein, 107 aa, Artificial Sequence
  source: /note="Description of Artificial Sequence: Synthetic polypeptide"
DILLTQSPVILSVSPGERVSFSCRASQSIGTNIHWYQQRTNGSPRLLILYASESISGIPSRFSGSGSGTDFTLSINSVESEDIADYYCQQNNNWPTTFGAGTKLELK

SEQ ID NO: 15337 - protein, 107 aa, Artificial Sequence
  source: /note="Description of Artificial Sequence: Synthetic polypeptide"
DILLTQSPVILSVSPGERVSFSCRASQSIGTNIHWYQQRTNGSPRLLIHYASESISGIPSRFSGSGSGTDFTLSINSVESEDIADYYCQQNNNWPTTFGAGTKLELK

SEQ ID NO: 15338 - protein, 107 aa, Artificial Sequence
  source: /note="Description of Artificial Sequence: Synthetic polypeptide"
DILLTQSPVILSVSPGERVSFSCRASQSIGTNIHWYQQRTNGSPRLLIRYASESISGIPSRFSGSGSGTDFTLSINSVESEDIADYYCQQNNNWPTTFGAGTKLELK

SEQ ID NO: 15339 - protein, 107 aa, Artificial Sequence
  source: /note="Description of Artificial Sequence: Synthetic polypeptide"
DILLTQSPVILSVSPGERVSFSCRASQSIGTNIHWYQQRTNGSPRLLIKYTSESISGIPSRFSGSGSGTDFTLSINSVESEDIADYYCQQNNNWPTTFGAGTKLELK

SEQ ID NO: 15340 - protein, 107 aa, Artificial Sequence
  source: /note="Description of Artificial Sequence: Synthetic polypeptide"
DILLTQSPVILSVSPGERVSFSCRASQSIGTNIHWYQQRTNGSPRLLIKYLSESISGIPSRFSGSGSGTDFTLSINSVESEDIADYYCQQNNNWPTTFGAGTKLELK

SEQ ID NO: 15341 - protein, 107 aa, Artificial Sequence
  source: /note="Description of Artificial Sequence: Synthetic polypeptide"
DILLTQSPVILSVSPGERVSFSCRASQSIGTNIHWYQQRTNGSPRLLIKYAAESISGIPSRFSGSGSGTDFTLSINSVESEDIADYYCQQNNNWPTTFGAGTKLELK

SEQ ID NO: 15342 - protein, 107 aa, Artificial Sequence
  source: /note="Description of Artificial Sequence: Synthetic polypeptide"
DILLTQSPVILSVSPGERVSFSCRASQSIGTNIHWYQQRTNGSPRLLIKYACESISGIPSRFSGSGSGTDFTLSINSVESEDIADYYCQQNNNWPTTFGAGTKLELK

SEQ ID NO: 15343 - protein, 107 aa, Artificial Sequence
  source: /note="Description of Artificial Sequence: Synthetic polypeptide"
DILLTQSPVILSVSPGERVSFSCRASQSIGTNIHWYQQRTNGSPRLLIKYADESISGIPSRFSGSGSGTDFTLSINSVESEDIADYYCQQNNNWPTTFGAGTKLELK

SEQ ID NO: 15344 - protein, 107 aa, Artificial Sequence
  source: /note="Description of Artificial Sequence: Synthetic polypeptide"
DILLTQSPVILSVSPGERVSFSCRASQSIGTNIHWYQQRTNGSPRLLIKYAEESISGIPSRFSGSGSGTDFTLSINSVESEDIADYYCQQNNNWPTTFGAGTKLELK

SEQ ID NO: 15345 - protein, 107 aa, Artificial Sequence
  source: /note="Description of Artificial Sequence: Synthetic polypeptide"
DILLTQSPVILSVSPGERVSFSCRASQSIGTNIHWYQQRTNGSPRLLIKYAGESISGIPSRFSGSGSGTDFTLSINSVESEDIADYYCQQNNNWPTTFGAGTKLELK

SEQ ID NO: 15346 - protein, 107 aa, Artificial Sequence
  source: /note="Description of Artificial Sequence: Synthetic polypeptide"
DILLTQSPVILSVSPGERVSFSCRASQSIGTNIHWYQQRTNGSPRLLIKYAIESISGIPSRFSGSGSGTDFTLSINSVESEDIADYYCQQNNNWPTTFGAGTKLELK

SEQ ID NO: 15347 - protein, 107 aa, Artificial Sequence
  source: /note="Description of Artificial Sequence: Synthetic polypeptide"
DILLTQSPVILSVSPGERVSFSCRASQSIGTNIHWYQQRTNGSPRLLIKYAMESISGIPSRFSGSGSGTDFTLSINSVESEDIADYYCQQNNNWPTTFGAGTKLELK

SEQ ID NO: 15348 - protein, 107 aa, Artificial Sequence
  source: /note="Description of Artificial Sequence: Synthetic polypeptide"
DILLTQSPVILSVSPGERVSFSCRASQSIGTNIHWYQQRTNGSPRLLIKYAQESISGIPSRFSGSGSGTDFTLSINSVESEDIADYYCQQNNNWPTTFGAGTKLELK

SEQ ID NO: 15349 - protein, 107 aa, Artificial Sequence
  source: /note="Description of Artificial Sequence: Synthetic polypeptide"
DILLTQSPVILSVSPGERVSFSCRASQSIGTNIHWYQQRTNGSPRLLIKYAVESISGIPSRFSGSGSGTDFTLSINSVESEDIADYYCQQNNNWPTTFGAGTKLELK

SEQ ID NO: 15350 - protein, 107 aa, Artificial Sequence
  source: /note="Description of Artificial Sequence: Synthetic polypeptide"
DILLTQSPVILSVSPGERVSFSCRASQSIGTNIHWYQQRTNGSPRLLIKYAWESISGIPSRFSGSGSGTDFTLSINSVESEDIADYYCQQNNNWPTTFGAGTKLELK

SEQ ID NO: 15351 - protein, 107 aa, Artificial Sequence
  source: /note="Description of Artificial Sequence: Synthetic polypeptide"
DILLTQSPVILSVSPGERVSFSCRASQSIGTNIHWYQQRTNGSPRLLIKYARESISGIPSRFSGSGSGTDFTLSINSVESEDIADYYCQQNNNWPTTFGAGTKLELK

SEQ ID NO: 15352 - protein, 107 aa, Artificial Sequence
  source: /note="Description of Artificial Sequence: Synthetic polypeptide"
DILLTQSPVILSVSPGERVSFSCRASQSIGTNIHWYQQRTNGSPRLLIKYAKESISGIPSRFSGSGSGTDFTLSINSVESEDIADYYCQQNNNWPTTFGAGTKLELK

SEQ ID NO: 15353 - protein, 107 aa, Artificial Sequence
  source: /note="Description of Artificial Sequence: Synthetic polypeptide"
DILLTQSPVILSVSPGERVSFSCRASQSIGTNIHWYQQRTNGSPRLLIKYASGSISGIPSRFSGSGSGTDFTLSINSVESEDIADYYCQQNNNWPTTFGAGTKLELK

SEQ ID NO: 15354 - protein, 107 aa, Artificial Sequence
  source: /note="Description of Artificial Sequence: Synthetic polypeptide"
DILLTQSPVILSVSPGERVSFSCRASQSIGTNIHWYQQRTNGSPRLLIKYASEMISGIPSRFSGSGSGTDFTLSINSVESEDIADYYCQQNNNWPTTFGAGTKLELK

SEQ ID NO: 15355 - protein, 107 aa, Artificial Sequence
  source: /note="Description of Artificial Sequence: Synthetic polypeptide"
DILLTQSPVILSVSPGERVSFSCRASQSIGTNIHWYQQRTNGSPRLLIKYASESASGIPSRFSGSGSGTDFTLSINSVESEDIADYYCQQNNNWPTTFGAGTKLELK

SEQ ID NO: 15356 - protein, 107 aa, Artificial Sequence
  source: /note="Description of Artificial Sequence: Synthetic polypeptide"
DILLTQSPVILSVSPGERVSFSCRASQSIGTNIHWYQQRTNGSPRLLIKYASESFSGIPSRFSGSGSGTDFTLSINSVESEDIADYYCQQNNNWPTTFGAGTKLELK

SEQ ID NO: 15357 - protein, 107 aa, Artificial Sequence
  source: /note="Description of Artificial Sequence: Synthetic polypeptide"
DILLTQSPVILSVSPGERVSFSCRASQSIGTNIHWYQQRTNGSPRLLIKYASESIGGIPSRFSGSGSGTDFTLSINSVESEDIADYYCQQNNNWPTTFGAGTKLELK

SEQ ID NO: 15358 - protein, 107 aa, Artificial Sequence
  source: /note="Description of Artificial Sequence: Synthetic polypeptide"
DILLTQSPVILSVSPGERVSFSCRASQSIGTNIHWYQQRTNGSPRLLIKYASESILGIPSRFSGSGSGTDFTLSINSVESEDIADYYCQQNNNWPTTFGAGTKLELK

SEQ ID NO: 15359 - protein, 107 aa, Artificial Sequence
  source: /note="Description of Artificial Sequence: Synthetic polypeptide"
DILLTQSPVILSVSPGERVSFSCRASQSIGTNIHWYQQRTNGSPRLLIKYASESIAGIPSRFSGSGSGTDFTLSINSVESEDIADYYCQQNNNWPTTFGAGTKLELK

SEQ ID NO: 15360 - protein, 107 aa, Artificial Sequence
  source: /note="Description of Artificial Sequence: Synthetic polypeptide"
DILLTQSPVILSVSPGERVSFSCRASQSIGTNIHWYQQRTNGSPRLLIKYASESICGIPSRFSGSGSGTDFTLSINSVESEDIADYYCQQNNNWPTTFGAGTKLELK

SEQ ID NO: 15361 - protein, 107 aa, Artificial Sequence
  source: /note="Description of Artificial Sequence: Synthetic polypeptide"
DILLTQSPVILSVSPGERVSFSCRASQSIGTNIHWYQQRTNGSPRLLIKYASESIDGIPSRFSGSGSGTDFTLSINSVESEDIADYYCQQNNNWPTTFGAGTKLELK

SEQ ID NO: 15362 - protein, 107 aa, Artificial Sequence
  source: /note="Description of Artificial Sequence: Synthetic polypeptide"
DILLTQSPVILSVSPGERVSFSCRASQSIGTNIHWYQQRTNGSPRLLIKYASESIEGIPSRFSGSGSGTDFTLSINSVESEDIADYYCQQNNNWPTTFGAGTKLELK

SEQ ID NO: 15363 - protein, 107 aa, Artificial Sequence
  source: /note="Description of Artificial Sequence: Synthetic polypeptide"
DILLTQSPVILSVSPGERVSFSCRASQSIGTNIHWYQQRTNGSPRLLIKYASESIFGIPSRFSGSGSGTDFTLSINSVESEDIADYYCQQNNNWPTTFGAGTKLELK

SEQ ID NO: 15364 - protein, 107 aa, Artificial Sequence
  source: /note="Description of Artificial Sequence: Synthetic polypeptide"
DILLTQSPVILSVSPGERVSFSCRASQSIGTNIHWYQQRTNGSPRLLIKYASESINGIPSRFSGSGSGTDFTLSINSVESEDIADYYCQQNNNWPTTFGAGTKLELK

SEQ ID NO: 15365 - protein, 107 aa, Artificial Sequence
  source: /note="Description of Artificial Sequence: Synthetic polypeptide"
DILLTQSPVILSVSPGERVSFSCRASQSIGTNIHWYQQRTNGSPRLLIKYASESIPGIPSRFSGSGSGTDFTLSINSVESEDIADYYCQQNNNWPTTFGAGTKLELK

SEQ ID NO: 15366 - protein, 107 aa, Artificial Sequence
  source: /note="Description of Artificial Sequence: Synthetic polypeptide"
DILLTQSPVILSVSPGERVSFSCRASQSIGTNIHWYQQRTNGSPRLLIKYASESIQGIPSRFSGSGSGTDFTLSINSVESEDIADYYCQQNNNWPTTFGAGTKLELK

SEQ ID NO: 15367 - protein, 107 aa, Artificial Sequence
  source: /note="Description of Artificial Sequence: Synthetic polypeptide"
DILLTQSPVILSVSPGERVSFSCRASQSIGTNIHWYQQRTNGSPRLLIKYASESIVGIPSRFSGSGSGTDFTLSINSVESEDIADYYCQQNNNWPTTFGAGTKLELK

SEQ ID NO: 15368 - protein, 107 aa, Artificial Sequence
  source: /note="Description of Artificial Sequence: Synthetic polypeptide"
DILLTQSPVILSVSPGERVSFSCRASQSIGTNIHWYQQRTNGSPRLLIKYASESIWGIPSRFSGSGSGTDFTLSINSVESEDIADYYCQQNNNWPTTFGAGTKLELK

SEQ ID NO: 15369 - protein, 107 aa, Artificial Sequence
  source: /note="Description of Artificial Sequence: Synthetic polypeptide"
DILLTQSPVILSVSPGERVSFSCRASQSIGTNIHWYQQRTNGSPRLLIKYASESIHGIPSRFSGSGSGTDFTLSINSVESEDIADYYCQQNNNWPTTFGAGTKLELK

SEQ ID NO: 15370 - protein, 107 aa, Artificial Sequence
  source: /note="Description of Artificial Sequence: Synthetic polypeptide"
DILLTQSPVILSVSPGERVSFSCRASQSIGTNIHWYQQRTNGSPRLLIKYASESIRGIPSRFSGSGSGTDFTLSINSVESEDIADYYCQQNNNWPTTFGAGTKLELK

SEQ ID NO: 15371 - protein, 107 aa, Artificial Sequence
  source: /note="Description of Artificial Sequence: Synthetic polypeptide"
DILLTQSPVILSVSPGERVSFSCRASQSIGTNIHWYQQRTNGSPRLLIKYASESIKGIPSRFSGSGSGTDFTLSINSVESEDIADYYCQQNNNWPTTFGAGTKLELK

SEQ ID NO: 15372 - protein, 107 aa, Artificial Sequence
  source: /note="Description of Artificial Sequence: Synthetic polypeptide"
DILLTQSPVILSVSPGERVSFSCRASQSIGTNIHWYQQRTNGSPRLLIKYASESISGIPSRFSGSGSGTDFTLSINSVESEDIADFYCQQNNNWPTTFGAGTKLELK

SEQ ID NO: 15373 - protein, 107 aa, Artificial Sequence
  source: /note="Description of Artificial Sequence: Synthetic polypeptide"
DILLTQSPVILSVSPGERVSFSCRASQSIGTNIHWYQQRTNGSPRLLIKYASESISGIPSRFSGSGSGTDFTLSINSVESEDIADMYCQQNNNWPTTFGAGTKLELK

SEQ ID NO: 15374 - protein, 107 aa, Artificial Sequence
  source: /note="Description of Artificial Sequence: Synthetic polypeptide"
DILLTQSPVILSVSPGERVSFSCRASQSIGTNIHWYQQRTNGSPRLLIKYASESISGIPSRFSGSGSGTDFTLSINSVESEDIADHYCQQNNNWPTTFGAGTKLELK

SEQ ID NO: 15375 - protein, 107 aa, Artificial Sequence
  source: /note="Description of Artificial Sequence: Synthetic polypeptide"
DILLTQSPVILSVSPGERVSFSCRASQSIGTNIHWYQQRTNGSPRLLIKYASESISGIPSRFSGSGSGTDFTLSINSVESEDIADYLCQQNNNWPTTFGAGTKLELK

SEQ ID NO: 15376 - protein, 107 aa, Artificial Sequence
  source: /note="Description of Artificial Sequence: Synthetic polypeptide"
DILLTQSPVILSVSPGERVSFSCRASQSIGTNIHWYQQRTNGSPRLLIKYASESISGIPSRFSGSGSGTDFTLSINSVESEDIADYCCQQNNNWPTTFGAGTKLELK

SEQ ID NO: 15377 - protein, 107 aa, Artificial Sequence
  source: /note="Description of Artificial Sequence: Synthetic polypeptide"
DILLTQSPVILSVSPGERVSFSCRASQSIGTNIHWYQQRTNGSPRLLIKYASESISGIPSRFSGSGSGTDFTLSINSVESEDIADYDCQQNNNWPTTFGAGTKLELK

SEQ ID NO: 15378 - protein, 107 aa, Artificial Sequence
  source: /note="Description of Artificial Sequence: Synthetic polypeptide"
DILLTQSPVILSVSPGERVSFSCRASQSIGTNIHWYQQRTNGSPRLLIKYASESISGIPSRFSGSGSGTDFTLSINSVESEDIADYFCQQNNNWPTTFGAGTKLELK

SEQ ID NO: 15379 - protein, 107 aa, Artificial Sequence
  source: /note="Description of Artificial Sequence: Synthetic polypeptide"
DILLTQSPVILSVSPGERVSFSCRASQSIGTNIHWYQQRTNGSPRLLIKYASESISGIPSRFSGSGSGTDFTLSINSVESEDIADYGCQQNNNWPTTFGAGTKLELK

SEQ ID NO: 15380 - protein, 107 aa, Artificial Sequence
  source: /note="Description of Artificial Sequence: Synthetic polypeptide"
DILLTQSPVILSVSPGERVSFSCRASQSIGTNIHWYQQRTNGSPRLLIKYASESISGIPSRFSGSGSGTDFTLSINSVESEDIADYICQQNNNWPTTFGAGTKLELK

SEQ ID NO: 15381 - protein, 107 aa, Artificial Sequence
  source: /note="Description of Artificial Sequence: Synthetic polypeptide"
DILLTQSPVILSVSPGERVSFSCRASQSIGTNIHWYQQRTNGSPRLLIKYASESISGIPSRFSGSGSGTDFTLSINSVESEDIADYNCQQNNNWPTTFGAGTKLELK

SEQ ID NO: 15382 - protein, 107 aa, Artificial Sequence
  source: /note="Description of Artificial Sequence: Synthetic polypeptide"
DILLTQSPVILSVSPGERVSFSCRASQSIGTNIHWYQQRTNGSPRLLIKYASESISGIPSRFSGSGSGTDFTLSINSVESEDIADYPCQQNNNWPTTFGAGTKLELK

SEQ ID NO: 15383 - protein, 107 aa, Artificial Sequence
  source: /note="Description of Artificial Sequence: Synthetic polypeptide"
DILLTQSPVILSVSPGERVSFSCRASQSIGTNIHWYQQRTNGSPRLLIKYASESISGIPSRFSGSGSGTDFTLSINSVESEDIADYSCQQNNNWPTTFGAGTKLELK

SEQ ID NO: 15384 - protein, 107 aa, Artificial Sequence
  source: /note="Description of Artificial Sequence: Synthetic polypeptide"
DILLTQSPVILSVSPGERVSFSCRASQSIGTNIHWYQQRTNGSPRLLIKYASESISGIPSRFSGSGSGTDFTLSINSVESEDIADYTCQQNNNWPTTFGAGTKLELK

SEQ ID NO: 15385 - protein, 107 aa, Artificial Sequence
  source: /note="Description of Artificial Sequence: Synthetic polypeptide"
DILLTQSPVILSVSPGERVSFSCRASQSIGTNIHWYQQRTNGSPRLLIKYASESISGIPSRFSGSGSGTDFTLSINSVESEDIADYVCQQNNNWPTTFGAGTKLELK

SEQ ID NO: 15386 - protein, 107 aa, Artificial Sequence
  source: /note="Description of Artificial Sequence: Synthetic polypeptide"
DILLTQSPVILSVSPGERVSFSCRASQSIGTNIHWYQQRTNGSPRLLIKYASESISGIPSRFSGSGSGTDFTLSINSVESEDIADYWCQQNNNWPTTFGAGTKLELK

SEQ ID NO: 15387 - protein, 107 aa, Artificial Sequence
  source: /note="Description of Artificial Sequence: Synthetic polypeptide"
DILLTQSPVILSVSPGERVSFSCRASQSIGTNIHWYQQRTNGSPRLLIKYASESISGIPSRFSGSGSGTDFTLSINSVESEDIADYKCQQNNNWPTTFGAGTKLELK

SEQ ID NO: 15388 - protein, 107 aa, Artificial Sequence
  source: /note="Description of Artificial Sequence: Synthetic polypeptide"
DILLTQSPVILSVSPGERVSFSCRASQSIGTNIHWYQQRTNGSPRLLIKYASESISGIPSRFSGSGSGTDFTLSINSVESEDIADYHCQQNNNWPTTFGAGTKLELK

SEQ ID NO: 15389 - protein, 107 aa, Artificial Sequence
  source: /note="Description of Artificial Sequence: Synthetic polypeptide"
DILLTQSPVILSVSPGERVSFSCRASQSIGTNIHWYQQRTNGSPRLLIKYASESISGIPSRFSGSGSGTDFTLSINSVESEDIADYRCQQNNNWPTTFGAGTKLELK

SEQ ID NO: 15390 - protein, 107 aa, Artificial Sequence
  source: /note="Description of Artificial Sequence: Synthetic polypeptide"
DILLTQSPVILSVSPGERVSFSCRASQSIGTNIHWYQQRTNGSPRLLIKYASESISGIPSRFSGSGSGTDFTLSINSVESEDIADYYCEQNNNWPTTFGAGTKLELK

SEQ ID NO: 15391 - protein, 107 aa, Artificial Sequence
  source: /note="Description of Artificial Sequence: Synthetic polypeptide"
DILLTQSPVILSVSPGERVSFSCRASQSIGTNIHWYQQRTNGSPRLLIKYASESISGIPSRFSGSGSGTDFTLSINSVESEDIADYYCQQLNNWPTTFGAGTKLELK

SEQ ID NO: 15392 - protein, 107 aa, Artificial Sequence
  source: /note="Description of Artificial Sequence: Synthetic polypeptide"
DILLTQSPVILSVSPGERVSFSCRASQSIGTNIHWYQQRTNGSPRLLIKYASESISGIPSRFSGSGSGTDFTLSINSVESEDIADYYCQQANNWPTTFGAGTKLELK

SEQ ID NO: 15393 - protein, 107 aa, Artificial Sequence
  source: /note="Description of Artificial Sequence: Synthetic polypeptide"
DILLTQSPVILSVSPGERVSFSCRASQSIGTNIHWYQQRTNGSPRLLIKYASESISGIPSRFSGSGSGTDFTLSINSVESEDIADYYCQQCNNWPTTFGAGTKLELK

SEQ ID NO: 15394 - protein, 107 aa, Artificial Sequence
  source: /note="Description of Artificial Sequence: Synthetic polypeptide"
DILLTQSPVILSVSPGERVSFSCRASQSIGTNIHWYQQRTNGSPRLLIKYASESISGIPSRFSGSGSGTDFTLSINSVESEDIADYYCQQINNWPTTFGAGTKLELK

SEQ ID NO: 15395 - protein, 107 aa, Artificial Sequence
  source: /note="Description of Artificial Sequence: Synthetic polypeptide"
DILLTQSPVILSVSPGERVSFSCRASQSIGTNIHWYQQRTNGSPRLLIKYASESISGIPSRFSGSGSGTDFTLSINSVESEDIADYYCQQMNNWPTTFGAGTKLELK

SEQ ID NO: 15396 - protein, 107 aa, Artificial Sequence
  source: /note="Description of Artificial Sequence: Synthetic polypeptide"
DILLTQSPVILSVSPGERVSFSCRASQSIGTNIHWYQQRTNGSPRLLIKYASESISGIPSRFSGSGSGTDFTLSINSVESEDIADYYCQQSNNWPTTFGAGTKLELK

SEQ ID NO: 15397 - protein, 107 aa, Artificial Sequence
  source: /note="Description of Artificial Sequence: Synthetic polypeptide"
DILLTQSPVILSVSPGERVSFSCRASQSIGTNIHWYQQRTNGSPRLLIKYASESISGIPSRFSGSGSGTDFTLSINSVESEDIADYYCQQTNNWPTTFGAGTKLELK

SEQ ID NO: 15398 - protein, 107 aa, Artificial Sequence
  source: /note="Description of Artificial Sequence: Synthetic polypeptide"
DILLTQSPVILSVSPGERVSFSCRASQSIGTNIHWYQQRTNGSPRLLIKYASESISGIPSRFSGSGSGTDFTLSINSVESEDIADYYCQQVNNWPTTFGAGTKLELK

SEQ ID NO: 15399 - protein, 107 aa, Artificial Sequence
  source: /note="Description of Artificial Sequence: Synthetic polypeptide"
DILLTQSPVILSVSPGERVSFSCRASQSIGTNIHWYQQRTNGSPRLLIKYASESISGIPSRFSGSGSGTDFTLSINSVESEDIADYYCQQHNNWPTTFGAGTKLELK

SEQ ID NO: 15400 - protein, 107 aa, Artificial Sequence
  source: /note="Description of Artificial Sequence: Synthetic polypeptide"
DILLTQSPVILSVSPGERVSFSCRASQSIGTNIHWYQQRTNGSPRLLIKYASESISGIPSRFSGSGSGTDFTLSINSVESEDIADYYCQQRNNWPTTFGAGTKLELK

SEQ ID NO: 15401 - protein, 107 aa, Artificial Sequence
  source: /note="Description of Artificial Sequence: Synthetic polypeptide"
DILLTQSPVILSVSPGERVSFSCRASQSIGTNIHWYQQRTNGSPRLLIKYASESISGIPSRFSGSGSGTDFTLSINSVESEDIADYYCQQNCNWPTTFGAGTKLELK

SEQ ID NO: 15402 - protein, 107 aa, Artificial Sequence
  source: /note="Description of Artificial Sequence: Synthetic polypeptide"
DILLTQSPVILSVSPGERVSFSCRASQSIGTNIHWYQQRTNGSPRLLIKYASESISGIPSRFSGSGSGTDFTLSINSVESEDIADYYCQQNDNWPTTFGAGTKLELK

SEQ ID NO: 15403 - protein, 107 aa, Artificial Sequence
  source: /note="Description of Artificial Sequence: Synthetic polypeptide"
DILLTQSPVILSVSPGERVSFSCRASQSIGTNIHWYQQRTNGSPRLLIKYASESISGIPSRFSGSGSGTDFTLSINSVESEDIADYYCQQNLNWPTTFGAGTKLELK

SEQ ID NO: 15404 - protein, 107 aa, Artificial Sequence
  source: /note="Description of Artificial Sequence: Synthetic polypeptide"
DILLTQSPVILSVSPGERVSFSCRASQSIGTNIHWYQQRTNGSPRLLIKYASESISGIPSRFSGSGSGTDFTLSINSVESEDIADYYCQQNMNWPTTFGAGTKLELK

SEQ ID NO: 15405 - protein, 107 aa, Artificial Sequence
  source: /note="Description of Artificial Sequence: Synthetic polypeptide"
DILLTQSPVILSVSPGERVSFSCRASQSIGTNIHWYQQRTNGSPRLLIKYASESISGIPSRFSGSGSGTDFTLSINSVESEDIADYYCQQNSNWPTTFGAGTKLELK

SEQ ID NO: 15406 - protein, 107 aa, Artificial Sequence
  source: /note="Description of Artificial Sequence: Synthetic polypeptide"
DILLTQSPVILSVSPGERVSFSCRASQSIGTNIHWYQQRTNGSPRLLIKYASESISGIPSRFSGSGSGTDFTLSINSVESEDIADYYCQQNTNWPTTFGAGTKLELK

SEQ ID NO: 15407 - protein, 107 aa, Artificial Sequence
  source: /note="Description of Artificial Sequence: Synthetic polypeptide"
DILLTQSPVILSVSPGERVSFSCRASQSIGTNIHWYQQRTNGSPRLLIKYASESISGIPSRFSGSGSGTDFTLSINSVESEDIADYYCQQNVNWPTTFGAGTKLELK

SEQ ID NO: 15408 - protein, 107 aa, Artificial Sequence
  source: /note="Description of Artificial Sequence: Synthetic polypeptide"
DILLTQSPVILSVSPGERVSFSCRASQSIGTNIHWYQQRTNGSPRLLIKYASESISGIPSRFSGSGSGTDFTLSINSVESEDIADYYCQQNWNWPTTFGAGTKLELK

SEQ ID NO: 15409 - protein, 107 aa, Artificial Sequence
  source: /note="Description of Artificial Sequence: Synthetic polypeptide"
DILLTQSPVILSVSPGERVSFSCRASQSIGTNIHWYQQRTNGSPRLLIKYASESISGIPSRFSGSGSGTDFTLSINSVESEDIADYYCQQNYNWPTTFGAGTKLELK

SEQ ID NO: 15410 - protein, 107 aa, Artificial Sequence
  source: /note="Description of Artificial Sequence: Synthetic polypeptide"
DILLTQSPVILSVSPGERVSFSCRASQSIGTNIHWYQQRTNGSPRLLIKYASESISGIPSRFSGSGSGTDFTLSINSVESEDIADYYCQQNHNWPTTFGAGTKLELK

SEQ ID NO: 15411 - protein, 107 aa, Artificial Sequence
  source: /note="Description of Artificial Sequence: Synthetic polypeptide"
DILLTQSPVILSVSPGERVSFSCRASQSIGTNIHWYQQRTNGSPRLLIKYASESISGIPSRFSGSGSGTDFTLSINSVESEDIADYYCQQNKNWPTTFGAGTKLELK

SEQ ID NO: 15412 - protein, 107 aa, Artificial Sequence
  source: /note="Description of Artificial Sequence: Synthetic polypeptide"
DILLTQSPVILSVSPGERVSFSCRASQSIGTNIHWYQQRTNGSPRLLIKYASESISGIPSRFSGSGSGTDFTLSINSVESEDIADYYCQQNRNWPTTFGAGTKLELK

SEQ ID NO: 15413 - protein, 107 aa, Artificial Sequence
  source: /note="Description of Artificial Sequence: Synthetic polypeptide"
DILLTQSPVILSVSPGERVSFSCRASQSIGTNIHWYQQRTNGSPRLLIKYASESISGIPSRFSGSGSGTDFTLSINSVESEDIADYYCQQNNTWPTTFGAGTKLELK

SEQ ID NO: 15414 - protein, 107 aa, Artificial Sequence
  source: /note="Description of Artificial Sequence: Synthetic polypeptide"
DILLTQSPVILSVSPGERVSFSCRASQSIGTNIHWYQQRTNGSPRLLIKYASESISGIPSRFSGSGSGTDFTLSINSVESEDIADYYCQQNNNWPLTFGAGTKLELK

SEQ ID NO: 15415 - protein, 107 aa, Artificial Sequence
  source: /note="Description of Artificial Sequence: Synthetic polypeptide"
DILLTQSPVILSVSPGERVSFSCRASQSIGTNIHWYQQRTNGSPRLLIKYASESISGIPSRFSGSGSGTDFTLSINSVESEDIADYYCQQNNNWPCTFGAGTKLELK

SEQ ID NO: 15416 - protein, 107 aa, Artificial Sequence
  source: /note="Description of Artificial Sequence: Synthetic polypeptide"
DILLTQSPVILSVSPGERVSFSCRASQSIGTNIHWYQQRTNGSPRLLIKYASESISGIPSRFSGSGSGTDFTLSINSVESEDIADYYCQQNNNWPMTFGAGTKLELK

SEQ ID NO: 15417 - protein, 107 aa, Artificial Sequence
  source: /note="Description of Artificial Sequence: Synthetic polypeptide"
DILLTQSPVILSVSPGERVSFSCRASQSIGTNIHWYQQRTNGSPRLLIKYASESISGIPSRFSGSGSGTDFTLSINSVESEDIADYYCQQNNNWPVTFGAGTKLELK

SEQ ID NO: 15418 - protein, 107 aa, Artificial Sequence
  source: /note="Description of Artificial Sequence: Synthetic polypeptide"
DILLTQSPVILSVSPGERVSFSCRASQSIGTNIHWYQQRTNGSPRLLIKYASESISGIPSRFSGSGSGTDFTLSINSVESEDIADYYCQQNNNWPTLFGAGTKLELK

SEQ ID NO: 15419 - protein, 107 aa, Artificial Sequence
  source: /note="Description of Artificial Sequence: Synthetic polypeptide"
DILLTQSPVILSVSPGERVSFSCRASQSIGTNIHWYQQRTNGSPRLLIKYASESISGIPSRFSGSGSGTDFTLSINSVESEDIADYYCQQNNNWPTAFGAGTKLELK

SEQ ID NO: 15420 - protein, 107 aa, Artificial Sequence
  source: /note="Description of Artificial Sequence: Synthetic polypeptide"
DILLTQSPVILSVSPGERVSFSCRASQSIGTNIHWYQQRTNGSPRLLIKYASESISGIPSRFSGSGSGTDFTLSINSVESEDIADYYCQQNNNWPTDFGAGTKLELK

SEQ ID NO: 15421 - protein, 107 aa, Artificial Sequence
  source: /note="Description of Artificial Sequence: Synthetic polypeptide"
DILLTQSPVILSVSPGERVSFSCRASQSIGTNIHWYQQRTNGSPRLLIKYASESISGIPSRFSGSGSGTDFTLSINSVESEDIADYYCQQNNNWPTGFGAGTKLELK

SEQ ID NO: 15422 - protein, 107 aa, Artificial Sequence
  source: /note="Description of Artificial Sequence: Synthetic polypeptide"
DILLTQSPVILSVSPGERVSFSCRASQSIGTNIHWYQQRTNGSPRLLIKYASESISGIPSRFSGSGSGTDFTLSINSVESEDIADYYCQQNNNWPTQFGAGTKLELK

SEQ ID NO: 15423 - protein, 107 aa, Artificial Sequence
  source: /note="Description of Artificial Sequence: Synthetic polypeptide"
DILLTQSPVILSVSPGERVSFSCRASQSIGTNIHWYQQRTNGSPRLLIKYASESISGIPSRFSGSGSGTDFTLSINSVESEDIADYYCQQNNNWPTSFGAGTKLELK

SEQ ID NO: 15424 - protein, 107 aa, Artificial Sequence
  source: /note="Description of Artificial Sequence: Synthetic polypeptide"
DILLTQSPVILSVSPGERVSFSCRASQSIGTNIHWYQQRTNGSPRLLIKYASESISGIPSRFSGSGSGTDFTLSINSVESEDIADYYCQQNNNWPTVFGAGTKLELK

SEQ ID NO: 15425 - protein, 107 aa, Artificial Sequence
  source: /note="Description of Artificial Sequence: Synthetic polypeptide"
DILLTQSPVILSVSPGERVSFSCRASQSIGTNIHWYQQRTNGSPRLLIKYASESISGIPSRFSGSGSGTDFTLSINSVESEDIADYYCQQNNNWPTKFGAGTKLELK

SEQ ID NO: 15426 - protein, 107 aa, Artificial Sequence
  source: /note="Description of Artificial Sequence: Synthetic polypeptide"
DILLTQSPVILSVSPGERVSFSCRASQSIGTNIHWYQQRTNGSPRLLIKYASESISGIPSRFSGSGSGTDFTLSINSVESEDIADYYCQQNNNWPTRFGAGTKLELK

SEQ ID NO: 15427 - protein, 107 aa, Artificial Sequence
  source: /note="Description of Artificial Sequence: Synthetic polypeptide"
DILLTQSPVILSVSPGERVSFSCRASQSIGTNIHWYQQRTNGSPRLLIKYASESISGIPSRFSGSGSGTDFTLSINSVESEDIADYYCQQNNNWPTTAGAGTKLELK

SEQ ID NO: 15428 - protein, 107 aa, Artificial Sequence
  source: /note="Description of Artificial Sequence: Synthetic polypeptide"
DILLTQSPVILSVSPGERVSFSCRASQSIGTNIHWYQQRTNGSPRLLIKYASESISGIPSRFSGSGSGTDFTLSINSVESEDIADYYCQQNNNWPTTMGAGTKLELK

SEQ ID NO: 15429 - protein, 107 aa, Artificial Sequence
  source: /note="Description of Artificial Sequence: Synthetic polypeptide"
DILLTQSPVILSVSPGERVSFSCRASQSIGTNIHWYQQRTNGSPRLLIKYASESISGIPSRFSGSGSGTDFTLSINSVESEDIADYYCQQNNNWPTTSGAGTKLELK

SEQ ID NO: 15430 - protein, 107 aa, Artificial Sequence
  source: /note="Description of Artificial Sequence: Synthetic polypeptide"
DILLTQSPVILSVSPGERVSFSCRASQSIGTNIHWYQQRTNGSPRLLIKYASESISGIPSRFSGSGSGTDFTLSINSVESEDIADYYCQQNNNWPTTVGAGTKLELK

SEQ ID NO: 15431 - protein, 107 aa, Artificial Sequence
  source: /note="Description of Artificial Sequence: Synthetic polypeptide"
DILLTQSPVILSVSPGERVSFSCRASQSIGTNIHWYQQRTNGSPRLLIKYASESISGIPSRFSGSGSGTDFTLSINSVESEDIADYYCQQNNNWPTTYGAGTKLELK

SEQ ID NO: 15432 - protein, 107 aa, Artificial Sequence
  source: /note="Description of Artificial Sequence: Synthetic polypeptide"
DILLTQSPVILSVSPGERVSFSCRASQSIGTNIHWYQQRTNGSPRLLIKYASESISGIPSRFSGSGSGTDFTLSINSVESEDIADYYCQQNNNWPTTFLAGTKLELK

SEQ ID NO: 15433 - protein, 107 aa, Artificial Sequence
  source: /note="Description of Artificial Sequence: Synthetic polypeptide"
DILLTQSPVILSVSPGERVSFSCRASQSIGTNIHWYQQRTNGSPRLLIKYASESISGIPSRFSGSGSGTDFTLSINSVESEDIADYYCQQNNNWPTTFDAGTKLELK

SEQ ID NO: 15434 - protein, 107 aa, Artificial Sequence
  source: /note="Description of Artificial Sequence: Synthetic polypeptide"
DILLTQSPVILSVSPGERVSFSCRASQSIGTNIHWYQQRTNGSPRLLIKYASESISGIPSRFSGSGSGTDFTLSINSVESEDIADYYCQQNNNWPTTFEAGTKLELK

SEQ ID NO: 15435 - protein, 107 aa, Artificial Sequence
  source: /note="Description of Artificial Sequence: Synthetic polypeptide"
DILLTQSPVILSVSPGERVSFSCRASQSIGTNIHWYQQRTNGSPRLLIKYASESISGIPSRFSGSGSGTDFTLSINSVESEDIADYYCQQNNNWPTTFFAGTKLELK

SEQ ID NO: 15436 - protein, 107 aa, Artificial Sequence
  source: /note="Description of Artificial Sequence: Synthetic polypeptide"
DILLTQSPVILSVSPGERVSFSCRASQSIGTNIHWYQQRTNGSPRLLIKYASESISGIPSRFSGSGSGTDFTLSINSVESEDIADYYCQQNNNWPTTFIAGTKLELK

SEQ ID NO: 15437 - protein, 107 aa, Artificial Sequence
  source: /note="Description of Artificial Sequence: Synthetic polypeptide"
DILLTQSPVILSVSPGERVSFSCRASQSIGTNIHWYQQRTNGSPRLLIKYASESISGIPSRFSGSGSGTDFTLSINSVESEDIADYYCQQNNNWPTTFMAGTKLELK

SEQ ID NO: 15438 - protein, 107 aa, Artificial Sequence
  source: /note="Description of Artificial Sequence: Synthetic polypeptide"
DILLTQSPVILSVSPGERVSFSCRASQSIGTNIHWYQQRTNGSPRLLIKYASESISGIPSRFSGSGSGTDFTLSINSVESEDIADYYCQQNNNWPTTFNAGTKLELK

SEQ ID NO: 15439 - protein, 107 aa, Artificial Sequence
  source: /note="Description of Artificial Sequence: Synthetic polypeptide"
DILLTQSPVILSVSPGERVSFSCRASQSIGTNIHWYQQRTNGSPRLLIKYASESISGIPSRFSGSGSGTDFTLSINSVESEDIADYYCQQNNNWPTTFSAGTKLELK

SEQ ID NO: 15440 - protein, 107 aa, Artificial Sequence
  source: /note="Description of Artificial Sequence: Synthetic polypeptide"
DILLTQSPVILSVSPGERVSFSCRASQSIGTNIHWYQQRTNGSPRLLIKYASESISGIPSRFSGSGSGTDFTLSINSVESEDIADYYCQQNNNWPTTFTAGTKLELK

SEQ ID NO: 15441 - protein, 107 aa, Artificial Sequence
  source: /note="Description of Artificial Sequence: Synthetic polypeptide"
DILLTQSPVILSVSPGERVSFSCRASQSIGTNIHWYQQRTNGSPRLLIKYASESISGIPSRFSGSGSGTDFTLSINSVESEDIADYYCQQNNNWPTTFVAGTKLELK

SEQ ID NO: 15442 - protein, 107 aa, Artificial Sequence
  source: /note="Description of Artificial Sequence: Synthetic polypeptide"
DILLTQSPVILSVSPGERVSFSCRASQSIGTNIHWYQQRTNGSPRLLIKYASESISGIPSRFSGSGSGTDFTLSINSVESEDIADYYCQQNNNWPTTFKAGTKLELK

SEQ ID NO: 15443 - protein, 107 aa, Artificial Sequence
  source: /note="Description of Artificial Sequence: Synthetic polypeptide"
DILLTQSPVILSVSPGERVSFSCRASQSIGTNIHWYQQRTNGSPRLLIKYASESISGIPSRFSGSGSGTDFTLSINSVESEDIADYYCQQNNNWPTTFHAGTKLELK

SEQ ID NO: 15444 - protein, 107 aa, Artificial Sequence
  source: /note="Description of Artificial Sequence: Synthetic polypeptide"
WILLTQSPVILSVSPGERVSFSCRASQSIGTNIHWYQQRTNGSPRLLIKYASESISGIPSRFSGSGSGTDFTLSINSVESEDIADYYCQQNNNWPTTFGQGTKLELK

SEQ ID NO: 15445 - protein, 107 aa, Artificial Sequence
  source: /note="Description of Artificial Sequence: Synthetic polypeptide"
DCLLTQSPVILSVSPGERVSFSCRASQSIGTNIHWYQQRTNGSPRLLIKYASESISGIPSRFSGSGSGTDFTLSINSVESEDIADYYCQQNNNWPTTFGQGTKLELK

SEQ ID NO: 15446 - protein, 107 aa, Artificial Sequence
  source: /note="Description of Artificial Sequence: Synthetic polypeptide"
DVLLTQSPVILSVSPGERVSFSCRASQSIGTNIHWYQQRTNGSPRLLIKYASESISGIPSRFSGSGSGTDFTLSINSVESEDIADYYCQQNNNWPTTFGQGTKLELK

SEQ ID NO: 15447 - protein, 107 aa, Artificial Sequence
  source: /note="Description of Artificial Sequence: Synthetic polypeptide"
DWLLTQSPVILSVSPGERVSFSCRASQSIGTNIHWYQQRTNGSPRLLIKYASESISGIPSRFSGSGSGTDFTLSINSVESEDIADYYCQQNNNWPTTFGQGTKLELK

SEQ ID NO: 15448 - protein, 107 aa, Artificial Sequence
  source: /note="Description of Artificial Sequence: Synthetic polypeptide"
DIDLTQSPVILSVSPGERVSFSCRASQSIGTNIHWYQQRTNGSPRLLIKYASESISGIPSRFSGSGSGTDFTLSINSVESEDIADYYCQQNNNWPTTFGQGTKLELK

SEQ ID NO: 15449 - protein, 107 aa, Artificial Sequence
  source: /note="Description of Artificial Sequence: Synthetic polypeptide"
DIFLTQSPVILSVSPGERVSFSCRASQSIGTNIHWYQQRTNGSPRLLIKYASESISGIPSRFSGSGSGTDFTLSINSVESEDIADYYCQQNNNWPTTFGQGTKLELK

SEQ ID NO: 15450 - protein, 107 aa, Artificial Sequence
  source: /note="Description of Artificial Sequence: Synthetic polypeptide"
DIGLTQSPVILSVSPGERVSFSCRASQSIGTNIHWYQQRTNGSPRLLIKYASESISGIPSRFSGSGSGTDFTLSINSVESEDIADYYCQQNNNWPTTFGQGTKLELK

SEQ ID NO: 15451 - protein, 107 aa, Artificial Sequence
  source: /note="Description of Artificial Sequence: Synthetic polypeptide"
DISLTQSPVILSVSPGERVSFSCRASQSIGTNIHWYQQRTNGSPRLLIKYASESISGIPSRFSGSGSGTDFTLSINSVESEDIADYYCQQNNNWPTTFGQGTKLELK

SEQ ID NO: 15452 - protein, 107 aa, Artificial Sequence
  source: /note="Description of Artificial Sequence: Synthetic polypeptide"
DITLTQSPVILSVSPGERVSFSCRASQSIGTNIHWYQQRTNGSPRLLIKYASESISGIPSRFSGSGSGTDFTLSINSVESEDIADYYCQQNNNWPTTFGQGTKLELK

SEQ ID NO: 15453 - protein, 107 aa, Artificial Sequence
  source: /note="Description of Artificial Sequence: Synthetic polypeptide"
DIVLTQSPVILSVSPGERVSFSCRASQSIGTNIHWYQQRTNGSPRLLIKYASESISGIPSRFSGSGSGTDFTLSINSVESEDIADYYCQQNNNWPTTFGQGTKLELK

SEQ ID NO: 15454 - protein, 107 aa, Artificial Sequence
  source: /note="Description of Artificial Sequence: Synthetic polypeptide"
DIWLTQSPVILSVSPGERVSFSCRASQSIGTNIHWYQQRTNGSPRLLIKYASESISGIPSRFSGSGSGTDFTLSINSVESEDIADYYCQQNNNWPTTFGQGTKLELK

SEQ ID NO: 15455 - protein, 107 aa, Artificial Sequence
  source: /note="Description of Artificial Sequence: Synthetic polypeptide"
DIYLTQSPVILSVSPGERVSFSCRASQSIGTNIHWYQQRTNGSPRLLIKYASESISGIPSRFSGSGSGTDFTLSINSVESEDIADYYCQQNNNWPTTFGQGTKLELK

SEQ ID NO: 15456 - protein, 107 aa, Artificial Sequence
  source: /note="Description of Artificial Sequence: Synthetic polypeptide"
DIRLTQSPVILSVSPGERVSFSCRASQSIGTNIHWYQQRTNGSPRLLIKYASESISGIPSRFSGSGSGTDFTLSINSVESEDIADYYCQQNNNWPTTFGQGTKLELK

SEQ ID NO: 15457 - protein, 107 aa, Artificial Sequence
  source: /note="Description of Artificial Sequence: Synthetic polypeptide"
DILCTQSPVILSVSPGERVSFSCRASQSIGTNIHWYQQRTNGSPRLLIKYASESISGIPSRFSGSGSGTDFTLSINSVESEDIADYYCQQNNNWPTTFGQGTKLELK

SEQ ID NO: 15458 - protein, 107 aa, Artificial Sequence
  source: /note="Description of Artificial Sequence: Synthetic polypeptide"
DILETQSPVILSVSPGERVSFSCRASQSIGTNIHWYQQRTNGSPRLLIKYASESISGIPSRFSGSGSGTDFTLSINSVESEDIADYYCQQNNNWPTTFGQGTKLELK

SEQ ID NO: 15459 - protein, 107 aa, Artificial Sequence
  source: /note="Description of Artificial Sequence: Synthetic polypeptide"
DILFTQSPVILSVSPGERVSFSCRASQSIGTNIHWYQQRTNGSPRLLIKYASESISGIPSRFSGSGSGTDFTLSINSVESEDIADYYCQQNNNWPTTFGQGTKLELK

SEQ ID NO: 15460 - protein, 107 aa, Artificial Sequence
  source: /note="Description of Artificial Sequence: Synthetic polypeptide"
DILITQSPVILSVSPGERVSFSCRASQSIGTNIHWYQQRTNGSPRLLIKYASESISGIPSRFSGSGSGTDFTLSINSVESEDIADYYCQQNNNWPTTFGQGTKLELK

SEQ ID NO: 15461 - protein, 107 aa, Artificial Sequence
  source: /note="Description of Artificial Sequence: Synthetic polypeptide"
DILPTQSPVILSVSPGERVSFSCRASQSIGTNIHWYQQRTNGSPRLLIKYASESISGIPSRFSGSGSGTDFTLSINSVESEDIADYYCQQNNNWPTTFGQGTKLELK

SEQ ID NO: 15462 - protein, 107 aa, Artificial Sequence
  source: /note="Description of Artificial Sequence: Synthetic polypeptide"
DILSTQSPVILSVSPGERVSFSCRASQSIGTNIHWYQQRTNGSPRLLIKYASESISGIPSRFSGSGSGTDFTLSINSVESEDIADYYCQQNNNWPTTFGQGTKLELK

SEQ ID NO: 15463 - protein, 107 aa, Artificial Sequence
  source: /note="Description of Artificial Sequence: Synthetic polypeptide"
DILTTQSPVILSVSPGERVSFSCRASQSIGTNIHWYQQRTNGSPRLLIKYASESISGIPSRFSGSGSGTDFTLSINSVESEDIADYYCQQNNNWPTTFGQGTKLELK

SEQ ID NO: 15464 - protein, 107 aa, Artificial Sequence
  source: /note="Description of Artificial Sequence: Synthetic polypeptide"
DILVTQSPVILSVSPGERVSFSCRASQSIGTNIHWYQQRTNGSPRLLIKYASESISGIPSRFSGSGSGTDFTLSINSVESEDIADYYCQQNNNWPTTFGQGTKLELK

SEQ ID NO: 15465 - protein, 107 aa, Artificial Sequence
  source: /note="Description of Artificial Sequence: Synthetic polypeptide"
DILWTQSPVILSVSPGERVSFSCRASQSIGTNIHWYQQRTNGSPRLLIKYASESISGIPSRFSGSGSGTDFTLSINSVESEDIADYYCQQNNNWPTTFGQGTKLELK

SEQ ID NO: 15466 - protein, 107 aa, Artificial Sequence
  source: /note="Description of Artificial Sequence: Synthetic polypeptide"
DILKTQSPVILSVSPGERVSFSCRASQSIGTNIHWYQQRTNGSPRLLIKYASESISGIPSRFSGSGSGTDFTLSINSVESEDIADYYCQQNNNWPTTFGQGTKLELK

SEQ ID NO: 15467 - protein, 107 aa, Artificial Sequence
  source: /note="Description of Artificial Sequence: Synthetic polypeptide"
DILHTQSPVILSVSPGERVSFSCRASQSIGTNIHWYQQRTNGSPRLLIKYASESISGIPSRFSGSGSGTDFTLSINSVESEDIADYYCQQNNNWPTTFGQGTKLELK

SEQ ID NO: 15468 - protein, 107 aa, Artificial Sequence
  source: /note="Description of Artificial Sequence: Synthetic polypeptide"
DILRTQSPVILSVSPGERVSFSCRASQSIGTNIHWYQQRTNGSPRLLIKYASESISGIPSRFSGSGSGTDFTLSINSVESEDIADYYCQQNNNWPTTFGQGTKLELK

SEQ ID NO: 15469 - protein, 107 aa, Artificial Sequence
  source: /note="Description of Artificial Sequence: Synthetic polypeptide"
DILLAQSPVILSVSPGERVSFSCRASQSIGTNIHWYQQRTNGSPRLLIKYASESISGIPSRFSGSGSGTDFTLSINSVESEDIADYYCQQNNNWPTTFGQGTKLELK

SEQ ID NO: 15470 - protein, 107 aa, Artificial Sequence
  source: /note="Description of Artificial Sequence: Synthetic polypeptide"
DILLCQSPVILSVSPGERVSFSCRASQSIGTNIHWYQQRTNGSPRLLIKYASESISGIPSRFSGSGSGTDFTLSINSVESEDIADYYCQQNNNWPTTFGQGTKLELK

SEQ ID NO: 15471 - protein, 107 aa, Artificial Sequence
  source: /note="Description of Artificial Sequence: Synthetic polypeptide"
DILLDQSPVILSVSPGERVSFSCRASQSIGTNIHWYQQRTNGSPRLLIKYASESISGIPSRFSGSGSGTDFTLSINSVESEDIADYYCQQNNNWPTTFGQGTKLELK

SEQ ID NO: 15472 - protein, 107 aa, Artificial Sequence
  source: /note="Description of Artificial Sequence: Synthetic polypeptide"
DILLEQSPVILSVSPGERVSFSCRASQSIGTNIHWYQQRTNGSPRLLIKYASESISGIPSRFSGSGSGTDFTLSINSVESEDIADYYCQQNNNWPTTFGQGTKLELK

SEQ ID NO: 15473 - protein, 107 aa, Artificial Sequence
  source: /note="Description of Artificial Sequence: Synthetic polypeptide"
DILLFQSPVILSVSPGERVSFSCRASQSIGTNIHWYQQRTNGSPRLLIKYASESISGIPSRFSGSGSGTDFTLSINSVESEDIADYYCQQNNNWPTTFGQGTKLELK

SEQ ID NO: 15474 - protein, 107 aa, Artificial Sequence
  source: /note="Description of Artificial Sequence: Synthetic polypeptide"
DILLGQSPVILSVSPGERVSFSCRASQSIGTNIHWYQQRTNGSPRLLIKYASESISGIPSRFSGSGSGTDFTLSINSVESEDIADYYCQQNNNWPTTFGQGTKLELK

SEQ ID NO: 15475 - protein, 107 aa, Artificial Sequence
  source: /note="Description of Artificial Sequence: Synthetic polypeptide"
DILLNQSPVILSVSPGERVSFSCRASQSIGTNIHWYQQRTNGSPRLLIKYASESISGIPSRFSGSGSGTDFTLSINSVESEDIADYYCQQNNNWPTTFGQGTKLELK

SEQ ID NO: 15476 - protein, 107 aa, Artificial Sequence
  source: /note="Description of Artificial Sequence: Synthetic polypeptide"
DILLSQSPVILSVSPGERVSFSCRASQSIGTNIHWYQQRTNGSPRLLIKYASESISGIPSRFSGSGSGTDFTLSINSVESEDIADYYCQQNNNWPTTFGQGTKLELK

SEQ ID NO: 15477 - protein, 107 aa, Artificial Sequence
  source: /note="Description of Artificial Sequence: Synthetic polypeptide"
DILLWQSPVILSVSPGERVSFSCRASQSIGTNIHWYQQRTNGSPRLLIKYASESISGIPSRFSGSGSGTDFTLSINSVESEDIADYYCQQNNNWPTTFGQGTKLELK

SEQ ID NO: 15478 - protein, 107 aa, Artificial Sequence
  source: /note="Description of Artificial Sequence: Synthetic polypeptide"
DILLLQSPVILSVSPGERVSFSCRASQSIGTNIHWYQQRTNGSPRLLIKYASESISGIPSRFSGSGSGTDFTLSINSVESEDIADYYCQQNNNWPTTFGQGTKLELK

SEQ ID NO: 15479 - protein, 107 aa, Artificial Sequence
  source: /note="Description of Artificial Sequence: Synthetic polypeptide"
DILLKQSPVILSVSPGERVSFSCRASQSIGTNIHWYQQRTNGSPRLLIKYASESISGIPSRFSGSGSGTDFTLSINSVESEDIADYYCQQNNNWPTTFGQGTKLELK

SEQ ID NO: 15480 - protein, 107 aa, Artificial Sequence
  source: /note="Description of Artificial Sequence: Synthetic polypeptide"
DILLHQSPVILSVSPGERVSFSCRASQSIGTNIHWYQQRTNGSPRLLIKYASESISGIPSRFSGSGSGTDFTLSINSVESEDIADYYCQQNNNWPTTFGQGTKLELK

SEQ ID NO: 15481 - protein, 107 aa, Artificial Sequence
  source: /note="Description of Artificial Sequence: Synthetic polypeptide"
DILLRQSPVILSVSPGERVSFSCRASQSIGTNIHWYQQRTNGSPRLLIKYASESISGIPSRFSGSGSGTDFTLSINSVESEDIADYYCQQNNNWPTTFGQGTKLELK

SEQ ID NO: 15482 - protein, 107 aa, Artificial Sequence
  source: /note="Description of Artificial Sequence: Synthetic polypeptide"
DILLTQSPVILSVSPGERVSFSCAASQSIGTNIHWYQQRTNGSPRLLIKYASESISGIPSRFSGSGSGTDFTLSINSVESEDIADYYCQQNNNWPTTFGQGTKLELK

SEQ ID NO: 15483 - protein, 107 aa, Artificial Sequence
  source: /note="Description of Artificial Sequence: Synthetic polypeptide"
DILLTQSPVILSVSPGERVSFSCCASQSIGTNIHWYQQRTNGSPRLLIKYASESISGIPSRFSGSGSGTDFTLSINSVESEDIADYYCQQNNNWPTTFGQGTKLELK

SEQ ID NO: 15484 - protein, 107 aa, Artificial Sequence
  source: /note="Description of Artificial Sequence: Synthetic polypeptide"
DILLTQSPVILSVSPGERVSFSCFASQSIGTNIHWYQQRTNGSPRLLIKYASESISGIPSRFSGSGSGTDFTLSINSVESEDIADYYCQQNNNWPTTFGQGTKLELK

SEQ ID NO: 15485 - protein, 107 aa, Artificial Sequence
  source: /note="Description of Artificial Sequence: Synthetic polypeptide"
DILLTQSPVILSVSPGERVSFSCLASQSIGTNIHWYQQRTNGSPRLLIKYASESISGIPSRFSGSGSGTDFTLSINSVESEDIADYYCQQNNNWPTTFGQGTKLELK

SEQ ID NO: 15486 - protein, 107 aa, Artificial Sequence
  source: /note="Description of Artificial Sequence: Synthetic polypeptide"
DILLTQSPVILSVSPGERVSFSCMASQSIGTNIHWYQQRTNGSPRLLIKYASESISGIPSRFSGSGSGTDFTLSINSVESEDIADYYCQQNNNWPTTFGQGTKLELK

SEQ ID NO: 15487 - protein, 107 aa, Artificial Sequence
  source: /note="Description of Artificial Sequence: Synthetic polypeptide"
DILLTQSPVILSVSPGERVSFSCSASQSIGTNIHWYQQRTNGSPRLLIKYASESISGIPSRFSGSGSGTDFTLSINSVESEDIADYYCQQNNNWPTTFGQGTKLELK

SEQ ID NO: 15488 - protein, 107 aa, Artificial Sequence
  source: /note="Description of Artificial Sequence: Synthetic polypeptide"
DILLTQSPVILSVSPGERVSFSCWASQSIGTNIHWYQQRTNGSPRLLIKYASESISGIPSRFSGSGSGTDFTLSINSVESEDIADYYCQQNNNWPTTFGQGTKLELK

SEQ ID NO: 15489 - protein, 107 aa, Artificial Sequence
  source: /note="Description of Artificial Sequence: Synthetic polypeptide"
DILLTQSPVILSVSPGERVSFSCYASQSIGTNIHWYQQRTNGSPRLLIKYASESISGIPSRFSGSGSGTDFTLSINSVESEDIADYYCQQNNNWPTTFGQGTKLELK

SEQ ID NO: 15490 - protein, 107 aa, Artificial Sequence
  source: /note="Description of Artificial Sequence: Synthetic polypeptide"
DILLTQSPVILSVSPGERVSFSCRCSQSIGTNIHWYQQRTNGSPRLLIKYASESISGIPSRFSGSGSGTDFTLSINSVESEDIADYYCQQNNNWPTTFGQGTKLELK

SEQ ID NO: 15491 - protein, 107 aa, Artificial Sequence
  source: /note="Description of Artificial Sequence: Synthetic polypeptide"
DILLTQSPVILSVSPGERVSFSCRGSQSIGTNIHWYQQRTNGSPRLLIKYASESISGIPSRFSGSGSGTDFTLSINSVESEDIADYYCQQNNNWPTTFGQGTKLELK

SEQ ID NO: 15492 - protein, 107 aa, Artificial Sequence
  source: /note="Description of Artificial Sequence: Synthetic polypeptide"
DILLTQSPVILSVSPGERVSFSCRLSQSIGTNIHWYQQRTNGSPRLLIKYASESISGIPSRFSGSGSGTDFTLSINSVESEDIADYYCQQNNNWPTTFGQGTKLELK

SEQ ID NO: 15493 - protein, 107 aa, Artificial Sequence
  source: /note="Description of Artificial Sequence: Synthetic polypeptide"
DILLTQSPVILSVSPGERVSFSCRVSQSIGTNIHWYQQRTNGSPRLLIKYASESISGIPSRFSGSGSGTDFTLSINSVESEDIADYYCQQNNNWPTTFGQGTKLELK

SEQ ID NO: 15494 - protein, 107 aa, Artificial Sequence
  source: /note="Description of Artificial Sequence: Synthetic polypeptide"
DILLTQSPVILSVSPGERVSFSCRAAQSIGTNIHWYQQRTNGSPRLLIKYASESISGIPSRFSGSGSGTDFTLSINSVESEDIADYYCQQNNNWPTTFGQGTKLELK

SEQ ID NO: 15495 - protein, 107 aa, Artificial Sequence
  source: /note="Description of Artificial Sequence: Synthetic polypeptide"
DILLTQSPVILSVSPGERVSFSCRACQSIGTNIHWYQQRTNGSPRLLIKYASESISGIPSRFSGSGSGTDFTLSINSVESEDIADYYCQQNNNWPTTFGQGTKLELK

SEQ ID NO: 15496 - protein, 107 aa, Artificial Sequence
  source: /note="Description of Artificial Sequence: Synthetic polypeptide"
DILLTQSPVILSVSPGERVSFSCRADQSIGTNIHWYQQRTNGSPRLLIKYASESISGIPSRFSGSGSGTDFTLSINSVESEDIADYYCQQNNNWPTTFGQGTKLELK

SEQ ID NO: 15497 - protein, 107 aa, Artificial Sequence
  source: /note="Description of Artificial Sequence: Synthetic polypeptide"
DILLTQSPVILSVSPGERVSFSCRAIQSIGTNIHWYQQRTNGSPRLLIKYASESISGIPSRFSGSGSGTDFTLSINSVESEDIADYYCQQNNNWPTTFGQGTKLELK

SEQ ID NO: 15498 - protein, 107 aa, Artificial Sequence
  source: /note="Description of Artificial Sequence: Synthetic polypeptide"
DILLTQSPVILSVSPGERVSFSCRAMQSIGTNIHWYQQRTNGSPRLLIKYASESISGIPSRFSGSGSGTDFTLSINSVESEDIADYYCQQNNNWPTTFGQGTKLELK

SEQ ID NO: 15499 - protein, 107 aa, Artificial Sequence
  source: /note="Description of Artificial Sequence: Synthetic polypeptide"
DILLTQSPVILSVSPGERVSFSCRANQSIGTNIHWYQQRTNGSPRLLIKYASESISGIPSRFSGSGSGTDFTLSINSVESEDIADYYCQQNNNWPTTFGQGTKLELK

SEQ ID NO: 15500 - protein, 107 aa, Artificial Sequence
  source: /note="Description of Artificial Sequence: Synthetic polypeptide"
DILLTQSPVILSVSPGERVSFSCRAVQSIGTNIHWYQQRTNGSPRLLIKYASESISGIPSRFSGSGSGTDFTLSINSVESEDIADYYCQQNNNWPTTFGQGTKLELK

SEQ ID NO: 15501 - protein, 107 aa, Artificial Sequence
  source: /note="Description of Artificial Sequence: Synthetic polypeptide"
DILLTQSPVILSVSPGERVSFSCRAWQSIGTNIHWYQQRTNGSPRLLIKYASESISGIPSRFSGSGSGTDFTLSINSVESEDIADYYCQQNNNWPTTFGQGTKLELK

SEQ ID NO: 15502 - protein, 107 aa, Artificial Sequence
  source: /note="Description of Artificial Sequence: Synthetic polypeptide"
DILLTQSPVILSVSPGERVSFSCRALQSIGTNIHWYQQRTNGSPRLLIKYASESISGIPSRFSGSGSGTDFTLSINSVESEDIADYYCQQNNNWPTTFGQGTKLELK

SEQ ID NO: 15503 - protein, 107 aa, Artificial Sequence
  source: /note="Description of Artificial Sequence: Synthetic polypeptide"
DILLTQSPVILSVSPGERVSFSCRAGQSIGTNIHWYQQRTNGSPRLLIKYASESISGIPSRFSGSGSGTDFTLSINSVESEDIADYYCQQNNNWPTTFGQGTKLELK

SEQ ID NO: 15504 - protein, 107 aa, Artificial Sequence
  source: /note="Description of Artificial Sequence: Synthetic polypeptide"
DILLTQSPVILSVSPGERVSFSCRAHQSIGTNIHWYQQRTNGSPRLLIKYASESISGIPSRFSGSGSGTDFTLSINSVESEDIADYYCQQNNNWPTTFGQGTKLELK

SEQ ID NO: 15505 - protein, 107 aa, Artificial Sequence
  source: /note="Description of Artificial Sequence: Synthetic polypeptide"
DILLTQSPVILSVSPGERVSFSCRARQSIGTNIHWYQQRTNGSPRLLIKYASESISGIPSRFSGSGSGTDFTLSINSVESEDIADYYCQQNNNWPTTFGQGTKLELK

SEQ ID NO: 15506 - protein, 107 aa, Artificial Sequence
  source: /note="Description of Artificial Sequence: Synthetic polypeptide"
DILLTQSPVILSVSPGERVSFSCRASASIGTNIHWYQQRTNGSPRLLIKYASESISGIPSRFSGSGSGTDFTLSINSVESEDIADYYCQQNNNWPTTFGQGTKLELK

SEQ ID NO: 15507 - protein, 107 aa, Artificial Sequence
  source: /note="Description of Artificial Sequence: Synthetic polypeptide"
DILLTQSPVILSVSPGERVSFSCRASDSIGTNIHWYQQRTNGSPRLLIKYASESISGIPSRFSGSGSGTDFTLSINSVESEDIADYYCQQNNNWPTTFGQGTKLELK

SEQ ID NO: 15508 - protein, 107 aa, Artificial Sequence
  source: /note="Description of Artificial Sequence: Synthetic polypeptide"
DILLTQSPVILSVSPGERVSFSCRASESIGTNIHWYQQRTNGSPRLLIKYASESISGIPSRFSGSGSGTDFTLSINSVESEDIADYYCQQNNNWPTTFGQGTKLELK

SEQ ID NO: 15509 - protein, 107 aa, Artificial Sequence
  source: /note="Description of Artificial Sequence: Synthetic polypeptide"
DILLTQSPVILSVSPGERVSFSCRASFSIGTNIHWYQQRTNGSPRLLIKYASESISGIPSRFSGSGSGTDFTLSINSVESEDIADYYCQQNNNWPTTFGQGTKLELK

SEQ ID NO: 15510 - protein, 107 aa, Artificial Sequence
  source: /note="Description of Artificial Sequence: Synthetic polypeptide"
DILLTQSPVILSVSPGERVSFSCRASISIGTNIHWYQQRTNGSPRLLIKYASESISGIPSRFSGSGSGTDFTLSINSVESEDIADYYCQQNNNWPTTFGQGTKLELK

SEQ ID NO: 15511 - protein, 107 aa, Artificial Sequence
  source: /note="Description of Artificial Sequence: Synthetic polypeptide"
DILLTQSPVILSVSPGERVSFSCRASMSIGTNIHWYQQRTNGSPRLLIKYASESISGIPSRFSGSGSGTDFTLSINSVESEDIADYYCQQNNNWPTTFGQGTKLELK

SEQ ID NO: 15512 - protein, 107 aa, Artificial Sequence
  source: /note="Description of Artificial Sequence: Synthetic polypeptide"
DILLTQSPVILSVSPGERVSFSCRASNSIGTNIHWYQQRTNGSPRLLIKYASESISGIPSRFSGSGSGTDFTLSINSVESEDIADYYCQQNNNWPTTFGQGTKLELK

SEQ ID NO: 15513 - protein, 107 aa, Artificial Sequence
  source: /note="Description of Artificial Sequence: Synthetic polypeptide"
DILLTQSPVILSVSPGERVSFSCRASPSIGTNIHWYQQRTNGSPRLLIKYASESISGIPSRFSGSGSGTDFTLSINSVESEDIADYYCQQNNNWPTTFGQGTKLELK

SEQ ID NO: 15514 - protein, 107 aa, Artificial Sequence
  source: /note="Description of Artificial Sequence: Synthetic polypeptide"
DILLTQSPVILSVSPGERVSFSCRASTSIGTNIHWYQQRTNGSPRLLIKYASESISGIPSRFSGSGSGTDFTLSINSVESEDIADYYCQQNNNWPTTFGQGTKLELK

SEQ ID NO: 15515 - protein, 107 aa, Artificial Sequence
  source: /note="Description of Artificial Sequence: Synthetic polypeptide"
DILLTQSPVILSVSPGERVSFSCRASQAIGTNIHWYQQRTNGSPRLLIKYASESISGIPSRFSGSGSGTDFTLSINSVESEDIADYYCQQNNNWPTTFGQGTKLELK

SEQ ID NO: 15516 - protein, 107 aa, Artificial Sequence
  source: /note="Description of Artificial Sequence: Synthetic polypeptide"
DILLTQSPVILSVSPGERVSFSCRASQDIGTNIHWYQQRTNGSPRLLIKYASESISGIPSRFSGSGSGTDFTLSINSVESEDIADYYCQQNNNWPTTFGQGTKLELK

SEQ ID NO: 15517 - protein, 107 aa, Artificial Sequence
  source: /note="Description of Artificial Sequence: Synthetic polypeptide"
DILLTQSPVILSVSPGERVSFSCRASQNIGTNIHWYQQRTNGSPRLLIKYASESISGIPSRFSGSGSGTDFTLSINSVESEDIADYYCQQNNNWPTTFGQGTKLELK

SEQ ID NO: 15518 - protein, 107 aa, Artificial Sequence
  source: /note="Description of Artificial Sequence: Synthetic polypeptide"
DILLTQSPVILSVSPGERVSFSCRASQQIGTNIHWYQQRTNGSPRLLIKYASESISGIPSRFSGSGSGTDFTLSINSVESEDIADYYCQQNNNWPTTFGQGTKLELK

SEQ ID NO: 15519 - protein, 107 aa, Artificial Sequence
  source: /note="Description of Artificial Sequence: Synthetic polypeptide"
DILLTQSPVILSVSPGERVSFSCRASQLIGTNIHWYQQRTNGSPRLLIKYASESISGIPSRFSGSGSGTDFTLSINSVESEDIADYYCQQNNNWPTTFGQGTKLELK

SEQ ID NO: 15520 - protein, 107 aa, Artificial Sequence
  source: /note="Description of Artificial Sequence: Synthetic polypeptide"
DILLTQSPVILSVSPGERVSFSCRASQKIGTNIHWYQQRTNGSPRLLIKYASESISGIPSRFSGSGSGTDFTLSINSVESEDIADYYCQQNNNWPTTFGQGTKLELK

SEQ ID NO: 15521 - protein, 107 aa, Artificial Sequence
  source: /note="Description of Artificial Sequence: Synthetic polypeptide"
DILLTQSPVILSVSPGERVSFSCRASQHIGTNIHWYQQRTNGSPRLLIKYASESISGIPSRFSGSGSGTDFTLSINSVESEDIADYYCQQNNNWPTTFGQGTKLELK

SEQ ID NO: 15522 - protein, 107 aa, Artificial Sequence
  source: /note="Description of Artificial Sequence: Synthetic polypeptide"
DILLTQSPVILSVSPGERVSFSCRASQSAGTNIHWYQQRTNGSPRLLIKYASESISGIPSRFSGSGSGTDFTLSINSVESEDIADYYCQQNNNWPTTFGQGTKLELK

SEQ ID NO: 15523 - protein, 107 aa, Artificial Sequence
  source: /note="Description of Artificial Sequence: Synthetic polypeptide"
DILLTQSPVILSVSPGERVSFSCRASQSEGTNIHWYQQRTNGSPRLLIKYASESISGIPSRFSGSGSGTDFTLSINSVESEDIADYYCQQNNNWPTTFGQGTKLELK

SEQ ID NO: 15524 - protein, 107 aa, Artificial Sequence
  source: /note="Description of Artificial Sequence: Synthetic polypeptide"
DILLTQSPVILSVSPGERVSFSCRASQSFGTNIHWYQQRTNGSPRLLIKYASESISGIPSRFSGSGSGTDFTLSINSVESEDIADYYCQQNNNWPTTFGQGTKLELK

SEQ ID NO: 15525 - protein, 107 aa, Artificial Sequence
  source: /note="Description of Artificial Sequence: Synthetic polypeptide"
DILLTQSPVILSVSPGERVSFSCRASQSSGTNIHWYQQRTNGSPRLLIKYASESISGIPSRFSGSGSGTDFTLSINSVESEDIADYYCQQNNNWPTTFGQGTKLELK

SEQ ID NO: 15526 - protein, 107 aa, Artificial Sequence
  source: /note="Description of Artificial Sequence: Synthetic polypeptide"
DILLTQSPVILSVSPGERVSFSCRASQSTGTNIHWYQQRTNGSPRLLIKYASESISGIPSRFSGSGSGTDFTLSINSVESEDIADYYCQQNNNWPTTFGQGTKLELK

SEQ ID NO: 15527 - protein, 107 aa, Artificial Sequence
  source: /note="Description of Artificial Sequence: Synthetic polypeptide"
DILLTQSPVILSVSPGERVSFSCRASQSRGTNIHWYQQRTNGSPRLLIKYASESISGIPSRFSGSGSGTDFTLSINSVESEDIADYYCQQNNNWPTTFGQGTKLELK

SEQ ID NO: 15528 - protein, 107 aa, Artificial Sequence
  source: /note="Description of Artificial Sequence: Synthetic polypeptide"
DILLTQSPVILSVSPGERVSFSCRASQSIATNIHWYQQRTNGSPRLLIKYASESISGIPSRFSGSGSGTDFTLSINSVESEDIADYYCQQNNNWPTTFGQGTKLELK

SEQ ID NO: 15529 - protein, 107 aa, Artificial Sequence
  source: /note="Description of Artificial Sequence: Synthetic polypeptide"
DILLTQSPVILSVSPGERVSFSCRASQSIETNIHWYQQRTNGSPRLLIKYASESISGIPSRFSGSGSGTDFTLSINSVESEDIADYYCQQNNNWPTTFGQGTKLELK

SEQ ID NO: 15530 - protein, 107 aa, Artificial Sequence
  source: /note="Description of Artificial Sequence: Synthetic polypeptide"
DILLTQSPVILSVSPGERVSFSCRASQSIFTNIHWYQQRTNGSPRLLIKYASESISGIPSRFSGSGSGTDFTLSINSVESEDIADYYCQQNNNWPTTFGQGTKLELK

SEQ ID NO: 15531 - protein, 107 aa, Artificial Sequence
  source: /note="Description of Artificial Sequence: Synthetic polypeptide"
DILLTQSPVILSVSPGERVSFSCRASQSIITNIHWYQQRTNGSPRLLIKYASESISGIPSRFSGSGSGTDFTLSINSVESEDIADYYCQQNNNWPTTFGQGTKLELK

SEQ ID NO: 15532 - protein, 107 aa, Artificial Sequence
  source: /note="Description of Artificial Sequence: Synthetic polypeptide"
DILLTQSPVILSVSPGERVSFSCRASQSIMTNIHWYQQRTNGSPRLLIKYASESISGIPSRFSGSGSGTDFTLSINSVESEDIADYYCQQNNNWPTTFGQGTKLELK

SEQ ID NO: 15533 - protein, 107 aa, Artificial Sequence
  source: /note="Description of Artificial Sequence: Synthetic polypeptide"
DILLTQSPVILSVSPGERVSFSCRASQSIPTNIHWYQQRTNGSPRLLIKYASESISGIPSRFSGSGSGTDFTLSINSVESEDIADYYCQQNNNWPTTFGQGTKLELK

SEQ ID NO: 15534 - protein, 107 aa, Artificial Sequence
  source: /note="Description of Artificial Sequence: Synthetic polypeptide"
DILLTQSPVILSVSPGERVSFSCRASQSIQTNIHWYQQRTNGSPRLLIKYASESISGIPSRFSGSGSGTDFTLSINSVESEDIADYYCQQNNNWPTTFGQGTKLELK

SEQ ID NO: 15535 - protein, 107 aa, Artificial Sequence
  source: /note="Description of Artificial Sequence: Synthetic polypeptide"
DILLTQSPVILSVSPGERVSFSCRASQSISTNIHWYQQRTNGSPRLLIKYASESISGIPSRFSGSGSGTDFTLSINSVESEDIADYYCQQNNNWPTTFGQGTKLELK

SEQ ID NO: 15536 - protein, 107 aa, Artificial Sequence
  source: /note="Description of Artificial Sequence: Synthetic polypeptide"
DILLTQSPVILSVSPGERVSFSCRASQSIVTNIHWYQQRTNGSPRLLIKYASESISGIPSRFSGSGSGTDFTLSINSVESEDIADYYCQQNNNWPTTFGQGTKLELK

SEQ ID NO: 15537 - protein, 107 aa, Artificial Sequence
  source: /note="Description of Artificial Sequence: Synthetic polypeptide"
DILLTQSPVILSVSPGERVSFSCRASQSIYTNIHWYQQRTNGSPRLLIKYASESISGIPSRFSGSGSGTDFTLSINSVESEDIADYYCQQNNNWPTTFGQGTKLELK

SEQ ID NO: 15538 - protein, 107 aa, Artificial Sequence
  source: /note="Description of Artificial Sequence: Synthetic polypeptide"
DILLTQSPVILSVSPGERVSFSCRASQSILTNIHWYQQRTNGSPRLLIKYASESISGIPSRFSGSGSGTDFTLSINSVESEDIADYYCQQNNNWPTTFGQGTKLELK

SEQ ID NO: 15539 - protein, 107 aa, Artificial Sequence
  source: /note="Description of Artificial Sequence: Synthetic polypeptide"
DILLTQSPVILSVSPGERVSFSCRASQSIKTNIHWYQQRTNGSPRLLIKYASESISGIPSRFSGSGSGTDFTLSINSVESEDIADYYCQQNNNWPTTFGQGTKLELK

SEQ ID NO: 15540 - protein, 107 aa, Artificial Sequence
  source: /note="Description of Artificial Sequence: Synthetic polypeptide"
DILLTQSPVILSVSPGERVSFSCRASQSIHTNIHWYQQRTNGSPRLLIKYASESISGIPSRFSGSGSGTDFTLSINSVESEDIADYYCQQNNNWPTTFGQGTKLELK

SEQ ID NO: 15541 - protein, 107 aa, Artificial Sequence
  source: /note="Description of Artificial Sequence: Synthetic polypeptide"
DILLTQSPVILSVSPGERVSFSCRASQSIRTNIHWYQQRTNGSPRLLIKYASESISGIPSRFSGSGSGTDFTLSINSVESEDIADYYCQQNNNWPTTFGQGTKLELK

SEQ ID NO: 15542 - protein, 107 aa, Artificial Sequence
  source: /note="Description of Artificial Sequence: Synthetic polypeptide"
DILLTQSPVILSVSPGERVSFSCRASQSIGANIHWYQQRTNGSPRLLIKYASESISGIPSRFSGSGSGTDFTLSINSVESEDIADYYCQQNNNWPTTFGQGTKLELK

SEQ ID NO: 15543 - protein, 107 aa, Artificial Sequence
  source: /note="Description of Artificial Sequence: Synthetic polypeptide"
DILLTQSPVILSVSPGERVSFSCRASQSIGFNIHWYQQRTNGSPRLLIKYASESISGIPSRFSGSGSGTDFTLSINSVESEDIADYYCQQNNNWPTTFGQGTKLELK

SEQ ID NO: 15544 - protein, 107 aa, Artificial Sequence
  source: /note="Description of Artificial Sequence: Synthetic polypeptide"
DILLTQSPVILSVSPGERVSFSCRASQSIGGNIHWYQQRTNGSPRLLIKYASESISGIPSRFSGSGSGTDFTLSINSVESEDIADYYCQQNNNWPTTFGQGTKLELK

SEQ ID NO: 15545 - protein, 107 aa, Artificial Sequence
  source: /note="Description of Artificial Sequence: Synthetic polypeptide"
DILLTQSPVILSVSPGERVSFSCRASQSIGMNIHWYQQRTNGSPRLLIKYASESISGIPSRFSGSGSGTDFTLSINSVESEDIADYYCQQNNNWPTTFGQGTKLELK

SEQ ID NO: 15546 - protein, 107 aa, Artificial Sequence
  source: /note="Description of Artificial Sequence: Synthetic polypeptide"
DILLTQSPVILSVSPGERVSFSCRASQSIGSNIHWYQQRTNGSPRLLIKYASESISGIPSRFSGSGSGTDFTLSINSVESEDIADYYCQQNNNWPTTFGQGTKLELK

SEQ ID NO: 15547 - protein, 107 aa, Artificial Sequence
  source: /note="Description of Artificial Sequence: Synthetic polypeptide"
DILLTQSPVILSVSPGERVSFSCRASQSIGVNIHWYQQRTNGSPRLLIKYASESISGIPSRFSGSGSGTDFTLSINSVESEDIADYYCQQNNNWPTTFGQGTKLELK

SEQ ID NO: 15548 - protein, 107 aa, Artificial Sequence
  source: /note="Description of Artificial Sequence: Synthetic polypeptide"
DILLTQSPVILSVSPGERVSFSCRASQSIGWNIHWYQQRTNGSPRLLIKYASESISGIPSRFSGSGSGTDFTLSINSVESEDIADYYCQQNNNWPTTFGQGTKLELK

SEQ ID NO: 15549 - protein, 107 aa, Artificial Sequence
  source: /note="Description of Artificial Sequence: Synthetic polypeptide"
DILLTQSPVILSVSPGERVSFSCRASQSIGLNIHWYQQRTNGSPRLLIKYASESISGIPSRFSGSGSGTDFTLSINSVESEDIADYYCQQNNNWPTTFGQGTKLELK

SEQ ID NO: 15550 - protein, 107 aa, Artificial Sequence
  source: /note="Description of Artificial Sequence: Synthetic polypeptide"
DILLTQSPVILSVSPGERVSFSCRASQSIGKNIHWYQQRTNGSPRLLIKYASESISGIPSRFSGSGSGTDFTLSINSVESEDIADYYCQQNNNWPTTFGQGTKLELK

SEQ ID NO: 15551 - protein, 107 aa, Artificial Sequence
  source: /note="Description of Artificial Sequence: Synthetic polypeptide"
DILLTQSPVILSVSPGERVSFSCRASQSIGHNIHWYQQRTNGSPRLLIKYASESISGIPSRFSGSGSGTDFTLSINSVESEDIADYYCQQNNNWPTTFGQGTKLELK

SEQ ID NO: 15552 - protein, 107 aa, Artificial Sequence
  source: /note="Description of Artificial Sequence: Synthetic polypeptide"
DILLTQSPVILSVSPGERVSFSCRASQSIGTGIHWYQQRTNGSPRLLIKYASESISGIPSRFSGSGSGTDFTLSINSVESEDIADYYCQQNNNWPTTFGQGTKLELK

SEQ ID NO: 15553 - protein, 107 aa, Artificial Sequence
  source: /note="Description of Artificial Sequence: Synthetic polypeptide"
DILLTQSPVILSVSPGERVSFSCRASQSIGTNFHWYQQRTNGSPRLLIKYASESISGIPSRFSGSGSGTDFTLSINSVESEDIADYYCQQNNNWPTTFGQGTKLELK

SEQ ID NO: 15554 - protein, 107 aa, Artificial Sequence
  source: /note="Description of Artificial Sequence: Synthetic polypeptide"
DILLTQSPVILSVSPGERVSFSCRASQSIGTNGHWYQQRTNGSPRLLIKYASESISGIPSRFSGSGSGTDFTLSINSVESEDIADYYCQQNNNWPTTFGQGTKLELK

SEQ ID NO: 15555 - protein, 107 aa, Artificial Sequence
  source: /note="Description of Artificial Sequence: Synthetic polypeptide"
DILLTQSPVILSVSPGERVSFSCRASQSIGTNMHWYQQRTNGSPRLLIKYASESISGIPSRFSGSGSGTDFTLSINSVESEDIADYYCQQNNNWPTTFGQGTKLELK

SEQ ID NO: 15556 - protein, 107 aa, Artificial Sequence
  source: /note="Description of Artificial Sequence: Synthetic polypeptide"
DILLTQSPVILSVSPGERVSFSCRASQSIGTNTHWYQQRTNGSPRLLIKYASESISGIPSRFSGSGSGTDFTLSINSVESEDIADYYCQQNNNWPTTFGQGTKLELK

SEQ ID NO: 15557 - protein, 107 aa, Artificial Sequence
  source: /note="Description of Artificial Sequence: Synthetic polypeptide"
DILLTQSPVILSVSPGERVSFSCRASQSIGTNVHWYQQRTNGSPRLLIKYASESISGIPSRFSGSGSGTDFTLSINSVESEDIADYYCQQNNNWPTTFGQGTKLELK

SEQ ID NO: 15558 - protein, 107 aa, Artificial Sequence
  source: /note="Description of Artificial Sequence: Synthetic polypeptide"
DILLTQSPVILSVSPGERVSFSCRASQSIGTNHHWYQQRTNGSPRLLIKYASESISGIPSRFSGSGSGTDFTLSINSVESEDIADYYCQQNNNWPTTFGQGTKLELK

SEQ ID NO: 15559 - protein, 107 aa, Artificial Sequence
  source: /note="Description of Artificial Sequence: Synthetic polypeptide"
DILLTQSPVILSVSPGERVSFSCRASQSIGTNIHWYQQRTNGSPRLLMKYASESISGIPSRFSGSGSGTDFTLSINSVESEDIADYYCQQNNNWPTTFGQGTKLELK

SEQ ID NO: 15560 - protein, 107 aa, Artificial Sequence
  source: /note="Description of Artificial Sequence: Synthetic polypeptide"
DILLTQSPVILSVSPGERVSFSCRASQSIGTNIHWYQQRTNGSPRLLSKYASESISGIPSRFSGSGSGTDFTLSINSVESEDIADYYCQQNNNWPTTFGQGTKLELK

SEQ ID NO: 15561 - protein, 107 aa, Artificial Sequence
  source: /note="Description of Artificial Sequence: Synthetic polypeptide"
DILLTQSPVILSVSPGERVSFSCRASQSIGTNIHWYQQRTNGSPRLLLKYASESISGIPSRFSGSGSGTDFTLSINSVESEDIADYYCQQNNNWPTTFGQGTKLELK

SEQ ID NO: 15562 - protein, 107 aa, Artificial Sequence
  source: /note="Description of Artificial Sequence: Synthetic polypeptide"
DILLTQSPVILSVSPGERVSFSCRASQSIGTNIHWYQQRTNGSPRLLKKYASESISGIPSRFSGSGSGTDFTLSINSVESEDIADYYCQQNNNWPTTFGQGTKLELK

SEQ ID NO: 15563 - protein, 107 aa, Artificial Sequence
  source: /note="Description of Artificial Sequence: Synthetic polypeptide"
DILLTQSPVILSVSPGERVSFSCRASQSIGTNIHWYQQRTNGSPRLLIAYASESISGIPSRFSGSGSGTDFTLSINSVESEDIADYYCQQNNNWPTTFGQGTKLELK

SEQ ID NO: 15564 - protein, 107 aa, Artificial Sequence
  source: /note="Description of Artificial Sequence: Synthetic polypeptide"
DILLTQSPVILSVSPGERVSFSCRASQSIGTNIHWYQQRTNGSPRLLIEYASESISGIPSRFSGSGSGTDFTLSINSVESEDIADYYCQQNNNWPTTFGQGTKLELK

SEQ ID NO: 15565 - protein, 107 aa, Artificial Sequence
  source: /note="Description of Artificial Sequence: Synthetic polypeptide"
DILLTQSPVILSVSPGERVSFSCRASQSIGTNIHWYQQRTNGSPRLLIFYASESISGIPSRFSGSGSGTDFTLSINSVESEDIADYYCQQNNNWPTTFGQGTKLELK

SEQ ID NO: 15566 - protein, 107 aa, Artificial Sequence
  source: /note="Description of Artificial Sequence: Synthetic polypeptide"
DILLTQSPVILSVSPGERVSFSCRASQSIGTNIHWYQQRTNGSPRLLIGYASESISGIPSRFSGSGSGTDFTLSINSVESEDIADYYCQQNNNWPTTFGQGTKLELK

SEQ ID NO: 15567 - protein, 107 aa, Artificial Sequence
  source: /note="Description of Artificial Sequence: Synthetic polypeptide"
DILLTQSPVILSVSPGERVSFSCRASQSIGTNIHWYQQRTNGSPRLLINYASESISGIPSRFSGSGSGTDFTLSINSVESEDIADYYCQQNNNWPTTFGQGTKLELK

SEQ ID NO: 15568 - protein, 107 aa, Artificial Sequence
  source: /note="Description of Artificial Sequence: Synthetic polypeptide"
DILLTQSPVILSVSPGERVSFSCRASQSIGTNIHWYQQRTNGSPRLLIQYASESISGIPSRFSGSGSGTDFTLSINSVESEDIADYYCQQNNNWPTTFGQGTKLELK

SEQ ID NO: 15569 - protein, 107 aa, Artificial Sequence
  source: /note="Description of Artificial Sequence: Synthetic polypeptide"
DILLTQSPVILSVSPGERVSFSCRASQSIGTNIHWYQQRTNGSPRLLISYASESISGIPSRFSGSGSGTDFTLSINSVESEDIADYYCQQNNNWPTTFGQGTKLELK

SEQ ID NO: 15570 - protein, 107 aa, Artificial Sequence
  source: /note="Description of Artificial Sequence: Synthetic polypeptide"
DILLTQSPVILSVSPGERVSFSCRASQSIGTNIHWYQQRTNGSPRLLITYASESISGIPSRFSGSGSGTDFTLSINSVESEDIADYYCQQNNNWPTTFGQGTKLELK

SEQ ID NO: 15571 - protein, 107 aa, Artificial Sequence
  source: /note="Description of Artificial Sequence: Synthetic polypeptide"
DILLTQSPVILSVSPGERVSFSCRASQSIGTNIHWYQQRTNGSPRLLIVYASESISGIPSRFSGSGSGTDFTLSINSVESEDIADYYCQQNNNWPTTFGQGTKLELK

SEQ ID NO: 15572 - protein, 107 aa, Artificial Sequence
  source: /note="Description of Artificial Sequence: Synthetic polypeptide"
DILLTQSPVILSVSPGERVSFSCRASQSIGTNIHWYQQRTNGSPRLLIYYASESISGIPSRFSGSGSGTDFTLSINSVESEDIADYYCQQNNNWPTTFGQGTKLELK

SEQ ID NO: 15573 - protein, 107 aa, Artificial Sequence
  source: /note="Description of Artificial Sequence: Synthetic polypeptide"
DILLTQSPVILSVSPGERVSFSCRASQSIGTNIHWYQQRTNGSPRLLILYASESISGIPSRFSGSGSGTDFTLSINSVESEDIADYYCQQNNNWPTTFGQGTKLELK

SEQ ID NO: 15574 - protein, 107 aa, Artificial Sequence
  source: /note="Description of Artificial Sequence: Synthetic polypeptide"
DILLTQSPVILSVSPGERVSFSCRASQSIGTNIHWYQQRTNGSPRLLIHYASESISGIPSRFSGSGSGTDFTLSINSVESEDIADYYCQQNNNWPTTFGQGTKLELK

SEQ ID NO: 15575 - protein, 107 aa, Artificial Sequence
  source: /note="Description of Artificial Sequence: Synthetic polypeptide"
DILLTQSPVILSVSPGERVSFSCRASQSIGTNIHWYQQRTNGSPRLLIRYASESISGIPSRFSGSGSGTDFTLSINSVESEDIADYYCQQNNNWPTTFGQGTKLELK

SEQ ID NO: 15576 - protein, 107 aa, Artificial Sequence
  source: /note="Description of Artificial Sequence: Synthetic polypeptide"
DILLTQSPVILSVSPGERVSFSCRASQSIGTNIHWYQQRTNGSPRLLIKYTSESISGIPSRFSGSGSGTDFTLSINSVESEDIADYYCQQNNNWPTTFGQGTKLELK

SEQ ID NO: 15577 - protein, 107 aa, Artificial Sequence
  source: /note="Description of Artificial Sequence: Synthetic polypeptide"
DILLTQSPVILSVSPGERVSFSCRASQSIGTNIHWYQQRTNGSPRLLIKYLSESISGIPSRFSGSGSGTDFTLSINSVESEDIADYYCQQNNNWPTTFGQGTKLELK

SEQ ID NO: 15578 - protein, 107 aa, Artificial Sequence
  source: /note="Description of Artificial Sequence: Synthetic polypeptide"
DILLTQSPVILSVSPGERVSFSCRASQSIGTNIHWYQQRTNGSPRLLIKYAAESISGIPSRFSGSGSGTDFTLSINSVESEDIADYYCQQNNNWPTTFGQGTKLELK

SEQ ID NO: 15579 - protein, 107 aa, Artificial Sequence
  source: /note="Description of Artificial Sequence: Synthetic polypeptide"
DILLTQSPVILSVSPGERVSFSCRASQSIGTNIHWYQQRTNGSPRLLIKYACESISGIPSRFSGSGSGTDFTLSINSVESEDIADYYCQQNNNWPTTFGQGTKLELK

SEQ ID NO: 15580 - protein, 107 aa, Artificial Sequence
  source: /note="Description of Artificial Sequence: Synthetic polypeptide"
DILLTQSPVILSVSPGERVSFSCRASQSIGTNIHWYQQRTNGSPRLLIKYADESISGIPSRFSGSGSGTDFTLSINSVESEDIADYYCQQNNNWPTTFGQGTKLELK

SEQ ID NO: 15581 - protein, 107 aa, Artificial Sequence
  source: /note="Description of Artificial Sequence: Synthetic polypeptide"
DILLTQSPVILSVSPGERVSFSCRASQSIGTNIHWYQQRTNGSPRLLIKYAEESISGIPSRFSGSGSGTDFTLSINSVESEDIADYYCQQNNNWPTTFGQGTKLELK

SEQ ID NO: 15582 - protein, 107 aa, Artificial Sequence
  source: /note="Description of Artificial Sequence: Synthetic polypeptide"
DILLTQSPVILSVSPGERVSFSCRASQSIGTNIHWYQQRTNGSPRLLIKYAGESISGIPSRFSGSGSGTDFTLSINSVESEDIADYYCQQNNNWPTTFGQGTKLELK

SEQ ID NO: 15583 - protein, 107 aa, Artificial Sequence
  source: /note="Description of Artificial Sequence: Synthetic polypeptide"
DILLTQSPVILSVSPGERVSFSCRASQSIGTNIHWYQQRTNGSPRLLIKYAIESISGIPSRFSGSGSGTDFTLSINSVESEDIADYYCQQNNNWPTTFGQGTKLELK

SEQ ID NO: 15584 - protein, 107 aa, Artificial Sequence
  source: /note="Description of Artificial Sequence: Synthetic polypeptide"
DILLTQSPVILSVSPGERVSFSCRASQSIGTNIHWYQQRTNGSPRLLIKYAMESISGIPSRFSGSGSGTDFTLSINSVESEDIADYYCQQNNNWPTTFGQGTKLELK

SEQ ID NO: 15585 - protein, 107 aa, Artificial Sequence
  source: /note="Description of Artificial Sequence: Synthetic polypeptide"
DILLTQSPVILSVSPGERVSFSCRASQSIGTNIHWYQQRTNGSPRLLIKYAQESISGIPSRFSGSGSGTDFTLSINSVESEDIADYYCQQNNNWPTTFGQGTKLELK

SEQ ID NO: 15586 - protein, 107 aa, Artificial Sequence
  source: /note="Description of Artificial Sequence: Synthetic polypeptide"
DILLTQSPVILSVSPGERVSFSCRASQSIGTNIHWYQQRTNGSPRLLIKYAVESISGIPSRFSGSGSGTDFTLSINSVESEDIADYYCQQNNNWPTTFGQGTKLELK

SEQ ID NO: 15587 - protein, 107 aa, Artificial Sequence
  source: /note="Description of Artificial Sequence: Synthetic polypeptide"
DILLTQSPVILSVSPGERVSFSCRASQSIGTNIHWYQQRTNGSPRLLIKYAWESISGIPSRFSGSGSGTDFTLSINSVESEDIADYYCQQNNNWPTTFGQGTKLELK

SEQ ID NO: 15588 - protein, 107 aa, Artificial Sequence
  source: /note="Description of Artificial Sequence: Synthetic polypeptide"
DILLTQSPVILSVSPGERVSFSCRASQSIGTNIHWYQQRTNGSPRLLIKYARESISGIPSRFSGSGSGTDFTLSINSVESEDIADYYCQQNNNWPTTFGQGTKLELK

SEQ ID NO: 15589 - protein, 107 aa, Artificial Sequence
  source: /note="Description of Artificial Sequence: Synthetic polypeptide"
DILLTQSPVILSVSPGERVSFSCRASQSIGTNIHWYQQRTNGSPRLLIKYAKESISGIPSRFSGSGSGTDFTLSINSVESEDIADYYCQQNNNWPTTFGQGTKLELK

SEQ ID NO: 15590 - protein, 107 aa, Artificial Sequence
  source: /note="Description of Artificial Sequence: Synthetic polypeptide"
DILLTQSPVILSVSPGERVSFSCRASQSIGTNIHWYQQRTNGSPRLLIKYASGSISGIPSRFSGSGSGTDFTLSINSVESEDIADYYCQQNNNWPTTFGQGTKLELK

SEQ ID NO: 15591 - protein, 107 aa, Artificial Sequence
  source: /note="Description of Artificial Sequence: Synthetic polypeptide"
DILLTQSPVILSVSPGERVSFSCRASQSIGTNIHWYQQRTNGSPRLLIKYASEMISGIPSRFSGSGSGTDFTLSINSVESEDIADYYCQQNNNWPTTFGQGTKLELK

SEQ ID NO: 15592 - protein, 107 aa, Artificial Sequence
  source: /note="Description of Artificial Sequence: Synthetic polypeptide"
DILLTQSPVILSVSPGERVSFSCRASQSIGTNIHWYQQRTNGSPRLLIKYASESASGIPSRFSGSGSGTDFTLSINSVESEDIADYYCQQNNNWPTTFGQGTKLELK

SEQ ID NO: 15593 - protein, 107 aa, Artificial Sequence
  source: /note="Description of Artificial Sequence: Synthetic polypeptide"
DILLTQSPVILSVSPGERVSFSCRASQSIGTNIHWYQQRTNGSPRLLIKYASESFSGIPSRFSGSGSGTDFTLSINSVESEDIADYYCQQNNNWPTTFGQGTKLELK

SEQ ID NO: 15594 - protein, 107 aa, Artificial Sequence
  source: /note="Description of Artificial Sequence: Synthetic polypeptide"
DILLTQSPVILSVSPGERVSFSCRASQSIGTNIHWYQQRTNGSPRLLIKYASESIGGIPSRFSGSGSGTDFTLSINSVESEDIADYYCQQNNNWPTTFGQGTKLELK

SEQ ID NO: 15595 - protein, 107 aa, Artificial Sequence
  source: /note="Description of Artificial Sequence: Synthetic polypeptide"
DILLTQSPVILSVSPGERVSFSCRASQSIGTNIHWYQQRTNGSPRLLIKYASESILGIPSRFSGSGSGTDFTLSINSVESEDIADYYCQQNNNWPTTFGQGTKLELK

SEQ ID NO: 15596 - protein, 107 aa, Artificial Sequence
  source: /note="Description of Artificial Sequence: Synthetic polypeptide"
DILLTQSPVILSVSPGERVSFSCRASQSIGTNIHWYQQRTNGSPRLLIKYASESIAGIPSRFSGSGSGTDFTLSINSVESEDIADYYCQQNNNWPTTFGQGTKLELK

SEQ ID NO: 15597 - protein, 107 aa, Artificial Sequence
  source: /note="Description of Artificial Sequence: Synthetic polypeptide"
DILLTQSPVILSVSPGERVSFSCRASQSIGTNIHWYQQRTNGSPRLLIKYASESICGIPSRFSGSGSGTDFTLSINSVESEDIADYYCQQNNNWPTTFGQGTKLELK

SEQ ID NO: 15598 - protein, 107 aa, Artificial Sequence
  source: /note="Description of Artificial Sequence: Synthetic polypeptide"
DILLTQSPVILSVSPGERVSFSCRASQSIGTNIHWYQQRTNGSPRLLIKYASESIDGIPSRFSGSGSGTDFTLSINSVESEDIADYYCQQNNNWPTTFGQGTKLELK

SEQ ID NO: 15599 - protein, 107 aa, Artificial Sequence
  source: /note="Description of Artificial Sequence: Synthetic polypeptide"
DILLTQSPVILSVSPGERVSFSCRASQSIGTNIHWYQQRTNGSPRLLIKYASESIEGIPSRFSGSGSGTDFTLSINSVESEDIADYYCQQNNNWPTTFGQGTKLELK

SEQ ID NO: 15600 - protein, 107 aa, Artificial Sequence
  source: /note="Description of Artificial Sequence: Synthetic polypeptide"
DILLTQSPVILSVSPGERVSFSCRASQSIGTNIHWYQQRTNGSPRLLIKYASESIFGIPSRFSGSGSGTDFTLSINSVESEDIADYYCQQNNNWPTTFGQGTKLELK

SEQ ID NO: 15601 - protein, 107 aa, Artificial Sequence
  source: /note="Description of Artificial Sequence: Synthetic polypeptide"
DILLTQSPVILSVSPGERVSFSCRASQSIGTNIHWYQQRTNGSPRLLIKYASESINGIPSRFSGSGSGTDFTLSINSVESEDIADYYCQQNNNWPTTFGQGTKLELK

SEQ ID NO: 15602 - protein, 107 aa, Artificial Sequence
  source: /note="Description of Artificial Sequence: Synthetic polypeptide"
DILLTQSPVILSVSPGERVSFSCRASQSIGTNIHWYQQRTNGSPRLLIKYASESIPGIPSRFSGSGSGTDFTLSINSVESEDIADYYCQQNNNWPTTFGQGTKLELK

SEQ ID NO: 15603 - protein, 107 aa, Artificial Sequence
  source: /note="Description of Artificial Sequence: Synthetic polypeptide"
DILLTQSPVILSVSPGERVSFSCRASQSIGTNIHWYQQRTNGSPRLLIKYASESIQGIPSRFSGSGSGTDFTLSINSVESEDIADYYCQQNNNWPTTFGQGTKLELK

SEQ ID NO: 15604 - protein, 107 aa, Artificial Sequence
  source: /note="Description of Artificial Sequence: Synthetic polypeptide"
DILLTQSPVILSVSPGERVSFSCRASQSIGTNIHWYQQRTNGSPRLLIKYASESIVGIPSRFSGSGSGTDFTLSINSVESEDIADYYCQQNNNWPTTFGQGTKLELK

SEQ ID NO: 15605 - protein, 107 aa, Artificial Sequence
  source: /note="Description of Artificial Sequence: Synthetic polypeptide"
DILLTQSPVILSVSPGERVSFSCRASQSIGTNIHWYQQRTNGSPRLLIKYASESIWGIPSRFSGSGSGTDFTLSINSVESEDIADYYCQQNNNWPTTFGQGTKLELK

SEQ ID NO: 15606 - protein, 107 aa, Artificial Sequence
  source: /note="Description of Artificial Sequence: Synthetic polypeptide"
DILLTQSPVILSVSPGERVSFSCRASQSIGTNIHWYQQRTNGSPRLLIKYASESIHGIPSRFSGSGSGTDFTLSINSVESEDIADYYCQQNNNWPTTFGQGTKLELK

SEQ ID NO: 15607 - protein, 107 aa, Artificial Sequence
  source: /note="Description of Artificial Sequence: Synthetic polypeptide"
DILLTQSPVILSVSPGERVSFSCRASQSIGTNIHWYQQRTNGSPRLLIKYASESIRGIPSRFSGSGSGTDFTLSINSVESEDIADYYCQQNNNWPTTFGQGTKLELK

SEQ ID NO: 15608 - protein, 107 aa, Artificial Sequence
  source: /note="Description of Artificial Sequence: Synthetic polypeptide"
DILLTQSPVILSVSPGERVSFSCRASQSIGTNIHWYQQRTNGSPRLLIKYASESIKGIPSRFSGSGSGTDFTLSINSVESEDIADYYCQQNNNWPTTFGQGTKLELK

SEQ ID NO: 15609 - protein, 107 aa, Artificial Sequence
  source: /note="Description of Artificial Sequence: Synthetic polypeptide"
DILLTQSPVILSVSPGERVSFSCRASQSIGTNIHWYQQRTNGSPRLLIKYASESISGIPSRFSGSGSGTDFTLSINSVESEDIADFYCQQNNNWPTTFGQGTKLELK

SEQ ID NO: 15610 - protein, 107 aa, Artificial Sequence
  source: /note="Description of Artificial Sequence: Synthetic polypeptide"
DILLTQSPVILSVSPGERVSFSCRASQSIGTNIHWYQQRTNGSPRLLIKYASESISGIPSRFSGSGSGTDFTLSINSVESEDIADMYCQQNNNWPTTFGQGTKLELK

SEQ ID NO: 15611 - protein, 107 aa, Artificial Sequence
  source: /note="Description of Artificial Sequence: Synthetic polypeptide"
DILLTQSPVILSVSPGERVSFSCRASQSIGTNIHWYQQRTNGSPRLLIKYASESISGIPSRFSGSGSGTDFTLSINSVESEDIADHYCQQNNNWPTTFGQGTKLELK

SEQ ID NO: 15612 - protein, 107 aa, Artificial Sequence
  source: /note="Description of Artificial Sequence: Synthetic polypeptide"
DILLTQSPVILSVSPGERVSFSCRASQSIGTNIHWYQQRTNGSPRLLIKYASESISGIPSRFSGSGSGTDFTLSINSVESEDIADYLCQQNNNWPTTFGQGTKLELK

SEQ ID NO: 15613 - protein, 107 aa, Artificial Sequence
  source: /note="Description of Artificial Sequence: Synthetic polypeptide"
DILLTQSPVILSVSPGERVSFSCRASQSIGTNIHWYQQRTNGSPRLLIKYASESISGIPSRFSGSGSGTDFTLSINSVESEDIADYCCQQNNNWPTTFGQGTKLELK

SEQ ID NO: 15614 - protein, 107 aa, Artificial Sequence
  source: /note="Description of Artificial Sequence: Synthetic polypeptide"
DILLTQSPVILSVSPGERVSFSCRASQSIGTNIHWYQQRTNGSPRLLIKYASESISGIPSRFSGSGSGTDFTLSINSVESEDIADYDCQQNNNWPTTFGQGTKLELK

SEQ ID NO: 15615 - protein, 107 aa, Artificial Sequence
  source: /note="Description of Artificial Sequence: Synthetic polypeptide"
DILLTQSPVILSVSPGERVSFSCRASQSIGTNIHWYQQRTNGSPRLLIKYASESISGIPSRFSGSGSGTDFTLSINSVESEDIADYFCQQNNNWPTTFGQGTKLELK

SEQ ID NO: 15616 - protein, 107 aa, Artificial Sequence
  source: /note="Description of Artificial Sequence: Synthetic polypeptide"
DILLTQSPVILSVSPGERVSFSCRASQSIGTNIHWYQQRTNGSPRLLIKYASESISGIPSRFSGSGSGTDFTLSINSVESEDIADYGCQQNNNWPTTFGQGTKLELK

SEQ ID NO: 15617 - protein, 107 aa, Artificial Sequence
  source: /note="Description of Artificial Sequence: Synthetic polypeptide"
DILLTQSPVILSVSPGERVSFSCRASQSIGTNIHWYQQRTNGSPRLLIKYASESISGIPSRFSGSGSGTDFTLSINSVESEDIADYICQQNNNWPTTFGQGTKLELK

SEQ ID NO: 15618 - protein, 107 aa, Artificial Sequence
  source: /note="Description of Artificial Sequence: Synthetic polypeptide"
DILLTQSPVILSVSPGERVSFSCRASQSIGTNIHWYQQRTNGSPRLLIKYASESISGIPSRFSGSGSGTDFTLSINSVESEDIADYNCQQNNNWPTTFGQGTKLELK

SEQ ID NO: 15619 - protein, 107 aa, Artificial Sequence
  source: /note="Description of Artificial Sequence: Synthetic polypeptide"
DILLTQSPVILSVSPGERVSFSCRASQSIGTNIHWYQQRTNGSPRLLIKYASESISGIPSRFSGSGSGTDFTLSINSVESEDIADYPCQQNNNWPTTFGQGTKLELK

SEQ ID NO: 15620 - protein, 107 aa, Artificial Sequence
  source: /note="Description of Artificial Sequence: Synthetic polypeptide"
DILLTQSPVILSVSPGERVSFSCRASQSIGTNIHWYQQRTNGSPRLLIKYASESISGIPSRFSGSGSGTDFTLSINSVESEDIADYSCQQNNNWPTTFGQGTKLELK

SEQ ID NO: 15621 - protein, 107 aa, Artificial Sequence
  source: /note="Description of Artificial Sequence: Synthetic polypeptide"
DILLTQSPVILSVSPGERVSFSCRASQSIGTNIHWYQQRTNGSPRLLIKYASESISGIPSRFSGSGSGTDFTLSINSVESEDIADYTCQQNNNWPTTFGQGTKLELK

SEQ ID NO: 15622 - protein, 107 aa, Artificial Sequence
  source: /note="Description of Artificial Sequence: Synthetic polypeptide"
DILLTQSPVILSVSPGERVSFSCRASQSIGTNIHWYQQRTNGSPRLLIKYASESISGIPSRFSGSGSGTDFTLSINSVESEDIADYVCQQNNNWPTTFGQGTKLELK

SEQ ID NO: 15623 - protein, 107 aa, Artificial Sequence
  source: /note="Description of Artificial Sequence: Synthetic polypeptide"
DILLTQSPVILSVSPGERVSFSCRASQSIGTNIHWYQQRTNGSPRLLIKYASESISGIPSRFSGSGSGTDFTLSINSVESEDIADYWCQQNNNWPTTFGQGTKLELK

SEQ ID NO: 15624 - protein, 107 aa, Artificial Sequence
  source: /note="Description of Artificial Sequence: Synthetic polypeptide"
DILLTQSPVILSVSPGERVSFSCRASQSIGTNIHWYQQRTNGSPRLLIKYASESISGIPSRFSGSGSGTDFTLSINSVESEDIADYKCQQNNNWPTTFGQGTKLELK

SEQ ID NO: 15625 - protein, 107 aa, Artificial Sequence
  source: /note="Description of Artificial Sequence: Synthetic polypeptide"
DILLTQSPVILSVSPGERVSFSCRASQSIGTNIHWYQQRTNGSPRLLIKYASESISGIPSRFSGSGSGTDFTLSINSVESEDIADYHCQQNNNWPTTFGQGTKLELK

SEQ ID NO: 15626 - protein, 107 aa, Artificial Sequence
  source: /note="Description of Artificial Sequence: Synthetic polypeptide"
DILLTQSPVILSVSPGERVSFSCRASQSIGTNIHWYQQRTNGSPRLLIKYASESISGIPSRFSGSGSGTDFTLSINSVESEDIADYRCQQNNNWPTTFGQGTKLELK

SEQ ID NO: 15627 - protein, 107 aa, Artificial Sequence
  source: /note="Description of Artificial Sequence: Synthetic polypeptide"
DILLTQSPVILSVSPGERVSFSCRASQSIGTNIHWYQQRTNGSPRLLIKYASESISGIPSRFSGSGSGTDFTLSINSVESEDIADYYCEQNNNWPTTFGQGTKLELK

SEQ ID NO: 15628 - protein, 107 aa, Artificial Sequence
  source: /note="Description of Artificial Sequence: Synthetic polypeptide"
DILLTQSPVILSVSPGERVSFSCRASQSIGTNIHWYQQRTNGSPRLLIKYASESISGIPSRFSGSGSGTDFTLSINSVESEDIADYYCQQLNNWPTTFGQGTKLELK

SEQ ID NO: 15629 - protein, 107 aa, Artificial Sequence
  source: /note="Description of Artificial Sequence: Synthetic polypeptide"
DILLTQSPVILSVSPGERVSFSCRASQSIGTNIHWYQQRTNGSPRLLIKYASESISGIPSRFSGSGSGTDFTLSINSVESEDIADYYCQQANNWPTTFGQGTKLELK

SEQ ID NO: 15630 - protein, 107 aa, Artificial Sequence
  source: /note="Description of Artificial Sequence: Synthetic polypeptide"
DILLTQSPVILSVSPGERVSFSCRASQSIGTNIHWYQQRTNGSPRLLIKYASESISGIPSRFSGSGSGTDFTLSINSVESEDIADYYCQQCNNWPTTFGQGTKLELK

SEQ ID NO: 15631 - protein, 107 aa, Artificial Sequence
  source: /note="Description of Artificial Sequence: Synthetic polypeptide"
DILLTQSPVILSVSPGERVSFSCRASQSIGTNIHWYQQRTNGSPRLLIKYASESISGIPSRFSGSGSGTDFTLSINSVESEDIADYYCQQINNWPTTFGQGTKLELK

SEQ ID NO: 15632 - protein, 107 aa, Artificial Sequence
  source: /note="Description of Artificial Sequence: Synthetic polypeptide"
DILLTQSPVILSVSPGERVSFSCRASQSIGTNIHWYQQRTNGSPRLLIKYASESISGIPSRFSGSGSGTDFTLSINSVESEDIADYYCQQMNNWPTTFGQGTKLELK

SEQ ID NO: 15633 - protein, 107 aa, Artificial Sequence
  source: /note="Description of Artificial Sequence: Synthetic polypeptide"
DILLTQSPVILSVSPGERVSFSCRASQSIGTNIHWYQQRTNGSPRLLIKYASESISGIPSRFSGSGSGTDFTLSINSVESEDIADYYCQQSNNWPTTFGQGTKLELK

SEQ ID NO: 15634 - protein, 107 aa, Artificial Sequence
  source: /note="Description of Artificial Sequence: Synthetic polypeptide"
DILLTQSPVILSVSPGERVSFSCRASQSIGTNIHWYQQRTNGSPRLLIKYASESISGIPSRFSGSGSGTDFTLSINSVESEDIADYYCQQTNNWPTTFGQGTKLELK

SEQ ID NO: 15635 - protein, 107 aa, Artificial Sequence
  source: /note="Description of Artificial Sequence: Synthetic polypeptide"
DILLTQSPVILSVSPGERVSFSCRASQSIGTNIHWYQQRTNGSPRLLIKYASESISGIPSRFSGSGSGTDFTLSINSVESEDIADYYCQQVNNWPTTFGQGTKLELK

SEQ ID NO: 15636 - protein, 107 aa, Artificial Sequence
  source: /note="Description of Artificial Sequence: Synthetic polypeptide"
DILLTQSPVILSVSPGERVSFSCRASQSIGTNIHWYQQRTNGSPRLLIKYASESISGIPSRFSGSGSGTDFTLSINSVESEDIADYYCQQHNNWPTTFGQGTKLELK

SEQ ID NO: 15637 - protein, 107 aa, Artificial Sequence
  source: /note="Description of Artificial Sequence: Synthetic polypeptide"
DILLTQSPVILSVSPGERVSFSCRASQSIGTNIHWYQQRTNGSPRLLIKYASESISGIPSRFSGSGSGTDFTLSINSVESEDIADYYCQQRNNWPTTFGQGTKLELK

SEQ ID NO: 15638 - protein, 107 aa, Artificial Sequence
  source: /note="Description of Artificial Sequence: Synthetic polypeptide"
DILLTQSPVILSVSPGERVSFSCRASQSIGTNIHWYQQRTNGSPRLLIKYASESISGIPSRFSGSGSGTDFTLSINSVESEDIADYYCQQNCNWPTTFGQGTKLELK

SEQ ID NO: 15639 - protein, 107 aa, Artificial Sequence
  source: /note="Description of Artificial Sequence: Synthetic polypeptide"
DILLTQSPVILSVSPGERVSFSCRASQSIGTNIHWYQQRTNGSPRLLIKYASESISGIPSRFSGSGSGTDFTLSINSVESEDIADYYCQQNDNWPTTFGQGTKLELK

SEQ ID NO: 15640 - protein, 107 aa, Artificial Sequence
  source: /note="Description of Artificial Sequence: Synthetic polypeptide"
DILLTQSPVILSVSPGERVSFSCRASQSIGTNIHWYQQRTNGSPRLLIKYASESISGIPSRFSGSGSGTDFTLSINSVESEDIADYYCQQNLNWPTTFGQGTKLELK

SEQ ID NO: 15641 - protein, 107 aa, Artificial Sequence
  source: /note="Description of Artificial Sequence: Synthetic polypeptide"
DILLTQSPVILSVSPGERVSFSCRASQSIGTNIHWYQQRTNGSPRLLIKYASESISGIPSRFSGSGSGTDFTLSINSVESEDIADYYCQQNMNWPTTFGQGTKLELK

SEQ ID NO: 15642 - protein, 107 aa, Artificial Sequence
  source: /note="Description of Artificial Sequence: Synthetic polypeptide"
DILLTQSPVILSVSPGERVSFSCRASQSIGTNIHWYQQRTNGSPRLLIKYASESISGIPSRFSGSGSGTDFTLSINSVESEDIADYYCQQNSNWPTTFGQGTKLELK

SEQ ID NO: 15643 - protein, 107 aa, Artificial Sequence
  source: /note="Description of Artificial Sequence: Synthetic polypeptide"
DILLTQSPVILSVSPGERVSFSCRASQSIGTNIHWYQQRTNGSPRLLIKYASESISGIPSRFSGSGSGTDFTLSINSVESEDIADYYCQQNTNWPTTFGQGTKLELK

SEQ ID NO: 15644 - protein, 107 aa, Artificial Sequence
  source: /note="Description of Artificial Sequence: Synthetic polypeptide"
DILLTQSPVILSVSPGERVSFSCRASQSIGTNIHWYQQRTNGSPRLLIKYASESISGIPSRFSGSGSGTDFTLSINSVESEDIADYYCQQNVNWPTTFGQGTKLELK

SEQ ID NO: 15645 - protein, 107 aa, Artificial Sequence
  source: /note="Description of Artificial Sequence: Synthetic polypeptide"
DILLTQSPVILSVSPGERVSFSCRASQSIGTNIHWYQQRTNGSPRLLIKYASESISGIPSRFSGSGSGTDFTLSINSVESEDIADYYCQQNWNWPTTFGQGTKLELK

SEQ ID NO: 15646 - protein, 107 aa, Artificial Sequence
  source: /note="Description of Artificial Sequence: Synthetic polypeptide"
DILLTQSPVILSVSPGERVSFSCRASQSIGTNIHWYQQRTNGSPRLLIKYASESISGIPSRFSGSGSGTDFTLSINSVESEDIADYYCQQNYNWPTTFGQGTKLELK

SEQ ID NO: 15647 - protein, 107 aa, Artificial Sequence
  source: /note="Description of Artificial Sequence: Synthetic polypeptide"
DILLTQSPVILSVSPGERVSFSCRASQSIGTNIHWYQQRTNGSPRLLIKYASESISGIPSRFSGSGSGTDFTLSINSVESEDIADYYCQQNHNWPTTFGQGTKLELK

SEQ ID NO: 15648 - protein, 107 aa, Artificial Sequence
  source: /note="Description of Artificial Sequence: Synthetic polypeptide"
DILLTQSPVILSVSPGERVSFSCRASQSIGTNIHWYQQRTNGSPRLLIKYASESISGIPSRFSGSGSGTDFTLSINSVESEDIADYYCQQNKNWPTTFGQGTKLELK

SEQ ID NO: 15649 - protein, 107 aa, Artificial Sequence
  source: /note="Description of Artificial Sequence: Synthetic polypeptide"
DILLTQSPVILSVSPGERVSFSCRASQSIGTNIHWYQQRTNGSPRLLIKYASESISGIPSRFSGSGSGTDFTLSINSVESEDIADYYCQQNRNWPTTFGQGTKLELK

SEQ ID NO: 15650 - protein, 107 aa, Artificial Sequence
  source: /note="Description of Artificial Sequence: Synthetic polypeptide"
DILLTQSPVILSVSPGERVSFSCRASQSIGTNIHWYQQRTNGSPRLLIKYASESISGIPSRFSGSGSGTDFTLSINSVESEDIADYYCQQNNTWPTTFGQGTKLELK

SEQ ID NO: 15651 - protein, 107 aa, Artificial Sequence
  source: /note="Description of Artificial Sequence: Synthetic polypeptide"
DILLTQSPVILSVSPGERVSFSCRASQSIGTNIHWYQQRTNGSPRLLIKYASESISGIPSRFSGSGSGTDFTLSINSVESEDIADYYCQQNNNWPLTFGQGTKLELK

SEQ ID NO: 15652 - protein, 107 aa, Artificial Sequence
  source: /note="Description of Artificial Sequence: Synthetic polypeptide"
DILLTQSPVILSVSPGERVSFSCRASQSIGTNIHWYQQRTNGSPRLLIKYASESISGIPSRFSGSGSGTDFTLSINSVESEDIADYYCQQNNNWPCTFGQGTKLELK

SEQ ID NO: 15653 - protein, 107 aa, Artificial Sequence
  source: /note="Description of Artificial Sequence: Synthetic polypeptide"
DILLTQSPVILSVSPGERVSFSCRASQSIGTNIHWYQQRTNGSPRLLIKYASESISGIPSRFSGSGSGTDFTLSINSVESEDIADYYCQQNNNWPMTFGQGTKLELK

SEQ ID NO: 15654 - protein, 107 aa, Artificial Sequence
  source: /note="Description of Artificial Sequence: Synthetic polypeptide"
DILLTQSPVILSVSPGERVSFSCRASQSIGTNIHWYQQRTNGSPRLLIKYASESISGIPSRFSGSGSGTDFTLSINSVESEDIADYYCQQNNNWPVTFGQGTKLELK

SEQ ID NO: 15655 - protein, 107 aa, Artificial Sequence
  source: /note="Description of Artificial Sequence: Synthetic polypeptide"
DILLTQSPVILSVSPGERVSFSCRASQSIGTNIHWYQQRTNGSPRLLIKYASESISGIPSRFSGSGSGTDFTLSINSVESEDIADYYCQQNNNWPTLFGQGTKLELK

SEQ ID NO: 15656 - protein, 107 aa, Artificial Sequence
  source: /note="Description of Artificial Sequence: Synthetic polypeptide"
DILLTQSPVILSVSPGERVSFSCRASQSIGTNIHWYQQRTNGSPRLLIKYASESISGIPSRFSGSGSGTDFTLSINSVESEDIADYYCQQNNNWPTAFGQGTKLELK

SEQ ID NO: 15657 - protein, 107 aa, Artificial Sequence
  source: /note="Description of Artificial Sequence: Synthetic polypeptide"
DILLTQSPVILSVSPGERVSFSCRASQSIGTNIHWYQQRTNGSPRLLIKYASESISGIPSRFSGSGSGTDFTLSINSVESEDIADYYCQQNNNWPTDFGQGTKLELK

SEQ ID NO: 15658 - protein, 107 aa, Artificial Sequence
  source: /note="Description of Artificial Sequence: Synthetic polypeptide"
DILLTQSPVILSVSPGERVSFSCRASQSIGTNIHWYQQRTNGSPRLLIKYASESISGIPSRFSGSGSGTDFTLSINSVESEDIADYYCQQNNNWPTGFGQGTKLELK

SEQ ID NO: 15659 - protein, 107 aa, Artificial Sequence
  source: /note="Description of Artificial Sequence: Synthetic polypeptide"
DILLTQSPVILSVSPGERVSFSCRASQSIGTNIHWYQQRTNGSPRLLIKYASESISGIPSRFSGSGSGTDFTLSINSVESEDIADYYCQQNNNWPTQFGQGTKLELK

SEQ ID NO: 15660 - protein, 107 aa, Artificial Sequence
  source: /note="Description of Artificial Sequence: Synthetic polypeptide"
DILLTQSPVILSVSPGERVSFSCRASQSIGTNIHWYQQRTNGSPRLLIKYASESISGIPSRFSGSGSGTDFTLSINSVESEDIADYYCQQNNNWPTSFGQGTKLELK

SEQ ID NO: 15661 - protein, 107 aa, Artificial Sequence
  source: /note="Description of Artificial Sequence: Synthetic polypeptide"
DILLTQSPVILSVSPGERVSFSCRASQSIGTNIHWYQQRTNGSPRLLIKYASESISGIPSRFSGSGSGTDFTLSINSVESEDIADYYCQQNNNWPTVFGQGTKLELK

SEQ ID NO: 15662 - protein, 107 aa, Artificial Sequence
  source: /note="Description of Artificial Sequence: Synthetic polypeptide"
DILLTQSPVILSVSPGERVSFSCRASQSIGTNIHWYQQRTNGSPRLLIKYASESISGIPSRFSGSGSGTDFTLSINSVESEDIADYYCQQNNNWPTKFGQGTKLELK

SEQ ID NO: 15663 - protein, 107 aa, Artificial Sequence
  source: /note="Description of Artificial Sequence: Synthetic polypeptide"
DILLTQSPVILSVSPGERVSFSCRASQSIGTNIHWYQQRTNGSPRLLIKYASESISGIPSRFSGSGSGTDFTLSINSVESEDIADYYCQQNNNWPTRFGQGTKLELK

SEQ ID NO: 15664 - protein, 107 aa, Artificial Sequence
  source: /note="Description of Artificial Sequence: Synthetic polypeptide"
DILLTQSPVILSVSPGERVSFSCRASQSIGTNIHWYQQRTNGSPRLLIKYASESISGIPSRFSGSGSGTDFTLSINSVESEDIADYYCQQNNNWPTTAGQGTKLELK

SEQ ID NO: 15665 - protein, 107 aa, Artificial Sequence
  source: /note="Description of Artificial Sequence: Synthetic polypeptide"
DILLTQSPVILSVSPGERVSFSCRASQSIGTNIHWYQQRTNGSPRLLIKYASESISGIPSRFSGSGSGTDFTLSINSVESEDIADYYCQQNNNWPTTMGQGTKLELK

SEQ ID NO: 15666 - protein, 107 aa, Artificial Sequence
  source: /note="Description of Artificial Sequence: Synthetic polypeptide"
DILLTQSPVILSVSPGERVSFSCRASQSIGTNIHWYQQRTNGSPRLLIKYASESISGIPSRFSGSGSGTDFTLSINSVESEDIADYYCQQNNNWPTTSGQGTKLELK

SEQ ID NO: 15667 - protein, 107 aa, Artificial Sequence
  source: /note="Description of Artificial Sequence: Synthetic polypeptide"
DILLTQSPVILSVSPGERVSFSCRASQSIGTNIHWYQQRTNGSPRLLIKYASESISGIPSRFSGSGSGTDFTLSINSVESEDIADYYCQQNNNWPTTVGQGTKLELK

SEQ ID NO: 15668 - protein, 107 aa, Artificial Sequence
  source: /note="Description of Artificial Sequence: Synthetic polypeptide"
DILLTQSPVILSVSPGERVSFSCRASQSIGTNIHWYQQRTNGSPRLLIKYASESISGIPSRFSGSGSGTDFTLSINSVESEDIADYYCQQNNNWPTTYGQGTKLELK

SEQ ID NO: 15669 - protein, 107 aa, Artificial Sequence
  source: /note="Description of Artificial Sequence: Synthetic polypeptide"
DILLTQSPVILSVSPGERVSFSCRASQSIGTNIHWYQQRTNGSPRLLIKYASESISGIPSRFSGSGSGTDFTLSINSVESEDIADYYCQQNNNWPTTFLQGTKLELK

SEQ ID NO: 15670 - protein, 107 aa, Artificial Sequence
  source: /note="Description of Artificial Sequence: Synthetic polypeptide"
DILLTQSPVILSVSPGERVSFSCRASQSIGTNIHWYQQRTNGSPRLLIKYASESISGIPSRFSGSGSGTDFTLSINSVESEDIADYYCQQNNNWPTTFDQGTKLELK

SEQ ID NO: 15671 - protein, 107 aa, Artificial Sequence
  source: /note="Description of Artificial Sequence: Synthetic polypeptide"
DILLTQSPVILSVSPGERVSFSCRASQSIGTNIHWYQQRTNGSPRLLIKYASESISGIPSRFSGSGSGTDFTLSINSVESEDIADYYCQQNNNWPTTFEQGTKLELK

SEQ ID NO: 15672 - protein, 107 aa, Artificial Sequence
  source: /note="Description of Artificial Sequence: Synthetic polypeptide"
DILLTQSPVILSVSPGERVSFSCRASQSIGTNIHWYQQRTNGSPRLLIKYASESISGIPSRFSGSGSGTDFTLSINSVESEDIADYYCQQNNNWPTTFFQGTKLELK

SEQ ID NO: 15673 - protein, 107 aa, Artificial Sequence
  source: /note="Description of Artificial Sequence: Synthetic polypeptide"
DILLTQSPVILSVSPGERVSFSCRASQSIGTNIHWYQQRTNGSPRLLIKYASESISGIPSRFSGSGSGTDFTLSINSVESEDIADYYCQQNNNWPTTFIQGTKLELK

SEQ ID NO: 15674 - protein, 107 aa, Artificial Sequence
  source: /note="Description of Artificial Sequence: Synthetic polypeptide"
DILLTQSPVILSVSPGERVSFSCRASQSIGTNIHWYQQRTNGSPRLLIKYASESISGIPSRFSGSGSGTDFTLSINSVESEDIADYYCQQNNNWPTTFMQGTKLELK

SEQ ID NO: 15675 - protein, 107 aa, Artificial Sequence
  source: /note="Description of Artificial Sequence: Synthetic polypeptide"
DILLTQSPVILSVSPGERVSFSCRASQSIGTNIHWYQQRTNGSPRLLIKYASESISGIPSRFSGSGSGTDFTLSINSVESEDIADYYCQQNNNWPTTFNQGTKLELK

SEQ ID NO: 15676 - protein, 107 aa, Artificial Sequence
  source: /note="Description of Artificial Sequence: Synthetic polypeptide"
DILLTQSPVILSVSPGERVSFSCRASQSIGTNIHWYQQRTNGSPRLLIKYASESISGIPSRFSGSGSGTDFTLSINSVESEDIADYYCQQNNNWPTTFSQGTKLELK

SEQ ID NO: 15677 - protein, 107 aa, Artificial Sequence
  source: /note="Description of Artificial Sequence: Synthetic polypeptide"
DILLTQSPVILSVSPGERVSFSCRASQSIGTNIHWYQQRTNGSPRLLIKYASESISGIPSRFSGSGSGTDFTLSINSVESEDIADYYCQQNNNWPTTFTQGTKLELK

SEQ ID NO: 15678 - protein, 107 aa, Artificial Sequence
  source: /note="Description of Artificial Sequence: Synthetic polypeptide"
DILLTQSPVILSVSPGERVSFSCRASQSIGTNIHWYQQRTNGSPRLLIKYASESISGIPSRFSGSGSGTDFTLSINSVESEDIADYYCQQNNNWPTTFVQGTKLELK

SEQ ID NO: 15679 - protein, 107 aa, Artificial Sequence
  source: /note="Description of Artificial Sequence: Synthetic polypeptide"
DILLTQSPVILSVSPGERVSFSCRASQSIGTNIHWYQQRTNGSPRLLIKYASESISGIPSRFSGSGSGTDFTLSINSVESEDIADYYCQQNNNWPTTFKQGTKLELK

SEQ ID NO: 15680 - protein, 107 aa, Artificial Sequence
  source: /note="Description of Artificial Sequence: Synthetic polypeptide"
DILLTQSPVILSVSPGERVSFSCRASQSIGTNIHWYQQRTNGSPRLLIKYASESISGIPSRFSGSGSGTDFTLSINSVESEDIADYYCQQNNNWPTTFHQGTKLELK

SEQ ID NO: 15681 - protein, 107 aa, Artificial Sequence
  source: /note="Description of Artificial Sequence: Synthetic polypeptide"
DILLTQSPVILSVSPGERVSFSCRASQSIGTNIHWYQQRTNGSPRLLIKYASESISGIPSRFSGSGSGTDFTLSINSVESEDIADYYCQQNNNWPTTFGCGTKLELK

SEQ ID NO: 15682 - protein, 107 aa, Artificial Sequence
  source: /note="Description of Artificial Sequence: Synthetic polypeptide"
DILLTQSPVILSVSPGERVSFSCRASQSIGTNIHWYQQRTNGSPRLLIKYASESISGIPSRFSGSGSGTDFTLSINSVESEDIADYYCQQNNNWPTTFGDGTKLELK

SEQ ID NO: 15683 - protein, 107 aa, Artificial Sequence
  source: /note="Description of Artificial Sequence: Synthetic polypeptide"
DILLTQSPVILSVSPGERVSFSCRASQSIGTNIHWYQQRTNGSPRLLIKYASESISGIPSRFSGSGSGTDFTLSINSVESEDIADYYCQQNNNWPTTFGEGTKLELK

SEQ ID NO: 15684 - protein, 107 aa, Artificial Sequence
  source: /note="Description of Artificial Sequence: Synthetic polypeptide"
DILLTQSPVILSVSPGERVSFSCRASQSIGTNIHWYQQRTNGSPRLLIKYASESISGIPSRFSGSGSGTDFTLSINSVESEDIADYYCQQNNNWPTTFGFGTKLELK

SEQ ID NO: 15685 - protein, 107 aa, Artificial Sequence
  source: /note="Description of Artificial Sequence: Synthetic polypeptide"
DILLTQSPVILSVSPGERVSFSCRASQSIGTNIHWYQQRTNGSPRLLIKYASESISGIPSRFSGSGSGTDFTLSINSVESEDIADYYCQQNNNWPTTFGIGTKLELK

SEQ ID NO: 15686 - protein, 107 aa, Artificial Sequence
  source: /note="Description of Artificial Sequence: Synthetic polypeptide"
DILLTQSPVILSVSPGERVSFSCRASQSIGTNIHWYQQRTNGSPRLLIKYASESISGIPSRFSGSGSGTDFTLSINSVESEDIADYYCQQNNNWPTTFGMGTKLELK

SEQ ID NO: 15687 - protein, 107 aa, Artificial Sequence
  source: /note="Description of Artificial Sequence: Synthetic polypeptide"
DILLTQSPVILSVSPGERVSFSCRASQSIGTNIHWYQQRTNGSPRLLIKYASESISGIPSRFSGSGSGTDFTLSINSVESEDIADYYCQQNNNWPTTFGNGTKLELK

SEQ ID NO: 15688 - protein, 107 aa, Artificial Sequence
  source: /note="Description of Artificial Sequence: Synthetic polypeptide"
DILLTQSPVILSVSPGERVSFSCRASQSIGTNIHWYQQRTNGSPRLLIKYASESISGIPSRFSGSGSGTDFTLSINSVESEDIADYYCQQNNNWPTTFGPGTKLELK

SEQ ID NO: 15689 - protein, 107 aa, Artificial Sequence
  source: /note="Description of Artificial Sequence: Synthetic polypeptide"
DILLTQSPVILSVSPGERVSFSCRASQSIGTNIHWYQQRTNGSPRLLIKYASESISGIPSRFSGSGSGTDFTLSINSVESEDIADYYCQQNNNWPTTFGTGTKLELK

SEQ ID NO: 15690 - protein, 107 aa, Artificial Sequence
  source: /note="Description of Artificial Sequence: Synthetic polypeptide"
DILLTQSPVILSVSPGERVSFSCRASQSIGTNIHWYQQRTNGSPRLLIKYASESISGIPSRFSGSGSGTDFTLSINSVESEDIADYYCQQNNNWPTTFGVGTKLELK

SEQ ID NO: 15691 - protein, 107 aa, Artificial Sequence
  source: /note="Description of Artificial Sequence: Synthetic polypeptide"
DILLTQSPVILSVSPGERVSFSCRASQSIGTNIHWYQQRTNGSPRLLIKYASESISGIPSRFSGSGSGTDFTLSINSVESEDIADYYCQQNNNWPTTFGWGTKLELK

SEQ ID NO: 15692 - protein, 107 aa, Artificial Sequence
  source: /note="Description of Artificial Sequence: Synthetic polypeptide"
DILLTQSPVILSVSPGERVSFSCRASQSIGTNIHWYQQRTNGSPRLLIKYASESISGIPSRFSGSGSGTDFTLSINSVESEDIADYYCQQNNNWPTTFGYGTKLELK

SEQ ID NO: 15693 - protein, 107 aa, Artificial Sequence
  source: /note="Description of Artificial Sequence: Synthetic polypeptide"
DILLTQSPVILSVSPGERVSFSCRASQSIGTNIHWYQQRTNGSPRLLIKYASESISGIPSRFSGSGSGTDFTLSINSVESEDIADYYCQQNNNWPTTFGKGTKLELK

SEQ ID NO: 15694 - protein, 107 aa, Artificial Sequence
  source: /note="Description of Artificial Sequence: Synthetic polypeptide"
DILLTQSPVILSVSPGERVSFSCRASQSIGTNIHWYQQRTNGSPRLLIKYASESISGIPSRFSGSGSGTDFTLSINSVESEDIADYYCQQNNNWPTTFGHGTKLELK

SEQ ID NO: 15695 - protein, 107 aa, Artificial Sequence
  source: /note="Description of Artificial Sequence: Synthetic polypeptide"
DILLTQSPVILSVSPGERVSFSCRASQSIGTNIHWYQQRTNGSPRLLIKYASESISGIPSRFSGSGSGTDFTLSINSVESEDIADYYCQQNNNWPTTFGRGTKLELK

SEQ ID NO: 15696 - protein, 107 aa, Artificial Sequence
  source: /note="Description of Artificial Sequence: Synthetic polypeptide"
DILLPQSPVILSVSPGERVSFSCRASQSIGTNIHWYQQRTNGSPRLLIKYASESISGIPSRFSGSGSGTDFTLSINSVESEDIADYYCQQNNNWPTTFGAGTKLELK

SEQ ID NO: 15697 - protein, 107 aa, Artificial Sequence
  source: /note="Description of Artificial Sequence: Synthetic polypeptide"
DILLTQSPVILSVSPGERVSFSCGASQSIGTNIHWYQQRTNGSPRLLIKYASESISGIPSRFSGSGSGTDFTLSINSVESEDIADYYCQQNNNWPTTFGAGTKLELK

SEQ ID NO: 15698 - protein, 119 aa, Homo sapiens
  MOD_RES (58)..(58): Any amino acid
  MOD_RES (101)..(103): Any amino acid
  MOD_RES (105)..(105): Any amino acid
QVQLKQSGPGLVQPSQSLSITCTVSGFSLTNYGVHWVRQSPGKGLEWLGVIWSGGNTXYNTPFTSRLSINKDNSKSQVFFKMNSLQSNDTAIYYCARALTXXXYXFAYWGQGTLVTVSA

SEQ ID NO: 15699 - protein, 108 aa, Homo sapiens
SYELMQPPSVSVAPGMTARISCGANNIGSETVHWYQQKPGQAPVLVIYYDSDRPSGIPERFSGSKSGNTATLTITRVEAGDEADYYCQVWDSSTDHPVFGGGTKLTVL

SEQ ID NO: 15700 - protein, 107 aa, Homo sapiens
DIQLTQSPSSLSASVGDRVTITCQASQDISNYLNWYQQKPGKAPKLLIYDASNTETGVPSRFSGSGSGTDFTFTISSLQPEDIATYFCQHYANLPLTFGPGTKVDIK

SEQ ID NO: 15701 - protein, 110 aa, Homo sapiens
QSVLTQPPSVSAAPGQEVTISCSGSNSNIGNNYVSWYQQLPGTAPKLLIYDNNERPSGIPDRFSGSKSGTSATLGITGLQTGDEADYYCGTWDSSLSAGVFGGGTKLTVL

SEQ ID NO: 15702 - protein, 108 aa, Homo sapiens
SYELMQPPSVSVAPGQTAGITCGGRNIGSKSVHWYQQKPGQAPLLVIYYDDDRPSGIPERFSGSNSENTATLTISRVEAGDEADYFCQVWDSSSDHYVFGAGTKLTVL

SEQ ID NO: 15703 - protein, 110 aa, Homo sapiens
QPVLTQPASVSGSPGQSITISCTGTSSDIGAYHYISWYQQHPGKPPKLMIFDVAKRPSGVSDRFSGSKSGNTASLTISGLQADDEADYYCSSFSRDTDVIFGGGTKLTVL

SEQ ID NO: 15704 - protein, 110 aa, Homo sapiens
QSVLTQPPSASGTPGQRVTISCSGSSSNIGSNAVNWYQQLPGKAPKLLIYFDDLLPSGVSDRFSGSKSGTSASLAISGLQSEDEADYYCAAWDDSLNGWVFGGGTKLTVL

SEQ ID NO: 15705 - protein, 107 aa, Homo sapiens
NIQMTQSPPSLSAFVGDRVTITCQASQAINNYLNWYQQKPGKAPKLLIYDASNLETGVPSRFSGSGSGTDFTFTISSLQPEDNATYYCQQYDKLPLTFGGGTKVEIK

SEQ ID NO: 15706 - protein, 110 aa, Homo sapiens
QSVLTQPASVSGSPGQSITISCTGTTSDVGGFNYVSWYQQHPGKVPKLIIFDVSNRPSSVSDRFSGSKSVNTASLTISGLQAEDEADYYCSSYTDSGSYIFGTGTKVTVL

SEQ ID NO: 15707 - protein, 110 aa, Homo sapiens
QAVLTQPASVSGSPGQSITISCTGTSSDVGGYNYVSWYQQHPGKAPKLIIYDVTKRPSGFSNRFSGSKSGNTASLTISGLQAEDEADYYCSSYTTSSTRVFGTGTKVTVL

SEQ ID NO: 15708 - protein, 110 aa, Homo sapiens
SYELMQPASVSGSPGQSITISCTGTSSDIGDYNYVSWYQQHPGKAPKLIIYDVSIRPSGVSLRFSGSKSGNTASLTISGLQAEDEADYYCSSYRNTDTLEFGGGTKVTVL

SEQ ID NO: 15709 - protein, 110 aa, Homo sapiens
QSVLTQPPSASGTPGQRVTISCSGSTANIGRNYVNWYQQFPGTAPKLLMYSNDQSPSGVRGRFSGSKSGTSASLAINGLQSEDEADYYCAAWDDRLNAYVFGTGTKLTVL

SEQ ID NO: 15710 - protein, 107 aa, Homo sapiens
AIQLTQSPSTLSASVGDRVTITCRASQSISSWLAWYQQKPGKAPKLLIYAASSLQSGVPSRFSGSGSGTDFTLTISSLQPEDFATYYCQQSYSTPLTFGGGTKVEIK

SEQ ID NO: 15711 - protein, 107 aa, Homo sapiens
AIRMTQSPSSVSASVGDRVTITCRASQGIDSWLAWYQQKPGEAPKLLIYGASNLQSGVPIRFSGSGSGTDFTLTIRSLQPEDFATYFCQQSHGAPYTFGQGTKVEIK

SEQ ID NO: 15712 - protein, 110 aa, Homo sapiens
QSVVTQPPSVSAAPGQKVTISCSGSTSNIENYSVSWYQQLPGTAPKLLIYDNNKRPSGIPDRFSGSKSGTSATLGITGLQTGDEADYYCGTWDNRLSSVVFGGGTKVTVL

SEQ ID NO: 15713 - protein, 106 aa, Homo sapiens
DIVMTQSPVSLSASVGDSVTITCRASQSISSYLNWYQQKPGKAPKLLIYAASSLQSGVPSRFSGSGSGTDFTLTISSLQPEDFATYYCQQSYSLYTFGQGTKLEIK

SEQ ID NO: 15714 - protein, 110 aa, Homo sapiens
QSVLTQPPSASGSPGQSVTISCTGARSDVGGYNYVSWYQQHPGKAPKLMIYDVSNRPSGVSNRFSGSKSGNTASLTISGLQAEDEADYYCSSYTSSSTYVFGTGTKLTVL

SEQ ID NO: 15715 - protein, 107 aa, Homo sapiens
DVVMTQSPATLSLSPGERATLSCRASQSVNTYLAWYQQKPGQAPRLLIYDASSRATGIPARFSGSGSGTDFTLTISSLEPEDFATYYCQQTYSTPFTFGPGTKVDIK

SEQ ID NO: 15716 - protein, 113 aa, Homo sapiens
EIVMTQSPDSLAVSLGERATINCKSSQSVLYSSNNKNYLAWYQQKPGQPPKLLIYWASTRESGVPDRFSGSGSGTDFTLTISSLQAEDVAVYYCQQYYTTPLTFGGGTKVEIK

SEQ ID NO: 15717 - protein, 108 aa, Homo sapiens
QAVVTQPPSASVAPGQTARITCEGNNIESKSVHWYQQKPGQAPVLVIYYDRDRPSGIPERFSGSNSGNTATLTISRVEAGDEADYYCQVWDSSSDHPVFGGGTKLTVL

SEQ ID NO: 15718 - protein, 108 aa, Homo sapiens
QPVLTQPPSVSVAPGKTARITCGGNNIGSKSVHWYQQKPGQAPVLVIYYDSDRPSGIPERFSGSNSGNTATLTISRVEAGDEADYYCQVWDSSSDHYVFGTGTKLTVR

SEQ ID NO: 15719 - protein, 109 aa, Homo sapiens
SSELTQDPAVSVALGQTVRITCQGDSLRSYYASWYQQKPGQAPVLVIYGKNNRPSGIPDRFSGSSSGNTASLTITGAQAEDEADYYCNSRDSSGNHHVVFGGGTKLTVL

SEQ ID NO: 15720 - protein, 111 aa, Homo sapiens
QPVLTQPPSASGTPGQRVTISCSGSSSNIGSYTVNWYQQLPGTAPKLLIYNNNERPSGVPDRFSGSKSGTSASLAISGLQSEDEADYYCASWDDRLSGDVIFGGGTKLTVL

SEQ ID NO: 15721 - protein, 107 aa, Homo sapiens
DVVMTQSPATLSLSPGERATLSCRASQSVSSYLAWYQQKPGQAPRLLIYDASNRATGIPARFSGSGSGTDFTLTISSLEPEDFATYYCQQYQVYPTTFGQGTRLEIK

SEQ ID NO: 15722 - protein, 108 aa, Homo sapiens
LPVLTQPPSVSVAPGETAKITCGGTYIVRKIVHWYQQKPGQAPRLVIYYDAARPSGIPERFSGSNSGNTATLTISGVEAGDEADYYCQVWDNDSDHYVFGPGTKVTVL

SEQ ID NO: 15723 - protein, 110 aa, Homo sapiens
QAVLTQPASVSGSPGQSITISCTGTSSDVGDYNYVSWYQQHPGKAPKLMIYDVSNRPSGVSYRFSGSKSGNTASLTISGLQAEDEADYYCSSYTSSSSYVFGTGTKVTVL

SEQ ID NO: 15724 - protein, 108 aa, Homo sapiens
QSALTQPASVSVAPGTTARITCGGSNIARKNVHWYQQKPGQAPLVVVSDESDRPSGIPERFSGSNSGNTATLTISRVEAGDEADYYCQVWDSSSDHPVFGGGTKLTVL

SEQ ID NO: 15725 - protein, 110 aa, Homo sapiens
QPVLTQPPSASGTPGQRVTISCSGSSSNIGRNYVFWYQQLPGTAPKLLIYSNNQRPSGVPDRFSGSKSGTSASLAISGLQSEDEADYYCAAWDDSLNVVVFGGGTKLTVL

SEQ ID NO: 15726 - protein, 107 aa, Homo sapiens
DIQLTQSPSSLSASVGDRVTIACRASQSISSYLNWYQKKVGKAPKLLIYAASSLQSGVPSRFSGSGSGTDFTLTISSLQPEDFATYYCQQSYSIPVTFGQGTKVEIK

SEQ ID NO: 15727 - protein, 110 aa, Homo sapiens
QSVLTQPPSVSAAPGQEVTISCSGSNSNIGNNYVSWYQQLPGTAPKLLIYDNNERPSGIPDRFSGSKSGTSATLGITGLQTGDEADYYCSTWDSSLSAVVFGGGTKLTVL

SEQ ID NO: 15728 - protein, 110 aa, Homo sapiens
QSVLTQPPSVSAAPGQEVTISCSGSNSNIEPNYVSWYQQLPGTAPKLLIYSTAERPSGIPDRFSGSKSGTSATLGITGLQTGDEADYYCSTWDSSLSAVVFGGGTKLTVL

SEQ ID NO: 15729 - protein, 110 aa, Homo sapiens
QSVLTQPPSVSAAPGQEVTISCSGSNSNIENNYVSWYQQLPGTAPKLLIYSNNERPSGIPDRFSGSKSGTSATLGITGLQTGDEADYYCGTFDSSLSAVVFGGGTKLTVL

SEQ ID NO: 15730 - protein, 110 aa, Homo sapiens
QSVLTQPPSVSAAPGQEVTISCSGSNSNIGNNYVSWYQQLPGTAPKLLIYDTAERPSGIPDRFSGSKSGTSATLGITGLQTGDEADYYCSTWDSSLSAVLFGGGTKLTVL

SEQ ID NO: 15731 - protein, 110 aa, Homo sapiens
QSVLTQPPSVSAAPGQEVTISCSGSNSNIPNNYVSWYQQLPGTAPKLLIYSNYERPSGIPDRFSGSKSGTSATLGITGLQTGDEADYYCSTWDSSLSAVVFGGGTKLTVL

SEQ ID NO: 15732 - protein, 110 aa, Homo sapiens
QSVLTQPPSVSAAPGQEVTISCSGSNSNIGPNYVSWYQQLPGTAPKLLIYDNNERPSGIPDRFSGSKSGTSATLGITGLQTGDEADYYCSTFDSSLSAAVFGGGTKLTVL

SEQ ID NO: 15733 - protein, 110 aa, Homo sapiens
QSVLTQPPSVSAAPGQEVTISCSGSNSNIPNNYVSWYQQLPGTAPKLLIYSNSERPSGIPDRFSGSKSGTSATLGITGLQTGDEADYYCSTWDSSLSAALFGGGTKLTVL

SEQ ID NO: 15734 - protein, 110 aa, Homo sapiens
QSVLTQPPSVSEAPRQRVSISCSGSSSNIGNNAVNWYQQLPGKAPKLLIYFDDLLPLGVSDRFSGSKSGTSASLAISGLQSEDEADYYCAAWDDSLKGYVFGTGTKVTVL

SEQ ID NO: 15735 - protein, 110 aa, Homo sapiens
QSVLTQPPSVSEAPRQRVSISCSGSSSNIGDNAVNWYQQLPGKAPKLLIYYDDLHPSGVSDRFSGSKSGTSASLAISGLQSEDEADYYCAAWDDSLKGYVFGTGTKVTVL

SEQ ID NO: 15736 - protein, 110 aa, Homo sapiens
QSVLTQPPSVSAAPGQEVTISCSGSNSNIGNNYVSWYQQLPGTAPKLLIYSTNERPSGIPDRFSGSKSGTSATLGITGLQTGDEADYYCGTWDSSLSAGVFGGGTKLTVL

SEQ ID NO: 15737 - protein, 110 aa, Homo sapiens
QSVLTQPPSVSAAPGQEVTISCSGSNSNIENNYVSWYQQLPGTAPKLLIYDNRERPSGIPDRFSGSKSGTSATLGITGLQTGDEADYYCGTWDSSLSAGVFGGGTKLTVL

SEQ ID NO: 15738 - protein, 110 aa, Homo sapiens
QSVLTQPPSVSAAPGQEVTISCSGSNSNIEPNYVSWYQQLPGTAPKLLIYSTYERPSGIPDRFSGSKSGTSATLGITGLQTGDEADYYCGTFDSSLSAAVFGGGTKLTVL

SEQ ID NO: 15739 - protein, 110 aa, Homo sapiens
QSVLTQPPSVSAAPGQEVTISCSGSNSNIGNNYVSWYQQLPGTAPKLLIYSTNERPSGIPDRFSGSKSGTSATLGITGLQTGDEADYYCGTWDSSLSAALFGGGTKLTVL

SEQ ID NO: 15740 - protein, 110 aa, Homo sapiens
QSVLTQPPSVSAAPGQEVTISCSGSNSNIENNYVSWYQQLPGTAPKLLIYDNAERPSGIPDRFSGSKSGTSATLGITGLQTGDEADYYCSTWDSSLSAVVFGGGTKLTVL

SEQ ID NO: 15741 - protein, 110 aa, Homo sapiens
QSVLTQPPSVSAAPGQEVTISCSGSNSNIGNNYVSWYQQLPGTAPKLLIYDNAERPSGIPDRFSGSKSGTSATLGITGLQTGDEADYYCSTWDSSLSAVLFGGGTKLTVL

SEQ ID NO: 15742 - protein, 110 aa, Homo sapiens
QSVLTQPPSVSAAPGQEVTISCSGSNSNIGNNYVSWYQQLPGTAPKLLIYDNNERPSGIPDRFSGSKSGTSATLGITGLQTGDEADYYCGTFDSSLSAALFGGGTKLTVL

SEQ ID NO: 15743 - protein, 110 aa, Homo sapiens
QSVLTQPPSVSAAPGQEVTISCSGSNSNIPNNYVSWYQQLPGTAPKLLIYSTSERPSGIPDRFSGSKSGTSATLGITGLQTGDEADYYCSTWDSSLSAVVFGGGTKLTVL

SEQ ID NO: 15744 - protein, 110 aa, Homo sapiens
QSVLTQPPSVSAAPGQEVTISCSGSNSNIENNYVSWYQQLPGTAPKLLIYSNRERPSGIPDRFSGSKSGTSATLGITGLQTGDEADYYCSTFDSSLSAVVFGGGTKLTVL

SEQ ID NO: 15745 - protein, 110 aa, Homo sapiens
QSVLTQPPSVSAAPGQEVTISCSGSNSNITNNYVSWYQQLPGTAPKLLIYDNNERPSGIPDRFSGSKSGTSATLGITGLQTGDEADYYCSTWDSSLSALLFGGGTKLTVL

SEQ ID NO: 15746 - protein, 110 aa, Homo sapiens
QSVLTQPPSVSAAPGQEVTISCSGSNSNIPNNYVSWYQQLPGTAPKLLIYDNNERPSGIPDRFSGSKSGTSATLGITGLQTGDEADYYCSTWDSSLSAVLFGGGTKLTVL

SEQ ID NO: 15747 - protein, 110 aa, Homo sapiens
QSVLTQPPSVSAAPGQEVTISCSGSNSNIGPNYVSWYQQLPGTAPKLLIYDNRERPSGIPDRFSGSKSGTSATLGITGLQTGDEADYYCSTWDSSLSAGVFGGGTKLTVL

SEQ ID NO: 15748 - protein, 110 aa, Homo sapiens
QSVLTQPPSVSEAPRQRVSISCSGSSSNIGNNAVNWYQQLPGKAPKLLIYFDDLLPQGVSDRFSGSKSGTSASLAISGLQSEDEADYYCAAWDDSLKGYVFGTGTKVTVL

SEQ ID NO: 15749 - protein, 110 aa, Homo sapiens
QSVLTQPPSVSEAPRQRVSISCSGSSSNIGNNAVNWYQQLPGKAPKLLIYFDDLHPSGVSDRFSGSKSGTSASLAISGLQSEDEADYYCSAWDDSLKGYVFGTGTKVTVL

SEQ ID NO: 15750 - protein, 110 aa, Homo sapiens
QSVLTQPPSVSEAPRQRVSISCSGSSSNIGNNAVNWYQQLPGKAPKLLIYFDDLHPSGVSDRFSGSKSGTSASLAISGLQSEDEADYYCAAWDDSLKGYVFGTGTKVTVL

SEQ ID NO: 15751 - protein, 110 aa, Homo sapiens
QSVLTQPPSVSEAPRQRVSISCSGSSSNIGNNAVNWYQQLPGKAPKLLIYFDDLLPSGVSDRFSGSKSGTSASLAISGLQSEDEADYYCAAWDDSLKGYVFGTGTKVTVL

SEQ ID NO: 15752 - protein, 110 aa, Homo sapiens
QSVLTQPPSVSEAPRQRVSISCSGSSSNIGNNAVNWYQQLPGKAPKLLIYYDDLLPSGVSDRFSGSKSGTSASLAISGLQSEDEADYYCAAWDDSLKGYVFGTGTKVTVL

SEQ ID NO: 15753 - protein, 110 aa, Homo sapiens
QSVLTQPPSVSEAPRQRVSISCSGSSSNVGNNAVNWYQQLPGKAPKLLIYFDDLLPSGVSDRFSGSKSGTSASLAISGLQSEDEADYYCAAWDDSLKGYVFGTGTKVTVL

SEQ ID NO: 15754 - protein, 110 aa, Homo sapiens
QSVLTQPPSVSEAPRQRVSISCSGSSSNIGNNAVNWYQQLPGKAPKLLIYYDDLLPSGVSNRFSGSKSGTSASLAISGLQSEDEADYYCAAWDDSLKGYVFGTGTKVTVL

SEQ ID NO: 15755 - protein, 109 aa, Homo sapiens
QSVLTQPPSVSEAPRQRVSISCSGSSSNIGNNAVNWYQQLPGKAPKLLIYYDDLLPSGVSDRFSGSKSGTSASLAISGLQSEDEADYYCAAWDDSLKGYVFGTGTKVTV

SEQ ID NO: 15756 - protein, 107 aa, Artificial Sequence
  source: /note="Description of Artificial Sequence: Synthetic polypeptide"
EIVLTQSPATLSLSPGERATLSCRASQSVSSYLAWYQQKPGQAPRLLIYDASNRATGIPARFSGSGSGTDFTLTISSLEPEDFAVYYCQQRSNWPWTFGQGTKVEIK

SEQ ID NO: 15757 - protein, 117 aa, Artificial Sequence
  source: /note="Description of Artificial Sequence: Synthetic polypeptide"
EVQLVESGGGLVQPGGSLRLSCAASGFTFSSYWMSWVRQAPGKGLEWVANIKQDGSEENYVDSVKGRFTVSRDNAKNSLYLQMNSLRAEDTAVYYCARTYSGFEDYWGQGTLVTVSS

SEQ ID NO: 15758 - protein, 117 aa, Artificial Sequence
  source: /note="Description of Artificial Sequence: Synthetic polypeptide"
EVQLVESGGGLVQPGGSLRLSCAASGFTFSDYWMSWVRQAPGRGLEWVAHINQDGSEKYYVDSVKGRFTLSRDTAKNSLYLQMNSLRAEDTAVYYCARGFLIYFDYWGQGTLVTVSS

SEQ ID NO: 15759 - protein, 107 aa, Artificial Sequence [sequence omitted]

SEQ ID NO: 15760 - protein, 107 aa, Artificial Sequence
  source: /note="Description of Artificial Sequence: Synthetic polypeptide"
DILLTQSPVILSVSPGERVSFSCRASQSIGTNIHWYQQRTNGSPRLLIKYASESISGIPSRFSGSGSGTDFTLSINSVESEDIADYYCQQNNNWPTTFGAGTKLELK

SEQ ID NO: 15761 - protein, 107 aa, Artificial Sequence
  source: /note="Description of Artificial Sequence: Synthetic polypeptide"
DILLTQSPVILSVSPGERVSFSCRASQSIGTNIHWYQQRTNGSPRLLIKYASESISGIPSRFSGSGSGTDFTLSINSVESEDIADYYCQQNNNWPTTFGQGTKVEIK

SEQ ID NO: 15762 - protein, 107 aa, Artificial Sequence
  source: /note="Description of Artificial Sequence: Synthetic polypeptide"
DILLTQSPVILSVSPGERVSFSCRASQSIGTNIHWYQQRTNGSPRLLIKYASESISGIPSRFSGSGSGTDFTLSINSVESEDIADYYCQQNNNWPTTFGQGTKLELK

SEQ ID NO: 15763 - protein, 107 aa, Artificial Sequence
  source: /note="Description of Artificial Sequence: Synthetic polypeptide"
EIVLTQSPATLSLSPGERATLSCRASQSIGTNIHWYQQRPGQAPRLLIKYASESISGIPARFSGSGSGTDFTLTISSLEPEDFAVYYCQQNNNWPTTFGGGTKVEIK

SEQ ID NO: 15764 - protein, 107 aa, Artificial Sequence
  source: /note="Description of Artificial Sequence: Synthetic polypeptide"
DILLTQSPVILSVSPGERVSFSCRASQSSGTNIHWYQQRTNGSPRLLIKYASESISGIPSRFSGSGSGTDFTLSINSVESEDIADYYCQQNNNWPTTFGQGTKVEIK

SEQ ID NO: 15765 - protein, 107 aa, Artificial Sequence; identical to SEQ ID NO: 15288
  source: /note="Description of Artificial Sequence: Synthetic polypeptide"

SEQ ID NO: 15766 - protein, 107 aa, Artificial Sequence
  source: /note="Description of Artificial Sequence: Synthetic polypeptide"
DILLTQSPVILSVSPGERVSFSCRASQSSGTNIHWYQQRTNGSPRLLIKYASESISGIPSRFSGSGSGTDFTLSINSVESEDIADYYCQQNNNWPTTFGEGTKLELK

SEQ ID NO: 15767 - protein, 107 aa, Artificial Sequence
  source: /note="Description of Artificial Sequence: Synthetic polypeptide"
AIQLTQSPSSLSASVGDRVTITCRASQSIGTNIHWYQQKPGQAPRLLIYYASESISGVPSRFSGSGSGTDFTLTISSLQPEDFATYYCQQNNNWPTTFGQGTKVEIK

SEQ ID NO: 15768 - protein, 107 aa, Artificial Sequence
  source: /note="Description of Artificial Sequence: Synthetic polypeptide"
AIQLTQSPSSLSASVGDRVTITCRASQSIGTNIHWYQQKPGQAPRLLIYYASESISGVPSRFSGSGSGTDFTLTISSLQPEDFATYYCQQNNNWPTTFGAGTKLELK

SEQ ID NO: 15769 - protein, 107 aa, Artificial Sequence
  source: /note="Description of Artificial Sequence: Synthetic polypeptide"
AIQLTQSPSSLSASVGDRVTITCRASQSIGTNIHWYLQKPGQSPQLLIYYASESISGVPSRFSGSGSGTDFTLTISSLQPEDFATYYCQQNNNWPTTFGQGTKVEIK

SEQ ID NO: 15770 - protein, 107 aa, Artificial Sequence
  source: /note="Description of Artificial Sequence: Synthetic polypeptide"
AIQLTQSPSSLSASVGDRVTITCRASQSIGTNIHWYLQKPGQSPQLLIYYASESISGVPSRFSGSGSGTDFTLTISSLQPEDFATYYCQQNNNWPTTFGAGTKLELK

SEQ ID NO: 15771 - protein, 107 aa, Artificial Sequence
  source: /note="Description of Artificial Sequence: Synthetic polypeptide"
AIQLTQSPSSLSASVGDRVTITCRASQSIGTNIHWYQQKPGKAPKLLIYYASESISGVPSRFSGSGSGTDFTLTISSLQPEDFATYYCQQNNNWPTTFGQGTKVEIK

SEQ ID NO: 15772 - protein, 107 aa, Artificial Sequence
  source: /note="Description of Artificial Sequence: Synthetic polypeptide"
AIQLTQSPSSLSASVGDRVTITCRASQSIGTNIHWYQQKPGKAPKLLIYYASESISGVPSRFSGSGSGTDFTLTISSLQPEDFATYYCQQNNNWPTTFGAGTKLELK

SEQ ID NO: 15773 - protein, 107 aa, Artificial Sequence
  source: /note="Description of Artificial Sequence: Synthetic polypeptide"
DIQMTQSPSSLSASVGDRVTITCRASQSIGTNIHWYQQKPGQAPRLLIYYASESISGIPDRFSGSGSGTDFTLTISRLEPEDFAVYYCQQNNNWPTTFGQGTKVEIK

SEQ ID NO: 15774 - protein, 107 aa, Artificial Sequence
  source: /note="Description of Artificial Sequence: Synthetic polypeptide"
DIQMTQSPSSLSASVGDRVTITCRASQSIGTNIHWYQQKPGQAPRLLIYYASESISGIPDRFSGSGSGTDFTLTISRLEPEDFAVYYCQQNNNWPTTFGAGTKLELK

SEQ ID NO: 15775 - protein, 107 aa, Artificial Sequence
  source: /note="Description of Artificial Sequence: Synthetic polypeptide"
AIQLTQSPSSLSASVGDRVTITCRASQSIGTNIHWYQQKPGQAPRLLIYYASESISGIPARFSGSGSGTEFTLTISSLQSEDFAVYYCQQNNNWPTTFGQGTKVEIK

SEQ ID NO: 15776 - protein, 107 aa, Artificial Sequence
  source: /note="Description of Artificial Sequence: Synthetic polypeptide"
AIQLTQSPSSLSASVGDRVTITCRASQSIGTNIHWYQQKPGQAPRLLIYYASESISGIPARFSGSGSGTEFTLTISSLQSEDFAVYYCQQNNNWPTTFGAGTKLELK

SEQ ID NO: 15777 - protein, 107 aa, Artificial Sequence
  source: /note="Description of Artificial Sequence: Synthetic polypeptide"
EIVLTQSPATLSLSPGERATLSCRASQSIGTNIHWYQQKPGQAPRLLIYYASESISGVPSRFSGSGSGTEFTLTISSLQPDDFATYYCQQNNNWPTTFGQGTKVEIK

SEQ ID NO: 15778 - protein, 107 aa, Artificial Sequence
  source: /note="Description of Artificial Sequence: Synthetic polypeptide"
EIVLTQSPATLSLSPGERATLSCRASQSIGTNIHWYQQKPGQAPRLLIYYASESISGVPSRFSGSGSGTEFTLTISSLQPDDFATYYCQQNNNWPTTFGAGTKLELK

SEQ ID NO: 15779 - protein, 214 aa, Artificial Sequence
  source: /note="Description of Artificial Sequence: Synthetic polypeptide"
AIQLTQSPSSLSASVGDRVTITCRASQSIGTNIHWYLQKPGQSPQLLIYYASESISGIPDRFSGSGSGTDFTLTISRLEPEDFAVYYCQQNNNWPTTFGQGTKVEIKRTVAAPSVFIFPPSDEQLKSGTASVVCLLNNFYPREAKVQWKVDNALQSGNSQESVTEQDSKDSTYSLSSTLTLSKADYEKHKVYACEVTHQGLSSPVTKSFNRGEC

SEQ ID NO: 15780 - protein, 107 aa, Artificial Sequence
  source: /note="Description of Artificial Sequence: Synthetic polypeptide"
AIQLTQSPSSLSASVGDRVTITCRASQSIGTNIHWYLQKPGQSPQLLIYYASESISGIPDRFSGSGSGTDFTLTISRLEPEDFAVYYCQQNNNWPTTFGQGTKVEIK

SEQ ID NO: 15781 - protein, 214 aa, Artificial Sequence
  source: /note="Description of Artificial Sequence: Synthetic polypeptide"
EIVLTQSPATLSLSPGERATLSCRASQSIGTNIHWYQQKPGKAPKLLIYYASESISGIPDRFSGSGSGTDFTLTISRLEPEDFAVYYCQQNNNWPTTFGQGTKVEIKRTVAAPSVFIFPPSDEQLKSGTASVVCLLNNFYPREAKVQWKVDNALQSGNSQESVTEQDSKDSTYSLSSTLTLSKADYEKHKVYACEVTHQGLSSPVTKSFNRGEC

SEQ ID NO: 15782 - protein, 214 aa, Artificial Sequence
  source: /note="Description of Artificial Sequence: Synthetic polypeptide"
EIVLTQSPATLSLSPGERATLSCRASQSIGTNIHWYQQKPGQAPRLLIYYASESISGVPSRFSGSGSGTDFTLTISSLQPEDFATYYCQQNNNWPTTFGQGTKVEIKRTVAAPSVFIFPPSDEQLKSGTASVVCLLNNFYPREAKVQWKVDNALQSGNSQESVTEQDSKDSTYSLSSTLTLSKADYEKHKVYACEVTHQGLSSPVTKSFNRGEC

SEQ ID NO: 15783 - protein, 107 aa, Artificial Sequence
  source: /note="Description of Artificial Sequence: Synthetic polypeptide"
EIVLTQSPATLSLSPGERATLSCRASQSIGTNIHWYQQKPGQAPRLLIYYASESISGVPSRFSGSGSGTDFTLTISSLQPEDFATYYCQQNNNWPTTFGQGTKVEIK

SEQ ID NO: 15784 - protein, 214 aa, Artificial Sequence
  source: /note="Description of Artificial Sequence: Synthetic polypeptide"
AIQLTQSPSSLSASVGDRVTITCRASQSIGTNIHWYQQKPGQAPRLLIYYASESISGIPPRFSGSGSGTDFTLTISRLEPEDFAVYYCQQNNNWPTTFGQGTKVEIKRTVAAPSVFIFPPSDEQLKSGTASVVCLLNNFYPREAKVQWKVDNALQSGNSQESVTEQDSKDSTYSLSSTLTLSKADYEKHKVYACEVTHQGLSSPVTKSFNRGEC

SEQ ID NO: 15785 - protein, 107 aa, Artificial Sequence
  source: /note="Description of Artificial Sequence: Synthetic polypeptide"
AIQLTQSPSSLSASVGDRVTITCRASQSIGTNIHWYQQKPGQAPRLLIYYASESISGIPPRFSGSGSGTDFTLTISRLEPEDFAVYYCQQNNNWPTTFGQGTKVEIK

SEQ ID NO: 15786 - protein, 214 aa, Artificial Sequence
  source: /note="Description of Artificial Sequence: Synthetic polypeptide"
AIQLTQSPSSLSASVGDRVTITCRASQSIGTNIHWYQQKPGQAPRLLIYYASESISGIPDRFSGSGSGTDFTLTISRLEPEDFAVYYCQQNNNWPTTFGQGTKVEIKRTVAAPSVFIFPPSDEQLKSGTASVVCLLNNFYPREAKVQWKVDNALQSGNSQESVTEQDSKDSTYSLSSTLTLSKADYEKHKVYACEVTHQGLSSPVTKSFNRGEC

SEQ ID NO: 15787 - protein, 107 aa, Artificial Sequence
  source: /note="Description of Artificial Sequence: Synthetic polypeptide"
AIQLTQSPSSLSASVGDRVTITCRASQSIGTNIHWYQQKPGQAPRLLIYYASESISGIPDRFSGSGSGTDFTLTISRLEPEDFAVYYCQQNNNWPTTFGQGTKVEIK

SEQ ID NO: 15788 - protein, 214 aa, Artificial Sequence
  source: /note="Description of Artificial Sequence: Synthetic polypeptide"
EIVLTQSPATLSLSPGERATLSCRASQSIGTNIHWYQQKPGQAPRLLIYYASESISGIPARFSGSGSGTEFTLTISSLQSEDFAVYYCQQNNNWPTTFGQGTKVEIKRTVAAPSVFIFPPSDEQLKSGTASVVCLLNNFYPREAKVQWKVDNALQSGNSQESVTEQDSKDSTYSLSSTLTLSKADYEKHKVYACEVTHQGLSSPVTKSFNRGEC

SEQ ID NO: 15789 - protein, 107 aa, Artificial Sequence
  source: /note="Description of Artificial Sequence: Synthetic polypeptide"
EIVLTQSPATLSLSPGERATLSCRASQSIGTNIHWYQQKPGQAPRLLIYYASESISGIPARFSGSGSGTEFTLTISSLQSEDFAVYYCQQNNNWPTTFGQGTKVEIK

SEQ ID NO: 15790 - protein, 108 aa, Mus sp.
  MOD_RES (26)..(26): Any amino acid
  MOD_RES (32)..(33): Any amino acid
  MOD_RES (51)..(51): Any amino acid
  MOD_RES (88)..(89): Any amino acid
  MOD_RES (92)..(92): Any amino acid
  MOD_RES (95)..(95): Any amino acid
SYELTQPPSVSVAPGQTARITCSGDXLGDKYXXWYQQKPGQAPVLVIYEDXKRPSGIPERFSGSNSGNTATLTISGTQAEDEADYYCXXWDXDWXMPVFGGGTKLTVL

SEQ ID NO: 15791 - protein, 107 aa, Artificial Sequence
  source: /note="Description of Artificial Sequence: Synthetic polypeptide"
DIQMTQSPSSMSVSVGDRVTITCHSSQDINSNIGWLQQKPGKSFKGLIYHGTNLDDGVPSRFSGSGSGTDYTLTISSLQPEDFATYYCVQYAQFPWTFGGGTKLEIK

SEQ ID NO: 15792 - protein, 107 aa, Artificial Sequence
  source: /note="Description of Artificial Sequence: Synthetic polypeptide"
DIQMTQSPSSMSVSVGDRVTITCHSSQDINSNIGWLQQKPGKSFKGLIYHGTNLDDGVPSRFSGSGSGTDYTLTISSLQPEDFATYYCVQYEQFPWTFGGGTKLEIK

SEQ ID NO: 15793 - protein, 107 aa, Artificial Sequence
  source: /note="Description of Artificial Sequence: Synthetic polypeptide"
DIQMTQSPSSMSVSVGDRVTITCHSSQDINSNLGWLQQKPGKSFKGLIYHGANLHDGVPSRFSGSGSGTDYTLTISSLQPEDFATYYCVQYAEFPWTFGGGTKLEIK

SEQ ID NO: 15794 - protein, 107 aa, Artificial Sequence
  source: /note="Description of Artificial Sequence: Synthetic polypeptide"
DIQMTQSPSSMSVSVGDRVTITCHSSQDINSNLGWLQQKPGKSFKGLIYHGSNLDHGVPSRFSGSGSGTDYTLTISSLQPEDFATYYCVQYDQFPWTFGGGTKLEIK

SEQ ID NO: 15795 - protein, 107 aa, Artificial Sequence
  source: /note="Description of Artificial Sequence: Synthetic polypeptide"
DIQMTQSPSSMSVSVGDRVTITCHSSQDITYNIGWLQQKPGKSFKGLIYHGANLDDGVPSRFSGSGSGTDYTLTISSLQPEDFATYYCVQYDEFPWTFGGGTKLEIK

SEQ ID NO: 15796 - protein, 107 aa, Artificial Sequence
  source: /note="Description of Artificial Sequence: Synthetic polypeptide"
DIQMTQSPSSMSVSVGDRVTITCHSSQDITYNVGWLQQKPGKSFKGLIYHGSNLDHGVPSRFSGSGSGTDYTLTISSLQPEDFATYYCVQYDDFPWTFGGGTKLEIK

SEQ ID NO: 15797 - protein, 107 aa, Artificial Sequence
  source: /note="Description of Artificial Sequence: Synthetic polypeptide"
DIQMTQSPSSMSVSVGDRVTITCHSSQDINMNVGWLQQKPGKSFKGLIYHGAILDDGVPSRFSGSGSGTDYTLTISSLQPEDFATYYCVQYAEFPWTFGGGTKLEIK

SEQ ID NO: 15798 - protein, 336 aa, Homo sapiens
GAGILEHISMETTHRGLNTHRTHRSERSERTTASERALASERTTAGLYASPARGVALTHRILESERCYSSERALASERGLNASPILEARGASNTYRTTAASNTRPTYRGLNGLNLYSCCGASPGLYTHRVALLYSTTATTAILETYRTYRTHRSERTHRTTAHISSERGLYVALCCGSERARGPHESERGLYSERGLYSERGLYTHRASPTYRSERTTATHRILESERASNTTAGAGCCGGAGASPILEALATHRTYRTYRCYSGLNGLNTYRSERLYSILECCGTYRTHRPHETHRGLYGLYTHRLYSTTAGAGILELYSARGALAASPALAALA

SEQ ID NO: 15799 - protein, 107 aa, Mus musculus
DIQMTQTTSSLSASLGDRVTISCRSSQDIRNYLNWYQQKPDGTVKLLIYYTSRSHSGVPSRFSGSGSGTDYSLTISNLEQEDIATYFCQQGNMFPFTFGGGTKLEIK

SEQ ID NO: 15800 - protein, 108 aa, Artificial Sequence; identical to SEQ ID NO: 10717
  source: /note="Description of Artificial Sequence: Synthetic polypeptide"

SEQ ID NO: 15801 - protein, 108 aa, Artificial Sequence; identical to SEQ ID NO: 10716
  source: /note="Description of Artificial Sequence: Synthetic polypeptide"

SEQ ID NO: 15802 - protein, 107 aa, Artificial Sequence
  source: /note="Description of Artificial Sequence: Synthetic polypeptide"
EIVLTQSPDFQSVTPKEKVTITCRASYSIGTNIHWYQQKPDQSPKLLIKYASESISGVPSRFSGSGSGTDFTLTINSLEAEDAATYYCQQNNEWPTSFGGGTKVEIK

SEQ ID NO: 15803 - protein, 107 aa, Artificial Sequence
  source: /note="Description of Artificial Sequence: Synthetic polypeptide"
EIVLTQSPDFQSVTPKEKVTITCRASYSIGTNIHWYQQKPDQSPKLLIKYASESISGVPSRFSGSGSGTDFTLTINSLEAEDAATYYCQQNNNWPTSFGGGTKVEIK

SEQ ID NO: 15804 - protein, 107 aa, Artificial Sequence
  source: /note="Description of Artificial Sequence: Synthetic polypeptide"
EIVLTQSPDFQSVTPKEKVTITCRASYSIGTNIHWYQQKPDQSPKLLIKYASESISGVPSRFSGSGSGTDFTLTINSLEAEDAATYYCQQNNNWPTTFGGGTKVEIK

SEQ ID NO: 15805 - protein, 107 aa, Artificial Sequence
  source: /note="Description of Artificial Sequence: Synthetic polypeptide"
EIVLTQSPDFQSVTPKEKVTITCRASYSIGTNIHWYQQKPDQSPKLLIKYASESISGVPSRFSGSGSGTDFTLTINSLEAEDAATYYCQQNNDWPTTFGGGTKVEIK

SEQ ID NO: 15806 - protein, 107 aa, Artificial Sequence
  source: /note="Description of Artificial Sequence: Synthetic polypeptide"
EIVLTQSPDFQSVTPKEKVTITCRASYSIGTNIHWYQQKPDQSPKLLIKYASESISGVPSRFSGSGSGTDFTLTINSLEAEDAATYYCQQNNDWPTSFGGGTKVEIK

SEQ ID NO: 15807 - protein, 109 aa, Artificial Sequence
  source: /note="Description of Artificial Sequence: Synthetic polypeptide"
DIQMTQSPSSLSASVGDRVTITCRASQGINNYLNWYQQKPGKAPKRLIYNTNNLQTGVPSRFSGSGSGTEYTLTISSLQPEDFATYYCLQHNSFPTFGQGTKLEIKRTV

SEQ ID NO: 15808 - protein, 109 aa, Artificial Sequence
  source: /note="Description of Artificial Sequence: Synthetic polypeptide"
DIQMTQSPSSLSASVGDRVTITCKASQNINNYLNWYQQKPGKAPKRLIYNTNNLQTGVPSRFSGSGSGTEYTLTISSLQPEDFATYYCLQHNSFPTFGQGTKLEIKRTV

SEQ ID NO: 15809 - protein, 120 aa, Artificial Sequence
  source: /note="Description of Artificial Sequence: Synthetic polypeptide"
QVQLVQSGAEVKKPGSSVKVSCKASGFTFTDYKIHWVRQAPGQGLEWMGYFNPNSGYSTYAQKFQGRVTITADKSTSTAYMELSSLRSEDTAVYYCARLSPGGYYVMDVWGQGTTVTVSS

SEQ ID NO: 15810 - protein, 108 aa, Artificial Sequence
  source: /note="Description of Artificial Sequence: Synthetic polypeptide"
DIQMTQSPSSLSASVGDRVTITCRASQGIRNYLNWYQQKPGKAPKRLIYNTNNLQTGVPSRFSGSGSGTEFTLTISSLQPEDFATYYCLQHNSFPTFGQGTKLEIKRT

SEQ ID NO: 15811 - protein, 108 aa, Artificial Sequence
  source: /note="Description of Artificial Sequence: Synthetic polypeptide"
DIQMTQSPSSLSASVGDRVTITCRASQGINNWLNWYQQKPGKAPKRLIYNTNNLQTGVPSRFSGSGSGTEFTLTISSLQPEDFATYYCLQHNSFPTFGQGTKLEIKRT

SEQ ID NO: 15812 - protein, 108 aa, Artificial Sequence
  source: /note="Description of Artificial Sequence: Synthetic polypeptide"
DIQMTQSPSSLSASVGDRVTITCRASQGINNYLNWYQQKPGKAPKRLIYTTNNLQTGVPSRFSGSGSGTEFTLTISSLQPEDFATYYCLQHNSFPTFGQGTKLEIKRT

SEQ ID NO: 15813 - protein, 108 aa, Artificial Sequence
  source: /note="Description of Artificial Sequence: Synthetic polypeptide"
DIQMTQSPSSLSASVGDRVTITCRASQGINNYLNWYQQKPGKAPKRLIYNANNLQTGVPSRFSGSGSGTEFTLTISSLQPEDFATYYCLQHNSFPTFGQGTKLEIKRT

SEQ ID NO: 15814 - protein, 108 aa, Artificial Sequence
  source: /note="Description of Artificial Sequence: Synthetic polypeptide"
DIQMTQSPSSLSASVGDRVTITCRASQGINNYLNWYQQKPGKAPKRLIYNTSNLQTGVPSRFSGSGSGTEFTLTISSLQPEDFATYYCLQHNSFPTFGQGTKLEIKRT

SEQ ID NO: 15815 - protein, 108 aa, Artificial Sequence
  source: /note="Description of Artificial Sequence: Synthetic polypeptide"
DIQMTQSPSSLSASVGDRVTITCRASQGINNYLNWYQQKPGKAPKRLIYNTNSLQTGVPSRFSGSGSGTEFTLTISSLQPEDFATYYCLQHNSFPTFGQGTKLEIKRT

SEQ ID NO: 15816 - protein, 108 aa, Artificial Sequence
  source: /note="Description of Artificial Sequence: Synthetic polypeptide"
DIQMTQSPSSLSASVGDRVTITCRASQGINNYLNWYQQKPGKAPKRLIYNTNNLQSGVPSRFSGSGSGTEFTLTISSLQPEDFATYYCLQHNSFPTFGQGTKLEIKRT

SEQ ID NO: 15817 - protein, 108 aa, Artificial Sequence
  source: /note="Description of Artificial Sequence: Synthetic polypeptide"
DIQMTQSPSSLSASVGDRVTITCRASQGINNYLNWYQQKPGKAPKRLIYNTNNLQTGVPSRFSGSGSGTEFTLTISSLQPEDFATYYCLQHNSYPTFGQGTKLEIKRT

SEQ ID NO: 15818 - protein, 216 aa, Homo sapiens
LADIQMTQTTSSLSASLGDRVTISCRTSQDIGNYLNWYQQKPDGTVKLLIYYTSRLHSGVPSRFSGSGSGTDFSLTINNVEQEDVATYFCQHYNTVPPTFGGGTKLEIKRTVAAPSVFIFPPSDEQLKSGTASVVCLLNNFYPREAKVQWKVDNALQSGNSQESVTEQDSKDSTYSLSSTLTLSKADYEKHKVYACEVTHQGLSSPVTKSFNRGEC

SEQ ID NO: 15819 - protein, 221 aa, Homo sapiens
LADIVMTQAAFSNPVTLGTSASISCRSSKSLLHSNGITYLYWYLQKPGQSPQLLIYQMSNLASGVPDRFSSSGSGTDFTLRISRVEAEDVGVYYCAQNLELPYTFGGGTKLEIKRTVAAPSVFIFPPSDEQLKSGTASVVCLLNNFYPREAKVQWKVDNALQSGNSQESVTEQDSKDSTYSLSSTLTLSKADYEKHKVYACEVTHQGLSSPVTKSFNRGEC

SEQ ID NO: 15820 - protein, 220 aa, Homo sapiens
LADIVLTQSPASLAVSLGQRATISCRASKSVSTSGYSFMHWYQLKPGQPPKLLIYLASNLESGVPARFSGSGSGTDFTLNIHPVEEEDAATYYCQHSREFPLTFGGGTKLEIKRTVAAPSVFIFPPSDEQLKSGTASVVCLLNNFYPREAKVQWKVDNALQSGNSQESVTEQDSKDSTYSLSSTLTLSKADYEKHKVYACEVTHQGLSSPVTKSFNRGEC

SEQ ID NO: 15821 - protein, 219 aa, Homo sapiens
DIVMTQAAFSNPVTLGTSASISCRSSKSLLHSNGITYLYWYLQKPGQSPQLLIYQMSNLASGVPDRFSSSGSRTDFTLRISRVEAEDVGVYYCAQNLELPYTFGGGTKLEIKRTVAAPSVFIFPPSDEQLKSGTASVVCLLNNFYPREAKVQWKVDNALQSGNSQESVTEQDSKDSTYSLSSTLTLSKADYEKHKVYACEVTHQGLSSPVTKSFNRGEC

SEQ ID NO: 15822 - protein, 220 aa, Homo sapiens
LADVVMTQTPLSLPVSLGDQASISCRSSQSLVHSNGNTYLHWYLQKPGQSPKLLIYKVSNRFSGVPDRFSGSGSGTDFTLKISRVEAEDLGVYFCSQSTHVPTFGGGTKLEIKRTVAAPSVFIFPPSDEQLKSGTASVVCLLNNFYPREAKVQWKVDNALQSGNSQESVTEQDSKDSTYSLSSTLTLSKADYEKHKVYACEVTHQGLSSPVTKSFNRGEC

SEQ ID NO: 15823 - protein, 216 aa, Homo sapiens
LADIVMTQSHKFMSTSVGDRVSITCKASQDVTNAVAWYQQKPGQSPKLLIYWASIRHTGVPDRFTGSRSGTDYTLTINSVQAEDLALYYCQQHYNTPLTFGAGTKLEIKRTVAAPSVFIFPPSDEQLKSGTASVVCLLNNFYPREAKVQWKVDNALQSGNSQESVTEQDSKDSTYSLSSTLTLSKADYEKHKVYACEVTHQGLSSPVTKSFNRGEC

SEQ ID NO: 15824 - protein, 220 aa, Homo sapiens
LADVVMTQTPLSLPVSLGDQASISCRSSQSLVHSNGNTYLHWYLQKPGQSPKLLLYKVSNRFSGVPDRFSGSGSGTDFTLKISRVESEDLGVYFCSQNTHVYTFGGGTKLEIKRTVAAPSVFIFPPSDEQLKSGTASVVCLLNNFYPREAKVQWKVDNALQSGNSQESVTEQDSKDSTYSLSSTLTLSKADYEKHKVYACEVTHQGLSSPVTKSFNRGEC

SEQ ID NO: 15825 - protein, 215 aa, Homo sapiens
LAQIVLTQSPAIMSASPGEKVTMTCSASSSVSYIYWYQQKPGSSPRLLIYDASNLASGVPVRFSGSGSGTSYSLTISRMEAEDAATYYCQQWSSYPITFGSGTKLEIKRTVAAPSVFIFPPSDEQLKSGTASVVCLLNNFYPREAKVQWKVDNALQSGNSQESVTEQDSKDSTYSLSSTLTLSKADYEKHKVYACEVTHQGLSSPVTKSFNRGEC

SEQ ID NO: 15826 - protein, 216 aa, Homo sapiens
LADIQMTQTTSSLSASLGDRVTISCSASQGITNYLNWYQQKPDGTVKLLIYYSSSLHSGVPSRFSGSGSGTDYSLTISNLEPEDIATYYCQQYSEIPYTFGGGTKLELKRTVAAPSVFIFPPSDEQLKSGTASVVCLLNNFYPREAKVQWKVDNALQSGNSQESVTEQDSKDSTYSLSSTLTLSKADYEKHKVYACEVTHQGLSSPVTKSFNRGEC

SEQ ID NO: 15827 - protein, 215 aa, Homo sapiens
LAQIVLTQSPAIMSASPGEKVTITCSASSSVSYMHWFQQKPGTSPKLWIYSTSNLASGVPARFSGSGSGTSYSLTISRMEAEDAATYYCQQRSSYPYTFGGGTKLELKRTVAAPSVFIFPPSDEQLKSGTASVVCLLNNFYPREAKVQWKVDNALQSGNSQESVTEQDSKDSTYSLSSTLTLSKADYEKHKVYACEVTHQGLSSPVTKSFNRGEC

SEQ ID NO: 15828 - protein, 220 aa, Homo sapiens
LADIVLTQSPASLAVSLGQRATISCRASQSVSTSTYSYMHWYQQKSGQPPKLLIKYASNLESGVPARFSGSGSGTDFTLNIHPVEEEDTATYYCQHSWEIPWTFGGGTKLEIKRTVAAPSVFIFPPSDEQLKSGTASVVCLLNNFYPREAKVQWKVDNALQSGNSQESVTEQDSKDSTYSLSSTLTLSKADYEKHKVYACEVTHQGLSSPVTKSFNRGEC

SEQ ID NO: 15829 - protein, 216 aa, Homo sapiens
LADIQMTQTTSSLSASLGDRVTISCRASQDISNYLNWYQQKPDGTVKVLIYYTSRLHSGVPSRFSGSGSGTDYSLTISNLEQEDIATYFCQQGNTLPYTFGGGTKLEIKRTVAAPSVFIFPPSDEQLKSGTASVVCLLNNFYPREAKVQWKVDNALQSGNSQESVTEQDSKDSTYSLSSTLTLSKADYEKHKVYACEVTHQGLSSPVTKSFNRGEC

SEQ ID NO: 15830 - protein, 216 aa, Homo sapiens
LADIQMTQTTSSLSASLGDRVTISCSASQDISNYLNWYQQKPDGTVKLLIYHTSTLHSGVPSRFSGSGSGTDYSLTISNLEPEDIATYYCQQYSKLPWTFGGGTKLEIKRTVAAPSVFIFPPSDEQLKSGTASVVCLLNNFYPREAKVQWKVDNALQSGNSQESVTEQDSKDSTYSLSSTLTLSKADYEKHKVYACEVTHQGLSSPVTKSFNRGEC

SEQ ID NO: 15831 - protein, 216 aa, Homo sapiens
LADIQMTQTTSSLSASLGDRVTISCSASQGISNYLNWYQQKPDGTVKLLIYYTSSLHSGVPSRFSGSGSGTDYSLTISNLEPEDIATYYCQQYSKLPYTFGGGTKLEIKRTVAAPSVFIFPPSDEQLKSGTASVVCLLNNFYPREAKVQWKVDNALQSGNSQESVTEQDSKDSTYSLSSTLTLSKADYEKHKVYACEVTHQGLSSPVTKSFNRGEC

SEQ ID NO: 15832 - protein, 217 aa, Homo sapiens
LAENVLTQSPAIMSASPGEKVTMTCRASSSVSSSYLHWYQQKSGASPKLWIYSTSNLASGVPARFSGSGSGTSYSLTVNSVETEDAATYYCHQYSGFPFTFGSGTKLELKRTVAAPSVFIFPPSDEQLKSGTASVVCLLNNFYPREAKVQWKVDNALQSGNSQESVTEQDSKDSTYSLSSTLTLSKADYEKHKVYACEVTHQGLSSPVTKSFNRGEC

SEQ ID NO: 15833 - protein, 107 aa, Homo sapiens [sequence omitted]

SEQ ID NO: 15834 - protein, 113 aa, Artificial Sequence
  source: /note="Description of Artificial Sequence: Synthetic polypeptide"
DIVMTQTPLSLPVTPGEPASISCRSNQDLTHSNGNTYLEWYLQKPGQSPRLLIYKVSNRFSGVPDRFSGSGAGTDFTLRISRVEAEDVGVYYCMQGTHWPWTFGQGTKVDIKR

SEQ ID NO: 15835 - protein, 113 aa, Artificial Sequence
  source: /note="Description of Artificial Sequence: Synthetic polypeptide"
DIVMTQTPLSLPVTPGEPASISCRSSQSVDMGIGNNYLEWYLQKPGQSPRLLIYKVSNRFSGVPDRFSGSGAGTDFTLRISRVEAEDVGVYYCMQGTHWPWTFGQGTKVDIKR

SEQ ID NO: 15836 - protein, 108 aa, Artificial Sequence
  source: /note="Description of Artificial Sequence: Synthetic polypeptide"
  MOD_RES (11)..(11): Any amino acid
  MOD_RES (21)..(21): Any amino acid
  MOD_RES (45)..(45): Any amino acid
  MOD_RES (83)..(83): Any amino acid
  MOD_RES (85)..(85): Any amino acid
  MOD_RES (100)..(100): Any amino acid
EIVLTQSPDFXSVTPKEKVTXTCRASQSIGTNIHWYQQKPDQSPXLLIKYASESISGVPSRFSGSGSGTDFTLTINSLEAEDXAXYYCQQNNNWPTTFGXGTKLEIKR

SEQ ID NO: 15837 - protein, 108 aa, Artificial Sequence
  source: /note="Description of Artificial Sequence: Synthetic polypeptide"
EIVLTQSPDFQSVTPKEKVTITCRASQSIGTNIHWYQQKPDQSPKLLIKYASESISGVPSRFSGSGSGTDFTLTINSLEAEDAATYYCQQNNNWPTTFGQGTKLEIKR

SEQ ID NO: 15838 - protein, 108 aa, Artificial Sequence
  source: /note="Description of Artificial Sequence: Synthetic polypeptide"
EIVLTQSPDFQSVTPKEKVTITCRASQSIGTNIHWYQQKPDQSPKLLIKYASESISGVPSRFSGSGSGTDFTLTINSLEAEDAADYYCQQNNNWPTTFGQGTKLEIKR

SEQ ID NO: 15839 - protein, 107 aa, Artificial Sequence
  source: /note="Description of Artificial Sequence: Synthetic polypeptide"
EIVLTQSPDFQSVTPKEKVTITCRASQSIGTNIHWYQQKPDQSPKLLIKYASESISGVPSRFSGSGSGTDFTLTINSLEAEDAADYYCQQNNNWPTTFGAGTKLEIK

SEQ ID NO: 15840 - protein, 95 aa, Homo sapiens
EIVLTQSPDFQSVTPKEKVTITCRASQSIGSSLHWYQQKPDQSPKLLIKYASQSFSGVPSRFSGSGSGTDFTLTINSLEAEDAATYYCHQSSSLP

SEQ ID NO: 15841 - protein, 108 aa, Artificial Sequence
  source: /note="Description of Artificial Sequence: Synthetic polypeptide"
DIQMTQSPSSLSASLGGKVTITCKASQDINNYLAWYQHKPGKGPRLLIHYTSTLHPGIPSRFSGSGSGRDYSFSISNLEPEDIATYYCLQYDNLLYTFGGGTKLEIKR

SEQ ID NO: 15842 - protein, 108 aa, Artificial Sequence
  source: /note="Description of Artificial Sequence: Synthetic polypeptide"
DVQITQSPSYLAASPGETITINCRASKSISKYLAWYQEKPGKTNKLLIYSGSTLQSGIPSRFSGSGSGTDFTLTISSLEPEDFAMYYCQQHNEYPWTFGGGTKLEIKR

SEQ ID NO: 15843 - protein, 108 aa, Artificial Sequence
  source: /note="Description of Artificial Sequence: Synthetic polypeptide"
DIQMTQSPSSLSASVGDRVTITCRASQDINNYLAWYQHKPGKGPKLLIHYTSTLHPGIPSRFSGSGSGRDYSFSISSLEPEDIATYYCLQYDNLLYTFGQGTKLEIKR

SEQ ID NO: 15844 - protein, 108 aa, Artificial Sequence
  source: /note="Description of Artificial Sequence: Synthetic polypeptide"
DIQMTQSPSSLSASVGDRVTITCKASQDINNYLAWYQHKPGKGPKLLIHYTSTLHPGIPSRFSGSGSGRDYSFSISSLEPEDIATYYCLQYDNLLYTFGQGTKLEIKR

SEQ ID NO: 15845 - protein, 108 aa, Artificial Sequence
  source: /note="Description of Artificial Sequence: Synthetic polypeptide"
DIQMTQSPSSLSASVGDRVTITCRASQDINNYLAWYQQKPGKAPKLLIYYTSTLHPGVPSRFSGSGSGTDFTFTISSLQPEDIATYYCLQYDNLLYTFGQGTKVEIKR

SEQ ID NO: 15846 - protein, 108 aa, Artificial Sequence
  source: /note="Description of Artificial Sequence: Synthetic polypeptide"
DVQITQSPSSLAASVGERITINCRASQSISRYLAWYQEKPGKTNKLLIYSGSTLQSGIPSRFSGSGSGTDFTLTISSLEPEDFAMYYCQQHNEYPWTFGQGTKLEIKR

SEQ ID NO: 15847 - protein, 108 aa, Artificial Sequence
  source: /note="Description of Artificial Sequence: Synthetic polypeptide"
DVQITQSPSSLAASVGERITINCRASKSISKYLAWYQEKPGKTNKLLIYSGSTLQSGIPSRFSGSGSGTDFTLTISSLEPEDFAMYYCQQHNEYPWTFGQGTKLEIKR

SEQ ID NO: 15848 - protein, 114 aa, Artificial Sequence
  source: /note="Description of Artificial Sequence: Synthetic polypeptide"
DIVMTQSPDSLAVSLGERATINCKSSQSVLYSSNNKNYLAWYQHKPGQPPNLLIYWASTRESGVPDRFSGSGSGTDFTLTISSLQAEDVAVYYCHQYYSTPFTFGPGTKVDIKR

SEQ ID NO: 15849 - protein, 108 aa, Artificial Sequence
  source: /note="Description of Artificial Sequence: Synthetic polypeptide"
DIQMTQSPSSVSASVGDRVTITCRASQGISSWLAWYQQQPGKAPKLLIYAASSLQSGVPSRFSGSGSGTDFTLTISSLQPEDFATYYCQQTNSFPLTFGGGTKVEIKR

SEQ ID NO: 15850 - protein, 107 aa, Artificial Sequence
  source: /note="Description of Artificial Sequence: Synthetic polypeptide"
DIQLTQSPSFLSASVGDRVTITCWASQGINNYLAWYQQKPGKAPKLLIYAASTLQTGVPSRFSGSGSGTEFTLTISSLQPEDFATYYCQQLNSYPLTFGGGTKVEIK

SEQ ID NO: 15851 - protein, 107 aa, Artificial Sequence
  source: /note="Description of Artificial Sequence: Synthetic polypeptide"
DIQMTQSPSTLSASVGDRVTITCRASQSTSSWLAWYQQKPGKAPTLLIYKASSLESGVPSKFSGSGSGTEFTLTISSLQPDDFATYYCQQYNRYSRTFGQGTKVEIK

SEQ ID NO: 15852 - protein, 108 aa, Artificial Sequence
  source: /note="Description of Artificial Sequence: Synthetic polypeptide"
EIALTQSPGTLSLSPGERATLSCRASQSVSSTYLAWYQQKPGQAPRLLIYGASSRATGIPDRFSGSGSGTDFTLTISRLEPEDFAVYYCQQYDSSPITFGQGTRLEIK

SEQ ID NO: 15853 - protein, 113 aa, Artificial Sequence
  source: /note="Description of Artificial Sequence: Synthetic polypeptide"
DVVMTQSPLSLPVALGQPASISCRSSQSLVYTDGNTYLNWFHQRPGQSPRRLIYKVSNRDSGVPDRFTGSGSGTDFTLKISRVEAEDVGVFYCMQGSHWPPYTFGQGTKLEIK

SEQ ID NO: 15854 - protein, 107 aa, Artificial Sequence
  source: /note="Description of Artificial Sequence: Synthetic polypeptide"
AIQLTQSPSSLSASVGDRVTITCRASQGIGNDLGWYQLRPGKAPKLLIYATSSLQSGVPSRFSGSGSGTDFTLTISSLQPEDFATYYCLQDYNYPWTFGQGTKVEIK

SEQ ID NO: 15855 - protein, 107 aa, Artificial Sequence
  source: /note="Description of Artificial Sequence: Synthetic polypeptide"
AIQMTQSPSSLSASVGDRVTITCRASQGIGYDLGWYQQKPGKAPKLLIYAASSLQSGVPSRFSGSGSGTDFTLTISSLQPEDFATYYCLQDYNYPWTFGQGTKVDIK

SEQ ID NO: 15856 - protein, 107 aa, Artificial Sequence
  source: /note="Description of Artificial Sequence: Synthetic polypeptide"
AIQMTQSPSSLSASVGDRVTITCRASQGIGNDLGWYQQKPGKAPNLLIYATSSLQSGVPSRFSGSGSGTDFTLTISSLQPEDFATYYCLQDYNYPWTFGQGTKVEIK

SEQ ID NO: 15857 - protein, 111 aa, Artificial Sequence
  source: /note="Description of Artificial Sequence: Synthetic polypeptide"
ESVLTQPPSVSAAPGQKVTISCSGSSSNIGNNYVSWYQQLPGTAPKLLIYDHTNRPAGVPDRFSGSKSGTSASLAISGFRSEDEADYYCASWDYTLSGWVFGGGTKLTVLG

SEQ ID NO: 15858 - protein, 127 aa, Artificial Sequence
  source: /note="Description of Artificial Sequence: Synthetic polypeptide"
MGTPAQLLFLLLLWLPDTTGDIQMTQSPSTLSASVGDRVTITCRASQSISSWWAWYQQKPGKAPKLLIYDASSLESGVPSRFSGSGSGTEFTLTISSLQPDDFATYYCQQYHAHPTTFGGGTKVEIK

SEQ ID NO: 15859 - protein, 133 aa, Artificial Sequence
  source: /note="Description of Artificial Sequence: Synthetic polypeptide"
MGTPAQLLFLLLLWLPDTTGDIVMTQSPDSLAVSLGERATINCKSSQSVLYSPNNKNYLAWYQQKPGQPPKLLIYWASTRESGVPDRFSGSGSGTDFTLTISSLQAEDVAVYYCQQYYGSPITFGGGTKVEIK

SEQ ID NO: 15860 - protein, 128 aa, Artificial Sequence
  source: /note="Description of Artificial Sequence: Synthetic polypeptide"
MGTPAQLLFLLLLWLPDTTGEIVMTQSPATLSVSPGERATLSCRASQSVSSNLAWYQQKPGQAPRLLIYGASTRATGIPARFSGSGSGTEFTLTISSLQSEDFAVYYCQDYRTWPRRVFGGGTKVEIK

SEQ ID NO: 15861 - protein, 108 aa, Artificial Sequence
  source: /note="Description of Artificial Sequence: Synthetic polypeptide"
DILLTQSPGTLSLSPGERATLSCRASQSIGTNIHWYQQKPGQAPRLLIKYASESISGIPDRFSGSGSGTDFTLTISRLEPEDFAVYYCQQNNNWPTTFGQGTKLEIKR

SEQ ID NO: 15862 - protein, 216 aa, Mus musculus; identical to SEQ ID NO: 15818

SEQ ID NO: 15863 - protein, 221 aa, Mus musculus; identical to SEQ ID NO: 15819

SEQ ID NO: 15864 - protein, 220 aa, Mus musculus; identical to SEQ ID NO: 15820

SEQ ID NO: 15865 - protein, 220 aa, Mus musculus; identical to SEQ ID NO: 15824

SEQ ID NO: 15866 - protein, 220 aa, Mus musculus; identical to SEQ ID NO: 15822

SEQ ID NO: 15867 - protein, 216 aa, Mus musculus
LANIVMTQSHKFMSTLIGARVSITCKASQDVDTAVAWYQQKPGQSPKLLIYWASTRHTGVPDRFTGSGSGTDFSLTVSNVQSEDLTDYFCQQYSSYPLTFGAGTKLELKRTVAAPSVFIFPPSDEQLKSGTASVVCLLNNFYPREAKVQWKVDNALQSGNSQESVTEQDSKDSTYSLSSTLTLSKADYEKHKVYACEVTHQGLSSPVTKSFNRGEC

SEQ ID NO: 15868 - protein, 213 aa, Mus musculus
DIQMTQTSSSLSASLGDRVTISCRSSQDISNYLNWYQQKPDGTVKLLMYISRLHSGVPSRFSGSGSGTEYSLTISNLEQEDIATYFCQQGNTLPLTFGAGTKLELKRTVAAPSVFIFPPSDEQLKSGTASVVCLLNNFYPREAKVQWKVDNALQSGNSQESVTEQDSKDSTYSLSSTLTLSKADYEKHKVYACEVTHQGLSSPVTKSFNRGEC

SEQ ID NO: 15869 - protein, 222 aa, Mus musculus
LADIVMTQSPSSLTVTAGEKVTMSCKSSQSLLNSGNQKNYLTWYQQKPGQPPKLLIYWASTRESGVPDRFTGSGSGTDFTLTISSVQAEDLAVYYCQSDYSYPYTFGGGTKLEIKRTVAAPSVFIFPPSDEQLKSGTASVVCLLNNFYPREAKVQWKVDNALQSGNSQESVTEQDSKDSTYSLSSTLTLSKADYEKHKVYACEVTHQGLSSPVTKSFNRGEC

SEQ ID NO: 15870 - protein, 216 aa, Mus musculus
LADIVMTQTTSSLSASLGDRVTISCRPSQDISNYVNWFQQKPGGTVKLLIFHTSRLHSGVPSRFSGSGSGTDYSLTISTLEQEDIAIYFCQQGITLPWTFGGGTKLEIKRTVAAPSVFIFPPSDEQLKSGTASVVCLLNNFYPREAKVQWKVDNALQSGNSQESVTEQDSKDSTYSLSSTLTLSKADYEKHKVYACEVTHQGLSSPVTKSFNRGEC

SEQ ID NO: 15871 - protein, 216 aa, Mus musculus
LADIVMTQATSSLSASLGDRVTVSCRASQDINNYLNWYQQKPDGTVKLLIYYTSRLQSGVPSRFSGSGSGIDYSLTISNLEQEDFVTYFCQQSETLPWTFGGGTKLELKRTVAAPSVFIFPPSDEQLKSGTASVVCLLNNFYPREAKVQWKVDNALQSGNSQESVTEQDSKDSTYSLSSTLTLSKADYEKHKVYACEVTHQGLSSPVTKSFNRGEC

SEQ ID NO: 15872 - protein, 221 aa, Mus musculus
LADIVLTQSPSSLAVSAGEKVTMSCKSSQSVLYISNERNYLAWYQQKPGQSPKLLIYWASTRKSGVPDRFTGSGSGTDFTLTISSVKAEDLAVYYCHQHLSSYTFGGGTKLEIKRTVAAPSVFIFPPSDEQLKSGTASVVCLLNNFYPREAKVQWKVDNALQSGNSQESVTEQDSKDSTYSLSSTLTLSKADYEKHKVYACEVTHQGLSSPVTKSFNRGEC

SEQ ID NO: 15873 - protein, 107 aa, Artificial Sequence
  source: /note="Description of Artificial Sequence: Synthetic polypeptide"
DIQMTQSPSSLSASVGDRVTITCRASQNIATDVAWYQQKPGKAPKLLIYSASFLYSGVPSRFSGSGSGTDFTLTISSLQPEDFATYYCQQSEPEPYTFGCGTKVEIK

SEQ ID NO: 15874 - protein, 111 aa, Mus sp.
QIVLTQSPAIMSASLGERVTMTCTVSSSVNSSYLHWYQQKPGSSPKLWIYSTSNLPSGVPARFSGSGSGTSYSLTISTIESEDAATYYCHQYHRSPQFTFGSGTKLEIKRA

SEQ ID NO: 15875 - protein, 112 aa, Mus sp.
DIVLTQSPASLAVSLGQRATISCRASESVDTFGYSFIYWYQQKPGQPPRLLIYRASNLESGIPARFSGSGSRTDFTLTINPVEADDVATYYCQQSNEDPPTFGGGTKLEIKR

SEQ ID NO: 15876 - protein, 113 aa, Mus sp.
DVVMSQIPLTLSVTIGQPASISCKSSQSLIHSDGKTYLNWLLQRPGQSPKRLIYLVSRLDSGVPDRFTGSGSGTDFTLKISRVEAEDLGVYYCWQGSHFPRTFGGGTKLEIKR

SEQ ID NO: 15877 - protein, 110 aa, Artificial Sequence
  source: /note="Description of Artificial Sequence: Synthetic polypeptide"
EIVLTQSPATMSASPGERVTMTCTVSSSVNSSYLHWYQQKPGSSPKLWIYSTSNLPSGVPARFSGSGSGTSYSLTISTIESEDAATYYCHQYHRSPQFTFGGGTKLEIKR

SEQ ID NO: 15878 - protein, 112 aa, Artificial Sequence
  source: /note="Description of Artificial Sequence: Synthetic polypeptide"
DIVLTQSPDSLAVSLGERATISCRASESVDTFGYSFIYWYQQKPGQPPRLLIYRASNLESGIPDRFSGSGSRTDFTLTINPVEAEDVATYYCQQSNEDPPTFGGGTKLEIKR

SEQ ID NO: 15879 - protein, 112 aa, Artificial Sequence
  source: /note="Description of Artificial Sequence: Synthetic polypeptide"
DIVLTQSPDSLAVSLGERATISCRASESVDTFGYSFIYWYQQKPGQPPRLLIYRASNLESGIPARFSGSGSRTDFTLTINPVEAEDVATYYCQQSNEDPPTFGGGTKLEIKR

SEQ ID NO: 15880 - protein, 112 aa, Artificial Sequence
  source: /note="Description of Artificial Sequence: Synthetic polypeptide"
DIVLTQSPDSLAVSLGERATISCRASESVDTFGYSFIYWYQQKPGQPPRLLIYRASNLESGIPDRFSGSGSRTDFTLTINPVEADDVATYYCQQSNEDPPTFGGGTKLEIKR

SEQ ID NO: 15881 - protein, 113 aa, Artificial Sequence
  source: /note="Description of Artificial Sequence: Synthetic polypeptide"
DVVMTQTPLSLSVTLGQPASISCKSSQSLIHSDGKTYLNWLLQRPGQSPKRLIYLVSRLDSGVPDRFTGSGAGTDFTLKISRVEAEDLGVYYCWQGSHFPRTFGGGTKLEIKR

SEQ ID NO: 15882 - protein, 112 aa, Mus sp.
DIVLTQSPGSLAVSLGQRATISCRASESVDTYGNSFMHWYQQKAGQPPRLLIYRASNLESGIPARFSGSGSRTDFTLTINPVEADDVATYYCQQSNEDPLTFGAGTKLELKR

SEQ ID NO: 15883 - protein, 107 aa, Mus sp.
QIVLTQSPALMSASPGEKVTMTCSASSSVSYMYWYQQKPRSSPKPWIYITSNLASGVPARFSGSGSGTSYSLTISSMEAEDAATYYCQQWSSNPPTFGGGTKLEIKR

SEQ ID NO: 15884 - protein, 107 aa, Artificial Sequence
  source: /note="Description of Artificial Sequence: Synthetic polypeptide"
DIQMTQSPSFLSASVGDRVTITCRASQGIISYLAWYQQKPEKAPKRLIYAASSLQSGVPSRFSGSGSGTEFTLTISSLQPEDFATYYCVQYANYPYTFGQGTKLEIK

SEQ ID NO: 15885 - protein, 107 aa, Artificial Sequence
  source: /note="Description of Artificial Sequence: Synthetic polypeptide"
DIQMTQSPSFLSASVGDRVTITCRASQGIISYLAWYQQKPEKAPKRLIYAASSLQSGVPSRFSGSGSGTEFTLTISSLQPEDFATYYCVQYSNYPYTFGQGTKLEIK

SEQ ID NO: 15886 - protein, 107 aa, Artificial Sequence
  source: /note="Description of Artificial Sequence: Synthetic polypeptide"
DIQMTQSPSFLSASVGDRVTITCRASQGIISYLAWYQQKPEKAPKRLIYAASSLQSGVPSRFSGSGSGTEFTLTISSLQPEDFATYYCGQYANYPYTFGQGTKLEIK

SEQ ID NO: 15887 - protein, 107 aa, Artificial Sequence
  source: /note="Description of Artificial Sequence: Synthetic polypeptide"
DIQLTQSPSFLSASVGDRVTITCRASQGIISYLAWYQQKPEKAPKRLIYGASSLQSGVPSRFSGSGSGTEFTLTISSLQPEDFATYYCVQYANYPYTFGQGTKLEIK

SEQ ID NO: 15888 - protein, 107 aa, Artificial Sequence
  source: /note="Description of Artificial Sequence: Synthetic polypeptide"
DIQMTQSPSSLSASLGDRVTITCQASQDISTYLNWIQQKPGKAPKRLIYAASSLQSGVPSRFSGSGSGTEFTLTISSLQPEDFATYYCVQYANYPYTFGQGTKLEIK

SEQ ID NO: 15889 - protein, 107 aa, Artificial Sequence
  source: /note="Description of Artificial Sequence: Synthetic polypeptide"
DIQMTQSPSSLSASLGDRVTITCQASQDISTYLNWIQQKPGKAPKRLIYAASSLQRGVPSRFSGSGSGTEFTLTISSLQPEDFATYYCVQYANYPYTFGQGTKLEIK

SEQ ID NO: 15890 - protein, 107 aa, Artificial Sequence
  source: /note="Description of Artificial Sequence: Synthetic polypeptide"
DIQMTQSPSSLSASVGDRVTITCRASQSISSYLAWYQQKPGKAPKRLIYAASSLQRGVPSRFSGSGSGTEFTLTISSLQPEDFATYYCVQYANYPYTFGQGTKLEIK

SEQ ID NO: 15891 - protein, 107 aa, Artificial Sequence
  source: /note="Description of Artificial Sequence: Synthetic polypeptide"
DIQMTQSPSFLSASVGDRVTITCRASQGIISYLAWYQQKPEKAPKRLIYAASSLQSGVPSRFSGSGSGTEFTLTISSLQPEDFATYYCAQYANYPYTFGQGTKLEIK

SEQ ID NO: 15892 - protein, 107 aa, Artificial Sequence
  source: /note="Description of Artificial Sequence: Synthetic polypeptide"
DIQMTQSPSFLSASVGDRVTITCRASQGIISYLAWYQQKPEKAPKRLIYAASSLQSGVPSRFSGSGSGTEFTLTISSLQPEDFATYYCVQYAKYPYTFGQGTKLEIK

SEQ ID NO: 15893 - protein, 107 aa, Artificial Sequence
  source: /note="Description of Artificial Sequence: Synthetic polypeptide"
DIQMTQSPSFLSASVGDRVTITCRASQGIISYLAWYQQKPEKAPKRLIYAASSLQSGVPSRFSGSGSGTEFTLTISSLQPEDFATYYCVGYANYPYTFGQGTKLEIK

SEQ ID NO: 15894 - protein, 107 aa, Artificial Sequence
  source: /note="Description of Artificial Sequence: Synthetic polypeptide"
DIQMTQSPSFLSASVGDRVTITCRASQGIISYLAWYQQKPEKAPKRLIYAASSLQSGVPSRFSGSGSGTEFTLTISSLQPEDFATYYCVRYANYPYTFGQGTKLEIK

SEQ ID NO: 15895 - protein, 107 aa, Artificial Sequence
  source: /note="Description of Artificial Sequence: Synthetic polypeptide"
DIQMTQSPSFLSASVGDRVTITCRASQGIISYLAWYQQKPEKAPKRLIYAASSLQSGVPSRFSGSGSGTEFTLTISSLQPEDFATYYCVQYLNYPYTFGQGTKLEIK

SEQ ID NO: 15896 - protein, 107 aa, Artificial Sequence
  source: /note="Description of Artificial Sequence: Synthetic polypeptide"
DIVLTQTPSSLSASLEERVSLTCRASQEISGYLGWLQQKPDGTIKRLIYAASTLDSGVPKKFSGNRSGSEYSLTISSLESEDFADYYCVQYANYPYTFGGGTKLEIK

SEQ ID NO: 15897 - protein, 107 aa, Artificial Sequence
  source: /note="Description of Artificial Sequence: Synthetic polypeptide"
DIVLTQTPSSLSASLEERVSLTCRASQEISGYLGWLQQKPDGTIKRLIYAASTLDSGVPKKFSGNRSGSEYSLTISSLESEDFATYYCVQYANYPYTFGQGTKLEIK

SEQ ID NO: 15898 - protein, 107 aa, Mus musculus
DTVMTQSHKIMSTSVGDRVSITCKASQDVSIGVAWYQQRPGQSPKLLIYSASYRYTGVPDRFTGSGSGTDFTFTISSVQAEDLAVYYCQQYYIYPYTFGGGTKLEIK

SEQ ID NO: 15899 - protein, 113 aa, Homo sapiens
DIVMTQSPDSLAVSLGERATITCKSSQSVFFRSNNKNCLAWYQQRPGQPPNLLIYWASTRESGVPDRFSGSGSGTDFTLTISSLQAEDVAVYYCQQYFGSPFTFGPGTKVDIK

SEQ ID NO: 15900 - protein, 107 aa, Homo sapiens
DIQMTQSPSSLSASVGDRVTITCRASQGISNHLAWFQQKPGKAPKSLIYGASSLQTGVPSKFSGSGSGTDFTLTISSLQPEDFASYFCQQYKGYPITFGQGTRLEIK

SEQ ID NO: 15901 - protein, 113 aa, Homo sapiens
DIVMTQSPDSLAVSLGERATITCKSSQSVFFRSNNKNCLTWYQQRPGQPPNLLIYWASTRESGVPDRFSGSGSGTDFTLTINNLQAEDVAVYYCQQYFGSPFTFGPGTKVDIK

SEQ ID NO: 15902 - protein, 113 aa, Homo sapiens
DIVMTQSPDSLAVSLGERATITCKSSQSVFFRSNNKNCLAWYQQRPGQPPNLLIYWASTRESGVPDRFSGSGCGTDFTLTISSLQAEDVAVYYCQQYFGSPFTFGPGTKVDIK

SEQ ID NO: 15903 - protein, 113 aa, Homo sapiens
DIVMTQSPDSLAVSLGERATITCKSSQSVFFRSNNKNCLAWYQQRPGQPPNLLFYWASTRESGVPDRFSGSGSGTDFTLTISSLQAEDVAVYYCQQYFGSPFTLGPGTKVDIK

SEQ ID NO: 15904 - protein, 113 aa, Homo sapiens
DIVMTQSPGSLVVSLGERATITCKSSQSVFFRSNNKNCLAWYQQRPGQSPNLLIYWASTRESGVPDRFSGSGSGTDFTLTISSLQAEDVAVYYCQQYFGSPFTFGPGTKVDIK

SEQ ID NO: 15905 - protein, 113 aa, Homo sapiens
DIVMTQSPDSLAVSLGERATITCKSSQSVFFRSNNKNCLAWYQQRPGQPPNLLIYWASSRESGVPDRFSGSGSGTDFALTISSLQTEDVAVYYCQQYFGSPFTFGPGTKVDIK

SEQ ID NO: 15906 - protein, 113 aa, Homo sapiens
DIVMTQFPDSLAVSLDERATINCKSSQSVFFRSNNKNCLAWYQQKPGQPPNLLIYWASTRESGVPDRFSGSGSGTDFTLTISSLQAEDVAFYYCQQYYSSPFTFGPGTKVDIK

SEQ ID NO: 15907 - protein, 112 aa, Homo sapiens; identical to SEQ ID NO: 9453

SEQ ID NO: 15908 - protein, 107 aa, Artificial Sequence
  source: /note="Description of Artificial Sequence: Synthetic polypeptide"
  MOD_RES (30)..(30): Any amino acid
  MOD_RES (53)..(53): Any amino acid
  MOD_RES (92)..(92): Any amino acid
DIQMTQSPSSLSASVGDRVTITCRASQDVXTAVAWYQQKPGKAPKLLIYSASXLYSGVPSRFSGSRSGTDFTLTISSLQPEDFATYYCQQHXTTPPTFGQGTKVEIK

SEQ ID NO: 15909 - protein, 111 aa, Homo sapiens
QSALTQPPSASGSPGQSVTISCTGTSSDVGAYNDVSWYQHHPGKAPKLIIYEVNHRPSGVPDRFSGSKSDNTASLTISGLQAEDEADYYCSSYTPSNTPLVFGSGTKVTVL

SEQ ID NO: 15910 - protein, 110 aa, Homo sapiens
QPVLTQPPSVSAAPGQRVTISCSGSSSNIGNNYLSWYQQLPGTAPKLLIYDDTKRPSGIPDRFSGSKSGTSATLGITGLQTGDEADYYCGTWDGSLDAEVFGTGTKLTVL

SEQ ID NO: 15911 - protein, 108 aa, Homo sapiens
QTVVTQAPSVSVAPGQTARITCGGNNIGSKSVHWYQQKPGQAPVLVVYDDSDRPSGIPERFSGSNSGNTATLTISRVEAGDEADYYCQVWDSTSDHVVFGGGTKVTVL

SEQ ID NO: 15912 - protein, 108 aa, Homo sapiens
QSVLTQPPSVSVAPGNTATITCGGDNIGEKTVHWYQQRPGQAPALVIYYDSDRPSGIPERFSGSNSGNTATLTISRVEAGDEADYYCQVWDSSSDHVVFGGGTKLTVL

SEQ ID NO: 15913 - protein, 105 aa, Homo sapiens
IVLTQSPSSLSASVGDRVTITCQASHDISNYLTWYQHRPGRAPKLLIFDASRLETGVPSRFSGYGSGKDFTFTISGLQPEDFATYYCQHYADLPSFGQGTKLEIK

SEQ ID NO: 15914 - protein, 107 aa, Homo sapiens
QSVLTQPPSVSVAPGKTARITCGGNNIGSKSVHWYQQKPGQAPVLVIYYDSDRPSGIPERFSGSNSGNTATLTISRVEAGDEADYYCQVWDSSSDHLVFGTGTKLVT

SEQ ID NO: 15915 - protein, 112 aa, Homo sapiens
QAGLTQPPSASASPGDSVTLTCTLSSDHSDYKVDWYQQRPGKGPRFVMRVGTGGIVGVKVSNRFSGSKSGNTASLTISGLQAEDEADYYCSSYTDSSTLDVVFGGGTKLTVL

SEQ ID NO: 15916 - protein, 108 aa, Homo sapiens
SYELMQPPSVSVAPGKTARITCGGNNIGSKSVHWYQQKPGQAPVLVIYYDSDRPSGIPERFSGSNSGNTATLTISRVEAGDEADYYCQVWDSSSDHVVFGGGTKVTVL

SEQ ID NO: 15917 - protein, 108 aa, Homo sapiens
QAGLTQPPSVSVAPGKTARITCGGDNIGSKSVHWYQQKPGQAPVLVIYYDTDRPSGIPERFSGSNSGNTATLTISRVEAGDEADYYCQVWDSSSDPVVFGGGTKLTVL

SEQ ID NO: 15918 - protein, 110 aa, Homo sapiens
  MOD_RES (104)..(104): Any amino acid
QSVVTQPPSVSGAPGQRVTISCTGSSSNIGAGYEVHWYQHVPGTAPKLLIYINSNRPSGIPNRFSGSKSGNTAFLTISGLQAEDEADYYCISYTSSNTWVFGGXTKVTVL

SEQ ID NO: 15919 - protein, 111 aa, Homo sapiens
QSVLTQPPSASGSPGQSVTISCTGTSSDVGGYNFVSWYQQHPGKAPKLMIYDVTNRPSGVSNRFSGSKSGNTASLTISGLQAEDEADYYCSSYTSSSTPYVFGTGTKLTVL

SEQ ID NO: 15920 - protein, 108 aa, Homo sapiens
QPVLTQPPSVSVAPGKTARITCGGNNIGSKSVHWYQQKPGQAPVLVIYYDSDRPSGIPERFSGSNSGNTATLTISRVEAGDEADYYCQVWDSSSDHVVFGGGTKLTVL

SEQ ID NO: 15921 - protein, 106 aa, Homo sapiens
EIVLTQSPSSLSASVGDRVTITCQASHDISNYLTWYQHRPGRAPKLLIFDASRLETGVPSRFSGYGSGKDFTFTISGLQPEDFATYYCQHYADLPSFGQGTKVDIK

SEQ ID NO: 15922 - protein, 108 aa, Homo sapiens
SYELMQPPSVSVAPGKTARITCGGNNIGSKSVHWYQQKPGQAPVLVIYYDSDRPSGIPERFSGSNSGNTATLTISRVEAGDEADYYCQVWDSSRDHAVFGGGTKLTVL

SEQ ID NO: 15923 - protein, 108 aa, Homo sapiens
QAVVTQPPSVSVAPGQTARITCAGNNIGSKSVHWYQQKPGQAPVLVIFDDSDRPSGISERFSGSNSGNTATLTISRVEAGDEADYYCQVWDGDTDHVVFGGGTKLTVL

SEQ ID NO: 15924 - protein, 111 aa, Homo sapiens
QPVLTQPASVSGSPGQSITISCTGTSSDVGGYNYVSWYQQHPGKAPKLMIYDVSKRPSGVSNRFSGSKSGNTASLTISGLQAEDEADYYCSSYTSNSIYVFGTGTKVTVLG

SEQ ID NO: 15925 - protein, 110 aa, Homo sapiens
QSVVTQPPSVSAAPGQKVTISCSGSSSNIGNNYVSWYQQLPGTAPKLLIYDNNERPSGIPDRFSGSKSGTSATLGITGLQTGDEADYYCGTWDSSLSAGVFGGGTKLTVL

SEQ ID NO: 15926 - protein, 110 aa, Homo sapiens
QSVLTQPPSASGTPGQSVTISCSGSSSNIGGNTVNWYQQFPGTAPKLLMYINNLRPAGVPDRFSGSKSGTSASLVISGLQSEDEADYYCASWDDSLSGLVFGGGTKLTVL

SEQ ID NO: 15927 - protein, 108 aa, Homo sapiens
SYELMQPPSVSVAPGKTARITCGGNNIGSKSVHWYQQKPGQAPVVVIYYDSDRPSGIPERFSGSNSGNTATLTISRVEAGDEADYYCQVWDSSSDHYVFGTGTKLTVL

SEQ ID NO: 15928 - protein, 108 aa, Homo sapiens
QSVLTQPPSVSVAPGKTARITCGGNNIGSKSVHWYQQKPGQAPLLVIYYDTDRPSGIPERFSGSNSENTATLTISGVEAGDEADYYCQVWDIGSDQVVFGTGTKVTVL

SEQ ID NO: 15929 - protein, 111 aa, Homo sapiens
SYELTQPASVSGSPGQSITISCTGTSSDVGNYNSVSWYQQHPGKAPELMIYDVNNRPSGVSNRFSGSKSGNTASLTISGLQAEDEADYYCSSYTSSSTLVFGGGTQLTVLG

SEQ ID NO: 15930 - protein, 111 aa, Homo sapiens
QSVLTQPASVSGSPGQSITISCTGSSSDVGSYNLVSWYQQHPGKAPKLMIYDDNRRPSGISTRFSGSKSGNTASLTVSGLQAEDEAYYYCSSYAGRNNDVIFGGGTQLTVL

SEQ ID NO: 15931 - protein, 116 aa, Homo sapiens
QAGLTQPPSASASPGDSVTLTCTLSSDHSDYKVDWYQQRPGKGPRFVMRVGTGGIVGVKGDGIPDRFSVWGSGPNRYLTIKNIQEEDESDYHCGSDHGSGNNYVYVFGGGTKLTVL

SEQ ID NO: 15932 - protein, 110 aa, Homo sapiens
QSALTQPPSVSAAPGQKVTISCSGSSSNIGNNYVSWYQQLPGTAPKLLIYDNNKRPSGIPDRFSGSKSGTSATLGITGLQTGDEADYYCGTWDSSLSAEVFGGGTKVTVL

SEQ ID NO: 15933 - protein, 111 aa, Homo sapiens
LPVLTQPPSASGSPGQSVTISCTGTSSDVGGYNYVSWYQQHPGKAPKLMIYEVSKRPSGVPDRFSGSKSGNTASLTVSGLQAEDEADYYCSSYAGSNNPYVFGTGTKVTVL

SEQ ID NO: 15934 - protein, 111 aa, Homo sapiens
QSVLTQPPSVSGAPGQRVTISCTGSSSNIGAGYDVHWYQQLPGTAPKLLIYGNSNRPSGVPDRFSGSKSGNTASLTVSGLQAEDEADYYCASWDDSLNSPVFGGGTKLTVL

SEQ ID NO: 15935 - protein, 112 aa, Homo sapiens
QSVLTQPASVSGSPGQSITISCTGTSSDVGGYNFVSWYQQHPGKAPKLMIYDVTNRPSGVSNRFSGSKSGNTASLTISGLQAEDEADYYCSSYTDSSTLDVVFGGGTKVTVL

SEQ ID NO: 15936 - protein, 110 aa, Homo sapiens
  MOD_RES (104)..(104): Any amino acid
QSALTQPASVSGSPGQSITISCTGTTSDVGGYNYVSWYQQHPGKGPKLMIYDVSKRPSGVSGRFSGSKSGNTASLTISGLQAEDEADYYCSSYTSSSTLLFGGXTKLTVL

SEQ ID NO: 15937 - protein, 110 aa, Homo sapiens
QAGLTQPRSVSGSPGQSVTISCTGTSSDVGGYNYVSWYQQHPGKAPKLLIYDVNNRPSGVPDRFSGSKSGNTASLTISGLQAEDEADYYCSSYTSSTTQVFGGGTKVTVL

SEQ ID NO: 15938 - protein, 109 aa, Homo sapiens
QAGLTQPPSASGSPGQSVTISCTGTSSDVGGYNYVSWYQQHPGKAPKLMIYEVNKRPSGIPDRFSGSKSDSTASLTISGLQAEDEANYYCISYTSSTTWVFGGGTQLTV

SEQ ID NO: 15939 - protein, 107 aa, Artificial Sequence [sequence omitted]

SEQ ID NO: 15940 - protein, 111 aa, Artificial Sequence [sequence omitted]

SEQ ID NO: 15941 - protein, 110 aa, Artificial Sequence
  source: /note="Description of Artificial Sequence: Synthetic polypeptide"
QSVLTQPPSASGTPGQRVTISCSGSDSNIGRNYIYWYQQFPGTAPKLLIYRNNQRPSGVPDRISGSKSGTSASLAISGLRSEDEAEYHCGTWDDSLSGPVFGGGTKLTVL

SEQ ID NO: 15942 - protein, 106 aa, Artificial Sequence
  source: /note="Description of Artificial Sequence: Synthetic polypeptide"
QYELTQPPSVSVYPGQTASITCSGDQLGSKFVSWYQQRPGQSPVLVMYKDKRRPSEIPERFSGSNSGNTATLTISGTQAIDEADYYCQAWDSSTYVFGTGTKVTVL

SEQ ID NO: 15943 - protein, 108 aa, Artificial Sequence
  source: /note="Description of Artificial Sequence: Synthetic polypeptide"
QDIQMTQSPSSLSASVGDRITITCQASQDIGDSLNWYQQKPGKAPRLLIYDASNLETGVPPRFSGSGSGTDFTFTFRSLQPEDIATYFCQQSANAPFTFGPGTKVDIK

SEQ ID NO: 15944 - protein, 110 aa, Artificial Sequence
  source: /note="Description of Artificial Sequence: Synthetic polypeptide"
QYELTQPASVSGSPGQSITISCTGTSSDIGRWNIVSWYQQHPGKAPKLMIYDVSNRPSGVSNRFSGSKSGNTASLTISGLQAEDEADYYCSSYTSSSTWVFGGGTKLTVL

SEQ ID NO: 15945 - protein, 107 aa, Artificial Sequence
  source: /note="Description of Artificial Sequence: Synthetic polypeptide"
DIQMTQSPSSLSASVGDRVTITCRASQDVNTAVAWYQQKPGKAPKLLIYTTTWPYSGVPSRFSGSRSGTDFSLTISSLQPEDFATYYCQQYYNTPVTFGQGTKVEIK

SEQ ID NO: 15946 - protein, 112 aa, Artificial Sequence
  source: /note="Description of Artificial Sequence: Synthetic polypeptide"
DIVMTQSPLSLPVTPGEPASISCRSSQSLVHSNGRTYLEWYLQKPGQSPQLLIYKVSNRISGVPDRFSGSGSGTDFTLKISRVEAEDVGVYYCFQGSHVPYTFGQGTKVEIK

SEQ ID NO: 15947 - protein, 112 aa, Artificial Sequence
  source: /note="Description of Artificial Sequence: Synthetic polypeptide"
DVVMTQSPLSLPVSLGEPASISCRSSQSLVHSNGRTYLEWYLQKPGQSPKVLIYKVSNRISGVPDRFSGSGSGTDFTLKISRVEAEDVGVYFCFQGSHVPYTFGQGTKVEIK

SEQ ID NO: 15948 - protein, 112 aa, Artificial Sequence
  source: /note="Description of Artificial Sequence: Synthetic polypeptide"
DIVMTQSPLSLPVSLGEPASISCRSSQSLVHSNGRTYLEWYLQKPGQSPQVLIYKVSNRISGVPDRFSGSGSGTDFTLKISRVEAEDVGVYFCFQGSHVPYTFGQGTKVEIK

SEQ ID NO: 15949 - protein, 112 aa, Artificial Sequence
  source: /note="Description of Artificial Sequence: Synthetic polypeptide"
DVVMTQSPLSLPVTPGEPASISCRSSQSLVHSNGRTYLEWYLQKPGQSPQVLIYKVSNRISGVPDRFSGSGSGTDFTLKISRVEAEDVGVYFCFQGSHVPYTFGQGTKVEIK

SEQ ID NO: 15950 - protein, 112 aa, Mus musculus
DVLMTQTPLSLPVSLGDQASISCRSSQSLVHSNGRTYLEWYLQKPGQSPKVLIYKVSNRISGVPDRFSGSGSGTDFTLKISRVEAEDLGVYFCFQGSHVPYTFGGGTKLEIK

SEQ ID NO: 15951 - protein, 109 aa, Rattus norvegicus
DIQMTQSPSSLSAFLGDRVTITCRASQDIGNYLRWFQQKPGKSPRLMIYGATNLANGVPSRFSGSRSGSDYSLTINNLESEDMAIYYCLKHNEYPFTFGSGTKLEIKRA

SEQ ID NO: 15952 - protein, 110 aa, Rattus norvegicus
DIQMTQSPASLSASLGETVTIECRASEDIYSNLAWYQQKPGNSPQLLIYDANILADGVPSRFSGSGSGTQYSLKINSLQSEDVASYFCQQYNNYPPFTFGVGTKLELKRA

SEQ ID NO: 15953 - protein, 110 aa, Rattus norvegicus
DIQMTQSPASLSASLGETVTIECRASEDIYSNLAWYQQKPGNSPQLLIYDANILADGVPSRFSGSGSGTQYSLKINSLQSEDVASYFCQQYNNYPPFTFGAGTKLELKRA

SEQ ID NO: 15954 - protein, 107 aa, Mus musculus
QIVLTQSPAIMSASPGEKVTITCSASSSVSYMHWFQQKPGTSPKLWIYSTSNLASGVPARFSGSGSGTSYSLTISRMEAEDAATYYCQQRSSYPYTFGGGTKLEIKR

SEQ ID NO: 15955 - protein, 108 aa, Artificial Sequence
  source: /note="Description of Artificial Sequence: Synthetic polypeptide"
DIQLTQSPSSLSASVGDRVTITCSASSSVSYMHWYQQKPGKAPKLLIYSTSNLASGVPSRFSGSGSGTDFTFTISSLQPEDIATYYCQQRSSYPYTFGGGTKVEIKRT

SEQ ID NO: 15956 - protein, 108 aa, Artificial Sequence
  source: /note="Description of Artificial Sequence: Synthetic polypeptide"
DIQMTQSPSSLSASVGDRVTITCSASSSVSYMHWYQQKPGKAPKLLIYSTSNLASGVPSRFSGSGSGTDFTLTISSLQPEDFATYYCQQRSSYPYTFGQGTKVEIKRT

SEQ ID NO: 15957 - protein, 108 aa, Artificial Sequence
  source: /note="Description of Artificial Sequence: Synthetic polypeptide"
DIQLTQSPSSLSASPGDRVTITCSASSSVSYMHWFQQKPGKAPKLWIYSTSNLASGVPARFSGSGSGTSYSLTISRLQPEDIATYYCQQRSSYPYTFGGGTKVEIKRT

SEQ ID NO: 15958 - protein, 108 aa, Artificial Sequence
  source: /note="Description of Artificial Sequence: Synthetic polypeptide"
DIQLTQSPSSLSASPGDRVTITCSASSSVSYMHWFQQKPGKAPKLWIYSTSNLASGVPSRFSGSGSGTSYSLTISRLQPEDIATYYCQQRSSYPYTFGGGTKVEIKRT

SEQ ID NO: 15959 - protein, 108 aa, Artificial Sequence
  source: /note="Description of Artificial Sequence: Synthetic polypeptide"
DIQLTQSPSSLSASPGDRVTITCSASSSVSYMHWFQQKPGKAPKLWIYSTSNLASGVPSRFSGSGSGTSYSFTISSLQPEDIATYYCQQRSSYPYTFGGGTKVEIKRT

SEQ ID NO: 15960 - protein, 108 aa, Artificial Sequence
  source: /note="Description of Artificial Sequence: Synthetic polypeptide"
DIQLTQSPSSLSASPGDRVTITCSASSSVSYMHWYQQKPGKAPKLWIYSTSNLASGVPSRFSGSGSGTSYSLTISRLQPEDIATYYCQQRSSYPYTFGGGTKVEIKRT

SEQ ID NO: 15961 - protein, 108 aa, Artificial Sequence
  source: /note="Description of Artificial Sequence: Synthetic polypeptide"
DIQLTQSPSSMSASPGDRVTITCSASSSVSYMHWFQQKPGKSPKLWIYSTSNLASGVPSRFSGSGSGTSYSLTISSMQPEDFATYYCQQRSSYPYTFGQGTKLEIKRT

SEQ ID NO: 15962 - protein, 133 aa, Mus musculus
MDSQAQVLMLLLLWVSGTCGDIVMSQSPSSLAVSVGEKVTMSCKSSQSLLYSTNQKNSLAWYQQKPGQSPKLLIYWASTRESGVPDRFTGSGSGTDFTLTISSVKAEDLAVYYCQQYYRYPLTFGAGTKLELK

SEQ ID NO: 15963 - protein, 113 aa, Artificial Sequence
  source: /note="Description of Artificial Sequence: Synthetic polypeptide"
DIVMTQSPDSLAVSLGERATINCKSSQSLLYSTNQKNSLAWYQQKPGQPPKLLIYWASTRESGVPDRFSGSGSGTDFTLTISSLQAEDVAVYYCQQYYRYPLTFGQGTKLEIK

SEQ ID NO: 15964 - protein, 106 aa, Mus musculus
QIVLTQSPAIMSASPGEKVTMTCSASSSVTYMYWYQQKPGSSPRLLIYDTSNLASGVPVRFSGSGSGTSYSLTISRMEAEDAATYYCQQWSSYPPTFGGGTKLEIK

SEQ ID NO: 15965 - protein, 106 aa, Mus musculus
QIVLTQSPAIMSASPGEKVTMTCSASSSISYMYWYQQRPGSSPRLLIYDTSNLASGVPVRFSGSGSGTSHSLTISRMEAEDAATYYCQQWSSYPSTFGGGTKLEIK

SEQ ID NO: 15966 - protein, 106 aa, Artificial Sequence
  source: /note="Description of Artificial Sequence: Synthetic polypeptide"
QIVLTQSPTTMAASPGEKITITCSASSSVTYMYWYQQRPGFSPKLLIYDTSNLASGVPVRFSGSGSGTSYSLTIGTMEAEDVATYYCQQWSSYPPTFGGGTKLEIK

SEQ ID NO: 15967 - protein, 112 aa, Homo sapiens
DVVMTQSPLSLPVTLGQPASISCRSSQSLVYSDGNTYLNWFQQRPGQSPRRLIYKVSNWDSGVPDRFNGSGSGTDFTLKISRVEAEDVGVYYCMQSTHWPITFGQGTRLEIK

SEQ ID NO: 15968 - protein, 112 aa, Homo sapiens
DVVMTQSPLSLPVTLGQPASISCRSSQSLVYSDGNTYLNWFQQRPGQSPRRLIYKVSNWDSGVPDRFSGSGSGTDFTLKISRVEAEDVGVYYCIQGTHWPTTFGQGTRLEIK

SEQ ID NO: 15969 - protein, 112 aa, Homo sapiens
DVVMTQSPLSLPVTLGQPASISCRSSQSLVYSDGNTYLNWLQQRPGQSPRRLIYKVSNWDSGVPDRFSGSGSGTDFTLKISRVEAEDVGVYYCMQGTHWPITFGQGTRLEIK

SEQ ID NO: 15970 - protein, 112 aa, Homo sapiens
DIVMTQTPLSLSVTPGQPASISCKSSQSLLHSDGKTYLYWYLQKPGQPPQLLIYEVSNRFSGVPDRFSGSGSGTDFTLKISRVEAEDVGVYYCMQGIQLPCSFGQGTKLEIK

SEQ ID NO: 15971 - protein, 112 aa, Homo sapiens
DIVMTQTPLSLSVTPGQPASISCKSSQSLLHSDGKTYLYWYLQKPGQPPQLLIYEVSNRFSGVPDRFSGSGSGTDFTLKISRVEAEDVGVYYCMQSIQLPLTFGGGTKVEIK

SEQ ID NO: 15972 - protein, 112 aa, Homo sapiens
DIVMTQTPLSLSVTPGQPASISCKSSQSLLHSDGKTYLYWFLQKPGQPPQPLIYEVSNRFSGVPDRFSGSGSGTDFTLKISRVEAEDVGVYYCMQSIQLPITFGHGTRLEIK

SEQ ID NO: 15973 - protein, 107 aa, Homo sapiens
DIQMTQSPSSLSASVGDRVTITCRASQGIANYLAWYQQKPGKVPKLLIYVASTLQSGVPSRFSGSGSGTDFTLTISSLQPEDVATYYCQNYNSAPFTFGPGTKVDIK

SEQ ID NO: 15974 - protein, 107 aa, Homo sapiens
DIQMTQSPSSLSASVGDRVTIICRASQGISNDLAWYQQKPGKVPKLLIYAASTLQSGVPSRFSGSGSGTDFTLTISSLQPEDVATYYCQKYNSVPLTFGGGTKVEIK

SEQ ID NO: 15975 - protein, 112 aa, Homo sapiens
NIVMTQTPLSSPVTLGQPASISCRSSQSLVHSDGNTYLSWLQQRPGQPPRLLIYKISNRFSGVPDRFSGSGAGTDFTLKISRVEAEDVGVYYCMQATQFPHTFGPGTKVDIK

SEQ ID NO: 15976 - protein, 112 aa, Homo sapiens
EIVMTQTPLSSPVTLGQPASISCRSSQSLVHSDGNTYLSWLQQRPGQPPRLLIYKISNRFSGVPDRFSGTGAGTDFTLKISRVEAEDVGVYYCMQATQFPHTFGGGTKVEIK

SEQ ID NO: 15977 - protein, 108 aa, Homo sapiens
EIVLTQSPGTLSLSPGERATLSCRASQTVISSYLAWYQQKPGQAPRLLISGASSRATGIPDRFSGSGSGTDFTLTISRLEPEDFAVYYCQQYGSSPRTFGQGTKVEIK

SEQ ID NO: 15978 - protein, 106 aa, Homo sapiens
EIVLTQSPGTLSLSPGERATLSCRASQSVSRLAWYQQKPGQAPRLLIYGASRRATGIPDRFSGSGSGTDFTLTISRLEPEDFAVYYCQQYGSSPRSFGQGTKLEIK

SEQ ID NO: 15979 - protein, 107 aa, Homo sapiens
DIQMTQSPSSLSASVGDRVTITCRASQGIRNDLGWYQQKPGKAPKRLIYAASSLQSGVPSRFSGSGSGTEFTLTISSLQPEDFATYYCLQHNSYPPTFGQGTKVEIK

SEQ ID NO: 15980 - protein, 113 aa, Homo sapiens
DIVMTQSPDSLAVSLGERATINCKSSQSVLYSSNNKNYLVWYQQKPGQPPKLFIYWASTRESGVPDRFTGSGSGTDFTLTISSLQAEDVAVYYCQQYYSFPWTFGQGTKVEIK

SEQ ID NO: 15981 - protein, 113 aa, Homo sapiens
DIVMTQSPDSLAVSLGERATINCKSSQSVLYSSNNKNYLAWYQQKPGQPPKLLIYWASTRESGVPDRFSGSGSGTDFTLTISSLQAEDVAVYYCQQYYSTTWTFGQGTKVEIK

SEQ ID NO: 15982 - protein, 113 aa, Homo sapiens
DIVMTQSPDSLAVSLGERATINCKSSQNVLYSSNNKNYLAWYQQKPGQPPKLLIYWASTRESGVPDRFSGSGSGTDFTLTISSLQAEDVAVYFCQQYYGTPRTFGQGTKVEIK

SEQ ID NO: 15983 - protein, 113 aa, Homo sapiens
DIVMTQSPDSLTVSLGERATINCKSSQSVLYSSNNKNYLAWYQQKPGQPPKLLIYWASTRESGVPDRFGGSGSGTDFTLTISSLQAEDVAVYYCQQYYSISRTFGQGTKVEIK

SEQ ID NO: 15984 - protein, 113 aa, Homo sapiens
DIVMTQSPDSLAVSLGERATINCKSSQSVLYNSNNKNYLAWYQQKPGQPPKLLIYWASTRESGVPDRFSGSGSGTDFTLTISSLQADDVAVYYCQQYYSTTWTFGPGTKVEIK

SEQ ID NO: 15985 - protein, 113 aa, Homo sapiens
DIVMTQSPDSLAVSLGERATINCKSSQSVLYSSNNKNYLAWYQQKPGQPPKVLIYWASTRKSGVPDRFSGSGSGTDFTLTISGLQAEDVALYYCQQYYSTMFSFGQGTKLEIK

SEQ ID NO: 15986 - protein, 113 aa, Homo sapiens
DIVMTQSPDSLAVSLGERATINCKSSQSVLDSSNNKNYLAWYQQKPGQPPKLLIYWASTRESGVPDRFSGSGSGTDFTLTISSLQAEDVAVFYCHQYYSTPLTFGGGTKVAIK

SEQ ID NO: 15987 - protein, 113 aa, Homo sapiens
DIVMTQSPDSLAVSLGERATINCKSSQSILYRSNNKNYLAWYQQKPGQPPKLLIYWASARESGVPDRFSGSGSGTDFTLTISSLQAEDVAVYFCQQYFITPLTFGGGTKVEIK

SEQ ID NO: 15988 - protein, 107 aa, Homo sapiens
DIQMTQSPSSLSASVGDRVTITCRASQDISHYLAWFQQKPGKAPKSLIYAASSLQSGVPSKFSGSGSGTDFTLTISSLQPEDFATYYCQQYNNYPFTFGPGTKVDIK

SEQ ID NO: 15989 - protein, 107 aa, Homo sapiens
DIQMTQSPSSLSASVGDRVAITCRASQDISNYLAWLQQKPGKAPKSLIYAASSLQSGVPSRFSGSGSGTDFTLTISSLQPEDFATYYCQQYNTYPFTFGPGTKMDIK

SEQ ID NO: 15990 - protein, 108 aa, Homo sapiens
EIVMTQSPATLSVSPGERATLSCRASQSVSSNLAWYQQDPGQAPRLLIYGASRRATGIPARFSGSGSGTEFTLTISSLQSEDFAVYYCQQHNNWPPWTFGQGTKVEIK

SEQ ID NO: 15991 - protein, 107 aa, Homo sapiens
DIQMTQSPSSVSASVGDRVTITCRASQDISRWLAWYQQKPGKAPKLLIYAASSLQSGVPSRFSGSGSGTDFTLTISSLQPEDFATYYCQQANSFPPTFGQGTKVEFK

SEQ ID NO: 15992 - protein, 107 aa, Homo sapiens
DIQMTQSPSSLSASVGDRVTITCRASQSISTYLNWYQQKPGKAPKFLIYAASSLQSGVPSRFSGSGSGTDFTLTISSLQPEDFAAYYCQQSHSAPFTFGPGTKVDIK

SEQ ID NO: 15993 - protein, 106 aa, Homo sapiens
DIQMTQSPSSLSASLGDRVTITCRASQTISIYLNWYQQKPGKAPKLLIYAASSLQSGVPSRFSGSGSGTDFTLTISSLQPEDFATYYCQQSYSTLTFGGGTKVEIK

SEQ ID NO: 15994 - protein, 107 aa, Homo sapiens
DIQMTQSPSSLSASVGDRVTITCRASQSIRSYLNWYQQRPGNAPKLLIYAASSLQSGVPSRVSGSGSGTDFTLTIRSLQPEDFATYYCQQSYSIPLTFGGGTKVEIK

SEQ ID NO: 15995 - protein, 107 aa, Homo sapiens
DIQMTQSPSSRSASVGDRVTITCRASQTISRYLNWYQQKPGKAPKLLIYAASTLQSGVPSRFSGSGSGTDFTLTLSSLQPEDFATYYCQQIYSTSITFGQGTRLEIK

SEQ ID NO: 15996 - protein, 107 aa, Homo sapiens
DIQMTQSPSSLSASVGDRVTITCRASQRISSYLNWYQQKPGKAPKVLIYAESSLQSGVPSRFSGSGSGTDFTLTISSLQPEDFATYYCQQSYITPITFGQGTRLEII

SEQ ID NO: 15997 - protein, 107 aa, Homo sapiens
DIQMTQSPSSLSASVGDRVTITCRASQSISRYLNWYQQKPGKAPKLLIYTASSLQSGVPSRFSGSGSGTDFTLTISSLQPENFATYYCQQSYFTPITFGQGTRLEIK

SEQ ID NO: 15998 - protein, 107 aa, Homo sapiens
DIQMTQSPSSLSASVGDRVTITCRASQSISSYLNWYQQKPGKAPKLLIYTASSLQSGVPSRFSGSGSGTDFTLTFSSLQPEDFATYYCQQSYFSPITFGQGTRLEIK

SEQ ID NO: 15999 - protein, 107 aa, Homo sapiens
DIQMTQSPSSLSASVGDRVTITCRASQSISSYLNWYQQKPGKAPKLLIYTASSLQSGVPSRFSGSGSGTDFTLTLSSLQPEDFASYYCQQSFYTPITFGQGTRLEIK

SEQ ID NO: 16000 - protein, 107 aa, Homo sapiens
DIQMTQSPSSLSASVGDRVTITCRASQSISSYLNWYQQKPGKAPKLLIYTVSSLQSGVPSRFSGSGSGTDFTLTISSLQPEDFATYYCQQSYFTPITFGQGTRLEIK

SEQ ID NO: 16001 - protein, 107 aa, Homo sapiens
DIQMTQSPSSLSASVGDRVTITCRASQSISSYLNWYQQKPGKAPKLLIYTASSLQSGVPSRFSGSGSGTDFTLTISSLQPEDFASYYCQQSFYAPITFGQGTRLEIK

SEQ ID NO: 16002 - protein, 107 aa, Homo sapiens
DIQMTQSPSSLSASVGDRVTITCRASQSISSYLNWYQQKPGKAPKLLIYTASSLQSGVPSRFSGSGSGTDFTLTISSLQPEDFATYYCQQSYFTPITFGQGTRLEIK

SEQ ID NO: 16003 - protein, 107 aa, Homo sapiens
DIQMTQSPSSLSASVGDRVTITCQASQDISNYLNWYQQKPGKAPKLLIYDASNLETGVPSRFSGSGSGTDFTFTISSLQPEDIATYYCQQYDYLPFTFGPGTKVDIK

SEQ ID NO: 16004 - protein, 107 aa, Homo sapiens
DIQMTQSPSSLSASVGDRVTITCQASQDISNSLNWYQQKPGKAPELLIYDASNLETGVPSRFSGSGSGTDFTFTISSLQPEDIATYYCQQCDDLPLTFGGGTKVEIK

SEQ ID NO: 16005 - protein, 107 aa, Homo sapiens
DIQMTQSPSSLSASVGDRVTITCQASQDISDYLNWYQQKPGKAPKLLIYDASNLETGVPSRFSGSGSGTDFTFTISSLQPEDIATYYCQHYDNLPLTFGGGTKVEIK

SEQ ID NO: 16006 - protein, 107 aa, Homo sapiens
DIQMTQSPSSLSASVGDRVAITCQASQDISNYLNWYQQKPGKAPKLLIYDASNLETGVPSRFSGSGSGTDFTFTISSLQPEDIATYYCQQYDNLPLTFGGGTKVEIK

SEQ ID NO: 16007 - protein, 107 aa, Homo sapiens
DIQMTQSPSSLSASVGDRVTITCQASQDISNSLNWYQQKPGKAPKLLIYDASILETGVPSRFSGSGSETDFTFTISSLQPEDIATYYCQQCDILPLSFGGGTKVEIK

SEQ ID NO: 16008 - protein, 107 aa, Homo sapiens
DIQMTQSPSSLSASVGDRVTITCQASQDISNSLNWYQQKPGKAPKLLIYDASNLETGVPSRFSGSGSGTDFTFTISSLQPEDIATYYCQQYDNLPLAFGGGTKVEIR

SEQ ID NO: 16009 - protein, 107 aa, Homo sapiens
DIQMTQSPSSLSASVGDGVTITCQASQDITNYLNWYQQKPGKAPKLLIYDASNLETGVPSRFSGSGSGTDFTFTISSLQPEDIATYYCQQYDSLPITFGQGTRLEIK

SEQ ID NO: 16010 - protein, 107 aa, Homo sapiens
DIQMTQSPSSLSASVGDRVTITCQASQDISNYLNWYQQKLGKAPKLLIHDASNLETGVPSRFSGSGSGTDFTFTISSLQPEDIATYYCQQYDNLPITFGQGTRLEIK

SEQ ID NO: 16011 - protein, 107 aa, Homo sapiens
DIQMTQSPSSLSASVGDRVTITCQASQDISDYLNWYQQKPGKAPKLLIYDASNLETGVPSRFSGSGSGTDFTFTISSLQPEDIATYYCQHYDNLPITFGQGTRLEIK

SEQ ID NO: 16012 - protein, 107 aa, Homo sapiens
DIQMTQSPSSLSASVGDRVTITCQASQDISNSLNWYQQKPGKAPKLLIYDASNLETGVPSRFSGSGSGTDFTFTISSLQPEDIATYYCQHYDNLPITFGQGTRLEIK

SEQ ID NO: 16013 - protein, 108 aa, Artificial Sequence
  source: /note="Description of Artificial Sequence: Synthetic polypeptide"
DIQMTQSPSSLSASVGDRVTITCRASQDVSTAVAWYQQKPGKAPKLLIYSASFLYSGVPSRFSGSGSGTDFTLTISSLQPEDFATYYCQQSYPTPYTFGQGTKVEIKR

SEQ ID NO: 16014 - protein, 108 aa, Artificial Sequence
  source: /note="Description of Artificial Sequence: Synthetic polypeptide"
DIQMTQSPSSLSASVGDRVTITCRASQDLATDVAWYQQKPGKAPKLLIYSASFLYSGVPSRFSGSGSGTDFTLTISSLQPEDFATYYCQQSEPEPYTFGQGTKVEIKR

SEQ ID NO: 16015 - protein, 121 aa, Artificial Sequence
  source: /note="Description of Artificial Sequence: Synthetic polypeptide"
EVQLVESGGGLVQPGGSLRLSCAASGFTLSGDWIHWVRQAPGKGLEWLGEISAAGGYTDYADSVKGRFTISADTSKNTAYLQMNSLRAEDTAVYYCARESRVSFEAAMDYWGQGTLVTVSS

SEQ ID NO: 16016 - protein, 108 aa, Artificial Sequence
  source: /note="Description of Artificial Sequence: Synthetic polypeptide"
DIQMTQSPSSLSASVGDRVTITCRASQNIATDVAWYQQKPGKAPKLLIYSASFLYSGVPSRFSGSGSGTDFTLTISSLQPEDFATYYCQQSEPEPYTFGQGTKVEIKR

SEQ ID NO: 16017 - protein, 112 aa, Artificial Sequence
  source: /note="Description of Artificial Sequence: Synthetic polypeptide"
DIQMTQSPSSLSASVGDRVTITCRASQAVWGGYIAPVAWYQQKPGKAPKLLIYDGSYLYSGVPSRFSGSGSGTDFTLTISSLQPEDFATYYCQQRLPTPYTFGQGTKVEIKR

SEQ ID NO: 16018 - protein, 112 aa, Artificial Sequence
  source: /note="Description of Artificial Sequence: Synthetic polypeptide"
DIQMTQSPSSLSASVGDRVTITCRANQSIAGAYYAPVAWYQQKPGKAPKLLIYDGYFLYSGVPSRFSGSGSGTDFTLTISSLQPEDFATYYCQQRLPSPYTFGQGTKVEIKR

SEQ ID NO: 16019 - protein, 112 aa, Artificial Sequence
  source: /note="Description of Artificial Sequence: Synthetic polypeptide"
DIQMTQSPSSLSASVGDRVTITCRASQSLWAAYFAPVAWYQQKPGKAPKLLIYDGSYLYSGVPSRFSGSGSGTDFTLTISSLQPEDFATYYCQQRLPSPYTFGQGTKVEIKR

SEQ ID NO: 16020 - protein, 110 aa, Artificial Sequence
  source: /note="Description of Artificial Sequence: Synthetic polypeptide"
DIQMTQSPSSLSASVGDRVTITCRASQDVLFYGNVAWYQQKPGKAPKLLIYDGSYLYSGVPSRFSGSGSGTDFTLTISSLQPEDFATYYCQQSYPAPYTFGQGTKVEIKR

SEQ ID NO: 16021 - protein, 107 aa, Artificial Sequence; identical to SEQ ID NO: 15898
  source: /note="Description of Artificial Sequence: Synthetic polypeptide"

SEQ ID NO: 16022 - protein, 109 aa, Artificial Sequence
  source: /note="Description of Artificial Sequence: Synthetic polypeptide"
DTVMTQSHKIMSTSVGDRVSITCKASQDVSIGVAWYQQRPGQSPKLLIYSASYRYTGVPDRFTGSGSGTDFTFTISSVQAEDLAVYYCQQYYIYPYTFGGGTKLEIKRT

SEQ ID NO: 16023 - protein, 109 aa, Artificial Sequence
  source: /note="Description of Artificial Sequence: Synthetic polypeptide"
DIQMTQSPSSLSASVGDRVTITCKASQDVSIGVAWYQQKPGKAPKLLIYSASYRYTGVPSRFSGSGSGTDFTLTISSLQPEDFATYYCQQYYIYPYTFGQGTKVEIKRT

SEQ ID NO: 16024 - protein, 107 aa, Homo sapiens
EIVLTQSPGTLSLSPGERATLSCRASQSVSSSYLAWYQQKPGQVPRLLIYGASSRATGIPDRFSGSGSGTDFTLTISRLEPEDFAVYYCQQYGSSLTFGGGTKVEIK

SEQ ID NO: 16025 - protein, 108 aa, Homo sapiens [sequence omitted]

SEQ ID NO: 16026 - protein, 108 aa, Homo sapiens
EIVLTQSPGTLSLSPGERATLSCRASQSVSSTYLAWYQQKPGQAPRLLIYGASSRATGIPDRFSGSGSGTDFTLTISRLEPEDFAVYYCQQYGTSLFTFGPGTKVDIK

SEQ ID NO: 16027 - protein, 109 aa, Homo sapiens
EIVLTQSPGTLSLSPGERATLSCRASQSVSSSYLAWYQQKPGQAPRLLIYGASSRATGIPDRFSGSGSGTDFTLTISRLEPEDFAVYYCQQYGSSPPITFGQGTRLEIK

SEQ ID NO: 16028 - protein, 107 aa, Homo sapiens
EIVLTQSPGTLSLSPGERATLSCRASQSVSSSYLAWYQQKPGQAPRLLIYGASSRATGIPDRFSGSGSGTDFTLTISRLEPEDFAVYYCQQYGSSFTFGPGTKVDIK

SEQ ID NO: 16029 - protein, 107 aa, Homo sapiens
EIVLTQSPGTLSLSPGERATLSCRASQSVRSSYLAWYQQKPGQAPRLLIYGASSRATGIPDRFSGSGSGTDFTLTISRLEPEDFAVYYCQLYGSSPTFGPGTKVDIK

SEQ ID NO: 16030 - protein, 107 aa, Homo sapiens
EIVLTQSPGTLSLSPGERATLSCRASQSVSSSYLAWYQQKPGQAPRLLIYGASSRATGIPDRFSGSGSGTDFTLTISRLEPEDFAVYYCQQYGSSLTFGGGTKVEIK

SEQ ID NO: 16031 - protein, 107 aa, Homo sapiens
EIVLTQSPGTLSLSPGERATLSCRASQSVSSSYLTWYQQKPGQAPRLLIYGASSRATGIPDRFSGSGSGTDFTLTISRLEPEDFAVYYCQQYGSSLTFGGGTKVEIK

SEQ ID NO: 16032 - protein, 109 aa, Homo sapiens
EIVLTQSPGTLSLSPGERATLSCRASQSVSSSYLAWYQQKPGQAPRLLIYGASSRATGIPDRFSGSGSGTDFTLTISRLEPEDFAVYYCQQYGSSPRLTFGGGTKVEIK

SEQ ID NO: 16033 - protein, 107 aa, Homo sapiens; identical to SEQ ID NO: 6073

SEQ ID NO: 16034 - protein, 107 aa, Homo sapiens
DIQMTQSPSSVSASVGDRVTITCRASQGISSWLAWYQHKPGKAPKLLIYAASILQSGVPSRFSGSGSGTDFTLTISSLQPEDFATYYCQQANSFPITFGQGTRLEIK

SEQ ID NO: 16035 - protein, 107 aa, Homo sapiens
DIQMTQSPSSVSASVGDRVTITCRASQGISSWLAWYQHKPGKAPKLLIYVASTLQSGVPSRFSGSGSGTDFTLTISSLQPEDFATYYCQQANSFPLTFGGGTKVEIK

SEQ ID NO: 16036 - protein, 107 aa, Homo sapiens
DIQMTQSPSSLSASVGDRVTITCRASQGISRWLAWYQQKPEKAPKSLIYAASSLRSGVPSRFSGSGSGTDFTLTISSLQPEDFATYYCQQYNSYPITFGQGTRLEIK

SEQ ID NO: 16037 - protein, 106 aa, Homo sapiens; identical to SEQ ID NO: 15183

SEQ ID NO: 16038 - protein, 107 aa, Homo sapiens
VIWMTQSPSLLSASTGDRVTISCRMSQGISSYLAWYQQKPGKAPELLIYAASTLQSGVPSRFSGSGSGTDFTLTISYLQSEDFATYYCQQYYSFPLTFGGGTKVEIK

SEQ ID NO: 16039 - protein, 107 aa, Homo sapiens
DIQMTQSPSSLSASVGDRVTITCRASQGISSWLAWYQQKPEKAPKSLIYAASSLQSGVPSRFSGSGSGTDFTLTISSLQPEDFATYYCQQYYIYPWTFGQGTKVEIK

SEQ ID NO: 16040 - protein, 107 aa, Homo sapiens
DIQMTQSPSSLSASVGDRVTITCRASQGISSWLAWYQQKPEKAPKSLIYDASSLQSGVPSRFSGSGYGTDFSLTISSLQPEDFAIYYCQQYKSYPITFGQGTRLEIK

SEQ ID NO: 16041 - protein, 108 aa, Homo sapiens
EIVLTQSPATLSLSPGERATLSCRASQSVSSYLAWYQQKPGQAPRLLIYDASNRATGIPARFSGSGSGTDFTLTISSLEPEDFAVYYCQQRSNWPMYTFGQGTKLEIK

SEQ ID NO: 16042 - protein, 107 aa, Homo sapiens
DIQMTQSPSSVSASVGDRVTITCRASQGISSWLAWYQHKPGKAPKLLIYAASILQSGVPSRFSGSGSGTDFTLTISSLRPEDFATYYCQQANSFPITFGQGTRLEIK

SEQ ID NO: 16043 - protein, 107 aa, Homo sapiens
EIVLTQSPATLSLSPGERATLSCRASQSVSSYLAWYQQKPGQAPRLLIYDTSNRATGIPARFSGSGSGTDFTLTISSLEPEDFAVYYCQQRSHWPRTFGQGTKVEIK

SEQ ID NO: 16044 - protein, 107 aa, Homo sapiens
DIQMTQSPSSLSASVGDRVTITCRASQGISSWLAWYQQKPEKAPKSLIFAASSLQSGVPSRFSGSGSGTDFTLTISSLQPEDFATYYCQQYISFPITFGQGTRLEIK

SEQ ID NO: 16045 - protein, 107 aa, Homo sapiens
DIQMTQSPSSLSASVGDRVTITCRASQGISSWLAWYQQKPEKAPKSLIYAASRLQSGVPSRFSGSGSGTDFTLTISSLQPEDFATYYCQQYNSYPITFGQGTRLEIK

SEQ ID NO: 16046 - protein, 107 aa, Homo sapiens
DIQMTQSPSSLSASVGDRVTITCRASQGISSWLAWYQQKPEKAPKSLIYATFRLQSGVPSRFSGSGSGTDFTLTISSLQPEDFATYYCQQYNSFPPTFGQGTKVEIK

SEQ ID NO: 16047 - protein, 107 aa, Homo sapiens
DIQMTQSPSSLSASVGDRVTITCRASQGISSWLTWYQQKPEKAPKSLIYAASRLQSGVPSRFSGSGSGTDFTLTISSLQPEDFATYYCQQYNSFPPTFGQGTKVEIK

SEQ ID NO: 16048 - protein, 107 aa, Homo sapiens
DIQMTQSPSSLSASVGDRVTITCRASQGISSWLAWYQQKPEKAPKSLIYAASSLQSGVPSRFSGSGSGTDFTLTISSLQPEDFATYYCQQYNSFPPTFGGGTKVEIK

SEQ ID NO: 16049 - protein, 107 aa, Homo sapiens
DIQMTQSPSSLSASVGDRVTITCRASQGISSWLVWYQQKPEKAPKSLIYAASSLQSGVPSRFSGSGSGTDFTLTISSLQPEDFATYYCQQYNSFPPTFGQGTKVEIK

SEQ ID NO: 16050 - protein, 107 aa, Homo sapiens
DIQMTQSPSSLSASVGDRVTITCRASQGISSWLAWYQQKPEKAPKSLIYAASSLQSGVPSRFSGSGSGTDFTLTISSLQPEDFATYYCQQYNSYPYTFGQGTKLEIK

SEQ ID NO: 16051 - protein, 107 aa, Homo sapiens
DIQMTQSPSSLSASVGDRVTITCRASQGINSWLAWYQQKPEKAPKSLIYAASSLQSGVPSRFSGSGSGTDFTLTISSLQPEDFATYYCQQYNSYPYTFGQGTKLEIK

SEQ ID NO: 16052 - protein, 107 aa, Homo sapiens; identical to SEQ ID NO: 10652

SEQ ID NO: 16053 - protein, 107 aa, Homo sapiens; identical to SEQ ID NO: 6083

SEQ ID NO: 16054 - protein, 107 aa, Homo sapiens
DIQMTQSPSSLSASVGDRVTITCRASQDISSWLAWYQQKPEKAPKSLIYAASSLQSGVPSRFSGSGSGTDFTLTISSLQPEDFATYYCQQYNSYPITFGQGTRLEIK

SEQ ID NO: 16055 - protein, 107 aa, Homo sapiens
DIQMTQSPSSLSASVGDRVTITCRASQGISNWLAWYQQKPEKAPKSLIYDASSLQSGVPSRFSGSGSGTDFTLTISSLQPEDFATYYCQQYNSYPITFGQGTRLEIK

SEQ ID NO: 16056 - protein, 107 aa, Homo sapiens
DIQMTQSPSSLSASVGDRVTITCRASQGINSWLAWYQQKPEKAPKSLIYDASSLQSGVPSRFSGSGSGTDFTLTISSLQPENFATYYCQQYNSYPITFGQGTRLEIK

SEQ ID NO: 16057 - protein, 108 aa, Artificial Sequence
  source: /note="Description of Artificial Sequence: Synthetic polypeptide"
DIQMTQSPSSLSASVGDRVTITCRASQDVNTAVAWYQQKPGKAPKLLIYSASFLYSGVPSRFSGSRSGTDFTLTISSLQPEDFATYYCQQHYTTPPTFGQGTKVEIKR

SEQ ID NO: 16058 - protein, 111 aa, Artificial Sequence
  source: /note="Description of Artificial Sequence: Synthetic polypeptide"
QTVVTQEPSFSVSPGGTVTLTCGLSSGSVSTSYYPSWYQQTPGQAPRTLIYSTNTRSSGVPDRFSGSILGNKAALTITGAQADDESDYYCVLYMGSGIWVFGGGTKLTVLG

SEQ ID NO: 16059 - protein, 111 aa, Artificial Sequence
  source: /note="Description of Artificial Sequence: Synthetic polypeptide"
QTVVTQEPSSSVSPGGTVTLTCGLTSGSVSTSYYPSWYQQTPGQAPRTLIYSTNTRSSGVPDRFSGSILGNKAALTITGAQADDESDYYCMLYLGGGISVFGGGTKLTVLG

SEQ ID NO: 16060 - protein, 111 aa, Artificial Sequence
  source: /note="Description of Artificial Sequence: Synthetic polypeptide"
QPVLTQPHSVSESPGKTVTISCTRSSGSIDSNFVQWYQQRPGSSPTTVIYDDNQRPSGVPDRFSGSIDSSSNSASLTISGLKIEDEADYYCQSYDSNNQVFGGGTKLTVLR

SEQ ID NO: 16061 - protein, 111 aa, Artificial Sequence
  source: /note="Description of Artificial Sequence: Synthetic polypeptide"
QTVVTQEPSFSVSPGGTVTLTCGLSSGSVSPTYYPSWYQQTPGQAPRTLIYRTNIRSSGVPDRFSGSILGNKAALTITGAQADDESLYYCLLYMGSGVSLFGGGTKLTVLR

SEQ ID NO: 16062 - protein, 111 aa, Artificial Sequence
  source: /note="Description of Artificial Sequence: Synthetic polypeptide"
QAVVTQEPSFSVSPGGTVTLTCGLSSGSVSTSYYPSWYQQTPGQAPRTLIYSTNTRSSGVPDRFSGSILGNKAALTITGAQTDDESDYYCVLYMGSGISLFGGGTKVTVLG

SEQ ID NO: 16063 - protein, 107 aa, Artificial Sequence
  source: /note="Description of Artificial Sequence: Synthetic polypeptide"
DIQMTQSPASQSASLGESVTITCLASQTIGTWLAWYQQKPGKSPQLLIYVATSLADGVPSRFSGSGSGTKFSFKISSLQAEDFVSYYCQQLYSTPWTFGGGTKLELK

SEQ ID NO: 16064 - protein, 107 aa, Artificial Sequence
  source: /note="Description of Artificial Sequence: Synthetic polypeptide"
DIQMTQSPSSLSASVGDRVTITCLASQTIGTWLAWYQQKPGKAPKLLIYVATSLADGVPSRFSGSGSGTDFTLTISSLQPEDFATYYCQQLYSTPWTFGQGTKVEIK

SEQ ID NO: 16065 - protein, 107 aa, Artificial Sequence
  source: /note="Description of Artificial Sequence: Synthetic polypeptide"
DIQMTQSPSSLSASVGDRVTITCLASQTIGTWLAWYQQKPGKAPKLLIYVATSLADGVPSRFSGSGSGTDFTLTISSLQPEDFATYYCDQMYSTPWTFGQGTKVEIK

SEQ ID NO: 16066 - protein, 107 aa, Artificial Sequence
  source: /note="Description of Artificial Sequence: Synthetic polypeptide"
DIQMTQSPSSLSASVGDRVTITCLASQTIGTWLAWYQQKPGKAPKLLIYVATSLADGVPSRFSGSGSGTDFTLTISSLQPEDFATYYCQQNAYAPWTFGQGTKVEIK

SEQ ID NO: 16067 - protein, 107 aa, Artificial Sequence
  source: /note="Description of Artificial Sequence: Synthetic polypeptide"
DIQMTQSPSSLSASVGDRVTITCLASQTIGTWLAWYQQKPGKAPKLLIYVATSLADGVPSRFSGSGSGTDFTLTISSLQPEDFATYYCQQTAFSPWTFGQGTKVEIK

SEQ ID NO: 16068 - protein, 139 aa, Artificial Sequence
  source: /note="Description of Artificial Sequence: Synthetic polypeptide"
MEWIWIFLFIFSGTAGVHSQVQLQQSGAELARPGASVKLSCKASGYTFTDNYINWMKQRPGQGLEWIGEIYPGSGNTYYNEKFKGKATLTADKSSSTAYMQLSSLTSEESAVYFCARSPNLRLYYFDYWGQGTTLTVSS

SEQ ID NO: 16069 - protein, 131 aa, Artificial Sequence
  source: /note="Description of Artificial Sequence: Synthetic polypeptide"
METDTLLLWVLLLWVPGSTGDIVLTQSPASLAVSLGQRATISCRASESVDSYGNSFMNWYQQKPGQPPKVLIYRASNLESGIPARFSGSGSRTDFTLTITPVEADDVATYYCQQSYEDPPTFGGGTKLEIK

SEQ ID NO: 16070 - protein, 110 aa, Artificial Sequence
  source: /note="Description of Artificial Sequence: Synthetic polypeptide"
QYELTQPPSASGTPGQRVTMSCSGSSSNIGLNYVSWYQQLPGTAPKLLISRNNQRPSGVPDRFSGSKSGTSASLAISGLRSEDEADYYCAAWDDSLSGEVFGGGTKLTVL

SEQ ID NO: 16071 - protein, 110 aa, Artificial Sequence
  source: /note="Description of Artificial Sequence: Synthetic polypeptide"
QSVLTQPPSASGTPGQRVTISCSGSSSNIGLNYVSWYQQLPGTAPKLLISRNNQRPSGVPDRFSGSKSGTSASLAISGLRSEDEADYYCAAWDDSLSGEVFGGGTKLTVL

SEQ ID NO: 16072 - protein, 110 aa, Artificial Sequence
  source: /note="Description of Artificial Sequence: Synthetic polypeptide"
QSVLTQPPSASGTPGQRVTISCSGSSSNIGLNYVSWYQQLPGTAPKLLISRNNQRPSGVPDRFSGSKSGTSASLAISGLRSEDEADYYCAAWDDSLPGEVFGGGTKLTVL

SEQ ID NO: 16073 - protein, 110 aa, Artificial Sequence
  source: /note="Description of Artificial Sequence: Synthetic polypeptide"
QSVLTQPPSASGTPGQRVTISCSGSSSNIGLNYVSWYQQLPGTAPKLLISRNNQRPSGVPDRFSGSKSGTSASLAISGLRSEDEADYYCAAWDDSPPGEAFGGGTKLTVL

SEQ ID NO: 16074 - protein, 110 aa, Artificial Sequence
  source: /note="Description of Artificial Sequence: Synthetic polypeptide"
QSVLTQPPSASGTPGQRVTISCSGSLSNIGLNYVSWYQQLPGTAPKLLISRNNQRPSGVPDRFSGSKSGTSASLAISGLRSEDEADYYCAAWDDSPPGEAFGGGTKLTVL

SEQ ID NO: 16075 - protein, 110 aa, Artificial Sequence
  source: /note="Description of Artificial Sequence: Synthetic polypeptide"
QSVLTQPPSASGTPGQRVTISCSGSSSNIGLNYVSWYQQLPGTAPKLLISRNNQRPSGVPDRFSGSKSGTSASLAISGLRSEDEADYYCAAWDDSPSGEAFGGGTKLTVL

SEQ ID NO: 16076 - protein, 110 aa, Artificial Sequence
  source: /note="Description of Artificial Sequence: Synthetic polypeptide"
QSVLTQPPSASGTPGQRVTISCRGSSSNIGLNYVSWYQQLPGTAPKLLISRNNQRPSGVPDRFSGSKSGTSASLAISGLRSEDEADYYCAAWDDSPPGEAFGGGTKLTVL

SEQ ID NO: 16077 - protein, 110 aa, Artificial Sequence
  source: /note="Description of Artificial Sequence: Synthetic polypeptide"
QSVLTQPPSASGTPGQRVTISCSGSSSNIGLNYVSWYQQLPGTAPKLLISRNNQRPSGVPDRFSGSKSGTSASLAISGLRSEDEADYYCAAWDDGLPGEVFGGGTKLTVL

SEQ ID NO: 16078 - protein, 110 aa, Artificial Sequence
  source: /note="Description of Artificial Sequence: Synthetic polypeptide"
QSVLTQPPSASGTPGQRVTISCSGSSSNIGLNYVSWYQQLPGTAPKLLISRNNQRPSGVPDRFSGSKSGTSASLAISGLRSEDEADYYCAAWDDSLIGEVFGGGTKLTVL

SEQ ID NO: 16079 - protein, 110 aa, Artificial Sequence
  source: /note="Description of Artificial Sequence: Synthetic polypeptide"
QSVLTQPPSASGTPGQRVTISCRGSSSNIGLNYVSWYQQLPGTAPKLLISRNNQRPSGVPDRFSGSKSGTSASLAISGLRSEDEADYYCAAWDDSLSGEVFGGGTKLTVL

SEQ ID NO: 16080 - protein, 110 aa, Artificial Sequence
  source: /note="Description of Artificial Sequence: Synthetic polypeptide"
QSVLTQPPSASGTPGQRVTISCSGSLSNIGLNYVSWYQQLPGTAPKLLISRNNQRPSGVPDRFSGSKSGTSASLAISGLRSEDEADYYCAAWDDSLSGEVFGGGTKLTVL

SEQ ID NO: 16081 - protein, 110 aa, Artificial Sequence
  source: /note="Description of Artificial Sequence: Synthetic polypeptide"
QSVLTQPPSASGTPGQRVTISCSGSSSNIGLNYVSWYQQLPGTAPKLLISRNNQRPSGVPDRFSGSKSGTSASLAISGLRSEDEADYYCAAWDDSLSGEAFGGGTKLTVL

SEQ ID NO: 16082 - protein, 110 aa, Artificial Sequence
  source: /note="Description of Artificial Sequence: Synthetic polypeptide"
QSVLTQPPSASGTPGQRVTISCSGSSSNIGLNYVSWYQQLPGTAPKLLISRNNQRPSGVPDRFSGSKSGTSASLAISGLRSEDEADYYCAAWDDSPSGEVFGGGTKLTVL

SEQ ID NO: 16083 - protein, 110 aa, Artificial Sequence
  source: /note="Description of Artificial Sequence: Synthetic polypeptide"
QSVLTQPPSASGTPGQRVTISCSGSSSNIGLNYVSWYQQLPGTAPKLLISRNNQRPSGVPDRFSGSKSGTSASLAISGLRSEDEADYYCAAWDDSLRGEVFGGGTKLTVL

SEQ ID NO: 16084 - protein, 111 aa, Artificial Sequence
  source: /note="Description of Artificial Sequence: Synthetic polypeptide"
AYDMTQTPASVEVAVGGTVTIKCQASQSISSWLAWYQQKPGQPPKLLIYQASKLASGVPSRFKGSGSGTEFTLTISGVECADAATYYCQQAYSVSNVDNAFGGGTEVVVKR

SEQ ID NO: 16085 - protein, 111 aa, Artificial Sequence
  source: /note="Description of Artificial Sequence: Synthetic polypeptide"
DIQMTQSPSTLSASVGDRVTITCQASQSISSWLAWYQQKPGKAPKLLIYQASKLASGVPSRFSGSGSGTEFTLTISSLQPDDFATYYCQQAYSVSNVDNAFGGGTKVEIKR

SEQ ID NO: 16086 - protein, 111 aa, Artificial Sequence
  source: /note="Description of Artificial Sequence: Synthetic polypeptide"
AYDMTQTPASVEIAVGGTVTIRCQASEDIESYLAWYQQKPGQPPKLLIYRASDLASGVSSRFKGSGSGTDYTLTISGVECDDAATYYCQQGYTIDNVDNTFGGGTEVVVKR

SEQ ID NO: 16087 - protein, 111 aa, Artificial Sequence
  source: /note="Description of Artificial Sequence: Synthetic polypeptide"
AYDMTQSPASVEAAVGGTVTIRCQASEDIESYLAWYQQKPGQPPKLLIYRASDLASGVSSRFKGSGSGTDYTLTISGLEPEDAATYYCQQGYTIDNVDNTFGGGTKVEIKR

SEQ ID NO: 16088 - protein, 111 aa, Artificial Sequence
  source: /note="Description of Artificial Sequence: Synthetic polypeptide"
AYDMTQTPASMEVAVGGTVTIKCQASQSISTYLAWYQQKPGQPPKLLIYDASDLASGVSSRFKGSGSGTQFTLTISGVECDDAATYYCQQDWSDSNVDNAFGGGTEVVVKR

SEQ ID NO: 16089 - protein, 116 aa, Artificial Sequence
  source: /note="Description of Artificial Sequence: Synthetic polypeptide"
ADIVMTQTPSSVEAAVGGTVTIKCQASENIYRLLAWYQQKPGQRPKLLIYSASTLASGVPSRFKGSGSGTQFTLTISDLECADAATYYCQNYYYSSRSSYDTYNVFGGGTEVVVKR

SEQ ID NO: 16090 - protein, 109 aa, Artificial Sequence
  source: /note="Description of Artificial Sequence: Synthetic polypeptide"
QVLTQTPPSVSAVVGGTVTINCQSSQRIYSNWLSWYQQKPGQTPKPLIYAASSLASGVPSRFKGSGSGTQFTLTISDLECDDAASYYCAGYYSGHIYSFGGGTEVVVKR

SEQ ID NO: 16091 - protein, 110 aa, Artificial Sequence
  source: /note="Description of Artificial Sequence: Synthetic polypeptide"
DIQMTQSPSSVSASVGDRVTITCQSSQRIYSNWLSWYQQKPGKAPKLLIYAASSLASGVPSRFSGSGSGTDFTLTISSLQPEDFATYYCAGYYSGHIYSFGGGTKVEIKR

SEQ ID NO: 16092 - protein, 113 aa, Artificial Sequence
  source: /note="Description of Artificial Sequence: Synthetic polypeptide"
AVLTQTPSPVSAAVGGTVTIKCQSSQSVYNNNLLSWYQQKPGQPPKLLIWGASYLPSGVPDRFSGSGSGTQFTLTISGVQCDDAATYYCLGGYDGDADTYNTFGGGTEVVVKR

SEQ ID NO: 16093 - protein, 111 aa, Artificial Sequence
  source: /note="Description of Artificial Sequence: Synthetic polypeptide"
AYDMTQTPASVEVAVGGTVTIKCQVSQSISSWLSWYQKKPGQRPKLLIYRASTLASGVSSRFKGSGSGTEFTLTISGVECADAATYYCQQAYSVSNVDNAFGGGTEVVVKR

SEQ ID NO: 16094 - protein, 111 aa, Artificial Sequence
  source: /note="Description of Artificial Sequence: Synthetic polypeptide"
DYQMTQSPSTLSASVGDRVTITCQVSQSISSWLSWYQQKPGKAPKLLIYRASTLASGVPSRFSGSGSGTEFTLTISSLQPDDFATYYCQQAYSVSNVDNAFGGGTKVEIKR

SEQ ID NO: 16095 - protein, 111 aa, Artificial Sequence
  source: /note="Description of Artificial Sequence: Synthetic polypeptide"
AYDMTQTPASVEVAVGGTVTIKCQASESIESYLAWYQQKSGQPPKLLIYRASTLASGVSSRFKGSGSGTQFTLTISGVECADAATYYCQQGDAWSNVDNVFGGGTEVVVKR

SEQ ID NO: 16096 - protein, 111 aa, Artificial Sequence
  source: /note="Description of Artificial Sequence: Synthetic polypeptide"
AYDMTQTPASVEVAVGGTVTIKCQASESISSYLAWYQQKSGQPPKLLIYRASTLASGVSSRFKGSGSGTQFTLTISGVECADAATYYCQQGDAWSNVDNVFGGGTEVVVKR

SEQ ID NO: 16097 - protein, 113 aa, Artificial Sequence
  source: /note="Description of Artificial Sequence: Synthetic polypeptide"
QVLTQTPSPVSAAVGGTVTINCQGSQSLYNNNAFSWYQQKPGQPPKLLIYDASTLASGVPSRFKGSGSGTQFTLTISGVQCADAATYYCQGEFSCGDVDCIAFGGGTEVVVKR

SEQ ID NO: 16098 - protein, 113 aa, Artificial Sequence
  source: /note="Description of Artificial Sequence: Synthetic polypeptide"
QVLTQTPSPVSAAVGGTVTINCQASQSFYNNGAFSWYQQKPGQPPKLLIYDASTLASGVPSRFKGSGSGTQFTLTISGVQCGDAATYYCQGEFSCGSADCVAFGGGTEVVVKR

SEQ ID NO: 16099 - protein, 111 aa, Artificial Sequence
  source: /note="Description of Artificial Sequence: Synthetic polypeptide"
AYDMTQTPASVEVAVGGTVTIKCQASQSISTALAWYQQKPGQRPKLLIYDASKLASGVSSRFKGSGSGAQFTLTISGVECADAATYYCHQGYSSSNVDNTFGGGTEVVVKR

SEQ ID NO: 16100 - protein, 111 aa, Artificial Sequence
  source: /note="Description of Artificial Sequence: Synthetic polypeptide"
DVVMTQTPASVSEPVGGTVTIKCQASQSIDNYLAWYQQKPGQRPRLLIYYTSTLASGVPSRFKGSGSGTEYTLTISDLECADAATYYCQFTAYYSTYIGAFGGGTEVVVKR

SEQ ID NO: 16101 - protein, 111 aa, Artificial Sequence
  source: /note="Description of Artificial Sequence: Synthetic polypeptide"
DIQMTQSPSSLSASVGDRVTITCQASQSIDNYLAWYQQKPGKVPKLLIYYTSTLASGVPSRFSGSGSGTDFTLTISSLQPEDVATYYCQFTAYYSTYIGAFGGGTKVEIKR

SEQ ID NO: 16102 - protein, 111 aa, Artificial Sequence
  source: /note="Description of Artificial Sequence: Synthetic polypeptide"
AYDMTQTPASVEVAVGGTVTIKCQASESISSYLNWYQQKLGQPPKLLIYRASTLTSGVSSRFKGSGSGTEYTLTISDLECADAATYYCQQTYGYSDTDNSFGGGTEVVVKR

SEQ ID NO: 16103 - protein, 111 aa, Artificial Sequence
  source: /note="Description of Artificial Sequence: Synthetic polypeptide"
AYDMTQTPASVEVAVGGTVTIKCQASESISTYLAWYQQKPGQPPKLLIYRASTLASGVSSRFKGSGSGTQFTLTISGVECADAATYYCQQGYSYSNVDNAFGGGTEVVVKR

SEQ ID NO: 16104 - protein, 111 aa, Artificial Sequence
  source: /note="Description of Artificial Sequence: Synthetic polypeptide"
DIQMTQSPSSLSASVGDRVTITCQASESISTYLAWYQQKPGKVPKLLIYRASTLASGVPSRFSGSGSGTDFTLTISSLQPEDVATYYCQQGYSYSNVDNAFGGGTKVEIKR

SEQ ID NO: 16105 - protein, 110 aa, Artificial Sequence
  source: /note="Description of Artificial Sequence: Synthetic polypeptide"
QVLTQTASSVSAAVGGTVTISCQSSQSVTNNNDLAWYQQKPGQPPKLLIYQASKLASGVPSRFKGSGSGTQFTLTISDLECDDAATYYCQGSYSGGICAFGGGTEVVVKR

SEQ ID NO: 16106 - protein, 110 aa, Artificial Sequence
  source: /note="Description of Artificial Sequence: Synthetic polypeptide"
ADVVMTQTPASVSEPVGGTVTIKCQASQSISSYLSWYQQKPGQPPKLLIYGASKLTSGVPSRFKGSGSGTEYTLTISDLECADAATYYCQSNYDIYSYAFGGGTEVVVKR

SEQ ID NO: 16107 - protein, 112 aa, Artificial Sequence
  source: /note="Description of Artificial Sequence: Synthetic polypeptide"
ADIVMTQNPASVSEPVGGTVTIKCQASQSVNSWLSWYQQKPGQPPKFLIYKASTLASGVSSRFKGSGIGTEFTLTISDLECADAATYYCQFSNSGTIYGSGFGGGTEVVVKR

SEQ ID NO: 16108 - protein, 111 aa, Artificial Sequence
  source: /note="Description of Artificial Sequence: Synthetic polypeptide"
DIQMTQSPSTLSASVGDRVTITCQASQSISSWLAWYQQKPGKAPKLLIYEASKLASGVPSRFSGSGSGTEFTLTISSLQPDDFATYYCQQAYSVANVDNAFGGGTKVEIKR

SEQ ID NO: 16109 - protein, 112 aa, Artificial Sequence
  source: /note="Description of Artificial Sequence: Synthetic polypeptide"
DVLMTQTPLSLPVSLGDQASISCRSSQSIVHSNGNTYLEWYLQKPGQSPKLLIYKVSNRFSGVPDRFSGSGSGTDFTLKISRLEAEDLGVYYCFQGSHVPFTFGGGTKLEIK

SEQ ID NO: 16110 - protein, 112 aa, Artificial Sequence
  source: /note="Description of Artificial Sequence: Synthetic polypeptide"
DLVMTQTPLSLPVSLGDQASISCRSSQSLVHSSGVTYLHWYLQKPGQSPKLLIYKVSNRFSGVPDRFSGSGSGTDFTLKISRVEAEDLGVYFCSQSTHVPPTFGSGTKLEIK

SEQ ID NO: 16111 - protein, 112 aa, Artificial Sequence
  source: /note="Description of Artificial Sequence: Synthetic polypeptide"
DVVMTQSPLSLPVTLGQPASISCRSSQSIVHSNGNTYLEWFQQRPGQSPRRLIYKVSNRFSGVPDRFSGSGSGTDFTLKISRVEAEDVGVYYCFQGSHVPFTFGGGTKVEIK

SEQ ID NO: 16112 - protein, 112 aa, Artificial Sequence
  source: /note="Description of Artificial Sequence: Synthetic polypeptide"
DIVMTQTPLSLSVTPGQPASISCKSSQSLVHSSGVTYLYWYLQKPGQSPQLLIYKVSNRFSGVPDRFSGSGSGTDFTLKISRVEAEDVGVYYCSQSTHVPPTFGQGTKLEIK

SEQ ID NO: 16113 - protein, 112 aa, Artificial Sequence
  source: /note="Description of Artificial Sequence: Synthetic polypeptide"
DIVMTQAASSNPVTLGTSASISCRSSKSLRHTKGITFLYWYLQKPGQSPQLLIYQMSNLASGVPDRFSSSGSGTDFTLRISRVEAEDLGVYYCAQNLELPLTFGAGTKLELK

SEQ ID NO: 16114 - protein, 112 aa, Artificial Sequence
  source: /note="Description of Artificial Sequence: Synthetic polypeptide"
DVVLTQTPLTLSVTIGQPASISCKSSQSLLDSDGKTYLNWLLQRPGQSPKRLIYLVSKLDSGVPDRFTGSGSGTDFTLKISRVEAEDLGVYYCWQGTHFPQTFGGGTKLEIK

SEQ ID NO: 16115 - protein, 112 aa, Artificial Sequence
  source: /note="Description of Artificial Sequence: Synthetic polypeptide"
DVVMTQTPLTLSVTIGRPASISCKSSQSLLDSDGKTYLYWLLQRPGQSPKRLIYLVSELDSGVPDRITGSGSGTDFTLKISRVEAEDLGVYYCWQGTHSPYTFGGGTKLEIK

SEQ ID NO: 16116 - protein, 115 aa, Artificial Sequence
  source: /note="Description of Artificial Sequence: Synthetic polypeptide"
QLALTQSSSASFSLGASAKLTCTLSSQHRTYTIEWYQQQSLKPPKYVMEVKKDGSHSTGHGIPDRFSGSSSGADRYLSISNIQPEDEAIYICGVGDAIKGQSVFVFGGGTKVTVL

SEQ ID NO: 16117 - protein, 112 aa, Artificial Sequence
  source: /note="Description of Artificial Sequence: Synthetic polypeptide"
DIVMTQSPLSLPVTPGEPASISCRSSKSLRHTKGITFLYWYLQKPGQSPQLLIYQMSNRASGVPDRFSGSGSGTDFTLKISRVEAEDVGVYYCAQNLELPLTFGGGTKVEIK

SEQ ID NO: 16118 - protein, 112 aa, Artificial Sequence
  source: /note="Description of Artificial Sequence: Synthetic polypeptide"
DIVMTQSPLSLPVTPGEPASISCRSSKSLRHTKGITFLDWYLQKPGQSPQLLIYQMSNRASGVPDRFSGSGSGTDFTLKISRVEAEDVGVYYCAQNLELPLTFGGGTKVEIK

SEQ ID NO: 16119 - protein, 114 aa, Artificial Sequence
  source: /note="Description of Artificial Sequence: Synthetic polypeptide"
EVQLVESGGGLVQPGGSLRLSCAASGFIFSSYGMSWVRQAPGKGLEWVANINTFGDRTYYVDSVKGRFTISRDNAKNSLYLQMNSLRAEDTAVYYCARGTGTYWGQGTLVTVSS

SEQ ID NO: 16120 - protein, 114 aa, Artificial Sequence
  source: /note="Description of Artificial Sequence: Synthetic polypeptide"
EVQLVESGGGLVQPGGSLRLSCAASGFIFSSYGMSWVRQAPGKGLEWVASINTFGDRTYYVDSVKGRFTISRDNAKNSLYLQMNSLRAEDTAVYYCARGTGTYWGQGTLVTVSS

SEQ ID NO: 16121 - protein, 117 aa, Artificial Sequence
  source: /note="Description of Artificial Sequence: Synthetic polypeptide"
QVQLVQSGAEVKKPGASVKVSCKASGYTFTSYYMYWVRQAPGQGLEWMGIINPSNGGTSYAQKFQGRVTMTRDTSTSTVYMELSSLRSEDTAVYYCTRGGYYPFDYWGQGTTVTVSS

SEQ ID NO: 16122 - protein, 117 aa, Artificial Sequence
  source: /note="Description of Artificial Sequence: Synthetic polypeptide"
QVQLVQSGAEVKKPGASVKVSCKASGYTFTSYYMHWVRQAPGQGLEWMGIINPSNGGTSYAQKFQGRVTMTRDTSTSTVYMELSSLRSEDTAVYYCTRGGYYPFDYWGQGTTVTVSS

SEQ ID NO: 16123 - protein, 117 aa, Artificial Sequence
  source: /note="Description of Artificial Sequence: Synthetic polypeptide"
QVQLVQSGAEVKKPGASVKVSCKASGYTFTSYYMYWVRQAPGQGLEWMGEINPSNGGTNYAQKFQGRVTMTRDTSTSTVYMELSSLRSEDTAVYYCTRGGYYPFDYWGQGTTVTVSS

SEQ ID NO: 16124 - protein, 121 aa, Artificial Sequence
  source: /note="Description of Artificial Sequence: Synthetic polypeptide"
QVQLQESGPGLVKPSQTLSLTCTVSGYSITSDYAWNWIRQHPGKGLEWIGYISFSGYTYYNPSLKSRVTISVDTSKNQFSLKLSSVTAADTAVYYCAREVNYGDSYHFDYWGQGTLVTVSS

SEQ ID NO: 16125 - protein, 121 aa, Artificial Sequence
  source: /note="Description of Artificial Sequence: Synthetic polypeptide"
QVQLQESGPGLVKPSQTLSLTCTVSGYSITSDYAWSWIRQHPGKGLEWIGYISFSGYTYYNPSLKSRVTISVDTSKNQFSLKLSSVTAADTAVYYCAREVNYGDSYHFDYWGQGTLVTVSS

SEQ ID NO: 16126 - protein, 121 aa, Artificial Sequence
  source: /note="Description of Artificial Sequence: Synthetic polypeptide"
QVQLQESGPGLVKPSQTLSLTCTVSGYSITSDYAWNWIRQHPGKGLEWIGYISFSGYTSYNPSLKSRVTISVDTSKNQFSLKLSSVTAADTAVYYCAREVNYGDSYHFDYWGQGTLVTVSS

SEQ ID NO: 16127 - protein, 128 aa, Artificial Sequence
  source: /note="Description of Artificial Sequence: Synthetic polypeptide"
MDFQVQSFSLLLISITVIVSSGEIVLTQSPTTMAASPGEKVTITCRASSSVSYMHWFQQKSGTSPKPWIYGTSKLASGVPDRFSGSGSGTSYSLTISSMEAEDAATYYCLQRSSYPPTFGAGTKLELK

SEQ ID NO: 16128 - protein, 106 aa, Artificial Sequence
  source: /note="Description of Artificial Sequence: Synthetic polypeptide"
DIVMTQSPDSLAVSLGERATITCRASSSVSYMHWFQQKPGQSPKPWIYGTSKLASGVPDRFSGSGSGTSYSLTISSLQAEDAATYYCLQRSSYPPTFGQGTKVEIK

SEQ ID NO: 16129 - protein, 106 aa, Artificial Sequence
  source: /note="Description of Artificial Sequence: Synthetic polypeptide"
DIVMTQSPDSLAVSLGERATINCRASSSVSYMHWYQQKPGQSPKPLIYGTSKLASGVPDRFSGSGSGTSYSLTISSLQAEDVAVYYCLQRSSYPPTFGQGTKVEIK

SEQ ID NO: 16130 - protein, 106 aa, Artificial Sequence
  source: /note="Description of Artificial Sequence: Synthetic polypeptide"
DIVMTQSPDSLAVSLGERATINCRASSSVSYMHWYQQKPGQSPKPWIYGTSKLASGVPDRFSGSGSGTSYSLTISSLQAEDVAVYYCLQRSSYPPTFGQGTKVEIK

SEQ ID NO: 16131 - protein, 106 aa, Artificial Sequence
  source: /note="Description of Artificial Sequence: Synthetic polypeptide"
DIQMTQSPSSLSASVGDRVTITCRASSSVSYMHWYQQKPGKAPKLLIYGTSKLASGVPSRFSGSGSGTDFTLTISSLQPEDFATYYCLQRSSYPPTFGQGTKVEIK

SEQ ID NO: 16132 - protein, 107 aa, Homo sapiens
DIELTQPPSVSVAPGQTARISCSGDNIPLKYVSWYQQKPGQAPVLVIHDDNKRPSGIPERFSGSNSGNTATLTISGTQAEDEADYYCQSWASTGVVFGGGTKLTVLG

SEQ ID NO: 16133 - protein, 105 aa, Homo sapiens
DIVLTQPPSVSGAPGQRVTISCTGSSSNIGTYDVHWYQQLPGTAPKLLIYSNSKRPSGVPDRFSGSKSGTSASLAITGLQSEDEADYYCSITRVFGGGTKLTVLG

SEQ ID NO: 16134 - protein, 113 aa, Artificial Sequence
  source: /note="Description of Artificial Sequence: Synthetic polypeptide"
DVLMTQTPLSLPVSLGDPASISCRSSQSIVHSNVNTYLEWYLQKPGQSPKLLIYKVSNRFSGVPDRFSGSGAGTDFTLRISRVEAEDLGIYYCFQGSHVPPTFGGGTKLEIKR

SEQ ID NO: 16135 - protein, 113 aa, Artificial Sequence
  source: /note="Description of Artificial Sequence: Synthetic polypeptide"
DVLMTQTPLSLPVSLGDPASISCRSSQSIVHSNVNTYLEWYLQKPGQSPRLLIYKVSNRFSGVPDRFSGSGAGTDFTLRISRVEAEDLGIYYCFQGSHVPPTFGGGTKLEIKR

SEQ ID NO: 16136 - protein, 113 aa, Artificial Sequence
  source: /note="Description of Artificial Sequence: Synthetic polypeptide"
DVVMTQTPLSLPVSLGDPASISCRSSQSIVHSNVNTYLEWYLQKPGQSPKLLIYKVSNRFSGVPDRFSGSGAGTDFTLRISRVEAEDLGIYYCFQGSHVPPTFGGGTKLEIKR

SEQ ID NO: 16137 - protein, 113 aa, Mus musculus; identical to SEQ ID NO: 14803

SEQ ID NO: 16138 - protein, 113 aa, Artificial Sequence
  source: /note="Description of Artificial Sequence: Synthetic polypeptide"
DVVMTQTPLSLPVSLGDPASISCRSSQSIVHSNVNTYLEWYLQKPGQSPRLLIYKVSNRFSGVPDRFSGSGAGTDFTLRISRVEAEDLGIYYCFQGSHVPPTFGGGTKLEIKR

SEQ ID NO: 16139 - protein, 110 aa, Homo sapiens
  MOD_RES (104)..(104): Any amino acid
QSVLTQPPSVSKGLRQTATLTCTGNSNNVGNQGAAWLQQHQGHPPKLLSYRNNNRPSGISERFSASRSGNTASLTITGLQPEDEADYYCSAWDSSLSAWVFGGXTQLTVL

SEQ ID NO: 16140 - protein, 110 aa, Homo sapiens
QSVLTQPASVSGSPGQSITISCTGNNRDVGGYNYVSWFQQYPGKAPKLLIYDVSHRPSGVSNRFSGSKAGNTASLTISGLQAEDEADYYCSSYTSSSTLVFGGGTKLTVL

SEQ ID NO: 16141 - protein, 111 aa, Homo sapiens
  MOD_RES (105)..(105): Any amino acid
QSVLTQPASVSGSPGQSITISCTGTSSDVGGYNLVSWYQQHPGKAPKLMIFEVSQRPSGVSDRFSGSKSGNTASLTVSGLQADDEANYYCQSYDSSVNGWIFGGXTKLTVL

SEQ ID NO: 16142 - protein, 110 aa, Homo sapiens
QAGLTQPASVSGSPGQSITISCTGTSSDVGGYNYVSWYQQHPGKAPKLMIYDVSNRPSGVSNRFSGSKSGNTASLTISGLQAEDEADYYCSSYTSSSTGVFGGGTKLTVL

SEQ ID NO: 16143 - protein, 110 aa, Homo sapiens
QAGLTQPASVSGSPGQSITISCTGTSSDVGGYNYVSWYQQHPGKAPKLMIYDVSNRPSGVSNRFSGSKSGNTASLTISGLQAEDEADYYCSSYTSSNTLVFGGGTKLTVL

SEQ ID NO: 16144 - protein, 110 aa, Homo sapiens
QSALTQPASVSGSPGQSITISCTGTSSDVGSYNLVSWYQQHPGKAPKLMIYEGSKRPSGVSNRFSGSKSGNTASLTISGLQAEDEADYYCSSYTSRSTYVFGTGTKVTVL

SEQ ID NO: 16145 - protein, 109 aa, Homo sapiens
QSALTQPPSVSAAPGQKVTISCSGSSSNIGNNYVSWYQQLPGTAPKLLIYDNNERPSGISNRFSGSKSGNTASLTISGLQAEDEADYYCSSYTSSSTYVFGTGTKVTVL

SEQ ID NO: 16146 - protein, 108 aa, Homo sapiens
SETTLTQSPAFLSATPGDKVNISCKASQDIDDDVNWYQRKPGEAAIFIIDEASNLVPGVSPRFSGSGYGTDFTLTINNVESEDAAYYFCLQHDHVPITFGQGTRLEIK

SEQ ID NO: 16147 - protein, 110 aa, Homo sapiens
QSVVTQPPSVSAAPGQKVTISCAGSTSNIGNNFVSWYQQLPGTAPKLLIYDNNKRPSEIPDRFSGSKSGTSATLGITGLQTGDEADYYCVTWDSSLSVVLFGGGTKVTVL

SEQ ID NO: 16148 - protein, 106 aa, Homo sapiens
SYELMQPSSVSVSPGQTARITCSGDLLTRRYARWFQQKPGQAPLLIIYRDTVRPSGIPERFSASSSGATITLTISGAQLEDEADYYCYSATDNNVVFGGGTKLTVL

SEQ ID NO: 16149 - protein, 110 aa, Homo sapiens
QPVLTQPPSVSAAPGQKVTISCSGGTSNVANNYVSWYQQLPGTAPKLLIYGNSNRPSGVPDRFSGSKSGTSASLAITGLQAEDEADYYCQSYDTSLSGYVFGSGTKVTVL

SEQ ID NO: 16150 - protein, 107 aa, Homo sapiens
VIWMTQSPSSLSASVGDRVTFTCQASQHISKYLNWYQQKPGKAPKLLIYDASNLETGVPSRFSGSGSATDFTLTISSLQPEDFATYYCQQSYLTSYTFGQGTKVDIK

SEQ ID NO: 16151 - protein, 107 aa, Homo sapiens
DIVMTQSPSSLSASVGDRVTITCRASQSISTYLNWFQQKPGKAPRLLIYAASNLQSGVPSRFSGGGSGTDFTLTINSLQPEDFATYYCQQSYSTPFTFGPGTKVDIK

SEQ ID NO: 16152 - protein, 111 aa, Homo sapiens
LPVLTQPASVSGSPGQSITISCTGTSIDVASYNLVSWYQQHPGKAPKLMIYDVSNRPSGVSTRFSGSKSGNTASLTISGLQAEDEADYYCISRANSNTLYVFGTGTKVTVL

SEQ ID NO: 16153 - protein, 107 aa, Homo sapiens
VIWMTQSPSSLSASVGDRVTITCRATQSISTYLNWYQQKPGKAPNLLIYAASSLQSGVPSRFSGSGSGTDFTLTISSLQPEDFATYYCQQSYRTPGTFGQGTKVDIK

SEQ ID NO: 16154 - protein, 139 aa, Homo sapiens
QPVLTQPPSVSAAPGQKVTISCSGSSSNIGNVLTQPASVSGSPGQSITISCTGNNRDVGGYNYVSWFQQYPGKAPKLLIYDVSHRPSGVSNRFSGSKAGNTASLTISGLQAEDEADYYCSSYTSSSTLVFGGGTKLTVL

SEQ ID NO: 16155 - protein, 112 aa, Artificial Sequence
  source: /note="Description of Artificial Sequence: Synthetic polypeptide"
DVVMTQSPLSLPVTPGEPASISCRSSQSIVHSNGNTYLQWYLQKPGQSPQLLIYKVSNRLYGVPDRFSGSGSGTDFTLKISRVEAEDVGVYYCFQGSHVPWTFGQGTKVEIK

SEQ ID NO: 16156 - protein, 108 aa, Homo sapiens
DIQMTQSPSSVSASVGDSVTITCRASQGISSYLAWYQQKPGKAPKLLIYAASSLQSGVPSRFSGNGSGTDFTLTISSLQPEDFATYYCQQANNFPFTFGPGTKVDIKR

SEQ ID NO: 16157 - protein, 112 aa, Homo sapiens; identical to SEQ ID NO: 10003

SEQ ID NO: 16158 - protein, 112 aa, Homo sapiens
QSVLTQAPSVSGAPGQRVTISCTGRSSNIGAGYDVHWYQQFPGTAPKLLIYGNSNRPSGVPDRFSGSKSGTSASLAITGLQAEDEADYYCQSYDSSLSGSVFGGGTKLTVLG

SEQ ID NO: 16159 - protein, 112 aa, Homo sapiens
QSVLTQPPSVSGAPGQRVTISCTGSSSNIGAGYDVHWYQQLPGTAPKLLIYGNNNRPSGVPDRFSGSKSGTSASLAITGLQADDEADYYCQSFDSSLSGSVFGGGTKLTVLG

SEQ ID NO: 16160 - protein, 108 aa, Homo sapiens
DIQMTQSPSSVSASVGDRVTITCRASRGISSWLAWYQQRPGKAPKLLIYTASSLQSGVPSRFSGSGSGTDFTLTISSLQPEDFATYYCQQANSFPFTFGPGTKVDIKR

SEQ ID NO: 16161 - protein, 139 aa, Homo sapiens
MRVPAQLLGLLLLWFPGSRCDIQMTQSPSSVSASVGDSVTITCRASQGISSYLAWYQQKPGKAPKLLIYAASSLQSGVPSRFSGNGSGTDFTLTISSLQPEDFATYYCQQANNFPFTFGPGTKVDIKRTVAAPSVFIFP

SEQ ID NO: 16162 - protein, 153 aa, Homo sapiens
MAWSPLLLTLLIHCTGSWAQSVLTQPPSVSAAPGQKVTISCSGSSSNIENNHVSWYQQLPGTAPKLLIYDNNKRPSGIPDRFSGSKSGTSATLGITGLQTGDEADYYCETWDTSLSAGRVFGGGTKLTVLGQPKAAPSVTLFPPSSEELQANK

SEQ ID NO: 16163 - protein, 144 aa, Homo sapiens
PLLLTLLAHCTGSWAQSVLTQAPSVSGAPGQRVTISCTGRSSNIGAGYDVHWYQQFPGTAPKLLIYGNSNRPSGVPDRFSGSKSGTSASLAITGLQAEDEADYYCQSYDSSLSGSVFGGGTKLTVLGQPKAAPSVTLFPPSSEE

SEQ ID NO: 16164 - protein, 145 aa, Homo sapiens
PLLLTLLAHCTGSWAQSVLTQPPSVSGAPGQRVTISCTGSSSNIGAGYDVHWYQQLPGTAPKLLIYGNNNRPSGVPDRFSGSKSGTSASLAITGLQADDEADYYCQSFDSSLSGSVFGGGTKLTVLGQPKAAPSVTLFPPSSEEL

SEQ ID NO: 16165 - protein, 177 aa, Homo sapiens
MRVPAQLLGLLLLWFPGSRCDIQMTQSPSSVSASVGDRVTITCRASRGISSWLAWYQQRPGKAPKLLIYTASSLQSGVPSRFSGSGSGTDFTLTISSLQPEDFATYYCQQANSFPFTFGPGTKVDIKRTVAAPSVFIFPPSDEQLKSGTASVVCLLNNFYPREAKVQWKVDNALQSG

SEQ ID NO: 16166 - protein, 122 aa, Mus musculus
LMFWIPASRSDVLMTQIPLSLPVSLGDQASISCRSSQSIVHSNGNTYLQWYLQKPGQSPKLLIYKVSNRLYGVPDRFSGSGSGTDFTLKISSVEAEDLGVYYCFQGSHVPWTFGGGTKLEIK

SEQ ID NO: 16167 - protein, 112 aa, Mus musculus
DVLMTQIPLSLPVSLGDQASISCRSSQSIVHSNGNTYLQWYLQKPGQSPKLLIYKVSNRLYGVPDRFSGSGSGTDFTLKISSVEAEDLGVYYCFQGSHVPWTFGGGTKLEIK

SEQ ID NO: 16168 - protein, 112 aa, Homo sapiens
DIVMTQSPLSLPVTPGEPASISCRSSQSLLHSNGYNYLDWYLQKPGQSPQLLIYLGSNRASGVPDRFSGSGSGTDFTLKISRVEAEDVGVYYCMQALQTPQTFGQGTKVEIK

SEQ ID NO: 16169 - protein, 112 aa, Homo sapiens; identical to SEQ ID NO: 16155

SEQ ID NO: 16170 - protein, 131 aa, Homo sapiens
MKLPVRLLVLMFWFPASSSDVVMTQSPLSLPVTPGEPASISCRSSQSIVHSNGNTYLQWYLQKPGQSPQLLIYKVSNRLYGVPDRFSGSGSGTDFTLKISRVEAEDVGVYYCFQGSHVPWTFGQGTKVEIK

SEQ ID NO: 16171 - protein, 131 aa, Homo sapiens
MKLPVRLLVLMFWFPASSSDIVMTQSPLSLPVTPGEPASISCRSSQSIVHSNGNTYLQWYLQKPGQSPQLLIYKVSNRLYGVPDRFSGSGSGTDFTLKISRVEAEDVGVYYCFQGSHVPWTFGQGTKVEIK

SEQ ID NO: 16172 - protein, 123 aa, Mus musculus
DIVMTQSQKFMSTSVGDRVSVTCKASQNVGTNVAWYQQKPGQSPKALIYSSSYRYSGVPDRFTGSGSGTDFTLTISHVQSEDLADYFCQQYNIYPLTFGPGTKLELKRADAAPPTVSIFPPFE

SEQ ID NO: 16173 - protein, 131 aa, Mus musculus
DIVMTQTPLSLPVSLGDQASISCRSSQSLVHGIGNTYLHWYLQKPGQSPKLLIYKVSNRFSGVPDRFSGSGSGTDFTLRISRVEAEDLGLYFCSQSTHVPLTFGAGTKLELKRADAAPTVSIFPPSSEQLK

SEQ ID NO: 16174 - protein, 242 aa, Artificial Sequence
  source: /note="Description of Artificial Sequence: Synthetic polypeptide"
MKKNIAFLLASMFVFSIATNAYADIVMTQTPLSLPVSLGDQASISCRSSQSLVHGIGNTYLHWYLQKPGQSPKLLIYKVSNRFSGVPDRFSGSGSGTDFTLRISRVEAEDLGLYFCSQSTHVPLTFGAGTKLELKRAVAAPTVFIFPPSSEQLKSGTASVVCLLNNFYPREAKVQWKVDNALQSGNSQESVTEQDSKDSTYSLSSTLTLSKADYEKHKVYACEVTHQGLSSPVTKSFNRGEC

SEQ ID NO: 16175 - protein, 114 aa, Mus musculus
DIVMTQTPLSLPVSLGDQASISCRSSQSLVHGIGNTYLHWYLQKPGQSPKLLIYYKVSNRFSGVPDRFSDSGSGTDFTLRISRVEAEDLGLYFCSQSTHVPLTFGAGTKLELKR

SEQ ID NO: 16176 - protein, 114 aa, Artificial Sequence
  source: /note="Description of Artificial Sequence: Synthetic polypeptide"
DIQMTQSPSSLSASVGDRVTITCRSSQSLVHGIGNTYLHWYQQKPGKAPKLLIYYKVSNRFSGVPSRFSGSGSGTDFTLTISSLQPEDFATYYCSQSTHVPLTFGQGTKVEIKR

SEQ ID NO: 16177 - protein, 107 aa, Homo sapiens
DIQMTQSPSSLSASVGDRVTITCRASQGISNYLAWYQQKPGKVPKLLIYAASTLQSGVPSRFSGSGSGTDFTLTISSLQPEDVATYYCQKYNSALLTFGGGTKVEIK

SEQ ID NO: 16178 - protein, 107 aa, Homo sapiens
DIQMTQSPSSLSASVGDRVTITCRASQSISSYLNWYQQKPGKAPKLLIYAASSLQSGVPSRFSGSGSGTDFTLTISSLQPEDFATYYCQQFNTYPITFGPGTKVDIK

SEQ ID NO: 16179 - protein, 106 aa, Homo sapiens
QSELTQTPSVSVSPGQTASITCSGDKLGDKYVSWFQLKPGQSPLLVIYQDSKWPSGIPERFSGSNSGNTATLTISGTQATDEADYYCQVWDISHVVFGGGTKLTVL

SEQ ID NO: 16180 - protein, 107 aa, Homo sapiens
DIQMTQSPSSLSASIGDRVTITCQASQDTDNRLHWYQQKSGRAPKLLIYDAVNLKRGVPSRFRGSGSGTNFILTITNLQPEDMATYFCQHSDGLSLAFGGGTKLEIK

SEQ ID NO: 16181 - protein, 107 aa, Homo sapiens
DIQMTQSPSSLSASVGDRVTITCRASQSISSYLNWYQQKPGKAPKLLIYAASSLQSGVPSRFSGSGSGTDFTLTISSLQPEDFATYYCQQSYSTSWTFGQGTKVEIK

SEQ ID NO: 16182 - protein, 110 aa, Homo sapiens
QYELTQPPSVSGTPGQRVTISCSGSSSNIGSEYVYWFQQLPGTAPRLLIYRNDQRPSGVPDRFSGSKSGTSASLAISGLRSEDETDYYCTTWDDSLSGPVFGGGTKLTVL

SEQ ID NO: 16183 - protein, 110 aa, Homo sapiens
QSALTQPPSASGTPGQRVTISCSGSSSNIGRNTVNWYQQLPGTAPKLLIYSNNQRPSGVPDRFAGSKSGTSASLAISGLQSEDEADYYCAAWDDSLNAWVFGGGTKLTAL

SEQ ID NO: 16184 - protein, 108 aa, Homo sapiens
DIQMTQSPGTLSLSPGERATLSCRASQSVDSSYLSWYQQKPGQAPRLLIYGASTRATGIPARFSGSGSGTDFTLTVSRLEPEDFAVYYCQQHGYSSRTFGQGTKVEIK

SEQ ID NO: 16185 - protein, 107 aa, Homo sapiens
DIQMTQSPGTLSLSPGERSTLSCRASQSVSSSYLAWYQQKPGQAPRLLIYGASSRATGIPDRFSGSGSGTDFTLTISRLEPEDFGVYYCHQYGRPPVFGPGTKVDIK

SEQ ID NO: 16186 - protein, 115 aa, Artificial Sequence
  source: /note="Description of Artificial Sequence: Synthetic polypeptide"
DIVMTQSPSSLTVTAGEKVTMSCKSSQSLLNSGNQKNYLTWYQQKPGQPPKLLIYWTSTRDSGVPDRFTGSGSGTDFTLTISSVQAEDLAVYYCQNDYSYPPTFGGGTKLEIKRA

SEQ ID NO: 16187 - protein, 109 aa, Artificial Sequence
  source: /note="Description of Artificial Sequence: Synthetic polypeptide"
QAVVTQESALTTSPGETVTLTCRSSTGAVTSTNYANWVQEKPDHLFTGLIGGTNNRAPGVPARFSGSLIGDKAALTITGAQTEDEAIYFCALWYSNHWVFGGGTKLTVL

SEQ ID NO: 16188 - protein, 109 aa, Artificial Sequence
  source: /note="Description of Artificial Sequence: Synthetic polypeptide"
QAVVTQESALTTSPGETVTLTCRSSTGAVTASNYANWVQEKPDHSFTGLIGGINNRAPGVPARFSGSLIGDKAALTITGAQTEDEAIYFCALWYNNHWVFGGGTKLTVL

SEQ ID NO: 16189 - protein, 112 aa, Artificial Sequence [sequence omitted]

SEQ ID NO: 16190 - protein, 109 aa, Artificial Sequence
  source: /note="Description of Artificial Sequence: Synthetic polypeptide"
DIQMTQSPSSLSASVGDRVTITCRASQTISHYLAWYQQKPGKAPKLLIYAASILQSGVPSRFSGSGSGTDFTLTISSLQPEDFAVYYCQQYSGFPVTFGQGTKVEIKRT

SEQ ID NO: 16191 - protein, 108 aa, Artificial Sequence
  source: /note="Description of Artificial Sequence: Synthetic polypeptide"
DIELTQPPSVSVAPGQSITISCSGDNLGDKYVHWYQQKPGQAPVLVIYDDNERPSGIPERFSGSNSGNTATLTISGTQAEDEADYYCSAYGSHSGTVFGGGTKLTVLG

SEQ ID NO: 16192 - protein, 1390 aa, Homo sapiens
MKAPAVLAPGILVLLFTLVQRSNGECKEALAKSEMNVNMKYQLPNFTAETPIQNVILHEHHIFLGATNYIYVLNEEDLQKVAEYKTGPVLEHPDCFPCQDCSSKANLSGGVWKDNINMALVVDTYYDDQLISCGSVNRGTCQRHVFPHNHTADIQSEVHCIFSPQIEEPSQCPDCVVSALGAKVLSSVKDRFINFFVGNTINSSYFPDHPLHSISVRRLKETKDGFMFLTDQSYIDVLPEFRDSYPIKYVHAFESNNFIYFLTVQRETLDAQTFHTRIIRFCSINSGLHSYMEMPLECILTEKRKKRSTKKEVFNILQAAYVSKPGAQLARQIGASLNDDILFGVFAQSKPDSAEPMDRSAMCAFPIKYVNDFFNKIVNKNNVRCLQHFYGPNHEHCFNRTLLRNSSGCEARRDEYRTEFTTALQRVDLFMGQFSEVLLTSISTFIKGDLTIANLGTSEGRFMQVVVSRSGPSTPHVNFLLDSHPVSPEVIVEHTLNQNGYTLVITGKKITKIPLNGLGCRHFQSCSQCLSAPPFVQCGWCHDKCVRSEECLSGTWTQQICLPAIYKVFPNSAPLEGGTRLTICGWDFGFRRNNKFDLKKTRVLLGNESCTLTLSESTMNTLKCTVGPAMNKHFNMSIIISNGHGTTQYSTFSYVDPVITSISPKYGPMAGGTLLTLTGNYLNSGNSRHISIGGKTCTLKSVSNSILECYTPAQTISTEFAVKLKIDLANRETSIFSYREDPIVYEIHPTKSFISGGSTITGVGKNLNSVSVPRMVINVHEAGRNFTVACQHRSNSEIICCTTPSLQQLNLQLPLKTKAFFMLDGILSKYFDLIYVHNPVFKPFEKPVMISMGNENVLEIKGNDIDPEAVKGEVLKVGNKSCENIHLHSEAVLCTVPNDLLKLNSELNIEWKQAISSTVLGKVIVQPDQNFTGLIAGVVSISTALLLLLGFFLWLKKRKQIKDLGSELVRYDARVHTPHLDRLVSARSVSPTTEMVSNESVDYRATFPEDQFPNSSQNGSCRQVQYPLTDMSPILTSGDSDISSPLLQNTVHIDLSALNPELVQAVQHVVIGPSSLIVHFNEVIGRGHFGCVYHGTLLDNDGKKIHCAVKSLNRITDIGEVSQFLTEGIIMKDFSHPNVLSLLGICLRSEGSPLVVLPYMKHGDLRNFIRNETHNPTVKDLIGFGLQVAKGMKYLASKKFVHRDLAARNCMLDEKFTVKVADFGLARDMYDKEYYSVHNKTGAKLPVKWMALESLQTQKFTTKSDVWSFGVLLWELMTRGAPPYPDVNTFDITVYLLQGRRLLQPEYCPDPLYEVMLKCWHPKAEMRPSFSELVSRISAIFSTFIGEHYVHVNATYVNVKCVAPYPSLLSSEDNADDEVDTRPASFWETS

SEQ ID NO: 16193 - protein, 510 aa, Artificial Sequence
  source: /note="Description of Artificial Sequence: Synthetic polypeptide"
MIQRTPKIQVYSRHPAENGKSNFLNCYVSGFHPSDIEVDLLKNGERIEKVEHSDLSFSKDWSFYLLYYTEFTPTEKDEYACRVNHVTLSQPKIVKWDRDMGGGGSGGGGSGGGGSGSHSMRYFFTSVSRPGRGEPRFIAVGYVDDTQFVRFDSDAASQRMEPRAPWIEQEGPEYWDGETRKVKAHSQTHRVDLGTLRGYYNQSEAGSHTVQRMYGCDVGSDWRFLRGYHQYAYDGKDYIALKEDLRSWTAADMAAQTTKHKWEAAHVAEQLRAYLEGTCVEWLRRYLENGKETLQRTDAPKTHMTHHAVSDHEATLRCWALSFYPAEITLTWQRDGEDQTQDTELVETRPAGDGTFQKWAAVVVPSGQEQRYTCHVQHEGLPKPLTLRWEGGGGSGGGGSGGGGSQIVLTQSPAIMSASPGEKVTITCSASSSISYMHWFQQKPGTSPKLWIYTTSNLASGVPARFSGSGSGTSYSLTISRMEAEDAATYYCHQRSTYPLTFGCGTKLEL

SEQ ID NO: 16194 - protein, 109 aa, Artificial Sequence
  source: /note="Description of Artificial Sequence: Synthetic polypeptide"
ETTLTQSPATLSLSPGERATLSCRASQSISSSYLAWYQHKPGQAPRLLIYGASRRATGIPDRFSGSGSGTDFSLTISRLEPEDFAVYYCLHYGSSKWTFGQGTKVEIKR

SEQ ID NO: 16195 - protein, 108 aa, Mus sp.
DIVMTQSPAIMSASPGEKVTMTCSASSSVSSSYLYWYQQKPGSSPKLWIYSTSNLASGVPARFSGSGSGTSYSLTISSMEAEDAASYFCHQWNRYPYTFGGGTKLEIK

SEQ ID NO: 16196 - protein, 109 aa, Artificial Sequence
  source: /note="Description of Artificial Sequence: Synthetic polypeptide"
DIQLTQSPAIMSASPGEKVTMTCSASSSVSSSYLYWYQQKPGSSPKLWIYSTSNLASGVPARFSGSGSGTSYSLTISSMEAEDAASYFCHQWNRYPYTFGGGTKLEIKR

SEQ ID NO: 16197 - protein, 107 aa, Homo sapiens
DIQMTQSPSSLSASVGDRVTITCRASQSISNYLSWYQQKPGKAPKLLIYAASSLQSGVTSRFSGSGSGTDFTLTISSLQPEDSATYYCQQSYSTLITFGQGTRLEIK

SEQ ID NO: 16198 - protein, 109 aa, Homo sapiens
DIQLTQSPSSLSASVGDRVTMTCSASSSVSSSYLYWYQQKPGKAPKLWIYSTSNLASGVPARFSGSGSGTDFTLTISSLQPEDSASYFCHQWNRYPYTFGGGTRLEIKR

SEQ ID NO: 16199 - protein, 107 aa, Homo sapiens; identical to SEQ ID NO: 15756

SEQ ID NO: 16200 - protein, 107 aa, Homo sapiens
DIQMTQSPSSVSASVGDRVTITCRASQGISIWLAWYQHKPGKAPKLLIYAASSLQSGVPSRFSGSGSGTDFTLTISSLQPEDFATYYCQQANSFPWTFGQGTKVEIK

SEQ ID NO: 16201 - protein, 108 aa, Homo sapiens
EIVLTQSPGTLSLSPGERATLSCRASQSVSSGFLAWFQQKPGQAPRLLIYGASSRATAIPDRFSGSGSGTDFTLTISRLEPEDFAVYYCQQYGSSPYTFGQGTKLEIK

SEQ ID NO: 16202 - protein, 108 aa, Homo sapiens
EIVLTQSPGTLSLSPGERATLSCRASQSVSSSYLAWYQQKPGQAPRLLIYVASSRATGIPDRFSGSGSGTDFTLTISRLEPEDFAVYYCQQYGSSPYTFGQGTKLEIK

SEQ ID NO: 16203 - protein, 107 aa, Homo sapiens
EIVLTQSPGTLSLSPGERATLSCRASQSVSSSYLAWYQQKPGQAPRLLIYGASSRATGIPDRFSGSGSGTDFTLTISRLEPEDFAVYYCQQYGSSYTFGQGTKLEIK

SEQ ID NO: 16204 - protein, 107 aa, Homo sapiens
DIQMTQSPSSLSASVGDRVTITCRASQGISSWLAWYQQKPEKAPKSLIYAASSLQSGVPSRFSGSGSGTDFTLTISSLQPEDFATYYCQQYNSYPWTFGQGTKVEIK

SEQ ID NO: 16205 - protein, 108 aa, Homo sapiens
EIVLTQSPGTLSLSPGERATLSCRASQSVSSSYLAWYQQKPGQAPRLLIYGASSRATGIPDRFSGSGSGTGFTLTISSLEPEDFAVYYCQQYNSYPWTFGQGTKVEIK

SEQ ID NO: 16206 - protein, 108 aa, Homo sapiens
EIVLTQSPGTLSLSPGERATLSCRASQSVSSSYLAWYQQKPGQAPRLLIYGASSRATGIPDRFSGSGSGTDFTLTISRLEPEDFAVYYCQQYGSSPYTFGQGTKLEIK

SEQ ID NO: 16207 - protein, 108 aa, Artificial Sequence
  source: /note="Description of Artificial Sequence: Synthetic polypeptide"
EIVLTQSPGTLSLSPGERATLSCRASQSVSNSHLAWYQQQPGQAPRLLIYSASSRATGIPDRFSGSGSGTDFTLTISRLEPEDFAVYYCQQYGSSLYTFGQGTKLEIK

SEQ ID NO: 16208 - protein, 107 aa, Artificial Sequence
  source: /note="Description of Artificial Sequence: Synthetic polypeptide"
EIVLTQSPGTLSLSPGERATLSCRASQSVSRHLAWYQQNSGQAPRLLIYSASSRATGIPDRFSGRGSGTDFTLTISRLEPEEFAVYYCQQYSSSPITFGQGTRLEIN

SEQ ID NO: 16209 - protein, 108 aa, Artificial Sequence
  source: /note="Description of Artificial Sequence: Synthetic polypeptide"
ENVLTQSPGTLSLSPGERGTLSCRASQNISGRSLAWYHQKPGQTPKLLIFGASRRATGIPDRFSGSGSGTDFTLTISRLEPEDFAVYYCQQYGSSPITFGQGTRLEIK

SEQ ID NO: 16210 - protein, 107 aa, Artificial Sequence
  source: /note="Description of Artificial Sequence: Synthetic polypeptide"
EIMLTQSPGTLSLSPGERATLSCRASQSVSSHLAWYQQTSGQAPRLLIYGASSRTTGIPDRFSGSGSGTDFTLTISRLEPEDFAVYYCQHYSKSPITFGQGTRLEIN

SEQ ID NO: 16211 - protein, 107 aa, Artificial Sequence
  source: /note="Description of Artificial Sequence: Synthetic polypeptide"
EIVLTQSPDTLSLSLGERAILSCRASQSVSSYLAWYQQTSGQAPRLLIFGASSRATGIPDRFSGSGSGTDFTLTINRLEPGDFAVYYCQQYASSPITFGQGTRLDIN

SEQ ID NO: 16212 - protein, 107 aa, Artificial Sequence
  source: /note="Description of Artificial Sequence: Synthetic polypeptide"
DIRMTQSPSSLSASAGDRVTITCRASQAIRNDLGWYQQKPGKAPKRLIYAAFNLQSGVPSRFSGSGSGTEFTLTISSLQPEDLASYYCQQYNRYPWTFGQGTKLEIK

SEQ ID NO: 16213 - protein, 108 aa, Artificial Sequence
  source: /note="Description of Artificial Sequence: Synthetic polypeptide"
DIQMTQSPSSLSASVGDRVTITCRASQAIRNDLGWYQQKPGKAPKRLIYAAFNLQSGVPSRFSGSGSGTEFTLTISSLQPEDFATYYCQQYNRYPWTFGQGTKVEIKR

SEQ ID NO: 16214 - protein, 108 aa, Artificial Sequence
  source: /note="Description of Artificial Sequence: Synthetic polypeptide"
DIQMTQSPSSLSASVGDRVTITCRASQAIRNDLGWYQQKPGKAPKRLIYAAFSLQSGVPSRFSGSGSGTEFTLTISSLQPEDFATYYCQQYNRYPWTFGQGTKVEIKR

SEQ ID NO: 16215 - protein, 108 aa, Artificial Sequence
  source: /note="Description of Artificial Sequence: Synthetic polypeptide"
DIQMTQSPSSLSASAGDRVTITCRASQAIRNDLGWYQQKPGKAPKRLIYAAFNLQSGVPSRFSGSGSGTEFTLTISSLQPEDLASYYCQQYNRYPWTFGQGTKVEIKR

SEQ ID NO: 16216 - protein, 108 aa, Artificial Sequence
  source: /note="Description of Artificial Sequence: Synthetic polypeptide"
DIQMTQSPSSLSASAGDRVTITCRASQAIRNDLGWYQQKPGKAPKRLIYAAFSLQSGVPSRFSGSGSGTEFTLTISSLQPEDLASYYCQQYNRYPWTFGQGTKVEIKR

SEQ ID NO: 16217 - protein, 107 aa, Artificial Sequence
  source: /note="Description of Artificial Sequence: Synthetic polypeptide"
DIVMTQSPSSLSASVRDRVTITCRASQGIRNDLGWYQQKPGKAPKRLIYAASSLQSGVPSRFSGSGSGTEFTLTLSSLQPEDFATYYCSQYNNYPWTFGQGTKVEIK

SEQ ID NO: 16218 - protein, 107 aa, Artificial Sequence
  source: /note="Description of Artificial Sequence: Synthetic polypeptide"
DIQMTQSPSSLSASVGDRVTITCRASQGIRNDLGWYQQKPGKAPKRLIYAASSLQSGVPSRFSGSGSGTEFTLTISSLQPEDFATYYCSQYNNYPWTFGQGTKVEIK

SEQ ID NO: 16219 - protein, 107 aa, Artificial Sequence
  source: /note="Description of Artificial Sequence: Synthetic polypeptide"
DIQMTQSPSSLSASVRDRVTITCRASQGIRNDLGWYQQKPGKAPKRLIYAASSLQSGVPSRFSGSGSGTEFTLTLSSLQPEDFATYYCSQYNNYPWTFGQGTKVEIK

SEQ ID NO: 16220 - protein, 107 aa, Artificial Sequence
  source: /note="Description of Artificial Sequence: Synthetic polypeptide"
DVVMTQSPSSLSASAGDRVTITCRASQAIRNDLGWYQQKPGKAPKRLIYAAFNLQSGVPSRFSGSGSGTEFTLTISSLQPEDLASYYCQQYNRYPWTFGQGTKLEIK

SEQ ID NO: 16221 - protein, 107 aa, Artificial Sequence [sequence omitted]

SEQ ID NO: 16222 - protein, 107 aa, Artificial Sequence
  source: /note="Description of Artificial Sequence: Synthetic polypeptide"
DIQMTQSPSSLSASVRDRVTITCRASQGIRNDLGWYQQKPGKAPKRLIYGAFSLQSGVPSRFSGSGSGTEFTLTISSLQPEDFATYYCLQYNTYPWTFGQGTKVEIK

SEQ ID NO: 16223 - protein, 107 aa, Artificial Sequence
  source: /note="Description of Artificial Sequence: Synthetic polypeptide"
DIQMTQSPSSLSASVGDRVTITCRASQGIRNDLGWYQQKPGKAPKRLIYGAFSLQSGVPSRFSGSGSGTEFTLTISSLQPEDFATYYCLQYNTYPWTFGQGTKVEIK

SEQ ID NO: 16224 - protein, 107 aa, Artificial Sequence
  source: /note="Description of Artificial Sequence: Synthetic polypeptide"
EIVLTQSPSSLSASVGDRVTITCRASQGIRNDLGWYQQKPGKAPKRLIYAASSLQSGVPSRFSGSGSGTEFTLTISSLQPEDFATYYCLQYNSYPWTFGQGTKLEIK

SEQ ID NO: 16225 - protein, 107 aa, Artificial Sequence
  source: /note="Description of Artificial Sequence: Synthetic polypeptide"
DIQMTQSPSSLSASVGDRVTITCRASQGIRNDLGWYQQKPGKAPKRLIYAASSLQSGVPSRFSGSGSGTEFTLTISSLQPEDFATYYCLQYNSYPWTFGQGTKVEIK

SEQ ID NO: 16226 - protein, 107 aa, Artificial Sequence
  source: /note="Description of Artificial Sequence: Synthetic polypeptide"
DIRMTQSPATLSVSPGERATLSCRASQSVTYNLDWYQQKPGQAPRLLIFGASTRATGIPARFSGSGSGTEFTLTITSLQSEDFAVYYCQQYNNWPYTFGQGTKVEIK

SEQ ID NO: 16227 - protein, 108 aa, Artificial Sequence
  source: /note="Description of Artificial Sequence: Synthetic polypeptide"
EIVMTQSPATLSVSPGERATLSCRASQSVTYNLDWYQQKPGQAPRLLIYGASTRATGIPARFSGSGSGTEFTLTISSLQSEDFAVYYCQQYNNWPYTFGQGTKLEIKR

SEQ ID NO: 16228 - protein, 108 aa, Artificial Sequence
  source: /note="Description of Artificial Sequence: Synthetic polypeptide"
EIVMTQSPATLSVSPGERATLSCRASQSVTYNLAWYQQKPGQAPRLLIYGASTRATGIPARFSGSGSGTEFTLTISSLQSEDFAVYYCQQYNNWPYTFGQGTKLEIKR

SEQ ID NO: 16229 - protein, 108 aa, Artificial Sequence
  source: /note="Description of Artificial Sequence: Synthetic polypeptide"
EIVMTQSPATLSVSPGERATLSCRASQSVTYNLDWYQQKPGQAPRLLIFGASTRATGIPARFSGSGSGTEFTLTITSLQSEDFAVYYCQQYNNWPYTFGQGTKLEIKR

SEQ ID NO: 16230 - protein, 108 aa, Artificial Sequence
  source: /note="Description of Artificial Sequence: Synthetic polypeptide"
EIVMTQSPATLSVSPGERATLSCRASQSVTYNLAWYQQKPGQAPRLLIFGASTRATGIPARFSGSGSGTEFTLTITSLQSEDFAVYYCQQYNNWPYTFGQGTKLEIKR

SEQ ID NO: 16231 - protein, 107 aa, Artificial Sequence
  source: /note="Description of Artificial Sequence: Synthetic polypeptide"
EIVLTQSPSSLSASVRDRVTITCRASQGIRNDLGWYQQKPGKAPKRLIYAASSLQSGVPSRFSGSGSGTESTLTISSLQPEDFATYYCSQYNSYPWTFGQGTKVEIK

SEQ ID NO: 16232 - protein, 107 aa, Artificial Sequence
  source: /note="Description of Artificial Sequence: Synthetic polypeptide"
DIQMTQSPSSLSASVGDRVTITCRASQGIRNDLGWYQQKPGKAPKRLIYAASSLQSGVPSRFSGSGSGTEFTLTISSLQPEDFATYYCSQYNSYPWTFGQGTKVEIK

SEQ ID NO: 16233 - protein, 107 aa, Artificial Sequence
  source: /note="Description of Artificial Sequence: Synthetic polypeptide"
DIQMTQSPSSLSASVRDRVTITCRASQGIRNDLGWYQQKPGKAPKRLIYAASSLQSGVPSRFSGSGSGTESTLTISSLQPEDFATYYCSQYNSYPWTFGQGTKVEIK

SEQ ID NO: 16234 - protein, 107 aa, Artificial Sequence
  source: /note="Description of Artificial Sequence: Synthetic polypeptide"
AIQLTQSPSSLSASAGDRVTITCRASQAIRNDLGWYQQKPGKAPKRLVYAAFNLQSGVPSRFSGSGSGTEFTLTISSLQPEDLATYYCLQYNSYPWTFGQGTKVDIK

SEQ ID NO: 16235 - protein, 107 aa, Artificial Sequence
  source: /note="Description of Artificial Sequence: Synthetic polypeptide"
DIQMTQSPSSLSASVGDRVTITCRASQAIRNDLGWYQQKPGKAPKRLIYAAFSLQSGVPSRFSGSGSGTEFTLTISSLQPEDFATYYCLQYNSYPWTFGQGTKVEIK

SEQ ID NO: 16236 - protein, 107 aa, Artificial Sequence
  source: /note="Description of Artificial Sequence: Synthetic polypeptide"
DIQMTQSPSSLSASAGDRVTITCRASQAIRNDLGWYQQKPGKAPKRLVYAAFNLQSGVPSRFSGSGSGTEFTLTISSLQPEDLATYYCLQYNSYPWTFGQGTKVEIK

SEQ ID NO: 16237 - protein, 107 aa, Artificial Sequence
  source: /note="Description of Artificial Sequence: Synthetic polypeptide"
DIRMTQSPATLSVSPGERATLSCRASPSVSSNLAWYQQRPGQPPRLLIYGASTRATGIPARFSGSGSGTEFTLTISSLQSEDFAVYYCQQYSNWPYTFGQGTKVEIK

SEQ ID NO: 16238 - protein, 107 aa, Artificial Sequence
  source: /note="Description of Artificial Sequence: Synthetic polypeptide"
EIVMTQSPATLSVSPGERATLSCRASPSVSSNLAWYQQKPGQAPRLLIYGASTRATGIPARFSGSGSGTEFTLTISSLQSEDFAVYYCQQYSNWPYTFGQGTKLEIK

SEQ ID NO: 16239 - protein, 107 aa, Artificial Sequence
  source: /note="Description of Artificial Sequence: Synthetic polypeptide"
EIVMTQSPATLSVSPGERATLSCRASPSVSSNLAWYQQRPGQPPRLLIYGASTRATGIPARFSGSGSGTEFTLTISSLQSEDFAVYYCQQYSNWPYTFGQGTKLEIK

SEQ ID NO: 16240 - protein, 107 aa, Artificial Sequence
  source: /note="Description of Artificial Sequence: Synthetic polypeptide"
AIQLTQSPATLSVSPGERATLSCRASQSVSSNLAWYQQKPDQAPRLLIYGSSTRATGIPARFSGSGSGTEFTLTISSLQSEDFAVYYCQQYNNWPYTFGQGTKVEIK

SEQ ID NO: 16241 - protein, 107 aa, Artificial Sequence
  source: /note="Description of Artificial Sequence: Synthetic polypeptide"
EIVMTQSPATLSVSPGERATLSCRASQSVSSNLAWYQQKPGQAPRLLIYGSSTRATGIPARFSGSGSGTEFTLTISSLQSEDFAVYYCQQYNNWPYTFGQGTKLEIK

SEQ ID NO: 16242 - protein, 107 aa, Artificial Sequence
  source: /note="Description of Artificial Sequence: Synthetic polypeptide"
EIVMTQSPATLSVSPGERATLSCRASQSVSSNLAWYQQKPDQAPRLLIYGSSTRATGIPARFSGSGSGTEFTLTISSLQSEDFAVYYCQQYNNWPYTFGQGTKLEIK

SEQ ID NO: 16243 - protein, 107 aa, Artificial Sequence
  source: /note="Description of Artificial Sequence: Synthetic polypeptide"
DVVMTQSPATLSVSPGERATLSCRASQSVSSNLDWYQQKPGQAPRLLIYGASTRATGIPARFSGSGSGTEFTLTISSLQSEDFAVYYCQQYNNWPYTFGQGTKLEIK

SEQ ID NO: 16244 - protein, 107 aa, Artificial Sequence
  source: /note="Description of Artificial Sequence: Synthetic polypeptide"
EIVMTQSPATLSVSPGERATLSCRASQSVSSNLAWYQQKPGQAPRLLIYGASTRATGIPARFSGSGSGTEFTLTISSLQSEDFAVYYCQQYNNWPYTFGQGTKLEIK

SEQ ID NO: 16245 - protein, 107 aa, Artificial Sequence
  source: /note="Description of Artificial Sequence: Synthetic polypeptide"
EIVMTQSPATLSVSPGERATLSCRASQSVSSNLDWYQQKPGQAPRLLIYGASTRATGIPARFSGSGSGTEFTLTISSLQSEDFAVYYCQQYNNWPYTFGQGTKLEIK

SEQ ID NO: 16246 - protein, 107 aa, Artificial Sequence
  source: /note="Description of Artificial Sequence: Synthetic polypeptide"
EIVLTQSPATLSVSPGERATLSCRASPSVSSNLAWYQQKPGQPPRLLIYGASTRATGIPARFSGSGSGTEFTLTISSLQSEDFAVYYCQQYSNWPYTFGQGTKLEIK

SEQ ID NO: 16247 - protein, 107 aa, Artificial Sequence
  source: /note="Description of Artificial Sequence: Synthetic polypeptide"
EIVMTQSPATLSVSPGERATLSCRASPSVSSNLAWYQQKPGQPPRLLIYGASTRATGIPARFSGSGSGTEFTLTISSLQSEDFAVYYCQQYSNWPYTFGQGTKLEIK

SEQ ID NO: 16248 - protein, 107 aa, Artificial Sequence
  source: /note="Description of Artificial Sequence: Synthetic polypeptide"
EIVMTQSPATLSVSPGERATLSCRASPSVSSNLAWYQQKPGQPPRLLIYGASTRATGIPARFSGSGSGTEFTLTISSLQSEDFAVYYCQQYSNWPYTFGQGTKVEIK

SEQ ID NO: 16249 - protein, 107 aa, Artificial Sequence
  source: /note="Description of Artificial Sequence: Synthetic polypeptide"
DIVMTQSPSSLSASAGDRVTITCRASQAIRNDLGWYQQKPGKAPKRLIYAAFNLQSGVPSRFSGSGSGTEFTLTISSLQPEDLASYYCQQYNRYPWTFGQGTKLEIK

SEQ ID NO: 16250 - protein, 107 aa, Artificial Sequence
  source: /note="Description of Artificial Sequence: Synthetic polypeptide"
EIVMTQSPATLSVSPGERATLSCRASRTVTYNLDWYQQKPGQAPRLLIFGASTRATGIPARFSGSGSGTEFTLTITSLQSEDFAVYYCQQYNNWPYTFGQGTKLEIK

SEQ ID NO: 16251 - protein, 107 aa, Artificial Sequence
  source: /note="Description of Artificial Sequence: Synthetic polypeptide"
EIVLTQSPATLSASPGDRASLSCRASQSVTFNLDWYQQKPGQPPRLLIYGASTRASGIPARFSGSGSGTEFTLTISGLQSEDFAVYYCQQYNNWPYTFGQGTKVDIK

SEQ ID NO: 16252 - protein, 107 aa, Artificial Sequence
  source: /note="Description of Artificial Sequence: Synthetic polypeptide"
EIVMTQSPATLSVSPGERATLSCRASQSVTFNLAWYQQKPGQPARLLIYGASTRATGIPARFSGSGSGTEFTLTISSLQSEDFAVYYCQQYNNWPYTFGQGTKLEIK

SEQ ID NO: 16253 - protein, 107 aa, Artificial Sequence
  source: /note="Description of Artificial Sequence: Synthetic polypeptide"
EIVMTQSPATLSASPGDRASLSCRASQSVTFNLDWYQQKPGQPPRLLIYGASTRASGIPARFSGSGSGTEFTLTISGLQSEDFAVYYCQQYNNWPYTFGQGTKLEIK

SEQ ID NO: 16254 - protein, 107 aa, Artificial Sequence
  source: /note="Description of Artificial Sequence: Synthetic polypeptide"
EIVMTQSPATLSVSPGERATLSCRASPSVSSNLAWYQQKPGQPPRLLIYGTSTRATGIPARFSGSGSGTEFTLTIRSLQSEDFAVYYCQQYSNWPYTFGQGTKVDIK

SEQ ID NO: 16255 - protein, 107 aa, Artificial Sequence
  source: /note="Description of Artificial Sequence: Synthetic polypeptide"
EIVMTQSPATLSVSPGERATLSCRASPSVSSNLAWYQQKPGQAPRLLIYGTSTRATGIPARFSGSGSGTEFTLTISSLQSEDFAVYYCQQYSNWPYTFGQGTKLEIK

SEQ ID NO: 16256 - protein, 107 aa, Artificial Sequence
  source: /note="Description of Artificial Sequence: Synthetic polypeptide"
EIVMTQSPATLSVSPGERATLSCRASPSVSSNLAWYQQKPGQPPRLLIYGTSTRATGIPARFSGSGSGTEFTLTIRSLQSEDFAVYYCQQYSNWPYTFGQGTKLEIK

SEQ ID NO: 16257 - protein, 107 aa, Artificial Sequence
  source: /note="Description of Artificial Sequence: Synthetic polypeptide"
EIVMTQSPATLSVSPGERATLSCRASQSVSSNLAWYQQKPGQAPRLLIYGASTRATGVPARFSGSGSGTEFTLTISSLQSEDFAVYYCQHYNYWPYTFGQGTKVDIK

SEQ ID NO: 16258 - protein, 107 aa, Artificial Sequence
  source: /note="Description of Artificial Sequence: Synthetic polypeptide"
EIVMTQSPATLSVSPGERATLSCRASQSVSSNLAWYQQKPGQAPRLLIYGASTRATGIPARFSGSGSGTEFTLTISSLQSEDFAVYYCQHYNYWPYTFGQGTKLEIK

SEQ ID NO: 16259 - protein, 107 aa, Artificial Sequence
  source: /note="Description of Artificial Sequence: Synthetic polypeptide"
EIVMTQSPATLSVSPGERATLSCRASQSVSSNLAWYQQKPGQAPRLLIYGASTRATGVPARFSGSGSGTEFTLTISSLQSEDFAVYYCQHYNYWPYTFGQGTKLEIK

SEQ ID NO: 16260 - protein, 107 aa, Artificial Sequence
  source: /note="Description of Artificial Sequence: Synthetic polypeptide"
DIVMTQSPSSLSASVRDRVTITCRASQGIRNELGWYQQKPGKAPKLLIYAASSLQSGVPSRFSGSGSGTDFTLTFSSLQPEDFATYYCSQDNNFPWTFGQGTKVEIK

SEQ ID NO: 16261 - protein, 107 aa, Artificial Sequence
  source: /note="Description of Artificial Sequence: Synthetic polypeptide"
DIQMTQSPSSLSASVGDRVTITCRASQGIRNELGWYQQKPGKAPKRLIYAASSLQSGVPSRFSGSGSGTEFTLTISSLQPEDFATYYCSQDNNFPWTFGQGTKVEIK

SEQ ID NO: 16262 - protein, 107 aa, Artificial Sequence
  source: /note="Description of Artificial Sequence: Synthetic polypeptide"
DIQMTQSPSSLSASVRDRVTITCRASQGIRNELGWYQQKPGKAPKLLIYAASSLQSGVPSRFSGSGSGTDFTLTFSSLQPEDFATYYCSQDNNFPWTFGQGTKVEIK

SEQ ID NO: 16263 - protein, 107 aa, Homo sapiens [sequence omitted]

SEQ ID NO: 16264 - protein, 107 aa, Artificial Sequence
  source: /note="Description of Artificial Sequence: Synthetic polypeptide"
DIMLTQSPPTLSVTPGETISLSCRASQRINTDLHWYQQKPNESPRVLIKFASQTISGVPSRFSGSGSGTDFTLNINRVEPEDFSVYYCQQSNSWPYTFGAGTKLELK

SEQ ID NO: 16265 - protein, 107 aa, Artificial Sequence
  source: /note="Description of Artificial Sequence: Synthetic polypeptide"
DIMLTQSPATLSVTPGERISLSCRASQKISTNLHWYQQKPNESPRILIKYASQTISGIPSRFSGSGSGTDFTLHINTVEPEDFSVYYCQQTNSWPLTFGSGTKLEIK

SEQ ID NO: 16266 - protein, 107 aa, Artificial Sequence
  source: /note="Description of Artificial Sequence: Synthetic polypeptide"
DIILTQSPAALSVTPGESISLSCRASQSINTNLHWYQQKPNESPRVLIKYASQTISGIPSRFSGSGSGTDFTLNINRVEPEDFSVYYCQQSNSWPLTFGSGTKLEIK

SEQ ID NO: 16267 - protein, 107 aa, Artificial Sequence
  source: /note="Description of Artificial Sequence: Synthetic polypeptide"
DIMLTQSPATLSVTPGESISLSCRASQSINTNLHWYQQKPNESPRVLIKYASQTISGIPSRFSGSGSGTDFTLNINRVEPEDFSVYYCQQSNSWPLTFGSGTKLEIK

SEQ ID NO: 16268 - protein, 107 aa, Artificial Sequence
  source: /note="Description of Artificial Sequence: Synthetic polypeptide"
DIMLTQSPVTLSVSPGESISLSCRASQSISTDLHWYQQKPNESPRVLIKYGSQTISGIPSRFSGSGSGTDFTLNINRVEPEDFSVYYCQQSNSWPWTFGGGTKLELK

SEQ ID NO: 16269 - protein, 107 aa, Artificial Sequence
  source: /note="Description of Artificial Sequence: Synthetic polypeptide"
DIQMTQSPSSLSASVGDRVTITCRASQRINTDLHWYQQKPGKAPKLLIYFASQTISGVPSRFSGSGSGTDFTLTISSLQPEDFATYYCQQSNSWPYTFGQGTKLEIK

SEQ ID NO: 16270 - protein, 107 aa, Artificial Sequence
  source: /note="Description of Artificial Sequence: Synthetic polypeptide"
DIQLTQSPSSLSASVGDRVTITCRASQRINTDLHWYQQKPGKAPKVLIKFASQTISGVPSRFSGSGSGTDFTLTISSLQPEDFATYYCQQSNSWPYTFGQGTKLEIK

SEQ ID NO: 16271 - protein, 107 aa, Artificial Sequence
  source: /note="Description of Artificial Sequence: Synthetic polypeptide"
DIQLTQSPSSLSASVGDRVTITCRASQRINTDLHWYQQKPGKAPKLLIYFASQTISGVPSRFSGSGSGTDFTLTISSLQPEDFATYYCQQSNSWPYTFGQGTKLEIK

SEQ ID NO: 16272 - protein, 107 aa, Artificial Sequence
  source: /note="Description of Artificial Sequence: Synthetic polypeptide"
DIQMTQSPSSLSASVGDRVTITCRASQRINTDLHWYQQKPGKAPKVLIYFASQTISGVPSRFSGSGSGTDFTLTISSLQPEDFATYYCQQSNSWPYTFGQGTKLEIK

SEQ ID NO: 16273 - protein, 107 aa, Artificial Sequence
  source: /note="Description of Artificial Sequence: Synthetic polypeptide"
DIQMTQSPSSLSASVGDRVTITCRASQRINTDLHWYQQKPGKAPKLLIKFASQTISGVPSRFSGSGSGTDFTLTISSLQPEDFATYYCQQSNSWPYTFGQGTKLEIK

SEQ ID NO: 16274 - protein, 107 aa, Artificial Sequence
  source: /note="Description of Artificial Sequence: Synthetic polypeptide"
DIQLTQSPSSLSASVGDRVTITCRASQRINTDLHWYQQKPGKAPKVLIYFASQTISGVPSRFSGSGSGTDFTLTISSLQPEDFATYYCQQSNSWPYTFGQGTKLEIK

SEQ ID NO: 16275 - protein, 107 aa, Artificial Sequence
  source: /note="Description of Artificial Sequence: Synthetic polypeptide"
DIQLTQSPSSLSASVGDRVTITCRASQRINTDLHWYQQKPGKAPKLLIKFASQTISGVPSRFSGSGSGTDFTLTISSLQPEDFATYYCQQSNSWPYTFGQGTKLEIK

SEQ ID NO: 16276 - protein, 107 aa, Artificial Sequence
  source: /note="Description of Artificial Sequence: Synthetic polypeptide"
DIQMTQSPSSLSASVGDRVTITCRASQRINTDLHWYQQKPGKAPKVLIKFASQTISGVPSRFSGSGSGTDFTLTISSLQPEDFATYYCQQSNSWPYTFGQGTKLEIK

SEQ ID NO: 16277 - protein, 107 aa, Artificial Sequence
  source: /note="Description of Artificial Sequence: Synthetic polypeptide"
DIMLTQSPSSLSASVGDRVTITCRASQRINTDLHWYQQKPGKAPKVLIKFASQTISGVPSRFSGSGSGTDFTLTISSLQPEDFATYYCQQSNSWPYTFGQGTKLEIK

SEQ ID NO: 16278 - protein, 107 aa, Artificial Sequence
  source: /note="Description of Artificial Sequence: Synthetic polypeptide"
DIQLTQSPSSLSASVGDRVTITCRASQRINTDLHWYQQKPGKAPRVLIKFASQTISGVPSRFSGSGSGTDFTLTISSLQPEDFATYYCQQSNSWPYTFGQGTKLEIK

SEQ ID NO: 16279 - protein, 107 aa, Artificial Sequence
  source: /note="Description of Artificial Sequence: Synthetic polypeptide"
DIQMTQSPSSLSASVGDRVTITCRASQRINTDLHWYQQKPGKAPRVLIKFASQTISGVPSRFSGSGSGTDFTLTISSLQPEDFATYYCQQSNSWPYTFGQGTKLEIK

SEQ ID NO: 16280 - protein, 214 aa, Artificial Sequence
  source: /note="Description of Artificial Sequence: Synthetic polypeptide"
DIQMTQSPSSLSASVGDRVTITCRASQRINTDLHWYQQKPGKAPKVLIKFASQTISGVPSRFSGSGSGTDFTLTISSLQPEDFATYYCQQSNSWPYTFGQGTKLEIKRTVAAPSVFIFPPSDEQLKSGTASVVCLLNNFYPREAKVQWKVDNALQSGNSQESVTEQDSKDSTYSLSSTLTLSKADYEKHKVYACEVTHQGLSSPVTKSFNRGEC

SEQ ID NO: 16281 - protein, 107 aa, Artificial Sequence
  source: /note="Description of Artificial Sequence: Synthetic polypeptide"
DIQMTQSPSSLSASVGDRVTITCRASQKISTNLHWYQQKPGKAPKLLIYYASQTISGVPSRFSGSGSGTDFTLTISSLQPEDFATYYCQQTNSWPLTFGGGTKVEIK

SEQ ID NO: 16282 - protein, 107 aa, Artificial Sequence
  source: /note="Description of Artificial Sequence: Synthetic polypeptide"
DIQMTQSPSSLSASVGDRVTITCRASQKISTNLHWYQQKPGKAPKILIKYASQTISGVPSRFSGSGSGTDFTLTISSLQPEDFATYYCQQTNSWPLTFGGGTKVEIK

SEQ ID NO: 16283 - protein, 106 aa, Artificial Sequence
  source: /note="Description of Artificial Sequence: Synthetic polypeptide"
IQLTQSPSSLSASVGDRVTITCRASQKISTNLHWYQQKPGKAPKLLIYYASQTISGVPSRFSGSGSGTDFTLTISSLQPEDFATYYCQQTNSWPLTFGGGTKVEIK

SEQ ID NO: 16284 - protein, 107 aa, Artificial Sequence
  source: /note="Description of Artificial Sequence: Synthetic polypeptide"
DIQMTQSPSSLSASVGDRVTITCRASQKISTNLHWYQQKPGKAPKILIYYASQTISGVPSRFSGSGSGTDFTLTISSLQPEDFATYYCQQTNSWPLTFGGGTKVEIK

SEQ ID NO: 16285 - protein, 107 aa, Artificial Sequence
  source: /note="Description of Artificial Sequence: Synthetic polypeptide"
DIQMTQSPSSLSASVGDRVTITCRASQKISTNLHWYQQKPGKAPKLLIKYASQTISGVPSRFSGSGSGTDFTLTISSLQPEDFATYYCQQTNSWPLTFGGGTKVEIK

SEQ ID NO: 16286 - protein, 107 aa, Artificial Sequence
  source: /note="Description of Artificial Sequence: Synthetic polypeptide"
DIQLTQSPSSLSASVGDRVTITCRASQKISTNLHWYQQKPGKAPKILIYYASQTISGVPSRFSGSGSGTDFTLTISSLQPEDFATYYCQQTNSWPLTFGGGTKVEIK

SEQ ID NO: 16287 - protein, 107 aa, Artificial Sequence
  source: /note="Description of Artificial Sequence: Synthetic polypeptide"
DIQLTQSPSSLSASVGDRVTITCRASQKISTNLHWYQQKPGKAPKLLIKYASQTISGVPSRFSGSGSGTDFTLTISSLQPEDFATYYCQQTNSWPLTFGGGTKVEIK

SEQ ID NO: 16288 - protein, 107 aa, Artificial Sequence
  source: /note="Description of Artificial Sequence: Synthetic polypeptide"
DIQLTQSPSSLSASVGDRVTITCRASQKISTNLHWYQQKPGKAPKILIKYASQTISGVPSRFSGSGSGTDFTLTISSLQPEDFATYYCQQTNSWPLTFGGGTKVEIK

SEQ ID NO: 16289 - protein, 214 aa, Artificial Sequence
  source: /note="Description of Artificial Sequence: Synthetic polypeptide"
DIQMTQSPSSLSASVGDRVTITCRASQKISTNLHWYQQKPGKAPKILIKYASQTISGVPSRFSGSGSGTDFTLTISSLQPEDFATYYCQQTNSWPLTFGGGTKVEIKRTVAAPSVFIFPPSDEQLKSGTASVVCLLNNFYPREAKVQWKVDNALQSGNSQESVTEQDSKDSTYSLSSTLTLSKADYEKHKVYACEVTHQGLSSPVTKSFNRGEC

SEQ ID NO: 16290 - protein, 107 aa, Homo sapiens
EIVLTQSPATLSLSPGERATLSCRASQSVSSYLAWYQQKPGQAPRLLIYDASNRATGIPARFSGSGSGTDFTLTISSLEPEDFAVYYCQQRSNWPPAFGQGTKVEIK

SEQ ID NO: 16291 - protein, 109 aa, Homo sapiens
SSELTQDPAVSVALGQTVRITCQGDSLRSYYATWYQQKPGQAPILVIYGENKRPSGIPDRFSGSSSGNTASLTITGAQAEDEADYYCKSRDGSGQHLVFGGGTKLTVLG

SEQ ID NO: 16292 - protein, 109 aa, Homo sapiens
SSELTQDPAVSVALGQTVRITCQGDSLRSYYASWYQQKPGQAPVLVIYGKNNRPSGIPDRFSGSSSGNTASLTITGAQAEDEADYYCNSRDNSDNRLIFGGGTKLTVLS

SEQ ID NO: 16293 - protein, 107 aa, Artificial Sequence
  source: /note="Description of Artificial Sequence: Synthetic polypeptide"
DIVMTQSHKFMSTSVGDRVSITCKASQDVGTAVAWYQQKPGQSPKLLIYWASTRHTGVPDRFTGSGSGTDFTLTISNVQSEDLADYFCQQYNSYPLTFGAGSKLELK

SEQ ID NO: 16294 - protein, 107 aa, Artificial Sequence
  source: /note="Description of Artificial Sequence: Synthetic polypeptide"
DIMMTQSHKFMSTSVGDRVSITCKASQDVGTAVAWYQQKPGQSPKLLIYWASTRHTGVPDRFTGSGSGTDFTLTISNVQSEDLADYFCQQYNSYPLTFGQGTKVEIK

SEQ ID NO: 16295 - protein, 447 aa, Artificial Sequence
  source: /note="Description of Artificial Sequence: Synthetic polypeptide"
QVQLVQSGAEVKKPGASVKVSCKASGYTFTSYWMYWVRQATGQGLEWMGRIDPNSGSTKYNEKFKNRFTISRDDSKNTAYLQMNSLKTEDTAVYYCARDYRKGLYAMDYWGQGTTVTVSSASTKGPSVFPLAPCSRSTSESTAALGCLVKDYFPEPVTVSWNSGALTSGVHTFPAVLQSSGLYSLSSVVTVPSSSLGTKTYTCNVDHKPSNTKVDKRVESKYGPPCPPCPAPEFLGGPSVFLFPPKPKDTLMISRTPEVTCVVVDVSQEDPEVQFNWYVDGVEVHNAKTKPREEQFNSTYRVVSVLTVLHQDWLNGKEYKCKVSNKGLPSSIEKTISKAKGQPREPQVYTLPPSQEEMTKNQVSLTCLVKGFYPSDIAVEWESNGQPENNYKTTPPVLDSDGSFFLYSRLTVDKSRWQEGNVFSCSVMHEALHNHYTQKSLSLSLGK

SEQ ID NO: 16296 - protein, 107 aa, Artificial Sequence
  source: /note="Description of Artificial Sequence: Synthetic polypeptide"
DIQMTQSPSSLSASVGDRVTITCRASQSISSYLNWYQQKPGKAPKLLIYAASSLQSGVPSRFSGSGSGTDFTLTISSLQPEDFATYYCQQYGRNPPTFGQGTKLEIK

SEQ ID NO: 16297 - protein, 107 aa, Artificial Sequence
  source: /note="Description of Artificial Sequence: Synthetic polypeptide"
DIQMTQSPSSLSASVGDRVTITCRASQSISSYLNWYQQKPGKAPKLLIYAASSLQSGVPSRFSGSGSGTDFTLTISSLQPEDFATYYCQQYGVYPFTFGQGTKLEIK

SEQ ID NO: 16298 - protein, 127 aa, Artificial Sequence
  source: /note="Description of Artificial Sequence: Synthetic polypeptide"
DIQMTQSPASLSASVGDTVTITCRASENIYSFLAWYHQKQGRSPQLLVYHAKTLAEGVPSRFSGSGSGTQFSLKINSLQAEDFGSYYCQHYYGSPLTFGAGTKLEVKRADAAPTVSIFPPSSEELSL

SEQ ID NO: 16299 - protein, 214 aa, Artificial Sequence
  source: /note="Description of Artificial Sequence: Synthetic polypeptide"
AIQLTQSPSSLSASVGDRVTITCRPSQGINWELAWYQQKPGKAPKLLIYDASSLEQGVPSRFSGSGSGTDFTLTISSLQPEDFATYYCQQFNSYPLTFGGGTKVEIKRTVAAPSVFIFPPSDEQLKSGTASVVCLLNNFYPREAKVQWKVDNALQSGNSQESVTEQDSKDSTYSLSSTLTLSKADYEKHKVYACEVTHQGLSSPVTKSFNRGEC

SEQ ID NO: 16300 - protein, 110 aa, Artificial Sequence
  source: /note="Description of Artificial Sequence: Synthetic polypeptide"
DIVLTQSPATLSLSPGERATLSCRASQFISSSYLSWYQQKPGQAPRLLIYGSSSRATGVPARFSGSGSGTDFTLTISSLEPEDFAVYYCQQLYSSPMTFGQGTKVEIKRT

SEQ ID NO: 16301 - protein, 215 aa, Artificial Sequence
  source: /note="Description of Artificial Sequence: Synthetic polypeptide"
DIVLTQSPATLSLSPGERATLSCRASQFISSSYLSWYQQKPGQAPRLLIYGSSSRATGVPARFSGSGSGTDFTLTISSLEPEDFAVYYCQQLYSSPMTFGQGTKVEIKRTVAAPSVFIFPPSDEQLKSGTASVVCLLNNFYPREAKVQWKVDNALQSGNSQESVTEQDSKDSTYSLSSTLTLSKADYEKHKVYACEVTHQGLSSPVTKSFNRGEC

SEQ ID NO: 16302 - protein, 106 aa, Artificial Sequence
  source: /note="Description of Artificial Sequence: Synthetic polypeptide"
DIQMTQSPSSLSASVGDRVTITCSASSSVSYMHWYQQKPGKAPKLLIYSTSNLASGVPSRFSGSGSGTDFTLTISSLQPEDFATYYCQQRSSYPPTFGQGTKVEIK

SEQ ID NO: 16303 - protein, 128 aa, Mus musculus
MHFQVQIFSFLLISASVIMSRGQIVLIQSPVIMSASPGEKVTITCSASSSVSYMHWFQQKPGTSPKLWIYSTSNLASGVPARFSGSGSGTSYSLTISRMEAEDAATYYCQQRSSYPPTFGAGTKLELK

SEQ ID NO: 16304 - protein, 145 aa, Homo sapiens
GLFEAATMKLPVRLLVLWIRETNGDVVMTQTPLTLSVTIGQPASISCKSSQSLLDSDGKTYLNWLLQRPGQSPKRLIYLVSKLDSGVPDRFTGSGSGTDFTLKISRVEAEDLGVYYCWQGTHFPFTFGSGTKLEIKRTDAAPTVS

SEQ ID NO: 16305 - protein, 126 aa, Homo sapiens
GLFEAATMEAPAQLTLSVTIGQPASISCKSSQSLLDSDGKTYLNWLLQRPGQSPKRLIYLVSKLDSGVPDRFTGSGSGTDFTLKISRVEAEDLGVYYCWQGTHFPFTFGSGTKLEIKRTDAAPTVS

SEQ ID NO: 16306 - protein, 146 aa, Homo sapiens
MGFKMESQAQVLMLLLLWVSGTCGDIVMSQSPSSLAVSVGEKVTMSCKSSQSLLYRSNQKNYLAWYQQKPGQSPKLLIYWASTRESGVPDRFTGSGSGTDFTLTISSVKAEDLAVYYCQQYYNYPRTFGGGTKLEIKRTDAAPTVS

SEQ ID NO: 16307 - protein, 113 aa, Artificial Sequence
  source: /note="Description of Artificial Sequence: Synthetic polypeptide"
DIVMTQSPDSLAVSLGERATINCKSSQSVLYSSNNKNYLAWYQQKPGQPPKLLIYWASTRESGVPDRFSGSGSGTDFTLTISSLQAEDVAVYYCQQYYSYPLTFGGGTKVEIK

SEQ ID NO: 16308 - protein, 113 aa, Homo sapiens
DIVMTQSPDSLAVSLGERATIHCKSSQSILYSSNNKNYLAWYQQKPGQPPKLLLYWASTREAGVPDRFSGGGSGTDFTLTISSLQPEDSATYYCQQYNTYPLTFGGGTKVEIK

SEQ ID NO: 16309 - protein, 107 aa, Mus musculus; identical to SEQ ID NO: 14457

SEQ ID NO: 16310 - protein, 107 aa, Mus musculus
DIQMTQSPSSLSASLGGKVTITCKASQDINKYIAWYQHKPGKGPRLFIHYTSKLQPGIPSRFSGSGSGRDYSFSISNLEPEDIATYYCLQYDNLLYTFGGGTKLEIK

SEQ ID NO: 16311 - protein, 107 aa, Mus musculus
DILMTQSPATLSVTPGETVSLSCRASQNTYKNLHWYQQKSHGTPKLLIKYASAPISGIPSRFTGSGSGTDYTLSINSVKPEDEGIYYCLQGYSMPWTFGGGTKLEIK

SEQ ID NO: 16312 - protein, 106 aa, Mus musculus
IQMTQSSSSLSVSLGDRVTITCKASEHINSWLAWYQQKPGNAPRLLISGATNLKTGVPSRFSGSASGKDYTLNITSLQTEDVATYYCQQYWGTPWTFGGGTKLEIK

SEQ ID NO: 16313 - protein, 112 aa, Mus musculus
DIVMTQAAPSVPVTPGESVSISCRSSKSLLHRNGNTYLYWFLQRPGQSPQLLIYRMSNLASGVPDRFSGSGSGTAFTLRISRVEAEDVGVYYCLQHLEYPYTFGSGTKLEIK

SEQ ID NO: 16314 - protein, 106 aa, Mus musculus
IQMTQSSSSLSVSLGDRVTITCKASVHINSWLAWYQQKPGNAPRLLISGATNLKTGVPSRFSGSASGKDYTLSITSLQTEDVATYYCQQYWDTPWTFGGGTKLEIK

SEQ ID NO: 16315 - protein, 106 aa, Mus musculus
IQMTQSSSSLSVSLGDRVTITCKASEHINSWLAWYQQKPGNAPRLLISGATNLKTGVPSRFSGSASGKDYTLSITSLQTEDVATYYCQQYWGTPWTFGGGTKLEIK

SEQ ID NO: 16316 - protein, 116 aa, Mus musculus
VQLQESGPGLVKPSQSLSLTCTVTGYSITSDYAWNWIRQFPGNKLEWMGYISYSGSTSYNPSLKSRISITRDTSKNQFFLQLNSVTTEDTATYYCARGGITRFAYWGQGTLVTVSA

SEQ ID NO: 16317 - protein, 91 aa, Mus musculus
DIQMTQSPSSLSASLGGKVTITCKASQDINKYIAWYQHKPGKGPRLFIHYTSKLQPGIPSRFSGEDIATYYCLQYDNLLYTFGGGTKLEIK

SEQ ID NO: 16318 - protein, 111 aa, Mus musculus
VQLQQSGAELVRPGASVKLSCTASGFNIKDDYMYWVKQRPEQGLEWIGRIDPANGNTKYAPKFQDKATITADTSSNTAYHLSSLTSEDTAVFYCAYRRAYWGQGTLVTVSA

SEQ ID NO: 16319 - protein, 106 aa, Mus musculus; identical to SEQ ID NO: 14459

SEQ ID NO: 16320 - protein, 112 aa, Mus musculus
EVQLQQSGTVLTRPGASVKMSCKASGYTFTNFWIHWVKQRPGQGLDWIGAIYPGNTNTDYNQKFQGKAKLTAVSSASTAYMELSSLTNEDSAVYYCTRGGAMDYWGQGTSVT

SEQ ID NO: 16321 - protein, 108 aa, Homo sapiens
SSELTQDPAVSVALGQTVRITCQGDSLRRYYASWYQQKPGQAPILVIYGKNNRPSGIPDRFSGSSSGNTASLTITGAQAEDEADYYCNSRDSSGNHLVFGGGTKLTVL

SEQ ID NO: 16322 - protein, 107 aa, Homo sapiens
DIQMTQSPSSLSASIGDRVTITCRASQGIRNDLGWYQQKPGKAPKRLIYAASSLQSGVPSRFSGSGSGPEFTLTISSLQPEDFATYYCLQHNSYPLTFGGGTKVEIK

SEQ ID NO: 16323 - protein, 107 aa, Homo sapiens
DIQMTQSPSSLSASVRDRVTITCRASQGIRNDLGWYQQKPGKAPKRLIYAASSLQSGVPSRFSGSGSGTEFTLTISSLQPEDFATYYCLQHNSYPLTFGGGTKVEIK

SEQ ID NO: 16324 - protein, 107 aa, Homo sapiens
DIQMTQSPSSLSASVGDRVTITCRASQGIRNDLTWYQQKPGKAPKRLIYAASSLQSGVPSRFSGSGSGTEFTLTISSLQPEDFATYYCLQHNSFPWTFGQGTKVEIK

SEQ ID NO: 16325 - protein, 114 aa, Homo sapiens
DVVMTQSPLSLPVTLGQPASISCRSSQSLVYSDGSTYLNWFQQRPGQSPRRLIYKVSNWDSGVPDRFSGSGSGTDFTLKISRVEAEDVGVYYCMQGSHWPREFTFGGGTKVEIK

SEQ ID NO: 16326 - protein, 107 aa, Homo sapiens
DIQMTQSPSSLSASVGDRVTITCRASQGIRNDLGWYQQKPGKAPKRLIYAASSLQSGVPSRFSGSGSGTEFTLTVSSLQPEDFATYYCLQHHSYPLTFGGGTKVQIN

SEQ ID NO: 16327 - protein, 107 aa, Homo sapiens
DIQMTQSPSSLSASVGDRVTITCRASQGIRNDLGWYQQKPGKAPKRLIYAASSLQSGVPSRFSGSGSGTEFTLTISSLQPEDFATYYCLQHNNYPLTFGGGTKVEIK

SEQ ID NO: 16328 - protein, 107 aa, Homo sapiens
DIQMTQSPSALSASVGDRVTITCRASQGIRNDLGWYQQKPGKAPKRLIYAASSLQSGVPSRFSGSGSGTEFTLTISSLQPEDFATYYCLQHKSYPLTFGGGTKVEIK

SEQ ID NO: 16329 - protein, 111 aa, Homo sapiens
DIVMTQSPLSLPVTPGEPASISCRSSQSLLHSNGYNYLDWYLQKPGQSPQLLIFLGSYRASGVPDRFSGSGSGTDFTLKISRVEAEDVGVYYCMQALQTWTFGQGTKVEIK

SEQ ID NO: 16330 - protein, 107 aa, Homo sapiens
DIQMTQSPSSLSASVGDRVTITCRASQGIRNDLGWYQQKPGKAPKRLISAASSLQGGVPSRFSGSGSGTEFTLTISSLQPEDFATYYCLQHNSYPLTFGGGTKVEIK

SEQ ID NO: 16331 - protein, 107 aa, Homo sapiens
DIQMTQSPSSLSASVGDRVTITCRASQDIRNDLGWYQQKPGKAPKRLIYAASSLQSGVPSRFSGSGSGPEFTLTISSLQPEDFATYYCLQHNSYPLTFGGGTKVEIK

SEQ ID NO: 16332 - protein, 106 aa, Homo sapiens
EIVMTQSPATLSVSPGERATLSCRASQSVTSNLAWYQQKPGQAPRLLIHGASIRATGLPARFSGSGSGTEFTLTISSLQSEDFAVYYCQQYNYWWTFGQGTKVEIK

SEQ ID NO: 16333 - protein, 106 aa, Homo sapiens
EIVMTQSPATLSVSPGERATLSCRASQSVSSNLAWYQQKPGQAPRLLIHGASIRATGLPARFSGSGSGTEFTLTISSLQSEDFAVYYCQQYNYWWTFGQGTKVEIK

SEQ ID NO: 16334 - protein, 107 aa, Homo sapiens
DIQMTQSPSSLSASVGDRVTITCRASQGIRNDLGWYQQKPGKAPKRLIYAASSLQSGVPSRFSGSGSGTEFTLTISSLQPEDFATYYCLQHNSYPRTFGQGTKVEIK

SEQ ID NO: 16335 - protein, 107 aa, Homo sapiens
DIQMTQSPSSLSASVGDRVTITCRASQGIRNDLGWYQQKPGKAPKRLIYAASSLHSGVPSRFSGSGSGTEFTLTISSLQPEDFATYYCLQHNSYPWTFGQGTKVEIK

SEQ ID NO: 16336 - protein, 107 aa, Homo sapiens
DIQMTQSPSSLSASVGDRVTITCRASQGIRNDLGWYQQKPGKAPKRLIYAASSLQSGVPSRFSGSGSGTEFTLTISSLQPEDFATYYCLQHCCYPLTFGGGTKVEIK

SEQ ID NO: 16337 - protein, 107 aa, Homo sapiens
DIQMTQSPSSLSASVGDRVTITCRASQGIRIDLGWYQQKPGKAPKRLIYAASTLQSGVPSRFSGSGSGTEFIFTISSLQPEDFASYYCLQHKSYPLTFGGGTKVEIK

SEQ ID NO: 16338 - protein, 125 aa, Homo sapiens
QVQLVESGGGVVQPGRSLRLSCAASGFTFSNHDIHWVRQAPGKGLEWVAVIWSDGSNKYYADSVKGRFTISRDNSKNTLYLQMNSLRAEDTAVYYCAREKMATIKGYYYYGMDVWGQGTTVTVSS

SEQ ID NO: 16339 - protein, 112 aa, Oryctolagus cuniculus
QSLEESGGRLVTPGTPLTLTCTVSGIDLSSNTMGWFRRAPGKGLEWIGIIISSGTTYYASWVKGRFTISKTSTTVDLKITRPTTEDTATYFCARGWYEFNLWGPGTLVTVSS

SEQ ID NO: 16340 - protein, 118 aa, Homo sapiens
QVQLVESGGDVVQPGRSLRLSCAASGFTFSSSGMHWVRQAPGKGLEWVAIIWYDGSNKYYADSVKGRFTISRDNSKNTLYLQMNSLRAEDTAVYYCARDDYYYGMDVWGQGTTVTVSS

SEQ ID NO: 16341 - protein, 121 aa, Homo sapiens
QVQLVESGGGVVQPGRSLRLSCAASGFTFSSYGMHWVRQAPGKGLEWVAVIWYDGNNKYYADSVKGRFTISRDNSKNTLYLQMNSLRAEDTAVYYCARESDYGGNPYFDYWGQGTLVTVSS

SEQ ID NO: 16342 - protein, 121 aa, Homo sapiens
QVQLVESGGGVVQPGRSLRLSCAASGFTFSSYGMNWVRQAPGKGLEWVAVIWYDGSNKYYGDSVKGRFTISRDNSKNTLYVQMNSLRAEDTAVYYCARESDYGGNPYFDYWGQGTLVTVSS

SEQ ID NO: 16343 - protein, 116 aa, Homo sapiens
EVQLVQSGAEVKKPGESLKISCKGSGYSFTSDWIGWVRQMPGKGLEWMGIIYPGDSDTRYSPSFQGQVTISADKSITTAYLQWSSLKASDTAMYYCARSGYGMDVWGQGTTVTVSS

SEQ ID NO: 16344 - protein, 122 aa, Homo sapiens
QVQLVQSGAEVKKPGASVKVSCKASGYTFTSYGISWVRQAPGQGLEWMGWISAYNVNTNYAQKLQGRVTMTTDTSTNTAYMELRSLRSDDTAVYYCARDPITETMEDYFDYWGQGTLVTVSS

SEQ ID NO: 16345 - protein, 115 aa, Homo sapiens
EVQLVESGGGLIQPGGSLRLSCAASGFTVSSNYMSWVRQAPGKGLEWVSVIYSGGGTYYADSVKGRFTISRDNSKNTLYLQMNSLRAEDTAVYYCARGPGSFDYWGQGTLVTVSS

SEQ ID NO: 16346 - protein, 123 aa, Homo sapiens
QVQLVESGGGVVQPGRSLRLSCAASGFTFSSYGMHWVRQAPGKGLEWVAVIWYDGSIKYYADSVKGRFTISRDNSKNTLYLQMNSLRAEDTAVYYCARERDSSGWYYYGMDVWGQGTTVTVSS

SEQ ID NO: 16347 - protein, 126 aa, Homo sapiens
QVQLVESGGGVVQPGRSLRLSCAASGFTFSNYGMHWVRQAPGKGLEWVAVIWYDGSNKYYADSVKGRFTISRDNSKNTLYLQMNSLRAEDTAVYYCAREGIAVAGPPYYYYGMDVWGQGTTVTVSS

SEQ ID NO: 16348 - protein, 123 aa, Homo sapiens
QVQLVESGGGVVQPGRSLRLSCAASGLIFSSYGMHWVRQAPGKGLEWVAVIWYDGSNKYYADSVKGRFTISRDNSKNTLYLQMNSLRAEDTAVYYCARERDSSGWYYYGMDVWGQGTTVTVSS

SEQ ID NO: 16349 - protein, 115 aa, Homo sapiens
EVQLVESGGGLIQPGGSLRLSCAASGFTVSSNYMSWVRQAPGKGLEWVSVIYSGGSTYYADSVKGRFTISRDNSKNTLYLQMNSLRAEDTAVYYCARGEGGMDVWGQGTTVTVSS

SEQ ID NO: 16350 - protein, 116 aa, Homo sapiens
QVQLVESGGGLVKPGGSLRLSCAASGFTFSDYYMSWIRQAPGKGLEWVSYISRSGSTIYYADSVKGRFTISRDNAKNSLYLQMNSLRAEDTAVYYCARSLGGMDVWGQGTTVTVSS

SEQ ID NO: 16351 - protein, 115 aa, Homo sapiens
EVQLVESGGGLIQPGGSLRLSCAASGFTVSSNYVNWVRQAPGKGLEWVSVIYNAGSAYYADSVKGRFTISRDNSKNTLFLQMNSLRAEDTAVYYCARGTGAFDYWGQGTLVTVSS

SEQ ID NO: 16352 - protein, 107 aa, Homo sapiens
DIQMTQSPSSLSASVGDRVTITCRTSQSISSYLNWYQQKPGKAPEVLIYAASNLQRGVPSRFSGSGSGTDFTLTISSLQPEDFATYYCQQSSSTLITFGQGTRLEIK

SEQ ID NO: 16353 - protein, 107 aa, Homo sapiens
DIQMTQSPSSLSASVGDRVTITCRTSQSISSYLNWYQQKPGKAPELLIYAAFNLQSGVPSRISGSGSGTDFTLTISSLHPEDFATYYCQQSSSTLITFGQGTRLEIK

SEQ ID NO: 16354 - protein, 110 aa, Homo sapiens
QSVLTQPPSMSAAPGQKVTISCSGSSSNIGNNYVSWYQQLPGIAPKLLIYDNNKRPSGIPDRFSGSKSGTSATLGITGLQTGDEADYYCGTWDSSLSAGVFGGGTKLTVL

SEQ ID NO: 16355 - protein, 111 aa, Homo sapiens
QSVLTQPPSVSGAPGQRVTISCTGSSSNIGAGYDVHWYQQFPGTAPKLLIQGNSNRPSGVPDRFSGSKSGTSASLAITGLQAEDEADYYCQSYDSSLSGSVFGGGTKLTVL

SEQ ID NO: 16356 - protein, 107 aa, Homo sapiens
DIQMTQSPSSLSASVGDRVTITCRASQGIRNDLGWYQQKPRKAPKRLIFAASSLQSGVPSRFSGSGSGPEFTLTISSLQPEDFATYYCLQHNSYPLTFGGGTKVEIK

SEQ ID NO: 16357 - protein, 107 aa, Homo sapiens
EIVMTQSPATLSVSPGERVTLSCRASQSATSNLAWYQQKPGQAPRLLIYGASTRATGIPARFSGSGSGTEFTLTISSLQSEDFAVYYCQQYNNWPFTFGQGTRLEIK

SEQ ID NO: 16358 - protein, 109 aa, Homo sapiens
DIQMTQSPSSLSASVGDRVTITCRASQGIRNDLGWFQQKPGKAPKRLIYAASNFLSGVPSRFSGSGSGTEFTLTISSLQPEDFTTYYCLQHNPYPPRLTFGGGTKVEIK

SEQ ID NO: 16359 - protein, 108 aa, Homo sapiens
SSELTQDPAVSVALGQTVRITCQGDSLRSYYASWYQQKPGQAPVLVIYGKNNRPSGIPDRFSGSSSENTASLTITGAQAEDEADYYCKSRDSSFNHLVFGGGTKLTVL

SEQ ID NO: 16360 - protein, 108 aa, Homo sapiens
SSELTQDPAVSVALGQTVRITCQGDILRSYYASWYQQKPGQAPVLVIYGKNNRPSGIPDRFSGSSSGNTASLTITGAQAEDEADYYCKSRDSSYNHLVFGGGTKLTVL

SEQ ID NO: 16361 - protein, 111 aa, Homo sapiens
QSVLTQPPSVSGAPGLRVTISCTGNSSNIGAGYDVHWYQQLPGTAPKLLIYGNSNRPSGVPDRFSGSKSGTSASLAITGLQAEDETDYYCQSYDSSLSGSVFGGGTKLTVL

SEQ ID NO: 16362 - protein, 108 aa, Homo sapiens
SSELTQDPAVSVALGQTVRITCQGDILRSYYASWYQQKPGQAPILVIYGKNNRPSGIPDRFSGSSSGNTASLTITGAQAEDEADYYCKSRDSSYNHLVFGGGTKLTVL

SEQ ID NO: 16363 - protein, 107 aa, Homo sapiens
DIQMTQSPSSLSASVGDRVTITCRASQGIRNDLGWYQQKPGKAPKRLIYAASSLQSGVPSRFSGSGSGTEFTLTISSLQPEDFATYYCLQHNSYPLTFGGGTKVEIK

SEQ ID NO: 16364 - protein, 110 aa, Homo sapiens
QSVLTQPPSASGTPGQRVTISCSGSSSNIGSNTVNWYQQLPGTAPKLLIYSNNQRPSGVPDRFSGSKSGTSASLAISGLQSEDEADYYCAAWDDSLNGPVFGGGTKLTVL

SEQ ID NO: 16365 - protein, 107 aa, Homo sapiens
EIVMTQSPATLSVSPGERATLSCRASQSVISNLAWYQQQPGQAPRLLIYGASTRATGFPARFSGSGSGTEFTLTISSLQSEDFAVYYCQQYNNWPLTFGGGTKVEIK

SEQ ID NO: 16366 - protein, 107 aa, Homo sapiens
DIQMTQSPSSLSTSVGDRVTITCRASQGIRNDLGWYQQKPGKAPKRLIYAASSLQSGVPSRFSGSGSGTEFTLTISSLQPEDFATYYCLQHNSYPLTFGGGTKVEIK

SEQ ID NO: 16367 - protein, 107 aa, Homo sapiens
DIQMTQSPSSLSASVGDRVTITCRASQGIRNDLGWYQQKPGKAPKRLIYAASSLQSGVPSRFSGSGSGTEFTLTISSLQPEDFATYYCLQHMSLPLTFGGGTKVEIK

SEQ ID NO: 16368 - protein, 107 aa, Homo sapiens
EIVMTQSPATLSVSPGERATLSCRASQSVTSNLAWYQQKPGQAPRLLIYGASTRATGIPARFSGSGSGTEFTLTISSLPSEDFAVYYCQQYHTWPFTFGPGTKVDIK

SEQ ID NO: 16369 - protein, 107 aa, Homo sapiens
EIVMTQSPSTLSVSPGERATLSCRASQSVTSNLAWYQQKPGQAPRLLIYGASTRATGIPARFSGSGSGTEFTLTISSLPSEDFAVYYCQQYHTWPFTFGPGTKVDIK

SEQ ID NO: 16370 - protein, 107 aa, Homo sapiens
DIQMTQSPSSLSASVGDRVTITCRASQGIRHDLGWYQQKPGKAPERLIYGASSLQSGVPSRFSGSGSGTEFTLTISSLQPEDFATYYCLQHNSYPLTFGGGTKVEIK

SEQ ID NO: 16371 - protein, 107 aa, Homo sapiens
DIQMTQSPSSLSASVGDRVTITCRASQGIRNDLGWYQQKPGKAPKCLIYVASSLQSGVPSRFSGSGSGTEFTLTISSLQPEDFATYYCLQHNSYPLTFGGGTKVEIK

SEQ ID NO: 16372 - protein, 107 aa, Homo sapiens
DIQMTQSPSSLSASVGDRVTITCRASQGIRNDLGWYQQKPGKAPKCLIYVASSLQSGVPSRFSGSGSGTEFTLTISSLQPEDFATYYCLQHNSYPWTFGQGTKVEIK

SEQ ID NO: 16373 - protein, 107 aa, Homo sapiens
DIQMTQSPSSLSASVGDRVTITCRASQGISNYLAWYQQKPGKVPKFLIYAASTLQSGVPSRFSGSGSGTDFTLTVSSLQPEDVATYYCQMYNSVPFTFGPGTKVDIK

SEQ ID NO: 16374 - protein, 111 aa, Artificial Sequence
  source: /note="Description of Artificial Sequence: Synthetic polypeptide"
QSVLTQPPSASGTPGQRVTISCTGSSSNIGNNAVTWYQQLPGTAPKLLIYDDSHRPSGVPDRFSGSKSGTSASLAISGLRSEDEADYYCGTWDYSLSGYVFGGGTKLTVLG

SEQ ID NO: 16375 - protein, 111 aa, Artificial Sequence
  source: /note="Description of Artificial Sequence: Synthetic polypeptide"
QSVLTQPPSASGTPGQRVTISCTGSSSNIGSNNVTWYQQLPGTAPKLLIYSDSHRPSGVPDRFSGSKSGTSASLAISGLQSEDEADYYCGSWDYSLSAYVFGGGTKLTVLG

SEQ ID NO: 16376 - protein, 111 aa, Artificial Sequence
  source: /note="Description of Artificial Sequence: Synthetic polypeptide"
QSVLTQPPSASGTPGQRVTISCTGSSSNIGSNYVSWYQQLPGTAPKLLIYADSQRPSGVPDRFSGSKSGTSASLAISGLRSEDEADYYCGTWDYSLSGYVLGGGTKLTVLG

SEQ ID NO: 16377 - protein, 111 aa, Artificial Sequence
  source: /note="Description of Artificial Sequence: Synthetic polypeptide"
QSVLTQPPSASGAPGQRVTISCSGSSSNIGSNDVSWYQQLPGTAPKLLIYADSNRPSGVPDRFSGSKSGTSASLAISGLRSEDEADYYCGSWDYSLSGYVFGGGTKLTVLG

SEQ ID NO: 16378 - protein, 111 aa, Artificial Sequence
  source: /note="Description of Artificial Sequence: Synthetic polypeptide"
QSVLTQPPSSSGTPGQRVTISCTGSSSNIGSNAVTWYQQLPGTAPKLLIYDDNHRPSGVPDRFSGSKSGTSASLAISGLRSEDEADYYCGAWDYSLNAYVFGGGTKLTVLG

SEQ ID NO: 16379 - protein, 111 aa, Artificial Sequence
  source: /note="Description of Artificial Sequence: Synthetic polypeptide"
QSVLTQPPSASGTPGQRVIISCSASSSNIGSNAVYWYQQLPGTAPKLLIYSDNQRPSGVPDRFSGSKSGTSASLAISGLRSEDEADYYCGSWDYSLSAYVFGGGTKLTVLG

SEQ ID NO: 16380 - protein, 111 aa, Artificial Sequence
  source: /note="Description of Artificial Sequence: Synthetic polypeptide"
QSVLTQPPSLSGTPGQRVTISCTGSSSNIGSNSVSWYQQLPGTAPKLLIYDDNNRPSGVPDRFSGSKSGTSASLAISGLRSEDEADYYCGAWDYSLSAYVFGGGTKLTVLG

SEQ ID NO: 16381 - protein, 111 aa, Artificial Sequence
  source: /note="Description of Artificial Sequence: Synthetic polypeptide"
QSVLTQPPSPSGTPGQRVTISCTGSSSNIGNYYVYWYQQLPGTAPKLLIYANSHRPSGVPDRFSGSKSGTSASLAISGLRSEDEADYYCGSWDDSLSAYVFGGGTKLTVLG

SEQ ID NO: 16382 - protein, 107 aa, Homo sapiens; identical to SEQ ID NO: 10153

SEQ ID NO: 16383 - protein, 107 aa, Mus musculus
DIVMTQSHKFMSTSVGDRVSFTCKASQDVFTAVAWYQQKPGQSPKLLIYWASTRRTGVPDRFTGSGSGTDYTLTISSVQAEDLALYYCQQHFSTPPTFGGGTKLEIK

SEQ ID NO: 16384 - protein, 108 aa, Homo sapiens
SYELTQPPSVSVSPGQAARITCSGDALPQKYVFWYQQKSGQAPVLVIYEDSKRPSGIPERFSGSSSGTMATLTISGAQVEDEADYYCYSTDRSGNHRVFGGGTRLTVL

SEQ ID NO: 16385 - protein, 107 aa, Homo sapiens
DIQMTQSPSSVSASVGDRVTITCRASQGIRSWLAWYQQKPGKAPKLLIYAISRLQSGVPSRFSGSGSGTDFTLTISSLQPEDFATYYCQQANSFPLTFGGGTKVEIK

SEQ ID NO: 16386 - protein, 107 aa, Homo sapiens
DIQMTQSPSSVSASVGDRVTITCRASQGISSWLAWYQQKSGKAPKLLIYAASGLQSGVPSRFSGSGSGTDFTLTISSLQPEDLATYYCQQSHSLPPTFGQGTKVEIK

SEQ ID NO: 16387 - protein, 107 aa, Mus musculus
DIVLTQSPATLSVTPGDRVSLSCRASQRIYNYLHWYQQKSHESPRLLIKYASQSISGIPSRFSGSGSGTDFILTINSVETEDFGMYFCQQSNSWPLTFGAGTKLELR

SEQ ID NO: 16388 - protein, 106 aa, Mus musculus
QIVLTQSPAIMSASPGEKVTMTCSASSSVSYMHWYQQKSGTSPKRLIYDTSKLASGVPARFSGSGSGTSYSLTISSMEAEDAATYYCQQWNSNPPTFGAGTKLELK

SEQ ID NO: 16389 - protein, 107 aa, Artificial Sequence
  source: /note="Description of Artificial Sequence: Synthetic polypeptide"
DIQMTQSPSSLSASVGDRVTITCRASQDIGNYLAWYQQKPGKVPKLLIYYTSTLQSGVPSRFSGSGSGTDFTLTISSLQPEDVATYYCQHYNTVPPTFGGGTKVEIK

SEQ ID NO: 16390 - protein, 112 aa, Artificial Sequence
  source: /note="Description of Artificial Sequence: Synthetic polypeptide"
DIVMTQSPLSLPVTPGEPASISCRSSKSLLHSNGITYLDWYLQKPGQSPQLLIYQMSNLASGVPDRFSSSGSGTDFTLRISRVEAEDVGVYYCAQNLELPYTFGGGTKLEIK

SEQ ID NO: 16391 - protein, 616 aa, Artificial Sequence
  source: /note="Description of Artificial Sequence: Synthetic polypeptide"
LEEKKVCQGTSNKLTQLGTFEDHFLSLQRMFNNCEVVLGNLEITYVQRNYDLSFLKTIQEVAGYVLIALNTVERIPLENLQIIRGNMYYENSYALAVLSNYDANKTGLKELPMRNLQEILHGAVRFSNNPALCNVESIQWRDIVSSDFLSNMSMDFQNHLGSCQKCDPSCPNGSCWGAGEENCQKLTKIICAQQCSGRCRGKSPSDCCHNQCAAGCTGPRESDCLVCRKFRDEATCKDTCPPLMLYNPTTYQMDVNPEGKYSFGATCVKKCPRNYVVTDHGSCVRACGADSYEMEEDGVRKCKKCEGPCRKVCNGIGIGEFKDSLSINATNIKHFKNCTSISGDLHILPVAFRGDSFTHTPPLDPQELDILKTVKEITGFLLIQAWPENRTDLHAFENLEIIRGRTKQHGQFSLAVVSLNITSLGLRSLKEISDGDVIISGNKNLCYANTINWKKLFGTSQKTKIISNRGENSCKATGQVCHALCSPEGCWGPEPKDCVSCNVSRGRECVDKCNILEGEPREFVENSECIQCHPECLPQMNITCTGRGPDNCIQCAHYIDGPHCVKTCPAGVMGENNTLVWKYADAGHVCHLCHPNCTYGCTGPGLEGCNGPKIPS

SEQ ID NO: 16392 - protein, 133 aa, Mus musculus
MESQTQVLISLLFWVSGTCGDIVMTQSPSSLSVSAGEKVTMTCKSSQSLLNSGNQQNYLAWYQQKPGQPPKLLIYGASTRESGVPDRFTGSGSGTDFTLTINSVQAEDLAVYYCQSDHIYPYTFGGGTKLEIK

SEQ ID NO: 16393 - protein, 113 aa, Mus musculus
DIVMTQSPDSLAVSLGERATINCKSSQSLLNSGNQQNYLAWYQQKPGQPPKLLIYGASTRESGVPDRFSGSGSGTDFTLTISSLQAEDVAVYYCQSDHIYPYTFGQGTKLEIK

SEQ ID NO: 16394 - protein, 113 aa, Artificial Sequence
  source: /note="Description of Artificial Sequence: Synthetic polypeptide"
DIVMTQSPDSLAVSLGERVTINCKSSQSLLNSGNQQNYLAWYQQKPGQPPKLLIYGASTRESGVPDRFSGSGSGTDFTLTISSVQAEDVAVYYCQSDHIYPYTFGQGTKLEIK

SEQ ID NO: 16395 - protein, 113 aa, Artificial Sequence
  source: /note="Description of Artificial Sequence: Synthetic polypeptide"
DIVMTQSPDSLAVSAGERVTMNCKSSQSLLNSGNQQNYLAWYQQKPGQPPKLLIYGASTRESGVPDRFSGSGSGTDFTLTISSVQAEDVAVYYCQSDHIYPYTFGQGTKLEIK

SEQ ID NO: 16396 - protein, 108 aa, Artificial Sequence
  source: /note="Description of Artificial Sequence: Synthetic polypeptide"
DIQMTQSPSSLSASVGDRVTITCSASQDISNYLNWYQQKPGKAPKVLIYFTSSLHSGVPSRFSGSGSGTDFTLTISSLQPEDFATYYCQQYSTVPWTFGQGTKVEIKR

SEQ ID NO: 16397 - protein, 237 aa, Artificial Sequence
  source: /note="Description of Artificial Sequence: Synthetic polypeptide"
MKKNIAFLLASMFVFSIATNAYADIVMTQSQKFMSTSVGDRVSVTCKASQNVGTNVAWYQQKPGQSPKALIYSSSYRYSGVPDRFTGSGSGTDFTLTISHVQSEDLADYFCQQYNIYPLTFGPGTKLELRRAVAAPSVFIFPPSDEQLKSGTASVVCLLNNFYPREAKVQWKVDNALQSGNSQESVTEQDSKDSTYSLSSTLTLSKADYEKHKVYACEVTHQGLSSPVTKSFNRGEC

SEQ ID NO: 16398 - protein, 80 aa, Artificial Sequence
  source: /note="Description of Artificial Sequence: Synthetic polypeptide"
DIQMTQSPSSLSASVGDRVTITCWYQQKPGKAPKLLIYGVPSRFSGSGSGTDFTLTISSLQPEDFATYYCFGQGTKVEIK

SEQ ID NO: 16399 - protein, 80 aa, Artificial Sequence
  source: /note="Description of Artificial Sequence: Synthetic polypeptide"
DIVMTQSPLSLPVTPGEPASISCWYLQKPGQSPQLLIYGVPDRFSGSGSGTDFTLKISRVEAEDVGVYYCFGQGTKVEIK

SEQ ID NO: 16400 - protein, 80 aa, Artificial Sequence
  source: /note="Description of Artificial Sequence: Synthetic polypeptide"
EIVLTQSPGTLSLSPGERATLSCWYQQKPGQAPRLLIYGIPDRFSGSGSGTDFTLTISRLEPEDFAVYYCFGQGTKVEIK

SEQ ID NO: 16401 - protein, 80 aa, Artificial Sequence
  source: /note="Description of Artificial Sequence: Synthetic polypeptide"
DIVMTQSPDSLAVSLGERATINCWYQQKPGQPPKLLIYGVPDRFSGSGSGTDFTLTISSLQAEDVAVYYCFGQGTKVEIK

SEQ ID NO: 16402 - protein, 334 aa, Artificial Sequence
  source: /note="Description of Artificial Sequence: Synthetic polypeptide"
LADIQMTQTTSSLSASLGDRVTISCRTSQDIGNYLNWYQQKPDGTVKLLIYYTSRLHSGVPSRFSGSGSGTDFSLTINNVEQEDVATYFCQHYNTVPPTFGGGTKLEIKRTVAAPDIVMTQAAFSNPVTLGTSASISCRSSKSLLHSNGITYLYWYLQKPGQSPQLLIYQMSNLASGVPDRFSSSGSGTDFTLRISRVEAEDVGVYYCAQNLELPYTFGGGTKLEIKRTVAAPSVFIFPPSDEQLKSGTASVVCLLNNFYPREAKVQWKVDNALQSGNSQESVTEQDSKDSTYSLSSTLTLSKADYEKHKVYACEVTHQGLSSPVTKSFNRGEC

SEQ ID NO: 16403 - protein, 334 aa, Artificial Sequence
  source: /note="Description of Artificial Sequence: Synthetic polypeptide"
LADIVMTQAAFSNPVTLGTSASISCRSSKSLLHSNGITYLYWYLQKPGQSPQLLIYQMSNLASGVPDRFSSSGSGTDFTLRISRVEAEDVGVYYCAQNLELPYTFGGGTKLEIKRTVAAPDIQMTQTTSSLSASLGDRVTISCRTSQDIGNYLNWYQQKPDGTVKLLIYYTSRLHSGVPSRFSGSGSGTDFSLTINNVEQEDVATYFCQHYNTVPPTFGGGTKLEIKRTVAAPSVFIFPPSDEQLKSGTASVVCLLNNFYPREAKVQWKVDNALQSGNSQESVTEQDSKDSTYSLSSTLTLSKADYEKHKVYACEVTHQGLSSPVTKSFNRGEC

SEQ ID NO: 16404 - protein, 111 aa, Artificial Sequence
  source: /note="Description of Artificial Sequence: Synthetic polypeptide"
DIVMTQSPDSLAVSLGERATISCRASESVDNYGISFMKWFQQKPGQPPKLLIYAASNQGSGVPDRFSGSGSGTDFTLTISSLQAEDVAVYYCQQSKEVPWTFGGGTKVEIK

SEQ ID NO: 16405 - protein, 113 aa, Artificial Sequence
  source: /note="Description of Artificial Sequence: Synthetic polypeptide"
DIVMTQTPSSVTASAGEKVTINCKSSQSVLLSSNQKNYLAWYQQRLGQSPRLLIYWASTRESGVPDRFSGSGSTTDFTLTISSFQPEDAAVYYCQQGVSFPLTFGQGTKVELK

SEQ ID NO: 16406 - protein, 110 aa, Artificial Sequence
  source: /note="Description of Artificial Sequence: Synthetic polypeptide"
QSALTQPPSVSGSPGKTVTISCTGTNSDVGYGNYVSWYQQLPGMAPKLLIYDVNRRASGIADRFSGSKSGNTASLTISGLQSEDEGDYHCASYRSANNAVFGGGTHLFVL

SEQ ID NO: 16407 - protein, 110 aa, Artificial Sequence
  source: /note="Description of Artificial Sequence: Synthetic polypeptide"
QSALTQPPSVSGTLGKTVTISCAGTSSDIGNYNYVSWYQQLPGTAPKLLIYEVNKRPSGIPDRFSGSKSGNTASLSISGLQSEDEADYYCASYRSSNNVVFGGGTKLTVL

SEQ ID NO: 16408 - protein, 110 aa, Artificial Sequence
  source: /note="Description of Artificial Sequence: Synthetic polypeptide"
QSVLTQPPSVSGTLGKTVTISCAGTSSDIGDYNYVSWYQQLPGTAPKLLIYDVNKRASGIPDRFSGSKSGNTASLSISGLQSEDEADYYCASYRSRNDYAFGGGTKLTVL

SEQ ID NO: 16409 - protein, 110 aa, Artificial Sequence
  source: /note="Description of Artificial Sequence: Synthetic polypeptide"
QAVLTQPPSVSGTLGKTLTISCAGTSSDVGYGNYVSWYQQLPGTAPKLLIYAVSTRASGIPDRFSGSKSGNTASLTISGLQSEDEADYYCASYRSSNNYAFGAGTKLTVL

SEQ ID NO: 16410 - protein, 111 aa, Artificial Sequence
  source: /note="Description of Artificial Sequence: Synthetic polypeptide"
QAGLTQLSSMSGSPGQTVTITCTGSSSNIGGGYYLSWYQHLPGTAPKLLIYSNINRASGVPDRFSGSTSGISASLTITGLQAEDEADYYCSSWDDSVSGPVFGGGTSLTVL

SEQ ID NO: 16411 - protein, 113 aa, Artificial Sequence
  source: /note="Description of Artificial Sequence: Synthetic polypeptide"
DIVMTQTPTSVTASAGDKVTINCKSSQSVLFSSNQKNYLAWYQQRLGQSPRLLIYWASIRESGVPDRFSGSGSATDFTLTISNFQPEDAAVYYCQQGYSFPYSFGSGTRLEIR

SEQ ID NO: 16412 - protein, 106 aa, Mus musculus
QIVLIQSPVIMSASPGEKVTITCSASSSVSYMHWFQQKPGTSPKLWIYSTSNLASGVPARFSGSGSGTSYSLTISRMEAEDAATYYCQQRSSYPPTFGAGTKLELK

SEQ ID NO: 16413 - protein, 112 aa, Artificial Sequence
  source: /note="Description of Artificial Sequence: Synthetic polypeptide"
DVLMTQTPLSLPVSLGDPASISCRSSQSIVHSNVNTYLEWYLQKPGQSPRLLIYKVSNRFSGVPDRFSGSGAGTDFTLRISRVEAEDLGIYYCFQGSHVPPTFGGGTKLEIK

SEQ ID NO: 16414 - protein, 109 aa, Artificial Sequence; identical to SEQ ID NO: 16292
  source: /note="Description of Artificial Sequence: Synthetic polypeptide"

SEQ ID NO: 16415 - protein, 107 aa, Artificial Sequence
  source: /note="Description of Artificial Sequence: Synthetic polypeptide"
DIQMTQSPSSLSASVGDRVTITCRASQGISSWLAWYQQKPEKAPKSLIYAASSLQSGVPSRFSGSGSGTDFTLTISSLQPEDFATYYCQQYNSYPPTFGPGTKVDIK

SEQ ID NO: 16416 - protein, 113 aa, Artificial Sequence
  source: /note="Description of Artificial Sequence: Synthetic polypeptide"
DIELTQTPLSLPVSLGDQASISCRSSQSIVHSNGNTYLEWYLQKPGQSPKLLIYKVSNRFSGVPDRFSGSGSGTDFTLKISRVEAEDLGVYYCFQGSHVPYTFGGGTKLEIKR

SEQ ID NO: 16417 - protein, 107 aa, Artificial Sequence [sequence omitted]

SEQ ID NO: 16418 - protein, 136 aa, Artificial Sequence
  source: /note="Description of Artificial Sequence: Synthetic polypeptide"
ASVGDRVTFTCRASQDIRRDLGWYQQKPGKAPKRLIYAASRLQSGVPSRFSGSGSGTEFTLTISSLQPEDFATYYCLQHNNYPRTFGQGTEVEIIRTVAAPSVFIFPPSDEQLKSGTASVVCLLNNFYPREAKVQW

SEQ ID NO: 16419 - protein, 100 aa, Artificial Sequence
  source: /note="Description of Artificial Sequence: Synthetic polypeptide"
SSLSASVGDRVTFTCRASQDIRRDLGWYQQKPGKAPKRLIYAASRLQSGVPSRFSGSGSGTEFTLTISSLQPEDFATYYCLQHNNYPRTFGQGTEVEIIR

SEQ ID NO: 16420 - protein, 107 aa, Artificial Sequence
  source: /note="Description of Artificial Sequence: Synthetic polypeptide"
DIQMTQSPSSLSASVGDRVTITCRASQGIRSDLGWFQQKPGKAPKRLIYAASKLHRGVPSRFSGSGSGTEFTLTISRLQPEDFATYYCLQHNSYPLTFGGGTKVEIK

SEQ ID NO: 16421 - protein, 92 aa, Artificial Sequence
  source: /note="Description of Artificial Sequence: Synthetic polypeptide"
GDRVTITCRASQSISTFLNWYQQKPGKAPKLLIHVASSLQGGVPSRFSGSGSGTDFTLTISSLQPEDFATYYCQQSYNAPLTFGGGTKVEIK

SEQ ID NO: 16422 - protein, 91 aa, Artificial Sequence
  source: /note="Description of Artificial Sequence: Synthetic polypeptide"
RATLSCRASQSVRGRYLAWYQQKPGQAPRLLIYGASSRATGIPDRFSGSGSGTDFTLTISRLEPEDFAVFYCQQYGSSPRTFGQGTKVEIK

SEQ ID NO: 16423 - protein, 236 aa, Artificial Sequence
  source: /note="Description of Artificial Sequence: Synthetic polypeptide"
MDMRVPAQLLGLLLLWFPGARCDIQMTQSPSSLSASVGDRVTITCRASQGIRNDLGWYQQKPGKAPKRLIYAASSLQSGVPSRFSGSGSGTEFTLTISSLQPEDFATYYCLQHNSYPWTFGQGTKVEIKRTVAAPSVFIFPPSDEQLKSGTASVVCLLNNFYPREAKVQWKVDNALQSGNSQESVTEQDSKDSTYSLSSTLTLSKADYEKHKVYACEVTHQGLSSPVTKSFNRGEC

SEQ ID NO: 16424 - protein, 236 aa, Artificial Sequence
  source: /note="Description of Artificial Sequence: Synthetic polypeptide"
MDMRVPAQLLGLLLLWFPGARCDIQMTQSPSSLSASVGDRVTFTCRASQDIRRDLGWYQQKPGKAPKRLIYAASRLQSGVPSRFSGSGSGTEFTLTISSLQPEDFATYYCLQHNNYPRTFGQGTEVEIIRTVAAPSVFIFPPSDEQLKSGTASVVCLLNNFYPREAKVQWKVDNALQSGNSQESVTEQDSKDSTYSLSSTLTLSKADYEKHKVYACEVTHQGLSSPVTKSFNRGEC

SEQ ID NO: 16425 - protein, 236 aa, Artificial Sequence
  source: /note="Description of Artificial Sequence: Synthetic polypeptide"
MDMRVPAQLLGLLLLWFPGARCDIQMTQSPSSLSASVGDRVTITCRASQGIRNDLGWYQQKPGKAPKRLIYAASSLQSGVPSRFSGSGSGTEFTLTISSLQPEDFATYYCLQHNSYPYTFGQGTKLEIKRTVAAPSVFIFPPSDEQLKSGTASVVCLLNNFYPREAKVQWKVDNALQSGNSQESVTEQDSKDSTYSLSSTLTLSKADYEKHKVYACEVTHQGLSSPVTKSFNRGEC

SEQ ID NO: 16426 - protein, 236 aa, Artificial Sequence
  source: /note="Description of Artificial Sequence: Synthetic polypeptide"
MDMRVPAQLLGLLLLWFPGARCDIQMTQFPSSLSASVGDRVTITCRASQGIRNDLGWYQQKPGKAPKRLIYAASRLHRGVPSRFSGSGSGTEFTLTISSLQPEDFATYYCLQHNSYPCSFGQGTKLEIKRTVAAPSVFIFPPSDEQLKSGTASVVCLLNNFYPREAKVQWKVDNALQSGNSQESVTEQDSKDSTYSLSSTLTLSKADYEKHKVYACEVTHQGLSSPVTKSFNRGEC

SEQ ID NO: 16427 - protein, 108 aa, Artificial Sequence
  source: /note="Description of Artificial Sequence: Synthetic polypeptide"
DIQMTQSPSSLSASVGDRVTITCRASQDIRRDLGWYQQKPGKAPKRLIYAASRLQSGVPSRFSGSGSGTEFTLTISSLQPEDFATYYCLQHNNYPRTFGQGTKVEIKR

SEQ ID NO: 16428 - protein, 128 aa, Homo sapiens; identical to SEQ ID NO: 9996

SEQ ID NO: 16429 - protein, 128 aa, Homo sapiens; identical to SEQ ID NO: 9997

SEQ ID NO: 16430 - protein, 128 aa, Homo sapiens; identical to SEQ ID NO: 9998

SEQ ID NO: 16431 - protein, 128 aa, Homo sapiens; identical to SEQ ID NO: 9999

SEQ ID NO: 16432 - protein, 123 aa, Unknown
  source: /note="Description of Unknown: rabbit polypeptide"
MDMRAPTQLLGLLLLWLPGATFAQVLTQTPSSVSAAVGGTVTINCQSSQSVYSDWLSWYQQKGGQPPRQLIYEASKLASGVPSRFSGSGSGTQFTLTINDVQCDDAATYYCLASYDCTRADCL

SEQ ID NO: 16433 - protein, 123 aa, Unknown
  source: /note="Description of Unknown: rabbit polypeptide"
MDMRAPTQLLGLLLLWLPGATFAQVLTQTPSPVSAAVGSTVTIKCQSSPSVYSNYLSWYQQKSGQPPKQLIYDASHLASGVPSRFSGSGSGTQFTLTISGVQCDDAATYYCLGSYDCSSVDCH

SEQ ID NO: 16434 - protein, 234 aa, Homo sapiens
MVLQTQVFISLLLWISGAYGDILLTQSPVILSVSPGERVSFSCRASQSIGTNIHWYQQRTNGSPRLLIKYASESISGIPSRFSGSGSGTDFTLSINSVESEDIADYYCQQNNNWPTTFGAGTKLELKRTVAAPSVFIFPPSDEQLKSGTASVVCLLNNFYPREAKVQWKVDNALQSGNSQESVTEQDSKDSTYSLSSTLTLSKADYEKHKVYACEVTHQGLSSPVTKSFNRGEC

SEQ ID NO: 16435 - protein, 214 aa, Artificial Sequence
  source: /note="Description of Artificial Sequence: Synthetic polypeptide"
DIQMTQSPSSLSASVGDRVTITCRASQGISNYLAWYQQKPGKVPKLLIYAASTLQSGVPSRFSGSGSGTDFTLTISSLQPEDVATYYCQKYNSALLTFGGGTKVEIKRTVAAPSVFIFPPSDEQLKSGTASVVCLLNNFYPREAKVQWKVDNALQSGNSQESVTEQDSKDSTYSLSSTLTLSKADYEKHKVYACEVTHQGLSSPVTKSFNRGEC

SEQ ID NO: 16436 - protein, 214 aa, Artificial Sequence
  source: /note="Description of Artificial Sequence: Synthetic polypeptide"
DIQMTQSPSSLSASVGDRVTITCRASQDIRYYLNWYQQKPGKAPKLLIYVASSLQSGVPSRFSGSGSGTEFTLTVSSLQPEDFATYYCLQVYSTDNAFGQGTKVEIKRTVAAPSVFIFPPSDEQLKSGTASVVCLLNNFYPREAKVQWKVDNALQSGNSQESVTEQDSKDSTYSLSSTLTLSKADYEKHKVYACEVTHQGLSSPVTKSFNRGEC

SEQ ID NO: 16437 - DNA, 645 bp, Artificial Sequence
  source: /note="Description of Artificial Sequence: Synthetic polynucleotide"
gacatccagatgacccagtctccatcttccctgtctgcatctgtaggggacagagtcaccatcacttgcagggcaagtcaggacattaggtattatttaaattggtatcagcagaaaccaggaaaagctcctaagctcctgatctatgttgcatccagtttgcaaagtggggtcccatcaaggttcagcggcagtggatctgggacagagttcactctcaccgtcagcagcctgcagcctgaagattttgcgacttattactgtctacaggtttatagtacccctcggacgttcggccaagggaccaaggtggaaatcaaacgtacggtggctgcaccatctgtcttcatcttcccgccatctgatgagcagttgaaatctggaactgcctctgttgtgtgcctgctgaataacttctatcccagagaggccaaagtacagtggaaggtggataacgccctccaatcgggtaactcccaggagagtgtcacagagcaggacagcaaggacagcacctacagcctcagcagcaccctgacgctgagcaaagcagactacgagaaacacaaagtctacgcctgcgaagtcacccatcagggcctgagctcgcccgtcacaaagagcttcaacaggggagagtgttga

SEQ ID NO: 16438 - protein, 240 aa, Artificial Sequence
  source: /note="Description of Artificial Sequence: Synthetic polypeptide"
MESQTQVLMSLLFWVSGTCGDIVMTQSPSSLTVTAGEKVTMSCKSSQSLLNSGNQKNYLTWYQQKPGQPPKLLIYWASTRESGVPDRFTGSGSGTDFTLTISSVQAEDLAVYYCQNDYSYPYTFGGGTKLEIKRTVAAPSVFIFPPSDEQLKSGTASVVCLLNNFYPREAKVQWKVDNALQSGNSQESVTEQDSKDSTYSLSSTLTLSKADYEKHKVYACEVTHQGLSSPVTKSFNRGEC

SEQ ID NO: 16439 - protein, 234 aa, Artificial Sequence
  source: /note="Description of Artificial Sequence: Synthetic polypeptide"
MMSSAQFLGLLLLCFQGTRCDIQMTQTTSSLSASLGDRVTISCRSSQDIRNYLNWYQQKPDGTVKLLIYYTSRSHSGVPSRFSGSGSGTDYSLTISNLEQEDIATYFCQQGNMFPFTFGGGTKLEIKRTVAAPSVFIFPPSDEQLKSGTASVVCLLNNFYPREAKVQWKVDNALQSGNSQESVTEQDSKDSTYSLSSTLTLSKADYEKHKVYACEVTHQGLSSPVTKSFNRGEC

SEQ ID NO: 16440 - protein, 218 aa, Artificial Sequence
  source: /note="Description of Artificial Sequence: Synthetic polypeptide"
NIVLTQSPASLAVSLGQRATISCRASESVESYGNSFIYWYQQKPGQAPKLLIYLASNLASGVPARFSGSGSRTDFTLTIDPVEADDAATYYCQQNNEDPYTFGGGTKLEIKRTVAAPSVFIFPPSDEQLKSGTASVVCLLNNFYPREAKVQWKVDNALQSGNSQESVTEQDSKDSTYSLSSTLTLSKADYEKHKVYACEVTHQGLSSPVTKSFNRGEC

SEQ ID NO: 16441 - protein, 109 aa, Artificial Sequence
  source: /note="Description of Artificial Sequence: Synthetic polypeptide"
DIQMTQSPSSLSASVGDRVTITCRASQSISNYLAWYQQKPGKAPKLLIYAASSLESGVPSRFSGSGSGTDFTLTISSLQPEDFATYYCQQYNSLPWTFGQGTKVEIKRT

SEQ ID NO: 16442 - protein, 105 aa, Homo sapiens
QPKAAPSVTLFPPSSEELQANKATLVCLISDFYPGAVTVAWKADSSPVKAGVETTTPSKQSNNKYAASSYLSLTPEQWKSHRSYSCQVTHEGSTVEKTVAPTECS

SEQ ID NO: 16443 - protein, 106 aa, Homo sapiens; identical to SEQ ID NO: 4042

SEQ ID NO: 16444 - protein, 109 aa, Homo sapiens
TVLGQPKAAPSVTLFPPSSEELQANKATLVCLISDFYPGAVTVAWKADSSPVKAGVETTTPSKQSNNKYAASSYLSLTPEQWKSHRSYSCQVTHEGSTVEKTVAPTECS

SEQ ID NO: 16445 - protein, 115 aa, Artificial Sequence [sequence omitted]

SEQ ID NO: 16446 - protein, 115 aa, Artificial Sequence [sequence omitted]

SEQ ID NO: 16447 - protein, 117 aa, Artificial Sequence
  source: /note="Description of Artificial Sequence: Synthetic polypeptide"
AVQLVESGGGLVQGGGSLRLACAASERIFDLNLMGWYRQGPGNERELVATCITVGDSTNYADSVKGRFTISMDYTKQTVYLHMNSLRPEDTGLYYCKIRRTWHSELWGQGTQVTVSS

SEQ ID NO: 16448 - protein, 125 aa, Artificial Sequence
  source: /note="Description of Artificial Sequence: Synthetic polypeptide"
EVQLVESGGGLVQPGGSLRLSCAASGFILDYYAIGWFRQAPGKEREGVLCIDASDDITYYADSVKGRFTISRDNAKNTVYLQMNSLKPEDTGVYYCATPIGLSSSCLLEYDYDYWGQGTLVTVSS

SEQ ID NO: 16449 - protein, 130 aa, Artificial Sequence
  source: /note="Description of Artificial Sequence: Synthetic polypeptide"
EVQLVESGGGLVQAGGSLRLSCAASGRTISRYTMGWFRQAPGKEREFVAAISWSGDNTNYADSVKGRFTISRPNTKNTMYLQMNSLKPEDTAVYYCAADYRSGSYYQASEWTRPSGYDYWGQGTLVTVSS

SEQ ID NO: 16450 - protein, 125 aa, Artificial Sequence
  source: /note="Description of Artificial Sequence: Synthetic polypeptide"
EVQLVESGGGLVQPGGSLRLSCAASGFSLDYFAIGWFRQAPGKEREEISCISNSDGSTYYANSVKGRFTISIDNAKNTVYLQMTSLKPEDTAVYYCATPVGLGPFCKTTNDYDYSGQGTLVTVSS

SEQ ID NO: 16451 - protein, 124 aa, Artificial Sequence
  source: /note="Description of Artificial Sequence: Synthetic polypeptide"
EVQLVESGGGLVQPGGSLRLSCAASGFTLDYYAINWFRQAPGKEREGVSCISGGDGSTYYADSVKGRFTISRDNAKNTVYLQMNSLKPEDTAVYYCATALGLSSSCHGDGYDYWGQGTLVTVSS

SEQ ID NO: 16452 - protein, 125 aa, Artificial Sequence
  source: /note="Description of Artificial Sequence: Synthetic polypeptide"
EVQLVESGGGLVQPGGSLRLSCAASGFILDYYAIGWFRQAPGKEREGVSCIDASDDITYYADSVKGRFTISRDNAKNTVYLQMNSLKPEDTGVYYCATPIGLSSSCLLEYDYDYWGQGTLVTVSS

SEQ ID NO: 16453 - protein, 125 aa, Artificial Sequence
  source: /note="Description of Artificial Sequence: Synthetic polypeptide"
EVQLVESGGGLVQPGGSLRLSCAASGFILDYYAIGWFRQAPGKEREGVLSIDASDDITYYADSVKGRFTISRDNAKNTVYLQMNSLKPEDTGVYYCATPIGLSSSGLLEYDYDYWGQGTLVTVSS

SEQ ID NO: 16454 - protein, 125 aa, Artificial Sequence
  source: /note="Description of Artificial Sequence: Synthetic polypeptide"
EVQLVESGGGLVQPGGSLRLSAAASGFILDYYAIGWFRQAPGKEREGVLCIDASDDITYYADSVKGRFTISRDNAKNTVYLQMNSLKPEDTGVYYSATPIGLSSSCLLEYDYDYWGQGTLVTVSS

SEQ ID NO: 16455 - protein, 124 aa, Artificial Sequence
  source: /note="Description of Artificial Sequence: Synthetic polypeptide"
EVQLVESGGGLVQAGGSLRLSCAASGFTFDDYAIGWFRQAPGEEREGVSSISSTYGLTYYADSVKGRFTISSSNAKNTVYLQMNNLKPEDTAVYYCAATPIERLGLDAYEYDYWGQGTQVTVSS

SEQ ID NO: 16456 - protein, 124 aa, Artificial Sequence
  source: /note="Description of Artificial Sequence: Synthetic polypeptide"
EVQLVESGGGLVQAGGSLRLSCAASGRTFSTYTMAWFRQAPGKEREFVQGISRSDGGTYDADSVKGRFTISRDNAKNTVYLQMNSLKPEDTAVYFCAAASVKLVYVNPNRYSYWGQGTQVTVSS

SEQ ID NO: 16457 - protein, 124 aa, Artificial Sequence
  source: /note="Description of Artificial Sequence: Synthetic polypeptide"
QVKLEESGGGSVQTGGSLRLTCAASGRTSRSYGMGWFRQAPGKEREFVSGISWRGDSTGYADSVKGRFTISRDNAKNTVDLQMNSLKPEDTAIYYCAAAAGSAWYGTLYEYDYWGQGTQVTVSS

SEQ ID NO: 16458 - protein, 124 aa, Artificial Sequence
  source: /note="Description of Artificial Sequence: Synthetic polypeptide"
AVQLVESGGGSVQAGGSLRLTCAASGRTSRSYGMGWFRQAPGKEREFVSGISWRGDSTGYADSVKGRFTISRDNAKNTVDLQMNSLKPEDTAIYYCAAAAGSTWYGTLYEYDYWGQGTQVTVSS

SEQ ID NO: 16459 - protein, 130 aa, Artificial Sequence
  source: /note="Description of Artificial Sequence: Synthetic polypeptide"
EVQLVESGGGLVQAGGSLRLSCAASGRTFSGFAMGWFRQAPGKEREFVAAISWSGGSLLYVDSVKGRFTISRDNAKNTVHLQMNSLKPGDTAVYYCAAMVGPPPRSLDYGLGNHYEYDYWGQGTQVTVSS

SEQ ID NO: 16460 - protein, 125 aa, Artificial Sequence
  source: /note="Description of Artificial Sequence: Synthetic polypeptide"
EVQLVESGGGLVQAGGSLRLSCAASDRTFSSNNMGWFRQAPGKEREFVAAIGWGGLETHYSDSVKGRFTISRDNAKNTVYLQMNSLKPEDTARYYCAVSSTRTVIYTLPRMYNYWGQGTQVTVSS

SEQ ID NO: 16461 - protein, 126 aa, Artificial Sequence
  source: /note="Description of Artificial Sequence: Synthetic polypeptide"
EVQLVESGGGLVQAGGSLRLSCAVSGRTFSGDVMGWFRQAPGKEREFVAGFSRSTSTTHYADSVKGRFTISGDNAKNTVYLQMNSLKPEDTAVYYCAANSRSSWVIFTIKGQYDRWGQGTQVTVSS

SEQ ID NO: 16462 - protein, 124 aa, Artificial Sequence
  source: /note="Description of Artificial Sequence: Synthetic polypeptide"
EVQLVESGGGLVQAGGSLRVSCVASIRSFSSYVVGWFRQAPGKDREFVAGIAWGDGITYYADSVKGRFTISRDHAKNTAYLQMNSLRPEDTAVYYCAVRPGMIITTIQATYGFWGQGTQVTVSS

SEQ ID NO: 16463 - protein, 127 aa, Artificial Sequence
  source: /note="Description of Artificial Sequence: Synthetic polypeptide"
EVQLVESGGGLVQAGASLRLSCAASGRYFSDYNMAWFRQAPGKEREFVAHISWLGGRTYYRDSVKGRFTISRDNAKDTVYLQMNSLKPEDTAVYSCAAGSPYGTELPYTRIEQYAYWGQGTQVTVSS

SEQ ID NO: 16464 - protein, 124 aa, Artificial Sequence
  source: /note="Description of Artificial Sequence: Synthetic polypeptide"
AVQLVESGGGLVQAGGSLRLSCAASGRTFSTYTMAWFRQAPGKEREFVQGISRSDGGTYDADSVKGRFTISRDNAKNTVYLQMNSLKPEDTAVYFCAAANEYWVYVNPNRYTYWGRGTQVTVSS

SEQ ID NO: 16465 - protein, 126 aa, Artificial Sequence
  source: /note="Description of Artificial Sequence: Synthetic polypeptide"
EVQLVESGGGLVQAGGSLRLSCTASGRTFENNAMAWFRQAAGKEREFVAGFSGSGGATYYAHSVEGRFTISRDNAKNTVDLQMNSLSLEDTAVYLCAARRKSGEVVFTIPARYDYWGQGTQVTVSS

SEQ ID NO: 16466 - protein, 131 aa, Artificial Sequence
  source: /note="Description of Artificial Sequence: Synthetic polypeptide"
QVKLEESGGGLVQAGGSLRLSCAASGRAFSSYVMGWFRQAPGKEREIVGAISWRGGSTYYADSVKGRFTISRDNAKNTVYLQMNSLKPEDTAVYYCAAVYRVGAISEYSGTDYYTDEYDYWGQGTQVTVSS

SEQ ID NO: 16467 - protein, 127 aa, Artificial Sequence
  source: /note="Description of Artificial Sequence: Synthetic polypeptide"
EVQLVESGGGLVQAGGSLRLSCAASGRTFSSYAMGWFRQAPGKEREFVVAINWSSGSTYYADSVKGRFTISRDNAKNTMYLQMNSLKPEDTAVYYCAAGYQINSGNYNFKDYEYDYWGQGTQVTVSS

SEQ ID NO: 16468 - protein, 129 aa, Artificial Sequence
  source: /note="Description of Artificial Sequence: Synthetic polypeptide"
EVQLVESGGGLVQAGGSLRLSCAASGRTFSSYVMGWFRQATGKEREFVATIAWDSGSTYYADSVKGRFTISRDNAKNTVHLQMNSLKPEDTAVYYCAASYNVYYNNYYYPISRDEYDYWGQGTQVTVSS

SEQ ID NO: 16469 - protein, 122 aa, Artificial Sequence
  source: /note="Description of Artificial Sequence: Synthetic polypeptide"
EVQLVESGGGLVQAGGSLRLSCAASGRGAWAWFRQAPGKEREFVGGLSWSADSTYYADSVKGRFTISRDNAKNTVFLQMTNLKADDTAVYYCAAHRRPFASVFTTTRMYDYWGPGTQVTVSS

SEQ ID NO: 16470 - protein, 243 aa, Artificial Sequence
  source: /note="Description of Artificial Sequence: Synthetic polypeptide"
EVQLVESGGGLVQPGNSLRLSCAASGFTFSSFGMSWVRQAPGKGLEWVSSISGSGSDTLYADSVKGRFTISRDNAKTTLYLQMNSLRPEDTAVYYCTIGGSLSRSSQGTLVTVSSAAAEVQLVESGGGLVQAGGSLRLSCAASDRTFSSNNMGWFRQAPGKEREFVAAIGWGGLETHYSDSVKGRFTISRDNAKNTVYLQMNSLKPEDTARYYCAVSSTRTVIYTLPRMYNYWGQGTQVTVSS

SEQ ID NO: 16471 - protein, 245 aa, Artificial Sequence
  source: /note="Description of Artificial Sequence: Synthetic polypeptide"
EVQLVESGGGLVQPGNSLRLSCAASGFTFSSFGMSWVRQAPGKGLEWVSSISGSGSDTLYADSVKGRFTISRDNAKTTLYLQMNSLRPEDTAVYYCTIGGSLSRSSQGTLVTVSSGGGGSEVQLVESGGGLVQAGGSLRLSCAASDRTFSSNNMGWFRQAPGKEREFVAAIGWGGLETHYSDSVKGRFTISRDNAKNTVYLQMNSLKPEDTARYYCAVSSTRTVIYTLPRMYNYWGQGTQVTVSS

SEQ ID NO: 16472 - protein, 249 aa, Artificial Sequence
  source: /note="Description of Artificial Sequence: Synthetic polypeptide"
EVQLVESGGGLVQPGNSLRLSCAASGFTFSSFGMSWVRQAPGKGLEWVSSISGSGSDTLYADSVKGRFTISRDNAKTTLYLQMNSLRPEDTAVYYCTIGGSLSRSSQGTQVTVSSGGGGSGGGSEVQLVESGGGLVQAGGSLRLSCAASDRTFSSNNMGWFRQAPGKEREFVAAIGWGGLETHYSDSVKGRFTISRDNAKNTVYLQMNSLKPEDTARYYCAVSSTRTVIYTLPRMYNYWGQGTQVTVSS

SEQ ID NO: 16473 - protein, 265 aa, Artificial Sequence
  source: /note="Description of Artificial Sequence: Synthetic polypeptide"
EVQLVESGGGLVQPGNSLRLSCAASGFTFSSFGMSWVRQAPGKGLEWVSSISGSGSDTLYADSVKGRFTISRDNAKTTLYLQMNSLRPEDTAVYYCTIGGSLSRSSQGTQVTVSSGGGGSGGGGSGGGGSGGGGSGGGGSEVQLVESGGGLVQAGGSLRLSCAASDRTFSSNNMGWFRQAPGKEREFVAAIGWGGLETHYSDSVKGRFTISRDNAKNTVYLQMNSLKPEDTARYYCAVSSTRTVIYTLPRMYNYWGQGTQVTVSS

SEQ ID NO: 16474 - protein, 242 aa, Artificial Sequence
  source: /note="Description of Artificial Sequence: Synthetic polypeptide"
EVQLVESGGGLVQPGNSLRLSCAASGFTFSSFGMSWVRQAPGKGLEWVSSISGSGSDTLYADSVKGRFTISRDNAKTTLYLQMNSLRPEDTAVYYCTIGGSLSRSSQGTLVTVSSAAAEVQLVESGGGSVQTGGSLRLTCAASGRTSRSYGMGWFRQAPGKEREFVSGISWRGDSTGYADSVKGRFTISRDNAKNTVDLQMNSLKPEDTAIYYCAAAAGSAWYGTLYEYDYWGQGTQVTVSS

SEQ ID NO: 16475 - protein, 244 aa, Artificial Sequence
  source: /note="Description of Artificial Sequence: Synthetic polypeptide"
EVQLVESGGGLVQPGNSLRLSCAASGFTFSSFGMSWVRQAPGKGLEWVSSISGSGSDTLYADSVKGRFTISRDNAKTTLYLQMNSLRPEDTAVYYCTIGGSLSRSSQGTLVTVSSGGGGSEVQLVESGGGSVQTGGSLRLTCAASGRTSRSYGMGWFRQAPGKEREFVSGISWRGDSTGYADSVKGRFTISRDNAKNTVDLQMNSLKPEDTAIYYCAAAAGSAWYGTLYEYDYWGQGTQVTVSS

SEQ ID NO: 16476 - protein, 248 aa, Artificial Sequence
  source: /note="Description of Artificial Sequence: Synthetic polypeptide"
EVQLVESGGGLVQPGNSLRLSCAASGFTFSSFGMSWVRQAPGKGLEWVSSISGSGSDTLYADSVKGRFTISRDNAKTTLYLQMNSLRPEDTAVYYCTIGGSLSRSSQGTQVTVSSGGGGSGGGSEVQLVESGGGSVQTGGSLRLTCAASGRTSRSYGMGWFRQAPGKEREFVSGISWRGDSTGYADSVKGRFTISRDNAKNTVDLQMNSLKPEDTAIYYCAAAAGSAWYGTLYEYDYWGQGTQVTVSS

SEQ ID NO: 16477 - protein, 264 aa, Artificial Sequence
  source: /note="Description of Artificial Sequence: Synthetic polypeptide"
EVQLVESGGGLVQPGNSLRLSCAASGFTFSSFGMSWVRQAPGKGLEWVSSISGSGSDTLYADSVKGRFTISRDNAKTTLYLQMNSLRPEDTAVYYCTIGGSLSRSSQGTQVTVSSGGGGSGGGGSGGGGSGGGGSGGGGSEVQLVESGGGSVQTGGSLRLTCAASGRTSRSYGMGWFRQAPGKEREFVSGISWRGDSTGYADSVKGRFTISRDNAKNTVDLQMNSLKPEDTAIYYCAAAAGSAWYGTLYEYDYWGQGTQVTVSS

SEQ ID NO: 16478 - protein, 249 aa, Artificial Sequence
  source: /note="Description of Artificial Sequence: Synthetic polypeptide"
EVQLVESGGGLVQAGGSLRLSCAASDRTFSSNNMGWFRQAPGKEREFVAAIGWGGLETHYSDSVKGRFTISRDNAKNTVYLQMNSLKPEDTARYYCAVSSTRTVIYTLPRMYNYWGQGTQVTVSSGGGGSGGGSEVQLVESGGGLVQPGNSLRLSCAASGFTFSSFGMSWVRQAPGKGLEWVSSISGSGSDTLYADSVKGRFTISRDNAKTTLYLQMNSLRPEDTAVYYCTIGGSLSRSSQGTLVTVSS

SEQ ID NO: 16479 - protein, 265 aa, Artificial Sequence
  source: /note="Description of Artificial Sequence: Synthetic polypeptide"
EVQLVESGGGLVQAGGSLRLSCAASDRTFSSNNMGWFRQAPGKEREFVAAIGWGGLETHYSDSVKGRFTISRDNAKNTVYLQMNSLKPEDTARYYCAVSSTRTVIYTLPRMYNYWGQGTQVTVSSGGGGSGGGGSGGGGSGGGGSGGGGSEVQLVESGGGLVQPGNSLRLSCAASGFTFSSFGMSWVRQAPGKGLEWVSSISGSGSDTLYADSVKGRFTISRDNAKTTLYLQMNSLRPEDTAVYYCTIGGSLSRSSQGTLVTVSS

SEQ ID NO: 16480 - protein, 248 aa, Artificial Sequence
  source: /note="Description of Artificial Sequence: Synthetic polypeptide"
QVKLEESGGGSVQTGGSLRLTCAASGRTSRSYGMGWFRQAPGKEREFVSGISWRGDSTGYADSVKGRFTISRDNAKNTVDLQMNSLKPEDTAIYYCAAAAGSAWYGTLYEYDYWGQGTQVTVSSGGGGSGGGSEVQLVESGGGLVQPGNSLRLSCAASGFTFSSFGMSWVRQAPGKGLEWVSSISGSGSDTLYADSVKGRFTISRDNAKTTLYLQMNSLRPEDTAVYYCTIGGSLSRSSQGTLVTVSS

SEQ ID NO: 16481 - protein, 264 aa, Artificial Sequence
  source: /note="Description of Artificial Sequence: Synthetic polypeptide"
QVKLEESGGGSVQTGGSLRLTCAASGRTSRSYGMGWFRQAPGKEREFVSGISWRGDSTGYADSVKGRFTISRDNAKNTVDLQMNSLKPEDTAIYYCAAAAGSAWYGTLYEYDYWGQGTQVTVSSGGGGSGGGGSGGGGSGGGGSGGGGSEVQLVESGGGLVQPGNSLRLSCAASGFTFSSFGMSWVRQAPGKGLEWVSSISGSGSDTLYADSVKGRFTISRDNAKTTLYLQMNSLRPEDTAVYYCTIGGSLSRSSQGTLVTVSS

SEQ ID NO: 16482 - protein, 257 aa, Artificial Sequence
  source: /note="Description of Artificial Sequence: Synthetic polypeptide"
QVKLEESGGGSVQTGGSLRLTCAASGRTSRSYGMGWFRQAPGKEREFVSGISWRGDSTGYADSVKGRFTISRDNAKNTVDLQMNSLKPEDTAIYYCAAAAGSAWYGTLYEYDYWGQGTQVTVSSGGGGSGGGSEVQLVESGGGSVQTGGSLRLTCAASGRTSRSYGMGWFRQAPGKEREFVSGISWRGDSTGYADSVKGRFTISRDNAKNTVDLQMNSLKPEDTAIYYCAAAAGSAWYGTLYEYDYWGQGTQVTVSS

SEQ ID NO: 16483 - protein, 273 aa, Artificial Sequence
  source: /note="Description of Artificial Sequence: Synthetic polypeptide"
QVKLEESGGGSVQTGGSLRLTCAASGRTSRSYGMGWFRQAPGKEREFVSGISWRGDSTGYADSVKGRFTISRDNAKNTVDLQMNSLKPEDTAIYYCAAAAGSAWYGTLYEYDYWGQGTQVTVSSGGGGSGGGGSGGGGSGGGGSGGGGSEVQLVESGGGSVQTGGSLRLTCAASGRTSRSYGMGWFRQAPGKEREFVSGISWRGDSTGYADSVKGRFTISRDNAKNTVDLQMNSLKPEDTAIYYCAAAAGSAWYGTLYEYDYWGQGTQVTVSS

SEQ ID NO: 16484 - protein, 383 aa, Artificial Sequence
  source: /note="Description of Artificial Sequence: Synthetic polypeptide"
EVQLVESGGGLVQAGGSLRLSCAASDRTFSSNNMGWFRQAPGKEREFVAAIGWGGLETHYSDSVKGRFTISRDNAKNTVYLQMNSLKPEDTARYYCAVSSTRTVIYTLPRMYNYWGQGTQVTVSSGGGGSGGGSEVQLVESGGGLVQAGGSLRLSCAASDRTFSSNNMGWFRQAPGKEREFVAAIGWGGLETHYSDSVKGRFTISRDNAKNTVYLQMNSLKPEDTARYYCAVSSTRTVIYTLPRMYNYWGQGTQVTVSSGGGGSGGGSEVQLVESGGGLVQPGNSLRLSCAASGFTFSSFGMSWVRQAPGKGLEWVSSISGSGSDTLYADSVKGRFTISRDNAKTTLYLQMNSLRPEDTAVYYCTIGGSLSRSSQGTLVTVSS

SEQ ID NO: 16485 - protein, 377 aa, Artificial Sequence
  source: /note="Description of Artificial Sequence: Synthetic polypeptide"
EVQLVESGGGLVQAGGSLRLSCAASDRTFSSNNMGWFRQAPGKEREFVAAIGWGGLETHYSDSVKGRFTISRDNAKNTVYLQMNSLKPEDTARYYCAVSSTRTVIYTLPRMYNYWGQGTQVTVSSGGGGSGGGSEVQLVESGGGLVQAGGSLRLSCAASDRTFSSNNMGWFRQAPGKEREFVAAIGWGGLETHYSDSVKGRFTISRDNAKNTVYLQMNSLKPEDTARYYCAVSSTRTVIYTLPRMYNYWGQGTQVTVSSAAAEVQLVESGGGLVQPGNSLRLSCAASGFTFSSFGMSWVRQAPGKGLEWVSSISGSGSDTLYADSVKGRFTISRDNAKTTLYLQMNSLRPEDTAVYYCTIGGSLSRSSQGTLVTVSS

SEQ ID NO: 16486 - protein, 381 aa, Artificial Sequence
  source: /note="Description of Artificial Sequence: Synthetic polypeptide"
QVKLEESGGGSVQTGGSLRLTCAASGRTSRSYGMGWFRQAPGKEREFVSGISWRGDSTGYADSVKGRFTISRDNAKNTVDLQMNSLKPEDTAIYYCAAAAGSAWYGTLYEYDYWGQGTQVTVSSGGGGSGGGSEVQLVESGGGSVQTGGSLRLTCAASGRTSRSYGMGWFRQAPGKEREFVSGISWRGDSTGYADSVKGRFTISRDNAKNTVDLQMNSLKPEDTAIYYCAAAAGSAWYGTLYEYDYWGQGTQVTVSSGGGGSGGGSEVQLVESGGGLVQPGNSLRLSCAASGFTFSSFGMSWVRQAPGKGLEWVSSISGSGSDTLYADSVKGRFTISRDNAKTTLYLQMNSLRPEDTAVYYCTIGGSLSRSSQGTLVTVSS

SEQ ID NO: 16487 - protein, 381 aa, Artificial Sequence
  source: /note="Description of Artificial Sequence: Synthetic polypeptide"
AVQLVESGGGSVQAGGSLRLTCAASGRTSRSYGMGWFRQAPGKEREFVSGISWRGDSTGYADSVKGRFTISRDNAKNTVDLQMNSLKPEDTAIYYCAAAAGSTWYGTLYEYDYWGQGTQVTVSSGGGGSGGGSEVQLVESGGGSVQAGGSLRLTCAASGRTSRSYGMGWFRQAPGKEREFVSGISWRGDSTGYADSVKGRFTISRDNAKNTVDLQMNSLKPEDTAIYYCAAAAGSTWYGTLYEYDYWGQGTQVTVSSGGGGSGGGSEVQLVESGGGLVQPGNSLRLSCAASGFTFSSFGMSWVRQAPGKGLEWVSSISGSGSDTLYADSVKGRFTISRDNAKTTLYLQMNSLRPEDTAVYYCTIGGSLSRSSQGTLVTVSS

SEQ ID NO: 16488 - protein, 371 aa, Artificial Sequence
  source: /note="Description of Artificial Sequence: Synthetic polypeptide"
EVQLVESGGGLVQAGGSLRLSCAASDRTFSSNNMGWFRQAPGKEREFVAAIGWGGLETHYSDSVKGRFTISRDNAKNTVYLQMNSLKPEDTARYYCAVSSTRTVIYTLPRMYNYWGQGTQVTVSSGGSEVQLVESGGGLVQPGNSLRLSCAASGFTFSSFGMSWVRQAPGKGLEWVSSISGSGSDTLYADSVKGRFTISRDNAKTTLYLQMNSLRPEDTAVYYCTIGGSLSRSSQGTLVTVSSAAAEVQLVESGGGLVQAGGSLRLSCAASDRTFSSNNMGWFRQAPGKEREFVAAIGWGGLETHYSDSVKGRFTISRDNAKNTVYLQMNSLKPEDTARYYCAVSSTRTVIYTLPRMYNYWGQGTQVTVSS

SEQ ID NO: 16489 - protein, 383 aa, Artificial Sequence
  source: /note="Description of Artificial Sequence: Synthetic polypeptide"
EVQLVESGGGLVQAGGSLRLSCAASDRTFSSNNMGWFRQAPGKEREFVAAIGWGGLETHYSDSVKGRFTISRDNAKNTVYLQMNSLKPEDTARYYCAVSSTRTVIYTLPRMYNYWGQGTQVTVSSGGGGSGGGSEVQLVESGGGLVQPGNSLRLSCAASGFTFSSFGMSWVRQAPGKGLEWVSSISGSGSDTLYADSVKGRFTISRDNAKTTLYLQMNSLRPEDTAVYYCTIGGSLSRSSQGTQVTVSSGGGGSGGGSEVQLVESGGGLVQAGGSLRLSCAASDRTFSSNNMGWFRQAPGKEREFVAAIGWGGLETHYSDSVKGRFTISRDNAKNTVYLQMNSLKPEDTARYYCAVSSTRTVIYTLPRMYNYWGQGTQVTVSS

SEQ ID NO: 16490 - protein, 381 aa, Artificial Sequence
  source: /note="Description of Artificial Sequence: Synthetic polypeptide"
QVKLEESGGGSVQTGGSLRLTCAASGRTSRSYGMGWFRQAPGKEREFVSGISWRGDSTGYADSVKGRFTISRDNAKNTVDLQMNSLKPEDTAIYYCAAAAGSAWYGTLYEYDYWGQGTQVTVSSGGGGSGGGSEVQLVESGGGLVQPGNSLRLSCAASGFTFSSFGMSWVRQAPGKGLEWVSSISGSGSDTLYADSVKGRFTISRDNAKTTLYLQMNSLRPEDTAVYYCTIGGSLSRSSQGTQVTVSSGGGGSGGGSEVQLVESGGGSVQTGGSLRLTCAASGRTSRSYGMGWFRQAPGKEREFVSGISWRGDSTGYADSVKGRFTISRDNAKNTVDLQMNSLKPEDTAIYYCAAAAGSAWYGTLYEYDYWGQGTQVTVSS

SEQ ID NO: 16491 - protein, 382 aa, Artificial Sequence
  source: /note="Description of Artificial Sequence: Synthetic polypeptide"
AVQLVESGGGSVQAGGSLRLLTCAASGRTSRSYGMGWFRQAPGKEREFVSGISWRGDSTGYADSVKGRFTISRDNAKNTVDLQMNSLKPEDTAIYYCAAAAGSTWYGTLYEYDYWGQGTQVTVSSGGGGSGGGSEVQLVESGGGLVQPGNSLRLSCAASGFTFSSFGMSWVRQAPGKGLEWVSSISGSGSDTLYADSVKGRFTISRDNAKTTLYLQMNSLRPEDTAVYYCTIGGSLSRSSQGTQVTVSSGGGGSGGGSEVQLVESGGGSVQAGGSLRLTCAASGRTSRSYGMGWFRQAPGKEREFVSGISWRGDSTGYADSVKGRFTISRDNAKNTVDLQMNSLKPEDTAIYYCAAAAGSTWYGTLYEYDYWGQGTQVTVSS

SEQ ID NO: 16492 - protein, 383 aa, Artificial Sequence
  source: /note="Description of Artificial Sequence: Synthetic polypeptide"
EVQLVRSGGGLVQPGNSLRLSCAASGFTFSSFGMSWVRQAPGKGLEWVSSISGSGSDTLYADSVKGRFTISRDNAKTTLYLQMNSLRPEDTAVYYCTIGGSLSRSSQGTLVTVSSGGGGSGGGSEVQLVESGGGLVQAGGSLRLSCAASDRTFSSNNMGWFRQAPGKEREFVAAIGWGGLETHYSDSVKGRFTISRDNAKNTVYLQMNSLKPEDTARYYCAVSSTRTVIYTLPRMYNYWGQGTQVTVSSGGGGSGGGSEVQLVESGGGLVQAGGSLRLSCAASDRTFSSNNMGWFRQAPGKEREFVAAIGWGGLETHYSDSVKGRFTISRDNAKNTVYLQMNSLKPEDTARYYCAVSSTRTVIYTLPRMYNYWGQGTQVTVSS

SEQ ID NO: 16493 - protein, 381 aa, Artificial Sequence
  source: /note="Description of Artificial Sequence: Synthetic polypeptide"
EVQLVESGGGLVQPGNSLRLSCAASGFTFSSFGMSWVRQAPGKGLEWVSSISGSGSDTLYADSVKGRFTISRDNAKTTLYLQMNSLRPEDTAVYYCTIGGSLSRSSQGTLVTVSSGGGGSGGGSEVQLVESGGGSVQTGGSLRLTCAASGRTSRSYGMGWFRQAPGKEREFVSGISWRGDSTGYADSVKGRFTISRDNAKNTVDLQMNSLKPEDTAIYYCAAAAGSAWYGTLYEYDYWGQGTQVTVSSGGGGSGGGSEVQLVESGGGSVQTGGSLRLTCAASGRTSRSYGMGWFRQAPGKEREFVSGISWRGDTSGYADSVKGRFTISRDNAKNTVDLQMNSLKPEDTAIYYCAAAAGSAWYGTLYEYDYWGQGTQVTVSS

SEQ ID NO: 16494 - protein, 257 aa, Artificial Sequence
  source: /note="Description of Artificial Sequence: Synthetic polypeptide"
QVKLEESGGGLVQAGGSLRLSCVASGRTFSRTAMAWFRQAPGKEREFVATITWNSGTTRYADSVKGRFFISKDSAKNTIYLEMNSLEPEDTAVYYCAATAAAVITPTRGYYNYWGQGTQVTVSSGGGGSGGGSQVKLEESGGGLVQAGGSLRLSCVASGRTFSRTAMAWFRQAPGKEREFVATITWNSGTTRYADSVKGRFFISKDSAKNTIYLEMNSLEPEDTAVYYCAATAAAVITPTRGYYNYWGQGTQVTVSS

SEQ ID NO: 16495 - protein, 273 aa, Artificial Sequence
  source: /note="Description of Artificial Sequence: Synthetic polypeptide"
QVKLEESGGGLVQAGGSLRLSCVASGRTFSRTAMAWFRQAPGKEREFVATITWNSGTTRYADSVKGRFFISKDSAKNTIYLEMNSLEPEDTAVYYCAATAAAVITPTRGYYNYWGQGTQVTVSSGGGGSGGGGSGGGGSGGGGSGGGGSQVKLEESGGGLVQAGGSLRLSCVASGRTFSRTAMAWFRQAPGKEREFVATITWNSGTTRYADSVKGRFFISKDSAKNTIYLEMNSLEPEDTAVYYCAATAAAVITPTRGYYNYWGQGTQVTVSS

SEQ ID NO: 16496 - protein, 257 aa, Artificial Sequence
  source: /note="Description of Artificial Sequence: Synthetic polypeptide"
QVKLEESGGGSVQTGGSLRLTCAASGRTSRSYGMGWFRQAPGKEREFVSGISWRGDSTGYADSVKGRFTISRDNAKNTVDLQMNSLKPEDTAIYYCAAAAGSAWYGTLYEYDYWGQGTQVTVSSGGGGSGGGSQVKLEESGGGLVQAGGSLRLSCVASGRTFSRTAMAWFRQAPGKEREFVATITWNSGTTRYADSVKGRFFISKDSAKNTIYLEMNSLEPEDTAVYYCAATAAAVITPTRGYYNYWGQGTQVTVSS

SEQ ID NO: 16497 - protein, 257 aa, Artificial Sequence; identical to SEQ ID NO: 16496
  source: /note="Description of Artificial Sequence: Synthetic polypeptide"

SEQ ID NO: 16498 - protein, 381 aa, Artificial Sequence
  source: /note="Description of Artificial Sequence: Synthetic polypeptide"
QVKLEESGGGSVQTGGSLRLTCAASGRTSRSYGMGWFRQAPGKEREFVSGISWRGDSTGYADSVKGRFTISRDNAKNTVDLQMNSLKPEDTAIYYCAAAAGSAWYGTLYEYDYWGQGTQVTVSSGGGGSGGGSQVKLEESGGGLVQAGGSLRLSCVASGRTFSRTAMAWFRQAPGKEREFVATITWNSGTTRYADSVKGRFFISKDSAKNTIYLEMNSLEPEDTAVYYCAATAAAVITPTRGYYNYWGQGTQVTVSSGGGGSGGGSEVQLVESGGGLVQPGNSLRLSCAASGFTFSSFGMSWVRQAPGKGLEWVSSISGSGSDTLYADSVKGRFTISRDNAKTTLYLQMNSLRPEDTAVYYCTIGGSLSRSSQGTLVTVSS

SEQ ID NO: 16499 - protein, 381 aa, Artificial Sequence
  source: /note="Description of Artificial Sequence: Synthetic polypeptide"
QVKLEESGGGSVQTGGSLRLTCAASGRTSRSYGMGWFRQAPGKEREFVSGISWRGDSTGYADSVKGRFTISRDNAKNTVDLQMNSLKPEDTAIYYCAAAAGSAWYGTLYEYDYWGQGTQVTVSSGGGGSGGGSEVQLVESGGGLVQPGNSLRLSCAASGFTFSSFGMSWVRQAPGKGLEWVSSISGSGSDTLYADSVKGRFTISRDNAKTTLYLQMNSLRPEDTAVYYCTIGGSLSRSSQGTLVTVSSGGGGSGGGSQVKLEESGGGLVQAGGSLRLSCVASGRTFSRTAMAWFRQAPGKEREFVATITWNSGTTRYADSVKGRFFISKDSAKNTIYLEMNSLEPEDTAVYYCAATAAAVITPTRGYYNYWGQGTQVTVSS

SEQ ID NO: 16500 - protein, 273 aa, Artificial Sequence
  source: /note="Description of Artificial Sequence: Synthetic polypeptide"
QVKLEESGGGSVQTGGSLRLTCAASGRTSRSYGMGWFRQAPGKEREFVSGISWRGDSTGYADSVKGRFTISRDNAKNTVDLQMNSLKPEDTAIYYCAAAAGSAWYGTLYEYDYWGQGTQVTVSSGGGGSGGGGSGGGGSGGGGSGGGGSQVKLEESGGGLVQAGGSLRLSCVASGRTFSRTAMAWFRQAPGKEREFVATITWNSGTTRYADSVKGRFFISKDSAKNTIYLEMNSLEPEDTAVYYCAATAAAVITPTRGYYNYWGQGTQVTVSS

SEQ ID NO: 16501 - protein, 381 aa, Artificial Sequence; identical to SEQ ID NO: 16498
  source: /note="Description of Artificial Sequence: Synthetic polypeptide"

SEQ ID NO: 16502 - protein, 381 aa, Artificial Sequence; identical to SEQ ID NO: 16499
  source: /note="Description of Artificial Sequence: Synthetic polypeptide"

SEQ ID NO: 16503 - protein, 397 aa, Artificial Sequence
  source: /note="Description of Artificial Sequence: Synthetic polypeptide"
QVKLEESGGGSVQTGGSLRLTCAASGRTSRSYGMGWFRQAPGKEREFVSGISWRGDSTGYADSVKGRFTISRDNAKNTVDLQMNSLKPEDTAIYYCAAAAGSAWYGTLYEYDYWGQGTQVTVSSGGGGSGGGGSGGGGSGGGGSGGGGSQVKLEESGGGLVQAGGSLRLSCVASGRTFSRTAMAWFRQAPGKEREFVATITWNSGTTRYADSVKGRFFISKDSAKNTIYLEMNSLEPEDTAVYYCAATAAAVITPTRGYYNYWGQGTQVTVSSGGGGSGGGSEVQLVESGGGLVQPGNSLRLSCAASGFTFSSFGMSWVRQAPGKGLEWVSSISGSGSDTLYADSVKGRFTISRDNAKTTLYLQMNSLRPEDTAVYYCTIGGSLSRSSQGTLVTVSS

SEQ ID NO: 16504 - protein, 125 aa, Artificial Sequence
  source: /note="Description of Artificial Sequence: Synthetic polypeptide"
EVQLQASGGGLVQAGGSLRLSCSASVRTFSIYAMGWFRQAPGKEREFVAGINRSGDVTKYADFVKGRFSISRDNAKNMVYLQMNSLKPEDTALYYCAATWAYDTVGALTSGYNFWGQGTQVTVSS

SEQ ID NO: 16505 - protein, 122 aa, Artificial Sequence
  source: /note="Description of Artificial Sequence: Synthetic polypeptide"
EVQLQASGGGLVQAGGSLRLSCAASGFKITHYTMGWFRQAPGKEREFVSRITWGGDNTFYSNSVKGRFTISRDNAKNTVYLQMNSLKPEDTADYYCAAGSTSTATPLRVDYWGKGTQVTVSS

SEQ ID NO: 16506 - protein, 114 aa, Artificial Sequence
  source: /note="Description of Artificial Sequence: Synthetic polypeptide"
EVQLVESGGGLVQPGGSLRLSCAASGSIFTFNAMGWYRQAPGKQRELVAVIISGGSTHYVDSVKGRFTISRDNAKKMVYLQMNSLKPEDTAVYYCNVKKFGDYWGQGTQVTVSS

SEQ ID NO: 16507 - protein, 116 aa, Artificial Sequence
  source: /note="Description of Artificial Sequence: Synthetic polypeptide"
DVQLVESGGGLVQAGGSLRLSCAASESISTINVMAWYRQAPGKQRELVAEITRSGRTNYVDSVKGRFTISRDNAKNTMYLQMNSLNLEDTAVYYCRTIDGSWREYWGQGTQVTVSS

SEQ ID NO: 16508 - protein, 125 aa, Artificial Sequence
  source: /note="Description of Artificial Sequence: Synthetic polypeptide"
QVKLEESGGGLVQPGGSLRLSCVASGRTFSNYAMGWFRQAPGQEREFVAAINWNSRSTYYADSVKGRFTISRLNARNTVYLQMNRLKPEDTAVYDCAASHDSDYGGTNANLYDYWGQGTQVTVSS

SEQ ID NO: 16509 - protein, 124 aa, Artificial Sequence
  source: /note="Description of Artificial Sequence: Synthetic polypeptide"
QVKLEESGGGLVQAGGSLRLSCVASGRTFSRTAMAWFRQAPGKEREFVATITWNSGTTRYADSVKGRFFISKDSAKNTIYLEMNSLEPEDTAVYYCAATAAAVITPTRGYYNYWGQGTQVTVSS

SEQ ID NO: 16510 - protein, 120 aa, Artificial Sequence
  source: /note="Description of Artificial Sequence: Synthetic polypeptide"
EVQLVESGGGLVQAGGSLRLSCAASGRTFSSGTMGWFRRAPGKEREFVASIPWSGGRTYYADSVKDRFTISRDNAQNTVFLQMNSLKPEDTAVYYCAFKERSTGWDFASWGQGIQVTVSS

SEQ ID NO: 16511 - protein, 119 aa, Artificial Sequence
  source: /note="Description of Artificial Sequence: Synthetic polypeptide"
EVQLVESGGGLVQAGGSLRLSCAASGSTFSNYVSNYAMGWGRQAPGTQRELVASISNGDTTNYADSVKGRFTISRDNAKNTVYLQMNSLKPEDTAVYYCFEHQVAGLTWGQGTQVTVSS

SEQ ID NO: 16512 - protein, 114 aa, Artificial Sequence
  source: /note="Description of Artificial Sequence: Synthetic polypeptide"
EVQLVESGGGLVEPGGSLRLSCVASGFTFSSYDMSWVRQAPGKGLEWVSTINSGGGITYRGSVKGRFTISRDNAKNTLYLQMNSLKPEDTAVYYCENGGSSYRRGQGTQVTVSS

SEQ ID NO: 16513 - protein, 127 aa, Artificial Sequence
  source: /note="Description of Artificial Sequence: Synthetic polypeptide"
EVQLVESGGGLVQTGGSLRLSCAASGFTLDYYGIGWFRQAPGKEREGVSFISGSDGSTYYAESVKGRFTISRDKAKNTVYLQMNSLKPEDTAVYYCAADPWGPPSIATMTSYEYKHWGQGTQVTVSS

SEQ ID NO: 16514 - protein, 113 aa, Artificial Sequence
  source: /note="Description of Artificial Sequence: Synthetic polypeptide"
EVQLVESGGGLVQPGGSLRLSCAASGFTFSTYTMIWLRRAPGKGFEWVSTIDKDGNTNYVDSVKGRFAVSRDNTKNTLYLQMNSLKPEDTAMYYCTKHGSSARGQGTRVTVSS

SEQ ID NO: 16515 - protein, 118 aa, Artificial Sequence
  source: /note="Description of Artificial Sequence: Synthetic polypeptide"
  MOD_RES (27)..(27): Any amino acid
  MOD_RES (32)..(32): Any amino acid
  MOD_RES (75)..(75): Any amino acid
EVQLVESGGGLVQAGGSLRLSCVASGXALKIXVMGWYRQAPGKQRELVAAITSGGRTNYSDSVKGRFTISGDNAXNTVYLQMNSLKSEDTAVYYCREWNSGYPPVDYWGQGTQVTVSS

SEQ ID NO: 16516 - protein, 111 aa, Artificial Sequence
  source: /note="Description of Artificial Sequence: Synthetic polypeptide"
EVQLVESGGGLVQAGGSLTISCAASGITFSDSIVSWYRRARGKQREWVAGISNGGTTKYAESVLGRFTISRDNAKNMVYLQMNGLNPEDTAVYLCKVRQYWGQGTQVTVSS

SEQ ID NO: 16517 - protein, 114 aa, Artificial Sequence
  source: /note="Description of Artificial Sequence: Synthetic polypeptide"
EVQLVESGGGLVQAGGSLRLSCAASGVDASNSAMGWYRQAPGKQREWVARITGGGLIAYTDSVKGRFTISRDNAKSTVYLQMNSLEPEDTAVYYCNTINSRDGWGQGTQVTVSS

SEQ ID NO: 16518 - protein, 126 aa, Artificial Sequence
  source: /note="Description of Artificial Sequence: Synthetic polypeptide"
EVQLVESGGGLVQPGGSLRLSCAASGFTLDYYAIGWFRQAPGKEREWASSISSSDGSTYYADSVKGRFTISRDNAKNTVFLQMNSLKPEDTAVYSCAASQAPITIATMMKPFYDYWGQGTQVTVSS

SEQ ID NO: 16519 - protein, 123 aa, Artificial Sequence
  source: /note="Description of Artificial Sequence: Synthetic polypeptide"
EVQLVESGGGLVQPGGSLRLSCAASGFTLDYYAKCWFRQAPGKEREWVSCISSSDGSTYYADSVKGRFTISRDNAKNTVYLQMNSLKPEDTAVYFCAARHGGPLTVEYFFDYWGQGTQVTVSS

SEQ ID NO: 16520 - protein, 124 aa, Artificial Sequence
  source: /note="Description of Artificial Sequence: Synthetic polypeptide"
EVQLVESGGGLVQPGGSLRLSCAASGFTFDYYAIGWFRQAPGKAREGVSCISGGDNSTYYADSVKGRFTISRDNAKNTVYLQMNSLKPEDTAVYYCATGGWKYCSGYDPEYIYWGQGTQVTVSS

SEQ ID NO: 16521 - protein, 115 aa, Artificial Sequence
  source: /note="Description of Artificial Sequence: Synthetic polypeptide"
EVQLVESGGGLVQAGGSLRLSCAASGSTFSQYDVGWYRQAPGKQRELVAFSSSGGRTIYPDSVKGRFTFSRDNTKNTVYLQMTSLKPEDTAVYYCKIDWYLNSYWGQGTQVTVSS

SEQ ID NO: 16522 - protein, 249 aa, Artificial Sequence
  source: /note="Description of Artificial Sequence: Synthetic polypeptide"
EVQLVESGGGLVQPGGSLRLSCAASGFILDYYAIGWFRQAPGKEREGVLCIDASDDITYYADSVKGRFTISRDNAKNTVYLQMNSLKPEDTGVYYCATPIGLSSSCLLEYDYDYWGQGTLVTVSSGGGGSGGGSEVQLVESGGGLVQPGNSLRLSCAASGFTFSSFGMSWVRQAPGKGLEWVSSISGSGSDTLYADSVKGRFTISRDNAKTTLYLQMNSLRPEDTAVYYCTIGGSLSRSSQGTLVTVSS

SEQ ID NO: 16523 - protein, 254 aa, Artificial Sequence
  source: /note="Description of Artificial Sequence: Synthetic polypeptide"
EVQLVESGGGLVQAGGSLRLSCAASGRTISRYTMGWFRQAPGKEREFVAAISWSGDNTNYADSVKGRFTISRPNTKNTMYLQMNSLKPEDTAVYYCAADYRSGSYYQASEWTRPSGYDYWGQGTLVTVSSGGGGSGGGSEVQLVESGGGLVQPGNSLRLSCAASGFTFSSFGMSWVRQAPGKGLEWVSSISGSGSDTLYADSVKGRFTISRDNAKTTLYLQMNSLRPEDTAVYYCTIGGSLSRSSQGTLVTVSS

SEQ ID NO: 16524 - protein, 249 aa, Artificial Sequence
  source: /note="Description of Artificial Sequence: Synthetic polypeptide"
EVQLVESGGGLVQPGGSLRLSCAASGFSLDYFAIGWFRQAPGKEREEISCISNSDGSTYYANSVKGRFTISIDNAKNTVYLQMTSLKPEDTAVYYCATPVGLGPFCKTTNDYDYSGQGTLVTVSSGGGGSGGGSEVQLVESGGGLVQPGNSLRLSCAASGFTFSSFGMSWVRQAPGKGLEWVSSISGSGSDTLYADSVKGRFTISRDNAKTTLYLQMNSLRPEDTAVYYCTIGGSLSRSSQGTLVTVSS

SEQ ID NO: 16525 - protein, 248 aa, Artificial Sequence
  source: /note="Description of Artificial Sequence: Synthetic polypeptide"
EVQLVESGGGLVQPGGSLRLSCAASGFTLDYYAINWFRQAPGKEREGVSCISGGDGSTYYADSVKGRFTISRDNAKNTVYLQMNSLKPEDTAVYYCATALGLSSSCHGDGYDYWGQGTLVTVSSGGGGSGGGSEVQLVESGGGLVQPGNSLRLSCAASGFTFSSFGMSWVRQAPGKGLEWVSSISGSGSDTLYADSVKGRFTISRDNAKTTLYLQMNSLRPEDTAVYYCTIGGSLSRSSQGTLVTVSS

SEQ ID NO: 16526 - protein, 275 aa, Artificial Sequence
  source: /note="Description of Artificial Sequence: Synthetic polypeptide"
EVQLVESGGGLVQPGNSLRLSCAASGFTFSSFGMSWVRQAPGKGLEWVSSISGSGSDTLYADSVKGRFTISRDNAKTTLYLQMNSLRPEDTAVYYCTIGGSLSRSSQGTLVTVSSGGGGSGGGGSGGGGSGGGGSGGGGSGGGGSGGGGSEVQLVESGGGLVQPGGSLRLSCAASGFILDYYAIGWFRQAPGKEREGVLCIDASDDITYYADSVKGRFTISRDNAKNTVYLQMNSLKPEDTGVYYCATPIGLSSSCLLEYDYDYWGQGTLVTVSS

SEQ ID NO: 16527 - protein, 249 aa, Artificial Sequence
  source: /note="Description of Artificial Sequence: Synthetic polypeptide"
EVQLVESGGGLVQPGNSLRLSCAASGFTFSSFGMSWVRQAPGKGLEWVSSISGSGSDTLYADSVKGRFTISRDNAKTTLYLQMNSLRPEDTAVYYCTIGGSLSRSSQGTLVTVSSGGGGSGGGSEVQLVESGGGLVQPGGSLRLSCAASGFILDYYAIGWFRQAPGKEREGVLCIDASDDITYYADSVKGRFTISRDNAKNTVYLQMNSLKPEDTGVYYCATPIGLSSSCLLEYDYDYWGQGTLVTVSS

SEQ ID NO: 16528 - protein, 125 aa, Artificial Sequence
  source: /note="Description of Artificial Sequence: Synthetic polypeptide"
DVQLVESGGGLVQPGGSLRLSCAASGFILDYYAIGWFRQAPGKEREGVLCIDASDDITYYADSVKGRFTISRDNSKNTVYLQMNSLRPEDTAVYYCATPIGLSSSCLLEYDYDYWGQGTLVTVSS

SEQ ID NO: 16529 - protein, 249 aa, Artificial Sequence
  source: /note="Description of Artificial Sequence: Synthetic polypeptide"
EVQLLESGGGLVQPGGSLRLSCAASGFTFRSFGMSWVRQAPGKGPEWVSSISGSGSDTLYADSVKGRFTISRDNSKNTLYLQMNSLRPEDTAVYYCTIGGSLSRSSQGTLVTVSSGGGGSGGGSEVQLVESGGGLVQPGGSLRLSCAASGFILDYYAIGWFRQAPGKEREGVLCIDASDDITYYADSVKGRFTISRDNAKNTVYLQMNSLKPEDTGVYYCATPIGLSSSCLLEYDYDYWGQGTLVTVSS

SEQ ID NO: 16530 - protein, 249 aa, Artificial Sequence
  source: /note="Description of Artificial Sequence: Synthetic polypeptide"
EVQLVESGGGLVQPGGSLRLSCAASGFILDYYAIGWFRQAPGKEREGVLCIDASDDITYYADSVKGRFTISRDNAKNTVYLQMNSLKPEDTGVYYCATPIGLSSSCLLEYDYDYWGQGTLVTVSSGGGGSGGGSEVQLLESGGGLVQPGGSLRLSCAASGFTFRSFGMSWVRQAPGKGPEWVSSISGSGSDTLYADSVKGRFTISRDNSKNTLYLQMNSLRPEDTAVYYCTIGGSLSRSSQGTLVTVSS

SEQ ID NO: 16531 - protein, 249 aa, Artificial Sequence
  source: /note="Description of Artificial Sequence: Synthetic polypeptide"
EVQLLESGGGLVQPGGSLRLSCAASGFTFRSFGMSWVRQAPGKGPEWVSSISGSGSDTLYADSVKGRFTISRDNSKNTLYLQMNSLRPEDTAVYYCTIGGSLSRSSQGTLVTVSSGGGGSGGGSDVQLVESGGGLVQPGGSLRLSCAASGFILDYYAIGWFRQAPGKEREGVLCIDASDDITYYADSVKGRFTISRDNSKNTVYLQMNSLRPEDTAVYYCATPIGLSSSCLLEYDYDYWGQGTLVTVSS

SEQ ID NO: 16532 - protein, 249 aa, Artificial Sequence
  source: /note="Description of Artificial Sequence: Synthetic polypeptide"
DVQLVESGGGLVQPGGSLRLSCAASGFILDYYAIGWFRQAPGKEREGVLCIDASDDITYYADSVKGRFTISRDNSKNTVYLQMNSLRPEDTAVYYCATPIGLSSSCLLEYDYDYWGQGTLVTVSSGGGGSGGGSEVQLLESGGGLVQPGGSLRLSCAASGFTFRSFGMSWVRQAPGKGPEWVSSISGSGSDTLYADSVKGRFTISRDNSKNTLYLQMNSLRPEDTAVYYCTIGGSLSRSSQGTLVTVSS

SEQ ID NO: 16533 - protein, 275 aa, Artificial Sequence
  source: /note="Description of Artificial Sequence: Synthetic polypeptide"
EVQLLESGGGLVQPGGSLRLSCAASGFTFRSFGMSWVRQAPGKGPEWVSSISGSGSDTLYADSVKGRFTISRDNSKNTLYLQMNSLRPEDTAVYYCTIGGSLSRSSQGTLVTVSSGGGGSGGGGSGGGGSGGGGSGGGGSGGGGSGGGGSEVQLVESGGGLVQPGGSLRLSCAASGFILDYYAIGWFRQAPGKEREGVLCIDASDDITYYADSVKGRFTISRDNAKNTVYLQMNSLKPEDTGVYYCATPIGLSSSCLLEYDYDYWGQGTLVTVSS

SEQ ID NO: 16534 - protein, 275 aa, Artificial Sequence
  source: /note="Description of Artificial Sequence: Synthetic polypeptide"
EVQLVESGGGLVQPGGSLRLSCAASGFILDYYAIGWFRQAPGKEREGVLCIDASDDITYYADSVKGRFTISRDNAKNTVYLQMNSLKPEDTGVYYCATPIGLSSSCLLEYDYDYWGQGTLVTVSSGGGGSGGGGSGGGGSGGGGSGGGGSGGGGSGGGGSEVQLLESGGGLVQPGGSLRLSCAASGFTFRSFGMSWVRQAPGKGPEWVSSISGSGSDTLYADSVKGRFTISRDNSKNTLYLQMNSLRPEDTAVYYCTIGGSLSRSSQGTLVTVSS

SEQ ID NO: 16535 - protein, 275 aa, Artificial Sequence
  source: /note="Description of Artificial Sequence: Synthetic polypeptide"
EVQLLESGGGLVQPGGSLRLSCAASGFTFRSFGMSWVRQAPGKGPEWVSSISGSGSDTLYADSVKGRFTISRDNSKNTLYLQMNSLRPEDTAVYYCTIGGSLSRSSQGTLVTVSSGGGGSGGGGSGGGGSGGGGSGGGGSGGGGSGGGGSDVQLVESGGGLVQPGGSLRLSCAASGFILDYYAIGWFRQAPGKEREGVLCIDASDDITYYADSVKGRFTISRDNSKNTVYLQMNSLRPEDTAVYYCATPIGLSSSCLLEYDYDYWGQGTLVTVSS

SEQ ID NO: 16536 - protein, 275 aa, Artificial Sequence
  source: /note="Description of Artificial Sequence: Synthetic polypeptide"
DVQLVESGGGLVQPGGSLRLSCAASGFILDYYAIGWFRQAPGKEREGVLCIDASDDITYYADSVKGRFTISRDNSKNTVYLQMNSLRPEDTAVYYCATPIGLSSSCLLEYDYDYWGQGTLVTVSSGGGGSGGGGSGGGGSGGGGSGGGGSGGGGSGGGGSEVQLLESGGGLVQPGGSLRLSCAASGFTFRSFGMSWVRQAPGKGPEWVSSISGSGSDTLYADSVKGRFTISRDNSKNTLYLQMNSLRPEDTAVYYCTIGGSLSRSSQGTLVTVSS

SEQ ID NO: 16537 - protein, 383 aa, Artificial Sequence
  source: /note="Description of Artificial Sequence: Synthetic polypeptide"
DVQLVESGGGLVQPGGSLRLSCAASGFILDYYAIGWFRQAPGKEREGVLCIDASDDITYYADSVKGRFTISRDNSKNTVYLQMNSLRPEDTAVYYCATPIGLSSSCLLEYDYDYWGQGTLVTVSSGGGGSGGGSDVQLVESGGGLVQPGGSLRLSCAASGFILDYYAIGWFRQAPGKEREGVLCIDASDDITYYADSVKGRFTISRDNSKNTVYLQMNSLRPEDTAVYYCATPIGLSSSCLLEYDYDYWGQGTLVTVSSGGGGSGGGSEVQLLESGGGLVQPGGSLRLSCAASGFTFRSFGMSWVRQAPGKGPEWVSSISGSGSDTLYADSVKGRFTISRDNSKNTLYLQMNSLRPEDTAVYYCTIGGSLSRSSQGTLVTVSS

SEQ ID NO: 16538 - protein, 283 aa, Artificial Sequence
  source: /note="Description of Artificial Sequence: Synthetic polypeptide"
EVQLVESGGGLVQPGGSLRLSCAASGFILDYYAIGWFRQAPGKEREGVLCIDASDDITYYADSVKGRFTISRDNAKNTVYLQMNSLKPEDTGVYYCATPIGLSSSCLLEYDYDYWGQGTLVTVSSGGGGSGGGSEVQLVESGGGLVQPGNSLRLSCAASGFTFSSFGMSWVRQAPGKGLEWVSSISGSGSDTLYADSVKGRFTISRDNAKTTLYLQMNSLRPEDTAVYYCTIGGSLSRSSQGTLVTVSSGAADYKDHDGDYKDHDIDYKDDDDKGAAHHHHHH

SEQ ID NO: 16539 - protein, 249 aa, Artificial Sequence
  source: /note="Description of Artificial Sequence: Synthetic polypeptide"
DVQLVESGGGLVQPGGSLRLSCAASGFILDYYAIGWFRQAPGKEREGVLCIDASDDITYYADSVKGRFTISRDNSKNTVYLQMNSLRPEDTAVYYCATPIGLSSSCLLEYDYDYWGQGTLVTVSSGGGGSGGGSEVQLVESGGGLVQPGNSLRLSCAASGFTFSSFGMSWVRQAPGKGLEWVSSISGSGSDTLYADSVKGRFTISRDNAKTTLYLQMNSLRPEDTAVYYCTIGGSLSRSSQGTLVTVSS

SEQ ID NO: 16540 - protein, 158 aa, Artificial Sequence
  source: /note="Description of Artificial Sequence: Synthetic polypeptide"
VQLVESGGGLVQPGGSLRLSCAASGFILDYYAIGWFRQAPGKEREGVLCIDASDDITYYADSVKGRFTISRDNAKNTVYLQMNSLKPEDTGVYYCATPIGLSSSCLLEYDYDYWGQGTLVTVSSAAADYKDHDGDYKDHDIDYKDDDDKGAAHHHHHH

SEQ ID NO: 16541 - protein, 159 aa, Artificial Sequence
  source: /note="Description of Artificial Sequence: Synthetic polypeptide"
EVQLVESGGGLVQPGGSLRLSCAASGFILDYYAIGWFRQAPGKEREGVLCIDASDDITYYADSVKGRFTISRDNSKNTVYLQMNSLRPEDTGVYYCATPIGLSSSCLLEYDYDYWGQGTLVTVSSAAADYKDHDGDYKDHDIDYKDDDDKGAAHHHHHH

SEQ ID NO: 16542 - protein, 159 aa, Artificial Sequence
  source: /note="Description of Artificial Sequence: Synthetic polypeptide"
EVQLVESGGGLVQPGGSLRLSCAASGFILDYYAIGWFRQAPGKEREGVLCIDASDDITYYADSVKGRFTISRDNSKNTVYLQMNSLRPEDTAVYYCATPIGLSSSCLLEYDYDYWGQGTLVTVSSAAADYKDHDGDYKDHDIDYKDDDDKGAAHHHHHH

SEQ ID NO: 16543 - protein, 158 aa, Artificial Sequence
  source: /note="Description of Artificial Sequence: Synthetic polypeptide"
EVQLVESGGGLVQPGGSLRLSCAASGFTFDDYAIGWFRQAPGEEREGVSSISSTYGLTYYADSVKGRFTISSSNSKNTVYLQMNNLKPEDTAVYYCAATPIERLGLDAYEYDYWGQGTLVTVSSAAADYKDHDGDYKDHDIDYKDDDDKGAAHHHHHH

SEQ ID NO: 16544 - protein, 158 aa, Artificial Sequence
  source: /note="Description of Artificial Sequence: Synthetic polypeptide"
EVQLVESGGGLVQPGGSLRLSCAASGFTFDDYAIGWFRQAPGEEREGVSSISSTYGLTYYADSVKGRFTISSSNSKNTVYLQMNSLKPEDTAVYYCAATPIERLGLDAYEYDYWGQGTLVTVSSAAADYKDHDGDYKDHDIDYKDDDDKGAAHHHHHH

SEQ ID NO: 16545 - protein, 158 aa, Artificial Sequence
  source: /note="Description of Artificial Sequence: Synthetic polypeptide"
EVQLVESGGGLVQPGGSLRLSCAASGFTFDDYAIGWFRQAPGEEREGVSSISSTYGLTYYADSVKGRFTISSDNSKNTVYLQMNNLKPEDTAVYYCAATPIERLGLDAYEYDYWGQGTLVTVSSAAADYKDHDGDYKDHDIDYKDDDDKGAAHHHHHH

SEQ ID NO: 16546 - protein, 158 aa, Artificial Sequence
  source: /note="Description of Artificial Sequence: Synthetic polypeptide"
EVQLVESGGGLVQPGGSLRLSCAASGFTFDDYAIGWFRQAPGEEREGVSSISSTYGLTYYADSVKGRFTISSDNSKNTVYLQMNSLKPEDTAVYYCAATPIERLGLDAYEYDYWGQGTLVTVSSAAADYKDHDGDYKDHDIDYKDDDDKGAAHHHHHH

SEQ ID NO: 16547 - protein, 158 aa, Artificial Sequence
  source: /note="Description of Artificial Sequence: Synthetic polypeptide"
EVQLVESGGGLVQPGGSLRLSCAASGFTFDDYAIGWFRQAPGEEREGVSSISSTYGLTYYADSVKGRFTISRSNSKNTVYLQMNNLKPEDTAVYYCAATPIERLGLDAYEYDYWGQGTLVTVSSAAADYKDHDGDYKDHDIDYKDDDDKGAAHHHHHH

SEQ ID NO: 16548 - protein, 158 aa, Artificial Sequence
  source: /note="Description of Artificial Sequence: Synthetic polypeptide"
EVQLVESGGGLVQPGGSLRLSCAASGFTFDDYAIGWFRQAPGEEREGVSSISSTYGLTYYADSVKGRFTISRDNSKNTVYLQMNNLKPEDTAVYYCAATPIERLGLDAYEYDYWGQGTLVTVSSAAADYKDHDGDYKDHDIDYKDDDDKGAAHHHHHH

SEQ ID NO: 16549 - protein, 157 aa, Artificial Sequence
  source: /note="Description of Artificial Sequence: Synthetic polypeptide"
VQLVESGGGLVQPGGSLRLSCAASGFTFDDYAIGWFRQAPGEEREGVSSISSTYGLTYYADSVKGRFTISRSNSKNTVYLQMNSLKPEDTAVYYCAATPIERLGLDAYEYDYWGQGTLVTVSSAAADYKDHDGDYKDHDIDYKDDDDKGAAHHHHHH

SEQ ID NO: 16550 - protein, 158 aa, Artificial Sequence
  source: /note="Description of Artificial Sequence: Synthetic polypeptide"
EVQLVESGGGLVQPGGSLRLSCAASGFTFDDYAIGWFRQAPGEEREGVSSISSTYGLTYYADSVKGRFTISRDNSKNTVYLQMNSLKPEDTAVYYCAATPIERLGLDAYEYDYWGQGTLVTVSSAAADYKDHDGDYKDHDIDYKDDDDKGAAHHHHHH

SEQ ID NO: 16551 - protein, 158 aa, Artificial Sequence
  source: /note="Description of Artificial Sequence: Synthetic polypeptide"
EVQLVESGGGLVQPGGSLRLSCAASGFTFDDYAIGWFRQAPGKEREGVSSISSTYGLTYYADSVKGRFTISSSNSKNTVYLQMNNLKPEDTAVYYCAATPIERLGLDAYEYDYWGQGTLVTVSSAAADYKDHDGDYKDHDIDYKDDDDKGAAHHHHHH

SEQ ID NO: 16552 - protein, 201 aa, Artificial Sequence
  source: /note="Description of Artificial Sequence: Synthetic polypeptide"
EVQLVESGGGLVQPGGSLRLSCAASGFTFDDYAIGWFRQAPGKEREGVSSISSTYGLTYYADSVKGRFTISSSNSKNTVYLQMNSLKPEDTAVYYCAATPIERLGLDAYEYDYWGQGTLVTVSSAAADYKDHDGDYKDHDIDYKDDDDKGAAHHHHHHEVQLVESGGGLVQPGGSLRLSCAASGFTFDDYAIGWFRQAPGK

SEQ ID NO: 16553 - protein, 115 aa, Artificial Sequence
  source: /note="Description of Artificial Sequence: Synthetic polypeptide"
EREGVSSISSTYGLTYYADSVKGRFTISSDNSKNTVYLQMNNLKPEDTAVYYCAATPIERLGLDAYEYDYWGQGTLVTVSSAAADYKDHDGDYKDHDIDYKDDDDKGAAHHHHHH

SEQ ID NO: 16554 - protein, 158 aa, Artificial Sequence
  source: /note="Description of Artificial Sequence: Synthetic polypeptide"
EVQLVESGGGLVQPGGSLRLSCAASGFTFDDYAIGWFRQAPGKEREGVSSISSTYGLTYYADSVKGRFTISSDNSKNTVYLQMNSLKPEDTAVYYCAATPIERLGLDAYEYDYWGQGTLVTVSSAAADYKDHDGDYKDHDIDYKDDDDKGAAHHHHHH

SEQ ID NO: 16555 - protein, 158 aa, Artificial Sequence
  source: /note="Description of Artificial Sequence: Synthetic polypeptide"
EVQLVESGGGLVQPGGSLRLSCAASGFTFDDYAIGWFRQAPGKEREGVSSISSTYGLTYYADSVKGRFTISRSNSKNTVYLQMNNLKPEDTAVYYCAATPIERLGLDAYEYDYWGQGTLVTVSSAAADYKDHDGDYKDHDIDYKDDDDKGAAHHHHHH

SEQ ID NO: 16556 - protein, 158 aa, Artificial Sequence
  source: /note="Description of Artificial Sequence: Synthetic polypeptide"
EVQLVESGGGLVQPGGSLRLSCAASGFTFDDYAIGWFRQAPGKEREGVSSISSTYGLTYYADSVKGRFTISRDNSKNTVYLQMNNLKPEDTAVYYCAATPIERLGLDAYEYDYWGQGTLVTVSSAAADYKDHDGDYKDHDIDYKDDDDKGAAHHHHHH

SEQ ID NO: 16557 - protein, 158 aa, Artificial Sequence
  source: /note="Description of Artificial Sequence: Synthetic polypeptide"
EVQLVESGGGLVQPGGSLRLSCAASGFTFDDYAIGWFRQAPGKEREGVSSISSTYGLTYYADSVKGRFTISRSNSKNTVYLQMNSLKPEDTAVYYCAATPIERLGLDAYEYDYWGQGTLVTVSSAAADYKDHDGDYKDHDIDYKDDDDKGAAHHHHHH

SEQ ID NO: 16558 - protein, 158 aa, Artificial Sequence
  source: /note="Description of Artificial Sequence: Synthetic polypeptide"
EVQLVESGGGLVQPGGSLRLSCAASGFTFDDYAIGWFRQAPGKEREGVSSISSTYGLTYYADSVKGRFTISRDNSKNTVYLQMNSLKPEDTAVYYCAATPIERLGLDAYEYDYWGQGTLVTVSSAAADYKDHDGDYKDHDIDYKDDDDKGAAHHHHHH

SEQ ID NO: 16559 - protein, 158 aa, Artificial Sequence
  source: /note="Description of Artificial Sequence: Synthetic polypeptide"
EVQLVESGGGLVQPGGSLRLSCAASGFTFDDYAIGWFRQAPGEEREGVSSISSTYGLTYYADSVKGRFTISSDNSKNTVYLQMNSLRPEDTAVYYCAATPIGLIGLDAYEYDYWGQGTLVTVSSAAADYKDHDGDYKDHDIDYKDDDDKGAAHHHHHH

SEQ ID NO: 16560 - protein, 158 aa, Artificial Sequence
  source: /note="Description of Artificial Sequence: Synthetic polypeptide"
EVQLVESGGGLVQPGGSLRLSCAASGFAFDDYAIGWFRQAPGEEREGVSSISSTYGLTYYADSVKGRFTISSDNSKNTVYLQMNSLRPEDTAVYYCAATPIGLIGLDAYEYDYWGQGTLVTVSSAAADYKDHDGDYKDHDIDYKDDDDKGAAHHHHHH

SEQ ID NO: 16561 - protein, 158 aa, Artificial Sequence
  source: /note="Description of Artificial Sequence: Synthetic polypeptide"
EVQLVESGGGLVQPGGSLRLSCAASGFTFDDYAIGWFRQAPGKEREGVSSISSTYGLTYYADSVKGRFTISSDNSKNTVYLQMNSLRPEDTAVYYCAATPIGLIGLDAYEYDYWGQGTLVTVSSAAADYKDHDGDYKDHDIDYKDDDDKGAAHHHHHH

SEQ ID NO: 16562 - protein, 158 aa, Artificial Sequence
  source: /note="Description of Artificial Sequence: Synthetic polypeptide"
EVQLVESGGGLVQPGGSLRLSCAASGFAFDDYAIGWFRQAPGKEREGVSSISSTYGLTYYADSVKGRFTISSDNSKNTVYLQMNSLRPEDTAVYYCAATPIGLIGLDAYEYDYWGQGTLVTVSSAAADYKDHDGDYKDHDIDYKDDDDKGAAHHHHHH

SEQ ID NO: 16563 - protein, 158 aa, Artificial Sequence
  source: /note="Description of Artificial Sequence: Synthetic polypeptide"
EVQLVESGGGLVQPGGSLRLSCAASGFTFDDYAIGWFRQAPGEERLGVSSISSTYGLTYYADSVKGRFTISSDNSKNTVYLQMNSLRPEDTAVYYCAATPIGLIGLDAYEYDYWGQGTLVTVSSAAADYKDHDGDYKDHDIDYKDDDDKGAAHHHHHH

SEQ ID NO: 16564 - protein, 158 aa, Artificial Sequence
  source: /note="Description of Artificial Sequence: Synthetic polypeptide"
EVQLVESGGGLVQPGGSLRLSCAASGFAFDDYAIGWFRQAPGEERLGVSSISSTYGLTYYADSVKGRFTISSDNSKNTVYLQMNSLRPEDTAVYYCAATPIGLIGLDAYEYDYWGQGTLVTVSSAAADYKDHDGDYKDHDIDYKDDDDKGAAHHHHHH

SEQ ID NO: 16565 - protein, 158 aa, Artificial Sequence
  source: /note="Description of Artificial Sequence: Synthetic polypeptide"
EVQLVESGGGLVQPGGSLRLSCAASGFTFDDYAIGWFRQAPGKERLGVSSISSTYGLTYYADSVKGRFTISSDNSKNTVYLQMNSLRPEDTAVYYCAATPIGLIGLDAYEYDYWGQGTLVTVSSAAADYKDHDGDYKDHDIDYKDDDDKGAAHHHHHH

SEQ ID NO: 16566 - protein, 158 aa, Artificial Sequence
  source: /note="Description of Artificial Sequence: Synthetic polypeptide"
EVQLVESGGGLVQPGGSLRLSCAASGFAFDDYAIGWFRQAPGKERLGVSSISSTYGLTYYADSVKGRFTISSDNSKNTVYLQMNSLRPEDTAVYYCAATPIGLIGLDAYEYDYWGQGTLVTVSSAAADYKDHDGDYKDHDIDYKDDDDKGAAHHHHHH

SEQ ID NO: 16567 - protein, 158 aa, Artificial Sequence
  source: /note="Description of Artificial Sequence: Synthetic polypeptide"
EVQLVESGGGLVQPGGSLRLSCAASGFTFDDYAIGWFRQAPGEEREGVSSISSTYGLTYYADPVKGRFTISSDNSKNTVYLQMNSLRPEDTAVYYCAATPIGLIGLDAYEYDYWGQGTLVTVSSAAADYKDHDGDYKDHDIDYKDDDDKGAAHHHHHH

SEQ ID NO: 16568 - protein, 249 aa, Artificial Sequence
  source: /note="Description of Artificial Sequence: Synthetic polypeptide"
DVQLVESGGGLVQPGGSLRLSCAASGFTFDDYAIGWFRQAPGEEREGVSSISSTYGLTYYADSVKGRFTISSDNSKNTVYLQMNSLRPEDTAVYYCAATPIGLIGLDAYEYDYWGQGTLVTVSSGGGGSGGGSEVQLVESGGGLVQPGNSLRLSCAASGFTFSSFGMSWVRQAPGKGLEWVSSISGSGSDTLYADSVKGRFTISRDNAKTTLYLQMNSLRPEDTAVYYCTIGGSLSRSSQGTLVTVSSA

SEQ ID NO: 16569 - protein, 249 aa, Artificial Sequence
  source: /note="Description of Artificial Sequence: Synthetic polypeptide"
DVQLVESGGGLVQPGGSLRLSCAASGFAFDDYAIGWFRQAPGEEREGVSSISSTYGLTYYADSVKGRFTISSDNSKNTVYLQMNSLRPEDTAVYYCAATPIGLIGLDAYEYDYWGQGTLVTVSSGGGGSGGGSEVQLVESGGGLVQPGNSLRLSCAASGFTFSSFGMSWVRQAPGKGLEWVSSISGSGSDTLYADSVKGRFTISRDNAKTTLYLQMNSLRPEDTAVYYCTIGGSLSRSSQGTLVTVSSA

SEQ ID NO: 16570 - protein, 249 aa, Artificial Sequence
  source: /note="Description of Artificial Sequence: Synthetic polypeptide"
DVQLVESGGGLVQPGGSLRLSCAASGFTFDDYAIGWFRQAPGKEREGVSSISSTYGLTYYADSVKGRFTISSDNSKNTVYLQMNSLRPEDTAVYYCAATPIGLIGLDAYEYDYWGQGTLVTVSSGGGGSGGGSEVQLVESGGGLVQPGNSLRLSCAASGFTFSSFGMSWVRQAPGKGLEWVSSISGSGSDTLYADSVKGRFTISRDNAKTTLYLQMNSLRPEDTAVYYCTIGGSLSRSSQGTLVTVSSA

SEQ ID NO: 16571 - protein, 249 aa, Artificial Sequence
  source: /note="Description of Artificial Sequence: Synthetic polypeptide"
DVQLVESGGGLVQPGGSLRLSCAASGFAFDDYAIGWFRQAPGKEREGVSSISSTYGLTYYADSVKGRFTISSDNSKNTVYLQMNSLRPEDTAVYYCAATPIGLIGLDAYEYDYWGQGTLVTVSSGGGGSGGGSEVQLVESGGGLVQPGNSLRLSCAASGFTFSSFGMSWVRQAPGKGLEWVSSISGSGSDTLYADSVKGRFTISRDNAKTTLYLQMNSLRPEDTAVYYCTIGGSLSRSSQGTLVTVSSA

SEQ ID NO: 16572 - protein, 249 aa, Artificial Sequence
  source: /note="Description of Artificial Sequence: Synthetic polypeptide"
DVQLVESGGGLVQPGGSLRLSCAASGFTFDDYAIGWFRQAPGEERLGVSSISSTYGLTYYADSVKGRFTISSDNSKNTVYLQMNSLRPEDTAVYYCAATPIGLIGLDAYEYDYWGQGTLVTVSSGGGGSGGGSEVQLVESGGGLVQPGNSLRLSCAASGFTFSSFGMSWVRQAPGKGLEWVSSISGSGSDTLYADSVKGRFTISRDNAKTTLYLQMNSLRPEDTAVYYCTIGGSLSRSSQGTLVTVSSA

SEQ ID NO: 16573 - protein, 249 aa, Artificial Sequence
  source: /note="Description of Artificial Sequence: Synthetic polypeptide"
DVQLVESGGGLVQPGGSLRLSCAASGFAFDDYAIGWFRQAPGEERLGVSSISSTYGLTYYADSVKGRFTISSDNSKNTVYLQMNSLRPEDTAVYYCAATPIGLIGLDAYEYDYWGQGTLVTVSSGGGGSGGGSEVQLVESGGGLVQPGNSLRLSCAASGFTFSSFGMSWVRQAPGKGLEWVSSISGSGSDTLYADSVKGRFTISRDNAKTTLYLQMNSLRPEDTAVYYCTIGGSLSRSSQGTLVTVSSA

SEQ ID NO: 16574 - protein, 249 aa, Artificial Sequence
  source: /note="Description of Artificial Sequence: Synthetic polypeptide"
DVQLVESGGGLVQPGGSLRLSCAASGFTFDDYAIGWFRQAPGKERLGVSSISSTYGLTYYADSVKGRFTISSDNSKNTVYLQMNSLRPEDTAVYYCAATPIGLIGLDAYEYDYWGQGTLVTVSSGGGGSGGGSEVQLVESGGGLVQPGNSLRLSCAASGFTFSSFGMSWVRQAPGKGLEWVSSISGSGSDTLYADSVKGRFTISRDNAKTTLYLQMNSLRPEDTAVYYCTIGGSLSRSSQGTLVTVSSA

SEQ ID NO: 16575 - protein, 249 aa, Artificial Sequence
  source: /note="Description of Artificial Sequence: Synthetic polypeptide"
DVQLVESGGGLVQPGGSLRLSCAASGFAFDDYAIGWFRQAPGKERLGVSSISSTYGLTYYADSVKGRFTISSDNSKNTVYLQMNSLRPEDTAVYYCAATPIGLIGLDAYEYDYWGQGTLVTVSSGGGGSGGGSEVQLVESGGGLVQPGNSLRLSCAASGFTFSSFGMSWVRQAPGKGLEWVSSISGSGSDTLYADSVKGRFTISRDNAKTTLYLQMNSLRPEDTAVYYCTIGGSLSRSSQGTLVTVSSA

SEQ ID NO: 16576 - protein, 249 aa, Artificial Sequence
  source: /note="Description of Artificial Sequence: Synthetic polypeptide"
DVQLVESGGGLVQPGGSLRLSCAASGFTFDDYAIGWFRQAPGEEREGVSSISSTYGLTYYADPVKGRFTISSDNSKNTVYLQMNSLRPEDTAVYYCAATPIGLIGLDAYEYDYWGQGTLVTVSSGGGGSGGGSEVQLVESGGGLVQPGNSLRLSCAASGFTFSSFGMSWVRQAPGKGLEWVSSISGSGSDTLYADSVKGRFTISRDNAKTTLYLQMNSLRPEDTAVYYCTIGGSLSRSSQGTLVTVSSA

SEQ ID NO: 16577 - protein, 158 aa, Artificial Sequence
  source: /note="Description of Artificial Sequence: Synthetic polypeptide"
EVQLVESGGGLVQAGGSLRLSCAASGFTFDDYAIGWFRQAPGEEREGVSSISSTYGLTYYADSVKGRFTISSSNAKNTVYLQMNNLKPEDTAVYYCAATPIERLGLDAYEYDYWGQGTLVTVSSAAADYKDHDGDYKDHDIDYKDDDDKGAAHHHHHH

SEQ ID NO: 16578 - protein, 250 aa, Artificial Sequence
  source: /note="Description of Artificial Sequence: Synthetic polypeptide"
DVQLVESGGGLVQPGGSLRLSCAASGFILDYYAIGWFRQAPGKEREGVLCIDASDDITYYADSVKGRFTISRDNSKNTVYLQMNSLRPEDTAVYYCATPIGLSSSCLLEYDYDYWGQGTLVTVSSGGGGSGGGSEVQLLESGGGLVQPGGSLRLSCAASGFTFRSFGMSWVRQAPGKGPEWVSSISGSGSDTLYADSVKGRFTISRDNSKNTLYLQMNSLRPEDTAVYYCTIGGSLSRSSQGTLVTVSSA

SEQ ID NO: 16579 - protein, 120 aa, Artificial Sequence
  source: /note="Description of Artificial Sequence: Synthetic polypeptide"
QVQLVQSGAEVKKPGSSVKVSCKGSGFTFTDYKIHWVRQAPGQGLEWMGYFNPNSGYSTYAQKFQGRVTITADKSTSTAYMELSSLRSEDTAVYYCARLSPGGYYVMDAWGQGTTVTVSS

SEQ ID NO: 16580 - protein, 120 aa, Artificial Sequence
  source: /note="Description of Artificial Sequence: Synthetic polypeptide"
QVQLVQSGAEVKKPGSSVKVSCKGSGFTFTDYKIHWVRQAPGQGLEWMGYFNPNSGYSTYNEKFKSRVTITADKSTSTAYMELSSLRSEDTAVYYCARLSPGGYYVMDAWGQGTTVTVSS

SEQ ID NO: 16581 - protein, 120 aa, Artificial Sequence
  source: /note="Description of Artificial Sequence: Synthetic polypeptide"
QVQLVQSGAEVKKPGASVKVSCKASGFTFTDYYMHWVRQAPGQGLEWMGWINPNSGYSTYAQKFQGRVTMTADTSISTAYMELSRLRSDDTAVYYCARLSPGGYYVMDAWGQGTTVTVSS

SEQ ID NO: 16582 - protein, 120 aa, Artificial Sequence
  source: /note="Description of Artificial Sequence: Synthetic polypeptide"
QVQLVQSGAEVKKPGASVKVSCKGSGFTFTDYKIHWVRQAPGQGLEWMGYFNPNSGYSTYAQKFQGRVTMTADTSISTAYMELSRLRSDDTAVYYCARLSPGGYYVMDAWGQGTTVTVSS

SEQ ID NO: 16583 - protein, 120 aa, Artificial Sequence
  source: /note="Description of Artificial Sequence: Synthetic polypeptide"
QVQLVQSGAEVKKPGASVKVSCKGSGFTFTDYKIHWVRQAPGQGLEWMGYFNPNSGYSTYNEKFKSRVTMTADTSISTAYMELSRLRSDDTAVYYCARLSPGGYYVMDAWGQGTTVTVSS

SEQ ID NO: 16584 - protein, 120 aa, Artificial Sequence
  source: /note="Description of Artificial Sequence: Synthetic polypeptide"
QVQLVQSGAEVKKPGSSVKVSCKGSGFTFTDYKISWVRQAPGQGLEWMGYFNPNSGYSTYAQKFQGRVTITADKSTSTAYMELSSLRSEDTAVYYCARLSPGGYYVMDAWGQGTTVTVSS

SEQ ID NO: 16585 - protein, 120 aa, Artificial Sequence
  source: /note="Description of Artificial Sequence: Synthetic polypeptide"
QVQLVQSGAEVKKPGSSVKVSCKGSGFTFTDYKIHWVRQAPGQGLEWMGYFNPNSGYSNYAQKFQGRVTITADKSTSTAYMELSSLRSEDTAVYYCARLSPGGYYVMDAWGQGTTVTVSS

SEQ ID NO: 16586 - protein, 120 aa, Artificial Sequence
  source: /note="Description of Artificial Sequence: Synthetic polypeptide"
QVQLVQSGAEVKKPGSSVKVSCKGSGFTFTDYKIHWVRQAPGQGLEWMGYFNPNSGYATYAQKFQGRVTITADKSTSTAYMELSSLRSEDTAVYYCARLSPGGYYVMDAWGQGTTVTVSS

SEQ ID NO: 16587 - protein, 120 aa, Artificial Sequence
  source: /note="Description of Artificial Sequence: Synthetic polypeptide"
QVQLVQSGAEVKKPGASVKVSCKASGFTFTDYYMHWVRQAPGQGLEWMGWINPNSGYSTYSPSFQGQVTISADKSISTAYLQWSSLKASDTAMYYCARLSPGGYYVMDAWGQGTTVTVSS

SEQ ID NO: 16588 - protein, 120 aa, Artificial Sequence
  source: /note="Description of Artificial Sequence: Synthetic polypeptide"
QVQLVQSGAEVKKPGASVKVSCKASGFTFTDYYMHWVRQAPGQGLEWMGWINPNSGYSTYNEKFQGQVTISADKSISTAYLQWSSLKASDTAMYYCARLSPGGYYVMDAWGQGTTVTVSS

SEQ ID NO: 16589 - protein, 120 aa, Artificial Sequence
  source: /note="Description of Artificial Sequence: Synthetic polypeptide"
QVQLVQSGAEVKKPGASVKVSCKASGYTFTDYYMHWVRQAPGQGLEWMGWINPNSGYSTYSPSFQGQVTISADKSISTAYLQWSSLKASDTAMYYCARLSPGGYYVMDAWGQGTTVTVSS

SEQ ID NO: 16590 - protein, 120 aa, Artificial Sequence
  source: /note="Description of Artificial Sequence: Synthetic polypeptide"
QVQLVQSGAEVKKPGASVKVSCKASGYTFTDYYMHWVRQAPGQGLEWMGWINPNSGYSTYNEKFQGQVTISADKSISTAYLQWSSLKASDTAMYYCARLSPGGYYVMDAWGQGTTVTVSS

SEQ ID NO: 16591 - protein, 120 aa, Artificial Sequence
  source: /note="Description of Artificial Sequence: Synthetic polypeptide"
QMQLVQSGPEVKKPGTSVKVSCKASGFTFTDYYMHWVRQAPGQGLEWMGWINPNSGYSTYSPSFQGQVTISADKSISTAYLQWSSLKASDTAMYYCARLSPGGYYVMDAWGQGTTVTVSS

SEQ ID NO: 16592 - protein, 120 aa, Artificial Sequence
  source: /note="Description of Artificial Sequence: Synthetic polypeptide"
QMQLVQSGPEVKKPGTSVKVSCKASGFTFTDYYMHWVRQAPGQGLEWMGWINPNSGYSTYNEKFQGQVTISADKSISTAYLQWSSLKASDTAMYYCARLSPGGYYVMDAWGQGTTVTVSS

SEQ ID NO: 16593 - protein, 120 aa, Artificial Sequence
  source: /note="Description of Artificial Sequence: Synthetic polypeptide"
QMQLVQSGPEVKKPGTSVKVSCKASGFTFTDYKIHWVRQARGQRLEWIGWINPNSGYSTYNEKFQGQVTISADKSISTAYLQWSSLKASDTAMYYCARLSPGGYYVMDAWGQGTTVTVSS

SEQ ID NO: 16594 - protein, 120 aa, Artificial Sequence
  source: /note="Description of Artificial Sequence: Synthetic polypeptide"
QMQLVQSGPEVKKPGTSVKVSCKASGFTFTDYKIHWVRQAPGQGLEWMGYFNPNSGYSTYAQKFQGRVTITADKSTSTAYMELSSLRSEDTAVYYCARLSPGGYYVMDAWGQGTTVTVSS

SEQ ID NO: 16595 - protein, 120 aa, Artificial Sequence
  source: /note="Description of Artificial Sequence: Synthetic polypeptide"
EVQLVQSGAEVKKPGESLKISCKGSGYSFTDYKIHWVRQAPGQGLEWMGYFNPNSGYSTYAQKFQGRVTITADKSTSTAYMELSSLRSEDTAVYYCARLSPGGYYVMDAWGQGTTVTVSS

SEQ ID NO: 16596 - protein, 19 aa, Homo sapiens
MDWTWRILFLVAAATGAHS

SEQ ID NO: 16597 - protein, 120 aa, Artificial Sequence
  source: /note="Description of Artificial Sequence: Synthetic polypeptide"
EVQLVQSGAEVKKPGESLKISCKGSGYSFTDYKIHWVRQMPGKGLEWMGYFNPNSGYSTYSPSFQGQVTISADKSISTAYLQWSSLKASDTAMYYCARLSPGGYYVMDAWGQGTTVTVSS

SEQ ID NO: 16598 - protein, 108 aa, Artificial Sequence
  source: /note="Description of Artificial Sequence: Synthetic polypeptide"
DIQMTQSPSSLSASVGDRVTITCRASQGINNYLGWYQQKPGKAPKRLIYNTNNLQTGVPSRFSGSGSGTEFTLTISSLQPEDFATYYCLQHNSFPTFGQGTKLEIKRT

SEQ ID NO: 16599 - protein, 621 aa, Macaca fascicularis
LEEKKVCQGTSNKLTQLGTFEDHFLSLQRMFNNCEVVLGNLEITYVQRNYDLSFLKTIQEVAGYVLIALNTVERIPLENLQIIRGNMYYENSYALAVLSNYDANKTGLKELPMRNLQEILHGAVRFSNNPALCNVESIQWRDIVSSEFLSNMSMDFQNHLGSCQKCDPSCPNGSCWGAGEENCQKLTKIICAQQCSGRCRGKSPSDCCHNQCAAGCTGPRESDCLVCRKFRDEATCKDTCPPLMLYNPTTYQMDVNPEGKYSFGATCVKKCPRNYVVTDHGSCVRACGADSYEMEEDGVRKCKKCEGPCRKVCNGIGIGEFKDTLSINATNIKHFKNCTSISGDLHILPVAFRGDSFTHTPPLDPQELDILKTVKEITGFLLIQAWPENRTDLHAFENLEIIRGRTKQHGQFSLAVVSLNITSLGLRSLKEISDGDVIISGNKNLCYANTINWKKLFGTSSQKTKIISNRGENSCKATGQVCHALCSPEGCWGPEPRDCVSCQNVSRGRECVDKCNILEGEPREFVENSECIQCHPECLPQVMNITCTGRGPDNCIQCAHYIDGPHCVKTCPAGVMGENNTLVWKYADAGHVCHLCHPNCTYGCTGPGLEGCARNGPKIPS

SEQ ID NO: 16600 - protein, 62 aa, Artificial Sequence
  source: /note="Description of Artificial Sequence: Synthetic polypeptide"
VVNGIPTRTNIGWMVSLRYRNKHICGGSLIKESWVLTARQCFPSRDLKDYEAWLGIHDVHGR

SEQ ID NO: 16601 - protein, 59 aa, Artificial Sequence
  source: /note="Description of Artificial Sequence: Synthetic polypeptide"
GIPTRTNIGWMVSLRYRNKHICGGSLIKESWVLTARQCFPSRDLKDYEAWLGIHDVHGR

SEQ ID NO: 16602 - protein, 1210 aa, Macaca fascicularis
MRPSGTAGAALLALLAALCPASRALEEKKVCQGTSNKLTQLGTFEDHFLSLQRMFNNCEVVLGNLEITYVQRNYDLSFLKTIQEVAGYVLIALNTVERIPLENLQIIRGNMYYENSYALAVLSNYDANKTGLKELPMRNLQEILHGAVRFSNNPALCNVESIQWRDIVSSEFLSNMSMDFQNHLGSCQKCDPSCPNGSCWGAGEENCQKLTKIICAQQCSGRCRGKSPSDCCHNQCAAGCTGPRESDCLVCRKFRDEATCKDTCPPLMLYNPTTYQMDVNPEGKYSFGATCVKKCPRNYVVTDHGSCVRACGADSYEMEEDGVRKCKKCEGPCRKVCNGIGIGEFKDTLSINATNIKHFKNCTSISGDLHILPVAFRGDSFTHTPPLDPQELDILKTVKEITGFLLIQAWPENRTDLHAFENLEIIRGRTKQHGQFSLAVVSLNITSLGLRSLKEISDGDVIISGNKNLCYANTINWKKLFGTSSQKTKIISNRGENSCKATGQVCHALCSPEGCWGPEPRDCVSCQNVSRGRECVDKCNILEGEPREFVENSECIQCHPECLPQVMNITCTGRGPDNCIQCAHYIDGPHCVKTCPAGVMGENNTLVWKYADAGHVCHLCHPNCTYGCTGPGLEGCARNGPKIPSIATGMVGALLLLLVVALGIGLFMRRRHIVRKRTLRRLLQERELVEPLTPSGEAPNQALLRILKETEFKKIKVLGSGAFGTVYKGLWIPEGEKVKIPVAIKELREATSPKANKEILDEAYVMASVDNPHVCRLLGICLTSTVQLITQLMPFGCLLDYVREHKDNIGSQYLLNWCVQIAKGMNYLEDRRLVHRDLAARNVLVKTPQHVKITDFGLAKLLGAEEKEYHAEGGKVPIKWMALESILHRIYTHQSDVWSYGVTVWELMTFGSKPYDGIPASEISSILEKGERLPQPPICTIDVYMIMVKCWMIDADSRPKFRELIIEFSKMARDPQRYLVIQGDERMHLPSPTDSNFYRALMDEEDMDDVVDADEYLIPQQGFFSSPSTSRTPLLSSLSATSNNSTVACIDRNGLQSCSIKEDSFLQRYSSDPTGALTEDSIDDTFLPVPEYINQSVPKRPAGSVQNPVYHNQPLNPAPSRDPHYQDPHSTAVGNPEYLNTVQPTCVNSTFDSPAHWAQKGSHQISLDNPDYQQDFFPKEAKPNGIFKGSTAENAEYLRVAPQSSEFIGA

SEQ ID NO: 16603 - protein, 291 aa, Artificial Sequence
  source: /note="Description of Artificial Sequence: Synthetic polypeptide"
MKYLLPTAAAGLLLLAAQPAMAQVQLVESGGGLVQPGGSLRLSCAASGFTFRSYAMSWVRQAPGKGLEWVSAISGRGDNTYYADSVKGRFTISRDNSKNTLYLQMNSLRAEDTAVYYCAKMTSNAFAFDYWGQGTLVTVSSGGGGSGGGGSGGGGSQSVLTQPPSVSGAPGQRVTISCTGSSSNIGAGYGVHWYQQLPGTAPKLLIYGNTNRPSGVPDRFSGFKSGTSASLAITGLQAEDEADYYCQSYDSSLSGWVFGGGTKLTVLGAAAEQKLISEEDLNGAAHHHHHH

SEQ ID NO: 16604 - protein, 291 aa, Artificial Sequence; identical to SEQ ID NO: 16603
  source: /note="Description of Artificial Sequence: Synthetic polypeptide"

SEQ ID NO: 16605 - protein, 288 aa, Artificial Sequence
  source: /note="Description of Artificial Sequence: Synthetic polypeptide"
MKYLLPTAAAGLLLLAAQPAMAQVQLQQSGGGLVKPGGSLRLSCAASGFTFSSYSMNWVRQVPGKGLEWVSSISSSSSYIYYADSVKGRFTISRDNAKNSLYLQMNSLRDEDTAVYYCARDDGPPIQHWGQGTLVTVSSRGGGSGGGGSGGGGSQSVLSQPPSVSGAPGQRVTISCTGSSSNIGASFDVQWYQQLPGTAPKLLIYGNNNRPSGVPDRFSASKSGTSASLGITGLQIGDEADYYCGSYTGTYSWVFGGGTKVTVLGAAAEQKLISEEDLNGAAHHHHHH

SEQ ID NO: 16606 - protein, 290 aa, Artificial Sequence
  source: /note="Description of Artificial Sequence: Synthetic polypeptide"
MKYLLPTAAAGLLLLAAQPAMAQVQLQESGGGLVKPGGSLRLSCAASGFTFSSYWMSWVRQAPGKGLEWVANINRDGSASYYVDSVKGRFTISRDDAKNSLYLQMNSLRAEDTAVYYCARDRGVGYFDLWGRGTLVTVSSGGGGSGGGGSGGGGSQSALTQPASVSGSPGQSITISCTGTSSDVGGYNFVSWYQQHPGKAPKLMIYDVSDRPSGVSDRFSGSKSGNTASLIISGLQADDEADYYCSSYGSSSTHVIFGGGTKVTVLGAAAEQKLISEEDLNGAAHHHHHH

SEQ ID NO: 16607 - protein, 287 aa, Artificial Sequence
  source: /note="Description of Artificial Sequence: Synthetic polypeptide"
MKYLLPTAAAGLLLLAAQPAMAQVQLVESGGGVVQPGRSLRLSCAASGFTFSDYYIHWVRQAPGKGLEWMAVISYDGNNKYYAASVKDRFTISRDNSKNTVSLQMNSLRAEDTAVYYCARDLYGDYALDYWGQGTLVTVSSGGGGSGGGGSGGGGSDIQMTQSPSTLSASLGDRVTITCRASQSIGSWLAWYQQKPGKAPKLLIYKASTLESGVPSRFTGSGSGTEFTLTISGLQPEDFATYYCQKLSSYPLTFGGGTKVEIKRAAAEQKLISEEDLNGAAHHHHHH

SEQ ID NO: 16608 - protein, 291 aa, Artificial Sequence
  source: /note="Description of Artificial Sequence: Synthetic polypeptide"
MKYLLPTAAAGLLLLAAQPAMAQVQLVQSGGGLVQPGRSLRLSCAASGFTFDDYAMHWVRQAPGKGLEWVSGISWNSGSIGYADSVKGRFTISRDNAKNSLYLQMNSLRPEDTAVYYCARDLGAKQWLEGFDYWGQGTLVTVSSGGGGSGGGGSGGGGSNFMLTQDPAVSVALGQTVRITCQGDSLRSYYASWYQQKPGQAPVLVIYGKNNRPSGIPDRFSGSTSGNSASLTITGAQAEDEADYYCNSRDSSGNHWVFGGGTKVTVLGAAAEQKLISEEDLNGAAHHHHHH

SEQ ID NO: 16609 - protein, 295 aa, Artificial Sequence
  source: /note="Description of Artificial Sequence: Synthetic polypeptide"
MKYLLPTAAAGLLLLAAQPAMAEVQLVQSGAEVKKPGSSVKVSCKASGGTFSSYAISWVRQAPGQGLEWMGGIIPIFGTANYAQKFQGRVTITADESTSTAYMEVSSLRSEDTAVYYCAREEGPYCSSTSCYGAFDIWGQGTLVTVSSGGGGSGGGGSGGGGSQSVLTQDPAVSVALGQTVKITCQGDSLRSYFASWYQQKPGQAPTLVMYARNDRPAGVPDRFSGSKSGTSASLAISGLQSEDEADYYCAAWDDSLNGYLFGAGTKLTVLGAAAEQKLISEEDLNGAAHHHHHH

SEQ ID NO: 16610 - protein, 286 aa, Artificial Sequence
  source: /note="Description of Artificial Sequence: Synthetic polypeptide"
MKYLLPTAAAGLLLLAAQPAMAQVQLQESGPGLVKPSETLSLTCTVSGGSFRSYYWSWIRPPGKGLEWIGYIFYSGSTNYNPSLKSRVTISVDTSKNQFSLKLSSLTAADTAVYYCARGHLGELGWFDPWGQGTLVTVSSSGGGSGGGGSGGGGSDIQMTQSPSSLSASVGDRVTITCQASQDISNYLNWYQQKPGKAPKLLIFAASRLASGVPSRFSGSGSGTDFSLTISSLQPDDFATYYCLQDSDYPLTFGGGTKVEIKRAAAEQKLISEEDLNGAAHHHHHH

SEQ ID NO: 16611 - protein, 291 aa, Artificial Sequence
  source: /note="Description of Artificial Sequence: Synthetic polypeptide"
MKYLLPTAAAGLLLLAAQPAMAQVQLLQFGGGLVQPGGSLRLSCAASGFTFSSYAMSWVRQAPGKGLEWLSAISGSGGSTYYADSVKGRFTISRDNSKNTLYLQMNSLRAEDTAVYYCAREGYSSNWNNWYFDLWGRGTLVTVSSGGGGSGGGGSGGGGSDVVMTQSPSSLSASVGDRVTITCRASQSISSYLNWYQQKPGKAPELLIYAASRLQSGVPSRFSGSGSGTEFTLTISSLQPDDFATYYGQQYYNYPWTFGRGTKVEIKRAAAEQKLISEEDLNGAAHHHHHH

SEQ ID NO: 16612 - protein, 291 aa, Artificial Sequence
  source: /note="Description of Artificial Sequence: Synthetic polypeptide"
MKYLLPTAAAGLLLLAAQPAMAQVQLQESGGGMVQPGRSLRLSCAASGFTFSSYAMSWVRQAPGKGLEWVSAISGSGGSTYYADSVKGRFTISRDNSKNTLYLQMNSLRAEDTALYYCAREGYSSNWNNWYFDLWGRGTLVTVSSGGGGSGGGGSGGGGSEIVLTQSPSSLSASVGDRVTITCRASQSISSYLNWYQQKPGKAPKLLIYAASSLQSGVPSRFSGSGSGTDFTLTISSLQPDDFATYYCQQYNSYPWTFGQGTKLEIKRAAAEQKLISEEDLNGAAHHHHHH

SEQ ID NO: 16613 - protein, 243 aa, Artificial Sequence
  source: /note="Description of Artificial Sequence: Synthetic polypeptide"
MAQVQLVESGGGVVQPGRSLRLSCAASGFTFSSYGMHWVRQAPGKGLEWVAVISYDGSNKYYADSVKGRFTISRDNSKNTLYLQMNSLRAEDTAEYYCAKYPLNWGQGTLVTVSSGGGGSGGGGSGGGGSQSALTQPASVSGSPGQSITISCTGTSSDVGGYNYASWYQQHPGKAPKLMIYEVSNRPSGVFNRFSGAKSGNTASLTISGLQAEDEADYYCNSYTSSSTWVFGGGTKLTVLGNS

SEQ ID NO: 16614 - protein, 295 aa, Artificial Sequence
  source: /note="Description of Artificial Sequence: Synthetic polypeptide"
MAQVQLQESGGGVVQPGRSLRLSCAASGFTFKSYGMHWVRQAPGKGLEWVSAISASGGSTYYADSVKGRFTIFRDNSENSLYLQMNSLRAEDTAVYYCARDSSGSFDYWGQGTLVTVSSGGGGSGGGGSGGGGSDIVMTQSPSTLSASIGDRVTITCRASEGIYHWLAWYQQKPGKAPKLLIYKASSLASGAPSRFSGSGSGTDTITCRASEGIYHWLAWYQQKPGKAPKLLIYKASSLASGAPSRFSGSGSGTDFTLTISSLQAEDVAVYYCQQYYRSPLTFGGGTKLENKRNS

SEQ ID NO: 16615 - protein, 304 aa, Homo sapiens [sequence omitted]

SEQ ID NO: 16616 - protein, 250 aa, Unknown
  source: /note="Description of Unknown: GFP variant"
MGSASKGEELFTGVVPILVELDGDVNGHKFSVRGEGEGDATNGKLTLKFICTTGKLPVPWPTLVTTLTYGVQCFSRYPDHMKQHDFFKSAMPEGYVQERTISFKDDGTYKTRAEVKFEGDTLVNRIELKGIDFKEDGNILGHKLEYNFNSHNVYITADKRKNGIKANFKIRHNVKDGSVQLADHYQQNTPIGRGPVLLPRNHYLSTRSALSKDPKEKRDHMVLLEFVTAAGITHGMDELYKGHGHHHHHH

SEQ ID NO: 16617 - protein, 250 aa, Unknown
  source: /note="Description of Unknown: GFP variant"
MGSASKGERLFTGVVPILVELDGDVNGHKFSVRGKGKGDATRGKLTLKFICITGKLPVPWPTLVTTLTYGVQCFSRYPKHMKQHDFFKSAMPEGYVQERTISFKDDGTYKTRAEVKFEGDTLVNRIELKGIDFKEDGNILGHKLEYNFNSHNVYITADKQKNGIKANFKIRHNVEDGSVQLADHYQQNTPIGDGPVLLPDNHYLSTQSALSKDPNEKRDHMVLLEFVTAAGITHGMDELYKGHGHHHHHH

SEQ ID NO: 16618 - protein, 250 aa, Artificial Sequence
  source: /note="Description of Artificial Sequence: Synthetic polypeptide"
MGSASKGERLFTGVVPILVELDGDVNGHKFSVRGEGEGDATRGKLTLKFICTTGKLPVPWPTLVTTLTYGVQCFSRYPKHMKRHDFFKSAMPEGYVQERTISFKKDGTYKTRAEVKFEGRTLVNRIELKGRDFKEKGNILGHKLEYNFNSHNVYITADKQKNGIKANFKIRHNVEDGSVQLADHYQQNTPIGDGPVLLPDNHYLSTQSALSKDPNEKRDHMVLLEFVTAAGITHGMDELYKGHGHHHHHH

SEQ ID NO: 16619 - protein, 250 aa, Unknown
  source: /note="Description of Unknown: GFP variant"
MGSASKGERLFRGKVPILVELKGDVNGHKFSVRGKGKGDATRGKLTLKFICTTGKLPVPWPTLVTTLTYGVQCFSRYPKHMKQHDFFKSAMPEGYVQERTISFKDDGTYKTRAEVKFEGDTLVNRIELKGIDFKEDGNILGHKLEYNFNSHNVYITADKQKNGIKANFKIRHNVEDGSVQLADHYQQNTPIGDGPVLLPDNHYLSTQSALSKDPNEKRDHMVLLEFVTAAGITHGMDELYKGHGHHHHHH

SEQ ID NO: 16620 - protein, 250 aa, Artificial Sequence
  source: /note="Description of Artificial Sequence: Synthetic polypeptide"
MGSASKGEELFTGVVPILVELDGDVNGHKFSVRGEGEGDATNGKLTLKFICTTGKLPVPWPTLVTTLTYGVQCFSRYPDHMKRHDFFKSAMPKGYVQERTISFKKDGKYKTRAEVKFEGRTLVNRIKLKGRDFKEKGNILGHKLRYNFNSHKVYITADKQKNGIKANFKIRHNVEDGSVQLADHYQQNTPIGDGPVLLPDNHYLSTQSALSKDPNEKRDHMVLLEFVTAAGITHGMDELYKGHGHHHHHH

SEQ ID NO: 16621 - protein, 250 aa, Unknown
  source: /note="Description of Unknown: GFP variant"
MGSASKGERLFTGVVPILVELDGDVNGHKFSVRGEGEGDATRGKLTLKFICTTGKLPVPWPTINTTLTYGVQCFSRYPKHMKRHDFFKSAMPKGYVQERTISFKKDGIYKTRAEVKFEGRTLVNRIKLKGRDFKEKGNILGHKLRYNFNSHNVYITADKQKNGIKANFKIRHNVEDGSVQLADHYQQNTPIGDGPVLLPDNHYLSTQSALSKDPNEKRDHMVLLEFVTAAGITHGMDELYKGHGHHHHHH

SEQ ID NO: 16622 - protein, 250 aa, Unknown
  source: /note="Description of Unknown: GFP variant"
MGSASKGERLFTGVVPILVELDGDVNGHKFSVRGEGEGDATRGKLTLKFICTTGKLPVPWPTINTTLTYGVQCFSRYPKHMKQHDFFKSAMPEGYVQERTISFKDDGTYKTRAEVKFEGDTINNRIELKGIDFKEDGNILGHKLEYNFNSHNVYITADKRKNGIKAKFKIRHNVKDGSVQLADHYQQNTPIGRGPVLLPRNHYLSTRSKLSKDPKEKRDHMVLLEFVTAAGIKHGRDERYKGHGHHHHHH

SEQ ID NO: 16623 - protein, 250 aa, Unknown
  source: /note="Description of Unknown: GFP variant"
MGSASKGEELFTGVVPILVELDGDVNGHKFSVRGEGEGDATNGKLTLKFICTTGKLPVPWPTLVTTLTYGVQCFSRYPDHMKQHDFFKSAMPEGYVQERTISFKDDGTYKTRAEVKFEGDTLVNRIELKGIDFKEDGNILGHKLEYNFNSHNVYITADKRKNGIKAKFKIRHNVKDGSVQLAKHYQQNTPIGRGPVLLPRKHYLSTRSKLSKDPKEKRDHMVLLEFVTAAGIKHGRKERYKGHGHHHHHH

SEQ ID NO: 16624 - protein, 250 aa, Unknown
  source: /note="Description of Unknown: GFP variant"
MGSASKGERLFTGVVPILVELDGDVNGHKFSVRGEGEGDATRGKLTLKFICTTGKLPVPWPTLVTTLTYGVQCFSRYPKHMKRHDFFKSAMPEGYVQERTISFKKDGTYKTRAEVKFEGRILVNRIELKGRDFKEKGNILGHKLEYNFNSHNVYITADKRKNGIKANFKIRHNVKDGSVQLADHYQQNTPIGRGPVLLPRNHYLSTRSALSKDPKEKRDHMVLLEFVTAAGITHGMDELYKGHGHHHHHH

SEQ ID NO: 16625 - protein, 250 aa, Unknown
  source: /note="Description of Unknown: GFP variant"
MGSASKGEELFTGVVPILVELDGDVNGHKFSVRGEGEGDATNGKLTLKFICTTGKLPVPWPTLNTTLTYGVQCFSRYPDHMKQHDFFKSAMPEGYVQERTISFKDDGTYKTRAEVKFEGDTLVNRIELKGIDFKEDGNILGEKLEYNFNSHNVYITADKQKNGIKANFKIRHNVEDGSVQLADHYQQNTPIGDGPVLLPDNHYLSTQSALSKDPNEKRDHMVLLEFVTAAGITHGMDELYKGHGHHHHHH

SEQ ID NO: 16626 - protein, 268 aa, Unknown
  source: /note="Description of Unknown: single-chain Fv antibody fused to His tag"
MHHHHHHGSQVQLLQSGAELKKPGESLKISCKGSGYSFTSYWIAWVRQMPGKGLEYMGLIYPGDSDTKYSPSFQGQVTISVDKSVSTAYLQWSSLKLPSDSAVYFCARHDVGYCSSSNCAKWPEYFQHWGQGTLVTVSSGGGGSGGGGSGGGGSQSVLTQPPSVSAAPGQKVTISCSGSSSNIGNNYVSWYQQLPGTAPKLLIYGHTNRPAGVPDRFSGSKSGTSASLAISGFRSEDEADYYCAAWDDSLSGWVFGGGTKLTVLGGHG

SEQ ID NO: 16627 - protein, 267 aa, Unknown
  source: /note="Description of Unknown: single-chain Fv antibody fused to His tag"
MGSQVQLLQSGAELKKPGESLKISCKGSGYSFTSYWIAWVRQMPGKGLEYMGLIYPGDSDTKYSPSFQGQVTISVDKSVSTAYLQWSSLKPSDSAVYFCARHDVGYCSSSNCAKWPEYFQHWGQGTLVTVSSGGGGSGGGGSGGGGSQSVLTQPPSVSAAPGQKVTISCSGSSSNIGNNYVSWYQQLPGTAPKLLIYGHTNRPAGVPDRFSGSKSGTSASLAISGFRSEDEADYYCAAWDDSLSGWVFGGGTKLTVLGGHGHHHHHH

SEQ ID NO: 16628 - protein, 539 aa, Unknown
  source: /note="Description of Unknown: Fusion protein"
MGSASKGEELFTGVVPILVELDGDVNGHKFSVRGEGEGDATNGKLTLKFICTTGKLPVPWPTLVTTLTYGVQCFSRYPDHMKQHDFFKSAMPEGYVQERTISFKDDGTYKTRAEVKFEGDTLVNRIELKGIDFKEDGNILGHKLEYNFNSHNVYITADKQKNGIKANFKIRHNVEDGSVQLADHYQQNTPIGDGPVLLPDNHYLSTQSALSKDPNEKRDHMVLLEFVTAAGITHGMDELYKGHGSSSSGSSSSGSSSSGSSSSGSSSSGSSSSGSQVQLLQSGAELKKPGESLKISCKGSGYSFTSYWIAWVRQMPGKGLEYMGLIYPGDSDTKYSPSFQGQVTISVDKSVSTAYLQWSSLKPSDSAVYFCARHDVGYCSSSNCAKWPEYFQHWGQGTLVTVSSGGGGSGGGGSGGGGSQSVLTQPPSVSAAPGQKVTISCSGSSSNIGNNYVSWYQQLPGTAPKLLIYGHTNRPAGVPDRFSGSKSGTSASLAISGFRSEDEADYYCAAWDDSLSGWVFGGGTKLTVLGGHGHHHHHH

SEQ ID NO: 16629 - protein, 539 aa, Artificial Sequence
  source: /note="Description of Artificial Sequence: Synthetic polypeptide"
MGSASKGERLFTGVVPILVELDGDVNGHKFSVRGEGEGDATRGKLTLKFICTTGKLPVPWPTLVTTLTYGVQCFSRYPKHMKRHDFFKSAMPEGYVQERTISFKKDGTYKTRAEVKFEGRTLVNRIELKGRDFKEKGNILGHKLEYNFNSHNVYITADKRKNGIKANFKIRHNVKDGSVQLADHYQQNTPIGRGPVLLPRNHYLSTRSALSKDPKEKRDHMVLLEFVTAAGITHGMDELYKGHGSSSSGSSSSGSSSSGSSSSGSSSSGSSSSGSQVQLLQSGAELKKPGESLKISCKGSGYSFTSYWIAWVRQMPGKGLEYMGLIYPGDSDTKYSPSFQGQVTISVDKSVSTAYLQWSSLKPSDSAVYFCARHDVGYCSSSNCAKWPEYFQHWGQGTLVTVSSGGGGSGGGGSGGGGSQSVLTQPPSVSAAPGQKVTISCSGSSSNIGNNYVSWYQQLPGTAPKLLIYGHTNRPAGVPDRFSGSKSGTSASLAISGFRSEDEADYYCAAWDDSLSGWVFGGGTKLTVLGGHGHHHHHH

SEQ ID NO: 16630 - protein, 539 aa, Unknown
  source: /note="Description of Unknown: Fusion protein"
MGSQVQLLQSGAELKKPGESLKISCKGSGYSFTSYWIAWVRQMPGKGLEYMGLIYPGDSDTKYSPSEQGQVTISVDKSVSTAYLQWSSLKPSDSAVYFCARHDVGYCSSSNCAKWPEYFQHWGQGTLVTVSSGGGGSGGGGSGGGGSQSVLTQPPSVSAAPGQKVTISCSGSSSNIGNNYVSWYQQLPGTAPKLLIYGHTNRPAGVPDRFSGSKSGTSASLAISGFRSEDEADYYCAAWDDSLSGWVFGGGTKLTVLGGHGSSSSGSSSSGSSSSGSSSSGSSSSGSSSSGSASKGEELFTGVVPILVELDGDVNGHKFSVRGEGEGDATNGKLTLKFICTTGKLPVPWPTLVTTLTYGVQCFSRYPDHMKQHDFFKSAMPEGYVQERTISFKDDGTYKTRAEVKFEGDTLVNRIELKGIDFKEDGNILGHKLEYNFNSHNVYITADKQKNGIKANFKIRENVEDGSVQLADHYQQNTPIGDGPVLLPDNHYLSTQSALSKDPNEKRDHMVLLEFVTAAGITHGMDELYKGHGHHHHHH

SEQ ID NO: 16631 - protein, 539 aa, Unknown
  source: /note="Description of Unknown: Fusion protein"
MGSQVQLLQSGAELKKPGESLKISCKGSGYSFTSYWIAWVRQMPGKGLEYMGLIYPGDSDTKYSPSFQGQVTISVDKSVSTAYLQWSSLKPSDSAVYFCARHDVGYCSSSNCAKWPEYFQHWGQGTLVTVSSGGGGSGGGGSGGGGSQSVLTQPPSVSAAPGQKVTISCSGSSSNIGNNYVSWYQQLPGTAPKLLIYGHTNRPAGVPDRFSGSKSGTSASLAISGFRSEDEADYYCAAWDDSLSGWVFGGGTKLTVLGGHGSSSSGSSSSGSSSSGSSSSGSSSSGSSSSGSASKGERLFTGVVPILVELDGDVNGHKFSVRGEGEGDATRGKLTLKFICTTGKLPVPWPTLVTTLTYGVQCFSRYPKHMKRHDFFKSAMPEGYVQERTISFKKDGTYKTRAEVKFEGRTLVNRIELKGRDFKEKGNILGHKLEYNFNSHNVYITADKRKNGIKANFKIRHNVKDGSVQLADHYQQNTPIGRGPVLLPRNHYLSTRSALSKDPKEKRDHMVLLEFVTAAGITHGMDELYKGHGHHHHHH

SEQ ID NO: 16632 - protein, 539 aa, Unknown
  source: /note="Description of Unknown: Fusion protein"
MGSASKGEELFTGVVPILVELDGDVNGHKFSVRGEGEGDATNGKLTLKFICTTGKLPVPWPTLVTTLTYGVQCFSRYPDHMKQHDFFKSAMPEGYVQERTISFKDDGTYKTRAEVKFEGDTLVNRIELKGIDFKEDGNILGHKLEYNFNSHNVYITADKRKNGIKANFKIRHNVKDGSVQLADHYQQNTPIGRGPVLLPRNHYLSTRSALSKDPKEKRDHMVLLEFVTAAGITHGMDELYKGHGSSSSGSSSSGSSSSGSSSSGSSSSGSSSSGSQVQLLQSGAELKKPGESLKISCKGSGYSFTSYWIAWVRQMPGKGLEYMGLIYPGDSDTKYSPSFQGQVTISVDKSVSTAYLQWSSLKPSDSAVYFCARHDVGYCSSSNCAKWPEYFQHWGQGTLVTVSSGGGGSGGGGSGGGGSQSVLTQPPSVSAAPGQKVTISCSGSSSNIGNNYVSWYQQLPGTAPKLLIYGHTNRPAGVPDRFSGSKSGTSASLAISGFRSEDEADYYCAAWDDSLSGWVFGGGTKLTVLGGHGHHHHHH

SEQ ID NO: 16633 - protein, 539 aa, Unknown
  source: /note="Description of Unknown: Fusion protein"
MGSASKGERLFTGVVPILVELDGDVNGHKFSVRGKGKGDATRGKLTLKFICTTGKLPVPWPTLVTTLTYGVQCFSRYPKHMKQHDFFKSAMPEGYVQERTISFKDDGTYKTRAEVKFEGDTLVNRIELKGIDFKEDGNILGHKLEYNFNSHNVYITADKQKNGIKANFKIRHNVEDGSVQLADHYQQNTPIGDGPVLLPDNHYLSTQSALSKDPNEKRDHMVLLEFVTAAGITHGMDELYKGHGSSSSGSSSSGSSSSGSSSSGSSSSGSSSSGSQVQLLQSGAELKKPGESLKISCKGSGYSFTSYWIAWVRQMPGKGLEYMGLIYPGDSDTKYSPSFQGQVTISVDKSVSTAYLQWSSLKPSDSAVYFCARHDVGYCSSSNCAKWPEYFQHWGQGTLVTVSSGGGGSGGGGSGGGGSQSVLTQPPSVSAAPGQKVTISCSGSSSNIGNNYVSWYQQLPGTAPKLLIYGHTNRPAGVPDRFSGSKSGTSASLAISGFRSEDEADYYCAAWDDSLSGWVFGGGTKLTVLGGHGHHHHHH

SEQ ID NO: 16634 - protein, 539 aa, Unknown
  source: /note="Description of Unknown: Fusion protein"
MGSASKGERLFTGVVPILVELDGDVNGHKFSVRGEGEGDATRGKLTLKFICTTGKLPVPWPTLVTTLTYGVQCFSRYPKHMKRHDFFKSAMPEGYVQERTISFKKDGTYKTRAEVKFEGRTLVNRIELKGRDFKEKGNILGHKLEYNFNSHNVYITADKQKNGIKANFKIRHNVEDGSVQLADHYQQNTPIGDGPVLLPDNHYLSTQSALSKDPNEKRDHMVLLEFVTAAGITHGMDELYKGHGSSSSGSSSSGSSSSGSSSSGSSSSGSSSSGSQVQLLQSGAELKKPGESLKISCKGSGYSFTSYWIAWVRQMPGKGLEYMGLIYPGDSDTKYSPSFQGQVTISVDKSVSTAYLQWSSLKPSDSAVYFCARHDVGYCSSSNCAKWPEYFQHWGQGTLVTVSSGGGGSGGGGSGGGGSQSVLTQPPSVSAAPGQKVTISCSGSSSNIGNNYVSWYQQLPGTAPKLLIYGHTNRPAGVPDRFSGSKSGTSASLAISGFRSEDEADYYCAAWDDSLSGWVFGGGTKLTVLGGHGHHHHHH

SEQ ID NO: 16635 - protein, 539 aa, Unknown
  source: /note="Description of Unknown: Fusion protein"
MGSASKGERLFRGKVPILVELKGDVNGHKFSVRGKGKGDATRGKLTLKFICTTGKLPVPWPTLVTTLTYGVQCFSRYPKHMKQHDFFKSAMPEGYVQERTISFKDDGTYKTRAEVKFEGDTLVNRIELKGIDFKEDGNILGHKLEYNFNSHNVYITADKQKNGIKANFKIRHNVEDGSVQLADHYQQNTPIGDGPVLLPDNHYLSTQSALSKDPNEKRDHMVLLEFVTAAGITHGMDELYKGHGSSSSGSSSSGSSSSGSSSSGSSSSGSSSSGSQVQLLQSGAELKKPGESLKISCKGSGYSFTSYWIAWVRQMPGKGLEYMGLIYPGDSDTKYSPSFQGQVTISVDKSVSTAYLQWSSLKPSDSAVYFCARHDVGYCSSSNCAKWPEYFQHWGQGTLVTVSSGGGGSGGGGSGGGGSQSVLTQPPSVSAAPGQKVTISCSGSSSNIGNNYVSWYQQLPGTAPKLLIYGHTNRPAGVPDRFSGSKSGTSASLAISGFRSEDEADYYCAAWDDSLSGWVFGGGTKLTVLGGHGHHHHHH

SEQ ID NO: 16636 - protein, 539 aa, Unknown
  source: /note="Description of Unknown: Fusion protein"
MGSASKGEELFTGVVPILVELDGDVNGHKFSVRGEGEGDATNGKLTLKFICTTGKLPVPWPTLVTTLTYGVQCFSRYPDHMKRHDFFKSAMPKGYVQERTISFKKDGKYKTRAEVKFEGRTLVNRIKLKGRDFKEKGNILGHKLRYNFNSHKVYITADKQKNGIKANFKIRHNVEDGSVQLADHYQQNTPIGDGPVLLPDNHYLSTQSALSKDPNEKRDHMVLLEFVTAAGITHGMDELYKGHGSSSSGSSSSGSSSSGSSSSGSSSSGSSSSGSQVQLLQSGAELKKPGESLKISCKGSGYSFTSYWIAWVRQMPGKGLEYMGLIYPGDSDTKYSPSFQGQVTISVDKSVSTAYLQWSSLKPSDSAVYFCARHDVGYCSSSNCAKWPEYFQHWGQGTLVTVSSGGGGSGGGGSGGGGSQSVLTQPPSVSAAPGQKVTISCSGSSSNIGNNYVSWYQQLPGTAPKLLIYGHTNRPAGVPDRFSGSKSGTSASLAISGFRSEDEADYYCAAWDDSLSGWVFGGGTKLTVLGGHGHHHHHH

SEQ ID NO: 16637 - protein, 539 aa, Unknown
  source: /note="Description of Unknown: Fusion protein"
MGSASKGERLFTGVVPILVELDGDVNGHKISVRGEGEGDATRGKLTLKFICTTGKLPVPWPTINTFLTYGVQCFSRYPKHMKRHDFFKSAMPKGYVQERTISFKKDGTYKTRAEVKFEGRTINNRIKLKGRDFKEKGNILGHKLRYNFNSHNVYITADKQKNGIKANFKIRHNVEDGSVQLADHYQQNTPIGDGPVLLPDNHYLSTQSALSKDPNEKRDHMVLLEFVTAAGITHGMDELYKGHGSSSSGSSSSGSSSSGSSSSGSSSSGSSSSGSQVQLLQSGAELKKPGESLKISCKGSGYSFTSYWIAWVRQMPGKGLEYMGLIYPGDSDTKYSPSFQGQVTISVDKSVSTAYLQWSSLKPSDSAVYFCARHDVGYCSSSNCAKWPEYFQHWGQGTLVTVSSGGGGSGGGGSGGGGSQSVLTQPPSVSAAPGQKVTISCSGSSSNIGNNYVSWYQQLPGTAPKLLIYGHTNRPAGVPDRFSGSKSGTSASLAISGFRSEDEADYYCAAWDDSLSGWVFGGGTKLTVLGGHGHHHHHH

SEQ ID NO: 16638 - protein, 539 aa, Unknown
  source: /note="Description of Unknown: Fusion protein"
MGSASKGERLFTGVVPILVELDGDVNGHKFSVRGEGEGDATRGKLTLKFICTTGKLPVPWPTLVTTLTYGVQCFSRYPKHMKQHDFFKSAMPEGYVQERTISFKDDGTYKTRAEVKFEGDTINNRIELKGIDFKEDGNILGHKLEYNFNSHNVYITADKRKNGIKAKFKIRHNVKDGSVQLADHYQQNTPIGRGPVLLPRNHYLSTRSKLSKDPKEKRDHMVLLEFVTAAGIKHGRDERYKGHGSSSSGSSSSGSSSSGSSSSGSSSSGSSSSGSQVQLLQSGAELKKPGESLKISCKGSGYSFTSYWIAWVRQMPGKGLEYMGLIYPGDSDTKYSPSFQGQVTISVDKSVSTAYLQWSSLKPSDSAVYFCARHDVGYCSSSNCAKWPEYFQHWGQGTLVTVSSGGGGSGGGGSGGGGSQSVLTQPPSVSAAPGQKVTISCSGSSSNIGNNYVSWYQQLPGTAPKLLIYGHTNRPAGVPDRFSGSKSGTSASLAISGFRSEDEADYYCAAWDDSLSGWVFGGGTKLTVLGGHGHHHHHH

SEQ ID NO: 16639 - protein, 539 aa, Artificial Sequence
  source: /note="Description of Artificial Sequence: Synthetic polypeptide"
MGSASKGEELFTGVVPILVELDGDVNGHKFSVRGEGEGDATNGKLTLKFICTTGKLPVPWPTLVTTLTYGVQCFSRYPDHMKQHDFFKSAMPEGYVQERTISFKDDGTYKTRAEVKFEGDTLVNRIELKGIDFKEDGNILGHKLEYNFNSHNVYITADKRKNGIKAKFKIRHNVKDGSVQLAKHYQQNTPIGRGPVLLPRKHYLSTRSKLSKDPKEKRDHMVLLEFVTAAGIKHGRKERYKGHGSSSSGSSSSGSSSSGSSSSGSSSSGSSSSGSQVQLLQSGAELKKPGESLKISCKGSGYSFTSYWIAWVRQMPGKGLEYMGLIYPGDSDTKYSPSFQGQVTISVDKSVSTAYLQWSSLKPSDSAVYFCARHDVGYCSSSNCAKWPEYFQHWGQGTLVTVSSGGGGSGGGGSGGGGSQSVLTQPPSVSAAPGQKVTISCSGSSSNIGNNYVSWYQQLPGTAPKLLIYGHTNRPAGVPDRFSGSKSGTSASLAISGFRSEDEADYYCAAWDDSLSGWVFGGGTKLTVLGGHGHHHHHH

SEQ ID NO: 16640 - protein, 542 aa, Unknown
  source: /note="Description of Unknown: Fusion protein"
MHHHHHHGSQVQLLQSGAELKKPGESLKISCKGSGYSFTSYWIAWVRQMPGKGLEYMGLIYPGDSDTKYSPSFQGQVTISVDKSVSTAYLQWSSLKPSDSAVYFCARHDVGYCSSSNCAKWPEYFQHWGQGTLVTVSSGGGGSGGGGSGGGGSQSVLTQPPSVSAAPGQKVTISCSGSSSNIGNNYVSWYQQLPGTAPKLLIYGHTNRPAGVPDRFSGSKSGTSASLAISGFRSEDEADYYCAAWDDSLSGWVFGGGTKLTVLGGHGSSSSGSSSSGSSSSGSSSSGSSSSGSSSSGSASKGERLFTGVVPILVELDGDVNGHKFSVRGEGEGDATRGKLTLKFICTTGKLPVPWPTLVTTLTYGVQCFSRYPKHMKRHDFFKSAMPEGYVQERTISFKKDGTYKTRAEVKFEGRTLVNRIELKGRDFKEKGNILGHKLEYNFNSHNVYITADKQKNGIKANFKIRHNVEDGSVQLADHYQQNTPIGDGPVLLPDNHYLSTQSALSKDPNEKRDHMVLLEFVTAAGITHGMDELYKGHGDSK

SEQ ID NO: 16641 - protein, 542 aa, Unknown
  source: /note="Description of Unknown: Fusion protein"
MHHHHHHGSQVQLLQSGAELKKPGESLKISCKGSGYSFTSYWIAWVRQMPGKGLEYMGLIYPGDSDTKYSPSFQGQVTISVDKSVSTAYLQWSSLKPSDSAVYFCARHDVGYCSSSNCAKWPEYFQHWGQGTLVTVSSGGGGSGGGGSGGGGSQSVLTQPPSVSAAPGQKVTISCSGSSSNIGNNYVSWYQQLPGTAPKLLIYGHTNRPAGVPDRFSGSKSGTSASLAISGFRSEDEADYYCAAWDDSLSGWVFGGGTKLTVLGGHGSSSSGSSSSGSSSSGSSSSGSSSSGSSSSGSASKGERLFRGKVPILVELKGDVNGHKFSVRGKGKGDATRGKLTLKFICTTGKLPVPWPTLVTTLTYGVQCFSRYPKHMKQHDFFKSAMPEGYVQERTISFKDDGTYKTRAEVKFEGDTLVNRIELKGIDFKEDGNILGHKLEYNFNSHNVYITADKQKNGIKANFKIRHNVEDGSVQLADHYQQNTPIGDGPVLLPDNHYLSTQSALSKDPNEKRDHMVLLEFVTAAGITHGMDELYKGHGDSK

SEQ ID NO: 16642 - protein, 542 aa, Unknown
  source: /note="Description of Unknown: Fusion protein"
MHHHHHHGSQVQLLQSGAELKKPGESLKISCKGSGYSFTSYWIAWVRQMPGKGLEYMGLIYPGDSDTKYSTSFQGQVTISVDKSVSTAYLQWSSLKPSDSAVYFCARHDVGYCSSSNCAKWPEYFQHWGQGTLVTVSSGGGGSGGGGSGGGGSQSVLTQFPSVSAAPGQKVTISCSGSSSNIGNNYVSWYQQLPGTAPKLLIYGHTNRPAGVPDRFSGSKSGTSASLAISGERSEDEADYYCAAWDDSLSGWVEGGGTKLTVLGGHGSSSSGSSSSGSSSSGSSSSGSSSSGSSSSGSASKGEELFTGVVPILVELDGDVNGHKFSVRGEGEGDATNGKLTLKFICTTGKLPVPWPTLVTTLTYGVQCFSRYPDHMKRHDFFKSAMPKGYVQERTISFKKDGKYKTRAEVKFEGRTLVNRIKLKGRDFKEKGNILGHKLRYNFNSHKVYITADKQKNGIKANFKIRHNVEDGSVQLADHYQQNTPIGDGPVLLPDNHYLSTQSALSKDPNEKRDHMVLLEFVTAAGITHGMDELYKGHGDSK

SEQ ID NO: 16643 - protein, 542 aa, Artificial Sequence
  source: /note="Description of Artificial Sequence: Synthetic polypeptide"
MHHHHHHGSQVQLLQSGAELKKPGESLKISCKGSGYSFTSYWIAWVRQMPGKGLEYMGLIYPGDSDTKYSPSFQGQVTISVDKSVSTAYLQWSSLKPSDSAVYFCARHDVGYCSSSNCAKWPEYFQHWGQGTLVTVSSGGGGSGGGGSGGGGSQSVLTQPPSVSAAPGQKVTISCSGSSSNIGNNYVSWYQQLPGTAPKLLIYGHTNRPAGVPDRFSGSKSGTSASLAISGFRSEDEADYYCAAWDDSLSGWVFGGGTKLTVLGGHGSSSSGSSSSGSSSSGSSSSGSSSSGSSSSGSASKGERLFTGVVPILVELDGDVNGHKFSVRGEGEGDATRGKLTLKFICTTGKLPVPWPTLVTTLTYGVQCFSRYPKHMKRHDFFKSAMPKGYVQERTISFKKDGTYKTRAEVKFEGRTLVNRIKLKGRDFKEKGNILGHKLRYNFNSHNVYITADKQKNGIKANFKIRHNVEDGSVQLADHYQQNTPIGDGPVLLPDNHYLSTQSALSKDPNEKRDHMVLLEFVTAAGITHGMDELYKGHGDSK

SEQ ID NO: 16644 - protein, 542 aa, Artificial Sequence
  source: /note="Description of Artificial Sequence: Synthetic polypeptide"
MHHHHHHGSQVQLLQSGAELKKPGESLKISCKGSGYSFTSYWIAWVRQMPGKGLEYMGLIYPGDSDTKYSPSFQGQVTISVDKSVSTAYLQWSSLKPSDSAVYFCARHDVGYCSSSNCAKWPEYFQHWGQGTLVTVSSGGGGSGGGGSGGGGSQSVLTQPPSVSAAPGQKVTISCSGSSSNIGNNYVSWYQQLPGTAPKLLIYGHTNRPAGVPDRFSGSKSGTSASLAISGFRSEDEADYYCAAWDDSLSGWVFGGGTKLTVLGGHGSSSSGSSSSGSSSSGSSSSGSSSSGSSSSGSASKGERLFTGVVPILVELDGDVNGHKFSVRGEGEGDATRGKLTLKFICTTGKLPVPWPTLVTTLTYGVQCFSRYPKHMKQHDFFKSAMPEGYVQERTISFKDDGTYKTRAEVKFEGDTLVNRIELKGIDFKEDGNILGHKLEYNFNSHNVYITADKRKNGIKAKFKIRHNVKDGSVQLADHYQQNTPIGRGPVLLPRNHYLSTRSKLSKDPKEKRDHMVLLEFVTAAGIKHGRDERYKGHGDSK

SEQ ID NO: 16645 - protein, 542 aa, Unknown
  source: /note="Description of Unknown: Fusion protein"
  MOD_RES (28)..(28): Any amino acid
MHHHHHHGSQVQLLQSGAELKKPGESIXISCKGSGYSFTSYWIAWVRQMPGKGLEYMGLIYPGDSDTKYSPSFQGQVTISVDKSVSTAYLQWSSLKPSDSAVYFCARHDVGYCSSSNCAKWPEYFQHWGQGTINTVSSGGGGSGGGGSGGGGSQSVLTQPPSVSAAPGQKVTISCSGSSSNIGNNYVSWYQQLPGTAPKLLIYGHTNRPAGVPDRFSGSKSGTSASLAISGFRSEDEADYYCAAWDDSLSGWVFGGGIKLTVLGGHGSSSSGSSSSGSSSSGSSSSGSSSSGSSSSGSASKGEELFTGVVPILVELDGDVNGHKFSVRGEGEGDATNGKLTLKFICTTGKLPVPWPTLVTTLTYGVQCFSRYPDHMKQHDFFKSAMPEGYVQERTISFKDDGTYKTRAEVKFEGDTLVNRIELKGIDFKEDGNILGHKLEYNFNSHNVYITADKRKNGIKAKFKIRHNVKDGSVQLAKHYQQNTPIGRGPVLLPRKHYLSTRSKLSKDPKEKRDHMVLLEFVTAAGIKHGRKERYKGHGDSK

SEQ ID NO: 16646 - protein, 542 aa, Unknown
  source: /note="Description of Unknown: Fusion protein"
MHHHHHHGSQVQLLQSGAELKKPGESLKISCKGSGYSFTSYWIAWVRQMPGKGLEYMGLIYPGDSDTKYSPSFQGQVTISVDKSVSTAYLQWSSLKPSDSAVYFCARHDVGYCSSSNCAKWPEYFQHWGQGTLVTVSSGGGGSGGGGSGGGGSQSVLTQPPSVSAAPGQKVTISCSGSSSNIGNNYVSWYQQLPGTAPKLLIYGHTNRPAGVPDRFSGSKSGTSASLAISGFRSEDEADYYCAAWDDSLSGWVFGGGTKLTVLGGHGSSSSGSSSSGSSSSGSSSSGSSSSGSSSSGSASKGERLFTGVVPILVELDGDVNGHKFSVRGEGEGDATRGKLTLKFICTTGKLPVPWPTLVTTLTYGVQCFSRYPKHMKRHDFFKSAMPEGYVQERTISFKKDGTYKTRAEVKFEGRTLVNRIELKGRDFKEKGNILGHKLEYNFNSHNVYITADKRKNGIKANFKIRHNVKDGSVQLADHYQQNTFIGRGPVLLPRNHYLSTRSALSKDPKEKRDHMVLLEFVTAAGITHGMDELYKGHGDSK

SEQ ID NO: 16647 - protein, 542 aa, Unknown
  source: /note="Description of Unknown: Fusion protein"
MHHHHHHGSQVQLLQSGAELKKPGESLKISCKGSGYSFTSYWIAWVRQMPGKGLEYMGLEYPGDSDTKYSPSFQGQVTISVDKSVSTAYLQWSSLKRSDSAVYFCAREDVGYCSSSNCAKWPEYFQHWGQGTLNTVSSGGGGSGGGGSGGGGSQSVLTQPPSVSAAPGQKVTISCSGSSSNIGNNYVSWYQQLPGTAPKLLIYGHTNRPAGVPDRFSGSKSGTSASLAISGFRSEDEADYYCAAWDDSISGNVWCGGTKLTVLGGHGSSSSGSSSSGSSSSGSSSSGSSSSGSSSSGSASKGEELFTGVVPILVELDGDVNGHKFSVRGEGEGDATNGKLTLKFICTTGKLPVPWPTLVTTLTYGVQCFSRYPDHMKQHDFFKSAMPEGYVQERTISFKDDGTYKTRAEVKFEGDTLVNRIELKGIDFKEDGNILGHKLEYNFNSHNVYITADKQKNGIKANFKIRHNVEDGSVQLADHYQQNTPIGDGPVLLPDNHYLSTQSALSKDPNEKRDHMVLLEFVTAAGITHGMDELYKGHGDSK

SEQ ID NO: 16648 - protein, 549 aa, Artificial Sequence
  source: /note="Description of Artificial Sequence: Synthetic polypeptide"
MHHHHHHGSQVQLLQSGAELKKPGESLKISCKGSGYSFTSYWIAWVRQMPGKGLEYMGLIYPGDSDTKYSPSFQGQVTISVDKSVSTAYLQWSSLKPSDSAVYFCARHDVGYCSSSNCAKWPEYFQHWGQGTLVTVSSGGGGSGGGGSGGGGSQSVLTQPPSVSAAPGQKVTISCSGSSSNIGNNYVSWYQQLPGTAPKLLIYGHTNRPAGVPDRFSGSKSGTSASLAISGFRSEDEADYYCAAWDDSLSGWVFGGGTKLTVLGGHGSSSSGSSSSGSSSSGSSSSGSSSSGSSSSGSASKGERLFTGVVPILVELDGDVNGHKFSVRGEGEGDATRGKLTLKFICTTGKLPVPWPTLVTTLTYGVQCFSRYPKHMKRHDFFKSAMPEGYVQERTISFKKDGTYKTRAEVKFEGRTLVNRIELKGRDFKEKGNILGHKLEYNFNSHNVYITADKQKNGIKANFKIRHNVEDGSVQLADHYQQNTPIGDGPVLLPDNHYLSTQSALSKDPNEKRDHMVLLEFVTAAGITHGMDELYKGHGEQKLISEEDL

SEQ ID NO: 16649 - protein, 549 aa, Artificial Sequence
  source: /note="Description of Artificial Sequence: Synthetic polypeptide"
MHHHHHHGSQVQLLQSGAELKKPGESLKISCKGSGYSFTSYWIAWVRQMPGKGLEYMGLIYPGDSDTKYSPSFQGQVTISVDKSVSTAYLQWSSLKPSDSAVYFCARHDVGYCSSSNCAKWPEYFQHWGQGTLVTVSSGGGGSGGGGSGGGGSQSVLTQPPSVSAAPGQKVTISCSGSSSNIGNNYVSWYQQLPGTAPKLLIYGHTNRPAGVPDRFSGSKSGTSASLAISGFRSEDEADYYCAAWDDSLSGWVFGGGTKLTVLGGHGSSSSGSSSSGSSSSGSSSSGSSSSGSSSSGSASKGERLFRGKVPILVELKGDVNGHKFSVRGKGKGDATRGKLTLKFICTTGKLPVPWPTLVTTLTYGVQCFSRYPKHMKQHDFFKSAMPEGYVQERTISFKDDGTYKTRAEVKFEGDTLVNRIELKGIDFKEDGNILGHKLEYNFNSHNVYITADKQKNGIKANFKIRHNVEDGSVQLADHYQQNTPIGDGPVLLPDNHYLSTQSALSKDPNEKRDHMVLLEFVTAAGITHGMDELYKGHGEQKLISEEDL

SEQ ID NO: 16650 - protein, 549 aa, Artificial Sequence
  source: /note="Description of Artificial Sequence: Synthetic polypeptide"
MHHHHHHGSQVQLLQSGAELKKPGESLKISCKGSGYSFTSYWIAWVRQMPGKGLEYMGLIYPGDSDTKYSPSFQGQVTISVDKSVSTAYLQWSSLKPSDSAVYFCARHDVGYCSSSNCAKWPEYFQHWGQGTLVTVSSGGGGSGGGGSGGGGSQSVLTQPPSVSAAPGQKVTISCSGSSSNIGNNYVSWYQQLPGTAPKLLIYGHTNRPAGVPDRFSGSKSGTSASLAISGFRSEDEADYYCAAWDDSLSGWVFGGGTKLTVLGGHGSSSSGSSSSGSSSSGSSSSGSSSSGSSSSGSASKGEELFTGVVPILVELDGDVNGHKFSVRGEGEGDATNGKLTLKFICTTGKLPVPWPTLVTTLTYGVQCFSRYPDHMKRHDFFKSAMPKGYVQERTISFKKDGKYKTRAEVKFEGRTLVNRIKLKGRDFKEKGNILGHKLRYNFNSHKVYITADKQKNGIKANFKIRHNVEDGSVQLADHYQQNTPIGDGPVLLPDNHYLSTQSALSKDPNEKRDHMVLLEFVTAAGITHGMDELYKGHGEQKLISEEDL

SEQ ID NO: 16651 - protein, 549 aa, Artificial Sequence
  source: /note="Description of Artificial Sequence: Synthetic polypeptide"
MHHHHHHGSQVQLLQSGAELKKPGESLKISCKGSGYSFTSYWIAWVRQMPGKGLEYMGLIYPGDSDTKYSPSFQGQVTISVDKSVSTAYLQWSSLKPSDSAVYFCARHDVGYCSSSNCAKWPEYFQHWGQGTLVTVSSGGGGSGGGGSGGGGSQSVLTQPPSVSAAPGQKVTISCSGSSSNIGNNYVSWYQQLPGTAPKLLIYGHTNRPAGVPDRFSGSKSGTSASLAISGFRSEDEADYYCAAWDDSLSGWVFGGGTKLTVLGGHGSSSSGSSSSGSSSSGSSSSGSSSSGSSSSGSASKGERLFTGVVPILVELDGDVNGHKFSVRGEGEGDATRGKLTLKFICTTGKLPVPWPTLVTTLTYGVQCFSRYPKHMKRHDFFKSAMPKGYVQERTISFKKDGTYKTRAEVKFEGRTLVNRIKLKGRDFKEKGNILGHKLRYNFNSHNVYITADKQKNGIKANFKIRHNVEDGSVQLADHYQQNTPIGDGPVLLPDNHYLSTQSALSKDPNEKRDHMVLLEFVTAAGITHGMDELYKGHGEQKLISEEDL

SEQ ID NO: 16652 - protein, 549 aa, Unknown
  source: /note="Description of Unknown: Fusion protein"
MHHHHHHGSQVQLLQSGAELKKPGESLKISCKGSGYSFTSYWIAWVRQMPGKGLEYMGLIYPGDSDTKYSPSFQGQVTISVDKSVSTAYLQWSSLKPSDSAVYFCARHDVGYCSSSNCAKWPEYFQHWGQGTLVTVSSGGGGSGGGGSGGGGSQSVLTQPPSVSAAPGQKVTISCSGSSSNIGNNYVSWYQQLPGTAPKLLIYGHTNRPAGVPDRFSGSKSGTSASLAISGFRSEDEADYYCAAWDDSLSGWVFGGGTKLTVLGGHGSSSSGSSSSGSSSSGSSSSGSSSSGSSSSGSASKGERLFTGVVPILVELDGDVNGHKFSVRGEGEGDATRGKLTLKFICTTGKLPVPWPTLVTTLTYGVQCFSRYPKHMKQHDFFKSAMPEGYVQERTISFKDDGTYKTRAEVKFEGDTLVNRIELKGIDFKEDGNILGHKLEYNFNSHNVYITADKRKNGIKAKFKIRHNVKDGSVQLADHYQQNTPIGRGPVLLPRNHYLSTRSKLSKDPKEKRDHMVLLEFVTAAGIKHGRDERYKGHGEQKLISEEDL

SEQ ID NO: 16653 - protein, 549 aa, Unknown
  source: /note="Description of Unknown: Fusion protein"
MHHHHHHGSQVQLLQSGAELKKPGESLKISCKGSGYSFTSYWIAWVRQMPGKGLEYMGLIYPGDSDTKYSPSFQGQVTISVDKSVSTAYLQWSSLKPSDSAVYFCARHDVGYCSSSNCAKWPEYFQHWGQGTINTVSSGGGGSGGGGSGGGGSQSVLTQPPSVSAAPGQKVTISCSGSSSNIGNNYVSWYQQLPGTAPKLLIYGHTNRPAGVPDRFSGSKSGTSASLAISGFRSEDEADYYCAAWDDSLSGWVFGGGTKLTVLGGHGSSSSGSSSSGSSSSGSSSSGSSSSGSSSSGSASKGEELFTGVVPILVELDGDVNGHKFSVRGEGEGDATNGKLTLKFICTTGKLPVPWPTLVTTLTYGVQCFSRYPDHMKQHDFFKSAMPEGYVQERTISFKDDGTYKTRAEVKFEGDTLVNRIELKGIDFKEDGNILGHKLEYNFNSHNVYTTADKRKNGIKAKFKIRHNVKDGSVQLAKHYQQNTPIGRGPVLLPRKHYLSTRSKLSKDPKEKRDHMVLLEFVTAAGIKHGRKERYKGHGEQKLISEEDL

SEQ ID NO: 16654 - protein, 549 aa, Unknown
  source: /note="Description of Unknown: Fusion protein"
MHHHHHHGSQVQLLQSGAELKKPGESLKISCKGSGYSFTSYWIAWVRQMPGKGLEYMGLIYPGDSDTKYSPSFQGQVTISVDKSVSTAYLQWSSLKPSDSAVYFCARHDVGYCSSSNCAKWPEYFQHWGQGTLVTVSSGGGGSGGGGSGGGGSQSVLTQPPSVSAAPGQKVTISCSGSSSNIGNNYVSWYQQLPGTAPKLLIYGHTNRPAGVPDRFSGSKSGTSASLAISGFRSEDEADYYCAAWDDSLSGWVFGGGTKLTVLGGHGSSSSGSSSSGSSSSGSSSSGSSSSGSSSSGSASKGERLFTGVVPILVELDGDVNGHKFSVRGEGEGDATRGKLTLKFICTTGKLPVPWPTLVTTLTYGVQCFSRYPKHMKRHDFFKSAMPEGYVQERTISFKKDGTYKTRAEVKFEGRTLVNRIELKGRDFKEKGNILGHKLEYNFNSHNVYITADKRKNGIKANFKIRHNVKDGSVQLADHYQQNTPIGRGPVLLPRNHYLSTRSALSKDPKEKRDHMVLLEFVTAAGITHGMDELYKGHGEQKLISEEDL

SEQ ID NO: 16655 - protein, 549 aa, Unknown
  source: /note="Description of Unknown: Fusion protein"
MHHHHHHGSQVQLLQSGAELKKPGESLKISCKGSGYSFTSYWIAWVRQMPGKGLEYMGLIYPGDSDTKYSPSFQGQVTISVDKSVSTAYLQWSSLKPSDSAVYFCARHDVGYCSSSNCAKWPEYFQHWGQGTLVTVSSGGGGSGGGGSGGGGSQSVLTQPPSVSAAPGQKVTISCSGSSSNIGNNYVSWYQQLPGTAPKLLIYGHTNRPAGVPDRFSGSKSGTSASLAISGFRSEDEADYYCAAWDDSLSGWVFGGGTKLTVLGGHGSSSSGSSSSGSSSSGSSSSGSSSSGSSSSGSASKGEELFTGVVPIIVELDGDVNGHKFSVRGEGEGDATNGKLTLKFICTTGKLPVPWPTLVTTLTYGVQCFSRYPDHMKQHDFFKSAMPEGYVQERTISFKDDGTYKTRAEVKFEGDTLVNRIELKGIDFKEDGNILGHKLEYNFNSHNVYITADKQKNGIKANFKIRHNVEDGSVQLADHYQQNTPIGDGPVLLPDNHYLSTQSALSKDPNEKRDHMVLLEFVTAAGITHGMDELYKGHGEQKLISEEDL

SEQ ID NO: 16656 - protein, 260 aa, Unknown
  source: /note="Description of Unknown: Tagged GFP"
MEQKLISEEDLGSASKGERLFRGKVPILVELKGDVNGHKFSVRGKGKGDATRGKLTLKFICTTGKLPVPWPTLVTTLTYGVQCFSRYPKHMKRHDFFKSAMPKGYVQERTISFKKDGKYKTRAEVKFEGRTLVNRIKLKGRDFKEKGNILGHKLRYNFNSHKVYITADKRKNGIKAKFKIRHNVKDGSVQLADHYQQNTPIGRGPVLLPRNHYLSTRSKLSKDPKEKRDHMVLLEFVTAAGIKHGRDERYKGHGHHHHHH

SEQ ID NO: 16657 - protein, 250 aa, Unknown
  source: /note="Description of Unknown: Tagged GFP"
MGSASKGERLFRGKVPILVELKGDVNGHKFSVRGKGKGDATRGKLTLKFICTTGKLPVPWPTLVTTLTYGVQCFSRYPKHMKRHDFFKSAMPKGYVQERTISFKKDGKYKTRAEVKFEGRTLVNRIKLKGRDFKEKGNILGHKLRYNFNSHKVYITADKRKNGIKAKFKIRHNVKDGSVQLADHYQQNTPIGRGPVLLPRNHYLSTRSKLSKDPKEKRDHMVLLEFVTAAGIKHGRDERYKGHGHHHHHH

SEQ ID NO: 16658 - protein, 246 aa, Artificial Sequence
  source: /note="Description of Artificial Sequence: Synthetic polypeptide"
QVQLVQSGGGLVQPGGSLRLSCAASGFTFSSYAMSWVRQAPGKGLEWVSAISGSGGSTYYADSVKGRFTISRDNSKNTLYLQMNSLRAEDTAVYYCAKSSSSWYRSYYFDYWGQGTLVTVSSGGGGGSGGGGSGGGGSQSALTQDPAVSVALGQTVRITCRGDSLRNYYASWYQQKPGQAPVLVIYGKNNRPSGIPDRFSGSFSGNTASLTITGAQAEDEADYYCNSRDSSANQMFGGGTKVTVLG

SEQ ID NO: 16659 - protein, 245 aa, Artificial Sequence
  source: /note="Description of Artificial Sequence: Synthetic polypeptide"
QVQLQESGGGLVQPGGSLRLSCAASGFTFSSYAMSWVRQAPGKGLEWVSAISGSGGSTYYADSVKGRFTISRDNSKNTLYLQMNSLRAEDTAVYYCASQHVGEQSRYFDYWGQGTLVTVSSGGGGGSGGGGSGGGGSDIVMTQSPSSLSASIGDRVTITCRASHSISSYVNWYQKKPGKAPNLLIYAASYLPRGVPSRFSGSGLGTDFTLTISNLQPEDFATYYCQESYSTPYSFGQGTKVDIKR

SEQ ID NO: 16660 - protein, 241 aa, Artificial Sequence
  source: /note="Description of Artificial Sequence: Synthetic polypeptide"
QVQLQESGGGVVQPGRSLRLSCAASGFTFSSYGMHWVRQAPGKGLEWVSAIGSSGGSTHDADTVKGRFTISRDNAKNSLYLQMNSLRAEDTAVYYCARDRARGFDYWGQGTLVTVSSGGGGGSGGGGSGGGGSEIVLTQSPSTLSASIGDRVTITCRASQGISSYLAWYQQKPGKAPKLLIYGASSLQSGVPSRFSGRGSGADFTLTISSLQPEDFATYYCQQLISYPLTFGGGTKVEIKR

SEQ ID NO: 16661 - protein, 241 aa, Artificial Sequence
  source: /note="Description of Artificial Sequence: Synthetic polypeptide"
QVQLVQSGAEVKKPGASVKVSCKASGYTFTDYYMHWVRQAPGEGLEWMGWMNPNSGGTNYAQKFQGRVTMTRDTSISTAYMELSRLRSDDTAVYYCARSHYWDSWSPGTLVTVSSGGGGGSGGGGSGGGGSSALTQPASVSGSPGQSITISCTGTSGDVGGYNYVSWYQQHPGKAPKLMIYDVSNRPSGVSNRFSGSKSGNTASLTISGLQAEDEADYYCTSYAGSRNLVFGGGTKLTVLG

SEQ ID NO: 16662 - protein, 243 aa, Artificial Sequence
  source: /note="Description of Artificial Sequence: Synthetic polypeptide"
QVQLQESGGGLLQPGGSLRLSCAASRFTFSNYAMSWVRQAPGKGLEWVSAISGSGASTYYADSVKGRFTISRDNSKNTLYLQMNSLRAEDTAVYYCSNLYGDYDYWGQGTLVTVSSGGGGGSGGGGSGGGGSQSVLTQPASVSGSPGQSITISCTGTSSDVGGYNYVSWYQQHPGKAPKLMIYDVSNRPSGVSNRFSGSKSGNTASLTISGLQAEDEADYYCSSYTSSSTLLFGGGTKLTVLG

SEQ ID NO: 16663 - protein, 255 aa, Artificial Sequence
  source: /note="Description of Artificial Sequence: Synthetic polypeptide"
QVQLQESGGGVVQPGGSLRLSCAASGFTFSSYSMNWVRQAPGKGLEWVSSISSSSSYIYYADSVKGRFTISRDNAKNSLYLQMNSLRAEDTAVYYCARDLPSDDYGDYDYYYYGMDVWGQGTTVTVSSGGGGGSGGGGSGGGGSQSVLTQPPSASGTPGQRVTLFCSGSSSNIASNSVKWYQQPPQRAPKLLMFSDDQRPSGVPVRFSASKSGTSASLAISGLQSEDEADYYCAAWDDSLNAEVFGGGTKVTVLG

SEQ ID NO: 16664 - protein, 244 aa, Artificial Sequence
  source: /note="Description of Artificial Sequence: Synthetic polypeptide"
EVQLVESGGGLVQPGGSLRLSCAASGFTFSTYAMSWVRQAPGKGLEWVSAISGSGGSTYYADSVKGRFTISRDNSKNTLYLQMNSLRAEDTAVYYCAREGGKWYYGMDVWGRGTLVTVSSGGGGGSGGGGSGGGGSSSELTQDPAVSVALGQTVRITCQGDSLRSYYTNWFQQKPGQAPLLVVYAKNKRPSGIPDRFSGSGSGDTASLTITGAQAEDEADYYCNSRDSSGNYLFAAGTKLTVLG

SEQ ID NO: 16665 - protein, 245 aa, Artificial Sequence
  source: /note="Description of Artificial Sequence: Synthetic polypeptide"
QVQLQESGGGLVQPGGSLRLSCAASGFTFSNYAMSWVRQAPGKGLEWVSAISGSGGSTYYADSVKGRFTISRDNSKNTLYLQMNSLRAEDTAVYYCAKDRFRAAAYWGQGTLVTVSSGGGGGSGGGGSGGGGSQSVLTQPPSVSAAPGQKVTISCTGSSSNIGAGYDVHWYQQLPGTAPKLLIYGNSNRPSGVPDRFSGSKSGTSASLAISGLQSEDEADYYCAAWDDILNGEIFGGGTKVTVLG

SEQ ID NO: 16666 - protein, 241 aa, Homo sapiens
ELQMTQSPSLLSASTGDRVTISCRASQSISSYLNWYQQKPGKAPKLLIYTRSSLQSGVPSRFSGSGSGTDFTLTISSLQPEDFATYYCQQSYSTPHTFGQGTKLEIKGGSSRSSSSGGGGSGGGGEVQLVESGGGVVQPGRSLRLSCAASGFTFSSYAMHWVRQAPGKGLEWVAVIWYDGSNRYYADSVKGRFTISRDNSKNTLYLQMNSLRAEDTAVYYCASQATEGLIWGQGTLVTVSP

SEQ ID NO: 16667 - protein, 330 aa, Artificial Sequence
  source: /note="Description of Artificial Sequence: Synthetic polypeptide"
QVQLKQSGPGLVQPSQSLSITCTVSGFSLTNYGVHWVRQSPGKGLEWLGVIWSGGNTDYNTPFTSRLSINKDNSKSQVFFKMNSLQSNDTAIYYCARALTYYDYEFAYWGQGTLVTVSAGGGGSGGGGSGGGGSDILLTQSPVILSVSPGERVSFSCRASQSIGTNIHWYQQRTNGSPRLLIKYASESISGIPSRFSGSGSGTDFTLSINSVESEDIADYYCQQNNNWPTTFGAGTKLELKAAAPDVQDCPECTLQENPFFSQPGAPILQCMGCCFSRAYPTPLRSKKTMLVQKNVTSESTCCVAKSYNRVTVMGGFKVENHTACHCSTC

SEQ ID NO: 16668 - protein, 415 aa, Artificial Sequence
  source: /note="Description of Artificial Sequence: Synthetic polypeptide"
MATGSRTSLLLAFGLLCLPWLQEGSAQVQLKQSGPGLVQPSQSLSITCTVSGFSLTNYGVHWVRQSPGKGLEWLGVIWSGGNTDYNTPFTSRLSINKDNSKSQVFFKMNSLQSNDTAIYYCARALTYYDYEFAYWGQGTLVTVSAGGGGSGGGGSGGGGSDILLTQSPVILSVSPGERVSFSCRASQSIGTNIHWYQQRTNGSPRLLIKYASESISGIPSRFSGSGSGTDFTLSINSVESEDIADYYCQQNNNWPTTFGAGTKLELKAAASKEPLRPRCRPINATLAVEKEGCPVCITVNTTICAGYCPTMTRVLQGVLPALPQVVCNYRDVRFESIRLPGCPRGVNPVVSYAVALSCQCALCRRSTTDCGGPKDHPLTCDDPRFQDSSSSKAPPPSLPSPSRLPGPSDTPILPQ

SEQ ID NO: 16669 - protein, 359 aa, Artificial Sequence
  source: /note="Description of Artificial Sequence: Synthetic polypeptide"
MATGSRTSLLLAFGLLCLPWLQEGSAQVQLQESGPGLVKPSETLSLTCTVSGYSITGGYLWNWIRQPPGKGLEWIGYISYDGTNNYKPSLKDRVTISRDTSKNQFSLKLSSVTAADTAVYYCARYGRVFFDYWGQGTLVTVSSGGGGSGGGGSGGGGSDIVMTQSPLSLPVTPGEPASISCRSSQSIVHSNGNTYLQWYLQKPGQSPQLLIYKVSNRLYGVPDRFSGSGSGTDFTLKISRVEAEDVGVYYCFQGSHVPWTFGQGTKVEIKAAAPDVQDCPECTLQENPFFSQPGAPILQCMGCCFSRAYPTPLRSKKTMLVQKNVTSESTCCVAKSYNRVTVMGGFKVENHTACHCSTC

SEQ ID NO: 16670 - protein, 418 aa, Artificial Sequence
  source: /note="Description of Artificial Sequence: Synthetic polypeptide"
MATGSRTSLLLAFGLLCLPWLQEGSAQVQLQESGPGLVKPSETLSLTCTVSGYSITGGYLWNWIRQPPGKGLEWIGYISYDGTNNYKPSLKDRVTISRDTSKNQFSLKLSSVTAADTAVYYCARYGRVFFDYWGQGTLVTVSSGGGGSGGGGSGGGGSDIVMTQSPLSLPVTPGEPASISCRSSQSIVHSNGNTYLQWYLQKPGQSPQLLIYKVSNRLYGVPDRFSGSGSGTDFTLKISRVEAEDVGVYYCFQGSHVPWTFGQGTKVEIKAAASKEPLRPRCRPINATLAVEKEGCPVCITVNTTICAGYCPTMTRVLQGVLPALPQVVCNYRDVRFESIRLPGCPRGVNPVVSYAVALSCQCALCRRSTTDCGGPKDHPLTCDDPRFQDSSSSKAPPPSLPSPSRLPGPSDTPILPQ

SEQ ID NO: 16671 - protein, 353 aa, Artificial Sequence
  source: /note="Description of Artificial Sequence: Synthetic polypeptide"
MATGSRTSLLLAFGLLCLPWLQEGSAAPDVQDCPECTLQENPFFSQPGAPILQCMGCCFSRAYPTPLRSKKTMLVQKNVTSESTCCVAKSYNRVTVMGGFKVENHTACHCSTCQVQLKQSGPGLVQPSQSLSITCTVSGFSLTNYGVHWVRQSPGKGLEWLGVIWSGGNTDYNTPFTSRLSINKDNSKSQVFFKMNSLQSNDTAIYYCARALTYYDYEFAYWGQGTLVTVSAGGGGSGGGGSGGGGSDILLTQSPVILSSPGERVSFSCRASQSIGTNIHWYQQRTNGSPRLLIKYASESISGIPSRFSGSGSGTDFTLSINSVESEDIADYYCQQNNNWPTTFGAGTKLELK

SEQ ID NO: 16672 - protein, 363 aa, Artificial Sequence
  source: /note="Description of Artificial Sequence: Synthetic polypeptide"
MATGSRTSLLLAFGLLCLPWLQEGSAAPDVQDCPECTLQENPFFSQPGAPILQCMGCCFSRAYPTPLRSKKTMLVQKNVTSESTCCVAKSYNRVTVMGGFKVENHTACHCSTCGFSASPAFFQVQLKQSGPGLVQPSQSLSITCTVSGFSLTNYGVHWVRQSPGKGLEWLGVIWSGGNTDYNTPFTSRLSINKDNSKSQVFFKMNSLQSNDTAIYYCARALTYYDYEFAYWGQGTLVTVSAGGGGSGGGGSGGGGSDILLTQSPVILSVSPGERVSFSCRASQSIGTNIHWYQQRTNGSPRLLIKYASESISGIPSRFSGSGSGTDFTLSINSVESEDIADYYCQQNNNWPTTFGAGTKLELK

SEQ ID NO: 16673 - protein, 412 aa, Artificial Sequence
  source: /note="Description of Artificial Sequence: Synthetic polypeptide"
MATGSRTSLLLAFGLLCLPWLQEGSASKEPLRPRCRPINATLAVEKEGCPVCITVNTTICAGYCPTMTRVLQGVLPALPQVVCNYRDVRFESIRLPGCPRGVNPVVSYAVALSCQCALCRRSTTDCGGPKDHPLTCDDPRFQDSSSSKAPPPSLPSPSRLPGPSDTPILPQQVQLKQSGPGLVQPSQSLSITCTVSGFSLTNYGVHWVRQSPGKGLEWLGVIWSGGNTDYNTPFTSRLSINKDNSKSQVFFKMNSLQSNDTAIYYCARALTYYDYEFAYWGQGTLVTVSAGGGGSGGGGSGGGGSDILLTQSPVILSVSPGERVSFSCRASQSIGTNIHWYQQRTNGSPRLLIKYASESISGIPSRFSGSGSGTDFTLSINSVESEDIADYYCQQNNNWPTTFGAGTKLELK

SEQ ID NO: 16674 - protein, 620 aa, Artificial Sequence
  source: /note="Description of Artificial Sequence: Synthetic polypeptide"
MATGSRTSLLLAFGLLCLPWLQEGSAEVQLVESGGGLVQPGGSLRLSCAASGYTFTNYGMNWVRQAPGKGLEWVGWINTYTGEPTYAADFKRRFTFSLDTSKSTAYLQMNSLRAEDTAVYYCAKYPHYYGSSHWYFDVWGQGTLVTVSSGGGGSGGGGSGGGGSDIQMTQSPSSLSASVGDRVTITCSASQDISNYLNWYQQKPGKAPKVLIYFTSSLHSGVPSRFSGSGSGTDFTLTISSLQPEDFATYYCQQYSTVPWTFGQGTKVEIKRAPDVQDCPECTLQENPFFSQPGAPILQCMGCCFSRAYPTPLRSKKTMLVQKNVTSESTCCVAKSYNRVTVMGGFKVENHTACHCSTCGGGGSGGGGSGGGGSGGGGSQVQLKQSGPGLVQPSQSLSITCTVSGFSLTNYGVHWVRQSPGKGLEWLGVIWSGGNTDYNTPFTSRLSINKDNSKSQVFFKMNSLQSNDTAIYYCARALTYYDYEFAYWGQGTLVTVSAGGGGSGGGGSGGGGSDILLTQSPVILSVSPGERVSFSCRASQSIGTNIHWYQQRTNGSPRLLIKYASESISGIPSRFSGSGSGTDFTLSINSVESEDIADYYCQQNNNWPTTFGAGTKLELK

SEQ ID NO: 16675 - protein, 658 aa, Artificial Sequence
  source: /note="Description of Artificial Sequence: Synthetic polypeptide"
MATGSRTSLLLAFGLLCLPWLQEGSAEVQLVESGGGLVQPGGSLRLSCAASGYTFTNYGMNWVRQAPGKGLEWVGWINTYTGEPTYAADFKRRFTFSLDTSKSTAYLQMNSLRAEDTAVYYCAKYPHYYGSSHWYFDVWGQGTLVTVSSGGGGSGGGGSGGGGSDIQMTQSPSSLSASVGDRVTITCSASQDISNYLNWYQQKPGKAPKVLIYFTSSLHSGVPSRFSGSGSGTDFTLTISSLQPEDFATYYCQQYSTVPWTFGQGTKVEIKRSKEPLRPRCRPINATLAVEKEGCPVCITVNTTICAGYCPTMTRVLQGVLPALPQVVCNYRDVRFESIRLPGCPRGVNPVVSYAVALSCQCALCRRSTTDCGGPKDHPLTCDDPRFQDSSSSKAPPPSLPSPSRLPGPSDTPILPQQVQLKQSGPGLVQPSQSLSITCTVSGFSLTNYGVHWVRQSPGKGLEWLGVIWSGGNTDYNTPFTSRLSINKDNSKSQVFFKMNSLQSNDTAIYYCARALTYYDYEFAYWGQGTLVTVSAGGGGSGGGGSGGGGSDILLTQSPVILSVSPGERVSFSCRASQSIGTNIHWYQQRTNGSPRLLIKYASESISGIPSRFSGSGSGTDFTLSINSVESEDIADYYCQQNNNWPTTFGAGTKLELK

SEQ ID NO: 16676 - protein, 616 aa, Artificial Sequence
  source: /note="Description of Artificial Sequence: Synthetic polypeptide"
MATGSRTSLLLAFGLLCLPWLQEGSADIQMTQSPSSLSASVGDRVTITCITSNDIDDDMNWYQQKPGKAPKLLISEGNTLRPGVPSRFSGSGYGTDFTLTISSLQPEDVATYYCFQSDNLPYTFGQGTKVEIKGGGGSGGGGSGGGGSEVQLVQSGAEVKKPGASVKVSCKASGDTFTTYVIHWMRQAPGQGLEWIGYINPYNDGTKYNEKFKGRVTITSDKSTSTAYMELSSLRSEDTAVYYCARIYYDYDGDYWGQGTLVTVSSAAAPDVQDCPECTLQENPFFSQPGAPILQCMGCCFSRAYPTPLRSKKTMLVQKNVTSESTCCVAKSYNRVTVMGGFKVENHTACHCSTCGGGGSGGGGSGGGGSGGGGSQVQLKQSGPGLVQPSQSLSITCTVSGFSLTNYGVHWVRQSPGKGLEWLGVIWSGGNTDYNTPFTSRLSINKDNSKSQVFFKMNSLQSNDTAIYYCARALTYYDYEFAYWGQGTLVTVSAGGGGSGGGGSGGGGSDILLTQSPVILSVSPGERVSFSCRASQSIGTNIHWYQQRTNGSPRLLIKYASESISGIPSRFSGSGSGTDFTLSINSVESEDIADYYCQQNNNWPTTFGAGTKLELK

SEQ ID NO: 16677 - protein, 126 aa, Artificial Sequence
  source: /note="Description of Artificial Sequence: Synthetic polypeptide"
EAQLVQSGAEGKKPGSSVKVSCKAPGGTFNSYAISWVRQAPGQGLEWMGGIIPIFGTAYYAQKFQGRVTITADESTSTAYMELSSLRSEDTAVYYCAREEGPYCSSTSCYGAFDIWGRGTLVTVSS

SEQ ID NO: 16678 - protein, 126 aa, Artificial Sequence; identical to SEQ ID NO: 14982
  source: /note="Description of Artificial Sequence: Synthetic polypeptide"

SEQ ID NO: 16679 - protein, 126 aa, Artificial Sequence; identical to SEQ ID NO: 14983
  source: /note="Description of Artificial Sequence: Synthetic polypeptide"

SEQ ID NO: 16680 - protein, 126 aa, Artificial Sequence
  source: /note="Description of Artificial Sequence: Synthetic polypeptide"
EVQLVQSGAEVKKLGSSVKVSCKASGGTFSSYAISWVRQAPGQGLEWVGGIIPIFGTANYAQKFQGRVKITADESASTAYMELSSLRSEDTAVYYCAREEGPYCSSTSCYGAFDIWGQGTLVTVSS

SEQ ID NO: 16681 - protein, 126 aa, Artificial Sequence
  source: /note="Description of Artificial Sequence: Synthetic polypeptide"
EVQLVQSGAEVKKPGSSVKVSCKASGGTFSSYAISWVRQAPGQGLEWVGGIIPIFGTANYAQKFQGRVKITADESASTAYMELSSLRSEDTAVYYCAREEGPYCSSTSCYGAFDIWGQGTLVTVSS

SEQ ID NO: 16682 - protein, 108 aa, Artificial Sequence
  source: /note="Description of Artificial Sequence: Synthetic polypeptide"
QSVLTQDPAVSAALGQTVKITCQGDSLRSYFASWYQQKPGQAPTLVMYARNDRPAGVPDRFSGSKSGTSASLAISGLQSEDEADYYCAAWDDSLNGYLFGAGTKLTVL

SEQ ID NO: 16683 - protein, 243 aa, Artificial Sequence
  source: /note="Description of Artificial Sequence: Synthetic polypeptide"
EVQLVESGGGLVQPGGSLRLSCAASGFTLSGDWIHWVRQAPGKCLEWVGEISAAGGYTDYADSVKGRFTISADTSKNTAYLQMNSLRAEDTAVYYCARESRVSFEAAMDYWGQGTLVTVSSGGGGSGGGGSGGGGSDIQMTQSPSSLSASVGDRVTITCRASQNIATDVAWYQQKPGKAPKLLIYSASFLYSGVPSRFSGSGSGTDFTLTISSLQPEDFATYYCQQSEPEPYTFGCGTKVEIK

SEQ ID NO: 16684 - protein, 248 aa, Artificial Sequence
  source: /note="Description of Artificial Sequence: Synthetic polypeptide"
EVQLLESGGGLVQPGGSLRLSCAASGFTFSHYVMAWVRQAPGKGLEWVSSISSSGGWTLYADSVKGRFTISRDNSKNTLYLQMNSLRAEDTAVYYCTRGLKMATIFDYWGQGTLVTVSSASTGGGGSGGGGSGGGGSQSALTQPASVSGSPGQSITISCTGTSSDVGSYNVVSWYQQHPGKAPKLIIYEVSQRPSGVSNRFSGSKSGNTASLTISGLQTEDEADYYCCSYAGSSIFVIFGGGTKVTVL

SEQ ID NO: 16685 - protein, 238 aa, Artificial Sequence
  source: /note="Description of Artificial Sequence: Synthetic polypeptide"
QVQLVQSGAEVKKPGSSVKVSCKASGYTFTTYYLHWVRQAPGQGLEWMGWIYPGNVHAQYNEKFKGRVTITADKSTSTAYMELSSLRSEDTAVYYCARSWEGFPYWGQGTTVTVSSGGGGSGGGGSGGGGSDIQMTQSPSSLSASVGDRVTITCKASQNVGINVAWYQQKPGKAPKSLISSASYRYSGVPSRFSGSGSGTDFTLTISSLQPEDFATYFCQQYDTYPFTFGQGTKVEIK

SEQ ID NO: 16686 - protein, 238 aa, Artificial Sequence
  source: /note="Description of Artificial Sequence: Synthetic polypeptide"
QVQLVQSGAEVKKPGSSVKVSCKASGYTFTTYYLHWVRQAPGQCLEWMGWIYPGNVHAQYNEKFKGRVTITADKSTSTAYMELSSLRSEDTAVYYCARSWEGFPYWGQGTTVTVSSGGGGSGGGGSGGGGSDIQMTQSPSSLSASVGDRVTITCKASQNVGINVAWYQQKPGKAPKSLISSASYRYSGVPSRFSGSGSGTDFTLTISSLQPEDFATYFCQQYDTYPFTFGCGTKVEIK

SEQ ID NO: 16687 - protein, 243 aa, Artificial Sequence
  source: /note="Description of Artificial Sequence: Synthetic polypeptide"
QVQLVQSGAEVKKPGSSVKVSCKASGYTFTTYYLHWVRQAPGQGLEWMGWIYPGNVHAQYNEKFKGRVTITADKSTSTAYMELSSLRSEDTAVYYCARSWEGFPYWGQGTTVTVSSGGGGSGGGGSGGGGSGGGGSDIQMTQSPSSLSASVGDRVTITCKASQNVGINVAWYQQKPGKAPKSLISSASYRYSGVPSRFSGSGSGTDFTLTISSLQPEDFATYFCQQYDTYPFTFGQGTKVEIK

SEQ ID NO: 16688 - protein, 248 aa, Artificial Sequence
  source: /note="Description of Artificial Sequence: Synthetic polypeptide"
QVQLVQSGAEVKKPGSSVKVSCKASGYTFTTYYLHWVRQAPGQGLEWMGWIYPGNVHAQYNEKFKGRVTITADKSTSTAYMELSSLRSEDTAVYYCARSWEGFPYWGQGTTVTVSSGGGGSGGGGSGGGGSGGGGSGGGGSDIQMTQSPSSLSASVGDRVTITCKASQNVGINVAWYQQKPGKAPKSLISSASYRYSGVPSRFSGSGSGTDFTLTISSLQPEDFATYFCQQYDTYPFTFGQGTKVEIK

SEQ ID NO: 16689 - protein, 243 aa, Artificial Sequence
  source: /note="Description of Artificial Sequence: Synthetic polypeptide"
QVQLVQSGAEVKKPGSSVKVSCKASGYTFTTYYLHWVRQAPGQCLEWMGWIYPGNVHAQYNEKFKGRVTITADKSTSTAYMELSSLRSEDTAVYYCARSWEGFPYWGQGTTVTVSSGGGGSGGGGSGGGGSGGGGSDIQMTQSPSSLSASVGDRVTITCKASQNVGINVAWYQQKPGKAPKSLISSASYRYSGVPSRFSGSGSGTDFTLTISSLQPEDFATYFCQQYDTYPFTFGCGTKVEIK

SEQ ID NO: 16690 - protein, 240 aa, Artificial Sequence
  source: /note="Description of Artificial Sequence: Synthetic polypeptide"
DIQMTQSPSSLSASVGDRVTITCRASQDIRYYLNWYQQKPGKAPKLLIYVASSLQSGVPSRFSGSGSGTEFTLTVSSLQPEDFATYYCLQVYSTPRTFGQGTKVEIKGGGGSGGGGSGGGGSEVQLVESGGGLAKPGGSLRLSCAASGFRFTFNNYYMDWVRQAPGQGLEWVSRISSSGDPTWYADSVKGRFTISRENAKNTLFLQMNSLRAEDTAVYYCASLTTGSDSWGQGVLVTVSS

SEQ ID NO: 16691 - protein, 240 aa, Artificial Sequence
  source: /note="Description of Artificial Sequence: Synthetic polypeptide"
EVQLVESGGGLAKPGGSLRLSCAASGFRFTFNNYYMDWVRQAPGQGLEWVSRISSSGDPTWYADSVKGRFTISRENAKNTLFLQMNSLRAEDTAVYYCASLTTGSDSWGQGVLVTVSSGGGGSGGGGSGGGGSDIQMTQSPSSLSASVGDRVTITCRASQDIRYYLNWYQQKPGKAPKLLIYVASSLQSGVPSRFSGSGSGTEFTLTVSSLQPEDFATYYCLQVYSTPRTFGQGTKVEIK

SEQ ID NO: 16692 - protein, 251 aa, Artificial Sequence
  source: /note="Description of Artificial Sequence: Synthetic polypeptide"
EVQLVQSGAEVKKPGESLTISCKGPGYNFFNYWIGWVRQMPGKGLEWMGIIYPTDSDTRYSPSFQGQVTISVDKSISTAYLQWSSLKASDTAMYYCARSIRYCPGGRCYSGYYGMDVWGQGTMVTVSSGGGGSGGGGSGGGGSSELTQDPAVSVALGQTVRITCQGDSLRSYYASWYQQKPGQAPVLVIYGKNNRPSGIPDRFSGSSSGNTASLTITGAQAEDEADYYCNSRDSSGNHVVFGGGTKLTVLG

SEQ ID NO: 16693 - protein, 245 aa, Artificial Sequence
  source: /note="Description of Artificial Sequence: Synthetic polypeptide"
QVQLVQSGAEVRKPGASVKVSCKTSGYTFRNYDINWVRQAPGQGLEWMGRISGHYGNTDHAQKFQGRFTMTKDTSTSTAYMELRSLTFDDTAVYYCARSQWNVDYWGRGTLVTVSSGGGGSGGGGSGGGGSALNFMLTQPHSVSESPGKTVTISCTRSSGSIASNYVQWYQQRPGSSPTTVIFEDNRRPSGVPDRFSGSIDTSSNSASLTISGLKTEDEADYYCQSFDSTNLVVFGGGTKVTVLG

SEQ ID NO: 16694 - protein, 245 aa, Artificial Sequence
  source: /note="Description of Artificial Sequence: Synthetic polypeptide"
EVQLLESGGGLVQPGGSLRLSCAASGFTFSSYAMSWVRQAPGKGLEWVSAISGSGGSTYYADSVKGRFTISRDNSKNTLYLQMNSLRAEDTAVYYCASSPYSSRWYSFDPWGQGTMVTVSSGGGGSGGGGSGGGGSALSYELTQPPSVSVSPGQTATITCSGDDLGNKYVSWYQQKPGQSPVLVIYQDTKRPSGIPERFSGSNSGNIATLTISGTQAVDEADYYCQVWDTGTVVFGGGTKLTVLG

SEQ ID NO: 16695 - protein, 251 aa, Artificial Sequence
  source: /note="Description of Artificial Sequence: Synthetic polypeptide"
EVQLVQSGAEVKKPGESLTISCKGSGYNFFNYWIGWVRQMPGKDLEWMGIIYPTDSDTRYSPSFQGQVTISVDKSISTAYLQWSSLKASDTAMYYCARSIRYCPGGRCYSGYYGMDVWGQGTMVTVSSGGGSSGGGGSGGGGSSELTQDPAVSVALGQTVRITCRGDSLRNYYASWYQQKPGQAPVLVIYGKNNRPSGIPDRFSGSSSGNTASLTITGAQAEDEADYYCNSRDSSGNHMVFGGGTKLTVLG

SEQ ID NO: 16696 - protein, 249 aa, Artificial Sequence
  source: /note="Description of Artificial Sequence: Synthetic polypeptide"
EVQLVESGGGVVQPGRSLRLSCAASGFTFSDFAMHWVRQIPGKGLEWLSGLRHDGSTAYYAGSVKGRFTISRDNSRNTVYLQMNSLRAEDTATYYCVTGSGSSGPHAFPVWGKGTLVTVSSGGGGSGGGGSGGGGSALSYVLTQPPSASGTPGQRVTISCSGSNSNIGTYTVNWFQQLPGTAPKLLIYSNNQRPSGVPDRFSGSKSGTSASLAISGLQSEDEADYYCAAWDDSLNGPVFGGGTKVTVLG

SEQ ID NO: 16697 - protein, 251 aa, Artificial Sequence
  source: /note="Description of Artificial Sequence: Synthetic polypeptide"
EVQLVQSGAEVKKPGESLTISCKGSGYNFFNYWIGWVRQMPGKGLEWMGIIYPTDSDTRYSPSFQGQVTISVDKSISTAYLQWSSLKASDTAMYYCARSIRYCPGGRCYSGYYGMDVWGQGTLVTVSSGGGGSGGGGSGGGGSSELTQDPAVSVALGQTVRITCQGDSLRSYYTNWFQQKPGQAPLLVVYAKNKRPSGIPDRFSGSSSGNTASLTITGAQAEDEADYYCNSRDSSGNHVVFGGGTKLTVLG

SEQ ID NO: 16698 - protein, 251 aa, Artificial Sequence
  source: /note="Description of Artificial Sequence: Synthetic polypeptide"
QVQLVQSGGGLVKPGRSLRLSCTASGFTFGDYAMSWFRQAPGKGLEWVGFIRSKAYGGTTEYAASVKGRFTISRDDSKSIAYLQMNSLKTEDTAVYYCTRGSSGWFLNWFDPWGQGTLVTVSSLEGGGGSGGGGSGGGGSELETTLTQSPATLSLSPGERATLSCRASQSISSSYLAWYQHKPGQAPRLLIYGASRRATGIPDRFSGSGSGTDFSLTISRLEPEDFAVYYCLHYGSSKWTFGQGTKVEIKR

SEQ ID NO: 16699 - protein, 253 aa, Artificial Sequence
  source: /note="Description of Artificial Sequence: Synthetic polypeptide"
EVQLLESGGGLVQPGGSLRLSCAASGFTFSGYAMSWVRQAPGKGLEWVSSIYSSSGSKYYADSVKGRFTISRDNSKNTLYLQMNSLRAEDTAVYYCARASSTCTRTWCSYDDAMDVWGQGTLVTVSSGGGGSGGGGSGGGGSQSVLTQPPSASGTPGQRVTISCTGSSSNIGNNAVTWYQQLPGTAPKLLIYDDSHRPSGVPDRFSGSKSGTSASLAISGLRSEDEADYYCGTWDYSLSGYVFGGGTKLTVLG

SEQ ID NO: 16700 - protein, 247 aa, Artificial Sequence
  source: /note="Description of Artificial Sequence: Synthetic polypeptide"
EVQLLESGGGLVQTGGSLRLSCAASGFTFSDYAMSWVRQAPGKGLEWVSSIYPGSGSKYYADSVKGRFAISRDNSKNTLYLQMNSLRAEDTAVYYCARDAWFRGHNVFDYWGQGTLVTVSSGGGGSGGGGSGGGGSQSVLTQPPSASGTPGQRVTISCTGSSSNIGSNNVTWYQQLPGTAPKLLIYSDSHRPSGVPDRFSGSKSGTSASLAISGLQSEDEADYYCGSWDYSLSAYVFGGGTKLTVLG

SEQ ID NO: 16701 - protein, 253 aa, Artificial Sequence
  source: /note="Description of Artificial Sequence: Synthetic polypeptide"
EVQLLESGGGLVQPGGSLRLSCAASGFTFSNYDMSWVRQAPGKGLEWVSGIYPNGGSKYYADSVKGRFTISRDNSKNTLYLQMNSLRAEDTAVYYCARALRQCQRYWCSYADGMDVWGQGTLVTVSSGGGGSGGGGSGGGGSQSVLTQPPSASGTPGQRVTISCTGSSSNIGSNYVSWYQQLPGTAPKLLIYADSQRPSGVPDRFSGSKSGTSASLAISGLRSEDEADYYCGTWDYSLSGYVLGGGTKLTVLG

SEQ ID NO: 16702 - protein, 247 aa, Artificial Sequence
  source: /note="Description of Artificial Sequence: Synthetic polypeptide"
EVQLLESGGGLVQPGGSLRLSCAASGFTFSDYYMSWVRQAPGKGLEWVSAIYSGGGSIYYADSVKGRFTISRDNSKNTLYLQMNSLRAEDTAVYYCARDVQWNKAPRFDYWGQGTLVTVSSGGGGSGGGGSGGGGSQSVLTQPPSASGAPGQRVTISCSGSSSNIGSNDVSWYQQLPGTAPKLLIYADSNRPSGVPDRFSGSKSGTSASLAISGLRSEDEADYYCGSWDYSLSGYVFGGGTKLTVLG

SEQ ID NO: 16703 - protein, 247 aa, Artificial Sequence
  source: /note="Description of Artificial Sequence: Synthetic polypeptide"
EVQLLESGGGLVQPGGSLRLSCAASGFTFSSYSMSWVRQAPGKGLEWVSGISHGGGNKYYADSVKGRFTISRDNSKNTLYLQMNSLRAEDTAVYYCARDLRANNDTGFDYWGQGTLVTVSSGGGGSGGGGSGGGGTQSVLTQPPSSSGTPGQRVTISCTGSSSNIGSNAVTWYQQLPGTAPKLLIYDDNHRPSGVPDRFSGSKSGTSASLAISGLRSEDEADYYCGAWDYSLNAYVFGGGTKLTVLG

SEQ ID NO: 16704 - protein, 253 aa, Artificial Sequence
  source: /note="Description of Artificial Sequence: Synthetic polypeptide"
EVQLLESGGGLVQPGGSLRLSCAASGFTFSNYDMSWVRQAPGKGLEWVSLISHGGGNIYYADSVKGRFTISRDNSKNTLYLQMNSLRAEDTAVYYCARVPVMCTNHWCSYANGMDVWGQGTLVTVSSGGGGSGGGGSGGGGSQSVLTQPPSASGTPGQRVIISCSASSSNIGSNAVYWYQQLPGTAPKLLIYSDNQRPSGVPDRFSGSKSGTSASLAISGLRSEDEADYYCGSWDYSLSAYVFGGGTKLTVLG

SEQ ID NO: 16705 - protein, 247 aa, Artificial Sequence
  source: /note="Description of Artificial Sequence: Synthetic polypeptide"
EVQLLESGGGLVQPGGSLRLSCAASGFTFSGYAMSWVRQAPGKGLEWVSGISHDGGNTYYADSVKGRFTISRDNSKNTLYLQMNSLRAEDTAVYYCARDRRKGPSTEFDYWGQGTLVTVSSGGGGSGGGGSGGGGSQSVLTQPPSLSGTPGQRVTISCTGSSSNIGSNSVSWYQQLPGTAPKLLIYDDNNRPSGVPDRFSGSKSGTSASLAISGLRSEDEADYYCGAWDYSLSAYVFGGGTKLTVLG

SEQ ID NO: 16706 - protein, 253 aa, Artificial Sequence
  source: /note="Description of Artificial Sequence: Synthetic polypeptide"
EVQLLESGGGLVQTGGSLRLSCAASGFTFSDYAMSWVRQAPGKGLEWVSWIYPGDSSIYYADSVKGRFTISRDNSKNTLYLQMNSLRAEDTAVYYCARLLSIDQAQLHYYYDAMDVWGQGTLVTVSSGGGGSGGGGSGGGGSQSVLTQPPSPSGTPGQRVTISCTGSSSNIGNYYVYWYQQLPGTAPKLLIYANSHRPSGVPDRFSGSKSGTSASLAISGLRSEDEADYYCGSWDDSLSAYVFGGGTKLTVLG

SEQ ID NO: 16707 - protein, 290 aa, Artificial Sequence
  source: /note="Description of Artificial Sequence: Synthetic polypeptide"
MKKLLFAIPLVVPFYSHSQVQLVQSGAEVKKPGSSVKVSCKASGYTFTTYYLHWVRQAPGQGLEWMGWIYPGNVHAQYNEKFKGRVTITADKSTSTAYMELSSLRSEDTAVYYCARSWEGFPYWGQGTTVTVSSGGGGSGGGGSGGGGSGGGGSDIQMTQSPSSLSASVGDRVTITCKASQNVGINVAWYQQKPGKAPKSLISSASYRYSGVPSRFSGSGSGTDFTLTISSLQPEDFATYFCQQYDTYPFTFGQGTKVEIKDDDDKSFLEQKLISEEDLNSAVDHHHHHH

SEQ ID NO: 16708 - protein, 290 aa, Artificial Sequence
  source: /note="Description of Artificial Sequence: Synthetic polypeptide"
MKKLLFAIPLVVPFYSHSQVQLVQSGAEVKKPGSSVKVSCKASGYTFTTYYLHWVRQAPGQGLEWMGWIYPGNGHAQYNEKFKGRVTITADKSTSTAYMELSSLRSEDTAVYYCARSWEGFPYWGQGTTVTVSSGGGGSGGGGSGGGGSGGGGSDIQMTQSPSSLSASVGDRVTITCKASQNVGINVAWYQQKPGKAPKSLISSASYRYSGVPSRFSGSGSGTDFTLTISSLQPEDFATYFCQQYDTYPFTFGQGTKVEIKDDDDKSFLEQKLISEEDLNSAVDHHHHHH

SEQ ID NO: 16709 - protein, 238 aa, Artificial Sequence
  source: /note="Description of Artificial Sequence: Synthetic polypeptide"
EVQLLESGRGLVQPGGSLRLSCAASGFTFSSYAMSWVRQAPGKGLEWVSAISGSGGSTYYADSVKGRFTISRDNSKNTLYLQMNSLRAEDTAVYYCARWGQGTTVTVSSGGGGSGGGGSGGGGSAQAVLTQPSSVSGAPGQRVTISCTGSSSNIGADYDVHWYQQLPGTAPKLLIYGNNNRPSGVPDRFSGSKSGTSASLAITGLQAEDEADYYCQSYDNSPDAYVVFGGGTKLTVLS

SEQ ID NO: 16710 - protein, 244 aa, Artificial Sequence
  source: /note="Description of Artificial Sequence: Synthetic polypeptide"
QVQLVQSGAEVRKPGASVKVSCKTSGYTFIDYYIHWVRQAPGQGLEWMGWVNPVTGTSGSSPNFRGRVTMTTDTSGNTAYMELRSLRSDDTAVFYCARRHQQSLDYWGQGTLVTVSSGGGGSGGGGSGGGGSAQSVLTQPPSVSAPPGQKVTISCSGSSSNIGTNYVSWYQQLPGTAPKLLIYDNHKRPSVIPDRFSGSKSGTSATLGISGLQTGDEADYYCGTWDYSLSTWVFGGGTKLTVLG

SEQ ID NO: 16711 - protein, 240 aa, Artificial Sequence
  source: /note="Description of Artificial Sequence: Synthetic polypeptide"
QLQLQESGPGLVKPSGTLSLTCAVSGDSVSSYYWWSWVRQPPGKGLEWIGEIFRDGSSNYNRSLKSRVTISPDKPKNQFSLRLSSVTAADTAIYYCARHIRGYDAFDIWGRGTLVTVSSGGGGSGGGGSGGGGSAQSVLTQPPSVSGAPGQRVTISCTGSSSNIGAGYDVHWYQQFPGRAPKLLIYGNTNRPSGVPDRFSGSKSDISASLAITGLQAEDEADYYCQSYDSNLTGVFGGGT

SEQ ID NO: 16712 - protein, 244 aa, Artificial Sequence
  source: /note="Description of Artificial Sequence: Synthetic polypeptide"
QVQLVQSGAEVRKPGASVKVSCKTSGYTFMDYYIHWVRQAPGQGLEWMGWSNPVTGTSGSSPKFRGRVTLTTDTSGNTAYLDLRSLRSDDTAVFYCARRHQQSLDYWGQGTMVTVSSGGGGSGGGGSGGGGSAQSVLTQPPSVSAAPGQKVTISCSGSSSNIGNNYVSWYQQLPGTAPKLLMYENSKRPSGIPDRFSGSKSGTSGTLGITGLQTGDEADYYCGTWDTSLRAWVFGGGTKVTVLG

SEQ ID NO: 16713 - protein, 244 aa, Artificial Sequence
  source: /note="Description of Artificial Sequence: Synthetic polypeptide"
QVQLQQSGAEVRKPGASAKVSCKTSGYTFIDYYIHWVRQAPGQGLEWMGWINPVTGASGSSPNFRGRVTLTTDTSGNTAYMELRSLRSDDTAVFYCARRHQQSLDYWGRGTTVTVSSGGGGSGGGGSGGGGSAQSVVTQPPSVSAAPGQKVTISCSGRTSNIGNNYVSWYQQVPGAPPKLLIFDNNKRPSGTPARFSGSKSGTSATLAISGLQTGDEADYYCGTWDTTLRGFVFGPGTKVTVLG

SEQ ID NO: 16714 - protein, 250 aa, Artificial Sequence
  source: /note="Description of Artificial Sequence: Synthetic polypeptide"
QLQLQESGPGLVKPSGTLSLTCAVSGGSISSTNWWSWVRQPPGKGLEWIGEIYHSGSTNYNPSLKSRVTISVDKSKNHFSLNLSSVTAADTAVYYCARDSMGSTGWHYGMDLWGRGTLVTVSSGGGGSGGGGSGGGGSAQSALTQPPSASGSPGQSVTISCSGSSSDIGDYNHVSWYQQHPGKAPKLMIYDVNKWPSGVPDRFSGSKSGNTASLTVSGLQAEDEADYYCSSYSGIYNLVFGGGTKVTVLG

SEQ ID NO: 16715 - protein, 250 aa, Artificial Sequence
  source: /note="Description of Artificial Sequence: Synthetic polypeptide"
EVQLLESGGGLVQPGGSLRLSCAASGFTFSSYAMSWVRQAPGKGLEWVSAISGSGGSTYYADSVKGRFTISRDNSKNTLYLQMNSLRAEDTAVYYCAKDHYYDSSGYLDYWGQGTLVTVSSGGGGSGGGGSGGGGSALNFMLTQPHSVSESPGKTVTISCTRSSGSIAFDYVQWYQQRPGSAPTTVIYEDNQRPSGVPDRFSASIDSSSNSASLTISALKTEDEADYYCQSYDNSNSWVFGGGTKLTVLG

SEQ ID NO: 16716 - protein, 242 aa, Artificial Sequence
  source: /note="Description of Artificial Sequence: Synthetic polypeptide"
KVQLLESGGGLVQPGGSLRLSCAASGFTFSSYAMSWVRQAPGKGLEWVSAISGSGGSTYYADSVKGRFTISRDNSKNTLYLQMNSLRAEDTAVYYCAKDDVRNAFDIWGRGTTVTVSSGGGGSGGGGSGGGGSAQSVLTQPPSVSVSPGQTTSITCSRDKLGEQYVYWYQQRPGQSPILLLYQDSRRPSWIPERFSGSNSGDTATLTISGTQALDEADYYCQAWDNSSYVAFGGGTKVTVLG

SEQ ID NO: 16717 - protein, 245 aa, Artificial Sequence
  source: /note="Description of Artificial Sequence: Synthetic polypeptide"
EVQLLESGGGLVQPGGSLRLSCAASGFTFSSYAMSWVRQAPGKGLEWVSAISGSGGSTYYADSVKGRFTISRDNSKNTLYLQMNSLRAEDTAVYYCARGGELWNPYLDYWGQGTLVTVSSGGGGSGGGGSGGGGSALPVLTQPPSVSVAPGKTARITCGGNDIASKSVQWFQQKPGQAPVLVIYYDSDRPSGIPERFSGSNSENTATLTISRVEAGDEADYYCQVWDSSSDHPVFGGGTKLTVLG

SEQ ID NO: 16718 - protein, 250 aa, Artificial Sequence
  source: /note="Description of Artificial Sequence: Synthetic polypeptide"
QVQLVQSGAEVKKPGESLKISCKGSGYTFTNYWIAWVRQMPGKGLEWMGIIYPDDSDTRYNPSFQGQVTMSADKSIDTAYLQWSSLKASDTAIYYCARPSGWNDNGYFDYWGRGTTVTVSSGGGGSGGGGSGGGGSALNFMLTQPHSVSASPGKTVTLSCTGSSGSIASNYVQWYRQRPGSAPTTVIYDDNQRPSGVPDRFSGSIDSSSNSASLTISGLKTEDEADYYCQSFDNDNHWVFGGGTKLTVLG

SEQ ID NO: 16719 - protein, 247 aa, Artificial Sequence
  source: /note="Description of Artificial Sequence: Synthetic polypeptide"
QVQLQESGPGLVRSSGILSLTCSVSGVSVSSNNWWSWVRQTPGKGLEWIGEIYQTGTTNYNPSLKSRVAISLDKSRNQFSLILKSVTAADTAVYYCARTSSAWSNADWGKGTMVTVSSGGGGSGGGGSGGGGSALSSELTQDPSASGSPGQSVSISCTGTSSDVGGYNYVSWYQQHPGKAPKLMISEVTKRPSGVPDRFSGSKSGNTASLTVSGLQAEDEADYYCSSFGANNNYLVFGGGTKLTVLG

SEQ ID NO: 16720 - protein, 251 aa, Artificial Sequence
  source: /note="Description of Artificial Sequence: Synthetic polypeptide"
QVQLQESGPRLVKPSQTLSLTCTVSNDSIISGDYFWSWIRQPPGKGLEWIGNIFYTGSTSYNPSLKSRLTMSLDTSKNQFSLRLSSVTAADTAVYFCARGRQGMNWNSGTYFDSWGRGTLVTVSSGGGGSGGGGSGGGGSALSYVLTQPPSVSVAPGKTANITCGGKNIGNKSVQWYQQKPGQAPVVVMYYDSDRPSGIPERFSGSNAGNTATLTIDRVEAGDEADYYCQVWDKSSDRPVFGGGTKLTVLG

SEQ ID NO: 16721 - protein, 245 aa, Artificial Sequence
  source: /note="Description of Artificial Sequence: Synthetic polypeptide"
QVQLVQSGAEVKKPGASVKVSCKTSGYTFMEYYIHWVRQAPGQGLEWMGWSNPVTGTSGSSPKFRGRVTLTTDTSGNTAYLDLRSLRSDDTAVFYCARRHQQSLDYWGQGTLVTVSSGGGGSGGGGSGGGGSAQSVVTQPPSASGSPGQSVTISCSGYSSSNIGNNAVSWYQQLPGTAPKLLIFDNNKRPSGIPARFSGSQSGTTATLGITGLQTGDEADYFCGTWDSSLSAFVFGSGTKVTVLG

SEQ ID NO: 16722 - protein, 246 aa, Artificial Sequence
  source: /note="Description of Artificial Sequence: Synthetic polypeptide"
EVQLVQSGAEVKKPGSSVKVSCKASGGSFSNYDFSWVRQAPGQGLEWMGEIINAFGSSRYAQKFQDRVTITADESASTAYMELRGLTSEDTATYYCARAERWELNMAFDMWGRGTLVTVSSGGGGSGGGGSGGGGSAQSVLTQPPSVSVAPGQTARITCGGDNIGRKNVHWYQQRPGLAPVLVVYDDTDRPSGIPERFSGSNSGDTATLTITWVEAGDEADYYCQLWDSDTYDVLFGGGTKLTVLG

SEQ ID NO: 16723 - protein, 247 aa, Artificial Sequence
  source: /note="Description of Artificial Sequence: Synthetic polypeptide"
EVQLVQSGAEVKKPGSSVKVSCKSSGGPFSSYGISWVRQAPGQGLEWMGGISPIFGTANYAQKFQGRVTITADESTETAYMELSSLRSEDTAVYYCARDESPVGFYALDIWGRGTTVTVSSGGGGSGGGGSGGGGSALSYELTQPPSVSVAPGQTARINCGGDKIGSRSVHWYQQKPGQAPVMVVYDDSDRPSGIPERFSGSNSGNTATLTISSVEAGDEADYYCQVWDGSTDPWVFGGGTKVTVLG

SEQ ID NO: 16724 - protein, 255 aa, Artificial Sequence
  source: /note="Description of Artificial Sequence: Synthetic polypeptide"
EVQLVQSGAEMKKPGSSVKVSCKASGGTFSSYAVNWVRQAPGQGLEWMGGIIPIFDTSNYAQKFQGRLTMTADDSTNTAYMELRSLRSEDTAVYYCARGAPRGTVMAFSSYYFDLWGQGTLVTVSSGGGGSGGGGSGGGGSALNFMLTQPHSVSESPGKTVIISCAGSGGNIATNYVQWYQHRPGSAPITVIYEDNQRPSGVPDRFSGSVDSSSNSASLTISGLQTEDEADYYCHSYDNTDQGVFGTGTKVTVLG

SEQ ID NO: 16725 - protein, 253 aa, Artificial Sequence
  source: /note="Description of Artificial Sequence: Synthetic polypeptide"
EVQLVESGGGLVQPGRSLRLSCAASGFTFDDYDMHWVRQAPGKGLEWVSSISWSGGTIGYADSVKGRFTVSRDNAKNSLYLQMNSVRAEDTALYYCAKDRGAVAALPDYQYGMDVWGRGTLVTVSSGGGGSGGGGSGGGGSAQSALTQPASVSGSPGQSITISCTGTSSDIGSYNLVSWYQQHPGKAPKLMIYEDYKRASGVSNHFSGSKSGNTASLTISGLQAEDEADYYCSSYAGSSAWVFGGGTKVTVLG

SEQ ID NO: 16726 - protein, 245 aa, Artificial Sequence
  source: /note="Description of Artificial Sequence: Synthetic polypeptide"
EVQLVQSGAEVRKPGSSMKVSCKASGDTFRNFAFSWVRQAPGQGLEWMGGVIPLVGPPKYAQKFQGRLTITADESTSTSYMDLTSLTLEDTAVYFCARGGVYAPFDKWGQGTLVTVSSGGGGSGGGGSGGGGSAQSVVTQPPSVSEAPRQRVTISCSGSSSNIGNNAVNWYQQLPGKAPKLLIYYNDLLPSGVSDRFSGSKSGTSASLAISGLQSEDEADYYCAAWDDSLNGWVFGGGTKVTVLG

SEQ ID NO: 16727 - protein, 251 aa, Artificial Sequence
  source: /note="Description of Artificial Sequence: Synthetic polypeptide"
EVQLVQSGAEVKKPGSSVKVSCKASGGTFKTYAINWVRQAPGQGLEWMGGIIPVLGTANYVQKFQGRVTITADESTTTAYMELRGLRSEDTAVYYCARGEGSGWYDHYYGLDVWGQGTLVTVSSGGGGSGGGGSGGGGSAQSVLTQPPSASGTPGQRVTISCSGSSSNIGSNTVNWYRQLPGTAPKLLIFGDDQRPSGVPDRFSGSRSGTSVSLAISGLQSEDEADYYCAAWDDSLNGGVFGGGTKLTVLG

SEQ ID NO: 16728 - protein, 248 aa, Artificial Sequence
  source: /note="Description of Artificial Sequence: Synthetic polypeptide"
QLQLQESGPGLVKPSGTLSLTCAVSGGSISTSDWWSWVRRPPGKGLEWIGEIYHSGSTNYHPSLKSRVTISLDKSKNQFSLKLSSVTAADTAVYYCAREGGHSGSYPLDYWGKGTLVTVSSGGGGSGGGGSGGGGSAQAVLTQPSSVSAAPGQKVTISCSGSSSNIGNNYVSWYQQLPGTAPKLLIYDNNKRPSGIPDRFSGSRSGTSATLGITGLQTGDEADYYCGTWDSSLSAVVFGTGTKLTVLG

SEQ ID NO: 16729 - protein, 250 aa, Artificial Sequence
  source: /note="Description of Artificial Sequence: Synthetic polypeptide"
QLQLQESGPGLVKPSGTLSLTCAVSGGSISSTNWWSWVRQPPGKGLEWIGEIYHSGSTNYNPSLKSRVTISVDKSKNHFSLNLSSVTAADTAVYYCARDSMGSTGWHYGMDLWGKGTLVTVSSGGGGSGGGGSGGGGSAQSALTQPASVSGSPGQSIAISCTGTSSDVGGYNYVSWYQQHPGKAPKLMIYAVTNRPSGVSDRFSGSKSGNTASLTISGLQADDEADYYCSSYTSSSSLVFGGGTKLTVLG

SEQ ID NO: 16730 - protein, 240 aa, Artificial Sequence
  source: /note="Description of Artificial Sequence: Synthetic polypeptide"
GVQLVESGGGLVKPGGSLRLSCAASGFTFSSYTMNWVRQAPGKGLEWVSYISSSGSATYYADSVKGRFTISRDNANNSLYLQMNSLRAEDTAVYYCARGYRYGMDVWGQGTLVTVSSGGGGSGGGGSGGGGSGIVMTQSPSTLSASVGDRVTITCRASQGISSWLAWYQQKPGRAPKVLIYKASTLESGVPSRFSGSGSGTDFTLTISSLQPEDFATYYCQQSYSTPWTFGQGTKLEIKR

SEQ ID NO: 16731 - protein, 245 aa, Artificial Sequence
  source: /note="Description of Artificial Sequence: Synthetic polypeptide"
EVQLLESGGGLVQPGGSLRLTCAASGFTFSSYAMSWVRQAPGKGLEWVSAISGSGGSTYYADSVKGRFTISRDNSKNTLYLQMNSLRAEDTAVYYCARDLAVAGIDYWGRGTMVTVSSGGGGSGGGGSGGGGSAQSVLTQPPSASGTPGQRVTISCSGSSSNIRSNYVYWYQQFPGTAPKLLIYRNNQRPSGVPDRFSGSKSGTSASLAISGLRSEDEADYYCAAWDDTLDAYVFAAGTKLTVLG

SEQ ID NO: 16732 - protein, 251 aa, Artificial Sequence
  source: /note="Description of Artificial Sequence: Synthetic polypeptide"
QVQLQESGPGLVKPSGTLSLTCAVSGGSISTSDWWSWVRRPPGKGLEWIGEIYHSGSTNYHPSLKSRVTISLDKSKNQFSLKLSSVTAADTAVYYCAREGGHSGSYPLDYWGQGTLVTVSSGGGGSGGGGSGGGGSALNFMLTQPHSVSGSPGRTVTISCTRSSGSIATNYVQWYQQRPGSSPTIVIYEDNQRPSGVPDRFSGSIDTSSNSASLTISGLKTEDEADYYCQSYDSNNLGVVFGGGTQLTVLS

SEQ ID NO: 16733 - protein, 249 aa, Artificial Sequence
  source: /note="Description of Artificial Sequence: Synthetic polypeptide"
QVQLQQSGAEVRKPGASVKISCKTSGYTFMDYYIHWVRQAPGQGLEWMGWSNPVTGTSGSSPKFRGRVTLTTDTSGNTAYLDLRSLRSDDTAVFYCARRHQQSLDYWGQGTLVTVSSGGGGSGGGGSGGGGSAQAVLTQPSSLSASPGASASLTCTLRSDINVGSYSINWYQQKPGSPPQYLLNYRSDSDKQQGSGVPSRFSGSKDASANAGILLISGLQSEDEADYYCMIWYRTAWVFGGGTKVTVLG

SEQ ID NO: 16734 - protein, 244 aa, Artificial Sequence
  source: /note="Description of Artificial Sequence: Synthetic polypeptide"
QVQLVQSGAEVRKPGASVKVSCKTSGYTFIEYYIHWVRQAPGQGLEWMGWSNPVTGTSGSSPKFRGRVTLTTDTSGNTAYLDLRSLRSDDTAVFYCARRHQQSLDYWGRGTTVTVSSGGGGSGGGGSGGGGSAQSVLTQPPSVSAAPGQKVTISCSGTNSNIGNYYVSWYQQLPGTAPKLLIYDNNKRPSGVPDRFSGSKSGTSASLVISGLRSEDEADYYCAAWDGSLTAWVFGGGTKVTVLG

SEQ ID NO: 16735 - protein, 250 aa, Artificial Sequence
  source: /note="Description of Artificial Sequence: Synthetic polypeptide"
QVQLQESGPGLVKPSGTLSLTCAVSGDSISSSNWWTWVRQPPGKGLEWIGEIFHSGTTNYNPSLNNRVTISLDESRNQFSLELSSVTAADTAIYYCARDSGNYDDNRGYDYWGRGTLVTVSSGGGGSGGGGSGGGGSAQSVLTQPPSVSGAPGQRVTISCAGTSSNIGAGFDVHWYQLLPGRAPKLLIYGNNNRPSGVPDRFSGSKSGTSASLAISGLQSEDEGDYYCAAWDDTVGGPVFGGGTKLTVLG

SEQ ID NO: 16736 - protein, 250 aa, Artificial Sequence
  source: /note="Description of Artificial Sequence: Synthetic polypeptide"
QVQLQESGPGLVKPSGTLSLTCAVSGGSISSTNWWSWVRQPPGKGLEWIGEIYHSGSTNYNPSLKSRVTISVDKSKNHFSLNLSSVTAADTAVYYCARDSMGSTGWHYGMDLWGRGTLVTVSSGGGGSGGGGSGGGGSAQSALTQPAAVSGSPGQSITISCTGSSSDVGGYNYVSWYQQHPGKAPKLLIYDVSDRPSGVSYRFSGSKSGNTASLTISGLQAEDEADYYCSSYTATGTLVFGGGTKLTVLG

SEQ ID NO: 16737 - protein, 251 aa, Artificial Sequence
  source: /note="Description of Artificial Sequence: Synthetic polypeptide"
QVQLQESGPGLVKPSGTLSLTCAVSGGSISSTNWWSWVRQPPGKGLEWIGEIYHSGSTNYNPSLKSRVTISVDKSKNHFSLNLSSVTAADTAVYYCARDSMGSTGWHYGMDLWGQGTTVTVSSGGGGSGGGGSGGGGSAQSALTQPASVSGSPGQSITISCTGTSSDVGGYNYVSWYQQHPGKAPKLMIYEVSNRPLGVSNRFSGSKSGNTASLTISGLQAEDEGDYYCSSYTSSTTLIVFGGGTKLTVLG

SEQ ID NO: 16738 - protein, 248 aa, Artificial Sequence
  source: /note="Description of Artificial Sequence: Synthetic polypeptide"
QVQLQESGPGLVKPSGTLSLTCAVSGGSISTSDWWSWVRRPPGKGLEWIGEIYHSGSTNYHPSLKSRVTISLDKSKNQFSLKLSSVTAADTAVYYCAREGGHSGSYPLDYWGQGTLVTVSSGGGGSGGGGSGGGGSAQSVLTQPPSVSGTTGQRVILSCSGGNSNIGYNSVNWYQQLPGTAPKLLIYTDDQRPSGVPDRFSGSRSGTSASLAISGLQSEDEADYYCATWDDSLNAGVFGGGTKLTVLG

SEQ ID NO: 16739 - protein, 245 aa, Artificial Sequence
  source: /note="Description of Artificial Sequence: Synthetic polypeptide"
QVQLVQSGAEVRKPGASVRVSCKTSGYTFLEYYIHWVRQAPGQGLEWMAWSNPVTGTSGSSPKFRGRVTLTADTSGNTAYLDLKSLTSDDTAIFYCARRHQQSLDYWGQGTLVTVSSGGGGSGGGGSGGGGSAQSVLTQPPSVSAAPGQTVTISCSGSNSNIGNNHVSWYRQLPETAPKLLIYDNNKRPSGIPDRFSGSKSGTSATLDITGLQTGDEADYYCATWDNSLSAPWVFGGGTKLTVLG

SEQ ID NO: 16740 - protein, 252 aa, Artificial Sequence
  source: /note="Description of Artificial Sequence: Synthetic polypeptide"
QVQLQESGAEVKKPGSSVKVSCKASGGTFSSSAISWVRQAPGQGLEWMGGIIPVFGTANYAQKFQDRVTITADESTSTAYLELSRLTSEDTAVYYCASRGEYDYGDYDVYYYYMEVWGQGTLVTVSSGGGGSGGGGSGGGGSAQSVLTQPPSVSVAPGQTARLTCGANNIGSTSVHWYQQKPGQAPVLVIYDDTDRPSGIPERFSGSNSGNTATLTIRRVEAGDEADYYCQVWDTNSDHVIFGGGTKLTVLG

SEQ ID NO: 16741 - protein, 249 aa, Artificial Sequence
  source: /note="Description of Artificial Sequence: Synthetic polypeptide"
EVQLVQSGAEVKKPGSSVKVSCQASGGTFTSHAMYWVRQAPGQGLEWMGGIIPIFGRTNYAQKFQGRVTFTADMSTSTAYMEMTSLRSDDTAVYYCARGDNWNDLYPIDYWGRGTLVTVSSGGGGSGGGGSGGGGSALNFMLTQPHSVSESPGKTVTISCTRSSGSIATTYVQWFQQRPGSSPTTVIYDDDQRPSGVPDRFSGSIDSSSNSASLTISGLMPEDEADYYCQSYDNTDLVFGGGTQLTVLS

SEQ ID NO: 16742 - protein, 248 aa, Artificial Sequence
  source: /note="Description of Artificial Sequence: Synthetic polypeptide"
EVQLVQSGAEVKKPGASVKVSCKVSGYSLSELSMHWVRQAPGKGLEWMGGFDPQNGYTIYAQEFQGRITMTEDTSTDTVYMELGSLRSEDTAVYFCAAIEITGVNWYFDLWGKGTLVTVSSGGGGSGGGGSGGGGSALSSELTQDPDVSVALGQTVRITCQGDSLKKFYPGWYQQKPGQAPLLVLYGENIRPSRIPDRFSGSSSGNTATLTITGAQAEDEAVYYCNSREASVHHVRVFGGGTKLTVLG

SEQ ID NO: 16743 - protein, 251 aa, Artificial Sequence
  source: /note="Description of Artificial Sequence: Synthetic polypeptide"
QVQLQESGPGLVKPSGTLSLTCAVSGGSISTSDWWSWVRRPPGKGLEWIGEIYHSGSTNYHPSLKSRVTISLDKSKNQFSLKLSSVTAADTAVYYCAREGGHSGSYPLDYWGKGTLVTVSSGGGGSGGGGSGGGGSALNFMLTQPHSVSESPGKTVTISCTRSSGSIASNYVQWYQQRPGSSPTTVIYEDNQRPSGVPDRFSGSIDSSSNSASLTISGLKTEDEADYYCQSYDSSNQGVVFGGGTKLTVLG

SEQ ID NO: 16744 - protein, 251 aa, Artificial Sequence
  source: /note="Description of Artificial Sequence: Synthetic polypeptide"
QLQLQESGPGLVKPSGTLSLTCAVSGGSISTSDWWSWVRRPPGKGLEWIGEIYHSGSTNYHPSLKSRVTISLDKSKNQFSLKLSSVTAADTAVYYCAREGGHSGSYPLDYWGQGTLVTVSSGGGGSGGGGSGGGGSALNFMLTQPHSVSESPGKTVTISCTGSSGSIASNYVQWYQQRPGSAPTTLIYEDDQRPSGVPDRFSGSVDSSSNSASLTISGLKTEDEADYYCQSYDRSNQAVVFGGGTKLTVLG

SEQ ID NO: 16745 - protein, 253 aa, Artificial Sequence
  source: /note="Description of Artificial Sequence: Synthetic polypeptide"
QVQLVQSGPEVKKPGASVEVSCKASGYTFTGDYMHWVRQAPGQGPEWMGWINPQTGVTKYAQKFQGRVTMARDTSINTAYMELRGLRSDDTAVYYCVREDHNYDLWSAYNGLDVWGQGTLVTVSSGGGGSGGGGSGGGGSAQSVLTQPPSVSAAPGQKVTISCSGSSSNIGNNHVSWYQQLAGTAPKLLIFDNDKRPSGIPDRFSGSKSGTSATLGITGLQTGDEADYYCGTWDKSPTDIYVFGSGTKLTVLG

SEQ ID NO: 16746 - protein, 247 aa, Artificial Sequence
  source: /note="Description of Artificial Sequence: Synthetic polypeptide"
QVQLQESGPGLVKPSGTLSLTCAVSGGSISSSNWWSWVRQAPGKGLEWIGEIYYGGSTNYNPSLKSRVTLSVDKSKNQFSLRLISVTAADTAVYYCARSSGLYGDYGNLWGRGTLVTVSSGGGGSGGGGSGGGGSAQSVVTQPPSVSAAPGQKVTISCSGSASNIGDHYISWYQQFPGTAPKLLISDNDQRPSGIPDRFSGSKSGTSATLGITGLQTGDEADYYCGTWDSNLSSWVFGSGTKVTVLG

SEQ ID NO: 16747 - protein, 250 aa, Artificial Sequence
  source: /note="Description of Artificial Sequence: Synthetic polypeptide"
EVQLVQSGAEVKKPGATLKVSCKVSAYTFTDYSMHWVQQAPGKGLKWMGLIDLEDGNTIYAEEFQDRVTITADTSTDTAYMDLSSLRSEDTAVFYCAISPLRGLTADVFDVWGQGTLVTVSSGGGGSGGGGSGGGGSAQSALTQPASASGSPGQSITISCTGTSSDIGRYDFVSWYQRQPGKAPKLMIYDVINRPSGVSSRFSGSKSGNTASLTISGLQAEDEADYYCSSYAGSTTLYVFGTGTKLTVLG

SEQ ID NO: 16748 - protein, 246 aa, Artificial Sequence
  source: /note="Description of Artificial Sequence: Synthetic polypeptide"
QVQLQESGPGLVKPSATLSLTCAVSGGSISSNHWWSWVRQSPGKGLEWIGEIYTYGGANYNPSLKSRVDISMDKSKNQFSLHLSSVTAADTAVYYCGRHLTGYDCFDIWGQGTLVTVSSGGGGSGGGGSGGGGSAQAVLTQPSSVSGAPGQRVTISCTGSSSNIGAGYDVHWYQQLPGTAPKLLIYGNSNRPSGVPDRFSGSKSGTSASLAITGLQAEDEADYYCQSYDSSLSGVFGTGTQLTVLS

SEQ ID NO: 16749 - protein, 249 aa, Artificial Sequence
  source: /note="Description of Artificial Sequence: Synthetic polypeptide"
QVQLQESGPGLVKPSGTLSLTCAVSGGSISTSDWWSWVRRPPGKGLEWIGEIYHSGSTNYHPSLKSRVTISLDKSKNQFSLKLSSVTAADTAVYYCAREGGHSGSYPLDYWGQGTLVTVSSGGGGSGGGGSGGGGSALNFMLTQPHSVSESPGKTVTISCTRSSGSIASKYVQWYQQRPGSAPTSVIYEDNQRPSGVPDRFSGSIDSASNSASLTISGLKTEDEADYYCQSDDGSSVVFGGGTKVTVLG

SEQ ID NO: 16750 - protein, 257 aa, Artificial Sequence
  source: /note="Description of Artificial Sequence: Synthetic polypeptide"
EVQLVQSGAEVKKPGASVKVSCKASGYSFPSSGLSWVRQAPGQGPEWMGWIGIYNGNTDYAQKFQGRVTMTTDKSTSTAYMELRSLRSDDTAVYYCARDSVGSISVAGTMQYYYFAMDVWGQGTLVTVSSGGGGSGGGGSGGGGSAQSVLTQPPSASGSPGQSVTISCAGTRYDIGTYNYVSWYQQHPAKGPKLIIYAVSERPSGVPNRFSGSKSGNTASLTVSGLRAEDEAHYYCSSYAGNNNVIFGGGTKVTVLG

SEQ ID NO: 16751 - protein, 247 aa, Artificial Sequence
  source: /note="Description of Artificial Sequence: Synthetic polypeptide"
QVQLQESGPGLVKPSGTLSLTCAVSGGSISTSDWWSWVRRPPGKGLEWIGEIYHSGSTNYHPSLKSRVTISLDKSKNQFSLKLSSVTAADTAVYYCAREGGHSGSYPLDYWGRGTMVTVSSGGGGSGGGGSGGGGSAQSVLTQPPSASGTPGQRVTISCSGSFSNIGGNYVNWYQQLPGTAPKLLIYGNNQRPSGVPDRFSSFKSGTSASLAISGLRSEDEADYYCATWDDSQTVLFGGGTKLTVLG

SEQ ID NO: 16752 - protein, 246 aa, Artificial Sequence
  source: /note="Description of Artificial Sequence: Synthetic polypeptide"
EVQLLESGGGLVQPGGSLRLSCAASGFTFSSYAMSWVRQAPGKGLEWVSAISGSGGSTYYADSVKGRFTISRDNSKNTLYLQMNSLRAEDTAVYYCARWNGFLTAHDSWGRGTMVTVSSGGGGSGGGGSGGGGSAQSVLTQPPSASGTPGQRVTISCSGSSSNIGTNYVYWYQQFPGTAPKLLIYRSNRRPSGVPDRFSASKSGTSASLVISGLRSEDEADYYCAAWDDRLNGEMFGGGTKVTVLG

SEQ ID NO: 16753 - protein, 243 aa, Artificial Sequence
  source: /note="Description of Artificial Sequence: Synthetic polypeptide"
EVQLLESGGGLVQPGGSLRLSCAASGFTFSSYAMSWVRQAPGKGLEWVSAISGSGGSTYYADSVKGRFTISRDNSKNTLYLQMNSLRAEDTAVYYCARWSGRFYDFWGQGTTVTVSSGGGGSGGGGSGGGGSAQSVLTQPPSASGTPGQRITISCSGSSSNIGSNYVYWYQQLPGTAPKILIYRNNQRPSGVPERFSGSKSGTSASLAISGLRSEDEADYYCAAWDDSLSEVFGGGTKVTVLG

SEQ ID NO: 16754 - protein, 246 aa, Artificial Sequence
  source: /note="Description of Artificial Sequence: Synthetic polypeptide"
EVQLLESGGGLVQPGGSLRLSCAASGFTFSSYAMSWVRQAPGKGLEWVSAISGSGGSTYYADSVKGRFTISRDNSKNTLYLQMNSLRAEDTAVYYCARDKGYSGFDYWGRGTLVTVSSGGGGSGGGGSGGGGSAQSVLTQPPSASGTPGQRVTISCSGSSSNIGRHTVNWYQQLPGTAPKLLIYSNNQRPSGVPDRFSGSKSGTSASLAISGLQSEDEGHYHCAAWDDTLNGDVVFGGGTKVTVLG

SEQ ID NO: 16755 - protein, 251 aa, Artificial Sequence
  source: /note="Description of Artificial Sequence: Synthetic polypeptide"
QLQLQESGPGLVKPSGTLSLTCAVSGGSISTSDWWSWVRRPPGKGLEWIGEIYHSGSTNYHPSLKSRVTISLDKSKNQFSLKLSSVTAADTAVYYCAREGGHSGSYPLDYWGKGTLVTVSSGGGGSGGGGSGGGGSALNFMLTQPHSVSESPGKTVTISCTRSSGSIASNYVQWYQQRPGSSPTTVIYEDNQRPSGVPDRFSGSIDSSSNSASLTISGLKTEDEADYYCQSYDSSNPYVVFGGGTKLTVLG

SEQ ID NO: 16756 - protein, 248 aa, Artificial Sequence
  source: /note="Description of Artificial Sequence: Synthetic polypeptide"
QLQLQESGPGLVKPSGTLSLTCAVSGGSISTSDWWSWVRRPPGKGLEWIGEIYHSGSTNYHPSLKSRVTISLDKSKNQFSLKLSSVTAADTAVYYCAREGGHSGSYPLDYWGQGTLVTVSSGGGGSGGGGSGGGGSAQSVVTQPPSVSAAPGQKVTISCSGSSSNIGNNYVSWYKQLPGTAPKLLIYDNNKRPSGIPDRFSGSKSGTSATLGITGLQTGDEADYYCGTWDSSLSGVVFGGGTKLTVLG

SEQ ID NO: 16757 - protein, 251 aa, Artificial Sequence
  source: /note="Description of Artificial Sequence: Synthetic polypeptide"
QLQLQESGPGLVKPSGTLSLTCAVSGGSISTSDWWSWVRRPPGKGLEWIGEIYHSGSTNYHPSLKSRVTISLDKSKNQFSLKLSSVTAADTAVYYCAREGGHSGSYPLDYWGRGTLVTVSSGGGGSGGGGSGGGGSALNFMLTQPHSVSESPGKTVTISCTRSSGSIASNYVQWYQQRPGSSPTTLIYDDNQRPSGVPDRFSGSIDSSSNSASLTISGLKTEDEADYYCQSYDSSNLGVVFGGGTKLTVLG

SEQ ID NO: 16758 - protein, 250 aa, Artificial Sequence
  source: /note="Description of Artificial Sequence: Synthetic polypeptide"
QVQLQESGPGLVKPSGTLSLTCAVSGGSISTSDWWSWVRRPPGKGLEWIGEIYHSGSTNYHPSLKSRVTISLDKSKNQFSLKLSSVTAADTAVYYCAREGGHSGSYPLDYWGRGTLVTVSSGGGGSGGGGSGGGGSALNFMLTQPHSVSESPGKTATISCTGSGGSIARSYVQWYQQRPGRAPSIVIYEDYQRPSGVPDRFSGSIDSSSNSASLTITGLKTDDEADYYCQSSDDNNNVVFGGGTKVTVLG

SEQ ID NO: 16759 - protein, 248 aa, Artificial Sequence
  source: /note="Description of Artificial Sequence: Synthetic polypeptide"
QVQLQESGPGLVKPSGTLSLTCAVSGGSISTSDWWSWVRRPPGKGLEWIGEIYHSGSTNYHPSLKSRVTISLDKSKNQFSLKLSSVTAADTAVYYCAREGGHSGSYPLDYWGRGTLVTVSSGGGGSGGGGSGGGGSAQAVLTQPSSVSAAPGQKVTISCSGSSSNIGNNYVSWYQQLPGTAPKLLIYDNNERPSGIPDRFSGSKSGTSATLGITGLQTGDEADYYCGTWDSSLSTVVFGTGTKVTVLG

SEQ ID NO: 16760 - protein, 249 aa, Artificial Sequence
  source: /note="Description of Artificial Sequence: Synthetic polypeptide"
QLQLQESGPGLVKPSGTLSLTCAVSGGSISTSDWWSWVRRPPGKGLEWIGEIYHSGSTNYHPSLKSRVTISLDKSKNQFSLKLSSVTAADTAVYYCAREGGHSGSYPLDYWGQGTLVTVSSGGGGSGGGGSGGGGSALNFMLTQPHSVSESPGKTVTVSCTGSGGNIASNYVQWYQQRPDSAPTLVIFEDTQRPSGVPARFSGSIDSSSNSASLIISSLRTEDEADYYCQSSDSNRVVFGGGTKVTVLG

SEQ ID NO: 16761 - protein, 241 aa, Artificial Sequence
  source: /note="Description of Artificial Sequence: Synthetic polypeptide"
QVQLQESGPGLVKPSETLSLTCNVSGGSIRNYFWSWIRQPPGQGLEYIGYIYYSGTTDYNPSLKGRVTISLDTSKTQFSLKLNSVTAADTAFYYCVRGPNKYAFDPWGQGTLVTVSSGGGGSGGGGSGGGGSALSYELTQPPSVSVSPGQTASITCSGDKLGDKFASWYQQKAGQSPVLVIYRDTKRPSGIPERFSGSNSGNTATLTISGTQAMDEADYYCQAWDSSTAVFGTGTKVTVLG

SEQ ID NO: 16762 - protein, 251 aa, Artificial Sequence
  source: /note="Description of Artificial Sequence: Synthetic polypeptide"
QLQLQESGPGLVKPSGTLSLTCAVSGGSISTSDWWSWVRRPPGKGLEWIGEIYHSGSTNYHPSLKSRVTISLDKSKNQFSLKLSSVTAADTAVYYCAREGGHSGSYPLDYWGQGTLVTVSSGGGGSGGGGSGGGGSALNFMLTQPHSVSESPGKTVTISCTRSSGSIDNNYVQWYQQRPGSSPTTVIFEDNQRPSGVPDRFSGSIDSSSNSASLTISGLKTEDEADYYCQSYDSHNQGVVFGGGTKLTVLG

SEQ ID NO: 16763 - protein, 248 aa, Artificial Sequence
  source: /note="Description of Artificial Sequence: Synthetic polypeptide"
QLQLQESGPGLVKPSGTLSLTCAVSGGSISTSDWWSWVRRPPGKGLEWIGEIYHSGSTNYHPSLKSRVTISLDKSKNQFSLKLSSVTAADTAVYYCAREGGHSGSYPLDYWGRGTLVTVSSGGGGSGGGGSGGGGSAQSVLTQPPSVSAAPGQKVTISCSGSSSNIGNSYVSWYKQLPGTAPKVLIYDNQKRSSGIPDRFSASKSGTSATLGITGLRTEDEADYYCGTWDTSLSAVVFGGGTKLTVLG

SEQ ID NO: 16764 - protein, 248 aa, Artificial Sequence
  source: /note="Description of Artificial Sequence: Synthetic polypeptide"
EVQLVESGPGLVKPSGTLSLTCAVSGGSISTSDWWSWVRRPPGKGLEWIGEIYHSGSTNYHPSLKSRVTISLDKSKNQFSLKLSSVTAADTAVYYCAREGGHSGSYPLDYWGRGTLVTVSSGGGGSGGGGSGGGGSAQSVVTQPPSVSAAPGQKVTISCSGNFSNIEYNYVSWYQHLPGTAPKLLIFDNNQRPSWIPDRFSGSKSGTSATLGITGLQTGDEADYYCGTWDSSLNAGVFGGGTKVTVLG

SEQ ID NO: 16765 - protein, 245 aa, Artificial Sequence
  source: /note="Description of Artificial Sequence: Synthetic polypeptide"
EVQLLESGGGLVRPGGSLRLSCAASGFTFSSYAMSWVRQAPGKGLEWVSAISGSGGSTYYADSVKGRFTISRDNSKNTLYLQMNSLRAEDTAVYYCAKDRRGVLDPWGKGTMVTVSSGGGGSGGGGSGGGGSAQSVLTQPPSVSGAPGQRVTISCTGSSSNIGAGYDVHWYQHLPGTAPRLLIYGNSNRPSGVPDRFSGSKSGTSASLAISGLQAEDEADYYCQSYDSSLSDWVFGGGTKVTVLG

SEQ ID NO: 16766 - protein, 250 aa, Artificial Sequence
  source: /note="Description of Artificial Sequence: Synthetic polypeptide"
QLQLQESGPGLVKPSGTLSLTCAVSGGSISTSDWWSWVRRPPGKGLEWIGEIYHSGSTNYHPSLKSRVTISLDKSKNQFSLKLSSVTAADTAVYYCAREGGHSGSYPLDYWGRGTLVTVSSGGGGSGGGGSGGGGSALNFMLTQPHSVSESPGKTVTISCARSSGSIASNYVQWYQQRPGSSPTTLIYEDRQRPSGVPDRFSGSIDSSSNSASLTISGLKTEDEADYYCQSYDSSDHVVFGGGTKLTVLG

SEQ ID NO: 16767 - protein, 249 aa, Mus sp.
SYELTQPPSVSVAPGQTARITCSGDALGDKYASWYQQKPGQAPVLVIYEDSKRPSGIPERFSGSNSGNTATLTISGTQAEDEADYYCSVWDGDWGMPVFGGGTKLTVLGSGGSTITSYNVYYTKLSSSGSEVQLVQSGAEVKKPGESLKISCKGSGYSFTSYWIGWVRQMPGKGLEWMGIIYPGDSDTRYSPSFQGQVTISADKSISTAYLQWSSLKASDTAMYYCARGIIYPSNVAVWGQGTLVTVSS

SEQ ID NO: 16768 - protein, 110 aa, Artificial Sequence
  source: /note="Description of Artificial Sequence: Synthetic polypeptide"
QSVLTQPPSVSAAPGQKVTISCSGSSSNIGNNYVSWYQQLPGTAPKLLIYDHTNRPAGVPDRFSGSKSGTSASLAISGFRSEDEADYYCASWDYTLSGWVFGGGTKLTVL

SEQ ID NO: 16769 - protein, 119 aa, Artificial Sequence
  source: /note="Description of Artificial Sequence: Synthetic polypeptide"
QVQLVQSGGGLVKPGGSLRLSCAASGFSFNTYDMNWVRQAPGKGLEWVSSISSSSSYIYYADSVKGRFTISRDNAKNSLYLQMNSLRAEDTAVYYCARDGVATTPFDYWGQGTLVTVSS

SEQ ID NO: 16770 - protein, 122 aa, Artificial Sequence
  source: /note="Description of Artificial Sequence: Synthetic polypeptide"
QVQLVQSGGGLVQPGRSLRLSCAASGFTFDDYAMHWVRQAPGKGLEWVSGISWNSGSIGYADSVKGRFTISRDNAKNSLYLQMNSLRPEDTAVYYCARDLGAKQWLEGFDYWGQGTLVTVSS

SEQ ID NO: 16771 - protein, 122 aa, Artificial Sequence
  source: /note="Description of Artificial Sequence: Synthetic polypeptide"
QVQLQESGGGLVKPGGSLRLSCAASGFTFSSYAMSWVRQAPGKGLEWVSTISGSGGSTYYADSVKGRFTISRDNSKNTLYLQMNSLRAEDTAVYYCAKGYSSSWSEVASGYWGQGTLVTVSS

SEQ ID NO: 16772 - protein, 119 aa, Artificial Sequence
  source: /note="Description of Artificial Sequence: Synthetic polypeptide"
QVQLVESGGGLVQPGGSLRLSCAASGFTFRSYAMSWVRQAPGKGLEWVSAISGRGDNTYYADSVKGRFTISRDNSKNTLYLQMNSLRAEDTAVYYCAKMTSNAVGFDYWGQGTLVTVSS

SEQ ID NO: 16773 - protein, 118 aa, Artificial Sequence
  source: /note="Description of Artificial Sequence: Synthetic polypeptide"
QVQLQESGGGLVKPGGSLRLSCAASGFTFSSYWMSWVRQAPGKGLEWVANINRDGSASYYVDSVKGRFTISRDDAKNSLYLQMNSLRAEDTAVYYCARDRGVGYFDLWGRGTLVTVSS

SEQ ID NO: 16774 - protein, 111 aa, Artificial Sequence
  source: /note="Description of Artificial Sequence: Synthetic polypeptide"
QSVLTQPPSVSGAPGQRVTISCTGSSSNIGAGYDVHWYQQLPGTAPKLLIYGNSNRPSGVPDRFSGSKSGTSASLAITGLQAEDEADYYCQSYDSSLSALFGGGTKLTVLG

SEQ ID NO: 16775 - protein, 108 aa, Artificial Sequence
  source: /note="Description of Artificial Sequence: Synthetic polypeptide"
NFMLTQDPAVSVALGQTVRITCQGDSLRSYYASWYQQKPGQAPVLVIYGKNNRPSGIPDRFSGSTSGNSASLTITGAQAEDEADYYCNSRDSSGNHWVFGGGTKVTVL

SEQ ID NO: 16776 - protein, 108 aa, Artificial Sequence
  source: /note="Description of Artificial Sequence: Synthetic polypeptide"
DIVMTQSPSSLSASVGDRVTITCRASQGIRNDLGWYQQKAGKAPKLLIYAASSLQSGVPSRFSGSGSGTDFTLTISSLQPDDFATYFCQQAHSFPPTFGGGTKVEIKR

SEQ ID NO: 16777 - protein, 112 aa, Artificial Sequence
  source: /note="Description of Artificial Sequence: Synthetic polypeptide"
QSVLTQPPSVSGAPGQRVTISCTGRHSNIGLGYGVHWYQQLPGTAPKLLIYGNTNRPSGVPDRFSGFKSGTSASLAITGLQAEDEADYYCQSYDRRTPGWVFGGGTKLTVLG

SEQ ID NO: 16778 - protein, 111 aa, Artificial Sequence
  source: /note="Description of Artificial Sequence: Synthetic polypeptide"
QSALTQPASVSGSPGQSITISCTGTSSDVGGYNFVSWYQQHPGKAPKLMIYDVSDRPSGVSDRFSGSKSGNTASLIISGLQADDEADYYCSSYGSSSTHVIFGGGTKVTVL

SEQ ID NO: 16779 - protein, 531 aa, Artificial Sequence [sequence omitted]

SEQ ID NO: 16780 - protein, 519 aa, Artificial Sequence [sequence omitted]

SEQ ID NO: 16781 - protein, 509 aa, Artificial Sequence
  source: /note="Description of Artificial Sequence: Synthetic polypeptide"
RHGPGAAGAVWGRPGQAWGVPETILCSLWIQLQHLHELGPPGSREGAGVGLIHLHILRRLSEGPIHHLQRQRQELTVSANEQPESRGHGCVLLCERWGGYDPLLLGPGHPGHRLLRWRRFRRRWLWRWRIAVCVDAATLSVWGPRAEGHHLLHWEQLQHRGRLCTLVPAASRNSPQTPHLWQQSSLRGPPILWLQVWHLSLPGHHWAPGGGLLLPVLQQPECPIRRRDQADRPREFRCWYFRFRCFRRFRFKASGAAGAVWGRGEKAAGVSEDLLGFWIQLYQLLDRLGAPDARERPGVHGAHLSWLHQIQPVLPRPGHHLSRQVRQHCLLAMEQSEALGQRRVFLCETRGILQFQLRKVAILPALGPGHPGHRLLRWRRFRRRWLWRWRIAVCVDAAALSVCGPRTEGHHLLLWKQLQHWELCILVPAAPRNSPQTPHLSHQSARRGPPILWLQVWHLSLPGHQWVPVRGGLLLCLLGLHPLGLGVRRRNQADRPRSAAPPPPPLSGR

SEQ ID NO: 16782 - protein, 126 aa, Artificial Sequence
  source: /note="Description of Artificial Sequence: Synthetic polypeptide"
EVQLVQSGAEVKKPGSSVKVSCKASGGTFSSYAISWVRQAPGQGLEWMGGIIPIFGTANYAQKFQGRVTITADESTSTAYMELSSLRSEDTAVYYCAREEGPYCSSTSCYGAFDIWGQGTLVTVSS

SEQ ID NO: 16783 - protein, 119 aa, Artificial Sequence
  source: /note="Description of Artificial Sequence: Synthetic polypeptide"
QVQLVESGGGLVQPGGSLRLSCAASGFTFRSYAMSWVRQAPGKGLEWVSAISGRGDNTYYADSVKGRFTISRDNSKNTLYLQMNSLRAEDTAVYYCAKMTSNAFAFDYWGQGTLVTVSS

SEQ ID NO: 16784 - protein, 110 aa, Artificial Sequence
  source: /note="Description of Artificial Sequence: Synthetic polypeptide"
QSVLTQPPSVSAAPGQKVTISCSGSSSNIGNNYVSWYQQLPGTAPKLLIYGHTNRPAGVPDRFSGSKSGTSASLAISGFRSEDEADYYCAAWDDSLSGWVFGGGTKLTVL

SEQ ID NO: 16785 - protein, 111 aa, Artificial Sequence
  source: /note="Description of Artificial Sequence: Synthetic polypeptide"
QSVLTQPPSVSGAPGQRVTISCTGSSSNIGAGYGVHWYQQLPGTAPKLLIYGNTNRPSGVPDRFSGFKSGTSASLAITGLQAEDEADYYCQSYDSSLSGWVFGGGTKLTVL

SEQ ID NO: 16786 - protein, 119 aa, Artificial Sequence
  source: /note="Description of Artificial Sequence: Synthetic polypeptide"
QVQLVESGGGVVQPGRSLRLSCAASGFTFSDYYIHWVRQAPGKGLEWMAVISYDGNNKYYAASVKDRFTISRDNSKNTVSLQMNSLRAEDTAVYYCARDLYGDYALDYWGQGTLVTVSS

SEQ ID NO: 16787 - protein, 113 aa, Artificial Sequence
  source: /note="Description of Artificial Sequence: Synthetic polypeptide"
QVQLVESGGGVVQPGRSLRLSCAASGFTFSSYGMHVISYDGSNKYYADSVKGWVRQAPGKGLEWVARFTISRDNSKNTLYLQMNSLRAEDTAVYYCAKYPLNWGQGTLVTVSS

SEQ ID NO: 16788 - protein, 110 aa, Artificial Sequence
  source: /note="Description of Artificial Sequence: Synthetic polypeptide"
QSALTQPASVSGSPGQSITISCTGTSSDVGGYNYVSWYQQHPGKAPKLMIYEVSNRPSGVSNRFSGSKSGNTASLTISGLQAEDEADYYCNSYTSSSTWVFGGGTKLTVL

SEQ ID NO: 16789 - protein, 246 aa, Artificial Sequence
  source: /note="Description of Artificial Sequence: Synthetic polypeptide"
QVQLVESGGGLVQPGGSLRLSCAASGFTFRSYAMSWVRQAPGKGLEWVSAISGRGDNTYYADSVKGRFTISRDNSKNTLYLQMNSLRAEDTAVYYCAKMTSNAFAFDYWGQGTLVTVSSGGGGSGGGGSGGGGSQSVLTQPPSVSGAPGQRVTISCTGSSSNIGAGYGVHWYQQLPGTAPKLLIYGNTNRPSGVPDRFSGFKSGTSASLAITGLQAEDEADYYCQSYDSSLSGWVFGGGTKLTVLG

SEQ ID NO: 16790 - protein, 242 aa, Artificial Sequence
  source: /note="Description of Artificial Sequence: Synthetic polypeptide"
QVQLVESGGGLVQPGGSLRLSCAASGFTFSSYAMGWVRQAPGKGLEWVSSISGSSRYIYYADSVKGRFTISRDNSKNTLYLQMNSLRAEDTAVYYCAKMDASGSYFNFWGQGTLVTVSSGGGGSGGGGSGGGGSETTLTQSPSFLSAFVGDRITITCRASPGIRNYLAWYQQKPGKAPKLLIYAASTLQSGVPSRFSGSGSGTDFTLTISSLQPEDFATYYCQQYNSYPLSFGGGTKVEIKR

SEQ ID NO: 16791 - protein, 389 aa, Artificial Sequence
  source: /note="Description of Artificial Sequence: Synthetic polypeptide"
MIQRTPKIQVYSRHPAENGKSNFLNCYVSGFHPSDIEVDLLKNGERIEKVEHSDLSFSKDWSFYLLYYTEFTPTEKDEYACRVNHVTLSQPKIVKWDRDMGGGGSGGGGSGGGGSGSHSMRYFFTSVSRPGRGEPRFIAVGYVDDTQFVRFDSDAASQRMEPRAPWIEQEGPEYWDGETRKVKAHSQTHRVDLGTLRGYYNQSEAGSHTVQRMYGCDVGSDWRFLRGYHQYAYDGKDYIALKEDLRSWTAADMAAQTTKHKWEAAHVAEQLRAYLEGTCVEWLRRYLENGKETLQRTDAPKTHMTHHAVSDHEATLRWALSFYPAEITLTWQRDGEDQTQDTELVETRPAGDGTFQKWAAVVVPSGQEQRYTCHVQHEGLPKPLTLRWE

SEQ ID NO: 16792 - protein, 108 aa, Homo sapiens
DIQMTQSPSSLSASVGDRVTITCRASQWIGILLDWYQQKPGKAPRLLIYYASFLREGVPSRFSGSGSGTDFTLTISSLQPEDFATYYCQQANPAPLTFGQGTKVEIKR

SEQ ID NO: 16793 - protein, 108 aa, Homo sapiens
DIQMTQSPSSLSASVGDRVTITCRASQWIGILLDWYQQKPGKAPKLLIYYASFLAEGVPSRFSGSGSGTDFTLTISSLQPEDFATYYCQQANPAPLTFGQGTKVEIKR

SEQ ID NO: 16794 - protein, 108 aa, Homo sapiens
DIQMTQSPSSLSASVGDRVTITCRASQWIGILLDWYQQKPGKAPKLLIYYASFLNKGVPSRFSGSGSGTDFTLTISSLQPEDFATYYCQQANPAPLTFGQGTKVEIKR

SEQ ID NO: 16795 - protein, 108 aa, Homo sapiens
DIQMTQSPSSLSASVGDRVTITCRASQWIGILLDWYQQKPGKAPKLLIYYASFLRPGVPSRFSGSGSGTDFTLTISSLQPEDFATYYCQQANPAPLTFGQGTKVEIKR

SEQ ID NO: 16796 - protein, 108 aa, Homo sapiens
DIQMTQSPSSLSASVGDRVTITCRASQWIGILLDWYQQKPGKAPKLLIYYASFLPEGVPSRFSGSGSGTDFTLTISSLQPEDFATYYCQQANPAPLTFGQGTKVEIKR

SEQ ID NO: 16797 - protein, 108 aa, Homo sapiens
DIQMTQSPSSLSASVGDRVTITCRASQWIGILLDWYQQKPGKAPKLLIYYASFLQSGVPSRFSGSGSGTDFTLTISSLQPEDFATYYCQQANPVPTTFGQGTKVEIKR

SEQ ID NO: 16798 - protein, 108 aa, Homo sapiens
DIQMTQSPSSLSASVGDRVTITCRASQWIGILLDWYQQKPGKAPKLLIYYASFLQSGVPSRFSGSGSGTDFTLTISSLQPEDFATYYCQQANPHPTTFGQGTKVEIKR

SEQ ID NO: 16799 - protein, 108 aa, Homo sapiens
DIQMTQSPSSLSASVGDRVTITCRASQWIGILLDWYQQKPGKAPKLLIYYASFLQSGVPSRFSGSGSGTDFTLTISSLQPEDFATYYCQQANPVPPTFGQGTKVEIKR

SEQ ID NO: 16800 - protein, 108 aa, Homo sapiens
DIQMTQSPSSLSASVGDRVTITCRASQWIGILLDWYQQKPGKAPKLLIYYASFLQSGVPSRFSGSGSGTDFTLTISSLQPEDFATYYCQQANPHPPTFGQGTKVEIKR

SEQ ID NO: 16801 - protein, 108 aa, Homo sapiens
DIQMTQSPSSLSASVGDRVTITCRASQWIGILLDWYQQKPGKAPKLLIYYASFLQSGVPSRFSGSGSGTDFTLTISSLQPEDFATYYCQQANPTPPTFGQGTKVEIKR

SEQ ID NO: 16802 - protein, 108 aa, Homo sapiens
DIQMTQSPSSLSASVGDRVTITCRASQWIGILLDWYQQKPGKAPKLLIYYASFLQSGVPSRFSGSGSGTDFTLTISSLQPEDFATYYCQQANPLPPTFGQGTKVEIKR

SEQ ID NO: 16803 - protein, 108 aa, Homo sapiens
DIQMTQSPSSLSASVGDRVTITCRASQWIGILLDWYQQKPGKAPKLLIYYASFLQSGVPSRFSGSGSGTDFTLTISSLQPEDFATYYCQQANPIPPTFGQGTKVEIKR

SEQ ID NO: 16804 - protein, 108 aa, Homo sapiens
DIQMTQSPSSLSASVGDRVTITCRASQWIGILLDWYQQKPGKAPKLLIYYASFLQSGVPSRFSGSGSGTDFTLTISSLQPEDFATYYCQPANPTPPTFGQGTKVEIKR

SEQ ID NO: 16805 - protein, 108 aa, Homo sapiens
DIQMTQSPSSLSASVGDRVTITCRASQWIGILLDWYQQKPGEAPKLLIYYASFLQSGVPSRFSGSGSGTDFTLTISSLQPEDFATYYCQQANPVPVTFGQGTKVEIKR

SEQ ID NO: 16806 - protein, 108 aa, Homo sapiens
DIQMTQSPSSLSASVGDRVTITCRASQWIGILLDWYQQKPGKAPKLLIYYASFLNNGVPSRFSGSGSGTDFTLTISNLQPEDFATYYCQQANPAPLTFGQGTKVEIKR

SEQ ID NO: 16807 - protein, 108 aa, Homo sapiens
DIQMTQSPSSLSASVGDRVTITCRASQWIGILLDWYQQKPGKAPKLLIYYASFLAPGVPSRFSGSGSGTDFTLTISSLQPEDFATYYCQQANPAPLTFGQGTKVEIKR

SEQ ID NO: 16808 - protein, 108 aa, Homo sapiens
DIQMTQSPSSLSASVGDRVTITCRASQWIGILLDWYQQKPGKAPKLLIYYASFLNSGVPSRFSGSGSGTDFTLTISSLQPEDFATYYCQQANPAPLTFGQGTKVEIKR

SEQ ID NO: 16809 - protein, 108 aa, Homo sapiens
DIQMTQSPSSLSASVGDRVTITCRASQWIGILLDWYQQKPGKAPELLIYYASFLKQGVPSRFSGSGSGTDFTLTISSLQPEDFATYYCQQANPAPLTFGQGTKVEIKR

SEQ ID NO: 16810 - protein, 108 aa, Homo sapiens
DIQMTQSPSSLSASVGDRVTITCRASQWIGILLDWYQQKPGKAPKLLIYYASFLNNGVPSRFSGSGSGTDFTLTISSLQPEDFATYYCQQANPAPLTFGQGTKVEIKR

SEQ ID NO: 16811 - protein, 108 aa, Homo sapiens
DIQMTQSPSSLSASVGDRVTITCRASQWIGILLDWYQQKPGKAPKLLIYYASFLSPGVPSRFSGSGSGTDFTLTISSLQPEDFATYYCQQANPAPLTFGQGTKVEIKR

SEQ ID NO: 16812 - protein, 108 aa, Homo sapiens
DIQMTQSPSSLSASVGDRVTITCRASQWIGILLDWYQQKPGEAPKLLIYYASFLQSGVPSRFSGSGSGTDFTLTISSLQPEDFATYYCQQANPTPPTFGQGTKVEIKR

SEQ ID NO: 16813 - protein, 108 aa, Homo sapiens
DIQMTQSPSSLSASVGDRVTITCRASQWIGILLDWYQQKPGEAPKLLIYYASFLQSGVPSRFSGSGSGTDFTLTISSLQPEDFATYYCQPANPTPPTFGQGTKVEIKR

SEQ ID NO: 16814 - protein, 108 aa, Homo sapiens
DIQMTQSPSSLSASVGDRVTITCRASQWIGILLDWYQQKPGEAPKLLIYYASFLQSGVPSRFSGSGSGTDFTLTISGLQPEDFATYYCQQANPYPTTFGQGTKVEIKR

SEQ ID NO: 16815 - protein, 108 aa, Homo sapiens
DIQMTQSPSSLSASVGDRVTITCRASQWIGILLDWYQQKPGEAPKLLIYYASFLQSGVPSRFSGSGSGTDFTLTISSLQPEDFATYYCQQANPYPTTFGQGTKVEIKR

SEQ ID NO: 16816 - protein, 108 aa, Homo sapiens
DIQMTQSPSSLSASVGDRVTITCRASQWIGILLDWYQQKPGKAPKLLIYYASFLQSGVPSRFSGSGSGTDFTLTISSLQPEDFATYYCQPANPHPPTFGQGTKVEIKR

SEQ ID NO: 16817 - protein, 108 aa, Homo sapiens
DIQMTQSPSSLSASVGDRVTITCRASQWIGILVDWYQQKPGKAPKLLIYYASFLPEGVPSRFSGSGSGTDFTLTISSLQPEDFATYYCQQANPAPLTFGQGTKVEIKR

SEQ ID NO: 16818 - protein, 108 aa, Homo sapiens
DIQMTQSPSSLSASVGDRVTITCRASQWIGILVDWYQQKPGKAPKLLIYYASFLQSGVPSRFSGSGSGTDFTLTISSLQPEDFATYYCQQANPVPPTFGQGTKVEIKR

SEQ ID NO: 16819 - protein, 108 aa, Homo sapiens
DIQMTQSPSSLSASVGDRVTITCRASQWIGILIDWYQQKPGKAPKLLIYYASFLPEGVPSRFSGSGSGTDFTLTISSLQPEDFATYYCQQANPAPLTFGQGTKVEIKR

SEQ ID NO: 16820 - protein, 108 aa, Homo sapiens
DIQMTQSPSSLSASVGDRVTITCRASQWIGILIDWYQQKPGKAPKLLIYYASFLQSGVPSRFSGSGSGTDFTLTISSLQPEDFATYYCQQANPVPPTFGQGTKVEIKR

SEQ ID NO: 16821 - protein, 108 aa, Homo sapiens
DIQMTQSPSSLSASVGDRVTITCRASQWIGILLDWYQQKPGKAPKLLIYYASFLPEGVPSRFSGSGSGTDFTLTISSLQPEDFATYYCQQANPVPPTFGQGTKVEIKR

SEQ ID NO: 16822 - protein, 108 aa, Homo sapiens
DIQMTQSPSSLSASVGDRVTITCRASQWIGINLDWYQQKPGKAPKLLIYYASFLPEGVPSRFSGSGSGTDFTLTISSLQPEDFATYYCQQANPAPLTFGQGTKVEIKR

SEQ ID NO: 16823 - protein, 108 aa, Homo sapiens
DIQMTQSPSSLSASVGDRVTITCRASQWIGINLDWYQQKPGKAPKLLIYYASFLQSGVPSRFSGSGSGTDFTLTISSLQPEDFATYYCQQANPVPPTFGQGTKVEIKR

SEQ ID NO: 16824 - protein, 108 aa, Homo sapiens
DIQMTQSPSSLSASVGDRVTITCRASQWIGILVDWYQQKPGKAPKLLIYYASFLPEGVPSRFSGSGSGTDFTLTISSLQPEDFATYYCQQANPVPPTFGQGTKVEIKR

SEQ ID NO: 16825 - protein, 108 aa, Homo sapiens
DIQMTQSPSSLSASVGDRVTITCRASQWIGILIDWYQQKPGKAPKLLIYYASFLPEGVPSRFSGSGSGTDFTLTISSLQPEDFATYYCQQANPVPPTFGQGTKVEIKR

SEQ ID NO: 16826 - protein, 108 aa, Homo sapiens
DIQMTQSPSSLSASVGDRVTITCRASQWIGINLDWYQQKPGKAPKLLIYYASFLPEGVPSRFSGSGSGTDFTLTISSLQPEDFATYYCQQANPVPPTFGQGTKVEIKR

SEQ ID NO: 16827 - protein, 108 aa, Homo sapiens
DIQMTQSPSSLSASVGDRVTITCRASQWIGINLDWYQQKPGKAPKLLIYYASFLQSGVPSRFSGSGSGTDFTLTISSLQPEDFATYYCLQANPVPPTFGQGTKVEIKR

SEQ ID NO: 16828 - protein, 108 aa, Homo sapiens
DIQMTQSPSSLSASVGDRVTITCRASQWIGINLDWYQQKPGKAPKLLIYYASFLQSGVPSRFSGSGSGTDFTLTISSLQPEDFATYYCGQANPVPPTFGQGTKVEIKR

SEQ ID NO: 16829 - protein, 108 aa, Homo sapiens
DIQMTQSPSSLSASVGDRVTITCRASQWIGINLDWYQQKPGKAPKLLIYYASFLQSGVPSRFSGSGSGTDFTLTISSLQPEDFATYYCQQANPVPPGFGQGTKVEIKR

SEQ ID NO: 16830 - protein, 108 aa, Homo sapiens
DIQMTQSPSSLSASVGDRVTITCRASQWIGINLDWYQQKPGKAPKLLIYYASFLQSGVPSRFSGSGSGTDFTLTISSLQPEDFATYYCQQANPVPVTFGQGTKVEIKR

SEQ ID NO: 16831 - protein, 108 aa, Homo sapiens
DIQMTQSPSSLSASVGDRVTITCRASQWIGINLDWYQQKPGKAPKLLIYYASFLQSGVPSRFSGSGSGTDFTLTISSLQPEDFATYYCQQANPVPTTFGQGTKVEIKR

SEQ ID NO: 16832 - protein, 108 aa, Homo sapiens
DIQMTQSPSSLSASVGDRVTITCRASQWIGINLDWYQQKPGKAPKLLIYYASFLQSGVPSRFSGSGSGTDFTLTISSLQPEDFATYYCQQANPYPTTFGQGTKVEIKR

SEQ ID NO: 16833 - protein, 108 aa, Homo sapiens
DIQMTQSPSSLSASVGDRVTITCRASQWIGNLLDWYQQKPGKAPKLLIYYASFLQSGVPSRFSGSGSGTDFTLTISSLQPEDFATYYCQQANPAPLTFGQGTKVEIKR

SEQ ID NO: 16834 - protein, 108 aa, Homo sapiens
DIQMTQSPSSLSASVGDRVTITCRASQWIGNLLDWYQQKPGKAPKLLIYYASFLQSGVPSRFSGSGFGTDFTLTISSLQPEDFATYYCQQANPAPLTFGQGTKVEIKR

SEQ ID NO: 16835 - protein, 108 aa, Homo sapiens
DIQMTQSPSSLSASVGDRVTITCRASQWIGNLLDWYQQKPGKAPKLLIYYASFLQSGVPSRFSGSGYGTDFTLTISSLQPEDFATYYCQQANPAPLTFGQGTKVEIKR

SEQ ID NO: 16836 - protein, 108 aa, Homo sapiens
DIQMTQSPSSLSASVGDRVTITCRASQWIGNLLDWYQQKPGKAPKLLIYYASFLQSGVPSRFSGSGWGTDFTLTISSLQPEDFATYYCQQANPAPLTFGQGTKVEIKR

SEQ ID NO: 16837 - protein, 108 aa, Homo sapiens
DIQMTQSPSSLSASVGDRVTITCRASQWIGNLLDWYQQKPGKAPKLLIYYASFLQSGVPSRFSGSGRGTDFTLTISSLQPEDFATYYCQQANPAPLTFGQGTKVEIKR

SEQ ID NO: 16838 - protein, 108 aa, Homo sapiens
DIQMTQSPSSLSASVGDRVTITCRASQWIGNLLDWYQQKPGKAPKLLIYYASFLQSGVPSRFSGSGEGTDFTLTISSLQPEDFATYYCQQANPAPLTFGQGTKVEIKR

SEQ ID NO: 16839 - protein, 108 aa, Homo sapiens
DIQMTQSPSSLSASVGDRVTITCRASQWIGINLDWYQQKPGKAPKLLIYYASFLQSGVPSRFSGSGFGTDFTLTISSLQPEDFATYYCQQANPAPLTFGQGTKVEIKR

SEQ ID NO: 16840 - protein, 108 aa, Homo sapiens
DIQMTQSPSSLSASVGDRVTITCRASQWIGINLDWYQQKPGKAPKLLIYYASFLQSGVPSRFSGSGYGTDFTLTISSLQPEDFATYYCQQANPAPLTFGQGTKVEIKR

SEQ ID NO: 16841 - protein, 108 aa, Homo sapiens
DIQMTQSPSSLSASVGDRVTITCRASQWIGINLDWYQQKPGKAPKLLIYYASFLQSGVPSRFSGSGWGTDFTLTISSLQPEDFATYYCQQANPAPLTFGQGTKVEIKR

SEQ ID NO: 16842 - protein, 108 aa, Homo sapiens
DIQMTQSPSSLSASVGDRVTITCRASQWIGINLDWYQQKPGKAPKLLIYYASFLQSGVPSRFSGSGRGTDFTLTISSLQPEDFATYYCQQANPAPLTFGQGTKVEIKR

SEQ ID NO: 16843 - protein, 108 aa, Homo sapiens
DIQMTQSPSSLSASVGDRVTITCRASQWIGINLDWYQQKPGKAPKLLIYYASFLQSGVPSRFSGSGEGTDFTLTISSLQPEDFATYYCQQANPAPLTFGQGTKVEIKR

SEQ ID NO: 16844 - protein, 108 aa, Homo sapiens
DIQMTQSPSSLSASVGDRVTITCRASQYIGNLLDWYQQKPGKAPKLLIYYASFLQSGVPSRFSGSGYGTDFTLTISSLQPEDFATYYCQQANPAPLTFGQGTKVEIKR

SEQ ID NO: 16845 - protein, 108 aa, Homo sapiens
DIQMTQSPSSLSASVGDRVTITCRASQHIGNLLDWYQQKPGKAPKLLIYYASFLQSGVPSRFSGSGYGTDFTLTISSLQPEDFATYYCQQANPAPLTFGQGTKVEIKR

SEQ ID NO: 16846 - protein, 108 aa, Homo sapiens
DIQMTQSPSSLSASVGDRVTITCRASQQIGNLLDWYQQKPGKAPKLLIYYASFLQSGVPSRFSGSGYGTDFTLTISSLQPEDFATYYCQQANPAPLTFGQGTKVEIKR

SEQ ID NO: 16847 - protein, 108 aa, Homo sapiens
DIQMTQSPSSLSASVGDRVTITCRASQNIGNLLDWYQQKPGKAPKLLIYYASFLQSGVPSRFSGSGYGTDFTLTISSLQPEDFATYYCQQANPAPLTFGQGTKVEIKR

SEQ ID NO: 16848 - protein, 108 aa, Homo sapiens
DIQMTQSPSSLSASVGDRVTITCRASQYIGINLDWYQQKPGKAPKLLIYYASFLQSGVPSRFSGSGYGTDFTLTISSLQPEDFATYYCQQANPAPLTFGQGTKVEIKR

SEQ ID NO: 16849 - protein, 108 aa, Homo sapiens
DIQMTQSPSSLSASVGDRVTITCRASQHIGINLDWYQQKPGKAPKLLIYYASFLQSGVPSRFSGSGYGTDFTLTISSLQPEDFATYYCQQANPAPLTFGQGTKVEIKR

SEQ ID NO: 16850 - protein, 108 aa, Homo sapiens
DIQMTQSPSSLSASVGDRVTITCRASQQIGINLDWYQQKPGKAPKLLIYYASFLQSGVPSRFSGSGYGTDFTLTISSLQPEDFATYYCQQANPAPLTFGQGTKVEIKR

SEQ ID NO: 16851 - protein, 108 aa, Homo sapiens
DIQMTQSPSSLSASVGDRVTITCRASQNIGINLDWYQQKPGKAPKLLIYYASFLQSGVPSRFSGSGYGTDFTLTISSLQPEDFATYYCQQANPAPLTFGQGTKVEIKR

SEQ ID NO: 16852 - protein, 108 aa, Homo sapiens
DIQMTQSPSSLSASVGDRVTITCRASQWIGNNLDWYQQKPGKAPKLLIYYASFLQSGVPSRFSGSGYGTDFTLTISSLQPEDFATYYCQQANPAPLTFGQGTKVEIKR

SEQ ID NO: 16853 - protein, 108 aa, Homo sapiens
DIQMTQSPSSLSASVGDRVTITCRASQWIGTLLDWYQQKPGKAPKLLIYYASFLQSGVPSRFSGSGYGTDFTLTISSLQPEDFATYYCQQANPAPLTFGQGTKVEIKR

SEQ ID NO: 16854 - protein, 108 aa, Homo sapiens
DIQMTQSPSSLSASVGDRVTITCRASQWIGIQLDWYQQKPGKAPKLLIYYASFLQSGVPSRFSGSGYGTDFTLTISSLQPEDFATYYCQQANPAPLTFGQGTKVEIKR

SEQ ID NO: 16855 - protein, 108 aa, Homo sapiens
DIQMTQSPSSLSASVGDRVTITCRASQWIGITLDWYQQKPGKAPKLLIYYASFLQSGVPSRFSGSGYGTDFTLTISSLQPEDFATYYCQQANPAPLTFGQGTKVEIKR

SEQ ID NO: 16856 - protein, 108 aa, Homo sapiens
DIQMTQSPSSLSASVGDRVTITCRASQWIGNLLDWYQQKPGKAPKLLIYYASFLQSGVPSRFSGSGYGTDFTLTISSLQPEDFATYYCQQANPVPPTFGQGTKVEIKR

SEQ ID NO: 16857 - protein, 108 aa, Homo sapiens
DIQMTQSPSSLSASVGDRVTITCRASQYIGNLLDWYQQKPGKAPKLLIYYASFLQSGVPSRFSGSGYGTDFTLTISSLQPEDFATYYCQQANPVPPTFGQGTKVEIKR

SEQ ID NO: 16858 - protein, 108 aa, Homo sapiens
DIQMTQSPSSLSASVGDRVTITCRASQHIGNLLDWYQQKPGKAPKLLIYYASFLQSGVPSRFSGSGYGTDFTLTISSLQPEDFATYYCQQANPVPPTFGQGTKVEIKR

SEQ ID NO: 16859 - protein, 108 aa, Homo sapiens
DIQMTQSPSSLSASVGDRVTITCRASQWIGINLDWYQQKPGKAPKLLIYYASFLQSGVPSRFSGSGYGTDFTLTISSLQPEDFATYYCQQANPVPPTFGQGTKVEIKR

SEQ ID NO: 16860 - protein, 108 aa, Homo sapiens
DIQMTQSPSSLSASVGDRVTITCRASQYIGINLDWYQQKPGKAPKLLIYYASFLQSGVPSRFSGSGYGTDFTLTISSLQPEDFATYYCQQANPVPPTFGQGTKVEIKR

SEQ ID NO: 16861 - protein, 108 aa, Homo sapiens
DIQMTQSPSSLSASVGDRVTITCRASQWIGNNLDWYQQKPGKAPKLLIYYASFLQSGVPSRFSGSGYGTDFTLTISSLQPEDFATYYCQQANPVPPTFGQGTKVEIKR

SEQ ID NO: 16862 - protein, 108 aa, Homo sapiens
DIQMTQSPSSLSASVGDRVTITCRASQWIGNLLDWYQQKPGKAPKLLIYYASFLQSGVPSRFSGSGYGTDFTLTISSLQPEDFATYYCQQANPTPPTFGQGTKVEIKR

SEQ ID NO: 16863 - protein, 108 aa, Homo sapiens
DIQMTQSPSSLSASVGDRVTITCRASQYIGNLLDWYQQKPGKAPKLLIYYASFLQSGVPSRFSGSGYGTDFTLTISSLQPEDFATYYCQQANPTPPTFGQGTKVEIKR

SEQ ID NO: 16864 - protein, 108 aa, Homo sapiens
DIQMTQSPSSLSASVGDRVTITCRASQHIGNLLDWYQQKPGKAPKLLIYYASFLQSGVPSRFSGSGYGTDFTLTISSLQPEDFATYYCQQANPTPPTFGQGTKVEIKR

SEQ ID NO: 16865 - protein, 108 aa, Homo sapiens
DIQMTQSPSSLSASVGDRVTITCRASQWIGINLDWYQQKPGKAPKLLIYYASFLQSGVPSRFSGSGYGTDFTLTISSLQPEDFATYYCQQANPTPPTFGQGTKVEIKR

SEQ ID NO: 16866 - protein, 108 aa, Homo sapiens
DIQMTQSPSSLSASVGDRVTITCRASQYIGINLDWYQQKPGKAPKLLIYYASFLQSGVPSRFSGSGYGTDFTLTISSLQPEDFATYYCQQANPTPPTFGQGTKVEIKR

SEQ ID NO: 16867 - protein, 108 aa, Homo sapiens
DIQMTQSPSSLSASVGDRVTITCRASQHIGINLDWYQQKPGKAPKLLIYYASFLQSGVPSRFSGSGYGTDFTLTISSLQPEDFATYYCQQANPTPPTFGQGTKVEIKR

SEQ ID NO: 16868 - protein, 108 aa, Homo sapiens
DIQMTQSPSSLSASVGDRVTITCRASQWIGNNLDWYQQKPGKAPKLLIYYASFLQSGVPSRFSGSGYGTDFTLTISSLQPEDFATYYCQQANPTPPTFGQGTKVEIKR

SEQ ID NO: 16869 - protein, 108 aa, Homo sapiens
DIQMTQSPSSLSASVGDRVTITCRASQWIGNLLDWYQQKPGKAPKLLIYYASFLQSGVPSRFSGSGFGTDFTLTISSLQPEDFATYYCQQANPVPPTFGQGTKVEIKR

SEQ ID NO: 16870 - protein, 108 aa, Homo sapiens
DIQMTQSPSSLSASVGDRVTITCRASQWIGNLLDWYQQKPGKAPKLLIYYASFLPEGVPSRFSGSGFGTDFTLTISSLQPEDFATYYCQQANPVPPTFGQGTKVEIKR

SEQ ID NO: 16871 - protein, 108 aa, Homo sapiens
DIQMTQSPSSLSASVGDRVTITCRASQWIGILVDWYQQKPGKAPKLLIYYASFLQSGVPSRFSGSGFGTDFTLTISSLHPEDFATYYCQQANPAPLTFGQGTKVEIKR

SEQ ID NO: 16872 - protein, 108 aa, Homo sapiens
DIQMTQSPTSLSASVGDRVTITCRASQWIGNLLDWYQQKPGKAPKLLIYYASFLQSGVPSRFSGGGFGTDFTLTISSLQPEDFATYYCQQANPAPLTFGQGTKVEIKR

SEQ ID NO: 16873 - protein, 115 aa, Unknown; identical to SEQ ID NO: 12882
  source: /note="Description of Unknown: Camelid sequence"

SEQ ID NO: 16874 - protein, 115 aa, Unknown; identical to SEQ ID NO: 12883
  source: /note="Description of Unknown: Camelid sequence"

SEQ ID NO: 16875 - protein, 114 aa, Unknown; identical to SEQ ID NO: 12884
  source: /note="Description of Unknown: Camelid sequence"

SEQ ID NO: 16876 - protein, 114 aa, Unknown; identical to SEQ ID NO: 12885
  source: /note="Description of Unknown: Camelid sequence"

SEQ ID NO: 16877 - protein, 128 aa, Unknown; identical to SEQ ID NO: 12900
  source: /note="Description of Unknown: Camelid sequence"

SEQ ID NO: 16878 - protein, 124 aa, Unknown; identical to SEQ ID NO: 12901
  source: /note="Description of Unknown: Camelid sequence"

SEQ ID NO: 16879 - protein, 120 aa, Unknown; identical to SEQ ID NO: 12902
  source: /note="Description of Unknown: Camelid sequence"

SEQ ID NO: 16880 - protein, 123 aa, Unknown; identical to SEQ ID NO: 12903
  source: /note="Description of Unknown: Camelid sequence"

SEQ ID NO: 16881 - protein, 125 aa, Homo sapiens; identical to SEQ ID NO: 12904

SEQ ID NO: 16882 - protein, 125 aa, Homo sapiens; identical to SEQ ID NO: 12905

SEQ ID NO: 16883 - protein, 124 aa, Unknown; identical to SEQ ID NO: 12906
  source: /note="Description of Unknown: Camelid sequence"

SEQ ID NO: 16884 - protein, 131 aa, Homo sapiens; identical to SEQ ID NO: 12907

SEQ ID NO: 16885 - protein, 126 aa, Homo sapiens; identical to SEQ ID NO: 12908

SEQ ID NO: 16886 - protein, 128 aa, Homo sapiens; identical to SEQ ID NO: 12909

SEQ ID NO: 16887 - protein, 120 aa, Unknown; identical to SEQ ID NO: 12910
  source: /note="Description of Unknown: Camelid sequence"

SEQ ID NO: 16888 - protein, 123 aa, Unknown; identical to SEQ ID NO: 12911
  source: /note="Description of Unknown: Camelid sequence"

SEQ ID NO: 16889 - protein, 125 aa, Unknown; identical to SEQ ID NO: 12912
  source: /note="Description of Unknown: Camelid sequence"

SEQ ID NO: 16890 - protein, 116 aa, Homo sapiens
EVQLLESGGGLVQPGGSLRLSCAASGFTFKAYPMMWVRQAPGKGLEWVSEISPSGSYTYYADSVKGRFTISRDNSKNTLYLQMNSLRAEDTAVYYCAKDPRKFDYWGQGTLVTVSS

SEQ ID NO: 16891 - protein, 108 aa, Homo sapiens
DIQMTQSPSSLSASVGDRVTITCRASQYIGAELSWYQQKPGKAPKLLIYWISELQSGVPSRFSGSGSGTDFTLTISSLQPEDFATYYCQQSSNTPYTFGQGTKVEIKR

SEQ ID NO: 16892 - protein, 108 aa, Homo sapiens
DIQMTQSPSSLSASVGDRVTITCRASQYIGINLIWYQQKPGKAPKLLIYWASVLQSGVPSRFSGSGSGTDFTLTISSLQPEDFATYYCQQSVYDPPTYGQGTKVEIKR

SEQ ID NO: 16893 - protein, 108 aa, Homo sapiens
DIQMTQSPSSLSASVGDRVTITCRASQDIFWLLSWYQQKPGKAPTLLIYSTSILQSGVPSRFSGSGSGTDFTLTISSLQPEDFATYYCQQYYLDPPTFSQGTKVEIKR

SEQ ID NO: 16894 - protein, 108 aa, Homo sapiens
DIQMTQSPSSLSASVGDRVTITCRASQFIGVNLNWYQQKPGKAPRLLIYLSSILQSGVPSRFSGSGSGTDFTLTISSLQPEDFATYYCQQTYDIPTTFGQGTKVEIKR

SEQ ID NO: 16895 - protein, 108 aa, Homo sapiens
DIQMTQSPSSLSASVGDRVTITCRASQNIGINLQWYQQKPRKAPKLLIYYASILQSGVPSRFSGSGSGTDFTLTISSLQPEDFATYYCQQDYDTPFTFGQGTKVEIKR

SEQ ID NO: 16896 - protein, 108 aa, Homo sapiens
DIQMTQFPSSLSASVGDRVTITCRASQHIERWLNWYQQKPGKAPKLLIYRSSYLQSGVPSRFSGSGSGTDFTLTISSLQPEDFATYYCQQDAILPHTFGQGTKVEIKR

SEQ ID NO: 16897 - protein, 108 aa, Homo sapiens
DIQMTQSPSSLSASVGDRVTITCRASQGIGVNLQWYQQKPGKAPKLLIYFSSVLQSGVPSRFSGSGSGTDFTLTISSLQPEDFATYYCQQDFDFPQTFGQGTKVEIKR

SEQ ID NO: 16898 - protein, 108 aa, Homo sapiens
DIQMTQSPSSLSASVGDRVTITCRASQNIGINLQWYQQKPRKAPKLLIYYASILQSGVPSRFSGSGSGTDFTLTISSLQPEDFATYYCQQEYDYPNTFGQGTKVEIKR

SEQ ID NO: 16899 - protein, 108 aa, Homo sapiens
DIQMTQSPSSLSASVGDRVTITCRASSSIGSGLEWYQQKPGKAPKLLIVGWSGLQSGVPSRFSGSGSGTDFTLTISSLQPEDFATYYCRQCVGLPCTFGQGTKVEIKR

SEQ ID NO: 16900 - protein, 108 aa, Homo sapiens
DIQMTQSPSSLSASVGDRVTITCRASQWIGVELSWYQQKPGKAPKLLIYWGSELQSGVPSRFSGSGSGTDFTLTISSLQPEDFATYYCQQLALPPFTFGQGTKVEIKR

SEQ ID NO: 16901 - protein, 108 aa, Homo sapiens
DIQMTQSPSSLSASVGDRVTITCRASHDIGVSLDWYQQKPGKAPKLLIVWASVLQSGVPSRFSGSGSGTDFTLTISSLQPEDFATYYCLQVGAGPMTFGQGTKVEIKR

SEQ ID NO: 16902 - protein, 108 aa, Homo sapiens
DIQMTQSPSSLSASVGDGVTITCRASQYIGIDLAWYQRKPGKAPRLLIYKASALQSGVPSRFSGSGSGTDFTLTISSLQPEDFATYYCQQYADYPATFGQGTKVEIKR

SEQ ID NO: 16903 - protein, 108 aa, Homo sapiens
DIQMTQSPSSLSASVGDRVTITCRASQEIEHYLSWYQQKPGKAPKLLIYLSSRLQSGVPSRFSGSGSGTDFTLTISSLQPEDFATYYCQQNVQLPITFGQGTKVEIKR

SEQ ID NO: 16904 - protein, 108 aa, Homo sapiens
DIQMTQSPSSLSASVGDRVTITCRASQEIGVSLSWYQQKPGKAPKLLIYWGSELQSGVPSRFSGSGSGTDFTLTISSLQPEDFATYYCQQDHNWPMTFGQGTKVEIKR

SEQ ID NO: 16905 - protein, 108 aa, Homo sapiens
DIQMTQSPSSLSASVGDRVTITCRASALIMGDLDWYQQKPGKAPKLLIAGVSFLQSGVPSRFSGSGSGTDFTLTISSLQPEDFATYYCAQSRSWPYTFGQGTKVEIKR

SEQ ID NO: 16906 - protein, 108 aa, Homo sapiens
DIQMTQSPSSLSASVGDRVTITCRASKMIDENLAWYQQKPGKAPKLLILRSSGLQSGVPSRFSGSGSGTDFTLTISSLQPEDFATYYCHQGHSAPGTFGQGTKVEIKR

SEQ ID NO: 16907 - protein, 108 aa, Homo sapiens
DIQMTQSPSSLSASVGDRVTITCRASRYIGVSLDWYQQKPGKAPKLLIMWGSALQSGVPSRFSGSGSGTDFTLTISSLQPEDFATYYCLQSAAPPATFGQGTKVEIKR

SEQ ID NO: 16908 - protein, 108 aa, Homo sapiens
DIQMTQSPSSLSASVGDRVTITCRASQEIGVSLSWYQQKPGKAPKLLIYWASALQSGVPSRFSGSGSGTDFTLTISSLQPEDFATYYCQQSYLPPDTFGQGTKVEIKR

SEQ ID NO: 16909 - protein, 108 aa, Homo sapiens
DIQMTQSPSSLSASVGDRVTITCRASQEIASDLLWYQQKPGKAPKLLIYNGSSLQSGVPSRFSGSGSGTDFTLTISRLQPEDFATYYCQWLWSEPLTFGQGTKVEIKR

SEQ ID NO: 16910 - protein, 108 aa, Homo sapiens
DIQMTQSPSSLSASVGDRVTITCRASQHIGDALWWYQQKPGKAPKLLIYWTSNLQSGVPSRFSGSGSGTDFTLTISSLQPEDFATYYCQQTIRRPYTFGQGTKVKIKR

SEQ ID NO: 16911 - protein, 108 aa, Homo sapiens
DIQMTQSPSSLSASVGDRVTITCRASQWIGILLDWYQQKPGEAPKLLIYYASFLQSGVPSRFSGSGSGTDFTLTISSLQPEDFATYYCQQANPAPLTFGQGTKVEIKR

SEQ ID NO: 16912 - protein, 108 aa, Homo sapiens
DIQMTQSPSSLSASVGDRVTITCRASQNIGINLQWYQQKPRKAPKLLIYYASILQSGVPSRFSGSGSGTDFTLTISSLQPEDFATYYCQQSYDLPKTFGQGTKVEIKR

SEQ ID NO: 16913 - protein, 108 aa, Homo sapiens
DIQMIQSPSSLSASVGDRVTITCRASQEIGVSLSWYQQKPGKAPKLLIYWGSELQSGVPSRFSGSGSGTDFTLTISSLQPEDFATYYCQQWYGWPDTFGQGTKVGIKR

SEQ ID NO: 16914 - protein, 108 aa, Homo sapiens
DIQMTQSPSSLSASVGDRVTITCRASQHIGIELNWYQQKPGKAPKLLIYWASVLQSGVPSRFSGSGSGTDFTLTISSLQPEDFATYYCQQSVYVPTTFGQGTKVEIKR

SEQ ID NO: 16915 - protein, 108 aa, Homo sapiens
DIQMTQSPSSLSASVGDRVTITCRASQWIGAELVWYQQKPGKAPKLLIYWSSVLQSGVPSRFSGSGSGTDFTLTISSLQPEDFATYYCQQAAHSPPTFGQGTKVEIKR

SEQ ID NO: 16916 - protein, 108 aa, Homo sapiens
DIQMTQSPSSLSASVGDRVTITCRASQDISRSLAWYQRKPGKAPRLLIYMSSTLQSGVPSRFSGSGSGTDFTLTISSLQPEDFATYYCQQYDSYPSTFGQGTKVEIKR

SEQ ID NO: 16917 - protein, 108 aa, Homo sapiens
DIQMTQSPSSLSASVGDRVTITCRASRMIGGMLLWYQQKPGKAPKLLITYGSVLQSGVPSRFSGSGSGTDFTLTISSLQPEDFATYYCAQEFWWPHTFGQGTKVEIKR

SEQ ID NO: 16918 - protein, 108 aa, Homo sapiens
DIQMTQSPSSLSASVGDRVTITCRASRPIGDRLTWYQQKPGKAPKLLISWVSVLQSGVPSRFSGSGSGTDFTLTISSLQPEDFATYYCRQLGGGPFTFGQGTKVEIKR

SEQ ID NO: 16919 - protein, 108 aa, Homo sapiens
DIQMTQSPSSLSASVGDRVTITCRASQYIGVSLSWYQQKPGKAPKLLIYFASALQSGVPSRFSGSGSGTDFTLTISSLQPEDFATYYCQQDRDWPATFGQGTKVEIKR

SEQ ID NO: 16920 - protein, 108 aa, Homo sapiens
DIQMTQSPSSLSASVGDRVTITCRASGAIGDRLKWYQQKPGKAPKLLISWASVLQSGVPSRFSGSGSGTDFTLTISSLQPEDFATYYCVQGPGVPLTFGQGTKVEIKR

SEQ ID NO: 16921 - protein, 108 aa, Homo sapiens
DIQMTQSPSSLSASVGDRVTITCRASQPIARWLAWYQQKPGKAPKLLIYGSSVLQSGVPSRFSGSGSGTDFTLTISSLQPEDFATYYCQQDLRLPPTFGQGTKVEIKR

SEQ ID NO: 16922 - protein, 108 aa, Homo sapiens
DIQMTQSPSSLSASVGDRVTITCRASQNIGVSLSWYQQKPGKAPRLLIYYGSNLLSGVPSRFSGSGSGTDFTLTISSLQPEDFATYYCQQEFSWPVTFGQGTKVEIKR

SEQ ID NO: 16923 - protein, 108 aa, Homo sapiens
DIQMTQSPSSLSASVGDRVTITCRASLPIDDGLGWYQQKPGKAPKLLICGVSGLQSGVPLRFSGSGSGTDFTLTISSLQPEDFATYYCGQGQVQPSTFGQGTKVEIKR

SEQ ID NO: 16924 - protein, 108 aa, Homo sapiens
DIQMTQSPSSLSASVGDRVTITCRASQNIGINLQWYQQKPRKAPKLLIYYASILQSGVPSRFSGSGSGTDFTLTISSLQPEDFATYYCQQSYDAPTTFGQGTKVEIKR

SEQ ID NO: 16925 - protein, 108 aa, Homo sapiens
DIQMTQSPSSLSASVGDRVTITCRASQSIGVNLMWYQQKPGKAPKLLIYFASILQSGVPSRFSGSGSGTDFTLTISSLQPEDFATYYCQQNYDIPKTFGQGTKVEIKR

SEQ ID NO: 16926 - protein, 108 aa, Homo sapiens
DIQMTQSPSSLSASVGDRVTITCRASQWIGISLSWYQQKPGKAPKLLIYYGSVLQSGVPSRFSGSGSGTDFTLTISSLQPEDFATYYCQQSHDLPVTFGQGTKVEIKR

SEQ ID NO: 16927 - protein, 108 aa, Homo sapiens
DIQMTQSPSSLSASVGDRVTITCRASQWIGVSLSWYQQKPGKAPKLLIYYASILQSGVPSRFSGSGSGTDFTLTISSLQPEDFATYYCQQEMSYPPTFGQGTKVEIKR

SEQ ID NO: 16928 - protein, 108 aa, Homo sapiens
DIQMTQSPSSLSASVGDRVTITCRASQDIGVSLEWYQQKPGKAPKLLIYWSSALQSGVPSRFSGSGSGTDFTLTISSLQPEDLATYYCQQGHTYPSTFGQGTKVEIKR

SEQ ID NO: 16929 - protein, 108 aa, Homo sapiens
DIQMTQSPSSLSASVGDRVTITCRASQYIGVYLSWYQQKPGKAPKLLIYWASLLQSGVPSRFSGSGSGTDFTLTISSLQPEDFATYYCQQTVRDPITFGQGTKVEIKR

SEQ ID NO: 16930 - protein, 108 aa, Homo sapiens
DIQMTQSPSFLSASVGDRVTITCRASQSIYTMLNWYQQKPGKAPKLLIYRASYLQSGVPSRFSGSGSGTDFTLTISSLLPEDSATYYCQQDFSYPSTFGQGTKVEIKR

SEQ ID NO: 16931 - protein, 108 aa, Homo sapiens
DIQMTQSPSSLSASVGDRVTITCRASQYIGANLSWYQQKPGKAPKLLIYYISVLQSGVPSRFSGSGSGTDFTLTISSLQPEDFATYYCQQELYTPHTFGQGTKVEIKR

SEQ ID NO: 16932 - protein, 108 aa, Homo sapiens
DIQLTQSPSSLSASVGDRVTITCRASQYIGVTLMWYQQKPGKAPKLLIYYASQLQSGVPSRFSGSGSGTDFTLTISSLQPEDFATYYCQQEVSYPYTFGQGTKVEIKR

SEQ ID NO: 16933 - protein, 108 aa, Homo sapiens
DIQMTQSPSSLSASVGDRVTITCRASQHIGVSLTWYQQKPGKAPKLLIYFASILQSGVPSRFSGSGSGTDFTLTISSLQPEDYATYYCQQDMSYPPTFGQGTKVGIKR

SEQ ID NO: 16934 - protein, 108 aa, Homo sapiens
DIQMTQSPSSLSASVGDRVTITCRASQDIGISLEWYQQKPGKAPKLLIYFASQLQSGVPSRFSGSGSGTDFTLTISSLQPEDFATYYCQQVYDFPNTFGQGTKVEIKR

SEQ ID NO: 16935 - protein, 108 aa, Homo sapiens
DIQMTQSPSSLSASVGDRVTITCRASQHIGVSLNWYQQKPGKVPKLLIYWASILQSGVPSRFSGSGSGTDFTLTISSLQPEDFATYYCQQEHTIPSTFGQGTKVEIKR

SEQ ID NO: 16936 - protein, 108 aa, Homo sapiens
DIQMTQSPSSLSASVGDRVTITCRASQHIGVSLDWYQQKPGKAPKLLIYYGSELQSGVPSRFSGSGSGTDFTLTISSLQPEDFATYYCQQYVTHPTTFGQGTKVEIKR

SEQ ID NO: 16937 - protein, 108 aa, Homo sapiens
DIQMTQSPSSLSASVGDRVTITCRASQRIGMMLDWYQQKPGKAPKLLIYGGSKLQSGVPSRFSGSGSGTDFTLTISSLQPEDFATYYCQHRGWYPLTFGQGTKVEIKR

SEQ ID NO: 16938 - protein, 108 aa, Homo sapiens
DIQMTQSPSSLSASVGDRVTITCRASQPIGDRLSWYQQKPGKAPKLLIYFSSVLQSGVPSRFSGSGSGTDFTLTISSLQPEDFATYYCQQHGLRPDTFGQGTKVEIKR

SEQ ID NO: 16939 - protein, 108 aa, Homo sapiens
DIQMTQSPSSLSASVGDRVTITCRASQWIGSSLMWYQQKPGKAPKLLIYWASELQSGVPSRFSGSGSGTDFTLTISSLQPEDFATYYCQQEYSYPSTFGQGTKVEIKR

SEQ ID NO: 16940 - protein, 108 aa, Homo sapiens
DIQMTQSPSSLSASVGDRVTITCRASQDIGVSLAWYQQKPGKAPKLLIYFGSVSLSGVPSRFSGSGSGTDFTLTISSLQPEDFATYYCQQSHLPPTTFGQGTKVEIKR

SEQ ID NO: 16941 - protein, 108 aa, Homo sapiens
DIQMTQSPSSLSASVGDRVTITCRASQWIGVELNWYQQKPGKAPKLLIYWTSILQSGVPSRFSGSGSGTDFTLTISSLQPEDFATYYCQQVINSPYTFGQGTKVEIKR

SEQ ID NO: 16942 - protein, 108 aa, Homo sapiens
DIQMTQSPSSLSASVGDRVTITCRASQDIGKWLEWYQQKPGKAPKLLIGATSWLQSGVPSRFSGSGSGTDFTLTISSLQPEDFATYYCVQQGRRPGTFGQGTKVEIKR

SEQ ID NO: 16943 - protein, 108 aa, Homo sapiens
DIQMTQSPSSLSASVGDRVTITCRASQWIGILLDWYQQKPGEAPKLLIYYASFLQSGVPSRFSGSGSGTDFTLTISSLQPEDFATYYCQRSDLSPLTFGQGTKVEIKR

SEQ ID NO: 16944 - protein, 108 aa, Homo sapiens
DIQMTQSPSSLSASVGDRVTITCRASQNIYMNLEWYQQKPGKAPKLLIVFGSWLQSGVPSRFSGSGSGTDFTLTISSLQPEDFATYYCRQTEAPPSTFGQGTKVEIKR

SEQ ID NO: 16945 - protein, 108 aa, Homo sapiens
DIRMTQSPSSLSASVGDRVTITCRASQHIGSSLSWYQQKPGKAPKLLIYYASVLQSGVPSRFSGSGSGTDFTLTISSLQPEDFATYYCQQEYSWPPTLGQGTKVEIKR

SEQ ID NO: 16946 - protein, 108 aa, Homo sapiens
DIQMTQSPSSLSASVGDRVTITCRASQDIRTLLRWYQQKPGKAPKLLIYWSSELQSGVPSRFSGSGSGTDFTLTISSLQPEDFATYYCQQTFHAPNTFGQGTKVEIKR

SEQ ID NO: 16947 - protein, 108 aa, Homo sapiens
DIRMTQSPSSLSASVGDRVTITCRASQYIGKYLSWYQQKPGKAPKLLIYLSSTLQSGVPSRFSGSGSGTDFTLTISSLQPEDFATYYCQQNDRLPLTLGQGTKVEIKR

SEQ ID NO: 16948 - protein, 108 aa, Homo sapiens
DIQMTQSPSSLSASVGDRVTITCQASQLIGNMLSWYQQKPGKAPTLLIYIGSSLQSGVPSRFSGSGSGTDFTLTISSLQPEDFATYYCQQTYFDPPTFGQGTKVEIKR

SEQ ID NO: 16949 - protein, 108 aa, Homo sapiens
DIQMTQSPSSLSASVGDRVTITCRASQYIGINLRWYQQKPGKAPKLLIYYSSTLLSGVPSRFSGSGSGTDFTLTISSLQPEDFATYYCQQSYDSPVTFGQGTKVEIKR

SEQ ID NO: 16950 - protein, 108 aa, Homo sapiens
DIQMTQSPSSLSASVGDRVTITCRASWAIGDRLEWYQQKPGKAPKLLIAWGSVLQSGVPSRFSGSGSGTDFTLTISSLQPEDFATYYCSQLGSRPRTFGQGTKVEIKR

SEQ ID NO: 16951 - protein, 108 aa, Homo sapiens
DIQMTQSPSSLSASVGDRVTITCRASQSIDNWLAWYQQKPGEAPKLLIYGTSRLQSGVPSRFSGSGSGTDFTLTISSLQPEDFATYYCQQYNFFPSTFGQGTKVEIKR

SEQ ID NO: 16952 - protein, 108 aa, Homo sapiens
DIQMTQSPSSLSASVGDRVTITCRASTFIGNVLNWYQQKPGKAPKLLISYVSMLQSGVPSRFSGSGSGTDFTLTISSLQPEDFATYYCCQSYDVPFTFGQGTQVEIKR

SEQ ID NO: 16953 - protein, 108 aa, Homo sapiens
DIQMTQSPSSLSASVGDRVTITCRASQWIGVSLVWYQQKPGKAPKLLIYWASVLQSGVPSRFSGSGSGTDFTLTISSLQPEDFATYYCQQTHAGPHTFGQGTKVEIKR

SEQ ID NO: 16954 - protein, 108 aa, Homo sapiens
DIQMTQSPSSLSASVGDRVTITCRASQWIGILLDWYQQKPGEAPKLLIYYASFLQSGVPSRFSGSGSGTDFTLTISSLQPEDFATYYCQQSSVDPLTFGQGTKVEIKR

SEQ ID NO: 16955 - protein, 108 aa, Homo sapiens
DIQMTQSPSSLSASVGDRVTITCRASQDIGVSLRWYQQKPGKAPKLLIYWASELQSGVPSRFSGSGSGTDFTLTISSLQPEDFATYYCQQLYDYPPTFGQGTKVEIKR

SEQ ID NO: 16956 - protein, 108 aa, Homo sapiens
DIQMTQSPSSLSASVGDRVTITCRASRFIASGLDWYQQKPGKAPKLLISRFSGLQSGVPSRFSGSGSGTDFTLTISSLQPEDFATYYCKQGFGAPATFGQGTKVEIKR

SEQ ID NO: 16957 - protein, 109 aa, Homo sapiens
DIQMTQSPSSLSASVGDRVTITCRASQYISTELEWYQQKPGKAPKLLIYSSSMLQSGVPSRFSGSGSGTDFTLTISSLQPEDFATYYCQQSASALPLTFGQGTKVEIKR

SEQ ID NO: 16958 - protein, 108 aa, Homo sapiens
DIQMTQSPSSLSASVGDRVTITCRASQWIGASLQWYQQKPGQAPKLLIYYMSVLQSGVPSRFSGSGSGTDFTLTISSLQPEDFATYYCQQTALTPATFGQGTKVEIKR

SEQ ID NO: 16959 - protein, 108 aa, Homo sapiens
DIQMTQSPSSLSASVGDRVTITCRASQVIGDYLSWYQQKPGKAPKLLIYFRSVLQSGVPSRFSGSGSGTDFTLTISSLQPEDFATYYCQQNWNLPVTFGQGTKVEIKR

SEQ ID NO: 16960 - protein, 108 aa, Homo sapiens
DIQMTQSPSSLSASVGDRVTITCRASQYIGVNLSWYQQKPGKAPKLLIYYVSVLQSGVPSRFSGSGSGTDFTLTISSLQPEDFATYYCQQTYDIPSTFGQGTKVEIKR

SEQ ID NO: 16961 - protein, 108 aa, Homo sapiens
DIQMTQSPSTLSASVGDRVTITCRASQWIGVSLSWYQQKPGKAPKLLIYYTSYLQSGVPSRFSGSGSGTDFTLTISSLQPEDFATYYCQQETTWPYTFGQGTKVEIKR

SEQ ID NO: 16962 - protein, 108 aa, Homo sapiens
DIQMTQSPSSLSASVGDRVTITCRASQYIGAELNWYQQKPGKAPKLLIYWTSVLQSGVPSRFSGSGSGTDFTLTISSLQPEDFATYYCQQAILAPLTFGQGTKVEIKR

SEQ ID NO: 16963 - protein, 108 aa, Homo sapiens
DIQMTQSPSSLSASVGDRVTITCRASQWIGVSLNWYQQKPGKAPKLLIYFASVLQSGVPSRFSGSGSGTDFTLTISSLQPEDFATYYCQQNAFYPDTFGQGTKVEIKR

SEQ ID NO: 16964 - protein, 108 aa, Homo sapiens
DIQMTQSPSSLSASVGDRVTITCRASQWIGAELNWYQQKPGKAPKLLIYWMSVLQSGVPSRFSGSGSGTDFTLTISSLQPEDFATYYCQQTSFFPITFGQGTKVEIKR

SEQ ID NO: 16965 - protein, 108 aa, Homo sapiens
DIQMTQSPSSLSASVGDRVAITCRASQDIRTLLAWYQQKPGKAPMLLIYWASELQSGVPSRFSGSGSGTDFTLTISSLQPEDFATYYCQQSLSWPSTFGQGTKVEIKR

SEQ ID NO: 16966 - protein, 108 aa, Homo sapiens
DIQMTQSPSSLSASVGDRVTITCRASQYIGVSLDWYQQKPGKAPKLLIYYSSMLQSGVPSRFSGSGSGTDFTLTISSLQPEDFATYYCQQYYTVPDTFGQGTKVEIKR

SEQ ID NO: 16967 - protein, 108 aa, Homo sapiens
DIQMTQSPSSLSASVGDRVTITCRASWPIGDRLNWYQQKPGKAPKLLIAWVSVLQSGVPSRFSGSGSGTDFTLTISSLQPEDFATYYCGQLGGGPRTFGQGTKVEIKR

SEQ ID NO: 16968 - protein, 108 aa, Homo sapiens
DIQMTQSPSSLSASVGDRVSITCRASQFIGWELAWYQQKPGKAPMLLIYPYSTLQSGVPSRFSGSGSGTDFTLTISSLQPEDFATYYCQQLAGFPYTFGQGTKVEIKR

SEQ ID NO: 16969 - protein, 108 aa, Homo sapiens
DIQMTQSPSSLSASVGDRVTITCRASQPIGDRLSWYQQKPGKAPKLLIYFVSQLQSGVPSRFSGSGSGTDFTLTISSLQPEDFATYYCQQSHPNPKTFGQGTKVEIKR

SEQ ID NO: 16970 - protein, 108 aa, Homo sapiens
DIQMTQSPSSLSASVGDGVTITCRASQWIGVELSWYQQKPGKAPKLLIYWGSELQSGVPSRFSGSGSGTDFTLTISSLQPEDFATYYCQQLALPPFTFGQGTKVEIKR

SEQ ID NO: 16971 - protein, 108 aa, Homo sapiens
DIQMTQSPSSLSASVGDRVTITCRASQEIGASLEWYQQKPGKAPKLLIYWASVLQSGVPSRFSGSGSGTDFTLTISSLQPEDFATYYCQQMHHTPFTFGQGTKVEIKR

SEQ ID NO: 16972 - protein, 108 aa, Homo sapiens
DIQMTQSPSSLSASVGDRVTITCRASQHIGQFLSWYQQKPGKAPKLLIYLASRLQSGVPSRFSGSGSGTDFTLTISSLQPEDFATYYCQQVDRIPVTFGQGTKVEIKR

SEQ ID NO: 16973 - protein, 108 aa, Homo sapiens
DIQMTQSPSSLSASVGDRVTITCRASQGIDHFLSWYQQKPGKAPKLLIYFASTLQSGVPSRFSGSGSGTDFTLTISSLQPEDFATYYCQQNASIPITFGQGTKVEIKR

SEQ ID NO: 16974 - protein, 108 aa, Homo sapiens
DIQMTQSPSSLSASVGDRVTITCRASQNIGTNLKWYQQKPEKAPKLLIYYGSLLQSGVPSRFSGSGSGTDFTLTISSLQPEDFATYYCQQDYDFPYTFGQGTKVEIKR

SEQ ID NO: 16975 - protein, 108 aa, Homo sapiens
DIQMTQSPSSLSASVGDRVSITCRASQWIGGELNWYQQKPGKAPKLLIYWVSTLQSGVPSRFSGSGSGTDFTLTISSLQPEDFATYYCQQIARYPATFGQGTKVEIKR

SEQ ID NO: 16976 - protein, 108 aa, Homo sapiens
DIQMTQSPSSLSASVGDRVTITCRASQNIGVNLIWYQQKPGKAPRLLIYFSSLLQSGVPSRFSGSGSGTDFTLTISSLQPEDFATYYCQQDYDVPQTFGQGTKVEIKR

SEQ ID NO: 16977 - protein, 108 aa, Homo sapiens
DIQMTQSPSSLSASVGDRVTITCRASQNIGSGLHWYQQKPGKAPKLLIVSWSGLQSGVPSRFSGSGSGTDFTLTISSLQPEDFATYYCGQDVLGPPTFGQGTKVEIKR

SEQ ID NO: 16978 - protein, 108 aa, Homo sapiens
DIQMTQSPSSLSASVGDRVTITCRASQWIGASLAWYQQKPGKAPKLLIYFMSELQSGVPSRFSGSGSGTDFTLTISSLQPEDFATYYCQQDYGYPTTFGQGTKVEIKR

SEQ ID NO: 16979 - protein, 108 aa, Homo sapiens
DIQMTQSPSSLSASVGDRVTITCRASQWIGVNLLWYQQKPGKAPKLLIYYGSILQSGVPSRFSGSGSGTDFTLTISSLQPEDFATYYCQQDYHGPYTFGQGTKVEIKR

SEQ ID NO: 16980 - protein, 108 aa, Homo sapiens
DIQMTQSPSSLSASVGDRVTITCRTSQDIGSLLSWYQQKPGKAPKLLIYMVSMLQSGVPSRFSGSGSGTDFTLTISSLQPEDFATYYCQHNSWYPITFGQGTKVEIKR

SEQ ID NO: 16981 - protein, 108 aa, Homo sapiens
DIQMTQSPSSLSASVGDRVTITCRASQFIYTMLNWYQQKPGKAPKLLIYRTSWLQSGVPSRFSGSGSGTDFTLTISSLQPEDFATYYCQQDYASPFTFGQGTKVEIKR

SEQ ID NO: 16982 - protein, 108 aa, Homo sapiens
DIQMTQSPSSLSASVGDRVTITCRASQWIGILLDWYQQKPGEAPKLLIYYASFLQSGVPSRFSGSGFGTDFTLTISSLQPEDFATYYCQQANPAPLTFGQGTKVEIKR

SEQ ID NO: 16983 - protein, 108 aa, Homo sapiens
DIQMTQSPSSLSASVGDRVTITCRASQWIGILIDWYQQKPGEAPKLLIYYASFLQSGVPSRFSGSGSGTDFTLTISSLQPEDSATYYCQQANPAPLTFGQGTKVEIKR

SEQ ID NO: 16984 - protein, 108 aa, Homo sapiens
DIQLTQSPSSLSASVGDRVTITCRASQWIGILLDWYQQKPGEAPKLLIYYASFLQSGVPSRFSGSGSGTDFTLTINSLQPEDFATYYCQQANPAPLTFGQGTKVEIKR

SEQ ID NO: 16985 - protein, 108 aa, Homo sapiens
DIQMTQSPSFLSASVGDRVTITCRASQWIGILLDWYQQKPGEAPKLLIYYASFLQSGVPSRFSGSGSGTDFTLTISSLQPEDFATYYCQQANPAPLTLGQGTKVEIKR

SEQ ID NO: 16986 - protein, 108 aa, Homo sapiens
DIQMTQSPSSLSASVGDRVTITCRASQWIGILVDWYQQKPGEAPKLLIYYASFLQSGVPSRFSGSGSGTDFTLTISSLQPEDFATYYCQQANPAPLRFGQGTKVEIKR

SEQ ID NO: 16987 - protein, 108 aa, Homo sapiens
DIQMTQSPSSLSASVGDRVTITCRASQWIGILLDWYQQKPGEAPKLLIYYASFLQNGVPSRFSGSGSGTDFTLTISSLQPEDFATYYCQQANPAPLTFGQGTKVEIKR

SEQ ID NO: 16988 - protein, 108 aa, Homo sapiens
DIQMIQSPSSLSASVGDRVTITCRASQWIGILLDWYQQKPGEAPKLLIYYASFLQSGVPSRFSGSGSGTDFTLTISNLQPEDFATYYCQQANPAPLTFGQGTKVEIKR

SEQ ID NO: 16989 - protein, 108 aa, Homo sapiens
DIQMTQSPSSLSASVGDRVTITCRASQWIGILVDWYQQKPGEAPKLLIYYASFLQSGVPSRFSGSGFGTDFTLTISSLHPEDFATYYCQQANPAPLTFGQGTKVEIKR

SEQ ID NO: 16990 - protein, 108 aa, Homo sapiens
DIQMTQSPSSLSASVGDRVTITCRASQWIGILLDWYQQKPGEAPKLLIYYASFLQSGVPSRFSGSGSGTDFTLTISNLQPEDFATYYCQQADPAPLTFGQGTKVEIKR

SEQ ID NO: 16991 - protein, 108 aa, Homo sapiens
DIQMTQSPSSLSASVGDSVTITCRASQWIGILLDWYQQKPGEAPKLLIYYASFLQSGVPSRFSGSGSGTDFTLTISSLQPEDFATYYCQQANPAPLTFGQGTKVEIKR

SEQ ID NO: 16992 - protein, 108 aa, Homo sapiens
DIQMTQYPSSLSASVGDRVTITCRASQWIGILLDWYQQKPGEAPKLLIYYASFLQSGVPSRFSGSGSGTDFTLTISSLQPEDFGTYYCQQANPAPLTFGQGTKVEIKR

SEQ ID NO: 16993 - protein, 108 aa, Homo sapiens
DIQMTQSPSSLYASVGDRVTITCRASQWIGILLDWYQQKPGEAPKLLIYYASFLQSGVPSRFSGSGSGTDFTLTISSLQPEDFATYYCQQANPAPLTFGQGTKVEIKR

SEQ ID NO: 16994 - protein, 108 aa, Homo sapiens
DIQMTQSPSSLSASVGDRVTITCRASQWIGILLDWYQQKPGEAPKLLIYYASFLQSGVPSRFSGSGSGTDFTLTISSLQPEDFATYYCQPANPAPLTFGQGTKVEIKR

SEQ ID NO: 16995 - protein, 108 aa, Homo sapiens
DIQMTQSPSSLSASVGDRVTITCRSSRWIGILLDWYQQKPGEAPKLLIYYASFLQSGVPSRFSGSGSGTDFTLTISSLQPEDVATYYCQQANPAPLTFGQGTKVEIKR

SEQ ID NO: 16996 - protein, 108 aa, Homo sapiens
DIQMTQSPSSLSASVGDRVTITCRASQWIGILVDWYQQKPGEAPKLLIYYASFLQSGVPSRFSGSGSGTDFTLTISSLQPEDFATYYCQQANPAPLTFGQGTKVEIKR

SEQ ID NO: 16997 - protein, 108 aa, Homo sapiens
DIQLTQSPSSLSASVGDRVTITCRASQWIGILLDWYQQKPGEAPKLLIYYASFLQSGVPSRFSGSGSGTDFTLTISSLQPEDFATYYCQQANPAPLTFGQGTKVEIKR

SEQ ID NO: 16998 - protein, 108 aa, Homo sapiens
DIQMTQSPTSLSASVGDRVTITCRASQWIGNLLDWYQQKPGEAPKLLIYYASFLQSGVPSRFSGGGFGTDFTLTISSLQPEDFATYYCQQANPAPLTFGQGTKVEIKR

SEQ ID NO: 16999 - protein, 108 aa, Homo sapiens
DIQMTQSPSSLSASVGDRVTITCRASQWIGILLDWYQQKPGEAPKLLIYYASFLQSGVPSRFSGSGSGTDFTLTISSLQPEDFATYYCQQANPAPPTFGQGTKVEIKR

SEQ ID NO: 17000 - protein, 108 aa, Homo sapiens
DIQMTQSPSSLSASVGDRVTITCRASQWIGILLDWYQQKPGEDPKLLIYYASFLQSGVPSRFSGSGSGTDFTLTISSLQPEDFATYYCQQANPAPLTFGQGTKVEIKR

SEQ ID NO: 17001 - protein, 108 aa, Homo sapiens
DIQMTQSPTSLSASVGDRVTITCRASQWIGILLDWYQQKPGEAPKLLIYYASFLQSGVPSRFSGSGSGTDFTLTISSLQPEDFATYYCQQANPAPLTFGQGTKVEIKR

SEQ ID NO: 17002 - protein, 108 aa, Homo sapiens
DIQMTQSPSSLSASVGDRVTITCRASQWIGILVDWYQQKPGEAPKLLIYYGSFLQSGVPSRFSGSGSGTDFTLTISSLQPEDFATYYCQQANPAPLTFGQGTKVEIKR

SEQ ID NO: 17003 - protein, 108 aa, Homo sapiens
DIQMTQSPSSLSASVGDRVTITCRASQWIGILLDWYQQKPGEAPKLLIYYASFLQSGVPSRFSGSGSGTDFTLTISSLQPEDFATYYCQQANPAPLTFGQGTKVEIRR

SEQ ID NO: 17004 - protein, 108 aa, Homo sapiens
DIQMTQSPSSLSASVGDRVTITCRASQWIGILLDWYQQKPGEAPKLLIYYASFLQSGVPSRFSGSGYGTDFTLTISSLQPEDFATYYCQQANPAPLTFGQGTKVEIKR

SEQ ID NO: 17005 - protein, 108 aa, Homo sapiens
DIQMTQSPSSLSASVGDRVTITCRASQWIGILLDWYQQKPGEAPKLLIYYASFLQSGVPSRFSGSGSGTDFTLTISSLQPEDFATYYCQQANPAPLTFGQGTKVEMKR

SEQ ID NO: 17006 - protein, 108 aa, Homo sapiens
DIQMTQSPSSLSASVGDRVTITCRASQWIGILLDWYQQKPGEDPKLLIYYASFLQSGVPSRFSGSGSGTDFTLTISSLQPEDFATYYCQQANPAPLMFGQGTKVEIKR

SEQ ID NO: 17007 - protein, 108 aa, Homo sapiens
DIQMTQSPSSLSASVGDRVTITCRASQWIGILLDWYQQKPGKAPKLLIYYASFLQSGVPSRFSGSGSGTDFTLTISSLQPEDFATYYCQQANPAPLTFGQGTKVEIKR

SEQ ID NO: 17008 - protein, 108 aa, Homo sapiens
DIQMTQSPSSLSASVGDRVTITCRASQWIGILVDWYQQKPGKAPKLLIYYASFLQSGVPSRFSGSGSGTDFTLTISSLQPEDFATYYCQQANPAPLTFGQGTKVEIKR

SEQ ID NO: 17009 - protein, 108 aa, Homo sapiens
DIQMTQSPSSLSASVGDRVTITCRASQWIGILLDWYQQKPGKAPKLLIYYASFLQSGVPSRFSGSGSGTDFTLTISSLQPEDFATYYCQQANPAPLRFGQGTKVEIKR

SEQ ID NO: 17010 - protein, 108 aa, Homo sapiens
DIQMTQSPSSLSASVGDRVTITCRASQWIGILIDWYQQKPGKAPKLLIYYASFLQSGVPSRFSGSGSGTDFTLTISSLQPEDFATYYCQQANPAPLTFGQGTKVEIKR

SEQ ID NO: 17011 - protein, 108 aa, Homo sapiens
DIQMTQSPSSLSASVGDRVTITCRASQWIGNLVDWYQQKPGKAPKLLIYYASFLQSGVPSRFSGSGSGTDFTLTISSLQPEDFATYYCQQANPAPLTFGQGTKVEIKR

SEQ ID NO: 17012 - protein, 108 aa, Homo sapiens
DIQMTQSPSSLSASVGDRVTITCRASQWIGNLVDWYQQKPGKAPKLLIYYASFLQSGVPSRFSGSGSGTDFTLTISSLQPEDFATYYCQQANPAPPTFGQGTKVEIKR

SEQ ID NO: 17013 - protein, 108 aa, Homo sapiens
DIQMTQSPSSLSASVGDRVTITCRASQWIGINLDWYQQKPGKAPKLLIYYASFLQSGVPSRFSGSGSGTDFTLTISSLQPEDFATYYCQQANPAPLTFGQGTKVEIKR

SEQ ID NO: 17014 - protein, 108 aa, Homo sapiens
DIQMTQSPSSLSASVGDRVTITCRASQNIGNLLDWYQQKPGKAPKLLIYYASFLQSGVPSRFSGSGFGTDFTLTISSLQPEDFATYYCQQANPAPLTFGQGTKVEIKR

SEQ ID NO: 17015 - protein, 108 aa, Homo sapiens
DIQMTQSPSSLSASVGDRVTITCRASQWIGINLDWYQQKPGKAPRLLIYYASFLQSGVPSRFSGSGSGTDFTLTISSLQPEDFATYYCQQANPAPLTFGQGTKVEIKR

SEQ ID NO: 17016 - protein, 119 aa, Homo sapiens
EVQLLESGGGLVQPGGSLRLSCAASGFTFAEQPMTWARQAPGKGLEWVSSISSFGDLTYYADSVKGRFTISRDNSKNTLYLQMNSLRAEDTAVYYCAKGVYRISRFDYWGQGTLVTVSS

SEQ ID NO: 17017 - protein, 127 aa, Unknown; identical to SEQ ID NO: 12860
  source: /note="Description of Unknown: Camelid sequence"

SEQ ID NO: 17018 - protein, 127 aa, Unknown; identical to SEQ ID NO: 12861
  source: /note="Description of Unknown: Camelid sequence"

SEQ ID NO: 17019 - protein, 122 aa, Unknown; identical to SEQ ID NO: 12862
  source: /note="Description of Unknown: Camelid sequence"

SEQ ID NO: 17020 - protein, 129 aa, Unknown; identical to SEQ ID NO: 12863
  source: /note="Description of Unknown: Camelid sequence"

SEQ ID NO: 17021 - protein, 125 aa, Unknown; identical to SEQ ID NO: 12864
  source: /note="Description of Unknown: Camelid sequence"

SEQ ID NO: 17022 - protein, 129 aa, Unknown; identical to SEQ ID NO: 12865
  source: /note="Description of Unknown: Camelid sequence"

SEQ ID NO: 17023 - protein, 122 aa, Unknown; identical to SEQ ID NO: 12866
  source: /note="Description of Unknown: Camelid sequence"

SEQ ID NO: 17024 - protein, 121 aa, Unknown; identical to SEQ ID NO: 12867
  source: /note="Description of Unknown: Camelid sequence"

SEQ ID NO: 17025 - protein, 122 aa, Unknown; identical to SEQ ID NO: 12868
  source: /note="Description of Unknown: Camelid sequence"

SEQ ID NO: 17026 - protein, 123 aa, Unknown; identical to SEQ ID NO: 12869
  source: /note="Description of Unknown: Camelid sequence"

SEQ ID NO: 17027 - protein, 123 aa, Unknown; identical to SEQ ID NO: 12870
  source: /note="Description of Unknown: Camelid sequence"

SEQ ID NO: 17028 - protein, 133 aa, Unknown; identical to SEQ ID NO: 12871
  source: /note="Description of Unknown: Camelid sequence"

SEQ ID NO: 17029 - protein, 120 aa, Unknown
  source: /note="Description of Unknown: Camelid sequence"
  MOD_RES (3)..(3): Any amino acid
  MOD_RES (13)..(13): Any amino acid
EVXLVESGGGLVXPGGSLRLSCVASGFTFADYAMSWVRQAPGKGLQWVSSISYNGDTTYYAESMKDRFTISRDNAKNTLYLQMNSLKSEDTAVYYCASSGSYYPGHFESWGQGTQVTVSS

SEQ ID NO: 17030 - protein, 121 aa, Unknown; identical to SEQ ID NO: 12873
  source: /note="Description of Unknown: Camelid sequence"

SEQ ID NO: 17031 - protein, 123 aa, Unknown; identical to SEQ ID NO: 12874
  source: /note="Description of Unknown: Camelid sequence"

SEQ ID NO: 17032 - protein, 122 aa, Unknown; identical to SEQ ID NO: 12875
  source: /note="Description of Unknown: Camelid sequence"

SEQ ID NO: 17033 - protein, 121 aa, Unknown; identical to SEQ ID NO: 12876
  source: /note="Description of Unknown: Camelid sequence"

SEQ ID NO: 17034 - protein, 127 aa, Unknown; identical to SEQ ID NO: 12877
  source: /note="Description of Unknown: Camelid sequence"

SEQ ID NO: 17035 - protein, 126 aa, Unknown; identical to SEQ ID NO: 12878
  source: /note="Description of Unknown: Camelid sequence"

SEQ ID NO: 17036 - protein, 126 aa, Unknown; identical to SEQ ID NO: 12879
  source: /note="Description of Unknown: Camelid sequence"

SEQ ID NO: 17037 - protein, 126 aa, Unknown; identical to SEQ ID NO: 12880
  source: /note="Description of Unknown: Camelid sequence"

SEQ ID NO: 17038 - protein, 123 aa, Unknown; identical to SEQ ID NO: 12881
  source: /note="Description of Unknown: Camelid sequence"

SEQ ID NO: 17039 - protein, 108 aa, Homo sapiens
DIQMTQSPSSLSASVGDRVTITCRASQSIIKHLKWYQQKPGKAPKLLIYGASRLQSGVPSRFSGSGSGTDFTLTISSLQPEDFATYYCQQGARWPQTFGQGTKVEIKR

SEQ ID NO: 17040 - protein, 108 aa, Homo sapiens
DIQMTQSPSSLSASVGDRVTITCRASQSIFRHLKWYQQKPGKAPKLLIYAASRLQSGVPSRFSGSGSGTDFTLTISSLQPEDFATYYCQQVALYPKTFGQGTKVEIKR

SEQ ID NO: 17041 - protein, 108 aa, Homo sapiens
DIQMTQSPSSLSASVGDRVTITCRASQSIYYHLKWYQQKPGKAPKLLIYKASTLQSGVPSRFSGSGSGTDFTLTISSLQPEDFATYYCQQVRKVPRTFGQGTKVEIKR

SEQ ID NO: 17042 - protein, 108 aa, Homo sapiens
DIQTTQSPSSLSASVGDRVTITCRASQYIGRYLRWYQQKPGKAPKLLIYDSSVLQSGVPSRFSGSGSGTDFTLTISSLQPEDFATYYCQQRYRMPYTFGQGTRVEIKR

SEQ ID NO: 17043 - protein, 108 aa, Homo sapiens
DIQMTQSPSSLSASVGDRVTITCRASQYIGRYLRWYQQKPGKAPKLLIYDSSVLQSGVPSRFSGSGSGTDFTLTISSLQPEDFATYYCQQRYMQPFTFGQGTKVEIKR

SEQ ID NO: 17044 - protein, 108 aa, Homo sapiens
DIQMTQSPSSLSASVGDRVTITCRASQWIGRYLRWYQQKPGKAPKLLIYNGSQLQSGVPSRFSGSGSGTDFTLTISSLQPEDFATYYCQQRYLQPYTFGQGTKVEIKR

SEQ ID NO: 17045 - protein, 108 aa, Homo sapiens
DIQMTQSPSSLSASVGDRVTITCRASQYISRQLRWYQQKPGKAPRLLIYGASVLQSGIPSRFSGSGSGTDFTLTISSLQPEDFATYYCQQRYITPYTFGQGTKVEVKR

SEQ ID NO: 17046 - protein, 108 aa, Homo sapiens
DIQMTQSPSSLSASVGDRVTITCRASQYIGRYLRWYQQKPGKAPKLLIYDSSVLQSGVPSRFSGSGSGTDFTLTISSLQPEDFATYYCQQRYSSPYTFGQGTKVEIKR

SEQ ID NO: 17047 - protein, 108 aa, Homo sapiens
DIQMTQSPSSLSASVGDRVTITCRASQWIHRQLKWYQQKPGKAPKLLIYYASILQSGVPSRFSGSGSGTDFTLTISSLQPEDFATYYCQQTFSKPSTFGQGTKVEIKR

SEQ ID NO: 17048 - protein, 108 aa, Homo sapiens
DIQMTQSPSSLSASVGDRVTITCRASQKIATYLNWYQQKPGKAPKLLIYRSSSLQSAVPSRFSGSGSGTVFTLTISSLQPEDFATYYCQQTYAVPPTFGQGTKVEIKR

SEQ ID NO: 17049 - protein, 108 aa, Homo sapiens
DIQMTQSPSSLSASVGDRVTITCRASQWIDTGLAWYQQKPGKAPRLLIYNVSRLQSGVPSRFSGSGSGTDFTLTISSLQPEDFATYYCQQYWGSPTTFGQGTKVEIKR

SEQ ID NO: 17050 - protein, 108 aa, Homo sapiens
DIQMTQSPSSLSASVGDRVTITCRASQEIYSWLAWYQQRPGKAPKLLIYNASHLQSGVPSRFSGSGSGTDFTLTISSLQPEDFATYYCQQVIGDPVTFGQGTKVEIKR

SEQ ID NO: 17051 - protein, 108 aa, Homo sapiens
DIQMTQSPSSLSASVGDRVTITCRASQSISSYLNWYQQKPGKAPTLLIYRLSVLQSGVPSRFSGSGSGTDFTLTISSLQPEDFATYYCQQTYNVPPTFGQGTKVEIKR

SEQ ID NO: 17052 - protein, 108 aa, Homo sapiens
DIQMTQSPSSLSASVGDRVTITCRASQSISSYLNWYQQKPGKAPKLLIYRNSFLQSGVPSRFSGSGSGTDFTLTISSLQPEDFATYYCQQTYTVPPTFGQGTKVEIKQ

SEQ ID NO: 17053 - protein, 108 aa, Homo sapiens
DIQMTQSPSSLSASVGDRVTITCRASQSISSYLNWYQQKPGKAPKLLIYRNSQLQSGVPSRFSGSGSGTDFTLTISSLQPEDFATYYCQQTFAVPPTFGQGTKVEIKR

SEQ ID NO: 17054 - protein, 123 aa, Homo sapiens
EVQLLESGGGLVQPGGSLRLSCAASGFTFSKYWMSWVRQAPGKGLEWVSSIDFMGPHTYYADSVKGRFTISRDNSKNTLYLQMNSLRAEDTAVYYCAKGRTSMLPMKGKFDYWGQGTLVTVSS

SEQ ID NO: 17055 - protein, 118 aa, Homo sapiens
EVQLLESGGGLVQPGGSLRLSCAASGFTFYDYNMSWVRQAPGKGLEWVSTITHTGGVTYYADSVKGRFTISRDNSKNTLYLQMNSLRAEDTAVYYCAKQNPSYQFDYWGQGTLVTVSS

SEQ ID NO: 17056 - protein, 118 aa, Homo sapiens
EVQLLESGGGLVQPGGSLRLSCAASGFTFHRYSMSWVRQAPGKGLEWVSTILPGGDVTYYADSVKGRFTISRDNSKNTLYLQMNSLRAEDTAVYYCAKQTPDYMFDYWGQGTLVTVSS

SEQ ID NO: 17057 - protein, 117 aa, Homo sapiens
EVQLLESGGGLVQPGGSLRLSCAASGFTFWKYNMAWVRQAPGKGLEWVSTILGEGNNTYYADSVKGRFTISRDNSKNTLYLQMNSLRAEDTAVYYCAKTMDYKFDYWGQGTLVTVSS

SEQ ID NO: 17058 - protein, 118 aa, Homo sapiens
EVQLLESGGGLVQPGGSLRLSCTASGFTFDEYNMSWVRQAPGKGLEWVSTILPHGDRTYYADSVKGRFTISRDNSKNTLYLQMNSLRAEDTAVYYCAKQDPLYRFDYWGQGTLVTVSS

SEQ ID NO: 17059 - protein, 120 aa, Homo sapiens
EVQLLESGGGLVQPGGSLRLSCAASGFTFDLYDMSWVRQAPGKGLEWVSSIVNSGVRTYYADSVKGRFTISRDNSKNTLYLQMNSLRAEDTAVYYCAKLNQSYHWDFDYWGQGTLVTVSS

SEQ ID NO: 17060 - protein, 118 aa, Homo sapiens
EVQLLESGGGLVQPGGSLRLSCAASGFTFSDYRMSWVRQAPGKGLEWVSTIISNGKFTYYADSVKGRFTISRDNSKNTLYLQMNSLRAEDTAVYYCAKQDWMYMFDYWGQGTLVTVSS

SEQ ID NO: 17061 - protein, 108 aa, Homo sapiens
DIQMTQSPSSLSASVGDRVTITCRASQSISSYLNWYQQKPGKAPKLLIYRNSPLQSGVPSRFSGSGSGTDFTLTISSLQPEDFATYYCQQTYRVPPTFGQGTKVEIKR

SEQ ID NO: 17062 - protein, 108 aa, Homo sapiens
DIQMTQSPSSLSASVGDRVTITCRASQHIHRELRWYQQKPGKAPKLLIYQASRLQSGVPSRFSGSGSGTDFTLTISSLQPEDFATYYCQQKYLPPYTFGQGTKVEIKR

SEQ ID NO: 17063 - protein, 108 aa, Homo sapiens
DIQMTQSPSSLSASVGDRVTITCRASQHIHRELRWYQQKPGKAPKLLIYQASRLQSGVPSRFSGSGSGTDFTLTISSLQPEDFATYYCQQRYRVPYTFGQGTKVEIKR

SEQ ID NO: 17064 - protein, 108 aa, Homo sapiens
DIQMTQSPSSLSASVGDRVTITCRASQSIGRRLKWYQQKPGAAPRLLIYRTSWLQSGVPSRFSGSGSGTDFTLTISSLQPEDFATYYCQQTSQWPHTFGQGTKVEIKR

SEQ ID NO: 17065 - protein, 108 aa, Homo sapiens
DIQMTQSPSSLSASVGDRVTITCRASQKIYKNLRWYQQKPGKAPKLLIYNSSILQSGVPSRFSGSGSGTDFTLTISSLQPEDFATYYCQQRYLSPYTFGQGTKVEIKR

SEQ ID NO: 17066 - protein, 108 aa, Homo sapiens
DIQMTQSPSSLSASVGDRVTITCRASQKIYNNLRWYQQKPGKAPKLLIYNTSILQSGVPSRFSGSGSGTDFTLTISSLQPEDFATYYCQQRWRAPYTFGQGTKVEIKR

SEQ ID NO: 17067 - protein, 108 aa, Homo sapiens
DIQMTQSPSSLSASVGDRVTITCRASQWIYKSLGWYQQKPGKAPKLLIYQSSLLQSGVPSRFSGSGSGTDFTLTISSLQPEDFATYYCQQYHQMPRTFGQGTKVEIKR

SEQ ID NO: 17068 - protein, 108 aa, Homo sapiens
DIQMTQSPSSLSASVGDRVTITCRASQWIYRHLRWYQQKPGKAPKLLIYDASRLQSGVPTRFSGSGSGTDFTLTISSLQPEDFATYYCQQTHNPPKTFGQGTKVEIKR

SEQ ID NO: 17069 - protein, 116 aa, Homo sapiens
EVQLLESGGGLVQPGGSLRLSCAASGFTFWPYTMSWVRQAPGKGLEWVSTISPFGSTTYYADSVKGRFTISRDNSKNTLYLQMNSLRAEDTAVYYCAKGGKDFDYWGQGTLVTVSS

SEQ ID NO: 17070 - protein, 117 aa, Homo sapiens
EVQLLESGGGLVQPGGSLRLSCAASGFTFWPYTMSWVRQAPGKGLEWVSTISPFGSTTYYADSVKGRFTISRDNSKNTLYLQMNSLRAEDTAVYYCAKGNLEPFDYWGQGTLVTVSS

SEQ ID NO: 17071 - protein, 117 aa, Homo sapiens
EVQLLESGGGLVQPGGSLRLSCAASGFTFWPYTMSWVRQAPGKGLEWVSTISPFGSTTYYADSVKGRFTISRDNSKNTLYLQMNSLRAEDTAVYYCAKKLSNGFDYWGQGTLVTVSS

SEQ ID NO: 17072 - protein, 118 aa, Homo sapiens
EVQLLESGGGLVQPGGSLRLSCAASGFTFWPYTMSWVRQAPGKGLEWVSTISPFGSTTYYADSVKGRFTISRDNSKNTLYLQMNSLRAEDTAVYYCAKVVKDNTFDYWGQGTLVTVSS

SEQ ID NO: 17073 - protein, 118 aa, Homo sapiens
EVQLLESGGGLVQPGGSLRLSCAASGFTFWPYTMSWVRQAPGKGLEWVSTISPFGSTTYYADSVKGRFTISRDNSKNTLYLQMNSLRAEDTAVYYCAKNTGGKQFDYWGQGTLVTVSS

SEQ ID NO: 17074 - protein, 118 aa, Homo sapiens
EVQLLESGGGLVQPGGSLRLSCAASGFTFWPYTMSWVRQAPGKGLEWVSTISPFGSTTYYADSVKGRFTISRDNSKNTLYLQMNSLRAEDTAVYYCAKKTGPSSFDYWGQGTLVTVSS

SEQ ID NO: 17075 - protein, 120 aa, Homo sapiens
EVQLLESGGGLVQPGGSLRLSCAASGFTFWPYTMSWVRQAPGKGLEWVSTISPFGSTTYYADSVKGRFTISRDNSKNTLYLQMNSLRAEDTAVYYCAKRTENRGVSFDYWGQGTLVTVSS

SEQ ID NO: 17076 - protein, 122 aa, Homo sapiens
EVQLLESGGGLVQPGGSLRLSCAASGFTFWPYTMSWVRQAPGKGLEWVSTISPFGSTTYYADSVKGRFTISRDNSKNTLYLQMNSLRAEDTAVYYCAKSDVLKTGLDGFDYWGQGTLVTVSS

SEQ ID NO: 17077 - protein, 120 aa, Homo sapiens
EVQLLESGGGLVQPGGSLRLSCAASGFTFMAYQMAWVRQAPGKGLEWVSTIHQTGFSTYYADSVKGRFTISRDNSKNTLYLQMNSLRAEDTAVYYCAKVRSMRPYKFDYWGQGTLVTVSS

SEQ ID NO: 17078 - protein, 120 aa, Homo sapiens
EVQLLESGGGLVQPGGSLRLSCAASGFTFKDYDMTWVRQAPGKGLEWVSMISSSGLWTYYADSVKGRFTISRDNSKNTLYLQMNSLRAEDTAVYYCAKGFRLFPRTFDYWGQGTLVTVSS

SEQ ID NO: 17079 - protein, 121 aa, Homo sapiens
EVQLLESGGGLVQPGGSLRLSCAASGFTFHDYVMGWARQAPGKGLEWVSLIKPNGSPTYYADSVKGRFTISRDNSKNTLYLQMNSLRAEDTAVYYCAKGRGRFNVLQFDYWGQGTLVTVSS

SEQ ID NO: 17080 - protein, 118 aa, Homo sapiens
EVQLLESGGGLVQPGGSLRLSCTASGFTFRHYRMGWVRQAPGKGLEWVSWIRPDGTFTYYADSVKGRFTISRDNSKNTLYLQMNSLRAEDTAVYYCAKSYMGDRFDYWGQGTLVTVSS

SEQ ID NO: 17081 - protein, 116 aa, Homo sapiens
EVQLLESGGGLVQPGGSLRLSCAASGFTFMWDKMGWVRQAPGKGLEWVSFIGREGYGTYYADSVKGRFTISRDNSKNTLYLQMNSLRAEDTAVYYCAKSVASFDYWGQGTLVTVSS

SEQ ID NO: 17082 - protein, 117 aa, Homo sapiens
EVQLLESGGGLVQPGGSLRLSCAASGFTFWAYPMSWVRQAPGKGLEWVSSISSWGTGTYYADSVKGRFTISRDNSKNTLYLQMNSLRAEDTAVYYCAKGGQGSFDYWGQGTLVTVSS

SEQ ID NO: 17083 - protein, 108 aa, Homo sapiens
DIQMTQSPSSLSASVGDRVTITCRASQWIGPELSWYQQKPGKAPKLLIYHGSILQSGVPSRFSGSGSGTDFTLTISSLQPEDFATYYCQQRMYRPATFGQGTKVEIKR

SEQ ID NO: 17084 - protein, 108 aa, Homo sapiens
DIQMTQSPSSLSASVGDRVTITCRASQWIGRELKWYQQKPGKAPRLLIYHGSVLQSGVPSRFSGSGSGTDFTLTISSLQPEDFATYYCQQDFFVPDTFGQGTKVEIKR

SEQ ID NO: 17085 - protein, 108 aa, Homo sapiens
DIQMTQSPSSLSASVGDRVTITCRASQDIANDLMWYQQKPGKAPKLLIYRNSRLQGGVPSRFSGSGSGTDFTLTISSLQPEDFATYYCQQLVHRPYTIGQGTKVEIKR

SEQ ID NO: 17086 - protein, 108 aa, Homo sapiens
DIQMTQSPSSLSASVGDRVTITCRASQFIGPHLTWYQQKPGKAPKLLIYHSSLLQSGVPSRFSGSGSGTDFTLTISSLQPEDFATYYCQQYMYYPSTFGQGTKVKIKR

SEQ ID NO: 17087 - protein, 108 aa, Homo sapiens
DIQMTQSPSSLSASVGDRVTITCRASQWIGPELSWYQQKPGKAPKLLIYHTSILQSGVPSRFSGSGSGTDFTLTISSLQPEDFATYYCQQYMFQPRTFGQGTKVEIRR

SEQ ID NO: 17088 - protein, 108 aa, Homo sapiens
DIQMIQSPSSLSASVGDRVTITCRASQFIGNELSWYQQKPGKAPKLLIYHASSLQSGVPSRFSGSGSGTDFTLTISSLQPEDFATYYCQQVLGYPYTFGQGTKVEIKR

SEQ ID NO: 17089 - protein, 108 aa, Homo sapiens
DIQMTQSPSSLSASVGDRVTITCRASQWIGPELSWYQQKPGKAPKLLIYHGSILQSGVPSRFSGSGSGTDFTLTISSLQPEDFATYYCQQVLYSPLTFGQGTKVEIKR

SEQ ID NO: 17090 - protein, 108 aa, Homo sapiens
DIQMTQSPSSLSASVGDRVTITCRASQWIGNELKWYQQKPGKAPKLLIYMSSLLQSGVPSRFSGSGSGTDFTLTISSLQPEDLATYYCQQTLLLPFTFGQGTKVEIKR

SEQ ID NO: 17091 - protein, 108 aa, Homo sapiens
DIQMTQSPSSLSASVGDRVTITCRASQWIGPELSWYQQKPGKAPKLLIYHGSILQSGVPSRFSGSGSGTDFTLTISSLQPEDFATYYCQQRLYYPGTFGQGTKVEIKR

SEQ ID NO: 17092 - protein, 108 aa, Homo sapiens
DIQMTQSPSSLSASVGDRVTITCRASQSIGRELSWYQQKPGKAPMLLIYHSSNLQSGVPSRFSGSGSGTDFTLTISSLQPEDFATYYCQQGMYWPYTFGQGTKVEIKR

SEQ ID NO: 17093 - protein, 108 aa, Homo sapiens
DIQMTQSPSSLSASVGDRVTITCRASQWIKPALHWYQQKPGKAPKLLIYHGSILQSGVPSRFSGSGSGTDFTLTISSLQPEDFATYYCQQTLFMPYTFGQGTKVEIKR

SEQ ID NO: 17094 - protein, 108 aa, Homo sapiens
DIQMTQSPSSLSASVGDRVTITCRASQSISTALLWYQQKPGKAPKLLIYNGSMLPNGVPSRFSGSGSGTDFTLTISSLQPEDFATYYCQQTWDTPMTFGQGTKVEIKR

SEQ ID NO: 17095 - protein, 108 aa, Homo sapiens
DIQMTQSPSSLSASVGDRVTITCRASQWIGHDLSWYQQKPGKAPKLLIYHSSSLQSGVPSRFSGSGSGTDFTLTISSLQPEDVATYYCQQLMGYPFTFGQGTKVEIKR

SEQ ID NO: 17096 - protein, 108 aa, Homo sapiens
DIQMTQSPSSLSASVGDRVTITCRASQDIGGLLVWYQQKPGKAPKLLIYRSSYLQSGVPSRFSGSGSGTDFTLTISSLQPEDFATYYCQQTWGIPHTFGQGTKVEIKR

SEQ ID NO: 17097 - protein, 108 aa, Homo sapiens
DIQMTQSPSSLSASVGDRVTITCRASQKIFNGLSWYQQKPGKAPKLLIYHSSTLQSGVPSRFSGSGSGTDFTLTISSLQPEDFATYYCQQVLLYPYTFGQGTKVEIKR

SEQ ID NO: 17098 - protein, 108 aa, Homo sapiens
DIQMTQSPSSLSASVGDRVTITCRASQSIGTNLSWYQQKPGKAPRLLIYRTSMLQSGVPSRFSGSGSGTDFTLTISSLQPEDFATYYCQQQFFWPHTFGQGTKVEIKR

SEQ ID NO: 17099 - protein, 118 aa, Homo sapiens
EVQLLESGGGLVQPGGSLRLSCAASGFTFRLYDMVWVRQAPGKGLEWVSYISSGGSGTYYADSVKGRFTISRDNSKNTLYLQMNSLRAEDTAVYYCAKAGGRASFDYWGQGTLVTVSS

SEQ ID NO: 17100 - protein, 116 aa, Homo sapiens
EVQLLESGGGLVQPGGSLRLSCAASGFTFHLYDMMWVRQAPGKGLEWVSFIGGDGLNTYYADSVKGRFTISRDNSKNTLYLQMNSLRAEDTAVYYCAKAGTQFDYWGQGTLVTVSS

SEQ ID NO: 17101 - protein, 119 aa, Homo sapiens
EVQLLESGGGLVQPGGSLRLSCAASGFTFNKYPMMWVRQAPGKGLEWVSEISPSGQDTYYADSVKGRFTISRDNSKNTLYLQMNSLRAEDTAVYYCAKNPQILSNFDYWGQGTLVTVSS

SEQ ID NO: 17102 - protein, 124 aa, Homo sapiens
EVQLLESGGGLVQPGGSLRLSCAASGFTFQWYPMWWVRQAPGKGLEWVSLIEGQGDRTYYADSVKGRFTISRDNSKNTLYLQMNSLRAEDTAVYYCAKAGDRTAGSRGNSFDYWGQGTLVTVSS

SEQ ID NO: 17103 - protein, 121 aa, Homo sapiens
EVQLLESGGGLVQPGGSLRLSCAASGFTFKAYEMGWVRQAPGKGLEWVSGISPNGGWTYYADSVKGRFTISRDNSKNTLYLQMNSLRAEDTAVYYCAKESISPTPLGFDYWGQGTLVTVSS

SEQ ID NO: 17104 - protein, 116 aa, Homo sapiens
EVQLLESGGGLVQPGGSLRLSCAASGFTFTGYEMGWVRQAPGKGLEWVSYISRGGRWTYYADSVKGRFTISRDNSKNTLYLQMNSLRAEDTAVYYCAKSDTMFDYWGQGTLVTVSS

SEQ ID NO: 17105 - protein, 116 aa, Homo sapiens
EVQLLESGGGLVQPGGSLRLSCAASGFTFSAYEMGWVRQAPGKGLEWVSFISGGGRWTYYADSVKGRFTISRDNSKNTLYLQMNSLRAEDTAVYYCAKYSEDFDYWGQGTLVTVSS

SEQ ID NO: 17106 - protein, 116 aa, Homo sapiens
EVQLLESGGGLVQPGGSLRLSCAASGFTFGAYPMMWVRQAPGKGLEWVSEISPSGSYTYYADSVKGRFTISRDNSKNTLYLQMNSLRAEDTAVYYCAKDPRKFDYWGQGTLVTVSS

SEQ ID NO: 17107 - protein, 123 aa, Homo sapiens
EVQLLESGGGLVQPGGSLRLSCAASGFTFQFYKMGWVRQAPGKGLEWVSSISSVGDATYYADSVKGRFTISRDNSKNTLYLQMNSLRAEDTAVYYCAKMGGGPPTYVVYFDYWGQGTLVTVSS

SEQ ID NO: 17108 - protein, 123 aa, Homo sapiens
EVQLLESGGGLVQPGGSLRLSCAASGFTFGEYGMYWVRQAPGKGLEWVSSISERGRLTYYADSVKGRFTISRDNSKNTLYLQMNNLRAEDTAVYYCAKSALSSEGFSRSFDYWGQGTLVTVSS

SEQ ID NO: 17109 - protein, 123 aa, Homo sapiens
EVQLLESGGGLVQPGGSLRLSCAASGFTFSDYAMYWVRQAPGKGLEWVSSITARGFITYYADSVKGRFTISRDNSKNTLYLQMNSLRAEDTAVYYCAKSGFPHKSGSNYFDYWGQGTLVTVSS

SEQ ID NO: 17110 - protein, 116 aa, Homo sapiens
EVQLLESGGGLVQPGGSLRLSCAASGFTFRLYDMMWVRQAPGKGLEWVSFIGGDGLNTYYADSVKGRFTISRDNSKNTLYLQMNSLRAEDTAVYYCAKDPRKFDYWGQGTLVTVSS

SEQ ID NO: 17111 - protein, 116 aa, Homo sapiens
EVQLLESGGGLVQPGGSLRLSCAASGFTFSFFDMMWVRQAPGKGLEWVSFIGGDGLNTYYADSVKGRFTISRDNSKNTLYLQMNSLRAEDTAVYYCAKAGTQFDYWGQGTLVTVSS

SEQ ID NO: 17112 - protein, 116 aa, Homo sapiens
EVQLLESGGGLVQPGGSLRLSCAASGFTFMLFDMMWVRQAPGKGLEWVSFIGGDGLNTYYADSVKGRFTISRDNSKNTLYLQMNSLRAEDTAVYYCAKAGTQFDYWGQGTLVTVSS

SEQ ID NO: 17113 - protein, 116 aa, Homo sapiens
EVQLLESGGGLVQPGGSLRLSCAASGFTFPLYDMMWVRQAPGKGLEWVSFIGGDGLNTYYADSVKGRFTISRDNSKNTLYLQMNSLRAEDTAVYYCAKAGTQFDYWGQGTLVTVSS

SEQ ID NO: 17114 - protein, 116 aa, Homo sapiens
EVQLLESGGGLVQPGGSLRLSCAASGFTFQYFDMMWVRQAPGKGLEWVSFIGGDGLNTYYADSVKGRFTISRDNSKNTLYLQMNSLRAEDTAVYYCAKAGTQFDYWGQGTLVTVSS

SEQ ID NO: 17115 - protein, 116 aa, Homo sapiens
EVQLLESGGGLVQPGGSLRLSCAASGFTFHLYDMMWVRQAPGKGLEWVSFIGGDGLNTYYADSVKGRFTISRDNSKNTLYLQMNSLRAEDTAVYYCAKSPRQFDYWGQGTLVTVSS

SEQ ID NO: 17116 - protein, 116 aa, Homo sapiens
EVQLLESGGGLVQPGGSLRLSCAASGFTFHLYDMMWVRQAPGKGLEWVSFIGGDGLNTYYADSVKGRFTISRDNSKNTLYLQMNSLRAEDTAVYYCAKNPRQFDYWGQGTLVTVSS

SEQ ID NO: 17117 - protein, 116 aa, Homo sapiens
EVQLLESGGGLVQPGGSLRLSCAASGFTFHLYDMMWVRQAPGKGLEWVSFIGGDGLNTYYADSVKGRFTISRDNSKNTLYLQMNSLRAEDTAVYYCAKKSMQFDYWGQGTLVTVSS

SEQ ID NO: 17118 - protein, 116 aa, Homo sapiens
EVQLLESGGGLVQPGGSLRLSCAASGFTFHLYDMMWVRQAPGKGLEWVSFIGGDGLNTYYADSVKGRFTISRDNSKNTLYLQMNSLRAEDTAVYYCAKSPRKFDYWGQGTLVTVSS

SEQ ID NO: 17119 - protein, 116 aa, Homo sapiens
EVQLLESGGGLVQPGGSLRLSCAASGFTFHLYDMMWVRQAPGKGLEWVSFIGGDGLNTYYADSVKGRFTISRDNSKNTLYLQMNSLRAEDTAVYYCAKDPRKFDYWGQGTLVTVSS

SEQ ID NO: 17120 - protein, 119 aa, Homo sapiens
EVQLLESGGGLVQPGGSLRLSCAASGYPMWWVRQAPGKGPEWVSLIEGQGDRTYYADSVKGRFTISRDNSKNTLYLQMNSLRAEDTAVYYCAKAGDRTAGSRGNSFDYWGQGTLVTVSS

SEQ ID NO: 17121 - protein, 124 aa, Homo sapiens
EVQLLESGGGLVQPGGSLRLSCAASGFTFQWAPMPWVRQAPGKGLEWVSLIEGQGDRTYYADSVKGRFTISRDNSKNTLYLQMNSLRAEDTAVYYCAKAGDRTAGSRGNSFDYWGQGTLVTVSS

SEQ ID NO: 17122 - protein, 124 aa, Homo sapiens
EVQLLESGGGLVQPGGSLRLSCAASGFTFQWPHMPWVRQAPGKGLEWVSLIEGQGDRTYYADSVKGRFTISRDNSKNTLYLQMNSLRAEDTAVYYCAKAGDRTAGSRGNSFDYWGQGTLVTVSS

SEQ ID NO: 17123 - protein, 124 aa, Homo sapiens
  MOD_RES (30)..(30): Any amino acid
EVQLLESGGGLVQPGGSLRLSCAASGFTFXWPHMHWVRQAPGKGLEWVSLIEGQGDRTYYADSVKGRFTISRDNSKNTLYLQMNSLRAEDTAVYYCAKAGDRTAGSRGNSFDYWGQGTLVTVSS

SEQ ID NO: 17124 - protein, 124 aa, Homo sapiens
EVQLLESGGGLVQPGGSLRLSCAASGFTFQWYPMWWVRQAPGKGLEWVSLIEGQGDRTYYADSVKGRFTISRDNSKNTLYLQMNSLRAEDTAVYYCAKAGDRWVLSRGNSFDYWGQGTLVTVSS

SEQ ID NO: 17125 - protein, 124 aa, Homo sapiens
EVQLLESGGGLVQPGGSLRLSCAASGFTFQWYPMWWVRQAPGKGLEWVSLIEGQGDRTYYADSVKGRFTISRDNSKNTLYLQMNSLRAEDTAVYYCAKAGDRRFLSRGNSFDYWGQGTLVTVSS

SEQ ID NO: 17126 - protein, 124 aa, Homo sapiens
EVQLLESGGGLVQPGGSLRLSCAASGFTFQWYPMWWVRQAPGKGLEWVSLIEGQGDRTYYADSVKGRFTISRDNSKNTLYLQMNSLRAEDTAVYYCAKAGDRHRTSRGNSFDYWGQGTLVTVSS

SEQ ID NO: 17127 - protein, 124 aa, Homo sapiens
EVQLLESGGGLVQPGGSLRLSCAASGFTFQWYPMWWVRQAPGKGLEWVSLIEVQGDRTYYADSVKGRFTISRDNSKNTLYLQMNSLRAEDTAVYYCAKAGPPFAGSRGNSFDYWGQGTLVTVSS

SEQ ID NO: 17128 - protein, 124 aa, Homo sapiens
EVQLLESGGGLVQPGGSLRLSCAASGFTFQWYPMWWVRQAPGKGLEWVSLIEGQGDRTYYADSVKGRFTISRDNSKNTLYLQMNSLRAEDTAVYYCAKAGTNNAGSRGNSFDYWGQGTLVTVSS

SEQ ID NO: 17129 - protein, 124 aa, Homo sapiens
EVQLLESGGGLVQPGGSLRLSCAASGFTFQWYPMWWVRQAPGKGLEWVSLIEGQGDRTYYADSVKGRFTISRDNSKNTLYLQMNSLRAEDTAVYYCAKAGDRTAQNSGNSFDYWGRGTLVTVSS

SEQ ID NO: 17130 - protein, 124 aa, Homo sapiens
EVQLLESGGGLVQPGGSLRLSCAASGFTFQWYPMWWVRQAPGKGLEWVSLIEGQGDRTYYADSVKGRFTISRDNSKNTLYLQMNSLRAEDTAVYYCAKAGNSNAGSRGNSFDYWGQGTLVTVSS

SEQ ID NO: 17131 - protein, 116 aa, Homo sapiens
EVQLLESGGGLVQPGGSLRLSCAASGFTFPAYPMMWVRQAPGKGLEWVSEISPSGSYTYYADSVKGRFTISRDNSKNTLYLQMNSLRAEDTAVYYCAKDPRKFDYWGQGTLVTVSS

SEQ ID NO: 17132 - protein, 116 aa, Homo sapiens
EVQLLESGGGLVQPGGSLRLSCAASGFTFKAYPIMWVRQAPGKGLEWVSEISPSGSYTYYADSVKGRFTISRDNSKNTLYLQMNSLRAEDTAVYYCAKDPRKFDYWGQGTLVTVSS

SEQ ID NO: 17133 - protein, 114 aa, Homo sapiens
EVQLLESGGGLVQPGGSLRLSCAASGFTFTAYPMMWVRQAPGKGLEWVSEISPSGSYTYYADSVKGRFTISRDNSKNTLYLQMNSLRAEDTAVYYCAKDPRKFDYWGQGTLVTV

SEQ ID NO: 17134 - protein, 116 aa, Homo sapiens
EVQLLESGGGLVQPGGSLRLSCAASGFTFGWYPMMWVRQAPGKGLEWVSEISPSGSYTYYADSVKGRFTISRDNSKNTLYLQMNSLRAEDTAVYYCAKDPRKFDYWGQGTLVTVSS

SEQ ID NO: 17135 - protein, 114 aa, Homo sapiens
EVQLLESGGGLVQPGGSLRLSCAASGFTFGLYPMMWVRQAPGKGLEWVSEISPSGSYTYYADSVKGRFTISRDNSKNTLYLQMNSLRAEDTAVYYCAKDPRKFDYWGQGTLVTV

SEQ ID NO: 17136 - protein, 116 aa, Homo sapiens
EVQLLESGGGLVQPGGSLRLSCAASGFTFLAYPMMWVRQAPGKGLEWVSEISPSGSYTYYADSVKGRFTISRDNSKNTLYLQMNSLRAEDTAVYYCAKDPRKFDYWGQGTLVTVSS

SEQ ID NO: 17137 - protein, 116 aa, Homo sapiens
EVQLLESGGGLVQPGGSLRLSCAASGFTFGRYPMMWVRQAPGKGLEWVSEISPSGSYTYYADSVKGRFTISRDNSKNTLYLQMNSLRAEDTAVYYCAKDPRKFDYWGQGTLVTVSS

SEQ ID NO: 17138 - protein, 116 aa, Homo sapiens
EVQLLESGGGLVQPGGSLRLSCAASGFTFGAFPMMWVRQAPGKGLEWVSEISPSGSYTYYADSVKGRFTISRDNSKNTLYLQMNSLRAEDTAVYYCAKDPRKFDYWGQGTLVTVSS

SEQ ID NO: 17139 - protein, 116 aa, Homo sapiens
EVQLLESGGGLVQPGGSLRLSCAASGFTFGAYPMLWVRQAPGKGLEWVSEISPSGSYTYYADSVKGRFTISRDNSKNTLYLQMNSLRAEDTAVYYCAKDPRKFDYWGQGTLVTVSS

SEQ ID NO: 17140 - protein, 116 aa, Homo sapiens
EVQLLESGGGLVQPGGSLRLSCAASGFTFSLFPMMWVRQAPGKGLEWVSEISPSGSYTYYADSVKGRFTISRDNSKNTLYLQMNSLRAEDTAVYYCAKDPRKFDYWGQGTLVTVSS

SEQ ID NO: 17141 - protein, 116 aa, Homo sapiens
EVQLLESGGGLVQPGGSLRLSCAASGFTFFLFPMMWVRQAPGKGLEWVSEISPSGSYTYYADSVKGRFTISRDNSKNTLYLQMNSLRAEDTAVYYCAKDPRKFDYWGQGTLVTVSS

SEQ ID NO: 17142 - protein, 116 aa, Homo sapiens
EVQLLESGGGLVQPGGSLRLSCAASGFTFSYFPMMWVRQAPGKGLEWVSEISPSGSYTYYADSVKGRFTISRDNSKNTLYLQMNSLRAEDTAVYYCAKDPRKFDYWGQGTLVTVSS

SEQ ID NO: 17143 - protein, 116 aa, Homo sapiens
EVQLLESGGGLVQPGGSLRLSCAASGFTFAFAPMMWVRQAPGKGLEWVSEISPSGSYTYYADSVKGRFTISRDNSKNTLYLQMNSLRAEDTAVYYCAKDPRKFDYWGQGTLVTVSS

SEQ ID NO: 17144 - protein, 116 aa, Homo sapiens
EVQLLESGGGLVQPGGSLRLSCAASGFTFAPYPMMWVRQAPGKGLEWVSEISPSGSYTYYADSVKGRFTISRDNSKNTLYLQMNSLRAEDTAVYYCAKDPRKFDYWGQGTLVTVSS

SEQ ID NO: 17145 - protein, 116 aa, Homo sapiens
EVQLLESGGGLVQPGGSLRLSCAASGFTFTSHPMMWVRQAPGKGLEWVSEISPSGSYTYYADSVKGRFTISRDNSKNTLYLQMNSLRAEDTAVYYCAKDPRKFDYWGQGTLVTVSS

SEQ ID NO: 17146 - protein, 116 aa, Homo sapiens
EVQLLESGGGLVQPGGSLRLSCAASGFTFTSHPMMWVRQAPGKGLEWVSEISPSGSYTYYADSVKGRFTISRDNSKNALYLQMNSLRAEDTAVYYCAKDPRKFDYWGQGTLVTVSS

SEQ ID NO: 17147 - protein, 116 aa, Homo sapiens
EVQLLESGGGLVQPGGSLRLSCAASGFTFHAYPMMWVRQAPGKGLEWVSEISPSGSYTYYADSVKGRFTISRDNSKNTLYLQMNSLRAEDTAVYYCAKDPRKFDYWGQGTLVTVSS

SEQ ID NO: 17148 - protein, 116 aa, Homo sapiens
EVQLLESGGGLVQPGGSLRLSCAASGFTFRAYPMMWVRQAPGKGLEWVSEISPSGSYTYYADSVKGRFTISRDNSKNTLYLQMNSLRAEDTAVYYCAKDPRKFDYWGQGTLVTVSS

SEQ ID NO: 17149 - protein, 116 aa, Homo sapiens
EVQQLESGGGLVQPGGSLRLSCAASGFTFWAYPMMWVRQAPGKGLEWVSEISPSGSYTYYADSVKGRFTISRDNSKNTLYLQMNSLRAEDTAVYYCAKDPRKFDYWGQGTLVTVSS

SEQ ID NO: 17150 - protein, 114 aa, Homo sapiens
EVQLLESGGGLVQPGGSLRLSCAASGFTFQAYPMMWVRQAPGKGLEWVSEISPSGSYTYYADSVKGRFTISRDNSKNTLYLQMNSLRAEDTAVYYCAKDPRKFDYWGQGTLVTV

SEQ ID NO: 17151 - protein, 116 aa, Homo sapiens
EVQLLESGGGLVQPGGSLRLSCAASGFTFGHYPMMWVRQAPGKGLEWVSEISPSGSYTYYADSVKGRFTISRDNSKNTLYLQMNSLRAEDTAVYYCAKDPRKFDYWGQGTLVTVSS

SEQ ID NO: 17152 - protein, 116 aa, Homo sapiens
EVQLLESGGGLVQPGGSLRLSCAASGFTFGLYPMMWVRQAPGKGLEWVSEISPSGSYTYYADSVKGRFTISRDNSKNTLYLQMNSLRAEDTAVYYCAKDPRKFDYWGQGTLVTVSS

SEQ ID NO: 17153 - protein, 116 aa, Homo sapiens
EVQLLESGGGLVQPGGSLRLSCAASGFTFKAYPIMWVRQAPGKGLEWVSEISPSGSYTYYADSVKGRFTISRDNSKNTLYLQMNSLRAEDTAVYYCAKDPRAFDYWGQGTLVTVSS

SEQ ID NO: 17154 - protein, 116 aa, Homo sapiens
EVQLLESGGGLVQPGGSLRLSCAASGFTFKAYPIMWVRQAPGKGLEWVSEISPSGSYTYYADSVKGRFTISRDNSKNTLYLQMNSLRAEDTAVYYCAKSPRKFDYWGQGTLVTVSS

SEQ ID NO: 17155 - protein, 116 aa, Homo sapiens
EVQLLESGGGLVQPGGSLRLSCAASGFTFKAYPIMWVRQAPGKGLEWVSEISPSGSYTYYADSVKGRFTISRDNSKNTLYLQMNSLRAEDTAVYYCAKTPRKFDYWGRGTLVTVSS

SEQ ID NO: 17156 - protein, 116 aa, Homo sapiens
EVQLLESGGGLVQPGGSLRLSCAASGFTFKAYPIMWVRQAPGKGLEWVSEISPSGSYTYYADSVKGRFTISRDNSKNTLYLQMNSLRAEDTAVYYCAKDPREFDYWGQGTLVTVSS

SEQ ID NO: 17157 - protein, 116 aa, Homo sapiens
EVQLLESGGGLVQPGGSLRLSCAASGFTFKAYPIMWVRQAPGKGLEWVSEISPSGSYTYYADSVKGRFTISRDNSKNTLYLQMNSLRAEDTAVYYCAKDPRRFDYWGQGTLVTVSS

SEQ ID NO: 17158 - protein, 116 aa, Homo sapiens
EVQLLESGGGLVQPGGSLRLSCAASGFTFKAYPIMWVRQAPGKGLEWVSEISPSGSYTYYADSVKGRFTISRDNSKNTLYLQMNSLRAEDTAVYYCAKDPRFFDYWGQGTLVTVSS

SEQ ID NO: 17159 - protein, 116 aa, Homo sapiens
EVQLLESGGGLVQPGGSLRLSCAASGFTFKAYPIMWVRQAPGKGLEWVSEISPSGSYTYYADSVKGRFTISRDNSKNTLYLQMNSLRAEDTAVYYCAKTPIKFDYWGQGTLVTVSS

SEQ ID NO: 17160 - protein, 116 aa, Homo sapiens
EVQLLESGGGLVQPGGSLRLSCAASGFTFKAYPIMWVRQAPGKGLEWVSEISPSGSHTYYADSVKGRFTISRDNSKNTLYLQMNSLRAEDTAVYYCAKDFSQFDYWGQGTLVTVSS

SEQ ID NO: 17161 - protein, 116 aa, Homo sapiens
EVQLLESGGGLVQPGGSLRLSCAASGFTFKAYPILWVRQAPGKGLEWVSEISPSGSYTYYADSVKGRFTISRDNSKNTLYLQMNSLRAEDTAVYYCAKDPRKFDYWGQGTLVTVSS

SEQ ID NO: 17162 - protein, 116 aa, Homo sapiens
EVQLLESGGGLVQPGGSLRLSCAASGFTFKAYPIMWVRQAPGKGLEWVSEISPSGKMKYYADSVKGRFTISRDNSKNTLYLQMNSLRAEDTAVYYCAKTPRKFDYWGRGTLVTVSS

SEQ ID NO: 17163 - protein, 116 aa, Homo sapiens
EVQLLESGGGLVQPGGSLRLSCAASGFTFKAYPIMWVRQAPGKGLEWVSEISPTGSYTYYADSVKGRFTISRDNSKNTLYLQMNSLRAEDTAVYYCAKSPRKFDYWGQGTLVTVSS

SEQ ID NO: 17164 - protein, 116 aa, Homo sapiens
EVQLLESGGGLVQPGGSLRLSCAASGFTFKAYPIMWVRQAPGKGLEWVSEISPSGSYTYYANSVKGRFTISRDNSKNTLYLQMNSLRAEDTAVYYCAKDPRAFDYWGQGTLVTVSS

SEQ ID NO: 17165 - protein, 116 aa, Homo sapiens
EVQLLESGGGLVQPGGSLRLSCAASGFTFKAYPIMWVRQAPGKGLEWVSEISPSGSYTYYADSVKGRFTISRDNSKNTLYLQMNSLRAEDTAVYYCAKTPRKFDYWGQGTLVTVSS

SEQ ID NO: 17166 - protein, 116 aa, Homo sapiens
EVQLLESGGGLVQPGGSLRLSCAASGFTFKAYPIMWVRQAPGKGLEWVSEISPSGQMRYYADSVKGRFTISRDNSKNTLYLQMNSLRAEDTAVYYCAKDPREFDYWGQGTLVTVSS

SEQ ID NO: 17167 - protein, 116 aa, Homo sapiens
EVQLLESGGGLVQPGGSLRLSCAASGFTFKAYPIMWVRQAPGKGLEWVSEISPSGRSRYYADSVKGRFTISRDNSKNTLYLQMNSLRAEDTAVYYCAKDPREFDYWGQGTLVTVSS

SEQ ID NO: 17168 - protein, 116 aa, Homo sapiens
EVQLLESGGGLVQPGGSLRLSCAASGFTFKAYPIMWVRQAPGKGLEWVSEISPSGRYSYYADSVKGRFTISRDNSKNTLYLQMNSLRAEDTAVYYCAKDPRRFDYWGQGTLVTVSS

SEQ ID NO: 17169 - protein, 116 aa, Homo sapiens
EVQLLESGGGLVQPGGSLRLSCAASGFTFKAYPIMWVRQAPGKGLEWVSEISPSGEARYYADSVKGRFTISRDNSKNTLYLQMNSLRAEDTAVYYCAKDPRAFDYWGQGTLVTVSS

SEQ ID NO: 17170 - protein, 116 aa, Homo sapiens
EVQLLESGGGLVQPGGSLRLSCAASGFTFRAYPIMWVRQAPGKGLEWVSEISPSGEKRYYADSVKGRFTISRDNSKNTLYLQMNSLRAEDTAVYYCAKDPRAFDYWGQGTLVTVSS

SEQ ID NO: 17171 - protein, 116 aa, Homo sapiens
EVQLLESGGGLVQPGGSLRLSCAASGFTFKAYPIMWVRQAPGKGLEWVSEISPSGEEEYYADSVKGRFTISRDNSKNTLYLQMNSLRAEDTAVYYCAKDPRAFDYWGQGTLVTVSS

SEQ ID NO: 17172 - protein, 116 aa, Homo sapiens
EVQLLESGGGLVQPGGSLRLSCAASGFTFKAYPIMWVRQAPGKGLEWVSEISPSGKKTYYADSVQGRFTISRDNSKNTLYLQMNSLRAEDTAVYYCAKDPRAFDYWGQGTLVTVSS

SEQ ID NO: 17173 - protein, 116 aa, Homo sapiens
EVQLLESGGGLVQPGGSLRLSCAASGFTFKAYPIMWVRQAPGKGLEWVSEISPSGKKKYYADSVKGRFTISRDNSKNTLYLQMNSLRAEDTAVYYCAKDPRAFDYWGQGTLVTVSS

SEQ ID NO: 17174 - protein, 116 aa, Homo sapiens
EVQLLESGGGLVQPGGSLRLSCAASGFTFKAYPIMWVRQAPGKGLEWVSEISPSGGYTYYADSVKGRFTISRDNSKNTLYLQMNSLRAEDTAVYYCAKDPRKFDYWGQGTLVTVSS

SEQ ID NO: 17175 - protein, 116 aa, Homo sapiens
EVQLLESGGGLVQPGGSLRLSCAASGFTFKAYPIMWVRQAPGKGLEWVSEISPSGSYTYYADEVKGRFTISRDNSKNTLYLQMNSLRAEDTAVYYCAKDPRKFDYWGQGTLVTVSS

SEQ ID NO: 17176 - protein, 116 aa, Homo sapiens
EVQLLESGGGLVQPGGSLRLSCAASGFTFKAYPIMWVRQAPGKGLEWVSEISPSGHNKYYADSVKGRFTISRDNSKNTLYLQMNSLRAEDTAVYYCAKDPRRFDYWGQGTLVTVSS

SEQ ID NO: 17177 - protein, 116 aa, Homo sapiens
EVQLLESGGGLVQPGGSLRLSCAASGFTFKAYPIMWVRQAPGKGLEWVSEISPSGSETYYADSVKGRFTISRDNSKNTLYLQMNSLRAEDTAVYYCAKDPRKFDYWGQGTLVTVSS

SEQ ID NO: 17178 - protein, 116 aa, Homo sapiens
EVQLLESGGGLVQPGGSLRLSCAASGFTFKAYPIMWVRQAPGKGLEWVSEISPSGSRTYYADSVKGRFTISRDNSKNTLYLQMNSLRAEDTAVYYCAKDPRKFDYWGQGTLVTVSS

SEQ ID NO: 17179 - protein, 616 aa, Artificial Sequence
  source: /note="Description of Artificial Sequence: Synthetic polypeptide"
MATGSRTSLLLAFGLLCLPWLQEGSAEVQLVQSGAEVKKPGASVKVSCKASGDTFTTYVIHWMRQAPGQGLEWIGYINPYNDGTKYNEKFKGRVTITSDKSTSTAYMELSSLRSEDTAVYYCARIYYDYDGDYWGQGTLVTVSSGGGGSGGGGSGGGGSDIQMTQSPSSLSASVGDRVTITCITSNDIDDDMNWYQQKPGKAPKLLISEGNTLRPGVPSRFSGSGYGTDFTLTISSLQPEDVATYYCFQSDNLPYTFGQGTKVEIKAAAPDVQDCPECTLQENPFFSQPGAPILQCMGCCFSRAYPTPLRSKKTMLVQKNVTSESTCCVAKSYNRVTVMGGFKVENHTACHCSTCGGGGSGGGGSGGGGSGGGGSQVQLKQSGPGLVQPSQSLSITCTVSGFSLTNYGVHWVRQSPGKGLEWLGVIWSGGNTDYNTPFTSRLSINKDNSKSQVFFKMNSLQSNDTAIYYCARALTYYDYEFAYWGQGTLVTVSAGGGGSGGGGSGGGGSDILLTQSPVILSVSPGERVSFSCRASQSIGTNIHWYQQRTNGSPRLLIKYASESISGIPSRFSGSGSGTDFTLSINSVESEDIADYYCQQNNNWPTTFGAGTKLELK

SEQ ID NO: 17180 - protein, 655 aa, Artificial Sequence
  source: /note="Description of Artificial Sequence: Synthetic polypeptide"
MATGSRTSLLLAFGLLCLPWLQEGSAEVQLVQSGAEVKKPGASVKVSCKASGDTFTTYVIHWMRQAPGQGLEWIGYINPYNDGTKYNEKFKGRVTITSDKSTSTAYMELSSLRSEDTAVYYCARIYYDYDGDYWGQGTLVTVSSGGGGSGGGGSGGGGSDIQMTQSPSSLSASVGDRVTITCITSNDIDDDMNWYQQKPGKAPKLLISEGNTLRPGVPSRFSGSGYGTDFTLTISSLQPEDVATYYCFQSDNLPYTFGQGTKVEIKAAASKEPLRPRCRPINATLAVEKEGCPVCITVNTTICAGYCPTMTRVLQGVLPALPQVVCNYRDVRFESIRLPGCPRGVNPVVSYAVALSCQCALCRRSTTDCGGPKDHPLTCDDPRFQDSSSSKAPPPSLPSPSRLPGPSDTPILPQQVQLKQSGPGLVQPSQSLSITCTVSGFSLTNYGVHWVRQSPGKGLEWLGVIWSGGNTDYNTPFTSRLSINKDNSKSQVFFKMNSLQSNDTAIYYCARALTYYDYEFAYWGQGTLVTVSAGGGGSGGGGSGGGGSDILLTQSPVILSVSPGERVSFSCRASQSIGTNIHWYQQRTNGSPRLLIKYASESISGIPSRFSGSGSGTDFTLSINSVESEDIADYYCQQNNNWPTTFGAGTKLELK

SEQ ID NO: 17181 - protein, 655 aa, Artificial Sequence
  source: /note="Description of Artificial Sequence: Synthetic polypeptide"
MATGSRTSLLLAFGLLCLPWLQEGSADIQMTQSPSSLSASVGDRVTITCITSNDIDDDMNWYQQKPGKAPKLLISEGNTLRPGVPSRFSGSGYGTDFTLTISSLQPEDVATYYCFQSDNLPYTFGQGTKVEIKGGGGSGGGGSGGGGSEVQLVQSGAEVKKPGASVKVSCKASGDTFTTYVIHWMRQAPGQGLEWIGYINPYNDGTKYNEKFKGRVTITSDKSTSTAYMELSSLRSEDTAVYYCARIYYDYDGDYWGQGTLVTVSSAAASKEPLRPRCRPINATLAVEKEGCPVCITVNTTICAGYCPTMTRVLQGVLPALPQVVCNYRDVRFESIRLPGCPRGVNPVVSYAVALSCQCALCRRSTTDCGGPKDHPLTCDDPRFQDSSSSKAPPPSLPSPSRLPGPSDTPILPQQVQLKQSGPGLVQPSQSLSITCTVSGFSLTNYGVHWVRQSPGKGLEWLGVIWSGGNTDYNTPFTSRLSINKDNSKSQVFFKMNSLQSNDTAIYYCARALTYYDYEFAYWGQGTLVTVSAGGGGSGGGGSGGGGSDILLTQSPVILSVSPGERVSFSCRASQSIGTNIHWYQQRTNGSPRLLIKYASESISGIPSRFSGSGSGTDFTLSINSVESEDIADYYCQQNNNWPTTFGAGTKLELK

SEQ ID NO: 17182 - protein, 617 aa, Artificial Sequence
  source: /note="Description of Artificial Sequence: Synthetic polypeptide"
MATGSRTSLLLAFGLLCLPWLQEGSADIQMTQSPSSLSASVGDRVTITCITSNDIDDDMNWYQQKPGKAPKLLISEGNTLRPGVPSRFSGSGYGTDFTLTISSLQPEDVATYYCFQSDNLPYTFGQGTKVEIKGGGGSGGGGSGGGGSEVQLVQSGAEVKKPGASVKVSCKASGDTFTTYVIHWMRQAPGQGLEWIGYINPYNDGTKYNEKFKGRVTITSDKSTSTAYMELSSLRSEDTAVYYCARIYYDYDGDYWGQGTLVTVSSAAAPDVQDCPECTLQENPFFSQPGAPILQCMGCCFSRAYPTPLRSKKTMLVQKNVTSESTCCVAKSYNRVTVMGGFKVENHTACHCSTCGGGGSGGGGSGGGGSGGGGSLEADILMTQSPSSMSVSLGDTVSITCHSSQDINSNIGWLQQRPGKSFKGLIYHGTNLDDEVPSRFSGSGSGADYSLTISSLESEDFADYYCVQYAQFPWTFGGGTKLEIKRGGGGSGGGGSGGGGSDVQLQESGPSLVKPSQSLSLTCTVTGYSITSDFAWNWIRQFPGNKLEWMGYISYSGNTRYNPSLKSRISITRDTSKNQFFLQLNSVTIEDTATYYCVTAGRGFPYWGQGTLVTVSA

SEQ ID NO: 17183 - protein, 656 aa, Artificial Sequence
  source: /note="Description of Artificial Sequence: Synthetic polypeptide"
MATGSRTSLLLAFGLLCLPWLQEGSADIQMTQSPSSLSASVGDRVTITCITSNDIDDDMNWYQQKPGKAPKLLISEGNTLRPGVPSRFSGSGYGTDFTLTISSLQPEDVATYYCFQSDNLPYTFGQGTKVEIKGGGGSGGGGSGGGGSEVQLVQSGAEVKKPGASVKVSCKASGDTFTTYVIHWMRQAPGQGLEWIGYINPYNDGTKYNEKFKGRVTITSDKSTSTAYMELSSLRSEDTAVYYCARIYYDYDGDYWGQGTLVTVSSAAASKEPLRPRCRPINATLAVEKEGCPVCITVNTTICAGYCPTMTRVLQGVLPALPQVVCNYRDVRFESIRLPGCPRGVNPVVSYAVALSCQCALCRRSTTDCGGPKDHPLTCDDPRFQDSSSSKAPPPSLPSPSRLPGPSDTPILPQLEADILMTQSPSSMSVSLGDTVSITCHSSQDINSNIGWLQQRPGKSFKGLIYHGTNLDDEVPSRFSGSGSGADYSLTISSLESEDFADYYCVQYAQFPWTFGGGTKLEIKRGGGGSGGGGSGGGGSDVQLQESGPSLVKPSQSLSLTCTVTGYSITSDFAWNWIRQFPGNKLEWMGYISYSGNTRYNPSLKSRISITRDTSKNQFFLQLNSVTIEDTATYYCVTAGRGFPYWGQGTLVTVSA

SEQ ID NO: 17184 - protein, 616 aa, Artificial Sequence
  source: /note="Description of Artificial Sequence: Synthetic polypeptide"
MATGSRTSLLLAFGLLCLPWLQEGSADILMTQSPSSMSVSLGDTVSITCHSSQDINSNIGWLQQRPGKSFKGLIYHGTNLDDEVPSRFSGSGSGADYSLTISSLESEDFADYYCVQYAQFPWTFGGGTKLEIKRGGGGSGGGGSGGGGSDVQLQESGPSLVKPSQSLSLTCTVTGYSITSDFAWNWIRQFPGNKLEWMGYISYSGNTRYNPSLKSRISITRDTSKNQFFLQLNSVTIEDTATYYCVTAGRGFPYWGQGTLVTVSAAAAPDVQDCPECTLQENPFFSQPGAPILQCMGCCFSRAYPTPLRSKKTMLVQKNVTSESTCCVAKSYNRVTVMGGFKVENHTACHCSTCGGGGSGGGGSGGGGSGGGGSLDDIQMTQSPSSLSASVGDRVTITCITSNDIDDDMNWYQQKPGKAPKLLISEGNTLRPGVPSRFSGSGYGTDFTLTISSLQPEDVATYYCFQSDNLPYTFGQGTKVEIKGGGGSGGGGSGGGGSEVQLVQSGAEVKKPGASVKVSCKASGDTFTTYVIHWMRQAPGQGLEWIGYINPYNDGTKYNEKFKGRVTITSDKSTSTAYMELSSLRSEDTAVYYCARIYYDYDGDYWGQGTLVTVSS

SEQ ID NO: 17185 - protein, 658 aa, Artificial Sequence
  source: /note="Description of Artificial Sequence: Synthetic polypeptide"
MATGSRTSLLLAFGLLCLPWLQEGSAGSADILMTQSPSSMSVSLGDTVSITCHSSQDINSNIGWLQQRPGKSFKGLIYHGTNLDDEVPSRFSGSGSGADYSLTISSLESEDFADYYCVQYAQFPWTFGGGTKLEIKRGGGGSGGGGSGGGGSDVQLQESGPSLVKPSQSLSLTCTVTGYSITSDFAWNWIRQFPGNKLEWMGYISYSGNTRYNPSLKSRISITRDTSKNQFFLQLNSVTIEDTATYYCVTAGRGFPYWGQGTLVTVSAAAASKEPLRPRCRPINATLAVEKEGCPVCITVNTTICAGYCPTMTRVLQGVLPALPQVVCNYRDVRFESIRLPGCPRGVNPVVSYAVALSCQCALCRRSTTDCGGPKDHPLTCDDPRFQDSSSSKAPPPSLPSPSRLPGPSDTPILPQLDDIQMTQSPSSLSASVGDRVTITCITSNDIDDDMNWYQQKPGKAPKLLISEGNTLRPGVPSRFSGSGYGTDFTLTISSLQPEDVATYYCFQSDNLPYTFGQGTKVEIKGGGGSGGGGSGGGGSEVQLVQSGAEVKKPGASVKVSCKASGDTFTTYVIHWMRQAPGQGLEWIGYINPYNDGTKYNEKFKGRVTITSDKSTSTAYMELSSLRSEDTAVYYCARIYYDYDGDYWGQGTLVTVSS

SEQ ID NO: 17186 - protein, 356 aa, Artificial Sequence
  source: /note="Description of Artificial Sequence: Synthetic polypeptide"
MATGSRTSLLLAFGLLCLPWLQEGSAEVQLVQSGAEVKKPGASVKVSCKASGFSLTNYGVHWMRQAPGQGLEWIGVIWSGGNTDYNTPFTSRVTITSDKSTSTAYMELSSLRSEDTAVYYCARALTYYDYEFAYWGQGTLVTVSSGGGGSGGGGSGGGGSDIQMTQSPSSLSASVGDRVTITCRASQSIGTNIHWYQQKPGKAPKLLIKYASESISGVPSRFSGSGYGTDFTLTISSLQPEDVATYYCQQNNNWPTTFGQGTKVEIKAAAPDVQDCPECTLQENPFFSQPGAPILQCMGCCFSRAYPTPLRSKKTMLVQKNVTSESTCCVAKSYNRVTVMGGFKVENHTACHCSTC

SEQ ID NO: 17187 - protein, 415 aa, Artificial Sequence
  source: /note="Description of Artificial Sequence: Synthetic polypeptide"
MATGSRTSLLLAFGLLCLPWLQEGSAEVQLVQSGAEVKKPGASVKVSCKASGFSLTNYGVHWMRQAPGQGLEWIGVIWSGGNTDYNTPFTSRVTITSDKSTSTAYMELSSLRSEDTAVYYCARALTYYDYEFAYWGQGTLVTVSSGGGGSGGGGSGGGGSDIQMTQSPSSLSASVGDRVTITCRASQSIGTNIHWYQQKPGKAPKLLIKYASESISGVPSRFSGSGYGTDFTLTISSLQPEDVATYYCQQNNNWPTTFGQGTKVEIKAAASKEPLRPRCRPINATLAVEKEGCPVCITVNTTICAGYCPTMTRVLQGVLPALPQVVCNYRDVRFESIRLPGCPRGVNPVVSYAVALSCQCALCRRSTTDCGGPKDHPLTCDDPRFQDSSSSKAPPPSLPSPSRLPGPSDTPILPQ

SEQ ID NO: 17188 - protein, 618 aa, Artificial Sequence [sequence omitted]

SEQ ID NO: 17189 - protein, 112 aa, Artificial Sequence
  source: /note="Description of Artificial Sequence: Synthetic polypeptide"
QVQLQESGPGLVKPSQTLSLTCTVSGGSISTEYAWNWIRQPPGKGLEWIGYIGYTGRTNYSPSLKSRITISVDTSKNQFSLQLSSVTAEDTATYYCARMDYWGQGTLVTVSS

SEQ ID NO: 17190 - protein, 246 aa, Artificial Sequence
  source: /note="Description of Artificial Sequence: Synthetic polypeptide"
QVKLQQSGAELVRSGTSVKLSCTASGFNIKDSYMHWLRQGPEQGLEWIGWIDPENGDTEYAPKFQGKATFTTDTSSNTAYLQLSSLTSEDTAVYYCNEGTPTGPYYFDYWGQGTTVTVSSGGGGSGGGGSGGGGSENVLTQSPAIMSASPGEKVTITCSASSSVSYMHWFQQKPGTSPKLWIYSTSNLASGVPARFSGSGSGTSYSLTISRMEAEDAATYYCQQRSSYPLTFGAGTKLELKRAAAH

SEQ ID NO: 17191 - protein, 506 aa, Artificial Sequence
  source: /note="Description of Artificial Sequence: Synthetic polypeptide"
EFATMAVMAPRTLVLLLSGALALTQTWAGDIKLQQSGAELARPGASVKMSCKTSGYTFTRYTMHWVKQRPGQGLEWIGYINPSRGYTNYNQKFKDKATLTTDKSSSTAYMQLSSLTSEDSAVYYCARYYDDHYCLDYWGQGTTLTVSSVEGGSGGSGGSGGSGGVDDIQLTQSPAIMSASPGEKVTMTCRASSSVSYMNWYQQKSGTSPKRWIYDTSKVASGVPYRFSGSGSGTSYSLTISSMEAEDAATYYCQQWSSNPLTFGAGTKLELKAAEPKSSDKTHTCPPCPAPELLGGPSVFLFPPKPKDTLMISRTPEVTCVVVDVSHEDPEVKFNWYVDGVEVHNAKTKPREEQYNSTYRVVSVLTVLHQDWLNGKEYKCKVSNKALPAPIEKTISKAKGQPREPQVYVLPPSRDELTKNQVSLLCLVKGFYPSDIAVEWESNGQPENNYLTWPPVLDSDGSFFLYSKLTVDKSRWQQGNVFSCSVMHEALHNHYTQKSLSLSPGK

SEQ ID NO: 17192 - protein, 506 aa, Artificial Sequence
  source: /note="Description of Artificial Sequence: Synthetic polypeptide"
EFATMAVMAPRTLVLLLSGALALTQTWAGQVQLQQSGAELARPGASVKMSCKASGYTFTRYTMHWVKQRPGQGLEWIGYINPSRGYTNYNQKFKDKATLTTDKSSSTAYMQLSSLTSEDSAVYYCARYYDDHYSLDYWGQGTTLTVSSAKTTPKLEEGEFSEARVDIVLTQSPAIMSASPGEKVTMTCSASSSVSYMNWYQQKSGTSPKRWIYDTSKLASGVPAHFRGSGSGTSYSLTISGMEAEDAATYYCQQWSSNPFTFGSGTKLEINRAAEPKSSDKTHTCPPCPAPELLGGPSVFLFPPKPKDTLMISRTPEVTCVVVDVSHEDPEVKFNWYVDGVEVHNAKTKPREEQYNSTYRVVSVLTVLHQDWLNGKEYKCKVSNKALPAPIEKTISKAKGQPREPQVYVLPPSRDELTKNQVSLLCLVKGFYPSDIAVEWESNGQPENNYLTWPPVLDSDGSFFLYSKLTVDKSRWQQGNVFSCSVMHEALHNHYTQKSLSLSPGK

SEQ ID NO: 17193 - protein, 498 aa, Artificial Sequence
  source: /note="Description of Artificial Sequence: Synthetic polypeptide"
EFATMAVMAPRTLVLLLSGALALTQTWAGQVQLQQSGAELARPGASVKMSCKASGYTFTRYTMHWVKQRPGQGLEWIGYINPSRGYTNYNQKFKDKATLTTDKSSSTAYMQLSSLTSEDSAVYYCARYYDDHYSLDYWGQGTTLTVSSAKTTPKLGGDIVLTQSPAIMSASPGEKVTMTCSASSSVSYMNWYQQKSGTSPKRWIYDTSKLASGVPAHFRGSGSGTSYSLTISGMEAEDAATYYCQQWSSNPFTFGSGTKLEINRAAEPKSSDKTHTCPPCPAPELLGGPSVFLFPPKPKDTLMISRTPEVTCVVVDVSHEDPEVKFNWYVDGVEVHNAKTKPREEQYNSTYRVVSVLTVLHQDWLNGKEYKCKVSNKALPAPIEKTISKAKGQPREPQVYVLPPSRDELTKNQVSLLCLVKGFYPSDIAVEWESNGQPENNYLTWPPVLDSDGSFFLYSKLTVDKSRWQQGNVFSCSVMHEALHNHYTQKSLSLSPGK

SEQ ID NO: 17194 - protein, 513 aa, Artificial Sequence
  source: /note="Description of Artificial Sequence: Synthetic polypeptide"
EFATMAVMAPRTLVLLLSGALALTQTWAGDIQLTQSPASLAVSLGQRATISCKASQSVDYDGDSYLNWYQQIPGQPPKLLIYDASNLVSGIPPRFSGSGSGTDFTLNIHPVEKVDAATYHCQQSTEDPWTFGGGTKLEIKGGGGSGGGGSGGGGSQVQLQQSGAELVRPGSSVKISCKASGYAFSSYWMNWVKQRPGQGLEWIGQIWPGDGDTNYNGKFKGKATLTADESSSTAYMQLSSLASEDSAVYFCARRETTTVGRYYYAMDYWGQGTTVTVSSAAEPKSSDKTHTCPPCPAPELLGGPSVFLFPPKPKDTLMISRTPEVTCVVVDVSHEDPEVKFNWYVDGVEVHNAKTKPREEQYNSTYRVVSVLTVLHQDWLNGKEYKCKVSNKALPAPIEKTISKAKGQPREPQVYVLPPSRDELTKNQVSLLCLVKGFYPSDIAVEWESNGQPENNYLTWPPVLDSDGSFFLYSKLTVDKSRWQQGNVFSCSVMHEALHNHYTQKSLSLSPGK

SEQ ID NO: 17195 - protein, 503 aa, Artificial Sequence
  source: /note="Description of Artificial Sequence: Synthetic polypeptide"
EFATMAVMAPRTLVLLLSGALALTQTWAGQIVLTQSPAIMSASPGEKVTMTCSASSSVSYMNWYQQKSGTSPKRWIYDTSKLASGVPAHFRGSGSGTSYSLTISGMEAEDAATYYCQQWSSNPFTFGSGTKLEINGGGGSGGGGSGGGGSQVQLQQSGAELARPGASVKMSCKASGYTFTRYTMHWVKQRPGQGLEWIGYINPSRGYTNYNQKFKDKATLTTDKSSSTAYMQLSSLTSEDSAVYYCARYYDDHYSLDYWGQGTTLTVSSAAEPKSSDKTHTCPPCPAPELLGGPSVFLFPPKPKDTLMISRTPEVTCVVVDVSHEDPEVKFNWYVDGVEVHNAKTKPREEQYNSTYRVVSVLTVLHQDWLNGKEYKCKVSNKALPAPIEKTISKAKGQPREPQVYVLPPSRDELTKNQVSLLCLVKGFYPSDIAVEWESNGQPENNYLTWPPVLDSDGSFFLYSKLTVDKSRWQQGNVFSCSVMHEALHNHYTQKSLSLSPGK

SEQ ID NO: 17196 - protein, 503 aa, Artificial Sequence
  source: /note="Description of Artificial Sequence: Synthetic polypeptide"
EFATMAVMAPRTLVLLLSGALALTQTWAGQIVLTQSPAIMSASPGEKVTMTCSASSSVSYMNWYQQKSGTSPKRWIYDTSKLASGVPAHFRGSGSGTSYSLTISGMEAEDAATYYCQQWSSNPFTFGCGTKLEINGGGGSGGGGSGGGGSQVQLQQSGAELARPGASVKMSCKASGYTFTRYTMHWVKQRPGQCLEWIGYINPSRGYTNYNQKFKDKATLTTDKSSSTAYMQLSSLTSEDSAVYYCARYYDDHYCLDYWGQGTTLTVSSAAEPKSSDKTHTCPPCPAPELLGGPSVFLFPPKPKDTLMISRTPEVTCVVVDVSHEDPEVKFNWYVDGVEVHNAKTKPREEQYNSTYRVVSVLTVLHQDWLNGKEYKCKVSNKALPAPIEKTISKAKGQPREPQVYVLPPSRDELTKNQVSLLCLVKGFYPSDIAVEWESNGQPENNYLTWPPVLDSDGSFFLYSKLTVDKSRWQQGNVFSCSVMHEALHNHYTQKSLSLSPGK

SEQ ID NO: 17197 - protein, 503 aa, Artificial Sequence
  source: /note="Description of Artificial Sequence: Synthetic polypeptide"
EFATMAVMAPRTLVLLLSGALALTQTWAGQIVLTQSPAIMSASPGEKVTMTCSASSSVSYMNWYQQKSGTSPKRWIYDTSKLASGVPAHFRGSGSGTSYSLTISGMEAEDAATYYCQQWSSNPFTFGCGTKLEINGGGGSGGGGSGGGGSQVQLQQSGAELARPGASVKMSCKASGYTFTRYTMHWVKQRPGQCLEWIGYINPSRGYTNYNQKFKDKATLTTDKSSSTAYMQLSSLTSEDSAVYYCARYYDDHYSLDYWGQGTTLTVSSAAEPKSSDKTHTCPPCPAPELLGGPSVFLFPPKPKDTLMISRTPEVTCVVVDVSHEDPEVKFNWYVDGVEVHNAKTKPREEQYNSTYRVVSVLTVLHQDWLNGKEYKCKVSNKALPAPIEKTISKAKGQPREPQVYVLPPSRDELTKNQVSLLCLVKGFYPSDIAVEWESNGQPENNYLTWPPVLDSDGSFFLYSKLTVDKSRWQQGNVFSCSVMHEALHNHYTQKSLSLSPGK

SEQ ID NO: 17198 - protein, 205 aa, Artificial Sequence
  source: /note="Description of Artificial Sequence: Synthetic polypeptide"
MLPAPKNLVVSEVTEDSARLSWDDPWAFYESFLIQYQESEKVGEAIVLTVPGSERSYDLTGLKPGTEYTVSIYGVHNVYKDTNMRGLPLSAIFTTGGGGSGGGGSGGGGSGGGGSMLPAPKNLVVSRVTEDSARLSWTAPDAAFDSFWIRYDEVVVGGEAIVLTVPGSERSYDLTGLKPGTEYYVNILGVKGGSISVPLSAIFTT

SEQ ID NO: 17199 - protein, 204 aa, Artificial Sequence
  source: /note="Description of Artificial Sequence: Synthetic polypeptide"
MLPAPKNLVVSEVTEDSARLSWDDPWAFYESFLIQYQESEKVGEAIVLTVPGSERSYDLTGLKPGTEYTVSIYGVHNVYKDTNMRGLPLSAIFTTGGGGSGGGGSGGGGSGGGGSLPAPKNLVVSRVTEDSARLSWTAPDAAFDSFWIRYFEFLGSGEAIVLTVPGSERSYDLTGLKPGTEYVVNIMGVKGGKISPPLSAIFTT

SEQ ID NO: 17200 - protein, 205 aa, Artificial Sequence
  source: /note="Description of Artificial Sequence: Synthetic polypeptide"
MLPAPKNLVVSEVTEDSARLSWDDPWAFYESFLIQYQESEKVGEAIVLTVPGSERSYDLTGLKPGTEYTVSIYGVHNVYKDTNMRGLPLSAIFTTGGGGSGGGGSGGGGSGGGGSMLPAPKNLVVSRVTEDSARLSWTAPDAAFDSFWIRYFEFLGSGEAIVLTVPGSERSYDLTGLKPGTEYVVQIIGVKGGHISLPLSAIFTT

SEQ ID NO: 17201 - protein, 205 aa, Artificial Sequence
  source: /note="Description of Artificial Sequence: Synthetic polypeptide"
MLPAPKNLVVSEVTEDSARLSWDDPWAFYESFLIQYQESEKVGEAIVLTVPGSERSYDLTGLKPGTEYTVSIYGVHNVYKDTNMRGLPLSAIFTTGGGGSGGGGSGGGGSGGGGSMLPAPKNLVVSRVTEDSARLSWTAPDAAFDSFFIRYDEFLRSGEAIVLTVPGSERSYDLTGLKPGTEYWVTILGVKGGLVSTPLSAIFTT

SEQ ID NO: 17202 - protein, 205 aa, Artificial Sequence
  source: /note="Description of Artificial Sequence: Synthetic polypeptide"
MLPAPKNLVVSEVTEDSARLSWADPHGFYDSFLIQYQESEKVGEAIVLTVPGSERSYDLTGLKPGTEYTVSIYGVHNVYKDTNMRGLPLSAIFTTGGGGSGGGGSGGGGSGGGGSMLPAPKNLVVSRVTEDSARLSWTAPDAAFDSFWIRYFEFLGSGEAIVLTVPGSERSYDLTGLKPGTEYVVNIMGVKGGKISPPLSAIFTT

SEQ ID NO: 17203 - protein, 205 aa, Artificial Sequence
  source: /note="Description of Artificial Sequence: Synthetic polypeptide"
MLPAPKNLVVSEVTEDSARLSWADPHGFYDSFLIQYQESEKVGEAIVLTVPGSERSYDLTGLKPGTEYTVSIYGVHNVYKDTNMRGLPLSAIFTTGGGGSGGGGSGGGGSGGGGSMLPAPKNLVVSRVTEDSARLSWTAPDAAFDSFWIRYFEFLGSGEAIVLTVPGSERSYDLTGLKPGTEYVVQIIGVKGGHISLPLSAIFTT

SEQ ID NO: 17204 - protein, 194 aa, Artificial Sequence
  source: /note="Description of Artificial Sequence: Synthetic polypeptide"
MLPAPKNLVVSEVTEDSARLSWDDPWAFYESFLIQYQESEKVGEAIVLTVPGSERSYDLTGLKPGTEYTVSIYGVHNVYKDTNMRGLPLSAIFTTAPAPAPAPAPLPAPKNLVVSRVTEDSARLSWTAPDAAFDSFWIRYFEFLGSGEAIVLTVPGSERSYDLTGLKPGTEYVVNIMGVKGGKISPPLSAIFTT

SEQ ID NO: 17205 - protein, 194 aa, Artificial Sequence
  source: /note="Description of Artificial Sequence: Synthetic polypeptide"
MLPAPKNLVVSEVTEDSARLSWDDPWAFYESFLIQYQESEKVGEAIVLTVPGSERSYDLTGLKPGTEYTVSIYGVHNVYKDTNMRGLPLSAIFTTAPAPAPAPAPLPAPKNLVVSRVTEDSARLSWTAPDAAFDSFWIRYDEVVVGGEAIVLTVPGSERSYDLTGLKPGTEYYVNILGVKGGSISVPLSAIFTT

SEQ ID NO: 17206 - protein, 195 aa, Artificial Sequence
  source: /note="Description of Artificial Sequence: Synthetic polypeptide"
MLPAPKNLVVSEVTEDSARLSWADPHGFYDSFLIQYQESEKVGEAIVLTVPGSERSYDLTGLKPGTEYTVSIYGVHNVYKDTNMRGLPLSAIFTTAPAPAPAPAPMLPAPKNLVVSRVTEDSARLSWTAPDAAFDSFWIRYFEFLGSGEAIVLTVPGSERSYDLTGLKPGTEYVVNIMGVKGGKISPPLSAIFTT

SEQ ID NO: 17207 - protein, 194 aa, Artificial Sequence
  source: /note="Description of Artificial Sequence: Synthetic polypeptide"
MLPAPKNLVVSEVTEDSARLSWADPHGFYDSFLIQYQESEKVGEAIVLTVPGSERSYDLTGLKPGTEYTVSIYGVHNVYKDTNMRGLPLSAIFTTAPAPAPAPAPLPAPKNLVVSRVTEDSARLSWTAPDAAFDSFWIRYDEVVVGGEAIVLTVPGSERSYDLTGLKPGTEYYVNILGVKGGSISVPLSAIFTT

SEQ ID NO: 17208 - protein, 194 aa, Artificial Sequence
  source: /note="Description of Artificial Sequence: Synthetic polypeptide"
MLPAPKNLVVSEVTEDSARLSWDDPWAFYESFLIQYQESEKVGEAIVLTVPGSERSYDLTGLKPGTEYTVSIYGVHNVYKDTNIRGLPLSAIFTTAPAPAPAPAPLPAPKNLVVSRVTEDSARLSWTAPDAAFDSFWIRYFEFLGSGEAIVLTVPGSERSYDLTGLKPGTEYVVNILGVKGGKISPPLSAIFTT

SEQ ID NO: 17209 - protein, 194 aa, Artificial Sequence
  source: /note="Description of Artificial Sequence: Synthetic polypeptide"
MLPAPKNLVVSEVTEDSARLSWDDPWAFYESFLIQYQESEKVGEAIVLTVPGSERSYDLTGLKPGTEYTVSIYGVHNVYKDTNIRGLPLSAIFTTAPAPAPAPAPLPAPKNLVVSRVTEDSARLSWTAPDAAFDSFWIRYFEFVGSGEAIVLTVPGSERSYDLTGLKPGTEYVVNILGVKGGSISPPLSAIFTT

SEQ ID NO: 17210 - protein, 194 aa, Artificial Sequence
  source: /note="Description of Artificial Sequence: Synthetic polypeptide"
MLPAPKNLVVSEVTEDSARLSWDDPWAFYESFLIQYQESEKVGEAIVLTVPGSERSYDLTGLKPGTEYTVSIYGVHNVYKDTNIRGLPLSAIFTTAPAPAPAPAPLPAPKNLVVSRVTEDSARLSWTAPDAAFDSFWIRYFEFVSKGDAIVLTVPGSERSYDLTGLKPGTEYVVNILGVKGGSISPPLSAIFTT

SEQ ID NO: 17211 - protein, 194 aa, Artificial Sequence
  source: /note="Description of Artificial Sequence: Synthetic polypeptide"
MLPAPKNLVVSEVTEDSARLSWDDPWAFYESFLIQYQESEKVGEAIVLTVPGSERSYDLTGLKPGTEYTVSIYGVHNVYKDTNIRGLPLSAIFTTAPAPAPAPAPLPAPKNLVVSRVTEDSARLSWTAPDAAFDSFWIRYFEFLGSGEAIVLTVPGSERSYDLTGLKPGTEYVVNILSVKGGSISPPLSAIFTT

SEQ ID NO: 17212 - protein, 194 aa, Artificial Sequence
  source: /note="Description of Artificial Sequence: Synthetic polypeptide"
MLPAPKNLVVSEVTEDSARLSWDDPHAFYESFLIQYQESEKVGEAIVLTVPGSERSYDLTGLKPGTEYTVSIYGVHNVYKDTNIRGLPLSAIFTTAPAPAPAPAPLPAPKNLVVSRVTEDSARLSWTAPDAAFDSFWIRYFEFLGSGEAIVLTVPGSERSYDLTGLKPGTEYVVNILGVKGGKISPPLSAIFTT

SEQ ID NO: 17213 - protein, 194 aa, Artificial Sequence
  source: /note="Description of Artificial Sequence: Synthetic polypeptide"
MLPAPKNLVVSEVTEDSARLSWDDPHAFYESFLIQYQESEKVGEAIVLTVPGSERSYDLTGLKPGTEYTVSIYGVHNVYKDTNIRGLPLSAIFTTAPAPAPAPAPLPAPKNLVVSRVTEDSARLSWTAPDAAFDSFWIRYFEFVGSGEAIVLTVPGSERSYDLTGLKPGTEYVVNILGVKGGSISPPLSAIFTT

SEQ ID NO: 17214 - protein, 194 aa, Artificial Sequence
  source: /note="Description of Artificial Sequence: Synthetic polypeptide"
MLPAPKNLVVSEVTEDSARLSWDDPHAFYESFLIQYQESEKVGEAIVLTVPGSERSYDLTGLKPGTEYTVSIYGVHNVYKDTNIRGLPLSAIFTTAPAPAPAPAPLPAPKNLVVSRVTEDSARLSWTAPDAAFDSFWIRYFEFVSKGDAIVLTVPGSERSYDLTGLKPGTEYVVNILGVKGGSISPPLSAIFTT

SEQ ID NO: 17215 - protein, 194 aa, Artificial Sequence
  source: /note="Description of Artificial Sequence: Synthetic polypeptide"
MLPAPKNLVVSEVTEDSARLSWDDPHAFYESFLIQYQESEKVGEAIVLTVPGSERSYDLTGLKPGTEYTVSIYGVHNVYKDTNIRGLPLSAIFTTAPAPAPAPAPLPAPKNLVVSRVTEDSARLSWTAPDAAFDSFWIRYFEFLGSGEAIVLTVPGSERSYDLTGLKPGTEYVVNILSVKGGSISPPLSAIFTT

SEQ ID NO: 17216 - protein, 194 aa, Artificial Sequence
  source: /note="Description of Artificial Sequence: Synthetic polypeptide"
MLPAPKNLVVSEVTEDSARLSWADPHGFYDSFLIQYQESEKVGEAIVLTVPGSERSYDLTGLKPGTEYTVSIYGVHNVYKDTNIRGLPLSAIFTTAPAPAPAPAPLPAPKNLVVSRVTEDSARLSWTAPDAAFDSFWIRYFEFLGSGEAIVLTVPGSERSYDLTGLKPGTEYVVNILGVKGGKISPPLSAIFTT

SEQ ID NO: 17217 - protein, 194 aa, Artificial Sequence
  source: /note="Description of Artificial Sequence: Synthetic polypeptide"
MLPAPKNLVVSEVTEDSARLSWADPHGFYDSFLIQYQESEKVGEAIVLTVPGSERSYDLTGLKPGTEYTVSIYGVHNVYKDTNIRGLPLSAIFTTAPAPAPAPAPLPAPKNLVVSRVTEDSARLSWTAPDAAFDSFWIRYFEFVGSGEAIVLTVPGSERSYDLTGLKPGTEYVVNILGVKGGSISPPLSAIFTT

SEQ ID NO: 17218 - protein, 194 aa, Artificial Sequence
  source: /note="Description of Artificial Sequence: Synthetic polypeptide"
MLPAPKNLVVSEVTEDSARLSWADPHGFYDSFLIQYQESEKVGEAIVLTVPGSERSYDLTGLKPGTEYTVSIYGVHNVYKDTNIRGLPLSAIFTTAPAPAPAPAPLPAPKNLVVSRVTEDSARLSWTAPDAAFDSFWIRYFEFVSKGDAIVLTVPGSERSYDLTGLKPGTEYVVNILGVKGGSISPPLSAIFTT

SEQ ID NO: 17219 - protein, 194 aa, Artificial Sequence
  source: /note="Description of Artificial Sequence: Synthetic polypeptide"
MLPAPKNLVVSEVTEDSARLSWADPHGFYDSFLIQYQESEKVGEAIVLTVPGSERSYDLTGLKPGTEYTVSIYGVHNVYKDTNIRGLPLSAIFTTAPAPAPAPAPLPAPKNLVVSRVTEDSARLSWTAPDAAFDSFWIRYFEFLGSGEAIVLTVPGSERSYDLTGLKPGTEYVVNILSVKGGSISPPLSAIFTT

SEQ ID NO: 17220 - protein, 250 aa, Artificial Sequence
  source: /note="Description of Artificial Sequence: Synthetic polypeptide"
MLPAPKNLVVSEVTEDSARLSWDDPWAFYESFLIQYQESEKVGEAIVLTVPGSERSYDLTGLKPGTEYTVSIYGVHNVYKDTNMRGLPLSAIFTTAPAPAPAPAPLPAPKNLVVSRVTEDSARLSWTAPDAAFDSFWIRYDEVVVGGEAIVLTVPGSERSYDLTGLKPGTEYYVNILGVKGGSISVPLSAIFTTAPAPAPAPAPLAEAKVLANRELDKYGVSDYYKNLINNAKTVEGVKALLDEILAALP

SEQ ID NO: 17221 - protein, 250 aa, Artificial Sequence
  source: /note="Description of Artificial Sequence: Synthetic polypeptide"
MLPAPKNLVVSEVTEDSARLSWADPHGFYDSFLIQYQESEKVGEAIVLTVPGSERSYDLTGLKPGTEYTVSIYGVHNVYKDTNMRGLPLSAIFTTAPAPAPAPAPLPAPKNLVVSRVTEDSARLSWTAPDAAFDSFWIRYDEVVVGGEAIVLTVPGSERSYDLTGLKPGTEYYVNILGVKGGSISVPLSAIFTTAPAPAPAPAPLAEAKVLANRELDKYGVSDYYKNLINNAKTVEGVKALLDEILAALP

SEQ ID NO: 17222 - protein, 250 aa, Artificial Sequence
  source: /note="Description of Artificial Sequence: Synthetic polypeptide"
MLPAPKNLVVSEVTEDSARLSWDDPWAFYESFLIQYQESEKVGEAIVLTVPGSERSYDLTGLKPGTEYTVSIYGVHNVYKDTNMRGLPLSAIFTTAPAPAPAPAPLPAPKNLVVSRVTEDSARLSWTAPDAAFDSFWIRYFEFLGSGEAIVLTVPGSERSYDLTGLKPGTEYVVNIMGVKGGKISPPLSAIFTTAPAPAPAPAPLAEAKVLANRELDKYGVSDYYKNLINNAKTVEGVKALLDEILAALP

SEQ ID NO: 17223 - protein, 250 aa, Artificial Sequence
  source: /note="Description of Artificial Sequence: Synthetic polypeptide"
MLPAPKNLVVSEVTEDSARLSWADPHGFYDSFLIQYQESEKVGEAIVLTVPGSERSYDLTGLKPGTEYTVSIYGVHNVYKDTNMRGLPLSAIFTTAPAPAPAPAPLPAPKNLVVSRVTEDSARLSWTAPDAAFDSFWIRYFEFLGSGEAIVLTVPGSERSYDLTGLKPGTEYVVNIMGVKGGKISPPLSAIFTTAPAPAPAPAPLAEAKVLANRELDKYGVSDYYKNLINNAKTVEGVKALLDEILAALP

SEQ ID NO: 17224 - protein, 204 aa, Artificial Sequence
  source: /note="Description of Artificial Sequence: Synthetic polypeptide"
LPAPKNLVVSEVTEDSARLSWDDPWAFYESFLIQYQESEKVGEAIVLTVPGSERSYDLTGLKPGTEYTVSIYGVHNVYKDTNMRGLPLSAIFTTGGGGSGGGGSGGGGSGGGGSMLPAPKNLVVSRVTEDSARLSWTAPDAAFDSFWIRYDEVVVGGEAIVLTVPGSERSYDLTGLKPGTEYYVNILGVKGGSISVPLSAIFTT

SEQ ID NO: 17225 - protein, 203 aa, Artificial Sequence
  source: /note="Description of Artificial Sequence: Synthetic polypeptide"
LPAPKNLVVSEVTEDSARLSWDDPWAFYESFLIQYQESEKVGEAIVLTVPGSERSYDLTGLKPGTEYTVSIYGVHNVYKDTNMRGLPLSAIFTTGGGGSGGGGSGGGGSGGGGSLPAPKNLVVSRVTEDSARLSWTAPDAAFDSFWIRYFEFLGSGEAIVLTVPGSERSYDLTGLKPGTEYVVNIMGVKGGKISPPLSAIFTT

SEQ ID NO: 17226 - protein, 204 aa, Artificial Sequence
  source: /note="Description of Artificial Sequence: Synthetic polypeptide"
LPAPKNLVVSEVTEDSARLSWDDPWAFYESFLIQYQESEKVGEAIVLTVPGSERSYDLTGLKPGTEYTVSIYGVHNVYKDTNMRGLPLSAIFTTGGGGSGGGGSGGGGSGGGGSMLPAPKNLVVSRVTEDSARLSWTAPDAAFDSFWIRYFEFLGSGEAIVLTVPGSERSYDLTGLKPGTEYVVQIIGVKGGHISLPLSAIFTT

SEQ ID NO: 17227 - protein, 204 aa, Artificial Sequence
  source: /note="Description of Artificial Sequence: Synthetic polypeptide"
LPAPKNLVVSEVTEDSARLSWDDPWAFYESFLIQYQESEKVGEAIVLTVPGSERSYDLTGLKPGTEYTVSIYGVHNVYKDTNMRGLPLSAIFTTGGGGSGGGGSGGGGSGGGGSMLPAPKNLVVSRVTEDSARLSWTAPDAAFDSFFIRYDEFLRSGEAIVLTVPGSERSYDLTGLKPGTEYWVTILGVKGGLVSTPLSAIFTT

SEQ ID NO: 17228 - protein, 204 aa, Artificial Sequence
  source: /note="Description of Artificial Sequence: Synthetic polypeptide"
LPAPKNLVVSEVTEDSARLSWADPHGFYDSFLIQYQESEKVGEAIVLTVPGSERSYDLTGLKPGTEYTVSIYGVHNVYKDTNMRGLPLSAIFTTGGGGSGGGGSGGGGSGGGGSMLPAPKNLVVSRVTEDSARLSWTAPDAAFDSFWIRYFEFLGSGEAIVLTVPGSERSYDLTGLKPGTEYVVNIMGVKGGKISPPLSAIFTT

SEQ ID NO: 17229 - protein, 204 aa, Artificial Sequence
  source: /note="Description of Artificial Sequence: Synthetic polypeptide"
LPAPKNLVVSEVTEDSARLSWADPHGFYDSFLIQYQESEKVGEAIVLTVPGSERSYDLTGLKPGTEYTVSIYGVHNVYKDTNMRGLPLSAIFTTGGGGSGGGGSGGGGSGGGGSMLPAPKNLVVSRVTEDSARLSWTAPDAAFDSFWIRYFEFLGSGEAIVLTVPGSERSYDLTGLKPGTEYVVQIIGVKGGHISLPLSAIFTT

SEQ ID NO: 17230 - protein, 193 aa, Artificial Sequence
  source: /note="Description of Artificial Sequence: Synthetic polypeptide"
LPAPKNLVVSEVTEDSARLSWDDPWAFYESFLIQYQESEKVGEAIVLTVPGSERSYDLTGLKPGTEYTVSIYGVHNVYKDTNMRGLPLSAIFTTAPAPAPAPAPLPAPKNLVVSRVTEDSARLSWTAPDAAFDSFWIRYFEFLGSGEAIVLTVPGSERSYDLTGLKPGTEYVVNIMGVKGGKISPPLSAIFTT

SEQ ID NO: 17231 - protein, 193 aa, Artificial Sequence
  source: /note="Description of Artificial Sequence: Synthetic polypeptide"
LPAPKNLVVSEVTEDSARLSWDDPWAFYESFLIQYQESEKVGEAIVLTVPGSERSYDLTGLKPGTEYTVSIYGVHNVYKDTNMRGLPLSAIFTTAPAPAPAPAPLPAPKNLVVSRVTEDSARLSWTAPDAAFDSFWIRYDEVVVGGEAIVLTVPGSERSYDLTGLKPGTEYYVNILGVKGGSISVPLSAIFTT

SEQ ID NO: 17232 - protein, 194 aa, Artificial Sequence
  source: /note="Description of Artificial Sequence: Synthetic polypeptide"
LPAPKNLVVSEVTEDSARLSWADPHGFYDSFLIQYQESEKVGEAIVLTVPGSERSYDLTGLKPGTEYTVSIYGVHNVYKDTNMRGLPLSAIFTTAPAPAPAPAPMLPAPKNLVVSRVTEDSARLSWTAPDAAFDSFWIRYFEFLGSGEAIVLTVPGSERSYDLTGLKPGTEYVVNIMGVKGGKISPPLSAIFTT

SEQ ID NO: 17233 - protein, 193 aa, Artificial Sequence
  source: /note="Description of Artificial Sequence: Synthetic polypeptide"
LPAPKNLVVSEVTEDSARLSWADPHGFYDSFLIQYQESEKVGEAIVLTVPGSERSYDLTGLKPGTEYTVSIYGVHNVYKDTNMRGLPLSAIFTTAPAPAPAPAPLPAPKNLVVSRVTEDSARLSWTAPDAAFDSFWIRYDEVVVGGEAIVLTVPGSERSYDLTGLKPGTEYYVNILGVKGGSISVPLSAIFTT

SEQ ID NO: 17234 - protein, 193 aa, Artificial Sequence
  source: /note="Description of Artificial Sequence: Synthetic polypeptide"
LPAPKNLVVSEVTEDSARLSWDDPWAFYESFLIQYQESEKVGEAIVLTVPGSERSYDLTGLKPGTEYTVSIYGVHNVYKDTNIRGLPLSAIFTTAPAPAPAPAPLPAPKNLVVSRVTEDSARLSWTAPDAAFDSFWIRYFEFLGSGEAIVLTVPGSERSYDLTGLKPGTEYVVNILGVKGGKISPPLSAIFTT

SEQ ID NO: 17235 - protein, 193 aa, Artificial Sequence
  source: /note="Description of Artificial Sequence: Synthetic polypeptide"
LPAPKNLVVSEVTEDSARLSWDDPWAFYESFLIQYQESEKVGEAIVLTVPGSERSYDLTGLKPGTEYTVSIYGVHNVYKDTNIRGLPLSAIFTTAPAPAPAPAPLPAPKNLVVSRVTEDSARLSWTAPDAAFDSFWIRYFEFVGSGEAIVLTVPGSERSYDLTGLKPGTEYVVNILGVKGGSISPPLSAIFTT

SEQ ID NO: 17236 - protein, 193 aa, Artificial Sequence
  source: /note="Description of Artificial Sequence: Synthetic polypeptide"
LPAPKNLVVSEVTEDSARLSWDDPWAFYESFLIQYQESEKVGEAIVLTVPGSERSYDLTGLKPGTEYTVSIYGVHNVYKDTNIRGLPLSAIFTTAPAPAPAPAPLPAPKNLVVSRVTEDSARLSWTAPDAAFDSFWIRYFEFVSKGDAIVLTVPGSERSYDLTGLKPGTEYVVNILGVKGGSISPPLSAIFTT

SEQ ID NO: 17237 - protein, 193 aa, Artificial Sequence
  source: /note="Description of Artificial Sequence: Synthetic polypeptide"
LPAPKNLVVSEVTEDSARLSWDDPWAFYESFLIQYQESEKVGEAIVLTVPGSERSYDLTGLKPGTEYTVSIYGVHNVYKDTNIRGLPLSAIFTTAPAPAPAPAPLPAPKNLVVSRVTEDSARLSWTAPDAAFDSFWIRYFEFLGSGEAIVLTVPGSERSYDLTGLKPGTEYVVNILSVKGGSISPPLSAIFTT

SEQ ID NO: 17238 - protein, 193 aa, Artificial Sequence
  source: /note="Description of Artificial Sequence: Synthetic polypeptide"
LPAPKNLVVSEVTEDSARLSWDDPHAFYESFLIQYQESEKVGEAIVLTVPGSERSYDLTGLKPGTEYTVSIYGVHNVYKDTNIRGLPLSAIFTTAPAPAPAPAPLPAPKNLVVSRVTEDSARLSWTAPDAAFDSFWIRYFEFLGSGEAIVLTVPGSERSYDLTGLKPGTEYVVNILGVKGGKISPPLSAIFTT

SEQ ID NO: 17239 - protein, 193 aa, Artificial Sequence
  source: /note="Description of Artificial Sequence: Synthetic polypeptide"
LPAPKNLVVSEVTEDSARLSWDDPHAFYESFLIQYQESEKVGEAIVLTVPGSERSYDLTGLKPGTEYTVSIYGVHNVYKDTNIRGLPLSAIFTTAPAPAPAPAPLPAPKNLVVSRVTEDSARLSWTAPDAAFDSFWIRYFEFVGSGEAIVLTVPGSERSYDLTGLKPGTEYVVNILGVKGGSISPPLSAIFTT

SEQ ID NO: 17240 - protein, 193 aa, Artificial Sequence
  source: /note="Description of Artificial Sequence: Synthetic polypeptide"
LPAPKNLVVSEVTEDSARLSWDDPHAFYESFLIQYQESEKVGEAIVLTVPGSERSYDLTGLKPGTEYTVSIYGVHNVYKDTNIRGLPLSAIFTTAPAPAPAPAPLPAPKNLVVSRVTEDSARLSWTAPDAAFDSFWIRYFEFVSKGDAIVLTVPGSERSYDLTGLKPGTEYVVNILGVKGGSISPPLSAIFTT

SEQ ID NO: 17241 - protein, 193 aa, Artificial Sequence
  source: /note="Description of Artificial Sequence: Synthetic polypeptide"
LPAPKNLVVSEVTEDSARLSWDDPHAFYESFLIQYQESEKVGEAIVLTVPGSERSYDLTGLKPGTEYTVSIYGVHNVYKDTNIRGLPLSAIFTTAPAPAPAPAPLPAPKNLVVSRVTEDSARLSWTAPDAAFDSFWIRYFEFLGSGEAIVLTVPGSERSYDLTGLKPGTEYVVNILSVKGGSISPPLSAIFTT

SEQ ID NO: 17242 - protein, 193 aa, Artificial Sequence
  source: /note="Description of Artificial Sequence: Synthetic polypeptide"
LPAPKNLVVSEVTEDSARLSWADPHGFYDSFLIQYQESEKVGEAIVLTVPGSERSYDLTGLKPGTEYTVSIYGVHNVYKDTNIRGLPLSAIFTTAPAPAPAPAPLPAPKNLVVSRVTEDSARLSWTAPDAAFDSFWIRYFEFLGSGEAIVLTVPGSERSYDLTGLKPGTEYVVNILGVKGGKISPPLSAIFTT

SEQ ID NO: 17243 - protein, 193 aa, Artificial Sequence
  source: /note="Description of Artificial Sequence: Synthetic polypeptide"
LPAPKNLVVSEVTEDSARLSWADPHGFYDSFLIQYQESEKVGEAIVLTVPGSERSYDLTGLKPGTEYTVSIYGVHNVYKDTNIRGLPLSAIFTTAPAPAPAPAPLPAPKNLVVSRVTEDSARLSWTAPDAAFDSFWIRYFEFVGSGEAIVLTVPGSERSYDLTGLKPGTEYVVNILGVKGGSISPPLSAIFTT

SEQ ID NO: 17244 - protein, 193 aa, Artificial Sequence
  source: /note="Description of Artificial Sequence: Synthetic polypeptide"
LPAPKNLVVSEVTEDSARLSWADPHGFYDSFLIQYQESEKVGEAIVLTVPGSERSYDLTGLKPGTEYTVSIYGVHNVYKDTNIRGLPLSAIFTTAPAPAPAPAPLPAPKNLVVSRVTEDSARLSWTAPDAAFDSFWIRYFEFVSKGDAIVLTVPGSERSYDLTGLKPGTEYVVNILGVKGGSISPPLSAIFTT

SEQ ID NO: 17245 - protein, 193 aa, Artificial Sequence
  source: /note="Description of Artificial Sequence: Synthetic polypeptide"
LPAPKNLVVSEVTEDSARLSWADPHGFYDSFLIQYQESEKVGEAIVLTVPGSERSYDLTGLKPGTEYTVSIYGVHNVYKDTNIRGLPLSAIFTTAPAPAPAPAPLPAPKNLVVSRVTEDSARLSWTAPDAAFDSFWIRYFEFLGSGEAIVLTVPGSERSYDLTGLKPGTEYVVNILSVKGGSISPPLSAIFTT

SEQ ID NO: 17246 - protein, 249 aa, Artificial Sequence
  source: /note="Description of Artificial Sequence: Synthetic polypeptide"
LPAPKNLVVSEVTEDSARLSWDDPWAFYESFLIQYQESEKVGEAIVLTVPGSERSYDLTGLKPGTEYTVSIYGVHNVYKDTNMRGLPLSAIFTTAPAPAPAPAPLPAPKNLVVSRVTEDSARLSWTAPDAAFDSFWIRYDEVVVGGEAIVLTVPGSERSYDLTGLKPGTEYYVNILGVKGGSISVPLSAIFTTAPAPAPAPAPLAEAKVLANRELDKYGVSDYYKNLINNAKTVEGVKALLDEILAALP

SEQ ID NO: 17247 - protein, 249 aa, Artificial Sequence
  source: /note="Description of Artificial Sequence: Synthetic polypeptide"
LPAPKNLVVSEVTEDSARLSWADPHGFYDSFLIQYQESEKVGEAIVLTVPGSERSYDLTGLKPGTEYTVSIYGVHNVYKDTNMRGLPLSAIFTTAPAPAPAPAPLPAPKNLVVSRVTEDSARLSWTAPDAAFDSFWIRYDEVVVGGEAIVLTVPGSERSYDLTGLKPGTEYYVNILGVKGGSISVPLSAIFTTAPAPAPAPAPLAEAKVLANRELDKYGVSDYYKNLINNAKTVEGVKALLDEILAALP

SEQ ID NO: 17248 - protein, 249 aa, Artificial Sequence
  source: /note="Description of Artificial Sequence: Synthetic polypeptide"
LPAPKNLVVSEVTEDSARLSWDDPWAFYESFLIQYQESEKVGEAIVLTVPGSERSYDLTGLKPGTEYTVSIYGVHNVYKDTNMRGLPLSAIFTTAPAPAPAPAPLPAPKNLVVSRVTEDSARLSWTAPDAAFDSFWIRYFEFLGSGEAIVLTVPGSERSYDLTGLKPGTEYVVNIMGVKGGKISPPLSAIFTTAPAPAPAPAPLAEAKVLANRELDKYGVSDYYKNLINNAKTVEGVKALLDEILAALP

SEQ ID NO: 17249 - protein, 249 aa, Artificial Sequence
  source: /note="Description of Artificial Sequence: Synthetic polypeptide"
LPAPKNLVVSEVTEDSARLSWADPHGFYDSFLIQYQESEKVGEAIVLTVPGSERSYDLTGLKPGTEYTVSIYGVHNVYKDTNMRGLPLSAIFTTAPAPAPAPAPLPAPKNLVVSRVTEDSARLSWTAPDAAFDSFWIRYFEFLGSGEAIVLTVPGSERSYDLTGLKPGTEYVVNIMGVKGGKISPPLSAIFTTAPAPAPAPAPLAEAKVLANRELDKYGVSDYYKNLINNAKTVEGVKALLDEILAALP

SEQ ID NO: 17250 - protein, 195 aa, Artificial Sequence
  source: /note="Description of Artificial Sequence: Synthetic polypeptide"
MLPAPKNLVVSEVTEDSARLSWDDPWAFYESFLIQYQESEKVGEAIVLTVPGSERSYDLTGLKPGTEYTVSIYGVHNVYKDTNIRGLPLSAIFTTAPAPAPAPAPLPAPKNLVVSRVTEDSARLSWTAPDAAFDSFWIRYFEFLGSGEAIVLTVPGSERSYDLTGLKPGTEYVVNILGVKGGKISPPLSAIFTTC

SEQ ID NO: 17251 - protein, 195 aa, Artificial Sequence
  source: /note="Description of Artificial Sequence: Synthetic polypeptide"
MLPAPKNLVVSEVTEDSARLSWDDPWAFYESFLIQYQESEKVGEAIVLTVPGSERSYDLTGLKPGTEYTVSIYGVHNVYKDTNIRGLPLSAIFTTAPAPAPAPAPLPAPKNLVVSRVTEDSARLSWTAPDAAFDSFWIRYFEFVGSGEAIVLTVPGSERSYDLTGLKPGTEYVVNILGVKGGSISPPLSAIFTTC

SEQ ID NO: 17252 - protein, 195 aa, Artificial Sequence
  source: /note="Description of Artificial Sequence: Synthetic polypeptide"
MLPAPKNLVVSEVTEDSARLSWDDPWAFYESFLIQYQESEKVGEAIVLTVPGSERSYDLTGLKPGTEYTVSIYGVHNVYKDTNIRGLPLSAIFTTAPAPAPAPAPLPAPKNLVVSRVTEDSARLSWTAPDAAFDSFWIRYFEFVSKGDAIVLTVPGSERSYDLTGLKPGTEYVVNILGVKGGSISPPLSAIFTTC

SEQ ID NO: 17253 - protein, 195 aa, Artificial Sequence
  source: /note="Description of Artificial Sequence: Synthetic polypeptide"
MLPAPKNLVVSEVTEDSARLSWDDPWAFYESFLIQYQESEKVGEAIVLTVPGSERSYDLTGLKPGTEYTVSIYGVHNVYKDTNIRGLPLSAIFTTAPAPAPAPAPLPAPKNLVVSRVTEDSARLSWTAPDAAFDSFWIRYFEFLGSGEAIVLTVPGSERSYDLTGLKPGTEYVVNILSVKGGSISPPLSAIFTTC

SEQ ID NO: 17254 - protein, 195 aa, Artificial Sequence
  source: /note="Description of Artificial Sequence: Synthetic polypeptide"
MLPAPKNLVVSEVTEDSARLSWDDPHAFYESFLIQYQESEKVGEAIVLTVPGSERSYDLTGLKPGTEYTVSIYGVHNVYKDTNIRGLPLSAIFTTAPAPAPAPAPLPAPKNLVVSRVTEDSARLSWTAPDAAFDSFWIRYFEFLGSGEAIVLTVPGSERSYDLTGLKPGTEYVVNILGVKGGKISPPLSAIFTTC

SEQ ID NO: 17255 - protein, 195 aa, Artificial Sequence
  source: /note="Description of Artificial Sequence: Synthetic polypeptide"
MLPAPKNLVVSEVTEDSARLSWDDPHAFYESFLIQYQESEKVGEAIVLTVPGSERSYDLTGLKPGTEYTVSIYGVHNVYKDTNIRGLPLSAIFTTAPAPAPAPAPLPAPKNLVVSRVTEDSARLSWTAPDAAFDSFWIRYFEFVGSGEAIVLTVPGSERSYDLTGLKPGTEYVVNILGVKGGSISPPLSAIFTTC

SEQ ID NO: 17256 - protein, 195 aa, Artificial Sequence
  source: /note="Description of Artificial Sequence: Synthetic polypeptide"
MLPAPKNLVVSEVTEDSARLSWDDPHAFYESFLIQYQESEKVGEAIVLTVPGSERSYDLTGLKPGTEYTVSIYGVHNVYKDTNIRGLPLSAIFTTAPAPAPAPAPLPAPKNLVVSRVTEDSARLSWTAPDAAFDSFWIRYFEFVSKGDAIVLTVPGSERSYDLTGLKPGTEYVVNILGVKGGSISPPLSAIFTTC

SEQ ID NO: 17257 - protein, 195 aa, Artificial Sequence
  source: /note="Description of Artificial Sequence: Synthetic polypeptide"
MLPAPKNLVVSEVTEDSARLSWDDPHAFYESFLIQYQESEKVGEAIVLTVPGSERSYDLTGLKPGTEYTVSIYGVHNVYKDTNIRGLPLSAIFTTAPAPAPAPAPLPAPKNLVVSRVTEDSARLSWTAPDAAFDSFWIRYFEFLGSGEAIVLTVPGSERSYDLTGLKPGTEYVVNILSVKGGSISPPLSAIFTTC

SEQ ID NO: 17258 - protein, 498 aa, Artificial Sequence
  source: /note="Description of Artificial Sequence: Synthetic polypeptide"
DIQLTQSPASLAVSLGQRATISCKASQSVDYDGDSYLNWYQQIPGQPPKLLIYDASNLVSGIPPRFSGSGSGTDFTLNIHPVEKVDAATYHCQQSTEDPWTFGGGTKLEIKGGGGSGGGGSGGGGSQVQLQQSGAELVRPGSSVKISCKASGYAFSSYWMNWVKQRPGQGLEWIGQIWPGDGDTNYNGKFKGKATLTADESSSTAYMQLSSLASEDSAVYFCARRETTTVGRYYYAMDYWGQGTTVTVSSGGGGSQVQLVQSGGGVVQPGRSLRLSCKSSGYTFTRYTMHWVRQAPGKGLEWIGYINPSRGYTNYNQKVKDRFTISRDNSKNTAFLQMDSLRPEDTGVYFCARYYDDHYCLDYWGQGTPVTVSSVEGGSGGSGGSGGSGGVDDIQMTQSPSSLSASVGDRVTITCRASSSVSYMNWYQQTPGKAPKRWIYDTSKVASGVPSRFSGSGSGTDYTFTISSLQPEDIATYYCQQWSSNPLTFGQGTKLQIT

SEQ ID NO: 17259 - protein, 490 aa, Artificial Sequence
  source: /note="Description of Artificial Sequence: Synthetic polypeptide"
ELVMTQSPSYLAASPGETITINCRASKSISKYLAWYQEKPGKTNKLLIYSGSTLQSGIPSRFSGSGSGTDFTLTISSLEPEDFAMYYCQQHNEYPYTFGGGTKLEIKGGGGSGGGGSGGGGSEVQLLEQSGAELVKPGASVKISCKASGYAFTNYWLGWVKQRPGHGLEWIGDLFPGSGNTHYNERFRGKATLTADKSSSTAFMQLSSLTSEDSAVYFCARLRNWDEAMDYWGQGTTVTVSSGGGGSQVQLVQSGGGVVQPGRSLRLSCKSSGYTFTRYTMHWVRQAPGKGLEWIGYINPSRGYTNYNQKVKDRFTISRDNSKNTAFLQMDSLRPEDTGVYFCARYYDDHYCLDYWGQGTPVTVSSVEGGSGGSGGSGGSGGVDDIQMTQSPSSLSASVGDRVTITCRASSSVSYMNWYQQTPGKAPKRWIYDTSKVASGVPSRFSGSGSGTDYTFTISSLQPEDIATYYCQQWSSNPLTFGQGTKLQIT

SEQ ID NO: 17260 - protein, 496 aa, Artificial Sequence
  source: /note="Description of Artificial Sequence: Synthetic polypeptide"
ELVMTQSPSSLTVTAGEKVTMSCKSSQSLLNSGNQKNYLTWYQQKPGQPPKLLIYWASTRESGVPDRFTGSGSGTDFTLTISSVQAEDLAVYYCQNDYSYPLTFGAGTKLEIKGGGGSGGGGSGGGGSEVQLLEQSGAELVRPGTSVKISCKASGYAFTNYWLGWVKQRPGHGLEWIGDIFPGSGNIHYNEKFKGKATLTADKSSSTAYMQLSSLTFEDSAVYFCARLRNWDEPMDYWGQGTTVTVSSGGGGSQVQLVQSGGGVVQPGRSLRLSCKSSGYTFTRYTMHWVRQAPGKGLEWIGYINPSRGYTNYNQKVKDRFTISRDNSKNTAFLQMDSLRPEDTGVYFCARYYDDHYCLDYWGQGTPVTVSSVEGGSGGSGGSGGSGGVDDIQMTQSPSSLSASVGDRVTITCRASSSVSYMNWYQQTPGKAPKRWIYDTSKVASGVPSRFSGSGSGTDYTFTISSLQPEDIATYYCQQWSSNPLTFGQGTKLQIT

SEQ ID NO: 17261 - protein, 712 aa, Artificial Sequence
  source: /note="Description of Artificial Sequence: Synthetic polypeptide"
QVQESGPGLVKPSETLSLTCTVSGGSVSSGDYYWTWIRQSPGKGLEWIGHIYYSGNTNYNPSLKSRLTISIDTSKTQFSLKLSSVTAADTAIYYCVRDRVTGAFDIWGQGTLVTVSSASTKGPSVFPLAPSSKSTSGGTAALGCLVKDYFPEPVTVSWNSGALTSGVHTFPAVLQSSGLYSLSSVVTVPSSSLGTQTYICNVNHKPSNTKVDKKVEPKSCDKTHTCPPCPAPELLGGPSVFLFPPKPKDTLMISRTPEVTCVVVDVSHEDPEVKFNWYVDGVEVHNAKTKPREEQYNSTYRVVSVLTVLHQDWLNGKEYKCKVSNKALPAPIEKTISKAKGQPREPQVYTLPPSRDELTKNQVSLTCLVKGFYPSDIAVEWESNGQPENNYKTTPPVLDSDGSFFLYSKLTVDKSRWQQGNVFSCSVMHEALHNHYTQKSLSLSPGKGGGGSGGGGSGGGGSEVQLVESGGGLVQPGGSLRLSCAASGYDFTHYGMNWVRQAPGKCLEWVGWINTYTGEPTYAADFKRRFTFSLDTSKSTAYLQMNSLRAEDTAVYYCAKYPYYYGTSHWYFDVWGQGTLVTVSSGGGGSGGGGSGGGGSGGGGSDIQLTQSPSSLSASVGDRVTITCSASQDISNYLNWYQQKPGKAPKVLIYFTSSLHSGVPSRFSGSGSGTDFTLTISSLQPEDFATYYCQQYSTVPWTFGCGTKVEIK

SEQ ID NO: 17262 - protein, 378 aa, Artificial Sequence
  source: /note="Description of Artificial Sequence: Synthetic polypeptide"
ELVMTQSPSSLTVTAGEKVTMSCKSSQSLLNSGNQKNYLTWYQQKPGQPPKLLIYWASTRESGVPDRFTGSGSGTDFTLTISSVQAEDLAVYYCQNDYSYPLTFGAGTKLEIKGGGGSGGGGSGGGGSEVQLLEQSGAELVRPGTSVKISCKASGYAFTNYWLGWVKQRPGHGLEWIGDIFPGSGNIHYNEKFKGKATLTADKSSSTAYMQLSSLTFEDSAVYFCARLRNWDEPMDYWGQGTTVTVSSGGGGSDIKLQQSGAELARPGASVKMSCKTSGYTFTRYTMHWVKQRPGQGLEWIGYINPSRGYTNYNQKFKDKATLTTDKSSSTAYMQLSSLTSEDSAVYYCARYYDDHYCLDYWGQGTTLTVSSHHHHHH

SEQ ID NO: 17263 - protein, 240 aa, Mus musculus
MEVQLVESGGGLVQPGSLKVSCVTSGFTFSDYYMWVRQTPEKRLEWVAYISQGDITDYPDTVKGRFTISRDNKNTLYLQMSRLKSEDTAMYCARGLDDGAWFAYWGQGTTTVSSGSGGGGSGGGGSGGGSKLDVLMTQIPVSLPVSLGQASISCRSSQIIVHNNGNTLEWYLQKPGQSPQLLIYKVNRFSGVPDRFSGSGSGTDFLKISRVEAEDLGVYYCFQVHVPFTFGSGTKLEIKR

SEQ ID NO: 17264 - protein, 328 aa, Homo sapiens; identical to SEQ ID NO: 12948

SEQ ID NO: 17265 - protein, 250 aa, Artificial Sequence
  source: /note="Description of Artificial Sequence: Synthetic polypeptide"
QSVLTQPPSASGTPGQRVTISCSGSSSNIGSNFVYWYQQLPGTAPKLLIYRNNQRPSGVPDRFSGSRSGTSASLAISGLRSEDEADYYCAAWDDSLGGHYVFGTGTKVTVLSGGGGQVQLVESGGGSVQPGRSLRLSCEASGFTFEAYAMHWVRQPPGKGLEWVSSINWNSGRIAYADSVKGRFTISRDNARNSLYLQMNSLRLEDTAFYYCAKDIRRFSTGGAEFEYWGQGTLVTVSSGSHHHHHHGGC

SEQ ID NO: 17266 - protein, 249 aa, Artificial Sequence
  source: /note="Description of Artificial Sequence: Synthetic polypeptide"
DVVLTQSPATLSVSPGERATLSCRASQSVSSNLAWYQQKPQAPRLLIYGASTRATGIPARFSGSGSGTDFTLTISSLQSEDSAVYYCQQYNNWPPYTFGQGTKVDIKSGGGGEVQLVESGGGVVQPGRSLRLSCAASGFTFSFYGMHWVRQAPGKGLEWVAAISYDGSNKYYADSVKGRFTISRDNSKNTLYLQMNSLRAEDTAVYYCAKRPNQFYCSDGRCYSIDYWGQGTLVTVSSGSHHHHHHGGC

SEQ ID NO: 17267 - protein, 238 aa, Artificial Sequence
  source: /note="Description of Artificial Sequence: Synthetic polypeptide"
DVQLQESGPGLVKPSQSLSLTCTVTGFSITSPYAWNWIRQFPGNTLEWMGYISYRGSTTHHPSLKSRISITRDTSKNQFFLQLNSVTTEDTATYFCSSYGNYGAYSGQGTLVTVSAASTKGPQVQLQESGPGLVKPSQTLSLTCTVSGYSISSDFAWNWIRQPPGKGLEWMGYISYSGNTRYQPSLKSRITISRDTSKNQFFLKLNSVTAADTATYYCVTAGRGFPYWGQGTLVTVSS

SEQ ID NO: 17268 - protein, 238 aa, Artificial Sequence
  source: /note="Description of Artificial Sequence: Synthetic polypeptide"
QVQLQESGPGLVKPSQTLSLTCTVSGYSISSDFAWNWIRQPPGKGLEWMGYISYSGNTRYQPSLKSRITISRDTSKNQFFLKLNSVTAADTATYYCVTAGRGFPYWGQGTLVTVSSASTKGPDVQLQESGPGLVKPSQSLSLTCTVTGFSITSPYAWNWIRQFPGNTLEWMGYISYRGSTTHHPSLKSRISITRDTSKNQFFLQLNSVTTEDTATYFCSSYGNYGAYSGQGTLVTVSA

SEQ ID NO: 17269 - protein, 242 aa, Artificial Sequence
  source: /note="Description of Artificial Sequence: Synthetic polypeptide"
DVQLQESGPGLVKPSQSLSLTCTVTGFSITSPYAWNWIRQFPGNTLEWMGYISYRGSTTHHPSLKSRISITRDTSKNQFFLQLNSVTTEDTATYFCSSYGNYGAYSGQGTLVTVSAASTKGPEVQLVESGGGLVQPGGSLRLSCAASGFNIKDTYIHWVRQAPGKGLEWVARIYPTNGYTRYADSVKGRFTISADTSKNTAYLQMNSLRAEDTAVYYCSRWGGDGFYAMDYWGQGTLVTVSS

SEQ ID NO: 17270 - protein, 242 aa, Artificial Sequence
  source: /note="Description of Artificial Sequence: Synthetic polypeptide"
EVQLVESGGGLVQPGGSLRLSCAASGFNIKDTYIHWVRQAPGKGLEWVARIYPTNGYTRYADSVKGRFTISADTSKNTAYLQMNSLRAEDTAVYYCSRWGGDGFYAMDYWGQGTLVTVSSASTKGPDVQLQESGPGLVKPSQSLSLTCTVTGFSITSPYAWNWIRQFPGNTLEWMGYISYRGSTTHHPSLKSRISITRDTSKNQFFLQLNSVTTEDTATYFCSSYGNYGAYSGQGTLVTVSA

SEQ ID NO: 17271 - protein, 243 aa, Artificial Sequence
  source: /note="Description of Artificial Sequence: Synthetic polypeptide"
DVQLQESGPGLVKPSQSLSLTCTVTGFSITSPYAWNWIRQFPGNTLEWMGYISYRGSTTHHPSLKSRISITRDTSKNQFFLQLNSVTTEDTATYFCSSYGNYGAYSGQGTLVTVSAASTKGPQVQLQQPGAELVKPGASVKMSCKASGYTFTSYNMHWVKQTPGRGLEWIGAIYPGNGDTSYNQKFKGKATLTADKSSSTAYMQLSSLTSEDSAVYYCARSTYYGGDWYFNVWGAGTTVTVSA

SEQ ID NO: 17272 - protein, 243 aa, Artificial Sequence
  source: /note="Description of Artificial Sequence: Synthetic polypeptide"
QVQLQQPGAELVKPGASVKMSCKASGYTFTSYNMHWVKQTPGRGLEWIGAIYPGNGDTSYNQKFKGKATLTADKSSSTAYMQLSSLTSEDSAVYYCARSTYYGGDWYFNVWGAGTTVTVSAASTKGPDVQLQESGPGLVKPSQSLSLTCTVTGFSITSPYAWNWIRQFPGNTLEWMGYISYRGSTTHHPSLKSRISITRDTSKNQFFLQLNSVTTEDTATYFCSSYGNYGAYSGQGTLVTVSA

SEQ ID NO: 17273 - protein, 241 aa, Artificial Sequence
  source: /note="Description of Artificial Sequence: Synthetic polypeptide"
QVQLQQSGAELARPGASVKMSCKASGYTFTRYTMHWVKQRPGQGLEWIGYINPSRGYTNYNQKFKDKATLTTDKSSSTAYMQLSSLTSEDSAVYYCARYYDDHYCLDYWGQGTTLTVSSASTKGPDVQLQESGPGLVKPSQSLSLTCTVTGFSITSPYAWNWIRQFPGNTLEWMGYISYRGSTTHHPSLKSRISITRDTSKNQFFLQLNSVTTEDTATYFCSSYGNYGAYSGQGTLVTVSA

SEQ ID NO: 17274 - protein, 238 aa, Artificial Sequence
  source: /note="Description of Artificial Sequence: Synthetic polypeptide"
DVQLQESGPGLVKPSQSLSLTCTVTGFSITSPYAWNWIRQFPGNTLEWMGYISYRGSTTHHPSLKSRISITRDTSKNQFFLQLNSVTTEDTATYFCSSYGNYGAYSGQGTLVTVSAASTKGPEVQLVESGGGLVQPGKSLKLSCEASGFTFSGYGMHWVRQAPGRGLESVAYITSSSINIKYADAVKGRFTVSRDNAKNLLFLQMNILKSEDTAMYYCARFDWDKNYWGQGTMVTVSS

SEQ ID NO: 17275 - protein, 238 aa, Artificial Sequence
  source: /note="Description of Artificial Sequence: Synthetic polypeptide"
EVQLVESGGGLVQPGKSLKLSCEASGFTFSGYGMHWVRQAPGRGLESVAYITSSSINIKYADAVKGRFTVSRDNAKNLLFLQMNILKSEDTAMYYCARFDWDKNYWGQGTMVTVSSASTKGPDVQLQESGPGLVKPSQSLSLTCTVTGFSITSPYAWNWIRQFPGNTLEWMGYISYRGSTTHHPSLKSRISITRDTSKNQFFLQLNSVTTEDTATYFCSSYGNYGAYSGQGTLVTVSA

SEQ ID NO: 17276 - protein, 226 aa, Artificial Sequence
  source: /note="Description of Artificial Sequence: Synthetic polypeptide"
DVLLTQIPLSLPVSLGDQASISCRSSQSIVHSNGNTYLEWYLQKPGQSPKLLIYKVSTRFSGVPDRFSGSGSGTDFTLKISRVEAEDLGVYYCFQGSHVPLTFGAGTQLELKRTVAAPDIQMTQSPSSMSVSVGDRVTITCHSSQDINSNIGWLQQKPGKSFKGLIYHGTNLDDGVPSRFSGSGSGTDYTLTISSLQPEDFATYYCVQYAQFPWTFGGGTKLEIKR

SEQ ID NO: 17277 - protein, 226 aa, Artificial Sequence
  source: /note="Description of Artificial Sequence: Synthetic polypeptide"
DIQMTQSPSSMSVSVGDRVTITCHSSQDINSNIGWLQQKPGKSFKGLIYHGTNLDDGVPSRFSGSGSGTDYTLTISSLQPEDFATYYCVQYAQFPWTFGGGTKLEIKRTVAAPDVLLTQIPLSLPVSLGDQASISCRSSQSIVHSNGNTYLEWYLQKPGQSPKLLIYKVSTRFSGVPDRFSGSGSGTDFTLKISRVEAEDLGVYYCFQGSHVPLTFGAGTQLELKR

SEQ ID NO: 17278 - protein, 226 aa, Artificial Sequence
  source: /note="Description of Artificial Sequence: Synthetic polypeptide"
DVLLTQIPLSLPVSLGDQASISCRSSQSIVHSNGNTYLEWYLQKPGQSPKLLIYKVSTRFSGVPDRFSGSGSGTDFTLKISRVEAEDLGVYYCFQGSHVPLTFGAGTQLELKRTVAAPDIQMTQSPSSLSASVGDRVTITCRASQDVNTAVAWYQQKPGKAPKLLIYSASFLYSGVPSRFSGSRSGTDFTLTISSLQPEDFATYYCQQHYTTPPTFGQGTKVEIKR

SEQ ID NO: 17279 - protein, 226 aa, Artificial Sequence
  source: /note="Description of Artificial Sequence: Synthetic polypeptide"
DIQMTQSPSSLSASVGDRVTITCRASQDVNTAVAWYQQKPGKAPKLLIYSASFLYSGVPSRFSGSRSGTDFTLTISSLQPEDFATYYCQQHYTTPPTFGQGTKVEIKRTVAAPDVLLTQIPLSLPVSLGDQASISCRSSQSIVHSNGNTYLEWYLQKPGQSPKLLIYKVSTRFSGVPDRFSGSGSGTDFTLKISRVEAEDLGVYYCFQGSHVPLTFGAGTQLELKR

SEQ ID NO: 17280 - protein, 225 aa, Artificial Sequence
  source: /note="Description of Artificial Sequence: Synthetic polypeptide"
DVLLTQIPLSLPVSLGDQASISCRSSQSIVHSNGNTYLEWYLQKPGQSPKLLIYKVSTRFSGVPDRFSGSGSGTDFTLKISRVEAEDLGVYYCFQGSHVPLTFGAGTQLELKRTVAAPQIVLSQSPAILSPSPGEKVTMTCRASSSVSYIHWFQQKPGSSPKPWIYATSNLASGVPVRFSGSGSGTSYSLTISRVEAEDAATYYCQQWTSNPPTFGGGTKLEIKR

SEQ ID NO: 17281 - protein, 225 aa, Artificial Sequence
  source: /note="Description of Artificial Sequence: Synthetic polypeptide"
QIVLSQSPAILSPSPGEKVTMTCRASSSVSYIHWFQQKPGSSPKPWIYATSNLASGVPVRFSGSGSGTSYSLTISRVEAEDAATYYCQQWTSNPPTFGGGTKLEIKRTVAAPDVLLTQIPLSLPVSLGDQASISCRSSQSIVHSNGNTYLEWYLQKPGQSPKLLIYKVSTRFSGVPDRFSGSGSGTDFTLKISRVEAEDLGVYYCFQGSHVPLTFGAGTQLELKR

SEQ ID NO: 17282 - protein, 225 aa, Artificial Sequence
  source: /note="Description of Artificial Sequence: Synthetic polypeptide"
DVLLTQIPLSLPVSLGDQASISCRSSQSIVHSNGNTYLEWYLQKPGQSPKLLIYKVSTRFSGVPDRFSGSGSGTDFTLKISRVEAEDLGVYYCFQGSHVPLTFGAGTQLELKRTVAAPQIVLTQSPAIMSASPGEKVTMTCRASSSVSYMNWYQQKSGTSPKRWIYDTSKVASGVPYRFSGSGSGTSYSLTISSMEAEDAATYYCQQWSSNPLTFGSGTKLEINR

SEQ ID NO: 17283 - protein, 225 aa, Artificial Sequence
  source: /note="Description of Artificial Sequence: Synthetic polypeptide"
QIVLTQSPAIMSASPGEKVTMTCRASSSVSYMNWYQQKSGTSPKRWIYDTSKVASGVPYRFSGSGSGTSYSLTISSMEAEDAATYYCQQWSSNPLTFGSGTKLEINRTVAAPDVLLTQIPLSLPVSLGDQASISCRSSQSIVHSNGNTYLEWYLQKPGQSPKLLIYKVSTRFSGVPDRFSGSGSGTDFTLKISRVEAEDLGVYYCFQGSHVPLTFGAGTQLELKR

SEQ ID NO: 17284 - protein, 226 aa, Artificial Sequence
  source: /note="Description of Artificial Sequence: Synthetic polypeptide"
DVLLTQIPLSLPVSLGDQASISCRSSQSIVHSNGNTYLEWYLQKPGQSPKLLIYKVSTRFSGVPDRFSGSGSGTDFTLKISRVEAEDLGVYYCFQGSHVPLTFGAGTQLELKRTVAAPDIQMTQSPSSLPASLGDRVTINCQASQDISNYLNWYQQKPGKAPKLLIYYTNKLADGVPSRFSGSGSGRDSSFTISSLESEDIGSYYCQQYYNYPWTFGPGTKLEIKR

SEQ ID NO: 17285 - protein, 226 aa, Artificial Sequence
  source: /note="Description of Artificial Sequence: Synthetic polypeptide"
DIQMTQSPSSLPASLGDRVTINCQASQDISNYLNWYQQKPGKAPKLLIYYTNKLADGVPSRFSGSGSGRDSSFTISSLESEDIGSYYCQQYYNYPWTFGPGTKLEIKRTVAAPDVLLTQIPLSLPVSLGDQASISCRSSQSIVHSNGNTYLEWYLQKPGQSPKLLIYKVSTRFSGVPDRFSGSGSGTDFTLKISRVEAEDLGVYYCFQGSHVPLTFGAGTQLELKR

SEQ ID NO: 17286 - protein, 217 aa, Homo sapiens
QVQLKQSGPGLVQPSQSLSITCTVSGFSLTNYGVHWVRQSPGKGLEWLGVIWSGGNTDYNTPFTSRLSINKDNSKSQVFFKMNSLQSNDTAIYYCARALTYYDYEFAYWGQGTLVTVSAASTKGPSVFPLAPSSKSTSGGTAALGCLVKDYFPEPVTVSWNSGALTSGVHTFPAVLQSSGLYSLSSVVTVPSSSLGTQTYICNVNHKPSNTKVDKRV

SEQ ID NO: 17287 - protein, 451 aa, Artificial Sequence
  source: /note="Description of Artificial Sequence: Synthetic polypeptide"
QVQLVQSGAEVKKPGASVKVSCKASGYTFTEFGMNWVRQAPGQGLEWMGWINTKTGEATYVEEFKGRVTFTTDTSTSTAYMELRSLRSDDTAVYYCARWDFAYYVEAMDYWGQGTTVTVSSASTKGPSVFPLAPSSKSTSGGTAALGCLVKDYFPEPVTVSWNSGALTSGVHTFPAVLQSSGLYSLSSVVTVPSSSLGTQTYICNVNHKPSNTKVDKKVEPKSCDKTHTCPPCPAPELLGGPSVFLFPPKPKDTLMISRTPEVTCVVVDVSHEDPEVKFNWYVDGVEVHNAKTKPREEQYNSTYRVVSVLTVLHQDWLNGKEYKCKVSNKALPAPIEKTISKAKGQPREPQVCTLPPSRDELTKNQVSLSCAVKGFYPSDIAVEWESNGQPENNYKTTPPVLDSDGSFFLVSKLTVDKSRWQQGNVFSCSVMHEALHNHYTQKSLSLSPGK

SEQ ID NO: 17288 - protein, 503 aa, Artificial Sequence; identical to SEQ ID NO: 17195
  source: /note="Description of Artificial Sequence: Synthetic polypeptide"

SEQ ID NO: 17289 - protein, 506 aa, Artificial Sequence; identical to SEQ ID NO: 17192
  source: /note="Description of Artificial Sequence: Synthetic polypeptide"

SEQ ID NO: 17290 - protein, 498 aa, Artificial Sequence; identical to SEQ ID NO: 17193
  source: /note="Description of Artificial Sequence: Synthetic polypeptide"

SEQ ID NO: 17291 - protein, 261 aa, Artificial Sequence
  source: /note="Description of Artificial Sequence: Synthetic polypeptide"
EFATMAVMAPRTLVLLLSGALALTQTWAGEPKSSDKTHTCPPCPAPELLGGPSVFLFPPKPKDTLMISRTPEVTCVVVDVSHEDPEVKFNWYVDGVEVHNAKTKPREEQYNSTYRVVSVLTVLHQDWLNGKEYKCKVSNKALPAPIEKTISKAKGQPREPQVYVLPPSRDELTKNQVSLLCLVKGFYPSDIAVEWESNGQPENNYLTWPPVLDSDGSFFLYSKLTVDKSRWQQGNVFSCSVMHEALHNHYTQKSLSLSPGK

SEQ ID NO: 17292 - protein, 261 aa, Artificial Sequence
  source: /note="Description of Artificial Sequence: Synthetic polypeptide"
EFATMAVMAPRTLVLLLSGALALTQTWAGEPKSSDKTHTCPPCPAPELLGGPSVFLFPPKPKDTLMISRTPEVTCVVVDVSHEDPEVKFNWYVDGVEVHNAKTKPREEQYNSTYRVVSVLTVLHQDWLNGKEYKCKVSNKALPAPIEKTISKAKGQPREPQVYTLPPSRDELTKNQVSLLCLVKGFYPSDIAVEWESNGQPENNYMTWPPVLDSDGSFFLYSKLTVDKSRWQQGNVFSCSVMHEALHNHYTQKSLSLSPGK

SEQ ID NO: 17293 - protein, 506 aa, Artificial Sequence
  source: /note="Description of Artificial Sequence: Synthetic polypeptide"
EFATMAVMAPRTLVLLLSGALALTQTWAGDIKLQQSGAELARPGASVKMSCKTSGYTFTRYTMHWVKQRPGQGLEWIGYINPSRGYTNYNQKFKDKATLTTDKSSSTAYMQLSSLTSEDSAVYYCARYYDDHYCLDYWGQGTTLTVSSVEGGSGGSGGSGGSGGVDDIQLTQSPAIMSASPGEKVTMTCRASSSVSYMNWYQQKSGTSPKRWIYDTSKVASGVPYRFSGSGSGTSYSLTISSMEAEDAATYYCQQWSSNPLTFGAGTKLELKAAEPKSSDKTHTCPPCPAPELLGGPSVFLFPPKPKDTLMISRTPEVTCVVVDVSHEDPEVKFNWYVDGVEVHNAKTKPREEQYNSTYRVVSVLTVLHQDWLNGKEYKCKVSNKALPAPIEKTISKAKGQPREPQVYTLPPSRDELTKNQVSLLCLVKGFYPSDIAVEWESNGQPENNYMTWPPVLDSDGSFFLYSKLTVDKSRWQQGNVFSCSVMHEALHNHYTQKSLSLSPGK

SEQ ID NO: 17294 - protein, 503 aa, Artificial Sequence
  source: /note="Description of Artificial Sequence: Synthetic polypeptide"
EFATMAVMAPRTLVLLLSGALALTQTWAGDIQLTQSPAIMSASPGEKVTMTCRASSSVSYMNWYQQKSGTSPKRWIYDTSKVASGVPYRFSGSGSGTSYSLTISSMEAEDAATYYCQQWSSNPLTFGAGTKLELKGGGGSGGGGSGGGGSDIKLQQSGAELARPGASVKMSCKTSGYTFTRYTMHWVKQRPGQGLEWIGYINPSRGYTNYNQKFKDKATLTTDKSSSTAYMQLSSLTSEDSAVYYCARYYDDHYCLDYWGQGTTLTVSSAAEPKSSDKTHTCPPCPAPELLGGPSVFLFPPKPKDTLMISRTPEVTCVVVDVSHEDPEVKFNWYVDGVEVHNAKTKPREEQYNSTYRVVSVLTVLHQDWLNGKEYKCKVSNKALPAPIEKTISKAKGQPREPQVYTLPPSRDELTKNQVSLLCLVKGFYPSDIAVEWESNGQPENNYMTWPPVLDSDGSFFLYSKLTVDKSRWQQGNVFSCSVMHEALHNHYTQKSLSLSPGK

SEQ ID NO: 17295 - protein, 503 aa, Artificial Sequence
  source: /note="Description of Artificial Sequence: Synthetic polypeptide"
EFATMAVMAPRTLVLLLSGALALTQTWAGQIVLTQSPAIMSASPGEKVTMTCSASSSVSYMNWYQQKSGTSPKRWIYDTSKLASGVPAHFRGSGSGTSYSLTISGMEAEDAATYYCQQWSSNPFTFGSGTKLEINGGGGSGGGGSGGGGSQVQLQQSGAELARPGASVKMSCKASGYTFTRYTMHWVKQRPGQGLEWIGYINPSRGYTNYNQKFKDKATLTTDKSSSTAYMQLSSLTSEDSAVYYCARYYDDHYCLDYWGQGTTLTVSSAAEPKSSDKTHTCPPCPAPELLGGPSVFLFPPKPKDTLMISRTPEVTCVVVDVSHEDPEVKFNWYVDGVEVHNAKTKPREEQYNSTYRVVSVLTVLHQDWLNGKEYKCKVSNKALPAPIEKTISKAKGQPREPQVYTLPPSRDELTKNQVSLLCLVKGFYPSDIAVEWESNGQPENNYMTWPPVLDSDGSFFLYSKLTVDKSRWQQGNVFSCSVMHEALHNHYTQKSLSLSPGK

SEQ ID NO: 17296 - protein, 89 aa, Artificial Sequence
  source: /note="Description of Artificial Sequence: Synthetic polypeptide"
LPAPKNLVVSRVTEDSARLSWTAPDAAFDSFWIRYDEVVVGGEAIVLTVPGSERSYDLTGLKPGTEYYVNILGVKGGSISVPLSAIFTT

SEQ ID NO: 17297 - protein, 89 aa, Artificial Sequence
  source: /note="Description of Artificial Sequence: Synthetic polypeptide"
LPAPKNLVVSRVTEDSARLSWTAPDAAFDSFFIRYDEFLRSGEAIVLTVPGSERSYDLTGLKPGTEYWVTILGVKGGLVSTPLSAIFTT

SEQ ID NO: 17298 - protein, 89 aa, Artificial Sequence
  source: /note="Description of Artificial Sequence: Synthetic polypeptide"
LPAPKNLVVSRVTEDSARLSWTAPDAAFDSFWIRYFEFLGSGEAIVLTVPGSERSYDLTGLKPGTEYIVNIMGVKGGSISHPLSAIFTT

SEQ ID NO: 17299 - protein, 89 aa, Artificial Sequence
  source: /note="Description of Artificial Sequence: Synthetic polypeptide"
LPAPKNLVVSRVTEDSARLSWTAPDAAFDSFWIRYFEFLGSGEAIVLTVPGSERSYDLTGLKPGTEYVVNILGVKGGGLSVPLSAIFTT

SEQ ID NO: 17300 - protein, 89 aa, Artificial Sequence
  source: /note="Description of Artificial Sequence: Synthetic polypeptide"
LPAPKNLVVSRVTEDSARLSWTAPDAAFDSFVIRYFEFLGSGEAIVLTVPGSERSYDLTGLKPGTEYVVQILGVKGGYISIPLSAIFTT

SEQ ID NO: 17301 - protein, 89 aa, Artificial Sequence
  source: /note="Description of Artificial Sequence: Synthetic polypeptide"
LPAPKNLVVSRVTEDSARLSWTAPDAAFDSFWIRYLEFLLGGEAIVLTVPGSERSYDLTGLKPGTEYVVQIMGVKGGTVSPPLSAIFTT

SEQ ID NO: 17302 - protein, 89 aa, Artificial Sequence
  source: /note="Description of Artificial Sequence: Synthetic polypeptide"
LPAPKNLVVSRVTEDSARLSWTAPDAAFDSFWIRYFEFLGSGEAIVLTVPGSERSYDLTGLKPGTEYVVGINGVKGGYISYPLSAIFTT

SEQ ID NO: 17303 - protein, 89 aa, Artificial Sequence
  source: /note="Description of Artificial Sequence: Synthetic polypeptide"
LPAPKNLVVSRVTEDSARLSWTAPDAAFDSFWIRYFEFLGSGEAIVLTVPGSERSYDLTDLKPGTEYGVTINGVKGGRVSTPLSAIFTT

SEQ ID NO: 17304 - protein, 89 aa, Artificial Sequence
  source: /note="Description of Artificial Sequence: Synthetic polypeptide"
LPAPKNLVVSRVTEDSARLSWTAPDAAFDSFWIRYFEFLGSGEAIVLTVPGSERSYDLTGLKPGTEYVVQIIGVKGGHISLPLSAIFTT

SEQ ID NO: 17305 - protein, 89 aa, Artificial Sequence
  source: /note="Description of Artificial Sequence: Synthetic polypeptide"
LPAPKNLVVSRVTEDSARLSWTAPDAAFDSFWIRYFEFLGSGEAIVLTVPGSERSYDLTGLKPGTEYVVNIMGVKGGKISPPLSAIFTT

SEQ ID NO: 17306 - protein, 89 aa, Artificial Sequence
  source: /note="Description of Artificial Sequence: Synthetic polypeptide"
LPAPKNLVVSRVTEDSARLSWTAPDAAFDSFWIRYFEFLGSGEAIVLTVPGSERSYDLTGLKPGTEYAVNIMGVKGGRVSVPLSAIFTT

SEQ ID NO: 17307 - protein, 89 aa, Artificial Sequence
  source: /note="Description of Artificial Sequence: Synthetic polypeptide"
LPAPKNLVVSRVTEDSARLSWTAPDAAFDSFWIRYFEFLGSGEAIVLTVPGSERSYDLTGLKPGTEYVVQILGVKGGSISVPLSAIFTT

SEQ ID NO: 17308 - protein, 89 aa, Artificial Sequence
  source: /note="Description of Artificial Sequence: Synthetic polypeptide"
LPAPKNLVVSRVTEDSARLSWTAPDAAFDSFWIRYFEFLGSGEAIVLTVPGSERSYDLTGLKPGTEYVVNIMGVKGGSISYPLSAIFTT

SEQ ID NO: 17309 - protein, 89 aa, Artificial Sequence
  source: /note="Description of Artificial Sequence: Synthetic polypeptide"
LPAPKNLVVSRVTEDSARLSWTAPDAAFDSFWIRYFEFLGSGEAIVLTVPGSERSYDLTGLKPGTEYVVQILGVKGGYISIPLSAIFTT

SEQ ID NO: 17310 - protein, 89 aa, Artificial Sequence
  source: /note="Description of Artificial Sequence: Synthetic polypeptide"
LPAPKNLVVSRVTEDSARLSWTAPDAAFDSFWIRYFEFLGSGEAIVLTVPGSERSYDLTGLKPGTEYVVQIMGVKGGTVSPPLSAIFTT

SEQ ID NO: 17311 - protein, 89 aa, Artificial Sequence
  source: /note="Description of Artificial Sequence: Synthetic polypeptide"
LPAPKNLVVSRVTEDSARLSWTAPDAAFDSFWIRYFEFTTAGEAIVLTVPGSERSYDLTGLKPGTEYVVNIMGVKGGSISPPLSAIFTT

SEQ ID NO: 17312 - protein, 89 aa, Artificial Sequence
  source: /note="Description of Artificial Sequence: Synthetic polypeptide"
LPAPKNLVVSRVTEDSARLSWTAPDAAFDSFWIRYFELLSTGEAIVLTVPGSERSYDLTGLKPGTEYVVNIMGVKGGSISPPLSAIFTT

SEQ ID NO: 17313 - protein, 89 aa, Artificial Sequence
  source: /note="Description of Artificial Sequence: Synthetic polypeptide"
LPAPKNLVVSRVTEDSARLSWTAPDAAFDSFWIRYFEFVSKGEAIVLTVPGSERSYDLTGLKPGTEYVVNIMGVKGGSISPPLSAIFTT

SEQ ID NO: 17314 - protein, 89 aa, Artificial Sequence
  source: /note="Description of Artificial Sequence: Synthetic polypeptide"
LPAPKNLVVSRVTEDSARLSWTAPDAAFDSFWIRYFEFLGSGEAIVLTVPGSERSYDLTGLKPGTEYVVNILGVKGGKISPPLSAIFTT

SEQ ID NO: 17315 - protein, 89 aa, Artificial Sequence
  source: /note="Description of Artificial Sequence: Synthetic polypeptide"
LPAPKNLVVSRVTEDSARLSWTAPDAAFDSFWIRYFEFVGSGEAIVLTVPGSERSYDLTGLKPGTEYVVNILGVKGGSISPPLSAIFTT

SEQ ID NO: 17316 - protein, 89 aa, Artificial Sequence
  source: /note="Description of Artificial Sequence: Synthetic polypeptide"
LPAPKNLVVSRVTEDSARLSWTAPDAAFDSFWIRYFEFVSKGDAIVLTVPGSERSYDLTGLKPGTEYVVNILGVKGGSISPPLSAIFTT

SEQ ID NO: 17317 - protein, 89 aa, Artificial Sequence
  source: /note="Description of Artificial Sequence: Synthetic polypeptide"
LPAPKNLVVSRVTEDSARLSWTAPDAAFDSFWIRYFEFLGSGEAIVLTVPGSERSYDLTGLKPGTEYVVNILSVKGGSISPPLSAIFTT

SEQ ID NO: 17318 - protein, 94 aa, Artificial Sequence
  source: /note="Description of Artificial Sequence: Synthetic polypeptide"
LPAPKNLVVSEVTEDSLRLSWADPHGFYDSFLIQYQESEKVGEAINLTVPGSERSYDLTGLKPGTEYTVSIYGVHNVYKDTNMRGLPLSAEFTT

SEQ ID NO: 17319 - protein, 94 aa, Artificial Sequence
  source: /note="Description of Artificial Sequence: Synthetic polypeptide"
LPAPKNLVVSEVTEDSLRLSWTYDRDGYDSFLIQYQESEKVGEAINLTVPGSERSYDLTGLKPGTEYTVSIYGVHNVYKDTNMRGLPLSAEFTT

SEQ ID NO: 17320 - protein, 94 aa, Artificial Sequence
  source: /note="Description of Artificial Sequence: Synthetic polypeptide"
LPAPKNLVVSEVTEDSLRLSWGYNGDHFDSFLIQYQESEKVGEAINLTVPGSERSYDLTGLKPGTEYTVSIYGVHNVYKDTNMRGLPLSAEFTT

SEQ ID NO: 17321 - protein, 94 aa, Artificial Sequence
  source: /note="Description of Artificial Sequence: Synthetic polypeptide"
LPAPKNLVVSEVTEDSLRLSWDDPRGFYESFLIQYQESEKVGEAINLTVPGSERSYDLTGLKPGTEYTVSIYGVHNVYKDTNMRGLPLSAEFTT

SEQ ID NO: 17322 - protein, 94 aa, Artificial Sequence
  source: /note="Description of Artificial Sequence: Synthetic polypeptide"
LPAPKNLVVSEVTEDSLRLSWTWPYADLDSFLIQYQESEKVGEAINLTVPGSERSYDLTGLKPGTEYTVSIYGVHNVYKDTNMRGLPLSAEFTT

SEQ ID NO: 17323 - protein, 95 aa, Artificial Sequence
  source: /note="Description of Artificial Sequence: Synthetic polypeptide"
LPAPKNLVVSEVTEDSLRLSWDYDLGVYFDSFLIQYQESEKVGEAINLTVPGSERSYDLTGLKPGTEYTVSIYGVHNVYKDTNMRGLPLSAEFTT

SEQ ID NO: 17324 - protein, 94 aa, Artificial Sequence
  source: /note="Description of Artificial Sequence: Synthetic polypeptide"
LPAPKNLVVSEVTEDSLRLSWDDPWAFYESFLIQYQESEKVGEAINLTVPGSERSYDLTGLKPGTEYTVSIYGVHNVYKDTNMRGLPLSAEFTT

SEQ ID NO: 17325 - protein, 94 aa, Artificial Sequence
  source: /note="Description of Artificial Sequence: Synthetic polypeptide"
LPAPKNLVVSEVTEDSLRLSWTAPDAAFDSFLIQYQESEKVGEAINLTVPGSERSYDLTGLKPGTEYTVSIYGVLGSYVFEHDVMLPLSAEFTT

SEQ ID NO: 17326 - protein, 94 aa, Artificial Sequence
  source: /note="Description of Artificial Sequence: Synthetic polypeptide"
LPAPKNLVVSEVTEDSARLSWDDPWAFYESFLIQYQESEKVGEAIVLTVPGSERSYDLTGLKPGTEYTVSIYGVHNVYKDTNMRGLPLSAIFTT

SEQ ID NO: 17327 - protein, 94 aa, Artificial Sequence
  source: /note="Description of Artificial Sequence: Synthetic polypeptide"
LPAPKNLVVSEVTEDSARLSWTAPDAAFDSFLIQYQESEKVGEAIVLTVPGSERSYDLTGLKPGTEYTVSIYGVLGSYVFEHDVMLPLSAIFTT

SEQ ID NO: 17328 - protein, 94 aa, Artificial Sequence
  source: /note="Description of Artificial Sequence: Synthetic polypeptide"
LPAPKNLVVSEVTEDSARLSWADPHGFYDSFLIQYQESEKVGEAIVLTVPGSERSYDLTGLKPGTEYTVSIYGVHNVYKDTNMRGLPLSAIFTT

SEQ ID NO: 17329 - protein, 94 aa, Artificial Sequence
  source: /note="Description of Artificial Sequence: Synthetic polypeptide"
LPAPKNLVVSEVTEDSARLSWDDPWAFYESFLIQYQESEKVGEAIVLTVPGSERSYDLTGLKPGTEYTVSIYGVHNVYKDTNIRGLPLSAIFTT

SEQ ID NO: 17330 - protein, 94 aa, Artificial Sequence
  source: /note="Description of Artificial Sequence: Synthetic polypeptide"
LPAPKNLVVSEVTEDSARLSWDDPHAFYESFLIQYQESEKVGEAIVLTVPGSERSYDLTGLKPGTEYTVSIYGVHNVYKDTNIRGLPLSAIFTT

SEQ ID NO: 17331 - protein, 94 aa, Artificial Sequence
  source: /note="Description of Artificial Sequence: Synthetic polypeptide"
LPAPKNLVVSEVTEDSARLSWADPHGFYDSFLIQYQESEKVGEAIVLTVPGSERSYDLTGLKPGTEYTVSIYGVHNVYKDTNIRGLPLSAIFTT

SEQ ID NO: 17332 - protein, 95 aa, Artificial Sequence
  source: /note="Description of Artificial Sequence: Synthetic polypeptide"
MLPAPKNLVVSEVTEDSLRLSWADPHGFYDSFLIQYQESEKVGEAINLTVPGSERSYDLTGLKPGTEYTVSIYGVHNVYKDTNMRGLPLSAEFTT

SEQ ID NO: 17333 - protein, 95 aa, Artificial Sequence
  source: /note="Description of Artificial Sequence: Synthetic polypeptide"
MLPAPKNLVVSEVTEDSLRLSWTYDRDGYDSFLIQYQESEKVGEAINLTVPGSERSYDLTGLKPGTEYTVSIYGVHNVYKDTNMRGLPLSAEFTT

SEQ ID NO: 17334 - protein, 95 aa, Artificial Sequence
  source: /note="Description of Artificial Sequence: Synthetic polypeptide"
MLPAPKNLVVSEVTEDSLRLSWGYNGDHFDSFLIQYQESEKVGEAINLTVPGSERSYDLTGLKPGTEYTVSIYGVHNVYKDTNMRGLPLSAEFTT

SEQ ID NO: 17335 - protein, 95 aa, Artificial Sequence
  source: /note="Description of Artificial Sequence: Synthetic polypeptide"
MLPAPKNLVVSEVTEDSLRLSWDDPRGFYESFLIQYQESEKVGEAINLTVPGSERSYDLTGLKPGTEYTVSIYGVHNVYKDTNMRGLPLSAEFTT

SEQ ID NO: 17336 - protein, 95 aa, Artificial Sequence
  source: /note="Description of Artificial Sequence: Synthetic polypeptide"
MLPAPKNLVVSEVTEDSLRLSWTWPYADLDSFLIQYQESEKVGEAINLTVPGSERSYDLTGLKPGTEYTVSIYGVHNVYKDTNMRGLPLSAEFTT

SEQ ID NO: 17337 - protein, 96 aa, Artificial Sequence
  source: /note="Description of Artificial Sequence: Synthetic polypeptide"
MLPAPKNLVVSEVTEDSLRLSWDYDLGVYFDSFLIQYQESEKVGEAINLTVPGSERSYDLTGLKPGTEYTVSIYGVHNVYKDTNMRGLPLSAEFTT

SEQ ID NO: 17338 - protein, 95 aa, Artificial Sequence
  source: /note="Description of Artificial Sequence: Synthetic polypeptide"
MLPAPKNLVVSEVTEDSLRLSWDDPWAFYESFLIQYQESEKVGEAINLTVPGSERSYDLTGLKPGTEYTVSIYGVHNVYKDTNMRGLPLSAEFTT

SEQ ID NO: 17339 - protein, 95 aa, Artificial Sequence
  source: /note="Description of Artificial Sequence: Synthetic polypeptide"
MLPAPKNLVVSEVTEDSLRLSWTAPDAAFDSFLIQYQESEKVGEAINLTVPGSERSYDLTGLKPGTEYTVSIYGVLGSYVFEHDVMLPLSAEFTT

SEQ ID NO: 17340 - protein, 95 aa, Artificial Sequence
  source: /note="Description of Artificial Sequence: Synthetic polypeptide"
MLPAPKNLVVSEVTEDSARLSWDDPWAFYESFLIQYQESEKVGEAIVLTVPGSERSYDLTGLKPGTEYTVSIYGVHNVYKDTNMRGLPLSAIFTT

SEQ ID NO: 17341 - protein, 95 aa, Artificial Sequence
  source: /note="Description of Artificial Sequence: Synthetic polypeptide"
MLPAPKNLVVSEVTEDSARLSWTAPDAAFDSFLIQYQESEKVGEAIVLTVPGSERSYDLTGLKPGTEYTVSIYGVLGSYVFEHDVMLPLSAIFTT

SEQ ID NO: 17342 - protein, 95 aa, Artificial Sequence
  source: /note="Description of Artificial Sequence: Synthetic polypeptide"
MLPAPKNLVVSEVTEDSARLSWADPHGFYDSFLIQYQESEKVGEAIVLTVPGSERSYDLTGLKPGTEYTVSIYGVHNVYKDTNMRGLPLSAIFTT

SEQ ID NO: 17343 - protein, 95 aa, Artificial Sequence
  source: /note="Description of Artificial Sequence: Synthetic polypeptide"
MLPAPKNLVVSEVTEDSARLSWDDPWAFYESFLIQYQESEKVGEAIVLTVPGSERSYDLTGLKPGTEYTVSIYGVHNVYKDTNIRGLPLSAIFTT

SEQ ID NO: 17344 - protein, 95 aa, Artificial Sequence
  source: /note="Description of Artificial Sequence: Synthetic polypeptide"
MLPAPKNLVVSEVTEDSARLSWDDPHAFYESFLIQYQESEKVGEAIVLTVPGSERSYDLTGLKPGTEYTVSIYGVHNVYKDTNIRGLPLSAIFTT

SEQ ID NO: 17345 - protein, 95 aa, Artificial Sequence
  source: /note="Description of Artificial Sequence: Synthetic polypeptide"
MLPAPKNLVVSEVTEDSARLSWADPHGFYDSFLIQYQESEKVGEAIVLTVPGSERSYDLTGLKPGTEYTVSIYGVHNVYKDTNIRGLPLSAIFTT

SEQ ID NO: 17346 - protein, 513 aa, Homo sapiens
EPKSCDKTHTCPPCPAPELLGGPSVFLFPPKPKDTLMISRTPEVTCVVVDVSHEDPEVKFNWYVDGVEVHNAKTKPREEQYNSTYRVVSVLTVLHQDWLNGKEYKCKVSNKALPAPIEKTISKAKGQPREPQVYTLPPSREEMTKNQVSLTCLVKGFYPSDIAVEWESNGQPENNYKTTPPVLDSDGSFFLYSKLTVDKSRWQQGNVFSCSVMHEALHNHYTQKSLSLSPGKSIKQIEDKIEEILSKIYHIENEIARIKKLIGERGHDIERKCCVECPPCPEPKSCDKTHTCPPCPAPELLGGPSVFLFPPKPKDTLMISRTPEVTCVVVDVSHEDPEVKFNWYVDGVEVHNAKTKPREEQYNSTYRVVSVLTVLHQDWLNGKEYKCKVSNKALPAPIEKTISKAKGQPREPQVYTLPPSREEMTKNQVSLTCLVKGFYPSDIAVEWESNGQPENNYKTTPPVLDSDGSFFLYSKLTVDKSRWQQGNVFSCSVMHEALHNHYTQKSLSLSPGK

SEQ ID NO: 17347 - protein, 218 aa, Homo sapiens; identical to SEQ ID NO: 12380

SEQ ID NO: 17348 - protein, 218 aa, Homo sapiens; identical to SEQ ID NO: 6437

SEQ ID NO: 17349 - protein, 217 aa, Homo sapiens
PAPPVAGPSVFLFPPKPKDTLMISRTPEVTCVVVDVSHEDPEVQFNWYVDGVEVHNAKTKPREEQFNSTFRVVSVLTVVHQDWLNGKEYKCKVSNKGLPAPIEKTISKTKGQPREPQVYTLPPSREEMTKNQVSLTCLVKGFYPSDIAVEWESNGQPENNYKTTPPMLDSDGSFFLYSKLTVDKSRWQQGNVFSCSVMHEALHNHYTQKSLSLSPGK

SEQ ID NO: 17350 - protein, 218 aa, Homo sapiens
PAPELLGGPSVFLFPPKPKDTLMISRTPEVTCVVVDVSHEDPEVQFKWYVDGVEVHNAKTKPREEQFNSTFRVVSVLTVLHQDWLNGKEYKCKVSNKALPAPIEKTISKTKGQPREPQVYTLPPSREEMTKNQVSLTCLVKGFYPSDIAVEWESSGQPENNYNTTPPMLDSDGSFFLYSKLTVDKSRWQQGNIFSCSVMHEALHNRFTQKSLSLSPGK

SEQ ID NO: 17351 - protein, 218 aa, Homo sapiens
PAPEFLGGPSVFLFPPKPKDTLMISRTPEVTCVVVDVSQEDPEVQFNWYVDGVEVHNAKTKPREEQFNSTYRVVSVLTVLHQDWLNGKEYKCKVSNKGLPSSIEKTISKAKGQPREPQVYTLPPSQEEMTKNQVSLTCLVKGFYPSDIAVEWZSNGQPENNYKTTPPVLDSDGSFFLYSRLTVDKSRWQEGNVFSCSVMHEALHNHYTQKSLSLSLGK

SEQ ID NO: 17352 - protein, 215 aa, Mus musculus
TVPEVSSVFIFPPKPKDVLTITLTPKVTCVVVDISKDDPEVQFSWFVDDVEVHTAQTQPREEQFNSTFRSVSELPIMHQDCLNGKEFKCRVNSAAFPAPIEKTISKTKGRPKAPQVYTIPPPKEQMAKDKVSLTCMITDFFPEDITVEWQWNGQPAENYKNTQPIMDTDGSYFVYSKLNVQKSNWEAGNTFTCSVLHEGLHNHHTEKSLSHSPGK

SEQ ID NO: 17353 - protein, 218 aa, Mus musculus
PAPNLLGGPSVFIFPPKIKDVLMISLSPIVTCVVVDVSEDDPDVQISWFVNNVEVHTAQTQTHREDYNSTLRVVSALPIQHQDWMSGKEFKCKVNNKDLPAPIERTISKPKGSVRAPQVYVLPPPEEEMTKKQVTLTCMVTDFMPEDIYVEWTNNGKTELNYKNTEPVLDSDGSYFMYSKLRVEKKNWVERNSYSCSVVHEGLHNHHTTKSFSRTPGK

SEQ ID NO: 17354 - protein, 218 aa, Mus musculus
PAPNLEGGPSVFIFPPNIKDVLMISLTPKVTCVVVDVSEDDPDVQISWFVNNVEVHTAQTQTHREDYNSTIRVVSHLPIQHQDWMSGKEFKCKVNNKDLPSPIERTISKPKGLVRAPQVYTLPPPAEQLSRKDVSLTCLVVGFNPGDISVEWTSNGHTEENYKDTAPVLDSDGSYFIYSKLNMKTSKWEKTDSFSCNVRHEGLKNYYLKKTISRSPGK

SEQ ID NO: 17355 - protein, 218 aa, Mus musculus
PPGNILGGPSVFIFPPKPKDALMISLTPKVTCVVVDVSEDDPDVHVSWFVDNKEVHTAWTQPREAQYNSTFRVVSALPIQHQDWMRGKEFKCKVNNKALPAPIERTISKPKGRAQTPQVYTIPPPREQMSKKKVSLTCLVTNFFSEAISVEWERNGELEQDYKNTPPILDSDGTYFLYSKLTVDTDSWLQGEIFTCSVVHEALHNHHTQKNLSRSPGK

SEQ ID NO: 17356 - protein, 444 aa, Artificial Sequence
  source: /note="Description of Artificial Sequence: Synthetic polypeptide"
QVQLQQSGAELVRPGASVKLSCKASGYTFSDFEMHWVKQTPVHGLEWIGDIDPGTGDTAYNLKFKGKATLTTDKSSSTAYMELRSLTSEDSAVYYCTLGAFVYWGQGTLVTVSAASTKGPSVFPLAPSSKSTSGGTAALGCLVKDYFPEPVTVSWNSGALTSGVHTFPAVLQSSGLYSLSSVVTVPSSSLGTQTYICNVNHKPSNTKVDKKVEPKSCDKTHTCPPCPAPELLGGPSVFLFPPKPKDTLMISRTPEVTCVVVDVSHEDPEVKFNWYVDGVEVHNAKTKPREEQYNSTYRVVSVLTVLHQDWLNGKEYKCKVSNKALPAPIEKTISKAKGQPREPQVYTLPPSRDELTKNQVSLTCLVKGFYPSDIAVEWESNGQPENNYKTTPPVLDSDGSFFLYSKLTVDKSRWQQGNVFSCSVMHEALHNHYTQKSLSLSPGK

SEQ ID NO: 17357 - protein, 451 aa, Artificial Sequence
  source: /note="Description of Artificial Sequence: Synthetic polypeptide"
EVQLVESGGGLVQPGGSLRLSCAASGYSFTGHWMNWVRQAPGKGLEWVGMIHPSDSETRYNQKFKDRFTISVDKSKNTLYLQMNSLRAEDTAVYYCARGIYFYGTTYFDYWGQGTLVTVSSASTKGPSVFPLAPSSKSTSGGTAALGCLVKDYFPEPVTVSWNSGALTSGVHTFPAVLQSSGLYSLSSVVTVPSSSLGTQTYICNVNHKPSNTKVDKKVEPKSCDKTHTCPPCPAPELLGGPSVFLFPPKPKDTLMISRTPEVTCVVVDVSHEDPEVKFNWYVDGVEVHNAKTKPREEQYNSTYRVVSVLTVLHQDWLNGKEYKCKVSNKALPAPIEKTISKAKGQPREPQVYTLPPSREEMTKNQVSLTCLVKGFYPSDIAVEWESNGQPENNYKTTPPVLDSDGSFFLYSKLTVDKSRWQQGNVFSCSVMHEALHNHYTQKSLSLSPGK

SEQ ID NO: 17358 - protein, 451 aa, Artificial Sequence
  source: /note="Description of Artificial Sequence: Synthetic polypeptide"
EVQLQQSGPELVKPGASVKMACKASGYTFTDYIMHWVKQKTGQGLEWIGYINPYNDGSKYTEKFNGKATLTSDKSSITAYMELSSLTSEDSAVYYCARGTYYYGSALFDYWGQGTTLTVSSASTKGPSVFPLAPSSKSTSGGTAALGCLVKDYFPEPVTVSWNSGALTSGVHTFPAVLQSSGLYSLSSVVTVPSSSLGTQTYICNVNHKPSNTKVDKKVEPKSCDKTHTCPPCPAPEAAGGPSVFLFPPKPKDTLMISRTPEVTCVVVDVSHEDPEVKFNWYVDGVEVHNAKTKPREEQYNSTYRVVSVLTVLHQDWLNGKEYKCKVSNKALGAPIEKTISKAKGQPREPQVYTLPPSRDELTKNQVSLTCLVKGFYPSDIAVEWESNGQPENNYKTTPPVLDSDGSFFLYSKLTVDKSRWQQGNVFSCSVMHEALHNHYTQKSLSLSPGK

SEQ ID NO: 17359 - protein, 451 aa, Artificial Sequence
  source: /note="Description of Artificial Sequence: Synthetic polypeptide"
QVQLVQSGAEVKKPGASVKVSCKASGYTFTDYITHWVRQAPGQGLEWMGYINPYNDGSKYTEKFQGRVTMTSDTSISTAYMELSRLRSDDTAVYYCARGTYYYGPDLFDYWGQGTTVTVSSASTKGPSVFPLAPSSKSTSGGTAALGCLVKDYFPEPVTVSWNSGALTSGVHTFPAVLQSSGLYSLSSVVTVPSSSLGTQTYICNVNHKPSNTKVDKKVEPKSCDKTHTCPPCPAPEAAGGPSVFLFPPKPKDTLMISRTPEVTCVVVDVSHEDPEVKFNWYVDGVEVHNAKTKPREEQYNSTYRVVSVLTVLHQDWLNGKEYKCKVSNKALGAPIEKTISKAKGQPREPQVYTLPPSRDELTKNQVSLTCLVKGFYPSDIAVEWESNGQPENNYKTTPPVLDSDGSFFLYSKLTVDKSRWQQGNVFSCSVMHEALHNHYTQKSLSLSPGK

SEQ ID NO: 17360 - protein, 451 aa, Artificial Sequence
  source: /note="Description of Artificial Sequence: Synthetic polypeptide"
QVQLVQSGAEVKKPGASVKVSCKASGYTFTDYIMHWVRQAPGQGLEWMGYINPYNDGSKYTEKFQGRVTMTSDTSISTAYMELSRLRSDDTAVYYCARGTYYYGPQLFDYWGQGTTVTVSSASTKGPSVFPLAPSSKSTSGGTAALGCLVKDYFPEPVTVSWNSGALTSGVHTFPAVLQSSGLYSLSSVVTVPSSSLGTQTYICNVNHKPSNTKVDKKVEPKSCDKTHTCPPCPAPEAAGGPSVFLFPPKPKDTLMISRTPEVTCVVVDVSHEDPEVKFNWYVDGVEVHNAKTKPREEQYNSTYRVVSVLTVLHQDWLNGKEYKCKVSNKALGAPIEKTISKAKGQPREPQVYTLPPSRDELTKNQVSLTCLVKGFYPSDIAVEWESNGQPENNYKTTPPVLDSDGSFFLYSKLTVDKSRWQQGNVFSCSVMHEALHNHYTQKSLSLSPGK

SEQ ID NO: 17361 - protein, 451 aa, Artificial Sequence
  source: /note="Description of Artificial Sequence: Synthetic polypeptide"
QVQLVQSGAEVKKPGASVKVSCKASGYTFTDYIMHWVRQAPGQGLEWMGYINPYNDGSKYTEKFQGRVTMTSDTSISTAYMELSRLRSDDTAVYYCARGTYYYGSALFDYWGQGTTVTVSSASTKGPSVFPLAPSSKSTSGGTAALGCLVKDYFPEPVTVSWNSGALTSGVHTFPAVLQSSGLYSLSSVVTVPSSSLGTQTYICNVNHKPSNTKVDKKVEPKSCDKTHTCPPCPAPEAAGGPSVFLFPPKPKDTLMISRTPEVTCVVVDVSHEDPEVKFNWYVDGVEVHNAKTKPREEQYNSTYRVVSVLTVLHQDWLNGKEYKCKVSNKALGAPIEKTISKAKGQPREPQVYTLPPSRDELTKNQVSLTCLVKGFYPSDIAVEWESNGQPENNYKTTPPVLDSDGSFFLYSKLTVDKSRWQQGNVFSCSVMHEALHNHYTQKSLSLSPGK

SEQ ID NO: 17362 - protein, 451 aa, Artificial Sequence; identical to SEQ ID NO: 17360
  source: /note="Description of Artificial Sequence: Synthetic polypeptide"

SEQ ID NO: 17363 - protein, 451 aa, Artificial Sequence
  source: /note="Description of Artificial Sequence: Synthetic polypeptide"
QVQLVQSGAEVKKPGASVKVSCKASGYTFTDYIMHWVRQAPGQGLEWMGYINPYNDGSKYTEKFQGRVTMTSDTSISTAYMELSRLRSDDTAVYYCARGTYYYGSELFDYWGQGTTVTVSSASTKGPSVFPLAPSSKSTSGGTAALGCLVKDYFPEPVTVSWNSGALTSGVHTFPAVLQSSGLYSLSSVVTVPSSSLGTQTYICNVNHKPSNTKVDKKVEPKSCDKTHTCPPCPAPEAAGGPSVFLFPPKPKDTLMISRTPEVTCVVVDVSHEDPEVKFNWYVDGVEVHNAKTKPREEQYNSTYRVVSVLTVLHQDWLNGKEYKCKVSNKALGAPIEKTISKAKGQPREPQVYTLPPSRDELTKNQVSLTCLVKGFYPSDIAVEWESNGQPENNYKTTPPVLDSDGSFFLYSKLTVDKSRWQQGNVFSCSVMHEALHNHYTQKSLSLSPGK

SEQ ID NO: 17364 - protein, 451 aa, Artificial Sequence; identical to SEQ ID NO: 17361
  source: /note="Description of Artificial Sequence: Synthetic polypeptide"

SEQ ID NO: 17365 - protein, 451 aa, Artificial Sequence; identical to SEQ ID NO: 17363
  source: /note="Description of Artificial Sequence: Synthetic polypeptide"

SEQ ID NO: 17366 - protein, 452 aa, Artificial Sequence; identical to SEQ ID NO: 6660
  source: /note="Description of Artificial Sequence: Synthetic polypeptide"

SEQ ID NO: 17367 - protein, 452 aa, Artificial Sequence
  source: /note="Description of Artificial Sequence: Synthetic polypeptide"
EVQLVESGGGLVQPGGSLRLSCAASGYTFTSYNMHWVRQAPGKGLEWVGAIYPGNGDTSYNQKFKGRFTISVDKSKNTLYLQMNSLRAEDTAVYYCARVVYYSNSYWYFDVWGQGTLVTVSSASTKGPSVFPLAPSSKSTSGGTAALGCLVKDYFPEPVTVSWNSGALTSGVHTFPAVLQSSGLYSLSSVVTVPSSSLGTQTYICNVNHKPSNTKVDKKVEPKSCDKTHTCPPCPAPELLGGPSVFLFPPKPKDTLMISRTPEVTCVVVDVSHEDPEVKFNWYVDGVEVHNAKTKPREEQYNATYRVVSVLTVLHQDWLNGKEYKCKVSNKALPAPIAATISKAKGQPREPQVYTLPPSREEMTKNQVSLTCLVKGFYPSDIAVEWESNGQPENNYKTTPPVLDSDGSFFLYSKLTVDKSRWQQGNVFSCSVMHEALHNHYTQKSLSLSPGK

SEQ ID NO: 17368 - protein, 452 aa, Artificial Sequence; identical to SEQ ID NO: 6662
  source: /note="Description of Artificial Sequence: Synthetic polypeptide"

SEQ ID NO: 17369 - protein, 452 aa, Artificial Sequence; identical to SEQ ID NO: 6664
  source: /note="Description of Artificial Sequence: Synthetic polypeptide"

SEQ ID NO: 17370 - protein, 452 aa, Artificial Sequence; identical to SEQ ID NO: 6665
  source: /note="Description of Artificial Sequence: Synthetic polypeptide"

SEQ ID NO: 17371 - protein, 452 aa, Artificial Sequence
  source: /note="Description of Artificial Sequence: Synthetic polypeptide"
EVQLVESGGGLVQPGGSLRLSCAASGYTFTSYNMHWVRQAPGKGLEWVGAIYPGNGATSYNQKFKGRFTISVDKSKNTLYLQMNSLRAEDTAVYYCARVVYYSASYWYFDVWGQGTLVTVSSASTKGPSVFPLAPSSKSTSGGTAALGCLVKDYFPEPVTVSWNSGALTSGVHTFPAVLQSSGLYSLSSVVTVPSSSLGTQTYICNVNHKPSNTKVDKKVEPKSCDKTHTCPPCPAPELLGGPSVFLFPPKPKDTLMISRTPEVTCVVVDVSHEDPEVKFNWYVDGVEVHNAKTKPREEQYNATYRVVSVLTVLHQDWLNGKEYKCKVSNAALPAPIAATISKAKGQPREPQVYTLPPSREEMTKNQVSLTCLVKGFYPSDIAVEWESNGQPENNYKTTPPVLDSDGSFFLYSKLTVDKSRWQQGNVFSCSVMHEALHWHYTQKSLSLSPGK

SEQ ID NO: 17372 - protein, 452 aa, Artificial Sequence; identical to SEQ ID NO: 7426
  source: /note="Description of Artificial Sequence: Synthetic polypeptide"

SEQ ID NO: 17373 - protein, 452 aa, Artificial Sequence
  source: /note="Description of Artificial Sequence: Synthetic polypeptide"
EVQLVESGGGLVQPGGSLRLSCAASGYTFTSYNMHWVRQAPGKGLEWVGAIYPGNGDTSYNQKFKGRFTISVDKSKNTLYLQMNSLRAEDTAVYYCARVVYYSNSYWYFDVWGQGTLVTVSSASTKGPSVFPLAPSSKSTSGGTAALGCLVKDYFPEPVTVSWNSGALTSGVHTFPAVLQSSGLYSLSSVVTVPSSSLGTQTYICNVNHKPSNTKVDKKVEPKSCDKTHTCPPCPAPELLGGPSVFLFPPKPKDTLMISRTPEVTCVVVDVSHEDPEVKFNWYVDGVEVHNAKTKPREEQYNATYRVVSVLTVLHQDWLNGKEYKCKVSNAALPAPIAATISKAKGQPREPQVYTLPPSREEMTKNQVSLTCLVKGFYPSDIAVEWESNGQPENNYKTTPPVLDSDGSFFLYSKLTVDKSRWQQGNVFSCSVMHEALHNHYTQKSLSLSPGK

SEQ ID NO: 17374 - protein, 119 aa, Artificial Sequence [sequence omitted]

SEQ ID NO: 17375 - protein, 122 aa, Artificial Sequence [sequence omitted]

SEQ ID NO: 17376 - protein, 455 aa, Artificial Sequence
  source: /note="Description of Artificial Sequence: Synthetic polypeptide"
EVQLLESGGGLVQPGGSLRLSCAASGFTFSTYAMNWVRQAPGKGLEWVSRIRSKYNNYATYYADSVKGRFTISRDDSKNTLYLQMNSLRAEDTAVYYCVRHGNFGNSYVSWFAYWGQGTLVTVSSASTKGPSVFPLAPSSKSTSGGTAALGCLVKDYFPEPVTVSWNSGALTSGVHTFPAVLQSSGLYSLSSVVTVPSSSLGTQTYICNVNHKPSNTKVDKKVEPKSCDKTHTCPPCPAPELLGGPSVFLFPPKPKDTLMISRTPEVTCVVVDVSHEDPEVKFNWYVDGVEVHNAKTKPREEQYNSTYRVVSVLTVLHQDWLNGKEYKCKVSNKALPAPIEKTISKAKGQPREPQVYTLPPSRDELTKNQVSLTCLVKGFYPSDIAVEWESNGQPENNYKTTPPVLDSDGSFFLYSKLTVDKSRWQQGNVFSCSVMHEALHNHYTQKSLSLSPGK

SEQ ID NO: 17377 - protein, 462 aa, Homo sapiens
  MOD_RES (14)..(14): Any amino acid
  MOD_RES (42)..(42): Any amino acid
  MOD_RES (97)..(97): Any amino acid
MDWTWSILFLVAAXTGAHSQVQLVQSGAEVKKPGASVKVSCXASGYTFTSYGFSWVRQAPGQGLEWMGWISASNGNTYYAQKLQGRVTMTTDTSTSXAYMELRSLRSDDTAVYYCARVYADYADYWGQGTLVTVSSASTKGPSVFPLAPCSRSTSESTAALGCLVKDYFPEPVTVSWNSGALTSGVHTFPAVLQSSGLYSLSSVVTVPSSNFGTQTYTCNVDHKPSNTKVDKTVERKCCVECPPCPAPPVAGPSVFLFPPKPKDTLMISRTPEVTCVVVDVSHEDPEVQFNWYVDGVEVHNAKTKPREEQFNSTFRVVSVLTVVHQDWLNGKEYKCKVSNKGLPAPIEKTISKTKGQPREPQVYTLPPSREEMTKNQVSLTCLVKGFYPSDIAVEWESNGQPENNYKTTPPMLDSDGSFFLYSKLTVDKSRWQQGNVFSCSVMHEALHNHYTQKSLSLSPGK

SEQ ID NO: 17378 - protein, 132 aa, Homo sapiens
MDWTWSILFLVAAPTGAHSQVQLVQSGAEVKKPGASVKVSCKASGYTFTSYGISWVRQAPGQGLEWMGWISAYNGNTNYAQKLQGRVTMTTDTSTSTAYMELRSLRSDDTAVYYCARYSYFWGQGTLVTVSS

SEQ ID NO: 17379 - protein, 443 aa, Mus musculus; identical to SEQ ID NO: 12448

SEQ ID NO: 17380 - protein, 445 aa, Mus musculus; identical to SEQ ID NO: 14642

SEQ ID NO: 17381 - protein, 443 aa, Mus musculus; identical to SEQ ID NO: 12449

SEQ ID NO: 17382 - protein, 446 aa, Mus musculus; identical to SEQ ID NO: 12450

SEQ ID NO: 17383 - protein, 448 aa, Mus musculus; identical to SEQ ID NO: 12451

SEQ ID NO: 17384 - protein, 448 aa, Mus musculus; identical to SEQ ID NO: 12452

SEQ ID NO: 17385 - protein, 448 aa, Mus musculus; identical to SEQ ID NO: 12453

SEQ ID NO: 17386 - protein, 448 aa, Mus musculus; identical to SEQ ID NO: 12454

SEQ ID NO: 17387 - protein, 448 aa, Mus musculus; identical to SEQ ID NO: 12455

SEQ ID NO: 17388 - protein, 448 aa, Mus musculus; identical to SEQ ID NO: 12456

SEQ ID NO: 17389 - protein, 448 aa, Mus musculus; identical to SEQ ID NO: 12457

SEQ ID NO: 17390 - protein, 446 aa, Mus musculus; identical to SEQ ID NO: 12458

SEQ ID NO: 17391 - protein, 447 aa, Mus musculus; identical to SEQ ID NO: 12459

SEQ ID NO: 17392 - protein, 447 aa, Mus musculus; identical to SEQ ID NO: 12460

SEQ ID NO: 17393 - protein, 446 aa, Mus musculus; identical to SEQ ID NO: 12461

SEQ ID NO: 17394 - protein, 446 aa, Mus musculus; identical to SEQ ID NO: 12462

SEQ ID NO: 17395 - protein, 446 aa, Mus musculus; identical to SEQ ID NO: 12463

SEQ ID NO: 17396 - protein, 444 aa, Mus musculus; identical to SEQ ID NO: 12464

SEQ ID NO: 17397 - protein, 448 aa, Mus musculus; identical to SEQ ID NO: 12465

SEQ ID NO: 17398 - protein, 463 aa, Homo sapiens
MKHLWFFLLLVAAPRWVLSQLQLQESGPGLVKPSETLSLTCTVSGGSISSSSYYGGWIRQPPGKGLDWIGSIYYSGNTYYNPSLKSRVTISVDTSKNQFSLKLSSVTAADTAVYYCARHSWDYFDYWDQGTLVTVSSASTKGPSVFPLAPCSRSTSESTAALGCLVKDYFPEPVTVSWNSGALTSGVHTFPAVLQSSGLYSLSSVVTVPSSNFGTQTYTCNVDHKPSNTKVDKTVERKCCVECPPCPAPPVAGPSVFLFPPKPKDTLMISRTPEVTCVVVDVSHEDPEVQFNWYVDGVEVHNAKTKPREEQFNSTFRVVSVLTVVHQDWLNGKEYKCKVSNKGLPAPIEKTISKTKGQPREPQVYTLPPSREEMTKNQVSLTCLVKGFYPSDIAVEWESNGQPENNYKTTPPMLDSDGSFFLYSKLTVDKSRWQQGNVFSCSVMHEALHNHYTQKSLSLSPGK

SEQ ID NO: 17399 - protein, 135 aa, Homo sapiens
MKHLWFFLLLVAAPRWVLSQLQLQESGPGLVKPSETLSLTCTVSGGSISSSSYYWGWIRQPPGKGLEWIGSIYYSGSTYYNPSLKSRVTISVDTSKNQFSLKLSSVTAADTAVYYCARSCYFDYWGQGTLVTVSS

SEQ ID NO: 17400 - protein, 462 aa, Homo sapiens
MELGLCWVFLVAILEGVQCEVQLVESGGGLVQPGGSLRLSCAASGFTFSRYSMNWVRQAPGKGLEWVSYISSRSSTIYYADSVKGRFTMSRDNAKNSLYMQMNSLRDEDTAVYYCGYGDYDYFDYWGQGTLVTVSSASTKGPSVFPLAPCSRSTSESTAALGCLVKDYFPEPVTVSWNSGALTSGVHTFPAVLQSSGLYSLSSVVTVPSSNFGTQTYTCNVDHKPSNTKVDKTVERKCCVECPPCPAPPVAGPSVFLFPPKPKDTLMISRTPEVTCVVVDVSHEDPEVQFNWYVDGVEVHNAKTKPREEQFNSTFRVVSVLTVVHQDWLNGKEYKCKVSNKGLPAPIEKTISKTKGQPREPQVYTLPPSREEMTKNQVSLTCLVKGFYPSDIAVEWESNGQPENNYKTTPPMLDSDGSFFLYSKLTVDKSRWQQGNVFSCSVMHEALHNHYTQKSLSLSPGK

SEQ ID NO: 17401 - protein, 136 aa, Homo sapiens
MELGLCWVFLVAILEGVQCEVQLVESGGGLVQPGGSLRLSCAASGFTFSSYSMNWVRQAPGKGLEWVSYISSSSSTIYYADSVKGRFTISRDNAKNSLYLQMNSLRDEDTAVYYCARYGDYYFDYWGQGTLVTVSS

SEQ ID NO: 17402 - protein, 480 aa, Homo sapiens
MKHLWFFLLLVAAPRWVLSQVQLQESGPGLVKPSQTLSLTCTVSGGSISSGGYYWSWIRQHPGKGLEWIGYIYYSGSTYYNPSLKSRVTISVDTSKNQFSLKLSSVTAADTAVYYCARDGPLGYCSSTSCPVTGEYYYYGMDVWGQGTTVTVSSASTKGPSVFPLAPCSRSTSESTAALGCLVKDYFPEPVTVSWNSGALTSGVHTFPAVLQSSGLYSLSSVVTVPSSNFGTQTYTCNVDHKPSNTKVDKTVERKCCVECPPCPAPPVAGPSVFLFPPKPKDTLMISRTPEVTCVVVDVSHEDPEVQFNWYVDGVEVHNAKTKPREEQFNSTFRVVSVLTVVHQDWLNGKEYKCKVSNKGLPAPIEKTISKTKGQPREPQVYTLPPSREEMTKNQVSLTCLVKGFYPSDIAVEWESNGQPENNYKTTPPMLDSDGSFFLYSKLTVDKSRWQQGNVFSCSVMHEALHNHYTQKSLSLSPGK

SEQ ID NO: 17403 - protein, 149 aa, Homo sapiens
MKHLWFFLLLVAAPRWVLSQVQLQESGPGLVKPSQTLSLTCTVSGGSISSGGYYWSWIRQHPGKGLEWIGYIYYSGSTYYNPSLKSRVTISVDTSKNQFSLKLSSVTAADTAVYYCARGYCSSTSCTGDYYYYYGMDVWGQGTTVTVSS

SEQ ID NO: 17404 - protein, 440 aa, Artificial Sequence; identical to SEQ ID NO: 12472
  source: /note="Description of Artificial Sequence: Synthetic polypeptide"

SEQ ID NO: 17405 - protein, 440 aa, Artificial Sequence; identical to SEQ ID NO: 12472
  source: /note="Description of Artificial Sequence: Synthetic polypeptide"

SEQ ID NO: 17406 - protein, 441 aa, Artificial Sequence; identical to SEQ ID NO: 8618
  source: /note="Description of Artificial Sequence: Synthetic polypeptide"

SEQ ID NO: 17407 - protein, 441 aa, Artificial Sequence; identical to SEQ ID NO: 8618
  source: /note="Description of Artificial Sequence: Synthetic polypeptide"

SEQ ID NO: 17408 - protein, 455 aa, Homo sapiens
EVQLVESGGGLVKPGGSLKLSCAASGFTFSDYYMYWVRQTPEKRLEWVATISDDGSYTYYPDSVKGRFTISRDNAKNNLYLQMSSLKSEDTAMYYCAREGLYYYGSGSYYNQDYWGQGTLVTVSSASTKGPSVFPLAPSSKSTSGGTAALGCLVKDYFPEPVTVSWNSGALTSGVHTFPAVLQSSGLYSLSSVVTVPSSSLGTQTYICNVNHKPSNTKVDKRVEPKSCDKTHTCPPCPAPELLGGPSVFLFPPKPKDTLMISRTPEVTCVVVDVSHEDPEVKFNWYVDGVEVHNAKTKPREEQYNSTYRVVSVLTVLHQDWLNGKEYKCKVSNKALPAPIEKTISKAKGQPREPQVYTLPPSREEMTKNQVSLTCLVKGFYPSDIAVEWESNGQPENNYKTTPPVLDSDGSFFLYSRLTVDKSRWQQGNVFSCSVMHEALHNHYTQKSLSLSPGK

SEQ ID NO: 17409 - protein, 449 aa, Homo sapiens
QVQLVQSGAEVKKPGASVKVSCETSGYTFTSYGISWVRQAPGHGLEWMGWISAYNGYTNYAQKLQGRVTMTTDTSTSTAYMELRSLRSDDTAVYYCARDLRGTNYFDYWGQGTLVTVSSASTKGPSVFPLAPSSKSTSGGTAALGCLVKDYFPEPVTVSWNSGALTSGVHTFPAVLQSSGLYSLSSVVTVPSSSLGTQTYICNVNHKPSNTKVDKRVEPKSCDKTHTCPPCPAPELLGGPSVFLFPPKPKDTLMISRTPEVTCVVVDVSHEDPEVKFNWYVDGVEVHNAKTKPREEQYNSTYRVVSVLTVLHQDWLNGKEYKCKVSNKALPAPIEKTISKAKGQPREPQVYTLPPSREEMTKNQVSLTCLVKGFYPSDIAVEWESNGQPENNYKTTPPVLDSDGSFFLYSRLTVDKSRWQQGNVFSCSVMHEALHNHYTQKSLSLSPGK

SEQ ID NO: 17410 - protein, 449 aa, Artificial Sequence; identical to SEQ ID NO: 6969
  source: /note="Description of Artificial Sequence: Synthetic polypeptide"

SEQ ID NO: 17411 - protein, 440 aa, Artificial Sequence
  source: /note="Description of Artificial Sequence: Synthetic polypeptide"
EVQLQQSGPELVKPGASVRISCKASGYTFTSRYIHWMKQRPGQGLEWIGWIYPVTGDTYYNEKFKGKATLTSDKSSSTAYMQISSLTSDDSAVYFCARGGGMFYYWGQGTLVTVSAAKTTPPSVYPLAPGSAAQTNSMVTLGCLVKGYFPEPVTVTWNSGSLSSGVHTFPAVLQSDLYTLSSSVTVPSSTWPSETVTCNVAHPASSTKVDKKIVPRDCGCKPCICTVPEVSSVFIFPPKPKDVLTITLTPKVTCVVVDISKDDPEVQFSWFVDDVEVHTAQTQPREEQFNSTFRSVSELPIMHQDWLNGKEFKCRVNSAAFPAPIEKTISKTKGRPKAPQVYTIPPPKEQMAKDKVSLTCMITDFFPEDITVEWQWNGQPAENYKNTQPIMDTDGSYFVYSKLNVQKSNWEAGNTFTCSVLHEGLHNHHTEKSLSHSPGK

SEQ ID NO: 17412 - protein, 446 aa, Artificial Sequence
  source: /note="Description of Artificial Sequence: Synthetic polypeptide"
EVQLVESGGGLVQPGGSLRLSCAASGYTFTSYWLHWVRQAPGKGLEWVGMIDPSNSDTRFNPNFKDRFTISADTSKNTAYLQMNSLRAEDTAVYYCATYRSYVTPLDYWGQGTLVTVSSASTKGPSVFPLAPSSKSTSGGTAALGCLVKDYFPEPVTVSWNSGALTSGVHTFPAVLQSSGLYSLSSWTVPSSSLGTQTYICNVNHKPSNTKVDKKVEPKSCDKTHTCPPCPAPELLGGPSVFLFPPKPKDTLMISRTPEVTCWVDVSHEDPEVKFNWYVDGVEVHNAKTKPREEQYNSTYRWSVLTVLHQDWLNGKEYKCKVSNKALPAPIEKTISKAKGQPREPQVYTLPPSREEMTKNQVSLSCAVKGFYPSDIAVEWESNGQPENNYKTTPPVLDSDGSFFLVSKLTVDKSRWQQGNVFSCSVMHEALHNHYTQKSLSLSPGK

SEQ ID NO: 17413 - protein, 443 aa, Artificial Sequence
  source: /note="Description of Artificial Sequence: Synthetic polypeptide"
EVQLQQSGTVLARPGASVKMSCKASGYSFTSYWMYWVKQRPGQGLEWIGGFHPGNSGTNYNQKFKGKAKLTAVTSASTAYMELSSLTNEDSAVYYCTRGYYYDGSFTYWGQGTLVTVSAAKTTPPSVYPLAPGSAAQTNSMVTLGCLVKGYFPEPVTVTWNSGSLSSGVHTFPAVLQSDLYTLSSSVTVPSSTWPSETVTCNVAHPASSTKVDKKIVPRDCGCKPCICTVPEVSSVFIFPPKPKDVLTITLTPKVTCVVVDISKDDPEVQFSWFVDDVEVHTAQTQPREEQFNSTFRSVSELPIMHQDWLNGKEFKCRVNSAAFPAPIEKTISKTKGRPKAPQVYTIPPPKEQMAKDKVSLTCMITDFFPEDITVEWQWNGQPAENYKNTQPIMDTDGSYFVYSKLNVQKSNWEAGNTFTCSVLHEGLHNHHTEKSLSHSPGK

SEQ ID NO: 17414 - protein, 443 aa, Artificial Sequence
  source: /note="Description of Artificial Sequence: Synthetic polypeptide"
EVQLQQSGTVLARPGASVKMSCKASGYSFTSYWMYWVKQRPGQGLEWIGGFHPRNSGTNYNQKFKGKAKLTAVTSASTAYMELSSLTNEDSAVYYCTRGYYYDGSFTYWGQGTLVTVSAAKTTPPSVYPLAPGSAAQTNSMVTLGCLVKGYFPEPVTVTWNSGSLSSGVHTFPAVLQSDLYTLSSSVTVPSSTWPSETVTCNVAHPASSTKVDKKIVPRDCGCKPCICTVPEVSSVFIFPPKPKDVLTITLTPKVTCVVVDISKDDPEVQFSWFVDDVEVHTAQTQPREEQFNSTFRSVSELPIMHQDWLNGKEFKCRVNSAAFPAPIEKTISKTKGRPKAPQVYTIPPPKEQMAKDKVSLTCMITDFFPEDITVEWQWNGQPAENYKNTQPIMDTDGSYFVYSKLNVQKSNWEAGNTFTCSVLHEGLHNHHTEKSLSHSPGK

SEQ ID NO: 17415 - protein, 442 aa, Artificial Sequence; identical to SEQ ID NO: 12467
  source: /note="Description of Artificial Sequence: Synthetic polypeptide"

SEQ ID NO: 17416 - protein, 449 aa, Artificial Sequence; identical to SEQ ID NO: 12582
  source: /note="Description of Artificial Sequence: Synthetic polypeptide"

SEQ ID NO: 17417 - protein, 451 aa, Homo sapiens
EVQLVESGGGLVQPGGSLRLSCAASGFTFSSYWMNWVRQAPGKGLEWVANIKKDGSEKYYVDSVKGRFTISRDNAKNSLYLQMNSLRAEDTAVYYCARDLGWGWGWYFDLWGRGTLVTVSSASTKGPSVFPLAPSSKSTSGGTAALGCLVKDYFPEPVTVSWNSGALTSGVHTFPAVLQSSGLYSLSSVVTVPSSSLGTQTYICNVNHKPSNTKVDKRVEPKSCDKTHTCPPCPAPELLGGPSVFLFPPKPKDTLMISRTPEVTCVVVDVSHEDPEVKFNWYVDGVEVHNAKTKPREEQYNSTYRVVSVLTVLHQDWLNGKEYKCKVSNKALPAPIEKTISKAKGQPREPQVYTLPPSREEMTKNQVSLTCLVKGFYPSDIAVEWESNGQPENNYKTTPPVLDSDGSFLLYSKLTVDKSRWQQGNVFSCSVMHEALHNHYTQKSLSLSPGK

SEQ ID NO: 17418 - protein, 455 aa, Homo sapiens
QVQLVESGGGVVQPGRSLRLSCAASGFTFSTYGMHWVRQAPGKGLEWVAVIWDDGSYKYYGDSVKGRFTISRDNSKNTLYLQMNSLRAEDTAVYYCARDGITMVRGVMKDYFDYWGQGTLVTVSSASTKGPSVFPLAPSSKSTSGGTAALGCLVKDYFPEPVTVSWNSGALTSGVHTFPAVLQSSGLYSLSSVVTVPSSSLGTQTYICNVNHKPSNTKVDKRVEPKSCDKTHTCPPCPAPELLGGPSVFLFPPKPKDTLMISRTPEVTCVVVDVSHEDPEVKFNWYVDGVEVHNAKTKPREEQYNSTYRVVSVLTVLHQDWLNGKEYKCKVSNKALPAPIEKTISKAKGQPREPQVYTLPPSREEMTKNQVSLTCLVKGFYPSDIAVEWESNGQPENNYKTTPPVLDSDGSFLLYSKLTVDKSRWQQGNVFSCSVMHEALHNHYTQKSLSLSPGK

SEQ ID NO: 17419 - protein, 451 aa, Artificial Sequence
  source: /note="Description of Artificial Sequence: Synthetic polypeptide"
QVQLVQSGAEVVKPGASVKLSCTTSGFTIKDTYIHWVKKRPGQGLEWIGRIDPTNGNNKYDQKFQGKATITADTSSNTAYLQLSSLTSEDTAVYYCTREDGYRYDDWYFDVWGQGTLVTVSSASTKGPSVFPLAPSSKSTSGGTAALGCLVKDYFPEPVTVSWNSGALTSGVHTFPAVLQSSGLYSLSSVVTVPSSSLGTQTYICNVNHKPSNTKVDKKVEPKSCDKTHTCPPCPAPELLGGPSVFLFPPKPKDTLMISRTPEVTCVVVDVSHEDPEVKFNWYVDGVEVHNAKTKPREEQYNSTYRVVSVLTVLHQDWLNGKEYKCKVSNKALPAPIEKTISKAKGQPREPQVYTLPPSRDELTKNQVSLTCLVKGFYPSDIAVEWESNGQPENNYKTTPPVLDSDGSFFLYSKLTVDKSRWQQGNVFSCSVMHEALHNHYTQKSLSLSPG

SEQ ID NO: 17420 - protein, 445 aa, Artificial Sequence
  source: /note="Description of Artificial Sequence: Synthetic polypeptide"
QVQLQESGPGLVKPSETLSLTCTVSGLSLASNSVSWIRQPPGKGLEWMGVIWNHGGTDYNPSIKSRLSISRDTSKSQVFLKMNSLTAADTAMYFCVRKGGIYFDYWGQGVLVTVSSASTKGPSVFPLAPSSKSTSGGTAALGCLVKDYFPEPVTVSWNSGALTSGVHTFPAVLQSSGLYSLSSVVTVPSSSLGTQTYICNVNHKPSNTKVDKKVEPKSCDKTHTCPPCPAPELLGGPSVFLFPPKPKDTLMISRTPEVTCVVVDVSHEDPEVKFNWYVDGVEVHNAKTKPREEQYNSTYRVVSVLTVLHQDWLNGKEYKCKVSNKALPAPIEKTISKAKGQPREPQVYTLPPSRDELTKNQVSLTCLVKGFYPSDIAVEWESNGQPENNYKTTPPVLDSDGSFFLYSKLTVDKSRWQQGNVFSCSVMHEALHNHYTQKSLSLSPG

SEQ ID NO: 17421 - protein, 222 aa, Artificial Sequence
  source: /note="Description of Artificial Sequence: Synthetic polypeptide"
QVQLQQSGAEVKKPGSSVKVSCKASGYTFTNYYIYWVRQAPGQGLEWIGGINPTSGGSNFNEKFKTRVTITADESSTTAYMELSSLRSEDTAFYFCTRQGLWFDSDGRGFDFWGQGTTVTVSSASTKGPSVFPLAPSSKSTSGGTAALGCLVKDYFPEPVTVSWNSGALTSGVHTFPAVLQSSGLYSLSSVVTVPSSSLGTQTYICNVNHKPSNTKVDKKVP

SEQ ID NO: 17422 - protein, 330 aa, Artificial Sequence; identical to SEQ ID NO: 7178
  source: /note="Description of Artificial Sequence: Synthetic polypeptide"

SEQ ID NO: 17423 - protein, 121 aa, Mus musculus
VQLQESGPGLVKPSQSLSLTCSVTGYSFTNGYYWNWIRQFPGNKLEWMGYISYDGNNSYNPSLKNRISITRDTSKNQFFLKLNSVTTEDTATYYCASHGYYEEDYYAMDYWGQGTSVTVSS

SEQ ID NO: 17424 - protein, 119 aa, Mus musculus
EVKLVESGGGLVKPGGSLKLSCAASGFTFSSFAMSWVRQTPEKRLEWVAVINSNGGITDYPDTVKDRFTISRDNAKNTLYLQMSSLRSEDTALYFCARRGGNYAWFAYWGQGTLVTVSA

SEQ ID NO: 17425 - protein, 119 aa, Mus musculus
QIQLQQSGPELVNPGASVKISCKPSGYTFTDYYINWVKQRPGQGLEWIGWIHPGGGYTKYNEKFRGKATVTVDTSANTVYMQLSSLTSDDSAVYFCARRDYGDYGFAYWGQGTLVTVSA

SEQ ID NO: 17426 - protein, 469 aa, Artificial Sequence
  source: /note="Description of Artificial Sequence: Synthetic polypeptide"
MYRMQLLSCIALSLALVTNSQVQLKQSGPGLVQPSQSLSITCTVSGFSLTNYGVHWVRQSPGKGLEWLGVIWSGGNTDYNTPFTSRLSINKDNSKSQVFFKMNSLQSNDTAIYYCARALTYYDYEFAYWGQGTLVTVSAASTKGPSVFPLAPSSKSTSGGTAALGCLVKDYFPEPVTVSWNSGALTSGVHTFPAVLQSSGLYSLSSVVTVPSSSLGTQTYICNVNHKPSNTKVDKKVEPKSCDKTHTCPPCPAPELLGGPSVFLFPPKPKDTLMISRTPEVTCVVVDVSHEDPEVKFNWYVDGVEVHNAKTKPREEQYNSTYRVVSVLTVLHQDWLNGKEYKCKVSNKALPAPIEKTISKAKGQPREPQVYTLPPSRDELTKNQVSLTCLVKGFYPSDIAVEWESNGQPENNYKTTPPVLDSDGSFFLYSKLTVDKSRWQQGNVFSCSVMHEALHNHYTQKSLSLSPGK

SEQ ID NO: 17427 - protein, 449 aa, Artificial Sequence; identical to SEQ ID NO: 12582
  source: /note="Description of Artificial Sequence: Synthetic polypeptide"

SEQ ID NO: 17428 - protein, 469 aa, Artificial Sequence
  source: /note="Description of Artificial Sequence: Synthetic polypeptide"
MYRMQLLSCIALSLALVTNSQVQLKQSGPGLVQPSQSLSITCTVSGFSLTNYGVHWVRQSPGKGLEWLGVIWSGGNTDYNTPFTSRLSINKDNSKSQVFFKMNSLQSQDTAIYYCARALTYYDYEFAYWGQGTLVTVSAASTKGPSVFPLAPSSKSTSGGTAALGCLVKDYFPEPVTVSWNSGALTSGVHTFPAVLQSSGLYSLSSVVTVPSSSLGTQTYICNVNHKPSNTKVDKKVEPKSCDKTHTCPPCPAPELLGGPSVFLFPPKPKDTLMISRTPEVTCVVVDVSHEDPEVKFNWYVDGVEVHNAKTKPREEQYNSTYRVVSVLTVLHQDWLNGKEYKCKVSNKALPAPIEKTISKAKGQPREPQVYTLPPSRDELTKNQVSLTCLVKGFYPSDIAVEWESNGQPENNYKTTPPVLDSDGSFFLYSKLTVDKSRWQQGNVFSCSVMHEALHNHYTQKSLSLSPGK

SEQ ID NO: 17429 - protein, 449 aa, Artificial Sequence; identical to SEQ ID NO: 12581
  source: /note="Description of Artificial Sequence: Synthetic polypeptide"

SEQ ID NO: 17430 - protein, 449 aa, Artificial Sequence; identical to SEQ ID NO: 12583
  source: /note="Description of Artificial Sequence: Synthetic polypeptide"

SEQ ID NO: 17431 - protein, 129 aa, Homo sapiens; identical to SEQ ID NO: 14050

SEQ ID NO: 17432 - protein, 121 aa, Homo sapiens; identical to SEQ ID NO: 14051

SEQ ID NO: 17433 - protein, 117 aa, Homo sapiens; identical to SEQ ID NO: 14052

SEQ ID NO: 17434 - protein, 121 aa, Homo sapiens; identical to SEQ ID NO: 14053

SEQ ID NO: 17435 - protein, 121 aa, Homo sapiens; identical to SEQ ID NO: 14054

SEQ ID NO: 17436 - protein, 121 aa, Homo sapiens; identical to SEQ ID NO: 14055

SEQ ID NO: 17437 - protein, 123 aa, Homo sapiens; identical to SEQ ID NO: 14056

SEQ ID NO: 17438 - protein, 463 aa, Artificial Sequence
  source: /note="Description of Artificial Sequence: Synthetic polypeptide"
MGWSCIIVLLVSTATGVHSQVQLQQPGAELVRPGTSVKLSCKASGYTFTSHWLHWVKQRPGQGLEWIGVLDPSDFYSNYNQNFKGKATLTVDTSSSTAYMQLSSLTSEDSAVYYCARGLLSGDYAMDYWGQGTSVTVSSAKTTPPSVYPLAPGSAAQTNSMVTLGCLVKGYFPEPVTVTWNSGSLSSGVHTFPAVLQSDLYTLSSSVTVPSSTWPSQTVTCNVAHPASSTKVDKKIVPRDCGCKPCICTVPEVSSVFIFPPKPKDVLTITLTPKVTCVVVDISKDDPEVQFSWFVDDVEVHTAQTQPREEQFNSTFRSVSELPIMHQDWLNGKEFKCRVNSAAFPAPIEKTISKTKGRPKAPQVYTIPPPKEQMAKDKVSLTCMITDFFPEDITVEWQWNGQPAENYKNTQPIMDTDGSYFVYSKLNVQKSNWEAGNTFTCSVLHEGLHNHHTEKSLSHSPGK

SEQ ID NO: 17439 - protein, 475 aa, Artificial Sequence
  source: /note="Description of Artificial Sequence: Synthetic polypeptide"
MGRLTSSFLLLIVPAYVLSQVTLKESGPGILRPSQTLSLTCSFSGFSLSTFGLSVGWIRQPSGKGLEWLAHIWWDDDKYYNPALKSRLTISKDTSKNQVFLKIANVDTADTATYYCARIGADALPFDYWGQGTTLTVSSAKTTPPSVYPLAPGCGDTTGSSVTSGCLVKGYFPEPVTVTWNSGSLSSSVHTFPALLQSGLYTMSSSVTVPSSTWPSQTVTCSVAHPASSTTVDKKLEPSGPISTINPCPPCKECHKCPAPNLEGGPSVFIFPPNIKDVLMISLTPKVTCVVVDVSEDDPDVQISWFVNNVEVHTAQTQTHREDYNSTIRVVSTLPIQHQDWMSGKEFKCKVNNKDLPSPIERTISKIKGLVRAPQVYTLPPPAEQLSRKDVSLTCLVVGFNPGDISVEWTSNGHTEENYKDTAPVLDSDGSYFIYSKLNMKTSKWEKTDSFSCNVRHEGLKNYYLKKTISRSPGK

SEQ ID NO: 17440 - protein, 460 aa, Artificial Sequence
  source: /note="Description of Artificial Sequence: Synthetic polypeptide"
MEWSWVSLFFLSVTTGVHSQVQLQQSDAELVKPGASVKISCKVSGYTFTDHIIHWMKQRPEQGLEWIGYIYPRDGYIKYNEKFKGKATLTADKSSSTAYMQVNSLTSEDSAVYFCARGYYYAMDYWGQGTSVTVSSAKTTPPSVYPLAPGSAAQTNSMVTLGCLVKGYFPEPVTVTWNSGSLSSGVHTFPAVLQSDLYTLSSSVTVPSSTWPSQTVTCNVAHPASSTKVDKKIVPRDCGCKPCICTVPEVSSVFIFPPKPKDVLTITLTPKVTCVVVDISKDDPEVQFSWFVDDVEVHTAQTQPREEQFNSTFRSVSELPIMHQDWLNGKEFKCRVNSAAFPAPIEKTISKTKGRPKAPQVYTIPPPKEQMAKDKVSLTCMITDFFPEDITVEWQWNGQPAENYKNTQPIMDTDGSYFVYSKLNVQKSNWEAGNTFTCSVLHEGLHNHHTEKSLSHSPGK

SEQ ID NO: 17441 - protein, 458 aa, Artificial Sequence
  source: /note="Description of Artificial Sequence: Synthetic polypeptide"
MGWSCIIVLLVSTATCVHSQVQLLQPGAELVRPGTSVKLSCKTSGYTFSSYWMHWVKQRPGQGLEWIGMIDPSDVYTNYNPKFKGKATLTVDTSSSTAYMQLSSLTSEDSAVYYCARNYSGDYWGQGTTLTVSSAKTTPPSVYPLAPGSAAQTNSMVTLGCLVKGYFPEPVTVTWNSGSLSSGVHTFPAVLQSDLYTLSSSVTVPSSTWPSQTVTCNVAHPASSTKVDKKIVPRDCGCKPCICTVPEVSSVFIFPPKPKDVLTITLTPKVTCVVVDISKDDPEVQFSWFVDDVEVHTAQTQPREEQFNSTFRSVSELPIMHQDWLNGKEFKCRVNSAAFPAPIEKTISKTKGRPKAPQVYTIPPPKEQMAKDKVSLTCMITDFFPEDITVEWQWNGQPAENYKNTQPIMDTDGSYFVYSKLNVQKSNWEAGNTFTCSVLHEGLHNHHTEKSLSHSPGK

SEQ ID NO: 17442 - protein, 464 aa, Artificial Sequence
  source: /note="Description of Artificial Sequence: Synthetic polypeptide"
MGWLWNLLFLMAAAQSAQAQIQLVQSGPELKKPGEAVKISCKSSGYTFTTYGMSWVKQAPGRALKWMGWINTYSGVPTYADDFKGRFAFSLESSASTAYLQINNLKNEDTATYFCARGRDGYQVAWFAYWGQGTLVTVSAAKTTPPSVYPLAPGSAAQTNSMVTLGCLVKGYFPEPVTVTWNSGSLSSGVHTFPAVLQSDLYTLSSSVTVPSSTWPSQTVTCNVAHPASSTKVDKKIVPRDCGCKPCICTVPEVSSVFIFPPKPKDVLTITLTPKVTCVVVDISKDDPEVQFSWFVDDVEVHTAQTQPREEQFNSTFRSVSELPIMHQDWLNGKEFKCRVNSAAFPAPIEKTISKTKGRPKAPQVYTIPPPKEQMAKDKVSLTCMITDFFPEDITVEWQWNGQPAENYKNTQPIMDTDGSYFVYSKLNVQKSNWEAGNTFTCSVLHEGLHNHHTEKSLSHSPGK

SEQ ID NO: 17443 - protein, 458 aa, Artificial Sequence
  source: /note="Description of Artificial Sequence: Synthetic polypeptide"
MGWSCIIVLLVSTATGVHSQVQLQQPGAELVRPGTSVKLSCKASGYTFTNYWMHWVKQRPGQGLEWIGMIDPSDSYTNYNPKFKGKATLTVDTSSSTAYMQLSSLTSEDSAVYYCARNYSGDYWGQGTTLTVSSAKTTPPSVYPLAPGSAAQTNSMVTLGCLVKGYFPEPVTVTWNSGSLSSGVHTFPAVLQSDLYTLSSSVTVPSSTWPSQTVTCNVAHPASSTKVDKKIVPRDCGCKPCICTVPEVSSVFIFPPKPKDVLTITLTPKVTCVVVDISKDDPEVQFSWFVDDVEVHTAQTQPREEQFNSTFRSVSELPIMHQDWLNGKEFKCRVNSAAFPAPIEKTISKTKGRPKAPQVYTIPPPKEQMAKDKVSLTCMITDFFPEDITVEWQWNGQPAENYKNTQPIMDTDGSYFVYSKLNVQKSNWEAGNTFTCSVLHEGLHNHHTEKSLSHSPGK

SEQ ID NO: 17444 - protein, 462 aa, Artificial Sequence
  source: /note="Description of Artificial Sequence: Synthetic polypeptide"
MNFGLSLMFLVLVLKGVQCEVQLVESGGGLVKPGGSLKLSCAASGFTFSDYAMSWVRQTPEKRLEWVATISDGGTYTYYPDNVKGRFTISRDNAKNNLYLQMSHLKSEDTAMYYCAREWGDYDGFDYWGQGTTLTVSSAKTTPPSVYPLAPGSAAQTNSMVTLGCLVKGYFPEPVTVTWNSGSLSSGVHTFPAVLQSDLYTLSSSVTVPSSTWPSQTVTCNVAHPASSTKVDKKIVPRDCGCKPCICTVPEVSSVFIFPPKPKDVLTITLTPKVTCVVVDISKDDPEVQFSWFVDDVEVHTAQTQPREEQFNSTFRSVSELPIMHQDWLNGKEFKCRVNSAAFPAPIEKTISKTKGRPKAPQVYTIPPPKEQMAKDKVSLTCMITDFFPEDITVEWQWNGQPAENYKNTQPIMDTDGSYFVYSKLNVQKSNWEAGNTFTCSVLHEGLHNHHTEKSLSHSPGK

SEQ ID NO: 17445 - protein, 451 aa, Artificial Sequence
  source: /note="Description of Artificial Sequence: Synthetic polypeptide"
EVQLVESGGGLVQPGRSLRLSCAASGFTFDDYAMHWVRQAPGKGLEWVSGISWDSGSVGYADSVKGRFTISRDNAKNSLYLQMNSLRAEDTALYYCARDLGAYQWEEGFDYWGQGTLVTVSSASTKGPSVFPLAPSSKSTSGGTAALGCLVKDYFPEPVTVSWNSGALTSGVHTFPAVLQSSGLYSLSSVVTVPSSSLGTQTYICNVNHKPSNTKVDKKVEPKSCDKTHTCPPCPAPELLGGPSVFLFPPKPKDTLMISRTPEVTCVVVDVSHEDPEVKFNWYVDGVEVHNAKTKPREEQYNSTYRVVSVLTVLHQDWLNGKEYKCKVSNKALPAPIEKTISKAKGQPREPQVYTLPPSREEMTKNQVSLTCLVKGFYPSDIAVEWESNGQPENNYKTTPPVLDSDGSFFLYSKLTVDKSRWQQGNVFSCSVMHEALHNHYTQKSLSLSPG

SEQ ID NO: 17446 - protein, 451 aa, Artificial Sequence
  source: /note="Description of Artificial Sequence: Synthetic polypeptide"
EVQLVESGGGLVQPGRSLRLSCAASGFTFDDYAMHWVRQAPGKGLEWVSGISWNSGSRGYADSVKGRFTISRDNAKNSLYLQMNSLRAEDTALYYCARDLGFNQWEEGFDYWGQGTLVTVSSASTKGPSVFPLAPSSKSTSGGTAALGCLVKDYFPEPVTVSWNSGALTSGVHTFPAVLQSSGLYSLSSVVTVPSSSLGTQTYICNVNHKPSNTKVDKKVEPKSCDKTHTCPPCPAPELLGGPSVFLFPPKPKDTLMISRTPEVTCVVVDVSHEDPEVKFNWYVDGVEVHNAKTKPREEQYNSTYRVVSVLTVLHQDWLNGKEYKCKVSNKALPAPIEKTISKAKGQPREPQVYTLPPSREEMTKNQVSLTCLVKGFYPSDIAVEWESNGQPENNYKTTPPVLDSDGSFFLYSKLTVDKSRWQQGNVFSCSVMHEALHNHYTQKSLSLSPG

SEQ ID NO: 17447 - protein, 451 aa, Artificial Sequence
  source: /note="Description of Artificial Sequence: Synthetic polypeptide"
EVQLVESGGGLVQPGRSLRLSCAASGFTFDDYAMHWVRQAPGKGLEWVSGISWNSGSTGYADSVKGRFTISRDNAKNSLYLQMNSLRAEDTALYYCARDLGFNQWVDGFDYWGQGTLVTVSSASTKGPSVFPLAPSSKSTSGGTAALGCLVKDYFPEPVTVSWNSGALTSGVHTFPAVLQSSGLYSLSSVVTVPSSSLGTQTYICNVNHKPSNTKVDKKVEPKSCDKTHTCPPCPAPELLGGPSVFLFPPKPKDTLMISRTPEVTCVVVDVSHEDPEVKFNWYVDGVEVHNAKTKPREEQYNSTYRVVSVLTVLHQDWLNGKEYKCKVSNKALPAPIEKTISKAKGQPREPQVYTLPPSREEMTKNQVSLTCLVKGFYPSDIAVEWESNGQPENNYKTTPPVLDSDGSFFLYSKLTVDKSRWQQGNVFSCSVMHEALHNHYTQKSLSLSPG

SEQ ID NO: 17448 - protein, 451 aa, Artificial Sequence
  source: /note="Description of Artificial Sequence: Synthetic polypeptide"
EVQLVESGGGLVQPGRSLRLSCAASGFTFDDYAMHWVRQAPGKGLEWVSGISWDSGSVGYADSVKGRFTISRDNAKNSLYLQMNSLRAEDTALYYCARDLGYNQWWEGFDYWGQGTLVTVSSASTKGPSVFPLAPSSKSTSGGTAALGCLVKDYFPEPVTVSWNSGALTSGVHTFPAVLQSSGLYSLSSVVTVPSSSLGTQTYICNVNHKPSNTKVDKKVEPKSCDKTHTCPPCPAPELLGGPSVFLFPPKPKDTLMISRTPEVTCVVVDVSHEDPEVKFNWYVDGVEVHNAKTKPREEQYNSTYRVVSVLTVLHQDWLNGKEYKCKVSNKALPAPIEKTISKAKGQPREPQVYTLPPSREEMTKNQVSLTCLVKGFYPSDIAVEWESNGQPENNYKTTPPVLDSDGSFFLYSKLTVDKSRWQQGNVFSCSVMHEALHNHYTQKSLSLSPG

SEQ ID NO: 17449 - protein, 324 aa, Artificial Sequence
  source: /note="Description of Artificial Sequence: Synthetic polypeptide"
AKTTPPSVYPLAPGSAAQTNSMVTLGCLVKGYFPEPVTVTWNSGSLSSGVHTFPAVLQSDLYTLSSSVTVPSSTWPSQTVTCNVAHPASSTKVDKKIVPRDCGCKPCICTVPEVSSVFIFPPKPKDVLTITLTPKVTCVVVDISKDDPEVQFSWFVDDVEVHTAQTQPREEQFNSTFRSVSELPIMHQDWLNGKEFKCRVNSAAFPAPIEKTISKTKGRPKAPQVYTIPPPKEQMAKDKVSLTCMITDFFPEDITVEWQWNGQPAENYKNTQPIMDTDGSYFVYSKLNVQKSNWEAGNTFTCSVLHEGLHNHHTEKSLSHSPGK

SEQ ID NO: 17450 - protein, 336 aa, Artificial Sequence
  source: /note="Description of Artificial Sequence: Synthetic polypeptide"
AKTTPPSVYPLAPGCGDTTGSSVTLGCLVKGYFPESVTVTWNSGSLSSSVHTFPALLQSGLYTMSSSVTVPSSTWPSQTVTCSVAHPASSTTVDKKLEPSGPISTINPCPPCKECHKCPAPNLEGGPSVFIFPPNIKDVLMISLTPKVTCVVVDVSEDDPDVQISWFVNNVEVHTAQTQTHREDYNSTIRVVSTLPIQHQDWMSGKEFKCKVNNKDLPSPIERTISKIKGLVRAPQVYILPPPAEQLSRKDVSLTCLVVGFNPGDISVEWTSNGHTEENYKDTAPVLDSDGSYFIYSKLNMKTSKWEKTDSFSCNVRHEGLKNYYLKKTISRSPGK

SEQ ID NO: 17451 - protein, 451 aa, Artificial Sequence
  source: /note="Description of Artificial Sequence: Synthetic polypeptide"
EVQLVESGGGLVQPGRSLRLSCAASGFTFDDYAMHWVRQAPGKGLEWVSGISWDSGSTGYADSVKGRFTISRDNAKNSLYLQMNSLRAEDTALYYCARDLGAYQWVEGFDYWGQGTLVTVSSASTKGPSVFPLAPSSKSTSGGTAALGCLVKDYFPEPVTVSWNSGALTSGVHTFPAVLQSSGLYSLSSVVTVPSSSLGTQTYICNVNHKPSNTKVDKKVEPKSCDKTHTCPPCPAPELLGGPSVFLFPPKPKDTLMISRTPEVTCVVVDVSHEDPEVKFNWYVDGVEVHNAKTKPREEQYNSTYRVVSVLTVLHQDWLNGKEYKCKVSNKALPAPIEKTISKAKGQPREPQVYTLPPSREEMTKNQVSLTCLVKGFYPSDIAVEWESNGQPENNYKTTPPVLDSDGSFFLYSKLTVDKSRWQQGNVFSCSVMHEALHNHYTQKSLSLSPG

SEQ ID NO: 17452 - protein, 720 aa, Artificial Sequence
  source: /note="Description of Artificial Sequence: Synthetic polypeptide"
EVQLVESGGGLVQPGRSLRLSCAASGFTFDDYAMHWVRQAPGKGLEWVSGISWDSGSTGYADSVKGRFTISRDNAKNSLYLQMNSLRAEDTALYYCARDLGAYQWVEGFDYWGQGTLVTVSSASTKGPSVFPLAPSSKSTSGGTAALGCLVKDYFPEPVTVSWNSGALTSGVHTFPAVLQSSGLYSLSSVVTVPSSSLGTQTYICNVNHKPSNTKVDKKVEPKSCDKTHTCPPCPAPELLGGPSVFLFPPKPKDTLMISRTPEVTCVVVDVSHEDPEVKFNWYVDGVEVHNAKTKPREEQYNSTYRVVSVLTVLHQDWLNGKEYKCKVSNKALPAPIEKTISKAKGQPREPQVYTLPPSREEMTKNQVSLTCLVKGFYPSDIAVEWESNGQPENNYKTTPPVLDSDGSFFLYSKLTVDKSRWQQGNVFSCSVMHEALHNHYTQKSLSLSPGGGGGSGGGGSGGGGSEVQLLQSGGGLVQPGGSLRLSCAASGFLFSSYPMHWVRQAPGKGLEWVGSISPSGGATPYADSVKGRFTISRDNSKNTLYLQMNSLRPEDTAVYYCAKDFYNILTGNAFDKWGQGTSVTVSSASTGGGGSGGGGSGGGGSGGGGSDIQLTQSPSSLSASLGDRVTITCRASQGISSYLAWYQQKPGKAPKLLIYAGSTPQSGVPSRFSGSGSGTEFTLTISSLQPEDSGTYYCQQYWTWPLTFGGGTKVEIKRT

SEQ ID NO: 17453 - protein, 471 aa, Artificial Sequence
  source: /note="Description of Artificial Sequence: Synthetic polypeptide"
MDMRVPAQLLGLLLLWLRGARCQVQLVESGGGLVKPGGSLRLSCAASGFTFSDYAMSWIRQAPGKGLEWVSTISDGGTYTYYPDSVKGRFTISRDNAKNSLYLQMNSLRAEDTAVYYCAREWGDYDGFDYWGQGTLVTVSSASTKGPSVFPLAPSSKSTSGGTAALGCLVKDYFPEPVTVSWNSGALTSGVHTFPAVLQSSGLYSLSSVVTVPSSSLGTQTYICNVNHKPSNTKVDKRVEPKSCDKTHTCPPCPAPELLGGPSVFLFPPKPKDTLMISRTPEVTCVVVDVSHEDPEVKFNWYVDGVEVHNAKTKPREEQYNSTYRVVSVLTVLHQDWLNGKEYKCKVSNKALPAPIEKTISKAKGQPREPQVYTLPPSREEMTKNQVSLTCLVKGFYPSDIAVEWESNGQPENNYKTTPPVLDSDGSFFLYSKLTVDKSRWQQGNVFSCSVMHEALHNHYTQKSLSLSPGK

SEQ ID NO: 17454 - protein, 467 aa, Artificial Sequence
  source: /note="Description of Artificial Sequence: Synthetic polypeptide"
MDMRVPAQLLGLLLLWLRGARCQVQLVESGGGLVKPGGSLRLSCAASGFTFSDYAMSWIRQAPGKGLEWVSTISDGGTYTYYPDSVKGRFTISRDNAKNSLYLQMNSLRAEDTAVYYCAREWGDYDGFDYWGQGTLVTVSSASTKGPSVFPLAPCSRSTSESTAALGCLVKDYFPEPVTVSWNSGALTSGVHTFPAVLQSSGLYSLSSVVTVPSSNFGTQTYTCNVDHKPSNTKVDKTVERKCCVECPPCPAPPVAGPSVFLFPPKPKDTLMISRTPEVTCVVVDVSHEDPEVQFNWYVDGVEVHNAKTKPREEQFNSTFRVVSVLTVVHQDWLNGKEYKCKVSNKGLPAPIEKTISKTKGQPREPQVYTLPPSREEMTKNQVSLTCLVKGFYPSDIAVEWESNGQPENNYKTTPPMLDSDGSFFLYSKLTVDKSRWQQGNVFSCSVMHEALHNHYTQKSLSLSPGK

SEQ ID NO: 17455 - protein, 471 aa, Artificial Sequence
  source: /note="Description of Artificial Sequence: Synthetic polypeptide"
MNFGLRLIFLVLTLKGVQCDVQLVESGGDLVKPGGSLKLSCVVSGFTFSTYGMSWVRQTPDRRLEWVATISHGDGYTYYPDSVKGRFTISRDNAKNTLHLQMSSLKSEDTAMYYCARHGDYDDDYYAMDYWGQGTSVTFSSASTKGPSVFPLAPSSKSTSGGTAALGCLVKDYFPEPVTVSWNSGALTSGVHTFPAVLQSSGLYSLSSVVTVPSSSLGTQTYICNVNHKPSNTKVDKRVEPKSCDKTHTCPPCPAPELLGGPSVFLFPPKPKDTLMISRTPEVTCVVVDVSHEDPEVKFNWYVDGVEVHNAKTKPREEQYNSTYRVVSVLTVLHQDWLNGKEYKCKVSNKALPAPIEKTISKAKGQPREPQVYTLPPSREEMTKNQVSLTCLVKGFYPSDIAVEWESNGQPENNYKTTPPVLDSDGSFFLYSKLTVDKSRWQQGNVFSCSVMHEALHNHYTQKSLSLSPGK

SEQ ID NO: 17456 - protein, 467 aa, Artificial Sequence
  source: /note="Description of Artificial Sequence: Synthetic polypeptide"
MNFGLRLIFLVLTLKGVQCDVQLVESGGDLVKPGGSLKLSCVVSGFTFSTYGMSWVRQTPDRRLEWVATISHGDGYTYYPDSVKGRFTISRDNAKNTLHLQMSSLKSEDTAMYYCARHGDYDDDYYAMDYWGQGTSVTFSSASTKGPSVFPLAPCSRSTSESTAALGCLVKDYFPEPVTVSWNSGALTSGVHTFPAVLQSSGLYSLSSVVTVPSSNFGTQTYTCNVDHKPSNTKVDKTVERKCCVECPPCPAPPVAGPSVFLFPPKPKDTLMISRTPEVTCVVVDVSHEDPEVQFNWYVDGMEVHNAKTKPREEQFNSTFRVVSVLTVVHQDWLNGKEYKCKVSNKGLPAPIEKTISKTKGQPREPQVYTLPPSREEMTKNQVSLTCLVKGFYPSDISVEWESNGQPENNYKTTPPMLDSDGSFFLYSKLTVDKSRWQQGNVFSCSVMHEALHNHYTQKSLSLSPGK

SEQ ID NO: 17457 - protein, 503 aa, Artificial Sequence
  source: /note="Description of Artificial Sequence: Synthetic polypeptide"
MNFGLRLIFLVLTLKGVQCDVQLVESGGDLVKPGGSLKLSCVVSGFTFSTYGMSWVRQTPDRRLEWVATISHGDGYTYYPDSVKGRFTISRDNAKNTLHLQMSSLKSEDTAMYYCARHGDYDDDYYAMDYWGQGTSVTFSSASTKGPSVFPLAPCSRSTSGGTAALGCLVKDYFPEPVTVSWNSGALTSGVHTFPAVLQSSGLYSLSSVVTVPSSSLGTQTYTCNVNHKPSNTKVDKRVELKTPLGDTTHTCPRCPEPKSCDTPPPCPRCPEPKSCDTPPPCPRCPAPELLGGPSVFLFPPKPKDTLMISRTPEVTCVVVDVSHEDPEVQFKWYVDGVEVHNAKTKPREEQYNSTFRVVSVLTVLHQDWLNGKEYKCKVSNKALPAPIEKTISKTKGQPREPQVYTLPPSREEMTKNQVSLTCLVKGFYPSDIAVEWESSGQPENNYNTTPPMLDSDGSFFLYSKLTVDKSRWQQGNIFSCSVMHEALHNRFTQKSLSLSPGK

SEQ ID NO: 17458 - protein, 471 aa, Artificial Sequence
  source: /note="Description of Artificial Sequence: Synthetic polypeptide"
MNFGLRLIFLVLTLKGVQCDVQLVESGGGLVQPGGSLRLSCAASGFTFSTYGMSWVRQTPDKRLEWVATISHGDGYTYYPDSVKGRFTISRDNAKNTLYLQMSSLKSEDTAMYYCARHGDYDDDYYAMDYWGQGTLVTVSSASTKGPSVFPLAPSSKSTSGGTAALGCLVKDYFPEPVTVSWNSGALTSGVHTFPAVLQSSGLYSLSSVVTVPSSSLGTQTYICNVNHKPSNTKVDKRVEPKSCDKTHTCPPCPAPELLGGPSVFLFPPKPKDTLMISRTPEVTCVVVDVSHEDPEVKFNWYVDGVEVHNAKTKPREEQYNSTYRVVSVLTVLHQDWLNGKEYKCKVSNKALPAPIEKTISKAKGQPREPQVYTLPPSREEMTKNQVSLTCLVKGFYPSDIAVEWESNGQPENNYKTTPPVLDSDGSFFLYSKLTVDKSRWQQGNVFSCSVMHEALHNHYTQKSLSLSPGK

SEQ ID NO: 17459 - protein, 471 aa, Artificial Sequence
  source: /note="Description of Artificial Sequence: Synthetic polypeptide"
MNFGLRLIFLVLTLKGVQCDVQLVESGGGLVQPGGSLRLSCAVSGFTFSTYGMSWVRQAPGKGLEWVATISHGDGYTYYPDSVKGRFTISRDNSKNTLYLQMNSLRAEDTAVYYCARHGDYDDDYYAMDYWGQGTLVTVSSASTKGPSVFPLAPSSKSTSGGTAALGCLVKDYFPEPVTVSWNSGALTSGVHTFPAVLQSSGLYSLSSVVTVPSSSLGTQTYICNVNHKPSNTKVDKRVEPKSCDKTHTCPPCPAPELLGGPSVFLFPPKPKDTLMISRTPEVTCVVVDVSHEDPEVKFNWYVDGVEVHNAKTKPREEQYNSTYRVVSVLTVLHQDWLNGKEYKCKVSNKALPAPIEKTISKAKGQPREPQVYTLPPSREEMTKNQVSLTCLVKGFYPSDIAVEWESNGQPENNYKTTPPVLDSDGSFFLYSKLTVDKSRWQQGNVFSCSVMHEALHNHYTQKSLSLSPGK

SEQ ID NO: 17460 - protein, 471 aa, Artificial Sequence
  source: /note="Description of Artificial Sequence: Synthetic polypeptide"
MNFGLRLIFLVLTLKGVQCDVQLVESGGDLVKPGGSLKLSCVASGFTFSTYGMSWVRQTPDKRLEWVATISHGDGYTYYPDSVKGRFTISRDNAKNTLYLQMSSLKSEDTAMYYCARHGDYDDDYYAMDYWGQGTTVTVSSASTKGPSVFPLAPSSKSTSGGTAALGCLVKDYFPEPVTVSWNSGALTSGVHTFPAVLQSSGLYSLSSVVTVPSSSLGTQTYICNVNHKPSNTKVDKRVEPKSCDKTHTCPPCPAPELLGGPSVFLFPPKPKDTLMISRTPEVTCVVVDVSHEDPEVKFNWYVDGVEVHNAKTKPREEQYNSTYRVVSVLTVLHQDWLNGKEYKCKVSNKALPAPIEKTISKAKGQPREPQVYTLPPSREEMTKNQVSLTCLVKGFYPSDIAVEWESNGQPENNYKTTPPVLDSDGSFFLYSKLTVDKSRWQQGNVFSCSVMHEALHNHYTQKSLSLSPGK

SEQ ID NO: 17461 - protein, 471 aa, Artificial Sequence
  source: /note="Description of Artificial Sequence: Synthetic polypeptide"
MNFGLRLIFLVLTLKGVQCDVQLVESGGDLVKPGGSLKLSCVASGFTFSTYGMSWVRQTPDRRLEWVATISHGDGYTYYPDSVKGRFTISRDNAKNTLHLQMSSLKSEDTAMYYCARHGDYDDDYYAMDYWGQGTTVTVSSASTKGPSVFPLAPSSKSTSGGTAALGCLVKDYFPEPVTVSWNSGALTSGVHTFPAVLQSSGLYSLSSVVTVPSSSLGTQTYICNVNHKPSNTKVDKRVEPKSCDKTHTCPPCPAPELLGGPSVFLFPPKPKDTLMISRTPEVTCVVVDVSHEDPEVKFNWYVDGVEVHNAKTKPREEQYNSTYRVVSVLTVLHQDWLNGKEYKCKVSNKALPAPIEKTISKAKGQPREPQVYTLPPSREEMTKNQVSLTCLVKGFYPSDIAVEWESNGQPENNYKTTPPVLDSDGSFFLYSKLTVDKSRWQQGNVFSCSVMHEALHNHYTQKSLSLSPGK

SEQ ID NO: 17462 - protein, 716 aa, Artificial Sequence
  source: /note="Description of Artificial Sequence: Synthetic polypeptide"
EVQLVESGGGLVQPGRSLRLSCAASGFTFDDYAMHWVRQAPGKGLEWVSGISWDSGSVGYADSVKGRFTISRDNAKNSLYLQMNSLRAEDTALYYCARDLGAYQWEEGFDYWGQGTLVTVSSASTKGPSVFPLAPCSRSTSESTAALGCLVKDYFPEPVTVSWNSGALTSGVHTFPAVLQSSGLYSLSSVVTVPSSNFGTQTYTCNVDHKPSNTKVDKTVERKCCVECPPCPAPPVAGPSVFLFPPKPKDTLMISRTPEVTCVVVDVSHEDPEVQFNWYVDGVEVHNAKTKPREEQFNSTFRVVSVLTVVHQDWLNGKEYKCKVSNKGLPAPIEKTISKTKGQPREPQVYTLPPSREEMTKNQVSLTCLVKGFYPSDIAVEWESNGQPENNYKTTPPMLDSDGSFFLYSKLTVDKSRWQQGNVFSCSVMHEALHNHYTQKSLSLSPGGGGGSGGGGSGGGGSEVQLLQSGGGLVQPGGSLRLSCAASGFDFSSYPMHWVRQAPGKGLEWVGSISSSGGATPYADSVKGRFTISRDNSKNTLYLQMNSLRPEDTAVYYCAKDFYTILTGNAFDMWGQGTSVTVSSASTGGGGSGGGGSGGGGSGGGGSDIQMTQSPSSLSASLGDRVTITCRASQGISSYLAWYQQKPGKAPKLLIYASSTRQSGVPSRFSGSGSGTDFTLTISSLQPEDSGTYYCQQYWAFPLTFGGGTKVEIKRT

SEQ ID NO: 17463 - protein, 739 aa, Artificial Sequence
  source: /note="Description of Artificial Sequence: Synthetic polypeptide"
MGFGLSWLFLVAILKGVQCEVQLLQSGGGLVQPGGSLRLSCAASGFFFSKYPMHWVRQAPGKGLEWVSSISSDGGATVYADSVKGRFTISRDNSKNTLYLQMNSLRAEDTAVYYCAKDFYTWLTGNAFDSWGQGTSVTVSSASTKGPSVFPLAPSSKSTSGGTAALGCLVKDYFPEPVTVSWNSGALTSGVHTFPAVLQSSGLYSLSSVVTVPSSSLGTQTYICNVNHKPSNTKVDKKVEPKSCDKTHTCPPCPAPELLGGPSVFLFPPKPKDTLMISRTPEVTCVVVDVSHEDPEVKFNWYVDGVEVHNAKTKPREEQYNSTYRVVSVLTVLHQDWLNGKEYKCKVSNKALPAPIEKTISKAKGQPREPQVYTLPPSREEMTKNQVSLTCLVKGFYPSDIAVEWESNGQPENNYKTTPPVLDSDGSFFLYSKLTVDKSRWQQGNVFSCSVMHEALHNHYTQKSLSLSPGGGGGSGGGGSGGGGSQVQLVQSGGGLVQPGGSLRLSCAASGFTFDDYAMHWVRQAPGKGLEWVAGISWNSGSIGYADSVKGRFTISRDNAKNSLYLQMNSLRPEDTAVYYCARDLGYNQWVEGFDYWGQGTLVTVSSASTGGGGSGGGGSGGGGSGGGGSSYELTQDPAVSVALGQTVRITCQGDSLRSYYASWYQQKPGQAPVLVIYGKNNRPSGIPDRFSGSTSGNSASLTITGAQAEDEADYYCNSRDSSGNHWVFGGGTKVTVLG

SEQ ID NO: 17464 - protein, 739 aa, Artificial Sequence
  source: /note="Description of Artificial Sequence: Synthetic polypeptide"
MGFGLSWLFLVAILKGVQCEVQLVESGGGLVQPGRSLRLSCAASGFTFDDYAMHWVRQAPGKGLEWVSGISWDSGSVGYADSVKGRFTISRDNAKNSLYLQMNSLRAEDTALYYCARDLGYNQWWEGFDYWGQGTLVTVSSASTKGPSVFPLAPSSKSTSGGTAALGCLVKDYFPEPVTVSWNSGALTSGVHTFPAVLQSSGLYSLSSVVTVPSSSLGTQTYICNVNHKPSNTKVDKKVEPKSCDKTHTCPPCPAPELLGGPSVFLFPPKPKDTLMISRTPEVTCVVVDVSHEDPEVKFNWYVDGVEVHNAKTKPREEQYNSTYRVVSVLTVLHQDWLNGKEYKCKVSNKALPAPIEKTISKAKGQPREPQVYTLPPSREEMTKNQVSLTCLVKGFYPSDIAVEWESNGQPENNYKTTPPVLDSDGSFFLYSKLTVDKSRWQQGNVFSCSVMHEALHNHYTQKSLSLSPGGGGGSGGGGSGGGGSEVQLLQSGGGLVQPGGSLRLSCAASGFDFSSYPMHWVRQAPGKGLEWVGSISSSGGATPYADSVKGRFTISRDNSKNTLYLQMNSLRPEDTAVYYCAKDFYTILTGNAFDMWGQGTSVTVSSASTGGGGSGGGGSGGGGSGGGGSDIQMTQSPSSLSASLGDRVTITCRASQGISSYLAWYQQKPGKAPKLLIYASSTRQSGVPSRFSGSGSGTDFTLTISSLQPEDSGTYYCQQYWAFPLTFGGGTKVEIKRT

SEQ ID NO: 17465 - protein, 716 aa, Artificial Sequence
  source: /note="Description of Artificial Sequence: Synthetic polypeptide"
EVQLVESGGGLVQPGRSLRLSCAASGFTFDDYAMHWVRQAPGKGLEWVSGISWDSGSVGYADSVKGRFTISRDNAKNSLYLQMNSLRAEDTALYYCARDLGYNQWWEGFDYWGQGTLVTVSSASTKGPSVFPLAPCSRSTSESTAALGCLVKDYFPEPVTVSWNSGALTSGVHTFPAVLQSSGLYSLSSVVTVPSSNFGTQTYTCNVDHKPSNTKVDKTVERKCCVECPPCPAPPVAGPSVFLFPPKPKDTLMISRTPEVTCVVVDVSHEDPEVQFNWYVDGVEVHNAKTKPREEQFNSTFRVVSVLTVVHQDWLNGKEYKCKVSNKGLPAPIEKTISKTKGQPREPQVYTLPPSREEMTKNQVSLTCLVKGFYPSDIAVEWESNGQPENNYKTTPPMLDSDGSFFLYSKLTVDKSRWQQGNVFSCSVMHEALHNHYTQKSLSLSPGGGGGSGGGGSGGGGSEVQLLQSGGGLVQPGGSLRLSCAASGFDFSSYPMHWVRQAPGKGLEWVGSISSSGGATPYADSVKGRFTISRDNSKNTLYLQMNSLRPEDTAVYYCAKDFYTILTGNAFDMWGQGTSVTVSSASTGGGGSGGGGSGGGGSGGGGSDIQMTQSPSSLSASLGDRVTITCRASQGISSYLAWYQQKPGKAPKLLIYASSTRQSGVPSRFSGSGSGTDFTLTISSLQPEDSGTYYCQQYWAFPLTFGGGTKVEIKRT

SEQ ID NO: 17466 - protein, 720 aa, Artificial Sequence
  source: /note="Description of Artificial Sequence: Synthetic polypeptide"
EVQLLQSGGGLVQPGGSLRLSCAASGFFFSKYPMHWVRQAPGKGLEWVSSISSDGGATVYADSVKGRFTISRDNSKNTLYLQMNSLRAEDTAVYYCAKDFYTILTGNAFDTWGQGTTVTVSSASTKGPSVFPLAPSSKSTSGGTAALGCLVKDYFPEPVTVSWNSGALTSGVHTFPAVLQSSGLYSLSSVVTVPSSSLGTQTYICNVNHKPSNTKVDKKVEPKSCDKTHTCPPCPAPELLGGPSVFLFPPKPKDTLMISRTPEVTCVVVDVSHEDPEVKFNWYVDGVEVHNAKTKPREEQYNSTYRVVSVLTVLHQDWLNGKEYKCKVSNKALPAPIEKTISKAKGQPREPQVYTLPPSREEMTKNQVSLTCLVKGFYPSDIAVEWESNGQPENNYKTTPPVLDSDGSFFLYSKLTVDKSRWQQGNVFSCSVMHEALHNHYTQKSLSLSPGGGGGSGGGGSGGGGSQVQLVQSGGGLVQPGGSLRLSCAASGFTFDDYAMHWVRQAPGKGLEWVAGISWNSGSIGYADSVKGRFTISRDNAKNSLYLQMNSLRPEDTAVYYCARDLGYNQWVEGFDYWGQGTLVTVSSASTGGGGSGGGGSGGGGSGGGGSSYELTQDPAVSVALGQTVRITCQGDSLRSYYASWYQQKPGQAPVLVIYGKNNRPSGIPDRFSGSTSGNSASLTITGAQAEDEADYYCNSRDSSGNHWVFGGGTKVTVLG

SEQ ID NO: 17467 - protein, 720 aa, Artificial Sequence
  source: /note="Description of Artificial Sequence: Synthetic polypeptide"
EVQLLQSGGGLVQPGGSLRLSCAASGFFFSKYPMHWVRQAPGKGLEWVSSISSDGGATVYADSVKGRFTISRDNSKNTLYLQMNSLRAEDTAVYYCAKDFYTILTGNAFDTWGQGTTVTVSSASTKGPSVFPLAPSSKSTSGGTAALGCLVKDYFPEPVTVSWNSGALTSGVHTFPAVLQSSGLYSLSSVVTVPSSSLGTQTYICNVNHKPSNTKVDKKVEPKSCDKTHTCPPCPAPELLGGPSVFLFPPKPKDTLMISRTPEVTCVVVDVSHEDPEVKFNWYVDGVEVHNAKTKPREEQYNSTYRVVSVLTVLHQDWLNGKEYKCKVSNKALPAPIEKTISKAKGQPREPQVYTLPPSREEMTKNQVSLTCLVKGFYPSDIAVEWESNGQPENNYKTTPPVLDSDGSFFLYSKLTVDKSRWQQGNVFSCSVMHEALHNHYTQKSLSLSPGGGGGSGGGGSGGGGSQVQLVQSGGGLVQPGGSLRLSCAASGFTFDDYAMHWVRQAPGKGLEWVAGISWDSGSTGYADSVKGRFTISRDNAKNSLYLQMNSLRAEDTALYYCARDLGAYQWVEGFDYWGQGTLVTVSSASTGGGGSGGGGSGGGGSGGGGSSYELTQDPAVSVALGQTVRITCQGDSLRSYYASWYQQKPGQAPVLVIYGKNNRPSGIPDRFSGSTSGNSASLTITGAQAEDEADYYCNSRDSPGNQWVFGGGTKVTVLG

SEQ ID NO: 17468 - protein, 720 aa, Artificial Sequence
  source: /note="Description of Artificial Sequence: Synthetic polypeptide"
EVQLLQSGGGLVQPGGSLRLSCAASGFMFSRYPMHWVRQAPGKGLEWVSSISGSGGATPYADSVKGRFTISRDNSKNTLYLQMNSLRAEDTAVYYCAKDFYQILTGNAFDYWGQGTTVTVSSASTKGPSVFPLAPSSKSTSGGTAALGCLVKDYFPEPVTVSWNSGALTSGVHTFPAVLQSSGLYSLSSVVTVPSSSLGTQTYICNVNHKPSNTKVDKKVEPKSCDKTHTCPPCPAPELLGGPSVFLFPPKPKDTLMISRTPEVTCVVVDVSHEDPEVKFNWYVDGVEVHNAKTKPREEQYNSTYRVVSVLTVLHQDWLNGKEYKCKVSNKALPAPIEKTISKAKGQPREPQVYTLPPSREEMTKNQVSLTCLVKGFYPSDIAVEWESNGQPENNYKTTPPVLDSDGSFFLYSKLTVDKSRWQQGNVFSCSVMHEALHNHYTQKSLSLSPGGGGGSGGGGSGGGGSQVQLVQSGGGLVQPGGSLRLSCAASGFTFDDYAMHWVRQAPGKGLEWVAGISWNSGSIGYADSVKGRFTISRDNAKNSLYLQMNSLRPEDTAVYYCARDLGYNQWVEGFDYWGQGTLVTVSSASTGGGGSGGGGSGGGGSGGGGSSYELTQDPAVSVALGQTVRITCQGDSLRSYYASWYQQKPGQAPVLVIYGKNNRPSGIPDRFSGSTSGNSASLTITGAQAEDEADYYCNSRDSSGNHWVFGGGTKVTVLG

SEQ ID NO: 17469 - protein, 720 aa, Artificial Sequence
  source: /note="Description of Artificial Sequence: Synthetic polypeptide"
EVQLLQSGGGLVQPGGSLRLSCAASGFMFSRYPMHWVRQAPGKGLEWVSSISGSGGATPYADSVKGRFTISRDNSKNTLYLQMNSLRAEDTAVYYCAKDFYQILTGNAFDYWGQGTTVTVSSASTKGPSVFPLAPSSKSTSGGTAALGCLVKDYFPEPVTVSWNSGALTSGVHTFPAVLQSSGLYSLSSVVTVPSSSLGTQTYICNVNHKPSNTKVDKKVEPKSCDKTHTCPPCPAPELLGGPSVFLFPPKPKDTLMISRTPEVTCVVVDVSHEDPEVKFNWYVDGVEVHNAKTKPREEQYNSTYRVVSVLTVLHQDWLNGKEYKCKVSNKALPAPIEKTISKAKGQPREPQVYTLPPSREEMTKNQVSLTCLVKGFYPSDIAVEWESNGQPENNYKTTPPVLDSDGSFFLYSKLTVDKSRWQQGNVFSCSVMHEALHNHYTQKSLSLSPGGGGGSGGGGSGGGGSQVQLVQSGGGLVQPGGSLRLSCAASGFTFDDYAMHWVRQAPGKGLEWVAGISWDSGSTGYADSVKGRFTISRDNAKNSLYLQMNSLRAEDTALYYCARDLGAYQWVEGFDYWGQGTLVTVSSASTGGGGSGGGGSGGGGSGGGGSSYELTQDPAVSVALGQTVRITCQGDSLRSYYASWYQQKPGQAPVLVIYGKNNRPSGIPDRFSGSTSGNSASLTITGAQAEDEADYYCNSRDSPGNQWVFGGGTKVTVLG

SEQ ID NO: 17470 - protein, 734 aa, Artificial Sequence
  source: /note="Description of Artificial Sequence: Synthetic polypeptide"
MGFGLSWLFLVAILKGVQCEVQLLQSGGGLVQPGGSLRLSCAASGFTFSVYPMHWVRQAPGKGLEWVSSISSSGGATRYADSVKGRFTISRDNSKNTLYLQMNSLRAEDTAVYYCAKDFYDILTGNAFDIWGQGTTVTVSSASTKGPSVFPLAPSSKSTSGGTAALGCLVKDYFPEPVTVSWNSGALTSGVHTFPAVLQSSGLYSLSSVVTVPSSSLGTQTYICNVNHKPSNTKVDKKVEPKSCDKTHTCPPCPAPELLGGPSVFLFPPKPKDTLMISRTPEVTCVVVDVSHEDPEVKFNWYVDGVEVHNAKTKPREEQYNSTYRVVSVLTVLHQDWLNGKEYKCKVSNKALPAPIEKTISKAKGQPREPQVYTLPPSREEMTKNQVSLTCLVKGFYPSDIAVEWESNGQPENNYKTTPPVLDSDGSFFLYSKLTVDKSRWQQGNVFSCSVMHEALHNHYTQKSLSLSPGGGGGSGGGGSGGGGSEVQLVESGGGLVQPGRSLRLSCAASGFTFDDYAMHWVRQAPGKGLEWVSGISWNSGSTGYADSVKGRFTISRDNAKNSLYLQMNSLRAEDTALYYCARDLGFNQWVDGFDYWGQGTLVTVSSASTGGGGSGGGGSGGGGSSSELTQDPAVSVALGQTVRITCQGDSLRSYYASWYQQKPGQAPVLVIYGKNNRPSGIPDRFSGSSSGNTASLTITGAQAEDEADYYCNSRDTPGDQWVFGGGTKVTVLG

SEQ ID NO: 17471 - protein, 734 aa, Artificial Sequence
  source: /note="Description of Artificial Sequence: Synthetic polypeptide"
MGFGLSWLFLVAILKGVQCEVQLLQSGGGLVQPGGSLRLSCAASGFTFSVYPMHWVRQAPGKGLEWVSSISSSGGATRYADSVKGRFTISRDNSKNTLYLQMNSLRAEDTAVYYCAKDFYDILTGNAFDIWGQGTTVTVSSASTKGPSVFPLAPSSKSTSGGTAALGCLVKDYFPEPVTVSWNSGALTSGVHTFPAVLQSSGLYSLSSVVTVPSSSLGTQTYICNVNHKPSNTKVDKKVEPKSCDKTHTCPPCPAPELLGGPSVFLFPPKPKDTLMISRTPEVTCVVVDVSHEDPEVKFNWYVDGVEVHNAKTKPREEQYNSTYRVVSVLTVLHQDWLNGKEYKCKVSNKALPAPIEKTISKAKGQPREPQVYTLPPSREEMTKNQVSLTCLVKGFYPSDIAVEWESNGQPENNYKTTPPVLDSDGSFFLYSKLTVDKSRWQQGNVFSCSVMHEALHNHYTQKSLSLSPGGGGGSGGGGSGGGGSEVQLVESGGGLVQPGRSLRLSCAASGFTFDDYAMHWVRQAPGKGLEWVSGISWDSGSTGYADSVKGRFTISRDNAKNSLYLQMNSLRAEDTALYYCARDLGAYQWVEGFDYWGQGTLVTVSSASTGGGGSGGGGSGGGGSSSELTQDPAVSVALGQTVRITCQGDSLRSYYASWYQQKPGQAPVLVIYGKNNRPSGIPDRFSGSSSGNTASLTITGAQAEDEADYYCESRDSPGNQWVFGGGTKVTVLG

SEQ ID NO: 17472 - protein, 739 aa, Artificial Sequence
  source: /note="Description of Artificial Sequence: Synthetic polypeptide"
MGFGLSWLFLVAILKGVQCEVQLLQSGGGLVQPGGSLRLSCAASGFTFSVYPMHWVRQAPGKGLEWVSSISSSGGATRYADSVKGRFTISRDNSKNTLYLQMNSLRAEDTAVYYCAKDFYDILTGNAFDIWGQGTTVTVSSASTKGPSVFPLAPSSKSTSGGTAALGCLVKDYFPEPVTVSWNSGALTSGVHTFPAVLQSSGLYSLSSVVTVPSSSLGTQTYICNVNHKPSNTKVDKKVEPKSCDKTHTCPPCPAPELLGGPSVFLFPPKPKDTLMISRTPEVTCVVVDVSHEDPEVKFNWYVDGVEVHNAKTKPREEQYNSTYRVVSVLTVLHQDWLNGKEYKCKVSNKALPAPIEKTISKAKGQPREPQVYTLPPSREEMTKNQVSLTCLVKGFYPSDIAVEWESNGQPENNYKTTPPVLDSDGSFFLYSKLTVDKSRWQQGNVFSCSVMHEALHNHYTQKSLSLSPGGGGGSGGGGSGGGGSQVQLVQSGGGLVQPGGSLRLSCAASGFTFDDYAMHWVRQAPGKGLEWVAGISWNSGSIGYADSVKGRFTISRDNAKNSLYLQMNSLRPEDTAVYYCARDLGYNQWVEGFDYWGQGTLVTVSSASTGGGGSGGGGSGGGGSGGGGSSYELTQDPAVSVALGQTVRITCQGDSLRSYYASWYQQKPGQAPVLVIYGKNNRPSGIPDRFSGSTSGNSASLTITGAQAEDEADYYCNSRDSSGNHWVFGGGTKVTVLG

SEQ ID NO: 17473 - protein, 708 aa, Artificial Sequence
  source: /note="Description of Artificial Sequence: Synthetic polypeptide"
EVQLLESGGGLVQPGGSLRLSCAASGFTFSAYNMRWVRQAPGKGLEWVSVIYPSGGATRYADSVKGRFTISRDNSKNTLYLQMNSLRAEDTAVYYCARGYYYYGMDVWGQGTLVTVSSASTKGPSVFPLAPCSRSTSESTAALGCLVKDYFPEPVTVSWNSGALTSGVHTFPAVLQSSGLYSLSSVVTVPSSNFGTQTYTCNVDHKPSNTKVDKTVERKCCVECPPCPAPPVAGPSVFLFPPKPKDTLMISRTPEVTCVVVDVSHEDPEVQFNWYVDGVEVHNAKTKPREEQFNSTFRVVSVLTVVHQDWLNGKEYKCKVSNKGLPAPIEKTISKTKGQPREPQVYTLPPSREEMTKNQVSLTCLVKGFYPSDIAVEWESNGQPENNYKTTPPMLDSDGSFFLYSKLTVDKSRWQQGNVFSCSVMHEALHNHYTQKSLSLSPGKGGGGSGGGGSGGGGSLQEVQLLESGGGLVQPGGSLRLSCAASGFTFSVYPMHWVRQAPGKGLEWVSSISSSGGATRYADSVKGRFTISRDNSKNTLYLQMNSLRAEDTAVYYCAKDFYDILTGNAFDIWGQGTMVTVSSASTGGGGSGGGGSGGGGSDIQMTQSPSSFSASTGDRVTITCRASQGISSYLAWYQQKPGKAPKLLIYAASTLQSGVPSRFSGSGSGTDFTLTISSLQPEDSATYYCQQYFTFPLTFGGGTKVEIK

SEQ ID NO: 17474 - protein, 712 aa, Artificial Sequence [sequence omitted]

SEQ ID NO: 17475 - protein, 711 aa, Artificial Sequence
  source: /note="Description of Artificial Sequence: Synthetic polypeptide"
EVQLLESGGGLVQPGGSLRLSCAASGFTFSVYPMHWVRQAPGKGLEWVSSISSSGGATRYADSVKGRFTISRDNSKNTLYLQMNSLRAEDTAVYYCAKDFYDILTGNAFDIWGQGTMVTVSSASTKGPSVFPLAPCSRSTSESTAALGCLVKDYFPEPVTVSWNSGALTSGVHTFPAVLQSSGLYSLSSVVTVPSSNFGTQTYTCNVDHKPSNTKVDKTVERKCCVECPPCPAPPVAGPSVFLFPPKPKDTLMISRTPEVTCVVVDVSHEDPEVQFNWYVDGVEVHNAKTKPREEQFNSTFRVVSVLTVVHQDWLNGKEYKCKVSNKGLPAPIEKTISKTKGQPREPQVYTLPPSREEMTKNQVSLTCLVKGFYPSDIAVEWESNGQPENNYKTTPPMLDSDGSFFLYSKLTVDKSRWQQGNVFSCSVMHEALHNHYTQKSLSLSPGKGGGGSGGGGSGGGGSLQEVQLLESGGGLVQPGGSLRLSCAASGFTFSVYDMYWVRQAPGKGLEWVSYIYSSGGDTDYADSVKGRFTISRDNSKNTLYLQMNSLRAEDTATYYCARASTNSIYDAMDVWGQGTTVTVSSASTGGGGSGGGGSGGGGSDIQMTQSPSSVSASVGDRVTITCRASQDITNWLAWYQQKPGKAPTLLIYDASTLQSGVPSRFSGSGSGTDFTLTISSLQPEDFATYFCQQANGFPLTFGGGTKVEIK

SEQ ID NO: 17476 - protein, 720 aa, Artificial Sequence
  source: /note="Description of Artificial Sequence: Synthetic polypeptide"
EVQLVESGGGLVQPGRSLRLSCAASGFTFDDYAMHWVRQAPGKGLEWVSGISWDSGSTGYADSVKGRFTISRDNAKNSLYLQMNSLRAEDTALYYCARDLGAYQWVEGFDYWGQGTLVTVSSASTKGPSVFPLAPSSKSTSGGTAALGCLVKDYFPEPVTVSWNSGALTSGVHTFPAVLQSSGLYSLSSVVTVPSSSLGTQTYICNVNHKPSNTKVDKKVEPKSCDKTHTCPPCPAPELLGGPSVFLFPPKPKDTLMISRTPEVTCVVVDVSHEDPEVKFNWYVDGVEVHNAKTKPREEQYNSTYRVVSVLTVLHQDWLNGKEYKCKVSNKALPAPIEKTISKAKGQPREPQVYTLPPSREEMTKNQVSLTCLVKGFYPSDIAVEWESNGQPENNYKTTPPVLDSDGSFFLYSKLTVDKSRWQQGNVFSCSVMHEALHNHYTQKSLSLSPGGGGGSGGGGSGGGGSEVQLLQSGGGLVQPGGSLRLSCAASGFMFSRYPMHWVRQAPGKGLEWVGSISGSGGATPYADSVKGRFTISRDNSKNTLYLQMNSLRAEDTAVYYCAKDFYQILTGNAFDYWGQGTTVTVSSASTGGGGSGGGGSGGGGSGGGGSDIQMTQSPSSLSASLGDRVTITCRASQGISSYLAWYQQKPGKAPKLLIYAKSTLQSGVPSRFSGSGSGTDFTLTISSLQPEDSATYYCQQYWTFPLTFGGGTKVEIKRT

SEQ ID NO: 17477 - protein, 720 aa, Artificial Sequence
  source: /note="Description of Artificial Sequence: Synthetic polypeptide"
EVQLVESGGGLVQPGRSLRLSCAASGFTFDDYAMHWVRQAPGKGLEWVSGISWDSGSTGYADSVKGRFTISRDNAKNSLYLQMNSLRAEDTALYYCARDLGAYQWVEGFDYWGQGTLVTVSSASTKGPSVFPLAPSSKSTSGGTAALGCLVKDYFPEPVTVSWNSGALTSGVHTFPAVLQSSGLYSLSSVVTVPSSSLGTQTYICNVNHKPSNTKVDKKVEPKSCDKTHTCPPCPAPELLGGPSVFLFPPKPKDTLMISRTPEVTCVVVDVSHEDPEVKFNWYVDGVEVHNAKTKPREEQYNSTYRVVSVLTVLHQDWLNGKEYKCKVSNKALPAPIEKTISKAKGQPREPQVYTLPPSREEMTKNQVSLTCLVKGFYPSDIAVEWESNGQPENNYKTTPPVLDSDGSFFLYSKLTVDKSRWQQGNVFSCSVMHEALHNHYTQKSLSLSPGGGGGSGGGGSGGGGSEVQLLQSGGGLVQPGGSLRLSCAASGFFFSKYPMHWVRQAPGKGLEWVSSISSDGGATVYADSVKGRFTISRDNSKNTLYLQMNSLRAEDTAVYYCAKDFYTWLTGNAFDSWGQGTSVTVSSASTGGGGSGGGGSGGGGSGGGGSDIQLTQSPSSLSASLGDRVTITCRASQGISSYLAWYQQKPGKAPKLLIYARSTRQSGVPSRFSGSGSGTEFTLTISSLQPEDSATYYCQQYWTWPLTFGGGTKVEIKRT

SEQ ID NO: 17478 - protein, 720 aa, Artificial Sequence
  source: /note="Description of Artificial Sequence: Synthetic polypeptide"
EVQLVESGGGLVQPGRSLRLSCAASGFTFDDYAMHWVRQAPGKGLEWVSGISWDSGSTGYADSVKGRFTISRDNAKNSLYLQMNSLRAEDTALYYCARDLGAYQWVEGFDYWGQGTLVTVSSASTKGPSVFPLAPSSKSTSGGTAALGCLVKDYFPEPVTVSWNSGALTSGVHTFPAVLQSSGLYSLSSVVTVPSSSLGTQTYICNVNHKPSNTKVDKKVEPKSCDKTHTCPPCPAPELLGGPSVFLFPPKPKDTLMISRTPEVTCVVVDVSHEDPEVKFNWYVDGVEVHNAKTKPREEQYNSTYRVVSVLTVLHQDWLNGKEYKCKVSNKALPAPIEKTISKAKGQPREPQVYTLPPSREEMTKNQVSLTCLVKGFYPSDIAVEWESNGQPENNYKTTPPVLDSDGSFFLYSKLTVDKSRWQQGNVFSCSVMHEALHNHYTQKSLSLSPGGGGGSGGGGSGGGGSEVQLLQSGGGLVQPGGSLRLSCAASGFDFSSYPMHWVRQAPGKGLEWVGSISSSGGATPYADSVKGRFTISRDNSKNTLYLQMNSLRPEDTAVYYCAKDFYTILTGNAFDMWGQGTSVTVSSASTGGGGSGGGGSGGGGSGGGGSDIQMTQSPSSLSASLGDRVTITCRASQGISSYLAWYQQKPGKAPKLLIYASSTRQSGVPSRFSGSGSGTDFTLTISSLQPEDSGTYYCQQYWAFPLTFGGGTKVEIKRT

SEQ ID NO: 17479 - protein, 720 aa, Artificial Sequence
  source: /note="Description of Artificial Sequence: Synthetic polypeptide"
EVQLVESGGGLVQPGRSLRLSCAASGFTFDDYAMHWVRQAPGKGLEWVSGISWNSGSTGYADSVKGRFTISRDNAKNSLYLQMNSLRAEDTALYYCARDLGFNQWVDGFDYWGQGTLVTVSSASTKGPSVFPLAPSSKSTSGGTAALGCLVKDYFPEPVTVSWNSGALTSGVHTFPAVLQSSGLYSLSSVVTVPSSSLGTQTYICNVNHKPSNTKVDKKVEPKSCDKTHTCPPCPAPELLGGPSVFLFPPKPKDTLMISRTPEVTCVVVDVSHEDPEVKFNWYVDGVEVHNAKTKPREEQYNSTYRVVSVLTVLHQDWLNGKEYKCKVSNKALPAPIEKTISKAKGQPREPQVYTLPPSREEMTKNQVSLTCLVKGFYPSDIAVEWESNGQPENNYKTTPPVLDSDGSFFLYSKLTVDKSRWQQGNVFSCSVMHEALHNHYTQKSLSLSPGGGGGSGGGGSGGGGSEVQLLQSGGGLVQPGGSLRLSCAASGFMFSRYPMHWVRQAPGKGLEWVGSISGSGGATPYADSVKGRFTISRDNSKNTLYLQMNSLRAEDTAVYYCAKDFYQILTGNAFDYWGQGTTVTVSSASTGGGGSGGGGSGGGGSGGGGSDIQMTQSPSSLSASLGDRVTITCRASQGISSYLAWYQQKPGKAPKLLIYAKSTLQSGVPSRFSGSGSGTDFTLTISSLQPEDSATYYCQQYWTFPLTFGGGTKVEIKRT

SEQ ID NO: 17480 - protein, 720 aa, Artificial Sequence
  source: /note="Description of Artificial Sequence: Synthetic polypeptide"
EVQLVESGGGLVQPGRSLRLSCAASGFTFDDYAMHWVRQAPGKGLEWVSGISWNSGSTGYADSVKGRFTISRDNAKNSLYLQMNSLRAEDTALYYCARDLGFNQWVDGFDYWGQGTLVTVSSASTKGPSVFPLAPSSKSTSGGTAALGCLVKDYFPEPVTVSWNSGALTSGVHTFPAVLQSSGLYSLSSVVTVPSSSLGTQTYICNVNHKPSNTKVDKKVEPKSCDKTHTCPPCPAPELLGGPSVFLFPPKPKDTLMISRTPEVTCVVVDVSHEDPEVKFNWYVDGVEVHNAKTKPREEQYNSTYRVVSVLTVLHQDWLNGKEYKCKVSNKALPAPIEKTISKAKGQPREPQVYTLPPSREEMTKNQVSLTCLVKGFYPSDIAVEWESNGQPENNYKTTPPVLDSDGSFFLYSKLTVDKSRWQQGNVFSCSVMHEALHNHYTQKSLSLSPGGGGGSGGGGSGGGGSEVQLLQSGGGLVQPGGSLRLSCAASGFFFSKYPMHWVRQAPGKGLEWVSSISSDGGATVYADSVKGRFTISRDNSKNTLYLQMNSLRAEDTAVYYCAKDFYTWLTGNAFDSWGQGTSVTVSSASTGGGGSGGGGSGGGGSGGGGSDIQLTQSPSSLSASLGDRVTITCRASQGISSYLAWYQQKPGKAPKLLIYARSTRQSGVPSRFSGSGSGTEFTLTISSLQPEDSATYYCQQYWTWPLTFGGGTKVEIKRT

SEQ ID NO: 17481 - protein, 720 aa, Artificial Sequence
  source: /note="Description of Artificial Sequence: Synthetic polypeptide"
EVQLVESGGGLVQPGRSLRLSCAASGFTFDDYAMHWVRQAPGKGLEWVSGISWNSGSTGYADSVKGRFTISRDNAKNSLYLQMNSLRAEDTALYYCARDLGFNQWVDGFDYWGQGTLVTVSSASTKGPSVFPLAPSSKSTSGGTAALGCLVKDYFPEPVTVSWNSGALTSGVHTFPAVLQSSGLYSLSSVVTVPSSSLGTQTYICNVNHKPSNTKVDKKVEPKSCDKTHTCPPCPAPELLGGPSVFLFPPKPKDTLMISRTPEVTCVVVDVSHEDPEVKFNWYVDGVEVHNAKTKPREEQYNSTYRVVSVLTVLHQDWLNGKEYKCKVSNKALPAPIEKTISKAKGQPREPQVYTLPPSREEMTKNQVSLTCLVKGFYPSDIAVEWESNGQPENNYKTTPPVLDSDGSFFLYSKLTVDKSRWQQGNVFSCSVMHEALHNHYTQKSLSLSPGGGGGSGGGGSGGGGSEVQLLQSGGGLVQPGGSLRLSCAASGFDFSSYPMHWVRQAPGKGLEWVGSISSSGGATPYADSVKGRFTISRDNSKNTLYLQMNSLRPEDTAVYYCAKDFYTILTGNAFDMWGQGTSVTVSSASTGGGGSGGGGSGGGGSGGGGSDIQMTQSPSSLSASLGDRVTITCRASQGISSYLAWYQQKPGKAPKLLIYASSTRQSGVPSRFSGSGSGTDFTLTISSLQPEDSGTYYCQQYWAFPLTFGGGTKVEIKRT

SEQ ID NO: 17482 - protein, 720 aa, Artificial Sequence
  source: /note="Description of Artificial Sequence: Synthetic polypeptide"
EVQLVESGGGLVQPGRSLRLSCAASGFTFDDYAMHWVRQAPGKGLEWVSGISWDSGSVGYADSVKGRFTISRDNAKNSLYLQMNSLRAEDTALYYCARDLGYNQWWEGFDYWGQGTLVTVSSASTKGPSVFPLAPSSKSTSGGTAALGCLVKDYFPEPVTVSWNSGALTSGVHTFPAVLQSSGLYSLSSVVTVPSSSLGTQTYICNVNHKPSNTKVDKKVEPKSCDKTHTCPPCPAPELLGGPSVFLFPPKPKDTLMISRTPEVTCVVVDVSHEDPEVKFNWYVDGVEVHNAKTKPREEQYNSTYRVVSVLTVLHQDWLNGKEYKCKVSNKALPAPIEKTISKAKGQPREPQVYTLPPSREEMTKNQVSLTCLVKGFYPSDIAVEWESNGQPENNYKTTPPVLDSDGSFFLYSKLTVDKSRWQQGNVFSCSVMHEALHNHYTQKSLSLSPGGGGGSGGGGSGGGGSEVQLLQSGGGLVQPGGSLRLSCAASGFMFSRYPMHWVRQAPGKGLEWVGSISGSGGATPYADSVKGRFTISRDNSKNTLYLQMNSLRAEDTAVYYCAKDFYQILTGNAFDYWGQGTTVTVSSASTGGGGSGGGGSGGGGSGGGGSDIQMTQSPSSLSASLGDRVTITCRASQGISSYLAWYQQKPGKAPKLLIYAKSTLQSGVPSRFSGSGSGTDFTLTISSLQPEDSATYYCQQYWTFPLTFGGGTKVEIKRT

SEQ ID NO: 17483 - protein, 720 aa, Artificial Sequence
  source: /note="Description of Artificial Sequence: Synthetic polypeptide"
EVQLVESGGGLVQPGRSLRLSCAASGFTFDDYAMHWVRQAPGKGLEWVSGISWDSGSVGYADSVKGRFTISRDNAKNSLYLQMNSLRAEDTALYYCARDLGYNQWWEGFDYWGQGTLVTVSSASTKGPSVFPLAPSSKSTSGGTAALGCLVKDYFPEPVTVSWNSGALTSGVHTFPAVLQSSGLYSLSSVVTVPSSSLGTQTYICNVNHKPSNTKVDKKVEPKSCDKTHTCPPCPAPELLGGPSVFLFPPKPKDTLMISRTPEVTCVVVDVSHEDPEVKFNWYVDGVEVHNAKTKPREEQYNSTYRVVSVLTVLHQDWLNGKEYKCKVSNKALPAPIEKTISKAKGQPREPQVYTLPPSREEMTKNQVSLTCLVKGFYPSDIAVEWESNGQPENNYKTTPPVLDSDGSFFLYSKLTVDKSRWQQGNVFSCSVMHEALHNHYTQKSLSLSPGGGGGSGGGGSGGGGSEVQLLQSGGGLVQPGGSLRLSCAASGFFFSKYPMHWVRQAPGKGLEWVSSISSDGGATVYADSVKGRFTISRDNSKNTLYLQMNSLRAEDTAVYYCAKDFYTWLTGNAFDSWGQGTSVTVSSASTGGGGSGGGGSGGGGSGGGGSDIQLTQSPSSLSASLGDRVTITCRASQGISSYLAWYQQKPGKAPKLLIYARSTRQSGVPSRFSGSGSGTEFTLTISSLQPEDSATYYCQQYWTWPLTFGGGTKVEIKRT

SEQ ID NO: 17484 - protein, 720 aa, Artificial Sequence
  source: /note="Description of Artificial Sequence: Synthetic polypeptide"
EVQLVESGGGLVQPGRSLRLSCAASGFTFDDYAMHWVRQAPGKGLEWVSGISWDSGSVGYADSVKGRFTISRDNAKNSLYLQMNSLRAEDTALYYCARDLGYNQWWEGFDYWGQGTLVTVSSASTKGPSVFPLAPSSKSTSGGTAALGCLVKDYFPEPVTVSWNSGALTSGVHTFPAVLQSSGLYSLSSVVTVPSSSLGTQTYICNVNHKPSNTKVDKKVEPKSCDKTHTCPPCPAPELLGGPSVFLFPPKPKDTLMISRTPEVTCVVVDVSHEDPEVKFNWYVDGVEVHNAKTKPREEQYNSTYRVVSVLTVLHQDWLNGKEYKCKVSNKALPAPIEKTISKAKGQPREPQVYTLPPSREEMTKNQVSLTCLVKGFYPSDIAVEWESNGQPENNYKTTPPVLDSDGSFFLYSKLTVDKSRWQQGNVFSCSVMHEALHNHYTQKSLSLSPGGGGGSGGGGSGGGGSEVQLLQSGGGLVQPGGSLRLSCAASGFDFSSYPMHWVRQAPGKGLEWVGSISSSGGATPYADSVKGRFTISRDNSKNTLYLQMNSLRPEDTAVYYCAKDFYTILTGNAFDMWGQGTSVTVSSASTGGGGSGGGGSGGGGSGGGGSDIQMTQSPSSLSASLGDRVTITCRASQGISSYLAWYQQKPGKAPKLLIYASSTRQSGVPSRFSGSGSGTDFTLTISSLQPEDSGTYYCQQYWAFPLTFGGGTKVEIKRT

SEQ ID NO: 17485 - protein, 720 aa, Artificial Sequence
  source: /note="Description of Artificial Sequence: Synthetic polypeptide"
EVQLVESGGGLVQPGRSLRLSCAASGFTFDDYAMHWVRQAPGKGLEWVSGISWNSGSRGYADSVKGRFTISRDNAKNSLYLQMNSLRAEDTALYYCARDLGFNQWEEGFDYWGQGTLVTVSSASTKGPSVFPLAPSSKSTSGGTAALGCLVKDYFPEPVTVSWNSGALTSGVHTFPAVLQSSGLYSLSSVVTVPSSSLGTQTYICNVNHKPSNTKVDKKVEPKSCDKTHTCPPCPAPELLGGPSVFLFPPKPKDTLMISRTPEVTCVVVDVSHEDPEVKFNWYVDGVEVHNAKTKPREEQYNSTYRVVSVLTVLHQDWLNGKEYKCKVSNKALPAPIEKTISKAKGQPREPQVYTLPPSREEMTKNQVSLTCLVKGFYPSDIAVEWESNGQPENNYKTTPPVLDSDGSFFLYSKLTVDKSRWQQGNVFSCSVMHEALHNHYTQKSLSLSPGGGGGSGGGGSGGGGSEVQLLQSGGGLVQPGGSLRLSCAASGFMFSRYPMHWVRQAPGKGLEWVGSISGSGGATPYADSVKGRFTISRDNSKNTLYLQMNSLRAEDTAVYYCAKDFYQILTGNAFDYWGQGTTVTVSSASTGGGGSGGGGSGGGGSGGGGSDIQMTQSPSSLSASLGDRVTITCRASQGISSYLAWYQQKPGKAPKLLIYAKSTLQSGVPSRFSGSGSGTDFTLTISSLQPEDSATYYCQQYWTFPLTFGGGTKVEIKRT

SEQ ID NO: 17486 - protein, 720 aa, Artificial Sequence
  source: /note="Description of Artificial Sequence: Synthetic polypeptide"
EVQLVESGGGLVQPGRSLRLSCAASGFTFDDYAMHWVRQAPGKGLEWVSGISWNSGSRGYADSVKGRFTISRDNAKNSLYLQMNSLRAEDTALYYCARDLGFNQWEEGFDYWGQGTLVTVSSASTKGPSVFPLAPSSKSTSGGTAALGCLVKDYFPEPVTVSWNSGALTSGVHTFPAVLQSSGLYSLSSVVTVPSSSLGTQTYICNVNHKPSNTKVDKKVEPKSCDKTHTCPPCPAPELLGGPSVFLFPPKPKDTLMISRTPEVTCVVVDVSHEDPEVKFNWYVDGVEVHNAKTKPREEQYNSTYRVVSVLTVLHQDWLNGKEYKCKVSNKALPAPIEKTISKAKGQPREPQVYTLPPSREEMTKNQVSLTCLVKGFYPSDIAVEWESNGQPENNYKTTPPVLDSDGSFFLYSKLTVDKSRWQQGNVFSCSVMHEALHNHYTQKSLSLSPGGGGGSGGGGSGGGGSEVQLLQSGGGLVQPGGSLRLSCAASGFFFSKYPMHWVRQAPGKGLEWVSSISSDGGATVYADSVKGRFTISRDNSKNTLYLQMNSLRAEDTAVYYCAKDFYTWLTGNAFDSWGQGTSVTVSSASTGGGGSGGGGSGGGGSGGGGSDIQLTQSPSSLSASLGDRVTITCRASQGISSYLAWYQQKPGKAPKLLIYARSTRQSGVPSRFSGSGSGTEFTLTISSLQPEDSATYYCQQYWTWPLTFGGGTKVEIKRT

SEQ ID NO: 17487 - protein, 720 aa, Artificial Sequence
  source: /note="Description of Artificial Sequence: Synthetic polypeptide"
EVQLVESGGGLVQPGRSLRLSCAASGFTFDDYAMHWVRQAPGKGLEWVSGISWNSGSRGYADSVKGRFTISRDNAKNSLYLQMNSLRAEDTALYYCARDLGFNQWEEGFDYWGQGTLVTVSSASTKGPSVFPLAPSSKSTSGGTAALGCLVKDYFPEPVTVSWNSGALTSGVHTFPAVLQSSGLYSLSSVVTVPSSSLGTQTYICNVNHKPSNTKVDKKVEPKSCDKTHTCPPCPAPELLGGPSVFLFPPKPKDTLMISRTPEVTCVVVDVSHEDPEVKFNWYVDGVEVHNAKTKPREEQYNSTYRVVSVLTVLHQDWLNGKEYKCKVSNKALPAPIEKTISKAKGQPREPQVYTLPPSREEMTKNQVSLTCLVKGFYPSDIAVEWESNGQPENNYKTTPPVLDSDGSFFLYSKLTVDKSRWQQGNVFSCSVMHEALHNHYTQKSLSLSPGGGGGSGGGGSGGGGSEVQLLQSGGGLVQPGGSLRLSCAASGFDFSSYPMHWVRQAPGKGLEWVGSISSSGGATPYADSVKGRFTISRDNSKNTLYLQMNSLRPEDTAVYYCAKDFYTILTGNAFDMWGQGTSVTVSSASTGGGGSGGGGSGGGGSGGGGSDIQMTQSPSSLSASLGDRVTITCRASQGISSYLAWYQQKPGKAPKLLIYASSTRQSGVPSRFSGSGSGTDFTLTISSLQPEDSGTYYCQQYWAFPLTFGGGTKVEIKRT

SEQ ID NO: 17488 - protein, 720 aa, Artificial Sequence
  source: /note="Description of Artificial Sequence: Synthetic polypeptide"
EVQLVESGGGLVQPGRSLRLSCAASGFTFDDYAMHWVRQAPGKGLEWVSGISWDSGSVGYADSVKGRFTISRDNAKNSLYLQMNSLRAEDTALYYCARDLGAYQWEEGFDYWGQGTLVTVSSASTKGPSVFPLAPSSKSTSGGTAALGCLVKDYFPEPVTVSWNSGALTSGVHTFPAVLQSSGLYSLSSVVTVPSSSLGTQTYICNVNHKPSNTKVDKKVEPKSCDKTHTCPPCPAPELLGGPSVFLFPPKPKDTLMISRTPEVTCVVVDVSHEDPEVKFNWYVDGVEVHNAKTKPREEQYNSTYRVVSVLTVLHQDWLNGKEYKCKVSNKALPAPIEKTISKAKGQPREPQVYTLPPSREEMTKNQVSLTCLVKGFYPSDIAVEWESNGQPENNYKTTPPVLDSDGSFFLYSKLTVDKSRWQQGNVFSCSVMHEALHNHYTQKSLSLSPGGGGGSGGGGSGGGGSEVQLLQSGGGLVQPGGSLRLSCAASGFMFSRYPMHWVRQAPGKGLEWVGSISGSGGATPYADSVKGRFTISRDNSKNTLYLQMNSLRAEDTAVYYCAKDFYQILTGNAFDYWGQGTTVTVSSASTGGGGSGGGGSGGGGSGGGGSDIQMTQSPSSLSASLGDRVTITCRASQGISSYLAWYQQKPGKAPKLLIYAKSTLQSGVPSRFSGSGSGTDFTLTISSLQPEDSATYYCQQYWTFPLTFGGGTKVEIKRT

SEQ ID NO: 17489 - protein, 720 aa, Artificial Sequence
  source: /note="Description of Artificial Sequence: Synthetic polypeptide"
EVQLVESGGGLVQPGRSLRLSCAASGFTFDDYAMHWVRQAPGKGLEWVSGISWDSGSVGYADSVKGRFTISRDNAKNSLYLQMNSLRAEDTALYYCARDLGAYQWEEGFDYWGQGTLVTVSSASTKGPSVFPLAPSSKSTSGGTAALGCLVKDYFPEPVTVSWNSGALTSGVHTFPAVLQSSGLYSLSSVVTVPSSSLGTQTYICNVNHKPSNTKVDKKVEPKSCDKTHTCPPCPAPELLGGPSVFLFPPKPKDTLMISRTPEVTCVVVDVSHEDPEVKFNWYVDGVEVHNAKTKPREEQYNSTYRVVSVLTVLHQDWLNGKEYKCKVSNKALPAPIEKTISKAKGQPREPQVYTLPPSREEMTKNQVSLTCLVKGFYPSDIAVEWESNGQPENNYKTTPPVLDSDGSFFLYSKLTVDKSRWQQGNVFSCSVMHEALHNHYTQKSLSLSPGGGGGSGGGGSGGGGSEVQLLQSGGGLVQPGGSLRLSCAASGFFFSKYPMHWVRQAPGKGLEWVSSISSDGGATVYADSVKGRFTISRDNSKNTLYLQMNSLRAEDTAVYYCAKDFYTWLTGNAFDSWGQGTSVTVSSASTGGGGSGGGGSGGGGSGGGGSDIQLTQSPSSLSASLGDRVTITCRASQGISSYLAWYQQKPGKAPKLLIYARSTRQSGVPSRFSGSGSGTEFTLTISSLQPEDSATYYCQQYWTWPLTFGGGTKVEIKRT

SEQ ID NO: 17490 - protein, 720 aa, Artificial Sequence
  source: /note="Description of Artificial Sequence: Synthetic polypeptide"
EVQLVESGGGLVQPGRSLRLSCAASGFTFDDYAMHWVRQAPGKGLEWVSGISWDSGSVGYADSVKGRFTISRDNAKNSLYLQMNSLRAEDTALYYCARDLGAYQWEEGFDYWGQGTLVTVSSASTKGPSVFPLAPSSKSTSGGTAALGCLVKDYFPEPVTVSWNSGALTSGVHTFPAVLQSSGLYSLSSVVTVPSSSLGTQTYICNVNHKPSNTKVDKKVEPKSCDKTHTCPPCPAPELLGGPSVFLFPPKPKDTLMISRTPEVTCVVVDVSHEDPEVKFNWYVDGVEVHNAKTKPREEQYNSTYRVVSVLTVLHQDWLNGKEYKCKVSNKALPAPIEKTISKAKGQPREPQVYTLPPSREEMTKNQVSLTCLVKGFYPSDIAVEWESNGQPENNYKTTPPVLDSDGSFFLYSKLTVDKSRWQQGNVFSCSVMHEALHNHYTQKSLSLSPGGGGGSGGGGSGGGGSEVQLLQSGGGLVQPGGSLRLSCAASGFDFSSYPMHWVRQAPGKGLEWVGSISSSGGATPYADSVKGRFTISRDNSKNTLYLQMNSLRPEDTAVYYCAKDFYTILTGNAFDMWGQGTSVTVSSASTGGGGSGGGGSGGGGSGGGGSDIQMTQSPSSLSASLGDRVTITCRASQGISSYLAWYQQKPGKAPKLLIYASSTRQSGVPSRFSGSGSGTDFTLTISSLQPEDSGTYYCQQYWAFPLTFGGGTKVEIKRT

SEQ ID NO: 17491 - protein, 469 aa, Artificial Sequence
  source: /note="Description of Artificial Sequence: Synthetic polypeptide"
METDTLLLWVLLLWVPGSTGQVQLVQSGAEVKKPGASVKVSCKASGYTFTENIIHWVRQAPGQGLEWMGWFHPGSGSIKYNEKFKDRVTMTADTSTSTVYMELSSLRSEDTAVYYCARHGGTGRGAMDYWGQGTLVTVSSASTKGPSVFPLAPSSKSTSGGTAALGCLVKDYFPEPVTVSWNSGALTSGVHTFPAVLQSSGLYSLSSVVTVPSSSLGTQTYICNVNHKPSNTKVDKKVEPKSCDKTHTCPPCPAPPVAGPSVFLFPPKPKDTLMISRTPEVTCVVVDVSHEDPEVKFNWYVDGVEVHNAKTKPREEQYNSTYRVVSVLTVLHQDWLNGKEYKCKVSNKGLPSSIEKTISKAKGQPREPQVYTLPPSRDELTKNQVSLTCLVKGFYPSDIAVEWESNGQPENNYKTTPPVLDSDGSFFLYSKLTVDKSRWQQGNVFSCSVMHEALHNHYTQKSLSLSPGK

SEQ ID NO: 17492 - protein, 453 aa, Homo sapiens
VQLQQSGPELVKPGASVKMSCKTSRYTFTEYTIHWVRQSHGKSLEWIGGINPNNGIPNYNQKFKGRATLTVGKSSSTAYMELRSLTSEDSAVYFCARRRIAYGYDEGHAMDYWGQGTSVTVSSASTKGPSVFPLAPSSKSTSGGTAALGCLVKDYFPEPVTVSWNSGALTSGVHTFPAVLQSSGLYSLSSVVTVPSSSLGTQTYICNVNHKPSNTKVDKKVEPKSCDKTHTCPPCPAPELLGGPSVFLFPPKPKDTLMISRTPEVTCVVVDVSHEDPEVKFNWYVDGVEVHNAKTKPREEQYNSTYRVVSVLTVLHQDWLNGKEYKCKVSNKALPAPIEKTISKAKGQPREPQVYTLPPSREEMTKNQVSLTCLVKGFYPSDIAVEWESNGQPENNYKTTPPVLDSDGSFFLYSKLTVDKSRWQQGNVFSCSVMHEALHNHYTQKSLSLSPGK

SEQ ID NO: 17493 - protein, 472 aa, Homo sapiens
MGWSWVFLFLLSGTAGVLSEVQLQQSGPELVKPGASVKMSCKTSRYTFTEYTIHWVRQSHGKSLEWIGGINPNNGIPNYNQKFKGRATLTVGKSSSTAYMELRSLTSEDSAVYFCARRRIAYGYDEGHAMDYWGQGTSVTVSSSTKGPSVFPLAPSSKSTSGGTAALGCLVKDYFPEPVTVSWNSGALTSGVHTFPAVLQSSGLYSLSSVVTVPSSSLGTQTYICNVNHKPSNTKVDKKVEPKSCDKTHTCPPCPAPELLGGPSVFLFPPKPKDTLMISRTPEVTCVVVDVSHEDPEVKFNWYVDGVEVHNAKTKPREEQYNSTYRVVSVLTVLHQDWLNGKEYKCKVSNKALPAPIEKTISKAKGQPREPQVYTLPPSREEMTKNQVSLTCLVKGFYPSDIAVEWESNGQPENNYKTTPPVLDSDGSFFLYSKLTVDKSRWQQGNVFSCSVMHEALHNHYTQKSLSLSPGK

SEQ ID NO: 17494 - protein, 472 aa, Homo sapiens
MDWTWRVFCLLAVAPGAHSQVQLVQSGAEVKKPGASVKVSCKTSRYTFTEYTIHWVRQAPGQRLEWIGGINPNNGIPNYNQKFKGRATLTVGKSASTAYMELSSLRSEDTAVYYCARRRIAYGYDEGHAMDYWGQGTLVTVSSSTKGPSVFPLAPSSKSTSGGTAALGCLVKDYFPEPVTVSWNSGALTSGVHTFPAVLQSSGLYSLSSVVTVPSSSLGTQTYICNVNHKPSNTKVDKKVEPKSCDKTHTCPPCPAPELLGGPSVFLFPPKPKDTLMISRTPEVTCVVVDVSHEDPEVKFNWYVDGVEVHNAKTKPREEQYNSTYRVVSVLTVLHQDWLNGKEYKCKVSNKALPAPIEKTISKAKGQPREPQVYTLPPSREEMTKNQVSLTCLVKGFYPSDIAVEWESNGQPENNYKTTPPVLDSDGSFFLYSKLTVDKSRWQQGNVFSCSVMHEALHNHYTQKSLSLSPGK

SEQ ID NO: 17495 - protein, 466 aa, Artificial Sequence
  source: /note="Description of Artificial Sequence: Synthetic polypeptide"
MGWSGVFIFILSGTAGVQSQVQLQQSGAELARPGASVNLSCKASGYTFTNNGINWLKQRTGQGLEWIGEIYPRSTNTLYNEKFKGKATLTADRSSNTAYMELRSLTSEDSAVYFCARTLTAPFAFWGQGTLVTVSAASTKGPSVFPLAPSSKSTSGGTAALGCLVKDYFPEPVTVSWNSGALTSGVHTFPAVLQSSGLYSLSSVVTVPSSSLGTQTYICNVNHKPSNTKVDKKVEPKSCDKTHTCPPCPAPELLGGPSVFLFPPKPKDTLMISRTPEVTCVVVDVSHEDPEVKFNWYVDGVEVHNAKTKPREEQYNSTYRVVSVLTVLHQDWLNGKEYKCKVSNKALPAPIEKTISKAKGQPREPQVYTLPPSRDELTKNQVSLTCLVKGFYPSDIAVEWESNGQPENNYKTTPPVLDSDGSFFLYSKLTVDKSRWQQGNVFSCSVMHEALHNHYTQKSLSLSPGK

SEQ ID NO: 17496 - protein, 446 aa, Homo sapiens
  MOD_RES (1)..(1): Any amino acid
XVQLVQSGAEVKKPGSSVKVSCKASGGTFSRSAIIWVRQAPGQGLEWMGGIVPMFGPPNYAQKFQGRVTITADESTNTAYMELSSLRSEDTAFYFCAGGYGIYSPEEYNGGLVTVSSASTKGPSVFPLAPSSKSTSGGTAALGCLVKDYFPEPVTVSWNSGALTSGVHTFPAVLQSSGLYSLSSVVTVPSSSLGTQTYICNVNHKPSNTKVDKRVEPKSCDKTHTCPPCPAPELLGGPSVFLFPPKPKDTLMISRTPEVTCVVVDVSHEDPQVKFNWYVDGVQVHNAKTKPREQQYNSTYRVVSVLTVLHQNWLDGKEYKCKVSNKALPAPIEKTISKAKGQPREPQVYTLPPSREEMTKNQVSLTCLVKGFYPSDIAVEWESNDGEPENYKTTPPVLDSDGSFFLYSKLTVDKSRWQEGNVFSCSVMHEALHNHYTQKSLSLSPG

SEQ ID NO: 17497 - protein, 446 aa, Homo sapiens
EVQLVQSGAEVKKPGSSVKVSCKASGGTFSRSAIIWVRQAPGQGLEWMGGIVPMFGPPNYAQKFQGRVTITADESTNTAYMELSSLRSEDTAFYFCAGGYGIYSPEEYNGGLVTVSSASTKGPSVFPLAPSSKSTSGGTAALGCLVKDYFPEPVTVSWNSGALTSGVHTFPAVLQSSGLYSLSSVVTVPSSSLGTQTYICNVNHKPSNTKVDKRVEPKSCDKTHTCPPCPAPELLGGPSVFLFPPKPKDTLMISRTPEVTCVVVDVSHEDPEVKFNWYVDGVEVHNAKTKPREQQYNSTYRVVSVLTVLHQNWLDGKEYKCKVSNKALPAPIEKTISKAKGQPREPQVYTLPPSREEMTKNQVSLTCLVKGFYPSDIAVEWESNGQPENNYKTTPPVLDSDGSFFLYSKLTVDKSRWQQGNVFSCSVMHEALHNHYTQKSLSLSPG

SEQ ID NO: 17498 - protein, 595 aa, Artificial Sequence
  source: /note="Description of Artificial Sequence: Synthetic polypeptide"
MKLPVRLLVLMFWIPASLSEVQLVQSGAEVEKPGASVKISCKASGSSFTGYNMNWVRQNIGKSLEWIGAIDPYYGGTSYNQKFKGRATLTVDKSTSTAYMHLKSLRSEDTAVYYCVSGMEYWGQGTSVTVSSASTKGPSVFPLAPSSKSTSGGTAALGCLVKDYFPEPVTVSWNSGALTSGVHTFPAVLQSSGLYSLSSVVTVPSSSLGTQTYICNVNHKPSNTKVDKRVEPKSCDKTHTCPPCPAPELLGGPSVFLFPPKPKDTLMISRTPEVTCVVVDVSHEDPEVKFNWYVDGVEVHNAKTKPREEQYNSTYRVVSVLTVLHQDWLNGKEYKCKVSNKALPAPIEKTISKAKGQPREPQVYTLPPSREEMTKNQVSLTCLVKGFYPSDIAVEWESNGQPENNYKTTPPVLDSDGSFFLYSKLTVDKSRWQQGNVFSCSVMHEALHNHYTQKSLSLSPGKAPTSSSTKKTQLQLEHLLLDLQMILNGINNYKNPKLTRMLTFKFYMPKKATELKHLQCLEEELKPLEEVLNLAQSKNFHLRPRDLISNINVIVLELKGSETTFMCEYADETATIVEFLNRWITFCQSIISTLT

SEQ ID NO: 17499 - protein, 449 aa, Artificial Sequence
  source: /note="Description of Artificial Sequence: Synthetic polypeptide"
QVQLVESGPGVVQPGRSLRISCAVSGFSVTNYGVHWVRQPPGKGLEWLGVIWAIGITNYNSAFMSRLTISKDNSKNTVYLQMNSLRAEDTAMYYCASRGGHYGYALDYWGQGTLVTVSSASTKGPSVFPLAPSSKSTSGGTAALGCLVKDYFPEPVTVSWNSGALTSGVHTFPAVLQSSGLYSLSSVVTVPSSSLGTQTYICNVNHKPSNTKVDKRVEPKSCDKTHTCPPCPAPELLGGPSVFLFPPKPKDTLMISRTPEVTCVVVDVSHEDPEVKFNWYVDGVEVHNAKTKPREEQYNSTYRVVSVLTVLHQDWLNGKEYKCKVSNKALPAPIEKTISKAKGQPREPQVYTLPPSRDELTKNQVSLTCLVKGFYPSDIAVEWESNGQPENNYKTTPPVLDSDGSFFLYSKLTVDKSRWQQGNVFSCSVMHEALHNHYTQKSLSLSPGK

SEQ ID NO: 17500 - protein, 449 aa, Artificial Sequence
  source: /note="Description of Artificial Sequence: Synthetic polypeptide"
QVQLVESGPGVVQPGRSLRLSCAVSGFSVTNYGVHWVRQPPGKGLEWLGVIWAGGITNYNSSVKGRLTISKDNSKNTVYLQMNSLRAEDTAVYYCASRGGHYGYALDYWGQGTLVTVSSASTKGPSVFPLAPSSKSTSGGTAALGCLVKDYFPEPVTVSWNSGALTSGVHTFPAVLQSSGLYSLSSVVTVPSSSLGTQTYICNVNHKPSNTKVDKRVEPKSCDKTHTCPPCPAPELLGGPSVFLFPPKPKDTLMISRTPEVTCVVVDVSHEDPEVKFNWYVDGVEVHNAKTKPREEQYNSTYRVVSVLTVLHQDWLNGKEYKCKVSNKALPAPIEKTISKAKGQPREPQVYTLPPSRDELTKNQVSLTCLVKGFYPSDIAVEWESNGQPENNYKTTPPVLDSDGSFFLYSKLTVDKSRWQQGNVFSCSVMHEALHNHYTQKSLSLSPGK

SEQ ID NO: 17501 - protein, 449 aa, Artificial Sequence
  source: /note="Description of Artificial Sequence: Synthetic polypeptide"
QVQLVESGPGVVQPGRSLRLSCAVSGFSVTNYGVHWVRQPPGKGLEWLGVIWAIGITNYNSSVKGRLTISKDNSKNTVYLQMNSLRAEDTAVYYCASRGGHYGYALDYWGQGTLVTVSSASTKGPSVFPLAPSSKSTSGGTAALGCLVKDYFPEPVTVSWNSGALTSGVHTFPAVLQSSGLYSLSSVVTVPSSSLGTQTYICNVNHKPSNTKVDKRVEPKSCDKTHTCPPCPAPELLGGPSVFLFPPKPKDTLMISRTPEVTCVVVDVSHEDPEVKFNWYVDGVEVHNAKTKPREEQYNSTYRVVSVLTVLHQDWLNGKEYKCKVSNKALPAPIEKTISKAKGQPREPQVYTLPPSRDELTKNQVSLTCLVKGFYPSDIAVEWESNGQPENNYKTTPPVLDSDGSFFLYSKLTVDKSRWQQGNVFSCSVMHEALHNHYTQKSLSLSPGK

SEQ ID NO: 17502 - protein, 449 aa, Artificial Sequence; identical to SEQ ID NO: 17499
  source: /note="Description of Artificial Sequence: Synthetic polypeptide"

SEQ ID NO: 17503 - protein, 449 aa, Artificial Sequence; identical to SEQ ID NO: 17500
  source: /note="Description of Artificial Sequence: Synthetic polypeptide"

SEQ ID NO: 17504 - protein, 449 aa, Artificial Sequence; identical to SEQ ID NO: 17501
  source: /note="Description of Artificial Sequence: Synthetic polypeptide"

SEQ ID NO: 17505 - protein, 443 aa, Homo sapiens
EVQLVQSGAEVEKPGASVKISCKASGSSFTGYNMNWVRQNIGKSLEWIGAIDPYYGGTSYNQKFKGRATLTVDKSTSTAYMHLKSLRSEDTAVYYCVSGMEYWGQGTSVTVSSASTKGPSVFPLAPSSKSTSGGTAALGCLVKDYFPEPVTVSWNSGALTSGVHTFPAVLQSSGLYSLSSVVTVPSSSLGTQTYICNVNHKPSNTKVDKRVEPKSCDKTHTCPPCPAPELLGGPSVFLFPPKPKDTLMISRTPEVTCVVVDVSHEDPEVKFNWYVDGVEVHNAKTKPREEQYNSTYRVVSVLTVLHQDWLNGKEYKCAVSNKALPAPIEKTISKAKGQPREPQVYTLPPSREEMTKNQVSLTCLVKGFYPSDIAVEWESNGQPENNYKTTPPVLDSDGSFFLYSKLTVDKSRWQQGNVFSCSVMHEALHNHYTQKSLSLSPGK

SEQ ID NO: 17506 - protein, 443 aa, Artificial Sequence
  source: /note="Description of Artificial Sequence: Synthetic polypeptide"
EVQLVQSGAEVEKPGASVKISCKASGSSFTGYNMNWVRQNIGKSLEWIGAIDPYYGGTSYNQKFKGRATLTVDKSTSTAYMHLKSLRSEDTAVYYCVSGMEYWGQGTSVTVSSASTKGPSVFPLAPSSKSTSGGTAALGCLVKDYFPEPVTVSWNSGALTSGVHTFPAVLQSSGLYSLSSVVTVPSSSLGTQTYICNVNHKPSNTKVDKRVEPKSCDKTHTCPPCPAPELLGGPSVFLFPPKPKDTLMISRTPEVTCVVVDVSHEDPEVKFNWYVDGVEVHNAKTKPREEQYNSTYRVVSVLTVLHQDWLNGKEYKCAVSNAALPAPIEKTISKAKGQPREPQVYTLPPSREEMTKNQVSLTCLVKGFYPSDIAVEWESNGQPENNYKTTPPVLDSDGSFFLYSKLTVDKSRWQQGNVFSCSVMHEALHNHYTQKSLSLSPGK

SEQ ID NO: 17507 - protein, 449 aa, Artificial Sequence
  source: /note="Description of Artificial Sequence: Synthetic polypeptide"
QVQLKESGPGLVAPSQSLSITCTVSGFSVTNYGVHWVRQPPGKGLEWLGVIWAGGITNYNSAFMSRLSISKDNSKSQVFLKMNSLQIDDTAMYYCASRGGHYGYALDYWGQGTSVTVSSASTKGPSVFPLAPSSKSTSGGTAALGCLVKDYFPEPVTVSWNSGALTSGVHTFPAVLQSSGLYSLSSVVTVPSSSLGTQTYICNVNHKPSNTKVDKRVEPKSCDKTHTCPPCPAPELLGGPSVFLFPPKPKDTLMISRTPEVTCVVVDVSHEDPEVKFNWYVDGVEVHNAKTKPREEQYNSTYRVVSVLTVLHQDWLNGKEYKCKVSNKALPAPIEKTISKAKGQPREPQVYTLPPSRDELTKNQVSLTCLVKGFYPSDIAVEWESNGQPENNYKTTPPVLDSDGSFFLYSKLTVDKSRWQQGNVFSCSVMHEALHNHYTQKSLSLSPGK

SEQ ID NO: 17508 - protein, 448 aa, Artificial Sequence
  source: /note="Description of Artificial Sequence: Synthetic polypeptide"
QVQLVESGPGVVQPGRSLRISCAVSGFSVTNYGVHWVRQPPGKGLEWLGVIWAGGITNYNSAFMSRLTISKDNSKNTVYLQMNSLRAEDTAMYYCASRGGHYGYALDYWGQGTLVTVSSASTKGPSVFPLAPSSKSTSGGTAALGCLVKDYFPEPVTVSWNSGALTSGVHTFPAVLQSSGLYSLSSVVTVPSSSLGTQTYICNVNHKPSNTKVDKRVEPKSCDKTHTCPPCPAPELLGGPSVFLFPPKPKDTLMISRTPEVTCVVVDVSHEDPEVKFNWYVDGVEVHNAKTKPREEQYNSTYRVVSVLTVLHQDWLNGKEYKCKVSNKALPAPIEKTISKAKGQPREPQVYTLPPSRDELTKNQVSLTCLVKGFYPSDIAVEWESNGQPENNYKTTPPVLDSDGSFFLYSKLTVDKSRWQQGNVFSCSVMHEALHNHYTQKSLSLSPG

SEQ ID NO: 17509 - protein, 462 aa, Artificial Sequence
  source: /note="Description of Artificial Sequence: Synthetic polypeptide"
MGWTWIFILILSVTTGVHSEVQLLQSGPELEKPGASVMISCKASGSSFTGYNMNWVRQNIGKSLEWIGAIDPYYGGTSYNQKFKGRATLTVDKSSSTAYMHLKSLTSEDSAVYYCVSGMEYWGQGTSVTVSSASTKGPSVFPLAPSSKSTSGGTAALGCLVKDYFPEPVTVSWNSGALTSGVHTFPAVLQSSGLYSLSSVVTVPSSSLGTQTYICNVNHKPSNTKVDKRVEPKSCDKTHTCPPCPAPELLGGPSVFLFPPKPKDTLMISRTPEVTCVVVDVSHEDPEVKFNWYVDGVEVHNAKTKPREEQYNSTYRVVSVLTVLHQDWLNGKEYKCKVSNKALPAPIEKTISKAKGQPREPQVYTLPPSREEMTKNQVSLTCLVKGFYPSDIAVEWESNGQPENNYKTTPPVLDSDGSFFLYSKLTVDKSRWQQGNVFSCSVMHEALHNHYTQKSLSLSPGK

SEQ ID NO: 17510 - protein, 462 aa, Artificial Sequence; identical to SEQ ID NO: 17509
  source: /note="Description of Artificial Sequence: Synthetic polypeptide"

SEQ ID NO: 17511 - protein, 448 aa, Artificial Sequence; identical to SEQ ID NO: 17508
  source: /note="Description of Artificial Sequence: Synthetic polypeptide"

SEQ ID NO: 17512 - protein, 448 aa, Artificial Sequence
  source: /note="Description of Artificial Sequence: Synthetic polypeptide"
QVQLKESGPGVVQPGQSLSISCAVSGFSVTNYGVHWVRQPPGKGLEWLGVIWAGGITNYNSAFMSRLTISKDNSKSTVYLKMNSLQAEDTAMYYCASRGGHYGYALDYWGQGTLVTVSSASTKGPSVFPLAPSSKSTSGGTAALGCLVKDYFPEPVTVSWNSGALTSGVHTFPAVLQSSGLYSLSSVVTVPSSSLGTQTYICNVNHKPSNTKVDKRVEPKSCDKTHTCPPCPAPELLGGPSVFLFPPKPKDTLMISRTPEVTCVVVDVSHEDPEVKFNWYVDGVEVHNAKTKPREEQYNSTYRVVSVLTVLHQDWLNGKEYKCKVSNKALPAPIEKTISKAKGQPREPQVYTLPPSRDELTKNQVSLTCLVKGFYPSDIAVEWESNGQPENNYKTTPPVLDSDGSFFLYSKLTVDKSRWQQGNVFSCSVMHEALHNHYTQKSLSLSPG

SEQ ID NO: 17513 - protein, 446 aa, Artificial Sequence
  source: /note="Description of Artificial Sequence: Synthetic polypeptide"
QVQLVESGPGVVQPGRSLRISCAVSGFSVTNYGVHWVRQPPGKGLEWLGVIWAGGITNYNSAFMSRLTISKDNSKNTVYLQMNSLRAEDTAMYYCASRGGHYGYALDYWGQGTLVTVSSASTKGPSVFPLAPCSRSTSESTAALGCLVKDYFPEPVTVSWNSGALTSGVHTFPAVLQSSGLYSLSSVVTVPSSSLGTKTYTCNVDHKPSNTKVDKRVESKYGPPCPSCPAPEFLGGPSVFLFPPKPKDTLMISRTPEVTCVVVDVSQEDPEVQFNWYVDGVEVHNAKTKPREEQFNSTYRVVSVLTVLHQDWLNGKEYKCKVSNKGLPSSIEKTISKAKGQPREPQVYTLPPSQEEMTKNQVSLTCLVKGFYPSDIAVEWESNGQPENNYKTTPPVLDSDGSFFLYSRLTVDKSRWQEGNVFSCSVMHEALHNHYTQKSLSLSLGK

SEQ ID NO: 17514 - protein, 449 aa, Artificial Sequence
  source: /note="Description of Artificial Sequence: Synthetic polypeptide"
QVQLVESGPGLVQPGRSLRLTCAVSGFSVTNYGVHWVRQPPGKGLEWLGVIWAGGITNYNSAFMSRLTISKDNSKNTVYLQMNSLRAEDTAVYYCASRGGHYGYALDYWGQGTLVTVSSASTKGPSVFPLAPSSKSTSGGTAALGCLVKDYFPEPVTVSWNSGALTSGVHTFPAVLQSSGLYSLSSVVTVPSSSLGTQTYICNVNHKPSNTKVDKRVEPKSCDKTHTCPPCPAPELLGGPSVFLFPPKPKDTLMISRTPEVTCVVVDVSHEDPEVKFNWYVDGVEVHNAKTKPREEQYNSTYRVVSVLTVLHQDWLNGKEYKCKVSNKALPAPIEKTISKAKGQPREPQVYTLPPSRDELTKNQVSLTCLVKGFYPSDIAVEWESNGQPENNYKTTPPVLDSDGSFFLYSKLTVDKSRWQQGNVFSCSVMHEALHNHYTQKSLSLSPGK

SEQ ID NO: 17515 - protein, 450 aa, Artificial Sequence
  source: /note="Description of Artificial Sequence: Synthetic polypeptide"
EVQLVESGGGLVQPGGSLRLSCAASGFNIKDTYIHWVRQAPGKGLEWVARIYPTNGYTRYADSVKGRFTISADTSKNTAYLQMNSLRAEDTAVYYCSRWGGDGFYAMDYWGQGTLVTVSSASTKGPSVFPLAPSSKSTSGGTAALGCLVKDYFPEPVTVSWNSGALTSGVHTFPAVLQSSGLYSLSSVVTVPSSSLGTQTYICNVNHKPSNTKVDKKVEPKSCDKTHTCPPCPAPELLGGPSVFLFPPKPKDTLMISRTPEVTCVVVDVSHEDPEVKFNWYVDGVEVHNAKTKPREEQYNSTYRVVSVLTVLHQDWLNGKEYKCKVSNKALPAPIEKTISKAKGQPREPQVYTLPPSRDELTKNQVSLTCLVKGFYPSDIAVEWESNGQPENNYKTTPPVLDSDGSFFLYSKLTVDKSRWQQGNVFSCSVMHEALHNHYTQKSLSLSPGK

SEQ ID NO: 17516 - protein, 707 aa, Artificial Sequence
  source: /note="Description of Artificial Sequence: Synthetic polypeptide"
EVQLVESGGGLVQPGGSLRLSCAASGFNIKDTYIHWVRQAPGKGLEWVARIYPTNGYTRYADSVKGRFTISADTSKNTAYLQMNSLRAEDTAVYYCSRWGGDGFYAMDYWGQGTLVTVSSASTKGPSVFPLAPSSKSTSGGTAALGCLVKDYFPEPVTVSWNSGALTSGVHTFPAVLQSSGLYSLSSVVTVPSSSLGTQTYICNVNHKPSNTKVDKKVEPKSCDKTHTCPPCPAPELLGGPSVFLFPPKPKDTLMISRTPEVTCVVVDVSHEDPEVKFNWYVDGVEVHNAKTKPREEQYNSTYRVVSVLTVLHQDWLNGKEYKCKVSNKALPAPIEKTISKAKGQPREPQVYTLPPSREEMTKNQVSLTCLVKGFYPSDIAVEWESNGQPENNYKTTPPVLDSDGSFFLYSKLTVDKSRWQQGNVFSCSVMHEALHNHYTQKSLSLSPGKGGGGSGGGGSQVQLVESGGGLVKPGGSLRLSCAASGFTFSDYAMSWIRQAPGKGLEWVSSINIGATYIYYADSVKGRFTISRDNAKNSLYLQMNSLRAEDTAVYYCARPGSPYEYDKAYYSMAYWGQGTTVTVSSGGGGSGGGGSGGGGSDIQMTQSPSSLSASVGDRVTITCRASQDIKNYLNWYQQKPGKAPKLLIYYSSTLLSGVPSRFSGSGSGTDFTLTISSLQPEDFATYYCQQSITLPPTFGGGTKVEIK

SEQ ID NO: 17517 - protein, 712 aa, Artificial Sequence
  source: /note="Description of Artificial Sequence: Synthetic polypeptide"
EVQLVESGGGLVQPGGSLRLSCAASGFNIKDTYIHWVRQAPGKGLEWVARIYPTNGYTRYADSVKGRFTISADTSKNTAYLQMNSLRAEDTAVYYCSRWGGDGFYAMDYWGQGTLVTVSSASTKGPSVFPLAPSSKSTSGGTAALGCLVKDYFPEPVTVSWNSGALTSGVHTFPAVLQSSGLYSLSSVVTVPSSSLGTQTYICNVNHKPSNTKVDKKVEPKSCDKTHTCPPCPAPELLGGPSVFLFPPKPKDTLMISRTPEVTCVVVDVSHEDPEVKFNWYVDGVEVHNAKTKPREEQYNSTYRVVSVLTVLHQDWLNGKEYKCKVSNKALPAPIEKTISKAKGQPREPQVYTLPPSREEMTKNQVSLTCLVKGFYPSDIAVEWESNGQPENNYKTTPPVLDSDGSFFLYSKLTVDKSRWQQGNVFSCSVMHEALHNHYTQKSLSLSPGKGGGGSGGGGSQVQLVESGGGLVKPGGSLRLSCAASGFTFSDYAMSWIRQAPGKCLEWVSSINIGATYIYYADSVKGRFTISRDNAKNSLYLQMNSLRAEDTAVYYCARPGSPYEYDKAYYSMAYWGQGTTVTVSSGGGGSGGGGSGGGGSGGGGSDIQMTQSPSSLSASVGDRVTITCRASQDIKNYLNWYQQKPGKAPKLLIYYSSTLLSGVPSRFSGSGSGTDFTLTISSLQPEDFATYYCQQSITLPPTFGCGTKVEIK

SEQ ID NO: 17518 - protein, 457 aa, Homo sapiens
QVQLVQSGAEVKKPGASVKVSCQASGYRFSNFVIHWVRQAPGQRFEWMGWINPYNGNKEFSAKFQDRVTFTADTSANTAYMELRSLRSADTAVYYCARVGPYSWDDSPQDNYYMDVWGKGTTVIVSSASTKGPSVFPLAPSSKSTSGGTAALGCLVKDYFPEPVTVSWNSGALTSGVHTFPAVLQSSGLYSLSSVVTVPSSSLGTQTYICNVNHKPSNTKVDKRVEPKSCDKTHTCPPCPAPELLGGPSVFLFPPKPKDTLMISRTPEVTCVVVDVSHEDPEVKFNWYVDGVEVHNAKTKPREEQYNSTYRVVSVLTVLHQDWLNGKEYKCKVSNKALPAPIEKTISKAKGQPREPQVYTLPPSREEMTKNQVSLTCLVKGFYPSDIAVEWESNGQPENNYKTTPPVLDSDGSFFLYSRLTVDKSRWQQGNVFSCSVMHEALHNHYTQKSLSLSPGK

SEQ ID NO: 17519 - protein, 457 aa, Homo sapiens
QVQLVQSGAEVKKPGASVKVSCQASGYRFSNFVIHWVRQAPGQRFEWMGWINPYNGNKEFSAKFQDRVTFTADTSANTAYMELRSLRSADTAVYYCARVGPYSWDDSPQDNYYMDVWGKGTTVIVSSASTKGPSVFPLAPSSKSTSGGTAALGCLVKDYFPEPVTVSWNSGALTSGVHTFPAVLQSSGLYSLSSVVTVPSSSLGTQTYICNVNHKPSNTKVDKRVEPKSCDKTHTCPPCPAPELLGGPSVFLFPPKPKDTLMISRTPEVTCVVVDVSHEDPEVKFNWYVDGVEVHNAKTKPREEQYNSTYRVVSVLTVLHQDWLNGKEYKCKVSNKALPAPIEKTISKAKGQPREPQVYTLPPSREEMTKNQVSLTCLVKGFYPSDIAVEWESNGQPENNYKTTPPVLDSDGSFLLYSKLTVDKSRWQQGNVFSCSVMHEALHNHYTQKSLSLSPGK

SEQ ID NO: 17520 - protein, 449 aa, Artificial Sequence; identical to SEQ ID NO: 6830
  source: /note="Description of Artificial Sequence: Synthetic polypeptide"

SEQ ID NO: 17521 - protein, 451 aa, Artificial Sequence
  source: /note="Description of Artificial Sequence: Synthetic polypeptide"
EVQLLQSGGGLVQPGGSLRLSCAASGFFFSKYPMHWVRQAPGKGLEWVSSISSDGGATVYADSVKGRFTISRDNSKNTLYLQMNSLRAEDTAVYYCAKDFYTWLTGNAFDSWGQGTSVTVSSASTKGPSVFPLAPSSKSTSGGTAALGCLVKDYFPEPVTVSWNSGALTSGVHTFPAVLQSSGLYSLSSVVTVPSSSLGTQTYICNVNHKPSNTKVDKKVEPKSCDKTHTCPPCPAPELLGGPSVFLFPPKPKDTLMISRTPEVTCVVVDVSHEDPEVKFNWYVDGVEVHNAKTKPREEQYNSTYRVVSVLTVLHQDWLNGKEYKCKVSNKALPAPIEKTISKAKGQPREPQVYTLPPSREEMTKNQVSLTCLVKGFYPSDIAVEWESNGQPENNYKTTPPVLDSDGSFFLYSKLTVDKSRWQQGNVFSCSVMHEALHNHYTQKSLSLSPG

SEQ ID NO: 17522 - protein, 451 aa, Artificial Sequence
  source: /note="Description of Artificial Sequence: Synthetic polypeptide"
EVQLLQSGGGLVQPGGSLRLSCAASGFDFSSYPMHWVRQAPGKGLEWVGSISSSGGATPYADSVKGRFTISRDNSKNTLYLQMNSLRPEDTAVYYCAKDFYTILTGNAFDMWGQGTSVTVSSASTKGPSVFPLAPSSKSTSGGTAALGCLVKDYFPEPVTVSWNSGALTSGVHTFPAVLQSSGLYSLSSVVTVPSSSLGTQTYICNVNHKPSNTKVDKKVEPKSCDKTHTCPPCPAPELLGGPSVFLFPPKPKDTLMISRTPEVTCVVVDVSHEDPEVKFNWYVDGVEVHNAKTKPREEQYNSTYRVVSVLTVLHQDWLNGKEYKCKVSNKALPAPIEKTISKAKGQPREPQVYTLPPSREEMTKNQVSLTCLVKGFYPSDIAVEWESNGQPENNYKTTPPVLDSDGSFFLYSKLTVDKSRWQQGNVFSCSVMHEALHNHYTQKSLSLSPG

SEQ ID NO: 17523 - protein, 720 aa, Artificial Sequence
  source: /note="Description of Artificial Sequence: Synthetic polypeptide"
EVQLLQSGGGLVQPGGSLRLSCAASGFFFSKYPMHWVRQAPGKGLEWVSSISSDGGATVYADSVKGRFTISRDNSKNTLYLQMNSLRAEDTAVYYCAKDFYTILTGNAFDTWGQGTTVTVSSASTKGPSVFPLAPSSKSTSGGTAALGCLVKDYFPEPVTVSWNSGALTSGVHTFPAVLQSSGLYSLSSVVTVPSSSLGTQTYICNVNHKPSNTKVDKKVEPKSCDKTHTCPPCPAPELLGGPSVFLFPPKPKDTLMISRTPEVTCVVVDVSHEDPEVKFNWYVDGVEVHNAKTKPREEQYNSTYRVVSVLTVLHQDWLNGKEYKCKVSNKALPAPIEKTISKAKGQPREPQVYTLPPSREEMTKNQVSLTCLVKGFYPSDIAVEWESNGQPENNYKTTPPVLDSDGSFFLYSKLTVDKSRWQQGNVFSCSVMHEALHNHYTQKSLSLSPGGGGGSGGGGSGGGGSEVQLVESGGGLVQPGRSLRLSCAASGFTFDDYAMHWVRQAPGKGLEWVSGISWNSGSTGYADSVKGRFTISRDNAKNSLYLQMNSLRAEDTALYYCARDLGYNQWLEGFDYWGQGTLVTVSSASTGGGGSGGGGSGGGGSGGGGSSSELTQDPAVSVALGQTVRITCQGDSLRSYYASWYQQKPGQAPVLVIYGKNNRPSGIPDRFSGSSSGNTASLTITGAQAEDEADYYCMSRDHPGNQWVFGGGTKVTVLG

SEQ ID NO: 17524 - protein, 451 aa, Artificial Sequence
  source: /note="Description of Artificial Sequence: Synthetic polypeptide"
EVQLLQSGGGLVQPGGSLRLSCAASGFMFSRYPMHWVRQAPGKGLEWVGSISGSGGATPYADSVKGRFTISRDNSKNTLYLQMNSLRAEDTAVYYCAKDFYQILTGNAFDYWGQGTTVTVSSASTKGPSVFPLAPSSKSTSGGTAALGCLVKDYFPEPVTVSWNSGALTSGVHTFPAVLQSSGLYSLSSVVTVPSSSLGTQTYICNVNHKPSNTKVDKKVEPKSCDKTHTCPPCPAPELLGGPSVFLFPPKPKDTLMISRTPEVTCVVVDVSHEDPEVKFNWYVDGVEVHNAKTKPREEQYNSTYRVVSVLTVLHQDWLNGKEYKCKVSNKALPAPIEKTISKAKGQPREPQVYTLPPSREEMTKNQVSLTCLVKGFYPSDIAVEWESNGQPENNYKTTPPVLDSDGSFFLYSKLTVDKSRWQQGNVFSCSVMHEALHNHYTQKSLSLSPG

SEQ ID NO: 17525 - protein, 720 aa, Artificial Sequence
  source: /note="Description of Artificial Sequence: Synthetic polypeptide"
EVQLLQSGGGLVQPGGSLRLSCAASGFMFSRYPMHWVRQAPGKGLEWVSSISGSGGATPYADSVKGRFTISRDNSKNTLYLQMNSLRAEDTAVYYCAKDFYQILTGNAFDYWGQGTTVTVSSASTKGPSVFPLAPSSKSTSGGTAALGCLVKDYFPEPVTVSWNSGALTSGVHTFPAVLQSSGLYSLSSVVTVPSSSLGTQTYICNVNHKPSNTKVDKKVEPKSCDKTHTCPPCPAPELLGGPSVFLFPPKPKDTLMISRTPEVTCVVVDVSHEDPEVKFNWYVDGVEVHNAKTKPREEQYNSTYRVVSVLTVLHQDWLNGKEYKCKVSNKALPAPIEKTISKAKGQPREPQVYTLPPSREEMTKNQVSLTCLVKGFYPSDIAVEWESNGQPENNYKTTPPVLDSDGSFFLYSKLTVDKSRWQQGNVFSCSVMHEALHNHYTQKSLSLSPGGGGGSGGGGSGGGGSEVQLVESGGGLVQPGRSLRLSCAASGFTFDDYAMHWVRQAPGKGLEWVSGISWNSGSTGYADSVKGRFTISRDNAKNSLYLQMNSLRAEDTALYYCARDLGYNQWLEGFDYWGQGTLVTVSSASTGGGGSGGGGSGGGGSGGGGSSSELTQDPAVSVALGQTVRITCQGDSLRSYYASWYQQKPGQAPVLVIYGKNNRPSGIPDRFSGSSSGNTASLTITGAQAEDEADYYCMSRDHPGNQWVFGGGTKVTVLG

SEQ ID NO: 17526 - protein, 451 aa, Artificial Sequence
  source: /note="Description of Artificial Sequence: Synthetic polypeptide"
EVQLLQSGGGLVQPGGSLRLSCAASGFTFSVYPMHWVRQAPGKGLEWVSSISSSGGATRYADSVKGRFTISRDNSKNTLYLQMNSLRAEDTAVYYCAKDFYDILTGNAFDIWGQGTTVTVSSASTKGPSVFPLAPSSKSTSGGTAALGCLVKDYFPEPVTVSWNSGALTSGVHTFPAVLQSSGLYSLSSVVTVPSSSLGTQTYICNVNHKPSNTKVDKKVEPKSCDKTHTCPPCPAPELLGGPSVFLFPPKPKDTLMISRTPEVTCVVVDVSHEDPEVKFNWYVDGVEVHNAKTKPREEQYNSTYRVVSVLTVLHQDWLNGKEYKCKVSNKALPAPIEKTISKAKGQPREPQVYTLPPSREEMTKNQVSLTCLVKGFYPSDIAVEWESNGQPENNYKTTPPVLDSDGSFFLYSKLTVDKSRWQQGNVFSCSVMHEALHNHYTQKSLSLSPG

SEQ ID NO: 17527 - protein, 705 aa, Artificial Sequence
  source: /note="Description of Artificial Sequence: Synthetic polypeptide"
QVELVESGGGVVQPGRSQRLSCAASGFTFSSYGMHWVRQAPGKGLEWVAIIWFDGSSTYYADSVRGRFTISRDNSKNTLYLQMNSLRAEDTAVYFCARELGRRYFDLWGRGTLVSVSSASTKGPSVFPLAPSSKSTSGGTAALGCLVKDYFPEPVTVSWNSGALTSGVHTFPAVLQSSGLYSLSSVVTVPSSSLGTQTYICNVNHKPSNTKVDKKVEPKSCDKTHTCPPCPAPELLGGPSVFLFPPKPKDTLMISRTPEVTCVVVDVSHEDPEVKFNWYVDGVEVHNAKTKPREEQYNSTYRVVSVLTVLHQDWLNGKEYKCKVSNKALPAPIEKTISKAKGQPREPQVYTLPPSRDELTKNQVSLTCLVKGFYPSDIAVEWESNGQPENNYKTTPPVLDSDGSFFLYSKLTVDKSRWQQGNVFSCSVMHEALHNHYTQKSLSLSPGKGGGGSGGGGSQVQLVESGGGLVKPGGSLRLSCAASGFTFSDYAMSWIRQAPGKGLEWVSSINIGATYIYYADSVKGRFTISRDNAKNSLYLQMNSLRAEDTAVYYCARPGSPYEYDKAYYSMAYWGQGTTVTVSSGGGGSGGGGSGGGGSDIQMTQSPSSLSASVGDRVTITCRASQDIKNYLNWYQQKPGKAPKLLIYYSSTLLSGVPSRFSGSGSGTDFTLTISSLQPEDFATYYCQQSITLPPTFGGGTKVEIK

SEQ ID NO: 17528 - protein, 705 aa, Artificial Sequence
  source: /note="Description of Artificial Sequence: Synthetic polypeptide"
QVELVESGGGVVQPGRSQRLSCAASGFTFSSYGMHWVRQAPGKGLEWVAIIWFDGSSTYYADSVRGRFTISRDNSKNTLYLQMNSLRAEDTAVYFCARELGRRYFDLWGRGTLVSVSSASTKGPSVFPLAPSSKSTSGGTAALGCLVKDYFPEPVTVSWNSGALTSGVHTFPAVLQSSGLYSLSSVVTVPSSSLGTQTYICNVNHKPSNTKVDKKVEPKSCDKTHTCPPCPAPELLGGPSVFLFPPKPKDTLMISRTPEVTCVVVDVSHEDPEVKFNWYVDGVEVHNAKTKPREEQYNSTYRVVSVLTVLHQDWLNGKEYKCKVSNKALPAPIEKTISKAKGQPREPQVYTLPPSRDELTKNQVSLTCLVKGFYPSDIAVEWESNGQPENNYKTTPPVLDSDGSFFLYSKLTVDKSRWQQGNVFSCSVMHEALHNHYTQKSLSLSPGKGGGGSGGGGSQVQLVESGGGLVKPGGSLRLSCAASGFTFSDYAMSWIRQAPGKCLEWVSSINIGATYIYYADSVKGRFTISRDNAKNSLYLQMNSLRAEDTAVYYCARPGSPYEYDKAYYSMAYWGQGTTVTVSSGGGGSGGGGSGGGGSDIQMTQSPSSLSASVGDRVTITCRASQDIKNYLNWYQQKPGKAPKLLIYYSSTLLSGVPSRFSGSGSGTDFTLTISSLQPEDFATYYCQQSITLPPTFGCGTKVEIK

SEQ ID NO: 17529 - protein, 720 aa, Artificial Sequence
  source: /note="Description of Artificial Sequence: Synthetic polypeptide"
EVQLLQSGGGLVQPGGSLRLSCAASGFTFSVYPMHWVRQAPGKGLEWVSSISSSGGATRYADSVKGRFTISRDNSKNTLYLQMNSLRAEDTAVYYCAKDFYDILTGNAFDIWGQGTTVTVSSASTKGPSVFPLAPSSKSTSGGTAALGCLVKDYFPEPVTVSWNSGALTSGVHTFPAVLQSSGLYSLSSVVTVPSSSLGTQTYICNVNHKPSNTKVDKKVEPKSCDKTHTCPPCPAPELLGGPSVFLFPPKPKDTLMISRTPEVTCVVVDVSHEDPEVKFNWYVDGVEVHNAKTKPREEQYNSTYRVVSVLTVLHQDWLNGKEYKCKVSNKALPAPIEKTISKAKGQPREPQVYTLPPSREEMTKNQVSLTCLVKGFYPSDIAVEWESNGQPENNYKTTPPVLDSDGSFFLYSKLTVDKSRWQQGNVFSCSVMHEALHNHYTQKSLSLSPGGGGGSGGGGSGGGGSQVQLVQSGGGLVQPGGSLRLSCAASGFTFDDYAMHWVRQAPGKGLEWVAGISWNSGSIGYADSVKGRFTISRDNAKNSLYLQMNSLRPEDTAVYYCARDLGYNQWVEGFDYWGQGTLVTVSSASTGGGGSGGGGSGGGGSGGGGSSYELTQDPAVSVALGQTVRITCQGDSLRSYYASWYQQKPGQAPVLVIYGKNNRPSGIPDRFSGSTSGNSASLTITGAQAEDEADYYCNSRDSSGNHWVFGGGTKVTVLG

SEQ ID NO: 17530 - protein, 715 aa, Artificial Sequence
  source: /note="Description of Artificial Sequence: Synthetic polypeptide"
EVQLLQSGGGLVQPGGSLRLSCAASGFTFSVYPMHWVRQAPGKGLEWVSSISSSGGATRYADSVKGRFTISRDNSKNTLYLQMNSLRAEDTAVYYCAKDFYDILTGNAFDIWGQGTTVTVSSASTKGPSVFPLAPSSKSTSGGTAALGCLVKDYFPEPVTVSWNSGALTSGVHTFPAVLQSSGLYSLSSVVTVPSSSLGTQTYICNVNHKPSNTKVDKKVEPKSCDKTHTCPPCPAPELLGGPSVFLFPPKPKDTLMISRTPEVTCVVVDVSHEDPEVKFNWYVDGVEVHNAKTKPREEQYNSTYRVVSVLTVLHQDWLNGKEYKCKVSNKALPAPIEKTISKAKGQPREPQVYTLPPSREEMTKNQVSLTCLVKGFYPSDIAVEWESNGQPENNYKTTPPVLDSDGSFFLYSKLTVDKSRWQQGNVFSCSVMHEALHNHYTQKSLSLSPGGGGGSGGGGSGGGGSEVQLVESGGGLVQPGRSLRLSCAASGFTFDDYAMHWVRQAPGKGLEWVSGISWDSGSTGYADSVKGRFTISRDNAKNSLYLQMNSLRAEDTALYYCARDLGAYQWVEGFDYWGQGTLVTVSSASTGGGGSGGGGSGGGGSSSELTQDPAVSVALGQTVRITCQGDSLRSYYASWYQQKPGQAPVLVIYGKNNRPSGIPDRFSGSSSGNTASLTITGAQAEDEADYYCESRDSPGNQWVFGGGTKVTVLG

SEQ ID NO: 17531 - protein, 720 aa, Artificial Sequence
  source: /note="Description of Artificial Sequence: Synthetic polypeptide"
EVQLLQSGGGLVQPGGSLRLSCAASGFTFSVYPMHWVRQAPGKGLEWVSSISSSGGATRYADSVKGRFTISRDNSKNTLYLQMNSLRAEDTAVYYCAKDFYDILTGNAFDIWGQGTTVTVSSASTKGPSVFPLAPSSKSTSGGTAALGCLVKDYFPEPVTVSWNSGALTSGVHTFPAVLQSSGLYSLSSVVTVPSSSLGTQTYICNVNHKPSNTKVDKKVEPKSCDKTHTCPPCPAPELLGGPSVFLFPPKPKDTLMISRTPEVTCVVVDVSHEDPEVKFNWYVDGVEVHNAKTKPREEQYNSTYRVVSVLTVLHQDWLNGKEYKCKVSNKALPAPIEKTISKAKGQPREPQVYTLPPSREEMTKNQVSLTCLVKGFYPSDIAVEWESNGQPENNYKTTPPVLDSDGSFFLYSKLTVDKSRWQQGNVFSCSVMHEALHNHYTQKSLSLSPGGGGGSGGGGSGGGGSQVQLVQSGGGLVQPGGSLRLSCAASGFTFDDYAMHWVRQAPGKGLEWVAGISWDSGSTGYADSVKGRFTISRDNAKNSLYLQMNSLRAEDTALYYCARDLGAYQWVEGFDYWGQGTLVTVSSASTGGGGSGGGGSGGGGSGGGGSSYELTQDPAVSVALGQTVRITCQGDSLRSYYASWYQQKPGQAPVLVIYGKNNRPSGIPDRFSGSTSGNSASLTITGAQAEDEADYYCNSRDSPGNQWVFGGGTKVTVLG

SEQ ID NO: 17532 - protein, 715 aa, Artificial Sequence
  source: /note="Description of Artificial Sequence: Synthetic polypeptide"
EVQLLQSGGGLVQPGGSLRLSCAASGFTFSVYPMHWVRQAPGKGLEWVSSISSSGGATRYADSVKGRFTISRDNSKNTLYLQMNSLRAEDTAVYYCAKDFYDILTGNAFDIWGQGTTVTVSSASTKGPSVFPLAPSSKSTSGGTAALGCLVKDYFPEPVTVSWNSGALTSGVHTFPAVLQSSGLYSLSSVVTVPSSSLGTQTYICNVNHKPSNTKVDKKVEPKSCDKTHTCPPCPAPELLGGPSVFLFPPKPKDTLMISRTPEVTCVVVDVSHEDPEVKFNWYVDGVEVHNAKTKPREEQYNSTYRVVSVLTVLHQDWLNGKEYKCKVSNKALPAPIEKTISKAKGQPREPQVYTLPPSREEMTKNQVSLTCLVKGFYPSDIAVEWESNGQPENNYKTTPPVLDSDGSFFLYSKLTVDKSRWQQGNVFSCSVMHEALHNHYTQKSLSLSPGGGGGSGGGGSGGGGSEVQLVESGGGLVQPGRSLRLSCAASGFTFDDYAMHWVRQAPGKGLEWVSGISWNSGSTGYADSVKGRFTISRDNAKNSLYLQMNSLRAEDTALYYCARDLGFNQWVDGFDYWGQGTLVTVSSASTGGGGSGGGGSGGGGSSSELTQDPAVSVALGQTVRITCQGDSLRSYYASWYQQKPGQAPVLVIYGKNNRPSGIPDRFSGSSSGNTASLTITGAQAEDEADYYCNSRDTPGDQWVFGGGTKVTVLG

SEQ ID NO: 17533 - protein, 715 aa, Artificial Sequence
  source: /note="Description of Artificial Sequence: Synthetic polypeptide"
EVQLLQSGGGLVQPGGSLRLSCAASGFTFSVYPMHWVRQAPGKGLEWVSSISSSGGATRYADSVKGRFTISRDNSKNTLYLQMNSLRAEDTAVYYCAKDFYDILTGNAFDIWGQGTTVTVSSASTKGPSVFPLAPSSKSTSGGTAALGCLVKDYFPEPVTVSWNSGALTSGVHTFPAVLQSSGLYSLSSVVTVPSSSLGTQTYICNVNHKPSNTKVDKKVEPKSCDKTHTCPPCPAPELLGGPSVFLFPPKPKDTLMISRTPEVTCVVVDVSHEDPEVKFNWYVDGVEVHNAKTKPREEQYNSTYRVVSVLTVLHQDWLNGKEYKCKVSNKALPAPIEKTISKAKGQPREPQVYTLPPSREEMTKNQVSLTCLVKGFYPSDIAVEWESNGQPENNYKTTPPVLDSDGSFFLYSKLTVDKSRWQQGNVFSCSVMHEALHNHYTQKSLSLSPGGGGGSGGGGSGGGGSEVQLVESGGGLVQPGRSLRLSCAASGFTFDDYAMHWVRQAPGKGLEWVSGISWNSGSTGYADSVKGRFTISRDNAKNSLYLQMNSLRAEDTALYYCARDLGYNQWLEGFDYWGQGTLVTVSSASTGGGGSGGGGSGGGGSSSELTQDPAVSVALGQTVRITCQGDSLRSYYASWYQQKPGQAPVLVIYGKNNRPSGIPDRFSGSSSGNTASLTITGAQAEDEADYYCMSRDHPGNQWVFGGGTKVTVLG

SEQ ID NO: 17534 - protein, 715 aa, Artificial Sequence
  source: /note="Description of Artificial Sequence: Synthetic polypeptide"
EVQLLQSGGGLVQPGGSLRLSCAASGFTFSVYPMHWVRQAPGKGLEWVSSISSSGGATRYADSVKGRFTISRDNSKNTLYLQMNSLRAEDTAVYYCAKDFYDILTGNAFDIWGQGTTVTVSSASTKGPSVFPLAPSSKSTSGGTAALGCLVKDYFPEPVTVSWNSGALTSGVHTFPAVLQSSGLYSLSSVVTVPSSSLGTQTYICNVNHKPSNTKVDKKVEPKSCDKTHTCPPCPAPELLGGPSVFLFPPKPKDTLMISRTPEVTCVVVDVSHEDPEVKFNWYVDGVEVHNAKTKPREEQYNSTYRVVSVLTVLHQDWLNGKEYKCKVSNKALPAPIEKTISKAKGQPREPQVYTLPPSREEMTKNQVSLTCLVKGFYPSDIAVEWESNGQPENNYKTTPPVLDSDGSFFLYSKLTVDKSRWQQGNVFSCSVMHEALHNHYTQKSLSLSPGGGGGSGGGGSGGGGSEVQLVESGGGLVQPGRSLRLSCAASGFTFDDYAMHWVRQAPGKGLEWVSGISWNSGSVGYADSVKGRFTISRDNAKNSLYLQMNSLRAEDTALYYCARDLGYNQWLEGFDYWGQGTLVTVSSASTGGGGSGGGGSGGGGSSSELTQDPAVSVALGQTVRITCQGDSLRSYYASWYQQKPGQAPVLVIYGKNNRPSGIPDRFSGSSSGNTASLTITGAQAEDEADYYCMSRDSPGNQWVFGGGTKVTVLG

SEQ ID NO: 17535 - protein, 720 aa, Artificial Sequence
  source: /note="Description of Artificial Sequence: Synthetic polypeptide"
EVQLLQSGGGLVQPGGSLRLSCAASGFMFSRYPMHWVRQAPGKGLEWVGSISGSGGATPYADSVKGRFTISRDNSKNTLYLQMNSLRAEDTAVYYCAKDFYQILTGNAFDYWGQGTTVTVSSASTKGPSVFPLAPSSKSTSGGTAALGCLVKDYFPEPVTVSWNSGALTSGVHTFPAVLQSSGLYSLSSVVTVPSSSLGTQTYICNVNHKPSNTKVDKKVEPKSCDKTHTCPPCPAPELLGGPSVFLFPPKPKDTLMISRTPEVTCVVVDVSHEDPEVKFNWYVDGVEVHNAKTKPREEQYNSTYRVVSVLTVLHQDWLNGKEYKCKVSNKALPAPIEKTISKAKGQPREPQVYTLPPSREEMTKNQVSLTCLVKGFYPSDIAVEWESNGQPENNYKTTPPVLDSDGSFFLYSKLTVDKSRWQQGNVFSCSVMHEALHNHYTQKSLSLSPGGGGGSGGGGSGGGGSQVQLVQSGGGLVQPGGSLRLSCAASGFTFDDYAMHWVRQAPGKGLEWVAGISWNSGSIGYADSVKGRFTISRDNAKNSLYLQMNSLRPEDTAVYYCARDLGYNQWVEGFDYWGQGTLVTVSSASTGGGGSGGGGSGGGGSGGGGSSYELTQDPAVSVALGQTVRITCQGDSLRSYYASWYQQKPGQAPVLVIYGKNNRPSGIPDRFSGSTSGNSASLTITGAQAEDEADYYCNSRDSSGNHWVFGGGTKVTVLG

SEQ ID NO: 17536 - protein, 715 aa, Artificial Sequence
  source: /note="Description of Artificial Sequence: Synthetic polypeptide"
EVQLLQSGGGLVQPGGSLRLSCAASGFMFSRYPMHWVRQAPGKGLEWVGSISGSGGATPYADSVKGRFTISRDNSKNTLYLQMNSLRAEDTAVYYCAKDFYQILTGNAFDYWGQGTTVTVSSASTKGPSVFPLAPSSKSTSGGTAALGCLVKDYFPEPVTVSWNSGALTSGVHTFPAVLQSSGLYSLSSVVTVPSSSLGTQTYICNVNHKPSNTKVDKKVEPKSCDKTHTCPPCPAPELLGGPSVFLFPPKPKDTLMISRTPEVTCVVVDVSHEDPEVKFNWYVDGVEVHNAKTKPREEQYNSTYRVVSVLTVLHQDWLNGKEYKCKVSNKALPAPIEKTISKAKGQPREPQVYTLPPSREEMTKNQVSLTCLVKGFYPSDIAVEWESNGQPENNYKTTPPVLDSDGSFFLYSKLTVDKSRWQQGNVFSCSVMHEALHNHYTQKSLSLSPGGGGGSGGGGSGGGGSEVQLVESGGGLVQPGRSLRLSCAASGFTFDDYAMHWVRQAPGKGLEWVSGISWDSGSTGYADSVKGRFTISRDNAKNSLYLQMNSLRAEDTALYYCARDLGAYQWVEGFDYWGQGTLVTVSSASTGGGGSGGGGSGGGGSSSELTQDPAVSVALGQTVRITCQGDSLRSYYASWYQQKPGQAPVLVIYGKNNRPSGIPDRFSGSSSGNTASLTITGAQAEDEADYYCESRDSPGNQWVFGGGTKVTVLG

SEQ ID NO: 17537 - protein, 720 aa, Artificial Sequence
  source: /note="Description of Artificial Sequence: Synthetic polypeptide"
EVQLLQSGGGLVQPGGSLRLSCAASGFMFSRYPMHWVRQAPGKGLEWVGSISGSGGATPYADSVKGRFTISRDNSKNTLYLQMNSLRAEDTAVYYCAKDFYQILTGNAFDYWGQGTTVTVSSASTKGPSVFPLAPSSKSTSGGTAALGCLVKDYFPEPVTVSWNSGALTSGVHTFPAVLQSSGLYSLSSVVTVPSSSLGTQTYICNVNHKPSNTKVDKKVEPKSCDKTHTCPPCPAPELLGGPSVFLFPPKPKDTLMISRTPEVTCVVVDVSHEDPEVKFNWYVDGVEVHNAKTKPREEQYNSTYRVVSVLTVLHQDWLNGKEYKCKVSNKALPAPIEKTISKAKGQPREPQVYTLPPSREEMTKNQVSLTCLVKGFYPSDIAVEWESNGQPENNYKTTPPVLDSDGSFFLYSKLTVDKSRWQQGNVFSCSVMHEALHNHYTQKSLSLSPGGGGGSGGGGSGGGGSQVQLVQSGGGLVQPGGSLRLSCAASGFTFDDYAMHWVRQAPGKGLEWVAGISWDSGSTGYADSVKGRFTISRDNAKNSLYLQMNSLRAEDTALYYCARDLGAYQWVEGFDYWGQGTLVTVSSASTGGGGSGGGGSGGGGSGGGGSSYELTQDPAVSVALGQTVRITCQGDSLRSYYASWYQQKPGQAPVLVIYGKNNRPSGIPDRFSGSTSGNSASLTITGAQAEDEADYYCNSRDSPGNQWVFGGGTKVTVLG

SEQ ID NO: 17538 - protein, 715 aa, Artificial Sequence
  source: /note="Description of Artificial Sequence: Synthetic polypeptide"
EVQLLQSGGGLVQPGGSLRLSCAASGFMFSRYPMHWVRQAPGKGLEWVGSISGSGGATPYADSVKGRFTISRDNSKNTLYLQMNSLRAEDTAVYYCAKDFYQILTGNAFDYWGQGTTVTVSSASTKGPSVFPLAPSSKSTSGGTAALGCLVKDYFPEPVTVSWNSGALTSGVHTFPAVLQSSGLYSLSSVVTVPSSSLGTQTYICNVNHKPSNTKVDKKVEPKSCDKTHTCPPCPAPELLGGPSVFLFPPKPKDTLMISRTPEVTCVVVDVSHEDPEVKFNWYVDGVEVHNAKTKPREEQYNSTYRVVSVLTVLHQDWLNGKEYKCKVSNKALPAPIEKTISKAKGQPREPQVYTLPPSREEMTKNQVSLTCLVKGFYPSDIAVEWESNGQPENNYKTTPPVLDSDGSFFLYSKLTVDKSRWQQGNVFSCSVMHEALHNHYTQKSLSLSPGGGGGSGGGGSGGGGSEVQLVESGGGLVQPGRSLRLSCAASGFTFDDYAMHWVRQAPGKGLEWVSGISWNSGSTGYADSVKGRFTISRDNAKNSLYLQMNSLRAEDTALYYCARDLGFNQWVDGFDYWGQGTLVTVSSASTGGGGSGGGGSGGGGSSSELTQDPAVSVALGQTVRITCQGDSLRSYYASWYQQKPGQAPVLVIYGKNNRPSGIPDRFSGSSSGNTASLTITGAQAEDEADYYCNSRDTPGDQWVFGGGTKVTVLG

SEQ ID NO: 17539 - protein, 715 aa, Artificial Sequence
  source: /note="Description of Artificial Sequence: Synthetic polypeptide"
EVQLLQSGGGLVQPGGSLRLSCAASGFMFSRYPMHWVRQAPGKGLEWVGSISGSGGATPYADSVKGRFTISRDNSKNTLYLQMNSLRAEDTAVYYCAKDFYQILTGNAFDYWGQGTTVTVSSASTKGPSVFPLAPSSKSTSGGTAALGCLVKDYFPEPVTVSWNSGALTSGVHTFPAVLQSSGLYSLSSVVTVPSSSLGTQTYICNVNHKPSNTKVDKKVEPKSCDKTHTCPPCPAPELLGGPSVFLFPPKPKDTLMISRTPEVTCVVVDVSHEDPEVKFNWYVDGVEVHNAKTKPREEQYNSTYRVVSVLTVLHQDWLNGKEYKCKVSNKALPAPIEKTISKAKGQPREPQVYTLPPSREEMTKNQVSLTCLVKGFYPSDIAVEWESNGQPENNYKTTPPVLDSDGSFFLYSKLTVDKSRWQQGNVFSCSVMHEALHNHYTQKSLSLSPGGGGGSGGGGSGGGGSEVQLVESGGGLVQPGRSLRLSCAASGFTFDDYAMHWVRQAPGKGLEWVSGISWNSGSTGYADSVKGRFTISRDNAKNSLYLQMNSLRAEDTALYYCARDLGYNQWLEGFDYWGQGTLVTVSSASTGGGGSGGGGSGGGGSSSELTQDPAVSVALGQTVRITCQGDSLRSYYASWYQQKPGQAPVLVIYGKNNRPSGIPDRFSGSSSGNTASLTITGAQAEDEADYYCMSRDHPGNQWVFGGGTKVTVLG

SEQ ID NO: 17540 - protein, 715 aa, Artificial Sequence
  source: /note="Description of Artificial Sequence: Synthetic polypeptide"
EVQLLQSGGGLVQPGGSLRLSCAASGFMFSRYPMHWVRQAPGKGLEWVGSISGSGGATPYADSVKGRFTISRDNSKNTLYLQMNSLRAEDTAVYYCAKDFYQILTGNAFDYWGQGTTVTVSSASTKGPSVFPLAPSSKSTSGGTAALGCLVKDYFPEPVTVSWNSGALTSGVHTFPAVLQSSGLYSLSSVVTVPSSSLGTQTYICNVNHKPSNTKVDKKVEPKSCDKTHTCPPCPAPELLGGPSVFLFPPKPKDTLMISRTPEVTCVVVDVSHEDPEVKFNWYVDGVEVHNAKTKPREEQYNSTYRVVSVLTVLHQDWLNGKEYKCKVSNKALPAPIEKTISKAKGQPREPQVYTLPPSREEMTKNQVSLTCLVKGFYPSDIAVEWESNGQPENNYKTTPPVLDSDGSFFLYSKLTVDKSRWQQGNVFSCSVMHEALHNHYTQKSLSLSPGGGGGSGGGGSGGGGSEVQLVESGGGLVQPGRSLRLSCAASGFTFDDYAMHWVRQAPGKGLEWVSGISWNSGSVGYADSVKGRFTISRDNAKNSLYLQMNSLRAEDTALYYCARDLGYNQWLEGFDYWGQGTLVTVSSASTGGGGSGGGGSGGGGSSSELTQDPAVSVALGQTVRITCQGDSLRSYYASWYQQKPGQAPVLVIYGKNNRPSGIPDRFSGSSSGNTASLTITGAQAEDEADYYCMSRDSPGNQWVFGGGTKVTVLG

SEQ ID NO: 17541 - protein, 720 aa, Artificial Sequence
  source: /note="Description of Artificial Sequence: Synthetic polypeptide"
EVQLLQSGGGLVQPGGSLRLSCAASGFDFSSYPMHWVRQAPGKGLEWVGSISSSGGATPYADSVKGRFTISRDNSKNTLYLQMNSLRPEDTAVYYCAKDFYTILTGNAFDMWGQGTSVTVSSASTKGPSVFPLAPSSKSTSGGTAALGCLVKDYFPEPVTVSWNSGALTSGVHTFPAVLQSSGLYSLSSVVTVPSSSLGTQTYICNVNHKPSNTKVDKKVEPKSCDKTHTCPPCPAPELLGGPSVFLFPPKPKDTLMISRTPEVTCVVVDVSHEDPEVKFNWYVDGVEVHNAKTKPREEQYNSTYRVVSVLTVLHQDWLNGKEYKCKVSNKALPAPIEKTISKAKGQPREPQVYTLPPSREEMTKNQVSLTCLVKGFYPSDIAVEWESNGQPENNYKTTPPVLDSDGSFFLYSKLTVDKSRWQQGNVFSCSVMHEALHNHYTQKSLSLSPGGGGGSGGGGSGGGGSQVQLVQSGGGLVQPGGSLRLSCAASGFTFDDYAMHWVRQAPGKGLEWVAGISWNSGSIGYADSVKGRFTISRDNAKNSLYLQMNSLRPEDTAVYYCARDLGYNQWVEGFDYWGQGTLVTVSSASTGGGGSGGGGSGGGGSGGGGSSYELTQDPAVSVALGQTVRITCQGDSLRSYYASWYQQKPGQAPVLVIYGKNNRPSGIPDRFSGSTSGNSASLTITGAQAEDEADYYCNSRDSSGNHWVFGGGTKVTVLG

SEQ ID NO: 17542 - protein, 715 aa, Artificial Sequence
  source: /note="Description of Artificial Sequence: Synthetic polypeptide"
EVQLLQSGGGLVQPGGSLRLSCAASGFDFSSYPMHWVRQAPGKGLEWVGSISSSGGATPYADSVKGRFTISRDNSKNTLYLQMNSLRPEDTAVYYCAKDFYTILTGNAFDMWGQGTSVTVSSASTKGPSVFPLAPSSKSTSGGTAALGCLVKDYFPEPVTVSWNSGALTSGVHTFPAVLQSSGLYSLSSVVTVPSSSLGTQTYICNVNHKPSNTKVDKKVEPKSCDKTHTCPPCPAPELLGGPSVFLFPPKPKDTLMISRTPEVTCVVVDVSHEDPEVKFNWYVDGVEVHNAKTKPREEQYNSTYRVVSVLTVLHQDWLNGKEYKCKVSNKALPAPIEKTISKAKGQPREPQVYTLPPSREEMTKNQVSLTCLVKGFYPSDIAVEWESNGQPENNYKTTPPVLDSDGSFFLYSKLTVDKSRWQQGNVFSCSVMHEALHNHYTQKSLSLSPGGGGGSGGGGSGGGGSEVQLVESGGGLVQPGRSLRLSCAASGFTFDDYAMHWVRQAPGKGLEWVSGISWDSGSTGYADSVKGRFTISRDNAKNSLYLQMNSLRAEDTALYYCARDLGAYQWVEGFDYWGQGTLVTVSSASTGGGGSGGGGSGGGGSSSELTQDPAVSVALGQTVRITCQGDSLRSYYASWYQQKPGQAPVLVIYGKNNRPSGIPDRFSGSSSGNTASLTITGAQAEDEADYYCESRDSPGNQWVFGGGTKVTVLG

SEQ ID NO: 17543 - protein, 720 aa, Artificial Sequence
  source: /note="Description of Artificial Sequence: Synthetic polypeptide"
EVQLLQSGGGLVQPGGSLRLSCAASGFDFSSYPMHWVRQAPGKGLEWVGSISSSGGATPYADSVKGRFTISRDNSKNTLYLQMNSLRPEDTAVYYCAKDFYTILTGNAFDMWGQGTSVTVSSASTKGPSVFPLAPSSKSTSGGTAALGCLVKDYFPEPVTVSWNSGALTSGVHTFPAVLQSSGLYSLSSVVTVPSSSLGTQTYICNVNHKPSNTKVDKKVEPKSCDKTHTCPPCPAPELLGGPSVFLFPPKPKDTLMISRTPEVTCVVVDVSHEDPEVKFNWYVDGVEVHNAKTKPREEQYNSTYRVVSVLTVLHQDWLNGKEYKCKVSNKALPAPIEKTISKAKGQPREPQVYTLPPSREEMTKNQVSLTCLVKGFYPSDIAVEWESNGQPENNYKTTPPVLDSDGSFFLYSKLTVDKSRWQQGNVFSCSVMHEALHNHYTQKSLSLSPGGGGGSGGGGSGGGGSQVQLVQSGGGLVQPGGSLRLSCAASGFTFDDYAMHWVRQAPGKGLEWVAGISWDSGSTGYADSVKGRFTISRDNAKNSLYLQMNSLRAEDTALYYCARDLGAYQWVEGFDYWGQGTLVTVSSASTGGGGSGGGGSGGGGSGGGGSSYELTQDPAVSVALGQTVRITCQGDSLRSYYASWYQQKPGQAPVLVIYGKNNRPSGIPDRFSGSTSGNSASLTITGAQAEDEADYYCNSRDSPGNQWVFGGGTKVTVLG

SEQ ID NO: 17544 - protein, 715 aa, Artificial Sequence
  source: /note="Description of Artificial Sequence: Synthetic polypeptide"
EVQLLQSGGGLVQPGGSLRLSCAASGFDFSSYPMHWVRQAPGKGLEWVGSISSSGGATPYADSVKGRFTISRDNSKNTLYLQMNSLRPEDTAVYYCAKDFYTILTGNAFDMWGQGTSVTVSSASTKGPSVFPLAPSSKSTSGGTAALGCLVKDYFPEPVTVSWNSGALTSGVHTFPAVLQSSGLYSLSSVVTVPSSSLGTQTYICNVNHKPSNTKVDKKVEPKSCDKTHTCPPCPAPELLGGPSVFLFPPKPKDTLMISRTPEVTCVVVDVSHEDPEVKFNWYVDGVEVHNAKTKPREEQYNSTYRVVSVLTVLHQDWLNGKEYKCKVSNKALPAPIEKTISKAKGQPREPQVYTLPPSREEMTKNQVSLTCLVKGFYPSDIAVEWESNGQPENNYKTTPPVLDSDGSFFLYSKLTVDKSRWQQGNVFSCSVMHEALHNHYTQKSLSLSPGGGGGSGGGGSGGGGSEVQLVESGGGLVQPGRSLRLSCAASGFTFDDYAMHWVRQAPGKGLEWVSGISWNSGSTGYADSVKGRFTISRDNAKNSLYLQMNSLRAEDTALYYCARDLGFNQWVDGFDYWGQGTLVTVSSASTGGGGSGGGGSGGGGSSSELTQDPAVSVALGQTVRITCQGDSLRSYYASWYQQKPGQAPVLVIYGKNNRPSGIPDRFSGSSSGNTASLTITGAQAEDEADYYCNSRDTPGDQWVFGGGTKVTVLG

SEQ ID NO: 17545 - protein, 715 aa, Artificial Sequence
  source: /note="Description of Artificial Sequence: Synthetic polypeptide"
EVQLLQSGGGLVQPGGSLRLSCAASGFDFSSYPMHWVRQAPGKGLEWVGSISSSGGATPYADSVKGRFTISRDNSKNTLYLQMNSLRPEDTAVYYCAKDFYTILTGNAFDMWGQGTSVTVSSASTKGPSVFPLAPSSKSTSGGTAALGCLVKDYFPEPVTVSWNSGALTSGVHTFPAVLQSSGLYSLSSVVTVPSSSLGTQTYICNVNHKPSNTKVDKKVEPKSCDKTHTCPPCPAPELLGGPSVFLFPPKPKDTLMISRTPEVTCVVVDVSHEDPEVKFNWYVDGVEVHNAKTKPREEQYNSTYRVVSVLTVLHQDWLNGKEYKCKVSNKALPAPIEKTISKAKGQPREPQVYTLPPSREEMTKNQVSLTCLVKGFYPSDIAVEWESNGQPENNYKTTPPVLDSDGSFFLYSKLTVDKSRWQQGNVFSCSVMHEALHNHYTQKSLSLSPGGGGGSGGGGSGGGGSEVQLVESGGGLVQPGRSLRLSCAASGFTFDDYAMHWVRQAPGKGLEWVSGISWNSGSTGYADSVKGRFTISRDNAKNSLYLQMNSLRAEDTALYYCARDLGYNQWLEGFDYWGQGTLVTVSSASTGGGGSGGGGSGGGGSSSELTQDPAVSVALGQTVRITCQGDSLRSYYASWYQQKPGQAPVLVIYGKNNRPSGIPDRFSGSSSGNTASLTITGAQAEDEADYYCMSRDHPGNQWVFGGGTKVTVLG

SEQ ID NO: 17546 - protein, 715 aa, Artificial Sequence
  source: /note="Description of Artificial Sequence: Synthetic polypeptide"
EVQLLQSGGGLVQPGGSLRLSCAASGFDFSSYPMHWVRQAPGKGLEWVGSISSSGGATPYADSVKGRFTISRDNSKNTLYLQMNSLRPEDTAVYYCAKDFYTILTGNAFDMWGQGTSVTVSSASTKGPSVFPLAPSSKSTSGGTAALGCLVKDYFPEPVTVSWNSGALTSGVHTFPAVLQSSGLYSLSSVVTVPSSSLGTQTYICNVNHKPSNTKVDKKVEPKSCDKTHTCPPCPAPELLGGPSVFLFPPKPKDTLMISRTPEVTCVVVDVSHEDPEVKFNWYVDGVEVHNAKTKPREEQYNSTYRVVSVLTVLHQDWLNGKEYKCKVSNKALPAPIEKTISKAKGQPREPQVYTLPPSREEMTKNQVSLTCLVKGFYPSDIAVEWESNGQPENNYKTTPPVLDSDGSFFLYSKLTVDKSRWQQGNVFSCSVMHEALHNHYTQKSLSLSPGGGGGSGGGGSGGGGSEVQLVESGGGLVQPGRSLRLSCAASGFTFDDYAMHWVRQAPGKGLEWVSGISWNSGSVGYADSVKGRFTISRDNAKNSLYLQMNSLRAEDTALYYCARDLGYNQWLEGFDYWGQGTLVTVSSASTGGGGSGGGGSGGGGSSSELTQDPAVSVALGQTVRITCQGDSLRSYYASWYQQKPGQAPVLVIYGKNNRPSGIPDRFSGSSSGNTASLTITGAQAEDEADYYCMSRDSPGNQWVFGGGTKVTVLG

SEQ ID NO: 17547 - protein, 720 aa, Artificial Sequence
  source: /note="Description of Artificial Sequence: Synthetic polypeptide"
EVQLLQSGGGLVQPGGSLRLSCAASGFFFSKYPMHWVRQAPGKGLEWVSSISSDGGATVYADSVKGRFTISRDNSKNTLYLQMNSLRAEDTAVYYCAKDFYTWLTGNAFDSWGQGTSVTVSSASTKGPSVFPLAPSSKSTSGGTAALGCLVKDYFPEPVTVSWNSGALTSGVHTFPAVLQSSGLYSLSSVVTVPSSSLGTQTYICNVNHKPSNTKVDKKVEPKSCDKTHTCPPCPAPELLGGPSVFLFPPKPKDTLMISRTPEVTCVVVDVSHEDPEVKFNWYVDGVEVHNAKTKPREEQYNSTYRVVSVLTVLHQDWLNGKEYKCKVSNKALPAPIEKTISKAKGQPREPQVYTLPPSREEMTKNQVSLTCLVKGFYPSDIAVEWESNGQPENNYKTTPPVLDSDGSFFLYSKLTVDKSRWQQGNVFSCSVMHEALHNHYTQKSLSLSPGGGGGSGGGGSGGGGSQVQLVQSGGGLVQPGGSLRLSCAASGFTFDDYAMHWVRQAPGKGLEWVAGISWNSGSIGYADSVKGRFTISRDNAKNSLYLQMNSLRPEDTAVYYCARDLGYNQWVEGFDYWGQGTLVTVSSASTGGGGSGGGGSGGGGSGGGGSSYELTQDPAVSVALGQTVRITCQGDSLRSYYASWYQQKPGQAPVLVIYGKNNRPSGIPDRFSGSTSGNSASLTITGAQAEDEADYYCNSRDSSGNHWVFGGGTKVTVLG

SEQ ID NO: 17548 - protein, 715 aa, Artificial Sequence
  source: /note="Description of Artificial Sequence: Synthetic polypeptide"
EVQLLQSGGGLVQPGGSLRLSCAASGFFFSKYPMHWVRQAPGKGLEWVSSISSDGGATVYADSVKGRFTISRDNSKNTLYLQMNSLRAEDTAVYYCAKDFYTWLTGNAFDSWGQGTSVTVSSASTKGPSVFPLAPSSKSTSGGTAALGCLVKDYFPEPVTVSWNSGALTSGVHTFPAVLQSSGLYSLSSVVTVPSSSLGTQTYICNVNHKPSNTKVDKKVEPKSCDKTHTCPPCPAPELLGGPSVFLFPPKPKDTLMISRTPEVTCVVVDVSHEDPEVKFNWYVDGVEVHNAKTKPREEQYNSTYRVVSVLTVLHQDWLNGKEYKCKVSNKALPAPIEKTISKAKGQPREPQVYTLPPSREEMTKNQVSLTCLVKGFYPSDIAVEWESNGQPENNYKTTPPVLDSDGSFFLYSKLTVDKSRWQQGNVFSCSVMHEALHNHYTQKSLSLSPGGGGGSGGGGSGGGGSEVQLVESGGGLVQPGRSLRLSCAASGFTFDDYAMHWVRQAPGKGLEWVSGISWDSGSTGYADSVKGRFTISRDNAKNSLYLQMNSLRAEDTALYYCARDLGAYQWVEGFDYWGQGTLVTVSSASTGGGGSGGGGSGGGGSSSELTQDPAVSVALGQTVRITCQGDSLRSYYASWYQQKPGQAPVLVIYGKNNRPSGIPDRFSGSSSGNTASLTITGAQAEDEADYYCESRDSPGNQWVFGGGTKVTVLG

SEQ ID NO: 17549 - protein, 720 aa, Artificial Sequence
  source: /note="Description of Artificial Sequence: Synthetic polypeptide"
EVQLLQSGGGLVQPGGSLRLSCAASGFFFSKYPMHWVRQAPGKGLEWVSSISSDGGATVYADSVKGRFTISRDNSKNTLYLQMNSLRAEDTAVYYCAKDFYTWLTGNAFDSWGQGTSVTVSSASTKGPSVFPLAPSSKSTSGGTAALGCLVKDYFPEPVTVSWNSGALTSGVHTFPAVLQSSGLYSLSSVVTVPSSSLGTQTYICNVNHKPSNTKVDKKVEPKSCDKTHTCPPCPAPELLGGPSVFLFPPKPKDTLMISRTPEVTCVVVDVSHEDPEVKFNWYVDGVEVHNAKTKPREEQYNSTYRVVSVLTVLHQDWLNGKEYKCKVSNKALPAPIEKTISKAKGQPREPQVYTLPPSREEMTKNQVSLTCLVKGFYPSDIAVEWESNGQPENNYKTTPPVLDSDGSFFLYSKLTVDKSRWQQGNVFSCSVMHEALHNHYTQKSLSLSPGGGGGSGGGGSGGGGSQVQLVQSGGGLVQPGGSLRLSCAASGFTFDDYAMHWVRQAPGKGLEWVAGISWDSGSTGYADSVKGRFTISRDNAKNSLYLQMNSLRAEDTALYYCARDLGAYQWVEGFDYWGQGTLVTVSSASTGGGGSGGGGSGGGGSGGGGSSYELTQDPAVSVALGQTVRITCQGDSLRSYYASWYQQKPGQAPVLVIYGKNNRPSGIPDRFSGSTSGNSASLTITGAQAEDEADYYCNSRDSPGNQWVFGGGTKVTVLG

SEQ ID NO: 17550 - protein, 715 aa, Artificial Sequence
  source: /note="Description of Artificial Sequence: Synthetic polypeptide"
EVQLLQSGGGLVQPGGSLRLSCAASGFFFSKYPMHWVRQAPGKGLEWVSSISSDGGATVYADSVKGRFTISRDNSKNTLYLQMNSLRAEDTAVYYCAKDFYTWLTGNAFDSWGQGTSVTVSSASTKGPSVFPLAPSSKSTSGGTAALGCLVKDYFPEPVTVSWNSGALTSGVHTFPAVLQSSGLYSLSSVVTVPSSSLGTQTYICNVNHKPSNTKVDKKVEPKSCDKTHTCPPCPAPELLGGPSVFLFPPKPKDTLMISRTPEVTCVVVDVSHEDPEVKFNWYVDGVEVHNAKTKPREEQYNSTYRVVSVLTVLHQDWLNGKEYKCKVSNKALPAPIEKTISKAKGQPREPQVYTLPPSREEMTKNQVSLTCLVKGFYPSDIAVEWESNGQPENNYKTTPPVLDSDGSFFLYSKLTVDKSRWQQGNVFSCSVMHEALHNHYTQKSLSLSPGGGGGSGGGGSGGGGSEVQLVESGGGLVQPGRSLRLSCAASGFTFDDYAMHWVRQAPGKGLEWVSGISWNSGSTGYADSVKGRFTISRDNAKNSLYLQMNSLRAEDTALYYCARDLGFNQWVDGFDYWGQGTLVTVSSASTGGGGSGGGGSGGGGSSSELTQDPAVSVALGQTVRITCQGDSLRSYYASWYQQKPGQAPVLVIYGKNNRPSGIPDRFSGSSSGNTASLTITGAQAEDEADYYCNSRDTPGDQWVFGGGTKVTVLG

SEQ ID NO: 17551 - protein, 715 aa, Artificial Sequence
  source: /note="Description of Artificial Sequence: Synthetic polypeptide"
EVQLLQSGGGLVQPGGSLRLSCAASGFFFSKYPMHWVRQAPGKGLEWVSSISSDGGATVYADSVKGRFTISRDNSKNTLYLQMNSLRAEDTAVYYCAKDFYTWLTGNAFDSWGQGTSVTVSSASTKGPSVFPLAPSSKSTSGGTAALGCLVKDYFPEPVTVSWNSGALTSGVHTFPAVLQSSGLYSLSSVVTVPSSSLGTQTYICNVNHKPSNTKVDKKVEPKSCDKTHTCPPCPAPELLGGPSVFLFPPKPKDTLMISRTPEVTCVVVDVSHEDPEVKFNWYVDGVEVHNAKTKPREEQYNSTYRVVSVLTVLHQDWLNGKEYKCKVSNKALPAPIEKTISKAKGQPREPQVYTLPPSREEMTKNQVSLTCLVKGFYPSDIAVEWESNGQPENNYKTTPPVLDSDGSFFLYSKLTVDKSRWQQGNVFSCSVMHEALHNHYTQKSLSLSPGGGGGSGGGGSGGGGSEVQLVESGGGLVQPGRSLRLSCAASGFTFDDYAMHWVRQAPGKGLEWVSGISWNSGSTGYADSVKGRFTISRDNAKNSLYLQMNSLRAEDTALYYCARDLGYNQWLEGFDYWGQGTLVTVSSASTGGGGSGGGGSGGGGSSSELTQDPAVSVALGQTVRITCQGDSLRSYYASWYQQKPGQAPVLVIYGKNNRPSGIPDRFSGSSSGNTASLTITGAQAEDEADYYCMSRDHPGNQWVFGGGTKVTVLG

SEQ ID NO: 17552 - protein, 715 aa, Artificial Sequence
  source: /note="Description of Artificial Sequence: Synthetic polypeptide"
EVQLLQSGGGLVQPGGSLRLSCAASGFFFSKYPMHWVRQAPGKGLEWVSSISSDGGATVYADSVKGRFTISRDNSKNTLYLQMNSLRAEDTAVYYCAKDFYTWLTGNAFDSWGQGTSVTVSSASTKGPSVFPLAPSSKSTSGGTAALGCLVKDYFPEPVTVSWNSGALTSGVHTFPAVLQSSGLYSLSSVVTVPSSSLGTQTYICNVNHKPSNTKVDKKVEPKSCDKTHTCPPCPAPELLGGPSVFLFPPKPKDTLMISRTPEVTCVVVDVSHEDPEVKFNWYVDGVEVHNAKTKPREEQYNSTYRVVSVLTVLHQDWLNGKEYKCKVSNKALPAPIEKTISKAKGQPREPQVYTLPPSREEMTKNQVSLTCLVKGFYPSDIAVEWESNGQPENNYKTTPPVLDSDGSFFLYSKLTVDKSRWQQGNVFSCSVMHEALHNHYTQKSLSLSPGGGGGSGGGGSGGGGSEVQLVESGGGLVQPGRSLRLSCAASGFTFDDYAMHWVRQAPGKGLEWVSGISWNSGSVGYADSVKGRFTISRDNAKNSLYLQMNSLRAEDTALYYCARDLGYNQWLEGFDYWGQGTLVTVSSASTGGGGSGGGGSGGGGSSSELTQDPAVSVALGQTVRITCQGDSLRSYYASWYQQKPGQAPVLVIYGKNNRPSGIPDRFSGSSSGNTASLTITGAQAEDEADYYCMSRDSPGNQWVFGGGTKVTVLG

SEQ ID NO: 17553 - protein, 475 aa, Mus musculus
MYLGLNYVFIVFLLNGVQSEVKLEESGGGLVQPGGSMKLSCAASGFTFSDAWMNWVRQSPEKGLEWVAEIRSKVINPAIYYAESVKERFTILRDDSKSSVYLQMNSLRAEDTGIYYCSRSTMITTRDPSRYFDVWGAGTTVTVSSATTTAPSVYPLVPGCSDTSGSSVTLGCLVKGYFPEPVTVKWNYGALSSGVRTVSSVLQSGFYSLSSLVTVPSSTWPSQTVICNVAHPASKTELIKRIEPRIPKPSTPPGSSCPPGNILGGPSVFIFPPKPKDALMISLTPKVTCVVVDVSEDDPDVHVSWFVDNKEVHTAWTQPREAQYNSTFRVVSALPIQHQDWMRGKEFKCKVNNKALPAPIERTISKPKGRAQTPQVYTIPPPREQMSKKKVSLTCLVTNFFSEAISVEWERNGELEQDYKNTPPILDSDGTYFLYSKLTVDTDSWLQGEIFTCSVVHEALHNHHTQKNLSRSPGK

SEQ ID NO: 17554 - protein, 475 aa, Homo sapiens
MYLGLNCVFIVFLLNGVQSEVKLEESGGGLVQPGGSMKLSCAASGFTFSDAWMNWVRQSPEKGLEWVAEIRSKVINPAIYYAESVKERFTILRDDSKSSVYLQMNSLRAEDTGIYYCSRSTMITTRDPSRYFDVWGAGTTVTVSSASTKGPSVFPLAPSSKSTSGGTAALGCLVKDYFPEPVTVSWNSGALTSGVHTFPAVLQSSGLYSLSSVVTVPSSSLGTQTYICNVNHKPSNTKVDKKVEPKSCDKTHTCPPCPAPELLGGPSVFLFPPKPKDTLMISRTPEVTCVVVDVSHEDPEVKFNWYVDGVEVHNAKTKPREEQYNSTYRVVSVLTVLHQDWLNGKEYKCKVSNKALPAPIEKTISKAKGQPREPQVYTLPPSRDELTKNQVSLTCLVKGFYPSDIAVEWESNGQPENNYKTTPPVLDSDGSFFLYSKLTVDKSRWQQGNVFSCSVMHEALHNHYTQKSLSLSPGK

SEQ ID NO: 17555 - protein, 475 aa, Homo sapiens
MYLGLNYVFIVFLLNGVQSEVKLEESGGGLVQPGGSMKLSCVASGFTFSDAWMNWVRQSPEKGLEWVAEIRSKAINPAIYYAESVKGRFTILRDDSKSSVYLQMNSLRAEDTGIYYCSRSTMITTRDPSRYFDVWGAGTTVTVSSATTTAPSVYPLVPGCSDTSGSSVTLGCLVKGYFPEPVTVKWNYGALSSGVRTVSSVLQSGFYSLSSLVTVPSSTWPSQTVICNVAHPASKTELIKRIEPRIPKPSTPPGSSCPPGNILGGPSVFIFPPKPKDALMISLTPKVTCVVVDVSEDDPDVHVSWFVDNKEVHTAWTQPREAQYNSTFRVVSALPIQHQDWMRGKEFKCKVNNKALPAPIERTISKPKGRAQTPQVYTIPPPREQMSKKKVSLTCLVTNFFSEAISVEWERNGELEQDYKNTPPILDSDGTYFLYSKLTVDTDSWLQGEIFTCSVVHEALHNHHTQKNLSRSPGK

SEQ ID NO: 17556 - protein, 486 aa, Homo sapiens
EVKLEESGGGLVQPGGSMKLSCVASGFTFSDAWMNWVRQSPEKGLEWVAEIRSKAINPAIYYAESVKGRFTILRDDSKSSVYLQMNSLRAEDTGIYYCSRSTMITTRDPSRYFDVWGAGTTVTVSSASTKGPSVFPLAPSSKSTVWGAGTTVTVSSASTKGPSVFPLAPSSKSTSGGTAALGCLVKDYFPEPVTVSWNSGALTSGVHTFPAVLQSSGLYSLSSVVTVPSSSLGTQTYICNVNHKPSNTKVDKKVEPKSCDKTHTCPPCPAPELLGGPSVFLFPPKPKDTLMISRTPEVTCVVVDVSHEDPEVKFNWYVDGVEVHNAKTKPREEQYNSTYRVVSVLTVLHQDWLNGKEYKCKVSNKALPAPIEKTISKAKGQPREPQVYTLPPSRDELTKNQVSLTCLVKGFYPSDIAVEWESNGQPENNYKTTPPVLDSDGSFFLYSKLTVDKSRWQQGNVFSCSVMHEALHNHYTQKSLSLSPGK

SEQ ID NO: 17557 - protein, 449 aa, Artificial Sequence
  source: /note="Description of Artificial Sequence: Synthetic Human/murine chimera"
EVQLVESGGGVVQPGRSLRLSCSTSGFTFSDYYMYWVRQAPGKGLEWVAYMSNVGAITDYPDTVKGRFTISRDNSKNTLFLQMDSLRPEDTGVYFCARGTRDGSWFAYWGQGTPVTVSSASTKGPSVFPLAPSSKSTSGGTAALGCLVKDYFPEPVTVSWNSGALTSGVHTFPAVLQSSGLYSLSSVVTVPSSSLGTQTYICNVNHKPSNTKVDKKVEPKSCDKTHTCPPCPAPEALGAPSVFLFPPKPKDTLMISRTPEVTCVVVDVSHEDPEVKFNWYVDGVEVHNAKTKPREEQYNSTYRVVSVLTVLHQDWLNGKEYKCKVSNKALPAPIEKTISKAKGQPREPQVYTLPPSREEMTKNQVSLTCLVKGFYPSDIAVEWESNGQPENNYKTTPPVLDSDGSFFLYSKLTVDKSRWQQGNVFSCSVMHEALHNHYTQKSLSLSPGK

SEQ ID NO: 17558 - protein, 442 aa, Artificial Sequence
  source: /note="Description of Artificial Sequence: Synthetic polypeptide"
QVQLQESGPGLVKPSQTLSLTCTVSGGSITSGYYWNWIRQHPGKGLEWIGYITFDGSNNYNPSLKSRVTISRDTSKNQFSLKLSSVTAADTAVYYCADFDYWGQGTLVTVSSASTKGPSVFPLAPSSKSTSGGTAALGCLVKDYFPEPVTVSWNSGALTSGVHTFPAVLQSSGLYSLSSVVTVPSSSLGTQTYICNVNHKPSNTKVDKKVEPKSCDKTHTCPPCPAPELLGGPSVFLFPPKPKDTLMISRTPEVTCVVVDVSHEDPEVKFNWYVDGVEVHNAKTKPREEQYNSTYRVVSVLTVLHQDWLNGKEYKCKVSNKALPAPIEKTISKAKGQPREPQVYTLPPSRDELTKNQVSLTCLVKGFYPSDIAVEWESNGQPENNYKTTPPVLDSDGSFFLYSKLTVDKSRWQQGNVFSCSVMHEALHNHYTQKSLSLSPGK

SEQ ID NO: 17559 - protein, 458 aa, Artificial Sequence
  source: /note="Description of Artificial Sequence: Synthetic polypeptide"
MKHLWFFLLLVAAPRWVLSQVQLQESGPGLVKPSETLSLTCTVTGTTITASYAWSWIRQPPGKGLEWMGYISYSGGTDYNPSLKSRITISRDTFKNQFSLKLSSVTAADTATYYCARKGAYWGQGTLVTVSSASTKGPSVFPLAPCSRSTSESTAALGCLVKDYFPEPVTVSWNSGALTSGVHTFPAVLQSSGLYSLSSVVTVPSSNFGTQTYTCNVDHKPSNTKVDKTVERKCCVECPPCPAPPVAGPSVFLFPPKPKDTLMISRTPEVTCVVVDVSHEDPEVQFNWYVDGVEVHNAKTKPREEQFNSTFRVVSVLTVVHQDWLNGKEYKCKVSNKGLPAPIEKTISKTKGQPREPQVYTLPPSREEMTKNQVSLTCLVKGFYPSDIAVEWESNGQPENNYKTTPPMLDSDGSFFLYSKLTVDKSRWQQGNVFSCSVMHEALHNHYTQKSLSLSPGK

SEQ ID NO: 17560 - protein, 458 aa, Artificial Sequence
  source: /note="Description of Artificial Sequence: Synthetic polypeptide"
MKHLWFFLLLVAAPRWVLSQVQLQESGPGLVKPSETLSLTCTVTGTTITASYAWSWIRQPPGKGLEWMGYISYSGGTDYNPSLKSRITISRDTFKNQFSLKLSSVTAADTATYYCARKGAYWGQGTLVTVSSASTKGPSVFPLAPCSRSTSESTAALGCLVKDYFPEPVTVSWNSGALTSGVHTFPAVLQSSGLYSLSSVVTVPSSNFGTQTYTCNVDHKPSNTKVDKTVERKCCVECPPCPAPPVAGPSVFLFPPKPKDTLMISRTPEVTCVVVDVSHEDPEVQFNWYVDGVEVHNAKTKPREEQFNSTFRVVSVLTVVHQDWLNGKEYKCKVSNKGLPAPIEKTISKTKGQPREPQVYTLPPSREKMTKNQVSLTCLVKGFYPSDIAVEWESNGQPENNYKTTPPMLKSDGSFFLYSKLTVDKSRWQQGNVFSCSVMHEALHNHYTQKSLSLSPGK

SEQ ID NO: 17561 - protein, 439 aa, Artificial Sequence
  source: /note="Description of Artificial Sequence: Synthetic polypeptide"
QVQLQESGPGLVKPSETLSLTCTVTGTTITASYAWSWIRQPPGKGLEWMGYISYSGGTDYNPSLKSRITISRDTFKNQFSLKLSSVTAADTATYYCARKGAYWGQGTLVTVSSASTKGPSVFPLAPCSRSTSESTAALGCLVKDYFPEPVTVSWNSGALTSGVHTFPAVLQSSGLYSLSSVVTVPSSNFGTQTYTCNVDHKPSNTKVDKTVERKCCVECPPCPAPPVAGPSVFLFPPKPKDTLMISRTPEVTCVVVDVSHEDPEVQFNWYVDGVEVHNAKTKPREEQFNSTFRVVSVLTVVHQDWLNGKEYKCKVSNKGLPAPIEKTISKTKGQPREPQVYTLPPSREKMTKNQVSLTCLVKGFYPSDIAVEWESNGQPENNYKTTPPMLKSDGSFFLYSKLTVDKSRWQQGNVFSCSVMHEALHNHYTQKSLSLSPGK

SEQ ID NO: 17562 - protein, 439 aa, Artificial Sequence
  source: /note="Description of Artificial Sequence: Synthetic polypeptide"
QVQLQESGPGLVKPSETLSLTCTVTGTTITASYAWSWIRQPPGKGLEWMGYISYSGGTDYNPSLKSRITISRDTFKNQFSLKLSSVTAADTATYYCARKGAYWGQGTLVTVSSASTKGPSVFPLAPCSRSTSESTAALGCLVKDYFPEPVTVSWNSGALTSGVHTFPAVLQSSGLYSLSSVVTVPSSNFGTQTYTCNVDHKPSNTKVDKTVERKCCVECPPCPAPPVAGPSVFLFPPKPKDTLMISRTPEVTCVVVDVSHEDPEVQFNWYVDGVEVHNAKTKPREEQFNSTFRVVSVLTVVHQDWLNGKEYKCKVSNKGLPAPIEKTISKTKGQPREPQVYTLPPSREEMTKNQVSLTCLVEGFYPSDIAVEWESNGQPENNYKTTPPMLDSDGSFFLYSELTVDKSRWQQGNVFSCSVMHEALHNHYTQKSLSLSPGK

SEQ ID NO: 17563 - protein, 439 aa, Artificial Sequence
  source: /note="Description of Artificial Sequence: Synthetic polypeptide"
QVQLQESGPGLVKPSETLSLTCTVTGTTITASYAWSWIRQPPGKGLEWMGYISYSGGTDYNPSLKSRITISRDTFKNQFSLKLSSVTAADTATYYCARKGAYWGQGTLVTVSSASTKGPSVFPLAPCSRSTSESTAALGCLVKDYFPEPVTVSWNSGALTSGVHTFPAVLQSSGLYSLSSVVTVPSSNFGTQTYTCNVDHKPSNTKVDKTVERKCCVECPPCPAPPVAGPSVFLFPPKPKDTLMISRTPEVTCVVVDVSHEDPEVQFNWYVDGVEVHNAKTKPREEQFNSTFRVVSVLTVVHQDWLNGKEYKCKVSNKGLPAPIEKTISKTKGQPREPQVYTLPPSREEMTKNQVSLTCLVKGFYPSDIAVEWESNGQPENNYKTTPPMLDSDGSFFLYSKLTVDKSRWQQGNVFSCSVMHEALHNHYTQKSLSLSPGK

SEQ ID NO: 17564 - protein, 461 aa, Artificial Sequence; identical to SEQ ID NO: 12809
  source: /note="Description of Artificial Sequence: Synthetic polypeptide"

SEQ ID NO: 17565 - protein, 449 aa, Artificial Sequence
  source: /note="Description of Artificial Sequence: Synthetic polypeptide"
QVQLQQSGAELVKPGASVRLSCKTSGYTFTTHYVSWVKQKPGQGLEWIGWIFGGSARTNYNQKFQGKATLTVDTSSSTAYMDLRSLTSDDSAVYFCVRQVGWDDALDFWGQGTQVTVSSASTKGPSVFPLAPSSKSTSGGTAALGCLVKDYFPEPVTVSWNSGALTSGVHTFPAVLQSSGLYSLSSVVTVPSSSLGTQTYICNVNHKPSNTKVDKRVEPKSCDKTHTCPPCPAPELLGGPSVFLFPPKPKDTLMISRTPEVTCVVVDVSHEDPEVKFNWYVDGVEVHNAKTKPREEQYNSTYRVVSVLTVLHQDWLNGKEYKCKVSNKALPAPIEKTISKAKGQPREPQVYTLPPSREEMTKNQVSLTCLVKGFYPSDIAVEWESNGQPENNYKTTPPVLDSDGSFFLYSKLTVDKSRWQQGNVFSCSVMHEALHNHYTQKSLSLSPGK

SEQ ID NO: 17566 - protein, 449 aa, Artificial Sequence; identical to SEQ ID NO: 6985
  source: /note="Description of Artificial Sequence: Synthetic polypeptide"

SEQ ID NO: 17567 - protein, 453 aa, Artificial Sequence
  source: /note="Description of Artificial Sequence: Synthetic polypeptide"
EVQLVESGGDLVNPGGTLTLSCVVSGFSLTNNNVNWVRQALGRGLEWVGGVWAGGATDYNSALKSRLTITRDTSKSTVFLKMHSLQSEDTATYYCARDGGYSSSTLYAMDAWGQGTLVTVSSASTTAPSVFPLAPSCGSTSGSTVALACLVSGYFPEPVTVSWNSGSLTSGVHTFPSVLQSSGLHSLSSMVTVPSSRWPSETFTCNVVHPASNTKVDKPVFNECRCTDTPPCPVPEPLGGPSVLIFPPKPKDILRITRTPEVTCVVLDLGREDPEVQISWFVDGKEVHTAKTQSREQQFNGTYRVVSVLPIEHQDWLTGKEFKCRVNHIDLPSPIERTISKARGRAHKPSVYVLPPSPKELSSSDTVSITCLIKDFYPPDIDVEWQSNGQQEPERKHRMTPPQLDEDGSYFLYSKLSVDKSRWQQGDPFTCAVMHETLQNHYTDLSLSHSPGK

SEQ ID NO: 17568 - protein, 457 aa, Artificial Sequence
  source: /note="Description of Artificial Sequence: Synthetic polypeptide"
EVQLVESGGDLVNPGGTLTLSCVVSGFSLTNNNVNWVRQALGRGLEWVGGVWAGGATDYNSALKSRLTITRDTSKSTVFLKMHSLQSEDTATYYCARDGGYSSSTLYAMDAWGQGTLVTVSSASTTAPSVFPLAPSCGSTSGSTVALACLVSGYFPEPVTVSWNSGSLTSGVHTFPSVLQSSGLYSLSSMVTVPSSRWPSETFTCNVAHPASKTKVDKPVPKRENGRVPRPPDCPKCPAPEMLGGPSVFIFPPKPKDTLLIARTPEVTCVVVDLDPEDPEVQISWFVDGKQMQTAKTQPREEQFNGTYRVVSVLPIGHQDWLKGKQFTCKVNNKALPSPIERTISKARGQAHQPSVYVLPPSREELSKNTVSLTCLIKDFYPPDIDVEWQSNGQQEPESKYRTTPPQLDEDGSYFLYSKLSVDKSRWQRGDTFICAVMHEALHNHYTQESLSHSPGK

SEQ ID NO: 17569 - protein, 455 aa, Artificial Sequence
  source: /note="Description of Artificial Sequence: Synthetic polypeptide"
EVQLVESGGDLVNPGGTLTLSCVVSGFSLTNNNVNWVRQALGRGLEWVGGVWAGGATDYNSALKSRLTITRDTSKSTVFLKMHSLQSEDTATYYCARDGGYSSSTLYAMDAWGQGTLVTVSSASTTAPSVFPLAPSCGSQSGSTVALACLVSGYIPEPVTVSWNSVSLTSGVHTFPSVLQSSGLYSLSSMVTVPSSRWPSETFTCNVAHPATNTKVDKPVAKECECKCNCNNCPCPGCGLLGGPSVFIFPPKPKDILVTARTPTVTCVVVDLDPENPEVQISWFVDSKQVQTANTQPREEQSNGTYRVVSVLPIGHQDWLSGKQFKCKVNNKALPSPIEEIISKTPGQAHQPNVYVLPPSRDEMSKNTVTLTCLVKDFFPPEIDVEWQSNGQQEPESKYRMTPPQLDEDGSYFLYSKLSVDKSRWQRGDTFICAVMHEALHNHYTQISLSHSPGK

SEQ ID NO: 17570 - protein, 453 aa, Artificial Sequence
  source: /note="Description of Artificial Sequence: Synthetic polypeptide"
EVQLVESGGDLVNPGGTLTLSCVVSGFSLTNNNVNWVRQALGRGLEWVGGVWAGGATDYNSALKSRLTITRDTSKSTVFLKMHSLQSEDTATYYCARDGGYSSSTLYAMDAWGQGTLVTVSSASTTAPSVFPLAPSCGSTSGSTVALACLVSGYFPEPVTVSWNSGSLTSGVHTFPSVLQSSGLYSLSSTVTVPSSRWPSETFTCNVVHPASNTKVDKPVPKESTCKCISPCPVPESLGGPSVFIFPPKPKDILRITRTPEITCVVLDLGREDPEVQISWFVDGKEVHTAKTQPREQQFNSTYRVVSVLPIEHQDWLTGKEFKCRVNHIGLPSPIERTISKARGQAHQPSVYVLPPSPKELSSSDTVTLTCLIKDFYPPEIDVEWQSNGQPEPESKYHTTAPQLDEDGSYFLYSKLSVDKSRWQQGDTFTCAVMHEALQNHYTDLSLSHSPGK

SEQ ID NO: 17571 - protein, 457 aa, Artificial Sequence
  source: /note="Description of Artificial Sequence: Synthetic polypeptide"
EVQLVESGGDLVNPGGTLTLSCVVSGFSLTNNNVNWVRQALGRGLEWVGGVWAGGATDYNSALKSRLTITRDTSKSTVFLKMHSLQSEDTATYYCARDGGYSSSTLYAMDAWGQGTLVTVSSASTTAPSVFPLAPSCGSTSGSTVALACLVSGYFPEPVTVSWNSGSLTSGVHTFPSVLQSSGLYSLSSMVTVPSSRWPSETFTCNVAHPASKTKVDKPVPKRENGRVPRPPDCPKCPAPEMLGGPSVFIFPPKPKDTLLIARTPEVTCVVVDLDPEDPEVQISWFVDGKQMQTAKTQPREEQFAGTYRVVSVLPIGHQDWLKGKQFTCKVNNKALPSPIERTISKARGQAHQPSVYVLPPSREELSKNTVSLTCLIKDFYPPDIDVEWQSNGQQEPESKYRTTPPQLDEDGSYFLYSKLSVDKSRWQRGDTFICAVMHEALHNHYTQESLSHSPGK

SEQ ID NO: 17572 - protein, 455 aa, Artificial Sequence
  source: /note="Description of Artificial Sequence: Synthetic polypeptide"
EVQLVESGGDLVNPGGTLTLSCVVSGFSLTNNNVNWVRQALGRGLEWVGGVWAGGATDYNSALKSRLTITRDTSKSTVFLKMHSLQSEDTATYYCARDGGYSSSTLYAMDAWGQGTLVTVSSASTTAPSVFPLAPSCGSQSGSTVALACLVSGYIPEPVTVSWNSVSLTSGVHTFPSVLQSSGLYSLSSMVTVPSSRWPSETFTCNVAHPATNTKVDKPVAKECECKCNCNNCPCPGCGLLGGPSVFIFPPKPKDILVTARTPTVTCVVVDLDPENPEVQISWFVDSKQVQTANTQPREEQSAGTYRVVSVLPIGHQDWLSGKQFKCKVNNKALPSPIEEIISKTPGQAHQPNVYVLPPSRDEMSKNTVTLTCLVKDFFPPEIDVEWQSNGQQEPESKYRMTPPQLDEDGSYFLYSKLSVDKSRWQRGDTFICAVMHEALHNHYTQISLSHSPGK

SEQ ID NO: 17573 - protein, 444 aa, Artificial Sequence
  source: /note="Description of Artificial Sequence: Synthetic polypeptide"
QVQLQQSGAELASPGASVKLSCKASGYTFTTYWLQWVKQRPGQGLEWIGAIYPGPGNTKYTQKFKDKATLTADKSASTAYMQLNSLTSEDSAVYYCARRGSRRGIAYWGQGTLVTVSAASTKGPSVFPLAPCSRSTSESTAALGCLVKDYFPEPVTVSWNSGALTSGVHTFPAVLQSSGLYSLSSVVTVPSSNFGTQTYTCNVDHKPSNTKVDKTVERKCCVECPPCPAPPVAGPSVFLFPPKPKDTLMISRTPEVTCVVVDVSHEDPEVQFNWYVDGVEVHNAKTKPREEQFNSTFRVVSVLTVVHQDWLNGKEYKCKVSNKGLPAPIEKTISKTKGQPREPQVYTLPPSREEMTKNQVSLTCLVKGFYPSDIAVEWESNGQPENNYKTTPPMLDSDGSFFLYSKLTVDKSRWQQGNVFSCSVMHEALHNHYTQKSLSLSPGK

SEQ ID NO: 17574 - protein, 444 aa, Artificial Sequence
  source: /note="Description of Artificial Sequence: Synthetic polypeptide"
QVQLVQSGAELKKPGASVKLSCKASGYTFTTYWLQWVRQAPGQGLEWMGAIYPGPGNTKYTQKFKDRFTITADTSKSTAYMQLNSLKSEDSAVYYCARRGSRRGIAYWGQGTLVTVSAASTKGPSVFPLAPCSRSTSESTAALGCLVKDYFPEPVTVSWNSGALTSGVHTFPAVLQSSGLYSLSSVVTVPSSNFGTQTYTCNVDHKPSNTKVDKTVERKCCVECPPCPAPPVAGPSVFLFPPKPKDTLMISRTPEVTCVVVDVSHEDPEVQFNWYVDGVEVHNAKTKPREEQFNSTFRVVSVLTVVHQDWLNGKEYKCKVSNKGLPAPIEKTISKTKGQPREPQVYTLPPSREEMTKNQVSLTCLVKGFYPSDIAVEWESNGQPENNYKTTPPMLDSDGSFFLYSKLTVDKSRWQQGNVFSCSVMHEALHNHYTQKSLSLSPGK

SEQ ID NO: 17575 - protein, 444 aa, Artificial Sequence
  source: /note="Description of Artificial Sequence: Synthetic polypeptide"
QVQLVQSGAEVKKPGASVKVSCKASGYTFTTYWLQWVRQAPGQGLEWMGAIYPGPGNTKYTQKFKDRVTITADESTSTAYMELSSLRSEDTAVYYCARRGSRRGIAYWGQGTLVTVSAASTKGPSVFPLAPCSRSTSESTAALGCLVKDYFPEPVTVSWNSGALTSGVHTFPAVLQSSGLYSLSSVVTVPSSNFGTQTYTCNVDHKPSNTKVDKTVERKCCVECPPCPAPPVAGPSVFLFPPKPKDTLMISRTPEVTCVVVDVSHEDPEVQFNWYVDGVEVHNAKTKPREEQFNSTFRVVSVLTVVHQDWLNGKEYKCKVSNKGLPAPIEKTISKTKGQPREPQVYTLPPSREEMTKNQVSLTCLVKGFYPSDIAVEWESNGQPENNYKTTPPMLDSDGSFFLYSKLTVDKSRWQQGNVFSCSVMHEALHNHYTQKSLSLSPGK

SEQ ID NO: 17576 - protein, 444 aa, Artificial Sequence
  source: /note="Description of Artificial Sequence: Synthetic polypeptide"
QVQLVQSGAELKKPGASVKLSCKASGYTFTTYWLQWVRQAPGQGLEWMGAIYPGPGNTKYTQKFKDRFTITADKSKSTAYMQLNSLKSEDSAVYYCARRGSRRGIAYWGQGTLVTVSAASTKGPSVFPLAPCSRSTSESTAALGCLVKDYFPEPVTVSWNSGALTSGVHTFPAVLQSSGLYSLSSVVTVPSSNFGTQTYTCNVDHKPSNTKVDKTVERKCCVECPPCPAPPVAGPSVFLFPPKPKDTLMISRTPEVTCVVVDVSHEDPEVQFNWYVDGVEVHNAKTKPREEQFNSTFRVVSVLTVVHQDWLNGKEYKCKVSNKGLPAPIEKTISKTKGQPREPQVYTLPPSREEMTKNQVSLTCLVKGFYPSDIAVEWESNGQPENNYKTTPPMLDSDGSFFLYSKLTVDKSRWQQGNVFSCSVMHEALHNHYTQKSLSLSPGK

SEQ ID NO: 17577 - protein, 444 aa, Artificial Sequence
  source: /note="Description of Artificial Sequence: Synthetic polypeptide"
QVQLVQSGAELVQPGASVKLSCKASGYTFTTYWLQWVRQTPGQGLEWMGAIYPGPGNTKYTQKFKDRVTITADTSTSTAYMQLNSLRSEDSAVYYCARRGSRRGIAYWGQGTLVTVSAASTKGPSVFPLAPCSRSTSESTAALGCLVKDYFPEPVTVSWNSGALTSGVHTFPAVLQSSGLYSLSSVVTVPSSNFGTQTYTCNVDHKPSNTKVDKTVERKCCVECPPCPAPPVAGPSVFLFPPKPKDTLMISRTPEVTCVVVDVSHEDPEVQFNWYVDGVEVHNAKTKPREEQFNSTFRVVSVLTVVHQDWLNGKEYKCKVSNKGLPAPIEKTISKTKGQPREPQVYTLPPSREEMTKNQVSLTCLVKGFYPSDIAVEWESNGQPENNYKTTPPMLDSDGSFFLYSKLTVDKSRWQQGNVFSCSVMHEALHNHYTQKSLSLSPGK

SEQ ID NO: 17578 - protein, 326 aa, Artificial Sequence; identical to SEQ ID NO: 3888
  source: /note="Description of Artificial Sequence: Synthetic polypeptide"

SEQ ID NO: 17579 - protein, 467 aa, Artificial Sequence; identical to SEQ ID NO: 9189
  source: /note="Description of Artificial Sequence: Synthetic polypeptide"

SEQ ID NO: 17580 - protein, 518 aa, Artificial Sequence [sequence omitted]

SEQ ID NO: 17581 - protein, 446 aa, Artificial Sequence
  source: /note="Description of Artificial Sequence: Synthetic polypeptide"
QVQLQQSDAELVKPGASVKISCKASGYTFTDHAIHWVKQKPEQGLDWIGYISPGNGDIKYNEKFKDKVTLTADKSSSTACMHLNSLTSEDSAVYFCKRSLLALDYWGQGTTLTVSSAKTTAPSVYPLAPVCGDTTGSSVTLGCLVKGYFPEPVTLTWNSGSLSSGVHTFPAVLQSDLYTLSSSVTVTSSTWPSQSITCNVAHPASSTKVDKKIEPRGPTIKPCPPCKCPAPNLLGGPSVFIFPPKIKDVLMISLSPIVTCVVVDVSEDDPDVQISWFVNNVEVHTAQTQTHREDYNSTLRVVSALPIQHQDWMSGKEFKCKVNNKDLPAPIERTISKPKGSVRAPQVYVLPPPEEEMTKKQVTLTCMVTDFMPEDIYVEWTNNGKTELNYKNTEPVLDSDGSYFMYSKLRVEKKNWVERNSYSCSVVHEGLHNHHTTKSFSRTPGK

SEQ ID NO: 17582 - protein, 466 aa, Artificial Sequence
  source: /note="Description of Artificial Sequence: Synthetic polypeptide"
TMEWRWVFLFFLSVTTGVHSQVQLQQSDAELVKPGASVKISCKASGYTFTDHAIHWVKQKPEQGLEWIGYFSPGNGDIKYNEKFKGKATLTADKSSSTAYMQLNSLTSEDSAVYFCKRSYGNYDYWGQGTTLTVSSASTKGPSVFPLAPSSKSTSGGTAALGCLVKDYFPEPVTVSWNSGALTSGVHTFPAVLQSSGLYSLSSVVTVPSSSLGTQTYICNVNHKPSNTKVDKKVEPKSCDKTHTCPPCPAPELLGGPSVFLFPPKPKDTLMISRTPEVTCVVVDVSHEDPEVKFNWYVDGVEVHNAKTKPREEQYNSTYRVVSVLTVLHQDWLNGKEYKCKVSNKALPAPIEKTISKAKGQPREPQVYTLPPSRDELTKNQVSLTCLVKGFYPSDIAVEWESNGQPENNYKTTPPVLDSDGSFFLYSKLTVDKSRWQQGNVFSCSVMHEALHNHYTQKSLSLSPGK

SEQ ID NO: 17583 - protein, 122 aa, Artificial Sequence
  source: /note="Description of Artificial Sequence: Synthetic polypeptide"
EVQLVESGGGLVKPGGSLRLSCAASGFSFSNNDVMCWVRQAPGKGLEWIGCIMTTDVVTEYANWAKSRFTVSRDSAKNSVYLQMNSLRAEDTAVYFCARDSVGSPLMSFDLWGPGTLVTVSS

SEQ ID NO: 17584 - protein, 123 aa, Artificial Sequence
  source: /note="Description of Artificial Sequence: Synthetic polypeptide"
QVQLVQSGAEVKKPGASVKVSCKASGYTFTSYDINWVRQATGQGLEWMGWMNPNSGNTGYAQKFQGRVTMTRNTSISTAYMELSSLRSEDTAVYYCARGGYSSSWYYWYFDLWGRGTLVTVSS

SEQ ID NO: 17585 - protein, 120 aa, Artificial Sequence
  source: /note="Description of Artificial Sequence: Synthetic polypeptide"
EVQLVESGGGLVQPGGSLRLSCAASGFTISDYWLHWVRQAPGKGLEWVAGITPAGGYTYYADSVKGRFTISADTSKNTAYLQMNSLRAEDTAVYYCARFVFFLPYAMDYWGQGTLVTVSS

SEQ ID NO: 17586 - protein, 330 aa, Artificial Sequence; identical to SEQ ID NO: 3890
  source: /note="Description of Artificial Sequence: Synthetic polypeptide"

SEQ ID NO: 17587 - protein, 326 aa, Artificial Sequence; identical to SEQ ID NO: 3888
  source: /note="Description of Artificial Sequence: Synthetic polypeptide"

SEQ ID NO: 17588 - protein, 377 aa, Artificial Sequence
  source: /note="Description of Artificial Sequence: Synthetic polypeptide"
ASTKGPSVFPLAPCSRSTSGGTAALGCLVKDYFPEPVTVSWNSGALTSGVHTFPAVLQSSGLYSLSSVVTVPSSSLGTQTYTCNVNHKPSNTKVDKRVELKTPLGDTTHTCPRCPEPKSCDTPPPCPRCPEPKSCDTPPPCPRCPEPKSCDTPPPCPRCPAPELLGGPSVFLFPPKPKDTLMISRTPEVTCVVVDVSHEDPEVQFNWYVDGVEVHNAKTKPREEQYNSTYRVVSVLTVLHQDWLNGKEYKCKVSNKALPAPIEKTISKTKGQPREPQVYTLPPSREEMTKNQVSLTCLVKGFYPSDIAVEWESSGQPENNYKTTPPVLDSDGSFFLYSKLTVDKSRWQQGNIFSCSVMHEALHNHFTQKSLSLSPGK

SEQ ID NO: 17589 - protein, 327 aa, Artificial Sequence; identical to SEQ ID NO: 7171
  source: /note="Description of Artificial Sequence: Synthetic polypeptide"

SEQ ID NO: 17590 - protein, 330 aa, Artificial Sequence
  source: /note="Description of Artificial Sequence: Synthetic polypeptide"
ASTKGPSVFPLAPSSKSTSGGTAALGCLVKDYFPEPVTVSWNSGALTSGVHTFPAVLQSSGLYSLSSVVTVPSSSLGTQTYICNVNHKPSNTKVDKRVEPKSSDKTHTCPPCPAPELLGGPSVFLFPPKPKDTLMISRTPEVTCVVVDVSHEDPEVKFNWYVDGVEVHNAKTKPREEQYNSTYRVVSVLTVLHQDWLNGKEYKCKVSNKALPAPIEKTISKAKGQPREPQVYTLPPSREEMTKNQVSLTCLVKGFYPSDIAVEWESNGQPENNYKTTPPVLDSDGSFFLYSKLTVDKSRWQQGNVFSCSVMHEALHNHYTQKSLSLSPGK

SEQ ID NO: 17591 - protein, 330 aa, Artificial Sequence
  source: /note="Description of Artificial Sequence: Synthetic polypeptide"
ASTKGPSVFPLAPSSKSTSGGTAALGCLVKDYFPEPVTVSWNSGALTSGVHTFPAVLQSSGLYSLSSVVTVPSSSLGTQTYICNVNHKPSNTKVDKRVEPKSVDKTHTCPPCPAPELLGGPSVFLFPPKPKDTLMISRTPEVTCVVVDVSHEDPEVKFNWYVDGVEVHNAKTKPREEQYNSTYRVVSVLTVLHQDWLNGKEYKCKVSNKALPAPIEKTISKAKGQPREPQVYTLPPSREEMTKNQVSLTCLVKGFYPSDIAVEWESNGQPENNYKTTPPVLDSDGSFFLYSKLTVDKSRWQQGNVFSCSVMHEALHNHYTQKSLSLSPGK

SEQ ID NO: 17592 - protein, 330 aa, Artificial Sequence
  source: /note="Description of Artificial Sequence: Synthetic polypeptide"
ASTKGPSVFPLAPSSKSTSGGTAALGCLVKDYFPEPVTVSWNSGALTSGVHTFPAVLQSSGLYSLSSVVTVPSSSLGTQTYICNVNHKPSNTKVDKRVEPKSCDKTHTSPPSPAPELLGGPSVFLFPPKPKDTLMISRTPEVTCVVVDVSHEDPEVKFNWYVDGVEVHNAKTKPREEQYNSTYRVVSVLTVLHQDWLNGKEYKCKVSNKALPAPIEKTISKAKGQPREPQVYTLPPSREEMTKNQVSLTCLVKGFYPSDIAVEWESNGQPENNYKTTPPVLDSDGSFFLYSKLTVDKSRWQQGNVFSCSVMHEALHNHYTQKSLSLSPGK

SEQ ID NO: 17593 - protein, 330 aa, Artificial Sequence
  source: /note="Description of Artificial Sequence: Synthetic polypeptide"
ASTKGPSVFPLAPSSKSTSGGTAALGCLVKDYFPEPVTVSWNSGALTSGVHTFPAVLQSSGLYSLSSVVTVPSSSLGTQTYICNVNHKPSNTKVDKRVEPKSCDKTHTVPPVPAPELLGGPSVFLFPPKPKDTLMISRTPEVTCVVVDVSHEDPEVKFNWYVDGVEVHNAKTKPREEQYNSTYRVVSVLTVLHQDWLNGKEYKCKVSNKALPAPIEKTISKAKGQPREPQVYTLPPSREEMTKNQVSLTCLVKGFYPSDIAVEWESNGQPENNYKTTPPVLDSDGSFFLYSKLTVDKSRWQQGNVFSCSVMHEALHNHYTQKSLSLSPGK

SEQ ID NO: 17594 - protein, 330 aa, Artificial Sequence
  source: /note="Description of Artificial Sequence: Synthetic polypeptide"
ASTKGPSVFPLAPSSKSTSGGTAALGCLVKDYFPEPVTVSWNSGALTSGVHTFPAVLQSSGLYSLSSVVTVPSSSLGTQTYICNVNHKPSNTKVDKRVEPKSSDKTHTSPPSPAPELLGGPSVFLFPPKPKDTLMISRTPEVTCVVVDVSHEDPEVKFNWYVDGVEVHNAKTKPREEQYNSTYRVVSVLTVLHQDWLNGKEYKCKVSNKALPAPIEKTISKAKGQPREPQVYTLPPSREEMTKNQVSLTCLVKGFYPSDIAVEWESNGQPENNYKTTPPVLDSDGSFFLYSKLTVDKSRWQQGNVFSCSVMHEALHNHYTQKSLSLSPGK

SEQ ID NO: 17595 - protein, 330 aa, Artificial Sequence
  source: /note="Description of Artificial Sequence: Synthetic polypeptide"
ASTKGPSVFPLAPSSKSTSGGTAALGCLVKDYFPEPVTVSWNSGALTSGVHTFPAVLQSSGLYSLSSVVTVPSSSLGTQTYICNVNHKPSNTKVDKRVEPKSVDKTHTVPPVPAPELLGGPSVFLFPPKPKDTLMISRTPEVTCVVVDVSHEDPEVKFNWYVDGVEVHNAKTKPREEQYNSTYRVVSVLTVLHQDWLNGKEYKCKVSNKALPAPIEKTISKAKGQPREPQVYTLPPSREEMTKNQVSLTCLVKGFYPSDIAVEWESNGQPENNYKTTPPVLDSDGSFFLYSKLTVDKSRWQQGNVFSCSVMHEALHNHYTQKSLSLSPGK

SEQ ID NO: 17596 - protein, 330 aa, Artificial Sequence
  source: /note="Description of Artificial Sequence: Synthetic polypeptide"
ASTKGPSVFPLAPSSKSTSGGTAALGCLVKDYFPEPVTVSWNSGALTSGVHTFPAVLQSSGLYSLSSVVTVPSSSLGTQTYICNVNHKPSNTKVDKRVEPKSCDKTHTCPPCPAPEALGGPSVFLFPPKPKDTLMISRTPEVTCVVVDVSHEDPEVKFNWYVDGVEVHNAKTKPREEQYNSTYRVVSVLTVLHQDWLNGKEYKCKVSNKALPAPIEKTISKAKGQPREPQVYTLPPSREEMTKNQVSLTCLVKGFYPSDIAVEWESNGQPENNYKTTPPVLDSDGSFFLYSKLTVDKSRWQQGNVFSCSVMHEALHNHYTQKSLSLSPGK

SEQ ID NO: 17597 - protein, 330 aa, Artificial Sequence
  source: /note="Description of Artificial Sequence: Synthetic polypeptide"
ASTKGPSVFPLAPSSKSTSGGTAALGCLVKDYFPEPVTVSWNSGALTSGVHTFPAVLQSSGLYSLSSVVTVPSSSLGTQTYICNVNHKPSNTKVDKRVEPKSCDKTHTCPPCPAPELAGGPSVFLFPPKPKDTLMISRTPEVTCVVVDVSHEDPEVKFNWYVDGVEVHNAKTKPREEQYNSTYRVVSVLTVLHQDWLNGKEYKCKVSNKALPAPIEKTISKAKGQPREPQVYTLPPSREEMTKNQVSLTCLVKGFYPSDIAVEWESNGQPENNYKTTPPVLDSDGSFFLYSKLTVDKSRWQQGNVFSCSVMHEALHNHYTQKSLSLSPGK

SEQ ID NO: 17598 - protein, 330 aa, Artificial Sequence; identical to SEQ ID NO: 12972
  source: /note="Description of Artificial Sequence: Synthetic polypeptide"

SEQ ID NO: 17599 - protein, 330 aa, Artificial Sequence
  source: /note="Description of Artificial Sequence: Synthetic polypeptide"
ASTKGPSVFPLAPSSKSTSGGTAALGCLVKDYFPEPVTVSWNSGALTSGVHTFPAVLQSSGLYSLSSVVTVPSSSLGTQTYICNVNHKPSNTKVDKRVEPKSCDKTHTCPPCPAPEGGGGPSVFLFPPKPKDTLMISRTPEVTCVVVDVSHEDPEVKFNWYVDGVEVHNAKTKPREEQYNSTYRVVSVLTVLHQDWLNGKEYKCKVSNKALPAPIEKTISKAKGQPREPQVYTLPPSREEMTKNQVSLTCLVKGFYPSDIAVEWESNGQPENNYKTTPPVLDSDGSFFLYSKLTVDKSRWQQGNVFSCSVMHEALHNHYTQKSLSLSPGK

SEQ ID NO: 17600 - protein, 330 aa, Artificial Sequence
  source: /note="Description of Artificial Sequence: Synthetic polypeptide"
ASTKGPSVFPLAPSSKSTSGGTAALGCLVKDYFPEPVTVSWNSGALTSGVHTFPAVLQSSGLYSLSSVVTVPSSSLGTQTYICNVNHKPSNTKVDKRVEPKSCDKTHTCPPCPAPEVVGGPSVFLFPPKPKDTLMISRTPEVTCVVVDVSHEDPEVKFNWYVDGVEVHNAKTKPREEQYNSTYRVVSVLTVLHQDWLNGKEYKCKVSNKALPAPIEKTISKAKGQPREPQVYTLPPSREEMTKNQVSLTCLVKGFYPSDIAVEWESNGQPENNYKTTPPVLDSDGSFFLYSKLTVDKSRWQQGNVFSCSVMHEALHNHYTQKSLSLSPGK

SEQ ID NO: 17601 - protein, 330 aa, Artificial Sequence
  source: /note="Description of Artificial Sequence: Synthetic polypeptide"
ASTKGPSVFPLAPSSKSTSGGTAALGCLVKDYFPEPVTVSWNSGALTSGVHTFPAVLQSSGLYSLSSVVTVPSSSLGTQTYICNVNHKPSNTKVDKRVEPKSCDKTHTCPPCPAPEIIGGPSVFLFPPKPKDTLMISRTPEVTCVVVDVSHEDPEVKFNWYVDGVEVHNAKTKPREEQYNSTYRVVSVLTVLHQDWLNGKEYKCKVSNKALPAPIEKTISKAKGQPREPQVYTLPPSREEMTKNQVSLTCLVKGFYPSDIAVEWESNGQPENNYKTTPPVLDSDGSFFLYSKLTVDKSRWQQGNVFSCSVMHEALHNHYTQKSLSLSPGK

SEQ ID NO: 17602 - protein, 377 aa, Artificial Sequence
  source: /note="Description of Artificial Sequence: Synthetic polypeptide"
ASTKGPSVFPLAPCSRSTSGGTAALGCLVKDYFPEPVTVSWNSGALTSGVHTFPAVLQSSGLYSLSSVVTVPSSSLGTQTYTCNVNHKPSNTKVDKRVELKTPLGDTTHTCPRCPEPKSCDTPPPCPRCPEPKSCDTPPPCPRCPEPKSCDTPPPCPRCPAPEALGGPSVFLFPPKPKDTLMISRTPEVTCVVVDVSHEDPEVQFNWYVDGVEVHNAKTKPREEQYNSTYRVVSVLTVLHQDWLNGKEYKCKVSNKALPAPIEKTISKTKGQPREPQVYTLPPSREEMTKNQVSLTCLVKGFYPSDIAVEWESSGQPENNYKTTPPVLDSDGSFFLYSKLTVDKSRWQQGNIFSCSVMHEALHNHFTQKSLSLSPGK

SEQ ID NO: 17603 - protein, 377 aa, Artificial Sequence
  source: /note="Description of Artificial Sequence: Synthetic polypeptide"
ASTKGPSVFPLAPCSRSTSGGTAALGCLVKDYFPEPVTVSWNSGALTSGVHTFPAVLQSSGLYSLSSVVTVPSSSLGTQTYTCNVNHKPSNTKVDKRVELKTPLGDTTHTCPRCPEPKSCDTPPPCPRCPEPKSCDTPPPCPRCPEPKSCDTPPPCPRCPAPELAGGPSVFLFPPKPKDTLMISRTPEVTCVVVDVSHEDPEVQFNWYVDGVEVHNAKTKPREEQYNSTYRVVSVLTVLHQDWLNGKEYKCKVSNKALPAPIEKTISKTKGQPREPQVYTLPPSREEMTKNQVSLTCLVKGFYPSDIAVEWESSGQPENNYKTTPPVLDSDGSFFLYSKLTVDKSRWQQGNIFSCSVMHEALHNHFTQKSLSLSPGK

SEQ ID NO: 17604 - protein, 377 aa, Artificial Sequence
  source: /note="Description of Artificial Sequence: Synthetic polypeptide"
ASTKGPSVFPLAPCSRSTSGGTAALGCLVKDYFPEPVTVSWNSGALTSGVHTFPAVLQSSGLYSLSSVVTVPSSSLGTQTYTCNVNHKPSNTKVDKRVELKTPLGDTTHTCPRCPEPKSCDTPPPCPRCPEPKSCDTPPPCPRCPEPKSCDTPPPCPRCPAPEAAGGPSVFLFPPKPKDTLMISRTPEVTCVVVDVSHEDPEVQFNWYVDGVEVHNAKTKPREEQYNSTYRVVSVLTVLHQDWLNGKEYKCKVSNKALPAPIEKTISKTKGQPREPQVYTLPPSREEMTKNQVSLTCLVKGFYPSDIAVEWESSGQPENNYKTTPPVLDSDGSFFLYSKLTVDKSRWQQGNIFSCSVMHEALHNHFTQKSLSLSPGK

SEQ ID NO: 17605 - protein, 377 aa, Artificial Sequence
  source: /note="Description of Artificial Sequence: Synthetic polypeptide"
ASTKGPSVFPLAPCSRSTSGGTAALGCLVKDYFPEPVTVSWNSGALTSGVHTFPAVLQSSGLYSLSSVVTVPSSSLGTQTYTCNVNHKPSNTKVDKRVELKTPLGDTTHTCPRCPEPKSCDTPPPCPRCPEPKSCDTPPPCPRCPEPKSCDTPPPCPRCPAPEGGGGPSVFLFPPKPKDTLMISRTPEVTCVVVDVSHEDPEVQFNWYVDGVEVHNAKTKPREEQYNSTYRVVSVLTVLHQDWLNGKEYKCKVSNKALPAPIEKTISKTKGQPREPQVYTLPPSREEMTKNQVSLTCLVKGFYPSDIAVEWESSGQPENNYKTTPPVLDSDGSFFLYSKLTVDKSRWQQGNIFSCSVMHEALHNHFTQKSLSLSPGK

SEQ ID NO: 17606 - protein, 377 aa, Artificial Sequence
  source: /note="Description of Artificial Sequence: Synthetic polypeptide"
ASTKGPSVFPLAPCSRSTSGGTAALGCLVKDYFPEPVTVSWNSGALTSGVHTFPAVLQSSGLYSLSSVVTVPSSSLGTQTYTCNVNHKPSNTKVDKRVELKTPLGDTTHTCPRCPEPKSCDTPPPCPRCPEPKSCDTPPPCPRCPEPKSCDTPPPCPRCPAPEVVGGPSVFLFPPKPKDTLMISRTPEVTCVVVDVSHEDPEVQFNWYVDGVEVHNAKTKPREEQYNSTYRVVSVLTVLHQDWLNGKEYKCKVSNKALPAPIEKTISKTKGQPREPQVYTLPPSREEMTKNQVSLTCLVKGFYPSDIAVEWESSGQPENNYKTTPPVLDSDGSFFLYSKLTVDKSRWQQGNIFSCSVMHEALHNHFTQKSLSLSPGK

SEQ ID NO: 17607 - protein, 377 aa, Artificial Sequence
  source: /note="Description of Artificial Sequence: Synthetic polypeptide"
ASTKGPSVFPLAPCSRSTSGGTAALGCLVKDYFPEPVTVSWNSGALTSGVHTFPAVLQSSGLYSLSSVVTVPSSSLGTQTYTCNVNHKPSNTKVDKRVELKTPLGDTTHTCPRCPEPKSCDTPPPCPRCPEPKSCDTPPPCPRCPEPKSCDTPPPCPRCPAPEIIGGPSVFLFPPKPKDTLMISRTPEVTCVVVDVSHEDPEVQFNWYVDGVEVHNAKTKPREEQYNSTYRVVSVLTVLHQDWLNGKEYKCKVSNKALPAPIEKTISKTKGQPREPQVYTLPPSREEMTKNQVSLTCLVKGFYPSDIAVEWESSGQPENNYKTTPPVLDSDGSFFLYSKLTVDKSRWQQGNIFSCSVMHEALHNHFTQKSLSLSPGK

SEQ ID NO: 17608 - protein, 327 aa, Artificial Sequence
  source: /note="Description of Artificial Sequence: Synthetic polypeptide"
ASTKGPSVFPLAPCSRSTSESTAALGCLVKDYFPEPVTVSWNSGALTSGVHTFPAVLQSSGLYSLSSVVTVPSSSLGTKTYTCNVDHKPSNTKVDKRVESKYGPPCPSCPAPEFAGGPSVFLFPPKPKDTLMISRTPEVTCVVVDVSQEDPEVQFNWYVDGVEVHNAKTKPREEQFNSTYRVVSVLTVLHQDWLNGKEYKCKVSNKGLPSSIEKTISKAKGQPREPQVYTLPPSQEEMTKNQVSLTCLVKGFYPSDIAVEWESNGQPENNYKTTPPVLDSDGSFFLYSRLTVDKSRWQEGNVFSCSVMHEALHNHYTQKSLSLSLGK

SEQ ID NO: 17609 - protein, 327 aa, Artificial Sequence
  source: /note="Description of Artificial Sequence: Synthetic polypeptide"
ASTKGPSVFPLAPCSRSTSESTAALGCLVKDYFPEPVTVSWNSGALTSGVHTFPAVLQSSGLYSLSSVVTVPSSSLGTKTYTCNVDHKPSNTKVDKRVESKYGPPCPSCPAPEFGGGPSVFLFPPKPKDTLMISRTPEVTCVVVDVSQEDPEVQFNWYVDGVEVHNAKTKPREEQFNSTYRVVSVLTVLHQDWLNGKEYKCKVSNKGLPSSIEKTISKAKGQPREPQVYTLPPSQEEMTKNQVSLTCLVKGFYPSDIAVEWESNGQPENNYKTTPPVLDSDGSFFLYSRLTVDKSRWQEGNVFSCSVMHEALHNHYTQKSLSLSLGK

SEQ ID NO: 17610 - protein, 327 aa, Artificial Sequence
  source: /note="Description of Artificial Sequence: Synthetic polypeptide"
ASTKGPSVFPLAPCSRSTSESTAALGCLVKDYFPEPVTVSWNSGALTSGVHTFPAVLQSSGLYSLSSVVTVPSSSLGTKTYTCNVDHKPSNTKVDKRVESKYGPPCPSCPAPEFVGGPSVFLFPPKPKDTLMISRTPEVTCVVVDVSQEDPEVQFNWYVDGVEVHNAKTKPREEQFNSTYRVVSVLTVLHQDWLNGKEYKCKVSNKGLPSSIEKTISKAKGQPREPQVYTLPPSQEEMTKNQVSLTCLVKGFYPSDIAVEWESNGQPENNYKTTPPVLDSDGSFFLYSRLTVDKSRWQEGNVFSCSVMHEALHNHYTQKSLSLSLGK

SEQ ID NO: 17611 - protein, 327 aa, Artificial Sequence
  source: /note="Description of Artificial Sequence: Synthetic polypeptide"
ASTKGPSVFPLAPCSRSTSESTAALGCLVKDYFPEPVTVSWNSGALTSGVHTFPAVLQSSGLYSLSSVVTVPSSSLGTKTYTCNVDHKPSNTKVDKRVESKYGPPCPSCPAPEFIGGPSVFLFPPKPKDTLMISRTPEVTCVVVDVSQEDPEVQFNWYVDGVEVHNAKTKPREEQFNSTYRVVSVLTVLHQDWLNGKEYKCKVSNKGLPSSIEKTISKAKGQPREPQVYTLPPSQEEMTKNQVSLTCLVKGFYPSDIAVEWESNGQPENNYKTTPPVLDSDGSFFLYSRLTVDKSRWQEGNVFSCSVMHEALHNHYTQKSLSLSLGK

SEQ ID NO: 17612 - protein, 330 aa, Artificial Sequence
  source: /note="Description of Artificial Sequence: Synthetic polypeptide"
ASTKGPSVFPLAPSSKSTSGGTAALGCLVKDYFPEPVTVSWNSGALTSGVHTFPAVLQSSGLYSLSSVVTVPSSSLGTQTYICNVNHKPSNTKVDKRVEPKSSDKTHTCPPCPAPEALGGPSVFLFPPKPKDTLMISRTPEVTCVVVDVSHEDPEVKFNWYVDGVEVHNAKTKPREEQYNSTYRVVSVLTVLHQDWLNGKEYKCKVSNKALPAPIEKTISKAKGQPREPQVYTLPPSREEMTKNQVSLTCLVKGFYPSDIAVEWESNGQPENNYKTTPPVLDSDGSFFLYSKLTVDKSRWQQGNVFSCSVMHEALHNHYTQKSLSLSPGK

SEQ ID NO: 17613 - protein, 330 aa, Artificial Sequence
  source: /note="Description of Artificial Sequence: Synthetic polypeptide"
ASTKGPSVFPLAPSSKSTSGGTAALGCLVKDYFPEPVTVSWNSGALTSGVHTFPAVLQSSGLYSLSSVVTVPSSSLGTQTYICNVNHKPSNTKVDKRVEPKSSDKTHTCPPCPAPELAGGPSVFLFPPKPKDTLMISRTPEVTCVVVDVSHEDPEVKFNWYVDGVEVHNAKTKPREEQYNSTYRVVSVLTVLHQDWLNGKEYKCKVSNKALPAPIEKTISKAKGQPREPQVYTLPPSREEMTKNQVSLTCLVKGFYPSDIAVEWESNGQPENNYKTTPPVLDSDGSFFLYSKLTVDKSRWQQGNVFSCSVMHEALHNHYTQKSLSLSPGK

SEQ ID NO: 17614 - protein, 330 aa, Artificial Sequence
  source: /note="Description of Artificial Sequence: Synthetic polypeptide"
ASTKGPSVFPLAPSSKSTSGGTAALGCLVKDYFPEPVTVSWNSGALTSGVHTFPAVLQSSGLYSLSSVVTVPSSSLGTQTYICNVNHKPSNTKVDKRVEPKSSDKTHTCPPCPAPEAAGGPSVFLFPPKPKDTLMISRTPEVTCVVVDVSHEDPEVKFNWYVDGVEVHNAKTKPREEQYNSTYRVVSVLTVLHQDWLNGKEYKCKVSNKALPAPIEKTISKAKGQPREPQVYTLPPSREEMTKNQVSLTCLVKGFYPSDIAVEWESNGQPENNYKTTPPVLDSDGSFFLYSKLTVDKSRWQQGNVFSCSVMHEALHNHYTQKSLSLSPGK

SEQ ID NO: 17615 - protein, 330 aa, Artificial Sequence
  source: /note="Description of Artificial Sequence: Synthetic polypeptide"
ASTKGPSVFPLAPSSKSTSGGTAALGCLVKDYFPEPVTVSWNSGALTSGVHTFPAVLQSSGLYSLSSVVTVPSSSLGTQTYICNVNHKPSNTKVDKRVEPKSSDKTHTCPPCPAPEGGGGPSVFLFPPKPKDTLMISRTPEVTCVVVDVSHEDPEVKFNWYVDGVEVHNAKTKPREEQYNSTYRVVSVLTVLHQDWLNGKEYKCKVSNKALPAPIEKTISKAKGQPREPQVYTLPPSREEMTKNQVSLTCLVKGFYPSDIAVEWESNGQPENNYKTTPPVLDSDGSFFLYSKLTVDKSRWQQGNVFSCSVMHEALHNHYTQKSLSLSPGK

SEQ ID NO: 17616 - protein, 330 aa, Artificial Sequence
  source: /note="Description of Artificial Sequence: Synthetic polypeptide"
ASTKGPSVFPLAPSSKSTSGGTAALGCLVKDYFPEPVTVSWNSGALTSGVHTFPAVLQSSGLYSLSSVVTVPSSSLGTQTYICNVNHKPSNTKVDKRVEPKSSDKTHTCPPCPAPEVVGGPSVFLFPPKPKDTLMISRTPEVTCVVVDVSHEDPEVKFNWYVDGVEVHNAKTKPREEQYNSTYRVVSVLTVLHQDWLNGKEYKCKVSNKALPAPIEKTISKAKGQPREPQVYTLPPSREEMTKNQVSLTCLVKGFYPSDIAVEWESNGQPENNYKTTPPVLDSDGSFFLYSKLTVDKSRWQQGNVFSCSVMHEALHNHYTQKSLSLSPGK

SEQ ID NO: 17617 - protein, 330 aa, Artificial Sequence
  source: /note="Description of Artificial Sequence: Synthetic polypeptide"
ASTKGPSVFPLAPSSKSTSGGTAALGCLVKDYFPEPVTVSWNSGALTSGVHTFPAVLQSSGLYSLSSVVTVPSSSLGTQTYICNVNHKPSNTKVDKRVEPKSSDKTHTCPPCPAPEIIGGPSVFLFPPKPKDTLMISRTPEVTCVVVDVSHEDPEVKFNWYVDGVEVHNAKTKPREEQYNSTYRVVSVLTVLHQDWLNGKEYKCKVSNKALPAPIEKTISKAKGQPREPQVYTLPPSREEMTKNQVSLTCLVKGFYPSDIAVEWESNGQPENNYKTTPPVLDSDGSFFLYSKLTVDKSRWQQGNVFSCSVMHEALHNHYTQKSLSLSPGK

SEQ ID NO: 17618 - protein, 330 aa, Artificial Sequence
  source: /note="Description of Artificial Sequence: Synthetic polypeptide"
ASTKGPSVFPLAPSSKSTSGGTAALGCLVKDYFPEPVTVSWNSGALTSGVHTFPAVLQSSGLYSLSSVVTVPSSSLGTQTYICNVNHKPSNTKVDKRVEPKSVDKTHTCPPCPAPEALGGPSVFLFPPKPKDTLMISRTPEVTCVVVDVSHEDPEVKFNWYVDGVEVHNAKTKPREEQYNSTYRVVSVLTVLHQDWLNGKEYKCKVSNKALPAPIEKTISKAKGQPREPQVYTLPPSREEMTKNQVSLTCLVKGFYPSDIAVEWESNGQPENNYKTTPPVLDSDGSFFLYSKLTVDKSRWQQGNVFSCSVMHEALHNHYTQKSLSLSPGK

SEQ ID NO: 17619 - protein, 330 aa, Artificial Sequence
  source: /note="Description of Artificial Sequence: Synthetic polypeptide"
ASTKGPSVFPLAPSSKSTSGGTAALGCLVKDYFPEPVTVSWNSGALTSGVHTFPAVLQSSGLYSLSSVVTVPSSSLGTQTYICNVNHKPSNTKVDKRVEPKSVDKTHTCPPCPAPELAGGPSVFLFPPKPKDTLMISRTPEVTCVVVDVSHEDPEVKFNWYVDGVEVHNAKTKPREEQYNSTYRVVSVLTVLHQDWLNGKEYKCKVSNKALPAPIEKTISKAKGQPREPQVYTLPPSREEMTKNQVSLTCLVKGFYPSDIAVEWESNGQPENNYKTTPPVLDSDGSFFLYSKLTVDKSRWQQGNVFSCSVMHEALHNHYTQKSLSLSPGK

SEQ ID NO: 17620 - protein, 330 aa, Artificial Sequence
  source: /note="Description of Artificial Sequence: Synthetic polypeptide"
ASTKGPSVFPLAPSSKSTSGGTAALGCLVKDYFPEPVTVSWNSGALTSGVHTFPAVLQSSGLYSLSSVVTVPSSSLGTQTYICNVNHKPSNTKVDKRVEPKSVDKTHTCPPCPAPEAAGGPSVFLFPPKPKDTLMISRTPEVTCVVVDVSHEDPEVKFNWYVDGVEVHNAKTKPREEQYNSTYRVVSVLTVLHQDWLNGKEYKCKVSNKALPAPIEKTISKAKGQPREPQVYTLPPSREEMTKNQVSLTCLVKGFYPSDIAVEWESNGQPENNYKTTPPVLDSDGSFFLYSKLTVDKSRWQQGNVFSCSVMHEALHNHYTQKSLSLSPGK

SEQ ID NO: 17621 - protein, 330 aa, Artificial Sequence
  source: /note="Description of Artificial Sequence: Synthetic polypeptide"
ASTKGPSVFPLAPSSKSTSGGTAALGCLVKDYFPEPVTVSWNSGALTSGVHTFPAVLQSSGLYSLSSVVTVPSSSLGTQTYICNVNHKPSNTKVDKRVEPKSVDKTHTCPPCPAPEGGGGPSVFLFPPKPKDTLMISRTPEVTCVVVDVSHEDPEVKFNWYVDGVEVHNAKTKPREEQYNSTYRVVSVLTVLHQDWLNGKEYKCKVSNKALPAPIEKTISKAKGQPREPQVYTLPPSREEMTKNQVSLTCLVKGFYPSDIAVEWESNGQPENNYKTTPPVLDSDGSFFLYSKLTVDKSRWQQGNVFSCSVMHEALHNHYTQKSLSLSPGK

SEQ ID NO: 17622 - protein, 330 aa, Artificial Sequence
  source: /note="Description of Artificial Sequence: Synthetic polypeptide"
ASTKGPSVFPLAPSSKSTSGGTAALGCLVKDYFPEPVTVSWNSGALTSGVHTFPAVLQSSGLYSLSSVVTVPSSSLGTQTYICNVNHKPSNTKVDKRVEPKSVDKTHTCPPCPAPEVVGGPSVFLFPPKPKDTLMISRTPEVTCVVVDVSHEDPEVKFNWYVDGVEVHNAKTKPREEQYNSTYRVVSVLTVLHQDWLNGKEYKCKVSNKALPAPIEKTISKAKGQPREPQVYTLPPSREEMTKNQVSLTCLVKGFYPSDIAVEWESNGQPENNYKTTPPVLDSDGSFFLYSKLTVDKSRWQQGNVFSCSVMHEALHNHYTQKSLSLSPGK

SEQ ID NO: 17623 - protein, 330 aa, Artificial Sequence
  source: /note="Description of Artificial Sequence: Synthetic polypeptide"
ASTKGPSVFPLAPSSKSTSGGTAALGCLVKDYFPEPVTVSWNSGALTSGVHTFPAVLQSSGLYSLSSVVTVPSSSLGTQTYICNVNHKPSNTKVDKRVEPKSVDKTHTCPPCPAPEIIGGPSVFLFPPKPKDTLMISRTPEVTCVVVDVSHEDPEVKFNWYVDGVEVHNAKTKPREEQYNSTYRVVSVLTVLHQDWLNGKEYKCKVSNKALPAPIEKTISKAKGQPREPQVYTLPPSREEMTKNQVSLTCLVKGFYPSDIAVEWESNGQPENNYKTTPPVLDSDGSFFLYSKLTVDKSRWQQGNVFSCSVMHEALHNHYTQKSLSLSPGK

SEQ ID NO: 17624 - protein, 330 aa, Artificial Sequence
  source: /note="Description of Artificial Sequence: Synthetic polypeptide"
ASTKGPSVFPLAPSSKSTSGGTAALGCLVKDYFPEPVTVSWNSGALTSGVHTFPAVLQSSGLYSLSSVVTVPSSSLGTQTYICNVNHKPSNTKVDKRVEPKSCDKTHTSPPSPAPEALGGPSVFLFPPKPKDTLMISRTPEVTCVVVDVSHEDPEVKFNWYVDGVEVHNAKTKPREEQYNSTYRVVSVLTVLHQDWLNGKEYKCKVSNKALPAPIEKTISKAKGQPREPQVYTLPPSREEMTKNQVSLTCLVKGFYPSDIAVEWESNGQPENNYKTTPPVLDSDGSFFLYSKLTVDKSRWQQGNVFSCSVMHEALHNHYTQKSLSLSPGK

SEQ ID NO: 17625 - protein, 330 aa, Artificial Sequence
  source: /note="Description of Artificial Sequence: Synthetic polypeptide"
ASTKGPSVFPLAPSSKSTSGGTAALGCLVKDYFPEPVTVSWNSGALTSGVHTFPAVLQSSGLYSLSSVVTVPSSSLGTQTYICNVNHKPSNTKVDKRVEPKSCDKTHTSPPSPAPELAGGPSVFLFPPKPKDTLMISRTPEVTCVVVDVSHEDPEVKFNWYVDGVEVHNAKTKPREEQYNSTYRVVSVLTVLHQDWLNGKEYKCKVSNKALPAPIEKTISKAKGQPREPQVYTLPPSREEMTKNQVSLTCLVKGFYPSDIAVEWESNGQPENNYKTTPPVLDSDGSFFLYSKLTVDKSRWQQGNVFSCSVMHEALHNHYTQKSLSLSPGK

SEQ ID NO: 17626 - protein, 330 aa, Artificial Sequence
  source: /note="Description of Artificial Sequence: Synthetic polypeptide"
ASTKGPSVFPLAPSSKSTSGGTAALGCLVKDYFPEPVTVSWNSGALTSGVHTFPAVLQSSGLYSLSSVVTVPSSSLGTQTYICNVNHKPSNTKVDKRVEPKSCDKTHTSPPSPAPEAAGGPSVFLFPPKPKDTLMISRTPEVTCVVVDVSHEDPEVKFNWYVDGVEVHNAKTKPREEQYNSTYRVVSVLTVLHQDWLNGKEYKCKVSNKALPAPIEKTISKAKGQPREPQVYTLPPSREEMTKNQVSLTCLVKGFYPSDIAVEWESNGQPENNYKTTPPVLDSDGSFFLYSKLTVDKSRWQQGNVFSCSVMHEALHNHYTQKSLSLSPGK

SEQ ID NO: 17627 - protein, 330 aa, Artificial Sequence
  source: /note="Description of Artificial Sequence: Synthetic polypeptide"
ASTKGPSVFPLAPSSKSTSGGTAALGCLVKDYFPEPVTVSWNSGALTSGVHTFPAVLQSSGLYSLSSVVTVPSSSLGTQTYICNVNHKPSNTKVDKRVEPKSCDKTHTSPPSPAPEGGGGPSVFLFPPKPKDTLMISRTPEVTCVVVDVSHEDPEVKFNWYVDGVEVHNAKTKPREEQYNSTYRVVSVLTVLHQDWLNGKEYKCKVSNKALPAPIEKTISKAKGQPREPQVYTLPPSREEMTKNQVSLTCLVKGFYPSDIAVEWESNGQPENNYKTTPPVLDSDGSFFLYSKLTVDKSRWQQGNVFSCSVMHEALHNHYTQKSLSLSPGK

SEQ ID NO: 17628 - protein, 330 aa, Artificial Sequence
  source: /note="Description of Artificial Sequence: Synthetic polypeptide"
ASTKGPSVFPLAPSSKSTSGGTAALGCLVKDYFPEPVTVSWNSGALTSGVHTFPAVLQSSGLYSLSSVVTVPSSSLGTQTYICNVNHKPSNTKVDKRVEPKSCDKTHTSPPSPAPEVVGGPSVFLFPPKPKDTLMISRTPEVTCVVVDVSHEDPEVKFNWYVDGVEVHNAKTKPREEQYNSTYRVVSVLTVLHQDWLNGKEYKCKVSNKALPAPIEKTISKAKGQPREPQVYTLPPSREEMTKNQVSLTCLVKGFYPSDIAVEWESNGQPENNYKTTPPVLDSDGSFFLYSKLTVDKSRWQQGNVFSCSVMHEALHNHYTQKSLSLSPGK

SEQ ID NO: 17629 - protein, 330 aa, Artificial Sequence
  source: /note="Description of Artificial Sequence: Synthetic polypeptide"
ASTKGPSVFPLAPSSKSTSGGTAALGCLVKDYFPEPVTVSWNSGALTSGVHTFPAVLQSSGLYSLSSVVTVPSSSLGTQTYICNVNHKPSNTKVDKRVEPKSCDKTHTSPPSPAPEIIGGPSVFLFPPKPKDTLMISRTPEVTCVVVDVSHEDPEVKFNWYVDGVEVHNAKTKPREEQYNSTYRVVSVLTVLHQDWLNGKEYKCKVSNKALPAPIEKTISKAKGQPREPQVYTLPPSREEMTKNQVSLTCLVKGFYPSDIAVEWESNGQPENNYKTTPPVLDSDGSFFLYSKLTVDKSRWQQGNVFSCSVMHEALHNHYTQKSLSLSPGK

SEQ ID NO: 17630 - protein, 330 aa, Artificial Sequence
  source: /note="Description of Artificial Sequence: Synthetic polypeptide"
ASTKGPSVFPLAPSSKSTSGGTAALGCLVKDYFPEPVTVSWNSGALTSGVHTFPAVLQSSGLYSLSSVVTVPSSSLGTQTYICNVNHKPSNTKVDKRVEPKSCDKTHTVPPVPAPEALGGPSVFLFPPKPKDTLMISRTPEVTCVVVDVSHEDPEVKFNWYVDGVEVHNAKTKPREEQYNSTYRVVSVLTVLHQDWLNGKEYKCKVSNKALPAPIEKTISKAKGQPREPQVYTLPPSREEMTKNQVSLTCLVKGFYPSDIAVEWESNGQPENNYKTTPPVLDSDGSFFLYSKLTVDKSRWQQGNVFSCSVMHEALHNHYTQKSLSLSPGK

SEQ ID NO: 17631 - protein, 330 aa, Artificial Sequence
  source: /note="Description of Artificial Sequence: Synthetic polypeptide"
ASTKGPSVFPLAPSSKSTSGGTAALGCLVKDYFPEPVTVSWNSGALTSGVHTFPAVLQSSGLYSLSSVVTVPSSSLGTQTYICNVNHKPSNTKVDKRVEPKSCDKTHTVPPVPAPELAGGPSVFLFPPKPKDTLMISRTPEVTCVVVDVSHEDPEVKFNWYVDGVEVHNAKTKPREEQYNSTYRVVSVLTVLHQDWLNGKEYKCKVSNKALPAPIEKTISKAKGQPREPQVYTLPPSREEMTKNQVSLTCLVKGFYPSDIAVEWESNGQPENNYKTTPPVLDSDGSFFLYSKLTVDKSRWQQGNVFSCSVMHEALHNHYTQKSLSLSPGK

SEQ ID NO: 17632 - protein, 330 aa, Artificial Sequence
  source: /note="Description of Artificial Sequence: Synthetic polypeptide"
ASTKGPSVFPLAPSSKSTSGGTAALGCLVKDYFPEPVTVSWNSGALTSGVHTFPAVLQSSGLYSLSSVVTVPSSSLGTQTYICNVNHKPSNTKVDKRVEPKSCDKTHTVPPVPAPEAAGGPSVFLFPPKPKDTLMISRTPEVTCVVVDVSHEDPEVKFNWYVDGVEVHNAKTKPREEQYNSTYRVVSVLTVLHQDWLNGKEYKCKVSNKALPAPIEKTISKAKGQPREPQVYTLPPSREEMTKNQVSLTCLVKGFYPSDIAVEWESNGQPENNYKTTPPVLDSDGSFFLYSKLTVDKSRWQQGNVFSCSVMHEALHNHYTQKSLSLSPGK

SEQ ID NO: 17633 - protein, 330 aa, Artificial Sequence
  source: /note="Description of Artificial Sequence: Synthetic polypeptide"
ASTKGPSVFPLAPSSKSTSGGTAALGCLVKDYFPEPVTVSWNSGALTSGVHTFPAVLQSSGLYSLSSVVTVPSSSLGTQTYICNVNHKPSNTKVDKRVEPKSCDKTHTVPPVPAPEGGGGPSVFLFPPKPKDTLMISRTPEVTCVVVDVSHEDPEVKFNWYVDGVEVHNAKTKPREEQYNSTYRVVSVLTVLHQDWLNGKEYKCKVSNKALPAPIEKTISKAKGQPREPQVYTLPPSREEMTKNQVSLTCLVKGFYPSDIAVEWESNGQPENNYKTTPPVLDSDGSFFLYSKLTVDKSRWQQGNVFSCSVMHEALHNHYTQKSLSLSPGK

SEQ ID NO: 17634 - protein, 330 aa, Artificial Sequence
  source: /note="Description of Artificial Sequence: Synthetic polypeptide"
ASTKGPSVFPLAPSSKSTSGGTAALGCLVKDYFPEPVTVSWNSGALTSGVHTFPAVLQSSGLYSLSSVVTVPSSSLGTQTYICNVNHKPSNTKVDKRVEPKSCDKTHTVPPVPAPEVVGGPSVFLFPPKPKDTLMISRTPEVTCVVVDVSHEDPEVKFNWYVDGVEVHNAKTKPREEQYNSTYRVVSVLTVLHQDWLNGKEYKCKVSNKALPAPIEKTISKAKGQPREPQVYTLPPSREEMTKNQVSLTCLVKGFYPSDIAVEWESNGQPENNYKTTPPVLDSDGSFFLYSKLTVDKSRWQQGNVFSCSVMHEALHNHYTQKSLSLSPGK

SEQ ID NO: 17635 - protein, 330 aa, Artificial Sequence
  source: /note="Description of Artificial Sequence: Synthetic polypeptide"
ASTKGPSVFPLAPSSKSTSGGTAALGCLVKDYFPEPVTVSWNSGALTSGVHTFPAVLQSSGLYSLSSVVTVPSSSLGTQTYICNVNHKPSNTKVDKRVEPKSCDKTHTVPPVPAPEIIGGPSVFLFPPKPKDTLMISRTPEVTCVVVDVSHEDPEVKFNWYVDGVEVHNAKTKPREEQYNSTYRVVSVLTVLHQDWLNGKEYKCKVSNKALPAPIEKTISKAKGQPREPQVYTLPPSREEMTKNQVSLTCLVKGFYPSDIAVEWESNGQPENNYKTTPPVLDSDGSFFLYSKLTVDKSRWQQGNVFSCSVMHEALHNHYTQKSLSLSPGK

SEQ ID NO: 17636 - protein, 330 aa, Artificial Sequence
  source: /note="Description of Artificial Sequence: Synthetic polypeptide"
ASTKGPSVFPLAPSSKSTSGGTAALGCLVKDYFPEPVTVSWNSGALTSGVHTFPAVLQSSGLYSLSSVVTVPSSSLGTQTYICNVNHKPSNTKVDKRVEPKSSDKTHTSPPSPAPEALGGPSVFLFPPKPKDTLMISRTPEVTCVVVDVSHEDPEVKFNWYVDGVEVHNAKTKPREEQYNSTYRVVSVLTVLHQDWLNGKEYKCKVSNKALPAPIEKTISKAKGQPREPQVYTLPPSREEMTKNQVSLTCLVKGFYPSDIAVEWESNGQPENNYKTTPPVLDSDGSFFLYSKLTVDKSRWQQGNVFSCSVMHEALHNHYTQKSLSLSPGK

SEQ ID NO: 17637 - protein, 330 aa, Artificial Sequence
  source: /note="Description of Artificial Sequence: Synthetic polypeptide"
ASTKGPSVFPLAPSSKSTSGGTAALGCLVKDYFPEPVTVSWNSGALTSGVHTFPAVLQSSGLYSLSSVVTVPSSSLGTQTYICNVNHKPSNTKVDKRVEPKSSDKTHTSPPSPAPELAGGPSVFLFPPKPKDTLMISRTPEVTCVVVDVSHEDPEVKFNWYVDGVEVHNAKTKPREEQYNSTYRVVSVLTVLHQDWLNGKEYKCKVSNKALPAPIEKTISKAKGQPREPQVYTLPPSREEMTKNQVSLTCLVKGFYPSDIAVEWESNGQPENNYKTTPPVLDSDGSFFLYSKLTVDKSRWQQGNVFSCSVMHEALHNHYTQKSLSLSPGK

SEQ ID NO: 17638 - protein, 330 aa, Artificial Sequence
  source: /note="Description of Artificial Sequence: Synthetic polypeptide"
ASTKGPSVFPLAPSSKSTSGGTAALGCLVKDYFPEPVTVSWNSGALTSGVHTFPAVLQSSGLYSLSSVVTVPSSSLGTQTYICNVNHKPSNTKVDKRVEPKSSDKTHTSPPSPAPEAAGGPSVFLFPPKPKDTLMISRTPEVTCVVVDVSHEDPEVKFNWYVDGVEVHNAKTKPREEQYNSTYRVVSVLTVLHQDWLNGKEYKCKVSNKALPAPIEKTISKAKGQPREPQVYTLPPSREEMTKNQVSLTCLVKGFYPSDIAVEWESNGQPENNYKTTPPVLDSDGSFFLYSKLTVDKSRWQQGNVFSCSVMHEALHNHYTQKSLSLSPGK

SEQ ID NO: 17639 - protein, 330 aa, Artificial Sequence
  source: /note="Description of Artificial Sequence: Synthetic polypeptide"
ASTKGPSVFPLAPSSKSTSGGTAALGCLVKDYFPEPVTVSWNSGALTSGVHTFPAVLQSSGLYSLSSVVTVPSSSLGTQTYICNVNHKPSNTKVDKRVEPKSSDKTHTSPPSPAPEGGGGPSVFLFPPKPKDTLMISRTPEVTCVVVDVSHEDPEVKFNWYVDGVEVHNAKTKPREEQYNSTYRVVSVLTVLHQDWLNGKEYKCKVSNKALPAPIEKTISKAKGQPREPQVYTLPPSREEMTKNQVSLTCLVKGFYPSDIAVEWESNGQPENNYKTTPPVLDSDGSFFLYSKLTVDKSRWQQGNVFSCSVMHEALHNHYTQKSLSLSPGK

SEQ ID NO: 17640 - protein, 330 aa, Artificial Sequence
  source: /note="Description of Artificial Sequence: Synthetic polypeptide"
ASTKGPSVFPLAPSSKSTSGGTAALGCLVKDYFPEPVTVSWNSGALTSGVHTFPAVLQSSGLYSLSSVVTVPSSSLGTQTYICNVNHKPSNTKVDKRVEPKSSDKTHTSPPSPAPEVVGGPSVFLFPPKPKDTLMISRTPEVTCVVVDVSHEDPEVKFNWYVDGVEVHNAKTKPREEQYNSTYRVVSVLTVLHQDWLNGKEYKCKVSNKALPAPIEKTISKAKGQPREPQVYTLPPSREEMTKNQVSLTCLVKGFYPSDIAVEWESNGQPENNYKTTPPVLDSDGSFFLYSKLTVDKSRWQQGNVFSCSVMHEALHNHYTQKSLSLSPGK

SEQ ID NO: 17641 - protein, 330 aa, Artificial Sequence
  source: /note="Description of Artificial Sequence: Synthetic polypeptide"
ASTKGPSVFPLAPSSKSTSGGTAALGCLVKDYFPEPVTVSWNSGALTSGVHTFPAVLQSSGLYSLSSVVTVPSSSLGTQTYICNVNHKPSNTKVDKRVEPKSSDKTHTSPPSPAPEIIGGPSVFLFPPKPKDTLMISRTPEVTCVVVDVSHEDPEVKFNWYVDGVEVHNAKTKPREEQYNSTYRVVSVLTVLHQDWLNGKEYKCKVSNKALPAPIEKTISKAKGQPREPQVYTLPPSREEMTKNQVSLTCLVKGFYPSDIAVEWESNGQPENNYKTTPPVLDSDGSFFLYSKLTVDKSRWQQGNVFSCSVMHEALHNHYTQKSLSLSPGK

SEQ ID NO: 17642 - protein, 330 aa, Artificial Sequence
  source: /note="Description of Artificial Sequence: Synthetic polypeptide"
ASTKGPSVFPLAPSSKSTSGGTAALGCLVKDYFPEPVTVSWNSGALTSGVHTFPAVLQSSGLYSLSSVVTVPSSSLGTQTYICNVNHKPSNTKVDKRVEPKSVDKTHTVPPVPAPEALGGPSVFLFPPKPKDTLMISRTPEVTCVVVDVSHEDPEVKFNWYVDGVEVHNAKTKPREEQYNSTYRVVSVLTVLHQDWLNGKEYKCKVSNKALPAPIEKTISKAKGQPREPQVYTLPPSREEMTKNQVSLTCLVKGFYPSDIAVEWESNGQPENNYKTTPPVLDSDGSFFLYSKLTVDKSRWQQGNVFSCSVMHEALHNHYTQKSLSLSPGK

SEQ ID NO: 17643 - protein, 330 aa, Artificial Sequence
  source: /note="Description of Artificial Sequence: Synthetic polypeptide"
ASTKGPSVFPLAPSSKSTSGGTAALGCLVKDYFPEPVTVSWNSGALTSGVHTFPAVLQSSGLYSLSSVVTVPSSSLGTQTYICNVNHKPSNTKVDKRVEPKSVDKTHTVPPVPAPELAGGPSVFLFPPKPKDTLMISRTPEVTCVVVDVSHEDPEVKFNWYVDGVEVHNAKTKPREEQYNSTYRVVSVLTVLHQDWLNGKEYKCKVSNKALPAPIEKTISKAKGQPREPQVYTLPPSREEMTKNQVSLTCLVKGFYPSDIAVEWESNGQPENNYKTTPPVLDSDGSFFLYSKLTVDKSRWQQGNVFSCSVMHEALHNHYTQKSLSLSPGK

SEQ ID NO: 17644 - protein, 330 aa, Artificial Sequence
  source: /note="Description of Artificial Sequence: Synthetic polypeptide"
ASTKGPSVFPLAPSSKSTSGGTAALGCLVKDYFPEPVTVSWNSGALTSGVHTFPAVLQSSGLYSLSSVVTVPSSSLGTQTYICNVNHKPSNTKVDKRVEPKSVDKTHTVPPVPAPEAAGGPSVFLFPPKPKDTLMISRTPEVTCVVVDVSHEDPEVKFNWYVDGVEVHNAKTKPREEQYNSTYRVVSVLTVLHQDWLNGKEYKCKVSNKALPAPIEKTISKAKGQPREPQVYTLPPSREEMTKNQVSLTCLVKGFYPSDIAVEWESNGQPENNYKTTPPVLDSDGSFFLYSKLTVDKSRWQQGNVFSCSVMHEALHNHYTQKSLSLSPGK

SEQ ID NO: 17645 - protein, 330 aa, Artificial Sequence
  source: /note="Description of Artificial Sequence: Synthetic polypeptide"
ASTKGPSVFPLAPSSKSTSGGTAALGCLVKDYFPEPVTVSWNSGALTSGVHTFPAVLQSSGLYSLSSVVTVPSSSLGTQTYICNVNHKPSNTKVDKRVEPKSVDKTHTVPPVPAPEGGGGPSVFLFPPKPKDTLMISRTPEVTCVVVDVSHEDPEVKFNWYVDGVEVHNAKTKPREEQYNSTYRVVSVLTVLHQDWLNGKEYKCKVSNKALPAPIEKTISKAKGQPREPQVYTLPPSREEMTKNQVSLTCLVKGFYPSDIAVEWESNGQPENNYKTTPPVLDSDGSFFLYSKLTVDKSRWQQGNVFSCSVMHEALHNHYTQKSLSLSPGK

SEQ ID NO: 17646 - protein, 330 aa, Artificial Sequence
  source: /note="Description of Artificial Sequence: Synthetic polypeptide"
ASTKGPSVFPLAPSSKSTSGGTAALGCLVKDYFPEPVTVSWNSGALTSGVHTFPAVLQSSGLYSLSSVVTVPSSSLGTQTYICNVNHKPSNTKVDKRVEPKSVDKTHTVPPVPAPEVVGGPSVFLFPPKPKDTLMISRTPEVTCVVVDVSHEDPEVKFNWYVDGVEVHNAKTKPREEQYNSTYRVVSVLTVLHQDWLNGKEYKCKVSNKALPAPIEKTISKAKGQPREPQVYTLPPSREEMTKNQVSLTCLVKGFYPSDIAVEWESNGQPENNYKTTPPVLDSDGSFFLYSKLTVDKSRWQQGNVFSCSVMHEALHNHYTQKSLSLSPGK

SEQ ID NO: 17647 - protein, 330 aa, Artificial Sequence
  source: /note="Description of Artificial Sequence: Synthetic polypeptide"
ASTKGPSVFPLAPSSKSTSGGTAALGCLVKDYFPEPVTVSWNSGALTSGVHTFPAVLQSSGLYSLSSVVTVPSSSLGTQTYICNVNHKPSNTKVDKRVEPKSVDKTHTVPPVPAPEIIGGPSVFLFPPKPKDTLMISRTPEVTCVVVDVSHEDPEVKFNWYVDGVEVHNAKTKPREEQYNSTYRVVSVLTVLHQDWLNGKEYKCKVSNKALPAPIEKTISKAKGQPREPQVYTLPPSREEMTKNQVSLTCLVKGFYPSDIAVEWESNGQPENNYKTTPPVLDSDGSFFLYSKLTVDKSRWQQGNVFSCSVMHEALHNHYTQKSLSLSPGK

SEQ ID NO: 17648 - protein, 449 aa, Artificial Sequence; identical to SEQ ID NO: 6969
  source: /note="Description of Artificial Sequence: Synthetic polypeptide"

SEQ ID NO: 17649 - protein, 445 aa, Artificial Sequence; identical to SEQ ID NO: 6773
  source: /note="Description of Artificial Sequence: Synthetic polypeptide"

SEQ ID NO: 17650 - protein, 449 aa, Artificial Sequence; identical to SEQ ID NO: 17507
  source: /note="Description of Artificial Sequence: Synthetic polypeptide"

SEQ ID NO: 17651 - protein, 449 aa, Artificial Sequence
  source: /note="Description of Artificial Sequence: Synthetic polypeptide"
QVQLVESGPGVVQPGRSLRISCAVSGFSVTNYGVHWVRQPPGKGLEWLGVIWAGGITNYNSAFMSRLTISKDNSKNTVYLQMNSLRAEDTAMYYCASRGGHYGYALDYWGQGTLVTVSSASTKGPSVFPLAPSSKSTSGGTAALGCLVKDYFPEPVTVSWNSGALTSGVHTFPAVLQSSGLYSLSSVVTVPSSSLGTQTYICNVNHKPSNTKVDKRVEPKSCDKTHTCPPCPAPELLGGPSVFLFPPKPKDTLMISRTPEVTCVVVDVSHEDPEVKFNWYVDGVEVHNAKTKPREEQYNSTYRVVSVLTVLHQDWLNGKEYKCKVSNKALPAPIEKTISKAKGQPREPQVYTLPPSRDELTKNQVSLTCLVKGFYPSDIAVEWESNGQPENNYKTTPPVLDSDGSFFLYSKLTVDKSRWQQGNVFSCSVMHEALHNHYTQKSLSLSPGK

SEQ ID NO: 17652 - protein, 446 aa, Artificial Sequence
  source: /note="Description of Artificial Sequence: Synthetic polypeptide"
QVQLKESGPGLVAPSQSLSITCTVSGFSVTNYGVHWVRQPPGKGLEWLGVIWAGGITNYNSAFMSRLSISKDNSKSQVFLKMNSLQIDDTAMYYCASRGGHYGYALDYWGQGTSVTVSSASTKGPSVFPLAPCSRSTSESTAALGCLVKDYFPEPVTVSWNSGALTSGVHTFPAVLQSSGLYSLSSVVTVPSSSLGTKTYTCNVDHKPSNTKVDKRVESKYGPPCPSCPAPEFLGGPSVFLFPPKPKDTLMISRTPEVTCVVVDVSQEDPEVQFNWYVDGVEVHNAKTKPREEQFNSTYRVVSVLTVLHQDWLNGKEYKCKVSNKGLPSSIEKTISKAKGQPREPQVYTLPPSQEEMTKNQVSLTCLVKGFYPSDIAVEWESNGQPENNYKTTPPVLDSDGSFFLYSRLTVDKSRWQEGNVFSCSVMHEALHNHYTQKSLSLSLGK

SEQ ID NO: 17653 - protein, 446 aa, Artificial Sequence; identical to SEQ ID NO: 17513
  source: /note="Description of Artificial Sequence: Synthetic polypeptide"

SEQ ID NO: 17654 - protein, 449 aa, Artificial Sequence; identical to SEQ ID NO: 17507
  source: /note="Description of Artificial Sequence: Synthetic polypeptide"

SEQ ID NO: 17655 - protein, 446 aa, Artificial Sequence; identical to SEQ ID NO: 17652
  source: /note="Description of Artificial Sequence: Synthetic polypeptide"

SEQ ID NO: 17656 - protein, 446 aa, Artificial Sequence; identical to SEQ ID NO: 17652
  source: /note="Description of Artificial Sequence: Synthetic polypeptide"

SEQ ID NO: 17657 - protein, 448 aa, Artificial Sequence; identical to SEQ ID NO: 17512
  source: /note="Description of Artificial Sequence: Synthetic polypeptide"

SEQ ID NO: 17658 - protein, 446 aa, Artificial Sequence; identical to SEQ ID NO: 17513
  source: /note="Description of Artificial Sequence: Synthetic polypeptide"

SEQ ID NO: 17659 - protein, 449 aa, Artificial Sequence; identical to SEQ ID NO: 17514
  source: /note="Description of Artificial Sequence: Synthetic polypeptide"

SEQ ID NO: 17660 - protein, 569 aa, Homo sapiens
EVQLVESGGGLVQPGGSLRLSCAASGFTVSGSYMSWVRQAPGKGLEWVSVIYSGGSTYYADSVKGRFTISRDNSKNTLYLQMNSLRAEDTAVYYCARDLRGSYDYWGQGTLVIVSSGSASAPTLFPLVSCENSPSDTSSVAVGCLAQDFLPDSITFSWKYKNNSDISSTRGFPSVLRGGKYAATSQVLLPSKDVMQGTDEHVVCKVQHPNGNKEKNVPLPVIAELPPKVSVFVPPRDGFFGNPRKSKLICQATGFSPRQIQVSWLREGKQVGSGVTTDQVQAEAKESGPTTYKVTSTLTIKESDWLSQSMFTCRVDHRGLTFQQNASSMCVPDQDTAIRVFAIPPSFASIFLTKSTKLTCLVTDLTTYDSVTISWTRQNGEAVKTHTNISESHPNATFSAVGEASICEDDWNSGERFTCTVTHTDLPSPLKQTISRPKGVALHRPDVYLLPPAREQLNLRESATITCLVTGFSPADVFVQWMQRGQPLSPEKYVTSAPMPEPQAPGRYFAHSILTVSEEEWNTGETYTCVVAHEALPNRVTERTVDKSTGKPTLYNVSLVMSDTAGTCY

SEQ ID NO: 17661 - protein, 454 aa, Homo sapiens
QVQLVESGGGVVQPGRSLRLSCAASGFTFSNFGMHWVRQAPGKGLEWVAYISSGGSSINYADTVKGRFTISRDNSKNTLYLQMNSLRAEDTAVYYCTRGGTGTRSLYYFDYWGQGTTVTVSSDIPSTKGPSVFPLAPSSKSTSGGTAALGCLVKDYFPEPVTVSWNSGALTSGVHTFPAVLQSSGLYSLSSVVTVPSSSLGTQTYICNVNHKPSNTKVDKKVEPKSCDKTHTCPPCPAPELLGGPSVFLFPPKPKDTLMISRTPEVTCVVVDVSHEDPEVKFNWYVDGVEVHNAKTKPREEQYNSTYRVVSVLTVLHQDWLNGKEYKCKVSNKALPAPIEKTISKAKGQPREPQVYTLPPSRDELTKNQVSLTCLVKGFYPSDIAVEWESNGQPENNYKTTPPVLDSDGSFFLYSKLTVDKSRWQQGNVFSCSVMHEALHNHYTQKSLSLSPGK

SEQ ID NO: 17662 - protein, 454 aa, Homo sapiens
DVQLVESGGGLVQPGGSRKLSCAASGFTFSNFGMHWVRQAPEKGLEWVAYISSGGSSINYADTVKGRFTISRDNPKNTLFLQMTSLRSEDTAIYYCTRGGTGTRSLYYFDYWGQGATLIVSSDIPSTKGPSVFPLAPSSKSTSGGTAALGCLVKDYFPEPVTVSWNSGALTSGVHTFPAVLQSSGLYSLSSVVTVPSSSLGTQTYICNVNHKPSNTKVDKKVEPKSCDKTHTCPPCPAPELLGGPSVFLFPPKPKDTLMISRTPEVTCVVVDVSHEDPEVKFNWYVDGVEVHNAKTKPREEQYNSTYRVVSVLTVLHQDWLNGKEYKCKVSNKALPAPIEKTISKAKGQPREPQVYTLPPSRDELTKNQVSLTCLVKGFYPSDIAVEWESNGQPENNYKTTPPVLDSDGSFFLYSKLTVDKSRWQQGNVFSCSVMHEALHNHYTQKSLSLSPGK

SEQ ID NO: 17663 - protein, 447 aa, Artificial Sequence; identical to SEQ ID NO: 12999
  source: /note="Description of Artificial Sequence: Synthetic polypeptide"

SEQ ID NO: 17664 - protein, 449 aa, Artificial Sequence; identical to SEQ ID NO: 17565
  source: /note="Description of Artificial Sequence: Synthetic polypeptide"

SEQ ID NO: 17665 - protein, 443 aa, Artificial Sequence
  source: /note="Description of Artificial Sequence: Synthetic polypeptide"
EVQLLESGGGLVQPGGSLRLSCAASGFTFNNTYMSWVRQAPGKGLEWVSGIYPKSGTTDYADSVKGRFTISRDNSKNTLYLQMNSLRAEDTAVYYCARFRVLFDYWGQGTLVTVSSASTKGPSVFPLAPSSKSTSGGTAALGCLVKDYFPEPVTVSWNSGALTSGVHTFPAVLQSSGLYSLSSWTVPSSSLGTQTYICNVNHKPSNTKVDKKVEPKSCDKTHTCPPCPAPELLGGPSVFLFPPKPKDTLMISRTPEVTCVWDVSHEDPEVKFNWYVDGVEVHNAKTKPREEQYNSTYRWSVLTVLHQDWLNGKEYKCKVSNKALPAPIEKTISKAKGQPREPQVYTLPPSREEMTKNQVSLTCLVKGFYPSDIAVEWESNGQPENNYKTTPPVLDSDGSFFLYSKLTVDKSRWQQGNVFSCSVMHEALHNHYTQKSLSLSPGK

SEQ ID NO: 17666 - protein, 443 aa, Artificial Sequence
  source: /note="Description of Artificial Sequence: Synthetic polypeptide"
EVQLLESGGGLVQPGGSLRLSCAASGFTFSGSAMSWVRQAPGKGLEWVSLIRPSRGVTNYADSVKGRFTISRDNSKNTLYLQMNSLRAEDTAVYYCARRGFWFDYWGQGTLVTVSSASTKGPSVFPLAPSSKSTSGGTAALGCLVKDYFPEPVTVSWNSGALTSGVHTFPAVLQSSGLYSLSSWTVPSSSLGTQTYICNVNHKPSNTKVDKKVEPKSCDKTHTCPPCPAPELLGGPSVFLFPPKPKDTLMISRTPEVTCVWDVSHEDPEVKFNWYVDGVEVHNAKTKPREEQYNSTYRWSVLTVLHQDWLNGKEYKCKVSNKALPAPIEKTISKAKGQPREPQVYTLPPSREEMTKNQVSLTCLVKGFYPSDIAVEWESNGQPENNYKTTPPVLDSDGSFFLYSKLTVDKSRWQQGNVFSCSVMHEALHNHYTQKSLSLSPGK

SEQ ID NO: 17667 - protein, 373 aa, Artificial Sequence
  source: /note="Description of Artificial Sequence: Synthetic polypeptide"
EVQLLESGGGLVQPGGSLRLSCAASGFTFSGSGMSWVRQAPGKGLEWVSSIWPEGGYTYYADSVKGRFTISRDNSKNTLYLQMNSLRAEDTAVYYCARFVFLFDYWGQGTLVTVSSASTKGPSVFPLAPLSSWTVPSSSLGTQTYICNVNHKPSNTKVDKKVEPKSCDKTHTCPPCPALFPPKPKDTLMISRTPEVTCVWDVSHEDPEVKFNWYVDGVEVHNAKTKPREEQYNSTYRVVSVLTVLHQDWLNGKEYKCKVSNKALPAPIEKTISKAKGQPREPQVYTLPPSREEMTKNQVSLTCLVKGFYPSDIAVEWESNGQPENNYKTTPPVLDSDGSFFLYSKLTVDKSRWQQGNLHNHYTQKSLSLSPGK

SEQ ID NO: 17668 - protein, 376 aa, Artificial Sequence
  source: /note="Description of Artificial Sequence: Synthetic polypeptide"
EVQLLESGGGLVQPGGSLRLSCAASGFTFNDNYMSWVRQAPGKGLEWVSSIRSGGGVTRYADSVKGRFTISRDNSKNTLYLQMNSLRAEDTAVYYCARHHYSVQGGLDYWGQGTLVTVSSASTKGPSVFPLAPLSSWTVPSSSLGTQTYICNVNHKPSNTKVDKKVEPKSCDKTHTCPPCPALFPPKPKDTLMISRTPEVTCWVDVSHEDPEVKFNWYVDGVEVHNAKTKPREEQYNSTYRWSVLTVLHQDWLNGKEYKCKVSNKALPAPIEKTISKAKGQPREPQVYTLPPSREEMTKNQVSLTCLVKGFYPSDIAVEWESNGQPENNYKTTPPVLDSDGSFFLYSKLTVDKSRWQQGNLHNHYTQKSLSLSPGK

SEQ ID NO: 17669 - protein, 373 aa, Artificial Sequence
  source: /note="Description of Artificial Sequence: Synthetic polypeptide"
EVQLLESGGGLVQPGGSLRLSCAASGFTFSNNAMSWVRQAPGKGLEWVSAISGSGGSTYYADSVKGRFTISRDNSKNTLYLQMNSLRAEDTAVYYCARHFLLFDYWGQGTLVTVSSASTKGPSVFPLAPLSSWTVPSSSLGTQTYICNVNHKPSNTKVDKKVEPKSCDKTHTCPPCPALFPPKPKDTLMISRTPEVTCVWDVSHEDPEVKFNWYVDGVEVHNAKTKPREEQYNSTYRVVSVLTVLHQDWLNGKEYKCKVSNKALPAPIEKTISKAKGQPREPQVYTLPPSREEMTKNQVSLTCLVKGFYPSDIAVEWESNGQPENNYKTTPPVLDSDGSFFLYSKLTVDKSRWQQGNLHNHYTQKSLSLSPGK

SEQ ID NO: 17670 - protein, 376 aa, Artificial Sequence
  source: /note="Description of Artificial Sequence: Synthetic polypeptide"
EVQLLESGGGLVQPGGSLRLSCAASGFTFSDYYMSWVRQAPGKGLEWVSSIASSDGYTNYADSVKGRFTISRDNSKNTLYLQMNSLRAEDTAVYYCARSYAYQYRGLDYWGQGTLVTVSSASTKGPSVFPLAPLSSWTVPSSSLGTQTYICNVNHKPSNTKVDKKVEPKSCDKTHTCPPCPALFPPKPKDTLMISRTPEVTCVWDVSHEDPEVKFNWYVDGVEVHNAKTKPREEQYNSTYRWSVLTVLHQDWLNGKEYKCKVSNKALPAPIEKTISKAKGQPREPQVYTLPPSREEMTKNQVSLTCLVKGFYPSDIAVEWESNGQPENNYKTTPPVLDSDGSFFLYSKLTVDKSRWQQGNLHNHYTQKSLSLSPGK

SEQ ID NO: 17671 - protein, 374 aa, Artificial Sequence
  source: /note="Description of Artificial Sequence: Synthetic polypeptide"
EVQLLESGGGLVQPGGSLRLSCAASGFTVTRSVIWWVRQAPGKGLEWVSGIGPGGGWTRYADSVKGRFTISRDNSKNTLYLQMNSLRAEDTAVYYCARSIGRRVFDYWGQGTLVTVSSASTKGPSVFPLAPLSSWTVPSSSLGTQTYICNVNHKPSNTKVDKKVEPKSCDKTHTCPPCPALFPPKPKDTLMISRTPEVTCVWDVSHEDPEVKFNWYVDGVEVHNAKTKPREEQYNSTYRWSVLTVLHQDWLNGKEYKCKVSNKALPAPIEKTISKAKGQPREPQVYTLPPSREEMTKNQVSLTCLVKGFYPSDIAVEWESNGQPENNYKTTPPVLDSDGSFFLYSKLTVDKSRWQQGNLHNHYTQKSLSLSPGK

SEQ ID NO: 17672 - protein, 446 aa, Artificial Sequence
  source: /note="Description of Artificial Sequence: Synthetic polypeptide"
EVQLLESGGGLVQPGGSLRLSCAASGFTFTGSTMNWVRQAPGKGLEWVSRIGPEGGGTDYADSVKGRFTISRDNSKNTLYLQMNSLRAEDTAVYYCARGIIIFDYWGQGTLVTVSSASTKGPSVFPLAPSSKSTSGGTAALGCLVKDYFPEPVTVSWNSGALTSGVHTFPAVLQSSGLYSLSSVVTVPSSSLGTQTYICNVNHKPSNTKVDKKVEPKSCDKTHTCPPCPAPELLGGPSVFLFPPKPKDTLMISRTPEVTCVVVDVSHEDPEVKFNWYVDGVEVHNAKTKPREEQYNSTYRVVSVLTVLHQDWLNGKEYKCKVSNKALPAPIEKTISKAKGQPREPQVYTLPPSREEMTKNQVSLTCLVKGFYPSDIAVEWESNGQPENNYKTTPPVLDSDGSFFLYSKLTVDKSRWQQGNVFSCSVMHEALHNHYTQKSLSLSPGK

SEQ ID NO: 17673 - protein, 373 aa, Artificial Sequence
  source: /note="Description of Artificial Sequence: Synthetic polypeptide"
EVQLLESGGGLVQPGGSLRLSCAASGFTFSDYYMSWVRQAPGKGLEWVSGIGPGGGWTRYADSVKGRFTISRDNSKNTLYLQMNSLRAEDTAVYYCARSIGRRVFDYGQGTLVTVSSASTKGPSVFPLAPLSSWTVPSSSLGTQTYICNVNHKPSNTKVDKKVEPKSCDKTHTCPPCPALFPPKPKDTLMISRTPEVTCVWDVSHEDPEVKFNWYVDGVEVHNAKTKPREEQYNSTYRWSVLTVLHQDWLNGKEYKCKVSNKALPAPIEKTISKAKGQPREPQVYTLPPSREEMTKNQVSLTCLVKGFYPSDIAVEWESNGQPENNYKTTPPVLDSDGSFFLYSKLTVDKSRWQQGNLHNHYTQKSLSLSPGK

SEQ ID NO: 17674 - protein, 376 aa, Artificial Sequence; identical to SEQ ID NO: 17670
  source: /note="Description of Artificial Sequence: Synthetic polypeptide"

SEQ ID NO: 17675 - protein, 446 aa, Artificial Sequence
  source: /note="Description of Artificial Sequence: Synthetic polypeptide"
EVQLLESGGGLVQPGGSLRLSCEASGFTFSSNSMSWVRQAPGKGLEWVSSITPSNSATYYADSVKGRFTISRDNSKNTLYLQMNSLRAEDTAVYYCARRAFWFDYWGQGTLVTVSSASTKGPSVFPLAPSSKSTSGGTAALGCLVKDYFPEPVTVSWNSGALTSGVHTFPAVLQSSGLYSLSSVVTVPSSSLGTQTYICNVNHKPSNTKVDKKVEPKSCDKTHTCPPCPAPELLGGPSVFLFPPKPKDTLMISRTPEVTCVVVDVSHEDPEVKFNWYVDGVEVHNAKTKPREEQYNSTYRVVSVLTVLHQDWLNGKEYKCKVSNKALPAPIEKTISKAKGQPREPQVYTLPPSREEMTKNQVSLTCLVKGFYPSDIAVEWESNGQPENNYKTTPPVLDSDGSFFLYSKLTVDKSRWQQGNVFSCSVMHEALHNHYTQKSLSLSPGK

SEQ ID NO: 17676 - protein, 446 aa, Artificial Sequence
  source: /note="Description of Artificial Sequence: Synthetic polypeptide"
EVQLLESGGGLVQPGGSLRLSCAASGFTFNRTDMSWVRQAPGKGLEWVSGINSYGGATNYADSVKGRFTISRDNSKNTLYLQMNSLRAEDTAVYYCARRGLWFDYWGQGTLVTVSSASTKGPSVFPLAPSSKSTSGGTAALGCLVKDYFPEPVTVSWNSGALTSGVHTFPAVLQSSGLYSLSSVVTVPSSSLGTQTYICNVNHKPSNTKVDKKVEPKSCDKTHTCPPCPAPELLGGPSVFLFPPKPKDTLMISRTPEVTCVVVDVSHEDPEVKFNWYVDGVEVHNAKTKPREEQYNSTYRVVSVLTVLHQDWLNGKEYKCKVSNKALPAPIEKTISKAKGQPREPQVYTLPPSREEMTKNQVSLTCLVKGFYPSDIAVEWESNGQPENNYKTTPPVLDSDGSFFLYSKLTVDKSRWQQGNVFSCSVMHEALHNHYTQKSLSLSPGK

SEQ ID NO: 17677 - protein, 443 aa, Artificial Sequence
  source: /note="Description of Artificial Sequence: Synthetic polypeptide"
EVQLLESGGGLVQPGGSLRLSCAASGFTFTRSAMSWVRQAPGKGLEWVSSISPNSWTNYADSVKGRFTISRDNSKNTLYLQMNSLRAEDTAVYYCARRGLVFDYWGQGTLVTVSSASTKGPSVFPLAPSSKSTSGGTAALGCLVKDYFPEPVTVSWNSGALTSGVHTFPAVLQSSGLYSLSSWTVPSSSLGTQTYICNVNHKPSNTKVDKKVEPKSCDKTHTCPPCPAPELLGGPSVFLFPPKPKDTLMISRTPEVTCVWDVSHEDPEVKFNWYVDGVEVHNAKTKPREEQYNSTYRVVSVLTVLHQDWLNGKEYKCKVSNKALPAPIEKTISKAKGQPREPQVYTLPPSREEMTKNQVSLTCLVKGFYPSDIAVEWESNGQPENNYKTTPPVLDSDGSFFLYSKLTVDKSRWQQGNVFSCSVMHEALHNHYTQKSLSLSPGK

SEQ ID NO: 17678 - protein, 380 aa, Artificial Sequence
  source: /note="Description of Artificial Sequence: Synthetic polypeptide"
EVQLLESGGGLVQPGGSLRLSCAASGFTFSSYRMNWVRQAPGKGLEWVSVISPGGGWTNYADSVKGRFTISRDNSKNTLYLQMNSLRAEDTAVYYCARTSTSSDYYYYGLDYWGQGTLVTVSSASTKGPSVFPLAPLSSVVTVPSSSLGTQTYICNVNHKPSNTKVDKKVEPKSCDKTHTCPPCPALFPPKPKDTLMISRTPEVTCVWDVSHEDPEVKFNWYVDGVEVHNAKTKPREEQYNSTYRWSVLTVLHQDWLNGKEYKCKVSNKALPAPIEKTISKAKGQPREPQVYTLPPSREEMTKNQVSLTCLVKGFYPSDIAVEWESNGQPENNYKTTPPVLDSDGSFFLYSKLTVDKSRWQQGNLHNHYTQKSLSLSPGK

SEQ ID NO: 17679 - protein, 373 aa, Artificial Sequence
  source: /note="Description of Artificial Sequence: Synthetic polypeptide"
EVQLLESGGGLVQPGGSLRLSCEASGFTFSSNSMSWVRQAPGKGLEWVSSITPSNSATYYADSVKGRFTISRDNSKNTLYLQMNSLRAEDTAVYYCARRAFWFDYWGQGTLVTVSSASTKGPSVFPLAPLSSWTVPSSSLGTQTYICNVNHKPSNTKVDKKVEPKSCDKTHTCPPCPALFPPKPKDTLMISRTPEVTCVWDVSHEDPEVKFNWYVDGVEVHNAKTKPREEQYNSTYRVVSVLTVLHQDWLNGKEYKCKVSNKALPAPIEKTISKAKGQPREPQVYTLPPSREEMTKNQVSLTCLVKGFYPSDIAVEWESNGQPENNYKTTPPVLDSDGSFFLYSKLTVDKSRWQQGNLHNHYTQKSLSLSPGK

SEQ ID NO: 17680 - protein, 215 aa, Artificial Sequence
  source: /note="Description of Artificial Sequence: Synthetic polypeptide"
QVQLQQWGAGLLKPSETLSLTCAVYGGSFSGYYWSWIRQPPGKGLEWIGEINHSGSTNYNPSLKSRVTISVETSKNQFSLKLSSVTAADTAVYYCARDKWTWYFDLWGRGTLVTVSSASTKGPSVFPLAPSSKSTSGGTAALGCLVKDYFPEPVTVSWNSGALTSGVHTFPAVLQSSGLYSLSSVVTVPSSSLGTQTYICNVNHKPSNTKVDKKV

SEQ ID NO: 17681 - protein, 216 aa, Artificial Sequence
  source: /note="Description of Artificial Sequence: Synthetic polypeptide"
QVQLQESGGGLVKPGGSLRLSCAASGFTFSSYWMSWVRQAPGKGLEWVANINRDGSASYYVDSVKGRFTISRDDAKNSLYLQMNSLRAEDTAVYYCARDRGVGYFDLWGRGTLVTVSSASTKGPSVFPLAPSSKSTSGGTAALGCLVKDYFPEPVTVSWNSGALTSGVHTFPAVLQSSGLYSLSSVVTVPSSSLGTQTYICNVNHKPSNTKVDKKV

SEQ ID NO: 17682 - protein, 220 aa, Artificial Sequence
  source: /note="Description of Artificial Sequence: Synthetic polypeptide"
EVQLLESGGGLVQPGGSLRLSCAASGFTFSAYGMGWVRQAPGKGLEWVSYISPSGGHTKYADSVKGRFTISRDNSKNTLYLQMNSLRAEDTAVYYCAKVLETGLLVDAFDIWGQGTMVTVSSASTKGPSVFPLAPSSKSTSGGTAALGCLVKDYFPEPVTVSWNSGALTSGVHTFPAVLQSSGLYSLSSVVTVPSSSLGTQTYICNVNHKPSNTKVDKKV

SEQ ID NO: 17683 - protein, 216 aa, Artificial Sequence
  source: /note="Description of Artificial Sequence: Synthetic polypeptide"
EVQLLESGGGLVQPGGSLRLSCAASGFTFSWYGMGWVRQAPGKGLEWVSYISPSGGITVYADSVKGRFTISRDNSKNTLYLQMNSLRAEDTAVYYCARLNYYYGLDVWGQGTTVTVSSASTKGPSVFPLAPSSKSTSGGTAALGCLVKDYFPEPVTVSWNSGALTSGVHTFPAVLQSSGLYSLSSVVTVPSSSLGTQTYICNVNHKPSNTKVDKKV

SEQ ID NO: 17684 - protein, 216 aa, Artificial Sequence
  source: /note="Description of Artificial Sequence: Synthetic polypeptide"
EVQLLESGGGLVQPGGSLRLSCAASGFTFSAYNMRWVRQAPGKGLEWVSVIYPSGGATRYADSVKGRFTISRDNSKNTLYLQMNSLRAEDTAVYYCARGYYYYGMDVWGQGTLVTVSSASTKGPSVFPLAPSSKSTSGGTAALGCLVKDYFPEPVTVSWNSGALTSGVHTFPAVLQSSGLYSLSSVVTVPSSSLGTQTYICNVNHKPSNTKVDKKV

SEQ ID NO: 17685 - protein, 217 aa, Artificial Sequence
  source: /note="Description of Artificial Sequence: Synthetic polypeptide"
EVQLLESGGGLVQPGGSLRLSCAASGFTFSRYGMWWVRQAPGKGLEWVSYIGSSGGPTYYVDSVKGRFTISRDNSKNTLYLQMNSLRAEDTAVYYCAGGRGTPYYFDSWGQGTLVTVSSASTKGPSVFPLAPSSKSTSGGTAALGCLVKDYFPEPVTVSWNSGALTSGVHTFPAVLQSSGLYSLSSVVTVPSSSLGTQTYICNVNHKPSNTKVDKKV

SEQ ID NO: 17686 - protein, 218 aa, Artificial Sequence
  source: /note="Description of Artificial Sequence: Synthetic polypeptide"
EVQLLESGGGLVQPGGSLRLSCAASGFTFSIYRMQWVRQAPGKGLEWVSGISPSGGTTWYADSVKGRFTISRDNSKNTLYLQMNSLRAEDTAVYYCARWSGGSGYAFDIWGQGTMVTVSSASTKGPSVFPLAPSSKSTSGGTAALGCLVKDYFPEPVTVSWNSGALTSGVHTFPAVLQSSGLYSLSSVVTVPSSSLGTQTYICNVNHKPSNTKVDKKV

SEQ ID NO: 17687 - protein, 222 aa, Artificial Sequence
  source: /note="Description of Artificial Sequence: Synthetic polypeptide"
EVQLLESGGGLVQPGGSLRLSCAASGFTFSNYPMYWVRQAPGKGLEWVSRISSSGGRTVYADSVKGRFTISRDNSKNTLYLQMNSLRAEDTAVYYCARDRWSRSAAEYGLGGYWGQGTLVTVSSASTKGPSVFPLAPSSKSTSGGTAALGCLVKDYFPEPVTVSWNSGALTSGVHTFPAVLQSSGLYSLSSVVTVPSSSLGTQTYICNVNHKPSNTKVDKKV

SEQ ID NO: 17688 - protein, 228 aa, Artificial Sequence
  source: /note="Description of Artificial Sequence: Synthetic polypeptide"
EVQLVQSGAEVKKPGSSVKVSCKASGGTFSSYAISWVRQAPGQGLEWMGGIIPIFGTANYAQKFQGRVTITADKSTSTAYMELSSLRSEDTAVYYCARAPLRFLEWSTQDHYYYYYMDVWGKGTTVTVSSASTKGPSVFPLAPSSKSTSGGTAALGCLVKDYFPEPVTVSWNSGALTSGVHTFPAVLQSSGLYSLSSVVTVPSSSLGTQTYICNVNHKPSNTKVDKKV

SEQ ID NO: 17689 - protein, 223 aa, Artificial Sequence
  source: /note="Description of Artificial Sequence: Synthetic polypeptide"
EVQLLESGGGLVQPGGSLRLSCTASGFTFSSYAMNWVRQAPGKGLEWVSAISGSGGTTFYADSVKGRFTISRDNSRTTLYLQMNSLRAEDTAVYYCAKDLGWSDSYYYYYGMDVWGQGTTVTVSSASTKGPSVFPLAPSSKSTSGGTAALGCLVKDYFPEPVTVSWNSGALTSGVHTFPAVLQSSGLYSLSSVVTVPSSSLGTQTYICNVNHKPSNTKVDKKV

SEQ ID NO: 17690 - protein, 217 aa, Artificial Sequence
  source: /note="Description of Artificial Sequence: Synthetic polypeptide"
QVQLQESGPGLVKPSGTLSLTCAVSGGSISSSNWWSWVRQPPGKGLEWIGEIYHSGSTNYNPSLKSRVTISVDKSKNQFSLKLSSVTAADTAVYYCARWTGRTDAFDIWGQGTMVTVSSASTKGPSVFPLAPSSKSTSGGTAALGCLVKDYFPEPVTVSWNSGALTSGVHTFPAVLQSSGLYSLSSVVTVPSSSLGTQTYICNVNHKPSNTKVDKKV

SEQ ID NO: 17691 - protein, 331 aa, Artificial Sequence
  source: /note="Description of Artificial Sequence: Synthetic polypeptide"
ASTTAPSVFPLAPSCGSTSGSTVALACLVSGYFPEPVTVSWNSGSLTSGVHTFPSVLQSSGLHSLSSMVTVPSSRWPSETFTCNVVHPASNTKVDKPVFNECRCTDTPPCPVPEPLGGPSVLIFPPKPKDILRITRTPEVTCVVLDLGREDPEVQISWFVDGKEVHTAKTQSREQQFNGTYRVVSVLPIEHQDWLTGKEFKCRVNHIDLPSPIERTISKARGRAHKPSVYVLPPSPKELSSSDTVSITCLIKDFYPPDIDVEWQSNGQQEPERKHRMTPPQLDEDGSYFLYSKLSVDKSRWQQGDPFTCAVMHETLQNHYTDLSLSHSPGK

SEQ ID NO: 17692 - protein, 335 aa, Artificial Sequence
  source: /note="Description of Artificial Sequence: Synthetic polypeptide"
ASTTAPSVFPLAPSCGSTSGSTVALACLVSGYFPEPVTVSWNSGSLTSGVHTFPSVLQSSGLYSLSSMVTVPSSRWPSETFTCNVAHPASKTKVDKPVPKRENGRVPRPPDCPKCPAPEMLGGPSVFIFPPKPKDTLLIARTPEVTCVVVDLDPEDPEVQISWFVDGKQMQTAKTQPREEQFNGTYRVVSVLPIGHQDWLKGKQFTCKVNNKALPSPIERTISKARGQAHQPSVYVLPPSREELSKNTVSLTCLIKDFYPPDIDVEWQSNGQQEPESKYRTTPPQLDEDGSYFLYSKLSVDKSRWQRGDTFICAVMHEALHNHYTQESLSHSPGK

SEQ ID NO: 17693 - protein, 333 aa, Artificial Sequence
  source: /note="Description of Artificial Sequence: Synthetic polypeptide"
ASTTAPSVFPLAPSCGSQSGSTVALACLVSGYIPEPVTVSWNSVSLTSGVHTFPSVLQSSGLYSLSSMVTVPSSRWPSETFTCNVAHPATNTKVDKPVAKECECKCNCNNCPCPGCGLLGGPSVFIFPPKPKDILVTARTPTVTCVVVDLDPENPEVQISWFVDSKQVQTANTQPREEQSNGTYRVVSVLPIGHQDWLSGKQFKCKVNNKALPSPIEEIISKTPGQAHQPNVYVLPPSRDEMSKNTVTLTCLVKDFFPPEIDVEWQSNGQQEPESKYRMTPPQLDEDGSYFLYSKLSVDKSRWQRGDTFICAVMHEALHNHYTQISLSHSPGK

SEQ ID NO: 17694 - protein, 331 aa, Artificial Sequence
  source: /note="Description of Artificial Sequence: Synthetic polypeptide"
ASTTAPSVFPLAPSCGSTSGSTVALACLVSGYFPEPVTVSWNSGSLTSGVHTFPSVLQSSGLYSLSSTVTVPSSRWPSETFTCNVVHPASNTKVDKPVPKESTCKCISPCPVPESLGGPSVFIFPPKPKDILRITRTPEITCVVLDLGREDPEVQISWFVDGKEVHTAKTQPREQQFNSTYRVVSVLPIEHQDWLTGKEFKCRVNHIGLPSPIERTISKARGQAHQPSVYVLPPSPKELSSSDTVTLTCLIKDFYPPEIDVEWQSNGQPEPESKYHTTAPQLDEDGSYFLYSKLSVDKSRWQQGDTFTCAVMHEALQNHYTDLSLSHSPGK

SEQ ID NO: 17695 - protein, 331 aa, Artificial Sequence
  source: /note="Description of Artificial Sequence: Synthetic polypeptide"
ASTTAPSVFPLAPSCGSTSGSTVALACLVSGYFPEPVTVSWNSGSLTSGVHTFPSVLQSSGLHSLSSMVTVPSSRWPSETFTCNVVHPASNTKVDKPVFNECRCTDTPPCPVPEPLGGPSVLIFPPKPKDILRITRTPEVTCVVLDLGREDPEVQISWFVDGKEVHTAKTQSREQQFAGTYRVVSVLPIEHQDWLTGKEFKCRVNHIDLPSPIERTISKARGRAHKPSVYVLPPSPKELSSSDTVSITCLIKDFYPPDIDVEWQSNGQQEPERKHRMTPPQLDEDGSYFLYSKLSVDKSRWQQGDPFTCAVMHETLQNHYTDLSLSHSPGK

SEQ ID NO: 17696 - protein, 335 aa, Artificial Sequence
  source: /note="Description of Artificial Sequence: Synthetic polypeptide"
ASTTAPSVFPLAPSCGSTSGSTVALACLVSGYFPEPVTVSWNSGSLTSGVHTFPSVLQSSGLYSLSSMVTVPSSRWPSETFTCNVAHPASKTKVDKPVPKRENGRVPRPPDCPKCPAPEMLGGPSVFIFPPKPKDTLLIARTPEVTCVVVDLDPEDPEVQISWFVDGKQMQTAKTQPREEQFAGTYRVVSVLPIGHQDWLKGKQFTCKVNNKALPSPIERTISKARGQAHQPSVYVLPPSREELSKNTVSLTCLIKDFYPPDIDVEWQSNGQQEPESKYRTTPPQLDEDGSYFLYSKLSVDKSRWQRGDTFICAVMHEALHNHYTQESLSHSPGK

SEQ ID NO: 17697 - protein, 333 aa, Artificial Sequence
  source: /note="Description of Artificial Sequence: Synthetic polypeptide"
ASTTAPSVFPLAPSCGSQSGSTVALACLVSGYIPEPVTVSWNSVSLTSGVHTFPSVLQSSGLYSLSSMVTVPSSRWPSETFTCNVAHPATNTKVDKPVAKECECKCNCNNCPCPGCGLLGGPSVFIFPPKPKDILVTARTPTVTCVVVDLDPENPEVQISWFVDSKQVQTANTQPREEQSAGTYRVVSVLPIGHQDWLSGKQFKCKVNNKALPSPIEEIISKTPGQAHQPNVYVLPPSRDEMSKNTVTLTCLVKDFFPPEIDVEWQSNGQQEPESKYRMTPPQLDEDGSYFLYSKLSVDKSRWQRGDTFICAVMHEALHNHYTQISLSHSPGK

SEQ ID NO: 17698 - protein, 331 aa, Artificial Sequence
  source: /note="Description of Artificial Sequence: Synthetic polypeptide"
ASTTAPSVFPLAPSCGSTSGSTVALACLVSGYFPEPVTVSWNSGSLTSGVHTFPSVLQSSGLYSLSSTVTVPSSRWPSETFTCNVVHPASNTKVDKPVPKESTCKCISPCPVPESLGGPSVFIFPPKPKDILRITRTPEITCVVLDLGREDPEVQISWFVDGKEVHTAKTQPREQQFASTYRVVSVLPIEHQDWLTGKEFKCRVNHIGLPSPIERTISKARGQAHQPSVYVLPPSPKELSSSDTVTLTCLIKDFYPPEIDVEWQSNGQPEPESKYHTTAPQLDEDGSYFLYSKLSVDKSRWQQGDTFTCAVMHEALQNHYTDLSLSHSPGK

SEQ ID NO: 17699 - protein, 330 aa, Artificial Sequence; identical to SEQ ID NO: 3889
  source: /note="Description of Artificial Sequence: Synthetic polypeptide"

SEQ ID NO: 17700 - protein, 330 aa, Mus musculus; identical to SEQ ID NO: 12484

SEQ ID NO: 17701 - protein, 330 aa, Homo sapiens; identical to SEQ ID NO: 7178

SEQ ID NO: 17702 - protein, 330 aa, Homo sapiens [sequence omitted]

SEQ ID NO: 17703 - protein, 326 aa, Homo sapiens; identical to SEQ ID NO: 3888

SEQ ID NO: 17704 - protein, 377 aa, Homo sapiens; identical to SEQ ID NO: 7170

SEQ ID NO: 17705 - protein, 327 aa, Homo sapiens; identical to SEQ ID NO: 7171

SEQ ID NO: 17706 - protein, 328 aa, Homo sapiens; identical to SEQ ID NO: 12948

SEQ ID NO: 17707 - protein, 116 aa, Mus musculus
SGPGILQPSQTLSLTCSFSGFSLYTFDMGVGWIRQPSGKGLEWLAHIWWDDDKYYNPALKSRLTVSKDTSKNQVFLKIPNVDTADSATYYCARVRGLHDYYYWFAYWGQGTLVTVS

SEQ ID NO: 17708 - protein, 116 aa, Mus musculus
SGPGILQPSQTLSLTCSFSGFSLYTFDMGVGWIRQPSGKGLEWLAQIWWDDDKYYNPGLKSRLTISKDTSKNQVFLKIPNVDTADSATYYCARIRGLRDYYYWFAYWGQGTLVTVS

SEQ ID NO: 17709 - protein, 117 aa, Mus musculus
SGPGILQPSQTLSLTCSFSGFSLSTFGLGVGWIRQPSGKGLEWLAHIWWDDDKSYNPALKSRLTISKDTSKNQVFLMIANVDTADTATYYCARIGPKWSNYYYYCDYWGQGTTLTVS

SEQ ID NO: 17710 - protein, 117 aa, Mus musculus
SGPGILQPSQTLSLTCSFSGFSLSTFGLGVGWIRQPSGKGLEWLAHIWWDDDKSYNPALKSQLTISKDTSKNQVLLKIANVDTADTATYYCARIGPKWSNYYYYCDYWGQGTTLTVS

SEQ ID NO: 17711 - protein, 119 aa, Mus musculus; identical to SEQ ID NO: 13867

SEQ ID NO: 17712 - protein, 122 aa, Artificial Sequence
  source: /note="Description of Artificial Sequence: Synthetic polypeptide"
EVQLVESGGGLVQPGGSLRLSCAASGFTFSSYAMSWVRQAPGKGLEWVSQISPAGGYTNYADSVKGRFTISADTSKNTAYLQMNSLRAEDTAVYYCARELPYYRMSKVMDVQGQGTLVTVSS

SEQ ID NO: 17713 - protein, 118 aa, Artificial Sequence
  source: /note="Description of Artificial Sequence: Synthetic polypeptide"
EVQLVQSGAEVKKPGESLKISCKGSGYSFTTYWMHWVRQMPGKGLEWMGEINPTNGHTNYNPSFQGQVTISADKSISTAYLQWSSLKASDTAMYYCARNYVGSIFDYWGQGTLVTVSS

SEQ ID NO: 17714 - protein, 116 aa, Artificial Sequence
  source: /note="Description of Artificial Sequence: Synthetic polypeptide"
EVQLVESGGGLVQPGKSLKLSCEASGFTFSGYGMHWVRQAPGRGLESVAYITSSSINIKYADAVKGRFTVSRDNAKNLLFLQMNILKSEDTAMYYCARFDWDKNYWGQGTMVTVSS

SEQ ID NO: 17715 - protein, 121 aa, Artificial Sequence
  source: /note="Description of Artificial Sequence: Synthetic polypeptide"
QVTLKESGPGILQPSQTLSLTCSFSGFSLSTSNMGIGWIRQPSGKGLEWLAHIWWHDDKYYNPSLKSRLTISKDISNNQVFLKITSVDTADTATYYCAQVPFYYGTSFDVWGTGTTVTVSS

SEQ ID NO: 17716 - protein, 121 aa, Artificial Sequence
  source: /note="Description of Artificial Sequence: Synthetic polypeptide"
QVTLKESGPGILQPSQTLSLTCSFSGFSLSTFGMGVGWIRQPSGKGLEWLAHIWWDDDKYYNPALKSRLTISKDTSKNQVFLKIANVDTADTATYYCARIAYYYGSERDYWGQGTTLTVSS

SEQ ID NO: 17717 - protein, 112 aa, Artificial Sequence
  source: /note="Description of Artificial Sequence: Synthetic polypeptide"
QVQLKESGPGLVAPSQSLSITCTVSGFSLTSYGVSWVRQPPGKGLEWLGVIWGDGSTNYHSSLISRLSISKDNSKSQVFLKLNSLQTDDTATYYCARAFVYWGQGTLVTVSA

SEQ ID NO: 17718 - protein, 112 aa, Artificial Sequence
  source: /note="Description of Artificial Sequence: Synthetic polypeptide"
QVQLKESGPGLVAPSQSLSITCTVSGFSLTSYGVSWVRQPPGKGLEWLGVIWGDGSTNYHSALISRLIISKDNSKSQVFLKLNSLQTDDTATYYCTKGFTYWGQGTLVTVSA

SEQ ID NO: 17719 - protein, 112 aa, Artificial Sequence
  source: /note="Description of Artificial Sequence: Synthetic polypeptide"
QVQLQESGPGLVAPSQSLSITCTVSGFSLISYGVNWVRQPPGKGLEWLGVIWGDGSTNYQSALISRLIISKDNSKSQVFLKLNSLQTDDTATYYCTKGFAYWGQGTLVTVSA

SEQ ID NO: 17720 - protein, 112 aa, Artificial Sequence
  source: /note="Description of Artificial Sequence: Synthetic polypeptide"
QVQLKESGPGLVAPSQNLSITCTVSGFSLTSYGVNWVRQPPGKGLEWLGVIWGDGSTNYHSALISRLIISKENSKSQVFLKLNSLQTNDTATYYCTKGFVYWGQGTLVTVSA

SEQ ID NO: 17721 - protein, 114 aa, Artificial Sequence
  source: /note="Description of Artificial Sequence: Synthetic polypeptide"
QVQLKESGPGLVAPSQSLSITCTVSGFSLTSYGVSWVRQPPGKGLEWLGVIWGDGSTNYHSALISRLSISKDNSKSQVFLKLNSLQTDDTATYYCAKGGYFDYWGQGTTLTVSS

SEQ ID NO: 17722 - protein, 129 aa, Artificial Sequence
  source: /note="Description of Artificial Sequence: Synthetic polypeptide"
VKLVESGPGLVAPSQSLSITCTVSGFSLTTHGVNWVRQPPGKGLEWLGVIWDDGNINYHSGLISRLSISKDDSKSQVFLKLNSLQTDDTATYYCAKPGSYPYYFDYWGQGTTLTVSSAKTTPPSVYPLA

SEQ ID NO: 17723 - protein, 126 aa, Artificial Sequence
  source: /note="Description of Artificial Sequence: Synthetic polypeptide"
QVQLQQSGPELAKPGASVKLSCKASGDTFTIYDINWVKQRPGQGLEWIGWIYPRDGSTKYNEKFKGKATLTVETSSSTAYMELHSLTSEDSAVYFCARGWFVYWGQGTLVTVSAAKTTPPSVYPLA

SEQ ID NO: 17724 - protein, 126 aa, Artificial Sequence
  source: /note="Description of Artificial Sequence: Synthetic polypeptide"
EVKLVESGPEVVKPGASVKLSCKASGFIFTIYDINWVKQRPGQGLEWIGWIYPRDGSTKYNEKFKGKATLTVDTSSSTAYMDLHSLTSEESAVYFCARGWFAYWGQGTLVTVSAAKTTAPSVYPLA

SEQ ID NO: 17725 - protein, 132 aa, Artificial Sequence
  source: /note="Description of Artificial Sequence: Synthetic polypeptide"
QVQLQQSGAELVRPGASVTLSCKASGYTFTDYEIHWVKQTPVHGLEWIGPIDPETGNTAYNQKFKGKAIMTVDKSSSTAYMELRSLTSEDSAVYYCTREGLRGHWYFDVWGAGTTVTVSSAKTTPPSDYPLV

SEQ ID NO: 17726 - protein, 118 aa, Artificial Sequence
  source: /note="Description of Artificial Sequence: Synthetic polypeptide"
QVQLQESGPELVKPGASVKMSCKASGYAFTSYVIHWVRQKPGQGLYWIGYIHPYNGGTKYNEKFKGKATLTSDKSSSTTYMELSSLTSEDSAVYYCARSGGGDPFAYWGQGTTVTVSS

SEQ ID NO: 17727 - protein, 118 aa, Artificial Sequence
  source: /note="Description of Artificial Sequence: Synthetic polypeptide"
QVQLQQSGAEVKKPGSSVKVSCKASGYAFTSYVIHWVRQAPGQGLYWIGYIHPYNGGTKYNEKFKGKATITADESTNTAYMELSSLRSEDTAFYFCARSGGGDPFAYWGQGSLVTVSS

SEQ ID NO: 17728 - protein, 117 aa, Artificial Sequence
  source: /note="Description of Artificial Sequence: Synthetic polypeptide"
VKLQESGPELVKPGASVKMSCKASGYAFTSYVIHWVRQKPGQGLYWIGYIHPYNGGTKYNEKFKGKATLTSDKSSSTTYMELSSLTSEDSAVYYCARSGGGDPFAYWGQGTLVTVSA

SEQ ID NO: 17729 - protein, 127 aa, Artificial Sequence
  source: /note="Description of Artificial Sequence: Synthetic polypeptide"
EVQLLESGGGLVQTGGSLRLSCAASGFTFSDYAMSWVRQAPGKGLEWVSAIYPDSGNKYYADSVKGRFTISRDNSKNTLYLQMNSLRAEDTAVYYCARHSSDPKVKSGYYDDGMDVWGQGTLVAVSS

SEQ ID NO: 17730 - protein, 121 aa, Artificial Sequence
  source: /note="Description of Artificial Sequence: Synthetic polypeptide"
EVQLLESGGGLVQPGGSLRLSCAASGFTFSDYYMSWVRQAPGKGLEWVSGIYPSGGSTYYADSVKGRFTISRDNSKNTLYLQMNSLRAEDTAVYYCARDPSTLTYAGFDYWGQGTLVTVSS

SEQ ID NO: 17731 - protein, 127 aa, Artificial Sequence
  source: /note="Description of Artificial Sequence: Synthetic polypeptide"
EVQLLESGGGLVQPGGSLRLSCAASGFTFSNYAMSWVRQAPGKGLEWVSAISSGGGNIYYADSVKGRFTISRDNSKNTLYLQMNSLRAEDTAVYYCAKSGIQPSPPSMSSAYAMDVWGQGTLVTVSS

SEQ ID NO: 17732 - protein, 127 aa, Artificial Sequence
  source: /note="Description of Artificial Sequence: Synthetic polypeptide"
EVQLLESGGGLVQPGGSLRLSCAASGFTFSDYAMSWVRQAPGKGLEWVSSIYPDDGNTYYADSVKGRFTISRDNSKNTLYLQMNSLRAEDTAVYYCARHTSHHTSIDGYYYYGMDGWGQGTLVTVSS

SEQ ID NO: 17733 - protein, 127 aa, Artificial Sequence
  source: /note="Description of Artificial Sequence: Synthetic polypeptide"
EVQLLESGGGLVQPGGSLRLSCAASGFTFSDYDMSWVRQAPGKGLEWVSSISHGDSNKYYADSVKGRFTISRDNSKNTLYLQMNSLRAEDTAVYYCAKSSGIQESPPTYYYYGMDVWGQGTLVTVSS

SEQ ID NO: 17734 - protein, 127 aa, Artificial Sequence
  source: /note="Description of Artificial Sequence: Synthetic polypeptide"
EVQLLESGGGLVQTGGSLRLSCAASGFTFSDYAMSWVRQAPGKGLEWVSSIYPDDGNTYYADSVKGRFTISRDNSKNTLYLQMNSLRAEDTAVYYCAKHPVRLNLHPMYYYYGMDVWGQGTLVTVSS

SEQ ID NO: 17735 - protein, 121 aa, Artificial Sequence
  source: /note="Description of Artificial Sequence: Synthetic polypeptide"
EVQLLESGGGLVQPGGSLRLSCAASGFTFSSYDMSWVRQAPGKGLEWVSLISPDSSSIYYADSVKGRFTISRDNSKNTLYLQMNSLRAEDTAVYYCAKDLISFWRGGFDYWGQGTLVTVSS

SEQ ID NO: 17736 - protein, 127 aa, Artificial Sequence
  source: /note="Description of Artificial Sequence: Synthetic polypeptide"
EVQLLESGGGLVQPGGSLRLSCAASGFTFSDYDMSWVRQAPGKGLEWVSGISSDDGNTYYADSVKGRFTISRDNSKNTLYLQMNSLRAEDTAVYYCARPTIDKYTLRGYYSYGMDVWGQGTLVTVSS

SEQ ID NO: 17737 - protein, 121 aa, Artificial Sequence
  source: /note="Description of Artificial Sequence: Synthetic polypeptide"
QVQLQQSGAELMKPGASVKISCKATDYTFSSYWLEWLIQRPGHGLEWIGEILPGSGSTNYNEKFRGKATFTEDTSSNTAYMQLSSLTSEDSAVYYCARGNHNSYYYAMDYWGQGTSVTVSS

SEQ ID NO: 17738 - protein, 118 aa, Artificial Sequence
  source: /note="Description of Artificial Sequence: Synthetic polypeptide"
EVQLQQSGAELVKPGASVKLSCTASGFNIKDPYIHWVKQRPEQGLEWIGRIDPANGNTKYDPKFQGKATITADTSSNTAYLQLSSLTSEDTAVYYCVRRWDGGGFDYWGQGTSVTVSS

SEQ ID NO: 17739 - protein, 120 aa, Artificial Sequence
  source: /note="Description of Artificial Sequence: Synthetic polypeptide"
EVQLQQSGPELVKPGDSVKMSCKASGYTFTDYYMKWVRQSHGKSLQWVGEINPKNGDTFYNQIFKGKATLTVDKSSSTAYMQLTSLTSEDSAVYYCTRENDYDVGFFDYWGQGTSVTVSS

SEQ ID NO: 17740 - protein, 118 aa, Artificial Sequence
  source: /note="Description of Artificial Sequence: Synthetic polypeptide"
QIQLVQSGPELKKPGETVKISCKASGYTFTNYGMNWVKQAPGKGLKWMGWINTYTGEPTYADDFKGRFAFSLETSASTAYLQINNLKNEDTATYFCARDHDGYLMDYWGQGTSVTVSS

SEQ ID NO: 17741 - protein, 148 aa, Artificial Sequence
  source: /note="Description of Artificial Sequence: Synthetic polypeptide"
MDWLRNLLFLMAAAQSIQAQVQLVQSGPELKKPGETVKISCKASDYTFTYYGMNWVKQAPGKGLKWMGWIDTTTGEPTYAEDFKGRIAFSLETSASTAYLQIKNLKNEDTATYFCARRGPYNWYFDVWGAGTTVTVSSAKTTPPSVYP

SEQ ID NO: 17742 - protein, 121 aa, Artificial Sequence [sequence omitted]

SEQ ID NO: 17743 - protein, 121 aa, Artificial Sequence
  source: /note="Description of Artificial Sequence: Synthetic polypeptide"
EVQLQQSGPELIKPGASVKMSCKASGYTFTSYVMHWVKQKPGQGLEWIGYINPYNDGTKYNEKFKGKATLTSDKSSSTAYMELSSLTSEDSAVYYCARGTYYYGSRVFDYWGQGTTLTVSS

SEQ ID NO: 17744 - protein, 121 aa, Artificial Sequence
  source: /note="Description of Artificial Sequence: Synthetic polypeptide"
QVQLVQSGAEVKKPGASVKVSCKASGYTFTDYIMHWVRQAPGQGLEWMGYINPYNDGSKYTEKFQGRVTMTSDTSISTAYMELSRLRSDDTAVYYCARGTYYYGSALFDYWGQGTTVTVSS

SEQ ID NO: 17745 - protein, 121 aa, Artificial Sequence
  source: /note="Description of Artificial Sequence: Synthetic polypeptide"
QVQLVQSGAEVKKPGASVKVSCKASGYTFTDYITHWVRQAPGQGLEWMGYINPYNDGSKYTEKFQGRVTMTSDTSISTAYMELSRLRSDDTAVYYCARGTYYYGPDLFDYWGQGTTVTVSS

SEQ ID NO: 17746 - protein, 121 aa, Artificial Sequence
  source: /note="Description of Artificial Sequence: Synthetic polypeptide"
QVQLVQSGAEVKKPGASVKVSCKASGYTFTDYIMHWVRQAPGQGLEWMGYINPYNDGSKYTEKFQGRVTMTSDTSISTAYMELSRLRSDDTAVYYCARGTYYYGPQLFDYWGQGTTVTVSS

SEQ ID NO: 17747 - protein, 121 aa, Artificial Sequence
  source: /note="Description of Artificial Sequence: Synthetic polypeptide"
QVQLVQSGAEVKKPGASVKVSCKASGYTFTDYIMHWVRQAPGQGLEWMGYINPYNDGSKYTEKFQGRVTMTSDTSISTAYMELSRLRSDDTAVYYCARGTYYYGSELFDYWGQGTTVTVSS

SEQ ID NO: 17748 - protein, 124 aa, Artificial Sequence; identical to SEQ ID NO: 7298
  source: /note="Description of Artificial Sequence: Synthetic polypeptide"

SEQ ID NO: 17749 - protein, 124 aa, Artificial Sequence; identical to SEQ ID NO: 7296
  source: /note="Description of Artificial Sequence: Synthetic polypeptide"

SEQ ID NO: 17750 - protein, 124 aa, Artificial Sequence; identical to SEQ ID NO: 15041
  source: /note="Description of Artificial Sequence: Synthetic polypeptide"

SEQ ID NO: 17751 - protein, 122 aa, Artificial Sequence [sequence omitted]

SEQ ID NO: 17752 - protein, 122 aa, Artificial Sequence
  source: /note="Description of Artificial Sequence: Synthetic polypeptide"
EVQLVESGGGLVQPGGSLRLSCAASGYTFTSYNMHWVRQAPGKGLEWVGAIYPGNGATSYNQKFKGRFTISVDKSKNTLYLQMNSLRAEDTAVYYCARVVYYSASYWYFDVWGQGTLVTVSS

SEQ ID NO: 17753 - protein, 122 aa, Artificial Sequence; identical to SEQ ID NO: 7428
  source: /note="Description of Artificial Sequence: Synthetic polypeptide"

SEQ ID NO: 17754 - protein, 112 aa, Artificial Sequence
  source: /note="Description of Artificial Sequence: Synthetic polypeptide"
QVQLQQSGAELARPGASVKMSCKASGYTFTRSTMHWVKQRPGQGLEWIGYINPSSAYTNYNQKFKDKATLTADKSSSTAYMQLSSLTSEDSAVYYCASPQVHYDYNGFPYWG

SEQ ID NO: 17755 - protein, 121 aa, Artificial Sequence
  source: /note="Description of Artificial Sequence: Synthetic polypeptide"
QVQLVQSGGGVVQPGRSLRLSCKASGYTFTRSTMHWVRQAPGKGLEWIGYINPSSAYTNYNQKFKDRFTISADKSKSTAFLQMDSLRPEDTGVYFCARPQVHYDYNGFPYWGQGTPVTVSS

SEQ ID NO: 17756 - protein, 120 aa, Artificial Sequence [sequence omitted]

SEQ ID NO: 17757 - protein, 119 aa, Artificial Sequence
  source: /note="Description of Artificial Sequence: Synthetic polypeptide"
QVQLVQSGGGVVQPGRSLRLSCKASGYTFTRYTMHWVRQAPGKGLEWIGYINPSRGYTNYNQKVKDRFTISRDNSKNTAFLQMDSLRPEDTGVYFCARYYDDHYSLDYWGQGTPVTVSS

SEQ ID NO: 17758 - protein, 119 aa, Artificial Sequence
  source: /note="Description of Artificial Sequence: Synthetic polypeptide"
QVQLVQSGGGVVQPGRSLRLSCKSSGYTFTRYTMHWVRQAPGKGLEWIGYINPSRGYTNYNQKVKDRFTISRDNSKNTAFLQMDSLRPEDTGVYFCARYYDDHYCLDYWGQGTPVTVSS

SEQ ID NO: 17759 - protein, 119 aa, Artificial Sequence; identical to SEQ ID NO: 7234
  source: /note="Description of Artificial Sequence: Synthetic polypeptide"

SEQ ID NO: 17760 - protein, 119 aa, Artificial Sequence; identical to SEQ ID NO: 7236
  source: /note="Description of Artificial Sequence: Synthetic polypeptide"

SEQ ID NO: 17761 - protein, 125 aa, Artificial Sequence
  source: /note="Description of Artificial Sequence: Synthetic polypeptide"
EVQLLESGGGLVQPGGSLRLSCAASGFTFSTYAMNWVRQAPGKGLEWVSRIRSKYNNYATYYADSVKGRFTISRDDSKNTLYLQMNSLRAEDTAVYYCVRHGNFGNSYVSWFAYWGQGTLVTVSS

SEQ ID NO: 17762 - protein, 125 aa, Artificial Sequence
  source: /note="Description of Artificial Sequence: Synthetic polypeptide"
EVQLLESGGGLVQPGGSLRLSCAASGFTFSTYAMNWVRQAPGKGLEWVSRIRSKYNNYATYYADSVKGRFTISRDDSKNTLYLQMNSLRAEDTAVYYCARHGNFGNSYVSWFAYWGQGTLVTVSS

SEQ ID NO: 17763 - protein, 125 aa, Artificial Sequence
  source: /note="Description of Artificial Sequence: Synthetic polypeptide"
EVQLLESGGGLVQPGGSLRLSCAASGFTFSTYAMNWVRQAPGKGLEWVSRIRSKYNNYATYYADSVKGRFTISRDDSKNTLYLQMNSLRAEDTAVYYCAKHGNFGNSYVSWFAYWGQGTLVTVSS

SEQ ID NO: 17764 - protein, 120 aa, Artificial Sequence; identical to SEQ ID NO: 8164
  source: /note="Description of Artificial Sequence: Synthetic polypeptide"

SEQ ID NO: 17765 - protein, 120 aa, Artificial Sequence; identical to SEQ ID NO: 8162
  source: /note="Description of Artificial Sequence: Synthetic polypeptide"

SEQ ID NO: 17766 - protein, 120 aa, Mus musculus; identical to SEQ ID NO: 8163

SEQ ID NO: 17767 - protein, 120 aa, Homo sapiens; identical to SEQ ID NO: 8165

SEQ ID NO: 17768 - protein, 121 aa, Artificial Sequence
  source: /note="Description of Artificial Sequence: Synthetic polypeptide"
QVQLVQSGAEVKKPGASVKVSCKASGYTFTEFGMNWVRQAPGQGLEWMGWINTKTGEATYVEEFKGRVTFTTDTSTSTAYMELRSLRSDDTAVYYCARWDFAYYVEAMDYWGQGTTVTVSS

SEQ ID NO: 17769 - protein, 119 aa, Homo sapiens
EVQLVESGGGVVQPGRSLRLSCSASGFDFTTYWMSWVRQAPGKGLEWIGEIHPDSSTINYAPSLKDRFTISRDNAKNTLFLQMDSLRPEDTGVYFCASLYFGFPWFAYWGQGTPVTVSS

SEQ ID NO: 17770 - protein, 119 aa, Mus sp.
EVKLLESGGGLVQSGGSLKLSCAASGFDFTTYWMSWVRQAPGKGLEWIGEIHPDSSTINYAPSLKDKFIVSRDNAKNTLYLQMSKVRSEDTALYYCASLYFGFPWFAYWGQGTPVTVSA

SEQ ID NO: 17771 - protein, 120 aa, Artificial Sequence
  source: /note="Description of Artificial Sequence: Synthetic polypeptide"
QVKLEQSGAEVVKPGASVKLSCKASGFNIKDSYMHWLRQGPGQCLEWIGWIDPENGDTEYAPKFQGKATFTTDTSANTAYLGLSSLRPEDTAVYYCNEGTPTGPYYFDYWGQGTLVTVSS

SEQ ID NO: 17772 - protein, 140 aa, Artificial Sequence
  source: /note="Description of Artificial Sequence: Synthetic polypeptide"
MKCSWVIFFLMAVVTGVNSEVQLQQSGAELVEPGASVKLSCTASGFNIKDTYMHWVKQRPEQGLEWIGRIDPANGNSKYVPKFQGKATITADTSSNTAYLQLTSLTSEDTAVYYCAPFGYYVSDYAMAYWGQGTSVTVSS

SEQ ID NO: 17773 - protein, 242 aa, Artificial Sequence
  source: /note="Description of Artificial Sequence: Synthetic polypeptide"
QVQLVQSGAEVKKPGSSVKVSCKASGFNIKDTYMHWVRQAPGQGLEWMGRIDPANGNSKYVPKFQGRVTITADTSTSTAYMELSSLRSEDTAVYYCAPFGYYVSDYAMAYWGQGTLVTVSSQVQLVQSGAEVKKPGSSVKVSCKASGFNIKDTYMHWVRQAPGQGLEWMGRIDPANGNSKYVPKFQGRVTITADTSTSTAYMELSSLRSEDTAVYYCAPFGYYVSDYAMAYWGQGTLVTVSS

SEQ ID NO: 17774 - protein, 121 aa, Artificial Sequence
  source: /note="Description of Artificial Sequence: Synthetic polypeptide"
EVQLQQSGAELVEPGASVKLSCTASGFNIKDTYMHWVKQRPEQGLEWIGRIDPANGNSKYVPKFQGKATITADTSSNTAYLQLTSLTSEDTAVYYCAPFGYYVSDYAMAYWGQGTSVTVSS

SEQ ID NO: 17775 - protein, 127 aa, Artificial Sequence
  source: /note="Description of Artificial Sequence: Synthetic polypeptide"
EVQLLESGGGLVQPGGSLRLSCAASGFTFSNYAMSWVRQAPGKGLEWVSGISYSGGSTYYADSVKGRFTISRDNSKNTLYLQMNSLRAEDTAVYYCAKASRSCQRPACSYANGMDVWGQGTLVTVSS

SEQ ID NO: 17776 - protein, 118 aa, Mus musculus; identical to SEQ ID NO: 13176

SEQ ID NO: 17777 - protein, 118 aa, Mus musculus; identical to SEQ ID NO: 12444

SEQ ID NO: 17778 - protein, 121 aa, Artificial Sequence
  source: /note="Description of Artificial Sequence: Synthetic polypeptide"
EVQLLESGGGLVQTGGSLRLSCAASGFTFSSYDMSWVRRAPGKGLEWVSWISHGGSSISYADSVKGRFTISRDNSKNTLYLQMNSLRAEDTAVYYCAKDAYPIRQETFDYWGQGTLVTVSS

SEQ ID NO: 17779 - protein, 127 aa, Artificial Sequence
  source: /note="Description of Artificial Sequence: Synthetic polypeptide"
EVQLLESGGGLVQPGGSLRLSCAASGFTFSNYAMSWVRQAPGKGLEWVSAISYDSGSIYYADSVKGRFTISRDNSKNTLYLQMNSLRAEDTAVYYCAKAARSCRNWSCSYANGMDVWGQGTLVTVSS

SEQ ID NO: 17780 - protein, 117 aa, Artificial Sequence; identical to SEQ ID NO: 13119
  source: /note="Description of Artificial Sequence: Synthetic polypeptide"

SEQ ID NO: 17781 - protein, 117 aa, Artificial Sequence; identical to SEQ ID NO: 13128
  source: /note="Description of Artificial Sequence: Synthetic polypeptide"

SEQ ID NO: 17782 - protein, 116 aa, Artificial Sequence
  source: /note="Description of Artificial Sequence: Synthetic polypeptide"
KIQLVQSGPELKKPGETVKISCKASGYTFTDNSMHWVKQAPGKGLKWMGWVNTETGEPTYADDFKGRFAFSLETSASTAYLQINNLKNEDTATYFCARDGHYFAYWGQGTLVTVSA

SEQ ID NO: 17783 - protein, 112 aa, Artificial Sequence
  source: /note="Description of Artificial Sequence: Synthetic polypeptide"
EVQLQQSGPELVKPGASVKMSCKASGYTFTDYYMKWVKQSHGKNLEWIGDINPNNGGTNYNQKFKGKATLTVDKSSSTAYMQLNSLTSEDSAVYYCARSGYWGQGTTLTVSS

SEQ ID NO: 17784 - protein, 123 aa, Artificial Sequence
  source: /note="Description of Artificial Sequence: Synthetic polypeptide"
QVQLQQSGAELAKPGASVKMSCKASGYTFIIYWIHWIKQRPGQGLEWIGYINPSNDYTEYNQKFKDKATLTADKSSNTAFMQLSSLTSEDSAVYYCARDSYDYDDGAYAMDYWGQGTSVTVSS

SEQ ID NO: 17785 - protein, 114 aa, Artificial Sequence
  source: /note="Description of Artificial Sequence: Synthetic polypeptide"
QVQLQQSGPELVKSGASVKMSCKASGNTLKDDHVHWVKQRPGQGLEWIGWIYPGGGRTRYNEKFKGKTTLTADKPSSTVNMLLSSLTSEDSAIYFCTNLVFDVWGAGTTVTVSS

SEQ ID NO: 17786 - protein, 119 aa, Homo sapiens; identical to SEQ ID NO: 13142

SEQ ID NO: 17787 - protein, 125 aa, Homo sapiens; identical to SEQ ID NO: 13137

SEQ ID NO: 17788 - protein, 115 aa, Artificial Sequence
  source: /note="Description of Artificial Sequence: Synthetic polypeptide"
EVQLQQSGPELVKPGASVRISCKASGYTFTSRYIHWMKQRPGQGLEWIGWIYPVTGDTYYNEKFKGKATLTSDKSSSTAYMQISSLTSDDSAVYFCARGGGMFYYWGQGTLVTVS

SEQ ID NO: 17789 - protein, 114 aa, Artificial Sequence; identical to SEQ ID NO: 13192
  source: /note="Description of Artificial Sequence: Synthetic polypeptide"

SEQ ID NO: 17790 - protein, 119 aa, Artificial Sequence [sequence omitted]

SEQ ID NO: 17791 - protein, 140 aa, Artificial Sequence
  source: /note="Description of Artificial Sequence: Synthetic polypeptide"
MGWSYIILFLVATAADVHSQVQLQEWGAGLLKPSETLSLTCAVSGGSLSGHYWSWVRLPPGKGLEWIGEISHSGNTNYNSSLKSRASISIDTSKNEYSLNLKSVTAVDTAVYYCARFYGDYPSSYGMDVWGQGTTVTVSS

SEQ ID NO: 17792 - protein, 141 aa, Artificial Sequence
  source: /note="Description of Artificial Sequence: Synthetic polypeptide"
MGWSYIILFLVATAADVHSQVQLQEWGAGLLKPSETLSLTCAVSGGSLSGHYWSWVRLPPGKGLEWIGEISHSGNTNYNSSLKSRASISIDTSKNEYSLNLKSVTAVDTAVYYCARFYGDYPSSYGMDVWGQGTTVTVSSC

SEQ ID NO: 17793 - protein, 119 aa, Artificial Sequence
  source: /note="Description of Artificial Sequence: Synthetic polypeptide"
EVQLQQSGTVLARPGASVKMSCKASGYSFTSYWMYWVKQRPGQGLEWIGGFHPGNSGTNYNQKFKGKAKLTAVTSASTAYMELSSLTNEDSAVYYCTRGYYYDGSFTYWGQGTLVTVSA

SEQ ID NO: 17794 - protein, 119 aa, Artificial Sequence
  source: /note="Description of Artificial Sequence: Synthetic polypeptide"
EVQLQQSGTVLARPGASVKMSCKASGYSFTSYWMYWVKQRPGQGLEWIGGFHPRNSGTNYNQKFKGKAKLTAVTSASTAYMELSSLTNEDSAVYYCTRGYYYDGSFTYWGQGTLVTVSA

SEQ ID NO: 17795 - protein, 117 aa, Artificial Sequence; identical to SEQ ID NO: 14036
  source: /note="Description of Artificial Sequence: Synthetic polypeptide"

SEQ ID NO: 17796 - protein, 117 aa, Artificial Sequence; identical to SEQ ID NO: 14005
  source: /note="Description of Artificial Sequence: Synthetic polypeptide"

SEQ ID NO: 17797 - protein, 117 aa, Artificial Sequence; identical to SEQ ID NO: 13199
  source: /note="Description of Artificial Sequence: Synthetic polypeptide"

SEQ ID NO: 17798 - protein, 117 aa, Artificial Sequence; identical to SEQ ID NO: 13200
  source: /note="Description of Artificial Sequence: Synthetic polypeptide"

SEQ ID NO: 17799 - protein, 117 aa, Artificial Sequence; identical to SEQ ID NO: 13201
  source: /note="Description of Artificial Sequence: Synthetic polypeptide"

SEQ ID NO: 17800 - protein, 138 aa, Artificial Sequence
  source: /note="Description of Artificial Sequence: Synthetic polypeptide"
MNLGLSLIFLVLVLKGVQCEVKLVESGGGLVQPGGSLKLSCATSGFTFSDYYMYWVRQTPEKRLEWVAYISNGGGSSHYVDSVKGRFTISRDNAKNTLYLQMSRLRSEDTAMYHCARGMDYGAWFAYWGQGTLVTVSA

SEQ ID NO: 17801 - protein, 119 aa, Artificial Sequence
  source: /note="Description of Artificial Sequence: Synthetic polypeptide"
EVQLLESGGGLVQPGGSLRLSCAASGFTFSDYYMYWVRQAPGKGLEWVAYISNGGGSSHYVDSVKGRFTISRDNSKNTLYLQMNSLRAEDTALYYCARGMDYGAWFAYWGQGTLVTVSS

SEQ ID NO: 17802 - protein, 119 aa, Artificial Sequence
  source: /note="Description of Artificial Sequence: Synthetic polypeptide"
EVQLLESGGGLVQPGGSLRLSCAASGFTFSDYYMYWVRQAPEKRLEWVAYISNGGGSSHYVDSVKGRFTISRDNSKNTLYLQMNSLRAEDTALYHCARGMDYGAWFAYWGQGTLVTVSS

SEQ ID NO: 17803 - protein, 117 aa, Artificial Sequence
  source: /note="Description of Artificial Sequence: Synthetic polypeptide"
EVQLLESGGGLVQPGGSLRLSCAASGFTFSSYAMSWVRQAPGKGLEWVSAISGSGGSTYYADSVKGRFTISRDNSKNTLYLQMNSLRAEDTAVYYCAKGVRISFDYWGQGTLVTVSS

SEQ ID NO: 17804 - protein, 117 aa, Artificial Sequence
  source: /note="Description of Artificial Sequence: Synthetic polypeptide"
EVQLVETGGGLIQPGGSLRLSCAASGFTVSRYAMIWVRQAPGKGLEYIGFITSDGSTYYADSAKGRFTISRDNSKNTLYLQMNSLRAEDTAVYYCARYTYSDGTDLWGRGTLVTVSS

SEQ ID NO: 17805 - protein, 117 aa, Artificial Sequence
  source: /note="Description of Artificial Sequence: Synthetic polypeptide"
EVQLLESGGGLVQPGGSLRLSCAASGFTFSSYAMSWVRQAPGKGLEWVSAISGSGGSTYYADSVKGRFTISRDNSKNTLYLQMNSLRAEDAAVYYCAKGVRKKFDYWGQGTLVTVSS

SEQ ID NO: 17806 - protein, 117 aa, Artificial Sequence
  source: /note="Description of Artificial Sequence: Synthetic polypeptide"
EVQLLESGGGLVQPGGSLRLSCAASGFTFSSYAMSWVRQAPGKGLEWVSAISGSGGSTYYADSVKGRFTISRDNSKNTLYLQMNSLRAEDTAVYYCAKGVRKGFDYWGQGTLVTVSS

SEQ ID NO: 17807 - protein, 117 aa, Artificial Sequence
  source: /note="Description of Artificial Sequence: Synthetic polypeptide"
EVQLLESGGGLVQPGGSLRLSCAASGFTFSSYAMSWVRQAPGKGLEWVSAISGSGGSTYYADSVKGRFTISRDNSKNTLYLQMNSLRAEDMAVYYCAKGARVSFDYWGQGTLVTVSS

SEQ ID NO: 17808 - protein, 117 aa, Artificial Sequence
  source: /note="Description of Artificial Sequence: Synthetic polypeptide"
EVQLLESGGGLVQPGGSLRLSCAASGFTFSSYAMSWVRQAPGKGLEWVSAISGSGGSTYYADSVKGRFTISRDNSKNTLYLQMNSLRAEDTAVYYCAKGVRVSFDYWGQGTLVTVSS

SEQ ID NO: 17809 - protein, 117 aa, Artificial Sequence
  source: /note="Description of Artificial Sequence: Synthetic polypeptide"
QSLEESGGRLVTPGTPLTLTCTASGFSLSSNHMSWVRQAPGKGLEWIGYIYAGSGSAYYASWAKGRFTISRTSTTVDLKMTSLTTEDTATYFCAGDAGSSYWEFNLWGPGTLVTVSS

SEQ ID NO: 17810 - protein, 117 aa, Artificial Sequence
  source: /note="Description of Artificial Sequence: Synthetic polypeptide"
QSLEESGGRLVKPDETLTLTCTVSGFSLSSNAISWVRQAPGMGLEWIGIIGSSGYTYYASWAKGRFTVSKTSTTVDLEIASPTTEDTATYFCARGYSGASDYSFNLWGPGTLVTVSS

SEQ ID NO: 17811 - protein, 114 aa, Artificial Sequence
  source: /note="Description of Artificial Sequence: Synthetic polypeptide"
QSVEESGGRLVTPGTPLTLTCTVSGFSISRYAMIWVRQAPGEGLEYIGFITSDSSAYYASWAKGRFTISKTSTTVDLKMTSPTTEDTATYFCARYTYSDGTDLWGPGTLVTVSS

SEQ ID NO: 17812 - protein, 117 aa, Artificial Sequence
  source: /note="Description of Artificial Sequence: Synthetic polypeptide"
QSLEESGGRLVTPGTPLTLTCTASGFTISSYHMSWVRQAPGKGLEWIGYIYAGSASTWYASWVKGRFTISKTSTTVDLKMTSLTTEDTATYFCARDAGSSYWEFNLWGPGTLVTVSS

SEQ ID NO: 17813 - protein, 119 aa, Artificial Sequence
  source: /note="Description of Artificial Sequence: Synthetic polypeptide"
QSLEESGGRLVKPDETLTLTCTVSGFSLNNYAMSWVRQAPGKGLEWIGMINKYGTKYYATWTKGRATISKTSTTLDLEITSPTTEDTATYFCARVRYAGDDYAEWLDVWGQGILVTVSS

SEQ ID NO: 17814 - protein, 117 aa, Artificial Sequence
  source: /note="Description of Artificial Sequence: Synthetic polypeptide"
QSVEESGGRLVTPGTPLTLTCTVSGFSLSNYAMSWVRQAPGKGLEWIGIISSSGTTYYASWAKGRFTISKTSTTVDLKVTSPTTEDTATYFCARETYYGYSYAAGLWGPGTLVTVSS

SEQ ID NO: 17815 - protein, 117 aa, Artificial Sequence
  source: /note="Description of Artificial Sequence: Synthetic polypeptide"
QVQLVESGGGLVQPGGSLRLSCSASGFSISRYAMIWVRQAPGKGLEYVGFITSDSSAYYASWAKGRFTISRDNSKNTLYLQMNSLRAEDTAVYYCARYTYSDGTDLWGQGTLVTVSS

SEQ ID NO: 17816 - protein, 114 aa, Artificial Sequence
  source: /note="Description of Artificial Sequence: Synthetic polypeptide"
QSLEESGGRLVTPGTPLTLTCTASGFSLSSAYMSWVRQAPGKGLEWIGYIYSGSGSTWYASWVKGRFTISKTSTTVDLKITSPTTEDTATYFCARGYSTMGDLWGPGTLVTVSS

SEQ ID NO: 17817 - protein, 118 aa, Artificial Sequence
  source: /note="Description of Artificial Sequence: Synthetic polypeptide"
QVQLVQSGAEVKKPGASVKVSCKASGYTFTSYWMHWVRQAPGQGLEWMGNIYPGSGGTNYAEKFKNRVTMTRDTSISTAYMELSRLRSDDTAVYYCARSGGPYFFDYWGQGTLVTVSS

SEQ ID NO: 17818 - protein, 124 aa, Mus musculus; identical to SEQ ID NO: 6765

SEQ ID NO: 17819 - protein, 120 aa, Mus musculus; identical to SEQ ID NO: 13963

SEQ ID NO: 17820 - protein, 120 aa, Mus musculus; identical to SEQ ID NO: 13964

SEQ ID NO: 17821 - protein, 120 aa, Homo sapiens; identical to SEQ ID NO: 13965

SEQ ID NO: 17822 - protein, 122 aa, Homo sapiens; identical to SEQ ID NO: 13966

SEQ ID NO: 17823 - protein, 122 aa, Homo sapiens; identical to SEQ ID NO: 13967

SEQ ID NO: 17824 - protein, 122 aa, Mus musculus; identical to SEQ ID NO: 13968

SEQ ID NO: 17825 - protein, 125 aa, Homo sapiens; identical to SEQ ID NO: 13969

SEQ ID NO: 17826 - protein, 117 aa, Homo sapiens; identical to SEQ ID NO: 13970

SEQ ID NO: 17827 - protein, 124 aa, Homo sapiens; identical to SEQ ID NO: 13971

SEQ ID NO: 17828 - protein, 117 aa, Artificial Sequence
  source: /note="Description of Artificial Sequence: Synthetic polypeptide"
EVQLVESGGGLVQPGGSLRLSCAASGFAFSYSDMSWVRQAPGKGLEWVSYMSSAGDVTFYSDTVKGRFTISRDNAKNSLYLQMNSLRAEDTAVYYCVRHRDVAMDYWGQGTTVTVSS

SEQ ID NO: 17829 - protein, 118 aa, Artificial Sequence; identical to SEQ ID NO: 13972
  source: /note="Description of Artificial Sequence: Synthetic polypeptide"

SEQ ID NO: 17830 - protein, 119 aa, Homo sapiens; identical to SEQ ID NO: 13973

SEQ ID NO: 17831 - protein, 125 aa, Homo sapiens; identical to SEQ ID NO: 13974

SEQ ID NO: 17832 - protein, 121 aa, Homo sapiens; identical to SEQ ID NO: 13975

SEQ ID NO: 17833 - protein, 117 aa, Homo sapiens; identical to SEQ ID NO: 13976

SEQ ID NO: 17834 - protein, 119 aa, Homo sapiens; identical to SEQ ID NO: 13977

SEQ ID NO: 17835 - protein, 121 aa, Artificial Sequence
  source: /note="Description of Artificial Sequence: Synthetic polypeptide"
  MOD_RES (55)..(56): Any amino acid
QVQLVQSGAEVKKPGASVKVSCKASGYTFTSYWMQWVRQAPGQGLEWMGNINPSXXGTSFNEEFKSRVTMTRDTSTSTVYMELSSLRSEDTAVYYCARDGGLYDGYYFDFWGQGTLVTVSS

SEQ ID NO: 17836 - protein, 122 aa, Artificial Sequence; identical to SEQ ID NO: 14028
  source: /note="Description of Artificial Sequence: Synthetic polypeptide"

SEQ ID NO: 17837 - protein, 117 aa, Artificial Sequence
  source: /note="Description of Artificial Sequence: Synthetic polypeptide"
EVQLVESGGGLVQPGGSLRLSCAASGFAFSYSDMSWVRQAPGKRLEWVSYMSSAGDVTFYSDTVKGRFTISRDNAKNSLYLQVNSLRAEDTAVYYCVRHRDVAMDYWGQGTTVTVSS

SEQ ID NO: 17838 - protein, 121 aa, Artificial Sequence
  source: /note="Description of Artificial Sequence: Synthetic polypeptide"
QVQLVQSGAEVKKPGASVKLSCKASGYTFTSYWMQWVRQAPGQGLEWIGNINPSNGGTSFNEEFKSRATMTRDTSTSTVYMELSSLRSEDTAVYYCARDGGLYDGYYFDFWGQGTLVTVSS

SEQ ID NO: 17839 - protein, 121 aa, Artificial Sequence
  source: /note="Description of Artificial Sequence: Synthetic polypeptide"
QVQLVQSGAEVKKPGASVKLSCKASGYTFTSYWMQWVRQAPGQGLEWIGNINPSNLGTSFNEEFKSRATMTRDTSTSTVYMELSSLRSEDTAVYYCARDGGLYDGYYFDFWGQGTLVTVSS

SEQ ID NO: 17840 - protein, 117 aa, Artificial Sequence
  source: /note="Description of Artificial Sequence: Synthetic polypeptide"
EVQLVESGGGLVQPGGSLRLSCAASGFAFSYSDMSWVRQAPGKRLEWVSYMSSAGDVTFYSDTVKGRFTISRDNAKNSLYLQVNSLRAEDTAVYYCVRHRDVAIDYWGQGTTVTVSS

SEQ ID NO: 17841 - protein, 117 aa, Homo sapiens
QVQLVESGGGVVQPGRSLRLSCTASGFTFSHYGMYWVRQAPGKGLEWVAVIWYDGSYEYNEDSVKGRFTISRDNSKNTLYLQMNSLRAEDTAVYYCARDRVGLFDYWGQGTLVTVSS

SEQ ID NO: 17842 - protein, 121 aa, Artificial Sequence
  source: /note="Description of Artificial Sequence: Synthetic polypeptide"
QVQLQEWGAGLLKPSETLSLTCAVYGGSFSDYYWSWIRQPPGKGLEWIGEISHSGSTGYNPSLKSRVAISVDTPKNQFSLKLNSVTAADTALYYCARLTTVVGGNWFDPWGQGTLVTVSSA

SEQ ID NO: 17843 - protein, 117 aa, Mus musculus
EVHLQQSGPELEKPGASVKISCKASGYSFTGYNMNVKQSNGKSLEWIGNIDPYYGDTDYDQKFKGTLTADKSSNTVYMQLQSLTSEDSAVYYCARGAHRDYYAMDYWGQGTSVTVSS

SEQ ID NO: 17844 - protein, 125 aa, Homo sapiens [sequence omitted]

SEQ ID NO: 17845 - protein, 121 aa, Homo sapiens; identical to SEQ ID NO: 13865

SEQ ID NO: 17846 - protein, 122 aa, Artificial Sequence
  source: /note="Description of Artificial Sequence: Synthetic polypeptide"
QVQLVQSGAEVVKPGASVKLSCTTSGFTIKDTYIHWVKKRPGQGLEWIGRIDPTNGNNKYDQKFQGKATITADTSSNTAYLQLSSLTSEDTAVYYCTREDGYRYDDWYFDVWGQGTLVTVSS

SEQ ID NO: 17847 - protein, 116 aa, Artificial Sequence
  source: /note="Description of Artificial Sequence: Synthetic polypeptide"
QVQLQESGPGLVKPSETLSLTCTVSGLSLASNSVSWIRQPPGKGLEWMGVIWNHGGTDYNPSIKSRLSISRDTSKSQVFLKMNSLTAADTAMYFCVRKGGIYFDYWGQGVLVTVSS

SEQ ID NO: 17848 - protein, 120 aa, Rattus sp.; identical to SEQ ID NO: 13242

SEQ ID NO: 17849 - protein, 120 aa, Artificial Sequence; identical to SEQ ID NO: 12357
  source: /note="Description of Artificial Sequence: Synthetic polypeptide"

SEQ ID NO: 17850 - protein, 120 aa, Artificial Sequence; identical to SEQ ID NO: 16579
  source: /note="Description of Artificial Sequence: Synthetic polypeptide"

SEQ ID NO: 17851 - protein, 120 aa, Artificial Sequence; identical to SEQ ID NO: 16580
  source: /note="Description of Artificial Sequence: Synthetic polypeptide"

SEQ ID NO: 17852 - protein, 120 aa, Artificial Sequence; identical to SEQ ID NO: 16584
  source: /note="Description of Artificial Sequence: Synthetic polypeptide"

SEQ ID NO: 17853 - protein, 120 aa, Artificial Sequence; identical to SEQ ID NO: 16585
  source: /note="Description of Artificial Sequence: Synthetic polypeptide"

SEQ ID NO: 17854 - protein, 120 aa, Artificial Sequence; identical to SEQ ID NO: 16586
  source: /note="Description of Artificial Sequence: Synthetic polypeptide"

SEQ ID NO: 17855 - protein, 120 aa, Artificial Sequence; identical to SEQ ID NO: 16581
  source: /note="Description of Artificial Sequence: Synthetic polypeptide"

SEQ ID NO: 17856 - protein, 120 aa, Artificial Sequence; identical to SEQ ID NO: 16587
  source: /note="Description of Artificial Sequence: Synthetic polypeptide"

SEQ ID NO: 17857 - protein, 120 aa, Artificial Sequence; identical to SEQ ID NO: 16597
  source: /note="Description of Artificial Sequence: Synthetic polypeptide"

SEQ ID NO: 17858 - protein, 120 aa, Artificial Sequence; identical to SEQ ID NO: 16588
  source: /note="Description of Artificial Sequence: Synthetic polypeptide"

SEQ ID NO: 17859 - protein, 120 aa, Artificial Sequence; identical to SEQ ID NO: 16589
  source: /note="Description of Artificial Sequence: Synthetic polypeptide"

SEQ ID NO: 17860 - protein, 120 aa, Artificial Sequence; identical to SEQ ID NO: 16590
  source: /note="Description of Artificial Sequence: Synthetic polypeptide"

SEQ ID NO: 17861 - protein, 120 aa, Artificial Sequence; identical to SEQ ID NO: 16591
  source: /note="Description of Artificial Sequence: Synthetic polypeptide"

SEQ ID NO: 17862 - protein, 120 aa, Artificial Sequence; identical to SEQ ID NO: 16592
  source: /note="Description of Artificial Sequence: Synthetic polypeptide"

SEQ ID NO: 17863 - protein, 120 aa, Artificial Sequence; identical to SEQ ID NO: 16593
  source: /note="Description of Artificial Sequence: Synthetic polypeptide"

SEQ ID NO: 17864 - protein, 120 aa, Artificial Sequence; identical to SEQ ID NO: 16594
  source: /note="Description of Artificial Sequence: Synthetic polypeptide"

SEQ ID NO: 17865 - protein, 120 aa, Artificial Sequence; identical to SEQ ID NO: 16595
  source: /note="Description of Artificial Sequence: Synthetic polypeptide"

SEQ ID NO: 17866 - protein, 120 aa, Artificial Sequence; identical to SEQ ID NO: 16582
  source: /note="Description of Artificial Sequence: Synthetic polypeptide"

SEQ ID NO: 17867 - protein, 120 aa, Artificial Sequence; identical to SEQ ID NO: 16583
  source: /note="Description of Artificial Sequence: Synthetic polypeptide"

SEQ ID NO: 17868 - protein, 125 aa, Artificial Sequence
  source: /note="Description of Artificial Sequence: Synthetic polypeptide"
QVQLQESGPGLVKPSETVSLTCSVSGDSLSHNYWSWIRQPPGKGLEWIGYIYPSGTSGTTKYNPSLKSRVTISSDTSKNQFSLRLTSVTAADTAIYYCAKEAITANAWPVSDYWGQGTLVTVSSA

SEQ ID NO: 17869 - protein, 116 aa, Mus musculus; identical to SEQ ID NO: 13240

SEQ ID NO: 17870 - protein, 116 aa, Mus musculus; identical to SEQ ID NO: 13241

SEQ ID NO: 17871 - protein, 122 aa, Artificial Sequence
  source: /note="Description of Artificial Sequence: Synthetic polypeptide"
EVQLQQSGAELVKPGASVKLSCTTSGFNIKDTYIHWVKKRPEQGLEWIGRIDPTNGNNKYDPKFQGKATITADTSSNTAYLQLSSLTSEDTAVYYCTREDGYRYDDWYFDVWGAGTTVTVSS

SEQ ID NO: 17872 - protein, 140 aa, Artificial Sequence; identical to SEQ ID NO: 14020
  source: /note="Description of Artificial Sequence: Synthetic polypeptide"

SEQ ID NO: 17873 - protein, 138 aa, Artificial Sequence; identical to SEQ ID NO: 14021
  source: /note="Description of Artificial Sequence: Synthetic polypeptide"

SEQ ID NO: 17874 - protein, 142 aa, Artificial Sequence; identical to SEQ ID NO: 14022
  source: /note="Description of Artificial Sequence: Synthetic polypeptide"

SEQ ID NO: 17875 - protein, 116 aa, Artificial Sequence
  source: /note="Description of Artificial Sequence: Synthetic polypeptide"
QVQLKESGPGLVQPSQTLSLTCTVSGLSLASNSVSWIRQPPGKGLEWMGVIWNHGGTDYNSVIKSRLSISRDTSKSQVFLKMNSLQTEDTAMYFCVRKGGIYFDYWGQGVMVTVSS

SEQ ID NO: 17876 - protein, 135 aa, Artificial Sequence; identical to SEQ ID NO: 13237
  source: /note="Description of Artificial Sequence: Synthetic polypeptide"

SEQ ID NO: 17877 - protein, 120 aa, Artificial Sequence [sequence omitted]

SEQ ID NO: 17878 - protein, 134 aa, Mus musculus; identical to SEQ ID NO: 12481

SEQ ID NO: 17879 - protein, 116 aa, Mus musculus; identical to SEQ ID NO: 13239

SEQ ID NO: 17880 - protein, 123 aa, Artificial Sequence
  source: /note="Description of Artificial Sequence: Synthetic polypeptide"
QVQLVQSGPGLVKPSETLSLTCTVSGGSVSSGTYCWSWIRQPPGKGLEWIAYICNSGSTSYNPSLKSRGTISVDTSKNQFSLRLSSVTAADTAVYYCARLSLIMVYHIFDYWGQGTLVTVSSA

SEQ ID NO: 17881 - protein, 125 aa, Artificial Sequence
  source: /note="Description of Artificial Sequence: Synthetic polypeptide"
QVQLVESGAEVRKPGASVKVSCQASGYTFTDHYLHWLRQAPGQGLEWMGWINPNIIEARYVARKFRGSVNLTRDTAIQTVYIEMSRLTSDDTATYFCARALKEGGYSYGYYDHWGPGTLVTVSSA

SEQ ID NO: 17882 - protein, 153 aa, Mus musculus
MRVLILLWLFTAFPGFLSDVQLQESGPGLVKPSQSLSLTCTVTAYSVTSDYAWNWIRQFPGNKLEWMGYISYSGTTRYNPSLKSRISITRDTSKNQFFLQLNSMTAEDTATYYCSRQGRGFPYWGQGTLVTVSAAKTTPPSVYPLAPGSAAQT

SEQ ID NO: 17883 - protein, 109 aa, Homo sapiens
QVQLQQSGSELKKPGASVKVSCKASGYTFTNYGMNWVKQAPGQGLKWMGWINTYTGEPTYTDDFKGRFAFSLDTSVSTAYLQISSLKADDTAVYFCARGGFGSSYWYFV

SEQ ID NO: 17884 - protein, 120 aa, Mus sp.
VKLQESGPELKKPGETVKISCKASGYTFTNYGMNWVKQAPGKGLKWMGWINTYTGEPTYTDDFKGRFAFSLETSATTAYLQINNLKSEDMATYFCARGGFGSSYWYFDVWGQGTTVTVSS

SEQ ID NO: 17885 - protein, 117 aa, Artificial Sequence
  source: /note="Description of Artificial Sequence: Synthetic polypeptide"
EVQLQQSGADLVRSGAAVKLSCTASGFNIKDYYLHWVKQRPEQGLEWIGWIDPENGDTEYAPKFQDKATMTADSSSNTAYLQLNSLTSEDTGVYYCNTRYGTSSACWGQGTTLTVSS

SEQ ID NO: 17886 - protein, 120 aa, Artificial Sequence
  source: /note="Description of Artificial Sequence: Synthetic polypeptide"
EVQLLEQSGAELVKPGASVKISCKASGYAFTNYWLGWVKQRPGHGLEWIGDLFPGSGNTHYNERFRGKATLTADKSSSTAFMQLSSLTSEDSAVYFCARLRNWDEAMDYWGQGTTVTVSS

SEQ ID NO: 17887 - protein, 124 aa, Artificial Sequence
  source: /note="Description of Artificial Sequence: Synthetic polypeptide"
EVQLLEQSGAELARPGASVKLSCKASGYTFTNYGLSWVKQRPGQVLEWIGEVYPRIGNAYYNEKFKGKATLTADKSSSTASMELRSLTSEDSAVYFCARRGSYDTNYDWYFDVWGQGTTVTVSS

SEQ ID NO: 17888 - protein, 120 aa, Artificial Sequence
  source: /note="Description of Artificial Sequence: Synthetic polypeptide"
EVQLLEQSGAELVRPGTSVKISCKASGYAFTNYWLGWVKQRPGHGLEWIGDIFPGSGNIHYNEKFKGKATLTADKSSSTAYMQLSSLTFEDSAVYFCARLRNWDEPMDYWGQGTTVTVSS

SEQ ID NO: 17889 - protein, 118 aa, Homo sapiens; identical to SEQ ID NO: 14234

SEQ ID NO: 17890 - protein, 120 aa, Artificial Sequence
  source: /note="Description of Artificial Sequence: Synthetic polypeptide"
QVQLQQPGAELVRPGTSVKLSCKASGYTFTSHWLHWVKQRPGQGLEWIGVLDPSDFYSNYNQNFKGKATLTVDTSSSTAYMQLSSLTSEDSAVYYCARGLLSGDYAMDYWGQGTSVTVSS

SEQ ID NO: 17891 - protein, 120 aa, Artificial Sequence
  source: /note="Description of Artificial Sequence: Synthetic polypeptide"
QVTLKESGPGILRPSQTLSLTCSFSGFSLSTFGLSVGWIRQPSGKGLEWLAHIWWDDDKYYNPALKSRLTISKDTSKNQVFLKIANVDTADTATYYCARIGADALPFDYWGQGTTLTVSS

SEQ ID NO: 17892 - protein, 117 aa, Artificial Sequence
  source: /note="Description of Artificial Sequence: Synthetic polypeptide"
QVQLQQSDAELVKPGASVKISCKVSGYTFTDHIIHWMKQRPEQGLEWIGYIYPRDGYIKYNEKFKGKATLTADKSSSTAYMQVNSLTSEDSAVYFCARGYYYAMDYWGQGTSVTVSS

SEQ ID NO: 17893 - protein, 115 aa, Artificial Sequence
  source: /note="Description of Artificial Sequence: Synthetic polypeptide"
QVQLLQPGAELVRPGTSVKLSCKTSGYTFSSYWMHWVKQRPGQGLEWIGMIDPSDVYTNYNPKFKGKATLTVDTSSSTAYMQLSSLTSEDSAVYYCARNYSGDYWGQGTTLTVSS

SEQ ID NO: 17894 - protein, 121 aa, Artificial Sequence
  source: /note="Description of Artificial Sequence: Synthetic polypeptide"
QIQLVQSGPELKKPGEAVKISCKSSGYTFTTYGMSWVKQAPGRALKWMGWINTYSGVPTYADDFKGRFAFSLESSASTAYLQINNLKNEDTATYFCARGRDGYQVAWFAYWGQGTLVTVSA

SEQ ID NO: 17895 - protein, 115 aa, Artificial Sequence
  source: /note="Description of Artificial Sequence: Synthetic polypeptide"
QVQLQQPGAELVRPGTSVKLSCKASGYTFTNYWMHWVKQRPGQGLEWIGMIDPSDSYTNYNPKFKGKATLTVDTSSSTAYMQLSSLTSEDSAVYYCARNYSGDYWGQGTTLTVSS

SEQ ID NO: 17896 - protein, 119 aa, Artificial Sequence
  source: /note="Description of Artificial Sequence: Synthetic polypeptide"
EVQLVESGGGLVKPGGSLKLSCAASGFTFSDYAMSWVRQTPEKRLEWVATISDGGTYTYYPDNVKGRFTISRDNAKNNLYLQMSHLKSEDTAMYYCAREWGDYDGFDYWGQGTTLTVSS

SEQ ID NO: 17897 - protein, 119 aa, Artificial Sequence
  source: /note="Description of Artificial Sequence: Synthetic polypeptide"
EVQLVESGGGLVKPGGSLRLSCAASGFTFSDYAMSWVRQAPGKGLEWVATISDGGTYTYYPDNVKGRFTISRDNAKNSLYLQMNSLRAEDTAVYYCAREWGDYDGFDYWGQGTLVTVSS

SEQ ID NO: 17898 - protein, 119 aa, Artificial Sequence [sequence omitted]

SEQ ID NO: 17899 - protein, 119 aa, Artificial Sequence
  source: /note="Description of Artificial Sequence: Synthetic polypeptide"
QVQLVESGGGLVKPGGSLRLSCAASGFTFSDYAMSWIRQAPGKGLEWVSTISDGGTYTYYPDNVKGRFTISRDNAKNSLYLQMNSLRAEDTAVYYCAREWGDYDGFDYWGQGTLVTVSS

SEQ ID NO: 17900 - protein, 119 aa, Artificial Sequence
  source: /note="Description of Artificial Sequence: Synthetic polypeptide"
QVQLVESGGGLVKPGGSLRLSCAASGFTFSDYAMSWIRQAPGKGLEWVSTISDGGTYTYYPDSVKGRFTISRDNAKNSLYLQMNSLRAEDTAVYYCAREWGDYDGFDYWGQGTLVTVSS

SEQ ID NO: 17901 - protein, 119 aa, Artificial Sequence
  source: /note="Description of Artificial Sequence: Synthetic polypeptide"
EVQLVESGGGLVKPGGSLRLSCAASGFTFSDYAMSWVRQAPGKGLEWVSTISDGGTYTYYPDNVKGRFTISRDNAKNSLYLQMNSLRAEDTAVYYCAREWGDYDGFDYWGQGTLVTVSS

SEQ ID NO: 17902 - protein, 119 aa, Artificial Sequence
  source: /note="Description of Artificial Sequence: Synthetic polypeptide"
EVQLLESGGGLVQPGGSLRLSCAASGFTFSDYAMSWVRQAPGKGLEWVSTISDGGTYTYYPDNVKGRFTISRDNSKNTLYLQMNSLRAEDTAVYYCAREWGDYDGFDYWGQGTLVTVSS

SEQ ID NO: 17903 - protein, 119 aa, Artificial Sequence
  source: /note="Description of Artificial Sequence: Synthetic polypeptide"
QVQLVESGGGVVQPGRSLRLSCAASGFTFSDYAMSWVRQAPGKGLEWVATISDGGTYTYYPDNVKGRFTISRDNSKNTLYLQMSSLRAEDTAVYYCAREWGDYDGFDYWGQGTLVTVSS

SEQ ID NO: 17904 - protein, 119 aa, Artificial Sequence
  source: /note="Description of Artificial Sequence: Synthetic polypeptide"
EVQLVESGGGLVQPGGSLRLSCAASGFTFSDYAMSWVRQAPGKGLEWVATISDGGTYTYYPDNVKGRFTISRDNAKNSLYLQMNSLRAEDTAVYYCAREWGDYDGFDYWGQGTLVTVSS

SEQ ID NO: 17905 - protein, 122 aa, Artificial Sequence
  source: /note="Description of Artificial Sequence: Synthetic polypeptide"
QVQLVESGGGVVQSGKSLRLSCVASGFTFSNYGMHWVRQTPGKGLEWVARIWFDGTNKYYTDSVKGRFTLSRDSSKNTLYLQMNSLRAEDTAVYFCAREESLELDHYVMDVWGQGTTVTVSS

SEQ ID NO: 17906 - protein, 119 aa, Artificial Sequence
  source: /note="Description of Artificial Sequence: Synthetic polypeptide"
EVQLVESGGGVVRPGGSLRLSCAASGFTFEDYGMNWVRQVPGKGLEWVSGTNWNGGITGYTGSVKGRFTISRDNAKNSLYLQMNSLRAEDTALYHCARDSGDQDAFDIWGQGTMVTVSS

SEQ ID NO: 17907 - protein, 123 aa, Artificial Sequence
  source: /note="Description of Artificial Sequence: Synthetic polypeptide"
EVQLVESGGGLVQPGGSLRLSCAASGFTFSSYDMHWVRQATGKGLEWVSAIGPAGDTYYPVSAMGRFTISRDDAKNSLYLQMNSLRAGDTAVYYCAREGVTIRPDDYFGLDVWGQGTTVTVSA

SEQ ID NO: 17908 - protein, 120 aa, Artificial Sequence
  source: /note="Description of Artificial Sequence: Synthetic polypeptide"
QVQLVESGGGVVQPGRSLRLSCAASGFTFSSFGMHWVRQAPGKGLEWVAVIWYVEINKYHADSVKGRFTISRDDSKNTVYLQMNSLRAEDTAVYYCARDWNDGDYGMDVWGQGTTVTVSS

SEQ ID NO: 17909 - protein, 123 aa, Artificial Sequence
  source: /note="Description of Artificial Sequence: Synthetic polypeptide"
EVQLVESGGGLVQPGGSLRLSCAASGFTFSNYDIHWVRQATGKGLEWVSAIGPAGDTYYSDSVKGRFTISREDAKNSLYLQMSSLRAGDTAVYYCASEGIAVRPDDYYGMDVWGQGTTVTVSA

SEQ ID NO: 17910 - protein, 127 aa, Artificial Sequence
  source: /note="Description of Artificial Sequence: Synthetic polypeptide"
EVQLLESGGDLVQPGGSLRLSCATSGFSFSSDAMNWVRQAPGKGLEWVSGISGSGGNTYYADSVKGRFTISRDISKSTLSLQMNSLRAEDTAVYYCAKEGTNMVRGVVMEDNGMDVWGQGTTVTVSA

SEQ ID NO: 17911 - protein, 119 aa, Artificial Sequence
  source: /note="Description of Artificial Sequence: Synthetic polypeptide"
QVQLVESGGGVVQPGRSLRLSCAASGFTFNNYGMHWVRQAPGKGLAWVAVMWYSESHKYYADSVKGRFTISRDNSKNTLYLEMNSLRVEDTAIYYCARDLGDPDAFDIWGQGTMVTVSS

SEQ ID NO: 17912 - protein, 125 aa, Artificial Sequence
  source: /note="Description of Artificial Sequence: Synthetic polypeptide"
QVQLVESGGGVVQPGRSLRLSCAASGFTFSSYGMHWVRQAPGKGLEWVAGMSYDGSSKYYEDSVKGRFTISRDNSKNTLNLQMNSLRVEDTAVYYCAKERDYVEYVDSYYGMDVWGQGTTVTVSA

SEQ ID NO: 17913 - protein, 125 aa, Artificial Sequence
  source: /note="Description of Artificial Sequence: Synthetic polypeptide"
EVQLVESGGGVVRPGGSLRLSCAASGFTFDDYGMSWVRQFPGKGLEWVSSIDGNGGNTGYSDSVKGRFTISRDNAKNSLHLQMNSLRAEDTALYHCARDPDYDSVWGNYRPFDYWGQGTLVTVSS

SEQ ID NO: 17914 - protein, 124 aa, Artificial Sequence
  source: /note="Description of Artificial Sequence: Synthetic polypeptide"
QVQLQESGPGLVKPSQTLSLTCTVSGGSINSGGYYWSWIRQHPGKGLEWIGYISYSGNTNYNPSLKSRVTISVDTSKNQFSLTLTSVTAADTAVYYCARDSDVDTGLVDGFDVWGQGTMVTVSS

SEQ ID NO: 17915 - protein, 124 aa, Artificial Sequence
  source: /note="Description of Artificial Sequence: Synthetic polypeptide"
EVQLVESGGGLVQPGGSLRLSCAASGFSVSYYDMHWVRQVTGKGLEWVSAIGPAGDTYYPGSVKGRFTISREDATNSLYLQIHSLGAGDTAVYYCAREGAIAARPDDYYGMDVWGQGTTVTVSS

SEQ ID NO: 17916 - protein, 121 aa, Artificial Sequence
  source: /note="Description of Artificial Sequence: Synthetic polypeptide"
EVQLVESGGGLVQPGRSLRLSCAASGFTFGDYAMHWVRQAPGKGLEWVSGINLNSGTIGYADSVKGRFTISRDNAKNSLYLQMNSLRAEDTAFYYCAKDIDGYYHYAMDVWGQGTTVTVSS

SEQ ID NO: 17917 - protein, 118 aa, Artificial Sequence
  source: /note="Description of Artificial Sequence: Synthetic polypeptide"
QVQLVESGGGVVQPGRSLRLSCAASGFTFINYGIHWVRQGPGKGLEWVAVIWYDGSNEWYADSVKGRFTISRDNSKNTVYLEMNKLRAEDTAVYYCAREEEDYGMDVWGQGTTVTVSS

SEQ ID NO: 17918 - protein, 119 aa, Artificial Sequence
  source: /note="Description of Artificial Sequence: Synthetic polypeptide"
QVQLVESGGGLVKPGGSLRLSCAASGFTFSDFNMGWIRQAPGKGLEWVSHISGSGNVIYYADSVKGRFAISRDNGKNSLYLQVNSLRAEDTAVYYCARDIGDSDAFDIWGQGTMVTVSS

SEQ ID NO: 17919 - protein, 119 aa, Artificial Sequence
  source: /note="Description of Artificial Sequence: Synthetic polypeptide"
EVQLVESGGGLVHPGRSLRLSCAASGFTFDDYAMHWVRQSPGKGLEWVSGISWNSVIKHSTDSVRGRFTISRDNAKNSLYLQMNSLKPEDTAFYYCAKDEDDWNYLDYWGQGTLVTVSS

SEQ ID NO: 17920 - protein, 122 aa, Artificial Sequence
  source: /note="Description of Artificial Sequence: Synthetic polypeptide"
QVQLVESGGGVVQPGRSLRLSCAASGFTFSNYGMHWVRQAPGKGLEWVARIWYDGSNKYYADSVKGRFTISRDSSKNTLYLQMNSLRAEDTAVYYCAREGEQNLDYYPLDVWGQGTTVTVSS

SEQ ID NO: 17921 - protein, 118 aa, Artificial Sequence
  source: /note="Description of Artificial Sequence: Synthetic polypeptide"
QVQLVQSGAEVKKPGASVKVSCKASGYTFTRYGISWVRQAPGLGLEWMGWISAYDGYTNFAQKFQGRFTMTTDTSTNTAYMELRGLRSDDTAVYYCAREEEDAAFDIWGQGTMVTVSS

SEQ ID NO: 17922 - protein, 124 aa, Artificial Sequence
  source: /note="Description of Artificial Sequence: Synthetic polypeptide"
QVQLQESGPGLINPSQTLSVTCTVSGGSISSGGYYWTWIRQHPGKGLEWIGYISYSGNTNYNPSLKSRVTISVDTAKNQFSLKLSSVTAADTAVYFCARDSDVDTAMVDGIDIWGQGTMVTVSS

SEQ ID NO: 17923 - protein, 123 aa, Artificial Sequence
  source: /note="Description of Artificial Sequence: Synthetic polypeptide"
EVQLLESGGGLVQPGGSLRLSCVASGFTFSSFAMSWVRQAPGKGLEWVSVISGSGGSTNHADSVRGRFTISRDNSLNTVYLQMHSLRAEDTALYYCVKAETSSSYFYYGMDVWGQGTTVTVSS

SEQ ID NO: 17924 - protein, 121 aa, Artificial Sequence
  source: /note="Description of Artificial Sequence: Synthetic polypeptide"
EVQLVESGGGVVRPGGSLRLSCAASGFTFDDYAMHWVRQAPGKGLEWVAGISWNSGSIDYADSVKGRFTISRDNAKNSLYLQMNSLRAGDTALYYCAKDILDLDYYGLDVWGQGTTVTVSS

SEQ ID NO: 17925 - protein, 122 aa, Artificial Sequence
  source: /note="Description of Artificial Sequence: Synthetic polypeptide"
EVQLVESGGGLVQPGRSLRLSCAASGFTFDDYAMHWVRQAPGKGLEWVSSISWNSGSIGYADSVKGRFTISRDNAKNSLYLQMNSLKPEDTALYYCTKDTDYGDYLDAFDIWGQGTMVAVAS

SEQ ID NO: 17926 - protein, 119 aa, Artificial Sequence
  source: /note="Description of Artificial Sequence: Synthetic polypeptide"
EVQLVESGGGVVRPGGSLRLSCAASGFTFDDYGMSWVRQAPGKGLECVSGINWNGGSTDYADSVKGRFTISRDNAKNSLYLQMNSLRAEDTASYYCARDGGDWDYFDLWGRGTLVTVSS

SEQ ID NO: 17927 - protein, 119 aa, Artificial Sequence
  source: /note="Description of Artificial Sequence: Synthetic polypeptide"
EVQLVESGGGVVRPGGSLRLSCAASGFTFDDYGMSWVRQAPGKGLECVSGISWNGGNTDYADSVKGRFTISRDNAKNSLYLQMNSLRAEDTALYHCARDGGDWDYFDLWGRGTLVTVSS

SEQ ID NO: 17928 - protein, 121 aa, Artificial Sequence
  source: /note="Description of Artificial Sequence: Synthetic polypeptide"
EVQLVESGGGLVQPGRSLRLSCAASGFTFDDYAMYWVRQAPGKGLEWVSGISWNSGSIGYADSVKGRFTISRDNAKNSLYLQMDSLRAEDTALYYCARDMMEVDLYGMDVWGQGTTVTVSS

SEQ ID NO: 17929 - protein, 119 aa, Artificial Sequence
  source: /note="Description of Artificial Sequence: Synthetic polypeptide"
EVQLVESGGGVVRPGGSLRLSCVASGFTFDDYGMSWVRQAPGKGLECVSGINWNGGSTDYADSVKGRFTISRDNAKNSLYLQMNSLRAEDTALYHCARDGGDWDYFDLWGRGTLVTVSS

SEQ ID NO: 17930 - protein, 119 aa, Artificial Sequence
  source: /note="Description of Artificial Sequence: Synthetic polypeptide"
EVQLVESGGGLVKPGGSLRLSCVASGFTFSSYNMNWVRQAPGKGLEWVSFISGSSNYIHYADSVKGRFTISRDNAKNALYLQMNSLRAEDTAVYYCARDDGDYDWFDPWGQGTLVTVSS

SEQ ID NO: 17931 - protein, 119 aa, Artificial Sequence
  source: /note="Description of Artificial Sequence: Synthetic polypeptide"
EVQLVQSGGGLVKPGGSLRLSCAASGFTFSNFNMNWVRQAPGKGLEWVSFISSLSTYTYYADSVKGRFTISRDNAKNSLYLQMNSLRAEDTAVYYCARDDGDHDWFDPWGQGTLVTVSS

SEQ ID NO: 17932 - protein, 121 aa, Artificial Sequence
  source: /note="Description of Artificial Sequence: Synthetic polypeptide"
EMQLVESGGGLVQPDRSLRLSCAASGFNFDNYAIHWVRQAPGKGLEWVSGISWNSGNIGYADSVKGRFTISRDNAKNSLFLLMNSLRPDDSALYYCTRGYNWNALSPMDVWGQGTTVTVSS

SEQ ID NO: 17933 - protein, 122 aa, Artificial Sequence
  source: /note="Description of Artificial Sequence: Synthetic polypeptide"
QVQLQQWDAGLLKPSETLSLTCAVYGGSFSSYYWSWIRQPPGKGLEWIGEINHRGSTNYNPSLKSRVTISVDTSKNQFSLKLRSVTAADTAVYYCARGGVAARPDWHFFDYWGQGTLVTVSS

SEQ ID NO: 17934 - protein, 119 aa, Artificial Sequence
  source: /note="Description of Artificial Sequence: Synthetic polypeptide"
EVQLVESGGGVVRPGGSLRLSCAASGFTFDDYGMSWVRQVPGKGLEWVSGLNWNGGITGYTDSVKGRFTISRDNAKNSLYLQMNSLRAEDTAFYHCARDSGDQDAFDIWGQGTMVTVSS

SEQ ID NO: 17935 - protein, 122 aa, Artificial Sequence
  source: /note="Description of Artificial Sequence: Synthetic polypeptide"
QVQVVESGGGVVQPGRSLRLSCAASGFTFSDYGMHWVRQAPGKGLEWVAIISYDGSNKYYADSVKGRFTVSRDNSKNTLYLQLDSLRPEDAAVFYCAREGAFNLDYYAMDVWGQGTTVTVSS

SEQ ID NO: 17936 - protein, 122 aa, Artificial Sequence
  source: /note="Description of Artificial Sequence: Synthetic polypeptide"
  MOD_RES (1)..(1): Any amino acid
  MOD_RES (6)..(6): Any amino acid
  MOD_RES (16)..(16): Any amino acid
  MOD_RES (49)..(49): Any amino acid
  MOD_RES (54)..(54): Any amino acid
  MOD_RES (58)..(58): Any amino acid
  MOD_RES (88)..(88): Any amino acid
  MOD_RES (93)..(93): Any amino acid
  MOD_RES (102)..(103): Any amino acid
  MOD_RES (106)..(107): Any amino acid
XVQLVXSGGGLVQPGXSLRLSCAASGFTFDDYAMHWVRQAPGKGLEWVXGISWXSGSXGYADSVKGRFTISRDNAKNSLYLQMNSLRXEDTAXYYCARDLGXXQWXXGFDYWGQGTLVTVSS

SEQ ID NO: 17937 - protein, 122 aa, Artificial Sequence
  source: /note="Description of Artificial Sequence: Synthetic polypeptide"
EVQLVESGGGLVQPGRSLRLSCAASGFTFDDYAMHWVRQAPGKGLEWVSGISWDSGSVGYADSVKGRFTISRDNAKNSLYLQMNSLRAEDTALYYCARDLGAYQWEEGFDYWGQGTLVTVSS

SEQ ID NO: 17938 - protein, 122 aa, Artificial Sequence
  source: /note="Description of Artificial Sequence: Synthetic polypeptide"
EVQLVESGGGLVQPGRSLRLSCAASGFTFDDYAMHWVRQAPGKGLEWVSGISWNSGSRGYADSVKGRFTISRDNAKNSLYLQMNSLRAEDTALYYCARDLGFNQWEEGFDYWGQGTLVTVSS

SEQ ID NO: 17939 - protein, 122 aa, Artificial Sequence
  source: /note="Description of Artificial Sequence: Synthetic polypeptide"
EVQLVESGGGLVQPGRSLRLSCAASGFTFDDYAMHWVRQAPGKGLEWVSGISWNSGSTGYADSVKGRFTISRDNAKNSLYLQMNSLRAEDTALYYCARDLGFNQWVDGFDYWGQGTLVTVSS

SEQ ID NO: 17940 - protein, 122 aa, Artificial Sequence
  source: /note="Description of Artificial Sequence: Synthetic polypeptide"
EVQLVESGGGLVQPGRSLRLSCAASGFTFDDYAMHWVRQAPGKGLEWVSGISWDSGSVGYADSVKGRFTISRDNAKNSLYLQMNSLRAEDTALYYCARDLGYNQWWEGFDYWGQGTLVTVSS

SEQ ID NO: 17941 - protein, 122 aa, Artificial Sequence
  source: /note="Description of Artificial Sequence: Synthetic polypeptide"
EVQLVESGGGLVQPGRSLRLSCAASGFTFDDYAMHWVRQAPGKGLEWVSGISWDSGSTGYADSVKGRFTISRDNAKNSLYLQMNSLRAEDTALYYCARDLGAYQWVEGFDYWGQGTLVTVSS

SEQ ID NO: 17942 - protein, 122 aa, Artificial Sequence
  source: /note="Description of Artificial Sequence: Synthetic polypeptide"
EVQLVESGGGLVQPGRSLRLSCAASGFTFDDYAMHWVRQAPGKGLEWVSGISWNSGSVGYADSVKGRFTISRDNAKNSLYLQMNSLRAEDTALYYCARDLGYNQWLEGFDYWGQGTLVTVSS

SEQ ID NO: 17943 - protein, 122 aa, Artificial Sequence
  source: /note="Description of Artificial Sequence: Synthetic polypeptide"
EVQLVESGGGLVQPGRSLRLSCAASGFTFDDYAMHWVRQAPGKGLEWVSGISWNSGSTGYADSVKGRFTISRDNAKNSLYLQMNSLRAEDTALYYCARDLGYNQWLEGFDYWGQGTLVTVSS

SEQ ID NO: 17944 - protein, 122 aa, Artificial Sequence
  source: /note="Description of Artificial Sequence: Synthetic polypeptide"
QVQLVQSGGGLVQPGGSLRLSCAASGFTFDDYAMHWVRQAPGKGLEWVAGISWDSGSTGYADSVKGRFTISRDNAKNSLYLQMNSLRAEDTALYYCARDLGAYQWVEGFDYWGQGTLVTVSS

SEQ ID NO: 17945 - protein, 122 aa, Artificial Sequence
  source: /note="Description of Artificial Sequence: Synthetic polypeptide"
QVQLVQSGGGLVQPGGSLRLSCAASGFTFDDYAMHWVRQAPGKGLEWVAGISWNSGSIGYADSVKGRFTISRDNAKNSLYLQMNSLRPEDTAVYYCARDLGYNQWVEGFDYWGQGTLVTVSS

SEQ ID NO: 17946 - protein, 122 aa, Artificial Sequence
  source: /note="Description of Artificial Sequence: Synthetic polypeptide"
EVQLVESGGGLVQPGRSLRLSCAASGFTFDDYAMHWVRQAPGKGLEWVSGISWNSGSIGYADSVKGRFTISRDNAKNSLYLQMNSLRAEDTALYYCARDLGAKQWLEGFDYWGQGTLVTVSS

SEQ ID NO: 17947 - protein, 122 aa, Artificial Sequence
  source: /note="Description of Artificial Sequence: Synthetic polypeptide"
EVQLVESGGGLVQPGRSLRLSCAASGFTFDDYAMHWVRQAPGKGLEWVSGISWNSGSMGYADSVKGRFTISRDNAKNSLYLQMNSLRAEDTALYYCARDLGAFQWEEGFDYWGQGTLVTVSS

SEQ ID NO: 17948 - protein, 122 aa, Artificial Sequence
  source: /note="Description of Artificial Sequence: Synthetic polypeptide"
EVQLVESGGGLVQPGRSLRLSCAASGFTFDDYAMHWVRQAPGKGLEWVSGISWDSGSSGYADSVKGRFTISRDNAKNSLYLQMNSLRAEDTALYYCARDLGAFQWQEGFDYWGQGTLVTVSS

SEQ ID NO: 17949 - protein, 122 aa, Artificial Sequence
  source: /note="Description of Artificial Sequence: Synthetic polypeptide"
EVQLVESGGGLVQPGRSLRLSCAASGFTFDDYAMHWVRQAPGKGLEWVSGISWNSGSTGYADSVKGRFTISRDNAKNSLYLQMNSLRAEDTALYYCARDLGAMQWVEGFDYWGQGTLVTVSS

SEQ ID NO: 17950 - protein, 122 aa, Artificial Sequence
  source: /note="Description of Artificial Sequence: Synthetic polypeptide"
EVQLVESGGGLVQPGRSLRLSCAASGFTFDDYAMHWVRQAPGKGLEWVSGISWNSGSIGYADSVKGRFTISRDNAKNSLYLQMNSLRAEDTALYYCARDLGFNQWNEGFDYWGQGTLVTVSS

SEQ ID NO: 17951 - protein, 122 aa, Artificial Sequence
  source: /note="Description of Artificial Sequence: Synthetic polypeptide"
EVQLVESGGGLVQPGRSLRLSCAASGFTFDDYAMHWVRQAPGKGLEWVSGISWNSGSIGYADSVKGRFTISRDNAKNSLYLQMNSLRAEDTALYYCARDLGFNQWLEGFDYWGQGTLVTVSS

SEQ ID NO: 17952 - protein, 122 aa, Artificial Sequence
  source: /note="Description of Artificial Sequence: Synthetic polypeptide"
EVQLVESGGGLVQPGRSLRLSCAASGFTFDDYAMHWVRQAPGKGLEWVSGISWDSGSNGYADSVKGRFTISRDNAKNSLYLQMNSLRAEDTALYYCARDLGFMQWVDGFDYWGQGTLVTVSS

SEQ ID NO: 17953 - protein, 122 aa, Artificial Sequence
  source: /note="Description of Artificial Sequence: Synthetic polypeptide"
EVQLVESGGGLVQPGRSLRLSCAASGFTFDDYAMHWVRQAPGKGLEWVSGISWNSGSVGYADSVKGRFTISRDNAKNSLYLQMNSLRAEDTALYYCARDLGYNQWVEGFDYWGQGTLVTVSS

SEQ ID NO: 17954 - protein, 122 aa, Artificial Sequence
  source: /note="Description of Artificial Sequence: Synthetic polypeptide"
EVQLVESGGGLVQPGRSLRLSCAASGFTFDDYAMHWVRQAPGKGLEWVSGISWNSGSVGYADSVKGRFTISRDNAKNSLYLQMNSLRAEDTALYYCARDLGYNQWLDGFDYWGQGTLVTVSS

SEQ ID NO: 17955 - protein, 122 aa, Artificial Sequence
  source: /note="Description of Artificial Sequence: Synthetic polypeptide"
EVQLVESGGGLVQPGRSLRLSCAASGFTFDDYAMHWVRQAPGKGLEWVSGISWNSGSSGYADSVKGRFTISRDNAKNSLYLQMNSLRAEDTALYYCARDLGYNQWLEGFDYWGQGTLVTVSS

SEQ ID NO: 17956 - protein, 122 aa, Artificial Sequence
  source: /note="Description of Artificial Sequence: Synthetic polypeptide"
EVQLVESGGGLVQPGRSLRLSCAASGFTFDDYAMHWVRQAPGKGLEWVSGISWNSGSMGYADSVKGRFTISRDNAKNSLYLQMNSLRAEDTALYYCARDLGYNQWLEGFDYWGQGTLVTVSS

SEQ ID NO: 17957 - protein, 122 aa, Artificial Sequence
  source: /note="Description of Artificial Sequence: Synthetic polypeptide"
EVQLVESGGGLVQPGRSLRLSCAASGFTFDDYAMHWVRQAPGKGLEWVSGISWDSGSRGYADSVKGRFTISRDNAKNSLYLQMNSLRAEDTALYYCARDLGYNQWLEGFDYWGQGTLVTVSS

SEQ ID NO: 17958 - protein, 122 aa, Artificial Sequence
  source: /note="Description of Artificial Sequence: Synthetic polypeptide"
EVQLVESGGGLVQPGRSLRLSCAASGFTFDDYAMHWVRQAPGKGLEWVSGISWDSGSTGYADSVKGRFTISRDNAKNSLYLQMNSLRAEDTALYYCARDLGYNQWQEGFDYWGQGTLVTVSS

SEQ ID NO: 17959 - protein, 122 aa, Artificial Sequence
  source: /note="Description of Artificial Sequence: Synthetic polypeptide"
EVQLVESGGGLVQPGRSLRLSCAASGFTFDDYAMHWVRQAPGKGLEWVSGISWDSGSLGYADSVKGRFTISRDNAKNSLYLQMNSLRAEDTALYYCARDLGYSQWVEGFDYWGQGTLVTVSS

SEQ ID NO: 17960 - protein, 122 aa, Artificial Sequence
  source: /note="Description of Artificial Sequence: Synthetic polypeptide"
EVQLVESGGGLVQPGRSLRLSCAASGFTFDDYAMHWVRQAPGKGLEWVSGISWDSGSSGYADSVKGRFTISRDNAKNSLYLQMNSLRAEDTALYYCARDLGFNQWVEGFDYWGQGTLVTVSS

SEQ ID NO: 17961 - protein, 117 aa, Artificial Sequence
  source: /note="Description of Artificial Sequence: Synthetic polypeptide"
EVQLLESGGGLVQPGGSLRLSCAASGFTFSSYAMSWVRQAPGKGLEWVSAISGSGGSTYYADSVKGRFTISRDNSKNTLYLQMNSLRAEDTAVYYCAKGWLGPFDYWGQGTLVTVSS

SEQ ID NO: 17962 - protein, 117 aa, Artificial Sequence
  source: /note="Description of Artificial Sequence: Synthetic polypeptide"
EVQLLESGGGLVQPGGSLRLSCAASGFTFSSYAMSWVRQAPGKGLEWVSAILASGAITYYADSVKGRFTISRDNSKNTLYLQMNSLRAEDTAVYYCAKGWFGGFNYWGQGTLVTVSS

SEQ ID NO: 17963 - protein, 117 aa, Artificial Sequence
  source: /note="Description of Artificial Sequence: Synthetic polypeptide"
EVQLLESGGGLVQPGGSLRLSCAASGFTFSSYAMSWVRQAPGKGLEWVSAISGSGGSTYYADSVKGRFTISRDNSKNTLYLQMNSLRAEDTAVYYCAKAWMGPFDYWGQGTLVTVSS

SEQ ID NO: 17964 - protein, 117 aa, Artificial Sequence
  source: /note="Description of Artificial Sequence: Synthetic polypeptide"
EVQLLESGGGLVQPGGSLRLSCAASGFTFSSYAMSWVRQAPGKGLEWVSGIIGSGGITYYADSVKGRFTISRDNSKNTLYLQMNSLRAEDTAVYYCAKGWFGGFNYWGQGTLVTVSS

SEQ ID NO: 17965 - protein, 117 aa, Artificial Sequence
  source: /note="Description of Artificial Sequence: Synthetic polypeptide"
EVQLLESGGGLVQPGGSLRLSCAASGFTFSSYAMSWVRQAPGKGLEWVSAILGSGGSTYYADSVKGRFTISRDNSKNTLYLQMNSLRAEDTAVYYCAKGWFGGFNYWGQGTLVTVSS

SEQ ID NO: 17966 - protein, 117 aa, Artificial Sequence
  source: /note="Description of Artificial Sequence: Synthetic polypeptide"
EVQLLESGGGLVQPGGSLRLSCAASGFTFSSYAMSWVRQAPGKGLEWVSAIISSGGLTYYADSVKGRFTISRDNSKNTLYLQMNSLRAEDTAVYYCAKGWFGGFNYWGQGTLVTVSS

SEQ ID NO: 17967 - protein, 117 aa, Artificial Sequence
  source: /note="Description of Artificial Sequence: Synthetic polypeptide"
EVQLLESGGGLVQPGGSLRLSCAASGFTFSSYAMSWVRQAPGKGLEWVSAIIGSGSRTYYADSVKGRFTISRDNSKNTLYLQMNSLRAEDTAVYYCAKGWFGGFNYWGQGTLVTVSS

SEQ ID NO: 17968 - protein, 117 aa, Artificial Sequence
  source: /note="Description of Artificial Sequence: Synthetic polypeptide"
EVQLLESGGGLVQPGGSLRLSCAASGFTFSSYAMSWVRQAPGKGLEWVSAIIGSGSITYYADSVKGRFTISRDNSKNTLYLQMNSLRAEDTAVYYCAKGWFGGFNYWGQGTLVTVSS

SEQ ID NO: 17969 - protein, 117 aa, Artificial Sequence
  source: /note="Description of Artificial Sequence: Synthetic polypeptide"
EVQLLESGGGLVQPGGSLRLSCAASGFTFSSSAMSWVRQAPGKGLEWVSAISTNGNYTYYADSVKGRFTISRDNSKNTLYLQMNSLRAEDTAVYYCAKGWLGNFDYWGQGTLVTVSS

SEQ ID NO: 17970 - protein, 116 aa, Artificial Sequence
  source: /note="Description of Artificial Sequence: Synthetic polypeptide"
EVQLLESGGGLVQPGGSLRLSCAASGFTFSSHAMSWVRQAPGKGLEWVSAIWASGEQYYADSVKGRFTISRDNSKNTLYLQMNSLRAEDTAVYYCAKGWLGNFDYWGQGTLVTVSS

SEQ ID NO: 17971 - protein, 117 aa, Artificial Sequence
  source: /note="Description of Artificial Sequence: Synthetic polypeptide"
EVQLLESGGGLVQPGGSLRLSCAASGFTFSSYAMSWVRQAPGKGLEWVSAIIGSGGITYYADSVKGRFTISRDNSKNTLYLQMNSLRAEDTAVYYCAKGWFGGFNYWGQGTLVTVSS

SEQ ID NO: 17972 - protein, 117 aa, Artificial Sequence
  source: /note="Description of Artificial Sequence: Synthetic polypeptide"
EVQLLESGGGLVQPGGSLRLSCAASGFTFSSYAMSWVRQAPGKGLEWVSAISGSGGSTYYADSVKGRFTISRDNSKNTLYLQMNSLRAEDTAVYYCAKGWFTPFDYWGQGTLVTVSS

SEQ ID NO: 17973 - protein, 117 aa, Artificial Sequence
  source: /note="Description of Artificial Sequence: Synthetic polypeptide"
EVQLLESGGGLVQPGGSLRLSCAASGSTFSSYAMSWVRQAPGKGLEWVSAISGSAGYTYYADSVKGRFTISRDNSKNTLYLQMNSLRAEDTAVYYCAKGWFGNFDYWGQGTLVTVSS

SEQ ID NO: 17974 - protein, 117 aa, Artificial Sequence
  source: /note="Description of Artificial Sequence: Synthetic polypeptide"
EVQLLESGGGLVQPGGSLRLSCAASGFTFSSYAMSWVRQTPGKGLEWVSAIGVSTGSTYYADSVKGRFTISRDNSKNTLYLQMNSLRAEDTAVYYCAKGWLGPFDYWGQGTLVTVSS

SEQ ID NO: 17975 - protein, 117 aa, Artificial Sequence
  source: /note="Description of Artificial Sequence: Synthetic polypeptide"
EVQLLESGGGLVQPGGSLRLSCAASGFTFSSYAMSWVRQAPGKGLEWVSAIGVSTGSTYYADSVKGRFTISRDNSKNTLYLQMNSLRAEDTAVYYCAKGWLGPFDYWGQGTLVTVSS

SEQ ID NO: 17976 - protein, 117 aa, Artificial Sequence
  source: /note="Description of Artificial Sequence: Synthetic polypeptide"
EVQLLESGGGLVQPGGSLRLSCAASGFTFSSYAMSWVRQAPGKGLEWVSAISGSGGSTYYADSVKGRFTISRDNSKNTLYLQMNSLRAEDTAVYYCAKGWFGGFNYWGQGTLVTVSS

SEQ ID NO: 17977 - protein, 117 aa, Artificial Sequence
  source: /note="Description of Artificial Sequence: Synthetic polypeptide"
EVQLLESGGGLVQPGGSLRLSCAASGFTFSSYAMSWVRQAPGKGLEWVSAIIGSGASTYYADSVKGRFTISRDNSKNTLYLQMNSLRAEDTAVYYCAKGWFGGFNYWGQGTLVTVSS

SEQ ID NO: 17978 - protein, 117 aa, Artificial Sequence
  source: /note="Description of Artificial Sequence: Synthetic polypeptide"
EVQLLESGGGLVQPGGSLRLSCAASGFTFSSYAMSWVRQAPGKGLEWVSAISGSGGSTYYADSVKGRFTISRDNSKNTLYLQMNSLRAEDTAVYYCAKGWLGNFDYWGQGTLVTVSS

SEQ ID NO: 17979 - protein, 117 aa, Artificial Sequence
  source: /note="Description of Artificial Sequence: Synthetic polypeptide"
EVQLLESGGGLVQPGGSLRLSCAASGFTFSSYAMSWVRQAPGKGLEWVSAIWGGGRSTYYADSVKGRFTISRDNSKNTLYLQMNSLRAEDTAVYYCAKGWFGGFNYWGQGTLVTVSS

SEQ ID NO: 17980 - protein, 117 aa, Artificial Sequence
  source: /note="Description of Artificial Sequence: Synthetic polypeptide"
EVQLLESGGGLVQPGGSLRLSCAASGFTFSSYAMSWVRQAPGKGLEWVSAIISSGASTYYADSVKGRFTISRDNSKNTLYLQMNSLRAEDTAVYYCAKGWFGGFNYWGQGTLVTVSS

SEQ ID NO: 17981 - protein, 116 aa, Artificial Sequence
  source: /note="Description of Artificial Sequence: Synthetic polypeptide"
EVQLLESGGGLVQPGGSLRLSCAASGFTFSSYTMSWVRRSPGKGLEWVSAISGGGRTYYADSVKGRFTISRDNSKNTLYLQMNSLRAEDTAVYYCAKGWFTPFDYWGQGTLVTVSS

SEQ ID NO: 17982 - protein, 117 aa, Artificial Sequence
  source: /note="Description of Artificial Sequence: Synthetic polypeptide"
EVQLLESGGGLVQPGGSLRLSCAASGFTFSSYAMSWVRQAPGKGLEWVSAISGSGGSTYYADSVKGRFTISRDNSKNTLYLQMNSLRAEDTAVYYCAKGWFGNFDYWGQGTLVTVSS

SEQ ID NO: 17983 - protein, 116 aa, Artificial Sequence
  source: /note="Description of Artificial Sequence: Synthetic polypeptide"
EVQLLESGGGLVQPGGSLRLSCAASGFTFSPAYMSWVRQAPGKGLEWVSAISGSGGSTYYADSVKGRFTISRDNSKNTLYLQMNSLRAEDTAVYYCAKGWRAFDYWGQGTLVTVSS

SEQ ID NO: 17984 - protein, 120 aa, Artificial Sequence
  source: /note="Description of Artificial Sequence: Synthetic polypeptide"
QVQLVQSGAEVKKPGASVKVSCKASGYTFTENIIHWVRQAPGQGLEWMGWFHPGSGSIKYNEKFKDRVTMTADTSTSTVYMELSSLRSEDTAVYYCARHGGTGRGAMDYWGQGTLVTVSS

SEQ ID NO: 17985 - protein, 117 aa, Artificial Sequence
  source: /note="Description of Artificial Sequence: Synthetic polypeptide"
EVQLLESGGGLVQPGGSLRLSCAASGFTFSSFAMSWVRQSPGKGLEWVSAIIGSGSNTYYADSVKGRFTISRDNSKNTLYLQMNSLRAEDTAVYYCAKGWFGGFNYWGQGTLVTVSS

SEQ ID NO: 17986 - protein, 129 aa, Homo sapiens
HVQLQESGPGLVKPSETLSLTCTVSGGSISSNNYYWGWIRQTPGKGLEWIGSIYYSGSTNYNPSLKSRVTISVDTSKNQFSLKLSSVTAADTAVYYCARGARWQARPATRIDGVAFDIWGQGTMVTVSS

SEQ ID NO: 17987 - protein, 129 aa, Homo sapiens
QVQLQESGPGLVKPSETLSLTCTVSGGSISSNNYYWGWIRQTPGKGLEWIGSIYYSGSTNYNPSLKSRVTISVDTSKNQFSLKLSSVTAADTAVYYCARGARWQARPATRIDGVAFDIWGQGTMVTVSS

SEQ ID NO: 17988 - protein, 121 aa, Homo sapiens
EVQLVQSGAEVKKPGASVKVSCKASGYTFTSYGISWVRQAPGQGLEWMGWISAYNGNTNYAQKLQGRVTMTTDTSTSTAYMELRSLRSDDTAVYYCARDWSRSGYYLPDYWGQGTLVTVSS

SEQ ID NO: 17989 - protein, 143 aa, Homo sapiens
MGWSWVFLFLLSGTAGVLSEVQLQQSGPELVKPGASVKMSCKTSRYTFTEYTIHWVRQSHGKSLEWIGGINPNNGIPNYNQKFKGRATLTVGKSSSTAYMELRSLTSEDSAVYFCARRRIAYGYDEGHAMDYWGQGTSVTVSS

SEQ ID NO: 17990 - protein, 124 aa, Homo sapiens; identical to SEQ ID NO: 7220

SEQ ID NO: 17991 - protein, 124 aa, Homo sapiens; identical to SEQ ID NO: 7216

SEQ ID NO: 17992 - protein, 124 aa, Homo sapiens; identical to SEQ ID NO: 7217

SEQ ID NO: 17993 - protein, 124 aa, Homo sapiens; identical to SEQ ID NO: 7218

SEQ ID NO: 17994 - protein, 124 aa, Homo sapiens; identical to SEQ ID NO: 7219

SEQ ID NO: 17995 - protein, 127 aa, Homo sapiens
QVQLVESGGTLVQPGGSLRLSCAASGFTFSSYAMSWIRQAPGKGLEWVSGISASGGYIDYADSVKGRVTISRDNSKNMAYLQMSSLRAEDTALYYCAKGGNYQMLLDHWGQGTLVTVSSASTKGPKL

SEQ ID NO: 17996 - protein, 125 aa, Homo sapiens
QVQLVQSGAEVKKDGASVKVSCKATGGTFSGHAISWVRQAPGQRLEWMGEISPMFGTPNYAQSFQGRVTITADESTSYMEVSSLRSEDTATYYCARGANYRALLDYWGQGTLVTVSSASTKGPKL

SEQ ID NO: 17997 - protein, 134 aa, Homo sapiens
QVQLVESGGGLVQPGGSLRLSCAASGFTFSNYWMSWVRQAPGKGLEWVANIKQDGSEKYYVDSVKGRFTISRDNAKNSLYLQMNSLRAEDTAVYYCARGSLCTDGSCPTIGPGPNWGQGTLVTVSSAPTKAPKL

SEQ ID NO: 17998 - protein, 132 aa, Artificial Sequence
  source: /note="Description of Artificial Sequence: Synthetic polypeptide"
QVQLQQSGAEVKKPGSSVKVSCKASGGTFSTHTINWVRQAPGQGLEWMGGIAPMFGTANYAQKFQGRVTITADKSTSTAYMEMSSLRSDDTAVYYCARRRIAYGYDEGHAMDYWGQGTLVTVSSASTKGPKL

SEQ ID NO: 17999 - protein, 132 aa, Artificial Sequence
  source: /note="Description of Artificial Sequence: Synthetic polypeptide"
QVQLVQSGAELKKPGSSMKVSCKASGDTFSTYSINWVRQAPGQGLEWMGVINPSGGSTSYAQKFQGRVTMTRDTSTSTVYMELSSLRSEDTAVYYCARRRIAYGYDEGHAMDYWGQGTLVTVSSASTKGPKL

SEQ ID NO: 18000 - protein, 149 aa, Mus musculus
MGWSGVFIFILSGTAGVQSQVQLQQSGAELARPGASVNLSCKASGYTFTNNGINWLKQRTGQGLEWIGEIYPRSTNTLYNEKFKGKATLTADRSSNTAYMELRSLTSEDSAVYFCARTLTAPFAFWGQGTLVTVSAAKTTAPSVYPLAP

SEQ ID NO: 18001 - protein, 117 aa, Artificial Sequence
  source: /note="Description of Artificial Sequence: Synthetic polypeptide"
QVQLVQSGAEVKKPGASVKVSCKASGYTFTNNGINWLRQAPGQGLEWMGEIYPRSTNTLYAQKFQGRVTITADRSSNTAYMELSSLRSEDTAVYFCARTLTAPFAFWGQGTLVTVSS

SEQ ID NO: 18002 - protein, 118 aa, Artificial Sequence
  source: /note="Description of Artificial Sequence: Synthetic polypeptide"
EVQLVESGGGLVQPGGSLRLSCAASGFTFSAAKMSWVRQAPGKGLEWVSAISGSGGSTYYADSVKGRFTISRDNSKNTLYLQMNSLRAEDTAVYYCAKSTHLYLFDYWGQGTLVTVSS

SEQ ID NO: 18003 - protein, 118 aa, Artificial Sequence
  source: /note="Description of Artificial Sequence: Synthetic polypeptide"
EVQLVESGGGLVQPGGSLRLSCAASGFTFSHFDMSWVRQAPGKGLEWVSAISGSGGSTYYADSVKGRFTISRDNSKNTLYLQMNSLRAEDTAVYYCAKSTHLYLFDYWGQGTLVTVSS

SEQ ID NO: 18004 - protein, 118 aa, Artificial Sequence
  source: /note="Description of Artificial Sequence: Synthetic polypeptide"
EVQLVESGGGLVQPGGSLRLSCAASGFTFSPITMSWVRQAPGKGLEWVSAISGSGGSTYYADSVKGRFTISRDNSKNTLYLQMNSLRAEDTAVYYCAKSTHLYLFDYWGQGTLVTVSS

SEQ ID NO: 18005 - protein, 118 aa, Artificial Sequence
  source: /note="Description of Artificial Sequence: Synthetic polypeptide"
EVQLVESGGGLVQPGGSLRLSCAASGFTFSLQTMSWVRQAPGKGLEWVSAISGSGGSTYYADSVKGRFTISRDNSKNTLYLQMNSLRAEDTAVYYCAKSTHLYLFDYWGQGTLVTVSS

SEQ ID NO: 18006 - protein, 118 aa, Artificial Sequence
  source: /note="Description of Artificial Sequence: Synthetic polypeptide"
EVQLVESGGGLVQPGGSLRLSCAASGFTFSVMKMSWVRQAPGKGLEWVSAISGSGGSTYYADSVKGRFTISRDNSKNTLYLQMNSLRAEDTAVYYCAKSTHLYLFDYWGQGTLVTVSS

SEQ ID NO: 18007 - protein, 118 aa, Artificial Sequence
  source: /note="Description of Artificial Sequence: Synthetic polypeptide"
EVQLVESGGGLVQPGGSLRLSCAASGFTFSTGSMSWVRQAPGKGLEWVSAISGSGGSTYYADSVKGRFTISRDNSKNTLYLQMNSLRAEDTAVYYCAKSTHLYLFDYWGQGTLVTVSS

SEQ ID NO: 18008 - protein, 118 aa, Artificial Sequence
  source: /note="Description of Artificial Sequence: Synthetic polypeptide"
EVQLVESGGGLVQPGGSLRLSCAASGFTFSDMHMSWVRQAPGKGLEWVSAISGSGGSTYYADSVKGRFTISRDNSKNTLYLQMNSLRAEDTAVYYCAKSTHLYLFDYWGQGTLVTVSS

SEQ ID NO: 18009 - protein, 118 aa, Artificial Sequence
  source: /note="Description of Artificial Sequence: Synthetic polypeptide"
EVQLVESGGGLVQPGGSLRLSCAASGFTFSQARMSWVRQAPGKGLEWVSAISGSGGSTYYADSVKGRFTISRDNSKNTLYLQMNSLRAEDTAVYYCAKSTHLYLFDYWGQGTLVTVSS

SEQ ID NO: 18010 - protein, 118 aa, Artificial Sequence
  source: /note="Description of Artificial Sequence: Synthetic polypeptide"
EVQLVESGGGLVQPGGSLRLSCAASGFTFSLFTMSWVRQAPGKGLEWVSAISGSGGSTYYADSVKGRFTISRDNSKNTLYLQMNSLRAEDTAVYYCAKSTHLYLFDYWGQGTLVTVSS

SEQ ID NO: 18011 - protein, 118 aa, Artificial Sequence
  source: /note="Description of Artificial Sequence: Synthetic polypeptide"
EVQLLESGGGLVQPGGSLRLSCAASGFTFSLFTMSWVRQAPGKGLEWVSAISGSGGSTYYADSVKGRFTISRDNSKNTLYLQMNSLRAEDTAVYYCAKSTHLYLFDYWGQGTLVTVSS

SEQ ID NO: 18012 - protein, 118 aa, Artificial Sequence
  source: /note="Description of Artificial Sequence: Synthetic polypeptide"
EVQLVESGGGLVQPGGSLRLSCAASGFTFSHMQMSWVRQAPGKGLEWVSAISGSGGSTYYADSVKGRFTISRDNSKNTLYLQMNSLRAEDTAVYYCAKSTHLYLFDYWGQGTLVTVSS

SEQ ID NO: 18013 - protein, 118 aa, Artificial Sequence
  source: /note="Description of Artificial Sequence: Synthetic polypeptide"
EVQLVESGGGLVQPGGSLRLSCAASGFTFSPRRMSWVRQAPGKGLEWVSAISGSGGSTYYADSVKGRFTISRDNSKNTLYLQMNSLRAEDTAVYYCAKSTHLYLFDYWGQGTLVTVSS

SEQ ID NO: 18014 - protein, 116 aa, Artificial Sequence
  source: /note="Description of Artificial Sequence: Synthetic polypeptide"
EVQLLESGGGLVQPGGSLRLSCAASGFTFSSYAMSWVRQAPGKGLEWVSAISGSGGSTYYADSVKGRFTISRDNSKNTLYLQMNSLRAEDTAVYYCAKNRYIFDYWGQGTLVTVSS

SEQ ID NO: 18015 - protein, 116 aa, Artificial Sequence
  source: /note="Description of Artificial Sequence: Synthetic polypeptide"
EVQLLESGGGLVQPGGSLRLSCAASGFTFSSYAMSWVRQAPGKGLEWVSAISGSGGSTYYADSVKGRFTISRDNSKNTLYLQMNSLRAEDTAVYYCAKGRFLFDYWGQGTLVTVSS

SEQ ID NO: 18016 - protein, 118 aa, Artificial Sequence
  source: /note="Description of Artificial Sequence: Synthetic polypeptide"
QVQLQQPGAELVKPGASLKLSCKSSGYTFTSYWMHWVRQRPGHGLEWIGEIDPSDSYKDYNQKFKDKATLTVDRSSNTAYMHLSSLTSDDSAVYYCARAITTTPFDFWGQGTTLTVSS

SEQ ID NO: 18017 - protein, 123 aa, Artificial Sequence
  source: /note="Description of Artificial Sequence: Synthetic polypeptide"
QVQLKQSGPGLVQPSQSLSITCTVSGFSLTNYGLHWVRQSPGKGLEWLGVIWSGGSTDYNAAFISRLSISKDNSKSQVFFKMNSLQADDTAIYYCARKGGIYYANHYYAMDYWGQGTSVTVSS

SEQ ID NO: 18018 - protein, 144 aa, Homo sapiens
MEFGLTWLFLVANLKGVQCEVQLLDSGGGLVQPGGCLRLSCAASGFTFSSCAMSWVRQAPGKGLEWVSAISGSGGSTYYADSVKGRFTISRDKSKNTLYLQMNSLRAEDTAVYYCAKGGNDILTGYYAWGQGTLVTVSSGSASA

SEQ ID NO: 18019 - protein, 113 aa, Artificial Sequence; identical to SEQ ID NO: 6791
  source: /note="Description of Artificial Sequence: Synthetic polypeptide"

SEQ ID NO: 18020 - protein, 118 aa, Artificial Sequence
  source: /note="Description of Artificial Sequence: Synthetic polypeptide"
QVQLKESGPVLVAPSQTLSITCTVSGFSLASYNIHWVRQPPGKGLEWLGVIWAGGSTNYNSALMSRLSISKDNSKSQVFLQMNSLQTDDTAMYYCAKRSDDYSWFAYWGQGTLVTVSA

SEQ ID NO: 18021 - protein, 105 aa, Homo sapiens
EVQLVESGGGLVQPGGSLRLSCAASGFTVSGSYMSWVRQAPGKGLEWVSVIYSGGSTYYADSVKGRFTISRDNSKNTLYLQMNSLRAEDTAVYYCARDLRGSYDY

SEQ ID NO: 18022 - protein, 119 aa, Artificial Sequence
  source: /note="Description of Artificial Sequence: Synthetic polypeptide"
EVQLVESGGDFVQPGGSLRVSCAASGFAFSHYAMSWVRQAPGKGLEWVAYISSGGSGTYYSDSVKGRFTISRDNSKNTLYLQMRSLRAEDSAVYFCTRVKLGTYYFDSWGQGTLLTVSS

SEQ ID NO: 18023 - protein, 138 aa, Mus musculus
MEFGLSWLFLVLVFKGVQCEVTLVESGGDFVKPGGSLKVSCAASGFAFSHYAMSWVRQTPAKRLEWVAYISSGGSGTYYSDSVKGRFTISRDNAKNTLYLQMRSLRSEDSAMYFCTRVKLGTYYFDSWGQGTTLTVSS

SEQ ID NO: 18024 - protein, 112 aa, Mus sp.
ASRGDIVLTQSPATLSVTPGDSVSLSCRASQIISNNLHWYQQKSHESPRLLIKYASQSISGIPSRFSGSGSGTDFTLSINSVETEDFGMYFCQQSNSWPLTFGSGTKLEIKR

SEQ ID NO: 18025 - protein, 130 aa, Artificial Sequence
  source: /note="Description of Artificial Sequence: Synthetic polypeptide"
LVLVFKGVQCEVTLVESGGDFVKPGGSLKVSCAASGFAFSHYAMSWVRQTPAKRLEWVAYISSGGSGTYYSDSVKGRFTISRDNAKNTLYLQMRSLRSEDSAMYFCTRVKLGTYYFDSWGQGTTLTVSSA

SEQ ID NO: 18026 - protein, 119 aa, Mus musculus
EVTLVESGGDFVKPGGSLKVSCAASGFAFSHYAMSWVRQTPAKRLEWVAYISSGGSGTYYSDSVKGRFTISRDNAKNTLYLQMRSLRSEDSAMYFCTRVKLGTYYFDSWGQGTTLTVSS

SEQ ID NO: 18027 - protein, 122 aa, Artificial Sequence
  source: /note="Description of Artificial Sequence: Synthetic polypeptide"
QVQLQESGPGLVKPSETLSLTCTVSGGSISTYYWSWFRQPPGKGLEWIGYIYYSGSTNHNPSLKSRVTISVDTSKNQFSLKLRSVTAADTAVYYCARVGPVGWGSWGNFDYWGQGTLVTVSS

SEQ ID NO: 18028 - protein, 132 aa, Artificial Sequence
  source: /note="Description of Artificial Sequence: Synthetic polypeptide"
MAVLVLLLCLVTFPSCVLSQVQLKESGPGLVQPSQTLSLTCTVSGFSLTSYTVSWVRQPPGKGLEWIAAISSGGSTYYNSALKSRLSISRDTSKSQVFLKMNSLQTEDTAMYFCAPSEGAWGQGVMVTVSSE

SEQ ID NO: 18029 - protein, 139 aa, Artificial Sequence
  source: /note="Description of Artificial Sequence: Synthetic polypeptide"
MGWSWIFLFLLSGTAGVLSEVQLQQSGPELVKPGASVKISCKASGYTFTDYNMDWVKQSHGKSLEWIGYIYPNNGGTGYNQKFKSKATLTVDKSSSTAYMELHSLTSEDSAVYYCATYGHYYGYMFAYWGQGTLVTVSA

SEQ ID NO: 18030 - protein, 124 aa, Artificial Sequence
  source: /note="Description of Artificial Sequence: Synthetic polypeptide"
VQLVQSGAEVKKPGASVKVSCKASGYTFTDYNMDWVKQSPGQGLEWMGYIYPNNGGTGYNQKFKSKVTITVDTSTSTAYMELHSLRSEDTAVYYCATYGHYYGYMFAYWGQGTLVTVSSASTKG

SEQ ID NO: 18031 - protein, 120 aa, Mus musculus; identical to SEQ ID NO: 14101

SEQ ID NO: 18032 - protein, 125 aa, Mus musculus; identical to SEQ ID NO: 14102

SEQ ID NO: 18033 - protein, 125 aa, Mus musculus; identical to SEQ ID NO: 14103

SEQ ID NO: 18034 - protein, 125 aa, Artificial Sequence; identical to SEQ ID NO: 14104
  source: /note="Description of Artificial Sequence: Synthetic polypeptide"

SEQ ID NO: 18035 - protein, 125 aa, Artificial Sequence; identical to SEQ ID NO: 14105
  source: /note="Description of Artificial Sequence: Synthetic polypeptide"

SEQ ID NO: 18036 - protein, 125 aa, Artificial Sequence; identical to SEQ ID NO: 14106
  source: /note="Description of Artificial Sequence: Synthetic polypeptide"

SEQ ID NO: 18037 - protein, 125 aa, Artificial Sequence; identical to SEQ ID NO: 14107
  source: /note="Description of Artificial Sequence: Synthetic polypeptide"

SEQ ID NO: 18038 - protein, 125 aa, Artificial Sequence; identical to SEQ ID NO: 14108
  source: /note="Description of Artificial Sequence: Synthetic polypeptide"

SEQ ID NO: 18039 - protein, 120 aa, Artificial Sequence
  source: /note="Description of Artificial Sequence: Synthetic polypeptide"
EVQLLESGGGLVQPGGSLRLSCAASGFRISDEDMGWVRQAPGKGLEWVSSIYGPSGSTYYADSVKGRFTISRDNSKNTLYLQMNSLRAEDTAVYYCASALEPLSEPLGFWGQGTLVTVSS

SEQ ID NO: 18040 - protein, 122 aa, Artificial Sequence; identical to SEQ ID NO: 14170
  source: /note="Description of Artificial Sequence: Synthetic polypeptide"

SEQ ID NO: 18041 - protein, 120 aa, Artificial Sequence; identical to SEQ ID NO: 14186
  source: /note="Description of Artificial Sequence: Synthetic polypeptide"

SEQ ID NO: 18042 - protein, 121 aa, Artificial Sequence; identical to SEQ ID NO: 14190
  source: /note="Description of Artificial Sequence: Synthetic polypeptide"

SEQ ID NO: 18043 - protein, 121 aa, Artificial Sequence; identical to SEQ ID NO: 14183
  source: /note="Description of Artificial Sequence: Synthetic polypeptide"

SEQ ID NO: 18044 - protein, 117 aa, Mus musculus; identical to SEQ ID NO: 14225

SEQ ID NO: 18045 - protein, 119 aa, Artificial Sequence
  source: /note="Description of Artificial Sequence: Synthetic polypeptide"
QVQLVQSGAEVKKPGASVKVSCKASGYTFTSHWMHWVRQAPGQGLEWMGNINPSNGGTNYNEKFKSRVTMTRDTSTSTVYMELSSLRSEDTAVYYCARAYYDFSWFVYWGQGTLVTVSS

SEQ ID NO: 18046 - protein, 118 aa, Artificial Sequence; identical to SEQ ID NO: 14034
  source: /note="Description of Artificial Sequence: Synthetic polypeptide"

SEQ ID NO: 18047 - protein, 116 aa, Mus musculus; identical to SEQ ID NO: 14029

SEQ ID NO: 18048 - protein, 121 aa, Artificial Sequence
  source: /note="Description of Artificial Sequence: Synthetic polypeptide"
EVQLVESGGGLVKPGGSLRLSCAASGFTFSSYGMSWVRQAPGKGLEWVSTISGGGSYTYYPDSVKGRFTISRDNAKNSLYLQMNSLRAEDTAVYYCARKGNYGNYGKLAYWGQGTTVTVSS

SEQ ID NO: 18049 - protein, 120 aa, Artificial Sequence; identical to SEQ ID NO: 14223
  source: /note="Description of Artificial Sequence: Synthetic polypeptide"

SEQ ID NO: 18050 - protein, 115 aa, Mus musculus; identical to SEQ ID NO: 14167

SEQ ID NO: 18051 - protein, 119 aa, Artificial Sequence
  source: /note="Description of Artificial Sequence: Synthetic polypeptide"
QVQLVQSGAEVKKPGASVKVSCKASGYTFTSHWMHWVRQAPGQGLEWMGNINPSSGGTNYNEKFKSRVTLTVDKSTSTAYMELSSLRSEDTAVYYCARAYYDFSWFVYWGQGTLVTVSS

SEQ ID NO: 18052 - protein, 121 aa, Artificial Sequence
  source: /note="Description of Artificial Sequence: Synthetic polypeptide"
EVQLVESGGGLVKPGGSLRLSCAASGFTFSSYGMSWVRQAPGKGLEWVATISGGGSYTYYPDSVKGRFTISRDIAKSSLYLQMNSLRAEDTAVYYCARKGNYGNYGKLAYWGQGTTVTVSS

SEQ ID NO: 18053 - protein, 119 aa, Artificial Sequence
  source: /note="Description of Artificial Sequence: Synthetic polypeptide"
QVQLVQSGAEVKKPGASVKVSCKASGYTFTSHWMHWVRQAPGQGLEWMGNINPSSGGTNYNEKFKSRVTMTVDTSTSTVYMELSSLRSEDTAVYYCARAYYDFSWFVYWGQGTLVTVSS

SEQ ID NO: 18054 - protein, 119 aa, Artificial Sequence [sequence omitted]

SEQ ID NO: 18055 - protein, 120 aa, Artificial Sequence [sequence omitted]

SEQ ID NO: 18056 - protein, 123 aa, Artificial Sequence [sequence omitted]

SEQ ID NO: 18057 - protein, 119 aa, Artificial Sequence
  source: /note="Description of Artificial Sequence: Synthetic polypeptide"
EVQLVESGGGLVKPGGSLRLSCAASGFTFSSYGMFWVRQAPGKGLEWVATISRYSRYIYYPDSVKGRFTISRDNAKNSLYLQMNSLRAEDTAVYYCARRPLYGSSPDYWGQGTLVTVSS

SEQ ID NO: 18058 - protein, 119 aa, Artificial Sequence [sequence omitted]

SEQ ID NO: 18059 - protein, 118 aa, Mus musculus
EVQLQQSGPELVMPGASVKISCKASGYSFTSYYVHWVKQRPGQGLEWIGWIYPGSGHTKYNEKFKDKATLTADTSSSTAYMQLSSLTSEDSAVYYCARPPYYSNYADVWGTGTTVTVS

SEQ ID NO: 18060 - protein, 120 aa, Mus musculus; identical to SEQ ID NO: 14030

SEQ ID NO: 18061 - protein, 117 aa, Mus musculus
EVQLVESGPGLVKPSQSLSLTCSVTGYSITSAYYWNWIRQFPGNKLEWMGYVSYDGSNTYNPSLKNRISITRDTSKNQFFLKLISLTTEDTATYYCAREGDYGYSDYWGQGTTLTVS

SEQ ID NO: 18062 - protein, 119 aa, Mus musculus
QIQLVQSGPELVKPGASVRISCKASGYTFTSYYIHWVKQRPGQGLEWIGWIYPGNVHTKYTEKFKGKATLTADKSSSTAYMHLSSLTSEDSAVYFCVRRYGYDGDWFAYWGQGTLVTVS

SEQ ID NO: 18063 - protein, 120 aa, Artificial Sequence
  source: /note="Description of Artificial Sequence: Synthetic polypeptide"
QVQLQESGPGLVKPSQTLSLTCTVSGYSITSGFYWTWIRQHPGKGLEWIGFISYDGSNNYNPSLKNRVTISVDTSKNQFSLKLSSVTAADTAVYYCARGGGYYGNLFDYWGQGTLVTVSS

SEQ ID NO: 18064 - protein, 121 aa, Artificial Sequence; identical to SEQ ID NO: 14031
  source: /note="Description of Artificial Sequence: Synthetic polypeptide"

SEQ ID NO: 18065 - protein, 119 aa, Mus musculus
EVKLVESGPGLVKPSQSLSLTCSVTGYSITSGFYWTWIRQFPGNKLEWMGFISYDGSNNYNPSLKNRISITRDTSKNQFFLKLNSVTTEDTATYYCARGGGYYGNLFDYWGQGTTLTVS

SEQ ID NO: 18066 - protein, 118 aa, Artificial Sequence
  source: /note="Description of Artificial Sequence: Synthetic polypeptide"
QVQLQESGPGLVKPSQTLSLTCTVSGYSITSAYYWNWIRQHPGKGLEWIGYIGYDGRNTYNPSLKNRVTISVDTSKNQFSLKLSSVTAADTAVYYCSREGDYGYSDYWGQGTLVTVSS

SEQ ID NO: 18067 - protein, 119 aa, Artificial Sequence; identical to SEQ ID NO: 14032
  source: /note="Description of Artificial Sequence: Synthetic polypeptide"

SEQ ID NO: 18068 - protein, 117 aa, Mus musculus
EVQLKESGPGLVKPSQSLSLTCSVTGYSITSAYYWNWIRQFPGNKVEWMGYIGYDGRNTYNPSLKNRISITRDTSKNQFFLKLNSLTTEDTATYYCSREGDYGYSDYWGQGTTLTVS

SEQ ID NO: 18069 - protein, 122 aa, Mus musculus; identical to SEQ ID NO: 14033

SEQ ID NO: 18070 - protein, 113 aa, Mus musculus
EVKLVESGGGLVKPGGSLKLSCAASGFTFSSYGMSWVRQTPEKRLEWVATIRDGGGYTYYSDNVKGRFTISRDNAQNNLYLQMSHLKSEDTAMYYCARGILDYWGQGTSVTVS

SEQ ID NO: 18071 - protein, 113 aa, Mus musculus
EVKLVESGGDLVKPGESLKLSCAASGFTFSSFAMSWVRQTPEKRLEWVATISDGGSHLYYPDNVKGRFTISRDNAKNNLYLQMSHLKSEDTAMYYCARGILDYWGQGTSVTVS

SEQ ID NO: 18072 - protein, 118 aa, Mus musculus
QVQLQQSGPELVKPGASVKISCKASGYSFTSYYIHWVKQRPGQGLEWIGWIYPGSGHTKYNEKFKGKATLTADTSSSTAYMQLSSLTSEDSAVYYCARPPYYSNYADVWGTGTTVTVS

SEQ ID NO: 18073 - protein, 117 aa, Mus musculus
QVQLKESGPGLVAPSQSLSITCTVSGFSLSRYSVHWVRQPPGKGLEWLGMIWGGGSTDYNSALKSRLNINKDNSKSQVFFKMNSLQTDDTAMYYCVRKGITTTGFDYWGQGTTLTVS

SEQ ID NO: 18074 - protein, 117 aa, Mus musculus
EVQLVESGPGLVAPSQSLSITCTVSGFSLSRYTIHWVRQPPGKGLEWLGMIWGGGSTDYNSALKSRLSISKDNSKSQLFLKMNSLQTDDTAIYYCARKGITTTGFDYWGQGTTLTVS

SEQ ID NO: 18075 - protein, 120 aa, Artificial Sequence
  source: /note="Description of Artificial Sequence: Synthetic polypeptide"
QVQLQESGPGLVKPSQTLSLTCTVSGYSITSGFYWTWIRQHPGKGLEWMGFISYSGSNNYNPSLKNRITISVDTSKNQFSLKLSSVTAADTAVYYCARGGGYYGNLFDYWGQGTLVTVSS

SEQ ID NO: 18076 - protein, 120 aa, Artificial Sequence
  source: /note="Description of Artificial Sequence: Synthetic polypeptide"
QVQLQESGPGLVKPSQTLSLTCTVSGYSITSGFYWTWIRQHPGNGLEWIGFISYSGSNNYNPSLKNRVTISVDTSKNQFSLKLSSVTAADTATYYCARGGGYYGNLFDYWGQGTLVTVSS

SEQ ID NO: 18077 - protein, 118 aa, Artificial Sequence
  source: /note="Description of Artificial Sequence: Synthetic polypeptide"
QVQLQESGPGLVKPSQTLSLTCTVSGYSITSAYYWNWIRQHPGKGVEWMGYIGYSGRNTYNPSLKNRVTISRDTSKNQFSLKLSSVTAADTAVYYCSREGDYGYSDYWGQGTLVTVSS

SEQ ID NO: 18078 - protein, 118 aa, Artificial Sequence
  source: /note="Description of Artificial Sequence: Synthetic polypeptide"
QVQLQESGPGLVKPSQTLSLTCTVSGYSITSAYYWNWIRQFPGKGVEWMGYIGYSGRNTYNPSLKNRVTISRDTSKNQFSLKLSSVTAADTAVYYCSREGDYGYSDYWGQGTLVTVSS

SEQ ID NO: 18079 - protein, 121 aa, Artificial Sequence
  source: /note="Description of Artificial Sequence: Synthetic polypeptide"
QVQLVQSGAEVKKPGASVKVSCKASGYTFTSYWMQWVRQAPGQGLEWMGNINPSNGGTSFNEEFKSRVTMTRDTSTSTVYMELSSLRSEDTAVYYCARDGGLYDGYYFDFWGQGTLVTVSS

SEQ ID NO: 18080 - protein, 123 aa, Homo sapiens
QVQLQQSGPGLVKPSETLSLTCTVSGYSISSGYFWGWIRQPPGKGLEWIGSIYQSGSTYYNPSLKSRVTISLDTSKNQFSLKLSSVTAADTAVYYCARDGYCSGGSCYPFDYWGQGTTVTVSS

SEQ ID NO: 18081 - protein, 123 aa, Homo sapiens
QVQLQESGPGLVKPSETLSLTCAVSGYSISSGYFWGWIRQPPGKGLEWIGSIYQSGSTYYNPSLKSRVTISLDTSKNQFSLKLSSVTAADTAVYYCARDGYCSGGSCYPFDYWGQGTLVTVSS

SEQ ID NO: 18082 - protein, 124 aa, Homo sapiens
QVQLQQSGAEVKMPGSSVKVSCKAFGNSFSSYATNWVRQAPGQGLEWLGWISAANGITNYGQKFQGRVTMTTDKSTDTAYMELRSLRSDDTAVYYCARTPFSENRGYYYYMDVWGKGTMVTVSS

SEQ ID NO: 18083 - protein, 124 aa, Homo sapiens
QVQLVQSGAEVKKPGASVKVSCKASGNSFSSYATNWVRQAPGQGLEWLGWISAASGITNYGQKFQGRVTMTTDKSTSTAYMELRSLRSDDTAVYYCARTPFSENRGYYYYMDVWGQGTMVTVSS

SEQ ID NO: 18084 - protein, 124 aa, Homo sapiens
QVQLQQSGAEVKMPGSSVKVSCKALGNSFSSYATNWVRQAPGQGLEWLGWISAANGITNYGQKFQGRVTMTTDKSTDTAYMELRSLRSDDTAVYYCARTPFSENRGYYYYMDVWGKGTMVTVSS

SEQ ID NO: 18085 - protein, 124 aa, Homo sapiens
QVQLQQSGAEVKMPGSSVKVSCKAFGNSFSSYATNWVRQAPGQGLEWLGWISAANGITNYGQKFQGRVTMTTDKSTDTAYMELRSLRSDDTAVYYCARTPFSENRGLQEYMDVWGKGTMVTVSS

SEQ ID NO: 18086 - protein, 124 aa, Homo sapiens
QVQLQQSGAEVKMPGSSVKVSCKAFGNSFSSYATNWVRQAPGQGLEWLGWISAANGITNYGQKFQGRVTMTTDKSTDTAYMELRSLRSDDTAVYYCARTPFSENAGFFEFMDVWGKGTMVTVSS

SEQ ID NO: 18087 - protein, 123 aa, Homo sapiens
QVQLQQSGPGLVKPSETLSLTCTVSGYSISSGYFWGWIRQPPGKGLEWIGSIYQSGSTYYNPSLKSRVTMSLDTSKNQFSLKLSSVTAADTAVYYCARDGYCSGGSCYPFDYWGQGTTVAVSS

SEQ ID NO: 18088 - protein, 123 aa, Homo sapiens
QVQLQQSGPGLVKPSETLSLTCTVSGYSISSGYFWGWVRQPPGKGLEWIGSIYQSGSTYYNPSLKSRATISLDTSKNQFSLKLSSVTAADTAVYYCARDGYCSGGGCYPFDYWGQGTTVTVSS

SEQ ID NO: 18089 - protein, 123 aa, Homo sapiens
QVQLQQSGPGLVMPSETLSLTCTVSGYSISSGYFWGWIRQPPGKGLEWIGSIYQSGSTYYNPSLKNRVTISLDTSKNQFSLKLSSVTAADTAEYYCARDGYCSGGSCYPFDYWGQGTTVTVSS

SEQ ID NO: 18090 - protein, 123 aa, Homo sapiens
QVQLQQSGPGLVEPSETLSLTCTVSGYSISSGYFWGWIRQPPGKGLEWIGSIYQSGSTYYNPSLKSRVTMSLDTSKNQFSLELSSVTAADTAVYYCARDGYCSGGSCYPLDYWGQGITVTVSS

SEQ ID NO: 18091 - protein, 123 aa, Homo sapiens
QVQLQQSGPGLVKPSESLSLTCTVSGYSVSSGYFWGWIRQPPGKGLEWIGSIYQSGSTYYNPSLKSRATMSLDASKNQFSLKLSSVTAADTAVYYCARDGYCSGGSCYPFDYWGQGTTVAVSS

SEQ ID NO: 18092 - protein, 123 aa, Homo sapiens
QVQLRQSGPGLVKPSETLSLTCTVSGYSISSGYFWGWIRQPPGKGLEWIGSIYQSGITYYNPSLKSRATISLDTSKNQFSLKLGSVTAADTAVYYCARDGYCSGGGCYPFDYWGQGTTVTVSS

SEQ ID NO: 18093 - protein, 123 aa, Homo sapiens
QVQLQESGPGLVKPSETLSLTCAVSGYSISSGYFWGWIRQPPGKGLEWIGSIYQSGITYYNPSLKSRATISLDTSKNQFSLKLSSVTAADTAVYYCARDGYCSGGGCYPFDYWGQGTLVTVSS

SEQ ID NO: 18094 - protein, 123 aa, Homo sapiens
QVQLQQSGPGLVKPSETLSLTCTVSGYSISSGYFWGWVRQPPGKGLEWIGSIYQSGSTYYNPSLKSRATISLDASKNQFSLKLSSVTAADTAVYYCARDGYCSGGGCYPFDYWGQGTTVTVSS

SEQ ID NO: 18095 - protein, 123 aa, Homo sapiens
QVQLQQSGPGLVKPSETLSLTCTVSGYSISSGYFWGWVRQPPGKGLEWIGSIYQSGSTYYNPSLKSRATISLDTSKNQFSLKLSSVTAADTAEYYCARDGYCSGGSCYPFDYWGQGTTVTVSS

SEQ ID NO: 18096 - protein, 123 aa, Homo sapiens
QVQLQQSGPGLVEPSETLSLTCTVSGYPISSGYFWGWIRQPPGKGLEWIGSIYQSGSTYYNPSLKRRVTMSLDTSKNQFSLKLSSVTAADTAVYYCARDGYCSGGSCYPFDYWGQGTTVAVSS

SEQ ID NO: 18097 - protein, 123 aa, Homo sapiens
QVQLQESGPGLVKPSETLSLTCAVSGYPISSGYFWGWIRQPPGKGLEWIGSIYQSGSTYYNPSLKRRVTMSLDTSKNQFSLKLSSVTAADTAVYYCARDGYCSGGSCYPFDYWGQGTLVTVSS

SEQ ID NO: 18098 - protein, 123 aa, Homo sapiens
QVQLQQSGPGLVKPSETLSLTCTVSGYSISSGYFWGWVRQPPGKGLEWIGSIYQSGSTYYNPSLKSRATISLDTSKNQFSLKLSSVTAADTAVYYCARDGYCSGGSCYPFDYWGQGTAVTVSS

SEQ ID NO: 18099 - protein, 123 aa, Homo sapiens
QVQLQESGPGLVKPSETLSLTCAVSGYSISSGYFWGWIRQPPGKGLEWIGSIYQSGSTYYNPSLKSRATISLDTSKNQFSLKLSSVTAADTAVYYCARDGYCSGGSCYPFDYWGQGTLVTVSS

SEQ ID NO: 18100 - protein, 123 aa, Homo sapiens
  MOD_RES (5)..(6): Any amino acid
  MOD_RES (13)..(13): Any amino acid
  MOD_RES (17)..(17): Any amino acid
  MOD_RES (23)..(23): Any amino acid
  MOD_RES (28)..(29): Any amino acid
  MOD_RES (38)..(38): Any amino acid
  MOD_RES (57)..(57): Any amino acid
  MOD_RES (66)..(66): Any amino acid
  MOD_RES (68)..(68): Any amino acid
  MOD_RES (70)..(70): Any amino acid
  MOD_RES (74)..(74): Any amino acid
  MOD_RES (82)..(82): Any amino acid
  MOD_RES (84)..(84): Any amino acid
  MOD_RES (93)..(93): Any amino acid
  MOD_RES (106)..(106): Any amino acid
  MOD_RES (110)..(110): Any amino acid
  MOD_RES (117)..(118): Any amino acid
  MOD_RES (120)..(120): Any amino acid
QVQLXXSGPGLVXPSEXLSLTCXVSGYXXSSGYFWGWXRQPPGKGLEWIGSIYQSGXTYYNPSLKXRXTXSLDXSKNQFSLXLXSVTAADTAXYYCARDGYCSGGXCYPXDYWGQGXXVXVSS

SEQ ID NO: 18101 - protein, 124 aa, Homo sapiens
  MOD_RES (5)..(5): Any amino acid
  MOD_RES (13)..(13): Any amino acid
  MOD_RES (16)..(16): Any amino acid
  MOD_RES (25)..(25): Any amino acid
  MOD_RES (55)..(55): Any amino acid
  MOD_RES (77)..(77): Any amino acid
  MOD_RES (105)..(105): Any amino acid
  MOD_RES (107)..(110): Any amino acid
  MOD_RES (116)..(116): Any amino acid
QVQLXQSGAEVKXPGXSVKVSCKAXGNSFSSYATNWVRQAPGQGLEWLGWISAAXGITNYGQKFQGRVTMTTDKSTXTAYMELRSLRSDDTAVYYCARTPFSENXGXXXXMDVWGXGTMVTVSS

SEQ ID NO: 18102 - protein, 119 aa, Artificial Sequence [sequence omitted]

SEQ ID NO: 18103 - protein, 122 aa, Artificial Sequence
  source: /note="Description of Artificial Sequence: Synthetic polypeptide"
EVQLLQSGGGLVQPGGSLRLSCAASGFFFSKYPMHWVRQAPGKGLEWVSSISSDGGATVYADSVKGRFTISRDNSKNTLYLQMNSLRAEDTAVYYCAKDFYTILTGNAFDTWGQGTTVTVSS

SEQ ID NO: 18104 - protein, 122 aa, Artificial Sequence
  source: /note="Description of Artificial Sequence: Synthetic polypeptide"
EVQLLQSGGGLVQPGGSLRLSCAASGFMFSRYPMHWVRQAPGKGLEWVGSISGSGGATPYADSVKGRFTISRDNSKNTLYLQMNSLRAEDTAVYYCAKDFYQILTGNAFDYWGQGTTVTVSS

SEQ ID NO: 18105 - protein, 122 aa, Artificial Sequence
  source: /note="Description of Artificial Sequence: Synthetic polypeptide"
  MOD_RES (28)..(28): Any amino acid
  MOD_RES (31)..(31): Any amino acid
  MOD_RES (49)..(49): Any amino acid
  MOD_RES (53)..(54): Any amino acid
  MOD_RES (59)..(59): Any amino acid
  MOD_RES (88)..(88): Any amino acid
  MOD_RES (102)..(103): Any amino acid
  MOD_RES (111)..(111): Any amino acid
  MOD_RES (117)..(117): Any amino acid
EVQLLQSGGGLVQPGGSLRLSCAASGFXFSXYPMHWVRQAPGKGLEWVXSISXXGGATXYADSVKGRFTISRDNSKNTLYLQMNSLRXEDTAVYYCAKDFYXXLTGNAFDXWGQGTXVTVSS

SEQ ID NO: 18106 - protein, 122 aa, Artificial Sequence
  source: /note="Description of Artificial Sequence: Synthetic polypeptide"
EVQLLQSGGGLVQPGGSLRLSCAASGFFFSKYPMHWVRQAPGKGLEWVSSISSDGGATVYADSVKGRFTISRDNSKNTLYLQMNSLRAEDTAVYYCAKDFYTWLTGNAFDSWGQGTSVTVSS

SEQ ID NO: 18107 - protein, 122 aa, Artificial Sequence
  source: /note="Description of Artificial Sequence: Synthetic polypeptide"
EVQLLQSGGGLVQPGGSLRLSCAASGFDFSSYPMHWVRQAPGKGLEWVGSISSSGGATPYADSVKGRFTISRDNSKNTLYLQMNSLRPEDTAVYYCAKDFYTILTGNAFDMWGQGTSVTVSS

SEQ ID NO: 18108 - protein, 122 aa, Artificial Sequence
  source: /note="Description of Artificial Sequence: Synthetic polypeptide"
EVQLLQSGGGLVQPGGSLRLSCAASGFTFSVYPMHWVRQAPGKGLEWVSSISSSGGATRYADSVKGRFTISRDNSKNTLYLQMNSLRAEDTAVYYCAKDFYDILTGNAFDIWGQGTTVTVSS

SEQ ID NO: 18109 - protein, 122 aa, Artificial Sequence
  source: /note="Description of Artificial Sequence: Synthetic polypeptide"
EVQLLQSGGGLVQPGGSLRLSCAASGFDFSHYPMHWVRQAPGKGLEWVSSISSSGGATIYADSVKGRFTISRDNSKNTLYLQMNSLRPEDTAVYYCAKDFYDMLTGNAFDKWGQGTSVTVSS

SEQ ID NO: 18110 - protein, 122 aa, Artificial Sequence
  source: /note="Description of Artificial Sequence: Synthetic polypeptide"
EVQLLQSGGGLVQPGGSLRLSCAASGFLFSRYPMHWVRQAPGKGLEWVSSISSSGGATPYADSVKGRFTISRDNSKNTLYLQMNSLRPEDTAVYYCAKDFYTMLTGNAFDEWGQGTTVTVSS

SEQ ID NO: 18111 - protein, 122 aa, Artificial Sequence
  source: /note="Description of Artificial Sequence: Synthetic polypeptide"
EVQLLQSGGGLVQPGGSLRLSCAASGFDFSHYPMHWVRQAPGKGLEWVSSISSSGGATIYADSVKGRFTISRDNSKNTLYLQMNSLRAEDTAVYYCAKDFYYMLTGNAFDVWGQGTTVTVSS

SEQ ID NO: 18112 - protein, 122 aa, Artificial Sequence
  source: /note="Description of Artificial Sequence: Synthetic polypeptide"
EVQLLQSGGGLVQPGGSLRLSCAASGFVFSSYPMHWVRQAPGKGLEWVGSISSWGGATPYADSVKGRFTISRDNSKNTLYLQMNSLRPEDTAVYYCAKDFYTLLTGNAFDMWGQGTTVTVSS

SEQ ID NO: 18113 - protein, 122 aa, Artificial Sequence
  source: /note="Description of Artificial Sequence: Synthetic polypeptide"
EVQLLQSGGGLVQPGGSLRLSCAASGFEFSEYPMHWVRQAPGKGLEWVGSISSGGGATPYADSVKGRFTISRDNSKNTLYLQMNSLRAEDTAVYYCAKDFYNILTGNAFDAWGQGTTVTVSS

SEQ ID NO: 18114 - protein, 122 aa, Artificial Sequence
  source: /note="Description of Artificial Sequence: Synthetic polypeptide"
EVQLLQSGGGLVQPGGSLRLSCAASGFRFSIYPMHWVRQAPGKGLEWVSSISSSGGATAYADSVKGRFTISRDNSKNTLYLQMNSLRAEDTAVYYCAKDFYRMLTGNAFDRWGQGTSVTVSS

SEQ ID NO: 18115 - protein, 122 aa, Artificial Sequence
  source: /note="Description of Artificial Sequence: Synthetic polypeptide"
EVQLLQSGGGLVQPGGSLRLSCAASGFSFSNYPMHWVRQAPGKGLEWVGSISGSGGATPYADSVKGRFTISRDNSKNTLYLQMNSLRAEDTAVYYCAKDFYWMLTGNAFDTWGQGTTVTVSS

SEQ ID NO: 18116 - protein, 122 aa, Artificial Sequence
  source: /note="Description of Artificial Sequence: Synthetic polypeptide"
EVQLLQSGGGLVQPGGSLRLSCAASGFAFSSYPMHWVRQAPGKGLEWVGSISASGGATPYADSVKGRFTISRDNSKNTLYLQMNSLRAEDTAVYYCAKDFYQILTGNAFDYWGQGTSVTVSS

SEQ ID NO: 18117 - protein, 122 aa, Artificial Sequence
  source: /note="Description of Artificial Sequence: Synthetic polypeptide"
EVQLLQSGGGLVQPGGSLRLSCAASGFAFSRYPMHWVRQAPGKGLEWVGSISGWGGATPYADSVKGRFTISRDNSKNTLYLQMNSLRPEDTAVYYCAKDFYFMLTGNAFDEWGQGTSVTVSS

SEQ ID NO: 18118 - protein, 122 aa, Artificial Sequence
  source: /note="Description of Artificial Sequence: Synthetic polypeptide"
EVQLLQSGGGLVQPGGSLRLSCAASGFLFSSYPMHWVRQAPGKGLEWVGSISSLGGATPYADSVKGRFTISRDNSKNTLYLQMNSLRAEDTAVYYCAKDFYTWLTGNAFDMWGQGTSVTVSS

SEQ ID NO: 18119 - protein, 122 aa, Artificial Sequence
  source: /note="Description of Artificial Sequence: Synthetic polypeptide"
EVQLLQSGGGLVQPGGSLRLSCAASGFAFSSYPMHWVRQAPGKGLEWVGSISGSGGATPYADSVKGRFTISRDNSKNTLYLQMNSLRPEDTAVYYCAKDFYHILTGNAFDNWGQGTTVTVSS

SEQ ID NO: 18120 - protein, 122 aa, Artificial Sequence
  source: /note="Description of Artificial Sequence: Synthetic polypeptide"
EVQLLQSGGGLVQPGGSLRLSCAASGFWFSDYPMHWVRQAPGKGLEWVGSISSSGGATPYADSVKGRFTISRDNSKNTLYLQMNSLRPEDTAVYYCAKDFYNILTGNAFDRWGQGTSVTVSS

SEQ ID NO: 18121 - protein, 122 aa, Artificial Sequence
  source: /note="Description of Artificial Sequence: Synthetic polypeptide"
EVQLLQSGGGLVQPGGSLRLSCAASGFDFSHYPMHWVRQAPGKGLEWVSSISSSGGATIYADSVKGRFTISRDNSKNTLYLQMNSLRAEDTAVYYCAKDFYMILTGNAFDTWGQGTTVTVSS

SEQ ID NO: 18122 - protein, 122 aa, Artificial Sequence
  source: /note="Description of Artificial Sequence: Synthetic polypeptide"
EVQLLQSGGGLVQPGGSLRLSCAASGFPFSAYPMHWVRQAPGKGLEWVSSISASGGATPYADSVKGRFTISRDNSKNTLYLQMNSLRAEDTAVYYCAKDFYKILTGNAFDMWGQGTSVTVSS

SEQ ID NO: 18123 - protein, 122 aa, Artificial Sequence
  source: /note="Description of Artificial Sequence: Synthetic polypeptide"
EVQLLQSGGGLVQPGGSLRLSCAASGFPFSTYPMHWVRQAPGKGLEWVGSISSSGGATPYADSVKGRFTISRDNSKNTLYLQMNSLRAEDTAVYYCAKDFYWMLTGNAFDVWGQGTSVTVSS

SEQ ID NO: 18124 - protein, 122 aa, Artificial Sequence
  source: /note="Description of Artificial Sequence: Synthetic polypeptide"
EVQLLQSGGGLVQPGGSLRLSCAASGFDFSHYPMHWVRQAPGKGLEWVSSISSSGGATIYADSVKGRFTISRDNSKNTLYLQMNSLRPEDTAVYYCAKDFYWMLTGNAFDKWGQGTTVTVSS

SEQ ID NO: 18125 - protein, 122 aa, Artificial Sequence
  source: /note="Description of Artificial Sequence: Synthetic polypeptide"
EVQLLQSGGGLVQPGGSLRLSCAASGFLFSSYPMHWVRQAPGKGLEWVGSISPSGGATPYADSVKGRFTISRDNSKNTLYLQMNSLRPEDTAVYYCAKDFYNILTGNAFDKWGQGTSVTVSS

SEQ ID NO: 18126 - protein, 121 aa, Mus musculus
EVKLVESGGGLVQPGGSLKLSCATSGFTFSDYYMYWVRQTPEKRLEWVAYITNYGGSTYYPDTVKGRFTISRDNAKNTLYLQMSRLRSEDTAMYFCARQSNYDYDGWFAYWGQGTTVTVSS

SEQ ID NO: 18127 - protein, 121 aa, Artificial Sequence; identical to SEQ ID NO: 14303
  source: /note="Description of Artificial Sequence: Synthetic polypeptide"

SEQ ID NO: 18128 - protein, 116 aa, Artificial Sequence; identical to SEQ ID NO: 8536
  source: /note="Description of Artificial Sequence: Synthetic polypeptide"

SEQ ID NO: 18129 - protein, 137 aa, Mus musculus
EVQLVESGGGLVKPGGSLKLSCAASGFIFSDNYMYWVRQTPEKRLEWVATISDGGTYIDYSDSVKGRFTISRDNAKNNLYLQMSSLRSEDTGMYYCGRSPIYYDYAPFTYWGQGTLVTVSAAKTTPPSVYPLAPGSA

SEQ ID NO: 18130 - protein, 119 aa, Mus musculus
DVKLVESGGGLVQPGGSLKLSCATSGFTFSDYYMYWVRQTPEKRLEWVAYISNDDSSAAYSDTVKGRFTISRDNARNTLYLQMSRLKSEDTAIYSCARGLAWGAWFAYWGQGTLVTVSS

SEQ ID NO: 18131 - protein, 119 aa, Artificial Sequence
  source: /note="Description of Artificial Sequence: Synthetic polypeptide"
DVKLVESGGGVVQPGRSLKLSCATSGFTFSDYYMYWVRQAPGKGLEWVAYISNDDSSAAYSDTVKGRFTISRDNSKNTLYLQMNRLRAEDTAIYSCARGLAWGAWFAYWGQGTLVTVSS

SEQ ID NO: 18132 - protein, 125 aa, Mus musculus
EVKLVESGGGLVQPGGSLKLSCATSGFTFSDYYMYWVRQTPEKRLEWVAYISNGGGSTYYPDTVKGRFTIDRDNAKNTLYLQMSRLKSEDTAMYYCARGLSDGSWFAYWGQGTLVTVSSGGGGSG

SEQ ID NO: 18133 - protein, 119 aa, Artificial Sequence
  source: /note="Description of Artificial Sequence: Synthetic polypeptide"
EVNLVESGGGLVQPGGSLKVSCVTSGFTFSDYYMYWVRQTPEKRLEWVAYISQGGDITDYPDTVKGRFTISRDNAKNTLYLQMSRLKSEDTAMYYCARGLDDGAWFAYWGQGTLVTVSV

SEQ ID NO: 18134 - protein, 119 aa, Artificial Sequence
  source: /note="Description of Artificial Sequence: Synthetic polypeptide"
EVNLVESGGGLVQPGGSLKVSCVTSGFTFSDYYMYWVRQTPEKRLEWVAYISQGGDITDYPDTVKGRFTISRDNAKNTLYLQMSRLKSEDTAMYYCARGLADGAWFAYWGQGTLVTVSV

SEQ ID NO: 18135 - protein, 119 aa, Artificial Sequence
  source: /note="Description of Artificial Sequence: Synthetic polypeptide"
EVNLVESGGGLVQPGGSLKVSCVTSGFTFSDYYMYWVRQTPEKRLEWVAYISQDGDITDYPDTVKGRFTISRDNAKNTLYLQMSRLKSEDTAMYYCARGLDDGAWFAYWGQGTLVTVSV

SEQ ID NO: 18136 - protein, 119 aa, Artificial Sequence
  source: /note="Description of Artificial Sequence: Synthetic polypeptide"
EVNLVESGGGLVQPGGSLKVSCVTSGFPFASYYMYWVRQTPEKRLEWVAYISQGGDITDYPDTVKGRFTISRDNAKNTLYLQMSRLKSEDTAMYYCARGLADGAWFAYWGQGTLVTVSV

SEQ ID NO: 18137 - protein, 119 aa, Artificial Sequence
  source: /note="Description of Artificial Sequence: Synthetic polypeptide"
EVNLVESGGGLVQPGGSLKVSCVTSGFTFSDYYMYWVRQTPEKRLEWVAYISQDGDITDYPDTVKGRFTISRDNAKNTLYLQMSRLKSEDTAMYYCARGLADGAWFAYWGQGTLVTVSV

SEQ ID NO: 18138 - protein, 119 aa, Artificial Sequence
  source: /note="Description of Artificial Sequence: Synthetic polypeptide"
EVNLVESGGGLVQPGGSLKVSCVTSGFPFSDYYMYWVRQTPEKRLEWVAYISQDGDITDYPDTVKGRFTISRDNAKNTLYLQMSRLKSEDTAMYYCARGLADGAWFAYWGQGTLVTVSV

SEQ ID NO: 18139 - protein, 122 aa, Artificial Sequence
  source: /note="Description of Artificial Sequence: Synthetic polypeptide"
EVKLEESGGGLVQPGGSMKLSCVASGFTFSNYWMNWVRQSPEKGLEWVAEIRLKSNNYATHYAESVKGRFTISRDDSKSSVYLQMNNLRAEDTGIYYCIRETVFYYYAMDYWGQGTTVTVSS

SEQ ID NO: 18140 - protein, 119 aa, Artificial Sequence
  source: /note="Description of Artificial Sequence: Synthetic polypeptide"
EVQLLESGGGLVQPGGSLRLSCAASGFTFSDYYMYWVRQAPEKRLEWVAYISNGGGSSHYVDSVKGRFTISRDNAKNTLYLQMNSLRAEDTALYHCARGMDYGAWFAYWGQGTLVTVSS

SEQ ID NO: 18141 - protein, 119 aa, Artificial Sequence
  source: /note="Description of Artificial Sequence: Synthetic polypeptide"
EVQLVESGGGVVQPGRSLRLSCSSSGFTFSDYYMYWVRQAPGKGLEWVAYMSNVGAITDYPDTVKGRFTISRDNSKNTLFLQMDSLRPEDTGVYFCARGTRDGSWFAYWGQGTPVTVSS

SEQ ID NO: 18142 - protein, 119 aa, Artificial Sequence
  source: /note="Description of Artificial Sequence: Synthetic polypeptide"
EVQLVESGGGVVQPGRSLRLSCSTSGFTFSDYYMYWVRQAPGKGLEWVAYMSNVGAITDYPDTVKGRFTISRDNSKNTLFLQMDSLRPEDTGVYFCARGTRDGSWFAYWGQGTPVTVSS

SEQ ID NO: 18143 - protein, 119 aa, Artificial Sequence
  source: /note="Description of Artificial Sequence: Synthetic polypeptide"
EVQLVESGGGVVQPGRSLRLSCSSSGFTFSDYYMYWVRQAPGKGLEWVAYMSNVGAITDYPDTVKGRFTISRDNAKNTLFLQMDSLRPEDTGVYFCARGTRDGSWFAYWGQGTPVTVSS

SEQ ID NO: 18144 - protein, 119 aa, Artificial Sequence
  source: /note="Description of Artificial Sequence: Synthetic polypeptide"
EVQLVESGGGVVQPGRSLRLSCSSSGFTFSDYYMYWVRQAPGKGLEWVAYMSNVGAITDYPDTVKGRFTISRDNAKSTLFLQMDSLRPEDTGVYFCARGTRDGSWFAYWGQGTPVTVSS

SEQ ID NO: 18145 - protein, 119 aa, Artificial Sequence
  source: /note="Description of Artificial Sequence: Synthetic polypeptide"
EVQLVESGGGVVQPGRSLRLSCSSSGFTFSDYYMYWVRQAPGKGLEWVAYMSNVGAITDYPDTVKGRFTISRDNAKSTLYLQMDSLRPEDTGVYFCARGTRDGSWFAYWGQGTPVTVSS

SEQ ID NO: 18146 - protein, 122 aa, Mus musculus
QVKLQQSGGGLVQPGGSMKLSCVVSGFTFSNYWMNWVRQSPEKGLEWIAEIRLKSNNFGRYYAESVKGRFTISRDDSKSSAYLQMINLRAEDTGIYYCTSYGNYVGHYFDHWGQGTTVTVSS

SEQ ID NO: 18147 - protein, 122 aa, Artificial Sequence
  source: /note="Description of Artificial Sequence: Synthetic polypeptide"
EVQLVESGGGLVQPGGSLRLSCAASGFTFSNYWMNWVRQAPGKGLEWVAEIRLKSNNFGRYYAASVKGRFTISRDDSKNTLYLQMNSLKTEDTAVYYCTTYGNYVGHYFDHWGQGTTVTVSS

SEQ ID NO: 18148 - protein, 122 aa, Artificial Sequence
  source: /note="Description of Artificial Sequence: Synthetic polypeptide"
EVQLVESGGGLVKPGGSLRLSCAASGFTFSNYWMNWVRQAPGKGLEWVAEIRLKSNNFGRYYAASVKGRFTISRDDSKNTLYLQMNSLKTEDTAVYYCTTYGNYVGHYFDHWGQGTTVTVSS

SEQ ID NO: 18149 - protein, 112 aa, Artificial Sequence
  source: /note="Description of Artificial Sequence: Synthetic polypeptide"
QVQLQESGPGLVKPSQTLSLTCTVSGGSITSGYYWNWIRQHPGKGLEWIGYITFDGSNNYNPSLKSRVTISRDTSKNQFSLKLSSVTAADTAVYYCADFDYWGQGTLVTVSS

SEQ ID NO: 18150 - protein, 112 aa, Artificial Sequence
  source: /note="Description of Artificial Sequence: Synthetic polypeptide"
QVQLQESGPGLVKPSQTLSLTCTVSGGSITSGYYWNWIRQHPGKGLEWIGYITFDGKNNYNPSLKSRVTISRDTSKNQFSLKLSSVTAADTAVYYCADFDYWGQGTLVTVSS

SEQ ID NO: 18151 - protein, 112 aa, Artificial Sequence
  source: /note="Description of Artificial Sequence: Synthetic polypeptide"
QVQLQESGPGLVKPSQTLSLTCTVSGGSITDGYYWNWIRQHPGKGLEWIGYITFDGRNNYNPSLKSRVTISRDTSKNQFSLKLSSVTAADTAVYYCADFDYWGQGTLVTVSS

SEQ ID NO: 18152 - protein, 112 aa, Artificial Sequence
  source: /note="Description of Artificial Sequence: Synthetic polypeptide"
QVQLQESGPGLVKPSQTLSLTCTVSGGSITSGYYWNWIRQHPGKGLEWIGYITFDGINNYNPSLKSRVTISRDTSKNQFSLKLSSVTAADTAVYYCADFDYWGQGTLVTVSS

SEQ ID NO: 18153 - protein, 112 aa, Artificial Sequence
  source: /note="Description of Artificial Sequence: Synthetic polypeptide"
QVQLQESGPGLVKPSQTLSLTCTVSGGSITSGYYWNWIRQHPGKGLEWIGYITFDGRNNYNPSLKSRVTISRDTSKNQFSLKLSSVTAADTAVYYCADFDYWGQGTLVTVSS

SEQ ID NO: 18154 - protein, 113 aa, Artificial Sequence
  source: /note="Description of Artificial Sequence: Synthetic polypeptide"
QVQLQESGPGLVKPSETLSLTCTVTGTTITASYAWSWIRQPPGKGLEWMGYISYSGGTDYNPSLKSRITISRDTFKNQFSLKLSSVTAADTATYYCARKGAYWGQGTLVTVSS

SEQ ID NO: 18155 - protein, 117 aa, Artificial Sequence
  source: /note="Description of Artificial Sequence: Synthetic polypeptide"
EVQLLESGGGLVQPGGSLRLSCAASGFTFSPYAMSWVRQAPGKGLEWVSAITGQGGVTYYADSVKGRFTISRDNSKNTLYLQMNSLRAEDTAVYYCAKISSFHFDYWGQGTLVTVSS

SEQ ID NO: 18156 - protein, 122 aa, Homo sapiens; identical to SEQ ID NO: 16505

SEQ ID NO: 18157 - protein, 122 aa, Homo sapiens
EVQLQASGGGLVQAGGSLRLSCAASGFKITHYTMGWFRQAPGKEREFVSRITWGGDNTFYSNSVKGRFTISRDNAKNTVYLQMNSLKPEDTADYYCAAGSASTADPLRVDYWGKGTQVTVSS

SEQ ID NO: 18158 - protein, 129 aa, Homo sapiens
GVQLVQSGGGVVQPGRSLRLSCAASGFTFSSYAMHWVRQAPGKGLEWVAVISYDGSNKYYADSVKGRFTISRDNSKNTLYLQMNSLRAEDTAVYYCARDDIVVVPAANANYYYYYMDVWGQGTTVTVSS

SEQ ID NO: 18159 - protein, 123 aa, Homo sapiens
GVQLVQSGAELKKPGSSVKVSCKASGGTFSSYAISWVRQAPGQGLEWMGRIIPILGTSNYAQKFQGRVTITADERTSTAYMELSSLRSEDTAVYYCARRSSLAAADRGAFDIWGQGTMVTVSS

SEQ ID NO: 18160 - protein, 122 aa, Homo sapiens
QVQLVQSGAEVKKPGSSVKVSCKTSGGTFGTYSITWVRQAPGQGLEWMGDIVPIFGTPNYAQNFQGRVTISADVSTATVYMELSSLTSDDTAVYFCAKRGSYYGRGGWFDPWGRGTMVTVSS

SEQ ID NO: 18161 - protein, 120 aa, Homo sapiens
EVQLQESGGGLVQPGGSLRLSCAASGFKITHYTMGWVRQAPGKGLEWVSAISGSGGSTYYADSVKGRFTISRDNSKNTLYLQMNSLRAEDTAVYYCARGGGTISARFDPWGQGTTVTVSS

SEQ ID NO: 18162 - protein, 128 aa, Homo sapiens
EVQLLESGGGLVQPGGSLRLSCAASGFTFSSYAMSWVRQAPGKGLEWVSAISGSGGSTYYADSVKGRFTISRDNSKNTLYLQMNSLRAEDTAVYYCAKNYYYDTSAYYYVGSDYFDYWGQGTMVTVSS

SEQ ID NO: 18163 - protein, 128 aa, Homo sapiens
EVHLLESGGGLVQPGGSLRLSCAASGFTFSSYAMSWVRQAPGKGLEWVSAISGSGGSTYYAHSVKGRFTISRDNSKNTLYLQMNSLRAEDTAVYYCAKNYYYDTSAYYYVGSDYFDYWGQGTMVTVSS

SEQ ID NO: 18164 - protein, 122 aa, Homo sapiens
EVQLLESGGGLVQPGGSLRLSCAASGFKITHYTMGWVRQAPGKGLEWVSRITWGGDNTFYSNSVKGRFTISRDNSKNTLYLQMNSLRAEDTAVYYCAKETTNLYHYYGMNDWGRGTLVTVSS

SEQ ID NO: 18165 - protein, 120 aa, Homo sapiens
QVQLQQSGAEVKKPGSSVRVSCKASGGTFNSYAINWVRQAPGQGLEWMGGIITFFGTTTYAQKFQGRVTITADESTSTAYMELSSLRSDDTAVYYCARNPRIVGGAFDIWGKGTTVTVSS

SEQ ID NO: 18166 - protein, 119 aa, Homo sapiens
QVQLVQSGAEVKKPGSSVKVSCKASGDTFRSYIISWVRQAPGQGLEWVGGIIPMFGTSNYAQQFQGKVTITADESTSTAYMELSSLRSEDTAVYYCARGGARYYYMDVWGRGTMVTVSS

SEQ ID NO: 18167 - protein, 120 aa, Homo sapiens
EVQLLESGGGLVQPGGSLRLSCAASGFTFSSYAMSWVRQAPGKGLEWVSAISGSGGSTYYADSVKGRFTISRDNSKNTLYLQMNSLRAEDTAVYYCAKRRRDYYYDMDVWGQGTMVTVSS

SEQ ID NO: 18168 - protein, 122 aa, Homo sapiens
EVQLLESGGGLVQPGGSLRLSCAASGFKITHYTMGWVRQAPGKGLEWVSRITWGGDNTFYSNSVRGRFTISRDNSKNTLYLQMNSLRAEDTAVYYCATGTFGELFPDYFKYWGRGTMVTVSS

SEQ ID NO: 18169 - protein, 120 aa, Homo sapiens
EVQLLESGGGLVQPGGSLRLSCAASGFTFSSYAMSWVRQAPGKGLEWVSRITWGGDNTFYSNSVKGRFTISRDNSKNTLYLQMNSLRAEDTAVYYCASHYGGWISLFDHWGQGTTVTVSS

SEQ ID NO: 18170 - protein, 116 aa, Artificial Sequence
  source: /note="Description of Artificial Sequence: Synthetic polypeptide"
QIQLVQSGPELKKPGETVKISCKASGYTFTNYGMNWVKQAPGKGLKWMGWITTNTGEPTYAEEFKGRFAFSLETSASTAYLQINNLKNEDTATYFCARRAFAMDYWGQGTSVTVSS

SEQ ID NO: 18171 - protein, 119 aa, Artificial Sequence; identical to SEQ ID NO: 14338
  source: /note="Description of Artificial Sequence: Synthetic polypeptide"

SEQ ID NO: 18172 - protein, 119 aa, Artificial Sequence; identical to SEQ ID NO: 14341
  source: /note="Description of Artificial Sequence: Synthetic polypeptide"

SEQ ID NO: 18173 - protein, 119 aa, Mus sp.; identical to SEQ ID NO: 14337

SEQ ID NO: 18174 - protein, 118 aa, Artificial Sequence
  source: /note="Description of Artificial Sequence: Synthetic polypeptide"
EVQLLESGGGLVQPGGSLRLSCAASGFTFSSYAMSWVRQAPGKGLEWVSAISGSGGSTYYADSVKGRFTISRDNSKNTLYLQMNSLRAEDTAVYYCAKHEPYIGFDYWGQGTLVTVSS

SEQ ID NO: 18175 - protein, 116 aa, Artificial Sequence
  source: /note="Description of Artificial Sequence: Synthetic polypeptide"
EVQLLESGGGLVQPGGSLRLSCAASGFTFSSYAMSWVRQAPGKGLEWVSAISGSGGSTYYADSVKGRFTISRDNSKNTLYLQMNSLRAEDTAVYYCAKHTPSFDYWGQGTLVTVSS

SEQ ID NO: 18176 - protein, 116 aa, Artificial Sequence
  source: /note="Description of Artificial Sequence: Synthetic polypeptide"
EVQLLESGGGLVQPGGSLRLSCAASGFTFSSYAMSWVRQAPGKGLEWVSAISGSGGSTYYADSVKGRFTISRDNSKNTLYLQMNSLRAEDTAVYYCAKARYPFDYWGQGTLVTVSS

SEQ ID NO: 18177 - protein, 116 aa, Artificial Sequence
  source: /note="Description of Artificial Sequence: Synthetic polypeptide"
EVQLLESGGGLVQPGGSLRLSCAASGFTFSSYAMSWVRQAPGKGLEWVSAISGSGGSTYYADSVKGRFTISRDNSKNTLYLQMNSLRAEDTAVYYCAKRARLFDYWGQGTLVTVSS

SEQ ID NO: 18178 - protein, 115 aa, Artificial Sequence
  source: /note="Description of Artificial Sequence: Synthetic polypeptide"
EVQLQQSGPELVKPGTSVRISCKTSGYTFTEYTIHWVKQSHGKSLEWIGNINPNNGGTTYNQKFEDKATLTVDKSSSTAYMELRSLTSEDSAVYYCAAGWNFDYWGQGTTLTVSS

SEQ ID NO: 18179 - protein, 119 aa, Mus musculus
EVQLQQSGAELVKPGASVKLSCTTSGFNIKATYIHWVQQRPEQGLEWIGRIDPANGNTKYDSKFQGKATITADTSSNTAYLQLSSLTSEDTAVYFCARSLHYYVFFDYWGQGTTLTVSS

SEQ ID NO: 18180 - protein, 120 aa, Mus musculus
EVQLQQSGTELVKPGASVKLSCTLFGFNIKATYMHWVRQRPEQGLEWIGRIDPPNGNTKYDPKFQDKATIKVDTSSNTAYLQLSSLTSEDTAVYYCAREFNRYDVWLAYWGQGTLVTVSA

SEQ ID NO: 18181 - protein, 120 aa, Mus musculus
EVQLQQSGAELVKPGASVKLSCTASGFKIKDTYMHWVRQRPEQGLEWIGRIDSANGNIKYDPKFQGKATITADTSSKTAYLHLSSLTFEDTAVYYCSRPKSNYDFWLPYWGQGTLVTVSA

SEQ ID NO: 18182 - protein, 120 aa, Mus musculus
EVQLQQSGAELVKPGASVKLSCTASGFNLKGTYIHWVKQRPGQGLEWIGRIDPANANTKYDPKFQGKATIRTDTSSNTAYLQLSSLTSEDTAVYFCSSPSGHYDVWFAYWGQGTLVTVSP

SEQ ID NO: 18183 - protein, 126 aa, Mus musculus
DVKLVESGGGLVKPGGSLKLSCAASGFTFSSYTMSWVRQTPEKRLEWVATISSGGSYTYYPDSVKGRFTISRDNAKNTLYLQMSSLKSEDTAMYYCTRDWDYYGTTYVGGYAMDYWGQGTSVTVSS

SEQ ID NO: 18184 - protein, 118 aa, Mus musculus
QVQLQQSGAELASPGASVKLSCKASGYTFTTYWLQWVKQRPGQGLEWIGAIYPGPGNTKYTQKFKDKATLTADKSASTAYMQLNSLTSEDSAVYYCARRGSRRGIAYWGQGTLVTVSA

SEQ ID NO: 18185 - protein, 118 aa, Mus musculus
QVQLQQSGAELASPGASVKLSCKTSGYTFTTYWLQWVKQRPGQGLEWIGAIYPGPGNTKYTQKFKDKATLTADKSASTAYMQLSSLTSEDSAVYYCARRGSRRGIAYWGQGTLVTVSA

SEQ ID NO: 18186 - protein, 117 aa, Mus musculus
DVQLQESGPDLVKPSQSLSLTCTVTGYSITSAYSWHWIRQFPGNKLEWMGYIHFSGVTNYNPSLKSRISITRDASKNQFFLQLSSVTTEDTATYYCATRRETGFTYWGQGTLVTVSA

SEQ ID NO: 18187 - protein, 112 aa, Oryctolagus cuniculus
QSVEESGGRLVTPGTPLTLTCTVSGFSLSSGVVSWVRQAPGKGLEWIGYAWSGGATYYASWAKGRFTISKSSTTVDLKITSPTTADTATYFCARGYNGMDPWGPGTLVTVSS

SEQ ID NO: 18188 - protein, 112 aa, Oryctolagus cuniculus
QSVEESGGRLVTPGTPQTLTCTVSGFSLSTDVVSWVRQAPGKGLEWIGYTWNGGATYYASWAKGRFTFSKTSTTVDLKITSPTTEDTATYFCARGYNGMDPWGPGTLVTVSS

SEQ ID NO: 18189 - protein, 117 aa, Oryctolagus cuniculus
QEQLQESGGGLITPGGTLTLTCTASGFSFNRNALSWVRQAPGKGLEWIGYIYSGGSPYYANWAKGRFNVSRTSTTVDLRMTSLTTEDTATYFCARHVSGGGWYLDIWGPGTLVTVSL

SEQ ID NO: 18190 - protein, 117 aa, Oryctolagus cuniculus
QSVEESGGRLVTPGTPLTLTCTVSGFSLYTNLINWVRQAPGKGLEWIGYINYGASAYYANWAKGRFTISQTSSTTVDLKMTSLTIEDTATYFCARGYGNDWDRLDLWGQGTLVTVSS

SEQ ID NO: 18191 - protein, 117 aa, Oryctolagus cuniculus
QSVEESGGRLVTPGTPLTLTCTFSGFSLSNNAINWVRQAPGKGLEWIGYTWSGGGTYCASWAKGRFTISKTSSTTVDLKMTSLTTEDTATYFCARAYDSEWDRLDLWGQGTLVTVSS

SEQ ID NO: 18192 - protein, 118 aa, Oryctolagus cuniculus
QEQLKESGGGLVTPGGTLTLTCTASGFYLSSNGMSWVRQAPGKGLEWIGYIYSGGSPYYASWAKGRFTISKTSSTTVDLKMTSLTTEDTATYFCARHASGGGWYLDIWGPGTLVTVSF

SEQ ID NO: 18193 - protein, 116 aa, Oryctolagus cuniculus
QSVKESGGGLVTPGGTLTLTCTASGFSLSNNAMSWVRQAPGKGLEWIGYIYPGGSPYYANWAKGRFTISRTSTTVDLKMTSLTTEDTATYFCARHVSDGGWYLYIWGPGTLVTVSL

SEQ ID NO: 18194 - protein, 112 aa, Oryctolagus cuniculus
QSLEESGGRLVTPGTPLTLTCTVSGFSLSKYEINWVRQAPGKGLEWIGYIDVGSGTWYASWAKGRFTISKTSTTVALRITSPTTEDTATYFCSRQYNPMDLWGPGTLVTVSS

SEQ ID NO: 18195 - protein, 112 aa, Oryctolagus cuniculus
QSLEESGGRLVKPDETLTLTCTVSGFSLYNYEINWVRQAPGKGLEWIGYIDVGSGTWYASWAKGRFTISKTSTTVDLKITSPTTEDTATYFCTRKYNPMDLWGPGTLVTVSS

SEQ ID NO: 18196 - protein, 118 aa, Oryctolagus cuniculus
QEQLKESGGGLVTPGGTLTLTCTASGFSLSSDGMSWVRQAPGKGLEWIGYIYSGSSPYYANWAKGRFTISKTSSTTVDLKMTSLTTEDTATYFCARHGSGGGWYLDIWGPGTLVTVSS

SEQ ID NO: 18197 - protein, 117 aa, Oryctolagus cuniculus
QEQLKESGGGLVTPGGTLTLTCTASGFSLNTNAMSWVRQAPGKGLEWIGYIYSGGSPYYANWAKGRFTISRTSTTVHLKMTSLTTEDTATYFCASHTSGGGWYLDIWGPGTLVTVSL

SEQ ID NO: 18198 - protein, 117 aa, Oryctolagus cuniculus
QSVKESGGGLVTPGGTLTLTCTASGLSLSGNGMSWVRQAPGKGLEWIGYIYSGSSPYYASWAKGRFTISKTSSTTVDLKMTSLTTEDTATYFCARHTSGGGWYLDIWGPGTLVTVSL

SEQ ID NO: 18199 - protein, 112 aa, Oryctolagus cuniculus
QSVEESGGRLVTPGTPLTLTCTVSGFSLSSDVMSWVRQAPGKGLDWIGYIWSGGRPYYANWAKGRFTISKSSSTTVDLKITSPTTEDTAAYFCARGFGSSGLNIWGPGTLVT

SEQ ID NO: 18200 - protein, 118 aa, Oryctolagus cuniculus
QSLEESGGRLVTPGTPLTLTCTVSGIDLSSSLMTWVRQAPGKGLEWIGYIWSGGAPFYASWAKGRFTISKTSSTTVDLKMTSLTTEDTATYFCAARYTDSGFDALDPWGPGTLVTVSS

SEQ ID NO: 18201 - protein, 118 aa, Oryctolagus cuniculus
QDQLKESGGGLVTPGGTLTLTCTASGFSLGSNGMSWVRQAPGKGLEWIGYIYSGSSPYYASWAKGRFTISKTSSTTVDLKMTSLTTEDTATYFCAGHAKGGGWYLDIWGPGTLVTVSL

SEQ ID NO: 18202 - protein, 115 aa, Oryctolagus cuniculus
QSVEESGGRLVTPGTPLTLTCTVSGFSLSNDVMSWVRQAPGKGLEWIGYIWSGGSPYYANWAKGRFTISKSSSTTVDLKITSPTTEDTAAYFCARGFGSSGLNIWGPGTLVTVSL

SEQ ID NO: 18203 - protein, 117 aa, Oryctolagus cuniculus
QEQLKESGGGLVTPGGTLTLTCTASRFSLINIGMSWVRQAPGRGLEWIGYIYSGGSPYYANWAKGRFTISRTSTTVDLKMTSLTTEDTATYFCARHASDGGWYLDIWGPGTLVTVSL

SEQ ID NO: 18204 - protein, 118 aa, Oryctolagus cuniculus
QSLEESGGDLVKPGASLTLTCTASGFSFSRYVCWVRQAPGKGLEWIGCIAAGSSGYTYYASWAKGRLTISKTSSTTLTLQMTSLTVADTATYFCARSGDSYVGYFNLWGPGTLVTVSS

SEQ ID NO: 18205 - protein, 112 aa, Oryctolagus cuniculus
QSVEESGGRLVTPGTPLTLTCTVSGFSLSSGVVSWVRQAPGKGLEWIGYAWSGGPTYYANWAKGRFTISKSSTTVDLKITSPTTADTATYFCARGYNGMDPWGPGTLVTVSS

SEQ ID NO: 18206 - protein, 112 aa, Oryctolagus cuniculus
QSVEESGGRLVTPGTPLTLTCTVSGFSLSTDVVSWVRQAPGKGLEWIGYTWNGGATFYASWAKGRFTFSKTSTTVDLKITSPTTEDTATYFCARGYNGMDPWGPGTLVTVSS

SEQ ID NO: 18207 - protein, 115 aa, Artificial Sequence
  source: /note="Description of Artificial Sequence: Synthetic polypeptide"
EVQLVESGGGLVQPGGSLRLSCAVSGFSLSTDVVSWVRQAPGKGLEWIGYTWNGGATFYASWAKGRFTFSKDSSKNTVYLQMNSPRAEDTAVYFCARGYNGMDPWGPGTLVTVSS

SEQ ID NO: 18208 - protein, 112 aa, Oryctolagus cuniculus
QSVEESGGRLVTPGGSLTLTCTVSGFSLSNYEMNWVRQAPGKGLEWIGYIDVGSGTWYASWAKGRFTISKTSTTVDLKITSPTTEDTATYFCSRQYNPMDLWGPGTLVTVSS

SEQ ID NO: 18209 - protein, 116 aa, Oryctolagus cuniculus
QSVKESGGGLVTPGGTLTLTCTVSGFSLSRNAMSWVRQTPGKGLEWIGYIYSGSSPYYANWAKGRFTISRTSTTVDLKMTSLTTEDTATYFCARHVSDGGWYLDIWGPGTLVAVSL

SEQ ID NO: 18210 - protein, 117 aa, Oryctolagus cuniculus
QEQLKESGGGLVTPGGILTLTCTASGFSLRSNAMSWVRQAPGKGLEWIGYIYPGGAPHYASWAKGRFTISRNSTTVDLKMTSLTTEDTATYFCARHVSGGGWYLDIWGPGTLVTVSL

SEQ ID NO: 18211 - protein, 120 aa, Oryctolagus cuniculus
QSLEESGGGLVQPEGSPTLTCTAYLIDFSRYGYMCWVRQAPGKGLEWIGCIHAGRSGRTYYANWAKGRFTISKTSSTTVTLQMTSLTAADTATYFCAKSGDSYVGYFALWGPGTLVTVSS

SEQ ID NO: 18212 - protein, 112 aa, Oryctolagus cuniculus
QSLEESGGRLVTPGGSLTLTCTVSGFSLSNYEINWVRQAPGKGLEWIGYIDVGSGTWYASWAKGRFTISKTSTTVDLKITSPTTGDTATYFCSRSYNPMDLWGPGTLVTVSS

SEQ ID NO: 18213 - protein, 118 aa, Oryctolagus cuniculus
QEQLKESGGGLVTPGGTLTLTCTASGFSLSSNGMSWVRQAPGKGLEWIGYIYSGSSPYYASWAKGRFTISKTSSTTVDLKMTSLTTEDTAKYFCARHVSGGGWYLDIWGPGTLVTVSL

SEQ ID NO: 18214 - protein, 118 aa, Oryctolagus cuniculus
QEDLKESGGGLITPGGTLTLTCTGSGFSLSSDGMSWVRQAPGKGLEWIGYIYSGSSPYYANWAKGRFTISKTSSTTVDLKMTSLTTEDTATYFCARHLSGGGWYLDIWGPGTLVTVSL

SEQ ID NO: 18215 - protein, 118 aa, Oryctolagus cuniculus
QEQLKESGGGLVKPDESLTLTCTASGFSLSSNGMSWARQAPGKGLEWIGYIYAGSSPYYANWAKGRFTISKTSSTTVDLKVTSLTTEDTATYFCARHASGGGWYLAIWGPGTLVTVSL

SEQ ID NO: 18216 - protein, 118 aa, Oryctolagus cuniculus
QEQLKESGGGLVTPGGTLTLTCTASGFSLTTNGMSWVRQAPGKGLEWIGYIYSGGSPYYANWAKGRFTISKTSSTTVDLKMTSLTTEDTATYFCARHLSGGGWYLDIWGPGTLVTVSL

SEQ ID NO: 18217 - protein, 112 aa, Oryctolagus cuniculus
QSLEESGGRLVKPDETLTLTCTVSGSSLYNYEINWVRQAPGKGLEWIGYIDVGSGTWYASWAKGRFTISKTSTTVDLKITSPTTEDTATYFCTRKYNPMDLWGPGTLVTVSS

SEQ ID NO: 18218 - protein, 121 aa, Oryctolagus cuniculus
QEQLEESGGGLVKPEGSLTLTCTASGFDLSTYYYMCWVRQAPGKGLEWIACIYTGRASTYYATWAKGRFTISKTSSTTVTLQMTSLTAADTATFFCASKAGDIWYYGMDLWGPGTLVTVSS

SEQ ID NO: 18219 - protein, 113 aa, Oryctolagus cuniculus
QSVEESGGRLITPGTPLTLTCTVSGFSLSTDVVSWVRQAPGTGLEWIGYTWSGGSTYYAIWAKGRFTISKTSSTTVDLKITSPTTEDTATYFCARGFNPFDPWGPGTLVTVSS

SEQ ID NO: 18220 - protein, 113 aa, Oryctolagus cuniculus
QSLEESGGRLVTPGTPLTLTCTASGFTISTDVISWVRQAPGKGLEWIGYTWSGGSTYYANWAKGRFTLSKTSSTTVDLKITSPTIEDTATYFCARGFNPFDPWGPGTLVTVSS

SEQ ID NO: 18221 - protein, 115 aa, Artificial Sequence
  source: /note="Description of Artificial Sequence: Synthetic polypeptide"
EVQLVESGGGLVQPGGSLRLSCAVSGFSLSTDVLSWVRQAPGKGLEWIGYTWSGGSTYYASWAKGRFTISKDSSKNTVYLQMNSPRAEDTAVYFCARGFNPFDPWGPGTLVTVSS

SEQ ID NO: 18222 - protein, 113 aa, Oryctolagus cuniculus
QSVEESGGRLVTPGTLLTLTCTVSGFSLSTDVLSWVRQAPGKGLEWIGYTWSGGSTYYASWAKGRFTISKTSSTTVDLKITSPTTEDTATYFCARGFNPFDPWGPGTLVTVSS

SEQ ID NO: 18223 - protein, 114 aa, Oryctolagus cuniculus
QSVKESEGGLFKPTDTLTLTCTVSGFSLSIYEISWVRQAPGKELEWIGYIGVGGVTYYANWAKSRSTITRNTNQKMVALKMTSLTAADTATYFCARGYNPFDLWGPGTLVTVSS

SEQ ID NO: 18224 - protein, 113 aa, Oryctolagus cuniculus
QSVEESGGRLVKPGESLTLTCTASGFSLSSDVISWVRQAPGKGLEWIGYGWSGGPTYYANWAKGRFTISKTSSTTVDLKITSPTTEDTATYFCARGFNPFDPWGPGTLVTVSS

SEQ ID NO: 18225 - protein, 118 aa, Artificial Sequence
  source: /note="Description of Artificial Sequence: Synthetic polypeptide"
QVQLVQSGAELVQPGASVKLSCKASGYTFTTYWLQWVRQTPGQGLEWMGAIYPGPGNTKYTQKFKDRVTITADTSTSTAYMQLNSLRSEDSAVYYCARRGSRRGIAYWGQGTLVTVSA

SEQ ID NO: 18226 - protein, 118 aa, Artificial Sequence
  source: /note="Description of Artificial Sequence: Synthetic polypeptide"
QVQLVQSGAELKKPGASVKLSCKASGYTFTTYWLQWVRQAPGQGLEWMGAIYPGPGNTKYTQKFKDRFTITADKSKSTAYMQLNSLKSEDSAVYYCARRGSRRGIAYWGQGTLVTVSA

SEQ ID NO: 18227 - protein, 118 aa, Artificial Sequence
  source: /note="Description of Artificial Sequence: Synthetic polypeptide"
QVQLVQSGAEVKKPGASVKVSCKASGYTFTTYWLQWVRQAPGQGLEWMGAIYPGPGNTKYTQKFKDRVTITADESTSTAYMELSSLRSEDTAVYYCARRGSRRGIAYWGQGTLVTVSA

SEQ ID NO: 18228 - protein, 118 aa, Artificial Sequence
  source: /note="Description of Artificial Sequence: Synthetic polypeptide"
QVQLVQSGAELKKPGASVKLSCKASGYTFTTYWLQWVRQAPGQGLEWMGAIYPGPGNTKYTQKFKDRFTITADTSKSTAYMQLNSLKSEDSAVYYCARRGSRRGIAYWGQGTLVTVSA

SEQ ID NO: 18229 - protein, 119 aa, Artificial Sequence
  source: /note="Description of Artificial Sequence: Synthetic polypeptide"
QEQLVESGGGLVQPGGSLRLSCVASGFSLSSDGMSWVRQAPGKGLEWIGYIYSGSSPYYANWAKGRFTISKDSSTNTVFLQMNSLRAEDTAVYFCARHGDGGGWYLDIWGPGTLVTVSS

SEQ ID NO: 18230 - protein, 119 aa, Artificial Sequence
  source: /note="Description of Artificial Sequence: Synthetic polypeptide"
EVQLVESGGGLVQPGGSLRLSCAASGFSLSSDGMSWVRQAPGKGLEWIGYIYSGSSPYYANWAKGRFTISKDSSKNTVYLQMNSLRAEDTAVYFCARHGSGGGWYLDIWGPGTLVTVSS

SEQ ID NO: 18231 - protein, 119 aa, Artificial Sequence
  source: /note="Description of Artificial Sequence: Synthetic polypeptide"
EVQLVESGGGLVQPGGSLRLSCAASGFSLSSNGMSWVRQAPGKGLEWIGYIYSGGSPYYANWAKGRFTISKDSSKNTVYLQMNSLRAEDTAVYFCARHGSGGGWYLDIWGPGTLVTVSS

SEQ ID NO: 18232 - protein, 122 aa, Artificial Sequence; identical to SEQ ID NO: 12812
  source: /note="Description of Artificial Sequence: Synthetic polypeptide"

SEQ ID NO: 18233 - protein, 122 aa, Artificial Sequence
  source: /note="Description of Artificial Sequence: Synthetic polypeptide"
EVQLMESGGGLVQLGGSLRLSCAASGFTFSNNAMSWVRQAPGKGLEWVSAITGSGDSTYYADSVKGRFTISRDNSRNTFYLQMNSLRAEDTAVYYCAKERTGTTYLLWFDPWGQGTLVTVSS

SEQ ID NO: 18234 - protein, 122 aa, Artificial Sequence
  source: /note="Description of Artificial Sequence: Synthetic polypeptide"
EVQLLESGGGLVQLGGSLRLSCAASGFTFSNNAMSWVRQAPGKGLEWVSAITGSGDSTYYADSVKGRFTISRDNSRNTFYLQMNSLRAEDTAVYYCAKERTGTTYLLWFDPWGQGTLVTVSS

SEQ ID NO: 18235 - protein, 122 aa, Artificial Sequence
  source: /note="Description of Artificial Sequence: Synthetic polypeptide"
EVQLLESGGGLVQPGGSLRLSCAASGFTFSNNAMSWVRQAPGKGLEWVSAITGSGDSTYYADSVKGRFTISRDNSKNTLYLQMNSLRAEDTAVYYCAKERTGTTYLLWFDPWGQGTLVTVSS

SEQ ID NO: 18236 - protein, 124 aa, Artificial Sequence
  source: /note="Description of Artificial Sequence: Synthetic polypeptide"
QVQLVQSGGGVVQPGRSLRLSCAASGFTFSRYGMHWVRQAPGKGLEWVAVISFDTSNKYYADSVKGRCTISRDNSKNTLYLQMNSLRPEDTAVYYCAKRIAEVGYYYHYGLDVWGQGTTVTVSS

SEQ ID NO: 18237 - protein, 124 aa, Artificial Sequence
  source: /note="Description of Artificial Sequence: Synthetic polypeptide"
QVQLVESGGGVVQPGRSLRLSCAASGFTFSRYGMHWVRQAPGKGLEWVAVISFDTSNKYYADSVKGRCTISRDNSKNTLYLQMNSLRPEDTAVYYCAKRIAEVGYYYHYGLDVWGQGTTVTVSS

SEQ ID NO: 18238 - protein, 124 aa, Artificial Sequence
  source: /note="Description of Artificial Sequence: Synthetic polypeptide"
QVQLVESGGGVVQPGRSLRLSCAASGFTFSRYGMHWVRQAPGKGLEWVAVISFDTSNKYYADSVKGRFTISRDNSKNTLYLQMNSLRAEDTAVYYCAKRIAEVGYYYHYGLDVWGQGTTVTVSS

SEQ ID NO: 18239 - protein, 124 aa, Artificial Sequence
  source: /note="Description of Artificial Sequence: Synthetic polypeptide"
QVQLVESGGGVAQPGRSLRLSCAASGFTFNRYGMHWVRQAPGKGLEWVAVISFDGSNKYYADSVMGRFTISRDNSKNTLYLQMNSLRGEDTAVYYCAKRITEVGYYYHYGLDVWGQGTTVTVSS

SEQ ID NO: 18240 - protein, 124 aa, Artificial Sequence
  source: /note="Description of Artificial Sequence: Synthetic polypeptide"
QVQLVESGGGVVQPGRSLRLSCAASGFTFNRYGMHWVRQAPGKGLEWVAVISFDGSNKYYADSVKGRFTISRDNSKNTLYLQMNSLRAEDTAVYYCAKRITEVGYYYHYGLDVWGQGTTVTVSS

SEQ ID NO: 18241 - protein, 124 aa, Artificial Sequence
  source: /note="Description of Artificial Sequence: Synthetic polypeptide"
QVQLVESGGDVVQPGRSLRLSCTASGFTFSSYGMHWVRQAPGRGLEWVAVISFDGKNKYYADSVKGRFTVSRDNSKNTLFLQMNSLRAEDTALYYCAKRIAATGYYYFYGLDVWGQGTTVTVSS

SEQ ID NO: 18242 - protein, 124 aa, Artificial Sequence
  source: /note="Description of Artificial Sequence: Synthetic polypeptide"
QVQLVESGGGVVQPGRSLRLSCAASGFTFSSYGMHWVRQAPGKGLEWVAVISFDGKNKYYADSVKGRFTISRDNSKNTLYLQMNSLRAEDTAVYYCAKRIAATGYYYFYGLDVWGQGTTVTVSS

SEQ ID NO: 18243 - protein, 124 aa, Artificial Sequence
  source: /note="Description of Artificial Sequence: Synthetic polypeptide"
QVQLVESGGGVVQPGRSLRLSCAASGFTFSRYGMHWVRQAPGKGLEWVAVISFDGSNKYYADSVQGRFTISRDNSKNTLFLQMNSLGAEDTAVYYCTKRIAAAGYYYFYGMDVWGQGTTVTVSS

SEQ ID NO: 18244 - protein, 124 aa, Artificial Sequence
  source: /note="Description of Artificial Sequence: Synthetic polypeptide"
QVQLVESGGGVVQPGRSLRLSCAASGFTFSRYGMHWVRQAPGKGLEWVAVISFDGSNKYYADSVKGRFTISRDNSKNTLYLQMNSLRAEDTAVYYCTKRIAAAGYYYFYGMDVWGQGTTVTVSS

SEQ ID NO: 18245 - protein, 124 aa, Artificial Sequence
  source: /note="Description of Artificial Sequence: Synthetic polypeptide"
QVQLVESGGGVVQPGRSLRLSCAASGFTFSTYGMHWVRQAPGKGLEWVAVISFDGSNKYYADSVKGRFTISRDNSKNTLYLQMNSLRAEDTAVYYCAKRIVEVGYYYHYGMDVWGQGTTVTVSS

SEQ ID NO: 18246 - protein, 124 aa, Artificial Sequence
  source: /note="Description of Artificial Sequence: Synthetic polypeptide"
QVQLVESGGGVVQPGRSLRLSCAASGFTFSRYGMHWVRQAPGKGLEWVAVISFDGSNKYYADSVKGRFTISRDNSKNALYLQMNSLRTEDTAVYYCAKRIAAAGYYYHYGMDVWGQGTTVTVSS

SEQ ID NO: 18247 - protein, 124 aa, Artificial Sequence
  source: /note="Description of Artificial Sequence: Synthetic polypeptide"
QVQLVESGGGVVQPGRSLRLSCAASGFTFSRYGMHWVRQAPGKGLEWVAVISFDGSNKYYADSVKGRFTISRDNSKNTLYLQMNSLRAEDTAVYYCAKRIAAAGYYYHYGMDVWGQGTTVTVSS

SEQ ID NO: 18248 - protein, 124 aa, Artificial Sequence
  source: /note="Description of Artificial Sequence: Synthetic polypeptide"
QVQLVESGGGVVQPGRSLRLSCAASGFTFSRYGMHWVRQAPGKGLEWVAVISFDGSNKYYADSVKGRCTISRDNSKNTLYLQMNSLRPEDTAVYYCAKRIAEVGYYYHYGLDVWGQGTTVTVSS

SEQ ID NO: 18249 - protein, 124 aa, Artificial Sequence
  source: /note="Description of Artificial Sequence: Synthetic polypeptide"
QVQLVESGGGVVQPGRSLRLSCAASGFTFSRYGMHWVRQAPGKGLEWVAVISFDGSNKYYADSVKGRFTISRDNSKNTLYLQMNSLRAEDTAVYYCAKRIAEVGYYYHYGLDVWGQGTTVTVSS

SEQ ID NO: 18250 - protein, 124 aa, Artificial Sequence
  source: /note="Description of Artificial Sequence: Synthetic polypeptide"
QVQLVESGGGVVQPGRSLRLSCSASGFTFTKYGMHWVRQAPGKGLEWVAVISFDGSNKYYTDSVKGRFSISRDNSNNTLYLQMNSLRAQDTAVYYCAKRIAEVGYYYHYGLDVWGQGTMVTVSS

SEQ ID NO: 18251 - protein, 124 aa, Artificial Sequence
  source: /note="Description of Artificial Sequence: Synthetic polypeptide"
QVQLVESGGGVVQPGRSLRLSCSASGFTFTKYGMHWVRQAPGKGLEWVAVISFDGSNKYYTDSVKGRFSISRDNSNNTLYLQMNSLRAQDTAVYYCAKRIAEVGYYYHYGLDVWGQGTTVTVSS

SEQ ID NO: 18252 - protein, 124 aa, Artificial Sequence
  source: /note="Description of Artificial Sequence: Synthetic polypeptide"
QVQLVESGGGVVQPGRSLRLSCAASGFTFTKYGMHWVRQAPGKGLEWVAVISFDGSNKYYADSVKGRFTISRDNSKNTLYLQMNSLRAEDTAVYYCAKRIAEVGYYYHYGLDVWGQGTTVTVSS

SEQ ID NO: 18253 - protein, 124 aa, Artificial Sequence
  source: /note="Description of Artificial Sequence: Synthetic polypeptide"
QVQLVESGGGVVQPGRSLRLSCAASGFTFNRYGMHWVRQAPGKGLEWVAVISFDGSNKYYADSVMGRFTISRDNSKNTLYLQMNSLRGEDTAVYYCAKRIAEVGYYYHYGMDVWGQGTTVTVSS

SEQ ID NO: 18254 - protein, 124 aa, Artificial Sequence
  source: /note="Description of Artificial Sequence: Synthetic polypeptide"
QVQLVESGGGVVQPGRSLRLSCAASGFTFNRYGMHWVRQAPGKGLEWVAVISFDGSNKYYADSVKGRFTISRDNSKNTLYLQMNSLRAEDTAVYYCAKRIAEVGYYYHYGMDVWGQGTTVTVSS

SEQ ID NO: 18255 - protein, 124 aa, Artificial Sequence
  source: /note="Description of Artificial Sequence: Synthetic polypeptide"
QVQLVESGGGVAQPGRSLRLSCAASGFTFNRYGMHWVRQAPGKGLEWVAVISFDGSNKYYADSVMGRFTISRDNSKNTLYLQMNSLRGEDTAVYYCAKRIAEVGYYYHYGMDVWGQGTTVTVSS

SEQ ID NO: 18256 - protein, 124 aa, Artificial Sequence
  source: /note="Description of Artificial Sequence: Synthetic polypeptide"
QVQLVESGGGVAQPGRSLRLSCAASGFTFNRYGMHWVRQAPGKGLEWVAVISFDGSNKYYVDSVMGRFTISRDNSKNTLYLQMNSLRGEDTAVYYCAKRIAEVGYYYHYGMDVWGQGTTVTVSS

SEQ ID NO: 18257 - protein, 124 aa, Artificial Sequence
  source: /note="Description of Artificial Sequence: Synthetic polypeptide"
QVQLVESGGGVVQPGRSLRLSCAASGFTFSNYGMHWVRQAPGKGLEWVAVISFDGKNKYYADSVQGRFTISRDNSKNTLFLQMNSLRAEDSSVYYCAKRIAVTGYYYFYGLDVWGQGTTVTVSS

SEQ ID NO: 18258 - protein, 124 aa, Artificial Sequence
  source: /note="Description of Artificial Sequence: Synthetic polypeptide"
QVQLVESGGGVVQPGRSLRLSCAASGFTFSNYGMHWVRQAPGKGLEWVAVISFDGKNKYYADSVKGRFTISRDNSKNTLYLQMNSLRAEDTAVYYCAKRIAVTGYYYFYGLDVWGQGTTVTVSS

SEQ ID NO: 18259 - protein, 124 aa, Artificial Sequence
  source: /note="Description of Artificial Sequence: Synthetic polypeptide"
QVQLVESGGGVVQPGRSLRLSCAASGFTFSRYGMHWVRQAPGKGLEWVAVISFDGSNKYYADSVKGRFTISRDNSKNALYLQMNSLRAEDTAVYYCAKRIAAAGYYYHYGMDVWGQGTTVTVSS

SEQ ID NO: 18260 - protein, 124 aa, Artificial Sequence
  source: /note="Description of Artificial Sequence: Synthetic polypeptide"
QVHLGESGGGVVQPGRSLRLSCAASGFTFSSYGMNWVRQAPGKGLEWVAVISFDGSNKYYADSVKGRFTISRDNSKNTLYLQMNSLRVEDSAVYYCAKRIAAAGYYYYYGLDVWGQGTTVTVSS

SEQ ID NO: 18261 - protein, 124 aa, Artificial Sequence
  source: /note="Description of Artificial Sequence: Synthetic polypeptide"
QVQLVESGGGVVQPGRSLRLSCAASGFTFSSYGMNWVRQAPGKGLEWVAVISFDGSNKYYADSVKGRFTISRDNSKNTLYLQMNSLRVEDSAVYYCAKRIAAAGYYYYYGLDVWGQGTTVTVSS

SEQ ID NO: 18262 - protein, 124 aa, Artificial Sequence
  source: /note="Description of Artificial Sequence: Synthetic polypeptide"
QVQLVESGGGVVQPGRSLRLSCAASGFTFSSYGMHWVRQAPGKGLEWVAVISFDGSNKYYADSVKGRFTISRDNSKNTLYLQMNSLRAEDTAVYYCAKRIAAAGYYYYYGLDVWGQGTTVTVSS

SEQ ID NO: 18263 - protein, 124 aa, Artificial Sequence
  source: /note="Description of Artificial Sequence: Synthetic polypeptide"
QVQLVESGGGVVQPGRSLRLSCAASGFTFSNYGMNWVRQAPGKGLEWMAVISFDGSNKYYADSVKGRFTISRDNSKNTLYLQMNSLRPDDTAVYYCAKRIAARGYYYYYGMDVWGQGTTVTVSS

SEQ ID NO: 18264 - protein, 124 aa, Artificial Sequence
  source: /note="Description of Artificial Sequence: Synthetic polypeptide"
QVQLVESGGGVVQPGRSLRLSCAASGFTFSNYGMHWVRQAPGKGLEWVAVISFDGSNKYYADSVKGRFTISRDNSKNTLYLQMNSLRAEDTAVYYCAKRIAARGYYYYYGMDVWGQGTTVTVSS

SEQ ID NO: 18265 - protein, 124 aa, Artificial Sequence
  source: /note="Description of Artificial Sequence: Synthetic polypeptide"
QVQLVESGGGVVQPGRSLRLSCAASGFTFSTYGMHWVRQAPGKGLEWVAVISFDGSNKYFADSVKGRFTISRDNSKNTLYLQMNSLRAEDTAVYYCAKRIVQVGYYYHYGMDVWGQGTTVTVSS

SEQ ID NO: 18266 - protein, 124 aa, Artificial Sequence
  source: /note="Description of Artificial Sequence: Synthetic polypeptide"
QVQLVESGGGVVQPGRSLRLSCAASGFTFSTYGMHWVRQAPGKGLEWVAVISFDGSNKYYADSVKGRFTISRDNSKNTLYLQMNSLRAEDTAVYYCAKRIVQVGYYYHYGMDVWGQGTTVTVSS

SEQ ID NO: 18267 - protein, 122 aa, Artificial Sequence
  source: /note="Description of Artificial Sequence: Synthetic polypeptide"
EVQLVESGGGLVQPGGSLRLSCVASGFTFSNYDMHWVRQATGKGLEWVSAIGTAGDTYYPGSVKGRFTISRENAKNSLYLQMNSLRAGDTAVYYCVRDGGMVGYYYYGMDVWGQGTTVTVSS

SEQ ID NO: 18268 - protein, 122 aa, Artificial Sequence
  source: /note="Description of Artificial Sequence: Synthetic polypeptide"
EVQLVESGGGLVQPGGSLRLSCAASGFTFSNYDMHWVRQATGKGLEWVSAIGTAGDTYYPGSVKGRFTISRENAKNSLYLQMNSLRAGDTAVYYCVRDGGMVGYYYYGMDVWGQGTTVTVSS

SEQ ID NO: 18269 - protein, 125 aa, Artificial Sequence
  source: /note="Description of Artificial Sequence: Synthetic polypeptide"
EVQLLESGGGFVQPGGSLRLSCAASGFTFSSYAMSWVRQAPGKGLEWVSAISGSGGSTYYADSVKGRFTISRDNSKNTLYLQMNSLRAEDTAVYYCGKVGYCSSSSCFYYGMDVWGQGTTVTVSS

SEQ ID NO: 18270 - protein, 125 aa, Artificial Sequence
  source: /note="Description of Artificial Sequence: Synthetic polypeptide"
EVQLLESGGGLVQPGGSLRLSCAASGFTFSSYAMSWVRQAPGKGLEWVSAISGSGGSTYYADSVKGRFTISRDNSKNTLYLQMNSLRAEDTAVYYCGKVGYCSSSSCFYYGMDVWGQGTTVTVSS

SEQ ID NO: 18271 - protein, 122 aa, Artificial Sequence
  source: /note="Description of Artificial Sequence: Synthetic polypeptide"
QVQLVQSGGGVVHPGRSLRLSCAASGFTFSGYGMHWVRQAPGKGLEWVAVISYDGTNEYYADSVKGRFIISRDNSKDTLYLQMNSLRPEDTAVYYCAKCLSGTYWGYGMDVWGQGTTVTVSS

SEQ ID NO: 18272 - protein, 121 aa, Artificial Sequence
  source: /note="Description of Artificial Sequence: Synthetic polypeptide"
QVQLVESGGGVVHPGRSLRLSCAASGFTFSGYGMHWVRQAPGKGLEWVAVISYDGTNEYYADSVKGRFIISRDNSKDTLYLQMNSLRPEDTAVYYCAKCLSGTYWGYGMDVWGQGTTVTVS

SEQ ID NO: 18273 - protein, 121 aa, Artificial Sequence
  source: /note="Description of Artificial Sequence: Synthetic polypeptide"
QVQLVESGGGVVQPGRSLRLSCAASGFTFSGYGMHWVRQAPGKGLEWVAVISYDGTNEYYADSVKGRFTISRDNSKNTLYLQMNSLRAEDTAVYYCAKCLSGTYWGYGMDVWGQGTTVTVS

SEQ ID NO: 18274 - protein, 122 aa, Artificial Sequence
  source: /note="Description of Artificial Sequence: Synthetic polypeptide"
QVQLVESGGGVVHPGRSLRLSCAASGFTFSGYGMHWVRQAPGKGLEWVAVISYDATNKYYADSVKGRFTISRDNSKDTLYLQMNSLRPEDTAVYYCAKSLSGTYWGYGMDVWGQGTTVTVSS

SEQ ID NO: 18275 - protein, 121 aa, Artificial Sequence
  source: /note="Description of Artificial Sequence: Synthetic polypeptide"
QVQLVESGGGVVHPGRSLRLSCAASGFTFSGYGMHWVRQAPGKGLEWVAVISYDATNKYYADSVKGRFTISRDNSKDTLYLQMNSLRPEDTAVYYCAKSLSGTYWGYGMDVWGQGTTVTVS

SEQ ID NO: 18276 - protein, 121 aa, Artificial Sequence
  source: /note="Description of Artificial Sequence: Synthetic polypeptide"
QVQLVESGGGVVQPGRSLRLSCAASGFTFSGYGMHWVRQAPGKGLEWVAVISYDATNKYYADSVKGRFTISRDNSKNTLYLQMNSLRAEDTAVYYCAKSLSGTYWGYGMDVWGQGTTVTVS

SEQ ID NO: 18277 - protein, 122 aa, Artificial Sequence
  source: /note="Description of Artificial Sequence: Synthetic polypeptide"
QVQLVQSGGGVVQPGRSLRLSCAASGFTFTGYGMHWVRQAPDKGLEWVAVISYDGTNKYYVDSVKGRFTISRDNSQNTLYLQMNSLRAEDTAVYYCAKCLSGTYWGYGMDVWGQGTTVTVSS

SEQ ID NO: 18278 - protein, 121 aa, Artificial Sequence
  source: /note="Description of Artificial Sequence: Synthetic polypeptide"
QVQLVESGGGVVQPGRSLRLSCAASGFTFTGYGMHWVRQAPDKGLEWVAVISYDGTNKYYVDSVKGRFTISRDNSQNTLYLQMNSLRAEDTAVYYCAKCLSGTYWGYGMDVWGQGTTVTVS

SEQ ID NO: 18279 - protein, 121 aa, Artificial Sequence
  source: /note="Description of Artificial Sequence: Synthetic polypeptide"
QVQLVESGGGVVQPGRSLRLSCAASGFTFTGYGMHWVRQAPGKGLEWVAVISYDGTNKYYADSVKGRFTISRDNSKNTLYLQMNSLRAEDTAVYYCAKCLSGTYWGYGMDVWGQGTTVTVS

SEQ ID NO: 18280 - protein, 122 aa, Artificial Sequence
  source: /note="Description of Artificial Sequence: Synthetic polypeptide"
QVQLVQSGGGVVQPGRSLRLSCAASGFTFSGYGMHWVRQAPGKGLEWVAVISYDGSNKYYADSVKGRFTISRDNSKNTLYLQVNSLRAEDTAVYYCAKCLSGTYWGYGMDVWGQGTTVTVSS

SEQ ID NO: 18281 - protein, 121 aa, Artificial Sequence
  source: /note="Description of Artificial Sequence: Synthetic polypeptide"
QVQLVESGGGVVQPGRSLRLSCAASGFTFSGYGMHWVRQAPGKGLEWVAVISYDGSNKYYADSVKGRFTISRDNSKNTLYLQVNSLRAEDTAVYYCAKCLSGTYWGYGMDVWGQGTTVTVS

SEQ ID NO: 18282 - protein, 121 aa, Artificial Sequence
  source: /note="Description of Artificial Sequence: Synthetic polypeptide"
QVQLVESGGGVVQPGRSLRLSCAASGFTFSGYGMHWVRQAPGKGLEWVAVISYDGSNKYYADSVKGRFTISRDNSKNTLYLQMNSLRAEDTAVYYCAKCLSGTYWGYGMDVWGQGTTVTVS

SEQ ID NO: 18283 - protein, 122 aa, Artificial Sequence
  source: /note="Description of Artificial Sequence: Synthetic polypeptide"
QVQLVQSGGGVVQPGRSLRLSCAASGFTFSGYGMHWVRQAPDKGLEWVAVLSYDGTNKYYADSVKGRFTISRDNSKNTLYLQMNSLRAEDTAVYYCAKCLSGTYWGYGMDVWGQGTTVTVSS

SEQ ID NO: 18284 - protein, 121 aa, Artificial Sequence
  source: /note="Description of Artificial Sequence: Synthetic polypeptide"
QVQLVESGGGVVQPGRSLRLSCAASGFTFSGYGMHWVRQAPDKGLEWVAVLSYDGTNKYYADSVKGRFTISRDNSKNTLYLQMNSLRAEDTAVYYCAKCLSGTYWGYGMDVWGQGTTVTVS

SEQ ID NO: 18285 - protein, 121 aa, Artificial Sequence
  source: /note="Description of Artificial Sequence: Synthetic polypeptide"
QVQLVESGGGVVQPGRSLRLSCAASGFTFSGYGMHWVRQAPGKGLEWVAVLSYDGTNKYYADSVKGRFTISRDNSKNTLYLQMNSLRAEDTAVYYCAKCLSGTYWGYGMDVWGQGTTVTVS

SEQ ID NO: 18286 - protein, 122 aa, Artificial Sequence
  source: /note="Description of Artificial Sequence: Synthetic polypeptide"
QVQLVQSGGGVVHPGRSLRLSCAASGFTFSGYGMHWVRQAPGKGLEWVAVISYDGTNKYYADSVKGRFTISRDNSKDTLYLQMNSLRPEDTAVYYCAKCLSGTYWGYGMDVWGQGTTVTVSS

SEQ ID NO: 18287 - protein, 121 aa, Artificial Sequence
  source: /note="Description of Artificial Sequence: Synthetic polypeptide"
QVQLVESGGGVVHPGRSLRLSCAASGFTFSGYGMHWVRQAPGKGLEWVAVISYDGTNKYYADSVKGRFTISRDNSKDTLYLQMNSLRPEDTAVYYCAKCLSGTYWGYGMDVWGQGTTVTVS

SEQ ID NO: 18288 - protein, 121 aa, Artificial Sequence
  source: /note="Description of Artificial Sequence: Synthetic polypeptide"
QVQLVESGGGVVQPGRSLRLSCAASGFTFSGYGMHWVRQAPGKGLEWVAVISYDGTNKYYADSVKGRFTISRDNSKNTLYLQMNSLRAEDTAVYYCAKCLSGTYWGYGMDVWGQGTTVTVS

SEQ ID NO: 18289 - protein, 122 aa, Artificial Sequence
  source: /note="Description of Artificial Sequence: Synthetic polypeptide"
QVQLVQSGGGVVQPGRSLRLSCAASGFTFGGYGMHWVRQAPDKGLEWVAVISYDGNNKYYVDSVKGRFTISRDNSKNMLYLQMNSLRAEDTAVYYCAKCLSGTYWGYGMDGWGQGTTVTVSS

SEQ ID NO: 18290 - protein, 121 aa, Artificial Sequence
  source: /note="Description of Artificial Sequence: Synthetic polypeptide"
QVQLVESGGGVVQPGRSLRLSCAASGFTFGGYGMHWVRQAPDKGLEWVAVISYDGNNKYYVDSVKGRFTISRDNSKNMLYLQMNSLRAEDTAVYYCAKCLSGTYWGYGMDGWGQGTTVTVS

SEQ ID NO: 18291 - protein, 121 aa, Artificial Sequence
  source: /note="Description of Artificial Sequence: Synthetic polypeptide"
QVQLVESGGGVVQPGRSLRLSCAASGFTFGGYGMHWVRQAPGKGLEWVAVISYDGNNKYYADSVKGRFTISRDNSKNTLYLQMNSLRAEDTAVYYCAKCLSGTYWGYGMDGWGQGTTVTVS

SEQ ID NO: 18292 - protein, 122 aa, Artificial Sequence
  source: /note="Description of Artificial Sequence: Synthetic polypeptide"
QVQLVQSGGGVVQPGRSLRLSCAASGFTFSGYGMHWVRQAPGMGLEWVAVISYDGINKYYADSVKGRFTISRDNSKNTLFLQMNSLRAEDTALYYCAKCLSGTYWGYGMDVWGQGTTVTVSS

SEQ ID NO: 18293 - protein, 121 aa, Artificial Sequence
  source: /note="Description of Artificial Sequence: Synthetic polypeptide"
QVQLVESGGGVVQPGRSLRLSCAASGFTFSGYGMHWVRQAPGMGLEWVAVISYDGINKYYADSVKGRFTISRDNSKNTLFLQMNSLRAEDTALYYCAKCLSGTYWGYGMDVWGQGTTVTVS

SEQ ID NO: 18294 - protein, 121 aa, Artificial Sequence
  source: /note="Description of Artificial Sequence: Synthetic polypeptide"
QVQLVESGGGVVQPGRSLRLSCAASGFTFSGYGMHWVRQAPGKGLEWVAVISYDGINKYYADSVKGRFTISRDNSKNTLYLQMNSLRAEDTAVYYCAKCLSGTYWGYGMDVWGQGTTVTVS

SEQ ID NO: 18295 - protein, 122 aa, Artificial Sequence
  source: /note="Description of Artificial Sequence: Synthetic polypeptide"
QVQLVQSGGGVVQPGRSLRLSCAASGFTFSGFGMHWVRQAPGKGLEWVAIISYDGRNKYYADSVKGRFTISRDNSKNTLYLQMNSLRAEDTAVYYCAKSLSGTYWGYGMDVWGQGTTVTVSS

SEQ ID NO: 18296 - protein, 121 aa, Artificial Sequence
  source: /note="Description of Artificial Sequence: Synthetic polypeptide"
QVQLVESGGGVVQPGRSLRLSCAASGFTFSGFGMHWVRQAPGKGLEWVAIISYDGRNKYYADSVKGRFTISRDNSKNTLYLQMNSLRAEDTAVYYCAKSLSGTYWGYGMDVWGQGTTVTVS

SEQ ID NO: 18297 - protein, 121 aa, Artificial Sequence
  source: /note="Description of Artificial Sequence: Synthetic polypeptide"
QVQLVESGGGVVQPGRSLRLSCAASGFTFSGFGMHWVRQAPGKGLEWVAVISYDGRNKYYADSVKGRFTISRDNSKNTLYLQMNSLRAEDTAVYYCAKSLSGTYWGYGMDVWGQGTTVTVS

SEQ ID NO: 18298 - protein, 122 aa, Artificial Sequence
  source: /note="Description of Artificial Sequence: Synthetic polypeptide"
QVQLVQSGGGVVHPGRSLRLSCAASGFTFSGYGMHWVRQAPGKGLEWVAVISYDGANKYYADSVKGRFTISRDNSKDTLYLQMNSLRPEDTAVYYCAKCLSGTYWGYGMDVWGQGTTVTVSS

SEQ ID NO: 18299 - protein, 121 aa, Artificial Sequence
  source: /note="Description of Artificial Sequence: Synthetic polypeptide"
QVQLVESGGGVVHPGRSLRLSCAASGFTFSGYGMHWVRQAPGKGLEWVAVISYDGANKYYADSVKGRFTISRDNSKDTLYLQMNSLRPEDTAVYYCAKCLSGTYWGYGMDVWGQGTTVTVS

SEQ ID NO: 18300 - protein, 121 aa, Artificial Sequence
  source: /note="Description of Artificial Sequence: Synthetic polypeptide"
QVQLVESGGGVVQPGRSLRLSCAASGFTFSGYGMHWVRQAPGKGLEWVAVISYDGANKYYADSVKGRFTISRDNSKNTLYLQMNSLRAEDTAVYYCAKCLSGTYWGYGMDVWGQGTTVTVS

SEQ ID NO: 18301 - protein, 122 aa, Artificial Sequence
  source: /note="Description of Artificial Sequence: Synthetic polypeptide"
QVQLVESGGGVVQPGRSLRLSCAASGFTFSGYGIHWVRQAPDKGLEWVAVISYDGTNKYYGDSVKGRFTISRDNTKNTLYLQMNSLRTEDTAVYYCAKSLSGTYWGYGMDVWGQGTTVTVSS

SEQ ID NO: 18302 - protein, 121 aa, Artificial Sequence
  source: /note="Description of Artificial Sequence: Synthetic polypeptide"
QVQLVESGGGVVQPGRSLRLSCAASGFTFSGYGIHWVRQAPDKGLEWVAVISYDGTNKYYGDSVKGRFTISRDNTKNTLYLQMNSLRTEDTAVYYCAKSLSGTYWGYGMDVWGQGTTVTVS

SEQ ID NO: 18303 - protein, 121 aa, Artificial Sequence
  source: /note="Description of Artificial Sequence: Synthetic polypeptide"
QVQLVESGGGVVQPGRSLRLSCAASGFTFSGYGMHWVRQAPGKGLEWVAVISYDGTNKYYADSVKGRFTISRDNSKNTLYLQMNSLRAEDTAVYYCAKSLSGTYWGYGMDVWGQGTTVTVS

SEQ ID NO: 18304 - protein, 122 aa, Artificial Sequence
  source: /note="Description of Artificial Sequence: Synthetic polypeptide"
QVQLVQSGGGVVQPGRSLRLSCAASGFTFSGYGMHWVRQAPGKGLDWVTVISYDGSNKHYADSVKGRFTISRDNSKNTLYLQMSSLGPEDTAVYYCAKSLSGTYWGYGMDVWGQGTTVTVSS

SEQ ID NO: 18305 - protein, 121 aa, Artificial Sequence
  source: /note="Description of Artificial Sequence: Synthetic polypeptide"
QVQLVESGGGVVQPGRSLRLSCAASGFTFSGYGMHWVRQAPGKGLDWVTVISYDGSNKHYADSVKGRFTISRDNSKNTLYLQMSSLGPEDTAVYYCAKSLSGTYWGYGMDVWGQGTTVTVS

SEQ ID NO: 18306 - protein, 121 aa, Artificial Sequence
  source: /note="Description of Artificial Sequence: Synthetic polypeptide"
QVQLVESGGGVVQPGRSLRLSCAASGFTFSGYGMHWVRQAPGKGLEWVAVISYDGSNKYYADSVKGRFTISRDNSKNTLYLQMNSLRAEDTAVYYCAKSLSGTYWGYGMDVWGQGTTVTVS

SEQ ID NO: 18307 - protein, 122 aa, Artificial Sequence
  source: /note="Description of Artificial Sequence: Synthetic polypeptide"
QVQLVQSGGGVVQPGRSLRLSCAASGFTFSGYGIHWVRQAPDKGLEWVAVISYDGTNKYYGDSVKGRFTISRDNTKNTLYLQMNSLRTEDTAVYYCAKCLSGTYWGYGMDVWGQGTTVTVSS

SEQ ID NO: 18308 - protein, 121 aa, Artificial Sequence
  source: /note="Description of Artificial Sequence: Synthetic polypeptide"
QVQLVESGGGVVQPGRSLRLSCAASGFTFSGYGIHWVRQAPDKGLEWVAVISYDGTNKYYGDSVKGRFTISRDNTKNTLYLQMNSLRTEDTAVYYCAKCLSGTYWGYGMDVWGQGTTVTVS

SEQ ID NO: 18309 - protein, 122 aa, Artificial Sequence
  source: /note="Description of Artificial Sequence: Synthetic polypeptide"
QVQLVQSGGGVVHPGRSLTLSCAASGFTFSGYGMHWVRQAPGKGLEWVAVISYDGINKYYADSVKGRFTISRDNSKNTLYLQMNSLRAEDTAIYYCAKCLSGSYWGFGMDVWGQGTTVTVSS

SEQ ID NO: 18310 - protein, 121 aa, Artificial Sequence
  source: /note="Description of Artificial Sequence: Synthetic polypeptide"
QVQLVESGGGVVHPGRSLTLSCAASGFTFSGYGMHWVRQAPGKGLEWVAVISYDGINKYYADSVKGRFTISRDNSKNTLYLQMNSLRAEDTAIYYCAKCLSGSYWGFGMDVWGQGTTVTVS

SEQ ID NO: 18311 - protein, 121 aa, Artificial Sequence
  source: /note="Description of Artificial Sequence: Synthetic polypeptide"
QVQLVESGGGVVQPGRSLRLSCAASGFTFSGYGMHWVRQAPGKGLEWVAVISYDGINKYYADSVKGRFTISRDNSKNTLYLQMNSLRAEDTAVYYCAKCLSGSYWGFGMDVWGQGTTVTVS

SEQ ID NO: 18312 - protein, 122 aa, Artificial Sequence
  source: /note="Description of Artificial Sequence: Synthetic polypeptide"
EVQLLESGGGLLQPGGSLRLSCAASGFTFSGFGMSWVRQAPGRGLEWVSVISYDGRNKYYADSVKGRFTSSRDNSKNTLYLQMNSLRAEDTAVYYCAKSLSGTYWGYGMDVWGRGTLVTVSS

SEQ ID NO: 18313 - protein, 117 aa, Artificial Sequence
  source: /note="Description of Artificial Sequence: Synthetic polypeptide"
QVQLQQSGAELAKPGASVKMSCKSSGYTFTSYWIHWVKERPGQGLEWIGYIYPTTGYTESNQKFKDKATLTADKSSSTAYMQLSSLTSEDSAVYYCFLLRPWYFDVWGAGTTVTVSS

SEQ ID NO: 18314 - protein, 117 aa, Artificial Sequence
  source: /note="Description of Artificial Sequence: Synthetic polypeptide"
QVQLVQSGAEVKKPGASVKVSCKASGYTFTSYWIHWVRQAPGQGLEWIGYIYPTTGYTESNQKFKDRVTMTRDTSTSTVYMELSSLRSEDTAVYYCFLLRPWYFDVWGQGTTVTVSS

SEQ ID NO: 18315 - protein, 117 aa, Artificial Sequence
  source: /note="Description of Artificial Sequence: Synthetic polypeptide"
QVQLVQSGAEVKKPGASVKVSCKASGYTFTSYWIHWVRQAPGQGLEWIGYIYPTTGYTESNQKFKDRVTMTRDTSISTAYMELSRLRSDDTAVYYCFLLRPWYFDVWGQGTTVTVSS

SEQ ID NO: 18316 - protein, 117 aa, Artificial Sequence
  source: /note="Description of Artificial Sequence: Synthetic polypeptide"
QVQLVQSGAEVKKPGASVKVSCKASGYTFTSYWIHWVRQATGQGLEWIGYIYPTTGYTESNQKFKDRVTMTRNTSISTAYMELSSLRSEDTAVYYCFLLRPWYFDVWGQGTTVTVSS

SEQ ID NO: 18317 - protein, 121 aa, Artificial Sequence
  source: /note="Description of Artificial Sequence: Synthetic polypeptide"
QIQLQQSGPELVKPGTSVKISCKASDYTLTDFYMNWVRQKPGQGLEWIGRIYPGTDKTRYNEKFRDKAILTVDTSSSTAYMQLSSLTSEDTAVYFCARSAYYGNYVAMDYWGQGTSVTVSL

SEQ ID NO: 18318 - protein, 121 aa, Artificial Sequence
  source: /note="Description of Artificial Sequence: Synthetic polypeptide"
QIQLQQSGPELVKPGTSVKISCKASDYTLTDFYMNWVRQKPGQGLEWIGRIYPGTDKTRYNEKFRDKAILTVDTSSSTAYMQLSSLTSEDTAVYFCARSAYYGNYVAMDYWGQGTSVTVSS

SEQ ID NO: 18319 - protein, 121 aa, Artificial Sequence
  source: /note="Description of Artificial Sequence: Synthetic polypeptide"
EVQLVQSGAEVKKPGATVKISCKVSDYTLTDFYMNWVQQAPGKGLEWIGRIYPGTDKTRYNEKFRDRVTITADTSTDTAYMELSSLRSEDTAVYYCARSAYYGNYVAMDYWGQGTTVTVSS

SEQ ID NO: 18320 - protein, 121 aa, Artificial Sequence
  source: /note="Description of Artificial Sequence: Synthetic polypeptide"
QVQLVQSGAEVKKPGSSVKVSCKASDYTLTDFYMNWVRQAPGQGLEWIGRIYPGTDKTRYNEKFRDRVTITADKSTSTAYMELSSLRSEDTAVYYCARSAYYGNYVAMDYWGQGTTVTVSS

SEQ ID NO: 18321 - protein, 91 aa, Artificial Sequence
  source: /note="Description of Artificial Sequence: Synthetic polypeptide"
AVTLDESGGGLQTPGGGLSLVCKASGFTFDSYAMYWVRQAPGKGLEWVASINRFGSSTGHGAAVKGRATISRDNGQSTLGAYPYDVPDYAS

SEQ ID NO: 18322 - protein, 153 aa, Artificial Sequence
  source: /note="Description of Artificial Sequence: Synthetic polypeptide"
AVTLDESGGGLQTPGGALSLICKASGFTFSSFNMIWVRQAPGKGLEFVGSINRFGNSTGHGAAVKGRVTISRDDGQSTVRLQLNNLRAEDTGTYFCAKSVHGHCASGYWCSAASIDAWGHGTEVIVSSTSGQAGQHHHHHHGAYPYDVPDYAS

SEQ ID NO: 18323 - protein, 148 aa, Artificial Sequence
  source: /note="Description of Artificial Sequence: Synthetic polypeptide"
AVTLDESEGGLQTPGGALSLVCKASGFSFSDRGMHWVRQAPGKGLEYVAGIYDDGGTTYYGAAVKGRASITRDNGQSAVRLQLNNLRAEDTATYYCAKSAAGDAWGADDIDAWGHGTEVIVSSTSGQAGQHHHHHHGAYPYDVPDYAS

SEQ ID NO: 18324 - protein, 153 aa, Artificial Sequence
  source: /note="Description of Artificial Sequence: Synthetic polypeptide"
AVTLDESGGGLQTPGGALSLVCKASGFDFSSYQMNWIRQAPGKGLEWVAAINKFGTSTSRGAAVKGRVTISRDDGQSTVRLQLNNLRSEDTATYFCAKSAYGSCASGSWCSAASIDAWGHGTEVIVSSTSGQAGQHHHHHHGAYPYDVPDYAS

SEQ ID NO: 18325 - protein, 115 aa, Artificial Sequence; identical to SEQ ID NO: 14446
  source: /note="Description of Artificial Sequence: Synthetic polypeptide"

SEQ ID NO: 18326 - protein, 115 aa, Artificial Sequence; identical to SEQ ID NO: 14449
  source: /note="Description of Artificial Sequence: Synthetic polypeptide"

SEQ ID NO: 18327 - protein, 142 aa, Artificial Sequence
  source: /note="Description of Artificial Sequence: Synthetic polypeptide"
MEFGLSWLFLVAILKGVQCQVQLVESGGGSVQPGRSLRLSCEASGFTFEAYAMHWVRQPPGKGLEWVSSINWNSGRIAYADSVKGRFTISRDNARNSLYLQMNSLRLEDTAFYYCAKDIRRFSTGGAEFEYWGQGTLVTVSS

SEQ ID NO: 18328 - protein, 142 aa, Artificial Sequence
  source: /note="Description of Artificial Sequence: Synthetic polypeptide"
MEFGLSWLFLVAILKGVQCEVQLLESGGGLVQPGRSLRLSCAASGFTFDDYVMHWVRQAPGKGLEWVSSISWNSGSIGYADSVKGRFIISRDNAKNSLYLQMNSLRAEDTALYYCAKDRRIRGDSGFEGDYWGQGTLVTVSS

SEQ ID NO: 18329 - protein, 142 aa, Artificial Sequence
  source: /note="Description of Artificial Sequence: Synthetic polypeptide"
MEFGLSWLFLVAILKGVQCQVQLLESGGGLVQPGRSLRLSCAASGFTFDEYAMHWVRQAPGKGLEWVSSVSWNSGSIGYADSVKGRFTISRDNAKNSLYLQMNSLRAEDTALYYCAKDIRTYSTGGAEFASWGQGTLVTASS

SEQ ID NO: 18330 - protein, 145 aa, Artificial Sequence
  source: /note="Description of Artificial Sequence: Synthetic polypeptide"
MEFGLSWLFLVAILKGVQCQVQLLESGGGVVQPGRSLRLSCAASGFTFSFYGMHWVRQAPGKGLEWVAAISYDGSNKYYADSVKGRFTISRDNSKNTLYLQMNSLRAEDTAVYYCAKRPNQFYCSDGRCYSIDYWGQGTLVTVSS

SEQ ID NO: 18331 - protein, 154 aa, Mus musculus
MRVLILLCLFTAFPGILSDVQLQESGPDLVKPSQSLSLTCTVTGYSITSGYSWHWVRQFPGNKMEWMGHIHFSGRPTYNPSLSSRISITRDTSKNQFLLQLKFVTTEDTSTYFCARKGKGSDDGLNYWGQGISVTVSSAKTTPPPVYPLVPGSL

SEQ ID NO: 18332 - protein, 117 aa, Artificial Sequence
  source: /note="Description of Artificial Sequence: Synthetic polypeptide"
EVQLLESGGGLVQPGGSLRLSCAASGFTFSSYAMSWVRQAPGKGLEWVSAISGSGGSTYYADSVKGRFTISRDNSKNTLYLQMNSLRAEDMAVYYCAKWRWMMFDYWGQGTLVTVSS

SEQ ID NO: 18333 - protein, 117 aa, Artificial Sequence
  source: /note="Description of Artificial Sequence: Synthetic polypeptide"
EVQLLESGGGLVQPGGSLRLSCAASGFTFSSYAMSWVRQAPGKGLEWVSAISGSGGSTYYADSVKGRFTISRDNSKNTLYLQMNSLRAEDTAVYYCAKWRWMMFDYWGQGTLVTVSS

SEQ ID NO: 18334 - protein, 121 aa, Artificial Sequence
  source: /note="Description of Artificial Sequence: Synthetic polypeptide"
QVQLVQSGAEVKKPGSSVKVSCKASGGTFSSYAISWVRQAPGQGLEWMGGIIPIFGTANYAQKFQGRVTITADKSTSTAYMELSSLRSEDTAVYYCARLYGYAYYGAFDYWGQGTTVTVSS

SEQ ID NO: 18335 - protein, 121 aa, Artificial Sequence
  source: /note="Description of Artificial Sequence: Synthetic polypeptide"
QVQLVQSGAEVKKPGSSVKVSCKASGGTFSSYAISWVRQAPGQGLEWMGVIIPILGTANYAQKFQGRVTITADKSTSTAYMELSSLRSEDTAVYYCARLYGYAYYGAFDYWGQGTTVTVSS

SEQ ID NO: 18336 - protein, 121 aa, Artificial Sequence
  source: /note="Description of Artificial Sequence: Synthetic polypeptide"
QVQLVQSGAEVKKPGSSVKVSCKASGGTFSSYAISWVRQAPGQGLEWMGAIIPILGIANYAQKFQGRVTITADKSTSTAYMELSSLRSEDTAVYYCARLYGYAYYGAFDYWGQGTTVTVSS

SEQ ID NO: 18337 - protein, 116 aa, Homo sapiens
EVQLLESGGGLVQPGGSLRLSCAASGFTFSSYAASWVRQAPGKGLEWVSAISGSGGSTYYADSVKGRFTISRDNSKNTLYLQMNSLRAEDTAVYYCAKAHNAFDYWGQGTLVTVSR

SEQ ID NO: 18338 - protein, 116 aa, Artificial Sequence
  source: /note="Description of Artificial Sequence: Synthetic polypeptide"
EVQLLESGGGLVQPGGSLRLSCAASGFTFSRYGASWVRQAPGKGLEWVSAISGSGGSTYYADSVKGRFTISRDNSKNTLYLQMNSLRAEDTAVYYCAKAHNAFDYWGQGTLVTVSR

SEQ ID NO: 18339 - protein, 118 aa, Homo sapiens
EVQLLESGGGLVQPGGSLRLSCAASGFTFSSYAMSWVRQAPGKGLEWVSAISGSGGSTYYADSVKGRFTISRDNSKNTLYLQMNSLRAEDTAVYYCAKHPPHRPFDYWGQGTLVTVSR

SEQ ID NO: 18340 - protein, 116 aa, Homo sapiens
EVQLVESGGGLVQPGGSLRLSCAASGFTFGSYAMSWVRQAPGKGLEWVSAISGSGGSTYYADSVEGRFTISRDNSKNTLYLQMNSLRAEDTAVYYCAKGRRIFDYWGQGTLVTVSR

SEQ ID NO: 18341 - protein, 118 aa, Homo sapiens
EVQLVESGGGLVQPGGSLRLSCAASGFTFSGSRMGWVRQAPGKGLEWVSAINEEGGQTYYADSVKGRFTISRDNSKNTLYLQMNSLRAEDTAVYYCAKHPPHRPFDYWGQGTLVTVSR

SEQ ID NO: 18342 - protein, 116 aa, Artificial Sequence
  source: /note="Description of Artificial Sequence: Synthetic polypeptide"
EVQLLESGGGLVQPGGSLRLSCAASGFTFSRYGMSWVRQAPGKGLEWVSAISGSGGSTYYADSVKGRFTISRDNSKNTLYLQMNSLRAEDTAVYYCAKAHNAFDYWGQGTLVTVSR

SEQ ID NO: 18343 - protein, 118 aa, Homo sapiens
EVQLLESGGGLVQPGGSLRLSCAASGFTFSGSRMGWVRQAPGKGLEWVSAINEEGGQTYYADSVKGRFTISRDNSKNTLYLQMNSLRAEDTAVYYCAKHPPHRPFDYWGQGTLVTVSS

SEQ ID NO: 18344 - protein, 116 aa, Homo sapiens
EVQLVESGGGLVQPGGSLRLSCAASGFTFSSYAMSWVRQAPGKGLEWVSAISGSGGSTYYADSVKGRFTISRDNSKNTLYLQMNSLRAEDTAVYYCAKGRRIFDYWGQGTLVTVSR

SEQ ID NO: 18345 - protein, 116 aa, Homo sapiens
EVQLVESGGGLVQPGGSLRLSCAASGFTFGQYSMSWVRQAPGKGLEWVSAITGTGGETYYADSVEGRFTISRDNSKNTLYLQMNSLRAEDTAVYYCAKGRRIFDYWGQGTLVTVSR

SEQ ID NO: 18346 - protein, 117 aa, Artificial Sequence
  source: /note="Description of Artificial Sequence: Synthetic polypeptide"
EVQLLESGGGLVQPGGSLRLSCAASGFTFSSYAMSWVRQAPGKGLEWVSAISGSGGSTYYADSVKGQFTISRDNSKNTLYLQMNSLRAEDTAVYYCAKANPWAFDYWGQGTLVTVSS

SEQ ID NO: 18347 - protein, 120 aa, Artificial Sequence
  source: /note="Description of Artificial Sequence: Synthetic polypeptide"
KVKLQQSGPELVKPGASVKVSCKASGYAFTSYNMYWVKQSHGKSLEWIGYIDPYNGVTSYNQKFKGKATLTVDKSSSTAYMHLNSLTSEDSAVYYCARGGGSIYYAMDYWGQGTTVTVSS

SEQ ID NO: 18348 - protein, 131 aa, Mus musculus
MDFQVQIFSFLLISASVIMSRGQIVLSQSPAILSASPGEKVTMTCRANSSVRFMHWYQQKPGSSPKPWIYATSNLASGVPARFSGSGSGTSYSVTISRVEAEDAATYYCQQWSSNSPRTFGGGTKVEIRRA

SEQ ID NO: 18349 - protein, 116 aa, Homo sapiens
QVQLVESGGGVVQPGRSLRLSCAASGFTFSNYGMHWVRQAPGKGLEWVAVIPFDGSNKYYADSVKGRFTISRDNSKNTLYLQTNSLRAEDTAVYYCARNWGYFDYWGQGTLVTVSS

SEQ ID NO: 18350 - protein, 127 aa, Homo sapiens
QVQLQESGPGLVKPSETLSLTCTVSGGSISSYYWSWIRQPPGKGLEWIGYIYYSGNTNYNPSLKSRVTISVDTSKNQFSLKLSSVTAADTAVYYCARDIVVVPAARDYDYYYGMDVWGQGTTVTVSS

SEQ ID NO: 18351 - protein, 122 aa, Homo sapiens
EVQLVQSGAEVKKPGESLKISCKDSGYSFTSYWIGWVRQMPGKGLEWMGIIYPGDSDTRYSPSFQGQVTISADKSISTAYLQWSSLKASDTAMYYCARPFFYSSGWYYFDYWGQGTLVTVSS

SEQ ID NO: 18352 - protein, 125 aa, Homo sapiens
EVQLLESGGGLVQPGGSLRLSCAASGFTFSSYAMSWVRQAPGKGLEWVSAISGSGGSTYYADSVKGRFTISRDNSKNTLYLQMNSLRAEDTAVYYCAKALVGATRDYYYYGMDVWGQGTTVTVSS

SEQ ID NO: 18353 - protein, 121 aa, Homo sapiens
QVQLQQWGAGLLKPSETLSLTCAVYGGSFSHYYWSWIRQPPGKGLEWIGEINHSGSTNYNPSLKSRVTISVDTSKNQFSLKLSSVTAADTAVYYCARDITMVRGLGGMDVWGQGTTVTVSS

SEQ ID NO: 18354 - protein, 125 aa, Homo sapiens
EVQLLESGGGLVQPGGSLRLSCAASGFTFSSYAMSWVRQAPGKGLEWVSAISGSGGSTYYADSVKGRFTISRDNSKNTLYLQMNSLRAEDTAVYYCAKAIVGARDYYYYYGMDVWGQGTTVTVSS

SEQ ID NO: 18355 - protein, 121 aa, Homo sapiens
QVQLVESGGGVVQPGRSLRLSCAASGFTFSSYGMHWVRQAPGKGLEWVAVLWYDGSKKFYADSVKGRFTISRDNSKNTLYLQMNSLRAEDTALYYCARGPWNYYYYGMDVWGQGTTVTVSS

SEQ ID NO: 18356 - protein, 121 aa, Homo sapiens
QEQLVESGGGVVQPGRSLRLSCAASGFTFSSHGMHWVRQAPGKGLEWVAIIWYDGSKKFYADSVKGRFTISRDNSKNTLSLQMNSLRAEDTAVYYCARGPWNYYYYGMDVWGQGTTVTVSS

SEQ ID NO: 18357 - protein, 120 aa, Homo sapiens
QVQLVESGGGVVQPGRSLRLSCAASGFTFSHYGMHWVRQAPGKGLEWVAVIWFDGSDKDYADSVKGRFTISRDNSKNTLYLQMNSLRAEDTAVYYCARDSSGWYAYFDYWGQGTLVTVSS

SEQ ID NO: 18358 - protein, 120 aa, Homo sapiens
QVQLVESGGGVVQPGRSLRLSCAASGFTFSSYGMHWVRQAPGKGLEWVAFIWYDGSNKYYADSVKGRFTISRDNSKNTLYLQMNSLRAEDTAVYYCARDGSSGWYFFDYWGQGTLVTVSS

SEQ ID NO: 18359 - protein, 122 aa, Homo sapiens
QVQLVQSGAEVKKPGASVKVSCKASGYTFTGYYMHWVRQAPGQGLEWMGWINPNSGGTNSAQRFQGRVTMTRDTSIYTAYMELSRLRSDDTAVYYCAREYRSGRYYNGMDVWGQGTTVTVSS

SEQ ID NO: 18360 - protein, 123 aa, Homo sapiens
QVQLVQSGAEVKKPGASVKVSCKASGYTFTNYDINWLRQASGQGLEWMGWMNPDSGNTGYAQRFQGRVTMTRDTSISTAYMELSSLRSEDTAVYYCARYISSLHYYYYGMDVWGQGTTVTVSS

SEQ ID NO: 18361 - protein, 123 aa, Homo sapiens
QVQLVQSGAEVKKPGASVKVSCKASGYTFTNYDINWVRQATGQGLEWMGWMNPNSGNTGYAQKFQGRVTMTRNTSIRTAYMELSSLRSEDTAVYYCARGPGGSFYYYYGMDVWGQGTTVTVSS

SEQ ID NO: 18362 - protein, 119 aa, Artificial Sequence
  source: /note="Description of Artificial Sequence: Synthetic polypeptide"
EVQLVESGGGLTQPGKSLKLSCEASGFTFSSFTMHWVRQSPGKGLEWVAFIRSGSGIVFYADAVRGRFTISRDNAKNLLFLQMNDLKSEDTAMYYCARRPLGHNTFDSWGQGTLVTVSS

SEQ ID NO: 18363 - protein, 119 aa, Artificial Sequence
  source: /note="Description of Artificial Sequence: Synthetic polypeptide"
EVQLQQSGPELVKPGTSMKISCKASGYSFTGHLMNWVKQSHGKNLEWIGLIIPYNGGTSYNQKFKGKATLTVDKSSSTAYMELLSLTSDDSAVYFCSRGLRGFYAMDYWGQGTSVTVSS

SEQ ID NO: 18364 - protein, 114 aa, Artificial Sequence
  source: /note="Description of Artificial Sequence: Synthetic polypeptide"
QVQLEESGPGLVAPSQSLSITCTVSGFSLTSYGVSWVRQPPGKGLEWLGVIWGDGSTNYHSALISRLSISKDNSKSQVFLKLNSLQTDDTATYYCAKGGYFDYWGQGTTLTVSS

SEQ ID NO: 18365 - protein, 116 aa, Artificial Sequence
  source: /note="Description of Artificial Sequence: Synthetic polypeptide"
QVQLQQSDAELVKPGSSVKISCKASGYTFTDHAIHWVKQKPEQGLEWIGHFSPGNTDIKYNDKFKGKATLTVDRSSSTAYMQLNSLTSEDSAVYFCKTSTFFFDYWGQGTTLTVSS

SEQ ID NO: 18366 - protein, 116 aa, Artificial Sequence
  source: /note="Description of Artificial Sequence: Synthetic polypeptide"
QVQLVQSGAEVKKTGSSVKVSCKASGYTFTDHAIHWVRQAPGQALEWMGHFSPGNTDIKYNDKFKGRVTITRDRSMSTAYMELSSLRSEDTAMYYCATSTFFFDYWGQGTMVTVSS

SEQ ID NO: 18367 - protein, 116 aa, Artificial Sequence
  source: /note="Description of Artificial Sequence: Synthetic polypeptide"
QVQLVQSGAEVKKTGSSVKVSCKASGYTFTDHAIHWVRQAPGQALEWIGHFSPGNTDIKYNDKFKGRATLTVDRSMSTAYMELSSLRSEDTAMYYCKTSTFFFDYWGQGTMVTVSS

SEQ ID NO: 18368 - protein, 116 aa, Artificial Sequence
  source: /note="Description of Artificial Sequence: Synthetic polypeptide"
QVQLVQSGAEVKKTGSSVKVSCKASGYTFTDHAIHWVRQAPGQALEWMGHFSPGNTDIKYNDKFKGRATLTVDRSMSTAYMELSSLRSEDTAMYYCKTSTFFFDYWGQGTMVTVSS

SEQ ID NO: 18369 - protein, 116 aa, Artificial Sequence
  source: /note="Description of Artificial Sequence: Synthetic polypeptide"
QVQLVQSGAEVKKTGSSVKVSCKASGYTFTDHAIHWVRQAPGQALEWIGHFSPGNTDIKYNDKFKGRVTLTVDRSMSTAYMELSSLRSEDTAMYYCKTSTFFFDYWGQGTMVTVSS

SEQ ID NO: 18370 - protein, 116 aa, Artificial Sequence
  source: /note="Description of Artificial Sequence: Synthetic polypeptide"
QVQLVQSGAEVKKTGSSVKVSCKASGYTFTDHAIHWVRQAPGQALEWIGHFSPGNTDIKYNDKFKGRATITVDRSMSTAYMELSSLRSEDTAMYYCKTSTFFFDYWGQGTMVTVSS

SEQ ID NO: 18371 - protein, 116 aa, Artificial Sequence
  source: /note="Description of Artificial Sequence: Synthetic polypeptide"
QVQLVQSGAEVKKTGSSVKVSCKASGYTFTDHAIHWVRQAPGQALEWIGHFSPGNTDIKYNDKFKGRATLTRDRSMSTAYMELSSLRSEDTAMYYCKTSTFFFDYWGQGTMVTVSS

SEQ ID NO: 18372 - protein, 116 aa, Artificial Sequence
  source: /note="Description of Artificial Sequence: Synthetic polypeptide"
QVQLVQSGAEVKKTGSSVKVSCKASGYTFTDHAIHWVRQAPGQALEWIGHFSPGNTDIKYNDKFKGRATLTVDRSMSTAYMELSSLRSEDTAMYYCATSTFFFDYWGQGTMVTVSS

SEQ ID NO: 18373 - protein, 116 aa, Artificial Sequence
  source: /note="Description of Artificial Sequence: Synthetic polypeptide"
QVQLVQSGAEVKKTGSSVKVSCKASGYTFTDHAIHWVRQAPGQALEWMGHFSPGNTDIKYNDKFKGRVTLTVDRSMSTAYMELSSLRSEDTAMYYCKTSTFFFDYWGQGTMVTVSS

SEQ ID NO: 18374 - protein, 116 aa, Artificial Sequence
  source: /note="Description of Artificial Sequence: Synthetic polypeptide"
EVQLVQSGAEVKKPGESLKISCKISGYIFTDHAIHWVRQMPGKGLEWMGHFSPGNTDIKYNDKFKGQVTFSVDRSINTAYLQWSSLKASDTAIYFCARSTFFFDYWGQGTRVTVSS

SEQ ID NO: 18375 - protein, 116 aa, Artificial Sequence
  source: /note="Description of Artificial Sequence: Synthetic polypeptide"
EVQLVQSGAEVKKPGESLKISCKISGYTFTDHAIHWVRQMPGKGLEWIGHFSPGNTDIKYNDKFKGQATLSVDRSINTAYLQWSSLKASDTAIYFCKTSTFFFDYWGQGTRVTVSS

SEQ ID NO: 18376 - protein, 116 aa, Artificial Sequence
  source: /note="Description of Artificial Sequence: Synthetic polypeptide"
EVQLVQSGAEVKKPGESLKISCKISGYIFTDHAIHWVRQMPGKGLEWIGHFSPGNTDIKYNDKFKGQATLSVDRSINTAYLQWSSLKASDTAIYFCKTSTFFFDYWGQGTRVTVSS

SEQ ID NO: 18377 - protein, 116 aa, Artificial Sequence
  source: /note="Description of Artificial Sequence: Synthetic polypeptide"
EVQLVQSGAEVKKPGESLKISCKISGYTFTDHAIHWVRQMPGKGLEWMGHFSPGNTDIKYNDKFKGQATLSVDRSINTAYLQWSSLKASDTAIYFCKTSTFFFDYWGQGTRVTVSS

SEQ ID NO: 18378 - protein, 116 aa, Artificial Sequence
  source: /note="Description of Artificial Sequence: Synthetic polypeptide"
EVQLVQSGAEVKKPGESLKISCKISGYTFTDHAIHWVRQMPGKGLEWIGHFSPGNTDIKYNDKFKGQVTLSVDRSINTAYLQWSSLKASDTAIYFCKTSTFFFDYWGQGTRVTVSS

SEQ ID NO: 18379 - protein, 116 aa, Artificial Sequence
  source: /note="Description of Artificial Sequence: Synthetic polypeptide"
EVQLVQSGAEVKKPGESLKISCKISGYTFTDHAIHWVRQMPGKGLEWIGHFSPGNTDIKYNDKFKGQATFSVDRSINTAYLQWSSLKASDTAIYFCKTSTFFFDYWGQGTRVTVSS

SEQ ID NO: 18380 - protein, 116 aa, Artificial Sequence
  source: /note="Description of Artificial Sequence: Synthetic polypeptide"
EVQLVQSGAEVKKPGESLKISCKISGYTFTDHAIHWVRQMPGKGLEWIGHFSPGNTDIKYNDKFKGQATLSVDRSINTAYLQWSSLKASDTAIYFCATSTFFFDYWGQGTRVTVSS

SEQ ID NO: 18381 - protein, 116 aa, Artificial Sequence
  source: /note="Description of Artificial Sequence: Synthetic polypeptide"
EVQLVQSGAEVKKPGESLKISCKISGYTFTDHAIHWVRQMPGKGLEWIGHFSPGNTDIKYNDKFKGQATLSVDRSINTAYLQWSSLKASDTAIYFCKRSTFFFDYWGQGTRVTVSS

SEQ ID NO: 18382 - protein, 116 aa, Artificial Sequence
  source: /note="Description of Artificial Sequence: Synthetic polypeptide"
EVQLVQSGAEVKKPGESLKISCKISGYIFTDHAIHWVRQMPGKGLEWMGHFSPGNTDIKYNDKFKGQATLSVDRSINTAYLQWSSLKASDTAIYFCKTSTFFFDYWGQGTRVTVSS

SEQ ID NO: 18383 - protein, 116 aa, Artificial Sequence
  source: /note="Description of Artificial Sequence: Synthetic polypeptide"
EVQLVQSGAEVKKPGESLKISCKISGYIFTDHAIHWVRQMPGKGLEWMGHFSPGNTDIKYNDKFKGQVTLSVDRSINTAYLQWSSLKASDTAIYFCKTSTFFFDYWGQGTRVTVSS

SEQ ID NO: 18384 - protein, 116 aa, Artificial Sequence
  source: /note="Description of Artificial Sequence: Synthetic polypeptide"
EVQLVESGAEVKKPGASVEVSCQASGYTFTDHAIHWVRQAPGQGLEWMGHFSPGNTDIKYNDKFKGRVTMTRDTSINTAYMELRRLRSDDTAVYYCATSTFFFDYWGQGTMVTVSS

SEQ ID NO: 18385 - protein, 116 aa, Artificial Sequence
  source: /note="Description of Artificial Sequence: Synthetic polypeptide"
EVQLVESGAEVKKPGASVEVSCQASGYTFTDHAIHWVRQAPGQGLEWIGHFSPGNTDIKYNDKFKGRATLTVDRSINTAYMELRRLRSDDTAVYYCKTSTFFFDYWGQGTMVTVSS

SEQ ID NO: 18386 - protein, 116 aa, Artificial Sequence
  source: /note="Description of Artificial Sequence: Synthetic polypeptide"
EVQLVESGAEVKKPGASVEVSCQASGYTFTDHAIHWVRQAPGQGLEWMGHFSPGNTDIKYNDKFKGRATLTVDRSINTAYMELRRLRSDDTAVYYCKTSTFFFDYWGQGTMVTVSS

SEQ ID NO: 18387 - protein, 116 aa, Artificial Sequence
  source: /note="Description of Artificial Sequence: Synthetic polypeptide"
EVQLVESGAEVKKPGASVEVSCQASGYTFTDHAIHWVRQAPGQGLEWIGHFSPGNTDIKYNDKFKGRVTLTVDRSINTAYMELRRLRSDDTAVYYCKTSTFFFDYWGQGTMVTVSS

SEQ ID NO: 18388 - protein, 116 aa, Artificial Sequence
  source: /note="Description of Artificial Sequence: Synthetic polypeptide"
EVQLVESGAEVKKPGASVEVSCQASGYTFTDHAIHWVRQAPGQGLEWIGHFSPGNTDIKYNDKFKGRATMTVDRSINTAYMELRRLRSDDTAVYYCKTSTFFFDYWGQGTMVTVSS

SEQ ID NO: 18389 - protein, 116 aa, Artificial Sequence
  source: /note="Description of Artificial Sequence: Synthetic polypeptide"
EVQLVESGAEVKKPGASVEVSCQASGYTFTDHAIHWVRQAPGQGLEWIGHFSPGNTDIKYNDKFKGRATLTRDRSINTAYMELRRLRSDDTAVYYCKTSTFFFDYWGQGTMVTVSS

SEQ ID NO: 18390 - protein, 116 aa, Artificial Sequence
  source: /note="Description of Artificial Sequence: Synthetic polypeptide"
EVQLVESGAEVKKPGASVEVSCQASGYTFTDHAIHWVRQAPGQGLEWIGHFSPGNTDIKYNDKFKGRATLTVDTSINTAYMELRRLRSDDTAVYYCKTSTFFFDYWGQGTMVTVSS

SEQ ID NO: 18391 - protein, 116 aa, Artificial Sequence
  source: /note="Description of Artificial Sequence: Synthetic polypeptide"
EVQLVESGAEVKKPGASVEVSCQASGYTFTDHAIHWVRQAPGQGLEWIGHFSPGNTDIKYNDKFKGRATLTVDRSINTAYMELRRLRSDDTAVYYCATSTFFFDYWGQGTMVTVSS

SEQ ID NO: 18392 - protein, 116 aa, Artificial Sequence
  source: /note="Description of Artificial Sequence: Synthetic polypeptide"
EVQLVESGAEVKKPGASVEVSCQASGYTFTDHAIHWVRQAPGQGLEWMGHFSPGNTDIKYNDKFKGRVTMTVDRSINTAYMELRRLRSDDTAVYYCKTSTFFFDYWGQGTMVTVSS

SEQ ID NO: 18393 - protein, 116 aa, Artificial Sequence
  source: /note="Description of Artificial Sequence: Synthetic polypeptide"
EVQLVESGAEVKKPGASVEVSCQASGYTFTDHAIHWVRQAPGQGLEWMGHFSPGNTDIKYNDKFKGRATMTVDRSINTAYMELRRLRSDDTAVYYCKTSTFFFDYWGQGTMVTVSS

SEQ ID NO: 18394 - protein, 123 aa, Artificial Sequence
  source: /note="Description of Artificial Sequence: Synthetic polypeptide"
EIQLVQSGPELKQPGETVRISCKASGYTFTNYGMNWVKQAPGKGLKWMGWINTYTGEPTYAADFKRRFTFSLETSASTAYLQISNLKNDDTATYFCAKYPHYYGSSHWYFDVWGAGTTVTVSS

SEQ ID NO: 18395 - protein, 123 aa, Artificial Sequence [sequence omitted]

SEQ ID NO: 18396 - protein, 122 aa, Artificial Sequence
  source: /note="Description of Artificial Sequence: Synthetic polypeptide"
QVQLQQPGAELVKPGASVKLSCEASGYTFTSYWMHWVKQRPGQGLEWIGEINPYNGRPNYNEKFKNKATLTADKTSNTAYMQLSSLTSEDSAVYYCTRPSYYDYDGAWFAYWGQGTLVTVSA

SEQ ID NO: 18397 - protein, 117 aa, Artificial Sequence
  source: /note="Description of Artificial Sequence: Synthetic polypeptide"
QVQLKQSGPSLVQPSQSLSITCTVSGFSLTSYGVHWFRQSPGKGLEWLGVIWRGGNTDYNAAFMSRLSITKDNSKSQVFFKMNSLQPDDTAIYYCVKNYRFGGSAYWGQGTLVTVSA

SEQ ID NO: 18398 - protein, 117 aa, Artificial Sequence
  source: /note="Description of Artificial Sequence: Synthetic polypeptide"
EVQLLESGGGLVQPGGSLRLSCAASGFTFSPYAMTWVRQAPGKGLEWVSWIVSSGGYTVYADSVKGRFTISRDNSKNTLYLQMNSLRAEDTAVYYCARVDYGAFDIWGQGTMVTVSS

SEQ ID NO: 18399 - protein, 118 aa, Artificial Sequence
  source: /note="Description of Artificial Sequence: Synthetic polypeptide"
EVQLLESGGGLVQPGGSLRLSCAASGFTFSHYKMDWVRQAPGKGLEWVSYIGPSGGVTYYADSVKGRFTISRDNSKNTLYLQMNSLRAEDTAVYYCARFSGYNSLDYWGQGTLVTVSS

SEQ ID NO: 18400 - protein, 122 aa, Artificial Sequence
  source: /note="Description of Artificial Sequence: Synthetic polypeptide"
EVQLLESGGGLVQPGGSLRLSCAASGFTFSGYYMSWVRQAPGKGLEWVSGIYSSGGTTHYADSVKGRFTISRDNSKNTLYLQMNSLRAEDTAVYYCAKGSGYYHYYYGMDVWGQGTTVTVSS

SEQ ID NO: 18401 - protein, 122 aa, Artificial Sequence
  source: /note="Description of Artificial Sequence: Synthetic polypeptide"
EVQLLESGGGLVQPGGSLRLSCAASGFTFSEYTMSWVRQAPGKGLEWVSRIYSSGGHTEYADSVKGRFTISRDNSKNTLYLQMNSLRAEDTAVYYCAKGSGYYHYYYGMDVWGQGTTVTVSS

SEQ ID NO: 18402 - protein, 152 aa, Mus musculus
MAVLGLLFCLVTFPSCVLSQVQVKESGPFLVPPSQSLSITCTVSGFSLTTYGVSWIRQPPGKGLEWLGAIWGDGTTNYHSALISRLSISKDNSKSQVFLKLNSLQTDDTATYYCAKLGNYDALDYWGQGTSVTVSSAKTTPPPVYPLVPGSL

SEQ ID NO: 18403 - protein, 118 aa, Artificial Sequence
  source: /note="Description of Artificial Sequence: Synthetic polypeptide"
QIQLVQSGPELKKPGETVKISCKASGYTFTEYPIHWVKQAPGKGFKWMGMIYTDIGKPTYAEEFKGRFAFSLETSASTAYLQINNLKNEDTATYFCVRDRYDSLFDYWGQGTTLTVSS

SEQ ID NO: 18404 - protein, 121 aa, Artificial Sequence
  source: /note="Description of Artificial Sequence: Synthetic polypeptide"
EMQLVESGGGFVKPGGSLKLSCAASGFAFSHYDMSWVRQTPKQRLEWVAYIASGGDITYYADTVKGRFTISRDNAQNTLYLQMSSLKSEDTAMFYCSRSSYGNNGDALDFWGQGTSVTVSS

SEQ ID NO: 18405 - protein, 116 aa, Mus musculus; identical to SEQ ID NO: 12482

SEQ ID NO: 18406 - protein, 116 aa, Mus musculus; identical to SEQ ID NO: 12483

SEQ ID NO: 18407 - protein, 116 aa, Mus musculus; identical to SEQ ID NO: 13238

SEQ ID NO: 18408 - protein, 120 aa, Artificial Sequence
  source: /note="Description of Artificial Sequence: Synthetic polypeptide"
QVQLVESGAEVKKPGASVKVSCKASGYTFTSYAIHWVRQAPGQRLEWMGWINAGNGYRKYSQKFQGRVTVTRDTSASTAYMELSSLRSEDTAVYYCARFEGGMVTAMDFWGQGTLVTVSS

SEQ ID NO: 18409 - protein, 119 aa, Artificial Sequence
  source: /note="Description of Artificial Sequence: Synthetic polypeptide"
QVQLVESGPGVVQPGRSLRISCAVSGFSVTNYGVHWVRQPPGKGLEWLGVIWAGGITNYNSAFMSRLTISKDNSKNTVYLQMNSLRAEDTAMYYCASRGGHYGYALDYWGQGTLVTVSS

SEQ ID NO: 18410 - protein, 118 aa, Artificial Sequence
  source: /note="Description of Artificial Sequence: Synthetic polypeptide"
QVQLQESGPGLVKPSQTLSITCTVSGFSLASYNIHWVRQPPGKGLEWLGVIWAGGSTNYNSALMSRLTISKDNSKNQVFLKMSSLTAADTAVYYCAKRSDDYSWFAYWGQGTLVTVSS

SEQ ID NO: 18411 - protein, 120 aa, Artificial Sequence
  source: /note="Description of Artificial Sequence: Synthetic polypeptide"
EVQLLESGAEVKKPGASVKVSCKASGYTFTSYAIHWVRQAPGQRLEWMGWINAGNGYRKYSQKFQGRVTVTRDTSASTAYMELSSLRSEDTAVYYCARFEGGMVTAMDYWGQGTLVTVSS

SEQ ID NO: 18412 - protein, 119 aa, Artificial Sequence
  source: /note="Description of Artificial Sequence: Synthetic polypeptide"
QVQLVESGAEVKKPGASVKMSCRASGYTFTRYYMHWVRQAPGQGLEWMGIINPSAGSTSYAQKFQDRVTMTRDTSRSTVYMELSSLRSEDTAVYYCARRVVVGGPFDFWGQGTLVTVSS

SEQ ID NO: 18413 - protein, 119 aa, Artificial Sequence
  source: /note="Description of Artificial Sequence: Synthetic polypeptide"
QVQLVESGAEVKKPGASVRVSCKASGYRFISYYMHWVRQAPGQGLEWMGIINPSGGSTSYAQKFQGRVTMTRDTSTSTIYMELSSLRSEDTAVYYCARRNIVTGPFDYWGQGTLVTVSS

SEQ ID NO: 18414 - protein, 119 aa, Artificial Sequence
  source: /note="Description of Artificial Sequence: Synthetic polypeptide"
QVQLVESGAEVKKPGASVKVSCKASGYTFARYYMHWVRQAPGQGPEWMGIINPSGGSTSYAQKFQGRVTVTRDTSTSTVYMELSSLRSEDTAVYYCARRVVLGGPFDYWGQGTLVTVSS

SEQ ID NO: 18415 - protein, 119 aa, Artificial Sequence
  source: /note="Description of Artificial Sequence: Synthetic polypeptide"
EVQLLESGAEVKKPGASVKVSCKASGYTFTRYYMHWVRQAPGQGLEWMGIINPSSGSTSYAQKFQGRVTMTRDTSTSTVYMELSSLRSEDMAVYYCARRVVVGGPFDYWGQGTLVTVSS

SEQ ID NO: 18416 - protein, 120 aa, Artificial Sequence
  source: /note="Description of Artificial Sequence: Synthetic polypeptide"
EVQLLESGAEVKKPGASVKVSCKASGYIFSRYAIHWVRQAPGQGLEWMGWINPFNGFTKYSQKFQGRVALTRDRSATTGYMELSSLTSEDTAVYYCARLESNKFYAFDIWGQGTMVTVSS

SEQ ID NO: 18417 - protein, 120 aa, Artificial Sequence
  source: /note="Description of Artificial Sequence: Synthetic polypeptide"
QVQLLESGAEVKKPGASVKVSCKASGYTFTSYAMHWVRQAPGQRLEWMGWINAGNGNTIYSQKFQARVTITRDTSASTAYMELSSLRSEDTAVYYCARWVGGVASYFDYWGQGTLVTVSS

SEQ ID NO: 18418 - protein, 121 aa, Artificial Sequence
  source: /note="Description of Artificial Sequence: Synthetic polypeptide"
QVQLLESGAEVKKPGASVKVSCEASGYTFTSSDINWVRQATGQGLEWMGWMNPNSGNTGYAQKFQGRVTMTRNTSISTAYMELSSLRSEDTAVYYCARERPRRRGGGFDIWGQGTMVTVSS

SEQ ID NO: 18419 - protein, 121 aa, Artificial Sequence
  source: /note="Description of Artificial Sequence: Synthetic polypeptide"
QVQLQQSGAEVKKPGASVKVSCEASGYTFTSSDINWVRQATGQGLEWMGWMNPKSGNTGYAQKFQGRVTMTRNTSISTAYMELSSLRSEDTAVYYCARERPRRRGGGFDIWGQGTMVTVSS

SEQ ID NO: 18420 - protein, 119 aa, Artificial Sequence
  source: /note="Description of Artificial Sequence: Synthetic polypeptide"
QVQLVESGAEVKKPGASVKVSCKASGYTFTNYYMHWVRQAPGQGLEWMGIINPSRGSTSYAQKFQGRVTMTRDTSTSTVYMELSSLRSEDTAVYYCARRQMATGPFDYWGQGTLVTVSS

SEQ ID NO: 18421 - protein, 120 aa, Homo sapiens
QVQLVESGGGVVQPGRSLRLSCAASGFTFSNFGMHWVRQAPGKGLEWVAYISSGGSSINYADTVKGRFTISRDNSKNTLYLQMNSLRAEDTAVYYCTRGGTGTRSLYYFDYWGQGTTVTV

SEQ ID NO: 18422 - protein, 120 aa, Homo sapiens
DVQLVESGGGLVQPGGSRKLSCAASGFTFSNFGMHWVRQAPEKGLEWVAYISSGGSSINYADTVKGRFTISRDNPKNTLFLQMTSLRSEDTAIYYCTRGGTGTRSLYYFDYWGQGATLIV

SEQ ID NO: 18423 - protein, 122 aa, Homo sapiens
QVQLVESGGGVVQPGRSLRLSCAASGFTFSNFGMHWVRQAPGKGLEWVAYISSGGSSINYADTVKGRFTISRDNSKNTLYLQMNSLRAEDTAVYYCTRGGTGTRSLYYFDYWGQGTTVTVSS

SEQ ID NO: 18424 - protein, 122 aa, Homo sapiens
DVQLVESGGGLVQPGGSRKLSCAASGFTFSNFGMHWVRQAPEKGLEWVAYISSGGSSINYADTVKGRFTISRDNPKNTLFLQMTSLRSEDTAIYYCTRGGTGTRSLYYFDYWGQGATLIVSS

SEQ ID NO: 18425 - protein, 126 aa, Artificial Sequence
  source: /note="Description of Artificial Sequence: Synthetic polypeptide"
QVQLVQSGAEMKKPGASVKVSCKASGYTFSSFAMHWVRQAPGQRLEWMGWINAGNGNTKYSQKFQGRLTITRDTSASTAYMDLSSLRSEDTAVYYCARNLNYYDILTGLDAFDIWGQGTMVTVSSG

SEQ ID NO: 18426 - protein, 118 aa, Artificial Sequence
  source: /note="Description of Artificial Sequence: Synthetic polypeptide"
QVQLQQSGGGLVKPGGSLTLSCAASRFTFSTYAMSWVRQTPAKRLEWVAYISSGGASTYYRDSVKGRFTISRDNAKNTLYLQMSSLRSEDTAMYYCARGGSRYAMDYWGQGTTVTVSS

SEQ ID NO: 18427 - protein, 121 aa, Artificial Sequence
  source: /note="Description of Artificial Sequence: Synthetic polypeptide"
EVVVVESGGGFVKPGGSLKLSCAAAGFTFSRYAMSWVRQTPEKRLEWVATISSGGSHTYYPDSVKGRFTISRDNAKNTLYLQMSSLRSEDTAIYYCARPGYDRGAWFFDVWGAGTTVTVSS

SEQ ID NO: 18428 - protein, 137 aa, Artificial Sequence
  source: /note="Description of Artificial Sequence: Synthetic polypeptide"
MGWSWIFLFLLSGTAGVLSEVQLQQSGPELVKPGASVKISCKASGYTFTDYNMDWVKQSHGKSLEWIGYIYPNNGGTGYNQKFKSKATLTVDKSSSTAYMELHSLTSEDSAVYYCARAGRYYYAWDWGQGTLVTVSA

SEQ ID NO: 18429 - protein, 144 aa, Artificial Sequence
  source: /note="Description of Artificial Sequence: Synthetic polypeptide"
MGWSWIFLFLLSGTAGVLSQVQLQESGPGLVRPSQTLSLTCTVSGFTFSDYNMDWVRQPPGRGLEWIGYIYPNNGGTGYNQKFKSRVTMLVDTSKNQFSLRLSSVTAADTAVYYCARYGHYYGYMFAYWGQGTTVTVSSASTKG

SEQ ID NO: 18430 - protein, 137 aa, Homo sapiens; identical to SEQ ID NO: 7206

SEQ ID NO: 18431 - protein, 137 aa, Homo sapiens; identical to SEQ ID NO: 7207

SEQ ID NO: 18432 - protein, 119 aa, Artificial Sequence; identical to SEQ ID NO: 14575
  source: /note="Description of Artificial Sequence: Synthetic polypeptide"

SEQ ID NO: 18433 - protein, 118 aa, Artificial Sequence; identical to SEQ ID NO: 13244
  source: /note="Description of Artificial Sequence: Synthetic polypeptide"

SEQ ID NO: 18434 - protein, 125 aa, Artificial Sequence [sequence omitted]

SEQ ID NO: 18435 - protein, 130 aa, Artificial Sequence; identical to SEQ ID NO: 14417
  source: /note="Description of Artificial Sequence: Synthetic polypeptide"

SEQ ID NO: 18436 - protein, 119 aa, Artificial Sequence
  source: /note="Description of Artificial Sequence: Synthetic polypeptide"
QVQLQESGPGLVKPSGTLSLTCAVSGGSISSSNWWSWVRQPPGKGLEWIGEIYHSGSTNYNPSLKSRVTISVDKSKNQFSLKLSSVTAADTAVYYCARWTGRTDAFDIWGQGTWVTVSS

SEQ ID NO: 18437 - protein, 117 aa, Artificial Sequence; identical to SEQ ID NO: 12739
  source: /note="Description of Artificial Sequence: Synthetic polypeptide"

SEQ ID NO: 18438 - protein, 106 aa, Artificial Sequence
  source: /note="Description of Artificial Sequence: Synthetic polypeptide"
GLVKPSQTLSLTCAISGDSVSSKSVAWNWIRQSPLRGLEWLGRTYYRSKWYNEYAVSVKSRITINPDTSKNQFSLHLNSVTPEDTAVYYCARNFDYWGQGTLVTVS

SEQ ID NO: 18439 - protein, 137 aa, Mus musculus
MKLWLNWIFLVTLLNGFQCEVKLVESGGGLVLPGDSLRLSCATSEFTFTDYYMTWVRQPPRKALEWLGFIRNRANGYTTEYNPSVKGRFTISRDNSQILYLQMNTLRTEDSATYYCARVSNWAFDYWGQTTLTVSSA

SEQ ID NO: 18440 - protein, 119 aa, Artificial Sequence
  source: /note="Description of Artificial Sequence: Synthetic polypeptide"
EVKLVESGGGLVLPGDSLRLSCATSEFTFTDYYMTWVRQPPRKALEWLGFIRNRANGYTTEYNPSVKGRFTISRDNSQSILYLQMNTLRTEDSATYYCARVSNWAFDYWGQGTTLTVSS

SEQ ID NO: 18441 - protein, 122 aa, Artificial Sequence
  source: /note="Description of Artificial Sequence: Synthetic polypeptide"
  MOD_RES (1)..(1): Any amino acid
  MOD_RES (6)..(6): Any amino acid
  MOD_RES (16)..(16): Any amino acid
  MOD_RES (49)..(49): Any amino acid
  MOD_RES (54)..(54): Any amino acid
  MOD_RES (58)..(58): Any amino acid
  MOD_RES (102)..(103): Any amino acid
  MOD_RES (106)..(107): Any amino acid
XVQLVXSGGGLVQPGXSLRLSCAASGFTFDDYAMHWVRQAPGKGLEWVXGISWXSGSXGYADSVKGRFTISRDNAKNSLYLQMNSLRAEDTALYYCARDLGXXQWXXGFDYWGQGTLVTVSS

SEQ ID NO: 18442 - protein, 119 aa, Mus musculus
QVQLQQSGAELVRPGTSVKMSCKAAGYTFTNYWIVWVKQRPGHGLEWIGDIYPGSGHTNYNEKFKGKATLTADTSSSTANMQLSSLTSEDSAIYYCVRPINYDGSYDYWGQGTTLTVSS

SEQ ID NO: 18443 - protein, 465 aa, Mus musculus; identical to SEQ ID NO: 12485

SEQ ID NO: 18444 - protein, 249 aa, Artificial Sequence; identical to SEQ ID NO: 13979
  source: /note="Description of Artificial Sequence: Synthetic polypeptide"

SEQ ID NO: 18445 - protein, 249 aa, Artificial Sequence; identical to SEQ ID NO: 13978
  source: /note="Description of Artificial Sequence: Synthetic polypeptide"

SEQ ID NO: 18446 - protein, 458 aa, Artificial Sequence; identical to SEQ ID NO: 17559
  source: /note="Description of Artificial Sequence: Synthetic polypeptide"

SEQ ID NO: 18447 - protein, 458 aa, Artificial Sequence; identical to SEQ ID NO: 17560
  source: /note="Description of Artificial Sequence: Synthetic polypeptide"

SEQ ID NO: 18448 - protein, 439 aa, Artificial Sequence; identical to SEQ ID NO: 17563
  source: /note="Description of Artificial Sequence: Synthetic polypeptide"

SEQ ID NO: 18449 - protein, 439 aa, Artificial Sequence; identical to SEQ ID NO: 17561
  source: /note="Description of Artificial Sequence: Synthetic polypeptide"

SEQ ID NO: 18450 - protein, 439 aa, Artificial Sequence; identical to SEQ ID NO: 17562
  source: /note="Description of Artificial Sequence: Synthetic polypeptide"

SEQ ID NO: 18451 - protein, 118 aa, Artificial Sequence
  source: /note="Description of Artificial Sequence: Synthetic polypeptide"
  MOD_RES (64)..(64): Any amino acid
EVQLLESGGGLVQPGGSLRLSCAASGFTFSYYYMQWVRQAPGKGLEWVSYIGSSGGVTNYADSXKGRFTISRDNSKNTLYLQMNSLRAEDTAVYYCARVGLGDAFDIWGQGTMVTVSS

SEQ ID NO: 18452 - protein, 118 aa, Artificial Sequence
  source: /note="Description of Artificial Sequence: Synthetic polypeptide"
  MOD_RES (31)..(31): Any amino acid
EVQLLESGGGLVQPGGSLRLSCAASGFTFSXYYMQWVRQAPGKGLEWVSYIGSSGGVTNYADSVKGRFTISRDNSKNTLYLQMNSLRAEDTAVYYCARVGLGDAFDIWGQGTMVTVSS

SEQ ID NO: 18453 - protein, 232 aa, Homo sapiens
EPKSCDKTHTCPPCPAPELLGGPSVFLFPPKPKDTLMISRTPEVTCVVVDVSHEDPEVKFNWYVDGVEVHNAKTKPREEQYNSTYRVVSVLTVLHQDWLNGKEYKCKVSNKALPAPIEKTISKAKGQPREPQVYTLPPSREEMTKNQVSLTCLVKGFYPSDIAVEWESNGQPENNYKTTPPVLDSDGSFFLYSKLTVDKSRWQQGNVFSCSVMHEALHNHYTQKSLSLSPGK

SEQ ID NO: 18454 - protein, 12 aa, Homo sapiens
ERKCCVECPPCP

SEQ ID NO: 18455 - protein, 106 aa, Homo sapiens; identical to SEQ ID NO: 4042

SEQ ID NO: 18456 - protein, 331 aa, Homo sapiens
SASTKGPSVFPLAPSSKSTSGGTAALGCLVKDYFPEPVTVSWNSGALTSGVHTFPAVLQSSGLYSLSSVVTVPSSSLGTQTYICNVNHKPSNTKVDKRVEPKSCDKTHTCPPCPAPELLGGPSVFLFPPKPKDTLMISRTPEVTCVVVDVSHEDPEVKFNWYVDGVEVHNAKTKPREEQYNSTYRVVSVLTVLHQDWLNGKEYKCKVSNKALPAPIEKTISKAKGQPREPQVYTLPPSREEMTKNQVSLTCLVKGFYPSDIAVEWESNGQPENNYKTTPPVLDSDGSFFLYSKLTVDKSRWQQGNVFSCSVMHEALHNHYTQKSLSLSPGK

SEQ ID NO: 18457 - protein, 40 aa, Homo sapiens
GGGSIKQIEDKIEEILSKIYHIENEIARIKKLIGERGHDI

SEQ ID NO: 18458 - protein, 214 aa, Artificial Sequence
  source: /note="Description of Artificial Sequence: Synthetic polypeptide"
DIQMTQSPSSLSASTGDRVTITCRASQGISSYLAWYQQKPGKAPKLLIYARSTRQSGVPSRFSGSGSGTDFTLTISSLQPEDFATYYCQQYWRWPLTFGGGTKVEIKRTVAAPSVFIFPPSDEQLKSGTASVVCLLNNFYPREAKVQWKVDNALQSGNSQESVTEQDSKDSTYSLSSTLTLSKADYEKHKVYACEVTHQGLSSPVTKSFNRGEC

SEQ ID NO: 18459 - protein, 214 aa, Artificial Sequence
  source: /note="Description of Artificial Sequence: Synthetic polypeptide"
DIQMTQSPSSLSASTGDRVTITCRASQGISSYLAWYQQKPGKAPKLLIYAKSTLQSGVPSRFSGSGSGTDFTLTISSLQPEDFATYYCQQYWTFPLTFGGGTKVEIKRTVAAPSVFIFPPSDEQLKSGTASVVCLLNNFYPREAKVQWKVDNALQSGNSQESVTEQDSKDSTYSLSSTLTLSKADYEKHKVYACEVTHQGLSSPVTKSFNRGEC

SEQ ID NO: 18460 - protein, 214 aa, Artificial Sequence
  source: /note="Description of Artificial Sequence: Synthetic polypeptide"
DIQMTQSPSSLSASTGDRVTITCRASQGISSYLAWYQQKPGKAPKLLIYAASTLQSGVPSRFSGSGSGTDFTLTISSLQPEDFATYYCQQYFTFPLTFGGGTKVEIKRTVAAPSVFIFPPSDEQLKSGTASVVCLLNNFYPREAKVQWKVDNALQSGNSQESVTEQDSKDSTYSLSSTLTLSKADYEKHKVYACEVTHQGLSSPVTKSFNRGEC

SEQ ID NO: 18461 - protein, 214 aa, Artificial Sequence
  source: /note="Description of Artificial Sequence: Synthetic polypeptide"
DIQMTQSPSSLSASLGDRVTITCRASQGISSYLAWYQQKPGKAPKLLIYAKSTLQSGVPSRFSGSGSGTDFTLTISSLQPEDSATYYCQQYWTFPLTFGGGTKVEIKRTVAAPSVFIFPPSDEQLKSGTASVVCLLNNFYPREAKVQWKVDNALQSGNSQESVTEQDSKDSTYSLSSTLTLSKADYEKHKVYACEVTHQGLSSPVTKSFNRGEC

SEQ ID NO: 18462 - protein, 214 aa, Artificial Sequence
  source: /note="Description of Artificial Sequence: Synthetic polypeptide"
DIQMTQSPSSLSASLGDRVTITCRASQGISSYLAWYQQKPGKAPKLLIYASSTRQSGVPSRFSGSGSGTDFTLTISSLQPEDSGTYYCQQYWAFPLTFGGGTKVEIKRTVAAPSVFIFPPSDEQLKSGTASVVCLLNNFYPREAKVQWKVDNALQSGNSQESVTEQDSKDSTYSLSSTLTLSKADYEKHKVYACEVTHQGLSSPVTKSFNRGEC

SEQ ID NO: 18463 - protein, 214 aa, Artificial Sequence
  source: /note="Description of Artificial Sequence: Synthetic polypeptide"
DIQLTQSPSSLSASLGDRVTITCRASQGISSYLAWYQQKPGKAPKLLIYARSTRQSGVPSRFSGSGSGTEFTLTISSLQPEDSATYYCQQYWTWPLTFGGGTKVEIKRTVAAPSVFIFPPSDEQLKSGTASVVCLLNNFYPREAKVQWKVDNALQSGNSQESVTEQDSKDSTYSLSSTLTLSKADYEKHKVYACEVTHQGLSSPVTKSFNRGEC

SEQ ID NO: 18464 - protein, 214 aa, Artificial Sequence
  source: /note="Description of Artificial Sequence: Synthetic polypeptide"
SSELTQDPAVSVALGQTVRITCQGDSLRSYYASWYQQKPGQAPVLVIYGKNNRPSGIPDRFSGSSSGNTASLTITGAQAEDEADYYCESRDSPGNQWVFGGGTKVTVLGQPKAAPSVTLFPPSSEELQANKATLVCLVSDFYPGAVTVAWKADGSPVKVGVETTKPSKQSNNKYAASSYLSLTPEQWKSHRSYSCRVTHEGSTVEKTVAPAECS

SEQ ID NO: 18465 - protein, 214 aa, Artificial Sequence
  source: /note="Description of Artificial Sequence: Synthetic polypeptide"
SSELTQDPAVSVALGQTVRITCQGDSLRSYYASWYQQKPGQAPVLVIYGKNNRPSGIPDRFSGSSSGNTASLTITGAQAEDEADYYCNSRDTPGDQWVFGGGTKVTVLGQPKAAPSVTLFPPSSEELQANKATLVCLVSDFYPGAVTVAWKADGSPVKVGVETTKPSKQSNNKYAASSYLSLTPEQWKSHRSYSCRVTHEGSTVEKTVAPAECS

SEQ ID NO: 18466 - protein, 214 aa, Artificial Sequence
  source: /note="Description of Artificial Sequence: Synthetic polypeptide"
SSELTQDPAVSVALGQTVRITCQGDSLRSYYASWYQQKPGQAPVLVIYGKNNRPSGIPDRFSGSSSGNTASLTITGAQAEDEADYYCNSRDTPGNKWVFGGGTKVTVIGQPKAAPSVTLFPPSSEELQANKATLVCLVSDFYPGAVTVAWKADGSPVKVGVETTKPSKQSNNKYAASSYLSLTPEQWKSHRSYSCRVTHEGSTVEKTVAPAECS

SEQ ID NO: 18467 - protein, 214 aa, Artificial Sequence
  source: /note="Description of Artificial Sequence: Synthetic polypeptide"
SSELTQDPAVSVALGQTVRITCQGDSLRSYYASWYQQKPGQAPVLVIYGKNNRPSGIPDRFSGSSSGNTASLTITGAQAEDEADYYCNSRDVPGDQWVFGGGTKVTVLGQPKAAPSVTLFPPSSEELQANKATLVCLVSDFYPGAVTVAWKADGSPVKVGVETTKPSKQSNNKYAASSYLSLTPEQWKSHRSYSCRVTHEGSTVEKTVAPAECS

SEQ ID NO: 18468 - protein, 214 aa, Artificial Sequence
  source: /note="Description of Artificial Sequence: Synthetic polypeptide"
SSELTQDPAVSVALGQTVRITCQGDSLRSYYASWYQQKPGQAPVLVIYGKNNRPSGIPDRFSGSSSGNTASLTITGAQAEDEADYYCNSRDWPGNQWVFGGGTKVTVLGQPKAAPSVTLFPPSSEELQANKATLVCLVSDFYPGAVTVAWKADGSPVKVGVETTKPSKQSNNKYAASSYLSLTPEQWKSHRSYSCRVTHEGSTVEKTVAPAECS

SEQ ID NO: 18469 - protein, 107 aa, Mus musculus
DIQMNQSPSSLSASLGDTITITCHASQNINVWLSWYQQKPGNIPKLLIYKASNLHTGVPSRFSGSGSGTGFTLTISSLQPEDIATYYCQQGQSYPRTFGGGTKLEIR

SEQ ID NO: 18470 - protein, 219 aa, Artificial Sequence
  source: /note="Description of Artificial Sequence: Synthetic polypeptide"
DVVVTQTPLSLPVSFGDQVSISCRSSQSLANSYGNTYLSWYLHKPGQSPQLLIYGISNRFSGVPDRFSGSGSGTDFTLKISTIKPEDLGMYYCLQGTHQPYTFGGGTKLEIKRTVAAPSVFIFPPSDEQLKSGTASVVCLLNNFYPREAKVQWKVDNALQSGNSQESVTEQDSKDSTYSLSSTLTLSKADYEKHKVYACEVTHQGLSSPVTKSFNRGEC

SEQ ID NO: 18471 - protein, 214 aa, Artificial Sequence
  source: /note="Description of Artificial Sequence: Synthetic polypeptide"
DIQMTQSPSSLSASVGDRVTITCRASKTISKYLAWYQQKPGKAPKLLIYSGSTLQSGVPSRFSGSGSGTDFTLTISSLQPEDFATYYCQQHNEYPLTFGQGTKVEIKRTVAAPSVFIFPPSDEQLKSGTASVVCLLNNFYPREAKVQWKVDNALQSGNSQESVTEQDSKDSTYSLSSTLTLSKADYEKHKVYACEVTHQGLSSPVTKSFNRGEC

SEQ ID NO: 18472 - protein, 219 aa, Artificial Sequence
  source: /note="Description of Artificial Sequence: Synthetic polypeptide"
DAVMTQTPLSLPVSLGDQASISCRSSQSLENSNGNTYLNWYLQKPGQSPQLLIYRVSKRFSGVLDRFSGSGSGTDFTLKISRVEAEDLGVYFCLQLTHVPYTFGGGTKLEIKRTVAAPSVFIFPPSDEQLKSGTASVVCLLNNFYPREAKVQWKVDNALQSGNSQESVTEQDSKDSTYSLSSTLTLSKADYEKHKVYACEVTHQGLSSPVTKSFNRGEC

SEQ ID NO: 18473 - protein, 219 aa, Artificial Sequence
  source: /note="Description of Artificial Sequence: Synthetic polypeptide"
DIVMTQTPLSLSVTPGQPASISCKSSQSLENPNGNTYLNWYLQKPGQSPQLLIYRVSKRFSGVPDRFSGSGSGTDFTLKISRVEAEDVGVYYCLQLTHVPYTFGQGTKLEIKRTVAAPSVFIFPPSDEQLKSGTASVVCLLNNFYPREAKVQWKVDNALQSGNSQESVTEQDSKDSTYSLSSTLTLSKADYEKHKVYACEVTHQGLSSPVTKSFNRGEC

SEQ ID NO: 18474 - protein, 219 aa, Artificial Sequence
  source: /note="Description of Artificial Sequence: Synthetic polypeptide"
  MOD_RES (107)..(107): Any amino acid
DIVMTQTPLSLSVTPGQPASISCKSSQSLETSTGNTYLNWYLQKPGQSPQLLIYRVSKRFSGVPDRFSGSGSGTDFTLKISRVEAEDVGVYYCLQLTHVPYTFGQGXKLEIKRTVAAPSVFIFPPSDEQLKSGTASVVCLLNNFYPREAKVQWKVDNALQSGNSQESVTEQDSKDSTYSLSSTLTLSKADYEKHKVYACEVTHQGLSSPVTKSFNRGEC

SEQ ID NO: 18475 - protein, 219 aa, Artificial Sequence
  source: /note="Description of Artificial Sequence: Synthetic polypeptide"
DIVMTQTPLSLSVTPGQPASISCKSSQSLETSTGTTYLNWYLQKPGQSPQLLIYRVSKRFSGVPDRFSGSGSGTDFTLKISRVEAEDVGVYYCLQLLEDPYTFGQGTKLEIKRTVAAPSVFIFPPSDEQLKSGTASVVCLLNNFYPREAKVQWKVDNALQSGNSQESVTEQDSKDSTYSLSSTLTLSKADYEKHKVYACEVTHQGLSSPVTKSFNRGEC

SEQ ID NO: 18476 - protein, 219 aa, Artificial Sequence
  source: /note="Description of Artificial Sequence: Synthetic polypeptide"
DIVMTQTPLSLSVTPGQPASISCKSSQSLETSTGNTYLNWYLQKPGQSPQLLIYRVSKRFSGVPDRFSGSGSGTDFTLKISRVEAEDVGVYYCLQPGHYPGTFGQGTKLEIKRTVAAPSVFIFPPSDEQLKSGTASVVCLLNNFYPREAKVQWKVDNALQSGNSQESVTEQDSKDSTYSLSSTLTLSKADYEKHKVYACEVTHQGLSSPVTKSFNRGEC

SEQ ID NO: 18477 - protein, 219 aa, Artificial Sequence
  source: /note="Description of Artificial Sequence: Synthetic polypeptide"
DIVMTQTPLSLSVTPGQPASISCKSSQSLETSTGNTYLNWYLQKPGQSPQLLIYRVSKRFSGVPDRFSGSGSGTDFTLKISRVEAEDVGVYYCLQLDSYPNTFGQGTKLEIKRTVAAPSVFIFPPSDEQLKSGTASVVCLLNNFYPREAKVQWKVDNALQSGNSQESVTEQDSKDSTYSLSSTLTLSKADYEKHKVYACEVTHQGLSSPVTKSFNRGEC

SEQ ID NO: 18478 - protein, 219 aa, Artificial Sequence
  source: /note="Description of Artificial Sequence: Synthetic polypeptide"
DIVMTQTPLSLSVTPGQPASISCKSSQSLETSTGNTYLNWYLQKPGQSPQLLIYRVSKRFSGVPDRFSGSGSGTDFTLKISRVEAEDVGVYYCLQLTHEPYTFGQGTKLEIKRTVAAPSVFIFPPSDEQLKSGTASVVCLLNNFYPREAKVQWKVDNALQSGNSQESVTEQDSKDSTYSLSSTLTLSKADYEKHKVYACEVTHQGLSSPVTKSFNRGEC

SEQ ID NO: 18479 - protein, 219 aa, Artificial Sequence
  source: /note="Description of Artificial Sequence: Synthetic polypeptide"
DIVMTQTPLSLSVTPGQPASISCKSSQSLESSTGNTYLNWYLQKPGQSPQLLIYRVSKRFSGVPDRFSGSGSGTDFTLKISRVEAEDVGVYYCLQLIDYPVTFGQGTKLEIKRTVAAPSVFIFPPSDEQLKSGTASVVCLLNNFYPREAKVQWKVDNALQSGNSQESVTEQDSKDSTYSLSSTLTLSKADYEKHKVYACEVTHQGLSSPVTKSFNRGEC

SEQ ID NO: 18480 - protein, 219 aa, Artificial Sequence
  source: /note="Description of Artificial Sequence: Synthetic polypeptide"
DIVMTQTPLSLSVTPGQPASISCKSSQSLETSTGNTYLNWYLQKPGQSPQLLIYRVSKRFSGVPDRFSGSGSGTDFTLKISRVEAEDVGVYYCLQATHIPYTFGQGTKLEIKRTVAAPSVFIFPPSDEQLKSGTASVVCLLNNFYPREAKVQWKVDNALQSGNSQESVTEQDSKDSTYSLSSTLTLSKADYEKHKVYACEVTHQGLSSPVTKSFNRGEC

SEQ ID NO: 18481 - protein, 213 aa, Artificial Sequence; identical to SEQ ID NO: 9449
  source: /note="Description of Artificial Sequence: Synthetic polypeptide"

SEQ ID NO: 18482 - protein, 213 aa, Artificial Sequence; identical to SEQ ID NO: 9883
  source: /note="Description of Artificial Sequence: Synthetic polypeptide"

SEQ ID NO: 18483 - protein, 106 aa, Artificial Sequence
  source: /note="Description of Artificial Sequence: Synthetic polypeptide"
DIVLTQSPAIMSASPGEKVTMTCSASSSVSYMNWYQQKSGTSPKRWIYDTSKLASGVPAHFRGSGSGTSYSLTISGMEAEDAATYYCQQWSSNPFTFGSGTKLEIN

SEQ ID NO: 18484 - protein, 107 aa, Artificial Sequence [sequence omitted]

SEQ ID NO: 18485 - protein, 215 aa, Artificial Sequence
  source: /note="Description of Artificial Sequence: Synthetic polypeptide"
QAVVTQEPSLTVSPGGTVTLTCGSSTGAVTTSNYANWVQEKPGQAFRGLIGGTNKRAPGTPARFSGSLLGGKAALTLSGAQPEDEAEYYCALWYSNLWVFGGGTKLTVLGQPKAAPSVTLFPPSSEELQANKATLVCLISDFYPGAVTVAWKADSSPVKAGVETTTPSKQSNNKYAASSYLSLTPEQWKSHRSYSCQVTHEGSTVEKTVAPTECS

SEQ ID NO: 18486 - protein, 218 aa, Artificial Sequence
  source: /note="Description of Artificial Sequence: Synthetic polypeptide"
DIQLTQSPSTLSASVGDRVTITCRASESLDNYGIRFLTWFQQKPGKAPKLLMYAASNQGSGVPSRFSGSGSGTEFTLTISSLQPDDFATYYCQQTKEVPWSFGQGTKVEVKRTVAAPSVFIFPPSDEQLKSGTASVVCLLNNFYPREAKVQWKVDNALQSGNSQESVTEQDSKDSTYSLSSTLTLSKADYEKHKVYACEVTHQGLSSPVTKSFNRGEC

SEQ ID NO: 18487 - protein, 215 aa, Artificial Sequence
  source: /note="Description of Artificial Sequence: Synthetic polypeptide"
DIQMTQSPSSLSASVGDRVTITCKASAAVGTYVAWYQQKPGKAPKLLIYSASYRKRGVPSRFSGSGSGTDFTLTISSLQPEDFATYYCHQYYTYPLFTFGQGTKLEIKRTVAAPSVFIFPPSDEQLKSGTASVVCLLNNFYPREAKVQWKVDNALQSGNSQESVTEQDSKDSTYSLSSTLTLSKADYEKHKVYACEVTHQGLSSPVTKSFNRGEC

SEQ ID NO: 18488 - protein, 213 aa, Artificial Sequence
  source: /note="Description of Artificial Sequence: Synthetic polypeptide"
ENVLTQSPSSMSVSVGDRVTIACSASSSVPYMHWLQQKPGKSPKLLIYSTSNLASGVPSRFSGSGSGTDYSLTISSVQPEDAATYYCQQRSSYPLTFGCGTKLEIKRTVAAPSVFIFPPSDEQLKSGTASVVCLLNNFYPREAKVQWKVDNALQSGNSQESVTEQDSKDSTYSLSSTLTLSKADYEKHKVYACEVTHQGLSSPVTKSFNRGEC

SEQ ID NO: 18489 - protein, 218 aa, Artificial Sequence
  source: /note="Description of Artificial Sequence: Synthetic polypeptide"
EIVLTQSPATLSLSPGERATLSCRAGESVDIFGVGFLHWYQQKPGQAPRLLIYRASNRATGIPARFSGSGSGTDFTLTISSLEPEDFAVYYCQQTNEDPYTFGQGTKLEIKRTVAAPSVFIFPPSDEQLKSGTASVVCLLNNFYPREAKVQWKVDNALQSGNSQESVTEQDSKDSTYSLSSTLTLSKADYEKHKVYACEVTHQGLSSPVTKSFNRGEC

SEQ ID NO: 18490 - protein, 218 aa, Artificial Sequence
  source: /note="Description of Artificial Sequence: Synthetic polypeptide"
DIVLTQSPASLAVSLGQRATMSCRAGESVDIFGVGFLHWYQQKPGQPPKLLIYRASNLESGIPVRFSGTGSRTDFTLIIDPVEADDVATYYCQQTNEDPYTFGGGTKLEIKRTVAAPSVFIFPPSDEQLKSGTASVVCLLNNFYPREAKVQWKVDNALQSGNSQESVTEQDSKDSTYSLSSTLTLSKADYEKHKVYACEVTHQGLSSPVTKSFNRGEC

SEQ ID NO: 18491 - protein, 236 aa, Homo sapiens
  MOD_RES (91)..(91): Any amino acid
MDMRVPAQLLGLLLLWFPGSRCDIQMTQSPSSVSASVGDRVTITCRASQGINTWLAWYQQKPGKAPKLLIYAASSLKSGVPSRFSGSGSGXDFTLTISSLQPEDFATYYCQQANSFPLTFGGGTKVEIKRTVAAPSVFIFPPSDEQLKSGTASVVCLLNNFYPREAKVQWKVDNALQSGNSQESVTEQDSKDSTYSLSSTLTLSKADYEKHKVYACEVTHQGLSSPVTKSFNRGEC

SEQ ID NO: 18492 - protein, 129 aa, Homo sapiens
MDMRVPAQLLGLLLLWFPGSRCDIQMTQSPSSVSASVGDRVTITCRASQGISSWLAWYQQKPGKAPKLLIYAASSLQSGVPSRFSGSGSGTDFTLTISSLQPEDFATYYCQQANSFPLTFGGGTKVEIK

SEQ ID NO: 18493 - protein, 218 aa, Mus musculus
DIVLTQSPDSLAVSLGERATINCKSSESVDSYANSFMHWYQQKPGQPPKLLIYRASTRESGVPDRFSGSGSRTDFTLTISSLQAEDVAVYYCQQSKEDPLTFGGGTKVEIKRTVAAPSVFIFPPSDEQLKSGTASVVCLLNNFYPREAKVQWKVDNALQSGNSQESVTEQDSKDSTYSLSSTLTLSKADYEKHKVYACEVTHQGLSSPVTKSFNRGEC

SEQ ID NO: 18494 - protein, 218 aa, Mus musculus; identical to SEQ ID NO: 14643

SEQ ID NO: 18495 - protein, 218 aa, Mus musculus; identical to SEQ ID NO: 14644

SEQ ID NO: 18496 - protein, 218 aa, Mus musculus; identical to SEQ ID NO: 14645

SEQ ID NO: 18497 - protein, 236 aa, Homo sapiens
MDMRVPAQLLGLLLLWFPGSRCDIQMTQSPSSVSASVGDRVTITCRASQGISSWLAWYQQKPGKAPKLLIYAASSLQSGVPSRFSGSGSGTDFTLTISSLQSEDFATYYCQQANSFPITFGPGTKVEIKRTVAAPSVFIFPPSDEQLKSGTASVVCLLNNFYPREAKVQWKVDNALQSGNSQESVTEQDSKDSTYSLSSTLTLSKADYEKHKVYACEVTHQGLSSPVTKSFNRGEC

SEQ ID NO: 18498 - protein, 129 aa, Homo sapiens
MDMRVPAQLLGLLLLWFPGSRCDIQMTQSPSSVSASVGDRVTITCRASQGISSWLAWYQQKPGKAPKLLIYAASSLQSGVPSRFSGSGSGTDFTLTISSLQPEDFATYYCQQANSFPFTFGPGTKVDIK

SEQ ID NO: 18499 - protein, 236 aa, Homo sapiens
MDMRVPAQLLGLLLLWFPGSRCDIQMTQSPSSVSASVGDRVIITCRASQGISSWLAWYQQKPGKAPKLLIYAASSLKSGVPSRFSGSGSGTDFTVTISSLQPEDFATYYCQQSNSLPWTFGQGTKVEIKRTVAAPSVFIFPPSDEQLKSGTASVVCLLNNFYPREAKVQWKVDNALQSGNSQESVTEQDSKDSTYSLSSTLTLSKADYEKHKVYACEVTHQGLSSPVTKSFNRGEC

SEQ ID NO: 18500 - protein, 129 aa, Homo sapiens
MDMRVPAQLLGLLLLWFPGSRCDIQMTQSPSSVSASVGDRVTITCRASQGISSWLAWYQQKPGKAPKLLIYAASSLQSGVPSRFSGSGSGTDFTLTISSLQPEDFATYYCQQANSFPWTFGQGTKVEIK

SEQ ID NO: 18501 - protein, 236 aa, Homo sapiens
METPAQLLFLLLLWLPDTTGEIVLTQSPGTLSLSPGERATLSCRASQSVSNNYLAWYQQKPGQAPRLLIFGASSRATGIPDRFSGSGSGTDFTLTISRLEPEDFAVYYCQQYDISPMYSFGQGTKLEMKRTVAAPSVFIFPPSDEQLKSGTASVVCLLNNFYPREAKVQWKVDNALQSGNSQESVTEQDSKDSTYSLSSTLTLSKADYEKHKVYACEVTHQGLSSPVTKSFNRGEC

SEQ ID NO: 18502 - protein, 128 aa, Homo sapiens
METPAQLLFLLLLWLPDTTGEIVLTQSPGTLSLSPGERATLSCRASQSVSSSYLAWYQQKPGQAPRLLIYGASSRATGIPDRFSGSGSGTDFTLTISRLEPEDFAVYYCQQYGSSPYTFGQGTKLEIK

SEQ ID NO: 18503 - protein, 215 aa, Artificial Sequence; identical to SEQ ID NO: 9758
  source: /note="Description of Artificial Sequence: Synthetic polypeptide"

SEQ ID NO: 18504 - protein, 213 aa, Homo sapiens
QLTQSPSSLSASVGDRVTITCRASQGLSSALAWYRQKPGKAPKLLIYDASSLESGVPSRFSGSGSGTDFTLTISSLQPEDFATYYCQQFTSYPQITFGQGTRLEIKRTVAAPSVFIFPPSDEQLKSGTASVVCLLNNFYPREAKVQWKVDNALQSGNSQESVTEQDSKDSTYSLSSTLTLSKADYEKHKVYACEVTHQGLSSPVTKSFNRGEC

SEQ ID NO: 18505 - protein, 214 aa, Homo sapiens
DIQMTQSPSSVSASVGDRVTITCRASQGISNWLAWFQHKPGKAPKLLIYAASSLLSGVPSRFSGSGSGTDFTLTISSLQPEDFATYYCQQANSFPITFGQGTRLEIKRTVAAPSVFIFPPSDEQLKSGTASVVCLLNNFYPREAKVQWKVDNALQSGNSQESVTEQDSKDSTYSLSSTLTLSKADYEKHKVYACEVTHQGLSSPVTKSFNRGEC

SEQ ID NO: 18506 - protein, 220 aa, Artificial Sequence; identical to SEQ ID NO: 14637
  source: /note="Description of Artificial Sequence: Synthetic polypeptide"

SEQ ID NO: 18507 - protein, 227 aa, Artificial Sequence; identical to SEQ ID NO: 12374
  source: /note="Description of Artificial Sequence: Synthetic polypeptide"

SEQ ID NO: 18508 - protein, 215 aa, Artificial Sequence
  source: /note="Description of Artificial Sequence: Synthetic polypeptide"
ETTVTQSPALMAASPGEKVTITCSVSSSISSTNLHWYQQKSETSPKPWIYGTSNLASGVPVRFGGSGSGTSYSLTISSMEAEDAATYYCQQWSSYPYTFGGGTKLEIKRADAAPTVSIFPPSSEQLTSGGASVVCFLNNFYPKDINVKWKIDGSERQNGVLNSWTDQDSKDSTYSMSSTLTLTKDEYERHNSYTCEATHKTSTSPIVKSFNRNEC

SEQ ID NO: 18509 - protein, 220 aa, Artificial Sequence; identical to SEQ ID NO: 9759
  source: /note="Description of Artificial Sequence: Synthetic polypeptide"

SEQ ID NO: 18510 - protein, 219 aa, Artificial Sequence
  source: /note="Description of Artificial Sequence: Synthetic polypeptide"
DIQMTQSPSSLSASVGDRVTITCKSSQSLLYTSSQKNYLAWYQQKPGKAPKLLIYWASTRESGVPSRFSGSGSGTDFTLTISSLQPEDFATYYCQQYYAYPWTFGQGTKVEIKRTVAAPSVFIFPPSDEQLKSGTASWCLLNNFYPREAKVQWKVDNALQSGNSQESVTEQDSKDSTYSLSSTLTLSKADYEKHKVYACEVTHQGLSSPVTKSFNRGEC

SEQ ID NO: 18511 - protein, 214 aa, Artificial Sequence
  source: /note="Description of Artificial Sequence: Synthetic polypeptide"
EIQMTQSPASLSASVGETVTITCRASENIYSYLAWYQRKQGRSPQLLVYNAKPLAEGVPSRFSGSGSGTQFSLKINSLQPEDFGTYYCQHHYGTPFTFGSGTRLEIKRADAAPTVSIFPPSSEQLTSGGASVVCFLNNFYPKDINVKWKIDGSERQNGVLNSWTDQDSKDSTYSMSSTLTLTKDEYERHNSYTCEATHKTSTSPIVKSFNRNEC

SEQ ID NO: 18512 - protein, 215 aa, Artificial Sequence
  source: /note="Description of Artificial Sequence: Synthetic polypeptide"
DIQMTQSPSSLSASVGDRVTITCSVSSSVSSIYLHWYQQKPGKAPKLLIYSTSNLASGVPSRFSGSGSGTDFTLTISSLQPEDFATYYCQVYSGYPLTFGGGTKVEIKRTVAAPSVFIFPPSDEQLKSGTASVVCLLNNFYPREAKVQWKVDNALQSGNSQESVTEQDSKDSTYSLSSTLTLSKADYEKHKVYACEVTHQGLSSPVTKSFNRGDC

SEQ ID NO: 18513 - protein, 218 aa, Artificial Sequence
  source: /note="Description of Artificial Sequence: Synthetic polypeptide"
DIELTQSPASLAVSLGQRATISCRASESVDSYGNSFMHWYQQKPGQPPKLLIYLASNLESGVPARFSGSGSRTDFTLTIDPVEADDAATYYCQQNNEDPLTFGGGTKLEIKRTVAAPSVFIFPPSDEQLKSGTASVVCLLNNFYPREAKVQWKVDNALQSGNSQESVTEQDSKDSTYSLSSTLTLSKADYEKHKVYACEVTHQGLSSPVTKSFNRGEC

SEQ ID NO: 18514 - protein, 216 aa, Mus musculus; identical to SEQ ID NO: 15818

SEQ ID NO: 18515 - protein, 221 aa, Mus musculus; identical to SEQ ID NO: 15819

SEQ ID NO: 18516 - protein, 220 aa, Mus musculus; identical to SEQ ID NO: 15820

SEQ ID NO: 18517 - protein, 220 aa, Mus musculus; identical to SEQ ID NO: 15824

SEQ ID NO: 18518 - protein, 220 aa, Artificial Sequence; identical to SEQ ID NO: 15822
  source: /note="Description of Artificial Sequence: Synthetic polypeptide"

SEQ ID NO: 18519 - protein, 216 aa, Artificial Sequence; identical to SEQ ID NO: 15867
  source: /note="Description of Artificial Sequence: Synthetic polypeptide"

SEQ ID NO: 18520 - protein, 214 aa, Artificial Sequence; identical to SEQ ID NO: 9491
  source: /note="Description of Artificial Sequence: Synthetic polypeptide"

SEQ ID NO: 18521 - protein, 214 aa, Homo sapiens; identical to SEQ ID NO: 9534

SEQ ID NO: 18522 - protein, 214 aa, Homo sapiens
AIQLTQSPSSLSASVGDRVTITCRASQDISSALVWYQQKPGKAPKLLIYDASSLESGVPSRFSGSESGTDFTLTISSLQPEDFATYYCQQFNSYPLTFGGGTKVEIKRTVAAPSVFIFPPSDEQLKSGTASVVCLLNNFYPREAKVQWKVDNALQSGNSQESVTEQDSKDSTYSLSSTLTLSKADYEKHKVYACEVTHQGLSSPVTKSFNRGEC

SEQ ID NO: 18523 - protein, 213 aa, Artificial Sequence
  source: /note="Description of Artificial Sequence: Synthetic polypeptide"
DIVLTQSPAFMSASPGEKVTMTCSASSSVSYMHWYQQKPDQSPKRWIYATSKLASGVPSRFSGSGSGTDYSLTISSMEAEDAATYYCQQWSSNPLTFGQGTKLELKRTVAAPSVFIFPPSDEQLKSGTASVVCLLNNFYPREAKVQWKVDNALQSGNSQESVTEQDSKDSTYSLSSTLTLSKADYEKHKVYACEVTHQGLSSPVTKSFNRGEC

SEQ ID NO: 18524 - protein, 213 aa, Artificial Sequence
  source: /note="Description of Artificial Sequence: Synthetic polypeptide"
DTVLTQSPSLAVSPGERATISCRASESVSTLMHWYQQKPGQQPKLLIYLASHRESGVPARFSGSGSGTDFTLTIDPMEAEDTATYYCQQSRNDPWTFGQGTKLELKRTVAAPSVFIFPPSDEQLKSGTASVVCLLNNFYPREAKVQWKVDNALQSGNSQESVTEQDSKDSTYSLSSTLTLSKADYEKHKVYACEVTHQGLSSPVTKSFNRGEC

SEQ ID NO: 18525 - protein, 219 aa, Artificial Sequence
  source: /note="Description of Artificial Sequence: Synthetic polypeptide"
DIQMTQSPSSLSASVGDRVTITCRSSQNIVHSNGNTYLDWYQQTPGKAPKLLIYKVSNRFSGVPSRFSGSGSGTDFTFTISSLQPEDIATYYCFQYSHVPWTFGQGTKLQITREVAAPSVFIFPPSDEQLKSGTASVVCLLNNFYPREAKVQWKVDNALQSGNSQESVTEQDSKDSTYSLSSTLTLSKADYEKHKVYACEVTHQGLSSPVTKSFNRGEC

SEQ ID NO: 18526 - protein, 107 aa, Artificial Sequence [sequence omitted]

SEQ ID NO: 18527 - protein, 214 aa, Artificial Sequence
  source: /note="Description of Artificial Sequence: Synthetic polypeptide"
DIQMTQSPSSLSASVGDRVTITCQASQDISNYLNWYQQKPGKAPKLLIYDASNLETGVPSRFSGSGSGTDFTFTISSLQPEDIATYFCQHFDHLPLAFGGGTKVEIKRTVAAPSVFIFPPSDEQLKSGTASVVCLLNNFYPREAKVQWKVDNALQSGNSQESVTEQDSKDSTYSLSSTLTLSKADYEKHKVYACEVTHQGLSSPVTKSFNRGEC

SEQ ID NO: 18528 - protein, 111 aa, Mus musculus
DIVLTQSPASLAVSLGQRATISCRASKSVSTSGYSYMHWYQQKPGQPPKLLIYLASNLESGVPARFSGSGSGTDFTLNIHPVEEEDAATYYCQHSRELPLTFGAGTKLELK

SEQ ID NO: 18529 - protein, 112 aa, Mus musculus; identical to SEQ ID NO: 9309

SEQ ID NO: 18530 - protein, 111 aa, Mus musculus
DIVLTQSPASLAVSLGQRATISCRVSESVDSYGNSFMHWYQQKPGQPPKLLIYRASNLESGIPDRFSGSVSRTDFTLTINPVEPDDVATYYCQQTNEDPPTFGGGTKLEIK

SEQ ID NO: 18531 - protein, 469 aa, Artificial Sequence
  source: /note="Description of Artificial Sequence: Synthetic polypeptide"
MYRMQLLSCIALSLALVTNSQVQLKQSGPGLVQPSQSLSITCTVSGFSLTNYGVHWVRQSPGKGLEWLGVIWSGGNTDYNTPFTSRLSINKDNSKSQVFFKMNSLQSQDTAIYYCARALTYYDYEFAYWGQGTLVTVSAASTKGPSVFPLAPSSKSTSGGTAALGCLVKDYFPEPVTVSWNSGALTSGVHTFPAVLQSSGLYSLSSVVTVPSSSLGTQTYICNVNHKPSNTKVDKKVEPKSCDKTHTCPPCPAPELLGGPSVFLFPPKPKDTLMISRTPEVTCVVVDVSHEDPEVKFNWYVDGVEVHNAKTKPREEQYASTYRVVSVLTVLHQDWLNGKEYKCKVSNKALPAPIEKTISKAKGQPREPQVYTLPPSRDELTKNQVSLTCLVKGFYPSDIAVEWESNGQPENNYKTTPPVLDSDGSFFLYSKLTVDKSRWQQGNVFSCSVMHEALHNHYTQKSLSLSPGK

SEQ ID NO: 18532 - protein, 281 aa, Artificial Sequence
  source: /note="Description of Artificial Sequence: Synthetic polypeptide"
MYRMQLLSCIALSLALVTNSQGQSGQCISPRGCPDGPYVMYGSSGGSGGSGGSGLSGRSDNHGSSGTQILLTQSPVILSVSPGERVSFSCRASQSIGTNIHWYQQRTNGSPRLLIKYASESISGIPSRFSGSGSGTDFTLSINSVESEDIADYYCQQNNNWPTTFGAGTKLELKRTVAAPSVFIFPPSDEQLKSGTASVVCLLNNFYPREAKVQWKVDNALQSGNSQESVTEQDSKDSTYSLSSTLTLSKADYEKHKVYACEVTHQGLSSPVTKSFNRGEC

SEQ ID NO: 18533 - protein, 261 aa, Artificial Sequence; identical to SEQ ID NO: 14743
  source: /note="Description of Artificial Sequence: Synthetic polypeptide"

SEQ ID NO: 18534 - protein, 214 aa, Artificial Sequence
  source: /note="Description of Artificial Sequence: Synthetic polypeptide"
QILLTQSPVILSVSPGERVSFSCRASQSIGTNIHWYQQRTNGSPRLLIKYASESISGIPSRFSGSGSGTDFTLSINSVESEDIADYYCQQNNNWPTTFGAGTKLELKRTVAAPSVFIFPPSDEQLKSGTASVVCLLNNFYPREAKVQWKVDNALQSGNSQESVTEQDSKDSTYSLSSTLTLSKADYEKHKVYACEVTHQGLSSPVTKSFNRGEC

SEQ ID NO: 18535 - protein, 223 aa, Artificial Sequence
  source: /note="Description of Artificial Sequence: Synthetic polypeptide"
SDNHGSSGTQILLTQSPVILSVSPGERVSFSCRASQSIGTNIHWYQQRTNGSPRLLIKYASESISGIPSRFSGSGSGTDFTLSINSVESEDIADYYCQQNNNWPTTFGAGTKLELKRTVAAPSVFIFPPSDEQLKSGTASVVCLLNNFYPREAKVQWKVDNALQSGNSQESVTEQDSKDSTYSLSSTLTLSKADYEKHKVYACEVTHQGLSSPVTKSFNRGEC

SEQ ID NO: 18536 - protein, 220 aa, Artificial Sequence
  source: /note="Description of Artificial Sequence: Synthetic polypeptide"
HGSSGTQILLTQSPVILSVSPGERVSFSCRASQSIGTNIHWYQQRTNGSPRLLIKYASESISGIPSRFSGSGSGTDFTLSINSVESEDIADYYCQQNNNWPTTFGAGTKLELKRTVAAPSVFIFPPSDEQLKSGTASVVCLLNNFYPREAKVQWKVDNALQSGNSQESVTEQDSKDSTYSLSSTLTLSKADYEKHKVYACEVTHQGLSSPVTKSFNRGEC

SEQ ID NO: 18537 - protein, 238 aa, Artificial Sequence
  source: /note="Description of Artificial Sequence: Synthetic polypeptide"
MKLPVRLLVLMFWIPASSSDVLMTQIPLSLPVSLGDQASISCRSSQSIVHSNGNTYLEWYLQKPGQSPKSLIYKVSNRFSGVPDRFSGSGSGTDFTLKISRVEAEDLGVYYCFQGSYVPWTFGGGTKLEIKRADAAPTVSIFPPSSEQLTSGGASVVCFLNNFYPRDINVKWKIDGSERQNGVLNSWTDQDSKDSTYSMSSTLTLTKDEYERHNSYTCEATHKTSTSPIVKSFNRNEC

SEQ ID NO: 18538 - protein, 239 aa, Artificial Sequence
  source: /note="Description of Artificial Sequence: Synthetic polypeptide"
MRCLAEFLGLLVLWIPGAIGDIVLTQTAPSVPVTPGESVSISCRSSKSLLHSNGNTYLYWFLQRPGQSPQLLIYRMSNLASGVPDRFSGSGSGTAFTLRISRVEAEDVGVYYCMQHLEYPFTFGSGTKLEIKRADAAPTVSIFPPSSEQLTSGGASVVCFLNNFYPRDINVKWKIDGSERQNGVLNSWTDQDSKDSTYSMSSTLTLTKDEYERHNSYTCEATHKTSTSPIVKSFNRNEC

SEQ ID NO: 18539 - protein, 238 aa, Artificial Sequence
  source: /note="Description of Artificial Sequence: Synthetic polypeptide"
MKLPVRLLVLMFWIPASRSDVLMTQTPLSLPVSLGDQASISCRSSQSIVHSIGNTYLEWYLQKPGQSPKLLIYKVSNRFSGVPERFSGSGSGTDFTLKISRVEAEDLGVYYCFQGSHVPFTFGSGTKLEIKRADAAPTVSIFPPSSEQLTSGGASVVCFLNNFYPKDINVKWKIDGSERQNGVLNSWTDQDSKDSTYSMSSTLTLTKDEYERHNSYTCEATHKTSTSPIVKSFNRNEC

SEQ ID NO: 18540 - protein, 238 aa, Artificial Sequence
  source: /note="Description of Artificial Sequence: Synthetic polypeptide"
MKLPVRLLVLMFWIPASSSDVLMTQIPLSLPVSLGDQASISCRSSQSIVHSNGNTYLEWYLQKPGQSPKLLIYKVSNRFSGVPDRFSGSGSGTDFTLKISRVEAEDLGVYYCFQGSYVPWTFGGGTKLEIKRADAAPTVSIFPPSSEQLTSGGASVVCFLNNFYPRDINVKWKIDGSERQNGVLNSWTDQDSKDSTYSMSSTLTLTKDEYERHNSYTCEATHKTSTSPIVKSFNRNEC

SEQ ID NO: 18541 - protein, 234 aa, Artificial Sequence
  source: /note="Description of Artificial Sequence: Synthetic polypeptide"
MFSLALLLSLLLLCVSDSRAETTVTQSPASLSMAIGDKVTIRCITSTDIDDDMNWFQQKPGEPPKLLISEGNTLRPGVPSRFSGSGYGTDFIFTIENMLSEDVADYYCLQSDNLPYTFGGGTKLEIKRADAAPTVSIFPPSSEQLTSGGASVVCFLNNFYPRDINVKWKIDGSERQNGVLNSWTDQDSKDSTYSMSSTLTLTKDEYERHNSYTCEATHKTSTSPIVKSFNRNEC

SEQ ID NO: 18542 - protein, 238 aa, Artificial Sequence
  source: /note="Description of Artificial Sequence: Synthetic polypeptide"
MKLPVRLLVLMFWIPASSSDVLMTQTPLSLPVSLGDQASISCRSSQSIVHSNGNTYLEWYLQKPGQSPKLLIYKVSNRFSGVPDRFSGSGSGTDFTLKISRVEAEDLGVYYCFQGSYVPWTFGGGTKLEIKRADAAPTVSIFPPSSEQLTSGGASVVCFLNNFYPRDINVKWKIDGSERQNGVLNSWTDQDSKDSTYSMSSTLTLTKDEYERHNSYTCEATHKTSTSPIVKSFNRNEC

SEQ ID NO: 18543 - protein, 236 aa, Artificial Sequence
  source: /note="Description of Artificial Sequence: Synthetic polypeptide"
MDMRVPAHVFGFLLLWFPGTRCDIQMTQSPSSLSASLGERVSLTCRASQEISGYLSWLQQKPDGTIKRLIYAASTLDSGVPKRFSGSRSGSDYSLTIGSLESEDLADYYCLQYDSYPYTFGGGTKLEIKRADAAPTVSIFPPSSEQLTSGGASVVCFLNNFYPRDINVKWKIDGSERQNGVLNSWTDQDSKDSTYSMSSTLTLTKDEYERHNSYTCEATHKTSTSPIVKSFNRNEC

SEQ ID NO: 18544 - protein, 107 aa, Artificial Sequence
  source: /note="Description of Artificial Sequence: Synthetic polypeptide"
RADAAPTVSIFPPSSEQLTSGGASVVCFLNNFYPRDINVKWKIDGSERQNGVLNSWTDQDSKDSTYSMSSTLTLTKDEYERHNSYTCEATHKTSTSPIVKSFNRNEC

SEQ ID NO: 18545 - protein, 236 aa, Artificial Sequence
  source: /note="Description of Artificial Sequence: Synthetic polypeptide"
MDMRVPAQLLGLLLLWLRGARCDIQMTQSPSSLSASVGDRVTITCRASQEISGYLSWFQQKPGKAPKSLIYAASTLDSGVPSRFSGSGSGTDFTLTISSLQPEDFATYYCLQYDSYPYTFGQGTKLEIKRTVAAPSVFIFPPSDEQLKSGTASVVCLLNNFYPREAKVQWKVDNALQSGNSQESVTEQDSKDSTYSLSSTLTLSKADYEKHKVYACEVTHQGLSSPVTKSFNRGEC

SEQ ID NO: 18546 - protein, 236 aa, Artificial Sequence
  source: /note="Description of Artificial Sequence: Synthetic polypeptide"
MDMRVPAQLLGLLLLWLRGARCDIQMTQSPSSLSASVGDRVTITCRASQEISGYLSWYQQKPGKAPKRLIYAASTLDSGVPSRFSGSGSGTEFTLTISSLQPEDFATYYCLQYDSYPYTFGQGTKLEIKRTVAAPSVFIFPPSDEQLKSGTASVVCLLNNFYPREAKVQWKVDNALQSGNSQESVTEQDSKDSTYSLSSTLTLSKADYEKHKVYACEVTHQGLSSPVTKSFNRGEC

SEQ ID NO: 18547 - protein, 240 aa, Artificial Sequence
  source: /note="Description of Artificial Sequence: Synthetic polypeptide"
MESQTQVLISLLFWVSGTCGDIVMTQSPSSLTVIAGEKVTMSCKSSQSLLNSGNQKNYLTWYQQKPGQPPKLLIYWASTRESGVPDRFTGSGSGTDFTLTISSVQAEDLAVYYCQNEYTYPLTFGAGTKLEIKRTVAAPSVFIFPPSDEQLKSGTASVVCLLNNFYPREAKVQWKVDNALQSGNSQESVTEQDSKDSTYSLSSTLTLSKADYEKHKVYACEVTHQGLSSPVTKSFNRGEC

SEQ ID NO: 18548 - protein, 239 aa, Artificial Sequence
  source: /note="Description of Artificial Sequence: Synthetic polypeptide"
MESQTQVLISLLFWVSGTCGDIVMTQSPSSLTVIAGEKVTMSCKSSQSLLNSGNQKNYLTWYQQKPGQPPKLLIYWASTRESGVPDRFTGSGSGTDFTLTISSVQAEDLAVYYCQNEYTYPLTFGAGTKLTVLGQPKAAPSVTLFPPSSEELQANKATLVCLISDFYPGAVTVAWKADSSPVKAGVETTTPSKQSNNKYAASSYLSLTPEQWKSHRSYSCQVTHEGSTVEKTVAPTECS

SEQ ID NO: 18549 - protein, 240 aa, Artificial Sequence
  source: /note="Description of Artificial Sequence: Synthetic polypeptide"
MESQTQVLISLLFWVSGTCGDIVMTQSPDSLAVSLGERATINCKSSQSLLNSGNQKNYLTWYQQKPGQPPKLLIYWASTRESGVPDRFSGSGSGTDFTLTISSLQAEDVAVYYCQNEYTYPLTFGGGTKLEIKRTVAAPSVFIFPPSDEQLKSGTASVVCLLNNFYPREAKVQWKVDNALQSGNSQESVTEQDSKDSTYSLSSTLTLSKADYEKHKVYACEVTHQGLSSPVTKSFNRGEC

SEQ ID NO: 18550 - protein, 240 aa, Artificial Sequence
  source: /note="Description of Artificial Sequence: Synthetic polypeptide"
MESQTQVLISLLFWVSGTCGDIQMTQSPSSLSASVGDRVTITCKSSQSLLNSGNQKNYLTWYQQKPGKAPKLLIYWASTRESGVPSRFSGSGSGTDFTLTISSLQPEDFATYYCQNEYTYPLTFGQGTKVEIKRTVAAPSVFIFPPSDEQLKSGTASVVCLLNNFYPREAKVQWKVDNALQSGNSQESVTEQDSKDSTYSLSSTLTLSKADYEKHKVYACEVTHQGLSSPVTKSFNRGEC

SEQ ID NO: 18551 - protein, 240 aa, Artificial Sequence
  source: /note="Description of Artificial Sequence: Synthetic polypeptide"
MESQTQVLISLLFWVSGTCGDIVMTQSPDSLTVSLGERATINCKSSQSLLNSGNQKNYLTWYQQKPGQPPKLLIYWASTRESGVPDRFSGSGSGTDFTLTISSVQAEDVAVYYCQNEYTYPLTFGGGTKLELKRTVAAPSVFIFPPSDEQLKSGTASVVCLLNNFYPREAKVQWKVDNALQSGNSQESVTEQDSKDSTYSLSSTLTLSKADYEKHKVYACEVTHQGLSSPVTKSFNRGEC

SEQ ID NO: 18552 - protein, 240 aa, Artificial Sequence
  source: /note="Description of Artificial Sequence: Synthetic polypeptide"
MESQTQVLISLLFWVSGTCGDIVMTQSPSSLTVSLGERATMSCKSSQSLLNSGNQKNYLTWYQQKPGQPPKLLIYWASTRESGVPDRFSGSGSGTDFTLTISSVQAEDVAVYYCQNEYTYPLTFGGGTKLELKRTVAAPSVFIFPPSDEQLKSGTASVVCLLNNFYPREAKVQWKVDNALQSGNSQESVTEQDSKDSTYSLSSTLTLSKADYEKHKVYACEVTHQGLSSPVTKSFNRGEC

SEQ ID NO: 18553 - protein, 234 aa, Artificial Sequence
  source: /note="Description of Artificial Sequence: Synthetic polypeptide"
MGTPAQLLFLLLLWLPDTTGDIQMTQSPSSLSASTGDRVTITCRASQGISSYLAWYQQKPGKAPKLLIYAASTLQSGVPSRFSGSGSGTDFTLTISSLQPEDFATYYCQQYFTFPLTFGGGTKVEIKRTVAAPSVFIFPPSDEQLKSGTASVVCLLNNFYPREAKVQWKVDNALQSGNSQESVTEQDSKDSTYSLSSTLTLSKADYEKHKVYACEVTHQGLSSPVTKSFNRGEC

SEQ ID NO: 18554 - protein, 216 aa, Artificial Sequence
  source: /note="Description of Artificial Sequence: Synthetic polypeptide"
QSVLTQPPSASGTPGQRVTISCSGSDSNIGRNYIYWYQQFPGTAPKLLIYRNNQRPSGVPDRISGSKSGTSASLAISGLRSEDEAEYHCGTWDDSLSGPVFGGGTKLTVLGQPKAAPSVTLFPPSSEELQANKATLVCLISDFYPGAVTVAWKADSSPVKAGVETTTPSKQSNNKYAASSYLSLTPEQWKSHRSYSCQVTHEGSTVEKTVAPTECS

SEQ ID NO: 18555 - protein, 214 aa, Artificial Sequence
  source: /note="Description of Artificial Sequence: Synthetic polypeptide"
DIQMTQSPSSFSASTGDRVTITCRASQGISSYLAWYQQKPGKAPKLLIYAASTLQSGVPSRFSGSGSGTDFTLTISSLQPEDSATYYCQQYFTFPLTFGGGTKVEIKRTVAAPSVFIFPPSDEQLKSGTASVVCLLNNFYPREAKVQWKVDNALQSGNSQESVTEQDSKDSTYSLSSTLTLSKADYEKHKVYACEVTHQGLSSPVTKSFNRGEC

SEQ ID NO: 18556 - protein, 238 aa, Artificial Sequence
  source: /note="Description of Artificial Sequence: Synthetic polypeptide"
METDTLLLWVLLLWVPGSTGDIQMTQSPSSLSASVGDRVTITCRASKSVSTSAYSYMHWYQQKPGKAPKLLIYLASNLESGVPSRFSGSGSGTDFTLTISSLQPEDFATYYCQHSRELPYTFGQGTKLEIKRTVAAPSVFIFPPSDEQLKSGTASVVCLLNNFYPREAKVQWKVDNALQSGNSQESVTEQDSKDSTYSLSSTLTLSKADYEKHKVYACEVTHQGLSSPVTKSFNRGEC

SEQ ID NO: 18557 - protein, 220 aa, Homo sapiens
DIVMSQSPSSLAVSVGEKVTMSCKSSQSLLYSRNQKNYLAWFQQKPGQSPKLLIFWASTRESGVPDRFTGSGFGTDFNLTISSVQAEDLAVYDCQQYFSYPLTFGAGTKLELKRTVAAPSVFIFPPSDEQLKSGTASVVCLLNNFYPREAKVQWKVDNALQSGNSQESVTEQDSKDSTYSLSSTLTLSKADYEKHKVYACEVTHQGLSSPVTKSFNRGEC

SEQ ID NO: 18558 - protein, 240 aa, Homo sapiens
MDSQAQVLMLLPLWVSGTCGDIVMSQSPSSLAVSVGEKVTMSCKSSQSLLYSRNQKNYLAWFQQKPGQSPKLLIFWASTRESGVPDRFTGSGFGTDFNLTISSVQAEDLAVYDCQQYFSYPLTFGAGTKLELKRTVAAPSVFIFPPSDEQLKSGTASVVCLLNNFYPREAKVQWKVDNALQSGNSQESVTEQDSKDSTYSLSSTLTLSKADYEKHKVYACEVTHQGLSSPVTKSFNRGEC

SEQ ID NO: 18559 - protein, 240 aa, Homo sapiens
METDTLLLWVLLLWVPGSSGDIVMTQSPDSLAVSLGERATINCKSSQSLLYSRNQKNYLAWYQQKPGQPPKLLIFWASTRESGVPDRFSGSGFGTDFTLTISSLQAEDVAVYYCQQYFSYPLTFGQGTKVEIKRTVAAPSVFIFPPSDEQLKSGTASVVCLLNNFYPREAKVQWKVDNALQSGNSQESVTEQDSKDSTYSLSSTLTLSKADYEKHKVYACEVTHQGLSSPVTKSFNRGEC

SEQ ID NO: 18560 - protein, 235 aa, Artificial Sequence
  source: /note="Description of Artificial Sequence: Synthetic polypeptide"
MDFQVQIFSFLLISASVIISRGQIVLTQSPAIMSASPGEKVTMTCSASSGVNFMHWYQQKSGTSPKRWIFDTSKLASGVPARFSGSGSGTSYSLTISSMEAEDAATYYCQQWSFNPPTFGGGTKLEIKRTVAAPSVFIFPPSDEQLKSGTASVVCLLNNFYPREAKVQWKVDNALQSGNSQESVTEQDSKDSTYSLSSTLTLSKADYEKHKVYACEVTHQGLSSPVTKSFNRGEC

SEQ ID NO: 18561 - protein, 239 aa, Artificial Sequence
  source: /note="Description of Artificial Sequence: Synthetic polypeptide"
MKLPVRLLVLMFWIPASLSDVVMTQTPLSLPVTPGEPASISCRSSQSLVHRNGNTYLHWYLQKPGQSPKLLIHKVSNRFSGVPDRFSGSGSGTDFTLKISRVEAEDLGVYFCSQSTHVPPLTFGAGTKLELKRTVAAPSVFIFPPSDEQLKSGTASVVCLLNNFYPREAKVQWKVDNALQSGNSQESVTEQDSKDSTYSLSSTLTLSKADYEKHKVYACEVTHQGLSSPVTKSFNRGEC

SEQ ID NO: 18562 - protein, 211 aa, Artificial Sequence
  source: /note="Description of Artificial Sequence: Synthetic polypeptide"
EIVMTQTPATLSVSAGERVTITCKASQSVSNHVTWYQQKPGQAPRLLIYSASNRYSGVPARFSGSGYGTEFTFTISSVQSEDFAVYFCQQDYSSFGQGTKLEIKRTVAAPSVFIFPPSDEQLKSGTASVVCLLNNFYPREAKVQWKVDNALQSGNSQESVTEQDSKDSTYSLSSTLTLSKADYEKHKVYACEVTHQGLSSPVTKSFNRGEC

SEQ ID NO: 18563 - protein, 211 aa, Artificial Sequence
  source: /note="Description of Artificial Sequence: Synthetic polypeptide"
KIVMTQTPATLSVSAGERVTITCKASQSVSNDVTWYQQKPGQAPRLLIYSASNRYSGVPARFSGSGYGTEFTFTISSVQSEDFAVYFCQQDYSSFGQGTKLEIKRTVAAPSVFIFPPSDEQLKSGTASVVCLLNNFYPREAKVQWKVDNALQSGNSQESVTEQDSKDSTYSLSSTLTLSKADYEKHKVYACEVTHQGLSSPVTKSFNRGEC

SEQ ID NO: 18564 - protein, 211 aa, Artificial Sequence
  source: /note="Description of Artificial Sequence: Synthetic polypeptide"
KIVMTQTPATLSVSAGERVTITCKASQSVSNHVTWYQQKPGQAPRLLIYSASNRYSGVPARFSGSGYGTEFTFTISSVQSEDFAVYFCQQDYSSFGQGTKLEIKRTVAAPSVFIFPPSDEQLKSGTASVVCLLNNFYPREAKVQWKVDNALQSGNSQESVTEQDSKDSTYSLSSTLTLSKADYEKHKVYACEVTHQGLSSPVTKSFNRGEC

SEQ ID NO: 18565 - protein, 211 aa, Artificial Sequence
  source: /note="Description of Artificial Sequence: Synthetic polypeptide"
EIVMTQTPATLSVSAGERVTITCRASQSVSNDVTWYQQKPGQAPRLLIYSASNRYTGIPARFSGSGYGTEFTFTISSVQSEDFAVYFCQQDYSSFGQGTKLEIKRTVAAPSVFIFPPSDEQLKSGTASVVCLLNNFYPREAKVQWKVDNALQSGNSQESVTEQDSKDSTYSLSSTLTLSKADYEKHKVYACEVTHQGLSSPVTKSFNRGEC

SEQ ID NO: 18566 - protein, 211 aa, Artificial Sequence
  source: /note="Description of Artificial Sequence: Synthetic polypeptide"
EIVMTQTPATLSVSAGERVTITCRASQSVSNHVTWYQQKPGQAPRLLIYSASNRYTGIPARFSGSGYGTEFTFTISSVQSEDFAVYFCQQDYSSFGQGTKLEIKRTVAAPSVFIFPPSDEQLKSGTASVVCLLNNFYPREAKVQWKVDNALQSGNSQESVTEQDSKDSTYSLSSTLTLSKADYEKHKVYACEVTHQGLSSPVTKSFNRGEC

SEQ ID NO: 18567 - protein, 211 aa, Artificial Sequence
  source: /note="Description of Artificial Sequence: Synthetic polypeptide"
KIVMTQTPATLSVSAGERVTITCRASQSVSNDVTWYQQKPGQAPRLLIYSASNRYTGIPARFSGSGYGTEFTFTISSVQSEDFAVYFCQQDYSSFGQGTKLEIKRTVAAPSVFIFPPSDEQLKSGTASVVCLLNNFYPREAKVQWKVDNALQSGNSQESVTEQDSKDSTYSLSSTLTLSKADYEKHKVYACEVTHQGLSSPVTKSFNRGEC

SEQ ID NO: 18568 - protein, 211 aa, Artificial Sequence
  source: /note="Description of Artificial Sequence: Synthetic polypeptide"
KIVMTQTPATLSVSAGERVTITCRASQSVSNHVTWYQQKPGQAPRLLIYSASNRYTGIPARFSGSGYGTEFTFTISSVQSEDFAVYFCQQDYSSFGQGTKLEIKRTVAAPSVFIFPPSDEQLKSGTASVVCLLNNFYPREAKVQWKVDNALQSGNSQESVTEQDSKDSTYSLSSTLTLSKADYEKHKVYACEVTHQGLSSPVTKSFNRGEC

SEQ ID NO: 18569 - protein, 220 aa, Homo sapiens
DVVMTQTPLSLPVTPGEPASISCRSSQSLVHRNGNTYLHWYLQKPGQSPKLLIHKVSNRFSGVPDRFSGSGSGTDFTLKISRVEAEDLGVYFCSQSTHVPPLTFGAGTKLELKRTVAAPSVFIFPPSDEQLKSGTASVVCLLNNFYPREAKVQWKVDNALQSGNSQESVTEQDSKDSTYSLSSTLTLSKADYEKHKVYACEVTHQGLSSPVTKSFNRGEC

SEQ ID NO: 18570 - protein, 219 aa, Homo sapiens
EIVLTQSPLSLPVTLGQPASISCRSSQSLVYSDGNTYLNWFQQRPGQSPRRLIYKVSNRDSGVPDRFSGSGSGTDFTLKISRVEAEDVGVYYCMQGTHWPRTFGQGTKVEIKRTVAAPSVFIFPPSDEQLKSGTASVVCLLNNFYPREAKVQWKVDNALQSGNSQESVTEQDSKDSTYSLSSTLTLSKADYEKHKVYACEVTHQGLSSPVTKSFNRGEC

SEQ ID NO: 18571 - protein, 211 aa, Artificial Sequence
  source: /note="Description of Artificial Sequence: Synthetic polypeptide"
EIVMTQTPATLSVSAGERVTITCKASQSVSNDVTWYQQKPGQAPRLLIYSASNRYSGVPARFSGSGYGTEFTFTISSVQSEDFAVYFCQQDYSSFGQGTKLEIKRTVAAPSVFIFPPSDEQLKSGTASVVCLLNNFYPREAKVQWKVDNALQSGNSQESVTEQDSKDSTYSLSSTLTLSKADYEKHKVYACEVTHQGLSSPVTKSFNRGEC
